United States Patent Application Publication US 2015/0141320 A1 - sequence listing, part 40

SEQ ID NO: 1539794 - DNA, 15 bp, Homo sapiens
agataggttagtgaa

SEQ ID NO: 1539795 - DNA, 15 bp, Homo sapiens
cagataggttagtga

SEQ ID NO: 1539796 - DNA, 15 bp, Homo sapiens
acagataggttagtg

SEQ ID NO: 1539797 - DNA, 15 bp, Homo sapiens
aacagataggttagt

SEQ ID NO: 1539798 - DNA, 15 bp, Homo sapiens
aaacagataggttag

SEQ ID NO: 1539799 - DNA, 15 bp, Homo sapiens
caaacagataggtta

SEQ ID NO: 1539800 - DNA, 15 bp, Homo sapiens
acaaacagataggtt

SEQ ID NO: 1539801 - DNA, 15 bp, Homo sapiens
aacaaacagataggt

SEQ ID NO: 1539802 - DNA, 15 bp, Homo sapiens
taacaaacagatagg

SEQ ID NO: 1539803 - DNA, 15 bp, Homo sapiens
ctaacaaacagatag

SEQ ID NO: 1539804 - DNA, 15 bp, Homo sapiens
actaacaaacagata

SEQ ID NO: 1539805 - DNA, 15 bp, Homo sapiens
tactaacaaacagat

SEQ ID NO: 1539806 - DNA, 15 bp, Homo sapiens
ttactaacaaacaga

SEQ ID NO: 1539807 - DNA, 15 bp, Homo sapiens
cttactaacaaacag

SEQ ID NO: 1539808 - DNA, 15 bp, Homo sapiens
acttactaacaaaca

SEQ ID NO: 1539809 - DNA, 15 bp, Homo sapiens
aacttactaacaaac

SEQ ID NO: 1539810 - DNA, 15 bp, Homo sapiens
aaacttactaacaaa

SEQ ID NO: 1539811 - DNA, 15 bp, Homo sapiens
aaaacttactaacaa

SEQ ID NO: 1539812 - DNA, 15 bp, Homo sapiens
aaaaacttactaaca

SEQ ID NO: 1539813 - DNA, 15 bp, Homo sapiens
gaaaaacttactaac

SEQ ID NO: 1539814 - DNA, 15 bp, Homo sapiens
tgaaaaacttactaa

SEQ ID NO: 1539815 - DNA, 15 bp, Homo sapiens
ctgaaaaacttacta

SEQ ID NO: 1539816 - DNA, 15 bp, Homo sapiens
actgaaaaacttact

SEQ ID NO: 1539817 - DNA, 15 bp, Homo sapiens
aactgaaaaacttac

SEQ ID NO: 1539818 - DNA, 15 bp, Homo sapiens
gaactgaaaaactta

SEQ ID NO: 1539819 - DNA, 15 bp, Homo sapiens
ggaactgaaaaactt

SEQ ID NO: 1539820 - DNA, 15 bp, Homo sapiens
aggaactgaaaaact

SEQ ID NO: 1539821 - DNA, 15 bp, Homo sapiens
aaggaactgaaaaac

SEQ ID NO: 1539822 - DNA, 15 bp, Homo sapiens
gaaggaactgaaaaa

SEQ ID NO: 1539823 - DNA, 15 bp, Homo sapiens
agaaggaactgaaaa

SEQ ID NO: 1539824 - DNA, 15 bp, Homo sapiens
aagaaggaactgaaa

SEQ ID NO: 1539825 - DNA, 15 bp, Homo sapiens
gaagaaggaactgaa

SEQ ID NO: 1539826 - DNA, 15 bp, Homo sapiens
tgaagaaggaactga

SEQ ID NO: 1539827 - DNA, 15 bp, Homo sapiens
atgaagaaggaactg

SEQ ID NO: 1539828 - DNA, 15 bp, Homo sapiens
gatgaagaaggaact

SEQ ID NO: 1539829 - DNA, 15 bp, Homo sapiens
agatgaagaaggaac

SEQ ID NO: 1539830 - DNA, 15 bp, Homo sapiens
aagatgaagaaggaa

SEQ ID NO: 1539831 - DNA, 15 bp, Homo sapiens
aaagatgaagaagga

SEQ ID NO: 1539832 - DNA, 15 bp, Homo sapiens
aaaagatgaagaagg

SEQ ID NO: 1539833 - DNA, 15 bp, Homo sapiens
gaaaagatgaagaag

SEQ ID NO: 1539834 - DNA, 15 bp, Homo sapiens
agaaaagatgaagaa

SEQ ID NO: 1539835 - DNA, 15 bp, Homo sapiens
aagaaaagatgaaga

SEQ ID NO: 1539836 - DNA, 15 bp, Homo sapiens
aaagaaaagatgaag

SEQ ID NO: 1539837 - DNA, 15 bp, Homo sapiens
gaaagaaaagatgaa

SEQ ID NO: 1539838 - DNA, 15 bp, Homo sapiens
ggaaagaaaagatga

SEQ ID NO: 1539839 - DNA, 15 bp, Homo sapiens
agggaaagaaaagat

SEQ ID NO: 1539840 - DNA, 15 bp, Homo sapiens
aagggaaagaaaaga

SEQ ID NO: 1539841 - DNA, 15 bp, Homo sapiens
caagggaaagaaaag

SEQ ID NO: 1539842 - DNA, 15 bp, Homo sapiens
acaagggaaagaaaa

SEQ ID NO: 1539843 - DNA, 15 bp, Homo sapiens
tacaagggaaagaaa

SEQ ID NO: 1539844 - DNA, 15 bp, Homo sapiens
ctacaagggaaagaa

SEQ ID NO: 1539845 - DNA, 15 bp, Homo sapiens
gctacaagggaaaga

SEQ ID NO: 1539846 - DNA, 15 bp, Homo sapiens
agctacaagggaaag

SEQ ID NO: 1539847 - DNA, 15 bp, Homo sapiens
cagctacaagggaaa

SEQ ID NO: 1539848 - DNA, 15 bp, Homo sapiens
acagctacaagggaa

SEQ ID NO: 1539849 - DNA, 15 bp, Homo sapiens
cacagctacaaggga

SEQ ID NO: 1539850 - DNA, 15 bp, Homo sapiens
tcacagctacaaggg

SEQ ID NO: 1539851 - DNA, 15 bp, Homo sapiens
ctcacagctacaagg

SEQ ID NO: 1539852 - DNA, 15 bp, Homo sapiens
gctcacagctacaag

SEQ ID NO: 1539853 - DNA, 15 bp, Homo sapiens
tgctcacagctacaa

SEQ ID NO: 1539854 - DNA, 15 bp, Homo sapiens
gtgctcacagctaca

SEQ ID NO: 1539855 - DNA, 15 bp, Homo sapiens
agtgctcacagctac

SEQ ID NO: 1539856 - DNA, 15 bp, Homo sapiens
gagtgctcacagcta

SEQ ID NO: 1539857 - DNA, 15 bp, Homo sapiens
ggagtgctcacagct

SEQ ID NO: 1539858 - DNA, 15 bp, Homo sapiens
tggagtgctcacagc

SEQ ID NO: 1539859 - DNA, 15 bp, Homo sapiens
ctggagtgctcacag

SEQ ID NO: 1539860 - DNA, 15 bp, Homo sapiens
actggagtgctcaca

SEQ ID NO: 1539861 - DNA, 15 bp, Homo sapiens
tactggagtgctcac

SEQ ID NO: 1539862 - DNA, 15 bp, Homo sapiens
ctactggagtgctca

SEQ ID NO: 1539863 - DNA, 15 bp, Homo sapiens
tctactggagtgctc

SEQ ID NO: 1539864 - DNA, 15 bp, Homo sapiens
atctactggagtgct

SEQ ID NO: 1539865 - DNA, 15 bp, Homo sapiens
aatctactggagtgc

SEQ ID NO: 1539866 - DNA, 15 bp, Homo sapiens
caatctactggagtg

SEQ ID NO: 1539867 - DNA, 15 bp, Homo sapiens
gcaatctactggagt

SEQ ID NO: 1539868 - DNA, 15 bp, Homo sapiens
tgcaatctactggag

SEQ ID NO: 1539869 - DNA, 15 bp, Homo sapiens
atgcaatctactgga

SEQ ID NO: 1539870 - DNA, 15 bp, Homo sapiens
gatgcaatctactgg

SEQ ID NO: 1539871 - DNA, 15 bp, Homo sapiens
tgatgcaatctactg

SEQ ID NO: 1539872 - DNA, 15 bp, Homo sapiens
gtgatgcaatctact

SEQ ID NO: 1539873 - DNA, 15 bp, Homo sapiens
agtgatgcaatctac

SEQ ID NO: 1539874 - DNA, 15 bp, Homo sapiens
tagtgatgcaatcta

SEQ ID NO: 1539875 - DNA, 15 bp, Homo sapiens
ctagtgatgcaatct

SEQ ID NO: 1539876 - DNA, 15 bp, Homo sapiens
cctagtgatgcaatc

SEQ ID NO: 1539877 - DNA, 15 bp, Homo sapiens
acctagtgatgcaat

SEQ ID NO: 1539878 - DNA, 15 bp, Homo sapiens
aacctagtgatgcaa

SEQ ID NO: 1539879 - DNA, 15 bp, Homo sapiens
caacctagtgatgca

SEQ ID NO: 1539880 - DNA, 15 bp, Homo sapiens
ccaacctagtgatgc

SEQ ID NO: 1539881 - DNA, 15 bp, Homo sapiens
cccaacctagtgatg

SEQ ID NO: 1539882 - DNA, 15 bp, Homo sapiens
acccaacctagtgat

SEQ ID NO: 1539883 - DNA, 15 bp, Homo sapiens
gacccaacctagtga

SEQ ID NO: 1539884 - DNA, 15 bp, Homo sapiens
ggacccaacctagtg

SEQ ID NO: 1539885 - DNA, 15 bp, Homo sapiens
aggacccaacctagt

SEQ ID NO: 1539886 - DNA, 15 bp, Homo sapiens
caggacccaacctag

SEQ ID NO: 1539887 - DNA, 15 bp, Homo sapiens
acaggacccaaccta

SEQ ID NO: 1539888 - DNA, 15 bp, Homo sapiens
cacaggacccaacct

SEQ ID NO: 1539889 - DNA, 15 bp, Homo sapiens
tcacaggacccaacc

SEQ ID NO: 1539890 - DNA, 15 bp, Homo sapiens
ctcacaggacccaac

SEQ ID NO: 1539891 - DNA, 15 bp, Homo sapiens
gctcacaggacccaa

SEQ ID NO: 1539892 - DNA, 15 bp, Homo sapiens
agctcacaggaccca

SEQ ID NO: 1539893 - DNA, 15 bp, Homo sapiens
cagctcacaggaccc

SEQ ID NO: 1539894 - DNA, 15 bp, Homo sapiens
acagctcacaggacc

SEQ ID NO: 1539895 - DNA, 15 bp, Homo sapiens
aacagctcacaggac

SEQ ID NO: 1539896 - DNA, 15 bp, Homo sapiens
aaacagctcacagga

SEQ ID NO: 1539897 - DNA, 15 bp, Homo sapiens
aaaacagctcacagg

SEQ ID NO: 1539898 - DNA, 15 bp, Homo sapiens
caaaacagctcacag

SEQ ID NO: 1539899 - DNA, 15 bp, Homo sapiens
acaaaacagctcaca

SEQ ID NO: 1539900 - DNA, 15 bp, Homo sapiens
aacaaaacagctcac

SEQ ID NO: 1539901 - DNA, 15 bp, Homo sapiens
gaacaaaacagctca

SEQ ID NO: 1539902 - DNA, 15 bp, Homo sapiens
agaacaaaacagctc

SEQ ID NO: 1539903 - DNA, 15 bp, Homo sapiens
aagaacaaaacagct

SEQ ID NO: 1539904 - DNA, 15 bp, Homo sapiens
aaagaacaaaacagc

SEQ ID NO: 1539905 - DNA, 15 bp, Homo sapiens
aaaagaacaaaacag

SEQ ID NO: 1539906 - DNA, 15 bp, Homo sapiens
gaaaagaacaaaaca

SEQ ID NO: 1539907 - DNA, 15 bp, Homo sapiens
ggaaaagaacaaaac

SEQ ID NO: 1539908 - DNA, 15 bp, Homo sapiens
tggaaaagaacaaaa

SEQ ID NO: 1539909 - DNA, 15 bp, Homo sapiens
ttggaaaagaacaaa

SEQ ID NO: 1539910 - DNA, 15 bp, Homo sapiens
cttggaaaagaacaa

SEQ ID NO: 1539911 - DNA, 15 bp, Homo sapiens
acttggaaaagaaca

SEQ ID NO: 1539912 - DNA, 15 bp, Homo sapiens
cacttggaaaagaac

SEQ ID NO: 1539913 - DNA, 15 bp, Homo sapiens
acacttggaaaagaa

SEQ ID NO: 1539914 - DNA, 15 bp, Homo sapiens
gacacttggaaaaga

SEQ ID NO: 1539915 - DNA, 15 bp, Homo sapiens
agacacttggaaaag

SEQ ID NO: 1539916 - DNA, 15 bp, Homo sapiens
cagacacttggaaaa

SEQ ID NO: 1539917 - DNA, 15 bp, Homo sapiens
tcagacacttggaaa

SEQ ID NO: 1539918 - DNA, 15 bp, Homo sapiens
atcagacacttggaa

SEQ ID NO: 1539919 - DNA, 15 bp, Homo sapiens
aatcagacacttgga

SEQ ID NO: 1539920 - DNA, 15 bp, Homo sapiens
gaatcagacacttgg

SEQ ID NO: 1539921 - DNA, 15 bp, Homo sapiens
tgaatcagacacttg

SEQ ID NO: 1539922 - DNA, 15 bp, Homo sapiens
ctgaatcagacactt

SEQ ID NO: 1539923 - DNA, 15 bp, Homo sapiens
gctgaatcagacact

SEQ ID NO: 1539924 - DNA, 15 bp, Homo sapiens
cgctgaatcagacac

SEQ ID NO: 1539925 - DNA, 15 bp, Homo sapiens
ccgctgaatcagaca

SEQ ID NO: 1539926 - DNA, 15 bp, Homo sapiens
cccgctgaatcagac

SEQ ID NO: 1539927 - DNA, 15 bp, Homo sapiens
gcccgctgaatcaga

SEQ ID NO: 1539928 - DNA, 15 bp, Homo sapiens
ggcccgctgaatcag

SEQ ID NO: 1539929 - DNA, 15 bp, Homo sapiens
tggcccgctgaatca

SEQ ID NO: 1539930 - DNA, 15 bp, Homo sapiens
atggcccgctgaatc

SEQ ID NO: 1539931 - DNA, 15 bp, Homo sapiens
tatggcccgctgaat

SEQ ID NO: 1539932 - DNA, 15 bp, Homo sapiens
ctatggcccgctgaa

SEQ ID NO: 1539933 - DNA, 15 bp, Homo sapiens
tctatggcccgctga

SEQ ID NO: 1539934 - DNA, 15 bp, Homo sapiens
gtctatggcccgctg

SEQ ID NO: 1539935 - DNA, 15 bp, Homo sapiens
ggtctatggcccgct

SEQ ID NO: 1539936 - DNA, 15 bp, Homo sapiens
cggtctatggcccgc

SEQ ID NO: 1539937 - DNA, 15 bp, Homo sapiens
gcggtctatggcccg

SEQ ID NO: 1539938 - DNA, 15 bp, Homo sapiens
agcggtctatggccc

SEQ ID NO: 1539939 - DNA, 15 bp, Homo sapiens
aagcggtctatggcc

SEQ ID NO: 1539940 - DNA, 15 bp, Homo sapiens
caagcggtctatggc

SEQ ID NO: 1539941 - DNA, 15 bp, Homo sapiens
gcaagcggtctatgg

SEQ ID NO: 1539942 - DNA, 15 bp, Homo sapiens
ggcaagcggtctatg

SEQ ID NO: 1539943 - DNA, 15 bp, Homo sapiens
tggcaagcggtctat

SEQ ID NO: 1539944 - DNA, 15 bp, Homo sapiens
ctggcaagcggtcta

SEQ ID NO: 1539945 - DNA, 15 bp, Homo sapiens
tctggcaagcggtct

SEQ ID NO: 1539946 - DNA, 15 bp, Homo sapiens
ttctggcaagcggtc

SEQ ID NO: 1539947 - DNA, 15 bp, Homo sapiens
tttctggcaagcggt

SEQ ID NO: 1539948 - DNA, 15 bp, Homo sapiens
ttttctggcaagcgg

SEQ ID NO: 1539949 - DNA, 15 bp, Homo sapiens
attttctggcaagcg

SEQ ID NO: 1539950 - DNA, 15 bp, Homo sapiens
gattttctggcaagc

SEQ ID NO: 1539951 - DNA, 15 bp, Homo sapiens
cgattttctggcaag

SEQ ID NO: 1539952 - DNA, 15 bp, Homo sapiens
gcgattttctggcaa

SEQ ID NO: 1539953 - DNA, 15 bp, Homo sapiens
ggcgattttctggca

SEQ ID NO: 1539954 - DNA, 15 bp, Homo sapiens
tggcgattttctggc

SEQ ID NO: 1539955 - DNA, 15 bp, Homo sapiens
atggcgattttctgg

SEQ ID NO: 1539956 - DNA, 15 bp, Homo sapiens
aatggcgattttctg

SEQ ID NO: 1539957 - DNA, 15 bp, Homo sapiens
caatggcgattttct

SEQ ID NO: 1539958 - DNA, 15 bp, Homo sapiens
gcaatggcgattttc

SEQ ID NO: 1539959 - DNA, 15 bp, Homo sapiens
agcaatggcgatttt

SEQ ID NO: 1539960 - DNA, 15 bp, Homo sapiens
aagcaatggcgattt

SEQ ID NO: 1539961 - DNA, 15 bp, Homo sapiens
gaagcaatggcgatt

SEQ ID NO: 1539962 - DNA, 15 bp, Homo sapiens
agaagcaatggcgat

SEQ ID NO: 1539963 - DNA, 15 bp, Homo sapiens
tagaagcaatggcga

SEQ ID NO: 1539964 - DNA, 15 bp, Homo sapiens
ctagaagcaatggcg

SEQ ID NO: 1539965 - DNA, 15 bp, Homo sapiens
cctagaagcaatggc

SEQ ID NO: 1539966 - DNA, 15 bp, Homo sapiens
gcctagaagcaatgg

SEQ ID NO: 1539967 - DNA, 15 bp, Homo sapiens
agcctagaagcaatg

SEQ ID NO: 1539968 - DNA, 15 bp, Homo sapiens
cagcctagaagcaat

SEQ ID NO: 1539969 - DNA, 15 bp, Homo sapiens
tcagcctagaagcaa

SEQ ID NO: 1539970 - DNA, 15 bp, Homo sapiens
gtcagcctagaagca

SEQ ID NO: 1539971 - DNA, 15 bp, Homo sapiens
cgtcagcctagaagc

SEQ ID NO: 1539972 - DNA, 15 bp, Homo sapiens
gcgtcagcctagaag

SEQ ID NO: 1539973 - DNA, 15 bp, Homo sapiens
agcgtcagcctagaa

SEQ ID NO: 1539974 - DNA, 15 bp, Homo sapiens
aagcgtcagcctaga

SEQ ID NO: 1539975 - DNA, 15 bp, Homo sapiens
caagcgtcagcctag

SEQ ID NO: 1539976 - DNA, 15 bp, Homo sapiens
gcaagcgtcagccta

SEQ ID NO: 1539977 - DNA, 15 bp, Homo sapiens
ggcaagcgtcagcct

SEQ ID NO: 1539978 - DNA, 15 bp, Homo sapiens
aggcaagcgtcagcc

SEQ ID NO: 1539979 - DNA, 15 bp, Homo sapiens
taggcaagcgtcagc

SEQ ID NO: 1539980 - DNA, 15 bp, Homo sapiens
gtaggcaagcgtcag

SEQ ID NO: 1539981 - DNA, 15 bp, Homo sapiens
agtaggcaagcgtca

SEQ ID NO: 1539982 - DNA, 15 bp, Homo sapiens
aagtaggcaagcgtc

SEQ ID NO: 1539983 - DNA, 15 bp, Homo sapiens
caagtaggcaagcgt

SEQ ID NO: 1539984 - DNA, 15 bp, Homo sapiens
acaagtaggcaagcg

SEQ ID NO: 1539985 - DNA, 15 bp, Homo sapiens
aacaagtaggcaagc

SEQ ID NO: 1539986 - DNA, 15 bp, Homo sapiens
aaacaagtaggcaag

SEQ ID NO: 1539987 - DNA, 15 bp, Homo sapiens
aaaacaagtaggcaa

SEQ ID NO: 1539988 - DNA, 15 bp, Homo sapiens
caaaacaagtaggca

SEQ ID NO: 1539989 - DNA, 15 bp, Homo sapiens
tcaaaacaagtaggc

SEQ ID NO: 1539990 - DNA, 15 bp, Homo sapiens
atcaaaacaagtagg

SEQ ID NO: 1539991 - DNA, 15 bp, Homo sapiens
gatcaaaacaagtag

SEQ ID NO: 1539992 - DNA, 15 bp, Homo sapiens
cgatcaaaacaagta

SEQ ID NO: 1539993 - DNA, 15 bp, Homo sapiens
acgatcaaaacaagt

SEQ ID NO: 1539994 - DNA, 15 bp, Homo sapiens
gacgatcaaaacaag

SEQ ID NO: 1539995 - DNA, 15 bp, Homo sapiens
agacgatcaaaacaa

SEQ ID NO: 1539996 - DNA, 15 bp, Homo sapiens
cagacgatcaaaaca

SEQ ID NO: 1539997 - DNA, 15 bp, Homo sapiens
tcagacgatcaaaac

SEQ ID NO: 1539998 - DNA, 15 bp, Homo sapiens
ctcagacgatcaaaa

SEQ ID NO: 1539999 - DNA, 15 bp, Homo sapiens
tctcagacgatcaaa

SEQ ID NO: 1540000 - DNA, 15 bp, Homo sapiens
ctctcagacgatcaa

SEQ ID NO: 1540001 - DNA, 15 bp, Homo sapiens
tctctcagacgatca

SEQ ID NO: 1540002 - DNA, 15 bp, Homo sapiens
ttctctcagacgatc

SEQ ID NO: 1540003 - DNA, 15 bp, Homo sapiens
cttctctcagacgat

SEQ ID NO: 1540004 - DNA, 15 bp, Homo sapiens
tcttctctcagacga

SEQ ID NO: 1540005 - DNA, 15 bp, Homo sapiens
ctcttctctcagacg

SEQ ID NO: 1540006 - DNA, 15 bp, Homo sapiens
tctcttctctcagac

SEQ ID NO: 1540007 - DNA, 15 bp, Homo sapiens
gtctcttctctcaga

SEQ ID NO: 1540008 - DNA, 15 bp, Homo sapiens
agtctcttctctcag

SEQ ID NO: 1540009 - DNA, 15 bp, Homo sapiens
aagtctcttctctca

SEQ ID NO: 1540010 - DNA, 15 bp, Homo sapiens
aaagtctcttctctc

SEQ ID NO: 1540011 - DNA, 15 bp, Homo sapiens
caaagtctcttctct

SEQ ID NO: 1540012 - DNA, 15 bp, Homo sapiens
acaaagtctcttctc

SEQ ID NO: 1540013 - DNA, 15 bp, Homo sapiens
aacaaagtctcttct

SEQ ID NO: 1540014 - DNA, 15 bp, Homo sapiens
aaacaaagtctcttc

SEQ ID NO: 1540015 - DNA, 15 bp, Homo sapiens
caaacaaagtctctt

SEQ ID NO: 1540016 - DNA, 15 bp, Homo sapiens
gcaaacaaagtctct

SEQ ID NO: 1540017 - DNA, 15 bp, Homo sapiens
ggcaaacaaagtctc

SEQ ID NO: 1540018 - DNA, 15 bp, Homo sapiens
tggcaaacaaagtct

SEQ ID NO: 1540019 - DNA, 15 bp, Homo sapiens
ttggcaaacaaagtc

SEQ ID NO: 1540020 - DNA, 15 bp, Homo sapiens
tttggcaaacaaagt

SEQ ID NO: 1540021 - DNA, 15 bp, Homo sapiens
ttttggcaaacaaag

SEQ ID NO: 1540022 - DNA, 15 bp, Homo sapiens
gttttggcaaacaaa

SEQ ID NO: 1540023 - DNA, 15 bp, Homo sapiens
ggttttggcaaacaa

SEQ ID NO: 1540024 - DNA, 15 bp, Homo sapiens
tggttttggcaaaca

SEQ ID NO: 1540025 - DNA, 15 bp, Homo sapiens
gtggttttggcaaac

SEQ ID NO: 1540026 - DNA, 15 bp, Homo sapiens
tgtggttttggcaaa

SEQ ID NO: 1540027 - DNA, 15 bp, Homo sapiens
ctgtggttttggcaa

SEQ ID NO: 1540028 - DNA, 15 bp, Homo sapiens
actgtggttttggca

SEQ ID NO: 1540029 - DNA, 15 bp, Homo sapiens
aactgtggttttggc

SEQ ID NO: 1540030 - DNA, 15 bp, Homo sapiens
caactgtggttttgg

SEQ ID NO: 1540031 - DNA, 15 bp, Homo sapiens
tcaactgtggttttg

SEQ ID NO: 1540032 - DNA, 15 bp, Homo sapiens
atcaactgtggtttt

SEQ ID NO: 1540033 - DNA, 15 bp, Homo sapiens
tatcaactgtggttt

SEQ ID NO: 1540034 - DNA, 15 bp, Homo sapiens
ctatcaactgtggtt

SEQ ID NO: 1540035 - DNA, 15 bp, Homo sapiens
tctatcaactgtggt

SEQ ID NO: 1540036 - DNA, 15 bp, Homo sapiens
ttctatcaactgtgg

SEQ ID NO: 1540037 - DNA, 15 bp, Homo sapiens
tttctatcaactgtg

SEQ ID NO: 1540038 - DNA, 15 bp, Homo sapiens
atttctatcaactgt

SEQ ID NO: 1540039 - DNA, 15 bp, Homo sapiens
tatttctatcaactg

SEQ ID NO: 1540040 - DNA, 15 bp, Homo sapiens
ctatttctatcaact

SEQ ID NO: 1540041 - DNA, 15 bp, Homo sapiens
tctatttctatcaac

SEQ ID NO: 1540042 - DNA, 15 bp, Homo sapiens
ttctatttctatcaa

SEQ ID NO: 1540043 - DNA, 15 bp, Homo sapiens
tttctatttctatca

SEQ ID NO: 1540044 - DNA, 15 bp, Homo sapiens
ctttctatttctatc

SEQ ID NO: 1540045 - DNA, 15 bp, Homo sapiens
cctttctatttctat

SEQ ID NO: 1540046 - DNA, 15 bp, Homo sapiens
acctttctatttcta

SEQ ID NO: 1540047 - DNA, 15 bp, Homo sapiens
tacctttctatttct

SEQ ID NO: 1540048 - DNA, 15 bp, Homo sapiens
gtacctttctatttc

SEQ ID NO: 1540049 - DNA, 15 bp, Homo sapiens
tgtacctttctattt

SEQ ID NO: 1540050 - DNA, 15 bp, Homo sapiens
ctgtacctttctatt

SEQ ID NO: 1540051 - DNA, 15 bp, Homo sapiens
tctgtacctttctat

SEQ ID NO: 1540052 - DNA, 15 bp, Homo sapiens
atctgtacctttcta

SEQ ID NO: 1540053 - DNA, 15 bp, Homo sapiens
tatctgtacctttct

SEQ ID NO: 1540054 - DNA, 15 bp, Homo sapiens
ttatctgtacctttc

SEQ ID NO: 1540055 - DNA, 15 bp, Homo sapiens
cttatctgtaccttt

SEQ ID NO: 1540056 - DNA, 15 bp, Homo sapiens
tcttatctgtacctt

SEQ ID NO: 1540057 - DNA, 15 bp, Homo sapiens
ttcttatctgtacct

SEQ ID NO: 1540058 - DNA, 15 bp, Homo sapiens
tttcttatctgtacc

SEQ ID NO: 1540059 - DNA, 15 bp, Homo sapiens
ttttcttatctgtac

SEQ ID NO: 1540060 - DNA, 15 bp, Homo sapiens
tttttcttatctgta

SEQ ID NO: 1540061 - DNA, 15 bp, Homo sapiens
ctttttcttatctgt

SEQ ID NO: 1540062 - DNA, 15 bp, Homo sapiens
gctttttcttatctg

SEQ ID NO: 1540063 - DNA, 15 bp, Homo sapiens
tgctttttcttatct

SEQ ID NO: 1540064 - DNA, 15 bp, Homo sapiens
gtgctttttcttatc

SEQ ID NO: 1540065 - DNA, 15 bp, Homo sapiens
agtgctttttcttat

SEQ ID NO: 1540066 - DNA, 15 bp, Homo sapiens
cagtgctttttctta

SEQ ID NO: 1540067 - DNA, 15 bp, Homo sapiens
gcagtgctttttctt

SEQ ID NO: 1540068 - DNA, 15 bp, Homo sapiens
tgcagtgctttttct

SEQ ID NO: 1540069 - DNA, 15 bp, Homo sapiens
ttgcagtgctttttc

SEQ ID NO: 1540070 - DNA, 15 bp, Homo sapiens
attgcagtgcttttt

SEQ ID NO: 1540071 - DNA, 15 bp, Homo sapiens
aattgcagtgctttt

SEQ ID NO: 1540072 - DNA, 15 bp, Homo sapiens
taattgcagtgcttt

SEQ ID NO: 1540073 - DNA, 15 bp, Homo sapiens
ataattgcagtgctt

SEQ ID NO: 1540074 - DNA, 15 bp, Homo sapiens
tataattgcagtgct

SEQ ID NO: 1540075 - DNA, 15 bp, Homo sapiens
ttataattgcagtgc

SEQ ID NO: 1540076 - DNA, 15 bp, Homo sapiens
attataattgcagtg

SEQ ID NO: 1540077 - DNA, 15 bp, Homo sapiens
aattataattgcagt

SEQ ID NO: 1540078 - DNA, 15 bp, Homo sapiens
taattataattgcag

SEQ ID NO: 1540079 - DNA, 15 bp, Homo sapiens
ttaattataattgca

SEQ ID NO: 1540080 - DNA, 15 bp, Homo sapiens
cttaattataattgc

SEQ ID NO: 1540081 - DNA, 15 bp, Homo sapiens
gcttaattataattg

SEQ ID NO: 1540082 - DNA, 15 bp, Homo sapiens
tgcttaattataatt

SEQ ID NO: 1540083 - DNA, 15 bp, Homo sapiens
ttgcttaattataat

SEQ ID NO: 1540084 - DNA, 15 bp, Homo sapiens
tttgcttaattataa

SEQ ID NO: 1540085 - DNA, 15 bp, Homo sapiens
atttgcttaattata

SEQ ID NO: 1540086 - DNA, 15 bp, Homo sapiens
aatttgcttaattat

SEQ ID NO: 1540087 - DNA, 15 bp, Homo sapiens
taatttgcttaatta

SEQ ID NO: 1540088 - DNA, 15 bp, Homo sapiens
ctaatttgcttaatt

SEQ ID NO: 1540089 - DNA, 15 bp, Homo sapiens
gctaatttgcttaat

SEQ ID NO: 1540090 - DNA, 15 bp, Homo sapiens
tgctaatttgcttaa

SEQ ID NO: 1540091 - DNA, 15 bp, Homo sapiens
atgctaatttgctta

SEQ ID NO: 1540092 - DNA, 15 bp, Homo sapiens
tatgctaatttgctt

SEQ ID NO: 1540093 - DNA, 15 bp, Homo sapiens
ctatgctaatttgct

SEQ ID NO: 1540094 - DNA, 15 bp, Homo sapiens
gctatgctaatttgc

SEQ ID NO: 1540095 - DNA, 15 bp, Homo sapiens
ggctatgctaatttg

SEQ ID NO: 1540096 - DNA, 15 bp, Homo sapiens
tggctatgctaattt

SEQ ID NO: 1540097 - DNA, 15 bp, Homo sapiens
atggctatgctaatt

SEQ ID NO: 1540098 - DNA, 15 bp, Homo sapiens
catggctatgctaat

SEQ ID NO: 1540099 - DNA, 15 bp, Homo sapiens
acatggctatgctaa

SEQ ID NO: 1540100 - DNA, 15 bp, Homo sapiens
aacatggctatgcta

SEQ ID NO: 1540101 - DNA, 15 bp, Homo sapiens
caacatggctatgct

SEQ ID NO: 1540102 - DNA, 15 bp, Homo sapiens
acaacatggctatgc

SEQ ID NO: 1540103 - DNA, 15 bp, Homo sapiens
aacaacatggctatg

SEQ ID NO: 1540104 - DNA, 15 bp, Homo sapiens
caacaacatggctat

SEQ ID NO: 1540105 - DNA, 15 bp, Homo sapiens
acaacaacatggcta

SEQ ID NO: 1540106 - DNA, 15 bp, Homo sapiens
aacaacaacatggct

SEQ ID NO: 1540107 - DNA, 15 bp, Homo sapiens
caacaacaacatggc

SEQ ID NO: 1540108 - DNA, 15 bp, Homo sapiens
acaacaacaacatgg

SEQ ID NO: 1540109 - DNA, 15 bp, Homo sapiens
aacaacaacaacatg

SEQ ID NO: 1540110 - DNA, 15 bp, Homo sapiens
aaacaacaacaacat

SEQ ID NO: 1540111 - DNA, 15 bp, Homo sapiens
gaaaacaacaacaac

SEQ ID NO: 1540112 - DNA, 15 bp, Homo sapiens
ggaaaacaacaacaa

SEQ ID NO: 1540113 - DNA, 15 bp, Homo sapiens
cggaaaacaacaaca

SEQ ID NO: 1540114 - DNA, 15 bp, Homo sapiens
gcggaaaacaacaac

SEQ ID NO: 1540115 - DNA, 15 bp, Homo sapiens
tgcggaaaacaacaa

SEQ ID NO: 1540116 - DNA, 15 bp, Homo sapiens
gtgcggaaaacaaca

SEQ ID NO: 1540117 - DNA, 15 bp, Homo sapiens
tgtgcggaaaacaac

SEQ ID NO: 1540118 - DNA, 15 bp, Homo sapiens
ctgtgcggaaaacaa

SEQ ID NO: 1540119 - DNA, 15 bp, Homo sapiens
tctgtgcggaaaaca

SEQ ID NO: 1540120 - DNA, 15 bp, Homo sapiens
gtctgtgcggaaaac

SEQ ID NO: 1540121 - DNA, 15 bp, Homo sapiens
tgtctgtgcggaaaa

SEQ ID NO: 1540122 - DNA, 15 bp, Homo sapiens
atgtctgtgcggaaa

SEQ ID NO: 1540123 - DNA, 15 bp, Homo sapiens
gatgtctgtgcggaa

SEQ ID NO: 1540124 - DNA, 15 bp, Homo sapiens
ggatgtctgtgcgga

SEQ ID NO: 1540125 - DNA, 15 bp, Homo sapiens
aggatgtctgtgcgg

SEQ ID NO: 1540126 - DNA, 15 bp, Homo sapiens
aaggatgtctgtgcg

SEQ ID NO: 1540127 - DNA, 15 bp, Homo sapiens
aaaggatgtctgtgc

SEQ ID NO: 1540128 - DNA, 15 bp, Homo sapiens
aaaaggatgtctgtg

SEQ ID NO: 1540129 - DNA, 15 bp, Homo sapiens
aaaaaggatgtctgt

SEQ ID NO: 1540130 - DNA, 15 bp, Homo sapiens
caaaaaggatgtctg

SEQ ID NO: 1540131 - DNA, 15 bp, Homo sapiens
tcaaaaaggatgtct

SEQ ID NO: 1540132 - DNA, 15 bp, Homo sapiens
ttcaaaaaggatgtc

SEQ ID NO: 1540133 - DNA, 15 bp, Homo sapiens
tttcaaaaaggatgt

SEQ ID NO: 1540134 - DNA, 15 bp, Homo sapiens
ttttcaaaaaggatg

SEQ ID NO: 1540135 - DNA, 15 bp, Homo sapiens
attttcaaaaaggat

SEQ ID NO: 1540136 - DNA, 15 bp, Homo sapiens
aattttcaaaaagga

SEQ ID NO: 1540137 - DNA, 15 bp, Homo sapiens
aaattttcaaaaagg

SEQ ID NO: 1540138 - DNA, 15 bp, Homo sapiens
gaaattttcaaaaag

SEQ ID NO: 1540139 - DNA, 15 bp, Homo sapiens
tgaaattttcaaaaa

SEQ ID NO: 1540140 - DNA, 15 bp, Homo sapiens
gtgaaattttcaaaa

SEQ ID NO: 1540141 - DNA, 15 bp, Homo sapiens
ggtgaaattttcaaa

SEQ ID NO: 1540142 - DNA, 15 bp, Homo sapiens
tggtgaaattttcaa

SEQ ID NO: 1540143 - DNA, 15 bp, Homo sapiens
atggtgaaattttca

SEQ ID NO: 1540144 - DNA, 15 bp, Homo sapiens
catggtgaaattttc

SEQ ID NO: 1540145 - DNA, 15 bp, Homo sapiens
tcatggtgaaatttt

SEQ ID NO: 1540146 - DNA, 15 bp, Homo sapiens
gtcatggtgaaattt

SEQ ID NO: 1540147 - DNA, 15 bp, Homo sapiens
agtcatggtgaaatt

SEQ ID NO: 1540148 - DNA, 15 bp, Homo sapiens
aagtcatggtgaaat

SEQ ID NO: 1540149 - DNA, 15 bp, Homo sapiens
aaagtcatggtgaaa

SEQ ID NO: 1540150 - DNA, 15 bp, Homo sapiens
aaaagtcatggtgaa

SEQ ID NO: 1540151 - DNA, 15 bp, Homo sapiens
caaaagtcatggtga

SEQ ID NO: 1540152 - DNA, 15 bp, Homo sapiens
gcaaaagtcatggtg

SEQ ID NO: 1540153 - DNA, 15 bp, Homo sapiens
agcaaaagtcatggt

SEQ ID NO: 1540154 - DNA, 15 bp, Homo sapiens
aagcaaaagtcatgg

SEQ ID NO: 1540155 - DNA, 15 bp, Homo sapiens
caagcaaaagtcatg

SEQ ID NO: 1540156 - DNA, 15 bp, Homo sapiens
acaagcaaaagtcat

SEQ ID NO: 1540157 - DNA, 15 bp, Homo sapiens
cacaagcaaaagtca

SEQ ID NO: 1540158 - DNA, 15 bp, Homo sapiens
acacaagcaaaagtc

SEQ ID NO: 1540159 - DNA, 15 bp, Homo sapiens
aacacaagcaaaagt

SEQ ID NO: 1540160 - DNA, 15 bp, Homo sapiens
aaacacaagcaaaag

SEQ ID NO: 1540161 - DNA, 15 bp, Homo sapiens
gaaaacacaagcaaa

SEQ ID NO: 1540162 - DNA, 15 bp, Homo sapiens
tgaaaacacaagcaa

SEQ ID NO: 1540163 - DNA, 15 bp, Homo sapiens
ttgaaaacacaagca

SEQ ID NO: 1540164 - DNA, 15 bp, Homo sapiens
attgaaaacacaagc

SEQ ID NO: 1540165 - DNA, 15 bp, Homo sapiens
cattgaaaacacaag

SEQ ID NO: 1540166 - DNA, 15 bp, Homo sapiens
gcattgaaaacacaa

SEQ ID NO: 1540167 - DNA, 15 bp, Homo sapiens
agcattgaaaacaca

SEQ ID NO: 1540168 - DNA, 15 bp, Homo sapiens
gagcattgaaaacac

SEQ ID NO: 1540169 - DNA, 15 bp, Homo sapiens
agagcattgaaaaca

SEQ ID NO: 1540170 - DNA, 15 bp, Homo sapiens
cagagcattgaaaac

SEQ ID NO: 1540171 - DNA, 15 bp, Homo sapiens
acagagcattgaaaa

SEQ ID NO: 1540172 - DNA, 15 bp, Homo sapiens
tacagagcattgaaa

SEQ ID NO: 1540173 - DNA, 15 bp, Homo sapiens
gtacagagcattgaa

SEQ ID NO: 1540174 - DNA, 15 bp, Homo sapiens
agtacagagcattga

SEQ ID NO: 1540175 - DNA, 15 bp, Homo sapiens
cagtacagagcattg

SEQ ID NO: 1540176 - DNA, 15 bp, Homo sapiens
acagtacagagcatt

SEQ ID NO: 1540177 - DNA, 15 bp, Homo sapiens
aacagtacagagcat

SEQ ID NO: 1540178 - DNA, 15 bp, Homo sapiens
caacagtacagagca

SEQ ID NO: 1540179 - DNA, 15 bp, Homo sapiens
tcaacagtacagagc

SEQ ID NO: 1540180 - DNA, 15 bp, Homo sapiens
ttcaacagtacagag

SEQ ID NO: 1540181 - DNA, 15 bp, Homo sapiens
cttcaacagtacaga

SEQ ID NO: 1540182 - DNA, 15 bp, Homo sapiens
ccttcaacagtacag

SEQ ID NO: 1540183 - DNA, 15 bp, Homo sapiens
tccttcaacagtaca

SEQ ID NO: 1540184 - DNA, 15 bp, Homo sapiens
gtccttcaacagtac

SEQ ID NO: 1540185 - DNA, 15 bp, Homo sapiens
agtccttcaacagta

SEQ ID NO: 1540186 - DNA, 15 bp, Homo sapiens
cagtccttcaacagt

SEQ ID NO: 1540187 - DNA, 15 bp, Homo sapiens
acagtccttcaacag

SEQ ID NO: 1540188 - DNA, 15 bp, Homo sapiens
aacagtccttcaaca

SEQ ID NO: 1540189 - DNA, 15 bp, Homo sapiens
caacagtccttcaac

SEQ ID NO: 1540190 - DNA, 15 bp, Homo sapiens
gcaacagtccttcaa

SEQ ID NO: 1540191 - DNA, 15 bp, Homo sapiens
agcaacagtccttca

SEQ ID NO: 1540192 - DNA, 15 bp, Homo sapiens
cagcaacagtccttc

SEQ ID NO: 1540193 - DNA, 15 bp, Homo sapiens
tcagcaacagtcctt

SEQ ID NO: 1540194 - DNA, 15 bp, Homo sapiens
gtcagcaacagtcct

SEQ ID NO: 1540195 - DNA, 15 bp, Homo sapiens
cgtcagcaacagtcc

SEQ ID NO: 1540196 - DNA, 15 bp, Homo sapiens
tcgtcagcaacagtc

SEQ ID NO: 1540197 - DNA, 15 bp, Homo sapiens
gtcgtcagcaacagt

SEQ ID NO: 1540198 - DNA, 15 bp, Homo sapiens
tgtcgtcagcaacag

SEQ ID NO: 1540199 - DNA, 15 bp, Homo sapiens
ctgtcgtcagcaaca

SEQ ID NO: 1540200 - DNA, 15 bp, Homo sapiens
tctgtcgtcagcaac

SEQ ID NO: 1540201 - DNA, 15 bp, Homo sapiens
ttctgtcgtcagcaa

SEQ ID NO: 1540202 - DNA, 15 bp, Homo sapiens
cttctgtcgtcagca

SEQ ID NO: 1540203 - DNA, 15 bp, Homo sapiens
ccttctgtcgtcagc

SEQ ID NO: 1540204 - DNA, 15 bp, Homo sapiens
accttctgtcgtcag

SEQ ID NO: 1540205 - DNA, 15 bp, Homo sapiens
taccttctgtcgtca

SEQ ID NO: 1540206 - DNA, 15 bp, Homo sapiens
ataccttctgtcgtc

SEQ ID NO: 1540207 - DNA, 15 bp, Homo sapiens
tataccttctgtcgt

SEQ ID NO: 1540208 - DNA, 15 bp, Homo sapiens
atataccttctgtcg

SEQ ID NO: 1540209 - DNA, 15 bp, Homo sapiens
tatataccttctgtc

SEQ ID NO: 1540210 - DNA, 15 bp, Homo sapiens
ttatataccttctgt

SEQ ID NO: 1540211 - DNA, 15 bp, Homo sapiens
tttatataccttctg

SEQ ID NO: 1540212 - DNA, 15 bp, Homo sapiens
ctttatataccttct

SEQ ID NO: 1540213 - DNA, 15 bp, Homo sapiens
gctttatataccttc

SEQ ID NO: 1540214 - DNA, 15 bp, Homo sapiens
agctttatatacctt

SEQ ID NO: 1540215 - DNA, 15 bp, Homo sapiens
gagctttatatacct

SEQ ID NO: 1540216 - DNA, 15 bp, Homo sapiens
ggagctttatatacc

SEQ ID NO: 1540217 - DNA, 15 bp, Homo sapiens
aggagctttatatac

SEQ ID NO: 1540218 - DNA, 15 bp, Homo sapiens
caggagctttatata

SEQ ID NO: 1540219 - DNA, 15 bp, Homo sapiens
acaggagctttatat

SEQ ID NO: 1540220 - DNA, 15 bp, Homo sapiens
aacaggagctttata

SEQ ID NO: 1540221 - DNA, 15 bp, Homo sapiens
gaacaggagctttat

SEQ ID NO: 1540222 - DNA, 15 bp, Homo sapiens
tgaacaggagcttta

SEQ ID NO: 1540223 - DNA, 15 bp, Homo sapiens
ctgaacaggagcttt

SEQ ID NO: 1540224 - DNA, 15 bp, Homo sapiens
tctgaacaggagctt

SEQ ID NO: 1540225 - DNA, 15 bp, Homo sapiens
atctgaacaggagct

SEQ ID NO: 1540226 - DNA, 15 bp, Homo sapiens
aatctgaacaggagc

SEQ ID NO: 1540227 - DNA, 15 bp, Homo sapiens
aaatctgaacaggag

SEQ ID NO: 1540228 - DNA, 15 bp, Homo sapiens
taaatctgaacagga

SEQ ID NO: 1540229 - DNA, 15 bp, Homo sapiens
ctaaatctgaacagg

SEQ ID NO: 1540230 - DNA, 15 bp, Homo sapiens
tctaaatctgaacag

SEQ ID NO: 1540231 - DNA, 15 bp, Homo sapiens
ttctaaatctgaaca

SEQ ID NO: 1540232 - DNA, 15 bp, Homo sapiens
cttctaaatctgaac

SEQ ID NO: 1540233 - DNA, 15 bp, Homo sapiens
acttctaaatctgaa

SEQ ID NO: 1540234 - DNA, 15 bp, Homo sapiens
aacttctaaatctga

SEQ ID NO: 1540235 - DNA, 15 bp, Homo sapiens
taacttctaaatctg

SEQ ID NO: 1540236 - DNA, 15 bp, Homo sapiens
ttaacttctaaatct

SEQ ID NO: 1540237 - DNA, 15 bp, Homo sapiens
tttaacttctaaatc

SEQ ID NO: 1540238 - DNA, 15 bp, Homo sapiens
ctttaacttctaaat

SEQ ID NO: 1540239 - DNA, 15 bp, Homo sapiens
gctttaacttctaaa

SEQ ID NO: 1540240 - DNA, 15 bp, Homo sapiens
agctttaacttctaa

SEQ ID NO: 1540241 - DNA, 15 bp, Homo sapiens
tagctttaacttcta

SEQ ID NO: 1540242 - DNA, 15 bp, Homo sapiens
gtagctttaacttct

SEQ ID NO: 1540243 - DNA, 15 bp, Homo sapiens
cgtagctttaacttc

SEQ ID NO: 1540244 - DNA, 15 bp, Homo sapiens
tcgtagctttaactt

SEQ ID NO: 1540245 - DNA, 15 bp, Homo sapiens
atcgtagctttaact

SEQ ID NO: 1540246 - DNA, 15 bp, Homo sapiens
catcgtagctttaac

SEQ ID NO: 1540247 - DNA, 15 bp, Homo sapiens
acatcgtagctttaa

SEQ ID NO: 1540248 - DNA, 15 bp, Homo sapiens
cacatcgtagcttta

SEQ ID NO: 1540249 - DNA, 15 bp, Homo sapiens
tcacatcgtagcttt

SEQ ID NO: 1540250 - DNA, 15 bp, Homo sapiens
ctcacatcgtagctt

SEQ ID NO: 1540251 - DNA, 15 bp, Homo sapiens
tctcacatcgtagct

SEQ ID NO: 1540252 - DNA, 15 bp, Homo sapiens
atctcacatcgtagc

SEQ ID NO: 1540253 - DNA, 15 bp, Homo sapiens
catctcacatcgtag

SEQ ID NO: 1540254 - DNA, 15 bp, Homo sapiens
acatctcacatcgta

SEQ ID NO: 1540255 - DNA, 15 bp, Homo sapiens
aacatctcacatcgt

SEQ ID NO: 1540256 - DNA, 15 bp, Homo sapiens
aaacatctcacatcg

SEQ ID NO: 1540257 - DNA, 15 bp, Homo sapiens
gaaacatctcacatc

SEQ ID NO: 1540258 - DNA, 15 bp, Homo sapiens
tgaaacatctcacat

SEQ ID NO: 1540259 - DNA, 15 bp, Homo sapiens
ctgaaacatctcaca

SEQ ID NO: 1540260 - DNA, 15 bp, Homo sapiens
cctgaaacatctcac

SEQ ID NO: 1540261 - DNA, 15 bp, Homo sapiens
gcctgaaacatctca

SEQ ID NO: 1540262 - DNA, 15 bp, Homo sapiens
tgcctgaaacatctc

SEQ ID NO: 1540263 - DNA, 15 bp, Homo sapiens
atgcctgaaacatct

SEQ ID NO: 1540264 - DNA, 15 bp, Homo sapiens
catgcctgaaacatc

SEQ ID NO: 1540265 - DNA, 15 bp, Homo sapiens
acatgcctgaaacat

SEQ ID NO: 1540266 - DNA, 15 bp, Homo sapiens
aacatgcctgaaaca

SEQ ID NO: 1540267 - DNA, 15 bp, Homo sapiens
aaacatgcctgaaac

SEQ ID NO: 1540268 - DNA, 15 bp, Homo sapiens
caaacatgcctgaaa

SEQ ID NO: 1540269 - DNA, 15 bp, Homo sapiens
acaaacatgcctgaa

SEQ ID NO: 1540270 - DNA, 15 bp, Homo sapiens
tacaaacatgcctga

SEQ ID NO: 1540271 - DNA, 15 bp, Homo sapiens
ctacaaacatgcctg

SEQ ID NO: 1540272 - DNA, 15 bp, Homo sapiens
tctacaaacatgcct

SEQ ID NO: 1540273 - DNA, 15 bp, Homo sapiens
ttctacaaacatgcc

SEQ ID NO: 1540274 - DNA, 15 bp, Homo sapiens
attctacaaacatgc

SEQ ID NO: 1540275 - DNA, 15 bp, Homo sapiens
aattctacaaacatg

SEQ ID NO: 1540276 - DNA, 15 bp, Homo sapiens
taattctacaaacat

SEQ ID NO: 1540277 - DNA, 15 bp, Homo sapiens
gtaattctacaaaca

SEQ ID NO: 1540278 - DNA, 15 bp, Homo sapiens
ggtaattctacaaac

SEQ ID NO: 1540279 - DNA, 15 bp, Homo sapiens
aggtaattctacaaa

SEQ ID NO: 1540280 - DNA, 15 bp, Homo sapiens
aaggtaattctacaa

SEQ ID NO: 1540281 - DNA, 15 bp, Homo sapiens
aaaggtaattctaca

SEQ ID NO: 1540282 - DNA, 15 bp, Homo sapiens
taaaggtaattctac

SEQ ID NO: 1540283 - DNA, 15 bp, Homo sapiens
ataaaggtaattcta

SEQ ID NO: 1540284 - DNA, 15 bp, Homo sapiens
tataaaggtaattct

SEQ ID NO: 1540285 - DNA, 15 bp, Homo sapiens
ttataaaggtaattc

SEQ ID NO: 1540286 - DNA, 15 bp, Homo sapiens
attataaaggtaatt

SEQ ID NO: 1540287 - DNA, 15 bp, Homo sapiens
gattataaaggtaat

SEQ ID NO: 1540288 - DNA, 15 bp, Homo sapiens
agattataaaggtaa

SEQ ID NO: 1540289 - DNA, 15 bp, Homo sapiens
tagattataaaggta

SEQ ID NO: 1540290 - DNA, 15 bp, Homo sapiens
gtagattataaaggt

SEQ ID NO: 1540291 - DNA, 15 bp, Homo sapiens
agtagattataaagg

SEQ ID NO: 1540292 - DNA, 15 bp, Homo sapiens
aagtagattataaag

SEQ ID NO: 1540293 - DNA, 15 bp, Homo sapiens
gaagtagattataaa

SEQ ID NO: 1540294 - DNA, 15 bp, Homo sapiens
tgaagtagattataa

SEQ ID NO: 1540295 - DNA, 15 bp, Homo sapiens
ctgaagtagattata

SEQ ID NO: 1540296 - DNA, 15 bp, Homo sapiens
cctgaagtagattat

SEQ ID NO: 1540297 - DNA, 15 bp, Homo sapiens
tcctgaagtagatta

SEQ ID NO: 1540298 - DNA, 15 bp, Homo sapiens
ctcctgaagtagatt

SEQ ID NO: 1540299 - DNA, 15 bp, Homo sapiens
actcctgaagtagat

SEQ ID NO: 1540300 - DNA, 15 bp, Homo sapiens
aactcctgaagtaga

SEQ ID NO: 1540301 - DNA, 15 bp, Homo sapiens
taactcctgaagtag

SEQ ID NO: 1540302 - DNA, 15 bp, Homo sapiens
ataactcctgaagta

SEQ ID NO: 1540303 - DNA, 15 bp, Homo sapiens
tataactcctgaagt

SEQ ID NO: 1540304 - DNA, 15 bp, Homo sapiens
ctataactcctgaag

SEQ ID NO: 1540305 - DNA, 15 bp, Homo sapiens
cctataactcctgaa

SEQ ID NO: 1540306 - DNA, 15 bp, Homo sapiens
ccctataactcctga

SEQ ID NO: 1540307 - DNA, 15 bp, Homo sapiens
accctataactcctg

SEQ ID NO: 1540308 - DNA, 15 bp, Homo sapiens
aaccctataactcct

SEQ ID NO: 1540309 - DNA, 15 bp, Homo sapiens
aaaccctataactcc

SEQ ID NO: 1540310 - DNA, 15 bp, Homo sapiens
caaaccctataactc

SEQ ID NO: 1540311 - DNA, 15 bp, Homo sapiens
acaaaccctataact

SEQ ID NO: 1540312 - DNA, 15 bp, Homo sapiens
cacaaaccctataac

SEQ ID NO: 1540313 - DNA, 15 bp, Homo sapiens
acacaaaccctataa

SEQ ID NO: 1540314 - DNA, 15 bp, Homo sapiens
aacacaaaccctata

SEQ ID NO: 1540315 - DNA, 15 bp, Homo sapiens
taacacaaaccctat

SEQ ID NO: 1540316 - DNA, 15 bp, Homo sapiens
ttaacacaaacccta

SEQ ID NO: 1540317 - DNA, 15 bp, Homo sapiens
attaacacaaaccct

SEQ ID NO: 1540318 - DNA, 15 bp, Homo sapiens
cattaacacaaaccc

SEQ ID NO: 1540319 - DNA, 15 bp, Homo sapiens
acattaacacaaacc

SEQ ID NO: 1540320 - DNA, 15 bp, Homo sapiens
aacattaacacaaac

SEQ ID NO: 1540321 - DNA, 15 bp, Homo sapiens
aaacattaacacaaa

SEQ ID NO: 1540322 - DNA, 15 bp, Homo sapiens
aaaacattaacacaa

SEQ ID NO: 1540323 - DNA, 15 bp, Homo sapiens
gaaaacattaacaca

SEQ ID NO: 1540324 - DNA, 15 bp, Homo sapiens
tgaaaacattaacac

SEQ ID NO: 1540325 - DNA, 15 bp, Homo sapiens
atgaaaacattaaca

SEQ ID NO: 1540326 - DNA, 15 bp, Homo sapiens
aatgaaaacattaac

SEQ ID NO: 1540327 - DNA, 15 bp, Homo sapiens
aaatgaaaacattaa

SEQ ID NO: 1540328 - DNA, 15 bp, Homo sapiens
aaaatgaaaacatta

SEQ ID NO: 1540329 - DNA, 15 bp, Homo sapiens
caaaatgaaaacatt

SEQ ID NO: 1540330 - DNA, 15 bp, Homo sapiens
ccaaaatgaaaacat

SEQ ID NO: 1540331 - DNA, 15 bp, Homo sapiens
accaaaatgaaaaca

SEQ ID NO: 1540332 - DNA, 15 bp, Homo sapiens
aaccaaaatgaaaac

SEQ ID NO: 1540333 - DNA, 15 bp, Homo sapiens
aaaccaaaatgaaaa

SEQ ID NO: 1540334 - DNA, 15 bp, Homo sapiens
gaaaccaaaatgaaa

SEQ ID NO: 1540335 - DNA, 15 bp, Homo sapiens
agaaaccaaaatgaa

SEQ ID NO: 1540336 - DNA, 15 bp, Homo sapiens
cagaaaccaaaatga

SEQ ID NO: 1540337 - DNA, 15 bp, Homo sapiens
gcagaaaccaaaatg

SEQ ID NO: 1540338 - DNA, 15 bp, Homo sapiens
ggcagaaaccaaaat

SEQ ID NO: 1540339 - DNA, 15 bp, Homo sapiens
aggcagaaaccaaaa

SEQ ID NO: 1540340 - DNA, 15 bp, Homo sapiens
caggcagaaaccaaa

SEQ ID NO: 1540341 - DNA, 15 bp, Homo sapiens
acaggcagaaaccaa

SEQ ID NO: 1540342 - DNA, 15 bp, Homo sapiens
gacaggcagaaacca

SEQ ID NO: 1540343 - DNA, 15 bp, Homo sapiens
agacaggcagaaacc

SEQ ID NO: 1540344 - DNA, 15 bp, Homo sapiens
aagacaggcagaaac

SEQ ID NO: 1540345 - DNA, 15 bp, Homo sapiens
caagacaggcagaaa

SEQ ID NO: 1540346 - DNA, 15 bp, Homo sapiens
acaagacaggcagaa

SEQ ID NO: 1540347 - DNA, 15 bp, Homo sapiens
aacaagacaggcaga

SEQ ID NO: 1540348 - DNA, 15 bp, Homo sapiens
aaacaagacaggcag

SEQ ID NO: 1540349 - DNA, 15 bp, Homo sapiens
aaaacaagacaggca

SEQ ID NO: 1540350 - DNA, 15 bp, Homo sapiens
caaaacaagacaggc

SEQ ID NO: 1540351 - DNA, 15 bp, Homo sapiens
tcaaaacaagacagg

SEQ ID NO: 1540352 - DNA, 15 bp, Homo sapiens
ttcaaaacaagacag

SEQ ID NO: 1540353 - DNA, 15 bp, Homo sapiens
attcaaaacaagaca

SEQ ID NO: 1540354 - DNA, 15 bp, Homo sapiens
tattcaaaacaagac

SEQ ID NO: 1540355 - DNA, 15 bp, Homo sapiens
ttattcaaaacaaga

SEQ ID NO: 1540356 - DNA, 15 bp, Homo sapiens
gttattcaaaacaag

SEQ ID NO: 1540357 - DNA, 15 bp, Homo sapiens
agttattcaaaacaa

SEQ ID NO: 1540358 - DNA, 15 bp, Homo sapiens
cagttattcaaaaca

SEQ ID NO: 1540359 - DNA, 15 bp, Homo sapiens
tcagttattcaaaac

SEQ ID NO: 1540360 - DNA, 15 bp, Homo sapiens
ttcagttattcaaaa

SEQ ID NO: 1540361 - DNA, 15 bp, Homo sapiens
attcagttattcaaa

SEQ ID NO: 1540362 - DNA, 15 bp, Homo sapiens
gattcagttattcaa

SEQ ID NO: 1540363 - DNA, 15 bp, Homo sapiens
ggattcagttattca

SEQ ID NO: 1540364 - DNA, 15 bp, Homo sapiens
gggattcagttattc

SEQ ID NO: 1540365 - DNA, 15 bp, Homo sapiens
tgggattcagttatt

SEQ ID NO: 1540366 - DNA, 15 bp, Homo sapiens
ctgggattcagttat

SEQ ID NO: 1540367 - DNA, 15 bp, Homo sapiens
cctgggattcagtta

SEQ ID NO: 1540368 - DNA, 15 bp, Homo sapiens
tcctgggattcagtt

SEQ ID NO: 1540369 - DNA, 15 bp, Homo sapiens
ttcctgggattcagt

SEQ ID NO: 1540370 - DNA, 15 bp, Homo sapiens
cttcctgggattcag

SEQ ID NO: 1540371 - DNA, 15 bp, Homo sapiens
tcttcctgggattca

SEQ ID NO: 1540372 - DNA, 15 bp, Homo sapiens
ttcttcctgggattc

SEQ ID NO: 1540373 - DNA, 15 bp, Homo sapiens
cttcttcctgggatt

SEQ ID NO: 1540374 - DNA, 15 bp, Homo sapiens
acttcttcctgggat

SEQ ID NO: 1540375 - DNA, 15 bp, Homo sapiens
tacttcttcctggga

SEQ ID NO: 1540376 - DNA, 15 bp, Homo sapiens
gtacttcttcctggg

SEQ ID NO: 1540377 - DNA, 15 bp, Homo sapiens
agtacttcttcctgg

SEQ ID NO: 1540378 - DNA, 15 bp, Homo sapiens
cagtacttcttcctg

SEQ ID NO: 1540379 - DNA, 15 bp, Homo sapiens
acagtacttcttcct

SEQ ID NO: 1540380 - DNA, 15 bp, Homo sapiens
aacagtacttcttcc

SEQ ID NO: 1540381 - DNA, 15 bp, Homo sapiens
taacagtacttcttc

SEQ ID NO: 1540382 - DNA, 15 bp, Homo sapiens
ctaacagtacttctt

SEQ ID NO: 1540383 - DNA, 15 bp, Homo sapiens
gctaacagtacttct

SEQ ID NO: 1540384 - DNA, 15 bp, Homo sapiens
ggctaacagtacttc

SEQ ID NO: 1540385 - DNA, 15 bp, Homo sapiens
gggctaacagtactt

SEQ ID NO: 1540386 - DNA, 15 bp, Homo sapiens
tgggctaacagtact

SEQ ID NO: 1540387 - DNA, 15 bp, Homo sapiens
gtgggctaacagtac

SEQ ID NO: 1540388 - DNA, 15 bp, Homo sapiens
tgtgggctaacagta

SEQ ID NO: 1540389 - DNA, 15 bp, Homo sapiens
ctgtgggctaacagt

SEQ ID NO: 1540390 - DNA, 15 bp, Homo sapiens
tctgtgggctaacag

SEQ ID NO: 1540391 - DNA, 15 bp, Homo sapiens
gtctgtgggctaaca

SEQ ID NO: 1540392 - DNA, 15 bp, Homo sapiens
cgtctgtgggctaac

SEQ ID NO: 1540393 - DNA, 15 bp, Homo sapiens
ccgtctgtgggctaa

SEQ ID NO: 1540394 - DNA, 15 bp, Homo sapiens
cccgtctgtgggcta

SEQ ID NO: 1540395 - DNA, 15 bp, Homo sapiens
acccgtctgtgggct

SEQ ID NO: 1540396 - DNA, 15 bp, Homo sapiens
tacccgtctgtgggc

SEQ ID NO: 1540397 - DNA, 15 bp, Homo sapiens
atacccgtctgtggg

SEQ ID NO: 1540398 - DNA, 15 bp, Homo sapiens
tatacccgtctgtgg

SEQ ID NO: 1540399 - DNA, 15 bp, Homo sapiens
ctatacccgtctgtg

SEQ ID NO: 1540400 - DNA, 15 bp, Homo sapiens
actatacccgtctgt

SEQ ID NO: 1540401 - DNA, 15 bp, Homo sapiens
aactatacccgtctg

SEQ ID NO: 1540402 - DNA, 15 bp, Homo sapiens
aaactatacccgtct

SEQ ID NO: 1540403 - DNA, 15 bp, Homo sapiens
caaactatacccgtc

SEQ ID NO: 1540404 - DNA, 15 bp, Homo sapiens
gcaaactatacccgt

SEQ ID NO: 1540405 - DNA, 15 bp, Homo sapiens
agcaaactatacccg

SEQ ID NO: 1540406 - DNA, 15 bp, Homo sapiens
aagcaaactataccc

SEQ ID NO: 1540407 - DNA, 15 bp, Homo sapiens
aaagcaaactatacc

SEQ ID NO: 1540408 - DNA, 15 bp, Homo sapiens
aaaagcaaactatac

SEQ ID NO: 1540409 - DNA, 15 bp, Homo sapiens
caaaagcaaactata

SEQ ID NO: 1540410 - DNA, 15 bp, Homo sapiens
acaaaagcaaactat

SEQ ID NO: 1540411 - DNA, 15 bp, Homo sapiens
aacaaaagcaaacta

SEQ ID NO: 1540412 - DNA, 15 bp, Homo sapiens
gaacaaaagcaaact

SEQ ID NO: 1540413 - DNA, 15 bp, Homo sapiens
ggaacaaaagcaaac

SEQ ID NO: 1540414 - DNA, 15 bp, Homo sapiens
tggaacaaaagcaaa

SEQ ID NO: 1540415 - DNA, 15 bp, Homo sapiens
ctggaacaaaagcaa

SEQ ID NO: 1540416 - DNA, 15 bp, Homo sapiens
cctggaacaaaagca

SEQ ID NO: 1540417 - DNA, 15 bp, Homo sapiens
tcctggaacaaaagc

SEQ ID NO: 1540418 - DNA, 15 bp, Homo sapiens
ctcctggaacaaaag

SEQ ID NO: 1540419 - DNA, 15 bp, Homo sapiens
tctcctggaacaaaa

SEQ ID NO: 1540420 - DNA, 15 bp, Homo sapiens
gtctcctggaacaaa

SEQ ID NO: 1540421 - DNA, 15 bp, Homo sapiens
tgtctcctggaacaa

SEQ ID NO: 1540422 - DNA, 15 bp, Homo sapiens
ttgtctcctggaaca

SEQ ID NO: 1540423 - DNA, 15 bp, Homo sapiens
tttgtctcctggaac

SEQ ID NO: 1540424 - DNA, 15 bp, Homo sapiens
ctttgtctcctggaa

SEQ ID NO: 1540425 - DNA, 15 bp, Homo sapiens
tctttgtctcctgga

SEQ ID NO: 1540426 - DNA, 15 bp, Homo sapiens
ttctttgtctcctgg

SEQ ID NO: 1540427 - DNA, 15 bp, Homo sapiens
tttctttgtctcctg

SEQ ID NO: 1540428 - DNA, 15 bp, Homo sapiens
ttttctttgtctcct

SEQ ID NO: 1540429 - DNA, 15 bp, Homo sapiens
tttttctttgtctcc

SEQ ID NO: 1540430 - DNA, 15 bp, Homo sapiens
ttttttctttgtctc

SEQ ID NO: 1540431 - DNA, 15 bp, Homo sapiens
gttttttctttgtct

SEQ ID NO: 1540432 - DNA, 15 bp, Homo sapiens
agttttttctttgtc

SEQ ID NO: 1540433 - DNA, 15 bp, Homo sapiens
cagttttttctttgt

SEQ ID NO: 1540434 - DNA, 15 bp, Homo sapiens
acagttttttctttg

SEQ ID NO: 1540435 - DNA, 15 bp, Homo sapiens
aacagttttttcttt

SEQ ID NO: 1540436 - DNA, 15 bp, Homo sapiens
caacagttttttctt

SEQ ID NO: 1540437 - DNA, 15 bp, Homo sapiens
acaacagttttttct

SEQ ID NO: 1540438 - DNA, 15 bp, Homo sapiens
gacaacagttttttc

SEQ ID NO: 1540439 - DNA, 15 bp, Homo sapiens
tgacaacagtttttt

SEQ ID NO: 1540440 - DNA, 15 bp, Homo sapiens
atgacaacagttttt

SEQ ID NO: 1540441 - DNA, 15 bp, Homo sapiens
gatgacaacagtttt

SEQ ID NO: 1540442 - DNA, 15 bp, Homo sapiens
tgatgacaacagttt

SEQ ID NO: 1540443 - DNA, 15 bp, Homo sapiens
ctgatgacaacagtt

SEQ ID NO: 1540444 - DNA, 15 bp, Homo sapiens
tctgatgacaacagt

SEQ ID NO: 1540445 - DNA, 15 bp, Homo sapiens
ttctgatgacaacag

SEQ ID NO: 1540446 - DNA, 15 bp, Homo sapiens
tttctgatgacaaca

SEQ ID NO: 1540447 - DNA, 15 bp, Homo sapiens
ctttctgatgacaac

SEQ ID NO: 1540448 - DNA, 15 bp, Homo sapiens
cctttctgatgacaa

SEQ ID NO: 1540449 - DNA, 15 bp, Homo sapiens
gcctttctgatgaca

SEQ ID NO: 1540450 - DNA, 15 bp, Homo sapiens
tgcctttctgatgac

SEQ ID NO: 1540451 - DNA, 15 bp, Homo sapiens
ttgcctttctgatga

SEQ ID NO: 1540452 - DNA, 15 bp, Homo sapiens
cttgcctttctgatg

SEQ ID NO: 1540453 - DNA, 15 bp, Homo sapiens
tcttgcctttctgat

SEQ ID NO: 1540454 - DNA, 15 bp, Homo sapiens
atcttgcctttctga

SEQ ID NO: 1540455 - DNA, 15 bp, Homo sapiens
catcttgcctttctg

SEQ ID NO: 1540456 - DNA, 15 bp, Homo sapiens
acatcttgcctttct

SEQ ID NO: 1540457 - DNA, 15 bp, Homo sapiens
tacatcttgcctttc

SEQ ID NO: 1540458 - DNA, 15 bp, Homo sapiens
ctacatcttgccttt

SEQ ID NO: 1540459 - DNA, 15 bp, Homo sapiens
cctacatcttgcctt

SEQ ID NO: 1540460 - DNA, 15 bp, Homo sapiens
acctacatcttgcct

SEQ ID NO: 1540461 - DNA, 15 bp, Homo sapiens
tacctacatcttgcc

SEQ ID NO: 1540462 - DNA, 15 bp, Homo sapiens
ttacctacatcttgc

SEQ ID NO: 1540463 - DNA, 15 bp, Homo sapiens
attacctacatcttg

SEQ ID NO: 1540464 - DNA, 15 bp, Homo sapiens
cattacctacatctt

SEQ ID NO: 1540465 - DNA, 15 bp, Homo sapiens
acattacctacatct

SEQ ID NO: 1540466 - DNA, 15 bp, Homo sapiens
gacattacctacatc

SEQ ID NO: 1540467 - DNA, 15 bp, Homo sapiens
ggacattacctacat

SEQ ID NO: 1540468 - DNA, 15 bp, Homo sapiens
aggacattacctaca

SEQ ID NO: 1540469 - DNA, 15 bp, Homo sapiens
caggacattacctac

SEQ ID NO: 1540470 - DNA, 15 bp, Homo sapiens
acaggacattaccta

SEQ ID NO: 1540471 - DNA, 15 bp, Homo sapiens
cacaggacattacct

SEQ ID NO: 1540472 - DNA, 15 bp, Homo sapiens
acacaggacattacc

SEQ ID NO: 1540473 - DNA, 15 bp, Homo sapiens
cacacaggacattac

SEQ ID NO: 1540474 - DNA, 15 bp, Homo sapiens
acacacaggacatta

SEQ ID NO: 1540475 - DNA, 15 bp, Homo sapiens
aacacacaggacatt

SEQ ID NO: 1540476 - DNA, 15 bp, Homo sapiens
gaacacacaggacat

SEQ ID NO: 1540477 - DNA, 15 bp, Homo sapiens
ggaacacacaggaca

SEQ ID NO: 1540478 - DNA, 15 bp, Homo sapiens
tggaacacacaggac

SEQ ID NO: 1540479 - DNA, 15 bp, Homo sapiens
atggaacacacagga

SEQ ID NO: 1540480 - DNA, 15 bp, Homo sapiens
catggaacacacagg

SEQ ID NO: 1540481 - DNA, 15 bp, Homo sapiens
acatggaacacacag

SEQ ID NO: 1540482 - DNA, 15 bp, Homo sapiens
gacatggaacacaca

SEQ ID NO: 1540483 - DNA, 15 bp, Homo sapiens
ggacatggaacacac

SEQ ID NO: 1540484 - DNA, 15 bp, Homo sapiens
cggacatggaacaca

SEQ ID NO: 1540485 - DNA, 15 bp, Homo sapiens
acggacatggaacac

SEQ ID NO: 1540486 - DNA, 15 bp, Homo sapiens
cacggacatggaaca

SEQ ID NO: 1540487 - DNA, 15 bp, Homo sapiens
ccacggacatggaac

SEQ ID NO: 1540488 - DNA, 15 bp, Homo sapiens
cccacggacatggaa

SEQ ID NO: 1540489 - DNA, 15 bp, Homo sapiens
gcccacggacatgga

SEQ ID NO: 1540490 - DNA, 15 bp, Homo sapiens
tgcccacggacatgg

SEQ ID NO: 1540491 - DNA, 15 bp, Homo sapiens
atgcccacggacatg

SEQ ID NO: 1540492 - DNA, 15 bp, Homo sapiens
catgcccacggacat

SEQ ID NO: 1540493 - DNA, 15 bp, Homo sapiens
gcatgcccacggaca

SEQ ID NO: 1540494 - DNA, 15 bp, Homo sapiens
agcatgcccacggac

SEQ ID NO: 1540495 - DNA, 15 bp, Homo sapiens
aagcatgcccacgga

SEQ ID NO: 1540496 - DNA, 15 bp, Homo sapiens
caagcatgcccacgg

SEQ ID NO: 1540497 - DNA, 15 bp, Homo sapiens
ccaagcatgcccacg

SEQ ID NO: 1540498 - DNA, 15 bp, Homo sapiens
gccaagcatgcccac

SEQ ID NO: 1540499 - DNA, 15 bp, Homo sapiens
tgccaagcatgccca

SEQ ID NO: 1540500 - DNA, 15 bp, Homo sapiens
ttgccaagcatgccc

SEQ ID NO: 1540501 - DNA, 15 bp, Homo sapiens
attgccaagcatgcc

SEQ ID NO: 1540502 - DNA, 15 bp, Homo sapiens
gattgccaagcatgc

SEQ ID NO: 1540503 - DNA, 15 bp, Homo sapiens
agattgccaagcatg

SEQ ID NO: 1540504 - DNA, 15 bp, Homo sapiens
cagattgccaagcat

SEQ ID NO: 1540505 - DNA, 15 bp, Homo sapiens
acagattgccaagca

SEQ ID NO: 1540506 - DNA, 15 bp, Homo sapiens
aacagattgccaagc

SEQ ID NO: 1540507 - DNA, 15 bp, Homo sapiens
caacagattgccaag

SEQ ID NO: 1540508 - DNA, 15 bp, Homo sapiens
ccaacagattgccaa

SEQ ID NO: 1540509 - DNA, 15 bp, Homo sapiens
cccaacagattgcca

SEQ ID NO: 1540510 - DNA, 15 bp, Homo sapiens
tcccaacagattgcc

SEQ ID NO: 1540511 - DNA, 15 bp, Homo sapiens
atcccaacagattgc

SEQ ID NO: 1540512 - DNA, 15 bp, Homo sapiens
tatcccaacagattg

SEQ ID NO: 1540513 - DNA, 15 bp, Homo sapiens
ctatcccaacagatt

SEQ ID NO: 1540514 - DNA, 15 bp, Homo sapiens
gctatcccaacagat

SEQ ID NO: 1540515 - DNA, 15 bp, Homo sapiens
tgctatcccaacaga

SEQ ID NO: 1540516 - DNA, 15 bp, Homo sapiens
ttgctatcccaacag

SEQ ID NO: 1540517 - DNA, 15 bp, Homo sapiens
attgctatcccaaca

SEQ ID NO: 1540518 - DNA, 15 bp, Homo sapiens
tattgctatcccaac

SEQ ID NO: 1540519 - DNA, 15 bp, Homo sapiens
atattgctatcccaa

SEQ ID NO: 1540520 - DNA, 15 bp, Homo sapiens
tatattgctatccca

SEQ ID NO: 1540521 - DNA, 15 bp, Homo sapiens
ttatattgctatccc

SEQ ID NO: 1540522 - DNA, 15 bp, Homo sapiens
attatattgctatcc

SEQ ID NO: 1540523 - DNA, 15 bp, Homo sapiens
aattatattgctatc

SEQ ID NO: 1540524 - DNA, 15 bp, Homo sapiens
aaattatattgctat

SEQ ID NO: 1540525 - DNA, 15 bp, Homo sapiens
caaattatattgcta

SEQ ID NO: 1540526 - DNA, 15 bp, Homo sapiens
acaaattatattgct

SEQ ID NO: 1540527 - DNA, 15 bp, Homo sapiens
aacaaattatattgc

SEQ ID NO: 1540528 - DNA, 15 bp, Homo sapiens
taacaaattatattg

SEQ ID NO: 1540529 - DNA, 15 bp, Homo sapiens
ctaacaaattatatt

SEQ ID NO: 1540530 - DNA, 15 bp, Homo sapiens
actaacaaattatat

SEQ ID NO: 1540531 - DNA, 15 bp, Homo sapiens
aactaacaaattata

SEQ ID NO: 1540532 - DNA, 15 bp, Homo sapiens
aaactaacaaattat

SEQ ID NO: 1540533 - DNA, 15 bp, Homo sapiens
caaactaacaaatta

SEQ ID NO: 1540534 - DNA, 15 bp, Homo sapiens
acaaactaacaaatt

SEQ ID NO: 1540535 - DNA, 15 bp, Homo sapiens
cacaaactaacaaat

SEQ ID NO: 1540536 - DNA, 15 bp, Homo sapiens
tcacaaactaacaaa

SEQ ID NO: 1540537 - DNA, 15 bp, Homo sapiens
ttcacaaactaacaa

SEQ ID NO: 1540538 - DNA, 15 bp, Homo sapiens
tttcacaaactaaca

SEQ ID NO: 1540539 - DNA, 15 bp, Homo sapiens
ctttcacaaactaac

SEQ ID NO: 1540540 - DNA, 15 bp, Homo sapiens
tctttcacaaactaa

SEQ ID NO: 1540541 - DNA, 15 bp, Homo sapiens
ttctttcacaaacta

SEQ ID NO: 1540542 - DNA, 15 bp, Homo sapiens
attctttcacaaact

SEQ ID NO: 1540543 - DNA, 15 bp, Homo sapiens
tattctttcacaaac

SEQ ID NO: 1540544 - DNA, 15 bp, Homo sapiens
ttattctttcacaaa

SEQ ID NO: 1540545 - DNA, 15 bp, Homo sapiens
attattctttcacaa

SEQ ID NO: 1540546 - DNA, 15 bp, Homo sapiens
cattattctttcaca

SEQ ID NO: 1540547 - DNA, 15 bp, Homo sapiens
ccattattctttcac

SEQ ID NO: 1540548 - DNA, 15 bp, Homo sapiens
tccattattctttca

SEQ ID NO: 1540549 - DNA, 15 bp, Homo sapiens
atccattattctttc

SEQ ID NO: 1540550 - DNA, 15 bp, Homo sapiens
gatccattattcttt

SEQ ID NO: 1540551 - DNA, 15 bp, Homo sapiens
ggatccattattctt

SEQ ID NO: 1540552 - DNA, 15 bp, Homo sapiens
aggatccattattct

SEQ ID NO: 1540553 - DNA, 15 bp, Homo sapiens
taggatccattattc

SEQ ID NO: 1540554 - DNA, 15 bp, Homo sapiens
ctaggatccattatt

SEQ ID NO: 1540555 - DNA, 15 bp, Homo sapiens
actaggatccattat

SEQ ID NO: 1540556 - DNA, 15 bp, Homo sapiens
aactaggatccatta

SEQ ID NO: 1540557 - DNA, 15 bp, Homo sapiens
aaactaggatccatt

SEQ ID NO: 1540558 - DNA, 15 bp, Homo sapiens
aaaactaggatccat

SEQ ID NO: 1540559 - DNA, 15 bp, Homo sapiens
caaaactaggatcca

SEQ ID NO: 1540560 - DNA, 15 bp, Homo sapiens
ccaaaactaggatcc

SEQ ID NO: 1540561 - DNA, 15 bp, Homo sapiens
accaaaactaggatc

SEQ ID NO: 1540562 - DNA, 15 bp, Homo sapiens
taccaaaactaggat

SEQ ID NO: 1540563 - DNA, 15 bp, Homo sapiens
ttaccaaaactagga

SEQ ID NO: 1540564 - DNA, 15 bp, Homo sapiens
attaccaaaactagg

SEQ ID NO: 1540565 - DNA, 15 bp, Homo sapiens
aattaccaaaactag

SEQ ID NO: 1540566 - DNA, 15 bp, Homo sapiens
caattaccaaaacta

SEQ ID NO: 1540567 - DNA, 15 bp, Homo sapiens
acaattaccaaaact

SEQ ID NO: 1540568 - DNA, 15 bp, Homo sapiens
tacaattaccaaaac

SEQ ID NO: 1540569 - DNA, 15 bp, Homo sapiens
ctacaattaccaaaa

SEQ ID NO: 1540570 - DNA, 15 bp, Homo sapiens
actacaattaccaaa

SEQ ID NO: 1540571 - DNA, 15 bp, Homo sapiens
aactacaattaccaa

SEQ ID NO: 1540572 - DNA, 15 bp, Homo sapiens
taactacaattacca

SEQ ID NO: 1540573 - DNA, 15 bp, Homo sapiens
ttaactacaattacc

SEQ ID NO: 1540574 - DNA, 15 bp, Homo sapiens
tttaactacaattac

SEQ ID NO: 1540575 - DNA, 15 bp, Homo sapiens
ttttaactacaatta

SEQ ID NO: 1540576 - DNA, 15 bp, Homo sapiens
cttttaactacaatt

SEQ ID NO: 1540577 - DNA, 15 bp, Homo sapiens
tcttttaactacaat

SEQ ID NO: 1540578 - DNA, 15 bp, Homo sapiens
atcttttaactacaa

SEQ ID NO: 1540579 - DNA, 15 bp, Homo sapiens
tatcttttaactaca

SEQ ID NO: 1540580 - DNA, 15 bp, Homo sapiens
ctatcttttaactac

SEQ ID NO: 1540581 - DNA, 15 bp, Homo sapiens
actatcttttaacta

SEQ ID NO: 1540582 - DNA, 15 bp, Homo sapiens
cactatcttttaact

SEQ ID NO: 1540583 - DNA, 15 bp, Homo sapiens
acactatcttttaac

SEQ ID NO: 1540584 - DNA, 15 bp, Homo sapiens
aacactatcttttaa

SEQ ID NO: 1540585 - DNA, 15 bp, Homo sapiens
caacactatctttta

SEQ ID NO: 1540586 - DNA, 15 bp, Homo sapiens
tcaacactatctttt

SEQ ID NO: 1540587 - DNA, 15 bp, Homo sapiens
ctcaacactatcttt

SEQ ID NO: 1540588 - DNA, 15 bp, Homo sapiens
tctcaacactatctt

SEQ ID NO: 1540589 - DNA, 15 bp, Homo sapiens
atctcaacactatct

SEQ ID NO: 1540590 - DNA, 15 bp, Homo sapiens
catctcaacactatc

SEQ ID NO: 1540591 - DNA, 15 bp, Homo sapiens
acatctcaacactat

SEQ ID NO: 1540592 - DNA, 15 bp, Homo sapiens
aacatctcaacacta

SEQ ID NO: 1540593 - DNA, 15 bp, Homo sapiens
taacatctcaacact

SEQ ID NO: 1540594 - DNA, 15 bp, Homo sapiens
gtaacatctcaacac

SEQ ID NO: 1540595 - DNA, 15 bp, Homo sapiens
tgtaacatctcaaca

SEQ ID NO: 1540596 - DNA, 15 bp, Homo sapiens
ttgtaacatctcaac

SEQ ID NO: 1540597 - DNA, 15 bp, Homo sapiens
cttgtaacatctcaa

SEQ ID NO: 1540598 - DNA, 15 bp, Homo sapiens
acttgtaacatctca

SEQ ID NO: 1540599 - DNA, 15 bp, Homo sapiens
tacttgtaacatctc

SEQ ID NO: 1540600 - DNA, 15 bp, Homo sapiens
ttacttgtaacatct

SEQ ID NO: 1540601 - DNA, 15 bp, Homo sapiens
tttacttgtaacatc

SEQ ID NO: 1540602 - DNA, 15 bp, Homo sapiens
gtttacttgtaacat

SEQ ID NO: 1540603 - DNA, 15 bp, Homo sapiens
agtttacttgtaaca

SEQ ID NO: 1540604 - DNA, 15 bp, Homo sapiens
tagtttacttgtaac

SEQ ID NO: 1540605 - DNA, 15 bp, Homo sapiens
gtagtttacttgtaa

SEQ ID NO: 1540606 - DNA, 15 bp, Homo sapiens
tgtagtttacttgta

SEQ ID NO: 1540607 - DNA, 15 bp, Homo sapiens
ttgtagtttacttgt

SEQ ID NO: 1540608 - DNA, 15 bp, Homo sapiens
cttgtagtttacttg

SEQ ID NO: 1540609 - DNA, 15 bp, Homo sapiens
gcttgtagtttactt

SEQ ID NO: 1540610 - DNA, 15 bp, Homo sapiens
agcttgtagtttact

SEQ ID NO: 1540611 - DNA, 15 bp, Homo sapiens
aagcttgtagtttac

SEQ ID NO: 1540612 - DNA, 15 bp, Homo sapiens
taagcttgtagttta

SEQ ID NO: 1540613 - DNA, 15 bp, Homo sapiens
ataagcttgtagttt

SEQ ID NO: 1540614 - DNA, 15 bp, Homo sapiens
cataagcttgtagtt

SEQ ID NO: 1540615 - DNA, 15 bp, Homo sapiens
gcataagcttgtagt

SEQ ID NO: 1540616 - DNA, 15 bp, Homo sapiens
ggcataagcttgtag

SEQ ID NO: 1540617 - DNA, 15 bp, Homo sapiens
aggcataagcttgta

SEQ ID NO: 1540618 - DNA, 15 bp, Homo sapiens
taggcataagcttgt

SEQ ID NO: 1540619 - DNA, 15 bp, Homo sapiens
ttaggcataagcttg

SEQ ID NO: 1540620 - DNA, 15 bp, Homo sapiens
attaggcataagctt

SEQ ID NO: 1540621 - DNA, 15 bp, Homo sapiens
tattaggcataagct

SEQ ID NO: 1540622 - DNA, 15 bp, Homo sapiens
atattaggcataagc

SEQ ID NO: 1540623 - DNA, 15 bp, Homo sapiens
aatattaggcataag

SEQ ID NO: 1540624 - DNA, 15 bp, Homo sapiens
gaatattaggcataa

SEQ ID NO: 1540625 - DNA, 15 bp, Homo sapiens
cgaatattaggcata

SEQ ID NO: 1540626 - DNA, 15 bp, Homo sapiens
gcgaatattaggcat

SEQ ID NO: 1540627 - DNA, 15 bp, Homo sapiens
agcgaatattaggca

SEQ ID NO: 1540628 - DNA, 15 bp, Homo sapiens
tagcgaatattaggc

SEQ ID NO: 1540629 - DNA, 15 bp, Homo sapiens
gtagcgaatattagg

SEQ ID NO: 1540630 - DNA, 15 bp, Homo sapiens
ggtagcgaatattag

SEQ ID NO: 1540631 - DNA, 15 bp, Homo sapiens
gggtagcgaatatta

SEQ ID NO: 1540632 - DNA, 15 bp, Homo sapiens
agggtagcgaatatt

SEQ ID NO: 1540633 - DNA, 15 bp, Homo sapiens
cagggtagcgaatat

SEQ ID NO: 1540634 - DNA, 15 bp, Homo sapiens
tcagggtagcgaata

SEQ ID NO: 1540635 - DNA, 15 bp, Homo sapiens
ttcagggtagcgaat

SEQ ID NO: 1540636 - DNA, 15 bp, Homo sapiens
attcagggtagcgaa

SEQ ID NO: 1540637 - DNA, 15 bp, Homo sapiens
aattcagggtagcga

SEQ ID NO: 1540638 - DNA, 15 bp, Homo sapiens
gaattcagggtagcg

SEQ ID NO: 1540639 - DNA, 15 bp, Homo sapiens
ggaattcagggtagc

SEQ ID NO: 1540640 - DNA, 15 bp, Homo sapiens
aggaattcagggtag

SEQ ID NO: 1540641 - DNA, 15 bp, Homo sapiens
aaggaattcagggta

SEQ ID NO: 1540642 - DNA, 15 bp, Homo sapiens
gaaggaattcagggt

SEQ ID NO: 1540643 - DNA, 15 bp, Homo sapiens
agaaggaattcaggg

SEQ ID NO: 1540644 - DNA, 15 bp, Homo sapiens
gagaaggaattcagg

SEQ ID NO: 1540645 - DNA, 15 bp, Homo sapiens
tgagaaggaattcag

SEQ ID NO: 1540646 - DNA, 15 bp, Homo sapiens
ttgagaaggaattca

SEQ ID NO: 1540647 - DNA, 15 bp, Homo sapiens
gttgagaaggaattc

SEQ ID NO: 1540648 - DNA, 15 bp, Homo sapiens
agttgagaaggaatt

SEQ ID NO: 1540649 - DNA, 15 bp, Homo sapiens
tagttgagaaggaat

SEQ ID NO: 1540650 - DNA, 15 bp, Homo sapiens
ttagttgagaaggaa

SEQ ID NO: 1540651 - DNA, 15 bp, Homo sapiens
tttagttgagaagga

SEQ ID NO: 1540652 - DNA, 15 bp, Homo sapiens
atttagttgagaagg

SEQ ID NO: 1540653 - DNA, 15 bp, Homo sapiens
aatttagttgagaag

SEQ ID NO: 1540654 - DNA, 15 bp, Homo sapiens
aaatttagttgagaa

SEQ ID NO: 1540655 - DNA, 15 bp, Homo sapiens
gaaatttagttgaga

SEQ ID NO: 1540656 - DNA, 15 bp, Homo sapiens
agaaatttagttgag

SEQ ID NO: 1540657 - DNA, 15 bp, Homo sapiens
aagaaatttagttga

SEQ ID NO: 1540658 - DNA, 15 bp, Homo sapiens
aaagaaatttagttg

SEQ ID NO: 1540659 - DNA, 15 bp, Homo sapiens
aaaagaaatttagtt

SEQ ID NO: 1540660 - DNA, 15 bp, Homo sapiens
gaaaagaaatttagt

SEQ ID NO: 1540661 - DNA, 15 bp, Homo sapiens
agaaaagaaatttag

SEQ ID NO: 1540662 - DNA, 15 bp, Homo sapiens
tagaaaagaaattta

SEQ ID NO: 1540663 - DNA, 15 bp, Homo sapiens
atagaaaagaaattt

SEQ ID NO: 1540664 - DNA, 15 bp, Homo sapiens
aatagaaaagaaatt

SEQ ID NO: 1540665 - DNA, 15 bp, Homo sapiens
gaatagaaaagaaat

SEQ ID NO: 1540666 - DNA, 15 bp, Homo sapiens
tgaatagaaaagaaa

SEQ ID NO: 1540667 - DNA, 15 bp, Homo sapiens
ctgaatagaaaagaa

SEQ ID NO: 1540668 - DNA, 15 bp, Homo sapiens
gctgaatagaaaaga

SEQ ID NO: 1540669 - DNA, 15 bp, Homo sapiens
agctgaatagaaaag

SEQ ID NO: 1540670 - DNA, 15 bp, Homo sapiens
tagctgaatagaaaa

SEQ ID NO: 1540671 - DNA, 15 bp, Homo sapiens
atagctgaatagaaa

SEQ ID NO: 1540672 - DNA, 15 bp, Homo sapiens
catagctgaatagaa

SEQ ID NO: 1540673 - DNA, 15 bp, Homo sapiens
acatagctgaataga

SEQ ID NO: 1540674 - DNA, 15 bp, Homo sapiens
tacatagctgaatag

SEQ ID NO: 1540675 - DNA, 15 bp, Homo sapiens
atacatagctgaata

SEQ ID NO: 1540676 - DNA, 15 bp, Homo sapiens
catacatagctgaat

SEQ ID NO: 1540677 - DNA, 15 bp, Homo sapiens
tcatacatagctgaa

SEQ ID NO: 1540678 - DNA, 15 bp, Homo sapiens
ttcatacatagctga

SEQ ID NO: 1540679 - DNA, 15 bp, Homo sapiens
cttcatacatagctg

SEQ ID NO: 1540680 - DNA, 15 bp, Homo sapiens
tcttcatacatagct

SEQ ID NO: 1540681 - DNA, 15 bp, Homo sapiens
ttcttcatacatagc

SEQ ID NO: 1540682 - DNA, 15 bp, Homo sapiens
cttcttcatacatag

SEQ ID NO: 1540683 - DNA, 15 bp, Homo sapiens
gcttcttcatacata

SEQ ID NO: 1540684 - DNA, 15 bp, Homo sapiens
tgcttcttcatacat

SEQ ID NO: 1540685 - DNA, 15 bp, Homo sapiens
atgcttcttcataca

SEQ ID NO: 1540686 - DNA, 15 bp, Homo sapiens
aatgcttcttcatac

SEQ ID NO: 1540687 - DNA, 15 bp, Homo sapiens
aaatgcttcttcata

SEQ ID NO: 1540688 - DNA, 15 bp, Homo sapiens
aaaatgcttcttcat

SEQ ID NO: 1540689 - DNA, 15 bp, Homo sapiens
taaaatgcttcttca

SEQ ID NO: 1540690 - DNA, 15 bp, Homo sapiens
ttaaaatgcttcttc

SEQ ID NO: 1540691 - DNA, 15 bp, Homo sapiens
attaaaatgcttctt

SEQ ID NO: 1540692 - DNA, 15 bp, Homo sapiens
aattaaaatgcttct

SEQ ID NO: 1540693 - DNA, 15 bp, Homo sapiens
aaattaaaatgcttc

SEQ ID NO: 1540694 - DNA, 15 bp, Homo sapiens
gaaattaaaatgctt

SEQ ID NO: 1540695 - DNA, 15 bp, Homo sapiens
agaaattaaaatgct

SEQ ID NO: 1540696 - DNA, 15 bp, Homo sapiens
tagaaattaaaatgc

SEQ ID NO: 1540697 - DNA, 15 bp, Homo sapiens
atagaaattaaaatg

SEQ ID NO: 1540698 - DNA, 15 bp, Homo sapiens
aatagaaattaaaat

SEQ ID NO: 1540699 - DNA, 15 bp, Homo sapiens
taatagaaattaaaa

SEQ ID NO: 1540700 - DNA, 15 bp, Homo sapiens
ttaatagaaattaaa

SEQ ID NO: 1540701 - DNA, 15 bp, Homo sapiens
gttaatagaaattaa

SEQ ID NO: 1540702 - DNA, 15 bp, Homo sapiens
tgttaatagaaatta

SEQ ID NO: 1540703 - DNA, 15 bp, Homo sapiens
gtgttaatagaaatt

SEQ ID NO: 1540704 - DNA, 15 bp, Homo sapiens
agtgttaatagaaat

SEQ ID NO: 1540705 - DNA, 15 bp, Homo sapiens
aagtgttaatagaaa

SEQ ID NO: 1540706 - DNA, 15 bp, Homo sapiens
aaagtgttaatagaa

SEQ ID NO: 1540707 - DNA, 15 bp, Homo sapiens
aaaagtgttaataga

SEQ ID NO: 1540708 - DNA, 15 bp, Homo sapiens
taaaagtgttaatag

SEQ ID NO: 1540709 - DNA, 15 bp, Homo sapiens
ctaaaagtgttaata

SEQ ID NO: 1540710 - DNA, 15 bp, Homo sapiens
tctaaaagtgttaat

SEQ ID NO: 1540711 - DNA, 15 bp, Homo sapiens
atctaaaagtgttaa

SEQ ID NO: 1540712 - DNA, 15 bp, Homo sapiens
catctaaaagtgtta

SEQ ID NO: 1540713 - DNA, 15 bp, Homo sapiens
gcatctaaaagtgtt

SEQ ID NO: 1540714 - DNA, 15 bp, Homo sapiens
agcatctaaaagtgt

SEQ ID NO: 1540715 - DNA, 15 bp, Homo sapiens
tagcatctaaaagtg

SEQ ID NO: 1540716 - DNA, 15 bp, Homo sapiens
ctagcatctaaaagt

SEQ ID NO: 1540717 - DNA, 15 bp, Homo sapiens
tctagcatctaaaag

SEQ ID NO: 1540718 - DNA, 15 bp, Homo sapiens
ttctagcatctaaaa

SEQ ID NO: 1540719 - DNA, 15 bp, Homo sapiens
cttctagcatctaaa

SEQ ID NO: 1540720 - DNA, 15 bp, Homo sapiens
acttctagcatctaa

SEQ ID NO: 1540721 - DNA, 15 bp, Homo sapiens
aacttctagcatcta

SEQ ID NO: 1540722 - DNA, 15 bp, Homo sapiens
taacttctagcatct

SEQ ID NO: 1540723 - DNA, 15 bp, Homo sapiens
ctaacttctagcatc

SEQ ID NO: 1540724 - DNA, 15 bp, Homo sapiens
gctaacttctagcat

SEQ ID NO: 1540725 - DNA, 15 bp, Homo sapiens
tgctaacttctagca

SEQ ID NO: 1540726 - DNA, 15 bp, Homo sapiens
atgctaacttctagc

SEQ ID NO: 1540727 - DNA, 15 bp, Homo sapiens
aatgctaacttctag

SEQ ID NO: 1540728 - DNA, 15 bp, Homo sapiens
taatgctaacttcta

SEQ ID NO: 1540729 - DNA, 15 bp, Homo sapiens
gtaatgctaacttct

SEQ ID NO: 1540730 - DNA, 15 bp, Homo sapiens
tgtaatgctaacttc

SEQ ID NO: 1540731 - DNA, 15 bp, Homo sapiens
ttgtaatgctaactt

SEQ ID NO: 1540732 - DNA, 15 bp, Homo sapiens
tttgtaatgctaact

SEQ ID NO: 1540733 - DNA, 15 bp, Homo sapiens
atttgtaatgctaac

SEQ ID NO: 1540734 - DNA, 15 bp, Homo sapiens
tatttgtaatgctaa

SEQ ID NO: 1540735 - DNA, 15 bp, Homo sapiens
ttatttgtaatgcta

SEQ ID NO: 1540736 - DNA, 15 bp, Homo sapiens
tttatttgtaatgct

SEQ ID NO: 1540737 - DNA, 15 bp, Homo sapiens
atttatttgtaatgc

SEQ ID NO: 1540738 - DNA, 15 bp, Homo sapiens
tatttatttgtaatg

SEQ ID NO: 1540739 - DNA, 15 bp, Homo sapiens
atatttatttgtaat

SEQ ID NO: 1540740 - DNA, 15 bp, Homo sapiens
aatatttatttgtaa

SEQ ID NO: 1540741 - DNA, 15 bp, Homo sapiens
taatatttatttgta

SEQ ID NO: 1540742 - DNA, 15 bp, Homo sapiens
ttaatatttatttgt

SEQ ID NO: 1540743 - DNA, 15 bp, Homo sapiens
attaatatttatttg

SEQ ID NO: 1540744 - DNA, 15 bp, Homo sapiens
gattaatatttattt

SEQ ID NO: 1540745 - DNA, 15 bp, Homo sapiens
tgattaatatttatt

SEQ ID NO: 1540746 - DNA, 15 bp, Homo sapiens
atgattaatatttat

SEQ ID NO: 1540747 - DNA, 15 bp, Homo sapiens
aatgattaatattta

SEQ ID NO: 1540748 - DNA, 15 bp, Homo sapiens
aaatgattaatattt

SEQ ID NO: 1540749 - DNA, 15 bp, Homo sapiens
aaaatgattaatatt

SEQ ID NO: 1540750 - DNA, 15 bp, Homo sapiens
taaaatgattaatat

SEQ ID NO: 1540751 - DNA, 15 bp, Homo sapiens
ttaaaatgattaata

SEQ ID NO: 1540752 - DNA, 15 bp, Homo sapiens
cttaaaatgattaat

SEQ ID NO: 1540753 - DNA, 15 bp, Homo sapiens
acttaaaatgattaa

SEQ ID NO: 1540754 - DNA, 15 bp, Homo sapiens
cacttaaaatgatta

SEQ ID NO: 1540755 - DNA, 15 bp, Homo sapiens
ccacttaaaatgatt

SEQ ID NO: 1540756 - DNA, 15 bp, Homo sapiens
tccacttaaaatgat

SEQ ID NO: 1540757 - DNA, 15 bp, Homo sapiens
gtccacttaaaatga

SEQ ID NO: 1540758 - DNA, 15 bp, Homo sapiens
agtccacttaaaatg

SEQ ID NO: 1540759 - DNA, 15 bp, Homo sapiens
tagtccacttaaaat

SEQ ID NO: 1540760 - DNA, 15 bp, Homo sapiens
atagtccacttaaaa

SEQ ID NO: 1540761 - DNA, 15 bp, Homo sapiens
gatagtccacttaaa

SEQ ID NO: 1540762 - DNA, 15 bp, Homo sapiens
tgatagtccacttaa

SEQ ID NO: 1540763 - DNA, 15 bp, Homo sapiens
atgatagtccactta

SEQ ID NO: 1540764 - DNA, 15 bp, Homo sapiens
catgatagtccactt

SEQ ID NO: 1540765 - DNA, 15 bp, Homo sapiens
ccatgatagtccact

SEQ ID NO: 1540766 - DNA, 15 bp, Homo sapiens
gccatgatagtccac

SEQ ID NO: 1540767 - DNA, 15 bp, Homo sapiens
agccatgatagtcca

SEQ ID NO: 1540768 - DNA, 15 bp, Homo sapiens
aagccatgatagtcc

SEQ ID NO: 1540769 - DNA, 15 bp, Homo sapiens
aaagccatgatagtc

SEQ ID NO: 1540770 - DNA, 15 bp, Homo sapiens
taaagccatgatagt

SEQ ID NO: 1540771 - DNA, 15 bp, Homo sapiens
ataaagccatgatag

SEQ ID NO: 1540772 - DNA, 15 bp, Homo sapiens
tataaagccatgata

SEQ ID NO: 1540773 - DNA, 15 bp, Homo sapiens
atataaagccatgat

SEQ ID NO: 1540774 - DNA, 15 bp, Homo sapiens
tatataaagccatga

SEQ ID NO: 1540775 - DNA, 15 bp, Homo sapiens
ctatataaagccatg

SEQ ID NO: 1540776 - DNA, 15 bp, Homo sapiens
actatataaagccat

SEQ ID NO: 1540777 - DNA, 15 bp, Homo sapiens
aactatataaagcca

SEQ ID NO: 1540778 - DNA, 15 bp, Homo sapiens
aaactatataaagcc

SEQ ID NO: 1540779 - DNA, 15 bp, Homo sapiens
aaaactatataaagc

SEQ ID NO: 1540780 - DNA, 15 bp, Homo sapiens
gaaaactatataaag

SEQ ID NO: 1540781 - DNA, 15 bp, Homo sapiens
agaaaactatataaa

SEQ ID NO: 1540782 - DNA, 15 bp, Homo sapiens
aagaaaactatataa

SEQ ID NO: 1540783 - DNA, 15 bp, Homo sapiens
gaagaaaactatata

SEQ ID NO: 1540784 - DNA, 15 bp, Homo sapiens
ggaagaaaactatat

SEQ ID NO: 1540785 - DNA, 15 bp, Homo sapiens
aggaagaaaactata

SEQ ID NO: 1540786 - DNA, 15 bp, Homo sapiens
caaaggaagaaaact

SEQ ID NO: 1540787 - DNA, 15 bp, Homo sapiens
tcaaaggaagaaaac

SEQ ID NO: 1540788 - DNA, 15 bp, Homo sapiens
ttcaaaggaagaaaa

SEQ ID NO: 1540789 - DNA, 15 bp, Homo sapiens
cttcaaaggaagaaa

SEQ ID NO: 1540790 - DNA, 15 bp, Homo sapiens
gcttcaaaggaagaa

SEQ ID NO: 1540791 - DNA, 15 bp, Homo sapiens
cgcttcaaaggaaga

SEQ ID NO: 1540792 - DNA, 15 bp, Homo sapiens
acgcttcaaaggaag

SEQ ID NO: 1540793 - DNA, 15 bp, Homo sapiens
cacgcttcaaaggaa

SEQ ID NO: 1540794 - DNA, 15 bp, Homo sapiens
gcacgcttcaaagga

SEQ ID NO: 1540795 - DNA, 15 bp, Homo sapiens
agcacgcttcaaagg

SEQ ID NO: 1540796 - DNA, 15 bp, Homo sapiens
tagcacgcttcaaag

SEQ ID NO: 1540797 - DNA, 15 bp, Homo sapiens
ctagcacgcttcaaa

SEQ ID NO: 1540798 - DNA, 15 bp, Homo sapiens
tctagcacgcttcaa

SEQ ID NO: 1540799 - DNA, 15 bp, Homo sapiens
gtctagcacgcttca

SEQ ID NO: 1540800 - DNA, 15 bp, Homo sapiens
agtctagcacgcttc

SEQ ID NO: 1540801 - DNA, 15 bp, Homo sapiens
aagtctagcacgctt

SEQ ID NO: 1540802 - DNA, 15 bp, Homo sapiens
gaagtctagcacgct

SEQ ID NO: 1540803 - DNA, 15 bp, Homo sapiens
agaagtctagcacgc

SEQ ID NO: 1540804 - DNA, 15 bp, Homo sapiens
cagaagtctagcacg

SEQ ID NO: 1540805 - DNA, 15 bp, Homo sapiens
gcagaagtctagcac

SEQ ID NO: 1540806 - DNA, 15 bp, Homo sapiens
agcagaagtctagca

SEQ ID NO: 1540807 - DNA, 15 bp, Homo sapiens
aagcagaagtctagc

SEQ ID NO: 1540808 - DNA, 15 bp, Homo sapiens
aaagcagaagtctag

SEQ ID NO: 1540809 - DNA, 15 bp, Homo sapiens
caaagcagaagtcta

SEQ ID NO: 1540810 - DNA, 15 bp, Homo sapiens
tcaaagcagaagtct

SEQ ID NO: 1540811 - DNA, 15 bp, Homo sapiens
ctcaaagcagaagtc

SEQ ID NO: 1540812 - DNA, 15 bp, Homo sapiens
actcaaagcagaagt

SEQ ID NO: 1540813 - DNA, 15 bp, Homo sapiens
gactcaaagcagaag

SEQ ID NO: 1540814 - DNA, 15 bp, Homo sapiens
tgactcaaagcagaa

SEQ ID NO: 1540815 - DNA, 15 bp, Homo sapiens
ctgactcaaagcaga

SEQ ID NO: 1540816 - DNA, 15 bp, Homo sapiens
actgactcaaagcag

SEQ ID NO: 1540817 - DNA, 15 bp, Homo sapiens
aactgactcaaagca

SEQ ID NO: 1540818 - DNA, 15 bp, Homo sapiens
taactgactcaaagc

SEQ ID NO: 1540819 - DNA, 15 bp, Homo sapiens
ctaactgactcaaag

SEQ ID NO: 1540820 - DNA, 15 bp, Homo sapiens
actaactgactcaaa

SEQ ID NO: 1540821 - DNA, 15 bp, Homo sapiens
aactaactgactcaa

SEQ ID NO: 1540822 - DNA, 15 bp, Homo sapiens
gaactaactgactca

SEQ ID NO: 1540823 - DNA, 15 bp, Homo sapiens
agaactaactgactc

SEQ ID NO: 1540824 - DNA, 15 bp, Homo sapiens
cagaactaactgact

SEQ ID NO: 1540825 - DNA, 15 bp, Homo sapiens
gcagaactaactgac

SEQ ID NO: 1540826 - DNA, 15 bp, Homo sapiens
agcagaactaactga

SEQ ID NO: 1540827 - DNA, 15 bp, Homo sapiens
aagcagaactaactg

SEQ ID NO: 1540828 - DNA, 15 bp, Homo sapiens
aaagcagaactaact

SEQ ID NO: 1540829 - DNA, 15 bp, Homo sapiens
aaaagcagaactaac

SEQ ID NO: 1540830 - DNA, 15 bp, Homo sapiens
taaaagcagaactaa

SEQ ID NO: 1540831 - DNA, 15 bp, Homo sapiens
gtaaaagcagaacta

SEQ ID NO: 1540832 - DNA, 15 bp, Homo sapiens
agtaaaagcagaact

SEQ ID NO: 1540833 - DNA, 15 bp, Homo sapiens
aagtaaaagcagaac

SEQ ID NO: 1540834 - DNA, 15 bp, Homo sapiens
aaagtaaaagcagaa

SEQ ID NO: 1540835 - DNA, 15 bp, Homo sapiens
aaaagtaaaagcaga

SEQ ID NO: 1540836 - DNA, 15 bp, Homo sapiens
gaaaagtaaaagcag

SEQ ID NO: 1540837 - DNA, 15 bp, Homo sapiens
agaaaagtaaaagca

SEQ ID NO: 1540838 - DNA, 15 bp, Homo sapiens
cagaaaagtaaaagc

SEQ ID NO: 1540839 - DNA, 15 bp, Homo sapiens
tcagaaaagtaaaag

SEQ ID NO: 1540840 - DNA, 15 bp, Homo sapiens
atcagaaaagtaaaa

SEQ ID NO: 1540841 - DNA, 15 bp, Homo sapiens
aatcagaaaagtaaa

SEQ ID NO: 1540842 - DNA, 15 bp, Homo sapiens
gaatcagaaaagtaa

SEQ ID NO: 1540843 - DNA, 15 bp, Homo sapiens
ggaatcagaaaagta

SEQ ID NO: 1540844 - DNA, 15 bp, Homo sapiens
aggaatcagaaaagt

SEQ ID NO: 1540845 - DNA, 15 bp, Homo sapiens
aaggaatcagaaaag

SEQ ID NO: 1540846 - DNA, 15 bp, Homo sapiens
gaaggaatcagaaaa

SEQ ID NO: 1540847 - DNA, 15 bp, Homo sapiens
agaaggaatcagaaa

SEQ ID NO: 1540848 - DNA, 15 bp, Homo sapiens
aagaaggaatcagaa

SEQ ID NO: 1540849 - DNA, 15 bp, Homo sapiens
aaagaaggaatcaga

SEQ ID NO: 1540850 - DNA, 15 bp, Homo sapiens
taaagaaggaatcag

SEQ ID NO: 1540851 - DNA, 15 bp, Homo sapiens
ttaaagaaggaatca

SEQ ID NO: 1540852 - DNA, 15 bp, Homo sapiens
tttaaagaaggaatc

SEQ ID NO: 1540853 - DNA, 15 bp, Homo sapiens
ttttaaagaaggaat

SEQ ID NO: 1540854 - DNA, 15 bp, Homo sapiens
tttttaaagaaggaa

SEQ ID NO: 1540855 - DNA, 15 bp, Homo sapiens
ttttttaaagaagga

SEQ ID NO: 1540856 - DNA, 15 bp, Homo sapiens
tttttttaaagaagg

SEQ ID NO: 1540857 - DNA, 15 bp, Homo sapiens
ttttttttaaagaag

SEQ ID NO: 1540858 - DNA, 15 bp, Homo sapiens
tttttttttaaagaa

SEQ ID NO: 1540859 - DNA, 15 bp, Homo sapiens
cttaatttttttttt

SEQ ID NO: 1540860 - DNA, 15 bp, Homo sapiens
ccttaattttttttt

SEQ ID NO: 1540861 - DNA, 15 bp, Homo sapiens
tccttaatttttttt

SEQ ID NO: 1540862 - DNA, 15 bp, Homo sapiens
atccttaattttttt

SEQ ID NO: 1540863 - DNA, 15 bp, Homo sapiens
gatccttaatttttt

SEQ ID NO: 1540864 - DNA, 15 bp, Homo sapiens
tgatccttaattttt

SEQ ID NO: 1540865 - DNA, 15 bp, Homo sapiens
atgatccttaatttt

SEQ ID NO: 1540866 - DNA, 15 bp, Homo sapiens
aatgatccttaattt

SEQ ID NO: 1540867 - DNA, 15 bp, Homo sapiens
gaatgatccttaatt

SEQ ID NO: 1540868 - DNA, 15 bp, Homo sapiens
agaatgatccttaat

SEQ ID NO: 1540869 - DNA, 15 bp, Homo sapiens
aagaatgatccttaa

SEQ ID NO: 1540870 - DNA, 15 bp, Homo sapiens
taagaatgatcctta

SEQ ID NO: 1540871 - DNA, 15 bp, Homo sapiens
gtaagaatgatcctt

SEQ ID NO: 1540872 - DNA, 15 bp, Homo sapiens
tgtaagaatgatcct

SEQ ID NO: 1540873 - DNA, 15 bp, Homo sapiens
ctgtaagaatgatcc

SEQ ID NO: 1540874 - DNA, 15 bp, Homo sapiens
tctgtaagaatgatc

SEQ ID NO: 1540875 - DNA, 15 bp, Homo sapiens
ttctgtaagaatgat

SEQ ID NO: 1540876 - DNA, 15 bp, Homo sapiens
tttctgtaagaatga

SEQ ID NO: 1540877 - DNA, 15 bp, Homo sapiens
gtttctgtaagaatg

SEQ ID NO: 1540878 - DNA, 15 bp, Homo sapiens
agtttctgtaagaat

SEQ ID NO: 1540879 - DNA, 15 bp, Homo sapiens
tagtttctgtaagaa

SEQ ID NO: 1540880 - DNA, 15 bp, Homo sapiens
gtagtttctgtaaga

SEQ ID NO: 1540881 - DNA, 15 bp, Homo sapiens
ggtagtttctgtaag

SEQ ID NO: 1540882 - DNA, 15 bp, Homo sapiens
gggtagtttctgtaa

SEQ ID NO: 1540883 - DNA, 15 bp, Homo sapiens
tgggtagtttctgta

SEQ ID NO: 1540884 - DNA, 15 bp, Homo sapiens
gtgggtagtttctgt

SEQ ID NO: 1540885 - DNA, 15 bp, Homo sapiens
ggtgggtagtttctg

SEQ ID NO: 1540886 - DNA, 15 bp, Homo sapiens
gggtgggtagtttct

SEQ ID NO: 1540887 - DNA, 15 bp, Homo sapiens
agggtgggtagtttc

SEQ ID NO: 1540888 - DNA, 15 bp, Homo sapiens
gagggtgggtagttt

SEQ ID NO: 1540889 - DNA, 15 bp, Homo sapiens
agagggtgggtagtt

SEQ ID NO: 1540890 - DNA, 15 bp, Homo sapiens
tagagggtgggtagt

SEQ ID NO: 1540891 - DNA, 15 bp, Homo sapiens
ttagagggtgggtag

SEQ ID NO: 1540892 - DNA, 15 bp, Homo sapiens
gttagagggtgggta

SEQ ID NO: 1540893 - DNA, 15 bp, Homo sapiens
ggttagagggtgggt

SEQ ID NO: 1540894 - DNA, 15 bp, Homo sapiens
aggttagagggtggg

SEQ ID NO: 1540895 - DNA, 15 bp, Homo sapiens
caggttagagggtgg

SEQ ID NO: 1540896 - DNA, 15 bp, Homo sapiens
acaggttagagggtg

SEQ ID NO: 1540897 - DNA, 15 bp, Homo sapiens
gacaggttagagggt

SEQ ID NO: 1540898 - DNA, 15 bp, Homo sapiens
tgacaggttagaggg

SEQ ID NO: 1540899 - DNA, 15 bp, Homo sapiens
gtgacaggttagagg

SEQ ID NO: 1540900 - DNA, 15 bp, Homo sapiens
ggtgacaggttagag

SEQ ID NO: 1540901 - DNA, 15 bp, Homo sapiens
tggtgacaggttaga

SEQ ID NO: 1540902 - DNA, 15 bp, Homo sapiens
ttggtgacaggttag

SEQ ID NO: 1540903 - DNA, 15 bp, Homo sapiens
attggtgacaggtta

SEQ ID NO: 1540904 - DNA, 15 bp, Homo sapiens
gattggtgacaggtt

SEQ ID NO: 1540905 - DNA, 15 bp, Homo sapiens
agattggtgacaggt

SEQ ID NO: 1540906 - DNA, 15 bp, Homo sapiens
aagattggtgacagg

SEQ ID NO: 1540907 - DNA, 15 bp, Homo sapiens
aaagattggtgacag

SEQ ID NO: 1540908 - DNA, 15 bp, Homo sapiens
taaagattggtgaca

SEQ ID NO: 1540909 - DNA, 15 bp, Homo sapiens
gtaaagattggtgac

SEQ ID NO: 1540910 - DNA, 15 bp, Homo sapiens
tgtaaagattggtga

SEQ ID NO: 1540911 - DNA, 15 bp, Homo sapiens
ctgtaaagattggtg

SEQ ID NO: 1540912 - DNA, 15 bp, Homo sapiens
tctgtaaagattggt

SEQ ID NO: 1540913 - DNA, 15 bp, Homo sapiens
ttctgtaaagattgg

SEQ ID NO: 1540914 - DNA, 15 bp, Homo sapiens
cttctgtaaagattg

SEQ ID NO: 1540915 - DNA, 15 bp, Homo sapiens
tcttctgtaaagatt

SEQ ID NO: 1540916 - DNA, 15 bp, Homo sapiens
ttcttctgtaaagat

SEQ ID NO: 1540917 - DNA, 15 bp, Homo sapiens
tttcttctgtaaaga

SEQ ID NO: 1540918 - DNA, 15 bp, Homo sapiens
atttcttctgtaaag

SEQ ID NO: 1540919 - DNA, 15 bp, Homo sapiens
catttcttctgtaaa

SEQ ID NO: 1540920 - DNA, 15 bp, Homo sapiens
acatttcttctgtaa

SEQ ID NO: 1540921 - DNA, 15 bp, Homo sapiens
cacatttcttctgta

SEQ ID NO: 1540922 - DNA, 15 bp, Homo sapiens
ccacatttcttctgt

SEQ ID NO: 1540923 - DNA, 15 bp, Homo sapiens
gccacatttcttctg

SEQ ID NO: 1540924 - DNA, 15 bp, Homo sapiens
ggccacatttcttct

SEQ ID NO: 1540925 - DNA, 15 bp, Homo sapiens
aggccacatttcttc

SEQ ID NO: 1540926 - DNA, 15 bp, Homo sapiens
aaggccacatttctt

SEQ ID NO: 1540927 - DNA, 15 bp, Homo sapiens
caaggccacatttct

SEQ ID NO: 1540928 - DNA, 15 bp, Homo sapiens
tcaaggccacatttc

SEQ ID NO: 1540929 - DNA, 15 bp, Homo sapiens
ctcaaggccacattt

SEQ ID NO: 1540930 - DNA, 15 bp, Homo sapiens
gctcaaggccacatt

SEQ ID NO: 1540931 - DNA, 15 bp, Homo sapiens
agctcaaggccacat

SEQ ID NO: 1540932 - DNA, 15 bp, Homo sapiens
aagctcaaggccaca

SEQ ID NO: 1540933 - DNA, 15 bp, Homo sapiens
gaagctcaaggccac

SEQ ID NO: 1540934 - DNA, 15 bp, Homo sapiens
agaagctcaaggcca

SEQ ID NO: 1540935 - DNA, 15 bp, Homo sapiens
aagaagctcaaggcc

SEQ ID NO: 1540936 - DNA, 15 bp, Homo sapiens
caagaagctcaaggc

SEQ ID NO: 1540937 - DNA, 15 bp, Homo sapiens
gcaagaagctcaagg

SEQ ID NO: 1540938 - DNA, 15 bp, Homo sapiens
agcaagaagctcaag

SEQ ID NO: 1540939 - DNA, 15 bp, Homo sapiens
aagcaagaagctcaa

SEQ ID NO: 1540940 - DNA, 15 bp, Homo sapiens
gaagcaagaagctca

SEQ ID NO: 1540941 - DNA, 15 bp, Homo sapiens
tgaagcaagaagctc

SEQ ID NO: 1540942 - DNA, 15 bp, Homo sapiens
atgaagcaagaagct

SEQ ID NO: 1540943 - DNA, 15 bp, Homo sapiens
catgaagcaagaagc

SEQ ID NO: 1540944 - DNA, 15 bp, Homo sapiens
acatgaagcaagaag

SEQ ID NO: 1540945 - DNA, 15 bp, Homo sapiens
tacatgaagcaagaa

SEQ ID NO: 1540946 - DNA, 15 bp, Homo sapiens
atacatgaagcaaga

SEQ ID NO: 1540947 - DNA, 15 bp, Homo sapiens
catacatgaagcaag

SEQ ID NO: 1540948 - DNA, 15 bp, Homo sapiens
tcatacatgaagcaa

SEQ ID NO: 1540949 - DNA, 15 bp, Homo sapiens
ttcatacatgaagca

SEQ ID NO: 1540950 - DNA, 15 bp, Homo sapiens
tttcatacatgaagc

SEQ ID NO: 1540951 - DNA, 15 bp, Homo sapiens
atttcatacatgaag

SEQ ID NO: 1540952 - DNA, 15 bp, Homo sapiens
tatttcatacatgaa

SEQ ID NO: 1540953 - DNA, 15 bp, Homo sapiens
ttatttcatacatga

SEQ ID NO: 1540954 - DNA, 15 bp, Homo sapiens
tttatttcatacatg

SEQ ID NO: 1540955 - DNA, 15 bp, Homo sapiens
atttatttcatacat

SEQ ID NO: 1540956 - DNA, 15 bp, Homo sapiens
catttatttcataca

SEQ ID NO: 1540957 - DNA, 15 bp, Homo sapiens
gcatttatttcatac

SEQ ID NO: 1540958 - DNA, 15 bp, Homo sapiens
tgcatttatttcata

SEQ ID NO: 1540959 - DNA, 15 bp, Homo sapiens
ttgcatttatttcat

SEQ ID NO: 1540960 - DNA, 15 bp, Homo sapiens
tttgcatttatttca

SEQ ID NO: 1540961 - DNA, 15 bp, Homo sapiens
atttgcatttatttc

SEQ ID NO: 1540962 - DNA, 15 bp, Homo sapiens
aatttgcatttattt

SEQ ID NO: 1540963 - DNA, 15 bp, Homo sapiens
aaatttgcatttatt

SEQ ID NO: 1540964 - DNA, 15 bp, Homo sapiens
aaaatttgcatttat

SEQ ID NO: 1540965 - DNA, 15 bp, Homo sapiens
aaaaatttgcattta

SEQ ID NO: 1540966 - DNA, 15 bp, Homo sapiens
aaaaaatttgcattt

SEQ ID NO: 1540967 - DNA, 15 bp, Homo sapiens
aaaaaaatttgcatt

SEQ ID NO: 1540968 - DNA, 15 bp, Homo sapiens
caaaaaaatttgcat

SEQ ID NO: 1540969 - DNA, 15 bp, Homo sapiens
ccaaaaaaatttgca

SEQ ID NO: 1540970 - DNA, 15 bp, Homo sapiens
accaaaaaaatttgc

SEQ ID NO: 1540971 - DNA, 15 bp, Homo sapiens
caccaaaaaaatttg

SEQ ID NO: 1540972 - DNA, 15 bp, Homo sapiens
ccaccaaaaaaattt

SEQ ID NO: 1540973 - DNA, 15 bp, Homo sapiens
tccaccaaaaaaatt

SEQ ID NO: 1540974 - DNA, 15 bp, Homo sapiens
ttccaccaaaaaaat

SEQ ID NO: 1540975 - DNA, 15 bp, Homo sapiens
tttccaccaaaaaaa

SEQ ID NO: 1540976 - DNA, 15 bp, Homo sapiens
ctttccaccaaaaaa

SEQ ID NO: 1540977 - DNA, 15 bp, Homo sapiens
tctttccaccaaaaa

SEQ ID NO: 1540978 - DNA, 15 bp, Homo sapiens
ctctttccaccaaaa

SEQ ID NO: 1540979 - DNA, 15 bp, Homo sapiens
cctctttccaccaaa

SEQ ID NO: 1540980 - DNA, 15 bp, Homo sapiens
ccctctttccaccaa

SEQ ID NO: 1540981 - DNA, 15 bp, Homo sapiens
cccctctttccacca

SEQ ID NO: 1540982 - DNA, 15 bp, Homo sapiens
tcccctctttccacc

SEQ ID NO: 1540983 - DNA, 15 bp, Homo sapiens
ttcccctctttccac

SEQ ID NO: 1540984 - DNA, 15 bp, Homo sapiens
cttcccctctttcca

SEQ ID NO: 1540985 - DNA, 15 bp, Homo sapiens
acttcccctctttcc

SEQ ID NO: 1540986 - DNA, 15 bp, Homo sapiens
aacttcccctctttc

SEQ ID NO: 1540987 - DNA, 15 bp, Homo sapiens
aaacttcccctcttt

SEQ ID NO: 1540988 - DNA, 15 bp, Homo sapiens
caaacttcccctctt

SEQ ID NO: 1540989 - DNA, 15 bp, Homo sapiens
ccaaacttcccctct

SEQ ID NO: 1540990 - DNA, 15 bp, Homo sapiens
accaaacttcccctc

SEQ ID NO: 1540991 - DNA, 15 bp, Homo sapiens
taccaaacttcccct

SEQ ID NO: 1540992 - DNA, 15 bp, Homo sapiens
ctaccaaacttcccc

SEQ ID NO: 1540993 - DNA, 15 bp, Homo sapiens
gctaccaaacttccc

SEQ ID NO: 1540994 - DNA, 15 bp, Homo sapiens
tgctaccaaacttcc

SEQ ID NO: 1540995 - DNA, 15 bp, Homo sapiens
ttgctaccaaacttc

SEQ ID NO: 1540996 - DNA, 15 bp, Homo sapiens
gttgctaccaaactt

SEQ ID NO: 1540997 - DNA, 15 bp, Homo sapiens
ggttgctaccaaact

SEQ ID NO: 1540998 - DNA, 15 bp, Homo sapiens
tggttgctaccaaac

SEQ ID NO: 1540999 - DNA, 15 bp, Homo sapiens
ttggttgctaccaaa

SEQ ID NO: 1541000 - DNA, 15 bp, Homo sapiens
tttggttgctaccaa

SEQ ID NO: 1541001 - DNA, 15 bp, Homo sapiens
ttttggttgctacca

SEQ ID NO: 1541002 - DNA, 15 bp, Homo sapiens
cttttggttgctacc

SEQ ID NO: 1541003 - DNA, 15 bp, Homo sapiens
tcttttggttgctac

SEQ ID NO: 1541004 - DNA, 15 bp, Homo sapiens
ttcttttggttgcta

SEQ ID NO: 1541005 - DNA, 15 bp, Homo sapiens
tttcttttggttgct

SEQ ID NO: 1541006 - DNA, 15 bp, Homo sapiens
gtttcttttggttgc

SEQ ID NO: 1541007 - DNA, 15 bp, Homo sapiens
agtttcttttggttg

SEQ ID NO: 1541008 - DNA, 15 bp, Homo sapiens
cagtttcttttggtt

SEQ ID NO: 1541009 - DNA, 15 bp, Homo sapiens
tcagtttcttttggt

SEQ ID NO: 1541010 - DNA, 15 bp, Homo sapiens
ttcagtttcttttgg

SEQ ID NO: 1541011 - DNA, 15 bp, Homo sapiens
gttcagtttcttttg

SEQ ID NO: 1541012 - DNA, 15 bp, Homo sapiens
agttcagtttctttt

SEQ ID NO: 1541013 - DNA, 15 bp, Homo sapiens
aagttcagtttcttt

SEQ ID NO: 1541014 - DNA, 15 bp, Homo sapiens
gaagttcagtttctt

SEQ ID NO: 1541015 - DNA, 15 bp, Homo sapiens
tgaagttcagtttct

SEQ ID NO: 1541016 - DNA, 15 bp, Homo sapiens
ttgaagttcagtttc

SEQ ID NO: 1541017 - DNA, 15 bp, Homo sapiens
tttgaagttcagttt

SEQ ID NO: 1541018 - DNA, 15 bp, Homo sapiens
atttgaagttcagtt

SEQ ID NO: 1541019 - DNA, 15 bp, Homo sapiens
tatttgaagttcagt

SEQ ID NO: 1541020 - DNA, 15 bp, Homo sapiens
ctatttgaagttcag

SEQ ID NO: 1541021 - DNA, 15 bp, Homo sapiens
tctatttgaagttca

SEQ ID NO: 1541022 - DNA, 15 bp, Homo sapiens
ttctatttgaagttc

SEQ ID NO: 1541023 - DNA, 15 bp, Homo sapiens
tttctatttgaagtt

SEQ ID NO: 1541024 - DNA, 15 bp, Homo sapiens
atttctatttgaagt

SEQ ID NO: 1541025 - DNA, 15 bp, Homo sapiens
aatttctatttgaag

SEQ ID NO: 1541026 - DNA, 15 bp, Homo sapiens
gaatttctatttgaa

SEQ ID NO: 1541027 - DNA, 15 bp, Homo sapiens
tgaatttctatttga

SEQ ID NO: 1541028 - DNA, 15 bp, Homo sapiens
ttgaatttctatttg

SEQ ID NO: 1541029 - DNA, 15 bp, Homo sapiens
cttgaatttctattt

SEQ ID NO: 1541030 - DNA, 15 bp, Homo sapiens
ccttgaatttctatt

SEQ ID NO: 1541031 - DNA, 15 bp, Homo sapiens
accttgaatttctat

SEQ ID NO: 1541032 - DNA, 15 bp, Homo sapiens
caccttgaatttcta

SEQ ID NO: 1541033 - DNA, 15 bp, Homo sapiens
acaccttgaatttct

SEQ ID NO: 1541034 - DNA, 15 bp, Homo sapiens
aacaccttgaatttc

SEQ ID NO: 1541035 - DNA, 15 bp, Homo sapiens
gaacaccttgaattt

SEQ ID NO: 1541036 - DNA, 15 bp, Homo sapiens
agaacaccttgaatt

SEQ ID NO: 1541037 - DNA, 15 bp, Homo sapiens
aagaacaccttgaat

SEQ ID NO: 1541038 - DNA, 15 bp, Homo sapiens
aaagaacaccttgaa

SEQ ID NO: 1541039 - DNA, 15 bp, Homo sapiens
aaaagaacaccttga

SEQ ID NO: 1541040 - DNA, 15 bp, Homo sapiens
aaaaagaacaccttg

SEQ ID NO: 1541041 - DNA, 15 bp, Homo sapiens
aaaaaagaacacctt

SEQ ID NO: 1541042 - DNA, 15 bp, Homo sapiens
aaaaaaagaacacct

SEQ ID NO: 1541043 - DNA, 15 bp, Homo sapiens
gaaaaaaaaagaaca

SEQ ID NO: 1541044 - DNA, 15 bp, Homo sapiens
agaaaaaaaaagaac

SEQ ID NO: 1541045 - DNA, 15 bp, Homo sapiens
aagaaaaaaaaagaa

SEQ ID NO: 1541046 - DNA, 15 bp, Homo sapiens
caagaaaaaaaaaga

SEQ ID NO: 1541047 - DNA, 15 bp, Homo sapiens
ccaagaaaaaaaaag

SEQ ID NO: 1541048 - DNA, 15 bp, Homo sapiens
cacccaagaaaaaaa

SEQ ID NO: 1541049 - DNA, 15 bp, Homo sapiens
acacccaagaaaaaa

SEQ ID NO: 1541050 - DNA, 15 bp, Homo sapiens
aacacccaagaaaaa

SEQ ID NO: 1541051 - DNA, 15 bp, Homo sapiens
gaacacccaagaaaa

SEQ ID NO: 1541052 - DNA, 15 bp, Homo sapiens
tgaacacccaagaaa

SEQ ID NO: 1541053 - DNA, 15 bp, Homo sapiens
atgaacacccaagaa

SEQ ID NO: 1541054 - DNA, 15 bp, Homo sapiens
gatgaacacccaaga

SEQ ID NO: 1541055 - DNA, 15 bp, Homo sapiens
agatgaacacccaag

SEQ ID NO: 1541056 - DNA, 15 bp, Homo sapiens
aagatgaacacccaa

SEQ ID NO: 1541057 - DNA, 15 bp, Homo sapiens
caagatgaacaccca

SEQ ID NO: 1541058 - DNA, 15 bp, Homo sapiens
tcaagatgaacaccc

SEQ ID NO: 1541059 - DNA, 15 bp, Homo sapiens
ttcaagatgaacacc

SEQ ID NO: 1541060 - DNA, 15 bp, Homo sapiens
cttcaagatgaacac

SEQ ID NO: 1541061 - DNA, 15 bp, Homo sapiens
gcttcaagatgaaca

SEQ ID NO: 1541062 - DNA, 15 bp, Homo sapiens
agcttcaagatgaac

SEQ ID NO: 1541063 - DNA, 15 bp, Homo sapiens
aagcttcaagatgaa

SEQ ID NO: 1541064 - DNA, 15 bp, Homo sapiens
taagcttcaagatga

SEQ ID NO: 1541065 - DNA, 15 bp, Homo sapiens
ctaagcttcaagatg

SEQ ID NO: 1541066 - DNA, 15 bp, Homo sapiens
tctaagcttcaagat

SEQ ID NO: 1541067 - DNA, 15 bp, Homo sapiens
ttctaagcttcaaga

SEQ ID NO: 1541068 - DNA, 15 bp, Homo sapiens
attctaagcttcaag

SEQ ID NO: 1541069 - DNA, 15 bp, Homo sapiens
tattctaagcttcaa

SEQ ID NO: 1541070 - DNA, 15 bp, Homo sapiens
ttattctaagcttca

SEQ ID NO: 1541071 - DNA, 15 bp, Homo sapiens
tttattctaagcttc

SEQ ID NO: 1541072 - DNA, 15 bp, Homo sapiens
ctttattctaagctt

SEQ ID NO: 1541073 - DNA, 15 bp, Homo sapiens
gctttattctaagct

SEQ ID NO: 1541074 - DNA, 15 bp, Homo sapiens
agctttattctaagc

SEQ ID NO: 1541075 - DNA, 15 bp, Homo sapiens
cagctttattctaag

SEQ ID NO: 1541076 - DNA, 15 bp, Homo sapiens
ccagctttattctaa

SEQ ID NO: 1541077 - DNA, 15 bp, Homo sapiens
accagctttattcta

SEQ ID NO: 1541078 - DNA, 15 bp, Homo sapiens
taccagctttattct

SEQ ID NO: 1541079 - DNA, 15 bp, Homo sapiens
gtaccagctttattc

SEQ ID NO: 1541080 - DNA, 15 bp, Homo sapiens
agtaccagctttatt

SEQ ID NO: 1541081 - DNA, 15 bp, Homo sapiens
aagtaccagctttat

SEQ ID NO: 1541082 - DNA, 15 bp, Homo sapiens
taagtaccagcttta

SEQ ID NO: 1541083 - DNA, 15 bp, Homo sapiens
ctaagtaccagcttt

SEQ ID NO: 1541084 - DNA, 15 bp, Homo sapiens
tctaagtaccagctt

SEQ ID NO: 1541085 - DNA, 15 bp, Homo sapiens
ttctaagtaccagct

SEQ ID NO: 1541086 - DNA, 15 bp, Homo sapiens
tttctaagtaccagc

SEQ ID NO: 1541087 - DNA, 15 bp, Homo sapiens
atttctaagtaccag

SEQ ID NO: 1541088 - DNA, 15 bp, Homo sapiens
tatttctaagtacca

SEQ ID NO: 1541089 - DNA, 15 bp, Homo sapiens
gtatttctaagtacc

SEQ ID NO: 1541090 - DNA, 15 bp, Homo sapiens
tgtatttctaagtac

SEQ ID NO: 1541091 - DNA, 15 bp, Homo sapiens
atgtatttctaagta

SEQ ID NO: 1541092 - DNA, 15 bp, Homo sapiens
aatgtatttctaagt

SEQ ID NO: 1541093 - DNA, 15 bp, Homo sapiens
aaatgtatttctaag

SEQ ID NO: 1541094 - DNA, 15 bp, Homo sapiens
caaatgtatttctaa

SEQ ID NO: 1541095 - DNA, 15 bp, Homo sapiens
acaaatgtatttcta

SEQ ID NO: 1541096 - DNA, 15 bp, Homo sapiens
tacaaatgtatttct

SEQ ID NO: 1541097 - DNA, 15 bp, Homo sapiens
ttacaaatgtatttc

SEQ ID NO: 1541098 - DNA, 15 bp, Homo sapiens
cttacaaatgtattt

SEQ ID NO: 1541099 - DNA, 15 bp, Homo sapiens
acttacaaatgtatt

SEQ ID NO: 1541100 - DNA, 15 bp, Homo sapiens
cacttacaaatgtat

SEQ ID NO: 1541101 - DNA, 15 bp, Homo sapiens
acacttacaaatgta

SEQ ID NO: 1541102 - DNA, 15 bp, Homo sapiens
tacacttacaaatgt

SEQ ID NO: 1541103 - DNA, 15 bp, Homo sapiens
atacacttacaaatg

SEQ ID NO: 1541104 - DNA, 15 bp, Homo sapiens
aatacacttacaaat

SEQ ID NO: 1541105 - DNA, 15 bp, Homo sapiens
aaatacacttacaaa

SEQ ID NO: 1541106 - DNA, 15 bp, Homo sapiens
caaatacacttacaa

SEQ ID NO: 1541107 - DNA, 15 bp, Homo sapiens
acaaatacacttaca

SEQ ID NO: 1541108 - DNA, 15 bp, Homo sapiens
cacaaatacacttac

SEQ ID NO: 1541109 - DNA, 15 bp, Homo sapiens
tcacaaatacactta

SEQ ID NO: 1541110 - DNA, 15 bp, Homo sapiens
ttcacaaatacactt

SEQ ID NO: 1541111 - DNA, 15 bp, Homo sapiens
gttcacaaatacact

SEQ ID NO: 1541112 - DNA, 15 bp, Homo sapiens
cgttcacaaatacac

SEQ ID NO: 1541113 - DNA, 15 bp, Homo sapiens
gcgttcacaaataca

SEQ ID NO: 1541114 - DNA, 15 bp, Homo sapiens
tgcgttcacaaatac

SEQ ID NO: 1541115 - DNA, 15 bp, Homo sapiens
ttgcgttcacaaata

SEQ ID NO: 1541116 - DNA, 15 bp, Homo sapiens
attgcgttcacaaat

SEQ ID NO: 1541117 - DNA, 15 bp, Homo sapiens
aattgcgttcacaaa

SEQ ID NO: 1541118 - DNA, 15 bp, Homo sapiens
aaattgcgttcacaa

SEQ ID NO: 1541119 - DNA, 15 bp, Homo sapiens
aaaattgcgttcaca

SEQ ID NO: 1541120 - DNA, 15 bp, Homo sapiens
taaaattgcgttcac

SEQ ID NO: 1541121 - DNA, 15 bp, Homo sapiens
gtaaaattgcgttca

SEQ ID NO: 1541122 - DNA, 15 bp, Homo sapiens
agtaaaattgcgttc

SEQ ID NO: 1541123 - DNA, 15 bp, Homo sapiens
cagtaaaattgcgtt

SEQ ID NO: 1541124 - DNA, 15 bp, Homo sapiens
acagtaaaattgcgt

SEQ ID NO: 1541125 - DNA, 15 bp, Homo sapiens
cacagtaaaattgcg

SEQ ID NO: 1541126 - DNA, 15 bp, Homo sapiens
ccacagtaaaattgc

SEQ ID NO: 1541127 - DNA, 15 bp, Homo sapiens
accacagtaaaattg

SEQ ID NO: 1541128 - DNA, 15 bp, Homo sapiens
caccacagtaaaatt

SEQ ID NO: 1541129 - DNA, 15 bp, Homo sapiens
ccaccacagtaaaat

SEQ ID NO: 1541130 - DNA, 15 bp, Homo sapiens
accaccacagtaaaa

SEQ ID NO: 1541131 - DNA, 15 bp, Homo sapiens
aaccaccacagtaaa

SEQ ID NO: 1541132 - DNA, 15 bp, Homo sapiens
caaccaccacagtaa

SEQ ID NO: 1541133 - DNA, 15 bp, Homo sapiens
acaaccaccacagta

SEQ ID NO: 1541134 - DNA, 15 bp, Homo sapiens
gacaaccaccacagt

SEQ ID NO: 1541135 - DNA, 15 bp, Homo sapiens
agacaaccaccacag

SEQ ID NO: 1541136 - DNA, 15 bp, Homo sapiens
gagacaaccaccaca

SEQ ID NO: 1541137 - DNA, 15 bp, Homo sapiens
agagacaaccaccac

SEQ ID NO: 1541138 - DNA, 15 bp, Homo sapiens
aagagacaaccacca

SEQ ID NO: 1541139 - DNA, 15 bp, Homo sapiens
aaagagacaaccacc

SEQ ID NO: 1541140 - DNA, 15 bp, Homo sapiens
aaaagagacaaccac

SEQ ID NO: 1541141 - DNA, 15 bp, Homo sapiens
gaaaagagacaacca

SEQ ID NO: 1541142 - DNA, 15 bp, Homo sapiens
tgaaaagagacaacc

SEQ ID NO: 1541143 - DNA, 15 bp, Homo sapiens
atgaaaagagacaac

SEQ ID NO: 1541144 - DNA, 15 bp, Homo sapiens
aatgaaaagagacaa

SEQ ID NO: 1541145 - DNA, 15 bp, Homo sapiens
aaatgaaaagagaca

SEQ ID NO: 1541146 - DNA, 15 bp, Homo sapiens
taaatgaaaagagac

SEQ ID NO: 1541147 - DNA, 15 bp, Homo sapiens
ataaatgaaaagaga

SEQ ID NO: 1541148 - DNA, 15 bp, Homo sapiens
tataaatgaaaagag

SEQ ID NO: 1541149 - DNA, 15 bp, Homo sapiens
atataaatgaaaaga

SEQ ID NO: 1541150 - DNA, 15 bp, Homo sapiens
aatataaatgaaaag

SEQ ID NO: 1541151 - DNA, 15 bp, Homo sapiens
aaatataaatgaaaa

SEQ ID NO: 1541152 - DNA, 15 bp, Homo sapiens
gaaatataaatgaaa

SEQ ID NO: 1541153 - DNA, 15 bp, Homo sapiens
ggaaatataaatgaa

SEQ ID NO: 1541154 - DNA, 15 bp, Homo sapiens
gggaaatataaatga

SEQ ID NO: 1541155 - DNA, 15 bp, Homo sapiens
agggaaatataaatg

SEQ ID NO: 1541156 - DNA, 15 bp, Homo sapiens
cagggaaatataaat

SEQ ID NO: 1541157 - DNA, 15 bp, Homo sapiens
ccagggaaatataaa

SEQ ID NO: 1541158 - DNA, 15 bp, Homo sapiens
tccagggaaatataa

SEQ ID NO: 1541159 - DNA, 15 bp, Homo sapiens
gtccagggaaatata

SEQ ID NO: 1541160 - DNA, 15 bp, Homo sapiens
agtccagggaaatat

SEQ ID NO: 1541161 - DNA, 15 bp, Homo sapiens
cagtccagggaaata

SEQ ID NO: 1541162 - DNA, 15 bp, Homo sapiens
tcagtccagggaaat

SEQ ID NO: 1541163 - DNA, 15 bp, Homo sapiens
gtcagtccagggaaa

SEQ ID NO: 1541164 - DNA, 15 bp, Homo sapiens
agtcagtccagggaa

SEQ ID NO: 1541165 - DNA, 15 bp, Homo sapiens
cagtcagtccaggga

SEQ ID NO: 1541166 - DNA, 15 bp, Homo sapiens
acagtcagtccaggg

SEQ ID NO: 1541167 - DNA, 15 bp, Homo sapiens
cacagtcagtccagg

SEQ ID NO: 1541168 - DNA, 15 bp, Homo sapiens
acacagtcagtccag

SEQ ID NO: 1541169 - DNA, 15 bp, Homo sapiens
gacacagtcagtcca

SEQ ID NO: 1541170 - DNA, 15 bp, Homo sapiens
agacacagtcagtcc

SEQ ID NO: 1541171 - DNA, 15 bp, Homo sapiens
aagacacagtcagtc

SEQ ID NO: 1541172 - DNA, 15 bp, Homo sapiens
aaagacacagtcagt

SEQ ID NO: 1541173 - DNA, 15 bp, Homo sapiens
gaaagacacagtcag

SEQ ID NO: 1541174 - DNA, 15 bp, Homo sapiens
agaaagacacagtca

SEQ ID NO: 1541175 - DNA, 15 bp, Homo sapiens
cagaaagacacagtc

SEQ ID NO: 1541176 - DNA, 15 bp, Homo sapiens
tcagaaagacacagt

SEQ ID NO: 1541177 - DNA, 15 bp, Homo sapiens
ttcagaaagacacag

SEQ ID NO: 1541178 - DNA, 15 bp, Homo sapiens
cttcagaaagacaca

SEQ ID NO: 1541179 - DNA, 15 bp, Homo sapiens
ccttcagaaagacac

SEQ ID NO: 1541180 - DNA, 15 bp, Homo sapiens
gccttcagaaagaca

SEQ ID NO: 1541181 - DNA, 15 bp, Homo sapiens
tgccttcagaaagac

SEQ ID NO: 1541182 - DNA, 15 bp, Homo sapiens
ttgccttcagaaaga

SEQ ID NO: 1541183 - DNA, 15 bp, Homo sapiens
tttgccttcagaaag

SEQ ID NO: 1541184 - DNA, 15 bp, Homo sapiens
ctttgccttcagaaa

SEQ ID NO: 1541185 - DNA, 15 bp, Homo sapiens
cctttgccttcagaa

SEQ ID NO: 1541186 - DNA, 15 bp, Homo sapiens
gcctttgccttcaga

SEQ ID NO: 1541187 - DNA, 15 bp, Homo sapiens
tgcctttgccttcag

SEQ ID NO: 1541188 - DNA, 15 bp, Homo sapiens
atgcctttgccttca

SEQ ID NO: 1541189 - DNA, 15 bp, Homo sapiens
tatgcctttgccttc

SEQ ID NO: 1541190 - DNA, 15 bp, Homo sapiens
gtatgcctttgcctt

SEQ ID NO: 1541191 - DNA, 15 bp, Homo sapiens
ggtatgcctttgcct

SEQ ID NO: 1541192 - DNA, 15 bp, Homo sapiens
tggtatgcctttgcc

SEQ ID NO: 1541193 - DNA, 15 bp, Homo sapiens
ctggtatgcctttgc

SEQ ID NO: 1541194 - DNA, 15 bp, Homo sapiens
actggtatgcctttg

SEQ ID NO: 1541195 - DNA, 15 bp, Homo sapiens
aactggtatgccttt

SEQ ID NO: 1541196 - DNA, 15 bp, Homo sapiens
aaactggtatgcctt

SEQ ID NO: 1541197 - DNA, 15 bp, Homo sapiens
aaaactggtatgcct

SEQ ID NO: 1541198 - DNA, 15 bp, Homo sapiens
gaaaactggtatgcc

SEQ ID NO: 1541199 - DNA, 15 bp, Homo sapiens
agaaaactggtatgc

SEQ ID NO: 1541200 - DNA, 15 bp, Homo sapiens
gagaaaactggtatg

SEQ ID NO: 1541201 - DNA, 15 bp, Homo sapiens
tgagaaaactggtat

SEQ ID NO: 1541202 - DNA, 15 bp, Homo sapiens
ttgagaaaactggta

SEQ ID NO: 1541203 - DNA, 15 bp, Homo sapiens
gttgagaaaactggt

SEQ ID NO: 1541204 - DNA, 15 bp, Homo sapiens
ggttgagaaaactgg

SEQ ID NO: 1541205 - DNA, 15 bp, Homo sapiens
aggttgagaaaactg

SEQ ID NO: 1541206 - DNA, 15 bp, Homo sapiens
taggttgagaaaact

SEQ ID NO: 1541207 - DNA, 15 bp, Homo sapiens
ttaggttgagaaaac

SEQ ID NO: 1541208 - DNA, 15 bp, Homo sapiens
tttaggttgagaaaa

SEQ ID NO: 1541209 - DNA, 15 bp, Homo sapiens
ttttaggttgagaaa

SEQ ID NO: 1541210 - DNA, 15 bp, Homo sapiens
tttttaggttgagaa

SEQ ID NO: 1541211 - DNA, 15 bp, Homo sapiens
atttttaggttgaga

SEQ ID NO: 1541212 - DNA, 15 bp, Homo sapiens
gatttttaggttgag

SEQ ID NO: 1541213 - DNA, 15 bp, Homo sapiens
agatttttaggttga

SEQ ID NO: 1541214 - DNA, 15 bp, Homo sapiens
cagatttttaggttg

SEQ ID NO: 1541215 - DNA, 15 bp, Homo sapiens
tcagatttttaggtt

SEQ ID NO: 1541216 - DNA, 15 bp, Homo sapiens
ttcagatttttaggt

SEQ ID NO: 1541217 - DNA, 15 bp, Homo sapiens
cttcagatttttagg

SEQ ID NO: 1541218 - DNA, 15 bp, Homo sapiens
tcttcagatttttag

SEQ ID NO: 1541219 - DNA, 15 bp, Homo sapiens
ttcttcagattttta

SEQ ID NO: 1541220 - DNA, 15 bp, Homo sapiens
tttcttcagattttt

SEQ ID NO: 1541221 - DNA, 15 bp, Homo sapiens
ttttcttcagatttt

SEQ ID NO: 1541222 - DNA, 15 bp, Homo sapiens
tttttcttcagattt

SEQ ID NO: 1541223 - DNA, 15 bp, Homo sapiens
ttttttcttcagatt

SEQ ID NO: 1541224 - DNA, 15 bp, Homo sapiens
tttttttcttcagat

SEQ ID NO: 1541225 - DNA, 15 bp, Homo sapiens
tttttttttttcttc

SEQ ID NO: 1541226 - DNA, 15 bp, Homo sapiens
ctgtttttttttttt

SEQ ID NO: 1541227 - DNA, 15 bp, Homo sapiens
gctgttttttttttt

SEQ ID NO: 1541228 - DNA, 15 bp, Homo sapiens
tgctgtttttttttt

SEQ ID NO: 1541229 - DNA, 15 bp, Homo sapiens
ttgctgttttttttt

SEQ ID NO: 1541230 - DNA, 15 bp, Homo sapiens
tttgctgtttttttt

SEQ ID NO: 1541231 - DNA, 15 bp, Homo sapiens
atttgctgttttttt

SEQ ID NO: 1541232 - DNA, 15 bp, Homo sapiens
aatttgctgtttttt

SEQ ID NO: 1541233 - DNA, 15 bp, Homo sapiens
aaatttgctgttttt

SEQ ID NO: 1541234 - DNA, 15 bp, Homo sapiens
gaaatttgctgtttt

SEQ ID NO: 1541235 - DNA, 15 bp, Homo sapiens
ggaaatttgctgttt

SEQ ID NO: 1541236 - DNA, 15 bp, Homo sapiens
aggaaatttgctgtt

SEQ ID NO: 1541237 - DNA, 15 bp, Homo sapiens
gaggaaatttgctgt

SEQ ID NO: 1541238 - DNA, 15 bp, Homo sapiens
agaggaaatttgctg

SEQ ID NO: 1541239 - DNA, 15 bp, Homo sapiens
cagaggaaatttgct

SEQ ID NO: 1541240 - DNA, 15 bp, Homo sapiens
tcagaggaaatttgc

SEQ ID NO: 1541241 - DNA, 15 bp, Homo sapiens
ctcagaggaaatttg

SEQ ID NO: 1541242 - DNA, 15 bp, Homo sapiens
actcagaggaaattt

SEQ ID NO: 1541243 - DNA, 15 bp, Homo sapiens
tactcagaggaaatt

SEQ ID NO: 1541244 - DNA, 15 bp, Homo sapiens
ctactcagaggaaat

SEQ ID NO: 1541245 - DNA, 15 bp, Homo sapiens
tctactcagaggaaa

SEQ ID NO: 1541246 - DNA, 15 bp, Homo sapiens
gtctactcagaggaa

SEQ ID NO: 1541247 - DNA, 15 bp, Homo sapiens
agtctactcagagga

SEQ ID NO: 1541248 - DNA, 15 bp, Homo sapiens
aagtctactcagagg

SEQ ID NO: 1541249 - DNA, 15 bp, Homo sapiens
taagtctactcagag

SEQ ID NO: 1541250 - DNA, 15 bp, Homo sapiens
ttaagtctactcaga

SEQ ID NO: 1541251 - DNA, 15 bp, Homo sapiens
tttaagtctactcag

SEQ ID NO: 1541252 - DNA, 15 bp, Homo sapiens
ttttaagtctactca

SEQ ID NO: 1541253 - DNA, 15 bp, Homo sapiens
cttttaagtctactc

SEQ ID NO: 1541254 - DNA, 15 bp, Homo sapiens
acttttaagtctact

SEQ ID NO: 1541255 - DNA, 15 bp, Homo sapiens
aacttttaagtctac

SEQ ID NO: 1541256 - DNA, 15 bp, Homo sapiens
gaacttttaagtcta

SEQ ID NO: 1541257 - DNA, 15 bp, Homo sapiens
tgaacttttaagtct

SEQ ID NO: 1541258 - DNA, 15 bp, Homo sapiens
ttgaacttttaagtc

SEQ ID NO: 1541259 - DNA, 15 bp, Homo sapiens
gttgaacttttaagt

SEQ ID NO: 1541260 - DNA, 15 bp, Homo sapiens
tgttgaacttttaag

SEQ ID NO: 1541261 - DNA, 15 bp, Homo sapiens
ttgttgaacttttaa

SEQ ID NO: 1541262 - DNA, 15 bp, Homo sapiens
tttgttgaactttta

SEQ ID NO: 1541263 - DNA, 15 bp, Homo sapiens
ttttgttgaactttt

SEQ ID NO: 1541264 - DNA, 15 bp, Homo sapiens
cttttgttgaacttt

SEQ ID NO: 1541265 - DNA, 15 bp, Homo sapiens
acttttgttgaactt

SEQ ID NO: 1541266 - DNA, 15 bp, Homo sapiens
aacttttgttgaact

SEQ ID NO: 1541267 - DNA, 15 bp, Homo sapiens
caacttttgttgaac

SEQ ID NO: 1541268 - DNA, 15 bp, Homo sapiens
gcaacttttgttgaa

SEQ ID NO: 1541269 - DNA, 15 bp, Homo sapiens
agcaacttttgttga

SEQ ID NO: 1541270 - DNA, 15 bp, Homo sapiens
cagcaacttttgttg

SEQ ID NO: 1541271 - DNA, 15 bp, Homo sapiens
ccagcaacttttgtt

SEQ ID NO: 1541272 - DNA, 15 bp, Homo sapiens
cccagcaacttttgt

SEQ ID NO: 1541273 - DNA, 15 bp, Homo sapiens
acccagcaacttttg

SEQ ID NO: 1541274 - DNA, 15 bp, Homo sapiens
aacccagcaactttt

SEQ ID NO: 1541275 - DNA, 15 bp, Homo sapiens
aaacccagcaacttt

SEQ ID NO: 1541276 - DNA, 15 bp, Homo sapiens
aaaacccagcaactt

SEQ ID NO: 1541277 - DNA, 15 bp, Homo sapiens
gaaaacccagcaact

SEQ ID NO: 1541278 - DNA, 15 bp, Homo sapiens
agaaaacccagcaac

SEQ ID NO: 1541279 - DNA, 15 bp, Homo sapiens
aagaaaacccagcaa

SEQ ID NO: 1541280 - DNA, 15 bp, Homo sapiens
aaagaaaacccagca

SEQ ID NO: 1541281 - DNA, 15 bp, Homo sapiens
aaaagaaaacccagc

SEQ ID NO: 1541282 - DNA, 15 bp, Homo sapiens
taaaagaaaacccag

SEQ ID NO: 1541283 - DNA, 15 bp, Homo sapiens
ttaaaagaaaaccca

SEQ ID NO: 1541284 - DNA, 15 bp, Homo sapiens
tttaaaagaaaaccc

SEQ ID NO: 1541285 - DNA, 15 bp, Homo sapiens
ctttaaaagaaaacc

SEQ ID NO: 1541286 - DNA, 15 bp, Homo sapiens
gctttaaaagaaaac

SEQ ID NO: 1541287 - DNA, 15 bp, Homo sapiens
tgctttaaaagaaaa

SEQ ID NO: 1541288 - DNA, 15 bp, Homo sapiens
atgctttaaaagaaa

SEQ ID NO: 1541289 - DNA, 15 bp, Homo sapiens
gatgctttaaaagaa

SEQ ID NO: 1541290 - DNA, 15 bp, Homo sapiens
tgatgctttaaaaga

SEQ ID NO: 1541291 - DNA, 15 bp, Homo sapiens
atgatgctttaaaag

SEQ ID NO: 1541292 - DNA, 15 bp, Homo sapiens
aatgatgctttaaaa

SEQ ID NO: 1541293 - DNA, 15 bp, Homo sapiens
aaatgatgctttaaa

SEQ ID NO: 1541294 - DNA, 15 bp, Homo sapiens
taaatgatgctttaa

SEQ ID NO: 1541295 - DNA, 15 bp, Homo sapiens
ataaatgatgcttta

SEQ ID NO: 1541296 - DNA, 15 bp, Homo sapiens
tataaatgatgcttt

SEQ ID NO: 1541297 - DNA, 15 bp, Homo sapiens
gtataaatgatgctt

SEQ ID NO: 1541298 - DNA, 15 bp, Homo sapiens
ggtataaatgatgct

SEQ ID NO: 1541299 - DNA, 15 bp, Homo sapiens
aggtataaatgatgc

SEQ ID NO: 1541300 - DNA, 15 bp, Homo sapiens
taggtataaatgatg

SEQ ID NO: 1541301 - DNA, 15 bp, Homo sapiens
ctaggtataaatgat

SEQ ID NO: 1541302 - DNA, 15 bp, Homo sapiens
gctaggtataaatga

SEQ ID NO: 1541303 - DNA, 15 bp, Homo sapiens
tgctaggtataaatg

SEQ ID NO: 1541304 - DNA, 15 bp, Homo sapiens
atgctaggtataaat

SEQ ID NO: 1541305 - DNA, 15 bp, Homo sapiens
aatgctaggtataaa

SEQ ID NO: 1541306 - DNA, 15 bp, Homo sapiens
aaatgctaggtataa

SEQ ID NO: 1541307 - DNA, 15 bp, Homo sapiens
aaaatgctaggtata

SEQ ID NO: 1541308 - DNA, 15 bp, Homo sapiens
aaaaatgctaggtat

SEQ ID NO: 1541309 - DNA, 15 bp, Homo sapiens
aaaaaatgctaggta

SEQ ID NO: 1541310 - DNA, 15 bp, Homo sapiens
gaaaaaatgctaggt

SEQ ID NO: 1541311 - DNA, 15 bp, Homo sapiens
agaaaaaatgctagg

SEQ ID NO: 1541312 - DNA, 15 bp, Homo sapiens
cagaaaaaatgctag

SEQ ID NO: 1541313 - DNA, 15 bp, Homo sapiens
tcagaaaaaatgcta

SEQ ID NO: 1541314 - DNA, 15 bp, Homo sapiens
atcagaaaaaatgct

SEQ ID NO: 1541315 - DNA, 15 bp, Homo sapiens
aatcagaaaaaatgc

SEQ ID NO: 1541316 - DNA, 15 bp, Homo sapiens
aaatcagaaaaaatg

SEQ ID NO: 1541317 - DNA, 15 bp, Homo sapiens
aaaatcagaaaaaat

SEQ ID NO: 1541318 - DNA, 15 bp, Homo sapiens
caaaatcagaaaaaa

SEQ ID NO: 1541319 - DNA, 15 bp, Homo sapiens
tcaaaatcagaaaaa

SEQ ID NO: 1541320 - DNA, 15 bp, Homo sapiens
gtcaaaatcagaaaa

SEQ ID NO: 1541321 - DNA, 15 bp, Homo sapiens
tgtcaaaatcagaaa

SEQ ID NO: 1541322 - DNA, 15 bp, Homo sapiens
atgtcaaaatcagaa

SEQ ID NO: 1541323 - DNA, 15 bp, Homo sapiens
tatgtcaaaatcaga

SEQ ID NO: 1541324 - DNA, 15 bp, Homo sapiens
ttatgtcaaaatcag

SEQ ID NO: 1541325 - DNA, 15 bp, Homo sapiens
attatgtcaaaatca

SEQ ID NO: 1541326 - DNA, 15 bp, Homo sapiens
aattatgtcaaaatc

SEQ ID NO: 1541327 - DNA, 15 bp, Homo sapiens
caattatgtcaaaat

SEQ ID NO: 1541328 - DNA, 15 bp, Homo sapiens
acaattatgtcaaaa

SEQ ID NO: 1541329 - DNA, 15 bp, Homo sapiens
tacaattatgtcaaa

SEQ ID NO: 1541330 - DNA, 15 bp, Homo sapiens
ttacaattatgtcaa

SEQ ID NO: 1541331 - DNA, 15 bp, Homo sapiens
tttacaattatgtca

SEQ ID NO: 1541332 - DNA, 15 bp, Homo sapiens
ttttacaattatgtc

SEQ ID NO: 1541333 - DNA, 15 bp, Homo sapiens
tttttacaattatgt

SEQ ID NO: 1541334 - DNA, 15 bp, Homo sapiens
ttttttacaattatg

SEQ ID NO: 1541335 - DNA, 15 bp, Homo sapiens
tttttttacaattat

SEQ ID NO: 1541336 - DNA, 15 bp, Homo sapiens
ttttttttacaatta

SEQ ID NO: 1541337 - DNA, 15 bp, Homo sapiens
tttttttttacaatt

SEQ ID NO: 1541338 - DNA, 15 bp, Homo sapiens
atttttttttacaat

SEQ ID NO: 1541339 - DNA, 15 bp, Homo sapiens
catttttttttacaa

SEQ ID NO: 1541340 - DNA, 15 bp, Homo sapiens
acatttttttttaca

SEQ ID NO: 1541341 - DNA, 15 bp, Homo sapiens
cacatttttttttac

SEQ ID NO: 1541342 - DNA, 15 bp, Homo sapiens
acacattttttttta

SEQ ID NO: 1541343 - DNA, 15 bp, Homo sapiens
tacacattttttttt

SEQ ID NO: 1541344 - DNA, 15 bp, Homo sapiens
ttacacatttttttt

SEQ ID NO: 1541345 - DNA, 15 bp, Homo sapiens
attacacattttttt

SEQ ID NO: 1541346 - DNA, 15 bp, Homo sapiens
tattacacatttttt

SEQ ID NO: 1541347 - DNA, 15 bp, Homo sapiens
ttattacacattttt

SEQ ID NO: 1541348 - DNA, 15 bp, Homo sapiens
tttattacacatttt

SEQ ID NO: 1541349 - DNA, 15 bp, Homo sapiens
ttttattacacattt

SEQ ID NO: 1541350 - DNA, 15 bp, Homo sapiens
attttattacacatt

SEQ ID NO: 1541351 - DNA, 15 bp, Homo sapiens
tattttattacacat

SEQ ID NO: 1541352 - DNA, 15 bp, Homo sapiens
ctattttattacaca

SEQ ID NO: 1541353 - DNA, 15 bp, Homo sapiens
tctattttattacac

SEQ ID NO: 1541354 - DNA, 15 bp, Homo sapiens
ttctattttattaca

SEQ ID NO: 1541355 - DNA, 15 bp, Homo sapiens
tttctattttattac

SEQ ID NO: 1541356 - DNA, 15 bp, Homo sapiens
atttctattttatta

SEQ ID NO: 1541357 - DNA, 15 bp, Homo sapiens
tatttctattttatt

SEQ ID NO: 1541358 - DNA, 15 bp, Homo sapiens
ctatttctattttat

SEQ ID NO: 1541359 - DNA, 15 bp, Homo sapiens
tctatttctatttta

SEQ ID NO: 1541360 - DNA, 15 bp, Homo sapiens
ctctatttctatttt

SEQ ID NO: 1541361 - DNA, 15 bp, Homo sapiens
gctctatttctattt

SEQ ID NO: 1541362 - DNA, 15 bp, Homo sapiens
tgctctatttctatt

SEQ ID NO: 1541363 - DNA, 15 bp, Homo sapiens
atgctctatttctat

SEQ ID NO: 1541364 - DNA, 15 bp, Homo sapiens
gatgctctatttcta

SEQ ID NO: 1541365 - DNA, 15 bp, Homo sapiens
tgatgctctatttct

SEQ ID NO: 1541366 - DNA, 15 bp, Homo sapiens
ctgatgctctatttc

SEQ ID NO: 1541367 - DNA, 15 bp, Homo sapiens
cctgatgctctattt

SEQ ID NO: 1541368 - DNA, 15 bp, Homo sapiens
tcctgatgctctatt

SEQ ID NO: 1541369 - DNA, 15 bp, Homo sapiens
atcctgatgctctat

SEQ ID NO: 1541370 - DNA, 15 bp, Homo sapiens
gatcctgatgctcta

SEQ ID NO: 1541371 - DNA, 15 bp, Homo sapiens
agatcctgatgctct

SEQ ID NO: 1541372 - DNA, 15 bp, Homo sapiens
aagatcctgatgctc

SEQ ID NO: 1541373 - DNA, 15 bp, Homo sapiens
caagatcctgatgct

SEQ ID NO: 1541374 - DNA, 15 bp, Homo sapiens
tcaagatcctgatgc

SEQ ID NO: 1541375 - DNA, 15 bp, Homo sapiens
atcaagatcctgatg

SEQ ID NO: 1541376 - DNA, 15 bp, Homo sapiens
catcaagatcctgat

SEQ ID NO: 1541377 - DNA, 15 bp, Homo sapiens
tcatcaagatcctga

SEQ ID NO: 1541378 - DNA, 15 bp, Homo sapiens
atcatcaagatcctg

SEQ ID NO: 1541379 - DNA, 15 bp, Homo sapiens
aatcatcaagatcct

SEQ ID NO: 1541380 - DNA, 15 bp, Homo sapiens
aaatcatcaagatcc

SEQ ID NO: 1541381 - DNA, 15 bp, Homo sapiens
caaatcatcaagatc

SEQ ID NO: 1541382 - DNA, 15 bp, Homo sapiens
ccaaatcatcaagat

SEQ ID NO: 1541383 - DNA, 15 bp, Homo sapiens
cccaaatcatcaaga

SEQ ID NO: 1541384 - DNA, 15 bp, Homo sapiens
tcccaaatcatcaag

SEQ ID NO: 1541385 - DNA, 15 bp, Homo sapiens
atcccaaatcatcaa

SEQ ID NO: 1541386 - DNA, 15 bp, Homo sapiens
catcccaaatcatca

SEQ ID NO: 1541387 - DNA, 15 bp, Homo sapiens
tcatcccaaatcatc

SEQ ID NO: 1541388 - DNA, 15 bp, Homo sapiens
ttcatcccaaatcat

SEQ ID NO: 1541389 - DNA, 15 bp, Homo sapiens
cttcatcccaaatca

SEQ ID NO: 1541390 - DNA, 15 bp, Homo sapiens
acttcatcccaaatc

SEQ ID NO: 1541391 - DNA, 15 bp, Homo sapiens
cacttcatcccaaat

SEQ ID NO: 1541392 - DNA, 15 bp, Homo sapiens
ccacttcatcccaaa

SEQ ID NO: 1541393 - DNA, 15 bp, Homo sapiens
gccacttcatcccaa

SEQ ID NO: 1541394 - DNA, 15 bp, Homo sapiens
tgccacttcatccca

SEQ ID NO: 1541395 - DNA, 15 bp, Homo sapiens
ctgccacttcatccc

SEQ ID NO: 1541396 - DNA, 15 bp, Homo sapiens
cctgccacttcatcc

SEQ ID NO: 1541397 - DNA, 15 bp, Homo sapiens
acctgccacttcatc

SEQ ID NO: 1541398 - DNA, 15 bp, Homo sapiens
aacctgccacttcat

SEQ ID NO: 1541399 - DNA, 15 bp, Homo sapiens
taacctgccacttca

SEQ ID NO: 1541400 - DNA, 15 bp, Homo sapiens
ataacctgccacttc

SEQ ID NO: 1541401 - DNA, 15 bp, Homo sapiens
tataacctgccactt

SEQ ID NO: 1541402 - DNA, 15 bp, Homo sapiens
ttataacctgccact

SEQ ID NO: 1541403 - DNA, 15 bp, Homo sapiens
cttataacctgccac

SEQ ID NO: 1541404 - DNA, 15 bp, Homo sapiens
gcttataacctgcca

SEQ ID NO: 1541405 - DNA, 15 bp, Homo sapiens
tgcttataacctgcc

SEQ ID NO: 1541406 - DNA, 15 bp, Homo sapiens
atgcttataacctgc

SEQ ID NO: 1541407 - DNA, 15 bp, Homo sapiens
gatgcttataacctg

SEQ ID NO: 1541408 - DNA, 15 bp, Homo sapiens
agatgcttataacct

SEQ ID NO: 1541409 - DNA, 15 bp, Homo sapiens
gagatgcttataacc

SEQ ID NO: 1541410 - DNA, 15 bp, Homo sapiens
tgagatgcttataac

SEQ ID NO: 1541411 - DNA, 15 bp, Homo sapiens
ttgagatgcttataa

SEQ ID NO: 1541412 - DNA, 15 bp, Homo sapiens
gttgagatgcttata

SEQ ID NO: 1541413 - DNA, 15 bp, Homo sapiens
tgttgagatgcttat

SEQ ID NO: 1541414 - DNA, 15 bp, Homo sapiens
ctgttgagatgctta

SEQ ID NO: 1541415 - DNA, 15 bp, Homo sapiens
tctgttgagatgctt

SEQ ID NO: 1541416 - DNA, 15 bp, Homo sapiens
atctgttgagatgct

SEQ ID NO: 1541417 - DNA, 15 bp, Homo sapiens
tatctgttgagatgc

SEQ ID NO: 1541418 - DNA, 15 bp, Homo sapiens
ttatctgttgagatg

SEQ ID NO: 1541419 - DNA, 15 bp, Homo sapiens
attatctgttgagat

SEQ ID NO: 1541420 - DNA, 15 bp, Homo sapiens
aattatctgttgaga

SEQ ID NO: 1541421 - DNA, 15 bp, Homo sapiens
caattatctgttgag

SEQ ID NO: 1541422 - DNA, 15 bp, Homo sapiens
tcaattatctgttga

SEQ ID NO: 1541423 - DNA, 15 bp, Homo sapiens
ttcaattatctgttg

SEQ ID NO: 1541424 - DNA, 15 bp, Homo sapiens
tttcaattatctgtt

SEQ ID NO: 1541425 - DNA, 15 bp, Homo sapiens
ttttcaattatctgt

SEQ ID NO: 1541426 - DNA, 15 bp, Homo sapiens
attttcaattatctg

SEQ ID NO: 1541427 - DNA, 15 bp, Homo sapiens
cattttcaattatct

SEQ ID NO: 1541428 - DNA, 15 bp, Homo sapiens
acattttcaattatc

SEQ ID NO: 1541429 - DNA, 15 bp, Homo sapiens
aacattttcaattat

SEQ ID NO: 1541430 - DNA, 15 bp, Homo sapiens
caacattttcaatta

SEQ ID NO: 1541431 - DNA, 15 bp, Homo sapiens
tcaacattttcaatt

SEQ ID NO: 1541432 - DNA, 15 bp, Homo sapiens
ttcaacattttcaat

SEQ ID NO: 1541433 - DNA, 15 bp, Homo sapiens
attcaacattttcaa

SEQ ID NO: 1541434 - DNA, 15 bp, Homo sapiens
aattcaacattttca

SEQ ID NO: 1541435 - DNA, 15 bp, Homo sapiens
aaattcaacattttc

SEQ ID NO: 1541436 - DNA, 15 bp, Homo sapiens
gaaattcaacatttt

SEQ ID NO: 1541437 - DNA, 15 bp, Homo sapiens
ggaaattcaacattt

SEQ ID NO: 1541438 - DNA, 15 bp, Homo sapiens
cggaaattcaacatt

SEQ ID NO: 1541439 - DNA, 15 bp, Homo sapiens
gcggaaattcaacat

SEQ ID NO: 1541440 - DNA, 15 bp, Homo sapiens
agcggaaattcaaca

SEQ ID NO: 1541441 - DNA, 15 bp, Homo sapiens
aagcggaaattcaac

SEQ ID NO: 1541442 - DNA, 15 bp, Homo sapiens
aaagcggaaattcaa

SEQ ID NO: 1541443 - DNA, 15 bp, Homo sapiens
caaagcggaaattca

SEQ ID NO: 1541444 - DNA, 15 bp, Homo sapiens
ccaaagcggaaattc

SEQ ID NO: 1541445 - DNA, 15 bp, Homo sapiens
gccaaagcggaaatt

SEQ ID NO: 1541446 - DNA, 15 bp, Homo sapiens
ggccaaagcggaaat

SEQ ID NO: 1541447 - DNA, 15 bp, Homo sapiens
gggccaaagcggaaa

SEQ ID NO: 1541448 - DNA, 15 bp, Homo sapiens
agggccaaagcggaa

SEQ ID NO: 1541449 - DNA, 15 bp, Homo sapiens
cagggccaaagcgga

SEQ ID NO: 1541450 - DNA, 15 bp, Homo sapiens
tcagggccaaagcgg

SEQ ID NO: 1541451 - DNA, 15 bp, Homo sapiens
ctcagggccaaagcg

SEQ ID NO: 1541452 - DNA, 15 bp, Homo sapiens
gctcagggccaaagc

SEQ ID NO: 1541453 - DNA, 15 bp, Homo sapiens
agctcagggccaaag

SEQ ID NO: 1541454 - DNA, 15 bp, Homo sapiens
aagctcagggccaaa

SEQ ID NO: 1541455 - DNA, 15 bp, Homo sapiens
caagctcagggccaa

SEQ ID NO: 1541456 - DNA, 15 bp, Homo sapiens
gcaagctcagggcca

SEQ ID NO: 1541457 - DNA, 15 bp, Homo sapiens
agcaagctcagggcc

SEQ ID NO: 1541458 - DNA, 15 bp, Homo sapiens
cagcaagctcagggc

SEQ ID NO: 1541459 - DNA, 15 bp, Homo sapiens
ccagcaagctcaggg

SEQ ID NO: 1541460 - DNA, 15 bp, Homo sapiens
tccagcaagctcagg

SEQ ID NO: 1541461 - DNA, 15 bp, Homo sapiens
ttccagcaagctcag

SEQ ID NO: 1541462 - DNA, 15 bp, Homo sapiens
tttccagcaagctca

SEQ ID NO: 1541463 - DNA, 15 bp, Homo sapiens
gtttccagcaagctc

SEQ ID NO: 1541464 - DNA, 15 bp, Homo sapiens
agtttccagcaagct

SEQ ID NO: 1541465 - DNA, 15 bp, Homo sapiens
tagtttccagcaagc

SEQ ID NO: 1541466 - DNA, 15 bp, Homo sapiens
ctagtttccagcaag

SEQ ID NO: 1541467 - DNA, 15 bp, Homo sapiens
actagtttccagcaa

SEQ ID NO: 1541468 - DNA, 15 bp, Homo sapiens
tactagtttccagca

SEQ ID NO: 1541469 - DNA, 15 bp, Homo sapiens
gtactagtttccagc

SEQ ID NO: 1541470 - DNA, 15 bp, Homo sapiens
tgtactagtttccag

SEQ ID NO: 1541471 - DNA, 15 bp, Homo sapiens
ttgtactagtttcca

SEQ ID NO: 1541472 - DNA, 15 bp, Homo sapiens
tttgtactagtttcc

SEQ ID NO: 1541473 - DNA, 15 bp, Homo sapiens
ttttgtactagtttc

SEQ ID NO: 1541474 - DNA, 15 bp, Homo sapiens
tttttgtactagttt

SEQ ID NO: 1541475 - DNA, 15 bp, Homo sapiens
ctttttgtactagtt

SEQ ID NO: 1541476 - DNA, 15 bp, Homo sapiens
cctttttgtactagt

SEQ ID NO: 1541477 - DNA, 15 bp, Homo sapiens
tcctttttgtactag

SEQ ID NO: 1541478 - DNA, 15 bp, Homo sapiens
ctcctttttgtacta

SEQ ID NO: 1541479 - DNA, 15 bp, Homo sapiens
tctcctttttgtact

SEQ ID NO: 1541480 - DNA, 15 bp, Homo sapiens
gtctcctttttgtac

SEQ ID NO: 1541481 - DNA, 15 bp, Homo sapiens
tgtctcctttttgta

SEQ ID NO: 1541482 - DNA, 15 bp, Homo sapiens
ttgtctcctttttgt

SEQ ID NO: 1541483 - DNA, 15 bp, Homo sapiens
cttgtctcctttttg

SEQ ID NO: 1541484 - DNA, 15 bp, Homo sapiens
acttgtctccttttt

SEQ ID NO: 1541485 - DNA, 15 bp, Homo sapiens
aacttgtctcctttt

SEQ ID NO: 1541486 - DNA, 15 bp, Homo sapiens
taacttgtctccttt

SEQ ID NO: 1541487 - DNA, 15 bp, Homo sapiens
ataacttgtctcctt

SEQ ID NO: 1541488 - DNA, 15 bp, Homo sapiens
tataacttgtctcct

SEQ ID NO: 1541489 - DNA, 15 bp, Homo sapiens
atataacttgtctcc

SEQ ID NO: 1541490 - DNA, 15 bp, Homo sapiens
aatataacttgtctc

SEQ ID NO: 1541491 - DNA, 15 bp, Homo sapiens
taatataacttgtct

SEQ ID NO: 1541492 - DNA, 15 bp, Homo sapiens
ataatataacttgtc

SEQ ID NO: 1541493 - DNA, 15 bp, Homo sapiens
tataatataacttgt

SEQ ID NO: 1541494 - DNA, 15 bp, Homo sapiens
gtataatataacttg

SEQ ID NO: 1541495 - DNA, 15 bp, Homo sapiens
tgtataatataactt

SEQ ID NO: 1541496 - DNA, 15 bp, Homo sapiens
atgtataatataact

SEQ ID NO: 1541497 - DNA, 15 bp, Homo sapiens
aatgtataatataac

SEQ ID NO: 1541498 - DNA, 15 bp, Homo sapiens
aaatgtataatataa

SEQ ID NO: 1541499 - DNA, 15 bp, Homo sapiens
aaaatgtataatata

SEQ ID NO: 1541500 - DNA, 15 bp, Homo sapiens
aaaaatgtataatat

SEQ ID NO: 1541501 - DNA, 15 bp, Homo sapiens
aaaaaatgtataata

SEQ ID NO: 1541502 - DNA, 15 bp, Homo sapiens
taaaaaatgtataat

SEQ ID NO: 1541503 - DNA, 15 bp, Homo sapiens
ttaaaaaatgtataa

SEQ ID NO: 1541504 - DNA, 15 bp, Homo sapiens
tttaaaaaatgtata

SEQ ID NO: 1541505 - DNA, 15 bp, Homo sapiens
atttaaaaaatgtat

SEQ ID NO: 1541506 - DNA, 15 bp, Homo sapiens
gatttaaaaaatgta

SEQ ID NO: 1541507 - DNA, 15 bp, Homo sapiens
agatttaaaaaatgt

SEQ ID NO: 1541508 - DNA, 15 bp, Homo sapiens
tagatttaaaaaatg

SEQ ID NO: 1541509 - DNA, 15 bp, Homo sapiens
gtagatttaaaaaat

SEQ ID NO: 1541510 - DNA, 15 bp, Homo sapiens
ggtagatttaaaaaa

SEQ ID NO: 1541511 - DNA, 15 bp, Homo sapiens
tggtagatttaaaaa

SEQ ID NO: 1541512 - DNA, 15 bp, Homo sapiens
ttggtagatttaaaa

SEQ ID NO: 1541513 - DNA, 15 bp, Homo sapiens
tttggtagatttaaa

SEQ ID NO: 1541514 - DNA, 15 bp, Homo sapiens
atttggtagatttaa

SEQ ID NO: 1541515 - DNA, 15 bp, Homo sapiens
catttggtagattta

SEQ ID NO: 1541516 - DNA, 15 bp, Homo sapiens
tcatttggtagattt

SEQ ID NO: 1541517 - DNA, 15 bp, Homo sapiens
atcatttggtagatt

SEQ ID NO: 1541518 - DNA, 15 bp, Homo sapiens
aatcatttggtagat

SEQ ID NO: 1541519 - DNA, 15 bp, Homo sapiens
caatcatttggtaga

SEQ ID NO: 1541520 - DNA, 15 bp, Homo sapiens
tcaatcatttggtag

SEQ ID NO: 1541521 - DNA, 15 bp, Homo sapiens
atcaatcatttggta

SEQ ID NO: 1541522 - DNA, 15 bp, Homo sapiens
aatcaatcatttggt

SEQ ID NO: 1541523 - DNA, 15 bp, Homo sapiens
aaatcaatcatttgg

SEQ ID NO: 1541524 - DNA, 15 bp, Homo sapiens
taaatcaatcatttg

SEQ ID NO: 1541525 - DNA, 15 bp, Homo sapiens
ttaaatcaatcattt

SEQ ID NO: 1541526 - DNA, 15 bp, Homo sapiens
tttaaatcaatcatt

SEQ ID NO: 1541527 - DNA, 15 bp, Homo sapiens
atttaaatcaatcat

SEQ ID NO: 1541528 - DNA, 15 bp, Homo sapiens
tatttaaatcaatca

SEQ ID NO: 1541529 - DNA, 15 bp, Homo sapiens
ctatttaaatcaatc

SEQ ID NO: 1541530 - DNA, 15 bp, Homo sapiens
tctatttaaatcaat

SEQ ID NO: 1541531 - DNA, 15 bp, Homo sapiens
ttctatttaaatcaa

SEQ ID NO: 1541532 - DNA, 15 bp, Homo sapiens
tttctatttaaatca

SEQ ID NO: 1541533 - DNA, 15 bp, Homo sapiens
atttctatttaaatc

SEQ ID NO: 1541534 - DNA, 15 bp, Homo sapiens
catttctatttaaat

SEQ ID NO: 1541535 - DNA, 15 bp, Homo sapiens
ccatttctatttaaa

SEQ ID NO: 1541536 - DNA, 15 bp, Homo sapiens
gccatttctatttaa

SEQ ID NO: 1541537 - DNA, 15 bp, Homo sapiens
tgccatttctattta

SEQ ID NO: 1541538 - DNA, 15 bp, Homo sapiens
atgccatttctattt

SEQ ID NO: 1541539 - DNA, 15 bp, Homo sapiens
tatgccatttctatt

SEQ ID NO: 1541540 - DNA, 15 bp, Homo sapiens
atatgccatttctat

SEQ ID NO: 1541541 - DNA, 15 bp, Homo sapiens
gatatgccatttcta

SEQ ID NO: 1541542 - DNA, 15 bp, Homo sapiens
agatatgccatttct

SEQ ID NO: 1541543 - DNA, 15 bp, Homo sapiens
aagatatgccatttc

SEQ ID NO: 1541544 - DNA, 15 bp, Homo sapiens
taagatatgccattt

SEQ ID NO: 1541545 - DNA, 15 bp, Homo sapiens
ctaagatatgccatt

SEQ ID NO: 1541546 - DNA, 15 bp, Homo sapiens
tctaagatatgccat

SEQ ID NO: 1541547 - DNA, 15 bp, Homo sapiens
ttctaagatatgcca

SEQ ID NO: 1541548 - DNA, 15 bp, Homo sapiens
attctaagatatgcc

SEQ ID NO: 1541549 - DNA, 15 bp, Homo sapiens
aattctaagatatgc

SEQ ID NO: 1541550 - DNA, 15 bp, Homo sapiens
aaattctaagatatg

SEQ ID NO: 1541551 - DNA, 15 bp, Homo sapiens
taaattctaagatat

SEQ ID NO: 1541552 - DNA, 15 bp, Homo sapiens
ttaaattctaagata

SEQ ID NO: 1541553 - DNA, 15 bp, Homo sapiens
gttaaattctaagat

SEQ ID NO: 1541554 - DNA, 15 bp, Homo sapiens
tgttaaattctaaga

SEQ ID NO: 1541555 - DNA, 15 bp, Homo sapiens
ctgttaaattctaag

SEQ ID NO: 1541556 - DNA, 15 bp, Homo sapiens
actgttaaattctaa

SEQ ID NO: 1541557 - DNA, 15 bp, Homo sapiens
aactgttaaattcta

SEQ ID NO: 1541558 - DNA, 15 bp, Homo sapiens
gaactgttaaattct

SEQ ID NO: 1541559 - DNA, 15 bp, Homo sapiens
ggaactgttaaattc

SEQ ID NO: 1541560 - DNA, 15 bp, Homo sapiens
tggaactgttaaatt

SEQ ID NO: 1541561 - DNA, 15 bp, Homo sapiens
atggaactgttaaat

SEQ ID NO: 1541562 - DNA, 15 bp, Homo sapiens
catggaactgttaaa

SEQ ID NO: 1541563 - DNA, 15 bp, Homo sapiens
acatggaactgttaa

SEQ ID NO: 1541564 - DNA, 15 bp, Homo sapiens
tacatggaactgtta

SEQ ID NO: 1541565 - DNA, 15 bp, Homo sapiens
gtacatggaactgtt

SEQ ID NO: 1541566 - DNA, 15 bp, Homo sapiens
agtacatggaactgt

SEQ ID NO: 1541567 - DNA, 15 bp, Homo sapiens
cagtacatggaactg

SEQ ID NO: 1541568 - DNA, 15 bp, Homo sapiens
gcagtacatggaact

SEQ ID NO: 1541569 - DNA, 15 bp, Homo sapiens
agcagtacatggaac

SEQ ID NO: 1541570 - DNA, 15 bp, Homo sapiens
tagcagtacatggaa

SEQ ID NO: 1541571 - DNA, 15 bp, Homo sapiens
ttagcagtacatgga

SEQ ID NO: 1541572 - DNA, 15 bp, Homo sapiens
gttagcagtacatgg

SEQ ID NO: 1541573 - DNA, 15 bp, Homo sapiens
ggttagcagtacatg

SEQ ID NO: 1541574 - DNA, 15 bp, Homo sapiens
gggttagcagtacat

SEQ ID NO: 1541575 - DNA, 15 bp, Homo sapiens
tgggttagcagtaca

SEQ ID NO: 1541576 - DNA, 15 bp, Homo sapiens
ctgggttagcagtac

SEQ ID NO: 1541577 - DNA, 15 bp, Homo sapiens
gctgggttagcagta

SEQ ID NO: 1541578 - DNA, 15 bp, Homo sapiens
tgctgggttagcagt

SEQ ID NO: 1541579 - DNA, 15 bp, Homo sapiens
ctgctgggttagcag

SEQ ID NO: 1541580 - DNA, 15 bp, Homo sapiens
cctgctgggttagca

SEQ ID NO: 1541581 - DNA, 15 bp, Homo sapiens
tcctgctgggttagc

SEQ ID NO: 1541582 - DNA, 15 bp, Homo sapiens
ttcctgctgggttag

SEQ ID NO: 1541583 - DNA, 15 bp, Homo sapiens
tttcctgctgggtta

SEQ ID NO: 1541584 - DNA, 15 bp, Homo sapiens
ctttcctgctgggtt

SEQ ID NO: 1541585 - DNA, 15 bp, Homo sapiens
tctttcctgctgggt

SEQ ID NO: 1541586 - DNA, 15 bp, Homo sapiens
atctttcctgctggg

SEQ ID NO: 1541587 - DNA, 15 bp, Homo sapiens
aatctttcctgctgg

SEQ ID NO: 1541588 - DNA, 15 bp, Homo sapiens
aaatctttcctgctg

SEQ ID NO: 1541589 - DNA, 15 bp, Homo sapiens
taaatctttcctgct

SEQ ID NO: 1541590 - DNA, 15 bp, Homo sapiens
ataaatctttcctgc

SEQ ID NO: 1541591 - DNA, 15 bp, Homo sapiens
tataaatctttcctg

SEQ ID NO: 1541592 - DNA, 15 bp, Homo sapiens
ttataaatctttcct

SEQ ID NO: 1541593 - DNA, 15 bp, Homo sapiens
attataaatctttcc

SEQ ID NO: 1541594 - DNA, 15 bp, Homo sapiens
gattataaatctttc

SEQ ID NO: 1541595 - DNA, 15 bp, Homo sapiens
tgattataaatcttt

SEQ ID NO: 1541596 - DNA, 15 bp, Homo sapiens
atgattataaatctt

SEQ ID NO: 1541597 - DNA, 15 bp, Homo sapiens
aatgattataaatct

SEQ ID NO: 1541598 - DNA, 15 bp, Homo sapiens
taatgattataaatc

SEQ ID NO: 1541599 - DNA, 15 bp, Homo sapiens
ataatgattataaat

SEQ ID NO: 1541600 - DNA, 15 bp, Homo sapiens
aataatgattataaa

SEQ ID NO: 1541601 - DNA, 15 bp, Homo sapiens
taataatgattataa

SEQ ID NO: 1541602 - DNA, 15 bp, Homo sapiens
ttaataatgattata

SEQ ID NO: 1541603 - DNA, 15 bp, Homo sapiens
cttaataatgattat

SEQ ID NO: 1541604 - DNA, 15 bp, Homo sapiens
ccttaataatgatta

SEQ ID NO: 1541605 - DNA, 15 bp, Homo sapiens
accttaataatgatt

SEQ ID NO: 1541606 - DNA, 15 bp, Homo sapiens
taccttaataatgat

SEQ ID NO: 1541607 - DNA, 15 bp, Homo sapiens
ataccttaataatga

SEQ ID NO: 1541608 - DNA, 15 bp, Homo sapiens
gataccttaataatg

SEQ ID NO: 1541609 - DNA, 15 bp, Homo sapiens
agataccttaataat

SEQ ID NO: 1541610 - DNA, 15 bp, Homo sapiens
aagataccttaataa

SEQ ID NO: 1541611 - DNA, 15 bp, Homo sapiens
taagataccttaata

SEQ ID NO: 1541612 - DNA, 15 bp, Homo sapiens
ataagataccttaat

SEQ ID NO: 1541613 - DNA, 15 bp, Homo sapiens
tataagataccttaa

SEQ ID NO: 1541614 - DNA, 15 bp, Homo sapiens
ttataagatacctta

SEQ ID NO: 1541615 - DNA, 15 bp, Homo sapiens
attataagatacctt

SEQ ID NO: 1541616 - DNA, 15 bp, Homo sapiens
tattataagatacct

SEQ ID NO: 1541617 - DNA, 15 bp, Homo sapiens
ttattataagatacc

SEQ ID NO: 1541618 - DNA, 15 bp, Homo sapiens
attattataagatac

SEQ ID NO: 1541619 - DNA, 15 bp, Homo sapiens
tattattataagata

SEQ ID NO: 1541620 - DNA, 15 bp, Homo sapiens
atattattataagat

SEQ ID NO: 1541621 - DNA, 15 bp, Homo sapiens
tatattattataaga

SEQ ID NO: 1541622 - DNA, 15 bp, Homo sapiens
gtatattattataag

SEQ ID NO: 1541623 - DNA, 15 bp, Homo sapiens
ggtatattattataa

SEQ ID NO: 1541624 - DNA, 15 bp, Homo sapiens
tggtatattattata

SEQ ID NO: 1541625 - DNA, 15 bp, Homo sapiens
ctggtatattattat

SEQ ID NO: 1541626 - DNA, 15 bp, Homo sapiens
actggtatattatta

SEQ ID NO: 1541627 - DNA, 15 bp, Homo sapiens
aactggtatattatt

SEQ ID NO: 1541628 - DNA, 15 bp, Homo sapiens
aaactggtatattat

SEQ ID NO: 1541629 - DNA, 15 bp, Homo sapiens
caaactggtatatta

SEQ ID NO: 1541630 - DNA, 15 bp, Homo sapiens
acaaactggtatatt

SEQ ID NO: 1541631 - DNA, 15 bp, Homo sapiens
gacaaactggtatat

SEQ ID NO: 1541632 - DNA, 15 bp, Homo sapiens
agacaaactggtata

SEQ ID NO: 1541633 - DNA, 15 bp, Homo sapiens
aagacaaactggtat

SEQ ID NO: 1541634 - DNA, 15 bp, Homo sapiens
caagacaaactggta

SEQ ID NO: 1541635 - DNA, 15 bp, Homo sapiens
tcaagacaaactggt

SEQ ID NO: 1541636 - DNA, 15 bp, Homo sapiens
ctcaagacaaactgg

SEQ ID NO: 1541637 - DNA, 15 bp, Homo sapiens
gctcaagacaaactg

SEQ ID NO: 1541638 - DNA, 15 bp, Homo sapiens
agctcaagacaaact

SEQ ID NO: 1541639 - DNA, 15 bp, Homo sapiens
tagctcaagacaaac

SEQ ID NO: 1541640 - DNA, 15 bp, Homo sapiens
gtagctcaagacaaa

SEQ ID NO: 1541641 - DNA, 15 bp, Homo sapiens
agtagctcaagacaa

SEQ ID NO: 1541642 - DNA, 15 bp, Homo sapiens
aagtagctcaagaca

SEQ ID NO: 1541643 - DNA, 15 bp, Homo sapiens
aaagtagctcaagac

SEQ ID NO: 1541644 - DNA, 15 bp, Homo sapiens
aaaagtagctcaaga

SEQ ID NO: 1541645 - DNA, 15 bp, Homo sapiens
caaaagtagctcaag

SEQ ID NO: 1541646 - DNA, 15 bp, Homo sapiens
tcaaaagtagctcaa

SEQ ID NO: 1541647 - DNA, 15 bp, Homo sapiens
ttcaaaagtagctca

SEQ ID NO: 1541648 - DNA, 15 bp, Homo sapiens
tttcaaaagtagctc

SEQ ID NO: 1541649 - DNA, 15 bp, Homo sapiens
ctttcaaaagtagct

SEQ ID NO: 1541650 - DNA, 15 bp, Homo sapiens
cctttcaaaagtagc

SEQ ID NO: 1541651 - DNA, 15 bp, Homo sapiens
tcctttcaaaagtag

SEQ ID NO: 1541652 - DNA, 15 bp, Homo sapiens
ctcctttcaaaagta

SEQ ID NO: 1541653 - DNA, 15 bp, Homo sapiens
actcctttcaaaagt

SEQ ID NO: 1541654 - DNA, 15 bp, Homo sapiens
tactcctttcaaaag

SEQ ID NO: 1541655 - DNA, 15 bp, Homo sapiens
atactcctttcaaaa

SEQ ID NO: 1541656 - DNA, 15 bp, Homo sapiens
aatactcctttcaaa

SEQ ID NO: 1541657 - DNA, 15 bp, Homo sapiens
aaatactcctttcaa

SEQ ID NO: 1541658 - DNA, 15 bp, Homo sapiens
aaaatactcctttca

SEQ ID NO: 1541659 - DNA, 15 bp, Homo sapiens
taaaatactcctttc

SEQ ID NO: 1541660 - DNA, 15 bp, Homo sapiens
ataaaatactccttt

SEQ ID NO: 1541661 - DNA, 15 bp, Homo sapiens
aataaaatactcctt

SEQ ID NO: 1541662 - DNA, 15 bp, Homo sapiens
caataaaatactcct

SEQ ID NO: 1541663 - DNA, 15 bp, Homo sapiens
acaataaaatactcc

SEQ ID NO: 1541664 - DNA, 15 bp, Homo sapiens
aacaataaaatactc

SEQ ID NO: 1541665 - DNA, 15 bp, Homo sapiens
taacaataaaatact

SEQ ID NO: 1541666 - DNA, 15 bp, Homo sapiens
ctaacaataaaatac

SEQ ID NO: 1541667 - DNA, 15 bp, Homo sapiens
gctaacaataaaata

SEQ ID NO: 1541668 - DNA, 15 bp, Homo sapiens
tgctaacaataaaat

SEQ ID NO: 1541669 - DNA, 15 bp, Homo sapiens
atgctaacaataaaa

SEQ ID NO: 1541670 - DNA, 15 bp, Homo sapiens
aatgctaacaataaa

SEQ ID NO: 1541671 - DNA, 15 bp, Homo sapiens
aaatgctaacaataa

SEQ ID NO: 1541672 - DNA, 15 bp, Homo sapiens
taaatgctaacaata

SEQ ID NO: 1541673 - DNA, 15 bp, Homo sapiens
ataaatgctaacaat

SEQ ID NO: 1541674 - DNA, 15 bp, Homo sapiens
aataaatgctaacaa

SEQ ID NO: 1541675 - DNA, 15 bp, Homo sapiens
aaataaatgctaaca

SEQ ID NO: 1541676 - DNA, 15 bp, Homo sapiens
caaataaatgctaac

SEQ ID NO: 1541677 - DNA, 15 bp, Homo sapiens
tcaaataaatgctaa

SEQ ID NO: 1541678 - DNA, 15 bp, Homo sapiens
ttcaaataaatgcta

SEQ ID NO: 1541679 - DNA, 15 bp, Homo sapiens
attcaaataaatgct

SEQ ID NO: 1541680 - DNA, 15 bp, Homo sapiens
cattcaaataaatgc

SEQ ID NO: 1541681 - DNA, 15 bp, Homo sapiens
tcattcaaataaatg

SEQ ID NO: 1541682 - DNA, 15 bp, Homo sapiens
ttcattcaaataaat

SEQ ID NO: 1541683 - DNA, 15 bp, Homo sapiens
gttcattcaaataaa

SEQ ID NO: 1541684 - DNA, 15 bp, Homo sapiens
agttcattcaaataa

SEQ ID NO: 1541685 - DNA, 15 bp, Homo sapiens
tagttcattcaaata

SEQ ID NO: 1541686 - DNA, 15 bp, Homo sapiens
ttagttcattcaaat

SEQ ID NO: 1541687 - DNA, 15 bp, Homo sapiens
tttagttcattcaaa

SEQ ID NO: 1541688 - DNA, 15 bp, Homo sapiens
ttttagttcattcaa

SEQ ID NO: 1541689 - DNA, 15 bp, Homo sapiens
cttttagttcattca

SEQ ID NO: 1541690 - DNA, 15 bp, Homo sapiens
gcttttagttcattc

SEQ ID NO: 1541691 - DNA, 15 bp, Homo sapiens
tgcttttagttcatt

SEQ ID NO: 1541692 - DNA, 15 bp, Homo sapiens
ttgcttttagttcat

SEQ ID NO: 1541693 - DNA, 15 bp, Homo sapiens
tttgcttttagttca

SEQ ID NO: 1541694 - DNA, 15 bp, Homo sapiens
ttttgcttttagttc

SEQ ID NO: 1541695 - DNA, 15 bp, Homo sapiens
gttttgcttttagtt

SEQ ID NO: 1541696 - DNA, 15 bp, Homo sapiens
agttttgcttttagt

SEQ ID NO: 1541697 - DNA, 15 bp, Homo sapiens
tagttttgcttttag

SEQ ID NO: 1541698 - DNA, 15 bp, Homo sapiens
atagttttgctttta

SEQ ID NO: 1541699 - DNA, 15 bp, Homo sapiens
tatagttttgctttt

SEQ ID NO: 1541700 - DNA, 15 bp, Homo sapiens
atatagttttgcttt

SEQ ID NO: 1541701 - DNA, 15 bp, Homo sapiens
aatatagttttgctt

SEQ ID NO: 1541702 - DNA, 15 bp, Homo sapiens
caatatagttttgct

SEQ ID NO: 1541703 - DNA, 15 bp, Homo sapiens
acaatatagttttgc

SEQ ID NO: 1541704 - DNA, 15 bp, Homo sapiens
aacaatatagttttg

SEQ ID NO: 1541705 - DNA, 15 bp, Homo sapiens
gaacaatatagtttt

SEQ ID NO: 1541706 - DNA, 15 bp, Homo sapiens
agaacaatatagttt

SEQ ID NO: 1541707 - DNA, 15 bp, Homo sapiens
gagaacaatatagtt

SEQ ID NO: 1541708 - DNA, 15 bp, Homo sapiens
ggagaacaatatagt

SEQ ID NO: 1541709 - DNA, 15 bp, Homo sapiens
aggagaacaatatag

SEQ ID NO: 1541710 - DNA, 15 bp, Homo sapiens
caggagaacaatata

SEQ ID NO: 1541711 - DNA, 15 bp, Homo sapiens
tcaggagaacaatat

SEQ ID NO: 1541712 - DNA, 15 bp, Homo sapiens
ctcaggagaacaata

SEQ ID NO: 1541713 - DNA, 15 bp, Homo sapiens
tctcaggagaacaat

SEQ ID NO: 1541714 - DNA, 15 bp, Homo sapiens
atctcaggagaacaa

SEQ ID NO: 1541715 - DNA, 15 bp, Homo sapiens
aatctcaggagaaca

SEQ ID NO: 1541716 - DNA, 15 bp, Homo sapiens
aaatctcaggagaac

SEQ ID NO: 1541717 - DNA, 15 bp, Homo sapiens
taaatctcaggagaa

SEQ ID NO: 1541718 - DNA, 15 bp, Homo sapiens
gtaaatctcaggaga

SEQ ID NO: 1541719 - DNA, 15 bp, Homo sapiens
agtaaatctcaggag

SEQ ID NO: 1541720 - DNA, 15 bp, Homo sapiens
tagtaaatctcagga

SEQ ID NO: 1541721 - DNA, 15 bp, Homo sapiens
ttagtaaatctcagg

SEQ ID NO: 1541722 - DNA, 15 bp, Homo sapiens
tttagtaaatctcag

SEQ ID NO: 1541723 - DNA, 15 bp, Homo sapiens
atttagtaaatctca

SEQ ID NO: 1541724 - DNA, 15 bp, Homo sapiens
catttagtaaatctc

SEQ ID NO: 1541725 - DNA, 15 bp, Homo sapiens
tcatttagtaaatct

SEQ ID NO: 1541726 - DNA, 15 bp, Homo sapiens
ttcatttagtaaatc

SEQ ID NO: 1541727 - DNA, 15 bp, Homo sapiens
tttcatttagtaaat

SEQ ID NO: 1541728 - DNA, 15 bp, Homo sapiens
atttcatttagtaaa

SEQ ID NO: 1541729 - DNA, 15 bp, Homo sapiens
aatttcatttagtaa

SEQ ID NO: 1541730 - DNA, 15 bp, Homo sapiens
caatttcatttagta

SEQ ID NO: 1541731 - DNA, 15 bp, Homo sapiens
gcaatttcatttagt

SEQ ID NO: 1541732 - DNA, 15 bp, Homo sapiens
ggcaatttcatttag

SEQ ID NO: 1541733 - DNA, 15 bp, Homo sapiens
aggcaatttcattta

SEQ ID NO: 1541734 - DNA, 15 bp, Homo sapiens
caggcaatttcattt

SEQ ID NO: 1541735 - DNA, 15 bp, Homo sapiens
ccaggcaatttcatt

SEQ ID NO: 1541736 - DNA, 15 bp, Homo sapiens
accaggcaatttcat

SEQ ID NO: 1541737 - DNA, 15 bp, Homo sapiens
aaccaggcaatttca

SEQ ID NO: 1541738 - DNA, 15 bp, Homo sapiens
taaccaggcaatttc

SEQ ID NO: 1541739 - DNA, 15 bp, Homo sapiens
ttaaccaggcaattt

SEQ ID NO: 1541740 - DNA, 15 bp, Homo sapiens
cttaaccaggcaatt

SEQ ID NO: 1541741 - DNA, 15 bp, Homo sapiens
tcttaaccaggcaat

SEQ ID NO: 1541742 - DNA, 15 bp, Homo sapiens
ttcttaaccaggcaa

SEQ ID NO: 1541743 - DNA, 15 bp, Homo sapiens
gttcttaaccaggca

SEQ ID NO: 1541744 - DNA, 15 bp, Homo sapiens
ggttcttaaccaggc

SEQ ID NO: 1541745 - DNA, 15 bp, Homo sapiens
gggttcttaaccagg

SEQ ID NO: 1541746 - DNA, 15 bp, Homo sapiens
agggttcttaaccag

SEQ ID NO: 1541747 - DNA, 15 bp, Homo sapiens
tagggttcttaacca

SEQ ID NO: 1541748 - DNA, 15 bp, Homo sapiens
gtagggttcttaacc

SEQ ID NO: 1541749 - DNA, 15 bp, Homo sapiens
cgtagggttcttaac

SEQ ID NO: 1541750 - DNA, 15 bp, Homo sapiens
acgtagggttcttaa

SEQ ID NO: 1541751 - DNA, 15 bp, Homo sapiens
tacgtagggttctta

SEQ ID NO: 1541752 - DNA, 15 bp, Homo sapiens
atacgtagggttctt

SEQ ID NO: 1541753 - DNA, 15 bp, Homo sapiens
catacgtagggttct

SEQ ID NO: 1541754 - DNA, 15 bp, Homo sapiens
gcatacgtagggttc

SEQ ID NO: 1541755 - DNA, 15 bp, Homo sapiens
agcatacgtagggtt

SEQ ID NO: 1541756 - DNA, 15 bp, Homo sapiens
tagcatacgtagggt

SEQ ID NO: 1541757 - DNA, 15 bp, Homo sapiens
atagcatacgtaggg

SEQ ID NO: 1541758 - DNA, 15 bp, Homo sapiens
tatagcatacgtagg

SEQ ID NO: 1541759 - DNA, 15 bp, Homo sapiens
ctatagcatacgtag

SEQ ID NO: 1541760 - DNA, 15 bp, Homo sapiens
tctatagcatacgta

SEQ ID NO: 1541761 - DNA, 15 bp, Homo sapiens
ttctatagcatacgt

SEQ ID NO: 1541762 - DNA, 15 bp, Homo sapiens
tttctatagcatacg

SEQ ID NO: 1541763 - DNA, 15 bp, Homo sapiens
atttctatagcatac

SEQ ID NO: 1541764 - DNA, 15 bp, Homo sapiens
aatttctatagcata

SEQ ID NO: 1541765 - DNA, 15 bp, Homo sapiens
gaatttctatagcat

SEQ ID NO: 1541766 - DNA, 15 bp, Homo sapiens
agaatttctatagca

SEQ ID NO: 1541767 - DNA, 15 bp, Homo sapiens
aagaatttctatagc

SEQ ID NO: 1541768 - DNA, 15 bp, Homo sapiens
gaagaatttctatag

SEQ ID NO: 1541769 - DNA, 15 bp, Homo sapiens
agaagaatttctata

SEQ ID NO: 1541770 - DNA, 15 bp, Homo sapiens
gagaagaatttctat

SEQ ID NO: 1541771 - DNA, 15 bp, Homo sapiens
tgagaagaatttcta

SEQ ID NO: 1541772 - DNA, 15 bp, Homo sapiens
ttgagaagaatttct

SEQ ID NO: 1541773 - DNA, 15 bp, Homo sapiens
tttgagaagaatttc

SEQ ID NO: 1541774 - DNA, 15 bp, Homo sapiens
atttgagaagaattt

SEQ ID NO: 1541775 - DNA, 15 bp, Homo sapiens
catttgagaagaatt

SEQ ID NO: 1541776 - DNA, 15 bp, Homo sapiens
acatttgagaagaat

SEQ ID NO: 1541777 - DNA, 15 bp, Homo sapiens
tacatttgagaagaa

SEQ ID NO: 1541778 - DNA, 15 bp, Homo sapiens
gtacatttgagaaga

SEQ ID NO: 1541779 - DNA, 15 bp, Homo sapiens
agtacatttgagaag

SEQ ID NO: 1541780 - DNA, 15 bp, Homo sapiens
aagtacatttgagaa

SEQ ID NO: 1541781 - DNA, 15 bp, Homo sapiens
taagtacatttgaga

SEQ ID NO: 1541782 - DNA, 15 bp, Homo sapiens
ctaagtacatttgag

SEQ ID NO: 1541783 - DNA, 15 bp, Homo sapiens
cctaagtacatttga

SEQ ID NO: 1541784 - DNA, 15 bp, Homo sapiens
tcctaagtacatttg

SEQ ID NO: 1541785 - DNA, 15 bp, Homo sapiens
ctcctaagtacattt

SEQ ID NO: 1541786 - DNA, 15 bp, Homo sapiens
actcctaagtacatt

SEQ ID NO: 1541787 - DNA, 15 bp, Homo sapiens
gactcctaagtacat

SEQ ID NO: 1541788 - DNA, 15 bp, Homo sapiens
ggactcctaagtaca

SEQ ID NO: 1541789 - DNA, 15 bp, Homo sapiens
aggactcctaagtac

SEQ ID NO: 1541790 - DNA, 15 bp, Homo sapiens
aaggactcctaagta

SEQ ID NO: 1541791 - DNA, 15 bp, Homo sapiens
aaaggactcctaagt

SEQ ID NO: 1541792 - DNA, 15 bp, Homo sapiens
aaaaggactcctaag

SEQ ID NO: 1541793 - DNA, 15 bp, Homo sapiens
taaaaggactcctaa

SEQ ID NO: 1541794 - DNA, 15 bp, Homo sapiens
ataaaaggactccta

SEQ ID NO: 1541795 - DNA, 15 bp, Homo sapiens
aataaaaggactcct

SEQ ID NO: 1541796 - DNA, 15 bp, Homo sapiens
aaataaaaggactcc

SEQ ID NO: 1541797 - DNA, 15 bp, Homo sapiens
taaataaaaggactc

SEQ ID NO: 1541798 - DNA, 15 bp, Homo sapiens
ttaaataaaaggact

SEQ ID NO: 1541799 - DNA, 15 bp, Homo sapiens
tttaaataaaaggac

SEQ ID NO: 1541800 - DNA, 15 bp, Homo sapiens
ttttaaataaaagga

SEQ ID NO: 1541801 - DNA, 15 bp, Homo sapiens
tttttaaataaaagg

SEQ ID NO: 1541802 - DNA, 15 bp, Homo sapiens
ttttttaaataaaag

SEQ ID NO: 1541803 - DNA, 15 bp, Homo sapiens
tttttttaaataaaa

SEQ ID NO: 1541804 - DNA, 15 bp, Homo sapiens
ttttttttaaataaa

SEQ ID NO: 1541805 - DNA, 15 bp, Homo sapiens
tttttttttaaataa

SEQ ID NO: 1541806 - DNA, 15 bp, Homo sapiens
gcctttttttttttt

SEQ ID NO: 1541807 - DNA, 15 bp, Homo sapiens
tgccttttttttttt

SEQ ID NO: 1541808 - DNA, 15 bp, Homo sapiens
ctgcctttttttttt

SEQ ID NO: 1541809 - DNA, 15 bp, Homo sapiens
tctgccttttttttt

SEQ ID NO: 1541810 - DNA, 15 bp, Homo sapiens
atctgcctttttttt

SEQ ID NO: 1541811 - DNA, 15 bp, Homo sapiens
aatctgccttttttt

SEQ ID NO: 1541812 - DNA, 15 bp, Homo sapiens
gaatctgcctttttt

SEQ ID NO: 1541813 - DNA, 15 bp, Homo sapiens
agaatctgccttttt

SEQ ID NO: 1541814 - DNA, 15 bp, Homo sapiens
aagaatctgcctttt

SEQ ID NO: 1541815 - DNA, 15 bp, Homo sapiens
taagaatctgccttt

SEQ ID NO: 1541816 - DNA, 15 bp, Homo sapiens
gtaagaatctgcctt

SEQ ID NO: 1541817 - DNA, 15 bp, Homo sapiens
ggtaagaatctgcct

SEQ ID NO: 1541818 - DNA, 15 bp, Homo sapiens
aggtaagaatctgcc

SEQ ID NO: 1541819 - DNA, 15 bp, Homo sapiens
taggtaagaatctgc

SEQ ID NO: 1541820 - DNA, 15 bp, Homo sapiens
ctaggtaagaatctg

SEQ ID NO: 1541821 - DNA, 15 bp, Homo sapiens
gctaggtaagaatct

SEQ ID NO: 1541822 - DNA, 15 bp, Homo sapiens
agctaggtaagaatc

SEQ ID NO: 1541823 - DNA, 15 bp, Homo sapiens
tagctaggtaagaat

SEQ ID NO: 1541824 - DNA, 15 bp, Homo sapiens
ctagctaggtaagaa

SEQ ID NO: 1541825 - DNA, 15 bp, Homo sapiens
actagctaggtaaga

SEQ ID NO: 1541826 - DNA, 15 bp, Homo sapiens
tactagctaggtaag

SEQ ID NO: 1541827 - DNA, 15 bp, Homo sapiens
atactagctaggtaa

SEQ ID NO: 1541828 - DNA, 15 bp, Homo sapiens
tatactagctaggta

SEQ ID NO: 1541829 - DNA, 15 bp, Homo sapiens
ctatactagctaggt

SEQ ID NO: 1541830 - DNA, 15 bp, Homo sapiens
cctatactagctagg

SEQ ID NO: 1541831 - DNA, 15 bp, Homo sapiens
acctatactagctag

SEQ ID NO: 1541832 - DNA, 15 bp, Homo sapiens
tacctatactagcta

SEQ ID NO: 1541833 - DNA, 15 bp, Homo sapiens
ctacctatactagct

SEQ ID NO: 1541834 - DNA, 15 bp, Homo sapiens
cctacctatactagc

SEQ ID NO: 1541835 - DNA, 15 bp, Homo sapiens
ccctacctatactag

SEQ ID NO: 1541836 - DNA, 15 bp, Homo sapiens
gccctacctatacta

SEQ ID NO: 1541837 - DNA, 15 bp, Homo sapiens
ggccctacctatact

SEQ ID NO: 1541838 - DNA, 15 bp, Homo sapiens
aggccctacctatac

SEQ ID NO: 1541839 - DNA, 15 bp, Homo sapiens
caggccctacctata

SEQ ID NO: 1541840 - DNA, 15 bp, Homo sapiens
tcaggccctacctat

SEQ ID NO: 1541841 - DNA, 15 bp, Homo sapiens
ttcaggccctaccta

SEQ ID NO: 1541842 - DNA, 15 bp, Homo sapiens
ctttcaggccctacc

SEQ ID NO: 1541843 - DNA, 15 bp, Homo sapiens
actttcaggccctac

SEQ ID NO: 1541844 - DNA, 15 bp, Homo sapiens
gactttcaggcccta

SEQ ID NO: 1541845 - DNA, 15 bp, Homo sapiens
agactttcaggccct

SEQ ID NO: 1541846 - DNA, 15 bp, Homo sapiens
aagactttcaggccc

SEQ ID NO: 1541847 - DNA, 15 bp, Homo sapiens
aaagactttcaggcc

SEQ ID NO: 1541848 - DNA, 15 bp, Homo sapiens
caaagactttcaggc

SEQ ID NO: 1541849 - DNA, 15 bp, Homo sapiens
acaaagactttcagg

SEQ ID NO: 1541850 - DNA, 15 bp, Homo sapiens
aacaaagactttcag

SEQ ID NO: 1541851 - DNA, 15 bp, Homo sapiens
aaacaaagactttca

SEQ ID NO: 1541852 - DNA, 15 bp, Homo sapiens
gaaacaaagactttc

SEQ ID NO: 1541853 - DNA, 15 bp, Homo sapiens
ggaaacaaagacttt

SEQ ID NO: 1541854 - DNA, 15 bp, Homo sapiens
tggaaacaaagactt

SEQ ID NO: 1541855 - DNA, 15 bp, Homo sapiens
ttggaaacaaagact

SEQ ID NO: 1541856 - DNA, 15 bp, Homo sapiens
tttggaaacaaagac

SEQ ID NO: 1541857 - DNA, 15 bp, Homo sapiens
gtttggaaacaaaga

SEQ ID NO: 1541858 - DNA, 15 bp, Homo sapiens
ggtttggaaacaaag

SEQ ID NO: 1541859 - DNA, 15 bp, Homo sapiens
tggtttggaaacaaa

SEQ ID NO: 1541860 - DNA, 15 bp, Homo sapiens
ttggtttggaaacaa

SEQ ID NO: 1541861 - DNA, 15 bp, Homo sapiens
gttggtttggaaaca

SEQ ID NO: 1541862 - DNA, 15 bp, Homo sapiens
agttggtttggaaac

SEQ ID NO: 1541863 - DNA, 15 bp, Homo sapiens
gagttggtttggaaa

SEQ ID NO: 1541864 - DNA, 15 bp, Homo sapiens
ggagttggtttggaa

SEQ ID NO: 1541865 - DNA, 15 bp, Homo sapiens
aggagttggtttgga

SEQ ID NO: 1541866 - DNA, 15 bp, Homo sapiens
taggagttggtttgg

SEQ ID NO: 1541867 - DNA, 15 bp, Homo sapiens
ttaggagttggtttg

SEQ ID NO: 1541868 - DNA, 15 bp, Homo sapiens
cttaggagttggttt

SEQ ID NO: 1541869 - DNA, 15 bp, Homo sapiens
gcttaggagttggtt

SEQ ID NO: 1541870 - DNA, 15 bp, Homo sapiens
tgcttaggagttggt

SEQ ID NO: 1541871 - DNA, 15 bp, Homo sapiens
ttgcttaggagttgg

SEQ ID NO: 1541872 - DNA, 15 bp, Homo sapiens
gttgcttaggagttg

SEQ ID NO: 1541873 - DNA, 15 bp, Homo sapiens
tgttgcttaggagtt

SEQ ID NO: 1541874 - DNA, 15 bp, Homo sapiens
atgttgcttaggagt

SEQ ID NO: 1541875 - DNA, 15 bp, Homo sapiens
catgttgcttaggag

SEQ ID NO: 1541876 - DNA, 15 bp, Homo sapiens
ccatgttgcttagga

SEQ ID NO: 1541877 - DNA, 15 bp, Homo sapiens
tccatgttgcttagg

SEQ ID NO: 1541878 - DNA, 15 bp, Homo sapiens
atccatgttgcttag

SEQ ID NO: 1541879 - DNA, 15 bp, Homo sapiens
catccatgttgctta

SEQ ID NO: 1541880 - DNA, 15 bp, Homo sapiens
gcatccatgttgctt

SEQ ID NO: 1541881 - DNA, 15 bp, Homo sapiens
ggcatccatgttgct

SEQ ID NO: 1541882 - DNA, 15 bp, Homo sapiens
tggcatccatgttgc

SEQ ID NO: 1541883 - DNA, 15 bp, Homo sapiens
gtggcatccatgttg

SEQ ID NO: 1541884 - DNA, 15 bp, Homo sapiens
agtggcatccatgtt

SEQ ID NO: 1541885 - DNA, 15 bp, Homo sapiens
cagtggcatccatgt

SEQ ID NO: 1541886 - DNA, 15 bp, Homo sapiens
gcagtggcatccatg

SEQ ID NO: 1541887 - DNA, 15 bp, Homo sapiens
agcagtggcatccat

SEQ ID NO: 1541888 - DNA, 15 bp, Homo sapiens
tagcagtggcatcca

SEQ ID NO: 1541889 - DNA, 15 bp, Homo sapiens
ctagcagtggcatcc

SEQ ID NO: 1541890 - DNA, 15 bp, Homo sapiens
actagcagtggcatc

SEQ ID NO: 1541891 - DNA, 15 bp, Homo sapiens
gactagcagtggcat

SEQ ID NO: 1541892 - DNA, 15 bp, Homo sapiens
tgactagcagtggca

SEQ ID NO: 1541893 - DNA, 15 bp, Homo sapiens
ctgactagcagtggc

SEQ ID NO: 1541894 - DNA, 15 bp, Homo sapiens
cctgactagcagtgg

SEQ ID NO: 1541895 - DNA, 15 bp, Homo sapiens
gcctgactagcagtg

SEQ ID NO: 1541896 - DNA, 15 bp, Homo sapiens
agcctgactagcagt

SEQ ID NO: 1541897 - DNA, 15 bp, Homo sapiens
aagcctgactagcag

SEQ ID NO: 1541898 - DNA, 15 bp, Homo sapiens
aaagcctgactagca

SEQ ID NO: 1541899 - DNA, 15 bp, Homo sapiens
aaaagcctgactagc

SEQ ID NO: 1541900 - DNA, 15 bp, Homo sapiens
caaaagcctgactag

SEQ ID NO: 1541901 - DNA, 15 bp, Homo sapiens
tcaaaagcctgacta

SEQ ID NO: 1541902 - DNA, 15 bp, Homo sapiens
ttcaaaagcctgact

SEQ ID NO: 1541903 - DNA, 15 bp, Homo sapiens
gttcaaaagcctgac

SEQ ID NO: 1541904 - DNA, 15 bp, Homo sapiens
tgttcaaaagcctga

SEQ ID NO: 1541905 - DNA, 15 bp, Homo sapiens
atgttcaaaagcctg

SEQ ID NO: 1541906 - DNA, 15 bp, Homo sapiens
gatgttcaaaagcct

SEQ ID NO: 1541907 - DNA, 15 bp, Homo sapiens
tgatgttcaaaagcc

SEQ ID NO: 1541908 - DNA, 15 bp, Homo sapiens
ttgatgttcaaaagc

SEQ ID NO: 1541909 - DNA, 15 bp, Homo sapiens
cttgatgttcaaaag

SEQ ID NO: 1541910 - DNA, 15 bp, Homo sapiens
ccttgatgttcaaaa

SEQ ID NO: 1541911 - DNA, 15 bp, Homo sapiens
accttgatgttcaaa

SEQ ID NO: 1541912 - DNA, 15 bp, Homo sapiens
aaccttgatgttcaa

SEQ ID NO: 1541913 - DNA, 15 bp, Homo sapiens
aaaccttgatgttca

SEQ ID NO: 1541914 - DNA, 15 bp, Homo sapiens
aaaaccttgatgttc

SEQ ID NO: 1541915 - DNA, 15 bp, Homo sapiens
taaaaccttgatgtt

SEQ ID NO: 1541916 - DNA, 15 bp, Homo sapiens
ataaaaccttgatgt

SEQ ID NO: 1541917 - DNA, 15 bp, Homo sapiens
tataaaaccttgatg

SEQ ID NO: 1541918 - DNA, 15 bp, Homo sapiens
ttataaaaccttgat

SEQ ID NO: 1541919 - DNA, 15 bp, Homo sapiens
cttataaaaccttga

SEQ ID NO: 1541920 - DNA, 15 bp, Homo sapiens
tcttataaaaccttg

SEQ ID NO: 1541921 - DNA, 15 bp, Homo sapiens
ttcttataaaacctt

SEQ ID NO: 1541922 - DNA, 15 bp, Homo sapiens
tttcttataaaacct

SEQ ID NO: 1541923 - DNA, 15 bp, Homo sapiens
atttcttataaaacc

SEQ ID NO: 1541924 - DNA, 15 bp, Homo sapiens
catttcttataaaac

SEQ ID NO: 1541925 - DNA, 15 bp, Homo sapiens
ccatttcttataaaa

SEQ ID NO: 1541926 - DNA, 15 bp, Homo sapiens
accatttcttataaa

SEQ ID NO: 1541927 - DNA, 15 bp, Homo sapiens
aaccatttcttataa

SEQ ID NO: 1541928 - DNA, 15 bp, Homo sapiens
caaccatttcttata

SEQ ID NO: 1541929 - DNA, 15 bp, Homo sapiens
acaaccatttcttat

SEQ ID NO: 1541930 - DNA, 15 bp, Homo sapiens
aacaaccatttctta

SEQ ID NO: 1541931 - DNA, 15 bp, Homo sapiens
taacaaccatttctt

SEQ ID NO: 1541932 - DNA, 15 bp, Homo sapiens
ataacaaccatttct

SEQ ID NO: 1541933 - DNA, 15 bp, Homo sapiens
tataacaaccatttc

SEQ ID NO: 1541934 - DNA, 15 bp, Homo sapiens
atataacaaccattt

SEQ ID NO: 1541935 - DNA, 15 bp, Homo sapiens
catataacaaccatt

SEQ ID NO: 1541936 - DNA, 15 bp, Homo sapiens
acatataacaaccat

SEQ ID NO: 1541937 - DNA, 15 bp, Homo sapiens
gacatataacaacca

SEQ ID NO: 1541938 - DNA, 15 bp, Homo sapiens
tgacatataacaacc

SEQ ID NO: 1541939 - DNA, 15 bp, Homo sapiens
atgacatataacaac

SEQ ID NO: 1541940 - DNA, 15 bp, Homo sapiens
aatgacatataacaa

SEQ ID NO: 1541941 - DNA, 15 bp, Homo sapiens
caatgacatataaca

SEQ ID NO: 1541942 - DNA, 15 bp, Homo sapiens
ccaatgacatataac

SEQ ID NO: 1541943 - DNA, 15 bp, Homo sapiens
gccaatgacatataa

SEQ ID NO: 1541944 - DNA, 15 bp, Homo sapiens
agccaatgacatata

SEQ ID NO: 1541945 - DNA, 15 bp, Homo sapiens
cagccaatgacatat

SEQ ID NO: 1541946 - DNA, 15 bp, Homo sapiens
tcagccaatgacata

SEQ ID NO: 1541947 - DNA, 15 bp, Homo sapiens
gtcagccaatgacat

SEQ ID NO: 1541948 - DNA, 15 bp, Homo sapiens
tgtcagccaatgaca

SEQ ID NO: 1541949 - DNA, 15 bp, Homo sapiens
atgtcagccaatgac

SEQ ID NO: 1541950 - DNA, 15 bp, Homo sapiens
aatgtcagccaatga

SEQ ID NO: 1541951 - DNA, 15 bp, Homo sapiens
aaatgtcagccaatg

SEQ ID NO: 1541952 - DNA, 15 bp, Homo sapiens
caaatgtcagccaat

SEQ ID NO: 1541953 - DNA, 15 bp, Homo sapiens
acaaatgtcagccaa

SEQ ID NO: 1541954 - DNA, 15 bp, Homo sapiens
tacaaatgtcagcca

SEQ ID NO: 1541955 - DNA, 15 bp, Homo sapiens
atacaaatgtcagcc

SEQ ID NO: 1541956 - DNA, 15 bp, Homo sapiens
tatacaaatgtcagc

SEQ ID NO: 1541957 - DNA, 15 bp, Homo sapiens
gtatacaaatgtcag

SEQ ID NO: 1541958 - DNA, 15 bp, Homo sapiens
agtatacaaatgtca

SEQ ID NO: 1541959 - DNA, 15 bp, Homo sapiens
tagtatacaaatgtc

SEQ ID NO: 1541960 - DNA, 15 bp, Homo sapiens
atagtatacaaatgt

SEQ ID NO: 1541961 - DNA, 15 bp, Homo sapiens
aatagtatacaaatg

SEQ ID NO: 1541962 - DNA, 15 bp, Homo sapiens
taatagtatacaaat

SEQ ID NO: 1541963 - DNA, 15 bp, Homo sapiens
ttaatagtatacaaa

SEQ ID NO: 1541964 - DNA, 15 bp, Homo sapiens
tttaatagtatacaa

SEQ ID NO: 1541965 - DNA, 15 bp, Homo sapiens
ttttaatagtataca

SEQ ID NO: 1541966 - DNA, 15 bp, Homo sapiens
attttaatagtatac

SEQ ID NO: 1541967 - DNA, 15 bp, Homo sapiens
tattttaatagtata

SEQ ID NO: 1541968 - DNA, 15 bp, Homo sapiens
gtattttaatagtat

SEQ ID NO: 1541969 - DNA, 15 bp, Homo sapiens
tgtattttaatagta

SEQ ID NO: 1541970 - DNA, 15 bp, Homo sapiens
ctgtattttaatagt

SEQ ID NO: 1541971 - DNA, 15 bp, Homo sapiens
tctgtattttaatag

SEQ ID NO: 1541972 - DNA, 15 bp, Homo sapiens
ttctgtattttaata

SEQ ID NO: 1541973 - DNA, 15 bp, Homo sapiens
tttctgtattttaat

SEQ ID NO: 1541974 - DNA, 15 bp, Homo sapiens
atttctgtattttaa

SEQ ID NO: 1541975 - DNA, 15 bp, Homo sapiens
aatttctgtatttta

SEQ ID NO: 1541976 - DNA, 15 bp, Homo sapiens
caatttctgtatttt

SEQ ID NO: 1541977 - DNA, 15 bp, Homo sapiens
tcaatttctgtattt

SEQ ID NO: 1541978 - DNA, 15 bp, Homo sapiens
ttcaatttctgtatt

SEQ ID NO: 1541979 - DNA, 15 bp, Homo sapiens
tttcaatttctgtat

SEQ ID NO: 1541980 - DNA, 15 bp, Homo sapiens
ttttcaatttctgta

SEQ ID NO: 1541981 - DNA, 15 bp, Homo sapiens
attttcaatttctgt

SEQ ID NO: 1541982 - DNA, 15 bp, Homo sapiens
tattttcaatttctg

SEQ ID NO: 1541983 - DNA, 15 bp, Homo sapiens
ttattttcaatttct

SEQ ID NO: 1541984 - DNA, 15 bp, Homo sapiens
cttattttcaatttc

SEQ ID NO: 1541985 - DNA, 15 bp, Homo sapiens
tcttattttcaattt

SEQ ID NO: 1541986 - DNA, 15 bp, Homo sapiens
ttcttattttcaatt

SEQ ID NO: 1541987 - DNA, 15 bp, Homo sapiens
tttcttattttcaat

SEQ ID NO: 1541988 - DNA, 15 bp, Homo sapiens
atttcttattttcaa

SEQ ID NO: 1541989 - DNA, 15 bp, Homo sapiens
catttcttattttca

SEQ ID NO: 1541990 - DNA, 15 bp, Homo sapiens
acatttcttattttc

SEQ ID NO: 1541991 - DNA, 15 bp, Homo sapiens
cacatttcttatttt

SEQ ID NO: 1541992 - DNA, 15 bp, Homo sapiens
tcacatttcttattt

SEQ ID NO: 1541993 - DNA, 15 bp, Homo sapiens
atcacatttcttatt

SEQ ID NO: 1541994 - DNA, 15 bp, Homo sapiens
tatcacatttcttat

SEQ ID NO: 1541995 - DNA, 15 bp, Homo sapiens
gtatcacatttctta

SEQ ID NO: 1541996 - DNA, 15 bp, Homo sapiens
cgtatcacatttctt

SEQ ID NO: 1541997 - DNA, 15 bp, Homo sapiens
acgtatcacatttct

SEQ ID NO: 1541998 - DNA, 15 bp, Homo sapiens
aacgtatcacatttc

SEQ ID NO: 1541999 - DNA, 15 bp, Homo sapiens
caacgtatcacattt

SEQ ID NO: 1542000 - DNA, 15 bp, Homo sapiens
tcaacgtatcacatt

SEQ ID NO: 1542001 - DNA, 15 bp, Homo sapiens
ctcaacgtatcacat

SEQ ID NO: 1542002 - DNA, 15 bp, Homo sapiens
actcaacgtatcaca

SEQ ID NO: 1542003 - DNA, 15 bp, Homo sapiens
aactcaacgtatcac

SEQ ID NO: 1542004 - DNA, 15 bp, Homo sapiens
taactcaacgtatca

SEQ ID NO: 1542005 - DNA, 15 bp, Homo sapiens
ataactcaacgtatc

SEQ ID NO: 1542006 - DNA, 15 bp, Homo sapiens
cataactcaacgtat

SEQ ID NO: 1542007 - DNA, 15 bp, Homo sapiens
gcataactcaacgta

SEQ ID NO: 1542008 - DNA, 15 bp, Homo sapiens
tgcataactcaacgt

SEQ ID NO: 1542009 - DNA, 15 bp, Homo sapiens
ttgcataactcaacg

SEQ ID NO: 1542010 - DNA, 15 bp, Homo sapiens
tttgcataactcaac

SEQ ID NO: 1542011 - DNA, 15 bp, Homo sapiens
gtttgcataactcaa

SEQ ID NO: 1542012 - DNA, 15 bp, Homo sapiens
tgtttgcataactca

SEQ ID NO: 1542013 - DNA, 15 bp, Homo sapiens
ttgtttgcataactc

SEQ ID NO: 1542014 - DNA, 15 bp, Homo sapiens
tttgtttgcataact

SEQ ID NO: 1542015 - DNA, 15 bp, Homo sapiens
ttttgtttgcataac

SEQ ID NO: 1542016 - DNA, 15 bp, Homo sapiens
cttttgtttgcataa

SEQ ID NO: 1542017 - DNA, 15 bp, Homo sapiens
acttttgtttgcata

SEQ ID NO: 1542018 - DNA, 15 bp, Homo sapiens
tacttttgtttgcat

SEQ ID NO: 1542019 - DNA, 15 bp, Homo sapiens
ctacttttgtttgca

SEQ ID NO: 1542020 - DNA, 15 bp, Homo sapiens
gctacttttgtttgc

SEQ ID NO: 1542021 - DNA, 15 bp, Homo sapiens
tgctacttttgtttg

SEQ ID NO: 1542022 - DNA, 15 bp, Homo sapiens
atgctacttttgttt

SEQ ID NO: 1542023 - DNA, 15 bp, Homo sapiens
catgctacttttgtt

SEQ ID NO: 1542024 - DNA, 15 bp, Homo sapiens
acatgctacttttgt

SEQ ID NO: 1542025 - DNA, 15 bp, Homo sapiens
tacatgctacttttg

SEQ ID NO: 1542026 - DNA, 15 bp, Homo sapiens
ttacatgctactttt

SEQ ID NO: 1542027 - DNA, 15 bp, Homo sapiens
attacatgctacttt

SEQ ID NO: 1542028 - DNA, 15 bp, Homo sapiens
ttatcaaaggaaatg

SEQ ID NO: 1542029 - DNA, 15 bp, Homo sapiens
cttatcaaaggaaat

SEQ ID NO: 1542030 - DNA, 15 bp, Homo sapiens
acttatcaaaggaaa

SEQ ID NO: 1542031 - DNA, 15 bp, Homo sapiens
cacttatcaaaggaa

SEQ ID NO: 1542032 - DNA, 15 bp, Homo sapiens
tcacttatcaaagga

SEQ ID NO: 1542033 - DNA, 15 bp, Homo sapiens
atcacttatcaaagg

SEQ ID NO: 1542034 - DNA, 15 bp, Homo sapiens
aatcacttatcaaag

SEQ ID NO: 1542035 - DNA, 15 bp, Homo sapiens
taatcacttatcaaa

SEQ ID NO: 1542036 - DNA, 15 bp, Homo sapiens
gtaatcacttatcaa

SEQ ID NO: 1542037 - DNA, 15 bp, Homo sapiens
agtaatcacttatca

SEQ ID NO: 1542038 - DNA, 15 bp, Homo sapiens
aagtaatcacttatc

SEQ ID NO: 1542039 - DNA, 15 bp, Homo sapiens
aaagtaatcacttat

SEQ ID NO: 1542040 - DNA, 15 bp, Homo sapiens
gaaagtaatcactta

SEQ ID NO: 1542041 - DNA, 15 bp, Homo sapiens
agaaagtaatcactt

SEQ ID NO: 1542042 - DNA, 15 bp, Homo sapiens
tagaaagtaatcact

SEQ ID NO: 1542043 - DNA, 15 bp, Homo sapiens
gtagaaagtaatcac

SEQ ID NO: 1542044 - DNA, 15 bp, Homo sapiens
ggtagaaagtaatca

SEQ ID NO: 1542045 - DNA, 15 bp, Homo sapiens
aggtagaaagtaatc

SEQ ID NO: 1542046 - DNA, 15 bp, Homo sapiens
gaggtagaaagtaat

SEQ ID NO: 1542047 - DNA, 15 bp, Homo sapiens
tgaggtagaaagtaa

SEQ ID NO: 1542048 - DNA, 15 bp, Homo sapiens
atgaggtagaaagta

SEQ ID NO: 1542049 - DNA, 15 bp, Homo sapiens
tatgaggtagaaagt

SEQ ID NO: 1542050 - DNA, 15 bp, Homo sapiens
atatgaggtagaaag

SEQ ID NO: 1542051 - DNA, 15 bp, Homo sapiens
gatatgaggtagaaa

SEQ ID NO: 1542052 - DNA, 15 bp, Homo sapiens
agatatgaggtagaa

SEQ ID NO: 1542053 - DNA, 15 bp, Homo sapiens
aagatatgaggtaga

SEQ ID NO: 1542054 - DNA, 15 bp, Homo sapiens
gaagatatgaggtag

SEQ ID NO: 1542055 - DNA, 15 bp, Homo sapiens
agaagatatgaggta

SEQ ID NO: 1542056 - DNA, 15 bp, Homo sapiens
tagaagatatgaggt

SEQ ID NO: 1542057 - DNA, 15 bp, Homo sapiens
atagaagatatgagg

SEQ ID NO: 1542058 - DNA, 15 bp, Homo sapiens
gatagaagatatgag

SEQ ID NO: 1542059 - DNA, 15 bp, Homo sapiens
agatagaagatatga

SEQ ID NO: 1542060 - DNA, 15 bp, Homo sapiens
aagatagaagatatg

SEQ ID NO: 1542061 - DNA, 15 bp, Homo sapiens
caagatagaagatat

SEQ ID NO: 1542062 - DNA, 15 bp, Homo sapiens
tcaagatagaagata

SEQ ID NO: 1542063 - DNA, 15 bp, Homo sapiens
ttcaagatagaagat

SEQ ID NO: 1542064 - DNA, 15 bp, Homo sapiens
tttcaagatagaaga

SEQ ID NO: 1542065 - DNA, 15 bp, Homo sapiens
atttcaagatagaag

SEQ ID NO: 1542066 - DNA, 15 bp, Homo sapiens
tatttcaagatagaa

SEQ ID NO: 1542067 - DNA, 15 bp, Homo sapiens
atatttcaagataga

SEQ ID NO: 1542068 - DNA, 15 bp, Homo sapiens
aatatttcaagatag

SEQ ID NO: 1542069 - DNA, 15 bp, Homo sapiens
aaatatttcaagata

SEQ ID NO: 1542070 - DNA, 15 bp, Homo sapiens
caaatatttcaagat

SEQ ID NO: 1542071 - DNA, 15 bp, Homo sapiens
acaaatatttcaaga

SEQ ID NO: 1542072 - DNA, 15 bp, Homo sapiens
cacaaatatttcaag

SEQ ID NO: 1542073 - DNA, 15 bp, Homo sapiens
acacaaatatttcaa

SEQ ID NO: 1542074 - DNA, 15 bp, Homo sapiens
aacacaaatatttca

SEQ ID NO: 1542075 - DNA, 15 bp, Homo sapiens
caacacaaatatttc

SEQ ID NO: 1542076 - DNA, 15 bp, Homo sapiens
acaacacaaatattt

SEQ ID NO: 1542077 - DNA, 15 bp, Homo sapiens
aacaacacaaatatt

SEQ ID NO: 1542078 - DNA, 15 bp, Homo sapiens
aaacaacacaaatat

SEQ ID NO: 1542079 - DNA, 15 bp, Homo sapiens
aaaacaacacaaata

SEQ ID NO: 1542080 - DNA, 15 bp, Homo sapiens
taaaacaacacaaat

SEQ ID NO: 1542081 - DNA, 15 bp, Homo sapiens
ttaaaacaacacaaa

SEQ ID NO: 1542082 - DNA, 15 bp, Homo sapiens
tttaaaacaacacaa

SEQ ID NO: 1542083 - DNA, 15 bp, Homo sapiens
ttttaaaacaacaca

SEQ ID NO: 1542084 - DNA, 15 bp, Homo sapiens
attttaaaacaacac

SEQ ID NO: 1542085 - DNA, 15 bp, Homo sapiens
gattttaaaacaaca

SEQ ID NO: 1542086 - DNA, 15 bp, Homo sapiens
tgattttaaaacaac

SEQ ID NO: 1542087 - DNA, 15 bp, Homo sapiens
atgattttaaaacaa

SEQ ID NO: 1542088 - DNA, 15 bp, Homo sapiens
aatgattttaaaaca

SEQ ID NO: 1542089 - DNA, 15 bp, Homo sapiens
caaatgattttaaaa

SEQ ID NO: 1542090 - DNA, 15 bp, Homo sapiens
tcaaatgattttaaa

SEQ ID NO: 1542091 - DNA, 15 bp, Homo sapiens
gtcaaatgattttaa

SEQ ID NO: 1542092 - DNA, 15 bp, Homo sapiens
agtcaaatgatttta

SEQ ID NO: 1542093 - DNA, 15 bp, Homo sapiens
aagtcaaatgatttt

SEQ ID NO: 1542094 - DNA, 15 bp, Homo sapiens
caagtcaaatgattt

SEQ ID NO: 1542095 - DNA, 15 bp, Homo sapiens
acaagtcaaatgatt

SEQ ID NO: 1542096 - DNA, 15 bp, Homo sapiens
gacaagtcaaatgat

SEQ ID NO: 1542097 - DNA, 15 bp, Homo sapiens
tgacaagtcaaatga

SEQ ID NO: 1542098 - DNA, 15 bp, Homo sapiens
atgacaagtcaaatg

SEQ ID NO: 1542099 - DNA, 15 bp, Homo sapiens
tatgacaagtcaaat

SEQ ID NO: 1542100 - DNA, 15 bp, Homo sapiens
atatgacaagtcaaa

SEQ ID NO: 1542101 - DNA, 15 bp, Homo sapiens
aatatgacaagtcaa

SEQ ID NO: 1542102 - DNA, 15 bp, Homo sapiens
aaatatgacaagtca

SEQ ID NO: 1542103 - DNA, 15 bp, Homo sapiens
aaaatatgacaagtc

SEQ ID NO: 1542104 - DNA, 15 bp, Homo sapiens
aaaaatatgacaagt

SEQ ID NO: 1542105 - DNA, 15 bp, Homo sapiens
taaaaatatgacaag

SEQ ID NO: 1542106 - DNA, 15 bp, Homo sapiens
gataaaaatatgaca

SEQ ID NO: 1542107 - DNA, 15 bp, Homo sapiens
agataaaaatatgac

SEQ ID NO: 1542108 - DNA, 15 bp, Homo sapiens
aagataaaaatatga

SEQ ID NO: 1542109 - DNA, 15 bp, Homo sapiens
taagataaaaatatg

SEQ ID NO: 1542110 - DNA, 15 bp, Homo sapiens
ataagataaaaatat

SEQ ID NO: 1542111 - DNA, 15 bp, Homo sapiens
aataagataaaaata

SEQ ID NO: 1542112 - DNA, 15 bp, Homo sapiens
aaataagataaaaat

SEQ ID NO: 1542113 - DNA, 15 bp, Homo sapiens
aaaataagataaaaa

SEQ ID NO: 1542114 - DNA, 15 bp, Homo sapiens
gaaaataagataaaa

SEQ ID NO: 1542115 - DNA, 15 bp, Homo sapiens
agaaaataagataaa

SEQ ID NO: 1542116 - DNA, 15 bp, Homo sapiens
gagaaaataagataa

SEQ ID NO: 1542117 - DNA, 15 bp, Homo sapiens
ggagaaaataagata

SEQ ID NO: 1542118 - DNA, 15 bp, Homo sapiens
gggagaaaataagat

SEQ ID NO: 1542119 - DNA, 15 bp, Homo sapiens
tgggagaaaataaga

SEQ ID NO: 1542120 - DNA, 15 bp, Homo sapiens
ttgggagaaaataag

SEQ ID NO: 1542121 - DNA, 15 bp, Homo sapiens
gttgggagaaaataa

SEQ ID NO: 1542122 - DNA, 15 bp, Homo sapiens
tgttgggagaaaata

SEQ ID NO: 1542123 - DNA, 15 bp, Homo sapiens
ttgttgggagaaaat

SEQ ID NO: 1542124 - DNA, 15 bp, Homo sapiens
cttgttgggagaaaa

SEQ ID NO: 1542125 - DNA, 15 bp, Homo sapiens
tcttgttgggagaaa

SEQ ID NO: 1542126 - DNA, 15 bp, Homo sapiens
atcttgttgggagaa

SEQ ID NO: 1542127 - DNA, 15 bp, Homo sapiens
aatcttgttgggaga

SEQ ID NO: 1542128 - DNA, 15 bp, Homo sapiens
taatcttgttgggag

SEQ ID NO: 1542129 - DNA, 15 bp, Homo sapiens
ttaatcttgttggga

SEQ ID NO: 1542130 - DNA, 15 bp, Homo sapiens
tttaatcttgttggg

SEQ ID NO: 1542131 - DNA, 15 bp, Homo sapiens
ttttaatcttgttgg

SEQ ID NO: 1542132 - DNA, 15 bp, Homo sapiens
tttttaatcttgttg

SEQ ID NO: 1542133 - DNA, 15 bp, Homo sapiens
atttttaatcttgtt

SEQ ID NO: 1542134 - DNA, 15 bp, Homo sapiens
aatttttaatcttgt

SEQ ID NO: 1542135 - DNA, 15 bp, Homo sapiens
gaatttttaatcttg

SEQ ID NO: 1542136 - DNA, 15 bp, Homo sapiens
agaatttttaatctt

SEQ ID NO: 1542137 - DNA, 15 bp, Homo sapiens
cagaatttttaatct

SEQ ID NO: 1542138 - DNA, 15 bp, Homo sapiens
tcagaatttttaatc

SEQ ID NO: 1542139 - DNA, 15 bp, Homo sapiens
ctcagaatttttaat

SEQ ID NO: 1542140 - DNA, 15 bp, Homo sapiens
cctcagaatttttaa

SEQ ID NO: 1542141 - DNA, 15 bp, Homo sapiens
acctcagaattttta

SEQ ID NO: 1542142 - DNA, 15 bp, Homo sapiens
cacctcagaattttt

SEQ ID NO: 1542143 - DNA, 15 bp, Homo sapiens
tcacctcagaatttt

SEQ ID NO: 1542144 - DNA, 15 bp, Homo sapiens
ttcacctcagaattt

SEQ ID NO: 1542145 - DNA, 15 bp, Homo sapiens
cttcacctcagaatt

SEQ ID NO: 1542146 - DNA, 15 bp, Homo sapiens
acttcacctcagaat

SEQ ID NO: 1542147 - DNA, 15 bp, Homo sapiens
aacttcacctcagaa

SEQ ID NO: 1542148 - DNA, 15 bp, Homo sapiens
aaacttcacctcaga

SEQ ID NO: 1542149 - DNA, 15 bp, Homo sapiens
aaaacttcacctcag

SEQ ID NO: 1542150 - DNA, 15 bp, Homo sapiens
aaaaacttcacctca

SEQ ID NO: 1542151 - DNA, 15 bp, Homo sapiens
aaaaaacttcacctc

SEQ ID NO: 1542152 - DNA, 15 bp, Homo sapiens
taaaaaacttcacct

SEQ ID NO: 1542153 - DNA, 15 bp, Homo sapiens
ataaaaaacttcacc

SEQ ID NO: 1542154 - DNA, 15 bp, Homo sapiens
aataaaaaacttcac

SEQ ID NO: 1542155 - DNA, 15 bp, Homo sapiens
caataaaaaacttca

SEQ ID NO: 1542156 - DNA, 15 bp, Homo sapiens
tcaataaaaaacttc

SEQ ID NO: 1542157 - DNA, 15 bp, Homo sapiens
atcaataaaaaactt

SEQ ID NO: 1542158 - DNA, 15 bp, Homo sapiens
tatcaataaaaaact

SEQ ID NO: 1542159 - DNA, 15 bp, Homo sapiens
gtatcaataaaaaac

SEQ ID NO: 1542160 - DNA, 15 bp, Homo sapiens
tgtatcaataaaaaa

SEQ ID NO: 1542161 - DNA, 15 bp, Homo sapiens
atgtatcaataaaaa

SEQ ID NO: 1542162 - DNA, 15 bp, Homo sapiens
catgtatcaataaaa

SEQ ID NO: 1542163 - DNA, 15 bp, Homo sapiens
tcatgtatcaataaa

SEQ ID NO: 1542164 - DNA, 15 bp, Homo sapiens
atcatgtatcaataa

SEQ ID NO: 1542165 - DNA, 15 bp, Homo sapiens
tatcatgtatcaata

SEQ ID NO: 1542166 - DNA, 15 bp, Homo sapiens
ttatcatgtatcaat

SEQ ID NO: 1542167 - DNA, 15 bp, Homo sapiens
attatcatgtatcaa

SEQ ID NO: 1542168 - DNA, 15 bp, Homo sapiens
aattatcatgtatca

SEQ ID NO: 1542169 - DNA, 15 bp, Homo sapiens
aaattatcatgtatc

SEQ ID NO: 1542170 - DNA, 15 bp, Homo sapiens
caaattatcatgtat

SEQ ID NO: 1542171 - DNA, 15 bp, Homo sapiens
acaaattatcatgta

SEQ ID NO: 1542172 - DNA, 15 bp, Homo sapiens
tacaaattatcatgt

SEQ ID NO: 1542173 - DNA, 15 bp, Homo sapiens
gtacaaattatcatg

SEQ ID NO: 1542174 - DNA, 15 bp, Homo sapiens
tgtacaaattatcat

SEQ ID NO: 1542175 - DNA, 15 bp, Homo sapiens
atgtacaaattatca

SEQ ID NO: 1542176 - DNA, 15 bp, Homo sapiens
tatgtacaaattatc

SEQ ID NO: 1542177 - DNA, 15 bp, Homo sapiens
atatgtacaaattat

SEQ ID NO: 1542178 - DNA, 15 bp, Homo sapiens
aatatgtacaaatta

SEQ ID NO: 1542179 - DNA, 15 bp, Homo sapiens
taatatgtacaaatt

SEQ ID NO: 1542180 - DNA, 15 bp, Homo sapiens
ttaatatgtacaaat

SEQ ID NO: 1542181 - DNA, 15 bp, Homo sapiens
attaatatgtacaaa

SEQ ID NO: 1542182 - DNA, 15 bp, Homo sapiens
cattaatatgtacaa

SEQ ID NO: 1542183 - DNA, 15 bp, Homo sapiens
ccattaatatgtaca

SEQ ID NO: 1542184 - DNA, 15 bp, Homo sapiens
tccattaatatgtac

SEQ ID NO: 1542185 - DNA, 15 bp, Homo sapiens
ctccattaatatgta

SEQ ID NO: 1542186 - DNA, 15 bp, Homo sapiens
actccattaatatgt

SEQ ID NO: 1542187 - DNA, 15 bp, Homo sapiens
tactccattaatatg

SEQ ID NO: 1542188 - DNA, 15 bp, Homo sapiens
atactccattaatat

SEQ ID NO: 1542189 - DNA, 15 bp, Homo sapiens
catactccattaata

SEQ ID NO: 1542190 - DNA, 15 bp, Homo sapiens
acatactccattaat

SEQ ID NO: 1542191 - DNA, 15 bp, Homo sapiens
cacatactccattaa

SEQ ID NO: 1542192 - DNA, 15 bp, Homo sapiens
acacatactccatta

SEQ ID NO: 1542193 - DNA, 15 bp, Homo sapiens
cacacatactccatt

SEQ ID NO: 1542194 - DNA, 15 bp, Homo sapiens
tcacacatactccat

SEQ ID NO: 1542195 - DNA, 15 bp, Homo sapiens
atcacacatactcca

SEQ ID NO: 1542196 - DNA, 15 bp, Homo sapiens
aatcacacatactcc

SEQ ID NO: 1542197 - DNA, 15 bp, Homo sapiens
aaatcacacatactc

SEQ ID NO: 1542198 - DNA, 15 bp, Homo sapiens
aaaatcacacatact

SEQ ID NO: 1542199 - DNA, 15 bp, Homo sapiens
aaaaatcacacatac

SEQ ID NO: 1542200 - DNA, 15 bp, Homo sapiens
aaaaaatcacacata

SEQ ID NO: 1542201 - DNA, 15 bp, Homo sapiens
aaaaaaatcacacat

SEQ ID NO: 1542202 - DNA, 15 bp, Homo sapiens
caaaaaaatcacaca

SEQ ID NO: 1542203 - DNA, 15 bp, Homo sapiens
ccaaaaaaatcacac

SEQ ID NO: 1542204 - DNA, 15 bp, Homo sapiens
accaaaaaaatcaca

SEQ ID NO: 1542205 - DNA, 15 bp, Homo sapiens
aaccaaaaaaatcac

SEQ ID NO: 1542206 - DNA, 15 bp, Homo sapiens
aaaccaaaaaaatca

SEQ ID NO: 1542207 - DNA, 15 bp, Homo sapiens
aaaaccaaaaaaatc

SEQ ID NO: 1542208 - DNA, 15 bp, Homo sapiens
aaaaaccaaaaaaat

SEQ ID NO: 1542209 - DNA, 15 bp, Homo sapiens
aaaaaaccaaaaaaa

SEQ ID NO: 1542210 - DNA, 15 bp, Homo sapiens
aaaaaaaccaaaaaa

SEQ ID NO: 1542211 - DNA, 15 bp, Homo sapiens
caaaaaaaaccaaaa

SEQ ID NO: 1542212 - DNA, 15 bp, Homo sapiens
acaaaaaaaaccaaa

SEQ ID NO: 1542213 - DNA, 15 bp, Homo sapiens
aacaaaaaaaaccaa

SEQ ID NO: 1542214 - DNA, 15 bp, Homo sapiens
aaacaaaaaaaacca

SEQ ID NO: 1542215 - DNA, 15 bp, Homo sapiens
aaaacaaaaaaaacc

SEQ ID NO: 1542216 - DNA, 15 bp, Homo sapiens
caacaaaaacaaaaa

SEQ ID NO: 1542217 - DNA, 15 bp, Homo sapiens
ccaacaaaaacaaaa

SEQ ID NO: 1542218 - DNA, 15 bp, Homo sapiens
tccaacaaaaacaaa

SEQ ID NO: 1542219 - DNA, 15 bp, Homo sapiens
ttccaacaaaaacaa

SEQ ID NO: 1542220 - DNA, 15 bp, Homo sapiens
attccaacaaaaaca

SEQ ID NO: 1542221 - DNA, 15 bp, Homo sapiens
gattccaacaaaaac

SEQ ID NO: 1542222 - DNA, 15 bp, Homo sapiens
agattccaacaaaaa

SEQ ID NO: 1542223 - DNA, 15 bp, Homo sapiens
gagattccaacaaaa

SEQ ID NO: 1542224 - DNA, 15 bp, Homo sapiens
cgagattccaacaaa

SEQ ID NO: 1542225 - DNA, 15 bp, Homo sapiens
gcgagattccaacaa

SEQ ID NO: 1542226 - DNA, 15 bp, Homo sapiens
agcgagattccaaca

SEQ ID NO: 1542227 - DNA, 15 bp, Homo sapiens
gagcgagattccaac

SEQ ID NO: 1542228 - DNA, 15 bp, Homo sapiens
agagcgagattccaa

SEQ ID NO: 1542229 - DNA, 15 bp, Homo sapiens
tagagcgagattcca

SEQ ID NO: 1542230 - DNA, 15 bp, Homo sapiens
atagagcgagattcc

SEQ ID NO: 1542231 - DNA, 15 bp, Homo sapiens
gatagagcgagattc

SEQ ID NO: 1542232 - DNA, 15 bp, Homo sapiens
cgatagagcgagatt

SEQ ID NO: 1542233 - DNA, 15 bp, Homo sapiens
gcgatagagcgagat

SEQ ID NO: 1542234 - DNA, 15 bp, Homo sapiens
ggcgatagagcgaga

SEQ ID NO: 1542235 - DNA, 15 bp, Homo sapiens
gggcgatagagcgag

SEQ ID NO: 1542236 - DNA, 15 bp, Homo sapiens
tgggcgatagagcga

SEQ ID NO: 1542237 - DNA, 15 bp, Homo sapiens
ctgggcgatagagcg

SEQ ID NO: 1542238 - DNA, 15 bp, Homo sapiens
cctgggcgatagagc

SEQ ID NO: 1542239 - DNA, 15 bp, Homo sapiens
gcctgggcgatagag

SEQ ID NO: 1542240 - DNA, 15 bp, Homo sapiens
agcctgggcgataga

SEQ ID NO: 1542241 - DNA, 15 bp, Homo sapiens
cagcctgggcgatag

SEQ ID NO: 1542242 - DNA, 15 bp, Homo sapiens
ccagcctgggcgata

SEQ ID NO: 1542243 - DNA, 15 bp, Homo sapiens
tttgcagtgagctga

SEQ ID NO: 1542244 - DNA, 15 bp, Homo sapiens
gtttgcagtgagctg

SEQ ID NO: 1542245 - DNA, 15 bp, Homo sapiens
agtttgcagtgagct

SEQ ID NO: 1542246 - DNA, 15 bp, Homo sapiens
gggagtttgcagtga

SEQ ID NO: 1542247 - DNA, 15 bp, Homo sapiens
ggggagtttgcagtg

SEQ ID NO: 1542248 - DNA, 15 bp, Homo sapiens
aggggagtttgcagt

SEQ ID NO: 1542249 - DNA, 15 bp, Homo sapiens
gaggggagtttgcag

SEQ ID NO: 1542250 - DNA, 15 bp, Homo sapiens
ggaggggagtttgca

SEQ ID NO: 1542251 - DNA, 15 bp, Homo sapiens
gggaggggagtttgc

SEQ ID NO: 1542252 - DNA, 15 bp, Homo sapiens
tgggaggggagtttg

SEQ ID NO: 1542253 - DNA, 15 bp, Homo sapiens
ctgggaggggagttt

SEQ ID NO: 1542254 - DNA, 15 bp, Homo sapiens
cctgggaggggagtt

SEQ ID NO: 1542255 - DNA, 15 bp, Homo sapiens
acctgggaggggagt

SEQ ID NO: 1542256 - DNA, 15 bp, Homo sapiens
aacctgggaggggag

SEQ ID NO: 1542257 - DNA, 15 bp, Homo sapiens
gaacctgggagggga

SEQ ID NO: 1542258 - DNA, 15 bp, Homo sapiens
tgaacctgggagggg

SEQ ID NO: 1542259 - DNA, 15 bp, Homo sapiens
ttgaacctgggaggg

SEQ ID NO: 1542260 - DNA, 15 bp, Homo sapiens
tgcttgaacctggga

SEQ ID NO: 1542261 - DNA, 15 bp, Homo sapiens
ttgcttgaacctggg

SEQ ID NO: 1542262 - DNA, 15 bp, Homo sapiens
attgcttgaacctgg

SEQ ID NO: 1542263 - DNA, 15 bp, Homo sapiens
aattgcttgaacctg

SEQ ID NO: 1542264 - DNA, 15 bp, Homo sapiens
ccccagctacttggg

SEQ ID NO: 1542265 - DNA, 15 bp, Homo sapiens
gccccagctacttgg

SEQ ID NO: 1542266 - DNA, 15 bp, Homo sapiens
agccccagctacttg

SEQ ID NO: 1542267 - DNA, 15 bp, Homo sapiens
tagccccagctactt

SEQ ID NO: 1542268 - DNA, 15 bp, Homo sapiens
gtagccccagctact

SEQ ID NO: 1542269 - DNA, 15 bp, Homo sapiens
tgtagccccagctac

SEQ ID NO: 1542270 - DNA, 15 bp, Homo sapiens
ctgtagccccagcta

SEQ ID NO: 1542271 - DNA, 15 bp, Homo sapiens
cctgtagccccagct

SEQ ID NO: 1542272 - DNA, 15 bp, Homo sapiens
gcctgtagccccagc

SEQ ID NO: 1542273 - DNA, 15 bp, Homo sapiens
tgcctgtagccccag

SEQ ID NO: 1542274 - DNA, 15 bp, Homo sapiens
gtgcctgtagcccca

SEQ ID NO: 1542275 - DNA, 15 bp, Homo sapiens
cgtgcctgtagcccc

SEQ ID NO: 1542276 - DNA, 15 bp, Homo sapiens
acgtgcctgtagccc

SEQ ID NO: 1542277 - DNA, 15 bp, Homo sapiens
cacgtgcctgtagcc

SEQ ID NO: 1542278 - DNA, 15 bp, Homo sapiens
gcacgtgcctgtagc

SEQ ID NO: 1542279 - DNA, 15 bp, Homo sapiens
gtggtggcacgtgcc

SEQ ID NO: 1542280 - DNA, 15 bp, Homo sapiens
cgtggtggcacgtgc

SEQ ID NO: 1542281 - DNA, 15 bp, Homo sapiens
gcgtggtggcacgtg

SEQ ID NO: 1542282 - DNA, 15 bp, Homo sapiens
ggcgtggtggcacgt

SEQ ID NO: 1542283 - DNA, 15 bp, Homo sapiens
gggcgtggtggcacg

SEQ ID NO: 1542284 - DNA, 15 bp, Homo sapiens
gggtgaaaccctgtc

SEQ ID NO: 1542285 - DNA, 15 bp, Homo sapiens
agggtgaaaccctgt

SEQ ID NO: 1542286 - DNA, 15 bp, Homo sapiens
cagggtgaaaccctg

SEQ ID NO: 1542287 - DNA, 15 bp, Homo sapiens
acagggtgaaaccct

SEQ ID NO: 1542288 - DNA, 15 bp, Homo sapiens
aacagggtgaaaccc

SEQ ID NO: 1542289 - DNA, 15 bp, Homo sapiens
caacagggtgaaacc

SEQ ID NO: 1542290 - DNA, 15 bp, Homo sapiens
ccaacagggtgaaac

SEQ ID NO: 1542291 - DNA, 15 bp, Homo sapiens
gccaacagggtgaaa

SEQ ID NO: 1542292 - DNA, 15 bp, Homo sapiens
ggccaacagggtgaa

SEQ ID NO: 1542293 - DNA, 15 bp, Homo sapiens
tggccaacagggtga

SEQ ID NO: 1542294 - DNA, 15 bp, Homo sapiens
ctggccaacagggtg

SEQ ID NO: 1542295 - DNA, 15 bp, Homo sapiens
cctggccaacagggt

SEQ ID NO: 1542296 - DNA, 15 bp, Homo sapiens
gcctggccaacaggg

SEQ ID NO: 1542297 - DNA, 15 bp, Homo sapiens
tagcctggccaacag

SEQ ID NO: 1542298 - DNA, 15 bp, Homo sapiens
ggtcaggaggtcaag

SEQ ID NO: 1542299 - DNA, 15 bp, Homo sapiens
aggtcaggaggtcaa

SEQ ID NO: 1542300 - DNA, 15 bp, Homo sapiens
gaggtcaggaggtca

SEQ ID NO: 1542301 - DNA, 15 bp, Homo sapiens
tgaggtcaggaggtc

SEQ ID NO: 1542302 - DNA, 15 bp, Homo sapiens
ctgaggtcaggaggt

SEQ ID NO: 1542303 - DNA, 15 bp, Homo sapiens
cctgaggtcaggagg

SEQ ID NO: 1542304 - DNA, 15 bp, Homo sapiens
gacgggcagatcacc

SEQ ID NO: 1542305 - DNA, 15 bp, Homo sapiens
agacgggcagatcac

SEQ ID NO: 1542306 - DNA, 15 bp, Homo sapiens
aagacgggcagatca

SEQ ID NO: 1542307 - DNA, 15 bp, Homo sapiens
caagacgggcagatc

SEQ ID NO: 1542308 - DNA, 15 bp, Homo sapiens
ccaagacgggcagat

SEQ ID NO: 1542309 - DNA, 15 bp, Homo sapiens
gccaagacgggcaga

SEQ ID NO: 1542310 - DNA, 15 bp, Homo sapiens
ggccaagacgggcag

SEQ ID NO: 1542311 - DNA, 15 bp, Homo sapiens
aggccaagacgggca

SEQ ID NO: 1542312 - DNA, 15 bp, Homo sapiens
gaggccaagacgggc

SEQ ID NO: 1542313 - DNA, 15 bp, Homo sapiens
ggaggccaagacggg

SEQ ID NO: 1542314 - DNA, 15 bp, Homo sapiens
gggaggccaagacgg

SEQ ID NO: 1542315 - DNA, 15 bp, Homo sapiens
tgggaggccaagacg

SEQ ID NO: 1542316 - DNA, 15 bp, Homo sapiens
agggcatggtggctc

SEQ ID NO: 1542317 - DNA, 15 bp, Homo sapiens
cagggcatggtggct

SEQ ID NO: 1542318 - DNA, 15 bp, Homo sapiens
gcagggcatggtggc

SEQ ID NO: 1542319 - DNA, 15 bp, Homo sapiens
ggcagggcatggtgg

SEQ ID NO: 1542320 - DNA, 15 bp, Homo sapiens
aggcagggcatggtg

SEQ ID NO: 1542321 - DNA, 15 bp, Homo sapiens
caggcagggcatggt

SEQ ID NO: 1542322 - DNA, 15 bp, Homo sapiens
acaggcagggcatgg

SEQ ID NO: 1542323 - DNA, 15 bp, Homo sapiens
tacaggcagggcatg

SEQ ID NO: 1542324 - DNA, 15 bp, Homo sapiens
atacaggcagggcat

SEQ ID NO: 1542325 - DNA, 15 bp, Homo sapiens
catacaggcagggca

SEQ ID NO: 1542326 - DNA, 15 bp, Homo sapiens
acatacaggcagggc

SEQ ID NO: 1542327 - DNA, 15 bp, Homo sapiens
cacatacaggcaggg

SEQ ID NO: 1542328 - DNA, 15 bp, Homo sapiens
acacatacaggcagg

SEQ ID NO: 1542329 - DNA, 15 bp, Homo sapiens
cacacatacaggcag

SEQ ID NO: 1542330 - DNA, 15 bp, Homo sapiens
tcacacatacaggca

SEQ ID NO: 1542331 - DNA, 15 bp, Homo sapiens
atcacacatacaggc

SEQ ID NO: 1542332 - DNA, 15 bp, Homo sapiens
tatcacacatacagg

SEQ ID NO: 1542333 - DNA, 15 bp, Homo sapiens
atatcacacatacag

SEQ ID NO: 1542334 - DNA, 15 bp, Homo sapiens
aatatcacacataca

SEQ ID NO: 1542335 - DNA, 15 bp, Homo sapiens
aaatatcacacatac

SEQ ID NO: 1542336 - DNA, 15 bp, Homo sapiens
aaaatatcacacata

SEQ ID NO: 1542337 - DNA, 15 bp, Homo sapiens
caaaatatcacacat

SEQ ID NO: 1542338 - DNA, 15 bp, Homo sapiens
tcaaaatatcacaca

SEQ ID NO: 1542339 - DNA, 15 bp, Homo sapiens
atcaaaatatcacac

SEQ ID NO: 1542340 - DNA, 15 bp, Homo sapiens
tatcaaaatatcaca

SEQ ID NO: 1542341 - DNA, 15 bp, Homo sapiens
gtatcaaaatatcac

SEQ ID NO: 1542342 - DNA, 15 bp, Homo sapiens
tgtatcaaaatatca

SEQ ID NO: 1542343 - DNA, 15 bp, Homo sapiens
atgtatcaaaatatc

SEQ ID NO: 1542344 - DNA, 15 bp, Homo sapiens
catgtatcaaaatat

SEQ ID NO: 1542345 - DNA, 15 bp, Homo sapiens
gcatgtatcaaaata

SEQ ID NO: 1542346 - DNA, 15 bp, Homo sapiens
tgcatgtatcaaaat

SEQ ID NO: 1542347 - DNA, 15 bp, Homo sapiens
atgcatgtatcaaaa

SEQ ID NO: 1542348 - DNA, 15 bp, Homo sapiens
tatgcatgtatcaaa

SEQ ID NO: 1542349 - DNA, 15 bp, Homo sapiens
atatgcatgtatcaa

SEQ ID NO: 1542350 - DNA, 15 bp, Homo sapiens
tatatgcatgtatca

SEQ ID NO: 1542351 - DNA, 15 bp, Homo sapiens
ttatatgcatgtatc

SEQ ID NO: 1542352 - DNA, 15 bp, Homo sapiens
attatatgcatgtat

SEQ ID NO: 1542353 - DNA, 15 bp, Homo sapiens
cattatatgcatgta

SEQ ID NO: 1542354 - DNA, 15 bp, Homo sapiens
acattatatgcatgt

SEQ ID NO: 1542355 - DNA, 15 bp, Homo sapiens
cacattatatgcatg

SEQ ID NO: 1542356 - DNA, 15 bp, Homo sapiens
acacattatatgcat

SEQ ID NO: 1542357 - DNA, 15 bp, Homo sapiens
tacacattatatgca

SEQ ID NO: 1542358 - DNA, 15 bp, Homo sapiens
ttacacattatatgc

SEQ ID NO: 1542359 - DNA, 15 bp, Homo sapiens
attacacattatatg

SEQ ID NO: 1542360 - DNA, 15 bp, Homo sapiens
cattacacattatat

SEQ ID NO: 1542361 - DNA, 15 bp, Homo sapiens
atcattacacattat

SEQ ID NO: 1542362 - DNA, 15 bp, Homo sapiens
aatcattacacatta

SEQ ID NO: 1542363 - DNA, 15 bp, Homo sapiens
taatcattacacatt

SEQ ID NO: 1542364 - DNA, 15 bp, Homo sapiens
ttaatcattacacat

SEQ ID NO: 1542365 - DNA, 15 bp, Homo sapiens
tttaatcattacaca

SEQ ID NO: 1542366 - DNA, 15 bp, Homo sapiens
atttaatcattacac

SEQ ID NO: 1542367 - DNA, 15 bp, Homo sapiens
gatttaatcattaca

SEQ ID NO: 1542368 - DNA, 15 bp, Homo sapiens
tgatttaatcattac

SEQ ID NO: 1542369 - DNA, 15 bp, Homo sapiens
ctgatttaatcatta

SEQ ID NO: 1542370 - DNA, 15 bp, Homo sapiens
cctgatttaatcatt

SEQ ID NO: 1542371 - DNA, 15 bp, Homo sapiens
ccctgatttaatcat

SEQ ID NO: 1542372 - DNA, 15 bp, Homo sapiens
accctgatttaatca

SEQ ID NO: 1542373 - DNA, 15 bp, Homo sapiens
caccctgatttaatc

SEQ ID NO: 1542374 - DNA, 15 bp, Homo sapiens
tcaccctgatttaat

SEQ ID NO: 1542375 - DNA, 15 bp, Homo sapiens
atcaccctgatttaa

SEQ ID NO: 1542376 - DNA, 15 bp, Homo sapiens
aatcaccctgattta

SEQ ID NO: 1542377 - DNA, 15 bp, Homo sapiens
taatcaccctgattt

SEQ ID NO: 1542378 - DNA, 15 bp, Homo sapiens
ctaatcaccctgatt

SEQ ID NO: 1542379 - DNA, 15 bp, Homo sapiens
cctaatcaccctgat

SEQ ID NO: 1542380 - DNA, 15 bp, Homo sapiens
tcctaatcaccctga

SEQ ID NO: 1542381 - DNA, 15 bp, Homo sapiens
atcctaatcaccctg

SEQ ID NO: 1542382 - DNA, 15 bp, Homo sapiens
tatcctaatcaccct

SEQ ID NO: 1542383 - DNA, 15 bp, Homo sapiens
atatcctaatcaccc

SEQ ID NO: 1542384 - DNA, 15 bp, Homo sapiens
gatatcctaatcacc

SEQ ID NO: 1542385 - DNA, 15 bp, Homo sapiens
ggatatcctaatcac

SEQ ID NO: 1542386 - DNA, 15 bp, Homo sapiens
tggatatcctaatca

SEQ ID NO: 1542387 - DNA, 15 bp, Homo sapiens
atggatatcctaatc

SEQ ID NO: 1542388 - DNA, 15 bp, Homo sapiens
aatggatatcctaat

SEQ ID NO: 1542389 - DNA, 15 bp, Homo sapiens
caatggatatcctaa

SEQ ID NO: 1542390 - DNA, 15 bp, Homo sapiens
gcaatggatatccta

SEQ ID NO: 1542391 - DNA, 15 bp, Homo sapiens
ggcaatggatatcct

SEQ ID NO: 1542392 - DNA, 15 bp, Homo sapiens
aggcaatggatatcc

SEQ ID NO: 1542393 - DNA, 15 bp, Homo sapiens
gaggcaatggatatc

SEQ ID NO: 1542394 - DNA, 15 bp, Homo sapiens
tgaggcaatggatat

SEQ ID NO: 1542395 - DNA, 15 bp, Homo sapiens
ttgaggcaatggata

SEQ ID NO: 1542396 - DNA, 15 bp, Homo sapiens
tttgaggcaatggat

SEQ ID NO: 1542397 - DNA, 15 bp, Homo sapiens
ctttgaggcaatgga

SEQ ID NO: 1542398 - DNA, 15 bp, Homo sapiens
tctttgaggcaatgg

SEQ ID NO: 1542399 - DNA, 15 bp, Homo sapiens
ttctttgaggcaatg

SEQ ID NO: 1542400 - DNA, 15 bp, Homo sapiens
tttctttgaggcaat

SEQ ID NO: 1542401 - DNA, 15 bp, Homo sapiens
ttttctttgaggcaa

SEQ ID NO: 1542402 - DNA, 15 bp, Homo sapiens
cttttctttgaggca

SEQ ID NO: 1542403 - DNA, 15 bp, Homo sapiens
tcttttctttgaggc

SEQ ID NO: 1542404 - DNA, 15 bp, Homo sapiens
ttcttttctttgagg

SEQ ID NO: 1542405 - DNA, 15 bp, Homo sapiens
tttcttttctttgag

SEQ ID NO: 1542406 - DNA, 15 bp, Homo sapiens
atttcttttctttga

SEQ ID NO: 1542407 - DNA, 15 bp, Homo sapiens
aatttcttttctttg

SEQ ID NO: 1542408 - DNA, 15 bp, Homo sapiens
caatttcttttcttt

SEQ ID NO: 1542409 - DNA, 15 bp, Homo sapiens
acaatttcttttctt

SEQ ID NO: 1542410 - DNA, 15 bp, Homo sapiens
aaacaatttcttttc

SEQ ID NO: 1542411 - DNA, 15 bp, Homo sapiens
gaaacaatttctttt

SEQ ID NO: 1542412 - DNA, 15 bp, Homo sapiens
cgaaacaatttcttt

SEQ ID NO: 1542413 - DNA, 15 bp, Homo sapiens
acgaaacaatttctt

SEQ ID NO: 1542414 - DNA, 15 bp, Homo sapiens
gacgaaacaatttct

SEQ ID NO: 1542415 - DNA, 15 bp, Homo sapiens
agacgaaacaatttc

SEQ ID NO: 1542416 - DNA, 15 bp, Homo sapiens
tagacgaaacaattt

SEQ ID NO: 1542417 - DNA, 15 bp, Homo sapiens
ctagacgaaacaatt

SEQ ID NO: 1542418 - DNA, 15 bp, Homo sapiens
gctagacgaaacaat

SEQ ID NO: 1542419 - DNA, 15 bp, Homo sapiens
agctagacgaaacaa

SEQ ID NO: 1542420 - DNA, 15 bp, Homo sapiens
cagctagacgaaaca

SEQ ID NO: 1542421 - DNA, 15 bp, Homo sapiens
acagctagacgaaac

SEQ ID NO: 1542422 - DNA, 15 bp, Homo sapiens
aacagctagacgaaa

SEQ ID NO: 1542423 - DNA, 15 bp, Homo sapiens
aaacagctagacgaa

SEQ ID NO: 1542424 - DNA, 15 bp, Homo sapiens
aaaacagctagacga

SEQ ID NO: 1542425 - DNA, 15 bp, Homo sapiens
caaaacagctagacg

SEQ ID NO: 1542426 - DNA, 15 bp, Homo sapiens
tcaaaacagctagac

SEQ ID NO: 1542427 - DNA, 15 bp, Homo sapiens
ttcaaaacagctaga

SEQ ID NO: 1542428 - DNA, 15 bp, Homo sapiens
tttcaaaacagctag

SEQ ID NO: 1542429 - DNA, 15 bp, Homo sapiens
atttcaaaacagcta

SEQ ID NO: 1542430 - DNA, 15 bp, Homo sapiens
tatttcaaaacagct

SEQ ID NO: 1542431 - DNA, 15 bp, Homo sapiens
atatttcaaaacagc

SEQ ID NO: 1542432 - DNA, 15 bp, Homo sapiens
tatatttcaaaacag

SEQ ID NO: 1542433 - DNA, 15 bp, Homo sapiens
gtatatttcaaaaca

SEQ ID NO: 1542434 - DNA, 15 bp, Homo sapiens
tgtatatttcaaaac

SEQ ID NO: 1542435 - DNA, 15 bp, Homo sapiens
ttgtatatttcaaaa

SEQ ID NO: 1542436 - DNA, 15 bp, Homo sapiens
attgtatatttcaaa

SEQ ID NO: 1542437 - DNA, 15 bp, Homo sapiens
cattgtatatttcaa

SEQ ID NO: 1542438 - DNA, 15 bp, Homo sapiens
acattgtatatttca

SEQ ID NO: 1542439 - DNA, 15 bp, Homo sapiens
aacattgtatatttc

SEQ ID NO: 1542440 - DNA, 15 bp, Homo sapiens
taacattgtatattt

SEQ ID NO: 1542441 - DNA, 15 bp, Homo sapiens
ataacattgtatatt

SEQ ID NO: 1542442 - DNA, 15 bp, Homo sapiens
aataacattgtatat

SEQ ID NO: 1542443 - DNA, 15 bp, Homo sapiens
taataacattgtata

SEQ ID NO: 1542444 - DNA, 15 bp, Homo sapiens
ataataacattgtat

SEQ ID NO: 1542445 - DNA, 15 bp, Homo sapiens
aataataacattgta

SEQ ID NO: 1542446 - DNA, 15 bp, Homo sapiens
taataataacattgt

SEQ ID NO: 1542447 - DNA, 15 bp, Homo sapiens
ttaataataacattg

SEQ ID NO: 1542448 - DNA, 15 bp, Homo sapiens
gttaataataacatt

SEQ ID NO: 1542449 - DNA, 15 bp, Homo sapiens
agttaataataacat

SEQ ID NO: 1542450 - DNA, 15 bp, Homo sapiens
tagttaataataaca

SEQ ID NO: 1542451 - DNA, 15 bp, Homo sapiens
ctagttaataataac

SEQ ID NO: 1542452 - DNA, 15 bp, Homo sapiens
actagttaataataa

SEQ ID NO: 1542453 - DNA, 15 bp, Homo sapiens
gactagttaataata

SEQ ID NO: 1542454 - DNA, 15 bp, Homo sapiens
tgactagttaataat

SEQ ID NO: 1542455 - DNA, 15 bp, Homo sapiens
gtgactagttaataa

SEQ ID NO: 1542456 - DNA, 15 bp, Homo sapiens
ggtgactagttaata

SEQ ID NO: 1542457 - DNA, 15 bp, Homo sapiens
aggtgactagttaat

SEQ ID NO: 1542458 - DNA, 15 bp, Homo sapiens
aaggtgactagttaa

SEQ ID NO: 1542459 - DNA, 15 bp, Homo sapiens
taaggtgactagtta

SEQ ID NO: 1542460 - DNA, 15 bp, Homo sapiens
gtaaggtgactagtt

SEQ ID NO: 1542461 - DNA, 15 bp, Homo sapiens
agtaaggtgactagt

SEQ ID NO: 1542462 - DNA, 15 bp, Homo sapiens
tagtaaggtgactag

SEQ ID NO: 1542463 - DNA, 15 bp, Homo sapiens
atagtaaggtgacta

SEQ ID NO: 1542464 - DNA, 15 bp, Homo sapiens
catagtaaggtgact

SEQ ID NO: 1542465 - DNA, 15 bp, Homo sapiens
tcatagtaaggtgac

SEQ ID NO: 1542466 - DNA, 15 bp, Homo sapiens
ttcatagtaaggtga

SEQ ID NO: 1542467 - DNA, 15 bp, Homo sapiens
attcatagtaaggtg

SEQ ID NO: 1542468 - DNA, 15 bp, Homo sapiens
tattcatagtaaggt

SEQ ID NO: 1542469 - DNA, 15 bp, Homo sapiens
ctattcatagtaagg

SEQ ID NO: 1542470 - DNA, 15 bp, Homo sapiens
actattcatagtaag

SEQ ID NO: 1542471 - DNA, 15 bp, Homo sapiens
tactattcatagtaa

SEQ ID NO: 1542472 - DNA, 15 bp, Homo sapiens
ctactattcatagta

SEQ ID NO: 1542473 - DNA, 15 bp, Homo sapiens
tctactattcatagt

SEQ ID NO: 1542474 - DNA, 15 bp, Homo sapiens
ttctactattcatag

SEQ ID NO: 1542475 - DNA, 15 bp, Homo sapiens
gttctactattcata

SEQ ID NO: 1542476 - DNA, 15 bp, Homo sapiens
agttctactattcat

SEQ ID NO: 1542477 - DNA, 15 bp, Homo sapiens
aagttctactattca

SEQ ID NO: 1542478 - DNA, 15 bp, Homo sapiens
caagttctactattc

SEQ ID NO: 1542479 - DNA, 15 bp, Homo sapiens
acaagttctactatt

SEQ ID NO: 1542480 - DNA, 15 bp, Homo sapiens
aacaagttctactat

SEQ ID NO: 1542481 - DNA, 15 bp, Homo sapiens
gaacaagttctacta

SEQ ID NO: 1542482 - DNA, 15 bp, Homo sapiens
ggaacaagttctact

SEQ ID NO: 1542483 - DNA, 15 bp, Homo sapiens
aggaacaagttctac

SEQ ID NO: 1542484 - DNA, 15 bp, Homo sapiens
aaggaacaagttcta

SEQ ID NO: 1542485 - DNA, 15 bp, Homo sapiens
gaaggaacaagttct

SEQ ID NO: 1542486 - DNA, 15 bp, Homo sapiens
agaaggaacaagttc

SEQ ID NO: 1542487 - DNA, 15 bp, Homo sapiens
tagaaggaacaagtt

SEQ ID NO: 1542488 - DNA, 15 bp, Homo sapiens
atagaaggaacaagt

SEQ ID NO: 1542489 - DNA, 15 bp, Homo sapiens
gatagaaggaacaag

SEQ ID NO: 1542490 - DNA, 15 bp, Homo sapiens
agatagaaggaacaa

SEQ ID NO: 1542491 - DNA, 15 bp, Homo sapiens
tagatagaaggaaca

SEQ ID NO: 1542492 - DNA, 15 bp, Homo sapiens
ttagatagaaggaac

SEQ ID NO: 1542493 - DNA, 15 bp, Homo sapiens
gttagaattagatag

SEQ ID NO: 1542494 - DNA, 15 bp, Homo sapiens
tgttagaattagata

SEQ ID NO: 1542495 - DNA, 15 bp, Homo sapiens
ttgttagaattagat

SEQ ID NO: 1542496 - DNA, 15 bp, Homo sapiens
attgttagaattaga

SEQ ID NO: 1542497 - DNA, 15 bp, Homo sapiens
tattgttagaattag

SEQ ID NO: 1542498 - DNA, 15 bp, Homo sapiens
gtattgttagaatta

SEQ ID NO: 1542499 - DNA, 15 bp, Homo sapiens
tgtattgttagaatt

SEQ ID NO: 1542500 - DNA, 15 bp, Homo sapiens
atgtattgttagaat

SEQ ID NO: 1542501 - DNA, 15 bp, Homo sapiens
tatgtattgttagaa

SEQ ID NO: 1542502 - DNA, 15 bp, Homo sapiens
atatgtattgttaga

SEQ ID NO: 1542503 - DNA, 15 bp, Homo sapiens
tatatgtattgttag

SEQ ID NO: 1542504 - DNA, 15 bp, Homo sapiens
atatatgtattgtta

SEQ ID NO: 1542505 - DNA, 15 bp, Homo sapiens
aatatatgtattgtt

SEQ ID NO: 1542506 - DNA, 15 bp, Homo sapiens
taatatatgtattgt

SEQ ID NO: 1542507 - DNA, 15 bp, Homo sapiens
ataatatatgtattg

SEQ ID NO: 1542508 - DNA, 15 bp, Homo sapiens
aataatatatgtatt

SEQ ID NO: 1542509 - DNA, 15 bp, Homo sapiens
aaataatatatgtat

SEQ ID NO: 1542510 - DNA, 15 bp, Homo sapiens
taaataatatatgta

SEQ ID NO: 1542511 - DNA, 15 bp, Homo sapiens
ataaataatatatgt

SEQ ID NO: 1542512 - DNA, 15 bp, Homo sapiens
aataaataatatatg

SEQ ID NO: 1542513 - DNA, 15 bp, Homo sapiens
aaataaataatatat

SEQ ID NO: 1542514 - DNA, 15 bp, Homo sapiens
aaaataaataatata

SEQ ID NO: 1542515 - DNA, 15 bp, Homo sapiens
taaaataaataatat

SEQ ID NO: 1542516 - DNA, 15 bp, Homo sapiens
ataaaataaataata

SEQ ID NO: 1542517 - DNA, 15 bp, Homo sapiens
aataaaataaataat

SEQ ID NO: 1542518 - DNA, 15 bp, Homo sapiens
ataataaaataaata

SEQ ID NO: 1542519 - DNA, 15 bp, Homo sapiens
aataataaaataaat

SEQ ID NO: 1542520 - DNA, 15 bp, Homo sapiens
taaaaaaataataat

SEQ ID NO: 1542521 - DNA, 15 bp, Homo sapiens
ttaaaaaaataataa

SEQ ID NO: 1542522 - DNA, 15 bp, Homo sapiens
cttaaaaaaataata

SEQ ID NO: 1542523 - DNA, 15 bp, Homo sapiens
tcttaaaaaaataat

SEQ ID NO: 1542524 - DNA, 15 bp, Homo sapiens
gtcttaaaaaaataa

SEQ ID NO: 1542525 - DNA, 15 bp, Homo sapiens
tgtcttaaaaaaata

SEQ ID NO: 1542526 - DNA, 15 bp, Homo sapiens
ctgtcttaaaaaaat

SEQ ID NO: 1542527 - DNA, 15 bp, Homo sapiens
actgtcttaaaaaaa

SEQ ID NO: 1542528 - DNA, 15 bp, Homo sapiens
gactgtcttaaaaaa

SEQ ID NO: 1542529 - DNA, 15 bp, Homo sapiens
agactgtcttaaaaa

SEQ ID NO: 1542530 - DNA, 15 bp, Homo sapiens
gagactgtcttaaaa

SEQ ID NO: 1542531 - DNA, 15 bp, Homo sapiens
tgagactgtcttaaa

SEQ ID NO: 1542532 - DNA, 15 bp, Homo sapiens
gtgagactgtcttaa

SEQ ID NO: 1542533 - DNA, 15 bp, Homo sapiens
agtgagactgtctta

SEQ ID NO: 1542534 - DNA, 15 bp, Homo sapiens
cagtgagactgtctt

SEQ ID NO: 1542535 - DNA, 15 bp, Homo sapiens
acagtgagactgtct

SEQ ID NO: 1542536 - DNA, 15 bp, Homo sapiens
aacagtgagactgtc

SEQ ID NO: 1542537 - DNA, 15 bp, Homo sapiens
caacagtgagactgt

SEQ ID NO: 1542538 - DNA, 15 bp, Homo sapiens
gcaacagtgagactg

SEQ ID NO: 1542539 - DNA, 15 bp, Homo sapiens
ggcaacagtgagact

SEQ ID NO: 1542540 - DNA, 15 bp, Homo sapiens
gggcaacagtgagac

SEQ ID NO: 1542541 - DNA, 15 bp, Homo sapiens
tgggcaacagtgaga

SEQ ID NO: 1542542 - DNA, 15 bp, Homo sapiens
ctgggcaacagtgag

SEQ ID NO: 1542543 - DNA, 15 bp, Homo sapiens
cctgggcaacagtga

SEQ ID NO: 1542544 - DNA, 15 bp, Homo sapiens
gcctgggcaacagtg

SEQ ID NO: 1542545 - DNA, 15 bp, Homo sapiens
agcctgggcaacagt

SEQ ID NO: 1542546 - DNA, 15 bp, Homo sapiens
ttcagcctgggcaac

SEQ ID NO: 1542547 - DNA, 15 bp, Homo sapiens
cttcagcctgggcaa

SEQ ID NO: 1542548 - DNA, 15 bp, Homo sapiens
acttcagcctgggca

SEQ ID NO: 1542549 - DNA, 15 bp, Homo sapiens
gagattgtaccactg

SEQ ID NO: 1542550 - DNA, 15 bp, Homo sapiens
tgagattgtaccact

SEQ ID NO: 1542551 - DNA, 15 bp, Homo sapiens
ctgagattgtaccac

SEQ ID NO: 1542552 - DNA, 15 bp, Homo sapiens
gctgagattgtacca

SEQ ID NO: 1542553 - DNA, 15 bp, Homo sapiens
agctgagattgtacc

SEQ ID NO: 1542554 - DNA, 15 bp, Homo sapiens
gagctgagattgtac

SEQ ID NO: 1542555 - DNA, 15 bp, Homo sapiens
cgagctgagattgta

SEQ ID NO: 1542556 - DNA, 15 bp, Homo sapiens
gcgagctgagattgt

SEQ ID NO: 1542557 - DNA, 15 bp, Homo sapiens
agcgagctgagattg

SEQ ID NO: 1542558 - DNA, 15 bp, Homo sapiens
cagcgagctgagatt

SEQ ID NO: 1542559 - DNA, 15 bp, Homo sapiens
gcagcgagctgagat

SEQ ID NO: 1542560 - DNA, 15 bp, Homo sapiens
tgcagcgagctgaga

SEQ ID NO: 1542561 - DNA, 15 bp, Homo sapiens
ctgcagcgagctgag

SEQ ID NO: 1542562 - DNA, 15 bp, Homo sapiens
gctgcagcgagctga

SEQ ID NO: 1542563 - DNA, 15 bp, Homo sapiens
ggctgcagcgagctg

SEQ ID NO: 1542564 - DNA, 15 bp, Homo sapiens
gaggctgcagcgagc

SEQ ID NO: 1542565 - DNA, 15 bp, Homo sapiens
agaggctgcagcgag

SEQ ID NO: 1542566 - DNA, 15 bp, Homo sapiens
cagaggctgcagcga

SEQ ID NO: 1542567 - DNA, 15 bp, Homo sapiens
gcagaggctgcagcg

SEQ ID NO: 1542568 - DNA, 15 bp, Homo sapiens
ggcagaggctgcagc

SEQ ID NO: 1542569 - DNA, 15 bp, Homo sapiens
gggaggcagaggctg

SEQ ID NO: 1542570 - DNA, 15 bp, Homo sapiens
tgggaggcagaggct

SEQ ID NO: 1542571 - DNA, 15 bp, Homo sapiens
ctgggaggcagaggc

SEQ ID NO: 1542572 - DNA, 15 bp, Homo sapiens
gacctgggaggcaga

SEQ ID NO: 1542573 - DNA, 15 bp, Homo sapiens
ggacctgggaggcag

SEQ ID NO: 1542574 - DNA, 15 bp, Homo sapiens
tggacctgggaggca

SEQ ID NO: 1542575 - DNA, 15 bp, Homo sapiens
ttggacctgggaggc

SEQ ID NO: 1542576 - DNA, 15 bp, Homo sapiens
cttggacctgggagg

SEQ ID NO: 1542577 - DNA, 15 bp, Homo sapiens
acttggacctgggag

SEQ ID NO: 1542578 - DNA, 15 bp, Homo sapiens
cacttggacctggga

SEQ ID NO: 1542579 - DNA, 15 bp, Homo sapiens
tcacttggacctggg

SEQ ID NO: 1542580 - DNA, 15 bp, Homo sapiens
atcacttggacctgg

SEQ ID NO: 1542581 - DNA, 15 bp, Homo sapiens
aatcacttggacctg

SEQ ID NO: 1542582 - DNA, 15 bp, Homo sapiens
gaatcacttggacct

SEQ ID NO: 1542583 - DNA, 15 bp, Homo sapiens
agaatcacttggacc

SEQ ID NO: 1542584 - DNA, 15 bp, Homo sapiens
gagaatcacttggac

SEQ ID NO: 1542585 - DNA, 15 bp, Homo sapiens
cgagaatcacttgga

SEQ ID NO: 1542586 - DNA, 15 bp, Homo sapiens
acgagaatcacttgg

SEQ ID NO: 1542587 - DNA, 15 bp, Homo sapiens
cacgagaatcacttg

SEQ ID NO: 1542588 - DNA, 15 bp, Homo sapiens
gcacgagaatcactt

SEQ ID NO: 1542589 - DNA, 15 bp, Homo sapiens
ggcacgagaatcact

SEQ ID NO: 1542590 - DNA, 15 bp, Homo sapiens
aggcacgagaatcac

SEQ ID NO: 1542591 - DNA, 15 bp, Homo sapiens
gaggcacgagaatca

SEQ ID NO: 1542592 - DNA, 15 bp, Homo sapiens
tgaggcacgagaatc

SEQ ID NO: 1542593 - DNA, 15 bp, Homo sapiens
tctgtaatcccagct

SEQ ID NO: 1542594 - DNA, 15 bp, Homo sapiens
gtctgtaatcccagc

SEQ ID NO: 1542595 - DNA, 15 bp, Homo sapiens
tgtctgtaatcccag

SEQ ID NO: 1542596 - DNA, 15 bp, Homo sapiens
atgtctgtaatccca

SEQ ID NO: 1542597 - DNA, 15 bp, Homo sapiens
catgtctgtaatccc

SEQ ID NO: 1542598 - DNA, 15 bp, Homo sapiens
acatgtctgtaatcc

SEQ ID NO: 1542599 - DNA, 15 bp, Homo sapiens
tacatgtctgtaatc

SEQ ID NO: 1542600 - DNA, 15 bp, Homo sapiens
gtacatgtctgtaat

SEQ ID NO: 1542601 - DNA, 15 bp, Homo sapiens
ggtacatgtctgtaa

SEQ ID NO: 1542602 - DNA, 15 bp, Homo sapiens
tggtacatgtctgta

SEQ ID NO: 1542603 - DNA, 15 bp, Homo sapiens
gtggtacatgtctgt

SEQ ID NO: 1542604 - DNA, 15 bp, Homo sapiens
ggtggtacatgtctg

SEQ ID NO: 1542605 - DNA, 15 bp, Homo sapiens
tggtggtacatgtct

SEQ ID NO: 1542606 - DNA, 15 bp, Homo sapiens
atggtggtacatgtc

SEQ ID NO: 1542607 - DNA, 15 bp, Homo sapiens
catggtggtacatgt

SEQ ID NO: 1542608 - DNA, 15 bp, Homo sapiens
aaaacgctgtctcta

SEQ ID NO: 1542609 - DNA, 15 bp, Homo sapiens
caaaacgctgtctct

SEQ ID NO: 1542610 - DNA, 15 bp, Homo sapiens
gcaaaacgctgtctc

SEQ ID NO: 1542611 - DNA, 15 bp, Homo sapiens
ggcaaaacgctgtct

SEQ ID NO: 1542612 - DNA, 15 bp, Homo sapiens
tggcaaaacgctgtc

SEQ ID NO: 1542613 - DNA, 15 bp, Homo sapiens
atggcaaaacgctgt

SEQ ID NO: 1542614 - DNA, 15 bp, Homo sapiens
catggcaaaacgctg

SEQ ID NO: 1542615 - DNA, 15 bp, Homo sapiens
acatggcaaaacgct

SEQ ID NO: 1542616 - DNA, 15 bp, Homo sapiens
aacatggcaaaacgc

SEQ ID NO: 1542617 - DNA, 15 bp, Homo sapiens
caacatggcaaaacg

SEQ ID NO: 1542618 - DNA, 15 bp, Homo sapiens
gccaggagttcgaga

SEQ ID NO: 1542619 - DNA, 15 bp, Homo sapiens
ggccaggagttcgag

SEQ ID NO: 1542620 - DNA, 15 bp, Homo sapiens
aggccaggagttcga

SEQ ID NO: 1542621 - DNA, 15 bp, Homo sapiens
ataaggccaggagtt

SEQ ID NO: 1542622 - DNA, 15 bp, Homo sapiens
cataaggccaggagt

SEQ ID NO: 1542623 - DNA, 15 bp, Homo sapiens
acataaggccaggag

SEQ ID NO: 1542624 - DNA, 15 bp, Homo sapiens
tacataaggccagga

SEQ ID NO: 1542625 - DNA, 15 bp, Homo sapiens
ttacataaggccagg

SEQ ID NO: 1542626 - DNA, 15 bp, Homo sapiens
gttacataaggccag

SEQ ID NO: 1542627 - DNA, 15 bp, Homo sapiens
ggttacataaggcca

SEQ ID NO: 1542628 - DNA, 15 bp, Homo sapiens
gggttacataaggcc

SEQ ID NO: 1542629 - DNA, 15 bp, Homo sapiens
tgggttacataaggc

SEQ ID NO: 1542630 - DNA, 15 bp, Homo sapiens
gtgggttacataagg

SEQ ID NO: 1542631 - DNA, 15 bp, Homo sapiens
ggtgggttacataag

SEQ ID NO: 1542632 - DNA, 15 bp, Homo sapiens
aggtgggttacataa

SEQ ID NO: 1542633 - DNA, 15 bp, Homo sapiens
caggtgggttacata

SEQ ID NO: 1542634 - DNA, 15 bp, Homo sapiens
gcaggtgggttacat

SEQ ID NO: 1542635 - DNA, 15 bp, Homo sapiens
ggcaggtgggttaca

SEQ ID NO: 1542636 - DNA, 15 bp, Homo sapiens
aggcaggtgggttac

SEQ ID NO: 1542637 - DNA, 15 bp, Homo sapiens
gaggcaggtgggtta

SEQ ID NO: 1542638 - DNA, 15 bp, Homo sapiens
tgaggcaggtgggtt

SEQ ID NO: 1542639 - DNA, 15 bp, Homo sapiens
ctgaggcaggtgggt

SEQ ID NO: 1542640 - DNA, 15 bp, Homo sapiens
gctgaggcaggtggg

SEQ ID NO: 1542641 - DNA, 15 bp, Homo sapiens
ttcccagcactctgg

SEQ ID NO: 1542642 - DNA, 15 bp, Homo sapiens
attcccagcactctg

SEQ ID NO: 1542643 - DNA, 15 bp, Homo sapiens
tattcccagcactct

SEQ ID NO: 1542644 - DNA, 15 bp, Homo sapiens
gtattcccagcactc

SEQ ID NO: 1542645 - DNA, 15 bp, Homo sapiens
tgtattcccagcact

SEQ ID NO: 1542646 - DNA, 15 bp, Homo sapiens
ctgtattcccagcac

SEQ ID NO: 1542647 - DNA, 15 bp, Homo sapiens
cctgtattcccagca

SEQ ID NO: 1542648 - DNA, 15 bp, Homo sapiens
acgcctgtattccca

SEQ ID NO: 1542649 - DNA, 15 bp, Homo sapiens
cacgcctgtattccc

SEQ ID NO: 1542650 - DNA, 15 bp, Homo sapiens
tcacgcctgtattcc

SEQ ID NO: 1542651 - DNA, 15 bp, Homo sapiens
ctcacgcctgtattc

SEQ ID NO: 1542652 - DNA, 15 bp, Homo sapiens
gctcacgcctgtatt

SEQ ID NO: 1542653 - DNA, 15 bp, Homo sapiens
ggctcacgcctgtat

SEQ ID NO: 1542654 - DNA, 15 bp, Homo sapiens
agggctgggcacagt

SEQ ID NO: 1542655 - DNA, 15 bp, Homo sapiens
cagggctgggcacag

SEQ ID NO: 1542656 - DNA, 15 bp, Homo sapiens
tcagggctgggcaca

SEQ ID NO: 1542657 - DNA, 15 bp, Homo sapiens
atcagggctgggcac

SEQ ID NO: 1542658 - DNA, 15 bp, Homo sapiens
aatcagggctgggca

SEQ ID NO: 1542659 - DNA, 15 bp, Homo sapiens
taatcagggctgggc

SEQ ID NO: 1542660 - DNA, 15 bp, Homo sapiens
ataatcagggctggg

SEQ ID NO: 1542661 - DNA, 15 bp, Homo sapiens
tataatcagggctgg

SEQ ID NO: 1542662 - DNA, 15 bp, Homo sapiens
atataatcagggctg

SEQ ID NO: 1542663 - DNA, 15 bp, Homo sapiens
aatataatcagggct

SEQ ID NO: 1542664 - DNA, 15 bp, Homo sapiens
aaatataatcagggc

SEQ ID NO: 1542665 - DNA, 15 bp, Homo sapiens
aaaatataatcaggg

SEQ ID NO: 1542666 - DNA, 15 bp, Homo sapiens
aaaaatataatcagg

SEQ ID NO: 1542667 - DNA, 15 bp, Homo sapiens
taaaaatataatcag

SEQ ID NO: 1542668 - DNA, 15 bp, Homo sapiens
ataaaaatataatca

SEQ ID NO: 1542669 - DNA, 15 bp, Homo sapiens
tataaaaatataatc

SEQ ID NO: 1542670 - DNA, 15 bp, Homo sapiens
atataaaaatataat

SEQ ID NO: 1542671 - DNA, 15 bp, Homo sapiens
gatataaaaatataa

SEQ ID NO: 1542672 - DNA, 15 bp, Homo sapiens
ggatataaaaatata

SEQ ID NO: 1542673 - DNA, 15 bp, Homo sapiens
tggatataaaaatat

SEQ ID NO: 1542674 - DNA, 15 bp, Homo sapiens
atggatataaaaata

SEQ ID NO: 1542675 - DNA, 15 bp, Homo sapiens
aatggatataaaaat

SEQ ID NO: 1542676 - DNA, 15 bp, Homo sapiens
taatggatataaaaa

SEQ ID NO: 1542677 - DNA, 15 bp, Homo sapiens
ttaatggatataaaa

SEQ ID NO: 1542678 - DNA, 15 bp, Homo sapiens
gttaatggatataaa

SEQ ID NO: 1542679 - DNA, 15 bp, Homo sapiens
ggttaatggatataa

SEQ ID NO: 1542680 - DNA, 15 bp, Homo sapiens
tggttaatggatata

SEQ ID NO: 1542681 - DNA, 15 bp, Homo sapiens
ttggttaatggatat

SEQ ID NO: 1542682 - DNA, 15 bp, Homo sapiens
gttggttaatggata

SEQ ID NO: 1542683 - DNA, 15 bp, Homo sapiens
ggttggttaatggat

SEQ ID NO: 1542684 - DNA, 15 bp, Homo sapiens
aggttggttaatgga

SEQ ID NO: 1542685 - DNA, 15 bp, Homo sapiens
gaggttggttaatgg

SEQ ID NO: 1542686 - DNA, 15 bp, Homo sapiens
agaggttggttaatg

SEQ ID NO: 1542687 - DNA, 15 bp, Homo sapiens
cagaggttggttaat

SEQ ID NO: 1542688 - DNA, 15 bp, Homo sapiens
tcagaggttggttaa

SEQ ID NO: 1542689 - DNA, 15 bp, Homo sapiens
ctcagaggttggtta

SEQ ID NO: 1542690 - DNA, 15 bp, Homo sapiens
cctcagaggttggtt

SEQ ID NO: 1542691 - DNA, 15 bp, Homo sapiens
acctcagaggttggt

SEQ ID NO: 1542692 - DNA, 15 bp, Homo sapiens
tacctcagaggttgg

SEQ ID NO: 1542693 - DNA, 15 bp, Homo sapiens
ttacctcagaggttg

SEQ ID NO: 1542694 - DNA, 15 bp, Homo sapiens
tttacctcagaggtt

SEQ ID NO: 1542695 - DNA, 15 bp, Homo sapiens
ctttacctcagaggt

SEQ ID NO: 1542696 - DNA, 15 bp, Homo sapiens
tctttacctcagagg

SEQ ID NO: 1542697 - DNA, 15 bp, Homo sapiens
atctttacctcagag

SEQ ID NO: 1542698 - DNA, 15 bp, Homo sapiens
aatctttacctcaga

SEQ ID NO: 1542699 - DNA, 15 bp, Homo sapiens
aaatctttacctcag

SEQ ID NO: 1542700 - DNA, 15 bp, Homo sapiens
taaatctttacctca

SEQ ID NO: 1542701 - DNA, 15 bp, Homo sapiens
ataaatctttacctc

SEQ ID NO: 1542702 - DNA, 15 bp, Homo sapiens
aataaatctttacct

SEQ ID NO: 1542703 - DNA, 15 bp, Homo sapiens
aaataaatctttacc

SEQ ID NO: 1542704 - DNA, 15 bp, Homo sapiens
aaaataaatctttac

SEQ ID NO: 1542705 - DNA, 15 bp, Homo sapiens
taaaataaatcttta

SEQ ID NO: 1542706 - DNA, 15 bp, Homo sapiens
ttaaaataaatcttt

SEQ ID NO: 1542707 - DNA, 15 bp, Homo sapiens
gttaaaataaatctt

SEQ ID NO: 1542708 - DNA, 15 bp, Homo sapiens
agttaaaataaatct

SEQ ID NO: 1542709 - DNA, 15 bp, Homo sapiens
aagttaaaataaatc

SEQ ID NO: 1542710 - DNA, 15 bp, Homo sapiens
taagttaaaataaat

SEQ ID NO: 1542711 - DNA, 15 bp, Homo sapiens
gtaagttaaaataaa

SEQ ID NO: 1542712 - DNA, 15 bp, Homo sapiens
agtaagttaaaataa

SEQ ID NO: 1542713 - DNA, 15 bp, Homo sapiens
aagtaagttaaaata

SEQ ID NO: 1542714 - DNA, 15 bp, Homo sapiens
taagtaagttaaaat

SEQ ID NO: 1542715 - DNA, 15 bp, Homo sapiens
ctaagtaagttaaaa

SEQ ID NO: 1542716 - DNA, 15 bp, Homo sapiens
actaagtaagttaaa

SEQ ID NO: 1542717 - DNA, 15 bp, Homo sapiens
tactaagtaagttaa

SEQ ID NO: 1542718 - DNA, 15 bp, Homo sapiens
ctactaagtaagtta

SEQ ID NO: 1542719 - DNA, 15 bp, Homo sapiens
actactaagtaagtt

SEQ ID NO: 1542720 - DNA, 15 bp, Homo sapiens
tactactaagtaagt

SEQ ID NO: 1542721 - DNA, 15 bp, Homo sapiens
atactactaagtaag

SEQ ID NO: 1542722 - DNA, 15 bp, Homo sapiens
aatactactaagtaa

SEQ ID NO: 1542723 - DNA, 15 bp, Homo sapiens
taatactactaagta

SEQ ID NO: 1542724 - DNA, 15 bp, Homo sapiens
ataatactactaagt

SEQ ID NO: 1542725 - DNA, 15 bp, Homo sapiens
gataatactactaag

SEQ ID NO: 1542726 - DNA, 15 bp, Homo sapiens
tgataatactactaa

SEQ ID NO: 1542727 - DNA, 15 bp, Homo sapiens
gtgataatactacta

SEQ ID NO: 1542728 - DNA, 15 bp, Homo sapiens
ggtgataatactact

SEQ ID NO: 1542729 - DNA, 15 bp, Homo sapiens
tggtgataatactac

SEQ ID NO: 1542730 - DNA, 15 bp, Homo sapiens
ctggtgataatacta

SEQ ID NO: 1542731 - DNA, 15 bp, Homo sapiens
tctggtgataatact

SEQ ID NO: 1542732 - DNA, 15 bp, Homo sapiens
ttctggtgataatac

SEQ ID NO: 1542733 - DNA, 15 bp, Homo sapiens
attctggtgataata

SEQ ID NO: 1542734 - DNA, 15 bp, Homo sapiens
gattctggtgataat

SEQ ID NO: 1542735 - DNA, 15 bp, Homo sapiens
tgattctggtgataa

SEQ ID NO: 1542736 - DNA, 15 bp, Homo sapiens
atgattctggtgata

SEQ ID NO: 1542737 - DNA, 15 bp, Homo sapiens
gatgattctggtgat

SEQ ID NO: 1542738 - DNA, 15 bp, Homo sapiens
tgatgattctggtga

SEQ ID NO: 1542739 - DNA, 15 bp, Homo sapiens
gtgatgattctggtg

SEQ ID NO: 1542740 - DNA, 15 bp, Homo sapiens
tgtgatgattctggt

SEQ ID NO: 1542741 - DNA, 15 bp, Homo sapiens
atgtgatgattctgg

SEQ ID NO: 1542742 - DNA, 15 bp, Homo sapiens
tatgtgatgattctg

SEQ ID NO: 1542743 - DNA, 15 bp, Homo sapiens
atatgtgatgattct

SEQ ID NO: 1542744 - DNA, 15 bp, Homo sapiens
catatgtgatgattc

SEQ ID NO: 1542745 - DNA, 15 bp, Homo sapiens
ccatatgtgatgatt

SEQ ID NO: 1542746 - DNA, 15 bp, Homo sapiens
tccatatgtgatgat

SEQ ID NO: 1542747 - DNA, 15 bp, Homo sapiens
ttccatatgtgatga

SEQ ID NO: 1542748 - DNA, 15 bp, Homo sapiens
tttccatatgtgatg

SEQ ID NO: 1542749 - DNA, 15 bp, Homo sapiens
ttttccatatgtgat

SEQ ID NO: 1542750 - DNA, 15 bp, Homo sapiens
gttttccatatgtga

SEQ ID NO: 1542751 - DNA, 15 bp, Homo sapiens
agttttccatatgtg

SEQ ID NO: 1542752 - DNA, 15 bp, Homo sapiens
aagttttccatatgt

SEQ ID NO: 1542753 - DNA, 15 bp, Homo sapiens
aaagttttccatatg

SEQ ID NO: 1542754 - DNA, 15 bp, Homo sapiens
caaagttttccatat

SEQ ID NO: 1542755 - DNA, 15 bp, Homo sapiens
ccaaagttttccata

SEQ ID NO: 1542756 - DNA, 15 bp, Homo sapiens
cccaaagttttccat

SEQ ID NO: 1542757 - DNA, 15 bp, Homo sapiens
gcccaaagttttcca

SEQ ID NO: 1542758 - DNA, 15 bp, Homo sapiens
ggcccaaagttttcc

SEQ ID NO: 1542759 - DNA, 15 bp, Homo sapiens
aggcccaaagttttc

SEQ ID NO: 1542760 - DNA, 15 bp, Homo sapiens
taggcccaaagtttt

SEQ ID NO: 1542761 - DNA, 15 bp, Homo sapiens
ttaggcccaaagttt

SEQ ID NO: 1542762 - DNA, 15 bp, Homo sapiens
cttaggcccaaagtt

SEQ ID NO: 1542763 - DNA, 15 bp, Homo sapiens
acttaggcccaaagt

SEQ ID NO: 1542764 - DNA, 15 bp, Homo sapiens
aacttaggcccaaag

SEQ ID NO: 1542765 - DNA, 15 bp, Homo sapiens
taacttaggcccaaa

SEQ ID NO: 1542766 - DNA, 15 bp, Homo sapiens
ttaacttaggcccaa

SEQ ID NO: 1542767 - DNA, 15 bp, Homo sapiens
gttaacttaggccca

SEQ ID NO: 1542768 - DNA, 15 bp, Homo sapiens
tgttaacttaggccc

SEQ ID NO: 1542769 - DNA, 15 bp, Homo sapiens
atgttaacttaggcc

SEQ ID NO: 1542770 - DNA, 15 bp, Homo sapiens
tatgttaacttaggc

SEQ ID NO: 1542771 - DNA, 15 bp, Homo sapiens
ctatgttaacttagg

SEQ ID NO: 1542772 - DNA, 15 bp, Homo sapiens
tctatgttaacttag

SEQ ID NO: 1542773 - DNA, 15 bp, Homo sapiens
atctatgttaactta

SEQ ID NO: 1542774 - DNA, 15 bp, Homo sapiens
aatctatgttaactt

SEQ ID NO: 1542775 - DNA, 15 bp, Homo sapiens
caatctatgttaact

SEQ ID NO: 1542776 - DNA, 15 bp, Homo sapiens
acaatctatgttaac

SEQ ID NO: 1542777 - DNA, 15 bp, Homo sapiens
aacaatctatgttaa

SEQ ID NO: 1542778 - DNA, 15 bp, Homo sapiens
aaacaatctatgtta

SEQ ID NO: 1542779 - DNA, 15 bp, Homo sapiens
aaaacaatctatgtt

SEQ ID NO: 1542780 - DNA, 15 bp, Homo sapiens
caaaacaatctatgt

SEQ ID NO: 1542781 - DNA, 15 bp, Homo sapiens
tcaaaacaatctatg

SEQ ID NO: 1542782 - DNA, 15 bp, Homo sapiens
atcaaaacaatctat

SEQ ID NO: 1542783 - DNA, 15 bp, Homo sapiens
aatcaaaacaatcta

SEQ ID NO: 1542784 - DNA, 15 bp, Homo sapiens
aaatcaaaacaatct

SEQ ID NO: 1542785 - DNA, 15 bp, Homo sapiens
caaatcaaaacaatc

SEQ ID NO: 1542786 - DNA, 15 bp, Homo sapiens
tcaaatcaaaacaat

SEQ ID NO: 1542787 - DNA, 15 bp, Homo sapiens
ttcaaatcaaaacaa

SEQ ID NO: 1542788 - DNA, 15 bp, Homo sapiens
tttcaaatcaaaaca

SEQ ID NO: 1542789 - DNA, 15 bp, Homo sapiens
gtttcaaatcaaaac

SEQ ID NO: 1542790 - DNA, 15 bp, Homo sapiens
agtttcaaatcaaaa

SEQ ID NO: 1542791 - DNA, 15 bp, Homo sapiens
aagtttcaaatcaaa

SEQ ID NO: 1542792 - DNA, 15 bp, Homo sapiens
aaagtttcaaatcaa

SEQ ID NO: 1542793 - DNA, 15 bp, Homo sapiens
caaagtttcaaatca

SEQ ID NO: 1542794 - DNA, 15 bp, Homo sapiens
ccaaagtttcaaatc

SEQ ID NO: 1542795 - DNA, 15 bp, Homo sapiens
accaaagtttcaaat

SEQ ID NO: 1542796 - DNA, 15 bp, Homo sapiens
taccaaagtttcaaa

SEQ ID NO: 1542797 - DNA, 15 bp, Homo sapiens
gtaccaaagtttcaa

SEQ ID NO: 1542798 - DNA, 15 bp, Homo sapiens
ggtaccaaagtttca

SEQ ID NO: 1542799 - DNA, 15 bp, Homo sapiens
tggtaccaaagtttc

SEQ ID NO: 1542800 - DNA, 15 bp, Homo sapiens
atggtaccaaagttt

SEQ ID NO: 1542801 - DNA, 15 bp, Homo sapiens
aatggtaccaaagtt

SEQ ID NO: 1542802 - DNA, 15 bp, Homo sapiens
taatggtaccaaagt

SEQ ID NO: 1542803 - DNA, 15 bp, Homo sapiens
gtaatggtaccaaag

SEQ ID NO: 1542804 - DNA, 15 bp, Homo sapiens
agtaatggtaccaaa

SEQ ID NO: 1542805 - DNA, 15 bp, Homo sapiens
aagtaatggtaccaa

SEQ ID NO: 1542806 - DNA, 15 bp, Homo sapiens
gaagtaatggtacca

SEQ ID NO: 1542807 - DNA, 15 bp, Homo sapiens
tgaagtaatggtacc

SEQ ID NO: 1542808 - DNA, 15 bp, Homo sapiens
ctgaagtaatggtac

SEQ ID NO: 1542809 - DNA, 15 bp, Homo sapiens
cctgaagtaatggta

SEQ ID NO: 1542810 - DNA, 15 bp, Homo sapiens
ccctgaagtaatggt

SEQ ID NO: 1542811 - DNA, 15 bp, Homo sapiens
gccctgaagtaatgg

SEQ ID NO: 1542812 - DNA, 15 bp, Homo sapiens
agccctgaagtaatg

SEQ ID NO: 1542813 - DNA, 15 bp, Homo sapiens
aagccctgaagtaat

SEQ ID NO: 1542814 - DNA, 15 bp, Homo sapiens
aaagccctgaagtaa

SEQ ID NO: 1542815 - DNA, 15 bp, Homo sapiens
aaaagccctgaagta

SEQ ID NO: 1542816 - DNA, 15 bp, Homo sapiens
aaaaagccctgaagt

SEQ ID NO: 1542817 - DNA, 15 bp, Homo sapiens
gaaaaagccctgaag

SEQ ID NO: 1542818 - DNA, 15 bp, Homo sapiens
tgaaaaagccctgaa

SEQ ID NO: 1542819 - DNA, 15 bp, Homo sapiens
atgaaaaagccctga

SEQ ID NO: 1542820 - DNA, 15 bp, Homo sapiens
catgaaaaagccctg

SEQ ID NO: 1542821 - DNA, 15 bp, Homo sapiens
ccatgaaaaagccct

SEQ ID NO: 1542822 - DNA, 15 bp, Homo sapiens
accatgaaaaagccc

SEQ ID NO: 1542823 - DNA, 15 bp, Homo sapiens
gaccatgaaaaagcc

SEQ ID NO: 1542824 - DNA, 15 bp, Homo sapiens
ggaccatgaaaaagc

SEQ ID NO: 1542825 - DNA, 15 bp, Homo sapiens
aggaccatgaaaaag

SEQ ID NO: 1542826 - DNA, 15 bp, Homo sapiens
gaggaccatgaaaaa

SEQ ID NO: 1542827 - DNA, 15 bp, Homo sapiens
tgaggaccatgaaaa

SEQ ID NO: 1542828 - DNA, 15 bp, Homo sapiens
gtgaggaccatgaaa

SEQ ID NO: 1542829 - DNA, 15 bp, Homo sapiens
agtgaggaccatgaa

SEQ ID NO: 1542830 - DNA, 15 bp, Homo sapiens
cagtgaggaccatga

SEQ ID NO: 1542831 - DNA, 15 bp, Homo sapiens
acagtgaggaccatg

SEQ ID NO: 1542832 - DNA, 15 bp, Homo sapiens
cacagtgaggaccat

SEQ ID NO: 1542833 - DNA, 15 bp, Homo sapiens
ccacagtgaggacca

SEQ ID NO: 1542834 - DNA, 15 bp, Homo sapiens
gccacagtgaggacc

SEQ ID NO: 1542835 - DNA, 15 bp, Homo sapiens
agccacagtgaggac

SEQ ID NO: 1542836 - DNA, 15 bp, Homo sapiens
cagccacagtgagga

SEQ ID NO: 1542837 - DNA, 15 bp, Homo sapiens
gcagccacagtgagg

SEQ ID NO: 1542838 - DNA, 15 bp, Homo sapiens
agcagccacagtgag

SEQ ID NO: 1542839 - DNA, 15 bp, Homo sapiens
gagcagccacagtga

SEQ ID NO: 1542840 - DNA, 15 bp, Homo sapiens
ggagcagccacagtg

SEQ ID NO: 1542841 - DNA, 15 bp, Homo sapiens
gggagcagccacagt

SEQ ID NO: 1542842 - DNA, 15 bp, Homo sapiens
tgggagcagccacag

SEQ ID NO: 1542843 - DNA, 15 bp, Homo sapiens
atgggagcagccaca

SEQ ID NO: 1542844 - DNA, 15 bp, Homo sapiens
aatgggagcagccac

SEQ ID NO: 1542845 - DNA, 15 bp, Homo sapiens
aaatgggagcagcca

SEQ ID NO: 1542846 - DNA, 15 bp, Homo sapiens
taaatgggagcagcc

SEQ ID NO: 1542847 - DNA, 15 bp, Homo sapiens
ataaatgggagcagc

SEQ ID NO: 1542848 - DNA, 15 bp, Homo sapiens
aataaatgggagcag

SEQ ID NO: 1542849 - DNA, 15 bp, Homo sapiens
taataaatgggagca

SEQ ID NO: 1542850 - DNA, 15 bp, Homo sapiens
ctaataaatgggagc

SEQ ID NO: 1542851 - DNA, 15 bp, Homo sapiens
actaataaatgggag

SEQ ID NO: 1542852 - DNA, 15 bp, Homo sapiens
tactaataaatggga

SEQ ID NO: 1542853 - DNA, 15 bp, Homo sapiens
atactaataaatggg

SEQ ID NO: 1542854 - DNA, 15 bp, Homo sapiens
aatactaataaatgg

SEQ ID NO: 1542855 - DNA, 15 bp, Homo sapiens
gaatactaataaatg

SEQ ID NO: 1542856 - DNA, 15 bp, Homo sapiens
agaatactaataaat

SEQ ID NO: 1542857 - DNA, 15 bp, Homo sapiens
aagaatactaataaa

SEQ ID NO: 1542858 - DNA, 15 bp, Homo sapiens
aaagaatactaataa

SEQ ID NO: 1542859 - DNA, 15 bp, Homo sapiens
aaaagaatactaata

SEQ ID NO: 1542860 - DNA, 15 bp, Homo sapiens
caaaagaatactaat

SEQ ID NO: 1542861 - DNA, 15 bp, Homo sapiens
ccaaaagaatactaa

SEQ ID NO: 1542862 - DNA, 15 bp, Homo sapiens
accaaaagaatacta

SEQ ID NO: 1542863 - DNA, 15 bp, Homo sapiens
aaccaaaagaatact

SEQ ID NO: 1542864 - DNA, 15 bp, Homo sapiens
aaaccaaaagaatac

SEQ ID NO: 1542865 - DNA, 15 bp, Homo sapiens
aaaaccaaaagaata

SEQ ID NO: 1542866 - DNA, 15 bp, Homo sapiens
taaaaccaaaagaat

SEQ ID NO: 1542867 - DNA, 15 bp, Homo sapiens
ttaaaaccaaaagaa

SEQ ID NO: 1542868 - DNA, 15 bp, Homo sapiens
gcttaaaaccaaaag

SEQ ID NO: 1542869 - DNA, 15 bp, Homo sapiens
tgcttaaaaccaaaa

SEQ ID NO: 1542870 - DNA, 15 bp, Homo sapiens
ttgcttaaaaccaaa

SEQ ID NO: 1542871 - DNA, 15 bp, Homo sapiens
gttgcttaaaaccaa

SEQ ID NO: 1542872 - DNA, 15 bp, Homo sapiens
tgttgcttaaaacca

SEQ ID NO: 1542873 - DNA, 15 bp, Homo sapiens
atgttgcttaaaacc

SEQ ID NO: 1542874 - DNA, 15 bp, Homo sapiens
tatgttgcttaaaac

SEQ ID NO: 1542875 - DNA, 15 bp, Homo sapiens
atatgttgcttaaaa

SEQ ID NO: 1542876 - DNA, 15 bp, Homo sapiens
catatgttgcttaaa

SEQ ID NO: 1542877 - DNA, 15 bp, Homo sapiens
tcatatgttgcttaa

SEQ ID NO: 1542878 - DNA, 15 bp, Homo sapiens
gtcatatgttgctta

SEQ ID NO: 1542879 - DNA, 15 bp, Homo sapiens
ggtcatatgttgctt

SEQ ID NO: 1542880 - DNA, 15 bp, Homo sapiens
aggtcatatgttgct

SEQ ID NO: 1542881 - DNA, 15 bp, Homo sapiens
taggtcatatgttgc

SEQ ID NO: 1542882 - DNA, 15 bp, Homo sapiens
ttaggtcatatgttg

SEQ ID NO: 1542883 - DNA, 15 bp, Homo sapiens
attaggtcatatgtt

SEQ ID NO: 1542884 - DNA, 15 bp, Homo sapiens
tattaggtcatatgt

SEQ ID NO: 1542885 - DNA, 15 bp, Homo sapiens
atattaggtcatatg

SEQ ID NO: 1542886 - DNA, 15 bp, Homo sapiens
catattaggtcatat

SEQ ID NO: 1542887 - DNA, 15 bp, Homo sapiens
ccatattaggtcata

SEQ ID NO: 1542888 - DNA, 15 bp, Homo sapiens
gccatattaggtcat

SEQ ID NO: 1542889 - DNA, 15 bp, Homo sapiens
agccatattaggtca

SEQ ID NO: 1542890 - DNA, 15 bp, Homo sapiens
aagccatattaggtc

SEQ ID NO: 1542891 - DNA, 15 bp, Homo sapiens
taagccatattaggt

SEQ ID NO: 1542892 - DNA, 15 bp, Homo sapiens
ttaagccatattagg

SEQ ID NO: 1542893 - DNA, 15 bp, Homo sapiens
attaagccatattag

SEQ ID NO: 1542894 - DNA, 15 bp, Homo sapiens
gattaagccatatta

SEQ ID NO: 1542895 - DNA, 15 bp, Homo sapiens
tgattaagccatatt

SEQ ID NO: 1542896 - DNA, 15 bp, Homo sapiens
ttgattaagccatat

SEQ ID NO: 1542897 - DNA, 15 bp, Homo sapiens
tttgattaagccata

SEQ ID NO: 1542898 - DNA, 15 bp, Homo sapiens
ttttgattaagccat

SEQ ID NO: 1542899 - DNA, 15 bp, Homo sapiens
tttttgattaagcca

SEQ ID NO: 1542900 - DNA, 15 bp, Homo sapiens
ttttttgattaagcc

SEQ ID NO: 1542901 - DNA, 15 bp, Homo sapiens
attttttgattaagc

SEQ ID NO: 1542902 - DNA, 15 bp, Homo sapiens
cattttttgattaag

SEQ ID NO: 1542903 - DNA, 15 bp, Homo sapiens
ccattttttgattaa

SEQ ID NO: 1542904 - DNA, 15 bp, Homo sapiens
accattttttgatta

SEQ ID NO: 1542905 - DNA, 15 bp, Homo sapiens
taccattttttgatt

SEQ ID NO: 1542906 - DNA, 15 bp, Homo sapiens
ataccattttttgat

SEQ ID NO: 1542907 - DNA, 15 bp, Homo sapiens
aataccattttttga

SEQ ID NO: 1542908 - DNA, 15 bp, Homo sapiens
aaataccattttttg

SEQ ID NO: 1542909 - DNA, 15 bp, Homo sapiens
taaataccatttttt

SEQ ID NO: 1542910 - DNA, 15 bp, Homo sapiens
ataaataccattttt

SEQ ID NO: 1542911 - DNA, 15 bp, Homo sapiens
aataaataccatttt

SEQ ID NO: 1542912 - DNA, 15 bp, Homo sapiens
caataaataccattt

SEQ ID NO: 1542913 - DNA, 15 bp, Homo sapiens
ccaataaataccatt

SEQ ID NO: 1542914 - DNA, 15 bp, Homo sapiens
gccaataaataccat

SEQ ID NO: 1542915 - DNA, 15 bp, Homo sapiens
agccaataaatacca

SEQ ID NO: 1542916 - DNA, 15 bp, Homo sapiens
aagccaataaatacc

SEQ ID NO: 1542917 - DNA, 15 bp, Homo sapiens
taagccaataaatac

SEQ ID NO: 1542918 - DNA, 15 bp, Homo sapiens
ataagccaataaata

SEQ ID NO: 1542919 - DNA, 15 bp, Homo sapiens
cataagccaataaat

SEQ ID NO: 1542920 - DNA, 15 bp, Homo sapiens
acataagccaataaa

SEQ ID NO: 1542921 - DNA, 15 bp, Homo sapiens
tacataagccaataa

SEQ ID NO: 1542922 - DNA, 15 bp, Homo sapiens
ttacataagccaata

SEQ ID NO: 1542923 - DNA, 15 bp, Homo sapiens
gttacataagccaat

SEQ ID NO: 1542924 - DNA, 15 bp, Homo sapiens
agttacataagccaa

SEQ ID NO: 1542925 - DNA, 15 bp, Homo sapiens
cagttacataagcca

SEQ ID NO: 1542926 - DNA, 15 bp, Homo sapiens
tcagttacataagcc

SEQ ID NO: 1542927 - DNA, 15 bp, Homo sapiens
ctcagttacataagc

SEQ ID NO: 1542928 - DNA, 15 bp, Homo sapiens
gctcagttacataag

SEQ ID NO: 1542929 - DNA, 15 bp, Homo sapiens
tgctcagttacataa

SEQ ID NO: 1542930 - DNA, 15 bp, Homo sapiens
ctgctcagttacata

SEQ ID NO: 1542931 - DNA, 15 bp, Homo sapiens
actgctcagttacat

SEQ ID NO: 1542932 - DNA, 15 bp, Homo sapiens
gactgctcagttaca

SEQ ID NO: 1542933 - DNA, 15 bp, Homo sapiens
ggactgctcagttac

SEQ ID NO: 1542934 - DNA, 15 bp, Homo sapiens
aggactgctcagtta

SEQ ID NO: 1542935 - DNA, 15 bp, Homo sapiens
caggactgctcagtt

SEQ ID NO: 1542936 - DNA, 15 bp, Homo sapiens
ccaggactgctcagt

SEQ ID NO: 1542937 - DNA, 15 bp, Homo sapiens
cccaggactgctcag

SEQ ID NO: 1542938 - DNA, 15 bp, Homo sapiens
tcccaggactgctca

SEQ ID NO: 1542939 - DNA, 15 bp, Homo sapiens
atcccaggactgctc

SEQ ID NO: 1542940 - DNA, 15 bp, Homo sapiens
tatcccaggactgct

SEQ ID NO: 1542941 - DNA, 15 bp, Homo sapiens
ttatcccaggactgc

SEQ ID NO: 1542942 - DNA, 15 bp, Homo sapiens
tttatcccaggactg

SEQ ID NO: 1542943 - DNA, 15 bp, Homo sapiens
atttatcccaggact

SEQ ID NO: 1542944 - DNA, 15 bp, Homo sapiens
aatttatcccaggac

SEQ ID NO: 1542945 - DNA, 15 bp, Homo sapiens
aaatttatcccagga

SEQ ID NO: 1542946 - DNA, 15 bp, Homo sapiens
caaatttatcccagg

SEQ ID NO: 1542947 - DNA, 15 bp, Homo sapiens
tcaaatttatcccag

SEQ ID NO: 1542948 - DNA, 15 bp, Homo sapiens
gtcaaatttatccca

SEQ ID NO: 1542949 - DNA, 15 bp, Homo sapiens
ggtcaaatttatccc

SEQ ID NO: 1542950 - DNA, 15 bp, Homo sapiens
gggtcaaatttatcc

SEQ ID NO: 1542951 - DNA, 15 bp, Homo sapiens
ggggtcaaatttatc

SEQ ID NO: 1542952 - DNA, 15 bp, Homo sapiens
tggggtcaaatttat

SEQ ID NO: 1542953 - DNA, 15 bp, Homo sapiens
ctggggtcaaattta

SEQ ID NO: 1542954 - DNA, 15 bp, Homo sapiens
cctggggtcaaattt

SEQ ID NO: 1542955 - DNA, 15 bp, Homo sapiens
tcctggggtcaaatt

SEQ ID NO: 1542956 - DNA, 15 bp, Homo sapiens
ctcctggggtcaaat

SEQ ID NO: 1542957 - DNA, 15 bp, Homo sapiens
tctcctggggtcaaa

SEQ ID NO: 1542958 - DNA, 15 bp, Homo sapiens
ctctcctggggtcaa

SEQ ID NO: 1542959 - DNA, 15 bp, Homo sapiens
cctctcctggggtca

SEQ ID NO: 1542960 - DNA, 15 bp, Homo sapiens
gcctctcctggggtc

SEQ ID NO: 1542961 - DNA, 15 bp, Homo sapiens
agcctctcctggggt

SEQ ID NO: 1542962 - DNA, 15 bp, Homo sapiens
aagcctctcctgggg

SEQ ID NO: 1542963 - DNA, 15 bp, Homo sapiens
aaagcctctcctggg

SEQ ID NO: 1542964 - DNA, 15 bp, Homo sapiens
taaagcctctcctgg

SEQ ID NO: 1542965 - DNA, 15 bp, Homo sapiens
ataaagcctctcctg

SEQ ID NO: 1542966 - DNA, 15 bp, Homo sapiens
gataaagcctctcct

SEQ ID NO: 1542967 - DNA, 15 bp, Homo sapiens
agataaagcctctcc

SEQ ID NO: 1542968 - DNA, 15 bp, Homo sapiens
gagataaagcctctc

SEQ ID NO: 1542969 - DNA, 15 bp, Homo sapiens
tgagataaagcctct

SEQ ID NO: 1542970 - DNA, 15 bp, Homo sapiens
atgagataaagcctc

SEQ ID NO: 1542971 - DNA, 15 bp, Homo sapiens
tatgagataaagcct

SEQ ID NO: 1542972 - DNA, 15 bp, Homo sapiens
gtatgagataaagcc

SEQ ID NO: 1542973 - DNA, 15 bp, Homo sapiens
tgtatgagataaagc

SEQ ID NO: 1542974 - DNA, 15 bp, Homo sapiens
gtgtatgagataaag

SEQ ID NO: 1542975 - DNA, 15 bp, Homo sapiens
tgtgtatgagataaa

SEQ ID NO: 1542976 - DNA, 15 bp, Homo sapiens
ttgtgtatgagataa

SEQ ID NO: 1542977 - DNA, 15 bp, Homo sapiens
tttgtgtatgagata

SEQ ID NO: 1542978 - DNA, 15 bp, Homo sapiens
atttgtgtatgagat

SEQ ID NO: 1542979 - DNA, 15 bp, Homo sapiens
catttgtgtatgaga

SEQ ID NO: 1542980 - DNA, 15 bp, Homo sapiens
tcatttgtgtatgag

SEQ ID NO: 1542981 - DNA, 15 bp, Homo sapiens
atcatttgtgtatga

SEQ ID NO: 1542982 - DNA, 15 bp, Homo sapiens
tatcatttgtgtatg

SEQ ID NO: 1542983 - DNA, 15 bp, Homo sapiens
atatcatttgtgtat

SEQ ID NO: 1542984 - DNA, 15 bp, Homo sapiens
catatcatttgtgta

SEQ ID NO: 1542985 - DNA, 15 bp, Homo sapiens
ccatatcatttgtgt

SEQ ID NO: 1542986 - DNA, 15 bp, Homo sapiens
gccatatcatttgtg

SEQ ID NO: 1542987 - DNA, 15 bp, Homo sapiens
ggccatatcatttgt

SEQ ID NO: 1542988 - DNA, 15 bp, Homo sapiens
tggccatatcatttg

SEQ ID NO: 1542989 - DNA, 15 bp, Homo sapiens
ctggccatatcattt

SEQ ID NO: 1542990 - DNA, 15 bp, Homo sapiens
cctggccatatcatt

SEQ ID NO: 1542991 - DNA, 15 bp, Homo sapiens
ccctggccatatcat

SEQ ID NO: 1542992 - DNA, 15 bp, Homo sapiens
accctggccatatca

SEQ ID NO: 1542993 - DNA, 15 bp, Homo sapiens
aaccctggccatatc

SEQ ID NO: 1542994 - DNA, 15 bp, Homo sapiens
gaaccctggccatat

SEQ ID NO: 1542995 - DNA, 15 bp, Homo sapiens
ggaaccctggccata

SEQ ID NO: 1542996 - DNA, 15 bp, Homo sapiens
tggaaccctggccat

SEQ ID NO: 1542997 - DNA, 15 bp, Homo sapiens
ctggaaccctggcca

SEQ ID NO: 1542998 - DNA, 15 bp, Homo sapiens
actggaaccctggcc

SEQ ID NO: 1542999 - DNA, 15 bp, Homo sapiens
aactggaaccctggc

SEQ ID NO: 1543000 - DNA, 15 bp, Homo sapiens
aaactggaaccctgg

SEQ ID NO: 1543001 - DNA, 15 bp, Homo sapiens
caaactggaaccctg

SEQ ID NO: 1543002 - DNA, 15 bp, Homo sapiens
acaaactggaaccct

SEQ ID NO: 1543003 - DNA, 15 bp, Homo sapiens
gacaaactggaaccc

SEQ ID NO: 1543004 - DNA, 15 bp, Homo sapiens
agacaaactggaacc

SEQ ID NO: 1543005 - DNA, 15 bp, Homo sapiens
tagacaaactggaac

SEQ ID NO: 1543006 - DNA, 15 bp, Homo sapiens
atagacaaactggaa

SEQ ID NO: 1543007 - DNA, 15 bp, Homo sapiens
aatagacaaactgga

SEQ ID NO: 1543008 - DNA, 15 bp, Homo sapiens
aaatagacaaactgg

SEQ ID NO: 1543009 - DNA, 15 bp, Homo sapiens
gaaatagacaaactg

SEQ ID NO: 1543010 - DNA, 15 bp, Homo sapiens
agaaatagacaaact

SEQ ID NO: 1543011 - DNA, 15 bp, Homo sapiens
gagaaatagacaaac

SEQ ID NO: 1543012 - DNA, 15 bp, Homo sapiens
tgagaaatagacaaa

SEQ ID NO: 1543013 - DNA, 15 bp, Homo sapiens
ctgagaaatagacaa

SEQ ID NO: 1543014 - DNA, 15 bp, Homo sapiens
gctgagaaatagaca

SEQ ID NO: 1543015 - DNA, 15 bp, Homo sapiens
agctgagaaatagac

SEQ ID NO: 1543016 - DNA, 15 bp, Homo sapiens
gagctgagaaataga

SEQ ID NO: 1543017 - DNA, 15 bp, Homo sapiens
ggagctgagaaatag

SEQ ID NO: 1543018 - DNA, 15 bp, Homo sapiens
aggagctgagaaata

SEQ ID NO: 1543019 - DNA, 15 bp, Homo sapiens
aaggagctgagaaat

SEQ ID NO: 1543020 - DNA, 15 bp, Homo sapiens
gaaggagctgagaaa

SEQ ID NO: 1543021 - DNA, 15 bp, Homo sapiens
agaaggagctgagaa

SEQ ID NO: 1543022 - DNA, 15 bp, Homo sapiens
gagaaggagctgaga

SEQ ID NO: 1543023 - DNA, 15 bp, Homo sapiens
agagaaggagctgag

SEQ ID NO: 1543024 - DNA, 15 bp, Homo sapiens
aagagaaggagctga

SEQ ID NO: 1543025 - DNA, 15 bp, Homo sapiens
gaagagaaggagctg

SEQ ID NO: 1543026 - DNA, 15 bp, Homo sapiens
tgaagagaaggagct

SEQ ID NO: 1543027 - DNA, 15 bp, Homo sapiens
ctgaagagaaggagc

SEQ ID NO: 1543028 - DNA, 15 bp, Homo sapiens
actgaagagaaggag

SEQ ID NO: 1543029 - DNA, 15 bp, Homo sapiens
gactgaagagaagga

SEQ ID NO: 1543030 - DNA, 15 bp, Homo sapiens
agactgaagagaagg

SEQ ID NO: 1543031 - DNA, 15 bp, Homo sapiens
aagactgaagagaag

SEQ ID NO: 1543032 - DNA, 15 bp, Homo sapiens
aaagactgaagagaa

SEQ ID NO: 1543033 - DNA, 15 bp, Homo sapiens
aaaagactgaagaga

SEQ ID NO: 1543034 - DNA, 15 bp, Homo sapiens
caaaagactgaagag

SEQ ID NO: 1543035 - DNA, 15 bp, Homo sapiens
ccaaaagactgaaga

SEQ ID NO: 1543036 - DNA, 15 bp, Homo sapiens
cccaaaagactgaag

SEQ ID NO: 1543037 - DNA, 15 bp, Homo sapiens
tcccaaaagactgaa

SEQ ID NO: 1543038 - DNA, 15 bp, Homo sapiens
ctcccaaaagactga

SEQ ID NO: 1543039 - DNA, 15 bp, Homo sapiens
cctcccaaaagactg

SEQ ID NO: 1543040 - DNA, 15 bp, Homo sapiens
gcctcccaaaagact

SEQ ID NO: 1543041 - DNA, 15 bp, Homo sapiens
agcctcccaaaagac

SEQ ID NO: 1543042 - DNA, 15 bp, Homo sapiens
gagcctcccaaaaga

SEQ ID NO: 1543043 - DNA, 15 bp, Homo sapiens
agagcctcccaaaag

SEQ ID NO: 1543044 - DNA, 15 bp, Homo sapiens
aagagcctcccaaaa

SEQ ID NO: 1543045 - DNA, 15 bp, Homo sapiens
gaagagcctcccaaa

SEQ ID NO: 1543046 - DNA, 15 bp, Homo sapiens
agaagagcctcccaa

SEQ ID NO: 1543047 - DNA, 15 bp, Homo sapiens
aagaagagcctccca

SEQ ID NO: 1543048 - DNA, 15 bp, Homo sapiens
aaagaagagcctccc

SEQ ID NO: 1543049 - DNA, 15 bp, Homo sapiens
aaaagaagagcctcc

SEQ ID NO: 1543050 - DNA, 15 bp, Homo sapiens
taaaagaagagcctc

SEQ ID NO: 1543051 - DNA, 15 bp, Homo sapiens
ataaaagaagagcct

SEQ ID NO: 1543052 - DNA, 15 bp, Homo sapiens
tataaaagaagagcc

SEQ ID NO: 1543053 - DNA, 15 bp, Homo sapiens
atataaaagaagagc

SEQ ID NO: 1543054 - DNA, 15 bp, Homo sapiens
gatataaaagaagag

SEQ ID NO: 1543055 - DNA, 15 bp, Homo sapiens
ggatataaaagaaga

SEQ ID NO: 1543056 - DNA, 15 bp, Homo sapiens
gggatataaaagaag

SEQ ID NO: 1543057 - DNA, 15 bp, Homo sapiens
tgggatataaaagaa

SEQ ID NO: 1543058 - DNA, 15 bp, Homo sapiens
ttgggatataaaaga

SEQ ID NO: 1543059 - DNA, 15 bp, Homo sapiens
tttgggatataaaag

SEQ ID NO: 1543060 - DNA, 15 bp, Homo sapiens
ttttgggatataaaa

SEQ ID NO: 1543061 - DNA, 15 bp, Homo sapiens
attttgggatataaa

SEQ ID NO: 1543062 - DNA, 15 bp, Homo sapiens
tattttgggatataa

SEQ ID NO: 1543063 - DNA, 15 bp, Homo sapiens
atattttgggatata

SEQ ID NO: 1543064 - DNA, 15 bp, Homo sapiens
catattttgggatat

SEQ ID NO: 1543065 - DNA, 15 bp, Homo sapiens
tcatattttgggata

SEQ ID NO: 1543066 - DNA, 15 bp, Homo sapiens
ctcatattttgggat

SEQ ID NO: 1543067 - DNA, 15 bp, Homo sapiens
gctcatattttggga

SEQ ID NO: 1543068 - DNA, 15 bp, Homo sapiens
agctcatattttggg

SEQ ID NO: 1543069 - DNA, 15 bp, Homo sapiens
tagctcatattttgg

SEQ ID NO: 1543070 - DNA, 15 bp, Homo sapiens
ctagctcatattttg

SEQ ID NO: 1543071 - DNA, 15 bp, Homo sapiens
gctagctcatatttt

SEQ ID NO: 1543072 - DNA, 15 bp, Homo sapiens
tgctagctcatattt

SEQ ID NO: 1543073 - DNA, 15 bp, Homo sapiens
ttgctagctcatatt

SEQ ID NO: 1543074 - DNA, 15 bp, Homo sapiens
gttgctagctcatat

SEQ ID NO: 1543075 - DNA, 15 bp, Homo sapiens
agttgctagctcata

SEQ ID NO: 1543076 - DNA, 15 bp, Homo sapiens
gagttgctagctcat

SEQ ID NO: 1543077 - DNA, 15 bp, Homo sapiens
ggagttgctagctca

SEQ ID NO: 1543078 - DNA, 15 bp, Homo sapiens
aggagttgctagctc

SEQ ID NO: 1543079 - DNA, 15 bp, Homo sapiens
taggagttgctagct

SEQ ID NO: 1543080 - DNA, 15 bp, Homo sapiens
ctaggagttgctagc

SEQ ID NO: 1543081 - DNA, 15 bp, Homo sapiens
cctaggagttgctag

SEQ ID NO: 1543082 - DNA, 15 bp, Homo sapiens
ccctaggagttgcta

SEQ ID NO: 1543083 - DNA, 15 bp, Homo sapiens
gccctaggagttgct

SEQ ID NO: 1543084 - DNA, 15 bp, Homo sapiens
agccctaggagttgc

SEQ ID NO: 1543085 - DNA, 15 bp, Homo sapiens
tagccctaggagttg

SEQ ID NO: 1543086 - DNA, 15 bp, Homo sapiens
gtagccctaggagtt

SEQ ID NO: 1543087 - DNA, 15 bp, Homo sapiens
cgtagccctaggagt

SEQ ID NO: 1543088 - DNA, 15 bp, Homo sapiens
acgtagccctaggag

SEQ ID NO: 1543089 - DNA, 15 bp, Homo sapiens
tacgtagccctagga

SEQ ID NO: 1543090 - DNA, 15 bp, Homo sapiens
atacgtagccctagg

SEQ ID NO: 1543091 - DNA, 15 bp, Homo sapiens
aatacgtagccctag

SEQ ID NO: 1543092 - DNA, 15 bp, Homo sapiens
gaatacgtagcccta

SEQ ID NO: 1543093 - DNA, 15 bp, Homo sapiens
ggaatacgtagccct

SEQ ID NO: 1543094 - DNA, 15 bp, Homo sapiens
gggaatacgtagccc

SEQ ID NO: 1543095 - DNA, 15 bp, Homo sapiens
agggaatacgtagcc

SEQ ID NO: 1543096 - DNA, 15 bp, Homo sapiens
aagggaatacgtagc

SEQ ID NO: 1543097 - DNA, 15 bp, Homo sapiens
caagggaatacgtag

SEQ ID NO: 1543098 - DNA, 15 bp, Homo sapiens
acaagggaatacgta

SEQ ID NO: 1543099 - DNA, 15 bp, Homo sapiens
aacaagggaatacgt

SEQ ID NO: 1543100 - DNA, 15 bp, Homo sapiens
aaacaagggaatacg

SEQ ID NO: 1543101 - DNA, 15 bp, Homo sapiens
taaacaagggaatac

SEQ ID NO: 1543102 - DNA, 15 bp, Homo sapiens
ataaacaagggaata

SEQ ID NO: 1543103 - DNA, 15 bp, Homo sapiens
tataaacaagggaat

SEQ ID NO: 1543104 - DNA, 15 bp, Homo sapiens
ttataaacaagggaa

SEQ ID NO: 1543105 - DNA, 15 bp, Homo sapiens
tttataaacaaggga

SEQ ID NO: 1543106 - DNA, 15 bp, Homo sapiens
gtttataaacaaggg

SEQ ID NO: 1543107 - DNA, 15 bp, Homo sapiens
tgtttataaacaagg

SEQ ID NO: 1543108 - DNA, 15 bp, Homo sapiens
gtgtttataaacaag

SEQ ID NO: 1543109 - DNA, 15 bp, Homo sapiens
ggtgtttataaacaa

SEQ ID NO: 1543110 - DNA, 15 bp, Homo sapiens
tggtgtttataaaca

SEQ ID NO: 1543111 - DNA, 15 bp, Homo sapiens
ctggtgtttataaac

SEQ ID NO: 1543112 - DNA, 15 bp, Homo sapiens
cctggtgtttataaa

SEQ ID NO: 1543113 - DNA, 15 bp, Homo sapiens
tcctggtgtttataa

SEQ ID NO: 1543114 - DNA, 15 bp, Homo sapiens
ttcctggtgtttata

SEQ ID NO: 1543115 - DNA, 15 bp, Homo sapiens
tttcctggtgtttat

SEQ ID NO: 1543116 - DNA, 15 bp, Homo sapiens
ctttcctggtgttta

SEQ ID NO: 1543117 - DNA, 15 bp, Homo sapiens
tctttcctggtgttt

SEQ ID NO: 1543118 - DNA, 15 bp, Homo sapiens
ttctttcctggtgtt

SEQ ID NO: 1543119 - DNA, 15 bp, Homo sapiens
tttctttcctggtgt

SEQ ID NO: 1543120 - DNA, 15 bp, Homo sapiens
atttctttcctggtg

SEQ ID NO: 1543121 - DNA, 15 bp, Homo sapiens
tatttctttcctggt

SEQ ID NO: 1543122 - DNA, 15 bp, Homo sapiens
atatttctttcctgg

SEQ ID NO: 1543123 - DNA, 15 bp, Homo sapiens
gatatttctttcctg

SEQ ID NO: 1543124 - DNA, 15 bp, Homo sapiens
agatatttctttcct

SEQ ID NO: 1543125 - DNA, 15 bp, Homo sapiens
gagatatttctttcc

SEQ ID NO: 1543126 - DNA, 15 bp, Homo sapiens
tgagatatttctttc

SEQ ID NO: 1543127 - DNA, 15 bp, Homo sapiens
ttgagatatttcttt

SEQ ID NO: 1543128 - DNA, 15 bp, Homo sapiens
tttgagatatttctt

SEQ ID NO: 1543129 - DNA, 15 bp, Homo sapiens
atttgagatatttct

SEQ ID NO: 1543130 - DNA, 15 bp, Homo sapiens
gatttgagatatttc

SEQ ID NO: 1543131 - DNA, 15 bp, Homo sapiens
ggatttgagatattt

SEQ ID NO: 1543132 - DNA, 15 bp, Homo sapiens
gggatttgagatatt

SEQ ID NO: 1543133 - DNA, 15 bp, Homo sapiens
tgggatttgagatat

SEQ ID NO: 1543134 - DNA, 15 bp, Homo sapiens
ttgggatttgagata

SEQ ID NO: 1543135 - DNA, 15 bp, Homo sapiens
gttgggatttgagat

SEQ ID NO: 1543136 - DNA, 15 bp, Homo sapiens
tgttgggatttgaga

SEQ ID NO: 1543137 - DNA, 15 bp, Homo sapiens
ttgttgggatttgag

SEQ ID NO: 1543138 - DNA, 15 bp, Homo sapiens
attgttgggatttga

SEQ ID NO: 1543139 - DNA, 15 bp, Homo sapiens
aattgttgggatttg

SEQ ID NO: 1543140 - DNA, 15 bp, Homo sapiens
aaattgttgggattt

SEQ ID NO: 1543141 - DNA, 15 bp, Homo sapiens
taaattgttgggatt

SEQ ID NO: 1543142 - DNA, 15 bp, Homo sapiens
ttaaattgttgggat

SEQ ID NO: 1543143 - DNA, 15 bp, Homo sapiens
cttaaattgttggga

SEQ ID NO: 1543144 - DNA, 15 bp, Homo sapiens
gcttaaattgttggg

SEQ ID NO: 1543145 - DNA, 15 bp, Homo sapiens
agcttaaattgttgg

SEQ ID NO: 1543146 - DNA, 15 bp, Homo sapiens
tagcttaaattgttg

SEQ ID NO: 1543147 - DNA, 15 bp, Homo sapiens
ttagcttaaattgtt

SEQ ID NO: 1543148 - DNA, 15 bp, Homo sapiens
tttagcttaaattgt

SEQ ID NO: 1543149 - DNA, 15 bp, Homo sapiens
gtttagcttaaattg

SEQ ID NO: 1543150 - DNA, 15 bp, Homo sapiens
agtttagcttaaatt

SEQ ID NO: 1543151 - DNA, 15 bp, Homo sapiens
tagtttagcttaaat

SEQ ID NO: 1543152 - DNA, 15 bp, Homo sapiens
gtagtttagcttaaa

SEQ ID NO: 1543153 - DNA, 15 bp, Homo sapiens
ggtagtttagcttaa

SEQ ID NO: 1543154 - DNA, 15 bp, Homo sapiens
aggtagtttagctta

SEQ ID NO: 1543155 - DNA, 15 bp, Homo sapiens
caggtagtttagctt

SEQ ID NO: 1543156 - DNA, 15 bp, Homo sapiens
tcaggtagtttagct

SEQ ID NO: 1543157 - DNA, 15 bp, Homo sapiens
ttcaggtagtttagc

SEQ ID NO: 1543158 - DNA, 15 bp, Homo sapiens
gttcaggtagtttag

SEQ ID NO: 1543159 - DNA, 15 bp, Homo sapiens
agttcaggtagttta

SEQ ID NO: 1543160 - DNA, 15 bp, Homo sapiens
cagttcaggtagttt

SEQ ID NO: 1543161 - DNA, 15 bp, Homo sapiens
ccagttcaggtagtt

SEQ ID NO: 1543162 - DNA, 15 bp, Homo sapiens
cccagttcaggtagt

SEQ ID NO: 1543163 - DNA, 15 bp, Homo sapiens
gcccagttcaggtag

SEQ ID NO: 1543164 - DNA, 15 bp, Homo sapiens
ggcccagttcaggta

SEQ ID NO: 1543165 - DNA, 15 bp, Homo sapiens
aggcccagttcaggt

SEQ ID NO: 1543166 - DNA, 15 bp, Homo sapiens
gaggcccagttcagg

SEQ ID NO: 1543167 - DNA, 15 bp, Homo sapiens
agaggcccagttcag

SEQ ID NO: 1543168 - DNA, 15 bp, Homo sapiens
aagaggcccagttca

SEQ ID NO: 1543169 - DNA, 15 bp, Homo sapiens
aaagaggcccagttc

SEQ ID NO: 1543170 - DNA, 15 bp, Homo sapiens
caaagaggcccagtt

SEQ ID NO: 1543171 - DNA, 15 bp, Homo sapiens
ccaaagaggcccagt

SEQ ID NO: 1543172 - DNA, 15 bp, Homo sapiens
gccaaagaggcccag

SEQ ID NO: 1543173 - DNA, 15 bp, Homo sapiens
ggccaaagaggccca

SEQ ID NO: 1543174 - DNA, 15 bp, Homo sapiens
gggccaaagaggccc

SEQ ID NO: 1543175 - DNA, 15 bp, Homo sapiens
agggccaaagaggcc

SEQ ID NO: 1543176 - DNA, 15 bp, Homo sapiens
cagggccaaagaggc

SEQ ID NO: 1543177 - DNA, 15 bp, Homo sapiens
ccagggccaaagagg

SEQ ID NO: 1543178 - DNA, 15 bp, Homo sapiens
accagggccaaagag

SEQ ID NO: 1543179 - DNA, 15 bp, Homo sapiens
aaccagggccaaaga

SEQ ID NO: 1543180 - DNA, 15 bp, Homo sapiens
caaccagggccaaag

SEQ ID NO: 1543181 - DNA, 15 bp, Homo sapiens
acaaccagggccaaa

SEQ ID NO: 1543182 - DNA, 15 bp, Homo sapiens
gacaaccagggccaa

SEQ ID NO: 1543183 - DNA, 15 bp, Homo sapiens
ggacaaccagggcca

SEQ ID NO: 1543184 - DNA, 15 bp, Homo sapiens
aggacaaccagggcc

SEQ ID NO: 1543185 - DNA, 15 bp, Homo sapiens
caggacaaccagggc

SEQ ID NO: 1543186 - DNA, 15 bp, Homo sapiens
ccaggacaaccaggg

SEQ ID NO: 1543187 - DNA, 15 bp, Homo sapiens
accaggacaaccagg

SEQ ID NO: 1543188 - DNA, 15 bp, Homo sapiens
aaccaggacaaccag

SEQ ID NO: 1543189 - DNA, 15 bp, Homo sapiens
aaaccaggacaacca

SEQ ID NO: 1543190 - DNA, 15 bp, Homo sapiens
caaaccaggacaacc

SEQ ID NO: 1543191 - DNA, 15 bp, Homo sapiens
tcaaaccaggacaac

SEQ ID NO: 1543192 - DNA, 15 bp, Homo sapiens
ttcaaaccaggacaa

SEQ ID NO: 1543193 - DNA, 15 bp, Homo sapiens
attcaaaccaggaca

SEQ ID NO: 1543194 - DNA, 15 bp, Homo sapiens
tattcaaaccaggac

SEQ ID NO: 1543195 - DNA, 15 bp, Homo sapiens
ttattcaaaccagga

SEQ ID NO: 1543196 - DNA, 15 bp, Homo sapiens
attattcaaaccagg

SEQ ID NO: 1543197 - DNA, 15 bp, Homo sapiens
cattattcaaaccag

SEQ ID NO: 1543198 - DNA, 15 bp, Homo sapiens
acattattcaaacca

SEQ ID NO: 1543199 - DNA, 15 bp, Homo sapiens
cacattattcaaacc

SEQ ID NO: 1543200 - DNA, 15 bp, Homo sapiens
acacattattcaaac

SEQ ID NO: 1543201 - DNA, 15 bp, Homo sapiens
aacacattattcaaa

SEQ ID NO: 1543202 - DNA, 15 bp, Homo sapiens
gaacacattattcaa

SEQ ID NO: 1543203 - DNA, 15 bp, Homo sapiens
tgaacacattattca

SEQ ID NO: 1543204 - DNA, 15 bp, Homo sapiens
atgaacacattattc

SEQ ID NO: 1543205 - DNA, 15 bp, Homo sapiens
aatgaacacattatt

SEQ ID NO: 1543206 - DNA, 15 bp, Homo sapiens
caatgaacacattat

SEQ ID NO: 1543207 - DNA, 15 bp, Homo sapiens
gcaatgaacacatta

SEQ ID NO: 1543208 - DNA, 15 bp, Homo sapiens
agcaatgaacacatt

SEQ ID NO: 1543209 - DNA, 15 bp, Homo sapiens
cagcaatgaacacat

SEQ ID NO: 1543210 - DNA, 15 bp, Homo sapiens
tcagcaatgaacaca

SEQ ID NO: 1543211 - DNA, 15 bp, Homo sapiens
ttcagcaatgaacac

SEQ ID NO: 1543212 - DNA, 15 bp, Homo sapiens
attcagcaatgaaca

SEQ ID NO: 1543213 - DNA, 15 bp, Homo sapiens
gattcagcaatgaac

SEQ ID NO: 1543214 - DNA, 15 bp, Homo sapiens
tgattcagcaatgaa

SEQ ID NO: 1543215 - DNA, 15 bp, Homo sapiens
ctgattcagcaatga

SEQ ID NO: 1543216 - DNA, 15 bp, Homo sapiens
actgattcagcaatg

SEQ ID NO: 1543217 - DNA, 15 bp, Homo sapiens
gactgattcagcaat

SEQ ID NO: 1543218 - DNA, 15 bp, Homo sapiens
agactgattcagcaa

SEQ ID NO: 1543219 - DNA, 15 bp, Homo sapiens
cagactgattcagca

SEQ ID NO: 1543220 - DNA, 15 bp, Homo sapiens
acagactgattcagc

SEQ ID NO: 1543221 - DNA, 15 bp, Homo sapiens
cacagactgattcag

SEQ ID NO: 1543222 - DNA, 15 bp, Homo sapiens
tcacagactgattca

SEQ ID NO: 1543223 - DNA, 15 bp, Homo sapiens
atcacagactgattc

SEQ ID NO: 1543224 - DNA, 15 bp, Homo sapiens
gatcacagactgatt

SEQ ID NO: 1543225 - DNA, 15 bp, Homo sapiens
tgatcacagactgat

SEQ ID NO: 1543226 - DNA, 15 bp, Homo sapiens
ttgatcacagactga

SEQ ID NO: 1543227 - DNA, 15 bp, Homo sapiens
cttgatcacagactg

SEQ ID NO: 1543228 - DNA, 15 bp, Homo sapiens
ccttgatcacagact

SEQ ID NO: 1543229 - DNA, 15 bp, Homo sapiens
accttgatcacagac

SEQ ID NO: 1543230 - DNA, 15 bp, Homo sapiens
caccttgatcacaga

SEQ ID NO: 1543231 - DNA, 15 bp, Homo sapiens
ccaccttgatcacag

SEQ ID NO: 1543232 - DNA, 15 bp, Homo sapiens
cccaccttgatcaca

SEQ ID NO: 1543233 - DNA, 15 bp, Homo sapiens
tcccaccttgatcac

SEQ ID NO: 1543234 - DNA, 15 bp, Homo sapiens
atcccaccttgatca

SEQ ID NO: 1543235 - DNA, 15 bp, Homo sapiens
tatcccaccttgatc

SEQ ID NO: 1543236 - DNA, 15 bp, Homo sapiens
ttatcccaccttgat

SEQ ID NO: 1543237 - DNA, 15 bp, Homo sapiens
tttatcccaccttga

SEQ ID NO: 1543238 - DNA, 15 bp, Homo sapiens
atttatcccaccttg

SEQ ID NO: 1543239 - DNA, 15 bp, Homo sapiens
catttatcccacctt

SEQ ID NO: 1543240 - DNA, 15 bp, Homo sapiens
ccatttatcccacct

SEQ ID NO: 1543241 - DNA, 15 bp, Homo sapiens
tccatttatcccacc

SEQ ID NO: 1543242 - DNA, 15 bp, Homo sapiens
atccatttatcccac

SEQ ID NO: 1543243 - DNA, 15 bp, Homo sapiens
aatccatttatccca

SEQ ID NO: 1543244 - DNA, 15 bp, Homo sapiens
caatccatttatccc

SEQ ID NO: 1543245 - DNA, 15 bp, Homo sapiens
ccaatccatttatcc

SEQ ID NO: 1543246 - DNA, 15 bp, Homo sapiens
gccaatccatttatc

SEQ ID NO: 1543247 - DNA, 15 bp, Homo sapiens
agccaatccatttat

SEQ ID NO: 1543248 - DNA, 15 bp, Homo sapiens
tagccaatccattta

SEQ ID NO: 1543249 - DNA, 15 bp, Homo sapiens
ttagccaatccattt

SEQ ID NO: 1543250 - DNA, 15 bp, Homo sapiens
tttagccaatccatt

SEQ ID NO: 1543251 - DNA, 15 bp, Homo sapiens
ttttagccaatccat

SEQ ID NO: 1543252 - DNA, 15 bp, Homo sapiens
gttttagccaatcca

SEQ ID NO: 1543253 - DNA, 15 bp, Homo sapiens
ggttttagccaatcc

SEQ ID NO: 1543254 - DNA, 15 bp, Homo sapiens
tggttttagccaatc

SEQ ID NO: 1543255 - DNA, 15 bp, Homo sapiens
atggttttagccaat

SEQ ID NO: 1543256 - DNA, 15 bp, Homo sapiens
gatggttttagccaa

SEQ ID NO: 1543257 - DNA, 15 bp, Homo sapiens
agatggttttagcca

SEQ ID NO: 1543258 - DNA, 15 bp, Homo sapiens
gagatggttttagcc

SEQ ID NO: 1543259 - DNA, 15 bp, Homo sapiens
tgagatggttttagc

SEQ ID NO: 1543260 - DNA, 15 bp, Homo sapiens
gtgagatggttttag

SEQ ID NO: 1543261 - DNA, 15 bp, Homo sapiens
agtgagatggtttta

SEQ ID NO: 1543262 - DNA, 15 bp, Homo sapiens
gagtgagatggtttt

SEQ ID NO: 1543263 - DNA, 15 bp, Homo sapiens
ggagtgagatggttt

SEQ ID NO: 1543264 - DNA, 15 bp, Homo sapiens
tggagtgagatggtt

SEQ ID NO: 1543265 - DNA, 15 bp, Homo sapiens
ctggagtgagatggt

SEQ ID NO: 1543266 - DNA, 15 bp, Homo sapiens
tctggagtgagatgg

SEQ ID NO: 1543267 - DNA, 15 bp, Homo sapiens
ctctggagtgagatg

SEQ ID NO: 1543268 - DNA, 15 bp, Homo sapiens
gctctggagtgagat

SEQ ID NO: 1543269 - DNA, 15 bp, Homo sapiens
agctctggagtgaga

SEQ ID NO: 1543270 - DNA, 15 bp, Homo sapiens
gagctctggagtgag

SEQ ID NO: 1543271 - DNA, 15 bp, Homo sapiens
ggagctctggagtga

SEQ ID NO: 1543272 - DNA, 15 bp, Homo sapiens
tggagctctggagtg

SEQ ID NO: 1543273 - DNA, 15 bp, Homo sapiens
ctggagctctggagt

SEQ ID NO: 1543274 - DNA, 15 bp, Homo sapiens
tctggagctctggag

SEQ ID NO: 1543275 - DNA, 15 bp, Homo sapiens
atctggagctctgga

SEQ ID NO: 1543276 - DNA, 15 bp, Homo sapiens
catctggagctctgg

SEQ ID NO: 1543277 - DNA, 15 bp, Homo sapiens
ccatctggagctctg

SEQ ID NO: 1543278 - DNA, 15 bp, Homo sapiens
cccatctggagctct

SEQ ID NO: 1543279 - DNA, 15 bp, Homo sapiens
acccatctggagctc

SEQ ID NO: 1543280 - DNA, 15 bp, Homo sapiens
gacccatctggagct

SEQ ID NO: 1543281 - DNA, 15 bp, Homo sapiens
tgacccatctggagc

SEQ ID NO: 1543282 - DNA, 15 bp, Homo sapiens
atgacccatctggag

SEQ ID NO: 1543283 - DNA, 15 bp, Homo sapiens
aatgacccatctgga

SEQ ID NO: 1543284 - DNA, 15 bp, Homo sapiens
gaatgacccatctgg

SEQ ID NO: 1543285 - DNA, 15 bp, Homo sapiens
ggaatgacccatctg

SEQ ID NO: 1543286 - DNA, 15 bp, Homo sapiens
aggaatgacccatct

SEQ ID NO: 1543287 - DNA, 15 bp, Homo sapiens
taggaatgacccatc

SEQ ID NO: 1543288 - DNA, 15 bp, Homo sapiens
gtaggaatgacccat

SEQ ID NO: 1543289 - DNA, 15 bp, Homo sapiens
ggtaggaatgaccca

SEQ ID NO: 1543290 - DNA, 15 bp, Homo sapiens
tggtaggaatgaccc

SEQ ID NO: 1543291 - DNA, 15 bp, Homo sapiens
ctggtaggaatgacc

SEQ ID NO: 1543292 - DNA, 15 bp, Homo sapiens
tctggtaggaatgac

SEQ ID NO: 1543293 - DNA, 15 bp, Homo sapiens
gtctggtaggaatga

SEQ ID NO: 1543294 - DNA, 15 bp, Homo sapiens
agtctggtaggaatg

SEQ ID NO: 1543295 - DNA, 15 bp, Homo sapiens
tagtctggtaggaat

SEQ ID NO: 1543296 - DNA, 15 bp, Homo sapiens
atagtctggtaggaa

SEQ ID NO: 1543297 - DNA, 15 bp, Homo sapiens
aatagtctggtagga

SEQ ID NO: 1543298 - DNA, 15 bp, Homo sapiens
gaatagtctggtagg

SEQ ID NO: 1543299 - DNA, 15 bp, Homo sapiens
cgaatagtctggtag

SEQ ID NO: 1543300 - DNA, 15 bp, Homo sapiens
gcgaatagtctggta

SEQ ID NO: 1543301 - DNA, 15 bp, Homo sapiens
ggcgaatagtctggt

SEQ ID NO: 1543302 - DNA, 15 bp, Homo sapiens
aggcgaatagtctgg

SEQ ID NO: 1543303 - DNA, 15 bp, Homo sapiens
taggcgaatagtctg

SEQ ID NO: 1543304 - DNA, 15 bp, Homo sapiens
ttaggcgaatagtct

SEQ ID NO: 1543305 - DNA, 15 bp, Homo sapiens
cttaggcgaatagtc

SEQ ID NO: 1543306 - DNA, 15 bp, Homo sapiens
ccttaggcgaatagt

SEQ ID NO: 1543307 - DNA, 15 bp, Homo sapiens
tccttaggcgaatag

SEQ ID NO: 1543308 - DNA, 15 bp, Homo sapiens
ctccttaggcgaata

SEQ ID NO: 1543309 - DNA, 15 bp, Homo sapiens
actccttaggcgaat

SEQ ID NO: 1543310 - DNA, 15 bp, Homo sapiens
aactccttaggcgaa

SEQ ID NO: 1543311 - DNA, 15 bp, Homo sapiens
aaactccttaggcga

SEQ ID NO: 1543312 - DNA, 15 bp, Homo sapiens
caaactccttaggcg

SEQ ID NO: 1543313 - DNA, 15 bp, Homo sapiens
ccaaactccttaggc

SEQ ID NO: 1543314 - DNA, 15 bp, Homo sapiens
accaaactccttagg

SEQ ID NO: 1543315 - DNA, 15 bp, Homo sapiens
caccaaactccttag

SEQ ID NO: 1543316 - DNA, 15 bp, Homo sapiens
ccaccaaactcctta

SEQ ID NO: 1543317 - DNA, 15 bp, Homo sapiens
cccaccaaactcctt

SEQ ID NO: 1543318 - DNA, 15 bp, Homo sapiens
gcccaccaaactcct

SEQ ID NO: 1543319 - DNA, 15 bp, Homo sapiens
ggcccaccaaactcc

SEQ ID NO: 1543320 - DNA, 15 bp, Homo sapiens
gggcccaccaaactc

SEQ ID NO: 1543321 - DNA, 15 bp, Homo sapiens
agggcccaccaaact

SEQ ID NO: 1543322 - DNA, 15 bp, Homo sapiens
cagggcccaccaaac

SEQ ID NO: 1543323 - DNA, 15 bp, Homo sapiens
gcagggcccaccaaa

SEQ ID NO: 1543324 - DNA, 15 bp, Homo sapiens
tgcagggcccaccaa

SEQ ID NO: 1543325 - DNA, 15 bp, Homo sapiens
ctgcagggcccacca

SEQ ID NO: 1543326 - DNA, 15 bp, Homo sapiens
cctgcagggcccacc

SEQ ID NO: 1543327 - DNA, 15 bp, Homo sapiens
gcctgcagggcccac

SEQ ID NO: 1543328 - DNA, 15 bp, Homo sapiens
tgcctgcagggccca

SEQ ID NO: 1543329 - DNA, 15 bp, Homo sapiens
ttgcctgcagggccc

SEQ ID NO: 1543330 - DNA, 15 bp, Homo sapiens
gttgcctgcagggcc

SEQ ID NO: 1543331 - DNA, 15 bp, Homo sapiens
ggttgcctgcagggc

SEQ ID NO: 1543332 - DNA, 15 bp, Homo sapiens
tggttgcctgcaggg

SEQ ID NO: 1543333 - DNA, 15 bp, Homo sapiens
ttggttgcctgcagg

SEQ ID NO: 1543334 - DNA, 15 bp, Homo sapiens
gttggttgcctgcag

SEQ ID NO: 1543335 - DNA, 15 bp, Homo sapiens
agttggttgcctgca

SEQ ID NO: 1543336 - DNA, 15 bp, Homo sapiens
tagttggttgcctgc

SEQ ID NO: 1543337 - DNA, 15 bp, Homo sapiens
ttagttggttgcctg

SEQ ID NO: 1543338 - DNA, 15 bp, Homo sapiens
attagttggttgcct

SEQ ID NO: 1543339 - DNA, 15 bp, Homo sapiens
aattagttggttgcc

SEQ ID NO: 1543340 - DNA, 15 bp, Homo sapiens
gaattagttggttgc

SEQ ID NO: 1543341 - DNA, 15 bp, Homo sapiens
ggaattagttggttg

SEQ ID NO: 1543342 - DNA, 15 bp, Homo sapiens
gggaattagttggtt

SEQ ID NO: 1543343 - DNA, 15 bp, Homo sapiens
tgggaattagttggt

SEQ ID NO: 1543344 - DNA, 15 bp, Homo sapiens
gtgggaattagttgg

SEQ ID NO: 1543345 - DNA, 15 bp, Homo sapiens
agtgggaattagttg

SEQ ID NO: 1543346 - DNA, 15 bp, Homo sapiens
cagtgggaattagtt

SEQ ID NO: 1543347 - DNA, 15 bp, Homo sapiens
acagtgggaattagt

SEQ ID NO: 1543348 - DNA, 15 bp, Homo sapiens
aacagtgggaattag

SEQ ID NO: 1543349 - DNA, 15 bp, Homo sapiens
aaacagtgggaatta

SEQ ID NO: 1543350 - DNA, 15 bp, Homo sapiens
aaaacagtgggaatt

SEQ ID NO: 1543351 - DNA, 15 bp, Homo sapiens
gaaaacagtgggaat

SEQ ID NO: 1543352 - DNA, 15 bp, Homo sapiens
agaaaacagtgggaa

SEQ ID NO: 1543353 - DNA, 15 bp, Homo sapiens
aagaaaacagtggga

SEQ ID NO: 1543354 - DNA, 15 bp, Homo sapiens
gaagaaaacagtggg

SEQ ID NO: 1543355 - DNA, 15 bp, Homo sapiens
ggaagaaaacagtgg

SEQ ID NO: 1543356 - DNA, 15 bp, Homo sapiens
aggaagaaaacagtg

SEQ ID NO: 1543357 - DNA, 15 bp, Homo sapiens
aaggaagaaaacagt

SEQ ID NO: 1543358 - DNA, 15 bp, Homo sapiens
aaaggaagaaaacag

SEQ ID NO: 1543359 - DNA, 15 bp, Homo sapiens
gaaaggaagaaaaca

SEQ ID NO: 1543360 - DNA, 15 bp, Homo sapiens
agaaaggaagaaaac

SEQ ID NO: 1543361 - DNA, 15 bp, Homo sapiens
caagaaaggaagaaa

SEQ ID NO: 1543362 - DNA, 15 bp, Homo sapiens
tcaagaaaggaagaa

SEQ ID NO: 1543363 - DNA, 15 bp, Homo sapiens
gtcaagaaaggaaga

SEQ ID NO: 1543364 - DNA, 15 bp, Homo sapiens
agtcaagaaaggaag

SEQ ID NO: 1543365 - DNA, 15 bp, Homo sapiens
gagtcaagaaaggaa

SEQ ID NO: 1543366 - DNA, 15 bp, Homo sapiens
tgagtcaagaaagga

SEQ ID NO: 1543367 - DNA, 15 bp, Homo sapiens
atgagtcaagaaagg

SEQ ID NO: 1543368 - DNA, 15 bp, Homo sapiens
catgagtcaagaaag

SEQ ID NO: 1543369 - DNA, 15 bp, Homo sapiens
ccatgagtcaagaaa

SEQ ID NO: 1543370 - DNA, 15 bp, Homo sapiens
cccatgagtcaagaa

SEQ ID NO: 1543371 - DNA, 15 bp, Homo sapiens
gcccatgagtcaaga

SEQ ID NO: 1543372 - DNA, 15 bp, Homo sapiens
tgcccatgagtcaag

SEQ ID NO: 1543373 - DNA, 15 bp, Homo sapiens
ttgcccatgagtcaa

SEQ ID NO: 1543374 - DNA, 15 bp, Homo sapiens
tttgcccatgagtca

SEQ ID NO: 1543375 - DNA, 15 bp, Homo sapiens
atttgcccatgagtc

SEQ ID NO: 1543376 - DNA, 15 bp, Homo sapiens
aatttgcccatgagt

SEQ ID NO: 1543377 - DNA, 15 bp, Homo sapiens
aaatttgcccatgag

SEQ ID NO: 1543378 - DNA, 15 bp, Homo sapiens
aaaatttgcccatga

SEQ ID NO: 1543379 - DNA, 15 bp, Homo sapiens
aaaaatttgcccatg

SEQ ID NO: 1543380 - DNA, 15 bp, Homo sapiens
aaaaaatttgcccat

SEQ ID NO: 1543381 - DNA, 15 bp, Homo sapiens
taaaaaatttgccca

SEQ ID NO: 1543382 - DNA, 15 bp, Homo sapiens
ataaaaaatttgccc

SEQ ID NO: 1543383 - DNA, 15 bp, Homo sapiens
aataaaaaatttgcc

SEQ ID NO: 1543384 - DNA, 15 bp, Homo sapiens
caataaaaaatttgc

SEQ ID NO: 1543385 - DNA, 15 bp, Homo sapiens
caacaataaaaaatt

SEQ ID NO: 1543386 - DNA, 15 bp, Homo sapiens
acaacaataaaaaat

SEQ ID NO: 1543387 - DNA, 15 bp, Homo sapiens
gacaacaataaaaaa

SEQ ID NO: 1543388 - DNA, 15 bp, Homo sapiens
cgacaacaataaaaa

SEQ ID NO: 1543389 - DNA, 15 bp, Homo sapiens
acgacaacaataaaa

SEQ ID NO: 1543390 - DNA, 15 bp, Homo sapiens
cacgacaacaataaa

SEQ ID NO: 1543391 - DNA, 15 bp, Homo sapiens
ccacgacaacaataa

SEQ ID NO: 1543392 - DNA, 15 bp, Homo sapiens
gccacgacaacaata

SEQ ID NO: 1543393 - DNA, 15 bp, Homo sapiens
agccacgacaacaat

SEQ ID NO: 1543394 - DNA, 15 bp, Homo sapiens
gagccacgacaacaa

SEQ ID NO: 1543395 - DNA, 15 bp, Homo sapiens
tgagccacgacaaca

SEQ ID NO: 1543396 - DNA, 15 bp, Homo sapiens
ttgagccacgacaac

SEQ ID NO: 1543397 - DNA, 15 bp, Homo sapiens
tttgagccacgacaa

SEQ ID NO: 1543398 - DNA, 15 bp, Homo sapiens
ttttgagccacgaca

SEQ ID NO: 1543399 - DNA, 15 bp, Homo sapiens
attttgagccacgac

SEQ ID NO: 1543400 - DNA, 15 bp, Homo sapiens
aattttgagccacga

SEQ ID NO: 1543401 - DNA, 15 bp, Homo sapiens
aaattttgagccacg

SEQ ID NO: 1543402 - DNA, 15 bp, Homo sapiens
aaaattttgagccac

SEQ ID NO: 1543403 - DNA, 15 bp, Homo sapiens
aaaaattttgagcca

SEQ ID NO: 1543404 - DNA, 15 bp, Homo sapiens
caaaaattttgagcc

SEQ ID NO: 1543405 - DNA, 15 bp, Homo sapiens
tcaaaaattttgagc

SEQ ID NO: 1543406 - DNA, 15 bp, Homo sapiens
ttcaaaaattttgag

SEQ ID NO: 1543407 - DNA, 15 bp, Homo sapiens
attcaaaaattttga

SEQ ID NO: 1543408 - DNA, 15 bp, Homo sapiens
aattcaaaaattttg

SEQ ID NO: 1543409 - DNA, 15 bp, Homo sapiens
caattcaaaaatttt

SEQ ID NO: 1543410 - DNA, 15 bp, Homo sapiens
ccaattcaaaaattt

SEQ ID NO: 1543411 - DNA, 15 bp, Homo sapiens
tccaattcaaaaatt

SEQ ID NO: 1543412 - DNA, 15 bp, Homo sapiens
ctccaattcaaaaat

SEQ ID NO: 1543413 - DNA, 15 bp, Homo sapiens
tctccaattcaaaaa

SEQ ID NO: 1543414 - DNA, 15 bp, Homo sapiens
atctccaattcaaaa

SEQ ID NO: 1543415 - DNA, 15 bp, Homo sapiens
aatctccaattcaaa

SEQ ID NO: 1543416 - DNA, 15 bp, Homo sapiens
aaatctccaattcaa

SEQ ID NO: 1543417 - DNA, 15 bp, Homo sapiens
caaatctccaattca

SEQ ID NO: 1543418 - DNA, 15 bp, Homo sapiens
acaaatctccaattc

SEQ ID NO: 1543419 - DNA, 15 bp, Homo sapiens
gacaaatctccaatt

SEQ ID NO: 1543420 - DNA, 15 bp, Homo sapiens
agacaaatctccaat

SEQ ID NO: 1543421 - DNA, 15 bp, Homo sapiens
gagacaaatctccaa

SEQ ID NO: 1543422 - DNA, 15 bp, Homo sapiens
agagacaaatctcca

SEQ ID NO: 1543423 - DNA, 15 bp, Homo sapiens
aagagacaaatctcc

SEQ ID NO: 1543424 - DNA, 15 bp, Homo sapiens
gaagagacaaatctc

SEQ ID NO: 1543425 - DNA, 15 bp, Homo sapiens
agaagagacaaatct

SEQ ID NO: 1543426 - DNA, 15 bp, Homo sapiens
gagaagagacaaatc

SEQ ID NO: 1543427 - DNA, 15 bp, Homo sapiens
agagaagagacaaat

SEQ ID NO: 1543428 - DNA, 15 bp, Homo sapiens
aagagaagagacaaa

SEQ ID NO: 1543429 - DNA, 15 bp, Homo sapiens
taagagaagagacaa

SEQ ID NO: 1543430 - DNA, 15 bp, Homo sapiens
ctaagagaagagaca

SEQ ID NO: 1543431 - DNA, 15 bp, Homo sapiens
gctaagagaagagac

SEQ ID NO: 1543432 - DNA, 15 bp, Homo sapiens
ggctaagagaagaga

SEQ ID NO: 1543433 - DNA, 15 bp, Homo sapiens
aggctaagagaagag

SEQ ID NO: 1543434 - DNA, 15 bp, Homo sapiens
aaggctaagagaaga

SEQ ID NO: 1543435 - DNA, 15 bp, Homo sapiens
taaggctaagagaag

SEQ ID NO: 1543436 - DNA, 15 bp, Homo sapiens
ataaggctaagagaa

SEQ ID NO: 1543437 - DNA, 15 bp, Homo sapiens
aataaggctaagaga

SEQ ID NO: 1543438 - DNA, 15 bp, Homo sapiens
aaataaggctaagag

SEQ ID NO: 1543439 - DNA, 15 bp, Homo sapiens
gaaataaggctaaga

SEQ ID NO: 1543440 - DNA, 15 bp, Homo sapiens
agaaataaggctaag

SEQ ID NO: 1543441 - DNA, 15 bp, Homo sapiens
gagaaataaggctaa

SEQ ID NO: 1543442 - DNA, 15 bp, Homo sapiens
tgagaaataaggcta

SEQ ID NO: 1543443 - DNA, 15 bp, Homo sapiens
ctgagaaataaggct

SEQ ID NO: 1543444 - DNA, 15 bp, Homo sapiens
actgagaaataaggc

SEQ ID NO: 1543445 - DNA, 15 bp, Homo sapiens
cactgagaaataagg

SEQ ID NO: 1543446 - DNA, 15 bp, Homo sapiens
acactgagaaataag

SEQ ID NO: 1543447 - DNA, 15 bp, Homo sapiens
gacactgagaaataa

SEQ ID NO: 1543448 - DNA, 15 bp, Homo sapiens
ggacactgagaaata

SEQ ID NO: 1543449 - DNA, 15 bp, Homo sapiens
tggacactgagaaat

SEQ ID NO: 1543450 - DNA, 15 bp, Homo sapiens
ttggacactgagaaa

SEQ ID NO: 1543451 - DNA, 15 bp, Homo sapiens
tttggacactgagaa

SEQ ID NO: 1543452 - DNA, 15 bp, Homo sapiens
ttttggacactgaga

SEQ ID NO: 1543453 - DNA, 15 bp, Homo sapiens
tttttggacactgag

SEQ ID NO: 1543454 - DNA, 15 bp, Homo sapiens
ttttttggacactga

SEQ ID NO: 1543455 - DNA, 15 bp, Homo sapiens
gttttttggacactg

SEQ ID NO: 1543456 - DNA, 15 bp, Homo sapiens
tgttttttggacact

SEQ ID NO: 1543457 - DNA, 15 bp, Homo sapiens
ttgttttttggacac

SEQ ID NO: 1543458 - DNA, 15 bp, Homo sapiens
gttgttttttggaca

SEQ ID NO: 1543459 - DNA, 15 bp, Homo sapiens
agttgttttttggac

SEQ ID NO: 1543460 - DNA, 15 bp, Homo sapiens
cagttgttttttgga

SEQ ID NO: 1543461 - DNA, 15 bp, Homo sapiens
tcagttgttttttgg

SEQ ID NO: 1543462 - DNA, 15 bp, Homo sapiens
atcagttgttttttg

SEQ ID NO: 1543463 - DNA, 15 bp, Homo sapiens
aatcagttgtttttt

SEQ ID NO: 1543464 - DNA, 15 bp, Homo sapiens
aaatcagttgttttt

SEQ ID NO: 1543465 - DNA, 15 bp, Homo sapiens
taaatcagttgtttt

SEQ ID NO: 1543466 - DNA, 15 bp, Homo sapiens
ttaaatcagttgttt

SEQ ID NO: 1543467 - DNA, 15 bp, Homo sapiens
tttaaatcagttgtt

SEQ ID NO: 1543468 - DNA, 15 bp, Homo sapiens
ttttaaatcagttgt

SEQ ID NO: 1543469 - DNA, 15 bp, Homo sapiens
tttttaaatcagttg

SEQ ID NO: 1543470 - DNA, 15 bp, Homo sapiens
ttttttaaatcagtt

SEQ ID NO: 1543471 - DNA, 15 bp, Homo sapiens
attttttaaatcagt

SEQ ID NO: 1543472 - DNA, 15 bp, Homo sapiens
cattttttaaatcag

SEQ ID NO: 1543473 - DNA, 15 bp, Homo sapiens
tcattttttaaatca

SEQ ID NO: 1543474 - DNA, 15 bp, Homo sapiens
ttcattttttaaatc

SEQ ID NO: 1543475 - DNA, 15 bp, Homo sapiens
attcattttttaaat

SEQ ID NO: 1543476 - DNA, 15 bp, Homo sapiens
gattcattttttaaa

SEQ ID NO: 1543477 - DNA, 15 bp, Homo sapiens
ggattcattttttaa

SEQ ID NO: 1543478 - DNA, 15 bp, Homo sapiens
tggattcatttttta

SEQ ID NO: 1543479 - DNA, 15 bp, Homo sapiens
ctggattcatttttt

SEQ ID NO: 1543480 - DNA, 15 bp, Homo sapiens
tctggattcattttt

SEQ ID NO: 1543481 - DNA, 15 bp, Homo sapiens
gtctggattcatttt

SEQ ID NO: 1543482 - DNA, 15 bp, Homo sapiens
agtctggattcattt

SEQ ID NO: 1543483 - DNA, 15 bp, Homo sapiens
aagtctggattcatt

SEQ ID NO: 1543484 - DNA, 15 bp, Homo sapiens
aaagtctggattcat

SEQ ID NO: 1543485 - DNA, 15 bp, Homo sapiens
caaagtctggattca

SEQ ID NO: 1543486 - DNA, 15 bp, Homo sapiens
tcaaagtctggattc

SEQ ID NO: 1543487 - DNA, 15 bp, Homo sapiens
ttcaaagtctggatt

SEQ ID NO: 1543488 - DNA, 15 bp, Homo sapiens
cttcaaagtctggat

SEQ ID NO: 1543489 - DNA, 15 bp, Homo sapiens
tcttcaaagtctgga

SEQ ID NO: 1543490 - DNA, 15 bp, Homo sapiens
ttcttcaaagtctgg

SEQ ID NO: 1543491 - DNA, 15 bp, Homo sapiens
attcttcaaagtctg

SEQ ID NO: 1543492 - DNA, 15 bp, Homo sapiens
aattcttcaaagtct

SEQ ID NO: 1543493 - DNA, 15 bp, Homo sapiens
caattcttcaaagtc

SEQ ID NO: 1543494 - DNA, 15 bp, Homo sapiens
acaattcttcaaagt

SEQ ID NO: 1543495 - DNA, 15 bp, Homo sapiens
aacaattcttcaaag

SEQ ID NO: 1543496 - DNA, 15 bp, Homo sapiens
aaacaattcttcaaa

SEQ ID NO: 1543497 - DNA, 15 bp, Homo sapiens
aaaacaattcttcaa

SEQ ID NO: 1543498 - DNA, 15 bp, Homo sapiens
taaaacaattcttca

SEQ ID NO: 1543499 - DNA, 15 bp, Homo sapiens
ataaaacaattcttc

SEQ ID NO: 1543500 - DNA, 15 bp, Homo sapiens
tataaaacaattctt

SEQ ID NO: 1543501 - DNA, 15 bp, Homo sapiens
atataaaacaattct

SEQ ID NO: 1543502 - DNA, 15 bp, Homo sapiens
aatataaaacaattc

SEQ ID NO: 1543503 - DNA, 15 bp, Homo sapiens
taatataaaacaatt

SEQ ID NO: 1543504 - DNA, 15 bp, Homo sapiens
ataatataaaacaat

SEQ ID NO: 1543505 - DNA, 15 bp, Homo sapiens
aataatataaaacaa

SEQ ID NO: 1543506 - DNA, 15 bp, Homo sapiens
gaataatataaaaca

SEQ ID NO: 1543507 - DNA, 15 bp, Homo sapiens
agaataatataaaac

SEQ ID NO: 1543508 - DNA, 15 bp, Homo sapiens
gagaataatataaaa

SEQ ID NO: 1543509 - DNA, 15 bp, Homo sapiens
agagaataatataaa

SEQ ID NO: 1543510 - DNA, 15 bp, Homo sapiens
gagagaataatataa

SEQ ID NO: 1543511 - DNA, 15 bp, Homo sapiens
agagagaataatata

SEQ ID NO: 1543512 - DNA, 15 bp, Homo sapiens
tagagagaataatat

SEQ ID NO: 1543513 - DNA, 15 bp, Homo sapiens
ctagagagaataata

SEQ ID NO: 1543514 - DNA, 15 bp, Homo sapiens
tctagagagaataat

SEQ ID NO: 1543515 - DNA, 15 bp, Homo sapiens
ttctagagagaataa

SEQ ID NO: 1543516 - DNA, 15 bp, Homo sapiens
tttctagagagaata

SEQ ID NO: 1543517 - DNA, 15 bp, Homo sapiens
ttttctagagagaat

SEQ ID NO: 1543518 - DNA, 15 bp, Homo sapiens
attttctagagagaa

SEQ ID NO: 1543519 - DNA, 15 bp, Homo sapiens
cattttctagagaga

SEQ ID NO: 1543520 - DNA, 15 bp, Homo sapiens
tcattttctagagag

SEQ ID NO: 1543521 - DNA, 15 bp, Homo sapiens
ttcattttctagaga

SEQ ID NO: 1543522 - DNA, 15 bp, Homo sapiens
attcattttctagag

SEQ ID NO: 1543523 - DNA, 15 bp, Homo sapiens
gattcattttctaga

SEQ ID NO: 1543524 - DNA, 15 bp, Homo sapiens
tgattcattttctag

SEQ ID NO: 1543525 - DNA, 15 bp, Homo sapiens
atgattcattttcta

SEQ ID NO: 1543526 - DNA, 15 bp, Homo sapiens
tatgattcattttct

SEQ ID NO: 1543527 - DNA, 15 bp, Homo sapiens
ttatgattcattttc

SEQ ID NO: 1543528 - DNA, 15 bp, Homo sapiens
tttatgattcatttt

SEQ ID NO: 1543529 - DNA, 15 bp, Homo sapiens
ttttatgattcattt

SEQ ID NO: 1543530 - DNA, 15 bp, Homo sapiens
attttatgattcatt

SEQ ID NO: 1543531 - DNA, 15 bp, Homo sapiens
tattttatgattcat

SEQ ID NO: 1543532 - DNA, 15 bp, Homo sapiens
ttattttatgattca

SEQ ID NO: 1543533 - DNA, 15 bp, Homo sapiens
tttattttatgattc

SEQ ID NO: 1543534 - DNA, 15 bp, Homo sapiens
atcaattttatttta

SEQ ID NO: 1543535 - DNA, 15 bp, Homo sapiens
aatcaattttatttt

SEQ ID NO: 1543536 - DNA, 15 bp, Homo sapiens
taatcaattttattt

SEQ ID NO: 1543537 - DNA, 15 bp, Homo sapiens
ctaatcaattttatt

SEQ ID NO: 1543538 - DNA, 15 bp, Homo sapiens
actaatcaattttat

SEQ ID NO: 1543539 - DNA, 15 bp, Homo sapiens
cactaatcaatttta

SEQ ID NO: 1543540 - DNA, 15 bp, Homo sapiens
ccactaatcaatttt

SEQ ID NO: 1543541 - DNA, 15 bp, Homo sapiens
gccactaatcaattt

SEQ ID NO: 1543542 - DNA, 15 bp, Homo sapiens
tgccactaatcaatt

SEQ ID NO: 1543543 - DNA, 15 bp, Homo sapiens
atgccactaatcaat

SEQ ID NO: 1543544 - DNA, 15 bp, Homo sapiens
gatgccactaatcaa

SEQ ID NO: 1543545 - DNA, 15 bp, Homo sapiens
agatgccactaatca

SEQ ID NO: 1543546 - DNA, 15 bp, Homo sapiens
cagatgccactaatc

SEQ ID NO: 1543547 - DNA, 15 bp, Homo sapiens
acagatgccactaat

SEQ ID NO: 1543548 - DNA, 15 bp, Homo sapiens
tacagatgccactaa

SEQ ID NO: 1543549 - DNA, 15 bp, Homo sapiens
atacagatgccacta

SEQ ID NO: 1543550 - DNA, 15 bp, Homo sapiens
tatacagatgccact

SEQ ID NO: 1543551 - DNA, 15 bp, Homo sapiens
atatacagatgccac

SEQ ID NO: 1543552 - DNA, 15 bp, Homo sapiens
aatatacagatgcca

SEQ ID NO: 1543553 - DNA, 15 bp, Homo sapiens
aaatatacagatgcc

SEQ ID NO: 1543554 - DNA, 15 bp, Homo sapiens
taaatatacagatgc

SEQ ID NO: 1543555 - DNA, 15 bp, Homo sapiens
ataaatatacagatg

SEQ ID NO: 1543556 - DNA, 15 bp, Homo sapiens
aataaatatacagat

SEQ ID NO: 1543557 - DNA, 15 bp, Homo sapiens
aaataaatatacaga

SEQ ID NO: 1543558 - DNA, 15 bp, Homo sapiens
aaaataaatatacag

SEQ ID NO: 1543559 - DNA, 15 bp, Homo sapiens
taaaataaatataca

SEQ ID NO: 1543560 - DNA, 15 bp, Homo sapiens
ttaaaataaatatac

SEQ ID NO: 1543561 - DNA, 15 bp, Homo sapiens
tttaaaataaatata

SEQ ID NO: 1543562 - DNA, 15 bp, Homo sapiens
gtttaaaataaatat

SEQ ID NO: 1543563 - DNA, 15 bp, Homo sapiens
tgtttaaaataaata

SEQ ID NO: 1543564 - DNA, 15 bp, Homo sapiens
gtgtttaaaataaat

SEQ ID NO: 1543565 - DNA, 15 bp, Homo sapiens
agtgtttaaaataaa

SEQ ID NO: 1543566 - DNA, 15 bp, Homo sapiens
cagtgtttaaaataa

SEQ ID NO: 1543567 - DNA, 15 bp, Homo sapiens
gcagtgtttaaaata

SEQ ID NO: 1543568 - DNA, 15 bp, Homo sapiens
agcagtgtttaaaat

SEQ ID NO: 1543569 - DNA, 15 bp, Homo sapiens
tagcagtgtttaaaa

SEQ ID NO: 1543570 - DNA, 15 bp, Homo sapiens
ttagcagtgtttaaa

SEQ ID NO: 1543571 - DNA, 15 bp, Homo sapiens
attagcagtgtttaa

SEQ ID NO: 1543572 - DNA, 15 bp, Homo sapiens
tattagcagtgttta

SEQ ID NO: 1543573 - DNA, 15 bp, Homo sapiens
ttattagcagtgttt

SEQ ID NO: 1543574 - DNA, 15 bp, Homo sapiens
attattagcagtgtt

SEQ ID NO: 1543575 - DNA, 15 bp, Homo sapiens
gattattagcagtgt

SEQ ID NO: 1543576 - DNA, 15 bp, Homo sapiens
agattattagcagtg

SEQ ID NO: 1543577 - DNA, 15 bp, Homo sapiens
aagattattagcagt

SEQ ID NO: 1543578 - DNA, 15 bp, Homo sapiens
aaagattattagcag

SEQ ID NO: 1543579 - DNA, 15 bp, Homo sapiens
caaagattattagca

SEQ ID NO: 1543580 - DNA, 15 bp, Homo sapiens
acaaagattattagc

SEQ ID NO: 1543581 - DNA, 15 bp, Homo sapiens
gacaaagattattag

SEQ ID NO: 1543582 - DNA, 15 bp, Homo sapiens
agacaaagattatta

SEQ ID NO: 1543583 - DNA, 15 bp, Homo sapiens
aagacaaagattatt

SEQ ID NO: 1543584 - DNA, 15 bp, Homo sapiens
aaagacaaagattat

SEQ ID NO: 1543585 - DNA, 15 bp, Homo sapiens
aaaagacaaagatta

SEQ ID NO: 1543586 - DNA, 15 bp, Homo sapiens
aaaaagacaaagatt

SEQ ID NO: 1543587 - DNA, 15 bp, Homo sapiens
aaaaaagacaaagat

SEQ ID NO: 1543588 - DNA, 15 bp, Homo sapiens
caaaaaagacaaaga

SEQ ID NO: 1543589 - DNA, 15 bp, Homo sapiens
acaaaaaagacaaag

SEQ ID NO: 1543590 - DNA, 15 bp, Homo sapiens
gacaaaaaagacaaa

SEQ ID NO: 1543591 - DNA, 15 bp, Homo sapiens
tgacaaaaaagacaa

SEQ ID NO: 1543592 - DNA, 15 bp, Homo sapiens
atgacaaaaaagaca

SEQ ID NO: 1543593 - DNA, 15 bp, Homo sapiens
aatgacaaaaaagac

SEQ ID NO: 1543594 - DNA, 15 bp, Homo sapiens
aaatgacaaaaaaga

SEQ ID NO: 1543595 - DNA, 15 bp, Homo sapiens
aaaatgacaaaaaag

SEQ ID NO: 1543596 - DNA, 15 bp, Homo sapiens
gaaaatgacaaaaaa

SEQ ID NO: 1543597 - DNA, 15 bp, Homo sapiens
ggaaaatgacaaaaa

SEQ ID NO: 1543598 - DNA, 15 bp, Homo sapiens
aggaaaatgacaaaa

SEQ ID NO: 1543599 - DNA, 15 bp, Homo sapiens
aaggaaaatgacaaa

SEQ ID NO: 1543600 - DNA, 15 bp, Homo sapiens
taaggaaaatgacaa

SEQ ID NO: 1543601 - DNA, 15 bp, Homo sapiens
ctaaggaaaatgaca

SEQ ID NO: 1543602 - DNA, 15 bp, Homo sapiens
cctaaggaaaatgac

SEQ ID NO: 1543603 - DNA, 15 bp, Homo sapiens
acctaaggaaaatga

SEQ ID NO: 1543604 - DNA, 15 bp, Homo sapiens
aacctaaggaaaatg

SEQ ID NO: 1543605 - DNA, 15 bp, Homo sapiens
gaacctaaggaaaat

SEQ ID NO: 1543606 - DNA, 15 bp, Homo sapiens
tgaacctaaggaaaa

SEQ ID NO: 1543607 - DNA, 15 bp, Homo sapiens
ttgaacctaaggaaa

SEQ ID NO: 1543608 - DNA, 15 bp, Homo sapiens
tttgaacctaaggaa

SEQ ID NO: 1543609 - DNA, 15 bp, Homo sapiens
ttttgaacctaagga

SEQ ID NO: 1543610 - DNA, 15 bp, Homo sapiens
gttttgaacctaagg

SEQ ID NO: 1543611 - DNA, 15 bp, Homo sapiens
agttttgaacctaag

SEQ ID NO: 1543612 - DNA, 15 bp, Homo sapiens
cagttttgaacctaa

SEQ ID NO: 1543613 - DNA, 15 bp, Homo sapiens
ccagttttgaaccta

SEQ ID NO: 1543614 - DNA, 15 bp, Homo sapiens
accagttttgaacct

SEQ ID NO: 1543615 - DNA, 15 bp, Homo sapiens
gaccagttttgaacc

SEQ ID NO: 1543616 - DNA, 15 bp, Homo sapiens
tgaccagttttgaac

SEQ ID NO: 1543617 - DNA, 15 bp, Homo sapiens
ttgaccagttttgaa

SEQ ID NO: 1543618 - DNA, 15 bp, Homo sapiens
tttgaccagttttga

SEQ ID NO: 1543619 - DNA, 15 bp, Homo sapiens
atttgaccagttttg

SEQ ID NO: 1543620 - DNA, 15 bp, Homo sapiens
gatttgaccagtttt

SEQ ID NO: 1543621 - DNA, 15 bp, Homo sapiens
tgatttgaccagttt

SEQ ID NO: 1543622 - DNA, 15 bp, Homo sapiens
ttgatttgaccagtt

SEQ ID NO: 1543623 - DNA, 15 bp, Homo sapiens
attgatttgaccagt

SEQ ID NO: 1543624 - DNA, 15 bp, Homo sapiens
cattgatttgaccag

SEQ ID NO: 1543625 - DNA, 15 bp, Homo sapiens
ccattgatttgacca

SEQ ID NO: 1543626 - DNA, 15 bp, Homo sapiens
accattgatttgacc

SEQ ID NO: 1543627 - DNA, 15 bp, Homo sapiens
caccattgatttgac

SEQ ID NO: 1543628 - DNA, 15 bp, Homo sapiens
tcaccattgatttga

SEQ ID NO: 1543629 - DNA, 15 bp, Homo sapiens
atcaccattgatttg

SEQ ID NO: 1543630 - DNA, 15 bp, Homo sapiens
aatcaccattgattt

SEQ ID NO: 1543631 - DNA, 15 bp, Homo sapiens
aaatcaccattgatt

SEQ ID NO: 1543632 - DNA, 15 bp, Homo sapiens
caaatcaccattgat

SEQ ID NO: 1543633 - DNA, 15 bp, Homo sapiens
gcaaatcaccattga

SEQ ID NO: 1543634 - DNA, 15 bp, Homo sapiens
agcaaatcaccattg

SEQ ID NO: 1543635 - DNA, 15 bp, Homo sapiens
cagcaaatcaccatt

SEQ ID NO: 1543636 - DNA, 15 bp, Homo sapiens
tcagcaaatcaccat

SEQ ID NO: 1543637 - DNA, 15 bp, Homo sapiens
atcagcaaatcacca

SEQ ID NO: 1543638 - DNA, 15 bp, Homo sapiens
tatcagcaaatcacc

SEQ ID NO: 1543639 - DNA, 15 bp, Homo sapiens
atatcagcaaatcac

SEQ ID NO: 1543640 - DNA, 15 bp, Homo sapiens
tatatcagcaaatca

SEQ ID NO: 1543641 - DNA, 15 bp, Homo sapiens
gtatatcagcaaatc

SEQ ID NO: 1543642 - DNA, 15 bp, Homo sapiens
ggtatatcagcaaat

SEQ ID NO: 1543643 - DNA, 15 bp, Homo sapiens
tggtatatcagcaaa

SEQ ID NO: 1543644 - DNA, 15 bp, Homo sapiens
atggtatatcagcaa

SEQ ID NO: 1543645 - DNA, 15 bp, Homo sapiens
catggtatatcagca

SEQ ID NO: 1543646 - DNA, 15 bp, Homo sapiens
acatggtatatcagc

SEQ ID NO: 1543647 - DNA, 15 bp, Homo sapiens
gacatggtatatcag

SEQ ID NO: 1543648 - DNA, 15 bp, Homo sapiens
agacatggtatatca

SEQ ID NO: 1543649 - DNA, 15 bp, Homo sapiens
aagacatggtatatc

SEQ ID NO: 1543650 - DNA, 15 bp, Homo sapiens
taagacatggtatat

SEQ ID NO: 1543651 - DNA, 15 bp, Homo sapiens
gtaagacatggtata

SEQ ID NO: 1543652 - DNA, 15 bp, Homo sapiens
agtaagacatggtat

SEQ ID NO: 1543653 - DNA, 15 bp, Homo sapiens
cagtaagacatggta

SEQ ID NO: 1543654 - DNA, 15 bp, Homo sapiens
tcagtaagacatggt

SEQ ID NO: 1543655 - DNA, 15 bp, Homo sapiens
gtcagtaagacatgg

SEQ ID NO: 1543656 - DNA, 15 bp, Homo sapiens
agtcagtaagacatg

SEQ ID NO: 1543657 - DNA, 15 bp, Homo sapiens
aagtcagtaagacat

SEQ ID NO: 1543658 - DNA, 15 bp, Homo sapiens
aaagtcagtaagaca

SEQ ID NO: 1543659 - DNA, 15 bp, Homo sapiens
taaagtcagtaagac

SEQ ID NO: 1543660 - DNA, 15 bp, Homo sapiens
ttaaagtcagtaaga

SEQ ID NO: 1543661 - DNA, 15 bp, Homo sapiens
tttaaagtcagtaag

SEQ ID NO: 1543662 - DNA, 15 bp, Homo sapiens
ctttaaagtcagtaa

SEQ ID NO: 1543663 - DNA, 15 bp, Homo sapiens
gctttaaagtcagta

SEQ ID NO: 1543664 - DNA, 15 bp, Homo sapiens
ggctttaaagtcagt

SEQ ID NO: 1543665 - DNA, 15 bp, Homo sapiens
tggctttaaagtcag

SEQ ID NO: 1543666 - DNA, 15 bp, Homo sapiens
atggctttaaagtca

SEQ ID NO: 1543667 - DNA, 15 bp, Homo sapiens
tatggctttaaagtc

SEQ ID NO: 1543668 - DNA, 15 bp, Homo sapiens
atatggctttaaagt

SEQ ID NO: 1543669 - DNA, 15 bp, Homo sapiens
aatatggctttaaag

SEQ ID NO: 1543670 - DNA, 15 bp, Homo sapiens
taatatggctttaaa

SEQ ID NO: 1543671 - DNA, 15 bp, Homo sapiens
ataatatggctttaa

SEQ ID NO: 1543672 - DNA, 15 bp, Homo sapiens
cataatatggcttta

SEQ ID NO: 1543673 - DNA, 15 bp, Homo sapiens
gcataatatggcttt

SEQ ID NO: 1543674 - DNA, 15 bp, Homo sapiens
tgcataatatggctt

SEQ ID NO: 1543675 - DNA, 15 bp, Homo sapiens
ttgcataatatggct

SEQ ID NO: 1543676 - DNA, 15 bp, Homo sapiens
tttgcataatatggc

SEQ ID NO: 1543677 - DNA, 15 bp, Homo sapiens
ctttgcataatatgg

SEQ ID NO: 1543678 - DNA, 15 bp, Homo sapiens
gctttgcataatatg

SEQ ID NO: 1543679 - DNA, 15 bp, Homo sapiens
ggctttgcataatat

SEQ ID NO: 1543680 - DNA, 15 bp, Homo sapiens
tggctttgcataata

SEQ ID NO: 1543681 - DNA, 15 bp, Homo sapiens
atggctttgcataat

SEQ ID NO: 1543682 - DNA, 15 bp, Homo sapiens
tatggctttgcataa

SEQ ID NO: 1543683 - DNA, 15 bp, Homo sapiens
atatggctttgcata

SEQ ID NO: 1543684 - DNA, 15 bp, Homo sapiens
catatggctttgcat

SEQ ID NO: 1543685 - DNA, 15 bp, Homo sapiens
tcatatggctttgca

SEQ ID NO: 1543686 - DNA, 15 bp, Homo sapiens
ttcatatggctttgc

SEQ ID NO: 1543687 - DNA, 15 bp, Homo sapiens
tttcatatggctttg

SEQ ID NO: 1543688 - DNA, 15 bp, Homo sapiens
atttcatatggcttt

SEQ ID NO: 1543689 - DNA, 15 bp, Homo sapiens
aatttcatatggctt

SEQ ID NO: 1543690 - DNA, 15 bp, Homo sapiens
caatttcatatggct

SEQ ID NO: 1543691 - DNA, 15 bp, Homo sapiens
acaatttcatatggc

SEQ ID NO: 1543692 - DNA, 15 bp, Homo sapiens
tacaatttcatatgg

SEQ ID NO: 1543693 - DNA, 15 bp, Homo sapiens
ctacaatttcatatg

SEQ ID NO: 1543694 - DNA, 15 bp, Homo sapiens
actacaatttcatat

SEQ ID NO: 1543695 - DNA, 15 bp, Homo sapiens
cactacaatttcata

SEQ ID NO: 1543696 - DNA, 15 bp, Homo sapiens
ccactacaatttcat

SEQ ID NO: 1543697 - DNA, 15 bp, Homo sapiens
tccactacaatttca

SEQ ID NO: 1543698 - DNA, 15 bp, Homo sapiens
gtccactacaatttc

SEQ ID NO: 1543699 - DNA, 15 bp, Homo sapiens
ggtccactacaattt

SEQ ID NO: 1543700 - DNA, 15 bp, Homo sapiens
aggtccactacaatt

SEQ ID NO: 1543701 - DNA, 15 bp, Homo sapiens
aaggtccactacaat

SEQ ID NO: 1543702 - DNA, 15 bp, Homo sapiens
taaggtccactacaa

SEQ ID NO: 1543703 - DNA, 15 bp, Homo sapiens
gtaaggtccactaca

SEQ ID NO: 1543704 - DNA, 15 bp, Homo sapiens
ggtaaggtccactac

SEQ ID NO: 1543705 - DNA, 15 bp, Homo sapiens
gggtaaggtccacta

SEQ ID NO: 1543706 - DNA, 15 bp, Homo sapiens
tgggtaaggtccact

SEQ ID NO: 1543707 - DNA, 15 bp, Homo sapiens
atgggtaaggtccac

SEQ ID NO: 1543708 - DNA, 15 bp, Homo sapiens
tatgggtaaggtcca

SEQ ID NO: 1543709 - DNA, 15 bp, Homo sapiens
gtatgggtaaggtcc

SEQ ID NO: 1543710 - DNA, 15 bp, Homo sapiens
ggtatgggtaaggtc

SEQ ID NO: 1543711 - DNA, 15 bp, Homo sapiens
cggtatgggtaaggt

SEQ ID NO: 1543712 - DNA, 15 bp, Homo sapiens
ccggtatgggtaagg

SEQ ID NO: 1543713 - DNA, 15 bp, Homo sapiens
cccggtatgggtaag

SEQ ID NO: 1543714 - DNA, 15 bp, Homo sapiens
gcccggtatgggtaa

SEQ ID NO: 1543715 - DNA, 15 bp, Homo sapiens
ggcccggtatgggta

SEQ ID NO: 1543716 - DNA, 15 bp, Homo sapiens
aggcccggtatgggt

SEQ ID NO: 1543717 - DNA, 15 bp, Homo sapiens
taggcccggtatggg

SEQ ID NO: 1543718 - DNA, 15 bp, Homo sapiens
ctaggcccggtatgg

SEQ ID NO: 1543719 - DNA, 15 bp, Homo sapiens
gctaggcccggtatg

SEQ ID NO: 1543720 - DNA, 15 bp, Homo sapiens
tgctaggcccggtat

SEQ ID NO: 1543721 - DNA, 15 bp, Homo sapiens
ttgctaggcccggta

SEQ ID NO: 1543722 - DNA, 15 bp, Homo sapiens
attgctaggcccggt

SEQ ID NO: 1543723 - DNA, 15 bp, Homo sapiens
gattgctaggcccgg

SEQ ID NO: 1543724 - DNA, 15 bp, Homo sapiens
cgattgctaggcccg

SEQ ID NO: 1543725 - DNA, 15 bp, Homo sapiens
gcgattgctaggccc

SEQ ID NO: 1543726 - DNA, 15 bp, Homo sapiens
agcgattgctaggcc

SEQ ID NO: 1543727 - DNA, 15 bp, Homo sapiens
aagcgattgctaggc

SEQ ID NO: 1543728 - DNA, 15 bp, Homo sapiens
aaagcgattgctagg

SEQ ID NO: 1543729 - DNA, 15 bp, Homo sapiens
taaagcgattgctag

SEQ ID NO: 1543730 - DNA, 15 bp, Homo sapiens
ttaaagcgattgcta

SEQ ID NO: 1543731 - DNA, 15 bp, Homo sapiens
tttaaagcgattgct

SEQ ID NO: 1543732 - DNA, 15 bp, Homo sapiens
ttttaaagcgattgc

SEQ ID NO: 1543733 - DNA, 15 bp, Homo sapiens
gttttaaagcgattg

SEQ ID NO: 1543734 - DNA, 15 bp, Homo sapiens
tgttttaaagcgatt

SEQ ID NO: 1543735 - DNA, 15 bp, Homo sapiens
ctgttttaaagcgat

SEQ ID NO: 1543736 - DNA, 15 bp, Homo sapiens
tctgttttaaagcga

SEQ ID NO: 1543737 - DNA, 15 bp, Homo sapiens
gtctgttttaaagcg

SEQ ID NO: 1543738 - DNA, 15 bp, Homo sapiens
agtctgttttaaagc

SEQ ID NO: 1543739 - DNA, 15 bp, Homo sapiens
aagtctgttttaaag

SEQ ID NO: 1543740 - DNA, 15 bp, Homo sapiens
aaagtctgttttaaa

SEQ ID NO: 1543741 - DNA, 15 bp, Homo sapiens
gaaagtctgttttaa

SEQ ID NO: 1543742 - DNA, 15 bp, Homo sapiens
agaaagtctgtttta

SEQ ID NO: 1543743 - DNA, 15 bp, Homo sapiens
gagaaagtctgtttt

SEQ ID NO: 1543744 - DNA, 15 bp, Homo sapiens
agagaaagtctgttt

SEQ ID NO: 1543745 - DNA, 15 bp, Homo sapiens
gagagaaagtctgtt

SEQ ID NO: 1543746 - DNA, 15 bp, Homo sapiens
agagagaaagtctgt

SEQ ID NO: 1543747 - DNA, 15 bp, Homo sapiens
tagagagaaagtctg

SEQ ID NO: 1543748 - DNA, 15 bp, Homo sapiens
ttagagagaaagtct

SEQ ID NO: 1543749 - DNA, 15 bp, Homo sapiens
cttagagagaaagtc

SEQ ID NO: 1543750 - DNA, 15 bp, Homo sapiens
acttagagagaaagt

SEQ ID NO: 1543751 - DNA, 15 bp, Homo sapiens
cacttagagagaaag

SEQ ID NO: 1543752 - DNA, 15 bp, Homo sapiens
ccacttagagagaaa

SEQ ID NO: 1543753 - DNA, 15 bp, Homo sapiens
accacttagagagaa

SEQ ID NO: 1543754 - DNA, 15 bp, Homo sapiens
aaccacttagagaga

SEQ ID NO: 1543755 - DNA, 15 bp, Homo sapiens
aaaccacttagagag

SEQ ID NO: 1543756 - DNA, 15 bp, Homo sapiens
caaaccacttagaga

SEQ ID NO: 1543757 - DNA, 15 bp, Homo sapiens
acaaaccacttagag

SEQ ID NO: 1543758 - DNA, 15 bp, Homo sapiens
aacaaaccacttaga

SEQ ID NO: 1543759 - DNA, 15 bp, Homo sapiens
caacaaaccacttag

SEQ ID NO: 1543760 - DNA, 15 bp, Homo sapiens
acaacaaaccactta

SEQ ID NO: 1543761 - DNA, 15 bp, Homo sapiens
aacaacaaaccactt

SEQ ID NO: 1543762 - DNA, 15 bp, Homo sapiens
aaacaacaaaccact

SEQ ID NO: 1543763 - DNA, 15 bp, Homo sapiens
aaaacaacaaaccac

SEQ ID NO: 1543764 - DNA, 15 bp, Homo sapiens
aaaaacaacaaacca

SEQ ID NO: 1543765 - DNA, 15 bp, Homo sapiens
gaaaaacaacaaacc

SEQ ID NO: 1543766 - DNA, 15 bp, Homo sapiens
ggaaaaacaacaaac

SEQ ID NO: 1543767 - DNA, 15 bp, Homo sapiens
aggaaaaacaacaaa

SEQ ID NO: 1543768 - DNA, 15 bp, Homo sapiens
caggaaaaacaacaa

SEQ ID NO: 1543769 - DNA, 15 bp, Homo sapiens
ccaggaaaaacaaca

SEQ ID NO: 1543770 - DNA, 15 bp, Homo sapiens
gccaggaaaaacaac

SEQ ID NO: 1543771 - DNA, 15 bp, Homo sapiens
agccaggaaaaacaa

SEQ ID NO: 1543772 - DNA, 15 bp, Homo sapiens
aagccaggaaaaaca

SEQ ID NO: 1543773 - DNA, 15 bp, Homo sapiens
aaagccaggaaaaac

SEQ ID NO: 1543774 - DNA, 15 bp, Homo sapiens
caaagccaggaaaaa

SEQ ID NO: 1543775 - DNA, 15 bp, Homo sapiens
gcaaagccaggaaaa

SEQ ID NO: 1543776 - DNA, 15 bp, Homo sapiens
agcaaagccaggaaa

SEQ ID NO: 1543777 - DNA, 15 bp, Homo sapiens
aagcaaagccaggaa

SEQ ID NO: 1543778 - DNA, 15 bp, Homo sapiens
taagcaaagccagga

SEQ ID NO: 1543779 - DNA, 15 bp, Homo sapiens
gtaagcaaagccagg

SEQ ID NO: 1543780 - DNA, 15 bp, Homo sapiens
cgtaagcaaagccag

SEQ ID NO: 1543781 - DNA, 15 bp, Homo sapiens
tcgtaagcaaagcca

SEQ ID NO: 1543782 - DNA, 15 bp, Homo sapiens
gtcgtaagcaaagcc

SEQ ID NO: 1543783 - DNA, 15 bp, Homo sapiens
tgtcgtaagcaaagc

SEQ ID NO: 1543784 - DNA, 15 bp, Homo sapiens
ttgtcgtaagcaaag

SEQ ID NO: 1543785 - DNA, 15 bp, Homo sapiens
gttgtcgtaagcaaa

SEQ ID NO: 1543786 - DNA, 15 bp, Homo sapiens
cgttgtcgtaagcaa

SEQ ID NO: 1543787 - DNA, 15 bp, Homo sapiens
acgttgtcgtaagca

SEQ ID NO: 1543788 - DNA, 15 bp, Homo sapiens
gacgttgtcgtaagc

SEQ ID NO: 1543789 - DNA, 15 bp, Homo sapiens
agacgttgtcgtaag

SEQ ID NO: 1543790 - DNA, 15 bp, Homo sapiens
gagacgttgtcgtaa

SEQ ID NO: 1543791 - DNA, 15 bp, Homo sapiens
ggagacgttgtcgta

SEQ ID NO: 1543792 - DNA, 15 bp, Homo sapiens
cggagacgttgtcgt

SEQ ID NO: 1543793 - DNA, 15 bp, Homo sapiens
gcggagacgttgtcg

SEQ ID NO: 1543794 - DNA, 15 bp, Homo sapiens
tgcggagacgttgtc

SEQ ID NO: 1543795 - DNA, 15 bp, Homo sapiens
ctgcggagacgttgt

SEQ ID NO: 1543796 - DNA, 15 bp, Homo sapiens
actgcggagacgttg

SEQ ID NO: 1543797 - DNA, 15 bp, Homo sapiens
gactgcggagacgtt

SEQ ID NO: 1543798 - DNA, 15 bp, Homo sapiens
agactgcggagacgt

SEQ ID NO: 1543799 - DNA, 15 bp, Homo sapiens
tagactgcggagacg

SEQ ID NO: 1543800 - DNA, 15 bp, Homo sapiens
atagactgcggagac

SEQ ID NO: 1543801 - DNA, 15 bp, Homo sapiens
tatagactgcggaga

SEQ ID NO: 1543802 - DNA, 15 bp, Homo sapiens
atatagactgcggag

SEQ ID NO: 1543803 - DNA, 15 bp, Homo sapiens
gatatagactgcgga

SEQ ID NO: 1543804 - DNA, 15 bp, Homo sapiens
agatatagactgcgg

SEQ ID NO: 1543805 - DNA, 15 bp, Homo sapiens
tagatatagactgcg

SEQ ID NO: 1543806 - DNA, 15 bp, Homo sapiens
atagatatagactgc

SEQ ID NO: 1543807 - DNA, 15 bp, Homo sapiens
tatagatatagactg

SEQ ID NO: 1543808 - DNA, 15 bp, Homo sapiens
ttatagatatagact

SEQ ID NO: 1543809 - DNA, 15 bp, Homo sapiens
gttatagatatagac

SEQ ID NO: 1543810 - DNA, 15 bp, Homo sapiens
agttatagatataga

SEQ ID NO: 1543811 - DNA, 15 bp, Homo sapiens
cagttatagatatag

SEQ ID NO: 1543812 - DNA, 15 bp, Homo sapiens
acagttatagatata

SEQ ID NO: 1543813 - DNA, 15 bp, Homo sapiens
tacagttatagatat

SEQ ID NO: 1543814 - DNA, 15 bp, Homo sapiens
ttacagttatagata

SEQ ID NO: 1543815 - DNA, 15 bp, Homo sapiens
gttacagttatagat

SEQ ID NO: 1543816 - DNA, 15 bp, Homo sapiens
agttacagttataga

SEQ ID NO: 1543817 - DNA, 15 bp, Homo sapiens
gagttacagttatag

SEQ ID NO: 1543818 - DNA, 15 bp, Homo sapiens
ggagttacagttata

SEQ ID NO: 1543819 - DNA, 15 bp, Homo sapiens
aggagttacagttat

SEQ ID NO: 1543820 - DNA, 15 bp, Homo sapiens
caggagttacagtta

SEQ ID NO: 1543821 - DNA, 15 bp, Homo sapiens
ccaggagttacagtt

SEQ ID NO: 1543822 - DNA, 15 bp, Homo sapiens
cccaggagttacagt

SEQ ID NO: 1543823 - DNA, 15 bp, Homo sapiens
acccaggagttacag

SEQ ID NO: 1543824 - DNA, 15 bp, Homo sapiens
gacccaggagttaca

SEQ ID NO: 1543825 - DNA, 15 bp, Homo sapiens
tgacccaggagttac

SEQ ID NO: 1543826 - DNA, 15 bp, Homo sapiens
ctgacccaggagtta

SEQ ID NO: 1543827 - DNA, 15 bp, Homo sapiens
cctgacccaggagtt

SEQ ID NO: 1543828 - DNA, 15 bp, Homo sapiens
ccctgacccaggagt

SEQ ID NO: 1543829 - DNA, 15 bp, Homo sapiens
tccctgacccaggag

SEQ ID NO: 1543830 - DNA, 15 bp, Homo sapiens
ctccctgacccagga

SEQ ID NO: 1543831 - DNA, 15 bp, Homo sapiens
actccctgacccagg

SEQ ID NO: 1543832 - DNA, 15 bp, Homo sapiens
tactccctgacccag

SEQ ID NO: 1543833 - DNA, 15 bp, Homo sapiens
gtactccctgaccca

SEQ ID NO: 1543834 - DNA, 15 bp, Homo sapiens
tgtactccctgaccc

SEQ ID NO: 1543835 - DNA, 15 bp, Homo sapiens
gtgtactccctgacc

SEQ ID NO: 1543836 - DNA, 15 bp, Homo sapiens
ggtgtactccctgac

SEQ ID NO: 1543837 - DNA, 15 bp, Homo sapiens
tggtgtactccctga

SEQ ID NO: 1543838 - DNA, 15 bp, Homo sapiens
ttggtgtactccctg

SEQ ID NO: 1543839 - DNA, 15 bp, Homo sapiens
cttggtgtactccct

SEQ ID NO: 1543840 - DNA, 15 bp, Homo sapiens
acttggtgtactccc

SEQ ID NO: 1543841 - DNA, 15 bp, Homo sapiens
tacttggtgtactcc

SEQ ID NO: 1543842 - DNA, 15 bp, Homo sapiens
atacttggtgtactc

SEQ ID NO: 1543843 - DNA, 15 bp, Homo sapiens
gatacttggtgtact

SEQ ID NO: 1543844 - DNA, 15 bp, Homo sapiens
tgatacttggtgtac

SEQ ID NO: 1543845 - DNA, 15 bp, Homo sapiens
atgatacttggtgta

SEQ ID NO: 1543846 - DNA, 15 bp, Homo sapiens
catgatacttggtgt

SEQ ID NO: 1543847 - DNA, 15 bp, Homo sapiens
tcatgatacttggtg

SEQ ID NO: 1543848 - DNA, 15 bp, Homo sapiens
ctcatgatacttggt

SEQ ID NO: 1543849 - DNA, 15 bp, Homo sapiens
gctcatgatacttgg

SEQ ID NO: 1543850 - DNA, 15 bp, Homo sapiens
cgctcatgatacttg

SEQ ID NO: 1543851 - DNA, 15 bp, Homo sapiens
ccgctcatgatactt

SEQ ID NO: 1543852 - DNA, 15 bp, Homo sapiens
gccgctcatgatact

SEQ ID NO: 1543853 - DNA, 15 bp, Homo sapiens
agccgctcatgatac

SEQ ID NO: 1543854 - DNA, 15 bp, Homo sapiens
cagccgctcatgata

SEQ ID NO: 1543855 - DNA, 15 bp, Homo sapiens
gcagccgctcatgat

SEQ ID NO: 1543856 - DNA, 15 bp, Homo sapiens
agcagccgctcatga

SEQ ID NO: 1543857 - DNA, 15 bp, Homo sapiens
cagcagccgctcatg

SEQ ID NO: 1543858 - DNA, 15 bp, Homo sapiens
tcagcagccgctcat

SEQ ID NO: 1543859 - DNA, 15 bp, Homo sapiens
gtcagcagccgctca

SEQ ID NO: 1543860 - DNA, 15 bp, Homo sapiens
agtcagcagccgctc

SEQ ID NO: 1543861 - DNA, 15 bp, Homo sapiens
cagtcagcagccgct

SEQ ID NO: 1543862 - DNA, 15 bp, Homo sapiens
ccagtcagcagccgc

SEQ ID NO: 1543863 - DNA, 15 bp, Homo sapiens
gccagtcagcagccg

SEQ ID NO: 1543864 - DNA, 15 bp, Homo sapiens
ggccagtcagcagcc

SEQ ID NO: 1543865 - DNA, 15 bp, Homo sapiens
aggccagtcagcagc

SEQ ID NO: 1543866 - DNA, 15 bp, Homo sapiens
gaggccagtcagcag

SEQ ID NO: 1543867 - DNA, 15 bp, Homo sapiens
tgaggccagtcagca

SEQ ID NO: 1543868 - DNA, 15 bp, Homo sapiens
ttgaggccagtcagc

SEQ ID NO: 1543869 - DNA, 15 bp, Homo sapiens
tttgaggccagtcag

SEQ ID NO: 1543870 - DNA, 15 bp, Homo sapiens
ctttgaggccagtca

SEQ ID NO: 1543871 - DNA, 15 bp, Homo sapiens
cctttgaggccagtc

SEQ ID NO: 1543872 - DNA, 15 bp, Homo sapiens
acctttgaggccagt

SEQ ID NO: 1543873 - DNA, 15 bp, Homo sapiens
tacctttgaggccag

SEQ ID NO: 1543874 - DNA, 15 bp, Homo sapiens
ctacctttgaggcca

SEQ ID NO: 1543875 - DNA, 15 bp, Homo sapiens
gctacctttgaggcc

SEQ ID NO: 1543876 - DNA, 15 bp, Homo sapiens
tgctacctttgaggc

SEQ ID NO: 1543877 - DNA, 15 bp, Homo sapiens
ttgctacctttgagg

SEQ ID NO: 1543878 - DNA, 15 bp, Homo sapiens
tttgctacctttgag

SEQ ID NO: 1543879 - DNA, 15 bp, Homo sapiens
ttttgctacctttga

SEQ ID NO: 1543880 - DNA, 15 bp, Homo sapiens
cttttgctacctttg

SEQ ID NO: 1543881 - DNA, 15 bp, Homo sapiens
ccttttgctaccttt

SEQ ID NO: 1543882 - DNA, 15 bp, Homo sapiens
gccttttgctacctt

SEQ ID NO: 1543883 - DNA, 15 bp, Homo sapiens
agccttttgctacct

SEQ ID NO: 1543884 - DNA, 15 bp, Homo sapiens
aagccttttgctacc

SEQ ID NO: 1543885 - DNA, 15 bp, Homo sapiens
caagccttttgctac

SEQ ID NO: 1543886 - DNA, 15 bp, Homo sapiens
acaagccttttgcta

SEQ ID NO: 1543887 - DNA, 15 bp, Homo sapiens
aacaagccttttgct

SEQ ID NO: 1543888 - DNA, 15 bp, Homo sapiens
aaacaagccttttgc

SEQ ID NO: 1543889 - DNA, 15 bp, Homo sapiens
aaaacaagccttttg

SEQ ID NO: 1543890 - DNA, 15 bp, Homo sapiens
gaaaacaagcctttt

SEQ ID NO: 1543891 - DNA, 15 bp, Homo sapiens
tgaaaacaagccttt

SEQ ID NO: 1543892 - DNA, 15 bp, Homo sapiens
atgaaaacaagcctt

SEQ ID NO: 1543893 - DNA, 15 bp, Homo sapiens
tatgaaaacaagcct

SEQ ID NO: 1543894 - DNA, 15 bp, Homo sapiens
ctatgaaaacaagcc

SEQ ID NO: 1543895 - DNA, 15 bp, Homo sapiens
tctatgaaaacaagc

SEQ ID NO: 1543896 - DNA, 15 bp, Homo sapiens
gtctatgaaaacaag

SEQ ID NO: 1543897 - DNA, 15 bp, Homo sapiens
agtctatgaaaacaa

SEQ ID NO: 1543898 - DNA, 15 bp, Homo sapiens
cagtctatgaaaaca

SEQ ID NO: 1543899 - DNA, 15 bp, Homo sapiens
acagtctatgaaaac

SEQ ID NO: 1543900 - DNA, 15 bp, Homo sapiens
gacagtctatgaaaa

SEQ ID NO: 1543901 - DNA, 15 bp, Homo sapiens
ggacagtctatgaaa

SEQ ID NO: 1543902 - DNA, 15 bp, Homo sapiens
aggacagtctatgaa

SEQ ID NO: 1543903 - DNA, 15 bp, Homo sapiens
caggacagtctatga

SEQ ID NO: 1543904 - DNA, 15 bp, Homo sapiens
ccaggacagtctatg

SEQ ID NO: 1543905 - DNA, 15 bp, Homo sapiens
cccaggacagtctat

SEQ ID NO: 1543906 - DNA, 15 bp, Homo sapiens
tcccaggacagtcta

SEQ ID NO: 1543907 - DNA, 15 bp, Homo sapiens
ttcccaggacagtct

SEQ ID NO: 1543908 - DNA, 15 bp, Homo sapiens
tttcccaggacagtc

SEQ ID NO: 1543909 - DNA, 15 bp, Homo sapiens
gtttcccaggacagt

SEQ ID NO: 1543910 - DNA, 15 bp, Homo sapiens
agtttcccaggacag

SEQ ID NO: 1543911 - DNA, 15 bp, Homo sapiens
cagtttcccaggaca

SEQ ID NO: 1543912 - DNA, 15 bp, Homo sapiens
ccagtttcccaggac

SEQ ID NO: 1543913 - DNA, 15 bp, Homo sapiens
gccagtttcccagga

SEQ ID NO: 1543914 - DNA, 15 bp, Homo sapiens
agccagtttcccagg

SEQ ID NO: 1543915 - DNA, 15 bp, Homo sapiens
cagccagtttcccag

SEQ ID NO: 1543916 - DNA, 15 bp, Homo sapiens
tcagccagtttccca

SEQ ID NO: 1543917 - DNA, 15 bp, Homo sapiens
ctcagccagtttccc

SEQ ID NO: 1543918 - DNA, 15 bp, Homo sapiens
gctcagccagtttcc

SEQ ID NO: 1543919 - DNA, 15 bp, Homo sapiens
tgctcagccagtttc

SEQ ID NO: 1543920 - DNA, 15 bp, Homo sapiens
gtgctcagccagttt

SEQ ID NO: 1543921 - DNA, 15 bp, Homo sapiens
tgtgctcagccagtt

SEQ ID NO: 1543922 - DNA, 15 bp, Homo sapiens
atgtgctcagccagt

SEQ ID NO: 1543923 - DNA, 15 bp, Homo sapiens
tatgtgctcagccag

SEQ ID NO: 1543924 - DNA, 15 bp, Homo sapiens
ctatgtgctcagcca

SEQ ID NO: 1543925 - DNA, 15 bp, Homo sapiens
tctatgtgctcagcc

SEQ ID NO: 1543926 - DNA, 15 bp, Homo sapiens
ctctatgtgctcagc

SEQ ID NO: 1543927 - DNA, 15 bp, Homo sapiens
gctctatgtgctcag

SEQ ID NO: 1543928 - DNA, 15 bp, Homo sapiens
tgctctatgtgctca

SEQ ID NO: 1543929 - DNA, 15 bp, Homo sapiens
atgctctatgtgctc

SEQ ID NO: 1543930 - DNA, 15 bp, Homo sapiens
catgctctatgtgct

SEQ ID NO: 1543931 - DNA, 15 bp, Homo sapiens
tcatgctctatgtgc

SEQ ID NO: 1543932 - DNA, 15 bp, Homo sapiens
ttcatgctctatgtg

SEQ ID NO: 1543933 - DNA, 15 bp, Homo sapiens
gttcatgctctatgt

SEQ ID NO: 1543934 - DNA, 15 bp, Homo sapiens
tgttcatgctctatg

SEQ ID NO: 1543935 - DNA, 15 bp, Homo sapiens
ttgttcatgctctat

SEQ ID NO: 1543936 - DNA, 15 bp, Homo sapiens
gttgttcatgctcta

SEQ ID NO: 1543937 - DNA, 15 bp, Homo sapiens
tgttgttcatgctct

SEQ ID NO: 1543938 - DNA, 15 bp, Homo sapiens
ctgttgttcatgctc

SEQ ID NO: 1543939 - DNA, 15 bp, Homo sapiens
tctgttgttcatgct

SEQ ID NO: 1543940 - DNA, 15 bp, Homo sapiens
ttctgttgttcatgc

SEQ ID NO: 1543941 - DNA, 15 bp, Homo sapiens
tttctgttgttcatg

SEQ ID NO: 1543942 - DNA, 15 bp, Homo sapiens
gtttctgttgttcat

SEQ ID NO: 1543943 - DNA, 15 bp, Homo sapiens
agtttctgttgttca

SEQ ID NO: 1543944 - DNA, 15 bp, Homo sapiens
tagtttctgttgttc

SEQ ID NO: 1543945 - DNA, 15 bp, Homo sapiens
gtagtttctgttgtt

SEQ ID NO: 1543946 - DNA, 15 bp, Homo sapiens
ggtagtttctgttgt

SEQ ID NO: 1543947 - DNA, 15 bp, Homo sapiens
aggtagtttctgttg

SEQ ID NO: 1543948 - DNA, 15 bp, Homo sapiens
caggtagtttctgtt

SEQ ID NO: 1543949 - DNA, 15 bp, Homo sapiens
gcaggtagtttctgt

SEQ ID NO: 1543950 - DNA, 15 bp, Homo sapiens
agcaggtagtttctg

SEQ ID NO: 1543951 - DNA, 15 bp, Homo sapiens
cagcaggtagtttct

SEQ ID NO: 1543952 - DNA, 15 bp, Homo sapiens
gcagcaggtagtttc

SEQ ID NO: 1543953 - DNA, 15 bp, Homo sapiens
ggcagcaggtagttt

SEQ ID NO: 1543954 - DNA, 15 bp, Homo sapiens
tggcagcaggtagtt

SEQ ID NO: 1543955 - DNA, 15 bp, Homo sapiens
gtggcagcaggtagt

SEQ ID NO: 1543956 - DNA, 15 bp, Homo sapiens
ggtggcagcaggtag

SEQ ID NO: 1543957 - DNA, 15 bp, Homo sapiens
aggtggcagcaggta

SEQ ID NO: 1543958 - DNA, 15 bp, Homo sapiens
aaggtggcagcaggt

SEQ ID NO: 1543959 - DNA, 15 bp, Homo sapiens
caaggtggcagcagg

SEQ ID NO: 1543960 - DNA, 15 bp, Homo sapiens
ccaaggtggcagcag

SEQ ID NO: 1543961 - DNA, 15 bp, Homo sapiens
gccaaggtggcagca

SEQ ID NO: 1543962 - DNA, 15 bp, Homo sapiens
agccaaggtggcagc

SEQ ID NO: 1543963 - DNA, 15 bp, Homo sapiens
aagccaaggtggcag

SEQ ID NO: 1543964 - DNA, 15 bp, Homo sapiens
aaagccaaggtggca

SEQ ID NO: 1543965 - DNA, 15 bp, Homo sapiens
taaagccaaggtggc

SEQ ID NO: 1543966 - DNA, 15 bp, Homo sapiens
ctaaagccaaggtgg

SEQ ID NO: 1543967 - DNA, 15 bp, Homo sapiens
tctaaagccaaggtg

SEQ ID NO: 1543968 - DNA, 15 bp, Homo sapiens
ttctaaagccaaggt

SEQ ID NO: 1543969 - DNA, 15 bp, Homo sapiens
cttctaaagccaagg

SEQ ID NO: 1543970 - DNA, 15 bp, Homo sapiens
tcttctaaagccaag

SEQ ID NO: 1543971 - DNA, 15 bp, Homo sapiens
ctcttctaaagccaa

SEQ ID NO: 1543972 - DNA, 15 bp, Homo sapiens
cctcttctaaagcca

SEQ ID NO: 1543973 - DNA, 15 bp, Homo sapiens
tcctcttctaaagcc

SEQ ID NO: 1543974 - DNA, 15 bp, Homo sapiens
gtcctcttctaaagc

SEQ ID NO: 1543975 - DNA, 15 bp, Homo sapiens
ggtcctcttctaaag

SEQ ID NO: 1543976 - DNA, 15 bp, Homo sapiens
aggtcctcttctaaa

SEQ ID NO: 1543977 - DNA, 15 bp, Homo sapiens
caggtcctcttctaa

SEQ ID NO: 1543978 - DNA, 15 bp, Homo sapiens
tcaggtcctcttcta

SEQ ID NO: 1543979 - DNA, 15 bp, Homo sapiens
ttcaggtcctcttct

SEQ ID NO: 1543980 - DNA, 15 bp, Homo sapiens
cttcaggtcctcttc

SEQ ID NO: 1543981 - DNA, 15 bp, Homo sapiens
ccttcaggtcctctt

SEQ ID NO: 1543982 - DNA, 15 bp, Homo sapiens
accttcaggtcctct

SEQ ID NO: 1543983 - DNA, 15 bp, Homo sapiens
taccttcaggtcctc

SEQ ID NO: 1543984 - DNA, 15 bp, Homo sapiens
ataccttcaggtcct

SEQ ID NO: 1543985 - DNA, 15 bp, Homo sapiens
aataccttcaggtcc

SEQ ID NO: 1543986 - DNA, 15 bp, Homo sapiens
gaataccttcaggtc

SEQ ID NO: 1543987 - DNA, 15 bp, Homo sapiens
ggaataccttcaggt

SEQ ID NO: 1543988 - DNA, 15 bp, Homo sapiens
tggaataccttcagg

SEQ ID NO: 1543989 - DNA, 15 bp, Homo sapiens
gtggaataccttcag

SEQ ID NO: 1543990 - DNA, 15 bp, Homo sapiens
tgtggaataccttca

SEQ ID NO: 1543991 - DNA, 15 bp, Homo sapiens
ttgtggaataccttc

SEQ ID NO: 1543992 - DNA, 15 bp, Homo sapiens
attgtggaatacctt

SEQ ID NO: 1543993 - DNA, 15 bp, Homo sapiens
cattgtggaatacct

SEQ ID NO: 1543994 - DNA, 15 bp, Homo sapiens
gcattgtggaatacc

SEQ ID NO: 1543995 - DNA, 15 bp, Homo sapiens
agcattgtggaatac

SEQ ID NO: 1543996 - DNA, 15 bp, Homo sapiens
gagcattgtggaata

SEQ ID NO: 1543997 - DNA, 15 bp, Homo sapiens
agagcattgtggaat

SEQ ID NO: 1543998 - DNA, 15 bp, Homo sapiens
gagagcattgtggaa

SEQ ID NO: 1543999 - DNA, 15 bp, Homo sapiens
tgagagcattgtgga

SEQ ID NO: 1544000 - DNA, 15 bp, Homo sapiens
ttgagagcattgtgg

SEQ ID NO: 1544001 - DNA, 15 bp, Homo sapiens
cttgagagcattgtg

SEQ ID NO: 1544002 - DNA, 15 bp, Homo sapiens
gcttgagagcattgt

SEQ ID NO: 1544003 - DNA, 15 bp, Homo sapiens
agcttgagagcattg

SEQ ID NO: 1544004 - DNA, 15 bp, Homo sapiens
tagcttgagagcatt

SEQ ID NO: 1544005 - DNA, 15 bp, Homo sapiens
ctagcttgagagcat

SEQ ID NO: 1544006 - DNA, 15 bp, Homo sapiens
gctagcttgagagca

SEQ ID NO: 1544007 - DNA, 15 bp, Homo sapiens
agctagcttgagagc

SEQ ID NO: 1544008 - DNA, 15 bp, Homo sapiens
gagctagcttgagag

SEQ ID NO: 1544009 - DNA, 15 bp, Homo sapiens
tgagctagcttgaga

SEQ ID NO: 1544010 - DNA, 15 bp, Homo sapiens
gtgagctagcttgag

SEQ ID NO: 1544011 - DNA, 15 bp, Homo sapiens
tgtgagctagcttga

SEQ ID NO: 1544012 - DNA, 15 bp, Homo sapiens
ttgtgagctagcttg

SEQ ID NO: 1544013 - DNA, 15 bp, Homo sapiens
tttgtgagctagctt

SEQ ID NO: 1544014 - DNA, 15 bp, Homo sapiens
ctttgtgagctagct

SEQ ID NO: 1544015 - DNA, 15 bp, Homo sapiens
tctttgtgagctagc

SEQ ID NO: 1544016 - DNA, 15 bp, Homo sapiens
gtctttgtgagctag

SEQ ID NO: 1544017 - DNA, 15 bp, Homo sapiens
tgtctttgtgagcta

SEQ ID NO: 1544018 - DNA, 15 bp, Homo sapiens
gtgtctttgtgagct

SEQ ID NO: 1544019 - DNA, 15 bp, Homo sapiens
ggtgtctttgtgagc

SEQ ID NO: 1544020 - DNA, 15 bp, Homo sapiens
tggtgtctttgtgag

SEQ ID NO: 1544021 - DNA, 15 bp, Homo sapiens
ttggtgtctttgtga

SEQ ID NO: 1544022 - DNA, 15 bp, Homo sapiens
tttggtgtctttgtg

SEQ ID NO: 1544023 - DNA, 15 bp, Homo sapiens
ctttggtgtctttgt

SEQ ID NO: 1544024 - DNA, 15 bp, Homo sapiens
actttggtgtctttg

SEQ ID NO: 1544025 - DNA, 15 bp, Homo sapiens
aactttggtgtcttt

SEQ ID NO: 1544026 - DNA, 15 bp, Homo sapiens
aaactttggtgtctt

SEQ ID NO: 1544027 - DNA, 15 bp, Homo sapiens
gaaactttggtgtct

SEQ ID NO: 1544028 - DNA, 15 bp, Homo sapiens
agaaactttggtgtc

SEQ ID NO: 1544029 - DNA, 15 bp, Homo sapiens
tagaaactttggtgt

SEQ ID NO: 1544030 - DNA, 15 bp, Homo sapiens
atagaaactttggtg

SEQ ID NO: 1544031 - DNA, 15 bp, Homo sapiens
aatagaaactttggt

SEQ ID NO: 1544032 - DNA, 15 bp, Homo sapiens
taatagaaactttgg

SEQ ID NO: 1544033 - DNA, 15 bp, Homo sapiens
ttaatagaaactttg

SEQ ID NO: 1544034 - DNA, 15 bp, Homo sapiens
tttaatagaaacttt

SEQ ID NO: 1544035 - DNA, 15 bp, Homo sapiens
ctttaatagaaactt

SEQ ID NO: 1544036 - DNA, 15 bp, Homo sapiens
actttaatagaaact

SEQ ID NO: 1544037 - DNA, 15 bp, Homo sapiens
tactttaatagaaac

SEQ ID NO: 1544038 - DNA, 15 bp, Homo sapiens
ttactttaatagaaa

SEQ ID NO: 1544039 - DNA, 15 bp, Homo sapiens
cttactttaatagaa

SEQ ID NO: 1544040 - DNA, 15 bp, Homo sapiens
acttactttaataga

SEQ ID NO: 1544041 - DNA, 15 bp, Homo sapiens
aacttactttaatag

SEQ ID NO: 1544042 - DNA, 15 bp, Homo sapiens
gaacttactttaata

SEQ ID NO: 1544043 - DNA, 15 bp, Homo sapiens
ggaacttactttaat

SEQ ID NO: 1544044 - DNA, 15 bp, Homo sapiens
tggaacttactttaa

SEQ ID NO: 1544045 - DNA, 15 bp, Homo sapiens
ctggaacttacttta

SEQ ID NO: 1544046 - DNA, 15 bp, Homo sapiens
actggaacttacttt

SEQ ID NO: 1544047 - DNA, 15 bp, Homo sapiens
gactggaacttactt

SEQ ID NO: 1544048 - DNA, 15 bp, Homo sapiens
agactggaacttact

SEQ ID NO: 1544049 - DNA, 15 bp, Homo sapiens
cagactggaacttac

SEQ ID NO: 1544050 - DNA, 15 bp, Homo sapiens
acagactggaactta

SEQ ID NO: 1544051 - DNA, 15 bp, Homo sapiens
cacagactggaactt

SEQ ID NO: 1544052 - DNA, 15 bp, Homo sapiens
acacagactggaact

SEQ ID NO: 1544053 - DNA, 15 bp, Homo sapiens
aacacagactggaac

SEQ ID NO: 1544054 - DNA, 15 bp, Homo sapiens
aaacacagactggaa

SEQ ID NO: 1544055 - DNA, 15 bp, Homo sapiens
aaaacacagactgga

SEQ ID NO: 1544056 - DNA, 15 bp, Homo sapiens
caaaacacagactgg

SEQ ID NO: 1544057 - DNA, 15 bp, Homo sapiens
acaaaacacagactg

SEQ ID NO: 1544058 - DNA, 15 bp, Homo sapiens
tacaaaacacagact

SEQ ID NO: 1544059 - DNA, 15 bp, Homo sapiens
ttacaaaacacagac

SEQ ID NO: 1544060 - DNA, 15 bp, Homo sapiens
tttacaaaacacaga

SEQ ID NO: 1544061 - DNA, 15 bp, Homo sapiens
gtttacaaaacacag

SEQ ID NO: 1544062 - DNA, 15 bp, Homo sapiens
cgtttacaaaacaca

SEQ ID NO: 1544063 - DNA, 15 bp, Homo sapiens
tcgtttacaaaacac

SEQ ID NO: 1544064 - DNA, 15 bp, Homo sapiens
atcgtttacaaaaca

SEQ ID NO: 1544065 - DNA, 15 bp, Homo sapiens
aatcgtttacaaaac

SEQ ID NO: 1544066 - DNA, 15 bp, Homo sapiens
gaatcgtttacaaaa

SEQ ID NO: 1544067 - DNA, 15 bp, Homo sapiens
tgaatcgtttacaaa

SEQ ID NO: 1544068 - DNA, 15 bp, Homo sapiens
atgaatcgtttacaa

SEQ ID NO: 1544069 - DNA, 15 bp, Homo sapiens
aatgaatcgtttaca

SEQ ID NO: 1544070 - DNA, 15 bp, Homo sapiens
caatgaatcgtttac

SEQ ID NO: 1544071 - DNA, 15 bp, Homo sapiens
gcaatgaatcgttta

SEQ ID NO: 1544072 - DNA, 15 bp, Homo sapiens
agcaatgaatcgttt

SEQ ID NO: 1544073 - DNA, 15 bp, Homo sapiens
aagcaatgaatcgtt

SEQ ID NO: 1544074 - DNA, 15 bp, Homo sapiens
aaagcaatgaatcgt

SEQ ID NO: 1544075 - DNA, 15 bp, Homo sapiens
aaaagcaatgaatcg

SEQ ID NO: 1544076 - DNA, 15 bp, Homo sapiens
gaaaagcaatgaatc

SEQ ID NO: 1544077 - DNA, 15 bp, Homo sapiens
agaaaagcaatgaat

SEQ ID NO: 1544078 - DNA, 15 bp, Homo sapiens
aagaaaagcaatgaa

SEQ ID NO: 1544079 - DNA, 15 bp, Homo sapiens
caagaaaagcaatga

SEQ ID NO: 1544080 - DNA, 15 bp, Homo sapiens
tcaagaaaagcaatg

SEQ ID NO: 1544081 - DNA, 15 bp, Homo sapiens
gtcaagaaaagcaat

SEQ ID NO: 1544082 - DNA, 15 bp, Homo sapiens
agtcaagaaaagcaa

SEQ ID NO: 1544083 - DNA, 15 bp, Homo sapiens
tagtcaagaaaagca

SEQ ID NO: 1544084 - DNA, 15 bp, Homo sapiens
ttagtcaagaaaagc

SEQ ID NO: 1544085 - DNA, 15 bp, Homo sapiens
gttagtcaagaaaag

SEQ ID NO: 1544086 - DNA, 15 bp, Homo sapiens
agttagtcaagaaaa

SEQ ID NO: 1544087 - DNA, 15 bp, Homo sapiens
tagttagtcaagaaa

SEQ ID NO: 1544088 - DNA, 15 bp, Homo sapiens
ctagttagtcaagaa

SEQ ID NO: 1544089 - DNA, 15 bp, Homo sapiens
tctagttagtcaaga

SEQ ID NO: 1544090 - DNA, 15 bp, Homo sapiens
gtctagttagtcaag

SEQ ID NO: 1544091 - DNA, 15 bp, Homo sapiens
agtctagttagtcaa

SEQ ID NO: 1544092 - DNA, 15 bp, Homo sapiens
tagtctagttagtca

SEQ ID NO: 1544093 - DNA, 15 bp, Homo sapiens
atagtctagttagtc

SEQ ID NO: 1544094 - DNA, 15 bp, Homo sapiens
tatagtctagttagt

SEQ ID NO: 1544095 - DNA, 15 bp, Homo sapiens
atatagtctagttag

SEQ ID NO: 1544096 - DNA, 15 bp, Homo sapiens
gatatagtctagtta

SEQ ID NO: 1544097 - DNA, 15 bp, Homo sapiens
ggatatagtctagtt

SEQ ID NO: 1544098 - DNA, 15 bp, Homo sapiens
aggatatagtctagt

SEQ ID NO: 1544099 - DNA, 15 bp, Homo sapiens
caggatatagtctag

SEQ ID NO: 1544100 - DNA, 15 bp, Homo sapiens
ccaggatatagtcta

SEQ ID NO: 1544101 - DNA, 15 bp, Homo sapiens
gccaggatatagtct

SEQ ID NO: 1544102 - DNA, 15 bp, Homo sapiens
ggccaggatatagtc

SEQ ID NO: 1544103 - DNA, 15 bp, Homo sapiens
aggccaggatatagt

SEQ ID NO: 1544104 - DNA, 15 bp, Homo sapiens
gaggccaggatatag

SEQ ID NO: 1544105 - DNA, 15 bp, Homo sapiens
ggaggccaggatata

SEQ ID NO: 1544106 - DNA, 15 bp, Homo sapiens
gggaggccaggatat

SEQ ID NO: 1544107 - DNA, 15 bp, Homo sapiens
agggaggccaggata

SEQ ID NO: 1544108 - DNA, 15 bp, Homo sapiens
tagggaggccaggat

SEQ ID NO: 1544109 - DNA, 15 bp, Homo sapiens
ctagggaggccagga

SEQ ID NO: 1544110 - DNA, 15 bp, Homo sapiens
cctagggaggccagg

SEQ ID NO: 1544111 - DNA, 15 bp, Homo sapiens
acctagggaggccag

SEQ ID NO: 1544112 - DNA, 15 bp, Homo sapiens
cacctagggaggcca

SEQ ID NO: 1544113 - DNA, 15 bp, Homo sapiens
acacctagggaggcc

SEQ ID NO: 1544114 - DNA, 15 bp, Homo sapiens
gacacctagggaggc

SEQ ID NO: 1544115 - DNA, 15 bp, Homo sapiens
ggacacctagggagg

SEQ ID NO: 1544116 - DNA, 15 bp, Homo sapiens
aggacacctagggag

SEQ ID NO: 1544117 - DNA, 15 bp, Homo sapiens
taggacacctaggga

SEQ ID NO: 1544118 - DNA, 15 bp, Homo sapiens
gtaggacacctaggg

SEQ ID NO: 1544119 - DNA, 15 bp, Homo sapiens
ggtaggacacctagg

SEQ ID NO: 1544120 - DNA, 15 bp, Homo sapiens
gggtaggacacctag

SEQ ID NO: 1544121 - DNA, 15 bp, Homo sapiens
ggggtaggacaccta

SEQ ID NO: 1544122 - DNA, 15 bp, Homo sapiens
aggggtaggacacct

SEQ ID NO: 1544123 - DNA, 15 bp, Homo sapiens
taggggtaggacacc

SEQ ID NO: 1544124 - DNA, 15 bp, Homo sapiens
ataggggtaggacac

SEQ ID NO: 1544125 - DNA, 15 bp, Homo sapiens
tataggggtaggaca

SEQ ID NO: 1544126 - DNA, 15 bp, Homo sapiens
ctataggggtaggac

SEQ ID NO: 1544127 - DNA, 15 bp, Homo sapiens
actataggggtagga

SEQ ID NO: 1544128 - DNA, 15 bp, Homo sapiens
cactataggggtagg

SEQ ID NO: 1544129 - DNA, 15 bp, Homo sapiens
ccactataggggtag

SEQ ID NO: 1544130 - DNA, 15 bp, Homo sapiens
accactataggggta

SEQ ID NO: 1544131 - DNA, 15 bp, Homo sapiens
caccactataggggt

SEQ ID NO: 1544132 - DNA, 15 bp, Homo sapiens
acaccactatagggg

SEQ ID NO: 1544133 - DNA, 15 bp, Homo sapiens
tacaccactataggg

SEQ ID NO: 1544134 - DNA, 15 bp, Homo sapiens
atacaccactatagg

SEQ ID NO: 1544135 - DNA, 15 bp, Homo sapiens
tatacaccactatag

SEQ ID NO: 1544136 - DNA, 15 bp, Homo sapiens
ttatacaccactata

SEQ ID NO: 1544137 - DNA, 15 bp, Homo sapiens
tttatacaccactat

SEQ ID NO: 1544138 - DNA, 15 bp, Homo sapiens
ttttatacaccacta

SEQ ID NO: 1544139 - DNA, 15 bp, Homo sapiens
attttatacaccact

SEQ ID NO: 1544140 - DNA, 15 bp, Homo sapiens
cattttatacaccac

SEQ ID NO: 1544141 - DNA, 15 bp, Homo sapiens
acattttatacacca

SEQ ID NO: 1544142 - DNA, 15 bp, Homo sapiens
gacattttatacacc

SEQ ID NO: 1544143 - DNA, 15 bp, Homo sapiens
tgacattttatacac

SEQ ID NO: 1544144 - DNA, 15 bp, Homo sapiens
gtgacattttataca

SEQ ID NO: 1544145 - DNA, 15 bp, Homo sapiens
cgtgacattttatac

SEQ ID NO: 1544146 - DNA, 15 bp, Homo sapiens
acgtgacattttata

SEQ ID NO: 1544147 - DNA, 15 bp, Homo sapiens
tacgtgacattttat

SEQ ID NO: 1544148 - DNA, 15 bp, Homo sapiens
ttacgtgacatttta

SEQ ID NO: 1544149 - DNA, 15 bp, Homo sapiens
cttacgtgacatttt

SEQ ID NO: 1544150 - DNA, 15 bp, Homo sapiens
ccttacgtgacattt

SEQ ID NO: 1544151 - DNA, 15 bp, Homo sapiens
gccttacgtgacatt

SEQ ID NO: 1544152 - DNA, 15 bp, Homo sapiens
agccttacgtgacat

SEQ ID NO: 1544153 - DNA, 15 bp, Homo sapiens
cagccttacgtgaca

SEQ ID NO: 1544154 - DNA, 15 bp, Homo sapiens
acagccttacgtgac

SEQ ID NO: 1544155 - DNA, 15 bp, Homo sapiens
gacagccttacgtga

SEQ ID NO: 1544156 - DNA, 15 bp, Homo sapiens
cgacagccttacgtg

SEQ ID NO: 1544157 - DNA, 15 bp, Homo sapiens
gcgacagccttacgt

SEQ ID NO: 1544158 - DNA, 15 bp, Homo sapiens
cgcgacagccttacg

SEQ ID NO: 1544159 - DNA, 15 bp, Homo sapiens
ccgcgacagccttac

SEQ ID NO: 1544160 - DNA, 15 bp, Homo sapiens
accgcgacagcctta

SEQ ID NO: 1544161 - DNA, 15 bp, Homo sapiens
caccgcgacagcctt

SEQ ID NO: 1544162 - DNA, 15 bp, Homo sapiens
ccaccgcgacagcct

SEQ ID NO: 1544163 - DNA, 15 bp, Homo sapiens
gccaccgcgacagcc

SEQ ID NO: 1544164 - DNA, 15 bp, Homo sapiens
agccaccgcgacagc

SEQ ID NO: 1544165 - DNA, 15 bp, Homo sapiens
gagccaccgcgacag

SEQ ID NO: 1544166 - DNA, 15 bp, Homo sapiens
tgagccaccgcgaca

SEQ ID NO: 1544167 - DNA, 15 bp, Homo sapiens
gtgagccaccgcgac

SEQ ID NO: 1544168 - DNA, 15 bp, Homo sapiens
cgtgagccaccgcga

SEQ ID NO: 1544169 - DNA, 15 bp, Homo sapiens
tggattacaggcgtg

SEQ ID NO: 1544170 - DNA, 15 bp, Homo sapiens
ttggattacaggcgt

SEQ ID NO: 1544171 - DNA, 15 bp, Homo sapiens
tgcttggattacagg

SEQ ID NO: 1544172 - DNA, 15 bp, Homo sapiens
gtgcttggattacag

SEQ ID NO: 1544173 - DNA, 15 bp, Homo sapiens
agtgcttggattaca

SEQ ID NO: 1544174 - DNA, 15 bp, Homo sapiens
aagtgcttggattac

SEQ ID NO: 1544175 - DNA, 15 bp, Homo sapiens
aaagtgcttggatta

SEQ ID NO: 1544176 - DNA, 15 bp, Homo sapiens
caaagtgcttggatt

SEQ ID NO: 1544177 - DNA, 15 bp, Homo sapiens
ccaaagtgcttggat

SEQ ID NO: 1544178 - DNA, 15 bp, Homo sapiens
cccaaagtgcttgga

SEQ ID NO: 1544179 - DNA, 15 bp, Homo sapiens
tcccaaagtgcttgg

SEQ ID NO: 1544180 - DNA, 15 bp, Homo sapiens
atcccaaagtgcttg

SEQ ID NO: 1544181 - DNA, 15 bp, Homo sapiens
catcccaaagtgctt

SEQ ID NO: 1544182 - DNA, 15 bp, Homo sapiens
acatcccaaagtgct

SEQ ID NO: 1544183 - DNA, 15 bp, Homo sapiens
gacatcccaaagtgc

SEQ ID NO: 1544184 - DNA, 15 bp, Homo sapiens
tgacatcccaaagtg

SEQ ID NO: 1544185 - DNA, 15 bp, Homo sapiens
ttgacatcccaaagt

SEQ ID NO: 1544186 - DNA, 15 bp, Homo sapiens
cttgacatcccaaag

SEQ ID NO: 1544187 - DNA, 15 bp, Homo sapiens
ccttgacatcccaaa

SEQ ID NO: 1544188 - DNA, 15 bp, Homo sapiens
accttgacatcccaa

SEQ ID NO: 1544189 - DNA, 15 bp, Homo sapiens
caccttgacatccca

SEQ ID NO: 1544190 - DNA, 15 bp, Homo sapiens
ccaccttgacatccc

SEQ ID NO: 1544191 - DNA, 15 bp, Homo sapiens
cccaccttgacatcc

SEQ ID NO: 1544192 - DNA, 15 bp, Homo sapiens
gcccaccttgacatc

SEQ ID NO: 1544193 - DNA, 15 bp, Homo sapiens
tgcccaccttgacat

SEQ ID NO: 1544194 - DNA, 15 bp, Homo sapiens
ctgcccaccttgaca

SEQ ID NO: 1544195 - DNA, 15 bp, Homo sapiens
tctgcccaccttgac

SEQ ID NO: 1544196 - DNA, 15 bp, Homo sapiens
atctgcccaccttga

SEQ ID NO: 1544197 - DNA, 15 bp, Homo sapiens
acgtgatctgcccac

SEQ ID NO: 1544198 - DNA, 15 bp, Homo sapiens
cacgtgatctgccca

SEQ ID NO: 1544199 - DNA, 15 bp, Homo sapiens
tcacgtgatctgccc

SEQ ID NO: 1544200 - DNA, 15 bp, Homo sapiens
ctcacgtgatctgcc

SEQ ID NO: 1544201 - DNA, 15 bp, Homo sapiens
cctcacgtgatctgc

SEQ ID NO: 1544202 - DNA, 15 bp, Homo sapiens
acctcacgtgatctg

SEQ ID NO: 1544203 - DNA, 15 bp, Homo sapiens
gacctcacgtgatct

SEQ ID NO: 1544204 - DNA, 15 bp, Homo sapiens
tgacctcacgtgatc

SEQ ID NO: 1544205 - DNA, 15 bp, Homo sapiens
ctgacctcacgtgat

SEQ ID NO: 1544206 - DNA, 15 bp, Homo sapiens
cctgacctcacgtga

SEQ ID NO: 1544207 - DNA, 15 bp, Homo sapiens
tcctgacctcacgtg

SEQ ID NO: 1544208 - DNA, 15 bp, Homo sapiens
ctcctgacctcacgt

SEQ ID NO: 1544209 - DNA, 15 bp, Homo sapiens
actcctgacctcacg

SEQ ID NO: 1544210 - DNA, 15 bp, Homo sapiens
aactcctgacctcac

SEQ ID NO: 1544211 - DNA, 15 bp, Homo sapiens
gtgttggccaggctg

SEQ ID NO: 1544212 - DNA, 15 bp, Homo sapiens
cgtgttggccaggct

SEQ ID NO: 1544213 - DNA, 15 bp, Homo sapiens
ccgtgttggccaggc

SEQ ID NO: 1544214 - DNA, 15 bp, Homo sapiens
accgtgttggccagg

SEQ ID NO: 1544215 - DNA, 15 bp, Homo sapiens
caccgtgttggccag

SEQ ID NO: 1544216 - DNA, 15 bp, Homo sapiens
tcaccgtgttggcca

SEQ ID NO: 1544217 - DNA, 15 bp, Homo sapiens
ttcaccgtgttggcc

SEQ ID NO: 1544218 - DNA, 15 bp, Homo sapiens
tttcaccgtgttggc

SEQ ID NO: 1544219 - DNA, 15 bp, Homo sapiens
gtttgtatttttagt

SEQ ID NO: 1544220 - DNA, 15 bp, Homo sapiens
tgtttgtatttttag

SEQ ID NO: 1544221 - DNA, 15 bp, Homo sapiens
atgtttgtattttta

SEQ ID NO: 1544222 - DNA, 15 bp, Homo sapiens
aatgtttgtattttt

SEQ ID NO: 1544223 - DNA, 15 bp, Homo sapiens
taatgtttgtatttt

SEQ ID NO: 1544224 - DNA, 15 bp, Homo sapiens
ctaatgtttgtattt

SEQ ID NO: 1544225 - DNA, 15 bp, Homo sapiens
gctaatgtttgtatt

SEQ ID NO: 1544226 - DNA, 15 bp, Homo sapiens
ggctaatgtttgtat

SEQ ID NO: 1544227 - DNA, 15 bp, Homo sapiens
cggctaatgtttgta

SEQ ID NO: 1544228 - DNA, 15 bp, Homo sapiens
ccggctaatgtttgt

SEQ ID NO: 1544229 - DNA, 15 bp, Homo sapiens
cccggctaatgtttg

SEQ ID NO: 1544230 - DNA, 15 bp, Homo sapiens
acccggctaatgttt

SEQ ID NO: 1544231 - DNA, 15 bp, Homo sapiens
tacccggctaatgtt

SEQ ID NO: 1544232 - DNA, 15 bp, Homo sapiens
atacccggctaatgt

SEQ ID NO: 1544233 - DNA, 15 bp, Homo sapiens
catacccggctaatg

SEQ ID NO: 1544234 - DNA, 15 bp, Homo sapiens
ccaccaccatacccg

SEQ ID NO: 1544235 - DNA, 15 bp, Homo sapiens
cccaccaccataccc

SEQ ID NO: 1544236 - DNA, 15 bp, Homo sapiens
gcccaccaccatacc

SEQ ID NO: 1544237 - DNA, 15 bp, Homo sapiens
tgcccaccaccatac

SEQ ID NO: 1544238 - DNA, 15 bp, Homo sapiens
gtgcccaccaccata

SEQ ID NO: 1544239 - DNA, 15 bp, Homo sapiens
agattacaggtgccc

SEQ ID NO: 1544240 - DNA, 15 bp, Homo sapiens
gagattacaggtgcc

SEQ ID NO: 1544241 - DNA, 15 bp, Homo sapiens
tgagattacaggtgc

SEQ ID NO: 1544242 - DNA, 15 bp, Homo sapiens
aagtagctgagatta

SEQ ID NO: 1544243 - DNA, 15 bp, Homo sapiens
caagtagctgagatt

SEQ ID NO: 1544244 - DNA, 15 bp, Homo sapiens
ccaagtagctgagat

SEQ ID NO: 1544245 - DNA, 15 bp, Homo sapiens
tccaagtagctgaga

SEQ ID NO: 1544246 - DNA, 15 bp, Homo sapiens
ctccaagtagctgag

SEQ ID NO: 1544247 - DNA, 15 bp, Homo sapiens
cctccaagtagctga

SEQ ID NO: 1544248 - DNA, 15 bp, Homo sapiens
gcctccaagtagctg

SEQ ID NO: 1544249 - DNA, 15 bp, Homo sapiens
agcctccaagtagct

SEQ ID NO: 1544250 - DNA, 15 bp, Homo sapiens
cagcctccaagtagc

SEQ ID NO: 1544251 - DNA, 15 bp, Homo sapiens
tcagcctccaagtag

SEQ ID NO: 1544252 - DNA, 15 bp, Homo sapiens
ctcagcctccaagta

SEQ ID NO: 1544253 - DNA, 15 bp, Homo sapiens
cctcagcctccaagt

SEQ ID NO: 1544254 - DNA, 15 bp, Homo sapiens
gcctcagcctccaag

SEQ ID NO: 1544255 - DNA, 15 bp, Homo sapiens
tgcctcagcctccaa

SEQ ID NO: 1544256 - DNA, 15 bp, Homo sapiens
ccctctgttgcccag

SEQ ID NO: 1544257 - DNA, 15 bp, Homo sapiens
tccctctgttgccca

SEQ ID NO: 1544258 - DNA, 15 bp, Homo sapiens
gtccctctgttgccc

SEQ ID NO: 1544259 - DNA, 15 bp, Homo sapiens
cgtccctctgttgcc

SEQ ID NO: 1544260 - DNA, 15 bp, Homo sapiens
gcgtccctctgttgc

SEQ ID NO: 1544261 - DNA, 15 bp, Homo sapiens
agcgtccctctgttg

SEQ ID NO: 1544262 - DNA, 15 bp, Homo sapiens
gagcgtccctctgtt

SEQ ID NO: 1544263 - DNA, 15 bp, Homo sapiens
agagcgtccctctgt

SEQ ID NO: 1544264 - DNA, 15 bp, Homo sapiens
cagagcgtccctctg

SEQ ID NO: 1544265 - DNA, 15 bp, Homo sapiens
acagagcgtccctct

SEQ ID NO: 1544266 - DNA, 15 bp, Homo sapiens
gacagagcgtccctc

SEQ ID NO: 1544267 - DNA, 15 bp, Homo sapiens
agacagagcgtccct

SEQ ID NO: 1544268 - DNA, 15 bp, Homo sapiens
gagacagagcgtccc

SEQ ID NO: 1544269 - DNA, 15 bp, Homo sapiens
tgagacagagcgtcc

SEQ ID NO: 1544270 - DNA, 15 bp, Homo sapiens
ttgagacagagcgtc

SEQ ID NO: 1544271 - DNA, 15 bp, Homo sapiens
tttgagacagagcgt

SEQ ID NO: 1544272 - DNA, 15 bp, Homo sapiens
ttttgagacagagcg

SEQ ID NO: 1544273 - DNA, 15 bp, Homo sapiens
cttttattttttgag

SEQ ID NO: 1544274 - DNA, 15 bp, Homo sapiens
ccttttattttttga

SEQ ID NO: 1544275 - DNA, 15 bp, Homo sapiens
accttttattttttg

SEQ ID NO: 1544276 - DNA, 15 bp, Homo sapiens
aaccttttatttttt

SEQ ID NO: 1544277 - DNA, 15 bp, Homo sapiens
taaccttttattttt

SEQ ID NO: 1544278 - DNA, 15 bp, Homo sapiens
ataaccttttatttt

SEQ ID NO: 1544279 - DNA, 15 bp, Homo sapiens
cataaccttttattt

SEQ ID NO: 1544280 - DNA, 15 bp, Homo sapiens
acataaccttttatt

SEQ ID NO: 1544281 - DNA, 15 bp, Homo sapiens
tacataaccttttat

SEQ ID NO: 1544282 - DNA, 15 bp, Homo sapiens
ttacataacctttta

SEQ ID NO: 1544283 - DNA, 15 bp, Homo sapiens
tttacataacctttt

SEQ ID NO: 1544284 - DNA, 15 bp, Homo sapiens
atttacataaccttt

SEQ ID NO: 1544285 - DNA, 15 bp, Homo sapiens
gatttacataacctt

SEQ ID NO: 1544286 - DNA, 15 bp, Homo sapiens
agatttacataacct

SEQ ID NO: 1544287 - DNA, 15 bp, Homo sapiens
tagatttacataacc

SEQ ID NO: 1544288 - DNA, 15 bp, Homo sapiens
ctagatttacataac

SEQ ID NO: 1544289 - DNA, 15 bp, Homo sapiens
tctagatttacataa

SEQ ID NO: 1544290 - DNA, 15 bp, Homo sapiens
atctagatttacata

SEQ ID NO: 1544291 - DNA, 15 bp, Homo sapiens
catctagatttacat

SEQ ID NO: 1544292 - DNA, 15 bp, Homo sapiens
acatctagatttaca

SEQ ID NO: 1544293 - DNA, 15 bp, Homo sapiens
tacatctagatttac

SEQ ID NO: 1544294 - DNA, 15 bp, Homo sapiens
ctacatctagattta

SEQ ID NO: 1544295 - DNA, 15 bp, Homo sapiens
cctacatctagattt

SEQ ID NO: 1544296 - DNA, 15 bp, Homo sapiens
tcctacatctagatt

SEQ ID NO: 1544297 - DNA, 15 bp, Homo sapiens
ttcctacatctagat

SEQ ID NO: 1544298 - DNA, 15 bp, Homo sapiens
cttcctacatctaga

SEQ ID NO: 1544299 - DNA, 15 bp, Homo sapiens
tcttcctacatctag

SEQ ID NO: 1544300 - DNA, 15 bp, Homo sapiens
gtcttcctacatcta

SEQ ID NO: 1544301 - DNA, 15 bp, Homo sapiens
ggtcttcctacatct

SEQ ID NO: 1544302 - DNA, 15 bp, Homo sapiens
tggtcttcctacatc

SEQ ID NO: 1544303 - DNA, 15 bp, Homo sapiens
ttggtcttcctacat

SEQ ID NO: 1544304 - DNA, 15 bp, Homo sapiens
gttggtcttcctaca

SEQ ID NO: 1544305 - DNA, 15 bp, Homo sapiens
tgttggtcttcctac

SEQ ID NO: 1544306 - DNA, 15 bp, Homo sapiens
atgttggtcttccta

SEQ ID NO: 1544307 - DNA, 15 bp, Homo sapiens
aatgttggtcttcct

SEQ ID NO: 1544308 - DNA, 15 bp, Homo sapiens
aaatgttggtcttcc

SEQ ID NO: 1544309 - DNA, 15 bp, Homo sapiens
caaatgttggtcttc

SEQ ID NO: 1544310 - DNA, 15 bp, Homo sapiens
acaaatgttggtctt

SEQ ID NO: 1544311 - DNA, 15 bp, Homo sapiens
cacaaatgttggtct

SEQ ID NO: 1544312 - DNA, 15 bp, Homo sapiens
acacaaatgttggtc

SEQ ID NO: 1544313 - DNA, 15 bp, Homo sapiens
gacacaaatgttggt

SEQ ID NO: 1544314 - DNA, 15 bp, Homo sapiens
tgacacaaatgttgg

SEQ ID NO: 1544315 - DNA, 15 bp, Homo sapiens
atgacacaaatgttg

SEQ ID NO: 1544316 - DNA, 15 bp, Homo sapiens
gatgacacaaatgtt

SEQ ID NO: 1544317 - DNA, 15 bp, Homo sapiens
tgatgacacaaatgt

SEQ ID NO: 1544318 - DNA, 15 bp, Homo sapiens
atgatgacacaaatg

SEQ ID NO: 1544319 - DNA, 15 bp, Homo sapiens
catgatgacacaaat

SEQ ID NO: 1544320 - DNA, 15 bp, Homo sapiens
ccatgatgacacaaa

SEQ ID NO: 1544321 - DNA, 15 bp, Homo sapiens
tccatgatgacacaa

SEQ ID NO: 1544322 - DNA, 15 bp, Homo sapiens
ctccatgatgacaca

SEQ ID NO: 1544323 - DNA, 15 bp, Homo sapiens
cctccatgatgacac

SEQ ID NO: 1544324 - DNA, 15 bp, Homo sapiens
acctccatgatgaca

SEQ ID NO: 1544325 - DNA, 15 bp, Homo sapiens
gacctccatgatgac

SEQ ID NO: 1544326 - DNA, 15 bp, Homo sapiens
ggacctccatgatga

SEQ ID NO: 1544327 - DNA, 15 bp, Homo sapiens
aggacctccatgatg

SEQ ID NO: 1544328 - DNA, 15 bp, Homo sapiens
caggacctccatgat

SEQ ID NO: 1544329 - DNA, 15 bp, Homo sapiens
acaggacctccatga

SEQ ID NO: 1544330 - DNA, 15 bp, Homo sapiens
cacaggacctccatg

SEQ ID NO: 1544331 - DNA, 15 bp, Homo sapiens
ccacaggacctccat

SEQ ID NO: 1544332 - DNA, 15 bp, Homo sapiens
tccacaggacctcca

SEQ ID NO: 1544333 - DNA, 15 bp, Homo sapiens
ctccacaggacctcc

SEQ ID NO: 1544334 - DNA, 15 bp, Homo sapiens
cctccacaggacctc

SEQ ID NO: 1544335 - DNA, 15 bp, Homo sapiens
tcctccacaggacct

SEQ ID NO: 1544336 - DNA, 15 bp, Homo sapiens
atcctccacaggacc

SEQ ID NO: 1544337 - DNA, 15 bp, Homo sapiens
tatcctccacaggac

SEQ ID NO: 1544338 - DNA, 15 bp, Homo sapiens
atatcctccacagga

SEQ ID NO: 1544339 - DNA, 15 bp, Homo sapiens
catatcctccacagg

SEQ ID NO: 1544340 - DNA, 15 bp, Homo sapiens
tcatatcctccacag

SEQ ID NO: 1544341 - DNA, 15 bp, Homo sapiens
ctcatatcctccaca

SEQ ID NO: 1544342 - DNA, 15 bp, Homo sapiens
tctcatatcctccac

SEQ ID NO: 1544343 - DNA, 15 bp, Homo sapiens
gtctcatatcctcca

SEQ ID NO: 1544344 - DNA, 15 bp, Homo sapiens
cgtctcatatcctcc

SEQ ID NO: 1544345 - DNA, 15 bp, Homo sapiens
acgtctcatatcctc

SEQ ID NO: 1544346 - DNA, 15 bp, Homo sapiens
tacgtctcatatcct

SEQ ID NO: 1544347 - DNA, 15 bp, Homo sapiens
atacgtctcatatcc

SEQ ID NO: 1544348 - DNA, 15 bp, Homo sapiens
tatacgtctcatatc

SEQ ID NO: 1544349 - DNA, 15 bp, Homo sapiens
gtatacgtctcatat

SEQ ID NO: 1544350 - DNA, 15 bp, Homo sapiens
tgtatacgtctcata

SEQ ID NO: 1544351 - DNA, 15 bp, Homo sapiens
atgtatacgtctcat

SEQ ID NO: 1544352 - DNA, 15 bp, Homo sapiens
aatgtatacgtctca

SEQ ID NO: 1544353 - DNA, 15 bp, Homo sapiens
aaatgtatacgtctc

SEQ ID NO: 1544354 - DNA, 15 bp, Homo sapiens
aaaatgtatacgtct

SEQ ID NO: 1544355 - DNA, 15 bp, Homo sapiens
taaaatgtatacgtc

SEQ ID NO: 1544356 - DNA, 15 bp, Homo sapiens
ataaaatgtatacgt

SEQ ID NO: 1544357 - DNA, 15 bp, Homo sapiens
aataaaatgtatacg

SEQ ID NO: 1544358 - DNA, 15 bp, Homo sapiens
gaataaaatgtatac

SEQ ID NO: 1544359 - DNA, 15 bp, Homo sapiens
agaataaaatgtata

SEQ ID NO: 1544360 - DNA, 15 bp, Homo sapiens
tagaataaaatgtat

SEQ ID NO: 1544361 - DNA, 15 bp, Homo sapiens
ctagaataaaatgta

SEQ ID NO: 1544362 - DNA, 15 bp, Homo sapiens
gctagaataaaatgt

SEQ ID NO: 1544363 - DNA, 15 bp, Homo sapiens
agctagaataaaatg

SEQ ID NO: 1544364 - DNA, 15 bp, Homo sapiens
aagctagaataaaat

SEQ ID NO: 1544365 - DNA, 15 bp, Homo sapiens
taagctagaataaaa

SEQ ID NO: 1544366 - DNA, 15 bp, Homo sapiens
ctaagctagaataaa

SEQ ID NO: 1544367 - DNA, 15 bp, Homo sapiens
cctaagctagaataa

SEQ ID NO: 1544368 - DNA, 15 bp, Homo sapiens
gcctaagctagaata

SEQ ID NO: 1544369 - DNA, 15 bp, Homo sapiens
agcctaagctagaat

SEQ ID NO: 1544370 - DNA, 15 bp, Homo sapiens
cagcctaagctagaa

SEQ ID NO: 1544371 - DNA, 15 bp, Homo sapiens
ccagcctaagctaga

SEQ ID NO: 1544372 - DNA, 15 bp, Homo sapiens
tccagcctaagctag

SEQ ID NO: 1544373 - DNA, 15 bp, Homo sapiens
ttccagcctaagcta

SEQ ID NO: 1544374 - DNA, 15 bp, Homo sapiens
cttccagcctaagct

SEQ ID NO: 1544375 - DNA, 15 bp, Homo sapiens
acttccagcctaagc

SEQ ID NO: 1544376 - DNA, 15 bp, Homo sapiens
tacttccagcctaag

SEQ ID NO: 1544377 - DNA, 15 bp, Homo sapiens
ctacttccagcctaa

SEQ ID NO: 1544378 - DNA, 15 bp, Homo sapiens
tctacttccagccta

SEQ ID NO: 1544379 - DNA, 15 bp, Homo sapiens
ttctacttccagcct

SEQ ID NO: 1544380 - DNA, 15 bp, Homo sapiens
cttctacttccagcc

SEQ ID NO: 1544381 - DNA, 15 bp, Homo sapiens
tcttctacttccagc

SEQ ID NO: 1544382 - DNA, 15 bp, Homo sapiens
ctcttctacttccag

SEQ ID NO: 1544383 - DNA, 15 bp, Homo sapiens
actcttctacttcca

SEQ ID NO: 1544384 - DNA, 15 bp, Homo sapiens
cactcttctacttcc

SEQ ID NO: 1544385 - DNA, 15 bp, Homo sapiens
acactcttctacttc

SEQ ID NO: 1544386 - DNA, 15 bp, Homo sapiens
aacactcttctactt

SEQ ID NO: 1544387 - DNA, 15 bp, Homo sapiens
aaacactcttctact

SEQ ID NO: 1544388 - DNA, 15 bp, Homo sapiens
aaaacactcttctac

SEQ ID NO: 1544389 - DNA, 15 bp, Homo sapiens
caaaacactcttcta

SEQ ID NO: 1544390 - DNA, 15 bp, Homo sapiens
ccaaaacactcttct

SEQ ID NO: 1544391 - DNA, 15 bp, Homo sapiens
tccaaaacactcttc

SEQ ID NO: 1544392 - DNA, 15 bp, Homo sapiens
ctccaaaacactctt

SEQ ID NO: 1544393 - DNA, 15 bp, Homo sapiens
tctccaaaacactct

SEQ ID NO: 1544394 - DNA, 15 bp, Homo sapiens
ctctccaaaacactc

SEQ ID NO: 1544395 - DNA, 15 bp, Homo sapiens
cctctccaaaacact

SEQ ID NO: 1544396 - DNA, 15 bp, Homo sapiens
ccctctccaaaacac

SEQ ID NO: 1544397 - DNA, 15 bp, Homo sapiens
gccctctccaaaaca

SEQ ID NO: 1544398 - DNA, 15 bp, Homo sapiens
tgccctctccaaaac

SEQ ID NO: 1544399 - DNA, 15 bp, Homo sapiens
ttgccctctccaaaa

SEQ ID NO: 1544400 - DNA, 15 bp, Homo sapiens
attgccctctccaaa

SEQ ID NO: 1544401 - DNA, 15 bp, Homo sapiens
aattgccctctccaa

SEQ ID NO: 1544402 - DNA, 15 bp, Homo sapiens
aaattgccctctcca

SEQ ID NO: 1544403 - DNA, 15 bp, Homo sapiens
caaattgccctctcc

SEQ ID NO: 1544404 - DNA, 15 bp, Homo sapiens
acaaattgccctctc

SEQ ID NO: 1544405 - DNA, 15 bp, Homo sapiens
aacaaattgccctct

SEQ ID NO: 1544406 - DNA, 15 bp, Homo sapiens
taacaaattgccctc

SEQ ID NO: 1544407 - DNA, 15 bp, Homo sapiens
ataacaaattgccct

SEQ ID NO: 1544408 - DNA, 15 bp, Homo sapiens
cataacaaattgccc

SEQ ID NO: 1544409 - DNA, 15 bp, Homo sapiens
acataacaaattgcc

SEQ ID NO: 1544410 - DNA, 15 bp, Homo sapiens
gacataacaaattgc

SEQ ID NO: 1544411 - DNA, 15 bp, Homo sapiens
tgacataacaaattg

SEQ ID NO: 1544412 - DNA, 15 bp, Homo sapiens
atgacataacaaatt

SEQ ID NO: 1544413 - DNA, 15 bp, Homo sapiens
aatgacataacaaat

SEQ ID NO: 1544414 - DNA, 15 bp, Homo sapiens
gaatgacataacaaa

SEQ ID NO: 1544415 - DNA, 15 bp, Homo sapiens
tgaatgacataacaa

SEQ ID NO: 1544416 - DNA, 15 bp, Homo sapiens
ttgaatgacataaca

SEQ ID NO: 1544417 - DNA, 15 bp, Homo sapiens
tttgaatgacataac

SEQ ID NO: 1544418 - DNA, 15 bp, Homo sapiens
atttgaatgacataa

SEQ ID NO: 1544419 - DNA, 15 bp, Homo sapiens
aatttgaatgacata

SEQ ID NO: 1544420 - DNA, 15 bp, Homo sapiens
caatttgaatgacat

SEQ ID NO: 1544421 - DNA, 15 bp, Homo sapiens
acaatttgaatgaca

SEQ ID NO: 1544422 - DNA, 15 bp, Homo sapiens
tacaatttgaatgac

SEQ ID NO: 1544423 - DNA, 15 bp, Homo sapiens
ctacaatttgaatga

SEQ ID NO: 1544424 - DNA, 15 bp, Homo sapiens
cctacaatttgaatg

SEQ ID NO: 1544425 - DNA, 15 bp, Homo sapiens
tcctacaatttgaat

SEQ ID NO: 1544426 - DNA, 15 bp, Homo sapiens
ttcctacaatttgaa

SEQ ID NO: 1544427 - DNA, 15 bp, Homo sapiens
attcctacaatttga

SEQ ID NO: 1544428 - DNA, 15 bp, Homo sapiens
cattcctacaatttg

SEQ ID NO: 1544429 - DNA, 15 bp, Homo sapiens
acattcctacaattt

SEQ ID NO: 1544430 - DNA, 15 bp, Homo sapiens
cacattcctacaatt

SEQ ID NO: 1544431 - DNA, 15 bp, Homo sapiens
acacattcctacaat

SEQ ID NO: 1544432 - DNA, 15 bp, Homo sapiens
cacacattcctacaa

SEQ ID NO: 1544433 - DNA, 15 bp, Homo sapiens
ccacacattcctaca

SEQ ID NO: 1544434 - DNA, 15 bp, Homo sapiens
tccacacattcctac

SEQ ID NO: 1544435 - DNA, 15 bp, Homo sapiens
ctccacacattccta

SEQ ID NO: 1544436 - DNA, 15 bp, Homo sapiens
tctccacacattcct

SEQ ID NO: 1544437 - DNA, 15 bp, Homo sapiens
ctctccacacattcc

SEQ ID NO: 1544438 - DNA, 15 bp, Homo sapiens
actctccacacattc

SEQ ID NO: 1544439 - DNA, 15 bp, Homo sapiens
tactctccacacatt

SEQ ID NO: 1544440 - DNA, 15 bp, Homo sapiens
ctactctccacacat

SEQ ID NO: 1544441 - DNA, 15 bp, Homo sapiens
tctactctccacaca

SEQ ID NO: 1544442 - DNA, 15 bp, Homo sapiens
ttctactctccacac

SEQ ID NO: 1544443 - DNA, 15 bp, Homo sapiens
tttctactctccaca

SEQ ID NO: 1544444 - DNA, 15 bp, Homo sapiens
atttctactctccac

SEQ ID NO: 1544445 - DNA, 15 bp, Homo sapiens
aatttctactctcca

SEQ ID NO: 1544446 - DNA, 15 bp, Homo sapiens
taatttctactctcc

SEQ ID NO: 1544447 - DNA, 15 bp, Homo sapiens
gtaatttctactctc

SEQ ID NO: 1544448 - DNA, 15 bp, Homo sapiens
ggtaatttctactct

SEQ ID NO: 1544449 - DNA, 15 bp, Homo sapiens
aggtaatttctactc

SEQ ID NO: 1544450 - DNA, 15 bp, Homo sapiens
taggtaatttctact

SEQ ID NO: 1544451 - DNA, 15 bp, Homo sapiens
ttaggtaatttctac

SEQ ID NO: 1544452 - DNA, 15 bp, Homo sapiens
attaggtaatttcta

SEQ ID NO: 1544453 - DNA, 15 bp, Homo sapiens
cattaggtaatttct

SEQ ID NO: 1544454 - DNA, 15 bp, Homo sapiens
tcattaggtaatttc

SEQ ID NO: 1544455 - DNA, 15 bp, Homo sapiens
ctcattaggtaattt

SEQ ID NO: 1544456 - DNA, 15 bp, Homo sapiens
tctcattaggtaatt

SEQ ID NO: 1544457 - DNA, 15 bp, Homo sapiens
ctctcattaggtaat

SEQ ID NO: 1544458 - DNA, 15 bp, Homo sapiens
actctcattaggtaa

SEQ ID NO: 1544459 - DNA, 15 bp, Homo sapiens
aactctcattaggta

SEQ ID NO: 1544460 - DNA, 15 bp, Homo sapiens
gaactctcattaggt

SEQ ID NO: 1544461 - DNA, 15 bp, Homo sapiens
agaactctcattagg

SEQ ID NO: 1544462 - DNA, 15 bp, Homo sapiens
cagaactctcattag

SEQ ID NO: 1544463 - DNA, 15 bp, Homo sapiens
tcagaactctcatta

SEQ ID NO: 1544464 - DNA, 15 bp, Homo sapiens
atcagaactctcatt

SEQ ID NO: 1544465 - DNA, 15 bp, Homo sapiens
aatcagaactctcat

SEQ ID NO: 1544466 - DNA, 15 bp, Homo sapiens
taatcagaactctca

SEQ ID NO: 1544467 - DNA, 15 bp, Homo sapiens
ataatcagaactctc

SEQ ID NO: 1544468 - DNA, 15 bp, Homo sapiens
aataatcagaactct

SEQ ID NO: 1544469 - DNA, 15 bp, Homo sapiens
taataatcagaactc

SEQ ID NO: 1544470 - DNA, 15 bp, Homo sapiens
gtaataatcagaact

SEQ ID NO: 1544471 - DNA, 15 bp, Homo sapiens
tgtaataatcagaac

SEQ ID NO: 1544472 - DNA, 15 bp, Homo sapiens
atgtaataatcagaa

SEQ ID NO: 1544473 - DNA, 15 bp, Homo sapiens
catgtaataatcaga

SEQ ID NO: 1544474 - DNA, 15 bp, Homo sapiens
gcatgtaataatcag

SEQ ID NO: 1544475 - DNA, 15 bp, Homo sapiens
agcatgtaataatca

SEQ ID NO: 1544476 - DNA, 15 bp, Homo sapiens
aagcatgtaataatc

SEQ ID NO: 1544477 - DNA, 15 bp, Homo sapiens
aaagcatgtaataat

SEQ ID NO: 1544478 - DNA, 15 bp, Homo sapiens
aaaagcatgtaataa

SEQ ID NO: 1544479 - DNA, 15 bp, Homo sapiens
aaaaagcatgtaata

SEQ ID NO: 1544480 - DNA, 15 bp, Homo sapiens
aaaaaagcatgtaat

SEQ ID NO: 1544481 - DNA, 15 bp, Homo sapiens
gaaaaaagcatgtaa

SEQ ID NO: 1544482 - DNA, 15 bp, Homo sapiens
tgaaaaaagcatgta

SEQ ID NO: 1544483 - DNA, 15 bp, Homo sapiens
ctgaaaaaagcatgt

SEQ ID NO: 1544484 - DNA, 15 bp, Homo sapiens
tctgaaaaaagcatg

SEQ ID NO: 1544485 - DNA, 15 bp, Homo sapiens
ctctgaaaaaagcat

SEQ ID NO: 1544486 - DNA, 15 bp, Homo sapiens
actctgaaaaaagca

SEQ ID NO: 1544487 - DNA, 15 bp, Homo sapiens
cactctgaaaaaagc

SEQ ID NO: 1544488 - DNA, 15 bp, Homo sapiens
tcactctgaaaaaag

SEQ ID NO: 1544489 - DNA, 15 bp, Homo sapiens
ctcactctgaaaaaa

SEQ ID NO: 1544490 - DNA, 15 bp, Homo sapiens
cctcactctgaaaaa

SEQ ID NO: 1544491 - DNA, 15 bp, Homo sapiens
tcctcactctgaaaa

SEQ ID NO: 1544492 - DNA, 15 bp, Homo sapiens
ttcctcactctgaaa

SEQ ID NO: 1544493 - DNA, 15 bp, Homo sapiens
gttcctcactctgaa

SEQ ID NO: 1544494 - DNA, 15 bp, Homo sapiens
tgttcctcactctga

SEQ ID NO: 1544495 - DNA, 15 bp, Homo sapiens
atgttcctcactctg

SEQ ID NO: 1544496 - DNA, 15 bp, Homo sapiens
catgttcctcactct

SEQ ID NO: 1544497 - DNA, 15 bp, Homo sapiens
tcatgttcctcactc

SEQ ID NO: 1544498 - DNA, 15 bp, Homo sapiens
ttcatgttcctcact

SEQ ID NO: 1544499 - DNA, 15 bp, Homo sapiens
gttcatgttcctcac

SEQ ID NO: 1544500 - DNA, 15 bp, Homo sapiens
ggttcatgttcctca

SEQ ID NO: 1544501 - DNA, 15 bp, Homo sapiens
aggttcatgttcctc

SEQ ID NO: 1544502 - DNA, 15 bp, Homo sapiens
aaggttcatgttcct

SEQ ID NO: 1544503 - DNA, 15 bp, Homo sapiens
gaaggttcatgttcc

SEQ ID NO: 1544504 - DNA, 15 bp, Homo sapiens
tgaaggttcatgttc

SEQ ID NO: 1544505 - DNA, 15 bp, Homo sapiens
ctgaaggttcatgtt

SEQ ID NO: 1544506 - DNA, 15 bp, Homo sapiens
cctgaaggttcatgt

SEQ ID NO: 1544507 - DNA, 15 bp, Homo sapiens
tcctgaaggttcatg

SEQ ID NO: 1544508 - DNA, 15 bp, Homo sapiens
atcctgaaggttcat

SEQ ID NO: 1544509 - DNA, 15 bp, Homo sapiens
tatcctgaaggttca

SEQ ID NO: 1544510 - DNA, 15 bp, Homo sapiens
ttatcctgaaggttc

SEQ ID NO: 1544511 - DNA, 15 bp, Homo sapiens
tttatcctgaaggtt

SEQ ID NO: 1544512 - DNA, 15 bp, Homo sapiens
ttttatcctgaaggt

SEQ ID NO: 1544513 - DNA, 15 bp, Homo sapiens
attttatcctgaagg

SEQ ID NO: 1544514 - DNA, 15 bp, Homo sapiens
gattttatcctgaag

SEQ ID NO: 1544515 - DNA, 15 bp, Homo sapiens
tgattttatcctgaa

SEQ ID NO: 1544516 - DNA, 15 bp, Homo sapiens
ctgattttatcctga

SEQ ID NO: 1544517 - DNA, 15 bp, Homo sapiens
actgattttatcctg

SEQ ID NO: 1544518 - DNA, 15 bp, Homo sapiens
tactgattttatcct

SEQ ID NO: 1544519 - DNA, 15 bp, Homo sapiens
gtactgattttatcc

SEQ ID NO: 1544520 - DNA, 15 bp, Homo sapiens
agtactgattttatc

SEQ ID NO: 1544521 - DNA, 15 bp, Homo sapiens
aagtactgattttat

SEQ ID NO: 1544522 - DNA, 15 bp, Homo sapiens
aaagtactgatttta

SEQ ID NO: 1544523 - DNA, 15 bp, Homo sapiens
aaaagtactgatttt

SEQ ID NO: 1544524 - DNA, 15 bp, Homo sapiens
gaaaagtactgattt

SEQ ID NO: 1544525 - DNA, 15 bp, Homo sapiens
agaaaagtactgatt

SEQ ID NO: 1544526 - DNA, 15 bp, Homo sapiens
tagaaaagtactgat

SEQ ID NO: 1544527 - DNA, 15 bp, Homo sapiens
atagaaaagtactga

SEQ ID NO: 1544528 - DNA, 15 bp, Homo sapiens
tatagaaaagtactg

SEQ ID NO: 1544529 - DNA, 15 bp, Homo sapiens
ttatagaaaagtact

SEQ ID NO: 1544530 - DNA, 15 bp, Homo sapiens
cttatagaaaagtac

SEQ ID NO: 1544531 - DNA, 15 bp, Homo sapiens
tcttatagaaaagta

SEQ ID NO: 1544532 - DNA, 15 bp, Homo sapiens
atcttatagaaaagt

SEQ ID NO: 1544533 - DNA, 15 bp, Homo sapiens
aatcttatagaaaag

SEQ ID NO: 1544534 - DNA, 15 bp, Homo sapiens
caatcttatagaaaa

SEQ ID NO: 1544535 - DNA, 15 bp, Homo sapiens
acaatcttatagaaa

SEQ ID NO: 1544536 - DNA, 15 bp, Homo sapiens
aacaatcttatagaa

SEQ ID NO: 1544537 - DNA, 15 bp, Homo sapiens
aaacaatcttataga

SEQ ID NO: 1544538 - DNA, 15 bp, Homo sapiens
caaacaatcttatag

SEQ ID NO: 1544539 - DNA, 15 bp, Homo sapiens
acaaacaatcttata

SEQ ID NO: 1544540 - DNA, 15 bp, Homo sapiens
aacaaacaatcttat

SEQ ID NO: 1544541 - DNA, 15 bp, Homo sapiens
aaacaaacaatctta

SEQ ID NO: 1544542 - DNA, 15 bp, Homo sapiens
aaaacaaacaatctt

SEQ ID NO: 1544543 - DNA, 15 bp, Homo sapiens
caaaacaaacaatct

SEQ ID NO: 1544544 - DNA, 15 bp, Homo sapiens
acaaaacaaacaatc

SEQ ID NO: 1544545 - DNA, 15 bp, Homo sapiens
aacaaaacaaacaat

SEQ ID NO: 1544546 - DNA, 15 bp, Homo sapiens
aaacaaaacaaacaa

SEQ ID NO: 1544547 - DNA, 15 bp, Homo sapiens
aaaacaaaacaaaca

SEQ ID NO: 1544548 - DNA, 15 bp, Homo sapiens
caaaacaaaacaaac

SEQ ID NO: 1544549 - DNA, 15 bp, Homo sapiens
atcaaaaaacaaaac

SEQ ID NO: 1544550 - DNA, 15 bp, Homo sapiens
tatcaaaaaacaaaa

SEQ ID NO: 1544551 - DNA, 15 bp, Homo sapiens
atatcaaaaaacaaa

SEQ ID NO: 1544552 - DNA, 15 bp, Homo sapiens
catatcaaaaaacaa

SEQ ID NO: 1544553 - DNA, 15 bp, Homo sapiens
ccatatcaaaaaaca

SEQ ID NO: 1544554 - DNA, 15 bp, Homo sapiens
tccatatcaaaaaac

SEQ ID NO: 1544555 - DNA, 15 bp, Homo sapiens
ctccatatcaaaaaa

SEQ ID NO: 1544556 - DNA, 15 bp, Homo sapiens
actccatatcaaaaa

SEQ ID NO: 1544557 - DNA, 15 bp, Homo sapiens
gactccatatcaaaa

SEQ ID NO: 1544558 - DNA, 15 bp, Homo sapiens
agactccatatcaaa

SEQ ID NO: 1544559 - DNA, 15 bp, Homo sapiens
gagactccatatcaa

SEQ ID NO: 1544560 - DNA, 15 bp, Homo sapiens
gagtgagactccata

SEQ ID NO: 1544561 - DNA, 15 bp, Homo sapiens
aggcaacagagtgag

SEQ ID NO: 1544562 - DNA, 15 bp, Homo sapiens
taggcaacagagtga

SEQ ID NO: 1544563 - DNA, 15 bp, Homo sapiens
ctaggcaacagagtg

SEQ ID NO: 1544564 - DNA, 15 bp, Homo sapiens
cctaggcaacagagt

SEQ ID NO: 1544565 - DNA, 15 bp, Homo sapiens
tctgagatcacgcca

SEQ ID NO: 1544566 - DNA, 15 bp, Homo sapiens
ctctgagatcacgcc

SEQ ID NO: 1544567 - DNA, 15 bp, Homo sapiens
actctgagatcacgc

SEQ ID NO: 1544568 - DNA, 15 bp, Homo sapiens
cactctgagatcacg

SEQ ID NO: 1544569 - DNA, 15 bp, Homo sapiens
gcactctgagatcac

SEQ ID NO: 1544570 - DNA, 15 bp, Homo sapiens
tgcactctgagatca

SEQ ID NO: 1544571 - DNA, 15 bp, Homo sapiens
ctgcactctgagatc

SEQ ID NO: 1544572 - DNA, 15 bp, Homo sapiens
actgcactctgagat

SEQ ID NO: 1544573 - DNA, 15 bp, Homo sapiens
cactgcactctgaga

SEQ ID NO: 1544574 - DNA, 15 bp, Homo sapiens
ccactgcactctgag

SEQ ID NO: 1544575 - DNA, 15 bp, Homo sapiens
gccactgcactctga

SEQ ID NO: 1544576 - DNA, 15 bp, Homo sapiens
cgccactgcactctg

SEQ ID NO: 1544577 - DNA, 15 bp, Homo sapiens
acgccactgcactct

SEQ ID NO: 1544578 - DNA, 15 bp, Homo sapiens
tgccactgcactctg

SEQ ID NO: 1544579 - DNA, 15 bp, Homo sapiens
gctgaggcagcagaa

SEQ ID NO: 1544580 - DNA, 15 bp, Homo sapiens
ggctgaggcagcaga

SEQ ID NO: 1544581 - DNA, 15 bp, Homo sapiens
atcccagctactggg

SEQ ID NO: 1544582 - DNA, 15 bp, Homo sapiens
aatcccagctactgg

SEQ ID NO: 1544583 - DNA, 15 bp, Homo sapiens
gcgcctataatccca

SEQ ID NO: 1544584 - DNA, 15 bp, Homo sapiens
ggcgcctataatccc

SEQ ID NO: 1544585 - DNA, 15 bp, Homo sapiens
gggcgcctataatcc

SEQ ID NO: 1544586 - DNA, 15 bp, Homo sapiens
tgggcgcctataatc

SEQ ID NO: 1544587 - DNA, 15 bp, Homo sapiens
gtgggcgcctataat

SEQ ID NO: 1544588 - DNA, 15 bp, Homo sapiens
ggtgggcgcctataa

SEQ ID NO: 1544589 - DNA, 15 bp, Homo sapiens
cggtgggcgcctata

SEQ ID NO: 1544590 - DNA, 15 bp, Homo sapiens
gcggtgggcgcctat

SEQ ID NO: 1544591 - DNA, 15 bp, Homo sapiens
ggcggtgggcgccta

SEQ ID NO: 1544592 - DNA, 15 bp, Homo sapiens
tggcggtgggcgcct

SEQ ID NO: 1544593 - DNA, 15 bp, Homo sapiens
gtggcggtgggcgcc

SEQ ID NO: 1544594 - DNA, 15 bp, Homo sapiens
cgtggcggtgggcgc

SEQ ID NO: 1544595 - DNA, 15 bp, Homo sapiens
ccgtggcggtgggcg

SEQ ID NO: 1544596 - DNA, 15 bp, Homo sapiens
gccgtggcggtgggc

SEQ ID NO: 1544597 - DNA, 15 bp, Homo sapiens
tgccgtggcggtggg

SEQ ID NO: 1544598 - DNA, 15 bp, Homo sapiens
ctgccgtggcggtgg

SEQ ID NO: 1544599 - DNA, 15 bp, Homo sapiens
cctgccgtggcggtg

SEQ ID NO: 1544600 - DNA, 15 bp, Homo sapiens
gcctgccgtggcggt

SEQ ID NO: 1544601 - DNA, 15 bp, Homo sapiens
agcctgccgtggcgg

SEQ ID NO: 1544602 - DNA, 15 bp, Homo sapiens
tagcctgccgtggcg

SEQ ID NO: 1544603 - DNA, 15 bp, Homo sapiens
ctagcctgccgtggc

SEQ ID NO: 1544604 - DNA, 15 bp, Homo sapiens
actagcctgccgtgg

SEQ ID NO: 1544605 - DNA, 15 bp, Homo sapiens
aactagcctgccgtg

SEQ ID NO: 1544606 - DNA, 15 bp, Homo sapiens
aaactagcctgccgt

SEQ ID NO: 1544607 - DNA, 15 bp, Homo sapiens
aaaactagcctgccg

SEQ ID NO: 1544608 - DNA, 15 bp, Homo sapiens
aaaaactagcctgcc

SEQ ID NO: 1544609 - DNA, 15 bp, Homo sapiens
caaaaactagcctgc

SEQ ID NO: 1544610 - DNA, 15 bp, Homo sapiens
acaaaaactagcctg

SEQ ID NO: 1544611 - DNA, 15 bp, Homo sapiens
tacaaaaactagcct

SEQ ID NO: 1544612 - DNA, 15 bp, Homo sapiens
ctacaaaaactagcc

SEQ ID NO: 1544613 - DNA, 15 bp, Homo sapiens
cctacaaaaactagc

SEQ ID NO: 1544614 - DNA, 15 bp, Homo sapiens
acctacaaaaactag

SEQ ID NO: 1544615 - DNA, 15 bp, Homo sapiens
aacctacaaaaacta

SEQ ID NO: 1544616 - DNA, 15 bp, Homo sapiens
aaacctacaaaaact

SEQ ID NO: 1544617 - DNA, 15 bp, Homo sapiens
taaacctacaaaaac

SEQ ID NO: 1544618 - DNA, 15 bp, Homo sapiens
ctaaacctacaaaaa

SEQ ID NO: 1544619 - DNA, 15 bp, Homo sapiens
actaaacctacaaaa

SEQ ID NO: 1544620 - DNA, 15 bp, Homo sapiens
tactaaacctacaaa

SEQ ID NO: 1544621 - DNA, 15 bp, Homo sapiens
ctactaaacctacaa

SEQ ID NO: 1544622 - DNA, 15 bp, Homo sapiens
tctactaaacctaca

SEQ ID NO: 1544623 - DNA, 15 bp, Homo sapiens
ctctactaaacctac

SEQ ID NO: 1544624 - DNA, 15 bp, Homo sapiens
tctctactaaaccta

SEQ ID NO: 1544625 - DNA, 15 bp, Homo sapiens
gtctctactaaacct

SEQ ID NO: 1544626 - DNA, 15 bp, Homo sapiens
tgtctctactaaacc

SEQ ID NO: 1544627 - DNA, 15 bp, Homo sapiens
ttgtctctactaaac

SEQ ID NO: 1544628 - DNA, 15 bp, Homo sapiens
caaccttgtctctac

SEQ ID NO: 1544629 - DNA, 15 bp, Homo sapiens
acaaccttgtctcta

SEQ ID NO: 1544630 - DNA, 15 bp, Homo sapiens
aacaaccttgtctct

SEQ ID NO: 1544631 - DNA, 15 bp, Homo sapiens
caacaaccttgtctc

SEQ ID NO: 1544632 - DNA, 15 bp, Homo sapiens
ccaacaaccttgtct

SEQ ID NO: 1544633 - DNA, 15 bp, Homo sapiens
gccaacaaccttgtc

SEQ ID NO: 1544634 - DNA, 15 bp, Homo sapiens
ggccaacaaccttgt

SEQ ID NO: 1544635 - DNA, 15 bp, Homo sapiens
tggccaacaaccttg

SEQ ID NO: 1544636 - DNA, 15 bp, Homo sapiens
ctggccaacaacctt

SEQ ID NO: 1544637 - DNA, 15 bp, Homo sapiens
cctggccaacaacct

SEQ ID NO: 1544638 - DNA, 15 bp, Homo sapiens
gcctggccaacaacc

SEQ ID NO: 1544639 - DNA, 15 bp, Homo sapiens
agcctggccaacaac

SEQ ID NO: 1544640 - DNA, 15 bp, Homo sapiens
gatcagcctggccaa

SEQ ID NO: 1544641 - DNA, 15 bp, Homo sapiens
tgatcagcctggcca

SEQ ID NO: 1544642 - DNA, 15 bp, Homo sapiens
gtgatcagcctggcc

SEQ ID NO: 1544643 - DNA, 15 bp, Homo sapiens
cgtgatcagcctggc

SEQ ID NO: 1544644 - DNA, 15 bp, Homo sapiens
tcgtgatcagcctgg

SEQ ID NO: 1544645 - DNA, 15 bp, Homo sapiens
ttcgtgatcagcctg

SEQ ID NO: 1544646 - DNA, 15 bp, Homo sapiens
gttcgtgatcagcct

SEQ ID NO: 1544647 - DNA, 15 bp, Homo sapiens
agttcgtgatcagcc

SEQ ID NO: 1544648 - DNA, 15 bp, Homo sapiens
gagttcgtgatcagc

SEQ ID NO: 1544649 - DNA, 15 bp, Homo sapiens
ggagttcgtgatcag

SEQ ID NO: 1544650 - DNA, 15 bp, Homo sapiens
aggagttcgtgatca

SEQ ID NO: 1544651 - DNA, 15 bp, Homo sapiens
caggagttcgtgatc

SEQ ID NO: 1544652 - DNA, 15 bp, Homo sapiens
tcaggagttcgtgat

SEQ ID NO: 1544653 - DNA, 15 bp, Homo sapiens
gtgggcagatcactt

SEQ ID NO: 1544654 - DNA, 15 bp, Homo sapiens
ggtgggcagatcact

SEQ ID NO: 1544655 - DNA, 15 bp, Homo sapiens
atccctgtaatccca

SEQ ID NO: 1544656 - DNA, 15 bp, Homo sapiens
catccctgtaatccc

SEQ ID NO: 1544657 - DNA, 15 bp, Homo sapiens
tcatccctgtaatcc

SEQ ID NO: 1544658 - DNA, 15 bp, Homo sapiens
ctcatccctgtaatc

SEQ ID NO: 1544659 - DNA, 15 bp, Homo sapiens
gctcatccctgtaat

SEQ ID NO: 1544660 - DNA, 15 bp, Homo sapiens
ggctcatccctgtaa

SEQ ID NO: 1544661 - DNA, 15 bp, Homo sapiens
tggctcatccctgta

SEQ ID NO: 1544662 - DNA, 15 bp, Homo sapiens
gtggctcatccctgt

SEQ ID NO: 1544663 - DNA, 15 bp, Homo sapiens
agtggctcatccctg

SEQ ID NO: 1544664 - DNA, 15 bp, Homo sapiens
cagtggctcatccct

SEQ ID NO: 1544665 - DNA, 15 bp, Homo sapiens
gcagtggctcatccc

SEQ ID NO: 1544666 - DNA, 15 bp, Homo sapiens
tgcagtggctcatcc

SEQ ID NO: 1544667 - DNA, 15 bp, Homo sapiens
gtgcagtggctcatc

SEQ ID NO: 1544668 - DNA, 15 bp, Homo sapiens
ggtgcagtggctcat

SEQ ID NO: 1544669 - DNA, 15 bp, Homo sapiens
gaaggccgggtgcag

SEQ ID NO: 1544670 - DNA, 15 bp, Homo sapiens
agaaggccgggtgca

SEQ ID NO: 1544671 - DNA, 15 bp, Homo sapiens
tagaaggccgggtgc

SEQ ID NO: 1544672 - DNA, 15 bp, Homo sapiens
atagaaggccgggtg

SEQ ID NO: 1544673 - DNA, 15 bp, Homo sapiens
tatagaaggccgggt

SEQ ID NO: 1544674 - DNA, 15 bp, Homo sapiens
ttatagaaggccggg

SEQ ID NO: 1544675 - DNA, 15 bp, Homo sapiens
cttatagaaggccgg

SEQ ID NO: 1544676 - DNA, 15 bp, Homo sapiens
tcttatagaaggccg

SEQ ID NO: 1544677 - DNA, 15 bp, Homo sapiens
atcttatagaaggcc

SEQ ID NO: 1544678 - DNA, 15 bp, Homo sapiens
aatcttatagaaggc

SEQ ID NO: 1544679 - DNA, 15 bp, Homo sapiens
gaatcttatagaagg

SEQ ID NO: 1544680 - DNA, 15 bp, Homo sapiens
agaatcttatagaag

SEQ ID NO: 1544681 - DNA, 15 bp, Homo sapiens
aagaatcttatagaa

SEQ ID NO: 1544682 - DNA, 15 bp, Homo sapiens
caagaatcttataga

SEQ ID NO: 1544683 - DNA, 15 bp, Homo sapiens
tcaagaatcttatag

SEQ ID NO: 1544684 - DNA, 15 bp, Homo sapiens
gtcaagaatcttata

SEQ ID NO: 1544685 - DNA, 15 bp, Homo sapiens
ggtcaagaatcttat

SEQ ID NO: 1544686 - DNA, 15 bp, Homo sapiens
aggtcaagaatctta

SEQ ID NO: 1544687 - DNA, 15 bp, Homo sapiens
aaggtcaagaatctt

SEQ ID NO: 1544688 - DNA, 15 bp, Homo sapiens
aaaggtcaagaatct

SEQ ID NO: 1544689 - DNA, 15 bp, Homo sapiens
aaaaggtcaagaatc

SEQ ID NO: 1544690 - DNA, 15 bp, Homo sapiens
aaaaaggtcaagaat

SEQ ID NO: 1544691 - DNA, 15 bp, Homo sapiens
taaaaaggtcaagaa

SEQ ID NO: 1544692 - DNA, 15 bp, Homo sapiens
ttaaaaaggtcaaga

SEQ ID NO: 1544693 - DNA, 15 bp, Homo sapiens
tttaaaaaggtcaag

SEQ ID NO: 1544694 - DNA, 15 bp, Homo sapiens
ttttaaaaaggtcaa

SEQ ID NO: 1544695 - DNA, 15 bp, Homo sapiens
tttttaaaaaggtca

SEQ ID NO: 1544696 - DNA, 15 bp, Homo sapiens
ctttttaaaaaggtc

SEQ ID NO: 1544697 - DNA, 15 bp, Homo sapiens
cctttttaaaaaggt

SEQ ID NO: 1544698 - DNA, 15 bp, Homo sapiens
tcctttttaaaaagg

SEQ ID NO: 1544699 - DNA, 15 bp, Homo sapiens
ttcctttttaaaaag

SEQ ID NO: 1544700 - DNA, 15 bp, Homo sapiens
attttcctttttaaa

SEQ ID NO: 1544701 - DNA, 15 bp, Homo sapiens
aattttcctttttaa

SEQ ID NO: 1544702 - DNA, 15 bp, Homo sapiens
taattttccttttta

SEQ ID NO: 1544703 - DNA, 15 bp, Homo sapiens
ttaattttccttttt

SEQ ID NO: 1544704 - DNA, 15 bp, Homo sapiens
tttaattttcctttt

SEQ ID NO: 1544705 - DNA, 15 bp, Homo sapiens
ttttaattttccttt

SEQ ID NO: 1544706 - DNA, 15 bp, Homo sapiens
tttttaattttcctt

SEQ ID NO: 1544707 - DNA, 15 bp, Homo sapiens
ttttttaattttcct

SEQ ID NO: 1544708 - DNA, 15 bp, Homo sapiens
attttttaattttcc

SEQ ID NO: 1544709 - DNA, 15 bp, Homo sapiens
aattttttaattttc

SEQ ID NO: 1544710 - DNA, 15 bp, Homo sapiens
aaattttttaatttt

SEQ ID NO: 1544711 - DNA, 15 bp, Homo sapiens
aaaattttttaattt

SEQ ID NO: 1544712 - DNA, 15 bp, Homo sapiens
aaaaattttttaatt

SEQ ID NO: 1544713 - DNA, 15 bp, Homo sapiens
taaaaattttttaat

SEQ ID NO: 1544714 - DNA, 15 bp, Homo sapiens
ttaaaaattttttaa

SEQ ID NO: 1544715 - DNA, 15 bp, Homo sapiens
tttaaaaatttttta

SEQ ID NO: 1544716 - DNA, 15 bp, Homo sapiens
atttaaaaatttttt

SEQ ID NO: 1544717 - DNA, 15 bp, Homo sapiens
catttaaaaattttt

SEQ ID NO: 1544718 - DNA, 15 bp, Homo sapiens
acatttaaaaatttt

SEQ ID NO: 1544719 - DNA, 15 bp, Homo sapiens
aacatttaaaaattt

SEQ ID NO: 1544720 - DNA, 15 bp, Homo sapiens
caaaaaacatttaaa

SEQ ID NO: 1544721 - DNA, 15 bp, Homo sapiens
acaaaaaacatttaa

SEQ ID NO: 1544722 - DNA, 15 bp, Homo sapiens
aacaaaaaacattta

SEQ ID NO: 1544723 - DNA, 15 bp, Homo sapiens
aaacaaaaaacattt

SEQ ID NO: 1544724 - DNA, 15 bp, Homo sapiens
gaaacaaaaaacatt

SEQ ID NO: 1544725 - DNA, 15 bp, Homo sapiens
agaaacaaaaaacat

SEQ ID NO: 1544726 - DNA, 15 bp, Homo sapiens
aagaaacaaaaaaca

SEQ ID NO: 1544727 - DNA, 15 bp, Homo sapiens
aaagaaacaaaaaac

SEQ ID NO: 1544728 - DNA, 15 bp, Homo sapiens
aaaagaaacaaaaaa

SEQ ID NO: 1544729 - DNA, 15 bp, Homo sapiens
caaaagaaacaaaaa

SEQ ID NO: 1544730 - DNA, 15 bp, Homo sapiens
tcaaaagaaacaaaa

SEQ ID NO: 1544731 - DNA, 15 bp, Homo sapiens
ctcaaaagaaacaaa

SEQ ID NO: 1544732 - DNA, 15 bp, Homo sapiens
tctcaaaagaaacaa

SEQ ID NO: 1544733 - DNA, 15 bp, Homo sapiens
ttctcaaaagaaaca

SEQ ID NO: 1544734 - DNA, 15 bp, Homo sapiens
gttctcaaaagaaac

SEQ ID NO: 1544735 - DNA, 15 bp, Homo sapiens
tgttctcaaaagaaa

SEQ ID NO: 1544736 - DNA, 15 bp, Homo sapiens
atgttctcaaaagaa

SEQ ID NO: 1544737 - DNA, 15 bp, Homo sapiens
aatgttctcaaaaga

SEQ ID NO: 1544738 - DNA, 15 bp, Homo sapiens
aaatgttctcaaaag

SEQ ID NO: 1544739 - DNA, 15 bp, Homo sapiens
taaatgttctcaaaa

SEQ ID NO: 1544740 - DNA, 15 bp, Homo sapiens
ataaatgttctcaaa

SEQ ID NO: 1544741 - DNA, 15 bp, Homo sapiens
gataaatgttctcaa

SEQ ID NO: 1544742 - DNA, 15 bp, Homo sapiens
tgataaatgttctca

SEQ ID NO: 1544743 - DNA, 15 bp, Homo sapiens
atgataaatgttctc

SEQ ID NO: 1544744 - DNA, 15 bp, Homo sapiens
tatgataaatgttct

SEQ ID NO: 1544745 - DNA, 15 bp, Homo sapiens
ttatgataaatgttc

SEQ ID NO: 1544746 - DNA, 15 bp, Homo sapiens
attatgataaatgtt

SEQ ID NO: 1544747 - DNA, 15 bp, Homo sapiens
tattatgataaatgt

SEQ ID NO: 1544748 - DNA, 15 bp, Homo sapiens
ttattatgataaatg

SEQ ID NO: 1544749 - DNA, 15 bp, Homo sapiens
attattatgataaat

SEQ ID NO: 1544750 - DNA, 15 bp, Homo sapiens
aattattatgataaa

SEQ ID NO: 1544751 - DNA, 15 bp, Homo sapiens
taattattatgataa

SEQ ID NO: 1544752 - DNA, 15 bp, Homo sapiens
gtaattattatgata

SEQ ID NO: 1544753 - DNA, 15 bp, Homo sapiens
agtaattattatgat

SEQ ID NO: 1544754 - DNA, 15 bp, Homo sapiens
cagtaattattatga

SEQ ID NO: 1544755 - DNA, 15 bp, Homo sapiens
tcagtaattattatg

SEQ ID NO: 1544756 - DNA, 15 bp, Homo sapiens
ttcagtaattattat

SEQ ID NO: 1544757 - DNA, 15 bp, Homo sapiens
gttcagtaattatta

SEQ ID NO: 1544758 - DNA, 15 bp, Homo sapiens
ggttcagtaattatt

SEQ ID NO: 1544759 - DNA, 15 bp, Homo sapiens
tggttcagtaattat

SEQ ID NO: 1544760 - DNA, 15 bp, Homo sapiens
atggttcagtaatta

SEQ ID NO: 1544761 - DNA, 15 bp, Homo sapiens
aatggttcagtaatt

SEQ ID NO: 1544762 - DNA, 15 bp, Homo sapiens
aaatggttcagtaat

SEQ ID NO: 1544763 - DNA, 15 bp, Homo sapiens
caaatggttcagtaa

SEQ ID NO: 1544764 - DNA, 15 bp, Homo sapiens
tcaaatggttcagta

SEQ ID NO: 1544765 - DNA, 15 bp, Homo sapiens
ttcaaatggttcagt

SEQ ID NO: 1544766 - DNA, 15 bp, Homo sapiens
attcaaatggttcag

SEQ ID NO: 1544767 - DNA, 15 bp, Homo sapiens
tattcaaatggttca

SEQ ID NO: 1544768 - DNA, 15 bp, Homo sapiens
atattcaaatggttc

SEQ ID NO: 1544769 - DNA, 15 bp, Homo sapiens
tatattcaaatggtt

SEQ ID NO: 1544770 - DNA, 15 bp, Homo sapiens
gtatattcaaatggt

SEQ ID NO: 1544771 - DNA, 15 bp, Homo sapiens
tgtatattcaaatgg

SEQ ID NO: 1544772 - DNA, 15 bp, Homo sapiens
ttgtatattcaaatg

SEQ ID NO: 1544773 - DNA, 15 bp, Homo sapiens
attgtatattcaaat

SEQ ID NO: 1544774 - DNA, 15 bp, Homo sapiens
cattgtatattcaaa

SEQ ID NO: 1544775 - DNA, 15 bp, Homo sapiens
ccattgtatattcaa

SEQ ID NO: 1544776 - DNA, 15 bp, Homo sapiens
accattgtatattca

SEQ ID NO: 1544777 - DNA, 15 bp, Homo sapiens
caccattgtatattc

SEQ ID NO: 1544778 - DNA, 15 bp, Homo sapiens
ccaccattgtatatt

SEQ ID NO: 1544779 - DNA, 15 bp, Homo sapiens
cccaccattgtatat

SEQ ID NO: 1544780 - DNA, 15 bp, Homo sapiens
tcccaccattgtata

SEQ ID NO: 1544781 - DNA, 15 bp, Homo sapiens
ttcccaccattgtat

SEQ ID NO: 1544782 - DNA, 15 bp, Homo sapiens
gttcccaccattgta

SEQ ID NO: 1544783 - DNA, 15 bp, Homo sapiens
agttcccaccattgt

SEQ ID NO: 1544784 - DNA, 15 bp, Homo sapiens
gagttcccaccattg

SEQ ID NO: 1544785 - DNA, 15 bp, Homo sapiens
agagttcccaccatt

SEQ ID NO: 1544786 - DNA, 15 bp, Homo sapiens
aagagttcccaccat

SEQ ID NO: 1544787 - DNA, 15 bp, Homo sapiens
gaagagttcccacca

SEQ ID NO: 1544788 - DNA, 15 bp, Homo sapiens
ggaagagttcccacc

SEQ ID NO: 1544789 - DNA, 15 bp, Homo sapiens
aggaagagttcccac

SEQ ID NO: 1544790 - DNA, 15 bp, Homo sapiens
aaggaagagttccca

SEQ ID NO: 1544791 - DNA, 15 bp, Homo sapiens
taaggaagagttccc

SEQ ID NO: 1544792 - DNA, 15 bp, Homo sapiens
ttaaggaagagttcc

SEQ ID NO: 1544793 - DNA, 15 bp, Homo sapiens
tttaaggaagagttc

SEQ ID NO: 1544794 - DNA, 15 bp, Homo sapiens
atttaaggaagagtt

SEQ ID NO: 1544795 - DNA, 15 bp, Homo sapiens
catttaaggaagagt

SEQ ID NO: 1544796 - DNA, 15 bp, Homo sapiens
ccatttaaggaagag

SEQ ID NO: 1544797 - DNA, 15 bp, Homo sapiens
gccatttaaggaaga

SEQ ID NO: 1544798 - DNA, 15 bp, Homo sapiens
tgccatttaaggaag

SEQ ID NO: 1544799 - DNA, 15 bp, Homo sapiens
atgccatttaaggaa

SEQ ID NO: 1544800 - DNA, 15 bp, Homo sapiens
tatgccatttaagga

SEQ ID NO: 1544801 - DNA, 15 bp, Homo sapiens
ctatgccatttaagg

SEQ ID NO: 1544802 - DNA, 15 bp, Homo sapiens
actatgccatttaag

SEQ ID NO: 1544803 - DNA, 15 bp, Homo sapiens
cactatgccatttaa

SEQ ID NO: 1544804 - DNA, 15 bp, Homo sapiens
acactatgccattta

SEQ ID NO: 1544805 - DNA, 15 bp, Homo sapiens
aacactatgccattt

SEQ ID NO: 1544806 - DNA, 15 bp, Homo sapiens
aaacactatgccatt

SEQ ID NO: 1544807 - DNA, 15 bp, Homo sapiens
aaaacactatgccat

SEQ ID NO: 1544808 - DNA, 15 bp, Homo sapiens
caaaacactatgcca

SEQ ID NO: 1544809 - DNA, 15 bp, Homo sapiens
acaaaacactatgcc

SEQ ID NO: 1544810 - DNA, 15 bp, Homo sapiens
aacaaaacactatgc

SEQ ID NO: 1544811 - DNA, 15 bp, Homo sapiens
aaacaaaacactatg

SEQ ID NO: 1544812 - DNA, 15 bp, Homo sapiens
caaacaaaacactat

SEQ ID NO: 1544813 - DNA, 15 bp, Homo sapiens
ccaaacaaaacacta

SEQ ID NO: 1544814 - DNA, 15 bp, Homo sapiens
accaaacaaaacact

SEQ ID NO: 1544815 - DNA, 15 bp, Homo sapiens
aaccaaacaaaacac

SEQ ID NO: 1544816 - DNA, 15 bp, Homo sapiens
caaccaaacaaaaca

SEQ ID NO: 1544817 - DNA, 15 bp, Homo sapiens
ccaaccaaacaaaac

SEQ ID NO: 1544818 - DNA, 15 bp, Homo sapiens
accaaccaaacaaaa

SEQ ID NO: 1544819 - DNA, 15 bp, Homo sapiens
accaaccaaccaaac

SEQ ID NO: 1544820 - DNA, 15 bp, Homo sapiens
aaccaaccaaccaaa

SEQ ID NO: 1544821 - DNA, 15 bp, Homo sapiens
aaaccaaccaaccaa

SEQ ID NO: 1544822 - DNA, 15 bp, Homo sapiens
gaaaccaaccaacca

SEQ ID NO: 1544823 - DNA, 15 bp, Homo sapiens
agaaaccaaccaacc

SEQ ID NO: 1544824 - DNA, 15 bp, Homo sapiens
cagaaaccaaccaac

SEQ ID NO: 1544825 - DNA, 15 bp, Homo sapiens
ccagaaaccaaccaa

SEQ ID NO: 1544826 - DNA, 15 bp, Homo sapiens
tccagaaaccaacca

SEQ ID NO: 1544827 - DNA, 15 bp, Homo sapiens
ctccagaaaccaacc

SEQ ID NO: 1544828 - DNA, 15 bp, Homo sapiens
gctccagaaaccaac

SEQ ID NO: 1544829 - DNA, 15 bp, Homo sapiens
ggctccagaaaccaa

SEQ ID NO: 1544830 - DNA, 15 bp, Homo sapiens
aggctccagaaacca

SEQ ID NO: 1544831 - DNA, 15 bp, Homo sapiens
aaggctccagaaacc

SEQ ID NO: 1544832 - DNA, 15 bp, Homo sapiens
aaaggctccagaaac

SEQ ID NO: 1544833 - DNA, 15 bp, Homo sapiens
aaaaggctccagaaa

SEQ ID NO: 1544834 - DNA, 15 bp, Homo sapiens
taaaaggctccagaa

SEQ ID NO: 1544835 - DNA, 15 bp, Homo sapiens
ctaaaaggctccaga

SEQ ID NO: 1544836 - DNA, 15 bp, Homo sapiens
tctaaaaggctccag

SEQ ID NO: 1544837 - DNA, 15 bp, Homo sapiens
ttctaaaaggctcca

SEQ ID NO: 1544838 - DNA, 15 bp, Homo sapiens
attctaaaaggctcc

SEQ ID NO: 1544839 - DNA, 15 bp, Homo sapiens
aattctaaaaggctc

SEQ ID NO: 1544840 - DNA, 15 bp, Homo sapiens
aaattctaaaaggct

SEQ ID NO: 1544841 - DNA, 15 bp, Homo sapiens
aaaattctaaaaggc

SEQ ID NO: 1544842 - DNA, 15 bp, Homo sapiens
taaaattctaaaagg

SEQ ID NO: 1544843 - DNA, 15 bp, Homo sapiens
ataaaattctaaaag

SEQ ID NO: 1544844 - DNA, 15 bp, Homo sapiens
cataaaattctaaaa

SEQ ID NO: 1544845 - DNA, 15 bp, Homo sapiens
acataaaattctaaa

SEQ ID NO: 1544846 - DNA, 15 bp, Homo sapiens
tacataaaattctaa

SEQ ID NO: 1544847 - DNA, 15 bp, Homo sapiens
ttacataaaattcta

SEQ ID NO: 1544848 - DNA, 15 bp, Homo sapiens
tttacataaaattct

SEQ ID NO: 1544849 - DNA, 15 bp, Homo sapiens
ttttacataaaattc

SEQ ID NO: 1544850 - DNA, 15 bp, Homo sapiens
cttttacataaaatt

SEQ ID NO: 1544851 - DNA, 15 bp, Homo sapiens
tcttttacataaaat

SEQ ID NO: 1544852 - DNA, 15 bp, Homo sapiens
ctcttttacataaaa

SEQ ID NO: 1544853 - DNA, 15 bp, Homo sapiens
actcttttacataaa

SEQ ID NO: 1544854 - DNA, 15 bp, Homo sapiens
aactcttttacataa

SEQ ID NO: 1544855 - DNA, 15 bp, Homo sapiens
aaactcttttacata

SEQ ID NO: 1544856 - DNA, 15 bp, Homo sapiens
taaactcttttacat

SEQ ID NO: 1544857 - DNA, 15 bp, Homo sapiens
ttaaactcttttaca

SEQ ID NO: 1544858 - DNA, 15 bp, Homo sapiens
attaaactcttttac

SEQ ID NO: 1544859 - DNA, 15 bp, Homo sapiens
aattaaactctttta

SEQ ID NO: 1544860 - DNA, 15 bp, Homo sapiens
gaattaaactctttt

SEQ ID NO: 1544861 - DNA, 15 bp, Homo sapiens
agaattaaactcttt

SEQ ID NO: 1544862 - DNA, 15 bp, Homo sapiens
aagaattaaactctt

SEQ ID NO: 1544863 - DNA, 15 bp, Homo sapiens
gaagaattaaactct

SEQ ID NO: 1544864 - DNA, 15 bp, Homo sapiens
agaagaattaaactc

SEQ ID NO: 1544865 - DNA, 15 bp, Homo sapiens
gagaagaattaaact

SEQ ID NO: 1544866 - DNA, 15 bp, Homo sapiens
ggagaagaattaaac

SEQ ID NO: 1544867 - DNA, 15 bp, Homo sapiens
tggagaagaattaaa

SEQ ID NO: 1544868 - DNA, 15 bp, Homo sapiens
gtggagaagaattaa

SEQ ID NO: 1544869 - DNA, 15 bp, Homo sapiens
agtggagaagaatta

SEQ ID NO: 1544870 - DNA, 15 bp, Homo sapiens
aagtggagaagaatt

SEQ ID NO: 1544871 - DNA, 15 bp, Homo sapiens
gaagtggagaagaat

SEQ ID NO: 1544872 - DNA, 15 bp, Homo sapiens
tgaagtggagaagaa

SEQ ID NO: 1544873 - DNA, 15 bp, Homo sapiens
gtgaagtggagaaga

SEQ ID NO: 1544874 - DNA, 15 bp, Homo sapiens
ggtgaagtggagaag

SEQ ID NO: 1544875 - DNA, 15 bp, Homo sapiens
gggtgaagtggagaa

SEQ ID NO: 1544876 - DNA, 15 bp, Homo sapiens
ggggtgaagtggaga

SEQ ID NO: 1544877 - DNA, 15 bp, Homo sapiens
cggggtgaagtggag

SEQ ID NO: 1544878 - DNA, 15 bp, Homo sapiens
acggggtgaagtgga

SEQ ID NO: 1544879 - DNA, 15 bp, Homo sapiens
gacggggtgaagtgg

SEQ ID NO: 1544880 - DNA, 15 bp, Homo sapiens
tgacggggtgaagtg

SEQ ID NO: 1544881 - DNA, 15 bp, Homo sapiens
gtgacggggtgaagt

SEQ ID NO: 1544882 - DNA, 15 bp, Homo sapiens
ggtgacggggtgaag

SEQ ID NO: 1544883 - DNA, 15 bp, Homo sapiens
tggtgacggggtgaa

SEQ ID NO: 1544884 - DNA, 15 bp, Homo sapiens
gtggtgacggggtga

SEQ ID NO: 1544885 - DNA, 15 bp, Homo sapiens
ggtggtgacggggtg

SEQ ID NO: 1544886 - DNA, 15 bp, Homo sapiens
tggtggtgacggggt

SEQ ID NO: 1544887 - DNA, 15 bp, Homo sapiens
gtggtggtgacgggg

SEQ ID NO: 1544888 - DNA, 15 bp, Homo sapiens
agtggtggtgacggg

SEQ ID NO: 1544889 - DNA, 15 bp, Homo sapiens
aagtggtggtgacgg

SEQ ID NO: 1544890 - DNA, 15 bp, Homo sapiens
aaagtggtggtgacg

SEQ ID NO: 1544891 - DNA, 15 bp, Homo sapiens
gaaagtggtggtgac

SEQ ID NO: 1544892 - DNA, 15 bp, Homo sapiens
ggaaagtggtggtga

SEQ ID NO: 1544893 - DNA, 15 bp, Homo sapiens
tggaaagtggtggtg

SEQ ID NO: 1544894 - DNA, 15 bp, Homo sapiens
ctggaaagtggtggt

SEQ ID NO: 1544895 - DNA, 15 bp, Homo sapiens
cctggaaagtggtgg

SEQ ID NO: 1544896 - DNA, 15 bp, Homo sapiens
acctggaaagtggtg

SEQ ID NO: 1544897 - DNA, 15 bp, Homo sapiens
aacctggaaagtggt

SEQ ID NO: 1544898 - DNA, 15 bp, Homo sapiens
caacctggaaagtgg

SEQ ID NO: 1544899 - DNA, 15 bp, Homo sapiens
ccaacctggaaagtg

SEQ ID NO: 1544900 - DNA, 15 bp, Homo sapiens
accaacctggaaagt

SEQ ID NO: 1544901 - DNA, 15 bp, Homo sapiens
aaccaacctggaaag

SEQ ID NO: 1544902 - DNA, 15 bp, Homo sapiens
gaaccaacctggaaa

SEQ ID NO: 1544903 - DNA, 15 bp, Homo sapiens
agaaccaacctggaa

SEQ ID NO: 1544904 - DNA, 15 bp, Homo sapiens
tagaaccaacctgga

SEQ ID NO: 1544905 - DNA, 15 bp, Homo sapiens
gtagaaccaacctgg

SEQ ID NO: 1544906 - DNA, 15 bp, Homo sapiens
agtagaaccaacctg

SEQ ID NO: 1544907 - DNA, 15 bp, Homo sapiens
cagtagaaccaacct

SEQ ID NO: 1544908 - DNA, 15 bp, Homo sapiens
gcagtagaaccaacc

SEQ ID NO: 1544909 - DNA, 15 bp, Homo sapiens
agcagtagaaccaac

SEQ ID NO: 1544910 - DNA, 15 bp, Homo sapiens
cagcagtagaaccaa

SEQ ID NO: 1544911 - DNA, 15 bp, Homo sapiens
acagcagtagaacca

SEQ ID NO: 1544912 - DNA, 15 bp, Homo sapiens
gacagcagtagaacc

SEQ ID NO: 1544913 - DNA, 15 bp, Homo sapiens
ggacagcagtagaac

SEQ ID NO: 1544914 - DNA, 15 bp, Homo sapiens
tggacagcagtagaa

SEQ ID NO: 1544915 - DNA, 15 bp, Homo sapiens
ttggacagcagtaga

SEQ ID NO: 1544916 - DNA, 15 bp, Homo sapiens
cttggacagcagtag

SEQ ID NO: 1544917 - DNA, 15 bp, Homo sapiens
acttggacagcagta

SEQ ID NO: 1544918 - DNA, 15 bp, Homo sapiens
tacttggacagcagt

SEQ ID NO: 1544919 - DNA, 15 bp, Homo sapiens
ttacttggacagcag

SEQ ID NO: 1544920 - DNA, 15 bp, Homo sapiens
gttacttggacagca

SEQ ID NO: 1544921 - DNA, 15 bp, Homo sapiens
agttacttggacagc

SEQ ID NO: 1544922 - DNA, 15 bp, Homo sapiens
aagttacttggacag

SEQ ID NO: 1544923 - DNA, 15 bp, Homo sapiens
gaagttacttggaca

SEQ ID NO: 1544924 - DNA, 15 bp, Homo sapiens
tgaagttacttggac

SEQ ID NO: 1544925 - DNA, 15 bp, Homo sapiens
ctgaagttacttgga

SEQ ID NO: 1544926 - DNA, 15 bp, Homo sapiens
gctgaagttacttgg

SEQ ID NO: 1544927 - DNA, 15 bp, Homo sapiens
tgctgaagttacttg

SEQ ID NO: 1544928 - DNA, 15 bp, Homo sapiens
ctgctgaagttactt

SEQ ID NO: 1544929 - DNA, 15 bp, Homo sapiens
tctgctgaagttact

SEQ ID NO: 1544930 - DNA, 15 bp, Homo sapiens
ctctgctgaagttac

SEQ ID NO: 1544931 - DNA, 15 bp, Homo sapiens
gctctgctgaagtta

SEQ ID NO: 1544932 - DNA, 15 bp, Homo sapiens
cgctctgctgaagtt

SEQ ID NO: 1544933 - DNA, 15 bp, Homo sapiens
tcgctctgctgaagt

SEQ ID NO: 1544934 - DNA, 15 bp, Homo sapiens
ttcgctctgctgaag

SEQ ID NO: 1544935 - DNA, 15 bp, Homo sapiens
gttcgctctgctgaa

SEQ ID NO: 1544936 - DNA, 15 bp, Homo sapiens
tgttcgctctgctga

SEQ ID NO: 1544937 - DNA, 15 bp, Homo sapiens
ttgttcgctctgctg

SEQ ID NO: 1544938 - DNA, 15 bp, Homo sapiens
tttgttcgctctgct

SEQ ID NO: 1544939 - DNA, 15 bp, Homo sapiens
ttttgttcgctctgc

SEQ ID NO: 1544940 - DNA, 15 bp, Homo sapiens
cttttgttcgctctg

SEQ ID NO: 1544941 - DNA, 15 bp, Homo sapiens
acttttgttcgctct

SEQ ID NO: 1544942 - DNA, 15 bp, Homo sapiens
gacttttgttcgctc

SEQ ID NO: 1544943 - DNA, 15 bp, Homo sapiens
ggacttttgttcgct

SEQ ID NO: 1544944 - DNA, 15 bp, Homo sapiens
aggacttttgttcgc

SEQ ID NO: 1544945 - DNA, 15 bp, Homo sapiens
taggacttttgttcg

SEQ ID NO: 1544946 - DNA, 15 bp, Homo sapiens
ctaggacttttgttc

SEQ ID NO: 1544947 - DNA, 15 bp, Homo sapiens
cctaggacttttgtt

SEQ ID NO: 1544948 - DNA, 15 bp, Homo sapiens
ccctaggacttttgt

SEQ ID NO: 1544949 - DNA, 15 bp, Homo sapiens
gccctaggacttttg

SEQ ID NO: 1544950 - DNA, 15 bp, Homo sapiens
tgccctaggactttt

SEQ ID NO: 1544951 - DNA, 15 bp, Homo sapiens
ttgccctaggacttt

SEQ ID NO: 1544952 - DNA, 15 bp, Homo sapiens
attgccctaggactt

SEQ ID NO: 1544953 - DNA, 15 bp, Homo sapiens
gattgccctaggact

SEQ ID NO: 1544954 - DNA, 15 bp, Homo sapiens
tgattgccctaggac

SEQ ID NO: 1544955 - DNA, 15 bp, Homo sapiens
ctgattgccctagga

SEQ ID NO: 1544956 - DNA, 15 bp, Homo sapiens
actgattgccctagg

SEQ ID NO: 1544957 - DNA, 15 bp, Homo sapiens
gactgattgccctag

SEQ ID NO: 1544958 - DNA, 15 bp, Homo sapiens
agactgattgcccta

SEQ ID NO: 1544959 - DNA, 15 bp, Homo sapiens
aagactgattgccct

SEQ ID NO: 1544960 - DNA, 15 bp, Homo sapiens
aaagactgattgccc

SEQ ID NO: 1544961 - DNA, 15 bp, Homo sapiens
gaaagactgattgcc

SEQ ID NO: 1544962 - DNA, 15 bp, Homo sapiens
agaaagactgattgc

SEQ ID NO: 1544963 - DNA, 15 bp, Homo sapiens
tagaaagactgattg

SEQ ID NO: 1544964 - DNA, 15 bp, Homo sapiens
ttagaaagactgatt

SEQ ID NO: 1544965 - DNA, 15 bp, Homo sapiens
tttagaaagactgat

SEQ ID NO: 1544966 - DNA, 15 bp, Homo sapiens
atttagaaagactga

SEQ ID NO: 1544967 - DNA, 15 bp, Homo sapiens
catttagaaagactg

SEQ ID NO: 1544968 - DNA, 15 bp, Homo sapiens
tcatttagaaagact

SEQ ID NO: 1544969 - DNA, 15 bp, Homo sapiens
gtcatttagaaagac

SEQ ID NO: 1544970 - DNA, 15 bp, Homo sapiens
tgtcatttagaaaga

SEQ ID NO: 1544971 - DNA, 15 bp, Homo sapiens
atgtcatttagaaag

SEQ ID NO: 1544972 - DNA, 15 bp, Homo sapiens
aatgtcatttagaaa

SEQ ID NO: 1544973 - DNA, 15 bp, Homo sapiens
aaatgtcatttagaa

SEQ ID NO: 1544974 - DNA, 15 bp, Homo sapiens
taaatgtcatttaga

SEQ ID NO: 1544975 - DNA, 15 bp, Homo sapiens
ataaatgtcatttag

SEQ ID NO: 1544976 - DNA, 15 bp, Homo sapiens
aataaatgtcattta

SEQ ID NO: 1544977 - DNA, 15 bp, Homo sapiens
taataaatgtcattt

SEQ ID NO: 1544978 - DNA, 15 bp, Homo sapiens
ataataaatgtcatt

SEQ ID NO: 1544979 - DNA, 15 bp, Homo sapiens
cataataaatgtcat

SEQ ID NO: 1544980 - DNA, 15 bp, Homo sapiens
gcataataaatgtca

SEQ ID NO: 1544981 - DNA, 15 bp, Homo sapiens
agcataataaatgtc

SEQ ID NO: 1544982 - DNA, 15 bp, Homo sapiens
aagcataataaatgt

SEQ ID NO: 1544983 - DNA, 15 bp, Homo sapiens
gaagcataataaatg

SEQ ID NO: 1544984 - DNA, 15 bp, Homo sapiens
cgaagcataataaat

SEQ ID NO: 1544985 - DNA, 15 bp, Homo sapiens
ccgaagcataataaa

SEQ ID NO: 1544986 - DNA, 15 bp, Homo sapiens
tccgaagcataataa

SEQ ID NO: 1544987 - DNA, 15 bp, Homo sapiens
ttccgaagcataata

SEQ ID NO: 1544988 - DNA, 15 bp, Homo sapiens
tttccgaagcataat

SEQ ID NO: 1544989 - DNA, 15 bp, Homo sapiens
atttccgaagcataa

SEQ ID NO: 1544990 - DNA, 15 bp, Homo sapiens
aatttccgaagcata

SEQ ID NO: 1544991 - DNA, 15 bp, Homo sapiens
caatttccgaagcat

SEQ ID NO: 1544992 - DNA, 15 bp, Homo sapiens
tcaatttccgaagca

SEQ ID NO: 1544993 - DNA, 15 bp, Homo sapiens
ttcaatttccgaagc

SEQ ID NO: 1544994 - DNA, 15 bp, Homo sapiens
cttcaatttccgaag

SEQ ID NO: 1544995 - DNA, 15 bp, Homo sapiens
tcttcaatttccgaa

SEQ ID NO: 1544996 - DNA, 15 bp, Homo sapiens
ttcttcaatttccga

SEQ ID NO: 1544997 - DNA, 15 bp, Homo sapiens
tttcttcaatttccg

SEQ ID NO: 1544998 - DNA, 15 bp, Homo sapiens
atttcttcaatttcc

SEQ ID NO: 1544999 - DNA, 15 bp, Homo sapiens
gatttcttcaatttc

SEQ ID NO: 1545000 - DNA, 15 bp, Homo sapiens
agatttcttcaattt

SEQ ID NO: 1545001 - DNA, 15 bp, Homo sapiens
cagatttcttcaatt

SEQ ID NO: 1545002 - DNA, 15 bp, Homo sapiens
gcagatttcttcaat

SEQ ID NO: 1545003 - DNA, 15 bp, Homo sapiens
ggcagatttcttcaa

SEQ ID NO: 1545004 - DNA, 15 bp, Homo sapiens
aggcagatttcttca

SEQ ID NO: 1545005 - DNA, 15 bp, Homo sapiens
taggcagatttcttc

SEQ ID NO: 1545006 - DNA, 15 bp, Homo sapiens
ctaggcagatttctt

SEQ ID NO: 1545007 - DNA, 15 bp, Homo sapiens
actaggcagatttct

SEQ ID NO: 1545008 - DNA, 15 bp, Homo sapiens
tactaggcagatttc

SEQ ID NO: 1545009 - DNA, 15 bp, Homo sapiens
ctactaggcagattt

SEQ ID NO: 1545010 - DNA, 15 bp, Homo sapiens
tctactaggcagatt

SEQ ID NO: 1545011 - DNA, 15 bp, Homo sapiens
atctactaggcagat

SEQ ID NO: 1545012 - DNA, 15 bp, Homo sapiens
catctactaggcaga

SEQ ID NO: 1545013 - DNA, 15 bp, Homo sapiens
tcatctactaggcag

SEQ ID NO: 1545014 - DNA, 15 bp, Homo sapiens
ctcatctactaggca

SEQ ID NO: 1545015 - DNA, 15 bp, Homo sapiens
tctcatctactaggc

SEQ ID NO: 1545016 - DNA, 15 bp, Homo sapiens
ttctcatctactagg

SEQ ID NO: 1545017 - DNA, 15 bp, Homo sapiens
gttctcatctactag

SEQ ID NO: 1545018 - DNA, 15 bp, Homo sapiens
ggttctcatctacta

SEQ ID NO: 1545019 - DNA, 15 bp, Homo sapiens
tggttctcatctact

SEQ ID NO: 1545020 - DNA, 15 bp, Homo sapiens
ctggttctcatctac

SEQ ID NO: 1545021 - DNA, 15 bp, Homo sapiens
actggttctcatcta

SEQ ID NO: 1545022 - DNA, 15 bp, Homo sapiens
aactggttctcatct

SEQ ID NO: 1545023 - DNA, 15 bp, Homo sapiens
gaactggttctcatc

SEQ ID NO: 1545024 - DNA, 15 bp, Homo sapiens
tgaactggttctcat

SEQ ID NO: 1545025 - DNA, 15 bp, Homo sapiens
gtgaactggttctca

SEQ ID NO: 1545026 - DNA, 15 bp, Homo sapiens
ggtgaactggttctc

SEQ ID NO: 1545027 - DNA, 15 bp, Homo sapiens
aggtgaactggttct

SEQ ID NO: 1545028 - DNA, 15 bp, Homo sapiens
aaggtgaactggttc

SEQ ID NO: 1545029 - DNA, 15 bp, Homo sapiens
taaggtgaactggtt

SEQ ID NO: 1545030 - DNA, 15 bp, Homo sapiens
ttaaggtgaactggt

SEQ ID NO: 1545031 - DNA, 15 bp, Homo sapiens
gttaaggtgaactgg

SEQ ID NO: 1545032 - DNA, 15 bp, Homo sapiens
ggttaaggtgaactg

SEQ ID NO: 1545033 - DNA, 15 bp, Homo sapiens
tggttaaggtgaact

SEQ ID NO: 1545034 - DNA, 15 bp, Homo sapiens
atggttaaggtgaac

SEQ ID NO: 1545035 - DNA, 15 bp, Homo sapiens
aatggttaaggtgaa

SEQ ID NO: 1545036 - DNA, 15 bp, Homo sapiens
caatggttaaggtga

SEQ ID NO: 1545037 - DNA, 15 bp, Homo sapiens
gcaatggttaaggtg

SEQ ID NO: 1545038 - DNA, 15 bp, Homo sapiens
tgcaatggttaaggt

SEQ ID NO: 1545039 - DNA, 15 bp, Homo sapiens
ttgcaatggttaagg

SEQ ID NO: 1545040 - DNA, 15 bp, Homo sapiens
tttgcaatggttaag

SEQ ID NO: 1545041 - DNA, 15 bp, Homo sapiens
gtttgcaatggttaa

SEQ ID NO: 1545042 - DNA, 15 bp, Homo sapiens
ggtttgcaatggtta

SEQ ID NO: 1545043 - DNA, 15 bp, Homo sapiens
tggtttgcaatggtt

SEQ ID NO: 1545044 - DNA, 15 bp, Homo sapiens
ctggtttgcaatggt

SEQ ID NO: 1545045 - DNA, 15 bp, Homo sapiens
cctggtttgcaatgg

SEQ ID NO: 1545046 - DNA, 15 bp, Homo sapiens
ccctggtttgcaatg

SEQ ID NO: 1545047 - DNA, 15 bp, Homo sapiens
gccctggtttgcaat

SEQ ID NO: 1545048 - DNA, 15 bp, Homo sapiens
tgccctggtttgcaa

SEQ ID NO: 1545049 - DNA, 15 bp, Homo sapiens
gtgccctggtttgca

SEQ ID NO: 1545050 - DNA, 15 bp, Homo sapiens
cgtgccctggtttgc

SEQ ID NO: 1545051 - DNA, 15 bp, Homo sapiens
gcgtgccctggtttg

SEQ ID NO: 1545052 - DNA, 15 bp, Homo sapiens
ggcgtgccctggttt

SEQ ID NO: 1545053 - DNA, 15 bp, Homo sapiens
cggcgtgccctggtt

SEQ ID NO: 1545054 - DNA, 15 bp, Homo sapiens
gcggcgtgccctggt

SEQ ID NO: 1545055 - DNA, 15 bp, Homo sapiens
agcggcgtgccctgg

SEQ ID NO: 1545056 - DNA, 15 bp, Homo sapiens
gagcggcgtgccctg

SEQ ID NO: 1545057 - DNA, 15 bp, Homo sapiens
tgagcggcgtgccct

SEQ ID NO: 1545058 - DNA, 15 bp, Homo sapiens
gtgagcggcgtgccc

SEQ ID NO: 1545059 - DNA, 15 bp, Homo sapiens
ggtgagcggcgtgcc

SEQ ID NO: 1545060 - DNA, 15 bp, Homo sapiens
aggtgagcggcgtgc

SEQ ID NO: 1545061 - DNA, 15 bp, Homo sapiens
aaggtgagcggcgtg

SEQ ID NO: 1545062 - DNA, 15 bp, Homo sapiens
gaaggtgagcggcgt

SEQ ID NO: 1545063 - DNA, 15 bp, Homo sapiens
tgaaggtgagcggcg

SEQ ID NO: 1545064 - DNA, 15 bp, Homo sapiens
atgaaggtgagcggc

SEQ ID NO: 1545065 - DNA, 15 bp, Homo sapiens
catgaaggtgagcgg

SEQ ID NO: 1545066 - DNA, 15 bp, Homo sapiens
gcatgaaggtgagcg

SEQ ID NO: 1545067 - DNA, 15 bp, Homo sapiens
tgcatgaaggtgagc

SEQ ID NO: 1545068 - DNA, 15 bp, Homo sapiens
gtgcatgaaggtgag

SEQ ID NO: 1545069 - DNA, 15 bp, Homo sapiens
ggtgcatgaaggtga

SEQ ID NO: 1545070 - DNA, 15 bp, Homo sapiens
tggtgcatgaaggtg

SEQ ID NO: 1545071 - DNA, 15 bp, Homo sapiens
ctggtgcatgaaggt

SEQ ID NO: 1545072 - DNA, 15 bp, Homo sapiens
cctggtgcatgaagg

SEQ ID NO: 1545073 - DNA, 15 bp, Homo sapiens
tcctggtgcatgaag

SEQ ID NO: 1545074 - DNA, 15 bp, Homo sapiens
ctcctggtgcatgaa

SEQ ID NO: 1545075 - DNA, 15 bp, Homo sapiens
actcctggtgcatga

SEQ ID NO: 1545076 - DNA, 15 bp, Homo sapiens
cactcctggtgcatg

SEQ ID NO: 1545077 - DNA, 15 bp, Homo sapiens
acactcctggtgcat

SEQ ID NO: 1545078 - DNA, 15 bp, Homo sapiens
cacactcctggtgca

SEQ ID NO: 1545079 - DNA, 15 bp, Homo sapiens
tcacactcctggtgc

SEQ ID NO: 1545080 - DNA, 15 bp, Homo sapiens
ttcacactcctggtg

SEQ ID NO: 1545081 - DNA, 15 bp, Homo sapiens
cttcacactcctggt

SEQ ID NO: 1545082 - DNA, 15 bp, Homo sapiens
gcttcacactcctgg

SEQ ID NO: 1545083 - DNA, 15 bp, Homo sapiens
ggcttcacactcctg

SEQ ID NO: 1545084 - DNA, 15 bp, Homo sapiens
tggcttcacactcct

SEQ ID NO: 1545085 - DNA, 15 bp, Homo sapiens
atggcttcacactcc

SEQ ID NO: 1545086 - DNA, 15 bp, Homo sapiens
aatggcttcacactc

SEQ ID NO: 1545087 - DNA, 15 bp, Homo sapiens
caatggcttcacact

SEQ ID NO: 1545088 - DNA, 15 bp, Homo sapiens
acaatggcttcacac

SEQ ID NO: 1545089 - DNA, 15 bp, Homo sapiens
gacaatggcttcaca

SEQ ID NO: 1545090 - DNA, 15 bp, Homo sapiens
ggacaatggcttcac

SEQ ID NO: 1545091 - DNA, 15 bp, Homo sapiens
tggacaatggcttca

SEQ ID NO: 1545092 - DNA, 15 bp, Homo sapiens
ctggacaatggcttc

SEQ ID NO: 1545093 - DNA, 15 bp, Homo sapiens
actggacaatggctt

SEQ ID NO: 1545094 - DNA, 15 bp, Homo sapiens
gactggacaatggct

SEQ ID NO: 1545095 - DNA, 15 bp, Homo sapiens
agactggacaatggc

SEQ ID NO: 1545096 - DNA, 15 bp, Homo sapiens
tagactggacaatgg

SEQ ID NO: 1545097 - DNA, 15 bp, Homo sapiens
atagactggacaatg

SEQ ID NO: 1545098 - DNA, 15 bp, Homo sapiens
gatagactggacaat

SEQ ID NO: 1545099 - DNA, 15 bp, Homo sapiens
tgatagactggacaa

SEQ ID NO: 1545100 - DNA, 15 bp, Homo sapiens
atgatagactggaca

SEQ ID NO: 1545101 - DNA, 15 bp, Homo sapiens
aatgatagactggac

SEQ ID NO: 1545102 - DNA, 15 bp, Homo sapiens
gaatgatagactgga

SEQ ID NO: 1545103 - DNA, 15 bp, Homo sapiens
tgaatgatagactgg

SEQ ID NO: 1545104 - DNA, 15 bp, Homo sapiens
atgaatgatagactg

SEQ ID NO: 1545105 - DNA, 15 bp, Homo sapiens
tatgaatgatagact

SEQ ID NO: 1545106 - DNA, 15 bp, Homo sapiens
atatgaatgatagac

SEQ ID NO: 1545107 - DNA, 15 bp, Homo sapiens
gatatgaatgataga

SEQ ID NO: 1545108 - DNA, 15 bp, Homo sapiens
ggatatgaatgatag

SEQ ID NO: 1545109 - DNA, 15 bp, Homo sapiens
cggatatgaatgata

SEQ ID NO: 1545110 - DNA, 15 bp, Homo sapiens
ccggatatgaatgat

SEQ ID NO: 1545111 - DNA, 15 bp, Homo sapiens
tccggatatgaatga

SEQ ID NO: 1545112 - DNA, 15 bp, Homo sapiens
gtccggatatgaatg

SEQ ID NO: 1545113 - DNA, 15 bp, Homo sapiens
ggtccggatatgaat

SEQ ID NO: 1545114 - DNA, 15 bp, Homo sapiens
gggtccggatatgaa

SEQ ID NO: 1545115 - DNA, 15 bp, Homo sapiens
cgggtccggatatga

SEQ ID NO: 1545116 - DNA, 15 bp, Homo sapiens
gcgggtccggatatg

SEQ ID NO: 1545117 - DNA, 15 bp, Homo sapiens
agcgggtccggatat

SEQ ID NO: 1545118 - DNA, 15 bp, Homo sapiens
cagcgggtccggata

SEQ ID NO: 1545119 - DNA, 15 bp, Homo sapiens
ccagcgggtccggat

SEQ ID NO: 1545120 - DNA, 15 bp, Homo sapiens
cccagcgggtccgga

SEQ ID NO: 1545121 - DNA, 15 bp, Homo sapiens
tcccagcgggtccgg

SEQ ID NO: 1545122 - DNA, 15 bp, Homo sapiens
ttcccagcgggtccg

SEQ ID NO: 1545123 - DNA, 15 bp, Homo sapiens
gttcccagcgggtcc

SEQ ID NO: 1545124 - DNA, 15 bp, Homo sapiens
agttcccagcgggtc

SEQ ID NO: 1545125 - DNA, 15 bp, Homo sapiens
cagttcccagcgggt

SEQ ID NO: 1545126 - DNA, 15 bp, Homo sapiens
acagttcccagcggg

SEQ ID NO: 1545127 - DNA, 15 bp, Homo sapiens
gacagttcccagcgg

SEQ ID NO: 1545128 - DNA, 15 bp, Homo sapiens
tgacagttcccagcg

SEQ ID NO: 1545129 - DNA, 15 bp, Homo sapiens
gtgacagttcccagc

SEQ ID NO: 1545130 - DNA, 15 bp, Homo sapiens
tgtgacagttcccag

SEQ ID NO: 1545131 - DNA, 15 bp, Homo sapiens
ctgtgacagttccca

SEQ ID NO: 1545132 - DNA, 15 bp, Homo sapiens
gctgtgacagttccc

SEQ ID NO: 1545133 - DNA, 15 bp, Homo sapiens
ggctgtgacagttcc

SEQ ID NO: 1545134 - DNA, 15 bp, Homo sapiens
gggctgtgacagttc

SEQ ID NO: 1545135 - DNA, 15 bp, Homo sapiens
cgggctgtgacagtt

SEQ ID NO: 1545136 - DNA, 15 bp, Homo sapiens
tcgggctgtgacagt

SEQ ID NO: 1545137 - DNA, 15 bp, Homo sapiens
gtcgggctgtgacag

SEQ ID NO: 1545138 - DNA, 15 bp, Homo sapiens
agtcgggctgtgaca

SEQ ID NO: 1545139 - DNA, 15 bp, Homo sapiens
gagtcgggctgtgac

SEQ ID NO: 1545140 - DNA, 15 bp, Homo sapiens
agagtcgggctgtga

SEQ ID NO: 1545141 - DNA, 15 bp, Homo sapiens
tagagtcgggctgtg

SEQ ID NO: 1545142 - DNA, 15 bp, Homo sapiens
atagagtcgggctgt

SEQ ID NO: 1545143 - DNA, 15 bp, Homo sapiens
gatagagtcgggctg

SEQ ID NO: 1545144 - DNA, 15 bp, Homo sapiens
ggatagagtcgggct

SEQ ID NO: 1545145 - DNA, 15 bp, Homo sapiens
gggatagagtcgggc

SEQ ID NO: 1545146 - DNA, 15 bp, Homo sapiens
ggggatagagtcggg

SEQ ID NO: 1545147 - DNA, 15 bp, Homo sapiens
gggggatagagtcgg

SEQ ID NO: 1545148 - DNA, 15 bp, Homo sapiens
tgggggatagagtcg

SEQ ID NO: 1545149 - DNA, 15 bp, Homo sapiens
ttgggggatagagtc

SEQ ID NO: 1545150 - DNA, 15 bp, Homo sapiens
gttgggggatagagt

SEQ ID NO: 1545151 - DNA, 15 bp, Homo sapiens
tgttgggggatagag

SEQ ID NO: 1545152 - DNA, 15 bp, Homo sapiens
gtgttgggggataga

SEQ ID NO: 1545153 - DNA, 15 bp, Homo sapiens
tgtgttgggggatag

SEQ ID NO: 1545154 - DNA, 15 bp, Homo sapiens
gtgtgttgggggata

SEQ ID NO: 1545155 - DNA, 15 bp, Homo sapiens
ggtgtgttgggggat

SEQ ID NO: 1545156 - DNA, 15 bp, Homo sapiens
tggtgtgttggggga

SEQ ID NO: 1545157 - DNA, 15 bp, Homo sapiens
ttggtgtgttggggg

SEQ ID NO: 1545158 - DNA, 15 bp, Homo sapiens
cttggtgtgttgggg

SEQ ID NO: 1545159 - DNA, 15 bp, Homo sapiens
tcttggtgtgttggg

SEQ ID NO: 1545160 - DNA, 15 bp, Homo sapiens
atcttggtgtgttgg

SEQ ID NO: 1545161 - DNA, 15 bp, Homo sapiens
aatcttggtgtgttg

SEQ ID NO: 1545162 - DNA, 15 bp, Homo sapiens
gaatcttggtgtgtt

SEQ ID NO: 1545163 - DNA, 15 bp, Homo sapiens
cgaatcttggtgtgt

SEQ ID NO: 1545164 - DNA, 15 bp, Homo sapiens
ccgaatcttggtgtg

SEQ ID NO: 1545165 - DNA, 15 bp, Homo sapiens
gccgaatcttggtgt

SEQ ID NO: 1545166 - DNA, 15 bp, Homo sapiens
ggccgaatcttggtg

SEQ ID NO: 1545167 - DNA, 15 bp, Homo sapiens
tggccgaatcttggt

SEQ ID NO: 1545168 - DNA, 15 bp, Homo sapiens
ttggccgaatcttgg

SEQ ID NO: 1545169 - DNA, 15 bp, Homo sapiens
tttggccgaatcttg

SEQ ID NO: 1545170 - DNA, 15 bp, Homo sapiens
ttttggccgaatctt

SEQ ID NO: 1545171 - DNA, 15 bp, Homo sapiens
cttttggccgaatct

SEQ ID NO: 1545172 - DNA, 15 bp, Homo sapiens
tcttttggccgaatc

SEQ ID NO: 1545173 - DNA, 15 bp, Homo sapiens
atcttttggccgaat

SEQ ID NO: 1545174 - DNA, 15 bp, Homo sapiens
catcttttggccgaa

SEQ ID NO: 1545175 - DNA, 15 bp, Homo sapiens
acatcttttggccga

SEQ ID NO: 1545176 - DNA, 15 bp, Homo sapiens
gacatcttttggccg

SEQ ID NO: 1545177 - DNA, 15 bp, Homo sapiens
ggacatcttttggcc

SEQ ID NO: 1545178 - DNA, 15 bp, Homo sapiens
gggacatcttttggc

SEQ ID NO: 1545179 - DNA, 15 bp, Homo sapiens
agggacatcttttgg

SEQ ID NO: 1545180 - DNA, 15 bp, Homo sapiens
cagggacatcttttg

SEQ ID NO: 1545181 - DNA, 15 bp, Homo sapiens
cccagggacatcttt

SEQ ID NO: 1545182 - DNA, 15 bp, Homo sapiens
tcccagggacatctt

SEQ ID NO: 1545183 - DNA, 15 bp, Homo sapiens
gtcccagggacatct

SEQ ID NO: 1545184 - DNA, 15 bp, Homo sapiens
tgtcccagggacatc

SEQ ID NO: 1545185 - DNA, 15 bp, Homo sapiens
gtgtcccagggacat

SEQ ID NO: 1545186 - DNA, 15 bp, Homo sapiens
agtgtcccagggaca

SEQ ID NO: 1545187 - DNA, 15 bp, Homo sapiens
cagtgtcccagggac

SEQ ID NO: 1545188 - DNA, 15 bp, Homo sapiens
gcagtgtcccaggga

SEQ ID NO: 1545189 - DNA, 15 bp, Homo sapiens
agcagtgtcccaggg

SEQ ID NO: 1545190 - DNA, 15 bp, Homo sapiens
gagcagtgtcccagg

SEQ ID NO: 1545191 - DNA, 15 bp, Homo sapiens
tgagcagtgtcccag

SEQ ID NO: 1545192 - DNA, 15 bp, Homo sapiens
ttgagcagtgtccca

SEQ ID NO: 1545193 - DNA, 15 bp, Homo sapiens
attgagcagtgtccc

SEQ ID NO: 1545194 - DNA, 15 bp, Homo sapiens
tattgagcagtgtcc

SEQ ID NO: 1545195 - DNA, 15 bp, Homo sapiens
atattgagcagtgtc

SEQ ID NO: 1545196 - DNA, 15 bp, Homo sapiens
gatattgagcagtgt

SEQ ID NO: 1545197 - DNA, 15 bp, Homo sapiens
cgatattgagcagtg

SEQ ID NO: 1545198 - DNA, 15 bp, Homo sapiens
gcgatattgagcagt

SEQ ID NO: 1545199 - DNA, 15 bp, Homo sapiens
tgcgatattgagcag

SEQ ID NO: 1545200 - DNA, 15 bp, Homo sapiens
atgcgatattgagca

SEQ ID NO: 1545201 - DNA, 15 bp, Homo sapiens
aatgcgatattgagc

SEQ ID NO: 1545202 - DNA, 15 bp, Homo sapiens
taatgcgatattgag

SEQ ID NO: 1545203 - DNA, 15 bp, Homo sapiens
gtaatgcgatattga

SEQ ID NO: 1545204 - DNA, 15 bp, Homo sapiens
agtaatgcgatattg

SEQ ID NO: 1545205 - DNA, 15 bp, Homo sapiens
aagtaatgcgatatt

SEQ ID NO: 1545206 - DNA, 15 bp, Homo sapiens
taagtaatgcgatat

SEQ ID NO: 1545207 - DNA, 15 bp, Homo sapiens
ttaagtaatgcgata

SEQ ID NO: 1545208 - DNA, 15 bp, Homo sapiens
attaagtaatgcgat

SEQ ID NO: 1545209 - DNA, 15 bp, Homo sapiens
aattaagtaatgcga

SEQ ID NO: 1545210 - DNA, 15 bp, Homo sapiens
aaattaagtaatgcg

SEQ ID NO: 1545211 - DNA, 15 bp, Homo sapiens
taaattaagtaatgc

SEQ ID NO: 1545212 - DNA, 15 bp, Homo sapiens
ctaaattaagtaatg

SEQ ID NO: 1545213 - DNA, 15 bp, Homo sapiens
cctaaattaagtaat

SEQ ID NO: 1545214 - DNA, 15 bp, Homo sapiens
gcctaaattaagtaa

SEQ ID NO: 1545215 - DNA, 15 bp, Homo sapiens
tgcctaaattaagta

SEQ ID NO: 1545216 - DNA, 15 bp, Homo sapiens
ctgcctaaattaagt

SEQ ID NO: 1545217 - DNA, 15 bp, Homo sapiens
actgcctaaattaag

SEQ ID NO: 1545218 - DNA, 15 bp, Homo sapiens
aactgcctaaattaa

SEQ ID NO: 1545219 - DNA, 15 bp, Homo sapiens
gaactgcctaaatta

SEQ ID NO: 1545220 - DNA, 15 bp, Homo sapiens
agaactgcctaaatt

SEQ ID NO: 1545221 - DNA, 15 bp, Homo sapiens
cagaactgcctaaat

SEQ ID NO: 1545222 - DNA, 15 bp, Homo sapiens
tcagaactgcctaaa

SEQ ID NO: 1545223 - DNA, 15 bp, Homo sapiens
gtcagaactgcctaa

SEQ ID NO: 1545224 - DNA, 15 bp, Homo sapiens
ggtcagaactgccta

SEQ ID NO: 1545225 - DNA, 15 bp, Homo sapiens
gggtcagaactgcct

SEQ ID NO: 1545226 - DNA, 15 bp, Homo sapiens
cgggtcagaactgcc

SEQ ID NO: 1545227 - DNA, 15 bp, Homo sapiens
tcgggtcagaactgc

SEQ ID NO: 1545228 - DNA, 15 bp, Homo sapiens
ctcgggtcagaactg

SEQ ID NO: 1545229 - DNA, 15 bp, Homo sapiens
actcgggtcagaact

SEQ ID NO: 1545230 - DNA, 15 bp, Homo sapiens
aactcgggtcagaac

SEQ ID NO: 1545231 - DNA, 15 bp, Homo sapiens
aaactcgggtcagaa

SEQ ID NO: 1545232 - DNA, 15 bp, Homo sapiens
taaactcgggtcaga

SEQ ID NO: 1545233 - DNA, 15 bp, Homo sapiens
gtaaactcgggtcag

SEQ ID NO: 1545234 - DNA, 15 bp, Homo sapiens
cgtaaactcgggtca

SEQ ID NO: 1545235 - DNA, 15 bp, Homo sapiens
ccgtaaactcgggtc

SEQ ID NO: 1545236 - DNA, 15 bp, Homo sapiens
accgtaaactcgggt

SEQ ID NO: 1545237 - DNA, 15 bp, Homo sapiens
taccgtaaactcggg

SEQ ID NO: 1545238 - DNA, 15 bp, Homo sapiens
ctaccgtaaactcgg

SEQ ID NO: 1545239 - DNA, 15 bp, Homo sapiens
cctaccgtaaactcg

SEQ ID NO: 1545240 - DNA, 15 bp, Homo sapiens
acctaccgtaaactc

SEQ ID NO: 1545241 - DNA, 15 bp, Homo sapiens
aacctaccgtaaact

SEQ ID NO: 1545242 - DNA, 15 bp, Homo sapiens
aaacctaccgtaaac

SEQ ID NO: 1545243 - DNA, 15 bp, Homo sapiens
aaaacctaccgtaaa

SEQ ID NO: 1545244 - DNA, 15 bp, Homo sapiens
aaaaacctaccgtaa

SEQ ID NO: 1545245 - DNA, 15 bp, Homo sapiens
aaaaaacctaccgta

SEQ ID NO: 1545246 - DNA, 15 bp, Homo sapiens
taaaaaacctaccgt

SEQ ID NO: 1545247 - DNA, 15 bp, Homo sapiens
ttaaaaaacctaccg

SEQ ID NO: 1545248 - DNA, 15 bp, Homo sapiens
tttaaaaaacctacc

SEQ ID NO: 1545249 - DNA, 15 bp, Homo sapiens
ttttaaaaaacctac

SEQ ID NO: 1545250 - DNA, 15 bp, Homo sapiens
attttaaaaaaccta

SEQ ID NO: 1545251 - DNA, 15 bp, Homo sapiens
aattttaaaaaacct

SEQ ID NO: 1545252 - DNA, 15 bp, Homo sapiens
gaattttaaaaaacc

SEQ ID NO: 1545253 - DNA, 15 bp, Homo sapiens
agaattttaaaaaac

SEQ ID NO: 1545254 - DNA, 15 bp, Homo sapiens
gagaattttaaaaaa

SEQ ID NO: 1545255 - DNA, 15 bp, Homo sapiens
agagaattttaaaaa

SEQ ID NO: 1545256 - DNA, 15 bp, Homo sapiens
aagagaattttaaaa

SEQ ID NO: 1545257 - DNA, 15 bp, Homo sapiens
gaagagaattttaaa

SEQ ID NO: 1545258 - DNA, 15 bp, Homo sapiens
tgaagagaattttaa

SEQ ID NO: 1545259 - DNA, 15 bp, Homo sapiens
ctgaagagaatttta

SEQ ID NO: 1545260 - DNA, 15 bp, Homo sapiens
actgaagagaatttt

SEQ ID NO: 1545261 - DNA, 15 bp, Homo sapiens
aactgaagagaattt

SEQ ID NO: 1545262 - DNA, 15 bp, Homo sapiens
aaactgaagagaatt

SEQ ID NO: 1545263 - DNA, 15 bp, Homo sapiens
caaactgaagagaat

SEQ ID NO: 1545264 - DNA, 15 bp, Homo sapiens
tcaaactgaagagaa

SEQ ID NO: 1545265 - DNA, 15 bp, Homo sapiens
atcaaactgaagaga

SEQ ID NO: 1545266 - DNA, 15 bp, Homo sapiens
aatcaaactgaagag

SEQ ID NO: 1545267 - DNA, 15 bp, Homo sapiens
aaatcaaactgaaga

SEQ ID NO: 1545268 - DNA, 15 bp, Homo sapiens
caaatcaaactgaag

SEQ ID NO: 1545269 - DNA, 15 bp, Homo sapiens
ccaaatcaaactgaa

SEQ ID NO: 1545270 - DNA, 15 bp, Homo sapiens
cccaaatcaaactga

SEQ ID NO: 1545271 - DNA, 15 bp, Homo sapiens
ccccaaatcaaactg

SEQ ID NO: 1545272 - DNA, 15 bp, Homo sapiens
accccaaatcaaact

SEQ ID NO: 1545273 - DNA, 15 bp, Homo sapiens
aaccccaaatcaaac

SEQ ID NO: 1545274 - DNA, 15 bp, Homo sapiens
aaaccccaaatcaaa

SEQ ID NO: 1545275 - DNA, 15 bp, Homo sapiens
caaaccccaaatcaa

SEQ ID NO: 1545276 - DNA, 15 bp, Homo sapiens
acaaaccccaaatca

SEQ ID NO: 1545277 - DNA, 15 bp, Homo sapiens
aacaaaccccaaatc

SEQ ID NO: 1545278 - DNA, 15 bp, Homo sapiens
caacaaaccccaaat

SEQ ID NO: 1545279 - DNA, 15 bp, Homo sapiens
gcaacaaaccccaaa

SEQ ID NO: 1545280 - DNA, 15 bp, Homo sapiens
agcaacaaaccccaa

SEQ ID NO: 1545281 - DNA, 15 bp, Homo sapiens
aagcaacaaacccca

SEQ ID NO: 1545282 - DNA, 15 bp, Homo sapiens
aaagcaacaaacccc

SEQ ID NO: 1545283 - DNA, 15 bp, Homo sapiens
aaaagcaacaaaccc

SEQ ID NO: 1545284 - DNA, 15 bp, Homo sapiens
taaaagcaacaaacc

SEQ ID NO: 1545285 - DNA, 15 bp, Homo sapiens
ttttaaaagcaacaa

SEQ ID NO: 1545286 - DNA, 15 bp, Homo sapiens
cattttaaaagcaac

SEQ ID NO: 1545287 - DNA, 15 bp, Homo sapiens
tcattttaaaagcaa

SEQ ID NO: 1545288 - DNA, 15 bp, Homo sapiens
ctcattttaaaagca

SEQ ID NO: 1545289 - DNA, 15 bp, Homo sapiens
tctcattttaaaagc

SEQ ID NO: 1545290 - DNA, 15 bp, Homo sapiens
gtctcattttaaaag

SEQ ID NO: 1545291 - DNA, 15 bp, Homo sapiens
ggtctcattttaaaa

SEQ ID NO: 1545292 - DNA, 15 bp, Homo sapiens
tggtctcattttaaa

SEQ ID NO: 1545293 - DNA, 15 bp, Homo sapiens
atggtctcattttaa

SEQ ID NO: 1545294 - DNA, 15 bp, Homo sapiens
aatggtctcatttta

SEQ ID NO: 1545295 - DNA, 15 bp, Homo sapiens
aaatggtctcatttt

SEQ ID NO: 1545296 - DNA, 15 bp, Homo sapiens
taaatggtctcattt

SEQ ID NO: 1545297 - DNA, 15 bp, Homo sapiens
ttaaatggtctcatt

SEQ ID NO: 1545298 - DNA, 15 bp, Homo sapiens
attaaatggtctcat

SEQ ID NO: 1545299 - DNA, 15 bp, Homo sapiens
cattaaatggtctca

SEQ ID NO: 1545300 - DNA, 15 bp, Homo sapiens
tcattaaatggtctc

SEQ ID NO: 1545301 - DNA, 15 bp, Homo sapiens
ttcattaaatggtct

SEQ ID NO: 1545302 - DNA, 15 bp, Homo sapiens
attcattaaatggtc

SEQ ID NO: 1545303 - DNA, 15 bp, Homo sapiens
aattcattaaatggt

SEQ ID NO: 1545304 - DNA, 15 bp, Homo sapiens
aaattcattaaatgg

SEQ ID NO: 1545305 - DNA, 15 bp, Homo sapiens
aaaattcattaaatg

SEQ ID NO: 1545306 - DNA, 15 bp, Homo sapiens
taaaattcattaaat

SEQ ID NO: 1545307 - DNA, 15 bp, Homo sapiens
ttaaaattcattaaa

SEQ ID NO: 1545308 - DNA, 15 bp, Homo sapiens
tttaaaattcattaa

SEQ ID NO: 1545309 - DNA, 15 bp, Homo sapiens
ttttaaaattcatta

SEQ ID NO: 1545310 - DNA, 15 bp, Homo sapiens
gttttaaaattcatt

SEQ ID NO: 1545311 - DNA, 15 bp, Homo sapiens
tgttttaaaattcat

SEQ ID NO: 1545312 - DNA, 15 bp, Homo sapiens
gctgttttaaaattc

SEQ ID NO: 1545313 - DNA, 15 bp, Homo sapiens
ggctgttttaaaatt

SEQ ID NO: 1545314 - DNA, 15 bp, Homo sapiens
aggctgttttaaaat

SEQ ID NO: 1545315 - DNA, 15 bp, Homo sapiens
gaggctgttttaaaa

SEQ ID NO: 1545316 - DNA, 15 bp, Homo sapiens
agaggctgttttaaa

SEQ ID NO: 1545317 - DNA, 15 bp, Homo sapiens
tagaggctgttttaa

SEQ ID NO: 1545318 - DNA, 15 bp, Homo sapiens
gtagaggctgtttta

SEQ ID NO: 1545319 - DNA, 15 bp, Homo sapiens
ggtagaggctgtttt

SEQ ID NO: 1545320 - DNA, 15 bp, Homo sapiens
aggtagaggctgttt

SEQ ID NO: 1545321 - DNA, 15 bp, Homo sapiens
aaggtagaggctgtt

SEQ ID NO: 1545322 - DNA, 15 bp, Homo sapiens
taaggtagaggctgt

SEQ ID NO: 1545323 - DNA, 15 bp, Homo sapiens
ttaaggtagaggctg

SEQ ID NO: 1545324 - DNA, 15 bp, Homo sapiens
attaaggtagaggct

SEQ ID NO: 1545325 - DNA, 15 bp, Homo sapiens
tattaaggtagaggc

SEQ ID NO: 1545326 - DNA, 15 bp, Homo sapiens
atattaaggtagagg

SEQ ID NO: 1545327 - DNA, 15 bp, Homo sapiens
aatattaaggtagag

SEQ ID NO: 1545328 - DNA, 15 bp, Homo sapiens
caatattaaggtaga

SEQ ID NO: 1545329 - DNA, 15 bp, Homo sapiens
acaatattaaggtag

SEQ ID NO: 1545330 - DNA, 15 bp, Homo sapiens
tacaatattaaggta

SEQ ID NO: 1545331 - DNA, 15 bp, Homo sapiens
ttacaatattaaggt

SEQ ID NO: 1545332 - DNA, 15 bp, Homo sapiens
tttacaatattaagg

SEQ ID NO: 1545333 - DNA, 15 bp, Homo sapiens
atttacaatattaag

SEQ ID NO: 1545334 - DNA, 15 bp, Homo sapiens
aatttacaatattaa

SEQ ID NO: 1545335 - DNA, 15 bp, Homo sapiens
caatttacaatatta

SEQ ID NO: 1545336 - DNA, 15 bp, Homo sapiens
ccaatttacaatatt

SEQ ID NO: 1545337 - DNA, 15 bp, Homo sapiens
tccaatttacaatat

SEQ ID NO: 1545338 - DNA, 15 bp, Homo sapiens
ttccaatttacaata

SEQ ID NO: 1545339 - DNA, 15 bp, Homo sapiens
cttccaatttacaat

SEQ ID NO: 1545340 - DNA, 15 bp, Homo sapiens
ccttccaatttacaa

SEQ ID NO: 1545341 - DNA, 15 bp, Homo sapiens
accttccaatttaca

SEQ ID NO: 1545342 - DNA, 15 bp, Homo sapiens
taccttccaatttac

SEQ ID NO: 1545343 - DNA, 15 bp, Homo sapiens
ataccttccaattta

SEQ ID NO: 1545344 - DNA, 15 bp, Homo sapiens
cataccttccaattt

SEQ ID NO: 1545345 - DNA, 15 bp, Homo sapiens
gcataccttccaatt

SEQ ID NO: 1545346 - DNA, 15 bp, Homo sapiens
tgcataccttccaat

SEQ ID NO: 1545347 - DNA, 15 bp, Homo sapiens
ctgcataccttccaa

SEQ ID NO: 1545348 - DNA, 15 bp, Homo sapiens
actgcataccttcca

SEQ ID NO: 1545349 - DNA, 15 bp, Homo sapiens
cactgcataccttcc

SEQ ID NO: 1545350 - DNA, 15 bp, Homo sapiens
acactgcataccttc

SEQ ID NO: 1545351 - DNA, 15 bp, Homo sapiens
aacactgcatacctt

SEQ ID NO: 1545352 - DNA, 15 bp, Homo sapiens
caacactgcatacct

SEQ ID NO: 1545353 - DNA, 15 bp, Homo sapiens
ccaacactgcatacc

SEQ ID NO: 1545354 - DNA, 15 bp, Homo sapiens
accaacactgcatac

SEQ ID NO: 1545355 - DNA, 15 bp, Homo sapiens
aaccaacactgcata

SEQ ID NO: 1545356 - DNA, 15 bp, Homo sapiens
taaccaacactgcat

SEQ ID NO: 1545357 - DNA, 15 bp, Homo sapiens
ttaaccaacactgca

SEQ ID NO: 1545358 - DNA, 15 bp, Homo sapiens
gttaaccaacactgc

SEQ ID NO: 1545359 - DNA, 15 bp, Homo sapiens
ggttaaccaacactg

SEQ ID NO: 1545360 - DNA, 15 bp, Homo sapiens
tggttaaccaacact

SEQ ID NO: 1545361 - DNA, 15 bp, Homo sapiens
gtggttaaccaacac

SEQ ID NO: 1545362 - DNA, 15 bp, Homo sapiens
agtggttaaccaaca

SEQ ID NO: 1545363 - DNA, 15 bp, Homo sapiens
cagtggttaaccaac

SEQ ID NO: 1545364 - DNA, 15 bp, Homo sapiens
acagtggttaaccaa

SEQ ID NO: 1545365 - DNA, 15 bp, Homo sapiens
cacagtggttaacca

SEQ ID NO: 1545366 - DNA, 15 bp, Homo sapiens
tcacagtggttaacc

SEQ ID NO: 1545367 - DNA, 15 bp, Homo sapiens
gtcacagtggttaac

SEQ ID NO: 1545368 - DNA, 15 bp, Homo sapiens
ggtcacagtggttaa

SEQ ID NO: 1545369 - DNA, 15 bp, Homo sapiens
aggtcacagtggtta

SEQ ID NO: 1545370 - DNA, 15 bp, Homo sapiens
gaggtcacagtggtt

SEQ ID NO: 1545371 - DNA, 15 bp, Homo sapiens
tgaggtcacagtggt

SEQ ID NO: 1545372 - DNA, 15 bp, Homo sapiens
atgaggtcacagtgg

SEQ ID NO: 1545373 - DNA, 15 bp, Homo sapiens
gatgaggtcacagtg

SEQ ID NO: 1545374 - DNA, 15 bp, Homo sapiens
tgatgaggtcacagt

SEQ ID NO: 1545375 - DNA, 15 bp, Homo sapiens
ttgatgaggtcacag

SEQ ID NO: 1545376 - DNA, 15 bp, Homo sapiens
cttgatgaggtcaca

SEQ ID NO: 1545377 - DNA, 15 bp, Homo sapiens
acttgatgaggtcac

SEQ ID NO: 1545378 - DNA, 15 bp, Homo sapiens
aacttgatgaggtca

SEQ ID NO: 1545379 - DNA, 15 bp, Homo sapiens
caacttgatgaggtc

SEQ ID NO: 1545380 - DNA, 15 bp, Homo sapiens
acaacttgatgaggt

SEQ ID NO: 1545381 - DNA, 15 bp, Homo sapiens
cacaacttgatgagg

SEQ ID NO: 1545382 - DNA, 15 bp, Homo sapiens
ccacaacttgatgag

SEQ ID NO: 1545383 - DNA, 15 bp, Homo sapiens
cccacaacttgatga

SEQ ID NO: 1545384 - DNA, 15 bp, Homo sapiens
ccccacaacttgatg

SEQ ID NO: 1545385 - DNA, 15 bp, Homo sapiens
accccacaacttgat

SEQ ID NO: 1545386 - DNA, 15 bp, Homo sapiens
taccccacaacttga

SEQ ID NO: 1545387 - DNA, 15 bp, Homo sapiens
ataccccacaacttg

SEQ ID NO: 1545388 - DNA, 15 bp, Homo sapiens
aataccccacaactt

SEQ ID NO: 1545389 - DNA, 15 bp, Homo sapiens
gaataccccacaact

SEQ ID NO: 1545390 - DNA, 15 bp, Homo sapiens
tgaataccccacaac

SEQ ID NO: 1545391 - DNA, 15 bp, Homo sapiens
gtgaataccccacaa

SEQ ID NO: 1545392 - DNA, 15 bp, Homo sapiens
tgtgaataccccaca

SEQ ID NO: 1545393 - DNA, 15 bp, Homo sapiens
atgtgaataccccac

SEQ ID NO: 1545394 - DNA, 15 bp, Homo sapiens
catgtgaatacccca

SEQ ID NO: 1545395 - DNA, 15 bp, Homo sapiens
tcatgtgaatacccc

SEQ ID NO: 1545396 - DNA, 15 bp, Homo sapiens
ttcatgtgaataccc

SEQ ID NO: 1545397 - DNA, 15 bp, Homo sapiens
gttcatgtgaatacc

SEQ ID NO: 1545398 - DNA, 15 bp, Homo sapiens
agttcatgtgaatac

SEQ ID NO: 1545399 - DNA, 15 bp, Homo sapiens
cagttcatgtgaata

SEQ ID NO: 1545400 - DNA, 15 bp, Homo sapiens
acagttcatgtgaat

SEQ ID NO: 1545401 - DNA, 15 bp, Homo sapiens
cacagttcatgtgaa

SEQ ID NO: 1545402 - DNA, 15 bp, Homo sapiens
ccacagttcatgtga

SEQ ID NO: 1545403 - DNA, 15 bp, Homo sapiens
tccacagttcatgtg

SEQ ID NO: 1545404 - DNA, 15 bp, Homo sapiens
ttccacagttcatgt

SEQ ID NO: 1545405 - DNA, 15 bp, Homo sapiens
attccacagttcatg

SEQ ID NO: 1545406 - DNA, 15 bp, Homo sapiens
aattccacagttcat

SEQ ID NO: 1545407 - DNA, 15 bp, Homo sapiens
gaattccacagttca

SEQ ID NO: 1545408 - DNA, 15 bp, Homo sapiens
ggaattccacagttc

SEQ ID NO: 1545409 - DNA, 15 bp, Homo sapiens
tggaattccacagtt

SEQ ID NO: 1545410 - DNA, 15 bp, Homo sapiens
ttggaattccacagt

SEQ ID NO: 1545411 - DNA, 15 bp, Homo sapiens
tttggaattccacag

SEQ ID NO: 1545412 - DNA, 15 bp, Homo sapiens
gtttggaattccaca

SEQ ID NO: 1545413 - DNA, 15 bp, Homo sapiens
tgtttggaattccac

SEQ ID NO: 1545414 - DNA, 15 bp, Homo sapiens
ctgtttggaattcca

SEQ ID NO: 1545415 - DNA, 15 bp, Homo sapiens
cctgtttggaattcc

SEQ ID NO: 1545416 - DNA, 15 bp, Homo sapiens
ccctgtttggaattc

SEQ ID NO: 1545417 - DNA, 15 bp, Homo sapiens
accctgtttggaatt

SEQ ID NO: 1545418 - DNA, 15 bp, Homo sapiens
caccctgtttggaat

SEQ ID NO: 1545419 - DNA, 15 bp, Homo sapiens
tcaccctgtttggaa

SEQ ID NO: 1545420 - DNA, 15 bp, Homo sapiens
atcaccctgtttgga

SEQ ID NO: 1545421 - DNA, 15 bp, Homo sapiens
aatcaccctgtttgg

SEQ ID NO: 1545422 - DNA, 15 bp, Homo sapiens
gaatcaccctgtttg

SEQ ID NO: 1545423 - DNA, 15 bp, Homo sapiens
tgaatcaccctgttt

SEQ ID NO: 1545424 - DNA, 15 bp, Homo sapiens
gtgaatcaccctgtt

SEQ ID NO: 1545425 - DNA, 15 bp, Homo sapiens
tgtgaatcaccctgt

SEQ ID NO: 1545426 - DNA, 15 bp, Homo sapiens
gtgtgaatcaccctg

SEQ ID NO: 1545427 - DNA, 15 bp, Homo sapiens
agtgtgaatcaccct

SEQ ID NO: 1545428 - DNA, 15 bp, Homo sapiens
tagtgtgaatcaccc

SEQ ID NO: 1545429 - DNA, 15 bp, Homo sapiens
ttagtgtgaatcacc

SEQ ID NO: 1545430 - DNA, 15 bp, Homo sapiens
tttagtgtgaatcac

SEQ ID NO: 1545431 - DNA, 15 bp, Homo sapiens
gtttagtgtgaatca

SEQ ID NO: 1545432 - DNA, 15 bp, Homo sapiens
ggtttagtgtgaatc

SEQ ID NO: 1545433 - DNA, 15 bp, Homo sapiens
tggtttagtgtgaat

SEQ ID NO: 1545434 - DNA, 15 bp, Homo sapiens
ttggtttagtgtgaa

SEQ ID NO: 1545435 - DNA, 15 bp, Homo sapiens
attggtttagtgtga

SEQ ID NO: 1545436 - DNA, 15 bp, Homo sapiens
tattggtttagtgtg

SEQ ID NO: 1545437 - DNA, 15 bp, Homo sapiens
atattggtttagtgt

SEQ ID NO: 1545438 - DNA, 15 bp, Homo sapiens
tatattggtttagtg

SEQ ID NO: 1545439 - DNA, 15 bp, Homo sapiens
atatattggtttagt

SEQ ID NO: 1545440 - DNA, 15 bp, Homo sapiens
catatattggtttag

SEQ ID NO: 1545441 - DNA, 15 bp, Homo sapiens
acatatattggttta

SEQ ID NO: 1545442 - DNA, 15 bp, Homo sapiens
gacatatattggttt

SEQ ID NO: 1545443 - DNA, 15 bp, Homo sapiens
ggacatatattggtt

SEQ ID NO: 1545444 - DNA, 15 bp, Homo sapiens
aggacatatattggt

SEQ ID NO: 1545445 - DNA, 15 bp, Homo sapiens
aaggacatatattgg

SEQ ID NO: 1545446 - DNA, 15 bp, Homo sapiens
aaaggacatatattg

SEQ ID NO: 1545447 - DNA, 15 bp, Homo sapiens
gaaaggacatatatt

SEQ ID NO: 1545448 - DNA, 15 bp, Homo sapiens
agaaaggacatatat

SEQ ID NO: 1545449 - DNA, 15 bp, Homo sapiens
gagaaaggacatata

SEQ ID NO: 1545450 - DNA, 15 bp, Homo sapiens
ggagaaaggacatat

SEQ ID NO: 1545451 - DNA, 15 bp, Homo sapiens
tggagaaaggacata

SEQ ID NO: 1545452 - DNA, 15 bp, Homo sapiens
atggagaaaggacat

SEQ ID NO: 1545453 - DNA, 15 bp, Homo sapiens
gatggagaaaggaca

SEQ ID NO: 1545454 - DNA, 15 bp, Homo sapiens
tgatggagaaaggac

SEQ ID NO: 1545455 - DNA, 15 bp, Homo sapiens
atgatggagaaagga

SEQ ID NO: 1545456 - DNA, 15 bp, Homo sapiens
catgatggagaaagg

SEQ ID NO: 1545457 - DNA, 15 bp, Homo sapiens
acatgatggagaaag

SEQ ID NO: 1545458 - DNA, 15 bp, Homo sapiens
tacatgatggagaaa

SEQ ID NO: 1545459 - DNA, 15 bp, Homo sapiens
ttacatgatggagaa

SEQ ID NO: 1545460 - DNA, 15 bp, Homo sapiens
tttacatgatggaga

SEQ ID NO: 1545461 - DNA, 15 bp, Homo sapiens
ttttacatgatggag

SEQ ID NO: 1545462 - DNA, 15 bp, Homo sapiens
gttttacatgatgga

SEQ ID NO: 1545463 - DNA, 15 bp, Homo sapiens
tgttttacatgatgg

SEQ ID NO: 1545464 - DNA, 15 bp, Homo sapiens
ttgttttacatgatg

SEQ ID NO: 1545465 - DNA, 15 bp, Homo sapiens
gttgttttacatgat

SEQ ID NO: 1545466 - DNA, 15 bp, Homo sapiens
tgttgttttacatga

SEQ ID NO: 1545467 - DNA, 15 bp, Homo sapiens
gtgttgttttacatg

SEQ ID NO: 1545468 - DNA, 15 bp, Homo sapiens
cgtgttgttttacat

SEQ ID NO: 1545469 - DNA, 15 bp, Homo sapiens
tcgtgttgttttaca

SEQ ID NO: 1545470 - DNA, 15 bp, Homo sapiens
gtcgtgttgttttac

SEQ ID NO: 1545471 - DNA, 15 bp, Homo sapiens
tgtcgtgttgtttta

SEQ ID NO: 1545472 - DNA, 15 bp, Homo sapiens
atgtcgtgttgtttt

SEQ ID NO: 1545473 - DNA, 15 bp, Homo sapiens
tatgtcgtgttgttt

SEQ ID NO: 1545474 - DNA, 15 bp, Homo sapiens
ctatgtcgtgttgtt

SEQ ID NO: 1545475 - DNA, 15 bp, Homo sapiens
gctatgtcgtgttgt

SEQ ID NO: 1545476 - DNA, 15 bp, Homo sapiens
tgctatgtcgtgttg

SEQ ID NO: 1545477 - DNA, 15 bp, Homo sapiens
ctgctatgtcgtgtt

SEQ ID NO: 1545478 - DNA, 15 bp, Homo sapiens
tctgctatgtcgtgt

SEQ ID NO: 1545479 - DNA, 15 bp, Homo sapiens
atctgctatgtcgtg

SEQ ID NO: 1545480 - DNA, 15 bp, Homo sapiens
aatctgctatgtcgt

SEQ ID NO: 1545481 - DNA, 15 bp, Homo sapiens
aaatctgctatgtcg

SEQ ID NO: 1545482 - DNA, 15 bp, Homo sapiens
aaaatctgctatgtc

SEQ ID NO: 1545483 - DNA, 15 bp, Homo sapiens
aaaaatctgctatgt

SEQ ID NO: 1545484 - DNA, 15 bp, Homo sapiens
aaaaaatctgctatg

SEQ ID NO: 1545485 - DNA, 15 bp, Homo sapiens
aaaaaaatctgctat

SEQ ID NO: 1545486 - DNA, 15 bp, Homo sapiens
aaaaaaaatctgcta

SEQ ID NO: 1545487 - DNA, 15 bp, Homo sapiens
aaaaaaaaatctgct

SEQ ID NO: 1545488 - DNA, 15 bp, Homo sapiens
gaaaaaaaaatctgc

SEQ ID NO: 1545489 - DNA, 15 bp, Homo sapiens
ggaaaaaaaaatctg

SEQ ID NO: 1545490 - DNA, 15 bp, Homo sapiens
tggaaaaaaaaatct

SEQ ID NO: 1545491 - DNA, 15 bp, Homo sapiens
ttggaaaaaaaaatc

SEQ ID NO: 1545492 - DNA, 15 bp, Homo sapiens
tttggaaaaaaaaat

SEQ ID NO: 1545493 - DNA, 15 bp, Homo sapiens
ctttggaaaaaaaaa

SEQ ID NO: 1545494 - DNA, 15 bp, Homo sapiens
actttggaaaaaaaa

SEQ ID NO: 1545495 - DNA, 15 bp, Homo sapiens
tactttggaaaaaaa

SEQ ID NO: 1545496 - DNA, 15 bp, Homo sapiens
atactttggaaaaaa

SEQ ID NO: 1545497 - DNA, 15 bp, Homo sapiens
gatactttggaaaaa

SEQ ID NO: 1545498 - DNA, 15 bp, Homo sapiens
ggatactttggaaaa

SEQ ID NO: 1545499 - DNA, 15 bp, Homo sapiens
aggatactttggaaa

SEQ ID NO: 1545500 - DNA, 15 bp, Homo sapiens
taggatactttggaa

SEQ ID NO: 1545501 - DNA, 15 bp, Homo sapiens
ttaggatactttgga

SEQ ID NO: 1545502 - DNA, 15 bp, Homo sapiens
tttaggatactttgg

SEQ ID NO: 1545503 - DNA, 15 bp, Homo sapiens
atttaggatactttg

SEQ ID NO: 1545504 - DNA, 15 bp, Homo sapiens
aatttaggatacttt

SEQ ID NO: 1545505 - DNA, 15 bp, Homo sapiens
taatttaggatactt

SEQ ID NO: 1545506 - DNA, 15 bp, Homo sapiens
ttaatttaggatact

SEQ ID NO: 1545507 - DNA, 15 bp, Homo sapiens
cttaatttaggatac

SEQ ID NO: 1545508 - DNA, 15 bp, Homo sapiens
acttaatttaggata

SEQ ID NO: 1545509 - DNA, 15 bp, Homo sapiens
aacttaatttaggat

SEQ ID NO: 1545510 - DNA, 15 bp, Homo sapiens
aaacttaatttagga

SEQ ID NO: 1545511 - DNA, 15 bp, Homo sapiens
aaaacttaatttagg

SEQ ID NO: 1545512 - DNA, 15 bp, Homo sapiens
aaaaacttaatttag

SEQ ID NO: 1545513 - DNA, 15 bp, Homo sapiens
gaaaaacttaattta

SEQ ID NO: 1545514 - DNA, 15 bp, Homo sapiens
agaaaaacttaattt

SEQ ID NO: 1545515 - DNA, 15 bp, Homo sapiens
aagaaaaacttaatt

SEQ ID NO: 1545516 - DNA, 15 bp, Homo sapiens
gaagaaaaacttaat

SEQ ID NO: 1545517 - DNA, 15 bp, Homo sapiens
ggaagaaaaacttaa

SEQ ID NO: 1545518 - DNA, 15 bp, Homo sapiens
aggaagaaaaactta

SEQ ID NO: 1545519 - DNA, 15 bp, Homo sapiens
gaggaagaaaaactt

SEQ ID NO: 1545520 - DNA, 15 bp, Homo sapiens
agaggaagaaaaact

SEQ ID NO: 1545521 - DNA, 15 bp, Homo sapiens
tagaggaagaaaaac

SEQ ID NO: 1545522 - DNA, 15 bp, Homo sapiens
ttagaggaagaaaaa

SEQ ID NO: 1545523 - DNA, 15 bp, Homo sapiens
cttagaggaagaaaa

SEQ ID NO: 1545524 - DNA, 15 bp, Homo sapiens
acttagaggaagaaa

SEQ ID NO: 1545525 - DNA, 15 bp, Homo sapiens
gacttagaggaagaa

SEQ ID NO: 1545526 - DNA, 15 bp, Homo sapiens
ggacttagaggaaga

SEQ ID NO: 1545527 - DNA, 15 bp, Homo sapiens
aggacttagaggaag

SEQ ID NO: 1545528 - DNA, 15 bp, Homo sapiens
gaggacttagaggaa

SEQ ID NO: 1545529 - DNA, 15 bp, Homo sapiens
agaggacttagagga

SEQ ID NO: 1545530 - DNA, 15 bp, Homo sapiens
tagaggacttagagg

SEQ ID NO: 1545531 - DNA, 15 bp, Homo sapiens
ttagaggacttagag

SEQ ID NO: 1545532 - DNA, 15 bp, Homo sapiens
attagaggacttaga

SEQ ID NO: 1545533 - DNA, 15 bp, Homo sapiens
aattagaggacttag

SEQ ID NO: 1545534 - DNA, 15 bp, Homo sapiens
aaattagaggactta

SEQ ID NO: 1545535 - DNA, 15 bp, Homo sapiens
aaaattagaggactt

SEQ ID NO: 1545536 - DNA, 15 bp, Homo sapiens
aaaaattagaggact

SEQ ID NO: 1545537 - DNA, 15 bp, Homo sapiens
aaaaaattagaggac

SEQ ID NO: 1545538 - DNA, 15 bp, Homo sapiens
aaaaaaattagagga

SEQ ID NO: 1545539 - DNA, 15 bp, Homo sapiens
gaaaaaaattagagg

SEQ ID NO: 1545540 - DNA, 15 bp, Homo sapiens
ggaaaaaaattagag

SEQ ID NO: 1545541 - DNA, 15 bp, Homo sapiens
tggaaaaaaattaga

SEQ ID NO: 1545542 - DNA, 15 bp, Homo sapiens
atggaaaaaaattag

SEQ ID NO: 1545543 - DNA, 15 bp, Homo sapiens
aatggaaaaaaatta

SEQ ID NO: 1545544 - DNA, 15 bp, Homo sapiens
aaatggaaaaaaatt

SEQ ID NO: 1545545 - DNA, 15 bp, Homo sapiens
aaaatggaaaaaaat

SEQ ID NO: 1545546 - DNA, 15 bp, Homo sapiens
gaaaatggaaaaaaa

SEQ ID NO: 1545547 - DNA, 15 bp, Homo sapiens
tgaaaatggaaaaaa

SEQ ID NO: 1545548 - DNA, 15 bp, Homo sapiens
ctgaaaatggaaaaa

SEQ ID NO: 1545549 - DNA, 15 bp, Homo sapiens
tctgaaaatggaaaa

SEQ ID NO: 1545550 - DNA, 15 bp, Homo sapiens
ttctgaaaatggaaa

SEQ ID NO: 1545551 - DNA, 15 bp, Homo sapiens
cttctgaaaatggaa

SEQ ID NO: 1545552 - DNA, 15 bp, Homo sapiens
acttctgaaaatgga

SEQ ID NO: 1545553 - DNA, 15 bp, Homo sapiens
tacttctgaaaatgg

SEQ ID NO: 1545554 - DNA, 15 bp, Homo sapiens
atacttctgaaaatg

SEQ ID NO: 1545555 - DNA, 15 bp, Homo sapiens
tatacttctgaaaat

SEQ ID NO: 1545556 - DNA, 15 bp, Homo sapiens
atatacttctgaaaa

SEQ ID NO: 1545557 - DNA, 15 bp, Homo sapiens
gatatacttctgaaa

SEQ ID NO: 1545558 - DNA, 15 bp, Homo sapiens
tgatatacttctgaa

SEQ ID NO: 1545559 - DNA, 15 bp, Homo sapiens
gtgatatacttctga

SEQ ID NO: 1545560 - DNA, 15 bp, Homo sapiens
agtgatatacttctg

SEQ ID NO: 1545561 - DNA, 15 bp, Homo sapiens
tagtgatatacttct

SEQ ID NO: 1545562 - DNA, 15 bp, Homo sapiens
atagtgatatacttc

SEQ ID NO: 1545563 - DNA, 15 bp, Homo sapiens
aatagtgatatactt

SEQ ID NO: 1545564 - DNA, 15 bp, Homo sapiens
aaatagtgatatact

SEQ ID NO: 1545565 - DNA, 15 bp, Homo sapiens
taaatagtgatatac

SEQ ID NO: 1545566 - DNA, 15 bp, Homo sapiens
ctaaatagtgatata

SEQ ID NO: 1545567 - DNA, 15 bp, Homo sapiens
actaaatagtgatat

SEQ ID NO: 1545568 - DNA, 15 bp, Homo sapiens
aactaaatagtgata

SEQ ID NO: 1545569 - DNA, 15 bp, Homo sapiens
aaactaaatagtgat

SEQ ID NO: 1545570 - DNA, 15 bp, Homo sapiens
taaactaaatagtga

SEQ ID NO: 1545571 - DNA, 15 bp, Homo sapiens
ttaaactaaatagtg

SEQ ID NO: 1545572 - DNA, 15 bp, Homo sapiens
tttaaactaaatagt

SEQ ID NO: 1545573 - DNA, 15 bp, Homo sapiens
ttttaaactaaatag

SEQ ID NO: 1545574 - DNA, 15 bp, Homo sapiens
cttttaaactaaata

SEQ ID NO: 1545575 - DNA, 15 bp, Homo sapiens
acttttaaactaaat

SEQ ID NO: 1545576 - DNA, 15 bp, Homo sapiens
gacttttaaactaaa

SEQ ID NO: 1545577 - DNA, 15 bp, Homo sapiens
tgacttttaaactaa

SEQ ID NO: 1545578 - DNA, 15 bp, Homo sapiens
ttgacttttaaacta

SEQ ID NO: 1545579 - DNA, 15 bp, Homo sapiens
cttgacttttaaact

SEQ ID NO: 1545580 - DNA, 15 bp, Homo sapiens
acttgacttttaaac

SEQ ID NO: 1545581 - DNA, 15 bp, Homo sapiens
gacttgacttttaaa

SEQ ID NO: 1545582 - DNA, 15 bp, Homo sapiens
tgacttgacttttaa

SEQ ID NO: 1545583 - DNA, 15 bp, Homo sapiens
ctgacttgactttta

SEQ ID NO: 1545584 - DNA, 15 bp, Homo sapiens
tctgacttgactttt

SEQ ID NO: 1545585 - DNA, 15 bp, Homo sapiens
atctgacttgacttt

SEQ ID NO: 1545586 - DNA, 15 bp, Homo sapiens
aatctgacttgactt

SEQ ID NO: 1545587 - DNA, 15 bp, Homo sapiens
taatctgacttgact

SEQ ID NO: 1545588 - DNA, 15 bp, Homo sapiens
ataatctgacttgac

SEQ ID NO: 1545589 - DNA, 15 bp, Homo sapiens
aataatctgacttga

SEQ ID NO: 1545590 - DNA, 15 bp, Homo sapiens
caataatctgacttg

SEQ ID NO: 1545591 - DNA, 15 bp, Homo sapiens
gcaataatctgactt

SEQ ID NO: 1545592 - DNA, 15 bp, Homo sapiens
agcaataatctgact

SEQ ID NO: 1545593 - DNA, 15 bp, Homo sapiens
aagcaataatctgac

SEQ ID NO: 1545594 - DNA, 15 bp, Homo sapiens
aaagcaataatctga

SEQ ID NO: 1545595 - DNA, 15 bp, Homo sapiens
taaagcaataatctg

SEQ ID NO: 1545596 - DNA, 15 bp, Homo sapiens
gtaaagcaataatct

SEQ ID NO: 1545597 - DNA, 15 bp, Homo sapiens
tgtaaagcaataatc

SEQ ID NO: 1545598 - DNA, 15 bp, Homo sapiens
ttgtaaagcaataat

SEQ ID NO: 1545599 - DNA, 15 bp, Homo sapiens
tttgtaaagcaataa

SEQ ID NO: 1545600 - DNA, 15 bp, Homo sapiens
ttttgtaaagcaata

SEQ ID NO: 1545601 - DNA, 15 bp, Homo sapiens
cttttgtaaagcaat

SEQ ID NO: 1545602 - DNA, 15 bp, Homo sapiens
tcttttgtaaagcaa

SEQ ID NO: 1545603 - DNA, 15 bp, Homo sapiens
ttcttttgtaaagca

SEQ ID NO: 1545604 - DNA, 15 bp, Homo sapiens
cttcttttgtaaagc

SEQ ID NO: 1545605 - DNA, 15 bp, Homo sapiens
ccttcttttgtaaag

SEQ ID NO: 1545606 - DNA, 15 bp, Homo sapiens
gccttcttttgtaaa

SEQ ID NO: 1545607 - DNA, 15 bp, Homo sapiens
ggccttcttttgtaa

SEQ ID NO: 1545608 - DNA, 15 bp, Homo sapiens
aggccttcttttgta

SEQ ID NO: 1545609 - DNA, 15 bp, Homo sapiens
taggccttcttttgt

SEQ ID NO: 1545610 - DNA, 15 bp, Homo sapiens
ttaggccttcttttg

SEQ ID NO: 1545611 - DNA, 15 bp, Homo sapiens
attaggccttctttt

SEQ ID NO: 1545612 - DNA, 15 bp, Homo sapiens
cattaggccttcttt

SEQ ID NO: 1545613 - DNA, 15 bp, Homo sapiens
acattaggccttctt

SEQ ID NO: 1545614 - DNA, 15 bp, Homo sapiens
aacattaggccttct

SEQ ID NO: 1545615 - DNA, 15 bp, Homo sapiens
gaacattaggccttc

SEQ ID NO: 1545616 - DNA, 15 bp, Homo sapiens
tgaacattaggcctt

SEQ ID NO: 1545617 - DNA, 15 bp, Homo sapiens
ttgaacattaggcct

SEQ ID NO: 1545618 - DNA, 15 bp, Homo sapiens
attgaacattaggcc

SEQ ID NO: 1545619 - DNA, 15 bp, Homo sapiens
tattgaacattaggc

SEQ ID NO: 1545620 - DNA, 15 bp, Homo sapiens
ttattgaacattagg

SEQ ID NO: 1545621 - DNA, 15 bp, Homo sapiens
gttattgaacattag

SEQ ID NO: 1545622 - DNA, 15 bp, Homo sapiens
agttattgaacatta

SEQ ID NO: 1545623 - DNA, 15 bp, Homo sapiens
aagttattgaacatt

SEQ ID NO: 1545624 - DNA, 15 bp, Homo sapiens
caagttattgaacat

SEQ ID NO: 1545625 - DNA, 15 bp, Homo sapiens
ccaagttattgaaca

SEQ ID NO: 1545626 - DNA, 15 bp, Homo sapiens
accaagttattgaac

SEQ ID NO: 1545627 - DNA, 15 bp, Homo sapiens
taccaagttattgaa

SEQ ID NO: 1545628 - DNA, 15 bp, Homo sapiens
ttaccaagttattga

SEQ ID NO: 1545629 - DNA, 15 bp, Homo sapiens
gttaccaagttattg

SEQ ID NO: 1545630 - DNA, 15 bp, Homo sapiens
tgttaccaagttatt

SEQ ID NO: 1545631 - DNA, 15 bp, Homo sapiens
atgttaccaagttat

SEQ ID NO: 1545632 - DNA, 15 bp, Homo sapiens
aatgttaccaagtta

SEQ ID NO: 1545633 - DNA, 15 bp, Homo sapiens
taatgttaccaagtt

SEQ ID NO: 1545634 - DNA, 15 bp, Homo sapiens
ataatgttaccaagt

SEQ ID NO: 1545635 - DNA, 15 bp, Homo sapiens
aataatgttaccaag

SEQ ID NO: 1545636 - DNA, 15 bp, Homo sapiens
caataatgttaccaa

SEQ ID NO: 1545637 - DNA, 15 bp, Homo sapiens
gcaataatgttacca

SEQ ID NO: 1545638 - DNA, 15 bp, Homo sapiens
tgcaataatgttacc

SEQ ID NO: 1545639 - DNA, 15 bp, Homo sapiens
atgcaataatgttac

SEQ ID NO: 1545640 - DNA, 15 bp, Homo sapiens
tatgcaataatgtta

SEQ ID NO: 1545641 - DNA, 15 bp, Homo sapiens
gtatgcaataatgtt

SEQ ID NO: 1545642 - DNA, 15 bp, Homo sapiens
agtatgcaataatgt

SEQ ID NO: 1545643 - DNA, 15 bp, Homo sapiens
aagtatgcaataatg

SEQ ID NO: 1545644 - DNA, 15 bp, Homo sapiens
aaagtatgcaataat

SEQ ID NO: 1545645 - DNA, 15 bp, Homo sapiens
gaaagtatgcaataa

SEQ ID NO: 1545646 - DNA, 15 bp, Homo sapiens
ggaaagtatgcaata

SEQ ID NO: 1545647 - DNA, 15 bp, Homo sapiens
tggaaagtatgcaat

SEQ ID NO: 1545648 - DNA, 15 bp, Homo sapiens
gtggaaagtatgcaa

SEQ ID NO: 1545649 - DNA, 15 bp, Homo sapiens
ggtggaaagtatgca

SEQ ID NO: 1545650 - DNA, 15 bp, Homo sapiens
aggtggaaagtatgc

SEQ ID NO: 1545651 - DNA, 15 bp, Homo sapiens
taggtggaaagtatg

SEQ ID NO: 1545652 - DNA, 15 bp, Homo sapiens
gtaggtggaaagtat

SEQ ID NO: 1545653 - DNA, 15 bp, Homo sapiens
tgtaggtggaaagta

SEQ ID NO: 1545654 - DNA, 15 bp, Homo sapiens
atgtaggtggaaagt

SEQ ID NO: 1545655 - DNA, 15 bp, Homo sapiens
gatgtaggtggaaag

SEQ ID NO: 1545656 - DNA, 15 bp, Homo sapiens
tgatgtaggtggaaa

SEQ ID NO: 1545657 - DNA, 15 bp, Homo sapiens
gtgatgtaggtggaa

SEQ ID NO: 1545658 - DNA, 15 bp, Homo sapiens
agtgatgtaggtgga

SEQ ID NO: 1545659 - DNA, 15 bp, Homo sapiens
gagtgatgtaggtgg

SEQ ID NO: 1545660 - DNA, 15 bp, Homo sapiens
agagtgatgtaggtg

SEQ ID NO: 1545661 - DNA, 15 bp, Homo sapiens
aagagtgatgtaggt

SEQ ID NO: 1545662 - DNA, 15 bp, Homo sapiens
taagagtgatgtagg

SEQ ID NO: 1545663 - DNA, 15 bp, Homo sapiens
ttaagagtgatgtag

SEQ ID NO: 1545664 - DNA, 15 bp, Homo sapiens
gttaagagtgatgta

SEQ ID NO: 1545665 - DNA, 15 bp, Homo sapiens
tgttaagagtgatgt

SEQ ID NO: 1545666 - DNA, 15 bp, Homo sapiens
ttgttaagagtgatg

SEQ ID NO: 1545667 - DNA, 15 bp, Homo sapiens
tttgttaagagtgat

SEQ ID NO: 1545668 - DNA, 15 bp, Homo sapiens
ttttgttaagagtga

SEQ ID NO: 1545669 - DNA, 15 bp, Homo sapiens
attttgttaagagtg

SEQ ID NO: 1545670 - DNA, 15 bp, Homo sapiens
aattttgttaagagt

SEQ ID NO: 1545671 - DNA, 15 bp, Homo sapiens
gaattttgttaagag

SEQ ID NO: 1545672 - DNA, 15 bp, Homo sapiens
agaattttgttaaga

SEQ ID NO: 1545673 - DNA, 15 bp, Homo sapiens
gagaattttgttaag

SEQ ID NO: 1545674 - DNA, 15 bp, Homo sapiens
tgagaattttgttaa

SEQ ID NO: 1545675 - DNA, 15 bp, Homo sapiens
ttgagaattttgtta

SEQ ID NO: 1545676 - DNA, 15 bp, Homo sapiens
tttgagaattttgtt

SEQ ID NO: 1545677 - DNA, 15 bp, Homo sapiens
ttttgagaattttgt

SEQ ID NO: 1545678 - DNA, 15 bp, Homo sapiens
attttgagaattttg

SEQ ID NO: 1545679 - DNA, 15 bp, Homo sapiens
tattttgagaatttt

SEQ ID NO: 1545680 - DNA, 15 bp, Homo sapiens
ttattttgagaattt

SEQ ID NO: 1545681 - DNA, 15 bp, Homo sapiens
tttattttgagaatt

SEQ ID NO: 1545682 - DNA, 15 bp, Homo sapiens
atttattttgagaat

SEQ ID NO: 1545683 - DNA, 15 bp, Homo sapiens
gatttattttgagaa

SEQ ID NO: 1545684 - DNA, 15 bp, Homo sapiens
agatttattttgaga

SEQ ID NO: 1545685 - DNA, 15 bp, Homo sapiens
aagatttattttgag

SEQ ID NO: 1545686 - DNA, 15 bp, Homo sapiens
taagatttattttga

SEQ ID NO: 1545687 - DNA, 15 bp, Homo sapiens
ttaagatttattttg

SEQ ID NO: 1545688 - DNA, 15 bp, Homo sapiens
cttaagatttatttt

SEQ ID NO: 1545689 - DNA, 15 bp, Homo sapiens
tcttaagatttattt

SEQ ID NO: 1545690 - DNA, 15 bp, Homo sapiens
gtcttaagatttatt

SEQ ID NO: 1545691 - DNA, 15 bp, Homo sapiens
tgtcttaagatttat

SEQ ID NO: 1545692 - DNA, 15 bp, Homo sapiens
ttgtcttaagattta

SEQ ID NO: 1545693 - DNA, 15 bp, Homo sapiens
tttgtcttaagattt

SEQ ID NO: 1545694 - DNA, 15 bp, Homo sapiens
atttgtcttaagatt

SEQ ID NO: 1545695 - DNA, 15 bp, Homo sapiens
tatttgtcttaagat

SEQ ID NO: 1545696 - DNA, 15 bp, Homo sapiens
ttatttgtcttaaga

SEQ ID NO: 1545697 - DNA, 15 bp, Homo sapiens
cttatttgtcttaag

SEQ ID NO: 1545698 - DNA, 15 bp, Homo sapiens
acttatttgtcttaa

SEQ ID NO: 1545699 - DNA, 15 bp, Homo sapiens
gacttatttgtctta

SEQ ID NO: 1545700 - DNA, 15 bp, Homo sapiens
tgacttatttgtctt

SEQ ID NO: 1545701 - DNA, 15 bp, Homo sapiens
atgacttatttgtct

SEQ ID NO: 1545702 - DNA, 15 bp, Homo sapiens
gatgacttatttgtc

SEQ ID NO: 1545703 - DNA, 15 bp, Homo sapiens
agatgacttatttgt

SEQ ID NO: 1545704 - DNA, 15 bp, Homo sapiens
cagatgacttatttg

SEQ ID NO: 1545705 - DNA, 15 bp, Homo sapiens
tcagatgacttattt

SEQ ID NO: 1545706 - DNA, 15 bp, Homo sapiens
ctcagatgacttatt

SEQ ID NO: 1545707 - DNA, 15 bp, Homo sapiens
gctcagatgacttat

SEQ ID NO: 1545708 - DNA, 15 bp, Homo sapiens
tgctcagatgactta

SEQ ID NO: 1545709 - DNA, 15 bp, Homo sapiens
ctgctcagatgactt

SEQ ID NO: 1545710 - DNA, 15 bp, Homo sapiens
tctgctcagatgact

SEQ ID NO: 1545711 - DNA, 15 bp, Homo sapiens
ctctgctcagatgac

SEQ ID NO: 1545712 - DNA, 15 bp, Homo sapiens
actctgctcagatga

SEQ ID NO: 1545713 - DNA, 15 bp, Homo sapiens
cactctgctcagatg

SEQ ID NO: 1545714 - DNA, 15 bp, Homo sapiens
acactctgctcagat

SEQ ID NO: 1545715 - DNA, 15 bp, Homo sapiens
tacactctgctcaga

SEQ ID NO: 1545716 - DNA, 15 bp, Homo sapiens
ttacactctgctcag

SEQ ID NO: 1545717 - DNA, 15 bp, Homo sapiens
attacactctgctca

SEQ ID NO: 1545718 - DNA, 15 bp, Homo sapiens
aattacactctgctc

SEQ ID NO: 1545719 - DNA, 15 bp, Homo sapiens
caattacactctgct

SEQ ID NO: 1545720 - DNA, 15 bp, Homo sapiens
ccaattacactctgc

SEQ ID NO: 1545721 - DNA, 15 bp, Homo sapiens
accaattacactctg

SEQ ID NO: 1545722 - DNA, 15 bp, Homo sapiens
aaccaattacactct

SEQ ID NO: 1545723 - DNA, 15 bp, Homo sapiens
gaaccaattacactc

SEQ ID NO: 1545724 - DNA, 15 bp, Homo sapiens
ggaaccaattacact

SEQ ID NO: 1545725 - DNA, 15 bp, Homo sapiens
tggaaccaattacac

SEQ ID NO: 1545726 - DNA, 15 bp, Homo sapiens
atggaaccaattaca

SEQ ID NO: 1545727 - DNA, 15 bp, Homo sapiens
aatggaaccaattac

SEQ ID NO: 1545728 - DNA, 15 bp, Homo sapiens
aaatggaaccaatta

SEQ ID NO: 1545729 - DNA, 15 bp, Homo sapiens
taaatggaaccaatt

SEQ ID NO: 1545730 - DNA, 15 bp, Homo sapiens
ctaaatggaaccaat

SEQ ID NO: 1545731 - DNA, 15 bp, Homo sapiens
cctaaatggaaccaa

SEQ ID NO: 1545732 - DNA, 15 bp, Homo sapiens
gcctaaatggaacca

SEQ ID NO: 1545733 - DNA, 15 bp, Homo sapiens
agcctaaatggaacc

SEQ ID NO: 1545734 - DNA, 15 bp, Homo sapiens
aagcctaaatggaac

SEQ ID NO: 1545735 - DNA, 15 bp, Homo sapiens
taagcctaaatggaa

SEQ ID NO: 1545736 - DNA, 15 bp, Homo sapiens
ttaagcctaaatgga

SEQ ID NO: 1545737 - DNA, 15 bp, Homo sapiens
attaagcctaaatgg

SEQ ID NO: 1545738 - DNA, 15 bp, Homo sapiens
tattaagcctaaatg

SEQ ID NO: 1545739 - DNA, 15 bp, Homo sapiens
ttattaagcctaaat

SEQ ID NO: 1545740 - DNA, 15 bp, Homo sapiens
gttattaagcctaaa

SEQ ID NO: 1545741 - DNA, 15 bp, Homo sapiens
agttattaagcctaa

SEQ ID NO: 1545742 - DNA, 15 bp, Homo sapiens
aagttattaagccta

SEQ ID NO: 1545743 - DNA, 15 bp, Homo sapiens
caagttattaagcct

SEQ ID NO: 1545744 - DNA, 15 bp, Homo sapiens
tcaagttattaagcc

SEQ ID NO: 1545745 - DNA, 15 bp, Homo sapiens
ttcaagttattaagc

SEQ ID NO: 1545746 - DNA, 15 bp, Homo sapiens
attcaagttattaag

SEQ ID NO: 1545747 - DNA, 15 bp, Homo sapiens
tattcaagttattaa

SEQ ID NO: 1545748 - DNA, 15 bp, Homo sapiens
atattcaagttatta

SEQ ID NO: 1545749 - DNA, 15 bp, Homo sapiens
catattcaagttatt

SEQ ID NO: 1545750 - DNA, 15 bp, Homo sapiens
gcatattcaagttat

SEQ ID NO: 1545751 - DNA, 15 bp, Homo sapiens
tgcatattcaagtta

SEQ ID NO: 1545752 - DNA, 15 bp, Homo sapiens
atgcatattcaagtt

SEQ ID NO: 1545753 - DNA, 15 bp, Homo sapiens
catgcatattcaagt

SEQ ID NO: 1545754 - DNA, 15 bp, Homo sapiens
acatgcatattcaag

SEQ ID NO: 1545755 - DNA, 15 bp, Homo sapiens
cacatgcatattcaa

SEQ ID NO: 1545756 - DNA, 15 bp, Homo sapiens
ccacatgcatattca

SEQ ID NO: 1545757 - DNA, 15 bp, Homo sapiens
tccacatgcatattc

SEQ ID NO: 1545758 - DNA, 15 bp, Homo sapiens
ttccacatgcatatt

SEQ ID NO: 1545759 - DNA, 15 bp, Homo sapiens
tttccacatgcatat

SEQ ID NO: 1545760 - DNA, 15 bp, Homo sapiens
ctttccacatgcata

SEQ ID NO: 1545761 - DNA, 15 bp, Homo sapiens
tctttccacatgcat

SEQ ID NO: 1545762 - DNA, 15 bp, Homo sapiens
ctctttccacatgca

SEQ ID NO: 1545763 - DNA, 15 bp, Homo sapiens
gctctttccacatgc

SEQ ID NO: 1545764 - DNA, 15 bp, Homo sapiens
tgctctttccacatg

SEQ ID NO: 1545765 - DNA, 15 bp, Homo sapiens
atgctctttccacat

SEQ ID NO: 1545766 - DNA, 15 bp, Homo sapiens
catgctctttccaca

SEQ ID NO: 1545767 - DNA, 15 bp, Homo sapiens
ccatgctctttccac

SEQ ID NO: 1545768 - DNA, 15 bp, Homo sapiens
gccatgctctttcca

SEQ ID NO: 1545769 - DNA, 15 bp, Homo sapiens
agccatgctctttcc

SEQ ID NO: 1545770 - DNA, 15 bp, Homo sapiens
cagccatgctctttc

SEQ ID NO: 1545771 - DNA, 15 bp, Homo sapiens
acagccatgctcttt

SEQ ID NO: 1545772 - DNA, 15 bp, Homo sapiens
cacagccatgctctt

SEQ ID NO: 1545773 - DNA, 15 bp, Homo sapiens
ccacagccatgctct

SEQ ID NO: 1545774 - DNA, 15 bp, Homo sapiens
tccacagccatgctc

SEQ ID NO: 1545775 - DNA, 15 bp, Homo sapiens
ctccacagccatgct

SEQ ID NO: 1545776 - DNA, 15 bp, Homo sapiens
actccacagccatgc

SEQ ID NO: 1545777 - DNA, 15 bp, Homo sapiens
cactccacagccatg

SEQ ID NO: 1545778 - DNA, 15 bp, Homo sapiens
tcactccacagccat

SEQ ID NO: 1545779 - DNA, 15 bp, Homo sapiens
ctcactccacagcca

SEQ ID NO: 1545780 - DNA, 15 bp, Homo sapiens
tactcactccacagc

SEQ ID NO: 1545781 - DNA, 15 bp, Homo sapiens
ctactcactccacag

SEQ ID NO: 1545782 - DNA, 15 bp, Homo sapiens
tctactcactccaca

SEQ ID NO: 1545783 - DNA, 15 bp, Homo sapiens
atctactcactccac

SEQ ID NO: 1545784 - DNA, 15 bp, Homo sapiens
catctactcactcca

SEQ ID NO: 1545785 - DNA, 15 bp, Homo sapiens
acatctactcactcc

SEQ ID NO: 1545786 - DNA, 15 bp, Homo sapiens
cacatctactcactc

SEQ ID NO: 1545787 - DNA, 15 bp, Homo sapiens
ccacatctactcact

SEQ ID NO: 1545788 - DNA, 15 bp, Homo sapiens
accacatctactcac

SEQ ID NO: 1545789 - DNA, 15 bp, Homo sapiens
aaccacatctactca

SEQ ID NO: 1545790 - DNA, 15 bp, Homo sapiens
aaaccacatctactc

SEQ ID NO: 1545791 - DNA, 15 bp, Homo sapiens
caaaccacatctact

SEQ ID NO: 1545792 - DNA, 15 bp, Homo sapiens
tcaaaccacatctac

SEQ ID NO: 1545793 - DNA, 15 bp, Homo sapiens
ttcaaaccacatcta

SEQ ID NO: 1545794 - DNA, 15 bp, Homo sapiens
gttcaaaccacatct

SEQ ID NO: 1545795 - DNA, 15 bp, Homo sapiens
tgttcaaaccacatc

SEQ ID NO: 1545796 - DNA, 15 bp, Homo sapiens
ctgttcaaaccacat

SEQ ID NO: 1545797 - DNA, 15 bp, Homo sapiens
tctgttcaaaccaca

SEQ ID NO: 1545798 - DNA, 15 bp, Homo sapiens
atctgttcaaaccac

SEQ ID NO: 1545799 - DNA, 15 bp, Homo sapiens
tatctgttcaaacca

SEQ ID NO: 1545800 - DNA, 15 bp, Homo sapiens
atatctgttcaaacc

SEQ ID NO: 1545801 - DNA, 15 bp, Homo sapiens
catatctgttcaaac

SEQ ID NO: 1545802 - DNA, 15 bp, Homo sapiens
gcatatctgttcaaa

SEQ ID NO: 1545803 - DNA, 15 bp, Homo sapiens
ggcatatctgttcaa

SEQ ID NO: 1545804 - DNA, 15 bp, Homo sapiens
tggcatatctgttca

SEQ ID NO: 1545805 - DNA, 15 bp, Homo sapiens
gtggcatatctgttc

SEQ ID NO: 1545806 - DNA, 15 bp, Homo sapiens
agtggcatatctgtt

SEQ ID NO: 1545807 - DNA, 15 bp, Homo sapiens
aagtggcatatctgt

SEQ ID NO: 1545808 - DNA, 15 bp, Homo sapiens
aaagtggcatatctg

SEQ ID NO: 1545809 - DNA, 15 bp, Homo sapiens
gaaagtggcatatct

SEQ ID NO: 1545810 - DNA, 15 bp, Homo sapiens
agaaagtggcatatc

SEQ ID NO: 1545811 - DNA, 15 bp, Homo sapiens
tagaaagtggcatat

SEQ ID NO: 1545812 - DNA, 15 bp, Homo sapiens
ctagaaagtggcata

SEQ ID NO: 1545813 - DNA, 15 bp, Homo sapiens
gctagaaagtggcat

SEQ ID NO: 1545814 - DNA, 15 bp, Homo sapiens
agctagaaagtggca

SEQ ID NO: 1545815 - DNA, 15 bp, Homo sapiens
tagctagaaagtggc

SEQ ID NO: 1545816 - DNA, 15 bp, Homo sapiens
atagctagaaagtgg

SEQ ID NO: 1545817 - DNA, 15 bp, Homo sapiens
catagctagaaagtg

SEQ ID NO: 1545818 - DNA, 15 bp, Homo sapiens
acatagctagaaagt

SEQ ID NO: 1545819 - DNA, 15 bp, Homo sapiens
tacatagctagaaag

SEQ ID NO: 1545820 - DNA, 15 bp, Homo sapiens
gtacatagctagaaa

SEQ ID NO: 1545821 - DNA, 15 bp, Homo sapiens
agtacatagctagaa

SEQ ID NO: 1545822 - DNA, 15 bp, Homo sapiens
aagtacatagctaga

SEQ ID NO: 1545823 - DNA, 15 bp, Homo sapiens
aaagtacatagctag

SEQ ID NO: 1545824 - DNA, 15 bp, Homo sapiens
caaagtacatagcta

SEQ ID NO: 1545825 - DNA, 15 bp, Homo sapiens
tcaaagtacatagct

SEQ ID NO: 1545826 - DNA, 15 bp, Homo sapiens
ctcaaagtacatagc

SEQ ID NO: 1545827 - DNA, 15 bp, Homo sapiens
gctcaaagtacatag

SEQ ID NO: 1545828 - DNA, 15 bp, Homo sapiens
tgctcaaagtacata

SEQ ID NO: 1545829 - DNA, 15 bp, Homo sapiens
ttgctcaaagtacat

SEQ ID NO: 1545830 - DNA, 15 bp, Homo sapiens
cttgctcaaagtaca

SEQ ID NO: 1545831 - DNA, 15 bp, Homo sapiens
tcttgctcaaagtac

SEQ ID NO: 1545832 - DNA, 15 bp, Homo sapiens
atcttgctcaaagta

SEQ ID NO: 1545833 - DNA, 15 bp, Homo sapiens
tatcttgctcaaagt

SEQ ID NO: 1545834 - DNA, 15 bp, Homo sapiens
gtatcttgctcaaag

SEQ ID NO: 1545835 - DNA, 15 bp, Homo sapiens
agtatcttgctcaaa

SEQ ID NO: 1545836 - DNA, 15 bp, Homo sapiens
cagtatcttgctcaa

SEQ ID NO: 1545837 - DNA, 15 bp, Homo sapiens
tcagtatcttgctca

SEQ ID NO: 1545838 - DNA, 15 bp, Homo sapiens
ttcagtatcttgctc

SEQ ID NO: 1545839 - DNA, 15 bp, Homo sapiens
cttcagtatcttgct

SEQ ID NO: 1545840 - DNA, 15 bp, Homo sapiens
acttcagtatcttgc

SEQ ID NO: 1545841 - DNA, 15 bp, Homo sapiens
aacttcagtatcttg

SEQ ID NO: 1545842 - DNA, 15 bp, Homo sapiens
aaacttcagtatctt

SEQ ID NO: 1545843 - DNA, 15 bp, Homo sapiens
aaaacttcagtatct

SEQ ID NO: 1545844 - DNA, 15 bp, Homo sapiens
gaaaacttcagtatc

SEQ ID NO: 1545845 - DNA, 15 bp, Homo sapiens
tgaaaacttcagtat

SEQ ID NO: 1545846 - DNA, 15 bp, Homo sapiens
ctgaaaacttcagta

SEQ ID NO: 1545847 - DNA, 15 bp, Homo sapiens
tctgaaaacttcagt

SEQ ID NO: 1545848 - DNA, 15 bp, Homo sapiens
atctgaaaacttcag

SEQ ID NO: 1545849 - DNA, 15 bp, Homo sapiens
tatctgaaaacttca

SEQ ID NO: 1545850 - DNA, 15 bp, Homo sapiens
atatctgaaaacttc

SEQ ID NO: 1545851 - DNA, 15 bp, Homo sapiens
gatatctgaaaactt

SEQ ID NO: 1545852 - DNA, 15 bp, Homo sapiens
agatatctgaaaact

SEQ ID NO: 1545853 - DNA, 15 bp, Homo sapiens
tagatatctgaaaac

SEQ ID NO: 1545854 - DNA, 15 bp, Homo sapiens
ctagatatctgaaaa

SEQ ID NO: 1545855 - DNA, 15 bp, Homo sapiens
actagatatctgaaa

SEQ ID NO: 1545856 - DNA, 15 bp, Homo sapiens
aactagatatctgaa

SEQ ID NO: 1545857 - DNA, 15 bp, Homo sapiens
aaactagatatctga

SEQ ID NO: 1545858 - DNA, 15 bp, Homo sapiens
gaaactagatatctg

SEQ ID NO: 1545859 - DNA, 15 bp, Homo sapiens
ggaaactagatatct

SEQ ID NO: 1545860 - DNA, 15 bp, Homo sapiens
aggaaactagatatc

SEQ ID NO: 1545861 - DNA, 15 bp, Homo sapiens
aaggaaactagatat

SEQ ID NO: 1545862 - DNA, 15 bp, Homo sapiens
taaggaaactagata

SEQ ID NO: 1545863 - DNA, 15 bp, Homo sapiens
ataaggaaactagat

SEQ ID NO: 1545864 - DNA, 15 bp, Homo sapiens
aataaggaaactaga

SEQ ID NO: 1545865 - DNA, 15 bp, Homo sapiens
aaataaggaaactag

SEQ ID NO: 1545866 - DNA, 15 bp, Homo sapiens
caaataaggaaacta

SEQ ID NO: 1545867 - DNA, 15 bp, Homo sapiens
acaaataaggaaact

SEQ ID NO: 1545868 - DNA, 15 bp, Homo sapiens
cacaaataaggaaac

SEQ ID NO: 1545869 - DNA, 15 bp, Homo sapiens
tcacaaataaggaaa

SEQ ID NO: 1545870 - DNA, 15 bp, Homo sapiens
ttcacaaataaggaa

SEQ ID NO: 1545871 - DNA, 15 bp, Homo sapiens
tttcacaaataagga

SEQ ID NO: 1545872 - DNA, 15 bp, Homo sapiens
atttcacaaataagg

SEQ ID NO: 1545873 - DNA, 15 bp, Homo sapiens
tatttcacaaataag

SEQ ID NO: 1545874 - DNA, 15 bp, Homo sapiens
ttatttcacaaataa

SEQ ID NO: 1545875 - DNA, 15 bp, Homo sapiens
tttatttcacaaata

SEQ ID NO: 1545876 - DNA, 15 bp, Homo sapiens
ctttatttcacaaat

SEQ ID NO: 1545877 - DNA, 15 bp, Homo sapiens
cctttatttcacaaa

SEQ ID NO: 1545878 - DNA, 15 bp, Homo sapiens
acctttatttcacaa

SEQ ID NO: 1545879 - DNA, 15 bp, Homo sapiens
tacctttatttcaca

SEQ ID NO: 1545880 - DNA, 15 bp, Homo sapiens
ttacctttatttcac

SEQ ID NO: 1545881 - DNA, 15 bp, Homo sapiens
attacctttatttca

SEQ ID NO: 1545882 - DNA, 15 bp, Homo sapiens
aattacctttatttc

SEQ ID NO: 1545883 - DNA, 15 bp, Homo sapiens
caattacctttattt

SEQ ID NO: 1545884 - DNA, 15 bp, Homo sapiens
gcaattacctttatt

SEQ ID NO: 1545885 - DNA, 15 bp, Homo sapiens
ggcaattacctttat

SEQ ID NO: 1545886 - DNA, 15 bp, Homo sapiens
aggcaattaccttta

SEQ ID NO: 1545887 - DNA, 15 bp, Homo sapiens
aaggcaattaccttt

SEQ ID NO: 1545888 - DNA, 15 bp, Homo sapiens
aaaggcaattacctt

SEQ ID NO: 1545889 - DNA, 15 bp, Homo sapiens
gaaaggcaattacct

SEQ ID NO: 1545890 - DNA, 15 bp, Homo sapiens
agaaaggcaattacc

SEQ ID NO: 1545891 - DNA, 15 bp, Homo sapiens
aagaaaggcaattac

SEQ ID NO: 1545892 - DNA, 15 bp, Homo sapiens
taagaaaggcaatta

SEQ ID NO: 1545893 - DNA, 15 bp, Homo sapiens
ataagaaaggcaatt

SEQ ID NO: 1545894 - DNA, 15 bp, Homo sapiens
tataagaaaggcaat

SEQ ID NO: 1545895 - DNA, 15 bp, Homo sapiens
atataagaaaggcaa

SEQ ID NO: 1545896 - DNA, 15 bp, Homo sapiens
tatataagaaaggca

SEQ ID NO: 1545897 - DNA, 15 bp, Homo sapiens
gtatataagaaaggc

SEQ ID NO: 1545898 - DNA, 15 bp, Homo sapiens
ggtatataagaaagg

SEQ ID NO: 1545899 - DNA, 15 bp, Homo sapiens
gggtatataagaaag

SEQ ID NO: 1545900 - DNA, 15 bp, Homo sapiens
tgggtatataagaaa

SEQ ID NO: 1545901 - DNA, 15 bp, Homo sapiens
gtgggtatataagaa

SEQ ID NO: 1545902 - DNA, 15 bp, Homo sapiens
tgtgggtatataaga

SEQ ID NO: 1545903 - DNA, 15 bp, Homo sapiens
ttgtgggtatataag

SEQ ID NO: 1545904 - DNA, 15 bp, Homo sapiens
tttgtgggtatataa

SEQ ID NO: 1545905 - DNA, 15 bp, Homo sapiens
ttttgtgggtatata

SEQ ID NO: 1545906 - DNA, 15 bp, Homo sapiens
cttttgtgggtatat

SEQ ID NO: 1545907 - DNA, 15 bp, Homo sapiens
gcttttgtgggtata

SEQ ID NO: 1545908 - DNA, 15 bp, Homo sapiens
agcttttgtgggtat

SEQ ID NO: 1545909 - DNA, 15 bp, Homo sapiens
aagcttttgtgggta

SEQ ID NO: 1545910 - DNA, 15 bp, Homo sapiens
taagcttttgtgggt

SEQ ID NO: 1545911 - DNA, 15 bp, Homo sapiens
ttaagcttttgtggg

SEQ ID NO: 1545912 - DNA, 15 bp, Homo sapiens
tttaagcttttgtgg

SEQ ID NO: 1545913 - DNA, 15 bp, Homo sapiens
ttttaagcttttgtg

SEQ ID NO: 1545914 - DNA, 15 bp, Homo sapiens
tttttaagcttttgt

SEQ ID NO: 1545915 - DNA, 15 bp, Homo sapiens
ttttttaagcttttg

SEQ ID NO: 1545916 - DNA, 15 bp, Homo sapiens
attttttaagctttt

SEQ ID NO: 1545917 - DNA, 15 bp, Homo sapiens
tattttttaagcttt

SEQ ID NO: 1545918 - DNA, 15 bp, Homo sapiens
ctattttttaagctt

SEQ ID NO: 1545919 - DNA, 15 bp, Homo sapiens
actattttttaagct

SEQ ID NO: 1545920 - DNA, 15 bp, Homo sapiens
tactattttttaagc

SEQ ID NO: 1545921 - DNA, 15 bp, Homo sapiens
atactattttttaag

SEQ ID NO: 1545922 - DNA, 15 bp, Homo sapiens
catactattttttaa

SEQ ID NO: 1545923 - DNA, 15 bp, Homo sapiens
acatactatttttta

SEQ ID NO: 1545924 - DNA, 15 bp, Homo sapiens
cacatactatttttt

SEQ ID NO: 1545925 - DNA, 15 bp, Homo sapiens
acacatactattttt

SEQ ID NO: 1545926 - DNA, 15 bp, Homo sapiens
tacacatactatttt

SEQ ID NO: 1545927 - DNA, 15 bp, Homo sapiens
ctacacatactattt

SEQ ID NO: 1545928 - DNA, 15 bp, Homo sapiens
actacacatactatt

SEQ ID NO: 1545929 - DNA, 15 bp, Homo sapiens
tactacacatactat

SEQ ID NO: 1545930 - DNA, 15 bp, Homo sapiens
ctactacacatacta

SEQ ID NO: 1545931 - DNA, 15 bp, Homo sapiens
actactacacatact

SEQ ID NO: 1545932 - DNA, 15 bp, Homo sapiens
tactactacacatac

SEQ ID NO: 1545933 - DNA, 15 bp, Homo sapiens
atactactacacata

SEQ ID NO: 1545934 - DNA, 15 bp, Homo sapiens
tatactactacacat

SEQ ID NO: 1545935 - DNA, 15 bp, Homo sapiens
ctatactactacaca

SEQ ID NO: 1545936 - DNA, 15 bp, Homo sapiens
actatactactacac

SEQ ID NO: 1545937 - DNA, 15 bp, Homo sapiens
tactatactactaca

SEQ ID NO: 1545938 - DNA, 15 bp, Homo sapiens
atactatactactac

SEQ ID NO: 1545939 - DNA, 15 bp, Homo sapiens
tatactatactacta

SEQ ID NO: 1545940 - DNA, 15 bp, Homo sapiens
ctatactatactact

SEQ ID NO: 1545941 - DNA, 15 bp, Homo sapiens
gctatactatactac

SEQ ID NO: 1545942 - DNA, 15 bp, Homo sapiens
tgctatactatacta

SEQ ID NO: 1545943 - DNA, 15 bp, Homo sapiens
ttgctatactatact

SEQ ID NO: 1545944 - DNA, 15 bp, Homo sapiens
tttgctatactatac

SEQ ID NO: 1545945 - DNA, 15 bp, Homo sapiens
gtttgctatactata

SEQ ID NO: 1545946 - DNA, 15 bp, Homo sapiens
agtttgctatactat

SEQ ID NO: 1545947 - DNA, 15 bp, Homo sapiens
tagtttgctatacta

SEQ ID NO: 1545948 - DNA, 15 bp, Homo sapiens
ctagtttgctatact

SEQ ID NO: 1545949 - DNA, 15 bp, Homo sapiens
gctagtttgctatac

SEQ ID NO: 1545950 - DNA, 15 bp, Homo sapiens
tgctagtttgctata

SEQ ID NO: 1545951 - DNA, 15 bp, Homo sapiens
ttgctagtttgctat

SEQ ID NO: 1545952 - DNA, 15 bp, Homo sapiens
tttgctagtttgcta

SEQ ID NO: 1545953 - DNA, 15 bp, Homo sapiens
atttgctagtttgct

SEQ ID NO: 1545954 - DNA, 15 bp, Homo sapiens
tatttgctagtttgc

SEQ ID NO: 1545955 - DNA, 15 bp, Homo sapiens
ctatttgctagtttg

SEQ ID NO: 1545956 - DNA, 15 bp, Homo sapiens
actatttgctagttt

SEQ ID NO: 1545957 - DNA, 15 bp, Homo sapiens
aactatttgctagtt

SEQ ID NO: 1545958 - DNA, 15 bp, Homo sapiens
aaactatttgctagt

SEQ ID NO: 1545959 - DNA, 15 bp, Homo sapiens
taaactatttgctag

SEQ ID NO: 1545960 - DNA, 15 bp, Homo sapiens
ataaactatttgcta

SEQ ID NO: 1545961 - DNA, 15 bp, Homo sapiens
tataaactatttgct

SEQ ID NO: 1545962 - DNA, 15 bp, Homo sapiens
gtataaactatttgc

SEQ ID NO: 1545963 - DNA, 15 bp, Homo sapiens
agtataaactatttg

SEQ ID NO: 1545964 - DNA, 15 bp, Homo sapiens
aagtataaactattt

SEQ ID NO: 1545965 - DNA, 15 bp, Homo sapiens
taagtataaactatt

SEQ ID NO: 1545966 - DNA, 15 bp, Homo sapiens
ctaagtataaactat

SEQ ID NO: 1545967 - DNA, 15 bp, Homo sapiens
actaagtataaacta

SEQ ID NO: 1545968 - DNA, 15 bp, Homo sapiens
tactaagtataaact

SEQ ID NO: 1545969 - DNA, 15 bp, Homo sapiens
ttactaagtataaac

SEQ ID NO: 1545970 - DNA, 15 bp, Homo sapiens
cttactaagtataaa

SEQ ID NO: 1545971 - DNA, 15 bp, Homo sapiens
acttactaagtataa

SEQ ID NO: 1545972 - DNA, 15 bp, Homo sapiens
tacttactaagtata

SEQ ID NO: 1545973 - DNA, 15 bp, Homo sapiens
ctacttactaagtat

SEQ ID NO: 1545974 - DNA, 15 bp, Homo sapiens
actacttactaagta

SEQ ID NO: 1545975 - DNA, 15 bp, Homo sapiens
tactacttactaagt

SEQ ID NO: 1545976 - DNA, 15 bp, Homo sapiens
atactacttactaag

SEQ ID NO: 1545977 - DNA, 15 bp, Homo sapiens
aatactacttactaa

SEQ ID NO: 1545978 - DNA, 15 bp, Homo sapiens
aaatactacttacta

SEQ ID NO: 1545979 - DNA, 15 bp, Homo sapiens
aaaatactacttact

SEQ ID NO: 1545980 - DNA, 15 bp, Homo sapiens
gaaaatactacttac

SEQ ID NO: 1545981 - DNA, 15 bp, Homo sapiens
agaaaatactactta

SEQ ID NO: 1545982 - DNA, 15 bp, Homo sapiens
aagaaaatactactt

SEQ ID NO: 1545983 - DNA, 15 bp, Homo sapiens
taagaaaatactact

SEQ ID NO: 1545984 - DNA, 15 bp, Homo sapiens
ataagaaaatactac

SEQ ID NO: 1545985 - DNA, 15 bp, Homo sapiens
gataagaaaatacta

SEQ ID NO: 1545986 - DNA, 15 bp, Homo sapiens
agataagaaaatact

SEQ ID NO: 1545987 - DNA, 15 bp, Homo sapiens
aagataagaaaatac

SEQ ID NO: 1545988 - DNA, 15 bp, Homo sapiens
aaagataagaaaata

SEQ ID NO: 1545989 - DNA, 15 bp, Homo sapiens
aaaagataagaaaat

SEQ ID NO: 1545990 - DNA, 15 bp, Homo sapiens
gaaaagataagaaaa

SEQ ID NO: 1545991 - DNA, 15 bp, Homo sapiens
ggaaaagataagaaa

SEQ ID NO: 1545992 - DNA, 15 bp, Homo sapiens
gggaaaagataagaa

SEQ ID NO: 1545993 - DNA, 15 bp, Homo sapiens
agggaaaagataaga

SEQ ID NO: 1545994 - DNA, 15 bp, Homo sapiens
gagggaaaagataag

SEQ ID NO: 1545995 - DNA, 15 bp, Homo sapiens
ggagggaaaagataa

SEQ ID NO: 1545996 - DNA, 15 bp, Homo sapiens
gggagggaaaagata

SEQ ID NO: 1545997 - DNA, 15 bp, Homo sapiens
agggagggaaaagat

SEQ ID NO: 1545998 - DNA, 15 bp, Homo sapiens
cagggagggaaaaga

SEQ ID NO: 1545999 - DNA, 15 bp, Homo sapiens
gcagggagggaaaag

SEQ ID NO: 1546000 - DNA, 15 bp, Homo sapiens
ggcagggagggaaaa

SEQ ID NO: 1546001 - DNA, 15 bp, Homo sapiens
tggcagggagggaaa

SEQ ID NO: 1546002 - DNA, 15 bp, Homo sapiens
ctggcagggagggaa

SEQ ID NO: 1546003 - DNA, 15 bp, Homo sapiens
gctggcagggaggga

SEQ ID NO: 1546004 - DNA, 15 bp, Homo sapiens
tgctggcagggaggg

SEQ ID NO: 1546005 - DNA, 15 bp, Homo sapiens
atgctggcagggagg

SEQ ID NO: 1546006 - DNA, 15 bp, Homo sapiens
gatgctggcagggag

SEQ ID NO: 1546007 - DNA, 15 bp, Homo sapiens
agatgctggcaggga

SEQ ID NO: 1546008 - DNA, 15 bp, Homo sapiens
gagatgctggcaggg

SEQ ID NO: 1546009 - DNA, 15 bp, Homo sapiens
ggagatgctggcagg

SEQ ID NO: 1546010 - DNA, 15 bp, Homo sapiens
aggagatgctggcag

SEQ ID NO: 1546011 - DNA, 15 bp, Homo sapiens
aaggagatgctggca

SEQ ID NO: 1546012 - DNA, 15 bp, Homo sapiens
caaggagatgctggc

SEQ ID NO: 1546013 - DNA, 15 bp, Homo sapiens
gcaaggagatgctgg

SEQ ID NO: 1546014 - DNA, 15 bp, Homo sapiens
tgcaaggagatgctg

SEQ ID NO: 1546015 - DNA, 15 bp, Homo sapiens
gtgcaaggagatgct

SEQ ID NO: 1546016 - DNA, 15 bp, Homo sapiens
ggtgcaaggagatgc

SEQ ID NO: 1546017 - DNA, 15 bp, Homo sapiens
gggtgcaaggagatg

SEQ ID NO: 1546018 - DNA, 15 bp, Homo sapiens
agggtgcaaggagat

SEQ ID NO: 1546019 - DNA, 15 bp, Homo sapiens
aagggtgcaaggaga

SEQ ID NO: 1546020 - DNA, 15 bp, Homo sapiens
aaagggtgcaaggag

SEQ ID NO: 1546021 - DNA, 15 bp, Homo sapiens
gaaagggtgcaagga

SEQ ID NO: 1546022 - DNA, 15 bp, Homo sapiens
agaaagggtgcaagg

SEQ ID NO: 1546023 - DNA, 15 bp, Homo sapiens
gagaaagggtgcaag

SEQ ID NO: 1546024 - DNA, 15 bp, Homo sapiens
ggagaaagggtgcaa

SEQ ID NO: 1546025 - DNA, 15 bp, Homo sapiens
gggagaaagggtgca

SEQ ID NO: 1546026 - DNA, 15 bp, Homo sapiens
agggagaaagggtgc

SEQ ID NO: 1546027 - DNA, 15 bp, Homo sapiens
aagggagaaagggtg

SEQ ID NO: 1546028 - DNA, 15 bp, Homo sapiens
aaagggagaaagggt

SEQ ID NO: 1546029 - DNA, 15 bp, Homo sapiens
aaaagggagaaaggg

SEQ ID NO: 1546030 - DNA, 15 bp, Homo sapiens
gaaaagggagaaagg

SEQ ID NO: 1546031 - DNA, 15 bp, Homo sapiens
agaaaagggagaaag

SEQ ID NO: 1546032 - DNA, 15 bp, Homo sapiens
gagaaaagggagaaa

SEQ ID NO: 1546033 - DNA, 15 bp, Homo sapiens
ggagaaaagggagaa

SEQ ID NO: 1546034 - DNA, 15 bp, Homo sapiens
gggagaaaagggaga

SEQ ID NO: 1546035 - DNA, 15 bp, Homo sapiens
ggggagaaaagggag

SEQ ID NO: 1546036 - DNA, 15 bp, Homo sapiens
aggggagaaaaggga

SEQ ID NO: 1546037 - DNA, 15 bp, Homo sapiens
gaggggagaaaaggg

SEQ ID NO: 1546038 - DNA, 15 bp, Homo sapiens
agaggggagaaaagg

SEQ ID NO: 1546039 - DNA, 15 bp, Homo sapiens
gagaggggagaaaag

SEQ ID NO: 1546040 - DNA, 15 bp, Homo sapiens
ggagaggggagaaaa

SEQ ID NO: 1546041 - DNA, 15 bp, Homo sapiens
aggagaggggagaaa

SEQ ID NO: 1546042 - DNA, 15 bp, Homo sapiens
aaggagaggggagaa

SEQ ID NO: 1546043 - DNA, 15 bp, Homo sapiens
taaggagaggggaga

SEQ ID NO: 1546044 - DNA, 15 bp, Homo sapiens
gtaaggagaggggag

SEQ ID NO: 1546045 - DNA, 15 bp, Homo sapiens
ggtaaggagagggga

SEQ ID NO: 1546046 - DNA, 15 bp, Homo sapiens
tggtaaggagagggg

SEQ ID NO: 1546047 - DNA, 15 bp, Homo sapiens
ttggtaaggagaggg

SEQ ID NO: 1546048 - DNA, 15 bp, Homo sapiens
cttggtaaggagagg

SEQ ID NO: 1546049 - DNA, 15 bp, Homo sapiens
acttggtaaggagag

SEQ ID NO: 1546050 - DNA, 15 bp, Homo sapiens
aacttggtaaggaga

SEQ ID NO: 1546051 - DNA, 15 bp, Homo sapiens
taacttggtaaggag

SEQ ID NO: 1546052 - DNA, 15 bp, Homo sapiens
ctaacttggtaagga

SEQ ID NO: 1546053 - DNA, 15 bp, Homo sapiens
cctaacttggtaagg

SEQ ID NO: 1546054 - DNA, 15 bp, Homo sapiens
tcctaacttggtaag

SEQ ID NO: 1546055 - DNA, 15 bp, Homo sapiens
atcctaacttggtaa

SEQ ID NO: 1546056 - DNA, 15 bp, Homo sapiens
tatcctaacttggta

SEQ ID NO: 1546057 - DNA, 15 bp, Homo sapiens
ttatcctaacttggt

SEQ ID NO: 1546058 - DNA, 15 bp, Homo sapiens
attatcctaacttgg

SEQ ID NO: 1546059 - DNA, 15 bp, Homo sapiens
aattatcctaacttg

SEQ ID NO: 1546060 - DNA, 15 bp, Homo sapiens
gaattatcctaactt

SEQ ID NO: 1546061 - DNA, 15 bp, Homo sapiens
agaattatcctaact

SEQ ID NO: 1546062 - DNA, 15 bp, Homo sapiens
aagaattatcctaac

SEQ ID NO: 1546063 - DNA, 15 bp, Homo sapiens
aaagaattatcctaa

SEQ ID NO: 1546064 - DNA, 15 bp, Homo sapiens
caaagaattatccta

SEQ ID NO: 1546065 - DNA, 15 bp, Homo sapiens
acaaagaattatcct

SEQ ID NO: 1546066 - DNA, 15 bp, Homo sapiens
gacaaagaattatcc

SEQ ID NO: 1546067 - DNA, 15 bp, Homo sapiens
agacaaagaattatc

SEQ ID NO: 1546068 - DNA, 15 bp, Homo sapiens
gagacaaagaattat

SEQ ID NO: 1546069 - DNA, 15 bp, Homo sapiens
tgagacaaagaatta

SEQ ID NO: 1546070 - DNA, 15 bp, Homo sapiens
ttgagacaaagaatt

SEQ ID NO: 1546071 - DNA, 15 bp, Homo sapiens
cttgagacaaagaat

SEQ ID NO: 1546072 - DNA, 15 bp, Homo sapiens
acttgagacaaagaa

SEQ ID NO: 1546073 - DNA, 15 bp, Homo sapiens
tacttgagacaaaga

SEQ ID NO: 1546074 - DNA, 15 bp, Homo sapiens
gtacttgagacaaag

SEQ ID NO: 1546075 - DNA, 15 bp, Homo sapiens
ggtacttgagacaaa

SEQ ID NO: 1546076 - DNA, 15 bp, Homo sapiens
gggtacttgagacaa

SEQ ID NO: 1546077 - DNA, 15 bp, Homo sapiens
agggtacttgagaca

SEQ ID NO: 1546078 - DNA, 15 bp, Homo sapiens
cagggtacttgagac

SEQ ID NO: 1546079 - DNA, 15 bp, Homo sapiens
tcagggtacttgaga

SEQ ID NO: 1546080 - DNA, 15 bp, Homo sapiens
ctcagggtacttgag

SEQ ID NO: 1546081 - DNA, 15 bp, Homo sapiens
tctcagggtacttga

SEQ ID NO: 1546082 - DNA, 15 bp, Homo sapiens
gtctcagggtacttg

SEQ ID NO: 1546083 - DNA, 15 bp, Homo sapiens
agtctcagggtactt

SEQ ID NO: 1546084 - DNA, 15 bp, Homo sapiens
aagtctcagggtact

SEQ ID NO: 1546085 - DNA, 15 bp, Homo sapiens
aaagtctcagggtac

SEQ ID NO: 1546086 - DNA, 15 bp, Homo sapiens
caaagtctcagggta

SEQ ID NO: 1546087 - DNA, 15 bp, Homo sapiens
tcaaagtctcagggt

SEQ ID NO: 1546088 - DNA, 15 bp, Homo sapiens
ttcaaagtctcaggg

SEQ ID NO: 1546089 - DNA, 15 bp, Homo sapiens
cttcaaagtctcagg

SEQ ID NO: 1546090 - DNA, 15 bp, Homo sapiens
tcttcaaagtctcag

SEQ ID NO: 1546091 - DNA, 15 bp, Homo sapiens
atcttcaaagtctca

SEQ ID NO: 1546092 - DNA, 15 bp, Homo sapiens
aatcttcaaagtctc

SEQ ID NO: 1546093 - DNA, 15 bp, Homo sapiens
aaatcttcaaagtct

SEQ ID NO: 1546094 - DNA, 15 bp, Homo sapiens
aaaatcttcaaagtc

SEQ ID NO: 1546095 - DNA, 15 bp, Homo sapiens
aaaaatcttcaaagt

SEQ ID NO: 1546096 - DNA, 15 bp, Homo sapiens
gaaaaatcttcaaag

SEQ ID NO: 1546097 - DNA, 15 bp, Homo sapiens
tgaaaaatcttcaaa

SEQ ID NO: 1546098 - DNA, 15 bp, Homo sapiens
ctgaaaaatcttcaa

SEQ ID NO: 1546099 - DNA, 15 bp, Homo sapiens
tctgaaaaatcttca

SEQ ID NO: 1546100 - DNA, 15 bp, Homo sapiens
atctgaaaaatcttc

SEQ ID NO: 1546101 - DNA, 15 bp, Homo sapiens
catctgaaaaatctt

SEQ ID NO: 1546102 - DNA, 15 bp, Homo sapiens
acatctgaaaaatct

SEQ ID NO: 1546103 - DNA, 15 bp, Homo sapiens
tacatctgaaaaatc

SEQ ID NO: 1546104 - DNA, 15 bp, Homo sapiens
ttacatctgaaaaat

SEQ ID NO: 1546105 - DNA, 15 bp, Homo sapiens
tttacatctgaaaaa

SEQ ID NO: 1546106 - DNA, 15 bp, Homo sapiens
atttacatctgaaaa

SEQ ID NO: 1546107 - DNA, 15 bp, Homo sapiens
aatttacatctgaaa

SEQ ID NO: 1546108 - DNA, 15 bp, Homo sapiens
gaatttacatctgaa

SEQ ID NO: 1546109 - DNA, 15 bp, Homo sapiens
agaatttacatctga

SEQ ID NO: 1546110 - DNA, 15 bp, Homo sapiens
aagaatttacatctg

SEQ ID NO: 1546111 - DNA, 15 bp, Homo sapiens
taagaatttacatct

SEQ ID NO: 1546112 - DNA, 15 bp, Homo sapiens
ttaagaatttacatc

SEQ ID NO: 1546113 - DNA, 15 bp, Homo sapiens
gttaagaatttacat

SEQ ID NO: 1546114 - DNA, 15 bp, Homo sapiens
agttaagaatttaca

SEQ ID NO: 1546115 - DNA, 15 bp, Homo sapiens
aagttaagaatttac

SEQ ID NO: 1546116 - DNA, 15 bp, Homo sapiens
gaagttaagaattta

SEQ ID NO: 1546117 - DNA, 15 bp, Homo sapiens
agaagttaagaattt

SEQ ID NO: 1546118 - DNA, 15 bp, Homo sapiens
cagaagttaagaatt

SEQ ID NO: 1546119 - DNA, 15 bp, Homo sapiens
tcagaagttaagaat

SEQ ID NO: 1546120 - DNA, 15 bp, Homo sapiens
ttcagaagttaagaa

SEQ ID NO: 1546121 - DNA, 15 bp, Homo sapiens
tttcagaagttaaga

SEQ ID NO: 1546122 - DNA, 15 bp, Homo sapiens
ttttcagaagttaag

SEQ ID NO: 1546123 - DNA, 15 bp, Homo sapiens
attttcagaagttaa

SEQ ID NO: 1546124 - DNA, 15 bp, Homo sapiens
aattttcagaagtta

SEQ ID NO: 1546125 - DNA, 15 bp, Homo sapiens
aaattttcagaagtt

SEQ ID NO: 1546126 - DNA, 15 bp, Homo sapiens
aaaattttcagaagt

SEQ ID NO: 1546127 - DNA, 15 bp, Homo sapiens
gaaaattttcagaag

SEQ ID NO: 1546128 - DNA, 15 bp, Homo sapiens
ggaaaattttcagaa

SEQ ID NO: 1546129 - DNA, 15 bp, Homo sapiens
gggaaaattttcaga

SEQ ID NO: 1546130 - DNA, 15 bp, Homo sapiens
agggaaaattttcag

SEQ ID NO: 1546131 - DNA, 15 bp, Homo sapiens
cagggaaaattttca

SEQ ID NO: 1546132 - DNA, 15 bp, Homo sapiens
tcagggaaaattttc

SEQ ID NO: 1546133 - DNA, 15 bp, Homo sapiens
ctcagggaaaatttt

SEQ ID NO: 1546134 - DNA, 15 bp, Homo sapiens
cctcagggaaaattt

SEQ ID NO: 1546135 - DNA, 15 bp, Homo sapiens
tcctcagggaaaatt

SEQ ID NO: 1546136 - DNA, 15 bp, Homo sapiens
atcctcagggaaaat

SEQ ID NO: 1546137 - DNA, 15 bp, Homo sapiens
tatcctcagggaaaa

SEQ ID NO: 1546138 - DNA, 15 bp, Homo sapiens
ttatcctcagggaaa

SEQ ID NO: 1546139 - DNA, 15 bp, Homo sapiens
gttatcctcagggaa

SEQ ID NO: 1546140 - DNA, 15 bp, Homo sapiens
tgttatcctcaggga

SEQ ID NO: 1546141 - DNA, 15 bp, Homo sapiens
atgttatcctcaggg

SEQ ID NO: 1546142 - DNA, 15 bp, Homo sapiens
tatgttatcctcagg

SEQ ID NO: 1546143 - DNA, 15 bp, Homo sapiens
ctatgttatcctcag

SEQ ID NO: 1546144 - DNA, 15 bp, Homo sapiens
gctatgttatcctca

SEQ ID NO: 1546145 - DNA, 15 bp, Homo sapiens
ggctatgttatcctc

SEQ ID NO: 1546146 - DNA, 15 bp, Homo sapiens
gggctatgttatcct

SEQ ID NO: 1546147 - DNA, 15 bp, Homo sapiens
tgggctatgttatcc

SEQ ID NO: 1546148 - DNA, 15 bp, Homo sapiens
ctgggctatgttatc

SEQ ID NO: 1546149 - DNA, 15 bp, Homo sapiens
cctgggctatgttat

SEQ ID NO: 1546150 - DNA, 15 bp, Homo sapiens
acctgggctatgtta

SEQ ID NO: 1546151 - DNA, 15 bp, Homo sapiens
aacctgggctatgtt

SEQ ID NO: 1546152 - DNA, 15 bp, Homo sapiens
aaacctgggctatgt

SEQ ID NO: 1546153 - DNA, 15 bp, Homo sapiens
aaaacctgggctatg

SEQ ID NO: 1546154 - DNA, 15 bp, Homo sapiens
taaaacctgggctat

SEQ ID NO: 1546155 - DNA, 15 bp, Homo sapiens
ataaaacctgggcta

SEQ ID NO: 1546156 - DNA, 15 bp, Homo sapiens
tataaaacctgggct

SEQ ID NO: 1546157 - DNA, 15 bp, Homo sapiens
ctataaaacctgggc

SEQ ID NO: 1546158 - DNA, 15 bp, Homo sapiens
cactataaaacctgg

SEQ ID NO: 1546159 - DNA, 15 bp, Homo sapiens
ccactataaaacctg

SEQ ID NO: 1546160 - DNA, 15 bp, Homo sapiens
cccactataaaacct

SEQ ID NO: 1546161 - DNA, 15 bp, Homo sapiens
gcccactataaaacc

SEQ ID NO: 1546162 - DNA, 15 bp, Homo sapiens
ggcccactataaaac

SEQ ID NO: 1546163 - DNA, 15 bp, Homo sapiens
aggcccactataaaa

SEQ ID NO: 1546164 - DNA, 15 bp, Homo sapiens
aaggcccactataaa

SEQ ID NO: 1546165 - DNA, 15 bp, Homo sapiens
aaaggcccactataa

SEQ ID NO: 1546166 - DNA, 15 bp, Homo sapiens
aaaaggcccactata

SEQ ID NO: 1546167 - DNA, 15 bp, Homo sapiens
taaaaggcccactat

SEQ ID NO: 1546168 - DNA, 15 bp, Homo sapiens
ctaaaaggcccacta

SEQ ID NO: 1546169 - DNA, 15 bp, Homo sapiens
cctaaaaggcccact

SEQ ID NO: 1546170 - DNA, 15 bp, Homo sapiens
tcctaaaaggcccac

SEQ ID NO: 1546171 - DNA, 15 bp, Homo sapiens
atcctaaaaggccca

SEQ ID NO: 1546172 - DNA, 15 bp, Homo sapiens
aatcctaaaaggccc

SEQ ID NO: 1546173 - DNA, 15 bp, Homo sapiens
gaatcctaaaaggcc

SEQ ID NO: 1546174 - DNA, 15 bp, Homo sapiens
ggaatcctaaaaggc

SEQ ID NO: 1546175 - DNA, 15 bp, Homo sapiens
tggaatcctaaaagg

SEQ ID NO: 1546176 - DNA, 15 bp, Homo sapiens
ttggaatcctaaaag

SEQ ID NO: 1546177 - DNA, 15 bp, Homo sapiens
tttggaatcctaaaa

SEQ ID NO: 1546178 - DNA, 15 bp, Homo sapiens
atttggaatcctaaa

SEQ ID NO: 1546179 - DNA, 15 bp, Homo sapiens
aatttggaatcctaa

SEQ ID NO: 1546180 - DNA, 15 bp, Homo sapiens
gaatttggaatccta

SEQ ID NO: 1546181 - DNA, 15 bp, Homo sapiens
agaatttggaatcct

SEQ ID NO: 1546182 - DNA, 15 bp, Homo sapiens
gagaatttggaatcc

SEQ ID NO: 1546183 - DNA, 15 bp, Homo sapiens
ggagaatttggaatc

SEQ ID NO: 1546184 - DNA, 15 bp, Homo sapiens
aggagaatttggaat

SEQ ID NO: 1546185 - DNA, 15 bp, Homo sapiens
aaggagaatttggaa

SEQ ID NO: 1546186 - DNA, 15 bp, Homo sapiens
aaaggagaatttgga

SEQ ID NO: 1546187 - DNA, 15 bp, Homo sapiens
taaaggagaatttgg

SEQ ID NO: 1546188 - DNA, 15 bp, Homo sapiens
gtaaaggagaatttg

SEQ ID NO: 1546189 - DNA, 15 bp, Homo sapiens
agtaaaggagaattt

SEQ ID NO: 1546190 - DNA, 15 bp, Homo sapiens
aagtaaaggagaatt

SEQ ID NO: 1546191 - DNA, 15 bp, Homo sapiens
taagtaaaggagaat

SEQ ID NO: 1546192 - DNA, 15 bp, Homo sapiens
ttaagtaaaggagaa

SEQ ID NO: 1546193 - DNA, 15 bp, Homo sapiens
tttaagtaaaggaga

SEQ ID NO: 1546194 - DNA, 15 bp, Homo sapiens
ctttaagtaaaggag

SEQ ID NO: 1546195 - DNA, 15 bp, Homo sapiens
cctttaagtaaagga

SEQ ID NO: 1546196 - DNA, 15 bp, Homo sapiens
ccctttaagtaaagg

SEQ ID NO: 1546197 - DNA, 15 bp, Homo sapiens
tccctttaagtaaag

SEQ ID NO: 1546198 - DNA, 15 bp, Homo sapiens
ttccctttaagtaaa

SEQ ID NO: 1546199 - DNA, 15 bp, Homo sapiens
tttccctttaagtaa

SEQ ID NO: 1546200 - DNA, 15 bp, Homo sapiens
ttttccctttaagta

SEQ ID NO: 1546201 - DNA, 15 bp, Homo sapiens
tttttccctttaagt

SEQ ID NO: 1546202 - DNA, 15 bp, Homo sapiens
ctttttccctttaag

SEQ ID NO: 1546203 - DNA, 15 bp, Homo sapiens
tctttttccctttaa

SEQ ID NO: 1546204 - DNA, 15 bp, Homo sapiens
ttctttttcccttta

SEQ ID NO: 1546205 - DNA, 15 bp, Homo sapiens
cttctttttcccttt

SEQ ID NO: 1546206 - DNA, 15 bp, Homo sapiens
tcttctttttccctt

SEQ ID NO: 1546207 - DNA, 15 bp, Homo sapiens
tttcttctttttccc

SEQ ID NO: 1546208 - DNA, 15 bp, Homo sapiens
ttttcttctttttcc

SEQ ID NO: 1546209 - DNA, 15 bp, Homo sapiens
attttcttctttttc

SEQ ID NO: 1546210 - DNA, 15 bp, Homo sapiens
gattttcttcttttt

SEQ ID NO: 1546211 - DNA, 15 bp, Homo sapiens
tgattttcttctttt

SEQ ID NO: 1546212 - DNA, 15 bp, Homo sapiens
ttgattttcttcttt

SEQ ID NO: 1546213 - DNA, 15 bp, Homo sapiens
cttgattttcttctt

SEQ ID NO: 1546214 - DNA, 15 bp, Homo sapiens
tcttgattttcttct

SEQ ID NO: 1546215 - DNA, 15 bp, Homo sapiens
atcttgattttcttc

SEQ ID NO: 1546216 - DNA, 15 bp, Homo sapiens
tatcttgattttctt

SEQ ID NO: 1546217 - DNA, 15 bp, Homo sapiens
catatcttgattttc

SEQ ID NO: 1546218 - DNA, 15 bp, Homo sapiens
acatatcttgatttt

SEQ ID NO: 1546219 - DNA, 15 bp, Homo sapiens
aacatatcttgattt

SEQ ID NO: 1546220 - DNA, 15 bp, Homo sapiens
aaacatatcttgatt

SEQ ID NO: 1546221 - DNA, 15 bp, Homo sapiens
taaacatatcttgat

SEQ ID NO: 1546222 - DNA, 15 bp, Homo sapiens
gtaaacatatcttga

SEQ ID NO: 1546223 - DNA, 15 bp, Homo sapiens
agtaaacatatcttg

SEQ ID NO: 1546224 - DNA, 15 bp, Homo sapiens
aagtaaacatatctt

SEQ ID NO: 1546225 - DNA, 15 bp, Homo sapiens
caagtaaacatatct

SEQ ID NO: 1546226 - DNA, 15 bp, Homo sapiens
ccaagtaaacatatc

SEQ ID NO: 1546227 - DNA, 15 bp, Homo sapiens
tccaagtaaacatat

SEQ ID NO: 1546228 - DNA, 15 bp, Homo sapiens
atccaagtaaacata

SEQ ID NO: 1546229 - DNA, 15 bp, Homo sapiens
catccaagtaaacat

SEQ ID NO: 1546230 - DNA, 15 bp, Homo sapiens
ccatccaagtaaaca

SEQ ID NO: 1546231 - DNA, 15 bp, Homo sapiens
cccatccaagtaaac

SEQ ID NO: 1546232 - DNA, 15 bp, Homo sapiens
gcccatccaagtaaa

SEQ ID NO: 1546233 - DNA, 15 bp, Homo sapiens
agcccatccaagtaa

SEQ ID NO: 1546234 - DNA, 15 bp, Homo sapiens
aagcccatccaagta

SEQ ID NO: 1546235 - DNA, 15 bp, Homo sapiens
gaagcccatccaagt

SEQ ID NO: 1546236 - DNA, 15 bp, Homo sapiens
tgaagcccatccaag

SEQ ID NO: 1546237 - DNA, 15 bp, Homo sapiens
ctgaagcccatccaa

SEQ ID NO: 1546238 - DNA, 15 bp, Homo sapiens
tctgaagcccatcca

SEQ ID NO: 1546239 - DNA, 15 bp, Homo sapiens
ttctgaagcccatcc

SEQ ID NO: 1546240 - DNA, 15 bp, Homo sapiens
tttctgaagcccatc

SEQ ID NO: 1546241 - DNA, 15 bp, Homo sapiens
atttctgaagcccat

SEQ ID NO: 1546242 - DNA, 15 bp, Homo sapiens
aatttctgaagccca

SEQ ID NO: 1546243 - DNA, 15 bp, Homo sapiens
caatttctgaagccc

SEQ ID NO: 1546244 - DNA, 15 bp, Homo sapiens
acaatttctgaagcc

SEQ ID NO: 1546245 - DNA, 15 bp, Homo sapiens
tacaatttctgaagc

SEQ ID NO: 1546246 - DNA, 15 bp, Homo sapiens
gtacaatttctgaag

SEQ ID NO: 1546247 - DNA, 15 bp, Homo sapiens
tgtacaatttctgaa

SEQ ID NO: 1546248 - DNA, 15 bp, Homo sapiens
atgtacaatttctga

SEQ ID NO: 1546249 - DNA, 15 bp, Homo sapiens
tatgtacaatttctg

SEQ ID NO: 1546250 - DNA, 15 bp, Homo sapiens
ttatgtacaatttct

SEQ ID NO: 1546251 - DNA, 15 bp, Homo sapiens
cttatgtacaatttc

SEQ ID NO: 1546252 - DNA, 15 bp, Homo sapiens
tcttatgtacaattt

SEQ ID NO: 1546253 - DNA, 15 bp, Homo sapiens
atcttatgtacaatt

SEQ ID NO: 1546254 - DNA, 15 bp, Homo sapiens
aatcttatgtacaat

SEQ ID NO: 1546255 - DNA, 15 bp, Homo sapiens
aaatcttatgtacaa

SEQ ID NO: 1546256 - DNA, 15 bp, Homo sapiens
aaaatcttatgtaca

SEQ ID NO: 1546257 - DNA, 15 bp, Homo sapiens
caaaatcttatgtac

SEQ ID NO: 1546258 - DNA, 15 bp, Homo sapiens
acaaaatcttatgta

SEQ ID NO: 1546259 - DNA, 15 bp, Homo sapiens
cacaaaatcttatgt

SEQ ID NO: 1546260 - DNA, 15 bp, Homo sapiens
acacaaaatcttatg

SEQ ID NO: 1546261 - DNA, 15 bp, Homo sapiens
tacacaaaatcttat

SEQ ID NO: 1546262 - DNA, 15 bp, Homo sapiens
atacacaaaatctta

SEQ ID NO: 1546263 - DNA, 15 bp, Homo sapiens
catacacaaaatctt

SEQ ID NO: 1546264 - DNA, 15 bp, Homo sapiens
gcatacacaaaatct

SEQ ID NO: 1546265 - DNA, 15 bp, Homo sapiens
agcatacacaaaatc

SEQ ID NO: 1546266 - DNA, 15 bp, Homo sapiens
aagcatacacaaaat

SEQ ID NO: 1546267 - DNA, 15 bp, Homo sapiens
aaagcatacacaaaa

SEQ ID NO: 1546268 - DNA, 15 bp, Homo sapiens
caaagcatacacaaa

SEQ ID NO: 1546269 - DNA, 15 bp, Homo sapiens
gcaaagcatacacaa

SEQ ID NO: 1546270 - DNA, 15 bp, Homo sapiens
agcaaagcatacaca

SEQ ID NO: 1546271 - DNA, 15 bp, Homo sapiens
aagcaaagcatacac

SEQ ID NO: 1546272 - DNA, 15 bp, Homo sapiens
gaagcaaagcataca

SEQ ID NO: 1546273 - DNA, 15 bp, Homo sapiens
ggaagcaaagcatac

SEQ ID NO: 1546274 - DNA, 15 bp, Homo sapiens
aggaagcaaagcata

SEQ ID NO: 1546275 - DNA, 15 bp, Homo sapiens
aaggaagcaaagcat

SEQ ID NO: 1546276 - DNA, 15 bp, Homo sapiens
aaaggaagcaaagca

SEQ ID NO: 1546277 - DNA, 15 bp, Homo sapiens
taaaggaagcaaagc

SEQ ID NO: 1546278 - DNA, 15 bp, Homo sapiens
ataaaggaagcaaag

SEQ ID NO: 1546279 - DNA, 15 bp, Homo sapiens
gataaaggaagcaaa

SEQ ID NO: 1546280 - DNA, 15 bp, Homo sapiens
agataaaggaagcaa

SEQ ID NO: 1546281 - DNA, 15 bp, Homo sapiens
gagataaaggaagca

SEQ ID NO: 1546282 - DNA, 15 bp, Homo sapiens
tgagataaaggaagc

SEQ ID NO: 1546283 - DNA, 15 bp, Homo sapiens
atgagataaaggaag

SEQ ID NO: 1546284 - DNA, 15 bp, Homo sapiens
tatgagataaaggaa

SEQ ID NO: 1546285 - DNA, 15 bp, Homo sapiens
ctatgagataaagga

SEQ ID NO: 1546286 - DNA, 15 bp, Homo sapiens
cctatgagataaagg

SEQ ID NO: 1546287 - DNA, 15 bp, Homo sapiens
acctatgagataaag

SEQ ID NO: 1546288 - DNA, 15 bp, Homo sapiens
cacctatgagataaa

SEQ ID NO: 1546289 - DNA, 15 bp, Homo sapiens
acacctatgagataa

SEQ ID NO: 1546290 - DNA, 15 bp, Homo sapiens
gacacctatgagata

SEQ ID NO: 1546291 - DNA, 15 bp, Homo sapiens
agacacctatgagat

SEQ ID NO: 1546292 - DNA, 15 bp, Homo sapiens
cagacacctatgaga

SEQ ID NO: 1546293 - DNA, 15 bp, Homo sapiens
acagacacctatgag

SEQ ID NO: 1546294 - DNA, 15 bp, Homo sapiens
cacagacacctatga

SEQ ID NO: 1546295 - DNA, 15 bp, Homo sapiens
tcacagacacctatg

SEQ ID NO: 1546296 - DNA, 15 bp, Homo sapiens
gtcacagacacctat

SEQ ID NO: 1546297 - DNA, 15 bp, Homo sapiens
tgtcacagacaccta

SEQ ID NO: 1546298 - DNA, 15 bp, Homo sapiens
gtgtcacagacacct

SEQ ID NO: 1546299 - DNA, 15 bp, Homo sapiens
ggtgtcacagacacc

SEQ ID NO: 1546300 - DNA, 15 bp, Homo sapiens
aggtgtcacagacac

SEQ ID NO: 1546301 - DNA, 15 bp, Homo sapiens
caggtgtcacagaca

SEQ ID NO: 1546302 - DNA, 15 bp, Homo sapiens
acaggtgtcacagac

SEQ ID NO: 1546303 - DNA, 15 bp, Homo sapiens
gacaggtgtcacaga

SEQ ID NO: 1546304 - DNA, 15 bp, Homo sapiens
ggacaggtgtcacag

SEQ ID NO: 1546305 - DNA, 15 bp, Homo sapiens
aggacaggtgtcaca

SEQ ID NO: 1546306 - DNA, 15 bp, Homo sapiens
caggacaggtgtcac

SEQ ID NO: 1546307 - DNA, 15 bp, Homo sapiens
ccaggacaggtgtca

SEQ ID NO: 1546308 - DNA, 15 bp, Homo sapiens
cccaggacaggtgtc

SEQ ID NO: 1546309 - DNA, 15 bp, Homo sapiens
acccaggacaggtgt

SEQ ID NO: 1546310 - DNA, 15 bp, Homo sapiens
aacccaggacaggtg

SEQ ID NO: 1546311 - DNA, 15 bp, Homo sapiens
caacccaggacaggt

SEQ ID NO: 1546312 - DNA, 15 bp, Homo sapiens
tcaacccaggacagg

SEQ ID NO: 1546313 - DNA, 15 bp, Homo sapiens
ctcaacccaggacag

SEQ ID NO: 1546314 - DNA, 15 bp, Homo sapiens
cctcaacccaggaca

SEQ ID NO: 1546315 - DNA, 15 bp, Homo sapiens
tcctcaacccaggac

SEQ ID NO: 1546316 - DNA, 15 bp, Homo sapiens
ttcctcaacccagga

SEQ ID NO: 1546317 - DNA, 15 bp, Homo sapiens
cttcctcaacccagg

SEQ ID NO: 1546318 - DNA, 15 bp, Homo sapiens
acttcctcaacccag

SEQ ID NO: 1546319 - DNA, 15 bp, Homo sapiens
gacttcctcaaccca

SEQ ID NO: 1546320 - DNA, 15 bp, Homo sapiens
ggacttcctcaaccc

SEQ ID NO: 1546321 - DNA, 15 bp, Homo sapiens
tggacttcctcaacc

SEQ ID NO: 1546322 - DNA, 15 bp, Homo sapiens
ttggacttcctcaac

SEQ ID NO: 1546323 - DNA, 15 bp, Homo sapiens
attggacttcctcaa

SEQ ID NO: 1546324 - DNA, 15 bp, Homo sapiens
aattggacttcctca

SEQ ID NO: 1546325 - DNA, 15 bp, Homo sapiens
gaattggacttcctc

SEQ ID NO: 1546326 - DNA, 15 bp, Homo sapiens
agaattggacttcct

SEQ ID NO: 1546327 - DNA, 15 bp, Homo sapiens
aagaattggacttcc

SEQ ID NO: 1546328 - DNA, 15 bp, Homo sapiens
aaagaattggacttc

SEQ ID NO: 1546329 - DNA, 15 bp, Homo sapiens
taaagaattggactt

SEQ ID NO: 1546330 - DNA, 15 bp, Homo sapiens
ataaagaattggact

SEQ ID NO: 1546331 - DNA, 15 bp, Homo sapiens
tataaagaattggac

SEQ ID NO: 1546332 - DNA, 15 bp, Homo sapiens
ttataaagaattgga

SEQ ID NO: 1546333 - DNA, 15 bp, Homo sapiens
cttataaagaattgg

SEQ ID NO: 1546334 - DNA, 15 bp, Homo sapiens
acttataaagaattg

SEQ ID NO: 1546335 - DNA, 15 bp, Homo sapiens
cacttataaagaatt

SEQ ID NO: 1546336 - DNA, 15 bp, Homo sapiens
acacttataaagaat

SEQ ID NO: 1546337 - DNA, 15 bp, Homo sapiens
aacacttataaagaa

SEQ ID NO: 1546338 - DNA, 15 bp, Homo sapiens
caacacttataaaga

SEQ ID NO: 1546339 - DNA, 15 bp, Homo sapiens
tcaacacttataaag

SEQ ID NO: 1546340 - DNA, 15 bp, Homo sapiens
ttcaacacttataaa

SEQ ID NO: 1546341 - DNA, 15 bp, Homo sapiens
tttcaacacttataa

SEQ ID NO: 1546342 - DNA, 15 bp, Homo sapiens
atttcaacacttata

SEQ ID NO: 1546343 - DNA, 15 bp, Homo sapiens
tatttcaacacttat

SEQ ID NO: 1546344 - DNA, 15 bp, Homo sapiens
gtatttcaacactta

SEQ ID NO: 1546345 - DNA, 15 bp, Homo sapiens
tgtatttcaacactt

SEQ ID NO: 1546346 - DNA, 15 bp, Homo sapiens
gtgtatttcaacact

SEQ ID NO: 1546347 - DNA, 15 bp, Homo sapiens
tgtgtatttcaacac

SEQ ID NO: 1546348 - DNA, 15 bp, Homo sapiens
ctgtgtatttcaaca

SEQ ID NO: 1546349 - DNA, 15 bp, Homo sapiens
cctgtgtatttcaac

SEQ ID NO: 1546350 - DNA, 15 bp, Homo sapiens
tcctgtgtatttcaa

SEQ ID NO: 1546351 - DNA, 15 bp, Homo sapiens
atcctgtgtatttca

SEQ ID NO: 1546352 - DNA, 15 bp, Homo sapiens
tatcctgtgtatttc

SEQ ID NO: 1546353 - DNA, 15 bp, Homo sapiens
ttatcctgtgtattt

SEQ ID NO: 1546354 - DNA, 15 bp, Homo sapiens
tttatcctgtgtatt

SEQ ID NO: 1546355 - DNA, 15 bp, Homo sapiens
ttttatcctgtgtat

SEQ ID NO: 1546356 - DNA, 15 bp, Homo sapiens
cttttatcctgtgta

SEQ ID NO: 1546357 - DNA, 15 bp, Homo sapiens
acttttatcctgtgt

SEQ ID NO: 1546358 - DNA, 15 bp, Homo sapiens
aacttttatcctgtg

SEQ ID NO: 1546359 - DNA, 15 bp, Homo sapiens
aaaacttttatcctg

SEQ ID NO: 1546360 - DNA, 15 bp, Homo sapiens
caaaacttttatcct

SEQ ID NO: 1546361 - DNA, 15 bp, Homo sapiens
acaaaacttttatcc

SEQ ID NO: 1546362 - DNA, 15 bp, Homo sapiens
gacaaaacttttatc

SEQ ID NO: 1546363 - DNA, 15 bp, Homo sapiens
tgacaaaacttttat

SEQ ID NO: 1546364 - DNA, 15 bp, Homo sapiens
ttgacaaaactttta

SEQ ID NO: 1546365 - DNA, 15 bp, Homo sapiens
tttgacaaaactttt

SEQ ID NO: 1546366 - DNA, 15 bp, Homo sapiens
ttttgacaaaacttt

SEQ ID NO: 1546367 - DNA, 15 bp, Homo sapiens
attttgacaaaactt

SEQ ID NO: 1546368 - DNA, 15 bp, Homo sapiens
aattttgacaaaact

SEQ ID NO: 1546369 - DNA, 15 bp, Homo sapiens
caattttgacaaaac

SEQ ID NO: 1546370 - DNA, 15 bp, Homo sapiens
acaattttgacaaaa

SEQ ID NO: 1546371 - DNA, 15 bp, Homo sapiens
tacaattttgacaaa

SEQ ID NO: 1546372 - DNA, 15 bp, Homo sapiens
atacaattttgacaa

SEQ ID NO: 1546373 - DNA, 15 bp, Homo sapiens
tatacaattttgaca

SEQ ID NO: 1546374 - DNA, 15 bp, Homo sapiens
ttatacaattttgac

SEQ ID NO: 1546375 - DNA, 15 bp, Homo sapiens
gttatacaattttga

SEQ ID NO: 1546376 - DNA, 15 bp, Homo sapiens
agttatacaattttg

SEQ ID NO: 1546377 - DNA, 15 bp, Homo sapiens
aagttatacaatttt

SEQ ID NO: 1546378 - DNA, 15 bp, Homo sapiens
taagttatacaattt

SEQ ID NO: 1546379 - DNA, 15 bp, Homo sapiens
ctaagttatacaatt

SEQ ID NO: 1546380 - DNA, 15 bp, Homo sapiens
tctaagttatacaat

SEQ ID NO: 1546381 - DNA, 15 bp, Homo sapiens
ttctaagttatacaa

SEQ ID NO: 1546382 - DNA, 15 bp, Homo sapiens
attctaagttataca

SEQ ID NO: 1546383 - DNA, 15 bp, Homo sapiens
aattctaagttatac

SEQ ID NO: 1546384 - DNA, 15 bp, Homo sapiens
gaattctaagttata

SEQ ID NO: 1546385 - DNA, 15 bp, Homo sapiens
ggaattctaagttat

SEQ ID NO: 1546386 - DNA, 15 bp, Homo sapiens
aggaattctaagtta

SEQ ID NO: 1546387 - DNA, 15 bp, Homo sapiens
caggaattctaagtt

SEQ ID NO: 1546388 - DNA, 15 bp, Homo sapiens
ccaggaattctaagt

SEQ ID NO: 1546389 - DNA, 15 bp, Homo sapiens
cccaggaattctaag

SEQ ID NO: 1546390 - DNA, 15 bp, Homo sapiens
tcccaggaattctaa

SEQ ID NO: 1546391 - DNA, 15 bp, Homo sapiens
ttcccaggaattcta

SEQ ID NO: 1546392 - DNA, 15 bp, Homo sapiens
attcccaggaattct

SEQ ID NO: 1546393 - DNA, 15 bp, Homo sapiens
aattcccaggaattc

SEQ ID NO: 1546394 - DNA, 15 bp, Homo sapiens
taattcccaggaatt

SEQ ID NO: 1546395 - DNA, 15 bp, Homo sapiens
ctaattcccaggaat

SEQ ID NO: 1546396 - DNA, 15 bp, Homo sapiens
actaattcccaggaa

SEQ ID NO: 1546397 - DNA, 15 bp, Homo sapiens
tactaattcccagga

SEQ ID NO: 1546398 - DNA, 15 bp, Homo sapiens
ttactaattcccagg

SEQ ID NO: 1546399 - DNA, 15 bp, Homo sapiens
tttactaattcccag

SEQ ID NO: 1546400 - DNA, 15 bp, Homo sapiens
ttttactaattccca

SEQ ID NO: 1546401 - DNA, 15 bp, Homo sapiens
cttttactaattccc

SEQ ID NO: 1546402 - DNA, 15 bp, Homo sapiens
tcttttactaattcc

SEQ ID NO: 1546403 - DNA, 15 bp, Homo sapiens
atcttttactaattc

SEQ ID NO: 1546404 - DNA, 15 bp, Homo sapiens
tatcttttactaatt

SEQ ID NO: 1546405 - DNA, 15 bp, Homo sapiens
gtatcttttactaat

SEQ ID NO: 1546406 - DNA, 15 bp, Homo sapiens
tgtatcttttactaa

SEQ ID NO: 1546407 - DNA, 15 bp, Homo sapiens
ttgtatcttttacta

SEQ ID NO: 1546408 - DNA, 15 bp, Homo sapiens
cttgtatcttttact

SEQ ID NO: 1546409 - DNA, 15 bp, Homo sapiens
gcttgtatcttttac

SEQ ID NO: 1546410 - DNA, 15 bp, Homo sapiens
agcttgtatctttta

SEQ ID NO: 1546411 - DNA, 15 bp, Homo sapiens
cagcttgtatctttt

SEQ ID NO: 1546412 - DNA, 15 bp, Homo sapiens
tcagcttgtatcttt

SEQ ID NO: 1546413 - DNA, 15 bp, Homo sapiens
ctcagcttgtatctt

SEQ ID NO: 1546414 - DNA, 15 bp, Homo sapiens
gctcagcttgtatct

SEQ ID NO: 1546415 - DNA, 15 bp, Homo sapiens
tgctcagcttgtatc

SEQ ID NO: 1546416 - DNA, 15 bp, Homo sapiens
gtgctcagcttgtat

SEQ ID NO: 1546417 - DNA, 15 bp, Homo sapiens
agtgctcagcttgta

SEQ ID NO: 1546418 - DNA, 15 bp, Homo sapiens
cagtgctcagcttgt

SEQ ID NO: 1546419 - DNA, 15 bp, Homo sapiens
ccagtgctcagcttg

SEQ ID NO: 1546420 - DNA, 15 bp, Homo sapiens
gccagtgctcagctt

SEQ ID NO: 1546421 - DNA, 15 bp, Homo sapiens
tgccagtgctcagct

SEQ ID NO: 1546422 - DNA, 15 bp, Homo sapiens
gtgccagtgctcagc

SEQ ID NO: 1546423 - DNA, 15 bp, Homo sapiens
agtgccagtgctcag

SEQ ID NO: 1546424 - DNA, 15 bp, Homo sapiens
cagtgccagtgctca

SEQ ID NO: 1546425 - DNA, 15 bp, Homo sapiens
acagtgccagtgctc

SEQ ID NO: 1546426 - DNA, 15 bp, Homo sapiens
tacagtgccagtgct

SEQ ID NO: 1546427 - DNA, 15 bp, Homo sapiens
ctacagtgccagtgc

SEQ ID NO: 1546428 - DNA, 15 bp, Homo sapiens
actacagtgccagtg

SEQ ID NO: 1546429 - DNA, 15 bp, Homo sapiens
gactacagtgccagt

SEQ ID NO: 1546430 - DNA, 15 bp, Homo sapiens
ggactacagtgccag

SEQ ID NO: 1546431 - DNA, 15 bp, Homo sapiens
gggactacagtgcca

SEQ ID NO: 1546432 - DNA, 15 bp, Homo sapiens
tgggactacagtgcc

SEQ ID NO: 1546433 - DNA, 15 bp, Homo sapiens
cgcctcagcctcccg

SEQ ID NO: 1546434 - DNA, 15 bp, Homo sapiens
tgtcctcccgcctca

SEQ ID NO: 1546435 - DNA, 15 bp, Homo sapiens
ctgtcctcccgcctc

SEQ ID NO: 1546436 - DNA, 15 bp, Homo sapiens
gctgtcctcccgcct

SEQ ID NO: 1546437 - DNA, 15 bp, Homo sapiens
agctgtcctcccgcc

SEQ ID NO: 1546438 - DNA, 15 bp, Homo sapiens
aagctgtcctcccgc

SEQ ID NO: 1546439 - DNA, 15 bp, Homo sapiens
caagctgtcctcccg

SEQ ID NO: 1546440 - DNA, 15 bp, Homo sapiens
tcaagctgtcctccc

SEQ ID NO: 1546441 - DNA, 15 bp, Homo sapiens
ctcaagctgtcctcc

SEQ ID NO: 1546442 - DNA, 15 bp, Homo sapiens
gctcaagctgtcctc

SEQ ID NO: 1546443 - DNA, 15 bp, Homo sapiens
agctcaagctgtcct

SEQ ID NO: 1546444 - DNA, 15 bp, Homo sapiens
gagctcaagctgtcc

SEQ ID NO: 1546445 - DNA, 15 bp, Homo sapiens
tgagctcaagctgtc

SEQ ID NO: 1546446 - DNA, 15 bp, Homo sapiens
ctgagctcaagctgt

SEQ ID NO: 1546447 - DNA, 15 bp, Homo sapiens
cctgagctcaagctg

SEQ ID NO: 1546448 - DNA, 15 bp, Homo sapiens
tcctgagctcaagct

SEQ ID NO: 1546449 - DNA, 15 bp, Homo sapiens
ctcctgagctcaagc

SEQ ID NO: 1546450 - DNA, 15 bp, Homo sapiens
ccttgaactcctgag

SEQ ID NO: 1546451 - DNA, 15 bp, Homo sapiens
gccttgaactcctga

SEQ ID NO: 1546452 - DNA, 15 bp, Homo sapiens
acactgcagccttga

SEQ ID NO: 1546453 - DNA, 15 bp, Homo sapiens
cacactgcagccttg

SEQ ID NO: 1546454 - DNA, 15 bp, Homo sapiens
gcacactgcagcctt

SEQ ID NO: 1546455 - DNA, 15 bp, Homo sapiens
agcacactgcagcct

SEQ ID NO: 1546456 - DNA, 15 bp, Homo sapiens
tagcacactgcagcc

SEQ ID NO: 1546457 - DNA, 15 bp, Homo sapiens
atagcacactgcagc

SEQ ID NO: 1546458 - DNA, 15 bp, Homo sapiens
tatagcacactgcag

SEQ ID NO: 1546459 - DNA, 15 bp, Homo sapiens
ttatagcacactgca

SEQ ID NO: 1546460 - DNA, 15 bp, Homo sapiens
attatagcacactgc

SEQ ID NO: 1546461 - DNA, 15 bp, Homo sapiens
gattatagcacactg

SEQ ID NO: 1546462 - DNA, 15 bp, Homo sapiens
tgattatagcacact

SEQ ID NO: 1546463 - DNA, 15 bp, Homo sapiens
atgattatagcacac

SEQ ID NO: 1546464 - DNA, 15 bp, Homo sapiens
catgattatagcaca

SEQ ID NO: 1546465 - DNA, 15 bp, Homo sapiens
acatgattatagcac

SEQ ID NO: 1546466 - DNA, 15 bp, Homo sapiens
gacatgattatagca

SEQ ID NO: 1546467 - DNA, 15 bp, Homo sapiens
agacatgattatagc

SEQ ID NO: 1546468 - DNA, 15 bp, Homo sapiens
cagacatgattatag

SEQ ID NO: 1546469 - DNA, 15 bp, Homo sapiens
acagacatgattata

SEQ ID NO: 1546470 - DNA, 15 bp, Homo sapiens
cacagacatgattat

SEQ ID NO: 1546471 - DNA, 15 bp, Homo sapiens
tcacagacatgatta

SEQ ID NO: 1546472 - DNA, 15 bp, Homo sapiens
ttcacagacatgatt

SEQ ID NO: 1546473 - DNA, 15 bp, Homo sapiens
attcacagacatgat

SEQ ID NO: 1546474 - DNA, 15 bp, Homo sapiens
tattcacagacatga

SEQ ID NO: 1546475 - DNA, 15 bp, Homo sapiens
ctattcacagacatg

SEQ ID NO: 1546476 - DNA, 15 bp, Homo sapiens
gctattcacagacat

SEQ ID NO: 1546477 - DNA, 15 bp, Homo sapiens
ggctattcacagaca

SEQ ID NO: 1546478 - DNA, 15 bp, Homo sapiens
tggctattcacagac

SEQ ID NO: 1546479 - DNA, 15 bp, Homo sapiens
ttggctattcacaga

SEQ ID NO: 1546480 - DNA, 15 bp, Homo sapiens
attggctattcacag

SEQ ID NO: 1546481 - DNA, 15 bp, Homo sapiens
cattggctattcaca

SEQ ID NO: 1546482 - DNA, 15 bp, Homo sapiens
gcattggctattcac

SEQ ID NO: 1546483 - DNA, 15 bp, Homo sapiens
tgcattggctattca

SEQ ID NO: 1546484 - DNA, 15 bp, Homo sapiens
gtgcattggctattc

SEQ ID NO: 1546485 - DNA, 15 bp, Homo sapiens
tgtgcattggctatt

SEQ ID NO: 1546486 - DNA, 15 bp, Homo sapiens
gtgtgcattggctat

SEQ ID NO: 1546487 - DNA, 15 bp, Homo sapiens
ggtgtgcattggcta

SEQ ID NO: 1546488 - DNA, 15 bp, Homo sapiens
tggtgtgcattggct

SEQ ID NO: 1546489 - DNA, 15 bp, Homo sapiens
ctggtgtgcattggc

SEQ ID NO: 1546490 - DNA, 15 bp, Homo sapiens
gctggtgtgcattgg

SEQ ID NO: 1546491 - DNA, 15 bp, Homo sapiens
ggctggtgtgcattg

SEQ ID NO: 1546492 - DNA, 15 bp, Homo sapiens
aggctggtgtgcatt

SEQ ID NO: 1546493 - DNA, 15 bp, Homo sapiens
caggctggtgtgcat

SEQ ID NO: 1546494 - DNA, 15 bp, Homo sapiens
ccccaggctggtgtg

SEQ ID NO: 1546495 - DNA, 15 bp, Homo sapiens
tccccaggctggtgt

SEQ ID NO: 1546496 - DNA, 15 bp, Homo sapiens
ttccccaggctggtg

SEQ ID NO: 1546497 - DNA, 15 bp, Homo sapiens
gttccccaggctggt

SEQ ID NO: 1546498 - DNA, 15 bp, Homo sapiens
tgttccccaggctgg

SEQ ID NO: 1546499 - DNA, 15 bp, Homo sapiens
atgttccccaggctg

SEQ ID NO: 1546500 - DNA, 15 bp, Homo sapiens
tatgttccccaggct

SEQ ID NO: 1546501 - DNA, 15 bp, Homo sapiens
ctatgttccccaggc

SEQ ID NO: 1546502 - DNA, 15 bp, Homo sapiens
actatgttccccagg

SEQ ID NO: 1546503 - DNA, 15 bp, Homo sapiens
cactatgttccccag

SEQ ID NO: 1546504 - DNA, 15 bp, Homo sapiens
tcactatgttcccca

SEQ ID NO: 1546505 - DNA, 15 bp, Homo sapiens
ctcactatgttcccc

SEQ ID NO: 1546506 - DNA, 15 bp, Homo sapiens
tctcactatgttccc

SEQ ID NO: 1546507 - DNA, 15 bp, Homo sapiens
gtctcactatgttcc

SEQ ID NO: 1546508 - DNA, 15 bp, Homo sapiens
agtctcactatgttc

SEQ ID NO: 1546509 - DNA, 15 bp, Homo sapiens
tcagagtctcactat

SEQ ID NO: 1546510 - DNA, 15 bp, Homo sapiens
gtcagagtctcacta

SEQ ID NO: 1546511 - DNA, 15 bp, Homo sapiens
agtcagagtctcact

SEQ ID NO: 1546512 - DNA, 15 bp, Homo sapiens
tagtcagagtctcac

SEQ ID NO: 1546513 - DNA, 15 bp, Homo sapiens
ttagtcagagtctca

SEQ ID NO: 1546514 - DNA, 15 bp, Homo sapiens
tttagtcagagtctc

SEQ ID NO: 1546515 - DNA, 15 bp, Homo sapiens
ttttagtcagagtct

SEQ ID NO: 1546516 - DNA, 15 bp, Homo sapiens
cttttagtcagagtc

SEQ ID NO: 1546517 - DNA, 15 bp, Homo sapiens
acttttagtcagagt

SEQ ID NO: 1546518 - DNA, 15 bp, Homo sapiens
aacttttagtcagag

SEQ ID NO: 1546519 - DNA, 15 bp, Homo sapiens
aaacttttagtcaga

SEQ ID NO: 1546520 - DNA, 15 bp, Homo sapiens
aaaacttttagtcag

SEQ ID NO: 1546521 - DNA, 15 bp, Homo sapiens
aaaaacttttagtca

SEQ ID NO: 1546522 - DNA, 15 bp, Homo sapiens
aaaaaacttttagtc

SEQ ID NO: 1546523 - DNA, 15 bp, Homo sapiens
taaaaaacttttagt

SEQ ID NO: 1546524 - DNA, 15 bp, Homo sapiens
ttaaaaaacttttag

SEQ ID NO: 1546525 - DNA, 15 bp, Homo sapiens
tttaaaaaactttta

SEQ ID NO: 1546526 - DNA, 15 bp, Homo sapiens
ttttaaaaaactttt

SEQ ID NO: 1546527 - DNA, 15 bp, Homo sapiens
tttttaaaaaacttt

SEQ ID NO: 1546528 - DNA, 15 bp, Homo sapiens
ttttttaaaaaactt

SEQ ID NO: 1546529 - DNA, 15 bp, Homo sapiens
cttttttaaaaaact

SEQ ID NO: 1546530 - DNA, 15 bp, Homo sapiens
tcttttttaaaaaac

SEQ ID NO: 1546531 - DNA, 15 bp, Homo sapiens
ttttcttttttaaaa

SEQ ID NO: 1546532 - DNA, 15 bp, Homo sapiens
tttttcttttttaaa

SEQ ID NO: 1546533 - DNA, 15 bp, Homo sapiens
ttttttcttttttaa

SEQ ID NO: 1546534 - DNA, 15 bp, Homo sapiens
cttttttctttttta

SEQ ID NO: 1546535 - DNA, 15 bp, Homo sapiens
atcttttttcttttt

SEQ ID NO: 1546536 - DNA, 15 bp, Homo sapiens
tatcttttttctttt

SEQ ID NO: 1546537 - DNA, 15 bp, Homo sapiens
atatcttttttcttt

SEQ ID NO: 1546538 - DNA, 15 bp, Homo sapiens
catatcttttttctt

SEQ ID NO: 1546539 - DNA, 15 bp, Homo sapiens
acatatcttttttct

SEQ ID NO: 1546540 - DNA, 15 bp, Homo sapiens
tacatatcttttttc

SEQ ID NO: 1546541 - DNA, 15 bp, Homo sapiens
ttacatatctttttt

SEQ ID NO: 1546542 - DNA, 15 bp, Homo sapiens
tttacatatcttttt

SEQ ID NO: 1546543 - DNA, 15 bp, Homo sapiens
gtttacatatctttt

SEQ ID NO: 1546544 - DNA, 15 bp, Homo sapiens
tgtttacatatcttt

SEQ ID NO: 1546545 - DNA, 15 bp, Homo sapiens
ctgtttacatatctt

SEQ ID NO: 1546546 - DNA, 15 bp, Homo sapiens
tctgtttacatatct

SEQ ID NO: 1546547 - DNA, 15 bp, Homo sapiens
ttctgtttacatatc

SEQ ID NO: 1546548 - DNA, 15 bp, Homo sapiens
tttctgtttacatat

SEQ ID NO: 1546549 - DNA, 15 bp, Homo sapiens
atttctgtttacata

SEQ ID NO: 1546550 - DNA, 15 bp, Homo sapiens
tatttctgtttacat

SEQ ID NO: 1546551 - DNA, 15 bp, Homo sapiens
ttatttctgtttaca

SEQ ID NO: 1546552 - DNA, 15 bp, Homo sapiens
attatttctgtttac

SEQ ID NO: 1546553 - DNA, 15 bp, Homo sapiens
tattatttctgttta

SEQ ID NO: 1546554 - DNA, 15 bp, Homo sapiens
ttattatttctgttt

SEQ ID NO: 1546555 - DNA, 15 bp, Homo sapiens
gttattatttctgtt

SEQ ID NO: 1546556 - DNA, 15 bp, Homo sapiens
tgttattatttctgt

SEQ ID NO: 1546557 - DNA, 15 bp, Homo sapiens
gtgttattatttctg

SEQ ID NO: 1546558 - DNA, 15 bp, Homo sapiens
agtgttattatttct

SEQ ID NO: 1546559 - DNA, 15 bp, Homo sapiens
tagtgttattatttc

SEQ ID NO: 1546560 - DNA, 15 bp, Homo sapiens
ttagtgttattattt

SEQ ID NO: 1546561 - DNA, 15 bp, Homo sapiens
attagtgttattatt

SEQ ID NO: 1546562 - DNA, 15 bp, Homo sapiens
aattagtgttattat

SEQ ID NO: 1546563 - DNA, 15 bp, Homo sapiens
aaattagtgttatta

SEQ ID NO: 1546564 - DNA, 15 bp, Homo sapiens
aaaattagtgttatt

SEQ ID NO: 1546565 - DNA, 15 bp, Homo sapiens
gaaaattagtgttat

SEQ ID NO: 1546566 - DNA, 15 bp, Homo sapiens
tgaaaattagtgtta

SEQ ID NO: 1546567 - DNA, 15 bp, Homo sapiens
gtgaaaattagtgtt

SEQ ID NO: 1546568 - DNA, 15 bp, Homo sapiens
tgtgaaaattagtgt

SEQ ID NO: 1546569 - DNA, 15 bp, Homo sapiens
atgtgaaaattagtg

SEQ ID NO: 1546570 - DNA, 15 bp, Homo sapiens
aatgtgaaaattagt

SEQ ID NO: 1546571 - DNA, 15 bp, Homo sapiens
aaatgtgaaaattag

SEQ ID NO: 1546572 - DNA, 15 bp, Homo sapiens
aaaatgtgaaaatta

SEQ ID NO: 1546573 - DNA, 15 bp, Homo sapiens
taaaatgtgaaaatt

SEQ ID NO: 1546574 - DNA, 15 bp, Homo sapiens
ctaaaatgtgaaaat

SEQ ID NO: 1546575 - DNA, 15 bp, Homo sapiens
cctaaaatgtgaaaa

SEQ ID NO: 1546576 - DNA, 15 bp, Homo sapiens
tcctaaaatgtgaaa

SEQ ID NO: 1546577 - DNA, 15 bp, Homo sapiens
ttcctaaaatgtgaa

SEQ ID NO: 1546578 - DNA, 15 bp, Homo sapiens
tttcctaaaatgtga

SEQ ID NO: 1546579 - DNA, 15 bp, Homo sapiens
ttttcctaaaatgtg

SEQ ID NO: 1546580 - DNA, 15 bp, Homo sapiens
attttcctaaaatgt

SEQ ID NO: 1546581 - DNA, 15 bp, Homo sapiens
cattttcctaaaatg

SEQ ID NO: 1546582 - DNA, 15 bp, Homo sapiens
ccattttcctaaaat

SEQ ID NO: 1546583 - DNA, 15 bp, Homo sapiens
tccattttcctaaaa

SEQ ID NO: 1546584 - DNA, 15 bp, Homo sapiens
ctccattttcctaaa

SEQ ID NO: 1546585 - DNA, 15 bp, Homo sapiens
gctccattttcctaa

SEQ ID NO: 1546586 - DNA, 15 bp, Homo sapiens
agctccattttccta

SEQ ID NO: 1546587 - DNA, 15 bp, Homo sapiens
tagctccattttcct

SEQ ID NO: 1546588 - DNA, 15 bp, Homo sapiens
atagctccattttcc

SEQ ID NO: 1546589 - DNA, 15 bp, Homo sapiens
tatagctccattttc

SEQ ID NO: 1546590 - DNA, 15 bp, Homo sapiens
ttatagctccatttt

SEQ ID NO: 1546591 - DNA, 15 bp, Homo sapiens
cttatagctccattt

SEQ ID NO: 1546592 - DNA, 15 bp, Homo sapiens
gcttatagctccatt

SEQ ID NO: 1546593 - DNA, 15 bp, Homo sapiens
ggcttatagctccat

SEQ ID NO: 1546594 - DNA, 15 bp, Homo sapiens
aggcttatagctcca

SEQ ID NO: 1546595 - DNA, 15 bp, Homo sapiens
caggcttatagctcc

SEQ ID NO: 1546596 - DNA, 15 bp, Homo sapiens
gcaggcttatagctc

SEQ ID NO: 1546597 - DNA, 15 bp, Homo sapiens
ggcaggcttatagct

SEQ ID NO: 1546598 - DNA, 15 bp, Homo sapiens
aggcaggcttatagc

SEQ ID NO: 1546599 - DNA, 15 bp, Homo sapiens
aaggcaggcttatag

SEQ ID NO: 1546600 - DNA, 15 bp, Homo sapiens
aaaggcaggcttata

SEQ ID NO: 1546601 - DNA, 15 bp, Homo sapiens
taaaggcaggcttat

SEQ ID NO: 1546602 - DNA, 15 bp, Homo sapiens
ttaaaggcaggctta

SEQ ID NO: 1546603 - DNA, 15 bp, Homo sapiens
attaaaggcaggctt

SEQ ID NO: 1546604 - DNA, 15 bp, Homo sapiens
aattaaaggcaggct

SEQ ID NO: 1546605 - DNA, 15 bp, Homo sapiens
aaattaaaggcaggc

SEQ ID NO: 1546606 - DNA, 15 bp, Homo sapiens
gaaattaaaggcagg

SEQ ID NO: 1546607 - DNA, 15 bp, Homo sapiens
agaaattaaaggcag

SEQ ID NO: 1546608 - DNA, 15 bp, Homo sapiens
tagaaattaaaggca

SEQ ID NO: 1546609 - DNA, 15 bp, Homo sapiens
ttagaaattaaaggc

SEQ ID NO: 1546610 - DNA, 15 bp, Homo sapiens
attagaaattaaagg

SEQ ID NO: 1546611 - DNA, 15 bp, Homo sapiens
aattagaaattaaag

SEQ ID NO: 1546612 - DNA, 15 bp, Homo sapiens
gaattagaaattaaa

SEQ ID NO: 1546613 - DNA, 15 bp, Homo sapiens
tgaattagaaattaa

SEQ ID NO: 1546614 - DNA, 15 bp, Homo sapiens
ttgaattagaaatta

SEQ ID NO: 1546615 - DNA, 15 bp, Homo sapiens
tttgaattagaaatt

SEQ ID NO: 1546616 - DNA, 15 bp, Homo sapiens
ctttgaattagaaat

SEQ ID NO: 1546617 - DNA, 15 bp, Homo sapiens
tctttgaattagaaa

SEQ ID NO: 1546618 - DNA, 15 bp, Homo sapiens
atctttgaattagaa

SEQ ID NO: 1546619 - DNA, 15 bp, Homo sapiens
gatctttgaattaga

SEQ ID NO: 1546620 - DNA, 15 bp, Homo sapiens
agatctttgaattag

SEQ ID NO: 1546621 - DNA, 15 bp, Homo sapiens
aagatctttgaatta

SEQ ID NO: 1546622 - DNA, 15 bp, Homo sapiens
gaagatctttgaatt

SEQ ID NO: 1546623 - DNA, 15 bp, Homo sapiens
tgaagatctttgaat

SEQ ID NO: 1546624 - DNA, 15 bp, Homo sapiens
atgaagatctttgaa

SEQ ID NO: 1546625 - DNA, 15 bp, Homo sapiens
aatgaagatctttga

SEQ ID NO: 1546626 - DNA, 15 bp, Homo sapiens
caatgaagatctttg

SEQ ID NO: 1546627 - DNA, 15 bp, Homo sapiens
tcaatgaagatcttt

SEQ ID NO: 1546628 - DNA, 15 bp, Homo sapiens
ttcaatgaagatctt

SEQ ID NO: 1546629 - DNA, 15 bp, Homo sapiens
tttcaatgaagatct

SEQ ID NO: 1546630 - DNA, 15 bp, Homo sapiens
ttttcaatgaagatc

SEQ ID NO: 1546631 - DNA, 15 bp, Homo sapiens
tttttcaatgaagat

SEQ ID NO: 1546632 - DNA, 15 bp, Homo sapiens
atttttcaatgaaga

SEQ ID NO: 1546633 - DNA, 15 bp, Homo sapiens
tatttttcaatgaag

SEQ ID NO: 1546634 - DNA, 15 bp, Homo sapiens
gtatttttcaatgaa

SEQ ID NO: 1546635 - DNA, 15 bp, Homo sapiens
tgtatttttcaatga

SEQ ID NO: 1546636 - DNA, 15 bp, Homo sapiens
ttgtatttttcaatg

SEQ ID NO: 1546637 - DNA, 15 bp, Homo sapiens
gttgtatttttcaat

SEQ ID NO: 1546638 - DNA, 15 bp, Homo sapiens
ggttgtatttttcaa

SEQ ID NO: 1546639 - DNA, 15 bp, Homo sapiens
aggttgtatttttca

SEQ ID NO: 1546640 - DNA, 15 bp, Homo sapiens
aaggttgtatttttc

SEQ ID NO: 1546641 - DNA, 15 bp, Homo sapiens
aaaggttgtattttt

SEQ ID NO: 1546642 - DNA, 15 bp, Homo sapiens
aaaaggttgtatttt

SEQ ID NO: 1546643 - DNA, 15 bp, Homo sapiens
taaaaggttgtattt

SEQ ID NO: 1546644 - DNA, 15 bp, Homo sapiens
ttaaaaggttgtatt

SEQ ID NO: 1546645 - DNA, 15 bp, Homo sapiens
gttaaaaggttgtat

SEQ ID NO: 1546646 - DNA, 15 bp, Homo sapiens
tgttaaaaggttgta

SEQ ID NO: 1546647 - DNA, 15 bp, Homo sapiens
ttgttaaaaggttgt

SEQ ID NO: 1546648 - DNA, 15 bp, Homo sapiens
attgttaaaaggttg

SEQ ID NO: 1546649 - DNA, 15 bp, Homo sapiens
aattgttaaaaggtt

SEQ ID NO: 1546650 - DNA, 15 bp, Homo sapiens
taattgttaaaaggt

SEQ ID NO: 1546651 - DNA, 15 bp, Homo sapiens
ataattgttaaaagg

SEQ ID NO: 1546652 - DNA, 15 bp, Homo sapiens
aataattgttaaaag

SEQ ID NO: 1546653 - DNA, 15 bp, Homo sapiens
taataattgttaaaa

SEQ ID NO: 1546654 - DNA, 15 bp, Homo sapiens
ctaataattgttaaa

SEQ ID NO: 1546655 - DNA, 15 bp, Homo sapiens
gctaataattgttaa

SEQ ID NO: 1546656 - DNA, 15 bp, Homo sapiens
ggctaataattgtta

SEQ ID NO: 1546657 - DNA, 15 bp, Homo sapiens
aggctaataattgtt

SEQ ID NO: 1546658 - DNA, 15 bp, Homo sapiens
caggctaataattgt

SEQ ID NO: 1546659 - DNA, 15 bp, Homo sapiens
ccaggctaataattg

SEQ ID NO: 1546660 - DNA, 15 bp, Homo sapiens
cccaggctaataatt

SEQ ID NO: 1546661 - DNA, 15 bp, Homo sapiens
acccaggctaataat

SEQ ID NO: 1546662 - DNA, 15 bp, Homo sapiens
tacccaggctaataa

SEQ ID NO: 1546663 - DNA, 15 bp, Homo sapiens
ttacccaggctaata

SEQ ID NO: 1546664 - DNA, 15 bp, Homo sapiens
tttacccaggctaat

SEQ ID NO: 1546665 - DNA, 15 bp, Homo sapiens
gtttacccaggctaa

SEQ ID NO: 1546666 - DNA, 15 bp, Homo sapiens
ggtttacccaggcta

SEQ ID NO: 1546667 - DNA, 15 bp, Homo sapiens
aggtttacccaggct

SEQ ID NO: 1546668 - DNA, 15 bp, Homo sapiens
caggtttacccaggc

SEQ ID NO: 1546669 - DNA, 15 bp, Homo sapiens
acaggtttacccagg

SEQ ID NO: 1546670 - DNA, 15 bp, Homo sapiens
tacaggtttacccag

SEQ ID NO: 1546671 - DNA, 15 bp, Homo sapiens
atacaggtttaccca

SEQ ID NO: 1546672 - DNA, 15 bp, Homo sapiens
aatacaggtttaccc

SEQ ID NO: 1546673 - DNA, 15 bp, Homo sapiens
gaatacaggtttacc

SEQ ID NO: 1546674 - DNA, 15 bp, Homo sapiens
agaatacaggtttac

SEQ ID NO: 1546675 - DNA, 15 bp, Homo sapiens
gaagaatacaggttt

SEQ ID NO: 1546676 - DNA, 15 bp, Homo sapiens
agaagaatacaggtt

SEQ ID NO: 1546677 - DNA, 15 bp, Homo sapiens
gagaagaatacaggt

SEQ ID NO: 1546678 - DNA, 15 bp, Homo sapiens
agagaagaatacagg

SEQ ID NO: 1546679 - DNA, 15 bp, Homo sapiens
tagagaagaatacag

SEQ ID NO: 1546680 - DNA, 15 bp, Homo sapiens
ctagagaagaataca

SEQ ID NO: 1546681 - DNA, 15 bp, Homo sapiens
actagagaagaatac

SEQ ID NO: 1546682 - DNA, 15 bp, Homo sapiens
cactagagaagaata

SEQ ID NO: 1546683 - DNA, 15 bp, Homo sapiens
tcactagagaagaat

SEQ ID NO: 1546684 - DNA, 15 bp, Homo sapiens
gtcactagagaagaa

SEQ ID NO: 1546685 - DNA, 15 bp, Homo sapiens
ggtcactagagaaga

SEQ ID NO: 1546686 - DNA, 15 bp, Homo sapiens
aggtcactagagaag

SEQ ID NO: 1546687 - DNA, 15 bp, Homo sapiens
taggtcactagagaa

SEQ ID NO: 1546688 - DNA, 15 bp, Homo sapiens
ttaggtcactagaga

SEQ ID NO: 1546689 - DNA, 15 bp, Homo sapiens
tttaggtcactagag

SEQ ID NO: 1546690 - DNA, 15 bp, Homo sapiens
ctttaggtcactaga

SEQ ID NO: 1546691 - DNA, 15 bp, Homo sapiens
gctttaggtcactag

SEQ ID NO: 1546692 - DNA, 15 bp, Homo sapiens
tgctttaggtcacta

SEQ ID NO: 1546693 - DNA, 15 bp, Homo sapiens
ttgctttaggtcact

SEQ ID NO: 1546694 - DNA, 15 bp, Homo sapiens
attgctttaggtcac

SEQ ID NO: 1546695 - DNA, 15 bp, Homo sapiens
gattgctttaggtca

SEQ ID NO: 1546696 - DNA, 15 bp, Homo sapiens
agattgctttaggtc

SEQ ID NO: 1546697 - DNA, 15 bp, Homo sapiens
gagattgctttaggt

SEQ ID NO: 1546698 - DNA, 15 bp, Homo sapiens
agagattgctttagg

SEQ ID NO: 1546699 - DNA, 15 bp, Homo sapiens
cagagattgctttag

SEQ ID NO: 1546700 - DNA, 15 bp, Homo sapiens
tcagagattgcttta

SEQ ID NO: 1546701 - DNA, 15 bp, Homo sapiens
gtcagagattgcttt

SEQ ID NO: 1546702 - DNA, 15 bp, Homo sapiens
tgtcagagattgctt

SEQ ID NO: 1546703 - DNA, 15 bp, Homo sapiens
ctgtcagagattgct

SEQ ID NO: 1546704 - DNA, 15 bp, Homo sapiens
gctgtcagagattgc

SEQ ID NO: 1546705 - DNA, 15 bp, Homo sapiens
agctgtcagagattg

SEQ ID NO: 1546706 - DNA, 15 bp, Homo sapiens
aagctgtcagagatt

SEQ ID NO: 1546707 - DNA, 15 bp, Homo sapiens
gaagctgtcagagat

SEQ ID NO: 1546708 - DNA, 15 bp, Homo sapiens
agaagctgtcagaga

SEQ ID NO: 1546709 - DNA, 15 bp, Homo sapiens
cagaagctgtcagag

SEQ ID NO: 1546710 - DNA, 15 bp, Homo sapiens
gcagaagctgtcaga

SEQ ID NO: 1546711 - DNA, 15 bp, Homo sapiens
agcagaagctgtcag

SEQ ID NO: 1546712 - DNA, 15 bp, Homo sapiens
aagcagaagctgtca

SEQ ID NO: 1546713 - DNA, 15 bp, Homo sapiens
aaagcagaagctgtc

SEQ ID NO: 1546714 - DNA, 15 bp, Homo sapiens
aaaagcagaagctgt

SEQ ID NO: 1546715 - DNA, 15 bp, Homo sapiens
aaaaagcagaagctg

SEQ ID NO: 1546716 - DNA, 15 bp, Homo sapiens
caaaaagcagaagct

SEQ ID NO: 1546717 - DNA, 15 bp, Homo sapiens
gcaaaaagcagaagc

SEQ ID NO: 1546718 - DNA, 15 bp, Homo sapiens
agcaaaaagcagaag

SEQ ID NO: 1546719 - DNA, 15 bp, Homo sapiens
cagcaaaaagcagaa

SEQ ID NO: 1546720 - DNA, 15 bp, Homo sapiens
tcagcaaaaagcaga

SEQ ID NO: 1546721 - DNA, 15 bp, Homo sapiens
ttcagcaaaaagcag

SEQ ID NO: 1546722 - DNA, 15 bp, Homo sapiens
cttcagcaaaaagca

SEQ ID NO: 1546723 - DNA, 15 bp, Homo sapiens
gcttcagcaaaaagc

SEQ ID NO: 1546724 - DNA, 15 bp, Homo sapiens
tgcttcagcaaaaag

SEQ ID NO: 1546725 - DNA, 15 bp, Homo sapiens
atgcttcagcaaaaa

SEQ ID NO: 1546726 - DNA, 15 bp, Homo sapiens
catgcttcagcaaaa

SEQ ID NO: 1546727 - DNA, 15 bp, Homo sapiens
acatgcttcagcaaa

SEQ ID NO: 1546728 - DNA, 15 bp, Homo sapiens
gacatgcttcagcaa

SEQ ID NO: 1546729 - DNA, 15 bp, Homo sapiens
tgacatgcttcagca

SEQ ID NO: 1546730 - DNA, 15 bp, Homo sapiens
atgacatgcttcagc

SEQ ID NO: 1546731 - DNA, 15 bp, Homo sapiens
gatgacatgcttcag

SEQ ID NO: 1546732 - DNA, 15 bp, Homo sapiens
ggatgacatgcttca

SEQ ID NO: 1546733 - DNA, 15 bp, Homo sapiens
gggatgacatgcttc

SEQ ID NO: 1546734 - DNA, 15 bp, Homo sapiens
tgggatgacatgctt

SEQ ID NO: 1546735 - DNA, 15 bp, Homo sapiens
ctgggatgacatgct

SEQ ID NO: 1546736 - DNA, 15 bp, Homo sapiens
tctgggatgacatgc

SEQ ID NO: 1546737 - DNA, 15 bp, Homo sapiens
ctctgggatgacatg

SEQ ID NO: 1546738 - DNA, 15 bp, Homo sapiens
tctctgggatgacat

SEQ ID NO: 1546739 - DNA, 15 bp, Homo sapiens
ttctctgggatgaca

SEQ ID NO: 1546740 - DNA, 15 bp, Homo sapiens
tttctctgggatgac

SEQ ID NO: 1546741 - DNA, 15 bp, Homo sapiens
ttttctctgggatga

SEQ ID NO: 1546742 - DNA, 15 bp, Homo sapiens
tttttctctgggatg

SEQ ID NO: 1546743 - DNA, 15 bp, Homo sapiens
ctttttctctgggat

SEQ ID NO: 1546744 - DNA, 15 bp, Homo sapiens
gctttttctctggga

SEQ ID NO: 1546745 - DNA, 15 bp, Homo sapiens
ggctttttctctggg

SEQ ID NO: 1546746 - DNA, 15 bp, Homo sapiens
aggctttttctctgg

SEQ ID NO: 1546747 - DNA, 15 bp, Homo sapiens
aaggctttttctctg

SEQ ID NO: 1546748 - DNA, 15 bp, Homo sapiens
aaaggctttttctct

SEQ ID NO: 1546749 - DNA, 15 bp, Homo sapiens
taaaggctttttctc

SEQ ID NO: 1546750 - DNA, 15 bp, Homo sapiens
ctaaaggctttttct

SEQ ID NO: 1546751 - DNA, 15 bp, Homo sapiens
cctaaaggctttttc

SEQ ID NO: 1546752 - DNA, 15 bp, Homo sapiens
gcctaaaggcttttt

SEQ ID NO: 1546753 - DNA, 15 bp, Homo sapiens
tgcctaaaggctttt

SEQ ID NO: 1546754 - DNA, 15 bp, Homo sapiens
ctgcctaaaggcttt

SEQ ID NO: 1546755 - DNA, 15 bp, Homo sapiens
tctgcctaaaggctt

SEQ ID NO: 1546756 - DNA, 15 bp, Homo sapiens
gtctgcctaaaggct

SEQ ID NO: 1546757 - DNA, 15 bp, Homo sapiens
agtctgcctaaaggc

SEQ ID NO: 1546758 - DNA, 15 bp, Homo sapiens
aagtctgcctaaagg

SEQ ID NO: 1546759 - DNA, 15 bp, Homo sapiens
taagtctgcctaaag

SEQ ID NO: 1546760 - DNA, 15 bp, Homo sapiens
ttaagtctgcctaaa

SEQ ID NO: 1546761 - DNA, 15 bp, Homo sapiens
tttaagtctgcctaa

SEQ ID NO: 1546762 - DNA, 15 bp, Homo sapiens
atttaagtctgccta

SEQ ID NO: 1546763 - DNA, 15 bp, Homo sapiens
aatttaagtctgcct

SEQ ID NO: 1546764 - DNA, 15 bp, Homo sapiens
gaatttaagtctgcc

SEQ ID NO: 1546765 - DNA, 15 bp, Homo sapiens
ggaatttaagtctgc

SEQ ID NO: 1546766 - DNA, 15 bp, Homo sapiens
tggaatttaagtctg

SEQ ID NO: 1546767 - DNA, 15 bp, Homo sapiens
ctggaatttaagtct

SEQ ID NO: 1546768 - DNA, 15 bp, Homo sapiens
actggaatttaagtc

SEQ ID NO: 1546769 - DNA, 15 bp, Homo sapiens
cactggaatttaagt

SEQ ID NO: 1546770 - DNA, 15 bp, Homo sapiens
ccactggaatttaag

SEQ ID NO: 1546771 - DNA, 15 bp, Homo sapiens
gccactggaatttaa

SEQ ID NO: 1546772 - DNA, 15 bp, Homo sapiens
agccactggaattta

SEQ ID NO: 1546773 - DNA, 15 bp, Homo sapiens
aagccactggaattt

SEQ ID NO: 1546774 - DNA, 15 bp, Homo sapiens
aaagccactggaatt

SEQ ID NO: 1546775 - DNA, 15 bp, Homo sapiens
aaaagccactggaat

SEQ ID NO: 1546776 - DNA, 15 bp, Homo sapiens
aaaaagccactggaa

SEQ ID NO: 1546777 - DNA, 15 bp, Homo sapiens
aaaaaagccactgga

SEQ ID NO: 1546778 - DNA, 15 bp, Homo sapiens
aaaaaaagccactgg

SEQ ID NO: 1546779 - DNA, 15 bp, Homo sapiens
gaaaaaaagccactg

SEQ ID NO: 1546780 - DNA, 15 bp, Homo sapiens
ggaaaaaaagccact

SEQ ID NO: 1546781 - DNA, 15 bp, Homo sapiens
gggaaaaaaagccac

SEQ ID NO: 1546782 - DNA, 15 bp, Homo sapiens
agggaaaaaaagcca

SEQ ID NO: 1546783 - DNA, 15 bp, Homo sapiens
tagggaaaaaaagcc

SEQ ID NO: 1546784 - DNA, 15 bp, Homo sapiens
atagggaaaaaaagc

SEQ ID NO: 1546785 - DNA, 15 bp, Homo sapiens
tatagggaaaaaaag

SEQ ID NO: 1546786 - DNA, 15 bp, Homo sapiens
atatagggaaaaaaa

SEQ ID NO: 1546787 - DNA, 15 bp, Homo sapiens
catatagggaaaaaa

SEQ ID NO: 1546788 - DNA, 15 bp, Homo sapiens
ccatatagggaaaaa

SEQ ID NO: 1546789 - DNA, 15 bp, Homo sapiens
accatatagggaaaa

SEQ ID NO: 1546790 - DNA, 15 bp, Homo sapiens
aaccatatagggaaa

SEQ ID NO: 1546791 - DNA, 15 bp, Homo sapiens
caaccatatagggaa

SEQ ID NO: 1546792 - DNA, 15 bp, Homo sapiens
acaaccatataggga

SEQ ID NO: 1546793 - DNA, 15 bp, Homo sapiens
aacaaccatataggg

SEQ ID NO: 1546794 - DNA, 15 bp, Homo sapiens
caacaaccatatagg

SEQ ID NO: 1546795 - DNA, 15 bp, Homo sapiens
gcaacaaccatatag

SEQ ID NO: 1546796 - DNA, 15 bp, Homo sapiens
tgcaacaaccatata

SEQ ID NO: 1546797 - DNA, 15 bp, Homo sapiens
atgcaacaaccatat

SEQ ID NO: 1546798 - DNA, 15 bp, Homo sapiens
gatgcaacaaccata

SEQ ID NO: 1546799 - DNA, 15 bp, Homo sapiens
tgatgcaacaaccat

SEQ ID NO: 1546800 - DNA, 15 bp, Homo sapiens
ttgatgcaacaacca

SEQ ID NO: 1546801 - DNA, 15 bp, Homo sapiens
attgatgcaacaacc

SEQ ID NO: 1546802 - DNA, 15 bp, Homo sapiens
tattgatgcaacaac

SEQ ID NO: 1546803 - DNA, 15 bp, Homo sapiens
atattgatgcaacaa

SEQ ID NO: 1546804 - DNA, 15 bp, Homo sapiens
tatattgatgcaaca

SEQ ID NO: 1546805 - DNA, 15 bp, Homo sapiens
ctatattgatgcaac

SEQ ID NO: 1546806 - DNA, 15 bp, Homo sapiens
actatattgatgcaa

SEQ ID NO: 1546807 - DNA, 15 bp, Homo sapiens
tactatattgatgca

SEQ ID NO: 1546808 - DNA, 15 bp, Homo sapiens
ctactatattgatgc

SEQ ID NO: 1546809 - DNA, 15 bp, Homo sapiens
gctactatattgatg

SEQ ID NO: 1546810 - DNA, 15 bp, Homo sapiens
tgctactatattgat

SEQ ID NO: 1546811 - DNA, 15 bp, Homo sapiens
atgctactatattga

SEQ ID NO: 1546812 - DNA, 15 bp, Homo sapiens
catgctactatattg

SEQ ID NO: 1546813 - DNA, 15 bp, Homo sapiens
tcatgctactatatt

SEQ ID NO: 1546814 - DNA, 15 bp, Homo sapiens
atcatgctactatat

SEQ ID NO: 1546815 - DNA, 15 bp, Homo sapiens
tatcatgctactata

SEQ ID NO: 1546816 - DNA, 15 bp, Homo sapiens
ttatcatgctactat

SEQ ID NO: 1546817 - DNA, 15 bp, Homo sapiens
tttatcatgctacta

SEQ ID NO: 1546818 - DNA, 15 bp, Homo sapiens
gtttatcatgctact

SEQ ID NO: 1546819 - DNA, 15 bp, Homo sapiens
tgtttatcatgctac

SEQ ID NO: 1546820 - DNA, 15 bp, Homo sapiens
atgtttatcatgcta

SEQ ID NO: 1546821 - DNA, 15 bp, Homo sapiens
aatgtttatcatgct

SEQ ID NO: 1546822 - DNA, 15 bp, Homo sapiens
gaatgtttatcatgc

SEQ ID NO: 1546823 - DNA, 15 bp, Homo sapiens
tgaatgtttatcatg

SEQ ID NO: 1546824 - DNA, 15 bp, Homo sapiens
ctgaatgtttatcat

SEQ ID NO: 1546825 - DNA, 15 bp, Homo sapiens
tctgaatgtttatca

SEQ ID NO: 1546826 - DNA, 15 bp, Homo sapiens
ctctgaatgtttatc

SEQ ID NO: 1546827 - DNA, 15 bp, Homo sapiens
cctctgaatgtttat

SEQ ID NO: 1546828 - DNA, 15 bp, Homo sapiens
acctctgaatgttta

SEQ ID NO: 1546829 - DNA, 15 bp, Homo sapiens
tacctctgaatgttt

SEQ ID NO: 1546830 - DNA, 15 bp, Homo sapiens
ttacctctgaatgtt

SEQ ID NO: 1546831 - DNA, 15 bp, Homo sapiens
cttacctctgaatgt

SEQ ID NO: 1546832 - DNA, 15 bp, Homo sapiens
ccttacctctgaatg

SEQ ID NO: 1546833 - DNA, 15 bp, Homo sapiens
tccttacctctgaat

SEQ ID NO: 1546834 - DNA, 15 bp, Homo sapiens
ttccttacctctgaa

SEQ ID NO: 1546835 - DNA, 15 bp, Homo sapiens
tttccttacctctga

SEQ ID NO: 1546836 - DNA, 15 bp, Homo sapiens
ttttccttacctctg

SEQ ID NO: 1546837 - DNA, 15 bp, Homo sapiens
gttttccttacctct

SEQ ID NO: 1546838 - DNA, 15 bp, Homo sapiens
ggttttccttacctc

SEQ ID NO: 1546839 - DNA, 15 bp, Homo sapiens
aggttttccttacct

SEQ ID NO: 1546840 - DNA, 15 bp, Homo sapiens
caggttttccttacc

SEQ ID NO: 1546841 - DNA, 15 bp, Homo sapiens
tcaggttttccttac

SEQ ID NO: 1546842 - DNA, 15 bp, Homo sapiens
gtcaggttttcctta

SEQ ID NO: 1546843 - DNA, 15 bp, Homo sapiens
tgtcaggttttcctt

SEQ ID NO: 1546844 - DNA, 15 bp, Homo sapiens
ctgtcaggttttcct

SEQ ID NO: 1546845 - DNA, 15 bp, Homo sapiens
actgtcaggttttcc

SEQ ID NO: 1546846 - DNA, 15 bp, Homo sapiens
aactgtcaggttttc

SEQ ID NO: 1546847 - DNA, 15 bp, Homo sapiens
taactgtcaggtttt

SEQ ID NO: 1546848 - DNA, 15 bp, Homo sapiens
gtaactgtcaggttt

SEQ ID NO: 1546849 - DNA, 15 bp, Homo sapiens
agtaactgtcaggtt

SEQ ID NO: 1546850 - DNA, 15 bp, Homo sapiens
cagtaactgtcaggt

SEQ ID NO: 1546851 - DNA, 15 bp, Homo sapiens
tcagtaactgtcagg

SEQ ID NO: 1546852 - DNA, 15 bp, Homo sapiens
ttcagtaactgtcag

SEQ ID NO: 1546853 - DNA, 15 bp, Homo sapiens
gttcagtaactgtca

SEQ ID NO: 1546854 - DNA, 15 bp, Homo sapiens
tgttcagtaactgtc

SEQ ID NO: 1546855 - DNA, 15 bp, Homo sapiens
ttgttcagtaactgt

SEQ ID NO: 1546856 - DNA, 15 bp, Homo sapiens
tttgttcagtaactg

SEQ ID NO: 1546857 - DNA, 15 bp, Homo sapiens
gtttgttcagtaact

SEQ ID NO: 1546858 - DNA, 15 bp, Homo sapiens
agtttgttcagtaac

SEQ ID NO: 1546859 - DNA, 15 bp, Homo sapiens
tagtttgttcagtaa

SEQ ID NO: 1546860 - DNA, 15 bp, Homo sapiens
atagtttgttcagta

SEQ ID NO: 1546861 - DNA, 15 bp, Homo sapiens
aatagtttgttcagt

SEQ ID NO: 1546862 - DNA, 15 bp, Homo sapiens
aaatagtttgttcag

SEQ ID NO: 1546863 - DNA, 15 bp, Homo sapiens
gaaatagtttgttca

SEQ ID NO: 1546864 - DNA, 15 bp, Homo sapiens
ggaaatagtttgttc

SEQ ID NO: 1546865 - DNA, 15 bp, Homo sapiens
aggaaatagtttgtt

SEQ ID NO: 1546866 - DNA, 15 bp, Homo sapiens
aaggaaatagtttgt

SEQ ID NO: 1546867 - DNA, 15 bp, Homo sapiens
aaaggaaatagtttg

SEQ ID NO: 1546868 - DNA, 15 bp, Homo sapiens
taaaggaaatagttt

SEQ ID NO: 1546869 - DNA, 15 bp, Homo sapiens
gtaaaggaaatagtt

SEQ ID NO: 1546870 - DNA, 15 bp, Homo sapiens
agtaaaggaaatagt

SEQ ID NO: 1546871 - DNA, 15 bp, Homo sapiens
cagtaaaggaaatag

SEQ ID NO: 1546872 - DNA, 15 bp, Homo sapiens
ccagtaaaggaaata

SEQ ID NO: 1546873 - DNA, 15 bp, Homo sapiens
tccagtaaaggaaat

SEQ ID NO: 1546874 - DNA, 15 bp, Homo sapiens
gtccagtaaaggaaa

SEQ ID NO: 1546875 - DNA, 15 bp, Homo sapiens
tgtccagtaaaggaa

SEQ ID NO: 1546876 - DNA, 15 bp, Homo sapiens
ctgtccagtaaagga

SEQ ID NO: 1546877 - DNA, 15 bp, Homo sapiens
cctgtccagtaaagg

SEQ ID NO: 1546878 - DNA, 15 bp, Homo sapiens
ccctgtccagtaaag

SEQ ID NO: 1546879 - DNA, 15 bp, Homo sapiens
cccctgtccagtaaa

SEQ ID NO: 1546880 - DNA, 15 bp, Homo sapiens
tcccctgtccagtaa

SEQ ID NO: 1546881 - DNA, 15 bp, Homo sapiens
ctcccctgtccagta

SEQ ID NO: 1546882 - DNA, 15 bp, Homo sapiens
tctcccctgtccagt

SEQ ID NO: 1546883 - DNA, 15 bp, Homo sapiens
ttctcccctgtccag

SEQ ID NO: 1546884 - DNA, 15 bp, Homo sapiens
tttctcccctgtcca

SEQ ID NO: 1546885 - DNA, 15 bp, Homo sapiens
ttttctcccctgtcc

SEQ ID NO: 1546886 - DNA, 15 bp, Homo sapiens
attttctcccctgtc

SEQ ID NO: 1546887 - DNA, 15 bp, Homo sapiens
aattttctcccctgt

SEQ ID NO: 1546888 - DNA, 15 bp, Homo sapiens
taattttctcccctg

SEQ ID NO: 1546889 - DNA, 15 bp, Homo sapiens
ttaattttctcccct

SEQ ID NO: 1546890 - DNA, 15 bp, Homo sapiens
tttaattttctcccc

SEQ ID NO: 1546891 - DNA, 15 bp, Homo sapiens
ttttaattttctccc

SEQ ID NO: 1546892 - DNA, 15 bp, Homo sapiens
attttaattttctcc

SEQ ID NO: 1546893 - DNA, 15 bp, Homo sapiens
aattttaattttctc

SEQ ID NO: 1546894 - DNA, 15 bp, Homo sapiens
aaattttaattttct

SEQ ID NO: 1546895 - DNA, 15 bp, Homo sapiens
aaaattttaattttc

SEQ ID NO: 1546896 - DNA, 15 bp, Homo sapiens
aaaaattttaatttt

SEQ ID NO: 1546897 - DNA, 15 bp, Homo sapiens
taaaaattttaattt

SEQ ID NO: 1546898 - DNA, 15 bp, Homo sapiens
ttaaaaattttaatt

SEQ ID NO: 1546899 - DNA, 15 bp, Homo sapiens
tttaaaaattttaat

SEQ ID NO: 1546900 - DNA, 15 bp, Homo sapiens
atttaaaaattttaa

SEQ ID NO: 1546901 - DNA, 15 bp, Homo sapiens
aatttaaaaatttta

SEQ ID NO: 1546902 - DNA, 15 bp, Homo sapiens
caatttaaaaatttt

SEQ ID NO: 1546903 - DNA, 15 bp, Homo sapiens
tcaatttaaaaattt

SEQ ID NO: 1546904 - DNA, 15 bp, Homo sapiens
actcaatttaaaaat

SEQ ID NO: 1546905 - DNA, 15 bp, Homo sapiens
gactcaatttaaaaa

SEQ ID NO: 1546906 - DNA, 15 bp, Homo sapiens
agactcaatttaaaa

SEQ ID NO: 1546907 - DNA, 15 bp, Homo sapiens
cagactcaatttaaa

SEQ ID NO: 1546908 - DNA, 15 bp, Homo sapiens
tcagactcaatttaa

SEQ ID NO: 1546909 - DNA, 15 bp, Homo sapiens
ctcagactcaattta

SEQ ID NO: 1546910 - DNA, 15 bp, Homo sapiens
actcagactcaattt

SEQ ID NO: 1546911 - DNA, 15 bp, Homo sapiens
gactcagactcaatt

SEQ ID NO: 1546912 - DNA, 15 bp, Homo sapiens
agactcagactcaat

SEQ ID NO: 1546913 - DNA, 15 bp, Homo sapiens
aagactcagactcaa

SEQ ID NO: 1546914 - DNA, 15 bp, Homo sapiens
aaagactcagactca

SEQ ID NO: 1546915 - DNA, 15 bp, Homo sapiens
aaaagactcagactc

SEQ ID NO: 1546916 - DNA, 15 bp, Homo sapiens
taaaagactcagact

SEQ ID NO: 1546917 - DNA, 15 bp, Homo sapiens
ctaaaagactcagac

SEQ ID NO: 1546918 - DNA, 15 bp, Homo sapiens
cctaaaagactcaga

SEQ ID NO: 1546919 - DNA, 15 bp, Homo sapiens
gcctaaaagactcag

SEQ ID NO: 1546920 - DNA, 15 bp, Homo sapiens
agcctaaaagactca

SEQ ID NO: 1546921 - DNA, 15 bp, Homo sapiens
cagcctaaaagactc

SEQ ID NO: 1546922 - DNA, 15 bp, Homo sapiens
acagcctaaaagact

SEQ ID NO: 1546923 - DNA, 15 bp, Homo sapiens
gacagcctaaaagac

SEQ ID NO: 1546924 - DNA, 15 bp, Homo sapiens
agacagcctaaaaga

SEQ ID NO: 1546925 - DNA, 15 bp, Homo sapiens
gagacagcctaaaag

SEQ ID NO: 1546926 - DNA, 15 bp, Homo sapiens
ggagacagcctaaaa

SEQ ID NO: 1546927 - DNA, 15 bp, Homo sapiens
aggagacagcctaaa

SEQ ID NO: 1546928 - DNA, 15 bp, Homo sapiens
taggagacagcctaa

SEQ ID NO: 1546929 - DNA, 15 bp, Homo sapiens
ttaggagacagccta

SEQ ID NO: 1546930 - DNA, 15 bp, Homo sapiens
tttaggagacagcct

SEQ ID NO: 1546931 - DNA, 15 bp, Homo sapiens
atttaggagacagcc

SEQ ID NO: 1546932 - DNA, 15 bp, Homo sapiens
aatttaggagacagc

SEQ ID NO: 1546933 - DNA, 15 bp, Homo sapiens
caatttaggagacag

SEQ ID NO: 1546934 - DNA, 15 bp, Homo sapiens
gcaatttaggagaca

SEQ ID NO: 1546935 - DNA, 15 bp, Homo sapiens
agcaatttaggagac

SEQ ID NO: 1546936 - DNA, 15 bp, Homo sapiens
aagcaatttaggaga

SEQ ID NO: 1546937 - DNA, 15 bp, Homo sapiens
taagcaatttaggag

SEQ ID NO: 1546938 - DNA, 15 bp, Homo sapiens
ttaagcaatttagga

SEQ ID NO: 1546939 - DNA, 15 bp, Homo sapiens
tttaagcaatttagg

SEQ ID NO: 1546940 - DNA, 15 bp, Homo sapiens
atttaagcaatttag

SEQ ID NO: 1546941 - DNA, 15 bp, Homo sapiens
tatttaagcaattta

SEQ ID NO: 1546942 - DNA, 15 bp, Homo sapiens
atatttaagcaattt

SEQ ID NO: 1546943 - DNA, 15 bp, Homo sapiens
tatatttaagcaatt

SEQ ID NO: 1546944 - DNA, 15 bp, Homo sapiens
atatatttaagcaat

SEQ ID NO: 1546945 - DNA, 15 bp, Homo sapiens
aatatatttaagcaa

SEQ ID NO: 1546946 - DNA, 15 bp, Homo sapiens
aaatatatttaagca

SEQ ID NO: 1546947 - DNA, 15 bp, Homo sapiens
aaaatatatttaagc

SEQ ID NO: 1546948 - DNA, 15 bp, Homo sapiens
gaaaatatatttaag

SEQ ID NO: 1546949 - DNA, 15 bp, Homo sapiens
tgaaaatatatttaa

SEQ ID NO: 1546950 - DNA, 15 bp, Homo sapiens
ctgaaaatatattta

SEQ ID NO: 1546951 - DNA, 15 bp, Homo sapiens
tctgaaaatatattt

SEQ ID NO: 1546952 - DNA, 15 bp, Homo sapiens
gtctgaaaatatatt

SEQ ID NO: 1546953 - DNA, 15 bp, Homo sapiens
tgtctgaaaatatat

SEQ ID NO: 1546954 - DNA, 15 bp, Homo sapiens
atgtctgaaaatata

SEQ ID NO: 1546955 - DNA, 15 bp, Homo sapiens
aatgtctgaaaatat

SEQ ID NO: 1546956 - DNA, 15 bp, Homo sapiens
aaatgtctgaaaata

SEQ ID NO: 1546957 - DNA, 15 bp, Homo sapiens
caaatgtctgaaaat

SEQ ID NO: 1546958 - DNA, 15 bp, Homo sapiens
acaaatgtctgaaaa

SEQ ID NO: 1546959 - DNA, 15 bp, Homo sapiens
tacaaatgtctgaaa

SEQ ID NO: 1546960 - DNA, 15 bp, Homo sapiens
ttacaaatgtctgaa

SEQ ID NO: 1546961 - DNA, 15 bp, Homo sapiens
cttacaaatgtctga

SEQ ID NO: 1546962 - DNA, 15 bp, Homo sapiens
acttacaaatgtctg

SEQ ID NO: 1546963 - DNA, 15 bp, Homo sapiens
cacttacaaatgtct

SEQ ID NO: 1546964 - DNA, 15 bp, Homo sapiens
tcacttacaaatgtc

SEQ ID NO: 1546965 - DNA, 15 bp, Homo sapiens
atcacttacaaatgt

SEQ ID NO: 1546966 - DNA, 15 bp, Homo sapiens
catcacttacaaatg

SEQ ID NO: 1546967 - DNA, 15 bp, Homo sapiens
acatcacttacaaat

SEQ ID NO: 1546968 - DNA, 15 bp, Homo sapiens
aacatcacttacaaa

SEQ ID NO: 1546969 - DNA, 15 bp, Homo sapiens
aaacatcacttacaa

SEQ ID NO: 1546970 - DNA, 15 bp, Homo sapiens
caaacatcacttaca

SEQ ID NO: 1546971 - DNA, 15 bp, Homo sapiens
ccaaacatcacttac

SEQ ID NO: 1546972 - DNA, 15 bp, Homo sapiens
accaaacatcactta

SEQ ID NO: 1546973 - DNA, 15 bp, Homo sapiens
gaccaaacatcactt

SEQ ID NO: 1546974 - DNA, 15 bp, Homo sapiens
agaccaaacatcact

SEQ ID NO: 1546975 - DNA, 15 bp, Homo sapiens
gagaccaaacatcac

SEQ ID NO: 1546976 - DNA, 15 bp, Homo sapiens
tgagaccaaacatca

SEQ ID NO: 1546977 - DNA, 15 bp, Homo sapiens
ttgagaccaaacatc

SEQ ID NO: 1546978 - DNA, 15 bp, Homo sapiens
attgagaccaaacat

SEQ ID NO: 1546979 - DNA, 15 bp, Homo sapiens
cattgagaccaaaca

SEQ ID NO: 1546980 - DNA, 15 bp, Homo sapiens
tcattgagaccaaac

SEQ ID NO: 1546981 - DNA, 15 bp, Homo sapiens
ttcattgagaccaaa

SEQ ID NO: 1546982 - DNA, 15 bp, Homo sapiens
tttcattgagaccaa

SEQ ID NO: 1546983 - DNA, 15 bp, Homo sapiens
gtttcattgagacca

SEQ ID NO: 1546984 - DNA, 15 bp, Homo sapiens
ggtttcattgagacc

SEQ ID NO: 1546985 - DNA, 15 bp, Homo sapiens
aggtttcattgagac

SEQ ID NO: 1546986 - DNA, 15 bp, Homo sapiens
caggtttcattgaga

SEQ ID NO: 1546987 - DNA, 15 bp, Homo sapiens
ccaggtttcattgag

SEQ ID NO: 1546988 - DNA, 15 bp, Homo sapiens
tccaggtttcattga

SEQ ID NO: 1546989 - DNA, 15 bp, Homo sapiens
atccaggtttcattg

SEQ ID NO: 1546990 - DNA, 15 bp, Homo sapiens
tatccaggtttcatt

SEQ ID NO: 1546991 - DNA, 15 bp, Homo sapiens
atatccaggtttcat

SEQ ID NO: 1546992 - DNA, 15 bp, Homo sapiens
aatatccaggtttca

SEQ ID NO: 1546993 - DNA, 15 bp, Homo sapiens
taatatccaggtttc

SEQ ID NO: 1546994 - DNA, 15 bp, Homo sapiens
ataatatccaggttt

SEQ ID NO: 1546995 - DNA, 15 bp, Homo sapiens
tataatatccaggtt

SEQ ID NO: 1546996 - DNA, 15 bp, Homo sapiens
ctataatatccaggt

SEQ ID NO: 1546997 - DNA, 15 bp, Homo sapiens
actataatatccagg

SEQ ID NO: 1546998 - DNA, 15 bp, Homo sapiens
aactataatatccag

SEQ ID NO: 1546999 - DNA, 15 bp, Homo sapiens
aaactataatatcca

SEQ ID NO: 1547000 - DNA, 15 bp, Homo sapiens
aaaactataatatcc

SEQ ID NO: 1547001 - DNA, 15 bp, Homo sapiens
aaaaactataatatc

SEQ ID NO: 1547002 - DNA, 15 bp, Homo sapiens
aaaaaactataatat

SEQ ID NO: 1547003 - DNA, 15 bp, Homo sapiens
aaaaaaactataata

SEQ ID NO: 1547004 - DNA, 15 bp, Homo sapiens
gaaaaaaactataat

SEQ ID NO: 1547005 - DNA, 15 bp, Homo sapiens
ggaaaaaaactataa

SEQ ID NO: 1547006 - DNA, 15 bp, Homo sapiens
tggaaaaaaactata

SEQ ID NO: 1547007 - DNA, 15 bp, Homo sapiens
atggaaaaaaactat

SEQ ID NO: 1547008 - DNA, 15 bp, Homo sapiens
tatggaaaaaaacta

SEQ ID NO: 1547009 - DNA, 15 bp, Homo sapiens
atatggaaaaaaact

SEQ ID NO: 1547010 - DNA, 15 bp, Homo sapiens
aatatggaaaaaaac

SEQ ID NO: 1547011 - DNA, 15 bp, Homo sapiens
caatatggaaaaaaa

SEQ ID NO: 1547012 - DNA, 15 bp, Homo sapiens
ccaatatggaaaaaa

SEQ ID NO: 1547013 - DNA, 15 bp, Homo sapiens
accaatatggaaaaa

SEQ ID NO: 1547014 - DNA, 15 bp, Homo sapiens
caccaatatggaaaa

SEQ ID NO: 1547015 - DNA, 15 bp, Homo sapiens
ccaccaatatggaaa

SEQ ID NO: 1547016 - DNA, 15 bp, Homo sapiens
accaccaatatggaa

SEQ ID NO: 1547017 - DNA, 15 bp, Homo sapiens
aaccaccaatatgga

SEQ ID NO: 1547018 - DNA, 15 bp, Homo sapiens
taaccaccaatatgg

SEQ ID NO: 1547019 - DNA, 15 bp, Homo sapiens
ataaccaccaatatg

SEQ ID NO: 1547020 - DNA, 15 bp, Homo sapiens
tataaccaccaatat

SEQ ID NO: 1547021 - DNA, 15 bp, Homo sapiens
atataaccaccaata

SEQ ID NO: 1547022 - DNA, 15 bp, Homo sapiens
tatataaccaccaat

SEQ ID NO: 1547023 - DNA, 15 bp, Homo sapiens
atatataaccaccaa

SEQ ID NO: 1547024 - DNA, 15 bp, Homo sapiens
catatataaccacca

SEQ ID NO: 1547025 - DNA, 15 bp, Homo sapiens
tcatatataaccacc

SEQ ID NO: 1547026 - DNA, 15 bp, Homo sapiens
atcatatataaccac

SEQ ID NO: 1547027 - DNA, 15 bp, Homo sapiens
catcatatataacca

SEQ ID NO: 1547028 - DNA, 15 bp, Homo sapiens
acatcatatataacc

SEQ ID NO: 1547029 - DNA, 15 bp, Homo sapiens
tacatcatatataac

SEQ ID NO: 1547030 - DNA, 15 bp, Homo sapiens
ttacatcatatataa

SEQ ID NO: 1547031 - DNA, 15 bp, Homo sapiens
attacatcatatata

SEQ ID NO: 1547032 - DNA, 15 bp, Homo sapiens
cattacatcatatat

SEQ ID NO: 1547033 - DNA, 15 bp, Homo sapiens
tcattacatcatata

SEQ ID NO: 1547034 - DNA, 15 bp, Homo sapiens
ctcattacatcatat

SEQ ID NO: 1547035 - DNA, 15 bp, Homo sapiens
cctcattacatcata

SEQ ID NO: 1547036 - DNA, 15 bp, Homo sapiens
acctcattacatcat

SEQ ID NO: 1547037 - DNA, 15 bp, Homo sapiens
gacctcattacatca

SEQ ID NO: 1547038 - DNA, 15 bp, Homo sapiens
tgacctcattacatc

SEQ ID NO: 1547039 - DNA, 15 bp, Homo sapiens
atgacctcattacat

SEQ ID NO: 1547040 - DNA, 15 bp, Homo sapiens
tatgacctcattaca

SEQ ID NO: 1547041 - DNA, 15 bp, Homo sapiens
ctatgacctcattac

SEQ ID NO: 1547042 - DNA, 15 bp, Homo sapiens
tctatgacctcatta

SEQ ID NO: 1547043 - DNA, 15 bp, Homo sapiens
ctctatgacctcatt

SEQ ID NO: 1547044 - DNA, 15 bp, Homo sapiens
cctctatgacctcat

SEQ ID NO: 1547045 - DNA, 15 bp, Homo sapiens
ccctctatgacctca

SEQ ID NO: 1547046 - DNA, 15 bp, Homo sapiens
tccctctatgacctc

SEQ ID NO: 1547047 - DNA, 15 bp, Homo sapiens
ttccctctatgacct

SEQ ID NO: 1547048 - DNA, 15 bp, Homo sapiens
tttccctctatgacc

SEQ ID NO: 1547049 - DNA, 15 bp, Homo sapiens
ttttccctctatgac

SEQ ID NO: 1547050 - DNA, 15 bp, Homo sapiens
tttttccctctatga

SEQ ID NO: 1547051 - DNA, 15 bp, Homo sapiens
atttttccctctatg

SEQ ID NO: 1547052 - DNA, 15 bp, Homo sapiens
catttttccctctat

SEQ ID NO: 1547053 - DNA, 15 bp, Homo sapiens
ccatttttccctcta

SEQ ID NO: 1547054 - DNA, 15 bp, Homo sapiens
cccatttttccctct

SEQ ID NO: 1547055 - DNA, 15 bp, Homo sapiens
tcccatttttccctc

SEQ ID NO: 1547056 - DNA, 15 bp, Homo sapiens
ctcccatttttccct

SEQ ID NO: 1547057 - DNA, 15 bp, Homo sapiens
cctcccatttttccc

SEQ ID NO: 1547058 - DNA, 15 bp, Homo sapiens
tcctcccatttttcc

SEQ ID NO: 1547059 - DNA, 15 bp, Homo sapiens
gtcctcccatttttc

SEQ ID NO: 1547060 - DNA, 15 bp, Homo sapiens
agtcctcccattttt

SEQ ID NO: 1547061 - DNA, 15 bp, Homo sapiens
aagtcctcccatttt

SEQ ID NO: 1547062 - DNA, 15 bp, Homo sapiens
taagtcctcccattt

SEQ ID NO: 1547063 - DNA, 15 bp, Homo sapiens
ttaagtcctcccatt

SEQ ID NO: 1547064 - DNA, 15 bp, Homo sapiens
attaagtcctcccat

SEQ ID NO: 1547065 - DNA, 15 bp, Homo sapiens
aattaagtcctccca

SEQ ID NO: 1547066 - DNA, 15 bp, Homo sapiens
taattaagtcctccc

SEQ ID NO: 1547067 - DNA, 15 bp, Homo sapiens
ataattaagtcctcc

SEQ ID NO: 1547068 - DNA, 15 bp, Homo sapiens
tataattaagtcctc

SEQ ID NO: 1547069 - DNA, 15 bp, Homo sapiens
ttataattaagtcct

SEQ ID NO: 1547070 - DNA, 15 bp, Homo sapiens
cttataattaagtcc

SEQ ID NO: 1547071 - DNA, 15 bp, Homo sapiens
acttataattaagtc

SEQ ID NO: 1547072 - DNA, 15 bp, Homo sapiens
aacttataattaagt

SEQ ID NO: 1547073 - DNA, 15 bp, Homo sapiens
taacttataattaag

SEQ ID NO: 1547074 - DNA, 15 bp, Homo sapiens
ttaacttataattaa

SEQ ID NO: 1547075 - DNA, 15 bp, Homo sapiens
attaacttataatta

SEQ ID NO: 1547076 - DNA, 15 bp, Homo sapiens
aattaacttataatt

SEQ ID NO: 1547077 - DNA, 15 bp, Homo sapiens
aaattaacttataat

SEQ ID NO: 1547078 - DNA, 15 bp, Homo sapiens
aaaattaacttataa

SEQ ID NO: 1547079 - DNA, 15 bp, Homo sapiens
caaaattaacttata

SEQ ID NO: 1547080 - DNA, 15 bp, Homo sapiens
acaaaattaacttat

SEQ ID NO: 1547081 - DNA, 15 bp, Homo sapiens
aacaaaattaactta

SEQ ID NO: 1547082 - DNA, 15 bp, Homo sapiens
aaacaaaattaactt

SEQ ID NO: 1547083 - DNA, 15 bp, Homo sapiens
aaaacaaaattaact

SEQ ID NO: 1547084 - DNA, 15 bp, Homo sapiens
taaaaacaaaattaa

SEQ ID NO: 1547085 - DNA, 15 bp, Homo sapiens
ttaaaaacaaaatta

SEQ ID NO: 1547086 - DNA, 15 bp, Homo sapiens
gttaaaaacaaaatt

SEQ ID NO: 1547087 - DNA, 15 bp, Homo sapiens
ggttaaaaacaaaat

SEQ ID NO: 1547088 - DNA, 15 bp, Homo sapiens
aggttaaaaacaaaa

SEQ ID NO: 1547089 - DNA, 15 bp, Homo sapiens
aaggttaaaaacaaa

SEQ ID NO: 1547090 - DNA, 15 bp, Homo sapiens
gaaggttaaaaacaa

SEQ ID NO: 1547091 - DNA, 15 bp, Homo sapiens
tgaaggttaaaaaca

SEQ ID NO: 1547092 - DNA, 15 bp, Homo sapiens
ctgaaggttaaaaac

SEQ ID NO: 1547093 - DNA, 15 bp, Homo sapiens
actgaaggttaaaaa

SEQ ID NO: 1547094 - DNA, 15 bp, Homo sapiens
aactgaaggttaaaa

SEQ ID NO: 1547095 - DNA, 15 bp, Homo sapiens
aaactgaaggttaaa

SEQ ID NO: 1547096 - DNA, 15 bp, Homo sapiens
caaactgaaggttaa

SEQ ID NO: 1547097 - DNA, 15 bp, Homo sapiens
acaaactgaaggtta

SEQ ID NO: 1547098 - DNA, 15 bp, Homo sapiens
tacaaactgaaggtt

SEQ ID NO: 1547099 - DNA, 15 bp, Homo sapiens
ctacaaactgaaggt

SEQ ID NO: 1547100 - DNA, 15 bp, Homo sapiens
cctacaaactgaagg

SEQ ID NO: 1547101 - DNA, 15 bp, Homo sapiens
ccctacaaactgaag

SEQ ID NO: 1547102 - DNA, 15 bp, Homo sapiens
accctacaaactgaa

SEQ ID NO: 1547103 - DNA, 15 bp, Homo sapiens
taccctacaaactga

SEQ ID NO: 1547104 - DNA, 15 bp, Homo sapiens
ttaccctacaaactg

SEQ ID NO: 1547105 - DNA, 15 bp, Homo sapiens
gttaccctacaaact

SEQ ID NO: 1547106 - DNA, 15 bp, Homo sapiens
agttaccctacaaac

SEQ ID NO: 1547107 - DNA, 15 bp, Homo sapiens
aagttaccctacaaa

SEQ ID NO: 1547108 - DNA, 15 bp, Homo sapiens
aaagttaccctacaa

SEQ ID NO: 1547109 - DNA, 15 bp, Homo sapiens
aaaagttaccctaca

SEQ ID NO: 1547110 - DNA, 15 bp, Homo sapiens
taaaagttaccctac

SEQ ID NO: 1547111 - DNA, 15 bp, Homo sapiens
ctaaaagttacccta

SEQ ID NO: 1547112 - DNA, 15 bp, Homo sapiens
cctaaaagttaccct

SEQ ID NO: 1547113 - DNA, 15 bp, Homo sapiens
tcctaaaagttaccc

SEQ ID NO: 1547114 - DNA, 15 bp, Homo sapiens
gtcctaaaagttacc

SEQ ID NO: 1547115 - DNA, 15 bp, Homo sapiens
tgtcctaaaagttac

SEQ ID NO: 1547116 - DNA, 15 bp, Homo sapiens
gtgtcctaaaagtta

SEQ ID NO: 1547117 - DNA, 15 bp, Homo sapiens
ggtgtcctaaaagtt

SEQ ID NO: 1547118 - DNA, 15 bp, Homo sapiens
gggtgtcctaaaagt

SEQ ID NO: 1547119 - DNA, 15 bp, Homo sapiens
tgggtgtcctaaaag

SEQ ID NO: 1547120 - DNA, 15 bp, Homo sapiens
ctgggtgtcctaaaa

SEQ ID NO: 1547121 - DNA, 15 bp, Homo sapiens
tctgggtgtcctaaa

SEQ ID NO: 1547122 - DNA, 15 bp, Homo sapiens
ttctgggtgtcctaa

SEQ ID NO: 1547123 - DNA, 15 bp, Homo sapiens
tttctgggtgtccta

SEQ ID NO: 1547124 - DNA, 15 bp, Homo sapiens
ctttctgggtgtcct

SEQ ID NO: 1547125 - DNA, 15 bp, Homo sapiens
tctttctgggtgtcc

SEQ ID NO: 1547126 - DNA, 15 bp, Homo sapiens
ttctttctgggtgtc

SEQ ID NO: 1547127 - DNA, 15 bp, Homo sapiens
cttctttctgggtgt

SEQ ID NO: 1547128 - DNA, 15 bp, Homo sapiens
acttctttctgggtg

SEQ ID NO: 1547129 - DNA, 15 bp, Homo sapiens
aacttctttctgggt

SEQ ID NO: 1547130 - DNA, 15 bp, Homo sapiens
gaacttctttctggg

SEQ ID NO: 1547131 - DNA, 15 bp, Homo sapiens
tgaacttctttctgg

SEQ ID NO: 1547132 - DNA, 15 bp, Homo sapiens
ctgaacttctttctg

SEQ ID NO: 1547133 - DNA, 15 bp, Homo sapiens
gctgaacttctttct

SEQ ID NO: 1547134 - DNA, 15 bp, Homo sapiens
tgctgaacttctttc

SEQ ID NO: 1547135 - DNA, 15 bp, Homo sapiens
ctgctgaacttcttt

SEQ ID NO: 1547136 - DNA, 15 bp, Homo sapiens
tctgctgaacttctt

SEQ ID NO: 1547137 - DNA, 15 bp, Homo sapiens
atctgctgaacttct

SEQ ID NO: 1547138 - DNA, 15 bp, Homo sapiens
gatctgctgaacttc

SEQ ID NO: 1547139 - DNA, 15 bp, Homo sapiens
ggatctgctgaactt

SEQ ID NO: 1547140 - DNA, 15 bp, Homo sapiens
aggatctgctgaact

SEQ ID NO: 1547141 - DNA, 15 bp, Homo sapiens
caggatctgctgaac

SEQ ID NO: 1547142 - DNA, 15 bp, Homo sapiens
tcaggatctgctgaa

SEQ ID NO: 1547143 - DNA, 15 bp, Homo sapiens
atcaggatctgctga

SEQ ID NO: 1547144 - DNA, 15 bp, Homo sapiens
aatcaggatctgctg

SEQ ID NO: 1547145 - DNA, 15 bp, Homo sapiens
taatcaggatctgct

SEQ ID NO: 1547146 - DNA, 15 bp, Homo sapiens
ttaatcaggatctgc

SEQ ID NO: 1547147 - DNA, 15 bp, Homo sapiens
tttaatcaggatctg

SEQ ID NO: 1547148 - DNA, 15 bp, Homo sapiens
ctttaatcaggatct

SEQ ID NO: 1547149 - DNA, 15 bp, Homo sapiens
tctttaatcaggatc

SEQ ID NO: 1547150 - DNA, 15 bp, Homo sapiens
atctttaatcaggat

SEQ ID NO: 1547151 - DNA, 15 bp, Homo sapiens
aatctttaatcagga

SEQ ID NO: 1547152 - DNA, 15 bp, Homo sapiens
aaatctttaatcagg

SEQ ID NO: 1547153 - DNA, 15 bp, Homo sapiens
aaaatctttaatcag

SEQ ID NO: 1547154 - DNA, 15 bp, Homo sapiens
gaaaatctttaatca

SEQ ID NO: 1547155 - DNA, 15 bp, Homo sapiens
tgaaaatctttaatc

SEQ ID NO: 1547156 - DNA, 15 bp, Homo sapiens
gtgaaaatctttaat

SEQ ID NO: 1547157 - DNA, 15 bp, Homo sapiens
tgtgaaaatctttaa

SEQ ID NO: 1547158 - DNA, 15 bp, Homo sapiens
atgtgaaaatcttta

SEQ ID NO: 1547159 - DNA, 15 bp, Homo sapiens
aatgtgaaaatcttt

SEQ ID NO: 1547160 - DNA, 15 bp, Homo sapiens
gaatgtgaaaatctt

SEQ ID NO: 1547161 - DNA, 15 bp, Homo sapiens
agaatgtgaaaatct

SEQ ID NO: 1547162 - DNA, 15 bp, Homo sapiens
tagaatgtgaaaatc

SEQ ID NO: 1547163 - DNA, 15 bp, Homo sapiens
ttagaatgtgaaaat

SEQ ID NO: 1547164 - DNA, 15 bp, Homo sapiens
attagaatgtgaaaa

SEQ ID NO: 1547165 - DNA, 15 bp, Homo sapiens
aattagaatgtgaaa

SEQ ID NO: 1547166 - DNA, 15 bp, Homo sapiens
aaattagaatgtgaa

SEQ ID NO: 1547167 - DNA, 15 bp, Homo sapiens
caaattagaatgtga

SEQ ID NO: 1547168 - DNA, 15 bp, Homo sapiens
tcaaattagaatgtg

SEQ ID NO: 1547169 - DNA, 15 bp, Homo sapiens
atcaaattagaatgt

SEQ ID NO: 1547170 - DNA, 15 bp, Homo sapiens
catcaaattagaatg

SEQ ID NO: 1547171 - DNA, 15 bp, Homo sapiens
tcatcaaattagaat

SEQ ID NO: 1547172 - DNA, 15 bp, Homo sapiens
ttcatcaaattagaa

SEQ ID NO: 1547173 - DNA, 15 bp, Homo sapiens
cttcatcaaattaga

SEQ ID NO: 1547174 - DNA, 15 bp, Homo sapiens
ccttcatcaaattag

SEQ ID NO: 1547175 - DNA, 15 bp, Homo sapiens
cccttcatcaaatta

SEQ ID NO: 1547176 - DNA, 15 bp, Homo sapiens
tcccttcatcaaatt

SEQ ID NO: 1547177 - DNA, 15 bp, Homo sapiens
ttcccttcatcaaat

SEQ ID NO: 1547178 - DNA, 15 bp, Homo sapiens
cttcccttcatcaaa

SEQ ID NO: 1547179 - DNA, 15 bp, Homo sapiens
ccttcccttcatcaa

SEQ ID NO: 1547180 - DNA, 15 bp, Homo sapiens
cccttcccttcatca

SEQ ID NO: 1547181 - DNA, 15 bp, Homo sapiens
gcccttcccttcatc

SEQ ID NO: 1547182 - DNA, 15 bp, Homo sapiens
ggcccttcccttcat

SEQ ID NO: 1547183 - DNA, 15 bp, Homo sapiens
tggcccttcccttca

SEQ ID NO: 1547184 - DNA, 15 bp, Homo sapiens
atggcccttcccttc

SEQ ID NO: 1547185 - DNA, 15 bp, Homo sapiens
gatggcccttccctt

SEQ ID NO: 1547186 - DNA, 15 bp, Homo sapiens
agatggcccttccct

SEQ ID NO: 1547187 - DNA, 15 bp, Homo sapiens
cagatggcccttccc

SEQ ID NO: 1547188 - DNA, 15 bp, Homo sapiens
tcagatggcccttcc

SEQ ID NO: 1547189 - DNA, 15 bp, Homo sapiens
atcagatggcccttc

SEQ ID NO: 1547190 - DNA, 15 bp, Homo sapiens
tatcagatggccctt

SEQ ID NO: 1547191 - DNA, 15 bp, Homo sapiens
atatcagatggccct

SEQ ID NO: 1547192 - DNA, 15 bp, Homo sapiens
gatatcagatggccc

SEQ ID NO: 1547193 - DNA, 15 bp, Homo sapiens
agatatcagatggcc

SEQ ID NO: 1547194 - DNA, 15 bp, Homo sapiens
cagatatcagatggc

SEQ ID NO: 1547195 - DNA, 15 bp, Homo sapiens
acagatatcagatgg

SEQ ID NO: 1547196 - DNA, 15 bp, Homo sapiens
gacagatatcagatg

SEQ ID NO: 1547197 - DNA, 15 bp, Homo sapiens
ggacagatatcagat

SEQ ID NO: 1547198 - DNA, 15 bp, Homo sapiens
gggacagatatcaga

SEQ ID NO: 1547199 - DNA, 15 bp, Homo sapiens
agggacagatatcag

SEQ ID NO: 1547200 - DNA, 15 bp, Homo sapiens
tagggacagatatca

SEQ ID NO: 1547201 - DNA, 15 bp, Homo sapiens
atagggacagatatc

SEQ ID NO: 1547202 - DNA, 15 bp, Homo sapiens
catagggacagatat

SEQ ID NO: 1547203 - DNA, 15 bp, Homo sapiens
tcatagggacagata

SEQ ID NO: 1547204 - DNA, 15 bp, Homo sapiens
atcatagggacagat

SEQ ID NO: 1547205 - DNA, 15 bp, Homo sapiens
gatcatagggacaga

SEQ ID NO: 1547206 - DNA, 15 bp, Homo sapiens
ggatcatagggacag

SEQ ID NO: 1547207 - DNA, 15 bp, Homo sapiens
gggatcatagggaca

SEQ ID NO: 1547208 - DNA, 15 bp, Homo sapiens
ggggatcatagggac

SEQ ID NO: 1547209 - DNA, 15 bp, Homo sapiens
tggggatcataggga

SEQ ID NO: 1547210 - DNA, 15 bp, Homo sapiens
atggggatcataggg

SEQ ID NO: 1547211 - DNA, 15 bp, Homo sapiens
aatggggatcatagg

SEQ ID NO: 1547212 - DNA, 15 bp, Homo sapiens
taatggggatcatag

SEQ ID NO: 1547213 - DNA, 15 bp, Homo sapiens
ataatggggatcata

SEQ ID NO: 1547214 - DNA, 15 bp, Homo sapiens
tataatggggatcat

SEQ ID NO: 1547215 - DNA, 15 bp, Homo sapiens
ttataatggggatca

SEQ ID NO: 1547216 - DNA, 15 bp, Homo sapiens
gttataatggggatc

SEQ ID NO: 1547217 - DNA, 15 bp, Homo sapiens
agttataatggggat

SEQ ID NO: 1547218 - DNA, 15 bp, Homo sapiens
cagttataatgggga

SEQ ID NO: 1547219 - DNA, 15 bp, Homo sapiens
ccagttataatgggg

SEQ ID NO: 1547220 - DNA, 15 bp, Homo sapiens
tccagttataatggg

SEQ ID NO: 1547221 - DNA, 15 bp, Homo sapiens
atccagttataatgg

SEQ ID NO: 1547222 - DNA, 15 bp, Homo sapiens
gatccagttataatg

SEQ ID NO: 1547223 - DNA, 15 bp, Homo sapiens
agatccagttataat

SEQ ID NO: 1547224 - DNA, 15 bp, Homo sapiens
tagatccagttataa

SEQ ID NO: 1547225 - DNA, 15 bp, Homo sapiens
ctagatccagttata

SEQ ID NO: 1547226 - DNA, 15 bp, Homo sapiens
actagatccagttat

SEQ ID NO: 1547227 - DNA, 15 bp, Homo sapiens
cactagatccagtta

SEQ ID NO: 1547228 - DNA, 15 bp, Homo sapiens
ccactagatccagtt

SEQ ID NO: 1547229 - DNA, 15 bp, Homo sapiens
cccactagatccagt

SEQ ID NO: 1547230 - DNA, 15 bp, Homo sapiens
tcccactagatccag

SEQ ID NO: 1547231 - DNA, 15 bp, Homo sapiens
ttcccactagatcca

SEQ ID NO: 1547232 - DNA, 15 bp, Homo sapiens
tttcccactagatcc

SEQ ID NO: 1547233 - DNA, 15 bp, Homo sapiens
ctttcccactagatc

SEQ ID NO: 1547234 - DNA, 15 bp, Homo sapiens
tctttcccactagat

SEQ ID NO: 1547235 - DNA, 15 bp, Homo sapiens
ctctttcccactaga

SEQ ID NO: 1547236 - DNA, 15 bp, Homo sapiens
tctctttcccactag

SEQ ID NO: 1547237 - DNA, 15 bp, Homo sapiens
ttctctttcccacta

SEQ ID NO: 1547238 - DNA, 15 bp, Homo sapiens
gttctctttcccact

SEQ ID NO: 1547239 - DNA, 15 bp, Homo sapiens
ggttctctttcccac

SEQ ID NO: 1547240 - DNA, 15 bp, Homo sapiens
tggttctctttccca

SEQ ID NO: 1547241 - DNA, 15 bp, Homo sapiens
ctggttctctttccc

SEQ ID NO: 1547242 - DNA, 15 bp, Homo sapiens
tctggttctctttcc

SEQ ID NO: 1547243 - DNA, 15 bp, Homo sapiens
ttctggttctctttc

SEQ ID NO: 1547244 - DNA, 15 bp, Homo sapiens
attctggttctcttt

SEQ ID NO: 1547245 - DNA, 15 bp, Homo sapiens
aattctggttctctt

SEQ ID NO: 1547246 - DNA, 15 bp, Homo sapiens
aaattctggttctct

SEQ ID NO: 1547247 - DNA, 15 bp, Homo sapiens
caaattctggttctc

SEQ ID NO: 1547248 - DNA, 15 bp, Homo sapiens
tcaaattctggttct

SEQ ID NO: 1547249 - DNA, 15 bp, Homo sapiens
ctcaaattctggttc

SEQ ID NO: 1547250 - DNA, 15 bp, Homo sapiens
actcaaattctggtt

SEQ ID NO: 1547251 - DNA, 15 bp, Homo sapiens
aactcaaattctggt

SEQ ID NO: 1547252 - DNA, 15 bp, Homo sapiens
aaactcaaattctgg

SEQ ID NO: 1547253 - DNA, 15 bp, Homo sapiens
aaaactcaaattctg

SEQ ID NO: 1547254 - DNA, 15 bp, Homo sapiens
caaaactcaaattct

SEQ ID NO: 1547255 - DNA, 15 bp, Homo sapiens
ccaaaactcaaattc

SEQ ID NO: 1547256 - DNA, 15 bp, Homo sapiens
gccaaaactcaaatt

SEQ ID NO: 1547257 - DNA, 15 bp, Homo sapiens
agccaaaactcaaat

SEQ ID NO: 1547258 - DNA, 15 bp, Homo sapiens
aagccaaaactcaaa

SEQ ID NO: 1547259 - DNA, 15 bp, Homo sapiens
aaagccaaaactcaa

SEQ ID NO: 1547260 - DNA, 15 bp, Homo sapiens
caaagccaaaactca

SEQ ID NO: 1547261 - DNA, 15 bp, Homo sapiens
gcaaagccaaaactc

SEQ ID NO: 1547262 - DNA, 15 bp, Homo sapiens
agcaaagccaaaact

SEQ ID NO: 1547263 - DNA, 15 bp, Homo sapiens
tagcaaagccaaaac

SEQ ID NO: 1547264 - DNA, 15 bp, Homo sapiens
ttagcaaagccaaaa

SEQ ID NO: 1547265 - DNA, 15 bp, Homo sapiens
tttagcaaagccaaa

SEQ ID NO: 1547266 - DNA, 15 bp, Homo sapiens
ttttagcaaagccaa

SEQ ID NO: 1547267 - DNA, 15 bp, Homo sapiens
tttttagcaaagcca

SEQ ID NO: 1547268 - DNA, 15 bp, Homo sapiens
atttttagcaaagcc

SEQ ID NO: 1547269 - DNA, 15 bp, Homo sapiens
catttttagcaaagc

SEQ ID NO: 1547270 - DNA, 15 bp, Homo sapiens
acatttttagcaaag

SEQ ID NO: 1547271 - DNA, 15 bp, Homo sapiens
tacatttttagcaaa

SEQ ID NO: 1547272 - DNA, 15 bp, Homo sapiens
atacatttttagcaa

SEQ ID NO: 1547273 - DNA, 15 bp, Homo sapiens
catacatttttagca

SEQ ID NO: 1547274 - DNA, 15 bp, Homo sapiens
ccatacatttttagc

SEQ ID NO: 1547275 - DNA, 15 bp, Homo sapiens
accatacatttttag

SEQ ID NO: 1547276 - DNA, 15 bp, Homo sapiens
caccatacattttta

SEQ ID NO: 1547277 - DNA, 15 bp, Homo sapiens
acaccatacattttt

SEQ ID NO: 1547278 - DNA, 15 bp, Homo sapiens
cacaccatacatttt

SEQ ID NO: 1547279 - DNA, 15 bp, Homo sapiens
gcacaccatacattt

SEQ ID NO: 1547280 - DNA, 15 bp, Homo sapiens
ggcacaccatacatt

SEQ ID NO: 1547281 - DNA, 15 bp, Homo sapiens
aggcacaccatacat

SEQ ID NO: 1547282 - DNA, 15 bp, Homo sapiens
aaggcacaccataca

SEQ ID NO: 1547283 - DNA, 15 bp, Homo sapiens
taaggcacaccatac

SEQ ID NO: 1547284 - DNA, 15 bp, Homo sapiens
ataaggcacaccata

SEQ ID NO: 1547285 - DNA, 15 bp, Homo sapiens
aataaggcacaccat

SEQ ID NO: 1547286 - DNA, 15 bp, Homo sapiens
gaataaggcacacca

SEQ ID NO: 1547287 - DNA, 15 bp, Homo sapiens
agaataaggcacacc

SEQ ID NO: 1547288 - DNA, 15 bp, Homo sapiens
cagaataaggcacac

SEQ ID NO: 1547289 - DNA, 15 bp, Homo sapiens
tcagaataaggcaca

SEQ ID NO: 1547290 - DNA, 15 bp, Homo sapiens
gtcagaataaggcac

SEQ ID NO: 1547291 - DNA, 15 bp, Homo sapiens
agtcagaataaggca

SEQ ID NO: 1547292 - DNA, 15 bp, Homo sapiens
aagtcagaataaggc

SEQ ID NO: 1547293 - DNA, 15 bp, Homo sapiens
taagtcagaataagg

SEQ ID NO: 1547294 - DNA, 15 bp, Homo sapiens
ttaagtcagaataag

SEQ ID NO: 1547295 - DNA, 15 bp, Homo sapiens
attaagtcagaataa

SEQ ID NO: 1547296 - DNA, 15 bp, Homo sapiens
aattaagtcagaata

SEQ ID NO: 1547297 - DNA, 15 bp, Homo sapiens
aaattaagtcagaat

SEQ ID NO: 1547298 - DNA, 15 bp, Homo sapiens
gaaattaagtcagaa

SEQ ID NO: 1547299 - DNA, 15 bp, Homo sapiens
agaaattaagtcaga

SEQ ID NO: 1547300 - DNA, 15 bp, Homo sapiens
tagaaattaagtcag

SEQ ID NO: 1547301 - DNA, 15 bp, Homo sapiens
atagaaattaagtca

SEQ ID NO: 1547302 - DNA, 15 bp, Homo sapiens
aatagaaattaagtc

SEQ ID NO: 1547303 - DNA, 15 bp, Homo sapiens
caatagaaattaagt

SEQ ID NO: 1547304 - DNA, 15 bp, Homo sapiens
tcaatagaaattaag

SEQ ID NO: 1547305 - DNA, 15 bp, Homo sapiens
atcaatagaaattaa

SEQ ID NO: 1547306 - DNA, 15 bp, Homo sapiens
gatcaatagaaatta

SEQ ID NO: 1547307 - DNA, 15 bp, Homo sapiens
ggatcaatagaaatt

SEQ ID NO: 1547308 - DNA, 15 bp, Homo sapiens
tggatcaatagaaat

SEQ ID NO: 1547309 - DNA, 15 bp, Homo sapiens
gtggatcaatagaaa

SEQ ID NO: 1547310 - DNA, 15 bp, Homo sapiens
tgtggatcaatagaa

SEQ ID NO: 1547311 - DNA, 15 bp, Homo sapiens
atgtggatcaataga

SEQ ID NO: 1547312 - DNA, 15 bp, Homo sapiens
aatgtggatcaatag

SEQ ID NO: 1547313 - DNA, 15 bp, Homo sapiens
taatgtggatcaata

SEQ ID NO: 1547314 - DNA, 15 bp, Homo sapiens
ctaatgtggatcaat

SEQ ID NO: 1547315 - DNA, 15 bp, Homo sapiens
cctaatgtggatcaa

SEQ ID NO: 1547316 - DNA, 15 bp, Homo sapiens
tcctaatgtggatca

SEQ ID NO: 1547317 - DNA, 15 bp, Homo sapiens
gtcctaatgtggatc

SEQ ID NO: 1547318 - DNA, 15 bp, Homo sapiens
ggtcctaatgtggat

SEQ ID NO: 1547319 - DNA, 15 bp, Homo sapiens
tggtcctaatgtgga

SEQ ID NO: 1547320 - DNA, 15 bp, Homo sapiens
atggtcctaatgtgg

SEQ ID NO: 1547321 - DNA, 15 bp, Homo sapiens
tatggtcctaatgtg

SEQ ID NO: 1547322 - DNA, 15 bp, Homo sapiens
ttatggtcctaatgt

SEQ ID NO: 1547323 - DNA, 15 bp, Homo sapiens
cttatggtcctaatg

SEQ ID NO: 1547324 - DNA, 15 bp, Homo sapiens
acttatggtcctaat

SEQ ID NO: 1547325 - DNA, 15 bp, Homo sapiens
gacttatggtcctaa

SEQ ID NO: 1547326 - DNA, 15 bp, Homo sapiens
ggacttatggtccta

SEQ ID NO: 1547327 - DNA, 15 bp, Homo sapiens
aggacttatggtcct

SEQ ID NO: 1547328 - DNA, 15 bp, Homo sapiens
gaggacttatggtcc

SEQ ID NO: 1547329 - DNA, 15 bp, Homo sapiens
agaggacttatggtc

SEQ ID NO: 1547330 - DNA, 15 bp, Homo sapiens
gagaggacttatggt

SEQ ID NO: 1547331 - DNA, 15 bp, Homo sapiens
tgagaggacttatgg

SEQ ID NO: 1547332 - DNA, 15 bp, Homo sapiens
atgagaggacttatg

SEQ ID NO: 1547333 - DNA, 15 bp, Homo sapiens
tatgagaggacttat

SEQ ID NO: 1547334 - DNA, 15 bp, Homo sapiens
atatgagaggactta

SEQ ID NO: 1547335 - DNA, 15 bp, Homo sapiens
aatatgagaggactt

SEQ ID NO: 1547336 - DNA, 15 bp, Homo sapiens
aaatatgagaggact

SEQ ID NO: 1547337 - DNA, 15 bp, Homo sapiens
aaaatatgagaggac

SEQ ID NO: 1547338 - DNA, 15 bp, Homo sapiens
taaaatatgagagga

SEQ ID NO: 1547339 - DNA, 15 bp, Homo sapiens
ataaaatatgagagg

SEQ ID NO: 1547340 - DNA, 15 bp, Homo sapiens
cataaaatatgagag

SEQ ID NO: 1547341 - DNA, 15 bp, Homo sapiens
acataaaatatgaga

SEQ ID NO: 1547342 - DNA, 15 bp, Homo sapiens
gacataaaatatgag

SEQ ID NO: 1547343 - DNA, 15 bp, Homo sapiens
agacataaaatatga

SEQ ID NO: 1547344 - DNA, 15 bp, Homo sapiens
gagacataaaatatg

SEQ ID NO: 1547345 - DNA, 15 bp, Homo sapiens
tgagacataaaatat

SEQ ID NO: 1547346 - DNA, 15 bp, Homo sapiens
ctgagacataaaata

SEQ ID NO: 1547347 - DNA, 15 bp, Homo sapiens
actgagacataaaat

SEQ ID NO: 1547348 - DNA, 15 bp, Homo sapiens
cactgagacataaaa

SEQ ID NO: 1547349 - DNA, 15 bp, Homo sapiens
tcactgagacataaa

SEQ ID NO: 1547350 - DNA, 15 bp, Homo sapiens
ctcactgagacataa

SEQ ID NO: 1547351 - DNA, 15 bp, Homo sapiens
tctcactgagacata

SEQ ID NO: 1547352 - DNA, 15 bp, Homo sapiens
atctcactgagacat

SEQ ID NO: 1547353 - DNA, 15 bp, Homo sapiens
catctcactgagaca

SEQ ID NO: 1547354 - DNA, 15 bp, Homo sapiens
acatctcactgagac

SEQ ID NO: 1547355 - DNA, 15 bp, Homo sapiens
tacatctcactgaga

SEQ ID NO: 1547356 - DNA, 15 bp, Homo sapiens
atacatctcactgag

SEQ ID NO: 1547357 - DNA, 15 bp, Homo sapiens
aatacatctcactga

SEQ ID NO: 1547358 - DNA, 15 bp, Homo sapiens
aaatacatctcactg

SEQ ID NO: 1547359 - DNA, 15 bp, Homo sapiens
aaaatacatctcact

SEQ ID NO: 1547360 - DNA, 15 bp, Homo sapiens
taaaatacatctcac

SEQ ID NO: 1547361 - DNA, 15 bp, Homo sapiens
ctaaaatacatctca

SEQ ID NO: 1547362 - DNA, 15 bp, Homo sapiens
cctaaaatacatctc

SEQ ID NO: 1547363 - DNA, 15 bp, Homo sapiens
tcctaaaatacatct

SEQ ID NO: 1547364 - DNA, 15 bp, Homo sapiens
ttcctaaaatacatc

SEQ ID NO: 1547365 - DNA, 15 bp, Homo sapiens
tttcctaaaatacat

SEQ ID NO: 1547366 - DNA, 15 bp, Homo sapiens
ctttcctaaaataca

SEQ ID NO: 1547367 - DNA, 15 bp, Homo sapiens
gctttcctaaaatac

SEQ ID NO: 1547368 - DNA, 15 bp, Homo sapiens
ggctttcctaaaata

SEQ ID NO: 1547369 - DNA, 15 bp, Homo sapiens
aggctttcctaaaat

SEQ ID NO: 1547370 - DNA, 15 bp, Homo sapiens
taggctttcctaaaa

SEQ ID NO: 1547371 - DNA, 15 bp, Homo sapiens
ataggctttcctaaa

SEQ ID NO: 1547372 - DNA, 15 bp, Homo sapiens
tataggctttcctaa

SEQ ID NO: 1547373 - DNA, 15 bp, Homo sapiens
gtataggctttccta

SEQ ID NO: 1547374 - DNA, 15 bp, Homo sapiens
ggtataggctttcct

SEQ ID NO: 1547375 - DNA, 15 bp, Homo sapiens
gggtataggctttcc

SEQ ID NO: 1547376 - DNA, 15 bp, Homo sapiens
ggggtataggctttc

SEQ ID NO: 1547377 - DNA, 15 bp, Homo sapiens
cggggtataggcttt

SEQ ID NO: 1547378 - DNA, 15 bp, Homo sapiens
gcggggtataggctt

SEQ ID NO: 1547379 - DNA, 15 bp, Homo sapiens
ggcggggtataggct

SEQ ID NO: 1547380 - DNA, 15 bp, Homo sapiens
gggcggggtataggc

SEQ ID NO: 1547381 - DNA, 15 bp, Homo sapiens
ggggcggggtatagg

SEQ ID NO: 1547382 - DNA, 15 bp, Homo sapiens
aggggcggggtatag

SEQ ID NO: 1547383 - DNA, 15 bp, Homo sapiens
gaggggcggggtata

SEQ ID NO: 1547384 - DNA, 15 bp, Homo sapiens
agaggggcggggtat

SEQ ID NO: 1547385 - DNA, 15 bp, Homo sapiens
cagaggggcggggta

SEQ ID NO: 1547386 - DNA, 15 bp, Homo sapiens
acagaggggcggggt

SEQ ID NO: 1547387 - DNA, 15 bp, Homo sapiens
gacagaggggcgggg

SEQ ID NO: 1547388 - DNA, 15 bp, Homo sapiens
tgacagaggggcggg

SEQ ID NO: 1547389 - DNA, 15 bp, Homo sapiens
atgacagaggggcgg

SEQ ID NO: 1547390 - DNA, 15 bp, Homo sapiens
tatgacagaggggcg

SEQ ID NO: 1547391 - DNA, 15 bp, Homo sapiens
ctatgacagaggggc

SEQ ID NO: 1547392 - DNA, 15 bp, Homo sapiens
cctatgacagagggg

SEQ ID NO: 1547393 - DNA, 15 bp, Homo sapiens
tcctatgacagaggg

SEQ ID NO: 1547394 - DNA, 15 bp, Homo sapiens
ctcctatgacagagg

SEQ ID NO: 1547395 - DNA, 15 bp, Homo sapiens
gctcctatgacagag

SEQ ID NO: 1547396 - DNA, 15 bp, Homo sapiens
ggctcctatgacaga

SEQ ID NO: 1547397 - DNA, 15 bp, Homo sapiens
aggctcctatgacag

SEQ ID NO: 1547398 - DNA, 15 bp, Homo sapiens
gaggctcctatgaca

SEQ ID NO: 1547399 - DNA, 15 bp, Homo sapiens
tgaggctcctatgac

SEQ ID NO: 1547400 - DNA, 15 bp, Homo sapiens
gtgaggctcctatga

SEQ ID NO: 1547401 - DNA, 15 bp, Homo sapiens
tgtgaggctcctatg

SEQ ID NO: 1547402 - DNA, 15 bp, Homo sapiens
ctgtgaggctcctat

SEQ ID NO: 1547403 - DNA, 15 bp, Homo sapiens
actgtgaggctccta

SEQ ID NO: 1547404 - DNA, 15 bp, Homo sapiens
cactgtgaggctcct

SEQ ID NO: 1547405 - DNA, 15 bp, Homo sapiens
gcactgtgaggctcc

SEQ ID NO: 1547406 - DNA, 15 bp, Homo sapiens
agcactgtgaggctc

SEQ ID NO: 1547407 - DNA, 15 bp, Homo sapiens
gagcactgtgaggct

SEQ ID NO: 1547408 - DNA, 15 bp, Homo sapiens
agagcactgtgaggc

SEQ ID NO: 1547409 - DNA, 15 bp, Homo sapiens
aagagcactgtgagg

SEQ ID NO: 1547410 - DNA, 15 bp, Homo sapiens
taagagcactgtgag

SEQ ID NO: 1547411 - DNA, 15 bp, Homo sapiens
ataagagcactgtga

SEQ ID NO: 1547412 - DNA, 15 bp, Homo sapiens
cataagagcactgtg

SEQ ID NO: 1547413 - DNA, 15 bp, Homo sapiens
ccataagagcactgt

SEQ ID NO: 1547414 - DNA, 15 bp, Homo sapiens
accataagagcactg

SEQ ID NO: 1547415 - DNA, 15 bp, Homo sapiens
aaccataagagcact

SEQ ID NO: 1547416 - DNA, 15 bp, Homo sapiens
taaccataagagcac

SEQ ID NO: 1547417 - DNA, 15 bp, Homo sapiens
ataaccataagagca

SEQ ID NO: 1547418 - DNA, 15 bp, Homo sapiens
tataaccataagagc

SEQ ID NO: 1547419 - DNA, 15 bp, Homo sapiens
atataaccataagag

SEQ ID NO: 1547420 - DNA, 15 bp, Homo sapiens
gatataaccataaga

SEQ ID NO: 1547421 - DNA, 15 bp, Homo sapiens
tgatataaccataag

SEQ ID NO: 1547422 - DNA, 15 bp, Homo sapiens
ttgatataaccataa

SEQ ID NO: 1547423 - DNA, 15 bp, Homo sapiens
cttgatataaccata

SEQ ID NO: 1547424 - DNA, 15 bp, Homo sapiens
acttgatataaccat

SEQ ID NO: 1547425 - DNA, 15 bp, Homo sapiens
cacttgatataacca

SEQ ID NO: 1547426 - DNA, 15 bp, Homo sapiens
acacttgatataacc

SEQ ID NO: 1547427 - DNA, 15 bp, Homo sapiens
cacacttgatataac

SEQ ID NO: 1547428 - DNA, 15 bp, Homo sapiens
acacacttgatataa

SEQ ID NO: 1547429 - DNA, 15 bp, Homo sapiens
gacacacttgatata

SEQ ID NO: 1547430 - DNA, 15 bp, Homo sapiens
ggacacacttgatat

SEQ ID NO: 1547431 - DNA, 15 bp, Homo sapiens
gggacacacttgata

SEQ ID NO: 1547432 - DNA, 15 bp, Homo sapiens
agggacacacttgat

SEQ ID NO: 1547433 - DNA, 15 bp, Homo sapiens
aagggacacacttga

SEQ ID NO: 1547434 - DNA, 15 bp, Homo sapiens
aaagggacacacttg

SEQ ID NO: 1547435 - DNA, 15 bp, Homo sapiens
aaaagggacacactt

SEQ ID NO: 1547436 - DNA, 15 bp, Homo sapiens
aaaaagggacacact

SEQ ID NO: 1547437 - DNA, 15 bp, Homo sapiens
taaaaagggacacac

SEQ ID NO: 1547438 - DNA, 15 bp, Homo sapiens
ataaaaagggacaca

SEQ ID NO: 1547439 - DNA, 15 bp, Homo sapiens
tataaaaagggacac

SEQ ID NO: 1547440 - DNA, 15 bp, Homo sapiens
ttataaaaagggaca

SEQ ID NO: 1547441 - DNA, 15 bp, Homo sapiens
tttataaaaagggac

SEQ ID NO: 1547442 - DNA, 15 bp, Homo sapiens
ttttataaaaaggga

SEQ ID NO: 1547443 - DNA, 15 bp, Homo sapiens
attttataaaaaggg

SEQ ID NO: 1547444 - DNA, 15 bp, Homo sapiens
gattttataaaaagg

SEQ ID NO: 1547445 - DNA, 15 bp, Homo sapiens
ggattttataaaaag

SEQ ID NO: 1547446 - DNA, 15 bp, Homo sapiens
gggattttataaaaa

SEQ ID NO: 1547447 - DNA, 15 bp, Homo sapiens
agggattttataaaa

SEQ ID NO: 1547448 - DNA, 15 bp, Homo sapiens
tagggattttataaa

SEQ ID NO: 1547449 - DNA, 15 bp, Homo sapiens
ttagggattttataa

SEQ ID NO: 1547450 - DNA, 15 bp, Homo sapiens
tttagggattttata

SEQ ID NO: 1547451 - DNA, 15 bp, Homo sapiens
atttagggattttat

SEQ ID NO: 1547452 - DNA, 15 bp, Homo sapiens
catttagggatttta

SEQ ID NO: 1547453 - DNA, 15 bp, Homo sapiens
tcatttagggatttt

SEQ ID NO: 1547454 - DNA, 15 bp, Homo sapiens
atcatttagggattt

SEQ ID NO: 1547455 - DNA, 15 bp, Homo sapiens
aatcatttagggatt

SEQ ID NO: 1547456 - DNA, 15 bp, Homo sapiens
taatcatttagggat

SEQ ID NO: 1547457 - DNA, 15 bp, Homo sapiens
ttaatcatttaggga

SEQ ID NO: 1547458 - DNA, 15 bp, Homo sapiens
cttaatcatttaggg

SEQ ID NO: 1547459 - DNA, 15 bp, Homo sapiens
ccttaatcatttagg

SEQ ID NO: 1547460 - DNA, 15 bp, Homo sapiens
cccttaatcatttag

SEQ ID NO: 1547461 - DNA, 15 bp, Homo sapiens
ccccttaatcattta

SEQ ID NO: 1547462 - DNA, 15 bp, Homo sapiens
accccttaatcattt

SEQ ID NO: 1547463 - DNA, 15 bp, Homo sapiens
taccccttaatcatt

SEQ ID NO: 1547464 - DNA, 15 bp, Homo sapiens
ataccccttaatcat

SEQ ID NO: 1547465 - DNA, 15 bp, Homo sapiens
aataccccttaatca

SEQ ID NO: 1547466 - DNA, 15 bp, Homo sapiens
aaataccccttaatc

SEQ ID NO: 1547467 - DNA, 15 bp, Homo sapiens
aaaataccccttaat

SEQ ID NO: 1547468 - DNA, 15 bp, Homo sapiens
caaaataccccttaa

SEQ ID NO: 1547469 - DNA, 15 bp, Homo sapiens
ccaaaatacccctta

SEQ ID NO: 1547470 - DNA, 15 bp, Homo sapiens
accaaaatacccctt

SEQ ID NO: 1547471 - DNA, 15 bp, Homo sapiens
aaccaaaatacccct

SEQ ID NO: 1547472 - DNA, 15 bp, Homo sapiens
aaaccaaaatacccc

SEQ ID NO: 1547473 - DNA, 15 bp, Homo sapiens
aaaaccaaaataccc

SEQ ID NO: 1547474 - DNA, 15 bp, Homo sapiens
taaaaccaaaatacc

SEQ ID NO: 1547475 - DNA, 15 bp, Homo sapiens
gtaaaaccaaaatac

SEQ ID NO: 1547476 - DNA, 15 bp, Homo sapiens
agtaaaaccaaaata

SEQ ID NO: 1547477 - DNA, 15 bp, Homo sapiens
cagtaaaaccaaaat

SEQ ID NO: 1547478 - DNA, 15 bp, Homo sapiens
acagtaaaaccaaaa

SEQ ID NO: 1547479 - DNA, 15 bp, Homo sapiens
tctacagtaaaacca

SEQ ID NO: 1547480 - DNA, 15 bp, Homo sapiens
ttctacagtaaaacc

SEQ ID NO: 1547481 - DNA, 15 bp, Homo sapiens
attctacagtaaaac

SEQ ID NO: 1547482 - DNA, 15 bp, Homo sapiens
aattctacagtaaaa

SEQ ID NO: 1547483 - DNA, 15 bp, Homo sapiens
taattctacagtaaa

SEQ ID NO: 1547484 - DNA, 15 bp, Homo sapiens
ataattctacagtaa

SEQ ID NO: 1547485 - DNA, 15 bp, Homo sapiens
tataattctacagta

SEQ ID NO: 1547486 - DNA, 15 bp, Homo sapiens
ttataattctacagt

SEQ ID NO: 1547487 - DNA, 15 bp, Homo sapiens
gttataattctacag

SEQ ID NO: 1547488 - DNA, 15 bp, Homo sapiens
tgttataattctaca

SEQ ID NO: 1547489 - DNA, 15 bp, Homo sapiens
atgttataattctac

SEQ ID NO: 1547490 - DNA, 15 bp, Homo sapiens
gatgttataattcta

SEQ ID NO: 1547491 - DNA, 15 bp, Homo sapiens
agatgttataattct

SEQ ID NO: 1547492 - DNA, 15 bp, Homo sapiens
aagatgttataattc

SEQ ID NO: 1547493 - DNA, 15 bp, Homo sapiens
taagatgttataatt

SEQ ID NO: 1547494 - DNA, 15 bp, Homo sapiens
ataagatgttataat

SEQ ID NO: 1547495 - DNA, 15 bp, Homo sapiens
aataagatgttataa

SEQ ID NO: 1547496 - DNA, 15 bp, Homo sapiens
aaataagatgttata

SEQ ID NO: 1547497 - DNA, 15 bp, Homo sapiens
gaaataagatgttat

SEQ ID NO: 1547498 - DNA, 15 bp, Homo sapiens
agaaataagatgtta

SEQ ID NO: 1547499 - DNA, 15 bp, Homo sapiens
tagaaataagatgtt

SEQ ID NO: 1547500 - DNA, 15 bp, Homo sapiens
ttagaaataagatgt

SEQ ID NO: 1547501 - DNA, 15 bp, Homo sapiens
gttagaaataagatg

SEQ ID NO: 1547502 - DNA, 15 bp, Homo sapiens
agttagaaataagat

SEQ ID NO: 1547503 - DNA, 15 bp, Homo sapiens
cagttagaaataaga

SEQ ID NO: 1547504 - DNA, 15 bp, Homo sapiens
tcagttagaaataag

SEQ ID NO: 1547505 - DNA, 15 bp, Homo sapiens
atcagttagaaataa

SEQ ID NO: 1547506 - DNA, 15 bp, Homo sapiens
gatcagttagaaata

SEQ ID NO: 1547507 - DNA, 15 bp, Homo sapiens
tgatcagttagaaat

SEQ ID NO: 1547508 - DNA, 15 bp, Homo sapiens
atgatcagttagaaa

SEQ ID NO: 1547509 - DNA, 15 bp, Homo sapiens
tatgatcagttagaa

SEQ ID NO: 1547510 - DNA, 15 bp, Homo sapiens
ttatgatcagttaga

SEQ ID NO: 1547511 - DNA, 15 bp, Homo sapiens
tttatgatcagttag

SEQ ID NO: 1547512 - DNA, 15 bp, Homo sapiens
ttttatgatcagtta

SEQ ID NO: 1547513 - DNA, 15 bp, Homo sapiens
attttatgatcagtt

SEQ ID NO: 1547514 - DNA, 15 bp, Homo sapiens
aattttatgatcagt

SEQ ID NO: 1547515 - DNA, 15 bp, Homo sapiens
aaattttatgatcag

SEQ ID NO: 1547516 - DNA, 15 bp, Homo sapiens
taaattttatgatca

SEQ ID NO: 1547517 - DNA, 15 bp, Homo sapiens
ttaaattttatgatc

SEQ ID NO: 1547518 - DNA, 15 bp, Homo sapiens
tttaaattttatgat

SEQ ID NO: 1547519 - DNA, 15 bp, Homo sapiens
ttttaaattttatga

SEQ ID NO: 1547520 - DNA, 15 bp, Homo sapiens
tttttaaattttatg

SEQ ID NO: 1547521 - DNA, 15 bp, Homo sapiens
atttttaaattttat

SEQ ID NO: 1547522 - DNA, 15 bp, Homo sapiens
tatttttaaatttta

SEQ ID NO: 1547523 - DNA, 15 bp, Homo sapiens
ctatttttaaatttt

SEQ ID NO: 1547524 - DNA, 15 bp, Homo sapiens
actatttttaaattt

SEQ ID NO: 1547525 - DNA, 15 bp, Homo sapiens
aactatttttaaatt

SEQ ID NO: 1547526 - DNA, 15 bp, Homo sapiens
caactatttttaaat

SEQ ID NO: 1547527 - DNA, 15 bp, Homo sapiens
tcaactatttttaaa

SEQ ID NO: 1547528 - DNA, 15 bp, Homo sapiens
atcaactatttttaa

SEQ ID NO: 1547529 - DNA, 15 bp, Homo sapiens
gatcaactattttta

SEQ ID NO: 1547530 - DNA, 15 bp, Homo sapiens
tgatcaactattttt

SEQ ID NO: 1547531 - DNA, 15 bp, Homo sapiens
atgatcaactatttt

SEQ ID NO: 1547532 - DNA, 15 bp, Homo sapiens
tatgatcaactattt

SEQ ID NO: 1547533 - DNA, 15 bp, Homo sapiens
gtatgatcaactatt

SEQ ID NO: 1547534 - DNA, 15 bp, Homo sapiens
agtatgatcaactat

SEQ ID NO: 1547535 - DNA, 15 bp, Homo sapiens
aagtatgatcaacta

SEQ ID NO: 1547536 - DNA, 15 bp, Homo sapiens
aaagtatgatcaact

SEQ ID NO: 1547537 - DNA, 15 bp, Homo sapiens
caaagtatgatcaac

SEQ ID NO: 1547538 - DNA, 15 bp, Homo sapiens
acaaagtatgatcaa

SEQ ID NO: 1547539 - DNA, 15 bp, Homo sapiens
tacaaagtatgatca

SEQ ID NO: 1547540 - DNA, 15 bp, Homo sapiens
ttacaaagtatgatc

SEQ ID NO: 1547541 - DNA, 15 bp, Homo sapiens
gttacaaagtatgat

SEQ ID NO: 1547542 - DNA, 15 bp, Homo sapiens
tgttacaaagtatga

SEQ ID NO: 1547543 - DNA, 15 bp, Homo sapiens
ctgttacaaagtatg

SEQ ID NO: 1547544 - DNA, 15 bp, Homo sapiens
tctgttacaaagtat

SEQ ID NO: 1547545 - DNA, 15 bp, Homo sapiens
ttctgttacaaagta

SEQ ID NO: 1547546 - DNA, 15 bp, Homo sapiens
attctgttacaaagt

SEQ ID NO: 1547547 - DNA, 15 bp, Homo sapiens
gattctgttacaaag

SEQ ID NO: 1547548 - DNA, 15 bp, Homo sapiens
tgattctgttacaaa

SEQ ID NO: 1547549 - DNA, 15 bp, Homo sapiens
gtgattctgttacaa

SEQ ID NO: 1547550 - DNA, 15 bp, Homo sapiens
tgtgattctgttaca

SEQ ID NO: 1547551 - DNA, 15 bp, Homo sapiens
ttgtgattctgttac

SEQ ID NO: 1547552 - DNA, 15 bp, Homo sapiens
tttgtgattctgtta

SEQ ID NO: 1547553 - DNA, 15 bp, Homo sapiens
atttgtgattctgtt

SEQ ID NO: 1547554 - DNA, 15 bp, Homo sapiens
aatttgtgattctgt

SEQ ID NO: 1547555 - DNA, 15 bp, Homo sapiens
caatttgtgattctg

SEQ ID NO: 1547556 - DNA, 15 bp, Homo sapiens
acaatttgtgattct

SEQ ID NO: 1547557 - DNA, 15 bp, Homo sapiens
tacaatttgtgattc

SEQ ID NO: 1547558 - DNA, 15 bp, Homo sapiens
atacaatttgtgatt

SEQ ID NO: 1547559 - DNA, 15 bp, Homo sapiens
catacaatttgtgat

SEQ ID NO: 1547560 - DNA, 15 bp, Homo sapiens
acatacaatttgtga

SEQ ID NO: 1547561 - DNA, 15 bp, Homo sapiens
aacatacaatttgtg

SEQ ID NO: 1547562 - DNA, 15 bp, Homo sapiens
taacatacaatttgt

SEQ ID NO: 1547563 - DNA, 15 bp, Homo sapiens
ataacatacaatttg

SEQ ID NO: 1547564 - DNA, 15 bp, Homo sapiens
cataacatacaattt

SEQ ID NO: 1547565 - DNA, 15 bp, Homo sapiens
tcataacatacaatt

SEQ ID NO: 1547566 - DNA, 15 bp, Homo sapiens
ttcataacatacaat

SEQ ID NO: 1547567 - DNA, 15 bp, Homo sapiens
tttcataacatacaa

SEQ ID NO: 1547568 - DNA, 15 bp, Homo sapiens
ttttcataacataca

SEQ ID NO: 1547569 - DNA, 15 bp, Homo sapiens
tttttcataacatac

SEQ ID NO: 1547570 - DNA, 15 bp, Homo sapiens
ttttttcataacata

SEQ ID NO: 1547571 - DNA, 15 bp, Homo sapiens
attttttcataacat

SEQ ID NO: 1547572 - DNA, 15 bp, Homo sapiens
aattttttcataaca

SEQ ID NO: 1547573 - DNA, 15 bp, Homo sapiens
aaattttttcataac

SEQ ID NO: 1547574 - DNA, 15 bp, Homo sapiens
aaaattttttcataa

SEQ ID NO: 1547575 - DNA, 15 bp, Homo sapiens
caaaattttttcata

SEQ ID NO: 1547576 - DNA, 15 bp, Homo sapiens
ccaaaattttttcat

SEQ ID NO: 1547577 - DNA, 15 bp, Homo sapiens
tccaaaattttttca

SEQ ID NO: 1547578 - DNA, 15 bp, Homo sapiens
ttccaaaattttttc

SEQ ID NO: 1547579 - DNA, 15 bp, Homo sapiens
gttccaaaatttttt

SEQ ID NO: 1547580 - DNA, 15 bp, Homo sapiens
agttccaaaattttt

SEQ ID NO: 1547581 - DNA, 15 bp, Homo sapiens
tagttccaaaatttt

SEQ ID NO: 1547582 - DNA, 15 bp, Homo sapiens
atagttccaaaattt

SEQ ID NO: 1547583 - DNA, 15 bp, Homo sapiens
tatagttccaaaatt

SEQ ID NO: 1547584 - DNA, 15 bp, Homo sapiens
ttatagttccaaaat

SEQ ID NO: 1547585 - DNA, 15 bp, Homo sapiens
cttatagttccaaaa

SEQ ID NO: 1547586 - DNA, 15 bp, Homo sapiens
ccttatagttccaaa

SEQ ID NO: 1547587 - DNA, 15 bp, Homo sapiens
tccttatagttccaa

SEQ ID NO: 1547588 - DNA, 15 bp, Homo sapiens
ttccttatagttcca

SEQ ID NO: 1547589 - DNA, 15 bp, Homo sapiens
tttccttatagttcc

SEQ ID NO: 1547590 - DNA, 15 bp, Homo sapiens
ttttccttatagttc

SEQ ID NO: 1547591 - DNA, 15 bp, Homo sapiens
tttttccttatagtt

SEQ ID NO: 1547592 - DNA, 15 bp, Homo sapiens
atttttccttatagt

SEQ ID NO: 1547593 - DNA, 15 bp, Homo sapiens
tatttttccttatag

SEQ ID NO: 1547594 - DNA, 15 bp, Homo sapiens
gtatttttccttata

SEQ ID NO: 1547595 - DNA, 15 bp, Homo sapiens
cgtatttttccttat

SEQ ID NO: 1547596 - DNA, 15 bp, Homo sapiens
acgtatttttcctta

SEQ ID NO: 1547597 - DNA, 15 bp, Homo sapiens
aacgtatttttcctt

SEQ ID NO: 1547598 - DNA, 15 bp, Homo sapiens
aaacgtatttttcct

SEQ ID NO: 1547599 - DNA, 15 bp, Homo sapiens
aaaacgtatttttcc

SEQ ID NO: 1547600 - DNA, 15 bp, Homo sapiens
taaaacgtatttttc

SEQ ID NO: 1547601 - DNA, 15 bp, Homo sapiens
ttaaaacgtattttt

SEQ ID NO: 1547602 - DNA, 15 bp, Homo sapiens
tttaaaacgtatttt

SEQ ID NO: 1547603 - DNA, 15 bp, Homo sapiens
ttttaaaacgtattt

SEQ ID NO: 1547604 - DNA, 15 bp, Homo sapiens
gttttaaaacgtatt

SEQ ID NO: 1547605 - DNA, 15 bp, Homo sapiens
tgttttaaaacgtat

SEQ ID NO: 1547606 - DNA, 15 bp, Homo sapiens
ttgttttaaaacgta

SEQ ID NO: 1547607 - DNA, 15 bp, Homo sapiens
gttgttttaaaacgt

SEQ ID NO: 1547608 - DNA, 15 bp, Homo sapiens
agttgttttaaaacg

SEQ ID NO: 1547609 - DNA, 15 bp, Homo sapiens
aagttgttttaaaac

SEQ ID NO: 1547610 - DNA, 15 bp, Homo sapiens
gaagttgttttaaaa

SEQ ID NO: 1547611 - DNA, 15 bp, Homo sapiens
tgaagttgttttaaa

SEQ ID NO: 1547612 - DNA, 15 bp, Homo sapiens
atgaagttgttttaa

SEQ ID NO: 1547613 - DNA, 15 bp, Homo sapiens
aatgaagttgtttta

SEQ ID NO: 1547614 - DNA, 15 bp, Homo sapiens
aaatgaagttgtttt

SEQ ID NO: 1547615 - DNA, 15 bp, Homo sapiens
caaatgaagttgttt

SEQ ID NO: 1547616 - DNA, 15 bp, Homo sapiens
acaaatgaagttgtt

SEQ ID NO: 1547617 - DNA, 15 bp, Homo sapiens
cacaaatgaagttgt

SEQ ID NO: 1547618 - DNA, 15 bp, Homo sapiens
acacaaatgaagttg

SEQ ID NO: 1547619 - DNA, 15 bp, Homo sapiens
aacacaaatgaagtt

SEQ ID NO: 1547620 - DNA, 15 bp, Homo sapiens
aaacacaaatgaagt

SEQ ID NO: 1547621 - DNA, 15 bp, Homo sapiens
aaaacacaaatgaag

SEQ ID NO: 1547622 - DNA, 15 bp, Homo sapiens
gaaaacacaaatgaa

SEQ ID NO: 1547623 - DNA, 15 bp, Homo sapiens
agaaaacacaaatga

SEQ ID NO: 1547624 - DNA, 15 bp, Homo sapiens
gagaaaacacaaatg

SEQ ID NO: 1547625 - DNA, 15 bp, Homo sapiens
ggagaaaacacaaat

SEQ ID NO: 1547626 - DNA, 15 bp, Homo sapiens
aggagaaaacacaaa

SEQ ID NO: 1547627 - DNA, 15 bp, Homo sapiens
taggagaaaacacaa

SEQ ID NO: 1547628 - DNA, 15 bp, Homo sapiens
ctaggagaaaacaca

SEQ ID NO: 1547629 - DNA, 15 bp, Homo sapiens
cctaggagaaaacac

SEQ ID NO: 1547630 - DNA, 15 bp, Homo sapiens
acctaggagaaaaca

SEQ ID NO: 1547631 - DNA, 15 bp, Homo sapiens
gacctaggagaaaac

SEQ ID NO: 1547632 - DNA, 15 bp, Homo sapiens
tgacctaggagaaaa

SEQ ID NO: 1547633 - DNA, 15 bp, Homo sapiens
ctgacctaggagaaa

SEQ ID NO: 1547634 - DNA, 15 bp, Homo sapiens
gctgacctaggagaa

SEQ ID NO: 1547635 - DNA, 15 bp, Homo sapiens
agctgacctaggaga

SEQ ID NO: 1547636 - DNA, 15 bp, Homo sapiens
cagctgacctaggag

SEQ ID NO: 1547637 - DNA, 15 bp, Homo sapiens
gcagctgacctagga

SEQ ID NO: 1547638 - DNA, 15 bp, Homo sapiens
ggcagctgacctagg

SEQ ID NO: 1547639 - DNA, 15 bp, Homo sapiens
aggcagctgacctag

SEQ ID NO: 1547640 - DNA, 15 bp, Homo sapiens
taggcagctgaccta

SEQ ID NO: 1547641 - DNA, 15 bp, Homo sapiens
ataggcagctgacct

SEQ ID NO: 1547642 - DNA, 15 bp, Homo sapiens
tataggcagctgacc

SEQ ID NO: 1547643 - DNA, 15 bp, Homo sapiens
ttataggcagctgac

SEQ ID NO: 1547644 - DNA, 15 bp, Homo sapiens
attataggcagctga

SEQ ID NO: 1547645 - DNA, 15 bp, Homo sapiens
gattataggcagctg

SEQ ID NO: 1547646 - DNA, 15 bp, Homo sapiens
agattataggcagct

SEQ ID NO: 1547647 - DNA, 15 bp, Homo sapiens
aagattataggcagc

SEQ ID NO: 1547648 - DNA, 15 bp, Homo sapiens
gaagattataggcag

SEQ ID NO: 1547649 - DNA, 15 bp, Homo sapiens
agaagattataggca

SEQ ID NO: 1547650 - DNA, 15 bp, Homo sapiens
cagaagattataggc

SEQ ID NO: 1547651 - DNA, 15 bp, Homo sapiens
acagaagattatagg

SEQ ID NO: 1547652 - DNA, 15 bp, Homo sapiens
cacagaagattatag

SEQ ID NO: 1547653 - DNA, 15 bp, Homo sapiens
acacagaagattata

SEQ ID NO: 1547654 - DNA, 15 bp, Homo sapiens
cacacagaagattat

SEQ ID NO: 1547655 - DNA, 15 bp, Homo sapiens
gcacacagaagatta

SEQ ID NO: 1547656 - DNA, 15 bp, Homo sapiens
ggcacacagaagatt

SEQ ID NO: 1547657 - DNA, 15 bp, Homo sapiens
aggcacacagaagat

SEQ ID NO: 1547658 - DNA, 15 bp, Homo sapiens
aaggcacacagaaga

SEQ ID NO: 1547659 - DNA, 15 bp, Homo sapiens
taaggcacacagaag

SEQ ID NO: 1547660 - DNA, 15 bp, Homo sapiens
ttaaggcacacagaa

SEQ ID NO: 1547661 - DNA, 15 bp, Homo sapiens
gttaaggcacacaga

SEQ ID NO: 1547662 - DNA, 15 bp, Homo sapiens
agttaaggcacacag

SEQ ID NO: 1547663 - DNA, 15 bp, Homo sapiens
aagttaaggcacaca

SEQ ID NO: 1547664 - DNA, 15 bp, Homo sapiens
caagttaaggcacac

SEQ ID NO: 1547665 - DNA, 15 bp, Homo sapiens
acaagttaaggcaca

SEQ ID NO: 1547666 - DNA, 15 bp, Homo sapiens
tacaagttaaggcac

SEQ ID NO: 1547667 - DNA, 15 bp, Homo sapiens
gtacaagttaaggca

SEQ ID NO: 1547668 - DNA, 15 bp, Homo sapiens
ggtacaagttaaggc

SEQ ID NO: 1547669 - DNA, 15 bp, Homo sapiens
aggtacaagttaagg

SEQ ID NO: 1547670 - DNA, 15 bp, Homo sapiens
aaggtacaagttaag

SEQ ID NO: 1547671 - DNA, 15 bp, Homo sapiens
aaaggtacaagttaa

SEQ ID NO: 1547672 - DNA, 15 bp, Homo sapiens
taaaggtacaagtta

SEQ ID NO: 1547673 - DNA, 15 bp, Homo sapiens
ttaaaggtacaagtt

SEQ ID NO: 1547674 - DNA, 15 bp, Homo sapiens
attaaaggtacaagt

SEQ ID NO: 1547675 - DNA, 15 bp, Homo sapiens
aattaaaggtacaag

SEQ ID NO: 1547676 - DNA, 15 bp, Homo sapiens
aaattaaaggtacaa

SEQ ID NO: 1547677 - DNA, 15 bp, Homo sapiens
taaattaaaggtaca

SEQ ID NO: 1547678 - DNA, 15 bp, Homo sapiens
ttaaattaaaggtac

SEQ ID NO: 1547679 - DNA, 15 bp, Homo sapiens
tttaaattaaaggta

SEQ ID NO: 1547680 - DNA, 15 bp, Homo sapiens
ttttaaattaaaggt

SEQ ID NO: 1547681 - DNA, 15 bp, Homo sapiens
tttttaaattaaagg

SEQ ID NO: 1547682 - DNA, 15 bp, Homo sapiens
atttttaaattaaag

SEQ ID NO: 1547683 - DNA, 15 bp, Homo sapiens
gatttttaaattaaa

SEQ ID NO: 1547684 - DNA, 15 bp, Homo sapiens
cgatttttaaattaa

SEQ ID NO: 1547685 - DNA, 15 bp, Homo sapiens
tcgatttttaaatta

SEQ ID NO: 1547686 - DNA, 15 bp, Homo sapiens
ctcgatttttaaatt

SEQ ID NO: 1547687 - DNA, 15 bp, Homo sapiens
cctcgatttttaaat

SEQ ID NO: 1547688 - DNA, 15 bp, Homo sapiens
ccctcgatttttaaa

SEQ ID NO: 1547689 - DNA, 15 bp, Homo sapiens
gccctcgatttttaa

SEQ ID NO: 1547690 - DNA, 15 bp, Homo sapiens
ggccctcgattttta

SEQ ID NO: 1547691 - DNA, 15 bp, Homo sapiens
tggccctcgattttt

SEQ ID NO: 1547692 - DNA, 15 bp, Homo sapiens
ctggccctcgatttt

SEQ ID NO: 1547693 - DNA, 15 bp, Homo sapiens
actggccctcgattt

SEQ ID NO: 1547694 - DNA, 15 bp, Homo sapiens
aactggccctcgatt

SEQ ID NO: 1547695 - DNA, 15 bp, Homo sapiens
taactggccctcgat

SEQ ID NO: 1547696 - DNA, 15 bp, Homo sapiens
gtaactggccctcga

SEQ ID NO: 1547697 - DNA, 15 bp, Homo sapiens
agtaactggccctcg

SEQ ID NO: 1547698 - DNA, 15 bp, Homo sapiens
tagtaactggccctc

SEQ ID NO: 1547699 - DNA, 15 bp, Homo sapiens
ctagtaactggccct

SEQ ID NO: 1547700 - DNA, 15 bp, Homo sapiens
tctagtaactggccc

SEQ ID NO: 1547701 - DNA, 15 bp, Homo sapiens
ctctagtaactggcc

SEQ ID NO: 1547702 - DNA, 15 bp, Homo sapiens
tctctagtaactggc

SEQ ID NO: 1547703 - DNA, 15 bp, Homo sapiens
gtctctagtaactgg

SEQ ID NO: 1547704 - DNA, 15 bp, Homo sapiens
tgtctctagtaactg

SEQ ID NO: 1547705 - DNA, 15 bp, Homo sapiens
atgtctctagtaact

SEQ ID NO: 1547706 - DNA, 15 bp, Homo sapiens
gatgtctctagtaac

SEQ ID NO: 1547707 - DNA, 15 bp, Homo sapiens
tgatgtctctagtaa

SEQ ID NO: 1547708 - DNA, 15 bp, Homo sapiens
ctgatgtctctagta

SEQ ID NO: 1547709 - DNA, 15 bp, Homo sapiens
cctgatgtctctagt

SEQ ID NO: 1547710 - DNA, 15 bp, Homo sapiens
acctgatgtctctag

SEQ ID NO: 1547711 - DNA, 15 bp, Homo sapiens
aacctgatgtctcta

SEQ ID NO: 1547712 - DNA, 15 bp, Homo sapiens
aaacctgatgtctct

SEQ ID NO: 1547713 - DNA, 15 bp, Homo sapiens
taaacctgatgtctc

SEQ ID NO: 1547714 - DNA, 15 bp, Homo sapiens
ataaacctgatgtct

SEQ ID NO: 1547715 - DNA, 15 bp, Homo sapiens
cataaacctgatgtc

SEQ ID NO: 1547716 - DNA, 15 bp, Homo sapiens
acataaacctgatgt

SEQ ID NO: 1547717 - DNA, 15 bp, Homo sapiens
tacataaacctgatg

SEQ ID NO: 1547718 - DNA, 15 bp, Homo sapiens
atacataaacctgat

SEQ ID NO: 1547719 - DNA, 15 bp, Homo sapiens
gatacataaacctga

SEQ ID NO: 1547720 - DNA, 15 bp, Homo sapiens
ggatacataaacctg

SEQ ID NO: 1547721 - DNA, 15 bp, Homo sapiens
gggatacataaacct

SEQ ID NO: 1547722 - DNA, 15 bp, Homo sapiens
agggatacataaacc

SEQ ID NO: 1547723 - DNA, 15 bp, Homo sapiens
cagggatacataaac

SEQ ID NO: 1547724 - DNA, 15 bp, Homo sapiens
gcagggatacataaa

SEQ ID NO: 1547725 - DNA, 15 bp, Homo sapiens
ggcagggatacataa

SEQ ID NO: 1547726 - DNA, 15 bp, Homo sapiens
tggcagggatacata

SEQ ID NO: 1547727 - DNA, 15 bp, Homo sapiens
ttggcagggatacat

SEQ ID NO: 1547728 - DNA, 15 bp, Homo sapiens
gttggcagggataca

SEQ ID NO: 1547729 - DNA, 15 bp, Homo sapiens
tgttggcagggatac

SEQ ID NO: 1547730 - DNA, 15 bp, Homo sapiens
ttgttggcagggata

SEQ ID NO: 1547731 - DNA, 15 bp, Homo sapiens
gttgttggcagggat

SEQ ID NO: 1547732 - DNA, 15 bp, Homo sapiens
tgttgttggcaggga

SEQ ID NO: 1547733 - DNA, 15 bp, Homo sapiens
gtgttgttggcaggg

SEQ ID NO: 1547734 - DNA, 15 bp, Homo sapiens
ggtgttgttggcagg

SEQ ID NO: 1547735 - DNA, 15 bp, Homo sapiens
gggtgttgttggcag

SEQ ID NO: 1547736 - DNA, 15 bp, Homo sapiens
agggtgttgttggca

SEQ ID NO: 1547737 - DNA, 15 bp, Homo sapiens
gagggtgttgttggc

SEQ ID NO: 1547738 - DNA, 15 bp, Homo sapiens
agagggtgttgttgg

SEQ ID NO: 1547739 - DNA, 15 bp, Homo sapiens
aagagggtgttgttg

SEQ ID NO: 1547740 - DNA, 15 bp, Homo sapiens
aaagagggtgttgtt

SEQ ID NO: 1547741 - DNA, 15 bp, Homo sapiens
taaagagggtgttgt

SEQ ID NO: 1547742 - DNA, 15 bp, Homo sapiens
ataaagagggtgttg

SEQ ID NO: 1547743 - DNA, 15 bp, Homo sapiens
aataaagagggtgtt

SEQ ID NO: 1547744 - DNA, 15 bp, Homo sapiens
caataaagagggtgt

SEQ ID NO: 1547745 - DNA, 15 bp, Homo sapiens
acaataaagagggtg

SEQ ID NO: 1547746 - DNA, 15 bp, Homo sapiens
gacaataaagagggt

SEQ ID NO: 1547747 - DNA, 15 bp, Homo sapiens
agacaataaagaggg

SEQ ID NO: 1547748 - DNA, 15 bp, Homo sapiens
gagacaataaagagg

SEQ ID NO: 1547749 - DNA, 15 bp, Homo sapiens
agagacaataaagag

SEQ ID NO: 1547750 - DNA, 15 bp, Homo sapiens
tagagacaataaaga

SEQ ID NO: 1547751 - DNA, 15 bp, Homo sapiens
atagagacaataaag

SEQ ID NO: 1547752 - DNA, 15 bp, Homo sapiens
aatagagacaataaa

SEQ ID NO: 1547753 - DNA, 15 bp, Homo sapiens
taatagagacaataa

SEQ ID NO: 1547754 - DNA, 15 bp, Homo sapiens
ctaatagagacaata

SEQ ID NO: 1547755 - DNA, 15 bp, Homo sapiens
actaatagagacaat

SEQ ID NO: 1547756 - DNA, 15 bp, Homo sapiens
tactaatagagacaa

SEQ ID NO: 1547757 - DNA, 15 bp, Homo sapiens
ttactaatagagaca

SEQ ID NO: 1547758 - DNA, 15 bp, Homo sapiens
cttactaatagagac

SEQ ID NO: 1547759 - DNA, 15 bp, Homo sapiens
tcttactaatagaga

SEQ ID NO: 1547760 - DNA, 15 bp, Homo sapiens
gtcttactaatagag

SEQ ID NO: 1547761 - DNA, 15 bp, Homo sapiens
tgtcttactaataga

SEQ ID NO: 1547762 - DNA, 15 bp, Homo sapiens
gtgtcttactaatag

SEQ ID NO: 1547763 - DNA, 15 bp, Homo sapiens
agtgtcttactaata

SEQ ID NO: 1547764 - DNA, 15 bp, Homo sapiens
cagtgtcttactaat

SEQ ID NO: 1547765 - DNA, 15 bp, Homo sapiens
ccagtgtcttactaa

SEQ ID NO: 1547766 - DNA, 15 bp, Homo sapiens
gccagtgtcttacta

SEQ ID NO: 1547767 - DNA, 15 bp, Homo sapiens
tgccagtgtcttact

SEQ ID NO: 1547768 - DNA, 15 bp, Homo sapiens
ctgccagtgtcttac

SEQ ID NO: 1547769 - DNA, 15 bp, Homo sapiens
gctgccagtgtctta

SEQ ID NO: 1547770 - DNA, 15 bp, Homo sapiens
ggctgccagtgtctt

SEQ ID NO: 1547771 - DNA, 15 bp, Homo sapiens
tggctgccagtgtct

SEQ ID NO: 1547772 - DNA, 15 bp, Homo sapiens
ttggctgccagtgtc

SEQ ID NO: 1547773 - DNA, 15 bp, Homo sapiens
attggctgccagtgt

SEQ ID NO: 1547774 - DNA, 15 bp, Homo sapiens
cattggctgccagtg

SEQ ID NO: 1547775 - DNA, 15 bp, Homo sapiens
tcattggctgccagt

SEQ ID NO: 1547776 - DNA, 15 bp, Homo sapiens
ctcattggctgccag

SEQ ID NO: 1547777 - DNA, 15 bp, Homo sapiens
gctcattggctgcca

SEQ ID NO: 1547778 - DNA, 15 bp, Homo sapiens
ggctcattggctgcc

SEQ ID NO: 1547779 - DNA, 15 bp, Homo sapiens
gtgtggctcattggc

SEQ ID NO: 1547780 - DNA, 15 bp, Homo sapiens
ggtgtggctcattgg

SEQ ID NO: 1547781 - DNA, 15 bp, Homo sapiens
aggtgtggctcattg

SEQ ID NO: 1547782 - DNA, 15 bp, Homo sapiens
gaggtgtggctcatt

SEQ ID NO: 1547783 - DNA, 15 bp, Homo sapiens
tgaggtgtggctcat

SEQ ID NO: 1547784 - DNA, 15 bp, Homo sapiens
gtgaggtgtggctca

SEQ ID NO: 1547785 - DNA, 15 bp, Homo sapiens
cgtgaggtgtggctc

SEQ ID NO: 1547786 - DNA, 15 bp, Homo sapiens
acgtgaggtgtggct

SEQ ID NO: 1547787 - DNA, 15 bp, Homo sapiens
aacgtgaggtgtggc

SEQ ID NO: 1547788 - DNA, 15 bp, Homo sapiens
taacgtgaggtgtgg

SEQ ID NO: 1547789 - DNA, 15 bp, Homo sapiens
ctaacgtgaggtgtg

SEQ ID NO: 1547790 - DNA, 15 bp, Homo sapiens
tctaacgtgaggtgt

SEQ ID NO: 1547791 - DNA, 15 bp, Homo sapiens
ttctaacgtgaggtg

SEQ ID NO: 1547792 - DNA, 15 bp, Homo sapiens
attctaacgtgaggt

SEQ ID NO: 1547793 - DNA, 15 bp, Homo sapiens
aattctaacgtgagg

SEQ ID NO: 1547794 - DNA, 15 bp, Homo sapiens
aaattctaacgtgag

SEQ ID NO: 1547795 - DNA, 15 bp, Homo sapiens
aaaattctaacgtga

SEQ ID NO: 1547796 - DNA, 15 bp, Homo sapiens
aaaaattctaacgtg

SEQ ID NO: 1547797 - DNA, 15 bp, Homo sapiens
caaaaattctaacgt

SEQ ID NO: 1547798 - DNA, 15 bp, Homo sapiens
ccaaaaattctaacg

SEQ ID NO: 1547799 - DNA, 15 bp, Homo sapiens
tccaaaaattctaac

SEQ ID NO: 1547800 - DNA, 15 bp, Homo sapiens
ttccaaaaattctaa

SEQ ID NO: 1547801 - DNA, 15 bp, Homo sapiens
cttccaaaaattcta

SEQ ID NO: 1547802 - DNA, 15 bp, Homo sapiens
tcttccaaaaattct

SEQ ID NO: 1547803 - DNA, 15 bp, Homo sapiens
ctcttccaaaaattc

SEQ ID NO: 1547804 - DNA, 15 bp, Homo sapiens
actcttccaaaaatt

SEQ ID NO: 1547805 - DNA, 15 bp, Homo sapiens
cactcttccaaaaat

SEQ ID NO: 1547806 - DNA, 15 bp, Homo sapiens
acactcttccaaaaa

SEQ ID NO: 1547807 - DNA, 15 bp, Homo sapiens
tacactcttccaaaa

SEQ ID NO: 1547808 - DNA, 15 bp, Homo sapiens
atacactcttccaaa

SEQ ID NO: 1547809 - DNA, 15 bp, Homo sapiens
aatacactcttccaa

SEQ ID NO: 1547810 - DNA, 15 bp, Homo sapiens
aaatacactcttcca

SEQ ID NO: 1547811 - DNA, 15 bp, Homo sapiens
gaaatacactcttcc

SEQ ID NO: 1547812 - DNA, 15 bp, Homo sapiens
agaaatacactcttc

SEQ ID NO: 1547813 - DNA, 15 bp, Homo sapiens
cagaaatacactctt

SEQ ID NO: 1547814 - DNA, 15 bp, Homo sapiens
ccagaaatacactct

SEQ ID NO: 1547815 - DNA, 15 bp, Homo sapiens
tccagaaatacactc

SEQ ID NO: 1547816 - DNA, 15 bp, Homo sapiens
atccagaaatacact

SEQ ID NO: 1547817 - DNA, 15 bp, Homo sapiens
aatccagaaatacac

SEQ ID NO: 1547818 - DNA, 15 bp, Homo sapiens
aaatccagaaataca

SEQ ID NO: 1547819 - DNA, 15 bp, Homo sapiens
taaatccagaaatac

SEQ ID NO: 1547820 - DNA, 15 bp, Homo sapiens
ctaaatccagaaata

SEQ ID NO: 1547821 - DNA, 15 bp, Homo sapiens
gctaaatccagaaat

SEQ ID NO: 1547822 - DNA, 15 bp, Homo sapiens
tgctaaatccagaaa

SEQ ID NO: 1547823 - DNA, 15 bp, Homo sapiens
ttgctaaatccagaa

SEQ ID NO: 1547824 - DNA, 15 bp, Homo sapiens
tttgctaaatccaga

SEQ ID NO: 1547825 - DNA, 15 bp, Homo sapiens
atttgctaaatccag

SEQ ID NO: 1547826 - DNA, 15 bp, Homo sapiens
gatttgctaaatcca

SEQ ID NO: 1547827 - DNA, 15 bp, Homo sapiens
agatttgctaaatcc

SEQ ID NO: 1547828 - DNA, 15 bp, Homo sapiens
tagatttgctaaatc

SEQ ID NO: 1547829 - DNA, 15 bp, Homo sapiens
ctagatttgctaaat

SEQ ID NO: 1547830 - DNA, 15 bp, Homo sapiens
actagatttgctaaa

SEQ ID NO: 1547831 - DNA, 15 bp, Homo sapiens
tactagatttgctaa

SEQ ID NO: 1547832 - DNA, 15 bp, Homo sapiens
ttactagatttgcta

SEQ ID NO: 1547833 - DNA, 15 bp, Homo sapiens
cttactagatttgct

SEQ ID NO: 1547834 - DNA, 15 bp, Homo sapiens
acttactagatttgc

SEQ ID NO: 1547835 - DNA, 15 bp, Homo sapiens
tacttactagatttg

SEQ ID NO: 1547836 - DNA, 15 bp, Homo sapiens
ttacttactagattt

SEQ ID NO: 1547837 - DNA, 15 bp, Homo sapiens
attacttactagatt

SEQ ID NO: 1547838 - DNA, 15 bp, Homo sapiens
cattacttactagat

SEQ ID NO: 1547839 - DNA, 15 bp, Homo sapiens
tcattacttactaga

SEQ ID NO: 1547840 - DNA, 15 bp, Homo sapiens
atcattacttactag

SEQ ID NO: 1547841 - DNA, 15 bp, Homo sapiens
tatcattacttacta

SEQ ID NO: 1547842 - DNA, 15 bp, Homo sapiens
ttatcattacttact

SEQ ID NO: 1547843 - DNA, 15 bp, Homo sapiens
attatcattacttac

SEQ ID NO: 1547844 - DNA, 15 bp, Homo sapiens
aattatcattactta

SEQ ID NO: 1547845 - DNA, 15 bp, Homo sapiens
aaattatcattactt

SEQ ID NO: 1547846 - DNA, 15 bp, Homo sapiens
aaaattatcattact

SEQ ID NO: 1547847 - DNA, 15 bp, Homo sapiens
gaaaattatcattac

SEQ ID NO: 1547848 - DNA, 15 bp, Homo sapiens
agaaaattatcatta

SEQ ID NO: 1547849 - DNA, 15 bp, Homo sapiens
aagaaaattatcatt

SEQ ID NO: 1547850 - DNA, 15 bp, Homo sapiens
aaagaaaattatcat

SEQ ID NO: 1547851 - DNA, 15 bp, Homo sapiens
taaagaaaattatca

SEQ ID NO: 1547852 - DNA, 15 bp, Homo sapiens
ttaaagaaaattatc

SEQ ID NO: 1547853 - DNA, 15 bp, Homo sapiens
attaaagaaaattat

SEQ ID NO: 1547854 - DNA, 15 bp, Homo sapiens
tattaaagaaaatta

SEQ ID NO: 1547855 - DNA, 15 bp, Homo sapiens
gtattaaagaaaatt

SEQ ID NO: 1547856 - DNA, 15 bp, Homo sapiens
agtattaaagaaaat

SEQ ID NO: 1547857 - DNA, 15 bp, Homo sapiens
tagtattaaagaaaa

SEQ ID NO: 1547858 - DNA, 15 bp, Homo sapiens
ttagtattaaagaaa

SEQ ID NO: 1547859 - DNA, 15 bp, Homo sapiens
gttagtattaaagaa

SEQ ID NO: 1547860 - DNA, 15 bp, Homo sapiens
tgttagtattaaaga

SEQ ID NO: 1547861 - DNA, 15 bp, Homo sapiens
ttgttagtattaaag

SEQ ID NO: 1547862 - DNA, 15 bp, Homo sapiens
attgttagtattaaa

SEQ ID NO: 1547863 - DNA, 15 bp, Homo sapiens
aattgttagtattaa

SEQ ID NO: 1547864 - DNA, 15 bp, Homo sapiens
taattgttagtatta

SEQ ID NO: 1547865 - DNA, 15 bp, Homo sapiens
ataattgttagtatt

SEQ ID NO: 1547866 - DNA, 15 bp, Homo sapiens
aataattgttagtat

SEQ ID NO: 1547867 - DNA, 15 bp, Homo sapiens
gaataattgttagta

SEQ ID NO: 1547868 - DNA, 15 bp, Homo sapiens
agaataattgttagt

SEQ ID NO: 1547869 - DNA, 15 bp, Homo sapiens
tagaataattgttag

SEQ ID NO: 1547870 - DNA, 15 bp, Homo sapiens
ttagaataattgtta

SEQ ID NO: 1547871 - DNA, 15 bp, Homo sapiens
cttagaataattgtt

SEQ ID NO: 1547872 - DNA, 15 bp, Homo sapiens
tcttagaataattgt

SEQ ID NO: 1547873 - DNA, 15 bp, Homo sapiens
ctcttagaataattg

SEQ ID NO: 1547874 - DNA, 15 bp, Homo sapiens
tctcttagaataatt

SEQ ID NO: 1547875 - DNA, 15 bp, Homo sapiens
ttctcttagaataat

SEQ ID NO: 1547876 - DNA, 15 bp, Homo sapiens
attctcttagaataa

SEQ ID NO: 1547877 - DNA, 15 bp, Homo sapiens
aattctcttagaata

SEQ ID NO: 1547878 - DNA, 15 bp, Homo sapiens
gaattctcttagaat

SEQ ID NO: 1547879 - DNA, 15 bp, Homo sapiens
tgaattctcttagaa

SEQ ID NO: 1547880 - DNA, 15 bp, Homo sapiens
ttgaattctcttaga

SEQ ID NO: 1547881 - DNA, 15 bp, Homo sapiens
tttgaattctcttag

SEQ ID NO: 1547882 - DNA, 15 bp, Homo sapiens
ctttgaattctctta

SEQ ID NO: 1547883 - DNA, 15 bp, Homo sapiens
tctttgaattctctt

SEQ ID NO: 1547884 - DNA, 15 bp, Homo sapiens
ttctttgaattctct

SEQ ID NO: 1547885 - DNA, 15 bp, Homo sapiens
tttctttgaattctc

SEQ ID NO: 1547886 - DNA, 15 bp, Homo sapiens
ttttctttgaattct

SEQ ID NO: 1547887 - DNA, 15 bp, Homo sapiens
gttttctttgaattc

SEQ ID NO: 1547888 - DNA, 15 bp, Homo sapiens
ggttttctttgaatt

SEQ ID NO: 1547889 - DNA, 15 bp, Homo sapiens
gggttttctttgaat

SEQ ID NO: 1547890 - DNA, 15 bp, Homo sapiens
agggttttctttgaa

SEQ ID NO: 1547891 - DNA, 15 bp, Homo sapiens
aagggttttctttga

SEQ ID NO: 1547892 - DNA, 15 bp, Homo sapiens
aaagggttttctttg

SEQ ID NO: 1547893 - DNA, 15 bp, Homo sapiens
gaaagggttttcttt

SEQ ID NO: 1547894 - DNA, 15 bp, Homo sapiens
tgaaagggttttctt

SEQ ID NO: 1547895 - DNA, 15 bp, Homo sapiens
atgaaagggttttct

SEQ ID NO: 1547896 - DNA, 15 bp, Homo sapiens
aatgaaagggttttc

SEQ ID NO: 1547897 - DNA, 15 bp, Homo sapiens
gaaatgaaagggttt

SEQ ID NO: 1547898 - DNA, 15 bp, Homo sapiens
tgaaatgaaagggtt

SEQ ID NO: 1547899 - DNA, 15 bp, Homo sapiens
ctgaaatgaaagggt

SEQ ID NO: 1547900 - DNA, 15 bp, Homo sapiens
tctgaaatgaaaggg

SEQ ID NO: 1547901 - DNA, 15 bp, Homo sapiens
ttctgaaatgaaagg

SEQ ID NO: 1547902 - DNA, 15 bp, Homo sapiens
attctgaaatgaaag

SEQ ID NO: 1547903 - DNA, 15 bp, Homo sapiens
aattctgaaatgaaa

SEQ ID NO: 1547904 - DNA, 15 bp, Homo sapiens
aaattctgaaatgaa

SEQ ID NO: 1547905 - DNA, 15 bp, Homo sapiens
aaaattctgaaatga

SEQ ID NO: 1547906 - DNA, 15 bp, Homo sapiens
gaaaattctgaaatg

SEQ ID NO: 1547907 - DNA, 15 bp, Homo sapiens
ggaaaattctgaaat

SEQ ID NO: 1547908 - DNA, 15 bp, Homo sapiens
tggaaaattctgaaa

SEQ ID NO: 1547909 - DNA, 15 bp, Homo sapiens
ctggaaaattctgaa

SEQ ID NO: 1547910 - DNA, 15 bp, Homo sapiens
actggaaaattctga

SEQ ID NO: 1547911 - DNA, 15 bp, Homo sapiens
cactggaaaattctg

SEQ ID NO: 1547912 - DNA, 15 bp, Homo sapiens
tcactggaaaattct

SEQ ID NO: 1547913 - DNA, 15 bp, Homo sapiens
ttcactggaaaattc

SEQ ID NO: 1547914 - DNA, 15 bp, Homo sapiens
cttcactggaaaatt

SEQ ID NO: 1547915 - DNA, 15 bp, Homo sapiens
tcttcactggaaaat

SEQ ID NO: 1547916 - DNA, 15 bp, Homo sapiens
gtcttcactggaaaa

SEQ ID NO: 1547917 - DNA, 15 bp, Homo sapiens
agtcttcactggaaa

SEQ ID NO: 1547918 - DNA, 15 bp, Homo sapiens
aagtcttcactggaa

SEQ ID NO: 1547919 - DNA, 15 bp, Homo sapiens
aaagtcttcactgga

SEQ ID NO: 1547920 - DNA, 15 bp, Homo sapiens
gaaagtcttcactgg

SEQ ID NO: 1547921 - DNA, 15 bp, Homo sapiens
tgaaagtcttcactg

SEQ ID NO: 1547922 - DNA, 15 bp, Homo sapiens
gtgaaagtcttcact

SEQ ID NO: 1547923 - DNA, 15 bp, Homo sapiens
agtgaaagtcttcac

SEQ ID NO: 1547924 - DNA, 15 bp, Homo sapiens
aagtgaaagtcttca

SEQ ID NO: 1547925 - DNA, 15 bp, Homo sapiens
taagtgaaagtcttc

SEQ ID NO: 1547926 - DNA, 15 bp, Homo sapiens
gtaagtgaaagtctt

SEQ ID NO: 1547927 - DNA, 15 bp, Homo sapiens
tgtaagtgaaagtct

SEQ ID NO: 1547928 - DNA, 15 bp, Homo sapiens
atgtaagtgaaagtc

SEQ ID NO: 1547929 - DNA, 15 bp, Homo sapiens
aatgtaagtgaaagt

SEQ ID NO: 1547930 - DNA, 15 bp, Homo sapiens
aaatgtaagtgaaag

SEQ ID NO: 1547931 - DNA, 15 bp, Homo sapiens
aaaatgtaagtgaaa

SEQ ID NO: 1547932 - DNA, 15 bp, Homo sapiens
aaaaatgtaagtgaa

SEQ ID NO: 1547933 - DNA, 15 bp, Homo sapiens
taaaaatgtaagtga

SEQ ID NO: 1547934 - DNA, 15 bp, Homo sapiens
gtaaaaatgtaagtg

SEQ ID NO: 1547935 - DNA, 15 bp, Homo sapiens
agtaaaaatgtaagt

SEQ ID NO: 1547936 - DNA, 15 bp, Homo sapiens
aagtaaaaatgtaag

SEQ ID NO: 1547937 - DNA, 15 bp, Homo sapiens
aaagtaaaaatgtaa

SEQ ID NO: 1547938 - DNA, 15 bp, Homo sapiens
aaaagtaaaaatgta

SEQ ID NO: 1547939 - DNA, 15 bp, Homo sapiens
aaaaagtaaaaatgt

SEQ ID NO: 1547940 - DNA, 15 bp, Homo sapiens
aaaaaagtaaaaatg

SEQ ID NO: 1547941 - DNA, 15 bp, Homo sapiens
aaaaaaagtaaaaat

SEQ ID NO: 1547942 - DNA, 15 bp, Homo sapiens
gaaaaaaagtaaaaa

SEQ ID NO: 1547943 - DNA, 15 bp, Homo sapiens
ggaaaaaaagtaaaa

SEQ ID NO: 1547944 - DNA, 15 bp, Homo sapiens
aggaaaaaaagtaaa

SEQ ID NO: 1547945 - DNA, 15 bp, Homo sapiens
gaggaaaaaaagtaa

SEQ ID NO: 1547946 - DNA, 15 bp, Homo sapiens
aagaggaaaaaaagt

SEQ ID NO: 1547947 - DNA, 15 bp, Homo sapiens
gaagaggaaaaaaag

SEQ ID NO: 1547948 - DNA, 15 bp, Homo sapiens
agaagaggaaaaaaa

SEQ ID NO: 1547949 - DNA, 15 bp, Homo sapiens
cagaagaggaaaaaa

SEQ ID NO: 1547950 - DNA, 15 bp, Homo sapiens
tcagaagaggaaaaa

SEQ ID NO: 1547951 - DNA, 15 bp, Homo sapiens
atcagaagaggaaaa

SEQ ID NO: 1547952 - DNA, 15 bp, Homo sapiens
aatcagaagaggaaa

SEQ ID NO: 1547953 - DNA, 15 bp, Homo sapiens
aaatcagaagaggaa

SEQ ID NO: 1547954 - DNA, 15 bp, Homo sapiens
aaaatcagaagagga

SEQ ID NO: 1547955 - DNA, 15 bp, Homo sapiens
taaaatcagaagagg

SEQ ID NO: 1547956 - DNA, 15 bp, Homo sapiens
ataaaatcagaagag

SEQ ID NO: 1547957 - DNA, 15 bp, Homo sapiens
tataaaatcagaaga

SEQ ID NO: 1547958 - DNA, 15 bp, Homo sapiens
atataaaatcagaag

SEQ ID NO: 1547959 - DNA, 15 bp, Homo sapiens
gatataaaatcagaa

SEQ ID NO: 1547960 - DNA, 15 bp, Homo sapiens
agatataaaatcaga

SEQ ID NO: 1547961 - DNA, 15 bp, Homo sapiens
cagatataaaatcag

SEQ ID NO: 1547962 - DNA, 15 bp, Homo sapiens
acagatataaaatca

SEQ ID NO: 1547963 - DNA, 15 bp, Homo sapiens
cacagatataaaatc

SEQ ID NO: 1547964 - DNA, 15 bp, Homo sapiens
ccacagatataaaat

SEQ ID NO: 1547965 - DNA, 15 bp, Homo sapiens
accacagatataaaa

SEQ ID NO: 1547966 - DNA, 15 bp, Homo sapiens
taccacagatataaa

SEQ ID NO: 1547967 - DNA, 15 bp, Homo sapiens
ataccacagatataa

SEQ ID NO: 1547968 - DNA, 15 bp, Homo sapiens
gataccacagatata

SEQ ID NO: 1547969 - DNA, 15 bp, Homo sapiens
ggataccacagatat

SEQ ID NO: 1547970 - DNA, 15 bp, Homo sapiens
aggataccacagata

SEQ ID NO: 1547971 - DNA, 15 bp, Homo sapiens
caggataccacagat

SEQ ID NO: 1547972 - DNA, 15 bp, Homo sapiens
acaggataccacaga

SEQ ID NO: 1547973 - DNA, 15 bp, Homo sapiens
tacaggataccacag

SEQ ID NO: 1547974 - DNA, 15 bp, Homo sapiens
ttacaggataccaca

SEQ ID NO: 1547975 - DNA, 15 bp, Homo sapiens
gttacaggataccac

SEQ ID NO: 1547976 - DNA, 15 bp, Homo sapiens
agttacaggatacca

SEQ ID NO: 1547977 - DNA, 15 bp, Homo sapiens
cagttacaggatacc

SEQ ID NO: 1547978 - DNA, 15 bp, Homo sapiens
tcagttacaggatac

SEQ ID NO: 1547979 - DNA, 15 bp, Homo sapiens
ttcagttacaggata

SEQ ID NO: 1547980 - DNA, 15 bp, Homo sapiens
cttcagttacaggat

SEQ ID NO: 1547981 - DNA, 15 bp, Homo sapiens
ccttcagttacagga

SEQ ID NO: 1547982 - DNA, 15 bp, Homo sapiens
tccttcagttacagg

SEQ ID NO: 1547983 - DNA, 15 bp, Homo sapiens
ttccttcagttacag

SEQ ID NO: 1547984 - DNA, 15 bp, Homo sapiens
gttccttcagttaca

SEQ ID NO: 1547985 - DNA, 15 bp, Homo sapiens
agttccttcagttac

SEQ ID NO: 1547986 - DNA, 15 bp, Homo sapiens
gagttccttcagtta

SEQ ID NO: 1547987 - DNA, 15 bp, Homo sapiens
agagttccttcagtt

SEQ ID NO: 1547988 - DNA, 15 bp, Homo sapiens
cagagttccttcagt

SEQ ID NO: 1547989 - DNA, 15 bp, Homo sapiens
tcagagttccttcag

SEQ ID NO: 1547990 - DNA, 15 bp, Homo sapiens
ttcagagttccttca

SEQ ID NO: 1547991 - DNA, 15 bp, Homo sapiens
cttcagagttccttc

SEQ ID NO: 1547992 - DNA, 15 bp, Homo sapiens
ccttcagagttcctt

SEQ ID NO: 1547993 - DNA, 15 bp, Homo sapiens
tccttcagagttcct

SEQ ID NO: 1547994 - DNA, 15 bp, Homo sapiens
ttccttcagagttcc

SEQ ID NO: 1547995 - DNA, 15 bp, Homo sapiens
gttccttcagagttc

SEQ ID NO: 1547996 - DNA, 15 bp, Homo sapiens
agttccttcagagtt

SEQ ID NO: 1547997 - DNA, 15 bp, Homo sapiens
aagttccttcagagt

SEQ ID NO: 1547998 - DNA, 15 bp, Homo sapiens
aaagttccttcagag

SEQ ID NO: 1547999 - DNA, 15 bp, Homo sapiens
aaaagttccttcaga

SEQ ID NO: 1548000 - DNA, 15 bp, Homo sapiens
aaaaagttccttcag

SEQ ID NO: 1548001 - DNA, 15 bp, Homo sapiens
caaaaagttccttca

SEQ ID NO: 1548002 - DNA, 15 bp, Homo sapiens
ccaaaaagttccttc

SEQ ID NO: 1548003 - DNA, 15 bp, Homo sapiens
accaaaaagttcctt

SEQ ID NO: 1548004 - DNA, 15 bp, Homo sapiens
taccaaaaagttcct

SEQ ID NO: 1548005 - DNA, 15 bp, Homo sapiens
ctaccaaaaagttcc

SEQ ID NO: 1548006 - DNA, 15 bp, Homo sapiens
cctaccaaaaagttc

SEQ ID NO: 1548007 - DNA, 15 bp, Homo sapiens
gcctaccaaaaagtt

SEQ ID NO: 1548008 - DNA, 15 bp, Homo sapiens
ggcctaccaaaaagt

SEQ ID NO: 1548009 - DNA, 15 bp, Homo sapiens
tggcctaccaaaaag

SEQ ID NO: 1548010 - DNA, 15 bp, Homo sapiens
gtggcctaccaaaaa

SEQ ID NO: 1548011 - DNA, 15 bp, Homo sapiens
tgtggcctaccaaaa

SEQ ID NO: 1548012 - DNA, 15 bp, Homo sapiens
atgtggcctaccaaa

SEQ ID NO: 1548013 - DNA, 15 bp, Homo sapiens
aatgtggcctaccaa

SEQ ID NO: 1548014 - DNA, 15 bp, Homo sapiens
caatgtggcctacca

SEQ ID NO: 1548015 - DNA, 15 bp, Homo sapiens
tcaatgtggcctacc

SEQ ID NO: 1548016 - DNA, 15 bp, Homo sapiens
ctcaatgtggcctac

SEQ ID NO: 1548017 - DNA, 15 bp, Homo sapiens
tctcaatgtggccta

SEQ ID NO: 1548018 - DNA, 15 bp, Homo sapiens
ttctcaatgtggcct

SEQ ID NO: 1548019 - DNA, 15 bp, Homo sapiens
tttctcaatgtggcc

SEQ ID NO: 1548020 - DNA, 15 bp, Homo sapiens
atttctcaatgtggc

SEQ ID NO: 1548021 - DNA, 15 bp, Homo sapiens
gatttctcaatgtgg

SEQ ID NO: 1548022 - DNA, 15 bp, Homo sapiens
ggatttctcaatgtg

SEQ ID NO: 1548023 - DNA, 15 bp, Homo sapiens
tggatttctcaatgt

SEQ ID NO: 1548024 - DNA, 15 bp, Homo sapiens
gtggatttctcaatg

SEQ ID NO: 1548025 - DNA, 15 bp, Homo sapiens
ggtggatttctcaat

SEQ ID NO: 1548026 - DNA, 15 bp, Homo sapiens
tggtggatttctcaa

SEQ ID NO: 1548027 - DNA, 15 bp, Homo sapiens
ttggtggatttctca

SEQ ID NO: 1548028 - DNA, 15 bp, Homo sapiens
tttggtggatttctc

SEQ ID NO: 1548029 - DNA, 15 bp, Homo sapiens
ttttggtggatttct

SEQ ID NO: 1548030 - DNA, 15 bp, Homo sapiens
attttggtggatttc

SEQ ID NO: 1548031 - DNA, 15 bp, Homo sapiens
aattttggtggattt

SEQ ID NO: 1548032 - DNA, 15 bp, Homo sapiens
gaattttggtggatt

SEQ ID NO: 1548033 - DNA, 15 bp, Homo sapiens
agaattttggtggat

SEQ ID NO: 1548034 - DNA, 15 bp, Homo sapiens
cagaattttggtgga

SEQ ID NO: 1548035 - DNA, 15 bp, Homo sapiens
tcagaattttggtgg

SEQ ID NO: 1548036 - DNA, 15 bp, Homo sapiens
atcagaattttggtg

SEQ ID NO: 1548037 - DNA, 15 bp, Homo sapiens
tatcagaattttggt

SEQ ID NO: 1548038 - DNA, 15 bp, Homo sapiens
ttatcagaattttgg

SEQ ID NO: 1548039 - DNA, 15 bp, Homo sapiens
attatcagaattttg

SEQ ID NO: 1548040 - DNA, 15 bp, Homo sapiens
tattatcagaatttt

SEQ ID NO: 1548041 - DNA, 15 bp, Homo sapiens
ttattatcagaattt

SEQ ID NO: 1548042 - DNA, 15 bp, Homo sapiens
tttattatcagaatt

SEQ ID NO: 1548043 - DNA, 15 bp, Homo sapiens
ttttattatcagaat

SEQ ID NO: 1548044 - DNA, 15 bp, Homo sapiens
cttttattatcagaa

SEQ ID NO: 1548045 - DNA, 15 bp, Homo sapiens
gcttttattatcaga

SEQ ID NO: 1548046 - DNA, 15 bp, Homo sapiens
tgcttttattatcag

SEQ ID NO: 1548047 - DNA, 15 bp, Homo sapiens
ttgcttttattatca

SEQ ID NO: 1548048 - DNA, 15 bp, Homo sapiens
tttgcttttattatc

SEQ ID NO: 1548049 - DNA, 15 bp, Homo sapiens
ctttgcttttattat

SEQ ID NO: 1548050 - DNA, 15 bp, Homo sapiens
gctttgcttttatta

SEQ ID NO: 1548051 - DNA, 15 bp, Homo sapiens
cgctttgcttttatt

SEQ ID NO: 1548052 - DNA, 15 bp, Homo sapiens
ccgctttgcttttat

SEQ ID NO: 1548053 - DNA, 15 bp, Homo sapiens
gccgctttgctttta

SEQ ID NO: 1548054 - DNA, 15 bp, Homo sapiens
tgccgctttgctttt

SEQ ID NO: 1548055 - DNA, 15 bp, Homo sapiens
ttgccgctttgcttt

SEQ ID NO: 1548056 - DNA, 15 bp, Homo sapiens
cttgccgctttgctt

SEQ ID NO: 1548057 - DNA, 15 bp, Homo sapiens
tcttgccgctttgct

SEQ ID NO: 1548058 - DNA, 15 bp, Homo sapiens
ctcttgccgctttgc

SEQ ID NO: 1548059 - DNA, 15 bp, Homo sapiens
actcttgccgctttg

SEQ ID NO: 1548060 - DNA, 15 bp, Homo sapiens
aactcttgccgcttt

SEQ ID NO: 1548061 - DNA, 15 bp, Homo sapiens
aaactcttgccgctt

SEQ ID NO: 1548062 - DNA, 15 bp, Homo sapiens
caaactcttgccgct

SEQ ID NO: 1548063 - DNA, 15 bp, Homo sapiens
ccaaactcttgccgc

SEQ ID NO: 1548064 - DNA, 15 bp, Homo sapiens
accaaactcttgccg

SEQ ID NO: 1548065 - DNA, 15 bp, Homo sapiens
taccaaactcttgcc

SEQ ID NO: 1548066 - DNA, 15 bp, Homo sapiens
gtaccaaactcttgc

SEQ ID NO: 1548067 - DNA, 15 bp, Homo sapiens
agtaccaaactcttg

SEQ ID NO: 1548068 - DNA, 15 bp, Homo sapiens
aagtaccaaactctt

SEQ ID NO: 1548069 - DNA, 15 bp, Homo sapiens
aaagtaccaaactct

SEQ ID NO: 1548070 - DNA, 15 bp, Homo sapiens
taaagtaccaaactc

SEQ ID NO: 1548071 - DNA, 15 bp, Homo sapiens
gtaaagtaccaaact

SEQ ID NO: 1548072 - DNA, 15 bp, Homo sapiens
tgtaaagtaccaaac

SEQ ID NO: 1548073 - DNA, 15 bp, Homo sapiens
gtgtaaagtaccaaa

SEQ ID NO: 1548074 - DNA, 15 bp, Homo sapiens
tgtgtaaagtaccaa

SEQ ID NO: 1548075 - DNA, 15 bp, Homo sapiens
gtgtgtaaagtacca

SEQ ID NO: 1548076 - DNA, 15 bp, Homo sapiens
ggtgtgtaaagtacc

SEQ ID NO: 1548077 - DNA, 15 bp, Homo sapiens
aggtgtgtaaagtac

SEQ ID NO: 1548078 - DNA, 15 bp, Homo sapiens
gaggtgtgtaaagta

SEQ ID NO: 1548079 - DNA, 15 bp, Homo sapiens
agaggtgtgtaaagt

SEQ ID NO: 1548080 - DNA, 15 bp, Homo sapiens
cagaggtgtgtaaag

SEQ ID NO: 1548081 - DNA, 15 bp, Homo sapiens
ccagaggtgtgtaaa

SEQ ID NO: 1548082 - DNA, 15 bp, Homo sapiens
tccagaggtgtgtaa

SEQ ID NO: 1548083 - DNA, 15 bp, Homo sapiens
gtccagaggtgtgta

SEQ ID NO: 1548084 - DNA, 15 bp, Homo sapiens
ggtccagaggtgtgt

SEQ ID NO: 1548085 - DNA, 15 bp, Homo sapiens
tggtccagaggtgtg

SEQ ID NO: 1548086 - DNA, 15 bp, Homo sapiens
gtggtccagaggtgt

SEQ ID NO: 1548087 - DNA, 15 bp, Homo sapiens
agtggtccagaggtg

SEQ ID NO: 1548088 - DNA, 15 bp, Homo sapiens
aagtggtccagaggt

SEQ ID NO: 1548089 - DNA, 15 bp, Homo sapiens
taagtggtccagagg

SEQ ID NO: 1548090 - DNA, 15 bp, Homo sapiens
gtaagtggtccagag

SEQ ID NO: 1548091 - DNA, 15 bp, Homo sapiens
tgtaagtggtccaga

SEQ ID NO: 1548092 - DNA, 15 bp, Homo sapiens
ttgtaagtggtccag

SEQ ID NO: 1548093 - DNA, 15 bp, Homo sapiens
tttgtaagtggtcca

SEQ ID NO: 1548094 - DNA, 15 bp, Homo sapiens
ctttgtaagtggtcc

SEQ ID NO: 1548095 - DNA, 15 bp, Homo sapiens
actttgtaagtggtc

SEQ ID NO: 1548096 - DNA, 15 bp, Homo sapiens
tactttgtaagtggt

SEQ ID NO: 1548097 - DNA, 15 bp, Homo sapiens
atactttgtaagtgg

SEQ ID NO: 1548098 - DNA, 15 bp, Homo sapiens
aatactttgtaagtg

SEQ ID NO: 1548099 - DNA, 15 bp, Homo sapiens
aaatactttgtaagt

SEQ ID NO: 1548100 - DNA, 15 bp, Homo sapiens
aaaatactttgtaag

SEQ ID NO: 1548101 - DNA, 15 bp, Homo sapiens
gaaaatactttgtaa

SEQ ID NO: 1548102 - DNA, 15 bp, Homo sapiens
agaaaatactttgta

SEQ ID NO: 1548103 - DNA, 15 bp, Homo sapiens
aagaaaatactttgt

SEQ ID NO: 1548104 - DNA, 15 bp, Homo sapiens
gaagaaaatactttg

SEQ ID NO: 1548105 - DNA, 15 bp, Homo sapiens
tgaagaaaatacttt

SEQ ID NO: 1548106 - DNA, 15 bp, Homo sapiens
gtgaagaaaatactt

SEQ ID NO: 1548107 - DNA, 15 bp, Homo sapiens
agtgaagaaaatact

SEQ ID NO: 1548108 - DNA, 15 bp, Homo sapiens
cagtgaagaaaatac

SEQ ID NO: 1548109 - DNA, 15 bp, Homo sapiens
acagtgaagaaaata

SEQ ID NO: 1548110 - DNA, 15 bp, Homo sapiens
aacagtgaagaaaat

SEQ ID NO: 1548111 - DNA, 15 bp, Homo sapiens
caacagtgaagaaaa

SEQ ID NO: 1548112 - DNA, 15 bp, Homo sapiens
gcaacagtgaagaaa

SEQ ID NO: 1548113 - DNA, 15 bp, Homo sapiens
tgcaacagtgaagaa

SEQ ID NO: 1548114 - DNA, 15 bp, Homo sapiens
ctgcaacagtgaaga

SEQ ID NO: 1548115 - DNA, 15 bp, Homo sapiens
actgcaacagtgaag

SEQ ID NO: 1548116 - DNA, 15 bp, Homo sapiens
aactgcaacagtgaa

SEQ ID NO: 1548117 - DNA, 15 bp, Homo sapiens
aaactgcaacagtga

SEQ ID NO: 1548118 - DNA, 15 bp, Homo sapiens
taaactgcaacagtg

SEQ ID NO: 1548119 - DNA, 15 bp, Homo sapiens
ttaaactgcaacagt

SEQ ID NO: 1548120 - DNA, 15 bp, Homo sapiens
attaaactgcaacag

SEQ ID NO: 1548121 - DNA, 15 bp, Homo sapiens
aattaaactgcaaca

SEQ ID NO: 1548122 - DNA, 15 bp, Homo sapiens
taattaaactgcaac

SEQ ID NO: 1548123 - DNA, 15 bp, Homo sapiens
ctaattaaactgcaa

SEQ ID NO: 1548124 - DNA, 15 bp, Homo sapiens
gctaattaaactgca

SEQ ID NO: 1548125 - DNA, 15 bp, Homo sapiens
agctaattaaactgc

SEQ ID NO: 1548126 - DNA, 15 bp, Homo sapiens
aagctaattaaactg

SEQ ID NO: 1548127 - DNA, 15 bp, Homo sapiens
gaagctaattaaact

SEQ ID NO: 1548128 - DNA, 15 bp, Homo sapiens
tgaagctaattaaac

SEQ ID NO: 1548129 - DNA, 15 bp, Homo sapiens
ctgaagctaattaaa

SEQ ID NO: 1548130 - DNA, 15 bp, Homo sapiens
gctgaagctaattaa

SEQ ID NO: 1548131 - DNA, 15 bp, Homo sapiens
tgctgaagctaatta

SEQ ID NO: 1548132 - DNA, 15 bp, Homo sapiens
atgctgaagctaatt

SEQ ID NO: 1548133 - DNA, 15 bp, Homo sapiens
aatgctgaagctaat

SEQ ID NO: 1548134 - DNA, 15 bp, Homo sapiens
aaatgctgaagctaa

SEQ ID NO: 1548135 - DNA, 15 bp, Homo sapiens
gaaatgctgaagcta

SEQ ID NO: 1548136 - DNA, 15 bp, Homo sapiens
agaaatgctgaagct

SEQ ID NO: 1548137 - DNA, 15 bp, Homo sapiens
gagaaatgctgaagc

SEQ ID NO: 1548138 - DNA, 15 bp, Homo sapiens
agagaaatgctgaag

SEQ ID NO: 1548139 - DNA, 15 bp, Homo sapiens
aagagaaatgctgaa

SEQ ID NO: 1548140 - DNA, 15 bp, Homo sapiens
gaagagaaatgctga

SEQ ID NO: 1548141 - DNA, 15 bp, Homo sapiens
tgaagagaaatgctg

SEQ ID NO: 1548142 - DNA, 15 bp, Homo sapiens
ctatgaagagaaatg

SEQ ID NO: 1548143 - DNA, 15 bp, Homo sapiens
gctatgaagagaaat

SEQ ID NO: 1548144 - DNA, 15 bp, Homo sapiens
tgctatgaagagaaa

SEQ ID NO: 1548145 - DNA, 15 bp, Homo sapiens
ctgctatgaagagaa

SEQ ID NO: 1548146 - DNA, 15 bp, Homo sapiens
tctgctatgaagaga

SEQ ID NO: 1548147 - DNA, 15 bp, Homo sapiens
ttctgctatgaagag

SEQ ID NO: 1548148 - DNA, 15 bp, Homo sapiens
tttctgctatgaaga

SEQ ID NO: 1548149 - DNA, 15 bp, Homo sapiens
ttttctgctatgaag

SEQ ID NO: 1548150 - DNA, 15 bp, Homo sapiens
cttttctgctatgaa

SEQ ID NO: 1548151 - DNA, 15 bp, Homo sapiens
acttttctgctatga

SEQ ID NO: 1548152 - DNA, 15 bp, Homo sapiens
gacttttctgctatg

SEQ ID NO: 1548153 - DNA, 15 bp, Homo sapiens
ggacttttctgctat

SEQ ID NO: 1548154 - DNA, 15 bp, Homo sapiens
tggacttttctgcta

SEQ ID NO: 1548155 - DNA, 15 bp, Homo sapiens
gtggacttttctgct

SEQ ID NO: 1548156 - DNA, 15 bp, Homo sapiens
tgtggacttttctgc

SEQ ID NO: 1548157 - DNA, 15 bp, Homo sapiens
atgtggacttttctg

SEQ ID NO: 1548158 - DNA, 15 bp, Homo sapiens
tatgtggacttttct

SEQ ID NO: 1548159 - DNA, 15 bp, Homo sapiens
ttatgtggacttttc

SEQ ID NO: 1548160 - DNA, 15 bp, Homo sapiens
cttatgtggactttt

SEQ ID NO: 1548161 - DNA, 15 bp, Homo sapiens
acttatgtggacttt

SEQ ID NO: 1548162 - DNA, 15 bp, Homo sapiens
tacttatgtggactt

SEQ ID NO: 1548163 - DNA, 15 bp, Homo sapiens
atacttatgtggact

SEQ ID NO: 1548164 - DNA, 15 bp, Homo sapiens
gatacttatgtggac

SEQ ID NO: 1548165 - DNA, 15 bp, Homo sapiens
ggatacttatgtgga

SEQ ID NO: 1548166 - DNA, 15 bp, Homo sapiens
tggatacttatgtgg

SEQ ID NO: 1548167 - DNA, 15 bp, Homo sapiens
atggatacttatgtg

SEQ ID NO: 1548168 - DNA, 15 bp, Homo sapiens
catggatacttatgt

SEQ ID NO: 1548169 - DNA, 15 bp, Homo sapiens
acatggatacttatg

SEQ ID NO: 1548170 - DNA, 15 bp, Homo sapiens
aacatggatacttat

SEQ ID NO: 1548171 - DNA, 15 bp, Homo sapiens
caacatggatactta

SEQ ID NO: 1548172 - DNA, 15 bp, Homo sapiens
gcaacatggatactt

SEQ ID NO: 1548173 - DNA, 15 bp, Homo sapiens
ggcaacatggatact

SEQ ID NO: 1548174 - DNA, 15 bp, Homo sapiens
aggcaacatggatac

SEQ ID NO: 1548175 - DNA, 15 bp, Homo sapiens
gaggcaacatggata

SEQ ID NO: 1548176 - DNA, 15 bp, Homo sapiens
ggaggcaacatggat

SEQ ID NO: 1548177 - DNA, 15 bp, Homo sapiens
aggaggcaacatgga

SEQ ID NO: 1548178 - DNA, 15 bp, Homo sapiens
aaggaggcaacatgg

SEQ ID NO: 1548179 - DNA, 15 bp, Homo sapiens
taaggaggcaacatg

SEQ ID NO: 1548180 - DNA, 15 bp, Homo sapiens
ttaaggaggcaacat

SEQ ID NO: 1548181 - DNA, 15 bp, Homo sapiens
attaaggaggcaaca

SEQ ID NO: 1548182 - DNA, 15 bp, Homo sapiens
aattaaggaggcaac

SEQ ID NO: 1548183 - DNA, 15 bp, Homo sapiens
aaattaaggaggcaa

SEQ ID NO: 1548184 - DNA, 15 bp, Homo sapiens
aaaattaaggaggca

SEQ ID NO: 1548185 - DNA, 15 bp, Homo sapiens
taaaattaaggaggc

SEQ ID NO: 1548186 - DNA, 15 bp, Homo sapiens
ctaaaattaaggagg

SEQ ID NO: 1548187 - DNA, 15 bp, Homo sapiens
tctaaaattaaggag

SEQ ID NO: 1548188 - DNA, 15 bp, Homo sapiens
ctctaaaattaagga

SEQ ID NO: 1548189 - DNA, 15 bp, Homo sapiens
tctctaaaattaagg

SEQ ID NO: 1548190 - DNA, 15 bp, Homo sapiens
ttctctaaaattaag

SEQ ID NO: 1548191 - DNA, 15 bp, Homo sapiens
gttctctaaaattaa

SEQ ID NO: 1548192 - DNA, 15 bp, Homo sapiens
agttctctaaaatta

SEQ ID NO: 1548193 - DNA, 15 bp, Homo sapiens
tagttctctaaaatt

SEQ ID NO: 1548194 - DNA, 15 bp, Homo sapiens
ctagttctctaaaat

SEQ ID NO: 1548195 - DNA, 15 bp, Homo sapiens
actagttctctaaaa

SEQ ID NO: 1548196 - DNA, 15 bp, Homo sapiens
gactagttctctaaa

SEQ ID NO: 1548197 - DNA, 15 bp, Homo sapiens
tgactagttctctaa

SEQ ID NO: 1548198 - DNA, 15 bp, Homo sapiens
atgactagttctcta

SEQ ID NO: 1548199 - DNA, 15 bp, Homo sapiens
aatgactagttctct

SEQ ID NO: 1548200 - DNA, 15 bp, Homo sapiens
aaatgactagttctc

SEQ ID NO: 1548201 - DNA, 15 bp, Homo sapiens
aaaatgactagttct

SEQ ID NO: 1548202 - DNA, 15 bp, Homo sapiens
gaaaatgactagttc

SEQ ID NO: 1548203 - DNA, 15 bp, Homo sapiens
agaaaatgactagtt

SEQ ID NO: 1548204 - DNA, 15 bp, Homo sapiens
gagaaaatgactagt

SEQ ID NO: 1548205 - DNA, 15 bp, Homo sapiens
agagaaaatgactag

SEQ ID NO: 1548206 - DNA, 15 bp, Homo sapiens
aagagaaaatgacta

SEQ ID NO: 1548207 - DNA, 15 bp, Homo sapiens
aaagagaaaatgact

SEQ ID NO: 1548208 - DNA, 15 bp, Homo sapiens
aaaagagaaaatgac

SEQ ID NO: 1548209 - DNA, 15 bp, Homo sapiens
gaaaagagaaaatga

SEQ ID NO: 1548210 - DNA, 15 bp, Homo sapiens
agaaaagagaaaatg

SEQ ID NO: 1548211 - DNA, 15 bp, Homo sapiens
aagaaaagagaaaat

SEQ ID NO: 1548212 - DNA, 15 bp, Homo sapiens
aaagaaaagagaaaa

SEQ ID NO: 1548213 - DNA, 15 bp, Homo sapiens
taaagaaaagagaaa

SEQ ID NO: 1548214 - DNA, 15 bp, Homo sapiens
ctaaagaaaagagaa

SEQ ID NO: 1548215 - DNA, 15 bp, Homo sapiens
cctaaagaaaagaga

SEQ ID NO: 1548216 - DNA, 15 bp, Homo sapiens
acctaaagaaaagag

SEQ ID NO: 1548217 - DNA, 15 bp, Homo sapiens
aacctaaagaaaaga

SEQ ID NO: 1548218 - DNA, 15 bp, Homo sapiens
caacctaaagaaaag

SEQ ID NO: 1548219 - DNA, 15 bp, Homo sapiens
tcaacctaaagaaaa

SEQ ID NO: 1548220 - DNA, 15 bp, Homo sapiens
gtcaacctaaagaaa

SEQ ID NO: 1548221 - DNA, 15 bp, Homo sapiens
agtcaacctaaagaa

SEQ ID NO: 1548222 - DNA, 15 bp, Homo sapiens
aagtcaacctaaaga

SEQ ID NO: 1548223 - DNA, 15 bp, Homo sapiens
aaagtcaacctaaag

SEQ ID NO: 1548224 - DNA, 15 bp, Homo sapiens
caaagtcaacctaaa

SEQ ID NO: 1548225 - DNA, 15 bp, Homo sapiens
tcaaagtcaacctaa

SEQ ID NO: 1548226 - DNA, 15 bp, Homo sapiens
ttcaaagtcaaccta

SEQ ID NO: 1548227 - DNA, 15 bp, Homo sapiens
gttcaaagtcaacct

SEQ ID NO: 1548228 - DNA, 15 bp, Homo sapiens
tgttcaaagtcaacc

SEQ ID NO: 1548229 - DNA, 15 bp, Homo sapiens
ttgttcaaagtcaac

SEQ ID NO: 1548230 - DNA, 15 bp, Homo sapiens
attgttcaaagtcaa

SEQ ID NO: 1548231 - DNA, 15 bp, Homo sapiens
cattgttcaaagtca

SEQ ID NO: 1548232 - DNA, 15 bp, Homo sapiens
tcattgttcaaagtc

SEQ ID NO: 1548233 - DNA, 15 bp, Homo sapiens
ttcattgttcaaagt

SEQ ID NO: 1548234 - DNA, 15 bp, Homo sapiens
attcattgttcaaag

SEQ ID NO: 1548235 - DNA, 15 bp, Homo sapiens
aattcattgttcaaa

SEQ ID NO: 1548236 - DNA, 15 bp, Homo sapiens
aaattcattgttcaa

SEQ ID NO: 1548237 - DNA, 15 bp, Homo sapiens
taaattcattgttca

SEQ ID NO: 1548238 - DNA, 15 bp, Homo sapiens
ataaattcattgttc

SEQ ID NO: 1548239 - DNA, 15 bp, Homo sapiens
aataaattcattgtt

SEQ ID NO: 1548240 - DNA, 15 bp, Homo sapiens
caataaattcattgt

SEQ ID NO: 1548241 - DNA, 15 bp, Homo sapiens
acaataaattcattg

SEQ ID NO: 1548242 - DNA, 15 bp, Homo sapiens
tacaataaattcatt

SEQ ID NO: 1548243 - DNA, 15 bp, Homo sapiens
ttacaataaattcat

SEQ ID NO: 1548244 - DNA, 15 bp, Homo sapiens
tttacaataaattca

SEQ ID NO: 1548245 - DNA, 15 bp, Homo sapiens
atttacaataaattc

SEQ ID NO: 1548246 - DNA, 15 bp, Homo sapiens
catttacaataaatt

SEQ ID NO: 1548247 - DNA, 15 bp, Homo sapiens
acatttacaataaat

SEQ ID NO: 1548248 - DNA, 15 bp, Homo sapiens
tacatttacaataaa

SEQ ID NO: 1548249 - DNA, 15 bp, Homo sapiens
gtacatttacaataa

SEQ ID NO: 1548250 - DNA, 15 bp, Homo sapiens
tgtacatttacaata

SEQ ID NO: 1548251 - DNA, 15 bp, Homo sapiens
ctgtacatttacaat

SEQ ID NO: 1548252 - DNA, 15 bp, Homo sapiens
actgtacatttacaa

SEQ ID NO: 1548253 - DNA, 15 bp, Homo sapiens
aactgtacatttaca

SEQ ID NO: 1548254 - DNA, 15 bp, Homo sapiens
gaactgtacatttac

SEQ ID NO: 1548255 - DNA, 15 bp, Homo sapiens
tgaactgtacattta

SEQ ID NO: 1548256 - DNA, 15 bp, Homo sapiens
gtgaactgtacattt

SEQ ID NO: 1548257 - DNA, 15 bp, Homo sapiens
cgtgaactgtacatt

SEQ ID NO: 1548258 - DNA, 15 bp, Homo sapiens
ccgtgaactgtacat

SEQ ID NO: 1548259 - DNA, 15 bp, Homo sapiens
tccgtgaactgtaca

SEQ ID NO: 1548260 - DNA, 15 bp, Homo sapiens
ctccgtgaactgtac

SEQ ID NO: 1548261 - DNA, 15 bp, Homo sapiens
tctccgtgaactgta

SEQ ID NO: 1548262 - DNA, 15 bp, Homo sapiens
ctctccgtgaactgt

SEQ ID NO: 1548263 - DNA, 15 bp, Homo sapiens
gctctccgtgaactg

SEQ ID NO: 1548264 - DNA, 15 bp, Homo sapiens
tgctctccgtgaact

SEQ ID NO: 1548265 - DNA, 15 bp, Homo sapiens
gtgctctccgtgaac

SEQ ID NO: 1548266 - DNA, 15 bp, Homo sapiens
tgtgctctccgtgaa

SEQ ID NO: 1548267 - DNA, 15 bp, Homo sapiens
ctgtgctctccgtga

SEQ ID NO: 1548268 - DNA, 15 bp, Homo sapiens
actgtgctctccgtg

SEQ ID NO: 1548269 - DNA, 15 bp, Homo sapiens
cactgtgctctccgt

SEQ ID NO: 1548270 - DNA, 15 bp, Homo sapiens
ccactgtgctctccg

SEQ ID NO: 1548271 - DNA, 15 bp, Homo sapiens
gccactgtgctctcc

SEQ ID NO: 1548272 - DNA, 15 bp, Homo sapiens
tgccactgtgctctc

SEQ ID NO: 1548273 - DNA, 15 bp, Homo sapiens
gtgccactgtgctct

SEQ ID NO: 1548274 - DNA, 15 bp, Homo sapiens
tgtgccactgtgctc

SEQ ID NO: 1548275 - DNA, 15 bp, Homo sapiens
atgtgccactgtgct

SEQ ID NO: 1548276 - DNA, 15 bp, Homo sapiens
tatgtgccactgtgc

SEQ ID NO: 1548277 - DNA, 15 bp, Homo sapiens
ttatgtgccactgtg

SEQ ID NO: 1548278 - DNA, 15 bp, Homo sapiens
attatgtgccactgt

SEQ ID NO: 1548279 - DNA, 15 bp, Homo sapiens
tattatgtgccactg

SEQ ID NO: 1548280 - DNA, 15 bp, Homo sapiens
gtattatgtgccact

SEQ ID NO: 1548281 - DNA, 15 bp, Homo sapiens
tgtattatgtgccac

SEQ ID NO: 1548282 - DNA, 15 bp, Homo sapiens
ctgtattatgtgcca

SEQ ID NO: 1548283 - DNA, 15 bp, Homo sapiens
cctgtattatgtgcc

SEQ ID NO: 1548284 - DNA, 15 bp, Homo sapiens
ccctgtattatgtgc

SEQ ID NO: 1548285 - DNA, 15 bp, Homo sapiens
gccctgtattatgtg

SEQ ID NO: 1548286 - DNA, 15 bp, Homo sapiens
ggccctgtattatgt

SEQ ID NO: 1548287 - DNA, 15 bp, Homo sapiens
gggccctgtattatg

SEQ ID NO: 1548288 - DNA, 15 bp, Homo sapiens
tgggccctgtattat

SEQ ID NO: 1548289 - DNA, 15 bp, Homo sapiens
ctgggccctgtatta

SEQ ID NO: 1548290 - DNA, 15 bp, Homo sapiens
tctgggccctgtatt

SEQ ID NO: 1548291 - DNA, 15 bp, Homo sapiens
ctctgggccctgtat

SEQ ID NO: 1548292 - DNA, 15 bp, Homo sapiens
actctgggccctgta

SEQ ID NO: 1548293 - DNA, 15 bp, Homo sapiens
gactctgggccctgt

SEQ ID NO: 1548294 - DNA, 15 bp, Homo sapiens
tgactctgggccctg

SEQ ID NO: 1548295 - DNA, 15 bp, Homo sapiens
ctgactctgggccct

SEQ ID NO: 1548296 - DNA, 15 bp, Homo sapiens
actgactctgggccc

SEQ ID NO: 1548297 - DNA, 15 bp, Homo sapiens
aactgactctgggcc

SEQ ID NO: 1548298 - DNA, 15 bp, Homo sapiens
gaactgactctgggc

SEQ ID NO: 1548299 - DNA, 15 bp, Homo sapiens
agaactgactctggg

SEQ ID NO: 1548300 - DNA, 15 bp, Homo sapiens
cagaactgactctgg

SEQ ID NO: 1548301 - DNA, 15 bp, Homo sapiens
tcagaactgactctg

SEQ ID NO: 1548302 - DNA, 15 bp, Homo sapiens
gtcagaactgactct

SEQ ID NO: 1548303 - DNA, 15 bp, Homo sapiens
agtcagaactgactc

SEQ ID NO: 1548304 - DNA, 15 bp, Homo sapiens
aagtcagaactgact

SEQ ID NO: 1548305 - DNA, 15 bp, Homo sapiens
aaagtcagaactgac

SEQ ID NO: 1548306 - DNA, 15 bp, Homo sapiens
caaagtcagaactga

SEQ ID NO: 1548307 - DNA, 15 bp, Homo sapiens
acaaagtcagaactg

SEQ ID NO: 1548308 - DNA, 15 bp, Homo sapiens
aacaaagtcagaact

SEQ ID NO: 1548309 - DNA, 15 bp, Homo sapiens
aaacaaagtcagaac

SEQ ID NO: 1548310 - DNA, 15 bp, Homo sapiens
aaaacaaagtcagaa

SEQ ID NO: 1548311 - DNA, 15 bp, Homo sapiens
taaaacaaagtcaga

SEQ ID NO: 1548312 - DNA, 15 bp, Homo sapiens
ttaaaacaaagtcag

SEQ ID NO: 1548313 - DNA, 15 bp, Homo sapiens
gttaaaacaaagtca

SEQ ID NO: 1548314 - DNA, 15 bp, Homo sapiens
agttaaaacaaagtc

SEQ ID NO: 1548315 - DNA, 15 bp, Homo sapiens
tagttaaaacaaagt

SEQ ID NO: 1548316 - DNA, 15 bp, Homo sapiens
ttagttaaaacaaag

SEQ ID NO: 1548317 - DNA, 15 bp, Homo sapiens
cttagttaaaacaaa

SEQ ID NO: 1548318 - DNA, 15 bp, Homo sapiens
acttagttaaaacaa

SEQ ID NO: 1548319 - DNA, 15 bp, Homo sapiens
gacttagttaaaaca

SEQ ID NO: 1548320 - DNA, 15 bp, Homo sapiens
agacttagttaaaac

SEQ ID NO: 1548321 - DNA, 15 bp, Homo sapiens
aagacttagttaaaa

SEQ ID NO: 1548322 - DNA, 15 bp, Homo sapiens
taagacttagttaaa

SEQ ID NO: 1548323 - DNA, 15 bp, Homo sapiens
ataagacttagttaa

SEQ ID NO: 1548324 - DNA, 15 bp, Homo sapiens
tataagacttagtta

SEQ ID NO: 1548325 - DNA, 15 bp, Homo sapiens
ttataagacttagtt

SEQ ID NO: 1548326 - DNA, 15 bp, Homo sapiens
tttataagacttagt

SEQ ID NO: 1548327 - DNA, 15 bp, Homo sapiens
atttataagacttag

SEQ ID NO: 1548328 - DNA, 15 bp, Homo sapiens
aatttataagactta

SEQ ID NO: 1548329 - DNA, 15 bp, Homo sapiens
aaatttataagactt

SEQ ID NO: 1548330 - DNA, 15 bp, Homo sapiens
taaatttataagact

SEQ ID NO: 1548331 - DNA, 15 bp, Homo sapiens
ttaaatttataagac

SEQ ID NO: 1548332 - DNA, 15 bp, Homo sapiens
tattaaatttataag

SEQ ID NO: 1548333 - DNA, 15 bp, Homo sapiens
atattaaatttataa

SEQ ID NO: 1548334 - DNA, 15 bp, Homo sapiens
gatattaaatttata

SEQ ID NO: 1548335 - DNA, 15 bp, Homo sapiens
ggatattaaatttat

SEQ ID NO: 1548336 - DNA, 15 bp, Homo sapiens
tggatattaaattta

SEQ ID NO: 1548337 - DNA, 15 bp, Homo sapiens
gtggatattaaattt

SEQ ID NO: 1548338 - DNA, 15 bp, Homo sapiens
agtggatattaaatt

SEQ ID NO: 1548339 - DNA, 15 bp, Homo sapiens
gagtggatattaaat

SEQ ID NO: 1548340 - DNA, 15 bp, Homo sapiens
agagtggatattaaa

SEQ ID NO: 1548341 - DNA, 15 bp, Homo sapiens
aagagtggatattaa

SEQ ID NO: 1548342 - DNA, 15 bp, Homo sapiens
aaagagtggatatta

SEQ ID NO: 1548343 - DNA, 15 bp, Homo sapiens
taaagagtggatatt

SEQ ID NO: 1548344 - DNA, 15 bp, Homo sapiens
ataaagagtggatat

SEQ ID NO: 1548345 - DNA, 15 bp, Homo sapiens
tataaagagtggata

SEQ ID NO: 1548346 - DNA, 15 bp, Homo sapiens
atataaagagtggat

SEQ ID NO: 1548347 - DNA, 15 bp, Homo sapiens
aatataaagagtgga

SEQ ID NO: 1548348 - DNA, 15 bp, Homo sapiens
aaatataaagagtgg

SEQ ID NO: 1548349 - DNA, 15 bp, Homo sapiens
caaatataaagagtg

SEQ ID NO: 1548350 - DNA, 15 bp, Homo sapiens
acaaatataaagagt

SEQ ID NO: 1548351 - DNA, 15 bp, Homo sapiens
gacaaatataaagag

SEQ ID NO: 1548352 - DNA, 15 bp, Homo sapiens
ggacaaatataaaga

SEQ ID NO: 1548353 - DNA, 15 bp, Homo sapiens
tggacaaatataaag

SEQ ID NO: 1548354 - DNA, 15 bp, Homo sapiens
atggacaaatataaa

SEQ ID NO: 1548355 - DNA, 15 bp, Homo sapiens
gatggacaaatataa

SEQ ID NO: 1548356 - DNA, 15 bp, Homo sapiens
agatggacaaatata

SEQ ID NO: 1548357 - DNA, 15 bp, Homo sapiens
aagatggacaaatat

SEQ ID NO: 1548358 - DNA, 15 bp, Homo sapiens
aaagatggacaaata

SEQ ID NO: 1548359 - DNA, 15 bp, Homo sapiens
taaagatggacaaat

SEQ ID NO: 1548360 - DNA, 15 bp, Homo sapiens
ataaagatggacaaa

SEQ ID NO: 1548361 - DNA, 15 bp, Homo sapiens
tataaagatggacaa

SEQ ID NO: 1548362 - DNA, 15 bp, Homo sapiens
atataaagatggaca

SEQ ID NO: 1548363 - DNA, 15 bp, Homo sapiens
gatataaagatggac

SEQ ID NO: 1548364 - DNA, 15 bp, Homo sapiens
ggatataaagatgga

SEQ ID NO: 1548365 - DNA, 15 bp, Homo sapiens
aggatataaagatgg

SEQ ID NO: 1548366 - DNA, 15 bp, Homo sapiens
taggatataaagatg

SEQ ID NO: 1548367 - DNA, 15 bp, Homo sapiens
ataggatataaagat

SEQ ID NO: 1548368 - DNA, 15 bp, Homo sapiens
tataggatataaaga

SEQ ID NO: 1548369 - DNA, 15 bp, Homo sapiens
ctataggatataaag

SEQ ID NO: 1548370 - DNA, 15 bp, Homo sapiens
actataggatataaa

SEQ ID NO: 1548371 - DNA, 15 bp, Homo sapiens
aactataggatataa

SEQ ID NO: 1548372 - DNA, 15 bp, Homo sapiens
aaactataggatata

SEQ ID NO: 1548373 - DNA, 15 bp, Homo sapiens
aaaactataggatat

SEQ ID NO: 1548374 - DNA, 15 bp, Homo sapiens
taaaactataggata

SEQ ID NO: 1548375 - DNA, 15 bp, Homo sapiens
ataaaactataggat

SEQ ID NO: 1548376 - DNA, 15 bp, Homo sapiens
tataaaactatagga

SEQ ID NO: 1548377 - DNA, 15 bp, Homo sapiens
ttataaaactatagg

SEQ ID NO: 1548378 - DNA, 15 bp, Homo sapiens
tttataaaactatag

SEQ ID NO: 1548379 - DNA, 15 bp, Homo sapiens
atttataaaactata

SEQ ID NO: 1548380 - DNA, 15 bp, Homo sapiens
catttataaaactat

SEQ ID NO: 1548381 - DNA, 15 bp, Homo sapiens
acatttataaaacta

SEQ ID NO: 1548382 - DNA, 15 bp, Homo sapiens
aacatttataaaact

SEQ ID NO: 1548383 - DNA, 15 bp, Homo sapiens
caacatttataaaac

SEQ ID NO: 1548384 - DNA, 15 bp, Homo sapiens
tcaacatttataaaa

SEQ ID NO: 1548385 - DNA, 15 bp, Homo sapiens
atcaacatttataaa

SEQ ID NO: 1548386 - DNA, 15 bp, Homo sapiens
gatcaacatttataa

SEQ ID NO: 1548387 - DNA, 15 bp, Homo sapiens
agatcaacatttata

SEQ ID NO: 1548388 - DNA, 15 bp, Homo sapiens
aagatcaacatttat

SEQ ID NO: 1548389 - DNA, 15 bp, Homo sapiens
gaagatcaacattta

SEQ ID NO: 1548390 - DNA, 15 bp, Homo sapiens
agaagatcaacattt

SEQ ID NO: 1548391 - DNA, 15 bp, Homo sapiens
gagaagatcaacatt

SEQ ID NO: 1548392 - DNA, 15 bp, Homo sapiens
ggagaagatcaacat

SEQ ID NO: 1548393 - DNA, 15 bp, Homo sapiens
gggagaagatcaaca

SEQ ID NO: 1548394 - DNA, 15 bp, Homo sapiens
tgggagaagatcaac

SEQ ID NO: 1548395 - DNA, 15 bp, Homo sapiens
ctgggagaagatcaa

SEQ ID NO: 1548396 - DNA, 15 bp, Homo sapiens
gctgggagaagatca

SEQ ID NO: 1548397 - DNA, 15 bp, Homo sapiens
tgctgggagaagatc

SEQ ID NO: 1548398 - DNA, 15 bp, Homo sapiens
atgctgggagaagat

SEQ ID NO: 1548399 - DNA, 15 bp, Homo sapiens
tatgctgggagaaga

SEQ ID NO: 1548400 - DNA, 15 bp, Homo sapiens
atatgctgggagaag

SEQ ID NO: 1548401 - DNA, 15 bp, Homo sapiens
aatatgctgggagaa

SEQ ID NO: 1548402 - DNA, 15 bp, Homo sapiens
aaatatgctgggaga

SEQ ID NO: 1548403 - DNA, 15 bp, Homo sapiens
gaaatatgctgggag

SEQ ID NO: 1548404 - DNA, 15 bp, Homo sapiens
ggaaatatgctggga

SEQ ID NO: 1548405 - DNA, 15 bp, Homo sapiens
aggaaatatgctggg

SEQ ID NO: 1548406 - DNA, 15 bp, Homo sapiens
caggaaatatgctgg

SEQ ID NO: 1548407 - DNA, 15 bp, Homo sapiens
tcaggaaatatgctg

SEQ ID NO: 1548408 - DNA, 15 bp, Homo sapiens
gtcaggaaatatgct

SEQ ID NO: 1548409 - DNA, 15 bp, Homo sapiens
ggtcaggaaatatgc

SEQ ID NO: 1548410 - DNA, 15 bp, Homo sapiens
aggtcaggaaatatg

SEQ ID NO: 1548411 - DNA, 15 bp, Homo sapiens
aaggtcaggaaatat

SEQ ID NO: 1548412 - DNA, 15 bp, Homo sapiens
aaaggtcaggaaata

SEQ ID NO: 1548413 - DNA, 15 bp, Homo sapiens
aaaaggtcaggaaat

SEQ ID NO: 1548414 - DNA, 15 bp, Homo sapiens
gaaaaggtcaggaaa

SEQ ID NO: 1548415 - DNA, 15 bp, Homo sapiens
agaaaaggtcaggaa

SEQ ID NO: 1548416 - DNA, 15 bp, Homo sapiens
aagaaaaggtcagga

SEQ ID NO: 1548417 - DNA, 15 bp, Homo sapiens
gaagaaaaggtcagg

SEQ ID NO: 1548418 - DNA, 15 bp, Homo sapiens
ggaagaaaaggtcag

SEQ ID NO: 1548419 - DNA, 15 bp, Homo sapiens
gggaagaaaaggtca

SEQ ID NO: 1548420 - DNA, 15 bp, Homo sapiens
agggaagaaaaggtc

SEQ ID NO: 1548421 - DNA, 15 bp, Homo sapiens
aagggaagaaaaggt

SEQ ID NO: 1548422 - DNA, 15 bp, Homo sapiens
aaagggaagaaaagg

SEQ ID NO: 1548423 - DNA, 15 bp, Homo sapiens
gaaagggaagaaaag

SEQ ID NO: 1548424 - DNA, 15 bp, Homo sapiens
ggaaagggaagaaaa

SEQ ID NO: 1548425 - DNA, 15 bp, Homo sapiens
aggaaagggaagaaa

SEQ ID NO: 1548426 - DNA, 15 bp, Homo sapiens
aaggaaagggaagaa

SEQ ID NO: 1548427 - DNA, 15 bp, Homo sapiens
aaaggaaagggaaga

SEQ ID NO: 1548428 - DNA, 15 bp, Homo sapiens
gaaaggaaagggaag

SEQ ID NO: 1548429 - DNA, 15 bp, Homo sapiens
ggaaaggaaagggaa

SEQ ID NO: 1548430 - DNA, 15 bp, Homo sapiens
gggaaaggaaaggga

SEQ ID NO: 1548431 - DNA, 15 bp, Homo sapiens
agggaaaggaaaggg

SEQ ID NO: 1548432 - DNA, 15 bp, Homo sapiens
cagggaaaggaaagg

SEQ ID NO: 1548433 - DNA, 15 bp, Homo sapiens
acagggaaaggaaag

SEQ ID NO: 1548434 - DNA, 15 bp, Homo sapiens
tacagggaaaggaaa

SEQ ID NO: 1548435 - DNA, 15 bp, Homo sapiens
ttacagggaaaggaa

SEQ ID NO: 1548436 - DNA, 15 bp, Homo sapiens
attacagggaaagga

SEQ ID NO: 1548437 - DNA, 15 bp, Homo sapiens
tattacagggaaagg

SEQ ID NO: 1548438 - DNA, 15 bp, Homo sapiens
atattacagggaaag

SEQ ID NO: 1548439 - DNA, 15 bp, Homo sapiens
tatattacagggaaa

SEQ ID NO: 1548440 - DNA, 15 bp, Homo sapiens
atatattacagggaa

SEQ ID NO: 1548441 - DNA, 15 bp, Homo sapiens
tatatattacaggga

SEQ ID NO: 1548442 - DNA, 15 bp, Homo sapiens
ttatatattacaggg

SEQ ID NO: 1548443 - DNA, 15 bp, Homo sapiens
tttatatattacagg

SEQ ID NO: 1548444 - DNA, 15 bp, Homo sapiens
ttttatatattacag

SEQ ID NO: 1548445 - DNA, 15 bp, Homo sapiens
gttttatatattaca

SEQ ID NO: 1548446 - DNA, 15 bp, Homo sapiens
agttttatatattac

SEQ ID NO: 1548447 - DNA, 15 bp, Homo sapiens
aagttttatatatta

SEQ ID NO: 1548448 - DNA, 15 bp, Homo sapiens
aaagttttatatatt

SEQ ID NO: 1548449 - DNA, 15 bp, Homo sapiens
aaaagttttatatat

SEQ ID NO: 1548450 - DNA, 15 bp, Homo sapiens
aaaaagttttatata

SEQ ID NO: 1548451 - DNA, 15 bp, Homo sapiens
aaaaaagttttatat

SEQ ID NO: 1548452 - DNA, 15 bp, Homo sapiens
aaaaaaagttttata

SEQ ID NO: 1548453 - DNA, 15 bp, Homo sapiens
aaaaaaaagttttat

SEQ ID NO: 1548454 - DNA, 15 bp, Homo sapiens
gaaaaaaaagtttta

SEQ ID NO: 1548455 - DNA, 15 bp, Homo sapiens
agaaaaaaaagtttt

SEQ ID NO: 1548456 - DNA, 15 bp, Homo sapiens
cagaaaaaaaagttt

SEQ ID NO: 1548457 - DNA, 15 bp, Homo sapiens
gcagaaaaaaaagtt

SEQ ID NO: 1548458 - DNA, 15 bp, Homo sapiens
tgcagaaaaaaaagt

SEQ ID NO: 1548459 - DNA, 15 bp, Homo sapiens
atgcagaaaaaaaag

SEQ ID NO: 1548460 - DNA, 15 bp, Homo sapiens
aatgcagaaaaaaaa

SEQ ID NO: 1548461 - DNA, 15 bp, Homo sapiens
gaatgcagaaaaaaa

SEQ ID NO: 1548462 - DNA, 15 bp, Homo sapiens
tgaatgcagaaaaaa

SEQ ID NO: 1548463 - DNA, 15 bp, Homo sapiens
ttgaatgcagaaaaa

SEQ ID NO: 1548464 - DNA, 15 bp, Homo sapiens
tttgaatgcagaaaa

SEQ ID NO: 1548465 - DNA, 15 bp, Homo sapiens
gtttgaatgcagaaa

SEQ ID NO: 1548466 - DNA, 15 bp, Homo sapiens
tgtttgaatgcagaa

SEQ ID NO: 1548467 - DNA, 15 bp, Homo sapiens
gtgtttgaatgcaga

SEQ ID NO: 1548468 - DNA, 15 bp, Homo sapiens
tgtgtttgaatgcag

SEQ ID NO: 1548469 - DNA, 15 bp, Homo sapiens
atgtgtttgaatgca

SEQ ID NO: 1548470 - DNA, 15 bp, Homo sapiens
aatgtgtttgaatgc

SEQ ID NO: 1548471 - DNA, 15 bp, Homo sapiens
aaatgtgtttgaatg

SEQ ID NO: 1548472 - DNA, 15 bp, Homo sapiens
gaaatgtgtttgaat

SEQ ID NO: 1548473 - DNA, 15 bp, Homo sapiens
agaaatgtgtttgaa

SEQ ID NO: 1548474 - DNA, 15 bp, Homo sapiens
aagaaatgtgtttga

SEQ ID NO: 1548475 - DNA, 15 bp, Homo sapiens
caagaaatgtgtttg

SEQ ID NO: 1548476 - DNA, 15 bp, Homo sapiens
tcaagaaatgtgttt

SEQ ID NO: 1548477 - DNA, 15 bp, Homo sapiens
gtcaagaaatgtgtt

SEQ ID NO: 1548478 - DNA, 15 bp, Homo sapiens
agtcaagaaatgtgt

SEQ ID NO: 1548479 - DNA, 15 bp, Homo sapiens
aagtcaagaaatgtg

SEQ ID NO: 1548480 - DNA, 15 bp, Homo sapiens
aaagtcaagaaatgt

SEQ ID NO: 1548481 - DNA, 15 bp, Homo sapiens
aaaagtcaagaaatg

SEQ ID NO: 1548482 - DNA, 15 bp, Homo sapiens
taaaagtcaagaaat

SEQ ID NO: 1548483 - DNA, 15 bp, Homo sapiens
ataaaagtcaagaaa

SEQ ID NO: 1548484 - DNA, 15 bp, Homo sapiens
tataaaagtcaagaa

SEQ ID NO: 1548485 - DNA, 15 bp, Homo sapiens
atataaaagtcaaga

SEQ ID NO: 1548486 - DNA, 15 bp, Homo sapiens
tatataaaagtcaag

SEQ ID NO: 1548487 - DNA, 15 bp, Homo sapiens
atatataaaagtcaa

SEQ ID NO: 1548488 - DNA, 15 bp, Homo sapiens
aatatataaaagtca

SEQ ID NO: 1548489 - DNA, 15 bp, Homo sapiens
taatatataaaagtc

SEQ ID NO: 1548490 - DNA, 15 bp, Homo sapiens
ctaatatataaaagt

SEQ ID NO: 1548491 - DNA, 15 bp, Homo sapiens
tctaatatataaaag

SEQ ID NO: 1548492 - DNA, 15 bp, Homo sapiens
atctaatatataaaa

SEQ ID NO: 1548493 - DNA, 15 bp, Homo sapiens
tatctaatatataaa

SEQ ID NO: 1548494 - DNA, 15 bp, Homo sapiens
ttatctaatatataa

SEQ ID NO: 1548495 - DNA, 15 bp, Homo sapiens
attatctaatatata

SEQ ID NO: 1548496 - DNA, 15 bp, Homo sapiens
aattatctaatatat

SEQ ID NO: 1548497 - DNA, 15 bp, Homo sapiens
taattatctaatata

SEQ ID NO: 1548498 - DNA, 15 bp, Homo sapiens
ttaattatctaatat

SEQ ID NO: 1548499 - DNA, 15 bp, Homo sapiens
tttaattatctaata

SEQ ID NO: 1548500 - DNA, 15 bp, Homo sapiens
ttttaattatctaat

SEQ ID NO: 1548501 - DNA, 15 bp, Homo sapiens
cttttaattatctaa

SEQ ID NO: 1548502 - DNA, 15 bp, Homo sapiens
gcttttaattatcta

SEQ ID NO: 1548503 - DNA, 15 bp, Homo sapiens
agcttttaattatct

SEQ ID NO: 1548504 - DNA, 15 bp, Homo sapiens
aagcttttaattatc

SEQ ID NO: 1548505 - DNA, 15 bp, Homo sapiens
gaagcttttaattat

SEQ ID NO: 1548506 - DNA, 15 bp, Homo sapiens
tgaagcttttaatta

SEQ ID NO: 1548507 - DNA, 15 bp, Homo sapiens
ctgaagcttttaatt

SEQ ID NO: 1548508 - DNA, 15 bp, Homo sapiens
gctgaagcttttaat

SEQ ID NO: 1548509 - DNA, 15 bp, Homo sapiens
tgctgaagcttttaa

SEQ ID NO: 1548510 - DNA, 15 bp, Homo sapiens
ttgctgaagctttta

SEQ ID NO: 1548511 - DNA, 15 bp, Homo sapiens
attgctgaagctttt

SEQ ID NO: 1548512 - DNA, 15 bp, Homo sapiens
aattgctgaagcttt

SEQ ID NO: 1548513 - DNA, 15 bp, Homo sapiens
gaattgctgaagctt

SEQ ID NO: 1548514 - DNA, 15 bp, Homo sapiens
tgaattgctgaagct

SEQ ID NO: 1548515 - DNA, 15 bp, Homo sapiens
gtgaattgctgaagc

SEQ ID NO: 1548516 - DNA, 15 bp, Homo sapiens
agtgaattgctgaag

SEQ ID NO: 1548517 - DNA, 15 bp, Homo sapiens
tagtgaattgctgaa

SEQ ID NO: 1548518 - DNA, 15 bp, Homo sapiens
ttagtgaattgctga

SEQ ID NO: 1548519 - DNA, 15 bp, Homo sapiens
cttagtgaattgctg

SEQ ID NO: 1548520 - DNA, 15 bp, Homo sapiens
tcttagtgaattgct

SEQ ID NO: 1548521 - DNA, 15 bp, Homo sapiens
gtcttagtgaattgc

SEQ ID NO: 1548522 - DNA, 15 bp, Homo sapiens
agtcttagtgaattg

SEQ ID NO: 1548523 - DNA, 15 bp, Homo sapiens
gagtcttagtgaatt

SEQ ID NO: 1548524 - DNA, 15 bp, Homo sapiens
agagtcttagtgaat

SEQ ID NO: 1548525 - DNA, 15 bp, Homo sapiens
aagagtcttagtgaa

SEQ ID NO: 1548526 - DNA, 15 bp, Homo sapiens
aaagagtcttagtga

SEQ ID NO: 1548527 - DNA, 15 bp, Homo sapiens
caaagagtcttagtg

SEQ ID NO: 1548528 - DNA, 15 bp, Homo sapiens
acaaagagtcttagt

SEQ ID NO: 1548529 - DNA, 15 bp, Homo sapiens
gacaaagagtcttag

SEQ ID NO: 1548530 - DNA, 15 bp, Homo sapiens
tgacaaagagtctta

SEQ ID NO: 1548531 - DNA, 15 bp, Homo sapiens
ctgacaaagagtctt

SEQ ID NO: 1548532 - DNA, 15 bp, Homo sapiens
cctgacaaagagtct

SEQ ID NO: 1548533 - DNA, 15 bp, Homo sapiens
acctgacaaagagtc

SEQ ID NO: 1548534 - DNA, 15 bp, Homo sapiens
tacctgacaaagagt

SEQ ID NO: 1548535 - DNA, 15 bp, Homo sapiens
ttacctgacaaagag

SEQ ID NO: 1548536 - DNA, 15 bp, Homo sapiens
cttacctgacaaaga

SEQ ID NO: 1548537 - DNA, 15 bp, Homo sapiens
tcttacctgacaaag

SEQ ID NO: 1548538 - DNA, 15 bp, Homo sapiens
ctcttacctgacaaa

SEQ ID NO: 1548539 - DNA, 15 bp, Homo sapiens
tctcttacctgacaa

SEQ ID NO: 1548540 - DNA, 15 bp, Homo sapiens
atctcttacctgaca

SEQ ID NO: 1548541 - DNA, 15 bp, Homo sapiens
catctcttacctgac

SEQ ID NO: 1548542 - DNA, 15 bp, Homo sapiens
acatctcttacctga

SEQ ID NO: 1548543 - DNA, 15 bp, Homo sapiens
tacatctcttacctg

SEQ ID NO: 1548544 - DNA, 15 bp, Homo sapiens
ctacatctcttacct

SEQ ID NO: 1548545 - DNA, 15 bp, Homo sapiens
cctacatctcttacc

SEQ ID NO: 1548546 - DNA, 15 bp, Homo sapiens
tcctacatctcttac

SEQ ID NO: 1548547 - DNA, 15 bp, Homo sapiens
gtcctacatctctta

SEQ ID NO: 1548548 - DNA, 15 bp, Homo sapiens
agtcctacatctctt

SEQ ID NO: 1548549 - DNA, 15 bp, Homo sapiens
tagtcctacatctct

SEQ ID NO: 1548550 - DNA, 15 bp, Homo sapiens
atagtcctacatctc

SEQ ID NO: 1548551 - DNA, 15 bp, Homo sapiens
tatagtcctacatct

SEQ ID NO: 1548552 - DNA, 15 bp, Homo sapiens
ttatagtcctacatc

SEQ ID NO: 1548553 - DNA, 15 bp, Homo sapiens
atgtgccatggtgcc

SEQ ID NO: 1548554 - DNA, 15 bp, Homo sapiens
catgtgccatggtgc

SEQ ID NO: 1548555 - DNA, 15 bp, Homo sapiens
gcatgtgccatggtg

SEQ ID NO: 1548556 - DNA, 15 bp, Homo sapiens
ggcatgtgccatggt

SEQ ID NO: 1548557 - DNA, 15 bp, Homo sapiens
aggcatgtgccatgg

SEQ ID NO: 1548558 - DNA, 15 bp, Homo sapiens
caggcatgtgccatg

SEQ ID NO: 1548559 - DNA, 15 bp, Homo sapiens
acaggcatgtgccat

SEQ ID NO: 1548560 - DNA, 15 bp, Homo sapiens
gtgggattacaggca

SEQ ID NO: 1548561 - DNA, 15 bp, Homo sapiens
ggtgggattacaggc

SEQ ID NO: 1548562 - DNA, 15 bp, Homo sapiens
aggtgggattacagg

SEQ ID NO: 1548563 - DNA, 15 bp, Homo sapiens
caggtgggattacag

SEQ ID NO: 1548564 - DNA, 15 bp, Homo sapiens
gcaggtgggattaca

SEQ ID NO: 1548565 - DNA, 15 bp, Homo sapiens
agcaggtgggattac

SEQ ID NO: 1548566 - DNA, 15 bp, Homo sapiens
gagcaggtgggatta

SEQ ID NO: 1548567 - DNA, 15 bp, Homo sapiens
tgagcaggtgggatt

SEQ ID NO: 1548568 - DNA, 15 bp, Homo sapiens
ctgagcaggtgggat

SEQ ID NO: 1548569 - DNA, 15 bp, Homo sapiens
cctgagcaggtggga

SEQ ID NO: 1548570 - DNA, 15 bp, Homo sapiens
tcctgagcaggtggg

SEQ ID NO: 1548571 - DNA, 15 bp, Homo sapiens
ctcctgagcaggtgg

SEQ ID NO: 1548572 - DNA, 15 bp, Homo sapiens
cctcctgagcaggtg

SEQ ID NO: 1548573 - DNA, 15 bp, Homo sapiens
tcctcctgagcaggt

SEQ ID NO: 1548574 - DNA, 15 bp, Homo sapiens
atcctcctgagcagg

SEQ ID NO: 1548575 - DNA, 15 bp, Homo sapiens
gatcctcctgagcag

SEQ ID NO: 1548576 - DNA, 15 bp, Homo sapiens
cgatcctcctgagca

SEQ ID NO: 1548577 - DNA, 15 bp, Homo sapiens
gcgatcctcctgagc

SEQ ID NO: 1548578 - DNA, 15 bp, Homo sapiens
agcgatcctcctgag

SEQ ID NO: 1548579 - DNA, 15 bp, Homo sapiens
tagcgatcctcctga

SEQ ID NO: 1548580 - DNA, 15 bp, Homo sapiens
ttagcgatcctcctg

SEQ ID NO: 1548581 - DNA, 15 bp, Homo sapiens
cttagcgatcctcct

SEQ ID NO: 1548582 - DNA, 15 bp, Homo sapiens
gcttagcgatcctcc

SEQ ID NO: 1548583 - DNA, 15 bp, Homo sapiens
ggcttagcgatcctc

SEQ ID NO: 1548584 - DNA, 15 bp, Homo sapiens
gggcttagcgatcct

SEQ ID NO: 1548585 - DNA, 15 bp, Homo sapiens
tgggcttagcgatcc

SEQ ID NO: 1548586 - DNA, 15 bp, Homo sapiens
ctgggcttagcgatc

SEQ ID NO: 1548587 - DNA, 15 bp, Homo sapiens
cctgggcttagcgat

SEQ ID NO: 1548588 - DNA, 15 bp, Homo sapiens
tcctgggcttagcga

SEQ ID NO: 1548589 - DNA, 15 bp, Homo sapiens
ctcctgggcttagcg

SEQ ID NO: 1548590 - DNA, 15 bp, Homo sapiens
actcctgggcttagc

SEQ ID NO: 1548591 - DNA, 15 bp, Homo sapiens
cctcactatgttgtc

SEQ ID NO: 1548592 - DNA, 15 bp, Homo sapiens
gcctcactatgttgt

SEQ ID NO: 1548593 - DNA, 15 bp, Homo sapiens
ggcctcactatgttg

SEQ ID NO: 1548594 - DNA, 15 bp, Homo sapiens
gggcctcactatgtt

SEQ ID NO: 1548595 - DNA, 15 bp, Homo sapiens
ggggcctcactatgt

SEQ ID NO: 1548596 - DNA, 15 bp, Homo sapiens
gggggcctcactatg

SEQ ID NO: 1548597 - DNA, 15 bp, Homo sapiens
tgggggcctcactat

SEQ ID NO: 1548598 - DNA, 15 bp, Homo sapiens
atgggggcctcacta

SEQ ID NO: 1548599 - DNA, 15 bp, Homo sapiens
gatgggggcctcact

SEQ ID NO: 1548600 - DNA, 15 bp, Homo sapiens
agatgggggcctcac

SEQ ID NO: 1548601 - DNA, 15 bp, Homo sapiens
gagatgggggcctca

SEQ ID NO: 1548602 - DNA, 15 bp, Homo sapiens
tgagatgggggcctc

SEQ ID NO: 1548603 - DNA, 15 bp, Homo sapiens
ttgagatgggggcct

SEQ ID NO: 1548604 - DNA, 15 bp, Homo sapiens
tttgagatgggggcc

SEQ ID NO: 1548605 - DNA, 15 bp, Homo sapiens
ttttgagatgggggc

SEQ ID NO: 1548606 - DNA, 15 bp, Homo sapiens
tttttgagatggggg

SEQ ID NO: 1548607 - DNA, 15 bp, Homo sapiens
ctttttgagatgggg

SEQ ID NO: 1548608 - DNA, 15 bp, Homo sapiens
tctttttgagatggg

SEQ ID NO: 1548609 - DNA, 15 bp, Homo sapiens
ttctttttgagatgg

SEQ ID NO: 1548610 - DNA, 15 bp, Homo sapiens
attctttttgagatg

SEQ ID NO: 1548611 - DNA, 15 bp, Homo sapiens
tattctttttgagat

SEQ ID NO: 1548612 - DNA, 15 bp, Homo sapiens
atattctttttgaga

SEQ ID NO: 1548613 - DNA, 15 bp, Homo sapiens
aatattctttttgag

SEQ ID NO: 1548614 - DNA, 15 bp, Homo sapiens
aaatattctttttga

SEQ ID NO: 1548615 - DNA, 15 bp, Homo sapiens
taaatattctttttg

SEQ ID NO: 1548616 - DNA, 15 bp, Homo sapiens
ataaatattcttttt

SEQ ID NO: 1548617 - DNA, 15 bp, Homo sapiens
tataaatattctttt

SEQ ID NO: 1548618 - DNA, 15 bp, Homo sapiens
atataaatattcttt

SEQ ID NO: 1548619 - DNA, 15 bp, Homo sapiens
aatataaatattctt

SEQ ID NO: 1548620 - DNA, 15 bp, Homo sapiens
aaatataaatattct

SEQ ID NO: 1548621 - DNA, 15 bp, Homo sapiens
aaaatataaatattc

SEQ ID NO: 1548622 - DNA, 15 bp, Homo sapiens
taaaatataaatatt

SEQ ID NO: 1548623 - DNA, 15 bp, Homo sapiens
ttaaaatataaatat

SEQ ID NO: 1548624 - DNA, 15 bp, Homo sapiens
cttaaaatataaata

SEQ ID NO: 1548625 - DNA, 15 bp, Homo sapiens
tcttaaaatataaat

SEQ ID NO: 1548626 - DNA, 15 bp, Homo sapiens
ttcttaaaatataaa

SEQ ID NO: 1548627 - DNA, 15 bp, Homo sapiens
tttcttaaaatataa

SEQ ID NO: 1548628 - DNA, 15 bp, Homo sapiens
atttcttaaaatata

SEQ ID NO: 1548629 - DNA, 15 bp, Homo sapiens
aatttcttaaaatat

SEQ ID NO: 1548630 - DNA, 15 bp, Homo sapiens
gaatttcttaaaata

SEQ ID NO: 1548631 - DNA, 15 bp, Homo sapiens
tgaatttcttaaaat

SEQ ID NO: 1548632 - DNA, 15 bp, Homo sapiens
gtgaatttcttaaaa

SEQ ID NO: 1548633 - DNA, 15 bp, Homo sapiens
agtgaatttcttaaa

SEQ ID NO: 1548634 - DNA, 15 bp, Homo sapiens
tagtgaatttcttaa

SEQ ID NO: 1548635 - DNA, 15 bp, Homo sapiens
ttagtgaatttctta

SEQ ID NO: 1548636 - DNA, 15 bp, Homo sapiens
attagtgaatttctt

SEQ ID NO: 1548637 - DNA, 15 bp, Homo sapiens
tattagtgaatttct

SEQ ID NO: 1548638 - DNA, 15 bp, Homo sapiens
ttattagtgaatttc

SEQ ID NO: 1548639 - DNA, 15 bp, Homo sapiens
tttattagtgaattt

SEQ ID NO: 1548640 - DNA, 15 bp, Homo sapiens
ttttattagtgaatt

SEQ ID NO: 1548641 - DNA, 15 bp, Homo sapiens
cttttattagtgaat

SEQ ID NO: 1548642 - DNA, 15 bp, Homo sapiens
gcttttattagtgaa

SEQ ID NO: 1548643 - DNA, 15 bp, Homo sapiens
ggcttttattagtga

SEQ ID NO: 1548644 - DNA, 15 bp, Homo sapiens
tggcttttattagtg

SEQ ID NO: 1548645 - DNA, 15 bp, Homo sapiens
ttggcttttattagt

SEQ ID NO: 1548646 - DNA, 15 bp, Homo sapiens
attggcttttattag

SEQ ID NO: 1548647 - DNA, 15 bp, Homo sapiens
aattggcttttatta

SEQ ID NO: 1548648 - DNA, 15 bp, Homo sapiens
caattggcttttatt

SEQ ID NO: 1548649 - DNA, 15 bp, Homo sapiens
tcaattggcttttat

SEQ ID NO: 1548650 - DNA, 15 bp, Homo sapiens
ttcaattggctttta

SEQ ID NO: 1548651 - DNA, 15 bp, Homo sapiens
tttcaattggctttt

SEQ ID NO: 1548652 - DNA, 15 bp, Homo sapiens
ctttcaattggcttt

SEQ ID NO: 1548653 - DNA, 15 bp, Homo sapiens
tctttcaattggctt

SEQ ID NO: 1548654 - DNA, 15 bp, Homo sapiens
ttctttcaattggct

SEQ ID NO: 1548655 - DNA, 15 bp, Homo sapiens
attctttcaattggc

SEQ ID NO: 1548656 - DNA, 15 bp, Homo sapiens
tattctttcaattgg

SEQ ID NO: 1548657 - DNA, 15 bp, Homo sapiens
ctattctttcaattg

SEQ ID NO: 1548658 - DNA, 15 bp, Homo sapiens
actattctttcaatt

SEQ ID NO: 1548659 - DNA, 15 bp, Homo sapiens
cactattctttcaat

SEQ ID NO: 1548660 - DNA, 15 bp, Homo sapiens
tcactattctttcaa

SEQ ID NO: 1548661 - DNA, 15 bp, Homo sapiens
ctcactattctttca

SEQ ID NO: 1548662 - DNA, 15 bp, Homo sapiens
tctcactattctttc

SEQ ID NO: 1548663 - DNA, 15 bp, Homo sapiens
atctcactattcttt

SEQ ID NO: 1548664 - DNA, 15 bp, Homo sapiens
tatctcactattctt

SEQ ID NO: 1548665 - DNA, 15 bp, Homo sapiens
ttatctcactattct

SEQ ID NO: 1548666 - DNA, 15 bp, Homo sapiens
attatctcactattc

SEQ ID NO: 1548667 - DNA, 15 bp, Homo sapiens
gattatctcactatt

SEQ ID NO: 1548668 - DNA, 15 bp, Homo sapiens
tgattatctcactat

SEQ ID NO: 1548669 - DNA, 15 bp, Homo sapiens
ctgattatctcacta

SEQ ID NO: 1548670 - DNA, 15 bp, Homo sapiens
actgattatctcact

SEQ ID NO: 1548671 - DNA, 15 bp, Homo sapiens
aactgattatctcac

SEQ ID NO: 1548672 - DNA, 15 bp, Homo sapiens
taactgattatctca

SEQ ID NO: 1548673 - DNA, 15 bp, Homo sapiens
ataactgattatctc

SEQ ID NO: 1548674 - DNA, 15 bp, Homo sapiens
gataactgattatct

SEQ ID NO: 1548675 - DNA, 15 bp, Homo sapiens
tgataactgattatc

SEQ ID NO: 1548676 - DNA, 15 bp, Homo sapiens
ctgataactgattat

SEQ ID NO: 1548677 - DNA, 15 bp, Homo sapiens
gctgataactgatta

SEQ ID NO: 1548678 - DNA, 15 bp, Homo sapiens
agctgataactgatt

SEQ ID NO: 1548679 - DNA, 15 bp, Homo sapiens
aagctgataactgat

SEQ ID NO: 1548680 - DNA, 15 bp, Homo sapiens
caagctgataactga

SEQ ID NO: 1548681 - DNA, 15 bp, Homo sapiens
ccaagctgataactg

SEQ ID NO: 1548682 - DNA, 15 bp, Homo sapiens
gccaagctgataact

SEQ ID NO: 1548683 - DNA, 15 bp, Homo sapiens
tgccaagctgataac

SEQ ID NO: 1548684 - DNA, 15 bp, Homo sapiens
ttgccaagctgataa

SEQ ID NO: 1548685 - DNA, 15 bp, Homo sapiens
tttgccaagctgata

SEQ ID NO: 1548686 - DNA, 15 bp, Homo sapiens
ctttgccaagctgat

SEQ ID NO: 1548687 - DNA, 15 bp, Homo sapiens
tctttgccaagctga

SEQ ID NO: 1548688 - DNA, 15 bp, Homo sapiens
atctttgccaagctg

SEQ ID NO: 1548689 - DNA, 15 bp, Homo sapiens
aatctttgccaagct

SEQ ID NO: 1548690 - DNA, 15 bp, Homo sapiens
aaatctttgccaagc

SEQ ID NO: 1548691 - DNA, 15 bp, Homo sapiens
aaaatctttgccaag

SEQ ID NO: 1548692 - DNA, 15 bp, Homo sapiens
aaaaatctttgccaa

SEQ ID NO: 1548693 - DNA, 15 bp, Homo sapiens
aaaaaatctttgcca

SEQ ID NO: 1548694 - DNA, 15 bp, Homo sapiens
aaaaaaatctttgcc

SEQ ID NO: 1548695 - DNA, 15 bp, Homo sapiens
aaaaaaaatctttgc

SEQ ID NO: 1548696 - DNA, 15 bp, Homo sapiens
aaaaaaaaatctttg

SEQ ID NO: 1548697 - DNA, 15 bp, Homo sapiens
taaaaaaaaaatctt

SEQ ID NO: 1548698 - DNA, 15 bp, Homo sapiens
ttaaaaaaaaaatct

SEQ ID NO: 1548699 - DNA, 15 bp, Homo sapiens
cttaaaaaaaaaatc

SEQ ID NO: 1548700 - DNA, 15 bp, Homo sapiens
gatcttaaaaaaaaa

SEQ ID NO: 1548701 - DNA, 15 bp, Homo sapiens
ggatcttaaaaaaaa

SEQ ID NO: 1548702 - DNA, 15 bp, Homo sapiens
tggatcttaaaaaaa

SEQ ID NO: 1548703 - DNA, 15 bp, Homo sapiens
atggatcttaaaaaa

SEQ ID NO: 1548704 - DNA, 15 bp, Homo sapiens
aatggatcttaaaaa

SEQ ID NO: 1548705 - DNA, 15 bp, Homo sapiens
gaatggatcttaaaa

SEQ ID NO: 1548706 - DNA, 15 bp, Homo sapiens
ggaatggatcttaaa

SEQ ID NO: 1548707 - DNA, 15 bp, Homo sapiens
aggaatggatcttaa

SEQ ID NO: 1548708 - DNA, 15 bp, Homo sapiens
caggaatggatctta

SEQ ID NO: 1548709 - DNA, 15 bp, Homo sapiens
ccaggaatggatctt

SEQ ID NO: 1548710 - DNA, 15 bp, Homo sapiens
accaggaatggatct

SEQ ID NO: 1548711 - DNA, 15 bp, Homo sapiens
caccaggaatggatc

SEQ ID NO: 1548712 - DNA, 15 bp, Homo sapiens
ccaccaggaatggat

SEQ ID NO: 1548713 - DNA, 15 bp, Homo sapiens
accaccaggaatgga

SEQ ID NO: 1548714 - DNA, 15 bp, Homo sapiens
gaccaccaggaatgg

SEQ ID NO: 1548715 - DNA, 15 bp, Homo sapiens
agaccaccaggaatg

SEQ ID NO: 1548716 - DNA, 15 bp, Homo sapiens
cagaccaccaggaat

SEQ ID NO: 1548717 - DNA, 15 bp, Homo sapiens
acagaccaccaggaa

SEQ ID NO: 1548718 - DNA, 15 bp, Homo sapiens
cacagaccaccagga

SEQ ID NO: 1548719 - DNA, 15 bp, Homo sapiens
ccacagaccaccagg

SEQ ID NO: 1548720 - DNA, 15 bp, Homo sapiens
tccacagaccaccag

SEQ ID NO: 1548721 - DNA, 15 bp, Homo sapiens
ttccacagaccacca

SEQ ID NO: 1548722 - DNA, 15 bp, Homo sapiens
attccacagaccacc

SEQ ID NO: 1548723 - DNA, 15 bp, Homo sapiens
aattccacagaccac

SEQ ID NO: 1548724 - DNA, 15 bp, Homo sapiens
caattccacagacca

SEQ ID NO: 1548725 - DNA, 15 bp, Homo sapiens
acaattccacagacc

SEQ ID NO: 1548726 - DNA, 15 bp, Homo sapiens
cacaattccacagac

SEQ ID NO: 1548727 - DNA, 15 bp, Homo sapiens
tcacaattccacaga

SEQ ID NO: 1548728 - DNA, 15 bp, Homo sapiens
ctcacaattccacag

SEQ ID NO: 1548729 - DNA, 15 bp, Homo sapiens
actcacaattccaca

SEQ ID NO: 1548730 - DNA, 15 bp, Homo sapiens
tactcacaattccac

SEQ ID NO: 1548731 - DNA, 15 bp, Homo sapiens
ctactcacaattcca

SEQ ID NO: 1548732 - DNA, 15 bp, Homo sapiens
tctactcacaattcc

SEQ ID NO: 1548733 - DNA, 15 bp, Homo sapiens
ctctactcacaattc

SEQ ID NO: 1548734 - DNA, 15 bp, Homo sapiens
cctctactcacaatt

SEQ ID NO: 1548735 - DNA, 15 bp, Homo sapiens
gcctctactcacaat

SEQ ID NO: 1548736 - DNA, 15 bp, Homo sapiens
tgcctctactcacaa

SEQ ID NO: 1548737 - DNA, 15 bp, Homo sapiens
ttgcctctactcaca

SEQ ID NO: 1548738 - DNA, 15 bp, Homo sapiens
attgcctctactcac

SEQ ID NO: 1548739 - DNA, 15 bp, Homo sapiens
aattgcctctactca

SEQ ID NO: 1548740 - DNA, 15 bp, Homo sapiens
aaattgcctctactc

SEQ ID NO: 1548741 - DNA, 15 bp, Homo sapiens
aaaattgcctctact

SEQ ID NO: 1548742 - DNA, 15 bp, Homo sapiens
aaaaattgcctctac

SEQ ID NO: 1548743 - DNA, 15 bp, Homo sapiens
gaaaaattgcctcta

SEQ ID NO: 1548744 - DNA, 15 bp, Homo sapiens
agaaaaattgcctct

SEQ ID NO: 1548745 - DNA, 15 bp, Homo sapiens
tagaaaaattgcctc

SEQ ID NO: 1548746 - DNA, 15 bp, Homo sapiens
ctagaaaaattgcct

SEQ ID NO: 1548747 - DNA, 15 bp, Homo sapiens
tctagaaaaattgcc

SEQ ID NO: 1548748 - DNA, 15 bp, Homo sapiens
ttctagaaaaattgc

SEQ ID NO: 1548749 - DNA, 15 bp, Homo sapiens
tttctagaaaaattg

SEQ ID NO: 1548750 - DNA, 15 bp, Homo sapiens
ctttctagaaaaatt

SEQ ID NO: 1548751 - DNA, 15 bp, Homo sapiens
tgcctttctagaaaa

SEQ ID NO: 1548752 - DNA, 15 bp, Homo sapiens
atgcctttctagaaa

SEQ ID NO: 1548753 - DNA, 15 bp, Homo sapiens
aatgcctttctagaa

SEQ ID NO: 1548754 - DNA, 15 bp, Homo sapiens
aaatgcctttctaga

SEQ ID NO: 1548755 - DNA, 15 bp, Homo sapiens
caaatgcctttctag

SEQ ID NO: 1548756 - DNA, 15 bp, Homo sapiens
ccaaatgcctttcta

SEQ ID NO: 1548757 - DNA, 15 bp, Homo sapiens
tccaaatgcctttct

SEQ ID NO: 1548758 - DNA, 15 bp, Homo sapiens
ttccaaatgcctttc

SEQ ID NO: 1548759 - DNA, 15 bp, Homo sapiens
cttccaaatgccttt

SEQ ID NO: 1548760 - DNA, 15 bp, Homo sapiens
acttccaaatgcctt

SEQ ID NO: 1548761 - DNA, 15 bp, Homo sapiens
cacttccaaatgcct

SEQ ID NO: 1548762 - DNA, 15 bp, Homo sapiens
ccacttccaaatgcc

SEQ ID NO: 1548763 - DNA, 15 bp, Homo sapiens
tccacttccaaatgc

SEQ ID NO: 1548764 - DNA, 15 bp, Homo sapiens
atccacttccaaatg

SEQ ID NO: 1548765 - DNA, 15 bp, Homo sapiens
tatccacttccaaat

SEQ ID NO: 1548766 - DNA, 15 bp, Homo sapiens
ttatccacttccaaa

SEQ ID NO: 1548767 - DNA, 15 bp, Homo sapiens
gttatccacttccaa

SEQ ID NO: 1548768 - DNA, 15 bp, Homo sapiens
tgttatccacttcca

SEQ ID NO: 1548769 - DNA, 15 bp, Homo sapiens
ttgttatccacttcc

SEQ ID NO: 1548770 - DNA, 15 bp, Homo sapiens
cttgttatccacttc

SEQ ID NO: 1548771 - DNA, 15 bp, Homo sapiens
tcttgttatccactt

SEQ ID NO: 1548772 - DNA, 15 bp, Homo sapiens
gtcttgttatccact

SEQ ID NO: 1548773 - DNA, 15 bp, Homo sapiens
ggtcttgttatccac

SEQ ID NO: 1548774 - DNA, 15 bp, Homo sapiens
aggtcttgttatcca

SEQ ID NO: 1548775 - DNA, 15 bp, Homo sapiens
aaggtcttgttatcc

SEQ ID NO: 1548776 - DNA, 15 bp, Homo sapiens
taaggtcttgttatc

SEQ ID NO: 1548777 - DNA, 15 bp, Homo sapiens
ttaaggtcttgttat

SEQ ID NO: 1548778 - DNA, 15 bp, Homo sapiens
cttaaggtcttgtta

SEQ ID NO: 1548779 - DNA, 15 bp, Homo sapiens
tcttaaggtcttgtt

SEQ ID NO: 1548780 - DNA, 15 bp, Homo sapiens
gtcttaaggtcttgt

SEQ ID NO: 1548781 - DNA, 15 bp, Homo sapiens
agtcttaaggtcttg

SEQ ID NO: 1548782 - DNA, 15 bp, Homo sapiens
tagtcttaaggtctt

SEQ ID NO: 1548783 - DNA, 15 bp, Homo sapiens
atagtcttaaggtct

SEQ ID NO: 1548784 - DNA, 15 bp, Homo sapiens
aatagtcttaaggtc

SEQ ID NO: 1548785 - DNA, 15 bp, Homo sapiens
gaatagtcttaaggt

SEQ ID NO: 1548786 - DNA, 15 bp, Homo sapiens
tgaatagtcttaagg

SEQ ID NO: 1548787 - DNA, 15 bp, Homo sapiens
atgaatagtcttaag

SEQ ID NO: 1548788 - DNA, 15 bp, Homo sapiens
tatgaatagtcttaa

SEQ ID NO: 1548789 - DNA, 15 bp, Homo sapiens
gtatgaatagtctta

SEQ ID NO: 1548790 - DNA, 15 bp, Homo sapiens
ggtatgaatagtctt

SEQ ID NO: 1548791 - DNA, 15 bp, Homo sapiens
aggtatgaatagtct

SEQ ID NO: 1548792 - DNA, 15 bp, Homo sapiens
aaggtatgaatagtc

SEQ ID NO: 1548793 - DNA, 15 bp, Homo sapiens
aaaggtatgaatagt

SEQ ID NO: 1548794 - DNA, 15 bp, Homo sapiens
aaaaggtatgaatag

SEQ ID NO: 1548795 - DNA, 15 bp, Homo sapiens
caaaaggtatgaata

SEQ ID NO: 1548796 - DNA, 15 bp, Homo sapiens
ccaaaaggtatgaat

SEQ ID NO: 1548797 - DNA, 15 bp, Homo sapiens
gccaaaaggtatgaa

SEQ ID NO: 1548798 - DNA, 15 bp, Homo sapiens
ggccaaaaggtatga

SEQ ID NO: 1548799 - DNA, 15 bp, Homo sapiens
aggccaaaaggtatg

SEQ ID NO: 1548800 - DNA, 15 bp, Homo sapiens
gaggccaaaaggtat

SEQ ID NO: 1548801 - DNA, 15 bp, Homo sapiens
tgaggccaaaaggta

SEQ ID NO: 1548802 - DNA, 15 bp, Homo sapiens
atgaggccaaaaggt

SEQ ID NO: 1548803 - DNA, 15 bp, Homo sapiens
tatgaggccaaaagg

SEQ ID NO: 1548804 - DNA, 15 bp, Homo sapiens
ttatgaggccaaaag

SEQ ID NO: 1548805 - DNA, 15 bp, Homo sapiens
attatgaggccaaaa

SEQ ID NO: 1548806 - DNA, 15 bp, Homo sapiens
aattatgaggccaaa

SEQ ID NO: 1548807 - DNA, 15 bp, Homo sapiens
gaattatgaggccaa

SEQ ID NO: 1548808 - DNA, 15 bp, Homo sapiens
agaattatgaggcca

SEQ ID NO: 1548809 - DNA, 15 bp, Homo sapiens
cagaattatgaggcc

SEQ ID NO: 1548810 - DNA, 15 bp, Homo sapiens
gcagaattatgaggc

SEQ ID NO: 1548811 - DNA, 15 bp, Homo sapiens
agcagaattatgagg

SEQ ID NO: 1548812 - DNA, 15 bp, Homo sapiens
aagcagaattatgag

SEQ ID NO: 1548813 - DNA, 15 bp, Homo sapiens
aaagcagaattatga

SEQ ID NO: 1548814 - DNA, 15 bp, Homo sapiens
aaaagcagaattatg

SEQ ID NO: 1548815 - DNA, 15 bp, Homo sapiens
aaaaagcagaattat

SEQ ID NO: 1548816 - DNA, 15 bp, Homo sapiens
taaaaagcagaatta

SEQ ID NO: 1548817 - DNA, 15 bp, Homo sapiens
ctaaaaagcagaatt

SEQ ID NO: 1548818 - DNA, 15 bp, Homo sapiens
gctaaaaagcagaat

SEQ ID NO: 1548819 - DNA, 15 bp, Homo sapiens
tgctaaaaagcagaa

SEQ ID NO: 1548820 - DNA, 15 bp, Homo sapiens
atgctaaaaagcaga

SEQ ID NO: 1548821 - DNA, 15 bp, Homo sapiens
aatgctaaaaagcag

SEQ ID NO: 1548822 - DNA, 15 bp, Homo sapiens
aaatgctaaaaagca

SEQ ID NO: 1548823 - DNA, 15 bp, Homo sapiens
taaatgctaaaaagc

SEQ ID NO: 1548824 - DNA, 15 bp, Homo sapiens
ataaatgctaaaaag

SEQ ID NO: 1548825 - DNA, 15 bp, Homo sapiens
gataaatgctaaaaa

SEQ ID NO: 1548826 - DNA, 15 bp, Homo sapiens
ggataaatgctaaaa

SEQ ID NO: 1548827 - DNA, 15 bp, Homo sapiens
aggataaatgctaaa

SEQ ID NO: 1548828 - DNA, 15 bp, Homo sapiens
taggataaatgctaa

SEQ ID NO: 1548829 - DNA, 15 bp, Homo sapiens
ttaggataaatgcta

SEQ ID NO: 1548830 - DNA, 15 bp, Homo sapiens
tttaggataaatgct

SEQ ID NO: 1548831 - DNA, 15 bp, Homo sapiens
ctttaggataaatgc

SEQ ID NO: 1548832 - DNA, 15 bp, Homo sapiens
tctttaggataaatg

SEQ ID NO: 1548833 - DNA, 15 bp, Homo sapiens
ttctttaggataaat

SEQ ID NO: 1548834 - DNA, 15 bp, Homo sapiens
attctttaggataaa

SEQ ID NO: 1548835 - DNA, 15 bp, Homo sapiens
aattctttaggataa

SEQ ID NO: 1548836 - DNA, 15 bp, Homo sapiens
taattctttaggata

SEQ ID NO: 1548837 - DNA, 15 bp, Homo sapiens
ttaattctttaggat

SEQ ID NO: 1548838 - DNA, 15 bp, Homo sapiens
attaattctttagga

SEQ ID NO: 1548839 - DNA, 15 bp, Homo sapiens
cattaattctttagg

SEQ ID NO: 1548840 - DNA, 15 bp, Homo sapiens
acattaattctttag

SEQ ID NO: 1548841 - DNA, 15 bp, Homo sapiens
aacattaattcttta

SEQ ID NO: 1548842 - DNA, 15 bp, Homo sapiens
taacattaattcttt

SEQ ID NO: 1548843 - DNA, 15 bp, Homo sapiens
ttaacattaattctt

SEQ ID NO: 1548844 - DNA, 15 bp, Homo sapiens
tttaacattaattct

SEQ ID NO: 1548845 - DNA, 15 bp, Homo sapiens
ttttaacattaattc

SEQ ID NO: 1548846 - DNA, 15 bp, Homo sapiens
attttaacattaatt

SEQ ID NO: 1548847 - DNA, 15 bp, Homo sapiens
cattttaacattaat

SEQ ID NO: 1548848 - DNA, 15 bp, Homo sapiens
acattttaacattaa

SEQ ID NO: 1548849 - DNA, 15 bp, Homo sapiens
aacattttaacatta

SEQ ID NO: 1548850 - DNA, 15 bp, Homo sapiens
aaacattttaacatt

SEQ ID NO: 1548851 - DNA, 15 bp, Homo sapiens
taaacattttaacat

SEQ ID NO: 1548852 - DNA, 15 bp, Homo sapiens
ataaacattttaaca

SEQ ID NO: 1548853 - DNA, 15 bp, Homo sapiens
aataaacattttaac

SEQ ID NO: 1548854 - DNA, 15 bp, Homo sapiens
taataaacattttaa

SEQ ID NO: 1548855 - DNA, 15 bp, Homo sapiens
ataataaacatttta

SEQ ID NO: 1548856 - DNA, 15 bp, Homo sapiens
tataataaacatttt

SEQ ID NO: 1548857 - DNA, 15 bp, Homo sapiens
ctataataaacattt

SEQ ID NO: 1548858 - DNA, 15 bp, Homo sapiens
gctataataaacatt

SEQ ID NO: 1548859 - DNA, 15 bp, Homo sapiens
tgctataataaacat

SEQ ID NO: 1548860 - DNA, 15 bp, Homo sapiens
atgctataataaaca

SEQ ID NO: 1548861 - DNA, 15 bp, Homo sapiens
aatgctataataaac

SEQ ID NO: 1548862 - DNA, 15 bp, Homo sapiens
taatgctataataaa

SEQ ID NO: 1548863 - DNA, 15 bp, Homo sapiens
ataatgctataataa

SEQ ID NO: 1548864 - DNA, 15 bp, Homo sapiens
aataatgctataata

SEQ ID NO: 1548865 - DNA, 15 bp, Homo sapiens
aaataatgctataat

SEQ ID NO: 1548866 - DNA, 15 bp, Homo sapiens
aaaataatgctataa

SEQ ID NO: 1548867 - DNA, 15 bp, Homo sapiens
aaaaataatgctata

SEQ ID NO: 1548868 - DNA, 15 bp, Homo sapiens
taaaaataatgctat

SEQ ID NO: 1548869 - DNA, 15 bp, Homo sapiens
ataaaaataatgcta

SEQ ID NO: 1548870 - DNA, 15 bp, Homo sapiens
cataaaaataatgct

SEQ ID NO: 1548871 - DNA, 15 bp, Homo sapiens
acataaaaataatgc

SEQ ID NO: 1548872 - DNA, 15 bp, Homo sapiens
tacataaaaataatg

SEQ ID NO: 1548873 - DNA, 15 bp, Homo sapiens
ctacataaaaataat

SEQ ID NO: 1548874 - DNA, 15 bp, Homo sapiens
tctacataaaaataa

SEQ ID NO: 1548875 - DNA, 15 bp, Homo sapiens
atctacataaaaata

SEQ ID NO: 1548876 - DNA, 15 bp, Homo sapiens
aatctacataaaaat

SEQ ID NO: 1548877 - DNA, 15 bp, Homo sapiens
aaatctacataaaaa

SEQ ID NO: 1548878 - DNA, 15 bp, Homo sapiens
aaaatctacataaaa

SEQ ID NO: 1548879 - DNA, 15 bp, Homo sapiens
aaaaatctacataaa

SEQ ID NO: 1548880 - DNA, 15 bp, Homo sapiens
taaaaatctacataa

SEQ ID NO: 1548881 - DNA, 15 bp, Homo sapiens
ttaaaaatctacata

SEQ ID NO: 1548882 - DNA, 15 bp, Homo sapiens
tttaaaaatctacat

SEQ ID NO: 1548883 - DNA, 15 bp, Homo sapiens
atttaaaaatctaca

SEQ ID NO: 1548884 - DNA, 15 bp, Homo sapiens
aatttaaaaatctac

SEQ ID NO: 1548885 - DNA, 15 bp, Homo sapiens
caatttaaaaatcta

SEQ ID NO: 1548886 - DNA, 15 bp, Homo sapiens
tcaatttaaaaatct

SEQ ID NO: 1548887 - DNA, 15 bp, Homo sapiens
ctcaatttaaaaatc

SEQ ID NO: 1548888 - DNA, 15 bp, Homo sapiens
cctcaatttaaaaat

SEQ ID NO: 1548889 - DNA, 15 bp, Homo sapiens
acctcaatttaaaaa

SEQ ID NO: 1548890 - DNA, 15 bp, Homo sapiens
tacctcaatttaaaa

SEQ ID NO: 1548891 - DNA, 15 bp, Homo sapiens
atacctcaatttaaa

SEQ ID NO: 1548892 - DNA, 15 bp, Homo sapiens
tatacctcaatttaa

SEQ ID NO: 1548893 - DNA, 15 bp, Homo sapiens
atatacctcaattta

SEQ ID NO: 1548894 - DNA, 15 bp, Homo sapiens
gatatacctcaattt

SEQ ID NO: 1548895 - DNA, 15 bp, Homo sapiens
agatatacctcaatt

SEQ ID NO: 1548896 - DNA, 15 bp, Homo sapiens
aagatatacctcaat

SEQ ID NO: 1548897 - DNA, 15 bp, Homo sapiens
caagatatacctcaa

SEQ ID NO: 1548898 - DNA, 15 bp, Homo sapiens
acaagatatacctca

SEQ ID NO: 1548899 - DNA, 15 bp, Homo sapiens
gacaagatatacctc

SEQ ID NO: 1548900 - DNA, 15 bp, Homo sapiens
tgacaagatatacct

SEQ ID NO: 1548901 - DNA, 15 bp, Homo sapiens
atgacaagatatacc

SEQ ID NO: 1548902 - DNA, 15 bp, Homo sapiens
gatgacaagatatac

SEQ ID NO: 1548903 - DNA, 15 bp, Homo sapiens
tgatgacaagatata

SEQ ID NO: 1548904 - DNA, 15 bp, Homo sapiens
ctgatgacaagatat

SEQ ID NO: 1548905 - DNA, 15 bp, Homo sapiens
actgatgacaagata

SEQ ID NO: 1548906 - DNA, 15 bp, Homo sapiens
tactgatgacaagat

SEQ ID NO: 1548907 - DNA, 15 bp, Homo sapiens
ttactgatgacaaga

SEQ ID NO: 1548908 - DNA, 15 bp, Homo sapiens
tttactgatgacaag

SEQ ID NO: 1548909 - DNA, 15 bp, Homo sapiens
ctttactgatgacaa

SEQ ID NO: 1548910 - DNA, 15 bp, Homo sapiens
actttactgatgaca

SEQ ID NO: 1548911 - DNA, 15 bp, Homo sapiens
cactttactgatgac

SEQ ID NO: 1548912 - DNA, 15 bp, Homo sapiens
gcactttactgatga

SEQ ID NO: 1548913 - DNA, 15 bp, Homo sapiens
tgcactttactgatg

SEQ ID NO: 1548914 - DNA, 15 bp, Homo sapiens
ttgcactttactgat

SEQ ID NO: 1548915 - DNA, 15 bp, Homo sapiens
cttgcactttactga

SEQ ID NO: 1548916 - DNA, 15 bp, Homo sapiens
tcttgcactttactg

SEQ ID NO: 1548917 - DNA, 15 bp, Homo sapiens
atcttgcactttact

SEQ ID NO: 1548918 - DNA, 15 bp, Homo sapiens
gatcttgcactttac

SEQ ID NO: 1548919 - DNA, 15 bp, Homo sapiens
agatcttgcacttta

SEQ ID NO: 1548920 - DNA, 15 bp, Homo sapiens
aagatcttgcacttt

SEQ ID NO: 1548921 - DNA, 15 bp, Homo sapiens
taagatcttgcactt

SEQ ID NO: 1548922 - DNA, 15 bp, Homo sapiens
ttaagatcttgcact

SEQ ID NO: 1548923 - DNA, 15 bp, Homo sapiens
cttaagatcttgcac

SEQ ID NO: 1548924 - DNA, 15 bp, Homo sapiens
acttaagatcttgca

SEQ ID NO: 1548925 - DNA, 15 bp, Homo sapiens
gacttaagatcttgc

SEQ ID NO: 1548926 - DNA, 15 bp, Homo sapiens
tgacttaagatcttg

SEQ ID NO: 1548927 - DNA, 15 bp, Homo sapiens
ttgacttaagatctt

SEQ ID NO: 1548928 - DNA, 15 bp, Homo sapiens
gttgacttaagatct

SEQ ID NO: 1548929 - DNA, 15 bp, Homo sapiens
tgttgacttaagatc

SEQ ID NO: 1548930 - DNA, 15 bp, Homo sapiens
ctgttgacttaagat

SEQ ID NO: 1548931 - DNA, 15 bp, Homo sapiens
gctgttgacttaaga

SEQ ID NO: 1548932 - DNA, 15 bp, Homo sapiens
agctgttgacttaag

SEQ ID NO: 1548933 - DNA, 15 bp, Homo sapiens
aagctgttgacttaa

SEQ ID NO: 1548934 - DNA, 15 bp, Homo sapiens
caagctgttgactta

SEQ ID NO: 1548935 - DNA, 15 bp, Homo sapiens
tcaagctgttgactt

SEQ ID NO: 1548936 - DNA, 15 bp, Homo sapiens
atcaagctgttgact

SEQ ID NO: 1548937 - DNA, 15 bp, Homo sapiens
catcaagctgttgac

SEQ ID NO: 1548938 - DNA, 15 bp, Homo sapiens
tcatcaagctgttga

SEQ ID NO: 1548939 - DNA, 15 bp, Homo sapiens
ttcatcaagctgttg

SEQ ID NO: 1548940 - DNA, 15 bp, Homo sapiens
gttcatcaagctgtt

SEQ ID NO: 1548941 - DNA, 15 bp, Homo sapiens
agttcatcaagctgt

SEQ ID NO: 1548942 - DNA, 15 bp, Homo sapiens
aagttcatcaagctg

SEQ ID NO: 1548943 - DNA, 15 bp, Homo sapiens
gaagttcatcaagct

SEQ ID NO: 1548944 - DNA, 15 bp, Homo sapiens
agaagttcatcaagc

SEQ ID NO: 1548945 - DNA, 15 bp, Homo sapiens
tagaagttcatcaag

SEQ ID NO: 1548946 - DNA, 15 bp, Homo sapiens
gtagaagttcatcaa

SEQ ID NO: 1548947 - DNA, 15 bp, Homo sapiens
tgtagaagttcatca

SEQ ID NO: 1548948 - DNA, 15 bp, Homo sapiens
atgtagaagttcatc

SEQ ID NO: 1548949 - DNA, 15 bp, Homo sapiens
catgtagaagttcat

SEQ ID NO: 1548950 - DNA, 15 bp, Homo sapiens
gcatgtagaagttca

SEQ ID NO: 1548951 - DNA, 15 bp, Homo sapiens
tgcatgtagaagttc

SEQ ID NO: 1548952 - DNA, 15 bp, Homo sapiens
ttgcatgtagaagtt

SEQ ID NO: 1548953 - DNA, 15 bp, Homo sapiens
tttgcatgtagaagt

SEQ ID NO: 1548954 - DNA, 15 bp, Homo sapiens
atttgcatgtagaag

SEQ ID NO: 1548955 - DNA, 15 bp, Homo sapiens
tatttgcatgtagaa

SEQ ID NO: 1548956 - DNA, 15 bp, Homo sapiens
gtatttgcatgtaga

SEQ ID NO: 1548957 - DNA, 15 bp, Homo sapiens
tgtatttgcatgtag

SEQ ID NO: 1548958 - DNA, 15 bp, Homo sapiens
atgtatttgcatgta

SEQ ID NO: 1548959 - DNA, 15 bp, Homo sapiens
gatgtatttgcatgt

SEQ ID NO: 1548960 - DNA, 15 bp, Homo sapiens
tgatgtatttgcatg

SEQ ID NO: 1548961 - DNA, 15 bp, Homo sapiens
atgatgtatttgcat

SEQ ID NO: 1548962 - DNA, 15 bp, Homo sapiens
catgatgtatttgca

SEQ ID NO: 1548963 - DNA, 15 bp, Homo sapiens
tcatgatgtatttgc

SEQ ID NO: 1548964 - DNA, 15 bp, Homo sapiens
ttcatgatgtatttg

SEQ ID NO: 1548965 - DNA, 15 bp, Homo sapiens
tttcatgatgtattt

SEQ ID NO: 1548966 - DNA, 15 bp, Homo sapiens
ctttcatgatgtatt

SEQ ID NO: 1548967 - DNA, 15 bp, Homo sapiens
actttcatgatgtat

SEQ ID NO: 1548968 - DNA, 15 bp, Homo sapiens
tactttcatgatgta

SEQ ID NO: 1548969 - DNA, 15 bp, Homo sapiens
atactttcatgatgt

SEQ ID NO: 1548970 - DNA, 15 bp, Homo sapiens
gatactttcatgatg

SEQ ID NO: 1548971 - DNA, 15 bp, Homo sapiens
agatactttcatgat

SEQ ID NO: 1548972 - DNA, 15 bp, Homo sapiens
gagatactttcatga

SEQ ID NO: 1548973 - DNA, 15 bp, Homo sapiens
ggagatactttcatg

SEQ ID NO: 1548974 - DNA, 15 bp, Homo sapiens
tggagatactttcat

SEQ ID NO: 1548975 - DNA, 15 bp, Homo sapiens
ctggagatactttca

SEQ ID NO: 1548976 - DNA, 15 bp, Homo sapiens
tctggagatactttc

SEQ ID NO: 1548977 - DNA, 15 bp, Homo sapiens
atctggagatacttt

SEQ ID NO: 1548978 - DNA, 15 bp, Homo sapiens
gatctggagatactt

SEQ ID NO: 1548979 - DNA, 15 bp, Homo sapiens
agatctggagatact

SEQ ID NO: 1548980 - DNA, 15 bp, Homo sapiens
tagatctggagatac

SEQ ID NO: 1548981 - DNA, 15 bp, Homo sapiens
ctagatctggagata

SEQ ID NO: 1548982 - DNA, 15 bp, Homo sapiens
tctagatctggagat

SEQ ID NO: 1548983 - DNA, 15 bp, Homo sapiens
gtctagatctggaga

SEQ ID NO: 1548984 - DNA, 15 bp, Homo sapiens
tgtctagatctggag

SEQ ID NO: 1548985 - DNA, 15 bp, Homo sapiens
atgtctagatctgga

SEQ ID NO: 1548986 - DNA, 15 bp, Homo sapiens
tatgtctagatctgg

SEQ ID NO: 1548987 - DNA, 15 bp, Homo sapiens
ctatgtctagatctg

SEQ ID NO: 1548988 - DNA, 15 bp, Homo sapiens
tctatgtctagatct

SEQ ID NO: 1548989 - DNA, 15 bp, Homo sapiens
ttctatgtctagatc

SEQ ID NO: 1548990 - DNA, 15 bp, Homo sapiens
gttctatgtctagat

SEQ ID NO: 1548991 - DNA, 15 bp, Homo sapiens
tgttctatgtctaga

SEQ ID NO: 1548992 - DNA, 15 bp, Homo sapiens
atgttctatgtctag

SEQ ID NO: 1548993 - DNA, 15 bp, Homo sapiens
aatgttctatgtcta

SEQ ID NO: 1548994 - DNA, 15 bp, Homo sapiens
aaatgttctatgtct

SEQ ID NO: 1548995 - DNA, 15 bp, Homo sapiens
gaaatgttctatgtc

SEQ ID NO: 1548996 - DNA, 15 bp, Homo sapiens
agaaatgttctatgt

SEQ ID NO: 1548997 - DNA, 15 bp, Homo sapiens
tagaaatgttctatg

SEQ ID NO: 1548998 - DNA, 15 bp, Homo sapiens
ctagaaatgttctat

SEQ ID NO: 1548999 - DNA, 15 bp, Homo sapiens
gctagaaatgttcta

SEQ ID NO: 1549000 - DNA, 15 bp, Homo sapiens
tgctagaaatgttct

SEQ ID NO: 1549001 - DNA, 15 bp, Homo sapiens
atgctagaaatgttc

SEQ ID NO: 1549002 - DNA, 15 bp, Homo sapiens
gatgctagaaatgtt

SEQ ID NO: 1549003 - DNA, 15 bp, Homo sapiens
ggatgctagaaatgt

SEQ ID NO: 1549004 - DNA, 15 bp, Homo sapiens
tggatgctagaaatg

SEQ ID NO: 1549005 - DNA, 15 bp, Homo sapiens
ctggatgctagaaat

SEQ ID NO: 1549006 - DNA, 15 bp, Homo sapiens
tctggatgctagaaa

SEQ ID NO: 1549007 - DNA, 15 bp, Homo sapiens
ctctggatgctagaa

SEQ ID NO: 1549008 - DNA, 15 bp, Homo sapiens
cctctggatgctaga

SEQ ID NO: 1549009 - DNA, 15 bp, Homo sapiens
ccctctggatgctag

SEQ ID NO: 1549010 - DNA, 15 bp, Homo sapiens
tccctctggatgcta

SEQ ID NO: 1549011 - DNA, 15 bp, Homo sapiens
atccctctggatgct

SEQ ID NO: 1549012 - DNA, 15 bp, Homo sapiens
tatccctctggatgc

SEQ ID NO: 1549013 - DNA, 15 bp, Homo sapiens
atatccctctggatg

SEQ ID NO: 1549014 - DNA, 15 bp, Homo sapiens
aatatccctctggat

SEQ ID NO: 1549015 - DNA, 15 bp, Homo sapiens
gaatatccctctgga

SEQ ID NO: 1549016 - DNA, 15 bp, Homo sapiens
agaatatccctctgg

SEQ ID NO: 1549017 - DNA, 15 bp, Homo sapiens
gagaatatccctctg

SEQ ID NO: 1549018 - DNA, 15 bp, Homo sapiens
tgagaatatccctct

SEQ ID NO: 1549019 - DNA, 15 bp, Homo sapiens
ctgagaatatccctc

SEQ ID NO: 1549020 - DNA, 15 bp, Homo sapiens
actgagaatatccct

SEQ ID NO: 1549021 - DNA, 15 bp, Homo sapiens
tactgagaatatccc

SEQ ID NO: 1549022 - DNA, 15 bp, Homo sapiens
gtactgagaatatcc

SEQ ID NO: 1549023 - DNA, 15 bp, Homo sapiens
ggtactgagaatatc

SEQ ID NO: 1549024 - DNA, 15 bp, Homo sapiens
gggtactgagaatat

SEQ ID NO: 1549025 - DNA, 15 bp, Homo sapiens
agggtactgagaata

SEQ ID NO: 1549026 - DNA, 15 bp, Homo sapiens
gagggtactgagaat

SEQ ID NO: 1549027 - DNA, 15 bp, Homo sapiens
ggagggtactgagaa

SEQ ID NO: 1549028 - DNA, 15 bp, Homo sapiens
gggagggtactgaga

SEQ ID NO: 1549029 - DNA, 15 bp, Homo sapiens
agggagggtactgag

SEQ ID NO: 1549030 - DNA, 15 bp, Homo sapiens
aagggagggtactga

SEQ ID NO: 1549031 - DNA, 15 bp, Homo sapiens
gaagggagggtactg

SEQ ID NO: 1549032 - DNA, 15 bp, Homo sapiens
tgaagggagggtact

SEQ ID NO: 1549033 - DNA, 15 bp, Homo sapiens
gtgaagggagggtac

SEQ ID NO: 1549034 - DNA, 15 bp, Homo sapiens
ggtgaagggagggta

SEQ ID NO: 1549035 - DNA, 15 bp, Homo sapiens
tggtgaagggagggt

SEQ ID NO: 1549036 - DNA, 15 bp, Homo sapiens
ttggtgaagggaggg

SEQ ID NO: 1549037 - DNA, 15 bp, Homo sapiens
cttggtgaagggagg

SEQ ID NO: 1549038 - DNA, 15 bp, Homo sapiens
tcttggtgaagggag

SEQ ID NO: 1549039 - DNA, 15 bp, Homo sapiens
ctcttggtgaaggga

SEQ ID NO: 1549040 - DNA, 15 bp, Homo sapiens
actcttggtgaaggg

SEQ ID NO: 1549041 - DNA, 15 bp, Homo sapiens
tactcttggtgaagg

SEQ ID NO: 1549042 - DNA, 15 bp, Homo sapiens
ttactcttggtgaag

SEQ ID NO: 1549043 - DNA, 15 bp, Homo sapiens
tttactcttggtgaa

SEQ ID NO: 1549044 - DNA, 15 bp, Homo sapiens
gtttactcttggtga

SEQ ID NO: 1549045 - DNA, 15 bp, Homo sapiens
tgtttactcttggtg

SEQ ID NO: 1549046 - DNA, 15 bp, Homo sapiens
gtgtttactcttggt

SEQ ID NO: 1549047 - DNA, 15 bp, Homo sapiens
agtgtttactcttgg

SEQ ID NO: 1549048 - DNA, 15 bp, Homo sapiens
tagtgtttactcttg

SEQ ID NO: 1549049 - DNA, 15 bp, Homo sapiens
atagtgtttactctt

SEQ ID NO: 1549050 - DNA, 15 bp, Homo sapiens
aatagtgtttactct

SEQ ID NO: 1549051 - DNA, 15 bp, Homo sapiens
taatagtgtttactc

SEQ ID NO: 1549052 - DNA, 15 bp, Homo sapiens
ataatagtgtttact

SEQ ID NO: 1549053 - DNA, 15 bp, Homo sapiens
cataatagtgtttac

SEQ ID NO: 1549054 - DNA, 15 bp, Homo sapiens
tcataatagtgttta

SEQ ID NO: 1549055 - DNA, 15 bp, Homo sapiens
gtcataatagtgttt

SEQ ID NO: 1549056 - DNA, 15 bp, Homo sapiens
ggtcataatagtgtt

SEQ ID NO: 1549057 - DNA, 15 bp, Homo sapiens
aggtcataatagtgt

SEQ ID NO: 1549058 - DNA, 15 bp, Homo sapiens
gaggtcataatagtg

SEQ ID NO: 1549059 - DNA, 15 bp, Homo sapiens
agaggtcataatagt

SEQ ID NO: 1549060 - DNA, 15 bp, Homo sapiens
tagaggtcataatag

SEQ ID NO: 1549061 - DNA, 15 bp, Homo sapiens
atagaggtcataata

SEQ ID NO: 1549062 - DNA, 15 bp, Homo sapiens
aatagaggtcataat

SEQ ID NO: 1549063 - DNA, 15 bp, Homo sapiens
caatagaggtcataa

SEQ ID NO: 1549064 - DNA, 15 bp, Homo sapiens
gcaatagaggtcata

SEQ ID NO: 1549065 - DNA, 15 bp, Homo sapiens
tgcaatagaggtcat

SEQ ID NO: 1549066 - DNA, 15 bp, Homo sapiens
gtgcaatagaggtca

SEQ ID NO: 1549067 - DNA, 15 bp, Homo sapiens
tgtgcaatagaggtc

SEQ ID NO: 1549068 - DNA, 15 bp, Homo sapiens
ctgtgcaatagaggt

SEQ ID NO: 1549069 - DNA, 15 bp, Homo sapiens
tctgtgcaatagagg

SEQ ID NO: 1549070 - DNA, 15 bp, Homo sapiens
atctgtgcaatagag

SEQ ID NO: 1549071 - DNA, 15 bp, Homo sapiens
aatctgtgcaataga

SEQ ID NO: 1549072 - DNA, 15 bp, Homo sapiens
aaatctgtgcaatag

SEQ ID NO: 1549073 - DNA, 15 bp, Homo sapiens
taaatctgtgcaata

SEQ ID NO: 1549074 - DNA, 15 bp, Homo sapiens
ataaatctgtgcaat

SEQ ID NO: 1549075 - DNA, 15 bp, Homo sapiens
aataaatctgtgcaa

SEQ ID NO: 1549076 - DNA, 15 bp, Homo sapiens
aaataaatctgtgca

SEQ ID NO: 1549077 - DNA, 15 bp, Homo sapiens
aaaataaatctgtgc

SEQ ID NO: 1549078 - DNA, 15 bp, Homo sapiens
caaaataaatctgtg

SEQ ID NO: 1549079 - DNA, 15 bp, Homo sapiens
gcaaaataaatctgt

SEQ ID NO: 1549080 - DNA, 15 bp, Homo sapiens
ggcaaaataaatctg

SEQ ID NO: 1549081 - DNA, 15 bp, Homo sapiens
aggcaaaataaatct

SEQ ID NO: 1549082 - DNA, 15 bp, Homo sapiens
taggcaaaataaatc

SEQ ID NO: 1549083 - DNA, 15 bp, Homo sapiens
gtaggcaaaataaat

SEQ ID NO: 1549084 - DNA, 15 bp, Homo sapiens
agtaggcaaaataaa

SEQ ID NO: 1549085 - DNA, 15 bp, Homo sapiens
aagtaggcaaaataa

SEQ ID NO: 1549086 - DNA, 15 bp, Homo sapiens
aaagtaggcaaaata

SEQ ID NO: 1549087 - DNA, 15 bp, Homo sapiens
taaagtaggcaaaat

SEQ ID NO: 1549088 - DNA, 15 bp, Homo sapiens
ctaaagtaggcaaaa

SEQ ID NO: 1549089 - DNA, 15 bp, Homo sapiens
tctaaagtaggcaaa

SEQ ID NO: 1549090 - DNA, 15 bp, Homo sapiens
ttctaaagtaggcaa

SEQ ID NO: 1549091 - DNA, 15 bp, Homo sapiens
gttctaaagtaggca

SEQ ID NO: 1549092 - DNA, 15 bp, Homo sapiens
agttctaaagtaggc

SEQ ID NO: 1549093 - DNA, 15 bp, Homo sapiens
aagttctaaagtagg

SEQ ID NO: 1549094 - DNA, 15 bp, Homo sapiens
gaagttctaaagtag

SEQ ID NO: 1549095 - DNA, 15 bp, Homo sapiens
tgaagttctaaagta

SEQ ID NO: 1549096 - DNA, 15 bp, Homo sapiens
atgaagttctaaagt

SEQ ID NO: 1549097 - DNA, 15 bp, Homo sapiens
tatgaagttctaaag

SEQ ID NO: 1549098 - DNA, 15 bp, Homo sapiens
atatgaagttctaaa

SEQ ID NO: 1549099 - DNA, 15 bp, Homo sapiens
catatgaagttctaa

SEQ ID NO: 1549100 - DNA, 15 bp, Homo sapiens
tcatatgaagttcta

SEQ ID NO: 1549101 - DNA, 15 bp, Homo sapiens
gtcatatgaagttct

SEQ ID NO: 1549102 - DNA, 15 bp, Homo sapiens
tgtcatatgaagttc

SEQ ID NO: 1549103 - DNA, 15 bp, Homo sapiens
atgtcatatgaagtt

SEQ ID NO: 1549104 - DNA, 15 bp, Homo sapiens
aatgtcatatgaagt

SEQ ID NO: 1549105 - DNA, 15 bp, Homo sapiens
taatgtcatatgaag

SEQ ID NO: 1549106 - DNA, 15 bp, Homo sapiens
ataatgtcatatgaa

SEQ ID NO: 1549107 - DNA, 15 bp, Homo sapiens
aataatgtcatatga

SEQ ID NO: 1549108 - DNA, 15 bp, Homo sapiens
aaataatgtcatatg

SEQ ID NO: 1549109 - DNA, 15 bp, Homo sapiens
taaataatgtcatat

SEQ ID NO: 1549110 - DNA, 15 bp, Homo sapiens
ataaataatgtcata

SEQ ID NO: 1549111 - DNA, 15 bp, Homo sapiens
tataaataatgtcat

SEQ ID NO: 1549112 - DNA, 15 bp, Homo sapiens
ttataaataatgtca

SEQ ID NO: 1549113 - DNA, 15 bp, Homo sapiens
attataaataatgtc

SEQ ID NO: 1549114 - DNA, 15 bp, Homo sapiens
tattataaataatgt

SEQ ID NO: 1549115 - DNA, 15 bp, Homo sapiens
ctattataaataatg

SEQ ID NO: 1549116 - DNA, 15 bp, Homo sapiens
tgctattataaataa

SEQ ID NO: 1549117 - DNA, 15 bp, Homo sapiens
tttttttgctattat

SEQ ID NO: 1549118 - DNA, 15 bp, Homo sapiens
atttttttgctatta

SEQ ID NO: 1549119 - DNA, 15 bp, Homo sapiens
catttttttgctatt

SEQ ID NO: 1549120 - DNA, 15 bp, Homo sapiens
tcatttttttgctat

SEQ ID NO: 1549121 - DNA, 15 bp, Homo sapiens
ttcatttttttgcta

SEQ ID NO: 1549122 - DNA, 15 bp, Homo sapiens
gttcatttttttgct

SEQ ID NO: 1549123 - DNA, 15 bp, Homo sapiens
tgttcatttttttgc

SEQ ID NO: 1549124 - DNA, 15 bp, Homo sapiens
ctgttcatttttttg

SEQ ID NO: 1549125 - DNA, 15 bp, Homo sapiens
cctgttcattttttt

SEQ ID NO: 1549126 - DNA, 15 bp, Homo sapiens
gcctgttcatttttt

SEQ ID NO: 1549127 - DNA, 15 bp, Homo sapiens
ggcctgttcattttt

SEQ ID NO: 1549128 - DNA, 15 bp, Homo sapiens
tggcctgttcatttt

SEQ ID NO: 1549129 - DNA, 15 bp, Homo sapiens
ttggcctgttcattt

SEQ ID NO: 1549130 - DNA, 15 bp, Homo sapiens
tttggcctgttcatt

SEQ ID NO: 1549131 - DNA, 15 bp, Homo sapiens
ttttggcctgttcat

SEQ ID NO: 1549132 - DNA, 15 bp, Homo sapiens
cttttggcctgttca

SEQ ID NO: 1549133 - DNA, 15 bp, Homo sapiens
acttttggcctgttc

SEQ ID NO: 1549134 - DNA, 15 bp, Homo sapiens
gacttttggcctgtt

SEQ ID NO: 1549135 - DNA, 15 bp, Homo sapiens
tgacttttggcctgt

SEQ ID NO: 1549136 - DNA, 15 bp, Homo sapiens
ttgacttttggcctg

SEQ ID NO: 1549137 - DNA, 15 bp, Homo sapiens
tttgacttttggcct

SEQ ID NO: 1549138 - DNA, 15 bp, Homo sapiens
ctttgacttttggcc

SEQ ID NO: 1549139 - DNA, 15 bp, Homo sapiens
tctttgacttttggc

SEQ ID NO: 1549140 - DNA, 15 bp, Homo sapiens
ttctttgacttttgg

SEQ ID NO: 1549141 - DNA, 15 bp, Homo sapiens
attctttgacttttg

SEQ ID NO: 1549142 - DNA, 15 bp, Homo sapiens
tattctttgactttt

SEQ ID NO: 1549143 - DNA, 15 bp, Homo sapiens
ttattctttgacttt

SEQ ID NO: 1549144 - DNA, 15 bp, Homo sapiens
cttattctttgactt

SEQ ID NO: 1549145 - DNA, 15 bp, Homo sapiens
ccttattctttgact

SEQ ID NO: 1549146 - DNA, 15 bp, Homo sapiens
tccttattctttgac

SEQ ID NO: 1549147 - DNA, 15 bp, Homo sapiens
ttccttattctttga

SEQ ID NO: 1549148 - DNA, 15 bp, Homo sapiens
gttccttattctttg

SEQ ID NO: 1549149 - DNA, 15 bp, Homo sapiens
agttccttattcttt

SEQ ID NO: 1549150 - DNA, 15 bp, Homo sapiens
cagttccttattctt

SEQ ID NO: 1549151 - DNA, 15 bp, Homo sapiens
tcagttccttattct

SEQ ID NO: 1549152 - DNA, 15 bp, Homo sapiens
atcagttccttattc

SEQ ID NO: 1549153 - DNA, 15 bp, Homo sapiens
aatcagttccttatt

SEQ ID NO: 1549154 - DNA, 15 bp, Homo sapiens
taatcagttccttat

SEQ ID NO: 1549155 - DNA, 15 bp, Homo sapiens
ttaatcagttcctta

SEQ ID NO: 1549156 - DNA, 15 bp, Homo sapiens
tttaatcagttcctt

SEQ ID NO: 1549157 - DNA, 15 bp, Homo sapiens
atttaatcagttcct

SEQ ID NO: 1549158 - DNA, 15 bp, Homo sapiens
aatttaatcagttcc

SEQ ID NO: 1549159 - DNA, 15 bp, Homo sapiens
taatttaatcagttc

SEQ ID NO: 1549160 - DNA, 15 bp, Homo sapiens
ataatttaatcagtt

SEQ ID NO: 1549161 - DNA, 15 bp, Homo sapiens
aataatttaatcagt

SEQ ID NO: 1549162 - DNA, 15 bp, Homo sapiens
caataatttaatcag

SEQ ID NO: 1549163 - DNA, 15 bp, Homo sapiens
ccaataatttaatca

SEQ ID NO: 1549164 - DNA, 15 bp, Homo sapiens
accaataatttaatc

SEQ ID NO: 1549165 - DNA, 15 bp, Homo sapiens
aaccaataatttaat

SEQ ID NO: 1549166 - DNA, 15 bp, Homo sapiens
gaaccaataatttaa

SEQ ID NO: 1549167 - DNA, 15 bp, Homo sapiens
agaaccaataattta

SEQ ID NO: 1549168 - DNA, 15 bp, Homo sapiens
gagaaccaataattt

SEQ ID NO: 1549169 - DNA, 15 bp, Homo sapiens
ggagaaccaataatt

SEQ ID NO: 1549170 - DNA, 15 bp, Homo sapiens
tggagaaccaataat

SEQ ID NO: 1549171 - DNA, 15 bp, Homo sapiens
atggagaaccaataa

SEQ ID NO: 1549172 - DNA, 15 bp, Homo sapiens
gatggagaaccaata

SEQ ID NO: 1549173 - DNA, 15 bp, Homo sapiens
agatggagaaccaat

SEQ ID NO: 1549174 - DNA, 15 bp, Homo sapiens
cagatggagaaccaa

SEQ ID NO: 1549175 - DNA, 15 bp, Homo sapiens
tcagatggagaacca

SEQ ID NO: 1549176 - DNA, 15 bp, Homo sapiens
atcagatggagaacc

SEQ ID NO: 1549177 - DNA, 15 bp, Homo sapiens
catcagatggagaac

SEQ ID NO: 1549178 - DNA, 15 bp, Homo sapiens
ccatcagatggagaa

SEQ ID NO: 1549179 - DNA, 15 bp, Homo sapiens
tccatcagatggaga

SEQ ID NO: 1549180 - DNA, 15 bp, Homo sapiens
ttccatcagatggag

SEQ ID NO: 1549181 - DNA, 15 bp, Homo sapiens
attccatcagatgga

SEQ ID NO: 1549182 - DNA, 15 bp, Homo sapiens
tattccatcagatgg

SEQ ID NO: 1549183 - DNA, 15 bp, Homo sapiens
ttattccatcagatg

SEQ ID NO: 1549184 - DNA, 15 bp, Homo sapiens
attattccatcagat

SEQ ID NO: 1549185 - DNA, 15 bp, Homo sapiens
tattattccatcaga

SEQ ID NO: 1549186 - DNA, 15 bp, Homo sapiens
atattattccatcag

SEQ ID NO: 1549187 - DNA, 15 bp, Homo sapiens
catattattccatca

SEQ ID NO: 1549188 - DNA, 15 bp, Homo sapiens
tcatattattccatc

SEQ ID NO: 1549189 - DNA, 15 bp, Homo sapiens
ttcatattattccat

SEQ ID NO: 1549190 - DNA, 15 bp, Homo sapiens
cttcatattattcca

SEQ ID NO: 1549191 - DNA, 15 bp, Homo sapiens
gcttcatattattcc

SEQ ID NO: 1549192 - DNA, 15 bp, Homo sapiens
ggcttcatattattc

SEQ ID NO: 1549193 - DNA, 15 bp, Homo sapiens
tggcttcatattatt

SEQ ID NO: 1549194 - DNA, 15 bp, Homo sapiens
atggcttcatattat

SEQ ID NO: 1549195 - DNA, 15 bp, Homo sapiens
aatggcttcatatta

SEQ ID NO: 1549196 - DNA, 15 bp, Homo sapiens
caatggcttcatatt

SEQ ID NO: 1549197 - DNA, 15 bp, Homo sapiens
tcaatggcttcatat

SEQ ID NO: 1549198 - DNA, 15 bp, Homo sapiens
ttcaatggcttcata

SEQ ID NO: 1549199 - DNA, 15 bp, Homo sapiens
tttcaatggcttcat

SEQ ID NO: 1549200 - DNA, 15 bp, Homo sapiens
ttttcaatggcttca

SEQ ID NO: 1549201 - DNA, 15 bp, Homo sapiens
tttttcaatggcttc

SEQ ID NO: 1549202 - DNA, 15 bp, Homo sapiens
atttttcaatggctt

SEQ ID NO: 1549203 - DNA, 15 bp, Homo sapiens
catttttcaatggct

SEQ ID NO: 1549204 - DNA, 15 bp, Homo sapiens
ccatttttcaatggc

SEQ ID NO: 1549205 - DNA, 15 bp, Homo sapiens
gccatttttcaatgg

SEQ ID NO: 1549206 - DNA, 15 bp, Homo sapiens
agccatttttcaatg

SEQ ID NO: 1549207 - DNA, 15 bp, Homo sapiens
aagccatttttcaat

SEQ ID NO: 1549208 - DNA, 15 bp, Homo sapiens
aaagccatttttcaa

SEQ ID NO: 1549209 - DNA, 15 bp, Homo sapiens
caaagccatttttca

SEQ ID NO: 1549210 - DNA, 15 bp, Homo sapiens
acaaagccatttttc

SEQ ID NO: 1549211 - DNA, 15 bp, Homo sapiens
aacaaagccattttt

SEQ ID NO: 1549212 - DNA, 15 bp, Homo sapiens
taacaaagccatttt

SEQ ID NO: 1549213 - DNA, 15 bp, Homo sapiens
gtaacaaagccattt

SEQ ID NO: 1549214 - DNA, 15 bp, Homo sapiens
tgtaacaaagccatt

SEQ ID NO: 1549215 - DNA, 15 bp, Homo sapiens
ctgtaacaaagccat

SEQ ID NO: 1549216 - DNA, 15 bp, Homo sapiens
tctgtaacaaagcca

SEQ ID NO: 1549217 - DNA, 15 bp, Homo sapiens
ttctgtaacaaagcc

SEQ ID NO: 1549218 - DNA, 15 bp, Homo sapiens
attctgtaacaaagc

SEQ ID NO: 1549219 - DNA, 15 bp, Homo sapiens
aattctgtaacaaag

SEQ ID NO: 1549220 - DNA, 15 bp, Homo sapiens
aaattctgtaacaaa

SEQ ID NO: 1549221 - DNA, 15 bp, Homo sapiens
gaaattctgtaacaa

SEQ ID NO: 1549222 - DNA, 15 bp, Homo sapiens
tgaaattctgtaaca

SEQ ID NO: 1549223 - DNA, 15 bp, Homo sapiens
ctgaaattctgtaac

SEQ ID NO: 1549224 - DNA, 15 bp, Homo sapiens
actgaaattctgtaa

SEQ ID NO: 1549225 - DNA, 15 bp, Homo sapiens
aactgaaattctgta

SEQ ID NO: 1549226 - DNA, 15 bp, Homo sapiens
aaactgaaattctgt

SEQ ID NO: 1549227 - DNA, 15 bp, Homo sapiens
caaactgaaattctg

SEQ ID NO: 1549228 - DNA, 15 bp, Homo sapiens
ccaaactgaaattct

SEQ ID NO: 1549229 - DNA, 15 bp, Homo sapiens
tccaaactgaaattc

SEQ ID NO: 1549230 - DNA, 15 bp, Homo sapiens
ttccaaactgaaatt

SEQ ID NO: 1549231 - DNA, 15 bp, Homo sapiens
cttccaaactgaaat

SEQ ID NO: 1549232 - DNA, 15 bp, Homo sapiens
tcttccaaactgaaa

SEQ ID NO: 1549233 - DNA, 15 bp, Homo sapiens
atcttccaaactgaa

SEQ ID NO: 1549234 - DNA, 15 bp, Homo sapiens
catcttccaaactga

SEQ ID NO: 1549235 - DNA, 15 bp, Homo sapiens
tcatcttccaaactg

SEQ ID NO: 1549236 - DNA, 15 bp, Homo sapiens
ttcatcttccaaact

SEQ ID NO: 1549237 - DNA, 15 bp, Homo sapiens
tttcatcttccaaac

SEQ ID NO: 1549238 - DNA, 15 bp, Homo sapiens
ttttcatcttccaaa

SEQ ID NO: 1549239 - DNA, 15 bp, Homo sapiens
cttttcatcttccaa

SEQ ID NO: 1549240 - DNA, 15 bp, Homo sapiens
ccttttcatcttcca

SEQ ID NO: 1549241 - DNA, 15 bp, Homo sapiens
accttttcatcttcc

SEQ ID NO: 1549242 - DNA, 15 bp, Homo sapiens
aaccttttcatcttc

SEQ ID NO: 1549243 - DNA, 15 bp, Homo sapiens
gaaccttttcatctt

SEQ ID NO: 1549244 - DNA, 15 bp, Homo sapiens
agaaccttttcatct

SEQ ID NO: 1549245 - DNA, 15 bp, Homo sapiens
tagaaccttttcatc

SEQ ID NO: 1549246 - DNA, 15 bp, Homo sapiens
ctagaaccttttcat

SEQ ID NO: 1549247 - DNA, 15 bp, Homo sapiens
tctagaaccttttca

SEQ ID NO: 1549248 - DNA, 15 bp, Homo sapiens
ctctagaaccttttc

SEQ ID NO: 1549249 - DNA, 15 bp, Homo sapiens
tctctagaacctttt

SEQ ID NO: 1549250 - DNA, 15 bp, Homo sapiens
atctctagaaccttt

SEQ ID NO: 1549251 - DNA, 15 bp, Homo sapiens
catctctagaacctt

SEQ ID NO: 1549252 - DNA, 15 bp, Homo sapiens
ccatctctagaacct

SEQ ID NO: 1549253 - DNA, 15 bp, Homo sapiens
tccatctctagaacc

SEQ ID NO: 1549254 - DNA, 15 bp, Homo sapiens
atccatctctagaac

SEQ ID NO: 1549255 - DNA, 15 bp, Homo sapiens
catccatctctagaa

SEQ ID NO: 1549256 - DNA, 15 bp, Homo sapiens
ccatccatctctaga

SEQ ID NO: 1549257 - DNA, 15 bp, Homo sapiens
accatccatctctag

SEQ ID NO: 1549258 - DNA, 15 bp, Homo sapiens
caccatccatctcta

SEQ ID NO: 1549259 - DNA, 15 bp, Homo sapiens
ccaccatccatctct

SEQ ID NO: 1549260 - DNA, 15 bp, Homo sapiens
accaccatccatctc

SEQ ID NO: 1549261 - DNA, 15 bp, Homo sapiens
caccaccatccatct

SEQ ID NO: 1549262 - DNA, 15 bp, Homo sapiens
tcaccaccatccatc

SEQ ID NO: 1549263 - DNA, 15 bp, Homo sapiens
atcaccaccatccat

SEQ ID NO: 1549264 - DNA, 15 bp, Homo sapiens
catcaccaccatcca

SEQ ID NO: 1549265 - DNA, 15 bp, Homo sapiens
ccatcaccaccatcc

SEQ ID NO: 1549266 - DNA, 15 bp, Homo sapiens
gccatcaccaccatc

SEQ ID NO: 1549267 - DNA, 15 bp, Homo sapiens
agccatcaccaccat

SEQ ID NO: 1549268 - DNA, 15 bp, Homo sapiens
cagccatcaccacca

SEQ ID NO: 1549269 - DNA, 15 bp, Homo sapiens
gcagccatcaccacc

SEQ ID NO: 1549270 - DNA, 15 bp, Homo sapiens
tgcagccatcaccac

SEQ ID NO: 1549271 - DNA, 15 bp, Homo sapiens
gtgcagccatcacca

SEQ ID NO: 1549272 - DNA, 15 bp, Homo sapiens
tgtgcagccatcacc

SEQ ID NO: 1549273 - DNA, 15 bp, Homo sapiens
attgtgcagccatca

SEQ ID NO: 1549274 - DNA, 15 bp, Homo sapiens
cattgtgcagccatc

SEQ ID NO: 1549275 - DNA, 15 bp, Homo sapiens
tcattgtgcagccat

SEQ ID NO: 1549276 - DNA, 15 bp, Homo sapiens
atcattgtgcagcca

SEQ ID NO: 1549277 - DNA, 15 bp, Homo sapiens
aatcattgtgcagcc

SEQ ID NO: 1549278 - DNA, 15 bp, Homo sapiens
aaatcattgtgcagc

SEQ ID NO: 1549279 - DNA, 15 bp, Homo sapiens
caaatcattgtgcag

SEQ ID NO: 1549280 - DNA, 15 bp, Homo sapiens
tcaaatcattgtgca

SEQ ID NO: 1549281 - DNA, 15 bp, Homo sapiens
ttcaaatcattgtgc

SEQ ID NO: 1549282 - DNA, 15 bp, Homo sapiens
attcaaatcattgtg

SEQ ID NO: 1549283 - DNA, 15 bp, Homo sapiens
cattcaaatcattgt

SEQ ID NO: 1549284 - DNA, 15 bp, Homo sapiens
acattcaaatcattg

SEQ ID NO: 1549285 - DNA, 15 bp, Homo sapiens
tacattcaaatcatt

SEQ ID NO: 1549286 - DNA, 15 bp, Homo sapiens
gtacattcaaatcat

SEQ ID NO: 1549287 - DNA, 15 bp, Homo sapiens
agtacattcaaatca

SEQ ID NO: 1549288 - DNA, 15 bp, Homo sapiens
gagtacattcaaatc

SEQ ID NO: 1549289 - DNA, 15 bp, Homo sapiens
tgagtacattcaaat

SEQ ID NO: 1549290 - DNA, 15 bp, Homo sapiens
ctgagtacattcaaa

SEQ ID NO: 1549291 - DNA, 15 bp, Homo sapiens
actgagtacattcaa

SEQ ID NO: 1549292 - DNA, 15 bp, Homo sapiens
cactgagtacattca

SEQ ID NO: 1549293 - DNA, 15 bp, Homo sapiens
gcactgagtacattc

SEQ ID NO: 1549294 - DNA, 15 bp, Homo sapiens
ggcactgagtacatt

SEQ ID NO: 1549295 - DNA, 15 bp, Homo sapiens
tggcactgagtacat

SEQ ID NO: 1549296 - DNA, 15 bp, Homo sapiens
gtggcactgagtaca

SEQ ID NO: 1549297 - DNA, 15 bp, Homo sapiens
agtggcactgagtac

SEQ ID NO: 1549298 - DNA, 15 bp, Homo sapiens
cagtggcactgagta

SEQ ID NO: 1549299 - DNA, 15 bp, Homo sapiens
tcagtggcactgagt

SEQ ID NO: 1549300 - DNA, 15 bp, Homo sapiens
ttcagtggcactgag

SEQ ID NO: 1549301 - DNA, 15 bp, Homo sapiens
gttcagtggcactga

SEQ ID NO: 1549302 - DNA, 15 bp, Homo sapiens
agttcagtggcactg

SEQ ID NO: 1549303 - DNA, 15 bp, Homo sapiens
cagttcagtggcact

SEQ ID NO: 1549304 - DNA, 15 bp, Homo sapiens
acagttcagtggcac

SEQ ID NO: 1549305 - DNA, 15 bp, Homo sapiens
cacagttcagtggca

SEQ ID NO: 1549306 - DNA, 15 bp, Homo sapiens
gcacagttcagtggc

SEQ ID NO: 1549307 - DNA, 15 bp, Homo sapiens
ggcacagttcagtgg

SEQ ID NO: 1549308 - DNA, 15 bp, Homo sapiens
gggcacagttcagtg

SEQ ID NO: 1549309 - DNA, 15 bp, Homo sapiens
agggcacagttcagt

SEQ ID NO: 1549310 - DNA, 15 bp, Homo sapiens
aagggcacagttcag

SEQ ID NO: 1549311 - DNA, 15 bp, Homo sapiens
gaagggcacagttca

SEQ ID NO: 1549312 - DNA, 15 bp, Homo sapiens
tgaagggcacagttc

SEQ ID NO: 1549313 - DNA, 15 bp, Homo sapiens
ttgaagggcacagtt

SEQ ID NO: 1549314 - DNA, 15 bp, Homo sapiens
tttgaagggcacagt

SEQ ID NO: 1549315 - DNA, 15 bp, Homo sapiens
ttttgaagggcacag

SEQ ID NO: 1549316 - DNA, 15 bp, Homo sapiens
attttgaagggcaca

SEQ ID NO: 1549317 - DNA, 15 bp, Homo sapiens
cattttgaagggcac

SEQ ID NO: 1549318 - DNA, 15 bp, Homo sapiens
ccattttgaagggca

SEQ ID NO: 1549319 - DNA, 15 bp, Homo sapiens
cccattttgaagggc

SEQ ID NO: 1549320 - DNA, 15 bp, Homo sapiens
acccattttgaaggg

SEQ ID NO: 1549321 - DNA, 15 bp, Homo sapiens
tacccattttgaagg

SEQ ID NO: 1549322 - DNA, 15 bp, Homo sapiens
ttacccattttgaag

SEQ ID NO: 1549323 - DNA, 15 bp, Homo sapiens
tttacccattttgaa

SEQ ID NO: 1549324 - DNA, 15 bp, Homo sapiens
ctttacccattttga

SEQ ID NO: 1549325 - DNA, 15 bp, Homo sapiens
gctttacccattttg

SEQ ID NO: 1549326 - DNA, 15 bp, Homo sapiens
ggctttacccatttt

SEQ ID NO: 1549327 - DNA, 15 bp, Homo sapiens
tggctttacccattt

SEQ ID NO: 1549328 - DNA, 15 bp, Homo sapiens
gtggctttacccatt

SEQ ID NO: 1549329 - DNA, 15 bp, Homo sapiens
cgtggctttacccat

SEQ ID NO: 1549330 - DNA, 15 bp, Homo sapiens
ccgtggctttaccca

SEQ ID NO: 1549331 - DNA, 15 bp, Homo sapiens
tccgtggctttaccc

SEQ ID NO: 1549332 - DNA, 15 bp, Homo sapiens
ttccgtggctttacc

SEQ ID NO: 1549333 - DNA, 15 bp, Homo sapiens
gttccgtggctttac

SEQ ID NO: 1549334 - DNA, 15 bp, Homo sapiens
agttccgtggcttta

SEQ ID NO: 1549335 - DNA, 15 bp, Homo sapiens
cagttccgtggcttt

SEQ ID NO: 1549336 - DNA, 15 bp, Homo sapiens
acagttccgtggctt

SEQ ID NO: 1549337 - DNA, 15 bp, Homo sapiens
tacagttccgtggct

SEQ ID NO: 1549338 - DNA, 15 bp, Homo sapiens
gtacagttccgtggc

SEQ ID NO: 1549339 - DNA, 15 bp, Homo sapiens
tgtacagttccgtgg

SEQ ID NO: 1549340 - DNA, 15 bp, Homo sapiens
atgtacagttccgtg

SEQ ID NO: 1549341 - DNA, 15 bp, Homo sapiens
aatgtacagttccgt

SEQ ID NO: 1549342 - DNA, 15 bp, Homo sapiens
aaatgtacagttccg

SEQ ID NO: 1549343 - DNA, 15 bp, Homo sapiens
taaatgtacagttcc

SEQ ID NO: 1549344 - DNA, 15 bp, Homo sapiens
ttaaatgtacagttc

SEQ ID NO: 1549345 - DNA, 15 bp, Homo sapiens
tttaaatgtacagtt

SEQ ID NO: 1549346 - DNA, 15 bp, Homo sapiens
ttttaaatgtacagt

SEQ ID NO: 1549347 - DNA, 15 bp, Homo sapiens
tttttaaatgtacag

SEQ ID NO: 1549348 - DNA, 15 bp, Homo sapiens
atttttaaatgtaca

SEQ ID NO: 1549349 - DNA, 15 bp, Homo sapiens
tatttttaaatgtac

SEQ ID NO: 1549350 - DNA, 15 bp, Homo sapiens
ctatttttaaatgta

SEQ ID NO: 1549351 - DNA, 15 bp, Homo sapiens
actatttttaaatgt

SEQ ID NO: 1549352 - DNA, 15 bp, Homo sapiens
aactatttttaaatg

SEQ ID NO: 1549353 - DNA, 15 bp, Homo sapiens
taactatttttaaat

SEQ ID NO: 1549354 - DNA, 15 bp, Homo sapiens
ttaactatttttaaa

SEQ ID NO: 1549355 - DNA, 15 bp, Homo sapiens
attttaactattttt

SEQ ID NO: 1549356 - DNA, 15 bp, Homo sapiens
cattttaactatttt

SEQ ID NO: 1549357 - DNA, 15 bp, Homo sapiens
ccattttaactattt

SEQ ID NO: 1549358 - DNA, 15 bp, Homo sapiens
accattttaactatt

SEQ ID NO: 1549359 - DNA, 15 bp, Homo sapiens
taccattttaactat

SEQ ID NO: 1549360 - DNA, 15 bp, Homo sapiens
ttaccattttaacta

SEQ ID NO: 1549361 - DNA, 15 bp, Homo sapiens
tttaccattttaact

SEQ ID NO: 1549362 - DNA, 15 bp, Homo sapiens
atttaccattttaac

SEQ ID NO: 1549363 - DNA, 15 bp, Homo sapiens
aatttaccattttaa

SEQ ID NO: 1549364 - DNA, 15 bp, Homo sapiens
aaatttaccatttta

SEQ ID NO: 1549365 - DNA, 15 bp, Homo sapiens
aaaatttaccatttt

SEQ ID NO: 1549366 - DNA, 15 bp, Homo sapiens
caaaatttaccattt

SEQ ID NO: 1549367 - DNA, 15 bp, Homo sapiens
acaaaatttaccatt

SEQ ID NO: 1549368 - DNA, 15 bp, Homo sapiens
cacaaaatttaccat

SEQ ID NO: 1549369 - DNA, 15 bp, Homo sapiens
acacaaaatttacca

SEQ ID NO: 1549370 - DNA, 15 bp, Homo sapiens
aacacaaaatttacc

SEQ ID NO: 1549371 - DNA, 15 bp, Homo sapiens
caacacaaaatttac

SEQ ID NO: 1549372 - DNA, 15 bp, Homo sapiens
acaacacaaaattta

SEQ ID NO: 1549373 - DNA, 15 bp, Homo sapiens
cacaacacaaaattt

SEQ ID NO: 1549374 - DNA, 15 bp, Homo sapiens
acacaacacaaaatt

SEQ ID NO: 1549375 - DNA, 15 bp, Homo sapiens
tacacaacacaaaat

SEQ ID NO: 1549376 - DNA, 15 bp, Homo sapiens
atacacaacacaaaa

SEQ ID NO: 1549377 - DNA, 15 bp, Homo sapiens
tatacacaacacaaa

SEQ ID NO: 1549378 - DNA, 15 bp, Homo sapiens
atatacacaacacaa

SEQ ID NO: 1549379 - DNA, 15 bp, Homo sapiens
aatatacacaacaca

SEQ ID NO: 1549380 - DNA, 15 bp, Homo sapiens
aaatatacacaacac

SEQ ID NO: 1549381 - DNA, 15 bp, Homo sapiens
aaaatatacacaaca

SEQ ID NO: 1549382 - DNA, 15 bp, Homo sapiens
taaaatatacacaac

SEQ ID NO: 1549383 - DNA, 15 bp, Homo sapiens
gtaaaatatacacaa

SEQ ID NO: 1549384 - DNA, 15 bp, Homo sapiens
ggtaaaatatacaca

SEQ ID NO: 1549385 - DNA, 15 bp, Homo sapiens
tggtaaaatatacac

SEQ ID NO: 1549386 - DNA, 15 bp, Homo sapiens
gtggtaaaatataca

SEQ ID NO: 1549387 - DNA, 15 bp, Homo sapiens
tgtggtaaaatatac

SEQ ID NO: 1549388 - DNA, 15 bp, Homo sapiens
ttgtggtaaaatata

SEQ ID NO: 1549389 - DNA, 15 bp, Homo sapiens
attgtggtaaaatat

SEQ ID NO: 1549390 - DNA, 15 bp, Homo sapiens
aattgtggtaaaata

SEQ ID NO: 1549391 - DNA, 15 bp, Homo sapiens
aaattgtggtaaaat

SEQ ID NO: 1549392 - DNA, 15 bp, Homo sapiens
aaaattgtggtaaaa

SEQ ID NO: 1549393 - DNA, 15 bp, Homo sapiens
taaaattgtggtaaa

SEQ ID NO: 1549394 - DNA, 15 bp, Homo sapiens
ttaaaattgtggtaa

SEQ ID NO: 1549395 - DNA, 15 bp, Homo sapiens
tttaaaattgtggta

SEQ ID NO: 1549396 - DNA, 15 bp, Homo sapiens
ttttaaaattgtggt

SEQ ID NO: 1549397 - DNA, 15 bp, Homo sapiens
tttttaaaattgtgg

SEQ ID NO: 1549398 - DNA, 15 bp, Homo sapiens
gtttttaaaattgtg

SEQ ID NO: 1549399 - DNA, 15 bp, Homo sapiens
agtttttaaaattgt

SEQ ID NO: 1549400 - DNA, 15 bp, Homo sapiens
gagtttttaaaattg

SEQ ID NO: 1549401 - DNA, 15 bp, Homo sapiens
agagtttttaaaatt

SEQ ID NO: 1549402 - DNA, 15 bp, Homo sapiens
aagagtttttaaaat

SEQ ID NO: 1549403 - DNA, 15 bp, Homo sapiens
aaagagtttttaaaa

SEQ ID NO: 1549404 - DNA, 15 bp, Homo sapiens
caaagagtttttaaa

SEQ ID NO: 1549405 - DNA, 15 bp, Homo sapiens
tcaaagagtttttaa

SEQ ID NO: 1549406 - DNA, 15 bp, Homo sapiens
ctcaaagagttttta

SEQ ID NO: 1549407 - DNA, 15 bp, Homo sapiens
tctcaaagagttttt

SEQ ID NO: 1549408 - DNA, 15 bp, Homo sapiens
gtctcaaagagtttt

SEQ ID NO: 1549409 - DNA, 15 bp, Homo sapiens
agtctcaaagagttt

SEQ ID NO: 1549410 - DNA, 15 bp, Homo sapiens
aagtctcaaagagtt

SEQ ID NO: 1549411 - DNA, 15 bp, Homo sapiens
aaagtctcaaagagt

SEQ ID NO: 1549412 - DNA, 15 bp, Homo sapiens
taaagtctcaaagag

SEQ ID NO: 1549413 - DNA, 15 bp, Homo sapiens
ctaaagtctcaaaga

SEQ ID NO: 1549414 - DNA, 15 bp, Homo sapiens
cctaaagtctcaaag

SEQ ID NO: 1549415 - DNA, 15 bp, Homo sapiens
acctaaagtctcaaa

SEQ ID NO: 1549416 - DNA, 15 bp, Homo sapiens
tacctaaagtctcaa

SEQ ID NO: 1549417 - DNA, 15 bp, Homo sapiens
ttacctaaagtctca

SEQ ID NO: 1549418 - DNA, 15 bp, Homo sapiens
tttacctaaagtctc

SEQ ID NO: 1549419 - DNA, 15 bp, Homo sapiens
ctttacctaaagtct

SEQ ID NO: 1549420 - DNA, 15 bp, Homo sapiens
actttacctaaagtc

SEQ ID NO: 1549421 - DNA, 15 bp, Homo sapiens
cactttacctaaagt

SEQ ID NO: 1549422 - DNA, 15 bp, Homo sapiens
acactttacctaaag

SEQ ID NO: 1549423 - DNA, 15 bp, Homo sapiens
tacactttacctaaa

SEQ ID NO: 1549424 - DNA, 15 bp, Homo sapiens
atacactttacctaa

SEQ ID NO: 1549425 - DNA, 15 bp, Homo sapiens
tatacactttaccta

SEQ ID NO: 1549426 - DNA, 15 bp, Homo sapiens
ctatacactttacct

SEQ ID NO: 1549427 - DNA, 15 bp, Homo sapiens
tctatacactttacc

SEQ ID NO: 1549428 - DNA, 15 bp, Homo sapiens
atctatacactttac

SEQ ID NO: 1549429 - DNA, 15 bp, Homo sapiens
tatctatacacttta

SEQ ID NO: 1549430 - DNA, 15 bp, Homo sapiens
ttatctatacacttt

SEQ ID NO: 1549431 - DNA, 15 bp, Homo sapiens
tttatctatacactt

SEQ ID NO: 1549432 - DNA, 15 bp, Homo sapiens
atttatctatacact

SEQ ID NO: 1549433 - DNA, 15 bp, Homo sapiens
aatttatctatacac

SEQ ID NO: 1549434 - DNA, 15 bp, Homo sapiens
aaatttatctataca

SEQ ID NO: 1549435 - DNA, 15 bp, Homo sapiens
aaaatttatctatac

SEQ ID NO: 1549436 - DNA, 15 bp, Homo sapiens
aaaaatttatctata

SEQ ID NO: 1549437 - DNA, 15 bp, Homo sapiens
acaaaaatttatcta

SEQ ID NO: 1549438 - DNA, 15 bp, Homo sapiens
tacaaaaatttatct

SEQ ID NO: 1549439 - DNA, 15 bp, Homo sapiens
gtacaaaaatttatc

SEQ ID NO: 1549440 - DNA, 15 bp, Homo sapiens
tgtacaaaaatttat

SEQ ID NO: 1549441 - DNA, 15 bp, Homo sapiens
ttgtacaaaaattta

SEQ ID NO: 1549442 - DNA, 15 bp, Homo sapiens
attgtacaaaaattt

SEQ ID NO: 1549443 - DNA, 15 bp, Homo sapiens
aattgtacaaaaatt

SEQ ID NO: 1549444 - DNA, 15 bp, Homo sapiens
aaattgtacaaaaat

SEQ ID NO: 1549445 - DNA, 15 bp, Homo sapiens
aaaattgtacaaaaa

SEQ ID NO: 1549446 - DNA, 15 bp, Homo sapiens
aaaaattgtacaaaa

SEQ ID NO: 1549447 - DNA, 15 bp, Homo sapiens
caaaaattgtacaaa

SEQ ID NO: 1549448 - DNA, 15 bp, Homo sapiens
acaaaaattgtacaa

SEQ ID NO: 1549449 - DNA, 15 bp, Homo sapiens
gacaaaaattgtaca

SEQ ID NO: 1549450 - DNA, 15 bp, Homo sapiens
agacaaaaattgtac

SEQ ID NO: 1549451 - DNA, 15 bp, Homo sapiens
aagacaaaaattgta

SEQ ID NO: 1549452 - DNA, 15 bp, Homo sapiens
taagacaaaaattgt

SEQ ID NO: 1549453 - DNA, 15 bp, Homo sapiens
ataagacaaaaattg

SEQ ID NO: 1549454 - DNA, 15 bp, Homo sapiens
tataagacaaaaatt

SEQ ID NO: 1549455 - DNA, 15 bp, Homo sapiens
ttataagacaaaaat

SEQ ID NO: 1549456 - DNA, 15 bp, Homo sapiens
tttataagacaaaaa

SEQ ID NO: 1549457 - DNA, 15 bp, Homo sapiens
atttataagacaaaa

SEQ ID NO: 1549458 - DNA, 15 bp, Homo sapiens
catttataagacaaa

SEQ ID NO: 1549459 - DNA, 15 bp, Homo sapiens
acatttataagacaa

SEQ ID NO: 1549460 - DNA, 15 bp, Homo sapiens
cacatttataagaca

SEQ ID NO: 1549461 - DNA, 15 bp, Homo sapiens
tcacatttataagac

SEQ ID NO: 1549462 - DNA, 15 bp, Homo sapiens
ttcacatttataaga

SEQ ID NO: 1549463 - DNA, 15 bp, Homo sapiens
cttcacatttataag

SEQ ID NO: 1549464 - DNA, 15 bp, Homo sapiens
gcttcacatttataa

SEQ ID NO: 1549465 - DNA, 15 bp, Homo sapiens
agcttcacatttata

SEQ ID NO: 1549466 - DNA, 15 bp, Homo sapiens
aagcttcacatttat

SEQ ID NO: 1549467 - DNA, 15 bp, Homo sapiens
aaagcttcacattta

SEQ ID NO: 1549468 - DNA, 15 bp, Homo sapiens
aaaagcttcacattt

SEQ ID NO: 1549469 - DNA, 15 bp, Homo sapiens
aaaaagcttcacatt

SEQ ID NO: 1549470 - DNA, 15 bp, Homo sapiens
gaaaaagcttcacat

SEQ ID NO: 1549471 - DNA, 15 bp, Homo sapiens
tgaaaaagcttcaca

SEQ ID NO: 1549472 - DNA, 15 bp, Homo sapiens
ttgaaaaagcttcac

SEQ ID NO: 1549473 - DNA, 15 bp, Homo sapiens
cttgaaaaagcttca

SEQ ID NO: 1549474 - DNA, 15 bp, Homo sapiens
acttgaaaaagcttc

SEQ ID NO: 1549475 - DNA, 15 bp, Homo sapiens
tacttgaaaaagctt

SEQ ID NO: 1549476 - DNA, 15 bp, Homo sapiens
ttacttgaaaaagct

SEQ ID NO: 1549477 - DNA, 15 bp, Homo sapiens
cttacttgaaaaagc

SEQ ID NO: 1549478 - DNA, 15 bp, Homo sapiens
acttacttgaaaaag

SEQ ID NO: 1549479 - DNA, 15 bp, Homo sapiens
aacttacttgaaaaa

SEQ ID NO: 1549480 - DNA, 15 bp, Homo sapiens
aaacttacttgaaaa

SEQ ID NO: 1549481 - DNA, 15 bp, Homo sapiens
taaacttacttgaaa

SEQ ID NO: 1549482 - DNA, 15 bp, Homo sapiens
ttaaacttacttgaa

SEQ ID NO: 1549483 - DNA, 15 bp, Homo sapiens
tttaaacttacttga

SEQ ID NO: 1549484 - DNA, 15 bp, Homo sapiens
ttttaaacttacttg

SEQ ID NO: 1549485 - DNA, 15 bp, Homo sapiens
cttttaaacttactt

SEQ ID NO: 1549486 - DNA, 15 bp, Homo sapiens
tcttttaaacttact

SEQ ID NO: 1549487 - DNA, 15 bp, Homo sapiens
ttcttttaaacttac

SEQ ID NO: 1549488 - DNA, 15 bp, Homo sapiens
cttcttttaaactta

SEQ ID NO: 1549489 - DNA, 15 bp, Homo sapiens
acttcttttaaactt

SEQ ID NO: 1549490 - DNA, 15 bp, Homo sapiens
aacttcttttaaact

SEQ ID NO: 1549491 - DNA, 15 bp, Homo sapiens
aaacttcttttaaac

SEQ ID NO: 1549492 - DNA, 15 bp, Homo sapiens
caaacttcttttaaa

SEQ ID NO: 1549493 - DNA, 15 bp, Homo sapiens
gcaaacttcttttaa

SEQ ID NO: 1549494 - DNA, 15 bp, Homo sapiens
tgcaaacttctttta

SEQ ID NO: 1549495 - DNA, 15 bp, Homo sapiens
ctgcaaacttctttt

SEQ ID NO: 1549496 - DNA, 15 bp, Homo sapiens
tctgcaaacttcttt

SEQ ID NO: 1549497 - DNA, 15 bp, Homo sapiens
ttctgcaaacttctt

SEQ ID NO: 1549498 - DNA, 15 bp, Homo sapiens
attctgcaaacttct

SEQ ID NO: 1549499 - DNA, 15 bp, Homo sapiens
aattctgcaaacttc

SEQ ID NO: 1549500 - DNA, 15 bp, Homo sapiens
aaattctgcaaactt

SEQ ID NO: 1549501 - DNA, 15 bp, Homo sapiens
caaattctgcaaact

SEQ ID NO: 1549502 - DNA, 15 bp, Homo sapiens
acaaattctgcaaac

SEQ ID NO: 1549503 - DNA, 15 bp, Homo sapiens
tacaaattctgcaaa

SEQ ID NO: 1549504 - DNA, 15 bp, Homo sapiens
ttacaaattctgcaa

SEQ ID NO: 1549505 - DNA, 15 bp, Homo sapiens
attacaaattctgca

SEQ ID NO: 1549506 - DNA, 15 bp, Homo sapiens
cattacaaattctgc

SEQ ID NO: 1549507 - DNA, 15 bp, Homo sapiens
acattacaaattctg

SEQ ID NO: 1549508 - DNA, 15 bp, Homo sapiens
aacattacaaattct

SEQ ID NO: 1549509 - DNA, 15 bp, Homo sapiens
caacattacaaattc

SEQ ID NO: 1549510 - DNA, 15 bp, Homo sapiens
tcaacattacaaatt

SEQ ID NO: 1549511 - DNA, 15 bp, Homo sapiens
ttcaacattacaaat

SEQ ID NO: 1549512 - DNA, 15 bp, Homo sapiens
attcaacattacaaa

SEQ ID NO: 1549513 - DNA, 15 bp, Homo sapiens
tattcaacattacaa

SEQ ID NO: 1549514 - DNA, 15 bp, Homo sapiens
ttattcaacattaca

SEQ ID NO: 1549515 - DNA, 15 bp, Homo sapiens
tttattcaacattac

SEQ ID NO: 1549516 - DNA, 15 bp, Homo sapiens
atttattcaacatta

SEQ ID NO: 1549517 - DNA, 15 bp, Homo sapiens
tatttattcaacatt

SEQ ID NO: 1549518 - DNA, 15 bp, Homo sapiens
ttatttattcaacat

SEQ ID NO: 1549519 - DNA, 15 bp, Homo sapiens
attatttattcaaca

SEQ ID NO: 1549520 - DNA, 15 bp, Homo sapiens
gattatttattcaac

SEQ ID NO: 1549521 - DNA, 15 bp, Homo sapiens
agattatttattcaa

SEQ ID NO: 1549522 - DNA, 15 bp, Homo sapiens
gagattatttattca

SEQ ID NO: 1549523 - DNA, 15 bp, Homo sapiens
tgagattatttattc

SEQ ID NO: 1549524 - DNA, 15 bp, Homo sapiens
ctgagattatttatt

SEQ ID NO: 1549525 - DNA, 15 bp, Homo sapiens
actgagattatttat

SEQ ID NO: 1549526 - DNA, 15 bp, Homo sapiens
tactgagattattta

SEQ ID NO: 1549527 - DNA, 15 bp, Homo sapiens
atactgagattattt

SEQ ID NO: 1549528 - DNA, 15 bp, Homo sapiens
tatactgagattatt

SEQ ID NO: 1549529 - DNA, 15 bp, Homo sapiens
ctatactgagattat

SEQ ID NO: 1549530 - DNA, 15 bp, Homo sapiens
cctatactgagatta

SEQ ID NO: 1549531 - DNA, 15 bp, Homo sapiens
gcctatactgagatt

SEQ ID NO: 1549532 - DNA, 15 bp, Homo sapiens
ggcctatactgagat

SEQ ID NO: 1549533 - DNA, 15 bp, Homo sapiens
tggcctatactgaga

SEQ ID NO: 1549534 - DNA, 15 bp, Homo sapiens
ctggcctatactgag

SEQ ID NO: 1549535 - DNA, 15 bp, Homo sapiens
cctggcctatactga

SEQ ID NO: 1549536 - DNA, 15 bp, Homo sapiens
ccctggcctatactg

SEQ ID NO: 1549537 - DNA, 15 bp, Homo sapiens
cccctggcctatact

SEQ ID NO: 1549538 - DNA, 15 bp, Homo sapiens
acccctggcctatac

SEQ ID NO: 1549539 - DNA, 15 bp, Homo sapiens
cacccctggcctata

SEQ ID NO: 1549540 - DNA, 15 bp, Homo sapiens
ccacccctggcctat

SEQ ID NO: 1549541 - DNA, 15 bp, Homo sapiens
accacccctggccta

SEQ ID NO: 1549542 - DNA, 15 bp, Homo sapiens
caccacccctggcct

SEQ ID NO: 1549543 - DNA, 15 bp, Homo sapiens
ccaccacccctggcc

SEQ ID NO: 1549544 - DNA, 15 bp, Homo sapiens
gccaccacccctggc

SEQ ID NO: 1549545 - DNA, 15 bp, Homo sapiens
agccaccacccctgg

SEQ ID NO: 1549546 - DNA, 15 bp, Homo sapiens
gagccaccacccctg

SEQ ID NO: 1549547 - DNA, 15 bp, Homo sapiens
tgagccaccacccct

SEQ ID NO: 1549548 - DNA, 15 bp, Homo sapiens
gtgagccaccacccc

SEQ ID NO: 1549549 - DNA, 15 bp, Homo sapiens
cgtgagccaccaccc

SEQ ID NO: 1549550 - DNA, 15 bp, Homo sapiens
gcgtgagccaccacc

SEQ ID NO: 1549551 - DNA, 15 bp, Homo sapiens
aatctcctgacctcg

SEQ ID NO: 1549552 - DNA, 15 bp, Homo sapiens
caatctcctgacctc

SEQ ID NO: 1549553 - DNA, 15 bp, Homo sapiens
tcaatctcctgacct

SEQ ID NO: 1549554 - DNA, 15 bp, Homo sapiens
ctcaatctcctgacc

SEQ ID NO: 1549555 - DNA, 15 bp, Homo sapiens
tctcaatctcctgac

SEQ ID NO: 1549556 - DNA, 15 bp, Homo sapiens
gtctcaatctcctga

SEQ ID NO: 1549557 - DNA, 15 bp, Homo sapiens
ggtctcaatctcctg

SEQ ID NO: 1549558 - DNA, 15 bp, Homo sapiens
atggtctcaatctcc

SEQ ID NO: 1549559 - DNA, 15 bp, Homo sapiens
gatggtctcaatctc

SEQ ID NO: 1549560 - DNA, 15 bp, Homo sapiens
ggatggtctcaatct

SEQ ID NO: 1549561 - DNA, 15 bp, Homo sapiens
aggatggtctcaatc

SEQ ID NO: 1549562 - DNA, 15 bp, Homo sapiens
caggatggtctcaat

SEQ ID NO: 1549563 - DNA, 15 bp, Homo sapiens
ccaggatggtctcaa

SEQ ID NO: 1549564 - DNA, 15 bp, Homo sapiens
gccaggatggtctca

SEQ ID NO: 1549565 - DNA, 15 bp, Homo sapiens
gagtagagacggggt

SEQ ID NO: 1549566 - DNA, 15 bp, Homo sapiens
tgagtagagacgggg

SEQ ID NO: 1549567 - DNA, 15 bp, Homo sapiens
ttgagtagagacggg

SEQ ID NO: 1549568 - DNA, 15 bp, Homo sapiens
tttgagtagagacgg

SEQ ID NO: 1549569 - DNA, 15 bp, Homo sapiens
ttttgagtagagacg

SEQ ID NO: 1549570 - DNA, 15 bp, Homo sapiens
attttgagtagagac

SEQ ID NO: 1549571 - DNA, 15 bp, Homo sapiens
atattttgagtagag

SEQ ID NO: 1549572 - DNA, 15 bp, Homo sapiens
catattttgagtaga

SEQ ID NO: 1549573 - DNA, 15 bp, Homo sapiens
tcatattttgagtag

SEQ ID NO: 1549574 - DNA, 15 bp, Homo sapiens
ttcatattttgagta

SEQ ID NO: 1549575 - DNA, 15 bp, Homo sapiens
tttcatattttgagt

SEQ ID NO: 1549576 - DNA, 15 bp, Homo sapiens
ttttcatattttgag

SEQ ID NO: 1549577 - DNA, 15 bp, Homo sapiens
tttttcatattttga

SEQ ID NO: 1549578 - DNA, 15 bp, Homo sapiens
ttttttcatattttg

SEQ ID NO: 1549579 - DNA, 15 bp, Homo sapiens
tttttttcatatttt

SEQ ID NO: 1549580 - DNA, 15 bp, Homo sapiens
caaattttttttcat

SEQ ID NO: 1549581 - DNA, 15 bp, Homo sapiens
gcaaattttttttca

SEQ ID NO: 1549582 - DNA, 15 bp, Homo sapiens
ggcaaattttttttc

SEQ ID NO: 1549583 - DNA, 15 bp, Homo sapiens
cggcaaatttttttt

SEQ ID NO: 1549584 - DNA, 15 bp, Homo sapiens
ccggcaaattttttt

SEQ ID NO: 1549585 - DNA, 15 bp, Homo sapiens
cccggcaaatttttt

SEQ ID NO: 1549586 - DNA, 15 bp, Homo sapiens
gcccggcaaattttt

SEQ ID NO: 1549587 - DNA, 15 bp, Homo sapiens
cgcccggcaaatttt

SEQ ID NO: 1549588 - DNA, 15 bp, Homo sapiens
acgcccggcaaattt

SEQ ID NO: 1549589 - DNA, 15 bp, Homo sapiens
cacgcccggcaaatt

SEQ ID NO: 1549590 - DNA, 15 bp, Homo sapiens
ccacgcccggcaaat

SEQ ID NO: 1549591 - DNA, 15 bp, Homo sapiens
accacgcccggcaaa

SEQ ID NO: 1549592 - DNA, 15 bp, Homo sapiens
caccacgcccggcaa

SEQ ID NO: 1549593 - DNA, 15 bp, Homo sapiens
ccaccacgcccggca

SEQ ID NO: 1549594 - DNA, 15 bp, Homo sapiens
cccaccaccacgccc

SEQ ID NO: 1549595 - DNA, 15 bp, Homo sapiens
aggttcacaccattc

SEQ ID NO: 1549596 - DNA, 15 bp, Homo sapiens
caggttcacaccatt

SEQ ID NO: 1549597 - DNA, 15 bp, Homo sapiens
acaggttcacaccat

SEQ ID NO: 1549598 - DNA, 15 bp, Homo sapiens
cacaggttcacacca

SEQ ID NO: 1549599 - DNA, 15 bp, Homo sapiens
tcacaggttcacacc

SEQ ID NO: 1549600 - DNA, 15 bp, Homo sapiens
ttcacaggttcacac

SEQ ID NO: 1549601 - DNA, 15 bp, Homo sapiens
gttcacaggttcaca

SEQ ID NO: 1549602 - DNA, 15 bp, Homo sapiens
ggttcacaggttcac

SEQ ID NO: 1549603 - DNA, 15 bp, Homo sapiens
gggttcacaggttca

SEQ ID NO: 1549604 - DNA, 15 bp, Homo sapiens
cgggttcacaggttc

SEQ ID NO: 1549605 - DNA, 15 bp, Homo sapiens
ccgggttcacaggtt

SEQ ID NO: 1549606 - DNA, 15 bp, Homo sapiens
cccgggttcacaggt

SEQ ID NO: 1549607 - DNA, 15 bp, Homo sapiens
tcccgggttcacagg

SEQ ID NO: 1549608 - DNA, 15 bp, Homo sapiens
ctcccgggttcacag

SEQ ID NO: 1549609 - DNA, 15 bp, Homo sapiens
cctcccgggttcaca

SEQ ID NO: 1549610 - DNA, 15 bp, Homo sapiens
ttccgcctcccgggt

SEQ ID NO: 1549611 - DNA, 15 bp, Homo sapiens
gttccgcctcccggg

SEQ ID NO: 1549612 - DNA, 15 bp, Homo sapiens
agttccgcctcccgg

SEQ ID NO: 1549613 - DNA, 15 bp, Homo sapiens
aagttccgcctcccg

SEQ ID NO: 1549614 - DNA, 15 bp, Homo sapiens
caagttccgcctccc

SEQ ID NO: 1549615 - DNA, 15 bp, Homo sapiens
ggctcactgcaagtt

SEQ ID NO: 1549616 - DNA, 15 bp, Homo sapiens
cggctcactgcaagt

SEQ ID NO: 1549617 - DNA, 15 bp, Homo sapiens
agcgatctcggctca

SEQ ID NO: 1549618 - DNA, 15 bp, Homo sapiens
gagcgatctcggctc

SEQ ID NO: 1549619 - DNA, 15 bp, Homo sapiens
ggagcgatctcggct

SEQ ID NO: 1549620 - DNA, 15 bp, Homo sapiens
aggagcgatctcggc

SEQ ID NO: 1549621 - DNA, 15 bp, Homo sapiens
gaggagcgatctcgg

SEQ ID NO: 1549622 - DNA, 15 bp, Homo sapiens
agaggagcgatctcg

SEQ ID NO: 1549623 - DNA, 15 bp, Homo sapiens
cagaggagcgatctc

SEQ ID NO: 1549624 - DNA, 15 bp, Homo sapiens
gcagaggagcgatct

SEQ ID NO: 1549625 - DNA, 15 bp, Homo sapiens
tgcagaggagcgatc

SEQ ID NO: 1549626 - DNA, 15 bp, Homo sapiens
gtgcagaggagcgat

SEQ ID NO: 1549627 - DNA, 15 bp, Homo sapiens
agtgcagaggagcga

SEQ ID NO: 1549628 - DNA, 15 bp, Homo sapiens
gagtgcagaggagcg

SEQ ID NO: 1549629 - DNA, 15 bp, Homo sapiens
ggagtgcagaggagc

SEQ ID NO: 1549630 - DNA, 15 bp, Homo sapiens
tggagtgcagaggag

SEQ ID NO: 1549631 - DNA, 15 bp, Homo sapiens
ctggagtgcagagga

SEQ ID NO: 1549632 - DNA, 15 bp, Homo sapiens
tcctctgtcgcccag

SEQ ID NO: 1549633 - DNA, 15 bp, Homo sapiens
ctcctctgtcgccca

SEQ ID NO: 1549634 - DNA, 15 bp, Homo sapiens
tctcctctgtcgccc

SEQ ID NO: 1549635 - DNA, 15 bp, Homo sapiens
gtctcctctgtcgcc

SEQ ID NO: 1549636 - DNA, 15 bp, Homo sapiens
agtctcctctgtcgc

SEQ ID NO: 1549637 - DNA, 15 bp, Homo sapiens
gagtctcctctgtcg

SEQ ID NO: 1549638 - DNA, 15 bp, Homo sapiens
ggagtctcctctgtc

SEQ ID NO: 1549639 - DNA, 15 bp, Homo sapiens
tggagtctcctctgt

SEQ ID NO: 1549640 - DNA, 15 bp, Homo sapiens
atggagtctcctctg

SEQ ID NO: 1549641 - DNA, 15 bp, Homo sapiens
gatggagtctcctct

SEQ ID NO: 1549642 - DNA, 15 bp, Homo sapiens
agatggagtctcctc

SEQ ID NO: 1549643 - DNA, 15 bp, Homo sapiens
gagatggagtctcct

SEQ ID NO: 1549644 - DNA, 15 bp, Homo sapiens
tattcattttttttt

SEQ ID NO: 1549645 - DNA, 15 bp, Homo sapiens
ttattcatttttttt

SEQ ID NO: 1549646 - DNA, 15 bp, Homo sapiens
attattcattttttt

SEQ ID NO: 1549647 - DNA, 15 bp, Homo sapiens
gattattcatttttt

SEQ ID NO: 1549648 - DNA, 15 bp, Homo sapiens
agattattcattttt

SEQ ID NO: 1549649 - DNA, 15 bp, Homo sapiens
gagattattcatttt

SEQ ID NO: 1549650 - DNA, 15 bp, Homo sapiens
tgagattattcattt

SEQ ID NO: 1549651 - DNA, 15 bp, Homo sapiens
ctgagattattcatt

SEQ ID NO: 1549652 - DNA, 15 bp, Homo sapiens
actgagattattcat

SEQ ID NO: 1549653 - DNA, 15 bp, Homo sapiens
tactgagattattca

SEQ ID NO: 1549654 - DNA, 15 bp, Homo sapiens
atactgagattattc

SEQ ID NO: 1549655 - DNA, 15 bp, Homo sapiens
ttatactgagattat

SEQ ID NO: 1549656 - DNA, 15 bp, Homo sapiens
attatactgagatta

SEQ ID NO: 1549657 - DNA, 15 bp, Homo sapiens
gattatactgagatt

SEQ ID NO: 1549658 - DNA, 15 bp, Homo sapiens
tgattatactgagat

SEQ ID NO: 1549659 - DNA, 15 bp, Homo sapiens
gtgattatactgaga

SEQ ID NO: 1549660 - DNA, 15 bp, Homo sapiens
agtgattatactgag

SEQ ID NO: 1549661 - DNA, 15 bp, Homo sapiens
cagtgattatactga

SEQ ID NO: 1549662 - DNA, 15 bp, Homo sapiens
tcagtgattatactg

SEQ ID NO: 1549663 - DNA, 15 bp, Homo sapiens
ttcagtgattatact

SEQ ID NO: 1549664 - DNA, 15 bp, Homo sapiens
tttcagtgattatac

SEQ ID NO: 1549665 - DNA, 15 bp, Homo sapiens
ttttcagtgattata

SEQ ID NO: 1549666 - DNA, 15 bp, Homo sapiens
tttttcagtgattat

SEQ ID NO: 1549667 - DNA, 15 bp, Homo sapiens
ttttttcagtgatta

SEQ ID NO: 1549668 - DNA, 15 bp, Homo sapiens
tttttttcagtgatt

SEQ ID NO: 1549669 - DNA, 15 bp, Homo sapiens
atttttttcagtgat

SEQ ID NO: 1549670 - DNA, 15 bp, Homo sapiens
tatttttttcagtga

SEQ ID NO: 1549671 - DNA, 15 bp, Homo sapiens
atatttttttcagtg

SEQ ID NO: 1549672 - DNA, 15 bp, Homo sapiens
aatatttttttcagt

SEQ ID NO: 1549673 - DNA, 15 bp, Homo sapiens
gaatatttttttcag

SEQ ID NO: 1549674 - DNA, 15 bp, Homo sapiens
tgaatatttttttca

SEQ ID NO: 1549675 - DNA, 15 bp, Homo sapiens
ctgaatatttttttc

SEQ ID NO: 1549676 - DNA, 15 bp, Homo sapiens
tctgaatattttttt

SEQ ID NO: 1549677 - DNA, 15 bp, Homo sapiens
ctctgaatatttttt

SEQ ID NO: 1549678 - DNA, 15 bp, Homo sapiens
gctctgaatattttt

SEQ ID NO: 1549679 - DNA, 15 bp, Homo sapiens
ggctctgaatatttt

SEQ ID NO: 1549680 - DNA, 15 bp, Homo sapiens
aggctctgaatattt

SEQ ID NO: 1549681 - DNA, 15 bp, Homo sapiens
taggctctgaatatt

SEQ ID NO: 1549682 - DNA, 15 bp, Homo sapiens
gtaggctctgaatat

SEQ ID NO: 1549683 - DNA, 15 bp, Homo sapiens
agtaggctctgaata

SEQ ID NO: 1549684 - DNA, 15 bp, Homo sapiens
cagtaggctctgaat

SEQ ID NO: 1549685 - DNA, 15 bp, Homo sapiens
gcagtaggctctgaa

SEQ ID NO: 1549686 - DNA, 15 bp, Homo sapiens
tgcagtaggctctga

SEQ ID NO: 1549687 - DNA, 15 bp, Homo sapiens
atgcagtaggctctg

SEQ ID NO: 1549688 - DNA, 15 bp, Homo sapiens
catgcagtaggctct

SEQ ID NO: 1549689 - DNA, 15 bp, Homo sapiens
acatgcagtaggctc

SEQ ID NO: 1549690 - DNA, 15 bp, Homo sapiens
tacatgcagtaggct

SEQ ID NO: 1549691 - DNA, 15 bp, Homo sapiens
atacatgcagtaggc

SEQ ID NO: 1549692 - DNA, 15 bp, Homo sapiens
tatacatgcagtagg

SEQ ID NO: 1549693 - DNA, 15 bp, Homo sapiens
ctatacatgcagtag

SEQ ID NO: 1549694 - DNA, 15 bp, Homo sapiens
gctatacatgcagta

SEQ ID NO: 1549695 - DNA, 15 bp, Homo sapiens
tgctatacatgcagt

SEQ ID NO: 1549696 - DNA, 15 bp, Homo sapiens
atgctatacatgcag

SEQ ID NO: 1549697 - DNA, 15 bp, Homo sapiens
tatgctatacatgca

SEQ ID NO: 1549698 - DNA, 15 bp, Homo sapiens
ttatgctatacatgc

SEQ ID NO: 1549699 - DNA, 15 bp, Homo sapiens
attatgctatacatg

SEQ ID NO: 1549700 - DNA, 15 bp, Homo sapiens
gattatgctatacat

SEQ ID NO: 1549701 - DNA, 15 bp, Homo sapiens
ggattatgctataca

SEQ ID NO: 1549702 - DNA, 15 bp, Homo sapiens
gggattatgctatac

SEQ ID NO: 1549703 - DNA, 15 bp, Homo sapiens
ggggattatgctata

SEQ ID NO: 1549704 - DNA, 15 bp, Homo sapiens
cggggattatgctat

SEQ ID NO: 1549705 - DNA, 15 bp, Homo sapiens
acggggattatgcta

SEQ ID NO: 1549706 - DNA, 15 bp, Homo sapiens
aacggggattatgct

SEQ ID NO: 1549707 - DNA, 15 bp, Homo sapiens
aaacggggattatgc

SEQ ID NO: 1549708 - DNA, 15 bp, Homo sapiens
aaaacggggattatg

SEQ ID NO: 1549709 - DNA, 15 bp, Homo sapiens
aaaaacggggattat

SEQ ID NO: 1549710 - DNA, 15 bp, Homo sapiens
caaaaacggggatta

SEQ ID NO: 1549711 - DNA, 15 bp, Homo sapiens
gcaaaaacggggatt

SEQ ID NO: 1549712 - DNA, 15 bp, Homo sapiens
cgcaaaaacggggat

SEQ ID NO: 1549713 - DNA, 15 bp, Homo sapiens
ccgcaaaaacgggga

SEQ ID NO: 1549714 - DNA, 15 bp, Homo sapiens
cccgcaaaaacgggg

SEQ ID NO: 1549715 - DNA, 15 bp, Homo sapiens
ccccgcaaaaacggg

SEQ ID NO: 1549716 - DNA, 15 bp, Homo sapiens
cccccgcaaaaacgg

SEQ ID NO: 1549717 - DNA, 15 bp, Homo sapiens
tcccccgcaaaaacg

SEQ ID NO: 1549718 - DNA, 15 bp, Homo sapiens
ctcccccgcaaaaac

SEQ ID NO: 1549719 - DNA, 15 bp, Homo sapiens
actcccccgcaaaaa

SEQ ID NO: 1549720 - DNA, 15 bp, Homo sapiens
cactcccccgcaaaa

SEQ ID NO: 1549721 - DNA, 15 bp, Homo sapiens
ccactcccccgcaaa

SEQ ID NO: 1549722 - DNA, 15 bp, Homo sapiens
cccactcccccgcaa

SEQ ID NO: 1549723 - DNA, 15 bp, Homo sapiens
tcccactcccccgca

SEQ ID NO: 1549724 - DNA, 15 bp, Homo sapiens
ctcccactcccccgc

SEQ ID NO: 1549725 - DNA, 15 bp, Homo sapiens
actcccactcccccg

SEQ ID NO: 1549726 - DNA, 15 bp, Homo sapiens
cactcccactccccc

SEQ ID NO: 1549727 - DNA, 15 bp, Homo sapiens
ccactcccactcccc

SEQ ID NO: 1549728 - DNA, 15 bp, Homo sapiens
cccactcccactccc

SEQ ID NO: 1549729 - DNA, 15 bp, Homo sapiens
acccactcccactcc

SEQ ID NO: 1549730 - DNA, 15 bp, Homo sapiens
aacccactcccactc

SEQ ID NO: 1549731 - DNA, 15 bp, Homo sapiens
taacccactcccact

SEQ ID NO: 1549732 - DNA, 15 bp, Homo sapiens
ataacccactcccac

SEQ ID NO: 1549733 - DNA, 15 bp, Homo sapiens
tataacccactccca

SEQ ID NO: 1549734 - DNA, 15 bp, Homo sapiens
gtataacccactccc

SEQ ID NO: 1549735 - DNA, 15 bp, Homo sapiens
ggtataacccactcc

SEQ ID NO: 1549736 - DNA, 15 bp, Homo sapiens
aggtataacccactc

SEQ ID NO: 1549737 - DNA, 15 bp, Homo sapiens
caggtataacccact

SEQ ID NO: 1549738 - DNA, 15 bp, Homo sapiens
acaggtataacccac

SEQ ID NO: 1549739 - DNA, 15 bp, Homo sapiens
cacaggtataaccca

SEQ ID NO: 1549740 - DNA, 15 bp, Homo sapiens
acacaggtataaccc

SEQ ID NO: 1549741 - DNA, 15 bp, Homo sapiens
tacacaggtataacc

SEQ ID NO: 1549742 - DNA, 15 bp, Homo sapiens
gtacacaggtataac

SEQ ID NO: 1549743 - DNA, 15 bp, Homo sapiens
tgtacacaggtataa

SEQ ID NO: 1549744 - DNA, 15 bp, Homo sapiens
gtgtacacaggtata

SEQ ID NO: 1549745 - DNA, 15 bp, Homo sapiens
tgtgtacacaggtat

SEQ ID NO: 1549746 - DNA, 15 bp, Homo sapiens
gtgtgtacacaggta

SEQ ID NO: 1549747 - DNA, 15 bp, Homo sapiens
tgtgtgtacacaggt

SEQ ID NO: 1549748 - DNA, 15 bp, Homo sapiens
gtgtgtgtacacagg

SEQ ID NO: 1549749 - DNA, 15 bp, Homo sapiens
tgtgtgtgtacacag

SEQ ID NO: 1549750 - DNA, 15 bp, Homo sapiens
atgtgtgtgtacaca

SEQ ID NO: 1549751 - DNA, 15 bp, Homo sapiens
tatgtgtgtgtacac

SEQ ID NO: 1549752 - DNA, 15 bp, Homo sapiens
ttatgtgtgtgtaca

SEQ ID NO: 1549753 - DNA, 15 bp, Homo sapiens
tttatgtgtgtgtac

SEQ ID NO: 1549754 - DNA, 15 bp, Homo sapiens
atttatgtgtgtgta

SEQ ID NO: 1549755 - DNA, 15 bp, Homo sapiens
catttatgtgtgtgt

SEQ ID NO: 1549756 - DNA, 15 bp, Homo sapiens
acatttatgtgtgtg

SEQ ID NO: 1549757 - DNA, 15 bp, Homo sapiens
tacatttatgtgtgt

SEQ ID NO: 1549758 - DNA, 15 bp, Homo sapiens
gtacatttatgtgtg

SEQ ID NO: 1549759 - DNA, 15 bp, Homo sapiens
tgtacatttatgtgt

SEQ ID NO: 1549760 - DNA, 15 bp, Homo sapiens
atgtacatttatgtg

SEQ ID NO: 1549761 - DNA, 15 bp, Homo sapiens
aatgtacatttatgt

SEQ ID NO: 1549762 - DNA, 15 bp, Homo sapiens
taatgtacatttatg

SEQ ID NO: 1549763 - DNA, 15 bp, Homo sapiens
ttaatgtacatttat

SEQ ID NO: 1549764 - DNA, 15 bp, Homo sapiens
gttaatgtacattta

SEQ ID NO: 1549765 - DNA, 15 bp, Homo sapiens
agttaatgtacattt

SEQ ID NO: 1549766 - DNA, 15 bp, Homo sapiens
gagttaatgtacatt

SEQ ID NO: 1549767 - DNA, 15 bp, Homo sapiens
agagttaatgtacat

SEQ ID NO: 1549768 - DNA, 15 bp, Homo sapiens
tagagttaatgtaca

SEQ ID NO: 1549769 - DNA, 15 bp, Homo sapiens
gtagagttaatgtac

SEQ ID NO: 1549770 - DNA, 15 bp, Homo sapiens
tgtagagttaatgta

SEQ ID NO: 1549771 - DNA, 15 bp, Homo sapiens
atgtagagttaatgt

SEQ ID NO: 1549772 - DNA, 15 bp, Homo sapiens
tatgtagagttaatg

SEQ ID NO: 1549773 - DNA, 15 bp, Homo sapiens
ttatgtagagttaat

SEQ ID NO: 1549774 - DNA, 15 bp, Homo sapiens
tttatgtagagttaa

SEQ ID NO: 1549775 - DNA, 15 bp, Homo sapiens
atttatgtagagtta

SEQ ID NO: 1549776 - DNA, 15 bp, Homo sapiens
aatttatgtagagtt

SEQ ID NO: 1549777 - DNA, 15 bp, Homo sapiens
aaatttatgtagagt

SEQ ID NO: 1549778 - DNA, 15 bp, Homo sapiens
caaatttatgtagag

SEQ ID NO: 1549779 - DNA, 15 bp, Homo sapiens
tcaaatttatgtaga

SEQ ID NO: 1549780 - DNA, 15 bp, Homo sapiens
ttcaaatttatgtag

SEQ ID NO: 1549781 - DNA, 15 bp, Homo sapiens
tttcaaatttatgta

SEQ ID NO: 1549782 - DNA, 15 bp, Homo sapiens
ctttcaaatttatgt

SEQ ID NO: 1549783 - DNA, 15 bp, Homo sapiens
gctttcaaatttatg

SEQ ID NO: 1549784 - DNA, 15 bp, Homo sapiens
ggctttcaaatttat

SEQ ID NO: 1549785 - DNA, 15 bp, Homo sapiens
aggctttcaaattta

SEQ ID NO: 1549786 - DNA, 15 bp, Homo sapiens
caggctttcaaattt

SEQ ID NO: 1549787 - DNA, 15 bp, Homo sapiens
tcaggctttcaaatt

SEQ ID NO: 1549788 - DNA, 15 bp, Homo sapiens
ctcaggctttcaaat

SEQ ID NO: 1549789 - DNA, 15 bp, Homo sapiens
cctcaggctttcaaa

SEQ ID NO: 1549790 - DNA, 15 bp, Homo sapiens
tcctcaggctttcaa

SEQ ID NO: 1549791 - DNA, 15 bp, Homo sapiens
ctcctcaggctttca

SEQ ID NO: 1549792 - DNA, 15 bp, Homo sapiens
tctcctcaggctttc

SEQ ID NO: 1549793 - DNA, 15 bp, Homo sapiens
ctctcctcaggcttt

SEQ ID NO: 1549794 - DNA, 15 bp, Homo sapiens
tctctcctcaggctt

SEQ ID NO: 1549795 - DNA, 15 bp, Homo sapiens
atctctcctcaggct

SEQ ID NO: 1549796 - DNA, 15 bp, Homo sapiens
catctctcctcaggc

SEQ ID NO: 1549797 - DNA, 15 bp, Homo sapiens
tcatctctcctcagg

SEQ ID NO: 1549798 - DNA, 15 bp, Homo sapiens
ctcatctctcctcag

SEQ ID NO: 1549799 - DNA, 15 bp, Homo sapiens
tctcatctctcctca

SEQ ID NO: 1549800 - DNA, 15 bp, Homo sapiens
atctcatctctcctc

SEQ ID NO: 1549801 - DNA, 15 bp, Homo sapiens
catctcatctctcct

SEQ ID NO: 1549802 - DNA, 15 bp, Homo sapiens
tcatctcatctctcc

SEQ ID NO: 1549803 - DNA, 15 bp, Homo sapiens
atcatctcatctctc

SEQ ID NO: 1549804 - DNA, 15 bp, Homo sapiens
tatcatctcatctct

SEQ ID NO: 1549805 - DNA, 15 bp, Homo sapiens
gtatcatctcatctc

SEQ ID NO: 1549806 - DNA, 15 bp, Homo sapiens
tgtatcatctcatct

SEQ ID NO: 1549807 - DNA, 15 bp, Homo sapiens
gtgtatcatctcatc

SEQ ID NO: 1549808 - DNA, 15 bp, Homo sapiens
ggtgtatcatctcat

SEQ ID NO: 1549809 - DNA, 15 bp, Homo sapiens
tggtgtatcatctca

SEQ ID NO: 1549810 - DNA, 15 bp, Homo sapiens
ttggtgtatcatctc

SEQ ID NO: 1549811 - DNA, 15 bp, Homo sapiens
attggtgtatcatct

SEQ ID NO: 1549812 - DNA, 15 bp, Homo sapiens
cattggtgtatcatc

SEQ ID NO: 1549813 - DNA, 15 bp, Homo sapiens
acattggtgtatcat

SEQ ID NO: 1549814 - DNA, 15 bp, Homo sapiens
aacattggtgtatca

SEQ ID NO: 1549815 - DNA, 15 bp, Homo sapiens
taacattggtgtatc

SEQ ID NO: 1549816 - DNA, 15 bp, Homo sapiens
ttaacattggtgtat

SEQ ID NO: 1549817 - DNA, 15 bp, Homo sapiens
attaacattggtgta

SEQ ID NO: 1549818 - DNA, 15 bp, Homo sapiens
tattaacattggtgt

SEQ ID NO: 1549819 - DNA, 15 bp, Homo sapiens
gtattaacattggtg

SEQ ID NO: 1549820 - DNA, 15 bp, Homo sapiens
tgtattaacattggt

SEQ ID NO: 1549821 - DNA, 15 bp, Homo sapiens
ctgtattaacattgg

SEQ ID NO: 1549822 - DNA, 15 bp, Homo sapiens
actgtattaacattg

SEQ ID NO: 1549823 - DNA, 15 bp, Homo sapiens
aactgtattaacatt

SEQ ID NO: 1549824 - DNA, 15 bp, Homo sapiens
aaactgtattaacat

SEQ ID NO: 1549825 - DNA, 15 bp, Homo sapiens
aaaactgtattaaca

SEQ ID NO: 1549826 - DNA, 15 bp, Homo sapiens
gaaaactgtattaac

SEQ ID NO: 1549827 - DNA, 15 bp, Homo sapiens
tgaaaactgtattaa

SEQ ID NO: 1549828 - DNA, 15 bp, Homo sapiens
atgaaaactgtatta

SEQ ID NO: 1549829 - DNA, 15 bp, Homo sapiens
aatgaaaactgtatt

SEQ ID NO: 1549830 - DNA, 15 bp, Homo sapiens
aaatgaaaactgtat

SEQ ID NO: 1549831 - DNA, 15 bp, Homo sapiens
aaaatgaaaactgta

SEQ ID NO: 1549832 - DNA, 15 bp, Homo sapiens
caaaatgaaaactgt

SEQ ID NO: 1549833 - DNA, 15 bp, Homo sapiens
acaaaatgaaaactg

SEQ ID NO: 1549834 - DNA, 15 bp, Homo sapiens
cacaaaatgaaaact

SEQ ID NO: 1549835 - DNA, 15 bp, Homo sapiens
ccacaaaatgaaaac

SEQ ID NO: 1549836 - DNA, 15 bp, Homo sapiens
accacaaaatgaaaa

SEQ ID NO: 1549837 - DNA, 15 bp, Homo sapiens
caccacaaaatgaaa

SEQ ID NO: 1549838 - DNA, 15 bp, Homo sapiens
tcaccacaaaatgaa

SEQ ID NO: 1549839 - DNA, 15 bp, Homo sapiens
atcaccacaaaatga

SEQ ID NO: 1549840 - DNA, 15 bp, Homo sapiens
catcaccacaaaatg

SEQ ID NO: 1549841 - DNA, 15 bp, Homo sapiens
gcatcaccacaaaat

SEQ ID NO: 1549842 - DNA, 15 bp, Homo sapiens
agcatcaccacaaaa

SEQ ID NO: 1549843 - DNA, 15 bp, Homo sapiens
aagcatcaccacaaa

SEQ ID NO: 1549844 - DNA, 15 bp, Homo sapiens
aaagcatcaccacaa

SEQ ID NO: 1549845 - DNA, 15 bp, Homo sapiens
gaaagcatcaccaca

SEQ ID NO: 1549846 - DNA, 15 bp, Homo sapiens
ggaaagcatcaccac

SEQ ID NO: 1549847 - DNA, 15 bp, Homo sapiens
aggaaagcatcacca

SEQ ID NO: 1549848 - DNA, 15 bp, Homo sapiens
aaggaaagcatcacc

SEQ ID NO: 1549849 - DNA, 15 bp, Homo sapiens
aaaggaaagcatcac

SEQ ID NO: 1549850 - DNA, 15 bp, Homo sapiens
aaaaggaaagcatca

SEQ ID NO: 1549851 - DNA, 15 bp, Homo sapiens
taaaaggaaagcatc

SEQ ID NO: 1549852 - DNA, 15 bp, Homo sapiens
gtaaaaggaaagcat

SEQ ID NO: 1549853 - DNA, 15 bp, Homo sapiens
ggtaaaaggaaagca

SEQ ID NO: 1549854 - DNA, 15 bp, Homo sapiens
tggtaaaaggaaagc

SEQ ID NO: 1549855 - DNA, 15 bp, Homo sapiens
ttggtaaaaggaaag

SEQ ID NO: 1549856 - DNA, 15 bp, Homo sapiens
tttggtaaaaggaaa

SEQ ID NO: 1549857 - DNA, 15 bp, Homo sapiens
gtttggtaaaaggaa

SEQ ID NO: 1549858 - DNA, 15 bp, Homo sapiens
agtttggtaaaagga

SEQ ID NO: 1549859 - DNA, 15 bp, Homo sapiens
aagtttggtaaaagg

SEQ ID NO: 1549860 - DNA, 15 bp, Homo sapiens
aaagtttggtaaaag

SEQ ID NO: 1549861 - DNA, 15 bp, Homo sapiens
gaaagtttggtaaaa

SEQ ID NO: 1549862 - DNA, 15 bp, Homo sapiens
agaaagtttggtaaa

SEQ ID NO: 1549863 - DNA, 15 bp, Homo sapiens
tagaaagtttggtaa

SEQ ID NO: 1549864 - DNA, 15 bp, Homo sapiens
atagaaagtttggta

SEQ ID NO: 1549865 - DNA, 15 bp, Homo sapiens
catagaaagtttggt

SEQ ID NO: 1549866 - DNA, 15 bp, Homo sapiens
tcatagaaagtttgg

SEQ ID NO: 1549867 - DNA, 15 bp, Homo sapiens
atcatagaaagtttg

SEQ ID NO: 1549868 - DNA, 15 bp, Homo sapiens
aatcatagaaagttt

SEQ ID NO: 1549869 - DNA, 15 bp, Homo sapiens
taatcatagaaagtt

SEQ ID NO: 1549870 - DNA, 15 bp, Homo sapiens
gtaatcatagaaagt

SEQ ID NO: 1549871 - DNA, 15 bp, Homo sapiens
ggtaatcatagaaag

SEQ ID NO: 1549872 - DNA, 15 bp, Homo sapiens
tggtaatcatagaaa

SEQ ID NO: 1549873 - DNA, 15 bp, Homo sapiens
gtggtaatcatagaa

SEQ ID NO: 1549874 - DNA, 15 bp, Homo sapiens
tgtggtaatcataga

SEQ ID NO: 1549875 - DNA, 15 bp, Homo sapiens
atgtggtaatcatag

SEQ ID NO: 1549876 - DNA, 15 bp, Homo sapiens
aatgtggtaatcata

SEQ ID NO: 1549877 - DNA, 15 bp, Homo sapiens
aaatgtggtaatcat

SEQ ID NO: 1549878 - DNA, 15 bp, Homo sapiens
gaaatgtggtaatca

SEQ ID NO: 1549879 - DNA, 15 bp, Homo sapiens
ggaaatgtggtaatc

SEQ ID NO: 1549880 - DNA, 15 bp, Homo sapiens
aggaaatgtggtaat

SEQ ID NO: 1549881 - DNA, 15 bp, Homo sapiens
aaggaaatgtggtaa

SEQ ID NO: 1549882 - DNA, 15 bp, Homo sapiens
aaaggaaatgtggta

SEQ ID NO: 1549883 - DNA, 15 bp, Homo sapiens
aaaaggaaatgtggt

SEQ ID NO: 1549884 - DNA, 15 bp, Homo sapiens
taaaaggaaatgtgg

SEQ ID NO: 1549885 - DNA, 15 bp, Homo sapiens
ataaaaggaaatgtg

SEQ ID NO: 1549886 - DNA, 15 bp, Homo sapiens
tataaaaggaaatgt

SEQ ID NO: 1549887 - DNA, 15 bp, Homo sapiens
ttataaaaggaaatg

SEQ ID NO: 1549888 - DNA, 15 bp, Homo sapiens
attataaaaggaaat

SEQ ID NO: 1549889 - DNA, 15 bp, Homo sapiens
cattataaaaggaaa

SEQ ID NO: 1549890 - DNA, 15 bp, Homo sapiens
tcattataaaaggaa

SEQ ID NO: 1549891 - DNA, 15 bp, Homo sapiens
ctcattataaaagga

SEQ ID NO: 1549892 - DNA, 15 bp, Homo sapiens
tctcattataaaagg

SEQ ID NO: 1549893 - DNA, 15 bp, Homo sapiens
ttctcattataaaag

SEQ ID NO: 1549894 - DNA, 15 bp, Homo sapiens
attctcattataaaa

SEQ ID NO: 1549895 - DNA, 15 bp, Homo sapiens
tattctcattataaa

SEQ ID NO: 1549896 - DNA, 15 bp, Homo sapiens
ttattctcattataa

SEQ ID NO: 1549897 - DNA, 15 bp, Homo sapiens
tttattctcattata

SEQ ID NO: 1549898 - DNA, 15 bp, Homo sapiens
ttttattctcattat

SEQ ID NO: 1549899 - DNA, 15 bp, Homo sapiens
gttttattctcatta

SEQ ID NO: 1549900 - DNA, 15 bp, Homo sapiens
tgttttattctcatt

SEQ ID NO: 1549901 - DNA, 15 bp, Homo sapiens
ttgttttattctcat

SEQ ID NO: 1549902 - DNA, 15 bp, Homo sapiens
gttgttttattctca

SEQ ID NO: 1549903 - DNA, 15 bp, Homo sapiens
agttgttttattctc

SEQ ID NO: 1549904 - DNA, 15 bp, Homo sapiens
aagttgttttattct

SEQ ID NO: 1549905 - DNA, 15 bp, Homo sapiens
aaagttgttttattc

SEQ ID NO: 1549906 - DNA, 15 bp, Homo sapiens
aaaagttgttttatt

SEQ ID NO: 1549907 - DNA, 15 bp, Homo sapiens
aaaaagttgttttat

SEQ ID NO: 1549908 - DNA, 15 bp, Homo sapiens
taaaaagttgtttta

SEQ ID NO: 1549909 - DNA, 15 bp, Homo sapiens
ttaaaaagttgtttt

SEQ ID NO: 1549910 - DNA, 15 bp, Homo sapiens
gttaaaaagttgttt

SEQ ID NO: 1549911 - DNA, 15 bp, Homo sapiens
tgttaaaaagttgtt

SEQ ID NO: 1549912 - DNA, 15 bp, Homo sapiens
ttgttaaaaagttgt

SEQ ID NO: 1549913 - DNA, 15 bp, Homo sapiens
cttgttaaaaagttg

SEQ ID NO: 1549914 - DNA, 15 bp, Homo sapiens
tcttgttaaaaagtt

SEQ ID NO: 1549915 - DNA, 15 bp, Homo sapiens
ttcttgttaaaaagt

SEQ ID NO: 1549916 - DNA, 15 bp, Homo sapiens
tttcttgttaaaaag

SEQ ID NO: 1549917 - DNA, 15 bp, Homo sapiens
ctttcttgttaaaaa

SEQ ID NO: 1549918 - DNA, 15 bp, Homo sapiens
cctttcttgttaaaa

SEQ ID NO: 1549919 - DNA, 15 bp, Homo sapiens
tcctttcttgttaaa

SEQ ID NO: 1549920 - DNA, 15 bp, Homo sapiens
gtcctttcttgttaa

SEQ ID NO: 1549921 - DNA, 15 bp, Homo sapiens
agtcctttcttgtta

SEQ ID NO: 1549922 - DNA, 15 bp, Homo sapiens
tagtcctttcttgtt

SEQ ID NO: 1549923 - DNA, 15 bp, Homo sapiens
ttagtcctttcttgt

SEQ ID NO: 1549924 - DNA, 15 bp, Homo sapiens
tttagtcctttcttg

SEQ ID NO: 1549925 - DNA, 15 bp, Homo sapiens
ttttagtcctttctt

SEQ ID NO: 1549926 - DNA, 15 bp, Homo sapiens
attttagtcctttct

SEQ ID NO: 1549927 - DNA, 15 bp, Homo sapiens
cattttagtcctttc

SEQ ID NO: 1549928 - DNA, 15 bp, Homo sapiens
ccattttagtccttt

SEQ ID NO: 1549929 - DNA, 15 bp, Homo sapiens
tccattttagtcctt

SEQ ID NO: 1549930 - DNA, 15 bp, Homo sapiens
ctccattttagtcct

SEQ ID NO: 1549931 - DNA, 15 bp, Homo sapiens
cctccattttagtcc

SEQ ID NO: 1549932 - DNA, 15 bp, Homo sapiens
tcctccattttagtc

SEQ ID NO: 1549933 - DNA, 15 bp, Homo sapiens
ttcctccattttagt

SEQ ID NO: 1549934 - DNA, 15 bp, Homo sapiens
tttcctccattttag

SEQ ID NO: 1549935 - DNA, 15 bp, Homo sapiens
ttttcctccatttta

SEQ ID NO: 1549936 - DNA, 15 bp, Homo sapiens
attttcctccatttt

SEQ ID NO: 1549937 - DNA, 15 bp, Homo sapiens
tattttcctccattt

SEQ ID NO: 1549938 - DNA, 15 bp, Homo sapiens
ttattttcctccatt

SEQ ID NO: 1549939 - DNA, 15 bp, Homo sapiens
cttattttcctccat

SEQ ID NO: 1549940 - DNA, 15 bp, Homo sapiens
tcttattttcctcca

SEQ ID NO: 1549941 - DNA, 15 bp, Homo sapiens
gtcttattttcctcc

SEQ ID NO: 1549942 - DNA, 15 bp, Homo sapiens
tgtcttattttcctc

SEQ ID NO: 1549943 - DNA, 15 bp, Homo sapiens
ttgtcttattttcct

SEQ ID NO: 1549944 - DNA, 15 bp, Homo sapiens
tttgtcttattttcc

SEQ ID NO: 1549945 - DNA, 15 bp, Homo sapiens
ttttgtcttattttc

SEQ ID NO: 1549946 - DNA, 15 bp, Homo sapiens
gttttgtcttatttt

SEQ ID NO: 1549947 - DNA, 15 bp, Homo sapiens
agttttgtcttattt

SEQ ID NO: 1549948 - DNA, 15 bp, Homo sapiens
aagttttgtcttatt

SEQ ID NO: 1549949 - DNA, 15 bp, Homo sapiens
aaagttttgtcttat

SEQ ID NO: 1549950 - DNA, 15 bp, Homo sapiens
aaaagttttgtctta

SEQ ID NO: 1549951 - DNA, 15 bp, Homo sapiens
gaaaagttttgtctt

SEQ ID NO: 1549952 - DNA, 15 bp, Homo sapiens
tgaaaagttttgtct

SEQ ID NO: 1549953 - DNA, 15 bp, Homo sapiens
ttgaaaagttttgtc

SEQ ID NO: 1549954 - DNA, 15 bp, Homo sapiens
tttgaaaagttttgt

SEQ ID NO: 1549955 - DNA, 15 bp, Homo sapiens
ttttgaaaagttttg

SEQ ID NO: 1549956 - DNA, 15 bp, Homo sapiens
tttttgaaaagtttt

SEQ ID NO: 1549957 - DNA, 15 bp, Homo sapiens
atttttgaaaagttt

SEQ ID NO: 1549958 - DNA, 15 bp, Homo sapiens
aatttttgaaaagtt

SEQ ID NO: 1549959 - DNA, 15 bp, Homo sapiens
caatttttgaaaagt

SEQ ID NO: 1549960 - DNA, 15 bp, Homo sapiens
ccaatttttgaaaag

SEQ ID NO: 1549961 - DNA, 15 bp, Homo sapiens
gccaatttttgaaaa

SEQ ID NO: 1549962 - DNA, 15 bp, Homo sapiens
agccaatttttgaaa

SEQ ID NO: 1549963 - DNA, 15 bp, Homo sapiens
aagccaatttttgaa

SEQ ID NO: 1549964 - DNA, 15 bp, Homo sapiens
taagccaatttttga

SEQ ID NO: 1549965 - DNA, 15 bp, Homo sapiens
gtaagccaatttttg

SEQ ID NO: 1549966 - DNA, 15 bp, Homo sapiens
agtaagccaattttt

SEQ ID NO: 1549967 - DNA, 15 bp, Homo sapiens
cagtaagccaatttt

SEQ ID NO: 1549968 - DNA, 15 bp, Homo sapiens
ccagtaagccaattt

SEQ ID NO: 1549969 - DNA, 15 bp, Homo sapiens
gccagtaagccaatt

SEQ ID NO: 1549970 - DNA, 15 bp, Homo sapiens
agccagtaagccaat

SEQ ID NO: 1549971 - DNA, 15 bp, Homo sapiens
aagccagtaagccaa

SEQ ID NO: 1549972 - DNA, 15 bp, Homo sapiens
aaagccagtaagcca

SEQ ID NO: 1549973 - DNA, 15 bp, Homo sapiens
aaaagccagtaagcc

SEQ ID NO: 1549974 - DNA, 15 bp, Homo sapiens
taaaagccagtaagc

SEQ ID NO: 1549975 - DNA, 15 bp, Homo sapiens
ttaaaagccagtaag

SEQ ID NO: 1549976 - DNA, 15 bp, Homo sapiens
tttaaaagccagtaa

SEQ ID NO: 1549977 - DNA, 15 bp, Homo sapiens
ttttaaaagccagta

SEQ ID NO: 1549978 - DNA, 15 bp, Homo sapiens
attttaaaagccagt

SEQ ID NO: 1549979 - DNA, 15 bp, Homo sapiens
aattttaaaagccag

SEQ ID NO: 1549980 - DNA, 15 bp, Homo sapiens
taattttaaaagcca

SEQ ID NO: 1549981 - DNA, 15 bp, Homo sapiens
gtaattttaaaagcc

SEQ ID NO: 1549982 - DNA, 15 bp, Homo sapiens
agtaattttaaaagc

SEQ ID NO: 1549983 - DNA, 15 bp, Homo sapiens
aagtaattttaaaag

SEQ ID NO: 1549984 - DNA, 15 bp, Homo sapiens
aaagtaattttaaaa

SEQ ID NO: 1549985 - DNA, 15 bp, Homo sapiens
gaaagtaattttaaa

SEQ ID NO: 1549986 - DNA, 15 bp, Homo sapiens
agaaagtaattttaa

SEQ ID NO: 1549987 - DNA, 15 bp, Homo sapiens
aagaaagtaatttta

SEQ ID NO: 1549988 - DNA, 15 bp, Homo sapiens
gaagaaagtaatttt

SEQ ID NO: 1549989 - DNA, 15 bp, Homo sapiens
tgaagaaagtaattt

SEQ ID NO: 1549990 - DNA, 15 bp, Homo sapiens
ttgaagaaagtaatt

SEQ ID NO: 1549991 - DNA, 15 bp, Homo sapiens
cttgaagaaagtaat

SEQ ID NO: 1549992 - DNA, 15 bp, Homo sapiens
ccttgaagaaagtaa

SEQ ID NO: 1549993 - DNA, 15 bp, Homo sapiens
tccttgaagaaagta

SEQ ID NO: 1549994 - DNA, 15 bp, Homo sapiens
gtccttgaagaaagt

SEQ ID NO: 1549995 - DNA, 15 bp, Homo sapiens
agtccttgaagaaag

SEQ ID NO: 1549996 - DNA, 15 bp, Homo sapiens
cagtccttgaagaaa

SEQ ID NO: 1549997 - DNA, 15 bp, Homo sapiens
acagtccttgaagaa

SEQ ID NO: 1549998 - DNA, 15 bp, Homo sapiens
aacagtccttgaaga

SEQ ID NO: 1549999 - DNA, 15 bp, Homo sapiens
gaacagtccttgaag

SEQ ID NO: 1550000 - DNA, 15 bp, Homo sapiens
agaacagtccttgaa

SEQ ID NO: 1550001 - DNA, 15 bp, Homo sapiens
aagaacagtccttga

SEQ ID NO: 1550002 - DNA, 15 bp, Homo sapiens
aaagaacagtccttg

SEQ ID NO: 1550003 - DNA, 15 bp, Homo sapiens
gaaagaacagtcctt

SEQ ID NO: 1550004 - DNA, 15 bp, Homo sapiens
agaaagaacagtcct

SEQ ID NO: 1550005 - DNA, 15 bp, Homo sapiens
aagaaagaacagtcc

SEQ ID NO: 1550006 - DNA, 15 bp, Homo sapiens
gaagaaagaacagtc

SEQ ID NO: 1550007 - DNA, 15 bp, Homo sapiens
cgaagaaagaacagt

SEQ ID NO: 1550008 - DNA, 15 bp, Homo sapiens
gcgaagaaagaacag

SEQ ID NO: 1550009 - DNA, 15 bp, Homo sapiens
ggcgaagaaagaaca

SEQ ID NO: 1550010 - DNA, 15 bp, Homo sapiens
aggcgaagaaagaac

SEQ ID NO: 1550011 - DNA, 15 bp, Homo sapiens
gaggcgaagaaagaa

SEQ ID NO: 1550012 - DNA, 15 bp, Homo sapiens
agaggcgaagaaaga

SEQ ID NO: 1550013 - DNA, 15 bp, Homo sapiens
tagaggcgaagaaag

SEQ ID NO: 1550014 - DNA, 15 bp, Homo sapiens
gtagaggcgaagaaa

SEQ ID NO: 1550015 - DNA, 15 bp, Homo sapiens
tgtagaggcgaagaa

SEQ ID NO: 1550016 - DNA, 15 bp, Homo sapiens
ttgtagaggcgaaga

SEQ ID NO: 1550017 - DNA, 15 bp, Homo sapiens
tttgtagaggcgaag

SEQ ID NO: 1550018 - DNA, 15 bp, Homo sapiens
ttttgtagaggcgaa

SEQ ID NO: 1550019 - DNA, 15 bp, Homo sapiens
tttttgtagaggcga

SEQ ID NO: 1550020 - DNA, 15 bp, Homo sapiens
atttttgtagaggcg

SEQ ID NO: 1550021 - DNA, 15 bp, Homo sapiens
tatttttgtagaggc

SEQ ID NO: 1550022 - DNA, 15 bp, Homo sapiens
atatttttgtagagg

SEQ ID NO: 1550023 - DNA, 15 bp, Homo sapiens
tatatttttgtagag

SEQ ID NO: 1550024 - DNA, 15 bp, Homo sapiens
atatatttttgtaga

SEQ ID NO: 1550025 - DNA, 15 bp, Homo sapiens
aatatatttttgtag

SEQ ID NO: 1550026 - DNA, 15 bp, Homo sapiens
aaatatatttttgta

SEQ ID NO: 1550027 - DNA, 15 bp, Homo sapiens
caaatatatttttgt

SEQ ID NO: 1550028 - DNA, 15 bp, Homo sapiens
gcaaatatatttttg

SEQ ID NO: 1550029 - DNA, 15 bp, Homo sapiens
ggcaaatatattttt

SEQ ID NO: 1550030 - DNA, 15 bp, Homo sapiens
tggcaaatatatttt

SEQ ID NO: 1550031 - DNA, 15 bp, Homo sapiens
ttggcaaatatattt

SEQ ID NO: 1550032 - DNA, 15 bp, Homo sapiens
cttggcaaatatatt

SEQ ID NO: 1550033 - DNA, 15 bp, Homo sapiens
acttggcaaatatat

SEQ ID NO: 1550034 - DNA, 15 bp, Homo sapiens
cacttggcaaatata

SEQ ID NO: 1550035 - DNA, 15 bp, Homo sapiens
acacttggcaaatat

SEQ ID NO: 1550036 - DNA, 15 bp, Homo sapiens
gacacttggcaaata

SEQ ID NO: 1550037 - DNA, 15 bp, Homo sapiens
agacacttggcaaat

SEQ ID NO: 1550038 - DNA, 15 bp, Homo sapiens
aagacacttggcaaa

SEQ ID NO: 1550039 - DNA, 15 bp, Homo sapiens
aaagacacttggcaa

SEQ ID NO: 1550040 - DNA, 15 bp, Homo sapiens
aaaagacacttggca

SEQ ID NO: 1550041 - DNA, 15 bp, Homo sapiens
gaaaagacacttggc

SEQ ID NO: 1550042 - DNA, 15 bp, Homo sapiens
agaaaagacacttgg

SEQ ID NO: 1550043 - DNA, 15 bp, Homo sapiens
gagaaaagacacttg

SEQ ID NO: 1550044 - DNA, 15 bp, Homo sapiens
ggagaaaagacactt

SEQ ID NO: 1550045 - DNA, 15 bp, Homo sapiens
tggagaaaagacact

SEQ ID NO: 1550046 - DNA, 15 bp, Homo sapiens
ctggagaaaagacac

SEQ ID NO: 1550047 - DNA, 15 bp, Homo sapiens
cctggagaaaagaca

SEQ ID NO: 1550048 - DNA, 15 bp, Homo sapiens
gcctggagaaaagac

SEQ ID NO: 1550049 - DNA, 15 bp, Homo sapiens
ggcctggagaaaaga

SEQ ID NO: 1550050 - DNA, 15 bp, Homo sapiens
aggcctggagaaaag

SEQ ID NO: 1550051 - DNA, 15 bp, Homo sapiens
caggcctggagaaaa

SEQ ID NO: 1550052 - DNA, 15 bp, Homo sapiens
tcaggcctggagaaa

SEQ ID NO: 1550053 - DNA, 15 bp, Homo sapiens
atcaggcctggagaa

SEQ ID NO: 1550054 - DNA, 15 bp, Homo sapiens
aatcaggcctggaga

SEQ ID NO: 1550055 - DNA, 15 bp, Homo sapiens
gaatcaggcctggag

SEQ ID NO: 1550056 - DNA, 15 bp, Homo sapiens
agaatcaggcctgga

SEQ ID NO: 1550057 - DNA, 15 bp, Homo sapiens
tagaatcaggcctgg

SEQ ID NO: 1550058 - DNA, 15 bp, Homo sapiens
ctagaatcaggcctg

SEQ ID NO: 1550059 - DNA, 15 bp, Homo sapiens
cctagaatcaggcct

SEQ ID NO: 1550060 - DNA, 15 bp, Homo sapiens
acctagaatcaggcc

SEQ ID NO: 1550061 - DNA, 15 bp, Homo sapiens
tacctagaatcaggc

SEQ ID NO: 1550062 - DNA, 15 bp, Homo sapiens
ttacctagaatcagg

SEQ ID NO: 1550063 - DNA, 15 bp, Homo sapiens
attacctagaatcag

SEQ ID NO: 1550064 - DNA, 15 bp, Homo sapiens
tattacctagaatca

SEQ ID NO: 1550065 - DNA, 15 bp, Homo sapiens
ctattacctagaatc

SEQ ID NO: 1550066 - DNA, 15 bp, Homo sapiens
actattacctagaat

SEQ ID NO: 1550067 - DNA, 15 bp, Homo sapiens
gactattacctagaa

SEQ ID NO: 1550068 - DNA, 15 bp, Homo sapiens
agactattacctaga

SEQ ID NO: 1550069 - DNA, 15 bp, Homo sapiens
aagactattacctag

SEQ ID NO: 1550070 - DNA, 15 bp, Homo sapiens
aaagactattaccta

SEQ ID NO: 1550071 - DNA, 15 bp, Homo sapiens
taaagactattacct

SEQ ID NO: 1550072 - DNA, 15 bp, Homo sapiens
gtaaagactattacc

SEQ ID NO: 1550073 - DNA, 15 bp, Homo sapiens
ggtaaagactattac

SEQ ID NO: 1550074 - DNA, 15 bp, Homo sapiens
aggtaaagactatta

SEQ ID NO: 1550075 - DNA, 15 bp, Homo sapiens
aaggtaaagactatt

SEQ ID NO: 1550076 - DNA, 15 bp, Homo sapiens
aaaggtaaagactat

SEQ ID NO: 1550077 - DNA, 15 bp, Homo sapiens
aaaaggtaaagacta

SEQ ID NO: 1550078 - DNA, 15 bp, Homo sapiens
taaaaggtaaagact

SEQ ID NO: 1550079 - DNA, 15 bp, Homo sapiens
gtaaaaggtaaagac

SEQ ID NO: 1550080 - DNA, 15 bp, Homo sapiens
ggtaaaaggtaaaga

SEQ ID NO: 1550081 - DNA, 15 bp, Homo sapiens
tggtaaaaggtaaag

SEQ ID NO: 1550082 - DNA, 15 bp, Homo sapiens
atggtaaaaggtaaa

SEQ ID NO: 1550083 - DNA, 15 bp, Homo sapiens
aatggtaaaaggtaa

SEQ ID NO: 1550084 - DNA, 15 bp, Homo sapiens
aaatggtaaaaggta

SEQ ID NO: 1550085 - DNA, 15 bp, Homo sapiens
aaaatggtaaaaggt

SEQ ID NO: 1550086 - DNA, 15 bp, Homo sapiens
aaaaatggtaaaagg

SEQ ID NO: 1550087 - DNA, 15 bp, Homo sapiens
aaaaaatggtaaaag

SEQ ID NO: 1550088 - DNA, 15 bp, Homo sapiens
gaaaaaatggtaaaa

SEQ ID NO: 1550089 - DNA, 15 bp, Homo sapiens
ggaaaaaatggtaaa

SEQ ID NO: 1550090 - DNA, 15 bp, Homo sapiens
gggaaaaaatggtaa

SEQ ID NO: 1550091 - DNA, 15 bp, Homo sapiens
ggggaaaaaatggta

SEQ ID NO: 1550092 - DNA, 15 bp, Homo sapiens
cggggaaaaaatggt

SEQ ID NO: 1550093 - DNA, 15 bp, Homo sapiens
tcggggaaaaaatgg

SEQ ID NO: 1550094 - DNA, 15 bp, Homo sapiens
ttcggggaaaaaatg

SEQ ID NO: 1550095 - DNA, 15 bp, Homo sapiens
attcggggaaaaaat

SEQ ID NO: 1550096 - DNA, 15 bp, Homo sapiens
aattcggggaaaaaa

SEQ ID NO: 1550097 - DNA, 15 bp, Homo sapiens
gaattcggggaaaaa

SEQ ID NO: 1550098 - DNA, 15 bp, Homo sapiens
agaattcggggaaaa

SEQ ID NO: 1550099 - DNA, 15 bp, Homo sapiens
aagaattcggggaaa

SEQ ID NO: 1550100 - DNA, 15 bp, Homo sapiens
aaagaattcggggaa

SEQ ID NO: 1550101 - DNA, 15 bp, Homo sapiens
taaagaattcgggga

SEQ ID NO: 1550102 - DNA, 15 bp, Homo sapiens
ataaagaattcgggg

SEQ ID NO: 1550103 - DNA, 15 bp, Homo sapiens
cataaagaattcggg

SEQ ID NO: 1550104 - DNA, 15 bp, Homo sapiens
acataaagaattcgg

SEQ ID NO: 1550105 - DNA, 15 bp, Homo sapiens
aacataaagaattcg

SEQ ID NO: 1550106 - DNA, 15 bp, Homo sapiens
taacataaagaattc

SEQ ID NO: 1550107 - DNA, 15 bp, Homo sapiens
ttaacataaagaatt

SEQ ID NO: 1550108 - DNA, 15 bp, Homo sapiens
tttaacataaagaat

SEQ ID NO: 1550109 - DNA, 15 bp, Homo sapiens
atttaacataaagaa

SEQ ID NO: 1550110 - DNA, 15 bp, Homo sapiens
tatttaacataaaga

SEQ ID NO: 1550111 - DNA, 15 bp, Homo sapiens
ttatttaacataaag

SEQ ID NO: 1550112 - DNA, 15 bp, Homo sapiens
attatttaacataaa

SEQ ID NO: 1550113 - DNA, 15 bp, Homo sapiens
aattatttaacataa

SEQ ID NO: 1550114 - DNA, 15 bp, Homo sapiens
caattatttaacata

SEQ ID NO: 1550115 - DNA, 15 bp, Homo sapiens
acaattatttaacat

SEQ ID NO: 1550116 - DNA, 15 bp, Homo sapiens
aacaattatttaaca

SEQ ID NO: 1550117 - DNA, 15 bp, Homo sapiens
caacaattatttaac

SEQ ID NO: 1550118 - DNA, 15 bp, Homo sapiens
tcaacaattatttaa

SEQ ID NO: 1550119 - DNA, 15 bp, Homo sapiens
atcaacaattattta

SEQ ID NO: 1550120 - DNA, 15 bp, Homo sapiens
catcaacaattattt

SEQ ID NO: 1550121 - DNA, 15 bp, Homo sapiens
acatcaacaattatt

SEQ ID NO: 1550122 - DNA, 15 bp, Homo sapiens
cacatcaacaattat

SEQ ID NO: 1550123 - DNA, 15 bp, Homo sapiens
tcacatcaacaatta

SEQ ID NO: 1550124 - DNA, 15 bp, Homo sapiens
atcacatcaacaatt

SEQ ID NO: 1550125 - DNA, 15 bp, Homo sapiens
aatcacatcaacaat

SEQ ID NO: 1550126 - DNA, 15 bp, Homo sapiens
aaatcacatcaacaa

SEQ ID NO: 1550127 - DNA, 15 bp, Homo sapiens
aaaatcacatcaaca

SEQ ID NO: 1550128 - DNA, 15 bp, Homo sapiens
gaaaatcacatcaac

SEQ ID NO: 1550129 - DNA, 15 bp, Homo sapiens
tgaaaatcacatcaa

SEQ ID NO: 1550130 - DNA, 15 bp, Homo sapiens
atgaaaatcacatca

SEQ ID NO: 1550131 - DNA, 15 bp, Homo sapiens
aatgaaaatcacatc

SEQ ID NO: 1550132 - DNA, 15 bp, Homo sapiens
caatgaaaatcacat

SEQ ID NO: 1550133 - DNA, 15 bp, Homo sapiens
tcaatgaaaatcaca

SEQ ID NO: 1550134 - DNA, 15 bp, Homo sapiens
gtcaatgaaaatcac

SEQ ID NO: 1550135 - DNA, 15 bp, Homo sapiens
ggtcaatgaaaatca

SEQ ID NO: 1550136 - DNA, 15 bp, Homo sapiens
tggtcaatgaaaatc

SEQ ID NO: 1550137 - DNA, 15 bp, Homo sapiens
atggtcaatgaaaat

SEQ ID NO: 1550138 - DNA, 15 bp, Homo sapiens
gatggtcaatgaaaa

SEQ ID NO: 1550139 - DNA, 15 bp, Homo sapiens
tgatggtcaatgaaa

SEQ ID NO: 1550140 - DNA, 15 bp, Homo sapiens
gtgatggtcaatgaa

SEQ ID NO: 1550141 - DNA, 15 bp, Homo sapiens
tgtgatggtcaatga

SEQ ID NO: 1550142 - DNA, 15 bp, Homo sapiens
atgtgatggtcaatg

SEQ ID NO: 1550143 - DNA, 15 bp, Homo sapiens
catgtgatggtcaat

SEQ ID NO: 1550144 - DNA, 15 bp, Homo sapiens
gcatgtgatggtcaa

SEQ ID NO: 1550145 - DNA, 15 bp, Homo sapiens
agcatgtgatggtca

SEQ ID NO: 1550146 - DNA, 15 bp, Homo sapiens
tagcatgtgatggtc

SEQ ID NO: 1550147 - DNA, 15 bp, Homo sapiens
ttagcatgtgatggt

SEQ ID NO: 1550148 - DNA, 15 bp, Homo sapiens
attagcatgtgatgg

SEQ ID NO: 1550149 - DNA, 15 bp, Homo sapiens
tattagcatgtgatg

SEQ ID NO: 1550150 - DNA, 15 bp, Homo sapiens
ctattagcatgtgat

SEQ ID NO: 1550151 - DNA, 15 bp, Homo sapiens
actattagcatgtga

SEQ ID NO: 1550152 - DNA, 15 bp, Homo sapiens
cactattagcatgtg

SEQ ID NO: 1550153 - DNA, 15 bp, Homo sapiens
acactattagcatgt

SEQ ID NO: 1550154 - DNA, 15 bp, Homo sapiens
tacactattagcatg

SEQ ID NO: 1550155 - DNA, 15 bp, Homo sapiens
atacactattagcat

SEQ ID NO: 1550156 - DNA, 15 bp, Homo sapiens
aatacactattagca

SEQ ID NO: 1550157 - DNA, 15 bp, Homo sapiens
aaatacactattagc

SEQ ID NO: 1550158 - DNA, 15 bp, Homo sapiens
aaaatacactattag

SEQ ID NO: 1550159 - DNA, 15 bp, Homo sapiens
aaaaatacactatta

SEQ ID NO: 1550160 - DNA, 15 bp, Homo sapiens
aaaaaatacactatt

SEQ ID NO: 1550161 - DNA, 15 bp, Homo sapiens
aaaaaaatacactat

SEQ ID NO: 1550162 - DNA, 15 bp, Homo sapiens
ggaaaaaaatacact

SEQ ID NO: 1550163 - DNA, 15 bp, Homo sapiens
tggaaaaaaatacac

SEQ ID NO: 1550164 - DNA, 15 bp, Homo sapiens
ctggaaaaaaataca

SEQ ID NO: 1550165 - DNA, 15 bp, Homo sapiens
cctggaaaaaaatac

SEQ ID NO: 1550166 - DNA, 15 bp, Homo sapiens
acctggaaaaaaata

SEQ ID NO: 1550167 - DNA, 15 bp, Homo sapiens
tacctggaaaaaaat

SEQ ID NO: 1550168 - DNA, 15 bp, Homo sapiens
atacctggaaaaaaa

SEQ ID NO: 1550169 - DNA, 15 bp, Homo sapiens
aatacctggaaaaaa

SEQ ID NO: 1550170 - DNA, 15 bp, Homo sapiens
caatacctggaaaaa

SEQ ID NO: 1550171 - DNA, 15 bp, Homo sapiens
tcaatacctggaaaa

SEQ ID NO: 1550172 - DNA, 15 bp, Homo sapiens
ttcaatacctggaaa

SEQ ID NO: 1550173 - DNA, 15 bp, Homo sapiens
attcaatacctggaa

SEQ ID NO: 1550174 - DNA, 15 bp, Homo sapiens
aattcaatacctgga

SEQ ID NO: 1550175 - DNA, 15 bp, Homo sapiens
caattcaatacctgg

SEQ ID NO: 1550176 - DNA, 15 bp, Homo sapiens
tcaattcaatacctg

SEQ ID NO: 1550177 - DNA, 15 bp, Homo sapiens
ttcaattcaatacct

SEQ ID NO: 1550178 - DNA, 15 bp, Homo sapiens
tttcaattcaatacc

SEQ ID NO: 1550179 - DNA, 15 bp, Homo sapiens
gtttcaattcaatac

SEQ ID NO: 1550180 - DNA, 15 bp, Homo sapiens
tgtttcaattcaata

SEQ ID NO: 1550181 - DNA, 15 bp, Homo sapiens
gtgtttcaattcaat

SEQ ID NO: 1550182 - DNA, 15 bp, Homo sapiens
ggtgtttcaattcaa

SEQ ID NO: 1550183 - DNA, 15 bp, Homo sapiens
aggtgtttcaattca

SEQ ID NO: 1550184 - DNA, 15 bp, Homo sapiens
aaggtgtttcaattc

SEQ ID NO: 1550185 - DNA, 15 bp, Homo sapiens
aaaggtgtttcaatt

SEQ ID NO: 1550186 - DNA, 15 bp, Homo sapiens
caaaggtgtttcaat

SEQ ID NO: 1550187 - DNA, 15 bp, Homo sapiens
acaaaggtgtttcaa

SEQ ID NO: 1550188 - DNA, 15 bp, Homo sapiens
aacaaaggtgtttca

SEQ ID NO: 1550189 - DNA, 15 bp, Homo sapiens
aaacaaaggtgtttc

SEQ ID NO: 1550190 - DNA, 15 bp, Homo sapiens
caaacaaaggtgttt

SEQ ID NO: 1550191 - DNA, 15 bp, Homo sapiens
ccaaacaaaggtgtt

SEQ ID NO: 1550192 - DNA, 15 bp, Homo sapiens
tccaaacaaaggtgt

SEQ ID NO: 1550193 - DNA, 15 bp, Homo sapiens
ttccaaacaaaggtg

SEQ ID NO: 1550194 - DNA, 15 bp, Homo sapiens
attccaaacaaaggt

SEQ ID NO: 1550195 - DNA, 15 bp, Homo sapiens
tattccaaacaaagg

SEQ ID NO: 1550196 - DNA, 15 bp, Homo sapiens
gtattccaaacaaag

SEQ ID NO: 1550197 - DNA, 15 bp, Homo sapiens
tgtattccaaacaaa

SEQ ID NO: 1550198 - DNA, 15 bp, Homo sapiens
atgtattccaaacaa

SEQ ID NO: 1550199 - DNA, 15 bp, Homo sapiens
catgtattccaaaca

SEQ ID NO: 1550200 - DNA, 15 bp, Homo sapiens
tcatgtattccaaac

SEQ ID NO: 1550201 - DNA, 15 bp, Homo sapiens
gtcatgtattccaaa

SEQ ID NO: 1550202 - DNA, 15 bp, Homo sapiens
agtcatgtattccaa

SEQ ID NO: 1550203 - DNA, 15 bp, Homo sapiens
gagtcatgtattcca

SEQ ID NO: 1550204 - DNA, 15 bp, Homo sapiens
ggagtcatgtattcc

SEQ ID NO: 1550205 - DNA, 15 bp, Homo sapiens
tggagtcatgtattc

SEQ ID NO: 1550206 - DNA, 15 bp, Homo sapiens
atggagtcatgtatt

SEQ ID NO: 1550207 - DNA, 15 bp, Homo sapiens
catggagtcatgtat

SEQ ID NO: 1550208 - DNA, 15 bp, Homo sapiens
ccatggagtcatgta

SEQ ID NO: 1550209 - DNA, 15 bp, Homo sapiens
gccatggagtcatgt

SEQ ID NO: 1550210 - DNA, 15 bp, Homo sapiens
agccatggagtcatg

SEQ ID NO: 1550211 - DNA, 15 bp, Homo sapiens
cagccatggagtcat

SEQ ID NO: 1550212 - DNA, 15 bp, Homo sapiens
acagccatggagtca

SEQ ID NO: 1550213 - DNA, 15 bp, Homo sapiens
gacagccatggagtc

SEQ ID NO: 1550214 - DNA, 15 bp, Homo sapiens
tgacagccatggagt

SEQ ID NO: 1550215 - DNA, 15 bp, Homo sapiens
ttgacagccatggag

SEQ ID NO: 1550216 - DNA, 15 bp, Homo sapiens
tttgacagccatgga

SEQ ID NO: 1550217 - DNA, 15 bp, Homo sapiens
atttgacagccatgg

SEQ ID NO: 1550218 - DNA, 15 bp, Homo sapiens
gatttgacagccatg

SEQ ID NO: 1550219 - DNA, 15 bp, Homo sapiens
agatttgacagccat

SEQ ID NO: 1550220 - DNA, 15 bp, Homo sapiens
tagatttgacagcca

SEQ ID NO: 1550221 - DNA, 15 bp, Homo sapiens
ctagatttgacagcc

SEQ ID NO: 1550222 - DNA, 15 bp, Homo sapiens
actagatttgacagc

SEQ ID NO: 1550223 - DNA, 15 bp, Homo sapiens
aactagatttgacag

SEQ ID NO: 1550224 - DNA, 15 bp, Homo sapiens
gaactagatttgaca

SEQ ID NO: 1550225 - DNA, 15 bp, Homo sapiens
cgaactagatttgac

SEQ ID NO: 1550226 - DNA, 15 bp, Homo sapiens
acgaactagatttga

SEQ ID NO: 1550227 - DNA, 15 bp, Homo sapiens
aacgaactagatttg

SEQ ID NO: 1550228 - DNA, 15 bp, Homo sapiens
aaacgaactagattt

SEQ ID NO: 1550229 - DNA, 15 bp, Homo sapiens
aaaacgaactagatt

SEQ ID NO: 1550230 - DNA, 15 bp, Homo sapiens
aaaaacgaactagat

SEQ ID NO: 1550231 - DNA, 15 bp, Homo sapiens
caaaaacgaactaga

SEQ ID NO: 1550232 - DNA, 15 bp, Homo sapiens
gcaaaaacgaactag

SEQ ID NO: 1550233 - DNA, 15 bp, Homo sapiens
tgcaaaaacgaacta

SEQ ID NO: 1550234 - DNA, 15 bp, Homo sapiens
ttgcaaaaacgaact

SEQ ID NO: 1550235 - DNA, 15 bp, Homo sapiens
cttgcaaaaacgaac

SEQ ID NO: 1550236 - DNA, 15 bp, Homo sapiens
gcttgcaaaaacgaa

SEQ ID NO: 1550237 - DNA, 15 bp, Homo sapiens
tgcttgcaaaaacga

SEQ ID NO: 1550238 - DNA, 15 bp, Homo sapiens
atgcttgcaaaaacg

SEQ ID NO: 1550239 - DNA, 15 bp, Homo sapiens
tatgcttgcaaaaac

SEQ ID NO: 1550240 - DNA, 15 bp, Homo sapiens
ttatgcttgcaaaaa

SEQ ID NO: 1550241 - DNA, 15 bp, Homo sapiens
attatgcttgcaaaa

SEQ ID NO: 1550242 - DNA, 15 bp, Homo sapiens
cattatgcttgcaaa

SEQ ID NO: 1550243 - DNA, 15 bp, Homo sapiens
tcattatgcttgcaa

SEQ ID NO: 1550244 - DNA, 15 bp, Homo sapiens
atcattatgcttgca

SEQ ID NO: 1550245 - DNA, 15 bp, Homo sapiens
catcattatgcttgc

SEQ ID NO: 1550246 - DNA, 15 bp, Homo sapiens
tcatcattatgcttg

SEQ ID NO: 1550247 - DNA, 15 bp, Homo sapiens
atcatcattatgctt

SEQ ID NO: 1550248 - DNA, 15 bp, Homo sapiens
catcatcattatgct

SEQ ID NO: 1550249 - DNA, 15 bp, Homo sapiens
gcatcatcattatgc

SEQ ID NO: 1550250 - DNA, 15 bp, Homo sapiens
ggcatcatcattatg

SEQ ID NO: 1550251 - DNA, 15 bp, Homo sapiens
tggcatcatcattat

SEQ ID NO: 1550252 - DNA, 15 bp, Homo sapiens
ttggcatcatcatta

SEQ ID NO: 1550253 - DNA, 15 bp, Homo sapiens
tttggcatcatcatt

SEQ ID NO: 1550254 - DNA, 15 bp, Homo sapiens
gtttggcatcatcat

SEQ ID NO: 1550255 - DNA, 15 bp, Homo sapiens
cgtttggcatcatca

SEQ ID NO: 1550256 - DNA, 15 bp, Homo sapiens
tcgtttggcatcatc

SEQ ID NO: 1550257 - DNA, 15 bp, Homo sapiens
gtcgtttggcatcat

SEQ ID NO: 1550258 - DNA, 15 bp, Homo sapiens
tgtcgtttggcatca

SEQ ID NO: 1550259 - DNA, 15 bp, Homo sapiens
ttgtcgtttggcatc

SEQ ID NO: 1550260 - DNA, 15 bp, Homo sapiens
tttgtcgtttggcat

SEQ ID NO: 1550261 - DNA, 15 bp, Homo sapiens
ctttgtcgtttggca

SEQ ID NO: 1550262 - DNA, 15 bp, Homo sapiens
tctttgtcgtttggc

SEQ ID NO: 1550263 - DNA, 15 bp, Homo sapiens
ctctttgtcgtttgg

SEQ ID NO: 1550264 - DNA, 15 bp, Homo sapiens
actctttgtcgtttg

SEQ ID NO: 1550265 - DNA, 15 bp, Homo sapiens
aactctttgtcgttt

SEQ ID NO: 1550266 - DNA, 15 bp, Homo sapiens
taactctttgtcgtt

SEQ ID NO: 1550267 - DNA, 15 bp, Homo sapiens
gtaactctttgtcgt

SEQ ID NO: 1550268 - DNA, 15 bp, Homo sapiens
agtaactctttgtcg

SEQ ID NO: 1550269 - DNA, 15 bp, Homo sapiens
cagtaactctttgtc

SEQ ID NO: 1550270 - DNA, 15 bp, Homo sapiens
gcagtaactctttgt

SEQ ID NO: 1550271 - DNA, 15 bp, Homo sapiens
agcagtaactctttg

SEQ ID NO: 1550272 - DNA, 15 bp, Homo sapiens
tagcagtaactcttt

SEQ ID NO: 1550273 - DNA, 15 bp, Homo sapiens
atagcagtaactctt

SEQ ID NO: 1550274 - DNA, 15 bp, Homo sapiens
aatagcagtaactct

SEQ ID NO: 1550275 - DNA, 15 bp, Homo sapiens
gaatagcagtaactc

SEQ ID NO: 1550276 - DNA, 15 bp, Homo sapiens
agaatagcagtaact

SEQ ID NO: 1550277 - DNA, 15 bp, Homo sapiens
aagaatagcagtaac

SEQ ID NO: 1550278 - DNA, 15 bp, Homo sapiens
caagaatagcagtaa

SEQ ID NO: 1550279 - DNA, 15 bp, Homo sapiens
tcaagaatagcagta

SEQ ID NO: 1550280 - DNA, 15 bp, Homo sapiens
gtcaagaatagcagt

SEQ ID NO: 1550281 - DNA, 15 bp, Homo sapiens
tgtcaagaatagcag

SEQ ID NO: 1550282 - DNA, 15 bp, Homo sapiens
ttgtcaagaatagca

SEQ ID NO: 1550283 - DNA, 15 bp, Homo sapiens
cttgtcaagaatagc

SEQ ID NO: 1550284 - DNA, 15 bp, Homo sapiens
gcttgtcaagaatag

SEQ ID NO: 1550285 - DNA, 15 bp, Homo sapiens
agcttgtcaagaata

SEQ ID NO: 1550286 - DNA, 15 bp, Homo sapiens
cagcttgtcaagaat

SEQ ID NO: 1550287 - DNA, 15 bp, Homo sapiens
tcagcttgtcaagaa

SEQ ID NO: 1550288 - DNA, 15 bp, Homo sapiens
atcagcttgtcaaga

SEQ ID NO: 1550289 - DNA, 15 bp, Homo sapiens
tatcagcttgtcaag

SEQ ID NO: 1550290 - DNA, 15 bp, Homo sapiens
ttatcagcttgtcaa

SEQ ID NO: 1550291 - DNA, 15 bp, Homo sapiens
gttatcagcttgtca

SEQ ID NO: 1550292 - DNA, 15 bp, Homo sapiens
tgttatcagcttgtc

SEQ ID NO: 1550293 - DNA, 15 bp, Homo sapiens
ttgttatcagcttgt

SEQ ID NO: 1550294 - DNA, 15 bp, Homo sapiens
attgttatcagcttg

SEQ ID NO: 1550295 - DNA, 15 bp, Homo sapiens
cattgttatcagctt

SEQ ID NO: 1550296 - DNA, 15 bp, Homo sapiens
tcattgttatcagct

SEQ ID NO: 1550297 - DNA, 15 bp, Homo sapiens
gtcattgttatcagc

SEQ ID NO: 1550298 - DNA, 15 bp, Homo sapiens
ggtcattgttatcag

SEQ ID NO: 1550299 - DNA, 15 bp, Homo sapiens
tggtcattgttatca

SEQ ID NO: 1550300 - DNA, 15 bp, Homo sapiens
atggtcattgttatc

SEQ ID NO: 1550301 - DNA, 15 bp, Homo sapiens
gatggtcattgttat

SEQ ID NO: 1550302 - DNA, 15 bp, Homo sapiens
tgatggtcattgtta

SEQ ID NO: 1550303 - DNA, 15 bp, Homo sapiens
ttgatggtcattgtt

SEQ ID NO: 1550304 - DNA, 15 bp, Homo sapiens
attgatggtcattgt

SEQ ID NO: 1550305 - DNA, 15 bp, Homo sapiens
cattgatggtcattg

SEQ ID NO: 1550306 - DNA, 15 bp, Homo sapiens
tcattgatggtcatt

SEQ ID NO: 1550307 - DNA, 15 bp, Homo sapiens
ttcattgatggtcat

SEQ ID NO: 1550308 - DNA, 15 bp, Homo sapiens
tttcattgatggtca

SEQ ID NO: 1550309 - DNA, 15 bp, Homo sapiens
ttttcattgatggtc

SEQ ID NO: 1550310 - DNA, 15 bp, Homo sapiens
tttttcattgatggt

SEQ ID NO: 1550311 - DNA, 15 bp, Homo sapiens
gtttttcattgatgg

SEQ ID NO: 1550312 - DNA, 15 bp, Homo sapiens
tgtttttcattgatg

SEQ ID NO: 1550313 - DNA, 15 bp, Homo sapiens
ctgtttttcattgat

SEQ ID NO: 1550314 - DNA, 15 bp, Homo sapiens
tctgtttttcattga

SEQ ID NO: 1550315 - DNA, 15 bp, Homo sapiens
atctgtttttcattg

SEQ ID NO: 1550316 - DNA, 15 bp, Homo sapiens
catctgtttttcatt

SEQ ID NO: 1550317 - DNA, 15 bp, Homo sapiens
acatctgtttttcat

SEQ ID NO: 1550318 - DNA, 15 bp, Homo sapiens
tacatctgtttttca

SEQ ID NO: 1550319 - DNA, 15 bp, Homo sapiens
gtacatctgtttttc

SEQ ID NO: 1550320 - DNA, 15 bp, Homo sapiens
ggtacatctgttttt

SEQ ID NO: 1550321 - DNA, 15 bp, Homo sapiens
gggtacatctgtttt

SEQ ID NO: 1550322 - DNA, 15 bp, Homo sapiens
tgggtacatctgttt

SEQ ID NO: 1550323 - DNA, 15 bp, Homo sapiens
atgggtacatctgtt

SEQ ID NO: 1550324 - DNA, 15 bp, Homo sapiens
gatgggtacatctgt

SEQ ID NO: 1550325 - DNA, 15 bp, Homo sapiens
agatgggtacatctg

SEQ ID NO: 1550326 - DNA, 15 bp, Homo sapiens
tagatgggtacatct

SEQ ID NO: 1550327 - DNA, 15 bp, Homo sapiens
atagatgggtacatc

SEQ ID NO: 1550328 - DNA, 15 bp, Homo sapiens
aatagatgggtacat

SEQ ID NO: 1550329 - DNA, 15 bp, Homo sapiens
gaatagatgggtaca

SEQ ID NO: 1550330 - DNA, 15 bp, Homo sapiens
tgaatagatgggtac

SEQ ID NO: 1550331 - DNA, 15 bp, Homo sapiens
ttgaatagatgggta

SEQ ID NO: 1550332 - DNA, 15 bp, Homo sapiens
cttgaatagatgggt

SEQ ID NO: 1550333 - DNA, 15 bp, Homo sapiens
gcttgaatagatggg

SEQ ID NO: 1550334 - DNA, 15 bp, Homo sapiens
tgcttgaatagatgg

SEQ ID NO: 1550335 - DNA, 15 bp, Homo sapiens
ttgcttgaatagatg

SEQ ID NO: 1550336 - DNA, 15 bp, Homo sapiens
tttgcttgaatagat

SEQ ID NO: 1550337 - DNA, 15 bp, Homo sapiens
ttttgcttgaataga

SEQ ID NO: 1550338 - DNA, 15 bp, Homo sapiens
tttttgcttgaatag

SEQ ID NO: 1550339 - DNA, 15 bp, Homo sapiens
atttttgcttgaata

SEQ ID NO: 1550340 - DNA, 15 bp, Homo sapiens
tatttttgcttgaat

SEQ ID NO: 1550341 - DNA, 15 bp, Homo sapiens
atatttttgcttgaa

SEQ ID NO: 1550342 - DNA, 15 bp, Homo sapiens
catatttttgcttga

SEQ ID NO: 1550343 - DNA, 15 bp, Homo sapiens
ccatatttttgcttg

SEQ ID NO: 1550344 - DNA, 15 bp, Homo sapiens
cccatatttttgctt

SEQ ID NO: 1550345 - DNA, 15 bp, Homo sapiens
ccccatatttttgct

SEQ ID NO: 1550346 - DNA, 15 bp, Homo sapiens
tccccatatttttgc

SEQ ID NO: 1550347 - DNA, 15 bp, Homo sapiens
ttccccatatttttg

SEQ ID NO: 1550348 - DNA, 15 bp, Homo sapiens
gcttccccatatttt

SEQ ID NO: 1550349 - DNA, 15 bp, Homo sapiens
ggcttccccatattt

SEQ ID NO: 1550350 - DNA, 15 bp, Homo sapiens
aggcttccccatatt

SEQ ID NO: 1550351 - DNA, 15 bp, Homo sapiens
aaggcttccccatat

SEQ ID NO: 1550352 - DNA, 15 bp, Homo sapiens
caaggcttccccata

SEQ ID NO: 1550353 - DNA, 15 bp, Homo sapiens
ccaaggcttccccat

SEQ ID NO: 1550354 - DNA, 15 bp, Homo sapiens
cccaaggcttcccca

SEQ ID NO: 1550355 - DNA, 15 bp, Homo sapiens
gcccaaggcttcccc

SEQ ID NO: 1550356 - DNA, 15 bp, Homo sapiens
tgcccaaggcttccc

SEQ ID NO: 1550357 - DNA, 15 bp, Homo sapiens
ctgcccaaggcttcc

SEQ ID NO: 1550358 - DNA, 15 bp, Homo sapiens
cctgcccaaggcttc

SEQ ID NO: 1550359 - DNA, 15 bp, Homo sapiens
acctgcccaaggctt

SEQ ID NO: 1550360 - DNA, 15 bp, Homo sapiens
tacctgcccaaggct

SEQ ID NO: 1550361 - DNA, 15 bp, Homo sapiens
atacctgcccaaggc

SEQ ID NO: 1550362 - DNA, 15 bp, Homo sapiens
aatacctgcccaagg

SEQ ID NO: 1550363 - DNA, 15 bp, Homo sapiens
caatacctgcccaag

SEQ ID NO: 1550364 - DNA, 15 bp, Homo sapiens
tcaatacctgcccaa

SEQ ID NO: 1550365 - DNA, 15 bp, Homo sapiens
ctcaatacctgccca

SEQ ID NO: 1550366 - DNA, 15 bp, Homo sapiens
actcaatacctgccc

SEQ ID NO: 1550367 - DNA, 15 bp, Homo sapiens
aactcaatacctgcc

SEQ ID NO: 1550368 - DNA, 15 bp, Homo sapiens
aaactcaatacctgc

SEQ ID NO: 1550369 - DNA, 15 bp, Homo sapiens
caaactcaatacctg

SEQ ID NO: 1550370 - DNA, 15 bp, Homo sapiens
gcaaactcaatacct

SEQ ID NO: 1550371 - DNA, 15 bp, Homo sapiens
agcaaactcaatacc

SEQ ID NO: 1550372 - DNA, 15 bp, Homo sapiens
gagcaaactcaatac

SEQ ID NO: 1550373 - DNA, 15 bp, Homo sapiens
tgagcaaactcaata

SEQ ID NO: 1550374 - DNA, 15 bp, Homo sapiens
ttgagcaaactcaat

SEQ ID NO: 1550375 - DNA, 15 bp, Homo sapiens
tttgagcaaactcaa

SEQ ID NO: 1550376 - DNA, 15 bp, Homo sapiens
atttgagcaaactca

SEQ ID NO: 1550377 - DNA, 15 bp, Homo sapiens
tatttgagcaaactc

SEQ ID NO: 1550378 - DNA, 15 bp, Homo sapiens
atatttgagcaaact

SEQ ID NO: 1550379 - DNA, 15 bp, Homo sapiens
aatatttgagcaaac

SEQ ID NO: 1550380 - DNA, 15 bp, Homo sapiens
aaatatttgagcaaa

SEQ ID NO: 1550381 - DNA, 15 bp, Homo sapiens
taaatatttgagcaa

SEQ ID NO: 1550382 - DNA, 15 bp, Homo sapiens
ataaatatttgagca

SEQ ID NO: 1550383 - DNA, 15 bp, Homo sapiens
gataaatatttgagc

SEQ ID NO: 1550384 - DNA, 15 bp, Homo sapiens
agataaatatttgag

SEQ ID NO: 1550385 - DNA, 15 bp, Homo sapiens
tagataaatatttga

SEQ ID NO: 1550386 - DNA, 15 bp, Homo sapiens
ctagataaatatttg

SEQ ID NO: 1550387 - DNA, 15 bp, Homo sapiens
actagataaatattt

SEQ ID NO: 1550388 - DNA, 15 bp, Homo sapiens
tactagataaatatt

SEQ ID NO: 1550389 - DNA, 15 bp, Homo sapiens
atactagataaatat

SEQ ID NO: 1550390 - DNA, 15 bp, Homo sapiens
gatactagataaata

SEQ ID NO: 1550391 - DNA, 15 bp, Homo sapiens
agatactagataaat

SEQ ID NO: 1550392 - DNA, 15 bp, Homo sapiens
gagatactagataaa

SEQ ID NO: 1550393 - DNA, 15 bp, Homo sapiens
ggagatactagataa

SEQ ID NO: 1550394 - DNA, 15 bp, Homo sapiens
aggagatactagata

SEQ ID NO: 1550395 - DNA, 15 bp, Homo sapiens
aaggagatactagat

SEQ ID NO: 1550396 - DNA, 15 bp, Homo sapiens
aaaggagatactaga

SEQ ID NO: 1550397 - DNA, 15 bp, Homo sapiens
caaaggagatactag

SEQ ID NO: 1550398 - DNA, 15 bp, Homo sapiens
acaaaggagatacta

SEQ ID NO: 1550399 - DNA, 15 bp, Homo sapiens
cacaaaggagatact

SEQ ID NO: 1550400 - DNA, 15 bp, Homo sapiens
gcacaaaggagatac

SEQ ID NO: 1550401 - DNA, 15 bp, Homo sapiens
tgcacaaaggagata

SEQ ID NO: 1550402 - DNA, 15 bp, Homo sapiens
gtgcacaaaggagat

SEQ ID NO: 1550403 - DNA, 15 bp, Homo sapiens
tgtgcacaaaggaga

SEQ ID NO: 1550404 - DNA, 15 bp, Homo sapiens
atgtgcacaaaggag

SEQ ID NO: 1550405 - DNA, 15 bp, Homo sapiens
tatgtgcacaaagga

SEQ ID NO: 1550406 - DNA, 15 bp, Homo sapiens
atatgtgcacaaagg

SEQ ID NO: 1550407 - DNA, 15 bp, Homo sapiens
aatatgtgcacaaag

SEQ ID NO: 1550408 - DNA, 15 bp, Homo sapiens
aaatatgtgcacaaa

SEQ ID NO: 1550409 - DNA, 15 bp, Homo sapiens
taaatatgtgcacaa

SEQ ID NO: 1550410 - DNA, 15 bp, Homo sapiens
ataaatatgtgcaca

SEQ ID NO: 1550411 - DNA, 15 bp, Homo sapiens
gataaatatgtgcac

SEQ ID NO: 1550412 - DNA, 15 bp, Homo sapiens
agataaatatgtgca

SEQ ID NO: 1550413 - DNA, 15 bp, Homo sapiens
cagataaatatgtgc

SEQ ID NO: 1550414 - DNA, 15 bp, Homo sapiens
ccagataaatatgtg

SEQ ID NO: 1550415 - DNA, 15 bp, Homo sapiens
accagataaatatgt

SEQ ID NO: 1550416 - DNA, 15 bp, Homo sapiens
caccagataaatatg

SEQ ID NO: 1550417 - DNA, 15 bp, Homo sapiens
gcaccagataaatat

SEQ ID NO: 1550418 - DNA, 15 bp, Homo sapiens
ggcaccagataaata

SEQ ID NO: 1550419 - DNA, 15 bp, Homo sapiens
tggcaccagataaat

SEQ ID NO: 1550420 - DNA, 15 bp, Homo sapiens
gtggcaccagataaa

SEQ ID NO: 1550421 - DNA, 15 bp, Homo sapiens
tgtggcaccagataa

SEQ ID NO: 1550422 - DNA, 15 bp, Homo sapiens
atgtggcaccagata

SEQ ID NO: 1550423 - DNA, 15 bp, Homo sapiens
aatgtggcaccagat

SEQ ID NO: 1550424 - DNA, 15 bp, Homo sapiens
caatgtggcaccaga

SEQ ID NO: 1550425 - DNA, 15 bp, Homo sapiens
ccaatgtggcaccag

SEQ ID NO: 1550426 - DNA, 15 bp, Homo sapiens
cccaatgtggcacca

SEQ ID NO: 1550427 - DNA, 15 bp, Homo sapiens
gcccaatgtggcacc

SEQ ID NO: 1550428 - DNA, 15 bp, Homo sapiens
tgcccaatgtggcac

SEQ ID NO: 1550429 - DNA, 15 bp, Homo sapiens
ttgcccaatgtggca

SEQ ID NO: 1550430 - DNA, 15 bp, Homo sapiens
tttgcccaatgtggc

SEQ ID NO: 1550431 - DNA, 15 bp, Homo sapiens
ctttgcccaatgtgg

SEQ ID NO: 1550432 - DNA, 15 bp, Homo sapiens
gctttgcccaatgtg

SEQ ID NO: 1550433 - DNA, 15 bp, Homo sapiens
tgctttgcccaatgt

SEQ ID NO: 1550434 - DNA, 15 bp, Homo sapiens
gtgctttgcccaatg

SEQ ID NO: 1550435 - DNA, 15 bp, Homo sapiens
agtgctttgcccaat

SEQ ID NO: 1550436 - DNA, 15 bp, Homo sapiens
cagtgctttgcccaa

SEQ ID NO: 1550437 - DNA, 15 bp, Homo sapiens
gcagtgctttgccca

SEQ ID NO: 1550438 - DNA, 15 bp, Homo sapiens
cgcagtgctttgccc

SEQ ID NO: 1550439 - DNA, 15 bp, Homo sapiens
gcgcagtgctttgcc

SEQ ID NO: 1550440 - DNA, 15 bp, Homo sapiens
agcgcagtgctttgc

SEQ ID NO: 1550441 - DNA, 15 bp, Homo sapiens
tagcgcagtgctttg

SEQ ID NO: 1550442 - DNA, 15 bp, Homo sapiens
ctagcgcagtgcttt

SEQ ID NO: 1550443 - DNA, 15 bp, Homo sapiens
tctagcgcagtgctt

SEQ ID NO: 1550444 - DNA, 15 bp, Homo sapiens
gtctagcgcagtgct

SEQ ID NO: 1550445 - DNA, 15 bp, Homo sapiens
tgtctagcgcagtgc

SEQ ID NO: 1550446 - DNA, 15 bp, Homo sapiens
gtgtctagcgcagtg

SEQ ID NO: 1550447 - DNA, 15 bp, Homo sapiens
agtgtctagcgcagt

SEQ ID NO: 1550448 - DNA, 15 bp, Homo sapiens
tagtgtctagcgcag

SEQ ID NO: 1550449 - DNA, 15 bp, Homo sapiens
ctagtgtctagcgca

SEQ ID NO: 1550450 - DNA, 15 bp, Homo sapiens
cctagtgtctagcgc

SEQ ID NO: 1550451 - DNA, 15 bp, Homo sapiens
ccctagtgtctagcg

SEQ ID NO: 1550452 - DNA, 15 bp, Homo sapiens
tccctagtgtctagc

SEQ ID NO: 1550453 - DNA, 15 bp, Homo sapiens
atccctagtgtctag

SEQ ID NO: 1550454 - DNA, 15 bp, Homo sapiens
tatccctagtgtcta

SEQ ID NO: 1550455 - DNA, 15 bp, Homo sapiens
ctatccctagtgtct

SEQ ID NO: 1550456 - DNA, 15 bp, Homo sapiens
tctatccctagtgtc

SEQ ID NO: 1550457 - DNA, 15 bp, Homo sapiens
ctctatccctagtgt

SEQ ID NO: 1550458 - DNA, 15 bp, Homo sapiens
actctatccctagtg

SEQ ID NO: 1550459 - DNA, 15 bp, Homo sapiens
aactctatccctagt

SEQ ID NO: 1550460 - DNA, 15 bp, Homo sapiens
caactctatccctag

SEQ ID NO: 1550461 - DNA, 15 bp, Homo sapiens
acaactctatcccta

SEQ ID NO: 1550462 - DNA, 15 bp, Homo sapiens
tacaactctatccct

SEQ ID NO: 1550463 - DNA, 15 bp, Homo sapiens
ttacaactctatccc

SEQ ID NO: 1550464 - DNA, 15 bp, Homo sapiens
tttacaactctatcc

SEQ ID NO: 1550465 - DNA, 15 bp, Homo sapiens
ttttacaactctatc

SEQ ID NO: 1550466 - DNA, 15 bp, Homo sapiens
tttttacaactctat

SEQ ID NO: 1550467 - DNA, 15 bp, Homo sapiens
ttttttacaactcta

SEQ ID NO: 1550468 - DNA, 15 bp, Homo sapiens
gttttttacaactct

SEQ ID NO: 1550469 - DNA, 15 bp, Homo sapiens
tgttttttacaactc

SEQ ID NO: 1550470 - DNA, 15 bp, Homo sapiens
gtgttttttacaact

SEQ ID NO: 1550471 - DNA, 15 bp, Homo sapiens
tgtgttttttacaac

SEQ ID NO: 1550472 - DNA, 15 bp, Homo sapiens
ctgtgttttttacaa

SEQ ID NO: 1550473 - DNA, 15 bp, Homo sapiens
actgtgttttttaca

SEQ ID NO: 1550474 - DNA, 15 bp, Homo sapiens
aactgtgttttttac

SEQ ID NO: 1550475 - DNA, 15 bp, Homo sapiens
aaactgtgtttttta

SEQ ID NO: 1550476 - DNA, 15 bp, Homo sapiens
gaaactgtgtttttt

SEQ ID NO: 1550477 - DNA, 15 bp, Homo sapiens
ggaaactgtgttttt

SEQ ID NO: 1550478 - DNA, 15 bp, Homo sapiens
aggaaactgtgtttt

SEQ ID NO: 1550479 - DNA, 15 bp, Homo sapiens
gaggaaactgtgttt

SEQ ID NO: 1550480 - DNA, 15 bp, Homo sapiens
ggaggaaactgtgtt

SEQ ID NO: 1550481 - DNA, 15 bp, Homo sapiens
aggaggaaactgtgt

SEQ ID NO: 1550482 - DNA, 15 bp, Homo sapiens
aaggaggaaactgtg

SEQ ID NO: 1550483 - DNA, 15 bp, Homo sapiens
gaaggaggaaactgt

SEQ ID NO: 1550484 - DNA, 15 bp, Homo sapiens
tgaaggaggaaactg

SEQ ID NO: 1550485 - DNA, 15 bp, Homo sapiens
ctgaaggaggaaact

SEQ ID NO: 1550486 - DNA, 15 bp, Homo sapiens
tctgaaggaggaaac

SEQ ID NO: 1550487 - DNA, 15 bp, Homo sapiens
ttctgaaggaggaaa

SEQ ID NO: 1550488 - DNA, 15 bp, Homo sapiens
tttctgaaggaggaa

SEQ ID NO: 1550489 - DNA, 15 bp, Homo sapiens
ctttctgaaggagga

SEQ ID NO: 1550490 - DNA, 15 bp, Homo sapiens
gctttctgaaggagg

SEQ ID NO: 1550491 - DNA, 15 bp, Homo sapiens
tgctttctgaaggag

SEQ ID NO: 1550492 - DNA, 15 bp, Homo sapiens
atgctttctgaagga

SEQ ID NO: 1550493 - DNA, 15 bp, Homo sapiens
catgctttctgaagg

SEQ ID NO: 1550494 - DNA, 15 bp, Homo sapiens
acatgctttctgaag

SEQ ID NO: 1550495 - DNA, 15 bp, Homo sapiens
tacatgctttctgaa

SEQ ID NO: 1550496 - DNA, 15 bp, Homo sapiens
ctacatgctttctga

SEQ ID NO: 1550497 - DNA, 15 bp, Homo sapiens
tctacatgctttctg

SEQ ID NO: 1550498 - DNA, 15 bp, Homo sapiens
gtctacatgctttct

SEQ ID NO: 1550499 - DNA, 15 bp, Homo sapiens
tgtctacatgctttc

SEQ ID NO: 1550500 - DNA, 15 bp, Homo sapiens
gtgtctacatgcttt

SEQ ID NO: 1550501 - DNA, 15 bp, Homo sapiens
agtgtctacatgctt

SEQ ID NO: 1550502 - DNA, 15 bp, Homo sapiens
gagtgtctacatgct

SEQ ID NO: 1550503 - DNA, 15 bp, Homo sapiens
tgagtgtctacatgc

SEQ ID NO: 1550504 - DNA, 15 bp, Homo sapiens
gtgagtgtctacatg

SEQ ID NO: 1550505 - DNA, 15 bp, Homo sapiens
ggtgagtgtctacat

SEQ ID NO: 1550506 - DNA, 15 bp, Homo sapiens
gggtgagtgtctaca

SEQ ID NO: 1550507 - DNA, 15 bp, Homo sapiens
tgggtgagtgtctac

SEQ ID NO: 1550508 - DNA, 15 bp, Homo sapiens
ctgggtgagtgtcta

SEQ ID NO: 1550509 - DNA, 15 bp, Homo sapiens
gctgggtgagtgtct

SEQ ID NO: 1550510 - DNA, 15 bp, Homo sapiens
agctgggtgagtgtc

SEQ ID NO: 1550511 - DNA, 15 bp, Homo sapiens
gagctgggtgagtgt

SEQ ID NO: 1550512 - DNA, 15 bp, Homo sapiens
agagctgggtgagtg

SEQ ID NO: 1550513 - DNA, 15 bp, Homo sapiens
aagagctgggtgagt

SEQ ID NO: 1550514 - DNA, 15 bp, Homo sapiens
gaagagctgggtgag

SEQ ID NO: 1550515 - DNA, 15 bp, Homo sapiens
tgaagagctgggtga

SEQ ID NO: 1550516 - DNA, 15 bp, Homo sapiens
atgaagagctgggtg

SEQ ID NO: 1550517 - DNA, 15 bp, Homo sapiens
gatgaagagctgggt

SEQ ID NO: 1550518 - DNA, 15 bp, Homo sapiens
agatgaagagctggg

SEQ ID NO: 1550519 - DNA, 15 bp, Homo sapiens
cagatgaagagctgg

SEQ ID NO: 1550520 - DNA, 15 bp, Homo sapiens
ccagatgaagagctg

SEQ ID NO: 1550521 - DNA, 15 bp, Homo sapiens
accagatgaagagct

SEQ ID NO: 1550522 - DNA, 15 bp, Homo sapiens
aaccagatgaagagc

SEQ ID NO: 1550523 - DNA, 15 bp, Homo sapiens
gaaccagatgaagag

SEQ ID NO: 1550524 - DNA, 15 bp, Homo sapiens
tgaaccagatgaaga

SEQ ID NO: 1550525 - DNA, 15 bp, Homo sapiens
ttgaaccagatgaag

SEQ ID NO: 1550526 - DNA, 15 bp, Homo sapiens
tttgaaccagatgaa

SEQ ID NO: 1550527 - DNA, 15 bp, Homo sapiens
ttttgaaccagatga

SEQ ID NO: 1550528 - DNA, 15 bp, Homo sapiens
attttgaaccagatg

SEQ ID NO: 1550529 - DNA, 15 bp, Homo sapiens
aattttgaaccagat

SEQ ID NO: 1550530 - DNA, 15 bp, Homo sapiens
caattttgaaccaga

SEQ ID NO: 1550531 - DNA, 15 bp, Homo sapiens
acaattttgaaccag

SEQ ID NO: 1550532 - DNA, 15 bp, Homo sapiens
tacaattttgaacca

SEQ ID NO: 1550533 - DNA, 15 bp, Homo sapiens
ttacaattttgaacc

SEQ ID NO: 1550534 - DNA, 15 bp, Homo sapiens
tttacaattttgaac

SEQ ID NO: 1550535 - DNA, 15 bp, Homo sapiens
atttacaattttgaa

SEQ ID NO: 1550536 - DNA, 15 bp, Homo sapiens
catttacaattttga

SEQ ID NO: 1550537 - DNA, 15 bp, Homo sapiens
acatttacaattttg

SEQ ID NO: 1550538 - DNA, 15 bp, Homo sapiens
gacatttacaatttt

SEQ ID NO: 1550539 - DNA, 15 bp, Homo sapiens
agacatttacaattt

SEQ ID NO: 1550540 - DNA, 15 bp, Homo sapiens
tagacatttacaatt

SEQ ID NO: 1550541 - DNA, 15 bp, Homo sapiens
ctagacatttacaat

SEQ ID NO: 1550542 - DNA, 15 bp, Homo sapiens
actagacatttacaa

SEQ ID NO: 1550543 - DNA, 15 bp, Homo sapiens
cactagacatttaca

SEQ ID NO: 1550544 - DNA, 15 bp, Homo sapiens
gcactagacatttac

SEQ ID NO: 1550545 - DNA, 15 bp, Homo sapiens
tgcactagacattta

SEQ ID NO: 1550546 - DNA, 15 bp, Homo sapiens
atgcactagacattt

SEQ ID NO: 1550547 - DNA, 15 bp, Homo sapiens
catgcactagacatt

SEQ ID NO: 1550548 - DNA, 15 bp, Homo sapiens
acatgcactagacat

SEQ ID NO: 1550549 - DNA, 15 bp, Homo sapiens
gacatgcactagaca

SEQ ID NO: 1550550 - DNA, 15 bp, Homo sapiens
agacatgcactagac

SEQ ID NO: 1550551 - DNA, 15 bp, Homo sapiens
gagacatgcactaga

SEQ ID NO: 1550552 - DNA, 15 bp, Homo sapiens
tgagacatgcactag

SEQ ID NO: 1550553 - DNA, 15 bp, Homo sapiens
ctgagacatgcacta

SEQ ID NO: 1550554 - DNA, 15 bp, Homo sapiens
tctgagacatgcact

SEQ ID NO: 1550555 - DNA, 15 bp, Homo sapiens
ctctgagacatgcac

SEQ ID NO: 1550556 - DNA, 15 bp, Homo sapiens
gctctgagacatgca

SEQ ID NO: 1550557 - DNA, 15 bp, Homo sapiens
ggctctgagacatgc

SEQ ID NO: 1550558 - DNA, 15 bp, Homo sapiens
tggctctgagacatg

SEQ ID NO: 1550559 - DNA, 15 bp, Homo sapiens
ctggctctgagacat

SEQ ID NO: 1550560 - DNA, 15 bp, Homo sapiens
tctggctctgagaca

SEQ ID NO: 1550561 - DNA, 15 bp, Homo sapiens
ctctggctctgagac

SEQ ID NO: 1550562 - DNA, 15 bp, Homo sapiens
tctctggctctgaga

SEQ ID NO: 1550563 - DNA, 15 bp, Homo sapiens
ttctctggctctgag

SEQ ID NO: 1550564 - DNA, 15 bp, Homo sapiens
tttctctggctctga

SEQ ID NO: 1550565 - DNA, 15 bp, Homo sapiens
ttttctctggctctg

SEQ ID NO: 1550566 - DNA, 15 bp, Homo sapiens
cttttctctggctct

SEQ ID NO: 1550567 - DNA, 15 bp, Homo sapiens
gcttttctctggctc

SEQ ID NO: 1550568 - DNA, 15 bp, Homo sapiens
agcttttctctggct

SEQ ID NO: 1550569 - DNA, 15 bp, Homo sapiens
tagcttttctctggc

SEQ ID NO: 1550570 - DNA, 15 bp, Homo sapiens
ctagcttttctctgg

SEQ ID NO: 1550571 - DNA, 15 bp, Homo sapiens
actagcttttctctg

SEQ ID NO: 1550572 - DNA, 15 bp, Homo sapiens
aactagcttttctct

SEQ ID NO: 1550573 - DNA, 15 bp, Homo sapiens
taactagcttttctc

SEQ ID NO: 1550574 - DNA, 15 bp, Homo sapiens
ataactagcttttct

SEQ ID NO: 1550575 - DNA, 15 bp, Homo sapiens
aataactagcttttc

SEQ ID NO: 1550576 - DNA, 15 bp, Homo sapiens
aaataactagctttt

SEQ ID NO: 1550577 - DNA, 15 bp, Homo sapiens
caaataactagcttt

SEQ ID NO: 1550578 - DNA, 15 bp, Homo sapiens
gcaaataactagctt

SEQ ID NO: 1550579 - DNA, 15 bp, Homo sapiens
tgcaaataactagct

SEQ ID NO: 1550580 - DNA, 15 bp, Homo sapiens
gtgcaaataactagc

SEQ ID NO: 1550581 - DNA, 15 bp, Homo sapiens
tgtgcaaataactag

SEQ ID NO: 1550582 - DNA, 15 bp, Homo sapiens
ctgtgcaaataacta

SEQ ID NO: 1550583 - DNA, 15 bp, Homo sapiens
actgtgcaaataact

SEQ ID NO: 1550584 - DNA, 15 bp, Homo sapiens
gactgtgcaaataac

SEQ ID NO: 1550585 - DNA, 15 bp, Homo sapiens
agactgtgcaaataa

SEQ ID NO: 1550586 - DNA, 15 bp, Homo sapiens
gagactgtgcaaata

SEQ ID NO: 1550587 - DNA, 15 bp, Homo sapiens
ggagactgtgcaaat

SEQ ID NO: 1550588 - DNA, 15 bp, Homo sapiens
aggagactgtgcaaa

SEQ ID NO: 1550589 - DNA, 15 bp, Homo sapiens
aaggagactgtgcaa

SEQ ID NO: 1550590 - DNA, 15 bp, Homo sapiens
gaaggagactgtgca

SEQ ID NO: 1550591 - DNA, 15 bp, Homo sapiens
tgaaggagactgtgc

SEQ ID NO: 1550592 - DNA, 15 bp, Homo sapiens
ttgaaggagactgtg

SEQ ID NO: 1550593 - DNA, 15 bp, Homo sapiens
cttgaaggagactgt

SEQ ID NO: 1550594 - DNA, 15 bp, Homo sapiens
ccttgaaggagactg

SEQ ID NO: 1550595 - DNA, 15 bp, Homo sapiens
gccttgaaggagact

SEQ ID NO: 1550596 - DNA, 15 bp, Homo sapiens
tgccttgaaggagac

SEQ ID NO: 1550597 - DNA, 15 bp, Homo sapiens
atgccttgaaggaga

SEQ ID NO: 1550598 - DNA, 15 bp, Homo sapiens
tatgccttgaaggag

SEQ ID NO: 1550599 - DNA, 15 bp, Homo sapiens
ttatgccttgaagga

SEQ ID NO: 1550600 - DNA, 15 bp, Homo sapiens
attatgccttgaagg

SEQ ID NO: 1550601 - DNA, 15 bp, Homo sapiens
aattatgccttgaag

SEQ ID NO: 1550602 - DNA, 15 bp, Homo sapiens
taattatgccttgaa

SEQ ID NO: 1550603 - DNA, 15 bp, Homo sapiens
ataattatgccttga

SEQ ID NO: 1550604 - DNA, 15 bp, Homo sapiens
tataattatgccttg

SEQ ID NO: 1550605 - DNA, 15 bp, Homo sapiens
atataattatgcctt

SEQ ID NO: 1550606 - DNA, 15 bp, Homo sapiens
tatataattatgcct

SEQ ID NO: 1550607 - DNA, 15 bp, Homo sapiens
atatataattatgcc

SEQ ID NO: 1550608 - DNA, 15 bp, Homo sapiens
tatatataattatgc

SEQ ID NO: 1550609 - DNA, 15 bp, Homo sapiens
atatatataattatg

SEQ ID NO: 1550610 - DNA, 15 bp, Homo sapiens
tatatatatatataa

SEQ ID NO: 1550611 - DNA, 15 bp, Homo sapiens
taattatatatatat

SEQ ID NO: 1550612 - DNA, 15 bp, Homo sapiens
ataattatatatata

SEQ ID NO: 1550613 - DNA, 15 bp, Homo sapiens
cataattatatatat

SEQ ID NO: 1550614 - DNA, 15 bp, Homo sapiens
gcataattatatata

SEQ ID NO: 1550615 - DNA, 15 bp, Homo sapiens
ggcataattatatat

SEQ ID NO: 1550616 - DNA, 15 bp, Homo sapiens
aggcataattatata

SEQ ID NO: 1550617 - DNA, 15 bp, Homo sapiens
aaggcataattatat

SEQ ID NO: 1550618 - DNA, 15 bp, Homo sapiens
caaggcataattata

SEQ ID NO: 1550619 - DNA, 15 bp, Homo sapiens
tcaaggcataattat

SEQ ID NO: 1550620 - DNA, 15 bp, Homo sapiens
ttcaaggcataatta

SEQ ID NO: 1550621 - DNA, 15 bp, Homo sapiens
cttcaaggcataatt

SEQ ID NO: 1550622 - DNA, 15 bp, Homo sapiens
ccttcaaggcataat

SEQ ID NO: 1550623 - DNA, 15 bp, Homo sapiens
tccttcaaggcataa

SEQ ID NO: 1550624 - DNA, 15 bp, Homo sapiens
ctccttcaaggcata

SEQ ID NO: 1550625 - DNA, 15 bp, Homo sapiens
tctccttcaaggcat

SEQ ID NO: 1550626 - DNA, 15 bp, Homo sapiens
gtctccttcaaggca

SEQ ID NO: 1550627 - DNA, 15 bp, Homo sapiens
agtctccttcaaggc

SEQ ID NO: 1550628 - DNA, 15 bp, Homo sapiens
cagtctccttcaagg

SEQ ID NO: 1550629 - DNA, 15 bp, Homo sapiens
acagtctccttcaag

SEQ ID NO: 1550630 - DNA, 15 bp, Homo sapiens
cacagtctccttcaa

SEQ ID NO: 1550631 - DNA, 15 bp, Homo sapiens
gcacagtctccttca

SEQ ID NO: 1550632 - DNA, 15 bp, Homo sapiens
tgcacagtctccttc

SEQ ID NO: 1550633 - DNA, 15 bp, Homo sapiens
ttgcacagtctcctt

SEQ ID NO: 1550634 - DNA, 15 bp, Homo sapiens
tttgcacagtctcct

SEQ ID NO: 1550635 - DNA, 15 bp, Homo sapiens
atttgcacagtctcc

SEQ ID NO: 1550636 - DNA, 15 bp, Homo sapiens
tatttgcacagtctc

SEQ ID NO: 1550637 - DNA, 15 bp, Homo sapiens
ttatttgcacagtct

SEQ ID NO: 1550638 - DNA, 15 bp, Homo sapiens
gttatttgcacagtc

SEQ ID NO: 1550639 - DNA, 15 bp, Homo sapiens
agttatttgcacagt

SEQ ID NO: 1550640 - DNA, 15 bp, Homo sapiens
tagttatttgcacag

SEQ ID NO: 1550641 - DNA, 15 bp, Homo sapiens
ctagttatttgcaca

SEQ ID NO: 1550642 - DNA, 15 bp, Homo sapiens
tctagttatttgcac

SEQ ID NO: 1550643 - DNA, 15 bp, Homo sapiens
atctagttatttgca

SEQ ID NO: 1550644 - DNA, 15 bp, Homo sapiens
aatctagttatttgc

SEQ ID NO: 1550645 - DNA, 15 bp, Homo sapiens
aaatctagttatttg

SEQ ID NO: 1550646 - DNA, 15 bp, Homo sapiens
aaaatctagttattt

SEQ ID NO: 1550647 - DNA, 15 bp, Homo sapiens
taaaatctagttatt

SEQ ID NO: 1550648 - DNA, 15 bp, Homo sapiens
ataaaatctagttat

SEQ ID NO: 1550649 - DNA, 15 bp, Homo sapiens
tataaaatctagtta

SEQ ID NO: 1550650 - DNA, 15 bp, Homo sapiens
atataaaatctagtt

SEQ ID NO: 1550651 - DNA, 15 bp, Homo sapiens
tatataaaatctagt

SEQ ID NO: 1550652 - DNA, 15 bp, Homo sapiens
atatataaaatctag

SEQ ID NO: 1550653 - DNA, 15 bp, Homo sapiens
tatatataaaatcta

SEQ ID NO: 1550654 - DNA, 15 bp, Homo sapiens
atatatataaaatct

SEQ ID NO: 1550655 - DNA, 15 bp, Homo sapiens
tatatatataaaatc

SEQ ID NO: 1550656 - DNA, 15 bp, Homo sapiens
aatatatatataaaa

SEQ ID NO: 1550657 - DNA, 15 bp, Homo sapiens
taatatatatataaa

SEQ ID NO: 1550658 - DNA, 15 bp, Homo sapiens
ataatatatatataa

SEQ ID NO: 1550659 - DNA, 15 bp, Homo sapiens
tataatatatatata

SEQ ID NO: 1550660 - DNA, 15 bp, Homo sapiens
atataatatatatat

SEQ ID NO: 1550661 - DNA, 15 bp, Homo sapiens
ctatataatatatat

SEQ ID NO: 1550662 - DNA, 15 bp, Homo sapiens
tctatataatatata

SEQ ID NO: 1550663 - DNA, 15 bp, Homo sapiens
ttctatataatatat

SEQ ID NO: 1550664 - DNA, 15 bp, Homo sapiens
gttctatataatata

SEQ ID NO: 1550665 - DNA, 15 bp, Homo sapiens
agttctatataatat

SEQ ID NO: 1550666 - DNA, 15 bp, Homo sapiens
cagttctatataata

SEQ ID NO: 1550667 - DNA, 15 bp, Homo sapiens
acagttctatataat

SEQ ID NO: 1550668 - DNA, 15 bp, Homo sapiens
tacagttctatataa

SEQ ID NO: 1550669 - DNA, 15 bp, Homo sapiens
ctacagttctatata

SEQ ID NO: 1550670 - DNA, 15 bp, Homo sapiens
tctacagttctatat

SEQ ID NO: 1550671 - DNA, 15 bp, Homo sapiens
ttctacagttctata

SEQ ID NO: 1550672 - DNA, 15 bp, Homo sapiens
tttctacagttctat

SEQ ID NO: 1550673 - DNA, 15 bp, Homo sapiens
atttctacagttcta

SEQ ID NO: 1550674 - DNA, 15 bp, Homo sapiens
gatttctacagttct

SEQ ID NO: 1550675 - DNA, 15 bp, Homo sapiens
agatttctacagttc

SEQ ID NO: 1550676 - DNA, 15 bp, Homo sapiens
cagatttctacagtt

SEQ ID NO: 1550677 - DNA, 15 bp, Homo sapiens
ccagatttctacagt

SEQ ID NO: 1550678 - DNA, 15 bp, Homo sapiens
accagatttctacag

SEQ ID NO: 1550679 - DNA, 15 bp, Homo sapiens
caccagatttctaca

SEQ ID NO: 1550680 - DNA, 15 bp, Homo sapiens
tcaccagatttctac

SEQ ID NO: 1550681 - DNA, 15 bp, Homo sapiens
gtcaccagatttcta

SEQ ID NO: 1550682 - DNA, 15 bp, Homo sapiens
tgtcaccagatttct

SEQ ID NO: 1550683 - DNA, 15 bp, Homo sapiens
atgtcaccagatttc

SEQ ID NO: 1550684 - DNA, 15 bp, Homo sapiens
aatgtcaccagattt

SEQ ID NO: 1550685 - DNA, 15 bp, Homo sapiens
gaaatgtcaccagat

SEQ ID NO: 1550686 - DNA, 15 bp, Homo sapiens
agaaatgtcaccaga

SEQ ID NO: 1550687 - DNA, 15 bp, Homo sapiens
tagaaatgtcaccag

SEQ ID NO: 1550688 - DNA, 15 bp, Homo sapiens
ctagaaatgtcacca

SEQ ID NO: 1550689 - DNA, 15 bp, Homo sapiens
actagaaatgtcacc

SEQ ID NO: 1550690 - DNA, 15 bp, Homo sapiens
cactagaaatgtcac

SEQ ID NO: 1550691 - DNA, 15 bp, Homo sapiens
gcactagaaatgtca

SEQ ID NO: 1550692 - DNA, 15 bp, Homo sapiens
agcactagaaatgtc

SEQ ID NO: 1550693 - DNA, 15 bp, Homo sapiens
aagcactagaaatgt

SEQ ID NO: 1550694 - DNA, 15 bp, Homo sapiens
aaagcactagaaatg

SEQ ID NO: 1550695 - DNA, 15 bp, Homo sapiens
taaagcactagaaat

SEQ ID NO: 1550696 - DNA, 15 bp, Homo sapiens
ataaagcactagaaa

SEQ ID NO: 1550697 - DNA, 15 bp, Homo sapiens
aataaagcactagaa

SEQ ID NO: 1550698 - DNA, 15 bp, Homo sapiens
gaataaagcactaga

SEQ ID NO: 1550699 - DNA, 15 bp, Homo sapiens
agaataaagcactag

SEQ ID NO: 1550700 - DNA, 15 bp, Homo sapiens
tagaataaagcacta

SEQ ID NO: 1550701 - DNA, 15 bp, Homo sapiens
ctagaataaagcact

SEQ ID NO: 1550702 - DNA, 15 bp, Homo sapiens
actagaataaagcac

SEQ ID NO: 1550703 - DNA, 15 bp, Homo sapiens
aactagaataaagca

SEQ ID NO: 1550704 - DNA, 15 bp, Homo sapiens
gaactagaataaagc

SEQ ID NO: 1550705 - DNA, 15 bp, Homo sapiens
agaactagaataaag

SEQ ID NO: 1550706 - DNA, 15 bp, Homo sapiens
gagaactagaataaa

SEQ ID NO: 1550707 - DNA, 15 bp, Homo sapiens
agagaactagaataa

SEQ ID NO: 1550708 - DNA, 15 bp, Homo sapiens
tagagaactagaata

SEQ ID NO: 1550709 - DNA, 15 bp, Homo sapiens
gtagagaactagaat

SEQ ID NO: 1550710 - DNA, 15 bp, Homo sapiens
tgtagagaactagaa

SEQ ID NO: 1550711 - DNA, 15 bp, Homo sapiens
atgtagagaactaga

SEQ ID NO: 1550712 - DNA, 15 bp, Homo sapiens
aatgtagagaactag

SEQ ID NO: 1550713 - DNA, 15 bp, Homo sapiens
gaatgtagagaacta

SEQ ID NO: 1550714 - DNA, 15 bp, Homo sapiens
ggaatgtagagaact

SEQ ID NO: 1550715 - DNA, 15 bp, Homo sapiens
tggaatgtagagaac

SEQ ID NO: 1550716 - DNA, 15 bp, Homo sapiens
ttggaatgtagagaa

SEQ ID NO: 1550717 - DNA, 15 bp, Homo sapiens
tttggaatgtagaga

SEQ ID NO: 1550718 - DNA, 15 bp, Homo sapiens
ctttggaatgtagag

SEQ ID NO: 1550719 - DNA, 15 bp, Homo sapiens
cctttggaatgtaga

SEQ ID NO: 1550720 - DNA, 15 bp, Homo sapiens
acctttggaatgtag

SEQ ID NO: 1550721 - DNA, 15 bp, Homo sapiens
cacctttggaatgta

SEQ ID NO: 1550722 - DNA, 15 bp, Homo sapiens
acacctttggaatgt

SEQ ID NO: 1550723 - DNA, 15 bp, Homo sapiens
gacacctttggaatg

SEQ ID NO: 1550724 - DNA, 15 bp, Homo sapiens
tgacacctttggaat

SEQ ID NO: 1550725 - DNA, 15 bp, Homo sapiens
ctgacacctttggaa

SEQ ID NO: 1550726 - DNA, 15 bp, Homo sapiens
actgacacctttgga

SEQ ID NO: 1550727 - DNA, 15 bp, Homo sapiens
tactgacacctttgg

SEQ ID NO: 1550728 - DNA, 15 bp, Homo sapiens
ctactgacacctttg

SEQ ID NO: 1550729 - DNA, 15 bp, Homo sapiens
tctactgacaccttt

SEQ ID NO: 1550730 - DNA, 15 bp, Homo sapiens
atctactgacacctt

SEQ ID NO: 1550731 - DNA, 15 bp, Homo sapiens
catctactgacacct

SEQ ID NO: 1550732 - DNA, 15 bp, Homo sapiens
acatctactgacacc

SEQ ID NO: 1550733 - DNA, 15 bp, Homo sapiens
aacatctactgacac

SEQ ID NO: 1550734 - DNA, 15 bp, Homo sapiens
aaacatctactgaca

SEQ ID NO: 1550735 - DNA, 15 bp, Homo sapiens
gaaacatctactgac

SEQ ID NO: 1550736 - DNA, 15 bp, Homo sapiens
agaaacatctactga

SEQ ID NO: 1550737 - DNA, 15 bp, Homo sapiens
aagaaacatctactg

SEQ ID NO: 1550738 - DNA, 15 bp, Homo sapiens
gaagaaacatctact

SEQ ID NO: 1550739 - DNA, 15 bp, Homo sapiens
agaagaaacatctac

SEQ ID NO: 1550740 - DNA, 15 bp, Homo sapiens
aagaagaaacatcta

SEQ ID NO: 1550741 - DNA, 15 bp, Homo sapiens
taagaagaaacatct

SEQ ID NO: 1550742 - DNA, 15 bp, Homo sapiens
ataagaagaaacatc

SEQ ID NO: 1550743 - DNA, 15 bp, Homo sapiens
aataagaagaaacat

SEQ ID NO: 1550744 - DNA, 15 bp, Homo sapiens
caataagaagaaaca

SEQ ID NO: 1550745 - DNA, 15 bp, Homo sapiens
tcaataagaagaaac

SEQ ID NO: 1550746 - DNA, 15 bp, Homo sapiens
atcaataagaagaaa

SEQ ID NO: 1550747 - DNA, 15 bp, Homo sapiens
catcaataagaagaa

SEQ ID NO: 1550748 - DNA, 15 bp, Homo sapiens
gcatcaataagaaga

SEQ ID NO: 1550749 - DNA, 15 bp, Homo sapiens
agcatcaataagaag

SEQ ID NO: 1550750 - DNA, 15 bp, Homo sapiens
tagcatcaataagaa

SEQ ID NO: 1550751 - DNA, 15 bp, Homo sapiens
atagcatcaataaga

SEQ ID NO: 1550752 - DNA, 15 bp, Homo sapiens
aatagcatcaataag

SEQ ID NO: 1550753 - DNA, 15 bp, Homo sapiens
aaatagcatcaataa

SEQ ID NO: 1550754 - DNA, 15 bp, Homo sapiens
caaatagcatcaata

SEQ ID NO: 1550755 - DNA, 15 bp, Homo sapiens
ccaaatagcatcaat

SEQ ID NO: 1550756 - DNA, 15 bp, Homo sapiens
tcccaaatagcatca

SEQ ID NO: 1550757 - DNA, 15 bp, Homo sapiens
gtcccaaatagcatc

SEQ ID NO: 1550758 - DNA, 15 bp, Homo sapiens
tgtcccaaatagcat

SEQ ID NO: 1550759 - DNA, 15 bp, Homo sapiens
atgtcccaaatagca

SEQ ID NO: 1550760 - DNA, 15 bp, Homo sapiens
gatgtcccaaatagc

SEQ ID NO: 1550761 - DNA, 15 bp, Homo sapiens
agatgtcccaaatag

SEQ ID NO: 1550762 - DNA, 15 bp, Homo sapiens
cagatgtcccaaata

SEQ ID NO: 1550763 - DNA, 15 bp, Homo sapiens
gcagatgtcccaaat

SEQ ID NO: 1550764 - DNA, 15 bp, Homo sapiens
agcagatgtcccaaa

SEQ ID NO: 1550765 - DNA, 15 bp, Homo sapiens
aagcagatgtcccaa

SEQ ID NO: 1550766 - DNA, 15 bp, Homo sapiens
aaagcagatgtccca

SEQ ID NO: 1550767 - DNA, 15 bp, Homo sapiens
gaaagcagatgtccc

SEQ ID NO: 1550768 - DNA, 15 bp, Homo sapiens
tgaaagcagatgtcc

SEQ ID NO: 1550769 - DNA, 15 bp, Homo sapiens
atgaaagcagatgtc

SEQ ID NO: 1550770 - DNA, 15 bp, Homo sapiens
aatgaaagcagatgt

SEQ ID NO: 1550771 - DNA, 15 bp, Homo sapiens
taaatgaaagcagat

SEQ ID NO: 1550772 - DNA, 15 bp, Homo sapiens
ataaatgaaagcaga

SEQ ID NO: 1550773 - DNA, 15 bp, Homo sapiens
tataaatgaaagcag

SEQ ID NO: 1550774 - DNA, 15 bp, Homo sapiens
ctataaatgaaagca

SEQ ID NO: 1550775 - DNA, 15 bp, Homo sapiens
actataaatgaaagc

SEQ ID NO: 1550776 - DNA, 15 bp, Homo sapiens
aactataaatgaaag

SEQ ID NO: 1550777 - DNA, 15 bp, Homo sapiens
gaactataaatgaaa

SEQ ID NO: 1550778 - DNA, 15 bp, Homo sapiens
agaactataaatgaa

SEQ ID NO: 1550779 - DNA, 15 bp, Homo sapiens
tagaactataaatga

SEQ ID NO: 1550780 - DNA, 15 bp, Homo sapiens
gtagaactataaatg

SEQ ID NO: 1550781 - DNA, 15 bp, Homo sapiens
tgtagaactataaat

SEQ ID NO: 1550782 - DNA, 15 bp, Homo sapiens
atgtagaactataaa

SEQ ID NO: 1550783 - DNA, 15 bp, Homo sapiens
tatgtagaactataa

SEQ ID NO: 1550784 - DNA, 15 bp, Homo sapiens
ttatgtagaactata

SEQ ID NO: 1550785 - DNA, 15 bp, Homo sapiens
cttatgtagaactat

SEQ ID NO: 1550786 - DNA, 15 bp, Homo sapiens
tcttatgtagaacta

SEQ ID NO: 1550787 - DNA, 15 bp, Homo sapiens
ttcttatgtagaact

SEQ ID NO: 1550788 - DNA, 15 bp, Homo sapiens
attcttatgtagaac

SEQ ID NO: 1550789 - DNA, 15 bp, Homo sapiens
cattcttatgtagaa

SEQ ID NO: 1550790 - DNA, 15 bp, Homo sapiens
gcattcttatgtaga

SEQ ID NO: 1550791 - DNA, 15 bp, Homo sapiens
ggcattcttatgtag

SEQ ID NO: 1550792 - DNA, 15 bp, Homo sapiens
tggcattcttatgta

SEQ ID NO: 1550793 - DNA, 15 bp, Homo sapiens
ttggcattcttatgt

SEQ ID NO: 1550794 - DNA, 15 bp, Homo sapiens
attggcattcttatg

SEQ ID NO: 1550795 - DNA, 15 bp, Homo sapiens
tattggcattcttat

SEQ ID NO: 1550796 - DNA, 15 bp, Homo sapiens
atattggcattctta

SEQ ID NO: 1550797 - DNA, 15 bp, Homo sapiens
aatattggcattctt

SEQ ID NO: 1550798 - DNA, 15 bp, Homo sapiens
taatattggcattct

SEQ ID NO: 1550799 - DNA, 15 bp, Homo sapiens
ttaatattggcattc

SEQ ID NO: 1550800 - DNA, 15 bp, Homo sapiens
tttaatattggcatt

SEQ ID NO: 1550801 - DNA, 15 bp, Homo sapiens
ttttaatattggcat

SEQ ID NO: 1550802 - DNA, 15 bp, Homo sapiens
attttaatattggca

SEQ ID NO: 1550803 - DNA, 15 bp, Homo sapiens
tattttaatattggc

SEQ ID NO: 1550804 - DNA, 15 bp, Homo sapiens
ctattttaatattgg

SEQ ID NO: 1550805 - DNA, 15 bp, Homo sapiens
cctattttaatattg

SEQ ID NO: 1550806 - DNA, 15 bp, Homo sapiens
tcctattttaatatt

SEQ ID NO: 1550807 - DNA, 15 bp, Homo sapiens
atcctattttaatat

SEQ ID NO: 1550808 - DNA, 15 bp, Homo sapiens
tatcctattttaata

SEQ ID NO: 1550809 - DNA, 15 bp, Homo sapiens
atatcctattttaat

SEQ ID NO: 1550810 - DNA, 15 bp, Homo sapiens
tatatcctattttaa

SEQ ID NO: 1550811 - DNA, 15 bp, Homo sapiens
ttatatcctatttta

SEQ ID NO: 1550812 - DNA, 15 bp, Homo sapiens
attatatcctatttt

SEQ ID NO: 1550813 - DNA, 15 bp, Homo sapiens
cattatatcctattt

SEQ ID NO: 1550814 - DNA, 15 bp, Homo sapiens
acattatatcctatt

SEQ ID NO: 1550815 - DNA, 15 bp, Homo sapiens
tacattatatcctat

SEQ ID NO: 1550816 - DNA, 15 bp, Homo sapiens
ttacattatatccta

SEQ ID NO: 1550817 - DNA, 15 bp, Homo sapiens
tttacattatatcct

SEQ ID NO: 1550818 - DNA, 15 bp, Homo sapiens
atttacattatatcc

SEQ ID NO: 1550819 - DNA, 15 bp, Homo sapiens
aatttacattatatc

SEQ ID NO: 1550820 - DNA, 15 bp, Homo sapiens
aaatttacattatat

SEQ ID NO: 1550821 - DNA, 15 bp, Homo sapiens
aaaatttacattata

SEQ ID NO: 1550822 - DNA, 15 bp, Homo sapiens
taaaatttacattat

SEQ ID NO: 1550823 - DNA, 15 bp, Homo sapiens
ataaaatttacatta

SEQ ID NO: 1550824 - DNA, 15 bp, Homo sapiens
aataaaatttacatt

SEQ ID NO: 1550825 - DNA, 15 bp, Homo sapiens
aaataaaatttacat

SEQ ID NO: 1550826 - DNA, 15 bp, Homo sapiens
aaaataaaatttaca

SEQ ID NO: 1550827 - DNA, 15 bp, Homo sapiens
aaaaataaaatttac

SEQ ID NO: 1550828 - DNA, 15 bp, Homo sapiens
taaaaataaaattta

SEQ ID NO: 1550829 - DNA, 15 bp, Homo sapiens
ataaaaataaaattt

SEQ ID NO: 1550830 - DNA, 15 bp, Homo sapiens
gataaaaataaaatt

SEQ ID NO: 1550831 - DNA, 15 bp, Homo sapiens
agataaaaataaaat

SEQ ID NO: 1550832 - DNA, 15 bp, Homo sapiens
cagataaaaataaaa

SEQ ID NO: 1550833 - DNA, 15 bp, Homo sapiens
tcagataaaaataaa

SEQ ID NO: 1550834 - DNA, 15 bp, Homo sapiens
gtcagataaaaataa

SEQ ID NO: 1550835 - DNA, 15 bp, Homo sapiens
tgtcagataaaaata

SEQ ID NO: 1550836 - DNA, 15 bp, Homo sapiens
ttgtcagataaaaat

SEQ ID NO: 1550837 - DNA, 15 bp, Homo sapiens
cttgtcagataaaaa

SEQ ID NO: 1550838 - DNA, 15 bp, Homo sapiens
tcttgtcagataaaa

SEQ ID NO: 1550839 - DNA, 15 bp, Homo sapiens
ttcttgtcagataaa

SEQ ID NO: 1550840 - DNA, 15 bp, Homo sapiens
attcttgtcagataa

SEQ ID NO: 1550841 - DNA, 15 bp, Homo sapiens
aattcttgtcagata

SEQ ID NO: 1550842 - DNA, 15 bp, Homo sapiens
taattcttgtcagat

SEQ ID NO: 1550843 - DNA, 15 bp, Homo sapiens
ctaattcttgtcaga

SEQ ID NO: 1550844 - DNA, 15 bp, Homo sapiens
cctaattcttgtcag

SEQ ID NO: 1550845 - DNA, 15 bp, Homo sapiens
gcctaattcttgtca

SEQ ID NO: 1550846 - DNA, 15 bp, Homo sapiens
tgcctaattcttgtc

SEQ ID NO: 1550847 - DNA, 15 bp, Homo sapiens
atgcctaattcttgt

SEQ ID NO: 1550848 - DNA, 15 bp, Homo sapiens
tatgcctaattcttg

SEQ ID NO: 1550849 - DNA, 15 bp, Homo sapiens
atatgcctaattctt

SEQ ID NO: 1550850 - DNA, 15 bp, Homo sapiens
gatatgcctaattct

SEQ ID NO: 1550851 - DNA, 15 bp, Homo sapiens
tgatatgcctaattc

SEQ ID NO: 1550852 - DNA, 15 bp, Homo sapiens
atgatatgcctaatt

SEQ ID NO: 1550853 - DNA, 15 bp, Homo sapiens
aatgatatgcctaat

SEQ ID NO: 1550854 - DNA, 15 bp, Homo sapiens
aaatgatatgcctaa

SEQ ID NO: 1550855 - DNA, 15 bp, Homo sapiens
gaaatgatatgccta

SEQ ID NO: 1550856 - DNA, 15 bp, Homo sapiens
agaaatgatatgcct

SEQ ID NO: 1550857 - DNA, 15 bp, Homo sapiens
aagaaatgatatgcc

SEQ ID NO: 1550858 - DNA, 15 bp, Homo sapiens
gaagaaatgatatgc

SEQ ID NO: 1550859 - DNA, 15 bp, Homo sapiens
tgaagaaatgatatg

SEQ ID NO: 1550860 - DNA, 15 bp, Homo sapiens
ttgaagaaatgatat

SEQ ID NO: 1550861 - DNA, 15 bp, Homo sapiens
tttgaagaaatgata

SEQ ID NO: 1550862 - DNA, 15 bp, Homo sapiens
ctttgaagaaatgat

SEQ ID NO: 1550863 - DNA, 15 bp, Homo sapiens
actttgaagaaatga

SEQ ID NO: 1550864 - DNA, 15 bp, Homo sapiens
tactttgaagaaatg

SEQ ID NO: 1550865 - DNA, 15 bp, Homo sapiens
ttactttgaagaaat

SEQ ID NO: 1550866 - DNA, 15 bp, Homo sapiens
attactttgaagaaa

SEQ ID NO: 1550867 - DNA, 15 bp, Homo sapiens
gattactttgaagaa

SEQ ID NO: 1550868 - DNA, 15 bp, Homo sapiens
tgattactttgaaga

SEQ ID NO: 1550869 - DNA, 15 bp, Homo sapiens
atgattactttgaag

SEQ ID NO: 1550870 - DNA, 15 bp, Homo sapiens
aatgattactttgaa

SEQ ID NO: 1550871 - DNA, 15 bp, Homo sapiens
aaatgattactttga

SEQ ID NO: 1550872 - DNA, 15 bp, Homo sapiens
taaatgattactttg

SEQ ID NO: 1550873 - DNA, 15 bp, Homo sapiens
ttaaatgattacttt

SEQ ID NO: 1550874 - DNA, 15 bp, Homo sapiens
cttaaatgattactt

SEQ ID NO: 1550875 - DNA, 15 bp, Homo sapiens
ccttaaatgattact

SEQ ID NO: 1550876 - DNA, 15 bp, Homo sapiens
tccttaaatgattac

SEQ ID NO: 1550877 - DNA, 15 bp, Homo sapiens
ttccttaaatgatta

SEQ ID NO: 1550878 - DNA, 15 bp, Homo sapiens
tttccttaaatgatt

SEQ ID NO: 1550879 - DNA, 15 bp, Homo sapiens
atttccttaaatgat

SEQ ID NO: 1550880 - DNA, 15 bp, Homo sapiens
tatttccttaaatga

SEQ ID NO: 1550881 - DNA, 15 bp, Homo sapiens
ttatttccttaaatg

SEQ ID NO: 1550882 - DNA, 15 bp, Homo sapiens
attatttccttaaat

SEQ ID NO: 1550883 - DNA, 15 bp, Homo sapiens
cattatttccttaaa

SEQ ID NO: 1550884 - DNA, 15 bp, Homo sapiens
gcattatttccttaa

SEQ ID NO: 1550885 - DNA, 15 bp, Homo sapiens
ggcattatttcctta

SEQ ID NO: 1550886 - DNA, 15 bp, Homo sapiens
gggcattatttcctt

SEQ ID NO: 1550887 - DNA, 15 bp, Homo sapiens
agggcattatttcct

SEQ ID NO: 1550888 - DNA, 15 bp, Homo sapiens
gagggcattatttcc

SEQ ID NO: 1550889 - DNA, 15 bp, Homo sapiens
tgagggcattatttc

SEQ ID NO: 1550890 - DNA, 15 bp, Homo sapiens
gtgagggcattattt

SEQ ID NO: 1550891 - DNA, 15 bp, Homo sapiens
agtgagggcattatt

SEQ ID NO: 1550892 - DNA, 15 bp, Homo sapiens
gagtgagggcattat

SEQ ID NO: 1550893 - DNA, 15 bp, Homo sapiens
tgagtgagggcatta

SEQ ID NO: 1550894 - DNA, 15 bp, Homo sapiens
ttgagtgagggcatt

SEQ ID NO: 1550895 - DNA, 15 bp, Homo sapiens
tttgagtgagggcat

SEQ ID NO: 1550896 - DNA, 15 bp, Homo sapiens
gtttgagtgagggca

SEQ ID NO: 1550897 - DNA, 15 bp, Homo sapiens
tgtttgagtgagggc

SEQ ID NO: 1550898 - DNA, 15 bp, Homo sapiens
gtgtttgagtgaggg

SEQ ID NO: 1550899 - DNA, 15 bp, Homo sapiens
agtgtttgagtgagg

SEQ ID NO: 1550900 - DNA, 15 bp, Homo sapiens
cagtgtttgagtgag

SEQ ID NO: 1550901 - DNA, 15 bp, Homo sapiens
gcagtgtttgagtga

SEQ ID NO: 1550902 - DNA, 15 bp, Homo sapiens
agcagtgtttgagtg

SEQ ID NO: 1550903 - DNA, 15 bp, Homo sapiens
cagcagtgtttgagt

SEQ ID NO: 1550904 - DNA, 15 bp, Homo sapiens
agcagcagtgtttga

SEQ ID NO: 1550905 - DNA, 15 bp, Homo sapiens
gagcagcagtgtttg

SEQ ID NO: 1550906 - DNA, 15 bp, Homo sapiens
ggagcagcagtgttt

SEQ ID NO: 1550907 - DNA, 15 bp, Homo sapiens
aggagcagcagtgtt

SEQ ID NO: 1550908 - DNA, 15 bp, Homo sapiens
gaggagcagcagtgt

SEQ ID NO: 1550909 - DNA, 15 bp, Homo sapiens
ggaggagcagcagtg

SEQ ID NO: 1550910 - DNA, 15 bp, Homo sapiens
aggaggagcagcagt

SEQ ID NO: 1550911 - DNA, 15 bp, Homo sapiens
gaggaggagcagcag

SEQ ID NO: 1550912 - DNA, 15 bp, Homo sapiens
ggaggaggagcagca

SEQ ID NO: 1550913 - DNA, 15 bp, Homo sapiens
tggaggaggagcagc

SEQ ID NO: 1550914 - DNA, 15 bp, Homo sapiens
ttggaggaggagcag

SEQ ID NO: 1550915 - DNA, 15 bp, Homo sapiens
tttggaggaggagca

SEQ ID NO: 1550916 - DNA, 15 bp, Homo sapiens
atttggaggaggagc

SEQ ID NO: 1550917 - DNA, 15 bp, Homo sapiens
tatttggaggaggag

SEQ ID NO: 1550918 - DNA, 15 bp, Homo sapiens
ttatttggaggagga

SEQ ID NO: 1550919 - DNA, 15 bp, Homo sapiens
attatttggaggagg

SEQ ID NO: 1550920 - DNA, 15 bp, Homo sapiens
aattatttggaggag

SEQ ID NO: 1550921 - DNA, 15 bp, Homo sapiens
taattatttggagga

SEQ ID NO: 1550922 - DNA, 15 bp, Homo sapiens
ctaattatttggagg

SEQ ID NO: 1550923 - DNA, 15 bp, Homo sapiens
tctaattatttggag

SEQ ID NO: 1550924 - DNA, 15 bp, Homo sapiens
ttctaattatttgga

SEQ ID NO: 1550925 - DNA, 15 bp, Homo sapiens
tttctaattatttgg

SEQ ID NO: 1550926 - DNA, 15 bp, Homo sapiens
atttctaattatttg

SEQ ID NO: 1550927 - DNA, 15 bp, Homo sapiens
gttatttctaattat

SEQ ID NO: 1550928 - DNA, 15 bp, Homo sapiens
ggttatttctaatta

SEQ ID NO: 1550929 - DNA, 15 bp, Homo sapiens
aggttatttctaatt

SEQ ID NO: 1550930 - DNA, 15 bp, Homo sapiens
aaggttatttctaat

SEQ ID NO: 1550931 - DNA, 15 bp, Homo sapiens
caaggttatttctaa

SEQ ID NO: 1550932 - DNA, 15 bp, Homo sapiens
ccaaggttatttcta

SEQ ID NO: 1550933 - DNA, 15 bp, Homo sapiens
tccaaggttatttct

SEQ ID NO: 1550934 - DNA, 15 bp, Homo sapiens
ctccaaggttatttc

SEQ ID NO: 1550935 - DNA, 15 bp, Homo sapiens
gctccaaggttattt

SEQ ID NO: 1550936 - DNA, 15 bp, Homo sapiens
ggctccaaggttatt

SEQ ID NO: 1550937 - DNA, 15 bp, Homo sapiens
tggctccaaggttat

SEQ ID NO: 1550938 - DNA, 15 bp, Homo sapiens
ctggctccaaggtta

SEQ ID NO: 1550939 - DNA, 15 bp, Homo sapiens
actggctccaaggtt

SEQ ID NO: 1550940 - DNA, 15 bp, Homo sapiens
cactggctccaaggt

SEQ ID NO: 1550941 - DNA, 15 bp, Homo sapiens
acactggctccaagg

SEQ ID NO: 1550942 - DNA, 15 bp, Homo sapiens
aacactggctccaag

SEQ ID NO: 1550943 - DNA, 15 bp, Homo sapiens
caacactggctccaa

SEQ ID NO: 1550944 - DNA, 15 bp, Homo sapiens
gcaacactggctcca

SEQ ID NO: 1550945 - DNA, 15 bp, Homo sapiens
tgcaacactggctcc

SEQ ID NO: 1550946 - DNA, 15 bp, Homo sapiens
ctgcaacactggctc

SEQ ID NO: 1550947 - DNA, 15 bp, Homo sapiens
gctgcaacactggct

SEQ ID NO: 1550948 - DNA, 15 bp, Homo sapiens
ggctgcaacactggc

SEQ ID NO: 1550949 - DNA, 15 bp, Homo sapiens
gggctgcaacactgg

SEQ ID NO: 1550950 - DNA, 15 bp, Homo sapiens
agggctgcaacactg

SEQ ID NO: 1550951 - DNA, 15 bp, Homo sapiens
tagggctgcaacact

SEQ ID NO: 1550952 - DNA, 15 bp, Homo sapiens
ctagggctgcaacac

SEQ ID NO: 1550953 - DNA, 15 bp, Homo sapiens
tctagggctgcaaca

SEQ ID NO: 1550954 - DNA, 15 bp, Homo sapiens
ttctagggctgcaac

SEQ ID NO: 1550955 - DNA, 15 bp, Homo sapiens
tttctagggctgcaa

SEQ ID NO: 1550956 - DNA, 15 bp, Homo sapiens
ttttctagggctgca

SEQ ID NO: 1550957 - DNA, 15 bp, Homo sapiens
gttttctagggctgc

SEQ ID NO: 1550958 - DNA, 15 bp, Homo sapiens
tgttttctagggctg

SEQ ID NO: 1550959 - DNA, 15 bp, Homo sapiens
atgttttctagggct

SEQ ID NO: 1550960 - DNA, 15 bp, Homo sapiens
gatgttttctagggc

SEQ ID NO: 1550961 - DNA, 15 bp, Homo sapiens
ggatgttttctaggg

SEQ ID NO: 1550962 - DNA, 15 bp, Homo sapiens
aggatgttttctagg

SEQ ID NO: 1550963 - DNA, 15 bp, Homo sapiens
caggatgttttctag

SEQ ID NO: 1550964 - DNA, 15 bp, Homo sapiens
ccaggatgttttcta

SEQ ID NO: 1550965 - DNA, 15 bp, Homo sapiens
accaggatgttttct

SEQ ID NO: 1550966 - DNA, 15 bp, Homo sapiens
taccaggatgttttc

SEQ ID NO: 1550967 - DNA, 15 bp, Homo sapiens
gtaccaggatgtttt

SEQ ID NO: 1550968 - DNA, 15 bp, Homo sapiens
agtaccaggatgttt

SEQ ID NO: 1550969 - DNA, 15 bp, Homo sapiens
aagtaccaggatgtt

SEQ ID NO: 1550970 - DNA, 15 bp, Homo sapiens
taagtaccaggatgt

SEQ ID NO: 1550971 - DNA, 15 bp, Homo sapiens
ttaagtaccaggatg

SEQ ID NO: 1550972 - DNA, 15 bp, Homo sapiens
attaagtaccaggat

SEQ ID NO: 1550973 - DNA, 15 bp, Homo sapiens
cattaagtaccagga

SEQ ID NO: 1550974 - DNA, 15 bp, Homo sapiens
acattaagtaccagg

SEQ ID NO: 1550975 - DNA, 15 bp, Homo sapiens
gacattaagtaccag

SEQ ID NO: 1550976 - DNA, 15 bp, Homo sapiens
tgacattaagtacca

SEQ ID NO: 1550977 - DNA, 15 bp, Homo sapiens
atgacattaagtacc

SEQ ID NO: 1550978 - DNA, 15 bp, Homo sapiens
aatgacattaagtac

SEQ ID NO: 1550979 - DNA, 15 bp, Homo sapiens
aaatgacattaagta

SEQ ID NO: 1550980 - DNA, 15 bp, Homo sapiens
gaaatgacattaagt

SEQ ID NO: 1550981 - DNA, 15 bp, Homo sapiens
ggaaatgacattaag

SEQ ID NO: 1550982 - DNA, 15 bp, Homo sapiens
aggaaatgacattaa

SEQ ID NO: 1550983 - DNA, 15 bp, Homo sapiens
taggaaatgacatta

SEQ ID NO: 1550984 - DNA, 15 bp, Homo sapiens
ataggaaatgacatt

SEQ ID NO: 1550985 - DNA, 15 bp, Homo sapiens
tataggaaatgacat

SEQ ID NO: 1550986 - DNA, 15 bp, Homo sapiens
atataggaaatgaca

SEQ ID NO: 1550987 - DNA, 15 bp, Homo sapiens
aatataggaaatgac

SEQ ID NO: 1550988 - DNA, 15 bp, Homo sapiens
aaatataggaaatga

SEQ ID NO: 1550989 - DNA, 15 bp, Homo sapiens
aaaatataggaaatg

SEQ ID NO: 1550990 - DNA, 15 bp, Homo sapiens
taaaatataggaaat

SEQ ID NO: 1550991 - DNA, 15 bp, Homo sapiens
ataaaatataggaaa

SEQ ID NO: 1550992 - DNA, 15 bp, Homo sapiens
aataaaatataggaa

SEQ ID NO: 1550993 - DNA, 15 bp, Homo sapiens
aaataaaatatagga

SEQ ID NO: 1550994 - DNA, 15 bp, Homo sapiens
aaaataaaatatagg

SEQ ID NO: 1550995 - DNA, 15 bp, Homo sapiens
aaaaataaaatatag

SEQ ID NO: 1550996 - DNA, 15 bp, Homo sapiens
aaaaaataaaatata

SEQ ID NO: 1550997 - DNA, 15 bp, Homo sapiens
aaaaaaataaaatat

SEQ ID NO: 1550998 - DNA, 15 bp, Homo sapiens
aaaaaaaaataaaat

SEQ ID NO: 1550999 - DNA, 15 bp, Homo sapiens
caaaaaaaaataaaa

SEQ ID NO: 1551000 - DNA, 15 bp, Homo sapiens
tcaaaaaaaaataaa

SEQ ID NO: 1551001 - DNA, 15 bp, Homo sapiens
ctcaaaaaaaaataa

SEQ ID NO: 1551002 - DNA, 15 bp, Homo sapiens
tctcaaaaaaaaata

SEQ ID NO: 1551003 - DNA, 15 bp, Homo sapiens
agtctcaaaaaaaaa

SEQ ID NO: 1551004 - DNA, 15 bp, Homo sapiens
cagtctcaaaaaaaa

SEQ ID NO: 1551005 - DNA, 15 bp, Homo sapiens
tcagtctcaaaaaaa

SEQ ID NO: 1551006 - DNA, 15 bp, Homo sapiens
ctcagtctcaaaaaa

SEQ ID NO: 1551007 - DNA, 15 bp, Homo sapiens
actcagtctcaaaaa

SEQ ID NO: 1551008 - DNA, 15 bp, Homo sapiens
gactcagtctcaaaa

SEQ ID NO: 1551009 - DNA, 15 bp, Homo sapiens
agactcagtctcaaa

SEQ ID NO: 1551010 - DNA, 15 bp, Homo sapiens
gagactcagtctcaa

SEQ ID NO: 1551011 - DNA, 15 bp, Homo sapiens
cgagactcagtctca

SEQ ID NO: 1551012 - DNA, 15 bp, Homo sapiens
gcgagactcagtctc

SEQ ID NO: 1551013 - DNA, 15 bp, Homo sapiens
agcgagactcagtct

SEQ ID NO: 1551014 - DNA, 15 bp, Homo sapiens
gagcgagactcagtc

SEQ ID NO: 1551015 - DNA, 15 bp, Homo sapiens
agagcgagactcagt

SEQ ID NO: 1551016 - DNA, 15 bp, Homo sapiens
cagagcgagactcag

SEQ ID NO: 1551017 - DNA, 15 bp, Homo sapiens
acagagcgagactca

SEQ ID NO: 1551018 - DNA, 15 bp, Homo sapiens
ctgtaccactgcact

SEQ ID NO: 1551019 - DNA, 15 bp, Homo sapiens
actgtaccactgcac

SEQ ID NO: 1551020 - DNA, 15 bp, Homo sapiens
gactgtaccactgca

SEQ ID NO: 1551021 - DNA, 15 bp, Homo sapiens
agactgtaccactgc

SEQ ID NO: 1551022 - DNA, 15 bp, Homo sapiens
gagactgtaccactg

SEQ ID NO: 1551023 - DNA, 15 bp, Homo sapiens
cgagactgtaccact

SEQ ID NO: 1551024 - DNA, 15 bp, Homo sapiens
ccgagactgtaccac

SEQ ID NO: 1551025 - DNA, 15 bp, Homo sapiens
gccgagactgtacca

SEQ ID NO: 1551026 - DNA, 15 bp, Homo sapiens
agccgagactgtacc

SEQ ID NO: 1551027 - DNA, 15 bp, Homo sapiens
gagccgagactgtac

SEQ ID NO: 1551028 - DNA, 15 bp, Homo sapiens
tgagccgagactgta

SEQ ID NO: 1551029 - DNA, 15 bp, Homo sapiens
atgagccgagactgt

SEQ ID NO: 1551030 - DNA, 15 bp, Homo sapiens
aatgagccgagactg

SEQ ID NO: 1551031 - DNA, 15 bp, Homo sapiens
caatgagccgagact

SEQ ID NO: 1551032 - DNA, 15 bp, Homo sapiens
gcaatgagccgagac

SEQ ID NO: 1551033 - DNA, 15 bp, Homo sapiens
agaggttgcaatgag

SEQ ID NO: 1551034 - DNA, 15 bp, Homo sapiens
cagaggttgcaatga

SEQ ID NO: 1551035 - DNA, 15 bp, Homo sapiens
gcagaggttgcaatg

SEQ ID NO: 1551036 - DNA, 15 bp, Homo sapiens
ggcagaggttgcaat

SEQ ID NO: 1551037 - DNA, 15 bp, Homo sapiens
aggcagaggttgcaa

SEQ ID NO: 1551038 - DNA, 15 bp, Homo sapiens
gtcacttgagcctgg

SEQ ID NO: 1551039 - DNA, 15 bp, Homo sapiens
ggtcacttgagcctg

SEQ ID NO: 1551040 - DNA, 15 bp, Homo sapiens
gggtcacttgagcct

SEQ ID NO: 1551041 - DNA, 15 bp, Homo sapiens
agggtcacttgagcc

SEQ ID NO: 1551042 - DNA, 15 bp, Homo sapiens
aagggtcacttgagc

SEQ ID NO: 1551043 - DNA, 15 bp, Homo sapiens
gaagggtcacttgag

SEQ ID NO: 1551044 - DNA, 15 bp, Homo sapiens
ggaagggtcacttga

SEQ ID NO: 1551045 - DNA, 15 bp, Homo sapiens
tggaagggtcacttg

SEQ ID NO: 1551046 - DNA, 15 bp, Homo sapiens
gtggaagggtcactt

SEQ ID NO: 1551047 - DNA, 15 bp, Homo sapiens
ggtggaagggtcact

SEQ ID NO: 1551048 - DNA, 15 bp, Homo sapiens
aggtggaagggtcac

SEQ ID NO: 1551049 - DNA, 15 bp, Homo sapiens
gaggtggaagggtca

SEQ ID NO: 1551050 - DNA, 15 bp, Homo sapiens
tgaggtggaagggtc

SEQ ID NO: 1551051 - DNA, 15 bp, Homo sapiens
ctgaggtggaagggt

SEQ ID NO: 1551052 - DNA, 15 bp, Homo sapiens
gctgaggtggaaggg

SEQ ID NO: 1551053 - DNA, 15 bp, Homo sapiens
ggctgaggtggaagg

SEQ ID NO: 1551054 - DNA, 15 bp, Homo sapiens
gaggctgaggtggaa

SEQ ID NO: 1551055 - DNA, 15 bp, Homo sapiens
gcccagctacttggg

SEQ ID NO: 1551056 - DNA, 15 bp, Homo sapiens
ggcccagctacttgg

SEQ ID NO: 1551057 - DNA, 15 bp, Homo sapiens
aggcccagctacttg

SEQ ID NO: 1551058 - DNA, 15 bp, Homo sapiens
taggcccagctactt

SEQ ID NO: 1551059 - DNA, 15 bp, Homo sapiens
acctgtaggcccagc

SEQ ID NO: 1551060 - DNA, 15 bp, Homo sapiens
cacctgtaggcccag

SEQ ID NO: 1551061 - DNA, 15 bp, Homo sapiens
gcacctgtaggccca

SEQ ID NO: 1551062 - DNA, 15 bp, Homo sapiens
tgcacctgtaggccc

SEQ ID NO: 1551063 - DNA, 15 bp, Homo sapiens
gtgcacctgtaggcc

SEQ ID NO: 1551064 - DNA, 15 bp, Homo sapiens
tgtgcacctgtaggc

SEQ ID NO: 1551065 - DNA, 15 bp, Homo sapiens
gtgtgcacctgtagg

SEQ ID NO: 1551066 - DNA, 15 bp, Homo sapiens
ggtgtgcacctgtag

SEQ ID NO: 1551067 - DNA, 15 bp, Homo sapiens
tggtgtgcacctgta

SEQ ID NO: 1551068 - DNA, 15 bp, Homo sapiens
ttggtgtgcacctgt

SEQ ID NO: 1551069 - DNA, 15 bp, Homo sapiens
gttggtgtgcacctg

SEQ ID NO: 1551070 - DNA, 15 bp, Homo sapiens
tgttggtgtgcacct

SEQ ID NO: 1551071 - DNA, 15 bp, Homo sapiens
gtgttggtgtgcacc

SEQ ID NO: 1551072 - DNA, 15 bp, Homo sapiens
tgtgttggtgtgcac

SEQ ID NO: 1551073 - DNA, 15 bp, Homo sapiens
gtgtgttggtgtgca

SEQ ID NO: 1551074 - DNA, 15 bp, Homo sapiens
ggtgtgttggtgtgc

SEQ ID NO: 1551075 - DNA, 15 bp, Homo sapiens
aggtgtgttggtgtg

SEQ ID NO: 1551076 - DNA, 15 bp, Homo sapiens
caggtgtgttggtgt

SEQ ID NO: 1551077 - DNA, 15 bp, Homo sapiens
ccaggtgtgttggtg

SEQ ID NO: 1551078 - DNA, 15 bp, Homo sapiens
gccaggtgtgttggt

SEQ ID NO: 1551079 - DNA, 15 bp, Homo sapiens
agccaggtgtgttgg

SEQ ID NO: 1551080 - DNA, 15 bp, Homo sapiens
tagccaggtgtgttg

SEQ ID NO: 1551081 - DNA, 15 bp, Homo sapiens
ttagccaggtgtgtt

SEQ ID NO: 1551082 - DNA, 15 bp, Homo sapiens
attagccaggtgtgt

SEQ ID NO: 1551083 - DNA, 15 bp, Homo sapiens
tatctctaaaaaaaa

SEQ ID NO: 1551084 - DNA, 15 bp, Homo sapiens
ctatctctaaaaaaa

SEQ ID NO: 1551085 - DNA, 15 bp, Homo sapiens
cctatctctaaaaaa

SEQ ID NO: 1551086 - DNA, 15 bp, Homo sapiens
ccctatctctaaaaa

SEQ ID NO: 1551087 - DNA, 15 bp, Homo sapiens
accctatctctaaaa

SEQ ID NO: 1551088 - DNA, 15 bp, Homo sapiens
aaccctatctctaaa

SEQ ID NO: 1551089 - DNA, 15 bp, Homo sapiens
aaaccctatctctaa

SEQ ID NO: 1551090 - DNA, 15 bp, Homo sapiens
aaaaccctatctcta

SEQ ID NO: 1551091 - DNA, 15 bp, Homo sapiens
caaaaccctatctct

SEQ ID NO: 1551092 - DNA, 15 bp, Homo sapiens
gcaaaaccctatctc

SEQ ID NO: 1551093 - DNA, 15 bp, Homo sapiens
ggcaaaaccctatct

SEQ ID NO: 1551094 - DNA, 15 bp, Homo sapiens
tggcaaaaccctatc

SEQ ID NO: 1551095 - DNA, 15 bp, Homo sapiens
atggcaaaaccctat

SEQ ID NO: 1551096 - DNA, 15 bp, Homo sapiens
catggcaaaacccta

SEQ ID NO: 1551097 - DNA, 15 bp, Homo sapiens
acatggcaaaaccct

SEQ ID NO: 1551098 - DNA, 15 bp, Homo sapiens
gcaacatggcaaaac

SEQ ID NO: 1551099 - DNA, 15 bp, Homo sapiens
gggcaacatggcaaa

SEQ ID NO: 1551100 - DNA, 15 bp, Homo sapiens
cggattgcttgaggc

SEQ ID NO: 1551101 - DNA, 15 bp, Homo sapiens
gcggattgcttgagg

SEQ ID NO: 1551102 - DNA, 15 bp, Homo sapiens
ggcggattgcttgag

SEQ ID NO: 1551103 - DNA, 15 bp, Homo sapiens
gggcggattgcttga

SEQ ID NO: 1551104 - DNA, 15 bp, Homo sapiens
cgggcggattgcttg

SEQ ID NO: 1551105 - DNA, 15 bp, Homo sapiens
gcgggcggattgctt

SEQ ID NO: 1551106 - DNA, 15 bp, Homo sapiens
ggcgggcggattgct

SEQ ID NO: 1551107 - DNA, 15 bp, Homo sapiens
aggcgggcggattgc

SEQ ID NO: 1551108 - DNA, 15 bp, Homo sapiens
gaggcgggcggattg

SEQ ID NO: 1551109 - DNA, 15 bp, Homo sapiens
tgaggcgggcggatt

SEQ ID NO: 1551110 - DNA, 15 bp, Homo sapiens
ggggaggctgaggcg

SEQ ID NO: 1551111 - DNA, 15 bp, Homo sapiens
cttggggaggctgag

SEQ ID NO: 1551112 - DNA, 15 bp, Homo sapiens
acttggggaggctga

SEQ ID NO: 1551113 - DNA, 15 bp, Homo sapiens
cacttggggaggctg

SEQ ID NO: 1551114 - DNA, 15 bp, Homo sapiens
gcacttggggaggct

SEQ ID NO: 1551115 - DNA, 15 bp, Homo sapiens
ccagcacttggggag

SEQ ID NO: 1551116 - DNA, 15 bp, Homo sapiens
cccagcacttgggga

SEQ ID NO: 1551117 - DNA, 15 bp, Homo sapiens
tcccagcacttgggg

SEQ ID NO: 1551118 - DNA, 15 bp, Homo sapiens
atcccagcacttggg

SEQ ID NO: 1551119 - DNA, 15 bp, Homo sapiens
aatcccagcacttgg

SEQ ID NO: 1551120 - DNA, 15 bp, Homo sapiens
taatcccagcacttg

SEQ ID NO: 1551121 - DNA, 15 bp, Homo sapiens
agtggctcacgcttg

SEQ ID NO: 1551122 - DNA, 15 bp, Homo sapiens
cagtggctcacgctt

SEQ ID NO: 1551123 - DNA, 15 bp, Homo sapiens
gcagtggctcacgct

SEQ ID NO: 1551124 - DNA, 15 bp, Homo sapiens
agctgggtgcagtgg

SEQ ID NO: 1551125 - DNA, 15 bp, Homo sapiens
gagctgggtgcagtg

SEQ ID NO: 1551126 - DNA, 15 bp, Homo sapiens
agagctgggtgcagt

SEQ ID NO: 1551127 - DNA, 15 bp, Homo sapiens
cagagctgggtgcag

SEQ ID NO: 1551128 - DNA, 15 bp, Homo sapiens
acagagctgggtgca

SEQ ID NO: 1551129 - DNA, 15 bp, Homo sapiens
tacagagctgggtgc

SEQ ID NO: 1551130 - DNA, 15 bp, Homo sapiens
atacagagctgggtg

SEQ ID NO: 1551131 - DNA, 15 bp, Homo sapiens
aatacagagctgggt

SEQ ID NO: 1551132 - DNA, 15 bp, Homo sapiens
aaatacagagctggg

SEQ ID NO: 1551133 - DNA, 15 bp, Homo sapiens
aaaatacagagctgg

SEQ ID NO: 1551134 - DNA, 15 bp, Homo sapiens
gaaaatacagagctg

SEQ ID NO: 1551135 - DNA, 15 bp, Homo sapiens
tgaaaatacagagct

SEQ ID NO: 1551136 - DNA, 15 bp, Homo sapiens
ttgaaaatacagagc

SEQ ID NO: 1551137 - DNA, 15 bp, Homo sapiens
tttgaaaatacagag

SEQ ID NO: 1551138 - DNA, 15 bp, Homo sapiens
atttgaaaatacaga

SEQ ID NO: 1551139 - DNA, 15 bp, Homo sapiens
aatttgaaaatacag

SEQ ID NO: 1551140 - DNA, 15 bp, Homo sapiens
taatttgaaaataca

SEQ ID NO: 1551141 - DNA, 15 bp, Homo sapiens
gtaatttgaaaatac

SEQ ID NO: 1551142 - DNA, 15 bp, Homo sapiens
agtaatttgaaaata

SEQ ID NO: 1551143 - DNA, 15 bp, Homo sapiens
tagtaatttgaaaat

SEQ ID NO: 1551144 - DNA, 15 bp, Homo sapiens
atagtaatttgaaaa

SEQ ID NO: 1551145 - DNA, 15 bp, Homo sapiens
aatagtaatttgaaa

SEQ ID NO: 1551146 - DNA, 15 bp, Homo sapiens
aaatagtaatttgaa

SEQ ID NO: 1551147 - DNA, 15 bp, Homo sapiens
aaaatagtaatttga

SEQ ID NO: 1551148 - DNA, 15 bp, Homo sapiens
taaaatagtaatttg

SEQ ID NO: 1551149 - DNA, 15 bp, Homo sapiens
ataaaatagtaattt

SEQ ID NO: 1551150 - DNA, 15 bp, Homo sapiens
tataaaatagtaatt

SEQ ID NO: 1551151 - DNA, 15 bp, Homo sapiens
atataaaatagtaat

SEQ ID NO: 1551152 - DNA, 15 bp, Homo sapiens
aatataaaatagtaa

SEQ ID NO: 1551153 - DNA, 15 bp, Homo sapiens
caatataaaatagta

SEQ ID NO: 1551154 - DNA, 15 bp, Homo sapiens
tcaatataaaatagt

SEQ ID NO: 1551155 - DNA, 15 bp, Homo sapiens
atcaatataaaatag

SEQ ID NO: 1551156 - DNA, 15 bp, Homo sapiens
catcaatataaaata

SEQ ID NO: 1551157 - DNA, 15 bp, Homo sapiens
gcatcaatataaaat

SEQ ID NO: 1551158 - DNA, 15 bp, Homo sapiens
agcatcaatataaaa

SEQ ID NO: 1551159 - DNA, 15 bp, Homo sapiens
tagcatcaatataaa

SEQ ID NO: 1551160 - DNA, 15 bp, Homo sapiens
gtagcatcaatataa

SEQ ID NO: 1551161 - DNA, 15 bp, Homo sapiens
tgtagcatcaatata

SEQ ID NO: 1551162 - DNA, 15 bp, Homo sapiens
atgtagcatcaatat

SEQ ID NO: 1551163 - DNA, 15 bp, Homo sapiens
aatgtagcatcaata

SEQ ID NO: 1551164 - DNA, 15 bp, Homo sapiens
taatgtagcatcaat

SEQ ID NO: 1551165 - DNA, 15 bp, Homo sapiens
gtaatgtagcatcaa

SEQ ID NO: 1551166 - DNA, 15 bp, Homo sapiens
agtaatgtagcatca

SEQ ID NO: 1551167 - DNA, 15 bp, Homo sapiens
cagtaatgtagcatc

SEQ ID NO: 1551168 - DNA, 15 bp, Homo sapiens
acagtaatgtagcat

SEQ ID NO: 1551169 - DNA, 15 bp, Homo sapiens
gacagtaatgtagca

SEQ ID NO: 1551170 - DNA, 15 bp, Homo sapiens
agacagtaatgtagc

SEQ ID NO: 1551171 - DNA, 15 bp, Homo sapiens
aagacagtaatgtag

SEQ ID NO: 1551172 - DNA, 15 bp, Homo sapiens
taagacagtaatgta

SEQ ID NO: 1551173 - DNA, 15 bp, Homo sapiens
ctaagacagtaatgt

SEQ ID NO: 1551174 - DNA, 15 bp, Homo sapiens
tctaagacagtaatg

SEQ ID NO: 1551175 - DNA, 15 bp, Homo sapiens
ttctaagacagtaat

SEQ ID NO: 1551176 - DNA, 15 bp, Homo sapiens
tttctaagacagtaa

SEQ ID NO: 1551177 - DNA, 15 bp, Homo sapiens
ttttctaagacagta

SEQ ID NO: 1551178 - DNA, 15 bp, Homo sapiens
cttttctaagacagt

SEQ ID NO: 1551179 - DNA, 15 bp, Homo sapiens
gcttttctaagacag

SEQ ID NO: 1551180 - DNA, 15 bp, Homo sapiens
tgcttttctaagaca

SEQ ID NO: 1551181 - DNA, 15 bp, Homo sapiens
atgcttttctaagac

SEQ ID NO: 1551182 - DNA, 15 bp, Homo sapiens
tatgcttttctaaga

SEQ ID NO: 1551183 - DNA, 15 bp, Homo sapiens
ctatgcttttctaag

SEQ ID NO: 1551184 - DNA, 15 bp, Homo sapiens
tctatgcttttctaa

SEQ ID NO: 1551185 - DNA, 15 bp, Homo sapiens
ctctatgcttttcta

SEQ ID NO: 1551186 - DNA, 15 bp, Homo sapiens
tctctatgcttttct

SEQ ID NO: 1551187 - DNA, 15 bp, Homo sapiens
atctctatgcttttc

SEQ ID NO: 1551188 - DNA, 15 bp, Homo sapiens
tatctctatgctttt

SEQ ID NO: 1551189 - DNA, 15 bp, Homo sapiens
gtatctctatgcttt

SEQ ID NO: 1551190 - DNA, 15 bp, Homo sapiens
agtatctctatgctt

SEQ ID NO: 1551191 - DNA, 15 bp, Homo sapiens
aagtatctctatgct

SEQ ID NO: 1551192 - DNA, 15 bp, Homo sapiens
aaagtatctctatgc

SEQ ID NO: 1551193 - DNA, 15 bp, Homo sapiens
caaagtatctctatg

SEQ ID NO: 1551194 - DNA, 15 bp, Homo sapiens
gcaaagtatctctat

SEQ ID NO: 1551195 - DNA, 15 bp, Homo sapiens
tgcaaagtatctcta

SEQ ID NO: 1551196 - DNA, 15 bp, Homo sapiens
ttgcaaagtatctct

SEQ ID NO: 1551197 - DNA, 15 bp, Homo sapiens
cttgcaaagtatctc

SEQ ID NO: 1551198 - DNA, 15 bp, Homo sapiens
acttgcaaagtatct

SEQ ID NO: 1551199 - DNA, 15 bp, Homo sapiens
cacttgcaaagtatc

SEQ ID NO: 1551200 - DNA, 15 bp, Homo sapiens
tcacttgcaaagtat

SEQ ID NO: 1551201 - DNA, 15 bp, Homo sapiens
gtcacttgcaaagta

SEQ ID NO: 1551202 - DNA, 15 bp, Homo sapiens
agtcacttgcaaagt

SEQ ID NO: 1551203 - DNA, 15 bp, Homo sapiens
cagtcacttgcaaag

SEQ ID NO: 1551204 - DNA, 15 bp, Homo sapiens
tcagtcacttgcaaa

SEQ ID NO: 1551205 - DNA, 15 bp, Homo sapiens
ttcagtcacttgcaa

SEQ ID NO: 1551206 - DNA, 15 bp, Homo sapiens
cttcagtcacttgca

SEQ ID NO: 1551207 - DNA, 15 bp, Homo sapiens
tcttcagtcacttgc

SEQ ID NO: 1551208 - DNA, 15 bp, Homo sapiens
atcttcagtcacttg

SEQ ID NO: 1551209 - DNA, 15 bp, Homo sapiens
tatcttcagtcactt

SEQ ID NO: 1551210 - DNA, 15 bp, Homo sapiens
ctatcttcagtcact

SEQ ID NO: 1551211 - DNA, 15 bp, Homo sapiens
actatcttcagtcac

SEQ ID NO: 1551212 - DNA, 15 bp, Homo sapiens
tactatcttcagtca

SEQ ID NO: 1551213 - DNA, 15 bp, Homo sapiens
atactatcttcagtc

SEQ ID NO: 1551214 - DNA, 15 bp, Homo sapiens
aatactatcttcagt

SEQ ID NO: 1551215 - DNA, 15 bp, Homo sapiens
caatactatcttcag

SEQ ID NO: 1551216 - DNA, 15 bp, Homo sapiens
tcaatactatcttca

SEQ ID NO: 1551217 - DNA, 15 bp, Homo sapiens
atcaatactatcttc

SEQ ID NO: 1551218 - DNA, 15 bp, Homo sapiens
tatcaatactatctt

SEQ ID NO: 1551219 - DNA, 15 bp, Homo sapiens
ctatcaatactatct

SEQ ID NO: 1551220 - DNA, 15 bp, Homo sapiens
tctatcaatactatc

SEQ ID NO: 1551221 - DNA, 15 bp, Homo sapiens
ctctatcaatactat

SEQ ID NO: 1551222 - DNA, 15 bp, Homo sapiens
tctctatcaatacta

SEQ ID NO: 1551223 - DNA, 15 bp, Homo sapiens
atctctatcaatact

SEQ ID NO: 1551224 - DNA, 15 bp, Homo sapiens
aatctctatcaatac

SEQ ID NO: 1551225 - DNA, 15 bp, Homo sapiens
aaatctctatcaata

SEQ ID NO: 1551226 - DNA, 15 bp, Homo sapiens
taaatctctatcaat

SEQ ID NO: 1551227 - DNA, 15 bp, Homo sapiens
ttaaatctctatcaa

SEQ ID NO: 1551228 - DNA, 15 bp, Homo sapiens
tttaaatctctatca

SEQ ID NO: 1551229 - DNA, 15 bp, Homo sapiens
ttttaaatctctatc

SEQ ID NO: 1551230 - DNA, 15 bp, Homo sapiens
attttaaatctctat

SEQ ID NO: 1551231 - DNA, 15 bp, Homo sapiens
aattttaaatctcta

SEQ ID NO: 1551232 - DNA, 15 bp, Homo sapiens
aaattttaaatctct

SEQ ID NO: 1551233 - DNA, 15 bp, Homo sapiens
aaaattttaaatctc

SEQ ID NO: 1551234 - DNA, 15 bp, Homo sapiens
aaaaattttaaatct

SEQ ID NO: 1551235 - DNA, 15 bp, Homo sapiens
caaaaattttaaatc

SEQ ID NO: 1551236 - DNA, 15 bp, Homo sapiens
tcaaaaattttaaat

SEQ ID NO: 1551237 - DNA, 15 bp, Homo sapiens
ttcaaaaattttaaa

SEQ ID NO: 1551238 - DNA, 15 bp, Homo sapiens
attcaaaaattttaa

SEQ ID NO: 1551239 - DNA, 15 bp, Homo sapiens
tattcaaaaatttta

SEQ ID NO: 1551240 - DNA, 15 bp, Homo sapiens
gtattcaaaaatttt

SEQ ID NO: 1551241 - DNA, 15 bp, Homo sapiens
ggtattcaaaaattt

SEQ ID NO: 1551242 - DNA, 15 bp, Homo sapiens
tggtattcaaaaatt

SEQ ID NO: 1551243 - DNA, 15 bp, Homo sapiens
ttggtattcaaaaat

SEQ ID NO: 1551244 - DNA, 15 bp, Homo sapiens
attggtattcaaaaa

SEQ ID NO: 1551245 - DNA, 15 bp, Homo sapiens
gattggtattcaaaa

SEQ ID NO: 1551246 - DNA, 15 bp, Homo sapiens
agattggtattcaaa

SEQ ID NO: 1551247 - DNA, 15 bp, Homo sapiens
gagattggtattcaa

SEQ ID NO: 1551248 - DNA, 15 bp, Homo sapiens
agagattggtattca

SEQ ID NO: 1551249 - DNA, 15 bp, Homo sapiens
aagagattggtattc

SEQ ID NO: 1551250 - DNA, 15 bp, Homo sapiens
taagagattggtatt

SEQ ID NO: 1551251 - DNA, 15 bp, Homo sapiens
ttaagagattggtat

SEQ ID NO: 1551252 - DNA, 15 bp, Homo sapiens
attaagagattggta

SEQ ID NO: 1551253 - DNA, 15 bp, Homo sapiens
gattaagagattggt

SEQ ID NO: 1551254 - DNA, 15 bp, Homo sapiens
agattaagagattgg

SEQ ID NO: 1551255 - DNA, 15 bp, Homo sapiens
gagattaagagattg

SEQ ID NO: 1551256 - DNA, 15 bp, Homo sapiens
agagattaagagatt

SEQ ID NO: 1551257 - DNA, 15 bp, Homo sapiens
cagagattaagagat

SEQ ID NO: 1551258 - DNA, 15 bp, Homo sapiens
tcagagattaagaga

SEQ ID NO: 1551259 - DNA, 15 bp, Homo sapiens
ttcagagattaagag

SEQ ID NO: 1551260 - DNA, 15 bp, Homo sapiens
cttcagagattaaga

SEQ ID NO: 1551261 - DNA, 15 bp, Homo sapiens
ccttcagagattaag

SEQ ID NO: 1551262 - DNA, 15 bp, Homo sapiens
tccttcagagattaa

SEQ ID NO: 1551263 - DNA, 15 bp, Homo sapiens
ctccttcagagatta

SEQ ID NO: 1551264 - DNA, 15 bp, Homo sapiens
actccttcagagatt

SEQ ID NO: 1551265 - DNA, 15 bp, Homo sapiens
gactccttcagagat

SEQ ID NO: 1551266 - DNA, 15 bp, Homo sapiens
tgactccttcagaga

SEQ ID NO: 1551267 - DNA, 15 bp, Homo sapiens
ttgactccttcagag

SEQ ID NO: 1551268 - DNA, 15 bp, Homo sapiens
tttgactccttcaga

SEQ ID NO: 1551269 - DNA, 15 bp, Homo sapiens
atttgactccttcag

SEQ ID NO: 1551270 - DNA, 15 bp, Homo sapiens
catttgactccttca

SEQ ID NO: 1551271 - DNA, 15 bp, Homo sapiens
tcatttgactccttc

SEQ ID NO: 1551272 - DNA, 15 bp, Homo sapiens
ttcatttgactcctt

SEQ ID NO: 1551273 - DNA, 15 bp, Homo sapiens
attcatttgactcct

SEQ ID NO: 1551274 - DNA, 15 bp, Homo sapiens
tattcatttgactcc

SEQ ID NO: 1551275 - DNA, 15 bp, Homo sapiens
atattcatttgactc

SEQ ID NO: 1551276 - DNA, 15 bp, Homo sapiens
tatattcatttgact

SEQ ID NO: 1551277 - DNA, 15 bp, Homo sapiens
gtatattcatttgac

SEQ ID NO: 1551278 - DNA, 15 bp, Homo sapiens
agtatattcatttga

SEQ ID NO: 1551279 - DNA, 15 bp, Homo sapiens
gagtatattcatttg

SEQ ID NO: 1551280 - DNA, 15 bp, Homo sapiens
tgagtatattcattt

SEQ ID NO: 1551281 - DNA, 15 bp, Homo sapiens
atgagtatattcatt

SEQ ID NO: 1551282 - DNA, 15 bp, Homo sapiens
gatgagtatattcat

SEQ ID NO: 1551283 - DNA, 15 bp, Homo sapiens
ggatgagtatattca

SEQ ID NO: 1551284 - DNA, 15 bp, Homo sapiens
aggatgagtatattc

SEQ ID NO: 1551285 - DNA, 15 bp, Homo sapiens
aaggatgagtatatt

SEQ ID NO: 1551286 - DNA, 15 bp, Homo sapiens
aaaggatgagtatat

SEQ ID NO: 1551287 - DNA, 15 bp, Homo sapiens
taaaggatgagtata

SEQ ID NO: 1551288 - DNA, 15 bp, Homo sapiens
gtaaaggatgagtat

SEQ ID NO: 1551289 - DNA, 15 bp, Homo sapiens
agtaaaggatgagta

SEQ ID NO: 1551290 - DNA, 15 bp, Homo sapiens
cagtaaaggatgagt

SEQ ID NO: 1551291 - DNA, 15 bp, Homo sapiens
ccagtaaaggatgag

SEQ ID NO: 1551292 - DNA, 15 bp, Homo sapiens
tccagtaaaggatga

SEQ ID NO: 1551293 - DNA, 15 bp, Homo sapiens
atccagtaaaggatg

SEQ ID NO: 1551294 - DNA, 15 bp, Homo sapiens
tatccagtaaaggat

SEQ ID NO: 1551295 - DNA, 15 bp, Homo sapiens
atatccagtaaagga

SEQ ID NO: 1551296 - DNA, 15 bp, Homo sapiens
aatatccagtaaagg

SEQ ID NO: 1551297 - DNA, 15 bp, Homo sapiens
aaatatccagtaaag

SEQ ID NO: 1551298 - DNA, 15 bp, Homo sapiens
aaaatatccagtaaa

SEQ ID NO: 1551299 - DNA, 15 bp, Homo sapiens
taaaatatccagtaa

SEQ ID NO: 1551300 - DNA, 15 bp, Homo sapiens
ataaaatatccagta

SEQ ID NO: 1551301 - DNA, 15 bp, Homo sapiens
tataaaatatccagt

SEQ ID NO: 1551302 - DNA, 15 bp, Homo sapiens
ttataaaatatccag

SEQ ID NO: 1551303 - DNA, 15 bp, Homo sapiens
attataaaatatcca

SEQ ID NO: 1551304 - DNA, 15 bp, Homo sapiens
tattataaaatatcc

SEQ ID NO: 1551305 - DNA, 15 bp, Homo sapiens
ttattataaaatatc

SEQ ID NO: 1551306 - DNA, 15 bp, Homo sapiens
tttattataaaatat

SEQ ID NO: 1551307 - DNA, 15 bp, Homo sapiens
atttattataaaata

SEQ ID NO: 1551308 - DNA, 15 bp, Homo sapiens
aatttattataaaat

SEQ ID NO: 1551309 - DNA, 15 bp, Homo sapiens
caatttattataaaa

SEQ ID NO: 1551310 - DNA, 15 bp, Homo sapiens
acaatttattataaa

SEQ ID NO: 1551311 - DNA, 15 bp, Homo sapiens
tacaatttattataa

SEQ ID NO: 1551312 - DNA, 15 bp, Homo sapiens
atacaatttattata

SEQ ID NO: 1551313 - DNA, 15 bp, Homo sapiens
aatacaatttattat

SEQ ID NO: 1551314 - DNA, 15 bp, Homo sapiens
aaatacaatttatta

SEQ ID NO: 1551315 - DNA, 15 bp, Homo sapiens
taaatacaatttatt

SEQ ID NO: 1551316 - DNA, 15 bp, Homo sapiens
gtaaatacaatttat

SEQ ID NO: 1551317 - DNA, 15 bp, Homo sapiens
agtaaatacaattta

SEQ ID NO: 1551318 - DNA, 15 bp, Homo sapiens
cagtaaatacaattt

SEQ ID NO: 1551319 - DNA, 15 bp, Homo sapiens
tcagtaaatacaatt

SEQ ID NO: 1551320 - DNA, 15 bp, Homo sapiens
gtcagtaaatacaat

SEQ ID NO: 1551321 - DNA, 15 bp, Homo sapiens
tgtcagtaaatacaa

SEQ ID NO: 1551322 - DNA, 15 bp, Homo sapiens
ctgtcagtaaataca

SEQ ID NO: 1551323 - DNA, 15 bp, Homo sapiens
cctgtcagtaaatac

SEQ ID NO: 1551324 - DNA, 15 bp, Homo sapiens
gcctgtcagtaaata

SEQ ID NO: 1551325 - DNA, 15 bp, Homo sapiens
ggcctgtcagtaaat

SEQ ID NO: 1551326 - DNA, 15 bp, Homo sapiens
aggcctgtcagtaaa

SEQ ID NO: 1551327 - DNA, 15 bp, Homo sapiens
caggcctgtcagtaa

SEQ ID NO: 1551328 - DNA, 15 bp, Homo sapiens
acaggcctgtcagta

SEQ ID NO: 1551329 - DNA, 15 bp, Homo sapiens
tacaggcctgtcagt

SEQ ID NO: 1551330 - DNA, 15 bp, Homo sapiens
ttacaggcctgtcag

SEQ ID NO: 1551331 - DNA, 15 bp, Homo sapiens
tttacaggcctgtca

SEQ ID NO: 1551332 - DNA, 15 bp, Homo sapiens
atttacaggcctgtc

SEQ ID NO: 1551333 - DNA, 15 bp, Homo sapiens
tatttacaggcctgt

SEQ ID NO: 1551334 - DNA, 15 bp, Homo sapiens
ttatttacaggcctg

SEQ ID NO: 1551335 - DNA, 15 bp, Homo sapiens
tttatttacaggcct

SEQ ID NO: 1551336 - DNA, 15 bp, Homo sapiens
ttttatttacaggcc

SEQ ID NO: 1551337 - DNA, 15 bp, Homo sapiens
attttatttacaggc

SEQ ID NO: 1551338 - DNA, 15 bp, Homo sapiens
gattttatttacagg

SEQ ID NO: 1551339 - DNA, 15 bp, Homo sapiens
agattttatttacag

SEQ ID NO: 1551340 - DNA, 15 bp, Homo sapiens
tagattttatttaca

SEQ ID NO: 1551341 - DNA, 15 bp, Homo sapiens
ctagattttatttac

SEQ ID NO: 1551342 - DNA, 15 bp, Homo sapiens
actagattttattta

SEQ ID NO: 1551343 - DNA, 15 bp, Homo sapiens
tactagattttattt

SEQ ID NO: 1551344 - DNA, 15 bp, Homo sapiens
atactagattttatt

SEQ ID NO: 1551345 - DNA, 15 bp, Homo sapiens
aatactagattttat

SEQ ID NO: 1551346 - DNA, 15 bp, Homo sapiens
aaatactagatttta

SEQ ID NO: 1551347 - DNA, 15 bp, Homo sapiens
aaaatactagatttt

SEQ ID NO: 1551348 - DNA, 15 bp, Homo sapiens
aaaaatactagattt

SEQ ID NO: 1551349 - DNA, 15 bp, Homo sapiens
caaaaatactagatt

SEQ ID NO: 1551350 - DNA, 15 bp, Homo sapiens
tcaaaaatactagat

SEQ ID NO: 1551351 - DNA, 15 bp, Homo sapiens
ctcaaaaatactaga

SEQ ID NO: 1551352 - DNA, 15 bp, Homo sapiens
cctcaaaaatactag

SEQ ID NO: 1551353 - DNA, 15 bp, Homo sapiens
gcctcaaaaatacta

SEQ ID NO: 1551354 - DNA, 15 bp, Homo sapiens
ggcctcaaaaatact

SEQ ID NO: 1551355 - DNA, 15 bp, Homo sapiens
aggcctcaaaaatac

SEQ ID NO: 1551356 - DNA, 15 bp, Homo sapiens
gaggcctcaaaaata

SEQ ID NO: 1551357 - DNA, 15 bp, Homo sapiens
tgaggcctcaaaaat

SEQ ID NO: 1551358 - DNA, 15 bp, Homo sapiens
ctgaggcctcaaaaa

SEQ ID NO: 1551359 - DNA, 15 bp, Homo sapiens
cctgaggcctcaaaa

SEQ ID NO: 1551360 - DNA, 15 bp, Homo sapiens
acctgaggcctcaaa

SEQ ID NO: 1551361 - DNA, 15 bp, Homo sapiens
tacctgaggcctcaa

SEQ ID NO: 1551362 - DNA, 15 bp, Homo sapiens
ttacctgaggcctca

SEQ ID NO: 1551363 - DNA, 15 bp, Homo sapiens
tttacctgaggcctc

SEQ ID NO: 1551364 - DNA, 15 bp, Homo sapiens
ttttacctgaggcct

SEQ ID NO: 1551365 - DNA, 15 bp, Homo sapiens
attttacctgaggcc

SEQ ID NO: 1551366 - DNA, 15 bp, Homo sapiens
tattttacctgaggc

SEQ ID NO: 1551367 - DNA, 15 bp, Homo sapiens
ctattttacctgagg

SEQ ID NO: 1551368 - DNA, 15 bp, Homo sapiens
tctattttacctgag

SEQ ID NO: 1551369 - DNA, 15 bp, Homo sapiens
ttctattttacctga

SEQ ID NO: 1551370 - DNA, 15 bp, Homo sapiens
attctattttacctg

SEQ ID NO: 1551371 - DNA, 15 bp, Homo sapiens
aattctattttacct

SEQ ID NO: 1551372 - DNA, 15 bp, Homo sapiens
aaattctattttacc

SEQ ID NO: 1551373 - DNA, 15 bp, Homo sapiens
aaaattctattttac

SEQ ID NO: 1551374 - DNA, 15 bp, Homo sapiens
gaaaattctatttta

SEQ ID NO: 1551375 - DNA, 15 bp, Homo sapiens
tgaaaattctatttt

SEQ ID NO: 1551376 - DNA, 15 bp, Homo sapiens
atgaaaattctattt

SEQ ID NO: 1551377 - DNA, 15 bp, Homo sapiens
tatgaaaattctatt

SEQ ID NO: 1551378 - DNA, 15 bp, Homo sapiens
atatgaaaattctat

SEQ ID NO: 1551379 - DNA, 15 bp, Homo sapiens
aatatgaaaattcta

SEQ ID NO: 1551380 - DNA, 15 bp, Homo sapiens
caatatgaaaattct

SEQ ID NO: 1551381 - DNA, 15 bp, Homo sapiens
tcaatatgaaaattc

SEQ ID NO: 1551382 - DNA, 15 bp, Homo sapiens
atcaatatgaaaatt

SEQ ID NO: 1551383 - DNA, 15 bp, Homo sapiens
aatcaatatgaaaat

SEQ ID NO: 1551384 - DNA, 15 bp, Homo sapiens
taatcaatatgaaaa

SEQ ID NO: 1551385 - DNA, 15 bp, Homo sapiens
ctaatcaatatgaaa

SEQ ID NO: 1551386 - DNA, 15 bp, Homo sapiens
cctaatcaatatgaa

SEQ ID NO: 1551387 - DNA, 15 bp, Homo sapiens
gcctaatcaatatga

SEQ ID NO: 1551388 - DNA, 15 bp, Homo sapiens
agcctaatcaatatg

SEQ ID NO: 1551389 - DNA, 15 bp, Homo sapiens
cagcctaatcaatat

SEQ ID NO: 1551390 - DNA, 15 bp, Homo sapiens
acagcctaatcaata

SEQ ID NO: 1551391 - DNA, 15 bp, Homo sapiens
aacagcctaatcaat

SEQ ID NO: 1551392 - DNA, 15 bp, Homo sapiens
gaacagcctaatcaa

SEQ ID NO: 1551393 - DNA, 15 bp, Homo sapiens
ggaacagcctaatca

SEQ ID NO: 1551394 - DNA, 15 bp, Homo sapiens
tggaacagcctaatc

SEQ ID NO: 1551395 - DNA, 15 bp, Homo sapiens
ttggaacagcctaat

SEQ ID NO: 1551396 - DNA, 15 bp, Homo sapiens
attggaacagcctaa

SEQ ID NO: 1551397 - DNA, 15 bp, Homo sapiens
cattggaacagccta

SEQ ID NO: 1551398 - DNA, 15 bp, Homo sapiens
tcattggaacagcct

SEQ ID NO: 1551399 - DNA, 15 bp, Homo sapiens
ttcattggaacagcc

SEQ ID NO: 1551400 - DNA, 15 bp, Homo sapiens
attcattggaacagc

SEQ ID NO: 1551401 - DNA, 15 bp, Homo sapiens
tattcattggaacag

SEQ ID NO: 1551402 - DNA, 15 bp, Homo sapiens
atattcattggaaca

SEQ ID NO: 1551403 - DNA, 15 bp, Homo sapiens
aatattcattggaac

SEQ ID NO: 1551404 - DNA, 15 bp, Homo sapiens
aaatattcattggaa

SEQ ID NO: 1551405 - DNA, 15 bp, Homo sapiens
aaaatattcattgga

SEQ ID NO: 1551406 - DNA, 15 bp, Homo sapiens
aaaaatattcattgg

SEQ ID NO: 1551407 - DNA, 15 bp, Homo sapiens
aaaaaatattcattg

SEQ ID NO: 1551408 - DNA, 15 bp, Homo sapiens
taaaaaatattcatt

SEQ ID NO: 1551409 - DNA, 15 bp, Homo sapiens
ttaaaaaatattcat

SEQ ID NO: 1551410 - DNA, 15 bp, Homo sapiens
attaaaaaatattca

SEQ ID NO: 1551411 - DNA, 15 bp, Homo sapiens
aattaaaaaatattc

SEQ ID NO: 1551412 - DNA, 15 bp, Homo sapiens
taattaaaaaatatt

SEQ ID NO: 1551413 - DNA, 15 bp, Homo sapiens
ttaattaaaaaatat

SEQ ID NO: 1551414 - DNA, 15 bp, Homo sapiens
tttaattaaaaaata

SEQ ID NO: 1551415 - DNA, 15 bp, Homo sapiens
ttttaattaaaaaat

SEQ ID NO: 1551416 - DNA, 15 bp, Homo sapiens
tttttaattaaaaaa

SEQ ID NO: 1551417 - DNA, 15 bp, Homo sapiens
atttttaattaaaaa

SEQ ID NO: 1551418 - DNA, 15 bp, Homo sapiens
aatttttaattaaaa

SEQ ID NO: 1551419 - DNA, 15 bp, Homo sapiens
taatttttaattaaa

SEQ ID NO: 1551420 - DNA, 15 bp, Homo sapiens
ttaatttttaattaa

SEQ ID NO: 1551421 - DNA, 15 bp, Homo sapiens
ccaatttaattttta

SEQ ID NO: 1551422 - DNA, 15 bp, Homo sapiens
accaatttaattttt

SEQ ID NO: 1551423 - DNA, 15 bp, Homo sapiens
taccaatttaatttt

SEQ ID NO: 1551424 - DNA, 15 bp, Homo sapiens
ctaccaatttaattt

SEQ ID NO: 1551425 - DNA, 15 bp, Homo sapiens
tctaccaatttaatt

SEQ ID NO: 1551426 - DNA, 15 bp, Homo sapiens
ctctaccaatttaat

SEQ ID NO: 1551427 - DNA, 15 bp, Homo sapiens
actctaccaatttaa

SEQ ID NO: 1551428 - DNA, 15 bp, Homo sapiens
cactctaccaattta

SEQ ID NO: 1551429 - DNA, 15 bp, Homo sapiens
tcactctaccaattt

SEQ ID NO: 1551430 - DNA, 15 bp, Homo sapiens
atcactctaccaatt

SEQ ID NO: 1551431 - DNA, 15 bp, Homo sapiens
aatcactctaccaat

SEQ ID NO: 1551432 - DNA, 15 bp, Homo sapiens
taatcactctaccaa

SEQ ID NO: 1551433 - DNA, 15 bp, Homo sapiens
ttaatcactctacca

SEQ ID NO: 1551434 - DNA, 15 bp, Homo sapiens
tttaatcactctacc

SEQ ID NO: 1551435 - DNA, 15 bp, Homo sapiens
ttttaatcactctac

SEQ ID NO: 1551436 - DNA, 15 bp, Homo sapiens
tttttaatcactcta

SEQ ID NO: 1551437 - DNA, 15 bp, Homo sapiens
gtttttaatcactct

SEQ ID NO: 1551438 - DNA, 15 bp, Homo sapiens
tgtttttaatcactc

SEQ ID NO: 1551439 - DNA, 15 bp, Homo sapiens
atgtttttaatcact

SEQ ID NO: 1551440 - DNA, 15 bp, Homo sapiens
catgtttttaatcac

SEQ ID NO: 1551441 - DNA, 15 bp, Homo sapiens
acatgtttttaatca

SEQ ID NO: 1551442 - DNA, 15 bp, Homo sapiens
aacatgtttttaatc

SEQ ID NO: 1551443 - DNA, 15 bp, Homo sapiens
taacatgtttttaat

SEQ ID NO: 1551444 - DNA, 15 bp, Homo sapiens
ataacatgtttttaa

SEQ ID NO: 1551445 - DNA, 15 bp, Homo sapiens
aataacatgttttta

SEQ ID NO: 1551446 - DNA, 15 bp, Homo sapiens
aaataacatgttttt

SEQ ID NO: 1551447 - DNA, 15 bp, Homo sapiens
aaaataacatgtttt

SEQ ID NO: 1551448 - DNA, 15 bp, Homo sapiens
gaaaataacatgttt

SEQ ID NO: 1551449 - DNA, 15 bp, Homo sapiens
ggaaaataacatgtt

SEQ ID NO: 1551450 - DNA, 15 bp, Homo sapiens
aggaaaataacatgt

SEQ ID NO: 1551451 - DNA, 15 bp, Homo sapiens
aaggaaaataacatg

SEQ ID NO: 1551452 - DNA, 15 bp, Homo sapiens
gaaggaaaataacat

SEQ ID NO: 1551453 - DNA, 15 bp, Homo sapiens
agaaggaaaataaca

SEQ ID NO: 1551454 - DNA, 15 bp, Homo sapiens
aagaaggaaaataac

SEQ ID NO: 1551455 - DNA, 15 bp, Homo sapiens
gaagaaggaaaataa

SEQ ID NO: 1551456 - DNA, 15 bp, Homo sapiens
tgaagaaggaaaata

SEQ ID NO: 1551457 - DNA, 15 bp, Homo sapiens
ttgaagaaggaaaat

SEQ ID NO: 1551458 - DNA, 15 bp, Homo sapiens
gttgaagaaggaaaa

SEQ ID NO: 1551459 - DNA, 15 bp, Homo sapiens
agttgaagaaggaaa

SEQ ID NO: 1551460 - DNA, 15 bp, Homo sapiens
tagttgaagaaggaa

SEQ ID NO: 1551461 - DNA, 15 bp, Homo sapiens
ctagttgaagaagga

SEQ ID NO: 1551462 - DNA, 15 bp, Homo sapiens
tctagttgaagaagg

SEQ ID NO: 1551463 - DNA, 15 bp, Homo sapiens
atctagttgaagaag

SEQ ID NO: 1551464 - DNA, 15 bp, Homo sapiens
aatctagttgaagaa

SEQ ID NO: 1551465 - DNA, 15 bp, Homo sapiens
taatctagttgaaga

SEQ ID NO: 1551466 - DNA, 15 bp, Homo sapiens
gtaatctagttgaag

SEQ ID NO: 1551467 - DNA, 15 bp, Homo sapiens
tgtaatctagttgaa

SEQ ID NO: 1551468 - DNA, 15 bp, Homo sapiens
ctgtaatctagttga

SEQ ID NO: 1551469 - DNA, 15 bp, Homo sapiens
tctgtaatctagttg

SEQ ID NO: 1551470 - DNA, 15 bp, Homo sapiens
atctgtaatctagtt

SEQ ID NO: 1551471 - DNA, 15 bp, Homo sapiens
gatctgtaatctagt

SEQ ID NO: 1551472 - DNA, 15 bp, Homo sapiens
agatctgtaatctag

SEQ ID NO: 1551473 - DNA, 15 bp, Homo sapiens
cagatctgtaatcta

SEQ ID NO: 1551474 - DNA, 15 bp, Homo sapiens
gcagatctgtaatct

SEQ ID NO: 1551475 - DNA, 15 bp, Homo sapiens
agcagatctgtaatc

SEQ ID NO: 1551476 - DNA, 15 bp, Homo sapiens
aagcagatctgtaat

SEQ ID NO: 1551477 - DNA, 15 bp, Homo sapiens
caagcagatctgtaa

SEQ ID NO: 1551478 - DNA, 15 bp, Homo sapiens
tcaagcagatctgta

SEQ ID NO: 1551479 - DNA, 15 bp, Homo sapiens
atcaagcagatctgt

SEQ ID NO: 1551480 - DNA, 15 bp, Homo sapiens
catcaagcagatctg

SEQ ID NO: 1551481 - DNA, 15 bp, Homo sapiens
acatcaagcagatct

SEQ ID NO: 1551482 - DNA, 15 bp, Homo sapiens
aacatcaagcagatc

SEQ ID NO: 1551483 - DNA, 15 bp, Homo sapiens
caacatcaagcagat

SEQ ID NO: 1551484 - DNA, 15 bp, Homo sapiens
acaacatcaagcaga

SEQ ID NO: 1551485 - DNA, 15 bp, Homo sapiens
tacaacatcaagcag

SEQ ID NO: 1551486 - DNA, 15 bp, Homo sapiens
gtacaacatcaagca

SEQ ID NO: 1551487 - DNA, 15 bp, Homo sapiens
agtacaacatcaagc

SEQ ID NO: 1551488 - DNA, 15 bp, Homo sapiens
tagtacaacatcaag

SEQ ID NO: 1551489 - DNA, 15 bp, Homo sapiens
ctagtacaacatcaa

SEQ ID NO: 1551490 - DNA, 15 bp, Homo sapiens
tctagtacaacatca

SEQ ID NO: 1551491 - DNA, 15 bp, Homo sapiens
gtctagtacaacatc

SEQ ID NO: 1551492 - DNA, 15 bp, Homo sapiens
tgtctagtacaacat

SEQ ID NO: 1551493 - DNA, 15 bp, Homo sapiens
ctgtctagtacaaca

SEQ ID NO: 1551494 - DNA, 15 bp, Homo sapiens
actgtctagtacaac

SEQ ID NO: 1551495 - DNA, 15 bp, Homo sapiens
aactgtctagtacaa

SEQ ID NO: 1551496 - DNA, 15 bp, Homo sapiens
aaactgtctagtaca

SEQ ID NO: 1551497 - DNA, 15 bp, Homo sapiens
gaaactgtctagtac

SEQ ID NO: 1551498 - DNA, 15 bp, Homo sapiens
tgaaactgtctagta

SEQ ID NO: 1551499 - DNA, 15 bp, Homo sapiens
atgaaactgtctagt

SEQ ID NO: 1551500 - DNA, 15 bp, Homo sapiens
gatgaaactgtctag

SEQ ID NO: 1551501 - DNA, 15 bp, Homo sapiens
tgatgaaactgtcta

SEQ ID NO: 1551502 - DNA, 15 bp, Homo sapiens
ttgatgaaactgtct

SEQ ID NO: 1551503 - DNA, 15 bp, Homo sapiens
tttgatgaaactgtc

SEQ ID NO: 1551504 - DNA, 15 bp, Homo sapiens
ttttgatgaaactgt

SEQ ID NO: 1551505 - DNA, 15 bp, Homo sapiens
gttttgatgaaactg

SEQ ID NO: 1551506 - DNA, 15 bp, Homo sapiens
ggttttgatgaaact

SEQ ID NO: 1551507 - DNA, 15 bp, Homo sapiens
tggttttgatgaaac

SEQ ID NO: 1551508 - DNA, 15 bp, Homo sapiens
ctggttttgatgaaa

SEQ ID NO: 1551509 - DNA, 15 bp, Homo sapiens
actggttttgatgaa

SEQ ID NO: 1551510 - DNA, 15 bp, Homo sapiens
cactggttttgatga

SEQ ID NO: 1551511 - DNA, 15 bp, Homo sapiens
gcactggttttgatg

SEQ ID NO: 1551512 - DNA, 15 bp, Homo sapiens
tgcactggttttgat

SEQ ID NO: 1551513 - DNA, 15 bp, Homo sapiens
ttgcactggttttga

SEQ ID NO: 1551514 - DNA, 15 bp, Homo sapiens
gttgcactggttttg

SEQ ID NO: 1551515 - DNA, 15 bp, Homo sapiens
tgttgcactggtttt

SEQ ID NO: 1551516 - DNA, 15 bp, Homo sapiens
ctgttgcactggttt

SEQ ID NO: 1551517 - DNA, 15 bp, Homo sapiens
cctgttgcactggtt

SEQ ID NO: 1551518 - DNA, 15 bp, Homo sapiens
acctgttgcactggt

SEQ ID NO: 1551519 - DNA, 15 bp, Homo sapiens
cacctgttgcactgg

SEQ ID NO: 1551520 - DNA, 15 bp, Homo sapiens
ccacctgttgcactg

SEQ ID NO: 1551521 - DNA, 15 bp, Homo sapiens
gccacctgttgcact

SEQ ID NO: 1551522 - DNA, 15 bp, Homo sapiens
agccacctgttgcac

SEQ ID NO: 1551523 - DNA, 15 bp, Homo sapiens
aagccacctgttgca

SEQ ID NO: 1551524 - DNA, 15 bp, Homo sapiens
caagccacctgttgc

SEQ ID NO: 1551525 - DNA, 15 bp, Homo sapiens
ccaagccacctgttg

SEQ ID NO: 1551526 - DNA, 15 bp, Homo sapiens
cccaagccacctgtt

SEQ ID NO: 1551527 - DNA, 15 bp, Homo sapiens
tcccaagccacctgt

SEQ ID NO: 1551528 - DNA, 15 bp, Homo sapiens
atcccaagccacctg

SEQ ID NO: 1551529 - DNA, 15 bp, Homo sapiens
gatcccaagccacct

SEQ ID NO: 1551530 - DNA, 15 bp, Homo sapiens
tgatcccaagccacc

SEQ ID NO: 1551531 - DNA, 15 bp, Homo sapiens
ttgatcccaagccac

SEQ ID NO: 1551532 - DNA, 15 bp, Homo sapiens
attgatcccaagcca

SEQ ID NO: 1551533 - DNA, 15 bp, Homo sapiens
ttattgatcccaagc

SEQ ID NO: 1551534 - DNA, 15 bp, Homo sapiens
tttattgatcccaag

SEQ ID NO: 1551535 - DNA, 15 bp, Homo sapiens
ttttattgatcccaa

SEQ ID NO: 1551536 - DNA, 15 bp, Homo sapiens
cttttattgatccca

SEQ ID NO: 1551537 - DNA, 15 bp, Homo sapiens
gcttttattgatccc

SEQ ID NO: 1551538 - DNA, 15 bp, Homo sapiens
agcttttattgatcc

SEQ ID NO: 1551539 - DNA, 15 bp, Homo sapiens
cagcttttattgatc

SEQ ID NO: 1551540 - DNA, 15 bp, Homo sapiens
tcagcttttattgat

SEQ ID NO: 1551541 - DNA, 15 bp, Homo sapiens
ctcagcttttattga

SEQ ID NO: 1551542 - DNA, 15 bp, Homo sapiens
cctcagcttttattg

SEQ ID NO: 1551543 - DNA, 15 bp, Homo sapiens
acctcagcttttatt

SEQ ID NO: 1551544 - DNA, 15 bp, Homo sapiens
cacctcagcttttat

SEQ ID NO: 1551545 - DNA, 15 bp, Homo sapiens
tcacctcagctttta

SEQ ID NO: 1551546 - DNA, 15 bp, Homo sapiens
atcacctcagctttt

SEQ ID NO: 1551547 - DNA, 15 bp, Homo sapiens
catcacctcagcttt

SEQ ID NO: 1551548 - DNA, 15 bp, Homo sapiens
ccatcacctcagctt

SEQ ID NO: 1551549 - DNA, 15 bp, Homo sapiens
gccatcacctcagct

SEQ ID NO: 1551550 - DNA, 15 bp, Homo sapiens
tgccatcacctcagc

SEQ ID NO: 1551551 - DNA, 15 bp, Homo sapiens
ctgccatcacctcag

SEQ ID NO: 1551552 - DNA, 15 bp, Homo sapiens
tctgccatcacctca

SEQ ID NO: 1551553 - DNA, 15 bp, Homo sapiens
atctgccatcacctc

SEQ ID NO: 1551554 - DNA, 15 bp, Homo sapiens
tatctgccatcacct

SEQ ID NO: 1551555 - DNA, 15 bp, Homo sapiens
gtatctgccatcacc

SEQ ID NO: 1551556 - DNA, 15 bp, Homo sapiens
agtatctgccatcac

SEQ ID NO: 1551557 - DNA, 15 bp, Homo sapiens
cagtatctgccatca

SEQ ID NO: 1551558 - DNA, 15 bp, Homo sapiens
gcagtatctgccatc

SEQ ID NO: 1551559 - DNA, 15 bp, Homo sapiens
agcagtatctgccat

SEQ ID NO: 1551560 - DNA, 15 bp, Homo sapiens
cagcagtatctgcca

SEQ ID NO: 1551561 - DNA, 15 bp, Homo sapiens
acagcagtatctgcc

SEQ ID NO: 1551562 - DNA, 15 bp, Homo sapiens
tacagcagtatctgc

SEQ ID NO: 1551563 - DNA, 15 bp, Homo sapiens
ctacagcagtatctg

SEQ ID NO: 1551564 - DNA, 15 bp, Homo sapiens
gctacagcagtatct

SEQ ID NO: 1551565 - DNA, 15 bp, Homo sapiens
agctacagcagtatc

SEQ ID NO: 1551566 - DNA, 15 bp, Homo sapiens
aagctacagcagtat

SEQ ID NO: 1551567 - DNA, 15 bp, Homo sapiens
aaagctacagcagta

SEQ ID NO: 1551568 - DNA, 15 bp, Homo sapiens
caaagctacagcagt

SEQ ID NO: 1551569 - DNA, 15 bp, Homo sapiens
ccaaagctacagcag

SEQ ID NO: 1551570 - DNA, 15 bp, Homo sapiens
gccaaagctacagca

SEQ ID NO: 1551571 - DNA, 15 bp, Homo sapiens
agccaaagctacagc

SEQ ID NO: 1551572 - DNA, 15 bp, Homo sapiens
aagccaaagctacag

SEQ ID NO: 1551573 - DNA, 15 bp, Homo sapiens
gaagccaaagctaca

SEQ ID NO: 1551574 - DNA, 15 bp, Homo sapiens
agaagccaaagctac

SEQ ID NO: 1551575 - DNA, 15 bp, Homo sapiens
cagaagccaaagcta

SEQ ID NO: 1551576 - DNA, 15 bp, Homo sapiens
ccagaagccaaagct

SEQ ID NO: 1551577 - DNA, 15 bp, Homo sapiens
tccagaagccaaagc

SEQ ID NO: 1551578 - DNA, 15 bp, Homo sapiens
ttccagaagccaaag

SEQ ID NO: 1551579 - DNA, 15 bp, Homo sapiens
tttccagaagccaaa

SEQ ID NO: 1551580 - DNA, 15 bp, Homo sapiens
atttccagaagccaa

SEQ ID NO: 1551581 - DNA, 15 bp, Homo sapiens
catttccagaagcca

SEQ ID NO: 1551582 - DNA, 15 bp, Homo sapiens
acatttccagaagcc

SEQ ID NO: 1551583 - DNA, 15 bp, Homo sapiens
cacatttccagaagc

SEQ ID NO: 1551584 - DNA, 15 bp, Homo sapiens
tcacatttccagaag

SEQ ID NO: 1551585 - DNA, 15 bp, Homo sapiens
ttcacatttccagaa

SEQ ID NO: 1551586 - DNA, 15 bp, Homo sapiens
tttcacatttccaga

SEQ ID NO: 1551587 - DNA, 15 bp, Homo sapiens
atttcacatttccag

SEQ ID NO: 1551588 - DNA, 15 bp, Homo sapiens
aatttcacatttcca

SEQ ID NO: 1551589 - DNA, 15 bp, Homo sapiens
caatttcacatttcc

SEQ ID NO: 1551590 - DNA, 15 bp, Homo sapiens
ccaatttcacatttc

SEQ ID NO: 1551591 - DNA, 15 bp, Homo sapiens
accaatttcacattt

SEQ ID NO: 1551592 - DNA, 15 bp, Homo sapiens
aaccaatttcacatt

SEQ ID NO: 1551593 - DNA, 15 bp, Homo sapiens
aaaccaatttcacat

SEQ ID NO: 1551594 - DNA, 15 bp, Homo sapiens
gaaaccaatttcaca

SEQ ID NO: 1551595 - DNA, 15 bp, Homo sapiens
tgaaaccaatttcac

SEQ ID NO: 1551596 - DNA, 15 bp, Homo sapiens
ttgaaaccaatttca

SEQ ID NO: 1551597 - DNA, 15 bp, Homo sapiens
cttgaaaccaatttc

SEQ ID NO: 1551598 - DNA, 15 bp, Homo sapiens
gcttgaaaccaattt

SEQ ID NO: 1551599 - DNA, 15 bp, Homo sapiens
tgcttgaaaccaatt

SEQ ID NO: 1551600 - DNA, 15 bp, Homo sapiens
ttgcttgaaaccaat

SEQ ID NO: 1551601 - DNA, 15 bp, Homo sapiens
cttgcttgaaaccaa

SEQ ID NO: 1551602 - DNA, 15 bp, Homo sapiens
ccttgcttgaaacca

SEQ ID NO: 1551603 - DNA, 15 bp, Homo sapiens
accttgcttgaaacc

SEQ ID NO: 1551604 - DNA, 15 bp, Homo sapiens
taccttgcttgaaac

SEQ ID NO: 1551605 - DNA, 15 bp, Homo sapiens
ttaccttgcttgaaa

SEQ ID NO: 1551606 - DNA, 15 bp, Homo sapiens
attaccttgcttgaa

SEQ ID NO: 1551607 - DNA, 15 bp, Homo sapiens
gattaccttgcttga

SEQ ID NO: 1551608 - DNA, 15 bp, Homo sapiens
tgattaccttgcttg

SEQ ID NO: 1551609 - DNA, 15 bp, Homo sapiens
gtgattaccttgctt

SEQ ID NO: 1551610 - DNA, 15 bp, Homo sapiens
agtgattaccttgct

SEQ ID NO: 1551611 - DNA, 15 bp, Homo sapiens
aagtgattaccttgc

SEQ ID NO: 1551612 - DNA, 15 bp, Homo sapiens
aaagtgattaccttg

SEQ ID NO: 1551613 - DNA, 15 bp, Homo sapiens
aaaagtgattacctt

SEQ ID NO: 1551614 - DNA, 15 bp, Homo sapiens
gaaaagtgattacct

SEQ ID NO: 1551615 - DNA, 15 bp, Homo sapiens
agaaaagtgattacc

SEQ ID NO: 1551616 - DNA, 15 bp, Homo sapiens
aagaaaagtgattac

SEQ ID NO: 1551617 - DNA, 15 bp, Homo sapiens
aaagaaaagtgatta

SEQ ID NO: 1551618 - DNA, 15 bp, Homo sapiens
aaaagaaaagtgatt

SEQ ID NO: 1551619 - DNA, 15 bp, Homo sapiens
caaaagaaaagtgat

SEQ ID NO: 1551620 - DNA, 15 bp, Homo sapiens
gcaaaagaaaagtga

SEQ ID NO: 1551621 - DNA, 15 bp, Homo sapiens
ggcaaaagaaaagtg

SEQ ID NO: 1551622 - DNA, 15 bp, Homo sapiens
aggcaaaagaaaagt

SEQ ID NO: 1551623 - DNA, 15 bp, Homo sapiens
aaggcaaaagaaaag

SEQ ID NO: 1551624 - DNA, 15 bp, Homo sapiens
gaaggcaaaagaaaa

SEQ ID NO: 1551625 - DNA, 15 bp, Homo sapiens
agaaggcaaaagaaa

SEQ ID NO: 1551626 - DNA, 15 bp, Homo sapiens
cagaaggcaaaagaa

SEQ ID NO: 1551627 - DNA, 15 bp, Homo sapiens
acagaaggcaaaaga

SEQ ID NO: 1551628 - DNA, 15 bp, Homo sapiens
tacagaaggcaaaag

SEQ ID NO: 1551629 - DNA, 15 bp, Homo sapiens
gtacagaaggcaaaa

SEQ ID NO: 1551630 - DNA, 15 bp, Homo sapiens
agtacagaaggcaaa

SEQ ID NO: 1551631 - DNA, 15 bp, Homo sapiens
tagtacagaaggcaa

SEQ ID NO: 1551632 - DNA, 15 bp, Homo sapiens
atagtacagaaggca

SEQ ID NO: 1551633 - DNA, 15 bp, Homo sapiens
tatagtacagaaggc

SEQ ID NO: 1551634 - DNA, 15 bp, Homo sapiens
ctatagtacagaagg

SEQ ID NO: 1551635 - DNA, 15 bp, Homo sapiens
gctatagtacagaag

SEQ ID NO: 1551636 - DNA, 15 bp, Homo sapiens
tgctatagtacagaa

SEQ ID NO: 1551637 - DNA, 15 bp, Homo sapiens
atgctatagtacaga

SEQ ID NO: 1551638 - DNA, 15 bp, Homo sapiens
tatgctatagtacag

SEQ ID NO: 1551639 - DNA, 15 bp, Homo sapiens
atatgctatagtaca

SEQ ID NO: 1551640 - DNA, 15 bp, Homo sapiens
gatatgctatagtac

SEQ ID NO: 1551641 - DNA, 15 bp, Homo sapiens
agatatgctatagta

SEQ ID NO: 1551642 - DNA, 15 bp, Homo sapiens
cagatatgctatagt

SEQ ID NO: 1551643 - DNA, 15 bp, Homo sapiens
acagatatgctatag

SEQ ID NO: 1551644 - DNA, 15 bp, Homo sapiens
aacagatatgctata

SEQ ID NO: 1551645 - DNA, 15 bp, Homo sapiens
aaacagatatgctat

SEQ ID NO: 1551646 - DNA, 15 bp, Homo sapiens
aaaacagatatgcta

SEQ ID NO: 1551647 - DNA, 15 bp, Homo sapiens
taaaacagatatgct

SEQ ID NO: 1551648 - DNA, 15 bp, Homo sapiens
ataaaacagatatgc

SEQ ID NO: 1551649 - DNA, 15 bp, Homo sapiens
gataaaacagatatg

SEQ ID NO: 1551650 - DNA, 15 bp, Homo sapiens
tgataaaacagatat

SEQ ID NO: 1551651 - DNA, 15 bp, Homo sapiens
atgataaaacagata

SEQ ID NO: 1551652 - DNA, 15 bp, Homo sapiens
gatgataaaacagat

SEQ ID NO: 1551653 - DNA, 15 bp, Homo sapiens
tgatgataaaacaga

SEQ ID NO: 1551654 - DNA, 15 bp, Homo sapiens
ctgatgataaaacag

SEQ ID NO: 1551655 - DNA, 15 bp, Homo sapiens
cctgatgataaaaca

SEQ ID NO: 1551656 - DNA, 15 bp, Homo sapiens
tcctgatgataaaac

SEQ ID NO: 1551657 - DNA, 15 bp, Homo sapiens
ctcctgatgataaaa

SEQ ID NO: 1551658 - DNA, 15 bp, Homo sapiens
cctcctgatgataaa

SEQ ID NO: 1551659 - DNA, 15 bp, Homo sapiens
acctcctgatgataa

SEQ ID NO: 1551660 - DNA, 15 bp, Homo sapiens
aacctcctgatgata

SEQ ID NO: 1551661 - DNA, 15 bp, Homo sapiens
aaacctcctgatgat

SEQ ID NO: 1551662 - DNA, 15 bp, Homo sapiens
aaaacctcctgatga

SEQ ID NO: 1551663 - DNA, 15 bp, Homo sapiens
aaaaacctcctgatg

SEQ ID NO: 1551664 - DNA, 15 bp, Homo sapiens
aaaaaacctcctgat

SEQ ID NO: 1551665 - DNA, 15 bp, Homo sapiens
caaaaaacctcctga

SEQ ID NO: 1551666 - DNA, 15 bp, Homo sapiens
acaaaaaacctcctg

SEQ ID NO: 1551667 - DNA, 15 bp, Homo sapiens
aaacaaaaaacctcc

SEQ ID NO: 1551668 - DNA, 15 bp, Homo sapiens
aaaacaaaaaacctc

SEQ ID NO: 1551669 - DNA, 15 bp, Homo sapiens
caaaacaaaaaacct

SEQ ID NO: 1551670 - DNA, 15 bp, Homo sapiens
acaaaacaaaaaacc

SEQ ID NO: 1551671 - DNA, 15 bp, Homo sapiens
tacaaaacaaaaaac

SEQ ID NO: 1551672 - DNA, 15 bp, Homo sapiens
ttacaaaacaaaaaa

SEQ ID NO: 1551673 - DNA, 15 bp, Homo sapiens
attacaaaacaaaaa

SEQ ID NO: 1551674 - DNA, 15 bp, Homo sapiens
aattacaaaacaaaa

SEQ ID NO: 1551675 - DNA, 15 bp, Homo sapiens
taattacaaaacaaa

SEQ ID NO: 1551676 - DNA, 15 bp, Homo sapiens
gtaattacaaaacaa

SEQ ID NO: 1551677 - DNA, 15 bp, Homo sapiens
agtaattacaaaaca

SEQ ID NO: 1551678 - DNA, 15 bp, Homo sapiens
aagtaattacaaaac

SEQ ID NO: 1551679 - DNA, 15 bp, Homo sapiens
aaagtaattacaaaa

SEQ ID NO: 1551680 - DNA, 15 bp, Homo sapiens
aaaagtaattacaaa

SEQ ID NO: 1551681 - DNA, 15 bp, Homo sapiens
taaaagtaattacaa

SEQ ID NO: 1551682 - DNA, 15 bp, Homo sapiens
ttaaaagtaattaca

SEQ ID NO: 1551683 - DNA, 15 bp, Homo sapiens
tttaaaagtaattac

SEQ ID NO: 1551684 - DNA, 15 bp, Homo sapiens
atttaaaagtaatta

SEQ ID NO: 1551685 - DNA, 15 bp, Homo sapiens
aatttaaaagtaatt

SEQ ID NO: 1551686 - DNA, 15 bp, Homo sapiens
taatttaaaagtaat

SEQ ID NO: 1551687 - DNA, 15 bp, Homo sapiens
ttaatttaaaagtaa

SEQ ID NO: 1551688 - DNA, 15 bp, Homo sapiens
tttaatttaaaagta

SEQ ID NO: 1551689 - DNA, 15 bp, Homo sapiens
gtttaatttaaaagt

SEQ ID NO: 1551690 - DNA, 15 bp, Homo sapiens
agtttaatttaaaag

SEQ ID NO: 1551691 - DNA, 15 bp, Homo sapiens
cagtttaatttaaaa

SEQ ID NO: 1551692 - DNA, 15 bp, Homo sapiens
tcagtttaatttaaa

SEQ ID NO: 1551693 - DNA, 15 bp, Homo sapiens
ttcagtttaatttaa

SEQ ID NO: 1551694 - DNA, 15 bp, Homo sapiens
gttcagtttaattta

SEQ ID NO: 1551695 - DNA, 15 bp, Homo sapiens
agttcagtttaattt

SEQ ID NO: 1551696 - DNA, 15 bp, Homo sapiens
aagttcagtttaatt

SEQ ID NO: 1551697 - DNA, 15 bp, Homo sapiens
aaagttcagtttaat

SEQ ID NO: 1551698 - DNA, 15 bp, Homo sapiens
caaaaaagttcagtt

SEQ ID NO: 1551699 - DNA, 15 bp, Homo sapiens
acaaaaaagttcagt

SEQ ID NO: 1551700 - DNA, 15 bp, Homo sapiens
cacaaaaaagttcag

SEQ ID NO: 1551701 - DNA, 15 bp, Homo sapiens
gcacaaaaaagttca

SEQ ID NO: 1551702 - DNA, 15 bp, Homo sapiens
agcacaaaaaagttc

SEQ ID NO: 1551703 - DNA, 15 bp, Homo sapiens
tagcacaaaaaagtt

SEQ ID NO: 1551704 - DNA, 15 bp, Homo sapiens
ttagcacaaaaaagt

SEQ ID NO: 1551705 - DNA, 15 bp, Homo sapiens
tttagcacaaaaaag

SEQ ID NO: 1551706 - DNA, 15 bp, Homo sapiens
ttttagcacaaaaaa

SEQ ID NO: 1551707 - DNA, 15 bp, Homo sapiens
gttttagcacaaaaa

SEQ ID NO: 1551708 - DNA, 15 bp, Homo sapiens
agttttagcacaaaa

SEQ ID NO: 1551709 - DNA, 15 bp, Homo sapiens
aagttttagcacaaa

SEQ ID NO: 1551710 - DNA, 15 bp, Homo sapiens
aaagttttagcacaa

SEQ ID NO: 1551711 - DNA, 15 bp, Homo sapiens
caaagttttagcaca

SEQ ID NO: 1551712 - DNA, 15 bp, Homo sapiens
tcaaagttttagcac

SEQ ID NO: 1551713 - DNA, 15 bp, Homo sapiens
ctcaaagttttagca

SEQ ID NO: 1551714 - DNA, 15 bp, Homo sapiens
actcaaagttttagc

SEQ ID NO: 1551715 - DNA, 15 bp, Homo sapiens
gactcaaagttttag

SEQ ID NO: 1551716 - DNA, 15 bp, Homo sapiens
ggactcaaagtttta

SEQ ID NO: 1551717 - DNA, 15 bp, Homo sapiens
gggactcaaagtttt

SEQ ID NO: 1551718 - DNA, 15 bp, Homo sapiens
tgggactcaaagttt

SEQ ID NO: 1551719 - DNA, 15 bp, Homo sapiens
atgggactcaaagtt

SEQ ID NO: 1551720 - DNA, 15 bp, Homo sapiens
catgggactcaaagt

SEQ ID NO: 1551721 - DNA, 15 bp, Homo sapiens
acatgggactcaaag

SEQ ID NO: 1551722 - DNA, 15 bp, Homo sapiens
aacatgggactcaaa

SEQ ID NO: 1551723 - DNA, 15 bp, Homo sapiens
aaacatgggactcaa

SEQ ID NO: 1551724 - DNA, 15 bp, Homo sapiens
aaaacatgggactca

SEQ ID NO: 1551725 - DNA, 15 bp, Homo sapiens
aaaaacatgggactc

SEQ ID NO: 1551726 - DNA, 15 bp, Homo sapiens
aaaaaacatgggact

SEQ ID NO: 1551727 - DNA, 15 bp, Homo sapiens
aaaaaaacatgggac

SEQ ID NO: 1551728 - DNA, 15 bp, Homo sapiens
aaaaaaaacatggga

SEQ ID NO: 1551729 - DNA, 15 bp, Homo sapiens
aaaaaaaaacatggg

SEQ ID NO: 1551730 - DNA, 15 bp, Homo sapiens
aaaaaaaaaacatgg

SEQ ID NO: 1551731 - DNA, 15 bp, Homo sapiens
aaaaaaaaaaacatg

SEQ ID NO: 1551732 - DNA, 15 bp, Homo sapiens
taaaaaaaaaaacat

SEQ ID NO: 1551733 - DNA, 15 bp, Homo sapiens
atttttttttttaaa

SEQ ID NO: 1551734 - DNA, 15 bp, Homo sapiens
ggattttttttttta

SEQ ID NO: 1551735 - DNA, 15 bp, Homo sapiens
aggattttttttttt

SEQ ID NO: 1551736 - DNA, 15 bp, Homo sapiens
gcaggattttttttt

SEQ ID NO: 1551737 - DNA, 15 bp, Homo sapiens
agcaggatttttttt

SEQ ID NO: 1551738 - DNA, 15 bp, Homo sapiens
aagcaggattttttt

SEQ ID NO: 1551739 - DNA, 15 bp, Homo sapiens
gaagcaggatttttt

SEQ ID NO: 1551740 - DNA, 15 bp, Homo sapiens
agaagcaggattttt

SEQ ID NO: 1551741 - DNA, 15 bp, Homo sapiens
aagaagcaggatttt

SEQ ID NO: 1551742 - DNA, 15 bp, Homo sapiens
aaagaagcaggattt

SEQ ID NO: 1551743 - DNA, 15 bp, Homo sapiens
taaagaagcaggatt

SEQ ID NO: 1551744 - DNA, 15 bp, Homo sapiens
gtaaagaagcaggat

SEQ ID NO: 1551745 - DNA, 15 bp, Homo sapiens
tgtaaagaagcagga

SEQ ID NO: 1551746 - DNA, 15 bp, Homo sapiens
ctgtaaagaagcagg

SEQ ID NO: 1551747 - DNA, 15 bp, Homo sapiens
cctgtaaagaagcag

SEQ ID NO: 1551748 - DNA, 15 bp, Homo sapiens
acctgtaaagaagca

SEQ ID NO: 1551749 - DNA, 15 bp, Homo sapiens
aacctgtaaagaagc

SEQ ID NO: 1551750 - DNA, 15 bp, Homo sapiens
taacctgtaaagaag

SEQ ID NO: 1551751 - DNA, 15 bp, Homo sapiens
ataacctgtaaagaa

SEQ ID NO: 1551752 - DNA, 15 bp, Homo sapiens
aataacctgtaaaga

SEQ ID NO: 1551753 - DNA, 15 bp, Homo sapiens
caataacctgtaaag

SEQ ID NO: 1551754 - DNA, 15 bp, Homo sapiens
ccaataacctgtaaa

SEQ ID NO: 1551755 - DNA, 15 bp, Homo sapiens
tccaataacctgtaa

SEQ ID NO: 1551756 - DNA, 15 bp, Homo sapiens
ttccaataacctgta

SEQ ID NO: 1551757 - DNA, 15 bp, Homo sapiens
cttccaataacctgt

SEQ ID NO: 1551758 - DNA, 15 bp, Homo sapiens
ccttccaataacctg

SEQ ID NO: 1551759 - DNA, 15 bp, Homo sapiens
tccttccaataacct

SEQ ID NO: 1551760 - DNA, 15 bp, Homo sapiens
atccttccaataacc

SEQ ID NO: 1551761 - DNA, 15 bp, Homo sapiens
catccttccaataac

SEQ ID NO: 1551762 - DNA, 15 bp, Homo sapiens
acatccttccaataa

SEQ ID NO: 1551763 - DNA, 15 bp, Homo sapiens
cacatccttccaata

SEQ ID NO: 1551764 - DNA, 15 bp, Homo sapiens
gcacatccttccaat

SEQ ID NO: 1551765 - DNA, 15 bp, Homo sapiens
tgcacatccttccaa

SEQ ID NO: 1551766 - DNA, 15 bp, Homo sapiens
ttgcacatccttcca

SEQ ID NO: 1551767 - DNA, 15 bp, Homo sapiens
tttgcacatccttcc

SEQ ID NO: 1551768 - DNA, 15 bp, Homo sapiens
ttttgcacatccttc

SEQ ID NO: 1551769 - DNA, 15 bp, Homo sapiens
attttgcacatcctt

SEQ ID NO: 1551770 - DNA, 15 bp, Homo sapiens
tattttgcacatcct

SEQ ID NO: 1551771 - DNA, 15 bp, Homo sapiens
ttattttgcacatcc

SEQ ID NO: 1551772 - DNA, 15 bp, Homo sapiens
attattttgcacatc

SEQ ID NO: 1551773 - DNA, 15 bp, Homo sapiens
aattattttgcacat

SEQ ID NO: 1551774 - DNA, 15 bp, Homo sapiens
caattattttgcaca

SEQ ID NO: 1551775 - DNA, 15 bp, Homo sapiens
tcaattattttgcac

SEQ ID NO: 1551776 - DNA, 15 bp, Homo sapiens
gtcaattattttgca

SEQ ID NO: 1551777 - DNA, 15 bp, Homo sapiens
tgtcaattattttgc

SEQ ID NO: 1551778 - DNA, 15 bp, Homo sapiens
ttgtcaattattttg

SEQ ID NO: 1551779 - DNA, 15 bp, Homo sapiens
cttgtcaattatttt

SEQ ID NO: 1551780 - DNA, 15 bp, Homo sapiens
tcttgtcaattattt

SEQ ID NO: 1551781 - DNA, 15 bp, Homo sapiens
gtcttgtcaattatt

SEQ ID NO: 1551782 - DNA, 15 bp, Homo sapiens
tgtcttgtcaattat

SEQ ID NO: 1551783 - DNA, 15 bp, Homo sapiens
atgtcttgtcaatta

SEQ ID NO: 1551784 - DNA, 15 bp, Homo sapiens
catgtcttgtcaatt

SEQ ID NO: 1551785 - DNA, 15 bp, Homo sapiens
gcatgtcttgtcaat

SEQ ID NO: 1551786 - DNA, 15 bp, Homo sapiens
agcatgtcttgtcaa

SEQ ID NO: 1551787 - DNA, 15 bp, Homo sapiens
aagcatgtcttgtca

SEQ ID NO: 1551788 - DNA, 15 bp, Homo sapiens
taagcatgtcttgtc

SEQ ID NO: 1551789 - DNA, 15 bp, Homo sapiens
ataagcatgtcttgt

SEQ ID NO: 1551790 - DNA, 15 bp, Homo sapiens
gataagcatgtcttg

SEQ ID NO: 1551791 - DNA, 15 bp, Homo sapiens
agataagcatgtctt

SEQ ID NO: 1551792 - DNA, 15 bp, Homo sapiens
gagataagcatgtct

SEQ ID NO: 1551793 - DNA, 15 bp, Homo sapiens
ggagataagcatgtc

SEQ ID NO: 1551794 - DNA, 15 bp, Homo sapiens
tggagataagcatgt

SEQ ID NO: 1551795 - DNA, 15 bp, Homo sapiens
ttggagataagcatg

SEQ ID NO: 1551796 - DNA, 15 bp, Homo sapiens
gttggagataagcat

SEQ ID NO: 1551797 - DNA, 15 bp, Homo sapiens
agttggagataagca

SEQ ID NO: 1551798 - DNA, 15 bp, Homo sapiens
gagttggagataagc

SEQ ID NO: 1551799 - DNA, 15 bp, Homo sapiens
ggagttggagataag

SEQ ID NO: 1551800 - DNA, 15 bp, Homo sapiens
aggagttggagataa

SEQ ID NO: 1551801 - DNA, 15 bp, Homo sapiens
taggagttggagata

SEQ ID NO: 1551802 - DNA, 15 bp, Homo sapiens
gtaggagttggagat

SEQ ID NO: 1551803 - DNA, 15 bp, Homo sapiens
agtaggagttggaga

SEQ ID NO: 1551804 - DNA, 15 bp, Homo sapiens
aagtaggagttggag

SEQ ID NO: 1551805 - DNA, 15 bp, Homo sapiens
aaagtaggagttgga

SEQ ID NO: 1551806 - DNA, 15 bp, Homo sapiens
taaagtaggagttgg

SEQ ID NO: 1551807 - DNA, 15 bp, Homo sapiens
ctaaagtaggagttg

SEQ ID NO: 1551808 - DNA, 15 bp, Homo sapiens
tctaaagtaggagtt

SEQ ID NO: 1551809 - DNA, 15 bp, Homo sapiens
ttctaaagtaggagt

SEQ ID NO: 1551810 - DNA, 15 bp, Homo sapiens
gttctaaagtaggag

SEQ ID NO: 1551811 - DNA, 15 bp, Homo sapiens
tgttctaaagtagga

SEQ ID NO: 1551812 - DNA, 15 bp, Homo sapiens
ttgttctaaagtagg

SEQ ID NO: 1551813 - DNA, 15 bp, Homo sapiens
gttgttctaaagtag

SEQ ID NO: 1551814 - DNA, 15 bp, Homo sapiens
tgttgttctaaagta

SEQ ID NO: 1551815 - DNA, 15 bp, Homo sapiens
atgttgttctaaagt

SEQ ID NO: 1551816 - DNA, 15 bp, Homo sapiens
gatgttgttctaaag

SEQ ID NO: 1551817 - DNA, 15 bp, Homo sapiens
agatgttgttctaaa

SEQ ID NO: 1551818 - DNA, 15 bp, Homo sapiens
aagatgttgttctaa

SEQ ID NO: 1551819 - DNA, 15 bp, Homo sapiens
taagatgttgttcta

SEQ ID NO: 1551820 - DNA, 15 bp, Homo sapiens
ataagatgttgttct

SEQ ID NO: 1551821 - DNA, 15 bp, Homo sapiens
cataagatgttgttc

SEQ ID NO: 1551822 - DNA, 15 bp, Homo sapiens
acataagatgttgtt

SEQ ID NO: 1551823 - DNA, 15 bp, Homo sapiens
cacataagatgttgt

SEQ ID NO: 1551824 - DNA, 15 bp, Homo sapiens
ccacataagatgttg

SEQ ID NO: 1551825 - DNA, 15 bp, Homo sapiens
cccacataagatgtt

SEQ ID NO: 1551826 - DNA, 15 bp, Homo sapiens
tcccacataagatgt

SEQ ID NO: 1551827 - DNA, 15 bp, Homo sapiens
atcccacataagatg

SEQ ID NO: 1551828 - DNA, 15 bp, Homo sapiens
catcccacataagat

SEQ ID NO: 1551829 - DNA, 15 bp, Homo sapiens
tcatcccacataaga

SEQ ID NO: 1551830 - DNA, 15 bp, Homo sapiens
atcatcccacataag

SEQ ID NO: 1551831 - DNA, 15 bp, Homo sapiens
tatcatcccacataa

SEQ ID NO: 1551832 - DNA, 15 bp, Homo sapiens
atatcatcccacata

SEQ ID NO: 1551833 - DNA, 15 bp, Homo sapiens
aatatcatcccacat

SEQ ID NO: 1551834 - DNA, 15 bp, Homo sapiens
caatatcatcccaca

SEQ ID NO: 1551835 - DNA, 15 bp, Homo sapiens
gcaatatcatcccac

SEQ ID NO: 1551836 - DNA, 15 bp, Homo sapiens
agcaatatcatccca

SEQ ID NO: 1551837 - DNA, 15 bp, Homo sapiens
tagcaatatcatccc

SEQ ID NO: 1551838 - DNA, 15 bp, Homo sapiens
atagcaatatcatcc

SEQ ID NO: 1551839 - DNA, 15 bp, Homo sapiens
aatagcaatatcatc

SEQ ID NO: 1551840 - DNA, 15 bp, Homo sapiens
aaatagcaatatcat

SEQ ID NO: 1551841 - DNA, 15 bp, Homo sapiens
aaaatagcaatatca

SEQ ID NO: 1551842 - DNA, 15 bp, Homo sapiens
taaaatagcaatatc

SEQ ID NO: 1551843 - DNA, 15 bp, Homo sapiens
ctaaaatagcaatat

SEQ ID NO: 1551844 - DNA, 15 bp, Homo sapiens
gctaaaatagcaata

SEQ ID NO: 1551845 - DNA, 15 bp, Homo sapiens
tgctaaaatagcaat

SEQ ID NO: 1551846 - DNA, 15 bp, Homo sapiens
gtgctaaaatagcaa

SEQ ID NO: 1551847 - DNA, 15 bp, Homo sapiens
cgtgctaaaatagca

SEQ ID NO: 1551848 - DNA, 15 bp, Homo sapiens
gcgtgctaaaatagc

SEQ ID NO: 1551849 - DNA, 15 bp, Homo sapiens
agcgtgctaaaatag

SEQ ID NO: 1551850 - DNA, 15 bp, Homo sapiens
tagcgtgctaaaata

SEQ ID NO: 1551851 - DNA, 15 bp, Homo sapiens
gtagcgtgctaaaat

SEQ ID NO: 1551852 - DNA, 15 bp, Homo sapiens
tgtagcgtgctaaaa

SEQ ID NO: 1551853 - DNA, 15 bp, Homo sapiens
atgtagcgtgctaaa

SEQ ID NO: 1551854 - DNA, 15 bp, Homo sapiens
catgtagcgtgctaa

SEQ ID NO: 1551855 - DNA, 15 bp, Homo sapiens
gcatgtagcgtgcta

SEQ ID NO: 1551856 - DNA, 15 bp, Homo sapiens
agcatgtagcgtgct

SEQ ID NO: 1551857 - DNA, 15 bp, Homo sapiens
cagcatgtagcgtgc

SEQ ID NO: 1551858 - DNA, 15 bp, Homo sapiens
tcagcatgtagcgtg

SEQ ID NO: 1551859 - DNA, 15 bp, Homo sapiens
atcagcatgtagcgt

SEQ ID NO: 1551860 - DNA, 15 bp, Homo sapiens
catcagcatgtagcg

SEQ ID NO: 1551861 - DNA, 15 bp, Homo sapiens
gcatcagcatgtagc

SEQ ID NO: 1551862 - DNA, 15 bp, Homo sapiens
agcatcagcatgtag

SEQ ID NO: 1551863 - DNA, 15 bp, Homo sapiens
cagcatcagcatgta

SEQ ID NO: 1551864 - DNA, 15 bp, Homo sapiens
acagcatcagcatgt

SEQ ID NO: 1551865 - DNA, 15 bp, Homo sapiens
gacagcatcagcatg

SEQ ID NO: 1551866 - DNA, 15 bp, Homo sapiens
ggacagcatcagcat

SEQ ID NO: 1551867 - DNA, 15 bp, Homo sapiens
aggacagcatcagca

SEQ ID NO: 1551868 - DNA, 15 bp, Homo sapiens
aaggacagcatcagc

SEQ ID NO: 1551869 - DNA, 15 bp, Homo sapiens
gaaggacagcatcag

SEQ ID NO: 1551870 - DNA, 15 bp, Homo sapiens
tgaaggacagcatca

SEQ ID NO: 1551871 - DNA, 15 bp, Homo sapiens
ttgaaggacagcatc

SEQ ID NO: 1551872 - DNA, 15 bp, Homo sapiens
gttgaaggacagcat

SEQ ID NO: 1551873 - DNA, 15 bp, Homo sapiens
tgttgaaggacagca

SEQ ID NO: 1551874 - DNA, 15 bp, Homo sapiens
ttgttgaaggacagc

SEQ ID NO: 1551875 - DNA, 15 bp, Homo sapiens
attgttgaaggacag

SEQ ID NO: 1551876 - DNA, 15 bp, Homo sapiens
aattgttgaaggaca

SEQ ID NO: 1551877 - DNA, 15 bp, Homo sapiens
gaattgttgaaggac

SEQ ID NO: 1551878 - DNA, 15 bp, Homo sapiens
ggaattgttgaagga

SEQ ID NO: 1551879 - DNA, 15 bp, Homo sapiens
gggaattgttgaagg

SEQ ID NO: 1551880 - DNA, 15 bp, Homo sapiens
agggaattgttgaag

SEQ ID NO: 1551881 - DNA, 15 bp, Homo sapiens
aagggaattgttgaa

SEQ ID NO: 1551882 - DNA, 15 bp, Homo sapiens
caagggaattgttga

SEQ ID NO: 1551883 - DNA, 15 bp, Homo sapiens
tcaagggaattgttg

SEQ ID NO: 1551884 - DNA, 15 bp, Homo sapiens
atcaagggaattgtt

SEQ ID NO: 1551885 - DNA, 15 bp, Homo sapiens
catcaagggaattgt

SEQ ID NO: 1551886 - DNA, 15 bp, Homo sapiens
acatcaagggaattg

SEQ ID NO: 1551887 - DNA, 15 bp, Homo sapiens
cacatcaagggaatt

SEQ ID NO: 1551888 - DNA, 15 bp, Homo sapiens
ccacatcaagggaat

SEQ ID NO: 1551889 - DNA, 15 bp, Homo sapiens
gccacatcaagggaa

SEQ ID NO: 1551890 - DNA, 15 bp, Homo sapiens
tgccacatcaaggga

SEQ ID NO: 1551891 - DNA, 15 bp, Homo sapiens
ctgccacatcaaggg

SEQ ID NO: 1551892 - DNA, 15 bp, Homo sapiens
gctgccacatcaagg

SEQ ID NO: 1551893 - DNA, 15 bp, Homo sapiens
agctgccacatcaag

SEQ ID NO: 1551894 - DNA, 15 bp, Homo sapiens
gagctgccacatcaa

SEQ ID NO: 1551895 - DNA, 15 bp, Homo sapiens
tgagctgccacatca

SEQ ID NO: 1551896 - DNA, 15 bp, Homo sapiens
atgagctgccacatc

SEQ ID NO: 1551897 - DNA, 15 bp, Homo sapiens
gatgagctgccacat

SEQ ID NO: 1551898 - DNA, 15 bp, Homo sapiens
agatgagctgccaca

SEQ ID NO: 1551899 - DNA, 15 bp, Homo sapiens
aagatgagctgccac

SEQ ID NO: 1551900 - DNA, 15 bp, Homo sapiens
gaagatgagctgcca

SEQ ID NO: 1551901 - DNA, 15 bp, Homo sapiens
ggaagatgagctgcc

SEQ ID NO: 1551902 - DNA, 15 bp, Homo sapiens
gggaagatgagctgc

SEQ ID NO: 1551903 - DNA, 15 bp, Homo sapiens
agggaagatgagctg

SEQ ID NO: 1551904 - DNA, 15 bp, Homo sapiens
tagggaagatgagct

SEQ ID NO: 1551905 - DNA, 15 bp, Homo sapiens
gtagggaagatgagc

SEQ ID NO: 1551906 - DNA, 15 bp, Homo sapiens
ggtagggaagatgag

SEQ ID NO: 1551907 - DNA, 15 bp, Homo sapiens
aggtagggaagatga

SEQ ID NO: 1551908 - DNA, 15 bp, Homo sapiens
gaggtagggaagatg

SEQ ID NO: 1551909 - DNA, 15 bp, Homo sapiens
agaggtagggaagat

SEQ ID NO: 1551910 - DNA, 15 bp, Homo sapiens
aagaggtagggaaga

SEQ ID NO: 1551911 - DNA, 15 bp, Homo sapiens
gaagaggtagggaag

SEQ ID NO: 1551912 - DNA, 15 bp, Homo sapiens
ggaagaggtagggaa

SEQ ID NO: 1551913 - DNA, 15 bp, Homo sapiens
tggaagaggtaggga

SEQ ID NO: 1551914 - DNA, 15 bp, Homo sapiens
gtggaagaggtaggg

SEQ ID NO: 1551915 - DNA, 15 bp, Homo sapiens
cgtggaagaggtagg

SEQ ID NO: 1551916 - DNA, 15 bp, Homo sapiens
acgtggaagaggtag

SEQ ID NO: 1551917 - DNA, 15 bp, Homo sapiens
aacgtggaagaggta

SEQ ID NO: 1551918 - DNA, 15 bp, Homo sapiens
caacgtggaagaggt

SEQ ID NO: 1551919 - DNA, 15 bp, Homo sapiens
acaacgtggaagagg

SEQ ID NO: 1551920 - DNA, 15 bp, Homo sapiens
aacaacgtggaagag

SEQ ID NO: 1551921 - DNA, 15 bp, Homo sapiens
taacaacgtggaaga

SEQ ID NO: 1551922 - DNA, 15 bp, Homo sapiens
gtaacaacgtggaag

SEQ ID NO: 1551923 - DNA, 15 bp, Homo sapiens
agtaacaacgtggaa

SEQ ID NO: 1551924 - DNA, 15 bp, Homo sapiens
aagtaacaacgtgga

SEQ ID NO: 1551925 - DNA, 15 bp, Homo sapiens
aaagtaacaacgtgg

SEQ ID NO: 1551926 - DNA, 15 bp, Homo sapiens
gaaagtaacaacgtg

SEQ ID NO: 1551927 - DNA, 15 bp, Homo sapiens
agaaagtaacaacgt

SEQ ID NO: 1551928 - DNA, 15 bp, Homo sapiens
aagaaagtaacaacg

SEQ ID NO: 1551929 - DNA, 15 bp, Homo sapiens
taagaaagtaacaac

SEQ ID NO: 1551930 - DNA, 15 bp, Homo sapiens
ctaagaaagtaacaa

SEQ ID NO: 1551931 - DNA, 15 bp, Homo sapiens
actaagaaagtaaca

SEQ ID NO: 1551932 - DNA, 15 bp, Homo sapiens
tactaagaaagtaac

SEQ ID NO: 1551933 - DNA, 15 bp, Homo sapiens
ctactaagaaagtaa

SEQ ID NO: 1551934 - DNA, 15 bp, Homo sapiens
gctactaagaaagta

SEQ ID NO: 1551935 - DNA, 15 bp, Homo sapiens
ggctactaagaaagt

SEQ ID NO: 1551936 - DNA, 15 bp, Homo sapiens
tggctactaagaaag

SEQ ID NO: 1551937 - DNA, 15 bp, Homo sapiens
gtggctactaagaaa

SEQ ID NO: 1551938 - DNA, 15 bp, Homo sapiens
tgtggctactaagaa

SEQ ID NO: 1551939 - DNA, 15 bp, Homo sapiens
ctgtggctactaaga

SEQ ID NO: 1551940 - DNA, 15 bp, Homo sapiens
cctgtggctactaag

SEQ ID NO: 1551941 - DNA, 15 bp, Homo sapiens
acctgtggctactaa

SEQ ID NO: 1551942 - DNA, 15 bp, Homo sapiens
gacctgtggctacta

SEQ ID NO: 1551943 - DNA, 15 bp, Homo sapiens
ggacctgtggctact

SEQ ID NO: 1551944 - DNA, 15 bp, Homo sapiens
cggacctgtggctac

SEQ ID NO: 1551945 - DNA, 15 bp, Homo sapiens
gcggacctgtggcta

SEQ ID NO: 1551946 - DNA, 15 bp, Homo sapiens
agcggacctgtggct

SEQ ID NO: 1551947 - DNA, 15 bp, Homo sapiens
gagcggacctgtggc

SEQ ID NO: 1551948 - DNA, 15 bp, Homo sapiens
agagcggacctgtgg

SEQ ID NO: 1551949 - DNA, 15 bp, Homo sapiens
gagagcggacctgtg

SEQ ID NO: 1551950 - DNA, 15 bp, Homo sapiens
ggagagcggacctgt

SEQ ID NO: 1551951 - DNA, 15 bp, Homo sapiens
gggagagcggacctg

SEQ ID NO: 1551952 - DNA, 15 bp, Homo sapiens
agggagagcggacct

SEQ ID NO: 1551953 - DNA, 15 bp, Homo sapiens
aagggagagcggacc

SEQ ID NO: 1551954 - DNA, 15 bp, Homo sapiens
taagggagagcggac

SEQ ID NO: 1551955 - DNA, 15 bp, Homo sapiens
ctaagggagagcgga

SEQ ID NO: 1551956 - DNA, 15 bp, Homo sapiens
tctaagggagagcgg

SEQ ID NO: 1551957 - DNA, 15 bp, Homo sapiens
ctctaagggagagcg

SEQ ID NO: 1551958 - DNA, 15 bp, Homo sapiens
gctctaagggagagc

SEQ ID NO: 1551959 - DNA, 15 bp, Homo sapiens
agctctaagggagag

SEQ ID NO: 1551960 - DNA, 15 bp, Homo sapiens
aagctctaagggaga

SEQ ID NO: 1551961 - DNA, 15 bp, Homo sapiens
gaagctctaagggag

SEQ ID NO: 1551962 - DNA, 15 bp, Homo sapiens
ggaagctctaaggga

SEQ ID NO: 1551963 - DNA, 15 bp, Homo sapiens
tggaagctctaaggg

SEQ ID NO: 1551964 - DNA, 15 bp, Homo sapiens
gtggaagctctaagg

SEQ ID NO: 1551965 - DNA, 15 bp, Homo sapiens
tgtggaagctctaag

SEQ ID NO: 1551966 - DNA, 15 bp, Homo sapiens
gtgtggaagctctaa

SEQ ID NO: 1551967 - DNA, 15 bp, Homo sapiens
tgtgtggaagctcta

SEQ ID NO: 1551968 - DNA, 15 bp, Homo sapiens
atgtgtggaagctct

SEQ ID NO: 1551969 - DNA, 15 bp, Homo sapiens
catgtgtggaagctc

SEQ ID NO: 1551970 - DNA, 15 bp, Homo sapiens
ccatgtgtggaagct

SEQ ID NO: 1551971 - DNA, 15 bp, Homo sapiens
tccatgtgtggaagc

SEQ ID NO: 1551972 - DNA, 15 bp, Homo sapiens
gtccatgtgtggaag

SEQ ID NO: 1551973 - DNA, 15 bp, Homo sapiens
agtccatgtgtggaa

SEQ ID NO: 1551974 - DNA, 15 bp, Homo sapiens
cagtccatgtgtgga

SEQ ID NO: 1551975 - DNA, 15 bp, Homo sapiens
ccagtccatgtgtgg

SEQ ID NO: 1551976 - DNA, 15 bp, Homo sapiens
accagtccatgtgtg

SEQ ID NO: 1551977 - DNA, 15 bp, Homo sapiens
gaccagtccatgtgt

SEQ ID NO: 1551978 - DNA, 15 bp, Homo sapiens
tgaccagtccatgtg

SEQ ID NO: 1551979 - DNA, 15 bp, Homo sapiens
atgaccagtccatgt

SEQ ID NO: 1551980 - DNA, 15 bp, Homo sapiens
aatgaccagtccatg

SEQ ID NO: 1551981 - DNA, 15 bp, Homo sapiens
taatgaccagtccat

SEQ ID NO: 1551982 - DNA, 15 bp, Homo sapiens
ttaatgaccagtcca

SEQ ID NO: 1551983 - DNA, 15 bp, Homo sapiens
attaatgaccagtcc

SEQ ID NO: 1551984 - DNA, 15 bp, Homo sapiens
tattaatgaccagtc

SEQ ID NO: 1551985 - DNA, 15 bp, Homo sapiens
atattaatgaccagt

SEQ ID NO: 1551986 - DNA, 15 bp, Homo sapiens
gatattaatgaccag

SEQ ID NO: 1551987 - DNA, 15 bp, Homo sapiens
tgatattaatgacca

SEQ ID NO: 1551988 - DNA, 15 bp, Homo sapiens
atgatattaatgacc

SEQ ID NO: 1551989 - DNA, 15 bp, Homo sapiens
aatgatattaatgac

SEQ ID NO: 1551990 - DNA, 15 bp, Homo sapiens
gaatgatattaatga

SEQ ID NO: 1551991 - DNA, 15 bp, Homo sapiens
tgaatgatattaatg

SEQ ID NO: 1551992 - DNA, 15 bp, Homo sapiens
gtgaatgatattaat

SEQ ID NO: 1551993 - DNA, 15 bp, Homo sapiens
agtgaatgatattaa

SEQ ID NO: 1551994 - DNA, 15 bp, Homo sapiens
gagtgaatgatatta

SEQ ID NO: 1551995 - DNA, 15 bp, Homo sapiens
agagtgaatgatatt

SEQ ID NO: 1551996 - DNA, 15 bp, Homo sapiens
gagagtgaatgatat

SEQ ID NO: 1551997 - DNA, 15 bp, Homo sapiens
agagagtgaatgata

SEQ ID NO: 1551998 - DNA, 15 bp, Homo sapiens
cagagagtgaatgat

SEQ ID NO: 1551999 - DNA, 15 bp, Homo sapiens
acagagagtgaatga

SEQ ID NO: 1552000 - DNA, 15 bp, Homo sapiens
cacagagagtgaatg

SEQ ID NO: 1552001 - DNA, 15 bp, Homo sapiens
acacagagagtgaat

SEQ ID NO: 1552002 - DNA, 15 bp, Homo sapiens
tacacagagagtgaa

SEQ ID NO: 1552003 - DNA, 15 bp, Homo sapiens
gtacacagagagtga

SEQ ID NO: 1552004 - DNA, 15 bp, Homo sapiens
agtacacagagagtg

SEQ ID NO: 1552005 - DNA, 15 bp, Homo sapiens
aagtacacagagagt

SEQ ID NO: 1552006 - DNA, 15 bp, Homo sapiens
caagtacacagagag

SEQ ID NO: 1552007 - DNA, 15 bp, Homo sapiens
acaagtacacagaga

SEQ ID NO: 1552008 - DNA, 15 bp, Homo sapiens
aacaagtacacagag

SEQ ID NO: 1552009 - DNA, 15 bp, Homo sapiens
gaacaagtacacaga

SEQ ID NO: 1552010 - DNA, 15 bp, Homo sapiens
tgaacaagtacacag

SEQ ID NO: 1552011 - DNA, 15 bp, Homo sapiens
gtgaacaagtacaca

SEQ ID NO: 1552012 - DNA, 15 bp, Homo sapiens
tgtgaacaagtacac

SEQ ID NO: 1552013 - DNA, 15 bp, Homo sapiens
ctgtgaacaagtaca

SEQ ID NO: 1552014 - DNA, 15 bp, Homo sapiens
gctgtgaacaagtac

SEQ ID NO: 1552015 - DNA, 15 bp, Homo sapiens
agctgtgaacaagta

SEQ ID NO: 1552016 - DNA, 15 bp, Homo sapiens
aagctgtgaacaagt

SEQ ID NO: 1552017 - DNA, 15 bp, Homo sapiens
gaagctgtgaacaag

SEQ ID NO: 1552018 - DNA, 15 bp, Homo sapiens
tgaagctgtgaacaa

SEQ ID NO: 1552019 - DNA, 15 bp, Homo sapiens
atgaagctgtgaaca

SEQ ID NO: 1552020 - DNA, 15 bp, Homo sapiens
aatgaagctgtgaac

SEQ ID NO: 1552021 - DNA, 15 bp, Homo sapiens
aaatgaagctgtgaa

SEQ ID NO: 1552022 - DNA, 15 bp, Homo sapiens
aaaatgaagctgtga

SEQ ID NO: 1552023 - DNA, 15 bp, Homo sapiens
taaaatgaagctgtg

SEQ ID NO: 1552024 - DNA, 15 bp, Homo sapiens
ctaaaatgaagctgt

SEQ ID NO: 1552025 - DNA, 15 bp, Homo sapiens
actaaaatgaagctg

SEQ ID NO: 1552026 - DNA, 15 bp, Homo sapiens
cactaaaatgaagct

SEQ ID NO: 1552027 - DNA, 15 bp, Homo sapiens
ccactaaaatgaagc

SEQ ID NO: 1552028 - DNA, 15 bp, Homo sapiens
accactaaaatgaag

SEQ ID NO: 1552029 - DNA, 15 bp, Homo sapiens
taccactaaaatgaa

SEQ ID NO: 1552030 - DNA, 15 bp, Homo sapiens
ttaccactaaaatga

SEQ ID NO: 1552031 - DNA, 15 bp, Homo sapiens
cttaccactaaaatg

SEQ ID NO: 1552032 - DNA, 15 bp, Homo sapiens
acttaccactaaaat

SEQ ID NO: 1552033 - DNA, 15 bp, Homo sapiens
aacttaccactaaaa

SEQ ID NO: 1552034 - DNA, 15 bp, Homo sapiens
gaacttaccactaaa

SEQ ID NO: 1552035 - DNA, 15 bp, Homo sapiens
agaacttaccactaa

SEQ ID NO: 1552036 - DNA, 15 bp, Homo sapiens
tagaacttaccacta

SEQ ID NO: 1552037 - DNA, 15 bp, Homo sapiens
ctagaacttaccact

SEQ ID NO: 1552038 - DNA, 15 bp, Homo sapiens
cctagaacttaccac

SEQ ID NO: 1552039 - DNA, 15 bp, Homo sapiens
tcctagaacttacca

SEQ ID NO: 1552040 - DNA, 15 bp, Homo sapiens
ttcctagaacttacc

SEQ ID NO: 1552041 - DNA, 15 bp, Homo sapiens
tttcctagaacttac

SEQ ID NO: 1552042 - DNA, 15 bp, Homo sapiens
ctttcctagaactta

SEQ ID NO: 1552043 - DNA, 15 bp, Homo sapiens
cctttcctagaactt

SEQ ID NO: 1552044 - DNA, 15 bp, Homo sapiens
tcctttcctagaact

SEQ ID NO: 1552045 - DNA, 15 bp, Homo sapiens
ttcctttcctagaac

SEQ ID NO: 1552046 - DNA, 15 bp, Homo sapiens
attcctttcctagaa

SEQ ID NO: 1552047 - DNA, 15 bp, Homo sapiens
aattcctttcctaga

SEQ ID NO: 1552048 - DNA, 15 bp, Homo sapiens
aaattcctttcctag

SEQ ID NO: 1552049 - DNA, 15 bp, Homo sapiens
caaattcctttccta

SEQ ID NO: 1552050 - DNA, 15 bp, Homo sapiens
acaaattcctttcct

SEQ ID NO: 1552051 - DNA, 15 bp, Homo sapiens
cacaaattcctttcc

SEQ ID NO: 1552052 - DNA, 15 bp, Homo sapiens
acacaaattcctttc

SEQ ID NO: 1552053 - DNA, 15 bp, Homo sapiens
aacacaaattccttt

SEQ ID NO: 1552054 - DNA, 15 bp, Homo sapiens
aaacacaaattcctt

SEQ ID NO: 1552055 - DNA, 15 bp, Homo sapiens
taaacacaaattcct

SEQ ID NO: 1552056 - DNA, 15 bp, Homo sapiens
gtaaacacaaattcc

SEQ ID NO: 1552057 - DNA, 15 bp, Homo sapiens
ggtaaacacaaattc

SEQ ID NO: 1552058 - DNA, 15 bp, Homo sapiens
tggtaaacacaaatt

SEQ ID NO: 1552059 - DNA, 15 bp, Homo sapiens
ctggtaaacacaaat

SEQ ID NO: 1552060 - DNA, 15 bp, Homo sapiens
actggtaaacacaaa

SEQ ID NO: 1552061 - DNA, 15 bp, Homo sapiens
aactggtaaacacaa

SEQ ID NO: 1552062 - DNA, 15 bp, Homo sapiens
gaactggtaaacaca

SEQ ID NO: 1552063 - DNA, 15 bp, Homo sapiens
ggaactggtaaacac

SEQ ID NO: 1552064 - DNA, 15 bp, Homo sapiens
aggaactggtaaaca

SEQ ID NO: 1552065 - DNA, 15 bp, Homo sapiens
aaggaactggtaaac

SEQ ID NO: 1552066 - DNA, 15 bp, Homo sapiens
aaaggaactggtaaa

SEQ ID NO: 1552067 - DNA, 15 bp, Homo sapiens
gaaaggaactggtaa

SEQ ID NO: 1552068 - DNA, 15 bp, Homo sapiens
agaaaggaactggta

SEQ ID NO: 1552069 - DNA, 15 bp, Homo sapiens
gagaaaggaactggt

SEQ ID NO: 1552070 - DNA, 15 bp, Homo sapiens
ggagaaaggaactgg

SEQ ID NO: 1552071 - DNA, 15 bp, Homo sapiens
tggagaaaggaactg

SEQ ID NO: 1552072 - DNA, 15 bp, Homo sapiens
atggagaaaggaact

SEQ ID NO: 1552073 - DNA, 15 bp, Homo sapiens
aatggagaaaggaac

SEQ ID NO: 1552074 - DNA, 15 bp, Homo sapiens
aaatggagaaaggaa

SEQ ID NO: 1552075 - DNA, 15 bp, Homo sapiens
aaaatggagaaagga

SEQ ID NO: 1552076 - DNA, 15 bp, Homo sapiens
taaaatggagaaagg

SEQ ID NO: 1552077 - DNA, 15 bp, Homo sapiens
gtaaaatggagaaag

SEQ ID NO: 1552078 - DNA, 15 bp, Homo sapiens
agtaaaatggagaaa

SEQ ID NO: 1552079 - DNA, 15 bp, Homo sapiens
aagtaaaatggagaa

SEQ ID NO: 1552080 - DNA, 15 bp, Homo sapiens
gaagtaaaatggaga

SEQ ID NO: 1552081 - DNA, 15 bp, Homo sapiens
tgaagtaaaatggag

SEQ ID NO: 1552082 - DNA, 15 bp, Homo sapiens
gtgaagtaaaatgga

SEQ ID NO: 1552083 - DNA, 15 bp, Homo sapiens
ggtgaagtaaaatgg

SEQ ID NO: 1552084 - DNA, 15 bp, Homo sapiens
aggtgaagtaaaatg

SEQ ID NO: 1552085 - DNA, 15 bp, Homo sapiens
caggtgaagtaaaat

SEQ ID NO: 1552086 - DNA, 15 bp, Homo sapiens
tcaggtgaagtaaaa

SEQ ID NO: 1552087 - DNA, 15 bp, Homo sapiens
atcaggtgaagtaaa

SEQ ID NO: 1552088 - DNA, 15 bp, Homo sapiens
gatcaggtgaagtaa

SEQ ID NO: 1552089 - DNA, 15 bp, Homo sapiens
tgatcaggtgaagta

SEQ ID NO: 1552090 - DNA, 15 bp, Homo sapiens
ttgatcaggtgaagt

SEQ ID NO: 1552091 - DNA, 15 bp, Homo sapiens
attgatcaggtgaag

SEQ ID NO: 1552092 - DNA, 15 bp, Homo sapiens
tattgatcaggtgaa

SEQ ID NO: 1552093 - DNA, 15 bp, Homo sapiens
atattgatcaggtga

SEQ ID NO: 1552094 - DNA, 15 bp, Homo sapiens
tatattgatcaggtg

SEQ ID NO: 1552095 - DNA, 15 bp, Homo sapiens
ctatattgatcaggt

SEQ ID NO: 1552096 - DNA, 15 bp, Homo sapiens
tctatattgatcagg

SEQ ID NO: 1552097 - DNA, 15 bp, Homo sapiens
atctatattgatcag

SEQ ID NO: 1552098 - DNA, 15 bp, Homo sapiens
aatctatattgatca

SEQ ID NO: 1552099 - DNA, 15 bp, Homo sapiens
taatctatattgatc

SEQ ID NO: 1552100 - DNA, 15 bp, Homo sapiens
ataatctatattgat

SEQ ID NO: 1552101 - DNA, 15 bp, Homo sapiens
gataatctatattga

SEQ ID NO: 1552102 - DNA, 15 bp, Homo sapiens
agataatctatattg

SEQ ID NO: 1552103 - DNA, 15 bp, Homo sapiens
aagataatctatatt

SEQ ID NO: 1552104 - DNA, 15 bp, Homo sapiens
taagataatctatat

SEQ ID NO: 1552105 - DNA, 15 bp, Homo sapiens
ataagataatctata

SEQ ID NO: 1552106 - DNA, 15 bp, Homo sapiens
aataagataatctat

SEQ ID NO: 1552107 - DNA, 15 bp, Homo sapiens
aaataagataatcta

SEQ ID NO: 1552108 - DNA, 15 bp, Homo sapiens
taaataagataatct

SEQ ID NO: 1552109 - DNA, 15 bp, Homo sapiens
ataaataagataatc

SEQ ID NO: 1552110 - DNA, 15 bp, Homo sapiens
cataaataagataat

SEQ ID NO: 1552111 - DNA, 15 bp, Homo sapiens
acataaataagataa

SEQ ID NO: 1552112 - DNA, 15 bp, Homo sapiens
aacataaataagata

SEQ ID NO: 1552113 - DNA, 15 bp, Homo sapiens
aaacataaataagat

SEQ ID NO: 1552114 - DNA, 15 bp, Homo sapiens
caaacataaataaga

SEQ ID NO: 1552115 - DNA, 15 bp, Homo sapiens
acaaacataaataag

SEQ ID NO: 1552116 - DNA, 15 bp, Homo sapiens
cacaaacataaataa

SEQ ID NO: 1552117 - DNA, 15 bp, Homo sapiens
gcacaaacataaata

SEQ ID NO: 1552118 - DNA, 15 bp, Homo sapiens
agcacaaacataaat

SEQ ID NO: 1552119 - DNA, 15 bp, Homo sapiens
gagcacaaacataaa

SEQ ID NO: 1552120 - DNA, 15 bp, Homo sapiens
agagcacaaacataa

SEQ ID NO: 1552121 - DNA, 15 bp, Homo sapiens
tagagcacaaacata

SEQ ID NO: 1552122 - DNA, 15 bp, Homo sapiens
ttagagcacaaacat

SEQ ID NO: 1552123 - DNA, 15 bp, Homo sapiens
gttagagcacaaaca

SEQ ID NO: 1552124 - DNA, 15 bp, Homo sapiens
tgttagagcacaaac

SEQ ID NO: 1552125 - DNA, 15 bp, Homo sapiens
gtgttagagcacaaa

SEQ ID NO: 1552126 - DNA, 15 bp, Homo sapiens
ggtgttagagcacaa

SEQ ID NO: 1552127 - DNA, 15 bp, Homo sapiens
tggtgttagagcaca

SEQ ID NO: 1552128 - DNA, 15 bp, Homo sapiens
ttggtgttagagcac

SEQ ID NO: 1552129 - DNA, 15 bp, Homo sapiens
cttggtgttagagca

SEQ ID NO: 1552130 - DNA, 15 bp, Homo sapiens
acttggtgttagagc

SEQ ID NO: 1552131 - DNA, 15 bp, Homo sapiens
aacttggtgttagag

SEQ ID NO: 1552132 - DNA, 15 bp, Homo sapiens
caacttggtgttaga

SEQ ID NO: 1552133 - DNA, 15 bp, Homo sapiens
gcaacttggtgttag

SEQ ID NO: 1552134 - DNA, 15 bp, Homo sapiens
agcaacttggtgtta

SEQ ID NO: 1552135 - DNA, 15 bp, Homo sapiens
tagcaacttggtgtt

SEQ ID NO: 1552136 - DNA, 15 bp, Homo sapiens
ttagcaacttggtgt

SEQ ID NO: 1552137 - DNA, 15 bp, Homo sapiens
attagcaacttggtg

SEQ ID NO: 1552138 - DNA, 15 bp, Homo sapiens
aattagcaacttggt

SEQ ID NO: 1552139 - DNA, 15 bp, Homo sapiens
aaattagcaacttgg

SEQ ID NO: 1552140 - DNA, 15 bp, Homo sapiens
taaattagcaacttg

SEQ ID NO: 1552141 - DNA, 15 bp, Homo sapiens
ttaaattagcaactt

SEQ ID NO: 1552142 - DNA, 15 bp, Homo sapiens
cttaaattagcaact

SEQ ID NO: 1552143 - DNA, 15 bp, Homo sapiens
gcttaaattagcaac

SEQ ID NO: 1552144 - DNA, 15 bp, Homo sapiens
ggcttaaattagcaa

SEQ ID NO: 1552145 - DNA, 15 bp, Homo sapiens
aggcttaaattagca

SEQ ID NO: 1552146 - DNA, 15 bp, Homo sapiens
gaggcttaaattagc

SEQ ID NO: 1552147 - DNA, 15 bp, Homo sapiens
ggaggcttaaattag

SEQ ID NO: 1552148 - DNA, 15 bp, Homo sapiens
tggaggcttaaatta

SEQ ID NO: 1552149 - DNA, 15 bp, Homo sapiens
ctggaggcttaaatt

SEQ ID NO: 1552150 - DNA, 15 bp, Homo sapiens
actggaggcttaaat

SEQ ID NO: 1552151 - DNA, 15 bp, Homo sapiens
tactggaggcttaaa

SEQ ID NO: 1552152 - DNA, 15 bp, Homo sapiens
ttactggaggcttaa

SEQ ID NO: 1552153 - DNA, 15 bp, Homo sapiens
attactggaggctta

SEQ ID NO: 1552154 - DNA, 15 bp, Homo sapiens
cattactggaggctt

SEQ ID NO: 1552155 - DNA, 15 bp, Homo sapiens
tcattactggaggct

SEQ ID NO: 1552156 - DNA, 15 bp, Homo sapiens
gtcattactggaggc

SEQ ID NO: 1552157 - DNA, 15 bp, Homo sapiens
tgtcattactggagg

SEQ ID NO: 1552158 - DNA, 15 bp, Homo sapiens
atgtcattactggag

SEQ ID NO: 1552159 - DNA, 15 bp, Homo sapiens
catgtcattactgga

SEQ ID NO: 1552160 - DNA, 15 bp, Homo sapiens
tcatgtcattactgg

SEQ ID NO: 1552161 - DNA, 15 bp, Homo sapiens
ttcatgtcattactg

SEQ ID NO: 1552162 - DNA, 15 bp, Homo sapiens
tttcatgtcattact

SEQ ID NO: 1552163 - DNA, 15 bp, Homo sapiens
atttcatgtcattac

SEQ ID NO: 1552164 - DNA, 15 bp, Homo sapiens
tatttcatgtcatta

SEQ ID NO: 1552165 - DNA, 15 bp, Homo sapiens
atatttcatgtcatt

SEQ ID NO: 1552166 - DNA, 15 bp, Homo sapiens
aatatttcatgtcat

SEQ ID NO: 1552167 - DNA, 15 bp, Homo sapiens
taatatttcatgtca

SEQ ID NO: 1552168 - DNA, 15 bp, Homo sapiens
gtaatatttcatgtc

SEQ ID NO: 1552169 - DNA, 15 bp, Homo sapiens
ggtaatatttcatgt

SEQ ID NO: 1552170 - DNA, 15 bp, Homo sapiens
tggtaatatttcatg

SEQ ID NO: 1552171 - DNA, 15 bp, Homo sapiens
ttggtaatatttcat

SEQ ID NO: 1552172 - DNA, 15 bp, Homo sapiens
tttggtaatatttca

SEQ ID NO: 1552173 - DNA, 15 bp, Homo sapiens
ttttggtaatatttc

SEQ ID NO: 1552174 - DNA, 15 bp, Homo sapiens
tttttggtaatattt

SEQ ID NO: 1552175 - DNA, 15 bp, Homo sapiens
ctttttggtaatatt

SEQ ID NO: 1552176 - DNA, 15 bp, Homo sapiens
tctttttggtaatat

SEQ ID NO: 1552177 - DNA, 15 bp, Homo sapiens
ttctttttggtaata

SEQ ID NO: 1552178 - DNA, 15 bp, Homo sapiens
tttctttttggtaat

SEQ ID NO: 1552179 - DNA, 15 bp, Homo sapiens
ttttctttttggtaa

SEQ ID NO: 1552180 - DNA, 15 bp, Homo sapiens
attttctttttggta

SEQ ID NO: 1552181 - DNA, 15 bp, Homo sapiens
tattttctttttggt

SEQ ID NO: 1552182 - DNA, 15 bp, Homo sapiens
ttattttctttttgg

SEQ ID NO: 1552183 - DNA, 15 bp, Homo sapiens
tttattttctttttg

SEQ ID NO: 1552184 - DNA, 15 bp, Homo sapiens
taatttattttcttt

SEQ ID NO: 1552185 - DNA, 15 bp, Homo sapiens
gtaatttattttctt

SEQ ID NO: 1552186 - DNA, 15 bp, Homo sapiens
agtaatttattttct

SEQ ID NO: 1552187 - DNA, 15 bp, Homo sapiens
aagtaatttattttc

SEQ ID NO: 1552188 - DNA, 15 bp, Homo sapiens
gaagtaatttatttt

SEQ ID NO: 1552189 - DNA, 15 bp, Homo sapiens
ggaagtaatttattt

SEQ ID NO: 1552190 - DNA, 15 bp, Homo sapiens
tggaagtaatttatt

SEQ ID NO: 1552191 - DNA, 15 bp, Homo sapiens
atggaagtaatttat

SEQ ID NO: 1552192 - DNA, 15 bp, Homo sapiens
aatggaagtaattta

SEQ ID NO: 1552193 - DNA, 15 bp, Homo sapiens
gaatggaagtaattt

SEQ ID NO: 1552194 - DNA, 15 bp, Homo sapiens
ggaatggaagtaatt

SEQ ID NO: 1552195 - DNA, 15 bp, Homo sapiens
tggaatggaagtaat

SEQ ID NO: 1552196 - DNA, 15 bp, Homo sapiens
atggaatggaagtaa

SEQ ID NO: 1552197 - DNA, 15 bp, Homo sapiens
tatggaatggaagta

SEQ ID NO: 1552198 - DNA, 15 bp, Homo sapiens
atatggaatggaagt

SEQ ID NO: 1552199 - DNA, 15 bp, Homo sapiens
gatatggaatggaag

SEQ ID NO: 1552200 - DNA, 15 bp, Homo sapiens
tgatatggaatggaa

SEQ ID NO: 1552201 - DNA, 15 bp, Homo sapiens
ttgatatggaatgga

SEQ ID NO: 1552202 - DNA, 15 bp, Homo sapiens
cttgatatggaatgg

SEQ ID NO: 1552203 - DNA, 15 bp, Homo sapiens
gcttgatatggaatg

SEQ ID NO: 1552204 - DNA, 15 bp, Homo sapiens
agcttgatatggaat

SEQ ID NO: 1552205 - DNA, 15 bp, Homo sapiens
tagcttgatatggaa

SEQ ID NO: 1552206 - DNA, 15 bp, Homo sapiens
atagcttgatatgga

SEQ ID NO: 1552207 - DNA, 15 bp, Homo sapiens
tatagcttgatatgg

SEQ ID NO: 1552208 - DNA, 15 bp, Homo sapiens
ctatagcttgatatg

SEQ ID NO: 1552209 - DNA, 15 bp, Homo sapiens
actatagcttgatat

SEQ ID NO: 1552210 - DNA, 15 bp, Homo sapiens
tactatagcttgata

SEQ ID NO: 1552211 - DNA, 15 bp, Homo sapiens
ttactatagcttgat

SEQ ID NO: 1552212 - DNA, 15 bp, Homo sapiens
tttactatagcttga

SEQ ID NO: 1552213 - DNA, 15 bp, Homo sapiens
ctttactatagcttg

SEQ ID NO: 1552214 - DNA, 15 bp, Homo sapiens
tctttactatagctt

SEQ ID NO: 1552215 - DNA, 15 bp, Homo sapiens
atctttactatagct

SEQ ID NO: 1552216 - DNA, 15 bp, Homo sapiens
aatctttactatagc

SEQ ID NO: 1552217 - DNA, 15 bp, Homo sapiens
aaatctttactatag

SEQ ID NO: 1552218 - DNA, 15 bp, Homo sapiens
aaaatctttactata

SEQ ID NO: 1552219 - DNA, 15 bp, Homo sapiens
gaaaatctttactat

SEQ ID NO: 1552220 - DNA, 15 bp, Homo sapiens
agaaaatctttacta

SEQ ID NO: 1552221 - DNA, 15 bp, Homo sapiens
tagaaaatctttact

SEQ ID NO: 1552222 - DNA, 15 bp, Homo sapiens
atagaaaatctttac

SEQ ID NO: 1552223 - DNA, 15 bp, Homo sapiens
catagaaaatcttta

SEQ ID NO: 1552224 - DNA, 15 bp, Homo sapiens
gcatagaaaatcttt

SEQ ID NO: 1552225 - DNA, 15 bp, Homo sapiens
tgcatagaaaatctt

SEQ ID NO: 1552226 - DNA, 15 bp, Homo sapiens
atgcatagaaaatct

SEQ ID NO: 1552227 - DNA, 15 bp, Homo sapiens
tatgcatagaaaatc

SEQ ID NO: 1552228 - DNA, 15 bp, Homo sapiens
gtatgcatagaaaat

SEQ ID NO: 1552229 - DNA, 15 bp, Homo sapiens
agtatgcatagaaaa

SEQ ID NO: 1552230 - DNA, 15 bp, Homo sapiens
aagtatgcatagaaa

SEQ ID NO: 1552231 - DNA, 15 bp, Homo sapiens
caagtatgcatagaa

SEQ ID NO: 1552232 - DNA, 15 bp, Homo sapiens
acaagtatgcataga

SEQ ID NO: 1552233 - DNA, 15 bp, Homo sapiens
gacaagtatgcatag

SEQ ID NO: 1552234 - DNA, 15 bp, Homo sapiens
tgacaagtatgcata

SEQ ID NO: 1552235 - DNA, 15 bp, Homo sapiens
atgacaagtatgcat

SEQ ID NO: 1552236 - DNA, 15 bp, Homo sapiens
catgacaagtatgca

SEQ ID NO: 1552237 - DNA, 15 bp, Homo sapiens
acatgacaagtatgc

SEQ ID NO: 1552238 - DNA, 15 bp, Homo sapiens
tacatgacaagtatg

SEQ ID NO: 1552239 - DNA, 15 bp, Homo sapiens
ctacatgacaagtat

SEQ ID NO: 1552240 - DNA, 15 bp, Homo sapiens
tctacatgacaagta

SEQ ID NO: 1552241 - DNA, 15 bp, Homo sapiens
ctctacatgacaagt

SEQ ID NO: 1552242 - DNA, 15 bp, Homo sapiens
actctacatgacaag

SEQ ID NO: 1552243 - DNA, 15 bp, Homo sapiens
aactctacatgacaa

SEQ ID NO: 1552244 - DNA, 15 bp, Homo sapiens
taactctacatgaca

SEQ ID NO: 1552245 - DNA, 15 bp, Homo sapiens
ataactctacatgac

SEQ ID NO: 1552246 - DNA, 15 bp, Homo sapiens
gataactctacatga

SEQ ID NO: 1552247 - DNA, 15 bp, Homo sapiens
ggataactctacatg

SEQ ID NO: 1552248 - DNA, 15 bp, Homo sapiens
gggataactctacat

SEQ ID NO: 1552249 - DNA, 15 bp, Homo sapiens
tgggataactctaca

SEQ ID NO: 1552250 - DNA, 15 bp, Homo sapiens
atgggataactctac

SEQ ID NO: 1552251 - DNA, 15 bp, Homo sapiens
tatgggataactcta

SEQ ID NO: 1552252 - DNA, 15 bp, Homo sapiens
ttatgggataactct

SEQ ID NO: 1552253 - DNA, 15 bp, Homo sapiens
cttatgggataactc

SEQ ID NO: 1552254 - DNA, 15 bp, Homo sapiens
gcttatgggataact

SEQ ID NO: 1552255 - DNA, 15 bp, Homo sapiens
cgcttatgggataac

SEQ ID NO: 1552256 - DNA, 15 bp, Homo sapiens
ccgcttatgggataa

SEQ ID NO: 1552257 - DNA, 15 bp, Homo sapiens
tccgcttatgggata

SEQ ID NO: 1552258 - DNA, 15 bp, Homo sapiens
ttccgcttatgggat

SEQ ID NO: 1552259 - DNA, 15 bp, Homo sapiens
attccgcttatggga

SEQ ID NO: 1552260 - DNA, 15 bp, Homo sapiens
tattccgcttatggg

SEQ ID NO: 1552261 - DNA, 15 bp, Homo sapiens
gtattccgcttatgg

SEQ ID NO: 1552262 - DNA, 15 bp, Homo sapiens
agtattccgcttatg

SEQ ID NO: 1552263 - DNA, 15 bp, Homo sapiens
gagtattccgcttat

SEQ ID NO: 1552264 - DNA, 15 bp, Homo sapiens
tgagtattccgctta

SEQ ID NO: 1552265 - DNA, 15 bp, Homo sapiens
ctgagtattccgctt

SEQ ID NO: 1552266 - DNA, 15 bp, Homo sapiens
actgagtattccgct

SEQ ID NO: 1552267 - DNA, 15 bp, Homo sapiens
cactgagtattccgc

SEQ ID NO: 1552268 - DNA, 15 bp, Homo sapiens
gcactgagtattccg

SEQ ID NO: 1552269 - DNA, 15 bp, Homo sapiens
ggcactgagtattcc

SEQ ID NO: 1552270 - DNA, 15 bp, Homo sapiens
tggcactgagtattc

SEQ ID NO: 1552271 - DNA, 15 bp, Homo sapiens
ctggcactgagtatt

SEQ ID NO: 1552272 - DNA, 15 bp, Homo sapiens
actggcactgagtat

SEQ ID NO: 1552273 - DNA, 15 bp, Homo sapiens
aactggcactgagta

SEQ ID NO: 1552274 - DNA, 15 bp, Homo sapiens
caactggcactgagt

SEQ ID NO: 1552275 - DNA, 15 bp, Homo sapiens
tcaactggcactgag

SEQ ID NO: 1552276 - DNA, 15 bp, Homo sapiens
gtcaactggcactga

SEQ ID NO: 1552277 - DNA, 15 bp, Homo sapiens
ggtcaactggcactg

SEQ ID NO: 1552278 - DNA, 15 bp, Homo sapiens
tggtcaactggcact

SEQ ID NO: 1552279 - DNA, 15 bp, Homo sapiens
atggtcaactggcac

SEQ ID NO: 1552280 - DNA, 15 bp, Homo sapiens
catggtcaactggca

SEQ ID NO: 1552281 - DNA, 15 bp, Homo sapiens
acatggtcaactggc

SEQ ID NO: 1552282 - DNA, 15 bp, Homo sapiens
aacatggtcaactgg

SEQ ID NO: 1552283 - DNA, 15 bp, Homo sapiens
gaacatggtcaactg

SEQ ID NO: 1552284 - DNA, 15 bp, Homo sapiens
tgaacatggtcaact

SEQ ID NO: 1552285 - DNA, 15 bp, Homo sapiens
ctgaacatggtcaac

SEQ ID NO: 1552286 - DNA, 15 bp, Homo sapiens
actgaacatggtcaa

SEQ ID NO: 1552287 - DNA, 15 bp, Homo sapiens
aactgaacatggtca

SEQ ID NO: 1552288 - DNA, 15 bp, Homo sapiens
taactgaacatggtc

SEQ ID NO: 1552289 - DNA, 15 bp, Homo sapiens
gtaactgaacatggt

SEQ ID NO: 1552290 - DNA, 15 bp, Homo sapiens
ggtaactgaacatgg

SEQ ID NO: 1552291 - DNA, 15 bp, Homo sapiens
tggtaactgaacatg

SEQ ID NO: 1552292 - DNA, 15 bp, Homo sapiens
ctggtaactgaacat

SEQ ID NO: 1552293 - DNA, 15 bp, Homo sapiens
gctggtaactgaaca

SEQ ID NO: 1552294 - DNA, 15 bp, Homo sapiens
tgctggtaactgaac

SEQ ID NO: 1552295 - DNA, 15 bp, Homo sapiens
gtgctggtaactgaa

SEQ ID NO: 1552296 - DNA, 15 bp, Homo sapiens
agtgctggtaactga

SEQ ID NO: 1552297 - DNA, 15 bp, Homo sapiens
tagtgctggtaactg

SEQ ID NO: 1552298 - DNA, 15 bp, Homo sapiens
ttagtgctggtaact

SEQ ID NO: 1552299 - DNA, 15 bp, Homo sapiens
attagtgctggtaac

SEQ ID NO: 1552300 - DNA, 15 bp, Homo sapiens
aattagtgctggtaa

SEQ ID NO: 1552301 - DNA, 15 bp, Homo sapiens
aaattagtgctggta

SEQ ID NO: 1552302 - DNA, 15 bp, Homo sapiens
caaattagtgctggt

SEQ ID NO: 1552303 - DNA, 15 bp, Homo sapiens
acaaattagtgctgg

SEQ ID NO: 1552304 - DNA, 15 bp, Homo sapiens
tacaaattagtgctg

SEQ ID NO: 1552305 - DNA, 15 bp, Homo sapiens
ctacaaattagtgct

SEQ ID NO: 1552306 - DNA, 15 bp, Homo sapiens
tctacaaattagtgc

SEQ ID NO: 1552307 - DNA, 15 bp, Homo sapiens
atctacaaattagtg

SEQ ID NO: 1552308 - DNA, 15 bp, Homo sapiens
tatctacaaattagt

SEQ ID NO: 1552309 - DNA, 15 bp, Homo sapiens
ttatctacaaattag

SEQ ID NO: 1552310 - DNA, 15 bp, Homo sapiens
tttatctacaaatta

SEQ ID NO: 1552311 - DNA, 15 bp, Homo sapiens
atttatctacaaatt

SEQ ID NO: 1552312 - DNA, 15 bp, Homo sapiens
tcatttatctacaaa

SEQ ID NO: 1552313 - DNA, 15 bp, Homo sapiens
ttcatttatctacaa

SEQ ID NO: 1552314 - DNA, 15 bp, Homo sapiens
cttcatttatctaca

SEQ ID NO: 1552315 - DNA, 15 bp, Homo sapiens
gcttcatttatctac

SEQ ID NO: 1552316 - DNA, 15 bp, Homo sapiens
tgcttcatttatcta

SEQ ID NO: 1552317 - DNA, 15 bp, Homo sapiens
ttgcttcatttatct

SEQ ID NO: 1552318 - DNA, 15 bp, Homo sapiens
cttgcttcatttatc

SEQ ID NO: 1552319 - DNA, 15 bp, Homo sapiens
ccttgcttcatttat

SEQ ID NO: 1552320 - DNA, 15 bp, Homo sapiens
tccttgcttcattta

SEQ ID NO: 1552321 - DNA, 15 bp, Homo sapiens
ctccttgcttcattt

SEQ ID NO: 1552322 - DNA, 15 bp, Homo sapiens
gctccttgcttcatt

SEQ ID NO: 1552323 - DNA, 15 bp, Homo sapiens
tgctccttgcttcat

SEQ ID NO: 1552324 - DNA, 15 bp, Homo sapiens
atgctccttgcttca

SEQ ID NO: 1552325 - DNA, 15 bp, Homo sapiens
aatgctccttgcttc

SEQ ID NO: 1552326 - DNA, 15 bp, Homo sapiens
taatgctccttgctt

SEQ ID NO: 1552327 - DNA, 15 bp, Homo sapiens
ttaatgctccttgct

SEQ ID NO: 1552328 - DNA, 15 bp, Homo sapiens
attaatgctccttgc

SEQ ID NO: 1552329 - DNA, 15 bp, Homo sapiens
tattaatgctccttg

SEQ ID NO: 1552330 - DNA, 15 bp, Homo sapiens
gtattaatgctcctt

SEQ ID NO: 1552331 - DNA, 15 bp, Homo sapiens
tgtattaatgctcct

SEQ ID NO: 1552332 - DNA, 15 bp, Homo sapiens
ttgtattaatgctcc

SEQ ID NO: 1552333 - DNA, 15 bp, Homo sapiens
attgtattaatgctc

SEQ ID NO: 1552334 - DNA, 15 bp, Homo sapiens
cattgtattaatgct

SEQ ID NO: 1552335 - DNA, 15 bp, Homo sapiens
acattgtattaatgc

SEQ ID NO: 1552336 - DNA, 15 bp, Homo sapiens
tacattgtattaatg

SEQ ID NO: 1552337 - DNA, 15 bp, Homo sapiens
atacattgtattaat

SEQ ID NO: 1552338 - DNA, 15 bp, Homo sapiens
gatacattgtattaa

SEQ ID NO: 1552339 - DNA, 15 bp, Homo sapiens
agatacattgtatta

SEQ ID NO: 1552340 - DNA, 15 bp, Homo sapiens
tagatacattgtatt

SEQ ID NO: 1552341 - DNA, 15 bp, Homo sapiens
ctagatacattgtat

SEQ ID NO: 1552342 - DNA, 15 bp, Homo sapiens
tctagatacattgta

SEQ ID NO: 1552343 - DNA, 15 bp, Homo sapiens
ctctagatacattgt

SEQ ID NO: 1552344 - DNA, 15 bp, Homo sapiens
cctctagatacattg

SEQ ID NO: 1552345 - DNA, 15 bp, Homo sapiens
acctctagatacatt

SEQ ID NO: 1552346 - DNA, 15 bp, Homo sapiens
aacctctagatacat

SEQ ID NO: 1552347 - DNA, 15 bp, Homo sapiens
aaacctctagataca

SEQ ID NO: 1552348 - DNA, 15 bp, Homo sapiens
caaacctctagatac

SEQ ID NO: 1552349 - DNA, 15 bp, Homo sapiens
tcaaacctctagata

SEQ ID NO: 1552350 - DNA, 15 bp, Homo sapiens
atcaaacctctagat

SEQ ID NO: 1552351 - DNA, 15 bp, Homo sapiens
aatcaaacctctaga

SEQ ID NO: 1552352 - DNA, 15 bp, Homo sapiens
aaatcaaacctctag

SEQ ID NO: 1552353 - DNA, 15 bp, Homo sapiens
taaatcaaacctcta

SEQ ID NO: 1552354 - DNA, 15 bp, Homo sapiens
ctaaatcaaacctct

SEQ ID NO: 1552355 - DNA, 15 bp, Homo sapiens
cctaaatcaaacctc

SEQ ID NO: 1552356 - DNA, 15 bp, Homo sapiens
ccctaaatcaaacct

SEQ ID NO: 1552357 - DNA, 15 bp, Homo sapiens
tccctaaatcaaacc

SEQ ID NO: 1552358 - DNA, 15 bp, Homo sapiens
ttccctaaatcaaac

SEQ ID NO: 1552359 - DNA, 15 bp, Homo sapiens
gttccctaaatcaaa

SEQ ID NO: 1552360 - DNA, 15 bp, Homo sapiens
tgttccctaaatcaa

SEQ ID NO: 1552361 - DNA, 15 bp, Homo sapiens
atgttccctaaatca

SEQ ID NO: 1552362 - DNA, 15 bp, Homo sapiens
catgttccctaaatc

SEQ ID NO: 1552363 - DNA, 15 bp, Homo sapiens
tcatgttccctaaat

SEQ ID NO: 1552364 - DNA, 15 bp, Homo sapiens
atcatgttccctaaa

SEQ ID NO: 1552365 - DNA, 15 bp, Homo sapiens
aatcatgttccctaa

SEQ ID NO: 1552366 - DNA, 15 bp, Homo sapiens
taatcatgttcccta

SEQ ID NO: 1552367 - DNA, 15 bp, Homo sapiens
ataatcatgttccct

SEQ ID NO: 1552368 - DNA, 15 bp, Homo sapiens
cataatcatgttccc

SEQ ID NO: 1552369 - DNA, 15 bp, Homo sapiens
acataatcatgttcc

SEQ ID NO: 1552370 - DNA, 15 bp, Homo sapiens
tacataatcatgttc

SEQ ID NO: 1552371 - DNA, 15 bp, Homo sapiens
ttacataatcatgtt

SEQ ID NO: 1552372 - DNA, 15 bp, Homo sapiens
attacataatcatgt

SEQ ID NO: 1552373 - DNA, 15 bp, Homo sapiens
aattacataatcatg

SEQ ID NO: 1552374 - DNA, 15 bp, Homo sapiens
aaaattacataatca

SEQ ID NO: 1552375 - DNA, 15 bp, Homo sapiens
aaaaattacataatc

SEQ ID NO: 1552376 - DNA, 15 bp, Homo sapiens
taaaaattacataat

SEQ ID NO: 1552377 - DNA, 15 bp, Homo sapiens
ataaaaattacataa

SEQ ID NO: 1552378 - DNA, 15 bp, Homo sapiens
tataaaaattacata

SEQ ID NO: 1552379 - DNA, 15 bp, Homo sapiens
atataaaaattacat

SEQ ID NO: 1552380 - DNA, 15 bp, Homo sapiens
catataaaaattaca

SEQ ID NO: 1552381 - DNA, 15 bp, Homo sapiens
ccatataaaaattac

SEQ ID NO: 1552382 - DNA, 15 bp, Homo sapiens
accatataaaaatta

SEQ ID NO: 1552383 - DNA, 15 bp, Homo sapiens
taccatataaaaatt

SEQ ID NO: 1552384 - DNA, 15 bp, Homo sapiens
ataccatataaaaat

SEQ ID NO: 1552385 - DNA, 15 bp, Homo sapiens
aataccatataaaaa

SEQ ID NO: 1552386 - DNA, 15 bp, Homo sapiens
gaataccatataaaa

SEQ ID NO: 1552387 - DNA, 15 bp, Homo sapiens
tgaataccatataaa

SEQ ID NO: 1552388 - DNA, 15 bp, Homo sapiens
ttgaataccatataa

SEQ ID NO: 1552389 - DNA, 15 bp, Homo sapiens
tttgaataccatata

SEQ ID NO: 1552390 - DNA, 15 bp, Homo sapiens
atttgaataccatat

SEQ ID NO: 1552391 - DNA, 15 bp, Homo sapiens
aatttgaataccata

SEQ ID NO: 1552392 - DNA, 15 bp, Homo sapiens
aaatttgaataccat

SEQ ID NO: 1552393 - DNA, 15 bp, Homo sapiens
aaaatttgaatacca

SEQ ID NO: 1552394 - DNA, 15 bp, Homo sapiens
gaaaatttgaatacc

SEQ ID NO: 1552395 - DNA, 15 bp, Homo sapiens
agaaaatttgaatac

SEQ ID NO: 1552396 - DNA, 15 bp, Homo sapiens
tagaaaatttgaata

SEQ ID NO: 1552397 - DNA, 15 bp, Homo sapiens
ttagaaaatttgaat

SEQ ID NO: 1552398 - DNA, 15 bp, Homo sapiens
tttagaaaatttgaa

SEQ ID NO: 1552399 - DNA, 15 bp, Homo sapiens
atttagaaaatttga

SEQ ID NO: 1552400 - DNA, 15 bp, Homo sapiens
aatttagaaaatttg

SEQ ID NO: 1552401 - DNA, 15 bp, Homo sapiens
gaatttagaaaattt

SEQ ID NO: 1552402 - DNA, 15 bp, Homo sapiens
tgaatttagaaaatt

SEQ ID NO: 1552403 - DNA, 15 bp, Homo sapiens
ttgaatttagaaaat

SEQ ID NO: 1552404 - DNA, 15 bp, Homo sapiens
tttgaatttagaaaa

SEQ ID NO: 1552405 - DNA, 15 bp, Homo sapiens
ttttgaatttagaaa

SEQ ID NO: 1552406 - DNA, 15 bp, Homo sapiens
attttgaatttagaa

SEQ ID NO: 1552407 - DNA, 15 bp, Homo sapiens
cattttgaatttaga

SEQ ID NO: 1552408 - DNA, 15 bp, Homo sapiens
tcattttgaatttag

SEQ ID NO: 1552409 - DNA, 15 bp, Homo sapiens
ttcattttgaattta

SEQ ID NO: 1552410 - DNA, 15 bp, Homo sapiens
tttcattttgaattt

SEQ ID NO: 1552411 - DNA, 15 bp, Homo sapiens
gtttcattttgaatt

SEQ ID NO: 1552412 - DNA, 15 bp, Homo sapiens
tgtttcattttgaat

SEQ ID NO: 1552413 - DNA, 15 bp, Homo sapiens
atgtttcattttgaa

SEQ ID NO: 1552414 - DNA, 15 bp, Homo sapiens
catgtttcattttga

SEQ ID NO: 1552415 - DNA, 15 bp, Homo sapiens
ccatgtttcattttg

SEQ ID NO: 1552416 - DNA, 15 bp, Homo sapiens
tccatgtttcatttt

SEQ ID NO: 1552417 - DNA, 15 bp, Homo sapiens
ttccatgtttcattt

SEQ ID NO: 1552418 - DNA, 15 bp, Homo sapiens
gttccatgtttcatt

SEQ ID NO: 1552419 - DNA, 15 bp, Homo sapiens
agttccatgtttcat

SEQ ID NO: 1552420 - DNA, 15 bp, Homo sapiens
aagttccatgtttca

SEQ ID NO: 1552421 - DNA, 15 bp, Homo sapiens
aaagttccatgtttc

SEQ ID NO: 1552422 - DNA, 15 bp, Homo sapiens
taaagttccatgttt

SEQ ID NO: 1552423 - DNA, 15 bp, Homo sapiens
ctaaagttccatgtt

SEQ ID NO: 1552424 - DNA, 15 bp, Homo sapiens
tctaaagttccatgt

SEQ ID NO: 1552425 - DNA, 15 bp, Homo sapiens
ttctaaagttccatg

SEQ ID NO: 1552426 - DNA, 15 bp, Homo sapiens
tttctaaagttccat

SEQ ID NO: 1552427 - DNA, 15 bp, Homo sapiens
atttctaaagttcca

SEQ ID NO: 1552428 - DNA, 15 bp, Homo sapiens
aatttctaaagttcc

SEQ ID NO: 1552429 - DNA, 15 bp, Homo sapiens
taatttctaaagttc

SEQ ID NO: 1552430 - DNA, 15 bp, Homo sapiens
ttaatttctaaagtt

SEQ ID NO: 1552431 - DNA, 15 bp, Homo sapiens
tttaatttctaaagt

SEQ ID NO: 1552432 - DNA, 15 bp, Homo sapiens
ttttaatttctaaag

SEQ ID NO: 1552433 - DNA, 15 bp, Homo sapiens
tttttaatttctaaa

SEQ ID NO: 1552434 - DNA, 15 bp, Homo sapiens
ctttttaatttctaa

SEQ ID NO: 1552435 - DNA, 15 bp, Homo sapiens
actttttaatttcta

SEQ ID NO: 1552436 - DNA, 15 bp, Homo sapiens
tactttttaatttct

SEQ ID NO: 1552437 - DNA, 15 bp, Homo sapiens
ttactttttaatttc

SEQ ID NO: 1552438 - DNA, 15 bp, Homo sapiens
attactttttaattt

SEQ ID NO: 1552439 - DNA, 15 bp, Homo sapiens
tattactttttaatt

SEQ ID NO: 1552440 - DNA, 15 bp, Homo sapiens
atattactttttaat

SEQ ID NO: 1552441 - DNA, 15 bp, Homo sapiens
aatattactttttaa

SEQ ID NO: 1552442 - DNA, 15 bp, Homo sapiens
aaatattacttttta

SEQ ID NO: 1552443 - DNA, 15 bp, Homo sapiens
aaaatattacttttt

SEQ ID NO: 1552444 - DNA, 15 bp, Homo sapiens
gaaaatattactttt

SEQ ID NO: 1552445 - DNA, 15 bp, Homo sapiens
agaaaatattacttt

SEQ ID NO: 1552446 - DNA, 15 bp, Homo sapiens
cagaaaatattactt

SEQ ID NO: 1552447 - DNA, 15 bp, Homo sapiens
acagaaaatattact

SEQ ID NO: 1552448 - DNA, 15 bp, Homo sapiens
gacagaaaatattac

SEQ ID NO: 1552449 - DNA, 15 bp, Homo sapiens
agacagaaaatatta

SEQ ID NO: 1552450 - DNA, 15 bp, Homo sapiens
aagacagaaaatatt

SEQ ID NO: 1552451 - DNA, 15 bp, Homo sapiens
aaagacagaaaatat

SEQ ID NO: 1552452 - DNA, 15 bp, Homo sapiens
taaagacagaaaata

SEQ ID NO: 1552453 - DNA, 15 bp, Homo sapiens
gtaaagacagaaaat

SEQ ID NO: 1552454 - DNA, 15 bp, Homo sapiens
agtaaagacagaaaa

SEQ ID NO: 1552455 - DNA, 15 bp, Homo sapiens
aagtaaagacagaaa

SEQ ID NO: 1552456 - DNA, 15 bp, Homo sapiens
caagtaaagacagaa

SEQ ID NO: 1552457 - DNA, 15 bp, Homo sapiens
acaagtaaagacaga

SEQ ID NO: 1552458 - DNA, 15 bp, Homo sapiens
aacaagtaaagacag

SEQ ID NO: 1552459 - DNA, 15 bp, Homo sapiens
gaacaagtaaagaca

SEQ ID NO: 1552460 - DNA, 15 bp, Homo sapiens
ggaacaagtaaagac

SEQ ID NO: 1552461 - DNA, 15 bp, Homo sapiens
aggaacaagtaaaga

SEQ ID NO: 1552462 - DNA, 15 bp, Homo sapiens
aaggaacaagtaaag

SEQ ID NO: 1552463 - DNA, 15 bp, Homo sapiens
aaaggaacaagtaaa

SEQ ID NO: 1552464 - DNA, 15 bp, Homo sapiens
taaaggaacaagtaa

SEQ ID NO: 1552465 - DNA, 15 bp, Homo sapiens
ataaaggaacaagta

SEQ ID NO: 1552466 - DNA, 15 bp, Homo sapiens
aataaaggaacaagt

SEQ ID NO: 1552467 - DNA, 15 bp, Homo sapiens
gaataaaggaacaag

SEQ ID NO: 1552468 - DNA, 15 bp, Homo sapiens
agaataaaggaacaa

SEQ ID NO: 1552469 - DNA, 15 bp, Homo sapiens
gagaataaaggaaca

SEQ ID NO: 1552470 - DNA, 15 bp, Homo sapiens
agagaataaaggaac

SEQ ID NO: 1552471 - DNA, 15 bp, Homo sapiens
aagagaataaaggaa

SEQ ID NO: 1552472 - DNA, 15 bp, Homo sapiens
taagagaataaagga

SEQ ID NO: 1552473 - DNA, 15 bp, Homo sapiens
gtaagagaataaagg

SEQ ID NO: 1552474 - DNA, 15 bp, Homo sapiens
tgtaagagaataaag

SEQ ID NO: 1552475 - DNA, 15 bp, Homo sapiens
ctgtaagagaataaa

SEQ ID NO: 1552476 - DNA, 15 bp, Homo sapiens
tctgtaagagaataa

SEQ ID NO: 1552477 - DNA, 15 bp, Homo sapiens
ttctgtaagagaata

SEQ ID NO: 1552478 - DNA, 15 bp, Homo sapiens
cttctgtaagagaat

SEQ ID NO: 1552479 - DNA, 15 bp, Homo sapiens
tcttctgtaagagaa

SEQ ID NO: 1552480 - DNA, 15 bp, Homo sapiens
ctcttctgtaagaga

SEQ ID NO: 1552481 - DNA, 15 bp, Homo sapiens
tctcttctgtaagag

SEQ ID NO: 1552482 - DNA, 15 bp, Homo sapiens
gtctcttctgtaaga

SEQ ID NO: 1552483 - DNA, 15 bp, Homo sapiens
ggtctcttctgtaag

SEQ ID NO: 1552484 - DNA, 15 bp, Homo sapiens
tggtctcttctgtaa

SEQ ID NO: 1552485 - DNA, 15 bp, Homo sapiens
ttggtctcttctgta

SEQ ID NO: 1552486 - DNA, 15 bp, Homo sapiens
cttggtctcttctgt

SEQ ID NO: 1552487 - DNA, 15 bp, Homo sapiens
gcttggtctcttctg

SEQ ID NO: 1552488 - DNA, 15 bp, Homo sapiens
tgcttggtctcttct

SEQ ID NO: 1552489 - DNA, 15 bp, Homo sapiens
ttgcttggtctcttc

SEQ ID NO: 1552490 - DNA, 15 bp, Homo sapiens
cttgcttggtctctt

SEQ ID NO: 1552491 - DNA, 15 bp, Homo sapiens
acttgcttggtctct

SEQ ID NO: 1552492 - DNA, 15 bp, Homo sapiens
aacttgcttggtctc

SEQ ID NO: 1552493 - DNA, 15 bp, Homo sapiens
aaacttgcttggtct

SEQ ID NO: 1552494 - DNA, 15 bp, Homo sapiens
aaaacttgcttggtc

SEQ ID NO: 1552495 - DNA, 15 bp, Homo sapiens
caaaacttgcttggt

SEQ ID NO: 1552496 - DNA, 15 bp, Homo sapiens
tcaaaacttgcttgg

SEQ ID NO: 1552497 - DNA, 15 bp, Homo sapiens
ctcaaaacttgcttg

SEQ ID NO: 1552498 - DNA, 15 bp, Homo sapiens
tctcaaaacttgctt

SEQ ID NO: 1552499 - DNA, 15 bp, Homo sapiens
gtctcaaaacttgct

SEQ ID NO: 1552500 - DNA, 15 bp, Homo sapiens
agtctcaaaacttgc

SEQ ID NO: 1552501 - DNA, 15 bp, Homo sapiens
gagtctcaaaacttg

SEQ ID NO: 1552502 - DNA, 15 bp, Homo sapiens
tgagtctcaaaactt

SEQ ID NO: 1552503 - DNA, 15 bp, Homo sapiens
ctgagtctcaaaact

SEQ ID NO: 1552504 - DNA, 15 bp, Homo sapiens
actgagtctcaaaac

SEQ ID NO: 1552505 - DNA, 15 bp, Homo sapiens
gactgagtctcaaaa

SEQ ID NO: 1552506 - DNA, 15 bp, Homo sapiens
agactgagtctcaaa

SEQ ID NO: 1552507 - DNA, 15 bp, Homo sapiens
cagactgagtctcaa

SEQ ID NO: 1552508 - DNA, 15 bp, Homo sapiens
tcagactgagtctca

SEQ ID NO: 1552509 - DNA, 15 bp, Homo sapiens
gtcagactgagtctc

SEQ ID NO: 1552510 - DNA, 15 bp, Homo sapiens
tgtcagactgagtct

SEQ ID NO: 1552511 - DNA, 15 bp, Homo sapiens
ctgtcagactgagtc

SEQ ID NO: 1552512 - DNA, 15 bp, Homo sapiens
tctgtcagactgagt

SEQ ID NO: 1552513 - DNA, 15 bp, Homo sapiens
ctctgtcagactgag

SEQ ID NO: 1552514 - DNA, 15 bp, Homo sapiens
actctgtcagactga

SEQ ID NO: 1552515 - DNA, 15 bp, Homo sapiens
aactctgtcagactg

SEQ ID NO: 1552516 - DNA, 15 bp, Homo sapiens
gaactctgtcagact

SEQ ID NO: 1552517 - DNA, 15 bp, Homo sapiens
agaactctgtcagac

SEQ ID NO: 1552518 - DNA, 15 bp, Homo sapiens
gagaactctgtcaga

SEQ ID NO: 1552519 - DNA, 15 bp, Homo sapiens
tgagaactctgtcag

SEQ ID NO: 1552520 - DNA, 15 bp, Homo sapiens
atgagaactctgtca

SEQ ID NO: 1552521 - DNA, 15 bp, Homo sapiens
aatgagaactctgtc

SEQ ID NO: 1552522 - DNA, 15 bp, Homo sapiens
taatgagaactctgt

SEQ ID NO: 1552523 - DNA, 15 bp, Homo sapiens
gtaatgagaactctg

SEQ ID NO: 1552524 - DNA, 15 bp, Homo sapiens
ggtaatgagaactct

SEQ ID NO: 1552525 - DNA, 15 bp, Homo sapiens
gggtaatgagaactc

SEQ ID NO: 1552526 - DNA, 15 bp, Homo sapiens
tgggtaatgagaact

SEQ ID NO: 1552527 - DNA, 15 bp, Homo sapiens
ttgggtaatgagaac

SEQ ID NO: 1552528 - DNA, 15 bp, Homo sapiens
tttgggtaatgagaa

SEQ ID NO: 1552529 - DNA, 15 bp, Homo sapiens
atttgggtaatgaga

SEQ ID NO: 1552530 - DNA, 15 bp, Homo sapiens
aatttgggtaatgag

SEQ ID NO: 1552531 - DNA, 15 bp, Homo sapiens
aaatttgggtaatga

SEQ ID NO: 1552532 - DNA, 15 bp, Homo sapiens
aaaatttgggtaatg

SEQ ID NO: 1552533 - DNA, 15 bp, Homo sapiens
taaaatttgggtaat

SEQ ID NO: 1552534 - DNA, 15 bp, Homo sapiens
gtaaaatttgggtaa

SEQ ID NO: 1552535 - DNA, 15 bp, Homo sapiens
agtaaaatttgggta

SEQ ID NO: 1552536 - DNA, 15 bp, Homo sapiens
aagtaaaatttgggt

SEQ ID NO: 1552537 - DNA, 15 bp, Homo sapiens
caagtaaaatttggg

SEQ ID NO: 1552538 - DNA, 15 bp, Homo sapiens
gcaagtaaaatttgg

SEQ ID NO: 1552539 - DNA, 15 bp, Homo sapiens
agcaagtaaaatttg

SEQ ID NO: 1552540 - DNA, 15 bp, Homo sapiens
cagcaagtaaaattt

SEQ ID NO: 1552541 - DNA, 15 bp, Homo sapiens
acagcaagtaaaatt

SEQ ID NO: 1552542 - DNA, 15 bp, Homo sapiens
aacagcaagtaaaat

SEQ ID NO: 1552543 - DNA, 15 bp, Homo sapiens
aaacagcaagtaaaa

SEQ ID NO: 1552544 - DNA, 15 bp, Homo sapiens
caaacagcaagtaaa

SEQ ID NO: 1552545 - DNA, 15 bp, Homo sapiens
ccaaacagcaagtaa

SEQ ID NO: 1552546 - DNA, 15 bp, Homo sapiens
gccaaacagcaagta

SEQ ID NO: 1552547 - DNA, 15 bp, Homo sapiens
tgccaaacagcaagt

SEQ ID NO: 1552548 - DNA, 15 bp, Homo sapiens
atgccaaacagcaag

SEQ ID NO: 1552549 - DNA, 15 bp, Homo sapiens
aatgccaaacagcaa

SEQ ID NO: 1552550 - DNA, 15 bp, Homo sapiens
taatgccaaacagca

SEQ ID NO: 1552551 - DNA, 15 bp, Homo sapiens
ctaatgccaaacagc

SEQ ID NO: 1552552 - DNA, 15 bp, Homo sapiens
gctaatgccaaacag

SEQ ID NO: 1552553 - DNA, 15 bp, Homo sapiens
tgctaatgccaaaca

SEQ ID NO: 1552554 - DNA, 15 bp, Homo sapiens
ttgctaatgccaaac

SEQ ID NO: 1552555 - DNA, 15 bp, Homo sapiens
tttgctaatgccaaa

SEQ ID NO: 1552556 - DNA, 15 bp, Homo sapiens
ctttgctaatgccaa

SEQ ID NO: 1552557 - DNA, 15 bp, Homo sapiens
actttgctaatgcca

SEQ ID NO: 1552558 - DNA, 15 bp, Homo sapiens
gactttgctaatgcc

SEQ ID NO: 1552559 - DNA, 15 bp, Homo sapiens
tgactttgctaatgc

SEQ ID NO: 1552560 - DNA, 15 bp, Homo sapiens
ttgactttgctaatg

SEQ ID NO: 1552561 - DNA, 15 bp, Homo sapiens
cttgactttgctaat

SEQ ID NO: 1552562 - DNA, 15 bp, Homo sapiens
acttgactttgctaa

SEQ ID NO: 1552563 - DNA, 15 bp, Homo sapiens
gacttgactttgcta

SEQ ID NO: 1552564 - DNA, 15 bp, Homo sapiens
tgacttgactttgct

SEQ ID NO: 1552565 - DNA, 15 bp, Homo sapiens
ctgacttgactttgc

SEQ ID NO: 1552566 - DNA, 15 bp, Homo sapiens
gctgacttgactttg

SEQ ID NO: 1552567 - DNA, 15 bp, Homo sapiens
agctgacttgacttt

SEQ ID NO: 1552568 - DNA, 15 bp, Homo sapiens
cagctgacttgactt

SEQ ID NO: 1552569 - DNA, 15 bp, Homo sapiens
gcagctgacttgact

SEQ ID NO: 1552570 - DNA, 15 bp, Homo sapiens
agcagctgacttgac

SEQ ID NO: 1552571 - DNA, 15 bp, Homo sapiens
cagcagctgacttga

SEQ ID NO: 1552572 - DNA, 15 bp, Homo sapiens
acagcagctgacttg

SEQ ID NO: 1552573 - DNA, 15 bp, Homo sapiens
gacagcagctgactt

SEQ ID NO: 1552574 - DNA, 15 bp, Homo sapiens
tgacagcagctgact

SEQ ID NO: 1552575 - DNA, 15 bp, Homo sapiens
atgacagcagctgac

SEQ ID NO: 1552576 - DNA, 15 bp, Homo sapiens
aatgacagcagctga

SEQ ID NO: 1552577 - DNA, 15 bp, Homo sapiens
caatgacagcagctg

SEQ ID NO: 1552578 - DNA, 15 bp, Homo sapiens
gcaatgacagcagct

SEQ ID NO: 1552579 - DNA, 15 bp, Homo sapiens
ggcaatgacagcagc

SEQ ID NO: 1552580 - DNA, 15 bp, Homo sapiens
aggcaatgacagcag

SEQ ID NO: 1552581 - DNA, 15 bp, Homo sapiens
aaggcaatgacagca

SEQ ID NO: 1552582 - DNA, 15 bp, Homo sapiens
gaaggcaatgacagc

SEQ ID NO: 1552583 - DNA, 15 bp, Homo sapiens
ggaaggcaatgacag

SEQ ID NO: 1552584 - DNA, 15 bp, Homo sapiens
cggaaggcaatgaca

SEQ ID NO: 1552585 - DNA, 15 bp, Homo sapiens
acggaaggcaatgac

SEQ ID NO: 1552586 - DNA, 15 bp, Homo sapiens
aacggaaggcaatga

SEQ ID NO: 1552587 - DNA, 15 bp, Homo sapiens
gaacggaaggcaatg

SEQ ID NO: 1552588 - DNA, 15 bp, Homo sapiens
ggaacggaaggcaat

SEQ ID NO: 1552589 - DNA, 15 bp, Homo sapiens
tggaacggaaggcaa

SEQ ID NO: 1552590 - DNA, 15 bp, Homo sapiens
ctggaacggaaggca

SEQ ID NO: 1552591 - DNA, 15 bp, Homo sapiens
actggaacggaaggc

SEQ ID NO: 1552592 - DNA, 15 bp, Homo sapiens
aactggaacggaagg

SEQ ID NO: 1552593 - DNA, 15 bp, Homo sapiens
taactggaacggaag

SEQ ID NO: 1552594 - DNA, 15 bp, Homo sapiens
gtaactggaacggaa

SEQ ID NO: 1552595 - DNA, 15 bp, Homo sapiens
ggtaactggaacgga

SEQ ID NO: 1552596 - DNA, 15 bp, Homo sapiens
cggtaactggaacgg

SEQ ID NO: 1552597 - DNA, 15 bp, Homo sapiens
ccggtaactggaacg

SEQ ID NO: 1552598 - DNA, 15 bp, Homo sapiens
cccggtaactggaac

SEQ ID NO: 1552599 - DNA, 15 bp, Homo sapiens
tcccggtaactggaa

SEQ ID NO: 1552600 - DNA, 15 bp, Homo sapiens
gtcccggtaactgga

SEQ ID NO: 1552601 - DNA, 15 bp, Homo sapiens
tgtcccggtaactgg

SEQ ID NO: 1552602 - DNA, 15 bp, Homo sapiens
ctgtcccggtaactg

SEQ ID NO: 1552603 - DNA, 15 bp, Homo sapiens
cctgtcccggtaact

SEQ ID NO: 1552604 - DNA, 15 bp, Homo sapiens
acctgtcccggtaac

SEQ ID NO: 1552605 - DNA, 15 bp, Homo sapiens
gacctgtcccggtaa

SEQ ID NO: 1552606 - DNA, 15 bp, Homo sapiens
tgacctgtcccggta

SEQ ID NO: 1552607 - DNA, 15 bp, Homo sapiens
atgacctgtcccggt

SEQ ID NO: 1552608 - DNA, 15 bp, Homo sapiens
aatgacctgtcccgg

SEQ ID NO: 1552609 - DNA, 15 bp, Homo sapiens
gaatgacctgtcccg

SEQ ID NO: 1552610 - DNA, 15 bp, Homo sapiens
agaatgacctgtccc

SEQ ID NO: 1552611 - DNA, 15 bp, Homo sapiens
gagaatgacctgtcc

SEQ ID NO: 1552612 - DNA, 15 bp, Homo sapiens
agagaatgacctgtc

SEQ ID NO: 1552613 - DNA, 15 bp, Homo sapiens
gagagaatgacctgt

SEQ ID NO: 1552614 - DNA, 15 bp, Homo sapiens
ggagagaatgacctg

SEQ ID NO: 1552615 - DNA, 15 bp, Homo sapiens
aggagagaatgacct

SEQ ID NO: 1552616 - DNA, 15 bp, Homo sapiens
caggagagaatgacc

SEQ ID NO: 1552617 - DNA, 15 bp, Homo sapiens
ccaggagagaatgac

SEQ ID NO: 1552618 - DNA, 15 bp, Homo sapiens
gccaggagagaatga

SEQ ID NO: 1552619 - DNA, 15 bp, Homo sapiens
agccaggagagaatg

SEQ ID NO: 1552620 - DNA, 15 bp, Homo sapiens
gagccaggagagaat

SEQ ID NO: 1552621 - DNA, 15 bp, Homo sapiens
ggagccaggagagaa

SEQ ID NO: 1552622 - DNA, 15 bp, Homo sapiens
aggagccaggagaga

SEQ ID NO: 1552623 - DNA, 15 bp, Homo sapiens
taggagccaggagag

SEQ ID NO: 1552624 - DNA, 15 bp, Homo sapiens
ataggagccaggaga

SEQ ID NO: 1552625 - DNA, 15 bp, Homo sapiens
cataggagccaggag

SEQ ID NO: 1552626 - DNA, 15 bp, Homo sapiens
tcataggagccagga

SEQ ID NO: 1552627 - DNA, 15 bp, Homo sapiens
ctcataggagccagg

SEQ ID NO: 1552628 - DNA, 15 bp, Homo sapiens
tctcataggagccag

SEQ ID NO: 1552629 - DNA, 15 bp, Homo sapiens
ctctcataggagcca

SEQ ID NO: 1552630 - DNA, 15 bp, Homo sapiens
tctctcataggagcc

SEQ ID NO: 1552631 - DNA, 15 bp, Homo sapiens
ctctctcataggagc

SEQ ID NO: 1552632 - DNA, 15 bp, Homo sapiens
tctctctcataggag

SEQ ID NO: 1552633 - DNA, 15 bp, Homo sapiens
ctctctctcatagga

SEQ ID NO: 1552634 - DNA, 15 bp, Homo sapiens
tctctctctcatagg

SEQ ID NO: 1552635 - DNA, 15 bp, Homo sapiens
gtctctctctcatag

SEQ ID NO: 1552636 - DNA, 15 bp, Homo sapiens
agtctctctctcata

SEQ ID NO: 1552637 - DNA, 15 bp, Homo sapiens
aagtctctctctcat

SEQ ID NO: 1552638 - DNA, 15 bp, Homo sapiens
aaagtctctctctca

SEQ ID NO: 1552639 - DNA, 15 bp, Homo sapiens
aaaagtctctctctc

SEQ ID NO: 1552640 - DNA, 15 bp, Homo sapiens
caaaagtctctctct

SEQ ID NO: 1552641 - DNA, 15 bp, Homo sapiens
gcaaaagtctctctc

SEQ ID NO: 1552642 - DNA, 15 bp, Homo sapiens
agcaaaagtctctct

SEQ ID NO: 1552643 - DNA, 15 bp, Homo sapiens
aagcaaaagtctctc

SEQ ID NO: 1552644 - DNA, 15 bp, Homo sapiens
aaagcaaaagtctct

SEQ ID NO: 1552645 - DNA, 15 bp, Homo sapiens
caaagcaaaagtctc

SEQ ID NO: 1552646 - DNA, 15 bp, Homo sapiens
tcaaagcaaaagtct

SEQ ID NO: 1552647 - DNA, 15 bp, Homo sapiens
gtcaaagcaaaagtc

SEQ ID NO: 1552648 - DNA, 15 bp, Homo sapiens
tgtcaaagcaaaagt

SEQ ID NO: 1552649 - DNA, 15 bp, Homo sapiens
atgtcaaagcaaaag

SEQ ID NO: 1552650 - DNA, 15 bp, Homo sapiens
gatgtcaaagcaaaa

SEQ ID NO: 1552651 - DNA, 15 bp, Homo sapiens
ggatgtcaaagcaaa

SEQ ID NO: 1552652 - DNA, 15 bp, Homo sapiens
aggatgtcaaagcaa

SEQ ID NO: 1552653 - DNA, 15 bp, Homo sapiens
aaggatgtcaaagca

SEQ ID NO: 1552654 - DNA, 15 bp, Homo sapiens
caaggatgtcaaagc

SEQ ID NO: 1552655 - DNA, 15 bp, Homo sapiens
ccaaggatgtcaaag

SEQ ID NO: 1552656 - DNA, 15 bp, Homo sapiens
tccaaggatgtcaaa

SEQ ID NO: 1552657 - DNA, 15 bp, Homo sapiens
ttccaaggatgtcaa

SEQ ID NO: 1552658 - DNA, 15 bp, Homo sapiens
tttccaaggatgtca

SEQ ID NO: 1552659 - DNA, 15 bp, Homo sapiens
gtttccaaggatgtc

SEQ ID NO: 1552660 - DNA, 15 bp, Homo sapiens
tgtttccaaggatgt

SEQ ID NO: 1552661 - DNA, 15 bp, Homo sapiens
ctgtttccaaggatg

SEQ ID NO: 1552662 - DNA, 15 bp, Homo sapiens
actgtttccaaggat

SEQ ID NO: 1552663 - DNA, 15 bp, Homo sapiens
gactgtttccaagga

SEQ ID NO: 1552664 - DNA, 15 bp, Homo sapiens
tgactgtttccaagg

SEQ ID NO: 1552665 - DNA, 15 bp, Homo sapiens
gtgactgtttccaag

SEQ ID NO: 1552666 - DNA, 15 bp, Homo sapiens
tgtgactgtttccaa

SEQ ID NO: 1552667 - DNA, 15 bp, Homo sapiens
ctgtgactgtttcca

SEQ ID NO: 1552668 - DNA, 15 bp, Homo sapiens
tctgtgactgtttcc

SEQ ID NO: 1552669 - DNA, 15 bp, Homo sapiens
ttctgtgactgtttc

SEQ ID NO: 1552670 - DNA, 15 bp, Homo sapiens
cttctgtgactgttt

SEQ ID NO: 1552671 - DNA, 15 bp, Homo sapiens
gcttctgtgactgtt

SEQ ID NO: 1552672 - DNA, 15 bp, Homo sapiens
agcttctgtgactgt

SEQ ID NO: 1552673 - DNA, 15 bp, Homo sapiens
aagcttctgtgactg

SEQ ID NO: 1552674 - DNA, 15 bp, Homo sapiens
aaagcttctgtgact

SEQ ID NO: 1552675 - DNA, 15 bp, Homo sapiens
caaagcttctgtgac

SEQ ID NO: 1552676 - DNA, 15 bp, Homo sapiens
acaaagcttctgtga

SEQ ID NO: 1552677 - DNA, 15 bp, Homo sapiens
aacaaagcttctgtg

SEQ ID NO: 1552678 - DNA, 15 bp, Homo sapiens
caacaaagcttctgt

SEQ ID NO: 1552679 - DNA, 15 bp, Homo sapiens
ccaacaaagcttctg

SEQ ID NO: 1552680 - DNA, 15 bp, Homo sapiens
tccaacaaagcttct

SEQ ID NO: 1552681 - DNA, 15 bp, Homo sapiens
ctccaacaaagcttc

SEQ ID NO: 1552682 - DNA, 15 bp, Homo sapiens
tctccaacaaagctt

SEQ ID NO: 1552683 - DNA, 15 bp, Homo sapiens
atctccaacaaagct

SEQ ID NO: 1552684 - DNA, 15 bp, Homo sapiens
gatctccaacaaagc

SEQ ID NO: 1552685 - DNA, 15 bp, Homo sapiens
tgatctccaacaaag

SEQ ID NO: 1552686 - DNA, 15 bp, Homo sapiens
atgatctccaacaaa

SEQ ID NO: 1552687 - DNA, 15 bp, Homo sapiens
catgatctccaacaa

SEQ ID NO: 1552688 - DNA, 15 bp, Homo sapiens
ccatgatctccaaca

SEQ ID NO: 1552689 - DNA, 15 bp, Homo sapiens
tccatgatctccaac

SEQ ID NO: 1552690 - DNA, 15 bp, Homo sapiens
ctccatgatctccaa

SEQ ID NO: 1552691 - DNA, 15 bp, Homo sapiens
cctccatgatctcca

SEQ ID NO: 1552692 - DNA, 15 bp, Homo sapiens
acctccatgatctcc

SEQ ID NO: 1552693 - DNA, 15 bp, Homo sapiens
tacctccatgatctc

SEQ ID NO: 1552694 - DNA, 15 bp, Homo sapiens
atacctccatgatct

SEQ ID NO: 1552695 - DNA, 15 bp, Homo sapiens
tatacctccatgatc

SEQ ID NO: 1552696 - DNA, 15 bp, Homo sapiens
ctatacctccatgat

SEQ ID NO: 1552697 - DNA, 15 bp, Homo sapiens
tctatacctccatga

SEQ ID NO: 1552698 - DNA, 15 bp, Homo sapiens
ttctatacctccatg

SEQ ID NO: 1552699 - DNA, 15 bp, Homo sapiens
cttctatacctccat

SEQ ID NO: 1552700 - DNA, 15 bp, Homo sapiens
gcttctatacctcca

SEQ ID NO: 1552701 - DNA, 15 bp, Homo sapiens
ggcttctatacctcc

SEQ ID NO: 1552702 - DNA, 15 bp, Homo sapiens
tggcttctatacctc

SEQ ID NO: 1552703 - DNA, 15 bp, Homo sapiens
ttggcttctatacct

SEQ ID NO: 1552704 - DNA, 15 bp, Homo sapiens
tttggcttctatacc

SEQ ID NO: 1552705 - DNA, 15 bp, Homo sapiens
ttttggcttctatac

SEQ ID NO: 1552706 - DNA, 15 bp, Homo sapiens
attttggcttctata

SEQ ID NO: 1552707 - DNA, 15 bp, Homo sapiens
cattttggcttctat

SEQ ID NO: 1552708 - DNA, 15 bp, Homo sapiens
tcattttggcttcta

SEQ ID NO: 1552709 - DNA, 15 bp, Homo sapiens
atcattttggcttct

SEQ ID NO: 1552710 - DNA, 15 bp, Homo sapiens
tatcattttggcttc

SEQ ID NO: 1552711 - DNA, 15 bp, Homo sapiens
ttatcattttggctt

SEQ ID NO: 1552712 - DNA, 15 bp, Homo sapiens
cttatcattttggct

SEQ ID NO: 1552713 - DNA, 15 bp, Homo sapiens
tcttatcattttggc

SEQ ID NO: 1552714 - DNA, 15 bp, Homo sapiens
ttcttatcattttgg

SEQ ID NO: 1552715 - DNA, 15 bp, Homo sapiens
tttcttatcattttg

SEQ ID NO: 1552716 - DNA, 15 bp, Homo sapiens
gtttcttatcatttt

SEQ ID NO: 1552717 - DNA, 15 bp, Homo sapiens
agtttcttatcattt

SEQ ID NO: 1552718 - DNA, 15 bp, Homo sapiens
tagtttcttatcatt

SEQ ID NO: 1552719 - DNA, 15 bp, Homo sapiens
ttagtttcttatcat

SEQ ID NO: 1552720 - DNA, 15 bp, Homo sapiens
cttagtttcttatca

SEQ ID NO: 1552721 - DNA, 15 bp, Homo sapiens
acttagtttcttatc

SEQ ID NO: 1552722 - DNA, 15 bp, Homo sapiens
aacttagtttcttat

SEQ ID NO: 1552723 - DNA, 15 bp, Homo sapiens
taacttagtttctta

SEQ ID NO: 1552724 - DNA, 15 bp, Homo sapiens
ttaacttagtttctt

SEQ ID NO: 1552725 - DNA, 15 bp, Homo sapiens
tttaacttagtttct

SEQ ID NO: 1552726 - DNA, 15 bp, Homo sapiens
ttttaacttagtttc

SEQ ID NO: 1552727 - DNA, 15 bp, Homo sapiens
attttaacttagttt

SEQ ID NO: 1552728 - DNA, 15 bp, Homo sapiens
gattttaacttagtt

SEQ ID NO: 1552729 - DNA, 15 bp, Homo sapiens
agattttaacttagt

SEQ ID NO: 1552730 - DNA, 15 bp, Homo sapiens
aagattttaacttag

SEQ ID NO: 1552731 - DNA, 15 bp, Homo sapiens
aaagattttaactta

SEQ ID NO: 1552732 - DNA, 15 bp, Homo sapiens
aaaagattttaactt

SEQ ID NO: 1552733 - DNA, 15 bp, Homo sapiens
aaaaagattttaact

SEQ ID NO: 1552734 - DNA, 15 bp, Homo sapiens
aaaaaagattttaac

SEQ ID NO: 1552735 - DNA, 15 bp, Homo sapiens
aaaaaaagattttaa

SEQ ID NO: 1552736 - DNA, 15 bp, Homo sapiens
taaaaaaagatttta

SEQ ID NO: 1552737 - DNA, 15 bp, Homo sapiens
ttaaaaaaagatttt

SEQ ID NO: 1552738 - DNA, 15 bp, Homo sapiens
tttaaaaaaagattt

SEQ ID NO: 1552739 - DNA, 15 bp, Homo sapiens
ttttaaaaaaagatt

SEQ ID NO: 1552740 - DNA, 15 bp, Homo sapiens
atatttttaaaaaaa

SEQ ID NO: 1552741 - DNA, 15 bp, Homo sapiens
catatttttaaaaaa

SEQ ID NO: 1552742 - DNA, 15 bp, Homo sapiens
acatatttttaaaaa

SEQ ID NO: 1552743 - DNA, 15 bp, Homo sapiens
aacatatttttaaaa

SEQ ID NO: 1552744 - DNA, 15 bp, Homo sapiens
taacatatttttaaa

SEQ ID NO: 1552745 - DNA, 15 bp, Homo sapiens
ttaacatatttttaa

SEQ ID NO: 1552746 - DNA, 15 bp, Homo sapiens
attaacatattttta

SEQ ID NO: 1552747 - DNA, 15 bp, Homo sapiens
tattaacatattttt

SEQ ID NO: 1552748 - DNA, 15 bp, Homo sapiens
gtattaacatatttt

SEQ ID NO: 1552749 - DNA, 15 bp, Homo sapiens
agtattaacatattt

SEQ ID NO: 1552750 - DNA, 15 bp, Homo sapiens
tagtattaacatatt

SEQ ID NO: 1552751 - DNA, 15 bp, Homo sapiens
atagtattaacatat

SEQ ID NO: 1552752 - DNA, 15 bp, Homo sapiens
tatagtattaacata

SEQ ID NO: 1552753 - DNA, 15 bp, Homo sapiens
atatagtattaacat

SEQ ID NO: 1552754 - DNA, 15 bp, Homo sapiens
tatatagtattaaca

SEQ ID NO: 1552755 - DNA, 15 bp, Homo sapiens
ctatatagtattaac

SEQ ID NO: 1552756 - DNA, 15 bp, Homo sapiens
tctatatagtattaa

SEQ ID NO: 1552757 - DNA, 15 bp, Homo sapiens
ttctatatagtatta

SEQ ID NO: 1552758 - DNA, 15 bp, Homo sapiens
cttctatatagtatt

SEQ ID NO: 1552759 - DNA, 15 bp, Homo sapiens
tcttctatatagtat

SEQ ID NO: 1552760 - DNA, 15 bp, Homo sapiens
ttcttctatatagta

SEQ ID NO: 1552761 - DNA, 15 bp, Homo sapiens
tttcttctatatagt

SEQ ID NO: 1552762 - DNA, 15 bp, Homo sapiens
atttcttctatatag

SEQ ID NO: 1552763 - DNA, 15 bp, Homo sapiens
tatttcttctatata

SEQ ID NO: 1552764 - DNA, 15 bp, Homo sapiens
atatttcttctatat

SEQ ID NO: 1552765 - DNA, 15 bp, Homo sapiens
aatatttcttctata

SEQ ID NO: 1552766 - DNA, 15 bp, Homo sapiens
caatatttcttctat

SEQ ID NO: 1552767 - DNA, 15 bp, Homo sapiens
ccaatatttcttcta

SEQ ID NO: 1552768 - DNA, 15 bp, Homo sapiens
accaatatttcttct

SEQ ID NO: 1552769 - DNA, 15 bp, Homo sapiens
aaccaatatttcttc

SEQ ID NO: 1552770 - DNA, 15 bp, Homo sapiens
aaaccaatatttctt

SEQ ID NO: 1552771 - DNA, 15 bp, Homo sapiens
taaaccaatatttct

SEQ ID NO: 1552772 - DNA, 15 bp, Homo sapiens
ataaaccaatatttc

SEQ ID NO: 1552773 - DNA, 15 bp, Homo sapiens
aataaaccaatattt

SEQ ID NO: 1552774 - DNA, 15 bp, Homo sapiens
caataaaccaatatt

SEQ ID NO: 1552775 - DNA, 15 bp, Homo sapiens
acaataaaccaatat

SEQ ID NO: 1552776 - DNA, 15 bp, Homo sapiens
cacaataaaccaata

SEQ ID NO: 1552777 - DNA, 15 bp, Homo sapiens
gcacaataaaccaat

SEQ ID NO: 1552778 - DNA, 15 bp, Homo sapiens
agcacaataaaccaa

SEQ ID NO: 1552779 - DNA, 15 bp, Homo sapiens
tagcacaataaacca

SEQ ID NO: 1552780 - DNA, 15 bp, Homo sapiens
atagcacaataaacc

SEQ ID NO: 1552781 - DNA, 15 bp, Homo sapiens
aatagcacaataaac

SEQ ID NO: 1552782 - DNA, 15 bp, Homo sapiens
aaatagcacaataaa

SEQ ID NO: 1552783 - DNA, 15 bp, Homo sapiens
aaaatagcacaataa

SEQ ID NO: 1552784 - DNA, 15 bp, Homo sapiens
caaaatagcacaata

SEQ ID NO: 1552785 - DNA, 15 bp, Homo sapiens
acaaaatagcacaat

SEQ ID NO: 1552786 - DNA, 15 bp, Homo sapiens
tacaaaatagcacaa

SEQ ID NO: 1552787 - DNA, 15 bp, Homo sapiens
gtacaaaatagcaca

SEQ ID NO: 1552788 - DNA, 15 bp, Homo sapiens
agtacaaaatagcac

SEQ ID NO: 1552789 - DNA, 15 bp, Homo sapiens
aagtacaaaatagca

SEQ ID NO: 1552790 - DNA, 15 bp, Homo sapiens
taagtacaaaatagc

SEQ ID NO: 1552791 - DNA, 15 bp, Homo sapiens
ttaagtacaaaatag

SEQ ID NO: 1552792 - DNA, 15 bp, Homo sapiens
attaagtacaaaata

SEQ ID NO: 1552793 - DNA, 15 bp, Homo sapiens
cattaagtacaaaat

SEQ ID NO: 1552794 - DNA, 15 bp, Homo sapiens
gcattaagtacaaaa

SEQ ID NO: 1552795 - DNA, 15 bp, Homo sapiens
agcattaagtacaaa

SEQ ID NO: 1552796 - DNA, 15 bp, Homo sapiens
aagcattaagtacaa

SEQ ID NO: 1552797 - DNA, 15 bp, Homo sapiens
taagcattaagtaca

SEQ ID NO: 1552798 - DNA, 15 bp, Homo sapiens
ttaagcattaagtac

SEQ ID NO: 1552799 - DNA, 15 bp, Homo sapiens
tttaagcattaagta

SEQ ID NO: 1552800 - DNA, 15 bp, Homo sapiens
atttaagcattaagt

SEQ ID NO: 1552801 - DNA, 15 bp, Homo sapiens
tatttaagcattaag

SEQ ID NO: 1552802 - DNA, 15 bp, Homo sapiens
ttatttaagcattaa

SEQ ID NO: 1552803 - DNA, 15 bp, Homo sapiens
tttatttaagcatta

SEQ ID NO: 1552804 - DNA, 15 bp, Homo sapiens
ttttatttaagcatt

SEQ ID NO: 1552805 - DNA, 15 bp, Homo sapiens
tttttatttaagcat

SEQ ID NO: 1552806 - DNA, 15 bp, Homo sapiens
gtttttatttaagca

SEQ ID NO: 1552807 - DNA, 15 bp, Homo sapiens
tgtttttatttaagc

SEQ ID NO: 1552808 - DNA, 15 bp, Homo sapiens
gtgtttttatttaag

SEQ ID NO: 1552809 - DNA, 15 bp, Homo sapiens
agtgtttttatttaa

SEQ ID NO: 1552810 - DNA, 15 bp, Homo sapiens
aagtgtttttattta

SEQ ID NO: 1552811 - DNA, 15 bp, Homo sapiens
caagtgtttttattt

SEQ ID NO: 1552812 - DNA, 15 bp, Homo sapiens
gcaagtgtttttatt

SEQ ID NO: 1552813 - DNA, 15 bp, Homo sapiens
tgcaagtgtttttat

SEQ ID NO: 1552814 - DNA, 15 bp, Homo sapiens
atgcaagtgttttta

SEQ ID NO: 1552815 - DNA, 15 bp, Homo sapiens
catgcaagtgttttt

SEQ ID NO: 1552816 - DNA, 15 bp, Homo sapiens
ccatgcaagtgtttt

SEQ ID NO: 1552817 - DNA, 15 bp, Homo sapiens
tccatgcaagtgttt

SEQ ID NO: 1552818 - DNA, 15 bp, Homo sapiens
gtccatgcaagtgtt

SEQ ID NO: 1552819 - DNA, 15 bp, Homo sapiens
agtccatgcaagtgt

SEQ ID NO: 1552820 - DNA, 15 bp, Homo sapiens
cagtccatgcaagtg

SEQ ID NO: 1552821 - DNA, 15 bp, Homo sapiens
acagtccatgcaagt

SEQ ID NO: 1552822 - DNA, 15 bp, Homo sapiens
cacagtccatgcaag

SEQ ID NO: 1552823 - DNA, 15 bp, Homo sapiens
acacagtccatgcaa

SEQ ID NO: 1552824 - DNA, 15 bp, Homo sapiens
aacacagtccatgca

SEQ ID NO: 1552825 - DNA, 15 bp, Homo sapiens
taacacagtccatgc

SEQ ID NO: 1552826 - DNA, 15 bp, Homo sapiens
ataacacagtccatg

SEQ ID NO: 1552827 - DNA, 15 bp, Homo sapiens
aataacacagtccat

SEQ ID NO: 1552828 - DNA, 15 bp, Homo sapiens
caataacacagtcca

SEQ ID NO: 1552829 - DNA, 15 bp, Homo sapiens
ccaataacacagtcc

SEQ ID NO: 1552830 - DNA, 15 bp, Homo sapiens
accaataacacagtc

SEQ ID NO: 1552831 - DNA, 15 bp, Homo sapiens
taccaataacacagt

SEQ ID NO: 1552832 - DNA, 15 bp, Homo sapiens
ttaccaataacacag

SEQ ID NO: 1552833 - DNA, 15 bp, Homo sapiens
gttaccaataacaca

SEQ ID NO: 1552834 - DNA, 15 bp, Homo sapiens
tgttaccaataacac

SEQ ID NO: 1552835 - DNA, 15 bp, Homo sapiens
ctgttaccaataaca

SEQ ID NO: 1552836 - DNA, 15 bp, Homo sapiens
cctgttaccaataac

SEQ ID NO: 1552837 - DNA, 15 bp, Homo sapiens
acctgttaccaataa

SEQ ID NO: 1552838 - DNA, 15 bp, Homo sapiens
gacctgttaccaata

SEQ ID NO: 1552839 - DNA, 15 bp, Homo sapiens
tgacctgttaccaat

SEQ ID NO: 1552840 - DNA, 15 bp, Homo sapiens
gtgacctgttaccaa

SEQ ID NO: 1552841 - DNA, 15 bp, Homo sapiens
agtgacctgttacca

SEQ ID NO: 1552842 - DNA, 15 bp, Homo sapiens
aagtgacctgttacc

SEQ ID NO: 1552843 - DNA, 15 bp, Homo sapiens
taagtgacctgttac

SEQ ID NO: 1552844 - DNA, 15 bp, Homo sapiens
ttaagtgacctgtta

SEQ ID NO: 1552845 - DNA, 15 bp, Homo sapiens
attaagtgacctgtt

SEQ ID NO: 1552846 - DNA, 15 bp, Homo sapiens
cattaagtgacctgt

SEQ ID NO: 1552847 - DNA, 15 bp, Homo sapiens
tcattaagtgacctg

SEQ ID NO: 1552848 - DNA, 15 bp, Homo sapiens
gtcattaagtgacct

SEQ ID NO: 1552849 - DNA, 15 bp, Homo sapiens
tgtcattaagtgacc

SEQ ID NO: 1552850 - DNA, 15 bp, Homo sapiens
atgtcattaagtgac

SEQ ID NO: 1552851 - DNA, 15 bp, Homo sapiens
gatgtcattaagtga

SEQ ID NO: 1552852 - DNA, 15 bp, Homo sapiens
tgatgtcattaagtg

SEQ ID NO: 1552853 - DNA, 15 bp, Homo sapiens
atgatgtcattaagt

SEQ ID NO: 1552854 - DNA, 15 bp, Homo sapiens
tatgatgtcattaag

SEQ ID NO: 1552855 - DNA, 15 bp, Homo sapiens
ttatgatgtcattaa

SEQ ID NO: 1552856 - DNA, 15 bp, Homo sapiens
attatgatgtcatta

SEQ ID NO: 1552857 - DNA, 15 bp, Homo sapiens
tattatgatgtcatt

SEQ ID NO: 1552858 - DNA, 15 bp, Homo sapiens
ttattatgatgtcat

SEQ ID NO: 1552859 - DNA, 15 bp, Homo sapiens
tttattatgatgtca

SEQ ID NO: 1552860 - DNA, 15 bp, Homo sapiens
gtttattatgatgtc

SEQ ID NO: 1552861 - DNA, 15 bp, Homo sapiens
tgtttattatgatgt

SEQ ID NO: 1552862 - DNA, 15 bp, Homo sapiens
atgtttattatgatg

SEQ ID NO: 1552863 - DNA, 15 bp, Homo sapiens
aatgtttattatgat

SEQ ID NO: 1552864 - DNA, 15 bp, Homo sapiens
taatgtttattatga

SEQ ID NO: 1552865 - DNA, 15 bp, Homo sapiens
ataatgtttattatg

SEQ ID NO: 1552866 - DNA, 15 bp, Homo sapiens
aataatgtttattat

SEQ ID NO: 1552867 - DNA, 15 bp, Homo sapiens
aaataatgtttatta

SEQ ID NO: 1552868 - DNA, 15 bp, Homo sapiens
taaataatgtttatt

SEQ ID NO: 1552869 - DNA, 15 bp, Homo sapiens
ttaaataatgtttat

SEQ ID NO: 1552870 - DNA, 15 bp, Homo sapiens
tttaaataatgttta

SEQ ID NO: 1552871 - DNA, 15 bp, Homo sapiens
gtttaaataatgttt

SEQ ID NO: 1552872 - DNA, 15 bp, Homo sapiens
tgtttaaataatgtt

SEQ ID NO: 1552873 - DNA, 15 bp, Homo sapiens
ctgtttaaataatgt

SEQ ID NO: 1552874 - DNA, 15 bp, Homo sapiens
actgtttaaataatg

SEQ ID NO: 1552875 - DNA, 15 bp, Homo sapiens
aactgtttaaataat

SEQ ID NO: 1552876 - DNA, 15 bp, Homo sapiens
gaactgtttaaataa

SEQ ID NO: 1552877 - DNA, 15 bp, Homo sapiens
agaactgtttaaata

SEQ ID NO: 1552878 - DNA, 15 bp, Homo sapiens
tagaactgtttaaat

SEQ ID NO: 1552879 - DNA, 15 bp, Homo sapiens
ttagaactgtttaaa

SEQ ID NO: 1552880 - DNA, 15 bp, Homo sapiens
tttagaactgtttaa

SEQ ID NO: 1552881 - DNA, 15 bp, Homo sapiens
ttttagaactgttta

SEQ ID NO: 1552882 - DNA, 15 bp, Homo sapiens
tttttagaactgttt

SEQ ID NO: 1552883 - DNA, 15 bp, Homo sapiens
gtttttagaactgtt

SEQ ID NO: 1552884 - DNA, 15 bp, Homo sapiens
tgtttttagaactgt

SEQ ID NO: 1552885 - DNA, 15 bp, Homo sapiens
atgtttttagaactg

SEQ ID NO: 1552886 - DNA, 15 bp, Homo sapiens
aatgtttttagaact

SEQ ID NO: 1552887 - DNA, 15 bp, Homo sapiens
aaatgtttttagaac

SEQ ID NO: 1552888 - DNA, 15 bp, Homo sapiens
taaatgtttttagaa

SEQ ID NO: 1552889 - DNA, 15 bp, Homo sapiens
ataaatgtttttaga

SEQ ID NO: 1552890 - DNA, 15 bp, Homo sapiens
cataaatgtttttag

SEQ ID NO: 1552891 - DNA, 15 bp, Homo sapiens
acataaatgttttta

SEQ ID NO: 1552892 - DNA, 15 bp, Homo sapiens
tacataaatgttttt

SEQ ID NO: 1552893 - DNA, 15 bp, Homo sapiens
gtacataaatgtttt

SEQ ID NO: 1552894 - DNA, 15 bp, Homo sapiens
tgtacataaatgttt

SEQ ID NO: 1552895 - DNA, 15 bp, Homo sapiens
ttgtacataaatgtt

SEQ ID NO: 1552896 - DNA, 15 bp, Homo sapiens
attgtacataaatgt

SEQ ID NO: 1552897 - DNA, 15 bp, Homo sapiens
tattgtacataaatg

SEQ ID NO: 1552898 - DNA, 15 bp, Homo sapiens
atattgtacataaat

SEQ ID NO: 1552899 - DNA, 15 bp, Homo sapiens
catattgtacataaa

SEQ ID NO: 1552900 - DNA, 15 bp, Homo sapiens
acatattgtacataa

SEQ ID NO: 1552901 - DNA, 15 bp, Homo sapiens
tacatattgtacata

SEQ ID NO: 1552902 - DNA, 15 bp, Homo sapiens
atacatattgtacat

SEQ ID NO: 1552903 - DNA, 15 bp, Homo sapiens
aatacatattgtaca

SEQ ID NO: 1552904 - DNA, 15 bp, Homo sapiens
gaatacatattgtac

SEQ ID NO: 1552905 - DNA, 15 bp, Homo sapiens
tgaatacatattgta

SEQ ID NO: 1552906 - DNA, 15 bp, Homo sapiens
ctgaatacatattgt

SEQ ID NO: 1552907 - DNA, 15 bp, Homo sapiens
tctgaatacatattg

SEQ ID NO: 1552908 - DNA, 15 bp, Homo sapiens
ctctgaatacatatt

SEQ ID NO: 1552909 - DNA, 15 bp, Homo sapiens
actctgaatacatat

SEQ ID NO: 1552910 - DNA, 15 bp, Homo sapiens
tactctgaatacata

SEQ ID NO: 1552911 - DNA, 15 bp, Homo sapiens
atactctgaatacat

SEQ ID NO: 1552912 - DNA, 15 bp, Homo sapiens
gatactctgaataca

SEQ ID NO: 1552913 - DNA, 15 bp, Homo sapiens
ggatactctgaatac

SEQ ID NO: 1552914 - DNA, 15 bp, Homo sapiens
gggatactctgaata

SEQ ID NO: 1552915 - DNA, 15 bp, Homo sapiens
ggggatactctgaat

SEQ ID NO: 1552916 - DNA, 15 bp, Homo sapiens
aggggatactctgaa

SEQ ID NO: 1552917 - DNA, 15 bp, Homo sapiens
aaggggatactctga

SEQ ID NO: 1552918 - DNA, 15 bp, Homo sapiens
aaaggggatactctg

SEQ ID NO: 1552919 - DNA, 15 bp, Homo sapiens
aaaaggggatactct

SEQ ID NO: 1552920 - DNA, 15 bp, Homo sapiens
aaaaaggggatactc

SEQ ID NO: 1552921 - DNA, 15 bp, Homo sapiens
aaaaaaggggatact

SEQ ID NO: 1552922 - DNA, 15 bp, Homo sapiens
taaaaaaggggatac

SEQ ID NO: 1552923 - DNA, 15 bp, Homo sapiens
ctaaaaaaggggata

SEQ ID NO: 1552924 - DNA, 15 bp, Homo sapiens
cctaaaaaaggggat

SEQ ID NO: 1552925 - DNA, 15 bp, Homo sapiens
gcctaaaaaagggga

SEQ ID NO: 1552926 - DNA, 15 bp, Homo sapiens
tgcctaaaaaagggg

SEQ ID NO: 1552927 - DNA, 15 bp, Homo sapiens
atgcctaaaaaaggg

SEQ ID NO: 1552928 - DNA, 15 bp, Homo sapiens
catgcctaaaaaagg

SEQ ID NO: 1552929 - DNA, 15 bp, Homo sapiens
gcatgcctaaaaaag

SEQ ID NO: 1552930 - DNA, 15 bp, Homo sapiens
tgcatgcctaaaaaa

SEQ ID NO: 1552931 - DNA, 15 bp, Homo sapiens
atgcatgcctaaaaa

SEQ ID NO: 1552932 - DNA, 15 bp, Homo sapiens
catgcatgcctaaaa

SEQ ID NO: 1552933 - DNA, 15 bp, Homo sapiens
tcatgcatgcctaaa

SEQ ID NO: 1552934 - DNA, 15 bp, Homo sapiens
ctcatgcatgcctaa

SEQ ID NO: 1552935 - DNA, 15 bp, Homo sapiens
tctcatgcatgccta

SEQ ID NO: 1552936 - DNA, 15 bp, Homo sapiens
ctctcatgcatgcct

SEQ ID NO: 1552937 - DNA, 15 bp, Homo sapiens
tctctcatgcatgcc

SEQ ID NO: 1552938 - DNA, 15 bp, Homo sapiens
atctctcatgcatgc

SEQ ID NO: 1552939 - DNA, 15 bp, Homo sapiens
tatctctcatgcatg

SEQ ID NO: 1552940 - DNA, 15 bp, Homo sapiens
atatctctcatgcat

SEQ ID NO: 1552941 - DNA, 15 bp, Homo sapiens
aatatctctcatgca

SEQ ID NO: 1552942 - DNA, 15 bp, Homo sapiens
gaatatctctcatgc

SEQ ID NO: 1552943 - DNA, 15 bp, Homo sapiens
ggaatatctctcatg

SEQ ID NO: 1552944 - DNA, 15 bp, Homo sapiens
tggaatatctctcat

SEQ ID NO: 1552945 - DNA, 15 bp, Homo sapiens
ttggaatatctctca

SEQ ID NO: 1552946 - DNA, 15 bp, Homo sapiens
gttggaatatctctc

SEQ ID NO: 1552947 - DNA, 15 bp, Homo sapiens
cgttggaatatctct

SEQ ID NO: 1552948 - DNA, 15 bp, Homo sapiens
acgttggaatatctc

SEQ ID NO: 1552949 - DNA, 15 bp, Homo sapiens
cacgttggaatatct

SEQ ID NO: 1552950 - DNA, 15 bp, Homo sapiens
gcacgttggaatatc

SEQ ID NO: 1552951 - DNA, 15 bp, Homo sapiens
tgcacgttggaatat

SEQ ID NO: 1552952 - DNA, 15 bp, Homo sapiens
ttgcacgttggaata

SEQ ID NO: 1552953 - DNA, 15 bp, Homo sapiens
cttgcacgttggaat

SEQ ID NO: 1552954 - DNA, 15 bp, Homo sapiens
acttgcacgttggaa

SEQ ID NO: 1552955 - DNA, 15 bp, Homo sapiens
cacttgcacgttgga

SEQ ID NO: 1552956 - DNA, 15 bp, Homo sapiens
ccacttgcacgttgg

SEQ ID NO: 1552957 - DNA, 15 bp, Homo sapiens
gccacttgcacgttg

SEQ ID NO: 1552958 - DNA, 15 bp, Homo sapiens
agccacttgcacgtt

SEQ ID NO: 1552959 - DNA, 15 bp, Homo sapiens
cagccacttgcacgt

SEQ ID NO: 1552960 - DNA, 15 bp, Homo sapiens
ccagccacttgcacg

SEQ ID NO: 1552961 - DNA, 15 bp, Homo sapiens
tccagccacttgcac

SEQ ID NO: 1552962 - DNA, 15 bp, Homo sapiens
gtccagccacttgca

SEQ ID NO: 1552963 - DNA, 15 bp, Homo sapiens
ggtccagccacttgc

SEQ ID NO: 1552964 - DNA, 15 bp, Homo sapiens
tggtccagccacttg

SEQ ID NO: 1552965 - DNA, 15 bp, Homo sapiens
ctggtccagccactt

SEQ ID NO: 1552966 - DNA, 15 bp, Homo sapiens
actggtccagccact

SEQ ID NO: 1552967 - DNA, 15 bp, Homo sapiens
cactggtccagccac

SEQ ID NO: 1552968 - DNA, 15 bp, Homo sapiens
ccactggtccagcca

SEQ ID NO: 1552969 - DNA, 15 bp, Homo sapiens
tccactggtccagcc

SEQ ID NO: 1552970 - DNA, 15 bp, Homo sapiens
gtccactggtccagc

SEQ ID NO: 1552971 - DNA, 15 bp, Homo sapiens
tgtccactggtccag

SEQ ID NO: 1552972 - DNA, 15 bp, Homo sapiens
ctgtccactggtcca

SEQ ID NO: 1552973 - DNA, 15 bp, Homo sapiens
tctgtccactggtcc

SEQ ID NO: 1552974 - DNA, 15 bp, Homo sapiens
ttctgtccactggtc

SEQ ID NO: 1552975 - DNA, 15 bp, Homo sapiens
gttctgtccactggt

SEQ ID NO: 1552976 - DNA, 15 bp, Homo sapiens
agttctgtccactgg

SEQ ID NO: 1552977 - DNA, 15 bp, Homo sapiens
tagttctgtccactg

SEQ ID NO: 1552978 - DNA, 15 bp, Homo sapiens
ctagttctgtccact

SEQ ID NO: 1552979 - DNA, 15 bp, Homo sapiens
gctagttctgtccac

SEQ ID NO: 1552980 - DNA, 15 bp, Homo sapiens
agctagttctgtcca

SEQ ID NO: 1552981 - DNA, 15 bp, Homo sapiens
gagctagttctgtcc

SEQ ID NO: 1552982 - DNA, 15 bp, Homo sapiens
tgagctagttctgtc

SEQ ID NO: 1552983 - DNA, 15 bp, Homo sapiens
ttgagctagttctgt

SEQ ID NO: 1552984 - DNA, 15 bp, Homo sapiens
tttgagctagttctg

SEQ ID NO: 1552985 - DNA, 15 bp, Homo sapiens
ctttgagctagttct

SEQ ID NO: 1552986 - DNA, 15 bp, Homo sapiens
cctttgagctagttc

SEQ ID NO: 1552987 - DNA, 15 bp, Homo sapiens
acctttgagctagtt

SEQ ID NO: 1552988 - DNA, 15 bp, Homo sapiens
tacctttgagctagt

SEQ ID NO: 1552989 - DNA, 15 bp, Homo sapiens
atacctttgagctag

SEQ ID NO: 1552990 - DNA, 15 bp, Homo sapiens
catacctttgagcta

SEQ ID NO: 1552991 - DNA, 15 bp, Homo sapiens
acatacctttgagct

SEQ ID NO: 1552992 - DNA, 15 bp, Homo sapiens
gacatacctttgagc

SEQ ID NO: 1552993 - DNA, 15 bp, Homo sapiens
ggacatacctttgag

SEQ ID NO: 1552994 - DNA, 15 bp, Homo sapiens
aggacatacctttga

SEQ ID NO: 1552995 - DNA, 15 bp, Homo sapiens
taggacatacctttg

SEQ ID NO: 1552996 - DNA, 15 bp, Homo sapiens
ttaggacataccttt

SEQ ID NO: 1552997 - DNA, 15 bp, Homo sapiens
tttaggacatacctt

SEQ ID NO: 1552998 - DNA, 15 bp, Homo sapiens
atttaggacatacct

SEQ ID NO: 1552999 - DNA, 15 bp, Homo sapiens
aatttaggacatacc

SEQ ID NO: 1553000 - DNA, 15 bp, Homo sapiens
taatttaggacatac

SEQ ID NO: 1553001 - DNA, 15 bp, Homo sapiens
ttaatttaggacata

SEQ ID NO: 1553002 - DNA, 15 bp, Homo sapiens
tttaatttaggacat

SEQ ID NO: 1553003 - DNA, 15 bp, Homo sapiens
atttaatttaggaca

SEQ ID NO: 1553004 - DNA, 15 bp, Homo sapiens
tatttaatttaggac

SEQ ID NO: 1553005 - DNA, 15 bp, Homo sapiens
atatttaatttagga

SEQ ID NO: 1553006 - DNA, 15 bp, Homo sapiens
tatatttaatttagg

SEQ ID NO: 1553007 - DNA, 15 bp, Homo sapiens
ttatatttaatttag

SEQ ID NO: 1553008 - DNA, 15 bp, Homo sapiens
acttatatttaattt

SEQ ID NO: 1553009 - DNA, 15 bp, Homo sapiens
aacttatatttaatt

SEQ ID NO: 1553010 - DNA, 15 bp, Homo sapiens
caacttatatttaat

SEQ ID NO: 1553011 - DNA, 15 bp, Homo sapiens
acaacttatatttaa

SEQ ID NO: 1553012 - DNA, 15 bp, Homo sapiens
tacaacttatattta

SEQ ID NO: 1553013 - DNA, 15 bp, Homo sapiens
ttacaacttatattt

SEQ ID NO: 1553014 - DNA, 15 bp, Homo sapiens
tttacaacttatatt

SEQ ID NO: 1553015 - DNA, 15 bp, Homo sapiens
ttttacaacttatat

SEQ ID NO: 1553016 - DNA, 15 bp, Homo sapiens
tttttacaacttata

SEQ ID NO: 1553017 - DNA, 15 bp, Homo sapiens
atttttacaacttat

SEQ ID NO: 1553018 - DNA, 15 bp, Homo sapiens
tatttttacaactta

SEQ ID NO: 1553019 - DNA, 15 bp, Homo sapiens
atatttttacaactt

SEQ ID NO: 1553020 - DNA, 15 bp, Homo sapiens
catatttttacaact

SEQ ID NO: 1553021 - DNA, 15 bp, Homo sapiens
gcatatttttacaac

SEQ ID NO: 1553022 - DNA, 15 bp, Homo sapiens
tgcatatttttacaa

SEQ ID NO: 1553023 - DNA, 15 bp, Homo sapiens
atgcatatttttaca

SEQ ID NO: 1553024 - DNA, 15 bp, Homo sapiens
tatgcatatttttac

SEQ ID NO: 1553025 - DNA, 15 bp, Homo sapiens
atatgcatattttta

SEQ ID NO: 1553026 - DNA, 15 bp, Homo sapiens
aatatgcatattttt

SEQ ID NO: 1553027 - DNA, 15 bp, Homo sapiens
caatatgcatatttt

SEQ ID NO: 1553028 - DNA, 15 bp, Homo sapiens
acaatatgcatattt

SEQ ID NO: 1553029 - DNA, 15 bp, Homo sapiens
aacaatatgcatatt

SEQ ID NO: 1553030 - DNA, 15 bp, Homo sapiens
caacaatatgcatat

SEQ ID NO: 1553031 - DNA, 15 bp, Homo sapiens
tcaacaatatgcata

SEQ ID NO: 1553032 - DNA, 15 bp, Homo sapiens
ttcaacaatatgcat

SEQ ID NO: 1553033 - DNA, 15 bp, Homo sapiens
tttcaacaatatgca

SEQ ID NO: 1553034 - DNA, 15 bp, Homo sapiens
ttttcaacaatatgc

SEQ ID NO: 1553035 - DNA, 15 bp, Homo sapiens
attttcaacaatatg

SEQ ID NO: 1553036 - DNA, 15 bp, Homo sapiens
tattttcaacaatat

SEQ ID NO: 1553037 - DNA, 15 bp, Homo sapiens
gtattttcaacaata

SEQ ID NO: 1553038 - DNA, 15 bp, Homo sapiens
tgtattttcaacaat

SEQ ID NO: 1553039 - DNA, 15 bp, Homo sapiens
ctgtattttcaacaa

SEQ ID NO: 1553040 - DNA, 15 bp, Homo sapiens
gctgtattttcaaca

SEQ ID NO: 1553041 - DNA, 15 bp, Homo sapiens
agctgtattttcaac

SEQ ID NO: 1553042 - DNA, 15 bp, Homo sapiens
tagctgtattttcaa

SEQ ID NO: 1553043 - DNA, 15 bp, Homo sapiens
atagctgtattttca

SEQ ID NO: 1553044 - DNA, 15 bp, Homo sapiens
aatagctgtattttc

SEQ ID NO: 1553045 - DNA, 15 bp, Homo sapiens
taatagctgtatttt

SEQ ID NO: 1553046 - DNA, 15 bp, Homo sapiens
gtaatagctgtattt

SEQ ID NO: 1553047 - DNA, 15 bp, Homo sapiens
agtaatagctgtatt

SEQ ID NO: 1553048 - DNA, 15 bp, Homo sapiens
cagtaatagctgtat

SEQ ID NO: 1553049 - DNA, 15 bp, Homo sapiens
acagtaatagctgta

SEQ ID NO: 1553050 - DNA, 15 bp, Homo sapiens
tacagtaatagctgt

SEQ ID NO: 1553051 - DNA, 15 bp, Homo sapiens
atacagtaatagctg

SEQ ID NO: 1553052 - DNA, 15 bp, Homo sapiens
catacagtaatagct

SEQ ID NO: 1553053 - DNA, 15 bp, Homo sapiens
tcatacagtaatagc

SEQ ID NO: 1553054 - DNA, 15 bp, Homo sapiens
atcatacagtaatag

SEQ ID NO: 1553055 - DNA, 15 bp, Homo sapiens
gatcatacagtaata

SEQ ID NO: 1553056 - DNA, 15 bp, Homo sapiens
tgatcatacagtaat

SEQ ID NO: 1553057 - DNA, 15 bp, Homo sapiens
ttgatcatacagtaa

SEQ ID NO: 1553058 - DNA, 15 bp, Homo sapiens
attgatcatacagta

SEQ ID NO: 1553059 - DNA, 15 bp, Homo sapiens
cattgatcatacagt

SEQ ID NO: 1553060 - DNA, 15 bp, Homo sapiens
acattgatcatacag

SEQ ID NO: 1553061 - DNA, 15 bp, Homo sapiens
aacattgatcataca

SEQ ID NO: 1553062 - DNA, 15 bp, Homo sapiens
taacattgatcatac

SEQ ID NO: 1553063 - DNA, 15 bp, Homo sapiens
ataacattgatcata

SEQ ID NO: 1553064 - DNA, 15 bp, Homo sapiens
tataacattgatcat

SEQ ID NO: 1553065 - DNA, 15 bp, Homo sapiens
ttataacattgatca

SEQ ID NO: 1553066 - DNA, 15 bp, Homo sapiens
attataacattgatc

SEQ ID NO: 1553067 - DNA, 15 bp, Homo sapiens
aattataacattgat

SEQ ID NO: 1553068 - DNA, 15 bp, Homo sapiens
aaattataacattga

SEQ ID NO: 1553069 - DNA, 15 bp, Homo sapiens
taaattataacattg

SEQ ID NO: 1553070 - DNA, 15 bp, Homo sapiens
ataaattataacatt

SEQ ID NO: 1553071 - DNA, 15 bp, Homo sapiens
aataaattataacat

SEQ ID NO: 1553072 - DNA, 15 bp, Homo sapiens
taataaattataaca

SEQ ID NO: 1553073 - DNA, 15 bp, Homo sapiens
ataataaattataac

SEQ ID NO: 1553074 - DNA, 15 bp, Homo sapiens
aataataaattataa

SEQ ID NO: 1553075 - DNA, 15 bp, Homo sapiens
aaataataaattata

SEQ ID NO: 1553076 - DNA, 15 bp, Homo sapiens
taaataataaattat

SEQ ID NO: 1553077 - DNA, 15 bp, Homo sapiens
ctaaataataaatta

SEQ ID NO: 1553078 - DNA, 15 bp, Homo sapiens
actaaataataaatt

SEQ ID NO: 1553079 - DNA, 15 bp, Homo sapiens
tactaaataataaat

SEQ ID NO: 1553080 - DNA, 15 bp, Homo sapiens
atactaaataataaa

SEQ ID NO: 1553081 - DNA, 15 bp, Homo sapiens
tatactaaataataa

SEQ ID NO: 1553082 - DNA, 15 bp, Homo sapiens
atatactaaataata

SEQ ID NO: 1553083 - DNA, 15 bp, Homo sapiens
tatatactaaataat

SEQ ID NO: 1553084 - DNA, 15 bp, Homo sapiens
atatatactaaataa

SEQ ID NO: 1553085 - DNA, 15 bp, Homo sapiens
tatatatactaaata

SEQ ID NO: 1553086 - DNA, 15 bp, Homo sapiens
ttatatatactaaat

SEQ ID NO: 1553087 - DNA, 15 bp, Homo sapiens
tttatatatactaaa

SEQ ID NO: 1553088 - DNA, 15 bp, Homo sapiens
gtttatatatactaa

SEQ ID NO: 1553089 - DNA, 15 bp, Homo sapiens
tgtttatatatacta

SEQ ID NO: 1553090 - DNA, 15 bp, Homo sapiens
gtgtttatatatact

SEQ ID NO: 1553091 - DNA, 15 bp, Homo sapiens
tgtgtttatatatac

SEQ ID NO: 1553092 - DNA, 15 bp, Homo sapiens
ttgtgtttatatata

SEQ ID NO: 1553093 - DNA, 15 bp, Homo sapiens
tttgtgtttatatat

SEQ ID NO: 1553094 - DNA, 15 bp, Homo sapiens
ctttgtgtttatata

SEQ ID NO: 1553095 - DNA, 15 bp, Homo sapiens
cctttgtgtttatat

SEQ ID NO: 1553096 - DNA, 15 bp, Homo sapiens
acctttgtgtttata

SEQ ID NO: 1553097 - DNA, 15 bp, Homo sapiens
aacctttgtgtttat

SEQ ID NO: 1553098 - DNA, 15 bp, Homo sapiens
aaacctttgtgttta

SEQ ID NO: 1553099 - DNA, 15 bp, Homo sapiens
aaaacctttgtgttt

SEQ ID NO: 1553100 - DNA, 15 bp, Homo sapiens
aaaaacctttgtgtt

SEQ ID NO: 1553101 - DNA, 15 bp, Homo sapiens
taaaaacctttgtgt

SEQ ID NO: 1553102 - DNA, 15 bp, Homo sapiens
ataaaaacctttgtg

SEQ ID NO: 1553103 - DNA, 15 bp, Homo sapiens
tataaaaacctttgt

SEQ ID NO: 1553104 - DNA, 15 bp, Homo sapiens
ttataaaaacctttg

SEQ ID NO: 1553105 - DNA, 15 bp, Homo sapiens
cttataaaaaccttt

SEQ ID NO: 1553106 - DNA, 15 bp, Homo sapiens
acttataaaaacctt

SEQ ID NO: 1553107 - DNA, 15 bp, Homo sapiens
aacttataaaaacct

SEQ ID NO: 1553108 - DNA, 15 bp, Homo sapiens
gaacttataaaaacc

SEQ ID NO: 1553109 - DNA, 15 bp, Homo sapiens
agaacttataaaaac

SEQ ID NO: 1553110 - DNA, 15 bp, Homo sapiens
cagaacttataaaaa

SEQ ID NO: 1553111 - DNA, 15 bp, Homo sapiens
acagaacttataaaa

SEQ ID NO: 1553112 - DNA, 15 bp, Homo sapiens
cacagaacttataaa

SEQ ID NO: 1553113 - DNA, 15 bp, Homo sapiens
ccacagaacttataa

SEQ ID NO: 1553114 - DNA, 15 bp, Homo sapiens
tccacagaacttata

SEQ ID NO: 1553115 - DNA, 15 bp, Homo sapiens
atccacagaacttat

SEQ ID NO: 1553116 - DNA, 15 bp, Homo sapiens
gatccacagaactta

SEQ ID NO: 1553117 - DNA, 15 bp, Homo sapiens
agatccacagaactt

SEQ ID NO: 1553118 - DNA, 15 bp, Homo sapiens
aagatccacagaact

SEQ ID NO: 1553119 - DNA, 15 bp, Homo sapiens
aaagatccacagaac

SEQ ID NO: 1553120 - DNA, 15 bp, Homo sapiens
aaaagatccacagaa

SEQ ID NO: 1553121 - DNA, 15 bp, Homo sapiens
taaaagatccacaga

SEQ ID NO: 1553122 - DNA, 15 bp, Homo sapiens
ttaaaagatccacag

SEQ ID NO: 1553123 - DNA, 15 bp, Homo sapiens
attaaaagatccaca

SEQ ID NO: 1553124 - DNA, 15 bp, Homo sapiens
aattaaaagatccac

SEQ ID NO: 1553125 - DNA, 15 bp, Homo sapiens
caattaaaagatcca

SEQ ID NO: 1553126 - DNA, 15 bp, Homo sapiens
gcaattaaaagatcc

SEQ ID NO: 1553127 - DNA, 15 bp, Homo sapiens
tgcaattaaaagatc

SEQ ID NO: 1553128 - DNA, 15 bp, Homo sapiens
ctgcaattaaaagat

SEQ ID NO: 1553129 - DNA, 15 bp, Homo sapiens
tctgcaattaaaaga

SEQ ID NO: 1553130 - DNA, 15 bp, Homo sapiens
atctgcaattaaaag

SEQ ID NO: 1553131 - DNA, 15 bp, Homo sapiens
aatctgcaattaaaa

SEQ ID NO: 1553132 - DNA, 15 bp, Homo sapiens
aaatctgcaattaaa

SEQ ID NO: 1553133 - DNA, 15 bp, Homo sapiens
caaatctgcaattaa

SEQ ID NO: 1553134 - DNA, 15 bp, Homo sapiens
gcaaatctgcaatta

SEQ ID NO: 1553135 - DNA, 15 bp, Homo sapiens
tgcaaatctgcaatt

SEQ ID NO: 1553136 - DNA, 15 bp, Homo sapiens
atgcaaatctgcaat

SEQ ID NO: 1553137 - DNA, 15 bp, Homo sapiens
aatgcaaatctgcaa

SEQ ID NO: 1553138 - DNA, 15 bp, Homo sapiens
gaatgcaaatctgca

SEQ ID NO: 1553139 - DNA, 15 bp, Homo sapiens
ggaatgcaaatctgc

SEQ ID NO: 1553140 - DNA, 15 bp, Homo sapiens
tggaatgcaaatctg

SEQ ID NO: 1553141 - DNA, 15 bp, Homo sapiens
ttggaatgcaaatct

SEQ ID NO: 1553142 - DNA, 15 bp, Homo sapiens
attggaatgcaaatc

SEQ ID NO: 1553143 - DNA, 15 bp, Homo sapiens
tattggaatgcaaat

SEQ ID NO: 1553144 - DNA, 15 bp, Homo sapiens
atattggaatgcaaa

SEQ ID NO: 1553145 - DNA, 15 bp, Homo sapiens
tatattggaatgcaa

SEQ ID NO: 1553146 - DNA, 15 bp, Homo sapiens
ttatattggaatgca

SEQ ID NO: 1553147 - DNA, 15 bp, Homo sapiens
attatattggaatgc

SEQ ID NO: 1553148 - DNA, 15 bp, Homo sapiens
gattatattggaatg

SEQ ID NO: 1553149 - DNA, 15 bp, Homo sapiens
ggattatattggaat

SEQ ID NO: 1553150 - DNA, 15 bp, Homo sapiens
tggattatattggaa

SEQ ID NO: 1553151 - DNA, 15 bp, Homo sapiens
atggattatattgga

SEQ ID NO: 1553152 - DNA, 15 bp, Homo sapiens
gatggattatattgg

SEQ ID NO: 1553153 - DNA, 15 bp, Homo sapiens
ggatggattatattg

SEQ ID NO: 1553154 - DNA, 15 bp, Homo sapiens
gggatggattatatt

SEQ ID NO: 1553155 - DNA, 15 bp, Homo sapiens
agggatggattatat

SEQ ID NO: 1553156 - DNA, 15 bp, Homo sapiens
cagggatggattata

SEQ ID NO: 1553157 - DNA, 15 bp, Homo sapiens
gcagggatggattat

SEQ ID NO: 1553158 - DNA, 15 bp, Homo sapiens
tgcagggatggatta

SEQ ID NO: 1553159 - DNA, 15 bp, Homo sapiens
ttgcagggatggatt

SEQ ID NO: 1553160 - DNA, 15 bp, Homo sapiens
gttgcagggatggat

SEQ ID NO: 1553161 - DNA, 15 bp, Homo sapiens
ggttgcagggatgga

SEQ ID NO: 1553162 - DNA, 15 bp, Homo sapiens
tggttgcagggatgg

SEQ ID NO: 1553163 - DNA, 15 bp, Homo sapiens
ttggttgcagggatg

SEQ ID NO: 1553164 - DNA, 15 bp, Homo sapiens
cttggttgcagggat

SEQ ID NO: 1553165 - DNA, 15 bp, Homo sapiens
tcttggttgcaggga

SEQ ID NO: 1553166 - DNA, 15 bp, Homo sapiens
ctcttggttgcaggg

SEQ ID NO: 1553167 - DNA, 15 bp, Homo sapiens
gctcttggttgcagg

SEQ ID NO: 1553168 - DNA, 15 bp, Homo sapiens
agctcttggttgcag

SEQ ID NO: 1553169 - DNA, 15 bp, Homo sapiens
gagctcttggttgca

SEQ ID NO: 1553170 - DNA, 15 bp, Homo sapiens
agagctcttggttgc

SEQ ID NO: 1553171 - DNA, 15 bp, Homo sapiens
aagagctcttggttg

SEQ ID NO: 1553172 - DNA, 15 bp, Homo sapiens
caagagctcttggtt

SEQ ID NO: 1553173 - DNA, 15 bp, Homo sapiens
acaagagctcttggt

SEQ ID NO: 1553174 - DNA, 15 bp, Homo sapiens
aacaagagctcttgg

SEQ ID NO: 1553175 - DNA, 15 bp, Homo sapiens
caacaagagctcttg

SEQ ID NO: 1553176 - DNA, 15 bp, Homo sapiens
acaacaagagctctt

SEQ ID NO: 1553177 - DNA, 15 bp, Homo sapiens
gacaacaagagctct

SEQ ID NO: 1553178 - DNA, 15 bp, Homo sapiens
agacaacaagagctc

SEQ ID NO: 1553179 - DNA, 15 bp, Homo sapiens
aagacaacaagagct

SEQ ID NO: 1553180 - DNA, 15 bp, Homo sapiens
aaagacaacaagagc

SEQ ID NO: 1553181 - DNA, 15 bp, Homo sapiens
caaagacaacaagag

SEQ ID NO: 1553182 - DNA, 15 bp, Homo sapiens
ccaaagacaacaaga

SEQ ID NO: 1553183 - DNA, 15 bp, Homo sapiens
cccaaagacaacaag

SEQ ID NO: 1553184 - DNA, 15 bp, Homo sapiens
acccaaagacaacaa

SEQ ID NO: 1553185 - DNA, 15 bp, Homo sapiens
cacccaaagacaaca

SEQ ID NO: 1553186 - DNA, 15 bp, Homo sapiens
acacccaaagacaac

SEQ ID NO: 1553187 - DNA, 15 bp, Homo sapiens
tacacccaaagacaa

SEQ ID NO: 1553188 - DNA, 15 bp, Homo sapiens
atacacccaaagaca

SEQ ID NO: 1553189 - DNA, 15 bp, Homo sapiens
aatacacccaaagac

SEQ ID NO: 1553190 - DNA, 15 bp, Homo sapiens
taatacacccaaaga

SEQ ID NO: 1553191 - DNA, 15 bp, Homo sapiens
ctaatacacccaaag

SEQ ID NO: 1553192 - DNA, 15 bp, Homo sapiens
gctaatacacccaaa

SEQ ID NO: 1553193 - DNA, 15 bp, Homo sapiens
tgctaatacacccaa

SEQ ID NO: 1553194 - DNA, 15 bp, Homo sapiens
ttgctaatacaccca

SEQ ID NO: 1553195 - DNA, 15 bp, Homo sapiens
tttgctaatacaccc

SEQ ID NO: 1553196 - DNA, 15 bp, Homo sapiens
gtttgctaatacacc

SEQ ID NO: 1553197 - DNA, 15 bp, Homo sapiens
cgtttgctaatacac

SEQ ID NO: 1553198 - DNA, 15 bp, Homo sapiens
tcgtttgctaataca

SEQ ID NO: 1553199 - DNA, 15 bp, Homo sapiens
ctcgtttgctaatac

SEQ ID NO: 1553200 - DNA, 15 bp, Homo sapiens
actcgtttgctaata

SEQ ID NO: 1553201 - DNA, 15 bp, Homo sapiens
cactcgtttgctaat

SEQ ID NO: 1553202 - DNA, 15 bp, Homo sapiens
acactcgtttgctaa

SEQ ID NO: 1553203 - DNA, 15 bp, Homo sapiens
gacactcgtttgcta

SEQ ID NO: 1553204 - DNA, 15 bp, Homo sapiens
agacactcgtttgct

SEQ ID NO: 1553205 - DNA, 15 bp, Homo sapiens
gagacactcgtttgc

SEQ ID NO: 1553206 - DNA, 15 bp, Homo sapiens
tgagacactcgtttg

SEQ ID NO: 1553207 - DNA, 15 bp, Homo sapiens
atgagacactcgttt

SEQ ID NO: 1553208 - DNA, 15 bp, Homo sapiens
catgagacactcgtt

SEQ ID NO: 1553209 - DNA, 15 bp, Homo sapiens
ccatgagacactcgt

SEQ ID NO: 1553210 - DNA, 15 bp, Homo sapiens
cccatgagacactcg

SEQ ID NO: 1553211 - DNA, 15 bp, Homo sapiens
gcccatgagacactc

SEQ ID NO: 1553212 - DNA, 15 bp, Homo sapiens
tgcccatgagacact

SEQ ID NO: 1553213 - DNA, 15 bp, Homo sapiens
ctgcccatgagacac

SEQ ID NO: 1553214 - DNA, 15 bp, Homo sapiens
tctgcccatgagaca

SEQ ID NO: 1553215 - DNA, 15 bp, Homo sapiens
atctgcccatgagac

SEQ ID NO: 1553216 - DNA, 15 bp, Homo sapiens
tatctgcccatgaga

SEQ ID NO: 1553217 - DNA, 15 bp, Homo sapiens
ttatctgcccatgag

SEQ ID NO: 1553218 - DNA, 15 bp, Homo sapiens
tttatctgcccatga

SEQ ID NO: 1553219 - DNA, 15 bp, Homo sapiens
ctttatctgcccatg

SEQ ID NO: 1553220 - DNA, 15 bp, Homo sapiens
gctttatctgcccat

SEQ ID NO: 1553221 - DNA, 15 bp, Homo sapiens
tgctttatctgccca

SEQ ID NO: 1553222 - DNA, 15 bp, Homo sapiens
ctgctttatctgccc

SEQ ID NO: 1553223 - DNA, 15 bp, Homo sapiens
tctgctttatctgcc

SEQ ID NO: 1553224 - DNA, 15 bp, Homo sapiens
atctgctttatctgc

SEQ ID NO: 1553225 - DNA, 15 bp, Homo sapiens
tatctgctttatctg

SEQ ID NO: 1553226 - DNA, 15 bp, Homo sapiens
attatctgctttatc

SEQ ID NO: 1553227 - DNA, 15 bp, Homo sapiens
gattatctgctttat

SEQ ID NO: 1553228 - DNA, 15 bp, Homo sapiens
ggattatctgcttta

SEQ ID NO: 1553229 - DNA, 15 bp, Homo sapiens
cggattatctgcttt

SEQ ID NO: 1553230 - DNA, 15 bp, Homo sapiens
acggattatctgctt

SEQ ID NO: 1553231 - DNA, 15 bp, Homo sapiens
tacggattatctgct

SEQ ID NO: 1553232 - DNA, 15 bp, Homo sapiens
atacggattatctgc

SEQ ID NO: 1553233 - DNA, 15 bp, Homo sapiens
aatacggattatctg

SEQ ID NO: 1553234 - DNA, 15 bp, Homo sapiens
gaatacggattatct

SEQ ID NO: 1553235 - DNA, 15 bp, Homo sapiens
agaatacggattatc

SEQ ID NO: 1553236 - DNA, 15 bp, Homo sapiens
aagaatacggattat

SEQ ID NO: 1553237 - DNA, 15 bp, Homo sapiens
taagaatacggatta

SEQ ID NO: 1553238 - DNA, 15 bp, Homo sapiens
ctaagaatacggatt

SEQ ID NO: 1553239 - DNA, 15 bp, Homo sapiens
gctaagaatacggat

SEQ ID NO: 1553240 - DNA, 15 bp, Homo sapiens
tgctaagaatacgga

SEQ ID NO: 1553241 - DNA, 15 bp, Homo sapiens
ttgctaagaatacgg

SEQ ID NO: 1553242 - DNA, 15 bp, Homo sapiens
cttgctaagaatacg

SEQ ID NO: 1553243 - DNA, 15 bp, Homo sapiens
ccttgctaagaatac

SEQ ID NO: 1553244 - DNA, 15 bp, Homo sapiens
accttgctaagaata

SEQ ID NO: 1553245 - DNA, 15 bp, Homo sapiens
taccttgctaagaat

SEQ ID NO: 1553246 - DNA, 15 bp, Homo sapiens
gtaccttgctaagaa

SEQ ID NO: 1553247 - DNA, 15 bp, Homo sapiens
ggtaccttgctaaga

SEQ ID NO: 1553248 - DNA, 15 bp, Homo sapiens
aggtaccttgctaag

SEQ ID NO: 1553249 - DNA, 15 bp, Homo sapiens
caggtaccttgctaa

SEQ ID NO: 1553250 - DNA, 15 bp, Homo sapiens
acaggtaccttgcta

SEQ ID NO: 1553251 - DNA, 15 bp, Homo sapiens
aacaggtaccttgct

SEQ ID NO: 1553252 - DNA, 15 bp, Homo sapiens
gaacaggtaccttgc

SEQ ID NO: 1553253 - DNA, 15 bp, Homo sapiens
ggaacaggtaccttg

SEQ ID NO: 1553254 - DNA, 15 bp, Homo sapiens
cggaacaggtacctt

SEQ ID NO: 1553255 - DNA, 15 bp, Homo sapiens
gcggaacaggtacct

SEQ ID NO: 1553256 - DNA, 15 bp, Homo sapiens
ggcggaacaggtacc

SEQ ID NO: 1553257 - DNA, 15 bp, Homo sapiens
gggcggaacaggtac

SEQ ID NO: 1553258 - DNA, 15 bp, Homo sapiens
agggcggaacaggta

SEQ ID NO: 1553259 - DNA, 15 bp, Homo sapiens
gagggcggaacaggt

SEQ ID NO: 1553260 - DNA, 15 bp, Homo sapiens
tgagggcggaacagg

SEQ ID NO: 1553261 - DNA, 15 bp, Homo sapiens
gtgagggcggaacag

SEQ ID NO: 1553262 - DNA, 15 bp, Homo sapiens
agtgagggcggaaca

SEQ ID NO: 1553263 - DNA, 15 bp, Homo sapiens
aagtgagggcggaac

SEQ ID NO: 1553264 - DNA, 15 bp, Homo sapiens
gaagtgagggcggaa

SEQ ID NO: 1553265 - DNA, 15 bp, Homo sapiens
agaagtgagggcgga

SEQ ID NO: 1553266 - DNA, 15 bp, Homo sapiens
gagaagtgagggcgg

SEQ ID NO: 1553267 - DNA, 15 bp, Homo sapiens
ggagaagtgagggcg

SEQ ID NO: 1553268 - DNA, 15 bp, Homo sapiens
gggagaagtgagggc

SEQ ID NO: 1553269 - DNA, 15 bp, Homo sapiens
tgggagaagtgaggg

SEQ ID NO: 1553270 - DNA, 15 bp, Homo sapiens
ttgggagaagtgagg

SEQ ID NO: 1553271 - DNA, 15 bp, Homo sapiens
tttgggagaagtgag

SEQ ID NO: 1553272 - DNA, 15 bp, Homo sapiens
atttgggagaagtga

SEQ ID NO: 1553273 - DNA, 15 bp, Homo sapiens
tatttgggagaagtg

SEQ ID NO: 1553274 - DNA, 15 bp, Homo sapiens
atatttgggagaagt

SEQ ID NO: 1553275 - DNA, 15 bp, Homo sapiens
aatatttgggagaag

SEQ ID NO: 1553276 - DNA, 15 bp, Homo sapiens
aaatatttgggagaa

SEQ ID NO: 1553277 - DNA, 15 bp, Homo sapiens
taaatatttgggaga

SEQ ID NO: 1553278 - DNA, 15 bp, Homo sapiens
ataaatatttgggag

SEQ ID NO: 1553279 - DNA, 15 bp, Homo sapiens
cataaatatttggga

SEQ ID NO: 1553280 - DNA, 15 bp, Homo sapiens
ccataaatatttggg

SEQ ID NO: 1553281 - DNA, 15 bp, Homo sapiens
accataaatatttgg

SEQ ID NO: 1553282 - DNA, 15 bp, Homo sapiens
aaccataaatatttg

SEQ ID NO: 1553283 - DNA, 15 bp, Homo sapiens
gaaccataaatattt

SEQ ID NO: 1553284 - DNA, 15 bp, Homo sapiens
agaaccataaatatt

SEQ ID NO: 1553285 - DNA, 15 bp, Homo sapiens
gagaaccataaatat

SEQ ID NO: 1553286 - DNA, 15 bp, Homo sapiens
tgagaaccataaata

SEQ ID NO: 1553287 - DNA, 15 bp, Homo sapiens
ttgagaaccataaat

SEQ ID NO: 1553288 - DNA, 15 bp, Homo sapiens
cttgagaaccataaa

SEQ ID NO: 1553289 - DNA, 15 bp, Homo sapiens
acttgagaaccataa

SEQ ID NO: 1553290 - DNA, 15 bp, Homo sapiens
aacttgagaaccata

SEQ ID NO: 1553291 - DNA, 15 bp, Homo sapiens
caacttgagaaccat

SEQ ID NO: 1553292 - DNA, 15 bp, Homo sapiens
acaacttgagaacca

SEQ ID NO: 1553293 - DNA, 15 bp, Homo sapiens
tacaacttgagaacc

SEQ ID NO: 1553294 - DNA, 15 bp, Homo sapiens
ttacaacttgagaac

SEQ ID NO: 1553295 - DNA, 15 bp, Homo sapiens
tttacaacttgagaa

SEQ ID NO: 1553296 - DNA, 15 bp, Homo sapiens
ctttacaacttgaga

SEQ ID NO: 1553297 - DNA, 15 bp, Homo sapiens
gctttacaacttgag

SEQ ID NO: 1553298 - DNA, 15 bp, Homo sapiens
tgctttacaacttga

SEQ ID NO: 1553299 - DNA, 15 bp, Homo sapiens
atgctttacaacttg

SEQ ID NO: 1553300 - DNA, 15 bp, Homo sapiens
tatgctttacaactt

SEQ ID NO: 1553301 - DNA, 15 bp, Homo sapiens
atatgctttacaact

SEQ ID NO: 1553302 - DNA, 15 bp, Homo sapiens
gatatgctttacaac

SEQ ID NO: 1553303 - DNA, 15 bp, Homo sapiens
agatatgctttacaa

SEQ ID NO: 1553304 - DNA, 15 bp, Homo sapiens
aagatatgctttaca

SEQ ID NO: 1553305 - DNA, 15 bp, Homo sapiens
aaagatatgctttac

SEQ ID NO: 1553306 - DNA, 15 bp, Homo sapiens
gaaagatatgcttta

SEQ ID NO: 1553307 - DNA, 15 bp, Homo sapiens
tgaaagatatgcttt

SEQ ID NO: 1553308 - DNA, 15 bp, Homo sapiens
atgaaagatatgctt

SEQ ID NO: 1553309 - DNA, 15 bp, Homo sapiens
aatgaaagatatgct

SEQ ID NO: 1553310 - DNA, 15 bp, Homo sapiens
aaatgaaagatatgc

SEQ ID NO: 1553311 - DNA, 15 bp, Homo sapiens
aaaatgaaagatatg

SEQ ID NO: 1553312 - DNA, 15 bp, Homo sapiens
aaaaatgaaagatat

SEQ ID NO: 1553313 - DNA, 15 bp, Homo sapiens
gaaaaatgaaagata

SEQ ID NO: 1553314 - DNA, 15 bp, Homo sapiens
tagaaaaatgaaaga

SEQ ID NO: 1553315 - DNA, 15 bp, Homo sapiens
ttagaaaaatgaaag

SEQ ID NO: 1553316 - DNA, 15 bp, Homo sapiens
tttagaaaaatgaaa

SEQ ID NO: 1553317 - DNA, 15 bp, Homo sapiens
ttttagaaaaatgaa

SEQ ID NO: 1553318 - DNA, 15 bp, Homo sapiens
cttttagaaaaatga

SEQ ID NO: 1553319 - DNA, 15 bp, Homo sapiens
tcttttagaaaaatg

SEQ ID NO: 1553320 - DNA, 15 bp, Homo sapiens
gtcttttagaaaaat

SEQ ID NO: 1553321 - DNA, 15 bp, Homo sapiens
cgtcttttagaaaaa

SEQ ID NO: 1553322 - DNA, 15 bp, Homo sapiens
acgtcttttagaaaa

SEQ ID NO: 1553323 - DNA, 15 bp, Homo sapiens
aacgtcttttagaaa

SEQ ID NO: 1553324 - DNA, 15 bp, Homo sapiens
aaacgtcttttagaa

SEQ ID NO: 1553325 - DNA, 15 bp, Homo sapiens
taaacgtcttttaga

SEQ ID NO: 1553326 - DNA, 15 bp, Homo sapiens
ttaaacgtcttttag

SEQ ID NO: 1553327 - DNA, 15 bp, Homo sapiens
tttaaacgtctttta

SEQ ID NO: 1553328 - DNA, 15 bp, Homo sapiens
atttaaacgtctttt

SEQ ID NO: 1553329 - DNA, 15 bp, Homo sapiens
aatttaaacgtcttt

SEQ ID NO: 1553330 - DNA, 15 bp, Homo sapiens
aaatttaaacgtctt

SEQ ID NO: 1553331 - DNA, 15 bp, Homo sapiens
caaatttaaacgtct

SEQ ID NO: 1553332 - DNA, 15 bp, Homo sapiens
tcaaatttaaacgtc

SEQ ID NO: 1553333 - DNA, 15 bp, Homo sapiens
ctcaaatttaaacgt

SEQ ID NO: 1553334 - DNA, 15 bp, Homo sapiens
cctcaaatttaaacg

SEQ ID NO: 1553335 - DNA, 15 bp, Homo sapiens
acctcaaatttaaac

SEQ ID NO: 1553336 - DNA, 15 bp, Homo sapiens
gacctcaaatttaaa

SEQ ID NO: 1553337 - DNA, 15 bp, Homo sapiens
tgacctcaaatttaa

SEQ ID NO: 1553338 - DNA, 15 bp, Homo sapiens
ttgacctcaaattta

SEQ ID NO: 1553339 - DNA, 15 bp, Homo sapiens
attgacctcaaattt

SEQ ID NO: 1553340 - DNA, 15 bp, Homo sapiens
cattgacctcaaatt

SEQ ID NO: 1553341 - DNA, 15 bp, Homo sapiens
tcattgacctcaaat

SEQ ID NO: 1553342 - DNA, 15 bp, Homo sapiens
ttcattgacctcaaa

SEQ ID NO: 1553343 - DNA, 15 bp, Homo sapiens
tttcattgacctcaa

SEQ ID NO: 1553344 - DNA, 15 bp, Homo sapiens
atttcattgacctca

SEQ ID NO: 1553345 - DNA, 15 bp, Homo sapiens
tatttcattgacctc

SEQ ID NO: 1553346 - DNA, 15 bp, Homo sapiens
atatttcattgacct

SEQ ID NO: 1553347 - DNA, 15 bp, Homo sapiens
gatatttcattgacc

SEQ ID NO: 1553348 - DNA, 15 bp, Homo sapiens
agatatttcattgac

SEQ ID NO: 1553349 - DNA, 15 bp, Homo sapiens
aagatatttcattga

SEQ ID NO: 1553350 - DNA, 15 bp, Homo sapiens
taagatatttcattg

SEQ ID NO: 1553351 - DNA, 15 bp, Homo sapiens
ataagatatttcatt

SEQ ID NO: 1553352 - DNA, 15 bp, Homo sapiens
tataagatatttcat

SEQ ID NO: 1553353 - DNA, 15 bp, Homo sapiens
atataagatatttca

SEQ ID NO: 1553354 - DNA, 15 bp, Homo sapiens
catataagatatttc

SEQ ID NO: 1553355 - DNA, 15 bp, Homo sapiens
acatataagatattt

SEQ ID NO: 1553356 - DNA, 15 bp, Homo sapiens
aacatataagatatt

SEQ ID NO: 1553357 - DNA, 15 bp, Homo sapiens
taacatataagatat

SEQ ID NO: 1553358 - DNA, 15 bp, Homo sapiens
gtaacatataagata

SEQ ID NO: 1553359 - DNA, 15 bp, Homo sapiens
agtaacatataagat

SEQ ID NO: 1553360 - DNA, 15 bp, Homo sapiens
aagtaacatataaga

SEQ ID NO: 1553361 - DNA, 15 bp, Homo sapiens
taagtaacatataag

SEQ ID NO: 1553362 - DNA, 15 bp, Homo sapiens
ataagtaacatataa

SEQ ID NO: 1553363 - DNA, 15 bp, Homo sapiens
aataagtaacatata

SEQ ID NO: 1553364 - DNA, 15 bp, Homo sapiens
taataagtaacatat

SEQ ID NO: 1553365 - DNA, 15 bp, Homo sapiens
ttaataagtaacata

SEQ ID NO: 1553366 - DNA, 15 bp, Homo sapiens
cttaataagtaacat

SEQ ID NO: 1553367 - DNA, 15 bp, Homo sapiens
gcttaataagtaaca

SEQ ID NO: 1553368 - DNA, 15 bp, Homo sapiens
ggcttaataagtaac

SEQ ID NO: 1553369 - DNA, 15 bp, Homo sapiens
aggcttaataagtaa

SEQ ID NO: 1553370 - DNA, 15 bp, Homo sapiens
aaggcttaataagta

SEQ ID NO: 1553371 - DNA, 15 bp, Homo sapiens
aaaggcttaataagt

SEQ ID NO: 1553372 - DNA, 15 bp, Homo sapiens
taaaggcttaataag

SEQ ID NO: 1553373 - DNA, 15 bp, Homo sapiens
ttaaaggcttaataa

SEQ ID NO: 1553374 - DNA, 15 bp, Homo sapiens
tttaaaggcttaata

SEQ ID NO: 1553375 - DNA, 15 bp, Homo sapiens
ttttaaaggcttaat

SEQ ID NO: 1553376 - DNA, 15 bp, Homo sapiens
attttaaaggcttaa

SEQ ID NO: 1553377 - DNA, 15 bp, Homo sapiens
cattttaaaggctta

SEQ ID NO: 1553378 - DNA, 15 bp, Homo sapiens
acattttaaaggctt

SEQ ID NO: 1553379 - DNA, 15 bp, Homo sapiens
tacattttaaaggct

SEQ ID NO: 1553380 - DNA, 15 bp, Homo sapiens
atacattttaaaggc

SEQ ID NO: 1553381 - DNA, 15 bp, Homo sapiens
aatacattttaaagg

SEQ ID NO: 1553382 - DNA, 15 bp, Homo sapiens
aaatacattttaaag

SEQ ID NO: 1553383 - DNA, 15 bp, Homo sapiens
aaaatacattttaaa

SEQ ID NO: 1553384 - DNA, 15 bp, Homo sapiens
caaaatacattttaa

SEQ ID NO: 1553385 - DNA, 15 bp, Homo sapiens
tcaaaatacatttta

SEQ ID NO: 1553386 - DNA, 15 bp, Homo sapiens
atcaaaatacatttt

SEQ ID NO: 1553387 - DNA, 15 bp, Homo sapiens
aatcaaaatacattt

SEQ ID NO: 1553388 - DNA, 15 bp, Homo sapiens
taatcaaaatacatt

SEQ ID NO: 1553389 - DNA, 15 bp, Homo sapiens
ataatcaaaatacat

SEQ ID NO: 1553390 - DNA, 15 bp, Homo sapiens
aataatcaaaataca

SEQ ID NO: 1553391 - DNA, 15 bp, Homo sapiens
aaataatcaaaatac

SEQ ID NO: 1553392 - DNA, 15 bp, Homo sapiens
taaataatcaaaata

SEQ ID NO: 1553393 - DNA, 15 bp, Homo sapiens
ataaataatcaaaat

SEQ ID NO: 1553394 - DNA, 15 bp, Homo sapiens
aataaataatcaaaa

SEQ ID NO: 1553395 - DNA, 15 bp, Homo sapiens
caataaataatcaaa

SEQ ID NO: 1553396 - DNA, 15 bp, Homo sapiens
acaataaataatcaa

SEQ ID NO: 1553397 - DNA, 15 bp, Homo sapiens
tacaataaataatca

SEQ ID NO: 1553398 - DNA, 15 bp, Homo sapiens
ttacaataaataatc

SEQ ID NO: 1553399 - DNA, 15 bp, Homo sapiens
attacaataaataat

SEQ ID NO: 1553400 - DNA, 15 bp, Homo sapiens
aattacaataaataa

SEQ ID NO: 1553401 - DNA, 15 bp, Homo sapiens
gaattacaataaata

SEQ ID NO: 1553402 - DNA, 15 bp, Homo sapiens
agaattacaataaat

SEQ ID NO: 1553403 - DNA, 15 bp, Homo sapiens
aagaattacaataaa

SEQ ID NO: 1553404 - DNA, 15 bp, Homo sapiens
aaagaattacaataa

SEQ ID NO: 1553405 - DNA, 15 bp, Homo sapiens
caaagaattacaata

SEQ ID NO: 1553406 - DNA, 15 bp, Homo sapiens
tcaaagaattacaat

SEQ ID NO: 1553407 - DNA, 15 bp, Homo sapiens
ttcaaagaattacaa

SEQ ID NO: 1553408 - DNA, 15 bp, Homo sapiens
cttcaaagaattaca

SEQ ID NO: 1553409 - DNA, 15 bp, Homo sapiens
tcttcaaagaattac

SEQ ID NO: 1553410 - DNA, 15 bp, Homo sapiens
ttcttcaaagaatta

SEQ ID NO: 1553411 - DNA, 15 bp, Homo sapiens
cttcttcaaagaatt

SEQ ID NO: 1553412 - DNA, 15 bp, Homo sapiens
acttcttcaaagaat

SEQ ID NO: 1553413 - DNA, 15 bp, Homo sapiens
gacttcttcaaagaa

SEQ ID NO: 1553414 - DNA, 15 bp, Homo sapiens
agacttcttcaaaga

SEQ ID NO: 1553415 - DNA, 15 bp, Homo sapiens
aagacttcttcaaag

SEQ ID NO: 1553416 - DNA, 15 bp, Homo sapiens
gaagacttcttcaaa

SEQ ID NO: 1553417 - DNA, 15 bp, Homo sapiens
agaagacttcttcaa

SEQ ID NO: 1553418 - DNA, 15 bp, Homo sapiens
gagaagacttcttca

SEQ ID NO: 1553419 - DNA, 15 bp, Homo sapiens
agagaagacttcttc

SEQ ID NO: 1553420 - DNA, 15 bp, Homo sapiens
tagagaagacttctt

SEQ ID NO: 1553421 - DNA, 15 bp, Homo sapiens
ttagagaagacttct

SEQ ID NO: 1553422 - DNA, 15 bp, Homo sapiens
tttagagaagacttc

SEQ ID NO: 1553423 - DNA, 15 bp, Homo sapiens
ctttagagaagactt

SEQ ID NO: 1553424 - DNA, 15 bp, Homo sapiens
tctttagagaagact

SEQ ID NO: 1553425 - DNA, 15 bp, Homo sapiens
ttctttagagaagac

SEQ ID NO: 1553426 - DNA, 15 bp, Homo sapiens
cttctttagagaaga

SEQ ID NO: 1553427 - DNA, 15 bp, Homo sapiens
gcttctttagagaag

SEQ ID NO: 1553428 - DNA, 15 bp, Homo sapiens
agcttctttagagaa

SEQ ID NO: 1553429 - DNA, 15 bp, Homo sapiens
cagcttctttagaga

SEQ ID NO: 1553430 - DNA, 15 bp, Homo sapiens
acagcttctttagag

SEQ ID NO: 1553431 - DNA, 15 bp, Homo sapiens
gacagcttctttaga

SEQ ID NO: 1553432 - DNA, 15 bp, Homo sapiens
agacagcttctttag

SEQ ID NO: 1553433 - DNA, 15 bp, Homo sapiens
aagacagcttcttta

SEQ ID NO: 1553434 - DNA, 15 bp, Homo sapiens
aaagacagcttcttt

SEQ ID NO: 1553435 - DNA, 15 bp, Homo sapiens
taaagacagcttctt

SEQ ID NO: 1553436 - DNA, 15 bp, Homo sapiens
ataaagacagcttct

SEQ ID NO: 1553437 - DNA, 15 bp, Homo sapiens
tataaagacagcttc

SEQ ID NO: 1553438 - DNA, 15 bp, Homo sapiens
atataaagacagctt

SEQ ID NO: 1553439 - DNA, 15 bp, Homo sapiens
catataaagacagct

SEQ ID NO: 1553440 - DNA, 15 bp, Homo sapiens
acatataaagacagc

SEQ ID NO: 1553441 - DNA, 15 bp, Homo sapiens
tacatataaagacag

SEQ ID NO: 1553442 - DNA, 15 bp, Homo sapiens
ttacatataaagaca

SEQ ID NO: 1553443 - DNA, 15 bp, Homo sapiens
tttacatataaagac

SEQ ID NO: 1553444 - DNA, 15 bp, Homo sapiens
gtttacatataaaga

SEQ ID NO: 1553445 - DNA, 15 bp, Homo sapiens
agtttacatataaag

SEQ ID NO: 1553446 - DNA, 15 bp, Homo sapiens
gagtttacatataaa

SEQ ID NO: 1553447 - DNA, 15 bp, Homo sapiens
agagtttacatataa

SEQ ID NO: 1553448 - DNA, 15 bp, Homo sapiens
cagagtttacatata

SEQ ID NO: 1553449 - DNA, 15 bp, Homo sapiens
tcagagtttacatat

SEQ ID NO: 1553450 - DNA, 15 bp, Homo sapiens
atcagagtttacata

SEQ ID NO: 1553451 - DNA, 15 bp, Homo sapiens
aatcagagtttacat

SEQ ID NO: 1553452 - DNA, 15 bp, Homo sapiens
taatcagagtttaca

SEQ ID NO: 1553453 - DNA, 15 bp, Homo sapiens
gtaatcagagtttac

SEQ ID NO: 1553454 - DNA, 15 bp, Homo sapiens
agtaatcagagttta

SEQ ID NO: 1553455 - DNA, 15 bp, Homo sapiens
aagtaatcagagttt

SEQ ID NO: 1553456 - DNA, 15 bp, Homo sapiens
gaagtaatcagagtt

SEQ ID NO: 1553457 - DNA, 15 bp, Homo sapiens
tgaagtaatcagagt

SEQ ID NO: 1553458 - DNA, 15 bp, Homo sapiens
atgaagtaatcagag

SEQ ID NO: 1553459 - DNA, 15 bp, Homo sapiens
aatgaagtaatcaga

SEQ ID NO: 1553460 - DNA, 15 bp, Homo sapiens
taatgaagtaatcag

SEQ ID NO: 1553461 - DNA, 15 bp, Homo sapiens
ttaatgaagtaatca

SEQ ID NO: 1553462 - DNA, 15 bp, Homo sapiens
cttaatgaagtaatc

SEQ ID NO: 1553463 - DNA, 15 bp, Homo sapiens
ccttaatgaagtaat

SEQ ID NO: 1553464 - DNA, 15 bp, Homo sapiens
tccttaatgaagtaa

SEQ ID NO: 1553465 - DNA, 15 bp, Homo sapiens
ttccttaatgaagta

SEQ ID NO: 1553466 - DNA, 15 bp, Homo sapiens
cttccttaatgaagt

SEQ ID NO: 1553467 - DNA, 15 bp, Homo sapiens
tcttccttaatgaag

SEQ ID NO: 1553468 - DNA, 15 bp, Homo sapiens
atcttccttaatgaa

SEQ ID NO: 1553469 - DNA, 15 bp, Homo sapiens
catcttccttaatga

SEQ ID NO: 1553470 - DNA, 15 bp, Homo sapiens
acatcttccttaatg

SEQ ID NO: 1553471 - DNA, 15 bp, Homo sapiens
gacatcttccttaat

SEQ ID NO: 1553472 - DNA, 15 bp, Homo sapiens
agacatcttccttaa

SEQ ID NO: 1553473 - DNA, 15 bp, Homo sapiens
aagacatcttcctta

SEQ ID NO: 1553474 - DNA, 15 bp, Homo sapiens
aaagacatcttcctt

SEQ ID NO: 1553475 - DNA, 15 bp, Homo sapiens
taaagacatcttcct

SEQ ID NO: 1553476 - DNA, 15 bp, Homo sapiens
ttaaagacatcttcc

SEQ ID NO: 1553477 - DNA, 15 bp, Homo sapiens
tttaaagacatcttc

SEQ ID NO: 1553478 - DNA, 15 bp, Homo sapiens
ttttaaagacatctt

SEQ ID NO: 1553479 - DNA, 15 bp, Homo sapiens
attttaaagacatct

SEQ ID NO: 1553480 - DNA, 15 bp, Homo sapiens
tattttaaagacatc

SEQ ID NO: 1553481 - DNA, 15 bp, Homo sapiens
ttattttaaagacat

SEQ ID NO: 1553482 - DNA, 15 bp, Homo sapiens
tttattttaaagaca

SEQ ID NO: 1553483 - DNA, 15 bp, Homo sapiens
ttttattttaaagac

SEQ ID NO: 1553484 - DNA, 15 bp, Homo sapiens
attttattttaaaga

SEQ ID NO: 1553485 - DNA, 15 bp, Homo sapiens
tattttattttaaag

SEQ ID NO: 1553486 - DNA, 15 bp, Homo sapiens
atattttattttaaa

SEQ ID NO: 1553487 - DNA, 15 bp, Homo sapiens
catattttattttaa

SEQ ID NO: 1553488 - DNA, 15 bp, Homo sapiens
acatattttatttta

SEQ ID NO: 1553489 - DNA, 15 bp, Homo sapiens
aacatattttatttt

SEQ ID NO: 1553490 - DNA, 15 bp, Homo sapiens
caacatattttattt

SEQ ID NO: 1553491 - DNA, 15 bp, Homo sapiens
gcaacatattttatt

SEQ ID NO: 1553492 - DNA, 15 bp, Homo sapiens
ggcaacatattttat

SEQ ID NO: 1553493 - DNA, 15 bp, Homo sapiens
aggcaacatatttta

SEQ ID NO: 1553494 - DNA, 15 bp, Homo sapiens
gaggcaacatatttt

SEQ ID NO: 1553495 - DNA, 15 bp, Homo sapiens
agaggcaacatattt

SEQ ID NO: 1553496 - DNA, 15 bp, Homo sapiens
aagaggcaacatatt

SEQ ID NO: 1553497 - DNA, 15 bp, Homo sapiens
aaagaggcaacatat

SEQ ID NO: 1553498 - DNA, 15 bp, Homo sapiens
aaaagaggcaacata

SEQ ID NO: 1553499 - DNA, 15 bp, Homo sapiens
caaaagaggcaacat

SEQ ID NO: 1553500 - DNA, 15 bp, Homo sapiens
gcaaaagaggcaaca

SEQ ID NO: 1553501 - DNA, 15 bp, Homo sapiens
agcaaaagaggcaac

SEQ ID NO: 1553502 - DNA, 15 bp, Homo sapiens
tagcaaaagaggcaa

SEQ ID NO: 1553503 - DNA, 15 bp, Homo sapiens
ttagcaaaagaggca

SEQ ID NO: 1553504 - DNA, 15 bp, Homo sapiens
cttagcaaaagaggc

SEQ ID NO: 1553505 - DNA, 15 bp, Homo sapiens
gcttagcaaaagagg

SEQ ID NO: 1553506 - DNA, 15 bp, Homo sapiens
tgcttagcaaaagag

SEQ ID NO: 1553507 - DNA, 15 bp, Homo sapiens
ctgcttagcaaaaga

SEQ ID NO: 1553508 - DNA, 15 bp, Homo sapiens
cctgcttagcaaaag

SEQ ID NO: 1553509 - DNA, 15 bp, Homo sapiens
acctgcttagcaaaa

SEQ ID NO: 1553510 - DNA, 15 bp, Homo sapiens
tacctgcttagcaaa

SEQ ID NO: 1553511 - DNA, 15 bp, Homo sapiens
gtacctgcttagcaa

SEQ ID NO: 1553512 - DNA, 15 bp, Homo sapiens
tgtacctgcttagca

SEQ ID NO: 1553513 - DNA, 15 bp, Homo sapiens
gtgtacctgcttagc

SEQ ID NO: 1553514 - DNA, 15 bp, Homo sapiens
agtgtacctgcttag

SEQ ID NO: 1553515 - DNA, 15 bp, Homo sapiens
aagtgtacctgctta

SEQ ID NO: 1553516 - DNA, 15 bp, Homo sapiens
taagtgtacctgctt

SEQ ID NO: 1553517 - DNA, 15 bp, Homo sapiens
ctaagtgtacctgct

SEQ ID NO: 1553518 - DNA, 15 bp, Homo sapiens
actaagtgtacctgc

SEQ ID NO: 1553519 - DNA, 15 bp, Homo sapiens
tactaagtgtacctg

SEQ ID NO: 1553520 - DNA, 15 bp, Homo sapiens
atactaagtgtacct

SEQ ID NO: 1553521 - DNA, 15 bp, Homo sapiens
aatactaagtgtacc

SEQ ID NO: 1553522 - DNA, 15 bp, Homo sapiens
aaatactaagtgtac

SEQ ID NO: 1553523 - DNA, 15 bp, Homo sapiens
aaaatactaagtgta

SEQ ID NO: 1553524 - DNA, 15 bp, Homo sapiens
taaaatactaagtgt

SEQ ID NO: 1553525 - DNA, 15 bp, Homo sapiens
gtaaaatactaagtg

SEQ ID NO: 1553526 - DNA, 15 bp, Homo sapiens
ggtaaaatactaagt

SEQ ID NO: 1553527 - DNA, 15 bp, Homo sapiens
tggtaaaatactaag

SEQ ID NO: 1553528 - DNA, 15 bp, Homo sapiens
ctggtaaaatactaa

SEQ ID NO: 1553529 - DNA, 15 bp, Homo sapiens
actggtaaaatacta

SEQ ID NO: 1553530 - DNA, 15 bp, Homo sapiens
aactggtaaaatact

SEQ ID NO: 1553531 - DNA, 15 bp, Homo sapiens
aaactggtaaaatac

SEQ ID NO: 1553532 - DNA, 15 bp, Homo sapiens
aaaactggtaaaata

SEQ ID NO: 1553533 - DNA, 15 bp, Homo sapiens
gaaaactggtaaaat

SEQ ID NO: 1553534 - DNA, 15 bp, Homo sapiens
tgaaaactggtaaaa

SEQ ID NO: 1553535 - DNA, 15 bp, Homo sapiens
ttgaaaactggtaaa

SEQ ID NO: 1553536 - DNA, 15 bp, Homo sapiens
tttgaaaactggtaa

SEQ ID NO: 1553537 - DNA, 15 bp, Homo sapiens
ctttgaaaactggta

SEQ ID NO: 1553538 - DNA, 15 bp, Homo sapiens
gctttgaaaactggt

SEQ ID NO: 1553539 - DNA, 15 bp, Homo sapiens
tgctttgaaaactgg

SEQ ID NO: 1553540 - DNA, 15 bp, Homo sapiens
atgctttgaaaactg

SEQ ID NO: 1553541 - DNA, 15 bp, Homo sapiens
aatgctttgaaaact

SEQ ID NO: 1553542 - DNA, 15 bp, Homo sapiens
aaatgctttgaaaac

SEQ ID NO: 1553543 - DNA, 15 bp, Homo sapiens
taaatgctttgaaaa

SEQ ID NO: 1553544 - DNA, 15 bp, Homo sapiens
ttaaatgctttgaaa

SEQ ID NO: 1553545 - DNA, 15 bp, Homo sapiens
attaaatgctttgaa

SEQ ID NO: 1553546 - DNA, 15 bp, Homo sapiens
aattaaatgctttga

SEQ ID NO: 1553547 - DNA, 15 bp, Homo sapiens
taattaaatgctttg

SEQ ID NO: 1553548 - DNA, 15 bp, Homo sapiens
ataattaaatgcttt

SEQ ID NO: 1553549 - DNA, 15 bp, Homo sapiens
atataattaaatgct

SEQ ID NO: 1553550 - DNA, 15 bp, Homo sapiens
catataattaaatgc

SEQ ID NO: 1553551 - DNA, 15 bp, Homo sapiens
ccatataattaaatg

SEQ ID NO: 1553552 - DNA, 15 bp, Homo sapiens
accatataattaaat

SEQ ID NO: 1553553 - DNA, 15 bp, Homo sapiens
taccatataattaaa

SEQ ID NO: 1553554 - DNA, 15 bp, Homo sapiens
ttaccatataattaa

SEQ ID NO: 1553555 - DNA, 15 bp, Homo sapiens
cttaccatataatta

SEQ ID NO: 1553556 - DNA, 15 bp, Homo sapiens
tcttaccatataatt

SEQ ID NO: 1553557 - DNA, 15 bp, Homo sapiens
gtcttaccatataat

SEQ ID NO: 1553558 - DNA, 15 bp, Homo sapiens
agtcttaccatataa

SEQ ID NO: 1553559 - DNA, 15 bp, Homo sapiens
tagtcttaccatata

SEQ ID NO: 1553560 - DNA, 15 bp, Homo sapiens
atagtcttaccatat

SEQ ID NO: 1553561 - DNA, 15 bp, Homo sapiens
tatagtcttaccata

SEQ ID NO: 1553562 - DNA, 15 bp, Homo sapiens
ctatagtcttaccat

SEQ ID NO: 1553563 - DNA, 15 bp, Homo sapiens
gctatagtcttacca

SEQ ID NO: 1553564 - DNA, 15 bp, Homo sapiens
ggctatagtcttacc

SEQ ID NO: 1553565 - DNA, 15 bp, Homo sapiens
aggctatagtcttac

SEQ ID NO: 1553566 - DNA, 15 bp, Homo sapiens
aaggctatagtctta

SEQ ID NO: 1553567 - DNA, 15 bp, Homo sapiens
caaggctatagtctt

SEQ ID NO: 1553568 - DNA, 15 bp, Homo sapiens
gcaaggctatagtct

SEQ ID NO: 1553569 - DNA, 15 bp, Homo sapiens
tgcaaggctatagtc

SEQ ID NO: 1553570 - DNA, 15 bp, Homo sapiens
atgcaaggctatagt

SEQ ID NO: 1553571 - DNA, 15 bp, Homo sapiens
tatgcaaggctatag

SEQ ID NO: 1553572 - DNA, 15 bp, Homo sapiens
ttatgcaaggctata

SEQ ID NO: 1553573 - DNA, 15 bp, Homo sapiens
tttatgcaaggctat

SEQ ID NO: 1553574 - DNA, 15 bp, Homo sapiens
ttttatgcaaggcta

SEQ ID NO: 1553575 - DNA, 15 bp, Homo sapiens
attttatgcaaggct

SEQ ID NO: 1553576 - DNA, 15 bp, Homo sapiens
aattttatgcaaggc

SEQ ID NO: 1553577 - DNA, 15 bp, Homo sapiens
taattttatgcaagg

SEQ ID NO: 1553578 - DNA, 15 bp, Homo sapiens
ataattttatgcaag

SEQ ID NO: 1553579 - DNA, 15 bp, Homo sapiens
aataattttatgcaa

SEQ ID NO: 1553580 - DNA, 15 bp, Homo sapiens
aaataattttatgca

SEQ ID NO: 1553581 - DNA, 15 bp, Homo sapiens
taaataattttatgc

SEQ ID NO: 1553582 - DNA, 15 bp, Homo sapiens
ttaaataattttatg

SEQ ID NO: 1553583 - DNA, 15 bp, Homo sapiens
attaaataattttat

SEQ ID NO: 1553584 - DNA, 15 bp, Homo sapiens
aattaaataatttta

SEQ ID NO: 1553585 - DNA, 15 bp, Homo sapiens
aaattaaataatttt

SEQ ID NO: 1553586 - DNA, 15 bp, Homo sapiens
caaattaaataattt

SEQ ID NO: 1553587 - DNA, 15 bp, Homo sapiens
acaaattaaataatt

SEQ ID NO: 1553588 - DNA, 15 bp, Homo sapiens
tacaaattaaataat

SEQ ID NO: 1553589 - DNA, 15 bp, Homo sapiens
ttacaaattaaataa

SEQ ID NO: 1553590 - DNA, 15 bp, Homo sapiens
attacaaattaaata

SEQ ID NO: 1553591 - DNA, 15 bp, Homo sapiens
aattacaaattaaat

SEQ ID NO: 1553592 - DNA, 15 bp, Homo sapiens
taattacaaattaaa

SEQ ID NO: 1553593 - DNA, 15 bp, Homo sapiens
gtaattacaaattaa

SEQ ID NO: 1553594 - DNA, 15 bp, Homo sapiens
agtaattacaaatta

SEQ ID NO: 1553595 - DNA, 15 bp, Homo sapiens
tagtaattacaaatt

SEQ ID NO: 1553596 - DNA, 15 bp, Homo sapiens
atagtaattacaaat

SEQ ID NO: 1553597 - DNA, 15 bp, Homo sapiens
tatagtaattacaaa

SEQ ID NO: 1553598 - DNA, 15 bp, Homo sapiens
ttatagtaattacaa

SEQ ID NO: 1553599 - DNA, 15 bp, Homo sapiens
attatagtaattaca

SEQ ID NO: 1553600 - DNA, 15 bp, Homo sapiens
tattatagtaattac

SEQ ID NO: 1553601 - DNA, 15 bp, Homo sapiens
ttattatagtaatta

SEQ ID NO: 1553602 - DNA, 15 bp, Homo sapiens
attattatagtaatt

SEQ ID NO: 1553603 - DNA, 15 bp, Homo sapiens
cattattatagtaat

SEQ ID NO: 1553604 - DNA, 15 bp, Homo sapiens
acattattatagtaa

SEQ ID NO: 1553605 - DNA, 15 bp, Homo sapiens
gacattattatagta

SEQ ID NO: 1553606 - DNA, 15 bp, Homo sapiens
agacattattatagt

SEQ ID NO: 1553607 - DNA, 15 bp, Homo sapiens
cagacattattatag

SEQ ID NO: 1553608 - DNA, 15 bp, Homo sapiens
tcagacattattata

SEQ ID NO: 1553609 - DNA, 15 bp, Homo sapiens
gtcagacattattat

SEQ ID NO: 1553610 - DNA, 15 bp, Homo sapiens
agtcagacattatta

SEQ ID NO: 1553611 - DNA, 15 bp, Homo sapiens
gagtcagacattatt

SEQ ID NO: 1553612 - DNA, 15 bp, Homo sapiens
agagtcagacattat

SEQ ID NO: 1553613 - DNA, 15 bp, Homo sapiens
aagagtcagacatta

SEQ ID NO: 1553614 - DNA, 15 bp, Homo sapiens
taagagtcagacatt

SEQ ID NO: 1553615 - DNA, 15 bp, Homo sapiens
ataagagtcagacat

SEQ ID NO: 1553616 - DNA, 15 bp, Homo sapiens
tataagagtcagaca

SEQ ID NO: 1553617 - DNA, 15 bp, Homo sapiens
ttataagagtcagac

SEQ ID NO: 1553618 - DNA, 15 bp, Homo sapiens
attataagagtcaga

SEQ ID NO: 1553619 - DNA, 15 bp, Homo sapiens
cattataagagtcag

SEQ ID NO: 1553620 - DNA, 15 bp, Homo sapiens
acattataagagtca

SEQ ID NO: 1553621 - DNA, 15 bp, Homo sapiens
tacattataagagtc

SEQ ID NO: 1553622 - DNA, 15 bp, Homo sapiens
ctacattataagagt

SEQ ID NO: 1553623 - DNA, 15 bp, Homo sapiens
tctacattataagag

SEQ ID NO: 1553624 - DNA, 15 bp, Homo sapiens
ttctacattataaga

SEQ ID NO: 1553625 - DNA, 15 bp, Homo sapiens
tttctacattataag

SEQ ID NO: 1553626 - DNA, 15 bp, Homo sapiens
atttctacattataa

SEQ ID NO: 1553627 - DNA, 15 bp, Homo sapiens
catttctacattata

SEQ ID NO: 1553628 - DNA, 15 bp, Homo sapiens
acatttctacattat

SEQ ID NO: 1553629 - DNA, 15 bp, Homo sapiens
gacatttctacatta

SEQ ID NO: 1553630 - DNA, 15 bp, Homo sapiens
tgacatttctacatt

SEQ ID NO: 1553631 - DNA, 15 bp, Homo sapiens
ttgacatttctacat

SEQ ID NO: 1553632 - DNA, 15 bp, Homo sapiens
tttgacatttctaca

SEQ ID NO: 1553633 - DNA, 15 bp, Homo sapiens
ttttgacatttctac

SEQ ID NO: 1553634 - DNA, 15 bp, Homo sapiens
tttttgacatttcta

SEQ ID NO: 1553635 - DNA, 15 bp, Homo sapiens
ttttttgacatttct

SEQ ID NO: 1553636 - DNA, 15 bp, Homo sapiens
attttttgacatttc

SEQ ID NO: 1553637 - DNA, 15 bp, Homo sapiens
tattttttgacattt

SEQ ID NO: 1553638 - DNA, 15 bp, Homo sapiens
ttattttttgacatt

SEQ ID NO: 1553639 - DNA, 15 bp, Homo sapiens
cttattttttgacat

SEQ ID NO: 1553640 - DNA, 15 bp, Homo sapiens
tcttattttttgaca

SEQ ID NO: 1553641 - DNA, 15 bp, Homo sapiens
ttcttattttttgac

SEQ ID NO: 1553642 - DNA, 15 bp, Homo sapiens
tttcttattttttga

SEQ ID NO: 1553643 - DNA, 15 bp, Homo sapiens
ttttcttattttttg

SEQ ID NO: 1553644 - DNA, 15 bp, Homo sapiens
gttttcttatttttt

SEQ ID NO: 1553645 - DNA, 15 bp, Homo sapiens
tgttttcttattttt

SEQ ID NO: 1553646 - DNA, 15 bp, Homo sapiens
ttgttttcttatttt

SEQ ID NO: 1553647 - DNA, 15 bp, Homo sapiens
tttgttttcttattt

SEQ ID NO: 1553648 - DNA, 15 bp, Homo sapiens
atttgttttcttatt

SEQ ID NO: 1553649 - DNA, 15 bp, Homo sapiens
catttgttttcttat

SEQ ID NO: 1553650 - DNA, 15 bp, Homo sapiens
acatttgttttctta

SEQ ID NO: 1553651 - DNA, 15 bp, Homo sapiens
tacatttgttttctt

SEQ ID NO: 1553652 - DNA, 15 bp, Homo sapiens
gtacatttgttttct

SEQ ID NO: 1553653 - DNA, 15 bp, Homo sapiens
tgtacatttgttttc

SEQ ID NO: 1553654 - DNA, 15 bp, Homo sapiens
atgtacatttgtttt

SEQ ID NO: 1553655 - DNA, 15 bp, Homo sapiens
aatgtacatttgttt

SEQ ID NO: 1553656 - DNA, 15 bp, Homo sapiens
taatgtacatttgtt

SEQ ID NO: 1553657 - DNA, 15 bp, Homo sapiens
ttaatgtacatttgt

SEQ ID NO: 1553658 - DNA, 15 bp, Homo sapiens
cttaatgtacatttg

SEQ ID NO: 1553659 - DNA, 15 bp, Homo sapiens
gcttaatgtacattt

SEQ ID NO: 1553660 - DNA, 15 bp, Homo sapiens
agcttaatgtacatt

SEQ ID NO: 1553661 - DNA, 15 bp, Homo sapiens
tagcttaatgtacat

SEQ ID NO: 1553662 - DNA, 15 bp, Homo sapiens
ctagcttaatgtaca

SEQ ID NO: 1553663 - DNA, 15 bp, Homo sapiens
gctagcttaatgtac

SEQ ID NO: 1553664 - DNA, 15 bp, Homo sapiens
agctagcttaatgta

SEQ ID NO: 1553665 - DNA, 15 bp, Homo sapiens
tagctagcttaatgt

SEQ ID NO: 1553666 - DNA, 15 bp, Homo sapiens
gtagctagcttaatg

SEQ ID NO: 1553667 - DNA, 15 bp, Homo sapiens
ggtagctagcttaat

SEQ ID NO: 1553668 - DNA, 15 bp, Homo sapiens
tggtagctagcttaa

SEQ ID NO: 1553669 - DNA, 15 bp, Homo sapiens
ttggtagctagctta

SEQ ID NO: 1553670 - DNA, 15 bp, Homo sapiens
cttggtagctagctt

SEQ ID NO: 1553671 - DNA, 15 bp, Homo sapiens
tcttggtagctagct

SEQ ID NO: 1553672 - DNA, 15 bp, Homo sapiens
atcttggtagctagc

SEQ ID NO: 1553673 - DNA, 15 bp, Homo sapiens
gatcttggtagctag

SEQ ID NO: 1553674 - DNA, 15 bp, Homo sapiens
tgatcttggtagcta

SEQ ID NO: 1553675 - DNA, 15 bp, Homo sapiens
gtgatcttggtagct

SEQ ID NO: 1553676 - DNA, 15 bp, Homo sapiens
ggtgatcttggtagc

SEQ ID NO: 1553677 - DNA, 15 bp, Homo sapiens
tggtgatcttggtag

SEQ ID NO: 1553678 - DNA, 15 bp, Homo sapiens
atggtgatcttggta

SEQ ID NO: 1553679 - DNA, 15 bp, Homo sapiens
tatggtgatcttggt

SEQ ID NO: 1553680 - DNA, 15 bp, Homo sapiens
ctatggtgatcttgg

SEQ ID NO: 1553681 - DNA, 15 bp, Homo sapiens
gctatggtgatcttg

SEQ ID NO: 1553682 - DNA, 15 bp, Homo sapiens
tgctatggtgatctt

SEQ ID NO: 1553683 - DNA, 15 bp, Homo sapiens
atgctatggtgatct

SEQ ID NO: 1553684 - DNA, 15 bp, Homo sapiens
catgctatggtgatc

SEQ ID NO: 1553685 - DNA, 15 bp, Homo sapiens
tcatgctatggtgat

SEQ ID NO: 1553686 - DNA, 15 bp, Homo sapiens
ctcatgctatggtga

SEQ ID NO: 1553687 - DNA, 15 bp, Homo sapiens
tctcatgctatggtg

SEQ ID NO: 1553688 - DNA, 15 bp, Homo sapiens
ttctcatgctatggt

SEQ ID NO: 1553689 - DNA, 15 bp, Homo sapiens
tttctcatgctatgg

SEQ ID NO: 1553690 - DNA, 15 bp, Homo sapiens
atttctcatgctatg

SEQ ID NO: 1553691 - DNA, 15 bp, Homo sapiens
gatttctcatgctat

SEQ ID NO: 1553692 - DNA, 15 bp, Homo sapiens
tgatttctcatgcta

SEQ ID NO: 1553693 - DNA, 15 bp, Homo sapiens
atgatttctcatgct

SEQ ID NO: 1553694 - DNA, 15 bp, Homo sapiens
aatgatttctcatgc

SEQ ID NO: 1553695 - DNA, 15 bp, Homo sapiens
gaatgatttctcatg

SEQ ID NO: 1553696 - DNA, 15 bp, Homo sapiens
agaatgatttctcat

SEQ ID NO: 1553697 - DNA, 15 bp, Homo sapiens
tagaatgatttctca

SEQ ID NO: 1553698 - DNA, 15 bp, Homo sapiens
ctagaatgatttctc

SEQ ID NO: 1553699 - DNA, 15 bp, Homo sapiens
gctagaatgatttct

SEQ ID NO: 1553700 - DNA, 15 bp, Homo sapiens
tgctagaatgatttc

SEQ ID NO: 1553701 - DNA, 15 bp, Homo sapiens
atgctagaatgattt

SEQ ID NO: 1553702 - DNA, 15 bp, Homo sapiens
aatgctagaatgatt

SEQ ID NO: 1553703 - DNA, 15 bp, Homo sapiens
aaatgctagaatgat

SEQ ID NO: 1553704 - DNA, 15 bp, Homo sapiens
taaatgctagaatga

SEQ ID NO: 1553705 - DNA, 15 bp, Homo sapiens
ataaatgctagaatg

SEQ ID NO: 1553706 - DNA, 15 bp, Homo sapiens
aataaatgctagaat

SEQ ID NO: 1553707 - DNA, 15 bp, Homo sapiens
taataaatgctagaa

SEQ ID NO: 1553708 - DNA, 15 bp, Homo sapiens
ttaataaatgctaga

SEQ ID NO: 1553709 - DNA, 15 bp, Homo sapiens
tttaataaatgctag

SEQ ID NO: 1553710 - DNA, 15 bp, Homo sapiens
atttaataaatgcta

SEQ ID NO: 1553711 - DNA, 15 bp, Homo sapiens
tatttaataaatgct

SEQ ID NO: 1553712 - DNA, 15 bp, Homo sapiens
ttatttaataaatgc

SEQ ID NO: 1553713 - DNA, 15 bp, Homo sapiens
cttatttaataaatg

SEQ ID NO: 1553714 - DNA, 15 bp, Homo sapiens
acttatttaataaat

SEQ ID NO: 1553715 - DNA, 15 bp, Homo sapiens
tacttatttaataaa

SEQ ID NO: 1553716 - DNA, 15 bp, Homo sapiens
ttacttatttaataa

SEQ ID NO: 1553717 - DNA, 15 bp, Homo sapiens
tttacttatttaata

SEQ ID NO: 1553718 - DNA, 15 bp, Homo sapiens
atttacttatttaat

SEQ ID NO: 1553719 - DNA, 15 bp, Homo sapiens
catttacttatttaa

SEQ ID NO: 1553720 - DNA, 15 bp, Homo sapiens
acatttacttattta

SEQ ID NO: 1553721 - DNA, 15 bp, Homo sapiens
aacatttacttattt

SEQ ID NO: 1553722 - DNA, 15 bp, Homo sapiens
gaacatttacttatt

SEQ ID NO: 1553723 - DNA, 15 bp, Homo sapiens
ggaacatttacttat

SEQ ID NO: 1553724 - DNA, 15 bp, Homo sapiens
aggaacatttactta

SEQ ID NO: 1553725 - DNA, 15 bp, Homo sapiens
caggaacatttactt

SEQ ID NO: 1553726 - DNA, 15 bp, Homo sapiens
tcaggaacatttact

SEQ ID NO: 1553727 - DNA, 15 bp, Homo sapiens
ttcaggaacatttac

SEQ ID NO: 1553728 - DNA, 15 bp, Homo sapiens
attcaggaacattta

SEQ ID NO: 1553729 - DNA, 15 bp, Homo sapiens
aattcaggaacattt

SEQ ID NO: 1553730 - DNA, 15 bp, Homo sapiens
gaattcaggaacatt

SEQ ID NO: 1553731 - DNA, 15 bp, Homo sapiens
tgaattcaggaacat

SEQ ID NO: 1553732 - DNA, 15 bp, Homo sapiens
atgaattcaggaaca

SEQ ID NO: 1553733 - DNA, 15 bp, Homo sapiens
aatgaattcaggaac

SEQ ID NO: 1553734 - DNA, 15 bp, Homo sapiens
gaatgaattcaggaa

SEQ ID NO: 1553735 - DNA, 15 bp, Homo sapiens
ggaatgaattcagga

SEQ ID NO: 1553736 - DNA, 15 bp, Homo sapiens
cggaatgaattcagg

SEQ ID NO: 1553737 - DNA, 15 bp, Homo sapiens
tcggaatgaattcag

SEQ ID NO: 1553738 - DNA, 15 bp, Homo sapiens
ctcggaatgaattca

SEQ ID NO: 1553739 - DNA, 15 bp, Homo sapiens
tctcggaatgaattc

SEQ ID NO: 1553740 - DNA, 15 bp, Homo sapiens
atctcggaatgaatt

SEQ ID NO: 1553741 - DNA, 15 bp, Homo sapiens
aatctcggaatgaat

SEQ ID NO: 1553742 - DNA, 15 bp, Homo sapiens
gaatctcggaatgaa

SEQ ID NO: 1553743 - DNA, 15 bp, Homo sapiens
tgaatctcggaatga

SEQ ID NO: 1553744 - DNA, 15 bp, Homo sapiens
ctgaatctcggaatg

SEQ ID NO: 1553745 - DNA, 15 bp, Homo sapiens
actgaatctcggaat

SEQ ID NO: 1553746 - DNA, 15 bp, Homo sapiens
aactgaatctcggaa

SEQ ID NO: 1553747 - DNA, 15 bp, Homo sapiens
aaactgaatctcgga

SEQ ID NO: 1553748 - DNA, 15 bp, Homo sapiens
taaactgaatctcgg

SEQ ID NO: 1553749 - DNA, 15 bp, Homo sapiens
ctaaactgaatctcg

SEQ ID NO: 1553750 - DNA, 15 bp, Homo sapiens
cctaaactgaatctc

SEQ ID NO: 1553751 - DNA, 15 bp, Homo sapiens
tcctaaactgaatct

SEQ ID NO: 1553752 - DNA, 15 bp, Homo sapiens
ctcctaaactgaatc

SEQ ID NO: 1553753 - DNA, 15 bp, Homo sapiens
actcctaaactgaat

SEQ ID NO: 1553754 - DNA, 15 bp, Homo sapiens
aactcctaaactgaa

SEQ ID NO: 1553755 - DNA, 15 bp, Homo sapiens
taactcctaaactga

SEQ ID NO: 1553756 - DNA, 15 bp, Homo sapiens
ttaactcctaaactg

SEQ ID NO: 1553757 - DNA, 15 bp, Homo sapiens
attaactcctaaact

SEQ ID NO: 1553758 - DNA, 15 bp, Homo sapiens
cattaactcctaaac

SEQ ID NO: 1553759 - DNA, 15 bp, Homo sapiens
acattaactcctaaa

SEQ ID NO: 1553760 - DNA, 15 bp, Homo sapiens
aacattaactcctaa

SEQ ID NO: 1553761 - DNA, 15 bp, Homo sapiens
aaacattaactccta

SEQ ID NO: 1553762 - DNA, 15 bp, Homo sapiens
aaaacattaactcct

SEQ ID NO: 1553763 - DNA, 15 bp, Homo sapiens
taaaacattaactcc

SEQ ID NO: 1553764 - DNA, 15 bp, Homo sapiens
ataaaacattaactc

SEQ ID NO: 1553765 - DNA, 15 bp, Homo sapiens
aataaaacattaact

SEQ ID NO: 1553766 - DNA, 15 bp, Homo sapiens
aaataaaacattaac

SEQ ID NO: 1553767 - DNA, 15 bp, Homo sapiens
gaaataaaacattaa

SEQ ID NO: 1553768 - DNA, 15 bp, Homo sapiens
tgaaataaaacatta

SEQ ID NO: 1553769 - DNA, 15 bp, Homo sapiens
ttgaaataaaacatt

SEQ ID NO: 1553770 - DNA, 15 bp, Homo sapiens
attgaaataaaacat

SEQ ID NO: 1553771 - DNA, 15 bp, Homo sapiens
cattgaaataaaaca

SEQ ID NO: 1553772 - DNA, 15 bp, Homo sapiens
tcattgaaataaaac

SEQ ID NO: 1553773 - DNA, 15 bp, Homo sapiens
ttcattgaaataaaa

SEQ ID NO: 1553774 - DNA, 15 bp, Homo sapiens
tttcattgaaataaa

SEQ ID NO: 1553775 - DNA, 15 bp, Homo sapiens
ctttcattgaaataa

SEQ ID NO: 1553776 - DNA, 15 bp, Homo sapiens
actttcattgaaata

SEQ ID NO: 1553777 - DNA, 15 bp, Homo sapiens
tactttcattgaaat

SEQ ID NO: 1553778 - DNA, 15 bp, Homo sapiens
ttactttcattgaaa

SEQ ID NO: 1553779 - DNA, 15 bp, Homo sapiens
tttactttcattgaa

SEQ ID NO: 1553780 - DNA, 15 bp, Homo sapiens
ttttactttcattga

SEQ ID NO: 1553781 - DNA, 15 bp, Homo sapiens
attttactttcattg

SEQ ID NO: 1553782 - DNA, 15 bp, Homo sapiens
tattttactttcatt

SEQ ID NO: 1553783 - DNA, 15 bp, Homo sapiens
ttattttactttcat

SEQ ID NO: 1553784 - DNA, 15 bp, Homo sapiens
tttattttactttca

SEQ ID NO: 1553785 - DNA, 15 bp, Homo sapiens
ttttattttactttc

SEQ ID NO: 1553786 - DNA, 15 bp, Homo sapiens
tttttattttacttt

SEQ ID NO: 1553787 - DNA, 15 bp, Homo sapiens
ttttttattttactt

SEQ ID NO: 1553788 - DNA, 15 bp, Homo sapiens
aattttttattttac

SEQ ID NO: 1553789 - DNA, 15 bp, Homo sapiens
gaattttttatttta

SEQ ID NO: 1553790 - DNA, 15 bp, Homo sapiens
agaattttttatttt

SEQ ID NO: 1553791 - DNA, 15 bp, Homo sapiens
cagaattttttattt

SEQ ID NO: 1553792 - DNA, 15 bp, Homo sapiens
acagaattttttatt

SEQ ID NO: 1553793 - DNA, 15 bp, Homo sapiens
aacagaattttttat

SEQ ID NO: 1553794 - DNA, 15 bp, Homo sapiens
aaacagaatttttta

SEQ ID NO: 1553795 - DNA, 15 bp, Homo sapiens
aaaacagaatttttt

SEQ ID NO: 1553796 - DNA, 15 bp, Homo sapiens
gaaaacagaattttt

SEQ ID NO: 1553797 - DNA, 15 bp, Homo sapiens
ggaaaacagaatttt

SEQ ID NO: 1553798 - DNA, 15 bp, Homo sapiens
aggaaaacagaattt

SEQ ID NO: 1553799 - DNA, 15 bp, Homo sapiens
taggaaaacagaatt

SEQ ID NO: 1553800 - DNA, 15 bp, Homo sapiens
ttaggaaaacagaat

SEQ ID NO: 1553801 - DNA, 15 bp, Homo sapiens
tttaggaaaacagaa

SEQ ID NO: 1553802 - DNA, 15 bp, Homo sapiens
ttttaggaaaacaga

SEQ ID NO: 1553803 - DNA, 15 bp, Homo sapiens
cttttaggaaaacag

SEQ ID NO: 1553804 - DNA, 15 bp, Homo sapiens
ccttttaggaaaaca

SEQ ID NO: 1553805 - DNA, 15 bp, Homo sapiens
gccttttaggaaaac

SEQ ID NO: 1553806 - DNA, 15 bp, Homo sapiens
tgccttttaggaaaa

SEQ ID NO: 1553807 - DNA, 15 bp, Homo sapiens
gtgccttttaggaaa

SEQ ID NO: 1553808 - DNA, 15 bp, Homo sapiens
agtgccttttaggaa

SEQ ID NO: 1553809 - DNA, 15 bp, Homo sapiens
aagtgccttttagga

SEQ ID NO: 1553810 - DNA, 15 bp, Homo sapiens
caagtgccttttagg

SEQ ID NO: 1553811 - DNA, 15 bp, Homo sapiens
tcaagtgccttttag

SEQ ID NO: 1553812 - DNA, 15 bp, Homo sapiens
ctcaagtgcctttta

SEQ ID NO: 1553813 - DNA, 15 bp, Homo sapiens
tctcaagtgcctttt

SEQ ID NO: 1553814 - DNA, 15 bp, Homo sapiens
ctctcaagtgccttt

SEQ ID NO: 1553815 - DNA, 15 bp, Homo sapiens
actctcaagtgcctt

SEQ ID NO: 1553816 - DNA, 15 bp, Homo sapiens
aactctcaagtgcct

SEQ ID NO: 1553817 - DNA, 15 bp, Homo sapiens
caactctcaagtgcc

SEQ ID NO: 1553818 - DNA, 15 bp, Homo sapiens
gcaactctcaagtgc

SEQ ID NO: 1553819 - DNA, 15 bp, Homo sapiens
agcaactctcaagtg

SEQ ID NO: 1553820 - DNA, 15 bp, Homo sapiens
aagcaactctcaagt

SEQ ID NO: 1553821 - DNA, 15 bp, Homo sapiens
taagcaactctcaag

SEQ ID NO: 1553822 - DNA, 15 bp, Homo sapiens
ttaagcaactctcaa

SEQ ID NO: 1553823 - DNA, 15 bp, Homo sapiens
tttaagcaactctca

SEQ ID NO: 1553824 - DNA, 15 bp, Homo sapiens
ttttaagcaactctc

SEQ ID NO: 1553825 - DNA, 15 bp, Homo sapiens
cttttaagcaactct

SEQ ID NO: 1553826 - DNA, 15 bp, Homo sapiens
ccttttaagcaactc

SEQ ID NO: 1553827 - DNA, 15 bp, Homo sapiens
tccttttaagcaact

SEQ ID NO: 1553828 - DNA, 15 bp, Homo sapiens
gtccttttaagcaac

SEQ ID NO: 1553829 - DNA, 15 bp, Homo sapiens
ggtccttttaagcaa

SEQ ID NO: 1553830 - DNA, 15 bp, Homo sapiens
aggtccttttaagca

SEQ ID NO: 1553831 - DNA, 15 bp, Homo sapiens
caggtccttttaagc

SEQ ID NO: 1553832 - DNA, 15 bp, Homo sapiens
tcaggtccttttaag

SEQ ID NO: 1553833 - DNA, 15 bp, Homo sapiens
gtcaggtccttttaa

SEQ ID NO: 1553834 - DNA, 15 bp, Homo sapiens
tgtcaggtcctttta

SEQ ID NO: 1553835 - DNA, 15 bp, Homo sapiens
gtgtcaggtcctttt

SEQ ID NO: 1553836 - DNA, 15 bp, Homo sapiens
agtgtcaggtccttt

SEQ ID NO: 1553837 - DNA, 15 bp, Homo sapiens
aagtgtcaggtcctt

SEQ ID NO: 1553838 - DNA, 15 bp, Homo sapiens
taagtgtcaggtcct

SEQ ID NO: 1553839 - DNA, 15 bp, Homo sapiens
gtaagtgtcaggtcc

SEQ ID NO: 1553840 - DNA, 15 bp, Homo sapiens
tgtaagtgtcaggtc

SEQ ID NO: 1553841 - DNA, 15 bp, Homo sapiens
ttgtaagtgtcaggt

SEQ ID NO: 1553842 - DNA, 15 bp, Homo sapiens
gttgtaagtgtcagg

SEQ ID NO: 1553843 - DNA, 15 bp, Homo sapiens
tgttgtaagtgtcag

SEQ ID NO: 1553844 - DNA, 15 bp, Homo sapiens
ctgttgtaagtgtca

SEQ ID NO: 1553845 - DNA, 15 bp, Homo sapiens
actgttgtaagtgtc

SEQ ID NO: 1553846 - DNA, 15 bp, Homo sapiens
gactgttgtaagtgt

SEQ ID NO: 1553847 - DNA, 15 bp, Homo sapiens
tgactgttgtaagtg

SEQ ID NO: 1553848 - DNA, 15 bp, Homo sapiens
ttgactgttgtaagt

SEQ ID NO: 1553849 - DNA, 15 bp, Homo sapiens
cttgactgttgtaag

SEQ ID NO: 1553850 - DNA, 15 bp, Homo sapiens
acttgactgttgtaa

SEQ ID NO: 1553851 - DNA, 15 bp, Homo sapiens
aacttgactgttgta

SEQ ID NO: 1553852 - DNA, 15 bp, Homo sapiens
gaacttgactgttgt

SEQ ID NO: 1553853 - DNA, 15 bp, Homo sapiens
agaacttgactgttg

SEQ ID NO: 1553854 - DNA, 15 bp, Homo sapiens
cagaacttgactgtt

SEQ ID NO: 1553855 - DNA, 15 bp, Homo sapiens
tcagaacttgactgt

SEQ ID NO: 1553856 - DNA, 15 bp, Homo sapiens
atcagaacttgactg

SEQ ID NO: 1553857 - DNA, 15 bp, Homo sapiens
tatcagaacttgact

SEQ ID NO: 1553858 - DNA, 15 bp, Homo sapiens
ctatcagaacttgac

SEQ ID NO: 1553859 - DNA, 15 bp, Homo sapiens
tctatcagaacttga

SEQ ID NO: 1553860 - DNA, 15 bp, Homo sapiens
ttctatcagaacttg

SEQ ID NO: 1553861 - DNA, 15 bp, Homo sapiens
cttctatcagaactt

SEQ ID NO: 1553862 - DNA, 15 bp, Homo sapiens
gcttctatcagaact

SEQ ID NO: 1553863 - DNA, 15 bp, Homo sapiens
agcttctatcagaac

SEQ ID NO: 1553864 - DNA, 15 bp, Homo sapiens
tagcttctatcagaa

SEQ ID NO: 1553865 - DNA, 15 bp, Homo sapiens
gtagcttctatcaga

SEQ ID NO: 1553866 - DNA, 15 bp, Homo sapiens
tgtagcttctatcag

SEQ ID NO: 1553867 - DNA, 15 bp, Homo sapiens
ctgtagcttctatca

SEQ ID NO: 1553868 - DNA, 15 bp, Homo sapiens
actgtagcttctatc

SEQ ID NO: 1553869 - DNA, 15 bp, Homo sapiens
tactgtagcttctat

SEQ ID NO: 1553870 - DNA, 15 bp, Homo sapiens
ttactgtagcttcta

SEQ ID NO: 1553871 - DNA, 15 bp, Homo sapiens
attactgtagcttct

SEQ ID NO: 1553872 - DNA, 15 bp, Homo sapiens
tattactgtagcttc

SEQ ID NO: 1553873 - DNA, 15 bp, Homo sapiens
ctattactgtagctt

SEQ ID NO: 1553874 - DNA, 15 bp, Homo sapiens
gctattactgtagct

SEQ ID NO: 1553875 - DNA, 15 bp, Homo sapiens
tgctattactgtagc

SEQ ID NO: 1553876 - DNA, 15 bp, Homo sapiens
gtgctattactgtag

SEQ ID NO: 1553877 - DNA, 15 bp, Homo sapiens
agtgctattactgta

SEQ ID NO: 1553878 - DNA, 15 bp, Homo sapiens
tagtgctattactgt

SEQ ID NO: 1553879 - DNA, 15 bp, Homo sapiens
ttagtgctattactg

SEQ ID NO: 1553880 - DNA, 15 bp, Homo sapiens
gttagtgctattact

SEQ ID NO: 1553881 - DNA, 15 bp, Homo sapiens
ggttagtgctattac

SEQ ID NO: 1553882 - DNA, 15 bp, Homo sapiens
tggttagtgctatta

SEQ ID NO: 1553883 - DNA, 15 bp, Homo sapiens
ttggttagtgctatt

SEQ ID NO: 1553884 - DNA, 15 bp, Homo sapiens
tttggttagtgctat

SEQ ID NO: 1553885 - DNA, 15 bp, Homo sapiens
atttggttagtgcta

SEQ ID NO: 1553886 - DNA, 15 bp, Homo sapiens
aatttggttagtgct

SEQ ID NO: 1553887 - DNA, 15 bp, Homo sapiens
taatttggttagtgc

SEQ ID NO: 1553888 - DNA, 15 bp, Homo sapiens
gtaatttggttagtg

SEQ ID NO: 1553889 - DNA, 15 bp, Homo sapiens
tgtaatttggttagt

SEQ ID NO: 1553890 - DNA, 15 bp, Homo sapiens
ctgtaatttggttag

SEQ ID NO: 1553891 - DNA, 15 bp, Homo sapiens
gctgtaatttggtta

SEQ ID NO: 1553892 - DNA, 15 bp, Homo sapiens
ggctgtaatttggtt

SEQ ID NO: 1553893 - DNA, 15 bp, Homo sapiens
tggctgtaatttggt

SEQ ID NO: 1553894 - DNA, 15 bp, Homo sapiens
gtggctgtaatttgg

SEQ ID NO: 1553895 - DNA, 15 bp, Homo sapiens
agtggctgtaatttg

SEQ ID NO: 1553896 - DNA, 15 bp, Homo sapiens
aagtggctgtaattt

SEQ ID NO: 1553897 - DNA, 15 bp, Homo sapiens
gaagtggctgtaatt

SEQ ID NO: 1553898 - DNA, 15 bp, Homo sapiens
agaagtggctgtaat

SEQ ID NO: 1553899 - DNA, 15 bp, Homo sapiens
aagaagtggctgtaa

SEQ ID NO: 1553900 - DNA, 15 bp, Homo sapiens
taagaagtggctgta

SEQ ID NO: 1553901 - DNA, 15 bp, Homo sapiens
ttaagaagtggctgt

SEQ ID NO: 1553902 - DNA, 15 bp, Homo sapiens
attaagaagtggctg

SEQ ID NO: 1553903 - DNA, 15 bp, Homo sapiens
tattaagaagtggct

SEQ ID NO: 1553904 - DNA, 15 bp, Homo sapiens
ttattaagaagtggc

SEQ ID NO: 1553905 - DNA, 15 bp, Homo sapiens
cttattaagaagtgg

SEQ ID NO: 1553906 - DNA, 15 bp, Homo sapiens
ccttattaagaagtg

SEQ ID NO: 1553907 - DNA, 15 bp, Homo sapiens
accttattaagaagt

SEQ ID NO: 1553908 - DNA, 15 bp, Homo sapiens
taccttattaagaag

SEQ ID NO: 1553909 - DNA, 15 bp, Homo sapiens
ttaccttattaagaa

SEQ ID NO: 1553910 - DNA, 15 bp, Homo sapiens
attaccttattaaga

SEQ ID NO: 1553911 - DNA, 15 bp, Homo sapiens
aattaccttattaag

SEQ ID NO: 1553912 - DNA, 15 bp, Homo sapiens
taattaccttattaa

SEQ ID NO: 1553913 - DNA, 15 bp, Homo sapiens
gtaattaccttatta

SEQ ID NO: 1553914 - DNA, 15 bp, Homo sapiens
agtaattaccttatt

SEQ ID NO: 1553915 - DNA, 15 bp, Homo sapiens
cagtaattaccttat

SEQ ID NO: 1553916 - DNA, 15 bp, Homo sapiens
acagtaattacctta

SEQ ID NO: 1553917 - DNA, 15 bp, Homo sapiens
tacagtaattacctt

SEQ ID NO: 1553918 - DNA, 15 bp, Homo sapiens
atacagtaattacct

SEQ ID NO: 1553919 - DNA, 15 bp, Homo sapiens
tatacagtaattacc

SEQ ID NO: 1553920 - DNA, 15 bp, Homo sapiens
ctatacagtaattac

SEQ ID NO: 1553921 - DNA, 15 bp, Homo sapiens
tctatacagtaatta

SEQ ID NO: 1553922 - DNA, 15 bp, Homo sapiens
ttctatacagtaatt

SEQ ID NO: 1553923 - DNA, 15 bp, Homo sapiens
tttctatacagtaat

SEQ ID NO: 1553924 - DNA, 15 bp, Homo sapiens
ttttctatacagtaa

SEQ ID NO: 1553925 - DNA, 15 bp, Homo sapiens
attttctatacagta

SEQ ID NO: 1553926 - DNA, 15 bp, Homo sapiens
cattttctatacagt

SEQ ID NO: 1553927 - DNA, 15 bp, Homo sapiens
tcattttctatacag

SEQ ID NO: 1553928 - DNA, 15 bp, Homo sapiens
ctcattttctataca

SEQ ID NO: 1553929 - DNA, 15 bp, Homo sapiens
actcattttctatac

SEQ ID NO: 1553930 - DNA, 15 bp, Homo sapiens
cactcattttctata

SEQ ID NO: 1553931 - DNA, 15 bp, Homo sapiens
gcactcattttctat

SEQ ID NO: 1553932 - DNA, 15 bp, Homo sapiens
tgcactcattttcta

SEQ ID NO: 1553933 - DNA, 15 bp, Homo sapiens
atgcactcattttct

SEQ ID NO: 1553934 - DNA, 15 bp, Homo sapiens
aatgcactcattttc

SEQ ID NO: 1553935 - DNA, 15 bp, Homo sapiens
gaatgcactcatttt

SEQ ID NO: 1553936 - DNA, 15 bp, Homo sapiens
tgaatgcactcattt

SEQ ID NO: 1553937 - DNA, 15 bp, Homo sapiens
atgaatgcactcatt

SEQ ID NO: 1553938 - DNA, 15 bp, Homo sapiens
aatgaatgcactcat

SEQ ID NO: 1553939 - DNA, 15 bp, Homo sapiens
aaatgaatgcactca

SEQ ID NO: 1553940 - DNA, 15 bp, Homo sapiens
aaaatgaatgcactc

SEQ ID NO: 1553941 - DNA, 15 bp, Homo sapiens
caaaatgaatgcact

SEQ ID NO: 1553942 - DNA, 15 bp, Homo sapiens
ccaaaatgaatgcac

SEQ ID NO: 1553943 - DNA, 15 bp, Homo sapiens
cccaaaatgaatgca

SEQ ID NO: 1553944 - DNA, 15 bp, Homo sapiens
acccaaaatgaatgc

SEQ ID NO: 1553945 - DNA, 15 bp, Homo sapiens
tacccaaaatgaatg

SEQ ID NO: 1553946 - DNA, 15 bp, Homo sapiens
atacccaaaatgaat

SEQ ID NO: 1553947 - DNA, 15 bp, Homo sapiens
gatacccaaaatgaa

SEQ ID NO: 1553948 - DNA, 15 bp, Homo sapiens
tgatacccaaaatga

SEQ ID NO: 1553949 - DNA, 15 bp, Homo sapiens
ctgatacccaaaatg

SEQ ID NO: 1553950 - DNA, 15 bp, Homo sapiens
actgatacccaaaat

SEQ ID NO: 1553951 - DNA, 15 bp, Homo sapiens
cactgatacccaaaa

SEQ ID NO: 1553952 - DNA, 15 bp, Homo sapiens
acactgatacccaaa

SEQ ID NO: 1553953 - DNA, 15 bp, Homo sapiens
aacactgatacccaa

SEQ ID NO: 1553954 - DNA, 15 bp, Homo sapiens
caacactgataccca

SEQ ID NO: 1553955 - DNA, 15 bp, Homo sapiens
tcaacactgataccc

SEQ ID NO: 1553956 - DNA, 15 bp, Homo sapiens
ttcaacactgatacc

SEQ ID NO: 1553957 - DNA, 15 bp, Homo sapiens
attcaacactgatac

SEQ ID NO: 1553958 - DNA, 15 bp, Homo sapiens
cattcaacactgata

SEQ ID NO: 1553959 - DNA, 15 bp, Homo sapiens
acattcaacactgat

SEQ ID NO: 1553960 - DNA, 15 bp, Homo sapiens
aacattcaacactga

SEQ ID NO: 1553961 - DNA, 15 bp, Homo sapiens
taacattcaacactg

SEQ ID NO: 1553962 - DNA, 15 bp, Homo sapiens
gtaacattcaacact

SEQ ID NO: 1553963 - DNA, 15 bp, Homo sapiens
agtaacattcaacac

SEQ ID NO: 1553964 - DNA, 15 bp, Homo sapiens
aagtaacattcaaca

SEQ ID NO: 1553965 - DNA, 15 bp, Homo sapiens
aaagtaacattcaac

SEQ ID NO: 1553966 - DNA, 15 bp, Homo sapiens
gaaagtaacattcaa

SEQ ID NO: 1553967 - DNA, 15 bp, Homo sapiens
agaaagtaacattca

SEQ ID NO: 1553968 - DNA, 15 bp, Homo sapiens
aagaaagtaacattc

SEQ ID NO: 1553969 - DNA, 15 bp, Homo sapiens
aaagaaagtaacatt

SEQ ID NO: 1553970 - DNA, 15 bp, Homo sapiens
gaaagaaagtaacat

SEQ ID NO: 1553971 - DNA, 15 bp, Homo sapiens
tgaaagaaagtaaca

SEQ ID NO: 1553972 - DNA, 15 bp, Homo sapiens
ttgaaagaaagtaac

SEQ ID NO: 1553973 - DNA, 15 bp, Homo sapiens
tttgaaagaaagtaa

SEQ ID NO: 1553974 - DNA, 15 bp, Homo sapiens
ctttgaaagaaagta

SEQ ID NO: 1553975 - DNA, 15 bp, Homo sapiens
tctttgaaagaaagt

SEQ ID NO: 1553976 - DNA, 15 bp, Homo sapiens
ctctttgaaagaaag

SEQ ID NO: 1553977 - DNA, 15 bp, Homo sapiens
actctttgaaagaaa

SEQ ID NO: 1553978 - DNA, 15 bp, Homo sapiens
aactctttgaaagaa

SEQ ID NO: 1553979 - DNA, 15 bp, Homo sapiens
aaactctttgaaaga

SEQ ID NO: 1553980 - DNA, 15 bp, Homo sapiens
taaactctttgaaag

SEQ ID NO: 1553981 - DNA, 15 bp, Homo sapiens
ctaaactctttgaaa

SEQ ID NO: 1553982 - DNA, 15 bp, Homo sapiens
tctaaactctttgaa

SEQ ID NO: 1553983 - DNA, 15 bp, Homo sapiens
ttctaaactctttga

SEQ ID NO: 1553984 - DNA, 15 bp, Homo sapiens
tttctaaactctttg

SEQ ID NO: 1553985 - DNA, 15 bp, Homo sapiens
ttttctaaactcttt

SEQ ID NO: 1553986 - DNA, 15 bp, Homo sapiens
attttctaaactctt

SEQ ID NO: 1553987 - DNA, 15 bp, Homo sapiens
tattttctaaactct

SEQ ID NO: 1553988 - DNA, 15 bp, Homo sapiens
ttattttctaaactc

SEQ ID NO: 1553989 - DNA, 15 bp, Homo sapiens
cttattttctaaact

SEQ ID NO: 1553990 - DNA, 15 bp, Homo sapiens
tcttattttctaaac

SEQ ID NO: 1553991 - DNA, 15 bp, Homo sapiens
atcttattttctaaa

SEQ ID NO: 1553992 - DNA, 15 bp, Homo sapiens
catcttattttctaa

SEQ ID NO: 1553993 - DNA, 15 bp, Homo sapiens
tcatcttattttcta

SEQ ID NO: 1553994 - DNA, 15 bp, Homo sapiens
ttcatcttattttct

SEQ ID NO: 1553995 - DNA, 15 bp, Homo sapiens
attcatcttattttc

SEQ ID NO: 1553996 - DNA, 15 bp, Homo sapiens
aattcatcttatttt

SEQ ID NO: 1553997 - DNA, 15 bp, Homo sapiens
caattcatcttattt

SEQ ID NO: 1553998 - DNA, 15 bp, Homo sapiens
tcaattcatcttatt

SEQ ID NO: 1553999 - DNA, 15 bp, Homo sapiens
ctcaattcatcttat

SEQ ID NO: 1554000 - DNA, 15 bp, Homo sapiens
tctcaattcatctta

SEQ ID NO: 1554001 - DNA, 15 bp, Homo sapiens
ttctcaattcatctt

SEQ ID NO: 1554002 - DNA, 15 bp, Homo sapiens
attctcaattcatct

SEQ ID NO: 1554003 - DNA, 15 bp, Homo sapiens
tattctcaattcatc

SEQ ID NO: 1554004 - DNA, 15 bp, Homo sapiens
ttattctcaattcat

SEQ ID NO: 1554005 - DNA, 15 bp, Homo sapiens
cttattctcaattca

SEQ ID NO: 1554006 - DNA, 15 bp, Homo sapiens
acttattctcaattc

SEQ ID NO: 1554007 - DNA, 15 bp, Homo sapiens
aacttattctcaatt

SEQ ID NO: 1554008 - DNA, 15 bp, Homo sapiens
taacttattctcaat

SEQ ID NO: 1554009 - DNA, 15 bp, Homo sapiens
ataacttattctcaa

SEQ ID NO: 1554010 - DNA, 15 bp, Homo sapiens
tataacttattctca

SEQ ID NO: 1554011 - DNA, 15 bp, Homo sapiens
ttataacttattctc

SEQ ID NO: 1554012 - DNA, 15 bp, Homo sapiens
tttataacttattct

SEQ ID NO: 1554013 - DNA, 15 bp, Homo sapiens
ctttataacttattc

SEQ ID NO: 1554014 - DNA, 15 bp, Homo sapiens
tctttataacttatt

SEQ ID NO: 1554015 - DNA, 15 bp, Homo sapiens
ttctttataacttat

SEQ ID NO: 1554016 - DNA, 15 bp, Homo sapiens
tttctttataactta

SEQ ID NO: 1554017 - DNA, 15 bp, Homo sapiens
ttttctttataactt

SEQ ID NO: 1554018 - DNA, 15 bp, Homo sapiens
tttttctttataact

SEQ ID NO: 1554019 - DNA, 15 bp, Homo sapiens
ttttttctttataac

SEQ ID NO: 1554020 - DNA, 15 bp, Homo sapiens
gttttttctttataa

SEQ ID NO: 1554021 - DNA, 15 bp, Homo sapiens
agttttttctttata

SEQ ID NO: 1554022 - DNA, 15 bp, Homo sapiens
tagttttttctttat

SEQ ID NO: 1554023 - DNA, 15 bp, Homo sapiens
atagttttttcttta

SEQ ID NO: 1554024 - DNA, 15 bp, Homo sapiens
tatagttttttcttt

SEQ ID NO: 1554025 - DNA, 15 bp, Homo sapiens
ctatagttttttctt

SEQ ID NO: 1554026 - DNA, 15 bp, Homo sapiens
actatagttttttct

SEQ ID NO: 1554027 - DNA, 15 bp, Homo sapiens
aactatagttttttc

SEQ ID NO: 1554028 - DNA, 15 bp, Homo sapiens
taactatagtttttt

SEQ ID NO: 1554029 - DNA, 15 bp, Homo sapiens
ttaactatagttttt

SEQ ID NO: 1554030 - DNA, 15 bp, Homo sapiens
tttaactatagtttt

SEQ ID NO: 1554031 - DNA, 15 bp, Homo sapiens
ctttaactatagttt

SEQ ID NO: 1554032 - DNA, 15 bp, Homo sapiens
actttaactatagtt

SEQ ID NO: 1554033 - DNA, 15 bp, Homo sapiens
tactttaactatagt

SEQ ID NO: 1554034 - DNA, 15 bp, Homo sapiens
ctactttaactatag

SEQ ID NO: 1554035 - DNA, 15 bp, Homo sapiens
tctactttaactata

SEQ ID NO: 1554036 - DNA, 15 bp, Homo sapiens
ttctactttaactat

SEQ ID NO: 1554037 - DNA, 15 bp, Homo sapiens
gttctactttaacta

SEQ ID NO: 1554038 - DNA, 15 bp, Homo sapiens
ggttctactttaact

SEQ ID NO: 1554039 - DNA, 15 bp, Homo sapiens
aggttctactttaac

SEQ ID NO: 1554040 - DNA, 15 bp, Homo sapiens
gaggttctactttaa

SEQ ID NO: 1554041 - DNA, 15 bp, Homo sapiens
agaggttctacttta

SEQ ID NO: 1554042 - DNA, 15 bp, Homo sapiens
aagaggttctacttt

SEQ ID NO: 1554043 - DNA, 15 bp, Homo sapiens
taagaggttctactt

SEQ ID NO: 1554044 - DNA, 15 bp, Homo sapiens
ttaagaggttctact

SEQ ID NO: 1554045 - DNA, 15 bp, Homo sapiens
tttaagaggttctac

SEQ ID NO: 1554046 - DNA, 15 bp, Homo sapiens
ctttaagaggttcta

SEQ ID NO: 1554047 - DNA, 15 bp, Homo sapiens
actttaagaggttct

SEQ ID NO: 1554048 - DNA, 15 bp, Homo sapiens
aactttaagaggttc

SEQ ID NO: 1554049 - DNA, 15 bp, Homo sapiens
aaactttaagaggtt

SEQ ID NO: 1554050 - DNA, 15 bp, Homo sapiens
taaactttaagaggt

SEQ ID NO: 1554051 - DNA, 15 bp, Homo sapiens
ctaaactttaagagg

SEQ ID NO: 1554052 - DNA, 15 bp, Homo sapiens
actaaactttaagag

SEQ ID NO: 1554053 - DNA, 15 bp, Homo sapiens
aactaaactttaaga

SEQ ID NO: 1554054 - DNA, 15 bp, Homo sapiens
caactaaactttaag

SEQ ID NO: 1554055 - DNA, 15 bp, Homo sapiens
acaactaaactttaa

SEQ ID NO: 1554056 - DNA, 15 bp, Homo sapiens
aacaactaaacttta

SEQ ID NO: 1554057 - DNA, 15 bp, Homo sapiens
aaacaactaaacttt

SEQ ID NO: 1554058 - DNA, 15 bp, Homo sapiens
caaacaactaaactt

SEQ ID NO: 1554059 - DNA, 15 bp, Homo sapiens
tcaaacaactaaact

SEQ ID NO: 1554060 - DNA, 15 bp, Homo sapiens
ttcaaacaactaaac

SEQ ID NO: 1554061 - DNA, 15 bp, Homo sapiens
cttcaaacaactaaa

SEQ ID NO: 1554062 - DNA, 15 bp, Homo sapiens
acttcaaacaactaa

SEQ ID NO: 1554063 - DNA, 15 bp, Homo sapiens
tacttcaaacaacta

SEQ ID NO: 1554064 - DNA, 15 bp, Homo sapiens
ctacttcaaacaact

SEQ ID NO: 1554065 - DNA, 15 bp, Homo sapiens
actacttcaaacaac

SEQ ID NO: 1554066 - DNA, 15 bp, Homo sapiens
gactacttcaaacaa

SEQ ID NO: 1554067 - DNA, 15 bp, Homo sapiens
tgactacttcaaaca

SEQ ID NO: 1554068 - DNA, 15 bp, Homo sapiens
atgactacttcaaac

SEQ ID NO: 1554069 - DNA, 15 bp, Homo sapiens
tatgactacttcaaa

SEQ ID NO: 1554070 - DNA, 15 bp, Homo sapiens
atatgactacttcaa

SEQ ID NO: 1554071 - DNA, 15 bp, Homo sapiens
aatatgactacttca

SEQ ID NO: 1554072 - DNA, 15 bp, Homo sapiens
taatatgactacttc

SEQ ID NO: 1554073 - DNA, 15 bp, Homo sapiens
ctaatatgactactt

SEQ ID NO: 1554074 - DNA, 15 bp, Homo sapiens
tctaatatgactact

SEQ ID NO: 1554075 - DNA, 15 bp, Homo sapiens
ttctaatatgactac

SEQ ID NO: 1554076 - DNA, 15 bp, Homo sapiens
cttctaatatgacta

SEQ ID NO: 1554077 - DNA, 15 bp, Homo sapiens
tcttctaatatgact

SEQ ID NO: 1554078 - DNA, 15 bp, Homo sapiens
ttcttctaatatgac

SEQ ID NO: 1554079 - DNA, 15 bp, Homo sapiens
cttcttctaatatga

SEQ ID NO: 1554080 - DNA, 15 bp, Homo sapiens
tcttcttctaatatg

SEQ ID NO: 1554081 - DNA, 15 bp, Homo sapiens
ctcttcttctaatat

SEQ ID NO: 1554082 - DNA, 15 bp, Homo sapiens
actcttcttctaata

SEQ ID NO: 1554083 - DNA, 15 bp, Homo sapiens
tactcttcttctaat

SEQ ID NO: 1554084 - DNA, 15 bp, Homo sapiens
ttactcttcttctaa

SEQ ID NO: 1554085 - DNA, 15 bp, Homo sapiens
cttactcttcttcta

SEQ ID NO: 1554086 - DNA, 15 bp, Homo sapiens
acttactcttcttct

SEQ ID NO: 1554087 - DNA, 15 bp, Homo sapiens
tacttactcttcttc

SEQ ID NO: 1554088 - DNA, 15 bp, Homo sapiens
atacttactcttctt

SEQ ID NO: 1554089 - DNA, 15 bp, Homo sapiens
catacttactcttct

SEQ ID NO: 1554090 - DNA, 15 bp, Homo sapiens
ccatacttactcttc

SEQ ID NO: 1554091 - DNA, 15 bp, Homo sapiens
tccatacttactctt

SEQ ID NO: 1554092 - DNA, 15 bp, Homo sapiens
atccatacttactct

SEQ ID NO: 1554093 - DNA, 15 bp, Homo sapiens
tatccatacttactc

SEQ ID NO: 1554094 - DNA, 15 bp, Homo sapiens
ctatccatacttact

SEQ ID NO: 1554095 - DNA, 15 bp, Homo sapiens
actatccatacttac

SEQ ID NO: 1554096 - DNA, 15 bp, Homo sapiens
tactatccatactta

SEQ ID NO: 1554097 - DNA, 15 bp, Homo sapiens
atactatccatactt

SEQ ID NO: 1554098 - DNA, 15 bp, Homo sapiens
catactatccatact

SEQ ID NO: 1554099 - DNA, 15 bp, Homo sapiens
acatactatccatac

SEQ ID NO: 1554100 - DNA, 15 bp, Homo sapiens
aacatactatccata

SEQ ID NO: 1554101 - DNA, 15 bp, Homo sapiens
gaacatactatccat

SEQ ID NO: 1554102 - DNA, 15 bp, Homo sapiens
agaacatactatcca

SEQ ID NO: 1554103 - DNA, 15 bp, Homo sapiens
gagaacatactatcc

SEQ ID NO: 1554104 - DNA, 15 bp, Homo sapiens
tgagaacatactatc

SEQ ID NO: 1554105 - DNA, 15 bp, Homo sapiens
ttgagaacatactat

SEQ ID NO: 1554106 - DNA, 15 bp, Homo sapiens
cttgagaacatacta

SEQ ID NO: 1554107 - DNA, 15 bp, Homo sapiens
gcttgagaacatact

SEQ ID NO: 1554108 - DNA, 15 bp, Homo sapiens
cgcttgagaacatac

SEQ ID NO: 1554109 - DNA, 15 bp, Homo sapiens
gcgcttgagaacata

SEQ ID NO: 1554110 - DNA, 15 bp, Homo sapiens
agcgcttgagaacat

SEQ ID NO: 1554111 - DNA, 15 bp, Homo sapiens
aagcgcttgagaaca

SEQ ID NO: 1554112 - DNA, 15 bp, Homo sapiens
caagcgcttgagaac

SEQ ID NO: 1554113 - DNA, 15 bp, Homo sapiens
acaagcgcttgagaa

SEQ ID NO: 1554114 - DNA, 15 bp, Homo sapiens
tacaagcgcttgaga

SEQ ID NO: 1554115 - DNA, 15 bp, Homo sapiens
ttacaagcgcttgag

SEQ ID NO: 1554116 - DNA, 15 bp, Homo sapiens
cttacaagcgcttga

SEQ ID NO: 1554117 - DNA, 15 bp, Homo sapiens
acttacaagcgcttg

SEQ ID NO: 1554118 - DNA, 15 bp, Homo sapiens
aacttacaagcgctt

SEQ ID NO: 1554119 - DNA, 15 bp, Homo sapiens
aaacttacaagcgct

SEQ ID NO: 1554120 - DNA, 15 bp, Homo sapiens
aaaacttacaagcgc

SEQ ID NO: 1554121 - DNA, 15 bp, Homo sapiens
aaaaacttacaagcg

SEQ ID NO: 1554122 - DNA, 15 bp, Homo sapiens
caaaaacttacaagc

SEQ ID NO: 1554123 - DNA, 15 bp, Homo sapiens
ccaaaaacttacaag

SEQ ID NO: 1554124 - DNA, 15 bp, Homo sapiens
accaaaaacttacaa

SEQ ID NO: 1554125 - DNA, 15 bp, Homo sapiens
gaccaaaaacttaca

SEQ ID NO: 1554126 - DNA, 15 bp, Homo sapiens
agaccaaaaacttac

SEQ ID NO: 1554127 - DNA, 15 bp, Homo sapiens
gagaccaaaaactta

SEQ ID NO: 1554128 - DNA, 15 bp, Homo sapiens
tgagaccaaaaactt

SEQ ID NO: 1554129 - DNA, 15 bp, Homo sapiens
atgagaccaaaaact

SEQ ID NO: 1554130 - DNA, 15 bp, Homo sapiens
gatgagaccaaaaac

SEQ ID NO: 1554131 - DNA, 15 bp, Homo sapiens
tgatgagaccaaaaa

SEQ ID NO: 1554132 - DNA, 15 bp, Homo sapiens
ctgatgagaccaaaa

SEQ ID NO: 1554133 - DNA, 15 bp, Homo sapiens
actgatgagaccaaa

SEQ ID NO: 1554134 - DNA, 15 bp, Homo sapiens
cactgatgagaccaa

SEQ ID NO: 1554135 - DNA, 15 bp, Homo sapiens
gcactgatgagacca

SEQ ID NO: 1554136 - DNA, 15 bp, Homo sapiens
agcactgatgagacc

SEQ ID NO: 1554137 - DNA, 15 bp, Homo sapiens
tagcactgatgagac

SEQ ID NO: 1554138 - DNA, 15 bp, Homo sapiens
ttagcactgatgaga

SEQ ID NO: 1554139 - DNA, 15 bp, Homo sapiens
tttagcactgatgag

SEQ ID NO: 1554140 - DNA, 15 bp, Homo sapiens
ctttagcactgatga

SEQ ID NO: 1554141 - DNA, 15 bp, Homo sapiens
cctttagcactgatg

SEQ ID NO: 1554142 - DNA, 15 bp, Homo sapiens
tcctttagcactgat

SEQ ID NO: 1554143 - DNA, 15 bp, Homo sapiens
ttcctttagcactga

SEQ ID NO: 1554144 - DNA, 15 bp, Homo sapiens
tttcctttagcactg

SEQ ID NO: 1554145 - DNA, 15 bp, Homo sapiens
ctttcctttagcact

SEQ ID NO: 1554146 - DNA, 15 bp, Homo sapiens
tctttcctttagcac

SEQ ID NO: 1554147 - DNA, 15 bp, Homo sapiens
atctttcctttagca

SEQ ID NO: 1554148 - DNA, 15 bp, Homo sapiens
tatctttcctttagc

SEQ ID NO: 1554149 - DNA, 15 bp, Homo sapiens
ctatctttcctttag

SEQ ID NO: 1554150 - DNA, 15 bp, Homo sapiens
cctatctttccttta

SEQ ID NO: 1554151 - DNA, 15 bp, Homo sapiens
acctatctttccttt

SEQ ID NO: 1554152 - DNA, 15 bp, Homo sapiens
tacctatctttcctt

SEQ ID NO: 1554153 - DNA, 15 bp, Homo sapiens
atacctatctttcct

SEQ ID NO: 1554154 - DNA, 15 bp, Homo sapiens
tatacctatctttcc

SEQ ID NO: 1554155 - DNA, 15 bp, Homo sapiens
atatacctatctttc

SEQ ID NO: 1554156 - DNA, 15 bp, Homo sapiens
tatatacctatcttt

SEQ ID NO: 1554157 - DNA, 15 bp, Homo sapiens
atatatacctatctt

SEQ ID NO: 1554158 - DNA, 15 bp, Homo sapiens
aatatatacctatct

SEQ ID NO: 1554159 - DNA, 15 bp, Homo sapiens
gaatatatacctatc

SEQ ID NO: 1554160 - DNA, 15 bp, Homo sapiens
agaatatatacctat

SEQ ID NO: 1554161 - DNA, 15 bp, Homo sapiens
aagaatatataccta

SEQ ID NO: 1554162 - DNA, 15 bp, Homo sapiens
taagaatatatacct

SEQ ID NO: 1554163 - DNA, 15 bp, Homo sapiens
ttaagaatatatacc

SEQ ID NO: 1554164 - DNA, 15 bp, Homo sapiens
attaagaatatatac

SEQ ID NO: 1554165 - DNA, 15 bp, Homo sapiens
aattaagaatatata

SEQ ID NO: 1554166 - DNA, 15 bp, Homo sapiens
taattaagaatatat

SEQ ID NO: 1554167 - DNA, 15 bp, Homo sapiens
ataattaagaatata

SEQ ID NO: 1554168 - DNA, 15 bp, Homo sapiens
aataattaagaatat

SEQ ID NO: 1554169 - DNA, 15 bp, Homo sapiens
aaataattaagaata

SEQ ID NO: 1554170 - DNA, 15 bp, Homo sapiens
aaaataattaagaat

SEQ ID NO: 1554171 - DNA, 15 bp, Homo sapiens
taaaataattaagaa

SEQ ID NO: 1554172 - DNA, 15 bp, Homo sapiens
ataaaataattaaga

SEQ ID NO: 1554173 - DNA, 15 bp, Homo sapiens
gataaaataattaag

SEQ ID NO: 1554174 - DNA, 15 bp, Homo sapiens
agataaaataattaa

SEQ ID NO: 1554175 - DNA, 15 bp, Homo sapiens
aagataaaataatta

SEQ ID NO: 1554176 - DNA, 15 bp, Homo sapiens
taagataaaataatt

SEQ ID NO: 1554177 - DNA, 15 bp, Homo sapiens
ataagataaaataat

SEQ ID NO: 1554178 - DNA, 15 bp, Homo sapiens
tataagataaaataa

SEQ ID NO: 1554179 - DNA, 15 bp, Homo sapiens
ttataagataaaata

SEQ ID NO: 1554180 - DNA, 15 bp, Homo sapiens
gttataagataaaat

SEQ ID NO: 1554181 - DNA, 15 bp, Homo sapiens
agttataagataaaa

SEQ ID NO: 1554182 - DNA, 15 bp, Homo sapiens
tagttataagataaa

SEQ ID NO: 1554183 - DNA, 15 bp, Homo sapiens
atagttataagataa

SEQ ID NO: 1554184 - DNA, 15 bp, Homo sapiens
aatagttataagata

SEQ ID NO: 1554185 - DNA, 15 bp, Homo sapiens
taatagttataagat

SEQ ID NO: 1554186 - DNA, 15 bp, Homo sapiens
ttaatagttataaga

SEQ ID NO: 1554187 - DNA, 15 bp, Homo sapiens
attaatagttataag

SEQ ID NO: 1554188 - DNA, 15 bp, Homo sapiens
aattaatagttataa

SEQ ID NO: 1554189 - DNA, 15 bp, Homo sapiens
taattaatagttata

SEQ ID NO: 1554190 - DNA, 15 bp, Homo sapiens
ataattaatagttat

SEQ ID NO: 1554191 - DNA, 15 bp, Homo sapiens
gataattaatagtta

SEQ ID NO: 1554192 - DNA, 15 bp, Homo sapiens
agataattaatagtt

SEQ ID NO: 1554193 - DNA, 15 bp, Homo sapiens
cagataattaatagt

SEQ ID NO: 1554194 - DNA, 15 bp, Homo sapiens
gcagataattaatag

SEQ ID NO: 1554195 - DNA, 15 bp, Homo sapiens
agcagataattaata

SEQ ID NO: 1554196 - DNA, 15 bp, Homo sapiens
tagcagataattaat

SEQ ID NO: 1554197 - DNA, 15 bp, Homo sapiens
atagcagataattaa

SEQ ID NO: 1554198 - DNA, 15 bp, Homo sapiens
aatagcagataatta

SEQ ID NO: 1554199 - DNA, 15 bp, Homo sapiens
caatagcagataatt

SEQ ID NO: 1554200 - DNA, 15 bp, Homo sapiens
gcaatagcagataat

SEQ ID NO: 1554201 - DNA, 15 bp, Homo sapiens
ggcaatagcagataa

SEQ ID NO: 1554202 - DNA, 15 bp, Homo sapiens
tggcaatagcagata

SEQ ID NO: 1554203 - DNA, 15 bp, Homo sapiens
ttggcaatagcagat

SEQ ID NO: 1554204 - DNA, 15 bp, Homo sapiens
cttggcaatagcaga

SEQ ID NO: 1554205 - DNA, 15 bp, Homo sapiens
acttggcaatagcag

SEQ ID NO: 1554206 - DNA, 15 bp, Homo sapiens
tacttggcaatagca

SEQ ID NO: 1554207 - DNA, 15 bp, Homo sapiens
gtacttggcaatagc

SEQ ID NO: 1554208 - DNA, 15 bp, Homo sapiens
agtacttggcaatag

SEQ ID NO: 1554209 - DNA, 15 bp, Homo sapiens
cagtacttggcaata

SEQ ID NO: 1554210 - DNA, 15 bp, Homo sapiens
acagtacttggcaat

SEQ ID NO: 1554211 - DNA, 15 bp, Homo sapiens
aacagtacttggcaa

SEQ ID NO: 1554212 - DNA, 15 bp, Homo sapiens
aaacagtacttggca

SEQ ID NO: 1554213 - DNA, 15 bp, Homo sapiens
aaaacagtacttggc

SEQ ID NO: 1554214 - DNA, 15 bp, Homo sapiens
taaaacagtacttgg

SEQ ID NO: 1554215 - DNA, 15 bp, Homo sapiens
ctaaaacagtacttg

SEQ ID NO: 1554216 - DNA, 15 bp, Homo sapiens
cctaaaacagtactt

SEQ ID NO: 1554217 - DNA, 15 bp, Homo sapiens
gcctaaaacagtact

SEQ ID NO: 1554218 - DNA, 15 bp, Homo sapiens
cgcctaaaacagtac

SEQ ID NO: 1554219 - DNA, 15 bp, Homo sapiens
gcgcctaaaacagta

SEQ ID NO: 1554220 - DNA, 15 bp, Homo sapiens
agcgcctaaaacagt

SEQ ID NO: 1554221 - DNA, 15 bp, Homo sapiens
tagcgcctaaaacag

SEQ ID NO: 1554222 - DNA, 15 bp, Homo sapiens
ctagcgcctaaaaca

SEQ ID NO: 1554223 - DNA, 15 bp, Homo sapiens
tctagcgcctaaaac

SEQ ID NO: 1554224 - DNA, 15 bp, Homo sapiens
ctctagcgcctaaaa

SEQ ID NO: 1554225 - DNA, 15 bp, Homo sapiens
tctctagcgcctaaa

SEQ ID NO: 1554226 - DNA, 15 bp, Homo sapiens
atctctagcgcctaa

SEQ ID NO: 1554227 - DNA, 15 bp, Homo sapiens
tatctctagcgccta

SEQ ID NO: 1554228 - DNA, 15 bp, Homo sapiens
ctatctctagcgcct

SEQ ID NO: 1554229 - DNA, 15 bp, Homo sapiens
tctatctctagcgcc

SEQ ID NO: 1554230 - DNA, 15 bp, Homo sapiens
ctctatctctagcgc

SEQ ID NO: 1554231 - DNA, 15 bp, Homo sapiens
actctatctctagcg

SEQ ID NO: 1554232 - DNA, 15 bp, Homo sapiens
tactctatctctagc

SEQ ID NO: 1554233 - DNA, 15 bp, Homo sapiens
gtactctatctctag

SEQ ID NO: 1554234 - DNA, 15 bp, Homo sapiens
agtactctatctcta

SEQ ID NO: 1554235 - DNA, 15 bp, Homo sapiens
tagtactctatctct

SEQ ID NO: 1554236 - DNA, 15 bp, Homo sapiens
ttagtactctatctc

SEQ ID NO: 1554237 - DNA, 15 bp, Homo sapiens
gttagtactctatct

SEQ ID NO: 1554238 - DNA, 15 bp, Homo sapiens
tgttagtactctatc

SEQ ID NO: 1554239 - DNA, 15 bp, Homo sapiens
ttgttagtactctat

SEQ ID NO: 1554240 - DNA, 15 bp, Homo sapiens
tttgttagtactcta

SEQ ID NO: 1554241 - DNA, 15 bp, Homo sapiens
ctttgttagtactct

SEQ ID NO: 1554242 - DNA, 15 bp, Homo sapiens
gctttgttagtactc

SEQ ID NO: 1554243 - DNA, 15 bp, Homo sapiens
ggctttgttagtact

SEQ ID NO: 1554244 - DNA, 15 bp, Homo sapiens
gggctttgttagtac

SEQ ID NO: 1554245 - DNA, 15 bp, Homo sapiens
tgggctttgttagta

SEQ ID NO: 1554246 - DNA, 15 bp, Homo sapiens
atgggctttgttagt

SEQ ID NO: 1554247 - DNA, 15 bp, Homo sapiens
tatgggctttgttag

SEQ ID NO: 1554248 - DNA, 15 bp, Homo sapiens
ttatgggctttgtta

SEQ ID NO: 1554249 - DNA, 15 bp, Homo sapiens
tttatgggctttgtt

SEQ ID NO: 1554250 - DNA, 15 bp, Homo sapiens
ttttatgggctttgt

SEQ ID NO: 1554251 - DNA, 15 bp, Homo sapiens
gttttatgggctttg

SEQ ID NO: 1554252 - DNA, 15 bp, Homo sapiens
agttttatgggcttt

SEQ ID NO: 1554253 - DNA, 15 bp, Homo sapiens
gagttttatgggctt

SEQ ID NO: 1554254 - DNA, 15 bp, Homo sapiens
tgagttttatgggct

SEQ ID NO: 1554255 - DNA, 15 bp, Homo sapiens
gtgagttttatgggc

SEQ ID NO: 1554256 - DNA, 15 bp, Homo sapiens
agtgagttttatggg

SEQ ID NO: 1554257 - DNA, 15 bp, Homo sapiens
cagtgagttttatgg

SEQ ID NO: 1554258 - DNA, 15 bp, Homo sapiens
gcagtgagttttatg

SEQ ID NO: 1554259 - DNA, 15 bp, Homo sapiens
ggcagtgagttttat

SEQ ID NO: 1554260 - DNA, 15 bp, Homo sapiens
aggcagtgagtttta

SEQ ID NO: 1554261 - DNA, 15 bp, Homo sapiens
aaggcagtgagtttt

SEQ ID NO: 1554262 - DNA, 15 bp, Homo sapiens
gaaggcagtgagttt

SEQ ID NO: 1554263 - DNA, 15 bp, Homo sapiens
tgaaggcagtgagtt

SEQ ID NO: 1554264 - DNA, 15 bp, Homo sapiens
atgaaggcagtgagt

SEQ ID NO: 1554265 - DNA, 15 bp, Homo sapiens
catgaaggcagtgag

SEQ ID NO: 1554266 - DNA, 15 bp, Homo sapiens
ccatgaaggcagtga

SEQ ID NO: 1554267 - DNA, 15 bp, Homo sapiens
gctccatgaaggcag

SEQ ID NO: 1554268 - DNA, 15 bp, Homo sapiens
agctccatgaaggca

SEQ ID NO: 1554269 - DNA, 15 bp, Homo sapiens
aagctccatgaaggc

SEQ ID NO: 1554270 - DNA, 15 bp, Homo sapiens
taagctccatgaagg

SEQ ID NO: 1554271 - DNA, 15 bp, Homo sapiens
gtaagctccatgaag

SEQ ID NO: 1554272 - DNA, 15 bp, Homo sapiens
agtaagctccatgaa

SEQ ID NO: 1554273 - DNA, 15 bp, Homo sapiens
aagtaagctccatga

SEQ ID NO: 1554274 - DNA, 15 bp, Homo sapiens
aaagtaagctccatg

SEQ ID NO: 1554275 - DNA, 15 bp, Homo sapiens
gaaagtaagctccat

SEQ ID NO: 1554276 - DNA, 15 bp, Homo sapiens
agaaagtaagctcca

SEQ ID NO: 1554277 - DNA, 15 bp, Homo sapiens
cagaaagtaagctcc

SEQ ID NO: 1554278 - DNA, 15 bp, Homo sapiens
ccagaaagtaagctc

SEQ ID NO: 1554279 - DNA, 15 bp, Homo sapiens
cccagaaagtaagct

SEQ ID NO: 1554280 - DNA, 15 bp, Homo sapiens
ccccagaaagtaagc

SEQ ID NO: 1554281 - DNA, 15 bp, Homo sapiens
accccagaaagtaag

SEQ ID NO: 1554282 - DNA, 15 bp, Homo sapiens
caccccagaaagtaa

SEQ ID NO: 1554283 - DNA, 15 bp, Homo sapiens
ccaccccagaaagta

SEQ ID NO: 1554284 - DNA, 15 bp, Homo sapiens
cccaccccagaaagt

SEQ ID NO: 1554285 - DNA, 15 bp, Homo sapiens
acccaccccagaaag

SEQ ID NO: 1554286 - DNA, 15 bp, Homo sapiens
cacccaccccagaaa

SEQ ID NO: 1554287 - DNA, 15 bp, Homo sapiens
acacccaccccagaa

SEQ ID NO: 1554288 - DNA, 15 bp, Homo sapiens
cacacccaccccaga

SEQ ID NO: 1554289 - DNA, 15 bp, Homo sapiens
ccacacccaccccag

SEQ ID NO: 1554290 - DNA, 15 bp, Homo sapiens
tccacacccacccca

SEQ ID NO: 1554291 - DNA, 15 bp, Homo sapiens
ctccacacccacccc

SEQ ID NO: 1554292 - DNA, 15 bp, Homo sapiens
cctccacacccaccc

SEQ ID NO: 1554293 - DNA, 15 bp, Homo sapiens
acctccacacccacc

SEQ ID NO: 1554294 - DNA, 15 bp, Homo sapiens
aacctccacacccac

SEQ ID NO: 1554295 - DNA, 15 bp, Homo sapiens
caacctccacaccca

SEQ ID NO: 1554296 - DNA, 15 bp, Homo sapiens
ccaacctccacaccc

SEQ ID NO: 1554297 - DNA, 15 bp, Homo sapiens
cccaacctccacacc

SEQ ID NO: 1554298 - DNA, 15 bp, Homo sapiens
ccccaacctccacac

SEQ ID NO: 1554299 - DNA, 15 bp, Homo sapiens
tccccaacctccaca

SEQ ID NO: 1554300 - DNA, 15 bp, Homo sapiens
ctccccaacctccac

SEQ ID NO: 1554301 - DNA, 15 bp, Homo sapiens
tcactccccaacctc

SEQ ID NO: 1554302 - DNA, 15 bp, Homo sapiens
ttcactccccaacct

SEQ ID NO: 1554303 - DNA, 15 bp, Homo sapiens
attcactccccaacc

SEQ ID NO: 1554304 - DNA, 15 bp, Homo sapiens
cattcactccccaac

SEQ ID NO: 1554305 - DNA, 15 bp, Homo sapiens
ccattcactccccaa

SEQ ID NO: 1554306 - DNA, 15 bp, Homo sapiens
tccattcactcccca

SEQ ID NO: 1554307 - DNA, 15 bp, Homo sapiens
atccattcactcccc

SEQ ID NO: 1554308 - DNA, 15 bp, Homo sapiens
tatccattcactccc

SEQ ID NO: 1554309 - DNA, 15 bp, Homo sapiens
ttatccattcactcc

SEQ ID NO: 1554310 - DNA, 15 bp, Homo sapiens
attatccattcactc

SEQ ID NO: 1554311 - DNA, 15 bp, Homo sapiens
cattatccattcact

SEQ ID NO: 1554312 - DNA, 15 bp, Homo sapiens
tcattatccattcac

SEQ ID NO: 1554313 - DNA, 15 bp, Homo sapiens
ttcattatccattca

SEQ ID NO: 1554314 - DNA, 15 bp, Homo sapiens
cttcattatccattc

SEQ ID NO: 1554315 - DNA, 15 bp, Homo sapiens
acttcattatccatt

SEQ ID NO: 1554316 - DNA, 15 bp, Homo sapiens
tacttcattatccat

SEQ ID NO: 1554317 - DNA, 15 bp, Homo sapiens
ttacttcattatcca

SEQ ID NO: 1554318 - DNA, 15 bp, Homo sapiens
tttacttcattatcc

SEQ ID NO: 1554319 - DNA, 15 bp, Homo sapiens
gtttacttcattatc

SEQ ID NO: 1554320 - DNA, 15 bp, Homo sapiens
tgtttacttcattat

SEQ ID NO: 1554321 - DNA, 15 bp, Homo sapiens
ttgtttacttcatta

SEQ ID NO: 1554322 - DNA, 15 bp, Homo sapiens
tttgtttacttcatt

SEQ ID NO: 1554323 - DNA, 15 bp, Homo sapiens
ttttgtttacttcat

SEQ ID NO: 1554324 - DNA, 15 bp, Homo sapiens
attttgtttacttca

SEQ ID NO: 1554325 - DNA, 15 bp, Homo sapiens
tattttgtttacttc

SEQ ID NO: 1554326 - DNA, 15 bp, Homo sapiens
gtattttgtttactt

SEQ ID NO: 1554327 - DNA, 15 bp, Homo sapiens
cgtattttgtttact

SEQ ID NO: 1554328 - DNA, 15 bp, Homo sapiens
acgtattttgtttac

SEQ ID NO: 1554329 - DNA, 15 bp, Homo sapiens
tacgtattttgttta

SEQ ID NO: 1554330 - DNA, 15 bp, Homo sapiens
ctacgtattttgttt

SEQ ID NO: 1554331 - DNA, 15 bp, Homo sapiens
actacgtattttgtt

SEQ ID NO: 1554332 - DNA, 15 bp, Homo sapiens
tactacgtattttgt

SEQ ID NO: 1554333 - DNA, 15 bp, Homo sapiens
atactacgtattttg

SEQ ID NO: 1554334 - DNA, 15 bp, Homo sapiens
catactacgtatttt

SEQ ID NO: 1554335 - DNA, 15 bp, Homo sapiens
acatactacgtattt

SEQ ID NO: 1554336 - DNA, 15 bp, Homo sapiens
aacatactacgtatt

SEQ ID NO: 1554337 - DNA, 15 bp, Homo sapiens
taacatactacgtat

SEQ ID NO: 1554338 - DNA, 15 bp, Homo sapiens
ctaacatactacgta

SEQ ID NO: 1554339 - DNA, 15 bp, Homo sapiens
actaacatactacgt

SEQ ID NO: 1554340 - DNA, 15 bp, Homo sapiens
cactaacatactacg

SEQ ID NO: 1554341 - DNA, 15 bp, Homo sapiens
tcactaacatactac

SEQ ID NO: 1554342 - DNA, 15 bp, Homo sapiens
atcactaacatacta

SEQ ID NO: 1554343 - DNA, 15 bp, Homo sapiens
aatcactaacatact

SEQ ID NO: 1554344 - DNA, 15 bp, Homo sapiens
taatcactaacatac

SEQ ID NO: 1554345 - DNA, 15 bp, Homo sapiens
ataatcactaacata

SEQ ID NO: 1554346 - DNA, 15 bp, Homo sapiens
aataatcactaacat

SEQ ID NO: 1554347 - DNA, 15 bp, Homo sapiens
taataatcactaaca

SEQ ID NO: 1554348 - DNA, 15 bp, Homo sapiens
gtaataatcactaac

SEQ ID NO: 1554349 - DNA, 15 bp, Homo sapiens
agtaataatcactaa

SEQ ID NO: 1554350 - DNA, 15 bp, Homo sapiens
tagtaataatcacta

SEQ ID NO: 1554351 - DNA, 15 bp, Homo sapiens
atagtaataatcact

SEQ ID NO: 1554352 - DNA, 15 bp, Homo sapiens
catagtaataatcac

SEQ ID NO: 1554353 - DNA, 15 bp, Homo sapiens
ccatagtaataatca

SEQ ID NO: 1554354 - DNA, 15 bp, Homo sapiens
tccatagtaataatc

SEQ ID NO: 1554355 - DNA, 15 bp, Homo sapiens
ctccatagtaataat

SEQ ID NO: 1554356 - DNA, 15 bp, Homo sapiens
tctccatagtaataa

SEQ ID NO: 1554357 - DNA, 15 bp, Homo sapiens
ttctccatagtaata

SEQ ID NO: 1554358 - DNA, 15 bp, Homo sapiens
tttctccatagtaat

SEQ ID NO: 1554359 - DNA, 15 bp, Homo sapiens
atttctccatagtaa

SEQ ID NO: 1554360 - DNA, 15 bp, Homo sapiens
aatttctccatagta

SEQ ID NO: 1554361 - DNA, 15 bp, Homo sapiens
taatttctccatagt

SEQ ID NO: 1554362 - DNA, 15 bp, Homo sapiens
ttaatttctccatag

SEQ ID NO: 1554363 - DNA, 15 bp, Homo sapiens
tttaatttctccata

SEQ ID NO: 1554364 - DNA, 15 bp, Homo sapiens
ctttaatttctccat

SEQ ID NO: 1554365 - DNA, 15 bp, Homo sapiens
gctttaatttctcca

SEQ ID NO: 1554366 - DNA, 15 bp, Homo sapiens
agctttaatttctcc

SEQ ID NO: 1554367 - DNA, 15 bp, Homo sapiens
cagctttaatttctc

SEQ ID NO: 1554368 - DNA, 15 bp, Homo sapiens
ccagctttaatttct

SEQ ID NO: 1554369 - DNA, 15 bp, Homo sapiens
cccagctttaatttc

SEQ ID NO: 1554370 - DNA, 15 bp, Homo sapiens
tcccagctttaattt

SEQ ID NO: 1554371 - DNA, 15 bp, Homo sapiens
ctcccagctttaatt

SEQ ID NO: 1554372 - DNA, 15 bp, Homo sapiens
tctcccagctttaat

SEQ ID NO: 1554373 - DNA, 15 bp, Homo sapiens
ttctcccagctttaa

SEQ ID NO: 1554374 - DNA, 15 bp, Homo sapiens
cttctcccagcttta

SEQ ID NO: 1554375 - DNA, 15 bp, Homo sapiens
acttctcccagcttt

SEQ ID NO: 1554376 - DNA, 15 bp, Homo sapiens
tacttctcccagctt

SEQ ID NO: 1554377 - DNA, 15 bp, Homo sapiens
atacttctcccagct

SEQ ID NO: 1554378 - DNA, 15 bp, Homo sapiens
tatacttctcccagc

SEQ ID NO: 1554379 - DNA, 15 bp, Homo sapiens
gtatacttctcccag

SEQ ID NO: 1554380 - DNA, 15 bp, Homo sapiens
agtatacttctccca

SEQ ID NO: 1554381 - DNA, 15 bp, Homo sapiens
aagtatacttctccc

SEQ ID NO: 1554382 - DNA, 15 bp, Homo sapiens
caagtatacttctcc

SEQ ID NO: 1554383 - DNA, 15 bp, Homo sapiens
tcaagtatacttctc

SEQ ID NO: 1554384 - DNA, 15 bp, Homo sapiens
atcaagtatacttct

SEQ ID NO: 1554385 - DNA, 15 bp, Homo sapiens
gatcaagtatacttc

SEQ ID NO: 1554386 - DNA, 15 bp, Homo sapiens
cgatcaagtatactt

SEQ ID NO: 1554387 - DNA, 15 bp, Homo sapiens
acgatcaagtatact

SEQ ID NO: 1554388 - DNA, 15 bp, Homo sapiens
gacgatcaagtatac

SEQ ID NO: 1554389 - DNA, 15 bp, Homo sapiens
tgacgatcaagtata

SEQ ID NO: 1554390 - DNA, 15 bp, Homo sapiens
atgacgatcaagtat

SEQ ID NO: 1554391 - DNA, 15 bp, Homo sapiens
tatgacgatcaagta

SEQ ID NO: 1554392 - DNA, 15 bp, Homo sapiens
ttatgacgatcaagt

SEQ ID NO: 1554393 - DNA, 15 bp, Homo sapiens
cttatgacgatcaag

SEQ ID NO: 1554394 - DNA, 15 bp, Homo sapiens
tcttatgacgatcaa

SEQ ID NO: 1554395 - DNA, 15 bp, Homo sapiens
ctcttatgacgatca

SEQ ID NO: 1554396 - DNA, 15 bp, Homo sapiens
actcttatgacgatc

SEQ ID NO: 1554397 - DNA, 15 bp, Homo sapiens
aactcttatgacgat

SEQ ID NO: 1554398 - DNA, 15 bp, Homo sapiens
aaactcttatgacga

SEQ ID NO: 1554399 - DNA, 15 bp, Homo sapiens
caaactcttatgacg

SEQ ID NO: 1554400 - DNA, 15 bp, Homo sapiens
ccaaactcttatgac

SEQ ID NO: 1554401 - DNA, 15 bp, Homo sapiens
cccaaactcttatga

SEQ ID NO: 1554402 - DNA, 15 bp, Homo sapiens
acccaaactcttatg

SEQ ID NO: 1554403 - DNA, 15 bp, Homo sapiens
cacccaaactcttat

SEQ ID NO: 1554404 - DNA, 15 bp, Homo sapiens
gcacccaaactctta

SEQ ID NO: 1554405 - DNA, 15 bp, Homo sapiens
ggcacccaaactctt

SEQ ID NO: 1554406 - DNA, 15 bp, Homo sapiens
tggcacccaaactct

SEQ ID NO: 1554407 - DNA, 15 bp, Homo sapiens
ttggcacccaaactc

SEQ ID NO: 1554408 - DNA, 15 bp, Homo sapiens
tttggcacccaaact

SEQ ID NO: 1554409 - DNA, 15 bp, Homo sapiens
atttggcacccaaac

SEQ ID NO: 1554410 - DNA, 15 bp, Homo sapiens
catttggcacccaaa

SEQ ID NO: 1554411 - DNA, 15 bp, Homo sapiens
tcatttggcacccaa

SEQ ID NO: 1554412 - DNA, 15 bp, Homo sapiens
ttcatttggcaccca

SEQ ID NO: 1554413 - DNA, 15 bp, Homo sapiens
cttcatttggcaccc

SEQ ID NO: 1554414 - DNA, 15 bp, Homo sapiens
tcttcatttggcacc

SEQ ID NO: 1554415 - DNA, 15 bp, Homo sapiens
atcttcatttggcac

SEQ ID NO: 1554416 - DNA, 15 bp, Homo sapiens
aatcttcatttggca

SEQ ID NO: 1554417 - DNA, 15 bp, Homo sapiens
taatcttcatttggc

SEQ ID NO: 1554418 - DNA, 15 bp, Homo sapiens
ataatcttcatttgg

SEQ ID NO: 1554419 - DNA, 15 bp, Homo sapiens
tataatcttcatttg

SEQ ID NO: 1554420 - DNA, 15 bp, Homo sapiens
atataatcttcattt

SEQ ID NO: 1554421 - DNA, 15 bp, Homo sapiens
aatataatcttcatt

SEQ ID NO: 1554422 - DNA, 15 bp, Homo sapiens
aaatataatcttcat

SEQ ID NO: 1554423 - DNA, 15 bp, Homo sapiens
taaatataatcttca

SEQ ID NO: 1554424 - DNA, 15 bp, Homo sapiens
ttaaatataatcttc

SEQ ID NO: 1554425 - DNA, 15 bp, Homo sapiens
tttaaatataatctt

SEQ ID NO: 1554426 - DNA, 15 bp, Homo sapiens
ttttaaatataatct

SEQ ID NO: 1554427 - DNA, 15 bp, Homo sapiens
cttttaaatataatc

SEQ ID NO: 1554428 - DNA, 15 bp, Homo sapiens
ccttttaaatataat

SEQ ID NO: 1554429 - DNA, 15 bp, Homo sapiens
tccttttaaatataa

SEQ ID NO: 1554430 - DNA, 15 bp, Homo sapiens
ctccttttaaatata

SEQ ID NO: 1554431 - DNA, 15 bp, Homo sapiens
actccttttaaatat

SEQ ID NO: 1554432 - DNA, 15 bp, Homo sapiens
tactccttttaaata

SEQ ID NO: 1554433 - DNA, 15 bp, Homo sapiens
ttactccttttaaat

SEQ ID NO: 1554434 - DNA, 15 bp, Homo sapiens
tttactccttttaaa

SEQ ID NO: 1554435 - DNA, 15 bp, Homo sapiens
ttttactccttttaa

SEQ ID NO: 1554436 - DNA, 15 bp, Homo sapiens
attttactcctttta

SEQ ID NO: 1554437 - DNA, 15 bp, Homo sapiens
cattttactcctttt

SEQ ID NO: 1554438 - DNA, 15 bp, Homo sapiens
tcattttactccttt

SEQ ID NO: 1554439 - DNA, 15 bp, Homo sapiens
ttcattttactcctt

SEQ ID NO: 1554440 - DNA, 15 bp, Homo sapiens
cttcattttactcct

SEQ ID NO: 1554441 - DNA, 15 bp, Homo sapiens
acttcattttactcc

SEQ ID NO: 1554442 - DNA, 15 bp, Homo sapiens
cacttcattttactc

SEQ ID NO: 1554443 - DNA, 15 bp, Homo sapiens
ccacttcattttact

SEQ ID NO: 1554444 - DNA, 15 bp, Homo sapiens
gccacttcattttac

SEQ ID NO: 1554445 - DNA, 15 bp, Homo sapiens
ggccacttcatttta

SEQ ID NO: 1554446 - DNA, 15 bp, Homo sapiens
tggccacttcatttt

SEQ ID NO: 1554447 - DNA, 15 bp, Homo sapiens
gtggccacttcattt

SEQ ID NO: 1554448 - DNA, 15 bp, Homo sapiens
agtggccacttcatt

SEQ ID NO: 1554449 - DNA, 15 bp, Homo sapiens
cagtggccacttcat

SEQ ID NO: 1554450 - DNA, 15 bp, Homo sapiens
acagtggccacttca

SEQ ID NO: 1554451 - DNA, 15 bp, Homo sapiens
aacagtggccacttc

SEQ ID NO: 1554452 - DNA, 15 bp, Homo sapiens
aaacagtggccactt

SEQ ID NO: 1554453 - DNA, 15 bp, Homo sapiens
aaaacagtggccact

SEQ ID NO: 1554454 - DNA, 15 bp, Homo sapiens
taaaacagtggccac

SEQ ID NO: 1554455 - DNA, 15 bp, Homo sapiens
ctaaaacagtggcca

SEQ ID NO: 1554456 - DNA, 15 bp, Homo sapiens
cctaaaacagtggcc

SEQ ID NO: 1554457 - DNA, 15 bp, Homo sapiens
tcctaaaacagtggc

SEQ ID NO: 1554458 - DNA, 15 bp, Homo sapiens
atcctaaaacagtgg

SEQ ID NO: 1554459 - DNA, 15 bp, Homo sapiens
catcctaaaacagtg

SEQ ID NO: 1554460 - DNA, 15 bp, Homo sapiens
ccatcctaaaacagt

SEQ ID NO: 1554461 - DNA, 15 bp, Homo sapiens
accatcctaaaacag

SEQ ID NO: 1554462 - DNA, 15 bp, Homo sapiens
gaccatcctaaaaca

SEQ ID NO: 1554463 - DNA, 15 bp, Homo sapiens
agaccatcctaaaac

SEQ ID NO: 1554464 - DNA, 15 bp, Homo sapiens
cagaccatcctaaaa

SEQ ID NO: 1554465 - DNA, 15 bp, Homo sapiens
tcagaccatcctaaa

SEQ ID NO: 1554466 - DNA, 15 bp, Homo sapiens
gtcagaccatcctaa

SEQ ID NO: 1554467 - DNA, 15 bp, Homo sapiens
ggtcagaccatccta

SEQ ID NO: 1554468 - DNA, 15 bp, Homo sapiens
aggtcagaccatcct

SEQ ID NO: 1554469 - DNA, 15 bp, Homo sapiens
aaggtcagaccatcc

SEQ ID NO: 1554470 - DNA, 15 bp, Homo sapiens
taaggtcagaccatc

SEQ ID NO: 1554471 - DNA, 15 bp, Homo sapiens
ataaggtcagaccat

SEQ ID NO: 1554472 - DNA, 15 bp, Homo sapiens
gataaggtcagacca

SEQ ID NO: 1554473 - DNA, 15 bp, Homo sapiens
ggataaggtcagacc

SEQ ID NO: 1554474 - DNA, 15 bp, Homo sapiens
gggataaggtcagac

SEQ ID NO: 1554475 - DNA, 15 bp, Homo sapiens
tgggataaggtcaga

SEQ ID NO: 1554476 - DNA, 15 bp, Homo sapiens
atgggataaggtcag

SEQ ID NO: 1554477 - DNA, 15 bp, Homo sapiens
aatgggataaggtca

SEQ ID NO: 1554478 - DNA, 15 bp, Homo sapiens
aaatgggataaggtc

SEQ ID NO: 1554479 - DNA, 15 bp, Homo sapiens
aaaatgggataaggt

SEQ ID NO: 1554480 - DNA, 15 bp, Homo sapiens
aaaaatgggataagg

SEQ ID NO: 1554481 - DNA, 15 bp, Homo sapiens
taaaaatgggataag

SEQ ID NO: 1554482 - DNA, 15 bp, Homo sapiens
ataaaaatgggataa

SEQ ID NO: 1554483 - DNA, 15 bp, Homo sapiens
tataaaaatgggata

SEQ ID NO: 1554484 - DNA, 15 bp, Homo sapiens
atataaaaatgggat

SEQ ID NO: 1554485 - DNA, 15 bp, Homo sapiens
aatataaaaatggga

SEQ ID NO: 1554486 - DNA, 15 bp, Homo sapiens
aaatataaaaatggg

SEQ ID NO: 1554487 - DNA, 15 bp, Homo sapiens
taaatataaaaatgg

SEQ ID NO: 1554488 - DNA, 15 bp, Homo sapiens
ttaaatataaaaatg

SEQ ID NO: 1554489 - DNA, 15 bp, Homo sapiens
cttaaatataaaaat

SEQ ID NO: 1554490 - DNA, 15 bp, Homo sapiens
tcttaaatataaaaa

SEQ ID NO: 1554491 - DNA, 15 bp, Homo sapiens
atcttaaatataaaa

SEQ ID NO: 1554492 - DNA, 15 bp, Homo sapiens
tatcttaaatataaa

SEQ ID NO: 1554493 - DNA, 15 bp, Homo sapiens
atatcttaaatataa

SEQ ID NO: 1554494 - DNA, 15 bp, Homo sapiens
gatatcttaaatata

SEQ ID NO: 1554495 - DNA, 15 bp, Homo sapiens
agatatcttaaatat

SEQ ID NO: 1554496 - DNA, 15 bp, Homo sapiens
cagatatcttaaata

SEQ ID NO: 1554497 - DNA, 15 bp, Homo sapiens
ccagatatcttaaat

SEQ ID NO: 1554498 - DNA, 15 bp, Homo sapiens
tccagatatcttaaa

SEQ ID NO: 1554499 - DNA, 15 bp, Homo sapiens
ttccagatatcttaa

SEQ ID NO: 1554500 - DNA, 15 bp, Homo sapiens
tttccagatatctta

SEQ ID NO: 1554501 - DNA, 15 bp, Homo sapiens
atttccagatatctt

SEQ ID NO: 1554502 - DNA, 15 bp, Homo sapiens
gatttccagatatct

SEQ ID NO: 1554503 - DNA, 15 bp, Homo sapiens
tgatttccagatatc

SEQ ID NO: 1554504 - DNA, 15 bp, Homo sapiens
atgatttccagatat

SEQ ID NO: 1554505 - DNA, 15 bp, Homo sapiens
catgatttccagata

SEQ ID NO: 1554506 - DNA, 15 bp, Homo sapiens
acatgatttccagat

SEQ ID NO: 1554507 - DNA, 15 bp, Homo sapiens
aacatgatttccaga

SEQ ID NO: 1554508 - DNA, 15 bp, Homo sapiens
aaacatgatttccag

SEQ ID NO: 1554509 - DNA, 15 bp, Homo sapiens
aaaacatgatttcca

SEQ ID NO: 1554510 - DNA, 15 bp, Homo sapiens
aaaaacatgatttcc

SEQ ID NO: 1554511 - DNA, 15 bp, Homo sapiens
caaaaacatgatttc

SEQ ID NO: 1554512 - DNA, 15 bp, Homo sapiens
acaaaaacatgattt

SEQ ID NO: 1554513 - DNA, 15 bp, Homo sapiens
tacaaaaacatgatt

SEQ ID NO: 1554514 - DNA, 15 bp, Homo sapiens
atacaaaaacatgat

SEQ ID NO: 1554515 - DNA, 15 bp, Homo sapiens
aatacaaaaacatga

SEQ ID NO: 1554516 - DNA, 15 bp, Homo sapiens
taatacaaaaacatg

SEQ ID NO: 1554517 - DNA, 15 bp, Homo sapiens
ttaatacaaaaacat

SEQ ID NO: 1554518 - DNA, 15 bp, Homo sapiens
attaatacaaaaaca

SEQ ID NO: 1554519 - DNA, 15 bp, Homo sapiens
tattaatacaaaaac

SEQ ID NO: 1554520 - DNA, 15 bp, Homo sapiens
ttattaatacaaaaa

SEQ ID NO: 1554521 - DNA, 15 bp, Homo sapiens
tttattaatacaaaa

SEQ ID NO: 1554522 - DNA, 15 bp, Homo sapiens
ttttattaatacaaa

SEQ ID NO: 1554523 - DNA, 15 bp, Homo sapiens
attttattaatacaa

SEQ ID NO: 1554524 - DNA, 15 bp, Homo sapiens
cattttattaataca

SEQ ID NO: 1554525 - DNA, 15 bp, Homo sapiens
tcattttattaatac

SEQ ID NO: 1554526 - DNA, 15 bp, Homo sapiens
ttcattttattaata

SEQ ID NO: 1554527 - DNA, 15 bp, Homo sapiens
tttcattttattaat

SEQ ID NO: 1554528 - DNA, 15 bp, Homo sapiens
ttttcattttattaa

SEQ ID NO: 1554529 - DNA, 15 bp, Homo sapiens
tttttcattttatta

SEQ ID NO: 1554530 - DNA, 15 bp, Homo sapiens
ctttttcattttatt

SEQ ID NO: 1554531 - DNA, 15 bp, Homo sapiens
tctttttcattttat

SEQ ID NO: 1554532 - DNA, 15 bp, Homo sapiens
atctttttcatttta

SEQ ID NO: 1554533 - DNA, 15 bp, Homo sapiens
aatctttttcatttt

SEQ ID NO: 1554534 - DNA, 15 bp, Homo sapiens
gaatctttttcattt

SEQ ID NO: 1554535 - DNA, 15 bp, Homo sapiens
cgaatctttttcatt

SEQ ID NO: 1554536 - DNA, 15 bp, Homo sapiens
tcgaatctttttcat

SEQ ID NO: 1554537 - DNA, 15 bp, Homo sapiens
atcgaatctttttca

SEQ ID NO: 1554538 - DNA, 15 bp, Homo sapiens
tatcgaatctttttc

SEQ ID NO: 1554539 - DNA, 15 bp, Homo sapiens
ttatcgaatcttttt

SEQ ID NO: 1554540 - DNA, 15 bp, Homo sapiens
attatcgaatctttt

SEQ ID NO: 1554541 - DNA, 15 bp, Homo sapiens
cattatcgaatcttt

SEQ ID NO: 1554542 - DNA, 15 bp, Homo sapiens
ccattatcgaatctt

SEQ ID NO: 1554543 - DNA, 15 bp, Homo sapiens
gccattatcgaatct

SEQ ID NO: 1554544 - DNA, 15 bp, Homo sapiens
tgccattatcgaatc

SEQ ID NO: 1554545 - DNA, 15 bp, Homo sapiens
atgccattatcgaat

SEQ ID NO: 1554546 - DNA, 15 bp, Homo sapiens
catgccattatcgaa

SEQ ID NO: 1554547 - DNA, 15 bp, Homo sapiens
ccatgccattatcga

SEQ ID NO: 1554548 - DNA, 15 bp, Homo sapiens
accatgccattatcg

SEQ ID NO: 1554549 - DNA, 15 bp, Homo sapiens
taccatgccattatc

SEQ ID NO: 1554550 - DNA, 15 bp, Homo sapiens
ataccatgccattat

SEQ ID NO: 1554551 - DNA, 15 bp, Homo sapiens
aataccatgccatta

SEQ ID NO: 1554552 - DNA, 15 bp, Homo sapiens
taataccatgccatt

SEQ ID NO: 1554553 - DNA, 15 bp, Homo sapiens
gtaataccatgccat

SEQ ID NO: 1554554 - DNA, 15 bp, Homo sapiens
ggtaataccatgcca

SEQ ID NO: 1554555 - DNA, 15 bp, Homo sapiens
tggtaataccatgcc

SEQ ID NO: 1554556 - DNA, 15 bp, Homo sapiens
atggtaataccatgc

SEQ ID NO: 1554557 - DNA, 15 bp, Homo sapiens
gatggtaataccatg

SEQ ID NO: 1554558 - DNA, 15 bp, Homo sapiens
ggatggtaataccat

SEQ ID NO: 1554559 - DNA, 15 bp, Homo sapiens
tggatggtaatacca

SEQ ID NO: 1554560 - DNA, 15 bp, Homo sapiens
ctggatggtaatacc

SEQ ID NO: 1554561 - DNA, 15 bp, Homo sapiens
actggatggtaatac

SEQ ID NO: 1554562 - DNA, 15 bp, Homo sapiens
aactggatggtaata

SEQ ID NO: 1554563 - DNA, 15 bp, Homo sapiens
gaactggatggtaat

SEQ ID NO: 1554564 - DNA, 15 bp, Homo sapiens
agaactggatggtaa

SEQ ID NO: 1554565 - DNA, 15 bp, Homo sapiens
tagaactggatggta

SEQ ID NO: 1554566 - DNA, 15 bp, Homo sapiens
ttagaactggatggt

SEQ ID NO: 1554567 - DNA, 15 bp, Homo sapiens
tttagaactggatgg

SEQ ID NO: 1554568 - DNA, 15 bp, Homo sapiens
ctttagaactggatg

SEQ ID NO: 1554569 - DNA, 15 bp, Homo sapiens
actttagaactggat

SEQ ID NO: 1554570 - DNA, 15 bp, Homo sapiens
cactttagaactgga

SEQ ID NO: 1554571 - DNA, 15 bp, Homo sapiens
ccactttagaactgg

SEQ ID NO: 1554572 - DNA, 15 bp, Homo sapiens
accactttagaactg

SEQ ID NO: 1554573 - DNA, 15 bp, Homo sapiens
aaccactttagaact

SEQ ID NO: 1554574 - DNA, 15 bp, Homo sapiens
aaaccactttagaac

SEQ ID NO: 1554575 - DNA, 15 bp, Homo sapiens
taaaccactttagaa

SEQ ID NO: 1554576 - DNA, 15 bp, Homo sapiens
ttaaaccactttaga

SEQ ID NO: 1554577 - DNA, 15 bp, Homo sapiens
attaaaccactttag

SEQ ID NO: 1554578 - DNA, 15 bp, Homo sapiens
aattaaaccacttta

SEQ ID NO: 1554579 - DNA, 15 bp, Homo sapiens
gaattaaaccacttt

SEQ ID NO: 1554580 - DNA, 15 bp, Homo sapiens
agaattaaaccactt

SEQ ID NO: 1554581 - DNA, 15 bp, Homo sapiens
cagaattaaaccact

SEQ ID NO: 1554582 - DNA, 15 bp, Homo sapiens
acagaattaaaccac

SEQ ID NO: 1554583 - DNA, 15 bp, Homo sapiens
cacagaattaaacca

SEQ ID NO: 1554584 - DNA, 15 bp, Homo sapiens
tcacagaattaaacc

SEQ ID NO: 1554585 - DNA, 15 bp, Homo sapiens
atcacagaattaaac

SEQ ID NO: 1554586 - DNA, 15 bp, Homo sapiens
aatcacagaattaaa

SEQ ID NO: 1554587 - DNA, 15 bp, Homo sapiens
aaatcacagaattaa

SEQ ID NO: 1554588 - DNA, 15 bp, Homo sapiens
caaatcacagaatta

SEQ ID NO: 1554589 - DNA, 15 bp, Homo sapiens
tcaaatcacagaatt

SEQ ID NO: 1554590 - DNA, 15 bp, Homo sapiens
ctcaaatcacagaat

SEQ ID NO: 1554591 - DNA, 15 bp, Homo sapiens
actcaaatcacagaa

SEQ ID NO: 1554592 - DNA, 15 bp, Homo sapiens
tactcaaatcacaga

SEQ ID NO: 1554593 - DNA, 15 bp, Homo sapiens
gtactcaaatcacag

SEQ ID NO: 1554594 - DNA, 15 bp, Homo sapiens
tgtactcaaatcaca

SEQ ID NO: 1554595 - DNA, 15 bp, Homo sapiens
ttgtactcaaatcac

SEQ ID NO: 1554596 - DNA, 15 bp, Homo sapiens
tttgtactcaaatca

SEQ ID NO: 1554597 - DNA, 15 bp, Homo sapiens
ctttgtactcaaatc

SEQ ID NO: 1554598 - DNA, 15 bp, Homo sapiens
cctttgtactcaaat

SEQ ID NO: 1554599 - DNA, 15 bp, Homo sapiens
acctttgtactcaaa

SEQ ID NO: 1554600 - DNA, 15 bp, Homo sapiens
tacctttgtactcaa

SEQ ID NO: 1554601 - DNA, 15 bp, Homo sapiens
atacctttgtactca

SEQ ID NO: 1554602 - DNA, 15 bp, Homo sapiens
catacctttgtactc

SEQ ID NO: 1554603 - DNA, 15 bp, Homo sapiens
gcatacctttgtact

SEQ ID NO: 1554604 - DNA, 15 bp, Homo sapiens
ggcatacctttgtac

SEQ ID NO: 1554605 - DNA, 15 bp, Homo sapiens
tggcatacctttgta

SEQ ID NO: 1554606 - DNA, 15 bp, Homo sapiens
ctggcatacctttgt

SEQ ID NO: 1554607 - DNA, 15 bp, Homo sapiens
tctggcatacctttg

SEQ ID NO: 1554608 - DNA, 15 bp, Homo sapiens
gtctggcataccttt

SEQ ID NO: 1554609 - DNA, 15 bp, Homo sapiens
agtctggcatacctt

SEQ ID NO: 1554610 - DNA, 15 bp, Homo sapiens
aagtctggcatacct

SEQ ID NO: 1554611 - DNA, 15 bp, Homo sapiens
caagtctggcatacc

SEQ ID NO: 1554612 - DNA, 15 bp, Homo sapiens
ccaagtctggcatac

SEQ ID NO: 1554613 - DNA, 15 bp, Homo sapiens
cccaagtctggcata

SEQ ID NO: 1554614 - DNA, 15 bp, Homo sapiens
tcccaagtctggcat

SEQ ID NO: 1554615 - DNA, 15 bp, Homo sapiens
ctcccaagtctggca

SEQ ID NO: 1554616 - DNA, 15 bp, Homo sapiens
tctcccaagtctggc

SEQ ID NO: 1554617 - DNA, 15 bp, Homo sapiens
ttctcccaagtctgg

SEQ ID NO: 1554618 - DNA, 15 bp, Homo sapiens
tttctcccaagtctg

SEQ ID NO: 1554619 - DNA, 15 bp, Homo sapiens
atttctcccaagtct

SEQ ID NO: 1554620 - DNA, 15 bp, Homo sapiens
tatttctcccaagtc

SEQ ID NO: 1554621 - DNA, 15 bp, Homo sapiens
ttatttctcccaagt

SEQ ID NO: 1554622 - DNA, 15 bp, Homo sapiens
gttatttctcccaag

SEQ ID NO: 1554623 - DNA, 15 bp, Homo sapiens
tgttatttctcccaa

SEQ ID NO: 1554624 - DNA, 15 bp, Homo sapiens
ctgttatttctccca

SEQ ID NO: 1554625 - DNA, 15 bp, Homo sapiens
tctgttatttctccc

SEQ ID NO: 1554626 - DNA, 15 bp, Homo sapiens
ctctgttatttctcc

SEQ ID NO: 1554627 - DNA, 15 bp, Homo sapiens
tctctgttatttctc

SEQ ID NO: 1554628 - DNA, 15 bp, Homo sapiens
ttctctgttatttct

SEQ ID NO: 1554629 - DNA, 15 bp, Homo sapiens
tttctctgttatttc

SEQ ID NO: 1554630 - DNA, 15 bp, Homo sapiens
atttctctgttattt

SEQ ID NO: 1554631 - DNA, 15 bp, Homo sapiens
tatttctctgttatt

SEQ ID NO: 1554632 - DNA, 15 bp, Homo sapiens
ttatttctctgttat

SEQ ID NO: 1554633 - DNA, 15 bp, Homo sapiens
attatttctctgtta

SEQ ID NO: 1554634 - DNA, 15 bp, Homo sapiens
tattatttctctgtt

SEQ ID NO: 1554635 - DNA, 15 bp, Homo sapiens
gtattatttctctgt

SEQ ID NO: 1554636 - DNA, 15 bp, Homo sapiens
ggtattatttctctg

SEQ ID NO: 1554637 - DNA, 15 bp, Homo sapiens
aggtattatttctct

SEQ ID NO: 1554638 - DNA, 15 bp, Homo sapiens
caggtattatttctc

SEQ ID NO: 1554639 - DNA, 15 bp, Homo sapiens
acaggtattatttct

SEQ ID NO: 1554640 - DNA, 15 bp, Homo sapiens
aacaggtattatttc

SEQ ID NO: 1554641 - DNA, 15 bp, Homo sapiens
taacaggtattattt

SEQ ID NO: 1554642 - DNA, 15 bp, Homo sapiens
ataacaggtattatt

SEQ ID NO: 1554643 - DNA, 15 bp, Homo sapiens
tataacaggtattat

SEQ ID NO: 1554644 - DNA, 15 bp, Homo sapiens
atataacaggtatta

SEQ ID NO: 1554645 - DNA, 15 bp, Homo sapiens
aatataacaggtatt

SEQ ID NO: 1554646 - DNA, 15 bp, Homo sapiens
gaatataacaggtat

SEQ ID NO: 1554647 - DNA, 15 bp, Homo sapiens
ggaatataacaggta

SEQ ID NO: 1554648 - DNA, 15 bp, Homo sapiens
aggaatataacaggt

SEQ ID NO: 1554649 - DNA, 15 bp, Homo sapiens
caggaatataacagg

SEQ ID NO: 1554650 - DNA, 15 bp, Homo sapiens
ccaggaatataacag

SEQ ID NO: 1554651 - DNA, 15 bp, Homo sapiens
accaggaatataaca

SEQ ID NO: 1554652 - DNA, 15 bp, Homo sapiens
aaccaggaatataac

SEQ ID NO: 1554653 - DNA, 15 bp, Homo sapiens
aaaccaggaatataa

SEQ ID NO: 1554654 - DNA, 15 bp, Homo sapiens
caaaccaggaatata

SEQ ID NO: 1554655 - DNA, 15 bp, Homo sapiens
acaaaccaggaatat

SEQ ID NO: 1554656 - DNA, 15 bp, Homo sapiens
gacaaaccaggaata

SEQ ID NO: 1554657 - DNA, 15 bp, Homo sapiens
agacaaaccaggaat

SEQ ID NO: 1554658 - DNA, 15 bp, Homo sapiens
tagacaaaccaggaa

SEQ ID NO: 1554659 - DNA, 15 bp, Homo sapiens
gtagacaaaccagga

SEQ ID NO: 1554660 - DNA, 15 bp, Homo sapiens
tgtagacaaaccagg

SEQ ID NO: 1554661 - DNA, 15 bp, Homo sapiens
ttgtagacaaaccag

SEQ ID NO: 1554662 - DNA, 15 bp, Homo sapiens
cttgtagacaaacca

SEQ ID NO: 1554663 - DNA, 15 bp, Homo sapiens
gcttgtagacaaacc

SEQ ID NO: 1554664 - DNA, 15 bp, Homo sapiens
tgcttgtagacaaac

SEQ ID NO: 1554665 - DNA, 15 bp, Homo sapiens
atgcttgtagacaaa

SEQ ID NO: 1554666 - DNA, 15 bp, Homo sapiens
aatgcttgtagacaa

SEQ ID NO: 1554667 - DNA, 15 bp, Homo sapiens
gaatgcttgtagaca

SEQ ID NO: 1554668 - DNA, 15 bp, Homo sapiens
agaatgcttgtagac

SEQ ID NO: 1554669 - DNA, 15 bp, Homo sapiens
tagaatgcttgtaga

SEQ ID NO: 1554670 - DNA, 15 bp, Homo sapiens
ttagaatgcttgtag

SEQ ID NO: 1554671 - DNA, 15 bp, Homo sapiens
attagaatgcttgta

SEQ ID NO: 1554672 - DNA, 15 bp, Homo sapiens
aattagaatgcttgt

SEQ ID NO: 1554673 - DNA, 15 bp, Homo sapiens
aaattagaatgcttg

SEQ ID NO: 1554674 - DNA, 15 bp, Homo sapiens
aaaattagaatgctt

SEQ ID NO: 1554675 - DNA, 15 bp, Homo sapiens
caaaattagaatgct

SEQ ID NO: 1554676 - DNA, 15 bp, Homo sapiens
acaaaattagaatgc

SEQ ID NO: 1554677 - DNA, 15 bp, Homo sapiens
tacaaaattagaatg

SEQ ID NO: 1554678 - DNA, 15 bp, Homo sapiens
atacaaaattagaat

SEQ ID NO: 1554679 - DNA, 15 bp, Homo sapiens
aatacaaaattagaa

SEQ ID NO: 1554680 - DNA, 15 bp, Homo sapiens
taatacaaaattaga

SEQ ID NO: 1554681 - DNA, 15 bp, Homo sapiens
ataatacaaaattag

SEQ ID NO: 1554682 - DNA, 15 bp, Homo sapiens
tataatacaaaatta

SEQ ID NO: 1554683 - DNA, 15 bp, Homo sapiens
gtataatacaaaatt

SEQ ID NO: 1554684 - DNA, 15 bp, Homo sapiens
tgtataatacaaaat

SEQ ID NO: 1554685 - DNA, 15 bp, Homo sapiens
ttgtataatacaaaa

SEQ ID NO: 1554686 - DNA, 15 bp, Homo sapiens
tttgtataatacaaa

SEQ ID NO: 1554687 - DNA, 15 bp, Homo sapiens
ttttgtataatacaa

SEQ ID NO: 1554688 - DNA, 15 bp, Homo sapiens
attttgtataataca

SEQ ID NO: 1554689 - DNA, 15 bp, Homo sapiens
cattttgtataatac

SEQ ID NO: 1554690 - DNA, 15 bp, Homo sapiens
ccattttgtataata

SEQ ID NO: 1554691 - DNA, 15 bp, Homo sapiens
accattttgtataat

SEQ ID NO: 1554692 - DNA, 15 bp, Homo sapiens
aaccattttgtataa

SEQ ID NO: 1554693 - DNA, 15 bp, Homo sapiens
gaaccattttgtata

SEQ ID NO: 1554694 - DNA, 15 bp, Homo sapiens
agaaccattttgtat

SEQ ID NO: 1554695 - DNA, 15 bp, Homo sapiens
gagaaccattttgta

SEQ ID NO: 1554696 - DNA, 15 bp, Homo sapiens
agagaaccattttgt

SEQ ID NO: 1554697 - DNA, 15 bp, Homo sapiens
cagagaaccattttg

SEQ ID NO: 1554698 - DNA, 15 bp, Homo sapiens
ccagagaaccatttt

SEQ ID NO: 1554699 - DNA, 15 bp, Homo sapiens
accagagaaccattt

SEQ ID NO: 1554700 - DNA, 15 bp, Homo sapiens
gaccagagaaccatt

SEQ ID NO: 1554701 - DNA, 15 bp, Homo sapiens
ggaccagagaaccat

SEQ ID NO: 1554702 - DNA, 15 bp, Homo sapiens
gggaccagagaacca

SEQ ID NO: 1554703 - DNA, 15 bp, Homo sapiens
ggggaccagagaacc

SEQ ID NO: 1554704 - DNA, 15 bp, Homo sapiens
tggggaccagagaac

SEQ ID NO: 1554705 - DNA, 15 bp, Homo sapiens
atggggaccagagaa

SEQ ID NO: 1554706 - DNA, 15 bp, Homo sapiens
gatggggaccagaga

SEQ ID NO: 1554707 - DNA, 15 bp, Homo sapiens
agatggggaccagag

SEQ ID NO: 1554708 - DNA, 15 bp, Homo sapiens
aagatggggaccaga

SEQ ID NO: 1554709 - DNA, 15 bp, Homo sapiens
gaagatggggaccag

SEQ ID NO: 1554710 - DNA, 15 bp, Homo sapiens
agaagatggggacca

SEQ ID NO: 1554711 - DNA, 15 bp, Homo sapiens
tagaagatggggacc

SEQ ID NO: 1554712 - DNA, 15 bp, Homo sapiens
ttagaagatggggac

SEQ ID NO: 1554713 - DNA, 15 bp, Homo sapiens
cttagaagatgggga

SEQ ID NO: 1554714 - DNA, 15 bp, Homo sapiens
acttagaagatgggg

SEQ ID NO: 1554715 - DNA, 15 bp, Homo sapiens
cacttagaagatggg

SEQ ID NO: 1554716 - DNA, 15 bp, Homo sapiens
tcacttagaagatgg

SEQ ID NO: 1554717 - DNA, 15 bp, Homo sapiens
ttcacttagaagatg

SEQ ID NO: 1554718 - DNA, 15 bp, Homo sapiens
tttcacttagaagat

SEQ ID NO: 1554719 - DNA, 15 bp, Homo sapiens
ttttcacttagaaga

SEQ ID NO: 1554720 - DNA, 15 bp, Homo sapiens
attttcacttagaag

SEQ ID NO: 1554721 - DNA, 15 bp, Homo sapiens
cattttcacttagaa

SEQ ID NO: 1554722 - DNA, 15 bp, Homo sapiens
tcattttcacttaga

SEQ ID NO: 1554723 - DNA, 15 bp, Homo sapiens
ctcattttcacttag

SEQ ID NO: 1554724 - DNA, 15 bp, Homo sapiens
gctcattttcactta

SEQ ID NO: 1554725 - DNA, 15 bp, Homo sapiens
agctcattttcactt

SEQ ID NO: 1554726 - DNA, 15 bp, Homo sapiens
gagctcattttcact

SEQ ID NO: 1554727 - DNA, 15 bp, Homo sapiens
tgagctcattttcac

SEQ ID NO: 1554728 - DNA, 15 bp, Homo sapiens
ctgagctcattttca

SEQ ID NO: 1554729 - DNA, 15 bp, Homo sapiens
tctgagctcattttc

SEQ ID NO: 1554730 - DNA, 15 bp, Homo sapiens
ttctgagctcatttt

SEQ ID NO: 1554731 - DNA, 15 bp, Homo sapiens
cttctgagctcattt

SEQ ID NO: 1554732 - DNA, 15 bp, Homo sapiens
ccttctgagctcatt

SEQ ID NO: 1554733 - DNA, 15 bp, Homo sapiens
cccttctgagctcat

SEQ ID NO: 1554734 - DNA, 15 bp, Homo sapiens
gcccttctgagctca

SEQ ID NO: 1554735 - DNA, 15 bp, Homo sapiens
agcccttctgagctc

SEQ ID NO: 1554736 - DNA, 15 bp, Homo sapiens
tagcccttctgagct

SEQ ID NO: 1554737 - DNA, 15 bp, Homo sapiens
ttagcccttctgagc

SEQ ID NO: 1554738 - DNA, 15 bp, Homo sapiens
tttagcccttctgag

SEQ ID NO: 1554739 - DNA, 15 bp, Homo sapiens
atttagcccttctga

SEQ ID NO: 1554740 - DNA, 15 bp, Homo sapiens
tatttagcccttctg

SEQ ID NO: 1554741 - DNA, 15 bp, Homo sapiens
ttatttagcccttct

SEQ ID NO: 1554742 - DNA, 15 bp, Homo sapiens
gttatttagcccttc

SEQ ID NO: 1554743 - DNA, 15 bp, Homo sapiens
agttatttagccctt

SEQ ID NO: 1554744 - DNA, 15 bp, Homo sapiens
aagttatttagccct

SEQ ID NO: 1554745 - DNA, 15 bp, Homo sapiens
caagttatttagccc

SEQ ID NO: 1554746 - DNA, 15 bp, Homo sapiens
gcaagttatttagcc

SEQ ID NO: 1554747 - DNA, 15 bp, Homo sapiens
ggcaagttatttagc

SEQ ID NO: 1554748 - DNA, 15 bp, Homo sapiens
gggcaagttatttag

SEQ ID NO: 1554749 - DNA, 15 bp, Homo sapiens
tgggcaagttattta

SEQ ID NO: 1554750 - DNA, 15 bp, Homo sapiens
ttgggcaagttattt

SEQ ID NO: 1554751 - DNA, 15 bp, Homo sapiens
tttgggcaagttatt

SEQ ID NO: 1554752 - DNA, 15 bp, Homo sapiens
ctttgggcaagttat

SEQ ID NO: 1554753 - DNA, 15 bp, Homo sapiens
actttgggcaagtta

SEQ ID NO: 1554754 - DNA, 15 bp, Homo sapiens
gactttgggcaagtt

SEQ ID NO: 1554755 - DNA, 15 bp, Homo sapiens
tgactttgggcaagt

SEQ ID NO: 1554756 - DNA, 15 bp, Homo sapiens
gtgactttgggcaag

SEQ ID NO: 1554757 - DNA, 15 bp, Homo sapiens
tgtgactttgggcaa

SEQ ID NO: 1554758 - DNA, 15 bp, Homo sapiens
atgtgactttgggca

SEQ ID NO: 1554759 - DNA, 15 bp, Homo sapiens
tatgtgactttgggc

SEQ ID NO: 1554760 - DNA, 15 bp, Homo sapiens
gtatgtgactttggg

SEQ ID NO: 1554761 - DNA, 15 bp, Homo sapiens
ggtatgtgactttgg

SEQ ID NO: 1554762 - DNA, 15 bp, Homo sapiens
aggtatgtgactttg

SEQ ID NO: 1554763 - DNA, 15 bp, Homo sapiens
taggtatgtgacttt

SEQ ID NO: 1554764 - DNA, 15 bp, Homo sapiens
ttaggtatgtgactt

SEQ ID NO: 1554765 - DNA, 15 bp, Homo sapiens
attaggtatgtgact

SEQ ID NO: 1554766 - DNA, 15 bp, Homo sapiens
tattaggtatgtgac

SEQ ID NO: 1554767 - DNA, 15 bp, Homo sapiens
ttattaggtatgtga

SEQ ID NO: 1554768 - DNA, 15 bp, Homo sapiens
tttattaggtatgtg

SEQ ID NO: 1554769 - DNA, 15 bp, Homo sapiens
ttttattaggtatgt

SEQ ID NO: 1554770 - DNA, 15 bp, Homo sapiens
cttttattaggtatg

SEQ ID NO: 1554771 - DNA, 15 bp, Homo sapiens
tcttttattaggtat

SEQ ID NO: 1554772 - DNA, 15 bp, Homo sapiens
ttcttttattaggta

SEQ ID NO: 1554773 - DNA, 15 bp, Homo sapiens
gttcttttattaggt

SEQ ID NO: 1554774 - DNA, 15 bp, Homo sapiens
ggttcttttattagg

SEQ ID NO: 1554775 - DNA, 15 bp, Homo sapiens
tggttcttttattag

SEQ ID NO: 1554776 - DNA, 15 bp, Homo sapiens
atggttcttttatta

SEQ ID NO: 1554777 - DNA, 15 bp, Homo sapiens
catggttcttttatt

SEQ ID NO: 1554778 - DNA, 15 bp, Homo sapiens
tcatggttcttttat

SEQ ID NO: 1554779 - DNA, 15 bp, Homo sapiens
atcatggttctttta

SEQ ID NO: 1554780 - DNA, 15 bp, Homo sapiens
aatcatggttctttt

SEQ ID NO: 1554781 - DNA, 15 bp, Homo sapiens
gaatcatggttcttt

SEQ ID NO: 1554782 - DNA, 15 bp, Homo sapiens
agaatcatggttctt

SEQ ID NO: 1554783 - DNA, 15 bp, Homo sapiens
tagaatcatggttct

SEQ ID NO: 1554784 - DNA, 15 bp, Homo sapiens
ttagaatcatggttc

SEQ ID NO: 1554785 - DNA, 15 bp, Homo sapiens
attagaatcatggtt

SEQ ID NO: 1554786 - DNA, 15 bp, Homo sapiens
cattagaatcatggt

SEQ ID NO: 1554787 - DNA, 15 bp, Homo sapiens
acattagaatcatgg

SEQ ID NO: 1554788 - DNA, 15 bp, Homo sapiens
cacattagaatcatg

SEQ ID NO: 1554789 - DNA, 15 bp, Homo sapiens
tcacattagaatcat

SEQ ID NO: 1554790 - DNA, 15 bp, Homo sapiens
atcacattagaatca

SEQ ID NO: 1554791 - DNA, 15 bp, Homo sapiens
tatcacattagaatc

SEQ ID NO: 1554792 - DNA, 15 bp, Homo sapiens
gtatcacattagaat

SEQ ID NO: 1554793 - DNA, 15 bp, Homo sapiens
agtatcacattagaa

SEQ ID NO: 1554794 - DNA, 15 bp, Homo sapiens
tagtatcacattaga

SEQ ID NO: 1554795 - DNA, 15 bp, Homo sapiens
atagtatcacattag

SEQ ID NO: 1554796 - DNA, 15 bp, Homo sapiens
aatagtatcacatta

SEQ ID NO: 1554797 - DNA, 15 bp, Homo sapiens
aaatagtatcacatt

SEQ ID NO: 1554798 - DNA, 15 bp, Homo sapiens
caaatagtatcacat

SEQ ID NO: 1554799 - DNA, 15 bp, Homo sapiens
tcaaatagtatcaca

SEQ ID NO: 1554800 - DNA, 15 bp, Homo sapiens
gtcaaatagtatcac

SEQ ID NO: 1554801 - DNA, 15 bp, Homo sapiens
agtcaaatagtatca

SEQ ID NO: 1554802 - DNA, 15 bp, Homo sapiens
gagtcaaatagtatc

SEQ ID NO: 1554803 - DNA, 15 bp, Homo sapiens
agagtcaaatagtat

SEQ ID NO: 1554804 - DNA, 15 bp, Homo sapiens
tagagtcaaatagta

SEQ ID NO: 1554805 - DNA, 15 bp, Homo sapiens
ttagagtcaaatagt

SEQ ID NO: 1554806 - DNA, 15 bp, Homo sapiens
tttagagtcaaatag

SEQ ID NO: 1554807 - DNA, 15 bp, Homo sapiens
ctttagagtcaaata

SEQ ID NO: 1554808 - DNA, 15 bp, Homo sapiens
actttagagtcaaat

SEQ ID NO: 1554809 - DNA, 15 bp, Homo sapiens
gactttagagtcaaa

SEQ ID NO: 1554810 - DNA, 15 bp, Homo sapiens
ggactttagagtcaa

SEQ ID NO: 1554811 - DNA, 15 bp, Homo sapiens
tggactttagagtca

SEQ ID NO: 1554812 - DNA, 15 bp, Homo sapiens
atggactttagagtc

SEQ ID NO: 1554813 - DNA, 15 bp, Homo sapiens
catggactttagagt

SEQ ID NO: 1554814 - DNA, 15 bp, Homo sapiens
acatggactttagag

SEQ ID NO: 1554815 - DNA, 15 bp, Homo sapiens
tacatggactttaga

SEQ ID NO: 1554816 - DNA, 15 bp, Homo sapiens
atacatggactttag

SEQ ID NO: 1554817 - DNA, 15 bp, Homo sapiens
aatacatggacttta

SEQ ID NO: 1554818 - DNA, 15 bp, Homo sapiens
aaatacatggacttt

SEQ ID NO: 1554819 - DNA, 15 bp, Homo sapiens
aaaatacatggactt

SEQ ID NO: 1554820 - DNA, 15 bp, Homo sapiens
gaaaatacatggact

SEQ ID NO: 1554821 - DNA, 15 bp, Homo sapiens
ggaaaatacatggac

SEQ ID NO: 1554822 - DNA, 15 bp, Homo sapiens
gggaaaatacatgga

SEQ ID NO: 1554823 - DNA, 15 bp, Homo sapiens
agggaaaatacatgg

SEQ ID NO: 1554824 - DNA, 15 bp, Homo sapiens
tagggaaaatacatg

SEQ ID NO: 1554825 - DNA, 15 bp, Homo sapiens
ttagggaaaatacat

SEQ ID NO: 1554826 - DNA, 15 bp, Homo sapiens
attagggaaaataca

SEQ ID NO: 1554827 - DNA, 15 bp, Homo sapiens
tattagggaaaatac

SEQ ID NO: 1554828 - DNA, 15 bp, Homo sapiens
atattagggaaaata

SEQ ID NO: 1554829 - DNA, 15 bp, Homo sapiens
gatattagggaaaat

SEQ ID NO: 1554830 - DNA, 15 bp, Homo sapiens
tgatattagggaaaa

SEQ ID NO: 1554831 - DNA, 15 bp, Homo sapiens
gtgatattagggaaa

SEQ ID NO: 1554832 - DNA, 15 bp, Homo sapiens
tgtgatattagggaa

SEQ ID NO: 1554833 - DNA, 15 bp, Homo sapiens
ctgtgatattaggga

SEQ ID NO: 1554834 - DNA, 15 bp, Homo sapiens
actgtgatattaggg

SEQ ID NO: 1554835 - DNA, 15 bp, Homo sapiens
cactgtgatattagg

SEQ ID NO: 1554836 - DNA, 15 bp, Homo sapiens
gcactgtgatattag

SEQ ID NO: 1554837 - DNA, 15 bp, Homo sapiens
agcactgtgatatta

SEQ ID NO: 1554838 - DNA, 15 bp, Homo sapiens
tagcactgtgatatt

SEQ ID NO: 1554839 - DNA, 15 bp, Homo sapiens
ttagcactgtgatat

SEQ ID NO: 1554840 - DNA, 15 bp, Homo sapiens
cttagcactgtgata

SEQ ID NO: 1554841 - DNA, 15 bp, Homo sapiens
acttagcactgtgat

SEQ ID NO: 1554842 - DNA, 15 bp, Homo sapiens
tacttagcactgtga

SEQ ID NO: 1554843 - DNA, 15 bp, Homo sapiens
ttacttagcactgtg

SEQ ID NO: 1554844 - DNA, 15 bp, Homo sapiens
tttacttagcactgt

SEQ ID NO: 1554845 - DNA, 15 bp, Homo sapiens
ctttacttagcactg

SEQ ID NO: 1554846 - DNA, 15 bp, Homo sapiens
tctttacttagcact

SEQ ID NO: 1554847 - DNA, 15 bp, Homo sapiens
atctttacttagcac

SEQ ID NO: 1554848 - DNA, 15 bp, Homo sapiens
aatctttacttagca

SEQ ID NO: 1554849 - DNA, 15 bp, Homo sapiens
caatctttacttagc

SEQ ID NO: 1554850 - DNA, 15 bp, Homo sapiens
gcaatctttacttag

SEQ ID NO: 1554851 - DNA, 15 bp, Homo sapiens
ggcaatctttactta

SEQ ID NO: 1554852 - DNA, 15 bp, Homo sapiens
tggcaatctttactt

SEQ ID NO: 1554853 - DNA, 15 bp, Homo sapiens
ctggcaatctttact

SEQ ID NO: 1554854 - DNA, 15 bp, Homo sapiens
actggcaatctttac

SEQ ID NO: 1554855 - DNA, 15 bp, Homo sapiens
tactggcaatcttta

SEQ ID NO: 1554856 - DNA, 15 bp, Homo sapiens
ttactggcaatcttt

SEQ ID NO: 1554857 - DNA, 15 bp, Homo sapiens
attactggcaatctt

SEQ ID NO: 1554858 - DNA, 15 bp, Homo sapiens
tattactggcaatct

SEQ ID NO: 1554859 - DNA, 15 bp, Homo sapiens
ttattactggcaatc

SEQ ID NO: 1554860 - DNA, 15 bp, Homo sapiens
tttattactggcaat

SEQ ID NO: 1554861 - DNA, 15 bp, Homo sapiens
atttattactggcaa

SEQ ID NO: 1554862 - DNA, 15 bp, Homo sapiens
tatttattactggca

SEQ ID NO: 1554863 - DNA, 15 bp, Homo sapiens
gtatttattactggc

SEQ ID NO: 1554864 - DNA, 15 bp, Homo sapiens
agtatttattactgg

SEQ ID NO: 1554865 - DNA, 15 bp, Homo sapiens
aagtatttattactg

SEQ ID NO: 1554866 - DNA, 15 bp, Homo sapiens
aaagtatttattact

SEQ ID NO: 1554867 - DNA, 15 bp, Homo sapiens
aaaagtatttattac

SEQ ID NO: 1554868 - DNA, 15 bp, Homo sapiens
taaaagtatttatta

SEQ ID NO: 1554869 - DNA, 15 bp, Homo sapiens
ttaaaagtatttatt

SEQ ID NO: 1554870 - DNA, 15 bp, Homo sapiens
attaaaagtatttat

SEQ ID NO: 1554871 - DNA, 15 bp, Homo sapiens
aattaaaagtattta

SEQ ID NO: 1554872 - DNA, 15 bp, Homo sapiens
gaattaaaagtattt

SEQ ID NO: 1554873 - DNA, 15 bp, Homo sapiens
tgaattaaaagtatt

SEQ ID NO: 1554874 - DNA, 15 bp, Homo sapiens
ctgaattaaaagtat

SEQ ID NO: 1554875 - DNA, 15 bp, Homo sapiens
tctgaattaaaagta

SEQ ID NO: 1554876 - DNA, 15 bp, Homo sapiens
ctctgaattaaaagt

SEQ ID NO: 1554877 - DNA, 15 bp, Homo sapiens
gctctgaattaaaag

SEQ ID NO: 1554878 - DNA, 15 bp, Homo sapiens
tgctctgaattaaaa

SEQ ID NO: 1554879 - DNA, 15 bp, Homo sapiens
ctgctctgaattaaa

SEQ ID NO: 1554880 - DNA, 15 bp, Homo sapiens
gctgctctgaattaa

SEQ ID NO: 1554881 - DNA, 15 bp, Homo sapiens
tgctgctctgaatta

SEQ ID NO: 1554882 - DNA, 15 bp, Homo sapiens
ttgctgctctgaatt

SEQ ID NO: 1554883 - DNA, 15 bp, Homo sapiens
cttgctgctctgaat

SEQ ID NO: 1554884 - DNA, 15 bp, Homo sapiens
tcttgctgctctgaa

SEQ ID NO: 1554885 - DNA, 15 bp, Homo sapiens
ctcttgctgctctga

SEQ ID NO: 1554886 - DNA, 15 bp, Homo sapiens
tctcttgctgctctg

SEQ ID NO: 1554887 - DNA, 15 bp, Homo sapiens
atctcttgctgctct

SEQ ID NO: 1554888 - DNA, 15 bp, Homo sapiens
aatctcttgctgctc

SEQ ID NO: 1554889 - DNA, 15 bp, Homo sapiens
taatctcttgctgct

SEQ ID NO: 1554890 - DNA, 15 bp, Homo sapiens
gtaatctcttgctgc

SEQ ID NO: 1554891 - DNA, 15 bp, Homo sapiens
ggtaatctcttgctg

SEQ ID NO: 1554892 - DNA, 15 bp, Homo sapiens
tggtaatctcttgct

SEQ ID NO: 1554893 - DNA, 15 bp, Homo sapiens
atggtaatctcttgc

SEQ ID NO: 1554894 - DNA, 15 bp, Homo sapiens
tatggtaatctcttg

SEQ ID NO: 1554895 - DNA, 15 bp, Homo sapiens
gtatggtaatctctt

SEQ ID NO: 1554896 - DNA, 15 bp, Homo sapiens
agtatggtaatctct

SEQ ID NO: 1554897 - DNA, 15 bp, Homo sapiens
cagtatggtaatctc

SEQ ID NO: 1554898 - DNA, 15 bp, Homo sapiens
ccagtatggtaatct

SEQ ID NO: 1554899 - DNA, 15 bp, Homo sapiens
accagtatggtaatc

SEQ ID NO: 1554900 - DNA, 15 bp, Homo sapiens
aaccagtatggtaat

SEQ ID NO: 1554901 - DNA, 15 bp, Homo sapiens
taaccagtatggtaa

SEQ ID NO: 1554902 - DNA, 15 bp, Homo sapiens
ttaaccagtatggta

SEQ ID NO: 1554903 - DNA, 15 bp, Homo sapiens
cttaaccagtatggt

SEQ ID NO: 1554904 - DNA, 15 bp, Homo sapiens
tcttaaccagtatgg

SEQ ID NO: 1554905 - DNA, 15 bp, Homo sapiens
ctcttaaccagtatg

SEQ ID NO: 1554906 - DNA, 15 bp, Homo sapiens
actcttaaccagtat

SEQ ID NO: 1554907 - DNA, 15 bp, Homo sapiens
cactcttaaccagta

SEQ ID NO: 1554908 - DNA, 15 bp, Homo sapiens
tcactcttaaccagt

SEQ ID NO: 1554909 - DNA, 15 bp, Homo sapiens
gtcactcttaaccag

SEQ ID NO: 1554910 - DNA, 15 bp, Homo sapiens
tgtcactcttaacca

SEQ ID NO: 1554911 - DNA, 15 bp, Homo sapiens
ttgtcactcttaacc

SEQ ID NO: 1554912 - DNA, 15 bp, Homo sapiens
cttgtcactcttaac

SEQ ID NO: 1554913 - DNA, 15 bp, Homo sapiens
tcttgtcactcttaa

SEQ ID NO: 1554914 - DNA, 15 bp, Homo sapiens
ttcttgtcactctta

SEQ ID NO: 1554915 - DNA, 15 bp, Homo sapiens
cttcttgtcactctt

SEQ ID NO: 1554916 - DNA, 15 bp, Homo sapiens
acttcttgtcactct

SEQ ID NO: 1554917 - DNA, 15 bp, Homo sapiens
aacttcttgtcactc

SEQ ID NO: 1554918 - DNA, 15 bp, Homo sapiens
caacttcttgtcact

SEQ ID NO: 1554919 - DNA, 15 bp, Homo sapiens
tcaacttcttgtcac

SEQ ID NO: 1554920 - DNA, 15 bp, Homo sapiens
ttcaacttcttgtca

SEQ ID NO: 1554921 - DNA, 15 bp, Homo sapiens
tttcaacttcttgtc

SEQ ID NO: 1554922 - DNA, 15 bp, Homo sapiens
ttttcaacttcttgt

SEQ ID NO: 1554923 - DNA, 15 bp, Homo sapiens
cttttcaacttcttg

SEQ ID NO: 1554924 - DNA, 15 bp, Homo sapiens
tcttttcaacttctt

SEQ ID NO: 1554925 - DNA, 15 bp, Homo sapiens
gtcttttcaacttct

SEQ ID NO: 1554926 - DNA, 15 bp, Homo sapiens
tgtcttttcaacttc

SEQ ID NO: 1554927 - DNA, 15 bp, Homo sapiens
ctgtcttttcaactt

SEQ ID NO: 1554928 - DNA, 15 bp, Homo sapiens
actgtcttttcaact

SEQ ID NO: 1554929 - DNA, 15 bp, Homo sapiens
aactgtcttttcaac

SEQ ID NO: 1554930 - DNA, 15 bp, Homo sapiens
aaactgtcttttcaa

SEQ ID NO: 1554931 - DNA, 15 bp, Homo sapiens
taaactgtcttttca

SEQ ID NO: 1554932 - DNA, 15 bp, Homo sapiens
ttaaactgtcttttc

SEQ ID NO: 1554933 - DNA, 15 bp, Homo sapiens
tttaaactgtctttt

SEQ ID NO: 1554934 - DNA, 15 bp, Homo sapiens
ttttaaactgtcttt

SEQ ID NO: 1554935 - DNA, 15 bp, Homo sapiens
attttaaactgtctt

SEQ ID NO: 1554936 - DNA, 15 bp, Homo sapiens
tattttaaactgtct

SEQ ID NO: 1554937 - DNA, 15 bp, Homo sapiens
ttattttaaactgtc

SEQ ID NO: 1554938 - DNA, 15 bp, Homo sapiens
tttattttaaactgt

SEQ ID NO: 1554939 - DNA, 15 bp, Homo sapiens
ctttattttaaactg

SEQ ID NO: 1554940 - DNA, 15 bp, Homo sapiens
actttattttaaact

SEQ ID NO: 1554941 - DNA, 15 bp, Homo sapiens
aactttattttaaac

SEQ ID NO: 1554942 - DNA, 15 bp, Homo sapiens
taactttattttaaa

SEQ ID NO: 1554943 - DNA, 15 bp, Homo sapiens
ttaactttattttaa

SEQ ID NO: 1554944 - DNA, 15 bp, Homo sapiens
tttaactttatttta

SEQ ID NO: 1554945 - DNA, 15 bp, Homo sapiens
ctttaactttatttt

SEQ ID NO: 1554946 - DNA, 15 bp, Homo sapiens
cctttaactttattt

SEQ ID NO: 1554947 - DNA, 15 bp, Homo sapiens
ccctttaactttatt

SEQ ID NO: 1554948 - DNA, 15 bp, Homo sapiens
tccctttaactttat

SEQ ID NO: 1554949 - DNA, 15 bp, Homo sapiens
ttccctttaacttta

SEQ ID NO: 1554950 - DNA, 15 bp, Homo sapiens
tttccctttaacttt

SEQ ID NO: 1554951 - DNA, 15 bp, Homo sapiens
gtttccctttaactt

SEQ ID NO: 1554952 - DNA, 15 bp, Homo sapiens
tgtttccctttaact

SEQ ID NO: 1554953 - DNA, 15 bp, Homo sapiens
atgtttccctttaac

SEQ ID NO: 1554954 - DNA, 15 bp, Homo sapiens
tatgtttccctttaa

SEQ ID NO: 1554955 - DNA, 15 bp, Homo sapiens
ctatgtttcccttta

SEQ ID NO: 1554956 - DNA, 15 bp, Homo sapiens
cctatgtttcccttt

SEQ ID NO: 1554957 - DNA, 15 bp, Homo sapiens
tcctatgtttccctt

SEQ ID NO: 1554958 - DNA, 15 bp, Homo sapiens
ctcctatgtttccct

SEQ ID NO: 1554959 - DNA, 15 bp, Homo sapiens
actcctatgtttccc

SEQ ID NO: 1554960 - DNA, 15 bp, Homo sapiens
aactcctatgtttcc

SEQ ID NO: 1554961 - DNA, 15 bp, Homo sapiens
taactcctatgtttc

SEQ ID NO: 1554962 - DNA, 15 bp, Homo sapiens
ttaactcctatgttt

SEQ ID NO: 1554963 - DNA, 15 bp, Homo sapiens
attaactcctatgtt

SEQ ID NO: 1554964 - DNA, 15 bp, Homo sapiens
cattaactcctatgt

SEQ ID NO: 1554965 - DNA, 15 bp, Homo sapiens
acattaactcctatg

SEQ ID NO: 1554966 - DNA, 15 bp, Homo sapiens
tacattaactcctat

SEQ ID NO: 1554967 - DNA, 15 bp, Homo sapiens
ctacattaactccta

SEQ ID NO: 1554968 - DNA, 15 bp, Homo sapiens
cctacattaactcct

SEQ ID NO: 1554969 - DNA, 15 bp, Homo sapiens
acctacattaactcc

SEQ ID NO: 1554970 - DNA, 15 bp, Homo sapiens
tacctacattaactc

SEQ ID NO: 1554971 - DNA, 15 bp, Homo sapiens
ctacctacattaact

SEQ ID NO: 1554972 - DNA, 15 bp, Homo sapiens
tctacctacattaac

SEQ ID NO: 1554973 - DNA, 15 bp, Homo sapiens
ctctacctacattaa

SEQ ID NO: 1554974 - DNA, 15 bp, Homo sapiens
tctctacctacatta

SEQ ID NO: 1554975 - DNA, 15 bp, Homo sapiens
ctctctacctacatt

SEQ ID NO: 1554976 - DNA, 15 bp, Homo sapiens
tctctctacctacat

SEQ ID NO: 1554977 - DNA, 15 bp, Homo sapiens
ttctctctacctaca

SEQ ID NO: 1554978 - DNA, 15 bp, Homo sapiens
tttctctctacctac

SEQ ID NO: 1554979 - DNA, 15 bp, Homo sapiens
ctttctctctaccta

SEQ ID NO: 1554980 - DNA, 15 bp, Homo sapiens
cctttctctctacct

SEQ ID NO: 1554981 - DNA, 15 bp, Homo sapiens
ccctttctctctacc

SEQ ID NO: 1554982 - DNA, 15 bp, Homo sapiens
tccctttctctctac

SEQ ID NO: 1554983 - DNA, 15 bp, Homo sapiens
ctccctttctctcta

SEQ ID NO: 1554984 - DNA, 15 bp, Homo sapiens
tctctccctttctct

SEQ ID NO: 1554985 - DNA, 15 bp, Homo sapiens
ctctctccctttctc

SEQ ID NO: 1554986 - DNA, 15 bp, Homo sapiens
gctctctccctttct

SEQ ID NO: 1554987 - DNA, 15 bp, Homo sapiens
agctctctccctttc

SEQ ID NO: 1554988 - DNA, 15 bp, Homo sapiens
cagctctctcccttt

SEQ ID NO: 1554989 - DNA, 15 bp, Homo sapiens
gcagctctctccctt

SEQ ID NO: 1554990 - DNA, 15 bp, Homo sapiens
tgcagctctctccct

SEQ ID NO: 1554991 - DNA, 15 bp, Homo sapiens
gtgcagctctctccc

SEQ ID NO: 1554992 - DNA, 15 bp, Homo sapiens
tgtgcagctctctcc

SEQ ID NO: 1554993 - DNA, 15 bp, Homo sapiens
ttgtgcagctctctc

SEQ ID NO: 1554994 - DNA, 15 bp, Homo sapiens
cttgtgcagctctct

SEQ ID NO: 1554995 - DNA, 15 bp, Homo sapiens
tcttgtgcagctctc

SEQ ID NO: 1554996 - DNA, 15 bp, Homo sapiens
ttcttgtgcagctct

SEQ ID NO: 1554997 - DNA, 15 bp, Homo sapiens
attcttgtgcagctc

SEQ ID NO: 1554998 - DNA, 15 bp, Homo sapiens
cattcttgtgcagct

SEQ ID NO: 1554999 - DNA, 15 bp, Homo sapiens
gcattcttgtgcagc

SEQ ID NO: 1555000 - DNA, 15 bp, Homo sapiens
ggcattcttgtgcag

SEQ ID NO: 1555001 - DNA, 15 bp, Homo sapiens
tggcattcttgtgca

SEQ ID NO: 1555002 - DNA, 15 bp, Homo sapiens
ctggcattcttgtgc

SEQ ID NO: 1555003 - DNA, 15 bp, Homo sapiens
cctggcattcttgtg

SEQ ID NO: 1555004 - DNA, 15 bp, Homo sapiens
tcctggcattcttgt

SEQ ID NO: 1555005 - DNA, 15 bp, Homo sapiens
gtcctggcattcttg

SEQ ID NO: 1555006 - DNA, 15 bp, Homo sapiens
tgtcctggcattctt

SEQ ID NO: 1555007 - DNA, 15 bp, Homo sapiens
ttgtcctggcattct

SEQ ID NO: 1555008 - DNA, 15 bp, Homo sapiens
attgtcctggcattc

SEQ ID NO: 1555009 - DNA, 15 bp, Homo sapiens
cattgtcctggcatt

SEQ ID NO: 1555010 - DNA, 15 bp, Homo sapiens
ccattgtcctggcat

SEQ ID NO: 1555011 - DNA, 15 bp, Homo sapiens
tccattgtcctggca

SEQ ID NO: 1555012 - DNA, 15 bp, Homo sapiens
ctccattgtcctggc

SEQ ID NO: 1555013 - DNA, 15 bp, Homo sapiens
cctccattgtcctgg

SEQ ID NO: 1555014 - DNA, 15 bp, Homo sapiens
ccctccattgtcctg

SEQ ID NO: 1555015 - DNA, 15 bp, Homo sapiens
tccctccattgtcct

SEQ ID NO: 1555016 - DNA, 15 bp, Homo sapiens
ttccctccattgtcc

SEQ ID NO: 1555017 - DNA, 15 bp, Homo sapiens
cttccctccattgtc

SEQ ID NO: 1555018 - DNA, 15 bp, Homo sapiens
ccttccctccattgt

SEQ ID NO: 1555019 - DNA, 15 bp, Homo sapiens
accttccctccattg

SEQ ID NO: 1555020 - DNA, 15 bp, Homo sapiens
caccttccctccatt

SEQ ID NO: 1555021 - DNA, 15 bp, Homo sapiens
ccaccttccctccat

SEQ ID NO: 1555022 - DNA, 15 bp, Homo sapiens
cccaccttccctcca

SEQ ID NO: 1555023 - DNA, 15 bp, Homo sapiens
acccaccttccctcc

SEQ ID NO: 1555024 - DNA, 15 bp, Homo sapiens
tacccaccttccctc

SEQ ID NO: 1555025 - DNA, 15 bp, Homo sapiens
ctacccaccttccct

SEQ ID NO: 1555026 - DNA, 15 bp, Homo sapiens
tctacccaccttccc

SEQ ID NO: 1555027 - DNA, 15 bp, Homo sapiens
ttctacccaccttcc

SEQ ID NO: 1555028 - DNA, 15 bp, Homo sapiens
gttctacccaccttc

SEQ ID NO: 1555029 - DNA, 15 bp, Homo sapiens
tgttctacccacctt

SEQ ID NO: 1555030 - DNA, 15 bp, Homo sapiens
atgttctacccacct

SEQ ID NO: 1555031 - DNA, 15 bp, Homo sapiens
aatgttctacccacc

SEQ ID NO: 1555032 - DNA, 15 bp, Homo sapiens
gaatgttctacccac

SEQ ID NO: 1555033 - DNA, 15 bp, Homo sapiens
agaatgttctaccca

SEQ ID NO: 1555034 - DNA, 15 bp, Homo sapiens
tagaatgttctaccc

SEQ ID NO: 1555035 - DNA, 15 bp, Homo sapiens
ctagaatgttctacc

SEQ ID NO: 1555036 - DNA, 15 bp, Homo sapiens
actagaatgttctac

SEQ ID NO: 1555037 - DNA, 15 bp, Homo sapiens
aactagaatgttcta

SEQ ID NO: 1555038 - DNA, 15 bp, Homo sapiens
caactagaatgttct

SEQ ID NO: 1555039 - DNA, 15 bp, Homo sapiens
acaactagaatgttc

SEQ ID NO: 1555040 - DNA, 15 bp, Homo sapiens
tacaactagaatgtt

SEQ ID NO: 1555041 - DNA, 15 bp, Homo sapiens
ttacaactagaatgt

SEQ ID NO: 1555042 - DNA, 15 bp, Homo sapiens
attacaactagaatg

SEQ ID NO: 1555043 - DNA, 15 bp, Homo sapiens
cattacaactagaat

SEQ ID NO: 1555044 - DNA, 15 bp, Homo sapiens
ccattacaactagaa

SEQ ID NO: 1555045 - DNA, 15 bp, Homo sapiens
tccattacaactaga

SEQ ID NO: 1555046 - DNA, 15 bp, Homo sapiens
ctccattacaactag

SEQ ID NO: 1555047 - DNA, 15 bp, Homo sapiens
tctccattacaacta

SEQ ID NO: 1555048 - DNA, 15 bp, Homo sapiens
ttctccattacaact

SEQ ID NO: 1555049 - DNA, 15 bp, Homo sapiens
cttctccattacaac

SEQ ID NO: 1555050 - DNA, 15 bp, Homo sapiens
gcttctccattacaa

SEQ ID NO: 1555051 - DNA, 15 bp, Homo sapiens
agcttctccattaca

SEQ ID NO: 1555052 - DNA, 15 bp, Homo sapiens
aagcttctccattac

SEQ ID NO: 1555053 - DNA, 15 bp, Homo sapiens
aaagcttctccatta

SEQ ID NO: 1555054 - DNA, 15 bp, Homo sapiens
aaaagcttctccatt

SEQ ID NO: 1555055 - DNA, 15 bp, Homo sapiens
gaaaagcttctccat

SEQ ID NO: 1555056 - DNA, 15 bp, Homo sapiens
tgaaaagcttctcca

SEQ ID NO: 1555057 - DNA, 15 bp, Homo sapiens
ttgaaaagcttctcc

SEQ ID NO: 1555058 - DNA, 15 bp, Homo sapiens
tttgaaaagcttctc

SEQ ID NO: 1555059 - DNA, 15 bp, Homo sapiens
ctttgaaaagcttct

SEQ ID NO: 1555060 - DNA, 15 bp, Homo sapiens
cctttgaaaagcttc

SEQ ID NO: 1555061 - DNA, 15 bp, Homo sapiens
tcctttgaaaagctt

SEQ ID NO: 1555062 - DNA, 15 bp, Homo sapiens
ttcctttgaaaagct

SEQ ID NO: 1555063 - DNA, 15 bp, Homo sapiens
attcctttgaaaagc

SEQ ID NO: 1555064 - DNA, 15 bp, Homo sapiens
gattcctttgaaaag

SEQ ID NO: 1555065 - DNA, 15 bp, Homo sapiens
cgattcctttgaaaa

SEQ ID NO: 1555066 - DNA, 15 bp, Homo sapiens
tcgattcctttgaaa

SEQ ID NO: 1555067 - DNA, 15 bp, Homo sapiens
ctcgattcctttgaa

SEQ ID NO: 1555068 - DNA, 15 bp, Homo sapiens
tctcgattcctttga

SEQ ID NO: 1555069 - DNA, 15 bp, Homo sapiens
ctctcgattcctttg

SEQ ID NO: 1555070 - DNA, 15 bp, Homo sapiens
tctctcgattccttt

SEQ ID NO: 1555071 - DNA, 15 bp, Homo sapiens
ctctctcgattcctt

SEQ ID NO: 1555072 - DNA, 15 bp, Homo sapiens
cctctctcgattcct

SEQ ID NO: 1555073 - DNA, 15 bp, Homo sapiens
ccctctctcgattcc

SEQ ID NO: 1555074 - DNA, 15 bp, Homo sapiens
tccctctctcgattc

SEQ ID NO: 1555075 - DNA, 15 bp, Homo sapiens
ttccctctctcgatt

SEQ ID NO: 1555076 - DNA, 15 bp, Homo sapiens
tttccctctctcgat

SEQ ID NO: 1555077 - DNA, 15 bp, Homo sapiens
ctttccctctctcga

SEQ ID NO: 1555078 - DNA, 15 bp, Homo sapiens
actttccctctctcg

SEQ ID NO: 1555079 - DNA, 15 bp, Homo sapiens
aactttccctctctc

SEQ ID NO: 1555080 - DNA, 15 bp, Homo sapiens
caactttccctctct

SEQ ID NO: 1555081 - DNA, 15 bp, Homo sapiens
acaactttccctctc

SEQ ID NO: 1555082 - DNA, 15 bp, Homo sapiens
cacaactttccctct

SEQ ID NO: 1555083 - DNA, 15 bp, Homo sapiens
tcacaactttccctc

SEQ ID NO: 1555084 - DNA, 15 bp, Homo sapiens
ctcacaactttccct

SEQ ID NO: 1555085 - DNA, 15 bp, Homo sapiens
cctcacaactttccc

SEQ ID NO: 1555086 - DNA, 15 bp, Homo sapiens
tcctcacaactttcc

SEQ ID NO: 1555087 - DNA, 15 bp, Homo sapiens
gtcctcacaactttc

SEQ ID NO: 1555088 - DNA, 15 bp, Homo sapiens
agtcctcacaacttt

SEQ ID NO: 1555089 - DNA, 15 bp, Homo sapiens
cagtcctcacaactt

SEQ ID NO: 1555090 - DNA, 15 bp, Homo sapiens
ccagtcctcacaact

SEQ ID NO: 1555091 - DNA, 15 bp, Homo sapiens
tccagtcctcacaac

SEQ ID NO: 1555092 - DNA, 15 bp, Homo sapiens
atccagtcctcacaa

SEQ ID NO: 1555093 - DNA, 15 bp, Homo sapiens
tatccagtcctcaca

SEQ ID NO: 1555094 - DNA, 15 bp, Homo sapiens
ctatccagtcctcac

SEQ ID NO: 1555095 - DNA, 15 bp, Homo sapiens
tctatccagtcctca

SEQ ID NO: 1555096 - DNA, 15 bp, Homo sapiens
gtctatccagtcctc

SEQ ID NO: 1555097 - DNA, 15 bp, Homo sapiens
ggtctatccagtcct

SEQ ID NO: 1555098 - DNA, 15 bp, Homo sapiens
aggtctatccagtcc

SEQ ID NO: 1555099 - DNA, 15 bp, Homo sapiens
gaggtctatccagtc

SEQ ID NO: 1555100 - DNA, 15 bp, Homo sapiens
tgaggtctatccagt

SEQ ID NO: 1555101 - DNA, 15 bp, Homo sapiens
atgaggtctatccag

SEQ ID NO: 1555102 - DNA, 15 bp, Homo sapiens
gatgaggtctatcca

SEQ ID NO: 1555103 - DNA, 15 bp, Homo sapiens
agatgaggtctatcc

SEQ ID NO: 1555104 - DNA, 15 bp, Homo sapiens
gagatgaggtctatc

SEQ ID NO: 1555105 - DNA, 15 bp, Homo sapiens
tgagatgaggtctat

SEQ ID NO: 1555106 - DNA, 15 bp, Homo sapiens
gtgagatgaggtcta

SEQ ID NO: 1555107 - DNA, 15 bp, Homo sapiens
tgtgagatgaggtct

SEQ ID NO: 1555108 - DNA, 15 bp, Homo sapiens
atgtgagatgaggtc

SEQ ID NO: 1555109 - DNA, 15 bp, Homo sapiens
aatgtgagatgaggt

SEQ ID NO: 1555110 - DNA, 15 bp, Homo sapiens
gaatgtgagatgagg

SEQ ID NO: 1555111 - DNA, 15 bp, Homo sapiens
tgaatgtgagatgag

SEQ ID NO: 1555112 - DNA, 15 bp, Homo sapiens
ctgaatgtgagatga

SEQ ID NO: 1555113 - DNA, 15 bp, Homo sapiens
gctgaatgtgagatg

SEQ ID NO: 1555114 - DNA, 15 bp, Homo sapiens
tgctgaatgtgagat

SEQ ID NO: 1555115 - DNA, 15 bp, Homo sapiens
atgctgaatgtgaga

SEQ ID NO: 1555116 - DNA, 15 bp, Homo sapiens
aatgctgaatgtgag

SEQ ID NO: 1555117 - DNA, 15 bp, Homo sapiens
caatgctgaatgtga

SEQ ID NO: 1555118 - DNA, 15 bp, Homo sapiens
acaatgctgaatgtg

SEQ ID NO: 1555119 - DNA, 15 bp, Homo sapiens
aacaatgctgaatgt

SEQ ID NO: 1555120 - DNA, 15 bp, Homo sapiens
gaacaatgctgaatg

SEQ ID NO: 1555121 - DNA, 15 bp, Homo sapiens
tgaacaatgctgaat

SEQ ID NO: 1555122 - DNA, 15 bp, Homo sapiens
ttgaacaatgctgaa

SEQ ID NO: 1555123 - DNA, 15 bp, Homo sapiens
tttgaacaatgctga

SEQ ID NO: 1555124 - DNA, 15 bp, Homo sapiens
ttttgaacaatgctg

SEQ ID NO: 1555125 - DNA, 15 bp, Homo sapiens
cttttgaacaatgct

SEQ ID NO: 1555126 - DNA, 15 bp, Homo sapiens
tcttttgaacaatgc

SEQ ID NO: 1555127 - DNA, 15 bp, Homo sapiens
ctcttttgaacaatg

SEQ ID NO: 1555128 - DNA, 15 bp, Homo sapiens
actcttttgaacaat

SEQ ID NO: 1555129 - DNA, 15 bp, Homo sapiens
aactcttttgaacaa

SEQ ID NO: 1555130 - DNA, 15 bp, Homo sapiens
aaactcttttgaaca

SEQ ID NO: 1555131 - DNA, 15 bp, Homo sapiens
caaactcttttgaac

SEQ ID NO: 1555132 - DNA, 15 bp, Homo sapiens
ccaaactcttttgaa

SEQ ID NO: 1555133 - DNA, 15 bp, Homo sapiens
tccaaactcttttga

SEQ ID NO: 1555134 - DNA, 15 bp, Homo sapiens
ttccaaactcttttg

SEQ ID NO: 1555135 - DNA, 15 bp, Homo sapiens
tttccaaactctttt

SEQ ID NO: 1555136 - DNA, 15 bp, Homo sapiens
atttccaaactcttt

SEQ ID NO: 1555137 - DNA, 15 bp, Homo sapiens
catttccaaactctt

SEQ ID NO: 1555138 - DNA, 15 bp, Homo sapiens
acatttccaaactct

SEQ ID NO: 1555139 - DNA, 15 bp, Homo sapiens
tacatttccaaactc

SEQ ID NO: 1555140 - DNA, 15 bp, Homo sapiens
gtacatttccaaact

SEQ ID NO: 1555141 - DNA, 15 bp, Homo sapiens
tgtacatttccaaac

SEQ ID NO: 1555142 - DNA, 15 bp, Homo sapiens
ctgtacatttccaaa

SEQ ID NO: 1555143 - DNA, 15 bp, Homo sapiens
actgtacatttccaa

SEQ ID NO: 1555144 - DNA, 15 bp, Homo sapiens
aactgtacatttcca

SEQ ID NO: 1555145 - DNA, 15 bp, Homo sapiens
aaactgtacatttcc

SEQ ID NO: 1555146 - DNA, 15 bp, Homo sapiens
aaaactgtacatttc

SEQ ID NO: 1555147 - DNA, 15 bp, Homo sapiens
aaaaactgtacattt

SEQ ID NO: 1555148 - DNA, 15 bp, Homo sapiens
taaaaactgtacatt

SEQ ID NO: 1555149 - DNA, 15 bp, Homo sapiens
ttaaaaactgtacat

SEQ ID NO: 1555150 - DNA, 15 bp, Homo sapiens
cttaaaaactgtaca

SEQ ID NO: 1555151 - DNA, 15 bp, Homo sapiens
gcttaaaaactgtac

SEQ ID NO: 1555152 - DNA, 15 bp, Homo sapiens
tgcttaaaaactgta

SEQ ID NO: 1555153 - DNA, 15 bp, Homo sapiens
ctgcttaaaaactgt

SEQ ID NO: 1555154 - DNA, 15 bp, Homo sapiens
tctgcttaaaaactg

SEQ ID NO: 1555155 - DNA, 15 bp, Homo sapiens
gtctgcttaaaaact

SEQ ID NO: 1555156 - DNA, 15 bp, Homo sapiens
tgtctgcttaaaaac

SEQ ID NO: 1555157 - DNA, 15 bp, Homo sapiens
ttgtctgcttaaaaa

SEQ ID NO: 1555158 - DNA, 15 bp, Homo sapiens
cttgtctgcttaaaa

SEQ ID NO: 1555159 - DNA, 15 bp, Homo sapiens
acttgtctgcttaaa

SEQ ID NO: 1555160 - DNA, 15 bp, Homo sapiens
gacttgtctgcttaa

SEQ ID NO: 1555161 - DNA, 15 bp, Homo sapiens
tgacttgtctgctta

SEQ ID NO: 1555162 - DNA, 15 bp, Homo sapiens
atgacttgtctgctt

SEQ ID NO: 1555163 - DNA, 15 bp, Homo sapiens
tatgacttgtctgct

SEQ ID NO: 1555164 - DNA, 15 bp, Homo sapiens
gtatgacttgtctgc

SEQ ID NO: 1555165 - DNA, 15 bp, Homo sapiens
cgtatgacttgtctg

SEQ ID NO: 1555166 - DNA, 15 bp, Homo sapiens
tcgtatgacttgtct

SEQ ID NO: 1555167 - DNA, 15 bp, Homo sapiens
atcgtatgacttgtc

SEQ ID NO: 1555168 - DNA, 15 bp, Homo sapiens
catcgtatgacttgt

SEQ ID NO: 1555169 - DNA, 15 bp, Homo sapiens
tcatcgtatgacttg

SEQ ID NO: 1555170 - DNA, 15 bp, Homo sapiens
ttcatcgtatgactt

SEQ ID NO: 1555171 - DNA, 15 bp, Homo sapiens
tttcatcgtatgact

SEQ ID NO: 1555172 - DNA, 15 bp, Homo sapiens
ctttcatcgtatgac

SEQ ID NO: 1555173 - DNA, 15 bp, Homo sapiens
gctttcatcgtatga

SEQ ID NO: 1555174 - DNA, 15 bp, Homo sapiens
tgctttcatcgtatg

SEQ ID NO: 1555175 - DNA, 15 bp, Homo sapiens
ctgctttcatcgtat

SEQ ID NO: 1555176 - DNA, 15 bp, Homo sapiens
cctgctttcatcgta

SEQ ID NO: 1555177 - DNA, 15 bp, Homo sapiens
tcctgctttcatcgt

SEQ ID NO: 1555178 - DNA, 15 bp, Homo sapiens
gtcctgctttcatcg

SEQ ID NO: 1555179 - DNA, 15 bp, Homo sapiens
agtcctgctttcatc

SEQ ID NO: 1555180 - DNA, 15 bp, Homo sapiens
aagtcctgctttcat

SEQ ID NO: 1555181 - DNA, 15 bp, Homo sapiens
taagtcctgctttca

SEQ ID NO: 1555182 - DNA, 15 bp, Homo sapiens
ctaagtcctgctttc

SEQ ID NO: 1555183 - DNA, 15 bp, Homo sapiens
gctaagtcctgcttt

SEQ ID NO: 1555184 - DNA, 15 bp, Homo sapiens
agctaagtcctgctt

SEQ ID NO: 1555185 - DNA, 15 bp, Homo sapiens
gagctaagtcctgct

SEQ ID NO: 1555186 - DNA, 15 bp, Homo sapiens
ggagctaagtcctgc

SEQ ID NO: 1555187 - DNA, 15 bp, Homo sapiens
aggagctaagtcctg

SEQ ID NO: 1555188 - DNA, 15 bp, Homo sapiens
caggagctaagtcct

SEQ ID NO: 1555189 - DNA, 15 bp, Homo sapiens
ccaggagctaagtcc

SEQ ID NO: 1555190 - DNA, 15 bp, Homo sapiens
accaggagctaagtc

SEQ ID NO: 1555191 - DNA, 15 bp, Homo sapiens
caccaggagctaagt

SEQ ID NO: 1555192 - DNA, 15 bp, Homo sapiens
ccaccaggagctaag

SEQ ID NO: 1555193 - DNA, 15 bp, Homo sapiens
accaccaggagctaa

SEQ ID NO: 1555194 - DNA, 15 bp, Homo sapiens
taccaccaggagcta

SEQ ID NO: 1555195 - DNA, 15 bp, Homo sapiens
ctaccaccaggagct

SEQ ID NO: 1555196 - DNA, 15 bp, Homo sapiens
actaccaccaggagc

SEQ ID NO: 1555197 - DNA, 15 bp, Homo sapiens
cactaccaccaggag

SEQ ID NO: 1555198 - DNA, 15 bp, Homo sapiens
acactaccaccagga

SEQ ID NO: 1555199 - DNA, 15 bp, Homo sapiens
cacactaccaccagg

SEQ ID NO: 1555200 - DNA, 15 bp, Homo sapiens
gcacactaccaccag

SEQ ID NO: 1555201 - DNA, 15 bp, Homo sapiens
tgcacactaccacca

SEQ ID NO: 1555202 - DNA, 15 bp, Homo sapiens
gtgcacactaccacc

SEQ ID NO: 1555203 - DNA, 15 bp, Homo sapiens
tgtgcacactaccac

SEQ ID NO: 1555204 - DNA, 15 bp, Homo sapiens
ctgtgcacactacca

SEQ ID NO: 1555205 - DNA, 15 bp, Homo sapiens
actgtgcacactacc

SEQ ID NO: 1555206 - DNA, 15 bp, Homo sapiens
cactgtgcacactac

SEQ ID NO: 1555207 - DNA, 15 bp, Homo sapiens
ccactgtgcacacta

SEQ ID NO: 1555208 - DNA, 15 bp, Homo sapiens
tccactgtgcacact

SEQ ID NO: 1555209 - DNA, 15 bp, Homo sapiens
atccactgtgcacac

SEQ ID NO: 1555210 - DNA, 15 bp, Homo sapiens
aatccactgtgcaca

SEQ ID NO: 1555211 - DNA, 15 bp, Homo sapiens
caatccactgtgcac

SEQ ID NO: 1555212 - DNA, 15 bp, Homo sapiens
ccaatccactgtgca

SEQ ID NO: 1555213 - DNA, 15 bp, Homo sapiens
tccaatccactgtgc

SEQ ID NO: 1555214 - DNA, 15 bp, Homo sapiens
ctccaatccactgtg

SEQ ID NO: 1555215 - DNA, 15 bp, Homo sapiens
actccaatccactgt

SEQ ID NO: 1555216 - DNA, 15 bp, Homo sapiens
tactccaatccactg

SEQ ID NO: 1555217 - DNA, 15 bp, Homo sapiens
ctactccaatccact

SEQ ID NO: 1555218 - DNA, 15 bp, Homo sapiens
cctactccaatccac

SEQ ID NO: 1555219 - DNA, 15 bp, Homo sapiens
ccctactccaatcca

SEQ ID NO: 1555220 - DNA, 15 bp, Homo sapiens
tccctactccaatcc

SEQ ID NO: 1555221 - DNA, 15 bp, Homo sapiens
ctccctactccaatc

SEQ ID NO: 1555222 - DNA, 15 bp, Homo sapiens
tctccctactccaat

SEQ ID NO: 1555223 - DNA, 15 bp, Homo sapiens
ttctccctactccaa

SEQ ID NO: 1555224 - DNA, 15 bp, Homo sapiens
tttctccctactcca

SEQ ID NO: 1555225 - DNA, 15 bp, Homo sapiens
gtttctccctactcc

SEQ ID NO: 1555226 - DNA, 15 bp, Homo sapiens
agtttctccctactc

SEQ ID NO: 1555227 - DNA, 15 bp, Homo sapiens
cagtttctccctact

SEQ ID NO: 1555228 - DNA, 15 bp, Homo sapiens
tcagtttctccctac

SEQ ID NO: 1555229 - DNA, 15 bp, Homo sapiens
ttcagtttctcccta

SEQ ID NO: 1555230 - DNA, 15 bp, Homo sapiens
cttcagtttctccct

SEQ ID NO: 1555231 - DNA, 15 bp, Homo sapiens
acttcagtttctccc

SEQ ID NO: 1555232 - DNA, 15 bp, Homo sapiens
tacttcagtttctcc

SEQ ID NO: 1555233 - DNA, 15 bp, Homo sapiens
ttacttcagtttctc

SEQ ID NO: 1555234 - DNA, 15 bp, Homo sapiens
tttacttcagtttct

SEQ ID NO: 1555235 - DNA, 15 bp, Homo sapiens
ttttacttcagtttc

SEQ ID NO: 1555236 - DNA, 15 bp, Homo sapiens
tttttacttcagttt

SEQ ID NO: 1555237 - DNA, 15 bp, Homo sapiens
ctttttacttcagtt

SEQ ID NO: 1555238 - DNA, 15 bp, Homo sapiens
tctttttacttcagt

SEQ ID NO: 1555239 - DNA, 15 bp, Homo sapiens
ttctttttacttcag

SEQ ID NO: 1555240 - DNA, 15 bp, Homo sapiens
attctttttacttca

SEQ ID NO: 1555241 - DNA, 15 bp, Homo sapiens
gattctttttacttc

SEQ ID NO: 1555242 - DNA, 15 bp, Homo sapiens
ggattctttttactt

SEQ ID NO: 1555243 - DNA, 15 bp, Homo sapiens
tggattctttttact

SEQ ID NO: 1555244 - DNA, 15 bp, Homo sapiens
gtggattctttttac

SEQ ID NO: 1555245 - DNA, 15 bp, Homo sapiens
ggtggattcttttta

SEQ ID NO: 1555246 - DNA, 15 bp, Homo sapiens
aggtggattcttttt

SEQ ID NO: 1555247 - DNA, 15 bp, Homo sapiens
aaggtggattctttt

SEQ ID NO: 1555248 - DNA, 15 bp, Homo sapiens
aaaggtggattcttt

SEQ ID NO: 1555249 - DNA, 15 bp, Homo sapiens
taaaggtggattctt

SEQ ID NO: 1555250 - DNA, 15 bp, Homo sapiens
ataaaggtggattct

SEQ ID NO: 1555251 - DNA, 15 bp, Homo sapiens
tataaaggtggattc

SEQ ID NO: 1555252 - DNA, 15 bp, Homo sapiens
ttataaaggtggatt

SEQ ID NO: 1555253 - DNA, 15 bp, Homo sapiens
attataaaggtggat

SEQ ID NO: 1555254 - DNA, 15 bp, Homo sapiens
tattataaaggtgga

SEQ ID NO: 1555255 - DNA, 15 bp, Homo sapiens
ttattataaaggtgg

SEQ ID NO: 1555256 - DNA, 15 bp, Homo sapiens
tttattataaaggtg

SEQ ID NO: 1555257 - DNA, 15 bp, Homo sapiens
ctttattataaaggt

SEQ ID NO: 1555258 - DNA, 15 bp, Homo sapiens
tctttattataaagg

SEQ ID NO: 1555259 - DNA, 15 bp, Homo sapiens
ttctttattataaag

SEQ ID NO: 1555260 - DNA, 15 bp, Homo sapiens
cttctttattataaa

SEQ ID NO: 1555261 - DNA, 15 bp, Homo sapiens
ccttctttattataa

SEQ ID NO: 1555262 - DNA, 15 bp, Homo sapiens
accttctttattata

SEQ ID NO: 1555263 - DNA, 15 bp, Homo sapiens
aaccttctttattat

SEQ ID NO: 1555264 - DNA, 15 bp, Homo sapiens
caaccttctttatta

SEQ ID NO: 1555265 - DNA, 15 bp, Homo sapiens
ccaaccttctttatt

SEQ ID NO: 1555266 - DNA, 15 bp, Homo sapiens
gccaaccttctttat

SEQ ID NO: 1555267 - DNA, 15 bp, Homo sapiens
tgccaaccttcttta

SEQ ID NO: 1555268 - DNA, 15 bp, Homo sapiens
atgccaaccttcttt

SEQ ID NO: 1555269 - DNA, 15 bp, Homo sapiens
catgccaaccttctt

SEQ ID NO: 1555270 - DNA, 15 bp, Homo sapiens
acatgccaaccttct

SEQ ID NO: 1555271 - DNA, 15 bp, Homo sapiens
cacatgccaaccttc

SEQ ID NO: 1555272 - DNA, 15 bp, Homo sapiens
ccacatgccaacctt

SEQ ID NO: 1555273 - DNA, 15 bp, Homo sapiens
accacatgccaacct

SEQ ID NO: 1555274 - DNA, 15 bp, Homo sapiens
taccacatgccaacc

SEQ ID NO: 1555275 - DNA, 15 bp, Homo sapiens
ttaccacatgccaac

SEQ ID NO: 1555276 - DNA, 15 bp, Homo sapiens
attaccacatgccaa

SEQ ID NO: 1555277 - DNA, 15 bp, Homo sapiens
cattaccacatgcca

SEQ ID NO: 1555278 - DNA, 15 bp, Homo sapiens
acattaccacatgcc

SEQ ID NO: 1555279 - DNA, 15 bp, Homo sapiens
gacattaccacatgc

SEQ ID NO: 1555280 - DNA, 15 bp, Homo sapiens
tgacattaccacatg

SEQ ID NO: 1555281 - DNA, 15 bp, Homo sapiens
atgacattaccacat

SEQ ID NO: 1555282 - DNA, 15 bp, Homo sapiens
aatgacattaccaca

SEQ ID NO: 1555283 - DNA, 15 bp, Homo sapiens
taatgacattaccac

SEQ ID NO: 1555284 - DNA, 15 bp, Homo sapiens
ctaatgacattacca

SEQ ID NO: 1555285 - DNA, 15 bp, Homo sapiens
gctaatgacattacc

SEQ ID NO: 1555286 - DNA, 15 bp, Homo sapiens
tgctaatgacattac

SEQ ID NO: 1555287 - DNA, 15 bp, Homo sapiens
ttgctaatgacatta

SEQ ID NO: 1555288 - DNA, 15 bp, Homo sapiens
attgctaatgacatt

SEQ ID NO: 1555289 - DNA, 15 bp, Homo sapiens
tattgctaatgacat

SEQ ID NO: 1555290 - DNA, 15 bp, Homo sapiens
ttattgctaatgaca

SEQ ID NO: 1555291 - DNA, 15 bp, Homo sapiens
cttattgctaatgac

SEQ ID NO: 1555292 - DNA, 15 bp, Homo sapiens
tcttattgctaatga

SEQ ID NO: 1555293 - DNA, 15 bp, Homo sapiens
ttcttattgctaatg

SEQ ID NO: 1555294 - DNA, 15 bp, Homo sapiens
tttcttattgctaat

SEQ ID NO: 1555295 - DNA, 15 bp, Homo sapiens
ctttcttattgctaa

SEQ ID NO: 1555296 - DNA, 15 bp, Homo sapiens
tctttcttattgcta

SEQ ID NO: 1555297 - DNA, 15 bp, Homo sapiens
ttctttcttattgct

SEQ ID NO: 1555298 - DNA, 15 bp, Homo sapiens
tttctttcttattgc

SEQ ID NO: 1555299 - DNA, 15 bp, Homo sapiens
atttctttcttattg

SEQ ID NO: 1555300 - DNA, 15 bp, Homo sapiens
catttctttcttatt

SEQ ID NO: 1555301 - DNA, 15 bp, Homo sapiens
tcatttctttcttat

SEQ ID NO: 1555302 - DNA, 15 bp, Homo sapiens
gtcatttctttctta

SEQ ID NO: 1555303 - DNA, 15 bp, Homo sapiens
tgtcatttctttctt

SEQ ID NO: 1555304 - DNA, 15 bp, Homo sapiens
ttgtcatttctttct

SEQ ID NO: 1555305 - DNA, 15 bp, Homo sapiens
tttgtcatttctttc

SEQ ID NO: 1555306 - DNA, 15 bp, Homo sapiens
ttttgtcatttcttt

SEQ ID NO: 1555307 - DNA, 15 bp, Homo sapiens
cttttgtcatttctt

SEQ ID NO: 1555308 - DNA, 15 bp, Homo sapiens
tcttttgtcatttct

SEQ ID NO: 1555309 - DNA, 15 bp, Homo sapiens
atcttttgtcatttc

SEQ ID NO: 1555310 - DNA, 15 bp, Homo sapiens
tatcttttgtcattt

SEQ ID NO: 1555311 - DNA, 15 bp, Homo sapiens
gtatcttttgtcatt

SEQ ID NO: 1555312 - DNA, 15 bp, Homo sapiens
tgtatcttttgtcat

SEQ ID NO: 1555313 - DNA, 15 bp, Homo sapiens
ttgtatcttttgtca

SEQ ID NO: 1555314 - DNA, 15 bp, Homo sapiens
tttgtatcttttgtc

SEQ ID NO: 1555315 - DNA, 15 bp, Homo sapiens
ttttgtatcttttgt

SEQ ID NO: 1555316 - DNA, 15 bp, Homo sapiens
cttttgtatcttttg

SEQ ID NO: 1555317 - DNA, 15 bp, Homo sapiens
tcttttgtatctttt

SEQ ID NO: 1555318 - DNA, 15 bp, Homo sapiens
ctcttttgtatcttt

SEQ ID NO: 1555319 - DNA, 15 bp, Homo sapiens
tctcttttgtatctt

SEQ ID NO: 1555320 - DNA, 15 bp, Homo sapiens
gtctcttttgtatct

SEQ ID NO: 1555321 - DNA, 15 bp, Homo sapiens
agtctcttttgtatc

SEQ ID NO: 1555322 - DNA, 15 bp, Homo sapiens
tagtctcttttgtat

SEQ ID NO: 1555323 - DNA, 15 bp, Homo sapiens
gtagtctcttttgta

SEQ ID NO: 1555324 - DNA, 15 bp, Homo sapiens
agtagtctcttttgt

SEQ ID NO: 1555325 - DNA, 15 bp, Homo sapiens
gagtagtctcttttg

SEQ ID NO: 1555326 - DNA, 15 bp, Homo sapiens
agagtagtctctttt

SEQ ID NO: 1555327 - DNA, 15 bp, Homo sapiens
tagagtagtctcttt

SEQ ID NO: 1555328 - DNA, 15 bp, Homo sapiens
ctagagtagtctctt

SEQ ID NO: 1555329 - DNA, 15 bp, Homo sapiens
tctagagtagtctct

SEQ ID NO: 1555330 - DNA, 15 bp, Homo sapiens
ttctagagtagtctc

SEQ ID NO: 1555331 - DNA, 15 bp, Homo sapiens
cttctagagtagtct

SEQ ID NO: 1555332 - DNA, 15 bp, Homo sapiens
tcttctagagtagtc

SEQ ID NO: 1555333 - DNA, 15 bp, Homo sapiens
ttcttctagagtagt

SEQ ID NO: 1555334 - DNA, 15 bp, Homo sapiens
attcttctagagtag

SEQ ID NO: 1555335 - DNA, 15 bp, Homo sapiens
gattcttctagagta

SEQ ID NO: 1555336 - DNA, 15 bp, Homo sapiens
tgattcttctagagt

SEQ ID NO: 1555337 - DNA, 15 bp, Homo sapiens
ttgattcttctagag

SEQ ID NO: 1555338 - DNA, 15 bp, Homo sapiens
gttgattcttctaga

SEQ ID NO: 1555339 - DNA, 15 bp, Homo sapiens
tgttgattcttctag

SEQ ID NO: 1555340 - DNA, 15 bp, Homo sapiens
ttgttgattcttcta

SEQ ID NO: 1555341 - DNA, 15 bp, Homo sapiens
tttgttgattcttct

SEQ ID NO: 1555342 - DNA, 15 bp, Homo sapiens
gtttgttgattcttc

SEQ ID NO: 1555343 - DNA, 15 bp, Homo sapiens
ggtttgttgattctt

SEQ ID NO: 1555344 - DNA, 15 bp, Homo sapiens
aggtttgttgattct

SEQ ID NO: 1555345 - DNA, 15 bp, Homo sapiens
aaggtttgttgattc

SEQ ID NO: 1555346 - DNA, 15 bp, Homo sapiens
caaggtttgttgatt

SEQ ID NO: 1555347 - DNA, 15 bp, Homo sapiens
ccaaggtttgttgat

SEQ ID NO: 1555348 - DNA, 15 bp, Homo sapiens
accaaggtttgttga

SEQ ID NO: 1555349 - DNA, 15 bp, Homo sapiens
caccaaggtttgttg

SEQ ID NO: 1555350 - DNA, 15 bp, Homo sapiens
tcaccaaggtttgtt

SEQ ID NO: 1555351 - DNA, 15 bp, Homo sapiens
gtcaccaaggtttgt

SEQ ID NO: 1555352 - DNA, 15 bp, Homo sapiens
agtcaccaaggtttg

SEQ ID NO: 1555353 - DNA, 15 bp, Homo sapiens
cagtcaccaaggttt

SEQ ID NO: 1555354 - DNA, 15 bp, Homo sapiens
ccagtcaccaaggtt

SEQ ID NO: 1555355 - DNA, 15 bp, Homo sapiens
tccagtcaccaaggt

SEQ ID NO: 1555356 - DNA, 15 bp, Homo sapiens
atccagtcaccaagg

SEQ ID NO: 1555357 - DNA, 15 bp, Homo sapiens
aatccagtcaccaag

SEQ ID NO: 1555358 - DNA, 15 bp, Homo sapiens
aaatccagtcaccaa

SEQ ID NO: 1555359 - DNA, 15 bp, Homo sapiens
taaatccagtcacca

SEQ ID NO: 1555360 - DNA, 15 bp, Homo sapiens
ctaaatccagtcacc

SEQ ID NO: 1555361 - DNA, 15 bp, Homo sapiens
tctaaatccagtcac

SEQ ID NO: 1555362 - DNA, 15 bp, Homo sapiens
ttctaaatccagtca

SEQ ID NO: 1555363 - DNA, 15 bp, Homo sapiens
tttctaaatccagtc

SEQ ID NO: 1555364 - DNA, 15 bp, Homo sapiens
atttctaaatccagt

SEQ ID NO: 1555365 - DNA, 15 bp, Homo sapiens
gatttctaaatccag

SEQ ID NO: 1555366 - DNA, 15 bp, Homo sapiens
tgatttctaaatcca

SEQ ID NO: 1555367 - DNA, 15 bp, Homo sapiens
ttgatttctaaatcc

SEQ ID NO: 1555368 - DNA, 15 bp, Homo sapiens
tttgatttctaaatc

SEQ ID NO: 1555369 - DNA, 15 bp, Homo sapiens
ctttgatttctaaat

SEQ ID NO: 1555370 - DNA, 15 bp, Homo sapiens
tctttgatttctaaa

SEQ ID NO: 1555371 - DNA, 15 bp, Homo sapiens
ttctttgatttctaa

SEQ ID NO: 1555372 - DNA, 15 bp, Homo sapiens
gttctttgatttcta

SEQ ID NO: 1555373 - DNA, 15 bp, Homo sapiens
tgttctttgatttct

SEQ ID NO: 1555374 - DNA, 15 bp, Homo sapiens
ctgttctttgatttc

SEQ ID NO: 1555375 - DNA, 15 bp, Homo sapiens
cctgttctttgattt

SEQ ID NO: 1555376 - DNA, 15 bp, Homo sapiens
ccctgttctttgatt

SEQ ID NO: 1555377 - DNA, 15 bp, Homo sapiens
tccctgttctttgat

SEQ ID NO: 1555378 - DNA, 15 bp, Homo sapiens
ctccctgttctttga

SEQ ID NO: 1555379 - DNA, 15 bp, Homo sapiens
tctccctgttctttg

SEQ ID NO: 1555380 - DNA, 15 bp, Homo sapiens
ttctccctgttcttt

SEQ ID NO: 1555381 - DNA, 15 bp, Homo sapiens
cttctccctgttctt

SEQ ID NO: 1555382 - DNA, 15 bp, Homo sapiens
acttctccctgttct

SEQ ID NO: 1555383 - DNA, 15 bp, Homo sapiens
gacttctccctgttc

SEQ ID NO: 1555384 - DNA, 15 bp, Homo sapiens
tgacttctccctgtt

SEQ ID NO: 1555385 - DNA, 15 bp, Homo sapiens
ttgacttctccctgt

SEQ ID NO: 1555386 - DNA, 15 bp, Homo sapiens
tttgacttctccctg

SEQ ID NO: 1555387 - DNA, 15 bp, Homo sapiens
ctttgacttctccct

SEQ ID NO: 1555388 - DNA, 15 bp, Homo sapiens
cctttgacttctccc

SEQ ID NO: 1555389 - DNA, 15 bp, Homo sapiens
tcctttgacttctcc

SEQ ID NO: 1555390 - DNA, 15 bp, Homo sapiens
ctcctttgacttctc

SEQ ID NO: 1555391 - DNA, 15 bp, Homo sapiens
cctcctttgacttct

SEQ ID NO: 1555392 - DNA, 15 bp, Homo sapiens
acctcctttgacttc

SEQ ID NO: 1555393 - DNA, 15 bp, Homo sapiens
cacctcctttgactt

SEQ ID NO: 1555394 - DNA, 15 bp, Homo sapiens
gcacctcctttgact

SEQ ID NO: 1555395 - DNA, 15 bp, Homo sapiens
agcacctcctttgac

SEQ ID NO: 1555396 - DNA, 15 bp, Homo sapiens
tagcacctcctttga

SEQ ID NO: 1555397 - DNA, 15 bp, Homo sapiens
ttagcacctcctttg

SEQ ID NO: 1555398 - DNA, 15 bp, Homo sapiens
cttagcacctccttt

SEQ ID NO: 1555399 - DNA, 15 bp, Homo sapiens
acttagcacctcctt

SEQ ID NO: 1555400 - DNA, 15 bp, Homo sapiens
tacttagcacctcct

SEQ ID NO: 1555401 - DNA, 15 bp, Homo sapiens
ttacttagcacctcc

SEQ ID NO: 1555402 - DNA, 15 bp, Homo sapiens
gttacttagcacctc

SEQ ID NO: 1555403 - DNA, 15 bp, Homo sapiens
cgttacttagcacct

SEQ ID NO: 1555404 - DNA, 15 bp, Homo sapiens
acgttacttagcacc

SEQ ID NO: 1555405 - DNA, 15 bp, Homo sapiens
aacgttacttagcac

SEQ ID NO: 1555406 - DNA, 15 bp, Homo sapiens
gaacgttacttagca

SEQ ID NO: 1555407 - DNA, 15 bp, Homo sapiens
agaacgttacttagc

SEQ ID NO: 1555408 - DNA, 15 bp, Homo sapiens
gagaacgttacttag

SEQ ID NO: 1555409 - DNA, 15 bp, Homo sapiens
tgagaacgttactta

SEQ ID NO: 1555410 - DNA, 15 bp, Homo sapiens
ctgagaacgttactt

SEQ ID NO: 1555411 - DNA, 15 bp, Homo sapiens
actgagaacgttact

SEQ ID NO: 1555412 - DNA, 15 bp, Homo sapiens
gactgagaacgttac

SEQ ID NO: 1555413 - DNA, 15 bp, Homo sapiens
ggactgagaacgtta

SEQ ID NO: 1555414 - DNA, 15 bp, Homo sapiens
tggactgagaacgtt

SEQ ID NO: 1555415 - DNA, 15 bp, Homo sapiens
ctggactgagaacgt

SEQ ID NO: 1555416 - DNA, 15 bp, Homo sapiens
gctggactgagaacg

SEQ ID NO: 1555417 - DNA, 15 bp, Homo sapiens
agctggactgagaac

SEQ ID NO: 1555418 - DNA, 15 bp, Homo sapiens
tagctggactgagaa

SEQ ID NO: 1555419 - DNA, 15 bp, Homo sapiens
ttagctggactgaga

SEQ ID NO: 1555420 - DNA, 15 bp, Homo sapiens
gttagctggactgag

SEQ ID NO: 1555421 - DNA, 15 bp, Homo sapiens
tgttagctggactga

SEQ ID NO: 1555422 - DNA, 15 bp, Homo sapiens
ctgttagctggactg

SEQ ID NO: 1555423 - DNA, 15 bp, Homo sapiens
actgttagctggact

SEQ ID NO: 1555424 - DNA, 15 bp, Homo sapiens
cactgttagctggac

SEQ ID NO: 1555425 - DNA, 15 bp, Homo sapiens
acactgttagctgga

SEQ ID NO: 1555426 - DNA, 15 bp, Homo sapiens
gacactgttagctgg

SEQ ID NO: 1555427 - DNA, 15 bp, Homo sapiens
agacactgttagctg

SEQ ID NO: 1555428 - DNA, 15 bp, Homo sapiens
aagacactgttagct

SEQ ID NO: 1555429 - DNA, 15 bp, Homo sapiens
aaagacactgttagc

SEQ ID NO: 1555430 - DNA, 15 bp, Homo sapiens
taaagacactgttag

SEQ ID NO: 1555431 - DNA, 15 bp, Homo sapiens
ctaaagacactgtta

SEQ ID NO: 1555432 - DNA, 15 bp, Homo sapiens
actaaagacactgtt

SEQ ID NO: 1555433 - DNA, 15 bp, Homo sapiens
aactaaagacactgt

SEQ ID NO: 1555434 - DNA, 15 bp, Homo sapiens
taactaaagacactg

SEQ ID NO: 1555435 - DNA, 15 bp, Homo sapiens
ataactaaagacact

SEQ ID NO: 1555436 - DNA, 15 bp, Homo sapiens
tataactaaagacac

SEQ ID NO: 1555437 - DNA, 15 bp, Homo sapiens
gtataactaaagaca

SEQ ID NO: 1555438 - DNA, 15 bp, Homo sapiens
tgtataactaaagac

SEQ ID NO: 1555439 - DNA, 15 bp, Homo sapiens
atgtataactaaaga

SEQ ID NO: 1555440 - DNA, 15 bp, Homo sapiens
tatgtataactaaag

SEQ ID NO: 1555441 - DNA, 15 bp, Homo sapiens
atatgtataactaaa

SEQ ID NO: 1555442 - DNA, 15 bp, Homo sapiens
catatgtataactaa

SEQ ID NO: 1555443 - DNA, 15 bp, Homo sapiens
ccatatgtataacta

SEQ ID NO: 1555444 - DNA, 15 bp, Homo sapiens
tccatatgtataact

SEQ ID NO: 1555445 - DNA, 15 bp, Homo sapiens
ttccatatgtataac

SEQ ID NO: 1555446 - DNA, 15 bp, Homo sapiens
tttccatatgtataa

SEQ ID NO: 1555447 - DNA, 15 bp, Homo sapiens
ttttccatatgtata

SEQ ID NO: 1555448 - DNA, 15 bp, Homo sapiens
cttttccatatgtat

SEQ ID NO: 1555449 - DNA, 15 bp, Homo sapiens
acttttccatatgta

SEQ ID NO: 1555450 - DNA, 15 bp, Homo sapiens
cacttttccatatgt

SEQ ID NO: 1555451 - DNA, 15 bp, Homo sapiens
tcacttttccatatg

SEQ ID NO: 1555452 - DNA, 15 bp, Homo sapiens
ttcacttttccatat

SEQ ID NO: 1555453 - DNA, 15 bp, Homo sapiens
cttcacttttccata

SEQ ID NO: 1555454 - DNA, 15 bp, Homo sapiens
tcttcacttttccat

SEQ ID NO: 1555455 - DNA, 15 bp, Homo sapiens
ctcttcacttttcca

SEQ ID NO: 1555456 - DNA, 15 bp, Homo sapiens
gctcttcacttttcc

SEQ ID NO: 1555457 - DNA, 15 bp, Homo sapiens
agctcttcacttttc

SEQ ID NO: 1555458 - DNA, 15 bp, Homo sapiens
aagctcttcactttt

SEQ ID NO: 1555459 - DNA, 15 bp, Homo sapiens
taagctcttcacttt

SEQ ID NO: 1555460 - DNA, 15 bp, Homo sapiens
gtaagctcttcactt

SEQ ID NO: 1555461 - DNA, 15 bp, Homo sapiens
agtaagctcttcact

SEQ ID NO: 1555462 - DNA, 15 bp, Homo sapiens
gagtaagctcttcac

SEQ ID NO: 1555463 - DNA, 15 bp, Homo sapiens
tgagtaagctcttca

SEQ ID NO: 1555464 - DNA, 15 bp, Homo sapiens
atgagtaagctcttc

SEQ ID NO: 1555465 - DNA, 15 bp, Homo sapiens
tatgagtaagctctt

SEQ ID NO: 1555466 - DNA, 15 bp, Homo sapiens
atatgagtaagctct

SEQ ID NO: 1555467 - DNA, 15 bp, Homo sapiens
gatatgagtaagctc

SEQ ID NO: 1555468 - DNA, 15 bp, Homo sapiens
agatatgagtaagct

SEQ ID NO: 1555469 - DNA, 15 bp, Homo sapiens
aagatatgagtaagc

SEQ ID NO: 1555470 - DNA, 15 bp, Homo sapiens
aaagatatgagtaag

SEQ ID NO: 1555471 - DNA, 15 bp, Homo sapiens
taaagatatgagtaa

SEQ ID NO: 1555472 - DNA, 15 bp, Homo sapiens
ataaagatatgagta

SEQ ID NO: 1555473 - DNA, 15 bp, Homo sapiens
gataaagatatgagt

SEQ ID NO: 1555474 - DNA, 15 bp, Homo sapiens
agataaagatatgag

SEQ ID NO: 1555475 - DNA, 15 bp, Homo sapiens
aagataaagatatga

SEQ ID NO: 1555476 - DNA, 15 bp, Homo sapiens
gaagataaagatatg

SEQ ID NO: 1555477 - DNA, 15 bp, Homo sapiens
ggaagataaagatat

SEQ ID NO: 1555478 - DNA, 15 bp, Homo sapiens
gggaagataaagata

SEQ ID NO: 1555479 - DNA, 15 bp, Homo sapiens
ggggaagataaagat

SEQ ID NO: 1555480 - DNA, 15 bp, Homo sapiens
tggggaagataaaga

SEQ ID NO: 1555481 - DNA, 15 bp, Homo sapiens
ttggggaagataaag

SEQ ID NO: 1555482 - DNA, 15 bp, Homo sapiens
tttggggaagataaa

SEQ ID NO: 1555483 - DNA, 15 bp, Homo sapiens
ttttggggaagataa

SEQ ID NO: 1555484 - DNA, 15 bp, Homo sapiens
cttttggggaagata

SEQ ID NO: 1555485 - DNA, 15 bp, Homo sapiens
tcttttggggaagat

SEQ ID NO: 1555486 - DNA, 15 bp, Homo sapiens
ctcttttggggaaga

SEQ ID NO: 1555487 - DNA, 15 bp, Homo sapiens
tctcttttggggaag

SEQ ID NO: 1555488 - DNA, 15 bp, Homo sapiens
ttctcttttggggaa

SEQ ID NO: 1555489 - DNA, 15 bp, Homo sapiens
tttctcttttgggga

SEQ ID NO: 1555490 - DNA, 15 bp, Homo sapiens
ttttctcttttgggg

SEQ ID NO: 1555491 - DNA, 15 bp, Homo sapiens
gttttctcttttggg

SEQ ID NO: 1555492 - DNA, 15 bp, Homo sapiens
tgttttctcttttgg

SEQ ID NO: 1555493 - DNA, 15 bp, Homo sapiens
atgttttctcttttg

SEQ ID NO: 1555494 - DNA, 15 bp, Homo sapiens
catgttttctctttt

SEQ ID NO: 1555495 - DNA, 15 bp, Homo sapiens
ccatgttttctcttt

SEQ ID NO: 1555496 - DNA, 15 bp, Homo sapiens
cccatgttttctctt

SEQ ID NO: 1555497 - DNA, 15 bp, Homo sapiens
acccatgttttctct

SEQ ID NO: 1555498 - DNA, 15 bp, Homo sapiens
tacccatgttttctc

SEQ ID NO: 1555499 - DNA, 15 bp, Homo sapiens
ttacccatgttttct

SEQ ID NO: 1555500 - DNA, 15 bp, Homo sapiens
attacccatgttttc

SEQ ID NO: 1555501 - DNA, 15 bp, Homo sapiens
aattacccatgtttt

SEQ ID NO: 1555502 - DNA, 15 bp, Homo sapiens
aaattacccatgttt

SEQ ID NO: 1555503 - DNA, 15 bp, Homo sapiens
taaattacccatgtt

SEQ ID NO: 1555504 - DNA, 15 bp, Homo sapiens
ctaaattacccatgt

SEQ ID NO: 1555505 - DNA, 15 bp, Homo sapiens
cctaaattacccatg

SEQ ID NO: 1555506 - DNA, 15 bp, Homo sapiens
tcctaaattacccat

SEQ ID NO: 1555507 - DNA, 15 bp, Homo sapiens
ttcctaaattaccca

SEQ ID NO: 1555508 - DNA, 15 bp, Homo sapiens
cttcctaaattaccc

SEQ ID NO: 1555509 - DNA, 15 bp, Homo sapiens
tcttcctaaattacc

SEQ ID NO: 1555510 - DNA, 15 bp, Homo sapiens
atcttcctaaattac

SEQ ID NO: 1555511 - DNA, 15 bp, Homo sapiens
tatcttcctaaatta

SEQ ID NO: 1555512 - DNA, 15 bp, Homo sapiens
ttatcttcctaaatt

SEQ ID NO: 1555513 - DNA, 15 bp, Homo sapiens
cttatcttcctaaat

SEQ ID NO: 1555514 - DNA, 15 bp, Homo sapiens
gcttatcttcctaaa

SEQ ID NO: 1555515 - DNA, 15 bp, Homo sapiens
agcttatcttcctaa

SEQ ID NO: 1555516 - DNA, 15 bp, Homo sapiens
cagcttatcttccta

SEQ ID NO: 1555517 - DNA, 15 bp, Homo sapiens
gcagcttatcttcct

SEQ ID NO: 1555518 - DNA, 15 bp, Homo sapiens
agcagcttatcttcc

SEQ ID NO: 1555519 - DNA, 15 bp, Homo sapiens
aagcagcttatcttc

SEQ ID NO: 1555520 - DNA, 15 bp, Homo sapiens
aaagcagcttatctt

SEQ ID NO: 1555521 - DNA, 15 bp, Homo sapiens
taaagcagcttatct

SEQ ID NO: 1555522 - DNA, 15 bp, Homo sapiens
ataaagcagcttatc

SEQ ID NO: 1555523 - DNA, 15 bp, Homo sapiens
aataaagcagcttat

SEQ ID NO: 1555524 - DNA, 15 bp, Homo sapiens
aaataaagcagctta

SEQ ID NO: 1555525 - DNA, 15 bp, Homo sapiens
aaaataaagcagctt

SEQ ID NO: 1555526 - DNA, 15 bp, Homo sapiens
aaaaataaagcagct

SEQ ID NO: 1555527 - DNA, 15 bp, Homo sapiens
taaaaataaagcagc

SEQ ID NO: 1555528 - DNA, 15 bp, Homo sapiens
ttaaaaataaagcag

SEQ ID NO: 1555529 - DNA, 15 bp, Homo sapiens
gttaaaaataaagca

SEQ ID NO: 1555530 - DNA, 15 bp, Homo sapiens
agttaaaaataaagc

SEQ ID NO: 1555531 - DNA, 15 bp, Homo sapiens
cagttaaaaataaag

SEQ ID NO: 1555532 - DNA, 15 bp, Homo sapiens
gcagttaaaaataaa

SEQ ID NO: 1555533 - DNA, 15 bp, Homo sapiens
tgcagttaaaaataa

SEQ ID NO: 1555534 - DNA, 15 bp, Homo sapiens
ctgcagttaaaaata

SEQ ID NO: 1555535 - DNA, 15 bp, Homo sapiens
actgcagttaaaaat

SEQ ID NO: 1555536 - DNA, 15 bp, Homo sapiens
cactgcagttaaaaa

SEQ ID NO: 1555537 - DNA, 15 bp, Homo sapiens
acactgcagttaaaa

SEQ ID NO: 1555538 - DNA, 15 bp, Homo sapiens
cacactgcagttaaa

SEQ ID NO: 1555539 - DNA, 15 bp, Homo sapiens
acacactgcagttaa

SEQ ID NO: 1555540 - DNA, 15 bp, Homo sapiens
aacacactgcagtta

SEQ ID NO: 1555541 - DNA, 15 bp, Homo sapiens
aaacacactgcagtt

SEQ ID NO: 1555542 - DNA, 15 bp, Homo sapiens
aaaacacactgcagt

SEQ ID NO: 1555543 - DNA, 15 bp, Homo sapiens
caaaacacactgcag

SEQ ID NO: 1555544 - DNA, 15 bp, Homo sapiens
tcaaaacacactgca

SEQ ID NO: 1555545 - DNA, 15 bp, Homo sapiens
ttcaaaacacactgc

SEQ ID NO: 1555546 - DNA, 15 bp, Homo sapiens
tttcaaaacacactg

SEQ ID NO: 1555547 - DNA, 15 bp, Homo sapiens
ctttcaaaacacact

SEQ ID NO: 1555548 - DNA, 15 bp, Homo sapiens
tctttcaaaacacac

SEQ ID NO: 1555549 - DNA, 15 bp, Homo sapiens
ctctttcaaaacaca

SEQ ID NO: 1555550 - DNA, 15 bp, Homo sapiens
tctctttcaaaacac

SEQ ID NO: 1555551 - DNA, 15 bp, Homo sapiens
gtctctttcaaaaca

SEQ ID NO: 1555552 - DNA, 15 bp, Homo sapiens
agtctctttcaaaac

SEQ ID NO: 1555553 - DNA, 15 bp, Homo sapiens
tagtctctttcaaaa

SEQ ID NO: 1555554 - DNA, 15 bp, Homo sapiens
atagtctctttcaaa

SEQ ID NO: 1555555 - DNA, 15 bp, Homo sapiens
catagtctctttcaa

SEQ ID NO: 1555556 - DNA, 15 bp, Homo sapiens
acatagtctctttca

SEQ ID NO: 1555557 - DNA, 15 bp, Homo sapiens
gacatagtctctttc

SEQ ID NO: 1555558 - DNA, 15 bp, Homo sapiens
tgacatagtctcttt

SEQ ID NO: 1555559 - DNA, 15 bp, Homo sapiens
atgacatagtctctt

SEQ ID NO: 1555560 - DNA, 15 bp, Homo sapiens
catgacatagtctct

SEQ ID NO: 1555561 - DNA, 15 bp, Homo sapiens
tcatgacatagtctc

SEQ ID NO: 1555562 - DNA, 15 bp, Homo sapiens
atcatgacatagtct

SEQ ID NO: 1555563 - DNA, 15 bp, Homo sapiens
aatcatgacatagtc

SEQ ID NO: 1555564 - DNA, 15 bp, Homo sapiens
gaatcatgacatagt

SEQ ID NO: 1555565 - DNA, 15 bp, Homo sapiens
tgaatcatgacatag

SEQ ID NO: 1555566 - DNA, 15 bp, Homo sapiens
atgaatcatgacata

SEQ ID NO: 1555567 - DNA, 15 bp, Homo sapiens
gatgaatcatgacat

SEQ ID NO: 1555568 - DNA, 15 bp, Homo sapiens
agatgaatcatgaca

SEQ ID NO: 1555569 - DNA, 15 bp, Homo sapiens
aagatgaatcatgac

SEQ ID NO: 1555570 - DNA, 15 bp, Homo sapiens
taagatgaatcatga

SEQ ID NO: 1555571 - DNA, 15 bp, Homo sapiens
gtaagatgaatcatg

SEQ ID NO: 1555572 - DNA, 15 bp, Homo sapiens
agtaagatgaatcat

SEQ ID NO: 1555573 - DNA, 15 bp, Homo sapiens
tagtaagatgaatca

SEQ ID NO: 1555574 - DNA, 15 bp, Homo sapiens
ctagtaagatgaatc

SEQ ID NO: 1555575 - DNA, 15 bp, Homo sapiens
gctagtaagatgaat

SEQ ID NO: 1555576 - DNA, 15 bp, Homo sapiens
ggctagtaagatgaa

SEQ ID NO: 1555577 - DNA, 15 bp, Homo sapiens
aggctagtaagatga

SEQ ID NO: 1555578 - DNA, 15 bp, Homo sapiens
gaggctagtaagatg

SEQ ID NO: 1555579 - DNA, 15 bp, Homo sapiens
tgaggctagtaagat

SEQ ID NO: 1555580 - DNA, 15 bp, Homo sapiens
ttgaggctagtaaga

SEQ ID NO: 1555581 - DNA, 15 bp, Homo sapiens
tttgaggctagtaag

SEQ ID NO: 1555582 - DNA, 15 bp, Homo sapiens
gtttgaggctagtaa

SEQ ID NO: 1555583 - DNA, 15 bp, Homo sapiens
tgtttgaggctagta

SEQ ID NO: 1555584 - DNA, 15 bp, Homo sapiens
atgtttgaggctagt

SEQ ID NO: 1555585 - DNA, 15 bp, Homo sapiens
tatgtttgaggctag

SEQ ID NO: 1555586 - DNA, 15 bp, Homo sapiens
atatgtttgaggcta

SEQ ID NO: 1555587 - DNA, 15 bp, Homo sapiens
gatatgtttgaggct

SEQ ID NO: 1555588 - DNA, 15 bp, Homo sapiens
agatatgtttgaggc

SEQ ID NO: 1555589 - DNA, 15 bp, Homo sapiens
aagatatgtttgagg

SEQ ID NO: 1555590 - DNA, 15 bp, Homo sapiens
gaagatatgtttgag

SEQ ID NO: 1555591 - DNA, 15 bp, Homo sapiens
agaagatatgtttga

SEQ ID NO: 1555592 - DNA, 15 bp, Homo sapiens
aagaagatatgtttg

SEQ ID NO: 1555593 - DNA, 15 bp, Homo sapiens
aaagaagatatgttt

SEQ ID NO: 1555594 - DNA, 15 bp, Homo sapiens
caaagaagatatgtt

SEQ ID NO: 1555595 - DNA, 15 bp, Homo sapiens
gcaaagaagatatgt

SEQ ID NO: 1555596 - DNA, 15 bp, Homo sapiens
ggcaaagaagatatg

SEQ ID NO: 1555597 - DNA, 15 bp, Homo sapiens
tggcaaagaagatat

SEQ ID NO: 1555598 - DNA, 15 bp, Homo sapiens
ctggcaaagaagata

SEQ ID NO: 1555599 - DNA, 15 bp, Homo sapiens
cctggcaaagaagat

SEQ ID NO: 1555600 - DNA, 15 bp, Homo sapiens
tcctggcaaagaaga

SEQ ID NO: 1555601 - DNA, 15 bp, Homo sapiens
gtcctggcaaagaag

SEQ ID NO: 1555602 - DNA, 15 bp, Homo sapiens
agtcctggcaaagaa

SEQ ID NO: 1555603 - DNA, 15 bp, Homo sapiens
gagtcctggcaaaga

SEQ ID NO: 1555604 - DNA, 15 bp, Homo sapiens
cgagtcctggcaaag

SEQ ID NO: 1555605 - DNA, 15 bp, Homo sapiens
gcgagtcctggcaaa

SEQ ID NO: 1555606 - DNA, 15 bp, Homo sapiens
ggcgagtcctggcaa

SEQ ID NO: 1555607 - DNA, 15 bp, Homo sapiens
aggcgagtcctggca

SEQ ID NO: 1555608 - DNA, 15 bp, Homo sapiens
gaggcgagtcctggc

SEQ ID NO: 1555609 - DNA, 15 bp, Homo sapiens
agaggcgagtcctgg

SEQ ID NO: 1555610 - DNA, 15 bp, Homo sapiens
cagaggcgagtcctg

SEQ ID NO: 1555611 - DNA, 15 bp, Homo sapiens
gcagaggcgagtcct

SEQ ID NO: 1555612 - DNA, 15 bp, Homo sapiens
tgcagaggcgagtcc

SEQ ID NO: 1555613 - DNA, 15 bp, Homo sapiens
gtgcagaggcgagtc

SEQ ID NO: 1555614 - DNA, 15 bp, Homo sapiens
tgtgcagaggcgagt

SEQ ID NO: 1555615 - DNA, 15 bp, Homo sapiens
ttgtgcagaggcgag

SEQ ID NO: 1555616 - DNA, 15 bp, Homo sapiens
tttgtgcagaggcga

SEQ ID NO: 1555617 - DNA, 15 bp, Homo sapiens
ctttgtgcagaggcg

SEQ ID NO: 1555618 - DNA, 15 bp, Homo sapiens
gctttgtgcagaggc

SEQ ID NO: 1555619 - DNA, 15 bp, Homo sapiens
ggctttgtgcagagg

SEQ ID NO: 1555620 - DNA, 15 bp, Homo sapiens
gggctttgtgcagag

SEQ ID NO: 1555621 - DNA, 15 bp, Homo sapiens
agggctttgtgcaga

SEQ ID NO: 1555622 - DNA, 15 bp, Homo sapiens
gagggctttgtgcag

SEQ ID NO: 1555623 - DNA, 15 bp, Homo sapiens
agagggctttgtgca

SEQ ID NO: 1555624 - DNA, 15 bp, Homo sapiens
aagagggctttgtgc

SEQ ID NO: 1555625 - DNA, 15 bp, Homo sapiens
aaagagggctttgtg

SEQ ID NO: 1555626 - DNA, 15 bp, Homo sapiens
aaaagagggctttgt

SEQ ID NO: 1555627 - DNA, 15 bp, Homo sapiens
caaaagagggctttg

SEQ ID NO: 1555628 - DNA, 15 bp, Homo sapiens
ccaaaagagggcttt

SEQ ID NO: 1555629 - DNA, 15 bp, Homo sapiens
cccaaaagagggctt

SEQ ID NO: 1555630 - DNA, 15 bp, Homo sapiens
acccaaaagagggct

SEQ ID NO: 1555631 - DNA, 15 bp, Homo sapiens
tacccaaaagagggc

SEQ ID NO: 1555632 - DNA, 15 bp, Homo sapiens
ctacccaaaagaggg

SEQ ID NO: 1555633 - DNA, 15 bp, Homo sapiens
gctacccaaaagagg

SEQ ID NO: 1555634 - DNA, 15 bp, Homo sapiens
agctacccaaaagag

SEQ ID NO: 1555635 - DNA, 15 bp, Homo sapiens
cagctacccaaaaga

SEQ ID NO: 1555636 - DNA, 15 bp, Homo sapiens
acagctacccaaaag

SEQ ID NO: 1555637 - DNA, 15 bp, Homo sapiens
cacagctacccaaaa

SEQ ID NO: 1555638 - DNA, 15 bp, Homo sapiens
ccacagctacccaaa

SEQ ID NO: 1555639 - DNA, 15 bp, Homo sapiens
gccacagctacccaa

SEQ ID NO: 1555640 - DNA, 15 bp, Homo sapiens
agccacagctaccca

SEQ ID NO: 1555641 - DNA, 15 bp, Homo sapiens
cagccacagctaccc

SEQ ID NO: 1555642 - DNA, 15 bp, Homo sapiens
acagccacagctacc

SEQ ID NO: 1555643 - DNA, 15 bp, Homo sapiens
cacagccacagctac

SEQ ID NO: 1555644 - DNA, 15 bp, Homo sapiens
gcacagccacagcta

SEQ ID NO: 1555645 - DNA, 15 bp, Homo sapiens
agcacagccacagct

SEQ ID NO: 1555646 - DNA, 15 bp, Homo sapiens
cagcacagccacagc

SEQ ID NO: 1555647 - DNA, 15 bp, Homo sapiens
gcagcacagccacag

SEQ ID NO: 1555648 - DNA, 15 bp, Homo sapiens
tgcagcacagccaca

SEQ ID NO: 1555649 - DNA, 15 bp, Homo sapiens
ctgcagcacagccac

SEQ ID NO: 1555650 - DNA, 15 bp, Homo sapiens
gctgcagcacagcca

SEQ ID NO: 1555651 - DNA, 15 bp, Homo sapiens
agctgcagcacagcc

SEQ ID NO: 1555652 - DNA, 15 bp, Homo sapiens
aagctgcagcacagc

SEQ ID NO: 1555653 - DNA, 15 bp, Homo sapiens
caagctgcagcacag

SEQ ID NO: 1555654 - DNA, 15 bp, Homo sapiens
tcaagctgcagcaca

SEQ ID NO: 1555655 - DNA, 15 bp, Homo sapiens
atcaagctgcagcac

SEQ ID NO: 1555656 - DNA, 15 bp, Homo sapiens
catcaagctgcagca

SEQ ID NO: 1555657 - DNA, 15 bp, Homo sapiens
tcatcaagctgcagc

SEQ ID NO: 1555658 - DNA, 15 bp, Homo sapiens
ctcatcaagctgcag

SEQ ID NO: 1555659 - DNA, 15 bp, Homo sapiens
cctcatcaagctgca

SEQ ID NO: 1555660 - DNA, 15 bp, Homo sapiens
acctcatcaagctgc

SEQ ID NO: 1555661 - DNA, 15 bp, Homo sapiens
gacctcatcaagctg

SEQ ID NO: 1555662 - DNA, 15 bp, Homo sapiens
tgacctcatcaagct

SEQ ID NO: 1555663 - DNA, 15 bp, Homo sapiens
ttgacctcatcaagc

SEQ ID NO: 1555664 - DNA, 15 bp, Homo sapiens
gttgacctcatcaag

SEQ ID NO: 1555665 - DNA, 15 bp, Homo sapiens
agttgacctcatcaa

SEQ ID NO: 1555666 - DNA, 15 bp, Homo sapiens
aagttgacctcatca

SEQ ID NO: 1555667 - DNA, 15 bp, Homo sapiens
caagttgacctcatc

SEQ ID NO: 1555668 - DNA, 15 bp, Homo sapiens
acaagttgacctcat

SEQ ID NO: 1555669 - DNA, 15 bp, Homo sapiens
tacaagttgacctca

SEQ ID NO: 1555670 - DNA, 15 bp, Homo sapiens
atacaagttgacctc

SEQ ID NO: 1555671 - DNA, 15 bp, Homo sapiens
aatacaagttgacct

SEQ ID NO: 1555672 - DNA, 15 bp, Homo sapiens
gaatacaagttgacc

SEQ ID NO: 1555673 - DNA, 15 bp, Homo sapiens
tgaatacaagttgac

SEQ ID NO: 1555674 - DNA, 15 bp, Homo sapiens
ctgaatacaagttga

SEQ ID NO: 1555675 - DNA, 15 bp, Homo sapiens
gctgaatacaagttg

SEQ ID NO: 1555676 - DNA, 15 bp, Homo sapiens
tgctgaatacaagtt

SEQ ID NO: 1555677 - DNA, 15 bp, Homo sapiens
ctgctgaatacaagt

SEQ ID NO: 1555678 - DNA, 15 bp, Homo sapiens
cctgctgaatacaag

SEQ ID NO: 1555679 - DNA, 15 bp, Homo sapiens
acctgctgaatacaa

SEQ ID NO: 1555680 - DNA, 15 bp, Homo sapiens
tacctgctgaataca

SEQ ID NO: 1555681 - DNA, 15 bp, Homo sapiens
gtacctgctgaatac

SEQ ID NO: 1555682 - DNA, 15 bp, Homo sapiens
ggtacctgctgaata

SEQ ID NO: 1555683 - DNA, 15 bp, Homo sapiens
cggtacctgctgaat

SEQ ID NO: 1555684 - DNA, 15 bp, Homo sapiens
gcggtacctgctgaa

SEQ ID NO: 1555685 - DNA, 15 bp, Homo sapiens
tgcggtacctgctga

SEQ ID NO: 1555686 - DNA, 15 bp, Homo sapiens
gtgcggtacctgctg

SEQ ID NO: 1555687 - DNA, 15 bp, Homo sapiens
agtgcggtacctgct

SEQ ID NO: 1555688 - DNA, 15 bp, Homo sapiens
aagtgcggtacctgc

SEQ ID NO: 1555689 - DNA, 15 bp, Homo sapiens
gaagtgcggtacctg

SEQ ID NO: 1555690 - DNA, 15 bp, Homo sapiens
agaagtgcggtacct

SEQ ID NO: 1555691 - DNA, 15 bp, Homo sapiens
aagaagtgcggtacc

SEQ ID NO: 1555692 - DNA, 15 bp, Homo sapiens
caagaagtgcggtac

SEQ ID NO: 1555693 - DNA, 15 bp, Homo sapiens
tcaagaagtgcggta

SEQ ID NO: 1555694 - DNA, 15 bp, Homo sapiens
ttcaagaagtgcggt

SEQ ID NO: 1555695 - DNA, 15 bp, Homo sapiens
gttcaagaagtgcgg

SEQ ID NO: 1555696 - DNA, 15 bp, Homo sapiens
tgttcaagaagtgcg

SEQ ID NO: 1555697 - DNA, 15 bp, Homo sapiens
ttgttcaagaagtgc

SEQ ID NO: 1555698 - DNA, 15 bp, Homo sapiens
tttgttcaagaagtg

SEQ ID NO: 1555699 - DNA, 15 bp, Homo sapiens
ttttgttcaagaagt

SEQ ID NO: 1555700 - DNA, 15 bp, Homo sapiens
gttttgttcaagaag

SEQ ID NO: 1555701 - DNA, 15 bp, Homo sapiens
ggttttgttcaagaa

SEQ ID NO: 1555702 - DNA, 15 bp, Homo sapiens
aggttttgttcaaga

SEQ ID NO: 1555703 - DNA, 15 bp, Homo sapiens
caggttttgttcaag

SEQ ID NO: 1555704 - DNA, 15 bp, Homo sapiens
gcaggttttgttcaa

SEQ ID NO: 1555705 - DNA, 15 bp, Homo sapiens
tgcaggttttgttca

SEQ ID NO: 1555706 - DNA, 15 bp, Homo sapiens
atgcaggttttgttc

SEQ ID NO: 1555707 - DNA, 15 bp, Homo sapiens
tatgcaggttttgtt

SEQ ID NO: 1555708 - DNA, 15 bp, Homo sapiens
gtatgcaggttttgt

SEQ ID NO: 1555709 - DNA, 15 bp, Homo sapiens
agtatgcaggttttg

SEQ ID NO: 1555710 - DNA, 15 bp, Homo sapiens
aagtatgcaggtttt

SEQ ID NO: 1555711 - DNA, 15 bp, Homo sapiens
aaagtatgcaggttt

SEQ ID NO: 1555712 - DNA, 15 bp, Homo sapiens
taaagtatgcaggtt

SEQ ID NO: 1555713 - DNA, 15 bp, Homo sapiens
ctaaagtatgcaggt

SEQ ID NO: 1555714 - DNA, 15 bp, Homo sapiens
tctaaagtatgcagg

SEQ ID NO: 1555715 - DNA, 15 bp, Homo sapiens
atctaaagtatgcag

SEQ ID NO: 1555716 - DNA, 15 bp, Homo sapiens
tatctaaagtatgca

SEQ ID NO: 1555717 - DNA, 15 bp, Homo sapiens
ctatctaaagtatgc

SEQ ID NO: 1555718 - DNA, 15 bp, Homo sapiens
actatctaaagtatg

SEQ ID NO: 1555719 - DNA, 15 bp, Homo sapiens
gactatctaaagtat

SEQ ID NO: 1555720 - DNA, 15 bp, Homo sapiens
agactatctaaagta

SEQ ID NO: 1555721 - DNA, 15 bp, Homo sapiens
gagactatctaaagt

SEQ ID NO: 1555722 - DNA, 15 bp, Homo sapiens
ggagactatctaaag

SEQ ID NO: 1555723 - DNA, 15 bp, Homo sapiens
cggagactatctaaa

SEQ ID NO: 1555724 - DNA, 15 bp, Homo sapiens
acggagactatctaa

SEQ ID NO: 1555725 - DNA, 15 bp, Homo sapiens
tacggagactatcta

SEQ ID NO: 1555726 - DNA, 15 bp, Homo sapiens
atacggagactatct

SEQ ID NO: 1555727 - DNA, 15 bp, Homo sapiens
tatacggagactatc

SEQ ID NO: 1555728 - DNA, 15 bp, Homo sapiens
atatacggagactat

SEQ ID NO: 1555729 - DNA, 15 bp, Homo sapiens
aatatacggagacta

SEQ ID NO: 1555730 - DNA, 15 bp, Homo sapiens
gaatatacggagact

SEQ ID NO: 1555731 - DNA, 15 bp, Homo sapiens
tgaatatacggagac

SEQ ID NO: 1555732 - DNA, 15 bp, Homo sapiens
ttgaatatacggaga

SEQ ID NO: 1555733 - DNA, 15 bp, Homo sapiens
attgaatatacggag

SEQ ID NO: 1555734 - DNA, 15 bp, Homo sapiens
cattgaatatacgga

SEQ ID NO: 1555735 - DNA, 15 bp, Homo sapiens
tcattgaatatacgg

SEQ ID NO: 1555736 - DNA, 15 bp, Homo sapiens
gtcattgaatatacg

SEQ ID NO: 1555737 - DNA, 15 bp, Homo sapiens
tgtcattgaatatac

SEQ ID NO: 1555738 - DNA, 15 bp, Homo sapiens
ttgtcattgaatata

SEQ ID NO: 1555739 - DNA, 15 bp, Homo sapiens
cttgtcattgaatat

SEQ ID NO: 1555740 - DNA, 15 bp, Homo sapiens
ccttgtcattgaata

SEQ ID NO: 1555741 - DNA, 15 bp, Homo sapiens
accttgtcattgaat

SEQ ID NO: 1555742 - DNA, 15 bp, Homo sapiens
taccttgtcattgaa

SEQ ID NO: 1555743 - DNA, 15 bp, Homo sapiens
ttaccttgtcattga

SEQ ID NO: 1555744 - DNA, 15 bp, Homo sapiens
cttaccttgtcattg

SEQ ID NO: 1555745 - DNA, 15 bp, Homo sapiens
gcttaccttgtcatt

SEQ ID NO: 1555746 - DNA, 15 bp, Homo sapiens
tgcttaccttgtcat

SEQ ID NO: 1555747 - DNA, 15 bp, Homo sapiens
ttgcttaccttgtca

SEQ ID NO: 1555748 - DNA, 15 bp, Homo sapiens
tttgcttaccttgtc

SEQ ID NO: 1555749 - DNA, 15 bp, Homo sapiens
gtttgcttaccttgt

SEQ ID NO: 1555750 - DNA, 15 bp, Homo sapiens
agtttgcttaccttg

SEQ ID NO: 1555751 - DNA, 15 bp, Homo sapiens
aagtttgcttacctt

SEQ ID NO: 1555752 - DNA, 15 bp, Homo sapiens
aaagtttgcttacct

SEQ ID NO: 1555753 - DNA, 15 bp, Homo sapiens
caaagtttgcttacc

SEQ ID NO: 1555754 - DNA, 15 bp, Homo sapiens
gcaaagtttgcttac

SEQ ID NO: 1555755 - DNA, 15 bp, Homo sapiens
ggcaaagtttgctta

SEQ ID NO: 1555756 - DNA, 15 bp, Homo sapiens
aggcaaagtttgctt

SEQ ID NO: 1555757 - DNA, 15 bp, Homo sapiens
aaggcaaagtttgct

SEQ ID NO: 1555758 - DNA, 15 bp, Homo sapiens
caaggcaaagtttgc

SEQ ID NO: 1555759 - DNA, 15 bp, Homo sapiens
tcaaggcaaagtttg

SEQ ID NO: 1555760 - DNA, 15 bp, Homo sapiens
ctcaaggcaaagttt

SEQ ID NO: 1555761 - DNA, 15 bp, Homo sapiens
cctcaaggcaaagtt

SEQ ID NO: 1555762 - DNA, 15 bp, Homo sapiens
acctcaaggcaaagt

SEQ ID NO: 1555763 - DNA, 15 bp, Homo sapiens
aacctcaaggcaaag

SEQ ID NO: 1555764 - DNA, 15 bp, Homo sapiens
gaacctcaaggcaaa

SEQ ID NO: 1555765 - DNA, 15 bp, Homo sapiens
ggaacctcaaggcaa

SEQ ID NO: 1555766 - DNA, 15 bp, Homo sapiens
aggaacctcaaggca

SEQ ID NO: 1555767 - DNA, 15 bp, Homo sapiens
taggaacctcaaggc

SEQ ID NO: 1555768 - DNA, 15 bp, Homo sapiens
ctaggaacctcaagg

SEQ ID NO: 1555769 - DNA, 15 bp, Homo sapiens
tctaggaacctcaag

SEQ ID NO: 1555770 - DNA, 15 bp, Homo sapiens
atctaggaacctcaa

SEQ ID NO: 1555771 - DNA, 15 bp, Homo sapiens
aatctaggaacctca

SEQ ID NO: 1555772 - DNA, 15 bp, Homo sapiens
taatctaggaacctc

SEQ ID NO: 1555773 - DNA, 15 bp, Homo sapiens
gtaatctaggaacct

SEQ ID NO: 1555774 - DNA, 15 bp, Homo sapiens
agtaatctaggaacc

SEQ ID NO: 1555775 - DNA, 15 bp, Homo sapiens
gagtaatctaggaac

SEQ ID NO: 1555776 - DNA, 15 bp, Homo sapiens
tgagtaatctaggaa

SEQ ID NO: 1555777 - DNA, 15 bp, Homo sapiens
ttgagtaatctagga

SEQ ID NO: 1555778 - DNA, 15 bp, Homo sapiens
tttgagtaatctagg

SEQ ID NO: 1555779 - DNA, 15 bp, Homo sapiens
atttgagtaatctag

SEQ ID NO: 1555780 - DNA, 15 bp, Homo sapiens
aatttgagtaatcta

SEQ ID NO: 1555781 - DNA, 15 bp, Homo sapiens
aaatttgagtaatct

SEQ ID NO: 1555782 - DNA, 15 bp, Homo sapiens
taaatttgagtaatc

SEQ ID NO: 1555783 - DNA, 15 bp, Homo sapiens
ctaaatttgagtaat

SEQ ID NO: 1555784 - DNA, 15 bp, Homo sapiens
actaaatttgagtaa

SEQ ID NO: 1555785 - DNA, 15 bp, Homo sapiens
tactaaatttgagta

SEQ ID NO: 1555786 - DNA, 15 bp, Homo sapiens
gtactaaatttgagt

SEQ ID NO: 1555787 - DNA, 15 bp, Homo sapiens
agtactaaatttgag

SEQ ID NO: 1555788 - DNA, 15 bp, Homo sapiens
gagtactaaatttga

SEQ ID NO: 1555789 - DNA, 15 bp, Homo sapiens
agagtactaaatttg

SEQ ID NO: 1555790 - DNA, 15 bp, Homo sapiens
aagagtactaaattt

SEQ ID NO: 1555791 - DNA, 15 bp, Homo sapiens
gaagagtactaaatt

SEQ ID NO: 1555792 - DNA, 15 bp, Homo sapiens
ggaagagtactaaat

SEQ ID NO: 1555793 - DNA, 15 bp, Homo sapiens
tggaagagtactaaa

SEQ ID NO: 1555794 - DNA, 15 bp, Homo sapiens
atggaagagtactaa

SEQ ID NO: 1555795 - DNA, 15 bp, Homo sapiens
gatggaagagtacta

SEQ ID NO: 1555796 - DNA, 15 bp, Homo sapiens
agatggaagagtact

SEQ ID NO: 1555797 - DNA, 15 bp, Homo sapiens
aagatggaagagtac

SEQ ID NO: 1555798 - DNA, 15 bp, Homo sapiens
aaagatggaagagta

SEQ ID NO: 1555799 - DNA, 15 bp, Homo sapiens
aaaagatggaagagt

SEQ ID NO: 1555800 - DNA, 15 bp, Homo sapiens
gaaaagatggaagag

SEQ ID NO: 1555801 - DNA, 15 bp, Homo sapiens
agaaaagatggaaga

SEQ ID NO: 1555802 - DNA, 15 bp, Homo sapiens
aagaaaagatggaag

SEQ ID NO: 1555803 - DNA, 15 bp, Homo sapiens
caagaaaagatggaa

SEQ ID NO: 1555804 - DNA, 15 bp, Homo sapiens
acaagaaaagatgga

SEQ ID NO: 1555805 - DNA, 15 bp, Homo sapiens
aacaagaaaagatgg

SEQ ID NO: 1555806 - DNA, 15 bp, Homo sapiens
caacaagaaaagatg

SEQ ID NO: 1555807 - DNA, 15 bp, Homo sapiens
gcaacaagaaaagat

SEQ ID NO: 1555808 - DNA, 15 bp, Homo sapiens
agcaacaagaaaaga

SEQ ID NO: 1555809 - DNA, 15 bp, Homo sapiens
tagcaacaagaaaag

SEQ ID NO: 1555810 - DNA, 15 bp, Homo sapiens
atagcaacaagaaaa

SEQ ID NO: 1555811 - DNA, 15 bp, Homo sapiens
aatagcaacaagaaa

SEQ ID NO: 1555812 - DNA, 15 bp, Homo sapiens
gaatagcaacaagaa

SEQ ID NO: 1555813 - DNA, 15 bp, Homo sapiens
agaatagcaacaaga

SEQ ID NO: 1555814 - DNA, 15 bp, Homo sapiens
aagaatagcaacaag

SEQ ID NO: 1555815 - DNA, 15 bp, Homo sapiens
aaagaatagcaacaa

SEQ ID NO: 1555816 - DNA, 15 bp, Homo sapiens
aaaagaatagcaaca

SEQ ID NO: 1555817 - DNA, 15 bp, Homo sapiens
taaaagaatagcaac

SEQ ID NO: 1555818 - DNA, 15 bp, Homo sapiens
ttaaaagaatagcaa

SEQ ID NO: 1555819 - DNA, 15 bp, Homo sapiens
tttaaaagaatagca

SEQ ID NO: 1555820 - DNA, 15 bp, Homo sapiens
ttttaaaagaatagc

SEQ ID NO: 1555821 - DNA, 15 bp, Homo sapiens
attttaaaagaatag

SEQ ID NO: 1555822 - DNA, 15 bp, Homo sapiens
gattttaaaagaata

SEQ ID NO: 1555823 - DNA, 15 bp, Homo sapiens
tgattttaaaagaat

SEQ ID NO: 1555824 - DNA, 15 bp, Homo sapiens
gtgattttaaaagaa

SEQ ID NO: 1555825 - DNA, 15 bp, Homo sapiens
tgtgattttaaaaga

SEQ ID NO: 1555826 - DNA, 15 bp, Homo sapiens
ttgtgattttaaaag

SEQ ID NO: 1555827 - DNA, 15 bp, Homo sapiens
cttgtgattttaaaa

SEQ ID NO: 1555828 - DNA, 15 bp, Homo sapiens
tcttgtgattttaaa

SEQ ID NO: 1555829 - DNA, 15 bp, Homo sapiens
ttcttgtgattttaa

SEQ ID NO: 1555830 - DNA, 15 bp, Homo sapiens
cttcttgtgatttta

SEQ ID NO: 1555831 - DNA, 15 bp, Homo sapiens
acttcttgtgatttt

SEQ ID NO: 1555832 - DNA, 15 bp, Homo sapiens
gacttcttgtgattt

SEQ ID NO: 1555833 - DNA, 15 bp, Homo sapiens
ggacttcttgtgatt

SEQ ID NO: 1555834 - DNA, 15 bp, Homo sapiens
tggacttcttgtgat

SEQ ID NO: 1555835 - DNA, 15 bp, Homo sapiens
atggacttcttgtga

SEQ ID NO: 1555836 - DNA, 15 bp, Homo sapiens
tatggacttcttgtg

SEQ ID NO: 1555837 - DNA, 15 bp, Homo sapiens
ttatggacttcttgt

SEQ ID NO: 1555838 - DNA, 15 bp, Homo sapiens
gttatggacttcttg

SEQ ID NO: 1555839 - DNA, 15 bp, Homo sapiens
agttatggacttctt

SEQ ID NO: 1555840 - DNA, 15 bp, Homo sapiens
aagttatggacttct

SEQ ID NO: 1555841 - DNA, 15 bp, Homo sapiens
taagttatggacttc

SEQ ID NO: 1555842 - DNA, 15 bp, Homo sapiens
ttaagttatggactt

SEQ ID NO: 1555843 - DNA, 15 bp, Homo sapiens
cttaagttatggact

SEQ ID NO: 1555844 - DNA, 15 bp, Homo sapiens
acttaagttatggac

SEQ ID NO: 1555845 - DNA, 15 bp, Homo sapiens
tacttaagttatgga

SEQ ID NO: 1555846 - DNA, 15 bp, Homo sapiens
ctacttaagttatgg

SEQ ID NO: 1555847 - DNA, 15 bp, Homo sapiens
cctacttaagttatg

SEQ ID NO: 1555848 - DNA, 15 bp, Homo sapiens
tcctacttaagttat

SEQ ID NO: 1555849 - DNA, 15 bp, Homo sapiens
ttcctacttaagtta

SEQ ID NO: 1555850 - DNA, 15 bp, Homo sapiens
attcctacttaagtt

SEQ ID NO: 1555851 - DNA, 15 bp, Homo sapiens
aattcctacttaagt

SEQ ID NO: 1555852 - DNA, 15 bp, Homo sapiens
aaattcctacttaag

SEQ ID NO: 1555853 - DNA, 15 bp, Homo sapiens
caaattcctacttaa

SEQ ID NO: 1555854 - DNA, 15 bp, Homo sapiens
acaaattcctactta

SEQ ID NO: 1555855 - DNA, 15 bp, Homo sapiens
tacaaattcctactt

SEQ ID NO: 1555856 - DNA, 15 bp, Homo sapiens
atacaaattcctact

SEQ ID NO: 1555857 - DNA, 15 bp, Homo sapiens
tatacaaattcctac

SEQ ID NO: 1555858 - DNA, 15 bp, Homo sapiens
ttatacaaattccta

SEQ ID NO: 1555859 - DNA, 15 bp, Homo sapiens
attatacaaattcct

SEQ ID NO: 1555860 - DNA, 15 bp, Homo sapiens
cattatacaaattcc

SEQ ID NO: 1555861 - DNA, 15 bp, Homo sapiens
acattatacaaattc

SEQ ID NO: 1555862 - DNA, 15 bp, Homo sapiens
tacattatacaaatt

SEQ ID NO: 1555863 - DNA, 15 bp, Homo sapiens
ttacattatacaaat

SEQ ID NO: 1555864 - DNA, 15 bp, Homo sapiens
gttacattatacaaa

SEQ ID NO: 1555865 - DNA, 15 bp, Homo sapiens
agttacattatacaa

SEQ ID NO: 1555866 - DNA, 15 bp, Homo sapiens
aagttacattataca

SEQ ID NO: 1555867 - DNA, 15 bp, Homo sapiens
taagttacattatac

SEQ ID NO: 1555868 - DNA, 15 bp, Homo sapiens
ataagttacattata

SEQ ID NO: 1555869 - DNA, 15 bp, Homo sapiens
aataagttacattat

SEQ ID NO: 1555870 - DNA, 15 bp, Homo sapiens
caataagttacatta

SEQ ID NO: 1555871 - DNA, 15 bp, Homo sapiens
acaataagttacatt

SEQ ID NO: 1555872 - DNA, 15 bp, Homo sapiens
cacaataagttacat

SEQ ID NO: 1555873 - DNA, 15 bp, Homo sapiens
tcacaataagttaca

SEQ ID NO: 1555874 - DNA, 15 bp, Homo sapiens
ctcacaataagttac

SEQ ID NO: 1555875 - DNA, 15 bp, Homo sapiens
actcacaataagtta

SEQ ID NO: 1555876 - DNA, 15 bp, Homo sapiens
tactcacaataagtt

SEQ ID NO: 1555877 - DNA, 15 bp, Homo sapiens
atactcacaataagt

SEQ ID NO: 1555878 - DNA, 15 bp, Homo sapiens
tatactcacaataag

SEQ ID NO: 1555879 - DNA, 15 bp, Homo sapiens
atatactcacaataa

SEQ ID NO: 1555880 - DNA, 15 bp, Homo sapiens
aatatactcacaata

SEQ ID NO: 1555881 - DNA, 15 bp, Homo sapiens
aaatatactcacaat

SEQ ID NO: 1555882 - DNA, 15 bp, Homo sapiens
gaaatatactcacaa

SEQ ID NO: 1555883 - DNA, 15 bp, Homo sapiens
ggaaatatactcaca

SEQ ID NO: 1555884 - DNA, 15 bp, Homo sapiens
aggaaatatactcac

SEQ ID NO: 1555885 - DNA, 15 bp, Homo sapiens
aaggaaatatactca

SEQ ID NO: 1555886 - DNA, 15 bp, Homo sapiens
taaggaaatatactc

SEQ ID NO: 1555887 - DNA, 15 bp, Homo sapiens
gtaaggaaatatact

SEQ ID NO: 1555888 - DNA, 15 bp, Homo sapiens
ggtaaggaaatatac

SEQ ID NO: 1555889 - DNA, 15 bp, Homo sapiens
tggtaaggaaatata

SEQ ID NO: 1555890 - DNA, 15 bp, Homo sapiens
ctggtaaggaaatat

SEQ ID NO: 1555891 - DNA, 15 bp, Homo sapiens
gctggtaaggaaata

SEQ ID NO: 1555892 - DNA, 15 bp, Homo sapiens
agctggtaaggaaat

SEQ ID NO: 1555893 - DNA, 15 bp, Homo sapiens
gagctggtaaggaaa

SEQ ID NO: 1555894 - DNA, 15 bp, Homo sapiens
tgagctggtaaggaa

SEQ ID NO: 1555895 - DNA, 15 bp, Homo sapiens
atgagctggtaagga

SEQ ID NO: 1555896 - DNA, 15 bp, Homo sapiens
tatgagctggtaagg

SEQ ID NO: 1555897 - DNA, 15 bp, Homo sapiens
ttatgagctggtaag

SEQ ID NO: 1555898 - DNA, 15 bp, Homo sapiens
tttatgagctggtaa

SEQ ID NO: 1555899 - DNA, 15 bp, Homo sapiens
ctttatgagctggta

SEQ ID NO: 1555900 - DNA, 15 bp, Homo sapiens
tctttatgagctggt

SEQ ID NO: 1555901 - DNA, 15 bp, Homo sapiens
ttctttatgagctgg

SEQ ID NO: 1555902 - DNA, 15 bp, Homo sapiens
gttctttatgagctg

SEQ ID NO: 1555903 - DNA, 15 bp, Homo sapiens
agttctttatgagct

SEQ ID NO: 1555904 - DNA, 15 bp, Homo sapiens
tagttctttatgagc

SEQ ID NO: 1555905 - DNA, 15 bp, Homo sapiens
atagttctttatgag

SEQ ID NO: 1555906 - DNA, 15 bp, Homo sapiens
catagttctttatga

SEQ ID NO: 1555907 - DNA, 15 bp, Homo sapiens
acatagttctttatg

SEQ ID NO: 1555908 - DNA, 15 bp, Homo sapiens
tacatagttctttat

SEQ ID NO: 1555909 - DNA, 15 bp, Homo sapiens
ttacatagttcttta

SEQ ID NO: 1555910 - DNA, 15 bp, Homo sapiens
tttacatagttcttt

SEQ ID NO: 1555911 - DNA, 15 bp, Homo sapiens
gtttacatagttctt

SEQ ID NO: 1555912 - DNA, 15 bp, Homo sapiens
agtttacatagttct

SEQ ID NO: 1555913 - DNA, 15 bp, Homo sapiens
aagtttacatagttc

SEQ ID NO: 1555914 - DNA, 15 bp, Homo sapiens
caagtttacatagtt

SEQ ID NO: 1555915 - DNA, 15 bp, Homo sapiens
tcaagtttacatagt

SEQ ID NO: 1555916 - DNA, 15 bp, Homo sapiens
ttcaagtttacatag

SEQ ID NO: 1555917 - DNA, 15 bp, Homo sapiens
attcaagtttacata

SEQ ID NO: 1555918 - DNA, 15 bp, Homo sapiens
gcattcaagtttaca

SEQ ID NO: 1555919 - DNA, 15 bp, Homo sapiens
tgcattcaagtttac

SEQ ID NO: 1555920 - DNA, 15 bp, Homo sapiens
atgcattcaagttta

SEQ ID NO: 1555921 - DNA, 15 bp, Homo sapiens
tatgcattcaagttt

SEQ ID NO: 1555922 - DNA, 15 bp, Homo sapiens
atatgcattcaagtt

SEQ ID NO: 1555923 - DNA, 15 bp, Homo sapiens
aatatgcattcaagt

SEQ ID NO: 1555924 - DNA, 15 bp, Homo sapiens
aaatatgcattcaag

SEQ ID NO: 1555925 - DNA, 15 bp, Homo sapiens
aaaatatgcattcaa

SEQ ID NO: 1555926 - DNA, 15 bp, Homo sapiens
aaaaatatgcattca

SEQ ID NO: 1555927 - DNA, 15 bp, Homo sapiens
aaaaaatatgcattc

SEQ ID NO: 1555928 - DNA, 15 bp, Homo sapiens
taaaaaatatgcatt

SEQ ID NO: 1555929 - DNA, 15 bp, Homo sapiens
gtaaaaaatatgcat

SEQ ID NO: 1555930 - DNA, 15 bp, Homo sapiens
tgtaaaaaatatgca

SEQ ID NO: 1555931 - DNA, 15 bp, Homo sapiens
atgtaaaaaatatgc

SEQ ID NO: 1555932 - DNA, 15 bp, Homo sapiens
tatgtaaaaaatatg

SEQ ID NO: 1555933 - DNA, 15 bp, Homo sapiens
ttatgtaaaaaatat

SEQ ID NO: 1555934 - DNA, 15 bp, Homo sapiens
tttatgtaaaaaata

SEQ ID NO: 1555935 - DNA, 15 bp, Homo sapiens
ttttatgtaaaaaat

SEQ ID NO: 1555936 - DNA, 15 bp, Homo sapiens
tttttatgtaaaaaa

SEQ ID NO: 1555937 - DNA, 15 bp, Homo sapiens
atttttatgtaaaaa

SEQ ID NO: 1555938 - DNA, 15 bp, Homo sapiens
tatttttatgtaaaa

SEQ ID NO: 1555939 - DNA, 15 bp, Homo sapiens
ctatttttatgtaaa

SEQ ID NO: 1555940 - DNA, 15 bp, Homo sapiens
gctatttttatgtaa

SEQ ID NO: 1555941 - DNA, 15 bp, Homo sapiens
tgctatttttatgta

SEQ ID NO: 1555942 - DNA, 15 bp, Homo sapiens
ttgctatttttatgt

SEQ ID NO: 1555943 - DNA, 15 bp, Homo sapiens
tttgctatttttatg

SEQ ID NO: 1555944 - DNA, 15 bp, Homo sapiens
ttttgctatttttat

SEQ ID NO: 1555945 - DNA, 15 bp, Homo sapiens
tttttgctattttta

SEQ ID NO: 1555946 - DNA, 15 bp, Homo sapiens
ttttttgctattttt

SEQ ID NO: 1555947 - DNA, 15 bp, Homo sapiens
tttttttgctatttt

SEQ ID NO: 1555948 - DNA, 15 bp, Homo sapiens
ttttttttgctattt

SEQ ID NO: 1555949 - DNA, 15 bp, Homo sapiens
gtttttttttttttg

SEQ ID NO: 1555950 - DNA, 15 bp, Homo sapiens
ttttttttttgtttt

SEQ ID NO: 1555951 - DNA, 15 bp, Homo sapiens
tgttttttttttgtt

SEQ ID NO: 1555952 - DNA, 15 bp, Homo sapiens
ctgttttttttttgt

SEQ ID NO: 1555953 - DNA, 15 bp, Homo sapiens
actgttttttttttg

SEQ ID NO: 1555954 - DNA, 15 bp, Homo sapiens
tactgtttttttttt

SEQ ID NO: 1555955 - DNA, 15 bp, Homo sapiens
gtactgttttttttt

SEQ ID NO: 1555956 - DNA, 15 bp, Homo sapiens
agtactgtttttttt

SEQ ID NO: 1555957 - DNA, 15 bp, Homo sapiens
cagtactgttttttt

SEQ ID NO: 1555958 - DNA, 15 bp, Homo sapiens
ccagtactgtttttt

SEQ ID NO: 1555959 - DNA, 15 bp, Homo sapiens
gccagtactgttttt

SEQ ID NO: 1555960 - DNA, 15 bp, Homo sapiens
ggccagtactgtttt

SEQ ID NO: 1555961 - DNA, 15 bp, Homo sapiens
aggccagtactgttt

SEQ ID NO: 1555962 - DNA, 15 bp, Homo sapiens
taggccagtactgtt

SEQ ID NO: 1555963 - DNA, 15 bp, Homo sapiens
ttaggccagtactgt

SEQ ID NO: 1555964 - DNA, 15 bp, Homo sapiens
attaggccagtactg

SEQ ID NO: 1555965 - DNA, 15 bp, Homo sapiens
tattaggccagtact

SEQ ID NO: 1555966 - DNA, 15 bp, Homo sapiens
gtattaggccagtac

SEQ ID NO: 1555967 - DNA, 15 bp, Homo sapiens
agtattaggccagta

SEQ ID NO: 1555968 - DNA, 15 bp, Homo sapiens
tagtattaggccagt

SEQ ID NO: 1555969 - DNA, 15 bp, Homo sapiens
ctagtattaggccag

SEQ ID NO: 1555970 - DNA, 15 bp, Homo sapiens
actagtattaggcca

SEQ ID NO: 1555971 - DNA, 15 bp, Homo sapiens
tactagtattaggcc

SEQ ID NO: 1555972 - DNA, 15 bp, Homo sapiens
ctactagtattaggc

SEQ ID NO: 1555973 - DNA, 15 bp, Homo sapiens
tctactagtattagg

SEQ ID NO: 1555974 - DNA, 15 bp, Homo sapiens
ttctactagtattag

SEQ ID NO: 1555975 - DNA, 15 bp, Homo sapiens
attctactagtatta

SEQ ID NO: 1555976 - DNA, 15 bp, Homo sapiens
aattctactagtatt

SEQ ID NO: 1555977 - DNA, 15 bp, Homo sapiens
taattctactagtat

SEQ ID NO: 1555978 - DNA, 15 bp, Homo sapiens
gtaattctactagta

SEQ ID NO: 1555979 - DNA, 15 bp, Homo sapiens
tgtaattctactagt

SEQ ID NO: 1555980 - DNA, 15 bp, Homo sapiens
ctgtaattctactag

SEQ ID NO: 1555981 - DNA, 15 bp, Homo sapiens
tctgtaattctacta

SEQ ID NO: 1555982 - DNA, 15 bp, Homo sapiens
ttctgtaattctact

SEQ ID NO: 1555983 - DNA, 15 bp, Homo sapiens
attctgtaattctac

SEQ ID NO: 1555984 - DNA, 15 bp, Homo sapiens
tattctgtaattcta

SEQ ID NO: 1555985 - DNA, 15 bp, Homo sapiens
ttattctgtaattct

SEQ ID NO: 1555986 - DNA, 15 bp, Homo sapiens
cttattctgtaattc

SEQ ID NO: 1555987 - DNA, 15 bp, Homo sapiens
ccttattctgtaatt

SEQ ID NO: 1555988 - DNA, 15 bp, Homo sapiens
tccttattctgtaat

SEQ ID NO: 1555989 - DNA, 15 bp, Homo sapiens
atccttattctgtaa

SEQ ID NO: 1555990 - DNA, 15 bp, Homo sapiens
tatccttattctgta

SEQ ID NO: 1555991 - DNA, 15 bp, Homo sapiens
ttatccttattctgt

SEQ ID NO: 1555992 - DNA, 15 bp, Homo sapiens
tttatccttattctg

SEQ ID NO: 1555993 - DNA, 15 bp, Homo sapiens
atttatccttattct

SEQ ID NO: 1555994 - DNA, 15 bp, Homo sapiens
tatttatccttattc

SEQ ID NO: 1555995 - DNA, 15 bp, Homo sapiens
ttatttatccttatt

SEQ ID NO: 1555996 - DNA, 15 bp, Homo sapiens
attatttatccttat

SEQ ID NO: 1555997 - DNA, 15 bp, Homo sapiens
tattatttatcctta

SEQ ID NO: 1555998 - DNA, 15 bp, Homo sapiens
gtattatttatcctt

SEQ ID NO: 1555999 - DNA, 15 bp, Homo sapiens
tgtattatttatcct

SEQ ID NO: 1556000 - DNA, 15 bp, Homo sapiens
atgtattatttatcc

SEQ ID NO: 1556001 - DNA, 15 bp, Homo sapiens
catgtattatttatc

SEQ ID NO: 1556002 - DNA, 15 bp, Homo sapiens
tcatgtattatttat

SEQ ID NO: 1556003 - DNA, 15 bp, Homo sapiens
atcatgtattattta

SEQ ID NO: 1556004 - DNA, 15 bp, Homo sapiens
gatcatgtattattt

SEQ ID NO: 1556005 - DNA, 15 bp, Homo sapiens
tgatcatgtattatt

SEQ ID NO: 1556006 - DNA, 15 bp, Homo sapiens
atgatcatgtattat

SEQ ID NO: 1556007 - DNA, 15 bp, Homo sapiens
gatgatcatgtatta

SEQ ID NO: 1556008 - DNA, 15 bp, Homo sapiens
aggatgatcatgtat

SEQ ID NO: 1556009 - DNA, 15 bp, Homo sapiens
aaggatgatcatgta

SEQ ID NO: 1556010 - DNA, 15 bp, Homo sapiens
taaggatgatcatgt

SEQ ID NO: 1556011 - DNA, 15 bp, Homo sapiens
gtaaggatgatcatg

SEQ ID NO: 1556012 - DNA, 15 bp, Homo sapiens
tgtaaggatgatcat

SEQ ID NO: 1556013 - DNA, 15 bp, Homo sapiens
ctgtaaggatgatca

SEQ ID NO: 1556014 - DNA, 15 bp, Homo sapiens
tctgtaaggatgatc

SEQ ID NO: 1556015 - DNA, 15 bp, Homo sapiens
ttctgtaaggatgat

SEQ ID NO: 1556016 - DNA, 15 bp, Homo sapiens
attctgtaaggatga

SEQ ID NO: 1556017 - DNA, 15 bp, Homo sapiens
cattctgtaaggatg

SEQ ID NO: 1556018 - DNA, 15 bp, Homo sapiens
tcattctgtaaggat

SEQ ID NO: 1556019 - DNA, 15 bp, Homo sapiens
ctcattctgtaagga

SEQ ID NO: 1556020 - DNA, 15 bp, Homo sapiens
gctcattctgtaagg

SEQ ID NO: 1556021 - DNA, 15 bp, Homo sapiens
tgctcattctgtaag

SEQ ID NO: 1556022 - DNA, 15 bp, Homo sapiens
atgctcattctgtaa

SEQ ID NO: 1556023 - DNA, 15 bp, Homo sapiens
tatgctcattctgta

SEQ ID NO: 1556024 - DNA, 15 bp, Homo sapiens
ttatgctcattctgt

SEQ ID NO: 1556025 - DNA, 15 bp, Homo sapiens
tttatgctcattctg

SEQ ID NO: 1556026 - DNA, 15 bp, Homo sapiens
gtttatgctcattct

SEQ ID NO: 1556027 - DNA, 15 bp, Homo sapiens
tgtttatgctcattc

SEQ ID NO: 1556028 - DNA, 15 bp, Homo sapiens
ttgtttatgctcatt

SEQ ID NO: 1556029 - DNA, 15 bp, Homo sapiens
attgtttatgctcat

SEQ ID NO: 1556030 - DNA, 15 bp, Homo sapiens
tattgtttatgctca

SEQ ID NO: 1556031 - DNA, 15 bp, Homo sapiens
gtattgtttatgctc

SEQ ID NO: 1556032 - DNA, 15 bp, Homo sapiens
tgtattgtttatgct

SEQ ID NO: 1556033 - DNA, 15 bp, Homo sapiens
atgtattgtttatgc

SEQ ID NO: 1556034 - DNA, 15 bp, Homo sapiens
catgtattgtttatg

SEQ ID NO: 1556035 - DNA, 15 bp, Homo sapiens
ccatgtattgtttat

SEQ ID NO: 1556036 - DNA, 15 bp, Homo sapiens
accatgtattgttta

SEQ ID NO: 1556037 - DNA, 15 bp, Homo sapiens
taccatgtattgttt

SEQ ID NO: 1556038 - DNA, 15 bp, Homo sapiens
ttaccatgtattgtt

SEQ ID NO: 1556039 - DNA, 15 bp, Homo sapiens
attaccatgtattgt

SEQ ID NO: 1556040 - DNA, 15 bp, Homo sapiens
tattaccatgtattg

SEQ ID NO: 1556041 - DNA, 15 bp, Homo sapiens
ttattaccatgtatt

SEQ ID NO: 1556042 - DNA, 15 bp, Homo sapiens
attattaccatgtat

SEQ ID NO: 1556043 - DNA, 15 bp, Homo sapiens
tattattaccatgta

SEQ ID NO: 1556044 - DNA, 15 bp, Homo sapiens
atattattaccatgt

SEQ ID NO: 1556045 - DNA, 15 bp, Homo sapiens
aatattattaccatg

SEQ ID NO: 1556046 - DNA, 15 bp, Homo sapiens
taatattattaccat

SEQ ID NO: 1556047 - DNA, 15 bp, Homo sapiens
ttaatattattacca

SEQ ID NO: 1556048 - DNA, 15 bp, Homo sapiens
attaatattattacc

SEQ ID NO: 1556049 - DNA, 15 bp, Homo sapiens
tattaatattattac

SEQ ID NO: 1556050 - DNA, 15 bp, Homo sapiens
ctattaatattatta

SEQ ID NO: 1556051 - DNA, 15 bp, Homo sapiens
gctattaatattatt

SEQ ID NO: 1556052 - DNA, 15 bp, Homo sapiens
agctattaatattat

SEQ ID NO: 1556053 - DNA, 15 bp, Homo sapiens
tagctattaatatta

SEQ ID NO: 1556054 - DNA, 15 bp, Homo sapiens
gtagctattaatatt

SEQ ID NO: 1556055 - DNA, 15 bp, Homo sapiens
ggtagctattaatat

SEQ ID NO: 1556056 - DNA, 15 bp, Homo sapiens
tggtagctattaata

SEQ ID NO: 1556057 - DNA, 15 bp, Homo sapiens
atggtagctattaat

SEQ ID NO: 1556058 - DNA, 15 bp, Homo sapiens
catggtagctattaa

SEQ ID NO: 1556059 - DNA, 15 bp, Homo sapiens
gcatggtagctatta

SEQ ID NO: 1556060 - DNA, 15 bp, Homo sapiens
ggcatggtagctatt

SEQ ID NO: 1556061 - DNA, 15 bp, Homo sapiens
tggcatggtagctat

SEQ ID NO: 1556062 - DNA, 15 bp, Homo sapiens
ctggcatggtagcta

SEQ ID NO: 1556063 - DNA, 15 bp, Homo sapiens
cctggcatggtagct

SEQ ID NO: 1556064 - DNA, 15 bp, Homo sapiens
gcctggcatggtagc

SEQ ID NO: 1556065 - DNA, 15 bp, Homo sapiens
ggcctggcatggtag

SEQ ID NO: 1556066 - DNA, 15 bp, Homo sapiens
cggcctggcatggta

SEQ ID NO: 1556067 - DNA, 15 bp, Homo sapiens
acggcctggcatggt

SEQ ID NO: 1556068 - DNA, 15 bp, Homo sapiens
tacggcctggcatgg

SEQ ID NO: 1556069 - DNA, 15 bp, Homo sapiens
atacggcctggcatg

SEQ ID NO: 1556070 - DNA, 15 bp, Homo sapiens
catacggcctggcat

SEQ ID NO: 1556071 - DNA, 15 bp, Homo sapiens
gcatacggcctggca

SEQ ID NO: 1556072 - DNA, 15 bp, Homo sapiens
agcatacggcctggc

SEQ ID NO: 1556073 - DNA, 15 bp, Homo sapiens
tagcatacggcctgg

SEQ ID NO: 1556074 - DNA, 15 bp, Homo sapiens
ttagcatacggcctg

SEQ ID NO: 1556075 - DNA, 15 bp, Homo sapiens
tttagcatacggcct

SEQ ID NO: 1556076 - DNA, 15 bp, Homo sapiens
gtttagcatacggcc

SEQ ID NO: 1556077 - DNA, 15 bp, Homo sapiens
tgtttagcatacggc

SEQ ID NO: 1556078 - DNA, 15 bp, Homo sapiens
gtgtttagcatacgg

SEQ ID NO: 1556079 - DNA, 15 bp, Homo sapiens
agtgtttagcatacg

SEQ ID NO: 1556080 - DNA, 15 bp, Homo sapiens
tagtgtttagcatac

SEQ ID NO: 1556081 - DNA, 15 bp, Homo sapiens
atagtgtttagcata

SEQ ID NO: 1556082 - DNA, 15 bp, Homo sapiens
tatagtgtttagcat

SEQ ID NO: 1556083 - DNA, 15 bp, Homo sapiens
gtatagtgtttagca

SEQ ID NO: 1556084 - DNA, 15 bp, Homo sapiens
tgtatagtgtttagc

SEQ ID NO: 1556085 - DNA, 15 bp, Homo sapiens
atgtatagtgtttag

SEQ ID NO: 1556086 - DNA, 15 bp, Homo sapiens
aatgtatagtgttta

SEQ ID NO: 1556087 - DNA, 15 bp, Homo sapiens
aaatgtatagtgttt

SEQ ID NO: 1556088 - DNA, 15 bp, Homo sapiens
taaatgtatagtgtt

SEQ ID NO: 1556089 - DNA, 15 bp, Homo sapiens
ataaatgtatagtgt

SEQ ID NO: 1556090 - DNA, 15 bp, Homo sapiens
aataaatgtatagtg

SEQ ID NO: 1556091 - DNA, 15 bp, Homo sapiens
aaataaatgtatagt

SEQ ID NO: 1556092 - DNA, 15 bp, Homo sapiens
aaaataaatgtatag

SEQ ID NO: 1556093 - DNA, 15 bp, Homo sapiens
aaaaataaatgtata

SEQ ID NO: 1556094 - DNA, 15 bp, Homo sapiens
taaaaataaatgtat

SEQ ID NO: 1556095 - DNA, 15 bp, Homo sapiens
ttaaaaataaatgta

SEQ ID NO: 1556096 - DNA, 15 bp, Homo sapiens
attaaaaataaatgt

SEQ ID NO: 1556097 - DNA, 15 bp, Homo sapiens
aattaaaaataaatg

SEQ ID NO: 1556098 - DNA, 15 bp, Homo sapiens
aaattaaaaataaat

SEQ ID NO: 1556099 - DNA, 15 bp, Homo sapiens
gaaaattaaaaataa

SEQ ID NO: 1556100 - DNA, 15 bp, Homo sapiens
tgaaaattaaaaata

SEQ ID NO: 1556101 - DNA, 15 bp, Homo sapiens
atgaaaattaaaaat

SEQ ID NO: 1556102 - DNA, 15 bp, Homo sapiens
tatgaaaattaaaaa

SEQ ID NO: 1556103 - DNA, 15 bp, Homo sapiens
ttatgaaaattaaaa

SEQ ID NO: 1556104 - DNA, 15 bp, Homo sapiens
gttatgaaaattaaa

SEQ ID NO: 1556105 - DNA, 15 bp, Homo sapiens
ggttatgaaaattaa

SEQ ID NO: 1556106 - DNA, 15 bp, Homo sapiens
aggttatgaaaatta

SEQ ID NO: 1556107 - DNA, 15 bp, Homo sapiens
aaggttatgaaaatt

SEQ ID NO: 1556108 - DNA, 15 bp, Homo sapiens
taaggttatgaaaat

SEQ ID NO: 1556109 - DNA, 15 bp, Homo sapiens
ttaaggttatgaaaa

SEQ ID NO: 1556110 - DNA, 15 bp, Homo sapiens
cttaaggttatgaaa

SEQ ID NO: 1556111 - DNA, 15 bp, Homo sapiens
ccttaaggttatgaa

SEQ ID NO: 1556112 - DNA, 15 bp, Homo sapiens
accttaaggttatga

SEQ ID NO: 1556113 - DNA, 15 bp, Homo sapiens
taccttaaggttatg

SEQ ID NO: 1556114 - DNA, 15 bp, Homo sapiens
ttaccttaaggttat

SEQ ID NO: 1556115 - DNA, 15 bp, Homo sapiens
tttaccttaaggtta

SEQ ID NO: 1556116 - DNA, 15 bp, Homo sapiens
ctttaccttaaggtt

SEQ ID NO: 1556117 - DNA, 15 bp, Homo sapiens
cctttaccttaaggt

SEQ ID NO: 1556118 - DNA, 15 bp, Homo sapiens
acctttaccttaagg

SEQ ID NO: 1556119 - DNA, 15 bp, Homo sapiens
aacctttaccttaag

SEQ ID NO: 1556120 - DNA, 15 bp, Homo sapiens
taacctttaccttaa

SEQ ID NO: 1556121 - DNA, 15 bp, Homo sapiens
ctaacctttacctta

SEQ ID NO: 1556122 - DNA, 15 bp, Homo sapiens
gctaacctttacctt

SEQ ID NO: 1556123 - DNA, 15 bp, Homo sapiens
tgctaacctttacct

SEQ ID NO: 1556124 - DNA, 15 bp, Homo sapiens
atgctaacctttacc

SEQ ID NO: 1556125 - DNA, 15 bp, Homo sapiens
aatgctaacctttac

SEQ ID NO: 1556126 - DNA, 15 bp, Homo sapiens
gaatgctaaccttta

SEQ ID NO: 1556127 - DNA, 15 bp, Homo sapiens
agaatgctaaccttt

SEQ ID NO: 1556128 - DNA, 15 bp, Homo sapiens
gagaatgctaacctt

SEQ ID NO: 1556129 - DNA, 15 bp, Homo sapiens
agagaatgctaacct

SEQ ID NO: 1556130 - DNA, 15 bp, Homo sapiens
cagagaatgctaacc

SEQ ID NO: 1556131 - DNA, 15 bp, Homo sapiens
gcagagaatgctaac

SEQ ID NO: 1556132 - DNA, 15 bp, Homo sapiens
ggcagagaatgctaa

SEQ ID NO: 1556133 - DNA, 15 bp, Homo sapiens
gggcagagaatgcta

SEQ ID NO: 1556134 - DNA, 15 bp, Homo sapiens
ggggcagagaatgct

SEQ ID NO: 1556135 - DNA, 15 bp, Homo sapiens
gggggcagagaatgc

SEQ ID NO: 1556136 - DNA, 15 bp, Homo sapiens
ggggggcagagaatg

SEQ ID NO: 1556137 - DNA, 15 bp, Homo sapiens
tggggggcagagaat

SEQ ID NO: 1556138 - DNA, 15 bp, Homo sapiens
atggggggcagagaa

SEQ ID NO: 1556139 - DNA, 15 bp, Homo sapiens
aatggggggcagaga

SEQ ID NO: 1556140 - DNA, 15 bp, Homo sapiens
aaatggggggcagag

SEQ ID NO: 1556141 - DNA, 15 bp, Homo sapiens
gaaatggggggcaga

SEQ ID NO: 1556142 - DNA, 15 bp, Homo sapiens
tgaaatggggggcag

SEQ ID NO: 1556143 - DNA, 15 bp, Homo sapiens
gtgaaatggggggca

SEQ ID NO: 1556144 - DNA, 15 bp, Homo sapiens
tgtgaaatggggggc

SEQ ID NO: 1556145 - DNA, 15 bp, Homo sapiens
gtgtgaaatgggggg

SEQ ID NO: 1556146 - DNA, 15 bp, Homo sapiens
cgtgtgaaatggggg

SEQ ID NO: 1556147 - DNA, 15 bp, Homo sapiens
acgtgtgaaatgggg

SEQ ID NO: 1556148 - DNA, 15 bp, Homo sapiens
cacgtgtgaaatggg

SEQ ID NO: 1556149 - DNA, 15 bp, Homo sapiens
tcacgtgtgaaatgg

SEQ ID NO: 1556150 - DNA, 15 bp, Homo sapiens
ttcacgtgtgaaatg

SEQ ID NO: 1556151 - DNA, 15 bp, Homo sapiens
cttcacgtgtgaaat

SEQ ID NO: 1556152 - DNA, 15 bp, Homo sapiens
tcttcacgtgtgaaa

SEQ ID NO: 1556153 - DNA, 15 bp, Homo sapiens
ttcttcacgtgtgaa

SEQ ID NO: 1556154 - DNA, 15 bp, Homo sapiens
tttcttcacgtgtga

SEQ ID NO: 1556155 - DNA, 15 bp, Homo sapiens
atttcttcacgtgtg

SEQ ID NO: 1556156 - DNA, 15 bp, Homo sapiens
tatttcttcacgtgt

SEQ ID NO: 1556157 - DNA, 15 bp, Homo sapiens
ttatttcttcacgtg

SEQ ID NO: 1556158 - DNA, 15 bp, Homo sapiens
attatttcttcacgt

SEQ ID NO: 1556159 - DNA, 15 bp, Homo sapiens
gattatttcttcacg

SEQ ID NO: 1556160 - DNA, 15 bp, Homo sapiens
agattatttcttcac

SEQ ID NO: 1556161 - DNA, 15 bp, Homo sapiens
tagattatttcttca

SEQ ID NO: 1556162 - DNA, 15 bp, Homo sapiens
ttagattatttcttc

SEQ ID NO: 1556163 - DNA, 15 bp, Homo sapiens
tttagattatttctt

SEQ ID NO: 1556164 - DNA, 15 bp, Homo sapiens
ttttagattatttct

SEQ ID NO: 1556165 - DNA, 15 bp, Homo sapiens
cttttagattatttc

SEQ ID NO: 1556166 - DNA, 15 bp, Homo sapiens
acttttagattattt

SEQ ID NO: 1556167 - DNA, 15 bp, Homo sapiens
tacttttagattatt

SEQ ID NO: 1556168 - DNA, 15 bp, Homo sapiens
ttacttttagattat

SEQ ID NO: 1556169 - DNA, 15 bp, Homo sapiens
attacttttagatta

SEQ ID NO: 1556170 - DNA, 15 bp, Homo sapiens
gattacttttagatt

SEQ ID NO: 1556171 - DNA, 15 bp, Homo sapiens
agattacttttagat

SEQ ID NO: 1556172 - DNA, 15 bp, Homo sapiens
aagattacttttaga

SEQ ID NO: 1556173 - DNA, 15 bp, Homo sapiens
taagattacttttag

SEQ ID NO: 1556174 - DNA, 15 bp, Homo sapiens
ctaagattactttta

SEQ ID NO: 1556175 - DNA, 15 bp, Homo sapiens
actaagattactttt

SEQ ID NO: 1556176 - DNA, 15 bp, Homo sapiens
aactaagattacttt

SEQ ID NO: 1556177 - DNA, 15 bp, Homo sapiens
aaactaagattactt

SEQ ID NO: 1556178 - DNA, 15 bp, Homo sapiens
aaaactaagattact

SEQ ID NO: 1556179 - DNA, 15 bp, Homo sapiens
taaaactaagattac

SEQ ID NO: 1556180 - DNA, 15 bp, Homo sapiens
gtaaaactaagatta

SEQ ID NO: 1556181 - DNA, 15 bp, Homo sapiens
agtaaaactaagatt

SEQ ID NO: 1556182 - DNA, 15 bp, Homo sapiens
aagtaaaactaagat

SEQ ID NO: 1556183 - DNA, 15 bp, Homo sapiens
taagtaaaactaaga

SEQ ID NO: 1556184 - DNA, 15 bp, Homo sapiens
ttaagtaaaactaag

SEQ ID NO: 1556185 - DNA, 15 bp, Homo sapiens
attaagtaaaactaa

SEQ ID NO: 1556186 - DNA, 15 bp, Homo sapiens
tattaagtaaaacta

SEQ ID NO: 1556187 - DNA, 15 bp, Homo sapiens
ttattaagtaaaact

SEQ ID NO: 1556188 - DNA, 15 bp, Homo sapiens
attattaagtaaaac

SEQ ID NO: 1556189 - DNA, 15 bp, Homo sapiens
cattattaagtaaaa

SEQ ID NO: 1556190 - DNA, 15 bp, Homo sapiens
gcattattaagtaaa

SEQ ID NO: 1556191 - DNA, 15 bp, Homo sapiens
ggcattattaagtaa

SEQ ID NO: 1556192 - DNA, 15 bp, Homo sapiens
tggcattattaagta

SEQ ID NO: 1556193 - DNA, 15 bp, Homo sapiens
gtggcattattaagt

SEQ ID NO: 1556194 - DNA, 15 bp, Homo sapiens
agtggcattattaag

SEQ ID NO: 1556195 - DNA, 15 bp, Homo sapiens
aagtggcattattaa

SEQ ID NO: 1556196 - DNA, 15 bp, Homo sapiens
taagtggcattatta

SEQ ID NO: 1556197 - DNA, 15 bp, Homo sapiens
ttaagtggcattatt

SEQ ID NO: 1556198 - DNA, 15 bp, Homo sapiens
attaagtggcattat

SEQ ID NO: 1556199 - DNA, 15 bp, Homo sapiens
cattaagtggcatta

SEQ ID NO: 1556200 - DNA, 15 bp, Homo sapiens
tcattaagtggcatt

SEQ ID NO: 1556201 - DNA, 15 bp, Homo sapiens
ttcattaagtggcat

SEQ ID NO: 1556202 - DNA, 15 bp, Homo sapiens
tttcattaagtggca

SEQ ID NO: 1556203 - DNA, 15 bp, Homo sapiens
ttttcattaagtggc

SEQ ID NO: 1556204 - DNA, 15 bp, Homo sapiens
tttttcattaagtgg

SEQ ID NO: 1556205 - DNA, 15 bp, Homo sapiens
atttttcattaagtg

SEQ ID NO: 1556206 - DNA, 15 bp, Homo sapiens
tatttttcattaagt

SEQ ID NO: 1556207 - DNA, 15 bp, Homo sapiens
gtatttttcattaag

SEQ ID NO: 1556208 - DNA, 15 bp, Homo sapiens
cgtatttttcattaa

SEQ ID NO: 1556209 - DNA, 15 bp, Homo sapiens
acgtatttttcatta

SEQ ID NO: 1556210 - DNA, 15 bp, Homo sapiens
tacgtatttttcatt

SEQ ID NO: 1556211 - DNA, 15 bp, Homo sapiens
atacgtatttttcat

SEQ ID NO: 1556212 - DNA, 15 bp, Homo sapiens
tatacgtatttttca

SEQ ID NO: 1556213 - DNA, 15 bp, Homo sapiens
ttatacgtatttttc

SEQ ID NO: 1556214 - DNA, 15 bp, Homo sapiens
attatacgtattttt

SEQ ID NO: 1556215 - DNA, 15 bp, Homo sapiens
aattatacgtatttt

SEQ ID NO: 1556216 - DNA, 15 bp, Homo sapiens
gaattatacgtattt

SEQ ID NO: 1556217 - DNA, 15 bp, Homo sapiens
tgaattatacgtatt

SEQ ID NO: 1556218 - DNA, 15 bp, Homo sapiens
atgaattatacgtat

SEQ ID NO: 1556219 - DNA, 15 bp, Homo sapiens
tatgaattatacgta

SEQ ID NO: 1556220 - DNA, 15 bp, Homo sapiens
ctatgaattatacgt

SEQ ID NO: 1556221 - DNA, 15 bp, Homo sapiens
actatgaattatacg

SEQ ID NO: 1556222 - DNA, 15 bp, Homo sapiens
tactatgaattatac

SEQ ID NO: 1556223 - DNA, 15 bp, Homo sapiens
ctactatgaattata

SEQ ID NO: 1556224 - DNA, 15 bp, Homo sapiens
tctactatgaattat

SEQ ID NO: 1556225 - DNA, 15 bp, Homo sapiens
atctactatgaatta

SEQ ID NO: 1556226 - DNA, 15 bp, Homo sapiens
tatctactatgaatt

SEQ ID NO: 1556227 - DNA, 15 bp, Homo sapiens
ttatctactatgaat

SEQ ID NO: 1556228 - DNA, 15 bp, Homo sapiens
cttatctactatgaa

SEQ ID NO: 1556229 - DNA, 15 bp, Homo sapiens
ccttatctactatga

SEQ ID NO: 1556230 - DNA, 15 bp, Homo sapiens
tccttatctactatg

SEQ ID NO: 1556231 - DNA, 15 bp, Homo sapiens
ttccttatctactat

SEQ ID NO: 1556232 - DNA, 15 bp, Homo sapiens
cttccttatctacta

SEQ ID NO: 1556233 - DNA, 15 bp, Homo sapiens
acttccttatctact

SEQ ID NO: 1556234 - DNA, 15 bp, Homo sapiens
aacttccttatctac

SEQ ID NO: 1556235 - DNA, 15 bp, Homo sapiens
caacttccttatcta

SEQ ID NO: 1556236 - DNA, 15 bp, Homo sapiens
ccaacttccttatct

SEQ ID NO: 1556237 - DNA, 15 bp, Homo sapiens
tccaacttccttatc

SEQ ID NO: 1556238 - DNA, 15 bp, Homo sapiens
ctccaacttccttat

SEQ ID NO: 1556239 - DNA, 15 bp, Homo sapiens
tctccaacttcctta

SEQ ID NO: 1556240 - DNA, 15 bp, Homo sapiens
ctctccaacttcctt

SEQ ID NO: 1556241 - DNA, 15 bp, Homo sapiens
actctccaacttcct

SEQ ID NO: 1556242 - DNA, 15 bp, Homo sapiens
gactctccaacttcc

SEQ ID NO: 1556243 - DNA, 15 bp, Homo sapiens
agactctccaacttc

SEQ ID NO: 1556244 - DNA, 15 bp, Homo sapiens
tagactctccaactt

SEQ ID NO: 1556245 - DNA, 15 bp, Homo sapiens
ttagactctccaact

SEQ ID NO: 1556246 - DNA, 15 bp, Homo sapiens
tttagactctccaac

SEQ ID NO: 1556247 - DNA, 15 bp, Homo sapiens
ctttagactctccaa

SEQ ID NO: 1556248 - DNA, 15 bp, Homo sapiens
cctttagactctcca

SEQ ID NO: 1556249 - DNA, 15 bp, Homo sapiens
tcctttagactctcc

SEQ ID NO: 1556250 - DNA, 15 bp, Homo sapiens
ttcctttagactctc

SEQ ID NO: 1556251 - DNA, 15 bp, Homo sapiens
tttcctttagactct

SEQ ID NO: 1556252 - DNA, 15 bp, Homo sapiens
gtttcctttagactc

SEQ ID NO: 1556253 - DNA, 15 bp, Homo sapiens
agtttcctttagact

SEQ ID NO: 1556254 - DNA, 15 bp, Homo sapiens
aagtttcctttagac

SEQ ID NO: 1556255 - DNA, 15 bp, Homo sapiens
aaagtttcctttaga

SEQ ID NO: 1556256 - DNA, 15 bp, Homo sapiens
aaaagtttcctttag

SEQ ID NO: 1556257 - DNA, 15 bp, Homo sapiens
caaaagtttccttta

SEQ ID NO: 1556258 - DNA, 15 bp, Homo sapiens
ccaaaagtttccttt

SEQ ID NO: 1556259 - DNA, 15 bp, Homo sapiens
cccaaaagtttcctt

SEQ ID NO: 1556260 - DNA, 15 bp, Homo sapiens
acccaaaagtttcct

SEQ ID NO: 1556261 - DNA, 15 bp, Homo sapiens
tacccaaaagtttcc

SEQ ID NO: 1556262 - DNA, 15 bp, Homo sapiens
gtacccaaaagtttc

SEQ ID NO: 1556263 - DNA, 15 bp, Homo sapiens
agtacccaaaagttt

SEQ ID NO: 1556264 - DNA, 15 bp, Homo sapiens
aagtacccaaaagtt

SEQ ID NO: 1556265 - DNA, 15 bp, Homo sapiens
taagtacccaaaagt

SEQ ID NO: 1556266 - DNA, 15 bp, Homo sapiens
ttaagtacccaaaag

SEQ ID NO: 1556267 - DNA, 15 bp, Homo sapiens
attaagtacccaaaa

SEQ ID NO: 1556268 - DNA, 15 bp, Homo sapiens
aattaagtacccaaa

SEQ ID NO: 1556269 - DNA, 15 bp, Homo sapiens
aaattaagtacccaa

SEQ ID NO: 1556270 - DNA, 15 bp, Homo sapiens
aaaattaagtaccca

SEQ ID NO: 1556271 - DNA, 15 bp, Homo sapiens
taaaattaagtaccc

SEQ ID NO: 1556272 - DNA, 15 bp, Homo sapiens
gtaaaattaagtacc

SEQ ID NO: 1556273 - DNA, 15 bp, Homo sapiens
agtaaaattaagtac

SEQ ID NO: 1556274 - DNA, 15 bp, Homo sapiens
tagtaaaattaagta

SEQ ID NO: 1556275 - DNA, 15 bp, Homo sapiens
ctagtaaaattaagt

SEQ ID NO: 1556276 - DNA, 15 bp, Homo sapiens
actagtaaaattaag

SEQ ID NO: 1556277 - DNA, 15 bp, Homo sapiens
aactagtaaaattaa

SEQ ID NO: 1556278 - DNA, 15 bp, Homo sapiens
aaactagtaaaatta

SEQ ID NO: 1556279 - DNA, 15 bp, Homo sapiens
aaaactagtaaaatt

SEQ ID NO: 1556280 - DNA, 15 bp, Homo sapiens
aaaaactagtaaaat

SEQ ID NO: 1556281 - DNA, 15 bp, Homo sapiens
aaaaaactagtaaaa

SEQ ID NO: 1556282 - DNA, 15 bp, Homo sapiens
aaaaaaactagtaaa

SEQ ID NO: 1556283 - DNA, 15 bp, Homo sapiens
taaaaaaactagtaa

SEQ ID NO: 1556284 - DNA, 15 bp, Homo sapiens
ataaaaaaactagta

SEQ ID NO: 1556285 - DNA, 15 bp, Homo sapiens
aataaaaaaactagt

SEQ ID NO: 1556286 - DNA, 15 bp, Homo sapiens
gaataaaaaaactag

SEQ ID NO: 1556287 - DNA, 15 bp, Homo sapiens
agaataaaaaaacta

SEQ ID NO: 1556288 - DNA, 15 bp, Homo sapiens
cagaataaaaaaact

SEQ ID NO: 1556289 - DNA, 15 bp, Homo sapiens
acagaataaaaaaac

SEQ ID NO: 1556290 - DNA, 15 bp, Homo sapiens
gacagaataaaaaaa

SEQ ID NO: 1556291 - DNA, 15 bp, Homo sapiens
agacagaataaaaaa

SEQ ID NO: 1556292 - DNA, 15 bp, Homo sapiens
tagacagaataaaaa

SEQ ID NO: 1556293 - DNA, 15 bp, Homo sapiens
ttagacagaataaaa

SEQ ID NO: 1556294 - DNA, 15 bp, Homo sapiens
attagacagaataaa

SEQ ID NO: 1556295 - DNA, 15 bp, Homo sapiens
gattagacagaataa

SEQ ID NO: 1556296 - DNA, 15 bp, Homo sapiens
agattagacagaata

SEQ ID NO: 1556297 - DNA, 15 bp, Homo sapiens
aagattagacagaat

SEQ ID NO: 1556298 - DNA, 15 bp, Homo sapiens
taagattagacagaa

SEQ ID NO: 1556299 - DNA, 15 bp, Homo sapiens
gtaagattagacaga

SEQ ID NO: 1556300 - DNA, 15 bp, Homo sapiens
agtaagattagacag

SEQ ID NO: 1556301 - DNA, 15 bp, Homo sapiens
aagtaagattagaca

SEQ ID NO: 1556302 - DNA, 15 bp, Homo sapiens
aaagtaagattagac

SEQ ID NO: 1556303 - DNA, 15 bp, Homo sapiens
taaagtaagattaga

SEQ ID NO: 1556304 - DNA, 15 bp, Homo sapiens
ttaaagtaagattag

SEQ ID NO: 1556305 - DNA, 15 bp, Homo sapiens
tttaaagtaagatta

SEQ ID NO: 1556306 - DNA, 15 bp, Homo sapiens
ttttaaagtaagatt

SEQ ID NO: 1556307 - DNA, 15 bp, Homo sapiens
attttaaagtaagat

SEQ ID NO: 1556308 - DNA, 15 bp, Homo sapiens
tattttaaagtaaga

SEQ ID NO: 1556309 - DNA, 15 bp, Homo sapiens
atattttaaagtaag

SEQ ID NO: 1556310 - DNA, 15 bp, Homo sapiens
tatattttaaagtaa

SEQ ID NO: 1556311 - DNA, 15 bp, Homo sapiens
gtatattttaaagta

SEQ ID NO: 1556312 - DNA, 15 bp, Homo sapiens
ggtatattttaaagt

SEQ ID NO: 1556313 - DNA, 15 bp, Homo sapiens
tggtatattttaaag

SEQ ID NO: 1556314 - DNA, 15 bp, Homo sapiens
atggtatattttaaa

SEQ ID NO: 1556315 - DNA, 15 bp, Homo sapiens
aatggtatattttaa

SEQ ID NO: 1556316 - DNA, 15 bp, Homo sapiens
taatggtatatttta

SEQ ID NO: 1556317 - DNA, 15 bp, Homo sapiens
ctaatggtatatttt

SEQ ID NO: 1556318 - DNA, 15 bp, Homo sapiens
actaatggtatattt

SEQ ID NO: 1556319 - DNA, 15 bp, Homo sapiens
cactaatggtatatt

SEQ ID NO: 1556320 - DNA, 15 bp, Homo sapiens
ccactaatggtatat

SEQ ID NO: 1556321 - DNA, 15 bp, Homo sapiens
gccactaatggtata

SEQ ID NO: 1556322 - DNA, 15 bp, Homo sapiens
ggccactaatggtat

SEQ ID NO: 1556323 - DNA, 15 bp, Homo sapiens
tggccactaatggta

SEQ ID NO: 1556324 - DNA, 15 bp, Homo sapiens
ctggccactaatggt

SEQ ID NO: 1556325 - DNA, 15 bp, Homo sapiens
cctggccactaatgg

SEQ ID NO: 1556326 - DNA, 15 bp, Homo sapiens
tcctggccactaatg

SEQ ID NO: 1556327 - DNA, 15 bp, Homo sapiens
ctcctggccactaat

SEQ ID NO: 1556328 - DNA, 15 bp, Homo sapiens
actcctggccactaa

SEQ ID NO: 1556329 - DNA, 15 bp, Homo sapiens
cactcctggccacta

SEQ ID NO: 1556330 - DNA, 15 bp, Homo sapiens
ccactcctggccact

SEQ ID NO: 1556331 - DNA, 15 bp, Homo sapiens
accactcctggccac

SEQ ID NO: 1556332 - DNA, 15 bp, Homo sapiens
caccactcctggcca

SEQ ID NO: 1556333 - DNA, 15 bp, Homo sapiens
atgagccaccactcc

SEQ ID NO: 1556334 - DNA, 15 bp, Homo sapiens
tatgagccaccactc

SEQ ID NO: 1556335 - DNA, 15 bp, Homo sapiens
gtatgagccaccact

SEQ ID NO: 1556336 - DNA, 15 bp, Homo sapiens
ggtatgagccaccac

SEQ ID NO: 1556337 - DNA, 15 bp, Homo sapiens
aggtatgagccacca

SEQ ID NO: 1556338 - DNA, 15 bp, Homo sapiens
caggtatgagccacc

SEQ ID NO: 1556339 - DNA, 15 bp, Homo sapiens
ctacaggtatgagcc

SEQ ID NO: 1556340 - DNA, 15 bp, Homo sapiens
actacaggtatgagc

SEQ ID NO: 1556341 - DNA, 15 bp, Homo sapiens
gactacaggtatgag

SEQ ID NO: 1556342 - DNA, 15 bp, Homo sapiens
ggactacaggtatga

SEQ ID NO: 1556343 - DNA, 15 bp, Homo sapiens
gggactacaggtatg

SEQ ID NO: 1556344 - DNA, 15 bp, Homo sapiens
tgggactacaggtat

SEQ ID NO: 1556345 - DNA, 15 bp, Homo sapiens
acctgtcttggcctc

SEQ ID NO: 1556346 - DNA, 15 bp, Homo sapiens
cacctgtcttggcct

SEQ ID NO: 1556347 - DNA, 15 bp, Homo sapiens
ccacctgtcttggcc

SEQ ID NO: 1556348 - DNA, 15 bp, Homo sapiens
tccacctgtcttggc

SEQ ID NO: 1556349 - DNA, 15 bp, Homo sapiens
atccacctgtcttgg

SEQ ID NO: 1556350 - DNA, 15 bp, Homo sapiens
gatccacctgtcttg

SEQ ID NO: 1556351 - DNA, 15 bp, Homo sapiens
tgatccacctgtctt

SEQ ID NO: 1556352 - DNA, 15 bp, Homo sapiens
ctgatccacctgtct

SEQ ID NO: 1556353 - DNA, 15 bp, Homo sapiens
actgatccacctgtc

SEQ ID NO: 1556354 - DNA, 15 bp, Homo sapiens
aactgatccacctgt

SEQ ID NO: 1556355 - DNA, 15 bp, Homo sapiens
caactgatccacctg

SEQ ID NO: 1556356 - DNA, 15 bp, Homo sapiens
tcaactgatccacct

SEQ ID NO: 1556357 - DNA, 15 bp, Homo sapiens
ctcaactgatccacc

SEQ ID NO: 1556358 - DNA, 15 bp, Homo sapiens
gctcaactgatccac

SEQ ID NO: 1556359 - DNA, 15 bp, Homo sapiens
agctcaactgatcca

SEQ ID NO: 1556360 - DNA, 15 bp, Homo sapiens
gagctcaactgatcc

SEQ ID NO: 1556361 - DNA, 15 bp, Homo sapiens
tgagctcaactgatc

SEQ ID NO: 1556362 - DNA, 15 bp, Homo sapiens
ctgagctcaactgat

SEQ ID NO: 1556363 - DNA, 15 bp, Homo sapiens
cctgagctcaactga

SEQ ID NO: 1556364 - DNA, 15 bp, Homo sapiens
tcctgagctcaactg

SEQ ID NO: 1556365 - DNA, 15 bp, Homo sapiens
ctcctgagctcaact

SEQ ID NO: 1556366 - DNA, 15 bp, Homo sapiens
actcctgagctcaac

SEQ ID NO: 1556367 - DNA, 15 bp, Homo sapiens
taactcctgagctca

SEQ ID NO: 1556368 - DNA, 15 bp, Homo sapiens
ctaactcctgagctc

SEQ ID NO: 1556369 - DNA, 15 bp, Homo sapiens
tctaactcctgagct

SEQ ID NO: 1556370 - DNA, 15 bp, Homo sapiens
ctctaactcctgagc

SEQ ID NO: 1556371 - DNA, 15 bp, Homo sapiens
tctctaactcctgag

SEQ ID NO: 1556372 - DNA, 15 bp, Homo sapiens
ttctctaactcctga

SEQ ID NO: 1556373 - DNA, 15 bp, Homo sapiens
gttctctaactcctg

SEQ ID NO: 1556374 - DNA, 15 bp, Homo sapiens
tgttctctaactcct

SEQ ID NO: 1556375 - DNA, 15 bp, Homo sapiens
ctgttctctaactcc

SEQ ID NO: 1556376 - DNA, 15 bp, Homo sapiens
gctgttctctaactc

SEQ ID NO: 1556377 - DNA, 15 bp, Homo sapiens
ggctgttctctaact

SEQ ID NO: 1556378 - DNA, 15 bp, Homo sapiens
aggctgttctctaac

SEQ ID NO: 1556379 - DNA, 15 bp, Homo sapiens
caggctgttctctaa

SEQ ID NO: 1556380 - DNA, 15 bp, Homo sapiens
ccaggctgttctcta

SEQ ID NO: 1556381 - DNA, 15 bp, Homo sapiens
cccaggctgttctct

SEQ ID NO: 1556382 - DNA, 15 bp, Homo sapiens
gcccaggctgttctc

SEQ ID NO: 1556383 - DNA, 15 bp, Homo sapiens
tgcccaggctgttct

SEQ ID NO: 1556384 - DNA, 15 bp, Homo sapiens
ttgcccaggctgttc

SEQ ID NO: 1556385 - DNA, 15 bp, Homo sapiens
gttgcccaggctgtt

SEQ ID NO: 1556386 - DNA, 15 bp, Homo sapiens
agttgcccaggctgt

SEQ ID NO: 1556387 - DNA, 15 bp, Homo sapiens
aagttgcccaggctg

SEQ ID NO: 1556388 - DNA, 15 bp, Homo sapiens
caagttgcccaggct

SEQ ID NO: 1556389 - DNA, 15 bp, Homo sapiens
gcaagttgcccaggc

SEQ ID NO: 1556390 - DNA, 15 bp, Homo sapiens
tgcaagttgcccagg

SEQ ID NO: 1556391 - DNA, 15 bp, Homo sapiens
ttgcaagttgcccag

SEQ ID NO: 1556392 - DNA, 15 bp, Homo sapiens
tttgcaagttgccca

SEQ ID NO: 1556393 - DNA, 15 bp, Homo sapiens
ttttgcaagttgccc

SEQ ID NO: 1556394 - DNA, 15 bp, Homo sapiens
gttttgcaagttgcc

SEQ ID NO: 1556395 - DNA, 15 bp, Homo sapiens
ggttttgcaagttgc

SEQ ID NO: 1556396 - DNA, 15 bp, Homo sapiens
gggttttgcaagttg

SEQ ID NO: 1556397 - DNA, 15 bp, Homo sapiens
ggggttttgcaagtt

SEQ ID NO: 1556398 - DNA, 15 bp, Homo sapiens
tggggttttgcaagt

SEQ ID NO: 1556399 - DNA, 15 bp, Homo sapiens
atggggttttgcaag

SEQ ID NO: 1556400 - DNA, 15 bp, Homo sapiens
gatggggttttgcaa

SEQ ID NO: 1556401 - DNA, 15 bp, Homo sapiens
agatggggttttgca

SEQ ID NO: 1556402 - DNA, 15 bp, Homo sapiens
tgtagagatggggtt

SEQ ID NO: 1556403 - DNA, 15 bp, Homo sapiens
cttttttgtagagat

SEQ ID NO: 1556404 - DNA, 15 bp, Homo sapiens
ccttttttgtagaga

SEQ ID NO: 1556405 - DNA, 15 bp, Homo sapiens
gccttttttgtagag

SEQ ID NO: 1556406 - DNA, 15 bp, Homo sapiens
tgccttttttgtaga

SEQ ID NO: 1556407 - DNA, 15 bp, Homo sapiens
ttgccttttttgtag

SEQ ID NO: 1556408 - DNA, 15 bp, Homo sapiens
tttgccttttttgta

SEQ ID NO: 1556409 - DNA, 15 bp, Homo sapiens
ttttgccttttttgt

SEQ ID NO: 1556410 - DNA, 15 bp, Homo sapiens
tttttgccttttttg

SEQ ID NO: 1556411 - DNA, 15 bp, Homo sapiens
atttttgcctttttt

SEQ ID NO: 1556412 - DNA, 15 bp, Homo sapiens
aatttttgccttttt

SEQ ID NO: 1556413 - DNA, 15 bp, Homo sapiens
taatttttgcctttt

SEQ ID NO: 1556414 - DNA, 15 bp, Homo sapiens
ctaatttttgccttt

SEQ ID NO: 1556415 - DNA, 15 bp, Homo sapiens
gctaatttttgcctt

SEQ ID NO: 1556416 - DNA, 15 bp, Homo sapiens
agctaatttttgcct

SEQ ID NO: 1556417 - DNA, 15 bp, Homo sapiens
tagctaatttttgcc

SEQ ID NO: 1556418 - DNA, 15 bp, Homo sapiens
cctagctaatttttg

SEQ ID NO: 1556419 - DNA, 15 bp, Homo sapiens
ccaccatgcctagct

SEQ ID NO: 1556420 - DNA, 15 bp, Homo sapiens
tgccaccatgcctag

SEQ ID NO: 1556421 - DNA, 15 bp, Homo sapiens
atgccaccatgccta

SEQ ID NO: 1556422 - DNA, 15 bp, Homo sapiens
gtaggtgcatgccac

SEQ ID NO: 1556423 - DNA, 15 bp, Homo sapiens
tgtaggtgcatgcca

SEQ ID NO: 1556424 - DNA, 15 bp, Homo sapiens
ttgtaggtgcatgcc

SEQ ID NO: 1556425 - DNA, 15 bp, Homo sapiens
attgtaggtgcatgc

SEQ ID NO: 1556426 - DNA, 15 bp, Homo sapiens
gattgtaggtgcatg

SEQ ID NO: 1556427 - DNA, 15 bp, Homo sapiens
ggattgtaggtgcat

SEQ ID NO: 1556428 - DNA, 15 bp, Homo sapiens
gggattgtaggtgca

SEQ ID NO: 1556429 - DNA, 15 bp, Homo sapiens
tgggattgtaggtgc

SEQ ID NO: 1556430 - DNA, 15 bp, Homo sapiens
ctgggattgtaggtg

SEQ ID NO: 1556431 - DNA, 15 bp, Homo sapiens
gctgggattgtaggt

SEQ ID NO: 1556432 - DNA, 15 bp, Homo sapiens
agctgggattgtagg

SEQ ID NO: 1556433 - DNA, 15 bp, Homo sapiens
tagctgggattgtag

SEQ ID NO: 1556434 - DNA, 15 bp, Homo sapiens
gtagctgggattgta

SEQ ID NO: 1556435 - DNA, 15 bp, Homo sapiens
agtagctgggattgt

SEQ ID NO: 1556436 - DNA, 15 bp, Homo sapiens
gagtagctgggattg

SEQ ID NO: 1556437 - DNA, 15 bp, Homo sapiens
cacctcccgagtagc

SEQ ID NO: 1556438 - DNA, 15 bp, Homo sapiens
tcacctcccgagtag

SEQ ID NO: 1556439 - DNA, 15 bp, Homo sapiens
ctcacctcccgagta

SEQ ID NO: 1556440 - DNA, 15 bp, Homo sapiens
cctcacctcccgagt

SEQ ID NO: 1556441 - DNA, 15 bp, Homo sapiens
acctcacctcccgag

SEQ ID NO: 1556442 - DNA, 15 bp, Homo sapiens
tacctcacctcccga

SEQ ID NO: 1556443 - DNA, 15 bp, Homo sapiens
ctacctcacctcccg

SEQ ID NO: 1556444 - DNA, 15 bp, Homo sapiens
cctacctcacctccc

SEQ ID NO: 1556445 - DNA, 15 bp, Homo sapiens
tcctacctcacctcc

SEQ ID NO: 1556446 - DNA, 15 bp, Homo sapiens
ctcctacctcacctc

SEQ ID NO: 1556447 - DNA, 15 bp, Homo sapiens
cctcctacctcacct

SEQ ID NO: 1556448 - DNA, 15 bp, Homo sapiens
tcctcctacctcacc

SEQ ID NO: 1556449 - DNA, 15 bp, Homo sapiens
atcctcctacctcac

SEQ ID NO: 1556450 - DNA, 15 bp, Homo sapiens
aatcctcctacctca

SEQ ID NO: 1556451 - DNA, 15 bp, Homo sapiens
caatcctcctacctc

SEQ ID NO: 1556452 - DNA, 15 bp, Homo sapiens
aggctcaagcaatcc

SEQ ID NO: 1556453 - DNA, 15 bp, Homo sapiens
gagtgcagtggcgtg

SEQ ID NO: 1556454 - DNA, 15 bp, Homo sapiens
gggtcttgctctgtt

SEQ ID NO: 1556455 - DNA, 15 bp, Homo sapiens
ggagacagggtcttg

SEQ ID NO: 1556456 - DNA, 15 bp, Homo sapiens
acttttttttggaga

SEQ ID NO: 1556457 - DNA, 15 bp, Homo sapiens
cacttttttttggag

SEQ ID NO: 1556458 - DNA, 15 bp, Homo sapiens
acacttttttttgga

SEQ ID NO: 1556459 - DNA, 15 bp, Homo sapiens
cacacttttttttgg

SEQ ID NO: 1556460 - DNA, 15 bp, Homo sapiens
acacacttttttttg

SEQ ID NO: 1556461 - DNA, 15 bp, Homo sapiens
tacacactttttttt

SEQ ID NO: 1556462 - DNA, 15 bp, Homo sapiens
atacacacttttttt

SEQ ID NO: 1556463 - DNA, 15 bp, Homo sapiens
tatacacactttttt

SEQ ID NO: 1556464 - DNA, 15 bp, Homo sapiens
gtatacacacttttt

SEQ ID NO: 1556465 - DNA, 15 bp, Homo sapiens
tgtatacacactttt

SEQ ID NO: 1556466 - DNA, 15 bp, Homo sapiens
atgtatacacacttt

SEQ ID NO: 1556467 - DNA, 15 bp, Homo sapiens
tatgtatacacactt

SEQ ID NO: 1556468 - DNA, 15 bp, Homo sapiens
atatgtatacacact

SEQ ID NO: 1556469 - DNA, 15 bp, Homo sapiens
tatatgtatacacac

SEQ ID NO: 1556470 - DNA, 15 bp, Homo sapiens
atatatgtatacaca

SEQ ID NO: 1556471 - DNA, 15 bp, Homo sapiens
aatatatgtatacac

SEQ ID NO: 1556472 - DNA, 15 bp, Homo sapiens
taatatatgtataca

SEQ ID NO: 1556473 - DNA, 15 bp, Homo sapiens
gtaatatatgtatac

SEQ ID NO: 1556474 - DNA, 15 bp, Homo sapiens
tgtaatatatgtata

SEQ ID NO: 1556475 - DNA, 15 bp, Homo sapiens
atgtaatatatgtat

SEQ ID NO: 1556476 - DNA, 15 bp, Homo sapiens
tatgtaatatatgta

SEQ ID NO: 1556477 - DNA, 15 bp, Homo sapiens
gtatgtaatatatgt

SEQ ID NO: 1556478 - DNA, 15 bp, Homo sapiens
tgtatgtaatatatg

SEQ ID NO: 1556479 - DNA, 15 bp, Homo sapiens
gtgtatgtaatatat

SEQ ID NO: 1556480 - DNA, 15 bp, Homo sapiens
tgtgtatgtaatata

SEQ ID NO: 1556481 - DNA, 15 bp, Homo sapiens
gtgtgtatgtaatat

SEQ ID NO: 1556482 - DNA, 15 bp, Homo sapiens
tgtgtgtatgtaata

SEQ ID NO: 1556483 - DNA, 15 bp, Homo sapiens
atgtgtgtatgtaat

SEQ ID NO: 1556484 - DNA, 15 bp, Homo sapiens
tatgtgtgtatgtaa

SEQ ID NO: 1556485 - DNA, 15 bp, Homo sapiens
atatgtgtgtatgta

SEQ ID NO: 1556486 - DNA, 15 bp, Homo sapiens
tatatgtgtgtatgt

SEQ ID NO: 1556487 - DNA, 15 bp, Homo sapiens
atatatgtgtgtatg

SEQ ID NO: 1556488 - DNA, 15 bp, Homo sapiens
tatatatgtgtgtat

SEQ ID NO: 1556489 - DNA, 15 bp, Homo sapiens
atatatatgtgtgta

SEQ ID NO: 1556490 - DNA, 15 bp, Homo sapiens
catatatatgtgtgt

SEQ ID NO: 1556491 - DNA, 15 bp, Homo sapiens
acatatatatgtgtg

SEQ ID NO: 1556492 - DNA, 15 bp, Homo sapiens
tacatatatatgtgt

SEQ ID NO: 1556493 - DNA, 15 bp, Homo sapiens
ttacatatatatgtg

SEQ ID NO: 1556494 - DNA, 15 bp, Homo sapiens
attacatatatatgt

SEQ ID NO: 1556495 - DNA, 15 bp, Homo sapiens
cattacatatatatg

SEQ ID NO: 1556496 - DNA, 15 bp, Homo sapiens
acattacatatatat

SEQ ID NO: 1556497 - DNA, 15 bp, Homo sapiens
tacattacatatata

SEQ ID NO: 1556498 - DNA, 15 bp, Homo sapiens
atacattacatatat

SEQ ID NO: 1556499 - DNA, 15 bp, Homo sapiens
catacattacatata

SEQ ID NO: 1556500 - DNA, 15 bp, Homo sapiens
acatacattacatat

SEQ ID NO: 1556501 - DNA, 15 bp, Homo sapiens
cacatacattacata

SEQ ID NO: 1556502 - DNA, 15 bp, Homo sapiens
acacatacattacat

SEQ ID NO: 1556503 - DNA, 15 bp, Homo sapiens
tacacatacattaca

SEQ ID NO: 1556504 - DNA, 15 bp, Homo sapiens
atacacatacattac

SEQ ID NO: 1556505 - DNA, 15 bp, Homo sapiens
tatacacatacatta

SEQ ID NO: 1556506 - DNA, 15 bp, Homo sapiens
atatacacatacatt

SEQ ID NO: 1556507 - DNA, 15 bp, Homo sapiens
tttatatatatatat

SEQ ID NO: 1556508 - DNA, 15 bp, Homo sapiens
ctttatatatatata

SEQ ID NO: 1556509 - DNA, 15 bp, Homo sapiens
actttatatatatat

SEQ ID NO: 1556510 - DNA, 15 bp, Homo sapiens
cactttatatatata

SEQ ID NO: 1556511 - DNA, 15 bp, Homo sapiens
acactttatatatat

SEQ ID NO: 1556512 - DNA, 15 bp, Homo sapiens
cacactttatatata

SEQ ID NO: 1556513 - DNA, 15 bp, Homo sapiens
acacactttatatat

SEQ ID NO: 1556514 - DNA, 15 bp, Homo sapiens
cacacactttatata

SEQ ID NO: 1556515 - DNA, 15 bp, Homo sapiens
acacacactttatat

SEQ ID NO: 1556516 - DNA, 15 bp, Homo sapiens
cacacacactttata

SEQ ID NO: 1556517 - DNA, 15 bp, Homo sapiens
acacacacactttat

SEQ ID NO: 1556518 - DNA, 15 bp, Homo sapiens
cacacacacacttta

SEQ ID NO: 1556519 - DNA, 15 bp, Homo sapiens
acacacacacacttt

SEQ ID NO: 1556520 - DNA, 15 bp, Homo sapiens
gtgtacacacacaca

SEQ ID NO: 1556521 - DNA, 15 bp, Homo sapiens
tgtgtacacacacac

SEQ ID NO: 1556522 - DNA, 15 bp, Homo sapiens
gtgtgtacacacaca

SEQ ID NO: 1556523 - DNA, 15 bp, Homo sapiens
tgtgtgtacacacac

SEQ ID NO: 1556524 - DNA, 15 bp, Homo sapiens
atgtgtgtacacaca

SEQ ID NO: 1556525 - DNA, 15 bp, Homo sapiens
tatgtgtgtacacac

SEQ ID NO: 1556526 - DNA, 15 bp, Homo sapiens
ttatgtgtgtacaca

SEQ ID NO: 1556527 - DNA, 15 bp, Homo sapiens
tttatgtgtgtacac

SEQ ID NO: 1556528 - DNA, 15 bp, Homo sapiens
ttttatgtgtgtaca

SEQ ID NO: 1556529 - DNA, 15 bp, Homo sapiens
attttatgtgtgtac

SEQ ID NO: 1556530 - DNA, 15 bp, Homo sapiens
tattttatgtgtgta

SEQ ID NO: 1556531 - DNA, 15 bp, Homo sapiens
atattttatgtgtgt

SEQ ID NO: 1556532 - DNA, 15 bp, Homo sapiens
catattttatgtgtg

SEQ ID NO: 1556533 - DNA, 15 bp, Homo sapiens
acatattttatgtgt

SEQ ID NO: 1556534 - DNA, 15 bp, Homo sapiens
tacatattttatgtg

SEQ ID NO: 1556535 - DNA, 15 bp, Homo sapiens
ttacatattttatgt

SEQ ID NO: 1556536 - DNA, 15 bp, Homo sapiens
tttacatattttatg

SEQ ID NO: 1556537 - DNA, 15 bp, Homo sapiens
ttttacatattttat

SEQ ID NO: 1556538 - DNA, 15 bp, Homo sapiens
attttacatatttta

SEQ ID NO: 1556539 - DNA, 15 bp, Homo sapiens
gattttacatatttt

SEQ ID NO: 1556540 - DNA, 15 bp, Homo sapiens
ggattttacatattt

SEQ ID NO: 1556541 - DNA, 15 bp, Homo sapiens
tggattttacatatt

SEQ ID NO: 1556542 - DNA, 15 bp, Homo sapiens
ttggattttacatat

SEQ ID NO: 1556543 - DNA, 15 bp, Homo sapiens
gttggattttacata

SEQ ID NO: 1556544 - DNA, 15 bp, Homo sapiens
agttggattttacat

SEQ ID NO: 1556545 - DNA, 15 bp, Homo sapiens
gagttggattttaca

SEQ ID NO: 1556546 - DNA, 15 bp, Homo sapiens
ggagttggattttac

SEQ ID NO: 1556547 - DNA, 15 bp, Homo sapiens
tggagttggatttta

SEQ ID NO: 1556548 - DNA, 15 bp, Homo sapiens
ttggagttggatttt

SEQ ID NO: 1556549 - DNA, 15 bp, Homo sapiens
attggagttggattt

SEQ ID NO: 1556550 - DNA, 15 bp, Homo sapiens
aattggagttggatt

SEQ ID NO: 1556551 - DNA, 15 bp, Homo sapiens
taattggagttggat

SEQ ID NO: 1556552 - DNA, 15 bp, Homo sapiens
ttaattggagttgga

SEQ ID NO: 1556553 - DNA, 15 bp, Homo sapiens
cttaattggagttgg

SEQ ID NO: 1556554 - DNA, 15 bp, Homo sapiens
ccttaattggagttg

SEQ ID NO: 1556555 - DNA, 15 bp, Homo sapiens
accttaattggagtt

SEQ ID NO: 1556556 - DNA, 15 bp, Homo sapiens
aaccttaattggagt

SEQ ID NO: 1556557 - DNA, 15 bp, Homo sapiens
taaccttaattggag

SEQ ID NO: 1556558 - DNA, 15 bp, Homo sapiens
ttaaccttaattgga

SEQ ID NO: 1556559 - DNA, 15 bp, Homo sapiens
attaaccttaattgg

SEQ ID NO: 1556560 - DNA, 15 bp, Homo sapiens
tattaaccttaattg

SEQ ID NO: 1556561 - DNA, 15 bp, Homo sapiens
ttattaaccttaatt

SEQ ID NO: 1556562 - DNA, 15 bp, Homo sapiens
tttattaaccttaat

SEQ ID NO: 1556563 - DNA, 15 bp, Homo sapiens
atttattaaccttaa

SEQ ID NO: 1556564 - DNA, 15 bp, Homo sapiens
catttattaacctta

SEQ ID NO: 1556565 - DNA, 15 bp, Homo sapiens
acatttattaacctt

SEQ ID NO: 1556566 - DNA, 15 bp, Homo sapiens
aacatttattaacct

SEQ ID NO: 1556567 - DNA, 15 bp, Homo sapiens
taacatttattaacc

SEQ ID NO: 1556568 - DNA, 15 bp, Homo sapiens
ctaacatttattaac

SEQ ID NO: 1556569 - DNA, 15 bp, Homo sapiens
cctaacatttattaa

SEQ ID NO: 1556570 - DNA, 15 bp, Homo sapiens
tcctaacatttatta

SEQ ID NO: 1556571 - DNA, 15 bp, Homo sapiens
ctcctaacatttatt

SEQ ID NO: 1556572 - DNA, 15 bp, Homo sapiens
cctcctaacatttat

SEQ ID NO: 1556573 - DNA, 15 bp, Homo sapiens
ccctcctaacattta

SEQ ID NO: 1556574 - DNA, 15 bp, Homo sapiens
cccctcctaacattt

SEQ ID NO: 1556575 - DNA, 15 bp, Homo sapiens
acccctcctaacatt

SEQ ID NO: 1556576 - DNA, 15 bp, Homo sapiens
cacccctcctaacat

SEQ ID NO: 1556577 - DNA, 15 bp, Homo sapiens
gcacccctcctaaca

SEQ ID NO: 1556578 - DNA, 15 bp, Homo sapiens
agcacccctcctaac

SEQ ID NO: 1556579 - DNA, 15 bp, Homo sapiens
tagcacccctcctaa

SEQ ID NO: 1556580 - DNA, 15 bp, Homo sapiens
ttagcacccctccta

SEQ ID NO: 1556581 - DNA, 15 bp, Homo sapiens
attagcacccctcct

SEQ ID NO: 1556582 - DNA, 15 bp, Homo sapiens
cattagcacccctcc

SEQ ID NO: 1556583 - DNA, 15 bp, Homo sapiens
ccattagcacccctc

SEQ ID NO: 1556584 - DNA, 15 bp, Homo sapiens
cccattagcacccct

SEQ ID NO: 1556585 - DNA, 15 bp, Homo sapiens
ccccattagcacccc

SEQ ID NO: 1556586 - DNA, 15 bp, Homo sapiens
accccattagcaccc

SEQ ID NO: 1556587 - DNA, 15 bp, Homo sapiens
caccccattagcacc

SEQ ID NO: 1556588 - DNA, 15 bp, Homo sapiens
acaccccattagcac

SEQ ID NO: 1556589 - DNA, 15 bp, Homo sapiens
cacaccccattagca

SEQ ID NO: 1556590 - DNA, 15 bp, Homo sapiens
acacaccccattagc

SEQ ID NO: 1556591 - DNA, 15 bp, Homo sapiens
cacacaccccattag

SEQ ID NO: 1556592 - DNA, 15 bp, Homo sapiens
acacacaccccatta

SEQ ID NO: 1556593 - DNA, 15 bp, Homo sapiens
cacacacaccccatt

SEQ ID NO: 1556594 - DNA, 15 bp, Homo sapiens
acacacacaccccat

SEQ ID NO: 1556595 - DNA, 15 bp, Homo sapiens
cacacacacacccca

SEQ ID NO: 1556596 - DNA, 15 bp, Homo sapiens
acacacacacacccc

SEQ ID NO: 1556597 - DNA, 15 bp, Homo sapiens
cacacacacacaccc

SEQ ID NO: 1556598 - DNA, 15 bp, Homo sapiens
acgtgcacacacaca

SEQ ID NO: 1556599 - DNA, 15 bp, Homo sapiens
cacgtgcacacacac

SEQ ID NO: 1556600 - DNA, 15 bp, Homo sapiens
acacgtgcacacaca

SEQ ID NO: 1556601 - DNA, 15 bp, Homo sapiens
cacacgtgcacacac

SEQ ID NO: 1556602 - DNA, 15 bp, Homo sapiens
gcacacgtgcacaca

SEQ ID NO: 1556603 - DNA, 15 bp, Homo sapiens
tgcacacgtgcacac

SEQ ID NO: 1556604 - DNA, 15 bp, Homo sapiens
atgcacacgtgcaca

SEQ ID NO: 1556605 - DNA, 15 bp, Homo sapiens
catgcacacgtgcac

SEQ ID NO: 1556606 - DNA, 15 bp, Homo sapiens
acatgcacacgtgca

SEQ ID NO: 1556607 - DNA, 15 bp, Homo sapiens
cacatgcacacgtgc

SEQ ID NO: 1556608 - DNA, 15 bp, Homo sapiens
acacatgcacacgtg

SEQ ID NO: 1556609 - DNA, 15 bp, Homo sapiens
cacacatgcacacgt

SEQ ID NO: 1556610 - DNA, 15 bp, Homo sapiens
acacacatgcacacg

SEQ ID NO: 1556611 - DNA, 15 bp, Homo sapiens
tacacacacacatgc

SEQ ID NO: 1556612 - DNA, 15 bp, Homo sapiens
atacacacacacatg

SEQ ID NO: 1556613 - DNA, 15 bp, Homo sapiens
tatacacacacacat

SEQ ID NO: 1556614 - DNA, 15 bp, Homo sapiens
tcatatatatataca

SEQ ID NO: 1556615 - DNA, 15 bp, Homo sapiens
ttcatatatatatac

SEQ ID NO: 1556616 - DNA, 15 bp, Homo sapiens
gttcatatatatata

SEQ ID NO: 1556617 - DNA, 15 bp, Homo sapiens
tgttcatatatatat

SEQ ID NO: 1556618 - DNA, 15 bp, Homo sapiens
atgttcatatatata

SEQ ID NO: 1556619 - DNA, 15 bp, Homo sapiens
catgttcatatatat

SEQ ID NO: 1556620 - DNA, 15 bp, Homo sapiens
ccatgttcatatata

SEQ ID NO: 1556621 - DNA, 15 bp, Homo sapiens
cccatgttcatatat

SEQ ID NO: 1556622 - DNA, 15 bp, Homo sapiens
gcccatgttcatata

SEQ ID NO: 1556623 - DNA, 15 bp, Homo sapiens
tgcccatgttcatat

SEQ ID NO: 1556624 - DNA, 15 bp, Homo sapiens
ttgcccatgttcata

SEQ ID NO: 1556625 - DNA, 15 bp, Homo sapiens
tttgcccatgttcat

SEQ ID NO: 1556626 - DNA, 15 bp, Homo sapiens
atttgcccatgttca

SEQ ID NO: 1556627 - DNA, 15 bp, Homo sapiens
aatttgcccatgttc

SEQ ID NO: 1556628 - DNA, 15 bp, Homo sapiens
taatttgcccatgtt

SEQ ID NO: 1556629 - DNA, 15 bp, Homo sapiens
gtaatttgcccatgt

SEQ ID NO: 1556630 - DNA, 15 bp, Homo sapiens
agtaatttgcccatg

SEQ ID NO: 1556631 - DNA, 15 bp, Homo sapiens
aagtaatttgcccat

SEQ ID NO: 1556632 - DNA, 15 bp, Homo sapiens
gaagtaatttgccca

SEQ ID NO: 1556633 - DNA, 15 bp, Homo sapiens
agaagtaatttgccc

SEQ ID NO: 1556634 - DNA, 15 bp, Homo sapiens
aagaagtaatttgcc

SEQ ID NO: 1556635 - DNA, 15 bp, Homo sapiens
taagaagtaatttgc

SEQ ID NO: 1556636 - DNA, 15 bp, Homo sapiens
ctaagaagtaatttg

SEQ ID NO: 1556637 - DNA, 15 bp, Homo sapiens
actaagaagtaattt

SEQ ID NO: 1556638 - DNA, 15 bp, Homo sapiens
aactaagaagtaatt

SEQ ID NO: 1556639 - DNA, 15 bp, Homo sapiens
gaactaagaagtaat

SEQ ID NO: 1556640 - DNA, 15 bp, Homo sapiens
ggaactaagaagtaa

SEQ ID NO: 1556641 - DNA, 15 bp, Homo sapiens
aggaactaagaagta

SEQ ID NO: 1556642 - DNA, 15 bp, Homo sapiens
aaggaactaagaagt

SEQ ID NO: 1556643 - DNA, 15 bp, Homo sapiens
aaaggaactaagaag

SEQ ID NO: 1556644 - DNA, 15 bp, Homo sapiens
gaaaggaactaagaa

SEQ ID NO: 1556645 - DNA, 15 bp, Homo sapiens
tagaaaggaactaag

SEQ ID NO: 1556646 - DNA, 15 bp, Homo sapiens
ttagaaaggaactaa

SEQ ID NO: 1556647 - DNA, 15 bp, Homo sapiens
attagaaaggaacta

SEQ ID NO: 1556648 - DNA, 15 bp, Homo sapiens
aattagaaaggaact

SEQ ID NO: 1556649 - DNA, 15 bp, Homo sapiens
aaattagaaaggaac

SEQ ID NO: 1556650 - DNA, 15 bp, Homo sapiens
caaattagaaaggaa

SEQ ID NO: 1556651 - DNA, 15 bp, Homo sapiens
acaaattagaaagga

SEQ ID NO: 1556652 - DNA, 15 bp, Homo sapiens
tacaaattagaaagg

SEQ ID NO: 1556653 - DNA, 15 bp, Homo sapiens
ttacaaattagaaag

SEQ ID NO: 1556654 - DNA, 15 bp, Homo sapiens
tttacaaattagaaa

SEQ ID NO: 1556655 - DNA, 15 bp, Homo sapiens
ttttacaaattagaa

SEQ ID NO: 1556656 - DNA, 15 bp, Homo sapiens
attttacaaattaga

SEQ ID NO: 1556657 - DNA, 15 bp, Homo sapiens
cattttacaaattag

SEQ ID NO: 1556658 - DNA, 15 bp, Homo sapiens
ccattttacaaatta

SEQ ID NO: 1556659 - DNA, 15 bp, Homo sapiens
tccattttacaaatt

SEQ ID NO: 1556660 - DNA, 15 bp, Homo sapiens
ctccattttacaaat

SEQ ID NO: 1556661 - DNA, 15 bp, Homo sapiens
tctccattttacaaa

SEQ ID NO: 1556662 - DNA, 15 bp, Homo sapiens
atctccattttacaa

SEQ ID NO: 1556663 - DNA, 15 bp, Homo sapiens
gatctccattttaca

SEQ ID NO: 1556664 - DNA, 15 bp, Homo sapiens
agatctccattttac

SEQ ID NO: 1556665 - DNA, 15 bp, Homo sapiens
tagatctccatttta

SEQ ID NO: 1556666 - DNA, 15 bp, Homo sapiens
ttagatctccatttt

SEQ ID NO: 1556667 - DNA, 15 bp, Homo sapiens
attagatctccattt

SEQ ID NO: 1556668 - DNA, 15 bp, Homo sapiens
aattagatctccatt

SEQ ID NO: 1556669 - DNA, 15 bp, Homo sapiens
caattagatctccat

SEQ ID NO: 1556670 - DNA, 15 bp, Homo sapiens
ccaattagatctcca

SEQ ID NO: 1556671 - DNA, 15 bp, Homo sapiens
cccaattagatctcc

SEQ ID NO: 1556672 - DNA, 15 bp, Homo sapiens
ccccaattagatctc

SEQ ID NO: 1556673 - DNA, 15 bp, Homo sapiens
accccaattagatct

SEQ ID NO: 1556674 - DNA, 15 bp, Homo sapiens
aaccccaattagatc

SEQ ID NO: 1556675 - DNA, 15 bp, Homo sapiens
caaccccaattagat

SEQ ID NO: 1556676 - DNA, 15 bp, Homo sapiens
ccaaccccaattaga

SEQ ID NO: 1556677 - DNA, 15 bp, Homo sapiens
tccaaccccaattag

SEQ ID NO: 1556678 - DNA, 15 bp, Homo sapiens
atccaaccccaatta

SEQ ID NO: 1556679 - DNA, 15 bp, Homo sapiens
aatccaaccccaatt

SEQ ID NO: 1556680 - DNA, 15 bp, Homo sapiens
aaatccaaccccaat

SEQ ID NO: 1556681 - DNA, 15 bp, Homo sapiens
aaaatccaaccccaa

SEQ ID NO: 1556682 - DNA, 15 bp, Homo sapiens
taaaatccaacccca

SEQ ID NO: 1556683 - DNA, 15 bp, Homo sapiens
ctaaaatccaacccc

SEQ ID NO: 1556684 - DNA, 15 bp, Homo sapiens
actaaaatccaaccc

SEQ ID NO: 1556685 - DNA, 15 bp, Homo sapiens
aactaaaatccaacc

SEQ ID NO: 1556686 - DNA, 15 bp, Homo sapiens
gaactaaaatccaac

SEQ ID NO: 1556687 - DNA, 15 bp, Homo sapiens
tgaactaaaatccaa

SEQ ID NO: 1556688 - DNA, 15 bp, Homo sapiens
atgaactaaaatcca

SEQ ID NO: 1556689 - DNA, 15 bp, Homo sapiens
tatgaactaaaatcc

SEQ ID NO: 1556690 - DNA, 15 bp, Homo sapiens
ctatgaactaaaatc

SEQ ID NO: 1556691 - DNA, 15 bp, Homo sapiens
tctatgaactaaaat

SEQ ID NO: 1556692 - DNA, 15 bp, Homo sapiens
ctctatgaactaaaa

SEQ ID NO: 1556693 - DNA, 15 bp, Homo sapiens
tctctatgaactaaa

SEQ ID NO: 1556694 - DNA, 15 bp, Homo sapiens
ttctctatgaactaa

SEQ ID NO: 1556695 - DNA, 15 bp, Homo sapiens
attctctatgaacta

SEQ ID NO: 1556696 - DNA, 15 bp, Homo sapiens
tattctctatgaact

SEQ ID NO: 1556697 - DNA, 15 bp, Homo sapiens
ctattctctatgaac

SEQ ID NO: 1556698 - DNA, 15 bp, Homo sapiens
tctattctctatgaa

SEQ ID NO: 1556699 - DNA, 15 bp, Homo sapiens
ctctattctctatga

SEQ ID NO: 1556700 - DNA, 15 bp, Homo sapiens
cctctattctctatg

SEQ ID NO: 1556701 - DNA, 15 bp, Homo sapiens
tcctctattctctat

SEQ ID NO: 1556702 - DNA, 15 bp, Homo sapiens
ctcctctattctcta

SEQ ID NO: 1556703 - DNA, 15 bp, Homo sapiens
tctcctctattctct

SEQ ID NO: 1556704 - DNA, 15 bp, Homo sapiens
ctctcctctattctc

SEQ ID NO: 1556705 - DNA, 15 bp, Homo sapiens
tctctcctctattct

SEQ ID NO: 1556706 - DNA, 15 bp, Homo sapiens
ttctctcctctattc

SEQ ID NO: 1556707 - DNA, 15 bp, Homo sapiens
attctctcctctatt

SEQ ID NO: 1556708 - DNA, 15 bp, Homo sapiens
tattctctcctctat

SEQ ID NO: 1556709 - DNA, 15 bp, Homo sapiens
ttattctctcctcta

SEQ ID NO: 1556710 - DNA, 15 bp, Homo sapiens
tttattctctcctct

SEQ ID NO: 1556711 - DNA, 15 bp, Homo sapiens
ttttattctctcctc

SEQ ID NO: 1556712 - DNA, 15 bp, Homo sapiens
attttattctctcct

SEQ ID NO: 1556713 - DNA, 15 bp, Homo sapiens
tattttattctctcc

SEQ ID NO: 1556714 - DNA, 15 bp, Homo sapiens
ctattttattctctc

SEQ ID NO: 1556715 - DNA, 15 bp, Homo sapiens
actattttattctct

SEQ ID NO: 1556716 - DNA, 15 bp, Homo sapiens
tactattttattctc

SEQ ID NO: 1556717 - DNA, 15 bp, Homo sapiens
atactattttattct

SEQ ID NO: 1556718 - DNA, 15 bp, Homo sapiens
catactattttattc

SEQ ID NO: 1556719 - DNA, 15 bp, Homo sapiens
tcatactattttatt

SEQ ID NO: 1556720 - DNA, 15 bp, Homo sapiens
ttcatactattttat

SEQ ID NO: 1556721 - DNA, 15 bp, Homo sapiens
tttcatactatttta

SEQ ID NO: 1556722 - DNA, 15 bp, Homo sapiens
atttcatactatttt

SEQ ID NO: 1556723 - DNA, 15 bp, Homo sapiens
aatttcatactattt

SEQ ID NO: 1556724 - DNA, 15 bp, Homo sapiens
taatttcatactatt

SEQ ID NO: 1556725 - DNA, 15 bp, Homo sapiens
gtaatttcatactat

SEQ ID NO: 1556726 - DNA, 15 bp, Homo sapiens
cgtaatttcatacta

SEQ ID NO: 1556727 - DNA, 15 bp, Homo sapiens
acgtaatttcatact

SEQ ID NO: 1556728 - DNA, 15 bp, Homo sapiens
gacgtaatttcatac

SEQ ID NO: 1556729 - DNA, 15 bp, Homo sapiens
ggacgtaatttcata

SEQ ID NO: 1556730 - DNA, 15 bp, Homo sapiens
gggacgtaatttcat

SEQ ID NO: 1556731 - DNA, 15 bp, Homo sapiens
agggacgtaatttca

SEQ ID NO: 1556732 - DNA, 15 bp, Homo sapiens
aagggacgtaatttc

SEQ ID NO: 1556733 - DNA, 15 bp, Homo sapiens
aaagggacgtaattt

SEQ ID NO: 1556734 - DNA, 15 bp, Homo sapiens
aaaagggacgtaatt

SEQ ID NO: 1556735 - DNA, 15 bp, Homo sapiens
caaaagggacgtaat

SEQ ID NO: 1556736 - DNA, 15 bp, Homo sapiens
acaaaagggacgtaa

SEQ ID NO: 1556737 - DNA, 15 bp, Homo sapiens
gacaaaagggacgta

SEQ ID NO: 1556738 - DNA, 15 bp, Homo sapiens
agacaaaagggacgt

SEQ ID NO: 1556739 - DNA, 15 bp, Homo sapiens
aagacaaaagggacg

SEQ ID NO: 1556740 - DNA, 15 bp, Homo sapiens
aaagacaaaagggac

SEQ ID NO: 1556741 - DNA, 15 bp, Homo sapiens
caaagacaaaaggga

SEQ ID NO: 1556742 - DNA, 15 bp, Homo sapiens
ccaaagacaaaaggg

SEQ ID NO: 1556743 - DNA, 15 bp, Homo sapiens
tccaaagacaaaagg

SEQ ID NO: 1556744 - DNA, 15 bp, Homo sapiens
atccaaagacaaaag

SEQ ID NO: 1556745 - DNA, 15 bp, Homo sapiens
tatccaaagacaaaa

SEQ ID NO: 1556746 - DNA, 15 bp, Homo sapiens
ttatccaaagacaaa

SEQ ID NO: 1556747 - DNA, 15 bp, Homo sapiens
tttatccaaagacaa

SEQ ID NO: 1556748 - DNA, 15 bp, Homo sapiens
ttttatccaaagaca

SEQ ID NO: 1556749 - DNA, 15 bp, Homo sapiens
tttttatccaaagac

SEQ ID NO: 1556750 - DNA, 15 bp, Homo sapiens
atttttatccaaaga

SEQ ID NO: 1556751 - DNA, 15 bp, Homo sapiens
catttttatccaaag

SEQ ID NO: 1556752 - DNA, 15 bp, Homo sapiens
ccatttttatccaaa

SEQ ID NO: 1556753 - DNA, 15 bp, Homo sapiens
cccatttttatccaa

SEQ ID NO: 1556754 - DNA, 15 bp, Homo sapiens
tcccatttttatcca

SEQ ID NO: 1556755 - DNA, 15 bp, Homo sapiens
ttcccatttttatcc

SEQ ID NO: 1556756 - DNA, 15 bp, Homo sapiens
cttcccatttttatc

SEQ ID NO: 1556757 - DNA, 15 bp, Homo sapiens
ccttcccatttttat

SEQ ID NO: 1556758 - DNA, 15 bp, Homo sapiens
cccttcccattttta

SEQ ID NO: 1556759 - DNA, 15 bp, Homo sapiens
acccttcccattttt

SEQ ID NO: 1556760 - DNA, 15 bp, Homo sapiens
gacccttcccatttt

SEQ ID NO: 1556761 - DNA, 15 bp, Homo sapiens
agacccttcccattt

SEQ ID NO: 1556762 - DNA, 15 bp, Homo sapiens
tagacccttcccatt

SEQ ID NO: 1556763 - DNA, 15 bp, Homo sapiens
ctagacccttcccat

SEQ ID NO: 1556764 - DNA, 15 bp, Homo sapiens
cctagacccttccca

SEQ ID NO: 1556765 - DNA, 15 bp, Homo sapiens
tcctagacccttccc

SEQ ID NO: 1556766 - DNA, 15 bp, Homo sapiens
ctcctagacccttcc

SEQ ID NO: 1556767 - DNA, 15 bp, Homo sapiens
tctcctagacccttc

SEQ ID NO: 1556768 - DNA, 15 bp, Homo sapiens
ttctcctagaccctt

SEQ ID NO: 1556769 - DNA, 15 bp, Homo sapiens
tttctcctagaccct

SEQ ID NO: 1556770 - DNA, 15 bp, Homo sapiens
ttttctcctagaccc

SEQ ID NO: 1556771 - DNA, 15 bp, Homo sapiens
cttttctcctagacc

SEQ ID NO: 1556772 - DNA, 15 bp, Homo sapiens
tcttttctcctagac

SEQ ID NO: 1556773 - DNA, 15 bp, Homo sapiens
ctcttttctcctaga

SEQ ID NO: 1556774 - DNA, 15 bp, Homo sapiens
cctcttttctcctag

SEQ ID NO: 1556775 - DNA, 15 bp, Homo sapiens
ccctcttttctccta

SEQ ID NO: 1556776 - DNA, 15 bp, Homo sapiens
cccctcttttctcct

SEQ ID NO: 1556777 - DNA, 15 bp, Homo sapiens
tcccctcttttctcc

SEQ ID NO: 1556778 - DNA, 15 bp, Homo sapiens
ttcccctcttttctc

SEQ ID NO: 1556779 - DNA, 15 bp, Homo sapiens
attcccctcttttct

SEQ ID NO: 1556780 - DNA, 15 bp, Homo sapiens
cattcccctcttttc

SEQ ID NO: 1556781 - DNA, 15 bp, Homo sapiens
acattcccctctttt

SEQ ID NO: 1556782 - DNA, 15 bp, Homo sapiens
aacattcccctcttt

SEQ ID NO: 1556783 - DNA, 15 bp, Homo sapiens
aaacattcccctctt

SEQ ID NO: 1556784 - DNA, 15 bp, Homo sapiens
aaaacattcccctct

SEQ ID NO: 1556785 - DNA, 15 bp, Homo sapiens
aaaaacattcccctc

SEQ ID NO: 1556786 - DNA, 15 bp, Homo sapiens
taaaaacattcccct

SEQ ID NO: 1556787 - DNA, 15 bp, Homo sapiens
ttaaaaacattcccc

SEQ ID NO: 1556788 - DNA, 15 bp, Homo sapiens
tttaaaaacattccc

SEQ ID NO: 1556789 - DNA, 15 bp, Homo sapiens
cttttaaaaacattc

SEQ ID NO: 1556790 - DNA, 15 bp, Homo sapiens
tcttttaaaaacatt

SEQ ID NO: 1556791 - DNA, 15 bp, Homo sapiens
ttcttttaaaaacat

SEQ ID NO: 1556792 - DNA, 15 bp, Homo sapiens
attcttttaaaaaca

SEQ ID NO: 1556793 - DNA, 15 bp, Homo sapiens
cattcttttaaaaac

SEQ ID NO: 1556794 - DNA, 15 bp, Homo sapiens
acattcttttaaaaa

SEQ ID NO: 1556795 - DNA, 15 bp, Homo sapiens
cacattcttttaaaa

SEQ ID NO: 1556796 - DNA, 15 bp, Homo sapiens
acacattcttttaaa

SEQ ID NO: 1556797 - DNA, 15 bp, Homo sapiens
tacacattcttttaa

SEQ ID NO: 1556798 - DNA, 15 bp, Homo sapiens
atacacattctttta

SEQ ID NO: 1556799 - DNA, 15 bp, Homo sapiens
tatacacattctttt

SEQ ID NO: 1556800 - DNA, 15 bp, Homo sapiens
atatacacattcttt

SEQ ID NO: 1556801 - DNA, 15 bp, Homo sapiens
tatatacacattctt

SEQ ID NO: 1556802 - DNA, 15 bp, Homo sapiens
gtatatacacattct

SEQ ID NO: 1556803 - DNA, 15 bp, Homo sapiens
tgtatatacacattc

SEQ ID NO: 1556804 - DNA, 15 bp, Homo sapiens
ctgtatatacacatt

SEQ ID NO: 1556805 - DNA, 15 bp, Homo sapiens
actgtatatacacat

SEQ ID NO: 1556806 - DNA, 15 bp, Homo sapiens
cactgtatatacaca

SEQ ID NO: 1556807 - DNA, 15 bp, Homo sapiens
tcactgtatatacac

SEQ ID NO: 1556808 - DNA, 15 bp, Homo sapiens
ctcactgtatataca

SEQ ID NO: 1556809 - DNA, 15 bp, Homo sapiens
tctcactgtatatac

SEQ ID NO: 1556810 - DNA, 15 bp, Homo sapiens
atctcactgtatata

SEQ ID NO: 1556811 - DNA, 15 bp, Homo sapiens
aatctcactgtatat

SEQ ID NO: 1556812 - DNA, 15 bp, Homo sapiens
aaatctcactgtata

SEQ ID NO: 1556813 - DNA, 15 bp, Homo sapiens
caaatctcactgtat

SEQ ID NO: 1556814 - DNA, 15 bp, Homo sapiens
gcaaatctcactgta

SEQ ID NO: 1556815 - DNA, 15 bp, Homo sapiens
agcaaatctcactgt

SEQ ID NO: 1556816 - DNA, 15 bp, Homo sapiens
aagcaaatctcactg

SEQ ID NO: 1556817 - DNA, 15 bp, Homo sapiens
caagcaaatctcact

SEQ ID NO: 1556818 - DNA, 15 bp, Homo sapiens
tcaagcaaatctcac

SEQ ID NO: 1556819 - DNA, 15 bp, Homo sapiens
ttcaagcaaatctca

SEQ ID NO: 1556820 - DNA, 15 bp, Homo sapiens
cttcaagcaaatctc

SEQ ID NO: 1556821 - DNA, 15 bp, Homo sapiens
acttcaagcaaatct

SEQ ID NO: 1556822 - DNA, 15 bp, Homo sapiens
cacttcaagcaaatc

SEQ ID NO: 1556823 - DNA, 15 bp, Homo sapiens
tcacttcaagcaaat

SEQ ID NO: 1556824 - DNA, 15 bp, Homo sapiens
ttcacttcaagcaaa

SEQ ID NO: 1556825 - DNA, 15 bp, Homo sapiens
tttcacttcaagcaa

SEQ ID NO: 1556826 - DNA, 15 bp, Homo sapiens
atttcacttcaagca

SEQ ID NO: 1556827 - DNA, 15 bp, Homo sapiens
aatttcacttcaagc

SEQ ID NO: 1556828 - DNA, 15 bp, Homo sapiens
taatttcacttcaag

SEQ ID NO: 1556829 - DNA, 15 bp, Homo sapiens
ttaatttcacttcaa

SEQ ID NO: 1556830 - DNA, 15 bp, Homo sapiens
gttaatttcacttca

SEQ ID NO: 1556831 - DNA, 15 bp, Homo sapiens
agttaatttcacttc

SEQ ID NO: 1556832 - DNA, 15 bp, Homo sapiens
cagttaatttcactt

SEQ ID NO: 1556833 - DNA, 15 bp, Homo sapiens
tcagttaatttcact

SEQ ID NO: 1556834 - DNA, 15 bp, Homo sapiens
ttcagttaatttcac

SEQ ID NO: 1556835 - DNA, 15 bp, Homo sapiens
gttcagttaatttca

SEQ ID NO: 1556836 - DNA, 15 bp, Homo sapiens
agttcagttaatttc

SEQ ID NO: 1556837 - DNA, 15 bp, Homo sapiens
cagttcagttaattt

SEQ ID NO: 1556838 - DNA, 15 bp, Homo sapiens
acagttcagttaatt

SEQ ID NO: 1556839 - DNA, 15 bp, Homo sapiens
cacagttcagttaat

SEQ ID NO: 1556840 - DNA, 15 bp, Homo sapiens
ccacagttcagttaa

SEQ ID NO: 1556841 - DNA, 15 bp, Homo sapiens
cccacagttcagtta

SEQ ID NO: 1556842 - DNA, 15 bp, Homo sapiens
acccacagttcagtt

SEQ ID NO: 1556843 - DNA, 15 bp, Homo sapiens
tacccacagttcagt

SEQ ID NO: 1556844 - DNA, 15 bp, Homo sapiens
gtacccacagttcag

SEQ ID NO: 1556845 - DNA, 15 bp, Homo sapiens
tgtacccacagttca

SEQ ID NO: 1556846 - DNA, 15 bp, Homo sapiens
ttgtacccacagttc

SEQ ID NO: 1556847 - DNA, 15 bp, Homo sapiens
tttgtacccacagtt

SEQ ID NO: 1556848 - DNA, 15 bp, Homo sapiens
ctttgtacccacagt

SEQ ID NO: 1556849 - DNA, 15 bp, Homo sapiens
tctttgtacccacag

SEQ ID NO: 1556850 - DNA, 15 bp, Homo sapiens
ttctttgtacccaca

SEQ ID NO: 1556851 - DNA, 15 bp, Homo sapiens
gttctttgtacccac

SEQ ID NO: 1556852 - DNA, 15 bp, Homo sapiens
tgttctttgtaccca

SEQ ID NO: 1556853 - DNA, 15 bp, Homo sapiens
ctgttctttgtaccc

SEQ ID NO: 1556854 - DNA, 15 bp, Homo sapiens
cctgttctttgtacc

SEQ ID NO: 1556855 - DNA, 15 bp, Homo sapiens
tcctgttctttgtac

SEQ ID NO: 1556856 - DNA, 15 bp, Homo sapiens
atcctgttctttgta

SEQ ID NO: 1556857 - DNA, 15 bp, Homo sapiens
aatcctgttctttgt

SEQ ID NO: 1556858 - DNA, 15 bp, Homo sapiens
taatcctgttctttg

SEQ ID NO: 1556859 - DNA, 15 bp, Homo sapiens
ataatcctgttcttt

SEQ ID NO: 1556860 - DNA, 15 bp, Homo sapiens
cataatcctgttctt

SEQ ID NO: 1556861 - DNA, 15 bp, Homo sapiens
ccataatcctgttct

SEQ ID NO: 1556862 - DNA, 15 bp, Homo sapiens
accataatcctgttc

SEQ ID NO: 1556863 - DNA, 15 bp, Homo sapiens
aaccataatcctgtt

SEQ ID NO: 1556864 - DNA, 15 bp, Homo sapiens
aaaccataatcctgt

SEQ ID NO: 1556865 - DNA, 15 bp, Homo sapiens
aaaaccataatcctg

SEQ ID NO: 1556866 - DNA, 15 bp, Homo sapiens
taaaaccataatcct

SEQ ID NO: 1556867 - DNA, 15 bp, Homo sapiens
ttaaaaccataatcc

SEQ ID NO: 1556868 - DNA, 15 bp, Homo sapiens
cttaaaaccataatc

SEQ ID NO: 1556869 - DNA, 15 bp, Homo sapiens
acttaaaaccataat

SEQ ID NO: 1556870 - DNA, 15 bp, Homo sapiens
cacttaaaaccataa

SEQ ID NO: 1556871 - DNA, 15 bp, Homo sapiens
acacttaaaaccata

SEQ ID NO: 1556872 - DNA, 15 bp, Homo sapiens
tacacttaaaaccat

SEQ ID NO: 1556873 - DNA, 15 bp, Homo sapiens
ttacacttaaaacca

SEQ ID NO: 1556874 - DNA, 15 bp, Homo sapiens
tttacacttaaaacc

SEQ ID NO: 1556875 - DNA, 15 bp, Homo sapiens
ttttacacttaaaac

SEQ ID NO: 1556876 - DNA, 15 bp, Homo sapiens
tttttacacttaaaa

SEQ ID NO: 1556877 - DNA, 15 bp, Homo sapiens
ctttttacacttaaa

SEQ ID NO: 1556878 - DNA, 15 bp, Homo sapiens
tctttttacacttaa

SEQ ID NO: 1556879 - DNA, 15 bp, Homo sapiens
atctttttacactta

SEQ ID NO: 1556880 - DNA, 15 bp, Homo sapiens
tatctttttacactt

SEQ ID NO: 1556881 - DNA, 15 bp, Homo sapiens
gtatctttttacact

SEQ ID NO: 1556882 - DNA, 15 bp, Homo sapiens
agtatctttttacac

SEQ ID NO: 1556883 - DNA, 15 bp, Homo sapiens
aagtatctttttaca

SEQ ID NO: 1556884 - DNA, 15 bp, Homo sapiens
caagtatctttttac

SEQ ID NO: 1556885 - DNA, 15 bp, Homo sapiens
ccaagtatcttttta

SEQ ID NO: 1556886 - DNA, 15 bp, Homo sapiens
accaagtatcttttt

SEQ ID NO: 1556887 - DNA, 15 bp, Homo sapiens
gaccaagtatctttt

SEQ ID NO: 1556888 - DNA, 15 bp, Homo sapiens
agaccaagtatcttt

SEQ ID NO: 1556889 - DNA, 15 bp, Homo sapiens
tagaccaagtatctt

SEQ ID NO: 1556890 - DNA, 15 bp, Homo sapiens
ttagaccaagtatct

SEQ ID NO: 1556891 - DNA, 15 bp, Homo sapiens
tttagaccaagtatc

SEQ ID NO: 1556892 - DNA, 15 bp, Homo sapiens
gtttagaccaagtat

SEQ ID NO: 1556893 - DNA, 15 bp, Homo sapiens
tgtttagaccaagta

SEQ ID NO: 1556894 - DNA, 15 bp, Homo sapiens
atgtttagaccaagt

SEQ ID NO: 1556895 - DNA, 15 bp, Homo sapiens
aatgtttagaccaag

SEQ ID NO: 1556896 - DNA, 15 bp, Homo sapiens
taatgtttagaccaa

SEQ ID NO: 1556897 - DNA, 15 bp, Homo sapiens
ataatgtttagacca

SEQ ID NO: 1556898 - DNA, 15 bp, Homo sapiens
aataatgtttagacc

SEQ ID NO: 1556899 - DNA, 15 bp, Homo sapiens
taataatgtttagac

SEQ ID NO: 1556900 - DNA, 15 bp, Homo sapiens
ctaataatgtttaga

SEQ ID NO: 1556901 - DNA, 15 bp, Homo sapiens
actaataatgtttag

SEQ ID NO: 1556902 - DNA, 15 bp, Homo sapiens
aactaataatgttta

SEQ ID NO: 1556903 - DNA, 15 bp, Homo sapiens
gaactaataatgttt

SEQ ID NO: 1556904 - DNA, 15 bp, Homo sapiens
tgaactaataatgtt

SEQ ID NO: 1556905 - DNA, 15 bp, Homo sapiens
ctgaactaataatgt

SEQ ID NO: 1556906 - DNA, 15 bp, Homo sapiens
actgaactaataatg

SEQ ID NO: 1556907 - DNA, 15 bp, Homo sapiens
gactgaactaataat

SEQ ID NO: 1556908 - DNA, 15 bp, Homo sapiens
agactgaactaataa

SEQ ID NO: 1556909 - DNA, 15 bp, Homo sapiens
tagactgaactaata

SEQ ID NO: 1556910 - DNA, 15 bp, Homo sapiens
gtagactgaactaat

SEQ ID NO: 1556911 - DNA, 15 bp, Homo sapiens
ggtagactgaactaa

SEQ ID NO: 1556912 - DNA, 15 bp, Homo sapiens
tggtagactgaacta

SEQ ID NO: 1556913 - DNA, 15 bp, Homo sapiens
ctggtagactgaact

SEQ ID NO: 1556914 - DNA, 15 bp, Homo sapiens
tctggtagactgaac

SEQ ID NO: 1556915 - DNA, 15 bp, Homo sapiens
atctggtagactgaa

SEQ ID NO: 1556916 - DNA, 15 bp, Homo sapiens
catctggtagactga

SEQ ID NO: 1556917 - DNA, 15 bp, Homo sapiens
acatctggtagactg

SEQ ID NO: 1556918 - DNA, 15 bp, Homo sapiens
tacatctggtagact

SEQ ID NO: 1556919 - DNA, 15 bp, Homo sapiens
ctacatctggtagac

SEQ ID NO: 1556920 - DNA, 15 bp, Homo sapiens
actacatctggtaga

SEQ ID NO: 1556921 - DNA, 15 bp, Homo sapiens
cactacatctggtag

SEQ ID NO: 1556922 - DNA, 15 bp, Homo sapiens
acactacatctggta

SEQ ID NO: 1556923 - DNA, 15 bp, Homo sapiens
cacactacatctggt

SEQ ID NO: 1556924 - DNA, 15 bp, Homo sapiens
tcacactacatctgg

SEQ ID NO: 1556925 - DNA, 15 bp, Homo sapiens
ttcacactacatctg

SEQ ID NO: 1556926 - DNA, 15 bp, Homo sapiens
gttcacactacatct

SEQ ID NO: 1556927 - DNA, 15 bp, Homo sapiens
ggttcacactacatc

SEQ ID NO: 1556928 - DNA, 15 bp, Homo sapiens
aggttcacactacat

SEQ ID NO: 1556929 - DNA, 15 bp, Homo sapiens
caggttcacactaca

SEQ ID NO: 1556930 - DNA, 15 bp, Homo sapiens
ccaggttcacactac

SEQ ID NO: 1556931 - DNA, 15 bp, Homo sapiens
tccaggttcacacta

SEQ ID NO: 1556932 - DNA, 15 bp, Homo sapiens
ttccaggttcacact

SEQ ID NO: 1556933 - DNA, 15 bp, Homo sapiens
gttccaggttcacac

SEQ ID NO: 1556934 - DNA, 15 bp, Homo sapiens
tgttccaggttcaca

SEQ ID NO: 1556935 - DNA, 15 bp, Homo sapiens
ctgttccaggttcac

SEQ ID NO: 1556936 - DNA, 15 bp, Homo sapiens
tctgttccaggttca

SEQ ID NO: 1556937 - DNA, 15 bp, Homo sapiens
atctgttccaggttc

SEQ ID NO: 1556938 - DNA, 15 bp, Homo sapiens
tatctgttccaggtt

SEQ ID NO: 1556939 - DNA, 15 bp, Homo sapiens
atatctgttccaggt

SEQ ID NO: 1556940 - DNA, 15 bp, Homo sapiens
catatctgttccagg

SEQ ID NO: 1556941 - DNA, 15 bp, Homo sapiens
ccatatctgttccag

SEQ ID NO: 1556942 - DNA, 15 bp, Homo sapiens
cccatatctgttcca

SEQ ID NO: 1556943 - DNA, 15 bp, Homo sapiens
acccatatctgttcc

SEQ ID NO: 1556944 - DNA, 15 bp, Homo sapiens
gacccatatctgttc

SEQ ID NO: 1556945 - DNA, 15 bp, Homo sapiens
agacccatatctgtt

SEQ ID NO: 1556946 - DNA, 15 bp, Homo sapiens
cagacccatatctgt

SEQ ID NO: 1556947 - DNA, 15 bp, Homo sapiens
tcagacccatatctg

SEQ ID NO: 1556948 - DNA, 15 bp, Homo sapiens
ttcagacccatatct

SEQ ID NO: 1556949 - DNA, 15 bp, Homo sapiens
tttcagacccatatc

SEQ ID NO: 1556950 - DNA, 15 bp, Homo sapiens
ttttcagacccatat

SEQ ID NO: 1556951 - DNA, 15 bp, Homo sapiens
tttttcagacccata

SEQ ID NO: 1556952 - DNA, 15 bp, Homo sapiens
atttttcagacccat

SEQ ID NO: 1556953 - DNA, 15 bp, Homo sapiens
tatttttcagaccca

SEQ ID NO: 1556954 - DNA, 15 bp, Homo sapiens
atatttttcagaccc

SEQ ID NO: 1556955 - DNA, 15 bp, Homo sapiens
tatatttttcagacc

SEQ ID NO: 1556956 - DNA, 15 bp, Homo sapiens
ctatatttttcagac

SEQ ID NO: 1556957 - DNA, 15 bp, Homo sapiens
tctatatttttcaga

SEQ ID NO: 1556958 - DNA, 15 bp, Homo sapiens
ttctatatttttcag

SEQ ID NO: 1556959 - DNA, 15 bp, Homo sapiens
cttctatatttttca

SEQ ID NO: 1556960 - DNA, 15 bp, Homo sapiens
gcttctatatttttc

SEQ ID NO: 1556961 - DNA, 15 bp, Homo sapiens
tgcttctatattttt

SEQ ID NO: 1556962 - DNA, 15 bp, Homo sapiens
ttgcttctatatttt

SEQ ID NO: 1556963 - DNA, 15 bp, Homo sapiens
tttgcttctatattt

SEQ ID NO: 1556964 - DNA, 15 bp, Homo sapiens
ttttgcttctatatt

SEQ ID NO: 1556965 - DNA, 15 bp, Homo sapiens
attttgcttctatat

SEQ ID NO: 1556966 - DNA, 15 bp, Homo sapiens
aattttgcttctata

SEQ ID NO: 1556967 - DNA, 15 bp, Homo sapiens
aaattttgcttctat

SEQ ID NO: 1556968 - DNA, 15 bp, Homo sapiens
aaaattttgcttcta

SEQ ID NO: 1556969 - DNA, 15 bp, Homo sapiens
taaaattttgcttct

SEQ ID NO: 1556970 - DNA, 15 bp, Homo sapiens
ctaaaattttgcttc

SEQ ID NO: 1556971 - DNA, 15 bp, Homo sapiens
tctaaaattttgctt

SEQ ID NO: 1556972 - DNA, 15 bp, Homo sapiens
ctctaaaattttgct

SEQ ID NO: 1556973 - DNA, 15 bp, Homo sapiens
cctctaaaattttgc

SEQ ID NO: 1556974 - DNA, 15 bp, Homo sapiens
acctctaaaattttg

SEQ ID NO: 1556975 - DNA, 15 bp, Homo sapiens
tacctctaaaatttt

SEQ ID NO: 1556976 - DNA, 15 bp, Homo sapiens
ttacctctaaaattt

SEQ ID NO: 1556977 - DNA, 15 bp, Homo sapiens
cttacctctaaaatt

SEQ ID NO: 1556978 - DNA, 15 bp, Homo sapiens
tcttacctctaaaat

SEQ ID NO: 1556979 - DNA, 15 bp, Homo sapiens
ctcttacctctaaaa

SEQ ID NO: 1556980 - DNA, 15 bp, Homo sapiens
cctcttacctctaaa

SEQ ID NO: 1556981 - DNA, 15 bp, Homo sapiens
acctcttacctctaa

SEQ ID NO: 1556982 - DNA, 15 bp, Homo sapiens
gacctcttacctcta

SEQ ID NO: 1556983 - DNA, 15 bp, Homo sapiens
agacctcttacctct

SEQ ID NO: 1556984 - DNA, 15 bp, Homo sapiens
aagacctcttacctc

SEQ ID NO: 1556985 - DNA, 15 bp, Homo sapiens
taagacctcttacct

SEQ ID NO: 1556986 - DNA, 15 bp, Homo sapiens
ataagacctcttacc

SEQ ID NO: 1556987 - DNA, 15 bp, Homo sapiens
cataagacctcttac

SEQ ID NO: 1556988 - DNA, 15 bp, Homo sapiens
ccataagacctctta

SEQ ID NO: 1556989 - DNA, 15 bp, Homo sapiens
tccataagacctctt

SEQ ID NO: 1556990 - DNA, 15 bp, Homo sapiens
ctccataagacctct

SEQ ID NO: 1556991 - DNA, 15 bp, Homo sapiens
actccataagacctc

SEQ ID NO: 1556992 - DNA, 15 bp, Homo sapiens
aactccataagacct

SEQ ID NO: 1556993 - DNA, 15 bp, Homo sapiens
aaactccataagacc

SEQ ID NO: 1556994 - DNA, 15 bp, Homo sapiens
taaactccataagac

SEQ ID NO: 1556995 - DNA, 15 bp, Homo sapiens
ataaactccataaga

SEQ ID NO: 1556996 - DNA, 15 bp, Homo sapiens
aataaactccataag

SEQ ID NO: 1556997 - DNA, 15 bp, Homo sapiens
taataaactccataa

SEQ ID NO: 1556998 - DNA, 15 bp, Homo sapiens
ttaataaactccata

SEQ ID NO: 1556999 - DNA, 15 bp, Homo sapiens
attaataaactccat

SEQ ID NO: 1557000 - DNA, 15 bp, Homo sapiens
gattaataaactcca

SEQ ID NO: 1557001 - DNA, 15 bp, Homo sapiens
tgattaataaactcc

SEQ ID NO: 1557002 - DNA, 15 bp, Homo sapiens
ctgattaataaactc

SEQ ID NO: 1557003 - DNA, 15 bp, Homo sapiens
tctgattaataaact

SEQ ID NO: 1557004 - DNA, 15 bp, Homo sapiens
gtctgattaataaac

SEQ ID NO: 1557005 - DNA, 15 bp, Homo sapiens
ggtctgattaataaa

SEQ ID NO: 1557006 - DNA, 15 bp, Homo sapiens
aggtctgattaataa

SEQ ID NO: 1557007 - DNA, 15 bp, Homo sapiens
gaggtctgattaata

SEQ ID NO: 1557008 - DNA, 15 bp, Homo sapiens
ggaggtctgattaat

SEQ ID NO: 1557009 - DNA, 15 bp, Homo sapiens
tggaggtctgattaa

SEQ ID NO: 1557010 - DNA, 15 bp, Homo sapiens
atggaggtctgatta

SEQ ID NO: 1557011 - DNA, 15 bp, Homo sapiens
aatggaggtctgatt

SEQ ID NO: 1557012 - DNA, 15 bp, Homo sapiens
aaatggaggtctgat

SEQ ID NO: 1557013 - DNA, 15 bp, Homo sapiens
aaaatggaggtctga

SEQ ID NO: 1557014 - DNA, 15 bp, Homo sapiens
caaaatggaggtctg

SEQ ID NO: 1557015 - DNA, 15 bp, Homo sapiens
gcaaaatggaggtct

SEQ ID NO: 1557016 - DNA, 15 bp, Homo sapiens
tgcaaaatggaggtc

SEQ ID NO: 1557017 - DNA, 15 bp, Homo sapiens
ttgcaaaatggaggt

SEQ ID NO: 1557018 - DNA, 15 bp, Homo sapiens
tttgcaaaatggagg

SEQ ID NO: 1557019 - DNA, 15 bp, Homo sapiens
atttgcaaaatggag

SEQ ID NO: 1557020 - DNA, 15 bp, Homo sapiens
aatttgcaaaatgga

SEQ ID NO: 1557021 - DNA, 15 bp, Homo sapiens
taatttgcaaaatgg

SEQ ID NO: 1557022 - DNA, 15 bp, Homo sapiens
ctaatttgcaaaatg

SEQ ID NO: 1557023 - DNA, 15 bp, Homo sapiens
tctaatttgcaaaat

SEQ ID NO: 1557024 - DNA, 15 bp, Homo sapiens
ttctaatttgcaaaa

SEQ ID NO: 1557025 - DNA, 15 bp, Homo sapiens
tttctaatttgcaaa

SEQ ID NO: 1557026 - DNA, 15 bp, Homo sapiens
ctttctaatttgcaa

SEQ ID NO: 1557027 - DNA, 15 bp, Homo sapiens
cctttctaatttgca

SEQ ID NO: 1557028 - DNA, 15 bp, Homo sapiens
tcctttctaatttgc

SEQ ID NO: 1557029 - DNA, 15 bp, Homo sapiens
ttcctttctaatttg

SEQ ID NO: 1557030 - DNA, 15 bp, Homo sapiens
gttcctttctaattt

SEQ ID NO: 1557031 - DNA, 15 bp, Homo sapiens
agttcctttctaatt

SEQ ID NO: 1557032 - DNA, 15 bp, Homo sapiens
tagttcctttctaat

SEQ ID NO: 1557033 - DNA, 15 bp, Homo sapiens
ttagttcctttctaa

SEQ ID NO: 1557034 - DNA, 15 bp, Homo sapiens
cttagttcctttcta

SEQ ID NO: 1557035 - DNA, 15 bp, Homo sapiens
tcttagttcctttct

SEQ ID NO: 1557036 - DNA, 15 bp, Homo sapiens
ttcttagttcctttc

SEQ ID NO: 1557037 - DNA, 15 bp, Homo sapiens
cttcttagttccttt

SEQ ID NO: 1557038 - DNA, 15 bp, Homo sapiens
acttcttagttcctt

SEQ ID NO: 1557039 - DNA, 15 bp, Homo sapiens
aacttcttagttcct

SEQ ID NO: 1557040 - DNA, 15 bp, Homo sapiens
taacttcttagttcc

SEQ ID NO: 1557041 - DNA, 15 bp, Homo sapiens
ttaacttcttagttc

SEQ ID NO: 1557042 - DNA, 15 bp, Homo sapiens
cttaacttcttagtt

SEQ ID NO: 1557043 - DNA, 15 bp, Homo sapiens
acttaacttcttagt

SEQ ID NO: 1557044 - DNA, 15 bp, Homo sapiens
tacttaacttcttag

SEQ ID NO: 1557045 - DNA, 15 bp, Homo sapiens
ttacttaacttctta

SEQ ID NO: 1557046 - DNA, 15 bp, Homo sapiens
gttacttaacttctt

SEQ ID NO: 1557047 - DNA, 15 bp, Homo sapiens
agttacttaacttct

SEQ ID NO: 1557048 - DNA, 15 bp, Homo sapiens
aagttacttaacttc

SEQ ID NO: 1557049 - DNA, 15 bp, Homo sapiens
gggcaagttacttaa

SEQ ID NO: 1557050 - DNA, 15 bp, Homo sapiens
tgggcaagttactta

SEQ ID NO: 1557051 - DNA, 15 bp, Homo sapiens
atgggcaagttactt

SEQ ID NO: 1557052 - DNA, 15 bp, Homo sapiens
catgggcaagttact

SEQ ID NO: 1557053 - DNA, 15 bp, Homo sapiens
gcatgggcaagttac

SEQ ID NO: 1557054 - DNA, 15 bp, Homo sapiens
agcatgggcaagtta

SEQ ID NO: 1557055 - DNA, 15 bp, Homo sapiens
aagcatgggcaagtt

SEQ ID NO: 1557056 - DNA, 15 bp, Homo sapiens
caagcatgggcaagt

SEQ ID NO: 1557057 - DNA, 15 bp, Homo sapiens
acaagcatgggcaag

SEQ ID NO: 1557058 - DNA, 15 bp, Homo sapiens
tacaagcatgggcaa

SEQ ID NO: 1557059 - DNA, 15 bp, Homo sapiens
gtacaagcatgggca

SEQ ID NO: 1557060 - DNA, 15 bp, Homo sapiens
tgtacaagcatgggc

SEQ ID NO: 1557061 - DNA, 15 bp, Homo sapiens
atgtacaagcatggg

SEQ ID NO: 1557062 - DNA, 15 bp, Homo sapiens
gatgtacaagcatgg

SEQ ID NO: 1557063 - DNA, 15 bp, Homo sapiens
agatgtacaagcatg

SEQ ID NO: 1557064 - DNA, 15 bp, Homo sapiens
cagatgtacaagcat

SEQ ID NO: 1557065 - DNA, 15 bp, Homo sapiens
acagatgtacaagca

SEQ ID NO: 1557066 - DNA, 15 bp, Homo sapiens
aacagatgtacaagc

SEQ ID NO: 1557067 - DNA, 15 bp, Homo sapiens
aaacagatgtacaag

SEQ ID NO: 1557068 - DNA, 15 bp, Homo sapiens
aaaacagatgtacaa

SEQ ID NO: 1557069 - DNA, 15 bp, Homo sapiens
caaaacagatgtaca

SEQ ID NO: 1557070 - DNA, 15 bp, Homo sapiens
ccaaaacagatgtac

SEQ ID NO: 1557071 - DNA, 15 bp, Homo sapiens
cccaaaacagatgta

SEQ ID NO: 1557072 - DNA, 15 bp, Homo sapiens
tcccaaaacagatgt

SEQ ID NO: 1557073 - DNA, 15 bp, Homo sapiens
gtcccaaaacagatg

SEQ ID NO: 1557074 - DNA, 15 bp, Homo sapiens
agtcccaaaacagat

SEQ ID NO: 1557075 - DNA, 15 bp, Homo sapiens
tagtcccaaaacaga

SEQ ID NO: 1557076 - DNA, 15 bp, Homo sapiens
ctagtcccaaaacag

SEQ ID NO: 1557077 - DNA, 15 bp, Homo sapiens
tctagtcccaaaaca

SEQ ID NO: 1557078 - DNA, 15 bp, Homo sapiens
ttctagtcccaaaac

SEQ ID NO: 1557079 - DNA, 15 bp, Homo sapiens
gttctagtcccaaaa

SEQ ID NO: 1557080 - DNA, 15 bp, Homo sapiens
ggttctagtcccaaa

SEQ ID NO: 1557081 - DNA, 15 bp, Homo sapiens
gggttctagtcccaa

SEQ ID NO: 1557082 - DNA, 15 bp, Homo sapiens
ggggttctagtccca

SEQ ID NO: 1557083 - DNA, 15 bp, Homo sapiens
aggggttctagtccc

SEQ ID NO: 1557084 - DNA, 15 bp, Homo sapiens
gaggggttctagtcc

SEQ ID NO: 1557085 - DNA, 15 bp, Homo sapiens
agaggggttctagtc

SEQ ID NO: 1557086 - DNA, 15 bp, Homo sapiens
cagaggggttctagt

SEQ ID NO: 1557087 - DNA, 15 bp, Homo sapiens
acagaggggttctag

SEQ ID NO: 1557088 - DNA, 15 bp, Homo sapiens
gacagaggggttcta

SEQ ID NO: 1557089 - DNA, 15 bp, Homo sapiens
ggacagaggggttct

SEQ ID NO: 1557090 - DNA, 15 bp, Homo sapiens
aggacagaggggttc

SEQ ID NO: 1557091 - DNA, 15 bp, Homo sapiens
taggacagaggggtt

SEQ ID NO: 1557092 - DNA, 15 bp, Homo sapiens
ttaggacagaggggt

SEQ ID NO: 1557093 - DNA, 15 bp, Homo sapiens
attaggacagagggg

SEQ ID NO: 1557094 - DNA, 15 bp, Homo sapiens
aattaggacagaggg

SEQ ID NO: 1557095 - DNA, 15 bp, Homo sapiens
gaattaggacagagg

SEQ ID NO: 1557096 - DNA, 15 bp, Homo sapiens
agaattaggacagag

SEQ ID NO: 1557097 - DNA, 15 bp, Homo sapiens
gagaattaggacaga

SEQ ID NO: 1557098 - DNA, 15 bp, Homo sapiens
tgagaattaggacag

SEQ ID NO: 1557099 - DNA, 15 bp, Homo sapiens
atgagaattaggaca

SEQ ID NO: 1557100 - DNA, 15 bp, Homo sapiens
aatgagaattaggac

SEQ ID NO: 1557101 - DNA, 15 bp, Homo sapiens
caatgagaattagga

SEQ ID NO: 1557102 - DNA, 15 bp, Homo sapiens
gcaatgagaattagg

SEQ ID NO: 1557103 - DNA, 15 bp, Homo sapiens
ggcaatgagaattag

SEQ ID NO: 1557104 - DNA, 15 bp, Homo sapiens
cggcaatgagaatta

SEQ ID NO: 1557105 - DNA, 15 bp, Homo sapiens
acggcaatgagaatt

SEQ ID NO: 1557106 - DNA, 15 bp, Homo sapiens
aacggcaatgagaat

SEQ ID NO: 1557107 - DNA, 15 bp, Homo sapiens
aaacggcaatgagaa

SEQ ID NO: 1557108 - DNA, 15 bp, Homo sapiens
aaaacggcaatgaga

SEQ ID NO: 1557109 - DNA, 15 bp, Homo sapiens
aaaaacggcaatgag

SEQ ID NO: 1557110 - DNA, 15 bp, Homo sapiens
gaaaaacggcaatga

SEQ ID NO: 1557111 - DNA, 15 bp, Homo sapiens
agaaaaacggcaatg

SEQ ID NO: 1557112 - DNA, 15 bp, Homo sapiens
tagaaaaacggcaat

SEQ ID NO: 1557113 - DNA, 15 bp, Homo sapiens
ttagaaaaacggcaa

SEQ ID NO: 1557114 - DNA, 15 bp, Homo sapiens
tttagaaaaacggca

SEQ ID NO: 1557115 - DNA, 15 bp, Homo sapiens
ttttagaaaaacggc

SEQ ID NO: 1557116 - DNA, 15 bp, Homo sapiens
gttttagaaaaacgg

SEQ ID NO: 1557117 - DNA, 15 bp, Homo sapiens
agttttagaaaaacg

SEQ ID NO: 1557118 - DNA, 15 bp, Homo sapiens
cagttttagaaaaac

SEQ ID NO: 1557119 - DNA, 15 bp, Homo sapiens
aacagttttagaaaa

SEQ ID NO: 1557120 - DNA, 15 bp, Homo sapiens
aaacagttttagaaa

SEQ ID NO: 1557121 - DNA, 15 bp, Homo sapiens
aaaacagttttagaa

SEQ ID NO: 1557122 - DNA, 15 bp, Homo sapiens
caaaacagttttaga

SEQ ID NO: 1557123 - DNA, 15 bp, Homo sapiens
ccaaaacagttttag

SEQ ID NO: 1557124 - DNA, 15 bp, Homo sapiens
cccaaaacagtttta

SEQ ID NO: 1557125 - DNA, 15 bp, Homo sapiens
tcccaaaacagtttt

SEQ ID NO: 1557126 - DNA, 15 bp, Homo sapiens
gtcccaaaacagttt

SEQ ID NO: 1557127 - DNA, 15 bp, Homo sapiens
tgtcccaaaacagtt

SEQ ID NO: 1557128 - DNA, 15 bp, Homo sapiens
ctgtcccaaaacagt

SEQ ID NO: 1557129 - DNA, 15 bp, Homo sapiens
actgtcccaaaacag

SEQ ID NO: 1557130 - DNA, 15 bp, Homo sapiens
cactgtcccaaaaca

SEQ ID NO: 1557131 - DNA, 15 bp, Homo sapiens
ccactgtcccaaaac

SEQ ID NO: 1557132 - DNA, 15 bp, Homo sapiens
accactgtcccaaaa

SEQ ID NO: 1557133 - DNA, 15 bp, Homo sapiens
caccactgtcccaaa

SEQ ID NO: 1557134 - DNA, 15 bp, Homo sapiens
ccaccactgtcccaa

SEQ ID NO: 1557135 - DNA, 15 bp, Homo sapiens
accaccactgtccca

SEQ ID NO: 1557136 - DNA, 15 bp, Homo sapiens
gaccaccactgtccc

SEQ ID NO: 1557137 - DNA, 15 bp, Homo sapiens
tgaccaccactgtcc

SEQ ID NO: 1557138 - DNA, 15 bp, Homo sapiens
ctgaccaccactgtc

SEQ ID NO: 1557139 - DNA, 15 bp, Homo sapiens
gctgaccaccactgt

SEQ ID NO: 1557140 - DNA, 15 bp, Homo sapiens
cgctgaccaccactg

SEQ ID NO: 1557141 - DNA, 15 bp, Homo sapiens
tcgctgaccaccact

SEQ ID NO: 1557142 - DNA, 15 bp, Homo sapiens
atcgctgaccaccac

SEQ ID NO: 1557143 - DNA, 15 bp, Homo sapiens
tatcgctgaccacca

SEQ ID NO: 1557144 - DNA, 15 bp, Homo sapiens
atatcgctgaccacc

SEQ ID NO: 1557145 - DNA, 15 bp, Homo sapiens
gatatcgctgaccac

SEQ ID NO: 1557146 - DNA, 15 bp, Homo sapiens
agatatcgctgacca

SEQ ID NO: 1557147 - DNA, 15 bp, Homo sapiens
tagatatcgctgacc

SEQ ID NO: 1557148 - DNA, 15 bp, Homo sapiens
ctagatatcgctgac

SEQ ID NO: 1557149 - DNA, 15 bp, Homo sapiens
actagatatcgctga

SEQ ID NO: 1557150 - DNA, 15 bp, Homo sapiens
aactagatatcgctg

SEQ ID NO: 1557151 - DNA, 15 bp, Homo sapiens
caactagatatcgct

SEQ ID NO: 1557152 - DNA, 15 bp, Homo sapiens
acaactagatatcgc

SEQ ID NO: 1557153 - DNA, 15 bp, Homo sapiens
aacaactagatatcg

SEQ ID NO: 1557154 - DNA, 15 bp, Homo sapiens
caacaactagatatc

SEQ ID NO: 1557155 - DNA, 15 bp, Homo sapiens
ccaacaactagatat

SEQ ID NO: 1557156 - DNA, 15 bp, Homo sapiens
gccaacaactagata

SEQ ID NO: 1557157 - DNA, 15 bp, Homo sapiens
agccaacaactagat

SEQ ID NO: 1557158 - DNA, 15 bp, Homo sapiens
tagccaacaactaga

SEQ ID NO: 1557159 - DNA, 15 bp, Homo sapiens
atagccaacaactag

SEQ ID NO: 1557160 - DNA, 15 bp, Homo sapiens
aatagccaacaacta

SEQ ID NO: 1557161 - DNA, 15 bp, Homo sapiens
aaatagccaacaact

SEQ ID NO: 1557162 - DNA, 15 bp, Homo sapiens
taaatagccaacaac

SEQ ID NO: 1557163 - DNA, 15 bp, Homo sapiens
ataaatagccaacaa

SEQ ID NO: 1557164 - DNA, 15 bp, Homo sapiens
tataaatagccaaca

SEQ ID NO: 1557165 - DNA, 15 bp, Homo sapiens
atataaatagccaac

SEQ ID NO: 1557166 - DNA, 15 bp, Homo sapiens
catataaatagccaa

SEQ ID NO: 1557167 - DNA, 15 bp, Homo sapiens
taacatataaatagc

SEQ ID NO: 1557168 - DNA, 15 bp, Homo sapiens
ttaacatataaatag

SEQ ID NO: 1557169 - DNA, 15 bp, Homo sapiens
cttaacatataaata

SEQ ID NO: 1557170 - DNA, 15 bp, Homo sapiens
tcttaacatataaat

SEQ ID NO: 1557171 - DNA, 15 bp, Homo sapiens
ttcttaacatataaa

SEQ ID NO: 1557172 - DNA, 15 bp, Homo sapiens
attcttaacatataa

SEQ ID NO: 1557173 - DNA, 15 bp, Homo sapiens
tattcttaacatata

SEQ ID NO: 1557174 - DNA, 15 bp, Homo sapiens
atattcttaacatat

SEQ ID NO: 1557175 - DNA, 15 bp, Homo sapiens
aatattcttaacata

SEQ ID NO: 1557176 - DNA, 15 bp, Homo sapiens
aaatattcttaacat

SEQ ID NO: 1557177 - DNA, 15 bp, Homo sapiens
caaatattcttaaca

SEQ ID NO: 1557178 - DNA, 15 bp, Homo sapiens
gcaaatattcttaac

SEQ ID NO: 1557179 - DNA, 15 bp, Homo sapiens
tgcaaatattcttaa

SEQ ID NO: 1557180 - DNA, 15 bp, Homo sapiens
ttgcaaatattctta

SEQ ID NO: 1557181 - DNA, 15 bp, Homo sapiens
tttgcaaatattctt

SEQ ID NO: 1557182 - DNA, 15 bp, Homo sapiens
atttgcaaatattct

SEQ ID NO: 1557183 - DNA, 15 bp, Homo sapiens
aatttgcaaatattc

SEQ ID NO: 1557184 - DNA, 15 bp, Homo sapiens
caatttgcaaatatt

SEQ ID NO: 1557185 - DNA, 15 bp, Homo sapiens
ccaatttgcaaatat

SEQ ID NO: 1557186 - DNA, 15 bp, Homo sapiens
gccaatttgcaaata

SEQ ID NO: 1557187 - DNA, 15 bp, Homo sapiens
ggccaatttgcaaat

SEQ ID NO: 1557188 - DNA, 15 bp, Homo sapiens
cggccaatttgcaaa

SEQ ID NO: 1557189 - DNA, 15 bp, Homo sapiens
ccggccaatttgcaa

SEQ ID NO: 1557190 - DNA, 15 bp, Homo sapiens
cccggccaatttgca

SEQ ID NO: 1557191 - DNA, 15 bp, Homo sapiens
acccggccaatttgc

SEQ ID NO: 1557192 - DNA, 15 bp, Homo sapiens
cacccggccaatttg

SEQ ID NO: 1557193 - DNA, 15 bp, Homo sapiens
tgcacccggccaatt

SEQ ID NO: 1557194 - DNA, 15 bp, Homo sapiens
ttgcacccggccaat

SEQ ID NO: 1557195 - DNA, 15 bp, Homo sapiens
attgcacccggccaa

SEQ ID NO: 1557196 - DNA, 15 bp, Homo sapiens
cattgcacccggcca

SEQ ID NO: 1557197 - DNA, 15 bp, Homo sapiens
ccattgcacccggcc

SEQ ID NO: 1557198 - DNA, 15 bp, Homo sapiens
gccattgcacccggc

SEQ ID NO: 1557199 - DNA, 15 bp, Homo sapiens
cgccattgcacccgg

SEQ ID NO: 1557200 - DNA, 15 bp, Homo sapiens
gcgccattgcacccg

SEQ ID NO: 1557201 - DNA, 15 bp, Homo sapiens
tgcgccattgcaccc

SEQ ID NO: 1557202 - DNA, 15 bp, Homo sapiens
atgcgccattgcacc

SEQ ID NO: 1557203 - DNA, 15 bp, Homo sapiens
catgcgccattgcac

SEQ ID NO: 1557204 - DNA, 15 bp, Homo sapiens
acatgcgccattgca

SEQ ID NO: 1557205 - DNA, 15 bp, Homo sapiens
aacatgcgccattgc

SEQ ID NO: 1557206 - DNA, 15 bp, Homo sapiens
aaacatgcgccattg

SEQ ID NO: 1557207 - DNA, 15 bp, Homo sapiens
caaacatgcgccatt

SEQ ID NO: 1557208 - DNA, 15 bp, Homo sapiens
acaaacatgcgccat

SEQ ID NO: 1557209 - DNA, 15 bp, Homo sapiens
tacaaacatgcgcca

SEQ ID NO: 1557210 - DNA, 15 bp, Homo sapiens
ttacaaacatgcgcc

SEQ ID NO: 1557211 - DNA, 15 bp, Homo sapiens
attacaaacatgcgc

SEQ ID NO: 1557212 - DNA, 15 bp, Homo sapiens
aattacaaacatgcg

SEQ ID NO: 1557213 - DNA, 15 bp, Homo sapiens
gaattacaaacatgc

SEQ ID NO: 1557214 - DNA, 15 bp, Homo sapiens
ggaattacaaacatg

SEQ ID NO: 1557215 - DNA, 15 bp, Homo sapiens
tggaattacaaacat

SEQ ID NO: 1557216 - DNA, 15 bp, Homo sapiens
ctggaattacaaaca

SEQ ID NO: 1557217 - DNA, 15 bp, Homo sapiens
gctggaattacaaac

SEQ ID NO: 1557218 - DNA, 15 bp, Homo sapiens
tgctggaattacaaa

SEQ ID NO: 1557219 - DNA, 15 bp, Homo sapiens
gtgctggaattacaa

SEQ ID NO: 1557220 - DNA, 15 bp, Homo sapiens
gagtgctggaattac

SEQ ID NO: 1557221 - DNA, 15 bp, Homo sapiens
agagtgctggaatta

SEQ ID NO: 1557222 - DNA, 15 bp, Homo sapiens
cagagtgctggaatt

SEQ ID NO: 1557223 - DNA, 15 bp, Homo sapiens
ccagagtgctggaat

SEQ ID NO: 1557224 - DNA, 15 bp, Homo sapiens
cccagagtgctggaa

SEQ ID NO: 1557225 - DNA, 15 bp, Homo sapiens
tcccagagtgctgga

SEQ ID NO: 1557226 - DNA, 15 bp, Homo sapiens
actcggcctcccaga

SEQ ID NO: 1557227 - DNA, 15 bp, Homo sapiens
aactcggcctcccag

SEQ ID NO: 1557228 - DNA, 15 bp, Homo sapiens
caactcggcctccca

SEQ ID NO: 1557229 - DNA, 15 bp, Homo sapiens
ccaactcggcctccc

SEQ ID NO: 1557230 - DNA, 15 bp, Homo sapiens
cccaactcggcctcc

SEQ ID NO: 1557231 - DNA, 15 bp, Homo sapiens
tcccaactcggcctc

SEQ ID NO: 1557232 - DNA, 15 bp, Homo sapiens
ctcccaactcggcct

SEQ ID NO: 1557233 - DNA, 15 bp, Homo sapiens
cctcccaactcggcc

SEQ ID NO: 1557234 - DNA, 15 bp, Homo sapiens
tcctcccaactcggc

SEQ ID NO: 1557235 - DNA, 15 bp, Homo sapiens
atcctcccaactcgg

SEQ ID NO: 1557236 - DNA, 15 bp, Homo sapiens
gatcctcccaactcg

SEQ ID NO: 1557237 - DNA, 15 bp, Homo sapiens
tgatcctcccaactc

SEQ ID NO: 1557238 - DNA, 15 bp, Homo sapiens
gtgatcctcccaact

SEQ ID NO: 1557239 - DNA, 15 bp, Homo sapiens
agtgatcctcccaac

SEQ ID NO: 1557240 - DNA, 15 bp, Homo sapiens
aagtgatcctcccaa

SEQ ID NO: 1557241 - DNA, 15 bp, Homo sapiens
cctcaagtgatcctc

SEQ ID NO: 1557242 - DNA, 15 bp, Homo sapiens
gtcaccatgttggcc

SEQ ID NO: 1557243 - DNA, 15 bp, Homo sapiens
tgtcaccatgttggc

SEQ ID NO: 1557244 - DNA, 15 bp, Homo sapiens
gtgtcaccatgttgg

SEQ ID NO: 1557245 - DNA, 15 bp, Homo sapiens
ggtgtcaccatgttg

SEQ ID NO: 1557246 - DNA, 15 bp, Homo sapiens
gggtgtcaccatgtt

SEQ ID NO: 1557247 - DNA, 15 bp, Homo sapiens
agggtgtcaccatgt

SEQ ID NO: 1557248 - DNA, 15 bp, Homo sapiens
cagggtgtcaccatg

SEQ ID NO: 1557249 - DNA, 15 bp, Homo sapiens
acagggtgtcaccat

SEQ ID NO: 1557250 - DNA, 15 bp, Homo sapiens
gacagggtgtcacca

SEQ ID NO: 1557251 - DNA, 15 bp, Homo sapiens
agacagggtgtcacc

SEQ ID NO: 1557252 - DNA, 15 bp, Homo sapiens
gagacagggtgtcac

SEQ ID NO: 1557253 - DNA, 15 bp, Homo sapiens
agagacagggtgtca

SEQ ID NO: 1557254 - DNA, 15 bp, Homo sapiens
tagagacagggtgtc

SEQ ID NO: 1557255 - DNA, 15 bp, Homo sapiens
gtagagacagggtgt

SEQ ID NO: 1557256 - DNA, 15 bp, Homo sapiens
agtagagacagggtg

SEQ ID NO: 1557257 - DNA, 15 bp, Homo sapiens
ccctggctaattttt

SEQ ID NO: 1557258 - DNA, 15 bp, Homo sapiens
accctggctaatttt

SEQ ID NO: 1557259 - DNA, 15 bp, Homo sapiens
caccctggctaattt

SEQ ID NO: 1557260 - DNA, 15 bp, Homo sapiens
ccaccctggctaatt

SEQ ID NO: 1557261 - DNA, 15 bp, Homo sapiens
gccaccctggctaat

SEQ ID NO: 1557262 - DNA, 15 bp, Homo sapiens
tgccaccctggctaa

SEQ ID NO: 1557263 - DNA, 15 bp, Homo sapiens
gtgccaccctggcta

SEQ ID NO: 1557264 - DNA, 15 bp, Homo sapiens
tgtgccaccctggct

SEQ ID NO: 1557265 - DNA, 15 bp, Homo sapiens
atgtgccaccctggc

SEQ ID NO: 1557266 - DNA, 15 bp, Homo sapiens
catgtgccaccctgg

SEQ ID NO: 1557267 - DNA, 15 bp, Homo sapiens
acatgtgccaccctg

SEQ ID NO: 1557268 - DNA, 15 bp, Homo sapiens
aacatgtgccaccct

SEQ ID NO: 1557269 - DNA, 15 bp, Homo sapiens
aaacatgtgccaccc

SEQ ID NO: 1557270 - DNA, 15 bp, Homo sapiens
caaacatgtgccacc

SEQ ID NO: 1557271 - DNA, 15 bp, Homo sapiens
acaaacatgtgccac

SEQ ID NO: 1557272 - DNA, 15 bp, Homo sapiens
tacaaacatgtgcca

SEQ ID NO: 1557273 - DNA, 15 bp, Homo sapiens
ttacaaacatgtgcc

SEQ ID NO: 1557274 - DNA, 15 bp, Homo sapiens
gttacaaacatgtgc

SEQ ID NO: 1557275 - DNA, 15 bp, Homo sapiens
agttacaaacatgtg

SEQ ID NO: 1557276 - DNA, 15 bp, Homo sapiens
gagttacaaacatgt

SEQ ID NO: 1557277 - DNA, 15 bp, Homo sapiens
ggagttacaaacatg

SEQ ID NO: 1557278 - DNA, 15 bp, Homo sapiens
tggagttacaaacat

SEQ ID NO: 1557279 - DNA, 15 bp, Homo sapiens
ctggagttacaaaca

SEQ ID NO: 1557280 - DNA, 15 bp, Homo sapiens
gctggagttacaaac

SEQ ID NO: 1557281 - DNA, 15 bp, Homo sapiens
cgctggagttacaaa

SEQ ID NO: 1557282 - DNA, 15 bp, Homo sapiens
tcgctggagttacaa

SEQ ID NO: 1557283 - DNA, 15 bp, Homo sapiens
gtcgctggagttaca

SEQ ID NO: 1557284 - DNA, 15 bp, Homo sapiens
ggtcgctggagttac

SEQ ID NO: 1557285 - DNA, 15 bp, Homo sapiens
aggtcgctggagtta

SEQ ID NO: 1557286 - DNA, 15 bp, Homo sapiens
caggtcgctggagtt

SEQ ID NO: 1557287 - DNA, 15 bp, Homo sapiens
ccaggtcgctggagt

SEQ ID NO: 1557288 - DNA, 15 bp, Homo sapiens
cccaggtcgctggag

SEQ ID NO: 1557289 - DNA, 15 bp, Homo sapiens
tcccaggtcgctgga

SEQ ID NO: 1557290 - DNA, 15 bp, Homo sapiens
ctcccaggtcgctgg

SEQ ID NO: 1557291 - DNA, 15 bp, Homo sapiens
cctcccaggtcgctg

SEQ ID NO: 1557292 - DNA, 15 bp, Homo sapiens
gcctcccaggtcgct

SEQ ID NO: 1557293 - DNA, 15 bp, Homo sapiens
agcctcccaggtcgc

SEQ ID NO: 1557294 - DNA, 15 bp, Homo sapiens
cagcctcccaggtcg

SEQ ID NO: 1557295 - DNA, 15 bp, Homo sapiens
tcagcctcccaggtc

SEQ ID NO: 1557296 - DNA, 15 bp, Homo sapiens
tcttcccacctcagc

SEQ ID NO: 1557297 - DNA, 15 bp, Homo sapiens
atcttcccacctcag

SEQ ID NO: 1557298 - DNA, 15 bp, Homo sapiens
gatcttcccacctca

SEQ ID NO: 1557299 - DNA, 15 bp, Homo sapiens
agatcttcccacctc

SEQ ID NO: 1557300 - DNA, 15 bp, Homo sapiens
gagatcttcccacct

SEQ ID NO: 1557301 - DNA, 15 bp, Homo sapiens
agagatcttcccacc

SEQ ID NO: 1557302 - DNA, 15 bp, Homo sapiens
aagagatcttcccac

SEQ ID NO: 1557303 - DNA, 15 bp, Homo sapiens
caagagatcttccca

SEQ ID NO: 1557304 - DNA, 15 bp, Homo sapiens
tcaagagatcttccc

SEQ ID NO: 1557305 - DNA, 15 bp, Homo sapiens
ttcaagagatcttcc

SEQ ID NO: 1557306 - DNA, 15 bp, Homo sapiens
gttcaagagatcttc

SEQ ID NO: 1557307 - DNA, 15 bp, Homo sapiens
ggttcaagagatctt

SEQ ID NO: 1557308 - DNA, 15 bp, Homo sapiens
gggttcaagagatct

SEQ ID NO: 1557309 - DNA, 15 bp, Homo sapiens
tgggttcaagagatc

SEQ ID NO: 1557310 - DNA, 15 bp, Homo sapiens
ctgggttcaagagat

SEQ ID NO: 1557311 - DNA, 15 bp, Homo sapiens
cctgggttcaagaga

SEQ ID NO: 1557312 - DNA, 15 bp, Homo sapiens
tcctgggttcaagag

SEQ ID NO: 1557313 - DNA, 15 bp, Homo sapiens
aacctcctgggttca

SEQ ID NO: 1557314 - DNA, 15 bp, Homo sapiens
caacctcctgggttc

SEQ ID NO: 1557315 - DNA, 15 bp, Homo sapiens
gcaacctcctgggtt

SEQ ID NO: 1557316 - DNA, 15 bp, Homo sapiens
tgcaacctcctgggt

SEQ ID NO: 1557317 - DNA, 15 bp, Homo sapiens
ctgcaacctcctggg

SEQ ID NO: 1557318 - DNA, 15 bp, Homo sapiens
actgcaacctcctgg

SEQ ID NO: 1557319 - DNA, 15 bp, Homo sapiens
cactgcaacctcctg

SEQ ID NO: 1557320 - DNA, 15 bp, Homo sapiens
ccttggctcactgca

SEQ ID NO: 1557321 - DNA, 15 bp, Homo sapiens
accttggctcactgc

SEQ ID NO: 1557322 - DNA, 15 bp, Homo sapiens
caccttggctcactg

SEQ ID NO: 1557323 - DNA, 15 bp, Homo sapiens
ccaccttggctcact

SEQ ID NO: 1557324 - DNA, 15 bp, Homo sapiens
accaccttggctcac

SEQ ID NO: 1557325 - DNA, 15 bp, Homo sapiens
caccaccttggctca

SEQ ID NO: 1557326 - DNA, 15 bp, Homo sapiens
gcaccaccttggctc

SEQ ID NO: 1557327 - DNA, 15 bp, Homo sapiens
ggcaccaccttggct

SEQ ID NO: 1557328 - DNA, 15 bp, Homo sapiens
tggcaccaccttggc

SEQ ID NO: 1557329 - DNA, 15 bp, Homo sapiens
gtggcaccaccttgg

SEQ ID NO: 1557330 - DNA, 15 bp, Homo sapiens
agtggcaccaccttg

SEQ ID NO: 1557331 - DNA, 15 bp, Homo sapiens
cagtggcaccacctt

SEQ ID NO: 1557332 - DNA, 15 bp, Homo sapiens
gcagtggcaccacct

SEQ ID NO: 1557333 - DNA, 15 bp, Homo sapiens
tgcagtggcaccacc

SEQ ID NO: 1557334 - DNA, 15 bp, Homo sapiens
gtgcagtggcaccac

SEQ ID NO: 1557335 - DNA, 15 bp, Homo sapiens
tactctgtcgcccag

SEQ ID NO: 1557336 - DNA, 15 bp, Homo sapiens
ttactctgtcgccca

SEQ ID NO: 1557337 - DNA, 15 bp, Homo sapiens
cttactctgtcgccc

SEQ ID NO: 1557338 - DNA, 15 bp, Homo sapiens
tcttactctgtcgcc

SEQ ID NO: 1557339 - DNA, 15 bp, Homo sapiens
gtcttactctgtcgc

SEQ ID NO: 1557340 - DNA, 15 bp, Homo sapiens
agtcttactctgtcg

SEQ ID NO: 1557341 - DNA, 15 bp, Homo sapiens
ggagtcttactctgt

SEQ ID NO: 1557342 - DNA, 15 bp, Homo sapiens
tggagtcttactctg

SEQ ID NO: 1557343 - DNA, 15 bp, Homo sapiens
atggagtcttactct

SEQ ID NO: 1557344 - DNA, 15 bp, Homo sapiens
gatggagtcttactc

SEQ ID NO: 1557345 - DNA, 15 bp, Homo sapiens
agatggagtcttact

SEQ ID NO: 1557346 - DNA, 15 bp, Homo sapiens
gagatggagtcttac

SEQ ID NO: 1557347 - DNA, 15 bp, Homo sapiens
tgagatggagtctta

SEQ ID NO: 1557348 - DNA, 15 bp, Homo sapiens
attctttttttgaga

SEQ ID NO: 1557349 - DNA, 15 bp, Homo sapiens
tattctttttttgag

SEQ ID NO: 1557350 - DNA, 15 bp, Homo sapiens
atattctttttttga

SEQ ID NO: 1557351 - DNA, 15 bp, Homo sapiens
aatattctttttttg

SEQ ID NO: 1557352 - DNA, 15 bp, Homo sapiens
aaatattcttttttt

SEQ ID NO: 1557353 - DNA, 15 bp, Homo sapiens
gcaaatattcttttt

SEQ ID NO: 1557354 - DNA, 15 bp, Homo sapiens
tgcaaatattctttt

SEQ ID NO: 1557355 - DNA, 15 bp, Homo sapiens
ttgcaaatattcttt

SEQ ID NO: 1557356 - DNA, 15 bp, Homo sapiens
catttgcaaatattc

SEQ ID NO: 1557357 - DNA, 15 bp, Homo sapiens
ccatttgcaaatatt

SEQ ID NO: 1557358 - DNA, 15 bp, Homo sapiens
tccatttgcaaatat

SEQ ID NO: 1557359 - DNA, 15 bp, Homo sapiens
ctccatttgcaaata

SEQ ID NO: 1557360 - DNA, 15 bp, Homo sapiens
gctccatttgcaaat

SEQ ID NO: 1557361 - DNA, 15 bp, Homo sapiens
tgctccatttgcaaa

SEQ ID NO: 1557362 - DNA, 15 bp, Homo sapiens
atgctccatttgcaa

SEQ ID NO: 1557363 - DNA, 15 bp, Homo sapiens
aatgctccatttgca

SEQ ID NO: 1557364 - DNA, 15 bp, Homo sapiens
caatgctccatttgc

SEQ ID NO: 1557365 - DNA, 15 bp, Homo sapiens
gcaatgctccatttg

SEQ ID NO: 1557366 - DNA, 15 bp, Homo sapiens
tgcaatgctccattt

SEQ ID NO: 1557367 - DNA, 15 bp, Homo sapiens
ttgcaatgctccatt

SEQ ID NO: 1557368 - DNA, 15 bp, Homo sapiens
tttgcaatgctccat

SEQ ID NO: 1557369 - DNA, 15 bp, Homo sapiens
atttgcaatgctcca

SEQ ID NO: 1557370 - DNA, 15 bp, Homo sapiens
catttgcaatgctcc

SEQ ID NO: 1557371 - DNA, 15 bp, Homo sapiens
ccatttgcaatgctc

SEQ ID NO: 1557372 - DNA, 15 bp, Homo sapiens
cccatttgcaatgct

SEQ ID NO: 1557373 - DNA, 15 bp, Homo sapiens
ccccatttgcaatgc

SEQ ID NO: 1557374 - DNA, 15 bp, Homo sapiens
gccccatttgcaatg

SEQ ID NO: 1557375 - DNA, 15 bp, Homo sapiens
tgccccatttgcaat

SEQ ID NO: 1557376 - DNA, 15 bp, Homo sapiens
atgccccatttgcaa

SEQ ID NO: 1557377 - DNA, 15 bp, Homo sapiens
gatgccccatttgca

SEQ ID NO: 1557378 - DNA, 15 bp, Homo sapiens
agatgccccatttgc

SEQ ID NO: 1557379 - DNA, 15 bp, Homo sapiens
cagatgccccatttg

SEQ ID NO: 1557380 - DNA, 15 bp, Homo sapiens
gcagatgccccattt

SEQ ID NO: 1557381 - DNA, 15 bp, Homo sapiens
ggcagatgccccatt

SEQ ID NO: 1557382 - DNA, 15 bp, Homo sapiens
aggcagatgccccat

SEQ ID NO: 1557383 - DNA, 15 bp, Homo sapiens
gaggcagatgcccca

SEQ ID NO: 1557384 - DNA, 15 bp, Homo sapiens
cgaggcagatgcccc

SEQ ID NO: 1557385 - DNA, 15 bp, Homo sapiens
ccgaggcagatgccc

SEQ ID NO: 1557386 - DNA, 15 bp, Homo sapiens
accgaggcagatgcc

SEQ ID NO: 1557387 - DNA, 15 bp, Homo sapiens
taccgaggcagatgc

SEQ ID NO: 1557388 - DNA, 15 bp, Homo sapiens
ataccgaggcagatg

SEQ ID NO: 1557389 - DNA, 15 bp, Homo sapiens
aataccgaggcagat

SEQ ID NO: 1557390 - DNA, 15 bp, Homo sapiens
aaataccgaggcaga

SEQ ID NO: 1557391 - DNA, 15 bp, Homo sapiens
aaaataccgaggcag

SEQ ID NO: 1557392 - DNA, 15 bp, Homo sapiens
gaaaataccgaggca

SEQ ID NO: 1557393 - DNA, 15 bp, Homo sapiens
tgaaaataccgaggc

SEQ ID NO: 1557394 - DNA, 15 bp, Homo sapiens
atgaaaataccgagg

SEQ ID NO: 1557395 - DNA, 15 bp, Homo sapiens
gatgaaaataccgag

SEQ ID NO: 1557396 - DNA, 15 bp, Homo sapiens
agatgaaaataccga

SEQ ID NO: 1557397 - DNA, 15 bp, Homo sapiens
aagatgaaaataccg

SEQ ID NO: 1557398 - DNA, 15 bp, Homo sapiens
gaagatgaaaatacc

SEQ ID NO: 1557399 - DNA, 15 bp, Homo sapiens
tgaagatgaaaatac

SEQ ID NO: 1557400 - DNA, 15 bp, Homo sapiens
ttgaagatgaaaata

SEQ ID NO: 1557401 - DNA, 15 bp, Homo sapiens
tttgaagatgaaaat

SEQ ID NO: 1557402 - DNA, 15 bp, Homo sapiens
ttttgaagatgaaaa

SEQ ID NO: 1557403 - DNA, 15 bp, Homo sapiens
gttttgaagatgaaa

SEQ ID NO: 1557404 - DNA, 15 bp, Homo sapiens
tgttttgaagatgaa

SEQ ID NO: 1557405 - DNA, 15 bp, Homo sapiens
ctgttttgaagatga

SEQ ID NO: 1557406 - DNA, 15 bp, Homo sapiens
gctgttttgaagatg

SEQ ID NO: 1557407 - DNA, 15 bp, Homo sapiens
ggctgttttgaagat

SEQ ID NO: 1557408 - DNA, 15 bp, Homo sapiens
gggctgttttgaaga

SEQ ID NO: 1557409 - DNA, 15 bp, Homo sapiens
tgggctgttttgaag

SEQ ID NO: 1557410 - DNA, 15 bp, Homo sapiens
ctgggctgttttgaa

SEQ ID NO: 1557411 - DNA, 15 bp, Homo sapiens
actgggctgttttga

SEQ ID NO: 1557412 - DNA, 15 bp, Homo sapiens
tactgggctgttttg

SEQ ID NO: 1557413 - DNA, 15 bp, Homo sapiens
ctactgggctgtttt

SEQ ID NO: 1557414 - DNA, 15 bp, Homo sapiens
gctactgggctgttt

SEQ ID NO: 1557415 - DNA, 15 bp, Homo sapiens
cgctactgggctgtt

SEQ ID NO: 1557416 - DNA, 15 bp, Homo sapiens
ccgctactgggctgt

SEQ ID NO: 1557417 - DNA, 15 bp, Homo sapiens
cccgctactgggctg

SEQ ID NO: 1557418 - DNA, 15 bp, Homo sapiens
tcccgctactgggct

SEQ ID NO: 1557419 - DNA, 15 bp, Homo sapiens
ctcccgctactgggc

SEQ ID NO: 1557420 - DNA, 15 bp, Homo sapiens
gctcccgctactggg

SEQ ID NO: 1557421 - DNA, 15 bp, Homo sapiens
agctcccgctactgg

SEQ ID NO: 1557422 - DNA, 15 bp, Homo sapiens
tagctcccgctactg

SEQ ID NO: 1557423 - DNA, 15 bp, Homo sapiens
ttagctcccgctact

SEQ ID NO: 1557424 - DNA, 15 bp, Homo sapiens
attagctcccgctac

SEQ ID NO: 1557425 - DNA, 15 bp, Homo sapiens
tattagctcccgcta

SEQ ID NO: 1557426 - DNA, 15 bp, Homo sapiens
atattagctcccgct

SEQ ID NO: 1557427 - DNA, 15 bp, Homo sapiens
aatattagctcccgc

SEQ ID NO: 1557428 - DNA, 15 bp, Homo sapiens
caatattagctcccg

SEQ ID NO: 1557429 - DNA, 15 bp, Homo sapiens
tcaatattagctccc

SEQ ID NO: 1557430 - DNA, 15 bp, Homo sapiens
atcaatattagctcc

SEQ ID NO: 1557431 - DNA, 15 bp, Homo sapiens
aatcaatattagctc

SEQ ID NO: 1557432 - DNA, 15 bp, Homo sapiens
gaatcaatattagct

SEQ ID NO: 1557433 - DNA, 15 bp, Homo sapiens
agaatcaatattagc

SEQ ID NO: 1557434 - DNA, 15 bp, Homo sapiens
tagaatcaatattag

SEQ ID NO: 1557435 - DNA, 15 bp, Homo sapiens
ctagaatcaatatta

SEQ ID NO: 1557436 - DNA, 15 bp, Homo sapiens
actagaatcaatatt

SEQ ID NO: 1557437 - DNA, 15 bp, Homo sapiens
cactagaatcaatat

SEQ ID NO: 1557438 - DNA, 15 bp, Homo sapiens
gcactagaatcaata

SEQ ID NO: 1557439 - DNA, 15 bp, Homo sapiens
ggcactagaatcaat

SEQ ID NO: 1557440 - DNA, 15 bp, Homo sapiens
gggcactagaatcaa

SEQ ID NO: 1557441 - DNA, 15 bp, Homo sapiens
agggcactagaatca

SEQ ID NO: 1557442 - DNA, 15 bp, Homo sapiens
aagggcactagaatc

SEQ ID NO: 1557443 - DNA, 15 bp, Homo sapiens
aaagggcactagaat

SEQ ID NO: 1557444 - DNA, 15 bp, Homo sapiens
caaagggcactagaa

SEQ ID NO: 1557445 - DNA, 15 bp, Homo sapiens
ccaaagggcactaga

SEQ ID NO: 1557446 - DNA, 15 bp, Homo sapiens
tccaaagggcactag

SEQ ID NO: 1557447 - DNA, 15 bp, Homo sapiens
atccaaagggcacta

SEQ ID NO: 1557448 - DNA, 15 bp, Homo sapiens
catccaaagggcact

SEQ ID NO: 1557449 - DNA, 15 bp, Homo sapiens
gcatccaaagggcac

SEQ ID NO: 1557450 - DNA, 15 bp, Homo sapiens
agcatccaaagggca

SEQ ID NO: 1557451 - DNA, 15 bp, Homo sapiens
tagcatccaaagggc

SEQ ID NO: 1557452 - DNA, 15 bp, Homo sapiens
ctagcatccaaaggg

SEQ ID NO: 1557453 - DNA, 15 bp, Homo sapiens
cctagcatccaaagg

SEQ ID NO: 1557454 - DNA, 15 bp, Homo sapiens
gcctagcatccaaag

SEQ ID NO: 1557455 - DNA, 15 bp, Homo sapiens
tgcctagcatccaaa

SEQ ID NO: 1557456 - DNA, 15 bp, Homo sapiens
atgcctagcatccaa

SEQ ID NO: 1557457 - DNA, 15 bp, Homo sapiens
gatgcctagcatcca

SEQ ID NO: 1557458 - DNA, 15 bp, Homo sapiens
tgatgcctagcatcc

SEQ ID NO: 1557459 - DNA, 15 bp, Homo sapiens
ctgatgcctagcatc

SEQ ID NO: 1557460 - DNA, 15 bp, Homo sapiens
tctgatgcctagcat

SEQ ID NO: 1557461 - DNA, 15 bp, Homo sapiens
ctctgatgcctagca

SEQ ID NO: 1557462 - DNA, 15 bp, Homo sapiens
actctgatgcctagc

SEQ ID NO: 1557463 - DNA, 15 bp, Homo sapiens
aactctgatgcctag

SEQ ID NO: 1557464 - DNA, 15 bp, Homo sapiens
taactctgatgccta

SEQ ID NO: 1557465 - DNA, 15 bp, Homo sapiens
ttaactctgatgcct

SEQ ID NO: 1557466 - DNA, 15 bp, Homo sapiens
attaactctgatgcc

SEQ ID NO: 1557467 - DNA, 15 bp, Homo sapiens
tattaactctgatgc

SEQ ID NO: 1557468 - DNA, 15 bp, Homo sapiens
ttattaactctgatg

SEQ ID NO: 1557469 - DNA, 15 bp, Homo sapiens
cttattaactctgat

SEQ ID NO: 1557470 - DNA, 15 bp, Homo sapiens
gcttattaactctga

SEQ ID NO: 1557471 - DNA, 15 bp, Homo sapiens
tgcttattaactctg

SEQ ID NO: 1557472 - DNA, 15 bp, Homo sapiens
atgcttattaactct

SEQ ID NO: 1557473 - DNA, 15 bp, Homo sapiens
catgcttattaactc

SEQ ID NO: 1557474 - DNA, 15 bp, Homo sapiens
acatgcttattaact

SEQ ID NO: 1557475 - DNA, 15 bp, Homo sapiens
aacatgcttattaac

SEQ ID NO: 1557476 - DNA, 15 bp, Homo sapiens
taacatgcttattaa

SEQ ID NO: 1557477 - DNA, 15 bp, Homo sapiens
ttaacatgcttatta

SEQ ID NO: 1557478 - DNA, 15 bp, Homo sapiens
tttaacatgcttatt

SEQ ID NO: 1557479 - DNA, 15 bp, Homo sapiens
ttttaacatgcttat

SEQ ID NO: 1557480 - DNA, 15 bp, Homo sapiens
cttttaacatgctta

SEQ ID NO: 1557481 - DNA, 15 bp, Homo sapiens
acttttaacatgctt

SEQ ID NO: 1557482 - DNA, 15 bp, Homo sapiens
gacttttaacatgct

SEQ ID NO: 1557483 - DNA, 15 bp, Homo sapiens
tgacttttaacatgc

SEQ ID NO: 1557484 - DNA, 15 bp, Homo sapiens
gtgacttttaacatg

SEQ ID NO: 1557485 - DNA, 15 bp, Homo sapiens
ggtgacttttaacat

SEQ ID NO: 1557486 - DNA, 15 bp, Homo sapiens
cggtgacttttaaca

SEQ ID NO: 1557487 - DNA, 15 bp, Homo sapiens
ccggtgacttttaac

SEQ ID NO: 1557488 - DNA, 15 bp, Homo sapiens
cccggtgacttttaa

SEQ ID NO: 1557489 - DNA, 15 bp, Homo sapiens
tcccggtgactttta

SEQ ID NO: 1557490 - DNA, 15 bp, Homo sapiens
atcccggtgactttt

SEQ ID NO: 1557491 - DNA, 15 bp, Homo sapiens
catcccggtgacttt

SEQ ID NO: 1557492 - DNA, 15 bp, Homo sapiens
acatcccggtgactt

SEQ ID NO: 1557493 - DNA, 15 bp, Homo sapiens
tacatcccggtgact

SEQ ID NO: 1557494 - DNA, 15 bp, Homo sapiens
ttacatcccggtgac

SEQ ID NO: 1557495 - DNA, 15 bp, Homo sapiens
tttacatcccggtga

SEQ ID NO: 1557496 - DNA, 15 bp, Homo sapiens
atttacatcccggtg

SEQ ID NO: 1557497 - DNA, 15 bp, Homo sapiens
aatttacatcccggt

SEQ ID NO: 1557498 - DNA, 15 bp, Homo sapiens
caatttacatcccgg

SEQ ID NO: 1557499 - DNA, 15 bp, Homo sapiens
tcaatttacatcccg

SEQ ID NO: 1557500 - DNA, 15 bp, Homo sapiens
gtcaatttacatccc

SEQ ID NO: 1557501 - DNA, 15 bp, Homo sapiens
tgtcaatttacatcc

SEQ ID NO: 1557502 - DNA, 15 bp, Homo sapiens
ctgtcaatttacatc

SEQ ID NO: 1557503 - DNA, 15 bp, Homo sapiens
actgtcaatttacat

SEQ ID NO: 1557504 - DNA, 15 bp, Homo sapiens
gactgtcaatttaca

SEQ ID NO: 1557505 - DNA, 15 bp, Homo sapiens
tgactgtcaatttac

SEQ ID NO: 1557506 - DNA, 15 bp, Homo sapiens
atgactgtcaattta

SEQ ID NO: 1557507 - DNA, 15 bp, Homo sapiens
aatgactgtcaattt

SEQ ID NO: 1557508 - DNA, 15 bp, Homo sapiens
aaatgactgtcaatt

SEQ ID NO: 1557509 - DNA, 15 bp, Homo sapiens
taaatgactgtcaat

SEQ ID NO: 1557510 - DNA, 15 bp, Homo sapiens
ataaatgactgtcaa

SEQ ID NO: 1557511 - DNA, 15 bp, Homo sapiens
aataaatgactgtca

SEQ ID NO: 1557512 - DNA, 15 bp, Homo sapiens
aaataaatgactgtc

SEQ ID NO: 1557513 - DNA, 15 bp, Homo sapiens
aaaataaatgactgt

SEQ ID NO: 1557514 - DNA, 15 bp, Homo sapiens
caaaataaatgactg

SEQ ID NO: 1557515 - DNA, 15 bp, Homo sapiens
acaaaataaatgact

SEQ ID NO: 1557516 - DNA, 15 bp, Homo sapiens
tacaaaataaatgac

SEQ ID NO: 1557517 - DNA, 15 bp, Homo sapiens
atacaaaataaatga

SEQ ID NO: 1557518 - DNA, 15 bp, Homo sapiens
aatacaaaataaatg

SEQ ID NO: 1557519 - DNA, 15 bp, Homo sapiens
caatacaaaataaat

SEQ ID NO: 1557520 - DNA, 15 bp, Homo sapiens
acaatacaaaataaa

SEQ ID NO: 1557521 - DNA, 15 bp, Homo sapiens
tacaatacaaaataa

SEQ ID NO: 1557522 - DNA, 15 bp, Homo sapiens
ttacaatacaaaata

SEQ ID NO: 1557523 - DNA, 15 bp, Homo sapiens
tttacaatacaaaat

SEQ ID NO: 1557524 - DNA, 15 bp, Homo sapiens
atttacaatacaaaa

SEQ ID NO: 1557525 - DNA, 15 bp, Homo sapiens
tatttacaatacaaa

SEQ ID NO: 1557526 - DNA, 15 bp, Homo sapiens
ttatttacaatacaa

SEQ ID NO: 1557527 - DNA, 15 bp, Homo sapiens
tttatttacaataca

SEQ ID NO: 1557528 - DNA, 15 bp, Homo sapiens
ttttatttacaatac

SEQ ID NO: 1557529 - DNA, 15 bp, Homo sapiens
cttttatttacaata

SEQ ID NO: 1557530 - DNA, 15 bp, Homo sapiens
acttttatttacaat

SEQ ID NO: 1557531 - DNA, 15 bp, Homo sapiens
cacttttatttacaa

SEQ ID NO: 1557532 - DNA, 15 bp, Homo sapiens
tcacttttatttaca

SEQ ID NO: 1557533 - DNA, 15 bp, Homo sapiens
atcacttttatttac

SEQ ID NO: 1557534 - DNA, 15 bp, Homo sapiens
aatcacttttattta

SEQ ID NO: 1557535 - DNA, 15 bp, Homo sapiens
aaatcacttttattt

SEQ ID NO: 1557536 - DNA, 15 bp, Homo sapiens
gaaatcacttttatt

SEQ ID NO: 1557537 - DNA, 15 bp, Homo sapiens
tgaaatcacttttat

SEQ ID NO: 1557538 - DNA, 15 bp, Homo sapiens
atgaaatcactttta

SEQ ID NO: 1557539 - DNA, 15 bp, Homo sapiens
gatgaaatcactttt

SEQ ID NO: 1557540 - DNA, 15 bp, Homo sapiens
agatgaaatcacttt

SEQ ID NO: 1557541 - DNA, 15 bp, Homo sapiens
aagatgaaatcactt

SEQ ID NO: 1557542 - DNA, 15 bp, Homo sapiens
gaagatgaaatcact

SEQ ID NO: 1557543 - DNA, 15 bp, Homo sapiens
ggaagatgaaatcac

SEQ ID NO: 1557544 - DNA, 15 bp, Homo sapiens
tggaagatgaaatca

SEQ ID NO: 1557545 - DNA, 15 bp, Homo sapiens
gtggaagatgaaatc

SEQ ID NO: 1557546 - DNA, 15 bp, Homo sapiens
ggtggaagatgaaat

SEQ ID NO: 1557547 - DNA, 15 bp, Homo sapiens
tggtggaagatgaaa

SEQ ID NO: 1557548 - DNA, 15 bp, Homo sapiens
atggtggaagatgaa

SEQ ID NO: 1557549 - DNA, 15 bp, Homo sapiens
gatggtggaagatga

SEQ ID NO: 1557550 - DNA, 15 bp, Homo sapiens
agatggtggaagatg

SEQ ID NO: 1557551 - DNA, 15 bp, Homo sapiens
aagatggtggaagat

SEQ ID NO: 1557552 - DNA, 15 bp, Homo sapiens
gaagatggtggaaga

SEQ ID NO: 1557553 - DNA, 15 bp, Homo sapiens
agaagatggtggaag

SEQ ID NO: 1557554 - DNA, 15 bp, Homo sapiens
aagaagatggtggaa

SEQ ID NO: 1557555 - DNA, 15 bp, Homo sapiens
taagaagatggtgga

SEQ ID NO: 1557556 - DNA, 15 bp, Homo sapiens
ataagaagatggtgg

SEQ ID NO: 1557557 - DNA, 15 bp, Homo sapiens
aataagaagatggtg

SEQ ID NO: 1557558 - DNA, 15 bp, Homo sapiens
aaataagaagatggt

SEQ ID NO: 1557559 - DNA, 15 bp, Homo sapiens
taaataagaagatgg

SEQ ID NO: 1557560 - DNA, 15 bp, Homo sapiens
ataaataagaagatg

SEQ ID NO: 1557561 - DNA, 15 bp, Homo sapiens
tataaataagaagat

SEQ ID NO: 1557562 - DNA, 15 bp, Homo sapiens
atataaataagaaga

SEQ ID NO: 1557563 - DNA, 15 bp, Homo sapiens
catataaataagaag

SEQ ID NO: 1557564 - DNA, 15 bp, Homo sapiens
gcatataaataagaa

SEQ ID NO: 1557565 - DNA, 15 bp, Homo sapiens
agcatataaataaga

SEQ ID NO: 1557566 - DNA, 15 bp, Homo sapiens
aagcatataaataag

SEQ ID NO: 1557567 - DNA, 15 bp, Homo sapiens
caagcatataaataa

SEQ ID NO: 1557568 - DNA, 15 bp, Homo sapiens
tcaagcatataaata

SEQ ID NO: 1557569 - DNA, 15 bp, Homo sapiens
gtcaagcatataaat

SEQ ID NO: 1557570 - DNA, 15 bp, Homo sapiens
agtcaagcatataaa

SEQ ID NO: 1557571 - DNA, 15 bp, Homo sapiens
cagtcaagcatataa

SEQ ID NO: 1557572 - DNA, 15 bp, Homo sapiens
acagtcaagcatata

SEQ ID NO: 1557573 - DNA, 15 bp, Homo sapiens
gacagtcaagcatat

SEQ ID NO: 1557574 - DNA, 15 bp, Homo sapiens
agacagtcaagcata

SEQ ID NO: 1557575 - DNA, 15 bp, Homo sapiens
aagacagtcaagcat

SEQ ID NO: 1557576 - DNA, 15 bp, Homo sapiens
caagacagtcaagca

SEQ ID NO: 1557577 - DNA, 15 bp, Homo sapiens
gcaagacagtcaagc

SEQ ID NO: 1557578 - DNA, 15 bp, Homo sapiens
tgcaagacagtcaag

SEQ ID NO: 1557579 - DNA, 15 bp, Homo sapiens
gtgcaagacagtcaa

SEQ ID NO: 1557580 - DNA, 15 bp, Homo sapiens
ggtgcaagacagtca

SEQ ID NO: 1557581 - DNA, 15 bp, Homo sapiens
tggtgcaagacagtc

SEQ ID NO: 1557582 - DNA, 15 bp, Homo sapiens
ctggtgcaagacagt

SEQ ID NO: 1557583 - DNA, 15 bp, Homo sapiens
actggtgcaagacag

SEQ ID NO: 1557584 - DNA, 15 bp, Homo sapiens
aactggtgcaagaca

SEQ ID NO: 1557585 - DNA, 15 bp, Homo sapiens
taactggtgcaagac

SEQ ID NO: 1557586 - DNA, 15 bp, Homo sapiens
ttaactggtgcaaga

SEQ ID NO: 1557587 - DNA, 15 bp, Homo sapiens
attaactggtgcaag

SEQ ID NO: 1557588 - DNA, 15 bp, Homo sapiens
aattaactggtgcaa

SEQ ID NO: 1557589 - DNA, 15 bp, Homo sapiens
aaattaactggtgca

SEQ ID NO: 1557590 - DNA, 15 bp, Homo sapiens
caaattaactggtgc

SEQ ID NO: 1557591 - DNA, 15 bp, Homo sapiens
acaaattaactggtg

SEQ ID NO: 1557592 - DNA, 15 bp, Homo sapiens
tacaaattaactggt

SEQ ID NO: 1557593 - DNA, 15 bp, Homo sapiens
ctacaaattaactgg

SEQ ID NO: 1557594 - DNA, 15 bp, Homo sapiens
actacaaattaactg

SEQ ID NO: 1557595 - DNA, 15 bp, Homo sapiens
tactacaaattaact

SEQ ID NO: 1557596 - DNA, 15 bp, Homo sapiens
ctactacaaattaac

SEQ ID NO: 1557597 - DNA, 15 bp, Homo sapiens
gctactacaaattaa

SEQ ID NO: 1557598 - DNA, 15 bp, Homo sapiens
agctactacaaatta

SEQ ID NO: 1557599 - DNA, 15 bp, Homo sapiens
tagctactacaaatt

SEQ ID NO: 1557600 - DNA, 15 bp, Homo sapiens
ttagctactacaaat

SEQ ID NO: 1557601 - DNA, 15 bp, Homo sapiens
tttagctactacaaa

SEQ ID NO: 1557602 - DNA, 15 bp, Homo sapiens
ttttagctactacaa

SEQ ID NO: 1557603 - DNA, 15 bp, Homo sapiens
attttagctactaca

SEQ ID NO: 1557604 - DNA, 15 bp, Homo sapiens
cattttagctactac

SEQ ID NO: 1557605 - DNA, 15 bp, Homo sapiens
acattttagctacta

SEQ ID NO: 1557606 - DNA, 15 bp, Homo sapiens
aacattttagctact

SEQ ID NO: 1557607 - DNA, 15 bp, Homo sapiens
gaacattttagctac

SEQ ID NO: 1557608 - DNA, 15 bp, Homo sapiens
agaacattttagcta

SEQ ID NO: 1557609 - DNA, 15 bp, Homo sapiens
cagaacattttagct

SEQ ID NO: 1557610 - DNA, 15 bp, Homo sapiens
acagaacattttagc

SEQ ID NO: 1557611 - DNA, 15 bp, Homo sapiens
cacagaacattttag

SEQ ID NO: 1557612 - DNA, 15 bp, Homo sapiens
ccacagaacatttta

SEQ ID NO: 1557613 - DNA, 15 bp, Homo sapiens
accacagaacatttt

SEQ ID NO: 1557614 - DNA, 15 bp, Homo sapiens
aaccacagaacattt

SEQ ID NO: 1557615 - DNA, 15 bp, Homo sapiens
aaaccacagaacatt

SEQ ID NO: 1557616 - DNA, 15 bp, Homo sapiens
aaaaccacagaacat

SEQ ID NO: 1557617 - DNA, 15 bp, Homo sapiens
gaaaaccacagaaca

SEQ ID NO: 1557618 - DNA, 15 bp, Homo sapiens
agaaaaccacagaac

SEQ ID NO: 1557619 - DNA, 15 bp, Homo sapiens
cagaaaaccacagaa

SEQ ID NO: 1557620 - DNA, 15 bp, Homo sapiens
gcagaaaaccacaga

SEQ ID NO: 1557621 - DNA, 15 bp, Homo sapiens
tgcagaaaaccacag

SEQ ID NO: 1557622 - DNA, 15 bp, Homo sapiens
ctgcagaaaaccaca

SEQ ID NO: 1557623 - DNA, 15 bp, Homo sapiens
actgcagaaaaccac

SEQ ID NO: 1557624 - DNA, 15 bp, Homo sapiens
gactgcagaaaacca

SEQ ID NO: 1557625 - DNA, 15 bp, Homo sapiens
tgactgcagaaaacc

SEQ ID NO: 1557626 - DNA, 15 bp, Homo sapiens
ttgactgcagaaaac

SEQ ID NO: 1557627 - DNA, 15 bp, Homo sapiens
gttgactgcagaaaa

SEQ ID NO: 1557628 - DNA, 15 bp, Homo sapiens
agttgactgcagaaa

SEQ ID NO: 1557629 - DNA, 15 bp, Homo sapiens
cagttgactgcagaa

SEQ ID NO: 1557630 - DNA, 15 bp, Homo sapiens
tcagttgactgcaga

SEQ ID NO: 1557631 - DNA, 15 bp, Homo sapiens
ttcagttgactgcag

SEQ ID NO: 1557632 - DNA, 15 bp, Homo sapiens
tttcagttgactgca

SEQ ID NO: 1557633 - DNA, 15 bp, Homo sapiens
ttttcagttgactgc

SEQ ID NO: 1557634 - DNA, 15 bp, Homo sapiens
attttcagttgactg

SEQ ID NO: 1557635 - DNA, 15 bp, Homo sapiens
tattttcagttgact

SEQ ID NO: 1557636 - DNA, 15 bp, Homo sapiens
ttattttcagttgac

SEQ ID NO: 1557637 - DNA, 15 bp, Homo sapiens
attattttcagttga

SEQ ID NO: 1557638 - DNA, 15 bp, Homo sapiens
aattattttcagttg

SEQ ID NO: 1557639 - DNA, 15 bp, Homo sapiens
aaattattttcagtt

SEQ ID NO: 1557640 - DNA, 15 bp, Homo sapiens
gaaattattttcagt

SEQ ID NO: 1557641 - DNA, 15 bp, Homo sapiens
agaaattattttcag

SEQ ID NO: 1557642 - DNA, 15 bp, Homo sapiens
gagaaattattttca

SEQ ID NO: 1557643 - DNA, 15 bp, Homo sapiens
agagaaattattttc

SEQ ID NO: 1557644 - DNA, 15 bp, Homo sapiens
gagagaaattatttt

SEQ ID NO: 1557645 - DNA, 15 bp, Homo sapiens
tgagagaaattattt

SEQ ID NO: 1557646 - DNA, 15 bp, Homo sapiens
ttgagagaaattatt

SEQ ID NO: 1557647 - DNA, 15 bp, Homo sapiens
tttgagagaaattat

SEQ ID NO: 1557648 - DNA, 15 bp, Homo sapiens
atttgagagaaatta

SEQ ID NO: 1557649 - DNA, 15 bp, Homo sapiens
aatttgagagaaatt

SEQ ID NO: 1557650 - DNA, 15 bp, Homo sapiens
caatttgagagaaat

SEQ ID NO: 1557651 - DNA, 15 bp, Homo sapiens
tcaatttgagagaaa

SEQ ID NO: 1557652 - DNA, 15 bp, Homo sapiens
ttcaatttgagagaa

SEQ ID NO: 1557653 - DNA, 15 bp, Homo sapiens
tttcaatttgagaga

SEQ ID NO: 1557654 - DNA, 15 bp, Homo sapiens
ctttcaatttgagag

SEQ ID NO: 1557655 - DNA, 15 bp, Homo sapiens
cctttcaatttgaga

SEQ ID NO: 1557656 - DNA, 15 bp, Homo sapiens
tcctttcaatttgag

SEQ ID NO: 1557657 - DNA, 15 bp, Homo sapiens
atcctttcaatttga

SEQ ID NO: 1557658 - DNA, 15 bp, Homo sapiens
aatcctttcaatttg

SEQ ID NO: 1557659 - DNA, 15 bp, Homo sapiens
taatcctttcaattt

SEQ ID NO: 1557660 - DNA, 15 bp, Homo sapiens
gtaatcctttcaatt

SEQ ID NO: 1557661 - DNA, 15 bp, Homo sapiens
agtaatcctttcaat

SEQ ID NO: 1557662 - DNA, 15 bp, Homo sapiens
aagtaatcctttcaa

SEQ ID NO: 1557663 - DNA, 15 bp, Homo sapiens
taagtaatcctttca

SEQ ID NO: 1557664 - DNA, 15 bp, Homo sapiens
ataagtaatcctttc

SEQ ID NO: 1557665 - DNA, 15 bp, Homo sapiens
gataagtaatccttt

SEQ ID NO: 1557666 - DNA, 15 bp, Homo sapiens
agataagtaatcctt

SEQ ID NO: 1557667 - DNA, 15 bp, Homo sapiens
aagataagtaatcct

SEQ ID NO: 1557668 - DNA, 15 bp, Homo sapiens
caagataagtaatcc

SEQ ID NO: 1557669 - DNA, 15 bp, Homo sapiens
acaagataagtaatc

SEQ ID NO: 1557670 - DNA, 15 bp, Homo sapiens
gacaagataagtaat

SEQ ID NO: 1557671 - DNA, 15 bp, Homo sapiens
tgacaagataagtaa

SEQ ID NO: 1557672 - DNA, 15 bp, Homo sapiens
atgacaagataagta

SEQ ID NO: 1557673 - DNA, 15 bp, Homo sapiens
tatgacaagataagt

SEQ ID NO: 1557674 - DNA, 15 bp, Homo sapiens
gtatgacaagataag

SEQ ID NO: 1557675 - DNA, 15 bp, Homo sapiens
agtatgacaagataa

SEQ ID NO: 1557676 - DNA, 15 bp, Homo sapiens
tagtatgacaagata

SEQ ID NO: 1557677 - DNA, 15 bp, Homo sapiens
atagtatgacaagat

SEQ ID NO: 1557678 - DNA, 15 bp, Homo sapiens
aatagtatgacaaga

SEQ ID NO: 1557679 - DNA, 15 bp, Homo sapiens
caatagtatgacaag

SEQ ID NO: 1557680 - DNA, 15 bp, Homo sapiens
tcaatagtatgacaa

SEQ ID NO: 1557681 - DNA, 15 bp, Homo sapiens
ttcaatagtatgaca

SEQ ID NO: 1557682 - DNA, 15 bp, Homo sapiens
gttcaatagtatgac

SEQ ID NO: 1557683 - DNA, 15 bp, Homo sapiens
tgttcaatagtatga

SEQ ID NO: 1557684 - DNA, 15 bp, Homo sapiens
gtgttcaatagtatg

SEQ ID NO: 1557685 - DNA, 15 bp, Homo sapiens
tgtgttcaatagtat

SEQ ID NO: 1557686 - DNA, 15 bp, Homo sapiens
ttgtgttcaatagta

SEQ ID NO: 1557687 - DNA, 15 bp, Homo sapiens
tttgtgttcaatagt

SEQ ID NO: 1557688 - DNA, 15 bp, Homo sapiens
ttttgtgttcaatag

SEQ ID NO: 1557689 - DNA, 15 bp, Homo sapiens
attttgtgttcaata

SEQ ID NO: 1557690 - DNA, 15 bp, Homo sapiens
aattttgtgttcaat

SEQ ID NO: 1557691 - DNA, 15 bp, Homo sapiens
taattttgtgttcaa

SEQ ID NO: 1557692 - DNA, 15 bp, Homo sapiens
ttaattttgtgttca

SEQ ID NO: 1557693 - DNA, 15 bp, Homo sapiens
cttaattttgtgttc

SEQ ID NO: 1557694 - DNA, 15 bp, Homo sapiens
acttaattttgtgtt

SEQ ID NO: 1557695 - DNA, 15 bp, Homo sapiens
cacttaattttgtgt

SEQ ID NO: 1557696 - DNA, 15 bp, Homo sapiens
tcacttaattttgtg

SEQ ID NO: 1557697 - DNA, 15 bp, Homo sapiens
ctcacttaattttgt

SEQ ID NO: 1557698 - DNA, 15 bp, Homo sapiens
gctcacttaattttg

SEQ ID NO: 1557699 - DNA, 15 bp, Homo sapiens
ggctcacttaatttt

SEQ ID NO: 1557700 - DNA, 15 bp, Homo sapiens
aggctcacttaattt

SEQ ID NO: 1557701 - DNA, 15 bp, Homo sapiens
aaggctcacttaatt

SEQ ID NO: 1557702 - DNA, 15 bp, Homo sapiens
aaaggctcacttaat

SEQ ID NO: 1557703 - DNA, 15 bp, Homo sapiens
taaaggctcacttaa

SEQ ID NO: 1557704 - DNA, 15 bp, Homo sapiens
ttaaaggctcactta

SEQ ID NO: 1557705 - DNA, 15 bp, Homo sapiens
tttaaaggctcactt

SEQ ID NO: 1557706 - DNA, 15 bp, Homo sapiens
ctttaaaggctcact

SEQ ID NO: 1557707 - DNA, 15 bp, Homo sapiens
tctttaaaggctcac

SEQ ID NO: 1557708 - DNA, 15 bp, Homo sapiens
ttctttaaaggctca

SEQ ID NO: 1557709 - DNA, 15 bp, Homo sapiens
tttctttaaaggctc

SEQ ID NO: 1557710 - DNA, 15 bp, Homo sapiens
ctttctttaaaggct

SEQ ID NO: 1557711 - DNA, 15 bp, Homo sapiens
gctttctttaaaggc

SEQ ID NO: 1557712 - DNA, 15 bp, Homo sapiens
agctttctttaaagg

SEQ ID NO: 1557713 - DNA, 15 bp, Homo sapiens
tagctttctttaaag

SEQ ID NO: 1557714 - DNA, 15 bp, Homo sapiens
gtagctttctttaaa

SEQ ID NO: 1557715 - DNA, 15 bp, Homo sapiens
agtagctttctttaa

SEQ ID NO: 1557716 - DNA, 15 bp, Homo sapiens
cagtagctttcttta

SEQ ID NO: 1557717 - DNA, 15 bp, Homo sapiens
acagtagctttcttt

SEQ ID NO: 1557718 - DNA, 15 bp, Homo sapiens
cacagtagctttctt

SEQ ID NO: 1557719 - DNA, 15 bp, Homo sapiens
acacagtagctttct

SEQ ID NO: 1557720 - DNA, 15 bp, Homo sapiens
cacacagtagctttc

SEQ ID NO: 1557721 - DNA, 15 bp, Homo sapiens
tcacacagtagcttt

SEQ ID NO: 1557722 - DNA, 15 bp, Homo sapiens
ttcacacagtagctt

SEQ ID NO: 1557723 - DNA, 15 bp, Homo sapiens
gttcacacagtagct

SEQ ID NO: 1557724 - DNA, 15 bp, Homo sapiens
ggttcacacagtagc

SEQ ID NO: 1557725 - DNA, 15 bp, Homo sapiens
aggttcacacagtag

SEQ ID NO: 1557726 - DNA, 15 bp, Homo sapiens
gaggttcacacagta

SEQ ID NO: 1557727 - DNA, 15 bp, Homo sapiens
tgaggttcacacagt

SEQ ID NO: 1557728 - DNA, 15 bp, Homo sapiens
atgaggttcacacag

SEQ ID NO: 1557729 - DNA, 15 bp, Homo sapiens
gatgaggttcacaca

SEQ ID NO: 1557730 - DNA, 15 bp, Homo sapiens
tgatgaggttcacac

SEQ ID NO: 1557731 - DNA, 15 bp, Homo sapiens
ttgatgaggttcaca

SEQ ID NO: 1557732 - DNA, 15 bp, Homo sapiens
gttgatgaggttcac

SEQ ID NO: 1557733 - DNA, 15 bp, Homo sapiens
ggttgatgaggttca

SEQ ID NO: 1557734 - DNA, 15 bp, Homo sapiens
tggttgatgaggttc

SEQ ID NO: 1557735 - DNA, 15 bp, Homo sapiens
atggttgatgaggtt

SEQ ID NO: 1557736 - DNA, 15 bp, Homo sapiens
gatggttgatgaggt

SEQ ID NO: 1557737 - DNA, 15 bp, Homo sapiens
agatggttgatgagg

SEQ ID NO: 1557738 - DNA, 15 bp, Homo sapiens
gagatggttgatgag

SEQ ID NO: 1557739 - DNA, 15 bp, Homo sapiens
tgagatggttgatga

SEQ ID NO: 1557740 - DNA, 15 bp, Homo sapiens
atgagatggttgatg

SEQ ID NO: 1557741 - DNA, 15 bp, Homo sapiens
catgagatggttgat

SEQ ID NO: 1557742 - DNA, 15 bp, Homo sapiens
tcatgagatggttga

SEQ ID NO: 1557743 - DNA, 15 bp, Homo sapiens
atcatgagatggttg

SEQ ID NO: 1557744 - DNA, 15 bp, Homo sapiens
aatcatgagatggtt

SEQ ID NO: 1557745 - DNA, 15 bp, Homo sapiens
taatcatgagatggt

SEQ ID NO: 1557746 - DNA, 15 bp, Homo sapiens
ataatcatgagatgg

SEQ ID NO: 1557747 - DNA, 15 bp, Homo sapiens
gataatcatgagatg

SEQ ID NO: 1557748 - DNA, 15 bp, Homo sapiens
agataatcatgagat

SEQ ID NO: 1557749 - DNA, 15 bp, Homo sapiens
aagataatcatgaga

SEQ ID NO: 1557750 - DNA, 15 bp, Homo sapiens
aaagataatcatgag

SEQ ID NO: 1557751 - DNA, 15 bp, Homo sapiens
taaagataatcatga

SEQ ID NO: 1557752 - DNA, 15 bp, Homo sapiens
ttaaagataatcatg

SEQ ID NO: 1557753 - DNA, 15 bp, Homo sapiens
attaaagataatcat

SEQ ID NO: 1557754 - DNA, 15 bp, Homo sapiens
tattaaagataatca

SEQ ID NO: 1557755 - DNA, 15 bp, Homo sapiens
ctattaaagataatc

SEQ ID NO: 1557756 - DNA, 15 bp, Homo sapiens
tctattaaagataat

SEQ ID NO: 1557757 - DNA, 15 bp, Homo sapiens
ctctattaaagataa

SEQ ID NO: 1557758 - DNA, 15 bp, Homo sapiens
actctattaaagata

SEQ ID NO: 1557759 - DNA, 15 bp, Homo sapiens
gactctattaaagat

SEQ ID NO: 1557760 - DNA, 15 bp, Homo sapiens
ggactctattaaaga

SEQ ID NO: 1557761 - DNA, 15 bp, Homo sapiens
tggactctattaaag

SEQ ID NO: 1557762 - DNA, 15 bp, Homo sapiens
ctggactctattaaa

SEQ ID NO: 1557763 - DNA, 15 bp, Homo sapiens
tctggactctattaa

SEQ ID NO: 1557764 - DNA, 15 bp, Homo sapiens
ctctggactctatta

SEQ ID NO: 1557765 - DNA, 15 bp, Homo sapiens
cctctggactctatt

SEQ ID NO: 1557766 - DNA, 15 bp, Homo sapiens
tcctctggactctat

SEQ ID NO: 1557767 - DNA, 15 bp, Homo sapiens
ttcctctggactcta

SEQ ID NO: 1557768 - DNA, 15 bp, Homo sapiens
cttcctctggactct

SEQ ID NO: 1557769 - DNA, 15 bp, Homo sapiens
acttcctctggactc

SEQ ID NO: 1557770 - DNA, 15 bp, Homo sapiens
tacttcctctggact

SEQ ID NO: 1557771 - DNA, 15 bp, Homo sapiens
atacttcctctggac

SEQ ID NO: 1557772 - DNA, 15 bp, Homo sapiens
aatacttcctctgga

SEQ ID NO: 1557773 - DNA, 15 bp, Homo sapiens
aaatacttcctctgg

SEQ ID NO: 1557774 - DNA, 15 bp, Homo sapiens
taaatacttcctctg

SEQ ID NO: 1557775 - DNA, 15 bp, Homo sapiens
ataaatacttcctct

SEQ ID NO: 1557776 - DNA, 15 bp, Homo sapiens
cataaatacttcctc

SEQ ID NO: 1557777 - DNA, 15 bp, Homo sapiens
ccataaatacttcct

SEQ ID NO: 1557778 - DNA, 15 bp, Homo sapiens
gccataaatacttcc

SEQ ID NO: 1557779 - DNA, 15 bp, Homo sapiens
tgccataaatacttc

SEQ ID NO: 1557780 - DNA, 15 bp, Homo sapiens
ttgccataaatactt

SEQ ID NO: 1557781 - DNA, 15 bp, Homo sapiens
attgccataaatact

SEQ ID NO: 1557782 - DNA, 15 bp, Homo sapiens
gattgccataaatac

SEQ ID NO: 1557783 - DNA, 15 bp, Homo sapiens
ggattgccataaata

SEQ ID NO: 1557784 - DNA, 15 bp, Homo sapiens
cggattgccataaat

SEQ ID NO: 1557785 - DNA, 15 bp, Homo sapiens
ccggattgccataaa

SEQ ID NO: 1557786 - DNA, 15 bp, Homo sapiens
tccggattgccataa

SEQ ID NO: 1557787 - DNA, 15 bp, Homo sapiens
ttccggattgccata

SEQ ID NO: 1557788 - DNA, 15 bp, Homo sapiens
attccggattgccat

SEQ ID NO: 1557789 - DNA, 15 bp, Homo sapiens
gattccggattgcca

SEQ ID NO: 1557790 - DNA, 15 bp, Homo sapiens
ggattccggattgcc

SEQ ID NO: 1557791 - DNA, 15 bp, Homo sapiens
aggattccggattgc

SEQ ID NO: 1557792 - DNA, 15 bp, Homo sapiens
gaggattccggattg

SEQ ID NO: 1557793 - DNA, 15 bp, Homo sapiens
agaggattccggatt

SEQ ID NO: 1557794 - DNA, 15 bp, Homo sapiens
cagaggattccggat

SEQ ID NO: 1557795 - DNA, 15 bp, Homo sapiens
ccagaggattccgga

SEQ ID NO: 1557796 - DNA, 15 bp, Homo sapiens
tccagaggattccgg

SEQ ID NO: 1557797 - DNA, 15 bp, Homo sapiens
ctccagaggattccg

SEQ ID NO: 1557798 - DNA, 15 bp, Homo sapiens
actccagaggattcc

SEQ ID NO: 1557799 - DNA, 15 bp, Homo sapiens
cactccagaggattc

SEQ ID NO: 1557800 - DNA, 15 bp, Homo sapiens
ccactccagaggatt

SEQ ID NO: 1557801 - DNA, 15 bp, Homo sapiens
gccactccagaggat

SEQ ID NO: 1557802 - DNA, 15 bp, Homo sapiens
tgccactccagagga

SEQ ID NO: 1557803 - DNA, 15 bp, Homo sapiens
gtgccactccagagg

SEQ ID NO: 1557804 - DNA, 15 bp, Homo sapiens
agtgccactccagag

SEQ ID NO: 1557805 - DNA, 15 bp, Homo sapiens
cagtgccactccaga

SEQ ID NO: 1557806 - DNA, 15 bp, Homo sapiens
gcagtgccactccag

SEQ ID NO: 1557807 - DNA, 15 bp, Homo sapiens
tgcagtgccactcca

SEQ ID NO: 1557808 - DNA, 15 bp, Homo sapiens
ttgcagtgccactcc

SEQ ID NO: 1557809 - DNA, 15 bp, Homo sapiens
cttgcagtgccactc

SEQ ID NO: 1557810 - DNA, 15 bp, Homo sapiens
gcttgcagtgccact

SEQ ID NO: 1557811 - DNA, 15 bp, Homo sapiens
tgcttgcagtgccac

SEQ ID NO: 1557812 - DNA, 15 bp, Homo sapiens
ttgcttgcagtgcca

SEQ ID NO: 1557813 - DNA, 15 bp, Homo sapiens
tttgcttgcagtgcc

SEQ ID NO: 1557814 - DNA, 15 bp, Homo sapiens
atttgcttgcagtgc

SEQ ID NO: 1557815 - DNA, 15 bp, Homo sapiens
catttgcttgcagtg

SEQ ID NO: 1557816 - DNA, 15 bp, Homo sapiens
ccatttgcttgcagt

SEQ ID NO: 1557817 - DNA, 15 bp, Homo sapiens
tccatttgcttgcag

SEQ ID NO: 1557818 - DNA, 15 bp, Homo sapiens
atccatttgcttgca

SEQ ID NO: 1557819 - DNA, 15 bp, Homo sapiens
gatccatttgcttgc

SEQ ID NO: 1557820 - DNA, 15 bp, Homo sapiens
tgatccatttgcttg

SEQ ID NO: 1557821 - DNA, 15 bp, Homo sapiens
atgatccatttgctt

SEQ ID NO: 1557822 - DNA, 15 bp, Homo sapiens
aatgatccatttgct

SEQ ID NO: 1557823 - DNA, 15 bp, Homo sapiens
aaatgatccatttgc

SEQ ID NO: 1557824 - DNA, 15 bp, Homo sapiens
aaaatgatccatttg

SEQ ID NO: 1557825 - DNA, 15 bp, Homo sapiens
caaaatgatccattt

SEQ ID NO: 1557826 - DNA, 15 bp, Homo sapiens
acaaaatgatccatt

SEQ ID NO: 1557827 - DNA, 15 bp, Homo sapiens
aacaaaatgatccat

SEQ ID NO: 1557828 - DNA, 15 bp, Homo sapiens
caacaaaatgatcca

SEQ ID NO: 1557829 - DNA, 15 bp, Homo sapiens
ccaacaaaatgatcc

SEQ ID NO: 1557830 - DNA, 15 bp, Homo sapiens
tccaacaaaatgatc

SEQ ID NO: 1557831 - DNA, 15 bp, Homo sapiens
gtccaacaaaatgat

SEQ ID NO: 1557832 - DNA, 15 bp, Homo sapiens
agtccaacaaaatga

SEQ ID NO: 1557833 - DNA, 15 bp, Homo sapiens
gagtccaacaaaatg

SEQ ID NO: 1557834 - DNA, 15 bp, Homo sapiens
tgagtccaacaaaat

SEQ ID NO: 1557835 - DNA, 15 bp, Homo sapiens
ttgagtccaacaaaa

SEQ ID NO: 1557836 - DNA, 15 bp, Homo sapiens
attgagtccaacaaa

SEQ ID NO: 1557837 - DNA, 15 bp, Homo sapiens
aattgagtccaacaa

SEQ ID NO: 1557838 - DNA, 15 bp, Homo sapiens
aaattgagtccaaca

SEQ ID NO: 1557839 - DNA, 15 bp, Homo sapiens
gaaattgagtccaac

SEQ ID NO: 1557840 - DNA, 15 bp, Homo sapiens
tgaaattgagtccaa

SEQ ID NO: 1557841 - DNA, 15 bp, Homo sapiens
ttgaaattgagtcca

SEQ ID NO: 1557842 - DNA, 15 bp, Homo sapiens
gttgaaattgagtcc

SEQ ID NO: 1557843 - DNA, 15 bp, Homo sapiens
agttgaaattgagtc

SEQ ID NO: 1557844 - DNA, 15 bp, Homo sapiens
gagttgaaattgagt

SEQ ID NO: 1557845 - DNA, 15 bp, Homo sapiens
agagttgaaattgag

SEQ ID NO: 1557846 - DNA, 15 bp, Homo sapiens
tagagttgaaattga

SEQ ID NO: 1557847 - DNA, 15 bp, Homo sapiens
ttagagttgaaattg

SEQ ID NO: 1557848 - DNA, 15 bp, Homo sapiens
gttagagttgaaatt

SEQ ID NO: 1557849 - DNA, 15 bp, Homo sapiens
agttagagttgaaat

SEQ ID NO: 1557850 - DNA, 15 bp, Homo sapiens
aagttagagttgaaa

SEQ ID NO: 1557851 - DNA, 15 bp, Homo sapiens
aaagttagagttgaa

SEQ ID NO: 1557852 - DNA, 15 bp, Homo sapiens
taaagttagagttga

SEQ ID NO: 1557853 - DNA, 15 bp, Homo sapiens
ttaaagttagagttg

SEQ ID NO: 1557854 - DNA, 15 bp, Homo sapiens
gttaaagttagagtt

SEQ ID NO: 1557855 - DNA, 15 bp, Homo sapiens
agttaaagttagagt

SEQ ID NO: 1557856 - DNA, 15 bp, Homo sapiens
aagttaaagttagag

SEQ ID NO: 1557857 - DNA, 15 bp, Homo sapiens
aaagttaaagttaga

SEQ ID NO: 1557858 - DNA, 15 bp, Homo sapiens
caaagttaaagttag

SEQ ID NO: 1557859 - DNA, 15 bp, Homo sapiens
gcaaagttaaagtta

SEQ ID NO: 1557860 - DNA, 15 bp, Homo sapiens
tgcaaagttaaagtt

SEQ ID NO: 1557861 - DNA, 15 bp, Homo sapiens
atgcaaagttaaagt

SEQ ID NO: 1557862 - DNA, 15 bp, Homo sapiens
aatgcaaagttaaag

SEQ ID NO: 1557863 - DNA, 15 bp, Homo sapiens
caatgcaaagttaaa

SEQ ID NO: 1557864 - DNA, 15 bp, Homo sapiens
ccaatgcaaagttaa

SEQ ID NO: 1557865 - DNA, 15 bp, Homo sapiens
accaatgcaaagtta

SEQ ID NO: 1557866 - DNA, 15 bp, Homo sapiens
aaccaatgcaaagtt

SEQ ID NO: 1557867 - DNA, 15 bp, Homo sapiens
caaccaatgcaaagt

SEQ ID NO: 1557868 - DNA, 15 bp, Homo sapiens
ccaaccaatgcaaag

SEQ ID NO: 1557869 - DNA, 15 bp, Homo sapiens
tccaaccaatgcaaa

SEQ ID NO: 1557870 - DNA, 15 bp, Homo sapiens
gtccaaccaatgcaa

SEQ ID NO: 1557871 - DNA, 15 bp, Homo sapiens
tgtccaaccaatgca

SEQ ID NO: 1557872 - DNA, 15 bp, Homo sapiens
gtgtccaaccaatgc

SEQ ID NO: 1557873 - DNA, 15 bp, Homo sapiens
ggtgtccaaccaatg

SEQ ID NO: 1557874 - DNA, 15 bp, Homo sapiens
aggtgtccaaccaat

SEQ ID NO: 1557875 - DNA, 15 bp, Homo sapiens
aaggtgtccaaccaa

SEQ ID NO: 1557876 - DNA, 15 bp, Homo sapiens
aaaggtgtccaacca

SEQ ID NO: 1557877 - DNA, 15 bp, Homo sapiens
aaaaggtgtccaacc

SEQ ID NO: 1557878 - DNA, 15 bp, Homo sapiens
taaaaggtgtccaac

SEQ ID NO: 1557879 - DNA, 15 bp, Homo sapiens
ttaaaaggtgtccaa

SEQ ID NO: 1557880 - DNA, 15 bp, Homo sapiens
tttaaaaggtgtcca

SEQ ID NO: 1557881 - DNA, 15 bp, Homo sapiens
ttttaaaaggtgtcc

SEQ ID NO: 1557882 - DNA, 15 bp, Homo sapiens
cttttaaaaggtgtc

SEQ ID NO: 1557883 - DNA, 15 bp, Homo sapiens
ccttttaaaaggtgt

SEQ ID NO: 1557884 - DNA, 15 bp, Homo sapiens
accttttaaaaggtg

SEQ ID NO: 1557885 - DNA, 15 bp, Homo sapiens
taccttttaaaaggt

SEQ ID NO: 1557886 - DNA, 15 bp, Homo sapiens
ttaccttttaaaagg

SEQ ID NO: 1557887 - DNA, 15 bp, Homo sapiens
tttaccttttaaaag

SEQ ID NO: 1557888 - DNA, 15 bp, Homo sapiens
ttttaccttttaaaa

SEQ ID NO: 1557889 - DNA, 15 bp, Homo sapiens
tttttaccttttaaa

SEQ ID NO: 1557890 - DNA, 15 bp, Homo sapiens
ttttttaccttttaa

SEQ ID NO: 1557891 - DNA, 15 bp, Homo sapiens
cttttttacctttta

SEQ ID NO: 1557892 - DNA, 15 bp, Homo sapiens
gcttttttacctttt

SEQ ID NO: 1557893 - DNA, 15 bp, Homo sapiens
ggcttttttaccttt

SEQ ID NO: 1557894 - DNA, 15 bp, Homo sapiens
aggcttttttacctt

SEQ ID NO: 1557895 - DNA, 15 bp, Homo sapiens
aaggcttttttacct

SEQ ID NO: 1557896 - DNA, 15 bp, Homo sapiens
taaggcttttttacc

SEQ ID NO: 1557897 - DNA, 15 bp, Homo sapiens
ataaggcttttttac

SEQ ID NO: 1557898 - DNA, 15 bp, Homo sapiens
aataaggctttttta

SEQ ID NO: 1557899 - DNA, 15 bp, Homo sapiens
taaataaggcttttt

SEQ ID NO: 1557900 - DNA, 15 bp, Homo sapiens
ctaaataaggctttt

SEQ ID NO: 1557901 - DNA, 15 bp, Homo sapiens
tctaaataaggcttt

SEQ ID NO: 1557902 - DNA, 15 bp, Homo sapiens
ttctaaataaggctt

SEQ ID NO: 1557903 - DNA, 15 bp, Homo sapiens
attctaaataaggct

SEQ ID NO: 1557904 - DNA, 15 bp, Homo sapiens
tattctaaataaggc

SEQ ID NO: 1557905 - DNA, 15 bp, Homo sapiens
atattctaaataagg

SEQ ID NO: 1557906 - DNA, 15 bp, Homo sapiens
aatattctaaataag

SEQ ID NO: 1557907 - DNA, 15 bp, Homo sapiens
aaatattctaaataa

SEQ ID NO: 1557908 - DNA, 15 bp, Homo sapiens
aaaaatattctaaat

SEQ ID NO: 1557909 - DNA, 15 bp, Homo sapiens
taaaaatattctaaa

SEQ ID NO: 1557910 - DNA, 15 bp, Homo sapiens
ataaaaatattctaa

SEQ ID NO: 1557911 - DNA, 15 bp, Homo sapiens
cataaaaatattcta

SEQ ID NO: 1557912 - DNA, 15 bp, Homo sapiens
tcataaaaatattct

SEQ ID NO: 1557913 - DNA, 15 bp, Homo sapiens
ttcataaaaatattc

SEQ ID NO: 1557914 - DNA, 15 bp, Homo sapiens
cttcataaaaatatt

SEQ ID NO: 1557915 - DNA, 15 bp, Homo sapiens
acttcataaaaatat

SEQ ID NO: 1557916 - DNA, 15 bp, Homo sapiens
tacttcataaaaata

SEQ ID NO: 1557917 - DNA, 15 bp, Homo sapiens
gtacttcataaaaat

SEQ ID NO: 1557918 - DNA, 15 bp, Homo sapiens
agtacttcataaaaa

SEQ ID NO: 1557919 - DNA, 15 bp, Homo sapiens
tagtacttcataaaa

SEQ ID NO: 1557920 - DNA, 15 bp, Homo sapiens
atagtacttcataaa

SEQ ID NO: 1557921 - DNA, 15 bp, Homo sapiens
aatagtacttcataa

SEQ ID NO: 1557922 - DNA, 15 bp, Homo sapiens
taatagtacttcata

SEQ ID NO: 1557923 - DNA, 15 bp, Homo sapiens
ttaatagtacttcat

SEQ ID NO: 1557924 - DNA, 15 bp, Homo sapiens
cttaatagtacttca

SEQ ID NO: 1557925 - DNA, 15 bp, Homo sapiens
tcttaatagtacttc

SEQ ID NO: 1557926 - DNA, 15 bp, Homo sapiens
ttcttaatagtactt

SEQ ID NO: 1557927 - DNA, 15 bp, Homo sapiens
tttcttaatagtact

SEQ ID NO: 1557928 - DNA, 15 bp, Homo sapiens
gtttcttaatagtac

SEQ ID NO: 1557929 - DNA, 15 bp, Homo sapiens
ggtttcttaatagta

SEQ ID NO: 1557930 - DNA, 15 bp, Homo sapiens
tggtttcttaatagt

SEQ ID NO: 1557931 - DNA, 15 bp, Homo sapiens
ctggtttcttaatag

SEQ ID NO: 1557932 - DNA, 15 bp, Homo sapiens
tctggtttcttaata

SEQ ID NO: 1557933 - DNA, 15 bp, Homo sapiens
ttctggtttcttaat

SEQ ID NO: 1557934 - DNA, 15 bp, Homo sapiens
cttctggtttcttaa

SEQ ID NO: 1557935 - DNA, 15 bp, Homo sapiens
acttctggtttctta

SEQ ID NO: 1557936 - DNA, 15 bp, Homo sapiens
tacttctggtttctt

SEQ ID NO: 1557937 - DNA, 15 bp, Homo sapiens
ttacttctggtttct

SEQ ID NO: 1557938 - DNA, 15 bp, Homo sapiens
attacttctggtttc

SEQ ID NO: 1557939 - DNA, 15 bp, Homo sapiens
aattacttctggttt

SEQ ID NO: 1557940 - DNA, 15 bp, Homo sapiens
aaattacttctggtt

SEQ ID NO: 1557941 - DNA, 15 bp, Homo sapiens
caaattacttctggt

SEQ ID NO: 1557942 - DNA, 15 bp, Homo sapiens
tcaaattacttctgg

SEQ ID NO: 1557943 - DNA, 15 bp, Homo sapiens
ttcaaattacttctg

SEQ ID NO: 1557944 - DNA, 15 bp, Homo sapiens
attcaaattacttct

SEQ ID NO: 1557945 - DNA, 15 bp, Homo sapiens
tattcaaattacttc

SEQ ID NO: 1557946 - DNA, 15 bp, Homo sapiens
ttattcaaattactt

SEQ ID NO: 1557947 - DNA, 15 bp, Homo sapiens
cttattcaaattact

SEQ ID NO: 1557948 - DNA, 15 bp, Homo sapiens
acttattcaaattac

SEQ ID NO: 1557949 - DNA, 15 bp, Homo sapiens
cacttattcaaatta

SEQ ID NO: 1557950 - DNA, 15 bp, Homo sapiens
tcacttattcaaatt

SEQ ID NO: 1557951 - DNA, 15 bp, Homo sapiens
atcacttattcaaat

SEQ ID NO: 1557952 - DNA, 15 bp, Homo sapiens
aatcacttattcaaa

SEQ ID NO: 1557953 - DNA, 15 bp, Homo sapiens
taatcacttattcaa

SEQ ID NO: 1557954 - DNA, 15 bp, Homo sapiens
gtaatcacttattca

SEQ ID NO: 1557955 - DNA, 15 bp, Homo sapiens
agtaatcacttattc

SEQ ID NO: 1557956 - DNA, 15 bp, Homo sapiens
aagtaatcacttatt

SEQ ID NO: 1557957 - DNA, 15 bp, Homo sapiens
caagtaatcacttat

SEQ ID NO: 1557958 - DNA, 15 bp, Homo sapiens
tcaagtaatcactta

SEQ ID NO: 1557959 - DNA, 15 bp, Homo sapiens
ttcaagtaatcactt

SEQ ID NO: 1557960 - DNA, 15 bp, Homo sapiens
tttcaagtaatcact

SEQ ID NO: 1557961 - DNA, 15 bp, Homo sapiens
atttcaagtaatcac

SEQ ID NO: 1557962 - DNA, 15 bp, Homo sapiens
tatttcaagtaatca

SEQ ID NO: 1557963 - DNA, 15 bp, Homo sapiens
ttatttcaagtaatc

SEQ ID NO: 1557964 - DNA, 15 bp, Homo sapiens
tttatttcaagtaat

SEQ ID NO: 1557965 - DNA, 15 bp, Homo sapiens
atttatttcaagtaa

SEQ ID NO: 1557966 - DNA, 15 bp, Homo sapiens
aatttatttcaagta

SEQ ID NO: 1557967 - DNA, 15 bp, Homo sapiens
caatttatttcaagt

SEQ ID NO: 1557968 - DNA, 15 bp, Homo sapiens
tcaatttatttcaag

SEQ ID NO: 1557969 - DNA, 15 bp, Homo sapiens
ttcaatttatttcaa

SEQ ID NO: 1557970 - DNA, 15 bp, Homo sapiens
cttcaatttatttca

SEQ ID NO: 1557971 - DNA, 15 bp, Homo sapiens
acttcaatttatttc

SEQ ID NO: 1557972 - DNA, 15 bp, Homo sapiens
tacttcaatttattt

SEQ ID NO: 1557973 - DNA, 15 bp, Homo sapiens
ttacttcaatttatt

SEQ ID NO: 1557974 - DNA, 15 bp, Homo sapiens
cttacttcaatttat

SEQ ID NO: 1557975 - DNA, 15 bp, Homo sapiens
acttacttcaattta

SEQ ID NO: 1557976 - DNA, 15 bp, Homo sapiens
aacttacttcaattt

SEQ ID NO: 1557977 - DNA, 15 bp, Homo sapiens
taacttacttcaatt

SEQ ID NO: 1557978 - DNA, 15 bp, Homo sapiens
ctaacttacttcaat

SEQ ID NO: 1557979 - DNA, 15 bp, Homo sapiens
gctaacttacttcaa

SEQ ID NO: 1557980 - DNA, 15 bp, Homo sapiens
ggctaacttacttca

SEQ ID NO: 1557981 - DNA, 15 bp, Homo sapiens
gggctaacttacttc

SEQ ID NO: 1557982 - DNA, 15 bp, Homo sapiens
agggctaacttactt

SEQ ID NO: 1557983 - DNA, 15 bp, Homo sapiens
aagggctaacttact

SEQ ID NO: 1557984 - DNA, 15 bp, Homo sapiens
taagggctaacttac

SEQ ID NO: 1557985 - DNA, 15 bp, Homo sapiens
ataagggctaactta

SEQ ID NO: 1557986 - DNA, 15 bp, Homo sapiens
cataagggctaactt

SEQ ID NO: 1557987 - DNA, 15 bp, Homo sapiens
acataagggctaact

SEQ ID NO: 1557988 - DNA, 15 bp, Homo sapiens
gacataagggctaac

SEQ ID NO: 1557989 - DNA, 15 bp, Homo sapiens
agacataagggctaa

SEQ ID NO: 1557990 - DNA, 15 bp, Homo sapiens
aagacataagggcta

SEQ ID NO: 1557991 - DNA, 15 bp, Homo sapiens
taagacataagggct

SEQ ID NO: 1557992 - DNA, 15 bp, Homo sapiens
gtaagacataagggc

SEQ ID NO: 1557993 - DNA, 15 bp, Homo sapiens
agtaagacataaggg

SEQ ID NO: 1557994 - DNA, 15 bp, Homo sapiens
aagtaagacataagg

SEQ ID NO: 1557995 - DNA, 15 bp, Homo sapiens
aaagtaagacataag

SEQ ID NO: 1557996 - DNA, 15 bp, Homo sapiens
taaagtaagacataa

SEQ ID NO: 1557997 - DNA, 15 bp, Homo sapiens
ttaaagtaagacata

SEQ ID NO: 1557998 - DNA, 15 bp, Homo sapiens
tttaaagtaagacat

SEQ ID NO: 1557999 - DNA, 15 bp, Homo sapiens
atttaaagtaagaca

SEQ ID NO: 1558000 - DNA, 15 bp, Homo sapiens
catttaaagtaagac

SEQ ID NO: 1558001 - DNA, 15 bp, Homo sapiens
gcatttaaagtaaga

SEQ ID NO: 1558002 - DNA, 15 bp, Homo sapiens
tgcatttaaagtaag

SEQ ID NO: 1558003 - DNA, 15 bp, Homo sapiens
ttgcatttaaagtaa

SEQ ID NO: 1558004 - DNA, 15 bp, Homo sapiens
tttgcatttaaagta

SEQ ID NO: 1558005 - DNA, 15 bp, Homo sapiens
gtttgcatttaaagt

SEQ ID NO: 1558006 - DNA, 15 bp, Homo sapiens
agtttgcatttaaag

SEQ ID NO: 1558007 - DNA, 15 bp, Homo sapiens
tagtttgcatttaaa

SEQ ID NO: 1558008 - DNA, 15 bp, Homo sapiens
ctagtttgcatttaa

SEQ ID NO: 1558009 - DNA, 15 bp, Homo sapiens
cctagtttgcattta

SEQ ID NO: 1558010 - DNA, 15 bp, Homo sapiens
gcctagtttgcattt

SEQ ID NO: 1558011 - DNA, 15 bp, Homo sapiens
ggcctagtttgcatt

SEQ ID NO: 1558012 - DNA, 15 bp, Homo sapiens
tggcctagtttgcat

SEQ ID NO: 1558013 - DNA, 15 bp, Homo sapiens
ctggcctagtttgca

SEQ ID NO: 1558014 - DNA, 15 bp, Homo sapiens
cctggcctagtttgc

SEQ ID NO: 1558015 - DNA, 15 bp, Homo sapiens
gcctggcctagtttg

SEQ ID NO: 1558016 - DNA, 15 bp, Homo sapiens
cgcctggcctagttt

SEQ ID NO: 1558017 - DNA, 15 bp, Homo sapiens
acgcctggcctagtt

SEQ ID NO: 1558018 - DNA, 15 bp, Homo sapiens
cacgcctggcctagt

SEQ ID NO: 1558019 - DNA, 15 bp, Homo sapiens
ccacgcctggcctag

SEQ ID NO: 1558020 - DNA, 15 bp, Homo sapiens
accacgcctggccta

SEQ ID NO: 1558021 - DNA, 15 bp, Homo sapiens
caccacgcctggcct

SEQ ID NO: 1558022 - DNA, 15 bp, Homo sapiens
acgtgagccaccacg

SEQ ID NO: 1558023 - DNA, 15 bp, Homo sapiens
gacgtgagccaccac

SEQ ID NO: 1558024 - DNA, 15 bp, Homo sapiens
tattacagacgtgag

SEQ ID NO: 1558025 - DNA, 15 bp, Homo sapiens
gtattacagacgtga

SEQ ID NO: 1558026 - DNA, 15 bp, Homo sapiens
ggtattacagacgtg

SEQ ID NO: 1558027 - DNA, 15 bp, Homo sapiens
tggtattacagacgt

SEQ ID NO: 1558028 - DNA, 15 bp, Homo sapiens
ttggtattacagacg

SEQ ID NO: 1558029 - DNA, 15 bp, Homo sapiens
gttggtattacagac

SEQ ID NO: 1558030 - DNA, 15 bp, Homo sapiens
tgttggtattacaga

SEQ ID NO: 1558031 - DNA, 15 bp, Homo sapiens
atgttggtattacag

SEQ ID NO: 1558032 - DNA, 15 bp, Homo sapiens
aatgttggtattaca

SEQ ID NO: 1558033 - DNA, 15 bp, Homo sapiens
aaatgttggtattac

SEQ ID NO: 1558034 - DNA, 15 bp, Homo sapiens
aaaatgttggtatta

SEQ ID NO: 1558035 - DNA, 15 bp, Homo sapiens
caaaatgttggtatt

SEQ ID NO: 1558036 - DNA, 15 bp, Homo sapiens
ccaaaatgttggtat

SEQ ID NO: 1558037 - DNA, 15 bp, Homo sapiens
cccaaaatgttggta

SEQ ID NO: 1558038 - DNA, 15 bp, Homo sapiens
tcccaaaatgttggt

SEQ ID NO: 1558039 - DNA, 15 bp, Homo sapiens
ctcccaaaatgttgg

SEQ ID NO: 1558040 - DNA, 15 bp, Homo sapiens
cctcccaaaatgttg

SEQ ID NO: 1558041 - DNA, 15 bp, Homo sapiens
gcctcccaaaatgtt

SEQ ID NO: 1558042 - DNA, 15 bp, Homo sapiens
agcctcccaaaatgt

SEQ ID NO: 1558043 - DNA, 15 bp, Homo sapiens
cagcctcccaaaatg

SEQ ID NO: 1558044 - DNA, 15 bp, Homo sapiens
tcagcctcccaaaat

SEQ ID NO: 1558045 - DNA, 15 bp, Homo sapiens
ctcagcctcccaaaa

SEQ ID NO: 1558046 - DNA, 15 bp, Homo sapiens
gcctcaagtgatcct

SEQ ID NO: 1558047 - DNA, 15 bp, Homo sapiens
agcctcaagtgatcc

SEQ ID NO: 1558048 - DNA, 15 bp, Homo sapiens
tagcctcaagtgatc

SEQ ID NO: 1558049 - DNA, 15 bp, Homo sapiens
ctagcctcaagtgat

SEQ ID NO: 1558050 - DNA, 15 bp, Homo sapiens
cctagcctcaagtga

SEQ ID NO: 1558051 - DNA, 15 bp, Homo sapiens
tcctagcctcaagtg

SEQ ID NO: 1558052 - DNA, 15 bp, Homo sapiens
ctcctagcctcaagt

SEQ ID NO: 1558053 - DNA, 15 bp, Homo sapiens
actcctagcctcaag

SEQ ID NO: 1558054 - DNA, 15 bp, Homo sapiens
aactcctagcctcaa

SEQ ID NO: 1558055 - DNA, 15 bp, Homo sapiens
aaactcctagcctca

SEQ ID NO: 1558056 - DNA, 15 bp, Homo sapiens
caaactcctagcctc

SEQ ID NO: 1558057 - DNA, 15 bp, Homo sapiens
tcaaactcctagcct

SEQ ID NO: 1558058 - DNA, 15 bp, Homo sapiens
ctcaaactcctagcc

SEQ ID NO: 1558059 - DNA, 15 bp, Homo sapiens
cctcaaactcctagc

SEQ ID NO: 1558060 - DNA, 15 bp, Homo sapiens
gcctcaaactcctag

SEQ ID NO: 1558061 - DNA, 15 bp, Homo sapiens
ggcctcaaactccta

SEQ ID NO: 1558062 - DNA, 15 bp, Homo sapiens
tggcctcaaactcct

SEQ ID NO: 1558063 - DNA, 15 bp, Homo sapiens
ctggcctcaaactcc

SEQ ID NO: 1558064 - DNA, 15 bp, Homo sapiens
gctggcctcaaactc

SEQ ID NO: 1558065 - DNA, 15 bp, Homo sapiens
ggctggcctcaaact

SEQ ID NO: 1558066 - DNA, 15 bp, Homo sapiens
aggctggcctcaaac

SEQ ID NO: 1558067 - DNA, 15 bp, Homo sapiens
caggctggcctcaaa

SEQ ID NO: 1558068 - DNA, 15 bp, Homo sapiens
ccaggctggcctcaa

SEQ ID NO: 1558069 - DNA, 15 bp, Homo sapiens
cccaggctggcctca

SEQ ID NO: 1558070 - DNA, 15 bp, Homo sapiens
gcccaggctggcctc

SEQ ID NO: 1558071 - DNA, 15 bp, Homo sapiens
tgcccaggctggcct

SEQ ID NO: 1558072 - DNA, 15 bp, Homo sapiens
ttgcccaggctggcc

SEQ ID NO: 1558073 - DNA, 15 bp, Homo sapiens
gttgcccaggctggc

SEQ ID NO: 1558074 - DNA, 15 bp, Homo sapiens
aagtctcactatgtt

SEQ ID NO: 1558075 - DNA, 15 bp, Homo sapiens
gaagtctcactatgt

SEQ ID NO: 1558076 - DNA, 15 bp, Homo sapiens
tgaagtctcactatg

SEQ ID NO: 1558077 - DNA, 15 bp, Homo sapiens
atgaagtctcactat

SEQ ID NO: 1558078 - DNA, 15 bp, Homo sapiens
gatgaagtctcacta

SEQ ID NO: 1558079 - DNA, 15 bp, Homo sapiens
agatgaagtctcact

SEQ ID NO: 1558080 - DNA, 15 bp, Homo sapiens
gagatgaagtctcac

SEQ ID NO: 1558081 - DNA, 15 bp, Homo sapiens
agagatgaagtctca

SEQ ID NO: 1558082 - DNA, 15 bp, Homo sapiens
tagagatgaagtctc

SEQ ID NO: 1558083 - DNA, 15 bp, Homo sapiens
gtagagatgaagtct

SEQ ID NO: 1558084 - DNA, 15 bp, Homo sapiens
tgtagagatgaagtc

SEQ ID NO: 1558085 - DNA, 15 bp, Homo sapiens
ctgtagagatgaagt

SEQ ID NO: 1558086 - DNA, 15 bp, Homo sapiens
tctgtagagatgaag

SEQ ID NO: 1558087 - DNA, 15 bp, Homo sapiens
ttctgtagagatgaa

SEQ ID NO: 1558088 - DNA, 15 bp, Homo sapiens
tttctgtagagatga

SEQ ID NO: 1558089 - DNA, 15 bp, Homo sapiens
ttttctgtagagatg

SEQ ID NO: 1558090 - DNA, 15 bp, Homo sapiens
attttctgtagagat

SEQ ID NO: 1558091 - DNA, 15 bp, Homo sapiens
aattttctgtagaga

SEQ ID NO: 1558092 - DNA, 15 bp, Homo sapiens
aaattttctgtagag

SEQ ID NO: 1558093 - DNA, 15 bp, Homo sapiens
taaattttctgtaga

SEQ ID NO: 1558094 - DNA, 15 bp, Homo sapiens
ttaaattttctgtag

SEQ ID NO: 1558095 - DNA, 15 bp, Homo sapiens
tttaaattttctgta

SEQ ID NO: 1558096 - DNA, 15 bp, Homo sapiens
ttttaaattttctgt

SEQ ID NO: 1558097 - DNA, 15 bp, Homo sapiens
tttttaaattttctg

SEQ ID NO: 1558098 - DNA, 15 bp, Homo sapiens
atttttaaattttct

SEQ ID NO: 1558099 - DNA, 15 bp, Homo sapiens
aatttttaaattttc

SEQ ID NO: 1558100 - DNA, 15 bp, Homo sapiens
ctaatttttaaattt

SEQ ID NO: 1558101 - DNA, 15 bp, Homo sapiens
ggctaatttttaaat

SEQ ID NO: 1558102 - DNA, 15 bp, Homo sapiens
tggctaatttttaaa

SEQ ID NO: 1558103 - DNA, 15 bp, Homo sapiens
ctggctaatttttaa

SEQ ID NO: 1558104 - DNA, 15 bp, Homo sapiens
gtgccaccatgcctg

SEQ ID NO: 1558105 - DNA, 15 bp, Homo sapiens
cgtgccaccatgcct

SEQ ID NO: 1558106 - DNA, 15 bp, Homo sapiens
acgtgccaccatgcc

SEQ ID NO: 1558107 - DNA, 15 bp, Homo sapiens
cacgtgccaccatgc

SEQ ID NO: 1558108 - DNA, 15 bp, Homo sapiens
gcacgtgccaccatg

SEQ ID NO: 1558109 - DNA, 15 bp, Homo sapiens
agcacgtgccaccat

SEQ ID NO: 1558110 - DNA, 15 bp, Homo sapiens
aagcacgtgccacca

SEQ ID NO: 1558111 - DNA, 15 bp, Homo sapiens
caagcacgtgccacc

SEQ ID NO: 1558112 - DNA, 15 bp, Homo sapiens
acaagcacgtgccac

SEQ ID NO: 1558113 - DNA, 15 bp, Homo sapiens
tacaagcacgtgcca

SEQ ID NO: 1558114 - DNA, 15 bp, Homo sapiens
ctacaagcacgtgcc

SEQ ID NO: 1558115 - DNA, 15 bp, Homo sapiens
actacaagcacgtgc

SEQ ID NO: 1558116 - DNA, 15 bp, Homo sapiens
gactacaagcacgtg

SEQ ID NO: 1558117 - DNA, 15 bp, Homo sapiens
ggactacaagcacgt

SEQ ID NO: 1558118 - DNA, 15 bp, Homo sapiens
gggactacaagcacg

SEQ ID NO: 1558119 - DNA, 15 bp, Homo sapiens
tgggactacaagcac

SEQ ID NO: 1558120 - DNA, 15 bp, Homo sapiens
ctgggactacaagca

SEQ ID NO: 1558121 - DNA, 15 bp, Homo sapiens
agctgggactacaag

SEQ ID NO: 1558122 - DNA, 15 bp, Homo sapiens
tagctgggactacaa

SEQ ID NO: 1558123 - DNA, 15 bp, Homo sapiens
tgcctcctaagtagc

SEQ ID NO: 1558124 - DNA, 15 bp, Homo sapiens
atgcctcctaagtag

SEQ ID NO: 1558125 - DNA, 15 bp, Homo sapiens
tatgcctcctaagta

SEQ ID NO: 1558126 - DNA, 15 bp, Homo sapiens
ctatgcctcctaagt

SEQ ID NO: 1558127 - DNA, 15 bp, Homo sapiens
tctatgcctcctaag

SEQ ID NO: 1558128 - DNA, 15 bp, Homo sapiens
atctatgcctcctaa

SEQ ID NO: 1558129 - DNA, 15 bp, Homo sapiens
catctatgcctccta

SEQ ID NO: 1558130 - DNA, 15 bp, Homo sapiens
ccatctatgcctcct

SEQ ID NO: 1558131 - DNA, 15 bp, Homo sapiens
tccatctatgcctcc

SEQ ID NO: 1558132 - DNA, 15 bp, Homo sapiens
ttccatctatgcctc

SEQ ID NO: 1558133 - DNA, 15 bp, Homo sapiens
cttccatctatgcct

SEQ ID NO: 1558134 - DNA, 15 bp, Homo sapiens
ccttccatctatgcc

SEQ ID NO: 1558135 - DNA, 15 bp, Homo sapiens
tccttccatctatgc

SEQ ID NO: 1558136 - DNA, 15 bp, Homo sapiens
atccttccatctatg

SEQ ID NO: 1558137 - DNA, 15 bp, Homo sapiens
aatccttccatctat

SEQ ID NO: 1558138 - DNA, 15 bp, Homo sapiens
caatccttccatcta

SEQ ID NO: 1558139 - DNA, 15 bp, Homo sapiens
gcaatccttccatct

SEQ ID NO: 1558140 - DNA, 15 bp, Homo sapiens
agcaatccttccatc

SEQ ID NO: 1558141 - DNA, 15 bp, Homo sapiens
aagcaatccttccat

SEQ ID NO: 1558142 - DNA, 15 bp, Homo sapiens
caagcaatccttcca

SEQ ID NO: 1558143 - DNA, 15 bp, Homo sapiens
tcaagcaatccttcc

SEQ ID NO: 1558144 - DNA, 15 bp, Homo sapiens
ctcaagcaatccttc

SEQ ID NO: 1558145 - DNA, 15 bp, Homo sapiens
gctcaagcaatcctt

SEQ ID NO: 1558146 - DNA, 15 bp, Homo sapiens
ttcccaggctcaagc

SEQ ID NO: 1558147 - DNA, 15 bp, Homo sapiens
cttcccaggctcaag

SEQ ID NO: 1558148 - DNA, 15 bp, Homo sapiens
acttcccaggctcaa

SEQ ID NO: 1558149 - DNA, 15 bp, Homo sapiens
gacttcccaggctca

SEQ ID NO: 1558150 - DNA, 15 bp, Homo sapiens
cgacttcccaggctc

SEQ ID NO: 1558151 - DNA, 15 bp, Homo sapiens
tcgacttcccaggct

SEQ ID NO: 1558152 - DNA, 15 bp, Homo sapiens
ctcgacttcccaggc

SEQ ID NO: 1558153 - DNA, 15 bp, Homo sapiens
cctcgacttcccagg

SEQ ID NO: 1558154 - DNA, 15 bp, Homo sapiens
gcctcgacttcccag

SEQ ID NO: 1558155 - DNA, 15 bp, Homo sapiens
agcctcgacttccca

SEQ ID NO: 1558156 - DNA, 15 bp, Homo sapiens
tagcctcgacttccc

SEQ ID NO: 1558157 - DNA, 15 bp, Homo sapiens
gtagcctcgacttcc

SEQ ID NO: 1558158 - DNA, 15 bp, Homo sapiens
tgtagcctcgacttc

SEQ ID NO: 1558159 - DNA, 15 bp, Homo sapiens
ctgtagcctcgactt

SEQ ID NO: 1558160 - DNA, 15 bp, Homo sapiens
actgtagcctcgact

SEQ ID NO: 1558161 - DNA, 15 bp, Homo sapiens
cactgtagcctcgac

SEQ ID NO: 1558162 - DNA, 15 bp, Homo sapiens
tcactgtagcctcga

SEQ ID NO: 1558163 - DNA, 15 bp, Homo sapiens
ctcactgtagcctcg

SEQ ID NO: 1558164 - DNA, 15 bp, Homo sapiens
atcacggctcactgt

SEQ ID NO: 1558165 - DNA, 15 bp, Homo sapiens
gatcacggctcactg

SEQ ID NO: 1558166 - DNA, 15 bp, Homo sapiens
tgatcacggctcact

SEQ ID NO: 1558167 - DNA, 15 bp, Homo sapiens
gtgatcacggctcac

SEQ ID NO: 1558168 - DNA, 15 bp, Homo sapiens
tgtgatcacggctca

SEQ ID NO: 1558169 - DNA, 15 bp, Homo sapiens
gtgtgatcacggctc

SEQ ID NO: 1558170 - DNA, 15 bp, Homo sapiens
ggtgtgatcacggct

SEQ ID NO: 1558171 - DNA, 15 bp, Homo sapiens
tggtgtgatcacggc

SEQ ID NO: 1558172 - DNA, 15 bp, Homo sapiens
gtggtgtgatcacgg

SEQ ID NO: 1558173 - DNA, 15 bp, Homo sapiens
agtggtgtgatcacg

SEQ ID NO: 1558174 - DNA, 15 bp, Homo sapiens
cagtggtgtgatcac

SEQ ID NO: 1558175 - DNA, 15 bp, Homo sapiens
tgagtgcagtggtgt

SEQ ID NO: 1558176 - DNA, 15 bp, Homo sapiens
ctgagtgcagtggtg

SEQ ID NO: 1558177 - DNA, 15 bp, Homo sapiens
gctgagtgcagtggt

SEQ ID NO: 1558178 - DNA, 15 bp, Homo sapiens
ggctgagtgcagtgg

SEQ ID NO: 1558179 - DNA, 15 bp, Homo sapiens
gggctgagtgcagtg

SEQ ID NO: 1558180 - DNA, 15 bp, Homo sapiens
agggctgagtgcagt

SEQ ID NO: 1558181 - DNA, 15 bp, Homo sapiens
tagggctgagtgcag

SEQ ID NO: 1558182 - DNA, 15 bp, Homo sapiens
ctagggctgagtgca

SEQ ID NO: 1558183 - DNA, 15 bp, Homo sapiens
cctagggctgagtgc

SEQ ID NO: 1558184 - DNA, 15 bp, Homo sapiens
acctagggctgagtg

SEQ ID NO: 1558185 - DNA, 15 bp, Homo sapiens
tacctagggctgagt

SEQ ID NO: 1558186 - DNA, 15 bp, Homo sapiens
ttacctagggctgag

SEQ ID NO: 1558187 - DNA, 15 bp, Homo sapiens
gttacctagggctga

SEQ ID NO: 1558188 - DNA, 15 bp, Homo sapiens
tgttacctagggctg

SEQ ID NO: 1558189 - DNA, 15 bp, Homo sapiens
ctgttacctagggct

SEQ ID NO: 1558190 - DNA, 15 bp, Homo sapiens
tctgttacctagggc

SEQ ID NO: 1558191 - DNA, 15 bp, Homo sapiens
ctctgttacctaggg

SEQ ID NO: 1558192 - DNA, 15 bp, Homo sapiens
actctgttacctagg

SEQ ID NO: 1558193 - DNA, 15 bp, Homo sapiens
cactctgttacctag

SEQ ID NO: 1558194 - DNA, 15 bp, Homo sapiens
tcactctgttaccta

SEQ ID NO: 1558195 - DNA, 15 bp, Homo sapiens
ctcactctgttacct

SEQ ID NO: 1558196 - DNA, 15 bp, Homo sapiens
gtctcactctgttac

SEQ ID NO: 1558197 - DNA, 15 bp, Homo sapiens
agtctcactctgtta

SEQ ID NO: 1558198 - DNA, 15 bp, Homo sapiens
aagtctcactctgtt

SEQ ID NO: 1558199 - DNA, 15 bp, Homo sapiens
aaagtctcactctgt

SEQ ID NO: 1558200 - DNA, 15 bp, Homo sapiens
caaagtctcactctg

SEQ ID NO: 1558201 - DNA, 15 bp, Homo sapiens
acaaagtctcactct

SEQ ID NO: 1558202 - DNA, 15 bp, Homo sapiens
gacaaagtctcactc

SEQ ID NO: 1558203 - DNA, 15 bp, Homo sapiens
tgagacaaagtctca

SEQ ID NO: 1558204 - DNA, 15 bp, Homo sapiens
ttgagacaaagtctc

SEQ ID NO: 1558205 - DNA, 15 bp, Homo sapiens
tttgagacaaagtct

SEQ ID NO: 1558206 - DNA, 15 bp, Homo sapiens
ttttgagacaaagtc

SEQ ID NO: 1558207 - DNA, 15 bp, Homo sapiens
tttttgagacaaagt

SEQ ID NO: 1558208 - DNA, 15 bp, Homo sapiens
ttttttgagacaaag

SEQ ID NO: 1558209 - DNA, 15 bp, Homo sapiens
attttttgagacaaa

SEQ ID NO: 1558210 - DNA, 15 bp, Homo sapiens
tattttttgagacaa

SEQ ID NO: 1558211 - DNA, 15 bp, Homo sapiens
gcatttatttattta

SEQ ID NO: 1558212 - DNA, 15 bp, Homo sapiens
tgcatttatttattt

SEQ ID NO: 1558213 - DNA, 15 bp, Homo sapiens
ttgcatttatttatt

SEQ ID NO: 1558214 - DNA, 15 bp, Homo sapiens
tttgcatttatttat

SEQ ID NO: 1558215 - DNA, 15 bp, Homo sapiens
gtttgcatttattta

SEQ ID NO: 1558216 - DNA, 15 bp, Homo sapiens
agtttgcatttattt

SEQ ID NO: 1558217 - DNA, 15 bp, Homo sapiens
tagtttgcatttatt

SEQ ID NO: 1558218 - DNA, 15 bp, Homo sapiens
atagtttgcatttat

SEQ ID NO: 1558219 - DNA, 15 bp, Homo sapiens
tatagtttgcattta

SEQ ID NO: 1558220 - DNA, 15 bp, Homo sapiens
atatagtttgcattt

SEQ ID NO: 1558221 - DNA, 15 bp, Homo sapiens
gatatagtttgcatt

SEQ ID NO: 1558222 - DNA, 15 bp, Homo sapiens
agatatagtttgcat

SEQ ID NO: 1558223 - DNA, 15 bp, Homo sapiens
cagatatagtttgca

SEQ ID NO: 1558224 - DNA, 15 bp, Homo sapiens
acagatatagtttgc

SEQ ID NO: 1558225 - DNA, 15 bp, Homo sapiens
gacagatatagtttg

SEQ ID NO: 1558226 - DNA, 15 bp, Homo sapiens
agacagatatagttt

SEQ ID NO: 1558227 - DNA, 15 bp, Homo sapiens
aagacagatatagtt

SEQ ID NO: 1558228 - DNA, 15 bp, Homo sapiens
taagacagatatagt

SEQ ID NO: 1558229 - DNA, 15 bp, Homo sapiens
ttaagacagatatag

SEQ ID NO: 1558230 - DNA, 15 bp, Homo sapiens
attaagacagatata

SEQ ID NO: 1558231 - DNA, 15 bp, Homo sapiens
cattaagacagatat

SEQ ID NO: 1558232 - DNA, 15 bp, Homo sapiens
tcattaagacagata

SEQ ID NO: 1558233 - DNA, 15 bp, Homo sapiens
ctcattaagacagat

SEQ ID NO: 1558234 - DNA, 15 bp, Homo sapiens
actcattaagacaga

SEQ ID NO: 1558235 - DNA, 15 bp, Homo sapiens
aactcattaagacag

SEQ ID NO: 1558236 - DNA, 15 bp, Homo sapiens
caactcattaagaca

SEQ ID NO: 1558237 - DNA, 15 bp, Homo sapiens
acaactcattaagac

SEQ ID NO: 1558238 - DNA, 15 bp, Homo sapiens
cacaactcattaaga

SEQ ID NO: 1558239 - DNA, 15 bp, Homo sapiens
acacaactcattaag

SEQ ID NO: 1558240 - DNA, 15 bp, Homo sapiens
aacacaactcattaa

SEQ ID NO: 1558241 - DNA, 15 bp, Homo sapiens
aaacacaactcatta

SEQ ID NO: 1558242 - DNA, 15 bp, Homo sapiens
aaaacacaactcatt

SEQ ID NO: 1558243 - DNA, 15 bp, Homo sapiens
taaaacacaactcat

SEQ ID NO: 1558244 - DNA, 15 bp, Homo sapiens
ataaaacacaactca

SEQ ID NO: 1558245 - DNA, 15 bp, Homo sapiens
aataaaacacaactc

SEQ ID NO: 1558246 - DNA, 15 bp, Homo sapiens
gaataaaacacaact

SEQ ID NO: 1558247 - DNA, 15 bp, Homo sapiens
tgaataaaacacaac

SEQ ID NO: 1558248 - DNA, 15 bp, Homo sapiens
ttgaataaaacacaa

SEQ ID NO: 1558249 - DNA, 15 bp, Homo sapiens
attgaataaaacaca

SEQ ID NO: 1558250 - DNA, 15 bp, Homo sapiens
tattgaataaaacac

SEQ ID NO: 1558251 - DNA, 15 bp, Homo sapiens
atattgaataaaaca

SEQ ID NO: 1558252 - DNA, 15 bp, Homo sapiens
catattgaataaaac

SEQ ID NO: 1558253 - DNA, 15 bp, Homo sapiens
acatattgaataaaa

SEQ ID NO: 1558254 - DNA, 15 bp, Homo sapiens
cacatattgaataaa

SEQ ID NO: 1558255 - DNA, 15 bp, Homo sapiens
acacatattgaataa

SEQ ID NO: 1558256 - DNA, 15 bp, Homo sapiens
aacacatattgaata

SEQ ID NO: 1558257 - DNA, 15 bp, Homo sapiens
aaacacatattgaat

SEQ ID NO: 1558258 - DNA, 15 bp, Homo sapiens
aaaacacatattgaa

SEQ ID NO: 1558259 - DNA, 15 bp, Homo sapiens
taaaacacatattga

SEQ ID NO: 1558260 - DNA, 15 bp, Homo sapiens
ttaaaacacatattg

SEQ ID NO: 1558261 - DNA, 15 bp, Homo sapiens
cttaaaacacatatt

SEQ ID NO: 1558262 - DNA, 15 bp, Homo sapiens
tcttaaaacacatat

SEQ ID NO: 1558263 - DNA, 15 bp, Homo sapiens
ctcttaaaacacata

SEQ ID NO: 1558264 - DNA, 15 bp, Homo sapiens
tctcttaaaacacat

SEQ ID NO: 1558265 - DNA, 15 bp, Homo sapiens
ctctcttaaaacaca

SEQ ID NO: 1558266 - DNA, 15 bp, Homo sapiens
gctctcttaaaacac

SEQ ID NO: 1558267 - DNA, 15 bp, Homo sapiens
agctctcttaaaaca

SEQ ID NO: 1558268 - DNA, 15 bp, Homo sapiens
aagctctcttaaaac

SEQ ID NO: 1558269 - DNA, 15 bp, Homo sapiens
gaagctctcttaaaa

SEQ ID NO: 1558270 - DNA, 15 bp, Homo sapiens
tgaagctctcttaaa

SEQ ID NO: 1558271 - DNA, 15 bp, Homo sapiens
atgaagctctcttaa

SEQ ID NO: 1558272 - DNA, 15 bp, Homo sapiens
aatgaagctctctta

SEQ ID NO: 1558273 - DNA, 15 bp, Homo sapiens
aaatgaagctctctt

SEQ ID NO: 1558274 - DNA, 15 bp, Homo sapiens
gaaatgaagctctct

SEQ ID NO: 1558275 - DNA, 15 bp, Homo sapiens
ggaaatgaagctctc

SEQ ID NO: 1558276 - DNA, 15 bp, Homo sapiens
tggaaatgaagctct

SEQ ID NO: 1558277 - DNA, 15 bp, Homo sapiens
ttggaaatgaagctc

SEQ ID NO: 1558278 - DNA, 15 bp, Homo sapiens
attggaaatgaagct

SEQ ID NO: 1558279 - DNA, 15 bp, Homo sapiens
aattggaaatgaagc

SEQ ID NO: 1558280 - DNA, 15 bp, Homo sapiens
gaattggaaatgaag

SEQ ID NO: 1558281 - DNA, 15 bp, Homo sapiens
tgaattggaaatgaa

SEQ ID NO: 1558282 - DNA, 15 bp, Homo sapiens
ttgaattggaaatga

SEQ ID NO: 1558283 - DNA, 15 bp, Homo sapiens
tttgaattggaaatg

SEQ ID NO: 1558284 - DNA, 15 bp, Homo sapiens
atttgaattggaaat

SEQ ID NO: 1558285 - DNA, 15 bp, Homo sapiens
tatttgaattggaaa

SEQ ID NO: 1558286 - DNA, 15 bp, Homo sapiens
atatttgaattggaa

SEQ ID NO: 1558287 - DNA, 15 bp, Homo sapiens
gatatttgaattgga

SEQ ID NO: 1558288 - DNA, 15 bp, Homo sapiens
tgatatttgaattgg

SEQ ID NO: 1558289 - DNA, 15 bp, Homo sapiens
ttgatatttgaattg

SEQ ID NO: 1558290 - DNA, 15 bp, Homo sapiens
tttgatatttgaatt

SEQ ID NO: 1558291 - DNA, 15 bp, Homo sapiens
atttgatatttgaat

SEQ ID NO: 1558292 - DNA, 15 bp, Homo sapiens
aatttgatatttgaa

SEQ ID NO: 1558293 - DNA, 15 bp, Homo sapiens
aaatttgatatttga

SEQ ID NO: 1558294 - DNA, 15 bp, Homo sapiens
caaatttgatatttg

SEQ ID NO: 1558295 - DNA, 15 bp, Homo sapiens
gcaaatttgatattt

SEQ ID NO: 1558296 - DNA, 15 bp, Homo sapiens
ggcaaatttgatatt

SEQ ID NO: 1558297 - DNA, 15 bp, Homo sapiens
aggcaaatttgatat

SEQ ID NO: 1558298 - DNA, 15 bp, Homo sapiens
caggcaaatttgata

SEQ ID NO: 1558299 - DNA, 15 bp, Homo sapiens
tcaggcaaatttgat

SEQ ID NO: 1558300 - DNA, 15 bp, Homo sapiens
ttcaggcaaatttga

SEQ ID NO: 1558301 - DNA, 15 bp, Homo sapiens
tttcaggcaaatttg

SEQ ID NO: 1558302 - DNA, 15 bp, Homo sapiens
ttttcaggcaaattt

SEQ ID NO: 1558303 - DNA, 15 bp, Homo sapiens
tttttcaggcaaatt

SEQ ID NO: 1558304 - DNA, 15 bp, Homo sapiens
gtttttcaggcaaat

SEQ ID NO: 1558305 - DNA, 15 bp, Homo sapiens
tgtttttcaggcaaa

SEQ ID NO: 1558306 - DNA, 15 bp, Homo sapiens
ttgtttttcaggcaa

SEQ ID NO: 1558307 - DNA, 15 bp, Homo sapiens
tttgtttttcaggca

SEQ ID NO: 1558308 - DNA, 15 bp, Homo sapiens
ttttgtttttcaggc

SEQ ID NO: 1558309 - DNA, 15 bp, Homo sapiens
cttttgtttttcagg

SEQ ID NO: 1558310 - DNA, 15 bp, Homo sapiens
tcttttgtttttcag

SEQ ID NO: 1558311 - DNA, 15 bp, Homo sapiens
ctcttttgtttttca

SEQ ID NO: 1558312 - DNA, 15 bp, Homo sapiens
actcttttgtttttc

SEQ ID NO: 1558313 - DNA, 15 bp, Homo sapiens
aactcttttgttttt

SEQ ID NO: 1558314 - DNA, 15 bp, Homo sapiens
aaactcttttgtttt

SEQ ID NO: 1558315 - DNA, 15 bp, Homo sapiens
taaactcttttgttt

SEQ ID NO: 1558316 - DNA, 15 bp, Homo sapiens
ataaactcttttgtt

SEQ ID NO: 1558317 - DNA, 15 bp, Homo sapiens
aataaactcttttgt

SEQ ID NO: 1558318 - DNA, 15 bp, Homo sapiens
gaataaactcttttg

SEQ ID NO: 1558319 - DNA, 15 bp, Homo sapiens
agaataaactctttt

SEQ ID NO: 1558320 - DNA, 15 bp, Homo sapiens
cagaataaactcttt

SEQ ID NO: 1558321 - DNA, 15 bp, Homo sapiens
ccagaataaactctt

SEQ ID NO: 1558322 - DNA, 15 bp, Homo sapiens
gccagaataaactct

SEQ ID NO: 1558323 - DNA, 15 bp, Homo sapiens
agccagaataaactc

SEQ ID NO: 1558324 - DNA, 15 bp, Homo sapiens
cagccagaataaact

SEQ ID NO: 1558325 - DNA, 15 bp, Homo sapiens
ccagccagaataaac

SEQ ID NO: 1558326 - DNA, 15 bp, Homo sapiens
cccagccagaataaa

SEQ ID NO: 1558327 - DNA, 15 bp, Homo sapiens
acccagccagaataa

SEQ ID NO: 1558328 - DNA, 15 bp, Homo sapiens
tacccagccagaata

SEQ ID NO: 1558329 - DNA, 15 bp, Homo sapiens
atacccagccagaat

SEQ ID NO: 1558330 - DNA, 15 bp, Homo sapiens
catacccagccagaa

SEQ ID NO: 1558331 - DNA, 15 bp, Homo sapiens
ccatacccagccaga

SEQ ID NO: 1558332 - DNA, 15 bp, Homo sapiens
accatacccagccag

SEQ ID NO: 1558333 - DNA, 15 bp, Homo sapiens
caccatacccagcca

SEQ ID NO: 1558334 - DNA, 15 bp, Homo sapiens
ccaccatacccagcc

SEQ ID NO: 1558335 - DNA, 15 bp, Homo sapiens
gccaccatacccagc

SEQ ID NO: 1558336 - DNA, 15 bp, Homo sapiens
agccaccatacccag

SEQ ID NO: 1558337 - DNA, 15 bp, Homo sapiens
gagccaccataccca

SEQ ID NO: 1558338 - DNA, 15 bp, Homo sapiens
tgagccaccataccc

SEQ ID NO: 1558339 - DNA, 15 bp, Homo sapiens
gtgtgagccaccata

SEQ ID NO: 1558340 - DNA, 15 bp, Homo sapiens
ctacaggtgtgagcc

SEQ ID NO: 1558341 - DNA, 15 bp, Homo sapiens
actacaggtgtgagc

SEQ ID NO: 1558342 - DNA, 15 bp, Homo sapiens
gactacaggtgtgag

SEQ ID NO: 1558343 - DNA, 15 bp, Homo sapiens
ggactacaggtgtga

SEQ ID NO: 1558344 - DNA, 15 bp, Homo sapiens
gagtgctgggactac

SEQ ID NO: 1558345 - DNA, 15 bp, Homo sapiens
agagtgctgggacta

SEQ ID NO: 1558346 - DNA, 15 bp, Homo sapiens
cagagtgctgggact

SEQ ID NO: 1558347 - DNA, 15 bp, Homo sapiens
ccagagtgctgggac

SEQ ID NO: 1558348 - DNA, 15 bp, Homo sapiens
tggcctcccagagtg

SEQ ID NO: 1558349 - DNA, 15 bp, Homo sapiens
ttggcctcccagagt

SEQ ID NO: 1558350 - DNA, 15 bp, Homo sapiens
tttggcctcccagag

SEQ ID NO: 1558351 - DNA, 15 bp, Homo sapiens
ctttggcctcccaga

SEQ ID NO: 1558352 - DNA, 15 bp, Homo sapiens
gctttggcctcccag

SEQ ID NO: 1558353 - DNA, 15 bp, Homo sapiens
tctgctttggcctcc

SEQ ID NO: 1558354 - DNA, 15 bp, Homo sapiens
ttctgctttggcctc

SEQ ID NO: 1558355 - DNA, 15 bp, Homo sapiens
cttctgctttggcct

SEQ ID NO: 1558356 - DNA, 15 bp, Homo sapiens
ccttctgctttggcc

SEQ ID NO: 1558357 - DNA, 15 bp, Homo sapiens
tccttctgctttggc

SEQ ID NO: 1558358 - DNA, 15 bp, Homo sapiens
atccttctgctttgg

SEQ ID NO: 1558359 - DNA, 15 bp, Homo sapiens
gatccttctgctttg

SEQ ID NO: 1558360 - DNA, 15 bp, Homo sapiens
agatccttctgcttt

SEQ ID NO: 1558361 - DNA, 15 bp, Homo sapiens
gagatccttctgctt

SEQ ID NO: 1558362 - DNA, 15 bp, Homo sapiens
agagatccttctgct

SEQ ID NO: 1558363 - DNA, 15 bp, Homo sapiens
aagagatccttctgc

SEQ ID NO: 1558364 - DNA, 15 bp, Homo sapiens
caagagatccttctg

SEQ ID NO: 1558365 - DNA, 15 bp, Homo sapiens
tcaagagatccttct

SEQ ID NO: 1558366 - DNA, 15 bp, Homo sapiens
ctcaagagatccttc

SEQ ID NO: 1558367 - DNA, 15 bp, Homo sapiens
gctcaagagatcctt

SEQ ID NO: 1558368 - DNA, 15 bp, Homo sapiens
agctcaagagatcct

SEQ ID NO: 1558369 - DNA, 15 bp, Homo sapiens
aagctcaagagatcc

SEQ ID NO: 1558370 - DNA, 15 bp, Homo sapiens
taagctcaagagatc

SEQ ID NO: 1558371 - DNA, 15 bp, Homo sapiens
ctaagctcaagagat

SEQ ID NO: 1558372 - DNA, 15 bp, Homo sapiens
cctaagctcaagaga

SEQ ID NO: 1558373 - DNA, 15 bp, Homo sapiens
tcctaagctcaagag

SEQ ID NO: 1558374 - DNA, 15 bp, Homo sapiens
ctcctaagctcaaga

SEQ ID NO: 1558375 - DNA, 15 bp, Homo sapiens
actcctaagctcaag

SEQ ID NO: 1558376 - DNA, 15 bp, Homo sapiens
aactcctaagctcaa

SEQ ID NO: 1558377 - DNA, 15 bp, Homo sapiens
gaactcctaagctca

SEQ ID NO: 1558378 - DNA, 15 bp, Homo sapiens
cgaactcctaagctc

SEQ ID NO: 1558379 - DNA, 15 bp, Homo sapiens
tcgaactcctaagct

SEQ ID NO: 1558380 - DNA, 15 bp, Homo sapiens
ctcgaactcctaagc

SEQ ID NO: 1558381 - DNA, 15 bp, Homo sapiens
tctcgaactcctaag

SEQ ID NO: 1558382 - DNA, 15 bp, Homo sapiens
ttcaccatattgccc

SEQ ID NO: 1558383 - DNA, 15 bp, Homo sapiens
tttcaccatattgcc

SEQ ID NO: 1558384 - DNA, 15 bp, Homo sapiens
gtttcaccatattgc

SEQ ID NO: 1558385 - DNA, 15 bp, Homo sapiens
gggggtttcaccata

SEQ ID NO: 1558386 - DNA, 15 bp, Homo sapiens
agggggtttcaccat

SEQ ID NO: 1558387 - DNA, 15 bp, Homo sapiens
aagggggtttcacca

SEQ ID NO: 1558388 - DNA, 15 bp, Homo sapiens
aaagggggtttcacc

SEQ ID NO: 1558389 - DNA, 15 bp, Homo sapiens
gaaagggggtttcac

SEQ ID NO: 1558390 - DNA, 15 bp, Homo sapiens
agaaagggggtttca

SEQ ID NO: 1558391 - DNA, 15 bp, Homo sapiens
tagaaagggggtttc

SEQ ID NO: 1558392 - DNA, 15 bp, Homo sapiens
gtagaaagggggttt

SEQ ID NO: 1558393 - DNA, 15 bp, Homo sapiens
tgtagaaagggggtt

SEQ ID NO: 1558394 - DNA, 15 bp, Homo sapiens
ttgtagaaagggggt

SEQ ID NO: 1558395 - DNA, 15 bp, Homo sapiens
tttgtagaaaggggg

SEQ ID NO: 1558396 - DNA, 15 bp, Homo sapiens
ttttgtagaaagggg

SEQ ID NO: 1558397 - DNA, 15 bp, Homo sapiens
tttttgtagaaaggg

SEQ ID NO: 1558398 - DNA, 15 bp, Homo sapiens
ttttttgtagaaagg

SEQ ID NO: 1558399 - DNA, 15 bp, Homo sapiens
attttttgtagaaag

SEQ ID NO: 1558400 - DNA, 15 bp, Homo sapiens
tattttttgtagaaa

SEQ ID NO: 1558401 - DNA, 15 bp, Homo sapiens
ttattttttgtagaa

SEQ ID NO: 1558402 - DNA, 15 bp, Homo sapiens
gtttttattttttgt

SEQ ID NO: 1558403 - DNA, 15 bp, Homo sapiens
tgtttttattttttg

SEQ ID NO: 1558404 - DNA, 15 bp, Homo sapiens
aatgtttttattttt

SEQ ID NO: 1558405 - DNA, 15 bp, Homo sapiens
taatgtttttatttt

SEQ ID NO: 1558406 - DNA, 15 bp, Homo sapiens
ctaatgtttttattt

SEQ ID NO: 1558407 - DNA, 15 bp, Homo sapiens
gctaatgtttttatt

SEQ ID NO: 1558408 - DNA, 15 bp, Homo sapiens
ggctaatgtttttat

SEQ ID NO: 1558409 - DNA, 15 bp, Homo sapiens
tggctaatgttttta

SEQ ID NO: 1558410 - DNA, 15 bp, Homo sapiens
ctggctaatgttttt

SEQ ID NO: 1558411 - DNA, 15 bp, Homo sapiens
cctggctaatgtttt

SEQ ID NO: 1558412 - DNA, 15 bp, Homo sapiens
cacctggctaatgtt

SEQ ID NO: 1558413 - DNA, 15 bp, Homo sapiens
gcacctggctaatgt

SEQ ID NO: 1558414 - DNA, 15 bp, Homo sapiens
cgcacctggctaatg

SEQ ID NO: 1558415 - DNA, 15 bp, Homo sapiens
cactataggcatgtg

SEQ ID NO: 1558416 - DNA, 15 bp, Homo sapiens
gcactataggcatgt

SEQ ID NO: 1558417 - DNA, 15 bp, Homo sapiens
ggcactataggcatg

SEQ ID NO: 1558418 - DNA, 15 bp, Homo sapiens
tggcactataggcat

SEQ ID NO: 1558419 - DNA, 15 bp, Homo sapiens
ctggcactataggca

SEQ ID NO: 1558420 - DNA, 15 bp, Homo sapiens
gctggcactataggc

SEQ ID NO: 1558421 - DNA, 15 bp, Homo sapiens
agctggcactatagg

SEQ ID NO: 1558422 - DNA, 15 bp, Homo sapiens
tagctggcactatag

SEQ ID NO: 1558423 - DNA, 15 bp, Homo sapiens
gtagctggcactata

SEQ ID NO: 1558424 - DNA, 15 bp, Homo sapiens
agtagctggcactat

SEQ ID NO: 1558425 - DNA, 15 bp, Homo sapiens
aagtagctggcacta

SEQ ID NO: 1558426 - DNA, 15 bp, Homo sapiens
caagtagctggcact

SEQ ID NO: 1558427 - DNA, 15 bp, Homo sapiens
ccaagtagctggcac

SEQ ID NO: 1558428 - DNA, 15 bp, Homo sapiens
atcccaagtagctgg

SEQ ID NO: 1558429 - DNA, 15 bp, Homo sapiens
catcccaagtagctg

SEQ ID NO: 1558430 - DNA, 15 bp, Homo sapiens
gcatcccaagtagct

SEQ ID NO: 1558431 - DNA, 15 bp, Homo sapiens
agcatcccaagtagc

SEQ ID NO: 1558432 - DNA, 15 bp, Homo sapiens
cagcatcccaagtag

SEQ ID NO: 1558433 - DNA, 15 bp, Homo sapiens
tcagcatcccaagta

SEQ ID NO: 1558434 - DNA, 15 bp, Homo sapiens
ctcagcatcccaagt

SEQ ID NO: 1558435 - DNA, 15 bp, Homo sapiens
cctcagcatcccaag

SEQ ID NO: 1558436 - DNA, 15 bp, Homo sapiens
tcctcagcatcccaa

SEQ ID NO: 1558437 - DNA, 15 bp, Homo sapiens
ttcctcagcatccca

SEQ ID NO: 1558438 - DNA, 15 bp, Homo sapiens
cttcctcagcatccc

SEQ ID NO: 1558439 - DNA, 15 bp, Homo sapiens
ccttcctcagcatcc

SEQ ID NO: 1558440 - DNA, 15 bp, Homo sapiens
tccttcctcagcatc

SEQ ID NO: 1558441 - DNA, 15 bp, Homo sapiens
ctccttcctcagcat

SEQ ID NO: 1558442 - DNA, 15 bp, Homo sapiens
tctccttcctcagca

SEQ ID NO: 1558443 - DNA, 15 bp, Homo sapiens
ttctccttcctcagc

SEQ ID NO: 1558444 - DNA, 15 bp, Homo sapiens
attctccttcctcag

SEQ ID NO: 1558445 - DNA, 15 bp, Homo sapiens
gattctccttcctca

SEQ ID NO: 1558446 - DNA, 15 bp, Homo sapiens
tgattctccttcctc

SEQ ID NO: 1558447 - DNA, 15 bp, Homo sapiens
gtgattctccttcct

SEQ ID NO: 1558448 - DNA, 15 bp, Homo sapiens
agtgattctccttcc

SEQ ID NO: 1558449 - DNA, 15 bp, Homo sapiens
aagtgattctccttc

SEQ ID NO: 1558450 - DNA, 15 bp, Homo sapiens
caagtgattctcctt

SEQ ID NO: 1558451 - DNA, 15 bp, Homo sapiens
tgggctcaagtgatt

SEQ ID NO: 1558452 - DNA, 15 bp, Homo sapiens
ctgcagccttgacct

SEQ ID NO: 1558453 - DNA, 15 bp, Homo sapiens
actgcagccttgacc

SEQ ID NO: 1558454 - DNA, 15 bp, Homo sapiens
cactgcagccttgac

SEQ ID NO: 1558455 - DNA, 15 bp, Homo sapiens
ccactgcagccttga

SEQ ID NO: 1558456 - DNA, 15 bp, Homo sapiens
cccactgcagccttg

SEQ ID NO: 1558457 - DNA, 15 bp, Homo sapiens
gcccactgcagcctt

SEQ ID NO: 1558458 - DNA, 15 bp, Homo sapiens
ggcccactgcagcct

SEQ ID NO: 1558459 - DNA, 15 bp, Homo sapiens
tggcccactgcagcc

SEQ ID NO: 1558460 - DNA, 15 bp, Homo sapiens
atggcccactgcagc

SEQ ID NO: 1558461 - DNA, 15 bp, Homo sapiens
catggcccactgcag

SEQ ID NO: 1558462 - DNA, 15 bp, Homo sapiens
tcatggcccactgca

SEQ ID NO: 1558463 - DNA, 15 bp, Homo sapiens
atcatggcccactgc

SEQ ID NO: 1558464 - DNA, 15 bp, Homo sapiens
gatcatggcccactg

SEQ ID NO: 1558465 - DNA, 15 bp, Homo sapiens
cgatcatggcccact

SEQ ID NO: 1558466 - DNA, 15 bp, Homo sapiens
acgatcatggcccac

SEQ ID NO: 1558467 - DNA, 15 bp, Homo sapiens
cacgatcatggccca

SEQ ID NO: 1558468 - DNA, 15 bp, Homo sapiens
gcacgatcatggccc

SEQ ID NO: 1558469 - DNA, 15 bp, Homo sapiens
ggcacgatcatggcc

SEQ ID NO: 1558470 - DNA, 15 bp, Homo sapiens
gcagggtctcactct

SEQ ID NO: 1558471 - DNA, 15 bp, Homo sapiens
ggcagggtctcactc

SEQ ID NO: 1558472 - DNA, 15 bp, Homo sapiens
aggcagggtctcact

SEQ ID NO: 1558473 - DNA, 15 bp, Homo sapiens
aaggcagggtctcac

SEQ ID NO: 1558474 - DNA, 15 bp, Homo sapiens
aaaggcagggtctca

SEQ ID NO: 1558475 - DNA, 15 bp, Homo sapiens
taaaggcagggtctc

SEQ ID NO: 1558476 - DNA, 15 bp, Homo sapiens
ttaaaggcagggtct

SEQ ID NO: 1558477 - DNA, 15 bp, Homo sapiens
tttaaaggcagggtc

SEQ ID NO: 1558478 - DNA, 15 bp, Homo sapiens
ttttaaaggcagggt

SEQ ID NO: 1558479 - DNA, 15 bp, Homo sapiens
tttttaaaggcaggg

SEQ ID NO: 1558480 - DNA, 15 bp, Homo sapiens
ttttttaaaggcagg

SEQ ID NO: 1558481 - DNA, 15 bp, Homo sapiens
tttttttaaaggcag

SEQ ID NO: 1558482 - DNA, 15 bp, Homo sapiens
ttttttttaaaggca

SEQ ID NO: 1558483 - DNA, 15 bp, Homo sapiens
tttttttttaaaggc

SEQ ID NO: 1558484 - DNA, 15 bp, Homo sapiens
ttttttttttaaagg

SEQ ID NO: 1558485 - DNA, 15 bp, Homo sapiens
aacactttttttttt

SEQ ID NO: 1558486 - DNA, 15 bp, Homo sapiens
caacacttttttttt

SEQ ID NO: 1558487 - DNA, 15 bp, Homo sapiens
tcaacactttttttt

SEQ ID NO: 1558488 - DNA, 15 bp, Homo sapiens
atcaacacttttttt

SEQ ID NO: 1558489 - DNA, 15 bp, Homo sapiens
aatcaacactttttt

SEQ ID NO: 1558490 - DNA, 15 bp, Homo sapiens
gaatcaacacttttt

SEQ ID NO: 1558491 - DNA, 15 bp, Homo sapiens
agaatcaacactttt

SEQ ID NO: 1558492 - DNA, 15 bp, Homo sapiens
aagaatcaacacttt

SEQ ID NO: 1558493 - DNA, 15 bp, Homo sapiens
taagaatcaacactt

SEQ ID NO: 1558494 - DNA, 15 bp, Homo sapiens
gtaagaatcaacact

SEQ ID NO: 1558495 - DNA, 15 bp, Homo sapiens
tgtaagaatcaacac

SEQ ID NO: 1558496 - DNA, 15 bp, Homo sapiens
ttgtaagaatcaaca

SEQ ID NO: 1558497 - DNA, 15 bp, Homo sapiens
tttgtaagaatcaac

SEQ ID NO: 1558498 - DNA, 15 bp, Homo sapiens
ttttgtaagaatcaa

SEQ ID NO: 1558499 - DNA, 15 bp, Homo sapiens
tttttgtaagaatca

SEQ ID NO: 1558500 - DNA, 15 bp, Homo sapiens
gtttttgtaagaatc

SEQ ID NO: 1558501 - DNA, 15 bp, Homo sapiens
ggtttttgtaagaat

SEQ ID NO: 1558502 - DNA, 15 bp, Homo sapiens
aggtttttgtaagaa

SEQ ID NO: 1558503 - DNA, 15 bp, Homo sapiens
taggtttttgtaaga

SEQ ID NO: 1558504 - DNA, 15 bp, Homo sapiens
gtaggtttttgtaag

SEQ ID NO: 1558505 - DNA, 15 bp, Homo sapiens
tgtaggtttttgtaa

SEQ ID NO: 1558506 - DNA, 15 bp, Homo sapiens
atgtaggtttttgta

SEQ ID NO: 1558507 - DNA, 15 bp, Homo sapiens
tatgtaggtttttgt

SEQ ID NO: 1558508 - DNA, 15 bp, Homo sapiens
gtatgtaggtttttg

SEQ ID NO: 1558509 - DNA, 15 bp, Homo sapiens
agtatgtaggttttt

SEQ ID NO: 1558510 - DNA, 15 bp, Homo sapiens
cagtatgtaggtttt

SEQ ID NO: 1558511 - DNA, 15 bp, Homo sapiens
tcagtatgtaggttt

SEQ ID NO: 1558512 - DNA, 15 bp, Homo sapiens
ctcagtatgtaggtt

SEQ ID NO: 1558513 - DNA, 15 bp, Homo sapiens
actcagtatgtaggt

SEQ ID NO: 1558514 - DNA, 15 bp, Homo sapiens
gactcagtatgtagg

SEQ ID NO: 1558515 - DNA, 15 bp, Homo sapiens
agactcagtatgtag

SEQ ID NO: 1558516 - DNA, 15 bp, Homo sapiens
cagactcagtatgta

SEQ ID NO: 1558517 - DNA, 15 bp, Homo sapiens
tcagactcagtatgt

SEQ ID NO: 1558518 - DNA, 15 bp, Homo sapiens
atcagactcagtatg

SEQ ID NO: 1558519 - DNA, 15 bp, Homo sapiens
tatcagactcagtat

SEQ ID NO: 1558520 - DNA, 15 bp, Homo sapiens
ttatcagactcagta

SEQ ID NO: 1558521 - DNA, 15 bp, Homo sapiens
attatcagactcagt

SEQ ID NO: 1558522 - DNA, 15 bp, Homo sapiens
tattatcagactcag

SEQ ID NO: 1558523 - DNA, 15 bp, Homo sapiens
ctattatcagactca

SEQ ID NO: 1558524 - DNA, 15 bp, Homo sapiens
gctattatcagactc

SEQ ID NO: 1558525 - DNA, 15 bp, Homo sapiens
agctattatcagact

SEQ ID NO: 1558526 - DNA, 15 bp, Homo sapiens
tagctattatcagac

SEQ ID NO: 1558527 - DNA, 15 bp, Homo sapiens
atagctattatcaga

SEQ ID NO: 1558528 - DNA, 15 bp, Homo sapiens
tatagctattatcag

SEQ ID NO: 1558529 - DNA, 15 bp, Homo sapiens
atatagctattatca

SEQ ID NO: 1558530 - DNA, 15 bp, Homo sapiens
aatatagctattatc

SEQ ID NO: 1558531 - DNA, 15 bp, Homo sapiens
taatatagctattat

SEQ ID NO: 1558532 - DNA, 15 bp, Homo sapiens
ttaatatagctatta

SEQ ID NO: 1558533 - DNA, 15 bp, Homo sapiens
attaatatagctatt

SEQ ID NO: 1558534 - DNA, 15 bp, Homo sapiens
tattaatatagctat

SEQ ID NO: 1558535 - DNA, 15 bp, Homo sapiens
ctattaatatagcta

SEQ ID NO: 1558536 - DNA, 15 bp, Homo sapiens
actattaatatagct

SEQ ID NO: 1558537 - DNA, 15 bp, Homo sapiens
tactattaatatagc

SEQ ID NO: 1558538 - DNA, 15 bp, Homo sapiens
ttactattaatatag

SEQ ID NO: 1558539 - DNA, 15 bp, Homo sapiens
tattgttactattaa

SEQ ID NO: 1558540 - DNA, 15 bp, Homo sapiens
gtattgttactatta

SEQ ID NO: 1558541 - DNA, 15 bp, Homo sapiens
ggtattgttactatt

SEQ ID NO: 1558542 - DNA, 15 bp, Homo sapiens
aggtattgttactat

SEQ ID NO: 1558543 - DNA, 15 bp, Homo sapiens
taggtattgttacta

SEQ ID NO: 1558544 - DNA, 15 bp, Homo sapiens
ttaggtattgttact

SEQ ID NO: 1558545 - DNA, 15 bp, Homo sapiens
cttaggtattgttac

SEQ ID NO: 1558546 - DNA, 15 bp, Homo sapiens
acttaggtattgtta

SEQ ID NO: 1558547 - DNA, 15 bp, Homo sapiens
tacttaggtattgtt

SEQ ID NO: 1558548 - DNA, 15 bp, Homo sapiens
atacttaggtattgt

SEQ ID NO: 1558549 - DNA, 15 bp, Homo sapiens
gatacttaggtattg

SEQ ID NO: 1558550 - DNA, 15 bp, Homo sapiens
agatacttaggtatt

SEQ ID NO: 1558551 - DNA, 15 bp, Homo sapiens
aagatacttaggtat

SEQ ID NO: 1558552 - DNA, 15 bp, Homo sapiens
taagatacttaggta

SEQ ID NO: 1558553 - DNA, 15 bp, Homo sapiens
gtaagatacttaggt

SEQ ID NO: 1558554 - DNA, 15 bp, Homo sapiens
agtaagatacttagg

SEQ ID NO: 1558555 - DNA, 15 bp, Homo sapiens
cagtaagatacttag

SEQ ID NO: 1558556 - DNA, 15 bp, Homo sapiens
tcagtaagatactta

SEQ ID NO: 1558557 - DNA, 15 bp, Homo sapiens
atcagtaagatactt

SEQ ID NO: 1558558 - DNA, 15 bp, Homo sapiens
aatcagtaagatact

SEQ ID NO: 1558559 - DNA, 15 bp, Homo sapiens
aaatcagtaagatac

SEQ ID NO: 1558560 - DNA, 15 bp, Homo sapiens
aaaatcagtaagata

SEQ ID NO: 1558561 - DNA, 15 bp, Homo sapiens
gaaaatcagtaagat

SEQ ID NO: 1558562 - DNA, 15 bp, Homo sapiens
tgaaaatcagtaaga

SEQ ID NO: 1558563 - DNA, 15 bp, Homo sapiens
ttgaaaatcagtaag

SEQ ID NO: 1558564 - DNA, 15 bp, Homo sapiens
tttgaaaatcagtaa

SEQ ID NO: 1558565 - DNA, 15 bp, Homo sapiens
ttttgaaaatcagta

SEQ ID NO: 1558566 - DNA, 15 bp, Homo sapiens
attttgaaaatcagt

SEQ ID NO: 1558567 - DNA, 15 bp, Homo sapiens
cattttgaaaatcag

SEQ ID NO: 1558568 - DNA, 15 bp, Homo sapiens
tcattttgaaaatca

SEQ ID NO: 1558569 - DNA, 15 bp, Homo sapiens
ttcattttgaaaatc

SEQ ID NO: 1558570 - DNA, 15 bp, Homo sapiens
tttcattttgaaaat

SEQ ID NO: 1558571 - DNA, 15 bp, Homo sapiens
gtttcattttgaaaa

SEQ ID NO: 1558572 - DNA, 15 bp, Homo sapiens
tgtttcattttgaaa

SEQ ID NO: 1558573 - DNA, 15 bp, Homo sapiens
ctgtttcattttgaa

SEQ ID NO: 1558574 - DNA, 15 bp, Homo sapiens
tctgtttcattttga

SEQ ID NO: 1558575 - DNA, 15 bp, Homo sapiens
gtctgtttcattttg

SEQ ID NO: 1558576 - DNA, 15 bp, Homo sapiens
agtctgtttcatttt

SEQ ID NO: 1558577 - DNA, 15 bp, Homo sapiens
cagtctgtttcattt

SEQ ID NO: 1558578 - DNA, 15 bp, Homo sapiens
gcagtctgtttcatt

SEQ ID NO: 1558579 - DNA, 15 bp, Homo sapiens
tgcagtctgtttcat

SEQ ID NO: 1558580 - DNA, 15 bp, Homo sapiens
ttgcagtctgtttca

SEQ ID NO: 1558581 - DNA, 15 bp, Homo sapiens
tttgcagtctgtttc

SEQ ID NO: 1558582 - DNA, 15 bp, Homo sapiens
atttgcagtctgttt

SEQ ID NO: 1558583 - DNA, 15 bp, Homo sapiens
gatttgcagtctgtt

SEQ ID NO: 1558584 - DNA, 15 bp, Homo sapiens
tgatttgcagtctgt

SEQ ID NO: 1558585 - DNA, 15 bp, Homo sapiens
gtgatttgcagtctg

SEQ ID NO: 1558586 - DNA, 15 bp, Homo sapiens
agtgatttgcagtct

SEQ ID NO: 1558587 - DNA, 15 bp, Homo sapiens
tagtgatttgcagtc

SEQ ID NO: 1558588 - DNA, 15 bp, Homo sapiens
ttagtgatttgcagt

SEQ ID NO: 1558589 - DNA, 15 bp, Homo sapiens
cttagtgatttgcag

SEQ ID NO: 1558590 - DNA, 15 bp, Homo sapiens
acttagtgatttgca

SEQ ID NO: 1558591 - DNA, 15 bp, Homo sapiens
cacttagtgatttgc

SEQ ID NO: 1558592 - DNA, 15 bp, Homo sapiens
acacttagtgatttg

SEQ ID NO: 1558593 - DNA, 15 bp, Homo sapiens
aacacttagtgattt

SEQ ID NO: 1558594 - DNA, 15 bp, Homo sapiens
taacacttagtgatt

SEQ ID NO: 1558595 - DNA, 15 bp, Homo sapiens
ataacacttagtgat

SEQ ID NO: 1558596 - DNA, 15 bp, Homo sapiens
aataacacttagtga

SEQ ID NO: 1558597 - DNA, 15 bp, Homo sapiens
aaataacacttagtg

SEQ ID NO: 1558598 - DNA, 15 bp, Homo sapiens
caaataacacttagt

SEQ ID NO: 1558599 - DNA, 15 bp, Homo sapiens
tcaaataacacttag

SEQ ID NO: 1558600 - DNA, 15 bp, Homo sapiens
ttcaaataacactta

SEQ ID NO: 1558601 - DNA, 15 bp, Homo sapiens
attcaaataacactt

SEQ ID NO: 1558602 - DNA, 15 bp, Homo sapiens
tattcaaataacact

SEQ ID NO: 1558603 - DNA, 15 bp, Homo sapiens
ttattcaaataacac

SEQ ID NO: 1558604 - DNA, 15 bp, Homo sapiens
attattcaaataaca

SEQ ID NO: 1558605 - DNA, 15 bp, Homo sapiens
aattattcaaataac

SEQ ID NO: 1558606 - DNA, 15 bp, Homo sapiens
aaattattcaaataa

SEQ ID NO: 1558607 - DNA, 15 bp, Homo sapiens
taaattattcaaata

SEQ ID NO: 1558608 - DNA, 15 bp, Homo sapiens
ataaattattcaaat

SEQ ID NO: 1558609 - DNA, 15 bp, Homo sapiens
tataaattattcaaa

SEQ ID NO: 1558610 - DNA, 15 bp, Homo sapiens
atataaattattcaa

SEQ ID NO: 1558611 - DNA, 15 bp, Homo sapiens
aatataaattattca

SEQ ID NO: 1558612 - DNA, 15 bp, Homo sapiens
taatataaattattc

SEQ ID NO: 1558613 - DNA, 15 bp, Homo sapiens
ctaatataaattatt

SEQ ID NO: 1558614 - DNA, 15 bp, Homo sapiens
tctaatataaattat

SEQ ID NO: 1558615 - DNA, 15 bp, Homo sapiens
ttctaatataaatta

SEQ ID NO: 1558616 - DNA, 15 bp, Homo sapiens
tttctaatataaatt

SEQ ID NO: 1558617 - DNA, 15 bp, Homo sapiens
ttttctaatataaat

SEQ ID NO: 1558618 - DNA, 15 bp, Homo sapiens
attttctaatataaa

SEQ ID NO: 1558619 - DNA, 15 bp, Homo sapiens
cattttctaatataa

SEQ ID NO: 1558620 - DNA, 15 bp, Homo sapiens
acattttctaatata

SEQ ID NO: 1558621 - DNA, 15 bp, Homo sapiens
aacattttctaatat

SEQ ID NO: 1558622 - DNA, 15 bp, Homo sapiens
taacattttctaata

SEQ ID NO: 1558623 - DNA, 15 bp, Homo sapiens
ttaacattttctaat

SEQ ID NO: 1558624 - DNA, 15 bp, Homo sapiens
cttaacattttctaa

SEQ ID NO: 1558625 - DNA, 15 bp, Homo sapiens
tcttaacattttcta

SEQ ID NO: 1558626 - DNA, 15 bp, Homo sapiens
ctcttaacattttct

SEQ ID NO: 1558627 - DNA, 15 bp, Homo sapiens
tctcttaacattttc

SEQ ID NO: 1558628 - DNA, 15 bp, Homo sapiens
atctcttaacatttt

SEQ ID NO: 1558629 - DNA, 15 bp, Homo sapiens
aatctcttaacattt

SEQ ID NO: 1558630 - DNA, 15 bp, Homo sapiens
aaatctcttaacatt

SEQ ID NO: 1558631 - DNA, 15 bp, Homo sapiens
caaatctcttaacat

SEQ ID NO: 1558632 - DNA, 15 bp, Homo sapiens
tcaaatctcttaaca

SEQ ID NO: 1558633 - DNA, 15 bp, Homo sapiens
atcaaatctcttaac

SEQ ID NO: 1558634 - DNA, 15 bp, Homo sapiens
gatcaaatctcttaa

SEQ ID NO: 1558635 - DNA, 15 bp, Homo sapiens
tgatcaaatctctta

SEQ ID NO: 1558636 - DNA, 15 bp, Homo sapiens
gtgatcaaatctctt

SEQ ID NO: 1558637 - DNA, 15 bp, Homo sapiens
tgtgatcaaatctct

SEQ ID NO: 1558638 - DNA, 15 bp, Homo sapiens
ctgtgatcaaatctc

SEQ ID NO: 1558639 - DNA, 15 bp, Homo sapiens
tctgtgatcaaatct

SEQ ID NO: 1558640 - DNA, 15 bp, Homo sapiens
atctgtgatcaaatc

SEQ ID NO: 1558641 - DNA, 15 bp, Homo sapiens
aatctgtgatcaaat

SEQ ID NO: 1558642 - DNA, 15 bp, Homo sapiens
aaatctgtgatcaaa

SEQ ID NO: 1558643 - DNA, 15 bp, Homo sapiens
aaaatctgtgatcaa

SEQ ID NO: 1558644 - DNA, 15 bp, Homo sapiens
gaaaatctgtgatca

SEQ ID NO: 1558645 - DNA, 15 bp, Homo sapiens
agaaaatctgtgatc

SEQ ID NO: 1558646 - DNA, 15 bp, Homo sapiens
aagaaaatctgtgat

SEQ ID NO: 1558647 - DNA, 15 bp, Homo sapiens
gaagaaaatctgtga

SEQ ID NO: 1558648 - DNA, 15 bp, Homo sapiens
tgaagaaaatctgtg

SEQ ID NO: 1558649 - DNA, 15 bp, Homo sapiens
ttgaagaaaatctgt

SEQ ID NO: 1558650 - DNA, 15 bp, Homo sapiens
gttgaagaaaatctg

SEQ ID NO: 1558651 - DNA, 15 bp, Homo sapiens
agttgaagaaaatct

SEQ ID NO: 1558652 - DNA, 15 bp, Homo sapiens
aagttgaagaaaatc

SEQ ID NO: 1558653 - DNA, 15 bp, Homo sapiens
caagttgaagaaaat

SEQ ID NO: 1558654 - DNA, 15 bp, Homo sapiens
acaagttgaagaaaa

SEQ ID NO: 1558655 - DNA, 15 bp, Homo sapiens
aacaagttgaagaaa

SEQ ID NO: 1558656 - DNA, 15 bp, Homo sapiens
aaacaagttgaagaa

SEQ ID NO: 1558657 - DNA, 15 bp, Homo sapiens
taaacaagttgaaga

SEQ ID NO: 1558658 - DNA, 15 bp, Homo sapiens
ataaacaagttgaag

SEQ ID NO: 1558659 - DNA, 15 bp, Homo sapiens
tataaacaagttgaa

SEQ ID NO: 1558660 - DNA, 15 bp, Homo sapiens
ctataaacaagttga

SEQ ID NO: 1558661 - DNA, 15 bp, Homo sapiens
actataaacaagttg

SEQ ID NO: 1558662 - DNA, 15 bp, Homo sapiens
aactataaacaagtt

SEQ ID NO: 1558663 - DNA, 15 bp, Homo sapiens
aaactataaacaagt

SEQ ID NO: 1558664 - DNA, 15 bp, Homo sapiens
taaactataaacaag

SEQ ID NO: 1558665 - DNA, 15 bp, Homo sapiens
ataaactataaacaa

SEQ ID NO: 1558666 - DNA, 15 bp, Homo sapiens
caataaactataaac

SEQ ID NO: 1558667 - DNA, 15 bp, Homo sapiens
acaataaactataaa

SEQ ID NO: 1558668 - DNA, 15 bp, Homo sapiens
aacaataaactataa

SEQ ID NO: 1558669 - DNA, 15 bp, Homo sapiens
caacaataaactata

SEQ ID NO: 1558670 - DNA, 15 bp, Homo sapiens
tcaacaataaactat

SEQ ID NO: 1558671 - DNA, 15 bp, Homo sapiens
atcaacaataaacta

SEQ ID NO: 1558672 - DNA, 15 bp, Homo sapiens
taatcaacaataaac

SEQ ID NO: 1558673 - DNA, 15 bp, Homo sapiens
ttaatcaacaataaa

SEQ ID NO: 1558674 - DNA, 15 bp, Homo sapiens
attaatcaacaataa

SEQ ID NO: 1558675 - DNA, 15 bp, Homo sapiens
tattaatcaacaata

SEQ ID NO: 1558676 - DNA, 15 bp, Homo sapiens
gtattaatcaacaat

SEQ ID NO: 1558677 - DNA, 15 bp, Homo sapiens
agtattaatcaacaa

SEQ ID NO: 1558678 - DNA, 15 bp, Homo sapiens
tagtattaatcaaca

SEQ ID NO: 1558679 - DNA, 15 bp, Homo sapiens
atagtattaatcaac

SEQ ID NO: 1558680 - DNA, 15 bp, Homo sapiens
aatagtattaatcaa

SEQ ID NO: 1558681 - DNA, 15 bp, Homo sapiens
taatagtattaatca

SEQ ID NO: 1558682 - DNA, 15 bp, Homo sapiens
ataatagtattaatc

SEQ ID NO: 1558683 - DNA, 15 bp, Homo sapiens
aataatagtattaat

SEQ ID NO: 1558684 - DNA, 15 bp, Homo sapiens
aaataatagtattaa

SEQ ID NO: 1558685 - DNA, 15 bp, Homo sapiens
aaaataatagtatta

SEQ ID NO: 1558686 - DNA, 15 bp, Homo sapiens
taaaataatagtatt

SEQ ID NO: 1558687 - DNA, 15 bp, Homo sapiens
ataaaataatagtat

SEQ ID NO: 1558688 - DNA, 15 bp, Homo sapiens
tataaaataatagta

SEQ ID NO: 1558689 - DNA, 15 bp, Homo sapiens
gtataaaataatagt

SEQ ID NO: 1558690 - DNA, 15 bp, Homo sapiens
ggtataaaataatag

SEQ ID NO: 1558691 - DNA, 15 bp, Homo sapiens
tggtataaaataata

SEQ ID NO: 1558692 - DNA, 15 bp, Homo sapiens
atggtataaaataat

SEQ ID NO: 1558693 - DNA, 15 bp, Homo sapiens
aatggtataaaataa

SEQ ID NO: 1558694 - DNA, 15 bp, Homo sapiens
caatggtataaaata

SEQ ID NO: 1558695 - DNA, 15 bp, Homo sapiens
acaatggtataaaat

SEQ ID NO: 1558696 - DNA, 15 bp, Homo sapiens
tacaatggtataaaa

SEQ ID NO: 1558697 - DNA, 15 bp, Homo sapiens
gtacaatggtataaa

SEQ ID NO: 1558698 - DNA, 15 bp, Homo sapiens
tgtacaatggtataa

SEQ ID NO: 1558699 - DNA, 15 bp, Homo sapiens
atgtacaatggtata

SEQ ID NO: 1558700 - DNA, 15 bp, Homo sapiens
gatgtacaatggtat

SEQ ID NO: 1558701 - DNA, 15 bp, Homo sapiens
tgatgtacaatggta

SEQ ID NO: 1558702 - DNA, 15 bp, Homo sapiens
gtgatgtacaatggt

SEQ ID NO: 1558703 - DNA, 15 bp, Homo sapiens
ggtgatgtacaatgg

SEQ ID NO: 1558704 - DNA, 15 bp, Homo sapiens
aggtgatgtacaatg

SEQ ID NO: 1558705 - DNA, 15 bp, Homo sapiens
aaggtgatgtacaat

SEQ ID NO: 1558706 - DNA, 15 bp, Homo sapiens
aaaggtgatgtacaa

SEQ ID NO: 1558707 - DNA, 15 bp, Homo sapiens
gaaaggtgatgtaca

SEQ ID NO: 1558708 - DNA, 15 bp, Homo sapiens
agaaaggtgatgtac

SEQ ID NO: 1558709 - DNA, 15 bp, Homo sapiens
cagaaaggtgatgta

SEQ ID NO: 1558710 - DNA, 15 bp, Homo sapiens
ccagaaaggtgatgt

SEQ ID NO: 1558711 - DNA, 15 bp, Homo sapiens
gccagaaaggtgatg

SEQ ID NO: 1558712 - DNA, 15 bp, Homo sapiens
tgccagaaaggtgat

SEQ ID NO: 1558713 - DNA, 15 bp, Homo sapiens
gtgccagaaaggtga

SEQ ID NO: 1558714 - DNA, 15 bp, Homo sapiens
ggtgccagaaaggtg

SEQ ID NO: 1558715 - DNA, 15 bp, Homo sapiens
gggtgccagaaaggt

SEQ ID NO: 1558716 - DNA, 15 bp, Homo sapiens
agggtgccagaaagg

SEQ ID NO: 1558717 - DNA, 15 bp, Homo sapiens
tagggtgccagaaag

SEQ ID NO: 1558718 - DNA, 15 bp, Homo sapiens
atagggtgccagaaa

SEQ ID NO: 1558719 - DNA, 15 bp, Homo sapiens
aatagggtgccagaa

SEQ ID NO: 1558720 - DNA, 15 bp, Homo sapiens
gaatagggtgccaga

SEQ ID NO: 1558721 - DNA, 15 bp, Homo sapiens
agaatagggtgccag

SEQ ID NO: 1558722 - DNA, 15 bp, Homo sapiens
gagaatagggtgcca

SEQ ID NO: 1558723 - DNA, 15 bp, Homo sapiens
tgagaatagggtgcc

SEQ ID NO: 1558724 - DNA, 15 bp, Homo sapiens
gtgagaatagggtgc

SEQ ID NO: 1558725 - DNA, 15 bp, Homo sapiens
ggtgagaatagggtg

SEQ ID NO: 1558726 - DNA, 15 bp, Homo sapiens
gggtgagaatagggt

SEQ ID NO: 1558727 - DNA, 15 bp, Homo sapiens
ggggtgagaataggg

SEQ ID NO: 1558728 - DNA, 15 bp, Homo sapiens
aggggtgagaatagg

SEQ ID NO: 1558729 - DNA, 15 bp, Homo sapiens
aaggggtgagaatag

SEQ ID NO: 1558730 - DNA, 15 bp, Homo sapiens
aaaggggtgagaata

SEQ ID NO: 1558731 - DNA, 15 bp, Homo sapiens
gaaaggggtgagaat

SEQ ID NO: 1558732 - DNA, 15 bp, Homo sapiens
agaaaggggtgagaa

SEQ ID NO: 1558733 - DNA, 15 bp, Homo sapiens
tagaaaggggtgaga

SEQ ID NO: 1558734 - DNA, 15 bp, Homo sapiens
atagaaaggggtgag

SEQ ID NO: 1558735 - DNA, 15 bp, Homo sapiens
tatagaaaggggtga

SEQ ID NO: 1558736 - DNA, 15 bp, Homo sapiens
atatagaaaggggtg

SEQ ID NO: 1558737 - DNA, 15 bp, Homo sapiens
aatatagaaaggggt

SEQ ID NO: 1558738 - DNA, 15 bp, Homo sapiens
caatatagaaagggg

SEQ ID NO: 1558739 - DNA, 15 bp, Homo sapiens
gcaatatagaaaggg

SEQ ID NO: 1558740 - DNA, 15 bp, Homo sapiens
agcaatatagaaagg

SEQ ID NO: 1558741 - DNA, 15 bp, Homo sapiens
aagcaatatagaaag

SEQ ID NO: 1558742 - DNA, 15 bp, Homo sapiens
taagcaatatagaaa

SEQ ID NO: 1558743 - DNA, 15 bp, Homo sapiens
ataagcaatatagaa

SEQ ID NO: 1558744 - DNA, 15 bp, Homo sapiens
tataagcaatataga

SEQ ID NO: 1558745 - DNA, 15 bp, Homo sapiens
ctataagcaatatag

SEQ ID NO: 1558746 - DNA, 15 bp, Homo sapiens
gctataagcaatata

SEQ ID NO: 1558747 - DNA, 15 bp, Homo sapiens
ggctataagcaatat

SEQ ID NO: 1558748 - DNA, 15 bp, Homo sapiens
tggctataagcaata

SEQ ID NO: 1558749 - DNA, 15 bp, Homo sapiens
ctggctataagcaat

SEQ ID NO: 1558750 - DNA, 15 bp, Homo sapiens
actggctataagcaa

SEQ ID NO: 1558751 - DNA, 15 bp, Homo sapiens
cactggctataagca

SEQ ID NO: 1558752 - DNA, 15 bp, Homo sapiens
tcactggctataagc

SEQ ID NO: 1558753 - DNA, 15 bp, Homo sapiens
atcactggctataag

SEQ ID NO: 1558754 - DNA, 15 bp, Homo sapiens
gatcactggctataa

SEQ ID NO: 1558755 - DNA, 15 bp, Homo sapiens
agatcactggctata

SEQ ID NO: 1558756 - DNA, 15 bp, Homo sapiens
gagatcactggctat

SEQ ID NO: 1558757 - DNA, 15 bp, Homo sapiens
ggagatcactggcta

SEQ ID NO: 1558758 - DNA, 15 bp, Homo sapiens
tggagatcactggct

SEQ ID NO: 1558759 - DNA, 15 bp, Homo sapiens
ctggagatcactggc

SEQ ID NO: 1558760 - DNA, 15 bp, Homo sapiens
gctggagatcactgg

SEQ ID NO: 1558761 - DNA, 15 bp, Homo sapiens
agctggagatcactg

SEQ ID NO: 1558762 - DNA, 15 bp, Homo sapiens
tagctggagatcact

SEQ ID NO: 1558763 - DNA, 15 bp, Homo sapiens
atagctggagatcac

SEQ ID NO: 1558764 - DNA, 15 bp, Homo sapiens
aatagctggagatca

SEQ ID NO: 1558765 - DNA, 15 bp, Homo sapiens
gaatagctggagatc

SEQ ID NO: 1558766 - DNA, 15 bp, Homo sapiens
ggaatagctggagat

SEQ ID NO: 1558767 - DNA, 15 bp, Homo sapiens
aggaatagctggaga

SEQ ID NO: 1558768 - DNA, 15 bp, Homo sapiens
gaggaatagctggag

SEQ ID NO: 1558769 - DNA, 15 bp, Homo sapiens
tgaggaatagctgga

SEQ ID NO: 1558770 - DNA, 15 bp, Homo sapiens
ctgaggaatagctgg

SEQ ID NO: 1558771 - DNA, 15 bp, Homo sapiens
tctgaggaatagctg

SEQ ID NO: 1558772 - DNA, 15 bp, Homo sapiens
ctctgaggaatagct

SEQ ID NO: 1558773 - DNA, 15 bp, Homo sapiens
gctctgaggaatagc

SEQ ID NO: 1558774 - DNA, 15 bp, Homo sapiens
ggctctgaggaatag

SEQ ID NO: 1558775 - DNA, 15 bp, Homo sapiens
gggctctgaggaata

SEQ ID NO: 1558776 - DNA, 15 bp, Homo sapiens
cgggctctgaggaat

SEQ ID NO: 1558777 - DNA, 15 bp, Homo sapiens
gcgggctctgaggaa

SEQ ID NO: 1558778 - DNA, 15 bp, Homo sapiens
agcgggctctgagga

SEQ ID NO: 1558779 - DNA, 15 bp, Homo sapiens
gagcgggctctgagg

SEQ ID NO: 1558780 - DNA, 15 bp, Homo sapiens
tgagcgggctctgag

SEQ ID NO: 1558781 - DNA, 15 bp, Homo sapiens
atgagcgggctctga

SEQ ID NO: 1558782 - DNA, 15 bp, Homo sapiens
aatgagcgggctctg

SEQ ID NO: 1558783 - DNA, 15 bp, Homo sapiens
gaatgagcgggctct

SEQ ID NO: 1558784 - DNA, 15 bp, Homo sapiens
tgaatgagcgggctc

SEQ ID NO: 1558785 - DNA, 15 bp, Homo sapiens
gtgaatgagcgggct

SEQ ID NO: 1558786 - DNA, 15 bp, Homo sapiens
agtgaatgagcgggc

SEQ ID NO: 1558787 - DNA, 15 bp, Homo sapiens
aagtgaatgagcggg

SEQ ID NO: 1558788 - DNA, 15 bp, Homo sapiens
gaagtgaatgagcgg

SEQ ID NO: 1558789 - DNA, 15 bp, Homo sapiens
ggaagtgaatgagcg

SEQ ID NO: 1558790 - DNA, 15 bp, Homo sapiens
aggaagtgaatgagc

SEQ ID NO: 1558791 - DNA, 15 bp, Homo sapiens
taggaagtgaatgag

SEQ ID NO: 1558792 - DNA, 15 bp, Homo sapiens
ttaggaagtgaatga

SEQ ID NO: 1558793 - DNA, 15 bp, Homo sapiens
gttaggaagtgaatg

SEQ ID NO: 1558794 - DNA, 15 bp, Homo sapiens
ggttaggaagtgaat

SEQ ID NO: 1558795 - DNA, 15 bp, Homo sapiens
aggttaggaagtgaa

SEQ ID NO: 1558796 - DNA, 15 bp, Homo sapiens
caggttaggaagtga

SEQ ID NO: 1558797 - DNA, 15 bp, Homo sapiens
ccaggttaggaagtg

SEQ ID NO: 1558798 - DNA, 15 bp, Homo sapiens
accaggttaggaagt

SEQ ID NO: 1558799 - DNA, 15 bp, Homo sapiens
aaccaggttaggaag

SEQ ID NO: 1558800 - DNA, 15 bp, Homo sapiens
aaaccaggttaggaa

SEQ ID NO: 1558801 - DNA, 15 bp, Homo sapiens
aaaaccaggttagga

SEQ ID NO: 1558802 - DNA, 15 bp, Homo sapiens
taaaaccaggttagg

SEQ ID NO: 1558803 - DNA, 15 bp, Homo sapiens
gtaaaaccaggttag

SEQ ID NO: 1558804 - DNA, 15 bp, Homo sapiens
agtaaaaccaggtta

SEQ ID NO: 1558805 - DNA, 15 bp, Homo sapiens
gagtaaaaccaggtt

SEQ ID NO: 1558806 - DNA, 15 bp, Homo sapiens
ggagtaaaaccaggt

SEQ ID NO: 1558807 - DNA, 15 bp, Homo sapiens
gggagtaaaaccagg

SEQ ID NO: 1558808 - DNA, 15 bp, Homo sapiens
ggggagtaaaaccag

SEQ ID NO: 1558809 - DNA, 15 bp, Homo sapiens
cggggagtaaaacca

SEQ ID NO: 1558810 - DNA, 15 bp, Homo sapiens
acggggagtaaaacc

SEQ ID NO: 1558811 - DNA, 15 bp, Homo sapiens
aacggggagtaaaac

SEQ ID NO: 1558812 - DNA, 15 bp, Homo sapiens
caacggggagtaaaa

SEQ ID NO: 1558813 - DNA, 15 bp, Homo sapiens
gcaacggggagtaaa

SEQ ID NO: 1558814 - DNA, 15 bp, Homo sapiens
agcaacggggagtaa

SEQ ID NO: 1558815 - DNA, 15 bp, Homo sapiens
cagcaacggggagta

SEQ ID NO: 1558816 - DNA, 15 bp, Homo sapiens
tcagcaacggggagt

SEQ ID NO: 1558817 - DNA, 15 bp, Homo sapiens
gtcagcaacggggag

SEQ ID NO: 1558818 - DNA, 15 bp, Homo sapiens
agtcagcaacgggga

SEQ ID NO: 1558819 - DNA, 15 bp, Homo sapiens
aagtcagcaacgggg

SEQ ID NO: 1558820 - DNA, 15 bp, Homo sapiens
gaagtcagcaacggg

SEQ ID NO: 1558821 - DNA, 15 bp, Homo sapiens
tgaagtcagcaacgg

SEQ ID NO: 1558822 - DNA, 15 bp, Homo sapiens
gtgaagtcagcaacg

SEQ ID NO: 1558823 - DNA, 15 bp, Homo sapiens
tgtgaagtcagcaac

SEQ ID NO: 1558824 - DNA, 15 bp, Homo sapiens
ctgtgaagtcagcaa

SEQ ID NO: 1558825 - DNA, 15 bp, Homo sapiens
gctgtgaagtcagca

SEQ ID NO: 1558826 - DNA, 15 bp, Homo sapiens
agctgtgaagtcagc

SEQ ID NO: 1558827 - DNA, 15 bp, Homo sapiens
aagctgtgaagtcag

SEQ ID NO: 1558828 - DNA, 15 bp, Homo sapiens
caagctgtgaagtca

SEQ ID NO: 1558829 - DNA, 15 bp, Homo sapiens
acaagctgtgaagtc

SEQ ID NO: 1558830 - DNA, 15 bp, Homo sapiens
aacaagctgtgaagt

SEQ ID NO: 1558831 - DNA, 15 bp, Homo sapiens
taacaagctgtgaag

SEQ ID NO: 1558832 - DNA, 15 bp, Homo sapiens
ttaacaagctgtgaa

SEQ ID NO: 1558833 - DNA, 15 bp, Homo sapiens
gttaacaagctgtga

SEQ ID NO: 1558834 - DNA, 15 bp, Homo sapiens
agttaacaagctgtg

SEQ ID NO: 1558835 - DNA, 15 bp, Homo sapiens
aagttaacaagctgt

SEQ ID NO: 1558836 - DNA, 15 bp, Homo sapiens
aaagttaacaagctg

SEQ ID NO: 1558837 - DNA, 15 bp, Homo sapiens
caaagttaacaagct

SEQ ID NO: 1558838 - DNA, 15 bp, Homo sapiens
ccaaagttaacaagc

SEQ ID NO: 1558839 - DNA, 15 bp, Homo sapiens
accaaagttaacaag

SEQ ID NO: 1558840 - DNA, 15 bp, Homo sapiens
aaccaaagttaacaa

SEQ ID NO: 1558841 - DNA, 15 bp, Homo sapiens
gaaccaaagttaaca

SEQ ID NO: 1558842 - DNA, 15 bp, Homo sapiens
tgaaccaaagttaac

SEQ ID NO: 1558843 - DNA, 15 bp, Homo sapiens
atgaaccaaagttaa

SEQ ID NO: 1558844 - DNA, 15 bp, Homo sapiens
aatgaaccaaagtta

SEQ ID NO: 1558845 - DNA, 15 bp, Homo sapiens
taatgaaccaaagtt

SEQ ID NO: 1558846 - DNA, 15 bp, Homo sapiens
ttaatgaaccaaagt

SEQ ID NO: 1558847 - DNA, 15 bp, Homo sapiens
gttaatgaaccaaag

SEQ ID NO: 1558848 - DNA, 15 bp, Homo sapiens
tgttaatgaaccaaa

SEQ ID NO: 1558849 - DNA, 15 bp, Homo sapiens
atgttaatgaaccaa

SEQ ID NO: 1558850 - DNA, 15 bp, Homo sapiens
catgttaatgaacca

SEQ ID NO: 1558851 - DNA, 15 bp, Homo sapiens
ccatgttaatgaacc

SEQ ID NO: 1558852 - DNA, 15 bp, Homo sapiens
cccatgttaatgaac

SEQ ID NO: 1558853 - DNA, 15 bp, Homo sapiens
ccccatgttaatgaa

SEQ ID NO: 1558854 - DNA, 15 bp, Homo sapiens
gccccatgttaatga

SEQ ID NO: 1558855 - DNA, 15 bp, Homo sapiens
tgccccatgttaatg

SEQ ID NO: 1558856 - DNA, 15 bp, Homo sapiens
ctgccccatgttaat

SEQ ID NO: 1558857 - DNA, 15 bp, Homo sapiens
actgccccatgttaa

SEQ ID NO: 1558858 - DNA, 15 bp, Homo sapiens
gactgccccatgtta

SEQ ID NO: 1558859 - DNA, 15 bp, Homo sapiens
tgactgccccatgtt

SEQ ID NO: 1558860 - DNA, 15 bp, Homo sapiens
atgactgccccatgt

SEQ ID NO: 1558861 - DNA, 15 bp, Homo sapiens
catgactgccccatg

SEQ ID NO: 1558862 - DNA, 15 bp, Homo sapiens
ccatgactgccccat

SEQ ID NO: 1558863 - DNA, 15 bp, Homo sapiens
gccatgactgcccca

SEQ ID NO: 1558864 - DNA, 15 bp, Homo sapiens
ggccatgactgcccc

SEQ ID NO: 1558865 - DNA, 15 bp, Homo sapiens
tggccatgactgccc

SEQ ID NO: 1558866 - DNA, 15 bp, Homo sapiens
ctggccatgactgcc

SEQ ID NO: 1558867 - DNA, 15 bp, Homo sapiens
tctggccatgactgc

SEQ ID NO: 1558868 - DNA, 15 bp, Homo sapiens
ctctggccatgactg

SEQ ID NO: 1558869 - DNA, 15 bp, Homo sapiens
tctctggccatgact

SEQ ID NO: 1558870 - DNA, 15 bp, Homo sapiens
gtctctggccatgac

SEQ ID NO: 1558871 - DNA, 15 bp, Homo sapiens
agtctctggccatga

SEQ ID NO: 1558872 - DNA, 15 bp, Homo sapiens
cagtctctggccatg

SEQ ID NO: 1558873 - DNA, 15 bp, Homo sapiens
gcagtctctggccat

SEQ ID NO: 1558874 - DNA, 15 bp, Homo sapiens
tgcagtctctggcca

SEQ ID NO: 1558875 - DNA, 15 bp, Homo sapiens
ctgcagtctctggcc

SEQ ID NO: 1558876 - DNA, 15 bp, Homo sapiens
actgcagtctctggc

SEQ ID NO: 1558877 - DNA, 15 bp, Homo sapiens
aactgcagtctctgg

SEQ ID NO: 1558878 - DNA, 15 bp, Homo sapiens
taactgcagtctctg

SEQ ID NO: 1558879 - DNA, 15 bp, Homo sapiens
ttaactgcagtctct

SEQ ID NO: 1558880 - DNA, 15 bp, Homo sapiens
attaactgcagtctc

SEQ ID NO: 1558881 - DNA, 15 bp, Homo sapiens
tattaactgcagtct

SEQ ID NO: 1558882 - DNA, 15 bp, Homo sapiens
ttattaactgcagtc

SEQ ID NO: 1558883 - DNA, 15 bp, Homo sapiens
cttattaactgcagt

SEQ ID NO: 1558884 - DNA, 15 bp, Homo sapiens
tcttattaactgcag

SEQ ID NO: 1558885 - DNA, 15 bp, Homo sapiens
ttcttattaactgca

SEQ ID NO: 1558886 - DNA, 15 bp, Homo sapiens
gttcttattaactgc

SEQ ID NO: 1558887 - DNA, 15 bp, Homo sapiens
tgttcttattaactg

SEQ ID NO: 1558888 - DNA, 15 bp, Homo sapiens
ctgttcttattaact

SEQ ID NO: 1558889 - DNA, 15 bp, Homo sapiens
gctgttcttattaac

SEQ ID NO: 1558890 - DNA, 15 bp, Homo sapiens
tgctgttcttattaa

SEQ ID NO: 1558891 - DNA, 15 bp, Homo sapiens
atgctgttcttatta

SEQ ID NO: 1558892 - DNA, 15 bp, Homo sapiens
catgctgttcttatt

SEQ ID NO: 1558893 - DNA, 15 bp, Homo sapiens
acatgctgttcttat

SEQ ID NO: 1558894 - DNA, 15 bp, Homo sapiens
tacatgctgttctta

SEQ ID NO: 1558895 - DNA, 15 bp, Homo sapiens
ctacatgctgttctt

SEQ ID NO: 1558896 - DNA, 15 bp, Homo sapiens
actacatgctgttct

SEQ ID NO: 1558897 - DNA, 15 bp, Homo sapiens
cactacatgctgttc

SEQ ID NO: 1558898 - DNA, 15 bp, Homo sapiens
ccactacatgctgtt

SEQ ID NO: 1558899 - DNA, 15 bp, Homo sapiens
accactacatgctgt

SEQ ID NO: 1558900 - DNA, 15 bp, Homo sapiens
caccactacatgctg

SEQ ID NO: 1558901 - DNA, 15 bp, Homo sapiens
ccaccactacatgct

SEQ ID NO: 1558902 - DNA, 15 bp, Homo sapiens
cccaccactacatgc

SEQ ID NO: 1558903 - DNA, 15 bp, Homo sapiens
acccaccactacatg

SEQ ID NO: 1558904 - DNA, 15 bp, Homo sapiens
gacccaccactacat

SEQ ID NO: 1558905 - DNA, 15 bp, Homo sapiens
tgacccaccactaca

SEQ ID NO: 1558906 - DNA, 15 bp, Homo sapiens
ctgacccaccactac

SEQ ID NO: 1558907 - DNA, 15 bp, Homo sapiens
tctgacccaccacta

SEQ ID NO: 1558908 - DNA, 15 bp, Homo sapiens
ttctgacccaccact

SEQ ID NO: 1558909 - DNA, 15 bp, Homo sapiens
cttctgacccaccac

SEQ ID NO: 1558910 - DNA, 15 bp, Homo sapiens
gcttctgacccacca

SEQ ID NO: 1558911 - DNA, 15 bp, Homo sapiens
tgcttctgacccacc

SEQ ID NO: 1558912 - DNA, 15 bp, Homo sapiens
ttgcttctgacccac

SEQ ID NO: 1558913 - DNA, 15 bp, Homo sapiens
tttgcttctgaccca

SEQ ID NO: 1558914 - DNA, 15 bp, Homo sapiens
ctttgcttctgaccc

SEQ ID NO: 1558915 - DNA, 15 bp, Homo sapiens
gctttgcttctgacc

SEQ ID NO: 1558916 - DNA, 15 bp, Homo sapiens
tgctttgcttctgac

SEQ ID NO: 1558917 - DNA, 15 bp, Homo sapiens
ctgctttgcttctga

SEQ ID NO: 1558918 - DNA, 15 bp, Homo sapiens
cctgctttgcttctg

SEQ ID NO: 1558919 - DNA, 15 bp, Homo sapiens
tcctgctttgcttct

SEQ ID NO: 1558920 - DNA, 15 bp, Homo sapiens
atcctgctttgcttc

SEQ ID NO: 1558921 - DNA, 15 bp, Homo sapiens
tatcctgctttgctt

SEQ ID NO: 1558922 - DNA, 15 bp, Homo sapiens
ttatcctgctttgct

SEQ ID NO: 1558923 - DNA, 15 bp, Homo sapiens
tttatcctgctttgc

SEQ ID NO: 1558924 - DNA, 15 bp, Homo sapiens
ctttatcctgctttg

SEQ ID NO: 1558925 - DNA, 15 bp, Homo sapiens
actttatcctgcttt

SEQ ID NO: 1558926 - DNA, 15 bp, Homo sapiens
tactttatcctgctt

SEQ ID NO: 1558927 - DNA, 15 bp, Homo sapiens
ttactttatcctgct

SEQ ID NO: 1558928 - DNA, 15 bp, Homo sapiens
cttactttatcctgc

SEQ ID NO: 1558929 - DNA, 15 bp, Homo sapiens
tcttactttatcctg

SEQ ID NO: 1558930 - DNA, 15 bp, Homo sapiens
gtcttactttatcct

SEQ ID NO: 1558931 - DNA, 15 bp, Homo sapiens
ggtcttactttatcc

SEQ ID NO: 1558932 - DNA, 15 bp, Homo sapiens
aggtcttactttatc

SEQ ID NO: 1558933 - DNA, 15 bp, Homo sapiens
caggtcttactttat

SEQ ID NO: 1558934 - DNA, 15 bp, Homo sapiens
ccaggtcttacttta

SEQ ID NO: 1558935 - DNA, 15 bp, Homo sapiens
cccaggtcttacttt

SEQ ID NO: 1558936 - DNA, 15 bp, Homo sapiens
tcccaggtcttactt

SEQ ID NO: 1558937 - DNA, 15 bp, Homo sapiens
atcccaggtcttact

SEQ ID NO: 1558938 - DNA, 15 bp, Homo sapiens
tatcccaggtcttac

SEQ ID NO: 1558939 - DNA, 15 bp, Homo sapiens
ttatcccaggtctta

SEQ ID NO: 1558940 - DNA, 15 bp, Homo sapiens
cttatcccaggtctt

SEQ ID NO: 1558941 - DNA, 15 bp, Homo sapiens
ccttatcccaggtct

SEQ ID NO: 1558942 - DNA, 15 bp, Homo sapiens
tccttatcccaggtc

SEQ ID NO: 1558943 - DNA, 15 bp, Homo sapiens
ctccttatcccaggt

SEQ ID NO: 1558944 - DNA, 15 bp, Homo sapiens
gctccttatcccagg

SEQ ID NO: 1558945 - DNA, 15 bp, Homo sapiens
agctccttatcccag

SEQ ID NO: 1558946 - DNA, 15 bp, Homo sapiens
cagctccttatccca

SEQ ID NO: 1558947 - DNA, 15 bp, Homo sapiens
ccagctccttatccc

SEQ ID NO: 1558948 - DNA, 15 bp, Homo sapiens
gccagctccttatcc

SEQ ID NO: 1558949 - DNA, 15 bp, Homo sapiens
tgccagctccttatc

SEQ ID NO: 1558950 - DNA, 15 bp, Homo sapiens
atgccagctccttat

SEQ ID NO: 1558951 - DNA, 15 bp, Homo sapiens
catgccagctcctta

SEQ ID NO: 1558952 - DNA, 15 bp, Homo sapiens
tcatgccagctcctt

SEQ ID NO: 1558953 - DNA, 15 bp, Homo sapiens
ttcatgccagctcct

SEQ ID NO: 1558954 - DNA, 15 bp, Homo sapiens
gttcatgccagctcc

SEQ ID NO: 1558955 - DNA, 15 bp, Homo sapiens
ggttcatgccagctc

SEQ ID NO: 1558956 - DNA, 15 bp, Homo sapiens
gggttcatgccagct

SEQ ID NO: 1558957 - DNA, 15 bp, Homo sapiens
ggggttcatgccagc

SEQ ID NO: 1558958 - DNA, 15 bp, Homo sapiens
tggggttcatgccag

SEQ ID NO: 1558959 - DNA, 15 bp, Homo sapiens
ctggggttcatgcca

SEQ ID NO: 1558960 - DNA, 15 bp, Homo sapiens
actggggttcatgcc

SEQ ID NO: 1558961 - DNA, 15 bp, Homo sapiens
cactggggttcatgc

SEQ ID NO: 1558962 - DNA, 15 bp, Homo sapiens
ccactggggttcatg

SEQ ID NO: 1558963 - DNA, 15 bp, Homo sapiens
accactggggttcat

SEQ ID NO: 1558964 - DNA, 15 bp, Homo sapiens
gaccactggggttca

SEQ ID NO: 1558965 - DNA, 15 bp, Homo sapiens
agaccactggggttc

SEQ ID NO: 1558966 - DNA, 15 bp, Homo sapiens
gagaccactggggtt

SEQ ID NO: 1558967 - DNA, 15 bp, Homo sapiens
tgagaccactggggt

SEQ ID NO: 1558968 - DNA, 15 bp, Homo sapiens
ctgagaccactgggg

SEQ ID NO: 1558969 - DNA, 15 bp, Homo sapiens
tctgagaccactggg

SEQ ID NO: 1558970 - DNA, 15 bp, Homo sapiens
ttctgagaccactgg

SEQ ID NO: 1558971 - DNA, 15 bp, Homo sapiens
cttctgagaccactg

SEQ ID NO: 1558972 - DNA, 15 bp, Homo sapiens
acttctgagaccact

SEQ ID NO: 1558973 - DNA, 15 bp, Homo sapiens
cacttctgagaccac

SEQ ID NO: 1558974 - DNA, 15 bp, Homo sapiens
ccacttctgagacca

SEQ ID NO: 1558975 - DNA, 15 bp, Homo sapiens
tccacttctgagacc

SEQ ID NO: 1558976 - DNA, 15 bp, Homo sapiens
atccacttctgagac

SEQ ID NO: 1558977 - DNA, 15 bp, Homo sapiens
aatccacttctgaga

SEQ ID NO: 1558978 - DNA, 15 bp, Homo sapiens
aaatccacttctgag

SEQ ID NO: 1558979 - DNA, 15 bp, Homo sapiens
caaatccacttctga

SEQ ID NO: 1558980 - DNA, 15 bp, Homo sapiens
ccaaatccacttctg

SEQ ID NO: 1558981 - DNA, 15 bp, Homo sapiens
gccaaatccacttct

SEQ ID NO: 1558982 - DNA, 15 bp, Homo sapiens
ggccaaatccacttc

SEQ ID NO: 1558983 - DNA, 15 bp, Homo sapiens
tggccaaatccactt

SEQ ID NO: 1558984 - DNA, 15 bp, Homo sapiens
gtggccaaatccact

SEQ ID NO: 1558985 - DNA, 15 bp, Homo sapiens
tgtggccaaatccac

SEQ ID NO: 1558986 - DNA, 15 bp, Homo sapiens
ttgtggccaaatcca

SEQ ID NO: 1558987 - DNA, 15 bp, Homo sapiens
attgtggccaaatcc

SEQ ID NO: 1558988 - DNA, 15 bp, Homo sapiens
tattgtggccaaatc

SEQ ID NO: 1558989 - DNA, 15 bp, Homo sapiens
ctattgtggccaaat

SEQ ID NO: 1558990 - DNA, 15 bp, Homo sapiens
tctattgtggccaaa

SEQ ID NO: 1558991 - DNA, 15 bp, Homo sapiens
ctctattgtggccaa

SEQ ID NO: 1558992 - DNA, 15 bp, Homo sapiens
tctctattgtggcca

SEQ ID NO: 1558993 - DNA, 15 bp, Homo sapiens
atctctattgtggcc

SEQ ID NO: 1558994 - DNA, 15 bp, Homo sapiens
aatctctattgtggc

SEQ ID NO: 1558995 - DNA, 15 bp, Homo sapiens
gaatctctattgtgg

SEQ ID NO: 1558996 - DNA, 15 bp, Homo sapiens
tgaatctctattgtg

SEQ ID NO: 1558997 - DNA, 15 bp, Homo sapiens
ttgaatctctattgt

SEQ ID NO: 1558998 - DNA, 15 bp, Homo sapiens
cttgaatctctattg

SEQ ID NO: 1558999 - DNA, 15 bp, Homo sapiens
gcttgaatctctatt

SEQ ID NO: 1559000 - DNA, 15 bp, Homo sapiens
agcttgaatctctat

SEQ ID NO: 1559001 - DNA, 15 bp, Homo sapiens
tagcttgaatctcta

SEQ ID NO: 1559002 - DNA, 15 bp, Homo sapiens
atagcttgaatctct

SEQ ID NO: 1559003 - DNA, 15 bp, Homo sapiens
tatagcttgaatctc

SEQ ID NO: 1559004 - DNA, 15 bp, Homo sapiens
ctatagcttgaatct

SEQ ID NO: 1559005 - DNA, 15 bp, Homo sapiens
gctatagcttgaatc

SEQ ID NO: 1559006 - DNA, 15 bp, Homo sapiens
agctatagcttgaat

SEQ ID NO: 1559007 - DNA, 15 bp, Homo sapiens
aagctatagcttgaa

SEQ ID NO: 1559008 - DNA, 15 bp, Homo sapiens
caagctatagcttga

SEQ ID NO: 1559009 - DNA, 15 bp, Homo sapiens
tcaagctatagcttg

SEQ ID NO: 1559010 - DNA, 15 bp, Homo sapiens
ctcaagctatagctt

SEQ ID NO: 1559011 - DNA, 15 bp, Homo sapiens
actcaagctatagct

SEQ ID NO: 1559012 - DNA, 15 bp, Homo sapiens
gactcaagctatagc

SEQ ID NO: 1559013 - DNA, 15 bp, Homo sapiens
tgactcaagctatag

SEQ ID NO: 1559014 - DNA, 15 bp, Homo sapiens
ttgactcaagctata

SEQ ID NO: 1559015 - DNA, 15 bp, Homo sapiens
gttgactcaagctat

SEQ ID NO: 1559016 - DNA, 15 bp, Homo sapiens
tgttgactcaagcta

SEQ ID NO: 1559017 - DNA, 15 bp, Homo sapiens
ttgttgactcaagct

SEQ ID NO: 1559018 - DNA, 15 bp, Homo sapiens
attgttgactcaagc

SEQ ID NO: 1559019 - DNA, 15 bp, Homo sapiens
aattgttgactcaag

SEQ ID NO: 1559020 - DNA, 15 bp, Homo sapiens
aaattgttgactcaa

SEQ ID NO: 1559021 - DNA, 15 bp, Homo sapiens
aaaattgttgactca

SEQ ID NO: 1559022 - DNA, 15 bp, Homo sapiens
caaaattgttgactc

SEQ ID NO: 1559023 - DNA, 15 bp, Homo sapiens
acaaaattgttgact

SEQ ID NO: 1559024 - DNA, 15 bp, Homo sapiens
tacaaaattgttgac

SEQ ID NO: 1559025 - DNA, 15 bp, Homo sapiens
atacaaaattgttga

SEQ ID NO: 1559026 - DNA, 15 bp, Homo sapiens
aatacaaaattgttg

SEQ ID NO: 1559027 - DNA, 15 bp, Homo sapiens
taatacaaaattgtt

SEQ ID NO: 1559028 - DNA, 15 bp, Homo sapiens
ttaatacaaaattgt

SEQ ID NO: 1559029 - DNA, 15 bp, Homo sapiens
attaatacaaaattg

SEQ ID NO: 1559030 - DNA, 15 bp, Homo sapiens
aattaatacaaaatt

SEQ ID NO: 1559031 - DNA, 15 bp, Homo sapiens
aaattaatacaaaat

SEQ ID NO: 1559032 - DNA, 15 bp, Homo sapiens
taaattaatacaaaa

SEQ ID NO: 1559033 - DNA, 15 bp, Homo sapiens
ttaaattaatacaaa

SEQ ID NO: 1559034 - DNA, 15 bp, Homo sapiens
tttaaattaatacaa

SEQ ID NO: 1559035 - DNA, 15 bp, Homo sapiens
atttaaattaataca

SEQ ID NO: 1559036 - DNA, 15 bp, Homo sapiens
gatttaaattaatac

SEQ ID NO: 1559037 - DNA, 15 bp, Homo sapiens
tgatttaaattaata

SEQ ID NO: 1559038 - DNA, 15 bp, Homo sapiens
atgatttaaattaat

SEQ ID NO: 1559039 - DNA, 15 bp, Homo sapiens
tatgatttaaattaa

SEQ ID NO: 1559040 - DNA, 15 bp, Homo sapiens
ctatgatttaaatta

SEQ ID NO: 1559041 - DNA, 15 bp, Homo sapiens
cctatgatttaaatt

SEQ ID NO: 1559042 - DNA, 15 bp, Homo sapiens
gcctatgatttaaat

SEQ ID NO: 1559043 - DNA, 15 bp, Homo sapiens
agcctatgatttaaa

SEQ ID NO: 1559044 - DNA, 15 bp, Homo sapiens
aagcctatgatttaa

SEQ ID NO: 1559045 - DNA, 15 bp, Homo sapiens
caagcctatgattta

SEQ ID NO: 1559046 - DNA, 15 bp, Homo sapiens
tcaagcctatgattt

SEQ ID NO: 1559047 - DNA, 15 bp, Homo sapiens
ctcaagcctatgatt

SEQ ID NO: 1559048 - DNA, 15 bp, Homo sapiens
cctcaagcctatgat

SEQ ID NO: 1559049 - DNA, 15 bp, Homo sapiens
ccctcaagcctatga

SEQ ID NO: 1559050 - DNA, 15 bp, Homo sapiens
tccctcaagcctatg

SEQ ID NO: 1559051 - DNA, 15 bp, Homo sapiens
gtccctcaagcctat

SEQ ID NO: 1559052 - DNA, 15 bp, Homo sapiens
ggtccctcaagccta

SEQ ID NO: 1559053 - DNA, 15 bp, Homo sapiens
tggtccctcaagcct

SEQ ID NO: 1559054 - DNA, 15 bp, Homo sapiens
atggtccctcaagcc

SEQ ID NO: 1559055 - DNA, 15 bp, Homo sapiens
catggtccctcaagc

SEQ ID NO: 1559056 - DNA, 15 bp, Homo sapiens
ccatggtccctcaag

SEQ ID NO: 1559057 - DNA, 15 bp, Homo sapiens
tccatggtccctcaa

SEQ ID NO: 1559058 - DNA, 15 bp, Homo sapiens
ctccatggtccctca

SEQ ID NO: 1559059 - DNA, 15 bp, Homo sapiens
tctccatggtccctc

SEQ ID NO: 1559060 - DNA, 15 bp, Homo sapiens
atctccatggtccct

SEQ ID NO: 1559061 - DNA, 15 bp, Homo sapiens
aatctccatggtccc

SEQ ID NO: 1559062 - DNA, 15 bp, Homo sapiens
gaatctccatggtcc

SEQ ID NO: 1559063 - DNA, 15 bp, Homo sapiens
agaatctccatggtc

SEQ ID NO: 1559064 - DNA, 15 bp, Homo sapiens
gagaatctccatggt

SEQ ID NO: 1559065 - DNA, 15 bp, Homo sapiens
ggagaatctccatgg

SEQ ID NO: 1559066 - DNA, 15 bp, Homo sapiens
gggagaatctccatg

SEQ ID NO: 1559067 - DNA, 15 bp, Homo sapiens
tgggagaatctccat

SEQ ID NO: 1559068 - DNA, 15 bp, Homo sapiens
ctgggagaatctcca

SEQ ID NO: 1559069 - DNA, 15 bp, Homo sapiens
actgggagaatctcc

SEQ ID NO: 1559070 - DNA, 15 bp, Homo sapiens
aactgggagaatctc

SEQ ID NO: 1559071 - DNA, 15 bp, Homo sapiens
aaactgggagaatct

SEQ ID NO: 1559072 - DNA, 15 bp, Homo sapiens
aaaactgggagaatc

SEQ ID NO: 1559073 - DNA, 15 bp, Homo sapiens
aaaaactgggagaat

SEQ ID NO: 1559074 - DNA, 15 bp, Homo sapiens
taaaaactgggagaa

SEQ ID NO: 1559075 - DNA, 15 bp, Homo sapiens
ataaaaactgggaga

SEQ ID NO: 1559076 - DNA, 15 bp, Homo sapiens
cataaaaactgggag

SEQ ID NO: 1559077 - DNA, 15 bp, Homo sapiens
tcataaaaactggga

SEQ ID NO: 1559078 - DNA, 15 bp, Homo sapiens
ctcataaaaactggg

SEQ ID NO: 1559079 - DNA, 15 bp, Homo sapiens
tctcataaaaactgg

SEQ ID NO: 1559080 - DNA, 15 bp, Homo sapiens
ctctcataaaaactg

SEQ ID NO: 1559081 - DNA, 15 bp, Homo sapiens
tctctcataaaaact

SEQ ID NO: 1559082 - DNA, 15 bp, Homo sapiens
ctctctcataaaaac

SEQ ID NO: 1559083 - DNA, 15 bp, Homo sapiens
tctctctcataaaaa

SEQ ID NO: 1559084 - DNA, 15 bp, Homo sapiens
ctctctctcataaaa

SEQ ID NO: 1559085 - DNA, 15 bp, Homo sapiens
tctctctctcataaa

SEQ ID NO: 1559086 - DNA, 15 bp, Homo sapiens
ctctctctctcataa

SEQ ID NO: 1559087 - DNA, 15 bp, Homo sapiens
tctctctctctcata

SEQ ID NO: 1559088 - DNA, 15 bp, Homo sapiens
ctctctctctctcat

SEQ ID NO: 1559089 - DNA, 15 bp, Homo sapiens
atctctctctctctc

SEQ ID NO: 1559090 - DNA, 15 bp, Homo sapiens
atatctctctctctc

SEQ ID NO: 1559091 - DNA, 15 bp, Homo sapiens
catatctctctctct

SEQ ID NO: 1559092 - DNA, 15 bp, Homo sapiens
gcatatctctctctc

SEQ ID NO: 1559093 - DNA, 15 bp, Homo sapiens
tgcatatctctctct

SEQ ID NO: 1559094 - DNA, 15 bp, Homo sapiens
atgcatatctctctc

SEQ ID NO: 1559095 - DNA, 15 bp, Homo sapiens
tatgcatatctctct

SEQ ID NO: 1559096 - DNA, 15 bp, Homo sapiens
gtatgcatatctctc

SEQ ID NO: 1559097 - DNA, 15 bp, Homo sapiens
tgtatgcatatctct

SEQ ID NO: 1559098 - DNA, 15 bp, Homo sapiens
gtgtatgcatatctc

SEQ ID NO: 1559099 - DNA, 15 bp, Homo sapiens
ggtgtatgcatatct

SEQ ID NO: 1559100 - DNA, 15 bp, Homo sapiens
gggtgtatgcatatc

SEQ ID NO: 1559101 - DNA, 15 bp, Homo sapiens
tgggtgtatgcatat

SEQ ID NO: 1559102 - DNA, 15 bp, Homo sapiens
gtgggtgtatgcata

SEQ ID NO: 1559103 - DNA, 15 bp, Homo sapiens
agtgggtgtatgcat

SEQ ID NO: 1559104 - DNA, 15 bp, Homo sapiens
tagtgggtgtatgca

SEQ ID NO: 1559105 - DNA, 15 bp, Homo sapiens
atagtgggtgtatgc

SEQ ID NO: 1559106 - DNA, 15 bp, Homo sapiens
aatagtgggtgtatg

SEQ ID NO: 1559107 - DNA, 15 bp, Homo sapiens
caatagtgggtgtat

SEQ ID NO: 1559108 - DNA, 15 bp, Homo sapiens
acaatagtgggtgta

SEQ ID NO: 1559109 - DNA, 15 bp, Homo sapiens
cacaatagtgggtgt

SEQ ID NO: 1559110 - DNA, 15 bp, Homo sapiens
tcacaatagtgggtg

SEQ ID NO: 1559111 - DNA, 15 bp, Homo sapiens
ttcacaatagtgggt

SEQ ID NO: 1559112 - DNA, 15 bp, Homo sapiens
attcacaatagtggg

SEQ ID NO: 1559113 - DNA, 15 bp, Homo sapiens
cattcacaatagtgg

SEQ ID NO: 1559114 - DNA, 15 bp, Homo sapiens
acattcacaatagtg

SEQ ID NO: 1559115 - DNA, 15 bp, Homo sapiens
tacattcacaatagt

SEQ ID NO: 1559116 - DNA, 15 bp, Homo sapiens
atacattcacaatag

SEQ ID NO: 1559117 - DNA, 15 bp, Homo sapiens
catacattcacaata

SEQ ID NO: 1559118 - DNA, 15 bp, Homo sapiens
gcatacattcacaat

SEQ ID NO: 1559119 - DNA, 15 bp, Homo sapiens
tgcatacattcacaa

SEQ ID NO: 1559120 - DNA, 15 bp, Homo sapiens
atgcatacattcaca

SEQ ID NO: 1559121 - DNA, 15 bp, Homo sapiens
aatgcatacattcac

SEQ ID NO: 1559122 - DNA, 15 bp, Homo sapiens
aaatgcatacattca

SEQ ID NO: 1559123 - DNA, 15 bp, Homo sapiens
caaatgcatacattc

SEQ ID NO: 1559124 - DNA, 15 bp, Homo sapiens
tcaaatgcatacatt

SEQ ID NO: 1559125 - DNA, 15 bp, Homo sapiens
atcaaatgcatacat

SEQ ID NO: 1559126 - DNA, 15 bp, Homo sapiens
aatcaaatgcataca

SEQ ID NO: 1559127 - DNA, 15 bp, Homo sapiens
aaatcaaatgcatac

SEQ ID NO: 1559128 - DNA, 15 bp, Homo sapiens
gaaatcaaatgcata

SEQ ID NO: 1559129 - DNA, 15 bp, Homo sapiens
tgaaatcaaatgcat

SEQ ID NO: 1559130 - DNA, 15 bp, Homo sapiens
gtgaaatcaaatgca

SEQ ID NO: 1559131 - DNA, 15 bp, Homo sapiens
agtgaaatcaaatgc

SEQ ID NO: 1559132 - DNA, 15 bp, Homo sapiens
aagtgaaatcaaatg

SEQ ID NO: 1559133 - DNA, 15 bp, Homo sapiens
aaagtgaaatcaaat

SEQ ID NO: 1559134 - DNA, 15 bp, Homo sapiens
gaaagtgaaatcaaa

SEQ ID NO: 1559135 - DNA, 15 bp, Homo sapiens
agaaagtgaaatcaa

SEQ ID NO: 1559136 - DNA, 15 bp, Homo sapiens
aagaaagtgaaatca

SEQ ID NO: 1559137 - DNA, 15 bp, Homo sapiens
taagaaagtgaaatc

SEQ ID NO: 1559138 - DNA, 15 bp, Homo sapiens
ataagaaagtgaaat

SEQ ID NO: 1559139 - DNA, 15 bp, Homo sapiens
cataagaaagtgaaa

SEQ ID NO: 1559140 - DNA, 15 bp, Homo sapiens
tcataagaaagtgaa

SEQ ID NO: 1559141 - DNA, 15 bp, Homo sapiens
ttcataagaaagtga

SEQ ID NO: 1559142 - DNA, 15 bp, Homo sapiens
tttcataagaaagtg

SEQ ID NO: 1559143 - DNA, 15 bp, Homo sapiens
atttcataagaaagt

SEQ ID NO: 1559144 - DNA, 15 bp, Homo sapiens
aatttcataagaaag

SEQ ID NO: 1559145 - DNA, 15 bp, Homo sapiens
aaatttcataagaaa

SEQ ID NO: 1559146 - DNA, 15 bp, Homo sapiens
gaaatttcataagaa

SEQ ID NO: 1559147 - DNA, 15 bp, Homo sapiens
agaaatttcataaga

SEQ ID NO: 1559148 - DNA, 15 bp, Homo sapiens
tagaaatttcataag

SEQ ID NO: 1559149 - DNA, 15 bp, Homo sapiens
gtagaaatttcataa

SEQ ID NO: 1559150 - DNA, 15 bp, Homo sapiens
tgtagaaatttcata

SEQ ID NO: 1559151 - DNA, 15 bp, Homo sapiens
ttgtagaaatttcat

SEQ ID NO: 1559152 - DNA, 15 bp, Homo sapiens
tttgtagaaatttca

SEQ ID NO: 1559153 - DNA, 15 bp, Homo sapiens
ttttgtagaaatttc

SEQ ID NO: 1559154 - DNA, 15 bp, Homo sapiens
tttttgtagaaattt

SEQ ID NO: 1559155 - DNA, 15 bp, Homo sapiens
ttttttgtagaaatt

SEQ ID NO: 1559156 - DNA, 15 bp, Homo sapiens
attttttgtagaaat

SEQ ID NO: 1559157 - DNA, 15 bp, Homo sapiens
atattttttgtagaa

SEQ ID NO: 1559158 - DNA, 15 bp, Homo sapiens
aatattttttgtaga

SEQ ID NO: 1559159 - DNA, 15 bp, Homo sapiens
caatattttttgtag

SEQ ID NO: 1559160 - DNA, 15 bp, Homo sapiens
tcaatattttttgta

SEQ ID NO: 1559161 - DNA, 15 bp, Homo sapiens
gtcaatattttttgt

SEQ ID NO: 1559162 - DNA, 15 bp, Homo sapiens
tgtcaatattttttg

SEQ ID NO: 1559163 - DNA, 15 bp, Homo sapiens
ctgtcaatatttttt

SEQ ID NO: 1559164 - DNA, 15 bp, Homo sapiens
actgtcaatattttt

SEQ ID NO: 1559165 - DNA, 15 bp, Homo sapiens
cactgtcaatatttt

SEQ ID NO: 1559166 - DNA, 15 bp, Homo sapiens
acactgtcaatattt

SEQ ID NO: 1559167 - DNA, 15 bp, Homo sapiens
aacactgtcaatatt

SEQ ID NO: 1559168 - DNA, 15 bp, Homo sapiens
taacactgtcaatat

SEQ ID NO: 1559169 - DNA, 15 bp, Homo sapiens
ttaacactgtcaata

SEQ ID NO: 1559170 - DNA, 15 bp, Homo sapiens
attaacactgtcaat

SEQ ID NO: 1559171 - DNA, 15 bp, Homo sapiens
gattaacactgtcaa

SEQ ID NO: 1559172 - DNA, 15 bp, Homo sapiens
agattaacactgtca

SEQ ID NO: 1559173 - DNA, 15 bp, Homo sapiens
gagattaacactgtc

SEQ ID NO: 1559174 - DNA, 15 bp, Homo sapiens
agagattaacactgt

SEQ ID NO: 1559175 - DNA, 15 bp, Homo sapiens
tagagattaacactg

SEQ ID NO: 1559176 - DNA, 15 bp, Homo sapiens
ttagagattaacact

SEQ ID NO: 1559177 - DNA, 15 bp, Homo sapiens
cttagagattaacac

SEQ ID NO: 1559178 - DNA, 15 bp, Homo sapiens
ccttagagattaaca

SEQ ID NO: 1559179 - DNA, 15 bp, Homo sapiens
accttagagattaac

SEQ ID NO: 1559180 - DNA, 15 bp, Homo sapiens
gaccttagagattaa

SEQ ID NO: 1559181 - DNA, 15 bp, Homo sapiens
tgaccttagagatta

SEQ ID NO: 1559182 - DNA, 15 bp, Homo sapiens
ttgaccttagagatt

SEQ ID NO: 1559183 - DNA, 15 bp, Homo sapiens
attgaccttagagat

SEQ ID NO: 1559184 - DNA, 15 bp, Homo sapiens
cattgaccttagaga

SEQ ID NO: 1559185 - DNA, 15 bp, Homo sapiens
ccattgaccttagag

SEQ ID NO: 1559186 - DNA, 15 bp, Homo sapiens
cccattgaccttaga

SEQ ID NO: 1559187 - DNA, 15 bp, Homo sapiens
ccccattgaccttag

SEQ ID NO: 1559188 - DNA, 15 bp, Homo sapiens
tccccattgacctta

SEQ ID NO: 1559189 - DNA, 15 bp, Homo sapiens
atccccattgacctt

SEQ ID NO: 1559190 - DNA, 15 bp, Homo sapiens
aatccccattgacct

SEQ ID NO: 1559191 - DNA, 15 bp, Homo sapiens
aaatccccattgacc

SEQ ID NO: 1559192 - DNA, 15 bp, Homo sapiens
gaaatccccattgac

SEQ ID NO: 1559193 - DNA, 15 bp, Homo sapiens
agaaatccccattga

SEQ ID NO: 1559194 - DNA, 15 bp, Homo sapiens
gagaaatccccattg

SEQ ID NO: 1559195 - DNA, 15 bp, Homo sapiens
tgagaaatccccatt

SEQ ID NO: 1559196 - DNA, 15 bp, Homo sapiens
ttgagaaatccccat

SEQ ID NO: 1559197 - DNA, 15 bp, Homo sapiens
tttgagaaatcccca

SEQ ID NO: 1559198 - DNA, 15 bp, Homo sapiens
ttttgagaaatcccc

SEQ ID NO: 1559199 - DNA, 15 bp, Homo sapiens
tttttgagaaatccc

SEQ ID NO: 1559200 - DNA, 15 bp, Homo sapiens
ttttttgagaaatcc

SEQ ID NO: 1559201 - DNA, 15 bp, Homo sapiens
attttttgagaaatc

SEQ ID NO: 1559202 - DNA, 15 bp, Homo sapiens
tattttttgagaaat

SEQ ID NO: 1559203 - DNA, 15 bp, Homo sapiens
gtattttttgagaaa

SEQ ID NO: 1559204 - DNA, 15 bp, Homo sapiens
agtattttttgagaa

SEQ ID NO: 1559205 - DNA, 15 bp, Homo sapiens
tagtattttttgaga

SEQ ID NO: 1559206 - DNA, 15 bp, Homo sapiens
gtagtattttttgag

SEQ ID NO: 1559207 - DNA, 15 bp, Homo sapiens
ggtagtattttttga

SEQ ID NO: 1559208 - DNA, 15 bp, Homo sapiens
aggtagtattttttg

SEQ ID NO: 1559209 - DNA, 15 bp, Homo sapiens
aaggtagtatttttt

SEQ ID NO: 1559210 - DNA, 15 bp, Homo sapiens
taaggtagtattttt

SEQ ID NO: 1559211 - DNA, 15 bp, Homo sapiens
gtaaggtagtatttt

SEQ ID NO: 1559212 - DNA, 15 bp, Homo sapiens
agtaaggtagtattt

SEQ ID NO: 1559213 - DNA, 15 bp, Homo sapiens
tagtaaggtagtatt

SEQ ID NO: 1559214 - DNA, 15 bp, Homo sapiens
ttagtaaggtagtat

SEQ ID NO: 1559215 - DNA, 15 bp, Homo sapiens
tttagtaaggtagta

SEQ ID NO: 1559216 - DNA, 15 bp, Homo sapiens
ctttagtaaggtagt

SEQ ID NO: 1559217 - DNA, 15 bp, Homo sapiens
cctttagtaaggtag

SEQ ID NO: 1559218 - DNA, 15 bp, Homo sapiens
tcctttagtaaggta

SEQ ID NO: 1559219 - DNA, 15 bp, Homo sapiens
atcctttagtaaggt

SEQ ID NO: 1559220 - DNA, 15 bp, Homo sapiens
tatcctttagtaagg

SEQ ID NO: 1559221 - DNA, 15 bp, Homo sapiens
gtatcctttagtaag

SEQ ID NO: 1559222 - DNA, 15 bp, Homo sapiens
ggtatcctttagtaa

SEQ ID NO: 1559223 - DNA, 15 bp, Homo sapiens
tggtatcctttagta

SEQ ID NO: 1559224 - DNA, 15 bp, Homo sapiens
ttggtatcctttagt

SEQ ID NO: 1559225 - DNA, 15 bp, Homo sapiens
cttggtatcctttag

SEQ ID NO: 1559226 - DNA, 15 bp, Homo sapiens
tcttggtatccttta

SEQ ID NO: 1559227 - DNA, 15 bp, Homo sapiens
atcttggtatccttt

SEQ ID NO: 1559228 - DNA, 15 bp, Homo sapiens
tatcttggtatcctt

SEQ ID NO: 1559229 - DNA, 15 bp, Homo sapiens
ttatcttggtatcct

SEQ ID NO: 1559230 - DNA, 15 bp, Homo sapiens
cttatcttggtatcc

SEQ ID NO: 1559231 - DNA, 15 bp, Homo sapiens
acttatcttggtatc

SEQ ID NO: 1559232 - DNA, 15 bp, Homo sapiens
tacttatcttggtat

SEQ ID NO: 1559233 - DNA, 15 bp, Homo sapiens
ttacttatcttggta

SEQ ID NO: 1559234 - DNA, 15 bp, Homo sapiens
attacttatcttggt

SEQ ID NO: 1559235 - DNA, 15 bp, Homo sapiens
aattacttatcttgg

SEQ ID NO: 1559236 - DNA, 15 bp, Homo sapiens
caattacttatcttg

SEQ ID NO: 1559237 - DNA, 15 bp, Homo sapiens
acaattacttatctt

SEQ ID NO: 1559238 - DNA, 15 bp, Homo sapiens
tacaattacttatct

SEQ ID NO: 1559239 - DNA, 15 bp, Homo sapiens
ttacaattacttatc

SEQ ID NO: 1559240 - DNA, 15 bp, Homo sapiens
gttacaattacttat

SEQ ID NO: 1559241 - DNA, 15 bp, Homo sapiens
agttacaattactta

SEQ ID NO: 1559242 - DNA, 15 bp, Homo sapiens
cagttacaattactt

SEQ ID NO: 1559243 - DNA, 15 bp, Homo sapiens
ccagttacaattact

SEQ ID NO: 1559244 - DNA, 15 bp, Homo sapiens
cccagttacaattac

SEQ ID NO: 1559245 - DNA, 15 bp, Homo sapiens
gcccagttacaatta

SEQ ID NO: 1559246 - DNA, 15 bp, Homo sapiens
agcccagttacaatt

SEQ ID NO: 1559247 - DNA, 15 bp, Homo sapiens
tagcccagttacaat

SEQ ID NO: 1559248 - DNA, 15 bp, Homo sapiens
ttagcccagttacaa

SEQ ID NO: 1559249 - DNA, 15 bp, Homo sapiens
attagcccagttaca

SEQ ID NO: 1559250 - DNA, 15 bp, Homo sapiens
tattagcccagttac

SEQ ID NO: 1559251 - DNA, 15 bp, Homo sapiens
ttattagcccagtta

SEQ ID NO: 1559252 - DNA, 15 bp, Homo sapiens
tttattagcccagtt

SEQ ID NO: 1559253 - DNA, 15 bp, Homo sapiens
ctttattagcccagt

SEQ ID NO: 1559254 - DNA, 15 bp, Homo sapiens
actttattagcccag

SEQ ID NO: 1559255 - DNA, 15 bp, Homo sapiens
cactttattagccca

SEQ ID NO: 1559256 - DNA, 15 bp, Homo sapiens
gcactttattagccc

SEQ ID NO: 1559257 - DNA, 15 bp, Homo sapiens
agcactttattagcc

SEQ ID NO: 1559258 - DNA, 15 bp, Homo sapiens
aagcactttattagc

SEQ ID NO: 1559259 - DNA, 15 bp, Homo sapiens
taagcactttattag

SEQ ID NO: 1559260 - DNA, 15 bp, Homo sapiens
ttaagcactttatta

SEQ ID NO: 1559261 - DNA, 15 bp, Homo sapiens
attaagcactttatt

SEQ ID NO: 1559262 - DNA, 15 bp, Homo sapiens
aattaagcactttat

SEQ ID NO: 1559263 - DNA, 15 bp, Homo sapiens
taattaagcacttta

SEQ ID NO: 1559264 - DNA, 15 bp, Homo sapiens
ataattaagcacttt

SEQ ID NO: 1559265 - DNA, 15 bp, Homo sapiens
aataattaagcactt

SEQ ID NO: 1559266 - DNA, 15 bp, Homo sapiens
gaataattaagcact

SEQ ID NO: 1559267 - DNA, 15 bp, Homo sapiens
agaataattaagcac

SEQ ID NO: 1559268 - DNA, 15 bp, Homo sapiens
aagaataattaagca

SEQ ID NO: 1559269 - DNA, 15 bp, Homo sapiens
aaagaataattaagc

SEQ ID NO: 1559270 - DNA, 15 bp, Homo sapiens
taaagaataattaag

SEQ ID NO: 1559271 - DNA, 15 bp, Homo sapiens
ataaagaataattaa

SEQ ID NO: 1559272 - DNA, 15 bp, Homo sapiens
tataaagaataatta

SEQ ID NO: 1559273 - DNA, 15 bp, Homo sapiens
atataaagaataatt

SEQ ID NO: 1559274 - DNA, 15 bp, Homo sapiens
gatataaagaataat

SEQ ID NO: 1559275 - DNA, 15 bp, Homo sapiens
agatataaagaataa

SEQ ID NO: 1559276 - DNA, 15 bp, Homo sapiens
tagatataaagaata

SEQ ID NO: 1559277 - DNA, 15 bp, Homo sapiens
ttagatataaagaat

SEQ ID NO: 1559278 - DNA, 15 bp, Homo sapiens
tttagatataaagaa

SEQ ID NO: 1559279 - DNA, 15 bp, Homo sapiens
ttttagatataaaga

SEQ ID NO: 1559280 - DNA, 15 bp, Homo sapiens
cttttagatataaag

SEQ ID NO: 1559281 - DNA, 15 bp, Homo sapiens
tcttttagatataaa

SEQ ID NO: 1559282 - DNA, 15 bp, Homo sapiens
ttcttttagatataa

SEQ ID NO: 1559283 - DNA, 15 bp, Homo sapiens
attcttttagatata

SEQ ID NO: 1559284 - DNA, 15 bp, Homo sapiens
tattcttttagatat

SEQ ID NO: 1559285 - DNA, 15 bp, Homo sapiens
gtattcttttagata

SEQ ID NO: 1559286 - DNA, 15 bp, Homo sapiens
ggtattcttttagat

SEQ ID NO: 1559287 - DNA, 15 bp, Homo sapiens
tggtattcttttaga

SEQ ID NO: 1559288 - DNA, 15 bp, Homo sapiens
ctggtattcttttag

SEQ ID NO: 1559289 - DNA, 15 bp, Homo sapiens
cctggtattctttta

SEQ ID NO: 1559290 - DNA, 15 bp, Homo sapiens
gcctggtattctttt

SEQ ID NO: 1559291 - DNA, 15 bp, Homo sapiens
agcctggtattcttt

SEQ ID NO: 1559292 - DNA, 15 bp, Homo sapiens
cagcctggtattctt

SEQ ID NO: 1559293 - DNA, 15 bp, Homo sapiens
ccagcctggtattct

SEQ ID NO: 1559294 - DNA, 15 bp, Homo sapiens
cccagcctggtattc

SEQ ID NO: 1559295 - DNA, 15 bp, Homo sapiens
acccagcctggtatt

SEQ ID NO: 1559296 - DNA, 15 bp, Homo sapiens
cacccagcctggtat

SEQ ID NO: 1559297 - DNA, 15 bp, Homo sapiens
gcacccagcctggta

SEQ ID NO: 1559298 - DNA, 15 bp, Homo sapiens
tgcacccagcctggt

SEQ ID NO: 1559299 - DNA, 15 bp, Homo sapiens
ctgcacccagcctgg

SEQ ID NO: 1559300 - DNA, 15 bp, Homo sapiens
gctgcacccagcctg

SEQ ID NO: 1559301 - DNA, 15 bp, Homo sapiens
cgctgcacccagcct

SEQ ID NO: 1559302 - DNA, 15 bp, Homo sapiens
ccgctgcacccagcc

SEQ ID NO: 1559303 - DNA, 15 bp, Homo sapiens
gccgctgcacccagc

SEQ ID NO: 1559304 - DNA, 15 bp, Homo sapiens
agccgctgcacccag

SEQ ID NO: 1559305 - DNA, 15 bp, Homo sapiens
gagccgctgcaccca

SEQ ID NO: 1559306 - DNA, 15 bp, Homo sapiens
tgagccgctgcaccc

SEQ ID NO: 1559307 - DNA, 15 bp, Homo sapiens
atgagccgctgcacc

SEQ ID NO: 1559308 - DNA, 15 bp, Homo sapiens
catgagccgctgcac

SEQ ID NO: 1559309 - DNA, 15 bp, Homo sapiens
gcatgagccgctgca

SEQ ID NO: 1559310 - DNA, 15 bp, Homo sapiens
ggcatgagccgctgc

SEQ ID NO: 1559311 - DNA, 15 bp, Homo sapiens
aggcatgagccgctg

SEQ ID NO: 1559312 - DNA, 15 bp, Homo sapiens
caggcatgagccgct

SEQ ID NO: 1559313 - DNA, 15 bp, Homo sapiens
acaggcatgagccgc

SEQ ID NO: 1559314 - DNA, 15 bp, Homo sapiens
tacaggcatgagccg

SEQ ID NO: 1559315 - DNA, 15 bp, Homo sapiens
tgttgggattacagg

SEQ ID NO: 1559316 - DNA, 15 bp, Homo sapiens
gtgttgggattacag

SEQ ID NO: 1559317 - DNA, 15 bp, Homo sapiens
agtgttgggattaca

SEQ ID NO: 1559318 - DNA, 15 bp, Homo sapiens
aagtgttgggattac

SEQ ID NO: 1559319 - DNA, 15 bp, Homo sapiens
ctcccaaagtgttgg

SEQ ID NO: 1559320 - DNA, 15 bp, Homo sapiens
cctcccaaagtgttg

SEQ ID NO: 1559321 - DNA, 15 bp, Homo sapiens
agcctcccaaagtgt

SEQ ID NO: 1559322 - DNA, 15 bp, Homo sapiens
aatccacctgcctca

SEQ ID NO: 1559323 - DNA, 15 bp, Homo sapiens
caatccacctgcctc

SEQ ID NO: 1559324 - DNA, 15 bp, Homo sapiens
gcaatccacctgcct

SEQ ID NO: 1559325 - DNA, 15 bp, Homo sapiens
agcaatccacctgcc

SEQ ID NO: 1559326 - DNA, 15 bp, Homo sapiens
aagcaatccacctgc

SEQ ID NO: 1559327 - DNA, 15 bp, Homo sapiens
caagcaatccacctg

SEQ ID NO: 1559328 - DNA, 15 bp, Homo sapiens
tcaagcaatccacct

SEQ ID NO: 1559329 - DNA, 15 bp, Homo sapiens
ctcaagcaatccacc

SEQ ID NO: 1559330 - DNA, 15 bp, Homo sapiens
cctcaagcaatccac

SEQ ID NO: 1559331 - DNA, 15 bp, Homo sapiens
gcctcaagcaatcca

SEQ ID NO: 1559332 - DNA, 15 bp, Homo sapiens
ttggcctcaagcaat

SEQ ID NO: 1559333 - DNA, 15 bp, Homo sapiens
cttggcctcaagcaa

SEQ ID NO: 1559334 - DNA, 15 bp, Homo sapiens
gaactcttggcctca

SEQ ID NO: 1559335 - DNA, 15 bp, Homo sapiens
tgaactcttggcctc

SEQ ID NO: 1559336 - DNA, 15 bp, Homo sapiens
ttgaactcttggcct

SEQ ID NO: 1559337 - DNA, 15 bp, Homo sapiens
cttgaactcttggcc

SEQ ID NO: 1559338 - DNA, 15 bp, Homo sapiens
tcttgaactcttggc

SEQ ID NO: 1559339 - DNA, 15 bp, Homo sapiens
gtcttgaactcttgg

SEQ ID NO: 1559340 - DNA, 15 bp, Homo sapiens
ggtcttgaactcttg

SEQ ID NO: 1559341 - DNA, 15 bp, Homo sapiens
tggtcttgaactctt

SEQ ID NO: 1559342 - DNA, 15 bp, Homo sapiens
ctggtcttgaactct

SEQ ID NO: 1559343 - DNA, 15 bp, Homo sapiens
caggggtttcaccat

SEQ ID NO: 1559344 - DNA, 15 bp, Homo sapiens
gcaggggtttcacca

SEQ ID NO: 1559345 - DNA, 15 bp, Homo sapiens
agcaggggtttcacc

SEQ ID NO: 1559346 - DNA, 15 bp, Homo sapiens
aagcaggggtttcac

SEQ ID NO: 1559347 - DNA, 15 bp, Homo sapiens
caagcaggggtttca

SEQ ID NO: 1559348 - DNA, 15 bp, Homo sapiens
tcaagcaggggtttc

SEQ ID NO: 1559349 - DNA, 15 bp, Homo sapiens
ttcaagcaggggttt

SEQ ID NO: 1559350 - DNA, 15 bp, Homo sapiens
cttcaagcaggggtt

SEQ ID NO: 1559351 - DNA, 15 bp, Homo sapiens
ccttcaagcaggggt

SEQ ID NO: 1559352 - DNA, 15 bp, Homo sapiens
gccttcaagcagggg

SEQ ID NO: 1559353 - DNA, 15 bp, Homo sapiens
tgccttcaagcaggg

SEQ ID NO: 1559354 - DNA, 15 bp, Homo sapiens
ctgccttcaagcagg

SEQ ID NO: 1559355 - DNA, 15 bp, Homo sapiens
cctgccttcaagcag

SEQ ID NO: 1559356 - DNA, 15 bp, Homo sapiens
tcctgccttcaagca

SEQ ID NO: 1559357 - DNA, 15 bp, Homo sapiens
ctcctgccttcaagc

SEQ ID NO: 1559358 - DNA, 15 bp, Homo sapiens
actcctgccttcaag

SEQ ID NO: 1559359 - DNA, 15 bp, Homo sapiens
aactcctgccttcaa

SEQ ID NO: 1559360 - DNA, 15 bp, Homo sapiens
gaactcctgccttca

SEQ ID NO: 1559361 - DNA, 15 bp, Homo sapiens
tgaactcctgccttc

SEQ ID NO: 1559362 - DNA, 15 bp, Homo sapiens
ttgaactcctgcctt

SEQ ID NO: 1559363 - DNA, 15 bp, Homo sapiens
cttgaactcctgcct

SEQ ID NO: 1559364 - DNA, 15 bp, Homo sapiens
tcttgaactcctgcc

SEQ ID NO: 1559365 - DNA, 15 bp, Homo sapiens
gtcttgaactcctgc

SEQ ID NO: 1559366 - DNA, 15 bp, Homo sapiens
cctaatttttgtatt

SEQ ID NO: 1559367 - DNA, 15 bp, Homo sapiens
gcctaatttttgtat

SEQ ID NO: 1559368 - DNA, 15 bp, Homo sapiens
tgcctaatttttgta

SEQ ID NO: 1559369 - DNA, 15 bp, Homo sapiens
ctgcctaatttttgt

SEQ ID NO: 1559370 - DNA, 15 bp, Homo sapiens
cctgcctaatttttg

SEQ ID NO: 1559371 - DNA, 15 bp, Homo sapiens
acctgcctaattttt

SEQ ID NO: 1559372 - DNA, 15 bp, Homo sapiens
cacctgcctaatttt

SEQ ID NO: 1559373 - DNA, 15 bp, Homo sapiens
tcacctgcctaattt

SEQ ID NO: 1559374 - DNA, 15 bp, Homo sapiens
ctcacctgcctaatt

SEQ ID NO: 1559375 - DNA, 15 bp, Homo sapiens
cctcacctgcctaat

SEQ ID NO: 1559376 - DNA, 15 bp, Homo sapiens
acctcacctgcctaa

SEQ ID NO: 1559377 - DNA, 15 bp, Homo sapiens
cacctcacctgccta

SEQ ID NO: 1559378 - DNA, 15 bp, Homo sapiens
ccacctcacctgcct

SEQ ID NO: 1559379 - DNA, 15 bp, Homo sapiens
accacctcacctgcc

SEQ ID NO: 1559380 - DNA, 15 bp, Homo sapiens
caccacctcacctgc

SEQ ID NO: 1559381 - DNA, 15 bp, Homo sapiens
gcaccacctcacctg

SEQ ID NO: 1559382 - DNA, 15 bp, Homo sapiens
tgcaccacctcacct

SEQ ID NO: 1559383 - DNA, 15 bp, Homo sapiens
ttgcaccacctcacc

SEQ ID NO: 1559384 - DNA, 15 bp, Homo sapiens
tttgcaccacctcac

SEQ ID NO: 1559385 - DNA, 15 bp, Homo sapiens
gtttgcaccacctca

SEQ ID NO: 1559386 - DNA, 15 bp, Homo sapiens
ggtttgcaccacctc

SEQ ID NO: 1559387 - DNA, 15 bp, Homo sapiens
aggtttgcaccacct

SEQ ID NO: 1559388 - DNA, 15 bp, Homo sapiens
caggtttgcaccacc

SEQ ID NO: 1559389 - DNA, 15 bp, Homo sapiens
acaggtttgcaccac

SEQ ID NO: 1559390 - DNA, 15 bp, Homo sapiens
tacaggtttgcacca

SEQ ID NO: 1559391 - DNA, 15 bp, Homo sapiens
ctacaggtttgcacc

SEQ ID NO: 1559392 - DNA, 15 bp, Homo sapiens
actacaggtttgcac

SEQ ID NO: 1559393 - DNA, 15 bp, Homo sapiens
aactacaggtttgca

SEQ ID NO: 1559394 - DNA, 15 bp, Homo sapiens
aaactacaggtttgc

SEQ ID NO: 1559395 - DNA, 15 bp, Homo sapiens
gaaactacaggtttg

SEQ ID NO: 1559396 - DNA, 15 bp, Homo sapiens
tgaaactacaggttt

SEQ ID NO: 1559397 - DNA, 15 bp, Homo sapiens
ctgaaactacaggtt

SEQ ID NO: 1559398 - DNA, 15 bp, Homo sapiens
gctgaaactacaggt

SEQ ID NO: 1559399 - DNA, 15 bp, Homo sapiens
ggctgaaactacagg

SEQ ID NO: 1559400 - DNA, 15 bp, Homo sapiens
tggctgaaactacag

SEQ ID NO: 1559401 - DNA, 15 bp, Homo sapiens
gtggctgaaactaca

SEQ ID NO: 1559402 - DNA, 15 bp, Homo sapiens
agtggctgaaactac

SEQ ID NO: 1559403 - DNA, 15 bp, Homo sapiens
gagtggctgaaacta

SEQ ID NO: 1559404 - DNA, 15 bp, Homo sapiens
tgagtggctgaaact

SEQ ID NO: 1559405 - DNA, 15 bp, Homo sapiens
ctgagtggctgaaac

SEQ ID NO: 1559406 - DNA, 15 bp, Homo sapiens
cctgagtggctgaaa

SEQ ID NO: 1559407 - DNA, 15 bp, Homo sapiens
tcctgagtggctgaa

SEQ ID NO: 1559408 - DNA, 15 bp, Homo sapiens
ctcctgagtggctga

SEQ ID NO: 1559409 - DNA, 15 bp, Homo sapiens
cctcctgagtggctg

SEQ ID NO: 1559410 - DNA, 15 bp, Homo sapiens
gcctcctgagtggct

SEQ ID NO: 1559411 - DNA, 15 bp, Homo sapiens
agcctcctgagtggc

SEQ ID NO: 1559412 - DNA, 15 bp, Homo sapiens
cagcctcctgagtgg

SEQ ID NO: 1559413 - DNA, 15 bp, Homo sapiens
tcagcctcctgagtg

SEQ ID NO: 1559414 - DNA, 15 bp, Homo sapiens
cgattcttgtgcctc

SEQ ID NO: 1559415 - DNA, 15 bp, Homo sapiens
gcgattcttgtgcct

SEQ ID NO: 1559416 - DNA, 15 bp, Homo sapiens
agcgattcttgtgcc

SEQ ID NO: 1559417 - DNA, 15 bp, Homo sapiens
aagcgattcttgtgc

SEQ ID NO: 1559418 - DNA, 15 bp, Homo sapiens
caagcgattcttgtg

SEQ ID NO: 1559419 - DNA, 15 bp, Homo sapiens
ttcaagcgattcttg

SEQ ID NO: 1559420 - DNA, 15 bp, Homo sapiens
ggatcttggctcact

SEQ ID NO: 1559421 - DNA, 15 bp, Homo sapiens
aggatcttggctcac

SEQ ID NO: 1559422 - DNA, 15 bp, Homo sapiens
taggatcttggctca

SEQ ID NO: 1559423 - DNA, 15 bp, Homo sapiens
gtaggatcttggctc

SEQ ID NO: 1559424 - DNA, 15 bp, Homo sapiens
ggtaggatcttggct

SEQ ID NO: 1559425 - DNA, 15 bp, Homo sapiens
tggtaggatcttggc

SEQ ID NO: 1559426 - DNA, 15 bp, Homo sapiens
gtggtaggatcttgg

SEQ ID NO: 1559427 - DNA, 15 bp, Homo sapiens
agtggtaggatcttg

SEQ ID NO: 1559428 - DNA, 15 bp, Homo sapiens
cagtggtaggatctt

SEQ ID NO: 1559429 - DNA, 15 bp, Homo sapiens
gcagtggtaggatct

SEQ ID NO: 1559430 - DNA, 15 bp, Homo sapiens
tgcagtggtaggatc

SEQ ID NO: 1559431 - DNA, 15 bp, Homo sapiens
gtgcagtggtaggat

SEQ ID NO: 1559432 - DNA, 15 bp, Homo sapiens
agtgcagtggtagga

SEQ ID NO: 1559433 - DNA, 15 bp, Homo sapiens
gagtgcagtggtagg

SEQ ID NO: 1559434 - DNA, 15 bp, Homo sapiens
ggagtgcagtggtag

SEQ ID NO: 1559435 - DNA, 15 bp, Homo sapiens
aaaggctggagtgca

SEQ ID NO: 1559436 - DNA, 15 bp, Homo sapiens
caaaggctggagtgc

SEQ ID NO: 1559437 - DNA, 15 bp, Homo sapiens
acaaaggctggagtg

SEQ ID NO: 1559438 - DNA, 15 bp, Homo sapiens
cacaaaggctggagt

SEQ ID NO: 1559439 - DNA, 15 bp, Homo sapiens
tcacaaaggctggag

SEQ ID NO: 1559440 - DNA, 15 bp, Homo sapiens
gtcacaaaggctgga

SEQ ID NO: 1559441 - DNA, 15 bp, Homo sapiens
tgtcacaaaggctgg

SEQ ID NO: 1559442 - DNA, 15 bp, Homo sapiens
ctgtcacaaaggctg

SEQ ID NO: 1559443 - DNA, 15 bp, Homo sapiens
tctgtcacaaaggct

SEQ ID NO: 1559444 - DNA, 15 bp, Homo sapiens
ctctgtcacaaaggc

SEQ ID NO: 1559445 - DNA, 15 bp, Homo sapiens
actctgtcacaaagg

SEQ ID NO: 1559446 - DNA, 15 bp, Homo sapiens
cactctgtcacaaag

SEQ ID NO: 1559447 - DNA, 15 bp, Homo sapiens
tcactctgtcacaaa

SEQ ID NO: 1559448 - DNA, 15 bp, Homo sapiens
gtcactctgtcacaa

SEQ ID NO: 1559449 - DNA, 15 bp, Homo sapiens
tgtcactctgtcaca

SEQ ID NO: 1559450 - DNA, 15 bp, Homo sapiens
agtgtcactctgtca

SEQ ID NO: 1559451 - DNA, 15 bp, Homo sapiens
gagtgtcactctgtc

SEQ ID NO: 1559452 - DNA, 15 bp, Homo sapiens
agagtgtcactctgt

SEQ ID NO: 1559453 - DNA, 15 bp, Homo sapiens
cagagtgtcactctg

SEQ ID NO: 1559454 - DNA, 15 bp, Homo sapiens
acagagtgtcactct

SEQ ID NO: 1559455 - DNA, 15 bp, Homo sapiens
gacagagtgtcactc

SEQ ID NO: 1559456 - DNA, 15 bp, Homo sapiens
agacagagtgtcact

SEQ ID NO: 1559457 - DNA, 15 bp, Homo sapiens
aagacagagtgtcac

SEQ ID NO: 1559458 - DNA, 15 bp, Homo sapiens
taagacagagtgtca

SEQ ID NO: 1559459 - DNA, 15 bp, Homo sapiens
ttaagacagagtgtc

SEQ ID NO: 1559460 - DNA, 15 bp, Homo sapiens
tttaagacagagtgt

SEQ ID NO: 1559461 - DNA, 15 bp, Homo sapiens
ttttaagacagagtg

SEQ ID NO: 1559462 - DNA, 15 bp, Homo sapiens
cttttaagacagagt

SEQ ID NO: 1559463 - DNA, 15 bp, Homo sapiens
tcttttaagacagag

SEQ ID NO: 1559464 - DNA, 15 bp, Homo sapiens
gtcttttaagacaga

SEQ ID NO: 1559465 - DNA, 15 bp, Homo sapiens
tgtcttttaagacag

SEQ ID NO: 1559466 - DNA, 15 bp, Homo sapiens
ttgtcttttaagaca

SEQ ID NO: 1559467 - DNA, 15 bp, Homo sapiens
cccaaactccaaagg

SEQ ID NO: 1559468 - DNA, 15 bp, Homo sapiens
tcccaaactccaaag

SEQ ID NO: 1559469 - DNA, 15 bp, Homo sapiens
ctcccaaactccaaa

SEQ ID NO: 1559470 - DNA, 15 bp, Homo sapiens
tctcccaaactccaa

SEQ ID NO: 1559471 - DNA, 15 bp, Homo sapiens
ctctcccaaactcca

SEQ ID NO: 1559472 - DNA, 15 bp, Homo sapiens
cctctcccaaactcc

SEQ ID NO: 1559473 - DNA, 15 bp, Homo sapiens
acctctcccaaactc

SEQ ID NO: 1559474 - DNA, 15 bp, Homo sapiens
tacctctcccaaact

SEQ ID NO: 1559475 - DNA, 15 bp, Homo sapiens
gtacctctcccaaac

SEQ ID NO: 1559476 - DNA, 15 bp, Homo sapiens
cgtacctctcccaaa

SEQ ID NO: 1559477 - DNA, 15 bp, Homo sapiens
ccgtacctctcccaa

SEQ ID NO: 1559478 - DNA, 15 bp, Homo sapiens
cccgtacctctccca

SEQ ID NO: 1559479 - DNA, 15 bp, Homo sapiens
tcccgtacctctccc

SEQ ID NO: 1559480 - DNA, 15 bp, Homo sapiens
ttcccgtacctctcc

SEQ ID NO: 1559481 - DNA, 15 bp, Homo sapiens
cttcccgtacctctc

SEQ ID NO: 1559482 - DNA, 15 bp, Homo sapiens
acttcccgtacctct

SEQ ID NO: 1559483 - DNA, 15 bp, Homo sapiens
cacttcccgtacctc

SEQ ID NO: 1559484 - DNA, 15 bp, Homo sapiens
ccacttcccgtacct

SEQ ID NO: 1559485 - DNA, 15 bp, Homo sapiens
gccacttcccgtacc

SEQ ID NO: 1559486 - DNA, 15 bp, Homo sapiens
ggccacttcccgtac

SEQ ID NO: 1559487 - DNA, 15 bp, Homo sapiens
aggccacttcccgta

SEQ ID NO: 1559488 - DNA, 15 bp, Homo sapiens
caggccacttcccgt

SEQ ID NO: 1559489 - DNA, 15 bp, Homo sapiens
tcaggccacttcccg

SEQ ID NO: 1559490 - DNA, 15 bp, Homo sapiens
atcaggccacttccc

SEQ ID NO: 1559491 - DNA, 15 bp, Homo sapiens
gatcaggccacttcc

SEQ ID NO: 1559492 - DNA, 15 bp, Homo sapiens
ggatcaggccacttc

SEQ ID NO: 1559493 - DNA, 15 bp, Homo sapiens
gggatcaggccactt

SEQ ID NO: 1559494 - DNA, 15 bp, Homo sapiens
agggatcaggccact

SEQ ID NO: 1559495 - DNA, 15 bp, Homo sapiens
cagggatcaggccac

SEQ ID NO: 1559496 - DNA, 15 bp, Homo sapiens
gcagggatcaggcca

SEQ ID NO: 1559497 - DNA, 15 bp, Homo sapiens
agcagggatcaggcc

SEQ ID NO: 1559498 - DNA, 15 bp, Homo sapiens
aagcagggatcaggc

SEQ ID NO: 1559499 - DNA, 15 bp, Homo sapiens
gaagcagggatcagg

SEQ ID NO: 1559500 - DNA, 15 bp, Homo sapiens
ggaagcagggatcag

SEQ ID NO: 1559501 - DNA, 15 bp, Homo sapiens
tggaagcagggatca

SEQ ID NO: 1559502 - DNA, 15 bp, Homo sapiens
atggaagcagggatc

SEQ ID NO: 1559503 - DNA, 15 bp, Homo sapiens
tatggaagcagggat

SEQ ID NO: 1559504 - DNA, 15 bp, Homo sapiens
gtatggaagcaggga

SEQ ID NO: 1559505 - DNA, 15 bp, Homo sapiens
agtatggaagcaggg

SEQ ID NO: 1559506 - DNA, 15 bp, Homo sapiens
aagtatggaagcagg

SEQ ID NO: 1559507 - DNA, 15 bp, Homo sapiens
gaagtatggaagcag

SEQ ID NO: 1559508 - DNA, 15 bp, Homo sapiens
tgaagtatggaagca

SEQ ID NO: 1559509 - DNA, 15 bp, Homo sapiens
gtgaagtatggaagc

SEQ ID NO: 1559510 - DNA, 15 bp, Homo sapiens
agtgaagtatggaag

SEQ ID NO: 1559511 - DNA, 15 bp, Homo sapiens
gagtgaagtatggaa

SEQ ID NO: 1559512 - DNA, 15 bp, Homo sapiens
ggagtgaagtatgga

SEQ ID NO: 1559513 - DNA, 15 bp, Homo sapiens
aggagtgaagtatgg

SEQ ID NO: 1559514 - DNA, 15 bp, Homo sapiens
gaggagtgaagtatg

SEQ ID NO: 1559515 - DNA, 15 bp, Homo sapiens
ggaggagtgaagtat

SEQ ID NO: 1559516 - DNA, 15 bp, Homo sapiens
tggaggagtgaagta

SEQ ID NO: 1559517 - DNA, 15 bp, Homo sapiens
atggaggagtgaagt

SEQ ID NO: 1559518 - DNA, 15 bp, Homo sapiens
gatggaggagtgaag

SEQ ID NO: 1559519 - DNA, 15 bp, Homo sapiens
ggatggaggagtgaa

SEQ ID NO: 1559520 - DNA, 15 bp, Homo sapiens
tggatggaggagtga

SEQ ID NO: 1559521 - DNA, 15 bp, Homo sapiens
atggatggaggagtg

SEQ ID NO: 1559522 - DNA, 15 bp, Homo sapiens
gatggatggaggagt

SEQ ID NO: 1559523 - DNA, 15 bp, Homo sapiens
ggatggatggaggag

SEQ ID NO: 1559524 - DNA, 15 bp, Homo sapiens
aggatggatggagga

SEQ ID NO: 1559525 - DNA, 15 bp, Homo sapiens
aaggatggatggagg

SEQ ID NO: 1559526 - DNA, 15 bp, Homo sapiens
gaaggatggatggag

SEQ ID NO: 1559527 - DNA, 15 bp, Homo sapiens
ggaaggatggatgga

SEQ ID NO: 1559528 - DNA, 15 bp, Homo sapiens
gggaaggatggatgg

SEQ ID NO: 1559529 - DNA, 15 bp, Homo sapiens
agggaaggatggatg

SEQ ID NO: 1559530 - DNA, 15 bp, Homo sapiens
gagggaaggatggat

SEQ ID NO: 1559531 - DNA, 15 bp, Homo sapiens
ggagggaaggatgga

SEQ ID NO: 1559532 - DNA, 15 bp, Homo sapiens
gggagggaaggatgg

SEQ ID NO: 1559533 - DNA, 15 bp, Homo sapiens
agggagggaaggatg

SEQ ID NO: 1559534 - DNA, 15 bp, Homo sapiens
gagggagggaaggat

SEQ ID NO: 1559535 - DNA, 15 bp, Homo sapiens
aagagggagggaagg

SEQ ID NO: 1559536 - DNA, 15 bp, Homo sapiens
gaagagggagggaag

SEQ ID NO: 1559537 - DNA, 15 bp, Homo sapiens
ggaagagggagggaa

SEQ ID NO: 1559538 - DNA, 15 bp, Homo sapiens
gggaagagggaggga

SEQ ID NO: 1559539 - DNA, 15 bp, Homo sapiens
ggggaagagggaggg

SEQ ID NO: 1559540 - DNA, 15 bp, Homo sapiens
aggggaagagggagg

SEQ ID NO: 1559541 - DNA, 15 bp, Homo sapiens
gaggggaagagggag

SEQ ID NO: 1559542 - DNA, 15 bp, Homo sapiens
ggaggggaagaggga

SEQ ID NO: 1559543 - DNA, 15 bp, Homo sapiens
tggaggggaagaggg

SEQ ID NO: 1559544 - DNA, 15 bp, Homo sapiens
ctggaggggaagagg

SEQ ID NO: 1559545 - DNA, 15 bp, Homo sapiens
gctggaggggaagag

SEQ ID NO: 1559546 - DNA, 15 bp, Homo sapiens
agctggaggggaaga

SEQ ID NO: 1559547 - DNA, 15 bp, Homo sapiens
tagctggaggggaag

SEQ ID NO: 1559548 - DNA, 15 bp, Homo sapiens
ttagctggaggggaa

SEQ ID NO: 1559549 - DNA, 15 bp, Homo sapiens
tttagctggagggga

SEQ ID NO: 1559550 - DNA, 15 bp, Homo sapiens
atttagctggagggg

SEQ ID NO: 1559551 - DNA, 15 bp, Homo sapiens
catttagctggaggg

SEQ ID NO: 1559552 - DNA, 15 bp, Homo sapiens
ccatttagctggagg

SEQ ID NO: 1559553 - DNA, 15 bp, Homo sapiens
tccatttagctggag

SEQ ID NO: 1559554 - DNA, 15 bp, Homo sapiens
gtccatttagctgga

SEQ ID NO: 1559555 - DNA, 15 bp, Homo sapiens
tgtccatttagctgg

SEQ ID NO: 1559556 - DNA, 15 bp, Homo sapiens
ttgtccatttagctg

SEQ ID NO: 1559557 - DNA, 15 bp, Homo sapiens
attgtccatttagct

SEQ ID NO: 1559558 - DNA, 15 bp, Homo sapiens
aattgtccatttagc

SEQ ID NO: 1559559 - DNA, 15 bp, Homo sapiens
gaattgtccatttag

SEQ ID NO: 1559560 - DNA, 15 bp, Homo sapiens
agaattgtccattta

SEQ ID NO: 1559561 - DNA, 15 bp, Homo sapiens
tagaattgtccattt

SEQ ID NO: 1559562 - DNA, 15 bp, Homo sapiens
ctagaattgtccatt

SEQ ID NO: 1559563 - DNA, 15 bp, Homo sapiens
gctagaattgtccat

SEQ ID NO: 1559564 - DNA, 15 bp, Homo sapiens
ggctagaattgtcca

SEQ ID NO: 1559565 - DNA, 15 bp, Homo sapiens
tggctagaattgtcc

SEQ ID NO: 1559566 - DNA, 15 bp, Homo sapiens
ttggctagaattgtc

SEQ ID NO: 1559567 - DNA, 15 bp, Homo sapiens
gttggctagaattgt

SEQ ID NO: 1559568 - DNA, 15 bp, Homo sapiens
tgttggctagaattg

SEQ ID NO: 1559569 - DNA, 15 bp, Homo sapiens
atgttggctagaatt

SEQ ID NO: 1559570 - DNA, 15 bp, Homo sapiens
aatgttggctagaat

SEQ ID NO: 1559571 - DNA, 15 bp, Homo sapiens
caatgttggctagaa

SEQ ID NO: 1559572 - DNA, 15 bp, Homo sapiens
tcaatgttggctaga

SEQ ID NO: 1559573 - DNA, 15 bp, Homo sapiens
ctcaatgttggctag

SEQ ID NO: 1559574 - DNA, 15 bp, Homo sapiens
actcaatgttggcta

SEQ ID NO: 1559575 - DNA, 15 bp, Homo sapiens
gactcaatgttggct

SEQ ID NO: 1559576 - DNA, 15 bp, Homo sapiens
tgactcaatgttggc

SEQ ID NO: 1559577 - DNA, 15 bp, Homo sapiens
gtgactcaatgttgg

SEQ ID NO: 1559578 - DNA, 15 bp, Homo sapiens
agtgactcaatgttg

SEQ ID NO: 1559579 - DNA, 15 bp, Homo sapiens
gagtgactcaatgtt

SEQ ID NO: 1559580 - DNA, 15 bp, Homo sapiens
tgagtgactcaatgt

SEQ ID NO: 1559581 - DNA, 15 bp, Homo sapiens
ttgagtgactcaatg

SEQ ID NO: 1559582 - DNA, 15 bp, Homo sapiens
attgagtgactcaat

SEQ ID NO: 1559583 - DNA, 15 bp, Homo sapiens
tattgagtgactcaa

SEQ ID NO: 1559584 - DNA, 15 bp, Homo sapiens
ttattgagtgactca

SEQ ID NO: 1559585 - DNA, 15 bp, Homo sapiens
cttattgagtgactc

SEQ ID NO: 1559586 - DNA, 15 bp, Homo sapiens
acttattgagtgact

SEQ ID NO: 1559587 - DNA, 15 bp, Homo sapiens
gacttattgagtgac

SEQ ID NO: 1559588 - DNA, 15 bp, Homo sapiens
agacttattgagtga

SEQ ID NO: 1559589 - DNA, 15 bp, Homo sapiens
gagacttattgagtg

SEQ ID NO: 1559590 - DNA, 15 bp, Homo sapiens
tgagacttattgagt

SEQ ID NO: 1559591 - DNA, 15 bp, Homo sapiens
ttgagacttattgag

SEQ ID NO: 1559592 - DNA, 15 bp, Homo sapiens
gttgagacttattga

SEQ ID NO: 1559593 - DNA, 15 bp, Homo sapiens
tgttgagacttattg

SEQ ID NO: 1559594 - DNA, 15 bp, Homo sapiens
ctgttgagacttatt

SEQ ID NO: 1559595 - DNA, 15 bp, Homo sapiens
actgttgagacttat

SEQ ID NO: 1559596 - DNA, 15 bp, Homo sapiens
cactgttgagactta

SEQ ID NO: 1559597 - DNA, 15 bp, Homo sapiens
ccactgttgagactt

SEQ ID NO: 1559598 - DNA, 15 bp, Homo sapiens
cccactgttgagact

SEQ ID NO: 1559599 - DNA, 15 bp, Homo sapiens
acccactgttgagac

SEQ ID NO: 1559600 - DNA, 15 bp, Homo sapiens
cacccactgttgaga

SEQ ID NO: 1559601 - DNA, 15 bp, Homo sapiens
acacccactgttgag

SEQ ID NO: 1559602 - DNA, 15 bp, Homo sapiens
cacacccactgttga

SEQ ID NO: 1559603 - DNA, 15 bp, Homo sapiens
acacacccactgttg

SEQ ID NO: 1559604 - DNA, 15 bp, Homo sapiens
aacacacccactgtt

SEQ ID NO: 1559605 - DNA, 15 bp, Homo sapiens
aaacacacccactgt

SEQ ID NO: 1559606 - DNA, 15 bp, Homo sapiens
caaacacacccactg

SEQ ID NO: 1559607 - DNA, 15 bp, Homo sapiens
gcaaacacacccact

SEQ ID NO: 1559608 - DNA, 15 bp, Homo sapiens
agcaaacacacccac

SEQ ID NO: 1559609 - DNA, 15 bp, Homo sapiens
cagcaaacacaccca

SEQ ID NO: 1559610 - DNA, 15 bp, Homo sapiens
tcagcaaacacaccc

SEQ ID NO: 1559611 - DNA, 15 bp, Homo sapiens
ctcagcaaacacacc

SEQ ID NO: 1559612 - DNA, 15 bp, Homo sapiens
tctcagcaaacacac

SEQ ID NO: 1559613 - DNA, 15 bp, Homo sapiens
atctcagcaaacaca

SEQ ID NO: 1559614 - DNA, 15 bp, Homo sapiens
aatctcagcaaacac

SEQ ID NO: 1559615 - DNA, 15 bp, Homo sapiens
caatctcagcaaaca

SEQ ID NO: 1559616 - DNA, 15 bp, Homo sapiens
acaatctcagcaaac

SEQ ID NO: 1559617 - DNA, 15 bp, Homo sapiens
gacaatctcagcaaa

SEQ ID NO: 1559618 - DNA, 15 bp, Homo sapiens
ggacaatctcagcaa

SEQ ID NO: 1559619 - DNA, 15 bp, Homo sapiens
tggacaatctcagca

SEQ ID NO: 1559620 - DNA, 15 bp, Homo sapiens
ctggacaatctcagc

SEQ ID NO: 1559621 - DNA, 15 bp, Homo sapiens
gctggacaatctcag

SEQ ID NO: 1559622 - DNA, 15 bp, Homo sapiens
tgctggacaatctca

SEQ ID NO: 1559623 - DNA, 15 bp, Homo sapiens
ctgctggacaatctc

SEQ ID NO: 1559624 - DNA, 15 bp, Homo sapiens
actgctggacaatct

SEQ ID NO: 1559625 - DNA, 15 bp, Homo sapiens
aactgctggacaatc

SEQ ID NO: 1559626 - DNA, 15 bp, Homo sapiens
caactgctggacaat

SEQ ID NO: 1559627 - DNA, 15 bp, Homo sapiens
tcaactgctggacaa

SEQ ID NO: 1559628 - DNA, 15 bp, Homo sapiens
ctcaactgctggaca

SEQ ID NO: 1559629 - DNA, 15 bp, Homo sapiens
gctcaactgctggac

SEQ ID NO: 1559630 - DNA, 15 bp, Homo sapiens
tgctcaactgctgga

SEQ ID NO: 1559631 - DNA, 15 bp, Homo sapiens
ctgctcaactgctgg

SEQ ID NO: 1559632 - DNA, 15 bp, Homo sapiens
actgctcaactgctg

SEQ ID NO: 1559633 - DNA, 15 bp, Homo sapiens
aactgctcaactgct

SEQ ID NO: 1559634 - DNA, 15 bp, Homo sapiens
aaactgctcaactgc

SEQ ID NO: 1559635 - DNA, 15 bp, Homo sapiens
caaactgctcaactg

SEQ ID NO: 1559636 - DNA, 15 bp, Homo sapiens
ccaaactgctcaact

SEQ ID NO: 1559637 - DNA, 15 bp, Homo sapiens
accaaactgctcaac

SEQ ID NO: 1559638 - DNA, 15 bp, Homo sapiens
gaccaaactgctcaa

SEQ ID NO: 1559639 - DNA, 15 bp, Homo sapiens
agaccaaactgctca

SEQ ID NO: 1559640 - DNA, 15 bp, Homo sapiens
gagaccaaactgctc

SEQ ID NO: 1559641 - DNA, 15 bp, Homo sapiens
tgagaccaaactgct

SEQ ID NO: 1559642 - DNA, 15 bp, Homo sapiens
gtgagaccaaactgc

SEQ ID NO: 1559643 - DNA, 15 bp, Homo sapiens
ggtgagaccaaactg

SEQ ID NO: 1559644 - DNA, 15 bp, Homo sapiens
aggtgagaccaaact

SEQ ID NO: 1559645 - DNA, 15 bp, Homo sapiens
gaggtgagaccaaac

SEQ ID NO: 1559646 - DNA, 15 bp, Homo sapiens
ggaggtgagaccaaa

SEQ ID NO: 1559647 - DNA, 15 bp, Homo sapiens
gggaggtgagaccaa

SEQ ID NO: 1559648 - DNA, 15 bp, Homo sapiens
agggaggtgagacca

SEQ ID NO: 1559649 - DNA, 15 bp, Homo sapiens
gagggaggtgagacc

SEQ ID NO: 1559650 - DNA, 15 bp, Homo sapiens
cgagggaggtgagac

SEQ ID NO: 1559651 - DNA, 15 bp, Homo sapiens
gcgagggaggtgaga

SEQ ID NO: 1559652 - DNA, 15 bp, Homo sapiens
agcgagggaggtgag

SEQ ID NO: 1559653 - DNA, 15 bp, Homo sapiens
tagcgagggaggtga

SEQ ID NO: 1559654 - DNA, 15 bp, Homo sapiens
ctagcgagggaggtg

SEQ ID NO: 1559655 - DNA, 15 bp, Homo sapiens
actagcgagggaggt

SEQ ID NO: 1559656 - DNA, 15 bp, Homo sapiens
aactagcgagggagg

SEQ ID NO: 1559657 - DNA, 15 bp, Homo sapiens
caactagcgagggag

SEQ ID NO: 1559658 - DNA, 15 bp, Homo sapiens
tcaactagcgaggga

SEQ ID NO: 1559659 - DNA, 15 bp, Homo sapiens
ctcaactagcgaggg

SEQ ID NO: 1559660 - DNA, 15 bp, Homo sapiens
tctcaactagcgagg

SEQ ID NO: 1559661 - DNA, 15 bp, Homo sapiens
gtctcaactagcgag

SEQ ID NO: 1559662 - DNA, 15 bp, Homo sapiens
ggtctcaactagcga

SEQ ID NO: 1559663 - DNA, 15 bp, Homo sapiens
tggtctcaactagcg

SEQ ID NO: 1559664 - DNA, 15 bp, Homo sapiens
ttggtctcaactagc

SEQ ID NO: 1559665 - DNA, 15 bp, Homo sapiens
tttggtctcaactag

SEQ ID NO: 1559666 - DNA, 15 bp, Homo sapiens
ttttggtctcaacta

SEQ ID NO: 1559667 - DNA, 15 bp, Homo sapiens
tttttggtctcaact

SEQ ID NO: 1559668 - DNA, 15 bp, Homo sapiens
ctttttggtctcaac

SEQ ID NO: 1559669 - DNA, 15 bp, Homo sapiens
tctttttggtctcaa

SEQ ID NO: 1559670 - DNA, 15 bp, Homo sapiens
ctctttttggtctca

SEQ ID NO: 1559671 - DNA, 15 bp, Homo sapiens
tctctttttggtctc

SEQ ID NO: 1559672 - DNA, 15 bp, Homo sapiens
gtctctttttggtct

SEQ ID NO: 1559673 - DNA, 15 bp, Homo sapiens
tgtctctttttggtc

SEQ ID NO: 1559674 - DNA, 15 bp, Homo sapiens
ttgtctctttttggt

SEQ ID NO: 1559675 - DNA, 15 bp, Homo sapiens
tttgtctctttttgg

SEQ ID NO: 1559676 - DNA, 15 bp, Homo sapiens
atttgtctctttttg

SEQ ID NO: 1559677 - DNA, 15 bp, Homo sapiens
ttatttgtctctttt

SEQ ID NO: 1559678 - DNA, 15 bp, Homo sapiens
gttatttgtctcttt

SEQ ID NO: 1559679 - DNA, 15 bp, Homo sapiens
agttatttgtctctt

SEQ ID NO: 1559680 - DNA, 15 bp, Homo sapiens
aagttatttgtctct

SEQ ID NO: 1559681 - DNA, 15 bp, Homo sapiens
aaagttatttgtctc

SEQ ID NO: 1559682 - DNA, 15 bp, Homo sapiens
aaaagttatttgtct

SEQ ID NO: 1559683 - DNA, 15 bp, Homo sapiens
aaaaagttatttgtc

SEQ ID NO: 1559684 - DNA, 15 bp, Homo sapiens
gaaaaagttatttgt

SEQ ID NO: 1559685 - DNA, 15 bp, Homo sapiens
tgaaaaagttatttg

SEQ ID NO: 1559686 - DNA, 15 bp, Homo sapiens
atgaaaaagttattt

SEQ ID NO: 1559687 - DNA, 15 bp, Homo sapiens
catgaaaaagttatt

SEQ ID NO: 1559688 - DNA, 15 bp, Homo sapiens
ccatgaaaaagttat

SEQ ID NO: 1559689 - DNA, 15 bp, Homo sapiens
accatgaaaaagtta

SEQ ID NO: 1559690 - DNA, 15 bp, Homo sapiens
gaccatgaaaaagtt

SEQ ID NO: 1559691 - DNA, 15 bp, Homo sapiens
agaccatgaaaaagt

SEQ ID NO: 1559692 - DNA, 15 bp, Homo sapiens
aagaccatgaaaaag

SEQ ID NO: 1559693 - DNA, 15 bp, Homo sapiens
aaagaccatgaaaaa

SEQ ID NO: 1559694 - DNA, 15 bp, Homo sapiens
caaagaccatgaaaa

SEQ ID NO: 1559695 - DNA, 15 bp, Homo sapiens
tcaaagaccatgaaa

SEQ ID NO: 1559696 - DNA, 15 bp, Homo sapiens
ttcaaagaccatgaa

SEQ ID NO: 1559697 - DNA, 15 bp, Homo sapiens
tttcaaagaccatga

SEQ ID NO: 1559698 - DNA, 15 bp, Homo sapiens
gtttcaaagaccatg

SEQ ID NO: 1559699 - DNA, 15 bp, Homo sapiens
tgtttcaaagaccat

SEQ ID NO: 1559700 - DNA, 15 bp, Homo sapiens
atgtttcaaagacca

SEQ ID NO: 1559701 - DNA, 15 bp, Homo sapiens
tatgtttcaaagacc

SEQ ID NO: 1559702 - DNA, 15 bp, Homo sapiens
ttatgtttcaaagac

SEQ ID NO: 1559703 - DNA, 15 bp, Homo sapiens
attatgtttcaaaga

SEQ ID NO: 1559704 - DNA, 15 bp, Homo sapiens
cattatgtttcaaag

SEQ ID NO: 1559705 - DNA, 15 bp, Homo sapiens
gcattatgtttcaaa

SEQ ID NO: 1559706 - DNA, 15 bp, Homo sapiens
agcattatgtttcaa

SEQ ID NO: 1559707 - DNA, 15 bp, Homo sapiens
aagcattatgtttca

SEQ ID NO: 1559708 - DNA, 15 bp, Homo sapiens
taagcattatgtttc

SEQ ID NO: 1559709 - DNA, 15 bp, Homo sapiens
ataagcattatgttt

SEQ ID NO: 1559710 - DNA, 15 bp, Homo sapiens
aataagcattatgtt

SEQ ID NO: 1559711 - DNA, 15 bp, Homo sapiens
aaataagcattatgt

SEQ ID NO: 1559712 - DNA, 15 bp, Homo sapiens
gaaataagcattatg

SEQ ID NO: 1559713 - DNA, 15 bp, Homo sapiens
cgaaataagcattat

SEQ ID NO: 1559714 - DNA, 15 bp, Homo sapiens
acgaaataagcatta

SEQ ID NO: 1559715 - DNA, 15 bp, Homo sapiens
cacgaaataagcatt

SEQ ID NO: 1559716 - DNA, 15 bp, Homo sapiens
ccacgaaataagcat

SEQ ID NO: 1559717 - DNA, 15 bp, Homo sapiens
accacgaaataagca

SEQ ID NO: 1559718 - DNA, 15 bp, Homo sapiens
gaccacgaaataagc

SEQ ID NO: 1559719 - DNA, 15 bp, Homo sapiens
tgaccacgaaataag

SEQ ID NO: 1559720 - DNA, 15 bp, Homo sapiens
ttgaccacgaaataa

SEQ ID NO: 1559721 - DNA, 15 bp, Homo sapiens
attgaccacgaaata

SEQ ID NO: 1559722 - DNA, 15 bp, Homo sapiens
cattgaccacgaaat

SEQ ID NO: 1559723 - DNA, 15 bp, Homo sapiens
ccattgaccacgaaa

SEQ ID NO: 1559724 - DNA, 15 bp, Homo sapiens
gccattgaccacgaa

SEQ ID NO: 1559725 - DNA, 15 bp, Homo sapiens
agccattgaccacga

SEQ ID NO: 1559726 - DNA, 15 bp, Homo sapiens
aagccattgaccacg

SEQ ID NO: 1559727 - DNA, 15 bp, Homo sapiens
aaagccattgaccac

SEQ ID NO: 1559728 - DNA, 15 bp, Homo sapiens
taaagccattgacca

SEQ ID NO: 1559729 - DNA, 15 bp, Homo sapiens
ttaaagccattgacc

SEQ ID NO: 1559730 - DNA, 15 bp, Homo sapiens
tttaaagccattgac

SEQ ID NO: 1559731 - DNA, 15 bp, Homo sapiens
ttttaaagccattga

SEQ ID NO: 1559732 - DNA, 15 bp, Homo sapiens
tttttaaagccattg

SEQ ID NO: 1559733 - DNA, 15 bp, Homo sapiens
ttttttaaagccatt

SEQ ID NO: 1559734 - DNA, 15 bp, Homo sapiens
tttttttaaagccat

SEQ ID NO: 1559735 - DNA, 15 bp, Homo sapiens
atttttttaaagcca

SEQ ID NO: 1559736 - DNA, 15 bp, Homo sapiens
gatttttttaaagcc

SEQ ID NO: 1559737 - DNA, 15 bp, Homo sapiens
cagatttttttaaag

SEQ ID NO: 1559738 - DNA, 15 bp, Homo sapiens
acagatttttttaaa

SEQ ID NO: 1559739 - DNA, 15 bp, Homo sapiens
aacagatttttttaa

SEQ ID NO: 1559740 - DNA, 15 bp, Homo sapiens
aaacagattttttta

SEQ ID NO: 1559741 - DNA, 15 bp, Homo sapiens
gaaacagattttttt

SEQ ID NO: 1559742 - DNA, 15 bp, Homo sapiens
agaaacagatttttt

SEQ ID NO: 1559743 - DNA, 15 bp, Homo sapiens
aagaaacagattttt

SEQ ID NO: 1559744 - DNA, 15 bp, Homo sapiens
caagaaacagatttt

SEQ ID NO: 1559745 - DNA, 15 bp, Homo sapiens
acaagaaacagattt

SEQ ID NO: 1559746 - DNA, 15 bp, Homo sapiens
aacaagaaacagatt

SEQ ID NO: 1559747 - DNA, 15 bp, Homo sapiens
aaacaagaaacagat

SEQ ID NO: 1559748 - DNA, 15 bp, Homo sapiens
aaaacaagaaacaga

SEQ ID NO: 1559749 - DNA, 15 bp, Homo sapiens
gaaaacaagaaacag

SEQ ID NO: 1559750 - DNA, 15 bp, Homo sapiens
agaaaacaagaaaca

SEQ ID NO: 1559751 - DNA, 15 bp, Homo sapiens
aagaaaacaagaaac

SEQ ID NO: 1559752 - DNA, 15 bp, Homo sapiens
gaagaaaacaagaaa

SEQ ID NO: 1559753 - DNA, 15 bp, Homo sapiens
ttgaagaaaacaaga

SEQ ID NO: 1559754 - DNA, 15 bp, Homo sapiens
gttgaagaaaacaag

SEQ ID NO: 1559755 - DNA, 15 bp, Homo sapiens
tgttgaagaaaacaa

SEQ ID NO: 1559756 - DNA, 15 bp, Homo sapiens
ttgttgaagaaaaca

SEQ ID NO: 1559757 - DNA, 15 bp, Homo sapiens
tttgttgaagaaaac

SEQ ID NO: 1559758 - DNA, 15 bp, Homo sapiens
gtttgttgaagaaaa

SEQ ID NO: 1559759 - DNA, 15 bp, Homo sapiens
agtttgttgaagaaa

SEQ ID NO: 1559760 - DNA, 15 bp, Homo sapiens
gagtttgttgaagaa

SEQ ID NO: 1559761 - DNA, 15 bp, Homo sapiens
tgagtttgttgaaga

SEQ ID NO: 1559762 - DNA, 15 bp, Homo sapiens
gtgagtttgttgaag

SEQ ID NO: 1559763 - DNA, 15 bp, Homo sapiens
agtgagtttgttgaa

SEQ ID NO: 1559764 - DNA, 15 bp, Homo sapiens
tagtgagtttgttga

SEQ ID NO: 1559765 - DNA, 15 bp, Homo sapiens
ctagtgagtttgttg

SEQ ID NO: 1559766 - DNA, 15 bp, Homo sapiens
actagtgagtttgtt

SEQ ID NO: 1559767 - DNA, 15 bp, Homo sapiens
aactagtgagtttgt

SEQ ID NO: 1559768 - DNA, 15 bp, Homo sapiens
aaactagtgagtttg

SEQ ID NO: 1559769 - DNA, 15 bp, Homo sapiens
aaaactagtgagttt

SEQ ID NO: 1559770 - DNA, 15 bp, Homo sapiens
gaaaactagtgagtt

SEQ ID NO: 1559771 - DNA, 15 bp, Homo sapiens
ggaaaactagtgagt

SEQ ID NO: 1559772 - DNA, 15 bp, Homo sapiens
gggaaaactagtgag

SEQ ID NO: 1559773 - DNA, 15 bp, Homo sapiens
agggaaaactagtga

SEQ ID NO: 1559774 - DNA, 15 bp, Homo sapiens
aagggaaaactagtg

SEQ ID NO: 1559775 - DNA, 15 bp, Homo sapiens
taagggaaaactagt

SEQ ID NO: 1559776 - DNA, 15 bp, Homo sapiens
ttaagggaaaactag

SEQ ID NO: 1559777 - DNA, 15 bp, Homo sapiens
gttaagggaaaacta

SEQ ID NO: 1559778 - DNA, 15 bp, Homo sapiens
agttaagggaaaact

SEQ ID NO: 1559779 - DNA, 15 bp, Homo sapiens
cagttaagggaaaac

SEQ ID NO: 1559780 - DNA, 15 bp, Homo sapiens
tcagttaagggaaaa

SEQ ID NO: 1559781 - DNA, 15 bp, Homo sapiens
atcagttaagggaaa

SEQ ID NO: 1559782 - DNA, 15 bp, Homo sapiens
tatcagttaagggaa

SEQ ID NO: 1559783 - DNA, 15 bp, Homo sapiens
atatcagttaaggga

SEQ ID NO: 1559784 - DNA, 15 bp, Homo sapiens
aatatcagttaaggg

SEQ ID NO: 1559785 - DNA, 15 bp, Homo sapiens
caatatcagttaagg

SEQ ID NO: 1559786 - DNA, 15 bp, Homo sapiens
acaatatcagttaag

SEQ ID NO: 1559787 - DNA, 15 bp, Homo sapiens
tacaatatcagttaa

SEQ ID NO: 1559788 - DNA, 15 bp, Homo sapiens
ttacaatatcagtta

SEQ ID NO: 1559789 - DNA, 15 bp, Homo sapiens
tttacaatatcagtt

SEQ ID NO: 1559790 - DNA, 15 bp, Homo sapiens
ttttacaatatcagt

SEQ ID NO: 1559791 - DNA, 15 bp, Homo sapiens
tttttacaatatcag

SEQ ID NO: 1559792 - DNA, 15 bp, Homo sapiens
atttttacaatatca

SEQ ID NO: 1559793 - DNA, 15 bp, Homo sapiens
aatttttacaatatc

SEQ ID NO: 1559794 - DNA, 15 bp, Homo sapiens
taatttttacaatat

SEQ ID NO: 1559795 - DNA, 15 bp, Homo sapiens
ttaatttttacaata

SEQ ID NO: 1559796 - DNA, 15 bp, Homo sapiens
tttaatttttacaat

SEQ ID NO: 1559797 - DNA, 15 bp, Homo sapiens
ctttaatttttacaa

SEQ ID NO: 1559798 - DNA, 15 bp, Homo sapiens
actttaatttttaca

SEQ ID NO: 1559799 - DNA, 15 bp, Homo sapiens
tactttaatttttac

SEQ ID NO: 1559800 - DNA, 15 bp, Homo sapiens
ttactttaattttta

SEQ ID NO: 1559801 - DNA, 15 bp, Homo sapiens
attactttaattttt

SEQ ID NO: 1559802 - DNA, 15 bp, Homo sapiens
gattactttaatttt

SEQ ID NO: 1559803 - DNA, 15 bp, Homo sapiens
agattactttaattt

SEQ ID NO: 1559804 - DNA, 15 bp, Homo sapiens
aagattactttaatt

SEQ ID NO: 1559805 - DNA, 15 bp, Homo sapiens
caagattactttaat

SEQ ID NO: 1559806 - DNA, 15 bp, Homo sapiens
tcaagattactttaa

SEQ ID NO: 1559807 - DNA, 15 bp, Homo sapiens
ttcaagattacttta

SEQ ID NO: 1559808 - DNA, 15 bp, Homo sapiens
tttcaagattacttt

SEQ ID NO: 1559809 - DNA, 15 bp, Homo sapiens
ttttcaagattactt

SEQ ID NO: 1559810 - DNA, 15 bp, Homo sapiens
attttcaagattact

SEQ ID NO: 1559811 - DNA, 15 bp, Homo sapiens
cattttcaagattac

SEQ ID NO: 1559812 - DNA, 15 bp, Homo sapiens
acattttcaagatta

SEQ ID NO: 1559813 - DNA, 15 bp, Homo sapiens
aacattttcaagatt

SEQ ID NO: 1559814 - DNA, 15 bp, Homo sapiens
aaacattttcaagat

SEQ ID NO: 1559815 - DNA, 15 bp, Homo sapiens
aaaacattttcaaga

SEQ ID NO: 1559816 - DNA, 15 bp, Homo sapiens
caaaacattttcaag

SEQ ID NO: 1559817 - DNA, 15 bp, Homo sapiens
tcaaaacattttcaa

SEQ ID NO: 1559818 - DNA, 15 bp, Homo sapiens
gtcaaaacattttca

SEQ ID NO: 1559819 - DNA, 15 bp, Homo sapiens
tgtcaaaacattttc

SEQ ID NO: 1559820 - DNA, 15 bp, Homo sapiens
ttgtcaaaacatttt

SEQ ID NO: 1559821 - DNA, 15 bp, Homo sapiens
tttgtcaaaacattt

SEQ ID NO: 1559822 - DNA, 15 bp, Homo sapiens
ttttgtcaaaacatt

SEQ ID NO: 1559823 - DNA, 15 bp, Homo sapiens
cttttgtcaaaacat

SEQ ID NO: 1559824 - DNA, 15 bp, Homo sapiens
acttttgtcaaaaca

SEQ ID NO: 1559825 - DNA, 15 bp, Homo sapiens
tacttttgtcaaaac

SEQ ID NO: 1559826 - DNA, 15 bp, Homo sapiens
ttacttttgtcaaaa

SEQ ID NO: 1559827 - DNA, 15 bp, Homo sapiens
tttacttttgtcaaa

SEQ ID NO: 1559828 - DNA, 15 bp, Homo sapiens
ttttacttttgtcaa

SEQ ID NO: 1559829 - DNA, 15 bp, Homo sapiens
attttacttttgtca

SEQ ID NO: 1559830 - DNA, 15 bp, Homo sapiens
aattttacttttgtc

SEQ ID NO: 1559831 - DNA, 15 bp, Homo sapiens
taattttacttttgt

SEQ ID NO: 1559832 - DNA, 15 bp, Homo sapiens
ttaattttacttttg

SEQ ID NO: 1559833 - DNA, 15 bp, Homo sapiens
ctttaattttacttt

SEQ ID NO: 1559834 - DNA, 15 bp, Homo sapiens
cctttaattttactt

SEQ ID NO: 1559835 - DNA, 15 bp, Homo sapiens
ccctttaattttact

SEQ ID NO: 1559836 - DNA, 15 bp, Homo sapiens
tccctttaattttac

SEQ ID NO: 1559837 - DNA, 15 bp, Homo sapiens
gtccctttaatttta

SEQ ID NO: 1559838 - DNA, 15 bp, Homo sapiens
tgtccctttaatttt

SEQ ID NO: 1559839 - DNA, 15 bp, Homo sapiens
atgtccctttaattt

SEQ ID NO: 1559840 - DNA, 15 bp, Homo sapiens
gatgtccctttaatt

SEQ ID NO: 1559841 - DNA, 15 bp, Homo sapiens
agatgtccctttaat

SEQ ID NO: 1559842 - DNA, 15 bp, Homo sapiens
aagatgtccctttaa

SEQ ID NO: 1559843 - DNA, 15 bp, Homo sapiens
aaagatgtcccttta

SEQ ID NO: 1559844 - DNA, 15 bp, Homo sapiens
aaaagatgtcccttt

SEQ ID NO: 1559845 - DNA, 15 bp, Homo sapiens
gaaaagatgtccctt

SEQ ID NO: 1559846 - DNA, 15 bp, Homo sapiens
agaaaagatgtccct

SEQ ID NO: 1559847 - DNA, 15 bp, Homo sapiens
aagaaaagatgtccc

SEQ ID NO: 1559848 - DNA, 15 bp, Homo sapiens
taagaaaagatgtcc

SEQ ID NO: 1559849 - DNA, 15 bp, Homo sapiens
ttaagaaaagatgtc

SEQ ID NO: 1559850 - DNA, 15 bp, Homo sapiens
tttaagaaaagatgt

SEQ ID NO: 1559851 - DNA, 15 bp, Homo sapiens
ttttaagaaaagatg

SEQ ID NO: 1559852 - DNA, 15 bp, Homo sapiens
tttttaagaaaagat

SEQ ID NO: 1559853 - DNA, 15 bp, Homo sapiens
ttttttaagaaaaga

SEQ ID NO: 1559854 - DNA, 15 bp, Homo sapiens
tttttttaagaaaag

SEQ ID NO: 1559855 - DNA, 15 bp, Homo sapiens
ttttttttaagaaaa

SEQ ID NO: 1559856 - DNA, 15 bp, Homo sapiens
tttttttttaagaaa

SEQ ID NO: 1559857 - DNA, 15 bp, Homo sapiens
ttttttttttaagaa

SEQ ID NO: 1559858 - DNA, 15 bp, Homo sapiens
atttttttttttaag

SEQ ID NO: 1559859 - DNA, 15 bp, Homo sapiens
catttttttttttaa

SEQ ID NO: 1559860 - DNA, 15 bp, Homo sapiens
acattttttttttta

SEQ ID NO: 1559861 - DNA, 15 bp, Homo sapiens
aaaacattttttttt

SEQ ID NO: 1559862 - DNA, 15 bp, Homo sapiens
aaaaacatttttttt

SEQ ID NO: 1559863 - DNA, 15 bp, Homo sapiens
caaaaacattttttt

SEQ ID NO: 1559864 - DNA, 15 bp, Homo sapiens
acaaaaacatttttt

SEQ ID NO: 1559865 - DNA, 15 bp, Homo sapiens
ttacaaaaacatttt

SEQ ID NO: 1559866 - DNA, 15 bp, Homo sapiens
tttacaaaaacattt

SEQ ID NO: 1559867 - DNA, 15 bp, Homo sapiens
ttttacaaaaacatt

SEQ ID NO: 1559868 - DNA, 15 bp, Homo sapiens
cttttacaaaaacat

SEQ ID NO: 1559869 - DNA, 15 bp, Homo sapiens
tcttttacaaaaaca

SEQ ID NO: 1559870 - DNA, 15 bp, Homo sapiens
ttcttttacaaaaac

SEQ ID NO: 1559871 - DNA, 15 bp, Homo sapiens
gttcttttacaaaaa

SEQ ID NO: 1559872 - DNA, 15 bp, Homo sapiens
ggttcttttacaaaa

SEQ ID NO: 1559873 - DNA, 15 bp, Homo sapiens
gggttcttttacaaa

SEQ ID NO: 1559874 - DNA, 15 bp, Homo sapiens
agggttcttttacaa

SEQ ID NO: 1559875 - DNA, 15 bp, Homo sapiens
tagggttcttttaca

SEQ ID NO: 1559876 - DNA, 15 bp, Homo sapiens
atagggttcttttac

SEQ ID NO: 1559877 - DNA, 15 bp, Homo sapiens
aatagggttctttta

SEQ ID NO: 1559878 - DNA, 15 bp, Homo sapiens
aaatagggttctttt

SEQ ID NO: 1559879 - DNA, 15 bp, Homo sapiens
aaaatagggttcttt

SEQ ID NO: 1559880 - DNA, 15 bp, Homo sapiens
gaaaatagggttctt

SEQ ID NO: 1559881 - DNA, 15 bp, Homo sapiens
tgaaaatagggttct

SEQ ID NO: 1559882 - DNA, 15 bp, Homo sapiens
ttgaaaatagggttc

SEQ ID NO: 1559883 - DNA, 15 bp, Homo sapiens
tttgaaaatagggtt

SEQ ID NO: 1559884 - DNA, 15 bp, Homo sapiens
atttgaaaatagggt

SEQ ID NO: 1559885 - DNA, 15 bp, Homo sapiens
catttgaaaataggg

SEQ ID NO: 1559886 - DNA, 15 bp, Homo sapiens
tcatttgaaaatagg

SEQ ID NO: 1559887 - DNA, 15 bp, Homo sapiens
ttcatttgaaaatag

SEQ ID NO: 1559888 - DNA, 15 bp, Homo sapiens
tttcatttgaaaata

SEQ ID NO: 1559889 - DNA, 15 bp, Homo sapiens
atttcatttgaaaat

SEQ ID NO: 1559890 - DNA, 15 bp, Homo sapiens
gatttcatttgaaaa

SEQ ID NO: 1559891 - DNA, 15 bp, Homo sapiens
agatttcatttgaaa

SEQ ID NO: 1559892 - DNA, 15 bp, Homo sapiens
aagatttcatttgaa

SEQ ID NO: 1559893 - DNA, 15 bp, Homo sapiens
ttaagatttcatttg

SEQ ID NO: 1559894 - DNA, 15 bp, Homo sapiens
cttaagatttcattt

SEQ ID NO: 1559895 - DNA, 15 bp, Homo sapiens
ccttaagatttcatt

SEQ ID NO: 1559896 - DNA, 15 bp, Homo sapiens
tccttaagatttcat

SEQ ID NO: 1559897 - DNA, 15 bp, Homo sapiens
ctccttaagatttca

SEQ ID NO: 1559898 - DNA, 15 bp, Homo sapiens
tctccttaagatttc

SEQ ID NO: 1559899 - DNA, 15 bp, Homo sapiens
ttctccttaagattt

SEQ ID NO: 1559900 - DNA, 15 bp, Homo sapiens
attctccttaagatt

SEQ ID NO: 1559901 - DNA, 15 bp, Homo sapiens
aattctccttaagat

SEQ ID NO: 1559902 - DNA, 15 bp, Homo sapiens
taattctccttaaga

SEQ ID NO: 1559903 - DNA, 15 bp, Homo sapiens
ataattctccttaag

SEQ ID NO: 1559904 - DNA, 15 bp, Homo sapiens
tataattctccttaa

SEQ ID NO: 1559905 - DNA, 15 bp, Homo sapiens
ttataattctcctta

SEQ ID NO: 1559906 - DNA, 15 bp, Homo sapiens
attataattctcctt

SEQ ID NO: 1559907 - DNA, 15 bp, Homo sapiens
tattataattctcct

SEQ ID NO: 1559908 - DNA, 15 bp, Homo sapiens
gtattataattctcc

SEQ ID NO: 1559909 - DNA, 15 bp, Homo sapiens
tgtattataattctc

SEQ ID NO: 1559910 - DNA, 15 bp, Homo sapiens
atgtattataattct

SEQ ID NO: 1559911 - DNA, 15 bp, Homo sapiens
tatgtattataattc

SEQ ID NO: 1559912 - DNA, 15 bp, Homo sapiens
ctatgtattataatt

SEQ ID NO: 1559913 - DNA, 15 bp, Homo sapiens
tctatgtattataat

SEQ ID NO: 1559914 - DNA, 15 bp, Homo sapiens
atctatgtattataa

SEQ ID NO: 1559915 - DNA, 15 bp, Homo sapiens
aatctatgtattata

SEQ ID NO: 1559916 - DNA, 15 bp, Homo sapiens
aaatctatgtattat

SEQ ID NO: 1559917 - DNA, 15 bp, Homo sapiens
aaaatctatgtatta

SEQ ID NO: 1559918 - DNA, 15 bp, Homo sapiens
aaaaatctatgtatt

SEQ ID NO: 1559919 - DNA, 15 bp, Homo sapiens
aaaaaatctatgtat

SEQ ID NO: 1559920 - DNA, 15 bp, Homo sapiens
aaaaaaatctatgta

SEQ ID NO: 1559921 - DNA, 15 bp, Homo sapiens
aaaaaaaatctatgt

SEQ ID NO: 1559922 - DNA, 15 bp, Homo sapiens
aaaaaaaaatctatg

SEQ ID NO: 1559923 - DNA, 15 bp, Homo sapiens
aaaaaaaaaatctat

SEQ ID NO: 1559924 - DNA, 15 bp, Homo sapiens
acagagattaaaaaa

SEQ ID NO: 1559925 - DNA, 15 bp, Homo sapiens
cacagagattaaaaa

SEQ ID NO: 1559926 - DNA, 15 bp, Homo sapiens
gcacagagattaaaa

SEQ ID NO: 1559927 - DNA, 15 bp, Homo sapiens
agcacagagattaaa

SEQ ID NO: 1559928 - DNA, 15 bp, Homo sapiens
cagcacagagattaa

SEQ ID NO: 1559929 - DNA, 15 bp, Homo sapiens
gcagcacagagatta

SEQ ID NO: 1559930 - DNA, 15 bp, Homo sapiens
agcagcacagagatt

SEQ ID NO: 1559931 - DNA, 15 bp, Homo sapiens
aagcagcacagagat

SEQ ID NO: 1559932 - DNA, 15 bp, Homo sapiens
aaagcagcacagaga

SEQ ID NO: 1559933 - DNA, 15 bp, Homo sapiens
taaagcagcacagag

SEQ ID NO: 1559934 - DNA, 15 bp, Homo sapiens
ctaaagcagcacaga

SEQ ID NO: 1559935 - DNA, 15 bp, Homo sapiens
cctaaagcagcacag

SEQ ID NO: 1559936 - DNA, 15 bp, Homo sapiens
ccctaaagcagcaca

SEQ ID NO: 1559937 - DNA, 15 bp, Homo sapiens
tccctaaagcagcac

SEQ ID NO: 1559938 - DNA, 15 bp, Homo sapiens
ttccctaaagcagca

SEQ ID NO: 1559939 - DNA, 15 bp, Homo sapiens
attccctaaagcagc

SEQ ID NO: 1559940 - DNA, 15 bp, Homo sapiens
tattccctaaagcag

SEQ ID NO: 1559941 - DNA, 15 bp, Homo sapiens
ctattccctaaagca

SEQ ID NO: 1559942 - DNA, 15 bp, Homo sapiens
tctattccctaaagc

SEQ ID NO: 1559943 - DNA, 15 bp, Homo sapiens
ttctattccctaaag

SEQ ID NO: 1559944 - DNA, 15 bp, Homo sapiens
cttctattccctaaa

SEQ ID NO: 1559945 - DNA, 15 bp, Homo sapiens
tcttctattccctaa

SEQ ID NO: 1559946 - DNA, 15 bp, Homo sapiens
atcttctattcccta

SEQ ID NO: 1559947 - DNA, 15 bp, Homo sapiens
gatcttctattccct

SEQ ID NO: 1559948 - DNA, 15 bp, Homo sapiens
agatcttctattccc

SEQ ID NO: 1559949 - DNA, 15 bp, Homo sapiens
cagatcttctattcc

SEQ ID NO: 1559950 - DNA, 15 bp, Homo sapiens
tcagatcttctattc

SEQ ID NO: 1559951 - DNA, 15 bp, Homo sapiens
ttcagatcttctatt

SEQ ID NO: 1559952 - DNA, 15 bp, Homo sapiens
tttcagatcttctat

SEQ ID NO: 1559953 - DNA, 15 bp, Homo sapiens
ctttcagatcttcta

SEQ ID NO: 1559954 - DNA, 15 bp, Homo sapiens
tctttcagatcttct

SEQ ID NO: 1559955 - DNA, 15 bp, Homo sapiens
gtctttcagatcttc

SEQ ID NO: 1559956 - DNA, 15 bp, Homo sapiens
agtctttcagatctt

SEQ ID NO: 1559957 - DNA, 15 bp, Homo sapiens
tagtctttcagatct

SEQ ID NO: 1559958 - DNA, 15 bp, Homo sapiens
atagtctttcagatc

SEQ ID NO: 1559959 - DNA, 15 bp, Homo sapiens
gatagtctttcagat

SEQ ID NO: 1559960 - DNA, 15 bp, Homo sapiens
tgatagtctttcaga

SEQ ID NO: 1559961 - DNA, 15 bp, Homo sapiens
atgatagtctttcag

SEQ ID NO: 1559962 - DNA, 15 bp, Homo sapiens
catgatagtctttca

SEQ ID NO: 1559963 - DNA, 15 bp, Homo sapiens
acatgatagtctttc

SEQ ID NO: 1559964 - DNA, 15 bp, Homo sapiens
aacatgatagtcttt

SEQ ID NO: 1559965 - DNA, 15 bp, Homo sapiens
aaacatgatagtctt

SEQ ID NO: 1559966 - DNA, 15 bp, Homo sapiens
aaaacatgatagtct

SEQ ID NO: 1559967 - DNA, 15 bp, Homo sapiens
aaaaacatgatagtc

SEQ ID NO: 1559968 - DNA, 15 bp, Homo sapiens
aaaaaacatgatagt

SEQ ID NO: 1559969 - DNA, 15 bp, Homo sapiens
taaaaaacatgatag

SEQ ID NO: 1559970 - DNA, 15 bp, Homo sapiens
ttaaaaaacatgata

SEQ ID NO: 1559971 - DNA, 15 bp, Homo sapiens
attaaaaaacatgat

SEQ ID NO: 1559972 - DNA, 15 bp, Homo sapiens
aattaaaaaacatga

SEQ ID NO: 1559973 - DNA, 15 bp, Homo sapiens
aaattaaaaaacatg

SEQ ID NO: 1559974 - DNA, 15 bp, Homo sapiens
aaaattaaaaaacat

SEQ ID NO: 1559975 - DNA, 15 bp, Homo sapiens
gaaaattaaaaaaca

SEQ ID NO: 1559976 - DNA, 15 bp, Homo sapiens
ggaaaattaaaaaac

SEQ ID NO: 1559977 - DNA, 15 bp, Homo sapiens
aggaaaattaaaaaa

SEQ ID NO: 1559978 - DNA, 15 bp, Homo sapiens
gaggaaaattaaaaa

SEQ ID NO: 1559979 - DNA, 15 bp, Homo sapiens
agaggaaaattaaaa

SEQ ID NO: 1559980 - DNA, 15 bp, Homo sapiens
aagaggaaaattaaa

SEQ ID NO: 1559981 - DNA, 15 bp, Homo sapiens
gaagaggaaaattaa

SEQ ID NO: 1559982 - DNA, 15 bp, Homo sapiens
ggaagaggaaaatta

SEQ ID NO: 1559983 - DNA, 15 bp, Homo sapiens
aggaagaggaaaatt

SEQ ID NO: 1559984 - DNA, 15 bp, Homo sapiens
caggaagaggaaaat

SEQ ID NO: 1559985 - DNA, 15 bp, Homo sapiens
ccaggaagaggaaaa

SEQ ID NO: 1559986 - DNA, 15 bp, Homo sapiens
tccaggaagaggaaa

SEQ ID NO: 1559987 - DNA, 15 bp, Homo sapiens
ctccaggaagaggaa

SEQ ID NO: 1559988 - DNA, 15 bp, Homo sapiens
actccaggaagagga

SEQ ID NO: 1559989 - DNA, 15 bp, Homo sapiens
tactccaggaagagg

SEQ ID NO: 1559990 - DNA, 15 bp, Homo sapiens
gtactccaggaagag

SEQ ID NO: 1559991 - DNA, 15 bp, Homo sapiens
agtactccaggaaga

SEQ ID NO: 1559992 - DNA, 15 bp, Homo sapiens
cagtactccaggaag

SEQ ID NO: 1559993 - DNA, 15 bp, Homo sapiens
acagtactccaggaa

SEQ ID NO: 1559994 - DNA, 15 bp, Homo sapiens
tacagtactccagga

SEQ ID NO: 1559995 - DNA, 15 bp, Homo sapiens
ctacagtactccagg

SEQ ID NO: 1559996 - DNA, 15 bp, Homo sapiens
tctacagtactccag

SEQ ID NO: 1559997 - DNA, 15 bp, Homo sapiens
ctctacagtactcca

SEQ ID NO: 1559998 - DNA, 15 bp, Homo sapiens
actctacagtactcc

SEQ ID NO: 1559999 - DNA, 15 bp, Homo sapiens
aactctacagtactc

SEQ ID NO: 1560000 - DNA, 15 bp, Homo sapiens
gaactctacagtact

SEQ ID NO: 1560001 - DNA, 15 bp, Homo sapiens
agaactctacagtac

SEQ ID NO: 1560002 - DNA, 15 bp, Homo sapiens
tagaactctacagta

SEQ ID NO: 1560003 - DNA, 15 bp, Homo sapiens
ctagaactctacagt

SEQ ID NO: 1560004 - DNA, 15 bp, Homo sapiens
cctagaactctacag

SEQ ID NO: 1560005 - DNA, 15 bp, Homo sapiens
ccctagaactctaca

SEQ ID NO: 1560006 - DNA, 15 bp, Homo sapiens
tccctagaactctac

SEQ ID NO: 1560007 - DNA, 15 bp, Homo sapiens
ttccctagaactcta

SEQ ID NO: 1560008 - DNA, 15 bp, Homo sapiens
attccctagaactct

SEQ ID NO: 1560009 - DNA, 15 bp, Homo sapiens
tattccctagaactc

SEQ ID NO: 1560010 - DNA, 15 bp, Homo sapiens
atattccctagaact

SEQ ID NO: 1560011 - DNA, 15 bp, Homo sapiens
aatattccctagaac

SEQ ID NO: 1560012 - DNA, 15 bp, Homo sapiens
taatattccctagaa

SEQ ID NO: 1560013 - DNA, 15 bp, Homo sapiens
ataatattccctaga

SEQ ID NO: 1560014 - DNA, 15 bp, Homo sapiens
tataatattccctag

SEQ ID NO: 1560015 - DNA, 15 bp, Homo sapiens
atataatattcccta

SEQ ID NO: 1560016 - DNA, 15 bp, Homo sapiens
aatataatattccct

SEQ ID NO: 1560017 - DNA, 15 bp, Homo sapiens
gaatataatattccc

SEQ ID NO: 1560018 - DNA, 15 bp, Homo sapiens
agaatataatattcc

SEQ ID NO: 1560019 - DNA, 15 bp, Homo sapiens
tagaatataatattc

SEQ ID NO: 1560020 - DNA, 15 bp, Homo sapiens
gtagaatataatatt

SEQ ID NO: 1560021 - DNA, 15 bp, Homo sapiens
tgtagaatataatat

SEQ ID NO: 1560022 - DNA, 15 bp, Homo sapiens
gtgtagaatataata

SEQ ID NO: 1560023 - DNA, 15 bp, Homo sapiens
tgtgtagaatataat

SEQ ID NO: 1560024 - DNA, 15 bp, Homo sapiens
atgtgtagaatataa

SEQ ID NO: 1560025 - DNA, 15 bp, Homo sapiens
aatgtgtagaatata

SEQ ID NO: 1560026 - DNA, 15 bp, Homo sapiens
aaatgtgtagaatat

SEQ ID NO: 1560027 - DNA, 15 bp, Homo sapiens
aaaatgtgtagaata

SEQ ID NO: 1560028 - DNA, 15 bp, Homo sapiens
aaaaatgtgtagaat

SEQ ID NO: 1560029 - DNA, 15 bp, Homo sapiens
caaaaatgtgtagaa

SEQ ID NO: 1560030 - DNA, 15 bp, Homo sapiens
ccaaaaatgtgtaga

SEQ ID NO: 1560031 - DNA, 15 bp, Homo sapiens
accaaaaatgtgtag

SEQ ID NO: 1560032 - DNA, 15 bp, Homo sapiens
taccaaaaatgtgta

SEQ ID NO: 1560033 - DNA, 15 bp, Homo sapiens
gtaccaaaaatgtgt

SEQ ID NO: 1560034 - DNA, 15 bp, Homo sapiens
agtaccaaaaatgtg

SEQ ID NO: 1560035 - DNA, 15 bp, Homo sapiens
aagtaccaaaaatgt

SEQ ID NO: 1560036 - DNA, 15 bp, Homo sapiens
taagtaccaaaaatg

SEQ ID NO: 1560037 - DNA, 15 bp, Homo sapiens
ttaagtaccaaaaat

SEQ ID NO: 1560038 - DNA, 15 bp, Homo sapiens
attaagtaccaaaaa

SEQ ID NO: 1560039 - DNA, 15 bp, Homo sapiens
gattaagtaccaaaa

SEQ ID NO: 1560040 - DNA, 15 bp, Homo sapiens
agattaagtaccaaa

SEQ ID NO: 1560041 - DNA, 15 bp, Homo sapiens
aagattaagtaccaa

SEQ ID NO: 1560042 - DNA, 15 bp, Homo sapiens
taagattaagtacca

SEQ ID NO: 1560043 - DNA, 15 bp, Homo sapiens
ataagattaagtacc

SEQ ID NO: 1560044 - DNA, 15 bp, Homo sapiens
tataagattaagtac

SEQ ID NO: 1560045 - DNA, 15 bp, Homo sapiens
gtataagattaagta

SEQ ID NO: 1560046 - DNA, 15 bp, Homo sapiens
tgtataagattaagt

SEQ ID NO: 1560047 - DNA, 15 bp, Homo sapiens
atgtataagattaag

SEQ ID NO: 1560048 - DNA, 15 bp, Homo sapiens
tatgtataagattaa

SEQ ID NO: 1560049 - DNA, 15 bp, Homo sapiens
ttatgtataagatta

SEQ ID NO: 1560050 - DNA, 15 bp, Homo sapiens
attatgtataagatt

SEQ ID NO: 1560051 - DNA, 15 bp, Homo sapiens
aattatgtataagat

SEQ ID NO: 1560052 - DNA, 15 bp, Homo sapiens
taattatgtataaga

SEQ ID NO: 1560053 - DNA, 15 bp, Homo sapiens
ttaattatgtataag

SEQ ID NO: 1560054 - DNA, 15 bp, Homo sapiens
attaattatgtataa

SEQ ID NO: 1560055 - DNA, 15 bp, Homo sapiens
aattaattatgtata

SEQ ID NO: 1560056 - DNA, 15 bp, Homo sapiens
taattaattatgtat

SEQ ID NO: 1560057 - DNA, 15 bp, Homo sapiens
ataattaattatgta

SEQ ID NO: 1560058 - DNA, 15 bp, Homo sapiens
aataattaattatgt

SEQ ID NO: 1560059 - DNA, 15 bp, Homo sapiens
gaataattaattatg

SEQ ID NO: 1560060 - DNA, 15 bp, Homo sapiens
agaataattaattat

SEQ ID NO: 1560061 - DNA, 15 bp, Homo sapiens
gagaataattaatta

SEQ ID NO: 1560062 - DNA, 15 bp, Homo sapiens
tgagaataattaatt

SEQ ID NO: 1560063 - DNA, 15 bp, Homo sapiens
atgagaataattaat

SEQ ID NO: 1560064 - DNA, 15 bp, Homo sapiens
aatgagaataattaa

SEQ ID NO: 1560065 - DNA, 15 bp, Homo sapiens
gaatgagaataatta

SEQ ID NO: 1560066 - DNA, 15 bp, Homo sapiens
tgaatgagaataatt

SEQ ID NO: 1560067 - DNA, 15 bp, Homo sapiens
gtgaatgagaataat

SEQ ID NO: 1560068 - DNA, 15 bp, Homo sapiens
tgtgaatgagaataa

SEQ ID NO: 1560069 - DNA, 15 bp, Homo sapiens
atgtgaatgagaata

SEQ ID NO: 1560070 - DNA, 15 bp, Homo sapiens
tatgtgaatgagaat

SEQ ID NO: 1560071 - DNA, 15 bp, Homo sapiens
atatgtgaatgagaa

SEQ ID NO: 1560072 - DNA, 15 bp, Homo sapiens
catatgtgaatgaga

SEQ ID NO: 1560073 - DNA, 15 bp, Homo sapiens
gcatatgtgaatgag

SEQ ID NO: 1560074 - DNA, 15 bp, Homo sapiens
tgcatatgtgaatga

SEQ ID NO: 1560075 - DNA, 15 bp, Homo sapiens
atgcatatgtgaatg

SEQ ID NO: 1560076 - DNA, 15 bp, Homo sapiens
catgcatatgtgaat

SEQ ID NO: 1560077 - DNA, 15 bp, Homo sapiens
acatgcatatgtgaa

SEQ ID NO: 1560078 - DNA, 15 bp, Homo sapiens
aacatgcatatgtga

SEQ ID NO: 1560079 - DNA, 15 bp, Homo sapiens
aaacatgcatatgtg

SEQ ID NO: 1560080 - DNA, 15 bp, Homo sapiens
aaaacatgcatatgt

SEQ ID NO: 1560081 - DNA, 15 bp, Homo sapiens
taaaacatgcatatg

SEQ ID NO: 1560082 - DNA, 15 bp, Homo sapiens
gtaaaacatgcatat

SEQ ID NO: 1560083 - DNA, 15 bp, Homo sapiens
ggtaaaacatgcata

SEQ ID NO: 1560084 - DNA, 15 bp, Homo sapiens
aggtaaaacatgcat

SEQ ID NO: 1560085 - DNA, 15 bp, Homo sapiens
aaggtaaaacatgca

SEQ ID NO: 1560086 - DNA, 15 bp, Homo sapiens
gaaggtaaaacatgc

SEQ ID NO: 1560087 - DNA, 15 bp, Homo sapiens
ggaaggtaaaacatg

SEQ ID NO: 1560088 - DNA, 15 bp, Homo sapiens
gggaaggtaaaacat

SEQ ID NO: 1560089 - DNA, 15 bp, Homo sapiens
tgggaaggtaaaaca

SEQ ID NO: 1560090 - DNA, 15 bp, Homo sapiens
ttgggaaggtaaaac

SEQ ID NO: 1560091 - DNA, 15 bp, Homo sapiens
tttgggaaggtaaaa

SEQ ID NO: 1560092 - DNA, 15 bp, Homo sapiens
atttgggaaggtaaa

SEQ ID NO: 1560093 - DNA, 15 bp, Homo sapiens
catttgggaaggtaa

SEQ ID NO: 1560094 - DNA, 15 bp, Homo sapiens
ccatttgggaaggta

SEQ ID NO: 1560095 - DNA, 15 bp, Homo sapiens
gccatttgggaaggt

SEQ ID NO: 1560096 - DNA, 15 bp, Homo sapiens
agccatttgggaagg

SEQ ID NO: 1560097 - DNA, 15 bp, Homo sapiens
tagccatttgggaag

SEQ ID NO: 1560098 - DNA, 15 bp, Homo sapiens
atagccatttgggaa

SEQ ID NO: 1560099 - DNA, 15 bp, Homo sapiens
aatagccatttggga

SEQ ID NO: 1560100 - DNA, 15 bp, Homo sapiens
gaatagccatttggg

SEQ ID NO: 1560101 - DNA, 15 bp, Homo sapiens
agaatagccatttgg

SEQ ID NO: 1560102 - DNA, 15 bp, Homo sapiens
aagaatagccatttg

SEQ ID NO: 1560103 - DNA, 15 bp, Homo sapiens
caagaatagccattt

SEQ ID NO: 1560104 - DNA, 15 bp, Homo sapiens
ccaagaatagccatt

SEQ ID NO: 1560105 - DNA, 15 bp, Homo sapiens
tccaagaatagccat

SEQ ID NO: 1560106 - DNA, 15 bp, Homo sapiens
ttccaagaatagcca

SEQ ID NO: 1560107 - DNA, 15 bp, Homo sapiens
tttccaagaatagcc

SEQ ID NO: 1560108 - DNA, 15 bp, Homo sapiens
ctttccaagaatagc

SEQ ID NO: 1560109 - DNA, 15 bp, Homo sapiens
actttccaagaatag

SEQ ID NO: 1560110 - DNA, 15 bp, Homo sapiens
tactttccaagaata

SEQ ID NO: 1560111 - DNA, 15 bp, Homo sapiens
ctactttccaagaat

SEQ ID NO: 1560112 - DNA, 15 bp, Homo sapiens
cctactttccaagaa

SEQ ID NO: 1560113 - DNA, 15 bp, Homo sapiens
tcctactttccaaga

SEQ ID NO: 1560114 - DNA, 15 bp, Homo sapiens
ctcctactttccaag

SEQ ID NO: 1560115 - DNA, 15 bp, Homo sapiens
actcctactttccaa

SEQ ID NO: 1560116 - DNA, 15 bp, Homo sapiens
aactcctactttcca

SEQ ID NO: 1560117 - DNA, 15 bp, Homo sapiens
taactcctactttcc

SEQ ID NO: 1560118 - DNA, 15 bp, Homo sapiens
ataactcctactttc

SEQ ID NO: 1560119 - DNA, 15 bp, Homo sapiens
tataactcctacttt

SEQ ID NO: 1560120 - DNA, 15 bp, Homo sapiens
atataactcctactt

SEQ ID NO: 1560121 - DNA, 15 bp, Homo sapiens
aatataactcctact

SEQ ID NO: 1560122 - DNA, 15 bp, Homo sapiens
aaatataactcctac

SEQ ID NO: 1560123 - DNA, 15 bp, Homo sapiens
gaaatataactccta

SEQ ID NO: 1560124 - DNA, 15 bp, Homo sapiens
ggaaatataactcct

SEQ ID NO: 1560125 - DNA, 15 bp, Homo sapiens
aggaaatataactcc

SEQ ID NO: 1560126 - DNA, 15 bp, Homo sapiens
aaggaaatataactc

SEQ ID NO: 1560127 - DNA, 15 bp, Homo sapiens
aaaggaaatataact

SEQ ID NO: 1560128 - DNA, 15 bp, Homo sapiens
gaaaggaaatataac

SEQ ID NO: 1560129 - DNA, 15 bp, Homo sapiens
ggaaaggaaatataa

SEQ ID NO: 1560130 - DNA, 15 bp, Homo sapiens
aggaaaggaaatata

SEQ ID NO: 1560131 - DNA, 15 bp, Homo sapiens
aaggaaaggaaatat

SEQ ID NO: 1560132 - DNA, 15 bp, Homo sapiens
caaggaaaggaaata

SEQ ID NO: 1560133 - DNA, 15 bp, Homo sapiens
gcaaggaaaggaaat

SEQ ID NO: 1560134 - DNA, 15 bp, Homo sapiens
tgcaaggaaaggaaa

SEQ ID NO: 1560135 - DNA, 15 bp, Homo sapiens
ctgcaaggaaaggaa

SEQ ID NO: 1560136 - DNA, 15 bp, Homo sapiens
tctgcaaggaaagga

SEQ ID NO: 1560137 - DNA, 15 bp, Homo sapiens
ctctgcaaggaaagg

SEQ ID NO: 1560138 - DNA, 15 bp, Homo sapiens
actctgcaaggaaag

SEQ ID NO: 1560139 - DNA, 15 bp, Homo sapiens
aactctgcaaggaaa

SEQ ID NO: 1560140 - DNA, 15 bp, Homo sapiens
caactctgcaaggaa

SEQ ID NO: 1560141 - DNA, 15 bp, Homo sapiens
acaactctgcaagga

SEQ ID NO: 1560142 - DNA, 15 bp, Homo sapiens
aacaactctgcaagg

SEQ ID NO: 1560143 - DNA, 15 bp, Homo sapiens
taacaactctgcaag

SEQ ID NO: 1560144 - DNA, 15 bp, Homo sapiens
ctaacaactctgcaa

SEQ ID NO: 1560145 - DNA, 15 bp, Homo sapiens
actaacaactctgca

SEQ ID NO: 1560146 - DNA, 15 bp, Homo sapiens
gactaacaactctgc

SEQ ID NO: 1560147 - DNA, 15 bp, Homo sapiens
tgactaacaactctg

SEQ ID NO: 1560148 - DNA, 15 bp, Homo sapiens
ctgactaacaactct

SEQ ID NO: 1560149 - DNA, 15 bp, Homo sapiens
cctgactaacaactc

SEQ ID NO: 1560150 - DNA, 15 bp, Homo sapiens
ccctgactaacaact

SEQ ID NO: 1560151 - DNA, 15 bp, Homo sapiens
tccctgactaacaac

SEQ ID NO: 1560152 - DNA, 15 bp, Homo sapiens
ttccctgactaacaa

SEQ ID NO: 1560153 - DNA, 15 bp, Homo sapiens
cttccctgactaaca

SEQ ID NO: 1560154 - DNA, 15 bp, Homo sapiens
tcttccctgactaac

SEQ ID NO: 1560155 - DNA, 15 bp, Homo sapiens
ttcttccctgactaa

SEQ ID NO: 1560156 - DNA, 15 bp, Homo sapiens
cttcttccctgacta

SEQ ID NO: 1560157 - DNA, 15 bp, Homo sapiens
tcttcttccctgact

SEQ ID NO: 1560158 - DNA, 15 bp, Homo sapiens
gtcttcttccctgac

SEQ ID NO: 1560159 - DNA, 15 bp, Homo sapiens
ggtcttcttccctga

SEQ ID NO: 1560160 - DNA, 15 bp, Homo sapiens
aggtcttcttccctg

SEQ ID NO: 1560161 - DNA, 15 bp, Homo sapiens
gaggtcttcttccct

SEQ ID NO: 1560162 - DNA, 15 bp, Homo sapiens
tgaggtcttcttccc

SEQ ID NO: 1560163 - DNA, 15 bp, Homo sapiens
ctgaggtcttcttcc

SEQ ID NO: 1560164 - DNA, 15 bp, Homo sapiens
gctgaggtcttcttc

SEQ ID NO: 1560165 - DNA, 15 bp, Homo sapiens
tgctgaggtcttctt

SEQ ID NO: 1560166 - DNA, 15 bp, Homo sapiens
ctgctgaggtcttct

SEQ ID NO: 1560167 - DNA, 15 bp, Homo sapiens
tctgctgaggtcttc

SEQ ID NO: 1560168 - DNA, 15 bp, Homo sapiens
atctgctgaggtctt

SEQ ID NO: 1560169 - DNA, 15 bp, Homo sapiens
catctgctgaggtct

SEQ ID NO: 1560170 - DNA, 15 bp, Homo sapiens
gcatctgctgaggtc

SEQ ID NO: 1560171 - DNA, 15 bp, Homo sapiens
agcatctgctgaggt

SEQ ID NO: 1560172 - DNA, 15 bp, Homo sapiens
aagcatctgctgagg

SEQ ID NO: 1560173 - DNA, 15 bp, Homo sapiens
caagcatctgctgag

SEQ ID NO: 1560174 - DNA, 15 bp, Homo sapiens
acaagcatctgctga

SEQ ID NO: 1560175 - DNA, 15 bp, Homo sapiens
aacaagcatctgctg

SEQ ID NO: 1560176 - DNA, 15 bp, Homo sapiens
gaacaagcatctgct

SEQ ID NO: 1560177 - DNA, 15 bp, Homo sapiens
tgaacaagcatctgc

SEQ ID NO: 1560178 - DNA, 15 bp, Homo sapiens
ttgaacaagcatctg

SEQ ID NO: 1560179 - DNA, 15 bp, Homo sapiens
tttgaacaagcatct

SEQ ID NO: 1560180 - DNA, 15 bp, Homo sapiens
ttttgaacaagcatc

SEQ ID NO: 1560181 - DNA, 15 bp, Homo sapiens
tttttgaacaagcat

SEQ ID NO: 1560182 - DNA, 15 bp, Homo sapiens
ttttttgaacaagca

SEQ ID NO: 1560183 - DNA, 15 bp, Homo sapiens
attttttgaacaagc

SEQ ID NO: 1560184 - DNA, 15 bp, Homo sapiens
aattttttgaacaag

SEQ ID NO: 1560185 - DNA, 15 bp, Homo sapiens
taattttttgaacaa

SEQ ID NO: 1560186 - DNA, 15 bp, Homo sapiens
ttaattttttgaaca

SEQ ID NO: 1560187 - DNA, 15 bp, Homo sapiens
attaattttttgaac

SEQ ID NO: 1560188 - DNA, 15 bp, Homo sapiens
aattaattttttgaa

SEQ ID NO: 1560189 - DNA, 15 bp, Homo sapiens
gaattaattttttga

SEQ ID NO: 1560190 - DNA, 15 bp, Homo sapiens
agaattaattttttg

SEQ ID NO: 1560191 - DNA, 15 bp, Homo sapiens
aagaattaatttttt

SEQ ID NO: 1560192 - DNA, 15 bp, Homo sapiens
taagaattaattttt

SEQ ID NO: 1560193 - DNA, 15 bp, Homo sapiens
gtaagaattaatttt

SEQ ID NO: 1560194 - DNA, 15 bp, Homo sapiens
agtaagaattaattt

SEQ ID NO: 1560195 - DNA, 15 bp, Homo sapiens
aagtaagaattaatt

SEQ ID NO: 1560196 - DNA, 15 bp, Homo sapiens
caagtaagaattaat

SEQ ID NO: 1560197 - DNA, 15 bp, Homo sapiens
acaagtaagaattaa

SEQ ID NO: 1560198 - DNA, 15 bp, Homo sapiens
aacaagtaagaatta

SEQ ID NO: 1560199 - DNA, 15 bp, Homo sapiens
aaacaagtaagaatt

SEQ ID NO: 1560200 - DNA, 15 bp, Homo sapiens
caaacaagtaagaat

SEQ ID NO: 1560201 - DNA, 15 bp, Homo sapiens
acaaacaagtaagaa

SEQ ID NO: 1560202 - DNA, 15 bp, Homo sapiens
aacaaacaagtaaga

SEQ ID NO: 1560203 - DNA, 15 bp, Homo sapiens
aaacaaacaagtaag

SEQ ID NO: 1560204 - DNA, 15 bp, Homo sapiens
caaacaaacaagtaa

SEQ ID NO: 1560205 - DNA, 15 bp, Homo sapiens
acaaacaaacaagta

SEQ ID NO: 1560206 - DNA, 15 bp, Homo sapiens
aacaaacaaacaagt

SEQ ID NO: 1560207 - DNA, 15 bp, Homo sapiens
acaaaaaacaaacaa

SEQ ID NO: 1560208 - DNA, 15 bp, Homo sapiens
tacaaaaaacaaaca

SEQ ID NO: 1560209 - DNA, 15 bp, Homo sapiens
ctacaaaaaacaaac

SEQ ID NO: 1560210 - DNA, 15 bp, Homo sapiens
cctacaaaaaacaaa

SEQ ID NO: 1560211 - DNA, 15 bp, Homo sapiens
ccctacaaaaaacaa

SEQ ID NO: 1560212 - DNA, 15 bp, Homo sapiens
accctacaaaaaaca

SEQ ID NO: 1560213 - DNA, 15 bp, Homo sapiens
taccctacaaaaaac

SEQ ID NO: 1560214 - DNA, 15 bp, Homo sapiens
gtaccctacaaaaaa

SEQ ID NO: 1560215 - DNA, 15 bp, Homo sapiens
tgtaccctacaaaaa

SEQ ID NO: 1560216 - DNA, 15 bp, Homo sapiens
ctgtaccctacaaaa

SEQ ID NO: 1560217 - DNA, 15 bp, Homo sapiens
cctgtaccctacaaa

SEQ ID NO: 1560218 - DNA, 15 bp, Homo sapiens
gcctgtaccctacaa

SEQ ID NO: 1560219 - DNA, 15 bp, Homo sapiens
tgcctgtaccctaca

SEQ ID NO: 1560220 - DNA, 15 bp, Homo sapiens
atgcctgtaccctac

SEQ ID NO: 1560221 - DNA, 15 bp, Homo sapiens
gatgcctgtacccta

SEQ ID NO: 1560222 - DNA, 15 bp, Homo sapiens
ggatgcctgtaccct

SEQ ID NO: 1560223 - DNA, 15 bp, Homo sapiens
aggatgcctgtaccc

SEQ ID NO: 1560224 - DNA, 15 bp, Homo sapiens
aaggatgcctgtacc

SEQ ID NO: 1560225 - DNA, 15 bp, Homo sapiens
gaaggatgcctgtac

SEQ ID NO: 1560226 - DNA, 15 bp, Homo sapiens
tgaaggatgcctgta

SEQ ID NO: 1560227 - DNA, 15 bp, Homo sapiens
gtgaaggatgcctgt

SEQ ID NO: 1560228 - DNA, 15 bp, Homo sapiens
ggtgaaggatgcctg

SEQ ID NO: 1560229 - DNA, 15 bp, Homo sapiens
aggtgaaggatgcct

SEQ ID NO: 1560230 - DNA, 15 bp, Homo sapiens
caggtgaaggatgcc

SEQ ID NO: 1560231 - DNA, 15 bp, Homo sapiens
gcaggtgaaggatgc

SEQ ID NO: 1560232 - DNA, 15 bp, Homo sapiens
agcaggtgaaggatg

SEQ ID NO: 1560233 - DNA, 15 bp, Homo sapiens
tagcaggtgaaggat

SEQ ID NO: 1560234 - DNA, 15 bp, Homo sapiens
atagcaggtgaagga

SEQ ID NO: 1560235 - DNA, 15 bp, Homo sapiens
aatagcaggtgaagg

SEQ ID NO: 1560236 - DNA, 15 bp, Homo sapiens
caatagcaggtgaag

SEQ ID NO: 1560237 - DNA, 15 bp, Homo sapiens
acaatagcaggtgaa

SEQ ID NO: 1560238 - DNA, 15 bp, Homo sapiens
aacaatagcaggtga

SEQ ID NO: 1560239 - DNA, 15 bp, Homo sapiens
caacaatagcaggtg

SEQ ID NO: 1560240 - DNA, 15 bp, Homo sapiens
gcaacaatagcaggt

SEQ ID NO: 1560241 - DNA, 15 bp, Homo sapiens
tgcaacaatagcagg

SEQ ID NO: 1560242 - DNA, 15 bp, Homo sapiens
ttgcaacaatagcag

SEQ ID NO: 1560243 - DNA, 15 bp, Homo sapiens
cttgcaacaatagca

SEQ ID NO: 1560244 - DNA, 15 bp, Homo sapiens
tcttgcaacaatagc

SEQ ID NO: 1560245 - DNA, 15 bp, Homo sapiens
ttcttgcaacaatag

SEQ ID NO: 1560246 - DNA, 15 bp, Homo sapiens
gttcttgcaacaata

SEQ ID NO: 1560247 - DNA, 15 bp, Homo sapiens
tgttcttgcaacaat

SEQ ID NO: 1560248 - DNA, 15 bp, Homo sapiens
ctgttcttgcaacaa

SEQ ID NO: 1560249 - DNA, 15 bp, Homo sapiens
actgttcttgcaaca

SEQ ID NO: 1560250 - DNA, 15 bp, Homo sapiens
gactgttcttgcaac

SEQ ID NO: 1560251 - DNA, 15 bp, Homo sapiens
tgactgttcttgcaa

SEQ ID NO: 1560252 - DNA, 15 bp, Homo sapiens
ctgactgttcttgca

SEQ ID NO: 1560253 - DNA, 15 bp, Homo sapiens
tctgactgttcttgc

SEQ ID NO: 1560254 - DNA, 15 bp, Homo sapiens
ttctgactgttcttg

SEQ ID NO: 1560255 - DNA, 15 bp, Homo sapiens
attctgactgttctt

SEQ ID NO: 1560256 - DNA, 15 bp, Homo sapiens
aattctgactgttct

SEQ ID NO: 1560257 - DNA, 15 bp, Homo sapiens
aaattctgactgttc

SEQ ID NO: 1560258 - DNA, 15 bp, Homo sapiens
aaaattctgactgtt

SEQ ID NO: 1560259 - DNA, 15 bp, Homo sapiens
taaaattctgactgt

SEQ ID NO: 1560260 - DNA, 15 bp, Homo sapiens
gtaaaattctgactg

SEQ ID NO: 1560261 - DNA, 15 bp, Homo sapiens
tgtaaaattctgact

SEQ ID NO: 1560262 - DNA, 15 bp, Homo sapiens
atgtaaaattctgac

SEQ ID NO: 1560263 - DNA, 15 bp, Homo sapiens
tatgtaaaattctga

SEQ ID NO: 1560264 - DNA, 15 bp, Homo sapiens
gtatgtaaaattctg

SEQ ID NO: 1560265 - DNA, 15 bp, Homo sapiens
tgtatgtaaaattct

SEQ ID NO: 1560266 - DNA, 15 bp, Homo sapiens
gtgtatgtaaaattc

SEQ ID NO: 1560267 - DNA, 15 bp, Homo sapiens
agtgtatgtaaaatt

SEQ ID NO: 1560268 - DNA, 15 bp, Homo sapiens
tagtgtatgtaaaat

SEQ ID NO: 1560269 - DNA, 15 bp, Homo sapiens
gtagtgtatgtaaaa

SEQ ID NO: 1560270 - DNA, 15 bp, Homo sapiens
agtagtgtatgtaaa

SEQ ID NO: 1560271 - DNA, 15 bp, Homo sapiens
tagtagtgtatgtaa

SEQ ID NO: 1560272 - DNA, 15 bp, Homo sapiens
ttagtagtgtatgta

SEQ ID NO: 1560273 - DNA, 15 bp, Homo sapiens
gttagtagtgtatgt

SEQ ID NO: 1560274 - DNA, 15 bp, Homo sapiens
agttagtagtgtatg

SEQ ID NO: 1560275 - DNA, 15 bp, Homo sapiens
gagttagtagtgtat

SEQ ID NO: 1560276 - DNA, 15 bp, Homo sapiens
agagttagtagtgta

SEQ ID NO: 1560277 - DNA, 15 bp, Homo sapiens
cagagttagtagtgt

SEQ ID NO: 1560278 - DNA, 15 bp, Homo sapiens
ccagagttagtagtg

SEQ ID NO: 1560279 - DNA, 15 bp, Homo sapiens
accagagttagtagt

SEQ ID NO: 1560280 - DNA, 15 bp, Homo sapiens
aaccagagttagtag

SEQ ID NO: 1560281 - DNA, 15 bp, Homo sapiens
taaccagagttagta

SEQ ID NO: 1560282 - DNA, 15 bp, Homo sapiens
ttaaccagagttagt

SEQ ID NO: 1560283 - DNA, 15 bp, Homo sapiens
gttaaccagagttag

SEQ ID NO: 1560284 - DNA, 15 bp, Homo sapiens
tgttaaccagagtta

SEQ ID NO: 1560285 - DNA, 15 bp, Homo sapiens
ttgttaaccagagtt

SEQ ID NO: 1560286 - DNA, 15 bp, Homo sapiens
tttgttaaccagagt

SEQ ID NO: 1560287 - DNA, 15 bp, Homo sapiens
gtttgttaaccagag

SEQ ID NO: 1560288 - DNA, 15 bp, Homo sapiens
tgtttgttaaccaga

SEQ ID NO: 1560289 - DNA, 15 bp, Homo sapiens
gtgtttgttaaccag

SEQ ID NO: 1560290 - DNA, 15 bp, Homo sapiens
tgtgtttgttaacca

SEQ ID NO: 1560291 - DNA, 15 bp, Homo sapiens
ctgtgtttgttaacc

SEQ ID NO: 1560292 - DNA, 15 bp, Homo sapiens
tctgtgtttgttaac

SEQ ID NO: 1560293 - DNA, 15 bp, Homo sapiens
ttctgtgtttgttaa

SEQ ID NO: 1560294 - DNA, 15 bp, Homo sapiens
tttctgtgtttgtta

SEQ ID NO: 1560295 - DNA, 15 bp, Homo sapiens
atttctgtgtttgtt

SEQ ID NO: 1560296 - DNA, 15 bp, Homo sapiens
aatttctgtgtttgt

SEQ ID NO: 1560297 - DNA, 15 bp, Homo sapiens
caatttctgtgtttg

SEQ ID NO: 1560298 - DNA, 15 bp, Homo sapiens
acaatttctgtgttt

SEQ ID NO: 1560299 - DNA, 15 bp, Homo sapiens
cacaatttctgtgtt

SEQ ID NO: 1560300 - DNA, 15 bp, Homo sapiens
tcacaatttctgtgt

SEQ ID NO: 1560301 - DNA, 15 bp, Homo sapiens
gtcacaatttctgtg

SEQ ID NO: 1560302 - DNA, 15 bp, Homo sapiens
tgtcacaatttctgt

SEQ ID NO: 1560303 - DNA, 15 bp, Homo sapiens
ttgtcacaatttctg

SEQ ID NO: 1560304 - DNA, 15 bp, Homo sapiens
tttgtcacaatttct

SEQ ID NO: 1560305 - DNA, 15 bp, Homo sapiens
atttgtcacaatttc

SEQ ID NO: 1560306 - DNA, 15 bp, Homo sapiens
aatttgtcacaattt

SEQ ID NO: 1560307 - DNA, 15 bp, Homo sapiens
aaatttgtcacaatt

SEQ ID NO: 1560308 - DNA, 15 bp, Homo sapiens
caaatttgtcacaat

SEQ ID NO: 1560309 - DNA, 15 bp, Homo sapiens
tcaaatttgtcacaa

SEQ ID NO: 1560310 - DNA, 15 bp, Homo sapiens
ttcaaatttgtcaca

SEQ ID NO: 1560311 - DNA, 15 bp, Homo sapiens
cttcaaatttgtcac

SEQ ID NO: 1560312 - DNA, 15 bp, Homo sapiens
acttcaaatttgtca

SEQ ID NO: 1560313 - DNA, 15 bp, Homo sapiens
cacttcaaatttgtc

SEQ ID NO: 1560314 - DNA, 15 bp, Homo sapiens
tcacttcaaatttgt

SEQ ID NO: 1560315 - DNA, 15 bp, Homo sapiens
ttcacttcaaatttg

SEQ ID NO: 1560316 - DNA, 15 bp, Homo sapiens
attcacttcaaattt

SEQ ID NO: 1560317 - DNA, 15 bp, Homo sapiens
tattcacttcaaatt

SEQ ID NO: 1560318 - DNA, 15 bp, Homo sapiens
gtattcacttcaaat

SEQ ID NO: 1560319 - DNA, 15 bp, Homo sapiens
tgtattcacttcaaa

SEQ ID NO: 1560320 - DNA, 15 bp, Homo sapiens
gtgtattcacttcaa

SEQ ID NO: 1560321 - DNA, 15 bp, Homo sapiens
tgtgtattcacttca

SEQ ID NO: 1560322 - DNA, 15 bp, Homo sapiens
ctgtgtattcacttc

SEQ ID NO: 1560323 - DNA, 15 bp, Homo sapiens
tctgtgtattcactt

SEQ ID NO: 1560324 - DNA, 15 bp, Homo sapiens
ctctgtgtattcact

SEQ ID NO: 1560325 - DNA, 15 bp, Homo sapiens
gctctgtgtattcac

SEQ ID NO: 1560326 - DNA, 15 bp, Homo sapiens
cgctctgtgtattca

SEQ ID NO: 1560327 - DNA, 15 bp, Homo sapiens
acgctctgtgtattc

SEQ ID NO: 1560328 - DNA, 15 bp, Homo sapiens
cacgctctgtgtatt

SEQ ID NO: 1560329 - DNA, 15 bp, Homo sapiens
ccacgctctgtgtat

SEQ ID NO: 1560330 - DNA, 15 bp, Homo sapiens
gccacgctctgtgta

SEQ ID NO: 1560331 - DNA, 15 bp, Homo sapiens
ggccacgctctgtgt

SEQ ID NO: 1560332 - DNA, 15 bp, Homo sapiens
aggccacgctctgtg

SEQ ID NO: 1560333 - DNA, 15 bp, Homo sapiens
taggccacgctctgt

SEQ ID NO: 1560334 - DNA, 15 bp, Homo sapiens
gtaggccacgctctg

SEQ ID NO: 1560335 - DNA, 15 bp, Homo sapiens
agtaggccacgctct

SEQ ID NO: 1560336 - DNA, 15 bp, Homo sapiens
aagtaggccacgctc

SEQ ID NO: 1560337 - DNA, 15 bp, Homo sapiens
taagtaggccacgct

SEQ ID NO: 1560338 - DNA, 15 bp, Homo sapiens
ctaagtaggccacgc

SEQ ID NO: 1560339 - DNA, 15 bp, Homo sapiens
gctaagtaggccacg

SEQ ID NO: 1560340 - DNA, 15 bp, Homo sapiens
tgctaagtaggccac

SEQ ID NO: 1560341 - DNA, 15 bp, Homo sapiens
ctgctaagtaggcca

SEQ ID NO: 1560342 - DNA, 15 bp, Homo sapiens
cctgctaagtaggcc

SEQ ID NO: 1560343 - DNA, 15 bp, Homo sapiens
acctgctaagtaggc

SEQ ID NO: 1560344 - DNA, 15 bp, Homo sapiens
tacctgctaagtagg

SEQ ID NO: 1560345 - DNA, 15 bp, Homo sapiens
ttacctgctaagtag

SEQ ID NO: 1560346 - DNA, 15 bp, Homo sapiens
tttacctgctaagta

SEQ ID NO: 1560347 - DNA, 15 bp, Homo sapiens
ttttacctgctaagt

SEQ ID NO: 1560348 - DNA, 15 bp, Homo sapiens
tttttacctgctaag

SEQ ID NO: 1560349 - DNA, 15 bp, Homo sapiens
gtttttacctgctaa

SEQ ID NO: 1560350 - DNA, 15 bp, Homo sapiens
tgtttttacctgcta

SEQ ID NO: 1560351 - DNA, 15 bp, Homo sapiens
gtgtttttacctgct

SEQ ID NO: 1560352 - DNA, 15 bp, Homo sapiens
tgtgtttttacctgc

SEQ ID NO: 1560353 - DNA, 15 bp, Homo sapiens
ttgtgtttttacctg

SEQ ID NO: 1560354 - DNA, 15 bp, Homo sapiens
tttgtgtttttacct

SEQ ID NO: 1560355 - DNA, 15 bp, Homo sapiens
ttttgtgtttttacc

SEQ ID NO: 1560356 - DNA, 15 bp, Homo sapiens
attttgtgtttttac

SEQ ID NO: 1560357 - DNA, 15 bp, Homo sapiens
gtttattttgtgttt

SEQ ID NO: 1560358 - DNA, 15 bp, Homo sapiens
tgtttattttgtgtt

SEQ ID NO: 1560359 - DNA, 15 bp, Homo sapiens
ttgtttattttgtgt

SEQ ID NO: 1560360 - DNA, 15 bp, Homo sapiens
tttgtttattttgtg

SEQ ID NO: 1560361 - DNA, 15 bp, Homo sapiens
ttttgtttattttgt

SEQ ID NO: 1560362 - DNA, 15 bp, Homo sapiens
attttgtttattttg

SEQ ID NO: 1560363 - DNA, 15 bp, Homo sapiens
aattttgtttatttt

SEQ ID NO: 1560364 - DNA, 15 bp, Homo sapiens
taattttgtttattt

SEQ ID NO: 1560365 - DNA, 15 bp, Homo sapiens
ttaattttgtttatt

SEQ ID NO: 1560366 - DNA, 15 bp, Homo sapiens
attaattttgtttat

SEQ ID NO: 1560367 - DNA, 15 bp, Homo sapiens
gattaattttgttta

SEQ ID NO: 1560368 - DNA, 15 bp, Homo sapiens
agattaattttgttt

SEQ ID NO: 1560369 - DNA, 15 bp, Homo sapiens
aagattaattttgtt

SEQ ID NO: 1560370 - DNA, 15 bp, Homo sapiens
caagattaattttgt

SEQ ID NO: 1560371 - DNA, 15 bp, Homo sapiens
gcaagattaattttg

SEQ ID NO: 1560372 - DNA, 15 bp, Homo sapiens
agcaagattaatttt

SEQ ID NO: 1560373 - DNA, 15 bp, Homo sapiens
tagcaagattaattt

SEQ ID NO: 1560374 - DNA, 15 bp, Homo sapiens
gtagcaagattaatt

SEQ ID NO: 1560375 - DNA, 15 bp, Homo sapiens
tgtagcaagattaat

SEQ ID NO: 1560376 - DNA, 15 bp, Homo sapiens
atgtagcaagattaa

SEQ ID NO: 1560377 - DNA, 15 bp, Homo sapiens
gatgtagcaagatta

SEQ ID NO: 1560378 - DNA, 15 bp, Homo sapiens
agatgtagcaagatt

SEQ ID NO: 1560379 - DNA, 15 bp, Homo sapiens
tagatgtagcaagat

SEQ ID NO: 1560380 - DNA, 15 bp, Homo sapiens
atagatgtagcaaga

SEQ ID NO: 1560381 - DNA, 15 bp, Homo sapiens
tatagatgtagcaag

SEQ ID NO: 1560382 - DNA, 15 bp, Homo sapiens
atatagatgtagcaa

SEQ ID NO: 1560383 - DNA, 15 bp, Homo sapiens
tatatagatgtagca

SEQ ID NO: 1560384 - DNA, 15 bp, Homo sapiens
atatatagatgtagc

SEQ ID NO: 1560385 - DNA, 15 bp, Homo sapiens
tatatatagatgtag

SEQ ID NO: 1560386 - DNA, 15 bp, Homo sapiens
ttatatatagatgta

SEQ ID NO: 1560387 - DNA, 15 bp, Homo sapiens
cttatatatagatgt

SEQ ID NO: 1560388 - DNA, 15 bp, Homo sapiens
ccttatatatagatg

SEQ ID NO: 1560389 - DNA, 15 bp, Homo sapiens
tccttatatatagat

SEQ ID NO: 1560390 - DNA, 15 bp, Homo sapiens
atccttatatataga

SEQ ID NO: 1560391 - DNA, 15 bp, Homo sapiens
gatccttatatatag

SEQ ID NO: 1560392 - DNA, 15 bp, Homo sapiens
tgatccttatatata

SEQ ID NO: 1560393 - DNA, 15 bp, Homo sapiens
gtgatccttatatat

SEQ ID NO: 1560394 - DNA, 15 bp, Homo sapiens
ggtgatccttatata

SEQ ID NO: 1560395 - DNA, 15 bp, Homo sapiens
gggtgatccttatat

SEQ ID NO: 1560396 - DNA, 15 bp, Homo sapiens
tgggtgatccttata

SEQ ID NO: 1560397 - DNA, 15 bp, Homo sapiens
ttgggtgatccttat

SEQ ID NO: 1560398 - DNA, 15 bp, Homo sapiens
tttgggtgatcctta

SEQ ID NO: 1560399 - DNA, 15 bp, Homo sapiens
ttttgggtgatcctt

SEQ ID NO: 1560400 - DNA, 15 bp, Homo sapiens
tttttgggtgatcct

SEQ ID NO: 1560401 - DNA, 15 bp, Homo sapiens
ctttttgggtgatcc

SEQ ID NO: 1560402 - DNA, 15 bp, Homo sapiens
actttttgggtgatc

SEQ ID NO: 1560403 - DNA, 15 bp, Homo sapiens
tactttttgggtgat

SEQ ID NO: 1560404 - DNA, 15 bp, Homo sapiens
gtactttttgggtga

SEQ ID NO: 1560405 - DNA, 15 bp, Homo sapiens
tgtactttttgggtg

SEQ ID NO: 1560406 - DNA, 15 bp, Homo sapiens
ttgtactttttgggt

SEQ ID NO: 1560407 - DNA, 15 bp, Homo sapiens
tttgtactttttggg

SEQ ID NO: 1560408 - DNA, 15 bp, Homo sapiens
atttgtactttttgg

SEQ ID NO: 1560409 - DNA, 15 bp, Homo sapiens
tatttgtactttttg

SEQ ID NO: 1560410 - DNA, 15 bp, Homo sapiens
gtatttgtacttttt

SEQ ID NO: 1560411 - DNA, 15 bp, Homo sapiens
ggtatttgtactttt

SEQ ID NO: 1560412 - DNA, 15 bp, Homo sapiens
aggtatttgtacttt

SEQ ID NO: 1560413 - DNA, 15 bp, Homo sapiens
taggtatttgtactt

SEQ ID NO: 1560414 - DNA, 15 bp, Homo sapiens
ataggtatttgtact

SEQ ID NO: 1560415 - DNA, 15 bp, Homo sapiens
tataggtatttgtac

SEQ ID NO: 1560416 - DNA, 15 bp, Homo sapiens
ctataggtatttgta

SEQ ID NO: 1560417 - DNA, 15 bp, Homo sapiens
cctataggtatttgt

SEQ ID NO: 1560418 - DNA, 15 bp, Homo sapiens
acctataggtatttg

SEQ ID NO: 1560419 - DNA, 15 bp, Homo sapiens
aacctataggtattt

SEQ ID NO: 1560420 - DNA, 15 bp, Homo sapiens
aaacctataggtatt

SEQ ID NO: 1560421 - DNA, 15 bp, Homo sapiens
aaaacctataggtat

SEQ ID NO: 1560422 - DNA, 15 bp, Homo sapiens
aaaaacctataggta

SEQ ID NO: 1560423 - DNA, 15 bp, Homo sapiens
aaaaaacctataggt

SEQ ID NO: 1560424 - DNA, 15 bp, Homo sapiens
caaaaaacctatagg

SEQ ID NO: 1560425 - DNA, 15 bp, Homo sapiens
ccaaaaaacctatag

SEQ ID NO: 1560426 - DNA, 15 bp, Homo sapiens
gccaaaaaacctata

SEQ ID NO: 1560427 - DNA, 15 bp, Homo sapiens
cgccaaaaaacctat

SEQ ID NO: 1560428 - DNA, 15 bp, Homo sapiens
ccgccaaaaaaccta

SEQ ID NO: 1560429 - DNA, 15 bp, Homo sapiens
accgccaaaaaacct

SEQ ID NO: 1560430 - DNA, 15 bp, Homo sapiens
aaccgccaaaaaacc

SEQ ID NO: 1560431 - DNA, 15 bp, Homo sapiens
caaccgccaaaaaac

SEQ ID NO: 1560432 - DNA, 15 bp, Homo sapiens
gcaaccgccaaaaaa

SEQ ID NO: 1560433 - DNA, 15 bp, Homo sapiens
cgcaaccgccaaaaa

SEQ ID NO: 1560434 - DNA, 15 bp, Homo sapiens
acgcaaccgccaaaa

SEQ ID NO: 1560435 - DNA, 15 bp, Homo sapiens
cacgcaaccgccaaa

SEQ ID NO: 1560436 - DNA, 15 bp, Homo sapiens
ccacgcaaccgccaa

SEQ ID NO: 1560437 - DNA, 15 bp, Homo sapiens
gccacgcaaccgcca

SEQ ID NO: 1560438 - DNA, 15 bp, Homo sapiens
tgccacgcaaccgcc

SEQ ID NO: 1560439 - DNA, 15 bp, Homo sapiens
ctgccacgcaaccgc

SEQ ID NO: 1560440 - DNA, 15 bp, Homo sapiens
tctgccacgcaaccg

SEQ ID NO: 1560441 - DNA, 15 bp, Homo sapiens
ctctgccacgcaacc

SEQ ID NO: 1560442 - DNA, 15 bp, Homo sapiens
gctctgccacgcaac

SEQ ID NO: 1560443 - DNA, 15 bp, Homo sapiens
tgctctgccacgcaa

SEQ ID NO: 1560444 - DNA, 15 bp, Homo sapiens
ctgctctgccacgca

SEQ ID NO: 1560445 - DNA, 15 bp, Homo sapiens
tctgctctgccacgc

SEQ ID NO: 1560446 - DNA, 15 bp, Homo sapiens
ttctgctctgccacg

SEQ ID NO: 1560447 - DNA, 15 bp, Homo sapiens
tttctgctctgccac

SEQ ID NO: 1560448 - DNA, 15 bp, Homo sapiens
ctttctgctctgcca

SEQ ID NO: 1560449 - DNA, 15 bp, Homo sapiens
actttctgctctgcc

SEQ ID NO: 1560450 - DNA, 15 bp, Homo sapiens
aactttctgctctgc

SEQ ID NO: 1560451 - DNA, 15 bp, Homo sapiens
gaactttctgctctg

SEQ ID NO: 1560452 - DNA, 15 bp, Homo sapiens
tgaactttctgctct

SEQ ID NO: 1560453 - DNA, 15 bp, Homo sapiens
gtgaactttctgctc

SEQ ID NO: 1560454 - DNA, 15 bp, Homo sapiens
tgtgaactttctgct

SEQ ID NO: 1560455 - DNA, 15 bp, Homo sapiens
ctgtgaactttctgc

SEQ ID NO: 1560456 - DNA, 15 bp, Homo sapiens
actgtgaactttctg

SEQ ID NO: 1560457 - DNA, 15 bp, Homo sapiens
gactgtgaactttct

SEQ ID NO: 1560458 - DNA, 15 bp, Homo sapiens
agactgtgaactttc

SEQ ID NO: 1560459 - DNA, 15 bp, Homo sapiens
tagactgtgaacttt

SEQ ID NO: 1560460 - DNA, 15 bp, Homo sapiens
ctagactgtgaactt

SEQ ID NO: 1560461 - DNA, 15 bp, Homo sapiens
actagactgtgaact

SEQ ID NO: 1560462 - DNA, 15 bp, Homo sapiens
gactagactgtgaac

SEQ ID NO: 1560463 - DNA, 15 bp, Homo sapiens
ggactagactgtgaa

SEQ ID NO: 1560464 - DNA, 15 bp, Homo sapiens
aggactagactgtga

SEQ ID NO: 1560465 - DNA, 15 bp, Homo sapiens
aaggactagactgtg

SEQ ID NO: 1560466 - DNA, 15 bp, Homo sapiens
ctaaaggactagact

SEQ ID NO: 1560467 - DNA, 15 bp, Homo sapiens
actaaaggactagac

SEQ ID NO: 1560468 - DNA, 15 bp, Homo sapiens
cactaaaggactaga

SEQ ID NO: 1560469 - DNA, 15 bp, Homo sapiens
ccactaaaggactag

SEQ ID NO: 1560470 - DNA, 15 bp, Homo sapiens
accactaaaggacta

SEQ ID NO: 1560471 - DNA, 15 bp, Homo sapiens
caccactaaaggact

SEQ ID NO: 1560472 - DNA, 15 bp, Homo sapiens
ccaccactaaaggac

SEQ ID NO: 1560473 - DNA, 15 bp, Homo sapiens
accaccactaaagga

SEQ ID NO: 1560474 - DNA, 15 bp, Homo sapiens
aaccaccactaaagg

SEQ ID NO: 1560475 - DNA, 15 bp, Homo sapiens
taaccaccactaaag

SEQ ID NO: 1560476 - DNA, 15 bp, Homo sapiens
gtaaccaccactaaa

SEQ ID NO: 1560477 - DNA, 15 bp, Homo sapiens
tgtaaccaccactaa

SEQ ID NO: 1560478 - DNA, 15 bp, Homo sapiens
ttgtaaccaccacta

SEQ ID NO: 1560479 - DNA, 15 bp, Homo sapiens
attgtaaccaccact

SEQ ID NO: 1560480 - DNA, 15 bp, Homo sapiens
aattgtaaccaccac

SEQ ID NO: 1560481 - DNA, 15 bp, Homo sapiens
aaattgtaaccacca

SEQ ID NO: 1560482 - DNA, 15 bp, Homo sapiens
aaaattgtaaccacc

SEQ ID NO: 1560483 - DNA, 15 bp, Homo sapiens
caaaattgtaaccac

SEQ ID NO: 1560484 - DNA, 15 bp, Homo sapiens
tcaaaattgtaacca

SEQ ID NO: 1560485 - DNA, 15 bp, Homo sapiens
ctcaaaattgtaacc

SEQ ID NO: 1560486 - DNA, 15 bp, Homo sapiens
tctcaaaattgtaac

SEQ ID NO: 1560487 - DNA, 15 bp, Homo sapiens
ctctcaaaattgtaa

SEQ ID NO: 1560488 - DNA, 15 bp, Homo sapiens
actctcaaaattgta

SEQ ID NO: 1560489 - DNA, 15 bp, Homo sapiens
aactctcaaaattgt

SEQ ID NO: 1560490 - DNA, 15 bp, Homo sapiens
aaactctcaaaattg

SEQ ID NO: 1560491 - DNA, 15 bp, Homo sapiens
aaaactctcaaaatt

SEQ ID NO: 1560492 - DNA, 15 bp, Homo sapiens
caaaactctcaaaat

SEQ ID NO: 1560493 - DNA, 15 bp, Homo sapiens
gcaaaactctcaaaa

SEQ ID NO: 1560494 - DNA, 15 bp, Homo sapiens
ggcaaaactctcaaa

SEQ ID NO: 1560495 - DNA, 15 bp, Homo sapiens
tggcaaaactctcaa

SEQ ID NO: 1560496 - DNA, 15 bp, Homo sapiens
ctggcaaaactctca

SEQ ID NO: 1560497 - DNA, 15 bp, Homo sapiens
tctggcaaaactctc

SEQ ID NO: 1560498 - DNA, 15 bp, Homo sapiens
ttctggcaaaactct

SEQ ID NO: 1560499 - DNA, 15 bp, Homo sapiens
gttctggcaaaactc

SEQ ID NO: 1560500 - DNA, 15 bp, Homo sapiens
tgttctggcaaaact

SEQ ID NO: 1560501 - DNA, 15 bp, Homo sapiens
atgttctggcaaaac

SEQ ID NO: 1560502 - DNA, 15 bp, Homo sapiens
aatgttctggcaaaa

SEQ ID NO: 1560503 - DNA, 15 bp, Homo sapiens
aaatgttctggcaaa

SEQ ID NO: 1560504 - DNA, 15 bp, Homo sapiens
aaaatgttctggcaa

SEQ ID NO: 1560505 - DNA, 15 bp, Homo sapiens
aaaaatgttctggca

SEQ ID NO: 1560506 - DNA, 15 bp, Homo sapiens
gaaaaatgttctggc

SEQ ID NO: 1560507 - DNA, 15 bp, Homo sapiens
agaaaaatgttctgg

SEQ ID NO: 1560508 - DNA, 15 bp, Homo sapiens
cagaaaaatgttctg

SEQ ID NO: 1560509 - DNA, 15 bp, Homo sapiens
acagaaaaatgttct

SEQ ID NO: 1560510 - DNA, 15 bp, Homo sapiens
tacagaaaaatgttc

SEQ ID NO: 1560511 - DNA, 15 bp, Homo sapiens
ctacagaaaaatgtt

SEQ ID NO: 1560512 - DNA, 15 bp, Homo sapiens
cctacagaaaaatgt

SEQ ID NO: 1560513 - DNA, 15 bp, Homo sapiens
tcctacagaaaaatg

SEQ ID NO: 1560514 - DNA, 15 bp, Homo sapiens
ttcctacagaaaaat

SEQ ID NO: 1560515 - DNA, 15 bp, Homo sapiens
tttcctacagaaaaa

SEQ ID NO: 1560516 - DNA, 15 bp, Homo sapiens
tttttcctacagaaa

SEQ ID NO: 1560517 - DNA, 15 bp, Homo sapiens
ttttttcctacagaa

SEQ ID NO: 1560518 - DNA, 15 bp, Homo sapiens
attttttcctacaga

SEQ ID NO: 1560519 - DNA, 15 bp, Homo sapiens
aattttttcctacag

SEQ ID NO: 1560520 - DNA, 15 bp, Homo sapiens
aaattttttcctaca

SEQ ID NO: 1560521 - DNA, 15 bp, Homo sapiens
taaattttttcctac

SEQ ID NO: 1560522 - DNA, 15 bp, Homo sapiens
ttaaattttttccta

SEQ ID NO: 1560523 - DNA, 15 bp, Homo sapiens
attaaattttttcct

SEQ ID NO: 1560524 - DNA, 15 bp, Homo sapiens
aattaaattttttcc

SEQ ID NO: 1560525 - DNA, 15 bp, Homo sapiens
gaattaaattttttc

SEQ ID NO: 1560526 - DNA, 15 bp, Homo sapiens
ggaattaaatttttt

SEQ ID NO: 1560527 - DNA, 15 bp, Homo sapiens
gggaattaaattttt

SEQ ID NO: 1560528 - DNA, 15 bp, Homo sapiens
tgggaattaaatttt

SEQ ID NO: 1560529 - DNA, 15 bp, Homo sapiens
atgggaattaaattt

SEQ ID NO: 1560530 - DNA, 15 bp, Homo sapiens
aatgggaattaaatt

SEQ ID NO: 1560531 - DNA, 15 bp, Homo sapiens
taatgggaattaaat

SEQ ID NO: 1560532 - DNA, 15 bp, Homo sapiens
ttaatgggaattaaa

SEQ ID NO: 1560533 - DNA, 15 bp, Homo sapiens
tttaatgggaattaa

SEQ ID NO: 1560534 - DNA, 15 bp, Homo sapiens
ttttaatgggaatta

SEQ ID NO: 1560535 - DNA, 15 bp, Homo sapiens
attttaatgggaatt

SEQ ID NO: 1560536 - DNA, 15 bp, Homo sapiens
gattttaatgggaat

SEQ ID NO: 1560537 - DNA, 15 bp, Homo sapiens
agattttaatgggaa

SEQ ID NO: 1560538 - DNA, 15 bp, Homo sapiens
cagattttaatggga

SEQ ID NO: 1560539 - DNA, 15 bp, Homo sapiens
tcagattttaatggg

SEQ ID NO: 1560540 - DNA, 15 bp, Homo sapiens
ttcagattttaatgg

SEQ ID NO: 1560541 - DNA, 15 bp, Homo sapiens
tttcagattttaatg

SEQ ID NO: 1560542 - DNA, 15 bp, Homo sapiens
atttcagattttaat

SEQ ID NO: 1560543 - DNA, 15 bp, Homo sapiens
catttcagattttaa

SEQ ID NO: 1560544 - DNA, 15 bp, Homo sapiens
acatttcagatttta

SEQ ID NO: 1560545 - DNA, 15 bp, Homo sapiens
cacatttcagatttt

SEQ ID NO: 1560546 - DNA, 15 bp, Homo sapiens
acacatttcagattt

SEQ ID NO: 1560547 - DNA, 15 bp, Homo sapiens
aacacatttcagatt

SEQ ID NO: 1560548 - DNA, 15 bp, Homo sapiens
gaacacatttcagat

SEQ ID NO: 1560549 - DNA, 15 bp, Homo sapiens
ggaacacatttcaga

SEQ ID NO: 1560550 - DNA, 15 bp, Homo sapiens
gggaacacatttcag

SEQ ID NO: 1560551 - DNA, 15 bp, Homo sapiens
agggaacacatttca

SEQ ID NO: 1560552 - DNA, 15 bp, Homo sapiens
aagggaacacatttc

SEQ ID NO: 1560553 - DNA, 15 bp, Homo sapiens
caagggaacacattt

SEQ ID NO: 1560554 - DNA, 15 bp, Homo sapiens
ccaagggaacacatt

SEQ ID NO: 1560555 - DNA, 15 bp, Homo sapiens
accaagggaacacat

SEQ ID NO: 1560556 - DNA, 15 bp, Homo sapiens
gaccaagggaacaca

SEQ ID NO: 1560557 - DNA, 15 bp, Homo sapiens
tgaccaagggaacac

SEQ ID NO: 1560558 - DNA, 15 bp, Homo sapiens
atgaccaagggaaca

SEQ ID NO: 1560559 - DNA, 15 bp, Homo sapiens
gatgaccaagggaac

SEQ ID NO: 1560560 - DNA, 15 bp, Homo sapiens
agatgaccaagggaa

SEQ ID NO: 1560561 - DNA, 15 bp, Homo sapiens
aagatgaccaaggga

SEQ ID NO: 1560562 - DNA, 15 bp, Homo sapiens
aaagatgaccaaggg

SEQ ID NO: 1560563 - DNA, 15 bp, Homo sapiens
caaagatgaccaagg

SEQ ID NO: 1560564 - DNA, 15 bp, Homo sapiens
ccaaagatgaccaag

SEQ ID NO: 1560565 - DNA, 15 bp, Homo sapiens
accaaagatgaccaa

SEQ ID NO: 1560566 - DNA, 15 bp, Homo sapiens
aaccaaagatgacca

SEQ ID NO: 1560567 - DNA, 15 bp, Homo sapiens
gaaccaaagatgacc

SEQ ID NO: 1560568 - DNA, 15 bp, Homo sapiens
tgaaccaaagatgac

SEQ ID NO: 1560569 - DNA, 15 bp, Homo sapiens
ttgaaccaaagatga

SEQ ID NO: 1560570 - DNA, 15 bp, Homo sapiens
cttgaaccaaagatg

SEQ ID NO: 1560571 - DNA, 15 bp, Homo sapiens
tcttgaaccaaagat

SEQ ID NO: 1560572 - DNA, 15 bp, Homo sapiens
gtcttgaaccaaaga

SEQ ID NO: 1560573 - DNA, 15 bp, Homo sapiens
tgtcttgaaccaaag

SEQ ID NO: 1560574 - DNA, 15 bp, Homo sapiens
gtgtcttgaaccaaa

SEQ ID NO: 1560575 - DNA, 15 bp, Homo sapiens
agtgtcttgaaccaa

SEQ ID NO: 1560576 - DNA, 15 bp, Homo sapiens
tagtgtcttgaacca

SEQ ID NO: 1560577 - DNA, 15 bp, Homo sapiens
gtagtgtcttgaacc

SEQ ID NO: 1560578 - DNA, 15 bp, Homo sapiens
tgtagtgtcttgaac

SEQ ID NO: 1560579 - DNA, 15 bp, Homo sapiens
ctgtagtgtcttgaa

SEQ ID NO: 1560580 - DNA, 15 bp, Homo sapiens
actgtagtgtcttga

SEQ ID NO: 1560581 - DNA, 15 bp, Homo sapiens
cactgtagtgtcttg

SEQ ID NO: 1560582 - DNA, 15 bp, Homo sapiens
ccactgtagtgtctt

SEQ ID NO: 1560583 - DNA, 15 bp, Homo sapiens
gccactgtagtgtct

SEQ ID NO: 1560584 - DNA, 15 bp, Homo sapiens
agccactgtagtgtc

SEQ ID NO: 1560585 - DNA, 15 bp, Homo sapiens
gagccactgtagtgt

SEQ ID NO: 1560586 - DNA, 15 bp, Homo sapiens
agagccactgtagtg

SEQ ID NO: 1560587 - DNA, 15 bp, Homo sapiens
gagagccactgtagt

SEQ ID NO: 1560588 - DNA, 15 bp, Homo sapiens
agagagccactgtag

SEQ ID NO: 1560589 - DNA, 15 bp, Homo sapiens
cagagagccactgta

SEQ ID NO: 1560590 - DNA, 15 bp, Homo sapiens
acagagagccactgt

SEQ ID NO: 1560591 - DNA, 15 bp, Homo sapiens
aacagagagccactg

SEQ ID NO: 1560592 - DNA, 15 bp, Homo sapiens
taacagagagccact

SEQ ID NO: 1560593 - DNA, 15 bp, Homo sapiens
ataacagagagccac

SEQ ID NO: 1560594 - DNA, 15 bp, Homo sapiens
gataacagagagcca

SEQ ID NO: 1560595 - DNA, 15 bp, Homo sapiens
agataacagagagcc

SEQ ID NO: 1560596 - DNA, 15 bp, Homo sapiens
cagataacagagagc

SEQ ID NO: 1560597 - DNA, 15 bp, Homo sapiens
acagataacagagag

SEQ ID NO: 1560598 - DNA, 15 bp, Homo sapiens
gacagataacagaga

SEQ ID NO: 1560599 - DNA, 15 bp, Homo sapiens
tgacagataacagag

SEQ ID NO: 1560600 - DNA, 15 bp, Homo sapiens
atgacagataacaga

SEQ ID NO: 1560601 - DNA, 15 bp, Homo sapiens
tatgacagataacag

SEQ ID NO: 1560602 - DNA, 15 bp, Homo sapiens
ttatgacagataaca

SEQ ID NO: 1560603 - DNA, 15 bp, Homo sapiens
tttatgacagataac

SEQ ID NO: 1560604 - DNA, 15 bp, Homo sapiens
ttttatgacagataa

SEQ ID NO: 1560605 - DNA, 15 bp, Homo sapiens
attttatgacagata

SEQ ID NO: 1560606 - DNA, 15 bp, Homo sapiens
gattttatgacagat

SEQ ID NO: 1560607 - DNA, 15 bp, Homo sapiens
agattttatgacaga

SEQ ID NO: 1560608 - DNA, 15 bp, Homo sapiens
cagattttatgacag

SEQ ID NO: 1560609 - DNA, 15 bp, Homo sapiens
tcagattttatgaca

SEQ ID NO: 1560610 - DNA, 15 bp, Homo sapiens
ttcagattttatgac

SEQ ID NO: 1560611 - DNA, 15 bp, Homo sapiens
attcagattttatga

SEQ ID NO: 1560612 - DNA, 15 bp, Homo sapiens
cattcagattttatg

SEQ ID NO: 1560613 - DNA, 15 bp, Homo sapiens
gcattcagattttat

SEQ ID NO: 1560614 - DNA, 15 bp, Homo sapiens
agcattcagatttta

SEQ ID NO: 1560615 - DNA, 15 bp, Homo sapiens
aagcattcagatttt

SEQ ID NO: 1560616 - DNA, 15 bp, Homo sapiens
gaagcattcagattt

SEQ ID NO: 1560617 - DNA, 15 bp, Homo sapiens
tgaagcattcagatt

SEQ ID NO: 1560618 - DNA, 15 bp, Homo sapiens
ctgaagcattcagat

SEQ ID NO: 1560619 - DNA, 15 bp, Homo sapiens
actgaagcattcaga

SEQ ID NO: 1560620 - DNA, 15 bp, Homo sapiens
gactgaagcattcag

SEQ ID NO: 1560621 - DNA, 15 bp, Homo sapiens
agactgaagcattca

SEQ ID NO: 1560622 - DNA, 15 bp, Homo sapiens
tagactgaagcattc

SEQ ID NO: 1560623 - DNA, 15 bp, Homo sapiens
ctagactgaagcatt

SEQ ID NO: 1560624 - DNA, 15 bp, Homo sapiens
gctagactgaagcat

SEQ ID NO: 1560625 - DNA, 15 bp, Homo sapiens
tgctagactgaagca

SEQ ID NO: 1560626 - DNA, 15 bp, Homo sapiens
gtgctagactgaagc

SEQ ID NO: 1560627 - DNA, 15 bp, Homo sapiens
ggtgctagactgaag

SEQ ID NO: 1560628 - DNA, 15 bp, Homo sapiens
gggtgctagactgaa

SEQ ID NO: 1560629 - DNA, 15 bp, Homo sapiens
agggtgctagactga

SEQ ID NO: 1560630 - DNA, 15 bp, Homo sapiens
cagggtgctagactg

SEQ ID NO: 1560631 - DNA, 15 bp, Homo sapiens
ccagggtgctagact

SEQ ID NO: 1560632 - DNA, 15 bp, Homo sapiens
cccagggtgctagac

SEQ ID NO: 1560633 - DNA, 15 bp, Homo sapiens
acccagggtgctaga

SEQ ID NO: 1560634 - DNA, 15 bp, Homo sapiens
gacccagggtgctag

SEQ ID NO: 1560635 - DNA, 15 bp, Homo sapiens
ggacccagggtgcta

SEQ ID NO: 1560636 - DNA, 15 bp, Homo sapiens
aggacccagggtgct

SEQ ID NO: 1560637 - DNA, 15 bp, Homo sapiens
aaggacccagggtgc

SEQ ID NO: 1560638 - DNA, 15 bp, Homo sapiens
taaggacccagggtg

SEQ ID NO: 1560639 - DNA, 15 bp, Homo sapiens
ttaaggacccagggt

SEQ ID NO: 1560640 - DNA, 15 bp, Homo sapiens
tttaaggacccaggg

SEQ ID NO: 1560641 - DNA, 15 bp, Homo sapiens
atttaaggacccagg

SEQ ID NO: 1560642 - DNA, 15 bp, Homo sapiens
tatttaaggacccag

SEQ ID NO: 1560643 - DNA, 15 bp, Homo sapiens
ctatttaaggaccca

SEQ ID NO: 1560644 - DNA, 15 bp, Homo sapiens
gctatttaaggaccc

SEQ ID NO: 1560645 - DNA, 15 bp, Homo sapiens
ggctatttaaggacc

SEQ ID NO: 1560646 - DNA, 15 bp, Homo sapiens
gggctatttaaggac

SEQ ID NO: 1560647 - DNA, 15 bp, Homo sapiens
agggctatttaagga

SEQ ID NO: 1560648 - DNA, 15 bp, Homo sapiens
gagggctatttaagg

SEQ ID NO: 1560649 - DNA, 15 bp, Homo sapiens
agagggctatttaag

SEQ ID NO: 1560650 - DNA, 15 bp, Homo sapiens
gagagggctatttaa

SEQ ID NO: 1560651 - DNA, 15 bp, Homo sapiens
tgagagggctattta

SEQ ID NO: 1560652 - DNA, 15 bp, Homo sapiens
ctgagagggctattt

SEQ ID NO: 1560653 - DNA, 15 bp, Homo sapiens
actgagagggctatt

SEQ ID NO: 1560654 - DNA, 15 bp, Homo sapiens
aactgagagggctat

SEQ ID NO: 1560655 - DNA, 15 bp, Homo sapiens
gaactgagagggcta

SEQ ID NO: 1560656 - DNA, 15 bp, Homo sapiens
agaactgagagggct

SEQ ID NO: 1560657 - DNA, 15 bp, Homo sapiens
cagaactgagagggc

SEQ ID NO: 1560658 - DNA, 15 bp, Homo sapiens
acagaactgagaggg

SEQ ID NO: 1560659 - DNA, 15 bp, Homo sapiens
aacagaactgagagg

SEQ ID NO: 1560660 - DNA, 15 bp, Homo sapiens
taacagaactgagag

SEQ ID NO: 1560661 - DNA, 15 bp, Homo sapiens
ataacagaactgaga

SEQ ID NO: 1560662 - DNA, 15 bp, Homo sapiens
gataacagaactgag

SEQ ID NO: 1560663 - DNA, 15 bp, Homo sapiens
agataacagaactga

SEQ ID NO: 1560664 - DNA, 15 bp, Homo sapiens
aagataacagaactg

SEQ ID NO: 1560665 - DNA, 15 bp, Homo sapiens
aaagataacagaact

SEQ ID NO: 1560666 - DNA, 15 bp, Homo sapiens
gaaagataacagaac

SEQ ID NO: 1560667 - DNA, 15 bp, Homo sapiens
agaaagataacagaa

SEQ ID NO: 1560668 - DNA, 15 bp, Homo sapiens
gagaaagataacaga

SEQ ID NO: 1560669 - DNA, 15 bp, Homo sapiens
agagaaagataacag

SEQ ID NO: 1560670 - DNA, 15 bp, Homo sapiens
tagagaaagataaca

SEQ ID NO: 1560671 - DNA, 15 bp, Homo sapiens
ttagagaaagataac

SEQ ID NO: 1560672 - DNA, 15 bp, Homo sapiens
tttagagaaagataa

SEQ ID NO: 1560673 - DNA, 15 bp, Homo sapiens
atttagagaaagata

SEQ ID NO: 1560674 - DNA, 15 bp, Homo sapiens
aatttagagaaagat

SEQ ID NO: 1560675 - DNA, 15 bp, Homo sapiens
aaatttagagaaaga

SEQ ID NO: 1560676 - DNA, 15 bp, Homo sapiens
gaaatttagagaaag

SEQ ID NO: 1560677 - DNA, 15 bp, Homo sapiens
tgaaatttagagaaa

SEQ ID NO: 1560678 - DNA, 15 bp, Homo sapiens
atgaaatttagagaa

SEQ ID NO: 1560679 - DNA, 15 bp, Homo sapiens
catgaaatttagaga

SEQ ID NO: 1560680 - DNA, 15 bp, Homo sapiens
tcatgaaatttagag

SEQ ID NO: 1560681 - DNA, 15 bp, Homo sapiens
ctcatgaaatttaga

SEQ ID NO: 1560682 - DNA, 15 bp, Homo sapiens
gctcatgaaatttag

SEQ ID NO: 1560683 - DNA, 15 bp, Homo sapiens
ggctcatgaaattta

SEQ ID NO: 1560684 - DNA, 15 bp, Homo sapiens
aggctcatgaaattt

SEQ ID NO: 1560685 - DNA, 15 bp, Homo sapiens
gaggctcatgaaatt

SEQ ID NO: 1560686 - DNA, 15 bp, Homo sapiens
tgaggctcatgaaat

SEQ ID NO: 1560687 - DNA, 15 bp, Homo sapiens
atgaggctcatgaaa

SEQ ID NO: 1560688 - DNA, 15 bp, Homo sapiens
aatgaggctcatgaa

SEQ ID NO: 1560689 - DNA, 15 bp, Homo sapiens
aaatgaggctcatga

SEQ ID NO: 1560690 - DNA, 15 bp, Homo sapiens
aaaatgaggctcatg

SEQ ID NO: 1560691 - DNA, 15 bp, Homo sapiens
aaaaatgaggctcat

SEQ ID NO: 1560692 - DNA, 15 bp, Homo sapiens
aaaaaatgaggctca

SEQ ID NO: 1560693 - DNA, 15 bp, Homo sapiens
taaaaaatgaggctc

SEQ ID NO: 1560694 - DNA, 15 bp, Homo sapiens
ataaaaaatgaggct

SEQ ID NO: 1560695 - DNA, 15 bp, Homo sapiens
aataaaaaatgaggc

SEQ ID NO: 1560696 - DNA, 15 bp, Homo sapiens
taataaaaaatgagg

SEQ ID NO: 1560697 - DNA, 15 bp, Homo sapiens
gtaataaaaaatgag

SEQ ID NO: 1560698 - DNA, 15 bp, Homo sapiens
ggtaataaaaaatga

SEQ ID NO: 1560699 - DNA, 15 bp, Homo sapiens
tggtaataaaaaatg

SEQ ID NO: 1560700 - DNA, 15 bp, Homo sapiens
gtggtaataaaaaat

SEQ ID NO: 1560701 - DNA, 15 bp, Homo sapiens
agtggtaataaaaaa

SEQ ID NO: 1560702 - DNA, 15 bp, Homo sapiens
gagtggtaataaaaa

SEQ ID NO: 1560703 - DNA, 15 bp, Homo sapiens
ggagtggtaataaaa

SEQ ID NO: 1560704 - DNA, 15 bp, Homo sapiens
tggagtggtaataaa

SEQ ID NO: 1560705 - DNA, 15 bp, Homo sapiens
ttggagtggtaataa

SEQ ID NO: 1560706 - DNA, 15 bp, Homo sapiens
tttggagtggtaata

SEQ ID NO: 1560707 - DNA, 15 bp, Homo sapiens
atttggagtggtaat

SEQ ID NO: 1560708 - DNA, 15 bp, Homo sapiens
catttggagtggtaa

SEQ ID NO: 1560709 - DNA, 15 bp, Homo sapiens
ccatttggagtggta

SEQ ID NO: 1560710 - DNA, 15 bp, Homo sapiens
tccatttggagtggt

SEQ ID NO: 1560711 - DNA, 15 bp, Homo sapiens
atccatttggagtgg

SEQ ID NO: 1560712 - DNA, 15 bp, Homo sapiens
catccatttggagtg

SEQ ID NO: 1560713 - DNA, 15 bp, Homo sapiens
tcatccatttggagt

SEQ ID NO: 1560714 - DNA, 15 bp, Homo sapiens
ctcatccatttggag

SEQ ID NO: 1560715 - DNA, 15 bp, Homo sapiens
gctcatccatttgga

SEQ ID NO: 1560716 - DNA, 15 bp, Homo sapiens
agctcatccatttgg

SEQ ID NO: 1560717 - DNA, 15 bp, Homo sapiens
tagctcatccatttg

SEQ ID NO: 1560718 - DNA, 15 bp, Homo sapiens
atagctcatccattt

SEQ ID NO: 1560719 - DNA, 15 bp, Homo sapiens
aatagctcatccatt

SEQ ID NO: 1560720 - DNA, 15 bp, Homo sapiens
aaatagctcatccat

SEQ ID NO: 1560721 - DNA, 15 bp, Homo sapiens
aaaatagctcatcca

SEQ ID NO: 1560722 - DNA, 15 bp, Homo sapiens
taaaatagctcatcc

SEQ ID NO: 1560723 - DNA, 15 bp, Homo sapiens
ttaaaatagctcatc

SEQ ID NO: 1560724 - DNA, 15 bp, Homo sapiens
cttaaaatagctcat

SEQ ID NO: 1560725 - DNA, 15 bp, Homo sapiens
gcttaaaatagctca

SEQ ID NO: 1560726 - DNA, 15 bp, Homo sapiens
agcttaaaatagctc

SEQ ID NO: 1560727 - DNA, 15 bp, Homo sapiens
tagcttaaaatagct

SEQ ID NO: 1560728 - DNA, 15 bp, Homo sapiens
ttagcttaaaatagc

SEQ ID NO: 1560729 - DNA, 15 bp, Homo sapiens
attagcttaaaatag

SEQ ID NO: 1560730 - DNA, 15 bp, Homo sapiens
gattagcttaaaata

SEQ ID NO: 1560731 - DNA, 15 bp, Homo sapiens
agattagcttaaaat

SEQ ID NO: 1560732 - DNA, 15 bp, Homo sapiens
tagattagcttaaaa

SEQ ID NO: 1560733 - DNA, 15 bp, Homo sapiens
gtagattagcttaaa

SEQ ID NO: 1560734 - DNA, 15 bp, Homo sapiens
agtagattagcttaa

SEQ ID NO: 1560735 - DNA, 15 bp, Homo sapiens
aagtagattagctta

SEQ ID NO: 1560736 - DNA, 15 bp, Homo sapiens
caagtagattagctt

SEQ ID NO: 1560737 - DNA, 15 bp, Homo sapiens
gcaagtagattagct

SEQ ID NO: 1560738 - DNA, 15 bp, Homo sapiens
ggcaagtagattagc

SEQ ID NO: 1560739 - DNA, 15 bp, Homo sapiens
tggcaagtagattag

SEQ ID NO: 1560740 - DNA, 15 bp, Homo sapiens
atggcaagtagatta

SEQ ID NO: 1560741 - DNA, 15 bp, Homo sapiens
gatggcaagtagatt

SEQ ID NO: 1560742 - DNA, 15 bp, Homo sapiens
agatggcaagtagat

SEQ ID NO: 1560743 - DNA, 15 bp, Homo sapiens
gagatggcaagtaga

SEQ ID NO: 1560744 - DNA, 15 bp, Homo sapiens
ggagatggcaagtag

SEQ ID NO: 1560745 - DNA, 15 bp, Homo sapiens
aggagatggcaagta

SEQ ID NO: 1560746 - DNA, 15 bp, Homo sapiens
taggagatggcaagt

SEQ ID NO: 1560747 - DNA, 15 bp, Homo sapiens
gtaggagatggcaag

SEQ ID NO: 1560748 - DNA, 15 bp, Homo sapiens
tgtaggagatggcaa

SEQ ID NO: 1560749 - DNA, 15 bp, Homo sapiens
ttgtaggagatggca

SEQ ID NO: 1560750 - DNA, 15 bp, Homo sapiens
cttgtaggagatggc

SEQ ID NO: 1560751 - DNA, 15 bp, Homo sapiens
gcttgtaggagatgg

SEQ ID NO: 1560752 - DNA, 15 bp, Homo sapiens
tgcttgtaggagatg

SEQ ID NO: 1560753 - DNA, 15 bp, Homo sapiens
ttgcttgtaggagat

SEQ ID NO: 1560754 - DNA, 15 bp, Homo sapiens
gttgcttgtaggaga

SEQ ID NO: 1560755 - DNA, 15 bp, Homo sapiens
agttgcttgtaggag

SEQ ID NO: 1560756 - DNA, 15 bp, Homo sapiens
cagttgcttgtagga

SEQ ID NO: 1560757 - DNA, 15 bp, Homo sapiens
gcagttgcttgtagg

SEQ ID NO: 1560758 - DNA, 15 bp, Homo sapiens
ggcagttgcttgtag

SEQ ID NO: 1560759 - DNA, 15 bp, Homo sapiens
aggcagttgcttgta

SEQ ID NO: 1560760 - DNA, 15 bp, Homo sapiens
gaggcagttgcttgt

SEQ ID NO: 1560761 - DNA, 15 bp, Homo sapiens
agaggcagttgcttg

SEQ ID NO: 1560762 - DNA, 15 bp, Homo sapiens
aagaggcagttgctt

SEQ ID NO: 1560763 - DNA, 15 bp, Homo sapiens
gaagaggcagttgct

SEQ ID NO: 1560764 - DNA, 15 bp, Homo sapiens
tgaagaggcagttgc

SEQ ID NO: 1560765 - DNA, 15 bp, Homo sapiens
ttgaagaggcagttg

SEQ ID NO: 1560766 - DNA, 15 bp, Homo sapiens
attgaagaggcagtt

SEQ ID NO: 1560767 - DNA, 15 bp, Homo sapiens
tattgaagaggcagt

SEQ ID NO: 1560768 - DNA, 15 bp, Homo sapiens
atattgaagaggcag

SEQ ID NO: 1560769 - DNA, 15 bp, Homo sapiens
aatattgaagaggca

SEQ ID NO: 1560770 - DNA, 15 bp, Homo sapiens
gaatattgaagaggc

SEQ ID NO: 1560771 - DNA, 15 bp, Homo sapiens
tgaatattgaagagg

SEQ ID NO: 1560772 - DNA, 15 bp, Homo sapiens
atgaatattgaagag

SEQ ID NO: 1560773 - DNA, 15 bp, Homo sapiens
aatgaatattgaaga

SEQ ID NO: 1560774 - DNA, 15 bp, Homo sapiens
gaatgaatattgaag

SEQ ID NO: 1560775 - DNA, 15 bp, Homo sapiens
ggaatgaatattgaa

SEQ ID NO: 1560776 - DNA, 15 bp, Homo sapiens
aggaatgaatattga

SEQ ID NO: 1560777 - DNA, 15 bp, Homo sapiens
aaggaatgaatattg

SEQ ID NO: 1560778 - DNA, 15 bp, Homo sapiens
taaggaatgaatatt

SEQ ID NO: 1560779 - DNA, 15 bp, Homo sapiens
ataaggaatgaatat

SEQ ID NO: 1560780 - DNA, 15 bp, Homo sapiens
cataaggaatgaata

SEQ ID NO: 1560781 - DNA, 15 bp, Homo sapiens
acataaggaatgaat

SEQ ID NO: 1560782 - DNA, 15 bp, Homo sapiens
gacataaggaatgaa

SEQ ID NO: 1560783 - DNA, 15 bp, Homo sapiens
tgacataaggaatga

SEQ ID NO: 1560784 - DNA, 15 bp, Homo sapiens
atgacataaggaatg

SEQ ID NO: 1560785 - DNA, 15 bp, Homo sapiens
aatgacataaggaat

SEQ ID NO: 1560786 - DNA, 15 bp, Homo sapiens
aaatgacataaggaa

SEQ ID NO: 1560787 - DNA, 15 bp, Homo sapiens
aaaatgacataagga

SEQ ID NO: 1560788 - DNA, 15 bp, Homo sapiens
taaaatgacataagg

SEQ ID NO: 1560789 - DNA, 15 bp, Homo sapiens
ataaaatgacataag

SEQ ID NO: 1560790 - DNA, 15 bp, Homo sapiens
gataaaatgacataa

SEQ ID NO: 1560791 - DNA, 15 bp, Homo sapiens
agataaaatgacata

SEQ ID NO: 1560792 - DNA, 15 bp, Homo sapiens
cagataaaatgacat

SEQ ID NO: 1560793 - DNA, 15 bp, Homo sapiens
ccagataaaatgaca

SEQ ID NO: 1560794 - DNA, 15 bp, Homo sapiens
tccagataaaatgac

SEQ ID NO: 1560795 - DNA, 15 bp, Homo sapiens
ctccagataaaatga

SEQ ID NO: 1560796 - DNA, 15 bp, Homo sapiens
actccagataaaatg

SEQ ID NO: 1560797 - DNA, 15 bp, Homo sapiens
tactccagataaaat

SEQ ID NO: 1560798 - DNA, 15 bp, Homo sapiens
atactccagataaaa

SEQ ID NO: 1560799 - DNA, 15 bp, Homo sapiens
gatactccagataaa

SEQ ID NO: 1560800 - DNA, 15 bp, Homo sapiens
agatactccagataa

SEQ ID NO: 1560801 - DNA, 15 bp, Homo sapiens
cagatactccagata

SEQ ID NO: 1560802 - DNA, 15 bp, Homo sapiens
gcagatactccagat

SEQ ID NO: 1560803 - DNA, 15 bp, Homo sapiens
ggcagatactccaga

SEQ ID NO: 1560804 - DNA, 15 bp, Homo sapiens
gggcagatactccag

SEQ ID NO: 1560805 - DNA, 15 bp, Homo sapiens
agggcagatactcca

SEQ ID NO: 1560806 - DNA, 15 bp, Homo sapiens
tagggcagatactcc

SEQ ID NO: 1560807 - DNA, 15 bp, Homo sapiens
atagggcagatactc

SEQ ID NO: 1560808 - DNA, 15 bp, Homo sapiens
gatagggcagatact

SEQ ID NO: 1560809 - DNA, 15 bp, Homo sapiens
ggatagggcagatac

SEQ ID NO: 1560810 - DNA, 15 bp, Homo sapiens
gggatagggcagata

SEQ ID NO: 1560811 - DNA, 15 bp, Homo sapiens
ggggatagggcagat

SEQ ID NO: 1560812 - DNA, 15 bp, Homo sapiens
tggggatagggcaga

SEQ ID NO: 1560813 - DNA, 15 bp, Homo sapiens
gtggggatagggcag

SEQ ID NO: 1560814 - DNA, 15 bp, Homo sapiens
ggtggggatagggca

SEQ ID NO: 1560815 - DNA, 15 bp, Homo sapiens
tggtggggatagggc

SEQ ID NO: 1560816 - DNA, 15 bp, Homo sapiens
atggtggggataggg

SEQ ID NO: 1560817 - DNA, 15 bp, Homo sapiens
aatggtggggatagg

SEQ ID NO: 1560818 - DNA, 15 bp, Homo sapiens
gaatggtggggatag

SEQ ID NO: 1560819 - DNA, 15 bp, Homo sapiens
ggaatggtggggata

SEQ ID NO: 1560820 - DNA, 15 bp, Homo sapiens
tggaatggtggggat

SEQ ID NO: 1560821 - DNA, 15 bp, Homo sapiens
atggaatggtgggga

SEQ ID NO: 1560822 - DNA, 15 bp, Homo sapiens
aatggaatggtgggg

SEQ ID NO: 1560823 - DNA, 15 bp, Homo sapiens
taatggaatggtggg

SEQ ID NO: 1560824 - DNA, 15 bp, Homo sapiens
ttaatggaatggtgg

SEQ ID NO: 1560825 - DNA, 15 bp, Homo sapiens
tttaatggaatggtg

SEQ ID NO: 1560826 - DNA, 15 bp, Homo sapiens
ctttaatggaatggt

SEQ ID NO: 1560827 - DNA, 15 bp, Homo sapiens
gctttaatggaatgg

SEQ ID NO: 1560828 - DNA, 15 bp, Homo sapiens
agctttaatggaatg

SEQ ID NO: 1560829 - DNA, 15 bp, Homo sapiens
aagctttaatggaat

SEQ ID NO: 1560830 - DNA, 15 bp, Homo sapiens
gaagctttaatggaa

SEQ ID NO: 1560831 - DNA, 15 bp, Homo sapiens
ggaagctttaatgga

SEQ ID NO: 1560832 - DNA, 15 bp, Homo sapiens
aggaagctttaatgg

SEQ ID NO: 1560833 - DNA, 15 bp, Homo sapiens
taggaagctttaatg

SEQ ID NO: 1560834 - DNA, 15 bp, Homo sapiens
ataggaagctttaat

SEQ ID NO: 1560835 - DNA, 15 bp, Homo sapiens
aataggaagctttaa

SEQ ID NO: 1560836 - DNA, 15 bp, Homo sapiens
aaataggaagcttta

SEQ ID NO: 1560837 - DNA, 15 bp, Homo sapiens
caaataggaagcttt

SEQ ID NO: 1560838 - DNA, 15 bp, Homo sapiens
gcaaataggaagctt

SEQ ID NO: 1560839 - DNA, 15 bp, Homo sapiens
agcaaataggaagct

SEQ ID NO: 1560840 - DNA, 15 bp, Homo sapiens
gagcaaataggaagc

SEQ ID NO: 1560841 - DNA, 15 bp, Homo sapiens
agagcaaataggaag

SEQ ID NO: 1560842 - DNA, 15 bp, Homo sapiens
aagagcaaataggaa

SEQ ID NO: 1560843 - DNA, 15 bp, Homo sapiens
taagagcaaatagga

SEQ ID NO: 1560844 - DNA, 15 bp, Homo sapiens
ataagagcaaatagg

SEQ ID NO: 1560845 - DNA, 15 bp, Homo sapiens
gataagagcaaatag

SEQ ID NO: 1560846 - DNA, 15 bp, Homo sapiens
agataagagcaaata

SEQ ID NO: 1560847 - DNA, 15 bp, Homo sapiens
cagataagagcaaat

SEQ ID NO: 1560848 - DNA, 15 bp, Homo sapiens
tcagataagagcaaa

SEQ ID NO: 1560849 - DNA, 15 bp, Homo sapiens
atcagataagagcaa

SEQ ID NO: 1560850 - DNA, 15 bp, Homo sapiens
aatcagataagagca

SEQ ID NO: 1560851 - DNA, 15 bp, Homo sapiens
aaatcagataagagc

SEQ ID NO: 1560852 - DNA, 15 bp, Homo sapiens
aaaatcagataagag

SEQ ID NO: 1560853 - DNA, 15 bp, Homo sapiens
aaaaatcagataaga

SEQ ID NO: 1560854 - DNA, 15 bp, Homo sapiens
caaaaatcagataag

SEQ ID NO: 1560855 - DNA, 15 bp, Homo sapiens
acaaaaatcagataa

SEQ ID NO: 1560856 - DNA, 15 bp, Homo sapiens
aacaaaaatcagata

SEQ ID NO: 1560857 - DNA, 15 bp, Homo sapiens
aaacaaaaatcagat

SEQ ID NO: 1560858 - DNA, 15 bp, Homo sapiens
gaaacaaaaatcaga

SEQ ID NO: 1560859 - DNA, 15 bp, Homo sapiens
agaaacaaaaatcag

SEQ ID NO: 1560860 - DNA, 15 bp, Homo sapiens
gagaaacaaaaatca

SEQ ID NO: 1560861 - DNA, 15 bp, Homo sapiens
agagaaacaaaaatc

SEQ ID NO: 1560862 - DNA, 15 bp, Homo sapiens
tagagaaacaaaaat

SEQ ID NO: 1560863 - DNA, 15 bp, Homo sapiens
gtagagaaacaaaaa

SEQ ID NO: 1560864 - DNA, 15 bp, Homo sapiens
agtagagaaacaaaa

SEQ ID NO: 1560865 - DNA, 15 bp, Homo sapiens
gagtagagaaacaaa

SEQ ID NO: 1560866 - DNA, 15 bp, Homo sapiens
tgagtagagaaacaa

SEQ ID NO: 1560867 - DNA, 15 bp, Homo sapiens
ctgagtagagaaaca

SEQ ID NO: 1560868 - DNA, 15 bp, Homo sapiens
gctgagtagagaaac

SEQ ID NO: 1560869 - DNA, 15 bp, Homo sapiens
tgctgagtagagaaa

SEQ ID NO: 1560870 - DNA, 15 bp, Homo sapiens
ttgctgagtagagaa

SEQ ID NO: 1560871 - DNA, 15 bp, Homo sapiens
gttgctgagtagaga

SEQ ID NO: 1560872 - DNA, 15 bp, Homo sapiens
tgttgctgagtagag

SEQ ID NO: 1560873 - DNA, 15 bp, Homo sapiens
gtgttgctgagtaga

SEQ ID NO: 1560874 - DNA, 15 bp, Homo sapiens
agtgttgctgagtag

SEQ ID NO: 1560875 - DNA, 15 bp, Homo sapiens
aagtgttgctgagta

SEQ ID NO: 1560876 - DNA, 15 bp, Homo sapiens
taagtgttgctgagt

SEQ ID NO: 1560877 - DNA, 15 bp, Homo sapiens
ctaagtgttgctgag

SEQ ID NO: 1560878 - DNA, 15 bp, Homo sapiens
gctaagtgttgctga

SEQ ID NO: 1560879 - DNA, 15 bp, Homo sapiens
tgctaagtgttgctg

SEQ ID NO: 1560880 - DNA, 15 bp, Homo sapiens
gtgctaagtgttgct

SEQ ID NO: 1560881 - DNA, 15 bp, Homo sapiens
agtgctaagtgttgc

SEQ ID NO: 1560882 - DNA, 15 bp, Homo sapiens
aagtgctaagtgttg

SEQ ID NO: 1560883 - DNA, 15 bp, Homo sapiens
taagtgctaagtgtt

SEQ ID NO: 1560884 - DNA, 15 bp, Homo sapiens
ataagtgctaagtgt

SEQ ID NO: 1560885 - DNA, 15 bp, Homo sapiens
cataagtgctaagtg

SEQ ID NO: 1560886 - DNA, 15 bp, Homo sapiens
acataagtgctaagt

SEQ ID NO: 1560887 - DNA, 15 bp, Homo sapiens
tacataagtgctaag

SEQ ID NO: 1560888 - DNA, 15 bp, Homo sapiens
gtacataagtgctaa

SEQ ID NO: 1560889 - DNA, 15 bp, Homo sapiens
tgtacataagtgcta

SEQ ID NO: 1560890 - DNA, 15 bp, Homo sapiens
ttgtacataagtgct

SEQ ID NO: 1560891 - DNA, 15 bp, Homo sapiens
attgtacataagtgc

SEQ ID NO: 1560892 - DNA, 15 bp, Homo sapiens
tattgtacataagtg

SEQ ID NO: 1560893 - DNA, 15 bp, Homo sapiens
gtattgtacataagt

SEQ ID NO: 1560894 - DNA, 15 bp, Homo sapiens
tgtattgtacataag

SEQ ID NO: 1560895 - DNA, 15 bp, Homo sapiens
ttgtattgtacataa

SEQ ID NO: 1560896 - DNA, 15 bp, Homo sapiens
attgtattgtacata

SEQ ID NO: 1560897 - DNA, 15 bp, Homo sapiens
aattgtattgtacat

SEQ ID NO: 1560898 - DNA, 15 bp, Homo sapiens
gaattgtattgtaca

SEQ ID NO: 1560899 - DNA, 15 bp, Homo sapiens
agaattgtattgtac

SEQ ID NO: 1560900 - DNA, 15 bp, Homo sapiens
aagaattgtattgta

SEQ ID NO: 1560901 - DNA, 15 bp, Homo sapiens
caagaattgtattgt

SEQ ID NO: 1560902 - DNA, 15 bp, Homo sapiens
tcaagaattgtattg

SEQ ID NO: 1560903 - DNA, 15 bp, Homo sapiens
ttcaagaattgtatt

SEQ ID NO: 1560904 - DNA, 15 bp, Homo sapiens
gttcaagaattgtat

SEQ ID NO: 1560905 - DNA, 15 bp, Homo sapiens
tgttcaagaattgta

SEQ ID NO: 1560906 - DNA, 15 bp, Homo sapiens
atgttcaagaattgt

SEQ ID NO: 1560907 - DNA, 15 bp, Homo sapiens
tatgttcaagaattg

SEQ ID NO: 1560908 - DNA, 15 bp, Homo sapiens
ctatgttcaagaatt

SEQ ID NO: 1560909 - DNA, 15 bp, Homo sapiens
actatgttcaagaat

SEQ ID NO: 1560910 - DNA, 15 bp, Homo sapiens
aactatgttcaagaa

SEQ ID NO: 1560911 - DNA, 15 bp, Homo sapiens
caactatgttcaaga

SEQ ID NO: 1560912 - DNA, 15 bp, Homo sapiens
acaactatgttcaag

SEQ ID NO: 1560913 - DNA, 15 bp, Homo sapiens
aacaactatgttcaa

SEQ ID NO: 1560914 - DNA, 15 bp, Homo sapiens
aaacaactatgttca

SEQ ID NO: 1560915 - DNA, 15 bp, Homo sapiens
caaacaactatgttc

SEQ ID NO: 1560916 - DNA, 15 bp, Homo sapiens
tcaaacaactatgtt

SEQ ID NO: 1560917 - DNA, 15 bp, Homo sapiens
atcaaacaactatgt

SEQ ID NO: 1560918 - DNA, 15 bp, Homo sapiens
tatcaaacaactatg

SEQ ID NO: 1560919 - DNA, 15 bp, Homo sapiens
ctatcaaacaactat

SEQ ID NO: 1560920 - DNA, 15 bp, Homo sapiens
tctatcaaacaacta

SEQ ID NO: 1560921 - DNA, 15 bp, Homo sapiens
ttctatcaaacaact

SEQ ID NO: 1560922 - DNA, 15 bp, Homo sapiens
tttctatcaaacaac

SEQ ID NO: 1560923 - DNA, 15 bp, Homo sapiens
ctttctatcaaacaa

SEQ ID NO: 1560924 - DNA, 15 bp, Homo sapiens
actttctatcaaaca

SEQ ID NO: 1560925 - DNA, 15 bp, Homo sapiens
cactttctatcaaac

SEQ ID NO: 1560926 - DNA, 15 bp, Homo sapiens
gcactttctatcaaa

SEQ ID NO: 1560927 - DNA, 15 bp, Homo sapiens
agcactttctatcaa

SEQ ID NO: 1560928 - DNA, 15 bp, Homo sapiens
cagcactttctatca

SEQ ID NO: 1560929 - DNA, 15 bp, Homo sapiens
tcagcactttctatc

SEQ ID NO: 1560930 - DNA, 15 bp, Homo sapiens
atcagcactttctat

SEQ ID NO: 1560931 - DNA, 15 bp, Homo sapiens
aatcagcactttcta

SEQ ID NO: 1560932 - DNA, 15 bp, Homo sapiens
gaatcagcactttct

SEQ ID NO: 1560933 - DNA, 15 bp, Homo sapiens
agaatcagcactttc

SEQ ID NO: 1560934 - DNA, 15 bp, Homo sapiens
gagaatcagcacttt

SEQ ID NO: 1560935 - DNA, 15 bp, Homo sapiens
tgagaatcagcactt

SEQ ID NO: 1560936 - DNA, 15 bp, Homo sapiens
ctgagaatcagcact

SEQ ID NO: 1560937 - DNA, 15 bp, Homo sapiens
actgagaatcagcac

SEQ ID NO: 1560938 - DNA, 15 bp, Homo sapiens
aactgagaatcagca

SEQ ID NO: 1560939 - DNA, 15 bp, Homo sapiens
aaactgagaatcagc

SEQ ID NO: 1560940 - DNA, 15 bp, Homo sapiens
gaaactgagaatcag

SEQ ID NO: 1560941 - DNA, 15 bp, Homo sapiens
tgaaactgagaatca

SEQ ID NO: 1560942 - DNA, 15 bp, Homo sapiens
gtgaaactgagaatc

SEQ ID NO: 1560943 - DNA, 15 bp, Homo sapiens
tgtgaaactgagaat

SEQ ID NO: 1560944 - DNA, 15 bp, Homo sapiens
ctgtgaaactgagaa

SEQ ID NO: 1560945 - DNA, 15 bp, Homo sapiens
tctgtgaaactgaga

SEQ ID NO: 1560946 - DNA, 15 bp, Homo sapiens
gtctgtgaaactgag

SEQ ID NO: 1560947 - DNA, 15 bp, Homo sapiens
agtctgtgaaactga

SEQ ID NO: 1560948 - DNA, 15 bp, Homo sapiens
aagtctgtgaaactg

SEQ ID NO: 1560949 - DNA, 15 bp, Homo sapiens
caagtctgtgaaact

SEQ ID NO: 1560950 - DNA, 15 bp, Homo sapiens
acaagtctgtgaaac

SEQ ID NO: 1560951 - DNA, 15 bp, Homo sapiens
tacaagtctgtgaaa

SEQ ID NO: 1560952 - DNA, 15 bp, Homo sapiens
atacaagtctgtgaa

SEQ ID NO: 1560953 - DNA, 15 bp, Homo sapiens
aatacaagtctgtga

SEQ ID NO: 1560954 - DNA, 15 bp, Homo sapiens
aaatacaagtctgtg

SEQ ID NO: 1560955 - DNA, 15 bp, Homo sapiens
caaatacaagtctgt

SEQ ID NO: 1560956 - DNA, 15 bp, Homo sapiens
acaaatacaagtctg

SEQ ID NO: 1560957 - DNA, 15 bp, Homo sapiens
aacaaatacaagtct

SEQ ID NO: 1560958 - DNA, 15 bp, Homo sapiens
gaacaaatacaagtc

SEQ ID NO: 1560959 - DNA, 15 bp, Homo sapiens
tgaacaaatacaagt

SEQ ID NO: 1560960 - DNA, 15 bp, Homo sapiens
ttgaacaaatacaag

SEQ ID NO: 1560961 - DNA, 15 bp, Homo sapiens
gttgaacaaatacaa

SEQ ID NO: 1560962 - DNA, 15 bp, Homo sapiens
agttgaacaaataca

SEQ ID NO: 1560963 - DNA, 15 bp, Homo sapiens
aagttgaacaaatac

SEQ ID NO: 1560964 - DNA, 15 bp, Homo sapiens
aaagttgaacaaata

SEQ ID NO: 1560965 - DNA, 15 bp, Homo sapiens
aaaagttgaacaaat

SEQ ID NO: 1560966 - DNA, 15 bp, Homo sapiens
aaaaagttgaacaaa

SEQ ID NO: 1560967 - DNA, 15 bp, Homo sapiens
aaaaaagttgaacaa

SEQ ID NO: 1560968 - DNA, 15 bp, Homo sapiens
caaaaaagttgaaca

SEQ ID NO: 1560969 - DNA, 15 bp, Homo sapiens
acaaaaaagttgaac

SEQ ID NO: 1560970 - DNA, 15 bp, Homo sapiens
aacaaaaaagttgaa

SEQ ID NO: 1560971 - DNA, 15 bp, Homo sapiens
aaacaaaaaagttga

SEQ ID NO: 1560972 - DNA, 15 bp, Homo sapiens
caaacaaaaaagttg

SEQ ID NO: 1560973 - DNA, 15 bp, Homo sapiens
tcaaacaaaaaagtt

SEQ ID NO: 1560974 - DNA, 15 bp, Homo sapiens
ttcaaacaaaaaagt

SEQ ID NO: 1560975 - DNA, 15 bp, Homo sapiens
gttcaaacaaaaaag

SEQ ID NO: 1560976 - DNA, 15 bp, Homo sapiens
ggttcaaacaaaaaa

SEQ ID NO: 1560977 - DNA, 15 bp, Homo sapiens
cggttcaaacaaaaa

SEQ ID NO: 1560978 - DNA, 15 bp, Homo sapiens
acggttcaaacaaaa

SEQ ID NO: 1560979 - DNA, 15 bp, Homo sapiens
tacggttcaaacaaa

SEQ ID NO: 1560980 - DNA, 15 bp, Homo sapiens
atacggttcaaacaa

SEQ ID NO: 1560981 - DNA, 15 bp, Homo sapiens
gatacggttcaaaca

SEQ ID NO: 1560982 - DNA, 15 bp, Homo sapiens
tgatacggttcaaac

SEQ ID NO: 1560983 - DNA, 15 bp, Homo sapiens
atgatacggttcaaa

SEQ ID NO: 1560984 - DNA, 15 bp, Homo sapiens
gatgatacggttcaa

SEQ ID NO: 1560985 - DNA, 15 bp, Homo sapiens
agatgatacggttca

SEQ ID NO: 1560986 - DNA, 15 bp, Homo sapiens
aagatgatacggttc

SEQ ID NO: 1560987 - DNA, 15 bp, Homo sapiens
caagatgatacggtt

SEQ ID NO: 1560988 - DNA, 15 bp, Homo sapiens
tcaagatgatacggt

SEQ ID NO: 1560989 - DNA, 15 bp, Homo sapiens
ctcaagatgatacgg

SEQ ID NO: 1560990 - DNA, 15 bp, Homo sapiens
gctcaagatgatacg

SEQ ID NO: 1560991 - DNA, 15 bp, Homo sapiens
tgctcaagatgatac

SEQ ID NO: 1560992 - DNA, 15 bp, Homo sapiens
ttgctcaagatgata

SEQ ID NO: 1560993 - DNA, 15 bp, Homo sapiens
tttgctcaagatgat

SEQ ID NO: 1560994 - DNA, 15 bp, Homo sapiens
atttgctcaagatga

SEQ ID NO: 1560995 - DNA, 15 bp, Homo sapiens
gatttgctcaagatg

SEQ ID NO: 1560996 - DNA, 15 bp, Homo sapiens
tgatttgctcaagat

SEQ ID NO: 1560997 - DNA, 15 bp, Homo sapiens
atgatttgctcaaga

SEQ ID NO: 1560998 - DNA, 15 bp, Homo sapiens
aatgatttgctcaag

SEQ ID NO: 1560999 - DNA, 15 bp, Homo sapiens
taaatgatttgctca

SEQ ID NO: 1561000 - DNA, 15 bp, Homo sapiens
ttaaatgatttgctc

SEQ ID NO: 1561001 - DNA, 15 bp, Homo sapiens
gttaaatgatttgct

SEQ ID NO: 1561002 - DNA, 15 bp, Homo sapiens
tgttaaatgatttgc

SEQ ID NO: 1561003 - DNA, 15 bp, Homo sapiens
atgttaaatgatttg

SEQ ID NO: 1561004 - DNA, 15 bp, Homo sapiens
gatgttaaatgattt

SEQ ID NO: 1561005 - DNA, 15 bp, Homo sapiens
agatgttaaatgatt

SEQ ID NO: 1561006 - DNA, 15 bp, Homo sapiens
gagatgttaaatgat

SEQ ID NO: 1561007 - DNA, 15 bp, Homo sapiens
tgagatgttaaatga

SEQ ID NO: 1561008 - DNA, 15 bp, Homo sapiens
ctgagatgttaaatg

SEQ ID NO: 1561009 - DNA, 15 bp, Homo sapiens
actgagatgttaaat

SEQ ID NO: 1561010 - DNA, 15 bp, Homo sapiens
tactgagatgttaaa

SEQ ID NO: 1561011 - DNA, 15 bp, Homo sapiens
atactgagatgttaa

SEQ ID NO: 1561012 - DNA, 15 bp, Homo sapiens
aatactgagatgtta

SEQ ID NO: 1561013 - DNA, 15 bp, Homo sapiens
aaatactgagatgtt

SEQ ID NO: 1561014 - DNA, 15 bp, Homo sapiens
aaaatactgagatgt

SEQ ID NO: 1561015 - DNA, 15 bp, Homo sapiens
aaaaatactgagatg

SEQ ID NO: 1561016 - DNA, 15 bp, Homo sapiens
aaaaaatactgagat

SEQ ID NO: 1561017 - DNA, 15 bp, Homo sapiens
gaaaaaatactgaga

SEQ ID NO: 1561018 - DNA, 15 bp, Homo sapiens
agaaaaaatactgag

SEQ ID NO: 1561019 - DNA, 15 bp, Homo sapiens
gagaaaaaatactga

SEQ ID NO: 1561020 - DNA, 15 bp, Homo sapiens
tgagaaaaaatactg

SEQ ID NO: 1561021 - DNA, 15 bp, Homo sapiens
atgagaaaaaatact

SEQ ID NO: 1561022 - DNA, 15 bp, Homo sapiens
aatgagaaaaaatac

SEQ ID NO: 1561023 - DNA, 15 bp, Homo sapiens
gaatgagaaaaaata

SEQ ID NO: 1561024 - DNA, 15 bp, Homo sapiens
tgaatgagaaaaaat

SEQ ID NO: 1561025 - DNA, 15 bp, Homo sapiens
ctgaatgagaaaaaa

SEQ ID NO: 1561026 - DNA, 15 bp, Homo sapiens
gctgaatgagaaaaa

SEQ ID NO: 1561027 - DNA, 15 bp, Homo sapiens
agctgaatgagaaaa

SEQ ID NO: 1561028 - DNA, 15 bp, Homo sapiens
aagctgaatgagaaa

SEQ ID NO: 1561029 - DNA, 15 bp, Homo sapiens
taagctgaatgagaa

SEQ ID NO: 1561030 - DNA, 15 bp, Homo sapiens
ttaagctgaatgaga

SEQ ID NO: 1561031 - DNA, 15 bp, Homo sapiens
attaagctgaatgag

SEQ ID NO: 1561032 - DNA, 15 bp, Homo sapiens
tattaagctgaatga

SEQ ID NO: 1561033 - DNA, 15 bp, Homo sapiens
ttattaagctgaatg

SEQ ID NO: 1561034 - DNA, 15 bp, Homo sapiens
attattaagctgaat

SEQ ID NO: 1561035 - DNA, 15 bp, Homo sapiens
tattattaagctgaa

SEQ ID NO: 1561036 - DNA, 15 bp, Homo sapiens
gtattattaagctga

SEQ ID NO: 1561037 - DNA, 15 bp, Homo sapiens
ggtattattaagctg

SEQ ID NO: 1561038 - DNA, 15 bp, Homo sapiens
aggtattattaagct

SEQ ID NO: 1561039 - DNA, 15 bp, Homo sapiens
caggtattattaagc

SEQ ID NO: 1561040 - DNA, 15 bp, Homo sapiens
gcaggtattattaag

SEQ ID NO: 1561041 - DNA, 15 bp, Homo sapiens
ggcaggtattattaa

SEQ ID NO: 1561042 - DNA, 15 bp, Homo sapiens
gggcaggtattatta

SEQ ID NO: 1561043 - DNA, 15 bp, Homo sapiens
agggcaggtattatt

SEQ ID NO: 1561044 - DNA, 15 bp, Homo sapiens
cagggcaggtattat

SEQ ID NO: 1561045 - DNA, 15 bp, Homo sapiens
gcagggcaggtatta

SEQ ID NO: 1561046 - DNA, 15 bp, Homo sapiens
ggcagggcaggtatt

SEQ ID NO: 1561047 - DNA, 15 bp, Homo sapiens
aggcagggcaggtat

SEQ ID NO: 1561048 - DNA, 15 bp, Homo sapiens
taggcagggcaggta

SEQ ID NO: 1561049 - DNA, 15 bp, Homo sapiens
gtaggcagggcaggt

SEQ ID NO: 1561050 - DNA, 15 bp, Homo sapiens
agtaggcagggcagg

SEQ ID NO: 1561051 - DNA, 15 bp, Homo sapiens
aagtaggcagggcag

SEQ ID NO: 1561052 - DNA, 15 bp, Homo sapiens
aaagtaggcagggca

SEQ ID NO: 1561053 - DNA, 15 bp, Homo sapiens
caaagtaggcagggc

SEQ ID NO: 1561054 - DNA, 15 bp, Homo sapiens
acaaagtaggcaggg

SEQ ID NO: 1561055 - DNA, 15 bp, Homo sapiens
cacaaagtaggcagg

SEQ ID NO: 1561056 - DNA, 15 bp, Homo sapiens
acacaaagtaggcag

SEQ ID NO: 1561057 - DNA, 15 bp, Homo sapiens
aacacaaagtaggca

SEQ ID NO: 1561058 - DNA, 15 bp, Homo sapiens
aaacacaaagtaggc

SEQ ID NO: 1561059 - DNA, 15 bp, Homo sapiens
caaacacaaagtagg

SEQ ID NO: 1561060 - DNA, 15 bp, Homo sapiens
acaaacacaaagtag

SEQ ID NO: 1561061 - DNA, 15 bp, Homo sapiens
aacaaacacaaagta

SEQ ID NO: 1561062 - DNA, 15 bp, Homo sapiens
taacaaacacaaagt

SEQ ID NO: 1561063 - DNA, 15 bp, Homo sapiens
ttaacaaacacaaag

SEQ ID NO: 1561064 - DNA, 15 bp, Homo sapiens
tttaacaaacacaaa

SEQ ID NO: 1561065 - DNA, 15 bp, Homo sapiens
ctttaacaaacacaa

SEQ ID NO: 1561066 - DNA, 15 bp, Homo sapiens
tctttaacaaacaca

SEQ ID NO: 1561067 - DNA, 15 bp, Homo sapiens
atctttaacaaacac

SEQ ID NO: 1561068 - DNA, 15 bp, Homo sapiens
gatctttaacaaaca

SEQ ID NO: 1561069 - DNA, 15 bp, Homo sapiens
tgatctttaacaaac

SEQ ID NO: 1561070 - DNA, 15 bp, Homo sapiens
ttgatctttaacaaa

SEQ ID NO: 1561071 - DNA, 15 bp, Homo sapiens
tttgatctttaacaa

SEQ ID NO: 1561072 - DNA, 15 bp, Homo sapiens
atttgatctttaaca

SEQ ID NO: 1561073 - DNA, 15 bp, Homo sapiens
catttgatctttaac

SEQ ID NO: 1561074 - DNA, 15 bp, Homo sapiens
acatttgatctttaa

SEQ ID NO: 1561075 - DNA, 15 bp, Homo sapiens
tacatttgatcttta

SEQ ID NO: 1561076 - DNA, 15 bp, Homo sapiens
atacatttgatcttt

SEQ ID NO: 1561077 - DNA, 15 bp, Homo sapiens
tatacatttgatctt

SEQ ID NO: 1561078 - DNA, 15 bp, Homo sapiens
atatacatttgatct

SEQ ID NO: 1561079 - DNA, 15 bp, Homo sapiens
aatatacatttgatc

SEQ ID NO: 1561080 - DNA, 15 bp, Homo sapiens
taatatacatttgat

SEQ ID NO: 1561081 - DNA, 15 bp, Homo sapiens
ttaatatacatttga

SEQ ID NO: 1561082 - DNA, 15 bp, Homo sapiens
tttaatatacatttg

SEQ ID NO: 1561083 - DNA, 15 bp, Homo sapiens
ctttaatatacattt

SEQ ID NO: 1561084 - DNA, 15 bp, Homo sapiens
tctttaatatacatt

SEQ ID NO: 1561085 - DNA, 15 bp, Homo sapiens
ttctttaatatacat

SEQ ID NO: 1561086 - DNA, 15 bp, Homo sapiens
gttctttaatataca

SEQ ID NO: 1561087 - DNA, 15 bp, Homo sapiens
agttctttaatatac

SEQ ID NO: 1561088 - DNA, 15 bp, Homo sapiens
aagttctttaatata

SEQ ID NO: 1561089 - DNA, 15 bp, Homo sapiens
caagttctttaatat

SEQ ID NO: 1561090 - DNA, 15 bp, Homo sapiens
ccaagttctttaata

SEQ ID NO: 1561091 - DNA, 15 bp, Homo sapiens
tccaagttctttaat

SEQ ID NO: 1561092 - DNA, 15 bp, Homo sapiens
ttccaagttctttaa

SEQ ID NO: 1561093 - DNA, 15 bp, Homo sapiens
tttccaagttcttta

SEQ ID NO: 1561094 - DNA, 15 bp, Homo sapiens
ttttccaagttcttt

SEQ ID NO: 1561095 - DNA, 15 bp, Homo sapiens
attttccaagttctt

SEQ ID NO: 1561096 - DNA, 15 bp, Homo sapiens
tattttccaagttct

SEQ ID NO: 1561097 - DNA, 15 bp, Homo sapiens
ttattttccaagttc

SEQ ID NO: 1561098 - DNA, 15 bp, Homo sapiens
tttattttccaagtt

SEQ ID NO: 1561099 - DNA, 15 bp, Homo sapiens
ttttattttccaagt

SEQ ID NO: 1561100 - DNA, 15 bp, Homo sapiens
cttttattttccaag

SEQ ID NO: 1561101 - DNA, 15 bp, Homo sapiens
tcttttattttccaa

SEQ ID NO: 1561102 - DNA, 15 bp, Homo sapiens
atcttttattttcca

SEQ ID NO: 1561103 - DNA, 15 bp, Homo sapiens
catcttttattttcc

SEQ ID NO: 1561104 - DNA, 15 bp, Homo sapiens
gcatcttttattttc

SEQ ID NO: 1561105 - DNA, 15 bp, Homo sapiens
agcatcttttatttt

SEQ ID NO: 1561106 - DNA, 15 bp, Homo sapiens
aagcatcttttattt

SEQ ID NO: 1561107 - DNA, 15 bp, Homo sapiens
taagcatcttttatt

SEQ ID NO: 1561108 - DNA, 15 bp, Homo sapiens
ataagcatcttttat

SEQ ID NO: 1561109 - DNA, 15 bp, Homo sapiens
aataagcatctttta

SEQ ID NO: 1561110 - DNA, 15 bp, Homo sapiens
taataagcatctttt

SEQ ID NO: 1561111 - DNA, 15 bp, Homo sapiens
ttaataagcatcttt

SEQ ID NO: 1561112 - DNA, 15 bp, Homo sapiens
tttaataagcatctt

SEQ ID NO: 1561113 - DNA, 15 bp, Homo sapiens
atttaataagcatct

SEQ ID NO: 1561114 - DNA, 15 bp, Homo sapiens
gatttaataagcatc

SEQ ID NO: 1561115 - DNA, 15 bp, Homo sapiens
agatttaataagcat

SEQ ID NO: 1561116 - DNA, 15 bp, Homo sapiens
gagatttaataagca

SEQ ID NO: 1561117 - DNA, 15 bp, Homo sapiens
agagatttaataagc

SEQ ID NO: 1561118 - DNA, 15 bp, Homo sapiens
gagagatttaataag

SEQ ID NO: 1561119 - DNA, 15 bp, Homo sapiens
agagagatttaataa

SEQ ID NO: 1561120 - DNA, 15 bp, Homo sapiens
cagagagatttaata

SEQ ID NO: 1561121 - DNA, 15 bp, Homo sapiens
acagagagatttaat

SEQ ID NO: 1561122 - DNA, 15 bp, Homo sapiens
tacagagagatttaa

SEQ ID NO: 1561123 - DNA, 15 bp, Homo sapiens
atacagagagattta

SEQ ID NO: 1561124 - DNA, 15 bp, Homo sapiens
tatacagagagattt

SEQ ID NO: 1561125 - DNA, 15 bp, Homo sapiens
atatacagagagatt

SEQ ID NO: 1561126 - DNA, 15 bp, Homo sapiens
aatatacagagagat

SEQ ID NO: 1561127 - DNA, 15 bp, Homo sapiens
aaatatacagagaga

SEQ ID NO: 1561128 - DNA, 15 bp, Homo sapiens
gaaatatacagagag

SEQ ID NO: 1561129 - DNA, 15 bp, Homo sapiens
tgaaatatacagaga

SEQ ID NO: 1561130 - DNA, 15 bp, Homo sapiens
gtgaaatatacagag

SEQ ID NO: 1561131 - DNA, 15 bp, Homo sapiens
tgtgaaatatacaga

SEQ ID NO: 1561132 - DNA, 15 bp, Homo sapiens
atgtgaaatatacag

SEQ ID NO: 1561133 - DNA, 15 bp, Homo sapiens
aatgtgaaatataca

SEQ ID NO: 1561134 - DNA, 15 bp, Homo sapiens
aaatgtgaaatatac

SEQ ID NO: 1561135 - DNA, 15 bp, Homo sapiens
taaatgtgaaatata

SEQ ID NO: 1561136 - DNA, 15 bp, Homo sapiens
ataaatgtgaaatat

SEQ ID NO: 1561137 - DNA, 15 bp, Homo sapiens
cataaatgtgaaata

SEQ ID NO: 1561138 - DNA, 15 bp, Homo sapiens
acataaatgtgaaat

SEQ ID NO: 1561139 - DNA, 15 bp, Homo sapiens
tacataaatgtgaaa

SEQ ID NO: 1561140 - DNA, 15 bp, Homo sapiens
ctacataaatgtgaa

SEQ ID NO: 1561141 - DNA, 15 bp, Homo sapiens
actacataaatgtga

SEQ ID NO: 1561142 - DNA, 15 bp, Homo sapiens
gactacataaatgtg

SEQ ID NO: 1561143 - DNA, 15 bp, Homo sapiens
agactacataaatgt

SEQ ID NO: 1561144 - DNA, 15 bp, Homo sapiens
aagactacataaatg

SEQ ID NO: 1561145 - DNA, 15 bp, Homo sapiens
gaagactacataaat

SEQ ID NO: 1561146 - DNA, 15 bp, Homo sapiens
ggaagactacataaa

SEQ ID NO: 1561147 - DNA, 15 bp, Homo sapiens
tggaagactacataa

SEQ ID NO: 1561148 - DNA, 15 bp, Homo sapiens
ttggaagactacata

SEQ ID NO: 1561149 - DNA, 15 bp, Homo sapiens
tttggaagactacat

SEQ ID NO: 1561150 - DNA, 15 bp, Homo sapiens
ttttggaagactaca

SEQ ID NO: 1561151 - DNA, 15 bp, Homo sapiens
attttggaagactac

SEQ ID NO: 1561152 - DNA, 15 bp, Homo sapiens
tattttggaagacta

SEQ ID NO: 1561153 - DNA, 15 bp, Homo sapiens
atattttggaagact

SEQ ID NO: 1561154 - DNA, 15 bp, Homo sapiens
catattttggaagac

SEQ ID NO: 1561155 - DNA, 15 bp, Homo sapiens
acatattttggaaga

SEQ ID NO: 1561156 - DNA, 15 bp, Homo sapiens
cacatattttggaag

SEQ ID NO: 1561157 - DNA, 15 bp, Homo sapiens
gcacatattttggaa

SEQ ID NO: 1561158 - DNA, 15 bp, Homo sapiens
tgcacatattttgga

SEQ ID NO: 1561159 - DNA, 15 bp, Homo sapiens
gtgcacatattttgg

SEQ ID NO: 1561160 - DNA, 15 bp, Homo sapiens
tgtgcacatattttg

SEQ ID NO: 1561161 - DNA, 15 bp, Homo sapiens
atgtgcacatatttt

SEQ ID NO: 1561162 - DNA, 15 bp, Homo sapiens
aatgtgcacatattt

SEQ ID NO: 1561163 - DNA, 15 bp, Homo sapiens
aaatgtgcacatatt

SEQ ID NO: 1561164 - DNA, 15 bp, Homo sapiens
taaatgtgcacatat

SEQ ID NO: 1561165 - DNA, 15 bp, Homo sapiens
ttaaatgtgcacata

SEQ ID NO: 1561166 - DNA, 15 bp, Homo sapiens
gttaaatgtgcacat

SEQ ID NO: 1561167 - DNA, 15 bp, Homo sapiens
tgttaaatgtgcaca

SEQ ID NO: 1561168 - DNA, 15 bp, Homo sapiens
ctgttaaatgtgcac

SEQ ID NO: 1561169 - DNA, 15 bp, Homo sapiens
cctgttaaatgtgca

SEQ ID NO: 1561170 - DNA, 15 bp, Homo sapiens
acctgttaaatgtgc

SEQ ID NO: 1561171 - DNA, 15 bp, Homo sapiens
tacctgttaaatgtg

SEQ ID NO: 1561172 - DNA, 15 bp, Homo sapiens
gtacctgttaaatgt

SEQ ID NO: 1561173 - DNA, 15 bp, Homo sapiens
agtacctgttaaatg

SEQ ID NO: 1561174 - DNA, 15 bp, Homo sapiens
tagtacctgttaaat

SEQ ID NO: 1561175 - DNA, 15 bp, Homo sapiens
atagtacctgttaaa

SEQ ID NO: 1561176 - DNA, 15 bp, Homo sapiens
catagtacctgttaa

SEQ ID NO: 1561177 - DNA, 15 bp, Homo sapiens
gcatagtacctgtta

SEQ ID NO: 1561178 - DNA, 15 bp, Homo sapiens
agcatagtacctgtt

SEQ ID NO: 1561179 - DNA, 15 bp, Homo sapiens
gagcatagtacctgt

SEQ ID NO: 1561180 - DNA, 15 bp, Homo sapiens
agagcatagtacctg

SEQ ID NO: 1561181 - DNA, 15 bp, Homo sapiens
aagagcatagtacct

SEQ ID NO: 1561182 - DNA, 15 bp, Homo sapiens
aaagagcatagtacc

SEQ ID NO: 1561183 - DNA, 15 bp, Homo sapiens
taaagagcatagtac

SEQ ID NO: 1561184 - DNA, 15 bp, Homo sapiens
ctaaagagcatagta

SEQ ID NO: 1561185 - DNA, 15 bp, Homo sapiens
cctaaagagcatagt

SEQ ID NO: 1561186 - DNA, 15 bp, Homo sapiens
tcctaaagagcatag

SEQ ID NO: 1561187 - DNA, 15 bp, Homo sapiens
ctcctaaagagcata

SEQ ID NO: 1561188 - DNA, 15 bp, Homo sapiens
tctcctaaagagcat

SEQ ID NO: 1561189 - DNA, 15 bp, Homo sapiens
gtctcctaaagagca

SEQ ID NO: 1561190 - DNA, 15 bp, Homo sapiens
agtctcctaaagagc

SEQ ID NO: 1561191 - DNA, 15 bp, Homo sapiens
cagtctcctaaagag

SEQ ID NO: 1561192 - DNA, 15 bp, Homo sapiens
acagtctcctaaaga

SEQ ID NO: 1561193 - DNA, 15 bp, Homo sapiens
tacagtctcctaaag

SEQ ID NO: 1561194 - DNA, 15 bp, Homo sapiens
ttacagtctcctaaa

SEQ ID NO: 1561195 - DNA, 15 bp, Homo sapiens
cttacagtctcctaa

SEQ ID NO: 1561196 - DNA, 15 bp, Homo sapiens
tcttacagtctccta

SEQ ID NO: 1561197 - DNA, 15 bp, Homo sapiens
ttcttacagtctcct

SEQ ID NO: 1561198 - DNA, 15 bp, Homo sapiens
cttcttacagtctcc

SEQ ID NO: 1561199 - DNA, 15 bp, Homo sapiens
acttcttacagtctc

SEQ ID NO: 1561200 - DNA, 15 bp, Homo sapiens
aacttcttacagtct

SEQ ID NO: 1561201 - DNA, 15 bp, Homo sapiens
gaacttcttacagtc

SEQ ID NO: 1561202 - DNA, 15 bp, Homo sapiens
tgaacttcttacagt

SEQ ID NO: 1561203 - DNA, 15 bp, Homo sapiens
atgaacttcttacag

SEQ ID NO: 1561204 - DNA, 15 bp, Homo sapiens
gatgaacttcttaca

SEQ ID NO: 1561205 - DNA, 15 bp, Homo sapiens
ggatgaacttcttac

SEQ ID NO: 1561206 - DNA, 15 bp, Homo sapiens
aggatgaacttctta

SEQ ID NO: 1561207 - DNA, 15 bp, Homo sapiens
caggatgaacttctt

SEQ ID NO: 1561208 - DNA, 15 bp, Homo sapiens
acaggatgaacttct

SEQ ID NO: 1561209 - DNA, 15 bp, Homo sapiens
aacaggatgaacttc

SEQ ID NO: 1561210 - DNA, 15 bp, Homo sapiens
aaacaggatgaactt

SEQ ID NO: 1561211 - DNA, 15 bp, Homo sapiens
aaaacaggatgaact

SEQ ID NO: 1561212 - DNA, 15 bp, Homo sapiens
taaaacaggatgaac

SEQ ID NO: 1561213 - DNA, 15 bp, Homo sapiens
ttaaaacaggatgaa

SEQ ID NO: 1561214 - DNA, 15 bp, Homo sapiens
cttaaaacaggatga

SEQ ID NO: 1561215 - DNA, 15 bp, Homo sapiens
gacttaaaacaggat

SEQ ID NO: 1561216 - DNA, 15 bp, Homo sapiens
tgacttaaaacagga

SEQ ID NO: 1561217 - DNA, 15 bp, Homo sapiens
gtgacttaaaacagg

SEQ ID NO: 1561218 - DNA, 15 bp, Homo sapiens
tgtgacttaaaacag

SEQ ID NO: 1561219 - DNA, 15 bp, Homo sapiens
gtgtgacttaaaaca

SEQ ID NO: 1561220 - DNA, 15 bp, Homo sapiens
agtgtgacttaaaac

SEQ ID NO: 1561221 - DNA, 15 bp, Homo sapiens
aagtgtgacttaaaa

SEQ ID NO: 1561222 - DNA, 15 bp, Homo sapiens
caagtgtgacttaaa

SEQ ID NO: 1561223 - DNA, 15 bp, Homo sapiens
acaagtgtgacttaa

SEQ ID NO: 1561224 - DNA, 15 bp, Homo sapiens
cacaagtgtgactta

SEQ ID NO: 1561225 - DNA, 15 bp, Homo sapiens
tcacaagtgtgactt

SEQ ID NO: 1561226 - DNA, 15 bp, Homo sapiens
atcacaagtgtgact

SEQ ID NO: 1561227 - DNA, 15 bp, Homo sapiens
aatcacaagtgtgac

SEQ ID NO: 1561228 - DNA, 15 bp, Homo sapiens
aaatcacaagtgtga

SEQ ID NO: 1561229 - DNA, 15 bp, Homo sapiens
caaatcacaagtgtg

SEQ ID NO: 1561230 - DNA, 15 bp, Homo sapiens
acaaatcacaagtgt

SEQ ID NO: 1561231 - DNA, 15 bp, Homo sapiens
aacaaatcacaagtg

SEQ ID NO: 1561232 - DNA, 15 bp, Homo sapiens
taacaaatcacaagt

SEQ ID NO: 1561233 - DNA, 15 bp, Homo sapiens
ttaacaaatcacaag

SEQ ID NO: 1561234 - DNA, 15 bp, Homo sapiens
tttaacaaatcacaa

SEQ ID NO: 1561235 - DNA, 15 bp, Homo sapiens
atttaacaaatcaca

SEQ ID NO: 1561236 - DNA, 15 bp, Homo sapiens
aatttaacaaatcac

SEQ ID NO: 1561237 - DNA, 15 bp, Homo sapiens
aaatttaacaaatca

SEQ ID NO: 1561238 - DNA, 15 bp, Homo sapiens
aaaatttaacaaatc

SEQ ID NO: 1561239 - DNA, 15 bp, Homo sapiens
aaaaatttaacaaat

SEQ ID NO: 1561240 - DNA, 15 bp, Homo sapiens
aaaaaatttaacaaa

SEQ ID NO: 1561241 - DNA, 15 bp, Homo sapiens
taaaaaatttaacaa

SEQ ID NO: 1561242 - DNA, 15 bp, Homo sapiens
ttaaaaaatttaaca

SEQ ID NO: 1561243 - DNA, 15 bp, Homo sapiens
gttaaaaaatttaac

SEQ ID NO: 1561244 - DNA, 15 bp, Homo sapiens
ggttaaaaaatttaa

SEQ ID NO: 1561245 - DNA, 15 bp, Homo sapiens
aggttaaaaaattta

SEQ ID NO: 1561246 - DNA, 15 bp, Homo sapiens
caggttaaaaaattt

SEQ ID NO: 1561247 - DNA, 15 bp, Homo sapiens
gcaggttaaaaaatt

SEQ ID NO: 1561248 - DNA, 15 bp, Homo sapiens
ggcaggttaaaaaat

SEQ ID NO: 1561249 - DNA, 15 bp, Homo sapiens
tggcaggttaaaaaa

SEQ ID NO: 1561250 - DNA, 15 bp, Homo sapiens
gtggcaggttaaaaa

SEQ ID NO: 1561251 - DNA, 15 bp, Homo sapiens
ggtggcaggttaaaa

SEQ ID NO: 1561252 - DNA, 15 bp, Homo sapiens
cggtggcaggttaaa

SEQ ID NO: 1561253 - DNA, 15 bp, Homo sapiens
acggtggcaggttaa

SEQ ID NO: 1561254 - DNA, 15 bp, Homo sapiens
aacggtggcaggtta

SEQ ID NO: 1561255 - DNA, 15 bp, Homo sapiens
aaacggtggcaggtt

SEQ ID NO: 1561256 - DNA, 15 bp, Homo sapiens
aaaacggtggcaggt

SEQ ID NO: 1561257 - DNA, 15 bp, Homo sapiens
gaaaacggtggcagg

SEQ ID NO: 1561258 - DNA, 15 bp, Homo sapiens
ggaaaacggtggcag

SEQ ID NO: 1561259 - DNA, 15 bp, Homo sapiens
aggaaaacggtggca

SEQ ID NO: 1561260 - DNA, 15 bp, Homo sapiens
aaggaaaacggtggc

SEQ ID NO: 1561261 - DNA, 15 bp, Homo sapiens
aaaggaaaacggtgg

SEQ ID NO: 1561262 - DNA, 15 bp, Homo sapiens
aaaaggaaaacggtg

SEQ ID NO: 1561263 - DNA, 15 bp, Homo sapiens
taaaaggaaaacggt

SEQ ID NO: 1561264 - DNA, 15 bp, Homo sapiens
ctaaaaggaaaacgg

SEQ ID NO: 1561265 - DNA, 15 bp, Homo sapiens
gctaaaaggaaaacg

SEQ ID NO: 1561266 - DNA, 15 bp, Homo sapiens
agctaaaaggaaaac

SEQ ID NO: 1561267 - DNA, 15 bp, Homo sapiens
aagctaaaaggaaaa

SEQ ID NO: 1561268 - DNA, 15 bp, Homo sapiens
aaagctaaaaggaaa

SEQ ID NO: 1561269 - DNA, 15 bp, Homo sapiens
taaagctaaaaggaa

SEQ ID NO: 1561270 - DNA, 15 bp, Homo sapiens
gtaaagctaaaagga

SEQ ID NO: 1561271 - DNA, 15 bp, Homo sapiens
agtaaagctaaaagg

SEQ ID NO: 1561272 - DNA, 15 bp, Homo sapiens
aagtaaagctaaaag

SEQ ID NO: 1561273 - DNA, 15 bp, Homo sapiens
taagtaaagctaaaa

SEQ ID NO: 1561274 - DNA, 15 bp, Homo sapiens
gtaagtaaagctaaa

SEQ ID NO: 1561275 - DNA, 15 bp, Homo sapiens
tgtaagtaaagctaa

SEQ ID NO: 1561276 - DNA, 15 bp, Homo sapiens
ctgtaagtaaagcta

SEQ ID NO: 1561277 - DNA, 15 bp, Homo sapiens
actgtaagtaaagct

SEQ ID NO: 1561278 - DNA, 15 bp, Homo sapiens
cactgtaagtaaagc

SEQ ID NO: 1561279 - DNA, 15 bp, Homo sapiens
acactgtaagtaaag

SEQ ID NO: 1561280 - DNA, 15 bp, Homo sapiens
gacactgtaagtaaa

SEQ ID NO: 1561281 - DNA, 15 bp, Homo sapiens
agacactgtaagtaa

SEQ ID NO: 1561282 - DNA, 15 bp, Homo sapiens
cagacactgtaagta

SEQ ID NO: 1561283 - DNA, 15 bp, Homo sapiens
tcagacactgtaagt

SEQ ID NO: 1561284 - DNA, 15 bp, Homo sapiens
ttcagacactgtaag

SEQ ID NO: 1561285 - DNA, 15 bp, Homo sapiens
cttcagacactgtaa

SEQ ID NO: 1561286 - DNA, 15 bp, Homo sapiens
tcttcagacactgta

SEQ ID NO: 1561287 - DNA, 15 bp, Homo sapiens
ttcttcagacactgt

SEQ ID NO: 1561288 - DNA, 15 bp, Homo sapiens
cttcttcagacactg

SEQ ID NO: 1561289 - DNA, 15 bp, Homo sapiens
acttcttcagacact

SEQ ID NO: 1561290 - DNA, 15 bp, Homo sapiens
aacttcttcagacac

SEQ ID NO: 1561291 - DNA, 15 bp, Homo sapiens
gaacttcttcagaca

SEQ ID NO: 1561292 - DNA, 15 bp, Homo sapiens
cgaacttcttcagac

SEQ ID NO: 1561293 - DNA, 15 bp, Homo sapiens
tcgaacttcttcaga

SEQ ID NO: 1561294 - DNA, 15 bp, Homo sapiens
ttcgaacttcttcag

SEQ ID NO: 1561295 - DNA, 15 bp, Homo sapiens
cttcgaacttcttca

SEQ ID NO: 1561296 - DNA, 15 bp, Homo sapiens
acttcgaacttcttc

SEQ ID NO: 1561297 - DNA, 15 bp, Homo sapiens
gacttcgaacttctt

SEQ ID NO: 1561298 - DNA, 15 bp, Homo sapiens
cgacttcgaacttct

SEQ ID NO: 1561299 - DNA, 15 bp, Homo sapiens
gcgacttcgaacttc

SEQ ID NO: 1561300 - DNA, 15 bp, Homo sapiens
agcgacttcgaactt

SEQ ID NO: 1561301 - DNA, 15 bp, Homo sapiens
cagcgacttcgaact

SEQ ID NO: 1561302 - DNA, 15 bp, Homo sapiens
gcagcgacttcgaac

SEQ ID NO: 1561303 - DNA, 15 bp, Homo sapiens
tgcagcgacttcgaa

SEQ ID NO: 1561304 - DNA, 15 bp, Homo sapiens
ctgcagcgacttcga

SEQ ID NO: 1561305 - DNA, 15 bp, Homo sapiens
gctgcagcgacttcg

SEQ ID NO: 1561306 - DNA, 15 bp, Homo sapiens
ggctgcagcgacttc

SEQ ID NO: 1561307 - DNA, 15 bp, Homo sapiens
aggctgcagcgactt

SEQ ID NO: 1561308 - DNA, 15 bp, Homo sapiens
taggctgcagcgact

SEQ ID NO: 1561309 - DNA, 15 bp, Homo sapiens
ttaggctgcagcgac

SEQ ID NO: 1561310 - DNA, 15 bp, Homo sapiens
tttaggctgcagcga

SEQ ID NO: 1561311 - DNA, 15 bp, Homo sapiens
ttttaggctgcagcg

SEQ ID NO: 1561312 - DNA, 15 bp, Homo sapiens
gttttaggctgcagc

SEQ ID NO: 1561313 - DNA, 15 bp, Homo sapiens
tgttttaggctgcag

SEQ ID NO: 1561314 - DNA, 15 bp, Homo sapiens
atgttttaggctgca

SEQ ID NO: 1561315 - DNA, 15 bp, Homo sapiens
tatgttttaggctgc

SEQ ID NO: 1561316 - DNA, 15 bp, Homo sapiens
ctatgttttaggctg

SEQ ID NO: 1561317 - DNA, 15 bp, Homo sapiens
tctatgttttaggct

SEQ ID NO: 1561318 - DNA, 15 bp, Homo sapiens
ttctatgttttaggc

SEQ ID NO: 1561319 - DNA, 15 bp, Homo sapiens
tttctatgttttagg

SEQ ID NO: 1561320 - DNA, 15 bp, Homo sapiens
ctttctatgttttag

SEQ ID NO: 1561321 - DNA, 15 bp, Homo sapiens
actttctatgtttta

SEQ ID NO: 1561322 - DNA, 15 bp, Homo sapiens
gactttctatgtttt

SEQ ID NO: 1561323 - DNA, 15 bp, Homo sapiens
tgactttctatgttt

SEQ ID NO: 1561324 - DNA, 15 bp, Homo sapiens
gtgactttctatgtt

SEQ ID NO: 1561325 - DNA, 15 bp, Homo sapiens
agtgactttctatgt

SEQ ID NO: 1561326 - DNA, 15 bp, Homo sapiens
aagtgactttctatg

SEQ ID NO: 1561327 - DNA, 15 bp, Homo sapiens
gaagtgactttctat

SEQ ID NO: 1561328 - DNA, 15 bp, Homo sapiens
agaagtgactttcta

SEQ ID NO: 1561329 - DNA, 15 bp, Homo sapiens
aagaagtgactttct

SEQ ID NO: 1561330 - DNA, 15 bp, Homo sapiens
gaagaagtgactttc

SEQ ID NO: 1561331 - DNA, 15 bp, Homo sapiens
agaagaagtgacttt

SEQ ID NO: 1561332 - DNA, 15 bp, Homo sapiens
aagaagaagtgactt

SEQ ID NO: 1561333 - DNA, 15 bp, Homo sapiens
taagaagaagtgact

SEQ ID NO: 1561334 - DNA, 15 bp, Homo sapiens
gtaagaagaagtgac

SEQ ID NO: 1561335 - DNA, 15 bp, Homo sapiens
agtaagaagaagtga

SEQ ID NO: 1561336 - DNA, 15 bp, Homo sapiens
cagtaagaagaagtg

SEQ ID NO: 1561337 - DNA, 15 bp, Homo sapiens
tcagtaagaagaagt

SEQ ID NO: 1561338 - DNA, 15 bp, Homo sapiens
atcagtaagaagaag

SEQ ID NO: 1561339 - DNA, 15 bp, Homo sapiens
tatcagtaagaagaa

SEQ ID NO: 1561340 - DNA, 15 bp, Homo sapiens
atatcagtaagaaga

SEQ ID NO: 1561341 - DNA, 15 bp, Homo sapiens
aatatcagtaagaag

SEQ ID NO: 1561342 - DNA, 15 bp, Homo sapiens
aaatatcagtaagaa

SEQ ID NO: 1561343 - DNA, 15 bp, Homo sapiens
gaaatatcagtaaga

SEQ ID NO: 1561344 - DNA, 15 bp, Homo sapiens
tgaaatatcagtaag

SEQ ID NO: 1561345 - DNA, 15 bp, Homo sapiens
ttgaaatatcagtaa

SEQ ID NO: 1561346 - DNA, 15 bp, Homo sapiens
attgaaatatcagta

SEQ ID NO: 1561347 - DNA, 15 bp, Homo sapiens
cattgaaatatcagt

SEQ ID NO: 1561348 - DNA, 15 bp, Homo sapiens
ccattgaaatatcag

SEQ ID NO: 1561349 - DNA, 15 bp, Homo sapiens
tccattgaaatatca

SEQ ID NO: 1561350 - DNA, 15 bp, Homo sapiens
ttccattgaaatatc

SEQ ID NO: 1561351 - DNA, 15 bp, Homo sapiens
tttccattgaaatat

SEQ ID NO: 1561352 - DNA, 15 bp, Homo sapiens
ttttccattgaaata

SEQ ID NO: 1561353 - DNA, 15 bp, Homo sapiens
attttccattgaaat

SEQ ID NO: 1561354 - DNA, 15 bp, Homo sapiens
cattttccattgaaa

SEQ ID NO: 1561355 - DNA, 15 bp, Homo sapiens
acattttccattgaa

SEQ ID NO: 1561356 - DNA, 15 bp, Homo sapiens
aacattttccattga

SEQ ID NO: 1561357 - DNA, 15 bp, Homo sapiens
gaacattttccattg

SEQ ID NO: 1561358 - DNA, 15 bp, Homo sapiens
ggaacattttccatt

SEQ ID NO: 1561359 - DNA, 15 bp, Homo sapiens
aggaacattttccat

SEQ ID NO: 1561360 - DNA, 15 bp, Homo sapiens
taggaacattttcca

SEQ ID NO: 1561361 - DNA, 15 bp, Homo sapiens
ataggaacattttcc

SEQ ID NO: 1561362 - DNA, 15 bp, Homo sapiens
cataggaacattttc

SEQ ID NO: 1561363 - DNA, 15 bp, Homo sapiens
ccataggaacatttt

SEQ ID NO: 1561364 - DNA, 15 bp, Homo sapiens
tccataggaacattt

SEQ ID NO: 1561365 - DNA, 15 bp, Homo sapiens
atccataggaacatt

SEQ ID NO: 1561366 - DNA, 15 bp, Homo sapiens
tatccataggaacat

SEQ ID NO: 1561367 - DNA, 15 bp, Homo sapiens
gtatccataggaaca

SEQ ID NO: 1561368 - DNA, 15 bp, Homo sapiens
tgtatccataggaac

SEQ ID NO: 1561369 - DNA, 15 bp, Homo sapiens
atgtatccataggaa

SEQ ID NO: 1561370 - DNA, 15 bp, Homo sapiens
tatgtatccatagga

SEQ ID NO: 1561371 - DNA, 15 bp, Homo sapiens
atatgtatccatagg

SEQ ID NO: 1561372 - DNA, 15 bp, Homo sapiens
gatatgtatccatag

SEQ ID NO: 1561373 - DNA, 15 bp, Homo sapiens
ggatatgtatccata

SEQ ID NO: 1561374 - DNA, 15 bp, Homo sapiens
gggatatgtatccat

SEQ ID NO: 1561375 - DNA, 15 bp, Homo sapiens
tgggatatgtatcca

SEQ ID NO: 1561376 - DNA, 15 bp, Homo sapiens
atgggatatgtatcc

SEQ ID NO: 1561377 - DNA, 15 bp, Homo sapiens
aatgggatatgtatc

SEQ ID NO: 1561378 - DNA, 15 bp, Homo sapiens
gaatgggatatgtat

SEQ ID NO: 1561379 - DNA, 15 bp, Homo sapiens
tgaatgggatatgta

SEQ ID NO: 1561380 - DNA, 15 bp, Homo sapiens
atgaatgggatatgt

SEQ ID NO: 1561381 - DNA, 15 bp, Homo sapiens
gatgaatgggatatg

SEQ ID NO: 1561382 - DNA, 15 bp, Homo sapiens
tgatgaatgggatat

SEQ ID NO: 1561383 - DNA, 15 bp, Homo sapiens
atgatgaatgggata

SEQ ID NO: 1561384 - DNA, 15 bp, Homo sapiens
catgatgaatgggat

SEQ ID NO: 1561385 - DNA, 15 bp, Homo sapiens
ccatgatgaatggga

SEQ ID NO: 1561386 - DNA, 15 bp, Homo sapiens
accatgatgaatggg

SEQ ID NO: 1561387 - DNA, 15 bp, Homo sapiens
caccatgatgaatgg

SEQ ID NO: 1561388 - DNA, 15 bp, Homo sapiens
tcaccatgatgaatg

SEQ ID NO: 1561389 - DNA, 15 bp, Homo sapiens
gtcaccatgatgaat

SEQ ID NO: 1561390 - DNA, 15 bp, Homo sapiens
ggtcaccatgatgaa

SEQ ID NO: 1561391 - DNA, 15 bp, Homo sapiens
gggtcaccatgatga

SEQ ID NO: 1561392 - DNA, 15 bp, Homo sapiens
agggtcaccatgatg

SEQ ID NO: 1561393 - DNA, 15 bp, Homo sapiens
aagggtcaccatgat

SEQ ID NO: 1561394 - DNA, 15 bp, Homo sapiens
gaagggtcaccatga

SEQ ID NO: 1561395 - DNA, 15 bp, Homo sapiens
ggaagggtcaccatg

SEQ ID NO: 1561396 - DNA, 15 bp, Homo sapiens
aggaagggtcaccat

SEQ ID NO: 1561397 - DNA, 15 bp, Homo sapiens
taggaagggtcacca

SEQ ID NO: 1561398 - DNA, 15 bp, Homo sapiens
ataggaagggtcacc

SEQ ID NO: 1561399 - DNA, 15 bp, Homo sapiens
tataggaagggtcac

SEQ ID NO: 1561400 - DNA, 15 bp, Homo sapiens
ctataggaagggtca

SEQ ID NO: 1561401 - DNA, 15 bp, Homo sapiens
cctataggaagggtc

SEQ ID NO: 1561402 - DNA, 15 bp, Homo sapiens
acctataggaagggt

SEQ ID NO: 1561403 - DNA, 15 bp, Homo sapiens
tacctataggaaggg

SEQ ID NO: 1561404 - DNA, 15 bp, Homo sapiens
ttacctataggaagg

SEQ ID NO: 1561405 - DNA, 15 bp, Homo sapiens
cttacctataggaag

SEQ ID NO: 1561406 - DNA, 15 bp, Homo sapiens
acttacctataggaa

SEQ ID NO: 1561407 - DNA, 15 bp, Homo sapiens
cacttacctatagga

SEQ ID NO: 1561408 - DNA, 15 bp, Homo sapiens
ccacttacctatagg

SEQ ID NO: 1561409 - DNA, 15 bp, Homo sapiens
tccacttacctatag

SEQ ID NO: 1561410 - DNA, 15 bp, Homo sapiens
atccacttacctata

SEQ ID NO: 1561411 - DNA, 15 bp, Homo sapiens
aatccacttacctat

SEQ ID NO: 1561412 - DNA, 15 bp, Homo sapiens
aaatccacttaccta

SEQ ID NO: 1561413 - DNA, 15 bp, Homo sapiens
taaatccacttacct

SEQ ID NO: 1561414 - DNA, 15 bp, Homo sapiens
gtaaatccacttacc

SEQ ID NO: 1561415 - DNA, 15 bp, Homo sapiens
agtaaatccacttac

SEQ ID NO: 1561416 - DNA, 15 bp, Homo sapiens
gagtaaatccactta

SEQ ID NO: 1561417 - DNA, 15 bp, Homo sapiens
agagtaaatccactt

SEQ ID NO: 1561418 - DNA, 15 bp, Homo sapiens
gagagtaaatccact

SEQ ID NO: 1561419 - DNA, 15 bp, Homo sapiens
ggagagtaaatccac

SEQ ID NO: 1561420 - DNA, 15 bp, Homo sapiens
aggagagtaaatcca

SEQ ID NO: 1561421 - DNA, 15 bp, Homo sapiens
taggagagtaaatcc

SEQ ID NO: 1561422 - DNA, 15 bp, Homo sapiens
ataggagagtaaatc

SEQ ID NO: 1561423 - DNA, 15 bp, Homo sapiens
tataggagagtaaat

SEQ ID NO: 1561424 - DNA, 15 bp, Homo sapiens
ttataggagagtaaa

SEQ ID NO: 1561425 - DNA, 15 bp, Homo sapiens
attataggagagtaa

SEQ ID NO: 1561426 - DNA, 15 bp, Homo sapiens
aattataggagagta

SEQ ID NO: 1561427 - DNA, 15 bp, Homo sapiens
taattataggagagt

SEQ ID NO: 1561428 - DNA, 15 bp, Homo sapiens
gtaattataggagag

SEQ ID NO: 1561429 - DNA, 15 bp, Homo sapiens
tgtaattataggaga

SEQ ID NO: 1561430 - DNA, 15 bp, Homo sapiens
atgtaattataggag

SEQ ID NO: 1561431 - DNA, 15 bp, Homo sapiens
tatgtaattatagga

SEQ ID NO: 1561432 - DNA, 15 bp, Homo sapiens
ttatgtaattatagg

SEQ ID NO: 1561433 - DNA, 15 bp, Homo sapiens
attatgtaattatag

SEQ ID NO: 1561434 - DNA, 15 bp, Homo sapiens
gattatgtaattata

SEQ ID NO: 1561435 - DNA, 15 bp, Homo sapiens
tgattatgtaattat

SEQ ID NO: 1561436 - DNA, 15 bp, Homo sapiens
atgattatgtaatta

SEQ ID NO: 1561437 - DNA, 15 bp, Homo sapiens
tatgattatgtaatt

SEQ ID NO: 1561438 - DNA, 15 bp, Homo sapiens
ttatgattatgtaat

SEQ ID NO: 1561439 - DNA, 15 bp, Homo sapiens
attatgattatgtaa

SEQ ID NO: 1561440 - DNA, 15 bp, Homo sapiens
gattatgattatgta

SEQ ID NO: 1561441 - DNA, 15 bp, Homo sapiens
tgattatgattatgt

SEQ ID NO: 1561442 - DNA, 15 bp, Homo sapiens
ttgattatgattatg

SEQ ID NO: 1561443 - DNA, 15 bp, Homo sapiens
cttgattatgattat

SEQ ID NO: 1561444 - DNA, 15 bp, Homo sapiens
acttgattatgatta

SEQ ID NO: 1561445 - DNA, 15 bp, Homo sapiens
aacttgattatgatt

SEQ ID NO: 1561446 - DNA, 15 bp, Homo sapiens
aaacttgattatgat

SEQ ID NO: 1561447 - DNA, 15 bp, Homo sapiens
gaaacttgattatga

SEQ ID NO: 1561448 - DNA, 15 bp, Homo sapiens
tgaaacttgattatg

SEQ ID NO: 1561449 - DNA, 15 bp, Homo sapiens
ttgaaacttgattat

SEQ ID NO: 1561450 - DNA, 15 bp, Homo sapiens
attgaaacttgatta

SEQ ID NO: 1561451 - DNA, 15 bp, Homo sapiens
aattgaaacttgatt

SEQ ID NO: 1561452 - DNA, 15 bp, Homo sapiens
aaattgaaacttgat

SEQ ID NO: 1561453 - DNA, 15 bp, Homo sapiens
aaaattgaaacttga

SEQ ID NO: 1561454 - DNA, 15 bp, Homo sapiens
gaaaattgaaacttg

SEQ ID NO: 1561455 - DNA, 15 bp, Homo sapiens
ggaaaattgaaactt

SEQ ID NO: 1561456 - DNA, 15 bp, Homo sapiens
tggaaaattgaaact

SEQ ID NO: 1561457 - DNA, 15 bp, Homo sapiens
ttggaaaattgaaac

SEQ ID NO: 1561458 - DNA, 15 bp, Homo sapiens
gttggaaaattgaaa

SEQ ID NO: 1561459 - DNA, 15 bp, Homo sapiens
agttggaaaattgaa

SEQ ID NO: 1561460 - DNA, 15 bp, Homo sapiens
tagttggaaaattga

SEQ ID NO: 1561461 - DNA, 15 bp, Homo sapiens
ttagttggaaaattg

SEQ ID NO: 1561462 - DNA, 15 bp, Homo sapiens
attagttggaaaatt

SEQ ID NO: 1561463 - DNA, 15 bp, Homo sapiens
cattagttggaaaat

SEQ ID NO: 1561464 - DNA, 15 bp, Homo sapiens
ccattagttggaaaa

SEQ ID NO: 1561465 - DNA, 15 bp, Homo sapiens
tccattagttggaaa

SEQ ID NO: 1561466 - DNA, 15 bp, Homo sapiens
ctccattagttggaa

SEQ ID NO: 1561467 - DNA, 15 bp, Homo sapiens
cctccattagttgga

SEQ ID NO: 1561468 - DNA, 15 bp, Homo sapiens
gcctccattagttgg

SEQ ID NO: 1561469 - DNA, 15 bp, Homo sapiens
tgcctccattagttg

SEQ ID NO: 1561470 - DNA, 15 bp, Homo sapiens
ttgcctccattagtt

SEQ ID NO: 1561471 - DNA, 15 bp, Homo sapiens
cttgcctccattagt

SEQ ID NO: 1561472 - DNA, 15 bp, Homo sapiens
gcttgcctccattag

SEQ ID NO: 1561473 - DNA, 15 bp, Homo sapiens
tgcttgcctccatta

SEQ ID NO: 1561474 - DNA, 15 bp, Homo sapiens
ctgcttgcctccatt

SEQ ID NO: 1561475 - DNA, 15 bp, Homo sapiens
gctgcttgcctccat

SEQ ID NO: 1561476 - DNA, 15 bp, Homo sapiens
tgctgcttgcctcca

SEQ ID NO: 1561477 - DNA, 15 bp, Homo sapiens
ctgctgcttgcctcc

SEQ ID NO: 1561478 - DNA, 15 bp, Homo sapiens
tctgctgcttgcctc

SEQ ID NO: 1561479 - DNA, 15 bp, Homo sapiens
ctctgctgcttgcct

SEQ ID NO: 1561480 - DNA, 15 bp, Homo sapiens
actctgctgcttgcc

SEQ ID NO: 1561481 - DNA, 15 bp, Homo sapiens
tactctgctgcttgc

SEQ ID NO: 1561482 - DNA, 15 bp, Homo sapiens
ttactctgctgcttg

SEQ ID NO: 1561483 - DNA, 15 bp, Homo sapiens
attactctgctgctt

SEQ ID NO: 1561484 - DNA, 15 bp, Homo sapiens
gattactctgctgct

SEQ ID NO: 1561485 - DNA, 15 bp, Homo sapiens
agattactctgctgc

SEQ ID NO: 1561486 - DNA, 15 bp, Homo sapiens
tagattactctgctg

SEQ ID NO: 1561487 - DNA, 15 bp, Homo sapiens
ctagattactctgct

SEQ ID NO: 1561488 - DNA, 15 bp, Homo sapiens
tctagattactctgc

SEQ ID NO: 1561489 - DNA, 15 bp, Homo sapiens
ttctagattactctg

SEQ ID NO: 1561490 - DNA, 15 bp, Homo sapiens
cttctagattactct

SEQ ID NO: 1561491 - DNA, 15 bp, Homo sapiens
ccttctagattactc

SEQ ID NO: 1561492 - DNA, 15 bp, Homo sapiens
accttctagattact

SEQ ID NO: 1561493 - DNA, 15 bp, Homo sapiens
taccttctagattac

SEQ ID NO: 1561494 - DNA, 15 bp, Homo sapiens
ttaccttctagatta

SEQ ID NO: 1561495 - DNA, 15 bp, Homo sapiens
gttaccttctagatt

SEQ ID NO: 1561496 - DNA, 15 bp, Homo sapiens
tgttaccttctagat

SEQ ID NO: 1561497 - DNA, 15 bp, Homo sapiens
atgttaccttctaga

SEQ ID NO: 1561498 - DNA, 15 bp, Homo sapiens
catgttaccttctag

SEQ ID NO: 1561499 - DNA, 15 bp, Homo sapiens
ccatgttaccttcta

SEQ ID NO: 1561500 - DNA, 15 bp, Homo sapiens
cccatgttaccttct

SEQ ID NO: 1561501 - DNA, 15 bp, Homo sapiens
tcccatgttaccttc

SEQ ID NO: 1561502 - DNA, 15 bp, Homo sapiens
ctcccatgttacctt

SEQ ID NO: 1561503 - DNA, 15 bp, Homo sapiens
tctcccatgttacct

SEQ ID NO: 1561504 - DNA, 15 bp, Homo sapiens
ttctcccatgttacc

SEQ ID NO: 1561505 - DNA, 15 bp, Homo sapiens
tttctcccatgttac

SEQ ID NO: 1561506 - DNA, 15 bp, Homo sapiens
atttctcccatgtta

SEQ ID NO: 1561507 - DNA, 15 bp, Homo sapiens
gatttctcccatgtt

SEQ ID NO: 1561508 - DNA, 15 bp, Homo sapiens
agatttctcccatgt

SEQ ID NO: 1561509 - DNA, 15 bp, Homo sapiens
tagatttctcccatg

SEQ ID NO: 1561510 - DNA, 15 bp, Homo sapiens
ctagatttctcccat

SEQ ID NO: 1561511 - DNA, 15 bp, Homo sapiens
tctagatttctccca

SEQ ID NO: 1561512 - DNA, 15 bp, Homo sapiens
ctctagatttctccc

SEQ ID NO: 1561513 - DNA, 15 bp, Homo sapiens
tctctagatttctcc

SEQ ID NO: 1561514 - DNA, 15 bp, Homo sapiens
atctctagatttctc

SEQ ID NO: 1561515 - DNA, 15 bp, Homo sapiens
catctctagatttct

SEQ ID NO: 1561516 - DNA, 15 bp, Homo sapiens
ccatctctagatttc

SEQ ID NO: 1561517 - DNA, 15 bp, Homo sapiens
gccatctctagattt

SEQ ID NO: 1561518 - DNA, 15 bp, Homo sapiens
ggccatctctagatt

SEQ ID NO: 1561519 - DNA, 15 bp, Homo sapiens
aggccatctctagat

SEQ ID NO: 1561520 - DNA, 15 bp, Homo sapiens
taggccatctctaga

SEQ ID NO: 1561521 - DNA, 15 bp, Homo sapiens
ctaggccatctctag

SEQ ID NO: 1561522 - DNA, 15 bp, Homo sapiens
cctaggccatctcta

SEQ ID NO: 1561523 - DNA, 15 bp, Homo sapiens
tcctaggccatctct

SEQ ID NO: 1561524 - DNA, 15 bp, Homo sapiens
ttcctaggccatctc

SEQ ID NO: 1561525 - DNA, 15 bp, Homo sapiens
cttcctaggccatct

SEQ ID NO: 1561526 - DNA, 15 bp, Homo sapiens
tcttcctaggccatc

SEQ ID NO: 1561527 - DNA, 15 bp, Homo sapiens
ctcttcctaggccat

SEQ ID NO: 1561528 - DNA, 15 bp, Homo sapiens
actcttcctaggcca

SEQ ID NO: 1561529 - DNA, 15 bp, Homo sapiens
tactcttcctaggcc

SEQ ID NO: 1561530 - DNA, 15 bp, Homo sapiens
ttactcttcctaggc

SEQ ID NO: 1561531 - DNA, 15 bp, Homo sapiens
cttactcttcctagg

SEQ ID NO: 1561532 - DNA, 15 bp, Homo sapiens
acttactcttcctag

SEQ ID NO: 1561533 - DNA, 15 bp, Homo sapiens
cacttactcttccta

SEQ ID NO: 1561534 - DNA, 15 bp, Homo sapiens
tcacttactcttcct

SEQ ID NO: 1561535 - DNA, 15 bp, Homo sapiens
ttcacttactcttcc

SEQ ID NO: 1561536 - DNA, 15 bp, Homo sapiens
tttcacttactcttc

SEQ ID NO: 1561537 - DNA, 15 bp, Homo sapiens
gtttcacttactctt

SEQ ID NO: 1561538 - DNA, 15 bp, Homo sapiens
agtttcacttactct

SEQ ID NO: 1561539 - DNA, 15 bp, Homo sapiens
gagtttcacttactc

SEQ ID NO: 1561540 - DNA, 15 bp, Homo sapiens
tgagtttcacttact

SEQ ID NO: 1561541 - DNA, 15 bp, Homo sapiens
atgagtttcacttac

SEQ ID NO: 1561542 - DNA, 15 bp, Homo sapiens
aatgagtttcactta

SEQ ID NO: 1561543 - DNA, 15 bp, Homo sapiens
aaatgagtttcactt

SEQ ID NO: 1561544 - DNA, 15 bp, Homo sapiens
aaaatgagtttcact

SEQ ID NO: 1561545 - DNA, 15 bp, Homo sapiens
taaaatgagtttcac

SEQ ID NO: 1561546 - DNA, 15 bp, Homo sapiens
ataaaatgagtttca

SEQ ID NO: 1561547 - DNA, 15 bp, Homo sapiens
tataaaatgagtttc

SEQ ID NO: 1561548 - DNA, 15 bp, Homo sapiens
ttataaaatgagttt

SEQ ID NO: 1561549 - DNA, 15 bp, Homo sapiens
tttataaaatgagtt

SEQ ID NO: 1561550 - DNA, 15 bp, Homo sapiens
atttataaaatgagt

SEQ ID NO: 1561551 - DNA, 15 bp, Homo sapiens
catttataaaatgag

SEQ ID NO: 1561552 - DNA, 15 bp, Homo sapiens
acatttataaaatga

SEQ ID NO: 1561553 - DNA, 15 bp, Homo sapiens
cacatttataaaatg

SEQ ID NO: 1561554 - DNA, 15 bp, Homo sapiens
acacatttataaaat

SEQ ID NO: 1561555 - DNA, 15 bp, Homo sapiens
cacacatttataaaa

SEQ ID NO: 1561556 - DNA, 15 bp, Homo sapiens
ccacacatttataaa

SEQ ID NO: 1561557 - DNA, 15 bp, Homo sapiens
accacacatttataa

SEQ ID NO: 1561558 - DNA, 15 bp, Homo sapiens
taccacacatttata

SEQ ID NO: 1561559 - DNA, 15 bp, Homo sapiens
ataccacacatttat

SEQ ID NO: 1561560 - DNA, 15 bp, Homo sapiens
aataccacacattta

SEQ ID NO: 1561561 - DNA, 15 bp, Homo sapiens
aaataccacacattt

SEQ ID NO: 1561562 - DNA, 15 bp, Homo sapiens
aaaataccacacatt

SEQ ID NO: 1561563 - DNA, 15 bp, Homo sapiens
taaaataccacacat

SEQ ID NO: 1561564 - DNA, 15 bp, Homo sapiens
ataaaataccacaca

SEQ ID NO: 1561565 - DNA, 15 bp, Homo sapiens
cataaaataccacac

SEQ ID NO: 1561566 - DNA, 15 bp, Homo sapiens
acataaaataccaca

SEQ ID NO: 1561567 - DNA, 15 bp, Homo sapiens
cacataaaataccac

SEQ ID NO: 1561568 - DNA, 15 bp, Homo sapiens
ccacataaaatacca

SEQ ID NO: 1561569 - DNA, 15 bp, Homo sapiens
cccacataaaatacc

SEQ ID NO: 1561570 - DNA, 15 bp, Homo sapiens
acccacataaaatac

SEQ ID NO: 1561571 - DNA, 15 bp, Homo sapiens
aacccacataaaata

SEQ ID NO: 1561572 - DNA, 15 bp, Homo sapiens
taacccacataaaat

SEQ ID NO: 1561573 - DNA, 15 bp, Homo sapiens
ctaacccacataaaa

SEQ ID NO: 1561574 - DNA, 15 bp, Homo sapiens
actaacccacataaa

SEQ ID NO: 1561575 - DNA, 15 bp, Homo sapiens
tactaacccacataa

SEQ ID NO: 1561576 - DNA, 15 bp, Homo sapiens
ctactaacccacata

SEQ ID NO: 1561577 - DNA, 15 bp, Homo sapiens
cctactaacccacat

SEQ ID NO: 1561578 - DNA, 15 bp, Homo sapiens
tcctactaacccaca

SEQ ID NO: 1561579 - DNA, 15 bp, Homo sapiens
ttcctactaacccac

SEQ ID NO: 1561580 - DNA, 15 bp, Homo sapiens
tttcctactaaccca

SEQ ID NO: 1561581 - DNA, 15 bp, Homo sapiens
ctttcctactaaccc

SEQ ID NO: 1561582 - DNA, 15 bp, Homo sapiens
actttcctactaacc

SEQ ID NO: 1561583 - DNA, 15 bp, Homo sapiens
aactttcctactaac

SEQ ID NO: 1561584 - DNA, 15 bp, Homo sapiens
taactttcctactaa

SEQ ID NO: 1561585 - DNA, 15 bp, Homo sapiens
ataactttcctacta

SEQ ID NO: 1561586 - DNA, 15 bp, Homo sapiens
aataactttcctact

SEQ ID NO: 1561587 - DNA, 15 bp, Homo sapiens
gaataactttcctac

SEQ ID NO: 1561588 - DNA, 15 bp, Homo sapiens
agaataactttccta

SEQ ID NO: 1561589 - DNA, 15 bp, Homo sapiens
aagaataactttcct

SEQ ID NO: 1561590 - DNA, 15 bp, Homo sapiens
gaagaataactttcc

SEQ ID NO: 1561591 - DNA, 15 bp, Homo sapiens
ggaagaataactttc

SEQ ID NO: 1561592 - DNA, 15 bp, Homo sapiens
tggaagaataacttt

SEQ ID NO: 1561593 - DNA, 15 bp, Homo sapiens
ctggaagaataactt

SEQ ID NO: 1561594 - DNA, 15 bp, Homo sapiens
actggaagaataact

SEQ ID NO: 1561595 - DNA, 15 bp, Homo sapiens
gactggaagaataac

SEQ ID NO: 1561596 - DNA, 15 bp, Homo sapiens
agactggaagaataa

SEQ ID NO: 1561597 - DNA, 15 bp, Homo sapiens
cagactggaagaata

SEQ ID NO: 1561598 - DNA, 15 bp, Homo sapiens
tcagactggaagaat

SEQ ID NO: 1561599 - DNA, 15 bp, Homo sapiens
atcagactggaagaa

SEQ ID NO: 1561600 - DNA, 15 bp, Homo sapiens
aatcagactggaaga

SEQ ID NO: 1561601 - DNA, 15 bp, Homo sapiens
caatcagactggaag

SEQ ID NO: 1561602 - DNA, 15 bp, Homo sapiens
acaatcagactggaa

SEQ ID NO: 1561603 - DNA, 15 bp, Homo sapiens
cacaatcagactgga

SEQ ID NO: 1561604 - DNA, 15 bp, Homo sapiens
gcacaatcagactgg

SEQ ID NO: 1561605 - DNA, 15 bp, Homo sapiens
agcacaatcagactg

SEQ ID NO: 1561606 - DNA, 15 bp, Homo sapiens
tagcacaatcagact

SEQ ID NO: 1561607 - DNA, 15 bp, Homo sapiens
ttagcacaatcagac

SEQ ID NO: 1561608 - DNA, 15 bp, Homo sapiens
attagcacaatcaga

SEQ ID NO: 1561609 - DNA, 15 bp, Homo sapiens
cattagcacaatcag

SEQ ID NO: 1561610 - DNA, 15 bp, Homo sapiens
acattagcacaatca

SEQ ID NO: 1561611 - DNA, 15 bp, Homo sapiens
aacattagcacaatc

SEQ ID NO: 1561612 - DNA, 15 bp, Homo sapiens
taacattagcacaat

SEQ ID NO: 1561613 - DNA, 15 bp, Homo sapiens
ttaacattagcacaa

SEQ ID NO: 1561614 - DNA, 15 bp, Homo sapiens
gttaacattagcaca

SEQ ID NO: 1561615 - DNA, 15 bp, Homo sapiens
tgttaacattagcac

SEQ ID NO: 1561616 - DNA, 15 bp, Homo sapiens
atgttaacattagca

SEQ ID NO: 1561617 - DNA, 15 bp, Homo sapiens
aatgttaacattagc

SEQ ID NO: 1561618 - DNA, 15 bp, Homo sapiens
taatgttaacattag

SEQ ID NO: 1561619 - DNA, 15 bp, Homo sapiens
ctaatgttaacatta

SEQ ID NO: 1561620 - DNA, 15 bp, Homo sapiens
actaatgttaacatt

SEQ ID NO: 1561621 - DNA, 15 bp, Homo sapiens
aactaatgttaacat

SEQ ID NO: 1561622 - DNA, 15 bp, Homo sapiens
aaactaatgttaaca

SEQ ID NO: 1561623 - DNA, 15 bp, Homo sapiens
caaactaatgttaac

SEQ ID NO: 1561624 - DNA, 15 bp, Homo sapiens
gcaaactaatgttaa

SEQ ID NO: 1561625 - DNA, 15 bp, Homo sapiens
ggcaaactaatgtta

SEQ ID NO: 1561626 - DNA, 15 bp, Homo sapiens
aggcaaactaatgtt

SEQ ID NO: 1561627 - DNA, 15 bp, Homo sapiens
gaggcaaactaatgt

SEQ ID NO: 1561628 - DNA, 15 bp, Homo sapiens
agaggcaaactaatg

SEQ ID NO: 1561629 - DNA, 15 bp, Homo sapiens
cagaggcaaactaat

SEQ ID NO: 1561630 - DNA, 15 bp, Homo sapiens
tcagaggcaaactaa

SEQ ID NO: 1561631 - DNA, 15 bp, Homo sapiens
ttcagaggcaaacta

SEQ ID NO: 1561632 - DNA, 15 bp, Homo sapiens
cttcagaggcaaact

SEQ ID NO: 1561633 - DNA, 15 bp, Homo sapiens
gcttcagaggcaaac

SEQ ID NO: 1561634 - DNA, 15 bp, Homo sapiens
tgcttcagaggcaaa

SEQ ID NO: 1561635 - DNA, 15 bp, Homo sapiens
gtgcttcagaggcaa

SEQ ID NO: 1561636 - DNA, 15 bp, Homo sapiens
tgtgcttcagaggca

SEQ ID NO: 1561637 - DNA, 15 bp, Homo sapiens
ctgtgcttcagaggc

SEQ ID NO: 1561638 - DNA, 15 bp, Homo sapiens
tctgtgcttcagagg

SEQ ID NO: 1561639 - DNA, 15 bp, Homo sapiens
gtctgtgcttcagag

SEQ ID NO: 1561640 - DNA, 15 bp, Homo sapiens
ggtctgtgcttcaga

SEQ ID NO: 1561641 - DNA, 15 bp, Homo sapiens
tggtctgtgcttcag

SEQ ID NO: 1561642 - DNA, 15 bp, Homo sapiens
ttggtctgtgcttca

SEQ ID NO: 1561643 - DNA, 15 bp, Homo sapiens
tttggtctgtgcttc

SEQ ID NO: 1561644 - DNA, 15 bp, Homo sapiens
atttggtctgtgctt

SEQ ID NO: 1561645 - DNA, 15 bp, Homo sapiens
catttggtctgtgct

SEQ ID NO: 1561646 - DNA, 15 bp, Homo sapiens
tcatttggtctgtgc

SEQ ID NO: 1561647 - DNA, 15 bp, Homo sapiens
ttcatttggtctgtg

SEQ ID NO: 1561648 - DNA, 15 bp, Homo sapiens
gttcatttggtctgt

SEQ ID NO: 1561649 - DNA, 15 bp, Homo sapiens
tgttcatttggtctg

SEQ ID NO: 1561650 - DNA, 15 bp, Homo sapiens
ttgttcatttggtct

SEQ ID NO: 1561651 - DNA, 15 bp, Homo sapiens
attgttcatttggtc

SEQ ID NO: 1561652 - DNA, 15 bp, Homo sapiens
cattgttcatttggt

SEQ ID NO: 1561653 - DNA, 15 bp, Homo sapiens
tcattgttcatttgg

SEQ ID NO: 1561654 - DNA, 15 bp, Homo sapiens
ttcattgttcatttg

SEQ ID NO: 1561655 - DNA, 15 bp, Homo sapiens
tttcattgttcattt

SEQ ID NO: 1561656 - DNA, 15 bp, Homo sapiens
ttttcattgttcatt

SEQ ID NO: 1561657 - DNA, 15 bp, Homo sapiens
cttttcattgttcat

SEQ ID NO: 1561658 - DNA, 15 bp, Homo sapiens
tcttttcattgttca

SEQ ID NO: 1561659 - DNA, 15 bp, Homo sapiens
ctcttttcattgttc

SEQ ID NO: 1561660 - DNA, 15 bp, Homo sapiens
tctcttttcattgtt

SEQ ID NO: 1561661 - DNA, 15 bp, Homo sapiens
atctcttttcattgt

SEQ ID NO: 1561662 - DNA, 15 bp, Homo sapiens
catctcttttcattg

SEQ ID NO: 1561663 - DNA, 15 bp, Homo sapiens
gcatctcttttcatt

SEQ ID NO: 1561664 - DNA, 15 bp, Homo sapiens
agcatctcttttcat

SEQ ID NO: 1561665 - DNA, 15 bp, Homo sapiens
gagcatctcttttca

SEQ ID NO: 1561666 - DNA, 15 bp, Homo sapiens
agagcatctcttttc

SEQ ID NO: 1561667 - DNA, 15 bp, Homo sapiens
aagagcatctctttt

SEQ ID NO: 1561668 - DNA, 15 bp, Homo sapiens
caagagcatctcttt

SEQ ID NO: 1561669 - DNA, 15 bp, Homo sapiens
tcaagagcatctctt

SEQ ID NO: 1561670 - DNA, 15 bp, Homo sapiens
ttcaagagcatctct

SEQ ID NO: 1561671 - DNA, 15 bp, Homo sapiens
tttcaagagcatctc

SEQ ID NO: 1561672 - DNA, 15 bp, Homo sapiens
attttcaagagcatc

SEQ ID NO: 1561673 - DNA, 15 bp, Homo sapiens
tattttcaagagcat

SEQ ID NO: 1561674 - DNA, 15 bp, Homo sapiens
atattttcaagagca

SEQ ID NO: 1561675 - DNA, 15 bp, Homo sapiens
aatattttcaagagc

SEQ ID NO: 1561676 - DNA, 15 bp, Homo sapiens
taatattttcaagag

SEQ ID NO: 1561677 - DNA, 15 bp, Homo sapiens
ctaatattttcaaga

SEQ ID NO: 1561678 - DNA, 15 bp, Homo sapiens
cctaatattttcaag

SEQ ID NO: 1561679 - DNA, 15 bp, Homo sapiens
acctaatattttcaa

SEQ ID NO: 1561680 - DNA, 15 bp, Homo sapiens
aacctaatattttca

SEQ ID NO: 1561681 - DNA, 15 bp, Homo sapiens
caacctaatattttc

SEQ ID NO: 1561682 - DNA, 15 bp, Homo sapiens
gcaacctaatatttt

SEQ ID NO: 1561683 - DNA, 15 bp, Homo sapiens
tgcaacctaatattt

SEQ ID NO: 1561684 - DNA, 15 bp, Homo sapiens
ctgcaacctaatatt

SEQ ID NO: 1561685 - DNA, 15 bp, Homo sapiens
cctgcaacctaatat

SEQ ID NO: 1561686 - DNA, 15 bp, Homo sapiens
ccctgcaacctaata

SEQ ID NO: 1561687 - DNA, 15 bp, Homo sapiens
cccctgcaacctaat

SEQ ID NO: 1561688 - DNA, 15 bp, Homo sapiens
tcccctgcaacctaa

SEQ ID NO: 1561689 - DNA, 15 bp, Homo sapiens
ttcccctgcaaccta

SEQ ID NO: 1561690 - DNA, 15 bp, Homo sapiens
cttcccctgcaacct

SEQ ID NO: 1561691 - DNA, 15 bp, Homo sapiens
ccttcccctgcaacc

SEQ ID NO: 1561692 - DNA, 15 bp, Homo sapiens
cccttcccctgcaac

SEQ ID NO: 1561693 - DNA, 15 bp, Homo sapiens
gcccttcccctgcaa

SEQ ID NO: 1561694 - DNA, 15 bp, Homo sapiens
aggcccttcccctgc

SEQ ID NO: 1561695 - DNA, 15 bp, Homo sapiens
caggcccttcccctg

SEQ ID NO: 1561696 - DNA, 15 bp, Homo sapiens
ccaggcccttcccct

SEQ ID NO: 1561697 - DNA, 15 bp, Homo sapiens
cccaggcccttcccc

SEQ ID NO: 1561698 - DNA, 15 bp, Homo sapiens
ccccaggcccttccc

SEQ ID NO: 1561699 - DNA, 15 bp, Homo sapiens
tccccaggcccttcc

SEQ ID NO: 1561700 - DNA, 15 bp, Homo sapiens
ttccccaggcccttc

SEQ ID NO: 1561701 - DNA, 15 bp, Homo sapiens
tttccccaggccctt

SEQ ID NO: 1561702 - DNA, 15 bp, Homo sapiens
ttttccccaggccct

SEQ ID NO: 1561703 - DNA, 15 bp, Homo sapiens
tttttccccaggccc

SEQ ID NO: 1561704 - DNA, 15 bp, Homo sapiens
ttttttccccaggcc

SEQ ID NO: 1561705 - DNA, 15 bp, Homo sapiens
tttttttccccaggc

SEQ ID NO: 1561706 - DNA, 15 bp, Homo sapiens
gtttttttccccagg

SEQ ID NO: 1561707 - DNA, 15 bp, Homo sapiens
agtttttttccccag

SEQ ID NO: 1561708 - DNA, 15 bp, Homo sapiens
tagtttttttcccca

SEQ ID NO: 1561709 - DNA, 15 bp, Homo sapiens
ttagtttttttcccc

SEQ ID NO: 1561710 - DNA, 15 bp, Homo sapiens
gttagtttttttccc

SEQ ID NO: 1561711 - DNA, 15 bp, Homo sapiens
cgttagtttttttcc

SEQ ID NO: 1561712 - DNA, 15 bp, Homo sapiens
gcgttagtttttttc

SEQ ID NO: 1561713 - DNA, 15 bp, Homo sapiens
cgcgttagttttttt

SEQ ID NO: 1561714 - DNA, 15 bp, Homo sapiens
tcgcgttagtttttt

SEQ ID NO: 1561715 - DNA, 15 bp, Homo sapiens
ttcgcgttagttttt

SEQ ID NO: 1561716 - DNA, 15 bp, Homo sapiens
tttcgcgttagtttt

SEQ ID NO: 1561717 - DNA, 15 bp, Homo sapiens
atttcgcgttagttt

SEQ ID NO: 1561718 - DNA, 15 bp, Homo sapiens
tatttcgcgttagtt

SEQ ID NO: 1561719 - DNA, 15 bp, Homo sapiens
atatttcgcgttagt

SEQ ID NO: 1561720 - DNA, 15 bp, Homo sapiens
tatatttcgcgttag

SEQ ID NO: 1561721 - DNA, 15 bp, Homo sapiens
ttatatttcgcgtta

SEQ ID NO: 1561722 - DNA, 15 bp, Homo sapiens
tttatatttcgcgtt

SEQ ID NO: 1561723 - DNA, 15 bp, Homo sapiens
gtttatatttcgcgt

SEQ ID NO: 1561724 - DNA, 15 bp, Homo sapiens
tgtttatatttcgcg

SEQ ID NO: 1561725 - DNA, 15 bp, Homo sapiens
ttgtttatatttcgc

SEQ ID NO: 1561726 - DNA, 15 bp, Homo sapiens
gttgtttatatttcg

SEQ ID NO: 1561727 - DNA, 15 bp, Homo sapiens
tgttgtttatatttc

SEQ ID NO: 1561728 - DNA, 15 bp, Homo sapiens
gtgttgtttatattt

SEQ ID NO: 1561729 - DNA, 15 bp, Homo sapiens
tgtgttgtttatatt

SEQ ID NO: 1561730 - DNA, 15 bp, Homo sapiens
atgtgttgtttatat

SEQ ID NO: 1561731 - DNA, 15 bp, Homo sapiens
aatgtgttgtttata

SEQ ID NO: 1561732 - DNA, 15 bp, Homo sapiens
taatgtgttgtttat

SEQ ID NO: 1561733 - DNA, 15 bp, Homo sapiens
gtaatgtgttgttta

SEQ ID NO: 1561734 - DNA, 15 bp, Homo sapiens
cgtaatgtgttgttt

SEQ ID NO: 1561735 - DNA, 15 bp, Homo sapiens
acgtaatgtgttgtt

SEQ ID NO: 1561736 - DNA, 15 bp, Homo sapiens
cacgtaatgtgttgt

SEQ ID NO: 1561737 - DNA, 15 bp, Homo sapiens
gcacgtaatgtgttg

SEQ ID NO: 1561738 - DNA, 15 bp, Homo sapiens
agcacgtaatgtgtt

SEQ ID NO: 1561739 - DNA, 15 bp, Homo sapiens
aagcacgtaatgtgt

SEQ ID NO: 1561740 - DNA, 15 bp, Homo sapiens
caagcacgtaatgtg

SEQ ID NO: 1561741 - DNA, 15 bp, Homo sapiens
ccaagcacgtaatgt

SEQ ID NO: 1561742 - DNA, 15 bp, Homo sapiens
tccaagcacgtaatg

SEQ ID NO: 1561743 - DNA, 15 bp, Homo sapiens
atccaagcacgtaat

SEQ ID NO: 1561744 - DNA, 15 bp, Homo sapiens
tatccaagcacgtaa

SEQ ID NO: 1561745 - DNA, 15 bp, Homo sapiens
ctatccaagcacgta

SEQ ID NO: 1561746 - DNA, 15 bp, Homo sapiens
tctatccaagcacgt

SEQ ID NO: 1561747 - DNA, 15 bp, Homo sapiens
ctctatccaagcacg

SEQ ID NO: 1561748 - DNA, 15 bp, Homo sapiens
tctctatccaagcac

SEQ ID NO: 1561749 - DNA, 15 bp, Homo sapiens
ttctctatccaagca

SEQ ID NO: 1561750 - DNA, 15 bp, Homo sapiens
gttctctatccaagc

SEQ ID NO: 1561751 - DNA, 15 bp, Homo sapiens
cgttctctatccaag

SEQ ID NO: 1561752 - DNA, 15 bp, Homo sapiens
tcgttctctatccaa

SEQ ID NO: 1561753 - DNA, 15 bp, Homo sapiens
ttcgttctctatcca

SEQ ID NO: 1561754 - DNA, 15 bp, Homo sapiens
attcgttctctatcc

SEQ ID NO: 1561755 - DNA, 15 bp, Homo sapiens
gattcgttctctatc

SEQ ID NO: 1561756 - DNA, 15 bp, Homo sapiens
agattcgttctctat

SEQ ID NO: 1561757 - DNA, 15 bp, Homo sapiens
tagattcgttctcta

SEQ ID NO: 1561758 - DNA, 15 bp, Homo sapiens
atagattcgttctct

SEQ ID NO: 1561759 - DNA, 15 bp, Homo sapiens
tatagattcgttctc

SEQ ID NO: 1561760 - DNA, 15 bp, Homo sapiens
gtatagattcgttct

SEQ ID NO: 1561761 - DNA, 15 bp, Homo sapiens
tgtatagattcgttc

SEQ ID NO: 1561762 - DNA, 15 bp, Homo sapiens
ctgtatagattcgtt

SEQ ID NO: 1561763 - DNA, 15 bp, Homo sapiens
tctgtatagattcgt

SEQ ID NO: 1561764 - DNA, 15 bp, Homo sapiens
atctgtatagattcg

SEQ ID NO: 1561765 - DNA, 15 bp, Homo sapiens
aatctgtatagattc

SEQ ID NO: 1561766 - DNA, 15 bp, Homo sapiens
aaatctgtatagatt

SEQ ID NO: 1561767 - DNA, 15 bp, Homo sapiens
caaatctgtatagat

SEQ ID NO: 1561768 - DNA, 15 bp, Homo sapiens
acaaatctgtataga

SEQ ID NO: 1561769 - DNA, 15 bp, Homo sapiens
tacaaatctgtatag

SEQ ID NO: 1561770 - DNA, 15 bp, Homo sapiens
ttacaaatctgtata

SEQ ID NO: 1561771 - DNA, 15 bp, Homo sapiens
tttacaaatctgtat

SEQ ID NO: 1561772 - DNA, 15 bp, Homo sapiens
ttttacaaatctgta

SEQ ID NO: 1561773 - DNA, 15 bp, Homo sapiens
tttttacaaatctgt

SEQ ID NO: 1561774 - DNA, 15 bp, Homo sapiens
atttttacaaatctg

SEQ ID NO: 1561775 - DNA, 15 bp, Homo sapiens
tatttttacaaatct

SEQ ID NO: 1561776 - DNA, 15 bp, Homo sapiens
gtatttttacaaatc

SEQ ID NO: 1561777 - DNA, 15 bp, Homo sapiens
tgtatttttacaaat

SEQ ID NO: 1561778 - DNA, 15 bp, Homo sapiens
ctgtatttttacaaa

SEQ ID NO: 1561779 - DNA, 15 bp, Homo sapiens
cctgtatttttacaa

SEQ ID NO: 1561780 - DNA, 15 bp, Homo sapiens
gcctgtatttttaca

SEQ ID NO: 1561781 - DNA, 15 bp, Homo sapiens
tgcctgtatttttac

SEQ ID NO: 1561782 - DNA, 15 bp, Homo sapiens
atgcctgtattttta

SEQ ID NO: 1561783 - DNA, 15 bp, Homo sapiens
catgcctgtattttt

SEQ ID NO: 1561784 - DNA, 15 bp, Homo sapiens
gcatgcctgtatttt

SEQ ID NO: 1561785 - DNA, 15 bp, Homo sapiens
agcatgcctgtattt

SEQ ID NO: 1561786 - DNA, 15 bp, Homo sapiens
tagcatgcctgtatt

SEQ ID NO: 1561787 - DNA, 15 bp, Homo sapiens
ttagcatgcctgtat

SEQ ID NO: 1561788 - DNA, 15 bp, Homo sapiens
gttagcatgcctgta

SEQ ID NO: 1561789 - DNA, 15 bp, Homo sapiens
tgttagcatgcctgt

SEQ ID NO: 1561790 - DNA, 15 bp, Homo sapiens
gtgttagcatgcctg

SEQ ID NO: 1561791 - DNA, 15 bp, Homo sapiens
tgtgttagcatgcct

SEQ ID NO: 1561792 - DNA, 15 bp, Homo sapiens
atgtgttagcatgcc

SEQ ID NO: 1561793 - DNA, 15 bp, Homo sapiens
aatgtgttagcatgc

SEQ ID NO: 1561794 - DNA, 15 bp, Homo sapiens
aaatgtgttagcatg

SEQ ID NO: 1561795 - DNA, 15 bp, Homo sapiens
caaatgtgttagcat

SEQ ID NO: 1561796 - DNA, 15 bp, Homo sapiens
acaaatgtgttagca

SEQ ID NO: 1561797 - DNA, 15 bp, Homo sapiens
aacaaatgtgttagc

SEQ ID NO: 1561798 - DNA, 15 bp, Homo sapiens
caacaaatgtgttag

SEQ ID NO: 1561799 - DNA, 15 bp, Homo sapiens
acaacaaatgtgtta

SEQ ID NO: 1561800 - DNA, 15 bp, Homo sapiens
tacaacaaatgtgtt

SEQ ID NO: 1561801 - DNA, 15 bp, Homo sapiens
atacaacaaatgtgt

SEQ ID NO: 1561802 - DNA, 15 bp, Homo sapiens
aatacaacaaatgtg

SEQ ID NO: 1561803 - DNA, 15 bp, Homo sapiens
aaatacaacaaatgt

SEQ ID NO: 1561804 - DNA, 15 bp, Homo sapiens
taaatacaacaaatg

SEQ ID NO: 1561805 - DNA, 15 bp, Homo sapiens
gtaaatacaacaaat

SEQ ID NO: 1561806 - DNA, 15 bp, Homo sapiens
agtaaatacaacaaa

SEQ ID NO: 1561807 - DNA, 15 bp, Homo sapiens
gagtaaatacaacaa

SEQ ID NO: 1561808 - DNA, 15 bp, Homo sapiens
tgagtaaatacaaca

SEQ ID NO: 1561809 - DNA, 15 bp, Homo sapiens
atgagtaaatacaac

SEQ ID NO: 1561810 - DNA, 15 bp, Homo sapiens
tatgagtaaatacaa

SEQ ID NO: 1561811 - DNA, 15 bp, Homo sapiens
atatgagtaaataca

SEQ ID NO: 1561812 - DNA, 15 bp, Homo sapiens
gatatgagtaaatac

SEQ ID NO: 1561813 - DNA, 15 bp, Homo sapiens
tgatatgagtaaata

SEQ ID NO: 1561814 - DNA, 15 bp, Homo sapiens
gtgatatgagtaaat

SEQ ID NO: 1561815 - DNA, 15 bp, Homo sapiens
tgtgatatgagtaaa

SEQ ID NO: 1561816 - DNA, 15 bp, Homo sapiens
gtgtgatatgagtaa

SEQ ID NO: 1561817 - DNA, 15 bp, Homo sapiens
tgtgtgatatgagta

SEQ ID NO: 1561818 - DNA, 15 bp, Homo sapiens
ttgtgtgatatgagt

SEQ ID NO: 1561819 - DNA, 15 bp, Homo sapiens
cttgtgtgatatgag

SEQ ID NO: 1561820 - DNA, 15 bp, Homo sapiens
acttgtgtgatatga

SEQ ID NO: 1561821 - DNA, 15 bp, Homo sapiens
aacttgtgtgatatg

SEQ ID NO: 1561822 - DNA, 15 bp, Homo sapiens
taacttgtgtgatat

SEQ ID NO: 1561823 - DNA, 15 bp, Homo sapiens
ataacttgtgtgata

SEQ ID NO: 1561824 - DNA, 15 bp, Homo sapiens
aataacttgtgtgat

SEQ ID NO: 1561825 - DNA, 15 bp, Homo sapiens
aaataacttgtgtga

SEQ ID NO: 1561826 - DNA, 15 bp, Homo sapiens
taaataacttgtgtg

SEQ ID NO: 1561827 - DNA, 15 bp, Homo sapiens
ttaaataacttgtgt

SEQ ID NO: 1561828 - DNA, 15 bp, Homo sapiens
tttaaataacttgtg

SEQ ID NO: 1561829 - DNA, 15 bp, Homo sapiens
ttttaaataacttgt

SEQ ID NO: 1561830 - DNA, 15 bp, Homo sapiens
cttttaaataacttg

SEQ ID NO: 1561831 - DNA, 15 bp, Homo sapiens
acttttaaataactt

SEQ ID NO: 1561832 - DNA, 15 bp, Homo sapiens
aacttttaaataact

SEQ ID NO: 1561833 - DNA, 15 bp, Homo sapiens
aaacttttaaataac

SEQ ID NO: 1561834 - DNA, 15 bp, Homo sapiens
aaaacttttaaataa

SEQ ID NO: 1561835 - DNA, 15 bp, Homo sapiens
gaaaacttttaaata

SEQ ID NO: 1561836 - DNA, 15 bp, Homo sapiens
agaaaacttttaaat

SEQ ID NO: 1561837 - DNA, 15 bp, Homo sapiens
tagaaaacttttaaa

SEQ ID NO: 1561838 - DNA, 15 bp, Homo sapiens
atagaaaacttttaa

SEQ ID NO: 1561839 - DNA, 15 bp, Homo sapiens
tatagaaaactttta

SEQ ID NO: 1561840 - DNA, 15 bp, Homo sapiens
ttatagaaaactttt

SEQ ID NO: 1561841 - DNA, 15 bp, Homo sapiens
attatagaaaacttt

SEQ ID NO: 1561842 - DNA, 15 bp, Homo sapiens
cattatagaaaactt

SEQ ID NO: 1561843 - DNA, 15 bp, Homo sapiens
acattatagaaaact

SEQ ID NO: 1561844 - DNA, 15 bp, Homo sapiens
tacattatagaaaac

SEQ ID NO: 1561845 - DNA, 15 bp, Homo sapiens
ctacattatagaaaa

SEQ ID NO: 1561846 - DNA, 15 bp, Homo sapiens
tctacattatagaaa

SEQ ID NO: 1561847 - DNA, 15 bp, Homo sapiens
gtctacattatagaa

SEQ ID NO: 1561848 - DNA, 15 bp, Homo sapiens
tgtctacattataga

SEQ ID NO: 1561849 - DNA, 15 bp, Homo sapiens
atgtctacattatag

SEQ ID NO: 1561850 - DNA, 15 bp, Homo sapiens
tatgtctacattata

SEQ ID NO: 1561851 - DNA, 15 bp, Homo sapiens
ctatgtctacattat

SEQ ID NO: 1561852 - DNA, 15 bp, Homo sapiens
tctatgtctacatta

SEQ ID NO: 1561853 - DNA, 15 bp, Homo sapiens
atctatgtctacatt

SEQ ID NO: 1561854 - DNA, 15 bp, Homo sapiens
catctatgtctacat

SEQ ID NO: 1561855 - DNA, 15 bp, Homo sapiens
ccatctatgtctaca

SEQ ID NO: 1561856 - DNA, 15 bp, Homo sapiens
accatctatgtctac

SEQ ID NO: 1561857 - DNA, 15 bp, Homo sapiens
taccatctatgtcta

SEQ ID NO: 1561858 - DNA, 15 bp, Homo sapiens
ttaccatctatgtct

SEQ ID NO: 1561859 - DNA, 15 bp, Homo sapiens
tttaccatctatgtc

SEQ ID NO: 1561860 - DNA, 15 bp, Homo sapiens
ttttaccatctatgt

SEQ ID NO: 1561861 - DNA, 15 bp, Homo sapiens
tttttaccatctatg

SEQ ID NO: 1561862 - DNA, 15 bp, Homo sapiens
atttttaccatctat

SEQ ID NO: 1561863 - DNA, 15 bp, Homo sapiens
aatttttaccatcta

SEQ ID NO: 1561864 - DNA, 15 bp, Homo sapiens
taatttttaccatct

SEQ ID NO: 1561865 - DNA, 15 bp, Homo sapiens
ataatttttaccatc

SEQ ID NO: 1561866 - DNA, 15 bp, Homo sapiens
tataatttttaccat

SEQ ID NO: 1561867 - DNA, 15 bp, Homo sapiens
atataatttttacca

SEQ ID NO: 1561868 - DNA, 15 bp, Homo sapiens
gatataatttttacc

SEQ ID NO: 1561869 - DNA, 15 bp, Homo sapiens
agatataatttttac

SEQ ID NO: 1561870 - DNA, 15 bp, Homo sapiens
cagatataattttta

SEQ ID NO: 1561871 - DNA, 15 bp, Homo sapiens
gcagatataattttt

SEQ ID NO: 1561872 - DNA, 15 bp, Homo sapiens
agcagatataatttt

SEQ ID NO: 1561873 - DNA, 15 bp, Homo sapiens
tagcagatataattt

SEQ ID NO: 1561874 - DNA, 15 bp, Homo sapiens
atagcagatataatt

SEQ ID NO: 1561875 - DNA, 15 bp, Homo sapiens
tatagcagatataat

SEQ ID NO: 1561876 - DNA, 15 bp, Homo sapiens
gtatagcagatataa

SEQ ID NO: 1561877 - DNA, 15 bp, Homo sapiens
tgtatagcagatata

SEQ ID NO: 1561878 - DNA, 15 bp, Homo sapiens
atgtatagcagatat

SEQ ID NO: 1561879 - DNA, 15 bp, Homo sapiens
catgtatagcagata

SEQ ID NO: 1561880 - DNA, 15 bp, Homo sapiens
ccatgtatagcagat

SEQ ID NO: 1561881 - DNA, 15 bp, Homo sapiens
cccatgtatagcaga

SEQ ID NO: 1561882 - DNA, 15 bp, Homo sapiens
acccatgtatagcag

SEQ ID NO: 1561883 - DNA, 15 bp, Homo sapiens
aacccatgtatagca

SEQ ID NO: 1561884 - DNA, 15 bp, Homo sapiens
aaacccatgtatagc

SEQ ID NO: 1561885 - DNA, 15 bp, Homo sapiens
caaacccatgtatag

SEQ ID NO: 1561886 - DNA, 15 bp, Homo sapiens
ccaaacccatgtata

SEQ ID NO: 1561887 - DNA, 15 bp, Homo sapiens
cccaaacccatgtat

SEQ ID NO: 1561888 - DNA, 15 bp, Homo sapiens
acccaaacccatgta

SEQ ID NO: 1561889 - DNA, 15 bp, Homo sapiens
tacccaaacccatgt

SEQ ID NO: 1561890 - DNA, 15 bp, Homo sapiens
ctacccaaacccatg

SEQ ID NO: 1561891 - DNA, 15 bp, Homo sapiens
actacccaaacccat

SEQ ID NO: 1561892 - DNA, 15 bp, Homo sapiens
tactacccaaaccca

SEQ ID NO: 1561893 - DNA, 15 bp, Homo sapiens
atactacccaaaccc

SEQ ID NO: 1561894 - DNA, 15 bp, Homo sapiens
tatactacccaaacc

SEQ ID NO: 1561895 - DNA, 15 bp, Homo sapiens
atatactacccaaac

SEQ ID NO: 1561896 - DNA, 15 bp, Homo sapiens
aatatactacccaaa

SEQ ID NO: 1561897 - DNA, 15 bp, Homo sapiens
aaatatactacccaa

SEQ ID NO: 1561898 - DNA, 15 bp, Homo sapiens
aaaatatactaccca

SEQ ID NO: 1561899 - DNA, 15 bp, Homo sapiens
aaaaatatactaccc

SEQ ID NO: 1561900 - DNA, 15 bp, Homo sapiens
gaaaaatatactacc

SEQ ID NO: 1561901 - DNA, 15 bp, Homo sapiens
tgaaaaatatactac

SEQ ID NO: 1561902 - DNA, 15 bp, Homo sapiens
ctgaaaaatatacta

SEQ ID NO: 1561903 - DNA, 15 bp, Homo sapiens
actgaaaaatatact

SEQ ID NO: 1561904 - DNA, 15 bp, Homo sapiens
tactgaaaaatatac

SEQ ID NO: 1561905 - DNA, 15 bp, Homo sapiens
atactgaaaaatata

SEQ ID NO: 1561906 - DNA, 15 bp, Homo sapiens
tatactgaaaaatat

SEQ ID NO: 1561907 - DNA, 15 bp, Homo sapiens
ttatactgaaaaata

SEQ ID NO: 1561908 - DNA, 15 bp, Homo sapiens
attatactgaaaaat

SEQ ID NO: 1561909 - DNA, 15 bp, Homo sapiens
aattatactgaaaaa

SEQ ID NO: 1561910 - DNA, 15 bp, Homo sapiens
aaattatactgaaaa

SEQ ID NO: 1561911 - DNA, 15 bp, Homo sapiens
taaattatactgaaa

SEQ ID NO: 1561912 - DNA, 15 bp, Homo sapiens
ctaaattatactgaa

SEQ ID NO: 1561913 - DNA, 15 bp, Homo sapiens
tctaaattatactga

SEQ ID NO: 1561914 - DNA, 15 bp, Homo sapiens
ctctaaattatactg

SEQ ID NO: 1561915 - DNA, 15 bp, Homo sapiens
tctctaaattatact

SEQ ID NO: 1561916 - DNA, 15 bp, Homo sapiens
ttctctaaattatac

SEQ ID NO: 1561917 - DNA, 15 bp, Homo sapiens
tttctctaaattata

SEQ ID NO: 1561918 - DNA, 15 bp, Homo sapiens
atttctctaaattat

SEQ ID NO: 1561919 - DNA, 15 bp, Homo sapiens
aatttctctaaatta

SEQ ID NO: 1561920 - DNA, 15 bp, Homo sapiens
aaatttctctaaatt

SEQ ID NO: 1561921 - DNA, 15 bp, Homo sapiens
gaaatttctctaaat

SEQ ID NO: 1561922 - DNA, 15 bp, Homo sapiens
tgaaatttctctaaa

SEQ ID NO: 1561923 - DNA, 15 bp, Homo sapiens
atgaaatttctctaa

SEQ ID NO: 1561924 - DNA, 15 bp, Homo sapiens
catgaaatttctcta

SEQ ID NO: 1561925 - DNA, 15 bp, Homo sapiens
tcatgaaatttctct

SEQ ID NO: 1561926 - DNA, 15 bp, Homo sapiens
ttcatgaaatttctc

SEQ ID NO: 1561927 - DNA, 15 bp, Homo sapiens
tttcatgaaatttct

SEQ ID NO: 1561928 - DNA, 15 bp, Homo sapiens
ttttcatgaaatttc

SEQ ID NO: 1561929 - DNA, 15 bp, Homo sapiens
attttcatgaaattt

SEQ ID NO: 1561930 - DNA, 15 bp, Homo sapiens
cattttcatgaaatt

SEQ ID NO: 1561931 - DNA, 15 bp, Homo sapiens
ccattttcatgaaat

SEQ ID NO: 1561932 - DNA, 15 bp, Homo sapiens
gccattttcatgaaa

SEQ ID NO: 1561933 - DNA, 15 bp, Homo sapiens
tgccattttcatgaa

SEQ ID NO: 1561934 - DNA, 15 bp, Homo sapiens
atgccattttcatga

SEQ ID NO: 1561935 - DNA, 15 bp, Homo sapiens
gatgccattttcatg

SEQ ID NO: 1561936 - DNA, 15 bp, Homo sapiens
tgatgccattttcat

SEQ ID NO: 1561937 - DNA, 15 bp, Homo sapiens
atgatgccattttca

SEQ ID NO: 1561938 - DNA, 15 bp, Homo sapiens
aatgatgccattttc

SEQ ID NO: 1561939 - DNA, 15 bp, Homo sapiens
caatgatgccatttt

SEQ ID NO: 1561940 - DNA, 15 bp, Homo sapiens
ccaatgatgccattt

SEQ ID NO: 1561941 - DNA, 15 bp, Homo sapiens
cccaatgatgccatt

SEQ ID NO: 1561942 - DNA, 15 bp, Homo sapiens
ccccaatgatgccat

SEQ ID NO: 1561943 - DNA, 15 bp, Homo sapiens
cccccaatgatgcca

SEQ ID NO: 1561944 - DNA, 15 bp, Homo sapiens
tcccccaatgatgcc

SEQ ID NO: 1561945 - DNA, 15 bp, Homo sapiens
atcccccaatgatgc

SEQ ID NO: 1561946 - DNA, 15 bp, Homo sapiens
aatcccccaatgatg

SEQ ID NO: 1561947 - DNA, 15 bp, Homo sapiens
aaatcccccaatgat

SEQ ID NO: 1561948 - DNA, 15 bp, Homo sapiens
aaaatcccccaatga

SEQ ID NO: 1561949 - DNA, 15 bp, Homo sapiens
aaaaatcccccaatg

SEQ ID NO: 1561950 - DNA, 15 bp, Homo sapiens
gaaaaatcccccaat

SEQ ID NO: 1561951 - DNA, 15 bp, Homo sapiens
agaaaaatcccccaa

SEQ ID NO: 1561952 - DNA, 15 bp, Homo sapiens
cagaaaaatccccca

SEQ ID NO: 1561953 - DNA, 15 bp, Homo sapiens
acagaaaaatccccc

SEQ ID NO: 1561954 - DNA, 15 bp, Homo sapiens
tacagaaaaatcccc

SEQ ID NO: 1561955 - DNA, 15 bp, Homo sapiens
atacagaaaaatccc

SEQ ID NO: 1561956 - DNA, 15 bp, Homo sapiens
aatacagaaaaatcc

SEQ ID NO: 1561957 - DNA, 15 bp, Homo sapiens
aaatacagaaaaatc

SEQ ID NO: 1561958 - DNA, 15 bp, Homo sapiens
aaaatacagaaaaat

SEQ ID NO: 1561959 - DNA, 15 bp, Homo sapiens
gaaaatacagaaaaa

SEQ ID NO: 1561960 - DNA, 15 bp, Homo sapiens
tgaaaatacagaaaa

SEQ ID NO: 1561961 - DNA, 15 bp, Homo sapiens
ttgaaaatacagaaa

SEQ ID NO: 1561962 - DNA, 15 bp, Homo sapiens
attgaaaatacagaa

SEQ ID NO: 1561963 - DNA, 15 bp, Homo sapiens
aattgaaaatacaga

SEQ ID NO: 1561964 - DNA, 15 bp, Homo sapiens
taattgaaaatacag

SEQ ID NO: 1561965 - DNA, 15 bp, Homo sapiens
ttaattgaaaataca

SEQ ID NO: 1561966 - DNA, 15 bp, Homo sapiens
tttaattgaaaatac

SEQ ID NO: 1561967 - DNA, 15 bp, Homo sapiens
atttaattgaaaata

SEQ ID NO: 1561968 - DNA, 15 bp, Homo sapiens
tatttaattgaaaat

SEQ ID NO: 1561969 - DNA, 15 bp, Homo sapiens
ttatttaattgaaaa

SEQ ID NO: 1561970 - DNA, 15 bp, Homo sapiens
tttatttaattgaaa

SEQ ID NO: 1561971 - DNA, 15 bp, Homo sapiens
ttttatttaattgaa

SEQ ID NO: 1561972 - DNA, 15 bp, Homo sapiens
tttttatttaattga

SEQ ID NO: 1561973 - DNA, 15 bp, Homo sapiens
atttttatttaattg

SEQ ID NO: 1561974 - DNA, 15 bp, Homo sapiens
tatttttatttaatt

SEQ ID NO: 1561975 - DNA, 15 bp, Homo sapiens
atatttttatttaat

SEQ ID NO: 1561976 - DNA, 15 bp, Homo sapiens
gatatttttatttaa

SEQ ID NO: 1561977 - DNA, 15 bp, Homo sapiens
agatatttttattta

SEQ ID NO: 1561978 - DNA, 15 bp, Homo sapiens
aaagatatttttatt

SEQ ID NO: 1561979 - DNA, 15 bp, Homo sapiens
taaagatatttttat

SEQ ID NO: 1561980 - DNA, 15 bp, Homo sapiens
ttaaagatattttta

SEQ ID NO: 1561981 - DNA, 15 bp, Homo sapiens
cttaaagatattttt

SEQ ID NO: 1561982 - DNA, 15 bp, Homo sapiens
ccttaaagatatttt

SEQ ID NO: 1561983 - DNA, 15 bp, Homo sapiens
accttaaagatattt

SEQ ID NO: 1561984 - DNA, 15 bp, Homo sapiens
aaccttaaagatatt

SEQ ID NO: 1561985 - DNA, 15 bp, Homo sapiens
aaaccttaaagatat

SEQ ID NO: 1561986 - DNA, 15 bp, Homo sapiens
taaaccttaaagata

SEQ ID NO: 1561987 - DNA, 15 bp, Homo sapiens
ctaaaccttaaagat

SEQ ID NO: 1561988 - DNA, 15 bp, Homo sapiens
cctaaaccttaaaga

SEQ ID NO: 1561989 - DNA, 15 bp, Homo sapiens
ccctaaaccttaaag

SEQ ID NO: 1561990 - DNA, 15 bp, Homo sapiens
tccctaaaccttaaa

SEQ ID NO: 1561991 - DNA, 15 bp, Homo sapiens
gtccctaaaccttaa

SEQ ID NO: 1561992 - DNA, 15 bp, Homo sapiens
tgtccctaaacctta

SEQ ID NO: 1561993 - DNA, 15 bp, Homo sapiens
ctgtccctaaacctt

SEQ ID NO: 1561994 - DNA, 15 bp, Homo sapiens
actgtccctaaacct

SEQ ID NO: 1561995 - DNA, 15 bp, Homo sapiens
cactgtccctaaacc

SEQ ID NO: 1561996 - DNA, 15 bp, Homo sapiens
acactgtccctaaac

SEQ ID NO: 1561997 - DNA, 15 bp, Homo sapiens
aacactgtccctaaa

SEQ ID NO: 1561998 - DNA, 15 bp, Homo sapiens
caacactgtccctaa

SEQ ID NO: 1561999 - DNA, 15 bp, Homo sapiens
tcaacactgtcccta

SEQ ID NO: 1562000 - DNA, 15 bp, Homo sapiens
ttcaacactgtccct

SEQ ID NO: 1562001 - DNA, 15 bp, Homo sapiens
gttcaacactgtccc

SEQ ID NO: 1562002 - DNA, 15 bp, Homo sapiens
tgttcaacactgtcc

SEQ ID NO: 1562003 - DNA, 15 bp, Homo sapiens
gtgttcaacactgtc

SEQ ID NO: 1562004 - DNA, 15 bp, Homo sapiens
tgtgttcaacactgt

SEQ ID NO: 1562005 - DNA, 15 bp, Homo sapiens
ctgtgttcaacactg

SEQ ID NO: 1562006 - DNA, 15 bp, Homo sapiens
tctgtgttcaacact

SEQ ID NO: 1562007 - DNA, 15 bp, Homo sapiens
ttctgtgttcaacac

SEQ ID NO: 1562008 - DNA, 15 bp, Homo sapiens
tttctgtgttcaaca

SEQ ID NO: 1562009 - DNA, 15 bp, Homo sapiens
ttttctgtgttcaac

SEQ ID NO: 1562010 - DNA, 15 bp, Homo sapiens
cttttctgtgttcaa

SEQ ID NO: 1562011 - DNA, 15 bp, Homo sapiens
acttttctgtgttca

SEQ ID NO: 1562012 - DNA, 15 bp, Homo sapiens
aacttttctgtgttc

SEQ ID NO: 1562013 - DNA, 15 bp, Homo sapiens
taacttttctgtgtt

SEQ ID NO: 1562014 - DNA, 15 bp, Homo sapiens
ataacttttctgtgt

SEQ ID NO: 1562015 - DNA, 15 bp, Homo sapiens
gataacttttctgtg

SEQ ID NO: 1562016 - DNA, 15 bp, Homo sapiens
agataacttttctgt

SEQ ID NO: 1562017 - DNA, 15 bp, Homo sapiens
aagataacttttctg

SEQ ID NO: 1562018 - DNA, 15 bp, Homo sapiens
gaagataacttttct

SEQ ID NO: 1562019 - DNA, 15 bp, Homo sapiens
agaagataacttttc

SEQ ID NO: 1562020 - DNA, 15 bp, Homo sapiens
cagaagataactttt

SEQ ID NO: 1562021 - DNA, 15 bp, Homo sapiens
acagaagataacttt

SEQ ID NO: 1562022 - DNA, 15 bp, Homo sapiens
aacagaagataactt

SEQ ID NO: 1562023 - DNA, 15 bp, Homo sapiens
gaacagaagataact

SEQ ID NO: 1562024 - DNA, 15 bp, Homo sapiens
cgaacagaagataac

SEQ ID NO: 1562025 - DNA, 15 bp, Homo sapiens
gcgaacagaagataa

SEQ ID NO: 1562026 - DNA, 15 bp, Homo sapiens
tgcgaacagaagata

SEQ ID NO: 1562027 - DNA, 15 bp, Homo sapiens
ttgcgaacagaagat

SEQ ID NO: 1562028 - DNA, 15 bp, Homo sapiens
tttgcgaacagaaga

SEQ ID NO: 1562029 - DNA, 15 bp, Homo sapiens
ttttgcgaacagaag

SEQ ID NO: 1562030 - DNA, 15 bp, Homo sapiens
gttttgcgaacagaa

SEQ ID NO: 1562031 - DNA, 15 bp, Homo sapiens
agttttgcgaacaga

SEQ ID NO: 1562032 - DNA, 15 bp, Homo sapiens
gagttttgcgaacag

SEQ ID NO: 1562033 - DNA, 15 bp, Homo sapiens
cgagttttgcgaaca

SEQ ID NO: 1562034 - DNA, 15 bp, Homo sapiens
acgagttttgcgaac

SEQ ID NO: 1562035 - DNA, 15 bp, Homo sapiens
tacgagttttgcgaa

SEQ ID NO: 1562036 - DNA, 15 bp, Homo sapiens
atacgagttttgcga

SEQ ID NO: 1562037 - DNA, 15 bp, Homo sapiens
gatacgagttttgcg

SEQ ID NO: 1562038 - DNA, 15 bp, Homo sapiens
tgatacgagttttgc

SEQ ID NO: 1562039 - DNA, 15 bp, Homo sapiens
atgatacgagttttg

SEQ ID NO: 1562040 - DNA, 15 bp, Homo sapiens
aatgatacgagtttt

SEQ ID NO: 1562041 - DNA, 15 bp, Homo sapiens
gaatgatacgagttt

SEQ ID NO: 1562042 - DNA, 15 bp, Homo sapiens
ggaatgatacgagtt

SEQ ID NO: 1562043 - DNA, 15 bp, Homo sapiens
tggaatgatacgagt

SEQ ID NO: 1562044 - DNA, 15 bp, Homo sapiens
atggaatgatacgag

SEQ ID NO: 1562045 - DNA, 15 bp, Homo sapiens
aatggaatgatacga

SEQ ID NO: 1562046 - DNA, 15 bp, Homo sapiens
aaatggaatgatacg

SEQ ID NO: 1562047 - DNA, 15 bp, Homo sapiens
taaatggaatgatac

SEQ ID NO: 1562048 - DNA, 15 bp, Homo sapiens
ataaatggaatgata

SEQ ID NO: 1562049 - DNA, 15 bp, Homo sapiens
gataaatggaatgat

SEQ ID NO: 1562050 - DNA, 15 bp, Homo sapiens
tgataaatggaatga

SEQ ID NO: 1562051 - DNA, 15 bp, Homo sapiens
ttgataaatggaatg

SEQ ID NO: 1562052 - DNA, 15 bp, Homo sapiens
gttgataaatggaat

SEQ ID NO: 1562053 - DNA, 15 bp, Homo sapiens
tgttgataaatggaa

SEQ ID NO: 1562054 - DNA, 15 bp, Homo sapiens
atgttgataaatgga

SEQ ID NO: 1562055 - DNA, 15 bp, Homo sapiens
gatgttgataaatgg

SEQ ID NO: 1562056 - DNA, 15 bp, Homo sapiens
ggatgttgataaatg

SEQ ID NO: 1562057 - DNA, 15 bp, Homo sapiens
aggatgttgataaat

SEQ ID NO: 1562058 - DNA, 15 bp, Homo sapiens
caggatgttgataaa

SEQ ID NO: 1562059 - DNA, 15 bp, Homo sapiens
gcaggatgttgataa

SEQ ID NO: 1562060 - DNA, 15 bp, Homo sapiens
agcaggatgttgata

SEQ ID NO: 1562061 - DNA, 15 bp, Homo sapiens
aagcaggatgttgat

SEQ ID NO: 1562062 - DNA, 15 bp, Homo sapiens
aaagcaggatgttga

SEQ ID NO: 1562063 - DNA, 15 bp, Homo sapiens
aaaagcaggatgttg

SEQ ID NO: 1562064 - DNA, 15 bp, Homo sapiens
aaaaagcaggatgtt

SEQ ID NO: 1562065 - DNA, 15 bp, Homo sapiens
caaaaagcaggatgt

SEQ ID NO: 1562066 - DNA, 15 bp, Homo sapiens
tcaaaaagcaggatg

SEQ ID NO: 1562067 - DNA, 15 bp, Homo sapiens
atcaaaaagcaggat

SEQ ID NO: 1562068 - DNA, 15 bp, Homo sapiens
tatcaaaaagcagga

SEQ ID NO: 1562069 - DNA, 15 bp, Homo sapiens
ttatcaaaaagcagg

SEQ ID NO: 1562070 - DNA, 15 bp, Homo sapiens
tttatcaaaaagcag

SEQ ID NO: 1562071 - DNA, 15 bp, Homo sapiens
ttttatcaaaaagca

SEQ ID NO: 1562072 - DNA, 15 bp, Homo sapiens
tttttatcaaaaagc

SEQ ID NO: 1562073 - DNA, 15 bp, Homo sapiens
ctttttatcaaaaag

SEQ ID NO: 1562074 - DNA, 15 bp, Homo sapiens
tctttttatcaaaaa

SEQ ID NO: 1562075 - DNA, 15 bp, Homo sapiens
gtctttttatcaaaa

SEQ ID NO: 1562076 - DNA, 15 bp, Homo sapiens
agtctttttatcaaa

SEQ ID NO: 1562077 - DNA, 15 bp, Homo sapiens
aagtctttttatcaa

SEQ ID NO: 1562078 - DNA, 15 bp, Homo sapiens
gaagtctttttatca

SEQ ID NO: 1562079 - DNA, 15 bp, Homo sapiens
tgaagtctttttatc

SEQ ID NO: 1562080 - DNA, 15 bp, Homo sapiens
ttgaagtctttttat

SEQ ID NO: 1562081 - DNA, 15 bp, Homo sapiens
gttgaagtcttttta

SEQ ID NO: 1562082 - DNA, 15 bp, Homo sapiens
tgttgaagtcttttt

SEQ ID NO: 1562083 - DNA, 15 bp, Homo sapiens
ttgttgaagtctttt

SEQ ID NO: 1562084 - DNA, 15 bp, Homo sapiens
attgttgaagtcttt

SEQ ID NO: 1562085 - DNA, 15 bp, Homo sapiens
aattgttgaagtctt

SEQ ID NO: 1562086 - DNA, 15 bp, Homo sapiens
aaattgttgaagtct

SEQ ID NO: 1562087 - DNA, 15 bp, Homo sapiens
gaaattgttgaagtc

SEQ ID NO: 1562088 - DNA, 15 bp, Homo sapiens
ggaaattgttgaagt

SEQ ID NO: 1562089 - DNA, 15 bp, Homo sapiens
aggaaattgttgaag

SEQ ID NO: 1562090 - DNA, 15 bp, Homo sapiens
aaggaaattgttgaa

SEQ ID NO: 1562091 - DNA, 15 bp, Homo sapiens
taaggaaattgttga

SEQ ID NO: 1562092 - DNA, 15 bp, Homo sapiens
ttaaggaaattgttg

SEQ ID NO: 1562093 - DNA, 15 bp, Homo sapiens
cttaaggaaattgtt

SEQ ID NO: 1562094 - DNA, 15 bp, Homo sapiens
tcttaaggaaattgt

SEQ ID NO: 1562095 - DNA, 15 bp, Homo sapiens
atcttaaggaaattg

SEQ ID NO: 1562096 - DNA, 15 bp, Homo sapiens
aatcttaaggaaatt

SEQ ID NO: 1562097 - DNA, 15 bp, Homo sapiens
gaatcttaaggaaat

SEQ ID NO: 1562098 - DNA, 15 bp, Homo sapiens
agaatcttaaggaaa

SEQ ID NO: 1562099 - DNA, 15 bp, Homo sapiens
tagaatcttaaggaa

SEQ ID NO: 1562100 - DNA, 15 bp, Homo sapiens
ttagaatcttaagga

SEQ ID NO: 1562101 - DNA, 15 bp, Homo sapiens
gttagaatcttaagg

SEQ ID NO: 1562102 - DNA, 15 bp, Homo sapiens
tgttagaatcttaag

SEQ ID NO: 1562103 - DNA, 15 bp, Homo sapiens
ttgttagaatcttaa

SEQ ID NO: 1562104 - DNA, 15 bp, Homo sapiens
attgttagaatctta

SEQ ID NO: 1562105 - DNA, 15 bp, Homo sapiens
cattgttagaatctt

SEQ ID NO: 1562106 - DNA, 15 bp, Homo sapiens
acattgttagaatct

SEQ ID NO: 1562107 - DNA, 15 bp, Homo sapiens
tacattgttagaatc

SEQ ID NO: 1562108 - DNA, 15 bp, Homo sapiens
gtacattgttagaat

SEQ ID NO: 1562109 - DNA, 15 bp, Homo sapiens
cgtacattgttagaa

SEQ ID NO: 1562110 - DNA, 15 bp, Homo sapiens
gcgtacattgttaga

SEQ ID NO: 1562111 - DNA, 15 bp, Homo sapiens
tgcgtacattgttag

SEQ ID NO: 1562112 - DNA, 15 bp, Homo sapiens
ttgcgtacattgtta

SEQ ID NO: 1562113 - DNA, 15 bp, Homo sapiens
tttgcgtacattgtt

SEQ ID NO: 1562114 - DNA, 15 bp, Homo sapiens
ttttgcgtacattgt

SEQ ID NO: 1562115 - DNA, 15 bp, Homo sapiens
tttttgcgtacattg

SEQ ID NO: 1562116 - DNA, 15 bp, Homo sapiens
atttttgcgtacatt

SEQ ID NO: 1562117 - DNA, 15 bp, Homo sapiens
aatttttgcgtacat

SEQ ID NO: 1562118 - DNA, 15 bp, Homo sapiens
aaatttttgcgtaca

SEQ ID NO: 1562119 - DNA, 15 bp, Homo sapiens
aaaatttttgcgtac

SEQ ID NO: 1562120 - DNA, 15 bp, Homo sapiens
aaaaatttttgcgta

SEQ ID NO: 1562121 - DNA, 15 bp, Homo sapiens
gaaaaatttttgcgt

SEQ ID NO: 1562122 - DNA, 15 bp, Homo sapiens
tgaaaaatttttgcg

SEQ ID NO: 1562123 - DNA, 15 bp, Homo sapiens
ttgaaaaatttttgc

SEQ ID NO: 1562124 - DNA, 15 bp, Homo sapiens
tttgaaaaatttttg

SEQ ID NO: 1562125 - DNA, 15 bp, Homo sapiens
gtttgaaaaattttt

SEQ ID NO: 1562126 - DNA, 15 bp, Homo sapiens
tgtttgaaaaatttt

SEQ ID NO: 1562127 - DNA, 15 bp, Homo sapiens
atgtttgaaaaattt

SEQ ID NO: 1562128 - DNA, 15 bp, Homo sapiens
catgtttgaaaaatt

SEQ ID NO: 1562129 - DNA, 15 bp, Homo sapiens
ccatgtttgaaaaat

SEQ ID NO: 1562130 - DNA, 15 bp, Homo sapiens
accatgtttgaaaaa

SEQ ID NO: 1562131 - DNA, 15 bp, Homo sapiens
taccatgtttgaaaa

SEQ ID NO: 1562132 - DNA, 15 bp, Homo sapiens
ataccatgtttgaaa

SEQ ID NO: 1562133 - DNA, 15 bp, Homo sapiens
aataccatgtttgaa

SEQ ID NO: 1562134 - DNA, 15 bp, Homo sapiens
gaataccatgtttga

SEQ ID NO: 1562135 - DNA, 15 bp, Homo sapiens
tgaataccatgtttg

SEQ ID NO: 1562136 - DNA, 15 bp, Homo sapiens
ttgaataccatgttt

SEQ ID NO: 1562137 - DNA, 15 bp, Homo sapiens
attgaataccatgtt

SEQ ID NO: 1562138 - DNA, 15 bp, Homo sapiens
tattgaataccatgt

SEQ ID NO: 1562139 - DNA, 15 bp, Homo sapiens
ctattgaataccatg

SEQ ID NO: 1562140 - DNA, 15 bp, Homo sapiens
actattgaataccat

SEQ ID NO: 1562141 - DNA, 15 bp, Homo sapiens
gactattgaatacca

SEQ ID NO: 1562142 - DNA, 15 bp, Homo sapiens
agactattgaatacc

SEQ ID NO: 1562143 - DNA, 15 bp, Homo sapiens
aagactattgaatac

SEQ ID NO: 1562144 - DNA, 15 bp, Homo sapiens
taagactattgaata

SEQ ID NO: 1562145 - DNA, 15 bp, Homo sapiens
gtaagactattgaat

SEQ ID NO: 1562146 - DNA, 15 bp, Homo sapiens
agtaagactattgaa

SEQ ID NO: 1562147 - DNA, 15 bp, Homo sapiens
aagtaagactattga

SEQ ID NO: 1562148 - DNA, 15 bp, Homo sapiens
aaagtaagactattg

SEQ ID NO: 1562149 - DNA, 15 bp, Homo sapiens
gaaagtaagactatt

SEQ ID NO: 1562150 - DNA, 15 bp, Homo sapiens
cgaaagtaagactat

SEQ ID NO: 1562151 - DNA, 15 bp, Homo sapiens
acgaaagtaagacta

SEQ ID NO: 1562152 - DNA, 15 bp, Homo sapiens
gacgaaagtaagact

SEQ ID NO: 1562153 - DNA, 15 bp, Homo sapiens
tgacgaaagtaagac

SEQ ID NO: 1562154 - DNA, 15 bp, Homo sapiens
ctgacgaaagtaaga

SEQ ID NO: 1562155 - DNA, 15 bp, Homo sapiens
actgacgaaagtaag

SEQ ID NO: 1562156 - DNA, 15 bp, Homo sapiens
gactgacgaaagtaa

SEQ ID NO: 1562157 - DNA, 15 bp, Homo sapiens
ggactgacgaaagta

SEQ ID NO: 1562158 - DNA, 15 bp, Homo sapiens
gggactgacgaaagt

SEQ ID NO: 1562159 - DNA, 15 bp, Homo sapiens
tgggactgacgaaag

SEQ ID NO: 1562160 - DNA, 15 bp, Homo sapiens
atgggactgacgaaa

SEQ ID NO: 1562161 - DNA, 15 bp, Homo sapiens
aatgggactgacgaa

SEQ ID NO: 1562162 - DNA, 15 bp, Homo sapiens
taatgggactgacga

SEQ ID NO: 1562163 - DNA, 15 bp, Homo sapiens
ataatgggactgacg

SEQ ID NO: 1562164 - DNA, 15 bp, Homo sapiens
aataatgggactgac

SEQ ID NO: 1562165 - DNA, 15 bp, Homo sapiens
taataatgggactga

SEQ ID NO: 1562166 - DNA, 15 bp, Homo sapiens
ataataatgggactg

SEQ ID NO: 1562167 - DNA, 15 bp, Homo sapiens
tataataatgggact

SEQ ID NO: 1562168 - DNA, 15 bp, Homo sapiens
atataataatgggac

SEQ ID NO: 1562169 - DNA, 15 bp, Homo sapiens
aatataataatggga

SEQ ID NO: 1562170 - DNA, 15 bp, Homo sapiens
taatataataatggg

SEQ ID NO: 1562171 - DNA, 15 bp, Homo sapiens
gtaatataataatgg

SEQ ID NO: 1562172 - DNA, 15 bp, Homo sapiens
agtaatataataatg

SEQ ID NO: 1562173 - DNA, 15 bp, Homo sapiens
aagtaatataataat

SEQ ID NO: 1562174 - DNA, 15 bp, Homo sapiens
aaagtaatataataa

SEQ ID NO: 1562175 - DNA, 15 bp, Homo sapiens
caaagtaatataata

SEQ ID NO: 1562176 - DNA, 15 bp, Homo sapiens
tcaaagtaatataat

SEQ ID NO: 1562177 - DNA, 15 bp, Homo sapiens
ctcaaagtaatataa

SEQ ID NO: 1562178 - DNA, 15 bp, Homo sapiens
tctcaaagtaatata

SEQ ID NO: 1562179 - DNA, 15 bp, Homo sapiens
atctcaaagtaatat

SEQ ID NO: 1562180 - DNA, 15 bp, Homo sapiens
tatctcaaagtaata

SEQ ID NO: 1562181 - DNA, 15 bp, Homo sapiens
atatctcaaagtaat

SEQ ID NO: 1562182 - DNA, 15 bp, Homo sapiens
catatctcaaagtaa

SEQ ID NO: 1562183 - DNA, 15 bp, Homo sapiens
gcatatctcaaagta

SEQ ID NO: 1562184 - DNA, 15 bp, Homo sapiens
ggcatatctcaaagt

SEQ ID NO: 1562185 - DNA, 15 bp, Homo sapiens
gggcatatctcaaag

SEQ ID NO: 1562186 - DNA, 15 bp, Homo sapiens
agggcatatctcaaa

SEQ ID NO: 1562187 - DNA, 15 bp, Homo sapiens
aagggcatatctcaa

SEQ ID NO: 1562188 - DNA, 15 bp, Homo sapiens
aaagggcatatctca

SEQ ID NO: 1562189 - DNA, 15 bp, Homo sapiens
aaaagggcatatctc

SEQ ID NO: 1562190 - DNA, 15 bp, Homo sapiens
aaaaagggcatatct

SEQ ID NO: 1562191 - DNA, 15 bp, Homo sapiens
caaaaagggcatatc

SEQ ID NO: 1562192 - DNA, 15 bp, Homo sapiens
acaaaaagggcatat

SEQ ID NO: 1562193 - DNA, 15 bp, Homo sapiens
aacaaaaagggcata

SEQ ID NO: 1562194 - DNA, 15 bp, Homo sapiens
taacaaaaagggcat

SEQ ID NO: 1562195 - DNA, 15 bp, Homo sapiens
ataacaaaaagggca

SEQ ID NO: 1562196 - DNA, 15 bp, Homo sapiens
tataacaaaaagggc

SEQ ID NO: 1562197 - DNA, 15 bp, Homo sapiens
ctataacaaaaaggg

SEQ ID NO: 1562198 - DNA, 15 bp, Homo sapiens
tctataacaaaaagg

SEQ ID NO: 1562199 - DNA, 15 bp, Homo sapiens
tttctataacaaaaa

SEQ ID NO: 1562200 - DNA, 15 bp, Homo sapiens
ctttctataacaaaa

SEQ ID NO: 1562201 - DNA, 15 bp, Homo sapiens
cctttctataacaaa

SEQ ID NO: 1562202 - DNA, 15 bp, Homo sapiens
ccctttctataacaa

SEQ ID NO: 1562203 - DNA, 15 bp, Homo sapiens
accctttctataaca

SEQ ID NO: 1562204 - DNA, 15 bp, Homo sapiens
taccctttctataac

SEQ ID NO: 1562205 - DNA, 15 bp, Homo sapiens
ttaccctttctataa

SEQ ID NO: 1562206 - DNA, 15 bp, Homo sapiens
tttaccctttctata

SEQ ID NO: 1562207 - DNA, 15 bp, Homo sapiens
ttttaccctttctat

SEQ ID NO: 1562208 - DNA, 15 bp, Homo sapiens
attttaccctttcta

SEQ ID NO: 1562209 - DNA, 15 bp, Homo sapiens
tattttaccctttct

SEQ ID NO: 1562210 - DNA, 15 bp, Homo sapiens
ctattttaccctttc

SEQ ID NO: 1562211 - DNA, 15 bp, Homo sapiens
actattttacccttt

SEQ ID NO: 1562212 - DNA, 15 bp, Homo sapiens
aactattttaccctt

SEQ ID NO: 1562213 - DNA, 15 bp, Homo sapiens
aaactattttaccct

SEQ ID NO: 1562214 - DNA, 15 bp, Homo sapiens
caaactattttaccc

SEQ ID NO: 1562215 - DNA, 15 bp, Homo sapiens
gcaaactattttacc

SEQ ID NO: 1562216 - DNA, 15 bp, Homo sapiens
ggcaaactattttac

SEQ ID NO: 1562217 - DNA, 15 bp, Homo sapiens
aggcaaactatttta

SEQ ID NO: 1562218 - DNA, 15 bp, Homo sapiens
caggcaaactatttt

SEQ ID NO: 1562219 - DNA, 15 bp, Homo sapiens
acaggcaaactattt

SEQ ID NO: 1562220 - DNA, 15 bp, Homo sapiens
cacaggcaaactatt

SEQ ID NO: 1562221 - DNA, 15 bp, Homo sapiens
acacaggcaaactat

SEQ ID NO: 1562222 - DNA, 15 bp, Homo sapiens
aacacaggcaaacta

SEQ ID NO: 1562223 - DNA, 15 bp, Homo sapiens
gaacacaggcaaact

SEQ ID NO: 1562224 - DNA, 15 bp, Homo sapiens
ggaacacaggcaaac

SEQ ID NO: 1562225 - DNA, 15 bp, Homo sapiens
gggaacacaggcaaa

SEQ ID NO: 1562226 - DNA, 15 bp, Homo sapiens
ggggaacacaggcaa

SEQ ID NO: 1562227 - DNA, 15 bp, Homo sapiens
aggggaacacaggca

SEQ ID NO: 1562228 - DNA, 15 bp, Homo sapiens
caggggaacacaggc

SEQ ID NO: 1562229 - DNA, 15 bp, Homo sapiens
acaggggaacacagg

SEQ ID NO: 1562230 - DNA, 15 bp, Homo sapiens
gacaggggaacacag

SEQ ID NO: 1562231 - DNA, 15 bp, Homo sapiens
tgacaggggaacaca

SEQ ID NO: 1562232 - DNA, 15 bp, Homo sapiens
ttgacaggggaacac

SEQ ID NO: 1562233 - DNA, 15 bp, Homo sapiens
tttgacaggggaaca

SEQ ID NO: 1562234 - DNA, 15 bp, Homo sapiens
ctttgacaggggaac

SEQ ID NO: 1562235 - DNA, 15 bp, Homo sapiens
actttgacaggggaa

SEQ ID NO: 1562236 - DNA, 15 bp, Homo sapiens
tactttgacagggga

SEQ ID NO: 1562237 - DNA, 15 bp, Homo sapiens
atactttgacagggg

SEQ ID NO: 1562238 - DNA, 15 bp, Homo sapiens
tatactttgacaggg

SEQ ID NO: 1562239 - DNA, 15 bp, Homo sapiens
ttatactttgacagg

SEQ ID NO: 1562240 - DNA, 15 bp, Homo sapiens
tttatactttgacag

SEQ ID NO: 1562241 - DNA, 15 bp, Homo sapiens
atttatactttgaca

SEQ ID NO: 1562242 - DNA, 15 bp, Homo sapiens
aatttatactttgac

SEQ ID NO: 1562243 - DNA, 15 bp, Homo sapiens
taatttatactttga

SEQ ID NO: 1562244 - DNA, 15 bp, Homo sapiens
ttaatttatactttg

SEQ ID NO: 1562245 - DNA, 15 bp, Homo sapiens
attaatttatacttt

SEQ ID NO: 1562246 - DNA, 15 bp, Homo sapiens
tattaatttatactt

SEQ ID NO: 1562247 - DNA, 15 bp, Homo sapiens
atattaatttatact

SEQ ID NO: 1562248 - DNA, 15 bp, Homo sapiens
gatattaatttatac

SEQ ID NO: 1562249 - DNA, 15 bp, Homo sapiens
agatattaatttata

SEQ ID NO: 1562250 - DNA, 15 bp, Homo sapiens
cagatattaatttat

SEQ ID NO: 1562251 - DNA, 15 bp, Homo sapiens
tcagatattaattta

SEQ ID NO: 1562252 - DNA, 15 bp, Homo sapiens
atcagatattaattt

SEQ ID NO: 1562253 - DNA, 15 bp, Homo sapiens
aatcagatattaatt

SEQ ID NO: 1562254 - DNA, 15 bp, Homo sapiens
aaatcagatattaat

SEQ ID NO: 1562255 - DNA, 15 bp, Homo sapiens
aaaatcagatattaa

SEQ ID NO: 1562256 - DNA, 15 bp, Homo sapiens
gaaaatcagatatta

SEQ ID NO: 1562257 - DNA, 15 bp, Homo sapiens
agaaaatcagatatt

SEQ ID NO: 1562258 - DNA, 15 bp, Homo sapiens
aagaaaatcagatat

SEQ ID NO: 1562259 - DNA, 15 bp, Homo sapiens
caagaaaatcagata

SEQ ID NO: 1562260 - DNA, 15 bp, Homo sapiens
ccaagaaaatcagat

SEQ ID NO: 1562261 - DNA, 15 bp, Homo sapiens
accaagaaaatcaga

SEQ ID NO: 1562262 - DNA, 15 bp, Homo sapiens
aaccaagaaaatcag

SEQ ID NO: 1562263 - DNA, 15 bp, Homo sapiens
aaaccaagaaaatca

SEQ ID NO: 1562264 - DNA, 15 bp, Homo sapiens
aaaaccaagaaaatc

SEQ ID NO: 1562265 - DNA, 15 bp, Homo sapiens
aaaaaccaagaaaat

SEQ ID NO: 1562266 - DNA, 15 bp, Homo sapiens
taaaaaccaagaaaa

SEQ ID NO: 1562267 - DNA, 15 bp, Homo sapiens
ttaaaaaccaagaaa

SEQ ID NO: 1562268 - DNA, 15 bp, Homo sapiens
tttaaaaaccaagaa

SEQ ID NO: 1562269 - DNA, 15 bp, Homo sapiens
gtttaaaaaccaaga

SEQ ID NO: 1562270 - DNA, 15 bp, Homo sapiens
tgtttaaaaaccaag

SEQ ID NO: 1562271 - DNA, 15 bp, Homo sapiens
ttgtttaaaaaccaa

SEQ ID NO: 1562272 - DNA, 15 bp, Homo sapiens
attgtttaaaaacca

SEQ ID NO: 1562273 - DNA, 15 bp, Homo sapiens
aattgtttaaaaacc

SEQ ID NO: 1562274 - DNA, 15 bp, Homo sapiens
caattgtttaaaaac

SEQ ID NO: 1562275 - DNA, 15 bp, Homo sapiens
gcaattgtttaaaaa

SEQ ID NO: 1562276 - DNA, 15 bp, Homo sapiens
ggcaattgtttaaaa

SEQ ID NO: 1562277 - DNA, 15 bp, Homo sapiens
aggcaattgtttaaa

SEQ ID NO: 1562278 - DNA, 15 bp, Homo sapiens
taggcaattgtttaa

SEQ ID NO: 1562279 - DNA, 15 bp, Homo sapiens
ataggcaattgttta

SEQ ID NO: 1562280 - DNA, 15 bp, Homo sapiens
aataggcaattgttt

SEQ ID NO: 1562281 - DNA, 15 bp, Homo sapiens
aaataggcaattgtt

SEQ ID NO: 1562282 - DNA, 15 bp, Homo sapiens
taaataggcaattgt

SEQ ID NO: 1562283 - DNA, 15 bp, Homo sapiens
ctaaataggcaattg

SEQ ID NO: 1562284 - DNA, 15 bp, Homo sapiens
tctaaataggcaatt

SEQ ID NO: 1562285 - DNA, 15 bp, Homo sapiens
gtctaaataggcaat

SEQ ID NO: 1562286 - DNA, 15 bp, Homo sapiens
agtctaaataggcaa

SEQ ID NO: 1562287 - DNA, 15 bp, Homo sapiens
aagtctaaataggca

SEQ ID NO: 1562288 - DNA, 15 bp, Homo sapiens
taagtctaaataggc

SEQ ID NO: 1562289 - DNA, 15 bp, Homo sapiens
ttaagtctaaatagg

SEQ ID NO: 1562290 - DNA, 15 bp, Homo sapiens
attaagtctaaatag

SEQ ID NO: 1562291 - DNA, 15 bp, Homo sapiens
aattaagtctaaata

SEQ ID NO: 1562292 - DNA, 15 bp, Homo sapiens
aaattaagtctaaat

SEQ ID NO: 1562293 - DNA, 15 bp, Homo sapiens
aaaattaagtctaaa

SEQ ID NO: 1562294 - DNA, 15 bp, Homo sapiens
aaaaattaagtctaa

SEQ ID NO: 1562295 - DNA, 15 bp, Homo sapiens
aaaaaattaagtcta

SEQ ID NO: 1562296 - DNA, 15 bp, Homo sapiens
gaaaaaattaagtct

SEQ ID NO: 1562297 - DNA, 15 bp, Homo sapiens
agaaaaaattaagtc

SEQ ID NO: 1562298 - DNA, 15 bp, Homo sapiens
cagaaaaaattaagt

SEQ ID NO: 1562299 - DNA, 15 bp, Homo sapiens
tcagaaaaaattaag

SEQ ID NO: 1562300 - DNA, 15 bp, Homo sapiens
atcagaaaaaattaa

SEQ ID NO: 1562301 - DNA, 15 bp, Homo sapiens
aatcagaaaaaatta

SEQ ID NO: 1562302 - DNA, 15 bp, Homo sapiens
aaatcagaaaaaatt

SEQ ID NO: 1562303 - DNA, 15 bp, Homo sapiens
taaatcagaaaaaat

SEQ ID NO: 1562304 - DNA, 15 bp, Homo sapiens
ttaaatcagaaaaaa

SEQ ID NO: 1562305 - DNA, 15 bp, Homo sapiens
tttaaatcagaaaaa

SEQ ID NO: 1562306 - DNA, 15 bp, Homo sapiens
ttttaaatcagaaaa

SEQ ID NO: 1562307 - DNA, 15 bp, Homo sapiens
tttttaaatcagaaa

SEQ ID NO: 1562308 - DNA, 15 bp, Homo sapiens
ttttttaaatcagaa

SEQ ID NO: 1562309 - DNA, 15 bp, Homo sapiens
attttttttaaatca

SEQ ID NO: 1562310 - DNA, 15 bp, Homo sapiens
gattttttttaaatc

SEQ ID NO: 1562311 - DNA, 15 bp, Homo sapiens
tgattttttttaaat

SEQ ID NO: 1562312 - DNA, 15 bp, Homo sapiens
ctgattttttttaaa

SEQ ID NO: 1562313 - DNA, 15 bp, Homo sapiens
actgattttttttaa

SEQ ID NO: 1562314 - DNA, 15 bp, Homo sapiens
cactgatttttttta

SEQ ID NO: 1562315 - DNA, 15 bp, Homo sapiens
gcactgatttttttt

SEQ ID NO: 1562316 - DNA, 15 bp, Homo sapiens
tgcactgattttttt

SEQ ID NO: 1562317 - DNA, 15 bp, Homo sapiens
ttgcactgatttttt

SEQ ID NO: 1562318 - DNA, 15 bp, Homo sapiens
attgcactgattttt

SEQ ID NO: 1562319 - DNA, 15 bp, Homo sapiens
tattgcactgatttt

SEQ ID NO: 1562320 - DNA, 15 bp, Homo sapiens
ttattgcactgattt

SEQ ID NO: 1562321 - DNA, 15 bp, Homo sapiens
cttattgcactgatt

SEQ ID NO: 1562322 - DNA, 15 bp, Homo sapiens
acttattgcactgat

SEQ ID NO: 1562323 - DNA, 15 bp, Homo sapiens
aacttattgcactga

SEQ ID NO: 1562324 - DNA, 15 bp, Homo sapiens
gaacttattgcactg

SEQ ID NO: 1562325 - DNA, 15 bp, Homo sapiens
tgaacttattgcact

SEQ ID NO: 1562326 - DNA, 15 bp, Homo sapiens
ttgaacttattgcac

SEQ ID NO: 1562327 - DNA, 15 bp, Homo sapiens
cttgaacttattgca

SEQ ID NO: 1562328 - DNA, 15 bp, Homo sapiens
ccttgaacttattgc

SEQ ID NO: 1562329 - DNA, 15 bp, Homo sapiens
accttgaacttattg

SEQ ID NO: 1562330 - DNA, 15 bp, Homo sapiens
gaccttgaacttatt

SEQ ID NO: 1562331 - DNA, 15 bp, Homo sapiens
agaccttgaacttat

SEQ ID NO: 1562332 - DNA, 15 bp, Homo sapiens
aagaccttgaactta

SEQ ID NO: 1562333 - DNA, 15 bp, Homo sapiens
aaagaccttgaactt

SEQ ID NO: 1562334 - DNA, 15 bp, Homo sapiens
aaaagaccttgaact

SEQ ID NO: 1562335 - DNA, 15 bp, Homo sapiens
taaaagaccttgaac

SEQ ID NO: 1562336 - DNA, 15 bp, Homo sapiens
ataaaagaccttgaa

SEQ ID NO: 1562337 - DNA, 15 bp, Homo sapiens
gataaaagaccttga

SEQ ID NO: 1562338 - DNA, 15 bp, Homo sapiens
tgataaaagaccttg

SEQ ID NO: 1562339 - DNA, 15 bp, Homo sapiens
ttgataaaagacctt

SEQ ID NO: 1562340 - DNA, 15 bp, Homo sapiens
gttgataaaagacct

SEQ ID NO: 1562341 - DNA, 15 bp, Homo sapiens
tgttgataaaagacc

SEQ ID NO: 1562342 - DNA, 15 bp, Homo sapiens
atgttgataaaagac

SEQ ID NO: 1562343 - DNA, 15 bp, Homo sapiens
tatgttgataaaaga

SEQ ID NO: 1562344 - DNA, 15 bp, Homo sapiens
ttatgttgataaaag

SEQ ID NO: 1562345 - DNA, 15 bp, Homo sapiens
gttatgttgataaaa

SEQ ID NO: 1562346 - DNA, 15 bp, Homo sapiens
agttatgttgataaa

SEQ ID NO: 1562347 - DNA, 15 bp, Homo sapiens
tagttatgttgataa

SEQ ID NO: 1562348 - DNA, 15 bp, Homo sapiens
gtagttatgttgata

SEQ ID NO: 1562349 - DNA, 15 bp, Homo sapiens
tgtagttatgttgat

SEQ ID NO: 1562350 - DNA, 15 bp, Homo sapiens
ctgtagttatgttga

SEQ ID NO: 1562351 - DNA, 15 bp, Homo sapiens
actgtagttatgttg

SEQ ID NO: 1562352 - DNA, 15 bp, Homo sapiens
aactgtagttatgtt

SEQ ID NO: 1562353 - DNA, 15 bp, Homo sapiens
taactgtagttatgt

SEQ ID NO: 1562354 - DNA, 15 bp, Homo sapiens
ttaactgtagttatg

SEQ ID NO: 1562355 - DNA, 15 bp, Homo sapiens
attaactgtagttat

SEQ ID NO: 1562356 - DNA, 15 bp, Homo sapiens
cattaactgtagtta

SEQ ID NO: 1562357 - DNA, 15 bp, Homo sapiens
acattaactgtagtt

SEQ ID NO: 1562358 - DNA, 15 bp, Homo sapiens
tacattaactgtagt

SEQ ID NO: 1562359 - DNA, 15 bp, Homo sapiens
atacattaactgtag

SEQ ID NO: 1562360 - DNA, 15 bp, Homo sapiens
aatacattaactgta

SEQ ID NO: 1562361 - DNA, 15 bp, Homo sapiens
aaatacattaactgt

SEQ ID NO: 1562362 - DNA, 15 bp, Homo sapiens
aaaatacattaactg

SEQ ID NO: 1562363 - DNA, 15 bp, Homo sapiens
taaaatacattaact

SEQ ID NO: 1562364 - DNA, 15 bp, Homo sapiens
ataaaatacattaac

SEQ ID NO: 1562365 - DNA, 15 bp, Homo sapiens
tataaaatacattaa

SEQ ID NO: 1562366 - DNA, 15 bp, Homo sapiens
gtataaaatacatta

SEQ ID NO: 1562367 - DNA, 15 bp, Homo sapiens
tcaagtataaaatac

SEQ ID NO: 1562368 - DNA, 15 bp, Homo sapiens
ttcaagtataaaata

SEQ ID NO: 1562369 - DNA, 15 bp, Homo sapiens
tttcaagtataaaat

SEQ ID NO: 1562370 - DNA, 15 bp, Homo sapiens
ttttcaagtataaaa

SEQ ID NO: 1562371 - DNA, 15 bp, Homo sapiens
attttcaagtataaa

SEQ ID NO: 1562372 - DNA, 15 bp, Homo sapiens
tattttcaagtataa

SEQ ID NO: 1562373 - DNA, 15 bp, Homo sapiens
ctattttcaagtata

SEQ ID NO: 1562374 - DNA, 15 bp, Homo sapiens
gctattttcaagtat

SEQ ID NO: 1562375 - DNA, 15 bp, Homo sapiens
agctattttcaagta

SEQ ID NO: 1562376 - DNA, 15 bp, Homo sapiens
tagctattttcaagt

SEQ ID NO: 1562377 - DNA, 15 bp, Homo sapiens
gtagctattttcaag

SEQ ID NO: 1562378 - DNA, 15 bp, Homo sapiens
cgtagctattttcaa

SEQ ID NO: 1562379 - DNA, 15 bp, Homo sapiens
tcgtagctattttca

SEQ ID NO: 1562380 - DNA, 15 bp, Homo sapiens
ctcgtagctattttc

SEQ ID NO: 1562381 - DNA, 15 bp, Homo sapiens
actcgtagctatttt

SEQ ID NO: 1562382 - DNA, 15 bp, Homo sapiens
tactcgtagctattt

SEQ ID NO: 1562383 - DNA, 15 bp, Homo sapiens
ctactcgtagctatt

SEQ ID NO: 1562384 - DNA, 15 bp, Homo sapiens
tctactcgtagctat

SEQ ID NO: 1562385 - DNA, 15 bp, Homo sapiens
atctactcgtagcta

SEQ ID NO: 1562386 - DNA, 15 bp, Homo sapiens
aatctactcgtagct

SEQ ID NO: 1562387 - DNA, 15 bp, Homo sapiens
aaatctactcgtagc

SEQ ID NO: 1562388 - DNA, 15 bp, Homo sapiens
aaaatctactcgtag

SEQ ID NO: 1562389 - DNA, 15 bp, Homo sapiens
taaaatctactcgta

SEQ ID NO: 1562390 - DNA, 15 bp, Homo sapiens
ttaaaatctactcgt

SEQ ID NO: 1562391 - DNA, 15 bp, Homo sapiens
cttaaaatctactcg

SEQ ID NO: 1562392 - DNA, 15 bp, Homo sapiens
acttaaaatctactc

SEQ ID NO: 1562393 - DNA, 15 bp, Homo sapiens
tacttaaaatctact

SEQ ID NO: 1562394 - DNA, 15 bp, Homo sapiens
atacttaaaatctac

SEQ ID NO: 1562395 - DNA, 15 bp, Homo sapiens
aatacttaaaatcta

SEQ ID NO: 1562396 - DNA, 15 bp, Homo sapiens
gaatacttaaaatct

SEQ ID NO: 1562397 - DNA, 15 bp, Homo sapiens
agaatacttaaaatc

SEQ ID NO: 1562398 - DNA, 15 bp, Homo sapiens
gagaatacttaaaat

SEQ ID NO: 1562399 - DNA, 15 bp, Homo sapiens
tgagaatacttaaaa

SEQ ID NO: 1562400 - DNA, 15 bp, Homo sapiens
gtgagaatacttaaa

SEQ ID NO: 1562401 - DNA, 15 bp, Homo sapiens
ggtgagaatacttaa

SEQ ID NO: 1562402 - DNA, 15 bp, Homo sapiens
tggtgagaatactta

SEQ ID NO: 1562403 - DNA, 15 bp, Homo sapiens
gtggtgagaatactt

SEQ ID NO: 1562404 - DNA, 15 bp, Homo sapiens
tgtggtgagaatact

SEQ ID NO: 1562405 - DNA, 15 bp, Homo sapiens
ttgtggtgagaatac

SEQ ID NO: 1562406 - DNA, 15 bp, Homo sapiens
tttgtggtgagaata

SEQ ID NO: 1562407 - DNA, 15 bp, Homo sapiens
ttttgtggtgagaat

SEQ ID NO: 1562408 - DNA, 15 bp, Homo sapiens
cttttgtggtgagaa

SEQ ID NO: 1562409 - DNA, 15 bp, Homo sapiens
tcttttgtggtgaga

SEQ ID NO: 1562410 - DNA, 15 bp, Homo sapiens
atcttttgtggtgag

SEQ ID NO: 1562411 - DNA, 15 bp, Homo sapiens
tatcttttgtggtga

SEQ ID NO: 1562412 - DNA, 15 bp, Homo sapiens
ttatcttttgtggtg

SEQ ID NO: 1562413 - DNA, 15 bp, Homo sapiens
tttatcttttgtggt

SEQ ID NO: 1562414 - DNA, 15 bp, Homo sapiens
atttatcttttgtgg

SEQ ID NO: 1562415 - DNA, 15 bp, Homo sapiens
tatttatcttttgtg

SEQ ID NO: 1562416 - DNA, 15 bp, Homo sapiens
atatttatcttttgt

SEQ ID NO: 1562417 - DNA, 15 bp, Homo sapiens
atatatttatctttt

SEQ ID NO: 1562418 - DNA, 15 bp, Homo sapiens
catatatttatcttt

SEQ ID NO: 1562419 - DNA, 15 bp, Homo sapiens
tcatatatttatctt

SEQ ID NO: 1562420 - DNA, 15 bp, Homo sapiens
ctcatatatttatct

SEQ ID NO: 1562421 - DNA, 15 bp, Homo sapiens
cctcatatatttatc

SEQ ID NO: 1562422 - DNA, 15 bp, Homo sapiens
acctcatatatttat

SEQ ID NO: 1562423 - DNA, 15 bp, Homo sapiens
tacctcatatattta

SEQ ID NO: 1562424 - DNA, 15 bp, Homo sapiens
ttacctcatatattt

SEQ ID NO: 1562425 - DNA, 15 bp, Homo sapiens
gttacctcatatatt

SEQ ID NO: 1562426 - DNA, 15 bp, Homo sapiens
tgttacctcatatat

SEQ ID NO: 1562427 - DNA, 15 bp, Homo sapiens
gtgttacctcatata

SEQ ID NO: 1562428 - DNA, 15 bp, Homo sapiens
tgtgttacctcatat

SEQ ID NO: 1562429 - DNA, 15 bp, Homo sapiens
atgtgttacctcata

SEQ ID NO: 1562430 - DNA, 15 bp, Homo sapiens
tatgtgttacctcat

SEQ ID NO: 1562431 - DNA, 15 bp, Homo sapiens
atatgtgttacctca

SEQ ID NO: 1562432 - DNA, 15 bp, Homo sapiens
catatgtgttacctc

SEQ ID NO: 1562433 - DNA, 15 bp, Homo sapiens
acatatgtgttacct

SEQ ID NO: 1562434 - DNA, 15 bp, Homo sapiens
aacatatgtgttacc

SEQ ID NO: 1562435 - DNA, 15 bp, Homo sapiens
taacatatgtgttac

SEQ ID NO: 1562436 - DNA, 15 bp, Homo sapiens
ttaacatatgtgtta

SEQ ID NO: 1562437 - DNA, 15 bp, Homo sapiens
attaacatatgtgtt

SEQ ID NO: 1562438 - DNA, 15 bp, Homo sapiens
aattaacatatgtgt

SEQ ID NO: 1562439 - DNA, 15 bp, Homo sapiens
aaattaacatatgtg

SEQ ID NO: 1562440 - DNA, 15 bp, Homo sapiens
caaattaacatatgt

SEQ ID NO: 1562441 - DNA, 15 bp, Homo sapiens
gcaaattaacatatg

SEQ ID NO: 1562442 - DNA, 15 bp, Homo sapiens
agcaaattaacatat

SEQ ID NO: 1562443 - DNA, 15 bp, Homo sapiens
aagcaaattaacata

SEQ ID NO: 1562444 - DNA, 15 bp, Homo sapiens
caagcaaattaacat

SEQ ID NO: 1562445 - DNA, 15 bp, Homo sapiens
tcaagcaaattaaca

SEQ ID NO: 1562446 - DNA, 15 bp, Homo sapiens
atcaagcaaattaac

SEQ ID NO: 1562447 - DNA, 15 bp, Homo sapiens
aatcaagcaaattaa

SEQ ID NO: 1562448 - DNA, 15 bp, Homo sapiens
aaatcaagcaaatta

SEQ ID NO: 1562449 - DNA, 15 bp, Homo sapiens
taaatcaagcaaatt

SEQ ID NO: 1562450 - DNA, 15 bp, Homo sapiens
ctaaatcaagcaaat

SEQ ID NO: 1562451 - DNA, 15 bp, Homo sapiens
gctaaatcaagcaaa

SEQ ID NO: 1562452 - DNA, 15 bp, Homo sapiens
ggctaaatcaagcaa

SEQ ID NO: 1562453 - DNA, 15 bp, Homo sapiens
tggctaaatcaagca

SEQ ID NO: 1562454 - DNA, 15 bp, Homo sapiens
atggctaaatcaagc

SEQ ID NO: 1562455 - DNA, 15 bp, Homo sapiens
aatggctaaatcaag

SEQ ID NO: 1562456 - DNA, 15 bp, Homo sapiens
gaatggctaaatcaa

SEQ ID NO: 1562457 - DNA, 15 bp, Homo sapiens
agaatggctaaatca

SEQ ID NO: 1562458 - DNA, 15 bp, Homo sapiens
tagaatggctaaatc

SEQ ID NO: 1562459 - DNA, 15 bp, Homo sapiens
gtagaatggctaaat

SEQ ID NO: 1562460 - DNA, 15 bp, Homo sapiens
tgtagaatggctaaa

SEQ ID NO: 1562461 - DNA, 15 bp, Homo sapiens
ttgtagaatggctaa

SEQ ID NO: 1562462 - DNA, 15 bp, Homo sapiens
attgtagaatggcta

SEQ ID NO: 1562463 - DNA, 15 bp, Homo sapiens
cattgtagaatggct

SEQ ID NO: 1562464 - DNA, 15 bp, Homo sapiens
acattgtagaatggc

SEQ ID NO: 1562465 - DNA, 15 bp, Homo sapiens
tacattgtagaatgg

SEQ ID NO: 1562466 - DNA, 15 bp, Homo sapiens
ttacattgtagaatg

SEQ ID NO: 1562467 - DNA, 15 bp, Homo sapiens
tttacattgtagaat

SEQ ID NO: 1562468 - DNA, 15 bp, Homo sapiens
gtttacattgtagaa

SEQ ID NO: 1562469 - DNA, 15 bp, Homo sapiens
tgtttacattgtaga

SEQ ID NO: 1562470 - DNA, 15 bp, Homo sapiens
atgtttacattgtag

SEQ ID NO: 1562471 - DNA, 15 bp, Homo sapiens
aatgtttacattgta

SEQ ID NO: 1562472 - DNA, 15 bp, Homo sapiens
aaatgtttacattgt

SEQ ID NO: 1562473 - DNA, 15 bp, Homo sapiens
aaaatgtttacattg

SEQ ID NO: 1562474 - DNA, 15 bp, Homo sapiens
taaaatgtttacatt

SEQ ID NO: 1562475 - DNA, 15 bp, Homo sapiens
ataaaatgtttacat

SEQ ID NO: 1562476 - DNA, 15 bp, Homo sapiens
aataaaatgtttaca

SEQ ID NO: 1562477 - DNA, 15 bp, Homo sapiens
aaataaaatgtttac

SEQ ID NO: 1562478 - DNA, 15 bp, Homo sapiens
ataaataaaatgttt

SEQ ID NO: 1562479 - DNA, 15 bp, Homo sapiens
aataaataaaatgtt

SEQ ID NO: 1562480 - DNA, 15 bp, Homo sapiens
aaaataaataaaatg

SEQ ID NO: 1562481 - DNA, 15 bp, Homo sapiens
aaaaataaataaaat

SEQ ID NO: 1562482 - DNA, 15 bp, Homo sapiens
ataaaaataaataaa

SEQ ID NO: 1562483 - DNA, 15 bp, Homo sapiens
gaaaaataaaaataa

SEQ ID NO: 1562484 - DNA, 15 bp, Homo sapiens
agaaaaataaaaata

SEQ ID NO: 1562485 - DNA, 15 bp, Homo sapiens
aagaaaaataaaaat

SEQ ID NO: 1562486 - DNA, 15 bp, Homo sapiens
aataaagaaaaataa

SEQ ID NO: 1562487 - DNA, 15 bp, Homo sapiens
taataaagaaaaata

SEQ ID NO: 1562488 - DNA, 15 bp, Homo sapiens
ttaataaagaaaaat

SEQ ID NO: 1562489 - DNA, 15 bp, Homo sapiens
attaataaagaaaaa

SEQ ID NO: 1562490 - DNA, 15 bp, Homo sapiens
aattaataaagaaaa

SEQ ID NO: 1562491 - DNA, 15 bp, Homo sapiens
aaattaataaagaaa

SEQ ID NO: 1562492 - DNA, 15 bp, Homo sapiens
aaaattaataaagaa

SEQ ID NO: 1562493 - DNA, 15 bp, Homo sapiens
aaaaattaataaaga

SEQ ID NO: 1562494 - DNA, 15 bp, Homo sapiens
aaaaaattaataaag

SEQ ID NO: 1562495 - DNA, 15 bp, Homo sapiens
aaaaaaaattaataa

SEQ ID NO: 1562496 - DNA, 15 bp, Homo sapiens
caaaaaaaattaata

SEQ ID NO: 1562497 - DNA, 15 bp, Homo sapiens
tcaaaaaaaattaat

SEQ ID NO: 1562498 - DNA, 15 bp, Homo sapiens
ttactgcactccagc

SEQ ID NO: 1562499 - DNA, 15 bp, Homo sapiens
gttactgcactccag

SEQ ID NO: 1562500 - DNA, 15 bp, Homo sapiens
tgttactgcactcca

SEQ ID NO: 1562501 - DNA, 15 bp, Homo sapiens
gtgttactgcactcc

SEQ ID NO: 1562502 - DNA, 15 bp, Homo sapiens
tgtgttactgcactc

SEQ ID NO: 1562503 - DNA, 15 bp, Homo sapiens
ttgtgttactgcact

SEQ ID NO: 1562504 - DNA, 15 bp, Homo sapiens
attgtgttactgcac

SEQ ID NO: 1562505 - DNA, 15 bp, Homo sapiens
gattgtgttactgca

SEQ ID NO: 1562506 - DNA, 15 bp, Homo sapiens
agattgtgttactgc

SEQ ID NO: 1562507 - DNA, 15 bp, Homo sapiens
gagattgtgttactg

SEQ ID NO: 1562508 - DNA, 15 bp, Homo sapiens
cgagattgtgttact

SEQ ID NO: 1562509 - DNA, 15 bp, Homo sapiens
ccgagattgtgttac

SEQ ID NO: 1562510 - DNA, 15 bp, Homo sapiens
gccgagattgtgtta

SEQ ID NO: 1562511 - DNA, 15 bp, Homo sapiens
agccgagattgtgtt

SEQ ID NO: 1562512 - DNA, 15 bp, Homo sapiens
gagccgagattgtgt

SEQ ID NO: 1562513 - DNA, 15 bp, Homo sapiens
tagtgagccgagatt

SEQ ID NO: 1562514 - DNA, 15 bp, Homo sapiens
aggttgtagtgagcc

SEQ ID NO: 1562515 - DNA, 15 bp, Homo sapiens
gaggttgtagtgagc

SEQ ID NO: 1562516 - DNA, 15 bp, Homo sapiens
atgaggcaggagaat

SEQ ID NO: 1562517 - DNA, 15 bp, Homo sapiens
gatgaggcaggagaa

SEQ ID NO: 1562518 - DNA, 15 bp, Homo sapiens
ggatgaggcaggaga

SEQ ID NO: 1562519 - DNA, 15 bp, Homo sapiens
aggatgaggcaggag

SEQ ID NO: 1562520 - DNA, 15 bp, Homo sapiens
gaggatgaggcagga

SEQ ID NO: 1562521 - DNA, 15 bp, Homo sapiens
ggaggatgaggcagg

SEQ ID NO: 1562522 - DNA, 15 bp, Homo sapiens
gggaggatgaggcag

SEQ ID NO: 1562523 - DNA, 15 bp, Homo sapiens
cgcgcctgtaatccc

SEQ ID NO: 1562524 - DNA, 15 bp, Homo sapiens
acgcgcctgtaatcc

SEQ ID NO: 1562525 - DNA, 15 bp, Homo sapiens
cacgcgcctgtaatc

SEQ ID NO: 1562526 - DNA, 15 bp, Homo sapiens
gcacgcgcctgtaat

SEQ ID NO: 1562527 - DNA, 15 bp, Homo sapiens
ggcacgcgcctgtaa

SEQ ID NO: 1562528 - DNA, 15 bp, Homo sapiens
tggcacgcgcctgta

SEQ ID NO: 1562529 - DNA, 15 bp, Homo sapiens
gtggcacgcgcctgt

SEQ ID NO: 1562530 - DNA, 15 bp, Homo sapiens
ggtggcacgcgcctg

SEQ ID NO: 1562531 - DNA, 15 bp, Homo sapiens
tggtggcacgcgcct

SEQ ID NO: 1562532 - DNA, 15 bp, Homo sapiens
atggtggcacgcgcc

SEQ ID NO: 1562533 - DNA, 15 bp, Homo sapiens
catggtggcacgcgc

SEQ ID NO: 1562534 - DNA, 15 bp, Homo sapiens
gcatggtggcacgcg

SEQ ID NO: 1562535 - DNA, 15 bp, Homo sapiens
ggcatggtggcacgc

SEQ ID NO: 1562536 - DNA, 15 bp, Homo sapiens
tgggcatggtggcac

SEQ ID NO: 1562537 - DNA, 15 bp, Homo sapiens
ttgcccaacatggtg

SEQ ID NO: 1562538 - DNA, 15 bp, Homo sapiens
cttgcccaacatggt

SEQ ID NO: 1562539 - DNA, 15 bp, Homo sapiens
gcttgcccaacatgg

SEQ ID NO: 1562540 - DNA, 15 bp, Homo sapiens
agcttgcccaacatg

SEQ ID NO: 1562541 - DNA, 15 bp, Homo sapiens
cagcttgcccaacat

SEQ ID NO: 1562542 - DNA, 15 bp, Homo sapiens
ccagcttgcccaaca

SEQ ID NO: 1562543 - DNA, 15 bp, Homo sapiens
accagcttgcccaac

SEQ ID NO: 1562544 - DNA, 15 bp, Homo sapiens
gaccagcttgcccaa

SEQ ID NO: 1562545 - DNA, 15 bp, Homo sapiens
agaccagcttgccca

SEQ ID NO: 1562546 - DNA, 15 bp, Homo sapiens
aagaccagcttgccc

SEQ ID NO: 1562547 - DNA, 15 bp, Homo sapiens
caagaccagcttgcc

SEQ ID NO: 1562548 - DNA, 15 bp, Homo sapiens
tcaagaccagcttgc

SEQ ID NO: 1562549 - DNA, 15 bp, Homo sapiens
ttcaagaccagcttg

SEQ ID NO: 1562550 - DNA, 15 bp, Homo sapiens
gttcaagaccagctt

SEQ ID NO: 1562551 - DNA, 15 bp, Homo sapiens
agttcaagaccagct

SEQ ID NO: 1562552 - DNA, 15 bp, Homo sapiens
tgtggctcacgcctg

SEQ ID NO: 1562553 - DNA, 15 bp, Homo sapiens
ctgtggctcacgcct

SEQ ID NO: 1562554 - DNA, 15 bp, Homo sapiens
gctgtggctcacgcc

SEQ ID NO: 1562555 - DNA, 15 bp, Homo sapiens
cgctgtggctcacgc

SEQ ID NO: 1562556 - DNA, 15 bp, Homo sapiens
gcgctgtggctcacg

SEQ ID NO: 1562557 - DNA, 15 bp, Homo sapiens
ggcgctgtggctcac

SEQ ID NO: 1562558 - DNA, 15 bp, Homo sapiens
gggcgctgtggctca

SEQ ID NO: 1562559 - DNA, 15 bp, Homo sapiens
tgggcgctgtggctc

SEQ ID NO: 1562560 - DNA, 15 bp, Homo sapiens
ctgggcgctgtggct

SEQ ID NO: 1562561 - DNA, 15 bp, Homo sapiens
gctgggcgctgtggc

SEQ ID NO: 1562562 - DNA, 15 bp, Homo sapiens
ggctgggcgctgtgg

SEQ ID NO: 1562563 - DNA, 15 bp, Homo sapiens
tggctgggcgctgtg

SEQ ID NO: 1562564 - DNA, 15 bp, Homo sapiens
ttggctgggcgctgt

SEQ ID NO: 1562565 - DNA, 15 bp, Homo sapiens
attggctgggcgctg

SEQ ID NO: 1562566 - DNA, 15 bp, Homo sapiens
cattggctgggcgct

SEQ ID NO: 1562567 - DNA, 15 bp, Homo sapiens
acattggctgggcgc

SEQ ID NO: 1562568 - DNA, 15 bp, Homo sapiens
tacattggctgggcg

SEQ ID NO: 1562569 - DNA, 15 bp, Homo sapiens
ttacattggctgggc

SEQ ID NO: 1562570 - DNA, 15 bp, Homo sapiens
tttacattggctggg

SEQ ID NO: 1562571 - DNA, 15 bp, Homo sapiens
gtttacattggctgg

SEQ ID NO: 1562572 - DNA, 15 bp, Homo sapiens
tgtttacattggctg

SEQ ID NO: 1562573 - DNA, 15 bp, Homo sapiens
atgtttacattggct

SEQ ID NO: 1562574 - DNA, 15 bp, Homo sapiens
tatgtttacattggc

SEQ ID NO: 1562575 - DNA, 15 bp, Homo sapiens
atatgtttacattgg

SEQ ID NO: 1562576 - DNA, 15 bp, Homo sapiens
aatatgtttacattg

SEQ ID NO: 1562577 - DNA, 15 bp, Homo sapiens
aaatatgtttacatt

SEQ ID NO: 1562578 - DNA, 15 bp, Homo sapiens
aaaatatgtttacat

SEQ ID NO: 1562579 - DNA, 15 bp, Homo sapiens
taaaatatgtttaca

SEQ ID NO: 1562580 - DNA, 15 bp, Homo sapiens
ttaaaatatgtttac

SEQ ID NO: 1562581 - DNA, 15 bp, Homo sapiens
tttaaaatatgttta

SEQ ID NO: 1562582 - DNA, 15 bp, Homo sapiens
ttttaaaatatgttt

SEQ ID NO: 1562583 - DNA, 15 bp, Homo sapiens
gttttaaaatatgtt

SEQ ID NO: 1562584 - DNA, 15 bp, Homo sapiens
tgttttaaaatatgt

SEQ ID NO: 1562585 - DNA, 15 bp, Homo sapiens
atgttttaaaatatg

SEQ ID NO: 1562586 - DNA, 15 bp, Homo sapiens
gatgttttaaaatat

SEQ ID NO: 1562587 - DNA, 15 bp, Homo sapiens
tgatgttttaaaata

SEQ ID NO: 1562588 - DNA, 15 bp, Homo sapiens
atgatgttttaaaat

SEQ ID NO: 1562589 - DNA, 15 bp, Homo sapiens
catgatgttttaaaa

SEQ ID NO: 1562590 - DNA, 15 bp, Homo sapiens
acatgatgttttaaa

SEQ ID NO: 1562591 - DNA, 15 bp, Homo sapiens
aacatgatgttttaa

SEQ ID NO: 1562592 - DNA, 15 bp, Homo sapiens
caacatgatgtttta

SEQ ID NO: 1562593 - DNA, 15 bp, Homo sapiens
acaacatgatgtttt

SEQ ID NO: 1562594 - DNA, 15 bp, Homo sapiens
tggtgtacaacatga

SEQ ID NO: 1562595 - DNA, 15 bp, Homo sapiens
ttggtgtacaacatg

SEQ ID NO: 1562596 - DNA, 15 bp, Homo sapiens
cttggtgtacaacat

SEQ ID NO: 1562597 - DNA, 15 bp, Homo sapiens
gcttggtgtacaaca

SEQ ID NO: 1562598 - DNA, 15 bp, Homo sapiens
agcttggtgtacaac

SEQ ID NO: 1562599 - DNA, 15 bp, Homo sapiens
aagcttggtgtacaa

SEQ ID NO: 1562600 - DNA, 15 bp, Homo sapiens
caagcttggtgtaca

SEQ ID NO: 1562601 - DNA, 15 bp, Homo sapiens
gcaagcttggtgtac

SEQ ID NO: 1562602 - DNA, 15 bp, Homo sapiens
agcaagcttggtgta

SEQ ID NO: 1562603 - DNA, 15 bp, Homo sapiens
gagcaagcttggtgt

SEQ ID NO: 1562604 - DNA, 15 bp, Homo sapiens
tgagcaagcttggtg

SEQ ID NO: 1562605 - DNA, 15 bp, Homo sapiens
ttgagcaagcttggt

SEQ ID NO: 1562606 - DNA, 15 bp, Homo sapiens
gttgagcaagcttgg

SEQ ID NO: 1562607 - DNA, 15 bp, Homo sapiens
ggttgagcaagcttg

SEQ ID NO: 1562608 - DNA, 15 bp, Homo sapiens
gggttgagcaagctt

SEQ ID NO: 1562609 - DNA, 15 bp, Homo sapiens
tgggttgagcaagct

SEQ ID NO: 1562610 - DNA, 15 bp, Homo sapiens
atgggttgagcaagc

SEQ ID NO: 1562611 - DNA, 15 bp, Homo sapiens
catgggttgagcaag

SEQ ID NO: 1562612 - DNA, 15 bp, Homo sapiens
ccatgggttgagcaa

SEQ ID NO: 1562613 - DNA, 15 bp, Homo sapiens
gccatgggttgagca

SEQ ID NO: 1562614 - DNA, 15 bp, Homo sapiens
ggccatgggttgagc

SEQ ID NO: 1562615 - DNA, 15 bp, Homo sapiens
aggccatgggttgag

SEQ ID NO: 1562616 - DNA, 15 bp, Homo sapiens
caggccatgggttga

SEQ ID NO: 1562617 - DNA, 15 bp, Homo sapiens
gcaggccatgggttg

SEQ ID NO: 1562618 - DNA, 15 bp, Homo sapiens
tgcaggccatgggtt

SEQ ID NO: 1562619 - DNA, 15 bp, Homo sapiens
ctgcaggccatgggt

SEQ ID NO: 1562620 - DNA, 15 bp, Homo sapiens
cctgcaggccatggg

SEQ ID NO: 1562621 - DNA, 15 bp, Homo sapiens
gcctgcaggccatgg

SEQ ID NO: 1562622 - DNA, 15 bp, Homo sapiens
ggcctgcaggccatg

SEQ ID NO: 1562623 - DNA, 15 bp, Homo sapiens
cggcctgcaggccat

SEQ ID NO: 1562624 - DNA, 15 bp, Homo sapiens
gcggcctgcaggcca

SEQ ID NO: 1562625 - DNA, 15 bp, Homo sapiens
tgcggcctgcaggcc

SEQ ID NO: 1562626 - DNA, 15 bp, Homo sapiens
gtgcggcctgcaggc

SEQ ID NO: 1562627 - DNA, 15 bp, Homo sapiens
cgtgcggcctgcagg

SEQ ID NO: 1562628 - DNA, 15 bp, Homo sapiens
gcgtgcggcctgcag

SEQ ID NO: 1562629 - DNA, 15 bp, Homo sapiens
tgcgtgcggcctgca

SEQ ID NO: 1562630 - DNA, 15 bp, Homo sapiens
ctgcgtgcggcctgc

SEQ ID NO: 1562631 - DNA, 15 bp, Homo sapiens
gctgcgtgcggcctg

SEQ ID NO: 1562632 - DNA, 15 bp, Homo sapiens
ggctgcgtgcggcct

SEQ ID NO: 1562633 - DNA, 15 bp, Homo sapiens
gggctgcgtgcggcc

SEQ ID NO: 1562634 - DNA, 15 bp, Homo sapiens
tgggctgcgtgcggc

SEQ ID NO: 1562635 - DNA, 15 bp, Homo sapiens
ctgggctgcgtgcgg

SEQ ID NO: 1562636 - DNA, 15 bp, Homo sapiens
cctgggctgcgtgcg

SEQ ID NO: 1562637 - DNA, 15 bp, Homo sapiens
tcctgggctgcgtgc

SEQ ID NO: 1562638 - DNA, 15 bp, Homo sapiens
atcctgggctgcgtg

SEQ ID NO: 1562639 - DNA, 15 bp, Homo sapiens
catcctgggctgcgt

SEQ ID NO: 1562640 - DNA, 15 bp, Homo sapiens
ccatcctgggctgcg

SEQ ID NO: 1562641 - DNA, 15 bp, Homo sapiens
gccatcctgggctgc

SEQ ID NO: 1562642 - DNA, 15 bp, Homo sapiens
agccatcctgggctg

SEQ ID NO: 1562643 - DNA, 15 bp, Homo sapiens
aagccatcctgggct

SEQ ID NO: 1562644 - DNA, 15 bp, Homo sapiens
aaagccatcctgggc

SEQ ID NO: 1562645 - DNA, 15 bp, Homo sapiens
caaagccatcctggg

SEQ ID NO: 1562646 - DNA, 15 bp, Homo sapiens
tcaaagccatcctgg

SEQ ID NO: 1562647 - DNA, 15 bp, Homo sapiens
ttcaaagccatcctg

SEQ ID NO: 1562648 - DNA, 15 bp, Homo sapiens
attcaaagccatcct

SEQ ID NO: 1562649 - DNA, 15 bp, Homo sapiens
cattcaaagccatcc

SEQ ID NO: 1562650 - DNA, 15 bp, Homo sapiens
gcattcaaagccatc

SEQ ID NO: 1562651 - DNA, 15 bp, Homo sapiens
tgcattcaaagccat

SEQ ID NO: 1562652 - DNA, 15 bp, Homo sapiens
ctgcattcaaagcca

SEQ ID NO: 1562653 - DNA, 15 bp, Homo sapiens
gctgcattcaaagcc

SEQ ID NO: 1562654 - DNA, 15 bp, Homo sapiens
ggctgcattcaaagc

SEQ ID NO: 1562655 - DNA, 15 bp, Homo sapiens
gggctgcattcaaag

SEQ ID NO: 1562656 - DNA, 15 bp, Homo sapiens
tgggctgcattcaaa

SEQ ID NO: 1562657 - DNA, 15 bp, Homo sapiens
ttgggctgcattcaa

SEQ ID NO: 1562658 - DNA, 15 bp, Homo sapiens
gttgggctgcattca

SEQ ID NO: 1562659 - DNA, 15 bp, Homo sapiens
tgttgggctgcattc

SEQ ID NO: 1562660 - DNA, 15 bp, Homo sapiens
gtgttgggctgcatt

SEQ ID NO: 1562661 - DNA, 15 bp, Homo sapiens
tgtgttgggctgcat

SEQ ID NO: 1562662 - DNA, 15 bp, Homo sapiens
ttgtgttgggctgca

SEQ ID NO: 1562663 - DNA, 15 bp, Homo sapiens
tttgtgttgggctgc

SEQ ID NO: 1562664 - DNA, 15 bp, Homo sapiens
atttgtgttgggctg

SEQ ID NO: 1562665 - DNA, 15 bp, Homo sapiens
aatttgtgttgggct

SEQ ID NO: 1562666 - DNA, 15 bp, Homo sapiens
aaatttgtgttgggc

SEQ ID NO: 1562667 - DNA, 15 bp, Homo sapiens
caaatttgtgttggg

SEQ ID NO: 1562668 - DNA, 15 bp, Homo sapiens
acaaatttgtgttgg

SEQ ID NO: 1562669 - DNA, 15 bp, Homo sapiens
tacaaatttgtgttg

SEQ ID NO: 1562670 - DNA, 15 bp, Homo sapiens
ttacaaatttgtgtt

SEQ ID NO: 1562671 - DNA, 15 bp, Homo sapiens
tttacaaatttgtgt

SEQ ID NO: 1562672 - DNA, 15 bp, Homo sapiens
gtttacaaatttgtg

SEQ ID NO: 1562673 - DNA, 15 bp, Homo sapiens
agtttacaaatttgt

SEQ ID NO: 1562674 - DNA, 15 bp, Homo sapiens
aagtttacaaatttg

SEQ ID NO: 1562675 - DNA, 15 bp, Homo sapiens
aaagtttacaaattt

SEQ ID NO: 1562676 - DNA, 15 bp, Homo sapiens
gaaagtttacaaatt

SEQ ID NO: 1562677 - DNA, 15 bp, Homo sapiens
agaaagtttacaaat

SEQ ID NO: 1562678 - DNA, 15 bp, Homo sapiens
aagaaagtttacaaa

SEQ ID NO: 1562679 - DNA, 15 bp, Homo sapiens
taagaaagtttacaa

SEQ ID NO: 1562680 - DNA, 15 bp, Homo sapiens
ttaagaaagtttaca

SEQ ID NO: 1562681 - DNA, 15 bp, Homo sapiens
tttaagaaagtttac

SEQ ID NO: 1562682 - DNA, 15 bp, Homo sapiens
ttttaagaaagttta

SEQ ID NO: 1562683 - DNA, 15 bp, Homo sapiens
gttttaagaaagttt

SEQ ID NO: 1562684 - DNA, 15 bp, Homo sapiens
tgttttaagaaagtt

SEQ ID NO: 1562685 - DNA, 15 bp, Homo sapiens
atgttttaagaaagt

SEQ ID NO: 1562686 - DNA, 15 bp, Homo sapiens
aatgttttaagaaag

SEQ ID NO: 1562687 - DNA, 15 bp, Homo sapiens
taatgttttaagaaa

SEQ ID NO: 1562688 - DNA, 15 bp, Homo sapiens
ttaatgttttaagaa

SEQ ID NO: 1562689 - DNA, 15 bp, Homo sapiens
cttaatgttttaaga

SEQ ID NO: 1562690 - DNA, 15 bp, Homo sapiens
acttaatgttttaag

SEQ ID NO: 1562691 - DNA, 15 bp, Homo sapiens
cacttaatgttttaa

SEQ ID NO: 1562692 - DNA, 15 bp, Homo sapiens
tcacttaatgtttta

SEQ ID NO: 1562693 - DNA, 15 bp, Homo sapiens
atcacttaatgtttt

SEQ ID NO: 1562694 - DNA, 15 bp, Homo sapiens
aatcacttaatgttt

SEQ ID NO: 1562695 - DNA, 15 bp, Homo sapiens
aaatcacttaatgtt

SEQ ID NO: 1562696 - DNA, 15 bp, Homo sapiens
aaaatcacttaatgt

SEQ ID NO: 1562697 - DNA, 15 bp, Homo sapiens
aaaaatcacttaatg

SEQ ID NO: 1562698 - DNA, 15 bp, Homo sapiens
aaaaaatcacttaat

SEQ ID NO: 1562699 - DNA, 15 bp, Homo sapiens
caaaaaatcacttaa

SEQ ID NO: 1562700 - DNA, 15 bp, Homo sapiens
ccaaaaaatcactta

SEQ ID NO: 1562701 - DNA, 15 bp, Homo sapiens
cccaaaaaatcactt

SEQ ID NO: 1562702 - DNA, 15 bp, Homo sapiens
ccccaaaaaatcact

SEQ ID NO: 1562703 - DNA, 15 bp, Homo sapiens
accccaaaaaatcac

SEQ ID NO: 1562704 - DNA, 15 bp, Homo sapiens
aaccccaaaaaatca

SEQ ID NO: 1562705 - DNA, 15 bp, Homo sapiens
aaaccccaaaaaatc

SEQ ID NO: 1562706 - DNA, 15 bp, Homo sapiens
aaaaccccaaaaaat

SEQ ID NO: 1562707 - DNA, 15 bp, Homo sapiens
aaaaaccccaaaaaa

SEQ ID NO: 1562708 - DNA, 15 bp, Homo sapiens
aaaaaaccccaaaaa

SEQ ID NO: 1562709 - DNA, 15 bp, Homo sapiens
aaaaaaaccccaaaa

SEQ ID NO: 1562710 - DNA, 15 bp, Homo sapiens
aaaaaaaaccccaaa

SEQ ID NO: 1562711 - DNA, 15 bp, Homo sapiens
aaaaaaaaaccccaa

SEQ ID NO: 1562712 - DNA, 15 bp, Homo sapiens
aaaaaaaaaacccca

SEQ ID NO: 1562713 - DNA, 15 bp, Homo sapiens
aaaaaaaaaaacccc

SEQ ID NO: 1562714 - DNA, 15 bp, Homo sapiens
gcttaaaaaaaaaaa

SEQ ID NO: 1562715 - DNA, 15 bp, Homo sapiens
agcttaaaaaaaaaa

SEQ ID NO: 1562716 - DNA, 15 bp, Homo sapiens
gagcttaaaaaaaaa

SEQ ID NO: 1562717 - DNA, 15 bp, Homo sapiens
tgagcttaaaaaaaa

SEQ ID NO: 1562718 - DNA, 15 bp, Homo sapiens
atgagcttaaaaaaa

SEQ ID NO: 1562719 - DNA, 15 bp, Homo sapiens
gatgagcttaaaaaa

SEQ ID NO: 1562720 - DNA, 15 bp, Homo sapiens
tgatgagcttaaaaa

SEQ ID NO: 1562721 - DNA, 15 bp, Homo sapiens
ttgatgagcttaaaa

SEQ ID NO: 1562722 - DNA, 15 bp, Homo sapiens
gttgatgagcttaaa

SEQ ID NO: 1562723 - DNA, 15 bp, Homo sapiens
agttgatgagcttaa

SEQ ID NO: 1562724 - DNA, 15 bp, Homo sapiens
cagttgatgagctta

SEQ ID NO: 1562725 - DNA, 15 bp, Homo sapiens
acagttgatgagctt

SEQ ID NO: 1562726 - DNA, 15 bp, Homo sapiens
tacagttgatgagct

SEQ ID NO: 1562727 - DNA, 15 bp, Homo sapiens
ctacagttgatgagc

SEQ ID NO: 1562728 - DNA, 15 bp, Homo sapiens
actacagttgatgag

SEQ ID NO: 1562729 - DNA, 15 bp, Homo sapiens
aactacagttgatga

SEQ ID NO: 1562730 - DNA, 15 bp, Homo sapiens
taactacagttgatg

SEQ ID NO: 1562731 - DNA, 15 bp, Homo sapiens
ctaactacagttgat

SEQ ID NO: 1562732 - DNA, 15 bp, Homo sapiens
actaactacagttga

SEQ ID NO: 1562733 - DNA, 15 bp, Homo sapiens
cactaactacagttg

SEQ ID NO: 1562734 - DNA, 15 bp, Homo sapiens
acactaactacagtt

SEQ ID NO: 1562735 - DNA, 15 bp, Homo sapiens
aacactaactacagt

SEQ ID NO: 1562736 - DNA, 15 bp, Homo sapiens
taacactaactacag

SEQ ID NO: 1562737 - DNA, 15 bp, Homo sapiens
ctaacactaactaca

SEQ ID NO: 1562738 - DNA, 15 bp, Homo sapiens
actaacactaactac

SEQ ID NO: 1562739 - DNA, 15 bp, Homo sapiens
cactaacactaacta

SEQ ID NO: 1562740 - DNA, 15 bp, Homo sapiens
acactaacactaact

SEQ ID NO: 1562741 - DNA, 15 bp, Homo sapiens
tacactaacactaac

SEQ ID NO: 1562742 - DNA, 15 bp, Homo sapiens
atacactaacactaa

SEQ ID NO: 1562743 - DNA, 15 bp, Homo sapiens
aatacactaacacta

SEQ ID NO: 1562744 - DNA, 15 bp, Homo sapiens
aaatacactaacact

SEQ ID NO: 1562745 - DNA, 15 bp, Homo sapiens
aaaatacactaacac

SEQ ID NO: 1562746 - DNA, 15 bp, Homo sapiens
taaaatacactaaca

SEQ ID NO: 1562747 - DNA, 15 bp, Homo sapiens
ataaaatacactaac

SEQ ID NO: 1562748 - DNA, 15 bp, Homo sapiens
tataaaatacactaa

SEQ ID NO: 1562749 - DNA, 15 bp, Homo sapiens
atataaaatacacta

SEQ ID NO: 1562750 - DNA, 15 bp, Homo sapiens
catataaaatacact

SEQ ID NO: 1562751 - DNA, 15 bp, Homo sapiens
acatataaaatacac

SEQ ID NO: 1562752 - DNA, 15 bp, Homo sapiens
cacatataaaataca

SEQ ID NO: 1562753 - DNA, 15 bp, Homo sapiens
ccacatataaaatac

SEQ ID NO: 1562754 - DNA, 15 bp, Homo sapiens
gccacatataaaata

SEQ ID NO: 1562755 - DNA, 15 bp, Homo sapiens
ggccacatataaaat

SEQ ID NO: 1562756 - DNA, 15 bp, Homo sapiens
gggccacatataaaa

SEQ ID NO: 1562757 - DNA, 15 bp, Homo sapiens
tgggccacatataaa

SEQ ID NO: 1562758 - DNA, 15 bp, Homo sapiens
ctgggccacatataa

SEQ ID NO: 1562759 - DNA, 15 bp, Homo sapiens
actgggccacatata

SEQ ID NO: 1562760 - DNA, 15 bp, Homo sapiens
tactgggccacatat

SEQ ID NO: 1562761 - DNA, 15 bp, Homo sapiens
atactgggccacata

SEQ ID NO: 1562762 - DNA, 15 bp, Homo sapiens
tatactgggccacat

SEQ ID NO: 1562763 - DNA, 15 bp, Homo sapiens
atatactgggccaca

SEQ ID NO: 1562764 - DNA, 15 bp, Homo sapiens
aatatactgggccac

SEQ ID NO: 1562765 - DNA, 15 bp, Homo sapiens
gaatatactgggcca

SEQ ID NO: 1562766 - DNA, 15 bp, Homo sapiens
agaatatactgggcc

SEQ ID NO: 1562767 - DNA, 15 bp, Homo sapiens
aagaatatactgggc

SEQ ID NO: 1562768 - DNA, 15 bp, Homo sapiens
gaagaatatactggg

SEQ ID NO: 1562769 - DNA, 15 bp, Homo sapiens
agaagaatatactgg

SEQ ID NO: 1562770 - DNA, 15 bp, Homo sapiens
tagaagaatatactg

SEQ ID NO: 1562771 - DNA, 15 bp, Homo sapiens
ttagaagaatatact

SEQ ID NO: 1562772 - DNA, 15 bp, Homo sapiens
attagaagaatatac

SEQ ID NO: 1562773 - DNA, 15 bp, Homo sapiens
aattagaagaatata

SEQ ID NO: 1562774 - DNA, 15 bp, Homo sapiens
gaattagaagaatat

SEQ ID NO: 1562775 - DNA, 15 bp, Homo sapiens
ggaattagaagaata

SEQ ID NO: 1562776 - DNA, 15 bp, Homo sapiens
tggaattagaagaat

SEQ ID NO: 1562777 - DNA, 15 bp, Homo sapiens
ctggaattagaagaa

SEQ ID NO: 1562778 - DNA, 15 bp, Homo sapiens
actggaattagaaga

SEQ ID NO: 1562779 - DNA, 15 bp, Homo sapiens
cactggaattagaag

SEQ ID NO: 1562780 - DNA, 15 bp, Homo sapiens
acactggaattagaa

SEQ ID NO: 1562781 - DNA, 15 bp, Homo sapiens
cacactggaattaga

SEQ ID NO: 1562782 - DNA, 15 bp, Homo sapiens
ccacactggaattag

SEQ ID NO: 1562783 - DNA, 15 bp, Homo sapiens
gccacactggaatta

SEQ ID NO: 1562784 - DNA, 15 bp, Homo sapiens
ggccacactggaatt

SEQ ID NO: 1562785 - DNA, 15 bp, Homo sapiens
gggccacactggaat

SEQ ID NO: 1562786 - DNA, 15 bp, Homo sapiens
tgggccacactggaa

SEQ ID NO: 1562787 - DNA, 15 bp, Homo sapiens
ctgggccacactgga

SEQ ID NO: 1562788 - DNA, 15 bp, Homo sapiens
cctgggccacactgg

SEQ ID NO: 1562789 - DNA, 15 bp, Homo sapiens
tcctgggccacactg

SEQ ID NO: 1562790 - DNA, 15 bp, Homo sapiens
ttcctgggccacact

SEQ ID NO: 1562791 - DNA, 15 bp, Homo sapiens
tttcctgggccacac

SEQ ID NO: 1562792 - DNA, 15 bp, Homo sapiens
ctttcctgggccaca

SEQ ID NO: 1562793 - DNA, 15 bp, Homo sapiens
gctttcctgggccac

SEQ ID NO: 1562794 - DNA, 15 bp, Homo sapiens
agctttcctgggcca

SEQ ID NO: 1562795 - DNA, 15 bp, Homo sapiens
tagctttcctgggcc

SEQ ID NO: 1562796 - DNA, 15 bp, Homo sapiens
ttagctttcctgggc

SEQ ID NO: 1562797 - DNA, 15 bp, Homo sapiens
cttagctttcctggg

SEQ ID NO: 1562798 - DNA, 15 bp, Homo sapiens
tcttagctttcctgg

SEQ ID NO: 1562799 - DNA, 15 bp, Homo sapiens
ctcttagctttcctg

SEQ ID NO: 1562800 - DNA, 15 bp, Homo sapiens
tctcttagctttcct

SEQ ID NO: 1562801 - DNA, 15 bp, Homo sapiens
atctcttagctttcc

SEQ ID NO: 1562802 - DNA, 15 bp, Homo sapiens
aatctcttagctttc

SEQ ID NO: 1562803 - DNA, 15 bp, Homo sapiens
caatctcttagcttt

SEQ ID NO: 1562804 - DNA, 15 bp, Homo sapiens
ccaatctcttagctt

SEQ ID NO: 1562805 - DNA, 15 bp, Homo sapiens
tccaatctcttagct

SEQ ID NO: 1562806 - DNA, 15 bp, Homo sapiens
gtccaatctcttagc

SEQ ID NO: 1562807 - DNA, 15 bp, Homo sapiens
tgtccaatctcttag

SEQ ID NO: 1562808 - DNA, 15 bp, Homo sapiens
gtgtccaatctctta

SEQ ID NO: 1562809 - DNA, 15 bp, Homo sapiens
ggtgtccaatctctt

SEQ ID NO: 1562810 - DNA, 15 bp, Homo sapiens
gggtgtccaatctct

SEQ ID NO: 1562811 - DNA, 15 bp, Homo sapiens
ggggtgtccaatctc

SEQ ID NO: 1562812 - DNA, 15 bp, Homo sapiens
aggggtgtccaatct

SEQ ID NO: 1562813 - DNA, 15 bp, Homo sapiens
caggggtgtccaatc

SEQ ID NO: 1562814 - DNA, 15 bp, Homo sapiens
acaggggtgtccaat

SEQ ID NO: 1562815 - DNA, 15 bp, Homo sapiens
aacaggggtgtccaa

SEQ ID NO: 1562816 - DNA, 15 bp, Homo sapiens
caacaggggtgtcca

SEQ ID NO: 1562817 - DNA, 15 bp, Homo sapiens
gcaacaggggtgtcc

SEQ ID NO: 1562818 - DNA, 15 bp, Homo sapiens
agcaacaggggtgtc

SEQ ID NO: 1562819 - DNA, 15 bp, Homo sapiens
tagcaacaggggtgt

SEQ ID NO: 1562820 - DNA, 15 bp, Homo sapiens
atagcaacaggggtg

SEQ ID NO: 1562821 - DNA, 15 bp, Homo sapiens
tatagcaacaggggt

SEQ ID NO: 1562822 - DNA, 15 bp, Homo sapiens
gtatagcaacagggg

SEQ ID NO: 1562823 - DNA, 15 bp, Homo sapiens
ggtatagcaacaggg

SEQ ID NO: 1562824 - DNA, 15 bp, Homo sapiens
aggtatagcaacagg

SEQ ID NO: 1562825 - DNA, 15 bp, Homo sapiens
aaggtatagcaacag

SEQ ID NO: 1562826 - DNA, 15 bp, Homo sapiens
aaaggtatagcaaca

SEQ ID NO: 1562827 - DNA, 15 bp, Homo sapiens
aaaaggtatagcaac

SEQ ID NO: 1562828 - DNA, 15 bp, Homo sapiens
aaaaaggtatagcaa

SEQ ID NO: 1562829 - DNA, 15 bp, Homo sapiens
taaaaaggtatagca

SEQ ID NO: 1562830 - DNA, 15 bp, Homo sapiens
ataaaaaggtatagc

SEQ ID NO: 1562831 - DNA, 15 bp, Homo sapiens
aataaaaaggtatag

SEQ ID NO: 1562832 - DNA, 15 bp, Homo sapiens
aaataaaaaggtata

SEQ ID NO: 1562833 - DNA, 15 bp, Homo sapiens
caaataaaaaggtat

SEQ ID NO: 1562834 - DNA, 15 bp, Homo sapiens
acaaataaaaaggta

SEQ ID NO: 1562835 - DNA, 15 bp, Homo sapiens
gacaaataaaaaggt

SEQ ID NO: 1562836 - DNA, 15 bp, Homo sapiens
tgacaaataaaaagg

SEQ ID NO: 1562837 - DNA, 15 bp, Homo sapiens
ctgacaaataaaaag

SEQ ID NO: 1562838 - DNA, 15 bp, Homo sapiens
gctgacaaataaaaa

SEQ ID NO: 1562839 - DNA, 15 bp, Homo sapiens
agctgacaaataaaa

SEQ ID NO: 1562840 - DNA, 15 bp, Homo sapiens
aagctgacaaataaa

SEQ ID NO: 1562841 - DNA, 15 bp, Homo sapiens
aaagctgacaaataa

SEQ ID NO: 1562842 - DNA, 15 bp, Homo sapiens
aaaagctgacaaata

SEQ ID NO: 1562843 - DNA, 15 bp, Homo sapiens
taaaagctgacaaat

SEQ ID NO: 1562844 - DNA, 15 bp, Homo sapiens
ttaaaagctgacaaa

SEQ ID NO: 1562845 - DNA, 15 bp, Homo sapiens
tttaaaagctgacaa

SEQ ID NO: 1562846 - DNA, 15 bp, Homo sapiens
ttttaaaagctgaca

SEQ ID NO: 1562847 - DNA, 15 bp, Homo sapiens
tttttaaaagctgac

SEQ ID NO: 1562848 - DNA, 15 bp, Homo sapiens
atttttaaaagctga

SEQ ID NO: 1562849 - DNA, 15 bp, Homo sapiens
aatttttaaaagctg

SEQ ID NO: 1562850 - DNA, 15 bp, Homo sapiens
caatttttaaaagct

SEQ ID NO: 1562851 - DNA, 15 bp, Homo sapiens
gcaatttttaaaagc

SEQ ID NO: 1562852 - DNA, 15 bp, Homo sapiens
tgcaatttttaaaag

SEQ ID NO: 1562853 - DNA, 15 bp, Homo sapiens
ctgcaatttttaaaa

SEQ ID NO: 1562854 - DNA, 15 bp, Homo sapiens
actgcaatttttaaa

SEQ ID NO: 1562855 - DNA, 15 bp, Homo sapiens
tactgcaatttttaa

SEQ ID NO: 1562856 - DNA, 15 bp, Homo sapiens
gtactgcaattttta

SEQ ID NO: 1562857 - DNA, 15 bp, Homo sapiens
tgtactgcaattttt

SEQ ID NO: 1562858 - DNA, 15 bp, Homo sapiens
ctgtactgcaatttt

SEQ ID NO: 1562859 - DNA, 15 bp, Homo sapiens
tctgtactgcaattt

SEQ ID NO: 1562860 - DNA, 15 bp, Homo sapiens
atctgtactgcaatt

SEQ ID NO: 1562861 - DNA, 15 bp, Homo sapiens
gatctgtactgcaat

SEQ ID NO: 1562862 - DNA, 15 bp, Homo sapiens
agatctgtactgcaa

SEQ ID NO: 1562863 - DNA, 15 bp, Homo sapiens
aagatctgtactgca

SEQ ID NO: 1562864 - DNA, 15 bp, Homo sapiens
aaagatctgtactgc

SEQ ID NO: 1562865 - DNA, 15 bp, Homo sapiens
aaaagatctgtactg

SEQ ID NO: 1562866 - DNA, 15 bp, Homo sapiens
aaaaagatctgtact

SEQ ID NO: 1562867 - DNA, 15 bp, Homo sapiens
caaaaagatctgtac

SEQ ID NO: 1562868 - DNA, 15 bp, Homo sapiens
acaaaaagatctgta

SEQ ID NO: 1562869 - DNA, 15 bp, Homo sapiens
aacaaaaagatctgt

SEQ ID NO: 1562870 - DNA, 15 bp, Homo sapiens
gaacaaaaagatctg

SEQ ID NO: 1562871 - DNA, 15 bp, Homo sapiens
tgaacaaaaagatct

SEQ ID NO: 1562872 - DNA, 15 bp, Homo sapiens
ctgaacaaaaagatc

SEQ ID NO: 1562873 - DNA, 15 bp, Homo sapiens
gctgaacaaaaagat

SEQ ID NO: 1562874 - DNA, 15 bp, Homo sapiens
tgctgaacaaaaaga

SEQ ID NO: 1562875 - DNA, 15 bp, Homo sapiens
atgctgaacaaaaag

SEQ ID NO: 1562876 - DNA, 15 bp, Homo sapiens
aatgctgaacaaaaa

SEQ ID NO: 1562877 - DNA, 15 bp, Homo sapiens
aaatgctgaacaaaa

SEQ ID NO: 1562878 - DNA, 15 bp, Homo sapiens
caaatgctgaacaaa

SEQ ID NO: 1562879 - DNA, 15 bp, Homo sapiens
ccaaatgctgaacaa

SEQ ID NO: 1562880 - DNA, 15 bp, Homo sapiens
accaaatgctgaaca

SEQ ID NO: 1562881 - DNA, 15 bp, Homo sapiens
caccaaatgctgaac

SEQ ID NO: 1562882 - DNA, 15 bp, Homo sapiens
tcaccaaatgctgaa

SEQ ID NO: 1562883 - DNA, 15 bp, Homo sapiens
ctcaccaaatgctga

SEQ ID NO: 1562884 - DNA, 15 bp, Homo sapiens
actcaccaaatgctg

SEQ ID NO: 1562885 - DNA, 15 bp, Homo sapiens
tactcaccaaatgct

SEQ ID NO: 1562886 - DNA, 15 bp, Homo sapiens
gtactcaccaaatgc

SEQ ID NO: 1562887 - DNA, 15 bp, Homo sapiens
ggtactcaccaaatg

SEQ ID NO: 1562888 - DNA, 15 bp, Homo sapiens
aggtactcaccaaat

SEQ ID NO: 1562889 - DNA, 15 bp, Homo sapiens
taggtactcaccaaa

SEQ ID NO: 1562890 - DNA, 15 bp, Homo sapiens
gtaggtactcaccaa

SEQ ID NO: 1562891 - DNA, 15 bp, Homo sapiens
agtaggtactcacca

SEQ ID NO: 1562892 - DNA, 15 bp, Homo sapiens
tagtaggtactcacc

SEQ ID NO: 1562893 - DNA, 15 bp, Homo sapiens
atagtaggtactcac

SEQ ID NO: 1562894 - DNA, 15 bp, Homo sapiens
catagtaggtactca

SEQ ID NO: 1562895 - DNA, 15 bp, Homo sapiens
acatagtaggtactc

SEQ ID NO: 1562896 - DNA, 15 bp, Homo sapiens
cacatagtaggtact

SEQ ID NO: 1562897 - DNA, 15 bp, Homo sapiens
gcacatagtaggtac

SEQ ID NO: 1562898 - DNA, 15 bp, Homo sapiens
tgcacatagtaggta

SEQ ID NO: 1562899 - DNA, 15 bp, Homo sapiens
ttgcacatagtaggt

SEQ ID NO: 1562900 - DNA, 15 bp, Homo sapiens
cttgcacatagtagg

SEQ ID NO: 1562901 - DNA, 15 bp, Homo sapiens
tcttgcacatagtag

SEQ ID NO: 1562902 - DNA, 15 bp, Homo sapiens
atcttgcacatagta

SEQ ID NO: 1562903 - DNA, 15 bp, Homo sapiens
tatcttgcacatagt

SEQ ID NO: 1562904 - DNA, 15 bp, Homo sapiens
gtatcttgcacatag

SEQ ID NO: 1562905 - DNA, 15 bp, Homo sapiens
agtatcttgcacata

SEQ ID NO: 1562906 - DNA, 15 bp, Homo sapiens
tagtatcttgcacat

SEQ ID NO: 1562907 - DNA, 15 bp, Homo sapiens
atagtatcttgcaca

SEQ ID NO: 1562908 - DNA, 15 bp, Homo sapiens
catagtatcttgcac

SEQ ID NO: 1562909 - DNA, 15 bp, Homo sapiens
ccatagtatcttgca

SEQ ID NO: 1562910 - DNA, 15 bp, Homo sapiens
gccatagtatcttgc

SEQ ID NO: 1562911 - DNA, 15 bp, Homo sapiens
tgccatagtatcttg

SEQ ID NO: 1562912 - DNA, 15 bp, Homo sapiens
ttgccatagtatctt

SEQ ID NO: 1562913 - DNA, 15 bp, Homo sapiens
cttgccatagtatct

SEQ ID NO: 1562914 - DNA, 15 bp, Homo sapiens
tcttgccatagtatc

SEQ ID NO: 1562915 - DNA, 15 bp, Homo sapiens
ttcttgccatagtat

SEQ ID NO: 1562916 - DNA, 15 bp, Homo sapiens
tttcttgccatagta

SEQ ID NO: 1562917 - DNA, 15 bp, Homo sapiens
ctttcttgccatagt

SEQ ID NO: 1562918 - DNA, 15 bp, Homo sapiens
actttcttgccatag

SEQ ID NO: 1562919 - DNA, 15 bp, Homo sapiens
aactttcttgccata

SEQ ID NO: 1562920 - DNA, 15 bp, Homo sapiens
caactttcttgccat

SEQ ID NO: 1562921 - DNA, 15 bp, Homo sapiens
tcaactttcttgcca

SEQ ID NO: 1562922 - DNA, 15 bp, Homo sapiens
atcaactttcttgcc

SEQ ID NO: 1562923 - DNA, 15 bp, Homo sapiens
tatcaactttcttgc

SEQ ID NO: 1562924 - DNA, 15 bp, Homo sapiens
ttatcaactttcttg

SEQ ID NO: 1562925 - DNA, 15 bp, Homo sapiens
attatcaactttctt

SEQ ID NO: 1562926 - DNA, 15 bp, Homo sapiens
aattatcaactttct

SEQ ID NO: 1562927 - DNA, 15 bp, Homo sapiens
gaattatcaactttc

SEQ ID NO: 1562928 - DNA, 15 bp, Homo sapiens
ggaattatcaacttt

SEQ ID NO: 1562929 - DNA, 15 bp, Homo sapiens
aggaattatcaactt

SEQ ID NO: 1562930 - DNA, 15 bp, Homo sapiens
taggaattatcaact

SEQ ID NO: 1562931 - DNA, 15 bp, Homo sapiens
ctaggaattatcaac

SEQ ID NO: 1562932 - DNA, 15 bp, Homo sapiens
cctaggaattatcaa

SEQ ID NO: 1562933 - DNA, 15 bp, Homo sapiens
ccctaggaattatca

SEQ ID NO: 1562934 - DNA, 15 bp, Homo sapiens
tccctaggaattatc

SEQ ID NO: 1562935 - DNA, 15 bp, Homo sapiens
atccctaggaattat

SEQ ID NO: 1562936 - DNA, 15 bp, Homo sapiens
tatccctaggaatta

SEQ ID NO: 1562937 - DNA, 15 bp, Homo sapiens
gtatccctaggaatt

SEQ ID NO: 1562938 - DNA, 15 bp, Homo sapiens
tgtatccctaggaat

SEQ ID NO: 1562939 - DNA, 15 bp, Homo sapiens
gtgtatccctaggaa

SEQ ID NO: 1562940 - DNA, 15 bp, Homo sapiens
ggtgtatccctagga

SEQ ID NO: 1562941 - DNA, 15 bp, Homo sapiens
tggtgtatccctagg

SEQ ID NO: 1562942 - DNA, 15 bp, Homo sapiens
ttggtgtatccctag

SEQ ID NO: 1562943 - DNA, 15 bp, Homo sapiens
cttggtgtatcccta

SEQ ID NO: 1562944 - DNA, 15 bp, Homo sapiens
tcttggtgtatccct

SEQ ID NO: 1562945 - DNA, 15 bp, Homo sapiens
ctcttggtgtatccc

SEQ ID NO: 1562946 - DNA, 15 bp, Homo sapiens
actcttggtgtatcc

SEQ ID NO: 1562947 - DNA, 15 bp, Homo sapiens
aactcttggtgtatc

SEQ ID NO: 1562948 - DNA, 15 bp, Homo sapiens
aaactcttggtgtat

SEQ ID NO: 1562949 - DNA, 15 bp, Homo sapiens
caaactcttggtgta

SEQ ID NO: 1562950 - DNA, 15 bp, Homo sapiens
acaaactcttggtgt

SEQ ID NO: 1562951 - DNA, 15 bp, Homo sapiens
tacaaactcttggtg

SEQ ID NO: 1562952 - DNA, 15 bp, Homo sapiens
atacaaactcttggt

SEQ ID NO: 1562953 - DNA, 15 bp, Homo sapiens
gatacaaactcttgg

SEQ ID NO: 1562954 - DNA, 15 bp, Homo sapiens
ggatacaaactcttg

SEQ ID NO: 1562955 - DNA, 15 bp, Homo sapiens
aggatacaaactctt

SEQ ID NO: 1562956 - DNA, 15 bp, Homo sapiens
taggatacaaactct

SEQ ID NO: 1562957 - DNA, 15 bp, Homo sapiens
ttaggatacaaactc

SEQ ID NO: 1562958 - DNA, 15 bp, Homo sapiens
tttaggatacaaact

SEQ ID NO: 1562959 - DNA, 15 bp, Homo sapiens
ctttaggatacaaac

SEQ ID NO: 1562960 - DNA, 15 bp, Homo sapiens
gctttaggatacaaa

SEQ ID NO: 1562961 - DNA, 15 bp, Homo sapiens
ggctttaggatacaa

SEQ ID NO: 1562962 - DNA, 15 bp, Homo sapiens
gggctttaggataca

SEQ ID NO: 1562963 - DNA, 15 bp, Homo sapiens
agggctttaggatac

SEQ ID NO: 1562964 - DNA, 15 bp, Homo sapiens
aagggctttaggata

SEQ ID NO: 1562965 - DNA, 15 bp, Homo sapiens
aaagggctttaggat

SEQ ID NO: 1562966 - DNA, 15 bp, Homo sapiens
taaagggctttagga

SEQ ID NO: 1562967 - DNA, 15 bp, Homo sapiens
ttaaagggctttagg

SEQ ID NO: 1562968 - DNA, 15 bp, Homo sapiens
tttaaagggctttag

SEQ ID NO: 1562969 - DNA, 15 bp, Homo sapiens
ctttaaagggcttta

SEQ ID NO: 1562970 - DNA, 15 bp, Homo sapiens
actttaaagggcttt

SEQ ID NO: 1562971 - DNA, 15 bp, Homo sapiens
cactttaaagggctt

SEQ ID NO: 1562972 - DNA, 15 bp, Homo sapiens
gcactttaaagggct

SEQ ID NO: 1562973 - DNA, 15 bp, Homo sapiens
tgcactttaaagggc

SEQ ID NO: 1562974 - DNA, 15 bp, Homo sapiens
ttgcactttaaaggg

SEQ ID NO: 1562975 - DNA, 15 bp, Homo sapiens
attgcactttaaagg

SEQ ID NO: 1562976 - DNA, 15 bp, Homo sapiens
aattgcactttaaag

SEQ ID NO: 1562977 - DNA, 15 bp, Homo sapiens
aaattgcactttaaa

SEQ ID NO: 1562978 - DNA, 15 bp, Homo sapiens
aaaattgcactttaa

SEQ ID NO: 1562979 - DNA, 15 bp, Homo sapiens
taaaattgcacttta

SEQ ID NO: 1562980 - DNA, 15 bp, Homo sapiens
ttaaaattgcacttt

SEQ ID NO: 1562981 - DNA, 15 bp, Homo sapiens
tttaaaattgcactt

SEQ ID NO: 1562982 - DNA, 15 bp, Homo sapiens
ttttaaaattgcact

SEQ ID NO: 1562983 - DNA, 15 bp, Homo sapiens
attttaaaattgcac

SEQ ID NO: 1562984 - DNA, 15 bp, Homo sapiens
aattttaaaattgca

SEQ ID NO: 1562985 - DNA, 15 bp, Homo sapiens
taattttaaaattgc

SEQ ID NO: 1562986 - DNA, 15 bp, Homo sapiens
ttaattttaaaattg

SEQ ID NO: 1562987 - DNA, 15 bp, Homo sapiens
attaattttaaaatt

SEQ ID NO: 1562988 - DNA, 15 bp, Homo sapiens
aattaattttaaaat

SEQ ID NO: 1562989 - DNA, 15 bp, Homo sapiens
caattaattttaaaa

SEQ ID NO: 1562990 - DNA, 15 bp, Homo sapiens
tcaattaattttaaa

SEQ ID NO: 1562991 - DNA, 15 bp, Homo sapiens
atcaattaattttaa

SEQ ID NO: 1562992 - DNA, 15 bp, Homo sapiens
aatcaattaatttta

SEQ ID NO: 1562993 - DNA, 15 bp, Homo sapiens
caatcaattaatttt

SEQ ID NO: 1562994 - DNA, 15 bp, Homo sapiens
gcaatcaattaattt

SEQ ID NO: 1562995 - DNA, 15 bp, Homo sapiens
agcaatcaattaatt

SEQ ID NO: 1562996 - DNA, 15 bp, Homo sapiens
cagcaatcaattaat

SEQ ID NO: 1562997 - DNA, 15 bp, Homo sapiens
acagcaatcaattaa

SEQ ID NO: 1562998 - DNA, 15 bp, Homo sapiens
aacagcaatcaatta

SEQ ID NO: 1562999 - DNA, 15 bp, Homo sapiens
caacagcaatcaatt

SEQ ID NO: 1563000 - DNA, 15 bp, Homo sapiens
acaacagcaatcaat

SEQ ID NO: 1563001 - DNA, 15 bp, Homo sapiens
aacaacagcaatcaa

SEQ ID NO: 1563002 - DNA, 15 bp, Homo sapiens
taacaacagcaatca

SEQ ID NO: 1563003 - DNA, 15 bp, Homo sapiens
ctaacaacagcaatc

SEQ ID NO: 1563004 - DNA, 15 bp, Homo sapiens
cctaacaacagcaat

SEQ ID NO: 1563005 - DNA, 15 bp, Homo sapiens
tcctaacaacagcaa

SEQ ID NO: 1563006 - DNA, 15 bp, Homo sapiens
ttcctaacaacagca

SEQ ID NO: 1563007 - DNA, 15 bp, Homo sapiens
tttcctaacaacagc

SEQ ID NO: 1563008 - DNA, 15 bp, Homo sapiens
atttcctaacaacag

SEQ ID NO: 1563009 - DNA, 15 bp, Homo sapiens
tatttcctaacaaca

SEQ ID NO: 1563010 - DNA, 15 bp, Homo sapiens
ctatttcctaacaac

SEQ ID NO: 1563011 - DNA, 15 bp, Homo sapiens
cctatttcctaacaa

SEQ ID NO: 1563012 - DNA, 15 bp, Homo sapiens
tcctatttcctaaca

SEQ ID NO: 1563013 - DNA, 15 bp, Homo sapiens
gtcctatttcctaac

SEQ ID NO: 1563014 - DNA, 15 bp, Homo sapiens
tgtcctatttcctaa

SEQ ID NO: 1563015 - DNA, 15 bp, Homo sapiens
ctgtcctatttccta

SEQ ID NO: 1563016 - DNA, 15 bp, Homo sapiens
gctgtcctatttcct

SEQ ID NO: 1563017 - DNA, 15 bp, Homo sapiens
ggctgtcctatttcc

SEQ ID NO: 1563018 - DNA, 15 bp, Homo sapiens
tggctgtcctatttc

SEQ ID NO: 1563019 - DNA, 15 bp, Homo sapiens
gtggctgtcctattt

SEQ ID NO: 1563020 - DNA, 15 bp, Homo sapiens
agtggctgtcctatt

SEQ ID NO: 1563021 - DNA, 15 bp, Homo sapiens
aagtggctgtcctat

SEQ ID NO: 1563022 - DNA, 15 bp, Homo sapiens
caagtggctgtccta

SEQ ID NO: 1563023 - DNA, 15 bp, Homo sapiens
ccaagtggctgtcct

SEQ ID NO: 1563024 - DNA, 15 bp, Homo sapiens
tccaagtggctgtcc

SEQ ID NO: 1563025 - DNA, 15 bp, Homo sapiens
ttccaagtggctgtc

SEQ ID NO: 1563026 - DNA, 15 bp, Homo sapiens
cttccaagtggctgt

SEQ ID NO: 1563027 - DNA, 15 bp, Homo sapiens
ccttccaagtggctg

SEQ ID NO: 1563028 - DNA, 15 bp, Homo sapiens
tccttccaagtggct

SEQ ID NO: 1563029 - DNA, 15 bp, Homo sapiens
ctccttccaagtggc

SEQ ID NO: 1563030 - DNA, 15 bp, Homo sapiens
gctccttccaagtgg

SEQ ID NO: 1563031 - DNA, 15 bp, Homo sapiens
tgctccttccaagtg

SEQ ID NO: 1563032 - DNA, 15 bp, Homo sapiens
ttgctccttccaagt

SEQ ID NO: 1563033 - DNA, 15 bp, Homo sapiens
tttgctccttccaag

SEQ ID NO: 1563034 - DNA, 15 bp, Homo sapiens
gtttgctccttccaa

SEQ ID NO: 1563035 - DNA, 15 bp, Homo sapiens
cgtttgctccttcca

SEQ ID NO: 1563036 - DNA, 15 bp, Homo sapiens
tcgtttgctccttcc

SEQ ID NO: 1563037 - DNA, 15 bp, Homo sapiens
atcgtttgctccttc

SEQ ID NO: 1563038 - DNA, 15 bp, Homo sapiens
catcgtttgctcctt

SEQ ID NO: 1563039 - DNA, 15 bp, Homo sapiens
ccatcgtttgctcct

SEQ ID NO: 1563040 - DNA, 15 bp, Homo sapiens
accatcgtttgctcc

SEQ ID NO: 1563041 - DNA, 15 bp, Homo sapiens
aaccatcgtttgctc

SEQ ID NO: 1563042 - DNA, 15 bp, Homo sapiens
caaccatcgtttgct

SEQ ID NO: 1563043 - DNA, 15 bp, Homo sapiens
acaaccatcgtttgc

SEQ ID NO: 1563044 - DNA, 15 bp, Homo sapiens
tacaaccatcgtttg

SEQ ID NO: 1563045 - DNA, 15 bp, Homo sapiens
atacaaccatcgttt

SEQ ID NO: 1563046 - DNA, 15 bp, Homo sapiens
aatacaaccatcgtt

SEQ ID NO: 1563047 - DNA, 15 bp, Homo sapiens
aaatacaaccatcgt

SEQ ID NO: 1563048 - DNA, 15 bp, Homo sapiens
caaatacaaccatcg

SEQ ID NO: 1563049 - DNA, 15 bp, Homo sapiens
acaaatacaaccatc

SEQ ID NO: 1563050 - DNA, 15 bp, Homo sapiens
gacaaatacaaccat

SEQ ID NO: 1563051 - DNA, 15 bp, Homo sapiens
tgacaaatacaacca

SEQ ID NO: 1563052 - DNA, 15 bp, Homo sapiens
gtgacaaatacaacc

SEQ ID NO: 1563053 - DNA, 15 bp, Homo sapiens
ggtgacaaatacaac

SEQ ID NO: 1563054 - DNA, 15 bp, Homo sapiens
tggtgacaaatacaa

SEQ ID NO: 1563055 - DNA, 15 bp, Homo sapiens
atggtgacaaataca

SEQ ID NO: 1563056 - DNA, 15 bp, Homo sapiens
tatggtgacaaatac

SEQ ID NO: 1563057 - DNA, 15 bp, Homo sapiens
atatggtgacaaata

SEQ ID NO: 1563058 - DNA, 15 bp, Homo sapiens
aatatggtgacaaat

SEQ ID NO: 1563059 - DNA, 15 bp, Homo sapiens
taatatggtgacaaa

SEQ ID NO: 1563060 - DNA, 15 bp, Homo sapiens
ttaatatggtgacaa

SEQ ID NO: 1563061 - DNA, 15 bp, Homo sapiens
attaatatggtgaca

SEQ ID NO: 1563062 - DNA, 15 bp, Homo sapiens
aattaatatggtgac

SEQ ID NO: 1563063 - DNA, 15 bp, Homo sapiens
caattaatatggtga

SEQ ID NO: 1563064 - DNA, 15 bp, Homo sapiens
tcaattaatatggtg

SEQ ID NO: 1563065 - DNA, 15 bp, Homo sapiens
atcaattaatatggt

SEQ ID NO: 1563066 - DNA, 15 bp, Homo sapiens
aatcaattaatatgg

SEQ ID NO: 1563067 - DNA, 15 bp, Homo sapiens
aaatcaattaatatg

SEQ ID NO: 1563068 - DNA, 15 bp, Homo sapiens
aaaatcaattaatat

SEQ ID NO: 1563069 - DNA, 15 bp, Homo sapiens
aaaaatcaattaata

SEQ ID NO: 1563070 - DNA, 15 bp, Homo sapiens
gaaaaatcaattaat

SEQ ID NO: 1563071 - DNA, 15 bp, Homo sapiens
agaaaaatcaattaa

SEQ ID NO: 1563072 - DNA, 15 bp, Homo sapiens
gagaaaaatcaatta

SEQ ID NO: 1563073 - DNA, 15 bp, Homo sapiens
agagaaaaatcaatt

SEQ ID NO: 1563074 - DNA, 15 bp, Homo sapiens
tagagaaaaatcaat

SEQ ID NO: 1563075 - DNA, 15 bp, Homo sapiens
atagagaaaaatcaa

SEQ ID NO: 1563076 - DNA, 15 bp, Homo sapiens
aatagagaaaaatca

SEQ ID NO: 1563077 - DNA, 15 bp, Homo sapiens
caatagagaaaaatc

SEQ ID NO: 1563078 - DNA, 15 bp, Homo sapiens
acaatagagaaaaat

SEQ ID NO: 1563079 - DNA, 15 bp, Homo sapiens
aacaatagagaaaaa

SEQ ID NO: 1563080 - DNA, 15 bp, Homo sapiens
aaacaatagagaaaa

SEQ ID NO: 1563081 - DNA, 15 bp, Homo sapiens
aaaacaatagagaaa

SEQ ID NO: 1563082 - DNA, 15 bp, Homo sapiens
gaaaacaatagagaa

SEQ ID NO: 1563083 - DNA, 15 bp, Homo sapiens
tgaaaacaatagaga

SEQ ID NO: 1563084 - DNA, 15 bp, Homo sapiens
atgaaaacaatagag

SEQ ID NO: 1563085 - DNA, 15 bp, Homo sapiens
gatgaaaacaataga

SEQ ID NO: 1563086 - DNA, 15 bp, Homo sapiens
agatgaaaacaatag

SEQ ID NO: 1563087 - DNA, 15 bp, Homo sapiens
aagatgaaaacaata

SEQ ID NO: 1563088 - DNA, 15 bp, Homo sapiens
aaagatgaaaacaat

SEQ ID NO: 1563089 - DNA, 15 bp, Homo sapiens
gaaagatgaaaacaa

SEQ ID NO: 1563090 - DNA, 15 bp, Homo sapiens
tgaaagatgaaaaca

SEQ ID NO: 1563091 - DNA, 15 bp, Homo sapiens
ctgaaagatgaaaac

SEQ ID NO: 1563092 - DNA, 15 bp, Homo sapiens
cctgaaagatgaaaa

SEQ ID NO: 1563093 - DNA, 15 bp, Homo sapiens
tcctgaaagatgaaa

SEQ ID NO: 1563094 - DNA, 15 bp, Homo sapiens
gtcctgaaagatgaa

SEQ ID NO: 1563095 - DNA, 15 bp, Homo sapiens
tgtcctgaaagatga

SEQ ID NO: 1563096 - DNA, 15 bp, Homo sapiens
gtgtcctgaaagatg

SEQ ID NO: 1563097 - DNA, 15 bp, Homo sapiens
agtgtcctgaaagat

SEQ ID NO: 1563098 - DNA, 15 bp, Homo sapiens
tagtgtcctgaaaga

SEQ ID NO: 1563099 - DNA, 15 bp, Homo sapiens
ttagtgtcctgaaag

SEQ ID NO: 1563100 - DNA, 15 bp, Homo sapiens
tttagtgtcctgaaa

SEQ ID NO: 1563101 - DNA, 15 bp, Homo sapiens
ctttagtgtcctgaa

SEQ ID NO: 1563102 - DNA, 15 bp, Homo sapiens
cctttagtgtcctga

SEQ ID NO: 1563103 - DNA, 15 bp, Homo sapiens
tcctttagtgtcctg

SEQ ID NO: 1563104 - DNA, 15 bp, Homo sapiens
ctcctttagtgtcct

SEQ ID NO: 1563105 - DNA, 15 bp, Homo sapiens
tctcctttagtgtcc

SEQ ID NO: 1563106 - DNA, 15 bp, Homo sapiens
gtctcctttagtgtc

SEQ ID NO: 1563107 - DNA, 15 bp, Homo sapiens
agtctcctttagtgt

SEQ ID NO: 1563108 - DNA, 15 bp, Homo sapiens
gagtctcctttagtg

SEQ ID NO: 1563109 - DNA, 15 bp, Homo sapiens
tgagtctcctttagt

SEQ ID NO: 1563110 - DNA, 15 bp, Homo sapiens
ctgagtctcctttag

SEQ ID NO: 1563111 - DNA, 15 bp, Homo sapiens
gctgagtctccttta

SEQ ID NO: 1563112 - DNA, 15 bp, Homo sapiens
ggctgagtctccttt

SEQ ID NO: 1563113 - DNA, 15 bp, Homo sapiens
tggctgagtctcctt

SEQ ID NO: 1563114 - DNA, 15 bp, Homo sapiens
atggctgagtctcct

SEQ ID NO: 1563115 - DNA, 15 bp, Homo sapiens
catggctgagtctcc

SEQ ID NO: 1563116 - DNA, 15 bp, Homo sapiens
ccatggctgagtctc

SEQ ID NO: 1563117 - DNA, 15 bp, Homo sapiens
accatggctgagtct

SEQ ID NO: 1563118 - DNA, 15 bp, Homo sapiens
gaccatggctgagtc

SEQ ID NO: 1563119 - DNA, 15 bp, Homo sapiens
ggaccatggctgagt

SEQ ID NO: 1563120 - DNA, 15 bp, Homo sapiens
aggaccatggctgag

SEQ ID NO: 1563121 - DNA, 15 bp, Homo sapiens
gaggaccatggctga

SEQ ID NO: 1563122 - DNA, 15 bp, Homo sapiens
agaggaccatggctg

SEQ ID NO: 1563123 - DNA, 15 bp, Homo sapiens
gagaggaccatggct

SEQ ID NO: 1563124 - DNA, 15 bp, Homo sapiens
ggagaggaccatggc

SEQ ID NO: 1563125 - DNA, 15 bp, Homo sapiens
gggagaggaccatgg

SEQ ID NO: 1563126 - DNA, 15 bp, Homo sapiens
tgggagaggaccatg

SEQ ID NO: 1563127 - DNA, 15 bp, Homo sapiens
ttgggagaggaccat

SEQ ID NO: 1563128 - DNA, 15 bp, Homo sapiens
tttgggagaggacca

SEQ ID NO: 1563129 - DNA, 15 bp, Homo sapiens
ctttgggagaggacc

SEQ ID NO: 1563130 - DNA, 15 bp, Homo sapiens
cctttgggagaggac

SEQ ID NO: 1563131 - DNA, 15 bp, Homo sapiens
acctttgggagagga

SEQ ID NO: 1563132 - DNA, 15 bp, Homo sapiens
aacctttgggagagg

SEQ ID NO: 1563133 - DNA, 15 bp, Homo sapiens
gaacctttgggagag

SEQ ID NO: 1563134 - DNA, 15 bp, Homo sapiens
agaacctttgggaga

SEQ ID NO: 1563135 - DNA, 15 bp, Homo sapiens
cagaacctttgggag

SEQ ID NO: 1563136 - DNA, 15 bp, Homo sapiens
tcagaacctttggga

SEQ ID NO: 1563137 - DNA, 15 bp, Homo sapiens
ttcagaacctttggg

SEQ ID NO: 1563138 - DNA, 15 bp, Homo sapiens
cttcagaacctttgg

SEQ ID NO: 1563139 - DNA, 15 bp, Homo sapiens
ccttcagaacctttg

SEQ ID NO: 1563140 - DNA, 15 bp, Homo sapiens
tccttcagaaccttt

SEQ ID NO: 1563141 - DNA, 15 bp, Homo sapiens
atccttcagaacctt

SEQ ID NO: 1563142 - DNA, 15 bp, Homo sapiens
tatccttcagaacct

SEQ ID NO: 1563143 - DNA, 15 bp, Homo sapiens
gtatccttcagaacc

SEQ ID NO: 1563144 - DNA, 15 bp, Homo sapiens
ggtatccttcagaac

SEQ ID NO: 1563145 - DNA, 15 bp, Homo sapiens
aggtatccttcagaa

SEQ ID NO: 1563146 - DNA, 15 bp, Homo sapiens
aaggtatccttcaga

SEQ ID NO: 1563147 - DNA, 15 bp, Homo sapiens
caaggtatccttcag

SEQ ID NO: 1563148 - DNA, 15 bp, Homo sapiens
gcaaggtatccttca

SEQ ID NO: 1563149 - DNA, 15 bp, Homo sapiens
tgcaaggtatccttc

SEQ ID NO: 1563150 - DNA, 15 bp, Homo sapiens
ctgcaaggtatcctt

SEQ ID NO: 1563151 - DNA, 15 bp, Homo sapiens
gctgcaaggtatcct

SEQ ID NO: 1563152 - DNA, 15 bp, Homo sapiens
ggctgcaaggtatcc

SEQ ID NO: 1563153 - DNA, 15 bp, Homo sapiens
tggctgcaaggtatc

SEQ ID NO: 1563154 - DNA, 15 bp, Homo sapiens
gtggctgcaaggtat

SEQ ID NO: 1563155 - DNA, 15 bp, Homo sapiens
ggtggctgcaaggta

SEQ ID NO: 1563156 - DNA, 15 bp, Homo sapiens
aggtggctgcaaggt

SEQ ID NO: 1563157 - DNA, 15 bp, Homo sapiens
taggtggctgcaagg

SEQ ID NO: 1563158 - DNA, 15 bp, Homo sapiens
ataggtggctgcaag

SEQ ID NO: 1563159 - DNA, 15 bp, Homo sapiens
gataggtggctgcaa

SEQ ID NO: 1563160 - DNA, 15 bp, Homo sapiens
ggataggtggctgca

SEQ ID NO: 1563161 - DNA, 15 bp, Homo sapiens
tggataggtggctgc

SEQ ID NO: 1563162 - DNA, 15 bp, Homo sapiens
ttggataggtggctg

SEQ ID NO: 1563163 - DNA, 15 bp, Homo sapiens
gttggataggtggct

SEQ ID NO: 1563164 - DNA, 15 bp, Homo sapiens
agttggataggtggc

SEQ ID NO: 1563165 - DNA, 15 bp, Homo sapiens
cagttggataggtgg

SEQ ID NO: 1563166 - DNA, 15 bp, Homo sapiens
acagttggataggtg

SEQ ID NO: 1563167 - DNA, 15 bp, Homo sapiens
gacagttggataggt

SEQ ID NO: 1563168 - DNA, 15 bp, Homo sapiens
cgacagttggatagg

SEQ ID NO: 1563169 - DNA, 15 bp, Homo sapiens
ccgacagttggatag

SEQ ID NO: 1563170 - DNA, 15 bp, Homo sapiens
gccgacagttggata

SEQ ID NO: 1563171 - DNA, 15 bp, Homo sapiens
ggccgacagttggat

SEQ ID NO: 1563172 - DNA, 15 bp, Homo sapiens
tggccgacagttgga

SEQ ID NO: 1563173 - DNA, 15 bp, Homo sapiens
ctggccgacagttgg

SEQ ID NO: 1563174 - DNA, 15 bp, Homo sapiens
tctggccgacagttg

SEQ ID NO: 1563175 - DNA, 15 bp, Homo sapiens
gtctggccgacagtt

SEQ ID NO: 1563176 - DNA, 15 bp, Homo sapiens
ggtctggccgacagt

SEQ ID NO: 1563177 - DNA, 15 bp, Homo sapiens
tggtctggccgacag

SEQ ID NO: 1563178 - DNA, 15 bp, Homo sapiens
ctggtctggccgaca

SEQ ID NO: 1563179 - DNA, 15 bp, Homo sapiens
actggtctggccgac

SEQ ID NO: 1563180 - DNA, 15 bp, Homo sapiens
gactggtctggccga

SEQ ID NO: 1563181 - DNA, 15 bp, Homo sapiens
ggactggtctggccg

SEQ ID NO: 1563182 - DNA, 15 bp, Homo sapiens
gggactggtctggcc

SEQ ID NO: 1563183 - DNA, 15 bp, Homo sapiens
ggggactggtctggc

SEQ ID NO: 1563184 - DNA, 15 bp, Homo sapiens
cggggactggtctgg

SEQ ID NO: 1563185 - DNA, 15 bp, Homo sapiens
tcggggactggtctg

SEQ ID NO: 1563186 - DNA, 15 bp, Homo sapiens
ctcggggactggtct

SEQ ID NO: 1563187 - DNA, 15 bp, Homo sapiens
gctcggggactggtc

SEQ ID NO: 1563188 - DNA, 15 bp, Homo sapiens
ggctcggggactggt

SEQ ID NO: 1563189 - DNA, 15 bp, Homo sapiens
tggctcggggactgg

SEQ ID NO: 1563190 - DNA, 15 bp, Homo sapiens
ctggctcggggactg

SEQ ID NO: 1563191 - DNA, 15 bp, Homo sapiens
cctggctcggggact

SEQ ID NO: 1563192 - DNA, 15 bp, Homo sapiens
tcctggctcggggac

SEQ ID NO: 1563193 - DNA, 15 bp, Homo sapiens
ttcctggctcgggga

SEQ ID NO: 1563194 - DNA, 15 bp, Homo sapiens
tttcctggctcgggg

SEQ ID NO: 1563195 - DNA, 15 bp, Homo sapiens
atttcctggctcggg

SEQ ID NO: 1563196 - DNA, 15 bp, Homo sapiens
gatttcctggctcgg

SEQ ID NO: 1563197 - DNA, 15 bp, Homo sapiens
ggatttcctggctcg

SEQ ID NO: 1563198 - DNA, 15 bp, Homo sapiens
tggatttcctggctc

SEQ ID NO: 1563199 - DNA, 15 bp, Homo sapiens
atggatttcctggct

SEQ ID NO: 1563200 - DNA, 15 bp, Homo sapiens
catggatttcctggc

SEQ ID NO: 1563201 - DNA, 15 bp, Homo sapiens
tcatggatttcctgg

SEQ ID NO: 1563202 - DNA, 15 bp, Homo sapiens
ctcatggatttcctg

SEQ ID NO: 1563203 - DNA, 15 bp, Homo sapiens
gctcatggatttcct

SEQ ID NO: 1563204 - DNA, 15 bp, Homo sapiens
ggctcatggatttcc

SEQ ID NO: 1563205 - DNA, 15 bp, Homo sapiens
aggctcatggatttc

SEQ ID NO: 1563206 - DNA, 15 bp, Homo sapiens
caggctcatggattt

SEQ ID NO: 1563207 - DNA, 15 bp, Homo sapiens
ccaggctcatggatt

SEQ ID NO: 1563208 - DNA, 15 bp, Homo sapiens
tccaggctcatggat

SEQ ID NO: 1563209 - DNA, 15 bp, Homo sapiens
gtccaggctcatgga

SEQ ID NO: 1563210 - DNA, 15 bp, Homo sapiens
tgtccaggctcatgg

SEQ ID NO: 1563211 - DNA, 15 bp, Homo sapiens
atgtccaggctcatg

SEQ ID NO: 1563212 - DNA, 15 bp, Homo sapiens
catgtccaggctcat

SEQ ID NO: 1563213 - DNA, 15 bp, Homo sapiens
ccatgtccaggctca

SEQ ID NO: 1563214 - DNA, 15 bp, Homo sapiens
cccatgtccaggctc

SEQ ID NO: 1563215 - DNA, 15 bp, Homo sapiens
ccccatgtccaggct

SEQ ID NO: 1563216 - DNA, 15 bp, Homo sapiens
gccccatgtccaggc

SEQ ID NO: 1563217 - DNA, 15 bp, Homo sapiens
tgccccatgtccagg

SEQ ID NO: 1563218 - DNA, 15 bp, Homo sapiens
ttgccccatgtccag

SEQ ID NO: 1563219 - DNA, 15 bp, Homo sapiens
gttgccccatgtcca

SEQ ID NO: 1563220 - DNA, 15 bp, Homo sapiens
ggttgccccatgtcc

SEQ ID NO: 1563221 - DNA, 15 bp, Homo sapiens
aggttgccccatgtc

SEQ ID NO: 1563222 - DNA, 15 bp, Homo sapiens
aaggttgccccatgt

SEQ ID NO: 1563223 - DNA, 15 bp, Homo sapiens
gaaggttgccccatg

SEQ ID NO: 1563224 - DNA, 15 bp, Homo sapiens
agaaggttgccccat

SEQ ID NO: 1563225 - DNA, 15 bp, Homo sapiens
gagaaggttgcccca

SEQ ID NO: 1563226 - DNA, 15 bp, Homo sapiens
tgagaaggttgcccc

SEQ ID NO: 1563227 - DNA, 15 bp, Homo sapiens
ctgagaaggttgccc

SEQ ID NO: 1563228 - DNA, 15 bp, Homo sapiens
cctgagaaggttgcc

SEQ ID NO: 1563229 - DNA, 15 bp, Homo sapiens
gcctgagaaggttgc

SEQ ID NO: 1563230 - DNA, 15 bp, Homo sapiens
ggcctgagaaggttg

SEQ ID NO: 1563231 - DNA, 15 bp, Homo sapiens
tggcctgagaaggtt

SEQ ID NO: 1563232 - DNA, 15 bp, Homo sapiens
ttggcctgagaaggt

SEQ ID NO: 1563233 - DNA, 15 bp, Homo sapiens
gttggcctgagaagg

SEQ ID NO: 1563234 - DNA, 15 bp, Homo sapiens
tgttggcctgagaag

SEQ ID NO: 1563235 - DNA, 15 bp, Homo sapiens
gtgttggcctgagaa

SEQ ID NO: 1563236 - DNA, 15 bp, Homo sapiens
agtgttggcctgaga

SEQ ID NO: 1563237 - DNA, 15 bp, Homo sapiens
tagtgttggcctgag

SEQ ID NO: 1563238 - DNA, 15 bp, Homo sapiens
ttagtgttggcctga

SEQ ID NO: 1563239 - DNA, 15 bp, Homo sapiens
cttagtgttggcctg

SEQ ID NO: 1563240 - DNA, 15 bp, Homo sapiens
tcttagtgttggcct

SEQ ID NO: 1563241 - DNA, 15 bp, Homo sapiens
ttcttagtgttggcc

SEQ ID NO: 1563242 - DNA, 15 bp, Homo sapiens
cttcttagtgttggc

SEQ ID NO: 1563243 - DNA, 15 bp, Homo sapiens
acttcttagtgttgg

SEQ ID NO: 1563244 - DNA, 15 bp, Homo sapiens
aacttcttagtgttg

SEQ ID NO: 1563245 - DNA, 15 bp, Homo sapiens
caacttcttagtgtt

SEQ ID NO: 1563246 - DNA, 15 bp, Homo sapiens
gcaacttcttagtgt

SEQ ID NO: 1563247 - DNA, 15 bp, Homo sapiens
agcaacttcttagtg

SEQ ID NO: 1563248 - DNA, 15 bp, Homo sapiens
aagcaacttcttagt

SEQ ID NO: 1563249 - DNA, 15 bp, Homo sapiens
caagcaacttcttag

SEQ ID NO: 1563250 - DNA, 15 bp, Homo sapiens
ccaagcaacttctta

SEQ ID NO: 1563251 - DNA, 15 bp, Homo sapiens
accaagcaacttctt

SEQ ID NO: 1563252 - DNA, 15 bp, Homo sapiens
aaccaagcaacttct

SEQ ID NO: 1563253 - DNA, 15 bp, Homo sapiens
taaccaagcaacttc

SEQ ID NO: 1563254 - DNA, 15 bp, Homo sapiens
ctaaccaagcaactt

SEQ ID NO: 1563255 - DNA, 15 bp, Homo sapiens
actaaccaagcaact

SEQ ID NO: 1563256 - DNA, 15 bp, Homo sapiens
aactaaccaagcaac

SEQ ID NO: 1563257 - DNA, 15 bp, Homo sapiens
aaactaaccaagcaa

SEQ ID NO: 1563258 - DNA, 15 bp, Homo sapiens
taaactaaccaagca

SEQ ID NO: 1563259 - DNA, 15 bp, Homo sapiens
ataaactaaccaagc

SEQ ID NO: 1563260 - DNA, 15 bp, Homo sapiens
gataaactaaccaag

SEQ ID NO: 1563261 - DNA, 15 bp, Homo sapiens
agataaactaaccaa

SEQ ID NO: 1563262 - DNA, 15 bp, Homo sapiens
tagataaactaacca

SEQ ID NO: 1563263 - DNA, 15 bp, Homo sapiens
ttagataaactaacc

SEQ ID NO: 1563264 - DNA, 15 bp, Homo sapiens
tttagataaactaac

SEQ ID NO: 1563265 - DNA, 15 bp, Homo sapiens
atttagataaactaa

SEQ ID NO: 1563266 - DNA, 15 bp, Homo sapiens
aatttagataaacta

SEQ ID NO: 1563267 - DNA, 15 bp, Homo sapiens
taatttagataaact

SEQ ID NO: 1563268 - DNA, 15 bp, Homo sapiens
ataatttagataaac

SEQ ID NO: 1563269 - DNA, 15 bp, Homo sapiens
cataatttagataaa

SEQ ID NO: 1563270 - DNA, 15 bp, Homo sapiens
acataatttagataa

SEQ ID NO: 1563271 - DNA, 15 bp, Homo sapiens
tacataatttagata

SEQ ID NO: 1563272 - DNA, 15 bp, Homo sapiens
ctacataatttagat

SEQ ID NO: 1563273 - DNA, 15 bp, Homo sapiens
tctacataatttaga

SEQ ID NO: 1563274 - DNA, 15 bp, Homo sapiens
atctacataatttag

SEQ ID NO: 1563275 - DNA, 15 bp, Homo sapiens
aatctacataattta

SEQ ID NO: 1563276 - DNA, 15 bp, Homo sapiens
aaatctacataattt

SEQ ID NO: 1563277 - DNA, 15 bp, Homo sapiens
aaaatctacataatt

SEQ ID NO: 1563278 - DNA, 15 bp, Homo sapiens
aaaaatctacataat

SEQ ID NO: 1563279 - DNA, 15 bp, Homo sapiens
aaaaaatctacataa

SEQ ID NO: 1563280 - DNA, 15 bp, Homo sapiens
aaaaaaatctacata

SEQ ID NO: 1563281 - DNA, 15 bp, Homo sapiens
aaaaaaaatctacat

SEQ ID NO: 1563282 - DNA, 15 bp, Homo sapiens
taaaaaaaatctaca

SEQ ID NO: 1563283 - DNA, 15 bp, Homo sapiens
ataaaaaaaatctac

SEQ ID NO: 1563284 - DNA, 15 bp, Homo sapiens
aataaaaaaaatcta

SEQ ID NO: 1563285 - DNA, 15 bp, Homo sapiens
taataaaaaaaatct

SEQ ID NO: 1563286 - DNA, 15 bp, Homo sapiens
ataataaaaaaaatc

SEQ ID NO: 1563287 - DNA, 15 bp, Homo sapiens
aataataaaaaaaat

SEQ ID NO: 1563288 - DNA, 15 bp, Homo sapiens
aaataataaaaaaaa

SEQ ID NO: 1563289 - DNA, 15 bp, Homo sapiens
taaataataaaaaaa

SEQ ID NO: 1563290 - DNA, 15 bp, Homo sapiens
ttaaataataaaaaa

SEQ ID NO: 1563291 - DNA, 15 bp, Homo sapiens
tttaaataataaaaa

SEQ ID NO: 1563292 - DNA, 15 bp, Homo sapiens
ttttaaataataaaa

SEQ ID NO: 1563293 - DNA, 15 bp, Homo sapiens
tttttaaataataaa

SEQ ID NO: 1563294 - DNA, 15 bp, Homo sapiens
ttttttaaataataa

SEQ ID NO: 1563295 - DNA, 15 bp, Homo sapiens
tttttttaaataata

SEQ ID NO: 1563296 - DNA, 15 bp, Homo sapiens
atttttttaaataat

SEQ ID NO: 1563297 - DNA, 15 bp, Homo sapiens
tatttttttaaataa

SEQ ID NO: 1563298 - DNA, 15 bp, Homo sapiens
ctatttttttaaata

SEQ ID NO: 1563299 - DNA, 15 bp, Homo sapiens
tctatttttttaaat

SEQ ID NO: 1563300 - DNA, 15 bp, Homo sapiens
atctatttttttaaa

SEQ ID NO: 1563301 - DNA, 15 bp, Homo sapiens
tatctatttttttaa

SEQ ID NO: 1563302 - DNA, 15 bp, Homo sapiens
atatctattttttta

SEQ ID NO: 1563303 - DNA, 15 bp, Homo sapiens
aatatctattttttt

SEQ ID NO: 1563304 - DNA, 15 bp, Homo sapiens
aaatatctatttttt

SEQ ID NO: 1563305 - DNA, 15 bp, Homo sapiens
aaaatatctattttt

SEQ ID NO: 1563306 - DNA, 15 bp, Homo sapiens
aaaaatatctatttt

SEQ ID NO: 1563307 - DNA, 15 bp, Homo sapiens
taaaaatatctattt

SEQ ID NO: 1563308 - DNA, 15 bp, Homo sapiens
gtaaaaatatctatt

SEQ ID NO: 1563309 - DNA, 15 bp, Homo sapiens
agtaaaaatatctat

SEQ ID NO: 1563310 - DNA, 15 bp, Homo sapiens
gagtaaaaatatcta

SEQ ID NO: 1563311 - DNA, 15 bp, Homo sapiens
agagtaaaaatatct

SEQ ID NO: 1563312 - DNA, 15 bp, Homo sapiens
aagagtaaaaatatc

SEQ ID NO: 1563313 - DNA, 15 bp, Homo sapiens
caagagtaaaaatat

SEQ ID NO: 1563314 - DNA, 15 bp, Homo sapiens
ccaagagtaaaaata

SEQ ID NO: 1563315 - DNA, 15 bp, Homo sapiens
tccaagagtaaaaat

SEQ ID NO: 1563316 - DNA, 15 bp, Homo sapiens
ttccaagagtaaaaa

SEQ ID NO: 1563317 - DNA, 15 bp, Homo sapiens
tttccaagagtaaaa

SEQ ID NO: 1563318 - DNA, 15 bp, Homo sapiens
ttttccaagagtaaa

SEQ ID NO: 1563319 - DNA, 15 bp, Homo sapiens
attttccaagagtaa

SEQ ID NO: 1563320 - DNA, 15 bp, Homo sapiens
aattttccaagagta

SEQ ID NO: 1563321 - DNA, 15 bp, Homo sapiens
taattttccaagagt

SEQ ID NO: 1563322 - DNA, 15 bp, Homo sapiens
ataattttccaagag

SEQ ID NO: 1563323 - DNA, 15 bp, Homo sapiens
aataattttccaaga

SEQ ID NO: 1563324 - DNA, 15 bp, Homo sapiens
aaataattttccaag

SEQ ID NO: 1563325 - DNA, 15 bp, Homo sapiens
caaataattttccaa

SEQ ID NO: 1563326 - DNA, 15 bp, Homo sapiens
tcaaataattttcca

SEQ ID NO: 1563327 - DNA, 15 bp, Homo sapiens
ttcaaataattttcc

SEQ ID NO: 1563328 - DNA, 15 bp, Homo sapiens
tttcaaataattttc

SEQ ID NO: 1563329 - DNA, 15 bp, Homo sapiens
atttcaaataatttt

SEQ ID NO: 1563330 - DNA, 15 bp, Homo sapiens
aatttcaaataattt

SEQ ID NO: 1563331 - DNA, 15 bp, Homo sapiens
aaatttcaaataatt

SEQ ID NO: 1563332 - DNA, 15 bp, Homo sapiens
gaaatttcaaataat

SEQ ID NO: 1563333 - DNA, 15 bp, Homo sapiens
tgaaatttcaaataa

SEQ ID NO: 1563334 - DNA, 15 bp, Homo sapiens
ctgaaatttcaaata

SEQ ID NO: 1563335 - DNA, 15 bp, Homo sapiens
cctgaaatttcaaat

SEQ ID NO: 1563336 - DNA, 15 bp, Homo sapiens
tcctgaaatttcaaa

SEQ ID NO: 1563337 - DNA, 15 bp, Homo sapiens
atcctgaaatttcaa

SEQ ID NO: 1563338 - DNA, 15 bp, Homo sapiens
aatcctgaaatttca

SEQ ID NO: 1563339 - DNA, 15 bp, Homo sapiens
taatcctgaaatttc

SEQ ID NO: 1563340 - DNA, 15 bp, Homo sapiens
ataatcctgaaattt

SEQ ID NO: 1563341 - DNA, 15 bp, Homo sapiens
gataatcctgaaatt

SEQ ID NO: 1563342 - DNA, 15 bp, Homo sapiens
tgataatcctgaaat

SEQ ID NO: 1563343 - DNA, 15 bp, Homo sapiens
ttgataatcctgaaa

SEQ ID NO: 1563344 - DNA, 15 bp, Homo sapiens
tttgataatcctgaa

SEQ ID NO: 1563345 - DNA, 15 bp, Homo sapiens
ttttgataatcctga

SEQ ID NO: 1563346 - DNA, 15 bp, Homo sapiens
attttgataatcctg

SEQ ID NO: 1563347 - DNA, 15 bp, Homo sapiens
aattttgataatcct

SEQ ID NO: 1563348 - DNA, 15 bp, Homo sapiens
aaattttgataatcc

SEQ ID NO: 1563349 - DNA, 15 bp, Homo sapiens
aaaattttgataatc

SEQ ID NO: 1563350 - DNA, 15 bp, Homo sapiens
gaaaattttgataat

SEQ ID NO: 1563351 - DNA, 15 bp, Homo sapiens
ggaaaattttgataa

SEQ ID NO: 1563352 - DNA, 15 bp, Homo sapiens
tggaaaattttgata

SEQ ID NO: 1563353 - DNA, 15 bp, Homo sapiens
atggaaaattttgat

SEQ ID NO: 1563354 - DNA, 15 bp, Homo sapiens
catggaaaattttga

SEQ ID NO: 1563355 - DNA, 15 bp, Homo sapiens
acatggaaaattttg

SEQ ID NO: 1563356 - DNA, 15 bp, Homo sapiens
tgacatggaaaattt

SEQ ID NO: 1563357 - DNA, 15 bp, Homo sapiens
ctgacatggaaaatt

SEQ ID NO: 1563358 - DNA, 15 bp, Homo sapiens
actgacatggaaaat

SEQ ID NO: 1563359 - DNA, 15 bp, Homo sapiens
cactgacatggaaaa

SEQ ID NO: 1563360 - DNA, 15 bp, Homo sapiens
acactgacatggaaa

SEQ ID NO: 1563361 - DNA, 15 bp, Homo sapiens
tacactgacatggaa

SEQ ID NO: 1563362 - DNA, 15 bp, Homo sapiens
ctacactgacatgga

SEQ ID NO: 1563363 - DNA, 15 bp, Homo sapiens
gctacactgacatgg

SEQ ID NO: 1563364 - DNA, 15 bp, Homo sapiens
tgctacactgacatg

SEQ ID NO: 1563365 - DNA, 15 bp, Homo sapiens
ttgctacactgacat

SEQ ID NO: 1563366 - DNA, 15 bp, Homo sapiens
tttgctacactgaca

SEQ ID NO: 1563367 - DNA, 15 bp, Homo sapiens
ctttgctacactgac

SEQ ID NO: 1563368 - DNA, 15 bp, Homo sapiens
actttgctacactga

SEQ ID NO: 1563369 - DNA, 15 bp, Homo sapiens
aactttgctacactg

SEQ ID NO: 1563370 - DNA, 15 bp, Homo sapiens
aaactttgctacact

SEQ ID NO: 1563371 - DNA, 15 bp, Homo sapiens
aaaactttgctacac

SEQ ID NO: 1563372 - DNA, 15 bp, Homo sapiens
aaaaactttgctaca

SEQ ID NO: 1563373 - DNA, 15 bp, Homo sapiens
caaaaactttgctac

SEQ ID NO: 1563374 - DNA, 15 bp, Homo sapiens
tcaaaaactttgcta

SEQ ID NO: 1563375 - DNA, 15 bp, Homo sapiens
atcaaaaactttgct

SEQ ID NO: 1563376 - DNA, 15 bp, Homo sapiens
catcaaaaactttgc

SEQ ID NO: 1563377 - DNA, 15 bp, Homo sapiens
gcatcaaaaactttg

SEQ ID NO: 1563378 - DNA, 15 bp, Homo sapiens
ggcatcaaaaacttt

SEQ ID NO: 1563379 - DNA, 15 bp, Homo sapiens
tggcatcaaaaactt

SEQ ID NO: 1563380 - DNA, 15 bp, Homo sapiens
atggcatcaaaaact

SEQ ID NO: 1563381 - DNA, 15 bp, Homo sapiens
aatggcatcaaaaac

SEQ ID NO: 1563382 - DNA, 15 bp, Homo sapiens
aaatggcatcaaaaa

SEQ ID NO: 1563383 - DNA, 15 bp, Homo sapiens
taaatggcatcaaaa

SEQ ID NO: 1563384 - DNA, 15 bp, Homo sapiens
ttaaatggcatcaaa

SEQ ID NO: 1563385 - DNA, 15 bp, Homo sapiens
tttaaatggcatcaa

SEQ ID NO: 1563386 - DNA, 15 bp, Homo sapiens
ttttaaatggcatca

SEQ ID NO: 1563387 - DNA, 15 bp, Homo sapiens
cttttaaatggcatc

SEQ ID NO: 1563388 - DNA, 15 bp, Homo sapiens
tcttttaaatggcat

SEQ ID NO: 1563389 - DNA, 15 bp, Homo sapiens
ctcttttaaatggca

SEQ ID NO: 1563390 - DNA, 15 bp, Homo sapiens
tctcttttaaatggc

SEQ ID NO: 1563391 - DNA, 15 bp, Homo sapiens
ctctcttttaaatgg

SEQ ID NO: 1563392 - DNA, 15 bp, Homo sapiens
actctcttttaaatg

SEQ ID NO: 1563393 - DNA, 15 bp, Homo sapiens
aactctcttttaaat

SEQ ID NO: 1563394 - DNA, 15 bp, Homo sapiens
aaactctcttttaaa

SEQ ID NO: 1563395 - DNA, 15 bp, Homo sapiens
caaactctcttttaa

SEQ ID NO: 1563396 - DNA, 15 bp, Homo sapiens
tcaaactctctttta

SEQ ID NO: 1563397 - DNA, 15 bp, Homo sapiens
atcaaactctctttt

SEQ ID NO: 1563398 - DNA, 15 bp, Homo sapiens
tatcaaactctcttt

SEQ ID NO: 1563399 - DNA, 15 bp, Homo sapiens
ctatcaaactctctt

SEQ ID NO: 1563400 - DNA, 15 bp, Homo sapiens
tctatcaaactctct

SEQ ID NO: 1563401 - DNA, 15 bp, Homo sapiens
atctatcaaactctc

SEQ ID NO: 1563402 - DNA, 15 bp, Homo sapiens
aactgatctatcaaa

SEQ ID NO: 1563403 - DNA, 15 bp, Homo sapiens
taactgatctatcaa

SEQ ID NO: 1563404 - DNA, 15 bp, Homo sapiens
ttaactgatctatca

SEQ ID NO: 1563405 - DNA, 15 bp, Homo sapiens
cttaactgatctatc

SEQ ID NO: 1563406 - DNA, 15 bp, Homo sapiens
gcttaactgatctat

SEQ ID NO: 1563407 - DNA, 15 bp, Homo sapiens
tgcttaactgatcta

SEQ ID NO: 1563408 - DNA, 15 bp, Homo sapiens
atgcttaactgatct

SEQ ID NO: 1563409 - DNA, 15 bp, Homo sapiens
aatgcttaactgatc

SEQ ID NO: 1563410 - DNA, 15 bp, Homo sapiens
taatgcttaactgat

SEQ ID NO: 1563411 - DNA, 15 bp, Homo sapiens
ataatgcttaactga

SEQ ID NO: 1563412 - DNA, 15 bp, Homo sapiens
tataatgcttaactg

SEQ ID NO: 1563413 - DNA, 15 bp, Homo sapiens
ttataatgcttaact

SEQ ID NO: 1563414 - DNA, 15 bp, Homo sapiens
cttataatgcttaac

SEQ ID NO: 1563415 - DNA, 15 bp, Homo sapiens
acttataatgcttaa

SEQ ID NO: 1563416 - DNA, 15 bp, Homo sapiens
aacttataatgctta

SEQ ID NO: 1563417 - DNA, 15 bp, Homo sapiens
caacttataatgctt

SEQ ID NO: 1563418 - DNA, 15 bp, Homo sapiens
tcaacttataatgct

SEQ ID NO: 1563419 - DNA, 15 bp, Homo sapiens
ctcaacttataatgc

SEQ ID NO: 1563420 - DNA, 15 bp, Homo sapiens
tctcaacttataatg

SEQ ID NO: 1563421 - DNA, 15 bp, Homo sapiens
atctcaacttataat

SEQ ID NO: 1563422 - DNA, 15 bp, Homo sapiens
tatctcaacttataa

SEQ ID NO: 1563423 - DNA, 15 bp, Homo sapiens
ctatctcaacttata

SEQ ID NO: 1563424 - DNA, 15 bp, Homo sapiens
tctatctcaacttat

SEQ ID NO: 1563425 - DNA, 15 bp, Homo sapiens
ctctatctcaactta

SEQ ID NO: 1563426 - DNA, 15 bp, Homo sapiens
tctctatctcaactt

SEQ ID NO: 1563427 - DNA, 15 bp, Homo sapiens
ttctctatctcaact

SEQ ID NO: 1563428 - DNA, 15 bp, Homo sapiens
tttctctatctcaac

SEQ ID NO: 1563429 - DNA, 15 bp, Homo sapiens
atttctctatctcaa

SEQ ID NO: 1563430 - DNA, 15 bp, Homo sapiens
catttctctatctca

SEQ ID NO: 1563431 - DNA, 15 bp, Homo sapiens
tcatttctctatctc

SEQ ID NO: 1563432 - DNA, 15 bp, Homo sapiens
ctcatttctctatct

SEQ ID NO: 1563433 - DNA, 15 bp, Homo sapiens
tctcatttctctatc

SEQ ID NO: 1563434 - DNA, 15 bp, Homo sapiens
ttctcatttctctat

SEQ ID NO: 1563435 - DNA, 15 bp, Homo sapiens
attctcatttctcta

SEQ ID NO: 1563436 - DNA, 15 bp, Homo sapiens
cattctcatttctct

SEQ ID NO: 1563437 - DNA, 15 bp, Homo sapiens
ccattctcatttctc

SEQ ID NO: 1563438 - DNA, 15 bp, Homo sapiens
cccattctcatttct

SEQ ID NO: 1563439 - DNA, 15 bp, Homo sapiens
tcccattctcatttc

SEQ ID NO: 1563440 - DNA, 15 bp, Homo sapiens
gtcccattctcattt

SEQ ID NO: 1563441 - DNA, 15 bp, Homo sapiens
ggtcccattctcatt

SEQ ID NO: 1563442 - DNA, 15 bp, Homo sapiens
aggtcccattctcat

SEQ ID NO: 1563443 - DNA, 15 bp, Homo sapiens
aaggtcccattctca

SEQ ID NO: 1563444 - DNA, 15 bp, Homo sapiens
caaggtcccattctc

SEQ ID NO: 1563445 - DNA, 15 bp, Homo sapiens
tcaaggtcccattct

SEQ ID NO: 1563446 - DNA, 15 bp, Homo sapiens
ttcaaggtcccattc

SEQ ID NO: 1563447 - DNA, 15 bp, Homo sapiens
tttcaaggtcccatt

SEQ ID NO: 1563448 - DNA, 15 bp, Homo sapiens
gtttcaaggtcccat

SEQ ID NO: 1563449 - DNA, 15 bp, Homo sapiens
tgtttcaaggtccca

SEQ ID NO: 1563450 - DNA, 15 bp, Homo sapiens
ctgtttcaaggtccc

SEQ ID NO: 1563451 - DNA, 15 bp, Homo sapiens
actgtttcaaggtcc

SEQ ID NO: 1563452 - DNA, 15 bp, Homo sapiens
aactgtttcaaggtc

SEQ ID NO: 1563453 - DNA, 15 bp, Homo sapiens
aaactgtttcaaggt

SEQ ID NO: 1563454 - DNA, 15 bp, Homo sapiens
aaaactgtttcaagg

SEQ ID NO: 1563455 - DNA, 15 bp, Homo sapiens
aaaaactgtttcaag

SEQ ID NO: 1563456 - DNA, 15 bp, Homo sapiens
aaaaaactgtttcaa

SEQ ID NO: 1563457 - DNA, 15 bp, Homo sapiens
gaaaaaactgtttca

SEQ ID NO: 1563458 - DNA, 15 bp, Homo sapiens
agaaaaaactgtttc

SEQ ID NO: 1563459 - DNA, 15 bp, Homo sapiens
cagaaaaaactgttt

SEQ ID NO: 1563460 - DNA, 15 bp, Homo sapiens
tcagaaaaaactgtt

SEQ ID NO: 1563461 - DNA, 15 bp, Homo sapiens
ttcagaaaaaactgt

SEQ ID NO: 1563462 - DNA, 15 bp, Homo sapiens
attcagaaaaaactg

SEQ ID NO: 1563463 - DNA, 15 bp, Homo sapiens
gattcagaaaaaact

SEQ ID NO: 1563464 - DNA, 15 bp, Homo sapiens
aagattcagaaaaaa

SEQ ID NO: 1563465 - DNA, 15 bp, Homo sapiens
taagattcagaaaaa

SEQ ID NO: 1563466 - DNA, 15 bp, Homo sapiens
ataagattcagaaaa

SEQ ID NO: 1563467 - DNA, 15 bp, Homo sapiens
tataagattcagaaa

SEQ ID NO: 1563468 - DNA, 15 bp, Homo sapiens
gtataagattcagaa

SEQ ID NO: 1563469 - DNA, 15 bp, Homo sapiens
agtataagattcaga

SEQ ID NO: 1563470 - DNA, 15 bp, Homo sapiens
tagtataagattcag

SEQ ID NO: 1563471 - DNA, 15 bp, Homo sapiens
ttagtataagattca

SEQ ID NO: 1563472 - DNA, 15 bp, Homo sapiens
tttagtataagattc

SEQ ID NO: 1563473 - DNA, 15 bp, Homo sapiens
atttagtataagatt

SEQ ID NO: 1563474 - DNA, 15 bp, Homo sapiens
tatttagtataagat

SEQ ID NO: 1563475 - DNA, 15 bp, Homo sapiens
atatttagtataaga

SEQ ID NO: 1563476 - DNA, 15 bp, Homo sapiens
aatatttagtataag

SEQ ID NO: 1563477 - DNA, 15 bp, Homo sapiens
caatatttagtataa

SEQ ID NO: 1563478 - DNA, 15 bp, Homo sapiens
acaatatttagtata

SEQ ID NO: 1563479 - DNA, 15 bp, Homo sapiens
cacaatatttagtat

SEQ ID NO: 1563480 - DNA, 15 bp, Homo sapiens
tcacaatatttagta

SEQ ID NO: 1563481 - DNA, 15 bp, Homo sapiens
gtcacaatatttagt

SEQ ID NO: 1563482 - DNA, 15 bp, Homo sapiens
agtcacaatatttag

SEQ ID NO: 1563483 - DNA, 15 bp, Homo sapiens
gagtcacaatattta

SEQ ID NO: 1563484 - DNA, 15 bp, Homo sapiens
agagtcacaatattt

SEQ ID NO: 1563485 - DNA, 15 bp, Homo sapiens
gagagtcacaatatt

SEQ ID NO: 1563486 - DNA, 15 bp, Homo sapiens
ggagagtcacaatat

SEQ ID NO: 1563487 - DNA, 15 bp, Homo sapiens
aggagagtcacaata

SEQ ID NO: 1563488 - DNA, 15 bp, Homo sapiens
aaggagagtcacaat

SEQ ID NO: 1563489 - DNA, 15 bp, Homo sapiens
taaggagagtcacaa

SEQ ID NO: 1563490 - DNA, 15 bp, Homo sapiens
ataaggagagtcaca

SEQ ID NO: 1563491 - DNA, 15 bp, Homo sapiens
aataaggagagtcac

SEQ ID NO: 1563492 - DNA, 15 bp, Homo sapiens
aaataaggagagtca

SEQ ID NO: 1563493 - DNA, 15 bp, Homo sapiens
aaaataaggagagtc

SEQ ID NO: 1563494 - DNA, 15 bp, Homo sapiens
caaaataaggagagt

SEQ ID NO: 1563495 - DNA, 15 bp, Homo sapiens
acaaaataaggagag

SEQ ID NO: 1563496 - DNA, 15 bp, Homo sapiens
aacaaaataaggaga

SEQ ID NO: 1563497 - DNA, 15 bp, Homo sapiens
aaacaaaataaggag

SEQ ID NO: 1563498 - DNA, 15 bp, Homo sapiens
aaaacaaaataagga

SEQ ID NO: 1563499 - DNA, 15 bp, Homo sapiens
caaaacaaaataagg

SEQ ID NO: 1563500 - DNA, 15 bp, Homo sapiens
gcaaaacaaaataag

SEQ ID NO: 1563501 - DNA, 15 bp, Homo sapiens
ggcaaaacaaaataa

SEQ ID NO: 1563502 - DNA, 15 bp, Homo sapiens
aggcaaaacaaaata

SEQ ID NO: 1563503 - DNA, 15 bp, Homo sapiens
aaggcaaaacaaaat

SEQ ID NO: 1563504 - DNA, 15 bp, Homo sapiens
aaaggcaaaacaaaa

SEQ ID NO: 1563505 - DNA, 15 bp, Homo sapiens
caaaggcaaaacaaa

SEQ ID NO: 1563506 - DNA, 15 bp, Homo sapiens
gcaaaggcaaaacaa

SEQ ID NO: 1563507 - DNA, 15 bp, Homo sapiens
agcaaaggcaaaaca

SEQ ID NO: 1563508 - DNA, 15 bp, Homo sapiens
cagcaaaggcaaaac

SEQ ID NO: 1563509 - DNA, 15 bp, Homo sapiens
ccagcaaaggcaaaa

SEQ ID NO: 1563510 - DNA, 15 bp, Homo sapiens
gccagcaaaggcaaa

SEQ ID NO: 1563511 - DNA, 15 bp, Homo sapiens
ggccagcaaaggcaa

SEQ ID NO: 1563512 - DNA, 15 bp, Homo sapiens
tggccagcaaaggca

SEQ ID NO: 1563513 - DNA, 15 bp, Homo sapiens
ctggccagcaaaggc

SEQ ID NO: 1563514 - DNA, 15 bp, Homo sapiens
gctggccagcaaagg

SEQ ID NO: 1563515 - DNA, 15 bp, Homo sapiens
tgctggccagcaaag

SEQ ID NO: 1563516 - DNA, 15 bp, Homo sapiens
ctgctggccagcaaa

SEQ ID NO: 1563517 - DNA, 15 bp, Homo sapiens
cctgctggccagcaa

SEQ ID NO: 1563518 - DNA, 15 bp, Homo sapiens
ccctgctggccagca

SEQ ID NO: 1563519 - DNA, 15 bp, Homo sapiens
tccctgctggccagc

SEQ ID NO: 1563520 - DNA, 15 bp, Homo sapiens
ttccctgctggccag

SEQ ID NO: 1563521 - DNA, 15 bp, Homo sapiens
attccctgctggcca

SEQ ID NO: 1563522 - DNA, 15 bp, Homo sapiens
cattccctgctggcc

SEQ ID NO: 1563523 - DNA, 15 bp, Homo sapiens
ccattccctgctggc

SEQ ID NO: 1563524 - DNA, 15 bp, Homo sapiens
cccattccctgctgg

SEQ ID NO: 1563525 - DNA, 15 bp, Homo sapiens
tcccattccctgctg

SEQ ID NO: 1563526 - DNA, 15 bp, Homo sapiens
gtcccattccctgct

SEQ ID NO: 1563527 - DNA, 15 bp, Homo sapiens
agtcccattccctgc

SEQ ID NO: 1563528 - DNA, 15 bp, Homo sapiens
gagtcccattccctg

SEQ ID NO: 1563529 - DNA, 15 bp, Homo sapiens
agagtcccattccct

SEQ ID NO: 1563530 - DNA, 15 bp, Homo sapiens
cagagtcccattccc

SEQ ID NO: 1563531 - DNA, 15 bp, Homo sapiens
tcagagtcccattcc

SEQ ID NO: 1563532 - DNA, 15 bp, Homo sapiens
ctcagagtcccattc

SEQ ID NO: 1563533 - DNA, 15 bp, Homo sapiens
tctcagagtcccatt

SEQ ID NO: 1563534 - DNA, 15 bp, Homo sapiens
gtctcagagtcccat

SEQ ID NO: 1563535 - DNA, 15 bp, Homo sapiens
tgtctcagagtccca

SEQ ID NO: 1563536 - DNA, 15 bp, Homo sapiens
atgtctcagagtccc

SEQ ID NO: 1563537 - DNA, 15 bp, Homo sapiens
tatgtctcagagtcc

SEQ ID NO: 1563538 - DNA, 15 bp, Homo sapiens
atatgtctcagagtc

SEQ ID NO: 1563539 - DNA, 15 bp, Homo sapiens
aatatgtctcagagt

SEQ ID NO: 1563540 - DNA, 15 bp, Homo sapiens
taatatgtctcagag

SEQ ID NO: 1563541 - DNA, 15 bp, Homo sapiens
ctaatatgtctcaga

SEQ ID NO: 1563542 - DNA, 15 bp, Homo sapiens
tctaatatgtctcag

SEQ ID NO: 1563543 - DNA, 15 bp, Homo sapiens
atctaatatgtctca

SEQ ID NO: 1563544 - DNA, 15 bp, Homo sapiens
tatctaatatgtctc

SEQ ID NO: 1563545 - DNA, 15 bp, Homo sapiens
ttatctaatatgtct

SEQ ID NO: 1563546 - DNA, 15 bp, Homo sapiens
tttatctaatatgtc

SEQ ID NO: 1563547 - DNA, 15 bp, Homo sapiens
atttatctaatatgt

SEQ ID NO: 1563548 - DNA, 15 bp, Homo sapiens
tatttatctaatatg

SEQ ID NO: 1563549 - DNA, 15 bp, Homo sapiens
gtatttatctaatat

SEQ ID NO: 1563550 - DNA, 15 bp, Homo sapiens
ggtatttatctaata

SEQ ID NO: 1563551 - DNA, 15 bp, Homo sapiens
aggtatttatctaat

SEQ ID NO: 1563552 - DNA, 15 bp, Homo sapiens
taggtatttatctaa

SEQ ID NO: 1563553 - DNA, 15 bp, Homo sapiens
ataggtatttatcta

SEQ ID NO: 1563554 - DNA, 15 bp, Homo sapiens
tataggtatttatct

SEQ ID NO: 1563555 - DNA, 15 bp, Homo sapiens
ttataggtatttatc

SEQ ID NO: 1563556 - DNA, 15 bp, Homo sapiens
cttataggtatttat

SEQ ID NO: 1563557 - DNA, 15 bp, Homo sapiens
tcttataggtattta

SEQ ID NO: 1563558 - DNA, 15 bp, Homo sapiens
ttcttataggtattt

SEQ ID NO: 1563559 - DNA, 15 bp, Homo sapiens
tttcttataggtatt

SEQ ID NO: 1563560 - DNA, 15 bp, Homo sapiens
ctttcttataggtat

SEQ ID NO: 1563561 - DNA, 15 bp, Homo sapiens
cctttcttataggta

SEQ ID NO: 1563562 - DNA, 15 bp, Homo sapiens
tcctttcttataggt

SEQ ID NO: 1563563 - DNA, 15 bp, Homo sapiens
ttcctttcttatagg

SEQ ID NO: 1563564 - DNA, 15 bp, Homo sapiens
cttcctttcttatag

SEQ ID NO: 1563565 - DNA, 15 bp, Homo sapiens
tcttcctttcttata

SEQ ID NO: 1563566 - DNA, 15 bp, Homo sapiens
ctcttcctttcttat

SEQ ID NO: 1563567 - DNA, 15 bp, Homo sapiens
actcttcctttctta

SEQ ID NO: 1563568 - DNA, 15 bp, Homo sapiens
gactcttcctttctt

SEQ ID NO: 1563569 - DNA, 15 bp, Homo sapiens
agactcttcctttct

SEQ ID NO: 1563570 - DNA, 15 bp, Homo sapiens
aagactcttcctttc

SEQ ID NO: 1563571 - DNA, 15 bp, Homo sapiens
caagactcttccttt

SEQ ID NO: 1563572 - DNA, 15 bp, Homo sapiens
gcaagactcttcctt

SEQ ID NO: 1563573 - DNA, 15 bp, Homo sapiens
agcaagactcttcct

SEQ ID NO: 1563574 - DNA, 15 bp, Homo sapiens
cagcaagactcttcc

SEQ ID NO: 1563575 - DNA, 15 bp, Homo sapiens
gcagcaagactcttc

SEQ ID NO: 1563576 - DNA, 15 bp, Homo sapiens
tgcagcaagactctt

SEQ ID NO: 1563577 - DNA, 15 bp, Homo sapiens
gtgcagcaagactct

SEQ ID NO: 1563578 - DNA, 15 bp, Homo sapiens
agtgcagcaagactc

SEQ ID NO: 1563579 - DNA, 15 bp, Homo sapiens
gagtgcagcaagact

SEQ ID NO: 1563580 - DNA, 15 bp, Homo sapiens
tgagtgcagcaagac

SEQ ID NO: 1563581 - DNA, 15 bp, Homo sapiens
ctgagtgcagcaaga

SEQ ID NO: 1563582 - DNA, 15 bp, Homo sapiens
cctgagtgcagcaag

SEQ ID NO: 1563583 - DNA, 15 bp, Homo sapiens
ccctgagtgcagcaa

SEQ ID NO: 1563584 - DNA, 15 bp, Homo sapiens
cccctgagtgcagca

SEQ ID NO: 1563585 - DNA, 15 bp, Homo sapiens
tcccctgagtgcagc

SEQ ID NO: 1563586 - DNA, 15 bp, Homo sapiens
atcccctgagtgcag

SEQ ID NO: 1563587 - DNA, 15 bp, Homo sapiens
aatcccctgagtgca

SEQ ID NO: 1563588 - DNA, 15 bp, Homo sapiens
aaatcccctgagtgc

SEQ ID NO: 1563589 - DNA, 15 bp, Homo sapiens
taaatcccctgagtg

SEQ ID NO: 1563590 - DNA, 15 bp, Homo sapiens
ttaaatcccctgagt

SEQ ID NO: 1563591 - DNA, 15 bp, Homo sapiens
attaaatcccctgag

SEQ ID NO: 1563592 - DNA, 15 bp, Homo sapiens
cattaaatcccctga

SEQ ID NO: 1563593 - DNA, 15 bp, Homo sapiens
tcattaaatcccctg

SEQ ID NO: 1563594 - DNA, 15 bp, Homo sapiens
atcattaaatcccct

SEQ ID NO: 1563595 - DNA, 15 bp, Homo sapiens
tatcattaaatcccc

SEQ ID NO: 1563596 - DNA, 15 bp, Homo sapiens
atatcattaaatccc

SEQ ID NO: 1563597 - DNA, 15 bp, Homo sapiens
tatatcattaaatcc

SEQ ID NO: 1563598 - DNA, 15 bp, Homo sapiens
gtatatcattaaatc

SEQ ID NO: 1563599 - DNA, 15 bp, Homo sapiens
agtatatcattaaat

SEQ ID NO: 1563600 - DNA, 15 bp, Homo sapiens
cagtatatcattaaa

SEQ ID NO: 1563601 - DNA, 15 bp, Homo sapiens
acagtatatcattaa

SEQ ID NO: 1563602 - DNA, 15 bp, Homo sapiens
tacagtatatcatta

SEQ ID NO: 1563603 - DNA, 15 bp, Homo sapiens
ttacagtatatcatt

SEQ ID NO: 1563604 - DNA, 15 bp, Homo sapiens
attacagtatatcat

SEQ ID NO: 1563605 - DNA, 15 bp, Homo sapiens
tattacagtatatca

SEQ ID NO: 1563606 - DNA, 15 bp, Homo sapiens
gtattacagtatatc

SEQ ID NO: 1563607 - DNA, 15 bp, Homo sapiens
agtattacagtatat

SEQ ID NO: 1563608 - DNA, 15 bp, Homo sapiens
aagtattacagtata

SEQ ID NO: 1563609 - DNA, 15 bp, Homo sapiens
gaagtattacagtat

SEQ ID NO: 1563610 - DNA, 15 bp, Homo sapiens
ggaagtattacagta

SEQ ID NO: 1563611 - DNA, 15 bp, Homo sapiens
gggaagtattacagt

SEQ ID NO: 1563612 - DNA, 15 bp, Homo sapiens
tgggaagtattacag

SEQ ID NO: 1563613 - DNA, 15 bp, Homo sapiens
ttgggaagtattaca

SEQ ID NO: 1563614 - DNA, 15 bp, Homo sapiens
tttgggaagtattac

SEQ ID NO: 1563615 - DNA, 15 bp, Homo sapiens
ttttgggaagtatta

SEQ ID NO: 1563616 - DNA, 15 bp, Homo sapiens
attttgggaagtatt

SEQ ID NO: 1563617 - DNA, 15 bp, Homo sapiens
aattttgggaagtat

SEQ ID NO: 1563618 - DNA, 15 bp, Homo sapiens
taattttgggaagta

SEQ ID NO: 1563619 - DNA, 15 bp, Homo sapiens
ataattttgggaagt

SEQ ID NO: 1563620 - DNA, 15 bp, Homo sapiens
gataattttgggaag

SEQ ID NO: 1563621 - DNA, 15 bp, Homo sapiens
tgataattttgggaa

SEQ ID NO: 1563622 - DNA, 15 bp, Homo sapiens
atgataattttggga

SEQ ID NO: 1563623 - DNA, 15 bp, Homo sapiens
gatgataattttggg

SEQ ID NO: 1563624 - DNA, 15 bp, Homo sapiens
agatgataattttgg

SEQ ID NO: 1563625 - DNA, 15 bp, Homo sapiens
cagatgataattttg

SEQ ID NO: 1563626 - DNA, 15 bp, Homo sapiens
tcagatgataatttt

SEQ ID NO: 1563627 - DNA, 15 bp, Homo sapiens
ctcagatgataattt

SEQ ID NO: 1563628 - DNA, 15 bp, Homo sapiens
tctcagatgataatt

SEQ ID NO: 1563629 - DNA, 15 bp, Homo sapiens
ctctcagatgataat

SEQ ID NO: 1563630 - DNA, 15 bp, Homo sapiens
tctctcagatgataa

SEQ ID NO: 1563631 - DNA, 15 bp, Homo sapiens
ttctctcagatgata

SEQ ID NO: 1563632 - DNA, 15 bp, Homo sapiens
attctctcagatgat

SEQ ID NO: 1563633 - DNA, 15 bp, Homo sapiens
tattctctcagatga

SEQ ID NO: 1563634 - DNA, 15 bp, Homo sapiens
atattctctcagatg

SEQ ID NO: 1563635 - DNA, 15 bp, Homo sapiens
tatattctctcagat

SEQ ID NO: 1563636 - DNA, 15 bp, Homo sapiens
atatattctctcaga

SEQ ID NO: 1563637 - DNA, 15 bp, Homo sapiens
catatattctctcag

SEQ ID NO: 1563638 - DNA, 15 bp, Homo sapiens
tcatatattctctca

SEQ ID NO: 1563639 - DNA, 15 bp, Homo sapiens
ttcatatattctctc

SEQ ID NO: 1563640 - DNA, 15 bp, Homo sapiens
attcatatattctct

SEQ ID NO: 1563641 - DNA, 15 bp, Homo sapiens
tattcatatattctc

SEQ ID NO: 1563642 - DNA, 15 bp, Homo sapiens
catattcatatattc

SEQ ID NO: 1563643 - DNA, 15 bp, Homo sapiens
ccatattcatatatt

SEQ ID NO: 1563644 - DNA, 15 bp, Homo sapiens
accatattcatatat

SEQ ID NO: 1563645 - DNA, 15 bp, Homo sapiens
taccatattcatata

SEQ ID NO: 1563646 - DNA, 15 bp, Homo sapiens
ataccatattcatat

SEQ ID NO: 1563647 - DNA, 15 bp, Homo sapiens
cataccatattcata

SEQ ID NO: 1563648 - DNA, 15 bp, Homo sapiens
tcataccatattcat

SEQ ID NO: 1563649 - DNA, 15 bp, Homo sapiens
ttcataccatattca

SEQ ID NO: 1563650 - DNA, 15 bp, Homo sapiens
cttcataccatattc

SEQ ID NO: 1563651 - DNA, 15 bp, Homo sapiens
gcttcataccatatt

SEQ ID NO: 1563652 - DNA, 15 bp, Homo sapiens
agcttcataccatat

SEQ ID NO: 1563653 - DNA, 15 bp, Homo sapiens
cagcttcataccata

SEQ ID NO: 1563654 - DNA, 15 bp, Homo sapiens
acagcttcataccat

SEQ ID NO: 1563655 - DNA, 15 bp, Homo sapiens
tacagcttcatacca

SEQ ID NO: 1563656 - DNA, 15 bp, Homo sapiens
ttacagcttcatacc

SEQ ID NO: 1563657 - DNA, 15 bp, Homo sapiens
attacagcttcatac

SEQ ID NO: 1563658 - DNA, 15 bp, Homo sapiens
tattacagcttcata

SEQ ID NO: 1563659 - DNA, 15 bp, Homo sapiens
ctattacagcttcat

SEQ ID NO: 1563660 - DNA, 15 bp, Homo sapiens
actattacagcttca

SEQ ID NO: 1563661 - DNA, 15 bp, Homo sapiens
tactattacagcttc

SEQ ID NO: 1563662 - DNA, 15 bp, Homo sapiens
gtactattacagctt

SEQ ID NO: 1563663 - DNA, 15 bp, Homo sapiens
agtactattacagct

SEQ ID NO: 1563664 - DNA, 15 bp, Homo sapiens
tagtactattacagc

SEQ ID NO: 1563665 - DNA, 15 bp, Homo sapiens
atagtactattacag

SEQ ID NO: 1563666 - DNA, 15 bp, Homo sapiens
aatagtactattaca

SEQ ID NO: 1563667 - DNA, 15 bp, Homo sapiens
aaatagtactattac

SEQ ID NO: 1563668 - DNA, 15 bp, Homo sapiens
caaatagtactatta

SEQ ID NO: 1563669 - DNA, 15 bp, Homo sapiens
gcaaatagtactatt

SEQ ID NO: 1563670 - DNA, 15 bp, Homo sapiens
ggcaaatagtactat

SEQ ID NO: 1563671 - DNA, 15 bp, Homo sapiens
cggcaaatagtacta

SEQ ID NO: 1563672 - DNA, 15 bp, Homo sapiens
acggcaaatagtact

SEQ ID NO: 1563673 - DNA, 15 bp, Homo sapiens
cacggcaaatagtac

SEQ ID NO: 1563674 - DNA, 15 bp, Homo sapiens
gcacggcaaatagta

SEQ ID NO: 1563675 - DNA, 15 bp, Homo sapiens
agcacggcaaatagt

SEQ ID NO: 1563676 - DNA, 15 bp, Homo sapiens
aagcacggcaaatag

SEQ ID NO: 1563677 - DNA, 15 bp, Homo sapiens
aaagcacggcaaata

SEQ ID NO: 1563678 - DNA, 15 bp, Homo sapiens
gaaagcacggcaaat

SEQ ID NO: 1563679 - DNA, 15 bp, Homo sapiens
agaaagcacggcaaa

SEQ ID NO: 1563680 - DNA, 15 bp, Homo sapiens
aagaaagcacggcaa

SEQ ID NO: 1563681 - DNA, 15 bp, Homo sapiens
aaagaaagcacggca

SEQ ID NO: 1563682 - DNA, 15 bp, Homo sapiens
caaagaaagcacggc

SEQ ID NO: 1563683 - DNA, 15 bp, Homo sapiens
tcaaagaaagcacgg

SEQ ID NO: 1563684 - DNA, 15 bp, Homo sapiens
ttcaaagaaagcacg

SEQ ID NO: 1563685 - DNA, 15 bp, Homo sapiens
tttcaaagaaagcac

SEQ ID NO: 1563686 - DNA, 15 bp, Homo sapiens
ttttcaaagaaagca

SEQ ID NO: 1563687 - DNA, 15 bp, Homo sapiens
cttttcaaagaaagc

SEQ ID NO: 1563688 - DNA, 15 bp, Homo sapiens
tcttttcaaagaaag

SEQ ID NO: 1563689 - DNA, 15 bp, Homo sapiens
gtcttttcaaagaaa

SEQ ID NO: 1563690 - DNA, 15 bp, Homo sapiens
tgtcttttcaaagaa

SEQ ID NO: 1563691 - DNA, 15 bp, Homo sapiens
ttgtcttttcaaaga

SEQ ID NO: 1563692 - DNA, 15 bp, Homo sapiens
tttgtcttttcaaag

SEQ ID NO: 1563693 - DNA, 15 bp, Homo sapiens
ttttgtcttttcaaa

SEQ ID NO: 1563694 - DNA, 15 bp, Homo sapiens
tttttgtcttttcaa

SEQ ID NO: 1563695 - DNA, 15 bp, Homo sapiens
ctttttgtcttttca

SEQ ID NO: 1563696 - DNA, 15 bp, Homo sapiens
tctttttgtcttttc

SEQ ID NO: 1563697 - DNA, 15 bp, Homo sapiens
gtctttttgtctttt

SEQ ID NO: 1563698 - DNA, 15 bp, Homo sapiens
tgtctttttgtcttt

SEQ ID NO: 1563699 - DNA, 15 bp, Homo sapiens
atgtctttttgtctt

SEQ ID NO: 1563700 - DNA, 15 bp, Homo sapiens
catgtctttttgtct

SEQ ID NO: 1563701 - DNA, 15 bp, Homo sapiens
gcatgtctttttgtc

SEQ ID NO: 1563702 - DNA, 15 bp, Homo sapiens
agcatgtctttttgt

SEQ ID NO: 1563703 - DNA, 15 bp, Homo sapiens
aagcatgtctttttg

SEQ ID NO: 1563704 - DNA, 15 bp, Homo sapiens
gaagcatgtcttttt

SEQ ID NO: 1563705 - DNA, 15 bp, Homo sapiens
agaagcatgtctttt

SEQ ID NO: 1563706 - DNA, 15 bp, Homo sapiens
gagaagcatgtcttt

SEQ ID NO: 1563707 - DNA, 15 bp, Homo sapiens
tgagaagcatgtctt

SEQ ID NO: 1563708 - DNA, 15 bp, Homo sapiens
ttgagaagcatgtct

SEQ ID NO: 1563709 - DNA, 15 bp, Homo sapiens
attgagaagcatgtc

SEQ ID NO: 1563710 - DNA, 15 bp, Homo sapiens
aattgagaagcatgt

SEQ ID NO: 1563711 - DNA, 15 bp, Homo sapiens
taattgagaagcatg

SEQ ID NO: 1563712 - DNA, 15 bp, Homo sapiens
gtaattgagaagcat

SEQ ID NO: 1563713 - DNA, 15 bp, Homo sapiens
ggtaattgagaagca

SEQ ID NO: 1563714 - DNA, 15 bp, Homo sapiens
cggtaattgagaagc

SEQ ID NO: 1563715 - DNA, 15 bp, Homo sapiens
tcggtaattgagaag

SEQ ID NO: 1563716 - DNA, 15 bp, Homo sapiens
ttcggtaattgagaa

SEQ ID NO: 1563717 - DNA, 15 bp, Homo sapiens
tttcggtaattgaga

SEQ ID NO: 1563718 - DNA, 15 bp, Homo sapiens
ctttcggtaattgag

SEQ ID NO: 1563719 - DNA, 15 bp, Homo sapiens
tctttcggtaattga

SEQ ID NO: 1563720 - DNA, 15 bp, Homo sapiens
ttctttcggtaattg

SEQ ID NO: 1563721 - DNA, 15 bp, Homo sapiens
tttctttcggtaatt

SEQ ID NO: 1563722 - DNA, 15 bp, Homo sapiens
ttttctttcggtaat

SEQ ID NO: 1563723 - DNA, 15 bp, Homo sapiens
attttctttcggtaa

SEQ ID NO: 1563724 - DNA, 15 bp, Homo sapiens
tattttctttcggta

SEQ ID NO: 1563725 - DNA, 15 bp, Homo sapiens
ctattttctttcggt

SEQ ID NO: 1563726 - DNA, 15 bp, Homo sapiens
cctattttctttcgg

SEQ ID NO: 1563727 - DNA, 15 bp, Homo sapiens
tcctattttctttcg

SEQ ID NO: 1563728 - DNA, 15 bp, Homo sapiens
atcctattttctttc

SEQ ID NO: 1563729 - DNA, 15 bp, Homo sapiens
aatcctattttcttt

SEQ ID NO: 1563730 - DNA, 15 bp, Homo sapiens
gaatcctattttctt

SEQ ID NO: 1563731 - DNA, 15 bp, Homo sapiens
agaatcctattttct

SEQ ID NO: 1563732 - DNA, 15 bp, Homo sapiens
aagaatcctattttc

SEQ ID NO: 1563733 - DNA, 15 bp, Homo sapiens
aaagaatcctatttt

SEQ ID NO: 1563734 - DNA, 15 bp, Homo sapiens
aaaagaatcctattt

SEQ ID NO: 1563735 - DNA, 15 bp, Homo sapiens
aaaaagaatcctatt

SEQ ID NO: 1563736 - DNA, 15 bp, Homo sapiens
aaaaaagaatcctat

SEQ ID NO: 1563737 - DNA, 15 bp, Homo sapiens
aaaaaaagaatccta

SEQ ID NO: 1563738 - DNA, 15 bp, Homo sapiens
aaaaaaaagaatcct

SEQ ID NO: 1563739 - DNA, 15 bp, Homo sapiens
gaaaaaaaagaatcc

SEQ ID NO: 1563740 - DNA, 15 bp, Homo sapiens
agaaaaaaaagaatc

SEQ ID NO: 1563741 - DNA, 15 bp, Homo sapiens
aagaaaaaaaagaat

SEQ ID NO: 1563742 - DNA, 15 bp, Homo sapiens
caagaaaagaaaaaa

SEQ ID NO: 1563743 - DNA, 15 bp, Homo sapiens
tcaagaaaagaaaaa

SEQ ID NO: 1563744 - DNA, 15 bp, Homo sapiens
atcaagaaaagaaaa

SEQ ID NO: 1563745 - DNA, 15 bp, Homo sapiens
tatcaagaaaagaaa

SEQ ID NO: 1563746 - DNA, 15 bp, Homo sapiens
atatcaagaaaagaa

SEQ ID NO: 1563747 - DNA, 15 bp, Homo sapiens
catatcaagaaaaga

SEQ ID NO: 1563748 - DNA, 15 bp, Homo sapiens
tcatatcaagaaaag

SEQ ID NO: 1563749 - DNA, 15 bp, Homo sapiens
ttcatatcaagaaaa

SEQ ID NO: 1563750 - DNA, 15 bp, Homo sapiens
cttcatatcaagaaa

SEQ ID NO: 1563751 - DNA, 15 bp, Homo sapiens
acttcatatcaagaa

SEQ ID NO: 1563752 - DNA, 15 bp, Homo sapiens
gacttcatatcaaga

SEQ ID NO: 1563753 - DNA, 15 bp, Homo sapiens
agacttcatatcaag

SEQ ID NO: 1563754 - DNA, 15 bp, Homo sapiens
aagacttcatatcaa

SEQ ID NO: 1563755 - DNA, 15 bp, Homo sapiens
caagacttcatatca

SEQ ID NO: 1563756 - DNA, 15 bp, Homo sapiens
acaagacttcatatc

SEQ ID NO: 1563757 - DNA, 15 bp, Homo sapiens
aacaagacttcatat

SEQ ID NO: 1563758 - DNA, 15 bp, Homo sapiens
gaacaagacttcata

SEQ ID NO: 1563759 - DNA, 15 bp, Homo sapiens
agaacaagacttcat

SEQ ID NO: 1563760 - DNA, 15 bp, Homo sapiens
cagaacaagacttca

SEQ ID NO: 1563761 - DNA, 15 bp, Homo sapiens
acagaacaagacttc

SEQ ID NO: 1563762 - DNA, 15 bp, Homo sapiens
aacagaacaagactt

SEQ ID NO: 1563763 - DNA, 15 bp, Homo sapiens
gaacagaacaagact

SEQ ID NO: 1563764 - DNA, 15 bp, Homo sapiens
tgaacagaacaagac

SEQ ID NO: 1563765 - DNA, 15 bp, Homo sapiens
gtgaacagaacaaga

SEQ ID NO: 1563766 - DNA, 15 bp, Homo sapiens
ggtgaacagaacaag

SEQ ID NO: 1563767 - DNA, 15 bp, Homo sapiens
gggtgaacagaacaa

SEQ ID NO: 1563768 - DNA, 15 bp, Homo sapiens
tgggtgaacagaaca

SEQ ID NO: 1563769 - DNA, 15 bp, Homo sapiens
ctgggtgaacagaac

SEQ ID NO: 1563770 - DNA, 15 bp, Homo sapiens
cctgggtgaacagaa

SEQ ID NO: 1563771 - DNA, 15 bp, Homo sapiens
gcctgggtgaacaga

SEQ ID NO: 1563772 - DNA, 15 bp, Homo sapiens
agcctgggtgaacag

SEQ ID NO: 1563773 - DNA, 15 bp, Homo sapiens
cagcctgggtgaaca

SEQ ID NO: 1563774 - DNA, 15 bp, Homo sapiens
ccagcctgggtgaac

SEQ ID NO: 1563775 - DNA, 15 bp, Homo sapiens
tccagcctgggtgaa

SEQ ID NO: 1563776 - DNA, 15 bp, Homo sapiens
tgagattgcgccact

SEQ ID NO: 1563777 - DNA, 15 bp, Homo sapiens
ctgagattgcgccac

SEQ ID NO: 1563778 - DNA, 15 bp, Homo sapiens
gctgagattgcgcca

SEQ ID NO: 1563779 - DNA, 15 bp, Homo sapiens
agctgagattgcgcc

SEQ ID NO: 1563780 - DNA, 15 bp, Homo sapiens
gagctgagattgcgc

SEQ ID NO: 1563781 - DNA, 15 bp, Homo sapiens
tgagctgagattgcg

SEQ ID NO: 1563782 - DNA, 15 bp, Homo sapiens
gcccgggaggcagag

SEQ ID NO: 1563783 - DNA, 15 bp, Homo sapiens
agcccgggaggcaga

SEQ ID NO: 1563784 - DNA, 15 bp, Homo sapiens
gagcccgggaggcag

SEQ ID NO: 1563785 - DNA, 15 bp, Homo sapiens
tgagcccgggaggca

SEQ ID NO: 1563786 - DNA, 15 bp, Homo sapiens
ttgagcccgggaggc

SEQ ID NO: 1563787 - DNA, 15 bp, Homo sapiens
cttgagcccgggagg

SEQ ID NO: 1563788 - DNA, 15 bp, Homo sapiens
gcttgagcccgggag

SEQ ID NO: 1563789 - DNA, 15 bp, Homo sapiens
tgcttgagcccggga

SEQ ID NO: 1563790 - DNA, 15 bp, Homo sapiens
ttgcttgagcccggg

SEQ ID NO: 1563791 - DNA, 15 bp, Homo sapiens
attgcttgagcccgg

SEQ ID NO: 1563792 - DNA, 15 bp, Homo sapiens
aattgcttgagcccg

SEQ ID NO: 1563793 - DNA, 15 bp, Homo sapiens
agggaggatgaggca

SEQ ID NO: 1563794 - DNA, 15 bp, Homo sapiens
tagggaggatgaggc

SEQ ID NO: 1563795 - DNA, 15 bp, Homo sapiens
ctagggaggatgagg

SEQ ID NO: 1563796 - DNA, 15 bp, Homo sapiens
actagggaggatgag

SEQ ID NO: 1563797 - DNA, 15 bp, Homo sapiens
tactagggaggatga

SEQ ID NO: 1563798 - DNA, 15 bp, Homo sapiens
ctactagggaggatg

SEQ ID NO: 1563799 - DNA, 15 bp, Homo sapiens
gctactagggaggat

SEQ ID NO: 1563800 - DNA, 15 bp, Homo sapiens
agctactagggagga

SEQ ID NO: 1563801 - DNA, 15 bp, Homo sapiens
acccagctactaggg

SEQ ID NO: 1563802 - DNA, 15 bp, Homo sapiens
aacccagctactagg

SEQ ID NO: 1563803 - DNA, 15 bp, Homo sapiens
aaacccagctactag

SEQ ID NO: 1563804 - DNA, 15 bp, Homo sapiens
taaacccagctacta

SEQ ID NO: 1563805 - DNA, 15 bp, Homo sapiens
gtaaacccagctact

SEQ ID NO: 1563806 - DNA, 15 bp, Homo sapiens
tgtaaacccagctac

SEQ ID NO: 1563807 - DNA, 15 bp, Homo sapiens
ctgtaaacccagcta

SEQ ID NO: 1563808 - DNA, 15 bp, Homo sapiens
cctgtaaacccagct

SEQ ID NO: 1563809 - DNA, 15 bp, Homo sapiens
gcctgtaaacccagc

SEQ ID NO: 1563810 - DNA, 15 bp, Homo sapiens
tgcctgtaaacccag

SEQ ID NO: 1563811 - DNA, 15 bp, Homo sapiens
gtgcctgtaaaccca

SEQ ID NO: 1563812 - DNA, 15 bp, Homo sapiens
tgtgcctgtaaaccc

SEQ ID NO: 1563813 - DNA, 15 bp, Homo sapiens
gtgtgcctgtaaacc

SEQ ID NO: 1563814 - DNA, 15 bp, Homo sapiens
cgtgtgcctgtaaac

SEQ ID NO: 1563815 - DNA, 15 bp, Homo sapiens
acgtgtgcctgtaaa

SEQ ID NO: 1563816 - DNA, 15 bp, Homo sapiens
gacgtgtgcctgtaa

SEQ ID NO: 1563817 - DNA, 15 bp, Homo sapiens
tgacgtgtgcctgta

SEQ ID NO: 1563818 - DNA, 15 bp, Homo sapiens
gtgacgtgtgcctgt

SEQ ID NO: 1563819 - DNA, 15 bp, Homo sapiens
ggtgacgtgtgcctg

SEQ ID NO: 1563820 - DNA, 15 bp, Homo sapiens
tggtgacgtgtgcct

SEQ ID NO: 1563821 - DNA, 15 bp, Homo sapiens
gtggtgacgtgtgcc

SEQ ID NO: 1563822 - DNA, 15 bp, Homo sapiens
tgtggtgacgtgtgc

SEQ ID NO: 1563823 - DNA, 15 bp, Homo sapiens
atgtggtgacgtgtg

SEQ ID NO: 1563824 - DNA, 15 bp, Homo sapiens
gatgtggtgacgtgt

SEQ ID NO: 1563825 - DNA, 15 bp, Homo sapiens
agatgtggtgacgtg

SEQ ID NO: 1563826 - DNA, 15 bp, Homo sapiens
cagatgtggtgacgt

SEQ ID NO: 1563827 - DNA, 15 bp, Homo sapiens
ccagatgtggtgacg

SEQ ID NO: 1563828 - DNA, 15 bp, Homo sapiens
gccagatgtggtgac

SEQ ID NO: 1563829 - DNA, 15 bp, Homo sapiens
agccagatgtggtga

SEQ ID NO: 1563830 - DNA, 15 bp, Homo sapiens
ttagccagatgtggt

SEQ ID NO: 1563831 - DNA, 15 bp, Homo sapiens
gttagccagatgtgg

SEQ ID NO: 1563832 - DNA, 15 bp, Homo sapiens
agttagccagatgtg

SEQ ID NO: 1563833 - DNA, 15 bp, Homo sapiens
aagttagccagatgt

SEQ ID NO: 1563834 - DNA, 15 bp, Homo sapiens
aaagttagccagatg

SEQ ID NO: 1563835 - DNA, 15 bp, Homo sapiens
aaaagttagccagat

SEQ ID NO: 1563836 - DNA, 15 bp, Homo sapiens
caaaagttagccaga

SEQ ID NO: 1563837 - DNA, 15 bp, Homo sapiens
acaaaagttagccag

SEQ ID NO: 1563838 - DNA, 15 bp, Homo sapiens
tacaaaagttagcca

SEQ ID NO: 1563839 - DNA, 15 bp, Homo sapiens
atacaaaagttagcc

SEQ ID NO: 1563840 - DNA, 15 bp, Homo sapiens
aatacaaaagttagc

SEQ ID NO: 1563841 - DNA, 15 bp, Homo sapiens
aaatacaaaagttag

SEQ ID NO: 1563842 - DNA, 15 bp, Homo sapiens
aaaatacaaaagtta

SEQ ID NO: 1563843 - DNA, 15 bp, Homo sapiens
aaaaatacaaaagtt

SEQ ID NO: 1563844 - DNA, 15 bp, Homo sapiens
taaaaatacaaaagt

SEQ ID NO: 1563845 - DNA, 15 bp, Homo sapiens
tgaaactctgtctct

SEQ ID NO: 1563846 - DNA, 15 bp, Homo sapiens
ggtgaaactctgtct

SEQ ID NO: 1563847 - DNA, 15 bp, Homo sapiens
tggtgaaactctgtc

SEQ ID NO: 1563848 - DNA, 15 bp, Homo sapiens
atggtgaaactctgt

SEQ ID NO: 1563849 - DNA, 15 bp, Homo sapiens
catggtgaaactctg

SEQ ID NO: 1563850 - DNA, 15 bp, Homo sapiens
acatggtgaaactct

SEQ ID NO: 1563851 - DNA, 15 bp, Homo sapiens
tatcacctgaggtca

SEQ ID NO: 1563852 - DNA, 15 bp, Homo sapiens
gtatcacctgaggtc

SEQ ID NO: 1563853 - DNA, 15 bp, Homo sapiens
tgtatcacctgaggt

SEQ ID NO: 1563854 - DNA, 15 bp, Homo sapiens
gtgtatcacctgagg

SEQ ID NO: 1563855 - DNA, 15 bp, Homo sapiens
ggtgtatcacctgag

SEQ ID NO: 1563856 - DNA, 15 bp, Homo sapiens
gggtgtatcacctga

SEQ ID NO: 1563857 - DNA, 15 bp, Homo sapiens
agggtgtatcacctg

SEQ ID NO: 1563858 - DNA, 15 bp, Homo sapiens
gagggtgtatcacct

SEQ ID NO: 1563859 - DNA, 15 bp, Homo sapiens
ggagggtgtatcacc

SEQ ID NO: 1563860 - DNA, 15 bp, Homo sapiens
aggagggtgtatcac

SEQ ID NO: 1563861 - DNA, 15 bp, Homo sapiens
gaggagggtgtatca

SEQ ID NO: 1563862 - DNA, 15 bp, Homo sapiens
cgaggagggtgtatc

SEQ ID NO: 1563863 - DNA, 15 bp, Homo sapiens
ccgaggagggtgtat

SEQ ID NO: 1563864 - DNA, 15 bp, Homo sapiens
gccgaggagggtgta

SEQ ID NO: 1563865 - DNA, 15 bp, Homo sapiens
ggccgaggagggtgt

SEQ ID NO: 1563866 - DNA, 15 bp, Homo sapiens
cggccgggcatggtg

SEQ ID NO: 1563867 - DNA, 15 bp, Homo sapiens
ccggccgggcatggt

SEQ ID NO: 1563868 - DNA, 15 bp, Homo sapiens
tccggccgggcatgg

SEQ ID NO: 1563869 - DNA, 15 bp, Homo sapiens
ttccggccgggcatg

SEQ ID NO: 1563870 - DNA, 15 bp, Homo sapiens
cttccggccgggcat

SEQ ID NO: 1563871 - DNA, 15 bp, Homo sapiens
tcttccggccgggca

SEQ ID NO: 1563872 - DNA, 15 bp, Homo sapiens
atcttccggccgggc

SEQ ID NO: 1563873 - DNA, 15 bp, Homo sapiens
tatcttccggccggg

SEQ ID NO: 1563874 - DNA, 15 bp, Homo sapiens
ctatcttccggccgg

SEQ ID NO: 1563875 - DNA, 15 bp, Homo sapiens
cctatcttccggccg

SEQ ID NO: 1563876 - DNA, 15 bp, Homo sapiens
tcctatcttccggcc

SEQ ID NO: 1563877 - DNA, 15 bp, Homo sapiens
atcctatcttccggc

SEQ ID NO: 1563878 - DNA, 15 bp, Homo sapiens
aatcctatcttccgg

SEQ ID NO: 1563879 - DNA, 15 bp, Homo sapiens
gaatcctatcttccg

SEQ ID NO: 1563880 - DNA, 15 bp, Homo sapiens
agaatcctatcttcc

SEQ ID NO: 1563881 - DNA, 15 bp, Homo sapiens
aagaatcctatcttc

SEQ ID NO: 1563882 - DNA, 15 bp, Homo sapiens
caagaatcctatctt

SEQ ID NO: 1563883 - DNA, 15 bp, Homo sapiens
tcaagaatcctatct

SEQ ID NO: 1563884 - DNA, 15 bp, Homo sapiens
ttcaagaatcctatc

SEQ ID NO: 1563885 - DNA, 15 bp, Homo sapiens
tttcaagaatcctat

SEQ ID NO: 1563886 - DNA, 15 bp, Homo sapiens
atttcaagaatccta

SEQ ID NO: 1563887 - DNA, 15 bp, Homo sapiens
aatttcaagaatcct

SEQ ID NO: 1563888 - DNA, 15 bp, Homo sapiens
taatttcaagaatcc

SEQ ID NO: 1563889 - DNA, 15 bp, Homo sapiens
ttaatttcaagaatc

SEQ ID NO: 1563890 - DNA, 15 bp, Homo sapiens
cttaatttcaagaat

SEQ ID NO: 1563891 - DNA, 15 bp, Homo sapiens
tcttaatttcaagaa

SEQ ID NO: 1563892 - DNA, 15 bp, Homo sapiens
atcttaatttcaaga

SEQ ID NO: 1563893 - DNA, 15 bp, Homo sapiens
aatcttaatttcaag

SEQ ID NO: 1563894 - DNA, 15 bp, Homo sapiens
caatcttaatttcaa

SEQ ID NO: 1563895 - DNA, 15 bp, Homo sapiens
gcaatcttaatttca

SEQ ID NO: 1563896 - DNA, 15 bp, Homo sapiens
agcaatcttaatttc

SEQ ID NO: 1563897 - DNA, 15 bp, Homo sapiens
gagcaatcttaattt

SEQ ID NO: 1563898 - DNA, 15 bp, Homo sapiens
tgagcaatcttaatt

SEQ ID NO: 1563899 - DNA, 15 bp, Homo sapiens
ctgagcaatcttaat

SEQ ID NO: 1563900 - DNA, 15 bp, Homo sapiens
actgagcaatcttaa

SEQ ID NO: 1563901 - DNA, 15 bp, Homo sapiens
aactgagcaatctta

SEQ ID NO: 1563902 - DNA, 15 bp, Homo sapiens
taactgagcaatctt

SEQ ID NO: 1563903 - DNA, 15 bp, Homo sapiens
gtaactgagcaatct

SEQ ID NO: 1563904 - DNA, 15 bp, Homo sapiens
tgtaactgagcaatc

SEQ ID NO: 1563905 - DNA, 15 bp, Homo sapiens
atgtaactgagcaat

SEQ ID NO: 1563906 - DNA, 15 bp, Homo sapiens
gatgtaactgagcaa

SEQ ID NO: 1563907 - DNA, 15 bp, Homo sapiens
tgatgtaactgagca

SEQ ID NO: 1563908 - DNA, 15 bp, Homo sapiens
ttgatgtaactgagc

SEQ ID NO: 1563909 - DNA, 15 bp, Homo sapiens
gttgatgtaactgag

SEQ ID NO: 1563910 - DNA, 15 bp, Homo sapiens
tgttgatgtaactga

SEQ ID NO: 1563911 - DNA, 15 bp, Homo sapiens
atgttgatgtaactg

SEQ ID NO: 1563912 - DNA, 15 bp, Homo sapiens
aatgttgatgtaact

SEQ ID NO: 1563913 - DNA, 15 bp, Homo sapiens
aaatgttgatgtaac

SEQ ID NO: 1563914 - DNA, 15 bp, Homo sapiens
taaatgttgatgtaa

SEQ ID NO: 1563915 - DNA, 15 bp, Homo sapiens
ataaatgttgatgta

SEQ ID NO: 1563916 - DNA, 15 bp, Homo sapiens
tataaatgttgatgt

SEQ ID NO: 1563917 - DNA, 15 bp, Homo sapiens
ctataaatgttgatg

SEQ ID NO: 1563918 - DNA, 15 bp, Homo sapiens
tctataaatgttgat

SEQ ID NO: 1563919 - DNA, 15 bp, Homo sapiens
ttctataaatgttga

SEQ ID NO: 1563920 - DNA, 15 bp, Homo sapiens
attctataaatgttg

SEQ ID NO: 1563921 - DNA, 15 bp, Homo sapiens
aattctataaatgtt

SEQ ID NO: 1563922 - DNA, 15 bp, Homo sapiens
aaattctataaatgt

SEQ ID NO: 1563923 - DNA, 15 bp, Homo sapiens
aaaattctataaatg

SEQ ID NO: 1563924 - DNA, 15 bp, Homo sapiens
aaaaattctataaat

SEQ ID NO: 1563925 - DNA, 15 bp, Homo sapiens
caaaaattctataaa

SEQ ID NO: 1563926 - DNA, 15 bp, Homo sapiens
acaaaaattctataa

SEQ ID NO: 1563927 - DNA, 15 bp, Homo sapiens
gacaaaaattctata

SEQ ID NO: 1563928 - DNA, 15 bp, Homo sapiens
agacaaaaattctat

SEQ ID NO: 1563929 - DNA, 15 bp, Homo sapiens
gagacaaaaattcta

SEQ ID NO: 1563930 - DNA, 15 bp, Homo sapiens
agagacaaaaattct

SEQ ID NO: 1563931 - DNA, 15 bp, Homo sapiens
cagagacaaaaattc

SEQ ID NO: 1563932 - DNA, 15 bp, Homo sapiens
tcagagacaaaaatt

SEQ ID NO: 1563933 - DNA, 15 bp, Homo sapiens
ctcagagacaaaaat

SEQ ID NO: 1563934 - DNA, 15 bp, Homo sapiens
tctcagagacaaaaa

SEQ ID NO: 1563935 - DNA, 15 bp, Homo sapiens
ttctcagagacaaaa

SEQ ID NO: 1563936 - DNA, 15 bp, Homo sapiens
cttctcagagacaaa

SEQ ID NO: 1563937 - DNA, 15 bp, Homo sapiens
acttctcagagacaa

SEQ ID NO: 1563938 - DNA, 15 bp, Homo sapiens
tacttctcagagaca

SEQ ID NO: 1563939 - DNA, 15 bp, Homo sapiens
gtacttctcagagac

SEQ ID NO: 1563940 - DNA, 15 bp, Homo sapiens
tgtacttctcagaga

SEQ ID NO: 1563941 - DNA, 15 bp, Homo sapiens
gtgtacttctcagag

SEQ ID NO: 1563942 - DNA, 15 bp, Homo sapiens
ggtgtacttctcaga

SEQ ID NO: 1563943 - DNA, 15 bp, Homo sapiens
aggtgtacttctcag

SEQ ID NO: 1563944 - DNA, 15 bp, Homo sapiens
caggtgtacttctca

SEQ ID NO: 1563945 - DNA, 15 bp, Homo sapiens
tcaggtgtacttctc

SEQ ID NO: 1563946 - DNA, 15 bp, Homo sapiens
ttcaggtgtacttct

SEQ ID NO: 1563947 - DNA, 15 bp, Homo sapiens
tttcaggtgtacttc

SEQ ID NO: 1563948 - DNA, 15 bp, Homo sapiens
atttcaggtgtactt

SEQ ID NO: 1563949 - DNA, 15 bp, Homo sapiens
catttcaggtgtact

SEQ ID NO: 1563950 - DNA, 15 bp, Homo sapiens
gcatttcaggtgtac

SEQ ID NO: 1563951 - DNA, 15 bp, Homo sapiens
agcatttcaggtgta

SEQ ID NO: 1563952 - DNA, 15 bp, Homo sapiens
cagcatttcaggtgt

SEQ ID NO: 1563953 - DNA, 15 bp, Homo sapiens
gcagcatttcaggtg

SEQ ID NO: 1563954 - DNA, 15 bp, Homo sapiens
cgcagcatttcaggt

SEQ ID NO: 1563955 - DNA, 15 bp, Homo sapiens
tcgcagcatttcagg

SEQ ID NO: 1563956 - DNA, 15 bp, Homo sapiens
ctcgcagcatttcag

SEQ ID NO: 1563957 - DNA, 15 bp, Homo sapiens
tctcgcagcatttca

SEQ ID NO: 1563958 - DNA, 15 bp, Homo sapiens
gtctcgcagcatttc

SEQ ID NO: 1563959 - DNA, 15 bp, Homo sapiens
agtctcgcagcattt

SEQ ID NO: 1563960 - DNA, 15 bp, Homo sapiens
gagtctcgcagcatt

SEQ ID NO: 1563961 - DNA, 15 bp, Homo sapiens
tgagtctcgcagcat

SEQ ID NO: 1563962 - DNA, 15 bp, Homo sapiens
atgagtctcgcagca

SEQ ID NO: 1563963 - DNA, 15 bp, Homo sapiens
aatgagtctcgcagc

SEQ ID NO: 1563964 - DNA, 15 bp, Homo sapiens
aaatgagtctcgcag

SEQ ID NO: 1563965 - DNA, 15 bp, Homo sapiens
gaaatgagtctcgca

SEQ ID NO: 1563966 - DNA, 15 bp, Homo sapiens
ggaaatgagtctcgc

SEQ ID NO: 1563967 - DNA, 15 bp, Homo sapiens
tggaaatgagtctcg

SEQ ID NO: 1563968 - DNA, 15 bp, Homo sapiens
atggaaatgagtctc

SEQ ID NO: 1563969 - DNA, 15 bp, Homo sapiens
aatggaaatgagtct

SEQ ID NO: 1563970 - DNA, 15 bp, Homo sapiens
aaatggaaatgagtc

SEQ ID NO: 1563971 - DNA, 15 bp, Homo sapiens
aaaatggaaatgagt

SEQ ID NO: 1563972 - DNA, 15 bp, Homo sapiens
taaaatggaaatgag

SEQ ID NO: 1563973 - DNA, 15 bp, Homo sapiens
ctaaaatggaaatga

SEQ ID NO: 1563974 - DNA, 15 bp, Homo sapiens
actaaaatggaaatg

SEQ ID NO: 1563975 - DNA, 15 bp, Homo sapiens
tactaaaatggaaat

SEQ ID NO: 1563976 - DNA, 15 bp, Homo sapiens
ttactaaaatggaaa

SEQ ID NO: 1563977 - DNA, 15 bp, Homo sapiens
gttactaaaatggaa

SEQ ID NO: 1563978 - DNA, 15 bp, Homo sapiens
agttactaaaatgga

SEQ ID NO: 1563979 - DNA, 15 bp, Homo sapiens
cagttactaaaatgg

SEQ ID NO: 1563980 - DNA, 15 bp, Homo sapiens
tcagttactaaaatg

SEQ ID NO: 1563981 - DNA, 15 bp, Homo sapiens
ttcagttactaaaat

SEQ ID NO: 1563982 - DNA, 15 bp, Homo sapiens
tttcagttactaaaa

SEQ ID NO: 1563983 - DNA, 15 bp, Homo sapiens
ctttcagttactaaa

SEQ ID NO: 1563984 - DNA, 15 bp, Homo sapiens
actttcagttactaa

SEQ ID NO: 1563985 - DNA, 15 bp, Homo sapiens
tactttcagttacta

SEQ ID NO: 1563986 - DNA, 15 bp, Homo sapiens
ttactttcagttact

SEQ ID NO: 1563987 - DNA, 15 bp, Homo sapiens
tttactttcagttac

SEQ ID NO: 1563988 - DNA, 15 bp, Homo sapiens
atttactttcagtta

SEQ ID NO: 1563989 - DNA, 15 bp, Homo sapiens
catttactttcagtt

SEQ ID NO: 1563990 - DNA, 15 bp, Homo sapiens
tcatttactttcagt

SEQ ID NO: 1563991 - DNA, 15 bp, Homo sapiens
ttcatttactttcag

SEQ ID NO: 1563992 - DNA, 15 bp, Homo sapiens
attcatttactttca

SEQ ID NO: 1563993 - DNA, 15 bp, Homo sapiens
cattcatttactttc

SEQ ID NO: 1563994 - DNA, 15 bp, Homo sapiens
tcattcatttacttt

SEQ ID NO: 1563995 - DNA, 15 bp, Homo sapiens
ttcattcatttactt

SEQ ID NO: 1563996 - DNA, 15 bp, Homo sapiens
ttttcattcatttac

SEQ ID NO: 1563997 - DNA, 15 bp, Homo sapiens
tttttcattcattta

SEQ ID NO: 1563998 - DNA, 15 bp, Homo sapiens
ttttttcattcattt

SEQ ID NO: 1563999 - DNA, 15 bp, Homo sapiens
gttttttcattcatt

SEQ ID NO: 1564000 - DNA, 15 bp, Homo sapiens
ggttttttcattcat

SEQ ID NO: 1564001 - DNA, 15 bp, Homo sapiens
gggttttttcattca

SEQ ID NO: 1564002 - DNA, 15 bp, Homo sapiens
tgggttttttcattc

SEQ ID NO: 1564003 - DNA, 15 bp, Homo sapiens
gtgggttttttcatt

SEQ ID NO: 1564004 - DNA, 15 bp, Homo sapiens
agtgggttttttcat

SEQ ID NO: 1564005 - DNA, 15 bp, Homo sapiens
tagtgggttttttca

SEQ ID NO: 1564006 - DNA, 15 bp, Homo sapiens
ctagtgggttttttc

SEQ ID NO: 1564007 - DNA, 15 bp, Homo sapiens
cctagtgggtttttt

SEQ ID NO: 1564008 - DNA, 15 bp, Homo sapiens
gcctagtgggttttt

SEQ ID NO: 1564009 - DNA, 15 bp, Homo sapiens
ggcctagtgggtttt

SEQ ID NO: 1564010 - DNA, 15 bp, Homo sapiens
tggcctagtgggttt

SEQ ID NO: 1564011 - DNA, 15 bp, Homo sapiens
ctggcctagtgggtt

SEQ ID NO: 1564012 - DNA, 15 bp, Homo sapiens
cctggcctagtgggt

SEQ ID NO: 1564013 - DNA, 15 bp, Homo sapiens
acctggcctagtggg

SEQ ID NO: 1564014 - DNA, 15 bp, Homo sapiens
cacctggcctagtgg

SEQ ID NO: 1564015 - DNA, 15 bp, Homo sapiens
gcacctggcctagtg

SEQ ID NO: 1564016 - DNA, 15 bp, Homo sapiens
tgcacctggcctagt

SEQ ID NO: 1564017 - DNA, 15 bp, Homo sapiens
ctgcacctggcctag

SEQ ID NO: 1564018 - DNA, 15 bp, Homo sapiens
actgcacctggccta

SEQ ID NO: 1564019 - DNA, 15 bp, Homo sapiens
cgtgagccactgcac

SEQ ID NO: 1564020 - DNA, 15 bp, Homo sapiens
gcgtgagccactgca

SEQ ID NO: 1564021 - DNA, 15 bp, Homo sapiens
ggcgtgagccactgc

SEQ ID NO: 1564022 - DNA, 15 bp, Homo sapiens
gggcgtgagccactg

SEQ ID NO: 1564023 - DNA, 15 bp, Homo sapiens
tgggcgtgagccact

SEQ ID NO: 1564024 - DNA, 15 bp, Homo sapiens
cctcaaagtgctggg

SEQ ID NO: 1564025 - DNA, 15 bp, Homo sapiens
ccctcaaagtgctgg

SEQ ID NO: 1564026 - DNA, 15 bp, Homo sapiens
tccctcaaagtgctg

SEQ ID NO: 1564027 - DNA, 15 bp, Homo sapiens
gtccctcaaagtgct

SEQ ID NO: 1564028 - DNA, 15 bp, Homo sapiens
agtccctcaaagtgc

SEQ ID NO: 1564029 - DNA, 15 bp, Homo sapiens
gagtccctcaaagtg

SEQ ID NO: 1564030 - DNA, 15 bp, Homo sapiens
tgagtccctcaaagt

SEQ ID NO: 1564031 - DNA, 15 bp, Homo sapiens
ctgagtccctcaaag

SEQ ID NO: 1564032 - DNA, 15 bp, Homo sapiens
cctgagtccctcaaa

SEQ ID NO: 1564033 - DNA, 15 bp, Homo sapiens
acctgagtccctcaa

SEQ ID NO: 1564034 - DNA, 15 bp, Homo sapiens
cacctgagtccctca

SEQ ID NO: 1564035 - DNA, 15 bp, Homo sapiens
ccacctgagtccctc

SEQ ID NO: 1564036 - DNA, 15 bp, Homo sapiens
cccacctgagtccct

SEQ ID NO: 1564037 - DNA, 15 bp, Homo sapiens
tcccacctgagtccc

SEQ ID NO: 1564038 - DNA, 15 bp, Homo sapiens
ctcccacctgagtcc

SEQ ID NO: 1564039 - DNA, 15 bp, Homo sapiens
cctcccacctgagtc

SEQ ID NO: 1564040 - DNA, 15 bp, Homo sapiens
tcctcccacctgagt

SEQ ID NO: 1564041 - DNA, 15 bp, Homo sapiens
atcctcccacctgag

SEQ ID NO: 1564042 - DNA, 15 bp, Homo sapiens
aatcctcccacctga

SEQ ID NO: 1564043 - DNA, 15 bp, Homo sapiens
caatcctcccacctg

SEQ ID NO: 1564044 - DNA, 15 bp, Homo sapiens
gagcaatcctcccac

SEQ ID NO: 1564045 - DNA, 15 bp, Homo sapiens
cgagcaatcctccca

SEQ ID NO: 1564046 - DNA, 15 bp, Homo sapiens
tcgagcaatcctccc

SEQ ID NO: 1564047 - DNA, 15 bp, Homo sapiens
ctcgagcaatcctcc

SEQ ID NO: 1564048 - DNA, 15 bp, Homo sapiens
actcgagcaatcctc

SEQ ID NO: 1564049 - DNA, 15 bp, Homo sapiens
gactcgagcaatcct

SEQ ID NO: 1564050 - DNA, 15 bp, Homo sapiens
ggactcgagcaatcc

SEQ ID NO: 1564051 - DNA, 15 bp, Homo sapiens
tggactcgagcaatc

SEQ ID NO: 1564052 - DNA, 15 bp, Homo sapiens
ctggactcgagcaat

SEQ ID NO: 1564053 - DNA, 15 bp, Homo sapiens
cctggactcgagcaa

SEQ ID NO: 1564054 - DNA, 15 bp, Homo sapiens
tcctggactcgagca

SEQ ID NO: 1564055 - DNA, 15 bp, Homo sapiens
ctcctggactcgagc

SEQ ID NO: 1564056 - DNA, 15 bp, Homo sapiens
actcctggactcgag

SEQ ID NO: 1564057 - DNA, 15 bp, Homo sapiens
aactcctggactcga

SEQ ID NO: 1564058 - DNA, 15 bp, Homo sapiens
gaactcctggactcg

SEQ ID NO: 1564059 - DNA, 15 bp, Homo sapiens
tgaactcctggactc

SEQ ID NO: 1564060 - DNA, 15 bp, Homo sapiens
ttgaactcctggact

SEQ ID NO: 1564061 - DNA, 15 bp, Homo sapiens
cttgaactcctggac

SEQ ID NO: 1564062 - DNA, 15 bp, Homo sapiens
tcttgaactcctgga

SEQ ID NO: 1564063 - DNA, 15 bp, Homo sapiens
gtcatgttgcccagg

SEQ ID NO: 1564064 - DNA, 15 bp, Homo sapiens
tgtcatgttgcccag

SEQ ID NO: 1564065 - DNA, 15 bp, Homo sapiens
ttgtcatgttgccca

SEQ ID NO: 1564066 - DNA, 15 bp, Homo sapiens
tttgtcatgttgccc

SEQ ID NO: 1564067 - DNA, 15 bp, Homo sapiens
ttttgtcatgttgcc

SEQ ID NO: 1564068 - DNA, 15 bp, Homo sapiens
gttttgtcatgttgc

SEQ ID NO: 1564069 - DNA, 15 bp, Homo sapiens
ggttttgtcatgttg

SEQ ID NO: 1564070 - DNA, 15 bp, Homo sapiens
gggttttgtcatgtt

SEQ ID NO: 1564071 - DNA, 15 bp, Homo sapiens
tgggttttgtcatgt

SEQ ID NO: 1564072 - DNA, 15 bp, Homo sapiens
atgggttttgtcatg

SEQ ID NO: 1564073 - DNA, 15 bp, Homo sapiens
gatgggttttgtcat

SEQ ID NO: 1564074 - DNA, 15 bp, Homo sapiens
agatgggttttgtca

SEQ ID NO: 1564075 - DNA, 15 bp, Homo sapiens
gagatgggttttgtc

SEQ ID NO: 1564076 - DNA, 15 bp, Homo sapiens
agagatgggttttgt

SEQ ID NO: 1564077 - DNA, 15 bp, Homo sapiens
tgtagagatgggttt

SEQ ID NO: 1564078 - DNA, 15 bp, Homo sapiens
ttgtagagatgggtt

SEQ ID NO: 1564079 - DNA, 15 bp, Homo sapiens
tttgtagagatgggt

SEQ ID NO: 1564080 - DNA, 15 bp, Homo sapiens
gttttgtattttttg

SEQ ID NO: 1564081 - DNA, 15 bp, Homo sapiens
agttttgtatttttt

SEQ ID NO: 1564082 - DNA, 15 bp, Homo sapiens
aagttttgtattttt

SEQ ID NO: 1564083 - DNA, 15 bp, Homo sapiens
taagttttgtatttt

SEQ ID NO: 1564084 - DNA, 15 bp, Homo sapiens
ctaagttttgtattt

SEQ ID NO: 1564085 - DNA, 15 bp, Homo sapiens
gctaagttttgtatt

SEQ ID NO: 1564086 - DNA, 15 bp, Homo sapiens
agctaagttttgtat

SEQ ID NO: 1564087 - DNA, 15 bp, Homo sapiens
cagctaagttttgta

SEQ ID NO: 1564088 - DNA, 15 bp, Homo sapiens
ccagctaagttttgt

SEQ ID NO: 1564089 - DNA, 15 bp, Homo sapiens
cccagctaagttttg

SEQ ID NO: 1564090 - DNA, 15 bp, Homo sapiens
gcccagctaagtttt

SEQ ID NO: 1564091 - DNA, 15 bp, Homo sapiens
tgcccagctaagttt

SEQ ID NO: 1564092 - DNA, 15 bp, Homo sapiens
atgcccagctaagtt

SEQ ID NO: 1564093 - DNA, 15 bp, Homo sapiens
catgcccagctaagt

SEQ ID NO: 1564094 - DNA, 15 bp, Homo sapiens
ccatgcccagctaag

SEQ ID NO: 1564095 - DNA, 15 bp, Homo sapiens
tcaccatgcccagct

SEQ ID NO: 1564096 - DNA, 15 bp, Homo sapiens
gtcaccatgcccagc

SEQ ID NO: 1564097 - DNA, 15 bp, Homo sapiens
cgtcaccatgcccag

SEQ ID NO: 1564098 - DNA, 15 bp, Homo sapiens
tcgtcaccatgccca

SEQ ID NO: 1564099 - DNA, 15 bp, Homo sapiens
ctcgtcaccatgccc

SEQ ID NO: 1564100 - DNA, 15 bp, Homo sapiens
gctcgtcaccatgcc

SEQ ID NO: 1564101 - DNA, 15 bp, Homo sapiens
tgctcgtcaccatgc

SEQ ID NO: 1564102 - DNA, 15 bp, Homo sapiens
gtgctcgtcaccatg

SEQ ID NO: 1564103 - DNA, 15 bp, Homo sapiens
ggtgctcgtcaccat

SEQ ID NO: 1564104 - DNA, 15 bp, Homo sapiens
aggtgctcgtcacca

SEQ ID NO: 1564105 - DNA, 15 bp, Homo sapiens
gaggtgctcgtcacc

SEQ ID NO: 1564106 - DNA, 15 bp, Homo sapiens
agaggtgctcgtcac

SEQ ID NO: 1564107 - DNA, 15 bp, Homo sapiens
tagaggtgctcgtca

SEQ ID NO: 1564108 - DNA, 15 bp, Homo sapiens
ctagaggtgctcgtc

SEQ ID NO: 1564109 - DNA, 15 bp, Homo sapiens
actagaggtgctcgt

SEQ ID NO: 1564110 - DNA, 15 bp, Homo sapiens
gactagaggtgctcg

SEQ ID NO: 1564111 - DNA, 15 bp, Homo sapiens
ggactagaggtgctc

SEQ ID NO: 1564112 - DNA, 15 bp, Homo sapiens
gggactagaggtgct

SEQ ID NO: 1564113 - DNA, 15 bp, Homo sapiens
tgggactagaggtgc

SEQ ID NO: 1564114 - DNA, 15 bp, Homo sapiens
ctgggactagaggtg

SEQ ID NO: 1564115 - DNA, 15 bp, Homo sapiens
gctgggactagaggt

SEQ ID NO: 1564116 - DNA, 15 bp, Homo sapiens
agctgggactagagg

SEQ ID NO: 1564117 - DNA, 15 bp, Homo sapiens
tagctgggactagag

SEQ ID NO: 1564118 - DNA, 15 bp, Homo sapiens
gtagctgggactaga

SEQ ID NO: 1564119 - DNA, 15 bp, Homo sapiens
agtagctgggactag

SEQ ID NO: 1564120 - DNA, 15 bp, Homo sapiens
ttcccaagtagctgg

SEQ ID NO: 1564121 - DNA, 15 bp, Homo sapiens
cttcccaagtagctg

SEQ ID NO: 1564122 - DNA, 15 bp, Homo sapiens
tcttcccaagtagct

SEQ ID NO: 1564123 - DNA, 15 bp, Homo sapiens
atcttcccaagtagc

SEQ ID NO: 1564124 - DNA, 15 bp, Homo sapiens
gatcttcccaagtag

SEQ ID NO: 1564125 - DNA, 15 bp, Homo sapiens
tgatcttcccaagta

SEQ ID NO: 1564126 - DNA, 15 bp, Homo sapiens
gtgatcttcccaagt

SEQ ID NO: 1564127 - DNA, 15 bp, Homo sapiens
agtgatcttcccaag

SEQ ID NO: 1564128 - DNA, 15 bp, Homo sapiens
aagtgatcttcccaa

SEQ ID NO: 1564129 - DNA, 15 bp, Homo sapiens
ggctcaagtgatctt

SEQ ID NO: 1564130 - DNA, 15 bp, Homo sapiens
cccacctcctgggct

SEQ ID NO: 1564131 - DNA, 15 bp, Homo sapiens
ccccacctcctgggc

SEQ ID NO: 1564132 - DNA, 15 bp, Homo sapiens
cccccacctcctggg

SEQ ID NO: 1564133 - DNA, 15 bp, Homo sapiens
acccccacctcctgg

SEQ ID NO: 1564134 - DNA, 15 bp, Homo sapiens
tacccccacctcctg

SEQ ID NO: 1564135 - DNA, 15 bp, Homo sapiens
ctacccccacctcct

SEQ ID NO: 1564136 - DNA, 15 bp, Homo sapiens
gctacccccacctcc

SEQ ID NO: 1564137 - DNA, 15 bp, Homo sapiens
tgctacccccacctc

SEQ ID NO: 1564138 - DNA, 15 bp, Homo sapiens
ctgctacccccacct

SEQ ID NO: 1564139 - DNA, 15 bp, Homo sapiens
actgctacccccacc

SEQ ID NO: 1564140 - DNA, 15 bp, Homo sapiens
tactgctacccccac

SEQ ID NO: 1564141 - DNA, 15 bp, Homo sapiens
ttactgctaccccca

SEQ ID NO: 1564142 - DNA, 15 bp, Homo sapiens
cttactgctaccccc

SEQ ID NO: 1564143 - DNA, 15 bp, Homo sapiens
gcttactgctacccc

SEQ ID NO: 1564144 - DNA, 15 bp, Homo sapiens
ggcttactgctaccc

SEQ ID NO: 1564145 - DNA, 15 bp, Homo sapiens
tggcttactgctacc

SEQ ID NO: 1564146 - DNA, 15 bp, Homo sapiens
ttggcttactgctac

SEQ ID NO: 1564147 - DNA, 15 bp, Homo sapiens
cttggcttactgcta

SEQ ID NO: 1564148 - DNA, 15 bp, Homo sapiens
tcttggcttactgct

SEQ ID NO: 1564149 - DNA, 15 bp, Homo sapiens
ggtgcaatcttggct

SEQ ID NO: 1564150 - DNA, 15 bp, Homo sapiens
tggtgcaatcttggc

SEQ ID NO: 1564151 - DNA, 15 bp, Homo sapiens
ccactctgtcaccca

SEQ ID NO: 1564152 - DNA, 15 bp, Homo sapiens
cccactctgtcaccc

SEQ ID NO: 1564153 - DNA, 15 bp, Homo sapiens
tcccactctgtcacc

SEQ ID NO: 1564154 - DNA, 15 bp, Homo sapiens
gtcccactctgtcac

SEQ ID NO: 1564155 - DNA, 15 bp, Homo sapiens
ggtcccactctgtca

SEQ ID NO: 1564156 - DNA, 15 bp, Homo sapiens
gggtcccactctgtc

SEQ ID NO: 1564157 - DNA, 15 bp, Homo sapiens
ggggtcccactctgt

SEQ ID NO: 1564158 - DNA, 15 bp, Homo sapiens
cggggtcccactctg

SEQ ID NO: 1564159 - DNA, 15 bp, Homo sapiens
tcggggtcccactct

SEQ ID NO: 1564160 - DNA, 15 bp, Homo sapiens
gtcggggtcccactc

SEQ ID NO: 1564161 - DNA, 15 bp, Homo sapiens
agtcggggtcccact

SEQ ID NO: 1564162 - DNA, 15 bp, Homo sapiens
gagtcggggtcccac

SEQ ID NO: 1564163 - DNA, 15 bp, Homo sapiens
ggagtcggggtccca

SEQ ID NO: 1564164 - DNA, 15 bp, Homo sapiens
tggagtcggggtccc

SEQ ID NO: 1564165 - DNA, 15 bp, Homo sapiens
ttggagtcggggtcc

SEQ ID NO: 1564166 - DNA, 15 bp, Homo sapiens
tttggagtcggggtc

SEQ ID NO: 1564167 - DNA, 15 bp, Homo sapiens
gtttggagtcggggt

SEQ ID NO: 1564168 - DNA, 15 bp, Homo sapiens
tgtttggagtcgggg

SEQ ID NO: 1564169 - DNA, 15 bp, Homo sapiens
ttgtttggagtcggg

SEQ ID NO: 1564170 - DNA, 15 bp, Homo sapiens
tttgtttggagtcgg

SEQ ID NO: 1564171 - DNA, 15 bp, Homo sapiens
gtttgtttggagtcg

SEQ ID NO: 1564172 - DNA, 15 bp, Homo sapiens
tgtttgtttggagtc

SEQ ID NO: 1564173 - DNA, 15 bp, Homo sapiens
ttgtttgtttggagt

SEQ ID NO: 1564174 - DNA, 15 bp, Homo sapiens
tttgtttgtttggag

SEQ ID NO: 1564175 - DNA, 15 bp, Homo sapiens
gtttgtttgtttgga

SEQ ID NO: 1564176 - DNA, 15 bp, Homo sapiens
tgtttgtttgtttgg

SEQ ID NO: 1564177 - DNA, 15 bp, Homo sapiens
gtttttgtttgtttg

SEQ ID NO: 1564178 - DNA, 15 bp, Homo sapiens
tgtttttgtttgttt

SEQ ID NO: 1564179 - DNA, 15 bp, Homo sapiens
gtgtttttgtttgtt

SEQ ID NO: 1564180 - DNA, 15 bp, Homo sapiens
agtgtttttgtttgt

SEQ ID NO: 1564181 - DNA, 15 bp, Homo sapiens
cagtgtttttgtttg

SEQ ID NO: 1564182 - DNA, 15 bp, Homo sapiens
tcagtgtttttgttt

SEQ ID NO: 1564183 - DNA, 15 bp, Homo sapiens
atcagtgtttttgtt

SEQ ID NO: 1564184 - DNA, 15 bp, Homo sapiens
gatcagtgtttttgt

SEQ ID NO: 1564185 - DNA, 15 bp, Homo sapiens
agatcagtgtttttg

SEQ ID NO: 1564186 - DNA, 15 bp, Homo sapiens
aagatcagtgttttt

SEQ ID NO: 1564187 - DNA, 15 bp, Homo sapiens
taagatcagtgtttt

SEQ ID NO: 1564188 - DNA, 15 bp, Homo sapiens
gtaagatcagtgttt

SEQ ID NO: 1564189 - DNA, 15 bp, Homo sapiens
tgtaagatcagtgtt

SEQ ID NO: 1564190 - DNA, 15 bp, Homo sapiens
atgtaagatcagtgt

SEQ ID NO: 1564191 - DNA, 15 bp, Homo sapiens
gatgtaagatcagtg

SEQ ID NO: 1564192 - DNA, 15 bp, Homo sapiens
cgatgtaagatcagt

SEQ ID NO: 1564193 - DNA, 15 bp, Homo sapiens
gcgatgtaagatcag

SEQ ID NO: 1564194 - DNA, 15 bp, Homo sapiens
agcgatgtaagatca

SEQ ID NO: 1564195 - DNA, 15 bp, Homo sapiens
gagcgatgtaagatc

SEQ ID NO: 1564196 - DNA, 15 bp, Homo sapiens
ggagcgatgtaagat

SEQ ID NO: 1564197 - DNA, 15 bp, Homo sapiens
aggagcgatgtaaga

SEQ ID NO: 1564198 - DNA, 15 bp, Homo sapiens
gaggagcgatgtaag

SEQ ID NO: 1564199 - DNA, 15 bp, Homo sapiens
tgaggagcgatgtaa

SEQ ID NO: 1564200 - DNA, 15 bp, Homo sapiens
ctgaggagcgatgta

SEQ ID NO: 1564201 - DNA, 15 bp, Homo sapiens
tctgaggagcgatgt

SEQ ID NO: 1564202 - DNA, 15 bp, Homo sapiens
ctctgaggagcgatg

SEQ ID NO: 1564203 - DNA, 15 bp, Homo sapiens
cctctgaggagcgat

SEQ ID NO: 1564204 - DNA, 15 bp, Homo sapiens
tcctctgaggagcga

SEQ ID NO: 1564205 - DNA, 15 bp, Homo sapiens
ttcctctgaggagcg

SEQ ID NO: 1564206 - DNA, 15 bp, Homo sapiens
tttcctctgaggagc

SEQ ID NO: 1564207 - DNA, 15 bp, Homo sapiens
atttcctctgaggag

SEQ ID NO: 1564208 - DNA, 15 bp, Homo sapiens
catttcctctgagga

SEQ ID NO: 1564209 - DNA, 15 bp, Homo sapiens
gcatttcctctgagg

SEQ ID NO: 1564210 - DNA, 15 bp, Homo sapiens
tgcatttcctctgag

SEQ ID NO: 1564211 - DNA, 15 bp, Homo sapiens
ctgcatttcctctga

SEQ ID NO: 1564212 - DNA, 15 bp, Homo sapiens
tctgcatttcctctg

SEQ ID NO: 1564213 - DNA, 15 bp, Homo sapiens
ctctgcatttcctct

SEQ ID NO: 1564214 - DNA, 15 bp, Homo sapiens
tctctgcatttcctc

SEQ ID NO: 1564215 - DNA, 15 bp, Homo sapiens
atctctgcatttcct

SEQ ID NO: 1564216 - DNA, 15 bp, Homo sapiens
catctctgcatttcc

SEQ ID NO: 1564217 - DNA, 15 bp, Homo sapiens
acatctctgcatttc

SEQ ID NO: 1564218 - DNA, 15 bp, Homo sapiens
aacatctctgcattt

SEQ ID NO: 1564219 - DNA, 15 bp, Homo sapiens
gaacatctctgcatt

SEQ ID NO: 1564220 - DNA, 15 bp, Homo sapiens
agaacatctctgcat

SEQ ID NO: 1564221 - DNA, 15 bp, Homo sapiens
aagaacatctctgca

SEQ ID NO: 1564222 - DNA, 15 bp, Homo sapiens
caagaacatctctgc

SEQ ID NO: 1564223 - DNA, 15 bp, Homo sapiens
gcaagaacatctctg

SEQ ID NO: 1564224 - DNA, 15 bp, Homo sapiens
tgcaagaacatctct

SEQ ID NO: 1564225 - DNA, 15 bp, Homo sapiens
atgcaagaacatctc

SEQ ID NO: 1564226 - DNA, 15 bp, Homo sapiens
aatgcaagaacatct

SEQ ID NO: 1564227 - DNA, 15 bp, Homo sapiens
gaatgcaagaacatc

SEQ ID NO: 1564228 - DNA, 15 bp, Homo sapiens
ggaatgcaagaacat

SEQ ID NO: 1564229 - DNA, 15 bp, Homo sapiens
tggaatgcaagaaca

SEQ ID NO: 1564230 - DNA, 15 bp, Homo sapiens
atggaatgcaagaac

SEQ ID NO: 1564231 - DNA, 15 bp, Homo sapiens
aatggaatgcaagaa

SEQ ID NO: 1564232 - DNA, 15 bp, Homo sapiens
caatggaatgcaaga

SEQ ID NO: 1564233 - DNA, 15 bp, Homo sapiens
ccaatggaatgcaag

SEQ ID NO: 1564234 - DNA, 15 bp, Homo sapiens
cccaatggaatgcaa

SEQ ID NO: 1564235 - DNA, 15 bp, Homo sapiens
acccaatggaatgca

SEQ ID NO: 1564236 - DNA, 15 bp, Homo sapiens
tacccaatggaatgc

SEQ ID NO: 1564237 - DNA, 15 bp, Homo sapiens
ttacccaatggaatg

SEQ ID NO: 1564238 - DNA, 15 bp, Homo sapiens
tttacccaatggaat

SEQ ID NO: 1564239 - DNA, 15 bp, Homo sapiens
ttttacccaatggaa

SEQ ID NO: 1564240 - DNA, 15 bp, Homo sapiens
attttacccaatgga

SEQ ID NO: 1564241 - DNA, 15 bp, Homo sapiens
aattttacccaatgg

SEQ ID NO: 1564242 - DNA, 15 bp, Homo sapiens
caattttacccaatg

SEQ ID NO: 1564243 - DNA, 15 bp, Homo sapiens
acaattttacccaat

SEQ ID NO: 1564244 - DNA, 15 bp, Homo sapiens
tacaattttacccaa

SEQ ID NO: 1564245 - DNA, 15 bp, Homo sapiens
ttacaattttaccca

SEQ ID NO: 1564246 - DNA, 15 bp, Homo sapiens
attacaattttaccc

SEQ ID NO: 1564247 - DNA, 15 bp, Homo sapiens
aattacaattttacc

SEQ ID NO: 1564248 - DNA, 15 bp, Homo sapiens
caattacaattttac

SEQ ID NO: 1564249 - DNA, 15 bp, Homo sapiens
acaattacaatttta

SEQ ID NO: 1564250 - DNA, 15 bp, Homo sapiens
aacaattacaatttt

SEQ ID NO: 1564251 - DNA, 15 bp, Homo sapiens
taacaattacaattt

SEQ ID NO: 1564252 - DNA, 15 bp, Homo sapiens
gtaacaattacaatt

SEQ ID NO: 1564253 - DNA, 15 bp, Homo sapiens
agtaacaattacaat

SEQ ID NO: 1564254 - DNA, 15 bp, Homo sapiens
cagtaacaattacaa

SEQ ID NO: 1564255 - DNA, 15 bp, Homo sapiens
ccagtaacaattaca

SEQ ID NO: 1564256 - DNA, 15 bp, Homo sapiens
tccagtaacaattac

SEQ ID NO: 1564257 - DNA, 15 bp, Homo sapiens
ttccagtaacaatta

SEQ ID NO: 1564258 - DNA, 15 bp, Homo sapiens
attccagtaacaatt

SEQ ID NO: 1564259 - DNA, 15 bp, Homo sapiens
tattccagtaacaat

SEQ ID NO: 1564260 - DNA, 15 bp, Homo sapiens
gtattccagtaacaa

SEQ ID NO: 1564261 - DNA, 15 bp, Homo sapiens
tgtattccagtaaca

SEQ ID NO: 1564262 - DNA, 15 bp, Homo sapiens
atgtattccagtaac

SEQ ID NO: 1564263 - DNA, 15 bp, Homo sapiens
aatgtattccagtaa

SEQ ID NO: 1564264 - DNA, 15 bp, Homo sapiens
taatgtattccagta

SEQ ID NO: 1564265 - DNA, 15 bp, Homo sapiens
ctaatgtattccagt

SEQ ID NO: 1564266 - DNA, 15 bp, Homo sapiens
cctaatgtattccag

SEQ ID NO: 1564267 - DNA, 15 bp, Homo sapiens
tcctaatgtattcca

SEQ ID NO: 1564268 - DNA, 15 bp, Homo sapiens
atcctaatgtattcc

SEQ ID NO: 1564269 - DNA, 15 bp, Homo sapiens
gatcctaatgtattc

SEQ ID NO: 1564270 - DNA, 15 bp, Homo sapiens
agatcctaatgtatt

SEQ ID NO: 1564271 - DNA, 15 bp, Homo sapiens
cagatcctaatgtat

SEQ ID NO: 1564272 - DNA, 15 bp, Homo sapiens
acagatcctaatgta

SEQ ID NO: 1564273 - DNA, 15 bp, Homo sapiens
tacagatcctaatgt

SEQ ID NO: 1564274 - DNA, 15 bp, Homo sapiens
atacagatcctaatg

SEQ ID NO: 1564275 - DNA, 15 bp, Homo sapiens
aatacagatcctaat

SEQ ID NO: 1564276 - DNA, 15 bp, Homo sapiens
aaatacagatcctaa

SEQ ID NO: 1564277 - DNA, 15 bp, Homo sapiens
gaaatacagatccta

SEQ ID NO: 1564278 - DNA, 15 bp, Homo sapiens
tgaaatacagatcct

SEQ ID NO: 1564279 - DNA, 15 bp, Homo sapiens
ctgaaatacagatcc

SEQ ID NO: 1564280 - DNA, 15 bp, Homo sapiens
actgaaatacagatc

SEQ ID NO: 1564281 - DNA, 15 bp, Homo sapiens
tactgaaatacagat

SEQ ID NO: 1564282 - DNA, 15 bp, Homo sapiens
ctactgaaatacaga

SEQ ID NO: 1564283 - DNA, 15 bp, Homo sapiens
gctactgaaatacag

SEQ ID NO: 1564284 - DNA, 15 bp, Homo sapiens
ggctactgaaataca

SEQ ID NO: 1564285 - DNA, 15 bp, Homo sapiens
tggctactgaaatac

SEQ ID NO: 1564286 - DNA, 15 bp, Homo sapiens
ctggctactgaaata

SEQ ID NO: 1564287 - DNA, 15 bp, Homo sapiens
gctggctactgaaat

SEQ ID NO: 1564288 - DNA, 15 bp, Homo sapiens
tgctggctactgaaa

SEQ ID NO: 1564289 - DNA, 15 bp, Homo sapiens
gtgctggctactgaa

SEQ ID NO: 1564290 - DNA, 15 bp, Homo sapiens
agtgctggctactga

SEQ ID NO: 1564291 - DNA, 15 bp, Homo sapiens
cagtgctggctactg

SEQ ID NO: 1564292 - DNA, 15 bp, Homo sapiens
tcagtgctggctact

SEQ ID NO: 1564293 - DNA, 15 bp, Homo sapiens
ttcagtgctggctac

SEQ ID NO: 1564294 - DNA, 15 bp, Homo sapiens
attcagtgctggcta

SEQ ID NO: 1564295 - DNA, 15 bp, Homo sapiens
cattcagtgctggct

SEQ ID NO: 1564296 - DNA, 15 bp, Homo sapiens
ccattcagtgctggc

SEQ ID NO: 1564297 - DNA, 15 bp, Homo sapiens
accattcagtgctgg

SEQ ID NO: 1564298 - DNA, 15 bp, Homo sapiens
aaccattcagtgctg

SEQ ID NO: 1564299 - DNA, 15 bp, Homo sapiens
gaaccattcagtgct

SEQ ID NO: 1564300 - DNA, 15 bp, Homo sapiens
tgaaccattcagtgc

SEQ ID NO: 1564301 - DNA, 15 bp, Homo sapiens
ttgaaccattcagtg

SEQ ID NO: 1564302 - DNA, 15 bp, Homo sapiens
gttgaaccattcagt

SEQ ID NO: 1564303 - DNA, 15 bp, Homo sapiens
tgttgaaccattcag

SEQ ID NO: 1564304 - DNA, 15 bp, Homo sapiens
ctgttgaaccattca

SEQ ID NO: 1564305 - DNA, 15 bp, Homo sapiens
tctgttgaaccattc

SEQ ID NO: 1564306 - DNA, 15 bp, Homo sapiens
atctgttgaaccatt

SEQ ID NO: 1564307 - DNA, 15 bp, Homo sapiens
aatctgttgaaccat

SEQ ID NO: 1564308 - DNA, 15 bp, Homo sapiens
aaatctgttgaacca

SEQ ID NO: 1564309 - DNA, 15 bp, Homo sapiens
gaaatctgttgaacc

SEQ ID NO: 1564310 - DNA, 15 bp, Homo sapiens
tgaaatctgttgaac

SEQ ID NO: 1564311 - DNA, 15 bp, Homo sapiens
ctgaaatctgttgaa

SEQ ID NO: 1564312 - DNA, 15 bp, Homo sapiens
actgaaatctgttga

SEQ ID NO: 1564313 - DNA, 15 bp, Homo sapiens
aactgaaatctgttg

SEQ ID NO: 1564314 - DNA, 15 bp, Homo sapiens
taactgaaatctgtt

SEQ ID NO: 1564315 - DNA, 15 bp, Homo sapiens
ataactgaaatctgt

SEQ ID NO: 1564316 - DNA, 15 bp, Homo sapiens
gataactgaaatctg

SEQ ID NO: 1564317 - DNA, 15 bp, Homo sapiens
ggataactgaaatct

SEQ ID NO: 1564318 - DNA, 15 bp, Homo sapiens
tggataactgaaatc

SEQ ID NO: 1564319 - DNA, 15 bp, Homo sapiens
atggataactgaaat

SEQ ID NO: 1564320 - DNA, 15 bp, Homo sapiens
catggataactgaaa

SEQ ID NO: 1564321 - DNA, 15 bp, Homo sapiens
gcatggataactgaa

SEQ ID NO: 1564322 - DNA, 15 bp, Homo sapiens
tgcatggataactga

SEQ ID NO: 1564323 - DNA, 15 bp, Homo sapiens
ttgcatggataactg

SEQ ID NO: 1564324 - DNA, 15 bp, Homo sapiens
tttgcatggataact

SEQ ID NO: 1564325 - DNA, 15 bp, Homo sapiens
gtttgcatggataac

SEQ ID NO: 1564326 - DNA, 15 bp, Homo sapiens
tgtttgcatggataa

SEQ ID NO: 1564327 - DNA, 15 bp, Homo sapiens
atgtttgcatggata

SEQ ID NO: 1564328 - DNA, 15 bp, Homo sapiens
tatgtttgcatggat

SEQ ID NO: 1564329 - DNA, 15 bp, Homo sapiens
atatgtttgcatgga

SEQ ID NO: 1564330 - DNA, 15 bp, Homo sapiens
aatatgtttgcatgg

SEQ ID NO: 1564331 - DNA, 15 bp, Homo sapiens
aaatatgtttgcatg

SEQ ID NO: 1564332 - DNA, 15 bp, Homo sapiens
taaatatgtttgcat

SEQ ID NO: 1564333 - DNA, 15 bp, Homo sapiens
ttaaatatgtttgca

SEQ ID NO: 1564334 - DNA, 15 bp, Homo sapiens
cttaaatatgtttgc

SEQ ID NO: 1564335 - DNA, 15 bp, Homo sapiens
acttaaatatgtttg

SEQ ID NO: 1564336 - DNA, 15 bp, Homo sapiens
tacttaaatatgttt

SEQ ID NO: 1564337 - DNA, 15 bp, Homo sapiens
atacttaaatatgtt

SEQ ID NO: 1564338 - DNA, 15 bp, Homo sapiens
gatacttaaatatgt

SEQ ID NO: 1564339 - DNA, 15 bp, Homo sapiens
agatacttaaatatg

SEQ ID NO: 1564340 - DNA, 15 bp, Homo sapiens
aagatacttaaatat

SEQ ID NO: 1564341 - DNA, 15 bp, Homo sapiens
aaagatacttaaata

SEQ ID NO: 1564342 - DNA, 15 bp, Homo sapiens
taaagatacttaaat

SEQ ID NO: 1564343 - DNA, 15 bp, Homo sapiens
ctaaagatacttaaa

SEQ ID NO: 1564344 - DNA, 15 bp, Homo sapiens
cctaaagatacttaa

SEQ ID NO: 1564345 - DNA, 15 bp, Homo sapiens
acctaaagatactta

SEQ ID NO: 1564346 - DNA, 15 bp, Homo sapiens
tacctaaagatactt

SEQ ID NO: 1564347 - DNA, 15 bp, Homo sapiens
atacctaaagatact

SEQ ID NO: 1564348 - DNA, 15 bp, Homo sapiens
aatacctaaagatac

SEQ ID NO: 1564349 - DNA, 15 bp, Homo sapiens
caatacctaaagata

SEQ ID NO: 1564350 - DNA, 15 bp, Homo sapiens
ccaatacctaaagat

SEQ ID NO: 1564351 - DNA, 15 bp, Homo sapiens
tccaatacctaaaga

SEQ ID NO: 1564352 - DNA, 15 bp, Homo sapiens
ttccaatacctaaag

SEQ ID NO: 1564353 - DNA, 15 bp, Homo sapiens
tttccaatacctaaa

SEQ ID NO: 1564354 - DNA, 15 bp, Homo sapiens
ttttccaatacctaa

SEQ ID NO: 1564355 - DNA, 15 bp, Homo sapiens
tttttccaataccta

SEQ ID NO: 1564356 - DNA, 15 bp, Homo sapiens
atttttccaatacct

SEQ ID NO: 1564357 - DNA, 15 bp, Homo sapiens
catttttccaatacc

SEQ ID NO: 1564358 - DNA, 15 bp, Homo sapiens
acatttttccaatac

SEQ ID NO: 1564359 - DNA, 15 bp, Homo sapiens
aacatttttccaata

SEQ ID NO: 1564360 - DNA, 15 bp, Homo sapiens
aaacatttttccaat

SEQ ID NO: 1564361 - DNA, 15 bp, Homo sapiens
caaacatttttccaa

SEQ ID NO: 1564362 - DNA, 15 bp, Homo sapiens
acaaacatttttcca

SEQ ID NO: 1564363 - DNA, 15 bp, Homo sapiens
cacaaacatttttcc

SEQ ID NO: 1564364 - DNA, 15 bp, Homo sapiens
acacaaacatttttc

SEQ ID NO: 1564365 - DNA, 15 bp, Homo sapiens
aacacaaacattttt

SEQ ID NO: 1564366 - DNA, 15 bp, Homo sapiens
gaacacaaacatttt

SEQ ID NO: 1564367 - DNA, 15 bp, Homo sapiens
tgaacacaaacattt

SEQ ID NO: 1564368 - DNA, 15 bp, Homo sapiens
atgaacacaaacatt

SEQ ID NO: 1564369 - DNA, 15 bp, Homo sapiens
cttatgaacacaaac

SEQ ID NO: 1564370 - DNA, 15 bp, Homo sapiens
ccttatgaacacaaa

SEQ ID NO: 1564371 - DNA, 15 bp, Homo sapiens
tccttatgaacacaa

SEQ ID NO: 1564372 - DNA, 15 bp, Homo sapiens
ttccttatgaacaca

SEQ ID NO: 1564373 - DNA, 15 bp, Homo sapiens
tttccttatgaacac

SEQ ID NO: 1564374 - DNA, 15 bp, Homo sapiens
atttccttatgaaca

SEQ ID NO: 1564375 - DNA, 15 bp, Homo sapiens
aatttccttatgaac

SEQ ID NO: 1564376 - DNA, 15 bp, Homo sapiens
taatttccttatgaa

SEQ ID NO: 1564377 - DNA, 15 bp, Homo sapiens
ctaatttccttatga

SEQ ID NO: 1564378 - DNA, 15 bp, Homo sapiens
actaatttccttatg

SEQ ID NO: 1564379 - DNA, 15 bp, Homo sapiens
cactaatttccttat

SEQ ID NO: 1564380 - DNA, 15 bp, Homo sapiens
tcactaatttcctta

SEQ ID NO: 1564381 - DNA, 15 bp, Homo sapiens
ttcactaatttcctt

SEQ ID NO: 1564382 - DNA, 15 bp, Homo sapiens
gttcactaatttcct

SEQ ID NO: 1564383 - DNA, 15 bp, Homo sapiens
tgttcactaatttcc

SEQ ID NO: 1564384 - DNA, 15 bp, Homo sapiens
ttgttcactaatttc

SEQ ID NO: 1564385 - DNA, 15 bp, Homo sapiens
tttgttcactaattt

SEQ ID NO: 1564386 - DNA, 15 bp, Homo sapiens
gtttgttcactaatt

SEQ ID NO: 1564387 - DNA, 15 bp, Homo sapiens
tgtttgttcactaat

SEQ ID NO: 1564388 - DNA, 15 bp, Homo sapiens
ttgtttgttcactaa

SEQ ID NO: 1564389 - DNA, 15 bp, Homo sapiens
gttgtttgttcacta

SEQ ID NO: 1564390 - DNA, 15 bp, Homo sapiens
tgttgtttgttcact

SEQ ID NO: 1564391 - DNA, 15 bp, Homo sapiens
ttgttgtttgttcac

SEQ ID NO: 1564392 - DNA, 15 bp, Homo sapiens
tttgttgtttgttca

SEQ ID NO: 1564393 - DNA, 15 bp, Homo sapiens
atttgttgtttgttc

SEQ ID NO: 1564394 - DNA, 15 bp, Homo sapiens
aatttgttgtttgtt

SEQ ID NO: 1564395 - DNA, 15 bp, Homo sapiens
caatttgttgtttgt

SEQ ID NO: 1564396 - DNA, 15 bp, Homo sapiens
acaatttgttgtttg

SEQ ID NO: 1564397 - DNA, 15 bp, Homo sapiens
tacaatttgttgttt

SEQ ID NO: 1564398 - DNA, 15 bp, Homo sapiens
ttacaatttgttgtt

SEQ ID NO: 1564399 - DNA, 15 bp, Homo sapiens
gttacaatttgttgt

SEQ ID NO: 1564400 - DNA, 15 bp, Homo sapiens
tgttacaatttgttg

SEQ ID NO: 1564401 - DNA, 15 bp, Homo sapiens
atgttacaatttgtt

SEQ ID NO: 1564402 - DNA, 15 bp, Homo sapiens
tatgttacaatttgt

SEQ ID NO: 1564403 - DNA, 15 bp, Homo sapiens
ttatgttacaatttg

SEQ ID NO: 1564404 - DNA, 15 bp, Homo sapiens
tttatgttacaattt

SEQ ID NO: 1564405 - DNA, 15 bp, Homo sapiens
atttatgttacaatt

SEQ ID NO: 1564406 - DNA, 15 bp, Homo sapiens
tatttatgttacaat

SEQ ID NO: 1564407 - DNA, 15 bp, Homo sapiens
ttatttatgttacaa

SEQ ID NO: 1564408 - DNA, 15 bp, Homo sapiens
gttatttatgttaca

SEQ ID NO: 1564409 - DNA, 15 bp, Homo sapiens
cgttatttatgttac

SEQ ID NO: 1564410 - DNA, 15 bp, Homo sapiens
acgttatttatgtta

SEQ ID NO: 1564411 - DNA, 15 bp, Homo sapiens
cacgttatttatgtt

SEQ ID NO: 1564412 - DNA, 15 bp, Homo sapiens
gcacgttatttatgt

SEQ ID NO: 1564413 - DNA, 15 bp, Homo sapiens
ggcacgttatttatg

SEQ ID NO: 1564414 - DNA, 15 bp, Homo sapiens
tggcacgttatttat

SEQ ID NO: 1564415 - DNA, 15 bp, Homo sapiens
ctggcacgttattta

SEQ ID NO: 1564416 - DNA, 15 bp, Homo sapiens
actggcacgttattt

SEQ ID NO: 1564417 - DNA, 15 bp, Homo sapiens
tactggcacgttatt

SEQ ID NO: 1564418 - DNA, 15 bp, Homo sapiens
ttactggcacgttat

SEQ ID NO: 1564419 - DNA, 15 bp, Homo sapiens
tttactggcacgtta

SEQ ID NO: 1564420 - DNA, 15 bp, Homo sapiens
gtttactggcacgtt

SEQ ID NO: 1564421 - DNA, 15 bp, Homo sapiens
ggtttactggcacgt

SEQ ID NO: 1564422 - DNA, 15 bp, Homo sapiens
cggtttactggcacg

SEQ ID NO: 1564423 - DNA, 15 bp, Homo sapiens
acggtttactggcac

SEQ ID NO: 1564424 - DNA, 15 bp, Homo sapiens
cacggtttactggca

SEQ ID NO: 1564425 - DNA, 15 bp, Homo sapiens
tcacggtttactggc

SEQ ID NO: 1564426 - DNA, 15 bp, Homo sapiens
ttcacggtttactgg

SEQ ID NO: 1564427 - DNA, 15 bp, Homo sapiens
tttcacggtttactg

SEQ ID NO: 1564428 - DNA, 15 bp, Homo sapiens
ctttcacggtttact

SEQ ID NO: 1564429 - DNA, 15 bp, Homo sapiens
tctttcacggtttac

SEQ ID NO: 1564430 - DNA, 15 bp, Homo sapiens
ttctttcacggttta

SEQ ID NO: 1564431 - DNA, 15 bp, Homo sapiens
tttctttcacggttt

SEQ ID NO: 1564432 - DNA, 15 bp, Homo sapiens
atttctttcacggtt

SEQ ID NO: 1564433 - DNA, 15 bp, Homo sapiens
tatttctttcacggt

SEQ ID NO: 1564434 - DNA, 15 bp, Homo sapiens
ctatttctttcacgg

SEQ ID NO: 1564435 - DNA, 15 bp, Homo sapiens
tctatttctttcacg

SEQ ID NO: 1564436 - DNA, 15 bp, Homo sapiens
ttctatttctttcac

SEQ ID NO: 1564437 - DNA, 15 bp, Homo sapiens
tttctatttctttca

SEQ ID NO: 1564438 - DNA, 15 bp, Homo sapiens
gtttctatttctttc

SEQ ID NO: 1564439 - DNA, 15 bp, Homo sapiens
ggtttctatttcttt

SEQ ID NO: 1564440 - DNA, 15 bp, Homo sapiens
tggtttctatttctt

SEQ ID NO: 1564441 - DNA, 15 bp, Homo sapiens
atggtttctatttct

SEQ ID NO: 1564442 - DNA, 15 bp, Homo sapiens
catggtttctatttc

SEQ ID NO: 1564443 - DNA, 15 bp, Homo sapiens
tcatggtttctattt

SEQ ID NO: 1564444 - DNA, 15 bp, Homo sapiens
attcatggtttctat

SEQ ID NO: 1564445 - DNA, 15 bp, Homo sapiens
cattcatggtttcta

SEQ ID NO: 1564446 - DNA, 15 bp, Homo sapiens
acattcatggtttct

SEQ ID NO: 1564447 - DNA, 15 bp, Homo sapiens
cacattcatggtttc

SEQ ID NO: 1564448 - DNA, 15 bp, Homo sapiens
acacattcatggttt

SEQ ID NO: 1564449 - DNA, 15 bp, Homo sapiens
gacacattcatggtt

SEQ ID NO: 1564450 - DNA, 15 bp, Homo sapiens
tgacacattcatggt

SEQ ID NO: 1564451 - DNA, 15 bp, Homo sapiens
ttgacacattcatgg

SEQ ID NO: 1564452 - DNA, 15 bp, Homo sapiens
attgacacattcatg

SEQ ID NO: 1564453 - DNA, 15 bp, Homo sapiens
gattgacacattcat

SEQ ID NO: 1564454 - DNA, 15 bp, Homo sapiens
tgattgacacattca

SEQ ID NO: 1564455 - DNA, 15 bp, Homo sapiens
gtgattgacacattc

SEQ ID NO: 1564456 - DNA, 15 bp, Homo sapiens
tgtgattgacacatt

SEQ ID NO: 1564457 - DNA, 15 bp, Homo sapiens
ctgtgattgacacat

SEQ ID NO: 1564458 - DNA, 15 bp, Homo sapiens
actgtgattgacaca

SEQ ID NO: 1564459 - DNA, 15 bp, Homo sapiens
aactgtgattgacac

SEQ ID NO: 1564460 - DNA, 15 bp, Homo sapiens
taactgtgattgaca

SEQ ID NO: 1564461 - DNA, 15 bp, Homo sapiens
gtaactgtgattgac

SEQ ID NO: 1564462 - DNA, 15 bp, Homo sapiens
agtaactgtgattga

SEQ ID NO: 1564463 - DNA, 15 bp, Homo sapiens
tagtaactgtgattg

SEQ ID NO: 1564464 - DNA, 15 bp, Homo sapiens
ctagtaactgtgatt

SEQ ID NO: 1564465 - DNA, 15 bp, Homo sapiens
gctagtaactgtgat

SEQ ID NO: 1564466 - DNA, 15 bp, Homo sapiens
ggctagtaactgtga

SEQ ID NO: 1564467 - DNA, 15 bp, Homo sapiens
tggctagtaactgtg

SEQ ID NO: 1564468 - DNA, 15 bp, Homo sapiens
gtggctagtaactgt

SEQ ID NO: 1564469 - DNA, 15 bp, Homo sapiens
tgtggctagtaactg

SEQ ID NO: 1564470 - DNA, 15 bp, Homo sapiens
atgtggctagtaact

SEQ ID NO: 1564471 - DNA, 15 bp, Homo sapiens
tatgtggctagtaac

SEQ ID NO: 1564472 - DNA, 15 bp, Homo sapiens
ctatgtggctagtaa

SEQ ID NO: 1564473 - DNA, 15 bp, Homo sapiens
cctatgtggctagta

SEQ ID NO: 1564474 - DNA, 15 bp, Homo sapiens
acctatgtggctagt

SEQ ID NO: 1564475 - DNA, 15 bp, Homo sapiens
cacctatgtggctag

SEQ ID NO: 1564476 - DNA, 15 bp, Homo sapiens
acacctatgtggcta

SEQ ID NO: 1564477 - DNA, 15 bp, Homo sapiens
cacacctatgtggct

SEQ ID NO: 1564478 - DNA, 15 bp, Homo sapiens
acacacctatgtggc

SEQ ID NO: 1564479 - DNA, 15 bp, Homo sapiens
aacacacctatgtgg

SEQ ID NO: 1564480 - DNA, 15 bp, Homo sapiens
taacacacctatgtg

SEQ ID NO: 1564481 - DNA, 15 bp, Homo sapiens
gtaacacacctatgt

SEQ ID NO: 1564482 - DNA, 15 bp, Homo sapiens
agtaacacacctatg

SEQ ID NO: 1564483 - DNA, 15 bp, Homo sapiens
cagtaacacacctat

SEQ ID NO: 1564484 - DNA, 15 bp, Homo sapiens
acagtaacacaccta

SEQ ID NO: 1564485 - DNA, 15 bp, Homo sapiens
aacagtaacacacct

SEQ ID NO: 1564486 - DNA, 15 bp, Homo sapiens
caacagtaacacacc

SEQ ID NO: 1564487 - DNA, 15 bp, Homo sapiens
acaacagtaacacac

SEQ ID NO: 1564488 - DNA, 15 bp, Homo sapiens
aacaacagtaacaca

SEQ ID NO: 1564489 - DNA, 15 bp, Homo sapiens
aaacaacagtaacac

SEQ ID NO: 1564490 - DNA, 15 bp, Homo sapiens
caaacaacagtaaca

SEQ ID NO: 1564491 - DNA, 15 bp, Homo sapiens
tcaaacaacagtaac

SEQ ID NO: 1564492 - DNA, 15 bp, Homo sapiens
ctcaaacaacagtaa

SEQ ID NO: 1564493 - DNA, 15 bp, Homo sapiens
actcaaacaacagta

SEQ ID NO: 1564494 - DNA, 15 bp, Homo sapiens
aactcaaacaacagt

SEQ ID NO: 1564495 - DNA, 15 bp, Homo sapiens
gaactcaaacaacag

SEQ ID NO: 1564496 - DNA, 15 bp, Homo sapiens
ggaactcaaacaaca

SEQ ID NO: 1564497 - DNA, 15 bp, Homo sapiens
gggaactcaaacaac

SEQ ID NO: 1564498 - DNA, 15 bp, Homo sapiens
agggaactcaaacaa

SEQ ID NO: 1564499 - DNA, 15 bp, Homo sapiens
aagggaactcaaaca

SEQ ID NO: 1564500 - DNA, 15 bp, Homo sapiens
gaagggaactcaaac

SEQ ID NO: 1564501 - DNA, 15 bp, Homo sapiens
agaagggaactcaaa

SEQ ID NO: 1564502 - DNA, 15 bp, Homo sapiens
cagaagggaactcaa

SEQ ID NO: 1564503 - DNA, 15 bp, Homo sapiens
acagaagggaactca

SEQ ID NO: 1564504 - DNA, 15 bp, Homo sapiens
aacagaagggaactc

SEQ ID NO: 1564505 - DNA, 15 bp, Homo sapiens
taacagaagggaact

SEQ ID NO: 1564506 - DNA, 15 bp, Homo sapiens
ctaacagaagggaac

SEQ ID NO: 1564507 - DNA, 15 bp, Homo sapiens
actaacagaagggaa

SEQ ID NO: 1564508 - DNA, 15 bp, Homo sapiens
tactaacagaaggga

SEQ ID NO: 1564509 - DNA, 15 bp, Homo sapiens
gtactaacagaaggg

SEQ ID NO: 1564510 - DNA, 15 bp, Homo sapiens
ggtactaacagaagg

SEQ ID NO: 1564511 - DNA, 15 bp, Homo sapiens
aggtactaacagaag

SEQ ID NO: 1564512 - DNA, 15 bp, Homo sapiens
aaggtactaacagaa

SEQ ID NO: 1564513 - DNA, 15 bp, Homo sapiens
caaggtactaacaga

SEQ ID NO: 1564514 - DNA, 15 bp, Homo sapiens
gcaaggtactaacag

SEQ ID NO: 1564515 - DNA, 15 bp, Homo sapiens
ggcaaggtactaaca

SEQ ID NO: 1564516 - DNA, 15 bp, Homo sapiens
tggcaaggtactaac

SEQ ID NO: 1564517 - DNA, 15 bp, Homo sapiens
atggcaaggtactaa

SEQ ID NO: 1564518 - DNA, 15 bp, Homo sapiens
tatggcaaggtacta

SEQ ID NO: 1564519 - DNA, 15 bp, Homo sapiens
ttatggcaaggtact

SEQ ID NO: 1564520 - DNA, 15 bp, Homo sapiens
tttatggcaaggtac

SEQ ID NO: 1564521 - DNA, 15 bp, Homo sapiens
atttatggcaaggta

SEQ ID NO: 1564522 - DNA, 15 bp, Homo sapiens
tatttatggcaaggt

SEQ ID NO: 1564523 - DNA, 15 bp, Homo sapiens
ttatttatggcaagg

SEQ ID NO: 1564524 - DNA, 15 bp, Homo sapiens
attatttatggcaag

SEQ ID NO: 1564525 - DNA, 15 bp, Homo sapiens
gattatttatggcaa

SEQ ID NO: 1564526 - DNA, 15 bp, Homo sapiens
tgattatttatggca

SEQ ID NO: 1564527 - DNA, 15 bp, Homo sapiens
atgattatttatggc

SEQ ID NO: 1564528 - DNA, 15 bp, Homo sapiens
aatgattatttatgg

SEQ ID NO: 1564529 - DNA, 15 bp, Homo sapiens
aaatgattatttatg

SEQ ID NO: 1564530 - DNA, 15 bp, Homo sapiens
taaatgattatttat

SEQ ID NO: 1564531 - DNA, 15 bp, Homo sapiens
ctaaatgattattta

SEQ ID NO: 1564532 - DNA, 15 bp, Homo sapiens
cctaaatgattattt

SEQ ID NO: 1564533 - DNA, 15 bp, Homo sapiens
tcctaaatgattatt

SEQ ID NO: 1564534 - DNA, 15 bp, Homo sapiens
ctcctaaatgattat

SEQ ID NO: 1564535 - DNA, 15 bp, Homo sapiens
actcctaaatgatta

SEQ ID NO: 1564536 - DNA, 15 bp, Homo sapiens
aactcctaaatgatt

SEQ ID NO: 1564537 - DNA, 15 bp, Homo sapiens
aaactcctaaatgat

SEQ ID NO: 1564538 - DNA, 15 bp, Homo sapiens
gaaactcctaaatga

SEQ ID NO: 1564539 - DNA, 15 bp, Homo sapiens
ggaaactcctaaatg

SEQ ID NO: 1564540 - DNA, 15 bp, Homo sapiens
aggaaactcctaaat

SEQ ID NO: 1564541 - DNA, 15 bp, Homo sapiens
caggaaactcctaaa

SEQ ID NO: 1564542 - DNA, 15 bp, Homo sapiens
ccaggaaactcctaa

SEQ ID NO: 1564543 - DNA, 15 bp, Homo sapiens
accaggaaactccta

SEQ ID NO: 1564544 - DNA, 15 bp, Homo sapiens
aaccaggaaactcct

SEQ ID NO: 1564545 - DNA, 15 bp, Homo sapiens
taaccaggaaactcc

SEQ ID NO: 1564546 - DNA, 15 bp, Homo sapiens
gtaaccaggaaactc

SEQ ID NO: 1564547 - DNA, 15 bp, Homo sapiens
agtaaccaggaaact

SEQ ID NO: 1564548 - DNA, 15 bp, Homo sapiens
aagtaaccaggaaac

SEQ ID NO: 1564549 - DNA, 15 bp, Homo sapiens
aaagtaaccaggaaa

SEQ ID NO: 1564550 - DNA, 15 bp, Homo sapiens
caaagtaaccaggaa

SEQ ID NO: 1564551 - DNA, 15 bp, Homo sapiens
acaaagtaaccagga

SEQ ID NO: 1564552 - DNA, 15 bp, Homo sapiens
cacaaagtaaccagg

SEQ ID NO: 1564553 - DNA, 15 bp, Homo sapiens
acacaaagtaaccag

SEQ ID NO: 1564554 - DNA, 15 bp, Homo sapiens
aacacaaagtaacca

SEQ ID NO: 1564555 - DNA, 15 bp, Homo sapiens
aaacacaaagtaacc

SEQ ID NO: 1564556 - DNA, 15 bp, Homo sapiens
aaaacacaaagtaac

SEQ ID NO: 1564557 - DNA, 15 bp, Homo sapiens
caaaacacaaagtaa

SEQ ID NO: 1564558 - DNA, 15 bp, Homo sapiens
acaaaacacaaagta

SEQ ID NO: 1564559 - DNA, 15 bp, Homo sapiens
tacaaaacacaaagt

SEQ ID NO: 1564560 - DNA, 15 bp, Homo sapiens
ttacaaaacacaaag

SEQ ID NO: 1564561 - DNA, 15 bp, Homo sapiens
attacaaaacacaaa

SEQ ID NO: 1564562 - DNA, 15 bp, Homo sapiens
aattacaaaacacaa

SEQ ID NO: 1564563 - DNA, 15 bp, Homo sapiens
gaattacaaaacaca

SEQ ID NO: 1564564 - DNA, 15 bp, Homo sapiens
agaattacaaaacac

SEQ ID NO: 1564565 - DNA, 15 bp, Homo sapiens
cagaattacaaaaca

SEQ ID NO: 1564566 - DNA, 15 bp, Homo sapiens
ccagaattacaaaac

SEQ ID NO: 1564567 - DNA, 15 bp, Homo sapiens
tccagaattacaaaa

SEQ ID NO: 1564568 - DNA, 15 bp, Homo sapiens
atccagaattacaaa

SEQ ID NO: 1564569 - DNA, 15 bp, Homo sapiens
aatccagaattacaa

SEQ ID NO: 1564570 - DNA, 15 bp, Homo sapiens
aaatccagaattaca

SEQ ID NO: 1564571 - DNA, 15 bp, Homo sapiens
aaaatccagaattac

SEQ ID NO: 1564572 - DNA, 15 bp, Homo sapiens
gaaaatccagaatta

SEQ ID NO: 1564573 - DNA, 15 bp, Homo sapiens
tgaaaatccagaatt

SEQ ID NO: 1564574 - DNA, 15 bp, Homo sapiens
atgaaaatccagaat

SEQ ID NO: 1564575 - DNA, 15 bp, Homo sapiens
catgaaaatccagaa

SEQ ID NO: 1564576 - DNA, 15 bp, Homo sapiens
gcatgaaaatccaga

SEQ ID NO: 1564577 - DNA, 15 bp, Homo sapiens
ggcatgaaaatccag

SEQ ID NO: 1564578 - DNA, 15 bp, Homo sapiens
tggcatgaaaatcca

SEQ ID NO: 1564579 - DNA, 15 bp, Homo sapiens
ttggcatgaaaatcc

SEQ ID NO: 1564580 - DNA, 15 bp, Homo sapiens
attggcatgaaaatc

SEQ ID NO: 1564581 - DNA, 15 bp, Homo sapiens
cattggcatgaaaat

SEQ ID NO: 1564582 - DNA, 15 bp, Homo sapiens
tcattggcatgaaaa

SEQ ID NO: 1564583 - DNA, 15 bp, Homo sapiens
ttcattggcatgaaa

SEQ ID NO: 1564584 - DNA, 15 bp, Homo sapiens
cttcattggcatgaa

SEQ ID NO: 1564585 - DNA, 15 bp, Homo sapiens
acttcattggcatga

SEQ ID NO: 1564586 - DNA, 15 bp, Homo sapiens
aacttcattggcatg

SEQ ID NO: 1564587 - DNA, 15 bp, Homo sapiens
caacttcattggcat

SEQ ID NO: 1564588 - DNA, 15 bp, Homo sapiens
acaacttcattggca

SEQ ID NO: 1564589 - DNA, 15 bp, Homo sapiens
tacaacttcattggc

SEQ ID NO: 1564590 - DNA, 15 bp, Homo sapiens
ttacaacttcattgg

SEQ ID NO: 1564591 - DNA, 15 bp, Homo sapiens
tttacaacttcattg

SEQ ID NO: 1564592 - DNA, 15 bp, Homo sapiens
atttacaacttcatt

SEQ ID NO: 1564593 - DNA, 15 bp, Homo sapiens
catttacaacttcat

SEQ ID NO: 1564594 - DNA, 15 bp, Homo sapiens
tcatttacaacttca

SEQ ID NO: 1564595 - DNA, 15 bp, Homo sapiens
ttcatttacaacttc

SEQ ID NO: 1564596 - DNA, 15 bp, Homo sapiens
tttcatttacaactt

SEQ ID NO: 1564597 - DNA, 15 bp, Homo sapiens
ttttcatttacaact

SEQ ID NO: 1564598 - DNA, 15 bp, Homo sapiens
tttttcatttacaac

SEQ ID NO: 1564599 - DNA, 15 bp, Homo sapiens
gtttttcatttacaa

SEQ ID NO: 1564600 - DNA, 15 bp, Homo sapiens
agtttttcatttaca

SEQ ID NO: 1564601 - DNA, 15 bp, Homo sapiens
tagtttttcatttac

SEQ ID NO: 1564602 - DNA, 15 bp, Homo sapiens
ttagtttttcattta

SEQ ID NO: 1564603 - DNA, 15 bp, Homo sapiens
gttagtttttcattt

SEQ ID NO: 1564604 - DNA, 15 bp, Homo sapiens
ggttagtttttcatt

SEQ ID NO: 1564605 - DNA, 15 bp, Homo sapiens
aggttagtttttcat

SEQ ID NO: 1564606 - DNA, 15 bp, Homo sapiens
gaggttagtttttca

SEQ ID NO: 1564607 - DNA, 15 bp, Homo sapiens
tgaggttagtttttc

SEQ ID NO: 1564608 - DNA, 15 bp, Homo sapiens
ctgaggttagttttt

SEQ ID NO: 1564609 - DNA, 15 bp, Homo sapiens
tctgaggttagtttt

SEQ ID NO: 1564610 - DNA, 15 bp, Homo sapiens
ttctgaggttagttt

SEQ ID NO: 1564611 - DNA, 15 bp, Homo sapiens
tttctgaggttagtt

SEQ ID NO: 1564612 - DNA, 15 bp, Homo sapiens
ttttctgaggttagt

SEQ ID NO: 1564613 - DNA, 15 bp, Homo sapiens
tttttctgaggttag

SEQ ID NO: 1564614 - DNA, 15 bp, Homo sapiens
ttttttctgaggtta

SEQ ID NO: 1564615 - DNA, 15 bp, Homo sapiens
tttttttctgaggtt

SEQ ID NO: 1564616 - DNA, 15 bp, Homo sapiens
atttttttctgaggt

SEQ ID NO: 1564617 - DNA, 15 bp, Homo sapiens
tatttttttctgagg

SEQ ID NO: 1564618 - DNA, 15 bp, Homo sapiens
atatttttttctgag

SEQ ID NO: 1564619 - DNA, 15 bp, Homo sapiens
tatatttttttctga

SEQ ID NO: 1564620 - DNA, 15 bp, Homo sapiens
atatatttttttctg

SEQ ID NO: 1564621 - DNA, 15 bp, Homo sapiens
aatatatttttttct

SEQ ID NO: 1564622 - DNA, 15 bp, Homo sapiens
caatatatttttttc

SEQ ID NO: 1564623 - DNA, 15 bp, Homo sapiens
tcaatatattttttt

SEQ ID NO: 1564624 - DNA, 15 bp, Homo sapiens
ttcaatatatttttt

SEQ ID NO: 1564625 - DNA, 15 bp, Homo sapiens
attcaatatattttt

SEQ ID NO: 1564626 - DNA, 15 bp, Homo sapiens
aattcaatatatttt

SEQ ID NO: 1564627 - DNA, 15 bp, Homo sapiens
gaattcaatatattt

SEQ ID NO: 1564628 - DNA, 15 bp, Homo sapiens
tgaattcaatatatt

SEQ ID NO: 1564629 - DNA, 15 bp, Homo sapiens
atgaattcaatatat

SEQ ID NO: 1564630 - DNA, 15 bp, Homo sapiens
aatgaattcaatata

SEQ ID NO: 1564631 - DNA, 15 bp, Homo sapiens
gaatgaattcaatat

SEQ ID NO: 1564632 - DNA, 15 bp, Homo sapiens
tgaatgaattcaata

SEQ ID NO: 1564633 - DNA, 15 bp, Homo sapiens
ttgaatgaattcaat

SEQ ID NO: 1564634 - DNA, 15 bp, Homo sapiens
gttgaatgaattcaa

SEQ ID NO: 1564635 - DNA, 15 bp, Homo sapiens
ggttgaatgaattca

SEQ ID NO: 1564636 - DNA, 15 bp, Homo sapiens
gggttgaatgaattc

SEQ ID NO: 1564637 - DNA, 15 bp, Homo sapiens
tgggttgaatgaatt

SEQ ID NO: 1564638 - DNA, 15 bp, Homo sapiens
atgggttgaatgaat

SEQ ID NO: 1564639 - DNA, 15 bp, Homo sapiens
catgggttgaatgaa

SEQ ID NO: 1564640 - DNA, 15 bp, Homo sapiens
acatgggttgaatga

SEQ ID NO: 1564641 - DNA, 15 bp, Homo sapiens
tacatgggttgaatg

SEQ ID NO: 1564642 - DNA, 15 bp, Homo sapiens
gtacatgggttgaat

SEQ ID NO: 1564643 - DNA, 15 bp, Homo sapiens
agtacatgggttgaa

SEQ ID NO: 1564644 - DNA, 15 bp, Homo sapiens
tagtacatgggttga

SEQ ID NO: 1564645 - DNA, 15 bp, Homo sapiens
ttagtacatgggttg

SEQ ID NO: 1564646 - DNA, 15 bp, Homo sapiens
cttagtacatgggtt

SEQ ID NO: 1564647 - DNA, 15 bp, Homo sapiens
acttagtacatgggt

SEQ ID NO: 1564648 - DNA, 15 bp, Homo sapiens
cacttagtacatggg

SEQ ID NO: 1564649 - DNA, 15 bp, Homo sapiens
tcacttagtacatgg

SEQ ID NO: 1564650 - DNA, 15 bp, Homo sapiens
ttcacttagtacatg

SEQ ID NO: 1564651 - DNA, 15 bp, Homo sapiens
tttcacttagtacat

SEQ ID NO: 1564652 - DNA, 15 bp, Homo sapiens
ttttcacttagtaca

SEQ ID NO: 1564653 - DNA, 15 bp, Homo sapiens
tttttcacttagtac

SEQ ID NO: 1564654 - DNA, 15 bp, Homo sapiens
ctttttcacttagta

SEQ ID NO: 1564655 - DNA, 15 bp, Homo sapiens
tctttttcacttagt

SEQ ID NO: 1564656 - DNA, 15 bp, Homo sapiens
atctttttcacttag

SEQ ID NO: 1564657 - DNA, 15 bp, Homo sapiens
tatctttttcactta

SEQ ID NO: 1564658 - DNA, 15 bp, Homo sapiens
ttatctttttcactt

SEQ ID NO: 1564659 - DNA, 15 bp, Homo sapiens
cttatctttttcact

SEQ ID NO: 1564660 - DNA, 15 bp, Homo sapiens
ccttatctttttcac

SEQ ID NO: 1564661 - DNA, 15 bp, Homo sapiens
accttatctttttca

SEQ ID NO: 1564662 - DNA, 15 bp, Homo sapiens
taccttatctttttc

SEQ ID NO: 1564663 - DNA, 15 bp, Homo sapiens
ttaccttatcttttt

SEQ ID NO: 1564664 - DNA, 15 bp, Homo sapiens
gttaccttatctttt

SEQ ID NO: 1564665 - DNA, 15 bp, Homo sapiens
agttaccttatcttt

SEQ ID NO: 1564666 - DNA, 15 bp, Homo sapiens
cagttaccttatctt

SEQ ID NO: 1564667 - DNA, 15 bp, Homo sapiens
gcagttaccttatct

SEQ ID NO: 1564668 - DNA, 15 bp, Homo sapiens
ggcagttaccttatc

SEQ ID NO: 1564669 - DNA, 15 bp, Homo sapiens
gggcagttaccttat

SEQ ID NO: 1564670 - DNA, 15 bp, Homo sapiens
agggcagttacctta

SEQ ID NO: 1564671 - DNA, 15 bp, Homo sapiens
cagggcagttacctt

SEQ ID NO: 1564672 - DNA, 15 bp, Homo sapiens
ccagggcagttacct

SEQ ID NO: 1564673 - DNA, 15 bp, Homo sapiens
tccagggcagttacc

SEQ ID NO: 1564674 - DNA, 15 bp, Homo sapiens
ttccagggcagttac

SEQ ID NO: 1564675 - DNA, 15 bp, Homo sapiens
cttccagggcagtta

SEQ ID NO: 1564676 - DNA, 15 bp, Homo sapiens
tcttccagggcagtt

SEQ ID NO: 1564677 - DNA, 15 bp, Homo sapiens
gtcttccagggcagt

SEQ ID NO: 1564678 - DNA, 15 bp, Homo sapiens
agtcttccagggcag

SEQ ID NO: 1564679 - DNA, 15 bp, Homo sapiens
aagtcttccagggca

SEQ ID NO: 1564680 - DNA, 15 bp, Homo sapiens
aaagtcttccagggc

SEQ ID NO: 1564681 - DNA, 15 bp, Homo sapiens
caaagtcttccaggg

SEQ ID NO: 1564682 - DNA, 15 bp, Homo sapiens
acaaagtcttccagg

SEQ ID NO: 1564683 - DNA, 15 bp, Homo sapiens
tacaaagtcttccag

SEQ ID NO: 1564684 - DNA, 15 bp, Homo sapiens
ttacaaagtcttcca

SEQ ID NO: 1564685 - DNA, 15 bp, Homo sapiens
attacaaagtcttcc

SEQ ID NO: 1564686 - DNA, 15 bp, Homo sapiens
aattacaaagtcttc

SEQ ID NO: 1564687 - DNA, 15 bp, Homo sapiens
aaattacaaagtctt

SEQ ID NO: 1564688 - DNA, 15 bp, Homo sapiens
caaattacaaagtct

SEQ ID NO: 1564689 - DNA, 15 bp, Homo sapiens
acaaattacaaagtc

SEQ ID NO: 1564690 - DNA, 15 bp, Homo sapiens
cacaaattacaaagt

SEQ ID NO: 1564691 - DNA, 15 bp, Homo sapiens
acacaaattacaaag

SEQ ID NO: 1564692 - DNA, 15 bp, Homo sapiens
gacacaaattacaaa

SEQ ID NO: 1564693 - DNA, 15 bp, Homo sapiens
ggacacaaattacaa

SEQ ID NO: 1564694 - DNA, 15 bp, Homo sapiens
tggacacaaattaca

SEQ ID NO: 1564695 - DNA, 15 bp, Homo sapiens
ttggacacaaattac

SEQ ID NO: 1564696 - DNA, 15 bp, Homo sapiens
cttggacacaaatta

SEQ ID NO: 1564697 - DNA, 15 bp, Homo sapiens
tcttggacacaaatt

SEQ ID NO: 1564698 - DNA, 15 bp, Homo sapiens
gtcttggacacaaat

SEQ ID NO: 1564699 - DNA, 15 bp, Homo sapiens
agtcttggacacaaa

SEQ ID NO: 1564700 - DNA, 15 bp, Homo sapiens
aagtcttggacacaa

SEQ ID NO: 1564701 - DNA, 15 bp, Homo sapiens
taagtcttggacaca

SEQ ID NO: 1564702 - DNA, 15 bp, Homo sapiens
ataagtcttggacac

SEQ ID NO: 1564703 - DNA, 15 bp, Homo sapiens
tataagtcttggaca

SEQ ID NO: 1564704 - DNA, 15 bp, Homo sapiens
ttataagtcttggac

SEQ ID NO: 1564705 - DNA, 15 bp, Homo sapiens
attataagtcttgga

SEQ ID NO: 1564706 - DNA, 15 bp, Homo sapiens
gattataagtcttgg

SEQ ID NO: 1564707 - DNA, 15 bp, Homo sapiens
tgattataagtcttg

SEQ ID NO: 1564708 - DNA, 15 bp, Homo sapiens
ctgattataagtctt

SEQ ID NO: 1564709 - DNA, 15 bp, Homo sapiens
gctgattataagtct

SEQ ID NO: 1564710 - DNA, 15 bp, Homo sapiens
ggctgattataagtc

SEQ ID NO: 1564711 - DNA, 15 bp, Homo sapiens
tggctgattataagt

SEQ ID NO: 1564712 - DNA, 15 bp, Homo sapiens
ttggctgattataag

SEQ ID NO: 1564713 - DNA, 15 bp, Homo sapiens
attggctgattataa

SEQ ID NO: 1564714 - DNA, 15 bp, Homo sapiens
gattggctgattata

SEQ ID NO: 1564715 - DNA, 15 bp, Homo sapiens
tgattggctgattat

SEQ ID NO: 1564716 - DNA, 15 bp, Homo sapiens
gtgattggctgatta

SEQ ID NO: 1564717 - DNA, 15 bp, Homo sapiens
tgtgattggctgatt

SEQ ID NO: 1564718 - DNA, 15 bp, Homo sapiens
ttgtgattggctgat

SEQ ID NO: 1564719 - DNA, 15 bp, Homo sapiens
gttgtgattggctga

SEQ ID NO: 1564720 - DNA, 15 bp, Homo sapiens
tgttgtgattggctg

SEQ ID NO: 1564721 - DNA, 15 bp, Homo sapiens
ctgttgtgattggct

SEQ ID NO: 1564722 - DNA, 15 bp, Homo sapiens
gctgttgtgattggc

SEQ ID NO: 1564723 - DNA, 15 bp, Homo sapiens
tgctgttgtgattgg

SEQ ID NO: 1564724 - DNA, 15 bp, Homo sapiens
ttgctgttgtgattg

SEQ ID NO: 1564725 - DNA, 15 bp, Homo sapiens
gttgctgttgtgatt

SEQ ID NO: 1564726 - DNA, 15 bp, Homo sapiens
agttgctgttgtgat

SEQ ID NO: 1564727 - DNA, 15 bp, Homo sapiens
gagttgctgttgtga

SEQ ID NO: 1564728 - DNA, 15 bp, Homo sapiens
ggagttgctgttgtg

SEQ ID NO: 1564729 - DNA, 15 bp, Homo sapiens
tggagttgctgttgt

SEQ ID NO: 1564730 - DNA, 15 bp, Homo sapiens
ctggagttgctgttg

SEQ ID NO: 1564731 - DNA, 15 bp, Homo sapiens
cctggagttgctgtt

SEQ ID NO: 1564732 - DNA, 15 bp, Homo sapiens
acctggagttgctgt

SEQ ID NO: 1564733 - DNA, 15 bp, Homo sapiens
cacctggagttgctg

SEQ ID NO: 1564734 - DNA, 15 bp, Homo sapiens
gcacctggagttgct

SEQ ID NO: 1564735 - DNA, 15 bp, Homo sapiens
ggcacctggagttgc

SEQ ID NO: 1564736 - DNA, 15 bp, Homo sapiens
tggcacctggagttg

SEQ ID NO: 1564737 - DNA, 15 bp, Homo sapiens
atggcacctggagtt

SEQ ID NO: 1564738 - DNA, 15 bp, Homo sapiens
aatggcacctggagt

SEQ ID NO: 1564739 - DNA, 15 bp, Homo sapiens
taatggcacctggag

SEQ ID NO: 1564740 - DNA, 15 bp, Homo sapiens
ttaatggcacctgga

SEQ ID NO: 1564741 - DNA, 15 bp, Homo sapiens
tttaatggcacctgg

SEQ ID NO: 1564742 - DNA, 15 bp, Homo sapiens
ttttaatggcacctg

SEQ ID NO: 1564743 - DNA, 15 bp, Homo sapiens
attttaatggcacct

SEQ ID NO: 1564744 - DNA, 15 bp, Homo sapiens
cattttaatggcacc

SEQ ID NO: 1564745 - DNA, 15 bp, Homo sapiens
tcattttaatggcac

SEQ ID NO: 1564746 - DNA, 15 bp, Homo sapiens
atcattttaatggca

SEQ ID NO: 1564747 - DNA, 15 bp, Homo sapiens
tatcattttaatggc

SEQ ID NO: 1564748 - DNA, 15 bp, Homo sapiens
atatcattttaatgg

SEQ ID NO: 1564749 - DNA, 15 bp, Homo sapiens
catatcattttaatg

SEQ ID NO: 1564750 - DNA, 15 bp, Homo sapiens
acatatcattttaat

SEQ ID NO: 1564751 - DNA, 15 bp, Homo sapiens
gacatatcattttaa

SEQ ID NO: 1564752 - DNA, 15 bp, Homo sapiens
agacatatcatttta

SEQ ID NO: 1564753 - DNA, 15 bp, Homo sapiens
aagacatatcatttt

SEQ ID NO: 1564754 - DNA, 15 bp, Homo sapiens
caagacatatcattt

SEQ ID NO: 1564755 - DNA, 15 bp, Homo sapiens
tcaagacatatcatt

SEQ ID NO: 1564756 - DNA, 15 bp, Homo sapiens
atcaagacatatcat

SEQ ID NO: 1564757 - DNA, 15 bp, Homo sapiens
catcaagacatatca

SEQ ID NO: 1564758 - DNA, 15 bp, Homo sapiens
ccatcaagacatatc

SEQ ID NO: 1564759 - DNA, 15 bp, Homo sapiens
tccatcaagacatat

SEQ ID NO: 1564760 - DNA, 15 bp, Homo sapiens
ctccatcaagacata

SEQ ID NO: 1564761 - DNA, 15 bp, Homo sapiens
tctccatcaagacat

SEQ ID NO: 1564762 - DNA, 15 bp, Homo sapiens
ttctccatcaagaca

SEQ ID NO: 1564763 - DNA, 15 bp, Homo sapiens
tttctccatcaagac

SEQ ID NO: 1564764 - DNA, 15 bp, Homo sapiens
ctttctccatcaaga

SEQ ID NO: 1564765 - DNA, 15 bp, Homo sapiens
gctttctccatcaag

SEQ ID NO: 1564766 - DNA, 15 bp, Homo sapiens
agctttctccatcaa

SEQ ID NO: 1564767 - DNA, 15 bp, Homo sapiens
cagctttctccatca

SEQ ID NO: 1564768 - DNA, 15 bp, Homo sapiens
ctccagctttctcca

SEQ ID NO: 1564769 - DNA, 15 bp, Homo sapiens
tctccagctttctcc

SEQ ID NO: 1564770 - DNA, 15 bp, Homo sapiens
atctccagctttctc

SEQ ID NO: 1564771 - DNA, 15 bp, Homo sapiens
gatctccagctttct

SEQ ID NO: 1564772 - DNA, 15 bp, Homo sapiens
agatctccagctttc

SEQ ID NO: 1564773 - DNA, 15 bp, Homo sapiens
cagatctccagcttt

SEQ ID NO: 1564774 - DNA, 15 bp, Homo sapiens
ccagatctccagctt

SEQ ID NO: 1564775 - DNA, 15 bp, Homo sapiens
cccagatctccagct

SEQ ID NO: 1564776 - DNA, 15 bp, Homo sapiens
ccccagatctccagc

SEQ ID NO: 1564777 - DNA, 15 bp, Homo sapiens
tccccagatctccag

SEQ ID NO: 1564778 - DNA, 15 bp, Homo sapiens
ttccccagatctcca

SEQ ID NO: 1564779 - DNA, 15 bp, Homo sapiens
tttccccagatctcc

SEQ ID NO: 1564780 - DNA, 15 bp, Homo sapiens
atttccccagatctc

SEQ ID NO: 1564781 - DNA, 15 bp, Homo sapiens
aatttccccagatct

SEQ ID NO: 1564782 - DNA, 15 bp, Homo sapiens
taatttccccagatc

SEQ ID NO: 1564783 - DNA, 15 bp, Homo sapiens
ctaatttccccagat

SEQ ID NO: 1564784 - DNA, 15 bp, Homo sapiens
tctaatttccccaga

SEQ ID NO: 1564785 - DNA, 15 bp, Homo sapiens
ttctaatttccccag

SEQ ID NO: 1564786 - DNA, 15 bp, Homo sapiens
cttctaatttcccca

SEQ ID NO: 1564787 - DNA, 15 bp, Homo sapiens
tcttctaatttcccc

SEQ ID NO: 1564788 - DNA, 15 bp, Homo sapiens
ttcttctaatttccc

SEQ ID NO: 1564789 - DNA, 15 bp, Homo sapiens
tttcttctaatttcc

SEQ ID NO: 1564790 - DNA, 15 bp, Homo sapiens
ttttcttctaatttc

SEQ ID NO: 1564791 - DNA, 15 bp, Homo sapiens
ttttttcttctaatt

SEQ ID NO: 1564792 - DNA, 15 bp, Homo sapiens
tttttttcttctaat

SEQ ID NO: 1564793 - DNA, 15 bp, Homo sapiens
ttttttttcttctaa

SEQ ID NO: 1564794 - DNA, 15 bp, Homo sapiens
gttttttttcttcta

SEQ ID NO: 1564795 - DNA, 15 bp, Homo sapiens
agttttttttcttct

SEQ ID NO: 1564796 - DNA, 15 bp, Homo sapiens
cagttttttttcttc

SEQ ID NO: 1564797 - DNA, 15 bp, Homo sapiens
gcagttttttttctt

SEQ ID NO: 1564798 - DNA, 15 bp, Homo sapiens
tgcagttttttttct

SEQ ID NO: 1564799 - DNA, 15 bp, Homo sapiens
ctgcagttttttttc

SEQ ID NO: 1564800 - DNA, 15 bp, Homo sapiens
tctgcagtttttttt

SEQ ID NO: 1564801 - DNA, 15 bp, Homo sapiens
ctctgcagttttttt

SEQ ID NO: 1564802 - DNA, 15 bp, Homo sapiens
tctctgcagtttttt

SEQ ID NO: 1564803 - DNA, 15 bp, Homo sapiens
ctctctgcagttttt

SEQ ID NO: 1564804 - DNA, 15 bp, Homo sapiens
cctctctgcagtttt

SEQ ID NO: 1564805 - DNA, 15 bp, Homo sapiens
tcctctctgcagttt

SEQ ID NO: 1564806 - DNA, 15 bp, Homo sapiens
ctcctctctgcagtt

SEQ ID NO: 1564807 - DNA, 15 bp, Homo sapiens
tctcctctctgcagt

SEQ ID NO: 1564808 - DNA, 15 bp, Homo sapiens
atctcctctctgcag

SEQ ID NO: 1564809 - DNA, 15 bp, Homo sapiens
tatctcctctctgca

SEQ ID NO: 1564810 - DNA, 15 bp, Homo sapiens
ttatctcctctctgc

SEQ ID NO: 1564811 - DNA, 15 bp, Homo sapiens
gttatctcctctctg

SEQ ID NO: 1564812 - DNA, 15 bp, Homo sapiens
tgttatctcctctct

SEQ ID NO: 1564813 - DNA, 15 bp, Homo sapiens
atgttatctcctctc

SEQ ID NO: 1564814 - DNA, 15 bp, Homo sapiens
aatgttatctcctct

SEQ ID NO: 1564815 - DNA, 15 bp, Homo sapiens
aaatgttatctcctc

SEQ ID NO: 1564816 - DNA, 15 bp, Homo sapiens
caaatgttatctcct

SEQ ID NO: 1564817 - DNA, 15 bp, Homo sapiens
ccaaatgttatctcc

SEQ ID NO: 1564818 - DNA, 15 bp, Homo sapiens
cccaaatgttatctc

SEQ ID NO: 1564819 - DNA, 15 bp, Homo sapiens
gcccaaatgttatct

SEQ ID NO: 1564820 - DNA, 15 bp, Homo sapiens
agcccaaatgttatc

SEQ ID NO: 1564821 - DNA, 15 bp, Homo sapiens
cagcccaaatgttat

SEQ ID NO: 1564822 - DNA, 15 bp, Homo sapiens
acagcccaaatgtta

SEQ ID NO: 1564823 - DNA, 15 bp, Homo sapiens
cacagcccaaatgtt

SEQ ID NO: 1564824 - DNA, 15 bp, Homo sapiens
acacagcccaaatgt

SEQ ID NO: 1564825 - DNA, 15 bp, Homo sapiens
gacacagcccaaatg

SEQ ID NO: 1564826 - DNA, 15 bp, Homo sapiens
tgacacagcccaaat

SEQ ID NO: 1564827 - DNA, 15 bp, Homo sapiens
atgacacagcccaaa

SEQ ID NO: 1564828 - DNA, 15 bp, Homo sapiens
tatgacacagcccaa

SEQ ID NO: 1564829 - DNA, 15 bp, Homo sapiens
ttatgacacagccca

SEQ ID NO: 1564830 - DNA, 15 bp, Homo sapiens
tttatgacacagccc

SEQ ID NO: 1564831 - DNA, 15 bp, Homo sapiens
ctttatgacacagcc

SEQ ID NO: 1564832 - DNA, 15 bp, Homo sapiens
tctttatgacacagc

SEQ ID NO: 1564833 - DNA, 15 bp, Homo sapiens
atctttatgacacag

SEQ ID NO: 1564834 - DNA, 15 bp, Homo sapiens
aatctttatgacaca

SEQ ID NO: 1564835 - DNA, 15 bp, Homo sapiens
aaatctttatgacac

SEQ ID NO: 1564836 - DNA, 15 bp, Homo sapiens
taaatctttatgaca

SEQ ID NO: 1564837 - DNA, 15 bp, Homo sapiens
ttaaatctttatgac

SEQ ID NO: 1564838 - DNA, 15 bp, Homo sapiens
attaaatctttatga

SEQ ID NO: 1564839 - DNA, 15 bp, Homo sapiens
tattaaatctttatg

SEQ ID NO: 1564840 - DNA, 15 bp, Homo sapiens
atattaaatctttat

SEQ ID NO: 1564841 - DNA, 15 bp, Homo sapiens
tatattaaatcttta

SEQ ID NO: 1564842 - DNA, 15 bp, Homo sapiens
atatattaaatcttt

SEQ ID NO: 1564843 - DNA, 15 bp, Homo sapiens
catatattaaatctt

SEQ ID NO: 1564844 - DNA, 15 bp, Homo sapiens
gcatatattaaatct

SEQ ID NO: 1564845 - DNA, 15 bp, Homo sapiens
agcatatattaaatc

SEQ ID NO: 1564846 - DNA, 15 bp, Homo sapiens
aagcatatattaaat

SEQ ID NO: 1564847 - DNA, 15 bp, Homo sapiens
caagcatatattaaa

SEQ ID NO: 1564848 - DNA, 15 bp, Homo sapiens
gcaagcatatattaa

SEQ ID NO: 1564849 - DNA, 15 bp, Homo sapiens
tgcaagcatatatta

SEQ ID NO: 1564850 - DNA, 15 bp, Homo sapiens
ttgcaagcatatatt

SEQ ID NO: 1564851 - DNA, 15 bp, Homo sapiens
tttgcaagcatatat

SEQ ID NO: 1564852 - DNA, 15 bp, Homo sapiens
ttttgcaagcatata

SEQ ID NO: 1564853 - DNA, 15 bp, Homo sapiens
attttgcaagcatat

SEQ ID NO: 1564854 - DNA, 15 bp, Homo sapiens
tattttgcaagcata

SEQ ID NO: 1564855 - DNA, 15 bp, Homo sapiens
ctattttgcaagcat

SEQ ID NO: 1564856 - DNA, 15 bp, Homo sapiens
gctattttgcaagca

SEQ ID NO: 1564857 - DNA, 15 bp, Homo sapiens
tgctattttgcaagc

SEQ ID NO: 1564858 - DNA, 15 bp, Homo sapiens
ctgctattttgcaag

SEQ ID NO: 1564859 - DNA, 15 bp, Homo sapiens
cctgctattttgcaa

SEQ ID NO: 1564860 - DNA, 15 bp, Homo sapiens
tcctgctattttgca

SEQ ID NO: 1564861 - DNA, 15 bp, Homo sapiens
atcctgctattttgc

SEQ ID NO: 1564862 - DNA, 15 bp, Homo sapiens
tatcctgctattttg

SEQ ID NO: 1564863 - DNA, 15 bp, Homo sapiens
ttatcctgctatttt

SEQ ID NO: 1564864 - DNA, 15 bp, Homo sapiens
cttatcctgctattt

SEQ ID NO: 1564865 - DNA, 15 bp, Homo sapiens
acttatcctgctatt

SEQ ID NO: 1564866 - DNA, 15 bp, Homo sapiens
tacttatcctgctat

SEQ ID NO: 1564867 - DNA, 15 bp, Homo sapiens
ctacttatcctgcta

SEQ ID NO: 1564868 - DNA, 15 bp, Homo sapiens
cctacttatcctgct

SEQ ID NO: 1564869 - DNA, 15 bp, Homo sapiens
ccctacttatcctgc

SEQ ID NO: 1564870 - DNA, 15 bp, Homo sapiens
cccctacttatcctg

SEQ ID NO: 1564871 - DNA, 15 bp, Homo sapiens
gcccctacttatcct

SEQ ID NO: 1564872 - DNA, 15 bp, Homo sapiens
tgcccctacttatcc

SEQ ID NO: 1564873 - DNA, 15 bp, Homo sapiens
atgcccctacttatc

SEQ ID NO: 1564874 - DNA, 15 bp, Homo sapiens
tatgcccctacttat

SEQ ID NO: 1564875 - DNA, 15 bp, Homo sapiens
atatgcccctactta

SEQ ID NO: 1564876 - DNA, 15 bp, Homo sapiens
catatgcccctactt

SEQ ID NO: 1564877 - DNA, 15 bp, Homo sapiens
acatatgcccctact

SEQ ID NO: 1564878 - DNA, 15 bp, Homo sapiens
aacatatgcccctac

SEQ ID NO: 1564879 - DNA, 15 bp, Homo sapiens
aaacatatgccccta

SEQ ID NO: 1564880 - DNA, 15 bp, Homo sapiens
taaacatatgcccct

SEQ ID NO: 1564881 - DNA, 15 bp, Homo sapiens
ttaaacatatgcccc

SEQ ID NO: 1564882 - DNA, 15 bp, Homo sapiens
cttaaacatatgccc

SEQ ID NO: 1564883 - DNA, 15 bp, Homo sapiens
tcttaaacatatgcc

SEQ ID NO: 1564884 - DNA, 15 bp, Homo sapiens
ctcttaaacatatgc

SEQ ID NO: 1564885 - DNA, 15 bp, Homo sapiens
gctcttaaacatatg

SEQ ID NO: 1564886 - DNA, 15 bp, Homo sapiens
tgctcttaaacatat

SEQ ID NO: 1564887 - DNA, 15 bp, Homo sapiens
ctgctcttaaacata

SEQ ID NO: 1564888 - DNA, 15 bp, Homo sapiens
actgctcttaaacat

SEQ ID NO: 1564889 - DNA, 15 bp, Homo sapiens
cactgctcttaaaca

SEQ ID NO: 1564890 - DNA, 15 bp, Homo sapiens
ccactgctcttaaac

SEQ ID NO: 1564891 - DNA, 15 bp, Homo sapiens
cccactgctcttaaa

SEQ ID NO: 1564892 - DNA, 15 bp, Homo sapiens
ccccactgctcttaa

SEQ ID NO: 1564893 - DNA, 15 bp, Homo sapiens
tccccactgctctta

SEQ ID NO: 1564894 - DNA, 15 bp, Homo sapiens
ttccccactgctctt

SEQ ID NO: 1564895 - DNA, 15 bp, Homo sapiens
attccccactgctct

SEQ ID NO: 1564896 - DNA, 15 bp, Homo sapiens
tattccccactgctc

SEQ ID NO: 1564897 - DNA, 15 bp, Homo sapiens
ctattccccactgct

SEQ ID NO: 1564898 - DNA, 15 bp, Homo sapiens
gctattccccactgc

SEQ ID NO: 1564899 - DNA, 15 bp, Homo sapiens
tgctattccccactg

SEQ ID NO: 1564900 - DNA, 15 bp, Homo sapiens
ttgctattccccact

SEQ ID NO: 1564901 - DNA, 15 bp, Homo sapiens
cttgctattccccac

SEQ ID NO: 1564902 - DNA, 15 bp, Homo sapiens
tcttgctattcccca

SEQ ID NO: 1564903 - DNA, 15 bp, Homo sapiens
ttcttgctattcccc

SEQ ID NO: 1564904 - DNA, 15 bp, Homo sapiens
attcttgctattccc

SEQ ID NO: 1564905 - DNA, 15 bp, Homo sapiens
tattcttgctattcc

SEQ ID NO: 1564906 - DNA, 15 bp, Homo sapiens
ttattcttgctattc

SEQ ID NO: 1564907 - DNA, 15 bp, Homo sapiens
tttattcttgctatt

SEQ ID NO: 1564908 - DNA, 15 bp, Homo sapiens
ctttattcttgctat

SEQ ID NO: 1564909 - DNA, 15 bp, Homo sapiens
tctttattcttgcta

SEQ ID NO: 1564910 - DNA, 15 bp, Homo sapiens
ttctttattcttgct

SEQ ID NO: 1564911 - DNA, 15 bp, Homo sapiens
tttctttattcttgc

SEQ ID NO: 1564912 - DNA, 15 bp, Homo sapiens
ttttctttattcttg

SEQ ID NO: 1564913 - DNA, 15 bp, Homo sapiens
cttttctttattctt

SEQ ID NO: 1564914 - DNA, 15 bp, Homo sapiens
ccttttctttattct

SEQ ID NO: 1564915 - DNA, 15 bp, Homo sapiens
gccttttctttattc

SEQ ID NO: 1564916 - DNA, 15 bp, Homo sapiens
tgccttttctttatt

SEQ ID NO: 1564917 - DNA, 15 bp, Homo sapiens
ctgccttttctttat

SEQ ID NO: 1564918 - DNA, 15 bp, Homo sapiens
cctgccttttcttta

SEQ ID NO: 1564919 - DNA, 15 bp, Homo sapiens
tcctgccttttcttt

SEQ ID NO: 1564920 - DNA, 15 bp, Homo sapiens
ttcctgccttttctt

SEQ ID NO: 1564921 - DNA, 15 bp, Homo sapiens
tttcctgccttttct

SEQ ID NO: 1564922 - DNA, 15 bp, Homo sapiens
ctttcctgccttttc

SEQ ID NO: 1564923 - DNA, 15 bp, Homo sapiens
gctttcctgcctttt

SEQ ID NO: 1564924 - DNA, 15 bp, Homo sapiens
tgctttcctgccttt

SEQ ID NO: 1564925 - DNA, 15 bp, Homo sapiens
ttgctttcctgcctt

SEQ ID NO: 1564926 - DNA, 15 bp, Homo sapiens
gttgctttcctgcct

SEQ ID NO: 1564927 - DNA, 15 bp, Homo sapiens
agttgctttcctgcc

SEQ ID NO: 1564928 - DNA, 15 bp, Homo sapiens
cagttgctttcctgc

SEQ ID NO: 1564929 - DNA, 15 bp, Homo sapiens
tcagttgctttcctg

SEQ ID NO: 1564930 - DNA, 15 bp, Homo sapiens
atcagttgctttcct

SEQ ID NO: 1564931 - DNA, 15 bp, Homo sapiens
catcagttgctttcc

SEQ ID NO: 1564932 - DNA, 15 bp, Homo sapiens
tcatcagttgctttc

SEQ ID NO: 1564933 - DNA, 15 bp, Homo sapiens
atcatcagttgcttt

SEQ ID NO: 1564934 - DNA, 15 bp, Homo sapiens
tatcatcagttgctt

SEQ ID NO: 1564935 - DNA, 15 bp, Homo sapiens
gtatcatcagttgct

SEQ ID NO: 1564936 - DNA, 15 bp, Homo sapiens
tgtatcatcagttgc

SEQ ID NO: 1564937 - DNA, 15 bp, Homo sapiens
atgtatcatcagttg

SEQ ID NO: 1564938 - DNA, 15 bp, Homo sapiens
gatgtatcatcagtt

SEQ ID NO: 1564939 - DNA, 15 bp, Homo sapiens
tgatgtatcatcagt

SEQ ID NO: 1564940 - DNA, 15 bp, Homo sapiens
atgatgtatcatcag

SEQ ID NO: 1564941 - DNA, 15 bp, Homo sapiens
catgatgtatcatca

SEQ ID NO: 1564942 - DNA, 15 bp, Homo sapiens
ccatgatgtatcatc

SEQ ID NO: 1564943 - DNA, 15 bp, Homo sapiens
gccatgatgtatcat

SEQ ID NO: 1564944 - DNA, 15 bp, Homo sapiens
tgccatgatgtatca

SEQ ID NO: 1564945 - DNA, 15 bp, Homo sapiens
atgccatgatgtatc

SEQ ID NO: 1564946 - DNA, 15 bp, Homo sapiens
gatgccatgatgtat

SEQ ID NO: 1564947 - DNA, 15 bp, Homo sapiens
tgatgccatgatgta

SEQ ID NO: 1564948 - DNA, 15 bp, Homo sapiens
atgatgccatgatgt

SEQ ID NO: 1564949 - DNA, 15 bp, Homo sapiens
catgatgccatgatg

SEQ ID NO: 1564950 - DNA, 15 bp, Homo sapiens
ccatgatgccatgat

SEQ ID NO: 1564951 - DNA, 15 bp, Homo sapiens
cccatgatgccatga

SEQ ID NO: 1564952 - DNA, 15 bp, Homo sapiens
ccccatgatgccatg

SEQ ID NO: 1564953 - DNA, 15 bp, Homo sapiens
tccccatgatgccat

SEQ ID NO: 1564954 - DNA, 15 bp, Homo sapiens
ttccccatgatgcca

SEQ ID NO: 1564955 - DNA, 15 bp, Homo sapiens
attccccatgatgcc

SEQ ID NO: 1564956 - DNA, 15 bp, Homo sapiens
cattccccatgatgc

SEQ ID NO: 1564957 - DNA, 15 bp, Homo sapiens
ccattccccatgatg

SEQ ID NO: 1564958 - DNA, 15 bp, Homo sapiens
cccattccccatgat

SEQ ID NO: 1564959 - DNA, 15 bp, Homo sapiens
ccccattccccatga

SEQ ID NO: 1564960 - DNA, 15 bp, Homo sapiens
accccattccccatg

SEQ ID NO: 1564961 - DNA, 15 bp, Homo sapiens
taccccattccccat

SEQ ID NO: 1564962 - DNA, 15 bp, Homo sapiens
ctaccccattcccca

SEQ ID NO: 1564963 - DNA, 15 bp, Homo sapiens
cctaccccattcccc

SEQ ID NO: 1564964 - DNA, 15 bp, Homo sapiens
tcctaccccattccc

SEQ ID NO: 1564965 - DNA, 15 bp, Homo sapiens
ttcctaccccattcc

SEQ ID NO: 1564966 - DNA, 15 bp, Homo sapiens
tttcctaccccattc

SEQ ID NO: 1564967 - DNA, 15 bp, Homo sapiens
atttcctaccccatt

SEQ ID NO: 1564968 - DNA, 15 bp, Homo sapiens
catttcctaccccat

SEQ ID NO: 1564969 - DNA, 15 bp, Homo sapiens
tcatttcctacccca

SEQ ID NO: 1564970 - DNA, 15 bp, Homo sapiens
ctcatttcctacccc

SEQ ID NO: 1564971 - DNA, 15 bp, Homo sapiens
tctcatttcctaccc

SEQ ID NO: 1564972 - DNA, 15 bp, Homo sapiens
atctcatttcctacc

SEQ ID NO: 1564973 - DNA, 15 bp, Homo sapiens
catctcatttcctac

SEQ ID NO: 1564974 - DNA, 15 bp, Homo sapiens
tcatctcatttccta

SEQ ID NO: 1564975 - DNA, 15 bp, Homo sapiens
ctcatctcatttcct

SEQ ID NO: 1564976 - DNA, 15 bp, Homo sapiens
tctcatctcatttcc

SEQ ID NO: 1564977 - DNA, 15 bp, Homo sapiens
ttctcatctcatttc

SEQ ID NO: 1564978 - DNA, 15 bp, Homo sapiens
cttctcatctcattt

SEQ ID NO: 1564979 - DNA, 15 bp, Homo sapiens
tcttctcatctcatt

SEQ ID NO: 1564980 - DNA, 15 bp, Homo sapiens
ttcttctcatctcat

SEQ ID NO: 1564981 - DNA, 15 bp, Homo sapiens
cttcttctcatctca

SEQ ID NO: 1564982 - DNA, 15 bp, Homo sapiens
ccttcttctcatctc

SEQ ID NO: 1564983 - DNA, 15 bp, Homo sapiens
tccttcttctcatct

SEQ ID NO: 1564984 - DNA, 15 bp, Homo sapiens
gtccttcttctcatc

SEQ ID NO: 1564985 - DNA, 15 bp, Homo sapiens
agtccttcttctcat

SEQ ID NO: 1564986 - DNA, 15 bp, Homo sapiens
tagtccttcttctca

SEQ ID NO: 1564987 - DNA, 15 bp, Homo sapiens
ctagtccttcttctc

SEQ ID NO: 1564988 - DNA, 15 bp, Homo sapiens
tctagtccttcttct

SEQ ID NO: 1564989 - DNA, 15 bp, Homo sapiens
ttctagtccttcttc

SEQ ID NO: 1564990 - DNA, 15 bp, Homo sapiens
gttctagtccttctt

SEQ ID NO: 1564991 - DNA, 15 bp, Homo sapiens
agttctagtccttct

SEQ ID NO: 1564992 - DNA, 15 bp, Homo sapiens
gagttctagtccttc

SEQ ID NO: 1564993 - DNA, 15 bp, Homo sapiens
cgagttctagtcctt

SEQ ID NO: 1564994 - DNA, 15 bp, Homo sapiens
tcgagttctagtcct

SEQ ID NO: 1564995 - DNA, 15 bp, Homo sapiens
atcgagttctagtcc

SEQ ID NO: 1564996 - DNA, 15 bp, Homo sapiens
aatcgagttctagtc

SEQ ID NO: 1564997 - DNA, 15 bp, Homo sapiens
caatcgagttctagt

SEQ ID NO: 1564998 - DNA, 15 bp, Homo sapiens
ccaatcgagttctag

SEQ ID NO: 1564999 - DNA, 15 bp, Homo sapiens
tccaatcgagttcta

SEQ ID NO: 1565000 - DNA, 15 bp, Homo sapiens
ttccaatcgagttct

SEQ ID NO: 1565001 - DNA, 15 bp, Homo sapiens
tttccaatcgagttc

SEQ ID NO: 1565002 - DNA, 15 bp, Homo sapiens
gtttccaatcgagtt

SEQ ID NO: 1565003 - DNA, 15 bp, Homo sapiens
cgtttccaatcgagt

SEQ ID NO: 1565004 - DNA, 15 bp, Homo sapiens
tcgtttccaatcgag

SEQ ID NO: 1565005 - DNA, 15 bp, Homo sapiens
gtcgtttccaatcga

SEQ ID NO: 1565006 - DNA, 15 bp, Homo sapiens
agtcgtttccaatcg

SEQ ID NO: 1565007 - DNA, 15 bp, Homo sapiens
cagtcgtttccaatc

SEQ ID NO: 1565008 - DNA, 15 bp, Homo sapiens
acagtcgtttccaat

SEQ ID NO: 1565009 - DNA, 15 bp, Homo sapiens
tacagtcgtttccaa

SEQ ID NO: 1565010 - DNA, 15 bp, Homo sapiens
atacagtcgtttcca

SEQ ID NO: 1565011 - DNA, 15 bp, Homo sapiens
catacagtcgtttcc

SEQ ID NO: 1565012 - DNA, 15 bp, Homo sapiens
gcatacagtcgtttc

SEQ ID NO: 1565013 - DNA, 15 bp, Homo sapiens
ggcatacagtcgttt

SEQ ID NO: 1565014 - DNA, 15 bp, Homo sapiens
tggcatacagtcgtt

SEQ ID NO: 1565015 - DNA, 15 bp, Homo sapiens
atggcatacagtcgt

SEQ ID NO: 1565016 - DNA, 15 bp, Homo sapiens
catggcatacagtcg

SEQ ID NO: 1565017 - DNA, 15 bp, Homo sapiens
ccatggcatacagtc

SEQ ID NO: 1565018 - DNA, 15 bp, Homo sapiens
accatggcatacagt

SEQ ID NO: 1565019 - DNA, 15 bp, Homo sapiens
taccatggcatacag

SEQ ID NO: 1565020 - DNA, 15 bp, Homo sapiens
ttaccatggcataca

SEQ ID NO: 1565021 - DNA, 15 bp, Homo sapiens
cttaccatggcatac

SEQ ID NO: 1565022 - DNA, 15 bp, Homo sapiens
tcttaccatggcata

SEQ ID NO: 1565023 - DNA, 15 bp, Homo sapiens
atcttaccatggcat

SEQ ID NO: 1565024 - DNA, 15 bp, Homo sapiens
tatcttaccatggca

SEQ ID NO: 1565025 - DNA, 15 bp, Homo sapiens
atatcttaccatggc

SEQ ID NO: 1565026 - DNA, 15 bp, Homo sapiens
aatatcttaccatgg

SEQ ID NO: 1565027 - DNA, 15 bp, Homo sapiens
aaatatcttaccatg

SEQ ID NO: 1565028 - DNA, 15 bp, Homo sapiens
taaatatcttaccat

SEQ ID NO: 1565029 - DNA, 15 bp, Homo sapiens
gtaaatatcttacca

SEQ ID NO: 1565030 - DNA, 15 bp, Homo sapiens
ggtaaatatcttacc

SEQ ID NO: 1565031 - DNA, 15 bp, Homo sapiens
gggtaaatatcttac

SEQ ID NO: 1565032 - DNA, 15 bp, Homo sapiens
agggtaaatatctta

SEQ ID NO: 1565033 - DNA, 15 bp, Homo sapiens
aagggtaaatatctt

SEQ ID NO: 1565034 - DNA, 15 bp, Homo sapiens
taagggtaaatatct

SEQ ID NO: 1565035 - DNA, 15 bp, Homo sapiens
ataagggtaaatatc

SEQ ID NO: 1565036 - DNA, 15 bp, Homo sapiens
gataagggtaaatat

SEQ ID NO: 1565037 - DNA, 15 bp, Homo sapiens
tgataagggtaaata

SEQ ID NO: 1565038 - DNA, 15 bp, Homo sapiens
gtgataagggtaaat

SEQ ID NO: 1565039 - DNA, 15 bp, Homo sapiens
tgtgataagggtaaa

SEQ ID NO: 1565040 - DNA, 15 bp, Homo sapiens
gtgtgataagggtaa

SEQ ID NO: 1565041 - DNA, 15 bp, Homo sapiens
tgtgtgataagggta

SEQ ID NO: 1565042 - DNA, 15 bp, Homo sapiens
atgtgtgataagggt

SEQ ID NO: 1565043 - DNA, 15 bp, Homo sapiens
aatgtgtgataaggg

SEQ ID NO: 1565044 - DNA, 15 bp, Homo sapiens
gaatgtgtgataagg

SEQ ID NO: 1565045 - DNA, 15 bp, Homo sapiens
tgaatgtgtgataag

SEQ ID NO: 1565046 - DNA, 15 bp, Homo sapiens
ctgaatgtgtgataa

SEQ ID NO: 1565047 - DNA, 15 bp, Homo sapiens
gctgaatgtgtgata

SEQ ID NO: 1565048 - DNA, 15 bp, Homo sapiens
agctgaatgtgtgat

SEQ ID NO: 1565049 - DNA, 15 bp, Homo sapiens
cagctgaatgtgtga

SEQ ID NO: 1565050 - DNA, 15 bp, Homo sapiens
tcagctgaatgtgtg

SEQ ID NO: 1565051 - DNA, 15 bp, Homo sapiens
ctcagctgaatgtgt

SEQ ID NO: 1565052 - DNA, 15 bp, Homo sapiens
cctcagctgaatgtg

SEQ ID NO: 1565053 - DNA, 15 bp, Homo sapiens
acctcagctgaatgt

SEQ ID NO: 1565054 - DNA, 15 bp, Homo sapiens
tacctcagctgaatg

SEQ ID NO: 1565055 - DNA, 15 bp, Homo sapiens
atacctcagctgaat

SEQ ID NO: 1565056 - DNA, 15 bp, Homo sapiens
aatacctcagctgaa

SEQ ID NO: 1565057 - DNA, 15 bp, Homo sapiens
aaatacctcagctga

SEQ ID NO: 1565058 - DNA, 15 bp, Homo sapiens
taaatacctcagctg

SEQ ID NO: 1565059 - DNA, 15 bp, Homo sapiens
ttaaatacctcagct

SEQ ID NO: 1565060 - DNA, 15 bp, Homo sapiens
cttaaatacctcagc

SEQ ID NO: 1565061 - DNA, 15 bp, Homo sapiens
acttaaatacctcag

SEQ ID NO: 1565062 - DNA, 15 bp, Homo sapiens
tacttaaatacctca

SEQ ID NO: 1565063 - DNA, 15 bp, Homo sapiens
ctacttaaatacctc

SEQ ID NO: 1565064 - DNA, 15 bp, Homo sapiens
cctacttaaatacct

SEQ ID NO: 1565065 - DNA, 15 bp, Homo sapiens
tcctacttaaatacc

SEQ ID NO: 1565066 - DNA, 15 bp, Homo sapiens
ctcctacttaaatac

SEQ ID NO: 1565067 - DNA, 15 bp, Homo sapiens
tctcctacttaaata

SEQ ID NO: 1565068 - DNA, 15 bp, Homo sapiens
ttctcctacttaaat

SEQ ID NO: 1565069 - DNA, 15 bp, Homo sapiens
cttctcctacttaaa

SEQ ID NO: 1565070 - DNA, 15 bp, Homo sapiens
tcttctcctacttaa

SEQ ID NO: 1565071 - DNA, 15 bp, Homo sapiens
ttcttctcctactta

SEQ ID NO: 1565072 - DNA, 15 bp, Homo sapiens
gttcttctcctactt

SEQ ID NO: 1565073 - DNA, 15 bp, Homo sapiens
tgttcttctcctact

SEQ ID NO: 1565074 - DNA, 15 bp, Homo sapiens
atgttcttctcctac

SEQ ID NO: 1565075 - DNA, 15 bp, Homo sapiens
catgttcttctccta

SEQ ID NO: 1565076 - DNA, 15 bp, Homo sapiens
tcatgttcttctcct

SEQ ID NO: 1565077 - DNA, 15 bp, Homo sapiens
gtcatgttcttctcc

SEQ ID NO: 1565078 - DNA, 15 bp, Homo sapiens
ggtcatgttcttctc

SEQ ID NO: 1565079 - DNA, 15 bp, Homo sapiens
tggtcatgttcttct

SEQ ID NO: 1565080 - DNA, 15 bp, Homo sapiens
ttggtcatgttcttc

SEQ ID NO: 1565081 - DNA, 15 bp, Homo sapiens
tttggtcatgttctt

SEQ ID NO: 1565082 - DNA, 15 bp, Homo sapiens
atttggtcatgttct

SEQ ID NO: 1565083 - DNA, 15 bp, Homo sapiens
aatttggtcatgttc

SEQ ID NO: 1565084 - DNA, 15 bp, Homo sapiens
aaatttggtcatgtt

SEQ ID NO: 1565085 - DNA, 15 bp, Homo sapiens
aaaatttggtcatgt

SEQ ID NO: 1565086 - DNA, 15 bp, Homo sapiens
taaaatttggtcatg

SEQ ID NO: 1565087 - DNA, 15 bp, Homo sapiens
ttaaaatttggtcat

SEQ ID NO: 1565088 - DNA, 15 bp, Homo sapiens
attaaaatttggtca

SEQ ID NO: 1565089 - DNA, 15 bp, Homo sapiens
aattaaaatttggtc

SEQ ID NO: 1565090 - DNA, 15 bp, Homo sapiens
aaattaaaatttggt

SEQ ID NO: 1565091 - DNA, 15 bp, Homo sapiens
aaaattaaaatttgg

SEQ ID NO: 1565092 - DNA, 15 bp, Homo sapiens
aaaaattaaaatttg

SEQ ID NO: 1565093 - DNA, 15 bp, Homo sapiens
caaaaattaaaattt

SEQ ID NO: 1565094 - DNA, 15 bp, Homo sapiens
gcaaaaattaaaatt

SEQ ID NO: 1565095 - DNA, 15 bp, Homo sapiens
ggcaaaaattaaaat

SEQ ID NO: 1565096 - DNA, 15 bp, Homo sapiens
tggcaaaaattaaaa

SEQ ID NO: 1565097 - DNA, 15 bp, Homo sapiens
ttggcaaaaattaaa

SEQ ID NO: 1565098 - DNA, 15 bp, Homo sapiens
cttggcaaaaattaa

SEQ ID NO: 1565099 - DNA, 15 bp, Homo sapiens
acttggcaaaaatta

SEQ ID NO: 1565100 - DNA, 15 bp, Homo sapiens
aacttggcaaaaatt

SEQ ID NO: 1565101 - DNA, 15 bp, Homo sapiens
aaacttggcaaaaat

SEQ ID NO: 1565102 - DNA, 15 bp, Homo sapiens
aaaacttggcaaaaa

SEQ ID NO: 1565103 - DNA, 15 bp, Homo sapiens
aaaaacttggcaaaa

SEQ ID NO: 1565104 - DNA, 15 bp, Homo sapiens
gaaaaacttggcaaa

SEQ ID NO: 1565105 - DNA, 15 bp, Homo sapiens
agaaaaacttggcaa

SEQ ID NO: 1565106 - DNA, 15 bp, Homo sapiens
tagaaaaacttggca

SEQ ID NO: 1565107 - DNA, 15 bp, Homo sapiens
ctagaaaaacttggc

SEQ ID NO: 1565108 - DNA, 15 bp, Homo sapiens
gctagaaaaacttgg

SEQ ID NO: 1565109 - DNA, 15 bp, Homo sapiens
tgctagaaaaacttg

SEQ ID NO: 1565110 - DNA, 15 bp, Homo sapiens
ctgctagaaaaactt

SEQ ID NO: 1565111 - DNA, 15 bp, Homo sapiens
gctgctagaaaaact

SEQ ID NO: 1565112 - DNA, 15 bp, Homo sapiens
tgctgctagaaaaac

SEQ ID NO: 1565113 - DNA, 15 bp, Homo sapiens
ttgctgctagaaaaa

SEQ ID NO: 1565114 - DNA, 15 bp, Homo sapiens
attgctgctagaaaa

SEQ ID NO: 1565115 - DNA, 15 bp, Homo sapiens
cattgctgctagaaa

SEQ ID NO: 1565116 - DNA, 15 bp, Homo sapiens
acattgctgctagaa

SEQ ID NO: 1565117 - DNA, 15 bp, Homo sapiens
cacattgctgctaga

SEQ ID NO: 1565118 - DNA, 15 bp, Homo sapiens
ccacattgctgctag

SEQ ID NO: 1565119 - DNA, 15 bp, Homo sapiens
tccacattgctgcta

SEQ ID NO: 1565120 - DNA, 15 bp, Homo sapiens
ctccacattgctgct

SEQ ID NO: 1565121 - DNA, 15 bp, Homo sapiens
tctccacattgctgc

SEQ ID NO: 1565122 - DNA, 15 bp, Homo sapiens
ctctccacattgctg

SEQ ID NO: 1565123 - DNA, 15 bp, Homo sapiens
tctctccacattgct

SEQ ID NO: 1565124 - DNA, 15 bp, Homo sapiens
gtctctccacattgc

SEQ ID NO: 1565125 - DNA, 15 bp, Homo sapiens
tgtctctccacattg

SEQ ID NO: 1565126 - DNA, 15 bp, Homo sapiens
ctgtctctccacatt

SEQ ID NO: 1565127 - DNA, 15 bp, Homo sapiens
cctgtctctccacat

SEQ ID NO: 1565128 - DNA, 15 bp, Homo sapiens
tcctgtctctccaca

SEQ ID NO: 1565129 - DNA, 15 bp, Homo sapiens
ttcctgtctctccac

SEQ ID NO: 1565130 - DNA, 15 bp, Homo sapiens
cttcctgtctctcca

SEQ ID NO: 1565131 - DNA, 15 bp, Homo sapiens
tcttcctgtctctcc

SEQ ID NO: 1565132 - DNA, 15 bp, Homo sapiens
atctcttcctgtctc

SEQ ID NO: 1565133 - DNA, 15 bp, Homo sapiens
aatctcttcctgtct

SEQ ID NO: 1565134 - DNA, 15 bp, Homo sapiens
aaatctcttcctgtc

SEQ ID NO: 1565135 - DNA, 15 bp, Homo sapiens
aaaatctcttcctgt

SEQ ID NO: 1565136 - DNA, 15 bp, Homo sapiens
aaaaatctcttcctg

SEQ ID NO: 1565137 - DNA, 15 bp, Homo sapiens
taaaaatctcttcct

SEQ ID NO: 1565138 - DNA, 15 bp, Homo sapiens
ctaaaaatctcttcc

SEQ ID NO: 1565139 - DNA, 15 bp, Homo sapiens
gctaaaaatctcttc

SEQ ID NO: 1565140 - DNA, 15 bp, Homo sapiens
tgctaaaaatctctt

SEQ ID NO: 1565141 - DNA, 15 bp, Homo sapiens
ttgctaaaaatctct

SEQ ID NO: 1565142 - DNA, 15 bp, Homo sapiens
cttgctaaaaatctc

SEQ ID NO: 1565143 - DNA, 15 bp, Homo sapiens
ccttgctaaaaatct

SEQ ID NO: 1565144 - DNA, 15 bp, Homo sapiens
cccttgctaaaaatc

SEQ ID NO: 1565145 - DNA, 15 bp, Homo sapiens
tcccttgctaaaaat

SEQ ID NO: 1565146 - DNA, 15 bp, Homo sapiens
ttcccttgctaaaaa

SEQ ID NO: 1565147 - DNA, 15 bp, Homo sapiens
gttcccttgctaaaa

SEQ ID NO: 1565148 - DNA, 15 bp, Homo sapiens
ggttcccttgctaaa

SEQ ID NO: 1565149 - DNA, 15 bp, Homo sapiens
tggttcccttgctaa

SEQ ID NO: 1565150 - DNA, 15 bp, Homo sapiens
atggttcccttgcta

SEQ ID NO: 1565151 - DNA, 15 bp, Homo sapiens
aatggttcccttgct

SEQ ID NO: 1565152 - DNA, 15 bp, Homo sapiens
aaatggttcccttgc

SEQ ID NO: 1565153 - DNA, 15 bp, Homo sapiens
taaatggttcccttg

SEQ ID NO: 1565154 - DNA, 15 bp, Homo sapiens
ttaaatggttccctt

SEQ ID NO: 1565155 - DNA, 15 bp, Homo sapiens
attaaatggttccct

SEQ ID NO: 1565156 - DNA, 15 bp, Homo sapiens
tattaaatggttccc

SEQ ID NO: 1565157 - DNA, 15 bp, Homo sapiens
ttattaaatggttcc

SEQ ID NO: 1565158 - DNA, 15 bp, Homo sapiens
tttattaaatggttc

SEQ ID NO: 1565159 - DNA, 15 bp, Homo sapiens
ttttattaaatggtt

SEQ ID NO: 1565160 - DNA, 15 bp, Homo sapiens
attttattaaatggt

SEQ ID NO: 1565161 - DNA, 15 bp, Homo sapiens
aattttattaaatgg

SEQ ID NO: 1565162 - DNA, 15 bp, Homo sapiens
caattttattaaatg

SEQ ID NO: 1565163 - DNA, 15 bp, Homo sapiens
tcaattttattaaat

SEQ ID NO: 1565164 - DNA, 15 bp, Homo sapiens
atcaattttattaaa

SEQ ID NO: 1565165 - DNA, 15 bp, Homo sapiens
tatcaattttattaa

SEQ ID NO: 1565166 - DNA, 15 bp, Homo sapiens
atatcaattttatta

SEQ ID NO: 1565167 - DNA, 15 bp, Homo sapiens
tatatcaattttatt

SEQ ID NO: 1565168 - DNA, 15 bp, Homo sapiens
ctatatcaattttat

SEQ ID NO: 1565169 - DNA, 15 bp, Homo sapiens
gctatatcaatttta

SEQ ID NO: 1565170 - DNA, 15 bp, Homo sapiens
tgctatatcaatttt

SEQ ID NO: 1565171 - DNA, 15 bp, Homo sapiens
ctgctatatcaattt

SEQ ID NO: 1565172 - DNA, 15 bp, Homo sapiens
actgctatatcaatt

SEQ ID NO: 1565173 - DNA, 15 bp, Homo sapiens
gactgctatatcaat

SEQ ID NO: 1565174 - DNA, 15 bp, Homo sapiens
ggactgctatatcaa

SEQ ID NO: 1565175 - DNA, 15 bp, Homo sapiens
tggactgctatatca

SEQ ID NO: 1565176 - DNA, 15 bp, Homo sapiens
ttggactgctatatc

SEQ ID NO: 1565177 - DNA, 15 bp, Homo sapiens
cttggactgctatat

SEQ ID NO: 1565178 - DNA, 15 bp, Homo sapiens
gcttggactgctata

SEQ ID NO: 1565179 - DNA, 15 bp, Homo sapiens
tgcttggactgctat

SEQ ID NO: 1565180 - DNA, 15 bp, Homo sapiens
ttgcttggactgcta

SEQ ID NO: 1565181 - DNA, 15 bp, Homo sapiens
tttgcttggactgct

SEQ ID NO: 1565182 - DNA, 15 bp, Homo sapiens
ttttgcttggactgc

SEQ ID NO: 1565183 - DNA, 15 bp, Homo sapiens
tttttgcttggactg

SEQ ID NO: 1565184 - DNA, 15 bp, Homo sapiens
ttttttgcttggact

SEQ ID NO: 1565185 - DNA, 15 bp, Homo sapiens
tttttttgcttggac

SEQ ID NO: 1565186 - DNA, 15 bp, Homo sapiens
ttttttttgcttgga

SEQ ID NO: 1565187 - DNA, 15 bp, Homo sapiens
attttttttgcttgg

SEQ ID NO: 1565188 - DNA, 15 bp, Homo sapiens
cattttttttgcttg

SEQ ID NO: 1565189 - DNA, 15 bp, Homo sapiens
ccattttttttgctt

SEQ ID NO: 1565190 - DNA, 15 bp, Homo sapiens
accattttttttgct

SEQ ID NO: 1565191 - DNA, 15 bp, Homo sapiens
caccattttttttgc

SEQ ID NO: 1565192 - DNA, 15 bp, Homo sapiens
acaccattttttttg

SEQ ID NO: 1565193 - DNA, 15 bp, Homo sapiens
cacaccatttttttt

SEQ ID NO: 1565194 - DNA, 15 bp, Homo sapiens
ccacaccattttttt

SEQ ID NO: 1565195 - DNA, 15 bp, Homo sapiens
cccacaccatttttt

SEQ ID NO: 1565196 - DNA, 15 bp, Homo sapiens
gcccacaccattttt

SEQ ID NO: 1565197 - DNA, 15 bp, Homo sapiens
ggcccacaccatttt

SEQ ID NO: 1565198 - DNA, 15 bp, Homo sapiens
gggcccacaccattt

SEQ ID NO: 1565199 - DNA, 15 bp, Homo sapiens
ggggcccacaccatt

SEQ ID NO: 1565200 - DNA, 15 bp, Homo sapiens
cggggcccacaccat

SEQ ID NO: 1565201 - DNA, 15 bp, Homo sapiens
gcggggcccacacca

SEQ ID NO: 1565202 - DNA, 15 bp, Homo sapiens
tgcggggcccacacc

SEQ ID NO: 1565203 - DNA, 15 bp, Homo sapiens
gtgcggggcccacac

SEQ ID NO: 1565204 - DNA, 15 bp, Homo sapiens
agtgcggggcccaca

SEQ ID NO: 1565205 - DNA, 15 bp, Homo sapiens
tagtgcggggcccac

SEQ ID NO: 1565206 - DNA, 15 bp, Homo sapiens
ttagtgcggggccca

SEQ ID NO: 1565207 - DNA, 15 bp, Homo sapiens
attagtgcggggccc

SEQ ID NO: 1565208 - DNA, 15 bp, Homo sapiens
cattagtgcggggcc

SEQ ID NO: 1565209 - DNA, 15 bp, Homo sapiens
gcattagtgcggggc

SEQ ID NO: 1565210 - DNA, 15 bp, Homo sapiens
tgcattagtgcgggg

SEQ ID NO: 1565211 - DNA, 15 bp, Homo sapiens
ctgcattagtgcggg

SEQ ID NO: 1565212 - DNA, 15 bp, Homo sapiens
cctgcattagtgcgg

SEQ ID NO: 1565213 - DNA, 15 bp, Homo sapiens
tcctgcattagtgcg

SEQ ID NO: 1565214 - DNA, 15 bp, Homo sapiens
ctcctgcattagtgc

SEQ ID NO: 1565215 - DNA, 15 bp, Homo sapiens
gctcctgcattagtg

SEQ ID NO: 1565216 - DNA, 15 bp, Homo sapiens
tgctcctgcattagt

SEQ ID NO: 1565217 - DNA, 15 bp, Homo sapiens
ttgctcctgcattag

SEQ ID NO: 1565218 - DNA, 15 bp, Homo sapiens
attgctcctgcatta

SEQ ID NO: 1565219 - DNA, 15 bp, Homo sapiens
cattgctcctgcatt

SEQ ID NO: 1565220 - DNA, 15 bp, Homo sapiens
ccattgctcctgcat

SEQ ID NO: 1565221 - DNA, 15 bp, Homo sapiens
cccattgctcctgca

SEQ ID NO: 1565222 - DNA, 15 bp, Homo sapiens
tcccattgctcctgc

SEQ ID NO: 1565223 - DNA, 15 bp, Homo sapiens
ctcccattgctcctg

SEQ ID NO: 1565224 - DNA, 15 bp, Homo sapiens
tctcccattgctcct

SEQ ID NO: 1565225 - DNA, 15 bp, Homo sapiens
ttctcccattgctcc

SEQ ID NO: 1565226 - DNA, 15 bp, Homo sapiens
attctcccattgctc

SEQ ID NO: 1565227 - DNA, 15 bp, Homo sapiens
cattctcccattgct

SEQ ID NO: 1565228 - DNA, 15 bp, Homo sapiens
ccattctcccattgc

SEQ ID NO: 1565229 - DNA, 15 bp, Homo sapiens
tccattctcccattg

SEQ ID NO: 1565230 - DNA, 15 bp, Homo sapiens
ctccattctcccatt

SEQ ID NO: 1565231 - DNA, 15 bp, Homo sapiens
tctccattctcccat

SEQ ID NO: 1565232 - DNA, 15 bp, Homo sapiens
ttctccattctccca

SEQ ID NO: 1565233 - DNA, 15 bp, Homo sapiens
cttctccattctccc

SEQ ID NO: 1565234 - DNA, 15 bp, Homo sapiens
tcttctccattctcc

SEQ ID NO: 1565235 - DNA, 15 bp, Homo sapiens
ttcttctccattctc

SEQ ID NO: 1565236 - DNA, 15 bp, Homo sapiens
gttcttctccattct

SEQ ID NO: 1565237 - DNA, 15 bp, Homo sapiens
ggttcttctccattc

SEQ ID NO: 1565238 - DNA, 15 bp, Homo sapiens
tggttcttctccatt

SEQ ID NO: 1565239 - DNA, 15 bp, Homo sapiens
ctggttcttctccat

SEQ ID NO: 1565240 - DNA, 15 bp, Homo sapiens
gctggttcttctcca

SEQ ID NO: 1565241 - DNA, 15 bp, Homo sapiens
tgctggttcttctcc

SEQ ID NO: 1565242 - DNA, 15 bp, Homo sapiens
ctgctggttcttctc

SEQ ID NO: 1565243 - DNA, 15 bp, Homo sapiens
cctgctggttcttct

SEQ ID NO: 1565244 - DNA, 15 bp, Homo sapiens
acctgctggttcttc

SEQ ID NO: 1565245 - DNA, 15 bp, Homo sapiens
aacctgctggttctt

SEQ ID NO: 1565246 - DNA, 15 bp, Homo sapiens
aaacctgctggttct

SEQ ID NO: 1565247 - DNA, 15 bp, Homo sapiens
caaacctgctggttc

SEQ ID NO: 1565248 - DNA, 15 bp, Homo sapiens
ccaaacctgctggtt

SEQ ID NO: 1565249 - DNA, 15 bp, Homo sapiens
tccaaacctgctggt

SEQ ID NO: 1565250 - DNA, 15 bp, Homo sapiens
ctccaaacctgctgg

SEQ ID NO: 1565251 - DNA, 15 bp, Homo sapiens
gctccaaacctgctg

SEQ ID NO: 1565252 - DNA, 15 bp, Homo sapiens
agctccaaacctgct

SEQ ID NO: 1565253 - DNA, 15 bp, Homo sapiens
cagctccaaacctgc

SEQ ID NO: 1565254 - DNA, 15 bp, Homo sapiens
ccagctccaaacctg

SEQ ID NO: 1565255 - DNA, 15 bp, Homo sapiens
cccagctccaaacct

SEQ ID NO: 1565256 - DNA, 15 bp, Homo sapiens
gcccagctccaaacc

SEQ ID NO: 1565257 - DNA, 15 bp, Homo sapiens
tgcccagctccaaac

SEQ ID NO: 1565258 - DNA, 15 bp, Homo sapiens
atgcccagctccaaa

SEQ ID NO: 1565259 - DNA, 15 bp, Homo sapiens
tatgcccagctccaa

SEQ ID NO: 1565260 - DNA, 15 bp, Homo sapiens
ttatgcccagctcca

SEQ ID NO: 1565261 - DNA, 15 bp, Homo sapiens
attatgcccagctcc

SEQ ID NO: 1565262 - DNA, 15 bp, Homo sapiens
cattatgcccagctc

SEQ ID NO: 1565263 - DNA, 15 bp, Homo sapiens
ccattatgcccagct

SEQ ID NO: 1565264 - DNA, 15 bp, Homo sapiens
accattatgcccagc

SEQ ID NO: 1565265 - DNA, 15 bp, Homo sapiens
taccattatgcccag

SEQ ID NO: 1565266 - DNA, 15 bp, Homo sapiens
gtaccattatgccca

SEQ ID NO: 1565267 - DNA, 15 bp, Homo sapiens
tgtaccattatgccc

SEQ ID NO: 1565268 - DNA, 15 bp, Homo sapiens
gtgtaccattatgcc

SEQ ID NO: 1565269 - DNA, 15 bp, Homo sapiens
tgtgtaccattatgc

SEQ ID NO: 1565270 - DNA, 15 bp, Homo sapiens
gtgtgtaccattatg

SEQ ID NO: 1565271 - DNA, 15 bp, Homo sapiens
gaggtagcatggcta

SEQ ID NO: 1565272 - DNA, 15 bp, Homo sapiens
tgaggtagcatggct

SEQ ID NO: 1565273 - DNA, 15 bp, Homo sapiens
ctgaggtagcatggc

SEQ ID NO: 1565274 - DNA, 15 bp, Homo sapiens
tctgaggtagcatgg

SEQ ID NO: 1565275 - DNA, 15 bp, Homo sapiens
gtctgaggtagcatg

SEQ ID NO: 1565276 - DNA, 15 bp, Homo sapiens
agtctgaggtagcat

SEQ ID NO: 1565277 - DNA, 15 bp, Homo sapiens
tagtctgaggtagca

SEQ ID NO: 1565278 - DNA, 15 bp, Homo sapiens
ttagtctgaggtagc

SEQ ID NO: 1565279 - DNA, 15 bp, Homo sapiens
attagtctgaggtag

SEQ ID NO: 1565280 - DNA, 15 bp, Homo sapiens
aattagtctgaggta

SEQ ID NO: 1565281 - DNA, 15 bp, Homo sapiens
taattagtctgaggt

SEQ ID NO: 1565282 - DNA, 15 bp, Homo sapiens
gtaattagtctgagg

SEQ ID NO: 1565283 - DNA, 15 bp, Homo sapiens
agtaattagtctgag

SEQ ID NO: 1565284 - DNA, 15 bp, Homo sapiens
aagtaattagtctga

SEQ ID NO: 1565285 - DNA, 15 bp, Homo sapiens
taagtaattagtctg

SEQ ID NO: 1565286 - DNA, 15 bp, Homo sapiens
ttaagtaattagtct

SEQ ID NO: 1565287 - DNA, 15 bp, Homo sapiens
gttaagtaattagtc

SEQ ID NO: 1565288 - DNA, 15 bp, Homo sapiens
agttaagtaattagt

SEQ ID NO: 1565289 - DNA, 15 bp, Homo sapiens
cagttaagtaattag

SEQ ID NO: 1565290 - DNA, 15 bp, Homo sapiens
gcagttaagtaatta

SEQ ID NO: 1565291 - DNA, 15 bp, Homo sapiens
agcagttaagtaatt

SEQ ID NO: 1565292 - DNA, 15 bp, Homo sapiens
gagcagttaagtaat

SEQ ID NO: 1565293 - DNA, 15 bp, Homo sapiens
tgagcagttaagtaa

SEQ ID NO: 1565294 - DNA, 15 bp, Homo sapiens
atgagcagttaagta

SEQ ID NO: 1565295 - DNA, 15 bp, Homo sapiens
catgagcagttaagt

SEQ ID NO: 1565296 - DNA, 15 bp, Homo sapiens
ccatgagcagttaag

SEQ ID NO: 1565297 - DNA, 15 bp, Homo sapiens
gccatgagcagttaa

SEQ ID NO: 1565298 - DNA, 15 bp, Homo sapiens
agccatgagcagtta

SEQ ID NO: 1565299 - DNA, 15 bp, Homo sapiens
aagccatgagcagtt

SEQ ID NO: 1565300 - DNA, 15 bp, Homo sapiens
gaagccatgagcagt

SEQ ID NO: 1565301 - DNA, 15 bp, Homo sapiens
tgaagccatgagcag

SEQ ID NO: 1565302 - DNA, 15 bp, Homo sapiens
atgaagccatgagca

SEQ ID NO: 1565303 - DNA, 15 bp, Homo sapiens
gatgaagccatgagc

SEQ ID NO: 1565304 - DNA, 15 bp, Homo sapiens
tgatgaagccatgag

SEQ ID NO: 1565305 - DNA, 15 bp, Homo sapiens
ctgatgaagccatga

SEQ ID NO: 1565306 - DNA, 15 bp, Homo sapiens
actgatgaagccatg

SEQ ID NO: 1565307 - DNA, 15 bp, Homo sapiens
cactgatgaagccat

SEQ ID NO: 1565308 - DNA, 15 bp, Homo sapiens
acactgatgaagcca

SEQ ID NO: 1565309 - DNA, 15 bp, Homo sapiens
tacactgatgaagcc

SEQ ID NO: 1565310 - DNA, 15 bp, Homo sapiens
gtacactgatgaagc

SEQ ID NO: 1565311 - DNA, 15 bp, Homo sapiens
tgtacactgatgaag

SEQ ID NO: 1565312 - DNA, 15 bp, Homo sapiens
atgtacactgatgaa

SEQ ID NO: 1565313 - DNA, 15 bp, Homo sapiens
catgtacactgatga

SEQ ID NO: 1565314 - DNA, 15 bp, Homo sapiens
acatgtacactgatg

SEQ ID NO: 1565315 - DNA, 15 bp, Homo sapiens
cacatgtacactgat

SEQ ID NO: 1565316 - DNA, 15 bp, Homo sapiens
gcacatgtacactga

SEQ ID NO: 1565317 - DNA, 15 bp, Homo sapiens
tgcacatgtacactg

SEQ ID NO: 1565318 - DNA, 15 bp, Homo sapiens
atgcacatgtacact

SEQ ID NO: 1565319 - DNA, 15 bp, Homo sapiens
catgcacatgtacac

SEQ ID NO: 1565320 - DNA, 15 bp, Homo sapiens
tcatgcacatgtaca

SEQ ID NO: 1565321 - DNA, 15 bp, Homo sapiens
ttcatgcacatgtac

SEQ ID NO: 1565322 - DNA, 15 bp, Homo sapiens
tttcatgcacatgta

SEQ ID NO: 1565323 - DNA, 15 bp, Homo sapiens
gtttcatgcacatgt

SEQ ID NO: 1565324 - DNA, 15 bp, Homo sapiens
cgtttcatgcacatg

SEQ ID NO: 1565325 - DNA, 15 bp, Homo sapiens
tcgtttcatgcacat

SEQ ID NO: 1565326 - DNA, 15 bp, Homo sapiens
ttcgtttcatgcaca

SEQ ID NO: 1565327 - DNA, 15 bp, Homo sapiens
cttcgtttcatgcac

SEQ ID NO: 1565328 - DNA, 15 bp, Homo sapiens
tcttcgtttcatgca

SEQ ID NO: 1565329 - DNA, 15 bp, Homo sapiens
ttcttcgtttcatgc

SEQ ID NO: 1565330 - DNA, 15 bp, Homo sapiens
cttcttcgtttcatg

SEQ ID NO: 1565331 - DNA, 15 bp, Homo sapiens
gcttcttcgtttcat

SEQ ID NO: 1565332 - DNA, 15 bp, Homo sapiens
ggcttcttcgtttca

SEQ ID NO: 1565333 - DNA, 15 bp, Homo sapiens
cggcttcttcgtttc

SEQ ID NO: 1565334 - DNA, 15 bp, Homo sapiens
ccggcttcttcgttt

SEQ ID NO: 1565335 - DNA, 15 bp, Homo sapiens
tccggcttcttcgtt

SEQ ID NO: 1565336 - DNA, 15 bp, Homo sapiens
gtccggcttcttcgt

SEQ ID NO: 1565337 - DNA, 15 bp, Homo sapiens
agtccggcttcttcg

SEQ ID NO: 1565338 - DNA, 15 bp, Homo sapiens
tagtccggcttcttc

SEQ ID NO: 1565339 - DNA, 15 bp, Homo sapiens
ctagtccggcttctt

SEQ ID NO: 1565340 - DNA, 15 bp, Homo sapiens
tctagtccggcttct

SEQ ID NO: 1565341 - DNA, 15 bp, Homo sapiens
atctagtccggcttc

SEQ ID NO: 1565342 - DNA, 15 bp, Homo sapiens
gatctagtccggctt

SEQ ID NO: 1565343 - DNA, 15 bp, Homo sapiens
ggatctagtccggct

SEQ ID NO: 1565344 - DNA, 15 bp, Homo sapiens
gggatctagtccggc

SEQ ID NO: 1565345 - DNA, 15 bp, Homo sapiens
agggatctagtccgg

SEQ ID NO: 1565346 - DNA, 15 bp, Homo sapiens
aagggatctagtccg

SEQ ID NO: 1565347 - DNA, 15 bp, Homo sapiens
aaagggatctagtcc

SEQ ID NO: 1565348 - DNA, 15 bp, Homo sapiens
caaagggatctagtc

SEQ ID NO: 1565349 - DNA, 15 bp, Homo sapiens
ccaaagggatctagt

SEQ ID NO: 1565350 - DNA, 15 bp, Homo sapiens
tccaaagggatctag

SEQ ID NO: 1565351 - DNA, 15 bp, Homo sapiens
gtccaaagggatcta

SEQ ID NO: 1565352 - DNA, 15 bp, Homo sapiens
agtccaaagggatct

SEQ ID NO: 1565353 - DNA, 15 bp, Homo sapiens
cagtccaaagggatc

SEQ ID NO: 1565354 - DNA, 15 bp, Homo sapiens
acagtccaaagggat

SEQ ID NO: 1565355 - DNA, 15 bp, Homo sapiens
aacagtccaaaggga

SEQ ID NO: 1565356 - DNA, 15 bp, Homo sapiens
taacagtccaaaggg

SEQ ID NO: 1565357 - DNA, 15 bp, Homo sapiens
ttaacagtccaaagg

SEQ ID NO: 1565358 - DNA, 15 bp, Homo sapiens
tttaacagtccaaag

SEQ ID NO: 1565359 - DNA, 15 bp, Homo sapiens
atttaacagtccaaa

SEQ ID NO: 1565360 - DNA, 15 bp, Homo sapiens
aatttaacagtccaa

SEQ ID NO: 1565361 - DNA, 15 bp, Homo sapiens
taatttaacagtcca

SEQ ID NO: 1565362 - DNA, 15 bp, Homo sapiens
ataatttaacagtcc

SEQ ID NO: 1565363 - DNA, 15 bp, Homo sapiens
aataatttaacagtc

SEQ ID NO: 1565364 - DNA, 15 bp, Homo sapiens
aaataatttaacagt

SEQ ID NO: 1565365 - DNA, 15 bp, Homo sapiens
caaataatttaacag

SEQ ID NO: 1565366 - DNA, 15 bp, Homo sapiens
ccaaataatttaaca

SEQ ID NO: 1565367 - DNA, 15 bp, Homo sapiens
gccaaataatttaac

SEQ ID NO: 1565368 - DNA, 15 bp, Homo sapiens
ggccaaataatttaa

SEQ ID NO: 1565369 - DNA, 15 bp, Homo sapiens
aggccaaataattta

SEQ ID NO: 1565370 - DNA, 15 bp, Homo sapiens
aaggccaaataattt

SEQ ID NO: 1565371 - DNA, 15 bp, Homo sapiens
caaggccaaataatt

SEQ ID NO: 1565372 - DNA, 15 bp, Homo sapiens
ccaaggccaaataat

SEQ ID NO: 1565373 - DNA, 15 bp, Homo sapiens
accaaggccaaataa

SEQ ID NO: 1565374 - DNA, 15 bp, Homo sapiens
taccaaggccaaata

SEQ ID NO: 1565375 - DNA, 15 bp, Homo sapiens
ataccaaggccaaat

SEQ ID NO: 1565376 - DNA, 15 bp, Homo sapiens
aataccaaggccaaa

SEQ ID NO: 1565377 - DNA, 15 bp, Homo sapiens
aaataccaaggccaa

SEQ ID NO: 1565378 - DNA, 15 bp, Homo sapiens
taaataccaaggcca

SEQ ID NO: 1565379 - DNA, 15 bp, Homo sapiens
ataaataccaaggcc

SEQ ID NO: 1565380 - DNA, 15 bp, Homo sapiens
cataaataccaaggc

SEQ ID NO: 1565381 - DNA, 15 bp, Homo sapiens
tcataaataccaagg

SEQ ID NO: 1565382 - DNA, 15 bp, Homo sapiens
gtcataaataccaag

SEQ ID NO: 1565383 - DNA, 15 bp, Homo sapiens
agtcataaataccaa

SEQ ID NO: 1565384 - DNA, 15 bp, Homo sapiens
tagtcataaatacca

SEQ ID NO: 1565385 - DNA, 15 bp, Homo sapiens
atagtcataaatacc

SEQ ID NO: 1565386 - DNA, 15 bp, Homo sapiens
aatagtcataaatac

SEQ ID NO: 1565387 - DNA, 15 bp, Homo sapiens
taatagtcataaata

SEQ ID NO: 1565388 - DNA, 15 bp, Homo sapiens
ataatagtcataaat

SEQ ID NO: 1565389 - DNA, 15 bp, Homo sapiens
cataatagtcataaa

SEQ ID NO: 1565390 - DNA, 15 bp, Homo sapiens
tcataatagtcataa

SEQ ID NO: 1565391 - DNA, 15 bp, Homo sapiens
ttcataatagtcata

SEQ ID NO: 1565392 - DNA, 15 bp, Homo sapiens
attcataatagtcat

SEQ ID NO: 1565393 - DNA, 15 bp, Homo sapiens
tattcataatagtca

SEQ ID NO: 1565394 - DNA, 15 bp, Homo sapiens
ctattcataatagtc

SEQ ID NO: 1565395 - DNA, 15 bp, Homo sapiens
actattcataatagt

SEQ ID NO: 1565396 - DNA, 15 bp, Homo sapiens
aactattcataatag

SEQ ID NO: 1565397 - DNA, 15 bp, Homo sapiens
taactattcataata

SEQ ID NO: 1565398 - DNA, 15 bp, Homo sapiens
ataactattcataat

SEQ ID NO: 1565399 - DNA, 15 bp, Homo sapiens
aataactattcataa

SEQ ID NO: 1565400 - DNA, 15 bp, Homo sapiens
gaataactattcata

SEQ ID NO: 1565401 - DNA, 15 bp, Homo sapiens
tgaataactattcat

SEQ ID NO: 1565402 - DNA, 15 bp, Homo sapiens
atgaataactattca

SEQ ID NO: 1565403 - DNA, 15 bp, Homo sapiens
tatgaataactattc

SEQ ID NO: 1565404 - DNA, 15 bp, Homo sapiens
atatgaataactatt

SEQ ID NO: 1565405 - DNA, 15 bp, Homo sapiens
aatatgaataactat

SEQ ID NO: 1565406 - DNA, 15 bp, Homo sapiens
gaatatgaataacta

SEQ ID NO: 1565407 - DNA, 15 bp, Homo sapiens
agaatatgaataact

SEQ ID NO: 1565408 - DNA, 15 bp, Homo sapiens
aagaatatgaataac

SEQ ID NO: 1565409 - DNA, 15 bp, Homo sapiens
caagaatatgaataa

SEQ ID NO: 1565410 - DNA, 15 bp, Homo sapiens
tcaagaatatgaata

SEQ ID NO: 1565411 - DNA, 15 bp, Homo sapiens
ctcaagaatatgaat

SEQ ID NO: 1565412 - DNA, 15 bp, Homo sapiens
cctcaagaatatgaa

SEQ ID NO: 1565413 - DNA, 15 bp, Homo sapiens
acctcaagaatatga

SEQ ID NO: 1565414 - DNA, 15 bp, Homo sapiens
tacctcaagaatatg

SEQ ID NO: 1565415 - DNA, 15 bp, Homo sapiens
ttacctcaagaatat

SEQ ID NO: 1565416 - DNA, 15 bp, Homo sapiens
attacctcaagaata

SEQ ID NO: 1565417 - DNA, 15 bp, Homo sapiens
tattacctcaagaat

SEQ ID NO: 1565418 - DNA, 15 bp, Homo sapiens
ctattacctcaagaa

SEQ ID NO: 1565419 - DNA, 15 bp, Homo sapiens
tctattacctcaaga

SEQ ID NO: 1565420 - DNA, 15 bp, Homo sapiens
gtctattacctcaag

SEQ ID NO: 1565421 - DNA, 15 bp, Homo sapiens
agtctattacctcaa

SEQ ID NO: 1565422 - DNA, 15 bp, Homo sapiens
aagtctattacctca

SEQ ID NO: 1565423 - DNA, 15 bp, Homo sapiens
aaagtctattacctc

SEQ ID NO: 1565424 - DNA, 15 bp, Homo sapiens
caaagtctattacct

SEQ ID NO: 1565425 - DNA, 15 bp, Homo sapiens
acaaagtctattacc

SEQ ID NO: 1565426 - DNA, 15 bp, Homo sapiens
tacaaagtctattac

SEQ ID NO: 1565427 - DNA, 15 bp, Homo sapiens
atacaaagtctatta

SEQ ID NO: 1565428 - DNA, 15 bp, Homo sapiens
aatacaaagtctatt

SEQ ID NO: 1565429 - DNA, 15 bp, Homo sapiens
aaatacaaagtctat

SEQ ID NO: 1565430 - DNA, 15 bp, Homo sapiens
gaaatacaaagtcta

SEQ ID NO: 1565431 - DNA, 15 bp, Homo sapiens
agaaatacaaagtct

SEQ ID NO: 1565432 - DNA, 15 bp, Homo sapiens
gagaaatacaaagtc

SEQ ID NO: 1565433 - DNA, 15 bp, Homo sapiens
tgagaaatacaaagt

SEQ ID NO: 1565434 - DNA, 15 bp, Homo sapiens
ttgagaaatacaaag

SEQ ID NO: 1565435 - DNA, 15 bp, Homo sapiens
cttgagaaatacaaa

SEQ ID NO: 1565436 - DNA, 15 bp, Homo sapiens
acttgagaaatacaa

SEQ ID NO: 1565437 - DNA, 15 bp, Homo sapiens
cacttgagaaataca

SEQ ID NO: 1565438 - DNA, 15 bp, Homo sapiens
acacttgagaaatac

SEQ ID NO: 1565439 - DNA, 15 bp, Homo sapiens
aacacttgagaaata

SEQ ID NO: 1565440 - DNA, 15 bp, Homo sapiens
taacacttgagaaat

SEQ ID NO: 1565441 - DNA, 15 bp, Homo sapiens
ttaacacttgagaaa

SEQ ID NO: 1565442 - DNA, 15 bp, Homo sapiens
tttaacacttgagaa

SEQ ID NO: 1565443 - DNA, 15 bp, Homo sapiens
atttaacacttgaga

SEQ ID NO: 1565444 - DNA, 15 bp, Homo sapiens
aatttaacacttgag

SEQ ID NO: 1565445 - DNA, 15 bp, Homo sapiens
caatttaacacttga

SEQ ID NO: 1565446 - DNA, 15 bp, Homo sapiens
acaatttaacacttg

SEQ ID NO: 1565447 - DNA, 15 bp, Homo sapiens
gacaatttaacactt

SEQ ID NO: 1565448 - DNA, 15 bp, Homo sapiens
tgacaatttaacact

SEQ ID NO: 1565449 - DNA, 15 bp, Homo sapiens
ctgacaatttaacac

SEQ ID NO: 1565450 - DNA, 15 bp, Homo sapiens
tctgacaatttaaca

SEQ ID NO: 1565451 - DNA, 15 bp, Homo sapiens
atctgacaatttaac

SEQ ID NO: 1565452 - DNA, 15 bp, Homo sapiens
aaatctgacaattta

SEQ ID NO: 1565453 - DNA, 15 bp, Homo sapiens
aaaatctgacaattt

SEQ ID NO: 1565454 - DNA, 15 bp, Homo sapiens
taaaatctgacaatt

SEQ ID NO: 1565455 - DNA, 15 bp, Homo sapiens
ataaaatctgacaat

SEQ ID NO: 1565456 - DNA, 15 bp, Homo sapiens
aataaaatctgacaa

SEQ ID NO: 1565457 - DNA, 15 bp, Homo sapiens
taataaaatctgaca

SEQ ID NO: 1565458 - DNA, 15 bp, Homo sapiens
ataataaaatctgac

SEQ ID NO: 1565459 - DNA, 15 bp, Homo sapiens
tataataaaatctga

SEQ ID NO: 1565460 - DNA, 15 bp, Homo sapiens
atataataaaatctg

SEQ ID NO: 1565461 - DNA, 15 bp, Homo sapiens
aatataataaaatct

SEQ ID NO: 1565462 - DNA, 15 bp, Homo sapiens
caatataataaaatc

SEQ ID NO: 1565463 - DNA, 15 bp, Homo sapiens
ccaatataataaaat

SEQ ID NO: 1565464 - DNA, 15 bp, Homo sapiens
gccaatataataaaa

SEQ ID NO: 1565465 - DNA, 15 bp, Homo sapiens
agccaatataataaa

SEQ ID NO: 1565466 - DNA, 15 bp, Homo sapiens
aagccaatataataa

SEQ ID NO: 1565467 - DNA, 15 bp, Homo sapiens
aaagccaatataata

SEQ ID NO: 1565468 - DNA, 15 bp, Homo sapiens
taaagccaatataat

SEQ ID NO: 1565469 - DNA, 15 bp, Homo sapiens
ttaaagccaatataa

SEQ ID NO: 1565470 - DNA, 15 bp, Homo sapiens
attaaagccaatata

SEQ ID NO: 1565471 - DNA, 15 bp, Homo sapiens
aattaaagccaatat

SEQ ID NO: 1565472 - DNA, 15 bp, Homo sapiens
gaattaaagccaata

SEQ ID NO: 1565473 - DNA, 15 bp, Homo sapiens
agaattaaagccaat

SEQ ID NO: 1565474 - DNA, 15 bp, Homo sapiens
cagaattaaagccaa

SEQ ID NO: 1565475 - DNA, 15 bp, Homo sapiens
ccagaattaaagcca

SEQ ID NO: 1565476 - DNA, 15 bp, Homo sapiens
gccagaattaaagcc

SEQ ID NO: 1565477 - DNA, 15 bp, Homo sapiens
agccagaattaaagc

SEQ ID NO: 1565478 - DNA, 15 bp, Homo sapiens
aagccagaattaaag

SEQ ID NO: 1565479 - DNA, 15 bp, Homo sapiens
aaagccagaattaaa

SEQ ID NO: 1565480 - DNA, 15 bp, Homo sapiens
taaagccagaattaa

SEQ ID NO: 1565481 - DNA, 15 bp, Homo sapiens
ttaaagccagaatta

SEQ ID NO: 1565482 - DNA, 15 bp, Homo sapiens
attaaagccagaatt

SEQ ID NO: 1565483 - DNA, 15 bp, Homo sapiens
tattaaagccagaat

SEQ ID NO: 1565484 - DNA, 15 bp, Homo sapiens
ttattaaagccagaa

SEQ ID NO: 1565485 - DNA, 15 bp, Homo sapiens
tttattaaagccaga

SEQ ID NO: 1565486 - DNA, 15 bp, Homo sapiens
ttttattaaagccag

SEQ ID NO: 1565487 - DNA, 15 bp, Homo sapiens
attttattaaagcca

SEQ ID NO: 1565488 - DNA, 15 bp, Homo sapiens
tattttattaaagcc

SEQ ID NO: 1565489 - DNA, 15 bp, Homo sapiens
ttattttattaaagc

SEQ ID NO: 1565490 - DNA, 15 bp, Homo sapiens
attattttattaaag

SEQ ID NO: 1565491 - DNA, 15 bp, Homo sapiens
tattattttattaaa

SEQ ID NO: 1565492 - DNA, 15 bp, Homo sapiens
gtattattttattaa

SEQ ID NO: 1565493 - DNA, 15 bp, Homo sapiens
agtattattttatta

SEQ ID NO: 1565494 - DNA, 15 bp, Homo sapiens
aacagtattatttta

SEQ ID NO: 1565495 - DNA, 15 bp, Homo sapiens
caacagtattatttt

SEQ ID NO: 1565496 - DNA, 15 bp, Homo sapiens
ccaacagtattattt

SEQ ID NO: 1565497 - DNA, 15 bp, Homo sapiens
gccaacagtattatt

SEQ ID NO: 1565498 - DNA, 15 bp, Homo sapiens
ggccaacagtattat

SEQ ID NO: 1565499 - DNA, 15 bp, Homo sapiens
cggccaacagtatta

SEQ ID NO: 1565500 - DNA, 15 bp, Homo sapiens
ccggccaacagtatt

SEQ ID NO: 1565501 - DNA, 15 bp, Homo sapiens
cccggccaacagtat

SEQ ID NO: 1565502 - DNA, 15 bp, Homo sapiens
gcccggccaacagta

SEQ ID NO: 1565503 - DNA, 15 bp, Homo sapiens
tgcccggccaacagt

SEQ ID NO: 1565504 - DNA, 15 bp, Homo sapiens
atgcccggccaacag

SEQ ID NO: 1565505 - DNA, 15 bp, Homo sapiens
catgcccggccaaca

SEQ ID NO: 1565506 - DNA, 15 bp, Homo sapiens
ccatgcccggccaac

SEQ ID NO: 1565507 - DNA, 15 bp, Homo sapiens
accatgcccggccaa

SEQ ID NO: 1565508 - DNA, 15 bp, Homo sapiens
caccatgcccggcca

SEQ ID NO: 1565509 - DNA, 15 bp, Homo sapiens
ccaccatgcccggcc

SEQ ID NO: 1565510 - DNA, 15 bp, Homo sapiens
ccccagagtgctggg

SEQ ID NO: 1565511 - DNA, 15 bp, Homo sapiens
tccccagagtgctgg

SEQ ID NO: 1565512 - DNA, 15 bp, Homo sapiens
ctccccagagtgctg

SEQ ID NO: 1565513 - DNA, 15 bp, Homo sapiens
tctccccagagtgct

SEQ ID NO: 1565514 - DNA, 15 bp, Homo sapiens
gtctccccagagtgc

SEQ ID NO: 1565515 - DNA, 15 bp, Homo sapiens
ggtctccccagagtg

SEQ ID NO: 1565516 - DNA, 15 bp, Homo sapiens
tggtctccccagagt

SEQ ID NO: 1565517 - DNA, 15 bp, Homo sapiens
ttggtctccccagag

SEQ ID NO: 1565518 - DNA, 15 bp, Homo sapiens
cttggtctccccaga

SEQ ID NO: 1565519 - DNA, 15 bp, Homo sapiens
ccttggtctccccag

SEQ ID NO: 1565520 - DNA, 15 bp, Homo sapiens
gccttggtctcccca

SEQ ID NO: 1565521 - DNA, 15 bp, Homo sapiens
tgccttggtctcccc

SEQ ID NO: 1565522 - DNA, 15 bp, Homo sapiens
acctgccttggtctc

SEQ ID NO: 1565523 - DNA, 15 bp, Homo sapiens
cacctgccttggtct

SEQ ID NO: 1565524 - DNA, 15 bp, Homo sapiens
ccacctgccttggtc

SEQ ID NO: 1565525 - DNA, 15 bp, Homo sapiens
tccacctgccttggt

SEQ ID NO: 1565526 - DNA, 15 bp, Homo sapiens
aatccacctgccttg

SEQ ID NO: 1565527 - DNA, 15 bp, Homo sapiens
caatccacctgcctt

SEQ ID NO: 1565528 - DNA, 15 bp, Homo sapiens
ggctcaagcaatcca

SEQ ID NO: 1565529 - DNA, 15 bp, Homo sapiens
tccatgttgcccagg

SEQ ID NO: 1565530 - DNA, 15 bp, Homo sapiens
ctccatgttgcccag

SEQ ID NO: 1565531 - DNA, 15 bp, Homo sapiens
tctccatgttgccca

SEQ ID NO: 1565532 - DNA, 15 bp, Homo sapiens
ttctccatgttgccc

SEQ ID NO: 1565533 - DNA, 15 bp, Homo sapiens
tttctccatgttgcc

SEQ ID NO: 1565534 - DNA, 15 bp, Homo sapiens
gtttctccatgttgc

SEQ ID NO: 1565535 - DNA, 15 bp, Homo sapiens
atttttctattttta

SEQ ID NO: 1565536 - DNA, 15 bp, Homo sapiens
gatttttctattttt

SEQ ID NO: 1565537 - DNA, 15 bp, Homo sapiens
tgatttttctatttt

SEQ ID NO: 1565538 - DNA, 15 bp, Homo sapiens
ctgatttttctattt

SEQ ID NO: 1565539 - DNA, 15 bp, Homo sapiens
gctgatttttctatt

SEQ ID NO: 1565540 - DNA, 15 bp, Homo sapiens
agctgatttttctat

SEQ ID NO: 1565541 - DNA, 15 bp, Homo sapiens
cagctgatttttcta

SEQ ID NO: 1565542 - DNA, 15 bp, Homo sapiens
ccagctgatttttct

SEQ ID NO: 1565543 - DNA, 15 bp, Homo sapiens
cccagctgatttttc

SEQ ID NO: 1565544 - DNA, 15 bp, Homo sapiens
acccagctgattttt

SEQ ID NO: 1565545 - DNA, 15 bp, Homo sapiens
cacccagctgatttt

SEQ ID NO: 1565546 - DNA, 15 bp, Homo sapiens
acacccagctgattt

SEQ ID NO: 1565547 - DNA, 15 bp, Homo sapiens
cacacccagctgatt

SEQ ID NO: 1565548 - DNA, 15 bp, Homo sapiens
ccacacccagctgat

SEQ ID NO: 1565549 - DNA, 15 bp, Homo sapiens
accacacccagctga

SEQ ID NO: 1565550 - DNA, 15 bp, Homo sapiens
taccacacccagctg

SEQ ID NO: 1565551 - DNA, 15 bp, Homo sapiens
actaccacacccagc

SEQ ID NO: 1565552 - DNA, 15 bp, Homo sapiens
cactaccacacccag

SEQ ID NO: 1565553 - DNA, 15 bp, Homo sapiens
acactaccacaccca

SEQ ID NO: 1565554 - DNA, 15 bp, Homo sapiens
cacactaccacaccc

SEQ ID NO: 1565555 - DNA, 15 bp, Homo sapiens
acacactaccacacc

SEQ ID NO: 1565556 - DNA, 15 bp, Homo sapiens
cacacactaccacac

SEQ ID NO: 1565557 - DNA, 15 bp, Homo sapiens
gcacacactaccaca

SEQ ID NO: 1565558 - DNA, 15 bp, Homo sapiens
ggcacacactaccac

SEQ ID NO: 1565559 - DNA, 15 bp, Homo sapiens
aggcacacactacca

SEQ ID NO: 1565560 - DNA, 15 bp, Homo sapiens
caggcacacactacc

SEQ ID NO: 1565561 - DNA, 15 bp, Homo sapiens
acaggcacacactac

SEQ ID NO: 1565562 - DNA, 15 bp, Homo sapiens
tacaggcacacacta

SEQ ID NO: 1565563 - DNA, 15 bp, Homo sapiens
ctacaggcacacact

SEQ ID NO: 1565564 - DNA, 15 bp, Homo sapiens
actacaggcacacac

SEQ ID NO: 1565565 - DNA, 15 bp, Homo sapiens
cagtagctgggacta

SEQ ID NO: 1565566 - DNA, 15 bp, Homo sapiens
ccagtagctgggact

SEQ ID NO: 1565567 - DNA, 15 bp, Homo sapiens
cccagtagctgggac

SEQ ID NO: 1565568 - DNA, 15 bp, Homo sapiens
atcagcctccccagt

SEQ ID NO: 1565569 - DNA, 15 bp, Homo sapiens
catcagcctccccag

SEQ ID NO: 1565570 - DNA, 15 bp, Homo sapiens
acatcagcctcccca

SEQ ID NO: 1565571 - DNA, 15 bp, Homo sapiens
cacatcagcctcccc

SEQ ID NO: 1565572 - DNA, 15 bp, Homo sapiens
ccacatcagcctccc

SEQ ID NO: 1565573 - DNA, 15 bp, Homo sapiens
cccacatcagcctcc

SEQ ID NO: 1565574 - DNA, 15 bp, Homo sapiens
tcccacatcagcctc

SEQ ID NO: 1565575 - DNA, 15 bp, Homo sapiens
ctcccacatcagcct

SEQ ID NO: 1565576 - DNA, 15 bp, Homo sapiens
cctcccacatcagcc

SEQ ID NO: 1565577 - DNA, 15 bp, Homo sapiens
tcctcccacatcagc

SEQ ID NO: 1565578 - DNA, 15 bp, Homo sapiens
atcctcccacatcag

SEQ ID NO: 1565579 - DNA, 15 bp, Homo sapiens
gatcctcccacatca

SEQ ID NO: 1565580 - DNA, 15 bp, Homo sapiens
tgatcctcccacatc

SEQ ID NO: 1565581 - DNA, 15 bp, Homo sapiens
gtgatcctcccacat

SEQ ID NO: 1565582 - DNA, 15 bp, Homo sapiens
ggtgatcctcccaca

SEQ ID NO: 1565583 - DNA, 15 bp, Homo sapiens
atcctgggctcaggt

SEQ ID NO: 1565584 - DNA, 15 bp, Homo sapiens
catcctgggctcagg

SEQ ID NO: 1565585 - DNA, 15 bp, Homo sapiens
acatcctgggctcag

SEQ ID NO: 1565586 - DNA, 15 bp, Homo sapiens
cacatcctgggctca

SEQ ID NO: 1565587 - DNA, 15 bp, Homo sapiens
ccacatcctgggctc

SEQ ID NO: 1565588 - DNA, 15 bp, Homo sapiens
tccacatcctgggct

SEQ ID NO: 1565589 - DNA, 15 bp, Homo sapiens
ctccacatcctgggc

SEQ ID NO: 1565590 - DNA, 15 bp, Homo sapiens
cctccacatcctggg

SEQ ID NO: 1565591 - DNA, 15 bp, Homo sapiens
acctccacatcctgg

SEQ ID NO: 1565592 - DNA, 15 bp, Homo sapiens
aacctccacatcctg

SEQ ID NO: 1565593 - DNA, 15 bp, Homo sapiens
caacctccacatcct

SEQ ID NO: 1565594 - DNA, 15 bp, Homo sapiens
gcaacctccacatcc

SEQ ID NO: 1565595 - DNA, 15 bp, Homo sapiens
tgcaacctccacatc

SEQ ID NO: 1565596 - DNA, 15 bp, Homo sapiens
ctgcaacctccacat

SEQ ID NO: 1565597 - DNA, 15 bp, Homo sapiens
actgcaacctccaca

SEQ ID NO: 1565598 - DNA, 15 bp, Homo sapiens
ttcagctcactgcaa

SEQ ID NO: 1565599 - DNA, 15 bp, Homo sapiens
tttcagctcactgca

SEQ ID NO: 1565600 - DNA, 15 bp, Homo sapiens
atttcagctcactgc

SEQ ID NO: 1565601 - DNA, 15 bp, Homo sapiens
gatttcagctcactg

SEQ ID NO: 1565602 - DNA, 15 bp, Homo sapiens
tgatttcagctcact

SEQ ID NO: 1565603 - DNA, 15 bp, Homo sapiens
atgatttcagctcac

SEQ ID NO: 1565604 - DNA, 15 bp, Homo sapiens
tatgatttcagctca

SEQ ID NO: 1565605 - DNA, 15 bp, Homo sapiens
atatgatttcagctc

SEQ ID NO: 1565606 - DNA, 15 bp, Homo sapiens
gatatgatttcagct

SEQ ID NO: 1565607 - DNA, 15 bp, Homo sapiens
tgatatgatttcagc

SEQ ID NO: 1565608 - DNA, 15 bp, Homo sapiens
gtgatatgatttcag

SEQ ID NO: 1565609 - DNA, 15 bp, Homo sapiens
agtgatatgatttca

SEQ ID NO: 1565610 - DNA, 15 bp, Homo sapiens
cagtgatatgatttc

SEQ ID NO: 1565611 - DNA, 15 bp, Homo sapiens
gcagtgatatgattt

SEQ ID NO: 1565612 - DNA, 15 bp, Homo sapiens
tgcagtgatatgatt

SEQ ID NO: 1565613 - DNA, 15 bp, Homo sapiens
ggagtgcagtgatat

SEQ ID NO: 1565614 - DNA, 15 bp, Homo sapiens
tggagtgcagtgata

SEQ ID NO: 1565615 - DNA, 15 bp, Homo sapiens
ctggagtgcagtgat

SEQ ID NO: 1565616 - DNA, 15 bp, Homo sapiens
ggtctcgctctgtgg

SEQ ID NO: 1565617 - DNA, 15 bp, Homo sapiens
gggtctcgctctgtg

SEQ ID NO: 1565618 - DNA, 15 bp, Homo sapiens
tagggtctcgctctg

SEQ ID NO: 1565619 - DNA, 15 bp, Homo sapiens
atagggtctcgctct

SEQ ID NO: 1565620 - DNA, 15 bp, Homo sapiens
gatagggtctcgctc

SEQ ID NO: 1565621 - DNA, 15 bp, Homo sapiens
tgatagggtctcgct

SEQ ID NO: 1565622 - DNA, 15 bp, Homo sapiens
ttgatagggtctcgc

SEQ ID NO: 1565623 - DNA, 15 bp, Homo sapiens
tttgatagggtctcg

SEQ ID NO: 1565624 - DNA, 15 bp, Homo sapiens
ttttgatagggtctc

SEQ ID NO: 1565625 - DNA, 15 bp, Homo sapiens
cttttgatagggtct

SEQ ID NO: 1565626 - DNA, 15 bp, Homo sapiens
tcttttgatagggtc

SEQ ID NO: 1565627 - DNA, 15 bp, Homo sapiens
ttcttttgatagggt

SEQ ID NO: 1565628 - DNA, 15 bp, Homo sapiens
tttcttttgataggg

SEQ ID NO: 1565629 - DNA, 15 bp, Homo sapiens
ttttcttttgatagg

SEQ ID NO: 1565630 - DNA, 15 bp, Homo sapiens
tttttcttttgatag

SEQ ID NO: 1565631 - DNA, 15 bp, Homo sapiens
ttttttcttttgata

SEQ ID NO: 1565632 - DNA, 15 bp, Homo sapiens
tttttttcttttgat

SEQ ID NO: 1565633 - DNA, 15 bp, Homo sapiens
atttttttcttttga

SEQ ID NO: 1565634 - DNA, 15 bp, Homo sapiens
tatttttttcttttg

SEQ ID NO: 1565635 - DNA, 15 bp, Homo sapiens
actatttttttcttt

SEQ ID NO: 1565636 - DNA, 15 bp, Homo sapiens
cactatttttttctt

SEQ ID NO: 1565637 - DNA, 15 bp, Homo sapiens
acactatttttttct

SEQ ID NO: 1565638 - DNA, 15 bp, Homo sapiens
aacactatttttttc

SEQ ID NO: 1565639 - DNA, 15 bp, Homo sapiens
taacactattttttt

SEQ ID NO: 1565640 - DNA, 15 bp, Homo sapiens
ttaacactatttttt

SEQ ID NO: 1565641 - DNA, 15 bp, Homo sapiens
attaacactattttt

SEQ ID NO: 1565642 - DNA, 15 bp, Homo sapiens
tattaacactatttt

SEQ ID NO: 1565643 - DNA, 15 bp, Homo sapiens
gtattaacactattt

SEQ ID NO: 1565644 - DNA, 15 bp, Homo sapiens
tgtattaacactatt

SEQ ID NO: 1565645 - DNA, 15 bp, Homo sapiens
atgtattaacactat

SEQ ID NO: 1565646 - DNA, 15 bp, Homo sapiens
catgtattaacacta

SEQ ID NO: 1565647 - DNA, 15 bp, Homo sapiens
tcatgtattaacact

SEQ ID NO: 1565648 - DNA, 15 bp, Homo sapiens
atcatgtattaacac

SEQ ID NO: 1565649 - DNA, 15 bp, Homo sapiens
aatcatgtattaaca

SEQ ID NO: 1565650 - DNA, 15 bp, Homo sapiens
taatcatgtattaac

SEQ ID NO: 1565651 - DNA, 15 bp, Homo sapiens
gtaatcatgtattaa

SEQ ID NO: 1565652 - DNA, 15 bp, Homo sapiens
tgtaatcatgtatta

SEQ ID NO: 1565653 - DNA, 15 bp, Homo sapiens
atgtaatcatgtatt

SEQ ID NO: 1565654 - DNA, 15 bp, Homo sapiens
catgtaatcatgtat

SEQ ID NO: 1565655 - DNA, 15 bp, Homo sapiens
tcatgtaatcatgta

SEQ ID NO: 1565656 - DNA, 15 bp, Homo sapiens
atcatgtaatcatgt

SEQ ID NO: 1565657 - DNA, 15 bp, Homo sapiens
aatcatgtaatcatg

SEQ ID NO: 1565658 - DNA, 15 bp, Homo sapiens
taatcatgtaatcat

SEQ ID NO: 1565659 - DNA, 15 bp, Homo sapiens
ctaatcatgtaatca

SEQ ID NO: 1565660 - DNA, 15 bp, Homo sapiens
tctaatcatgtaatc

SEQ ID NO: 1565661 - DNA, 15 bp, Homo sapiens
ctctaatcatgtaat

SEQ ID NO: 1565662 - DNA, 15 bp, Homo sapiens
tctctaatcatgtaa

SEQ ID NO: 1565663 - DNA, 15 bp, Homo sapiens
ttctctaatcatgta

SEQ ID NO: 1565664 - DNA, 15 bp, Homo sapiens
tttctctaatcatgt

SEQ ID NO: 1565665 - DNA, 15 bp, Homo sapiens
gtttctctaatcatg

SEQ ID NO: 1565666 - DNA, 15 bp, Homo sapiens
agtttctctaatcat

SEQ ID NO: 1565667 - DNA, 15 bp, Homo sapiens
tagtttctctaatca

SEQ ID NO: 1565668 - DNA, 15 bp, Homo sapiens
ttagtttctctaatc

SEQ ID NO: 1565669 - DNA, 15 bp, Homo sapiens
tttagtttctctaat

SEQ ID NO: 1565670 - DNA, 15 bp, Homo sapiens
ttttagtttctctaa

SEQ ID NO: 1565671 - DNA, 15 bp, Homo sapiens
cttttagtttctcta

SEQ ID NO: 1565672 - DNA, 15 bp, Homo sapiens
gcttttagtttctct

SEQ ID NO: 1565673 - DNA, 15 bp, Homo sapiens
ggcttttagtttctc

SEQ ID NO: 1565674 - DNA, 15 bp, Homo sapiens
tggcttttagtttct

SEQ ID NO: 1565675 - DNA, 15 bp, Homo sapiens
ttggcttttagtttc

SEQ ID NO: 1565676 - DNA, 15 bp, Homo sapiens
tttggcttttagttt

SEQ ID NO: 1565677 - DNA, 15 bp, Homo sapiens
atttggcttttagtt

SEQ ID NO: 1565678 - DNA, 15 bp, Homo sapiens
catttggcttttagt

SEQ ID NO: 1565679 - DNA, 15 bp, Homo sapiens
ccatttggcttttag

SEQ ID NO: 1565680 - DNA, 15 bp, Homo sapiens
cccatttggctttta

SEQ ID NO: 1565681 - DNA, 15 bp, Homo sapiens
tcccatttggctttt

SEQ ID NO: 1565682 - DNA, 15 bp, Homo sapiens
ctcccatttggcttt

SEQ ID NO: 1565683 - DNA, 15 bp, Homo sapiens
tctcccatttggctt

SEQ ID NO: 1565684 - DNA, 15 bp, Homo sapiens
atctcccatttggct

SEQ ID NO: 1565685 - DNA, 15 bp, Homo sapiens
tatctcccatttggc

SEQ ID NO: 1565686 - DNA, 15 bp, Homo sapiens
ttatctcccatttgg

SEQ ID NO: 1565687 - DNA, 15 bp, Homo sapiens
attatctcccatttg

SEQ ID NO: 1565688 - DNA, 15 bp, Homo sapiens
cattatctcccattt

SEQ ID NO: 1565689 - DNA, 15 bp, Homo sapiens
gcattatctcccatt

SEQ ID NO: 1565690 - DNA, 15 bp, Homo sapiens
agcattatctcccat

SEQ ID NO: 1565691 - DNA, 15 bp, Homo sapiens
tagcattatctccca

SEQ ID NO: 1565692 - DNA, 15 bp, Homo sapiens
gtagcattatctccc

SEQ ID NO: 1565693 - DNA, 15 bp, Homo sapiens
agtagcattatctcc

SEQ ID NO: 1565694 - DNA, 15 bp, Homo sapiens
aagtagcattatctc

SEQ ID NO: 1565695 - DNA, 15 bp, Homo sapiens
caagtagcattatct

SEQ ID NO: 1565696 - DNA, 15 bp, Homo sapiens
gcaagtagcattatc

SEQ ID NO: 1565697 - DNA, 15 bp, Homo sapiens
agcaagtagcattat

SEQ ID NO: 1565698 - DNA, 15 bp, Homo sapiens
tagcaagtagcatta

SEQ ID NO: 1565699 - DNA, 15 bp, Homo sapiens
atagcaagtagcatt

SEQ ID NO: 1565700 - DNA, 15 bp, Homo sapiens
aatagcaagtagcat

SEQ ID NO: 1565701 - DNA, 15 bp, Homo sapiens
aaatagcaagtagca

SEQ ID NO: 1565702 - DNA, 15 bp, Homo sapiens
aaaatagcaagtagc

SEQ ID NO: 1565703 - DNA, 15 bp, Homo sapiens
aaaaatagcaagtag

SEQ ID NO: 1565704 - DNA, 15 bp, Homo sapiens
caaaaatagcaagta

SEQ ID NO: 1565705 - DNA, 15 bp, Homo sapiens
tcaaaaatagcaagt

SEQ ID NO: 1565706 - DNA, 15 bp, Homo sapiens
ttcaaaaatagcaag

SEQ ID NO: 1565707 - DNA, 15 bp, Homo sapiens
cttcaaaaatagcaa

SEQ ID NO: 1565708 - DNA, 15 bp, Homo sapiens
gcttcaaaaatagca

SEQ ID NO: 1565709 - DNA, 15 bp, Homo sapiens
tgcttcaaaaatagc

SEQ ID NO: 1565710 - DNA, 15 bp, Homo sapiens
atgcttcaaaaatag

SEQ ID NO: 1565711 - DNA, 15 bp, Homo sapiens
gatgcttcaaaaata

SEQ ID NO: 1565712 - DNA, 15 bp, Homo sapiens
agatgcttcaaaaat

SEQ ID NO: 1565713 - DNA, 15 bp, Homo sapiens
gagatgcttcaaaaa

SEQ ID NO: 1565714 - DNA, 15 bp, Homo sapiens
ggagatgcttcaaaa

SEQ ID NO: 1565715 - DNA, 15 bp, Homo sapiens
gggagatgcttcaaa

SEQ ID NO: 1565716 - DNA, 15 bp, Homo sapiens
tgggagatgcttcaa

SEQ ID NO: 1565717 - DNA, 15 bp, Homo sapiens
ctgggagatgcttca

SEQ ID NO: 1565718 - DNA, 15 bp, Homo sapiens
actgggagatgcttc

SEQ ID NO: 1565719 - DNA, 15 bp, Homo sapiens
cactgggagatgctt

SEQ ID NO: 1565720 - DNA, 15 bp, Homo sapiens
acactgggagatgct

SEQ ID NO: 1565721 - DNA, 15 bp, Homo sapiens
tacactgggagatgc

SEQ ID NO: 1565722 - DNA, 15 bp, Homo sapiens
atacactgggagatg

SEQ ID NO: 1565723 - DNA, 15 bp, Homo sapiens
gatacactgggagat

SEQ ID NO: 1565724 - DNA, 15 bp, Homo sapiens
agatacactgggaga

SEQ ID NO: 1565725 - DNA, 15 bp, Homo sapiens
cagatacactgggag

SEQ ID NO: 1565726 - DNA, 15 bp, Homo sapiens
ccagatacactggga

SEQ ID NO: 1565727 - DNA, 15 bp, Homo sapiens
accagatacactggg

SEQ ID NO: 1565728 - DNA, 15 bp, Homo sapiens
aaccagatacactgg

SEQ ID NO: 1565729 - DNA, 15 bp, Homo sapiens
aaaccagatacactg

SEQ ID NO: 1565730 - DNA, 15 bp, Homo sapiens
aaaaccagatacact

SEQ ID NO: 1565731 - DNA, 15 bp, Homo sapiens
aaaaaccagatacac

SEQ ID NO: 1565732 - DNA, 15 bp, Homo sapiens
taaaaaccagataca

SEQ ID NO: 1565733 - DNA, 15 bp, Homo sapiens
ctaaaaaccagatac

SEQ ID NO: 1565734 - DNA, 15 bp, Homo sapiens
actaaaaaccagata

SEQ ID NO: 1565735 - DNA, 15 bp, Homo sapiens
tactaaaaaccagat

SEQ ID NO: 1565736 - DNA, 15 bp, Homo sapiens
atactaaaaaccaga

SEQ ID NO: 1565737 - DNA, 15 bp, Homo sapiens
aatactaaaaaccag

SEQ ID NO: 1565738 - DNA, 15 bp, Homo sapiens
aaatactaaaaacca

SEQ ID NO: 1565739 - DNA, 15 bp, Homo sapiens
aaaatactaaaaacc

SEQ ID NO: 1565740 - DNA, 15 bp, Homo sapiens
gaaaatactaaaaac

SEQ ID NO: 1565741 - DNA, 15 bp, Homo sapiens
tgaaaatactaaaaa

SEQ ID NO: 1565742 - DNA, 15 bp, Homo sapiens
ctgaaaatactaaaa

SEQ ID NO: 1565743 - DNA, 15 bp, Homo sapiens
cctgaaaatactaaa

SEQ ID NO: 1565744 - DNA, 15 bp, Homo sapiens
gcctgaaaatactaa

SEQ ID NO: 1565745 - DNA, 15 bp, Homo sapiens
tgcctgaaaatacta

SEQ ID NO: 1565746 - DNA, 15 bp, Homo sapiens
atgcctgaaaatact

SEQ ID NO: 1565747 - DNA, 15 bp, Homo sapiens
catgcctgaaaatac

SEQ ID NO: 1565748 - DNA, 15 bp, Homo sapiens
gcatgcctgaaaata

SEQ ID NO: 1565749 - DNA, 15 bp, Homo sapiens
tgcatgcctgaaaat

SEQ ID NO: 1565750 - DNA, 15 bp, Homo sapiens
atgcatgcctgaaaa

SEQ ID NO: 1565751 - DNA, 15 bp, Homo sapiens
tatgcatgcctgaaa

SEQ ID NO: 1565752 - DNA, 15 bp, Homo sapiens
atatgcatgcctgaa

SEQ ID NO: 1565753 - DNA, 15 bp, Homo sapiens
gatatgcatgcctga

SEQ ID NO: 1565754 - DNA, 15 bp, Homo sapiens
agatatgcatgcctg

SEQ ID NO: 1565755 - DNA, 15 bp, Homo sapiens
aagatatgcatgcct

SEQ ID NO: 1565756 - DNA, 15 bp, Homo sapiens
aaagatatgcatgcc

SEQ ID NO: 1565757 - DNA, 15 bp, Homo sapiens
aaaagatatgcatgc

SEQ ID NO: 1565758 - DNA, 15 bp, Homo sapiens
aaaaagatatgcatg

SEQ ID NO: 1565759 - DNA, 15 bp, Homo sapiens
aaaaaagatatgcat

SEQ ID NO: 1565760 - DNA, 15 bp, Homo sapiens
aaaaaaagatatgca

SEQ ID NO: 1565761 - DNA, 15 bp, Homo sapiens
gaaaaaaagatatgc

SEQ ID NO: 1565762 - DNA, 15 bp, Homo sapiens
tgaaaaaaagatatg

SEQ ID NO: 1565763 - DNA, 15 bp, Homo sapiens
ttgaaaaaaagatat

SEQ ID NO: 1565764 - DNA, 15 bp, Homo sapiens
tttgaaaaaaagata

SEQ ID NO: 1565765 - DNA, 15 bp, Homo sapiens
ctttgaaaaaaagat

SEQ ID NO: 1565766 - DNA, 15 bp, Homo sapiens
gctttgaaaaaaaga

SEQ ID NO: 1565767 - DNA, 15 bp, Homo sapiens
agctttgaaaaaaag

SEQ ID NO: 1565768 - DNA, 15 bp, Homo sapiens
aagctttgaaaaaaa

SEQ ID NO: 1565769 - DNA, 15 bp, Homo sapiens
taagctttgaaaaaa

SEQ ID NO: 1565770 - DNA, 15 bp, Homo sapiens
ttaagctttgaaaaa

SEQ ID NO: 1565771 - DNA, 15 bp, Homo sapiens
tttaagctttgaaaa

SEQ ID NO: 1565772 - DNA, 15 bp, Homo sapiens
ttttaagctttgaaa

SEQ ID NO: 1565773 - DNA, 15 bp, Homo sapiens
tttttaagctttgaa

SEQ ID NO: 1565774 - DNA, 15 bp, Homo sapiens
ttttttaagctttga

SEQ ID NO: 1565775 - DNA, 15 bp, Homo sapiens
attttttaagctttg

SEQ ID NO: 1565776 - DNA, 15 bp, Homo sapiens
aattttttaagcttt

SEQ ID NO: 1565777 - DNA, 15 bp, Homo sapiens
taattttttaagctt

SEQ ID NO: 1565778 - DNA, 15 bp, Homo sapiens
ttaattttttaagct

SEQ ID NO: 1565779 - DNA, 15 bp, Homo sapiens
tttaattttttaagc

SEQ ID NO: 1565780 - DNA, 15 bp, Homo sapiens
ttttaattttttaag

SEQ ID NO: 1565781 - DNA, 15 bp, Homo sapiens
attttaattttttaa

SEQ ID NO: 1565782 - DNA, 15 bp, Homo sapiens
gattttaatttttta

SEQ ID NO: 1565783 - DNA, 15 bp, Homo sapiens
tgattttaatttttt

SEQ ID NO: 1565784 - DNA, 15 bp, Homo sapiens
ttgattttaattttt

SEQ ID NO: 1565785 - DNA, 15 bp, Homo sapiens
tttgattttaatttt

SEQ ID NO: 1565786 - DNA, 15 bp, Homo sapiens
gtttgattttaattt

SEQ ID NO: 1565787 - DNA, 15 bp, Homo sapiens
agtttgattttaatt

SEQ ID NO: 1565788 - DNA, 15 bp, Homo sapiens
gagtttgattttaat

SEQ ID NO: 1565789 - DNA, 15 bp, Homo sapiens
agagtttgattttaa

SEQ ID NO: 1565790 - DNA, 15 bp, Homo sapiens
cagagtttgatttta

SEQ ID NO: 1565791 - DNA, 15 bp, Homo sapiens
gcagagtttgatttt

SEQ ID NO: 1565792 - DNA, 15 bp, Homo sapiens
agcagagtttgattt

SEQ ID NO: 1565793 - DNA, 15 bp, Homo sapiens
aagcagagtttgatt

SEQ ID NO: 1565794 - DNA, 15 bp, Homo sapiens
aaagcagagtttgat

SEQ ID NO: 1565795 - DNA, 15 bp, Homo sapiens
gaaagcagagtttga

SEQ ID NO: 1565796 - DNA, 15 bp, Homo sapiens
agaaagcagagtttg

SEQ ID NO: 1565797 - DNA, 15 bp, Homo sapiens
aagaaagcagagttt

SEQ ID NO: 1565798 - DNA, 15 bp, Homo sapiens
gaagaaagcagagtt

SEQ ID NO: 1565799 - DNA, 15 bp, Homo sapiens
ggaagaaagcagagt

SEQ ID NO: 1565800 - DNA, 15 bp, Homo sapiens
aggaagaaagcagag

SEQ ID NO: 1565801 - DNA, 15 bp, Homo sapiens
taggaagaaagcaga

SEQ ID NO: 1565802 - DNA, 15 bp, Homo sapiens
ttaggaagaaagcag

SEQ ID NO: 1565803 - DNA, 15 bp, Homo sapiens
cttaggaagaaagca

SEQ ID NO: 1565804 - DNA, 15 bp, Homo sapiens
gcttaggaagaaagc

SEQ ID NO: 1565805 - DNA, 15 bp, Homo sapiens
agcttaggaagaaag

SEQ ID NO: 1565806 - DNA, 15 bp, Homo sapiens
aagcttaggaagaaa

SEQ ID NO: 1565807 - DNA, 15 bp, Homo sapiens
caagcttaggaagaa

SEQ ID NO: 1565808 - DNA, 15 bp, Homo sapiens
ccaagcttaggaaga

SEQ ID NO: 1565809 - DNA, 15 bp, Homo sapiens
tccaagcttaggaag

SEQ ID NO: 1565810 - DNA, 15 bp, Homo sapiens
ttccaagcttaggaa

SEQ ID NO: 1565811 - DNA, 15 bp, Homo sapiens
tttccaagcttagga

SEQ ID NO: 1565812 - DNA, 15 bp, Homo sapiens
atttccaagcttagg

SEQ ID NO: 1565813 - DNA, 15 bp, Homo sapiens
aatttccaagcttag

SEQ ID NO: 1565814 - DNA, 15 bp, Homo sapiens
taatttccaagctta

SEQ ID NO: 1565815 - DNA, 15 bp, Homo sapiens
gtaatttccaagctt

SEQ ID NO: 1565816 - DNA, 15 bp, Homo sapiens
agtaatttccaagct

SEQ ID NO: 1565817 - DNA, 15 bp, Homo sapiens
gagtaatttccaagc

SEQ ID NO: 1565818 - DNA, 15 bp, Homo sapiens
tgagtaatttccaag

SEQ ID NO: 1565819 - DNA, 15 bp, Homo sapiens
atgagtaatttccaa

SEQ ID NO: 1565820 - DNA, 15 bp, Homo sapiens
catgagtaatttcca

SEQ ID NO: 1565821 - DNA, 15 bp, Homo sapiens
acatgagtaatttcc

SEQ ID NO: 1565822 - DNA, 15 bp, Homo sapiens
tacatgagtaatttc

SEQ ID NO: 1565823 - DNA, 15 bp, Homo sapiens
atacatgagtaattt

SEQ ID NO: 1565824 - DNA, 15 bp, Homo sapiens
aatacatgagtaatt

SEQ ID NO: 1565825 - DNA, 15 bp, Homo sapiens
taatacatgagtaat

SEQ ID NO: 1565826 - DNA, 15 bp, Homo sapiens
ttaatacatgagtaa

SEQ ID NO: 1565827 - DNA, 15 bp, Homo sapiens
attaatacatgagta

SEQ ID NO: 1565828 - DNA, 15 bp, Homo sapiens
cattaatacatgagt

SEQ ID NO: 1565829 - DNA, 15 bp, Homo sapiens
tcattaatacatgag

SEQ ID NO: 1565830 - DNA, 15 bp, Homo sapiens
ctcattaatacatga

SEQ ID NO: 1565831 - DNA, 15 bp, Homo sapiens
actcattaatacatg

SEQ ID NO: 1565832 - DNA, 15 bp, Homo sapiens
tactcattaatacat

SEQ ID NO: 1565833 - DNA, 15 bp, Homo sapiens
ctactcattaataca

SEQ ID NO: 1565834 - DNA, 15 bp, Homo sapiens
actactcattaatac

SEQ ID NO: 1565835 - DNA, 15 bp, Homo sapiens
aactactcattaata

SEQ ID NO: 1565836 - DNA, 15 bp, Homo sapiens
gaactactcattaat

SEQ ID NO: 1565837 - DNA, 15 bp, Homo sapiens
agaactactcattaa

SEQ ID NO: 1565838 - DNA, 15 bp, Homo sapiens
aagaactactcatta

SEQ ID NO: 1565839 - DNA, 15 bp, Homo sapiens
caagaactactcatt

SEQ ID NO: 1565840 - DNA, 15 bp, Homo sapiens
ccaagaactactcat

SEQ ID NO: 1565841 - DNA, 15 bp, Homo sapiens
gccaagaactactca

SEQ ID NO: 1565842 - DNA, 15 bp, Homo sapiens
tgccaagaactactc

SEQ ID NO: 1565843 - DNA, 15 bp, Homo sapiens
gtgccaagaactact

SEQ ID NO: 1565844 - DNA, 15 bp, Homo sapiens
ggtgccaagaactac

SEQ ID NO: 1565845 - DNA, 15 bp, Homo sapiens
tggtgccaagaacta

SEQ ID NO: 1565846 - DNA, 15 bp, Homo sapiens
ctggtgccaagaact

SEQ ID NO: 1565847 - DNA, 15 bp, Homo sapiens
gctggtgccaagaac

SEQ ID NO: 1565848 - DNA, 15 bp, Homo sapiens
tgctggtgccaagaa

SEQ ID NO: 1565849 - DNA, 15 bp, Homo sapiens
ctgctggtgccaaga

SEQ ID NO: 1565850 - DNA, 15 bp, Homo sapiens
gctgctggtgccaag

SEQ ID NO: 1565851 - DNA, 15 bp, Homo sapiens
cgctgctggtgccaa

SEQ ID NO: 1565852 - DNA, 15 bp, Homo sapiens
acgctgctggtgcca

SEQ ID NO: 1565853 - DNA, 15 bp, Homo sapiens
aacgctgctggtgcc

SEQ ID NO: 1565854 - DNA, 15 bp, Homo sapiens
aaacgctgctggtgc

SEQ ID NO: 1565855 - DNA, 15 bp, Homo sapiens
gaaacgctgctggtg

SEQ ID NO: 1565856 - DNA, 15 bp, Homo sapiens
agaaacgctgctggt

SEQ ID NO: 1565857 - DNA, 15 bp, Homo sapiens
aagaaacgctgctgg

SEQ ID NO: 1565858 - DNA, 15 bp, Homo sapiens
taagaaacgctgctg

SEQ ID NO: 1565859 - DNA, 15 bp, Homo sapiens
ttaagaaacgctgct

SEQ ID NO: 1565860 - DNA, 15 bp, Homo sapiens
tttaagaaacgctgc

SEQ ID NO: 1565861 - DNA, 15 bp, Homo sapiens
gtttaagaaacgctg

SEQ ID NO: 1565862 - DNA, 15 bp, Homo sapiens
agtttaagaaacgct

SEQ ID NO: 1565863 - DNA, 15 bp, Homo sapiens
cagtttaagaaacgc

SEQ ID NO: 1565864 - DNA, 15 bp, Homo sapiens
tcagtttaagaaacg

SEQ ID NO: 1565865 - DNA, 15 bp, Homo sapiens
ttcagtttaagaaac

SEQ ID NO: 1565866 - DNA, 15 bp, Homo sapiens
tttcagtttaagaaa

SEQ ID NO: 1565867 - DNA, 15 bp, Homo sapiens
ttttcagtttaagaa

SEQ ID NO: 1565868 - DNA, 15 bp, Homo sapiens
cttttcagtttaaga

SEQ ID NO: 1565869 - DNA, 15 bp, Homo sapiens
tcttttcagtttaag

SEQ ID NO: 1565870 - DNA, 15 bp, Homo sapiens
gtcttttcagtttaa

SEQ ID NO: 1565871 - DNA, 15 bp, Homo sapiens
agtcttttcagttta

SEQ ID NO: 1565872 - DNA, 15 bp, Homo sapiens
cagtcttttcagttt

SEQ ID NO: 1565873 - DNA, 15 bp, Homo sapiens
ccagtcttttcagtt

SEQ ID NO: 1565874 - DNA, 15 bp, Homo sapiens
accagtcttttcagt

SEQ ID NO: 1565875 - DNA, 15 bp, Homo sapiens
gaccagtcttttcag

SEQ ID NO: 1565876 - DNA, 15 bp, Homo sapiens
tgaccagtcttttca

SEQ ID NO: 1565877 - DNA, 15 bp, Homo sapiens
ctgaccagtcttttc

SEQ ID NO: 1565878 - DNA, 15 bp, Homo sapiens
tctgaccagtctttt

SEQ ID NO: 1565879 - DNA, 15 bp, Homo sapiens
gtctgaccagtcttt

SEQ ID NO: 1565880 - DNA, 15 bp, Homo sapiens
tgtctgaccagtctt

SEQ ID NO: 1565881 - DNA, 15 bp, Homo sapiens
atgtctgaccagtct

SEQ ID NO: 1565882 - DNA, 15 bp, Homo sapiens
tatgtctgaccagtc

SEQ ID NO: 1565883 - DNA, 15 bp, Homo sapiens
ctatgtctgaccagt

SEQ ID NO: 1565884 - DNA, 15 bp, Homo sapiens
actatgtctgaccag

SEQ ID NO: 1565885 - DNA, 15 bp, Homo sapiens
aactatgtctgacca

SEQ ID NO: 1565886 - DNA, 15 bp, Homo sapiens
caactatgtctgacc

SEQ ID NO: 1565887 - DNA, 15 bp, Homo sapiens
tcaactatgtctgac

SEQ ID NO: 1565888 - DNA, 15 bp, Homo sapiens
gtcaactatgtctga

SEQ ID NO: 1565889 - DNA, 15 bp, Homo sapiens
ggtcaactatgtctg

SEQ ID NO: 1565890 - DNA, 15 bp, Homo sapiens
aggtcaactatgtct

SEQ ID NO: 1565891 - DNA, 15 bp, Homo sapiens
aaggtcaactatgtc

SEQ ID NO: 1565892 - DNA, 15 bp, Homo sapiens
aaaggtcaactatgt

SEQ ID NO: 1565893 - DNA, 15 bp, Homo sapiens
caaaggtcaactatg

SEQ ID NO: 1565894 - DNA, 15 bp, Homo sapiens
gcaaaggtcaactat

SEQ ID NO: 1565895 - DNA, 15 bp, Homo sapiens
agcaaaggtcaacta

SEQ ID NO: 1565896 - DNA, 15 bp, Homo sapiens
tagcaaaggtcaact

SEQ ID NO: 1565897 - DNA, 15 bp, Homo sapiens
gtagcaaaggtcaac

SEQ ID NO: 1565898 - DNA, 15 bp, Homo sapiens
agtagcaaaggtcaa

SEQ ID NO: 1565899 - DNA, 15 bp, Homo sapiens
cagtagcaaaggtca

SEQ ID NO: 1565900 - DNA, 15 bp, Homo sapiens
tcagtagcaaaggtc

SEQ ID NO: 1565901 - DNA, 15 bp, Homo sapiens
ttcagtagcaaaggt

SEQ ID NO: 1565902 - DNA, 15 bp, Homo sapiens
attcagtagcaaagg

SEQ ID NO: 1565903 - DNA, 15 bp, Homo sapiens
tattcagtagcaaag

SEQ ID NO: 1565904 - DNA, 15 bp, Homo sapiens
ttattcagtagcaaa

SEQ ID NO: 1565905 - DNA, 15 bp, Homo sapiens
attattcagtagcaa

SEQ ID NO: 1565906 - DNA, 15 bp, Homo sapiens
cattattcagtagca

SEQ ID NO: 1565907 - DNA, 15 bp, Homo sapiens
gcattattcagtagc

SEQ ID NO: 1565908 - DNA, 15 bp, Homo sapiens
ggcattattcagtag

SEQ ID NO: 1565909 - DNA, 15 bp, Homo sapiens
aggcattattcagta

SEQ ID NO: 1565910 - DNA, 15 bp, Homo sapiens
taggcattattcagt

SEQ ID NO: 1565911 - DNA, 15 bp, Homo sapiens
gtaggcattattcag

SEQ ID NO: 1565912 - DNA, 15 bp, Homo sapiens
ggtaggcattattca

SEQ ID NO: 1565913 - DNA, 15 bp, Homo sapiens
tggtaggcattattc

SEQ ID NO: 1565914 - DNA, 15 bp, Homo sapiens
atggtaggcattatt

SEQ ID NO: 1565915 - DNA, 15 bp, Homo sapiens
aatggtaggcattat

SEQ ID NO: 1565916 - DNA, 15 bp, Homo sapiens
caatggtaggcatta

SEQ ID NO: 1565917 - DNA, 15 bp, Homo sapiens
gcaatggtaggcatt

SEQ ID NO: 1565918 - DNA, 15 bp, Homo sapiens
tgcaatggtaggcat

SEQ ID NO: 1565919 - DNA, 15 bp, Homo sapiens
atgcaatggtaggca

SEQ ID NO: 1565920 - DNA, 15 bp, Homo sapiens
aatgcaatggtaggc

SEQ ID NO: 1565921 - DNA, 15 bp, Homo sapiens
aaatgcaatggtagg

SEQ ID NO: 1565922 - DNA, 15 bp, Homo sapiens
taaatgcaatggtag

SEQ ID NO: 1565923 - DNA, 15 bp, Homo sapiens
ataaatgcaatggta

SEQ ID NO: 1565924 - DNA, 15 bp, Homo sapiens
aataaatgcaatggt

SEQ ID NO: 1565925 - DNA, 15 bp, Homo sapiens
taataaatgcaatgg

SEQ ID NO: 1565926 - DNA, 15 bp, Homo sapiens
ataataaatgcaatg

SEQ ID NO: 1565927 - DNA, 15 bp, Homo sapiens
gataataaatgcaat

SEQ ID NO: 1565928 - DNA, 15 bp, Homo sapiens
tgataataaatgcaa

SEQ ID NO: 1565929 - DNA, 15 bp, Homo sapiens
ctgataataaatgca

SEQ ID NO: 1565930 - DNA, 15 bp, Homo sapiens
actgataataaatgc

SEQ ID NO: 1565931 - DNA, 15 bp, Homo sapiens
aactgataataaatg

SEQ ID NO: 1565932 - DNA, 15 bp, Homo sapiens
taactgataataaat

SEQ ID NO: 1565933 - DNA, 15 bp, Homo sapiens
ataactgataataaa

SEQ ID NO: 1565934 - DNA, 15 bp, Homo sapiens
gataactgataataa

SEQ ID NO: 1565935 - DNA, 15 bp, Homo sapiens
tgataactgataata

SEQ ID NO: 1565936 - DNA, 15 bp, Homo sapiens
atgataactgataat

SEQ ID NO: 1565937 - DNA, 15 bp, Homo sapiens
tatgataactgataa

SEQ ID NO: 1565938 - DNA, 15 bp, Homo sapiens
atatgataactgata

SEQ ID NO: 1565939 - DNA, 15 bp, Homo sapiens
aatatgataactgat

SEQ ID NO: 1565940 - DNA, 15 bp, Homo sapiens
aaatatgataactga

SEQ ID NO: 1565941 - DNA, 15 bp, Homo sapiens
caaatatgataactg

SEQ ID NO: 1565942 - DNA, 15 bp, Homo sapiens
acaaatatgataact

SEQ ID NO: 1565943 - DNA, 15 bp, Homo sapiens
aacaaatatgataac

SEQ ID NO: 1565944 - DNA, 15 bp, Homo sapiens
caacaaatatgataa

SEQ ID NO: 1565945 - DNA, 15 bp, Homo sapiens
tcaacaaatatgata

SEQ ID NO: 1565946 - DNA, 15 bp, Homo sapiens
atcaacaaatatgat

SEQ ID NO: 1565947 - DNA, 15 bp, Homo sapiens
aatcaacaaatatga

SEQ ID NO: 1565948 - DNA, 15 bp, Homo sapiens
aaatcaacaaatatg

SEQ ID NO: 1565949 - DNA, 15 bp, Homo sapiens
taaatcaacaaatat

SEQ ID NO: 1565950 - DNA, 15 bp, Homo sapiens
gtaaatcaacaaata

SEQ ID NO: 1565951 - DNA, 15 bp, Homo sapiens
ggtaaatcaacaaat

SEQ ID NO: 1565952 - DNA, 15 bp, Homo sapiens
aggtaaatcaacaaa

SEQ ID NO: 1565953 - DNA, 15 bp, Homo sapiens
gaggtaaatcaacaa

SEQ ID NO: 1565954 - DNA, 15 bp, Homo sapiens
ggaggtaaatcaaca

SEQ ID NO: 1565955 - DNA, 15 bp, Homo sapiens
tggaggtaaatcaac

SEQ ID NO: 1565956 - DNA, 15 bp, Homo sapiens
ctggaggtaaatcaa

SEQ ID NO: 1565957 - DNA, 15 bp, Homo sapiens
actggaggtaaatca

SEQ ID NO: 1565958 - DNA, 15 bp, Homo sapiens
cactggaggtaaatc

SEQ ID NO: 1565959 - DNA, 15 bp, Homo sapiens
acactggaggtaaat

SEQ ID NO: 1565960 - DNA, 15 bp, Homo sapiens
tacactggaggtaaa

SEQ ID NO: 1565961 - DNA, 15 bp, Homo sapiens
ctacactggaggtaa

SEQ ID NO: 1565962 - DNA, 15 bp, Homo sapiens
actacactggaggta

SEQ ID NO: 1565963 - DNA, 15 bp, Homo sapiens
aactacactggaggt

SEQ ID NO: 1565964 - DNA, 15 bp, Homo sapiens
aaactacactggagg

SEQ ID NO: 1565965 - DNA, 15 bp, Homo sapiens
caaactacactggag

SEQ ID NO: 1565966 - DNA, 15 bp, Homo sapiens
ccaaactacactgga

SEQ ID NO: 1565967 - DNA, 15 bp, Homo sapiens
accaaactacactgg

SEQ ID NO: 1565968 - DNA, 15 bp, Homo sapiens
aaccaaactacactg

SEQ ID NO: 1565969 - DNA, 15 bp, Homo sapiens
aaaccaaactacact

SEQ ID NO: 1565970 - DNA, 15 bp, Homo sapiens
taaaccaaactacac

SEQ ID NO: 1565971 - DNA, 15 bp, Homo sapiens
gtaaaccaaactaca

SEQ ID NO: 1565972 - DNA, 15 bp, Homo sapiens
ggtaaaccaaactac

SEQ ID NO: 1565973 - DNA, 15 bp, Homo sapiens
aggtaaaccaaacta

SEQ ID NO: 1565974 - DNA, 15 bp, Homo sapiens
gaggtaaaccaaact

SEQ ID NO: 1565975 - DNA, 15 bp, Homo sapiens
ggaggtaaaccaaac

SEQ ID NO: 1565976 - DNA, 15 bp, Homo sapiens
tggaggtaaaccaaa

SEQ ID NO: 1565977 - DNA, 15 bp, Homo sapiens
ctggaggtaaaccaa

SEQ ID NO: 1565978 - DNA, 15 bp, Homo sapiens
actggaggtaaacca

SEQ ID NO: 1565979 - DNA, 15 bp, Homo sapiens
cactggaggtaaacc

SEQ ID NO: 1565980 - DNA, 15 bp, Homo sapiens
acactggaggtaaac

SEQ ID NO: 1565981 - DNA, 15 bp, Homo sapiens
gtacactggaggtaa

SEQ ID NO: 1565982 - DNA, 15 bp, Homo sapiens
tgtacactggaggta

SEQ ID NO: 1565983 - DNA, 15 bp, Homo sapiens
ctgtacactggaggt

SEQ ID NO: 1565984 - DNA, 15 bp, Homo sapiens
tctgtacactggagg

SEQ ID NO: 1565985 - DNA, 15 bp, Homo sapiens
ttctgtacactggag

SEQ ID NO: 1565986 - DNA, 15 bp, Homo sapiens
attctgtacactgga

SEQ ID NO: 1565987 - DNA, 15 bp, Homo sapiens
tattctgtacactgg

SEQ ID NO: 1565988 - DNA, 15 bp, Homo sapiens
gtattctgtacactg

SEQ ID NO: 1565989 - DNA, 15 bp, Homo sapiens
tgtattctgtacact

SEQ ID NO: 1565990 - DNA, 15 bp, Homo sapiens
ttgtattctgtacac

SEQ ID NO: 1565991 - DNA, 15 bp, Homo sapiens
attgtattctgtaca

SEQ ID NO: 1565992 - DNA, 15 bp, Homo sapiens
gattgtattctgtac

SEQ ID NO: 1565993 - DNA, 15 bp, Homo sapiens
agattgtattctgta

SEQ ID NO: 1565994 - DNA, 15 bp, Homo sapiens
gagattgtattctgt

SEQ ID NO: 1565995 - DNA, 15 bp, Homo sapiens
tgagattgtattctg

SEQ ID NO: 1565996 - DNA, 15 bp, Homo sapiens
ctgagattgtattct

SEQ ID NO: 1565997 - DNA, 15 bp, Homo sapiens
actgagattgtattc

SEQ ID NO: 1565998 - DNA, 15 bp, Homo sapiens
aactgagattgtatt

SEQ ID NO: 1565999 - DNA, 15 bp, Homo sapiens
aaactgagattgtat

SEQ ID NO: 1566000 - DNA, 15 bp, Homo sapiens
taaactgagattgta

SEQ ID NO: 1566001 - DNA, 15 bp, Homo sapiens
ttaaactgagattgt

SEQ ID NO: 1566002 - DNA, 15 bp, Homo sapiens
attaaactgagattg

SEQ ID NO: 1566003 - DNA, 15 bp, Homo sapiens
aattaaactgagatt

SEQ ID NO: 1566004 - DNA, 15 bp, Homo sapiens
aaattaaactgagat

SEQ ID NO: 1566005 - DNA, 15 bp, Homo sapiens
caaattaaactgaga

SEQ ID NO: 1566006 - DNA, 15 bp, Homo sapiens
gcaaattaaactgag

SEQ ID NO: 1566007 - DNA, 15 bp, Homo sapiens
tgcaaattaaactga

SEQ ID NO: 1566008 - DNA, 15 bp, Homo sapiens
gtgcaaattaaactg

SEQ ID NO: 1566009 - DNA, 15 bp, Homo sapiens
ggtgcaaattaaact

SEQ ID NO: 1566010 - DNA, 15 bp, Homo sapiens
tggtgcaaattaaac

SEQ ID NO: 1566011 - DNA, 15 bp, Homo sapiens
ctggtgcaaattaaa

SEQ ID NO: 1566012 - DNA, 15 bp, Homo sapiens
actggtgcaaattaa

SEQ ID NO: 1566013 - DNA, 15 bp, Homo sapiens
tactggtgcaaatta

SEQ ID NO: 1566014 - DNA, 15 bp, Homo sapiens
ttactggtgcaaatt

SEQ ID NO: 1566015 - DNA, 15 bp, Homo sapiens
cttactggtgcaaat

SEQ ID NO: 1566016 - DNA, 15 bp, Homo sapiens
ccttactggtgcaaa

SEQ ID NO: 1566017 - DNA, 15 bp, Homo sapiens
accttactggtgcaa

SEQ ID NO: 1566018 - DNA, 15 bp, Homo sapiens
caccttactggtgca

SEQ ID NO: 1566019 - DNA, 15 bp, Homo sapiens
gcaccttactggtgc

SEQ ID NO: 1566020 - DNA, 15 bp, Homo sapiens
tgcaccttactggtg

SEQ ID NO: 1566021 - DNA, 15 bp, Homo sapiens
ttgcaccttactggt

SEQ ID NO: 1566022 - DNA, 15 bp, Homo sapiens
gttgcaccttactgg

SEQ ID NO: 1566023 - DNA, 15 bp, Homo sapiens
ggttgcaccttactg

SEQ ID NO: 1566024 - DNA, 15 bp, Homo sapiens
aggttgcaccttact

SEQ ID NO: 1566025 - DNA, 15 bp, Homo sapiens
taggttgcaccttac

SEQ ID NO: 1566026 - DNA, 15 bp, Homo sapiens
ataggttgcacctta

SEQ ID NO: 1566027 - DNA, 15 bp, Homo sapiens
gataggttgcacctt

SEQ ID NO: 1566028 - DNA, 15 bp, Homo sapiens
ggataggttgcacct

SEQ ID NO: 1566029 - DNA, 15 bp, Homo sapiens
aggataggttgcacc

SEQ ID NO: 1566030 - DNA, 15 bp, Homo sapiens
caggataggttgcac

SEQ ID NO: 1566031 - DNA, 15 bp, Homo sapiens
tcaggataggttgca

SEQ ID NO: 1566032 - DNA, 15 bp, Homo sapiens
ttcaggataggttgc

SEQ ID NO: 1566033 - DNA, 15 bp, Homo sapiens
tttcaggataggttg

SEQ ID NO: 1566034 - DNA, 15 bp, Homo sapiens
gtttcaggataggtt

SEQ ID NO: 1566035 - DNA, 15 bp, Homo sapiens
tgtttcaggataggt

SEQ ID NO: 1566036 - DNA, 15 bp, Homo sapiens
ctgtttcaggatagg

SEQ ID NO: 1566037 - DNA, 15 bp, Homo sapiens
tctgtttcaggatag

SEQ ID NO: 1566038 - DNA, 15 bp, Homo sapiens
ttctgtttcaggata

SEQ ID NO: 1566039 - DNA, 15 bp, Homo sapiens
tttctgtttcaggat

SEQ ID NO: 1566040 - DNA, 15 bp, Homo sapiens
ctttctgtttcagga

SEQ ID NO: 1566041 - DNA, 15 bp, Homo sapiens
gctttctgtttcagg

SEQ ID NO: 1566042 - DNA, 15 bp, Homo sapiens
agctttctgtttcag

SEQ ID NO: 1566043 - DNA, 15 bp, Homo sapiens
tagctttctgtttca

SEQ ID NO: 1566044 - DNA, 15 bp, Homo sapiens
atagctttctgtttc

SEQ ID NO: 1566045 - DNA, 15 bp, Homo sapiens
catagctttctgttt

SEQ ID NO: 1566046 - DNA, 15 bp, Homo sapiens
ccatagctttctgtt

SEQ ID NO: 1566047 - DNA, 15 bp, Homo sapiens
cccatagctttctgt

SEQ ID NO: 1566048 - DNA, 15 bp, Homo sapiens
tcccatagctttctg

SEQ ID NO: 1566049 - DNA, 15 bp, Homo sapiens
ttcccatagctttct

SEQ ID NO: 1566050 - DNA, 15 bp, Homo sapiens
gttcccatagctttc

SEQ ID NO: 1566051 - DNA, 15 bp, Homo sapiens
tgttcccatagcttt

SEQ ID NO: 1566052 - DNA, 15 bp, Homo sapiens
ttgttcccatagctt

SEQ ID NO: 1566053 - DNA, 15 bp, Homo sapiens
tttgttcccatagct

SEQ ID NO: 1566054 - DNA, 15 bp, Homo sapiens
ttttgttcccatagc

SEQ ID NO: 1566055 - DNA, 15 bp, Homo sapiens
gttttgttcccatag

SEQ ID NO: 1566056 - DNA, 15 bp, Homo sapiens
ggttttgttcccata

SEQ ID NO: 1566057 - DNA, 15 bp, Homo sapiens
gggttttgttcccat

SEQ ID NO: 1566058 - DNA, 15 bp, Homo sapiens
agggttttgttccca

SEQ ID NO: 1566059 - DNA, 15 bp, Homo sapiens
aagggttttgttccc

SEQ ID NO: 1566060 - DNA, 15 bp, Homo sapiens
aaagggttttgttcc

SEQ ID NO: 1566061 - DNA, 15 bp, Homo sapiens
caaagggttttgttc

SEQ ID NO: 1566062 - DNA, 15 bp, Homo sapiens
tcaaagggttttgtt

SEQ ID NO: 1566063 - DNA, 15 bp, Homo sapiens
ctcaaagggttttgt

SEQ ID NO: 1566064 - DNA, 15 bp, Homo sapiens
tctcaaagggttttg

SEQ ID NO: 1566065 - DNA, 15 bp, Homo sapiens
ttctcaaagggtttt

SEQ ID NO: 1566066 - DNA, 15 bp, Homo sapiens
cttctcaaagggttt

SEQ ID NO: 1566067 - DNA, 15 bp, Homo sapiens
tcttctcaaagggtt

SEQ ID NO: 1566068 - DNA, 15 bp, Homo sapiens
atcttctcaaagggt

SEQ ID NO: 1566069 - DNA, 15 bp, Homo sapiens
catcttctcaaaggg

SEQ ID NO: 1566070 - DNA, 15 bp, Homo sapiens
ccatcttctcaaagg

SEQ ID NO: 1566071 - DNA, 15 bp, Homo sapiens
tccatcttctcaaag

SEQ ID NO: 1566072 - DNA, 15 bp, Homo sapiens
ttccatcttctcaaa

SEQ ID NO: 1566073 - DNA, 15 bp, Homo sapiens
tttccatcttctcaa

SEQ ID NO: 1566074 - DNA, 15 bp, Homo sapiens
ttttccatcttctca

SEQ ID NO: 1566075 - DNA, 15 bp, Homo sapiens
attttccatcttctc

SEQ ID NO: 1566076 - DNA, 15 bp, Homo sapiens
tattttccatcttct

SEQ ID NO: 1566077 - DNA, 15 bp, Homo sapiens
ttattttccatcttc

SEQ ID NO: 1566078 - DNA, 15 bp, Homo sapiens
tttattttccatctt

SEQ ID NO: 1566079 - DNA, 15 bp, Homo sapiens
ctttattttccatct

SEQ ID NO: 1566080 - DNA, 15 bp, Homo sapiens
cctttattttccatc

SEQ ID NO: 1566081 - DNA, 15 bp, Homo sapiens
tcctttattttccat

SEQ ID NO: 1566082 - DNA, 15 bp, Homo sapiens
ttcctttattttcca

SEQ ID NO: 1566083 - DNA, 15 bp, Homo sapiens
tttcctttattttcc

SEQ ID NO: 1566084 - DNA, 15 bp, Homo sapiens
ctttcctttattttc

SEQ ID NO: 1566085 - DNA, 15 bp, Homo sapiens
tctttcctttatttt

SEQ ID NO: 1566086 - DNA, 15 bp, Homo sapiens
ttctttcctttattt

SEQ ID NO: 1566087 - DNA, 15 bp, Homo sapiens
tttctttcctttatt

SEQ ID NO: 1566088 - DNA, 15 bp, Homo sapiens
gtttctttcctttat

SEQ ID NO: 1566089 - DNA, 15 bp, Homo sapiens
agtttctttccttta

SEQ ID NO: 1566090 - DNA, 15 bp, Homo sapiens
cagtttctttccttt

SEQ ID NO: 1566091 - DNA, 15 bp, Homo sapiens
gcagtttctttcctt

SEQ ID NO: 1566092 - DNA, 15 bp, Homo sapiens
agcagtttctttcct

SEQ ID NO: 1566093 - DNA, 15 bp, Homo sapiens
gagcagtttctttcc

SEQ ID NO: 1566094 - DNA, 15 bp, Homo sapiens
ggagcagtttctttc

SEQ ID NO: 1566095 - DNA, 15 bp, Homo sapiens
tggagcagtttcttt

SEQ ID NO: 1566096 - DNA, 15 bp, Homo sapiens
ctggagcagtttctt

SEQ ID NO: 1566097 - DNA, 15 bp, Homo sapiens
cctggagcagtttct

SEQ ID NO: 1566098 - DNA, 15 bp, Homo sapiens
ccctggagcagtttc

SEQ ID NO: 1566099 - DNA, 15 bp, Homo sapiens
tccctggagcagttt

SEQ ID NO: 1566100 - DNA, 15 bp, Homo sapiens
atccctggagcagtt

SEQ ID NO: 1566101 - DNA, 15 bp, Homo sapiens
catccctggagcagt

SEQ ID NO: 1566102 - DNA, 15 bp, Homo sapiens
acatccctggagcag

SEQ ID NO: 1566103 - DNA, 15 bp, Homo sapiens
tacatccctggagca

SEQ ID NO: 1566104 - DNA, 15 bp, Homo sapiens
atacatccctggagc

SEQ ID NO: 1566105 - DNA, 15 bp, Homo sapiens
aatacatccctggag

SEQ ID NO: 1566106 - DNA, 15 bp, Homo sapiens
taatacatccctgga

SEQ ID NO: 1566107 - DNA, 15 bp, Homo sapiens
ctaatacatccctgg

SEQ ID NO: 1566108 - DNA, 15 bp, Homo sapiens
tctaatacatccctg

SEQ ID NO: 1566109 - DNA, 15 bp, Homo sapiens
gaaagctctaataca

SEQ ID NO: 1566110 - DNA, 15 bp, Homo sapiens
agaaagctctaatac

SEQ ID NO: 1566111 - DNA, 15 bp, Homo sapiens
aagaaagctctaata

SEQ ID NO: 1566112 - DNA, 15 bp, Homo sapiens
aaagaaagctctaat

SEQ ID NO: 1566113 - DNA, 15 bp, Homo sapiens
caaagaaagctctaa

SEQ ID NO: 1566114 - DNA, 15 bp, Homo sapiens
tcaaagaaagctcta

SEQ ID NO: 1566115 - DNA, 15 bp, Homo sapiens
ctcaaagaaagctct

SEQ ID NO: 1566116 - DNA, 15 bp, Homo sapiens
actcaaagaaagctc

SEQ ID NO: 1566117 - DNA, 15 bp, Homo sapiens
gactcaaagaaagct

SEQ ID NO: 1566118 - DNA, 15 bp, Homo sapiens
ggactcaaagaaagc

SEQ ID NO: 1566119 - DNA, 15 bp, Homo sapiens
aggactcaaagaaag

SEQ ID NO: 1566120 - DNA, 15 bp, Homo sapiens
gaggactcaaagaaa

SEQ ID NO: 1566121 - DNA, 15 bp, Homo sapiens
tgaggactcaaagaa

SEQ ID NO: 1566122 - DNA, 15 bp, Homo sapiens
ctgaggactcaaaga

SEQ ID NO: 1566123 - DNA, 15 bp, Homo sapiens
actgaggactcaaag

SEQ ID NO: 1566124 - DNA, 15 bp, Homo sapiens
cactgaggactcaaa

SEQ ID NO: 1566125 - DNA, 15 bp, Homo sapiens
tcactgaggactcaa

SEQ ID NO: 1566126 - DNA, 15 bp, Homo sapiens
ttcactgaggactca

SEQ ID NO: 1566127 - DNA, 15 bp, Homo sapiens
tttcactgaggactc

SEQ ID NO: 1566128 - DNA, 15 bp, Homo sapiens
ctttcactgaggact

SEQ ID NO: 1566129 - DNA, 15 bp, Homo sapiens
gctttcactgaggac

SEQ ID NO: 1566130 - DNA, 15 bp, Homo sapiens
agctttcactgagga

SEQ ID NO: 1566131 - DNA, 15 bp, Homo sapiens
aagctttcactgagg

SEQ ID NO: 1566132 - DNA, 15 bp, Homo sapiens
taagctttcactgag

SEQ ID NO: 1566133 - DNA, 15 bp, Homo sapiens
ttaagctttcactga

SEQ ID NO: 1566134 - DNA, 15 bp, Homo sapiens
tttaagctttcactg

SEQ ID NO: 1566135 - DNA, 15 bp, Homo sapiens
gtttaagctttcact

SEQ ID NO: 1566136 - DNA, 15 bp, Homo sapiens
tgtttaagctttcac

SEQ ID NO: 1566137 - DNA, 15 bp, Homo sapiens
gtgtttaagctttca

SEQ ID NO: 1566138 - DNA, 15 bp, Homo sapiens
agtgtttaagctttc

SEQ ID NO: 1566139 - DNA, 15 bp, Homo sapiens
aagtgtttaagcttt

SEQ ID NO: 1566140 - DNA, 15 bp, Homo sapiens
aaagtgtttaagctt

SEQ ID NO: 1566141 - DNA, 15 bp, Homo sapiens
taaagtgtttaagct

SEQ ID NO: 1566142 - DNA, 15 bp, Homo sapiens
ataaagtgtttaagc

SEQ ID NO: 1566143 - DNA, 15 bp, Homo sapiens
cataaagtgtttaag

SEQ ID NO: 1566144 - DNA, 15 bp, Homo sapiens
acataaagtgtttaa

SEQ ID NO: 1566145 - DNA, 15 bp, Homo sapiens
gacataaagtgttta

SEQ ID NO: 1566146 - DNA, 15 bp, Homo sapiens
ggacataaagtgttt

SEQ ID NO: 1566147 - DNA, 15 bp, Homo sapiens
tggacataaagtgtt

SEQ ID NO: 1566148 - DNA, 15 bp, Homo sapiens
ttggacataaagtgt

SEQ ID NO: 1566149 - DNA, 15 bp, Homo sapiens
tttggacataaagtg

SEQ ID NO: 1566150 - DNA, 15 bp, Homo sapiens
gtttggacataaagt

SEQ ID NO: 1566151 - DNA, 15 bp, Homo sapiens
tgtttggacataaag

SEQ ID NO: 1566152 - DNA, 15 bp, Homo sapiens
atgtttggacataaa

SEQ ID NO: 1566153 - DNA, 15 bp, Homo sapiens
aatgtttggacataa

SEQ ID NO: 1566154 - DNA, 15 bp, Homo sapiens
aaatgtttggacata

SEQ ID NO: 1566155 - DNA, 15 bp, Homo sapiens
aaaatgtttggacat

SEQ ID NO: 1566156 - DNA, 15 bp, Homo sapiens
gaaaatgtttggaca

SEQ ID NO: 1566157 - DNA, 15 bp, Homo sapiens
agaaaatgtttggac

SEQ ID NO: 1566158 - DNA, 15 bp, Homo sapiens
aagaaaatgtttgga

SEQ ID NO: 1566159 - DNA, 15 bp, Homo sapiens
aaagaaaatgtttgg

SEQ ID NO: 1566160 - DNA, 15 bp, Homo sapiens
aaaagaaaatgtttg

SEQ ID NO: 1566161 - DNA, 15 bp, Homo sapiens
aaaaagaaaatgttt

SEQ ID NO: 1566162 - DNA, 15 bp, Homo sapiens
taaaaagaaaatgtt

SEQ ID NO: 1566163 - DNA, 15 bp, Homo sapiens
ctaaaaagaaaatgt

SEQ ID NO: 1566164 - DNA, 15 bp, Homo sapiens
actaaaaagaaaatg

SEQ ID NO: 1566165 - DNA, 15 bp, Homo sapiens
cactaaaaagaaaat

SEQ ID NO: 1566166 - DNA, 15 bp, Homo sapiens
acactaaaaagaaaa

SEQ ID NO: 1566167 - DNA, 15 bp, Homo sapiens
tacactaaaaagaaa

SEQ ID NO: 1566168 - DNA, 15 bp, Homo sapiens
atacactaaaaagaa

SEQ ID NO: 1566169 - DNA, 15 bp, Homo sapiens
aatacactaaaaaga

SEQ ID NO: 1566170 - DNA, 15 bp, Homo sapiens
gaatacactaaaaag

SEQ ID NO: 1566171 - DNA, 15 bp, Homo sapiens
ggaatacactaaaaa

SEQ ID NO: 1566172 - DNA, 15 bp, Homo sapiens
gggaatacactaaaa

SEQ ID NO: 1566173 - DNA, 15 bp, Homo sapiens
tgggaatacactaaa

SEQ ID NO: 1566174 - DNA, 15 bp, Homo sapiens
atgggaatacactaa

SEQ ID NO: 1566175 - DNA, 15 bp, Homo sapiens
aatgggaatacacta

SEQ ID NO: 1566176 - DNA, 15 bp, Homo sapiens
aaatgggaatacact

SEQ ID NO: 1566177 - DNA, 15 bp, Homo sapiens
taaatgggaatacac

SEQ ID NO: 1566178 - DNA, 15 bp, Homo sapiens
ataaatgggaataca

SEQ ID NO: 1566179 - DNA, 15 bp, Homo sapiens
tataaatgggaatac

SEQ ID NO: 1566180 - DNA, 15 bp, Homo sapiens
ctataaatgggaata

SEQ ID NO: 1566181 - DNA, 15 bp, Homo sapiens
gtctataaatgggaa

SEQ ID NO: 1566182 - DNA, 15 bp, Homo sapiens
tgtctataaatggga

SEQ ID NO: 1566183 - DNA, 15 bp, Homo sapiens
gtgtctataaatggg

SEQ ID NO: 1566184 - DNA, 15 bp, Homo sapiens
agtgtctataaatgg

SEQ ID NO: 1566185 - DNA, 15 bp, Homo sapiens
cagtgtctataaatg

SEQ ID NO: 1566186 - DNA, 15 bp, Homo sapiens
acagtgtctataaat

SEQ ID NO: 1566187 - DNA, 15 bp, Homo sapiens
tacagtgtctataaa

SEQ ID NO: 1566188 - DNA, 15 bp, Homo sapiens
ctacagtgtctataa

SEQ ID NO: 1566189 - DNA, 15 bp, Homo sapiens
actacagtgtctata

SEQ ID NO: 1566190 - DNA, 15 bp, Homo sapiens
aactacagtgtctat

SEQ ID NO: 1566191 - DNA, 15 bp, Homo sapiens
taactacagtgtcta

SEQ ID NO: 1566192 - DNA, 15 bp, Homo sapiens
ttaactacagtgtct

SEQ ID NO: 1566193 - DNA, 15 bp, Homo sapiens
attaactacagtgtc

SEQ ID NO: 1566194 - DNA, 15 bp, Homo sapiens
cattaactacagtgt

SEQ ID NO: 1566195 - DNA, 15 bp, Homo sapiens
tcattaactacagtg

SEQ ID NO: 1566196 - DNA, 15 bp, Homo sapiens
ttcattaactacagt

SEQ ID NO: 1566197 - DNA, 15 bp, Homo sapiens
gttcattaactacag

SEQ ID NO: 1566198 - DNA, 15 bp, Homo sapiens
agttcattaactaca

SEQ ID NO: 1566199 - DNA, 15 bp, Homo sapiens
aagttcattaactac

SEQ ID NO: 1566200 - DNA, 15 bp, Homo sapiens
caagttcattaacta

SEQ ID NO: 1566201 - DNA, 15 bp, Homo sapiens
gcaagttcattaact

SEQ ID NO: 1566202 - DNA, 15 bp, Homo sapiens
tgcaagttcattaac

SEQ ID NO: 1566203 - DNA, 15 bp, Homo sapiens
atgcaagttcattaa

SEQ ID NO: 1566204 - DNA, 15 bp, Homo sapiens
tatgcaagttcatta

SEQ ID NO: 1566205 - DNA, 15 bp, Homo sapiens
atatgcaagttcatt

SEQ ID NO: 1566206 - DNA, 15 bp, Homo sapiens
aatatgcaagttcat

SEQ ID NO: 1566207 - DNA, 15 bp, Homo sapiens
gaatatgcaagttca

SEQ ID NO: 1566208 - DNA, 15 bp, Homo sapiens
agaatatgcaagttc

SEQ ID NO: 1566209 - DNA, 15 bp, Homo sapiens
aagaatatgcaagtt

SEQ ID NO: 1566210 - DNA, 15 bp, Homo sapiens
taagaatatgcaagt

SEQ ID NO: 1566211 - DNA, 15 bp, Homo sapiens
ttaagaatatgcaag

SEQ ID NO: 1566212 - DNA, 15 bp, Homo sapiens
gttaagaatatgcaa

SEQ ID NO: 1566213 - DNA, 15 bp, Homo sapiens
agttaagaatatgca

SEQ ID NO: 1566214 - DNA, 15 bp, Homo sapiens
aagttaagaatatgc

SEQ ID NO: 1566215 - DNA, 15 bp, Homo sapiens
aaagttaagaatatg

SEQ ID NO: 1566216 - DNA, 15 bp, Homo sapiens
aaaagttaagaatat

SEQ ID NO: 1566217 - DNA, 15 bp, Homo sapiens
caaaagttaagaata

SEQ ID NO: 1566218 - DNA, 15 bp, Homo sapiens
acaaaagttaagaat

SEQ ID NO: 1566219 - DNA, 15 bp, Homo sapiens
aacaaaagttaagaa

SEQ ID NO: 1566220 - DNA, 15 bp, Homo sapiens
aaacaaaagttaaga

SEQ ID NO: 1566221 - DNA, 15 bp, Homo sapiens
taaacaaaagttaag

SEQ ID NO: 1566222 - DNA, 15 bp, Homo sapiens
ataaacaaaagttaa

SEQ ID NO: 1566223 - DNA, 15 bp, Homo sapiens
tataaacaaaagtta

SEQ ID NO: 1566224 - DNA, 15 bp, Homo sapiens
ctataaacaaaagtt

SEQ ID NO: 1566225 - DNA, 15 bp, Homo sapiens
cctataaacaaaagt

SEQ ID NO: 1566226 - DNA, 15 bp, Homo sapiens
tcctataaacaaaag

SEQ ID NO: 1566227 - DNA, 15 bp, Homo sapiens
ttcctataaacaaaa

SEQ ID NO: 1566228 - DNA, 15 bp, Homo sapiens
gttcctataaacaaa

SEQ ID NO: 1566229 - DNA, 15 bp, Homo sapiens
tgttcctataaacaa

SEQ ID NO: 1566230 - DNA, 15 bp, Homo sapiens
ttgttcctataaaca

SEQ ID NO: 1566231 - DNA, 15 bp, Homo sapiens
cttgttcctataaac

SEQ ID NO: 1566232 - DNA, 15 bp, Homo sapiens
ccttgttcctataaa

SEQ ID NO: 1566233 - DNA, 15 bp, Homo sapiens
tccttgttcctataa

SEQ ID NO: 1566234 - DNA, 15 bp, Homo sapiens
ttccttgttcctata

SEQ ID NO: 1566235 - DNA, 15 bp, Homo sapiens
tttccttgttcctat

SEQ ID NO: 1566236 - DNA, 15 bp, Homo sapiens
ttttccttgttccta

SEQ ID NO: 1566237 - DNA, 15 bp, Homo sapiens
cttttccttgttcct

SEQ ID NO: 1566238 - DNA, 15 bp, Homo sapiens
acttttccttgttcc

SEQ ID NO: 1566239 - DNA, 15 bp, Homo sapiens
aacttttccttgttc

SEQ ID NO: 1566240 - DNA, 15 bp, Homo sapiens
aaacttttccttgtt

SEQ ID NO: 1566241 - DNA, 15 bp, Homo sapiens
aaaacttttccttgt

SEQ ID NO: 1566242 - DNA, 15 bp, Homo sapiens
caaaacttttccttg

SEQ ID NO: 1566243 - DNA, 15 bp, Homo sapiens
tcaaaacttttcctt

SEQ ID NO: 1566244 - DNA, 15 bp, Homo sapiens
atcaaaacttttcct

SEQ ID NO: 1566245 - DNA, 15 bp, Homo sapiens
gatcaaaacttttcc

SEQ ID NO: 1566246 - DNA, 15 bp, Homo sapiens
tgatcaaaacttttc

SEQ ID NO: 1566247 - DNA, 15 bp, Homo sapiens
gtgatcaaaactttt

SEQ ID NO: 1566248 - DNA, 15 bp, Homo sapiens
agtgatcaaaacttt

SEQ ID NO: 1566249 - DNA, 15 bp, Homo sapiens
aagtgatcaaaactt

SEQ ID NO: 1566250 - DNA, 15 bp, Homo sapiens
caagtgatcaaaact

SEQ ID NO: 1566251 - DNA, 15 bp, Homo sapiens
tcaagtgatcaaaac

SEQ ID NO: 1566252 - DNA, 15 bp, Homo sapiens
atcaagtgatcaaaa

SEQ ID NO: 1566253 - DNA, 15 bp, Homo sapiens
tatcaagtgatcaaa

SEQ ID NO: 1566254 - DNA, 15 bp, Homo sapiens
atatcaagtgatcaa

SEQ ID NO: 1566255 - DNA, 15 bp, Homo sapiens
gatatcaagtgatca

SEQ ID NO: 1566256 - DNA, 15 bp, Homo sapiens
tgatatcaagtgatc

SEQ ID NO: 1566257 - DNA, 15 bp, Homo sapiens
ctgatatcaagtgat

SEQ ID NO: 1566258 - DNA, 15 bp, Homo sapiens
tctgatatcaagtga

SEQ ID NO: 1566259 - DNA, 15 bp, Homo sapiens
gtctgatatcaagtg

SEQ ID NO: 1566260 - DNA, 15 bp, Homo sapiens
tgtctgatatcaagt

SEQ ID NO: 1566261 - DNA, 15 bp, Homo sapiens
gtgtctgatatcaag

SEQ ID NO: 1566262 - DNA, 15 bp, Homo sapiens
tgtgtctgatatcaa

SEQ ID NO: 1566263 - DNA, 15 bp, Homo sapiens
ttgtgtctgatatca

SEQ ID NO: 1566264 - DNA, 15 bp, Homo sapiens
tttgtgtctgatatc

SEQ ID NO: 1566265 - DNA, 15 bp, Homo sapiens
ctttgtgtctgatat

SEQ ID NO: 1566266 - DNA, 15 bp, Homo sapiens
cctttgtgtctgata

SEQ ID NO: 1566267 - DNA, 15 bp, Homo sapiens
gcctttgtgtctgat

SEQ ID NO: 1566268 - DNA, 15 bp, Homo sapiens
agcctttgtgtctga

SEQ ID NO: 1566269 - DNA, 15 bp, Homo sapiens
gagcctttgtgtctg

SEQ ID NO: 1566270 - DNA, 15 bp, Homo sapiens
ggagcctttgtgtct

SEQ ID NO: 1566271 - DNA, 15 bp, Homo sapiens
aggagcctttgtgtc

SEQ ID NO: 1566272 - DNA, 15 bp, Homo sapiens
taggagcctttgtgt

SEQ ID NO: 1566273 - DNA, 15 bp, Homo sapiens
ttaggagcctttgtg

SEQ ID NO: 1566274 - DNA, 15 bp, Homo sapiens
tttaggagcctttgt

SEQ ID NO: 1566275 - DNA, 15 bp, Homo sapiens
ttttaggagcctttg

SEQ ID NO: 1566276 - DNA, 15 bp, Homo sapiens
cttttaggagccttt

SEQ ID NO: 1566277 - DNA, 15 bp, Homo sapiens
ccttttaggagcctt

SEQ ID NO: 1566278 - DNA, 15 bp, Homo sapiens
gccttttaggagcct

SEQ ID NO: 1566279 - DNA, 15 bp, Homo sapiens
tgccttttaggagcc

SEQ ID NO: 1566280 - DNA, 15 bp, Homo sapiens
ttgccttttaggagc

SEQ ID NO: 1566281 - DNA, 15 bp, Homo sapiens
cttgccttttaggag

SEQ ID NO: 1566282 - DNA, 15 bp, Homo sapiens
tcttgccttttagga

SEQ ID NO: 1566283 - DNA, 15 bp, Homo sapiens
ttcttgccttttagg

SEQ ID NO: 1566284 - DNA, 15 bp, Homo sapiens
tttcttgccttttag

SEQ ID NO: 1566285 - DNA, 15 bp, Homo sapiens
atttcttgcctttta

SEQ ID NO: 1566286 - DNA, 15 bp, Homo sapiens
catttcttgcctttt

SEQ ID NO: 1566287 - DNA, 15 bp, Homo sapiens
ccatttcttgccttt

SEQ ID NO: 1566288 - DNA, 15 bp, Homo sapiens
tccatttcttgcctt

SEQ ID NO: 1566289 - DNA, 15 bp, Homo sapiens
ttccatttcttgcct

SEQ ID NO: 1566290 - DNA, 15 bp, Homo sapiens
attccatttcttgcc

SEQ ID NO: 1566291 - DNA, 15 bp, Homo sapiens
gattccatttcttgc

SEQ ID NO: 1566292 - DNA, 15 bp, Homo sapiens
tgattccatttcttg

SEQ ID NO: 1566293 - DNA, 15 bp, Homo sapiens
ctgattccatttctt

SEQ ID NO: 1566294 - DNA, 15 bp, Homo sapiens
cctgattccatttct

SEQ ID NO: 1566295 - DNA, 15 bp, Homo sapiens
ccctgattccatttc

SEQ ID NO: 1566296 - DNA, 15 bp, Homo sapiens
tccctgattccattt

SEQ ID NO: 1566297 - DNA, 15 bp, Homo sapiens
atccctgattccatt

SEQ ID NO: 1566298 - DNA, 15 bp, Homo sapiens
gatccctgattccat

SEQ ID NO: 1566299 - DNA, 15 bp, Homo sapiens
tgatccctgattcca

SEQ ID NO: 1566300 - DNA, 15 bp, Homo sapiens
gtgatccctgattcc

SEQ ID NO: 1566301 - DNA, 15 bp, Homo sapiens
tgtgatccctgattc

SEQ ID NO: 1566302 - DNA, 15 bp, Homo sapiens
ttgtgatccctgatt

SEQ ID NO: 1566303 - DNA, 15 bp, Homo sapiens
gttgtgatccctgat

SEQ ID NO: 1566304 - DNA, 15 bp, Homo sapiens
tgttgtgatccctga

SEQ ID NO: 1566305 - DNA, 15 bp, Homo sapiens
gtgttgtgatccctg

SEQ ID NO: 1566306 - DNA, 15 bp, Homo sapiens
ggtgttgtgatccct

SEQ ID NO: 1566307 - DNA, 15 bp, Homo sapiens
gggtgttgtgatccc

SEQ ID NO: 1566308 - DNA, 15 bp, Homo sapiens
ggggtgttgtgatcc

SEQ ID NO: 1566309 - DNA, 15 bp, Homo sapiens
gggggtgttgtgatc

SEQ ID NO: 1566310 - DNA, 15 bp, Homo sapiens
ggggggtgttgtgat

SEQ ID NO: 1566311 - DNA, 15 bp, Homo sapiens
tggggggtgttgtga

SEQ ID NO: 1566312 - DNA, 15 bp, Homo sapiens
ttggggggtgttgtg

SEQ ID NO: 1566313 - DNA, 15 bp, Homo sapiens
tttggggggtgttgt

SEQ ID NO: 1566314 - DNA, 15 bp, Homo sapiens
ttttggggggtgttg

SEQ ID NO: 1566315 - DNA, 15 bp, Homo sapiens
attttggggggtgtt

SEQ ID NO: 1566316 - DNA, 15 bp, Homo sapiens
cattttggggggtgt

SEQ ID NO: 1566317 - DNA, 15 bp, Homo sapiens
tcattttggggggtg

SEQ ID NO: 1566318 - DNA, 15 bp, Homo sapiens
ctcattttggggggt

SEQ ID NO: 1566319 - DNA, 15 bp, Homo sapiens
cctcattttgggggg

SEQ ID NO: 1566320 - DNA, 15 bp, Homo sapiens
tcctcattttggggg

SEQ ID NO: 1566321 - DNA, 15 bp, Homo sapiens
ctcctcattttgggg

SEQ ID NO: 1566322 - DNA, 15 bp, Homo sapiens
tctcctcattttggg

SEQ ID NO: 1566323 - DNA, 15 bp, Homo sapiens
ctctcctcattttgg

SEQ ID NO: 1566324 - DNA, 15 bp, Homo sapiens
actctcctcattttg

SEQ ID NO: 1566325 - DNA, 15 bp, Homo sapiens
tactctcctcatttt

SEQ ID NO: 1566326 - DNA, 15 bp, Homo sapiens
ctactctcctcattt

SEQ ID NO: 1566327 - DNA, 15 bp, Homo sapiens
gctactctcctcatt

SEQ ID NO: 1566328 - DNA, 15 bp, Homo sapiens
tgctactctcctcat

SEQ ID NO: 1566329 - DNA, 15 bp, Homo sapiens
ctgctactctcctca

SEQ ID NO: 1566330 - DNA, 15 bp, Homo sapiens
tctgctactctcctc

SEQ ID NO: 1566331 - DNA, 15 bp, Homo sapiens
ttctgctactctcct

SEQ ID NO: 1566332 - DNA, 15 bp, Homo sapiens
tttctgctactctcc

SEQ ID NO: 1566333 - DNA, 15 bp, Homo sapiens
gtttctgctactctc

SEQ ID NO: 1566334 - DNA, 15 bp, Homo sapiens
agtttctgctactct

SEQ ID NO: 1566335 - DNA, 15 bp, Homo sapiens
cagtttctgctactc

SEQ ID NO: 1566336 - DNA, 15 bp, Homo sapiens
tcagtttctgctact

SEQ ID NO: 1566337 - DNA, 15 bp, Homo sapiens
atcagtttctgctac

SEQ ID NO: 1566338 - DNA, 15 bp, Homo sapiens
aatcagtttctgcta

SEQ ID NO: 1566339 - DNA, 15 bp, Homo sapiens
taatcagtttctgct

SEQ ID NO: 1566340 - DNA, 15 bp, Homo sapiens
ataatcagtttctgc

SEQ ID NO: 1566341 - DNA, 15 bp, Homo sapiens
cataatcagtttctg

SEQ ID NO: 1566342 - DNA, 15 bp, Homo sapiens
tcataatcagtttct

SEQ ID NO: 1566343 - DNA, 15 bp, Homo sapiens
ttcataatcagtttc

SEQ ID NO: 1566344 - DNA, 15 bp, Homo sapiens
tttcataatcagttt

SEQ ID NO: 1566345 - DNA, 15 bp, Homo sapiens
atttcataatcagtt

SEQ ID NO: 1566346 - DNA, 15 bp, Homo sapiens
catttcataatcagt

SEQ ID NO: 1566347 - DNA, 15 bp, Homo sapiens
ccatttcataatcag

SEQ ID NO: 1566348 - DNA, 15 bp, Homo sapiens
cccatttcataatca

SEQ ID NO: 1566349 - DNA, 15 bp, Homo sapiens
acccatttcataatc

SEQ ID NO: 1566350 - DNA, 15 bp, Homo sapiens
cacccatttcataat

SEQ ID NO: 1566351 - DNA, 15 bp, Homo sapiens
tcacccatttcataa

SEQ ID NO: 1566352 - DNA, 15 bp, Homo sapiens
ctcacccatttcata

SEQ ID NO: 1566353 - DNA, 15 bp, Homo sapiens
tctcacccatttcat

SEQ ID NO: 1566354 - DNA, 15 bp, Homo sapiens
ttctcacccatttca

SEQ ID NO: 1566355 - DNA, 15 bp, Homo sapiens
tttctcacccatttc

SEQ ID NO: 1566356 - DNA, 15 bp, Homo sapiens
gtttctcacccattt

SEQ ID NO: 1566357 - DNA, 15 bp, Homo sapiens
tgtttctcacccatt

SEQ ID NO: 1566358 - DNA, 15 bp, Homo sapiens
ttgtttctcacccat

SEQ ID NO: 1566359 - DNA, 15 bp, Homo sapiens
tttgtttctcaccca

SEQ ID NO: 1566360 - DNA, 15 bp, Homo sapiens
ctttgtttctcaccc

SEQ ID NO: 1566361 - DNA, 15 bp, Homo sapiens
actttgtttctcacc

SEQ ID NO: 1566362 - DNA, 15 bp, Homo sapiens
tactttgtttctcac

SEQ ID NO: 1566363 - DNA, 15 bp, Homo sapiens
atactttgtttctca

SEQ ID NO: 1566364 - DNA, 15 bp, Homo sapiens
aatactttgtttctc

SEQ ID NO: 1566365 - DNA, 15 bp, Homo sapiens
caatactttgtttct

SEQ ID NO: 1566366 - DNA, 15 bp, Homo sapiens
tcaatactttgtttc

SEQ ID NO: 1566367 - DNA, 15 bp, Homo sapiens
atcaatactttgttt

SEQ ID NO: 1566368 - DNA, 15 bp, Homo sapiens
gatcaatactttgtt

SEQ ID NO: 1566369 - DNA, 15 bp, Homo sapiens
agatcaatactttgt

SEQ ID NO: 1566370 - DNA, 15 bp, Homo sapiens
tagatcaatactttg

SEQ ID NO: 1566371 - DNA, 15 bp, Homo sapiens
ctagatcaatacttt

SEQ ID NO: 1566372 - DNA, 15 bp, Homo sapiens
tctagatcaatactt

SEQ ID NO: 1566373 - DNA, 15 bp, Homo sapiens
atctagatcaatact

SEQ ID NO: 1566374 - DNA, 15 bp, Homo sapiens
gatctagatcaatac

SEQ ID NO: 1566375 - DNA, 15 bp, Homo sapiens
tgatctagatcaata

SEQ ID NO: 1566376 - DNA, 15 bp, Homo sapiens
atgatctagatcaat

SEQ ID NO: 1566377 - DNA, 15 bp, Homo sapiens
aatgatctagatcaa

SEQ ID NO: 1566378 - DNA, 15 bp, Homo sapiens
caatgatctagatca

SEQ ID NO: 1566379 - DNA, 15 bp, Homo sapiens
tcaatgatctagatc

SEQ ID NO: 1566380 - DNA, 15 bp, Homo sapiens
ttcaatgatctagat

SEQ ID NO: 1566381 - DNA, 15 bp, Homo sapiens
tttcaatgatctaga

SEQ ID NO: 1566382 - DNA, 15 bp, Homo sapiens
ttttcaatgatctag

SEQ ID NO: 1566383 - DNA, 15 bp, Homo sapiens
attttcaatgatcta

SEQ ID NO: 1566384 - DNA, 15 bp, Homo sapiens
tattttcaatgatct

SEQ ID NO: 1566385 - DNA, 15 bp, Homo sapiens
ttattttcaatgatc

SEQ ID NO: 1566386 - DNA, 15 bp, Homo sapiens
cttattttcaatgat

SEQ ID NO: 1566387 - DNA, 15 bp, Homo sapiens
ccttattttcaatga

SEQ ID NO: 1566388 - DNA, 15 bp, Homo sapiens
accttattttcaatg

SEQ ID NO: 1566389 - DNA, 15 bp, Homo sapiens
caccttattttcaat

SEQ ID NO: 1566390 - DNA, 15 bp, Homo sapiens
ccaccttattttcaa

SEQ ID NO: 1566391 - DNA, 15 bp, Homo sapiens
cccaccttattttca

SEQ ID NO: 1566392 - DNA, 15 bp, Homo sapiens
tcccaccttattttc

SEQ ID NO: 1566393 - DNA, 15 bp, Homo sapiens
ctcccaccttatttt

SEQ ID NO: 1566394 - DNA, 15 bp, Homo sapiens
tctcccaccttattt

SEQ ID NO: 1566395 - DNA, 15 bp, Homo sapiens
ctctcccaccttatt

SEQ ID NO: 1566396 - DNA, 15 bp, Homo sapiens
actctcccaccttat

SEQ ID NO: 1566397 - DNA, 15 bp, Homo sapiens
tactctcccacctta

SEQ ID NO: 1566398 - DNA, 15 bp, Homo sapiens
gtactctcccacctt

SEQ ID NO: 1566399 - DNA, 15 bp, Homo sapiens
tgtactctcccacct

SEQ ID NO: 1566400 - DNA, 15 bp, Homo sapiens
atgtactctcccacc

SEQ ID NO: 1566401 - DNA, 15 bp, Homo sapiens
catgtactctcccac

SEQ ID NO: 1566402 - DNA, 15 bp, Homo sapiens
tcatgtactctccca

SEQ ID NO: 1566403 - DNA, 15 bp, Homo sapiens
ttcatgtactctccc

SEQ ID NO: 1566404 - DNA, 15 bp, Homo sapiens
tttcatgtactctcc

SEQ ID NO: 1566405 - DNA, 15 bp, Homo sapiens
ctttcatgtactctc

SEQ ID NO: 1566406 - DNA, 15 bp, Homo sapiens
actttcatgtactct

SEQ ID NO: 1566407 - DNA, 15 bp, Homo sapiens
gactttcatgtactc

SEQ ID NO: 1566408 - DNA, 15 bp, Homo sapiens
tgactttcatgtact

SEQ ID NO: 1566409 - DNA, 15 bp, Homo sapiens
atgactttcatgtac

SEQ ID NO: 1566410 - DNA, 15 bp, Homo sapiens
catgactttcatgta

SEQ ID NO: 1566411 - DNA, 15 bp, Homo sapiens
acatgactttcatgt

SEQ ID NO: 1566412 - DNA, 15 bp, Homo sapiens
aacatgactttcatg

SEQ ID NO: 1566413 - DNA, 15 bp, Homo sapiens
aaacatgactttcat

SEQ ID NO: 1566414 - DNA, 15 bp, Homo sapiens
taaacatgactttca

SEQ ID NO: 1566415 - DNA, 15 bp, Homo sapiens
ataaacatgactttc

SEQ ID NO: 1566416 - DNA, 15 bp, Homo sapiens
aataaacatgacttt

SEQ ID NO: 1566417 - DNA, 15 bp, Homo sapiens
aaataaacatgactt

SEQ ID NO: 1566418 - DNA, 15 bp, Homo sapiens
aaaataaacatgact

SEQ ID NO: 1566419 - DNA, 15 bp, Homo sapiens
gaaaataaacatgac

SEQ ID NO: 1566420 - DNA, 15 bp, Homo sapiens
ggaaaataaacatga

SEQ ID NO: 1566421 - DNA, 15 bp, Homo sapiens
tggaaaataaacatg

SEQ ID NO: 1566422 - DNA, 15 bp, Homo sapiens
ctggaaaataaacat

SEQ ID NO: 1566423 - DNA, 15 bp, Homo sapiens
gctggaaaataaaca

SEQ ID NO: 1566424 - DNA, 15 bp, Homo sapiens
ggctggaaaataaac

SEQ ID NO: 1566425 - DNA, 15 bp, Homo sapiens
tggctggaaaataaa

SEQ ID NO: 1566426 - DNA, 15 bp, Homo sapiens
atggctggaaaataa

SEQ ID NO: 1566427 - DNA, 15 bp, Homo sapiens
aatggctggaaaata

SEQ ID NO: 1566428 - DNA, 15 bp, Homo sapiens
aaatggctggaaaat

SEQ ID NO: 1566429 - DNA, 15 bp, Homo sapiens
gaaatggctggaaaa

SEQ ID NO: 1566430 - DNA, 15 bp, Homo sapiens
agaaatggctggaaa

SEQ ID NO: 1566431 - DNA, 15 bp, Homo sapiens
aagaaatggctggaa

SEQ ID NO: 1566432 - DNA, 15 bp, Homo sapiens
taagaaatggctgga

SEQ ID NO: 1566433 - DNA, 15 bp, Homo sapiens
ctaagaaatggctgg

SEQ ID NO: 1566434 - DNA, 15 bp, Homo sapiens
tctaagaaatggctg

SEQ ID NO: 1566435 - DNA, 15 bp, Homo sapiens
ttctaagaaatggct

SEQ ID NO: 1566436 - DNA, 15 bp, Homo sapiens
attctaagaaatggc

SEQ ID NO: 1566437 - DNA, 15 bp, Homo sapiens
gattctaagaaatgg

SEQ ID NO: 1566438 - DNA, 15 bp, Homo sapiens
agattctaagaaatg

SEQ ID NO: 1566439 - DNA, 15 bp, Homo sapiens
aagattctaagaaat

SEQ ID NO: 1566440 - DNA, 15 bp, Homo sapiens
aaagattctaagaaa

SEQ ID NO: 1566441 - DNA, 15 bp, Homo sapiens
taaagattctaagaa

SEQ ID NO: 1566442 - DNA, 15 bp, Homo sapiens
ctaaagattctaaga

SEQ ID NO: 1566443 - DNA, 15 bp, Homo sapiens
tctaaagattctaag

SEQ ID NO: 1566444 - DNA, 15 bp, Homo sapiens
ctctaaagattctaa

SEQ ID NO: 1566445 - DNA, 15 bp, Homo sapiens
actctaaagattcta

SEQ ID NO: 1566446 - DNA, 15 bp, Homo sapiens
cactctaaagattct

SEQ ID NO: 1566447 - DNA, 15 bp, Homo sapiens
tcactctaaagattc

SEQ ID NO: 1566448 - DNA, 15 bp, Homo sapiens
ttcactctaaagatt

SEQ ID NO: 1566449 - DNA, 15 bp, Homo sapiens
tttcactctaaagat

SEQ ID NO: 1566450 - DNA, 15 bp, Homo sapiens
atttcactctaaaga

SEQ ID NO: 1566451 - DNA, 15 bp, Homo sapiens
tatttcactctaaag

SEQ ID NO: 1566452 - DNA, 15 bp, Homo sapiens
atatttcactctaaa

SEQ ID NO: 1566453 - DNA, 15 bp, Homo sapiens
tatatttcactctaa

SEQ ID NO: 1566454 - DNA, 15 bp, Homo sapiens
ctatatttcactcta

SEQ ID NO: 1566455 - DNA, 15 bp, Homo sapiens
tctatatttcactct

SEQ ID NO: 1566456 - DNA, 15 bp, Homo sapiens
ttctatatttcactc

SEQ ID NO: 1566457 - DNA, 15 bp, Homo sapiens
tttctatatttcact

SEQ ID NO: 1566458 - DNA, 15 bp, Homo sapiens
gtttctatatttcac

SEQ ID NO: 1566459 - DNA, 15 bp, Homo sapiens
cgtttctatatttca

SEQ ID NO: 1566460 - DNA, 15 bp, Homo sapiens
acgtttctatatttc

SEQ ID NO: 1566461 - DNA, 15 bp, Homo sapiens
aacgtttctatattt

SEQ ID NO: 1566462 - DNA, 15 bp, Homo sapiens
aaacgtttctatatt

SEQ ID NO: 1566463 - DNA, 15 bp, Homo sapiens
caaacgtttctatat

SEQ ID NO: 1566464 - DNA, 15 bp, Homo sapiens
gcaaacgtttctata

SEQ ID NO: 1566465 - DNA, 15 bp, Homo sapiens
ggcaaacgtttctat

SEQ ID NO: 1566466 - DNA, 15 bp, Homo sapiens
tggcaaacgtttcta

SEQ ID NO: 1566467 - DNA, 15 bp, Homo sapiens
atggcaaacgtttct

SEQ ID NO: 1566468 - DNA, 15 bp, Homo sapiens
aatggcaaacgtttc

SEQ ID NO: 1566469 - DNA, 15 bp, Homo sapiens
aaatggcaaacgttt

SEQ ID NO: 1566470 - DNA, 15 bp, Homo sapiens
gaaatggcaaacgtt

SEQ ID NO: 1566471 - DNA, 15 bp, Homo sapiens
agaaatggcaaacgt

SEQ ID NO: 1566472 - DNA, 15 bp, Homo sapiens
gagaaatggcaaacg

SEQ ID NO: 1566473 - DNA, 15 bp, Homo sapiens
tgagaaatggcaaac

SEQ ID NO: 1566474 - DNA, 15 bp, Homo sapiens
ttgagaaatggcaaa

SEQ ID NO: 1566475 - DNA, 15 bp, Homo sapiens
tttgagaaatggcaa

SEQ ID NO: 1566476 - DNA, 15 bp, Homo sapiens
ttttgagaaatggca

SEQ ID NO: 1566477 - DNA, 15 bp, Homo sapiens
cttttgagaaatggc

SEQ ID NO: 1566478 - DNA, 15 bp, Homo sapiens
tcttttgagaaatgg

SEQ ID NO: 1566479 - DNA, 15 bp, Homo sapiens
atcttttgagaaatg

SEQ ID NO: 1566480 - DNA, 15 bp, Homo sapiens
tatcttttgagaaat

SEQ ID NO: 1566481 - DNA, 15 bp, Homo sapiens
ttatcttttgagaaa

SEQ ID NO: 1566482 - DNA, 15 bp, Homo sapiens
tttatcttttgagaa

SEQ ID NO: 1566483 - DNA, 15 bp, Homo sapiens
gtttatcttttgaga

SEQ ID NO: 1566484 - DNA, 15 bp, Homo sapiens
agtttatcttttgag

SEQ ID NO: 1566485 - DNA, 15 bp, Homo sapiens
gagtttatcttttga

SEQ ID NO: 1566486 - DNA, 15 bp, Homo sapiens
agagtttatcttttg

SEQ ID NO: 1566487 - DNA, 15 bp, Homo sapiens
tagagtttatctttt

SEQ ID NO: 1566488 - DNA, 15 bp, Homo sapiens
gtagagtttatcttt

SEQ ID NO: 1566489 - DNA, 15 bp, Homo sapiens
ggtagagtttatctt

SEQ ID NO: 1566490 - DNA, 15 bp, Homo sapiens
tggtagagtttatct

SEQ ID NO: 1566491 - DNA, 15 bp, Homo sapiens
atggtagagtttatc

SEQ ID NO: 1566492 - DNA, 15 bp, Homo sapiens
aatggtagagtttat

SEQ ID NO: 1566493 - DNA, 15 bp, Homo sapiens
gaatggtagagttta

SEQ ID NO: 1566494 - DNA, 15 bp, Homo sapiens
tgaatggtagagttt

SEQ ID NO: 1566495 - DNA, 15 bp, Homo sapiens
ttgaatggtagagtt

SEQ ID NO: 1566496 - DNA, 15 bp, Homo sapiens
cttgaatggtagagt

SEQ ID NO: 1566497 - DNA, 15 bp, Homo sapiens
tcttgaatggtagag

SEQ ID NO: 1566498 - DNA, 15 bp, Homo sapiens
gtcttgaatggtaga

SEQ ID NO: 1566499 - DNA, 15 bp, Homo sapiens
tgtcttgaatggtag

SEQ ID NO: 1566500 - DNA, 15 bp, Homo sapiens
ctgtcttgaatggta

SEQ ID NO: 1566501 - DNA, 15 bp, Homo sapiens
actgtcttgaatggt

SEQ ID NO: 1566502 - DNA, 15 bp, Homo sapiens
aactgtcttgaatgg

SEQ ID NO: 1566503 - DNA, 15 bp, Homo sapiens
taactgtcttgaatg

SEQ ID NO: 1566504 - DNA, 15 bp, Homo sapiens
ataactgtcttgaat

SEQ ID NO: 1566505 - DNA, 15 bp, Homo sapiens
gataactgtcttgaa

SEQ ID NO: 1566506 - DNA, 15 bp, Homo sapiens
agataactgtcttga

SEQ ID NO: 1566507 - DNA, 15 bp, Homo sapiens
aagataactgtcttg

SEQ ID NO: 1566508 - DNA, 15 bp, Homo sapiens
caagataactgtctt

SEQ ID NO: 1566509 - DNA, 15 bp, Homo sapiens
tcaagataactgtct

SEQ ID NO: 1566510 - DNA, 15 bp, Homo sapiens
ttcaagataactgtc

SEQ ID NO: 1566511 - DNA, 15 bp, Homo sapiens
cttcaagataactgt

SEQ ID NO: 1566512 - DNA, 15 bp, Homo sapiens
gcttcaagataactg

SEQ ID NO: 1566513 - DNA, 15 bp, Homo sapiens
agcttcaagataact

SEQ ID NO: 1566514 - DNA, 15 bp, Homo sapiens
aagcttcaagataac

SEQ ID NO: 1566515 - DNA, 15 bp, Homo sapiens
caagcttcaagataa

SEQ ID NO: 1566516 - DNA, 15 bp, Homo sapiens
acaagcttcaagata

SEQ ID NO: 1566517 - DNA, 15 bp, Homo sapiens
cacaagcttcaagat

SEQ ID NO: 1566518 - DNA, 15 bp, Homo sapiens
acacaagcttcaaga

SEQ ID NO: 1566519 - DNA, 15 bp, Homo sapiens
tacacaagcttcaag

SEQ ID NO: 1566520 - DNA, 15 bp, Homo sapiens
ttacacaagcttcaa

SEQ ID NO: 1566521 - DNA, 15 bp, Homo sapiens
tttacacaagcttca

SEQ ID NO: 1566522 - DNA, 15 bp, Homo sapiens
ttttacacaagcttc

SEQ ID NO: 1566523 - DNA, 15 bp, Homo sapiens
tttttacacaagctt

SEQ ID NO: 1566524 - DNA, 15 bp, Homo sapiens
atttttacacaagct

SEQ ID NO: 1566525 - DNA, 15 bp, Homo sapiens
aatttttacacaagc

SEQ ID NO: 1566526 - DNA, 15 bp, Homo sapiens
taatttttacacaag

SEQ ID NO: 1566527 - DNA, 15 bp, Homo sapiens
ttaatttttacacaa

SEQ ID NO: 1566528 - DNA, 15 bp, Homo sapiens
attaatttttacaca

SEQ ID NO: 1566529 - DNA, 15 bp, Homo sapiens
gattaatttttacac

SEQ ID NO: 1566530 - DNA, 15 bp, Homo sapiens
tgattaatttttaca

SEQ ID NO: 1566531 - DNA, 15 bp, Homo sapiens
atgattaatttttac

SEQ ID NO: 1566532 - DNA, 15 bp, Homo sapiens
tatgattaattttta

SEQ ID NO: 1566533 - DNA, 15 bp, Homo sapiens
atatgattaattttt

SEQ ID NO: 1566534 - DNA, 15 bp, Homo sapiens
tatatgattaatttt

SEQ ID NO: 1566535 - DNA, 15 bp, Homo sapiens
atatatgattaattt

SEQ ID NO: 1566536 - DNA, 15 bp, Homo sapiens
tatatatgattaatt

SEQ ID NO: 1566537 - DNA, 15 bp, Homo sapiens
atatatatgattaat

SEQ ID NO: 1566538 - DNA, 15 bp, Homo sapiens
aatatatatgattaa

SEQ ID NO: 1566539 - DNA, 15 bp, Homo sapiens
taatatatatgatta

SEQ ID NO: 1566540 - DNA, 15 bp, Homo sapiens
ataatatatatgatt

SEQ ID NO: 1566541 - DNA, 15 bp, Homo sapiens
tataatatatatgat

SEQ ID NO: 1566542 - DNA, 15 bp, Homo sapiens
atataatatatatga

SEQ ID NO: 1566543 - DNA, 15 bp, Homo sapiens
tatataatatatatg

SEQ ID NO: 1566544 - DNA, 15 bp, Homo sapiens
gtatataatatatat

SEQ ID NO: 1566545 - DNA, 15 bp, Homo sapiens
tgtatataatatata

SEQ ID NO: 1566546 - DNA, 15 bp, Homo sapiens
ctgtatataatatat

SEQ ID NO: 1566547 - DNA, 15 bp, Homo sapiens
gctgtatataatata

SEQ ID NO: 1566548 - DNA, 15 bp, Homo sapiens
tgctgtatataatat

SEQ ID NO: 1566549 - DNA, 15 bp, Homo sapiens
atgctgtatataata

SEQ ID NO: 1566550 - DNA, 15 bp, Homo sapiens
aatgctgtatataat

SEQ ID NO: 1566551 - DNA, 15 bp, Homo sapiens
caatgctgtatataa

SEQ ID NO: 1566552 - DNA, 15 bp, Homo sapiens
acaatgctgtatata

SEQ ID NO: 1566553 - DNA, 15 bp, Homo sapiens
tacaatgctgtatat

SEQ ID NO: 1566554 - DNA, 15 bp, Homo sapiens
ttacaatgctgtata

SEQ ID NO: 1566555 - DNA, 15 bp, Homo sapiens
tttacaatgctgtat

SEQ ID NO: 1566556 - DNA, 15 bp, Homo sapiens
atttacaatgctgta

SEQ ID NO: 1566557 - DNA, 15 bp, Homo sapiens
tatttacaatgctgt

SEQ ID NO: 1566558 - DNA, 15 bp, Homo sapiens
ctatttacaatgctg

SEQ ID NO: 1566559 - DNA, 15 bp, Homo sapiens
cctatttacaatgct

SEQ ID NO: 1566560 - DNA, 15 bp, Homo sapiens
acctatttacaatgc

SEQ ID NO: 1566561 - DNA, 15 bp, Homo sapiens
tacctatttacaatg

SEQ ID NO: 1566562 - DNA, 15 bp, Homo sapiens
ctacctatttacaat

SEQ ID NO: 1566563 - DNA, 15 bp, Homo sapiens
gctacctatttacaa

SEQ ID NO: 1566564 - DNA, 15 bp, Homo sapiens
ggctacctatttaca

SEQ ID NO: 1566565 - DNA, 15 bp, Homo sapiens
tggctacctatttac

SEQ ID NO: 1566566 - DNA, 15 bp, Homo sapiens
ttggctacctattta

SEQ ID NO: 1566567 - DNA, 15 bp, Homo sapiens
tttggctacctattt

SEQ ID NO: 1566568 - DNA, 15 bp, Homo sapiens
ttttggctacctatt

SEQ ID NO: 1566569 - DNA, 15 bp, Homo sapiens
gttttggctacctat

SEQ ID NO: 1566570 - DNA, 15 bp, Homo sapiens
agttttggctaccta

SEQ ID NO: 1566571 - DNA, 15 bp, Homo sapiens
aagttttggctacct

SEQ ID NO: 1566572 - DNA, 15 bp, Homo sapiens
aaagttttggctacc

SEQ ID NO: 1566573 - DNA, 15 bp, Homo sapiens
aaaagttttggctac

SEQ ID NO: 1566574 - DNA, 15 bp, Homo sapiens
caaaagttttggcta

SEQ ID NO: 1566575 - DNA, 15 bp, Homo sapiens
acaaaagttttggct

SEQ ID NO: 1566576 - DNA, 15 bp, Homo sapiens
cacaaaagttttggc

SEQ ID NO: 1566577 - DNA, 15 bp, Homo sapiens
acacaaaagttttgg

SEQ ID NO: 1566578 - DNA, 15 bp, Homo sapiens
tacacaaaagttttg

SEQ ID NO: 1566579 - DNA, 15 bp, Homo sapiens
ctacacaaaagtttt

SEQ ID NO: 1566580 - DNA, 15 bp, Homo sapiens
cctacacaaaagttt

SEQ ID NO: 1566581 - DNA, 15 bp, Homo sapiens
gcctacacaaaagtt

SEQ ID NO: 1566582 - DNA, 15 bp, Homo sapiens
cgcctacacaaaagt

SEQ ID NO: 1566583 - DNA, 15 bp, Homo sapiens
tcgcctacacaaaag

SEQ ID NO: 1566584 - DNA, 15 bp, Homo sapiens
ttcgcctacacaaaa

SEQ ID NO: 1566585 - DNA, 15 bp, Homo sapiens
attcgcctacacaaa

SEQ ID NO: 1566586 - DNA, 15 bp, Homo sapiens
tattcgcctacacaa

SEQ ID NO: 1566587 - DNA, 15 bp, Homo sapiens
ctattcgcctacaca

SEQ ID NO: 1566588 - DNA, 15 bp, Homo sapiens
actattcgcctacac

SEQ ID NO: 1566589 - DNA, 15 bp, Homo sapiens
tactattcgcctaca

SEQ ID NO: 1566590 - DNA, 15 bp, Homo sapiens
ttactattcgcctac

SEQ ID NO: 1566591 - DNA, 15 bp, Homo sapiens
attactattcgccta

SEQ ID NO: 1566592 - DNA, 15 bp, Homo sapiens
aattactattcgcct

SEQ ID NO: 1566593 - DNA, 15 bp, Homo sapiens
gaattactattcgcc

SEQ ID NO: 1566594 - DNA, 15 bp, Homo sapiens
agaattactattcgc

SEQ ID NO: 1566595 - DNA, 15 bp, Homo sapiens
gagaattactattcg

SEQ ID NO: 1566596 - DNA, 15 bp, Homo sapiens
agagaattactattc

SEQ ID NO: 1566597 - DNA, 15 bp, Homo sapiens
tagagaattactatt

SEQ ID NO: 1566598 - DNA, 15 bp, Homo sapiens
atagagaattactat

SEQ ID NO: 1566599 - DNA, 15 bp, Homo sapiens
catagagaattacta

SEQ ID NO: 1566600 - DNA, 15 bp, Homo sapiens
tcatagagaattact

SEQ ID NO: 1566601 - DNA, 15 bp, Homo sapiens
atcatagagaattac

SEQ ID NO: 1566602 - DNA, 15 bp, Homo sapiens
catcatagagaatta

SEQ ID NO: 1566603 - DNA, 15 bp, Homo sapiens
acatcatagagaatt

SEQ ID NO: 1566604 - DNA, 15 bp, Homo sapiens
aacatcatagagaat

SEQ ID NO: 1566605 - DNA, 15 bp, Homo sapiens
aaacatcatagagaa

SEQ ID NO: 1566606 - DNA, 15 bp, Homo sapiens
taaacatcatagaga

SEQ ID NO: 1566607 - DNA, 15 bp, Homo sapiens
ataaacatcatagag

SEQ ID NO: 1566608 - DNA, 15 bp, Homo sapiens
cataaacatcataga

SEQ ID NO: 1566609 - DNA, 15 bp, Homo sapiens
acataaacatcatag

SEQ ID NO: 1566610 - DNA, 15 bp, Homo sapiens
aacataaacatcata

SEQ ID NO: 1566611 - DNA, 15 bp, Homo sapiens
taacataaacatcat

SEQ ID NO: 1566612 - DNA, 15 bp, Homo sapiens
ctaacataaacatca

SEQ ID NO: 1566613 - DNA, 15 bp, Homo sapiens
actaacataaacatc

SEQ ID NO: 1566614 - DNA, 15 bp, Homo sapiens
tactaacataaacat

SEQ ID NO: 1566615 - DNA, 15 bp, Homo sapiens
atactaacataaaca

SEQ ID NO: 1566616 - DNA, 15 bp, Homo sapiens
aatactaacataaac

SEQ ID NO: 1566617 - DNA, 15 bp, Homo sapiens
aaatactaacataaa

SEQ ID NO: 1566618 - DNA, 15 bp, Homo sapiens
aaaatactaacataa

SEQ ID NO: 1566619 - DNA, 15 bp, Homo sapiens
taaaatactaacata

SEQ ID NO: 1566620 - DNA, 15 bp, Homo sapiens
ttaaaatactaacat

SEQ ID NO: 1566621 - DNA, 15 bp, Homo sapiens
cttaaaatactaaca

SEQ ID NO: 1566622 - DNA, 15 bp, Homo sapiens
acttaaaatactaac

SEQ ID NO: 1566623 - DNA, 15 bp, Homo sapiens
tacttaaaatactaa

SEQ ID NO: 1566624 - DNA, 15 bp, Homo sapiens
atacttaaaatacta

SEQ ID NO: 1566625 - DNA, 15 bp, Homo sapiens
gatacttaaaatact

SEQ ID NO: 1566626 - DNA, 15 bp, Homo sapiens
agatacttaaaatac

SEQ ID NO: 1566627 - DNA, 15 bp, Homo sapiens
tagatacttaaaata

SEQ ID NO: 1566628 - DNA, 15 bp, Homo sapiens
gtagatacttaaaat

SEQ ID NO: 1566629 - DNA, 15 bp, Homo sapiens
agtagatacttaaaa

SEQ ID NO: 1566630 - DNA, 15 bp, Homo sapiens
tagtagatacttaaa

SEQ ID NO: 1566631 - DNA, 15 bp, Homo sapiens
ttagtagatacttaa

SEQ ID NO: 1566632 - DNA, 15 bp, Homo sapiens
tttagtagatactta

SEQ ID NO: 1566633 - DNA, 15 bp, Homo sapiens
ctttagtagatactt

SEQ ID NO: 1566634 - DNA, 15 bp, Homo sapiens
tctttagtagatact

SEQ ID NO: 1566635 - DNA, 15 bp, Homo sapiens
ttctttagtagatac

SEQ ID NO: 1566636 - DNA, 15 bp, Homo sapiens
tttctttagtagata

SEQ ID NO: 1566637 - DNA, 15 bp, Homo sapiens
ctttctttagtagat

SEQ ID NO: 1566638 - DNA, 15 bp, Homo sapiens
gctttctttagtaga

SEQ ID NO: 1566639 - DNA, 15 bp, Homo sapiens
agctttctttagtag

SEQ ID NO: 1566640 - DNA, 15 bp, Homo sapiens
cagctttctttagta

SEQ ID NO: 1566641 - DNA, 15 bp, Homo sapiens
acagctttctttagt

SEQ ID NO: 1566642 - DNA, 15 bp, Homo sapiens
aacagctttctttag

SEQ ID NO: 1566643 - DNA, 15 bp, Homo sapiens
caacagctttcttta

SEQ ID NO: 1566644 - DNA, 15 bp, Homo sapiens
tcaacagctttcttt

SEQ ID NO: 1566645 - DNA, 15 bp, Homo sapiens
ttcaacagctttctt

SEQ ID NO: 1566646 - DNA, 15 bp, Homo sapiens
attcaacagctttct

SEQ ID NO: 1566647 - DNA, 15 bp, Homo sapiens
aattcaacagctttc

SEQ ID NO: 1566648 - DNA, 15 bp, Homo sapiens
aaattcaacagcttt

SEQ ID NO: 1566649 - DNA, 15 bp, Homo sapiens
aaaattcaacagctt

SEQ ID NO: 1566650 - DNA, 15 bp, Homo sapiens
taaaattcaacagct

SEQ ID NO: 1566651 - DNA, 15 bp, Homo sapiens
ctaaaattcaacagc

SEQ ID NO: 1566652 - DNA, 15 bp, Homo sapiens
tctaaaattcaacag

SEQ ID NO: 1566653 - DNA, 15 bp, Homo sapiens
ttctaaaattcaaca

SEQ ID NO: 1566654 - DNA, 15 bp, Homo sapiens
cttctaaaattcaac

SEQ ID NO: 1566655 - DNA, 15 bp, Homo sapiens
acttctaaaattcaa

SEQ ID NO: 1566656 - DNA, 15 bp, Homo sapiens
tacttctaaaattca

SEQ ID NO: 1566657 - DNA, 15 bp, Homo sapiens
ttacttctaaaattc

SEQ ID NO: 1566658 - DNA, 15 bp, Homo sapiens
gttacttctaaaatt

SEQ ID NO: 1566659 - DNA, 15 bp, Homo sapiens
tgttacttctaaaat

SEQ ID NO: 1566660 - DNA, 15 bp, Homo sapiens
atgttacttctaaaa

SEQ ID NO: 1566661 - DNA, 15 bp, Homo sapiens
aatgttacttctaaa

SEQ ID NO: 1566662 - DNA, 15 bp, Homo sapiens
caatgttacttctaa

SEQ ID NO: 1566663 - DNA, 15 bp, Homo sapiens
tcaatgttacttcta

SEQ ID NO: 1566664 - DNA, 15 bp, Homo sapiens
ttcaatgttacttct

SEQ ID NO: 1566665 - DNA, 15 bp, Homo sapiens
tttcaatgttacttc

SEQ ID NO: 1566666 - DNA, 15 bp, Homo sapiens
atttcaatgttactt

SEQ ID NO: 1566667 - DNA, 15 bp, Homo sapiens
tatttcaatgttact

SEQ ID NO: 1566668 - DNA, 15 bp, Homo sapiens
ctatttcaatgttac

SEQ ID NO: 1566669 - DNA, 15 bp, Homo sapiens
actatttcaatgtta

SEQ ID NO: 1566670 - DNA, 15 bp, Homo sapiens
aactatttcaatgtt

SEQ ID NO: 1566671 - DNA, 15 bp, Homo sapiens
taactatttcaatgt

SEQ ID NO: 1566672 - DNA, 15 bp, Homo sapiens
ctaactatttcaatg

SEQ ID NO: 1566673 - DNA, 15 bp, Homo sapiens
cctaactatttcaat

SEQ ID NO: 1566674 - DNA, 15 bp, Homo sapiens
acctaactatttcaa

SEQ ID NO: 1566675 - DNA, 15 bp, Homo sapiens
cacctaactatttca

SEQ ID NO: 1566676 - DNA, 15 bp, Homo sapiens
tcacctaactatttc

SEQ ID NO: 1566677 - DNA, 15 bp, Homo sapiens
ttcacctaactattt

SEQ ID NO: 1566678 - DNA, 15 bp, Homo sapiens
cttcacctaactatt

SEQ ID NO: 1566679 - DNA, 15 bp, Homo sapiens
acttcacctaactat

SEQ ID NO: 1566680 - DNA, 15 bp, Homo sapiens
cacttcacctaacta

SEQ ID NO: 1566681 - DNA, 15 bp, Homo sapiens
tcacttcacctaact

SEQ ID NO: 1566682 - DNA, 15 bp, Homo sapiens
atcacttcacctaac

SEQ ID NO: 1566683 - DNA, 15 bp, Homo sapiens
aatcacttcacctaa

SEQ ID NO: 1566684 - DNA, 15 bp, Homo sapiens
taatcacttcaccta

SEQ ID NO: 1566685 - DNA, 15 bp, Homo sapiens
ataatcacttcacct

SEQ ID NO: 1566686 - DNA, 15 bp, Homo sapiens
gataatcacttcacc

SEQ ID NO: 1566687 - DNA, 15 bp, Homo sapiens
ggataatcacttcac

SEQ ID NO: 1566688 - DNA, 15 bp, Homo sapiens
tggataatcacttca

SEQ ID NO: 1566689 - DNA, 15 bp, Homo sapiens
ctggataatcacttc

SEQ ID NO: 1566690 - DNA, 15 bp, Homo sapiens
cctggataatcactt

SEQ ID NO: 1566691 - DNA, 15 bp, Homo sapiens
acctggataatcact

SEQ ID NO: 1566692 - DNA, 15 bp, Homo sapiens
cacctggataatcac

SEQ ID NO: 1566693 - DNA, 15 bp, Homo sapiens
acacctggataatca

SEQ ID NO: 1566694 - DNA, 15 bp, Homo sapiens
aacacctggataatc

SEQ ID NO: 1566695 - DNA, 15 bp, Homo sapiens
aaacacctggataat

SEQ ID NO: 1566696 - DNA, 15 bp, Homo sapiens
caaacacctggataa

SEQ ID NO: 1566697 - DNA, 15 bp, Homo sapiens
tcaaacacctggata

SEQ ID NO: 1566698 - DNA, 15 bp, Homo sapiens
atcaaacacctggat

SEQ ID NO: 1566699 - DNA, 15 bp, Homo sapiens
gatcaaacacctgga

SEQ ID NO: 1566700 - DNA, 15 bp, Homo sapiens
tgatcaaacacctgg

SEQ ID NO: 1566701 - DNA, 15 bp, Homo sapiens
gtgatcaaacacctg

SEQ ID NO: 1566702 - DNA, 15 bp, Homo sapiens
cgtgatcaaacacct

SEQ ID NO: 1566703 - DNA, 15 bp, Homo sapiens
acgtgatcaaacacc

SEQ ID NO: 1566704 - DNA, 15 bp, Homo sapiens
aacgtgatcaaacac

SEQ ID NO: 1566705 - DNA, 15 bp, Homo sapiens
taacgtgatcaaaca

SEQ ID NO: 1566706 - DNA, 15 bp, Homo sapiens
ttaacgtgatcaaac

SEQ ID NO: 1566707 - DNA, 15 bp, Homo sapiens
attaacgtgatcaaa

SEQ ID NO: 1566708 - DNA, 15 bp, Homo sapiens
aattaacgtgatcaa

SEQ ID NO: 1566709 - DNA, 15 bp, Homo sapiens
gaattaacgtgatca

SEQ ID NO: 1566710 - DNA, 15 bp, Homo sapiens
ggaattaacgtgatc

SEQ ID NO: 1566711 - DNA, 15 bp, Homo sapiens
gggaattaacgtgat

SEQ ID NO: 1566712 - DNA, 15 bp, Homo sapiens
agggaattaacgtga

SEQ ID NO: 1566713 - DNA, 15 bp, Homo sapiens
tagggaattaacgtg

SEQ ID NO: 1566714 - DNA, 15 bp, Homo sapiens
atagggaattaacgt

SEQ ID NO: 1566715 - DNA, 15 bp, Homo sapiens
gatagggaattaacg

SEQ ID NO: 1566716 - DNA, 15 bp, Homo sapiens
agatagggaattaac

SEQ ID NO: 1566717 - DNA, 15 bp, Homo sapiens
aagatagggaattaa

SEQ ID NO: 1566718 - DNA, 15 bp, Homo sapiens
caagatagggaatta

SEQ ID NO: 1566719 - DNA, 15 bp, Homo sapiens
gcaagatagggaatt

SEQ ID NO: 1566720 - DNA, 15 bp, Homo sapiens
agcaagatagggaat

SEQ ID NO: 1566721 - DNA, 15 bp, Homo sapiens
cagcaagatagggaa

SEQ ID NO: 1566722 - DNA, 15 bp, Homo sapiens
gcagcaagataggga

SEQ ID NO: 1566723 - DNA, 15 bp, Homo sapiens
tgcagcaagataggg

SEQ ID NO: 1566724 - DNA, 15 bp, Homo sapiens
ctgcagcaagatagg

SEQ ID NO: 1566725 - DNA, 15 bp, Homo sapiens
tctgcagcaagatag

SEQ ID NO: 1566726 - DNA, 15 bp, Homo sapiens
ttctgcagcaagata

SEQ ID NO: 1566727 - DNA, 15 bp, Homo sapiens
tttctgcagcaagat

SEQ ID NO: 1566728 - DNA, 15 bp, Homo sapiens
gtttctgcagcaaga

SEQ ID NO: 1566729 - DNA, 15 bp, Homo sapiens
agtttctgcagcaag

SEQ ID NO: 1566730 - DNA, 15 bp, Homo sapiens
gagtttctgcagcaa

SEQ ID NO: 1566731 - DNA, 15 bp, Homo sapiens
tgagtttctgcagca

SEQ ID NO: 1566732 - DNA, 15 bp, Homo sapiens
ctgagtttctgcagc

SEQ ID NO: 1566733 - DNA, 15 bp, Homo sapiens
tctgagtttctgcag

SEQ ID NO: 1566734 - DNA, 15 bp, Homo sapiens
ctctgagtttctgca

SEQ ID NO: 1566735 - DNA, 15 bp, Homo sapiens
cctctgagtttctgc

SEQ ID NO: 1566736 - DNA, 15 bp, Homo sapiens
tcctctgagtttctg

SEQ ID NO: 1566737 - DNA, 15 bp, Homo sapiens
atcctctgagtttct

SEQ ID NO: 1566738 - DNA, 15 bp, Homo sapiens
aatcctctgagtttc

SEQ ID NO: 1566739 - DNA, 15 bp, Homo sapiens
aaatcctctgagttt

SEQ ID NO: 1566740 - DNA, 15 bp, Homo sapiens
gaaatcctctgagtt

SEQ ID NO: 1566741 - DNA, 15 bp, Homo sapiens
ggaaatcctctgagt

SEQ ID NO: 1566742 - DNA, 15 bp, Homo sapiens
aggaaatcctctgag

SEQ ID NO: 1566743 - DNA, 15 bp, Homo sapiens
gaggaaatcctctga

SEQ ID NO: 1566744 - DNA, 15 bp, Homo sapiens
tgaggaaatcctctg

SEQ ID NO: 1566745 - DNA, 15 bp, Homo sapiens
atgaggaaatcctct

SEQ ID NO: 1566746 - DNA, 15 bp, Homo sapiens
gatgaggaaatcctc

SEQ ID NO: 1566747 - DNA, 15 bp, Homo sapiens
tgatgaggaaatcct

SEQ ID NO: 1566748 - DNA, 15 bp, Homo sapiens
gtgatgaggaaatcc

SEQ ID NO: 1566749 - DNA, 15 bp, Homo sapiens
tgtgatgaggaaatc

SEQ ID NO: 1566750 - DNA, 15 bp, Homo sapiens
ttgtgatgaggaaat

SEQ ID NO: 1566751 - DNA, 15 bp, Homo sapiens
gttgtgatgaggaaa

SEQ ID NO: 1566752 - DNA, 15 bp, Homo sapiens
tgttgtgatgaggaa

SEQ ID NO: 1566753 - DNA, 15 bp, Homo sapiens
ctgttgtgatgagga

SEQ ID NO: 1566754 - DNA, 15 bp, Homo sapiens
gctgttgtgatgagg

SEQ ID NO: 1566755 - DNA, 15 bp, Homo sapiens
tgctgttgtgatgag

SEQ ID NO: 1566756 - DNA, 15 bp, Homo sapiens
gtgctgttgtgatga

SEQ ID NO: 1566757 - DNA, 15 bp, Homo sapiens
ggtgctgttgtgatg

SEQ ID NO: 1566758 - DNA, 15 bp, Homo sapiens
gggtgctgttgtgat

SEQ ID NO: 1566759 - DNA, 15 bp, Homo sapiens
tgggtgctgttgtga

SEQ ID NO: 1566760 - DNA, 15 bp, Homo sapiens
gtgggtgctgttgtg

SEQ ID NO: 1566761 - DNA, 15 bp, Homo sapiens
tgtgggtgctgttgt

SEQ ID NO: 1566762 - DNA, 15 bp, Homo sapiens
atgtgggtgctgttg

SEQ ID NO: 1566763 - DNA, 15 bp, Homo sapiens
aatgtgggtgctgtt

SEQ ID NO: 1566764 - DNA, 15 bp, Homo sapiens
aaatgtgggtgctgt

SEQ ID NO: 1566765 - DNA, 15 bp, Homo sapiens
taaatgtgggtgctg

SEQ ID NO: 1566766 - DNA, 15 bp, Homo sapiens
gtaaatgtgggtgct

SEQ ID NO: 1566767 - DNA, 15 bp, Homo sapiens
cgtaaatgtgggtgc

SEQ ID NO: 1566768 - DNA, 15 bp, Homo sapiens
acgtaaatgtgggtg

SEQ ID NO: 1566769 - DNA, 15 bp, Homo sapiens
tacgtaaatgtgggt

SEQ ID NO: 1566770 - DNA, 15 bp, Homo sapiens
ttacgtaaatgtggg

SEQ ID NO: 1566771 - DNA, 15 bp, Homo sapiens
tttacgtaaatgtgg

SEQ ID NO: 1566772 - DNA, 15 bp, Homo sapiens
ctttacgtaaatgtg

SEQ ID NO: 1566773 - DNA, 15 bp, Homo sapiens
actttacgtaaatgt

SEQ ID NO: 1566774 - DNA, 15 bp, Homo sapiens
aactttacgtaaatg

SEQ ID NO: 1566775 - DNA, 15 bp, Homo sapiens
aaactttacgtaaat

SEQ ID NO: 1566776 - DNA, 15 bp, Homo sapiens
gaaactttacgtaaa

SEQ ID NO: 1566777 - DNA, 15 bp, Homo sapiens
tgaaactttacgtaa

SEQ ID NO: 1566778 - DNA, 15 bp, Homo sapiens
ctgaaactttacgta

SEQ ID NO: 1566779 - DNA, 15 bp, Homo sapiens
actgaaactttacgt

SEQ ID NO: 1566780 - DNA, 15 bp, Homo sapiens
cactgaaactttacg

SEQ ID NO: 1566781 - DNA, 15 bp, Homo sapiens
acactgaaactttac

SEQ ID NO: 1566782 - DNA, 15 bp, Homo sapiens
gacactgaaacttta

SEQ ID NO: 1566783 - DNA, 15 bp, Homo sapiens
agacactgaaacttt

SEQ ID NO: 1566784 - DNA, 15 bp, Homo sapiens
cagacactgaaactt

SEQ ID NO: 1566785 - DNA, 15 bp, Homo sapiens
tcagacactgaaact

SEQ ID NO: 1566786 - DNA, 15 bp, Homo sapiens
ttcagacactgaaac

SEQ ID NO: 1566787 - DNA, 15 bp, Homo sapiens
attcagacactgaaa

SEQ ID NO: 1566788 - DNA, 15 bp, Homo sapiens
gattcagacactgaa

SEQ ID NO: 1566789 - DNA, 15 bp, Homo sapiens
tgattcagacactga

SEQ ID NO: 1566790 - DNA, 15 bp, Homo sapiens
ttgattcagacactg

SEQ ID NO: 1566791 - DNA, 15 bp, Homo sapiens
tttgattcagacact

SEQ ID NO: 1566792 - DNA, 15 bp, Homo sapiens
atttgattcagacac

SEQ ID NO: 1566793 - DNA, 15 bp, Homo sapiens
catttgattcagaca

SEQ ID NO: 1566794 - DNA, 15 bp, Homo sapiens
acatttgattcagac

SEQ ID NO: 1566795 - DNA, 15 bp, Homo sapiens
aacatttgattcaga

SEQ ID NO: 1566796 - DNA, 15 bp, Homo sapiens
gaacatttgattcag

SEQ ID NO: 1566797 - DNA, 15 bp, Homo sapiens
agaacatttgattca

SEQ ID NO: 1566798 - DNA, 15 bp, Homo sapiens
gagaacatttgattc

SEQ ID NO: 1566799 - DNA, 15 bp, Homo sapiens
agagaacatttgatt

SEQ ID NO: 1566800 - DNA, 15 bp, Homo sapiens
aagagaacatttgat

SEQ ID NO: 1566801 - DNA, 15 bp, Homo sapiens
caagagaacatttga

SEQ ID NO: 1566802 - DNA, 15 bp, Homo sapiens
ccaagagaacatttg

SEQ ID NO: 1566803 - DNA, 15 bp, Homo sapiens
tccaagagaacattt

SEQ ID NO: 1566804 - DNA, 15 bp, Homo sapiens
atccaagagaacatt

SEQ ID NO: 1566805 - DNA, 15 bp, Homo sapiens
catccaagagaacat

SEQ ID NO: 1566806 - DNA, 15 bp, Homo sapiens
tcatccaagagaaca

SEQ ID NO: 1566807 - DNA, 15 bp, Homo sapiens
ttcatccaagagaac

SEQ ID NO: 1566808 - DNA, 15 bp, Homo sapiens
cttcatccaagagaa

SEQ ID NO: 1566809 - DNA, 15 bp, Homo sapiens
tcttcatccaagaga

SEQ ID NO: 1566810 - DNA, 15 bp, Homo sapiens
ttcttcatccaagag

SEQ ID NO: 1566811 - DNA, 15 bp, Homo sapiens
cttcttcatccaaga

SEQ ID NO: 1566812 - DNA, 15 bp, Homo sapiens
acttcttcatccaag

SEQ ID NO: 1566813 - DNA, 15 bp, Homo sapiens
tacttcttcatccaa

SEQ ID NO: 1566814 - DNA, 15 bp, Homo sapiens
gtacttcttcatcca

SEQ ID NO: 1566815 - DNA, 15 bp, Homo sapiens
agtacttcttcatcc

SEQ ID NO: 1566816 - DNA, 15 bp, Homo sapiens
aagtacttcttcatc

SEQ ID NO: 1566817 - DNA, 15 bp, Homo sapiens
taagtacttcttcat

SEQ ID NO: 1566818 - DNA, 15 bp, Homo sapiens
gtaagtacttcttca

SEQ ID NO: 1566819 - DNA, 15 bp, Homo sapiens
agtaagtacttcttc

SEQ ID NO: 1566820 - DNA, 15 bp, Homo sapiens
cagtaagtacttctt

SEQ ID NO: 1566821 - DNA, 15 bp, Homo sapiens
tcagtaagtacttct

SEQ ID NO: 1566822 - DNA, 15 bp, Homo sapiens
atcagtaagtacttc

SEQ ID NO: 1566823 - DNA, 15 bp, Homo sapiens
gatcagtaagtactt

SEQ ID NO: 1566824 - DNA, 15 bp, Homo sapiens
ggatcagtaagtact

SEQ ID NO: 1566825 - DNA, 15 bp, Homo sapiens
cggatcagtaagtac

SEQ ID NO: 1566826 - DNA, 15 bp, Homo sapiens
tcggatcagtaagta

SEQ ID NO: 1566827 - DNA, 15 bp, Homo sapiens
ttcggatcagtaagt

SEQ ID NO: 1566828 - DNA, 15 bp, Homo sapiens
cttcggatcagtaag

SEQ ID NO: 1566829 - DNA, 15 bp, Homo sapiens
tcttcggatcagtaa

SEQ ID NO: 1566830 - DNA, 15 bp, Homo sapiens
atcttcggatcagta

SEQ ID NO: 1566831 - DNA, 15 bp, Homo sapiens
gatcttcggatcagt

SEQ ID NO: 1566832 - DNA, 15 bp, Homo sapiens
ggatcttcggatcag

SEQ ID NO: 1566833 - DNA, 15 bp, Homo sapiens
tggatcttcggatca

SEQ ID NO: 1566834 - DNA, 15 bp, Homo sapiens
ctggatcttcggatc

SEQ ID NO: 1566835 - DNA, 15 bp, Homo sapiens
cctggatcttcggat

SEQ ID NO: 1566836 - DNA, 15 bp, Homo sapiens
gcctggatcttcgga

SEQ ID NO: 1566837 - DNA, 15 bp, Homo sapiens
cgcctggatcttcgg

SEQ ID NO: 1566838 - DNA, 15 bp, Homo sapiens
gcgcctggatcttcg

SEQ ID NO: 1566839 - DNA, 15 bp, Homo sapiens
agcgcctggatcttc

SEQ ID NO: 1566840 - DNA, 15 bp, Homo sapiens
cagcgcctggatctt

SEQ ID NO: 1566841 - DNA, 15 bp, Homo sapiens
gcagcgcctggatct

SEQ ID NO: 1566842 - DNA, 15 bp, Homo sapiens
agcagcgcctggatc

SEQ ID NO: 1566843 - DNA, 15 bp, Homo sapiens
aagcagcgcctggat

SEQ ID NO: 1566844 - DNA, 15 bp, Homo sapiens
gaagcagcgcctgga

SEQ ID NO: 1566845 - DNA, 15 bp, Homo sapiens
agaagcagcgcctgg

SEQ ID NO: 1566846 - DNA, 15 bp, Homo sapiens
aagaagcagcgcctg

SEQ ID NO: 1566847 - DNA, 15 bp, Homo sapiens
taagaagcagcgcct

SEQ ID NO: 1566848 - DNA, 15 bp, Homo sapiens
gtaagaagcagcgcc

SEQ ID NO: 1566849 - DNA, 15 bp, Homo sapiens
agtaagaagcagcgc

SEQ ID NO: 1566850 - DNA, 15 bp, Homo sapiens
cagtaagaagcagcg

SEQ ID NO: 1566851 - DNA, 15 bp, Homo sapiens
acagtaagaagcagc

SEQ ID NO: 1566852 - DNA, 15 bp, Homo sapiens
aacagtaagaagcag

SEQ ID NO: 1566853 - DNA, 15 bp, Homo sapiens
gaacagtaagaagca

SEQ ID NO: 1566854 - DNA, 15 bp, Homo sapiens
tagaacagtaagaag

SEQ ID NO: 1566855 - DNA, 15 bp, Homo sapiens
ctagaacagtaagaa

SEQ ID NO: 1566856 - DNA, 15 bp, Homo sapiens
actagaacagtaaga

SEQ ID NO: 1566857 - DNA, 15 bp, Homo sapiens
tactagaacagtaag

SEQ ID NO: 1566858 - DNA, 15 bp, Homo sapiens
ttactagaacagtaa

SEQ ID NO: 1566859 - DNA, 15 bp, Homo sapiens
cttactagaacagta

SEQ ID NO: 1566860 - DNA, 15 bp, Homo sapiens
ccttactagaacagt

SEQ ID NO: 1566861 - DNA, 15 bp, Homo sapiens
tccttactagaacag

SEQ ID NO: 1566862 - DNA, 15 bp, Homo sapiens
atccttactagaaca

SEQ ID NO: 1566863 - DNA, 15 bp, Homo sapiens
aatccttactagaac

SEQ ID NO: 1566864 - DNA, 15 bp, Homo sapiens
aaatccttactagaa

SEQ ID NO: 1566865 - DNA, 15 bp, Homo sapiens
gaaatccttactaga

SEQ ID NO: 1566866 - DNA, 15 bp, Homo sapiens
ggaaatccttactag

SEQ ID NO: 1566867 - DNA, 15 bp, Homo sapiens
gggaaatccttacta

SEQ ID NO: 1566868 - DNA, 15 bp, Homo sapiens
ggggaaatccttact

SEQ ID NO: 1566869 - DNA, 15 bp, Homo sapiens
aggggaaatccttac

SEQ ID NO: 1566870 - DNA, 15 bp, Homo sapiens
aaggggaaatcctta

SEQ ID NO: 1566871 - DNA, 15 bp, Homo sapiens
aaaggggaaatcctt

SEQ ID NO: 1566872 - DNA, 15 bp, Homo sapiens
aaaaggggaaatcct

SEQ ID NO: 1566873 - DNA, 15 bp, Homo sapiens
aaaaaggggaaatcc

SEQ ID NO: 1566874 - DNA, 15 bp, Homo sapiens
caaaaaggggaaatc

SEQ ID NO: 1566875 - DNA, 15 bp, Homo sapiens
tcaaaaaggggaaat

SEQ ID NO: 1566876 - DNA, 15 bp, Homo sapiens
ctcaaaaaggggaaa

SEQ ID NO: 1566877 - DNA, 15 bp, Homo sapiens
actcaaaaaggggaa

SEQ ID NO: 1566878 - DNA, 15 bp, Homo sapiens
gactcaaaaagggga

SEQ ID NO: 1566879 - DNA, 15 bp, Homo sapiens
ggactcaaaaagggg

SEQ ID NO: 1566880 - DNA, 15 bp, Homo sapiens
gggactcaaaaaggg

SEQ ID NO: 1566881 - DNA, 15 bp, Homo sapiens
ggggactcaaaaagg

SEQ ID NO: 1566882 - DNA, 15 bp, Homo sapiens
gggggactcaaaaag

SEQ ID NO: 1566883 - DNA, 15 bp, Homo sapiens
tgggggactcaaaaa

SEQ ID NO: 1566884 - DNA, 15 bp, Homo sapiens
gtgggggactcaaaa

SEQ ID NO: 1566885 - DNA, 15 bp, Homo sapiens
ggtgggggactcaaa

SEQ ID NO: 1566886 - DNA, 15 bp, Homo sapiens
gggtgggggactcaa

SEQ ID NO: 1566887 - DNA, 15 bp, Homo sapiens
agggtgggggactca

SEQ ID NO: 1566888 - DNA, 15 bp, Homo sapiens
gagggtgggggactc

SEQ ID NO: 1566889 - DNA, 15 bp, Homo sapiens
tgagggtgggggact

SEQ ID NO: 1566890 - DNA, 15 bp, Homo sapiens
ttgagggtgggggac

SEQ ID NO: 1566891 - DNA, 15 bp, Homo sapiens
tttgagggtggggga

SEQ ID NO: 1566892 - DNA, 15 bp, Homo sapiens
atttgagggtggggg

SEQ ID NO: 1566893 - DNA, 15 bp, Homo sapiens
aatttgagggtgggg

SEQ ID NO: 1566894 - DNA, 15 bp, Homo sapiens
aaatttgagggtggg

SEQ ID NO: 1566895 - DNA, 15 bp, Homo sapiens
aaaatttgagggtgg

SEQ ID NO: 1566896 - DNA, 15 bp, Homo sapiens
aaaaatttgagggtg

SEQ ID NO: 1566897 - DNA, 15 bp, Homo sapiens
taaaaatttgagggt

SEQ ID NO: 1566898 - DNA, 15 bp, Homo sapiens
ataaaaatttgaggg

SEQ ID NO: 1566899 - DNA, 15 bp, Homo sapiens
aataaaaatttgagg

SEQ ID NO: 1566900 - DNA, 15 bp, Homo sapiens
gaataaaaatttgag

SEQ ID NO: 1566901 - DNA, 15 bp, Homo sapiens
ggaataaaaatttga

SEQ ID NO: 1566902 - DNA, 15 bp, Homo sapiens
tggaataaaaatttg

SEQ ID NO: 1566903 - DNA, 15 bp, Homo sapiens
ctggaataaaaattt

SEQ ID NO: 1566904 - DNA, 15 bp, Homo sapiens
actggaataaaaatt

SEQ ID NO: 1566905 - DNA, 15 bp, Homo sapiens
gactggaataaaaat

SEQ ID NO: 1566906 - DNA, 15 bp, Homo sapiens
agactggaataaaaa

SEQ ID NO: 1566907 - DNA, 15 bp, Homo sapiens
tagactggaataaaa

SEQ ID NO: 1566908 - DNA, 15 bp, Homo sapiens
gtagactggaataaa

SEQ ID NO: 1566909 - DNA, 15 bp, Homo sapiens
agtagactggaataa

SEQ ID NO: 1566910 - DNA, 15 bp, Homo sapiens
aagtagactggaata

SEQ ID NO: 1566911 - DNA, 15 bp, Homo sapiens
aaagtagactggaat

SEQ ID NO: 1566912 - DNA, 15 bp, Homo sapiens
aaaagtagactggaa

SEQ ID NO: 1566913 - DNA, 15 bp, Homo sapiens
taaaagtagactgga

SEQ ID NO: 1566914 - DNA, 15 bp, Homo sapiens
ctaaaagtagactgg

SEQ ID NO: 1566915 - DNA, 15 bp, Homo sapiens
cctaaaagtagactg

SEQ ID NO: 1566916 - DNA, 15 bp, Homo sapiens
tcctaaaagtagact

SEQ ID NO: 1566917 - DNA, 15 bp, Homo sapiens
ctcctaaaagtagac

SEQ ID NO: 1566918 - DNA, 15 bp, Homo sapiens
cctcctaaaagtaga

SEQ ID NO: 1566919 - DNA, 15 bp, Homo sapiens
gcctcctaaaagtag

SEQ ID NO: 1566920 - DNA, 15 bp, Homo sapiens
ggcctcctaaaagta

SEQ ID NO: 1566921 - DNA, 15 bp, Homo sapiens
gggcctcctaaaagt

SEQ ID NO: 1566922 - DNA, 15 bp, Homo sapiens
agggcctcctaaaag

SEQ ID NO: 1566923 - DNA, 15 bp, Homo sapiens
aagggcctcctaaaa

SEQ ID NO: 1566924 - DNA, 15 bp, Homo sapiens
taagggcctcctaaa

SEQ ID NO: 1566925 - DNA, 15 bp, Homo sapiens
ttaagggcctcctaa

SEQ ID NO: 1566926 - DNA, 15 bp, Homo sapiens
tttaagggcctccta

SEQ ID NO: 1566927 - DNA, 15 bp, Homo sapiens
atttaagggcctcct

SEQ ID NO: 1566928 - DNA, 15 bp, Homo sapiens
tatttaagggcctcc

SEQ ID NO: 1566929 - DNA, 15 bp, Homo sapiens
atatttaagggcctc

SEQ ID NO: 1566930 - DNA, 15 bp, Homo sapiens
aatatttaagggcct

SEQ ID NO: 1566931 - DNA, 15 bp, Homo sapiens
taatatttaagggcc

SEQ ID NO: 1566932 - DNA, 15 bp, Homo sapiens
ttaatatttaagggc

SEQ ID NO: 1566933 - DNA, 15 bp, Homo sapiens
tttaatatttaaggg

SEQ ID NO: 1566934 - DNA, 15 bp, Homo sapiens
gtttttaatatttaa

SEQ ID NO: 1566935 - DNA, 15 bp, Homo sapiens
tgtttttaatattta

SEQ ID NO: 1566936 - DNA, 15 bp, Homo sapiens
atgtttttaatattt

SEQ ID NO: 1566937 - DNA, 15 bp, Homo sapiens
catgtttttaatatt

SEQ ID NO: 1566938 - DNA, 15 bp, Homo sapiens
tcatgtttttaatat

SEQ ID NO: 1566939 - DNA, 15 bp, Homo sapiens
ttcatgtttttaata

SEQ ID NO: 1566940 - DNA, 15 bp, Homo sapiens
attcatgtttttaat

SEQ ID NO: 1566941 - DNA, 15 bp, Homo sapiens
tattcatgtttttaa

SEQ ID NO: 1566942 - DNA, 15 bp, Homo sapiens
ctattcatgttttta

SEQ ID NO: 1566943 - DNA, 15 bp, Homo sapiens
cctattcatgttttt

SEQ ID NO: 1566944 - DNA, 15 bp, Homo sapiens
tcctattcatgtttt

SEQ ID NO: 1566945 - DNA, 15 bp, Homo sapiens
atcctattcatgttt

SEQ ID NO: 1566946 - DNA, 15 bp, Homo sapiens
tatcctattcatgtt

SEQ ID NO: 1566947 - DNA, 15 bp, Homo sapiens
gtatcctattcatgt

SEQ ID NO: 1566948 - DNA, 15 bp, Homo sapiens
tgtatcctattcatg

SEQ ID NO: 1566949 - DNA, 15 bp, Homo sapiens
ctgtatcctattcat

SEQ ID NO: 1566950 - DNA, 15 bp, Homo sapiens
actgtatcctattca

SEQ ID NO: 1566951 - DNA, 15 bp, Homo sapiens
gactgtatcctattc

SEQ ID NO: 1566952 - DNA, 15 bp, Homo sapiens
agactgtatcctatt

SEQ ID NO: 1566953 - DNA, 15 bp, Homo sapiens
aagactgtatcctat

SEQ ID NO: 1566954 - DNA, 15 bp, Homo sapiens
gaagactgtatccta

SEQ ID NO: 1566955 - DNA, 15 bp, Homo sapiens
agaagactgtatcct

SEQ ID NO: 1566956 - DNA, 15 bp, Homo sapiens
tagaagactgtatcc

SEQ ID NO: 1566957 - DNA, 15 bp, Homo sapiens
gtagaagactgtatc

SEQ ID NO: 1566958 - DNA, 15 bp, Homo sapiens
agtagaagactgtat

SEQ ID NO: 1566959 - DNA, 15 bp, Homo sapiens
aagtagaagactgta

SEQ ID NO: 1566960 - DNA, 15 bp, Homo sapiens
gaagtagaagactgt

SEQ ID NO: 1566961 - DNA, 15 bp, Homo sapiens
agaagtagaagactg

SEQ ID NO: 1566962 - DNA, 15 bp, Homo sapiens
gagaagtagaagact

SEQ ID NO: 1566963 - DNA, 15 bp, Homo sapiens
tgagaagtagaagac

SEQ ID NO: 1566964 - DNA, 15 bp, Homo sapiens
gtgagaagtagaaga

SEQ ID NO: 1566965 - DNA, 15 bp, Homo sapiens
ggtgagaagtagaag

SEQ ID NO: 1566966 - DNA, 15 bp, Homo sapiens
gggtgagaagtagaa

SEQ ID NO: 1566967 - DNA, 15 bp, Homo sapiens
tgggtgagaagtaga

SEQ ID NO: 1566968 - DNA, 15 bp, Homo sapiens
ttgggtgagaagtag

SEQ ID NO: 1566969 - DNA, 15 bp, Homo sapiens
tttgggtgagaagta

SEQ ID NO: 1566970 - DNA, 15 bp, Homo sapiens
gtttgggtgagaagt

SEQ ID NO: 1566971 - DNA, 15 bp, Homo sapiens
tgtttgggtgagaag

SEQ ID NO: 1566972 - DNA, 15 bp, Homo sapiens
ctgtttgggtgagaa

SEQ ID NO: 1566973 - DNA, 15 bp, Homo sapiens
tctgtttgggtgaga

SEQ ID NO: 1566974 - DNA, 15 bp, Homo sapiens
atctgtttgggtgag

SEQ ID NO: 1566975 - DNA, 15 bp, Homo sapiens
tatctgtttgggtga

SEQ ID NO: 1566976 - DNA, 15 bp, Homo sapiens
ttatctgtttgggtg

SEQ ID NO: 1566977 - DNA, 15 bp, Homo sapiens
gttatctgtttgggt

SEQ ID NO: 1566978 - DNA, 15 bp, Homo sapiens
tgttatctgtttggg

SEQ ID NO: 1566979 - DNA, 15 bp, Homo sapiens
ttgttatctgtttgg

SEQ ID NO: 1566980 - DNA, 15 bp, Homo sapiens
attgttatctgtttg

SEQ ID NO: 1566981 - DNA, 15 bp, Homo sapiens
aattgttatctgttt

SEQ ID NO: 1566982 - DNA, 15 bp, Homo sapiens
gaattgttatctgtt

SEQ ID NO: 1566983 - DNA, 15 bp, Homo sapiens
tgaattgttatctgt

SEQ ID NO: 1566984 - DNA, 15 bp, Homo sapiens
ctgaattgttatctg

SEQ ID NO: 1566985 - DNA, 15 bp, Homo sapiens
gctgaattgttatct

SEQ ID NO: 1566986 - DNA, 15 bp, Homo sapiens
ggctgaattgttatc

SEQ ID NO: 1566987 - DNA, 15 bp, Homo sapiens
tggctgaattgttat

SEQ ID NO: 1566988 - DNA, 15 bp, Homo sapiens
gtggctgaattgtta

SEQ ID NO: 1566989 - DNA, 15 bp, Homo sapiens
tgtggctgaattgtt

SEQ ID NO: 1566990 - DNA, 15 bp, Homo sapiens
ttgtggctgaattgt

SEQ ID NO: 1566991 - DNA, 15 bp, Homo sapiens
tttgtggctgaattg

SEQ ID NO: 1566992 - DNA, 15 bp, Homo sapiens
ctttgtggctgaatt

SEQ ID NO: 1566993 - DNA, 15 bp, Homo sapiens
actttgtggctgaat

SEQ ID NO: 1566994 - DNA, 15 bp, Homo sapiens
tactttgtggctgaa

SEQ ID NO: 1566995 - DNA, 15 bp, Homo sapiens
ttactttgtggctga

SEQ ID NO: 1566996 - DNA, 15 bp, Homo sapiens
tttactttgtggctg

SEQ ID NO: 1566997 - DNA, 15 bp, Homo sapiens
ttttactttgtggct

SEQ ID NO: 1566998 - DNA, 15 bp, Homo sapiens
tttttactttgtggc

SEQ ID NO: 1566999 - DNA, 15 bp, Homo sapiens
atttttactttgtgg

SEQ ID NO: 1567000 - DNA, 15 bp, Homo sapiens
catttttactttgtg

SEQ ID NO: 1567001 - DNA, 15 bp, Homo sapiens
acatttttactttgt

SEQ ID NO: 1567002 - DNA, 15 bp, Homo sapiens
aacatttttactttg

SEQ ID NO: 1567003 - DNA, 15 bp, Homo sapiens
caacatttttacttt

SEQ ID NO: 1567004 - DNA, 15 bp, Homo sapiens
acaacatttttactt

SEQ ID NO: 1567005 - DNA, 15 bp, Homo sapiens
cacaacatttttact

SEQ ID NO: 1567006 - DNA, 15 bp, Homo sapiens
acacaacatttttac

SEQ ID NO: 1567007 - DNA, 15 bp, Homo sapiens
cacacaacattttta

SEQ ID NO: 1567008 - DNA, 15 bp, Homo sapiens
acacacaacattttt

SEQ ID NO: 1567009 - DNA, 15 bp, Homo sapiens
aacacacaacatttt

SEQ ID NO: 1567010 - DNA, 15 bp, Homo sapiens
aaacacacaacattt

SEQ ID NO: 1567011 - DNA, 15 bp, Homo sapiens
taaacacacaacatt

SEQ ID NO: 1567012 - DNA, 15 bp, Homo sapiens
gtaaacacacaacat

SEQ ID NO: 1567013 - DNA, 15 bp, Homo sapiens
agtaaacacacaaca

SEQ ID NO: 1567014 - DNA, 15 bp, Homo sapiens
aagtaaacacacaac

SEQ ID NO: 1567015 - DNA, 15 bp, Homo sapiens
aaagtaaacacacaa

SEQ ID NO: 1567016 - DNA, 15 bp, Homo sapiens
aaaagtaaacacaca

SEQ ID NO: 1567017 - DNA, 15 bp, Homo sapiens
aaaaagtaaacacac

SEQ ID NO: 1567018 - DNA, 15 bp, Homo sapiens
aaaaaagtaaacaca

SEQ ID NO: 1567019 - DNA, 15 bp, Homo sapiens
caaaaaagtaaacac

SEQ ID NO: 1567020 - DNA, 15 bp, Homo sapiens
gcaaaaaagtaaaca

SEQ ID NO: 1567021 - DNA, 15 bp, Homo sapiens
tgcaaaaaagtaaac

SEQ ID NO: 1567022 - DNA, 15 bp, Homo sapiens
atgcaaaaaagtaaa

SEQ ID NO: 1567023 - DNA, 15 bp, Homo sapiens
gatgcaaaaaagtaa

SEQ ID NO: 1567024 - DNA, 15 bp, Homo sapiens
agatgcaaaaaagta

SEQ ID NO: 1567025 - DNA, 15 bp, Homo sapiens
aagatgcaaaaaagt

SEQ ID NO: 1567026 - DNA, 15 bp, Homo sapiens
caagatgcaaaaaag

SEQ ID NO: 1567027 - DNA, 15 bp, Homo sapiens
ccaagatgcaaaaaa

SEQ ID NO: 1567028 - DNA, 15 bp, Homo sapiens
gccaagatgcaaaaa

SEQ ID NO: 1567029 - DNA, 15 bp, Homo sapiens
tgccaagatgcaaaa

SEQ ID NO: 1567030 - DNA, 15 bp, Homo sapiens
ctgccaagatgcaaa

SEQ ID NO: 1567031 - DNA, 15 bp, Homo sapiens
cctgccaagatgcaa

SEQ ID NO: 1567032 - DNA, 15 bp, Homo sapiens
gcctgccaagatgca

SEQ ID NO: 1567033 - DNA, 15 bp, Homo sapiens
agcctgccaagatgc

SEQ ID NO: 1567034 - DNA, 15 bp, Homo sapiens
tagcctgccaagatg

SEQ ID NO: 1567035 - DNA, 15 bp, Homo sapiens
gtagcctgccaagat

SEQ ID NO: 1567036 - DNA, 15 bp, Homo sapiens
tgtagcctgccaaga

SEQ ID NO: 1567037 - DNA, 15 bp, Homo sapiens
gtgtagcctgccaag

SEQ ID NO: 1567038 - DNA, 15 bp, Homo sapiens
agtgtagcctgccaa

SEQ ID NO: 1567039 - DNA, 15 bp, Homo sapiens
cagtgtagcctgcca

SEQ ID NO: 1567040 - DNA, 15 bp, Homo sapiens
ccagtgtagcctgcc

SEQ ID NO: 1567041 - DNA, 15 bp, Homo sapiens
accagtgtagcctgc

SEQ ID NO: 1567042 - DNA, 15 bp, Homo sapiens
taccagtgtagcctg

SEQ ID NO: 1567043 - DNA, 15 bp, Homo sapiens
ttaccagtgtagcct

SEQ ID NO: 1567044 - DNA, 15 bp, Homo sapiens
tttaccagtgtagcc

SEQ ID NO: 1567045 - DNA, 15 bp, Homo sapiens
ttttaccagtgtagc

SEQ ID NO: 1567046 - DNA, 15 bp, Homo sapiens
attttaccagtgtag

SEQ ID NO: 1567047 - DNA, 15 bp, Homo sapiens
tattttaccagtgta

SEQ ID NO: 1567048 - DNA, 15 bp, Homo sapiens
atattttaccagtgt

SEQ ID NO: 1567049 - DNA, 15 bp, Homo sapiens
tatattttaccagtg

SEQ ID NO: 1567050 - DNA, 15 bp, Homo sapiens
gtatattttaccagt

SEQ ID NO: 1567051 - DNA, 15 bp, Homo sapiens
ggtatattttaccag

SEQ ID NO: 1567052 - DNA, 15 bp, Homo sapiens
tggtatattttacca

SEQ ID NO: 1567053 - DNA, 15 bp, Homo sapiens
gtggtatattttacc

SEQ ID NO: 1567054 - DNA, 15 bp, Homo sapiens
tgtggtatattttac

SEQ ID NO: 1567055 - DNA, 15 bp, Homo sapiens
ctgtggtatatttta

SEQ ID NO: 1567056 - DNA, 15 bp, Homo sapiens
tctgtggtatatttt

SEQ ID NO: 1567057 - DNA, 15 bp, Homo sapiens
atctgtggtatattt

SEQ ID NO: 1567058 - DNA, 15 bp, Homo sapiens
catctgtggtatatt

SEQ ID NO: 1567059 - DNA, 15 bp, Homo sapiens
tcatctgtggtatat

SEQ ID NO: 1567060 - DNA, 15 bp, Homo sapiens
ctcatctgtggtata

SEQ ID NO: 1567061 - DNA, 15 bp, Homo sapiens
actcatctgtggtat

SEQ ID NO: 1567062 - DNA, 15 bp, Homo sapiens
aactcatctgtggta

SEQ ID NO: 1567063 - DNA, 15 bp, Homo sapiens
aaactcatctgtggt

SEQ ID NO: 1567064 - DNA, 15 bp, Homo sapiens
caaactcatctgtgg

SEQ ID NO: 1567065 - DNA, 15 bp, Homo sapiens
tcaaactcatctgtg

SEQ ID NO: 1567066 - DNA, 15 bp, Homo sapiens
atcaaactcatctgt

SEQ ID NO: 1567067 - DNA, 15 bp, Homo sapiens
gatcaaactcatctg

SEQ ID NO: 1567068 - DNA, 15 bp, Homo sapiens
tgatcaaactcatct

SEQ ID NO: 1567069 - DNA, 15 bp, Homo sapiens
ttgatcaaactcatc

SEQ ID NO: 1567070 - DNA, 15 bp, Homo sapiens
gttgatcaaactcat

SEQ ID NO: 1567071 - DNA, 15 bp, Homo sapiens
cgttgatcaaactca

SEQ ID NO: 1567072 - DNA, 15 bp, Homo sapiens
tcgttgatcaaactc

SEQ ID NO: 1567073 - DNA, 15 bp, Homo sapiens
ttcgttgatcaaact

SEQ ID NO: 1567074 - DNA, 15 bp, Homo sapiens
attcgttgatcaaac

SEQ ID NO: 1567075 - DNA, 15 bp, Homo sapiens
aattcgttgatcaaa

SEQ ID NO: 1567076 - DNA, 15 bp, Homo sapiens
gaattcgttgatcaa

SEQ ID NO: 1567077 - DNA, 15 bp, Homo sapiens
agaattcgttgatca

SEQ ID NO: 1567078 - DNA, 15 bp, Homo sapiens
aagaattcgttgatc

SEQ ID NO: 1567079 - DNA, 15 bp, Homo sapiens
aaagaattcgttgat

SEQ ID NO: 1567080 - DNA, 15 bp, Homo sapiens
taaagaattcgttga

SEQ ID NO: 1567081 - DNA, 15 bp, Homo sapiens
ataaagaattcgttg

SEQ ID NO: 1567082 - DNA, 15 bp, Homo sapiens
cataaagaattcgtt

SEQ ID NO: 1567083 - DNA, 15 bp, Homo sapiens
tcataaagaattcgt

SEQ ID NO: 1567084 - DNA, 15 bp, Homo sapiens
ttcataaagaattcg

SEQ ID NO: 1567085 - DNA, 15 bp, Homo sapiens
attcataaagaattc

SEQ ID NO: 1567086 - DNA, 15 bp, Homo sapiens
tattcataaagaatt

SEQ ID NO: 1567087 - DNA, 15 bp, Homo sapiens
gtattcataaagaat

SEQ ID NO: 1567088 - DNA, 15 bp, Homo sapiens
agtattcataaagaa

SEQ ID NO: 1567089 - DNA, 15 bp, Homo sapiens
aagtattcataaaga

SEQ ID NO: 1567090 - DNA, 15 bp, Homo sapiens
taagtattcataaag

SEQ ID NO: 1567091 - DNA, 15 bp, Homo sapiens
ctaagtattcataaa

SEQ ID NO: 1567092 - DNA, 15 bp, Homo sapiens
gctaagtattcataa

SEQ ID NO: 1567093 - DNA, 15 bp, Homo sapiens
tgctaagtattcata

SEQ ID NO: 1567094 - DNA, 15 bp, Homo sapiens
ctgctaagtattcat

SEQ ID NO: 1567095 - DNA, 15 bp, Homo sapiens
tctgctaagtattca

SEQ ID NO: 1567096 - DNA, 15 bp, Homo sapiens
ctctgctaagtattc

SEQ ID NO: 1567097 - DNA, 15 bp, Homo sapiens
cctctgctaagtatt

SEQ ID NO: 1567098 - DNA, 15 bp, Homo sapiens
gcctctgctaagtat

SEQ ID NO: 1567099 - DNA, 15 bp, Homo sapiens
ggcctctgctaagta

SEQ ID NO: 1567100 - DNA, 15 bp, Homo sapiens
tggcctctgctaagt

SEQ ID NO: 1567101 - DNA, 15 bp, Homo sapiens
ctggcctctgctaag

SEQ ID NO: 1567102 - DNA, 15 bp, Homo sapiens
actggcctctgctaa

SEQ ID NO: 1567103 - DNA, 15 bp, Homo sapiens
cactggcctctgcta

SEQ ID NO: 1567104 - DNA, 15 bp, Homo sapiens
acactggcctctgct

SEQ ID NO: 1567105 - DNA, 15 bp, Homo sapiens
aacactggcctctgc

SEQ ID NO: 1567106 - DNA, 15 bp, Homo sapiens
caacactggcctctg

SEQ ID NO: 1567107 - DNA, 15 bp, Homo sapiens
acaacactggcctct

SEQ ID NO: 1567108 - DNA, 15 bp, Homo sapiens
cacaacactggcctc

SEQ ID NO: 1567109 - DNA, 15 bp, Homo sapiens
acacaacactggcct

SEQ ID NO: 1567110 - DNA, 15 bp, Homo sapiens
aacacaacactggcc

SEQ ID NO: 1567111 - DNA, 15 bp, Homo sapiens
aaacacaacactggc

SEQ ID NO: 1567112 - DNA, 15 bp, Homo sapiens
gaaacacaacactgg

SEQ ID NO: 1567113 - DNA, 15 bp, Homo sapiens
ggaaacacaacactg

SEQ ID NO: 1567114 - DNA, 15 bp, Homo sapiens
gggaaacacaacact

SEQ ID NO: 1567115 - DNA, 15 bp, Homo sapiens
tgggaaacacaacac

SEQ ID NO: 1567116 - DNA, 15 bp, Homo sapiens
ttgggaaacacaaca

SEQ ID NO: 1567117 - DNA, 15 bp, Homo sapiens
tttgggaaacacaac

SEQ ID NO: 1567118 - DNA, 15 bp, Homo sapiens
ctttgggaaacacaa

SEQ ID NO: 1567119 - DNA, 15 bp, Homo sapiens
actttgggaaacaca

SEQ ID NO: 1567120 - DNA, 15 bp, Homo sapiens
gactttgggaaacac

SEQ ID NO: 1567121 - DNA, 15 bp, Homo sapiens
agactttgggaaaca

SEQ ID NO: 1567122 - DNA, 15 bp, Homo sapiens
aagactttgggaaac

SEQ ID NO: 1567123 - DNA, 15 bp, Homo sapiens
aaagactttgggaaa

SEQ ID NO: 1567124 - DNA, 15 bp, Homo sapiens
gaaagactttgggaa

SEQ ID NO: 1567125 - DNA, 15 bp, Homo sapiens
ggaaagactttggga

SEQ ID NO: 1567126 - DNA, 15 bp, Homo sapiens
aggaaagactttggg

SEQ ID NO: 1567127 - DNA, 15 bp, Homo sapiens
caggaaagactttgg

SEQ ID NO: 1567128 - DNA, 15 bp, Homo sapiens
acaggaaagactttg

SEQ ID NO: 1567129 - DNA, 15 bp, Homo sapiens
aacaggaaagacttt

SEQ ID NO: 1567130 - DNA, 15 bp, Homo sapiens
caacaggaaagactt

SEQ ID NO: 1567131 - DNA, 15 bp, Homo sapiens
acaacaggaaagact

SEQ ID NO: 1567132 - DNA, 15 bp, Homo sapiens
cacaacaggaaagac

SEQ ID NO: 1567133 - DNA, 15 bp, Homo sapiens
acacaacaggaaaga

SEQ ID NO: 1567134 - DNA, 15 bp, Homo sapiens
tacacaacaggaaag

SEQ ID NO: 1567135 - DNA, 15 bp, Homo sapiens
ttacacaacaggaaa

SEQ ID NO: 1567136 - DNA, 15 bp, Homo sapiens
cttacacaacaggaa

SEQ ID NO: 1567137 - DNA, 15 bp, Homo sapiens
acttacacaacagga

SEQ ID NO: 1567138 - DNA, 15 bp, Homo sapiens
tacttacacaacagg

SEQ ID NO: 1567139 - DNA, 15 bp, Homo sapiens
atacttacacaacag

SEQ ID NO: 1567140 - DNA, 15 bp, Homo sapiens
gatacttacacaaca

SEQ ID NO: 1567141 - DNA, 15 bp, Homo sapiens
agatacttacacaac

SEQ ID NO: 1567142 - DNA, 15 bp, Homo sapiens
gagatacttacacaa

SEQ ID NO: 1567143 - DNA, 15 bp, Homo sapiens
ggagatacttacaca

SEQ ID NO: 1567144 - DNA, 15 bp, Homo sapiens
aggagatacttacac

SEQ ID NO: 1567145 - DNA, 15 bp, Homo sapiens
aaggagatacttaca

SEQ ID NO: 1567146 - DNA, 15 bp, Homo sapiens
aaaggagatacttac

SEQ ID NO: 1567147 - DNA, 15 bp, Homo sapiens
aaaaggagatactta

SEQ ID NO: 1567148 - DNA, 15 bp, Homo sapiens
caaaaggagatactt

SEQ ID NO: 1567149 - DNA, 15 bp, Homo sapiens
tcaaaaggagatact

SEQ ID NO: 1567150 - DNA, 15 bp, Homo sapiens
atcaaaaggagatac

SEQ ID NO: 1567151 - DNA, 15 bp, Homo sapiens
aatcaaaaggagata

SEQ ID NO: 1567152 - DNA, 15 bp, Homo sapiens
aaatcaaaaggagat

SEQ ID NO: 1567153 - DNA, 15 bp, Homo sapiens
aaaatcaaaaggaga

SEQ ID NO: 1567154 - DNA, 15 bp, Homo sapiens
taaaatcaaaaggag

SEQ ID NO: 1567155 - DNA, 15 bp, Homo sapiens
ttaaaatcaaaagga

SEQ ID NO: 1567156 - DNA, 15 bp, Homo sapiens
attaaaatcaaaagg

SEQ ID NO: 1567157 - DNA, 15 bp, Homo sapiens
aattaaaatcaaaag

SEQ ID NO: 1567158 - DNA, 15 bp, Homo sapiens
gaattaaaatcaaaa

SEQ ID NO: 1567159 - DNA, 15 bp, Homo sapiens
tgaattaaaatcaaa

SEQ ID NO: 1567160 - DNA, 15 bp, Homo sapiens
gtgaattaaaatcaa

SEQ ID NO: 1567161 - DNA, 15 bp, Homo sapiens
ggtgaattaaaatca

SEQ ID NO: 1567162 - DNA, 15 bp, Homo sapiens
aggtgaattaaaatc

SEQ ID NO: 1567163 - DNA, 15 bp, Homo sapiens
aaggtgaattaaaat

SEQ ID NO: 1567164 - DNA, 15 bp, Homo sapiens
gaaggtgaattaaaa

SEQ ID NO: 1567165 - DNA, 15 bp, Homo sapiens
cgaaggtgaattaaa

SEQ ID NO: 1567166 - DNA, 15 bp, Homo sapiens
acgaaggtgaattaa

SEQ ID NO: 1567167 - DNA, 15 bp, Homo sapiens
cacgaaggtgaatta

SEQ ID NO: 1567168 - DNA, 15 bp, Homo sapiens
gcacgaaggtgaatt

SEQ ID NO: 1567169 - DNA, 15 bp, Homo sapiens
ggcacgaaggtgaat

SEQ ID NO: 1567170 - DNA, 15 bp, Homo sapiens
aggcacgaaggtgaa

SEQ ID NO: 1567171 - DNA, 15 bp, Homo sapiens
caggcacgaaggtga

SEQ ID NO: 1567172 - DNA, 15 bp, Homo sapiens
acaggcacgaaggtg

SEQ ID NO: 1567173 - DNA, 15 bp, Homo sapiens
gacaggcacgaaggt

SEQ ID NO: 1567174 - DNA, 15 bp, Homo sapiens
agacaggcacgaagg

SEQ ID NO: 1567175 - DNA, 15 bp, Homo sapiens
aagacaggcacgaag

SEQ ID NO: 1567176 - DNA, 15 bp, Homo sapiens
aaagacaggcacgaa

SEQ ID NO: 1567177 - DNA, 15 bp, Homo sapiens
taaagacaggcacga

SEQ ID NO: 1567178 - DNA, 15 bp, Homo sapiens
ttaaagacaggcacg

SEQ ID NO: 1567179 - DNA, 15 bp, Homo sapiens
cttaaagacaggcac

SEQ ID NO: 1567180 - DNA, 15 bp, Homo sapiens
acttaaagacaggca

SEQ ID NO: 1567181 - DNA, 15 bp, Homo sapiens
aacttaaagacaggc

SEQ ID NO: 1567182 - DNA, 15 bp, Homo sapiens
taacttaaagacagg

SEQ ID NO: 1567183 - DNA, 15 bp, Homo sapiens
ttaacttaaagacag

SEQ ID NO: 1567184 - DNA, 15 bp, Homo sapiens
tttaacttaaagaca

SEQ ID NO: 1567185 - DNA, 15 bp, Homo sapiens
atttaacttaaagac

SEQ ID NO: 1567186 - DNA, 15 bp, Homo sapiens
catttaacttaaaga

SEQ ID NO: 1567187 - DNA, 15 bp, Homo sapiens
gcatttaacttaaag

SEQ ID NO: 1567188 - DNA, 15 bp, Homo sapiens
agcatttaacttaaa

SEQ ID NO: 1567189 - DNA, 15 bp, Homo sapiens
aagcatttaacttaa

SEQ ID NO: 1567190 - DNA, 15 bp, Homo sapiens
taagcatttaactta

SEQ ID NO: 1567191 - DNA, 15 bp, Homo sapiens
gtaagcatttaactt

SEQ ID NO: 1567192 - DNA, 15 bp, Homo sapiens
ggtaagcatttaact

SEQ ID NO: 1567193 - DNA, 15 bp, Homo sapiens
gggtaagcatttaac

SEQ ID NO: 1567194 - DNA, 15 bp, Homo sapiens
tgggtaagcatttaa

SEQ ID NO: 1567195 - DNA, 15 bp, Homo sapiens
ctgggtaagcattta

SEQ ID NO: 1567196 - DNA, 15 bp, Homo sapiens
actgggtaagcattt

SEQ ID NO: 1567197 - DNA, 15 bp, Homo sapiens
tactgggtaagcatt

SEQ ID NO: 1567198 - DNA, 15 bp, Homo sapiens
ttactgggtaagcat

SEQ ID NO: 1567199 - DNA, 15 bp, Homo sapiens
attactgggtaagca

SEQ ID NO: 1567200 - DNA, 15 bp, Homo sapiens
cattactgggtaagc

SEQ ID NO: 1567201 - DNA, 15 bp, Homo sapiens
acattactgggtaag

SEQ ID NO: 1567202 - DNA, 15 bp, Homo sapiens
cacattactgggtaa

SEQ ID NO: 1567203 - DNA, 15 bp, Homo sapiens
gcacattactgggta

SEQ ID NO: 1567204 - DNA, 15 bp, Homo sapiens
tgcacattactgggt

SEQ ID NO: 1567205 - DNA, 15 bp, Homo sapiens
gtgcacattactggg

SEQ ID NO: 1567206 - DNA, 15 bp, Homo sapiens
agtgcacattactgg

SEQ ID NO: 1567207 - DNA, 15 bp, Homo sapiens
cagtgcacattactg

SEQ ID NO: 1567208 - DNA, 15 bp, Homo sapiens
ccagtgcacattact

SEQ ID NO: 1567209 - DNA, 15 bp, Homo sapiens
accagtgcacattac

SEQ ID NO: 1567210 - DNA, 15 bp, Homo sapiens
aaccagtgcacatta

SEQ ID NO: 1567211 - DNA, 15 bp, Homo sapiens
caaccagtgcacatt

SEQ ID NO: 1567212 - DNA, 15 bp, Homo sapiens
gcaaccagtgcacat

SEQ ID NO: 1567213 - DNA, 15 bp, Homo sapiens
tgcaaccagtgcaca

SEQ ID NO: 1567214 - DNA, 15 bp, Homo sapiens
ttgcaaccagtgcac

SEQ ID NO: 1567215 - DNA, 15 bp, Homo sapiens
tttgcaaccagtgca

SEQ ID NO: 1567216 - DNA, 15 bp, Homo sapiens
ctttgcaaccagtgc

SEQ ID NO: 1567217 - DNA, 15 bp, Homo sapiens
tctttgcaaccagtg

SEQ ID NO: 1567218 - DNA, 15 bp, Homo sapiens
ctctttgcaaccagt

SEQ ID NO: 1567219 - DNA, 15 bp, Homo sapiens
cctctttgcaaccag

SEQ ID NO: 1567220 - DNA, 15 bp, Homo sapiens
ccctctttgcaacca

SEQ ID NO: 1567221 - DNA, 15 bp, Homo sapiens
gccctctttgcaacc

SEQ ID NO: 1567222 - DNA, 15 bp, Homo sapiens
tgccctctttgcaac

SEQ ID NO: 1567223 - DNA, 15 bp, Homo sapiens
ttgccctctttgcaa

SEQ ID NO: 1567224 - DNA, 15 bp, Homo sapiens
tttgccctctttgca

SEQ ID NO: 1567225 - DNA, 15 bp, Homo sapiens
ttttgccctctttgc

SEQ ID NO: 1567226 - DNA, 15 bp, Homo sapiens
attttgccctctttg

SEQ ID NO: 1567227 - DNA, 15 bp, Homo sapiens
cattttgccctcttt

SEQ ID NO: 1567228 - DNA, 15 bp, Homo sapiens
tcattttgccctctt

SEQ ID NO: 1567229 - DNA, 15 bp, Homo sapiens
ctcattttgccctct

SEQ ID NO: 1567230 - DNA, 15 bp, Homo sapiens
tctcattttgccctc

SEQ ID NO: 1567231 - DNA, 15 bp, Homo sapiens
atctcattttgccct

SEQ ID NO: 1567232 - DNA, 15 bp, Homo sapiens
tatctcattttgccc

SEQ ID NO: 1567233 - DNA, 15 bp, Homo sapiens
atatctcattttgcc

SEQ ID NO: 1567234 - DNA, 15 bp, Homo sapiens
aatatctcattttgc

SEQ ID NO: 1567235 - DNA, 15 bp, Homo sapiens
caatatctcattttg

SEQ ID NO: 1567236 - DNA, 15 bp, Homo sapiens
acaatatctcatttt

SEQ ID NO: 1567237 - DNA, 15 bp, Homo sapiens
cacaatatctcattt

SEQ ID NO: 1567238 - DNA, 15 bp, Homo sapiens
tcacaatatctcatt

SEQ ID NO: 1567239 - DNA, 15 bp, Homo sapiens
atcacaatatctcat

SEQ ID NO: 1567240 - DNA, 15 bp, Homo sapiens
tatcacaatatctca

SEQ ID NO: 1567241 - DNA, 15 bp, Homo sapiens
ctatcacaatatctc

SEQ ID NO: 1567242 - DNA, 15 bp, Homo sapiens
actatcacaatatct

SEQ ID NO: 1567243 - DNA, 15 bp, Homo sapiens
cactatcacaatatc

SEQ ID NO: 1567244 - DNA, 15 bp, Homo sapiens
tcactatcacaatat

SEQ ID NO: 1567245 - DNA, 15 bp, Homo sapiens
atcactatcacaata

SEQ ID NO: 1567246 - DNA, 15 bp, Homo sapiens
aatcactatcacaat

SEQ ID NO: 1567247 - DNA, 15 bp, Homo sapiens
aaatcactatcacaa

SEQ ID NO: 1567248 - DNA, 15 bp, Homo sapiens
aaaatcactatcaca

SEQ ID NO: 1567249 - DNA, 15 bp, Homo sapiens
taaaatcactatcac

SEQ ID NO: 1567250 - DNA, 15 bp, Homo sapiens
ctaaaatcactatca

SEQ ID NO: 1567251 - DNA, 15 bp, Homo sapiens
gctaaaatcactatc

SEQ ID NO: 1567252 - DNA, 15 bp, Homo sapiens
agctaaaatcactat

SEQ ID NO: 1567253 - DNA, 15 bp, Homo sapiens
aagctaaaatcacta

SEQ ID NO: 1567254 - DNA, 15 bp, Homo sapiens
aaagctaaaatcact

SEQ ID NO: 1567255 - DNA, 15 bp, Homo sapiens
caaagctaaaatcac

SEQ ID NO: 1567256 - DNA, 15 bp, Homo sapiens
tcaaagctaaaatca

SEQ ID NO: 1567257 - DNA, 15 bp, Homo sapiens
ctcaaagctaaaatc

SEQ ID NO: 1567258 - DNA, 15 bp, Homo sapiens
tctcaaagctaaaat

SEQ ID NO: 1567259 - DNA, 15 bp, Homo sapiens
gtctcaaagctaaaa

SEQ ID NO: 1567260 - DNA, 15 bp, Homo sapiens
tgtctcaaagctaaa

SEQ ID NO: 1567261 - DNA, 15 bp, Homo sapiens
ctgtctcaaagctaa

SEQ ID NO: 1567262 - DNA, 15 bp, Homo sapiens
actgtctcaaagcta

SEQ ID NO: 1567263 - DNA, 15 bp, Homo sapiens
tactgtctcaaagct

SEQ ID NO: 1567264 - DNA, 15 bp, Homo sapiens
ctactgtctcaaagc

SEQ ID NO: 1567265 - DNA, 15 bp, Homo sapiens
cctactgtctcaaag

SEQ ID NO: 1567266 - DNA, 15 bp, Homo sapiens
acctactgtctcaaa

SEQ ID NO: 1567267 - DNA, 15 bp, Homo sapiens
aacctactgtctcaa

SEQ ID NO: 1567268 - DNA, 15 bp, Homo sapiens
aaacctactgtctca

SEQ ID NO: 1567269 - DNA, 15 bp, Homo sapiens
taaacctactgtctc

SEQ ID NO: 1567270 - DNA, 15 bp, Homo sapiens
ttaaacctactgtct

SEQ ID NO: 1567271 - DNA, 15 bp, Homo sapiens
attaaacctactgtc

SEQ ID NO: 1567272 - DNA, 15 bp, Homo sapiens
cattaaacctactgt

SEQ ID NO: 1567273 - DNA, 15 bp, Homo sapiens
tcattaaacctactg

SEQ ID NO: 1567274 - DNA, 15 bp, Homo sapiens
ctcattaaacctact

SEQ ID NO: 1567275 - DNA, 15 bp, Homo sapiens
cctcattaaacctac

SEQ ID NO: 1567276 - DNA, 15 bp, Homo sapiens
ccctcattaaaccta

SEQ ID NO: 1567277 - DNA, 15 bp, Homo sapiens
accctcattaaacct

SEQ ID NO: 1567278 - DNA, 15 bp, Homo sapiens
aaccctcattaaacc

SEQ ID NO: 1567279 - DNA, 15 bp, Homo sapiens
taaccctcattaaac

SEQ ID NO: 1567280 - DNA, 15 bp, Homo sapiens
ttaaccctcattaaa

SEQ ID NO: 1567281 - DNA, 15 bp, Homo sapiens
cttaaccctcattaa

SEQ ID NO: 1567282 - DNA, 15 bp, Homo sapiens
tcttaaccctcatta

SEQ ID NO: 1567283 - DNA, 15 bp, Homo sapiens
atcttaaccctcatt

SEQ ID NO: 1567284 - DNA, 15 bp, Homo sapiens
aatcttaaccctcat

SEQ ID NO: 1567285 - DNA, 15 bp, Homo sapiens
taatcttaaccctca

SEQ ID NO: 1567286 - DNA, 15 bp, Homo sapiens
ctaatcttaaccctc

SEQ ID NO: 1567287 - DNA, 15 bp, Homo sapiens
actaatcttaaccct

SEQ ID NO: 1567288 - DNA, 15 bp, Homo sapiens
aactaatcttaaccc

SEQ ID NO: 1567289 - DNA, 15 bp, Homo sapiens
aaactaatcttaacc

SEQ ID NO: 1567290 - DNA, 15 bp, Homo sapiens
aaaactaatcttaac

SEQ ID NO: 1567291 - DNA, 15 bp, Homo sapiens
caaaactaatcttaa

SEQ ID NO: 1567292 - DNA, 15 bp, Homo sapiens
tcaaaactaatctta

SEQ ID NO: 1567293 - DNA, 15 bp, Homo sapiens
gtcaaaactaatctt

SEQ ID NO: 1567294 - DNA, 15 bp, Homo sapiens
ggtcaaaactaatct

SEQ ID NO: 1567295 - DNA, 15 bp, Homo sapiens
aggtcaaaactaatc

SEQ ID NO: 1567296 - DNA, 15 bp, Homo sapiens
taggtcaaaactaat

SEQ ID NO: 1567297 - DNA, 15 bp, Homo sapiens
gtaggtcaaaactaa

SEQ ID NO: 1567298 - DNA, 15 bp, Homo sapiens
agtaggtcaaaacta

SEQ ID NO: 1567299 - DNA, 15 bp, Homo sapiens
tagtaggtcaaaact

SEQ ID NO: 1567300 - DNA, 15 bp, Homo sapiens
ctagtaggtcaaaac

SEQ ID NO: 1567301 - DNA, 15 bp, Homo sapiens
tctagtaggtcaaaa

SEQ ID NO: 1567302 - DNA, 15 bp, Homo sapiens
atctagtaggtcaaa

SEQ ID NO: 1567303 - DNA, 15 bp, Homo sapiens
gatctagtaggtcaa

SEQ ID NO: 1567304 - DNA, 15 bp, Homo sapiens
agatctagtaggtca

SEQ ID NO: 1567305 - DNA, 15 bp, Homo sapiens
tagatctagtaggtc

SEQ ID NO: 1567306 - DNA, 15 bp, Homo sapiens
atagatctagtaggt

SEQ ID NO: 1567307 - DNA, 15 bp, Homo sapiens
aatagatctagtagg

SEQ ID NO: 1567308 - DNA, 15 bp, Homo sapiens
taatagatctagtag

SEQ ID NO: 1567309 - DNA, 15 bp, Homo sapiens
ctaatagatctagta

SEQ ID NO: 1567310 - DNA, 15 bp, Homo sapiens
tctaatagatctagt

SEQ ID NO: 1567311 - DNA, 15 bp, Homo sapiens
ttctaatagatctag

SEQ ID NO: 1567312 - DNA, 15 bp, Homo sapiens
tttctaatagatcta

SEQ ID NO: 1567313 - DNA, 15 bp, Homo sapiens
ctttctaatagatct

SEQ ID NO: 1567314 - DNA, 15 bp, Homo sapiens
actttctaatagatc

SEQ ID NO: 1567315 - DNA, 15 bp, Homo sapiens
aactttctaatagat

SEQ ID NO: 1567316 - DNA, 15 bp, Homo sapiens
aaactttctaataga

SEQ ID NO: 1567317 - DNA, 15 bp, Homo sapiens
taaactttctaatag

SEQ ID NO: 1567318 - DNA, 15 bp, Homo sapiens
ataaactttctaata

SEQ ID NO: 1567319 - DNA, 15 bp, Homo sapiens
tataaactttctaat

SEQ ID NO: 1567320 - DNA, 15 bp, Homo sapiens
ttataaactttctaa

SEQ ID NO: 1567321 - DNA, 15 bp, Homo sapiens
cttataaactttcta

SEQ ID NO: 1567322 - DNA, 15 bp, Homo sapiens
ccttataaactttct

SEQ ID NO: 1567323 - DNA, 15 bp, Homo sapiens
tccttataaactttc

SEQ ID NO: 1567324 - DNA, 15 bp, Homo sapiens
ttccttataaacttt

SEQ ID NO: 1567325 - DNA, 15 bp, Homo sapiens
tttccttataaactt

SEQ ID NO: 1567326 - DNA, 15 bp, Homo sapiens
ctttccttataaact

SEQ ID NO: 1567327 - DNA, 15 bp, Homo sapiens
tctttccttataaac

SEQ ID NO: 1567328 - DNA, 15 bp, Homo sapiens
gtctttccttataaa

SEQ ID NO: 1567329 - DNA, 15 bp, Homo sapiens
agtctttccttataa

SEQ ID NO: 1567330 - DNA, 15 bp, Homo sapiens
aagtctttccttata

SEQ ID NO: 1567331 - DNA, 15 bp, Homo sapiens
aaagtctttccttat

SEQ ID NO: 1567332 - DNA, 15 bp, Homo sapiens
aaaagtctttcctta

SEQ ID NO: 1567333 - DNA, 15 bp, Homo sapiens
taaaagtctttcctt

SEQ ID NO: 1567334 - DNA, 15 bp, Homo sapiens
ttaaaagtctttcct

SEQ ID NO: 1567335 - DNA, 15 bp, Homo sapiens
tttaaaagtctttcc

SEQ ID NO: 1567336 - DNA, 15 bp, Homo sapiens
ttttaaaagtctttc

SEQ ID NO: 1567337 - DNA, 15 bp, Homo sapiens
tttttaaaagtcttt

SEQ ID NO: 1567338 - DNA, 15 bp, Homo sapiens
ttttttaaaagtctt

SEQ ID NO: 1567339 - DNA, 15 bp, Homo sapiens
attttttaaaagtct

SEQ ID NO: 1567340 - DNA, 15 bp, Homo sapiens
gattttttaaaagtc

SEQ ID NO: 1567341 - DNA, 15 bp, Homo sapiens
agattttttaaaagt

SEQ ID NO: 1567342 - DNA, 15 bp, Homo sapiens
cagattttttaaaag

SEQ ID NO: 1567343 - DNA, 15 bp, Homo sapiens
ccagattttttaaaa

SEQ ID NO: 1567344 - DNA, 15 bp, Homo sapiens
accagattttttaaa

SEQ ID NO: 1567345 - DNA, 15 bp, Homo sapiens
aaccagattttttaa

SEQ ID NO: 1567346 - DNA, 15 bp, Homo sapiens
caaccagatttttta

SEQ ID NO: 1567347 - DNA, 15 bp, Homo sapiens
tcaaccagatttttt

SEQ ID NO: 1567348 - DNA, 15 bp, Homo sapiens
atcaaccagattttt

SEQ ID NO: 1567349 - DNA, 15 bp, Homo sapiens
aatcaaccagatttt

SEQ ID NO: 1567350 - DNA, 15 bp, Homo sapiens
aaatcaaccagattt

SEQ ID NO: 1567351 - DNA, 15 bp, Homo sapiens
taaatcaaccagatt

SEQ ID NO: 1567352 - DNA, 15 bp, Homo sapiens
ataaatcaaccagat

SEQ ID NO: 1567353 - DNA, 15 bp, Homo sapiens
aataaatcaaccaga

SEQ ID NO: 1567354 - DNA, 15 bp, Homo sapiens
aaataaatcaaccag

SEQ ID NO: 1567355 - DNA, 15 bp, Homo sapiens
taaataaatcaacca

SEQ ID NO: 1567356 - DNA, 15 bp, Homo sapiens
ttaaataaatcaacc

SEQ ID NO: 1567357 - DNA, 15 bp, Homo sapiens
cttaaataaatcaac

SEQ ID NO: 1567358 - DNA, 15 bp, Homo sapiens
acttaaataaatcaa

SEQ ID NO: 1567359 - DNA, 15 bp, Homo sapiens
cacttaaataaatca

SEQ ID NO: 1567360 - DNA, 15 bp, Homo sapiens
ccacttaaataaatc

SEQ ID NO: 1567361 - DNA, 15 bp, Homo sapiens
accacttaaataaat

SEQ ID NO: 1567362 - DNA, 15 bp, Homo sapiens
aaccacttaaataaa

SEQ ID NO: 1567363 - DNA, 15 bp, Homo sapiens
aaaccacttaaataa

SEQ ID NO: 1567364 - DNA, 15 bp, Homo sapiens
taaaccacttaaata

SEQ ID NO: 1567365 - DNA, 15 bp, Homo sapiens
ataaaccacttaaat

SEQ ID NO: 1567366 - DNA, 15 bp, Homo sapiens
aataaaccacttaaa

SEQ ID NO: 1567367 - DNA, 15 bp, Homo sapiens
aaataaaccacttaa

SEQ ID NO: 1567368 - DNA, 15 bp, Homo sapiens
aaaataaaccactta

SEQ ID NO: 1567369 - DNA, 15 bp, Homo sapiens
caaaataaaccactt

SEQ ID NO: 1567370 - DNA, 15 bp, Homo sapiens
tcaaaataaaccact

SEQ ID NO: 1567371 - DNA, 15 bp, Homo sapiens
atcaaaataaaccac

SEQ ID NO: 1567372 - DNA, 15 bp, Homo sapiens
catcaaaataaacca

SEQ ID NO: 1567373 - DNA, 15 bp, Homo sapiens
tcatcaaaataaacc

SEQ ID NO: 1567374 - DNA, 15 bp, Homo sapiens
atcatcaaaataaac

SEQ ID NO: 1567375 - DNA, 15 bp, Homo sapiens
gatcatcaaaataaa

SEQ ID NO: 1567376 - DNA, 15 bp, Homo sapiens
tgatcatcaaaataa

SEQ ID NO: 1567377 - DNA, 15 bp, Homo sapiens
atgatcatcaaaata

SEQ ID NO: 1567378 - DNA, 15 bp, Homo sapiens
aatgatcatcaaaat

SEQ ID NO: 1567379 - DNA, 15 bp, Homo sapiens
caatgatcatcaaaa

SEQ ID NO: 1567380 - DNA, 15 bp, Homo sapiens
gcaatgatcatcaaa

SEQ ID NO: 1567381 - DNA, 15 bp, Homo sapiens
agcaatgatcatcaa

SEQ ID NO: 1567382 - DNA, 15 bp, Homo sapiens
gagcaatgatcatca

SEQ ID NO: 1567383 - DNA, 15 bp, Homo sapiens
tgagcaatgatcatc

SEQ ID NO: 1567384 - DNA, 15 bp, Homo sapiens
atgagcaatgatcat

SEQ ID NO: 1567385 - DNA, 15 bp, Homo sapiens
aatgagcaatgatca

SEQ ID NO: 1567386 - DNA, 15 bp, Homo sapiens
aaatgagcaatgatc

SEQ ID NO: 1567387 - DNA, 15 bp, Homo sapiens
aaaatgagcaatgat

SEQ ID NO: 1567388 - DNA, 15 bp, Homo sapiens
gaaaatgagcaatga

SEQ ID NO: 1567389 - DNA, 15 bp, Homo sapiens
ggaaaatgagcaatg

SEQ ID NO: 1567390 - DNA, 15 bp, Homo sapiens
aggaaaatgagcaat

SEQ ID NO: 1567391 - DNA, 15 bp, Homo sapiens
gaggaaaatgagcaa

SEQ ID NO: 1567392 - DNA, 15 bp, Homo sapiens
tgaggaaaatgagca

SEQ ID NO: 1567393 - DNA, 15 bp, Homo sapiens
gtgaggaaaatgagc

SEQ ID NO: 1567394 - DNA, 15 bp, Homo sapiens
agtgaggaaaatgag

SEQ ID NO: 1567395 - DNA, 15 bp, Homo sapiens
aagtgaggaaaatga

SEQ ID NO: 1567396 - DNA, 15 bp, Homo sapiens
taagtgaggaaaatg

SEQ ID NO: 1567397 - DNA, 15 bp, Homo sapiens
ctaagtgaggaaaat

SEQ ID NO: 1567398 - DNA, 15 bp, Homo sapiens
tctaagtgaggaaaa

SEQ ID NO: 1567399 - DNA, 15 bp, Homo sapiens
ttctaagtgaggaaa

SEQ ID NO: 1567400 - DNA, 15 bp, Homo sapiens
cttctaagtgaggaa

SEQ ID NO: 1567401 - DNA, 15 bp, Homo sapiens
gcttctaagtgagga

SEQ ID NO: 1567402 - DNA, 15 bp, Homo sapiens
tgcttctaagtgagg

SEQ ID NO: 1567403 - DNA, 15 bp, Homo sapiens
ttgcttctaagtgag

SEQ ID NO: 1567404 - DNA, 15 bp, Homo sapiens
tttgcttctaagtga

SEQ ID NO: 1567405 - DNA, 15 bp, Homo sapiens
gtttgcttctaagtg

SEQ ID NO: 1567406 - DNA, 15 bp, Homo sapiens
agtttgcttctaagt

SEQ ID NO: 1567407 - DNA, 15 bp, Homo sapiens
tagtttgcttctaag

SEQ ID NO: 1567408 - DNA, 15 bp, Homo sapiens
atagtttgcttctaa

SEQ ID NO: 1567409 - DNA, 15 bp, Homo sapiens
aatagtttgcttcta

SEQ ID NO: 1567410 - DNA, 15 bp, Homo sapiens
taatagtttgcttct

SEQ ID NO: 1567411 - DNA, 15 bp, Homo sapiens
ctaatagtttgcttc

SEQ ID NO: 1567412 - DNA, 15 bp, Homo sapiens
tctaatagtttgctt

SEQ ID NO: 1567413 - DNA, 15 bp, Homo sapiens
gtctaatagtttgct

SEQ ID NO: 1567414 - DNA, 15 bp, Homo sapiens
agtctaatagtttgc

SEQ ID NO: 1567415 - DNA, 15 bp, Homo sapiens
cagtctaatagtttg

SEQ ID NO: 1567416 - DNA, 15 bp, Homo sapiens
gcagtctaatagttt

SEQ ID NO: 1567417 - DNA, 15 bp, Homo sapiens
agcagtctaatagtt

SEQ ID NO: 1567418 - DNA, 15 bp, Homo sapiens
tagcagtctaatagt

SEQ ID NO: 1567419 - DNA, 15 bp, Homo sapiens
atagcagtctaatag

SEQ ID NO: 1567420 - DNA, 15 bp, Homo sapiens
tatagcagtctaata

SEQ ID NO: 1567421 - DNA, 15 bp, Homo sapiens
atatagcagtctaat

SEQ ID NO: 1567422 - DNA, 15 bp, Homo sapiens
gatatagcagtctaa

SEQ ID NO: 1567423 - DNA, 15 bp, Homo sapiens
agatatagcagtcta

SEQ ID NO: 1567424 - DNA, 15 bp, Homo sapiens
tagatatagcagtct

SEQ ID NO: 1567425 - DNA, 15 bp, Homo sapiens
ttagatatagcagtc

SEQ ID NO: 1567426 - DNA, 15 bp, Homo sapiens
tttagatatagcagt

SEQ ID NO: 1567427 - DNA, 15 bp, Homo sapiens
atttagatatagcag

SEQ ID NO: 1567428 - DNA, 15 bp, Homo sapiens
gatttagatatagca

SEQ ID NO: 1567429 - DNA, 15 bp, Homo sapiens
tgatttagatatagc

SEQ ID NO: 1567430 - DNA, 15 bp, Homo sapiens
ctgatttagatatag

SEQ ID NO: 1567431 - DNA, 15 bp, Homo sapiens
gctgatttagatata

SEQ ID NO: 1567432 - DNA, 15 bp, Homo sapiens
tgctgatttagatat

SEQ ID NO: 1567433 - DNA, 15 bp, Homo sapiens
atgctgatttagata

SEQ ID NO: 1567434 - DNA, 15 bp, Homo sapiens
tatgctgatttagat

SEQ ID NO: 1567435 - DNA, 15 bp, Homo sapiens
atatgctgatttaga

SEQ ID NO: 1567436 - DNA, 15 bp, Homo sapiens
gatatgctgatttag

SEQ ID NO: 1567437 - DNA, 15 bp, Homo sapiens
agatatgctgattta

SEQ ID NO: 1567438 - DNA, 15 bp, Homo sapiens
cagatatgctgattt

SEQ ID NO: 1567439 - DNA, 15 bp, Homo sapiens
acagatatgctgatt

SEQ ID NO: 1567440 - DNA, 15 bp, Homo sapiens
aacagatatgctgat

SEQ ID NO: 1567441 - DNA, 15 bp, Homo sapiens
aaacagatatgctga

SEQ ID NO: 1567442 - DNA, 15 bp, Homo sapiens
aaaacagatatgctg

SEQ ID NO: 1567443 - DNA, 15 bp, Homo sapiens
caaaacagatatgct

SEQ ID NO: 1567444 - DNA, 15 bp, Homo sapiens
ccaaaacagatatgc

SEQ ID NO: 1567445 - DNA, 15 bp, Homo sapiens
accaaaacagatatg

SEQ ID NO: 1567446 - DNA, 15 bp, Homo sapiens
aaccaaaacagatat

SEQ ID NO: 1567447 - DNA, 15 bp, Homo sapiens
taaaccaaaacagat

SEQ ID NO: 1567448 - DNA, 15 bp, Homo sapiens
gtaaaccaaaacaga

SEQ ID NO: 1567449 - DNA, 15 bp, Homo sapiens
agtaaaccaaaacag

SEQ ID NO: 1567450 - DNA, 15 bp, Homo sapiens
aagtaaaccaaaaca

SEQ ID NO: 1567451 - DNA, 15 bp, Homo sapiens
aaagtaaaccaaaac

SEQ ID NO: 1567452 - DNA, 15 bp, Homo sapiens
aaaagtaaaccaaaa

SEQ ID NO: 1567453 - DNA, 15 bp, Homo sapiens
aaaaagtaaaccaaa

SEQ ID NO: 1567454 - DNA, 15 bp, Homo sapiens
taaaaagtaaaccaa

SEQ ID NO: 1567455 - DNA, 15 bp, Homo sapiens
ctaaaaagtaaacca

SEQ ID NO: 1567456 - DNA, 15 bp, Homo sapiens
ctactaaaaagtaaa

SEQ ID NO: 1567457 - DNA, 15 bp, Homo sapiens
tctactaaaaagtaa

SEQ ID NO: 1567458 - DNA, 15 bp, Homo sapiens
ctctactaaaaagta

SEQ ID NO: 1567459 - DNA, 15 bp, Homo sapiens
gctctactaaaaagt

SEQ ID NO: 1567460 - DNA, 15 bp, Homo sapiens
agctctactaaaaag

SEQ ID NO: 1567461 - DNA, 15 bp, Homo sapiens
aagctctactaaaaa

SEQ ID NO: 1567462 - DNA, 15 bp, Homo sapiens
aaagctctactaaaa

SEQ ID NO: 1567463 - DNA, 15 bp, Homo sapiens
aaaagctctactaaa

SEQ ID NO: 1567464 - DNA, 15 bp, Homo sapiens
caaaagctctactaa

SEQ ID NO: 1567465 - DNA, 15 bp, Homo sapiens
acaaaagctctacta

SEQ ID NO: 1567466 - DNA, 15 bp, Homo sapiens
tacaaaagctctact

SEQ ID NO: 1567467 - DNA, 15 bp, Homo sapiens
atacaaaagctctac

SEQ ID NO: 1567468 - DNA, 15 bp, Homo sapiens
aatacaaaagctcta

SEQ ID NO: 1567469 - DNA, 15 bp, Homo sapiens
aaatacaaaagctct

SEQ ID NO: 1567470 - DNA, 15 bp, Homo sapiens
taaatacaaaagctc

SEQ ID NO: 1567471 - DNA, 15 bp, Homo sapiens
ataaatacaaaagct

SEQ ID NO: 1567472 - DNA, 15 bp, Homo sapiens
gataaatacaaaagc

SEQ ID NO: 1567473 - DNA, 15 bp, Homo sapiens
ggataaatacaaaag

SEQ ID NO: 1567474 - DNA, 15 bp, Homo sapiens
tggataaatacaaaa

SEQ ID NO: 1567475 - DNA, 15 bp, Homo sapiens
gtggataaatacaaa

SEQ ID NO: 1567476 - DNA, 15 bp, Homo sapiens
tgtggataaatacaa

SEQ ID NO: 1567477 - DNA, 15 bp, Homo sapiens
ctgtggataaataca

SEQ ID NO: 1567478 - DNA, 15 bp, Homo sapiens
gctgtggataaatac

SEQ ID NO: 1567479 - DNA, 15 bp, Homo sapiens
agctgtggataaata

SEQ ID NO: 1567480 - DNA, 15 bp, Homo sapiens
cagctgtggataaat

SEQ ID NO: 1567481 - DNA, 15 bp, Homo sapiens
tcagctgtggataaa

SEQ ID NO: 1567482 - DNA, 15 bp, Homo sapiens
ctcagctgtggataa

SEQ ID NO: 1567483 - DNA, 15 bp, Homo sapiens
actcagctgtggata

SEQ ID NO: 1567484 - DNA, 15 bp, Homo sapiens
cactcagctgtggat

SEQ ID NO: 1567485 - DNA, 15 bp, Homo sapiens
tcactcagctgtgga

SEQ ID NO: 1567486 - DNA, 15 bp, Homo sapiens
ttcactcagctgtgg

SEQ ID NO: 1567487 - DNA, 15 bp, Homo sapiens
tttcactcagctgtg

SEQ ID NO: 1567488 - DNA, 15 bp, Homo sapiens
ttttcactcagctgt

SEQ ID NO: 1567489 - DNA, 15 bp, Homo sapiens
gttttcactcagctg

SEQ ID NO: 1567490 - DNA, 15 bp, Homo sapiens
tgttttcactcagct

SEQ ID NO: 1567491 - DNA, 15 bp, Homo sapiens
ttgttttcactcagc

SEQ ID NO: 1567492 - DNA, 15 bp, Homo sapiens
tttgttttcactcag

SEQ ID NO: 1567493 - DNA, 15 bp, Homo sapiens
ttttgttttcactca

SEQ ID NO: 1567494 - DNA, 15 bp, Homo sapiens
attttgttttcactc

SEQ ID NO: 1567495 - DNA, 15 bp, Homo sapiens
aattttgttttcact

SEQ ID NO: 1567496 - DNA, 15 bp, Homo sapiens
caattttgttttcac

SEQ ID NO: 1567497 - DNA, 15 bp, Homo sapiens
tcaattttgttttca

SEQ ID NO: 1567498 - DNA, 15 bp, Homo sapiens
gtcaattttgttttc

SEQ ID NO: 1567499 - DNA, 15 bp, Homo sapiens
ggtcaattttgtttt

SEQ ID NO: 1567500 - DNA, 15 bp, Homo sapiens
aggtcaattttgttt

SEQ ID NO: 1567501 - DNA, 15 bp, Homo sapiens
aaggtcaattttgtt

SEQ ID NO: 1567502 - DNA, 15 bp, Homo sapiens
gaaggtcaattttgt

SEQ ID NO: 1567503 - DNA, 15 bp, Homo sapiens
agaaggtcaattttg

SEQ ID NO: 1567504 - DNA, 15 bp, Homo sapiens
cagaaggtcaatttt

SEQ ID NO: 1567505 - DNA, 15 bp, Homo sapiens
acagaaggtcaattt

SEQ ID NO: 1567506 - DNA, 15 bp, Homo sapiens
aacagaaggtcaatt

SEQ ID NO: 1567507 - DNA, 15 bp, Homo sapiens
aaacagaaggtcaat

SEQ ID NO: 1567508 - DNA, 15 bp, Homo sapiens
taaacagaaggtcaa

SEQ ID NO: 1567509 - DNA, 15 bp, Homo sapiens
ctaaacagaaggtca

SEQ ID NO: 1567510 - DNA, 15 bp, Homo sapiens
cctaaacagaaggtc

SEQ ID NO: 1567511 - DNA, 15 bp, Homo sapiens
tcctaaacagaaggt

SEQ ID NO: 1567512 - DNA, 15 bp, Homo sapiens
ctcctaaacagaagg

SEQ ID NO: 1567513 - DNA, 15 bp, Homo sapiens
cctcctaaacagaag

SEQ ID NO: 1567514 - DNA, 15 bp, Homo sapiens
acctcctaaacagaa

SEQ ID NO: 1567515 - DNA, 15 bp, Homo sapiens
cacctcctaaacaga

SEQ ID NO: 1567516 - DNA, 15 bp, Homo sapiens
tcacctcctaaacag

SEQ ID NO: 1567517 - DNA, 15 bp, Homo sapiens
ttcacctcctaaaca

SEQ ID NO: 1567518 - DNA, 15 bp, Homo sapiens
attcacctcctaaac

SEQ ID NO: 1567519 - DNA, 15 bp, Homo sapiens
aattcacctcctaaa

SEQ ID NO: 1567520 - DNA, 15 bp, Homo sapiens
caattcacctcctaa

SEQ ID NO: 1567521 - DNA, 15 bp, Homo sapiens
acaattcacctccta

SEQ ID NO: 1567522 - DNA, 15 bp, Homo sapiens
aacaattcacctcct

SEQ ID NO: 1567523 - DNA, 15 bp, Homo sapiens
aaacaattcacctcc

SEQ ID NO: 1567524 - DNA, 15 bp, Homo sapiens
taaacaattcacctc

SEQ ID NO: 1567525 - DNA, 15 bp, Homo sapiens
gtaaacaattcacct

SEQ ID NO: 1567526 - DNA, 15 bp, Homo sapiens
agtaaacaattcacc

SEQ ID NO: 1567527 - DNA, 15 bp, Homo sapiens
gagtaaacaattcac

SEQ ID NO: 1567528 - DNA, 15 bp, Homo sapiens
agagtaaacaattca

SEQ ID NO: 1567529 - DNA, 15 bp, Homo sapiens
gagagtaaacaattc

SEQ ID NO: 1567530 - DNA, 15 bp, Homo sapiens
agagagtaaacaatt

SEQ ID NO: 1567531 - DNA, 15 bp, Homo sapiens
gagagagtaaacaat

SEQ ID NO: 1567532 - DNA, 15 bp, Homo sapiens
agagagagtaaacaa

SEQ ID NO: 1567533 - DNA, 15 bp, Homo sapiens
aagagagagtaaaca

SEQ ID NO: 1567534 - DNA, 15 bp, Homo sapiens
taagagagagtaaac

SEQ ID NO: 1567535 - DNA, 15 bp, Homo sapiens
ttaagagagagtaaa

SEQ ID NO: 1567536 - DNA, 15 bp, Homo sapiens
cttaagagagagtaa

SEQ ID NO: 1567537 - DNA, 15 bp, Homo sapiens
ccttaagagagagta

SEQ ID NO: 1567538 - DNA, 15 bp, Homo sapiens
tccttaagagagagt

SEQ ID NO: 1567539 - DNA, 15 bp, Homo sapiens
gtccttaagagagag

SEQ ID NO: 1567540 - DNA, 15 bp, Homo sapiens
agtccttaagagaga

SEQ ID NO: 1567541 - DNA, 15 bp, Homo sapiens
tagtccttaagagag

SEQ ID NO: 1567542 - DNA, 15 bp, Homo sapiens
ttagtccttaagaga

SEQ ID NO: 1567543 - DNA, 15 bp, Homo sapiens
tttagtccttaagag

SEQ ID NO: 1567544 - DNA, 15 bp, Homo sapiens
ttttagtccttaaga

SEQ ID NO: 1567545 - DNA, 15 bp, Homo sapiens
tttttagtccttaag

SEQ ID NO: 1567546 - DNA, 15 bp, Homo sapiens
ttttttagtccttaa

SEQ ID NO: 1567547 - DNA, 15 bp, Homo sapiens
attttttagtcctta

SEQ ID NO: 1567548 - DNA, 15 bp, Homo sapiens
tattttttagtcctt

SEQ ID NO: 1567549 - DNA, 15 bp, Homo sapiens
atattttttagtcct

SEQ ID NO: 1567550 - DNA, 15 bp, Homo sapiens
aatattttttagtcc

SEQ ID NO: 1567551 - DNA, 15 bp, Homo sapiens
taatattttttagtc

SEQ ID NO: 1567552 - DNA, 15 bp, Homo sapiens
ttaatattttttagt

SEQ ID NO: 1567553 - DNA, 15 bp, Homo sapiens
gttaatattttttag

SEQ ID NO: 1567554 - DNA, 15 bp, Homo sapiens
ggttaatatttttta

SEQ ID NO: 1567555 - DNA, 15 bp, Homo sapiens
aggttaatatttttt

SEQ ID NO: 1567556 - DNA, 15 bp, Homo sapiens
gaggttaatattttt

SEQ ID NO: 1567557 - DNA, 15 bp, Homo sapiens
tgaggttaatatttt

SEQ ID NO: 1567558 - DNA, 15 bp, Homo sapiens
ttgaggttaatattt

SEQ ID NO: 1567559 - DNA, 15 bp, Homo sapiens
tttgaggttaatatt

SEQ ID NO: 1567560 - DNA, 15 bp, Homo sapiens
ctttgaggttaatat

SEQ ID NO: 1567561 - DNA, 15 bp, Homo sapiens
actttgaggttaata

SEQ ID NO: 1567562 - DNA, 15 bp, Homo sapiens
cactttgaggttaat

SEQ ID NO: 1567563 - DNA, 15 bp, Homo sapiens
acactttgaggttaa

SEQ ID NO: 1567564 - DNA, 15 bp, Homo sapiens
aacactttgaggtta

SEQ ID NO: 1567565 - DNA, 15 bp, Homo sapiens
gaacactttgaggtt

SEQ ID NO: 1567566 - DNA, 15 bp, Homo sapiens
tgaacactttgaggt

SEQ ID NO: 1567567 - DNA, 15 bp, Homo sapiens
ttgaacactttgagg

SEQ ID NO: 1567568 - DNA, 15 bp, Homo sapiens
tttgaacactttgag

SEQ ID NO: 1567569 - DNA, 15 bp, Homo sapiens
atttgaacactttga

SEQ ID NO: 1567570 - DNA, 15 bp, Homo sapiens
aatttgaacactttg

SEQ ID NO: 1567571 - DNA, 15 bp, Homo sapiens
aaatttgaacacttt

SEQ ID NO: 1567572 - DNA, 15 bp, Homo sapiens
taaatttgaacactt

SEQ ID NO: 1567573 - DNA, 15 bp, Homo sapiens
ttaaatttgaacact

SEQ ID NO: 1567574 - DNA, 15 bp, Homo sapiens
tttaaatttgaacac

SEQ ID NO: 1567575 - DNA, 15 bp, Homo sapiens
atttaaatttgaaca

SEQ ID NO: 1567576 - DNA, 15 bp, Homo sapiens
tatttaaatttgaac

SEQ ID NO: 1567577 - DNA, 15 bp, Homo sapiens
ctatttaaatttgaa

SEQ ID NO: 1567578 - DNA, 15 bp, Homo sapiens
actatttaaatttga

SEQ ID NO: 1567579 - DNA, 15 bp, Homo sapiens
aactatttaaatttg

SEQ ID NO: 1567580 - DNA, 15 bp, Homo sapiens
gaactatttaaattt

SEQ ID NO: 1567581 - DNA, 15 bp, Homo sapiens
tgaactatttaaatt

SEQ ID NO: 1567582 - DNA, 15 bp, Homo sapiens
ttgaactatttaaat

SEQ ID NO: 1567583 - DNA, 15 bp, Homo sapiens
tttgaactatttaaa

SEQ ID NO: 1567584 - DNA, 15 bp, Homo sapiens
atttgaactatttaa

SEQ ID NO: 1567585 - DNA, 15 bp, Homo sapiens
tatttgaactattta

SEQ ID NO: 1567586 - DNA, 15 bp, Homo sapiens
ttatttgaactattt

SEQ ID NO: 1567587 - DNA, 15 bp, Homo sapiens
tttatttgaactatt

SEQ ID NO: 1567588 - DNA, 15 bp, Homo sapiens
atttatttgaactat

SEQ ID NO: 1567589 - DNA, 15 bp, Homo sapiens
aatttatttgaacta

SEQ ID NO: 1567590 - DNA, 15 bp, Homo sapiens
gaatttatttgaact

SEQ ID NO: 1567591 - DNA, 15 bp, Homo sapiens
agaatttatttgaac

SEQ ID NO: 1567592 - DNA, 15 bp, Homo sapiens
aagaatttatttgaa

SEQ ID NO: 1567593 - DNA, 15 bp, Homo sapiens
aaagaatttatttga

SEQ ID NO: 1567594 - DNA, 15 bp, Homo sapiens
aaaagaatttatttg

SEQ ID NO: 1567595 - DNA, 15 bp, Homo sapiens
gaaaagaatttattt

SEQ ID NO: 1567596 - DNA, 15 bp, Homo sapiens
ggaaaagaatttatt

SEQ ID NO: 1567597 - DNA, 15 bp, Homo sapiens
aggaaaagaatttat

SEQ ID NO: 1567598 - DNA, 15 bp, Homo sapiens
caggaaaagaattta

SEQ ID NO: 1567599 - DNA, 15 bp, Homo sapiens
tcaggaaaagaattt

SEQ ID NO: 1567600 - DNA, 15 bp, Homo sapiens
atcaggaaaagaatt

SEQ ID NO: 1567601 - DNA, 15 bp, Homo sapiens
gatcaggaaaagaat

SEQ ID NO: 1567602 - DNA, 15 bp, Homo sapiens
agatcaggaaaagaa

SEQ ID NO: 1567603 - DNA, 15 bp, Homo sapiens
tagatcaggaaaaga

SEQ ID NO: 1567604 - DNA, 15 bp, Homo sapiens
ctagatcaggaaaag

SEQ ID NO: 1567605 - DNA, 15 bp, Homo sapiens
cctagatcaggaaaa

SEQ ID NO: 1567606 - DNA, 15 bp, Homo sapiens
gcctagatcaggaaa

SEQ ID NO: 1567607 - DNA, 15 bp, Homo sapiens
ggcctagatcaggaa

SEQ ID NO: 1567608 - DNA, 15 bp, Homo sapiens
aggcctagatcagga

SEQ ID NO: 1567609 - DNA, 15 bp, Homo sapiens
aaggcctagatcagg

SEQ ID NO: 1567610 - DNA, 15 bp, Homo sapiens
gaaggcctagatcag

SEQ ID NO: 1567611 - DNA, 15 bp, Homo sapiens
agaaggcctagatca

SEQ ID NO: 1567612 - DNA, 15 bp, Homo sapiens
tagaaggcctagatc

SEQ ID NO: 1567613 - DNA, 15 bp, Homo sapiens
atagaaggcctagat

SEQ ID NO: 1567614 - DNA, 15 bp, Homo sapiens
tatagaaggcctaga

SEQ ID NO: 1567615 - DNA, 15 bp, Homo sapiens
atatagaaggcctag

SEQ ID NO: 1567616 - DNA, 15 bp, Homo sapiens
gatatagaaggccta

SEQ ID NO: 1567617 - DNA, 15 bp, Homo sapiens
tgatatagaaggcct

SEQ ID NO: 1567618 - DNA, 15 bp, Homo sapiens
atgatatagaaggcc

SEQ ID NO: 1567619 - DNA, 15 bp, Homo sapiens
catgatatagaaggc

SEQ ID NO: 1567620 - DNA, 15 bp, Homo sapiens
acatgatatagaagg

SEQ ID NO: 1567621 - DNA, 15 bp, Homo sapiens
gacatgatatagaag

SEQ ID NO: 1567622 - DNA, 15 bp, Homo sapiens
tgacatgatatagaa

SEQ ID NO: 1567623 - DNA, 15 bp, Homo sapiens
atgacatgatataga

SEQ ID NO: 1567624 - DNA, 15 bp, Homo sapiens
aatgacatgatatag

SEQ ID NO: 1567625 - DNA, 15 bp, Homo sapiens
taatgacatgatata

SEQ ID NO: 1567626 - DNA, 15 bp, Homo sapiens
ataatgacatgatat

SEQ ID NO: 1567627 - DNA, 15 bp, Homo sapiens
aataatgacatgata

SEQ ID NO: 1567628 - DNA, 15 bp, Homo sapiens
aaataatgacatgat

SEQ ID NO: 1567629 - DNA, 15 bp, Homo sapiens
aaaataatgacatga

SEQ ID NO: 1567630 - DNA, 15 bp, Homo sapiens
gaaaataatgacatg

SEQ ID NO: 1567631 - DNA, 15 bp, Homo sapiens
agaaaataatgacat

SEQ ID NO: 1567632 - DNA, 15 bp, Homo sapiens
aagaaaataatgaca

SEQ ID NO: 1567633 - DNA, 15 bp, Homo sapiens
aaagaaaataatgac

SEQ ID NO: 1567634 - DNA, 15 bp, Homo sapiens
aaaagaaaataatga

SEQ ID NO: 1567635 - DNA, 15 bp, Homo sapiens
aaaaagaaaataatg

SEQ ID NO: 1567636 - DNA, 15 bp, Homo sapiens
aaaaaagaaaataat

SEQ ID NO: 1567637 - DNA, 15 bp, Homo sapiens
attaaaaaaagaaaa

SEQ ID NO: 1567638 - DNA, 15 bp, Homo sapiens
gattaaaaaaagaaa

SEQ ID NO: 1567639 - DNA, 15 bp, Homo sapiens
agattaaaaaaagaa

SEQ ID NO: 1567640 - DNA, 15 bp, Homo sapiens
gagattaaaaaaaga

SEQ ID NO: 1567641 - DNA, 15 bp, Homo sapiens
tgagattaaaaaaag

SEQ ID NO: 1567642 - DNA, 15 bp, Homo sapiens
atgagattaaaaaaa

SEQ ID NO: 1567643 - DNA, 15 bp, Homo sapiens
catgagattaaaaaa

SEQ ID NO: 1567644 - DNA, 15 bp, Homo sapiens
acatgagattaaaaa

SEQ ID NO: 1567645 - DNA, 15 bp, Homo sapiens
aacatgagattaaaa

SEQ ID NO: 1567646 - DNA, 15 bp, Homo sapiens
taacatgagattaaa

SEQ ID NO: 1567647 - DNA, 15 bp, Homo sapiens
ctaacatgagattaa

SEQ ID NO: 1567648 - DNA, 15 bp, Homo sapiens
tctaacatgagatta

SEQ ID NO: 1567649 - DNA, 15 bp, Homo sapiens
ttctaacatgagatt

SEQ ID NO: 1567650 - DNA, 15 bp, Homo sapiens
attctaacatgagat

SEQ ID NO: 1567651 - DNA, 15 bp, Homo sapiens
aattctaacatgaga

SEQ ID NO: 1567652 - DNA, 15 bp, Homo sapiens
aaattctaacatgag

SEQ ID NO: 1567653 - DNA, 15 bp, Homo sapiens
aaaattctaacatga

SEQ ID NO: 1567654 - DNA, 15 bp, Homo sapiens
taaaattctaacatg

SEQ ID NO: 1567655 - DNA, 15 bp, Homo sapiens
ctaaaattctaacat

SEQ ID NO: 1567656 - DNA, 15 bp, Homo sapiens
tctaaaattctaaca

SEQ ID NO: 1567657 - DNA, 15 bp, Homo sapiens
ctctaaaattctaac

SEQ ID NO: 1567658 - DNA, 15 bp, Homo sapiens
tctctaaaattctaa

SEQ ID NO: 1567659 - DNA, 15 bp, Homo sapiens
ctctctaaaattcta

SEQ ID NO: 1567660 - DNA, 15 bp, Homo sapiens
actctctaaaattct

SEQ ID NO: 1567661 - DNA, 15 bp, Homo sapiens
aactctctaaaattc

SEQ ID NO: 1567662 - DNA, 15 bp, Homo sapiens
taactctctaaaatt

SEQ ID NO: 1567663 - DNA, 15 bp, Homo sapiens
ctaactctctaaaat

SEQ ID NO: 1567664 - DNA, 15 bp, Homo sapiens
tctaactctctaaaa

SEQ ID NO: 1567665 - DNA, 15 bp, Homo sapiens
ttctaactctctaaa

SEQ ID NO: 1567666 - DNA, 15 bp, Homo sapiens
gttctaactctctaa

SEQ ID NO: 1567667 - DNA, 15 bp, Homo sapiens
agttctaactctcta

SEQ ID NO: 1567668 - DNA, 15 bp, Homo sapiens
gagttctaactctct

SEQ ID NO: 1567669 - DNA, 15 bp, Homo sapiens
tgagttctaactctc

SEQ ID NO: 1567670 - DNA, 15 bp, Homo sapiens
ctgagttctaactct

SEQ ID NO: 1567671 - DNA, 15 bp, Homo sapiens
actgagttctaactc

SEQ ID NO: 1567672 - DNA, 15 bp, Homo sapiens
aactgagttctaact

SEQ ID NO: 1567673 - DNA, 15 bp, Homo sapiens
taactgagttctaac

SEQ ID NO: 1567674 - DNA, 15 bp, Homo sapiens
ataactgagttctaa

SEQ ID NO: 1567675 - DNA, 15 bp, Homo sapiens
aataactgagttcta

SEQ ID NO: 1567676 - DNA, 15 bp, Homo sapiens
aaataactgagttct

SEQ ID NO: 1567677 - DNA, 15 bp, Homo sapiens
aaaataactgagttc

SEQ ID NO: 1567678 - DNA, 15 bp, Homo sapiens
aaaaataactgagtt

SEQ ID NO: 1567679 - DNA, 15 bp, Homo sapiens
taaaaataactgagt

SEQ ID NO: 1567680 - DNA, 15 bp, Homo sapiens
ataaaaataactgag

SEQ ID NO: 1567681 - DNA, 15 bp, Homo sapiens
aataaaaataactga

SEQ ID NO: 1567682 - DNA, 15 bp, Homo sapiens
taataaaaataactg

SEQ ID NO: 1567683 - DNA, 15 bp, Homo sapiens
ttaataaaaataact

SEQ ID NO: 1567684 - DNA, 15 bp, Homo sapiens
attaataaaaataac

SEQ ID NO: 1567685 - DNA, 15 bp, Homo sapiens
cattaataaaaataa

SEQ ID NO: 1567686 - DNA, 15 bp, Homo sapiens
ccattaataaaaata

SEQ ID NO: 1567687 - DNA, 15 bp, Homo sapiens
tccattaataaaaat

SEQ ID NO: 1567688 - DNA, 15 bp, Homo sapiens
ctccattaataaaaa

SEQ ID NO: 1567689 - DNA, 15 bp, Homo sapiens
actccattaataaaa

SEQ ID NO: 1567690 - DNA, 15 bp, Homo sapiens
cactccattaataaa

SEQ ID NO: 1567691 - DNA, 15 bp, Homo sapiens
acactccattaataa

SEQ ID NO: 1567692 - DNA, 15 bp, Homo sapiens
tacactccattaata

SEQ ID NO: 1567693 - DNA, 15 bp, Homo sapiens
ctacactccattaat

SEQ ID NO: 1567694 - DNA, 15 bp, Homo sapiens
gctacactccattaa

SEQ ID NO: 1567695 - DNA, 15 bp, Homo sapiens
ggctacactccatta

SEQ ID NO: 1567696 - DNA, 15 bp, Homo sapiens
cggctacactccatt

SEQ ID NO: 1567697 - DNA, 15 bp, Homo sapiens
ccggctacactccat

SEQ ID NO: 1567698 - DNA, 15 bp, Homo sapiens
cccggctacactcca

SEQ ID NO: 1567699 - DNA, 15 bp, Homo sapiens
acccggctacactcc

SEQ ID NO: 1567700 - DNA, 15 bp, Homo sapiens
aacccggctacactc

SEQ ID NO: 1567701 - DNA, 15 bp, Homo sapiens
taacccggctacact

SEQ ID NO: 1567702 - DNA, 15 bp, Homo sapiens
ctaacccggctacac

SEQ ID NO: 1567703 - DNA, 15 bp, Homo sapiens
tctaacccggctaca

SEQ ID NO: 1567704 - DNA, 15 bp, Homo sapiens
ttctaacccggctac

SEQ ID NO: 1567705 - DNA, 15 bp, Homo sapiens
tttctaacccggcta

SEQ ID NO: 1567706 - DNA, 15 bp, Homo sapiens
atttctaacccggct

SEQ ID NO: 1567707 - DNA, 15 bp, Homo sapiens
tatttctaacccggc

SEQ ID NO: 1567708 - DNA, 15 bp, Homo sapiens
ttatttctaacccgg

SEQ ID NO: 1567709 - DNA, 15 bp, Homo sapiens
attatttctaacccg

SEQ ID NO: 1567710 - DNA, 15 bp, Homo sapiens
aattatttctaaccc

SEQ ID NO: 1567711 - DNA, 15 bp, Homo sapiens
aaattatttctaacc

SEQ ID NO: 1567712 - DNA, 15 bp, Homo sapiens
aaaattatttctaac

SEQ ID NO: 1567713 - DNA, 15 bp, Homo sapiens
aaaaattatttctaa

SEQ ID NO: 1567714 - DNA, 15 bp, Homo sapiens
aaaaaattatttcta

SEQ ID NO: 1567715 - DNA, 15 bp, Homo sapiens
aaaaaaattatttct

SEQ ID NO: 1567716 - DNA, 15 bp, Homo sapiens
gaaaaaaattatttc

SEQ ID NO: 1567717 - DNA, 15 bp, Homo sapiens
ggaaaaaaattattt

SEQ ID NO: 1567718 - DNA, 15 bp, Homo sapiens
aggaaaaaaattatt

SEQ ID NO: 1567719 - DNA, 15 bp, Homo sapiens
taggaaaaaaattat

SEQ ID NO: 1567720 - DNA, 15 bp, Homo sapiens
ttaggaaaaaaatta

SEQ ID NO: 1567721 - DNA, 15 bp, Homo sapiens
cttaggaaaaaaatt

SEQ ID NO: 1567722 - DNA, 15 bp, Homo sapiens
acttaggaaaaaaat

SEQ ID NO: 1567723 - DNA, 15 bp, Homo sapiens
aacttaggaaaaaaa

SEQ ID NO: 1567724 - DNA, 15 bp, Homo sapiens
aaacttaggaaaaaa

SEQ ID NO: 1567725 - DNA, 15 bp, Homo sapiens
gaaacttaggaaaaa

SEQ ID NO: 1567726 - DNA, 15 bp, Homo sapiens
tgaaacttaggaaaa

SEQ ID NO: 1567727 - DNA, 15 bp, Homo sapiens
ctgaaacttaggaaa

SEQ ID NO: 1567728 - DNA, 15 bp, Homo sapiens
actgaaacttaggaa

SEQ ID NO: 1567729 - DNA, 15 bp, Homo sapiens
aactgaaacttagga

SEQ ID NO: 1567730 - DNA, 15 bp, Homo sapiens
caactgaaacttagg

SEQ ID NO: 1567731 - DNA, 15 bp, Homo sapiens
ccaactgaaacttag

SEQ ID NO: 1567732 - DNA, 15 bp, Homo sapiens
tccaactgaaactta

SEQ ID NO: 1567733 - DNA, 15 bp, Homo sapiens
atccaactgaaactt

SEQ ID NO: 1567734 - DNA, 15 bp, Homo sapiens
gatccaactgaaact

SEQ ID NO: 1567735 - DNA, 15 bp, Homo sapiens
tgatccaactgaaac

SEQ ID NO: 1567736 - DNA, 15 bp, Homo sapiens
atgatccaactgaaa

SEQ ID NO: 1567737 - DNA, 15 bp, Homo sapiens
catgatccaactgaa

SEQ ID NO: 1567738 - DNA, 15 bp, Homo sapiens
acatgatccaactga

SEQ ID NO: 1567739 - DNA, 15 bp, Homo sapiens
tacatgatccaactg

SEQ ID NO: 1567740 - DNA, 15 bp, Homo sapiens
atacatgatccaact

SEQ ID NO: 1567741 - DNA, 15 bp, Homo sapiens
aatacatgatccaac

SEQ ID NO: 1567742 - DNA, 15 bp, Homo sapiens
aaatacatgatccaa

SEQ ID NO: 1567743 - DNA, 15 bp, Homo sapiens
gaaatacatgatcca

SEQ ID NO: 1567744 - DNA, 15 bp, Homo sapiens
tgaaatacatgatcc

SEQ ID NO: 1567745 - DNA, 15 bp, Homo sapiens
gtgaaatacatgatc

SEQ ID NO: 1567746 - DNA, 15 bp, Homo sapiens
agtgaaatacatgat

SEQ ID NO: 1567747 - DNA, 15 bp, Homo sapiens
gagtgaaatacatga

SEQ ID NO: 1567748 - DNA, 15 bp, Homo sapiens
ggagtgaaatacatg

SEQ ID NO: 1567749 - DNA, 15 bp, Homo sapiens
gggagtgaaatacat

SEQ ID NO: 1567750 - DNA, 15 bp, Homo sapiens
agggagtgaaataca

SEQ ID NO: 1567751 - DNA, 15 bp, Homo sapiens
gagggagtgaaatac

SEQ ID NO: 1567752 - DNA, 15 bp, Homo sapiens
agagggagtgaaata

SEQ ID NO: 1567753 - DNA, 15 bp, Homo sapiens
tagagggagtgaaat

SEQ ID NO: 1567754 - DNA, 15 bp, Homo sapiens
ttagagggagtgaaa

SEQ ID NO: 1567755 - DNA, 15 bp, Homo sapiens
tttagagggagtgaa

SEQ ID NO: 1567756 - DNA, 15 bp, Homo sapiens
gtttagagggagtga

SEQ ID NO: 1567757 - DNA, 15 bp, Homo sapiens
agtttagagggagtg

SEQ ID NO: 1567758 - DNA, 15 bp, Homo sapiens
tagtttagagggagt

SEQ ID NO: 1567759 - DNA, 15 bp, Homo sapiens
atagtttagagggag

SEQ ID NO: 1567760 - DNA, 15 bp, Homo sapiens
aatagtttagaggga

SEQ ID NO: 1567761 - DNA, 15 bp, Homo sapiens
aaatagtttagaggg

SEQ ID NO: 1567762 - DNA, 15 bp, Homo sapiens
aaaatagtttagagg

SEQ ID NO: 1567763 - DNA, 15 bp, Homo sapiens
caaaatagtttagag

SEQ ID NO: 1567764 - DNA, 15 bp, Homo sapiens
gcaaaatagtttaga

SEQ ID NO: 1567765 - DNA, 15 bp, Homo sapiens
agcaaaatagtttag

SEQ ID NO: 1567766 - DNA, 15 bp, Homo sapiens
aagcaaaatagttta

SEQ ID NO: 1567767 - DNA, 15 bp, Homo sapiens
aaagcaaaatagttt

SEQ ID NO: 1567768 - DNA, 15 bp, Homo sapiens
gaaagcaaaatagtt

SEQ ID NO: 1567769 - DNA, 15 bp, Homo sapiens
ggaaagcaaaatagt

SEQ ID NO: 1567770 - DNA, 15 bp, Homo sapiens
gggaaagcaaaatag

SEQ ID NO: 1567771 - DNA, 15 bp, Homo sapiens
agggaaagcaaaata

SEQ ID NO: 1567772 - DNA, 15 bp, Homo sapiens
tagggaaagcaaaat

SEQ ID NO: 1567773 - DNA, 15 bp, Homo sapiens
atagggaaagcaaaa

SEQ ID NO: 1567774 - DNA, 15 bp, Homo sapiens
aatagggaaagcaaa

SEQ ID NO: 1567775 - DNA, 15 bp, Homo sapiens
aaatagggaaagcaa

SEQ ID NO: 1567776 - DNA, 15 bp, Homo sapiens
caaatagggaaagca

SEQ ID NO: 1567777 - DNA, 15 bp, Homo sapiens
tcaaatagggaaagc

SEQ ID NO: 1567778 - DNA, 15 bp, Homo sapiens
atcaaatagggaaag

SEQ ID NO: 1567779 - DNA, 15 bp, Homo sapiens
gatcaaatagggaaa

SEQ ID NO: 1567780 - DNA, 15 bp, Homo sapiens
agatcaaatagggaa

SEQ ID NO: 1567781 - DNA, 15 bp, Homo sapiens
cagatcaaataggga

SEQ ID NO: 1567782 - DNA, 15 bp, Homo sapiens
tcagatcaaataggg

SEQ ID NO: 1567783 - DNA, 15 bp, Homo sapiens
gtcagatcaaatagg

SEQ ID NO: 1567784 - DNA, 15 bp, Homo sapiens
agtcagatcaaatag

SEQ ID NO: 1567785 - DNA, 15 bp, Homo sapiens
gagtcagatcaaata

SEQ ID NO: 1567786 - DNA, 15 bp, Homo sapiens
tgagtcagatcaaat

SEQ ID NO: 1567787 - DNA, 15 bp, Homo sapiens
ctgagtcagatcaaa

SEQ ID NO: 1567788 - DNA, 15 bp, Homo sapiens
gctgagtcagatcaa

SEQ ID NO: 1567789 - DNA, 15 bp, Homo sapiens
tgctgagtcagatca

SEQ ID NO: 1567790 - DNA, 15 bp, Homo sapiens
atgctgagtcagatc

SEQ ID NO: 1567791 - DNA, 15 bp, Homo sapiens
aatgctgagtcagat

SEQ ID NO: 1567792 - DNA, 15 bp, Homo sapiens
aaatgctgagtcaga

SEQ ID NO: 1567793 - DNA, 15 bp, Homo sapiens
aaaatgctgagtcag

SEQ ID NO: 1567794 - DNA, 15 bp, Homo sapiens
taaaatgctgagtca

SEQ ID NO: 1567795 - DNA, 15 bp, Homo sapiens
ttaaaatgctgagtc

SEQ ID NO: 1567796 - DNA, 15 bp, Homo sapiens
tttaaaatgctgagt

SEQ ID NO: 1567797 - DNA, 15 bp, Homo sapiens
ttttaaaatgctgag

SEQ ID NO: 1567798 - DNA, 15 bp, Homo sapiens
cttttaaaatgctga

SEQ ID NO: 1567799 - DNA, 15 bp, Homo sapiens
gcttttaaaatgctg

SEQ ID NO: 1567800 - DNA, 15 bp, Homo sapiens
tgcttttaaaatgct

SEQ ID NO: 1567801 - DNA, 15 bp, Homo sapiens
gtgcttttaaaatgc

SEQ ID NO: 1567802 - DNA, 15 bp, Homo sapiens
agtgcttttaaaatg

SEQ ID NO: 1567803 - DNA, 15 bp, Homo sapiens
cagtgcttttaaaat

SEQ ID NO: 1567804 - DNA, 15 bp, Homo sapiens
tcagtgcttttaaaa

SEQ ID NO: 1567805 - DNA, 15 bp, Homo sapiens
atcagtgcttttaaa

SEQ ID NO: 1567806 - DNA, 15 bp, Homo sapiens
aatcagtgcttttaa

SEQ ID NO: 1567807 - DNA, 15 bp, Homo sapiens
taatcagtgctttta

SEQ ID NO: 1567808 - DNA, 15 bp, Homo sapiens
ttaatcagtgctttt

SEQ ID NO: 1567809 - DNA, 15 bp, Homo sapiens
gttaatcagtgcttt

SEQ ID NO: 1567810 - DNA, 15 bp, Homo sapiens
tgttaatcagtgctt

SEQ ID NO: 1567811 - DNA, 15 bp, Homo sapiens
atgttaatcagtgct

SEQ ID NO: 1567812 - DNA, 15 bp, Homo sapiens
aatgttaatcagtgc

SEQ ID NO: 1567813 - DNA, 15 bp, Homo sapiens
taatgttaatcagtg

SEQ ID NO: 1567814 - DNA, 15 bp, Homo sapiens
ttaatgttaatcagt

SEQ ID NO: 1567815 - DNA, 15 bp, Homo sapiens
tttaatgttaatcag

SEQ ID NO: 1567816 - DNA, 15 bp, Homo sapiens
atttaatgttaatca

SEQ ID NO: 1567817 - DNA, 15 bp, Homo sapiens
aatttaatgttaatc

SEQ ID NO: 1567818 - DNA, 15 bp, Homo sapiens
aaatttaatgttaat

SEQ ID NO: 1567819 - DNA, 15 bp, Homo sapiens
taaatttaatgttaa

SEQ ID NO: 1567820 - DNA, 15 bp, Homo sapiens
ttaaatttaatgtta

SEQ ID NO: 1567821 - DNA, 15 bp, Homo sapiens
attaaatttaatgtt

SEQ ID NO: 1567822 - DNA, 15 bp, Homo sapiens
aattaaatttaatgt

SEQ ID NO: 1567823 - DNA, 15 bp, Homo sapiens
aaattaaatttaatg

SEQ ID NO: 1567824 - DNA, 15 bp, Homo sapiens
aaaattaaatttaat

SEQ ID NO: 1567825 - DNA, 15 bp, Homo sapiens
aaaaattaaatttaa

SEQ ID NO: 1567826 - DNA, 15 bp, Homo sapiens
aaaaaattaaattta

SEQ ID NO: 1567827 - DNA, 15 bp, Homo sapiens
aaaaaaattaaattt

SEQ ID NO: 1567828 - DNA, 15 bp, Homo sapiens
gaaaaaaattaaatt

SEQ ID NO: 1567829 - DNA, 15 bp, Homo sapiens
agaaaaaaattaaat

SEQ ID NO: 1567830 - DNA, 15 bp, Homo sapiens
aagaaaaaaattaaa

SEQ ID NO: 1567831 - DNA, 15 bp, Homo sapiens
caaaaagaaaaaaat

SEQ ID NO: 1567832 - DNA, 15 bp, Homo sapiens
aacaaaaagaaaaaa

SEQ ID NO: 1567833 - DNA, 15 bp, Homo sapiens
aaacaaaaagaaaaa

SEQ ID NO: 1567834 - DNA, 15 bp, Homo sapiens
gcaaaacaaaaagaa

SEQ ID NO: 1567835 - DNA, 15 bp, Homo sapiens
tgcaaaacaaaaaga

SEQ ID NO: 1567836 - DNA, 15 bp, Homo sapiens
gtgcaaaacaaaaag

SEQ ID NO: 1567837 - DNA, 15 bp, Homo sapiens
tgtgcaaaacaaaaa

SEQ ID NO: 1567838 - DNA, 15 bp, Homo sapiens
ctgtgcaaaacaaaa

SEQ ID NO: 1567839 - DNA, 15 bp, Homo sapiens
tctgtgcaaaacaaa

SEQ ID NO: 1567840 - DNA, 15 bp, Homo sapiens
atctgtgcaaaacaa

SEQ ID NO: 1567841 - DNA, 15 bp, Homo sapiens
gatctgtgcaaaaca

SEQ ID NO: 1567842 - DNA, 15 bp, Homo sapiens
ggatctgtgcaaaac

SEQ ID NO: 1567843 - DNA, 15 bp, Homo sapiens
aggatctgtgcaaaa

SEQ ID NO: 1567844 - DNA, 15 bp, Homo sapiens
taggatctgtgcaaa

SEQ ID NO: 1567845 - DNA, 15 bp, Homo sapiens
ttaggatctgtgcaa

SEQ ID NO: 1567846 - DNA, 15 bp, Homo sapiens
tttaggatctgtgca

SEQ ID NO: 1567847 - DNA, 15 bp, Homo sapiens
atttaggatctgtgc

SEQ ID NO: 1567848 - DNA, 15 bp, Homo sapiens
aatttaggatctgtg

SEQ ID NO: 1567849 - DNA, 15 bp, Homo sapiens
aaatttaggatctgt

SEQ ID NO: 1567850 - DNA, 15 bp, Homo sapiens
taaatttaggatctg

SEQ ID NO: 1567851 - DNA, 15 bp, Homo sapiens
ctaaatttaggatct

SEQ ID NO: 1567852 - DNA, 15 bp, Homo sapiens
actaaatttaggatc

SEQ ID NO: 1567853 - DNA, 15 bp, Homo sapiens
aactaaatttaggat

SEQ ID NO: 1567854 - DNA, 15 bp, Homo sapiens
aaactaaatttagga

SEQ ID NO: 1567855 - DNA, 15 bp, Homo sapiens
aaaactaaatttagg

SEQ ID NO: 1567856 - DNA, 15 bp, Homo sapiens
taaaactaaatttag

SEQ ID NO: 1567857 - DNA, 15 bp, Homo sapiens
ttaaaactaaattta

SEQ ID NO: 1567858 - DNA, 15 bp, Homo sapiens
gttaaaactaaattt

SEQ ID NO: 1567859 - DNA, 15 bp, Homo sapiens
agttaaaactaaatt

SEQ ID NO: 1567860 - DNA, 15 bp, Homo sapiens
aagttaaaactaaat

SEQ ID NO: 1567861 - DNA, 15 bp, Homo sapiens
gaagttaaaactaaa

SEQ ID NO: 1567862 - DNA, 15 bp, Homo sapiens
ggaagttaaaactaa

SEQ ID NO: 1567863 - DNA, 15 bp, Homo sapiens
aggaagttaaaacta

SEQ ID NO: 1567864 - DNA, 15 bp, Homo sapiens
taggaagttaaaact

SEQ ID NO: 1567865 - DNA, 15 bp, Homo sapiens
ttaggaagttaaaac

SEQ ID NO: 1567866 - DNA, 15 bp, Homo sapiens
cttaggaagttaaaa

SEQ ID NO: 1567867 - DNA, 15 bp, Homo sapiens
gcttaggaagttaaa

SEQ ID NO: 1567868 - DNA, 15 bp, Homo sapiens
cgcttaggaagttaa

SEQ ID NO: 1567869 - DNA, 15 bp, Homo sapiens
gcgcttaggaagtta

SEQ ID NO: 1567870 - DNA, 15 bp, Homo sapiens
tgcgcttaggaagtt

SEQ ID NO: 1567871 - DNA, 15 bp, Homo sapiens
atgcgcttaggaagt

SEQ ID NO: 1567872 - DNA, 15 bp, Homo sapiens
catgcgcttaggaag

SEQ ID NO: 1567873 - DNA, 15 bp, Homo sapiens
acatgcgcttaggaa

SEQ ID NO: 1567874 - DNA, 15 bp, Homo sapiens
gacatgcgcttagga

SEQ ID NO: 1567875 - DNA, 15 bp, Homo sapiens
tgacatgcgcttagg

SEQ ID NO: 1567876 - DNA, 15 bp, Homo sapiens
ctgacatgcgcttag

SEQ ID NO: 1567877 - DNA, 15 bp, Homo sapiens
actgacatgcgctta

SEQ ID NO: 1567878 - DNA, 15 bp, Homo sapiens
tactgacatgcgctt

SEQ ID NO: 1567879 - DNA, 15 bp, Homo sapiens
atactgacatgcgct

SEQ ID NO: 1567880 - DNA, 15 bp, Homo sapiens
tatactgacatgcgc

SEQ ID NO: 1567881 - DNA, 15 bp, Homo sapiens
gtatactgacatgcg

SEQ ID NO: 1567882 - DNA, 15 bp, Homo sapiens
tgtatactgacatgc

SEQ ID NO: 1567883 - DNA, 15 bp, Homo sapiens
ttgtatactgacatg

SEQ ID NO: 1567884 - DNA, 15 bp, Homo sapiens
gttgtatactgacat

SEQ ID NO: 1567885 - DNA, 15 bp, Homo sapiens
tgttgtatactgaca

SEQ ID NO: 1567886 - DNA, 15 bp, Homo sapiens
ctgttgtatactgac

SEQ ID NO: 1567887 - DNA, 15 bp, Homo sapiens
tctgttgtatactga

SEQ ID NO: 1567888 - DNA, 15 bp, Homo sapiens
atctgttgtatactg

SEQ ID NO: 1567889 - DNA, 15 bp, Homo sapiens
catctgttgtatact

SEQ ID NO: 1567890 - DNA, 15 bp, Homo sapiens
ccatctgttgtatac

SEQ ID NO: 1567891 - DNA, 15 bp, Homo sapiens
tccatctgttgtata

SEQ ID NO: 1567892 - DNA, 15 bp, Homo sapiens
ttccatctgttgtat

SEQ ID NO: 1567893 - DNA, 15 bp, Homo sapiens
tttccatctgttgta

SEQ ID NO: 1567894 - DNA, 15 bp, Homo sapiens
atttccatctgttgt

SEQ ID NO: 1567895 - DNA, 15 bp, Homo sapiens
tatttccatctgttg

SEQ ID NO: 1567896 - DNA, 15 bp, Homo sapiens
ctatttccatctgtt

SEQ ID NO: 1567897 - DNA, 15 bp, Homo sapiens
actatttccatctgt

SEQ ID NO: 1567898 - DNA, 15 bp, Homo sapiens
tactatttccatctg

SEQ ID NO: 1567899 - DNA, 15 bp, Homo sapiens
gtactatttccatct

SEQ ID NO: 1567900 - DNA, 15 bp, Homo sapiens
agtactatttccatc

SEQ ID NO: 1567901 - DNA, 15 bp, Homo sapiens
tagtactatttccat

SEQ ID NO: 1567902 - DNA, 15 bp, Homo sapiens
ttagtactatttcca

SEQ ID NO: 1567903 - DNA, 15 bp, Homo sapiens
tttagtactatttcc

SEQ ID NO: 1567904 - DNA, 15 bp, Homo sapiens
ttttagtactatttc

SEQ ID NO: 1567905 - DNA, 15 bp, Homo sapiens
gttttagtactattt

SEQ ID NO: 1567906 - DNA, 15 bp, Homo sapiens
tgttttagtactatt

SEQ ID NO: 1567907 - DNA, 15 bp, Homo sapiens
atgttttagtactat

SEQ ID NO: 1567908 - DNA, 15 bp, Homo sapiens
catgttttagtacta

SEQ ID NO: 1567909 - DNA, 15 bp, Homo sapiens
gcatgttttagtact

SEQ ID NO: 1567910 - DNA, 15 bp, Homo sapiens
agcatgttttagtac

SEQ ID NO: 1567911 - DNA, 15 bp, Homo sapiens
tagcatgttttagta

SEQ ID NO: 1567912 - DNA, 15 bp, Homo sapiens
ttagcatgttttagt

SEQ ID NO: 1567913 - DNA, 15 bp, Homo sapiens
cttagcatgttttag

SEQ ID NO: 1567914 - DNA, 15 bp, Homo sapiens
acttagcatgtttta

SEQ ID NO: 1567915 - DNA, 15 bp, Homo sapiens
tacttagcatgtttt

SEQ ID NO: 1567916 - DNA, 15 bp, Homo sapiens
ctacttagcatgttt

SEQ ID NO: 1567917 - DNA, 15 bp, Homo sapiens
gctacttagcatgtt

SEQ ID NO: 1567918 - DNA, 15 bp, Homo sapiens
tgctacttagcatgt

SEQ ID NO: 1567919 - DNA, 15 bp, Homo sapiens
ctgctacttagcatg

SEQ ID NO: 1567920 - DNA, 15 bp, Homo sapiens
tctgctacttagcat

SEQ ID NO: 1567921 - DNA, 15 bp, Homo sapiens
gtctgctacttagca

SEQ ID NO: 1567922 - DNA, 15 bp, Homo sapiens
tgtctgctacttagc

SEQ ID NO: 1567923 - DNA, 15 bp, Homo sapiens
ctgtctgctacttag

SEQ ID NO: 1567924 - DNA, 15 bp, Homo sapiens
tctgtctgctactta

SEQ ID NO: 1567925 - DNA, 15 bp, Homo sapiens
ctctgtctgctactt

SEQ ID NO: 1567926 - DNA, 15 bp, Homo sapiens
gctctgtctgctact

SEQ ID NO: 1567927 - DNA, 15 bp, Homo sapiens
ggctctgtctgctac

SEQ ID NO: 1567928 - DNA, 15 bp, Homo sapiens
tggctctgtctgcta

SEQ ID NO: 1567929 - DNA, 15 bp, Homo sapiens
ttggctctgtctgct

SEQ ID NO: 1567930 - DNA, 15 bp, Homo sapiens
gttggctctgtctgc

SEQ ID NO: 1567931 - DNA, 15 bp, Homo sapiens
ggttggctctgtctg

SEQ ID NO: 1567932 - DNA, 15 bp, Homo sapiens
aggttggctctgtct

SEQ ID NO: 1567933 - DNA, 15 bp, Homo sapiens
aaggttggctctgtc

SEQ ID NO: 1567934 - DNA, 15 bp, Homo sapiens
caaggttggctctgt

SEQ ID NO: 1567935 - DNA, 15 bp, Homo sapiens
acaaggttggctctg

SEQ ID NO: 1567936 - DNA, 15 bp, Homo sapiens
gacaaggttggctct

SEQ ID NO: 1567937 - DNA, 15 bp, Homo sapiens
agacaaggttggctc

SEQ ID NO: 1567938 - DNA, 15 bp, Homo sapiens
aagacaaggttggct

SEQ ID NO: 1567939 - DNA, 15 bp, Homo sapiens
taagacaaggttggc

SEQ ID NO: 1567940 - DNA, 15 bp, Homo sapiens
ttaagacaaggttgg

SEQ ID NO: 1567941 - DNA, 15 bp, Homo sapiens
cttaagacaaggttg

SEQ ID NO: 1567942 - DNA, 15 bp, Homo sapiens
gcttaagacaaggtt

SEQ ID NO: 1567943 - DNA, 15 bp, Homo sapiens
tgcttaagacaaggt

SEQ ID NO: 1567944 - DNA, 15 bp, Homo sapiens
ttgcttaagacaagg

SEQ ID NO: 1567945 - DNA, 15 bp, Homo sapiens
tttgcttaagacaag

SEQ ID NO: 1567946 - DNA, 15 bp, Homo sapiens
gtttgcttaagacaa

SEQ ID NO: 1567947 - DNA, 15 bp, Homo sapiens
tgtttgcttaagaca

SEQ ID NO: 1567948 - DNA, 15 bp, Homo sapiens
atgtttgcttaagac

SEQ ID NO: 1567949 - DNA, 15 bp, Homo sapiens
aatgtttgcttaaga

SEQ ID NO: 1567950 - DNA, 15 bp, Homo sapiens
aaatgtttgcttaag

SEQ ID NO: 1567951 - DNA, 15 bp, Homo sapiens
taaatgtttgcttaa

SEQ ID NO: 1567952 - DNA, 15 bp, Homo sapiens
gtaaatgtttgctta

SEQ ID NO: 1567953 - DNA, 15 bp, Homo sapiens
ggtaaatgtttgctt

SEQ ID NO: 1567954 - DNA, 15 bp, Homo sapiens
cggtaaatgtttgct

SEQ ID NO: 1567955 - DNA, 15 bp, Homo sapiens
acggtaaatgtttgc

SEQ ID NO: 1567956 - DNA, 15 bp, Homo sapiens
tacggtaaatgtttg

SEQ ID NO: 1567957 - DNA, 15 bp, Homo sapiens
atacggtaaatgttt

SEQ ID NO: 1567958 - DNA, 15 bp, Homo sapiens
tatacggtaaatgtt

SEQ ID NO: 1567959 - DNA, 15 bp, Homo sapiens
atatacggtaaatgt

SEQ ID NO: 1567960 - DNA, 15 bp, Homo sapiens
catatacggtaaatg

SEQ ID NO: 1567961 - DNA, 15 bp, Homo sapiens
ccatatacggtaaat

SEQ ID NO: 1567962 - DNA, 15 bp, Homo sapiens
accatatacggtaaa

SEQ ID NO: 1567963 - DNA, 15 bp, Homo sapiens
aaccatatacggtaa

SEQ ID NO: 1567964 - DNA, 15 bp, Homo sapiens
taaccatatacggta

SEQ ID NO: 1567965 - DNA, 15 bp, Homo sapiens
gtaaccatatacggt

SEQ ID NO: 1567966 - DNA, 15 bp, Homo sapiens
tgtaaccatatacgg

SEQ ID NO: 1567967 - DNA, 15 bp, Homo sapiens
gtgtaaccatatacg

SEQ ID NO: 1567968 - DNA, 15 bp, Homo sapiens
tgtgtaaccatatac

SEQ ID NO: 1567969 - DNA, 15 bp, Homo sapiens
atgtgtaaccatata

SEQ ID NO: 1567970 - DNA, 15 bp, Homo sapiens
catgtgtaaccatat

SEQ ID NO: 1567971 - DNA, 15 bp, Homo sapiens
ccatgtgtaaccata

SEQ ID NO: 1567972 - DNA, 15 bp, Homo sapiens
accatgtgtaaccat

SEQ ID NO: 1567973 - DNA, 15 bp, Homo sapiens
aaccatgtgtaacca

SEQ ID NO: 1567974 - DNA, 15 bp, Homo sapiens
taaccatgtgtaacc

SEQ ID NO: 1567975 - DNA, 15 bp, Homo sapiens
ataaccatgtgtaac

SEQ ID NO: 1567976 - DNA, 15 bp, Homo sapiens
tataaccatgtgtaa

SEQ ID NO: 1567977 - DNA, 15 bp, Homo sapiens
atataaccatgtgta

SEQ ID NO: 1567978 - DNA, 15 bp, Homo sapiens
catataaccatgtgt

SEQ ID NO: 1567979 - DNA, 15 bp, Homo sapiens
tcatataaccatgtg

SEQ ID NO: 1567980 - DNA, 15 bp, Homo sapiens
gtcatataaccatgt

SEQ ID NO: 1567981 - DNA, 15 bp, Homo sapiens
tgtcatataaccatg

SEQ ID NO: 1567982 - DNA, 15 bp, Homo sapiens
gtgtcatataaccat

SEQ ID NO: 1567983 - DNA, 15 bp, Homo sapiens
agtgtcatataacca

SEQ ID NO: 1567984 - DNA, 15 bp, Homo sapiens
tagtgtcatataacc

SEQ ID NO: 1567985 - DNA, 15 bp, Homo sapiens
gtagtgtcatataac

SEQ ID NO: 1567986 - DNA, 15 bp, Homo sapiens
ggtagtgtcatataa

SEQ ID NO: 1567987 - DNA, 15 bp, Homo sapiens
tggtagtgtcatata

SEQ ID NO: 1567988 - DNA, 15 bp, Homo sapiens
ctggtagtgtcatat

SEQ ID NO: 1567989 - DNA, 15 bp, Homo sapiens
actggtagtgtcata

SEQ ID NO: 1567990 - DNA, 15 bp, Homo sapiens
aactggtagtgtcat

SEQ ID NO: 1567991 - DNA, 15 bp, Homo sapiens
caactggtagtgtca

SEQ ID NO: 1567992 - DNA, 15 bp, Homo sapiens
acaactggtagtgtc

SEQ ID NO: 1567993 - DNA, 15 bp, Homo sapiens
aacaactggtagtgt

SEQ ID NO: 1567994 - DNA, 15 bp, Homo sapiens
aaacaactggtagtg

SEQ ID NO: 1567995 - DNA, 15 bp, Homo sapiens
caaacaactggtagt

SEQ ID NO: 1567996 - DNA, 15 bp, Homo sapiens
acaaacaactggtag

SEQ ID NO: 1567997 - DNA, 15 bp, Homo sapiens
aacaaacaactggta

SEQ ID NO: 1567998 - DNA, 15 bp, Homo sapiens
aaacaaacaactggt

SEQ ID NO: 1567999 - DNA, 15 bp, Homo sapiens
aaaacaaacaactgg

SEQ ID NO: 1568000 - DNA, 15 bp, Homo sapiens
gaaaacaaacaactg

SEQ ID NO: 1568001 - DNA, 15 bp, Homo sapiens
tgaaaacaaacaact

SEQ ID NO: 1568002 - DNA, 15 bp, Homo sapiens
gtgaaaacaaacaac

SEQ ID NO: 1568003 - DNA, 15 bp, Homo sapiens
tgtgaaaacaaacaa

SEQ ID NO: 1568004 - DNA, 15 bp, Homo sapiens
ttgtgaaaacaaaca

SEQ ID NO: 1568005 - DNA, 15 bp, Homo sapiens
attgtgaaaacaaac

SEQ ID NO: 1568006 - DNA, 15 bp, Homo sapiens
aattgtgaaaacaaa

SEQ ID NO: 1568007 - DNA, 15 bp, Homo sapiens
aaattgtgaaaacaa

SEQ ID NO: 1568008 - DNA, 15 bp, Homo sapiens
gaaattgtgaaaaca

SEQ ID NO: 1568009 - DNA, 15 bp, Homo sapiens
agaaattgtgaaaac

SEQ ID NO: 1568010 - DNA, 15 bp, Homo sapiens
aagaaattgtgaaaa

SEQ ID NO: 1568011 - DNA, 15 bp, Homo sapiens
gaagaaattgtgaaa

SEQ ID NO: 1568012 - DNA, 15 bp, Homo sapiens
ggaagaaattgtgaa

SEQ ID NO: 1568013 - DNA, 15 bp, Homo sapiens
gggaagaaattgtga

SEQ ID NO: 1568014 - DNA, 15 bp, Homo sapiens
agggaagaaattgtg

SEQ ID NO: 1568015 - DNA, 15 bp, Homo sapiens
cagggaagaaattgt

SEQ ID NO: 1568016 - DNA, 15 bp, Homo sapiens
ccagggaagaaattg

SEQ ID NO: 1568017 - DNA, 15 bp, Homo sapiens
accagggaagaaatt

SEQ ID NO: 1568018 - DNA, 15 bp, Homo sapiens
caccagggaagaaat

SEQ ID NO: 1568019 - DNA, 15 bp, Homo sapiens
tcaccagggaagaaa

SEQ ID NO: 1568020 - DNA, 15 bp, Homo sapiens
gtcaccagggaagaa

SEQ ID NO: 1568021 - DNA, 15 bp, Homo sapiens
agtcaccagggaaga

SEQ ID NO: 1568022 - DNA, 15 bp, Homo sapiens
tagtcaccagggaag

SEQ ID NO: 1568023 - DNA, 15 bp, Homo sapiens
ttagtcaccagggaa

SEQ ID NO: 1568024 - DNA, 15 bp, Homo sapiens
tttagtcaccaggga

SEQ ID NO: 1568025 - DNA, 15 bp, Homo sapiens
ttttagtcaccaggg

SEQ ID NO: 1568026 - DNA, 15 bp, Homo sapiens
tttttagtcaccagg

SEQ ID NO: 1568027 - DNA, 15 bp, Homo sapiens
gtttttagtcaccag

SEQ ID NO: 1568028 - DNA, 15 bp, Homo sapiens
tgtttttagtcacca

SEQ ID NO: 1568029 - DNA, 15 bp, Homo sapiens
ttgtttttagtcacc

SEQ ID NO: 1568030 - DNA, 15 bp, Homo sapiens
tttgtttttagtcac

SEQ ID NO: 1568031 - DNA, 15 bp, Homo sapiens
ttttgtttttagtca

SEQ ID NO: 1568032 - DNA, 15 bp, Homo sapiens
cttttgtttttagtc

SEQ ID NO: 1568033 - DNA, 15 bp, Homo sapiens
tcttttgtttttagt

SEQ ID NO: 1568034 - DNA, 15 bp, Homo sapiens
gtcttttgtttttag

SEQ ID NO: 1568035 - DNA, 15 bp, Homo sapiens
tgtcttttgttttta

SEQ ID NO: 1568036 - DNA, 15 bp, Homo sapiens
ttgtcttttgttttt

SEQ ID NO: 1568037 - DNA, 15 bp, Homo sapiens
tttgtcttttgtttt

SEQ ID NO: 1568038 - DNA, 15 bp, Homo sapiens
gtttgtcttttgttt

SEQ ID NO: 1568039 - DNA, 15 bp, Homo sapiens
tgtttgtcttttgtt

SEQ ID NO: 1568040 - DNA, 15 bp, Homo sapiens
ttgtttgtcttttgt

SEQ ID NO: 1568041 - DNA, 15 bp, Homo sapiens
tttgtttgtcttttg

SEQ ID NO: 1568042 - DNA, 15 bp, Homo sapiens
ttttgtttgtctttt

SEQ ID NO: 1568043 - DNA, 15 bp, Homo sapiens
tttttgtttgtcttt

SEQ ID NO: 1568044 - DNA, 15 bp, Homo sapiens
gtttttgtttgtctt

SEQ ID NO: 1568045 - DNA, 15 bp, Homo sapiens
tgtttttgtttgtct

SEQ ID NO: 1568046 - DNA, 15 bp, Homo sapiens
ctgtttttgtttgtc

SEQ ID NO: 1568047 - DNA, 15 bp, Homo sapiens
tctgtttttgtttgt

SEQ ID NO: 1568048 - DNA, 15 bp, Homo sapiens
gtctgtttttgtttg

SEQ ID NO: 1568049 - DNA, 15 bp, Homo sapiens
tgtctgtttttgttt

SEQ ID NO: 1568050 - DNA, 15 bp, Homo sapiens
gtgtctgtttttgtt

SEQ ID NO: 1568051 - DNA, 15 bp, Homo sapiens
tgtgtctgtttttgt

SEQ ID NO: 1568052 - DNA, 15 bp, Homo sapiens
gtgtgtctgtttttg

SEQ ID NO: 1568053 - DNA, 15 bp, Homo sapiens
tgtgtgtctgttttt

SEQ ID NO: 1568054 - DNA, 15 bp, Homo sapiens
gtgtgtgtctgtttt

SEQ ID NO: 1568055 - DNA, 15 bp, Homo sapiens
tgtgtgtgtctgttt

SEQ ID NO: 1568056 - DNA, 15 bp, Homo sapiens
gtgtgtgtgtctgtt

SEQ ID NO: 1568057 - DNA, 15 bp, Homo sapiens
atgtgtgtgtgtctg

SEQ ID NO: 1568058 - DNA, 15 bp, Homo sapiens
catgtgtgtgtgtct

SEQ ID NO: 1568059 - DNA, 15 bp, Homo sapiens
acatgtgtgtgtgtc

SEQ ID NO: 1568060 - DNA, 15 bp, Homo sapiens
aacatgtgtgtgtgt

SEQ ID NO: 1568061 - DNA, 15 bp, Homo sapiens
gaacatgtgtgtgtg

SEQ ID NO: 1568062 - DNA, 15 bp, Homo sapiens
tgaacatgtgtgtgt

SEQ ID NO: 1568063 - DNA, 15 bp, Homo sapiens
atgaacatgtgtgtg

SEQ ID NO: 1568064 - DNA, 15 bp, Homo sapiens
aatgaacatgtgtgt

SEQ ID NO: 1568065 - DNA, 15 bp, Homo sapiens
caatgaacatgtgtg

SEQ ID NO: 1568066 - DNA, 15 bp, Homo sapiens
acaatgaacatgtgt

SEQ ID NO: 1568067 - DNA, 15 bp, Homo sapiens
tacaatgaacatgtg

SEQ ID NO: 1568068 - DNA, 15 bp, Homo sapiens
attttctacaatgaa

SEQ ID NO: 1568069 - DNA, 15 bp, Homo sapiens
aattttctacaatga

SEQ ID NO: 1568070 - DNA, 15 bp, Homo sapiens
aaattttctacaatg

SEQ ID NO: 1568071 - DNA, 15 bp, Homo sapiens
caaattttctacaat

SEQ ID NO: 1568072 - DNA, 15 bp, Homo sapiens
ccaaattttctacaa

SEQ ID NO: 1568073 - DNA, 15 bp, Homo sapiens
tccaaattttctaca

SEQ ID NO: 1568074 - DNA, 15 bp, Homo sapiens
ttccaaattttctac

SEQ ID NO: 1568075 - DNA, 15 bp, Homo sapiens
tttccaaattttcta

SEQ ID NO: 1568076 - DNA, 15 bp, Homo sapiens
ttttccaaattttct

SEQ ID NO: 1568077 - DNA, 15 bp, Homo sapiens
attttccaaattttc

SEQ ID NO: 1568078 - DNA, 15 bp, Homo sapiens
cattttccaaatttt

SEQ ID NO: 1568079 - DNA, 15 bp, Homo sapiens
tcattttccaaattt

SEQ ID NO: 1568080 - DNA, 15 bp, Homo sapiens
ttcattttccaaatt

SEQ ID NO: 1568081 - DNA, 15 bp, Homo sapiens
cttcattttccaaat

SEQ ID NO: 1568082 - DNA, 15 bp, Homo sapiens
tcttcattttccaaa

SEQ ID NO: 1568083 - DNA, 15 bp, Homo sapiens
ttcttcattttccaa

SEQ ID NO: 1568084 - DNA, 15 bp, Homo sapiens
tttcttcattttcca

SEQ ID NO: 1568085 - DNA, 15 bp, Homo sapiens
atttcttcattttcc

SEQ ID NO: 1568086 - DNA, 15 bp, Homo sapiens
catttcttcattttc

SEQ ID NO: 1568087 - DNA, 15 bp, Homo sapiens
gcatttcttcatttt

SEQ ID NO: 1568088 - DNA, 15 bp, Homo sapiens
ggcatttcttcattt

SEQ ID NO: 1568089 - DNA, 15 bp, Homo sapiens
gggcatttcttcatt

SEQ ID NO: 1568090 - DNA, 15 bp, Homo sapiens
ggggcatttcttcat

SEQ ID NO: 1568091 - DNA, 15 bp, Homo sapiens
tggggcatttcttca

SEQ ID NO: 1568092 - DNA, 15 bp, Homo sapiens
ctggggcatttcttc

SEQ ID NO: 1568093 - DNA, 15 bp, Homo sapiens
tctggggcatttctt

SEQ ID NO: 1568094 - DNA, 15 bp, Homo sapiens
ttctggggcatttct

SEQ ID NO: 1568095 - DNA, 15 bp, Homo sapiens
tttctggggcatttc

SEQ ID NO: 1568096 - DNA, 15 bp, Homo sapiens
ctttctggggcattt

SEQ ID NO: 1568097 - DNA, 15 bp, Homo sapiens
actttctggggcatt

SEQ ID NO: 1568098 - DNA, 15 bp, Homo sapiens
tactttctggggcat

SEQ ID NO: 1568099 - DNA, 15 bp, Homo sapiens
ttactttctggggca

SEQ ID NO: 1568100 - DNA, 15 bp, Homo sapiens
tttactttctggggc

SEQ ID NO: 1568101 - DNA, 15 bp, Homo sapiens
ttttactttctgggg

SEQ ID NO: 1568102 - DNA, 15 bp, Homo sapiens
tttttactttctggg

SEQ ID NO: 1568103 - DNA, 15 bp, Homo sapiens
ctttttactttctgg

SEQ ID NO: 1568104 - DNA, 15 bp, Homo sapiens
gctttttactttctg

SEQ ID NO: 1568105 - DNA, 15 bp, Homo sapiens
tgctttttactttct

SEQ ID NO: 1568106 - DNA, 15 bp, Homo sapiens
gtgctttttactttc

SEQ ID NO: 1568107 - DNA, 15 bp, Homo sapiens
agtgctttttacttt

SEQ ID NO: 1568108 - DNA, 15 bp, Homo sapiens
gagtgctttttactt

SEQ ID NO: 1568109 - DNA, 15 bp, Homo sapiens
tgagtgctttttact

SEQ ID NO: 1568110 - DNA, 15 bp, Homo sapiens
atgagtgctttttac

SEQ ID NO: 1568111 - DNA, 15 bp, Homo sapiens
gatgagtgcttttta

SEQ ID NO: 1568112 - DNA, 15 bp, Homo sapiens
agatgagtgcttttt

SEQ ID NO: 1568113 - DNA, 15 bp, Homo sapiens
gagatgagtgctttt

SEQ ID NO: 1568114 - DNA, 15 bp, Homo sapiens
ggagatgagtgcttt

SEQ ID NO: 1568115 - DNA, 15 bp, Homo sapiens
gggagatgagtgctt

SEQ ID NO: 1568116 - DNA, 15 bp, Homo sapiens
agggagatgagtgct

SEQ ID NO: 1568117 - DNA, 15 bp, Homo sapiens
aagggagatgagtgc

SEQ ID NO: 1568118 - DNA, 15 bp, Homo sapiens
aaagggagatgagtg

SEQ ID NO: 1568119 - DNA, 15 bp, Homo sapiens
taaagggagatgagt

SEQ ID NO: 1568120 - DNA, 15 bp, Homo sapiens
ttaaagggagatgag

SEQ ID NO: 1568121 - DNA, 15 bp, Homo sapiens
attaaagggagatga

SEQ ID NO: 1568122 - DNA, 15 bp, Homo sapiens
aattaaagggagatg

SEQ ID NO: 1568123 - DNA, 15 bp, Homo sapiens
aaattaaagggagat

SEQ ID NO: 1568124 - DNA, 15 bp, Homo sapiens
aaaattaaagggaga

SEQ ID NO: 1568125 - DNA, 15 bp, Homo sapiens
caaaattaaagggag

SEQ ID NO: 1568126 - DNA, 15 bp, Homo sapiens
ccaaaattaaaggga

SEQ ID NO: 1568127 - DNA, 15 bp, Homo sapiens
gccaaaattaaaggg

SEQ ID NO: 1568128 - DNA, 15 bp, Homo sapiens
tgccaaaattaaagg

SEQ ID NO: 1568129 - DNA, 15 bp, Homo sapiens
gtgccaaaattaaag

SEQ ID NO: 1568130 - DNA, 15 bp, Homo sapiens
tgtgccaaaattaaa

SEQ ID NO: 1568131 - DNA, 15 bp, Homo sapiens
atgtgccaaaattaa

SEQ ID NO: 1568132 - DNA, 15 bp, Homo sapiens
aatgtgccaaaatta

SEQ ID NO: 1568133 - DNA, 15 bp, Homo sapiens
taatgtgccaaaatt

SEQ ID NO: 1568134 - DNA, 15 bp, Homo sapiens
ataatgtgccaaaat

SEQ ID NO: 1568135 - DNA, 15 bp, Homo sapiens
aataatgtgccaaaa

SEQ ID NO: 1568136 - DNA, 15 bp, Homo sapiens
gaataatgtgccaaa

SEQ ID NO: 1568137 - DNA, 15 bp, Homo sapiens
agaataatgtgccaa

SEQ ID NO: 1568138 - DNA, 15 bp, Homo sapiens
cagaataatgtgcca

SEQ ID NO: 1568139 - DNA, 15 bp, Homo sapiens
ccagaataatgtgcc

SEQ ID NO: 1568140 - DNA, 15 bp, Homo sapiens
cccagaataatgtgc

SEQ ID NO: 1568141 - DNA, 15 bp, Homo sapiens
ccccagaataatgtg

SEQ ID NO: 1568142 - DNA, 15 bp, Homo sapiens
tccccagaataatgt

SEQ ID NO: 1568143 - DNA, 15 bp, Homo sapiens
ttccccagaataatg

SEQ ID NO: 1568144 - DNA, 15 bp, Homo sapiens
attccccagaataat

SEQ ID NO: 1568145 - DNA, 15 bp, Homo sapiens
cattccccagaataa

SEQ ID NO: 1568146 - DNA, 15 bp, Homo sapiens
acattccccagaata

SEQ ID NO: 1568147 - DNA, 15 bp, Homo sapiens
tacattccccagaat

SEQ ID NO: 1568148 - DNA, 15 bp, Homo sapiens
atacattccccagaa

SEQ ID NO: 1568149 - DNA, 15 bp, Homo sapiens
tatacattccccaga

SEQ ID NO: 1568150 - DNA, 15 bp, Homo sapiens
atatacattccccag

SEQ ID NO: 1568151 - DNA, 15 bp, Homo sapiens
aatatacattcccca

SEQ ID NO: 1568152 - DNA, 15 bp, Homo sapiens
taatatacattcccc

SEQ ID NO: 1568153 - DNA, 15 bp, Homo sapiens
ataatatacattccc

SEQ ID NO: 1568154 - DNA, 15 bp, Homo sapiens
cataatatacattcc

SEQ ID NO: 1568155 - DNA, 15 bp, Homo sapiens
acataatatacattc

SEQ ID NO: 1568156 - DNA, 15 bp, Homo sapiens
aacataatatacatt

SEQ ID NO: 1568157 - DNA, 15 bp, Homo sapiens
aaacataatatacat

SEQ ID NO: 1568158 - DNA, 15 bp, Homo sapiens
aaaacataatataca

SEQ ID NO: 1568159 - DNA, 15 bp, Homo sapiens
gaaaacataatatac

SEQ ID NO: 1568160 - DNA, 15 bp, Homo sapiens
ggaaaacataatata

SEQ ID NO: 1568161 - DNA, 15 bp, Homo sapiens
tggaaaacataatat

SEQ ID NO: 1568162 - DNA, 15 bp, Homo sapiens
gtggaaaacataata

SEQ ID NO: 1568163 - DNA, 15 bp, Homo sapiens
agtggaaaacataat

SEQ ID NO: 1568164 - DNA, 15 bp, Homo sapiens
tagtggaaaacataa

SEQ ID NO: 1568165 - DNA, 15 bp, Homo sapiens
gtagtggaaaacata

SEQ ID NO: 1568166 - DNA, 15 bp, Homo sapiens
tgtagtggaaaacat

SEQ ID NO: 1568167 - DNA, 15 bp, Homo sapiens
atgtagtggaaaaca

SEQ ID NO: 1568168 - DNA, 15 bp, Homo sapiens
tatgtagtggaaaac

SEQ ID NO: 1568169 - DNA, 15 bp, Homo sapiens
atatgtagtggaaaa

SEQ ID NO: 1568170 - DNA, 15 bp, Homo sapiens
aatatgtagtggaaa

SEQ ID NO: 1568171 - DNA, 15 bp, Homo sapiens
aaatatgtagtggaa

SEQ ID NO: 1568172 - DNA, 15 bp, Homo sapiens
aaaatatgtagtgga

SEQ ID NO: 1568173 - DNA, 15 bp, Homo sapiens
gaaaatatgtagtgg

SEQ ID NO: 1568174 - DNA, 15 bp, Homo sapiens
tgaaaatatgtagtg

SEQ ID NO: 1568175 - DNA, 15 bp, Homo sapiens
atgaaaatatgtagt

SEQ ID NO: 1568176 - DNA, 15 bp, Homo sapiens
aatgaaaatatgtag

SEQ ID NO: 1568177 - DNA, 15 bp, Homo sapiens
aaatgaaaatatgta

SEQ ID NO: 1568178 - DNA, 15 bp, Homo sapiens
taaatgaaaatatgt

SEQ ID NO: 1568179 - DNA, 15 bp, Homo sapiens
ttaaatgaaaatatg

SEQ ID NO: 1568180 - DNA, 15 bp, Homo sapiens
attaaatgaaaatat

SEQ ID NO: 1568181 - DNA, 15 bp, Homo sapiens
aattaaatgaaaata

SEQ ID NO: 1568182 - DNA, 15 bp, Homo sapiens
aaattaaatgaaaat

SEQ ID NO: 1568183 - DNA, 15 bp, Homo sapiens
aaaattaaatgaaaa

SEQ ID NO: 1568184 - DNA, 15 bp, Homo sapiens
gaaaattaaatgaaa

SEQ ID NO: 1568185 - DNA, 15 bp, Homo sapiens
ggaaaattaaatgaa

SEQ ID NO: 1568186 - DNA, 15 bp, Homo sapiens
aggaaaattaaatga

SEQ ID NO: 1568187 - DNA, 15 bp, Homo sapiens
gaggaaaattaaatg

SEQ ID NO: 1568188 - DNA, 15 bp, Homo sapiens
agaggaaaattaaat

SEQ ID NO: 1568189 - DNA, 15 bp, Homo sapiens
tagaggaaaattaaa

SEQ ID NO: 1568190 - DNA, 15 bp, Homo sapiens
ttagaggaaaattaa

SEQ ID NO: 1568191 - DNA, 15 bp, Homo sapiens
tttagaggaaaatta

SEQ ID NO: 1568192 - DNA, 15 bp, Homo sapiens
ttttagaggaaaatt

SEQ ID NO: 1568193 - DNA, 15 bp, Homo sapiens
attttagaggaaaat

SEQ ID NO: 1568194 - DNA, 15 bp, Homo sapiens
cattttagaggaaaa

SEQ ID NO: 1568195 - DNA, 15 bp, Homo sapiens
acattttagaggaaa

SEQ ID NO: 1568196 - DNA, 15 bp, Homo sapiens
aacattttagaggaa

SEQ ID NO: 1568197 - DNA, 15 bp, Homo sapiens
gaacattttagagga

SEQ ID NO: 1568198 - DNA, 15 bp, Homo sapiens
ggaacattttagagg

SEQ ID NO: 1568199 - DNA, 15 bp, Homo sapiens
aggaacattttagag

SEQ ID NO: 1568200 - DNA, 15 bp, Homo sapiens
gaggaacattttaga

SEQ ID NO: 1568201 - DNA, 15 bp, Homo sapiens
agaggaacattttag

SEQ ID NO: 1568202 - DNA, 15 bp, Homo sapiens
cagaggaacatttta

SEQ ID NO: 1568203 - DNA, 15 bp, Homo sapiens
acagaggaacatttt

SEQ ID NO: 1568204 - DNA, 15 bp, Homo sapiens
aacagaggaacattt

SEQ ID NO: 1568205 - DNA, 15 bp, Homo sapiens
caacagaggaacatt

SEQ ID NO: 1568206 - DNA, 15 bp, Homo sapiens
tcaacagaggaacat

SEQ ID NO: 1568207 - DNA, 15 bp, Homo sapiens
gtcaacagaggaaca

SEQ ID NO: 1568208 - DNA, 15 bp, Homo sapiens
agtcaacagaggaac

SEQ ID NO: 1568209 - DNA, 15 bp, Homo sapiens
aagtcaacagaggaa

SEQ ID NO: 1568210 - DNA, 15 bp, Homo sapiens
aaagtcaacagagga

SEQ ID NO: 1568211 - DNA, 15 bp, Homo sapiens
aaaagtcaacagagg

SEQ ID NO: 1568212 - DNA, 15 bp, Homo sapiens
aaaaagtcaacagag

SEQ ID NO: 1568213 - DNA, 15 bp, Homo sapiens
aaaaaagtcaacaga

SEQ ID NO: 1568214 - DNA, 15 bp, Homo sapiens
aaaaaaagtcaacag

SEQ ID NO: 1568215 - DNA, 15 bp, Homo sapiens
aaaaaaaagtcaaca

SEQ ID NO: 1568216 - DNA, 15 bp, Homo sapiens
aaaaaaaaagtcaac

SEQ ID NO: 1568217 - DNA, 15 bp, Homo sapiens
gaaaaaaaaagtcaa

SEQ ID NO: 1568218 - DNA, 15 bp, Homo sapiens
agaaaaaaaaagtca

SEQ ID NO: 1568219 - DNA, 15 bp, Homo sapiens
aagaaaaaaaaagtc

SEQ ID NO: 1568220 - DNA, 15 bp, Homo sapiens
aaaagaaaaaaaaag

SEQ ID NO: 1568221 - DNA, 15 bp, Homo sapiens
ctaaaagaaaaaaaa

SEQ ID NO: 1568222 - DNA, 15 bp, Homo sapiens
cctaaaagaaaaaaa

SEQ ID NO: 1568223 - DNA, 15 bp, Homo sapiens
gcctaaaagaaaaaa

SEQ ID NO: 1568224 - DNA, 15 bp, Homo sapiens
tatgcctaaaagaaa

SEQ ID NO: 1568225 - DNA, 15 bp, Homo sapiens
ttatgcctaaaagaa

SEQ ID NO: 1568226 - DNA, 15 bp, Homo sapiens
attatgcctaaaaga

SEQ ID NO: 1568227 - DNA, 15 bp, Homo sapiens
aattatgcctaaaag

SEQ ID NO: 1568228 - DNA, 15 bp, Homo sapiens
aaattatgcctaaaa

SEQ ID NO: 1568229 - DNA, 15 bp, Homo sapiens
caaattatgcctaaa

SEQ ID NO: 1568230 - DNA, 15 bp, Homo sapiens
acaaattatgcctaa

SEQ ID NO: 1568231 - DNA, 15 bp, Homo sapiens
aacaaattatgccta

SEQ ID NO: 1568232 - DNA, 15 bp, Homo sapiens
caacaaattatgcct

SEQ ID NO: 1568233 - DNA, 15 bp, Homo sapiens
ccaacaaattatgcc

SEQ ID NO: 1568234 - DNA, 15 bp, Homo sapiens
tccaacaaattatgc

SEQ ID NO: 1568235 - DNA, 15 bp, Homo sapiens
gtccaacaaattatg

SEQ ID NO: 1568236 - DNA, 15 bp, Homo sapiens
agtccaacaaattat

SEQ ID NO: 1568237 - DNA, 15 bp, Homo sapiens
gagtccaacaaatta

SEQ ID NO: 1568238 - DNA, 15 bp, Homo sapiens
agagtccaacaaatt

SEQ ID NO: 1568239 - DNA, 15 bp, Homo sapiens
tagagtccaacaaat

SEQ ID NO: 1568240 - DNA, 15 bp, Homo sapiens
ttagagtccaacaaa

SEQ ID NO: 1568241 - DNA, 15 bp, Homo sapiens
cttagagtccaacaa

SEQ ID NO: 1568242 - DNA, 15 bp, Homo sapiens
tcttagagtccaaca

SEQ ID NO: 1568243 - DNA, 15 bp, Homo sapiens
atcttagagtccaac

SEQ ID NO: 1568244 - DNA, 15 bp, Homo sapiens
gatcttagagtccaa

SEQ ID NO: 1568245 - DNA, 15 bp, Homo sapiens
tgatcttagagtcca

SEQ ID NO: 1568246 - DNA, 15 bp, Homo sapiens
ttgatcttagagtcc

SEQ ID NO: 1568247 - DNA, 15 bp, Homo sapiens
gttgatcttagagtc

SEQ ID NO: 1568248 - DNA, 15 bp, Homo sapiens
tgttgatcttagagt

SEQ ID NO: 1568249 - DNA, 15 bp, Homo sapiens
gtgttgatcttagag

SEQ ID NO: 1568250 - DNA, 15 bp, Homo sapiens
ggtgttgatcttaga

SEQ ID NO: 1568251 - DNA, 15 bp, Homo sapiens
gggtgttgatcttag

SEQ ID NO: 1568252 - DNA, 15 bp, Homo sapiens
agggtgttgatctta

SEQ ID NO: 1568253 - DNA, 15 bp, Homo sapiens
cagggtgttgatctt

SEQ ID NO: 1568254 - DNA, 15 bp, Homo sapiens
acagggtgttgatct

SEQ ID NO: 1568255 - DNA, 15 bp, Homo sapiens
aacagggtgttgatc

SEQ ID NO: 1568256 - DNA, 15 bp, Homo sapiens
taacagggtgttgat

SEQ ID NO: 1568257 - DNA, 15 bp, Homo sapiens
ataacagggtgttga

SEQ ID NO: 1568258 - DNA, 15 bp, Homo sapiens
gataacagggtgttg

SEQ ID NO: 1568259 - DNA, 15 bp, Homo sapiens
tgataacagggtgtt

SEQ ID NO: 1568260 - DNA, 15 bp, Homo sapiens
atgataacagggtgt

SEQ ID NO: 1568261 - DNA, 15 bp, Homo sapiens
aatgataacagggtg

SEQ ID NO: 1568262 - DNA, 15 bp, Homo sapiens
caatgataacagggt

SEQ ID NO: 1568263 - DNA, 15 bp, Homo sapiens
acaatgataacaggg

SEQ ID NO: 1568264 - DNA, 15 bp, Homo sapiens
cacaatgataacagg

SEQ ID NO: 1568265 - DNA, 15 bp, Homo sapiens
gcacaatgataacag

SEQ ID NO: 1568266 - DNA, 15 bp, Homo sapiens
ggcacaatgataaca

SEQ ID NO: 1568267 - DNA, 15 bp, Homo sapiens
tggcacaatgataac

SEQ ID NO: 1568268 - DNA, 15 bp, Homo sapiens
ttggcacaatgataa

SEQ ID NO: 1568269 - DNA, 15 bp, Homo sapiens
cttggcacaatgata

SEQ ID NO: 1568270 - DNA, 15 bp, Homo sapiens
tcttggcacaatgat

SEQ ID NO: 1568271 - DNA, 15 bp, Homo sapiens
atcttggcacaatga

SEQ ID NO: 1568272 - DNA, 15 bp, Homo sapiens
gatcttggcacaatg

SEQ ID NO: 1568273 - DNA, 15 bp, Homo sapiens
ggatcttggcacaat

SEQ ID NO: 1568274 - DNA, 15 bp, Homo sapiens
tggatcttggcacaa

SEQ ID NO: 1568275 - DNA, 15 bp, Homo sapiens
ttggatcttggcaca

SEQ ID NO: 1568276 - DNA, 15 bp, Homo sapiens
tttggatcttggcac

SEQ ID NO: 1568277 - DNA, 15 bp, Homo sapiens
atttggatcttggca

SEQ ID NO: 1568278 - DNA, 15 bp, Homo sapiens
aatttggatcttggc

SEQ ID NO: 1568279 - DNA, 15 bp, Homo sapiens
aaatttggatcttgg

SEQ ID NO: 1568280 - DNA, 15 bp, Homo sapiens
caaatttggatcttg

SEQ ID NO: 1568281 - DNA, 15 bp, Homo sapiens
acaaatttggatctt

SEQ ID NO: 1568282 - DNA, 15 bp, Homo sapiens
aacaaatttggatct

SEQ ID NO: 1568283 - DNA, 15 bp, Homo sapiens
taacaaatttggatc

SEQ ID NO: 1568284 - DNA, 15 bp, Homo sapiens
ttaacaaatttggat

SEQ ID NO: 1568285 - DNA, 15 bp, Homo sapiens
tttaacaaatttgga

SEQ ID NO: 1568286 - DNA, 15 bp, Homo sapiens
atttaacaaatttgg

SEQ ID NO: 1568287 - DNA, 15 bp, Homo sapiens
gatttaacaaatttg

SEQ ID NO: 1568288 - DNA, 15 bp, Homo sapiens
ggatttaacaaattt

SEQ ID NO: 1568289 - DNA, 15 bp, Homo sapiens
tggatttaacaaatt

SEQ ID NO: 1568290 - DNA, 15 bp, Homo sapiens
ttggatttaacaaat

SEQ ID NO: 1568291 - DNA, 15 bp, Homo sapiens
attggatttaacaaa

SEQ ID NO: 1568292 - DNA, 15 bp, Homo sapiens
gattggatttaacaa

SEQ ID NO: 1568293 - DNA, 15 bp, Homo sapiens
ggattggatttaaca

SEQ ID NO: 1568294 - DNA, 15 bp, Homo sapiens
tggattggatttaac

SEQ ID NO: 1568295 - DNA, 15 bp, Homo sapiens
atggattggatttaa

SEQ ID NO: 1568296 - DNA, 15 bp, Homo sapiens
catggattggattta

SEQ ID NO: 1568297 - DNA, 15 bp, Homo sapiens
ccatggattggattt

SEQ ID NO: 1568298 - DNA, 15 bp, Homo sapiens
tccatggattggatt

SEQ ID NO: 1568299 - DNA, 15 bp, Homo sapiens
ttccatggattggat

SEQ ID NO: 1568300 - DNA, 15 bp, Homo sapiens
attccatggattgga

SEQ ID NO: 1568301 - DNA, 15 bp, Homo sapiens
aattccatggattgg

SEQ ID NO: 1568302 - DNA, 15 bp, Homo sapiens
caattccatggattg

SEQ ID NO: 1568303 - DNA, 15 bp, Homo sapiens
acaattccatggatt

SEQ ID NO: 1568304 - DNA, 15 bp, Homo sapiens
cacaattccatggat

SEQ ID NO: 1568305 - DNA, 15 bp, Homo sapiens
gcacaattccatgga

SEQ ID NO: 1568306 - DNA, 15 bp, Homo sapiens
tgcacaattccatgg

SEQ ID NO: 1568307 - DNA, 15 bp, Homo sapiens
ctgcacaattccatg

SEQ ID NO: 1568308 - DNA, 15 bp, Homo sapiens
tctgcacaattccat

SEQ ID NO: 1568309 - DNA, 15 bp, Homo sapiens
ctctgcacaattcca

SEQ ID NO: 1568310 - DNA, 15 bp, Homo sapiens
actctgcacaattcc

SEQ ID NO: 1568311 - DNA, 15 bp, Homo sapiens
cactctgcacaattc

SEQ ID NO: 1568312 - DNA, 15 bp, Homo sapiens
acactctgcacaatt

SEQ ID NO: 1568313 - DNA, 15 bp, Homo sapiens
cacactctgcacaat

SEQ ID NO: 1568314 - DNA, 15 bp, Homo sapiens
ccacactctgcacaa

SEQ ID NO: 1568315 - DNA, 15 bp, Homo sapiens
accacactctgcaca

SEQ ID NO: 1568316 - DNA, 15 bp, Homo sapiens
caccacactctgcac

SEQ ID NO: 1568317 - DNA, 15 bp, Homo sapiens
acaccacactctgca

SEQ ID NO: 1568318 - DNA, 15 bp, Homo sapiens
tacaccacactctgc

SEQ ID NO: 1568319 - DNA, 15 bp, Homo sapiens
gtacaccacactctg

SEQ ID NO: 1568320 - DNA, 15 bp, Homo sapiens
ggtacaccacactct

SEQ ID NO: 1568321 - DNA, 15 bp, Homo sapiens
tggtacaccacactc

SEQ ID NO: 1568322 - DNA, 15 bp, Homo sapiens
atggtacaccacact

SEQ ID NO: 1568323 - DNA, 15 bp, Homo sapiens
catggtacaccacac

SEQ ID NO: 1568324 - DNA, 15 bp, Homo sapiens
tcatggtacaccaca

SEQ ID NO: 1568325 - DNA, 15 bp, Homo sapiens
ttcatggtacaccac

SEQ ID NO: 1568326 - DNA, 15 bp, Homo sapiens
cttcatggtacacca

SEQ ID NO: 1568327 - DNA, 15 bp, Homo sapiens
tcttcatggtacacc

SEQ ID NO: 1568328 - DNA, 15 bp, Homo sapiens
ttcttcatggtacac

SEQ ID NO: 1568329 - DNA, 15 bp, Homo sapiens
attcttcatggtaca

SEQ ID NO: 1568330 - DNA, 15 bp, Homo sapiens
gattcttcatggtac

SEQ ID NO: 1568331 - DNA, 15 bp, Homo sapiens
ggattcttcatggta

SEQ ID NO: 1568332 - DNA, 15 bp, Homo sapiens
gggattcttcatggt

SEQ ID NO: 1568333 - DNA, 15 bp, Homo sapiens
ggggattcttcatgg

SEQ ID NO: 1568334 - DNA, 15 bp, Homo sapiens
tggggattcttcatg

SEQ ID NO: 1568335 - DNA, 15 bp, Homo sapiens
gtggggattcttcat

SEQ ID NO: 1568336 - DNA, 15 bp, Homo sapiens
ggtggggattcttca

SEQ ID NO: 1568337 - DNA, 15 bp, Homo sapiens
tggtggggattcttc

SEQ ID NO: 1568338 - DNA, 15 bp, Homo sapiens
gtggtggggattctt

SEQ ID NO: 1568339 - DNA, 15 bp, Homo sapiens
tgtggtggggattct

SEQ ID NO: 1568340 - DNA, 15 bp, Homo sapiens
ttgtggtggggattc

SEQ ID NO: 1568341 - DNA, 15 bp, Homo sapiens
attgtggtggggatt

SEQ ID NO: 1568342 - DNA, 15 bp, Homo sapiens
tattgtggtggggat

SEQ ID NO: 1568343 - DNA, 15 bp, Homo sapiens
gtattgtggtgggga

SEQ ID NO: 1568344 - DNA, 15 bp, Homo sapiens
ggtattgtggtgggg

SEQ ID NO: 1568345 - DNA, 15 bp, Homo sapiens
tggtattgtggtggg

SEQ ID NO: 1568346 - DNA, 15 bp, Homo sapiens
ttggtattgtggtgg

SEQ ID NO: 1568347 - DNA, 15 bp, Homo sapiens
tttggtattgtggtg

SEQ ID NO: 1568348 - DNA, 15 bp, Homo sapiens
gtttggtattgtggt

SEQ ID NO: 1568349 - DNA, 15 bp, Homo sapiens
tgtttggtattgtgg

SEQ ID NO: 1568350 - DNA, 15 bp, Homo sapiens
atgtttggtattgtg

SEQ ID NO: 1568351 - DNA, 15 bp, Homo sapiens
gatgtttggtattgt

SEQ ID NO: 1568352 - DNA, 15 bp, Homo sapiens
agatgtttggtattg

SEQ ID NO: 1568353 - DNA, 15 bp, Homo sapiens
aagatgtttggtatt

SEQ ID NO: 1568354 - DNA, 15 bp, Homo sapiens
taagatgtttggtat

SEQ ID NO: 1568355 - DNA, 15 bp, Homo sapiens
gtaagatgtttggta

SEQ ID NO: 1568356 - DNA, 15 bp, Homo sapiens
ggtaagatgtttggt

SEQ ID NO: 1568357 - DNA, 15 bp, Homo sapiens
aggtaagatgtttgg

SEQ ID NO: 1568358 - DNA, 15 bp, Homo sapiens
caggtaagatgtttg

SEQ ID NO: 1568359 - DNA, 15 bp, Homo sapiens
gcaggtaagatgttt

SEQ ID NO: 1568360 - DNA, 15 bp, Homo sapiens
tgcaggtaagatgtt

SEQ ID NO: 1568361 - DNA, 15 bp, Homo sapiens
ttgcaggtaagatgt

SEQ ID NO: 1568362 - DNA, 15 bp, Homo sapiens
tttgcaggtaagatg

SEQ ID NO: 1568363 - DNA, 15 bp, Homo sapiens
ctttgcaggtaagat

SEQ ID NO: 1568364 - DNA, 15 bp, Homo sapiens
actttgcaggtaaga

SEQ ID NO: 1568365 - DNA, 15 bp, Homo sapiens
tactttgcaggtaag

SEQ ID NO: 1568366 - DNA, 15 bp, Homo sapiens
ttactttgcaggtaa

SEQ ID NO: 1568367 - DNA, 15 bp, Homo sapiens
tttactttgcaggta

SEQ ID NO: 1568368 - DNA, 15 bp, Homo sapiens
atttactttgcaggt

SEQ ID NO: 1568369 - DNA, 15 bp, Homo sapiens
tatttactttgcagg

SEQ ID NO: 1568370 - DNA, 15 bp, Homo sapiens
ttatttactttgcag

SEQ ID NO: 1568371 - DNA, 15 bp, Homo sapiens
tttatttactttgca

SEQ ID NO: 1568372 - DNA, 15 bp, Homo sapiens
atttatttactttgc

SEQ ID NO: 1568373 - DNA, 15 bp, Homo sapiens
catttatttactttg

SEQ ID NO: 1568374 - DNA, 15 bp, Homo sapiens
acatttatttacttt

SEQ ID NO: 1568375 - DNA, 15 bp, Homo sapiens
tacatttatttactt

SEQ ID NO: 1568376 - DNA, 15 bp, Homo sapiens
atacatttatttact

SEQ ID NO: 1568377 - DNA, 15 bp, Homo sapiens
gatacatttatttac

SEQ ID NO: 1568378 - DNA, 15 bp, Homo sapiens
agatacatttattta

SEQ ID NO: 1568379 - DNA, 15 bp, Homo sapiens
cagatacatttattt

SEQ ID NO: 1568380 - DNA, 15 bp, Homo sapiens
ccagatacatttatt

SEQ ID NO: 1568381 - DNA, 15 bp, Homo sapiens
tccagatacatttat

SEQ ID NO: 1568382 - DNA, 15 bp, Homo sapiens
ctccagatacattta

SEQ ID NO: 1568383 - DNA, 15 bp, Homo sapiens
tctccagatacattt

SEQ ID NO: 1568384 - DNA, 15 bp, Homo sapiens
ttctccagatacatt

SEQ ID NO: 1568385 - DNA, 15 bp, Homo sapiens
cttctccagatacat

SEQ ID NO: 1568386 - DNA, 15 bp, Homo sapiens
ccttctccagataca

SEQ ID NO: 1568387 - DNA, 15 bp, Homo sapiens
tccttctccagatac

SEQ ID NO: 1568388 - DNA, 15 bp, Homo sapiens
atccttctccagata

SEQ ID NO: 1568389 - DNA, 15 bp, Homo sapiens
catccttctccagat

SEQ ID NO: 1568390 - DNA, 15 bp, Homo sapiens
ccatccttctccaga

SEQ ID NO: 1568391 - DNA, 15 bp, Homo sapiens
accatccttctccag

SEQ ID NO: 1568392 - DNA, 15 bp, Homo sapiens
aaccatccttctcca

SEQ ID NO: 1568393 - DNA, 15 bp, Homo sapiens
caaccatccttctcc

SEQ ID NO: 1568394 - DNA, 15 bp, Homo sapiens
tcaaccatccttctc

SEQ ID NO: 1568395 - DNA, 15 bp, Homo sapiens
atcaaccatccttct

SEQ ID NO: 1568396 - DNA, 15 bp, Homo sapiens
catcaaccatccttc

SEQ ID NO: 1568397 - DNA, 15 bp, Homo sapiens
tcatcaaccatcctt

SEQ ID NO: 1568398 - DNA, 15 bp, Homo sapiens
ttcatcaaccatcct

SEQ ID NO: 1568399 - DNA, 15 bp, Homo sapiens
gttcatcaaccatcc

SEQ ID NO: 1568400 - DNA, 15 bp, Homo sapiens
agttcatcaaccatc

SEQ ID NO: 1568401 - DNA, 15 bp, Homo sapiens
aagttcatcaaccat

SEQ ID NO: 1568402 - DNA, 15 bp, Homo sapiens
caagttcatcaacca

SEQ ID NO: 1568403 - DNA, 15 bp, Homo sapiens
gcaagttcatcaacc

SEQ ID NO: 1568404 - DNA, 15 bp, Homo sapiens
agcaagttcatcaac

SEQ ID NO: 1568405 - DNA, 15 bp, Homo sapiens
tagcaagttcatcaa

SEQ ID NO: 1568406 - DNA, 15 bp, Homo sapiens
ttagcaagttcatca

SEQ ID NO: 1568407 - DNA, 15 bp, Homo sapiens
gttagcaagttcatc

SEQ ID NO: 1568408 - DNA, 15 bp, Homo sapiens
tgttagcaagttcat

SEQ ID NO: 1568409 - DNA, 15 bp, Homo sapiens
atgttagcaagttca

SEQ ID NO: 1568410 - DNA, 15 bp, Homo sapiens
catgttagcaagttc

SEQ ID NO: 1568411 - DNA, 15 bp, Homo sapiens
gcatgttagcaagtt

SEQ ID NO: 1568412 - DNA, 15 bp, Homo sapiens
cgcatgttagcaagt

SEQ ID NO: 1568413 - DNA, 15 bp, Homo sapiens
gcgcatgttagcaag

SEQ ID NO: 1568414 - DNA, 15 bp, Homo sapiens
cgcgcatgttagcaa

SEQ ID NO: 1568415 - DNA, 15 bp, Homo sapiens
gcgcgcatgttagca

SEQ ID NO: 1568416 - DNA, 15 bp, Homo sapiens
agcgcgcatgttagc

SEQ ID NO: 1568417 - DNA, 15 bp, Homo sapiens
cagcgcgcatgttag

SEQ ID NO: 1568418 - DNA, 15 bp, Homo sapiens
acagcgcgcatgtta

SEQ ID NO: 1568419 - DNA, 15 bp, Homo sapiens
aacagcgcgcatgtt

SEQ ID NO: 1568420 - DNA, 15 bp, Homo sapiens
caacagcgcgcatgt

SEQ ID NO: 1568421 - DNA, 15 bp, Homo sapiens
acaacagcgcgcatg

SEQ ID NO: 1568422 - DNA, 15 bp, Homo sapiens
tacaacagcgcgcat

SEQ ID NO: 1568423 - DNA, 15 bp, Homo sapiens
ctacaacagcgcgca

SEQ ID NO: 1568424 - DNA, 15 bp, Homo sapiens
tctacaacagcgcgc

SEQ ID NO: 1568425 - DNA, 15 bp, Homo sapiens
ttctacaacagcgcg

SEQ ID NO: 1568426 - DNA, 15 bp, Homo sapiens
attctacaacagcgc

SEQ ID NO: 1568427 - DNA, 15 bp, Homo sapiens
cattctacaacagcg

SEQ ID NO: 1568428 - DNA, 15 bp, Homo sapiens
gcattctacaacagc

SEQ ID NO: 1568429 - DNA, 15 bp, Homo sapiens
tgcattctacaacag

SEQ ID NO: 1568430 - DNA, 15 bp, Homo sapiens
gtgcattctacaaca

SEQ ID NO: 1568431 - DNA, 15 bp, Homo sapiens
agtgcattctacaac

SEQ ID NO: 1568432 - DNA, 15 bp, Homo sapiens
cagtgcattctacaa

SEQ ID NO: 1568433 - DNA, 15 bp, Homo sapiens
tcagtgcattctaca

SEQ ID NO: 1568434 - DNA, 15 bp, Homo sapiens
gtcagtgcattctac

SEQ ID NO: 1568435 - DNA, 15 bp, Homo sapiens
agtcagtgcattcta

SEQ ID NO: 1568436 - DNA, 15 bp, Homo sapiens
tagtcagtgcattct

SEQ ID NO: 1568437 - DNA, 15 bp, Homo sapiens
gtagtcagtgcattc

SEQ ID NO: 1568438 - DNA, 15 bp, Homo sapiens
tgtagtcagtgcatt

SEQ ID NO: 1568439 - DNA, 15 bp, Homo sapiens
ctgtagtcagtgcat

SEQ ID NO: 1568440 - DNA, 15 bp, Homo sapiens
tctgtagtcagtgca

SEQ ID NO: 1568441 - DNA, 15 bp, Homo sapiens
ttctgtagtcagtgc

SEQ ID NO: 1568442 - DNA, 15 bp, Homo sapiens
attctgtagtcagtg

SEQ ID NO: 1568443 - DNA, 15 bp, Homo sapiens
aattctgtagtcagt

SEQ ID NO: 1568444 - DNA, 15 bp, Homo sapiens
gaattctgtagtcag

SEQ ID NO: 1568445 - DNA, 15 bp, Homo sapiens
agaattctgtagtca

SEQ ID NO: 1568446 - DNA, 15 bp, Homo sapiens
aagaattctgtagtc

SEQ ID NO: 1568447 - DNA, 15 bp, Homo sapiens
aaagaattctgtagt

SEQ ID NO: 1568448 - DNA, 15 bp, Homo sapiens
taaagaattctgtag

SEQ ID NO: 1568449 - DNA, 15 bp, Homo sapiens
ataaagaattctgta

SEQ ID NO: 1568450 - DNA, 15 bp, Homo sapiens
tataaagaattctgt

SEQ ID NO: 1568451 - DNA, 15 bp, Homo sapiens
ttataaagaattctg

SEQ ID NO: 1568452 - DNA, 15 bp, Homo sapiens
cttataaagaattct

SEQ ID NO: 1568453 - DNA, 15 bp, Homo sapiens
ccttataaagaattc

SEQ ID NO: 1568454 - DNA, 15 bp, Homo sapiens
cccttataaagaatt

SEQ ID NO: 1568455 - DNA, 15 bp, Homo sapiens
tcccttataaagaat

SEQ ID NO: 1568456 - DNA, 15 bp, Homo sapiens
atcccttataaagaa

SEQ ID NO: 1568457 - DNA, 15 bp, Homo sapiens
tatcccttataaaga

SEQ ID NO: 1568458 - DNA, 15 bp, Homo sapiens
ctatcccttataaag

SEQ ID NO: 1568459 - DNA, 15 bp, Homo sapiens
tctatcccttataaa

SEQ ID NO: 1568460 - DNA, 15 bp, Homo sapiens
gtctatcccttataa

SEQ ID NO: 1568461 - DNA, 15 bp, Homo sapiens
agtctatcccttata

SEQ ID NO: 1568462 - DNA, 15 bp, Homo sapiens
aagtctatcccttat

SEQ ID NO: 1568463 - DNA, 15 bp, Homo sapiens
caagtctatccctta

SEQ ID NO: 1568464 - DNA, 15 bp, Homo sapiens
acaagtctatccctt

SEQ ID NO: 1568465 - DNA, 15 bp, Homo sapiens
aacaagtctatccct

SEQ ID NO: 1568466 - DNA, 15 bp, Homo sapiens
gaacaagtctatccc

SEQ ID NO: 1568467 - DNA, 15 bp, Homo sapiens
tgaacaagtctatcc

SEQ ID NO: 1568468 - DNA, 15 bp, Homo sapiens
atgaacaagtctatc

SEQ ID NO: 1568469 - DNA, 15 bp, Homo sapiens
tatgaacaagtctat

SEQ ID NO: 1568470 - DNA, 15 bp, Homo sapiens
gtatgaacaagtcta

SEQ ID NO: 1568471 - DNA, 15 bp, Homo sapiens
agtatgaacaagtct

SEQ ID NO: 1568472 - DNA, 15 bp, Homo sapiens
aagtatgaacaagtc

SEQ ID NO: 1568473 - DNA, 15 bp, Homo sapiens
aaagtatgaacaagt

SEQ ID NO: 1568474 - DNA, 15 bp, Homo sapiens
aaaagtatgaacaag

SEQ ID NO: 1568475 - DNA, 15 bp, Homo sapiens
taaaagtatgaacaa

SEQ ID NO: 1568476 - DNA, 15 bp, Homo sapiens
ataaaagtatgaaca

SEQ ID NO: 1568477 - DNA, 15 bp, Homo sapiens
aataaaagtatgaac

SEQ ID NO: 1568478 - DNA, 15 bp, Homo sapiens
aaataaaagtatgaa

SEQ ID NO: 1568479 - DNA, 15 bp, Homo sapiens
gaaataaaagtatga

SEQ ID NO: 1568480 - DNA, 15 bp, Homo sapiens
ggaaataaaagtatg

SEQ ID NO: 1568481 - DNA, 15 bp, Homo sapiens
tggaaataaaagtat

SEQ ID NO: 1568482 - DNA, 15 bp, Homo sapiens
atggaaataaaagta

SEQ ID NO: 1568483 - DNA, 15 bp, Homo sapiens
tatggaaataaaagt

SEQ ID NO: 1568484 - DNA, 15 bp, Homo sapiens
atatggaaataaaag

SEQ ID NO: 1568485 - DNA, 15 bp, Homo sapiens
aatatggaaataaaa

SEQ ID NO: 1568486 - DNA, 15 bp, Homo sapiens
gaatatggaaataaa

SEQ ID NO: 1568487 - DNA, 15 bp, Homo sapiens
ggaatatggaaataa

SEQ ID NO: 1568488 - DNA, 15 bp, Homo sapiens
tggaatatggaaata

SEQ ID NO: 1568489 - DNA, 15 bp, Homo sapiens
atggaatatggaaat

SEQ ID NO: 1568490 - DNA, 15 bp, Homo sapiens
aatggaatatggaaa

SEQ ID NO: 1568491 - DNA, 15 bp, Homo sapiens
aaatggaatatggaa

SEQ ID NO: 1568492 - DNA, 15 bp, Homo sapiens
aaaatggaatatgga

SEQ ID NO: 1568493 - DNA, 15 bp, Homo sapiens
aaaaatggaatatgg

SEQ ID NO: 1568494 - DNA, 15 bp, Homo sapiens
aaaaaatggaatatg

SEQ ID NO: 1568495 - DNA, 15 bp, Homo sapiens
aaaaaaatggaatat

SEQ ID NO: 1568496 - DNA, 15 bp, Homo sapiens
taaaaaaatggaata

SEQ ID NO: 1568497 - DNA, 15 bp, Homo sapiens
gtaaaaaaatggaat

SEQ ID NO: 1568498 - DNA, 15 bp, Homo sapiens
agtaaaaaaatggaa

SEQ ID NO: 1568499 - DNA, 15 bp, Homo sapiens
gagtaaaaaaatgga

SEQ ID NO: 1568500 - DNA, 15 bp, Homo sapiens
agagtaaaaaaatgg

SEQ ID NO: 1568501 - DNA, 15 bp, Homo sapiens
gagagtaaaaaaatg

SEQ ID NO: 1568502 - DNA, 15 bp, Homo sapiens
agagagtaaaaaaat

SEQ ID NO: 1568503 - DNA, 15 bp, Homo sapiens
gagagagtaaaaaaa

SEQ ID NO: 1568504 - DNA, 15 bp, Homo sapiens
tgagagagtaaaaaa

SEQ ID NO: 1568505 - DNA, 15 bp, Homo sapiens
ttgagagagtaaaaa

SEQ ID NO: 1568506 - DNA, 15 bp, Homo sapiens
gttgagagagtaaaa

SEQ ID NO: 1568507 - DNA, 15 bp, Homo sapiens
agttgagagagtaaa

SEQ ID NO: 1568508 - DNA, 15 bp, Homo sapiens
cagttgagagagtaa

SEQ ID NO: 1568509 - DNA, 15 bp, Homo sapiens
acagttgagagagta

SEQ ID NO: 1568510 - DNA, 15 bp, Homo sapiens
tacagttgagagagt

SEQ ID NO: 1568511 - DNA, 15 bp, Homo sapiens
atacagttgagagag

SEQ ID NO: 1568512 - DNA, 15 bp, Homo sapiens
catacagttgagaga

SEQ ID NO: 1568513 - DNA, 15 bp, Homo sapiens
acatacagttgagag

SEQ ID NO: 1568514 - DNA, 15 bp, Homo sapiens
gacatacagttgaga

SEQ ID NO: 1568515 - DNA, 15 bp, Homo sapiens
ggacatacagttgag

SEQ ID NO: 1568516 - DNA, 15 bp, Homo sapiens
tggacatacagttga

SEQ ID NO: 1568517 - DNA, 15 bp, Homo sapiens
ttggacatacagttg

SEQ ID NO: 1568518 - DNA, 15 bp, Homo sapiens
attggacatacagtt

SEQ ID NO: 1568519 - DNA, 15 bp, Homo sapiens
cattggacatacagt

SEQ ID NO: 1568520 - DNA, 15 bp, Homo sapiens
acattggacatacag

SEQ ID NO: 1568521 - DNA, 15 bp, Homo sapiens
tacattggacataca

SEQ ID NO: 1568522 - DNA, 15 bp, Homo sapiens
ttacattggacatac

SEQ ID NO: 1568523 - DNA, 15 bp, Homo sapiens
gttacattggacata

SEQ ID NO: 1568524 - DNA, 15 bp, Homo sapiens
agttacattggacat

SEQ ID NO: 1568525 - DNA, 15 bp, Homo sapiens
cagttacattggaca

SEQ ID NO: 1568526 - DNA, 15 bp, Homo sapiens
ccagttacattggac

SEQ ID NO: 1568527 - DNA, 15 bp, Homo sapiens
accagttacattgga

SEQ ID NO: 1568528 - DNA, 15 bp, Homo sapiens
aaccagttacattgg

SEQ ID NO: 1568529 - DNA, 15 bp, Homo sapiens
caaccagttacattg

SEQ ID NO: 1568530 - DNA, 15 bp, Homo sapiens
tcaaccagttacatt

SEQ ID NO: 1568531 - DNA, 15 bp, Homo sapiens
gtcaaccagttacat

SEQ ID NO: 1568532 - DNA, 15 bp, Homo sapiens
tgtcaaccagttaca

SEQ ID NO: 1568533 - DNA, 15 bp, Homo sapiens
ttgtcaaccagttac

SEQ ID NO: 1568534 - DNA, 15 bp, Homo sapiens
gttgtcaaccagtta

SEQ ID NO: 1568535 - DNA, 15 bp, Homo sapiens
agttgtcaaccagtt

SEQ ID NO: 1568536 - DNA, 15 bp, Homo sapiens
aagttgtcaaccagt

SEQ ID NO: 1568537 - DNA, 15 bp, Homo sapiens
aaagttgtcaaccag

SEQ ID NO: 1568538 - DNA, 15 bp, Homo sapiens
aaaagttgtcaacca

SEQ ID NO: 1568539 - DNA, 15 bp, Homo sapiens
aaaaagttgtcaacc

SEQ ID NO: 1568540 - DNA, 15 bp, Homo sapiens
taaaaagttgtcaac

SEQ ID NO: 1568541 - DNA, 15 bp, Homo sapiens
ataaaaagttgtcaa

SEQ ID NO: 1568542 - DNA, 15 bp, Homo sapiens
cataaaaagttgtca

SEQ ID NO: 1568543 - DNA, 15 bp, Homo sapiens
gcataaaaagttgtc

SEQ ID NO: 1568544 - DNA, 15 bp, Homo sapiens
agcataaaaagttgt

SEQ ID NO: 1568545 - DNA, 15 bp, Homo sapiens
cagcataaaaagttg

SEQ ID NO: 1568546 - DNA, 15 bp, Homo sapiens
tcagcataaaaagtt

SEQ ID NO: 1568547 - DNA, 15 bp, Homo sapiens
ctcagcataaaaagt

SEQ ID NO: 1568548 - DNA, 15 bp, Homo sapiens
actcagcataaaaag

SEQ ID NO: 1568549 - DNA, 15 bp, Homo sapiens
tactcagcataaaaa

SEQ ID NO: 1568550 - DNA, 15 bp, Homo sapiens
atactcagcataaaa

SEQ ID NO: 1568551 - DNA, 15 bp, Homo sapiens
tatactcagcataaa

SEQ ID NO: 1568552 - DNA, 15 bp, Homo sapiens
atatactcagcataa

SEQ ID NO: 1568553 - DNA, 15 bp, Homo sapiens
aatatactcagcata

SEQ ID NO: 1568554 - DNA, 15 bp, Homo sapiens
aaatatactcagcat

SEQ ID NO: 1568555 - DNA, 15 bp, Homo sapiens
aaaatatactcagca

SEQ ID NO: 1568556 - DNA, 15 bp, Homo sapiens
taaaatatactcagc

SEQ ID NO: 1568557 - DNA, 15 bp, Homo sapiens
ttaaaatatactcag

SEQ ID NO: 1568558 - DNA, 15 bp, Homo sapiens
cttaaaatatactca

SEQ ID NO: 1568559 - DNA, 15 bp, Homo sapiens
acttaaaatatactc

SEQ ID NO: 1568560 - DNA, 15 bp, Homo sapiens
tacttaaaatatact

SEQ ID NO: 1568561 - DNA, 15 bp, Homo sapiens
ctacttaaaatatac

SEQ ID NO: 1568562 - DNA, 15 bp, Homo sapiens
cctacttaaaatata

SEQ ID NO: 1568563 - DNA, 15 bp, Homo sapiens
acctacttaaaatat

SEQ ID NO: 1568564 - DNA, 15 bp, Homo sapiens
aacctacttaaaata

SEQ ID NO: 1568565 - DNA, 15 bp, Homo sapiens
aaacctacttaaaat

SEQ ID NO: 1568566 - DNA, 15 bp, Homo sapiens
aaaacctacttaaaa

SEQ ID NO: 1568567 - DNA, 15 bp, Homo sapiens
taaaacctacttaaa

SEQ ID NO: 1568568 - DNA, 15 bp, Homo sapiens
ctaaaacctacttaa

SEQ ID NO: 1568569 - DNA, 15 bp, Homo sapiens
actaaaacctactta

SEQ ID NO: 1568570 - DNA, 15 bp, Homo sapiens
aactaaaacctactt

SEQ ID NO: 1568571 - DNA, 15 bp, Homo sapiens
caactaaaacctact

SEQ ID NO: 1568572 - DNA, 15 bp, Homo sapiens
gcaactaaaacctac

SEQ ID NO: 1568573 - DNA, 15 bp, Homo sapiens
agcaactaaaaccta

SEQ ID NO: 1568574 - DNA, 15 bp, Homo sapiens
aagcaactaaaacct

SEQ ID NO: 1568575 - DNA, 15 bp, Homo sapiens
aaagcaactaaaacc

SEQ ID NO: 1568576 - DNA, 15 bp, Homo sapiens
caaagcaactaaaac

SEQ ID NO: 1568577 - DNA, 15 bp, Homo sapiens
tcaaagcaactaaaa

SEQ ID NO: 1568578 - DNA, 15 bp, Homo sapiens
gtcaaagcaactaaa

SEQ ID NO: 1568579 - DNA, 15 bp, Homo sapiens
tgtcaaagcaactaa

SEQ ID NO: 1568580 - DNA, 15 bp, Homo sapiens
gtgtcaaagcaacta

SEQ ID NO: 1568581 - DNA, 15 bp, Homo sapiens
agtgtcaaagcaact

SEQ ID NO: 1568582 - DNA, 15 bp, Homo sapiens
gagtgtcaaagcaac

SEQ ID NO: 1568583 - DNA, 15 bp, Homo sapiens
tgagtgtcaaagcaa

SEQ ID NO: 1568584 - DNA, 15 bp, Homo sapiens
atgagtgtcaaagca

SEQ ID NO: 1568585 - DNA, 15 bp, Homo sapiens
aatgagtgtcaaagc

SEQ ID NO: 1568586 - DNA, 15 bp, Homo sapiens
gaatgagtgtcaaag

SEQ ID NO: 1568587 - DNA, 15 bp, Homo sapiens
agaatgagtgtcaaa

SEQ ID NO: 1568588 - DNA, 15 bp, Homo sapiens
tagaatgagtgtcaa

SEQ ID NO: 1568589 - DNA, 15 bp, Homo sapiens
ttagaatgagtgtca

SEQ ID NO: 1568590 - DNA, 15 bp, Homo sapiens
tttagaatgagtgtc

SEQ ID NO: 1568591 - DNA, 15 bp, Homo sapiens
ttttagaatgagtgt

SEQ ID NO: 1568592 - DNA, 15 bp, Homo sapiens
tttttagaatgagtg

SEQ ID NO: 1568593 - DNA, 15 bp, Homo sapiens
gtttttagaatgagt

SEQ ID NO: 1568594 - DNA, 15 bp, Homo sapiens
tgtttttagaatgag

SEQ ID NO: 1568595 - DNA, 15 bp, Homo sapiens
atgtttttagaatga

SEQ ID NO: 1568596 - DNA, 15 bp, Homo sapiens
catgtttttagaatg

SEQ ID NO: 1568597 - DNA, 15 bp, Homo sapiens
acatgtttttagaat

SEQ ID NO: 1568598 - DNA, 15 bp, Homo sapiens
aacatgtttttagaa

SEQ ID NO: 1568599 - DNA, 15 bp, Homo sapiens
aaacatgtttttaga

SEQ ID NO: 1568600 - DNA, 15 bp, Homo sapiens
aaaacatgtttttag

SEQ ID NO: 1568601 - DNA, 15 bp, Homo sapiens
gaaaacatgttttta

SEQ ID NO: 1568602 - DNA, 15 bp, Homo sapiens
tgaaaacatgttttt

SEQ ID NO: 1568603 - DNA, 15 bp, Homo sapiens
ttgaaaacatgtttt

SEQ ID NO: 1568604 - DNA, 15 bp, Homo sapiens
gttgaaaacatgttt

SEQ ID NO: 1568605 - DNA, 15 bp, Homo sapiens
tgttgaaaacatgtt

SEQ ID NO: 1568606 - DNA, 15 bp, Homo sapiens
atgttgaaaacatgt

SEQ ID NO: 1568607 - DNA, 15 bp, Homo sapiens
catgttgaaaacatg

SEQ ID NO: 1568608 - DNA, 15 bp, Homo sapiens
acatgttgaaaacat

SEQ ID NO: 1568609 - DNA, 15 bp, Homo sapiens
tacatgttgaaaaca

SEQ ID NO: 1568610 - DNA, 15 bp, Homo sapiens
gtacatgttgaaaac

SEQ ID NO: 1568611 - DNA, 15 bp, Homo sapiens
tgtacatgttgaaaa

SEQ ID NO: 1568612 - DNA, 15 bp, Homo sapiens
atgtacatgttgaaa

SEQ ID NO: 1568613 - DNA, 15 bp, Homo sapiens
tatgtacatgttgaa

SEQ ID NO: 1568614 - DNA, 15 bp, Homo sapiens
ctatgtacatgttga

SEQ ID NO: 1568615 - DNA, 15 bp, Homo sapiens
cctatgtacatgttg

SEQ ID NO: 1568616 - DNA, 15 bp, Homo sapiens
ccctatgtacatgtt

SEQ ID NO: 1568617 - DNA, 15 bp, Homo sapiens
accctatgtacatgt

SEQ ID NO: 1568618 - DNA, 15 bp, Homo sapiens
aaccctatgtacatg

SEQ ID NO: 1568619 - DNA, 15 bp, Homo sapiens
aaaccctatgtacat

SEQ ID NO: 1568620 - DNA, 15 bp, Homo sapiens
taaaccctatgtaca

SEQ ID NO: 1568621 - DNA, 15 bp, Homo sapiens
ataaaccctatgtac

SEQ ID NO: 1568622 - DNA, 15 bp, Homo sapiens
tataaaccctatgta

SEQ ID NO: 1568623 - DNA, 15 bp, Homo sapiens
atataaaccctatgt

SEQ ID NO: 1568624 - DNA, 15 bp, Homo sapiens
tatataaaccctatg

SEQ ID NO: 1568625 - DNA, 15 bp, Homo sapiens
atatataaaccctat

SEQ ID NO: 1568626 - DNA, 15 bp, Homo sapiens
gatatataaacccta

SEQ ID NO: 1568627 - DNA, 15 bp, Homo sapiens
tgatatataaaccct

SEQ ID NO: 1568628 - DNA, 15 bp, Homo sapiens
atgatatataaaccc

SEQ ID NO: 1568629 - DNA, 15 bp, Homo sapiens
gatgatatataaacc

SEQ ID NO: 1568630 - DNA, 15 bp, Homo sapiens
tgatgatatataaac

SEQ ID NO: 1568631 - DNA, 15 bp, Homo sapiens
ctgatgatatataaa

SEQ ID NO: 1568632 - DNA, 15 bp, Homo sapiens
gctgatgatatataa

SEQ ID NO: 1568633 - DNA, 15 bp, Homo sapiens
agctgatgatatata

SEQ ID NO: 1568634 - DNA, 15 bp, Homo sapiens
tagctgatgatatat

SEQ ID NO: 1568635 - DNA, 15 bp, Homo sapiens
atagctgatgatata

SEQ ID NO: 1568636 - DNA, 15 bp, Homo sapiens
tatagctgatgatat

SEQ ID NO: 1568637 - DNA, 15 bp, Homo sapiens
atatagctgatgata

SEQ ID NO: 1568638 - DNA, 15 bp, Homo sapiens
catatagctgatgat

SEQ ID NO: 1568639 - DNA, 15 bp, Homo sapiens
tcatatagctgatga

SEQ ID NO: 1568640 - DNA, 15 bp, Homo sapiens
gtcatatagctgatg

SEQ ID NO: 1568641 - DNA, 15 bp, Homo sapiens
agtcatatagctgat

SEQ ID NO: 1568642 - DNA, 15 bp, Homo sapiens
aagtcatatagctga

SEQ ID NO: 1568643 - DNA, 15 bp, Homo sapiens
taagtcatatagctg

SEQ ID NO: 1568644 - DNA, 15 bp, Homo sapiens
ataagtcatatagct

SEQ ID NO: 1568645 - DNA, 15 bp, Homo sapiens
aataagtcatatagc

SEQ ID NO: 1568646 - DNA, 15 bp, Homo sapiens
aaataagtcatatag

SEQ ID NO: 1568647 - DNA, 15 bp, Homo sapiens
taaataagtcatata

SEQ ID NO: 1568648 - DNA, 15 bp, Homo sapiens
ttaaataagtcatat

SEQ ID NO: 1568649 - DNA, 15 bp, Homo sapiens
attaaataagtcata

SEQ ID NO: 1568650 - DNA, 15 bp, Homo sapiens
aattaaataagtcat

SEQ ID NO: 1568651 - DNA, 15 bp, Homo sapiens
aaattaaataagtca

SEQ ID NO: 1568652 - DNA, 15 bp, Homo sapiens
gaaattaaataagtc

SEQ ID NO: 1568653 - DNA, 15 bp, Homo sapiens
agaaattaaataagt

SEQ ID NO: 1568654 - DNA, 15 bp, Homo sapiens
cagaaattaaataag

SEQ ID NO: 1568655 - DNA, 15 bp, Homo sapiens
acagaaattaaataa

SEQ ID NO: 1568656 - DNA, 15 bp, Homo sapiens
aacagaaattaaata

SEQ ID NO: 1568657 - DNA, 15 bp, Homo sapiens
taacagaaattaaat

SEQ ID NO: 1568658 - DNA, 15 bp, Homo sapiens
gtaacagaaattaaa

SEQ ID NO: 1568659 - DNA, 15 bp, Homo sapiens
tgtaacagaaattaa

SEQ ID NO: 1568660 - DNA, 15 bp, Homo sapiens
ttgtaacagaaatta

SEQ ID NO: 1568661 - DNA, 15 bp, Homo sapiens
attgtaacagaaatt

SEQ ID NO: 1568662 - DNA, 15 bp, Homo sapiens
aattgtaacagaaat

SEQ ID NO: 1568663 - DNA, 15 bp, Homo sapiens
taattgtaacagaaa

SEQ ID NO: 1568664 - DNA, 15 bp, Homo sapiens
ttaattgtaacagaa

SEQ ID NO: 1568665 - DNA, 15 bp, Homo sapiens
tttaattgtaacaga

SEQ ID NO: 1568666 - DNA, 15 bp, Homo sapiens
ttttaattgtaacag

SEQ ID NO: 1568667 - DNA, 15 bp, Homo sapiens
cttttaattgtaaca

SEQ ID NO: 1568668 - DNA, 15 bp, Homo sapiens
tcttttaattgtaac

SEQ ID NO: 1568669 - DNA, 15 bp, Homo sapiens
atcttttaattgtaa

SEQ ID NO: 1568670 - DNA, 15 bp, Homo sapiens
tatcttttaattgta

SEQ ID NO: 1568671 - DNA, 15 bp, Homo sapiens
gtatcttttaattgt

SEQ ID NO: 1568672 - DNA, 15 bp, Homo sapiens
ggtatcttttaattg

SEQ ID NO: 1568673 - DNA, 15 bp, Homo sapiens
aggtatcttttaatt

SEQ ID NO: 1568674 - DNA, 15 bp, Homo sapiens
aaggtatcttttaat

SEQ ID NO: 1568675 - DNA, 15 bp, Homo sapiens
caaggtatcttttaa

SEQ ID NO: 1568676 - DNA, 15 bp, Homo sapiens
gcaaggtatctttta

SEQ ID NO: 1568677 - DNA, 15 bp, Homo sapiens
agcaaggtatctttt

SEQ ID NO: 1568678 - DNA, 15 bp, Homo sapiens
aagcaaggtatcttt

SEQ ID NO: 1568679 - DNA, 15 bp, Homo sapiens
caagcaaggtatctt

SEQ ID NO: 1568680 - DNA, 15 bp, Homo sapiens
acaagcaaggtatct

SEQ ID NO: 1568681 - DNA, 15 bp, Homo sapiens
aacaagcaaggtatc

SEQ ID NO: 1568682 - DNA, 15 bp, Homo sapiens
taacaagcaaggtat

SEQ ID NO: 1568683 - DNA, 15 bp, Homo sapiens
ataacaagcaaggta

SEQ ID NO: 1568684 - DNA, 15 bp, Homo sapiens
tataacaagcaaggt

SEQ ID NO: 1568685 - DNA, 15 bp, Homo sapiens
ttataacaagcaagg

SEQ ID NO: 1568686 - DNA, 15 bp, Homo sapiens
cttataacaagcaag

SEQ ID NO: 1568687 - DNA, 15 bp, Homo sapiens
tcttataacaagcaa

SEQ ID NO: 1568688 - DNA, 15 bp, Homo sapiens
ctcttataacaagca

SEQ ID NO: 1568689 - DNA, 15 bp, Homo sapiens
actcttataacaagc

SEQ ID NO: 1568690 - DNA, 15 bp, Homo sapiens
tactcttataacaag

SEQ ID NO: 1568691 - DNA, 15 bp, Homo sapiens
ttactcttataacaa

SEQ ID NO: 1568692 - DNA, 15 bp, Homo sapiens
tttactcttataaca

SEQ ID NO: 1568693 - DNA, 15 bp, Homo sapiens
ttttactcttataac

SEQ ID NO: 1568694 - DNA, 15 bp, Homo sapiens
attttactcttataa

SEQ ID NO: 1568695 - DNA, 15 bp, Homo sapiens
aattttactcttata

SEQ ID NO: 1568696 - DNA, 15 bp, Homo sapiens
aaattttactcttat

SEQ ID NO: 1568697 - DNA, 15 bp, Homo sapiens
caaattttactctta

SEQ ID NO: 1568698 - DNA, 15 bp, Homo sapiens
tcaaattttactctt

SEQ ID NO: 1568699 - DNA, 15 bp, Homo sapiens
atcaaattttactct

SEQ ID NO: 1568700 - DNA, 15 bp, Homo sapiens
aatcaaattttactc

SEQ ID NO: 1568701 - DNA, 15 bp, Homo sapiens
aaatcaaattttact

SEQ ID NO: 1568702 - DNA, 15 bp, Homo sapiens
caaatcaaattttac

SEQ ID NO: 1568703 - DNA, 15 bp, Homo sapiens
acaaatcaaatttta

SEQ ID NO: 1568704 - DNA, 15 bp, Homo sapiens
aacaaatcaaatttt

SEQ ID NO: 1568705 - DNA, 15 bp, Homo sapiens
caacaaatcaaattt

SEQ ID NO: 1568706 - DNA, 15 bp, Homo sapiens
gcaacaaatcaaatt

SEQ ID NO: 1568707 - DNA, 15 bp, Homo sapiens
tgcaacaaatcaaat

SEQ ID NO: 1568708 - DNA, 15 bp, Homo sapiens
ctgcaacaaatcaaa

SEQ ID NO: 1568709 - DNA, 15 bp, Homo sapiens
cctgcaacaaatcaa

SEQ ID NO: 1568710 - DNA, 15 bp, Homo sapiens
acctgcaacaaatca

SEQ ID NO: 1568711 - DNA, 15 bp, Homo sapiens
aacctgcaacaaatc

SEQ ID NO: 1568712 - DNA, 15 bp, Homo sapiens
aaacctgcaacaaat

SEQ ID NO: 1568713 - DNA, 15 bp, Homo sapiens
aaaacctgcaacaaa

SEQ ID NO: 1568714 - DNA, 15 bp, Homo sapiens
caaaacctgcaacaa

SEQ ID NO: 1568715 - DNA, 15 bp, Homo sapiens
ccaaaacctgcaaca

SEQ ID NO: 1568716 - DNA, 15 bp, Homo sapiens
accaaaacctgcaac

SEQ ID NO: 1568717 - DNA, 15 bp, Homo sapiens
aaccaaaacctgcaa

SEQ ID NO: 1568718 - DNA, 15 bp, Homo sapiens
aaaccaaaacctgca

SEQ ID NO: 1568719 - DNA, 15 bp, Homo sapiens
aaaaccaaaacctgc

SEQ ID NO: 1568720 - DNA, 15 bp, Homo sapiens
taaaaccaaaacctg

SEQ ID NO: 1568721 - DNA, 15 bp, Homo sapiens
ttaaaaccaaaacct

SEQ ID NO: 1568722 - DNA, 15 bp, Homo sapiens
attaaaaccaaaacc

SEQ ID NO: 1568723 - DNA, 15 bp, Homo sapiens
cattaaaaccaaaac

SEQ ID NO: 1568724 - DNA, 15 bp, Homo sapiens
ccattaaaaccaaaa

SEQ ID NO: 1568725 - DNA, 15 bp, Homo sapiens
gccattaaaaccaaa

SEQ ID NO: 1568726 - DNA, 15 bp, Homo sapiens
agccattaaaaccaa

SEQ ID NO: 1568727 - DNA, 15 bp, Homo sapiens
aagccattaaaacca

SEQ ID NO: 1568728 - DNA, 15 bp, Homo sapiens
caagccattaaaacc

SEQ ID NO: 1568729 - DNA, 15 bp, Homo sapiens
acaagccattaaaac

SEQ ID NO: 1568730 - DNA, 15 bp, Homo sapiens
cacaagccattaaaa

SEQ ID NO: 1568731 - DNA, 15 bp, Homo sapiens
ccacaagccattaaa

SEQ ID NO: 1568732 - DNA, 15 bp, Homo sapiens
gccacaagccattaa

SEQ ID NO: 1568733 - DNA, 15 bp, Homo sapiens
cgccacaagccatta

SEQ ID NO: 1568734 - DNA, 15 bp, Homo sapiens
ccgccacaagccatt

SEQ ID NO: 1568735 - DNA, 15 bp, Homo sapiens
accgccacaagccat

SEQ ID NO: 1568736 - DNA, 15 bp, Homo sapiens
aaccgccacaagcca

SEQ ID NO: 1568737 - DNA, 15 bp, Homo sapiens
aaaccgccacaagcc

SEQ ID NO: 1568738 - DNA, 15 bp, Homo sapiens
caaaccgccacaagc

SEQ ID NO: 1568739 - DNA, 15 bp, Homo sapiens
gcaaaccgccacaag

SEQ ID NO: 1568740 - DNA, 15 bp, Homo sapiens
tgcaaaccgccacaa

SEQ ID NO: 1568741 - DNA, 15 bp, Homo sapiens
ctgcaaaccgccaca

SEQ ID NO: 1568742 - DNA, 15 bp, Homo sapiens
cctgcaaaccgccac

SEQ ID NO: 1568743 - DNA, 15 bp, Homo sapiens
tcctgcaaaccgcca

SEQ ID NO: 1568744 - DNA, 15 bp, Homo sapiens
gtcctgcaaaccgcc

SEQ ID NO: 1568745 - DNA, 15 bp, Homo sapiens
ggtcctgcaaaccgc

SEQ ID NO: 1568746 - DNA, 15 bp, Homo sapiens
cggtcctgcaaaccg

SEQ ID NO: 1568747 - DNA, 15 bp, Homo sapiens
acggtcctgcaaacc

SEQ ID NO: 1568748 - DNA, 15 bp, Homo sapiens
aacggtcctgcaaac

SEQ ID NO: 1568749 - DNA, 15 bp, Homo sapiens
aaacggtcctgcaaa

SEQ ID NO: 1568750 - DNA, 15 bp, Homo sapiens
aaaacggtcctgcaa

SEQ ID NO: 1568751 - DNA, 15 bp, Homo sapiens
gaaaacggtcctgca

SEQ ID NO: 1568752 - DNA, 15 bp, Homo sapiens
tgaaaacggtcctgc

SEQ ID NO: 1568753 - DNA, 15 bp, Homo sapiens
ttgaaaacggtcctg

SEQ ID NO: 1568754 - DNA, 15 bp, Homo sapiens
tttgaaaacggtcct

SEQ ID NO: 1568755 - DNA, 15 bp, Homo sapiens
ctttgaaaacggtcc

SEQ ID NO: 1568756 - DNA, 15 bp, Homo sapiens
cctttgaaaacggtc

SEQ ID NO: 1568757 - DNA, 15 bp, Homo sapiens
acctttgaaaacggt

SEQ ID NO: 1568758 - DNA, 15 bp, Homo sapiens
tacctttgaaaacgg

SEQ ID NO: 1568759 - DNA, 15 bp, Homo sapiens
ttacctttgaaaacg

SEQ ID NO: 1568760 - DNA, 15 bp, Homo sapiens
cttacctttgaaaac

SEQ ID NO: 1568761 - DNA, 15 bp, Homo sapiens
tcttacctttgaaaa

SEQ ID NO: 1568762 - DNA, 15 bp, Homo sapiens
ttcttacctttgaaa

SEQ ID NO: 1568763 - DNA, 15 bp, Homo sapiens
tttcttacctttgaa

SEQ ID NO: 1568764 - DNA, 15 bp, Homo sapiens
ttttcttacctttga

SEQ ID NO: 1568765 - DNA, 15 bp, Homo sapiens
attttcttacctttg

SEQ ID NO: 1568766 - DNA, 15 bp, Homo sapiens
tattttcttaccttt

SEQ ID NO: 1568767 - DNA, 15 bp, Homo sapiens
atattttcttacctt

SEQ ID NO: 1568768 - DNA, 15 bp, Homo sapiens
tatattttcttacct

SEQ ID NO: 1568769 - DNA, 15 bp, Homo sapiens
atatattttcttacc

SEQ ID NO: 1568770 - DNA, 15 bp, Homo sapiens
aatatattttcttac

SEQ ID NO: 1568771 - DNA, 15 bp, Homo sapiens
aaatatattttctta

SEQ ID NO: 1568772 - DNA, 15 bp, Homo sapiens
aaaatatattttctt

SEQ ID NO: 1568773 - DNA, 15 bp, Homo sapiens
aaaaatatattttct

SEQ ID NO: 1568774 - DNA, 15 bp, Homo sapiens
gaaaaatatattttc

SEQ ID NO: 1568775 - DNA, 15 bp, Homo sapiens
agaaaaatatatttt

SEQ ID NO: 1568776 - DNA, 15 bp, Homo sapiens
gagaaaaatatattt

SEQ ID NO: 1568777 - DNA, 15 bp, Homo sapiens
agagaaaaatatatt

SEQ ID NO: 1568778 - DNA, 15 bp, Homo sapiens
tagagaaaaatatat

SEQ ID NO: 1568779 - DNA, 15 bp, Homo sapiens
ttagagaaaaatata

SEQ ID NO: 1568780 - DNA, 15 bp, Homo sapiens
gttagagaaaaatat

SEQ ID NO: 1568781 - DNA, 15 bp, Homo sapiens
agttagagaaaaata

SEQ ID NO: 1568782 - DNA, 15 bp, Homo sapiens
aagttagagaaaaat

SEQ ID NO: 1568783 - DNA, 15 bp, Homo sapiens
aaagttagagaaaaa

SEQ ID NO: 1568784 - DNA, 15 bp, Homo sapiens
aaaagttagagaaaa

SEQ ID NO: 1568785 - DNA, 15 bp, Homo sapiens
caaaagttagagaaa

SEQ ID NO: 1568786 - DNA, 15 bp, Homo sapiens
ccaaaagttagagaa

SEQ ID NO: 1568787 - DNA, 15 bp, Homo sapiens
gccaaaagttagaga

SEQ ID NO: 1568788 - DNA, 15 bp, Homo sapiens
tgccaaaagttagag

SEQ ID NO: 1568789 - DNA, 15 bp, Homo sapiens
ttgccaaaagttaga

SEQ ID NO: 1568790 - DNA, 15 bp, Homo sapiens
tttgccaaaagttag

SEQ ID NO: 1568791 - DNA, 15 bp, Homo sapiens
ttttgccaaaagtta

SEQ ID NO: 1568792 - DNA, 15 bp, Homo sapiens
attttgccaaaagtt

SEQ ID NO: 1568793 - DNA, 15 bp, Homo sapiens
cattttgccaaaagt

SEQ ID NO: 1568794 - DNA, 15 bp, Homo sapiens
tcattttgccaaaag

SEQ ID NO: 1568795 - DNA, 15 bp, Homo sapiens
ttcattttgccaaaa

SEQ ID NO: 1568796 - DNA, 15 bp, Homo sapiens
cttcattttgccaaa

SEQ ID NO: 1568797 - DNA, 15 bp, Homo sapiens
ccttcattttgccaa

SEQ ID NO: 1568798 - DNA, 15 bp, Homo sapiens
accttcattttgcca

SEQ ID NO: 1568799 - DNA, 15 bp, Homo sapiens
aaccttcattttgcc

SEQ ID NO: 1568800 - DNA, 15 bp, Homo sapiens
aaaccttcattttgc

SEQ ID NO: 1568801 - DNA, 15 bp, Homo sapiens
gaaaccttcattttg

SEQ ID NO: 1568802 - DNA, 15 bp, Homo sapiens
agaaaccttcatttt

SEQ ID NO: 1568803 - DNA, 15 bp, Homo sapiens
cagaaaccttcattt

SEQ ID NO: 1568804 - DNA, 15 bp, Homo sapiens
acagaaaccttcatt

SEQ ID NO: 1568805 - DNA, 15 bp, Homo sapiens
aacagaaaccttcat

SEQ ID NO: 1568806 - DNA, 15 bp, Homo sapiens
gaacagaaaccttca

SEQ ID NO: 1568807 - DNA, 15 bp, Homo sapiens
tgaacagaaaccttc

SEQ ID NO: 1568808 - DNA, 15 bp, Homo sapiens
ttgaacagaaacctt

SEQ ID NO: 1568809 - DNA, 15 bp, Homo sapiens
tttgaacagaaacct

SEQ ID NO: 1568810 - DNA, 15 bp, Homo sapiens
atttgaacagaaacc

SEQ ID NO: 1568811 - DNA, 15 bp, Homo sapiens
aatttgaacagaaac

SEQ ID NO: 1568812 - DNA, 15 bp, Homo sapiens
taatttgaacagaaa

SEQ ID NO: 1568813 - DNA, 15 bp, Homo sapiens
ctaatttgaacagaa

SEQ ID NO: 1568814 - DNA, 15 bp, Homo sapiens
actaatttgaacaga

SEQ ID NO: 1568815 - DNA, 15 bp, Homo sapiens
tactaatttgaacag

SEQ ID NO: 1568816 - DNA, 15 bp, Homo sapiens
atactaatttgaaca

SEQ ID NO: 1568817 - DNA, 15 bp, Homo sapiens
catactaatttgaac

SEQ ID NO: 1568818 - DNA, 15 bp, Homo sapiens
gcatactaatttgaa

SEQ ID NO: 1568819 - DNA, 15 bp, Homo sapiens
ggcatactaatttga

SEQ ID NO: 1568820 - DNA, 15 bp, Homo sapiens
aggcatactaatttg

SEQ ID NO: 1568821 - DNA, 15 bp, Homo sapiens
caggcatactaattt

SEQ ID NO: 1568822 - DNA, 15 bp, Homo sapiens
gcaggcatactaatt

SEQ ID NO: 1568823 - DNA, 15 bp, Homo sapiens
agcaggcatactaat

SEQ ID NO: 1568824 - DNA, 15 bp, Homo sapiens
aagcaggcatactaa

SEQ ID NO: 1568825 - DNA, 15 bp, Homo sapiens
aaagcaggcatacta

SEQ ID NO: 1568826 - DNA, 15 bp, Homo sapiens
taaagcaggcatact

SEQ ID NO: 1568827 - DNA, 15 bp, Homo sapiens
ttaaagcaggcatac

SEQ ID NO: 1568828 - DNA, 15 bp, Homo sapiens
cttaaagcaggcata

SEQ ID NO: 1568829 - DNA, 15 bp, Homo sapiens
tcttaaagcaggcat

SEQ ID NO: 1568830 - DNA, 15 bp, Homo sapiens
ttcttaaagcaggca

SEQ ID NO: 1568831 - DNA, 15 bp, Homo sapiens
gttcttaaagcaggc

SEQ ID NO: 1568832 - DNA, 15 bp, Homo sapiens
tgttcttaaagcagg

SEQ ID NO: 1568833 - DNA, 15 bp, Homo sapiens
gtgttcttaaagcag

SEQ ID NO: 1568834 - DNA, 15 bp, Homo sapiens
tgtgttcttaaagca

SEQ ID NO: 1568835 - DNA, 15 bp, Homo sapiens
gtgtgttcttaaagc

SEQ ID NO: 1568836 - DNA, 15 bp, Homo sapiens
tgtgtgttcttaaag

SEQ ID NO: 1568837 - DNA, 15 bp, Homo sapiens
ttgtgtgttcttaaa

SEQ ID NO: 1568838 - DNA, 15 bp, Homo sapiens
attgtgtgttcttaa

SEQ ID NO: 1568839 - DNA, 15 bp, Homo sapiens
cattgtgtgttctta

SEQ ID NO: 1568840 - DNA, 15 bp, Homo sapiens
acattgtgtgttctt

SEQ ID NO: 1568841 - DNA, 15 bp, Homo sapiens
cacattgtgtgttct

SEQ ID NO: 1568842 - DNA, 15 bp, Homo sapiens
gcacattgtgtgttc

SEQ ID NO: 1568843 - DNA, 15 bp, Homo sapiens
agcacattgtgtgtt

SEQ ID NO: 1568844 - DNA, 15 bp, Homo sapiens
cagcacattgtgtgt

SEQ ID NO: 1568845 - DNA, 15 bp, Homo sapiens
tcagcacattgtgtg

SEQ ID NO: 1568846 - DNA, 15 bp, Homo sapiens
ttcagcacattgtgt

SEQ ID NO: 1568847 - DNA, 15 bp, Homo sapiens
tttcagcacattgtg

SEQ ID NO: 1568848 - DNA, 15 bp, Homo sapiens
ttttcagcacattgt

SEQ ID NO: 1568849 - DNA, 15 bp, Homo sapiens
gttttcagcacattg

SEQ ID NO: 1568850 - DNA, 15 bp, Homo sapiens
ggttttcagcacatt

SEQ ID NO: 1568851 - DNA, 15 bp, Homo sapiens
tggttttcagcacat

SEQ ID NO: 1568852 - DNA, 15 bp, Homo sapiens
ctggttttcagcaca

SEQ ID NO: 1568853 - DNA, 15 bp, Homo sapiens
tctggttttcagcac

SEQ ID NO: 1568854 - DNA, 15 bp, Homo sapiens
ttctggttttcagca

SEQ ID NO: 1568855 - DNA, 15 bp, Homo sapiens
tttctggttttcagc

SEQ ID NO: 1568856 - DNA, 15 bp, Homo sapiens
ttttctggttttcag

SEQ ID NO: 1568857 - DNA, 15 bp, Homo sapiens
tttttctggttttca

SEQ ID NO: 1568858 - DNA, 15 bp, Homo sapiens
atttttctggttttc

SEQ ID NO: 1568859 - DNA, 15 bp, Homo sapiens
tatttttctggtttt

SEQ ID NO: 1568860 - DNA, 15 bp, Homo sapiens
ttatttttctggttt

SEQ ID NO: 1568861 - DNA, 15 bp, Homo sapiens
attatttttctggtt

SEQ ID NO: 1568862 - DNA, 15 bp, Homo sapiens
aattatttttctggt

SEQ ID NO: 1568863 - DNA, 15 bp, Homo sapiens
gaattatttttctgg

SEQ ID NO: 1568864 - DNA, 15 bp, Homo sapiens
tgaattatttttctg

SEQ ID NO: 1568865 - DNA, 15 bp, Homo sapiens
gtgaattatttttct

SEQ ID NO: 1568866 - DNA, 15 bp, Homo sapiens
tgtgaattatttttc

SEQ ID NO: 1568867 - DNA, 15 bp, Homo sapiens
ttgtgaattattttt

SEQ ID NO: 1568868 - DNA, 15 bp, Homo sapiens
attgtgaattatttt

SEQ ID NO: 1568869 - DNA, 15 bp, Homo sapiens
tattgtgaattattt

SEQ ID NO: 1568870 - DNA, 15 bp, Homo sapiens
ttattgtgaattatt

SEQ ID NO: 1568871 - DNA, 15 bp, Homo sapiens
tttattgtgaattat

SEQ ID NO: 1568872 - DNA, 15 bp, Homo sapiens
gtttattgtgaatta

SEQ ID NO: 1568873 - DNA, 15 bp, Homo sapiens
tgtttattgtgaatt

SEQ ID NO: 1568874 - DNA, 15 bp, Homo sapiens
gtgtttattgtgaat

SEQ ID NO: 1568875 - DNA, 15 bp, Homo sapiens
tgtgtttattgtgaa

SEQ ID NO: 1568876 - DNA, 15 bp, Homo sapiens
atgtgtttattgtga

SEQ ID NO: 1568877 - DNA, 15 bp, Homo sapiens
tatgtgtttattgtg

SEQ ID NO: 1568878 - DNA, 15 bp, Homo sapiens
atatgtgtttattgt

SEQ ID NO: 1568879 - DNA, 15 bp, Homo sapiens
catatgtgtttattg

SEQ ID NO: 1568880 - DNA, 15 bp, Homo sapiens
acatatgtgtttatt

SEQ ID NO: 1568881 - DNA, 15 bp, Homo sapiens
aacatatgtgtttat

SEQ ID NO: 1568882 - DNA, 15 bp, Homo sapiens
taacatatgtgttta

SEQ ID NO: 1568883 - DNA, 15 bp, Homo sapiens
gtaacatatgtgttt

SEQ ID NO: 1568884 - DNA, 15 bp, Homo sapiens
agtaacatatgtgtt

SEQ ID NO: 1568885 - DNA, 15 bp, Homo sapiens
aagtaacatatgtgt

SEQ ID NO: 1568886 - DNA, 15 bp, Homo sapiens
aaagtaacatatgtg

SEQ ID NO: 1568887 - DNA, 15 bp, Homo sapiens
aaaagtaacatatgt

SEQ ID NO: 1568888 - DNA, 15 bp, Homo sapiens
taaaagtaacatatg

SEQ ID NO: 1568889 - DNA, 15 bp, Homo sapiens
ataaaagtaacatat

SEQ ID NO: 1568890 - DNA, 15 bp, Homo sapiens
tataaaagtaacata

SEQ ID NO: 1568891 - DNA, 15 bp, Homo sapiens
ttataaaagtaacat

SEQ ID NO: 1568892 - DNA, 15 bp, Homo sapiens
tttataaaagtaaca

SEQ ID NO: 1568893 - DNA, 15 bp, Homo sapiens
ttttataaaagtaac

SEQ ID NO: 1568894 - DNA, 15 bp, Homo sapiens
tttttataaaagtaa

SEQ ID NO: 1568895 - DNA, 15 bp, Homo sapiens
ctttttataaaagta

SEQ ID NO: 1568896 - DNA, 15 bp, Homo sapiens
actttttataaaagt

SEQ ID NO: 1568897 - DNA, 15 bp, Homo sapiens
aactttttataaaag

SEQ ID NO: 1568898 - DNA, 15 bp, Homo sapiens
aaactttttataaaa

SEQ ID NO: 1568899 - DNA, 15 bp, Homo sapiens
gaaactttttataaa

SEQ ID NO: 1568900 - DNA, 15 bp, Homo sapiens
agaaactttttataa

SEQ ID NO: 1568901 - DNA, 15 bp, Homo sapiens
gagaaactttttata

SEQ ID NO: 1568902 - DNA, 15 bp, Homo sapiens
tgagaaactttttat

SEQ ID NO: 1568903 - DNA, 15 bp, Homo sapiens
atgagaaacttttta

SEQ ID NO: 1568904 - DNA, 15 bp, Homo sapiens
gatgagaaacttttt

SEQ ID NO: 1568905 - DNA, 15 bp, Homo sapiens
tgatgagaaactttt

SEQ ID NO: 1568906 - DNA, 15 bp, Homo sapiens
gtgatgagaaacttt

SEQ ID NO: 1568907 - DNA, 15 bp, Homo sapiens
tgtgatgagaaactt

SEQ ID NO: 1568908 - DNA, 15 bp, Homo sapiens
ttgtgatgagaaact

SEQ ID NO: 1568909 - DNA, 15 bp, Homo sapiens
cttgtgatgagaaac

SEQ ID NO: 1568910 - DNA, 15 bp, Homo sapiens
ccttgtgatgagaaa

SEQ ID NO: 1568911 - DNA, 15 bp, Homo sapiens
accttgtgatgagaa

SEQ ID NO: 1568912 - DNA, 15 bp, Homo sapiens
aaccttgtgatgaga

SEQ ID NO: 1568913 - DNA, 15 bp, Homo sapiens
aaaccttgtgatgag

SEQ ID NO: 1568914 - DNA, 15 bp, Homo sapiens
aaaaccttgtgatga

SEQ ID NO: 1568915 - DNA, 15 bp, Homo sapiens
aaaaaccttgtgatg

SEQ ID NO: 1568916 - DNA, 15 bp, Homo sapiens
aaaaaaccttgtgat

SEQ ID NO: 1568917 - DNA, 15 bp, Homo sapiens
aaaaaaaccttgtga

SEQ ID NO: 1568918 - DNA, 15 bp, Homo sapiens
gaaaaaaaccttgtg

SEQ ID NO: 1568919 - DNA, 15 bp, Homo sapiens
ggaaaaaaaccttgt

SEQ ID NO: 1568920 - DNA, 15 bp, Homo sapiens
tggaaaaaaaccttg

SEQ ID NO: 1568921 - DNA, 15 bp, Homo sapiens
ctggaaaaaaacctt

SEQ ID NO: 1568922 - DNA, 15 bp, Homo sapiens
cctggaaaaaaacct

SEQ ID NO: 1568923 - DNA, 15 bp, Homo sapiens
tcctggaaaaaaacc

SEQ ID NO: 1568924 - DNA, 15 bp, Homo sapiens
ctcctggaaaaaaac

SEQ ID NO: 1568925 - DNA, 15 bp, Homo sapiens
cctcctggaaaaaaa

SEQ ID NO: 1568926 - DNA, 15 bp, Homo sapiens
gcctcctggaaaaaa

SEQ ID NO: 1568927 - DNA, 15 bp, Homo sapiens
tgcctcctggaaaaa

SEQ ID NO: 1568928 - DNA, 15 bp, Homo sapiens
ctgcctcctggaaaa

SEQ ID NO: 1568929 - DNA, 15 bp, Homo sapiens
gctgcctcctggaaa

SEQ ID NO: 1568930 - DNA, 15 bp, Homo sapiens
tgctgcctcctggaa

SEQ ID NO: 1568931 - DNA, 15 bp, Homo sapiens
atgctgcctcctgga

SEQ ID NO: 1568932 - DNA, 15 bp, Homo sapiens
catgctgcctcctgg

SEQ ID NO: 1568933 - DNA, 15 bp, Homo sapiens
ccatgctgcctcctg

SEQ ID NO: 1568934 - DNA, 15 bp, Homo sapiens
accatgctgcctcct

SEQ ID NO: 1568935 - DNA, 15 bp, Homo sapiens
caccatgctgcctcc

SEQ ID NO: 1568936 - DNA, 15 bp, Homo sapiens
acaccatgctgcctc

SEQ ID NO: 1568937 - DNA, 15 bp, Homo sapiens
aacaccatgctgcct

SEQ ID NO: 1568938 - DNA, 15 bp, Homo sapiens
caacaccatgctgcc

SEQ ID NO: 1568939 - DNA, 15 bp, Homo sapiens
ccaacaccatgctgc

SEQ ID NO: 1568940 - DNA, 15 bp, Homo sapiens
cccaacaccatgctg

SEQ ID NO: 1568941 - DNA, 15 bp, Homo sapiens
ccccaacaccatgct

SEQ ID NO: 1568942 - DNA, 15 bp, Homo sapiens
accccaacaccatgc

SEQ ID NO: 1568943 - DNA, 15 bp, Homo sapiens
caccccaacaccatg

SEQ ID NO: 1568944 - DNA, 15 bp, Homo sapiens
acaccccaacaccat

SEQ ID NO: 1568945 - DNA, 15 bp, Homo sapiens
cacaccccaacacca

SEQ ID NO: 1568946 - DNA, 15 bp, Homo sapiens
acacaccccaacacc

SEQ ID NO: 1568947 - DNA, 15 bp, Homo sapiens
cacacaccccaacac

SEQ ID NO: 1568948 - DNA, 15 bp, Homo sapiens
acacacaccccaaca

SEQ ID NO: 1568949 - DNA, 15 bp, Homo sapiens
tacacacaccccaac

SEQ ID NO: 1568950 - DNA, 15 bp, Homo sapiens
atacacacaccccaa

SEQ ID NO: 1568951 - DNA, 15 bp, Homo sapiens
aatacacacacccca

SEQ ID NO: 1568952 - DNA, 15 bp, Homo sapiens
gaatacacacacccc

SEQ ID NO: 1568953 - DNA, 15 bp, Homo sapiens
tgaatacacacaccc

SEQ ID NO: 1568954 - DNA, 15 bp, Homo sapiens
gtgaatacacacacc

SEQ ID NO: 1568955 - DNA, 15 bp, Homo sapiens
agtgaatacacacac

SEQ ID NO: 1568956 - DNA, 15 bp, Homo sapiens
aagtgaatacacaca

SEQ ID NO: 1568957 - DNA, 15 bp, Homo sapiens
aaagtgaatacacac

SEQ ID NO: 1568958 - DNA, 15 bp, Homo sapiens
aaaagtgaatacaca

SEQ ID NO: 1568959 - DNA, 15 bp, Homo sapiens
taaaagtgaatacac

SEQ ID NO: 1568960 - DNA, 15 bp, Homo sapiens
gtaaaagtgaataca

SEQ ID NO: 1568961 - DNA, 15 bp, Homo sapiens
tgtaaaagtgaatac

SEQ ID NO: 1568962 - DNA, 15 bp, Homo sapiens
ttgtaaaagtgaata

SEQ ID NO: 1568963 - DNA, 15 bp, Homo sapiens
tttgtaaaagtgaat

SEQ ID NO: 1568964 - DNA, 15 bp, Homo sapiens
gtttgtaaaagtgaa

SEQ ID NO: 1568965 - DNA, 15 bp, Homo sapiens
tgtttgtaaaagtga

SEQ ID NO: 1568966 - DNA, 15 bp, Homo sapiens
ttgtttgtaaaagtg

SEQ ID NO: 1568967 - DNA, 15 bp, Homo sapiens
tttgtttgtaaaagt

SEQ ID NO: 1568968 - DNA, 15 bp, Homo sapiens
ctttgtttgtaaaag

SEQ ID NO: 1568969 - DNA, 15 bp, Homo sapiens
actttgtttgtaaaa

SEQ ID NO: 1568970 - DNA, 15 bp, Homo sapiens
gactttgtttgtaaa

SEQ ID NO: 1568971 - DNA, 15 bp, Homo sapiens
tgactttgtttgtaa

SEQ ID NO: 1568972 - DNA, 15 bp, Homo sapiens
ttgactttgtttgta

SEQ ID NO: 1568973 - DNA, 15 bp, Homo sapiens
gttgactttgtttgt

SEQ ID NO: 1568974 - DNA, 15 bp, Homo sapiens
agttgactttgtttg

SEQ ID NO: 1568975 - DNA, 15 bp, Homo sapiens
aagttgactttgttt

SEQ ID NO: 1568976 - DNA, 15 bp, Homo sapiens
taagttgactttgtt

SEQ ID NO: 1568977 - DNA, 15 bp, Homo sapiens
ataagttgactttgt

SEQ ID NO: 1568978 - DNA, 15 bp, Homo sapiens
cataagttgactttg

SEQ ID NO: 1568979 - DNA, 15 bp, Homo sapiens
tcataagttgacttt

SEQ ID NO: 1568980 - DNA, 15 bp, Homo sapiens
atcataagttgactt

SEQ ID NO: 1568981 - DNA, 15 bp, Homo sapiens
gatcataagttgact

SEQ ID NO: 1568982 - DNA, 15 bp, Homo sapiens
tgatcataagttgac

SEQ ID NO: 1568983 - DNA, 15 bp, Homo sapiens
ttgatcataagttga

SEQ ID NO: 1568984 - DNA, 15 bp, Homo sapiens
attgatcataagttg

SEQ ID NO: 1568985 - DNA, 15 bp, Homo sapiens
aattgatcataagtt

SEQ ID NO: 1568986 - DNA, 15 bp, Homo sapiens
aaattgatcataagt

SEQ ID NO: 1568987 - DNA, 15 bp, Homo sapiens
aaaattgatcataag

SEQ ID NO: 1568988 - DNA, 15 bp, Homo sapiens
aaaaattgatcataa

SEQ ID NO: 1568989 - DNA, 15 bp, Homo sapiens
gaaaaattgatcata

SEQ ID NO: 1568990 - DNA, 15 bp, Homo sapiens
tgaaaaattgatcat

SEQ ID NO: 1568991 - DNA, 15 bp, Homo sapiens
ctgaaaaattgatca

SEQ ID NO: 1568992 - DNA, 15 bp, Homo sapiens
tctgaaaaattgatc

SEQ ID NO: 1568993 - DNA, 15 bp, Homo sapiens
ttctgaaaaattgat

SEQ ID NO: 1568994 - DNA, 15 bp, Homo sapiens
cttctgaaaaattga

SEQ ID NO: 1568995 - DNA, 15 bp, Homo sapiens
tcttctgaaaaattg

SEQ ID NO: 1568996 - DNA, 15 bp, Homo sapiens
ctcttctgaaaaatt

SEQ ID NO: 1568997 - DNA, 15 bp, Homo sapiens
actcttctgaaaaat

SEQ ID NO: 1568998 - DNA, 15 bp, Homo sapiens
tactcttctgaaaaa

SEQ ID NO: 1568999 - DNA, 15 bp, Homo sapiens
atactcttctgaaaa

SEQ ID NO: 1569000 - DNA, 15 bp, Homo sapiens
catactcttctgaaa

SEQ ID NO: 1569001 - DNA, 15 bp, Homo sapiens
tcatactcttctgaa

SEQ ID NO: 1569002 - DNA, 15 bp, Homo sapiens
atcatactcttctga

SEQ ID NO: 1569003 - DNA, 15 bp, Homo sapiens
tatcatactcttctg

SEQ ID NO: 1569004 - DNA, 15 bp, Homo sapiens
ttatcatactcttct

SEQ ID NO: 1569005 - DNA, 15 bp, Homo sapiens
tttatcatactcttc

SEQ ID NO: 1569006 - DNA, 15 bp, Homo sapiens
gtttatcatactctt

SEQ ID NO: 1569007 - DNA, 15 bp, Homo sapiens
ggtttatcatactct

SEQ ID NO: 1569008 - DNA, 15 bp, Homo sapiens
aggtttatcatactc

SEQ ID NO: 1569009 - DNA, 15 bp, Homo sapiens
gaggtttatcatact

SEQ ID NO: 1569010 - DNA, 15 bp, Homo sapiens
agaggtttatcatac

SEQ ID NO: 1569011 - DNA, 15 bp, Homo sapiens
cagaggtttatcata

SEQ ID NO: 1569012 - DNA, 15 bp, Homo sapiens
acagaggtttatcat

SEQ ID NO: 1569013 - DNA, 15 bp, Homo sapiens
cacagaggtttatca

SEQ ID NO: 1569014 - DNA, 15 bp, Homo sapiens
tcacagaggtttatc

SEQ ID NO: 1569015 - DNA, 15 bp, Homo sapiens
atcacagaggtttat

SEQ ID NO: 1569016 - DNA, 15 bp, Homo sapiens
tatcacagaggttta

SEQ ID NO: 1569017 - DNA, 15 bp, Homo sapiens
gtatcacagaggttt

SEQ ID NO: 1569018 - DNA, 15 bp, Homo sapiens
agtatcacagaggtt

SEQ ID NO: 1569019 - DNA, 15 bp, Homo sapiens
aagtatcacagaggt

SEQ ID NO: 1569020 - DNA, 15 bp, Homo sapiens
aaagtatcacagagg

SEQ ID NO: 1569021 - DNA, 15 bp, Homo sapiens
aaaagtatcacagag

SEQ ID NO: 1569022 - DNA, 15 bp, Homo sapiens
gaaaagtatcacaga

SEQ ID NO: 1569023 - DNA, 15 bp, Homo sapiens
agaaaagtatcacag

SEQ ID NO: 1569024 - DNA, 15 bp, Homo sapiens
cagaaaagtatcaca

SEQ ID NO: 1569025 - DNA, 15 bp, Homo sapiens
gcagaaaagtatcac

SEQ ID NO: 1569026 - DNA, 15 bp, Homo sapiens
ggcagaaaagtatca

SEQ ID NO: 1569027 - DNA, 15 bp, Homo sapiens
tggcagaaaagtatc

SEQ ID NO: 1569028 - DNA, 15 bp, Homo sapiens
gtggcagaaaagtat

SEQ ID NO: 1569029 - DNA, 15 bp, Homo sapiens
tgtggcagaaaagta

SEQ ID NO: 1569030 - DNA, 15 bp, Homo sapiens
ctgtggcagaaaagt

SEQ ID NO: 1569031 - DNA, 15 bp, Homo sapiens
actgtggcagaaaag

SEQ ID NO: 1569032 - DNA, 15 bp, Homo sapiens
gactgtggcagaaaa

SEQ ID NO: 1569033 - DNA, 15 bp, Homo sapiens
ggactgtggcagaaa

SEQ ID NO: 1569034 - DNA, 15 bp, Homo sapiens
gggactgtggcagaa

SEQ ID NO: 1569035 - DNA, 15 bp, Homo sapiens
agggactgtggcaga

SEQ ID NO: 1569036 - DNA, 15 bp, Homo sapiens
aagggactgtggcag

SEQ ID NO: 1569037 - DNA, 15 bp, Homo sapiens
caagggactgtggca

SEQ ID NO: 1569038 - DNA, 15 bp, Homo sapiens
acaagggactgtggc

SEQ ID NO: 1569039 - DNA, 15 bp, Homo sapiens
cacaagggactgtgg

SEQ ID NO: 1569040 - DNA, 15 bp, Homo sapiens
acacaagggactgtg

SEQ ID NO: 1569041 - DNA, 15 bp, Homo sapiens
tacacaagggactgt

SEQ ID NO: 1569042 - DNA, 15 bp, Homo sapiens
atacacaagggactg

SEQ ID NO: 1569043 - DNA, 15 bp, Homo sapiens
aatacacaagggact

SEQ ID NO: 1569044 - DNA, 15 bp, Homo sapiens
aaatacacaagggac

SEQ ID NO: 1569045 - DNA, 15 bp, Homo sapiens
caaatacacaaggga

SEQ ID NO: 1569046 - DNA, 15 bp, Homo sapiens
tcaaatacacaaggg

SEQ ID NO: 1569047 - DNA, 15 bp, Homo sapiens
atcaaatacacaagg

SEQ ID NO: 1569048 - DNA, 15 bp, Homo sapiens
tatcaaatacacaag

SEQ ID NO: 1569049 - DNA, 15 bp, Homo sapiens
ttatcaaatacacaa

SEQ ID NO: 1569050 - DNA, 15 bp, Homo sapiens
attatcaaatacaca

SEQ ID NO: 1569051 - DNA, 15 bp, Homo sapiens
gattatcaaatacac

SEQ ID NO: 1569052 - DNA, 15 bp, Homo sapiens
agattatcaaataca

SEQ ID NO: 1569053 - DNA, 15 bp, Homo sapiens
aagattatcaaatac

SEQ ID NO: 1569054 - DNA, 15 bp, Homo sapiens
taagattatcaaata

SEQ ID NO: 1569055 - DNA, 15 bp, Homo sapiens
ttaagattatcaaat

SEQ ID NO: 1569056 - DNA, 15 bp, Homo sapiens
attaagattatcaaa

SEQ ID NO: 1569057 - DNA, 15 bp, Homo sapiens
cattaagattatcaa

SEQ ID NO: 1569058 - DNA, 15 bp, Homo sapiens
gcattaagattatca

SEQ ID NO: 1569059 - DNA, 15 bp, Homo sapiens
tgcattaagattatc

SEQ ID NO: 1569060 - DNA, 15 bp, Homo sapiens
gtgcattaagattat

SEQ ID NO: 1569061 - DNA, 15 bp, Homo sapiens
tgtgcattaagatta

SEQ ID NO: 1569062 - DNA, 15 bp, Homo sapiens
gtgtgcattaagatt

SEQ ID NO: 1569063 - DNA, 15 bp, Homo sapiens
tgtgtgcattaagat

SEQ ID NO: 1569064 - DNA, 15 bp, Homo sapiens
ctgtgtgcattaaga

SEQ ID NO: 1569065 - DNA, 15 bp, Homo sapiens
actgtgtgcattaag

SEQ ID NO: 1569066 - DNA, 15 bp, Homo sapiens
aactgtgtgcattaa

SEQ ID NO: 1569067 - DNA, 15 bp, Homo sapiens
taactgtgtgcatta

SEQ ID NO: 1569068 - DNA, 15 bp, Homo sapiens
ctaactgtgtgcatt

SEQ ID NO: 1569069 - DNA, 15 bp, Homo sapiens
tctaactgtgtgcat

SEQ ID NO: 1569070 - DNA, 15 bp, Homo sapiens
atctaactgtgtgca

SEQ ID NO: 1569071 - DNA, 15 bp, Homo sapiens
tatctaactgtgtgc

SEQ ID NO: 1569072 - DNA, 15 bp, Homo sapiens
atatctaactgtgtg

SEQ ID NO: 1569073 - DNA, 15 bp, Homo sapiens
gatatctaactgtgt

SEQ ID NO: 1569074 - DNA, 15 bp, Homo sapiens
agatatctaactgtg

SEQ ID NO: 1569075 - DNA, 15 bp, Homo sapiens
aagatatctaactgt

SEQ ID NO: 1569076 - DNA, 15 bp, Homo sapiens
taagatatctaactg

SEQ ID NO: 1569077 - DNA, 15 bp, Homo sapiens
ataagatatctaact

SEQ ID NO: 1569078 - DNA, 15 bp, Homo sapiens
cataagatatctaac

SEQ ID NO: 1569079 - DNA, 15 bp, Homo sapiens
tcataagatatctaa

SEQ ID NO: 1569080 - DNA, 15 bp, Homo sapiens
gtcataagatatcta

SEQ ID NO: 1569081 - DNA, 15 bp, Homo sapiens
agtcataagatatct

SEQ ID NO: 1569082 - DNA, 15 bp, Homo sapiens
tagtcataagatatc

SEQ ID NO: 1569083 - DNA, 15 bp, Homo sapiens
ctagtcataagatat

SEQ ID NO: 1569084 - DNA, 15 bp, Homo sapiens
gctagtcataagata

SEQ ID NO: 1569085 - DNA, 15 bp, Homo sapiens
tgctagtcataagat

SEQ ID NO: 1569086 - DNA, 15 bp, Homo sapiens
ttgctagtcataaga

SEQ ID NO: 1569087 - DNA, 15 bp, Homo sapiens
cttgctagtcataag

SEQ ID NO: 1569088 - DNA, 15 bp, Homo sapiens
ccttgctagtcataa

SEQ ID NO: 1569089 - DNA, 15 bp, Homo sapiens
tccttgctagtcata

SEQ ID NO: 1569090 - DNA, 15 bp, Homo sapiens
ctccttgctagtcat

SEQ ID NO: 1569091 - DNA, 15 bp, Homo sapiens
gctccttgctagtca

SEQ ID NO: 1569092 - DNA, 15 bp, Homo sapiens
tgctccttgctagtc

SEQ ID NO: 1569093 - DNA, 15 bp, Homo sapiens
atgctccttgctagt

SEQ ID NO: 1569094 - DNA, 15 bp, Homo sapiens
aatgctccttgctag

SEQ ID NO: 1569095 - DNA, 15 bp, Homo sapiens
taatgctccttgcta

SEQ ID NO: 1569096 - DNA, 15 bp, Homo sapiens
gtaatgctccttgct

SEQ ID NO: 1569097 - DNA, 15 bp, Homo sapiens
ggtaatgctccttgc

SEQ ID NO: 1569098 - DNA, 15 bp, Homo sapiens
tggtaatgctccttg

SEQ ID NO: 1569099 - DNA, 15 bp, Homo sapiens
atggtaatgctcctt

SEQ ID NO: 1569100 - DNA, 15 bp, Homo sapiens
catggtaatgctcct

SEQ ID NO: 1569101 - DNA, 15 bp, Homo sapiens
ccatggtaatgctcc

SEQ ID NO: 1569102 - DNA, 15 bp, Homo sapiens
accatggtaatgctc

SEQ ID NO: 1569103 - DNA, 15 bp, Homo sapiens
aaccatggtaatgct

SEQ ID NO: 1569104 - DNA, 15 bp, Homo sapiens
taaccatggtaatgc

SEQ ID NO: 1569105 - DNA, 15 bp, Homo sapiens
ttaaccatggtaatg

SEQ ID NO: 1569106 - DNA, 15 bp, Homo sapiens
tttaaccatggtaat

SEQ ID NO: 1569107 - DNA, 15 bp, Homo sapiens
ttttaaccatggtaa

SEQ ID NO: 1569108 - DNA, 15 bp, Homo sapiens
attttaaccatggta

SEQ ID NO: 1569109 - DNA, 15 bp, Homo sapiens
gattttaaccatggt

SEQ ID NO: 1569110 - DNA, 15 bp, Homo sapiens
agattttaaccatgg

SEQ ID NO: 1569111 - DNA, 15 bp, Homo sapiens
tagattttaaccatg

SEQ ID NO: 1569112 - DNA, 15 bp, Homo sapiens
atagattttaaccat

SEQ ID NO: 1569113 - DNA, 15 bp, Homo sapiens
aatagattttaacca

SEQ ID NO: 1569114 - DNA, 15 bp, Homo sapiens
aaatagattttaacc

SEQ ID NO: 1569115 - DNA, 15 bp, Homo sapiens
gaaatagattttaac

SEQ ID NO: 1569116 - DNA, 15 bp, Homo sapiens
tgaaatagattttaa

SEQ ID NO: 1569117 - DNA, 15 bp, Homo sapiens
atgaaatagatttta

SEQ ID NO: 1569118 - DNA, 15 bp, Homo sapiens
catgaaatagatttt

SEQ ID NO: 1569119 - DNA, 15 bp, Homo sapiens
tcatgaaatagattt

SEQ ID NO: 1569120 - DNA, 15 bp, Homo sapiens
ttcatgaaatagatt

SEQ ID NO: 1569121 - DNA, 15 bp, Homo sapiens
tttcatgaaatagat

SEQ ID NO: 1569122 - DNA, 15 bp, Homo sapiens
ttttcatgaaataga

SEQ ID NO: 1569123 - DNA, 15 bp, Homo sapiens
gttttcatgaaatag

SEQ ID NO: 1569124 - DNA, 15 bp, Homo sapiens
tgttttcatgaaata

SEQ ID NO: 1569125 - DNA, 15 bp, Homo sapiens
atgttttcatgaaat

SEQ ID NO: 1569126 - DNA, 15 bp, Homo sapiens
aatgttttcatgaaa

SEQ ID NO: 1569127 - DNA, 15 bp, Homo sapiens
aaatgttttcatgaa

SEQ ID NO: 1569128 - DNA, 15 bp, Homo sapiens
aaaatgttttcatga

SEQ ID NO: 1569129 - DNA, 15 bp, Homo sapiens
aaaaatgttttcatg

SEQ ID NO: 1569130 - DNA, 15 bp, Homo sapiens
taaaaatgttttcat

SEQ ID NO: 1569131 - DNA, 15 bp, Homo sapiens
ataaaaatgttttca

SEQ ID NO: 1569132 - DNA, 15 bp, Homo sapiens
aataaaaatgttttc

SEQ ID NO: 1569133 - DNA, 15 bp, Homo sapiens
aaataaaaatgtttt

SEQ ID NO: 1569134 - DNA, 15 bp, Homo sapiens
gaaataaaaatgttt

SEQ ID NO: 1569135 - DNA, 15 bp, Homo sapiens
ggaaataaaaatgtt

SEQ ID NO: 1569136 - DNA, 15 bp, Homo sapiens
tggaaataaaaatgt

SEQ ID NO: 1569137 - DNA, 15 bp, Homo sapiens
ctggaaataaaaatg

SEQ ID NO: 1569138 - DNA, 15 bp, Homo sapiens
gctggaaataaaaat

SEQ ID NO: 1569139 - DNA, 15 bp, Homo sapiens
ggctggaaataaaaa

SEQ ID NO: 1569140 - DNA, 15 bp, Homo sapiens
aggctggaaataaaa

SEQ ID NO: 1569141 - DNA, 15 bp, Homo sapiens
taggctggaaataaa

SEQ ID NO: 1569142 - DNA, 15 bp, Homo sapiens
ataggctggaaataa

SEQ ID NO: 1569143 - DNA, 15 bp, Homo sapiens
aataggctggaaata

SEQ ID NO: 1569144 - DNA, 15 bp, Homo sapiens
taataggctggaaat

SEQ ID NO: 1569145 - DNA, 15 bp, Homo sapiens
ctaataggctggaaa

SEQ ID NO: 1569146 - DNA, 15 bp, Homo sapiens
tctaataggctggaa

SEQ ID NO: 1569147 - DNA, 15 bp, Homo sapiens
atctaataggctgga

SEQ ID NO: 1569148 - DNA, 15 bp, Homo sapiens
aatctaataggctgg

SEQ ID NO: 1569149 - DNA, 15 bp, Homo sapiens
taatctaataggctg

SEQ ID NO: 1569150 - DNA, 15 bp, Homo sapiens
ctaatctaataggct

SEQ ID NO: 1569151 - DNA, 15 bp, Homo sapiens
tctaatctaataggc

SEQ ID NO: 1569152 - DNA, 15 bp, Homo sapiens
atctaatctaatagg

SEQ ID NO: 1569153 - DNA, 15 bp, Homo sapiens
aatctaatctaatag

SEQ ID NO: 1569154 - DNA, 15 bp, Homo sapiens
taatctaatctaata

SEQ ID NO: 1569155 - DNA, 15 bp, Homo sapiens
ttaatctaatctaat

SEQ ID NO: 1569156 - DNA, 15 bp, Homo sapiens
attaatctaatctaa

SEQ ID NO: 1569157 - DNA, 15 bp, Homo sapiens
aattaatctaatcta

SEQ ID NO: 1569158 - DNA, 15 bp, Homo sapiens
aaattaatctaatct

SEQ ID NO: 1569159 - DNA, 15 bp, Homo sapiens
gaaattaatctaatc

SEQ ID NO: 1569160 - DNA, 15 bp, Homo sapiens
agaaattaatctaat

SEQ ID NO: 1569161 - DNA, 15 bp, Homo sapiens
gagaaattaatctaa

SEQ ID NO: 1569162 - DNA, 15 bp, Homo sapiens
agagaaattaatcta

SEQ ID NO: 1569163 - DNA, 15 bp, Homo sapiens
gagagaaattaatct

SEQ ID NO: 1569164 - DNA, 15 bp, Homo sapiens
agagagaaattaatc

SEQ ID NO: 1569165 - DNA, 15 bp, Homo sapiens
cagagagaaattaat

SEQ ID NO: 1569166 - DNA, 15 bp, Homo sapiens
ccagagagaaattaa

SEQ ID NO: 1569167 - DNA, 15 bp, Homo sapiens
tccagagagaaatta

SEQ ID NO: 1569168 - DNA, 15 bp, Homo sapiens
atccagagagaaatt

SEQ ID NO: 1569169 - DNA, 15 bp, Homo sapiens
aatccagagagaaat

SEQ ID NO: 1569170 - DNA, 15 bp, Homo sapiens
aaatccagagagaaa

SEQ ID NO: 1569171 - DNA, 15 bp, Homo sapiens
caaatccagagagaa

SEQ ID NO: 1569172 - DNA, 15 bp, Homo sapiens
acaaatccagagaga

SEQ ID NO: 1569173 - DNA, 15 bp, Homo sapiens
gacaaatccagagag

SEQ ID NO: 1569174 - DNA, 15 bp, Homo sapiens
ggacaaatccagaga

SEQ ID NO: 1569175 - DNA, 15 bp, Homo sapiens
aggacaaatccagag

SEQ ID NO: 1569176 - DNA, 15 bp, Homo sapiens
gaggacaaatccaga

SEQ ID NO: 1569177 - DNA, 15 bp, Homo sapiens
tgaggacaaatccag

SEQ ID NO: 1569178 - DNA, 15 bp, Homo sapiens
atgaggacaaatcca

SEQ ID NO: 1569179 - DNA, 15 bp, Homo sapiens
aatgaggacaaatcc

SEQ ID NO: 1569180 - DNA, 15 bp, Homo sapiens
aaatgaggacaaatc

SEQ ID NO: 1569181 - DNA, 15 bp, Homo sapiens
caaatgaggacaaat

SEQ ID NO: 1569182 - DNA, 15 bp, Homo sapiens
gcaaatgaggacaaa

SEQ ID NO: 1569183 - DNA, 15 bp, Homo sapiens
agcaaatgaggacaa

SEQ ID NO: 1569184 - DNA, 15 bp, Homo sapiens
gagcaaatgaggaca

SEQ ID NO: 1569185 - DNA, 15 bp, Homo sapiens
agagcaaatgaggac

SEQ ID NO: 1569186 - DNA, 15 bp, Homo sapiens
aagagcaaatgagga

SEQ ID NO: 1569187 - DNA, 15 bp, Homo sapiens
taagagcaaatgagg

SEQ ID NO: 1569188 - DNA, 15 bp, Homo sapiens
ataagagcaaatgag

SEQ ID NO: 1569189 - DNA, 15 bp, Homo sapiens
aataagagcaaatga

SEQ ID NO: 1569190 - DNA, 15 bp, Homo sapiens
gaataagagcaaatg

SEQ ID NO: 1569191 - DNA, 15 bp, Homo sapiens
tgaataagagcaaat

SEQ ID NO: 1569192 - DNA, 15 bp, Homo sapiens
ctgaataagagcaaa

SEQ ID NO: 1569193 - DNA, 15 bp, Homo sapiens
actgaataagagcaa

SEQ ID NO: 1569194 - DNA, 15 bp, Homo sapiens
aactgaataagagca

SEQ ID NO: 1569195 - DNA, 15 bp, Homo sapiens
aaactgaataagagc

SEQ ID NO: 1569196 - DNA, 15 bp, Homo sapiens
aaaactgaataagag

SEQ ID NO: 1569197 - DNA, 15 bp, Homo sapiens
aaaaactgaataaga

SEQ ID NO: 1569198 - DNA, 15 bp, Homo sapiens
aaaaaactgaataag

SEQ ID NO: 1569199 - DNA, 15 bp, Homo sapiens
aaaaaaactgaataa

SEQ ID NO: 1569200 - DNA, 15 bp, Homo sapiens
caaaaaaactgaata

SEQ ID NO: 1569201 - DNA, 15 bp, Homo sapiens
acaaaaaaactgaat

SEQ ID NO: 1569202 - DNA, 15 bp, Homo sapiens
aacaaaaaaactgaa

SEQ ID NO: 1569203 - DNA, 15 bp, Homo sapiens
aaacaaaaaaactga

SEQ ID NO: 1569204 - DNA, 15 bp, Homo sapiens
caaacaaaaaaactg

SEQ ID NO: 1569205 - DNA, 15 bp, Homo sapiens
acaaaacaaacaaac

SEQ ID NO: 1569206 - DNA, 15 bp, Homo sapiens
cacaaaacaaacaaa

SEQ ID NO: 1569207 - DNA, 15 bp, Homo sapiens
tcacaaaacaaacaa

SEQ ID NO: 1569208 - DNA, 15 bp, Homo sapiens
ctcacaaaacaaaca

SEQ ID NO: 1569209 - DNA, 15 bp, Homo sapiens
tctcacaaaacaaac

SEQ ID NO: 1569210 - DNA, 15 bp, Homo sapiens
gtctcacaaaacaaa

SEQ ID NO: 1569211 - DNA, 15 bp, Homo sapiens
cgtctcacaaaacaa

SEQ ID NO: 1569212 - DNA, 15 bp, Homo sapiens
ccgtctcacaaaaca

SEQ ID NO: 1569213 - DNA, 15 bp, Homo sapiens
tccgtctcacaaaac

SEQ ID NO: 1569214 - DNA, 15 bp, Homo sapiens
ctccgtctcacaaaa

SEQ ID NO: 1569215 - DNA, 15 bp, Homo sapiens
actccgtctcacaaa

SEQ ID NO: 1569216 - DNA, 15 bp, Homo sapiens
gactccgtctcacaa

SEQ ID NO: 1569217 - DNA, 15 bp, Homo sapiens
agactccgtctcaca

SEQ ID NO: 1569218 - DNA, 15 bp, Homo sapiens
gagactccgtctcac

SEQ ID NO: 1569219 - DNA, 15 bp, Homo sapiens
agacagagtgagact

SEQ ID NO: 1569220 - DNA, 15 bp, Homo sapiens
ggagacagagtgaga

SEQ ID NO: 1569221 - DNA, 15 bp, Homo sapiens
tggagacagagtgag

SEQ ID NO: 1569222 - DNA, 15 bp, Homo sapiens
ctggagacagagtga

SEQ ID NO: 1569223 - DNA, 15 bp, Homo sapiens
cctggagacagagtg

SEQ ID NO: 1569224 - DNA, 15 bp, Homo sapiens
gcctggagacagagt

SEQ ID NO: 1569225 - DNA, 15 bp, Homo sapiens
agcctggagacagag

SEQ ID NO: 1569226 - DNA, 15 bp, Homo sapiens
cagcctggagacaga

SEQ ID NO: 1569227 - DNA, 15 bp, Homo sapiens
ccagcctggagacag

SEQ ID NO: 1569228 - DNA, 15 bp, Homo sapiens
tccagcctggagaca

SEQ ID NO: 1569229 - DNA, 15 bp, Homo sapiens
ctccagcctggagac

SEQ ID NO: 1569230 - DNA, 15 bp, Homo sapiens
actccagcctggaga

SEQ ID NO: 1569231 - DNA, 15 bp, Homo sapiens
cactccagcctggag

SEQ ID NO: 1569232 - DNA, 15 bp, Homo sapiens
gtctcagctactcgg

SEQ ID NO: 1569233 - DNA, 15 bp, Homo sapiens
agtctcagctactcg

SEQ ID NO: 1569234 - DNA, 15 bp, Homo sapiens
atgcctgtagtctca

SEQ ID NO: 1569235 - DNA, 15 bp, Homo sapiens
catgcctgtagtctc

SEQ ID NO: 1569236 - DNA, 15 bp, Homo sapiens
gcatgcctgtagtct

SEQ ID NO: 1569237 - DNA, 15 bp, Homo sapiens
ctgcatgcctgtagt

SEQ ID NO: 1569238 - DNA, 15 bp, Homo sapiens
gctgcatgcctgtag

SEQ ID NO: 1569239 - DNA, 15 bp, Homo sapiens
tgctgcatgcctgta

SEQ ID NO: 1569240 - DNA, 15 bp, Homo sapiens
gtgctgcatgcctgt

SEQ ID NO: 1569241 - DNA, 15 bp, Homo sapiens
ggtgctgcatgcctg

SEQ ID NO: 1569242 - DNA, 15 bp, Homo sapiens
tggtgctgcatgcct

SEQ ID NO: 1569243 - DNA, 15 bp, Homo sapiens
gtggtgctgcatgcc

SEQ ID NO: 1569244 - DNA, 15 bp, Homo sapiens
cgtggtgctgcatgc

SEQ ID NO: 1569245 - DNA, 15 bp, Homo sapiens
gcgtggtgctgcatg

SEQ ID NO: 1569246 - DNA, 15 bp, Homo sapiens
ggcgtggtgctgcat

SEQ ID NO: 1569247 - DNA, 15 bp, Homo sapiens
gggcgtggtgctgca

SEQ ID NO: 1569248 - DNA, 15 bp, Homo sapiens
tgggcgtggtgctgc

SEQ ID NO: 1569249 - DNA, 15 bp, Homo sapiens
ctgggcgtggtgctg

SEQ ID NO: 1569250 - DNA, 15 bp, Homo sapiens
gctgggcgtggtgct

SEQ ID NO: 1569251 - DNA, 15 bp, Homo sapiens
agctgggcgtggtgc

SEQ ID NO: 1569252 - DNA, 15 bp, Homo sapiens
tgtttctactaaaaa

SEQ ID NO: 1569253 - DNA, 15 bp, Homo sapiens
ctgtttctactaaaa

SEQ ID NO: 1569254 - DNA, 15 bp, Homo sapiens
cctgtttctactaaa

SEQ ID NO: 1569255 - DNA, 15 bp, Homo sapiens
ccctgtttctactaa

SEQ ID NO: 1569256 - DNA, 15 bp, Homo sapiens
accctgtttctacta

SEQ ID NO: 1569257 - DNA, 15 bp, Homo sapiens
aaccctgtttctact

SEQ ID NO: 1569258 - DNA, 15 bp, Homo sapiens
aaaccctgtttctac

SEQ ID NO: 1569259 - DNA, 15 bp, Homo sapiens
gaaaccctgtttcta

SEQ ID NO: 1569260 - DNA, 15 bp, Homo sapiens
tgaaaccctgtttct

SEQ ID NO: 1569261 - DNA, 15 bp, Homo sapiens
gtgaaaccctgtttc

SEQ ID NO: 1569262 - DNA, 15 bp, Homo sapiens
ggtgaaaccctgttt

SEQ ID NO: 1569263 - DNA, 15 bp, Homo sapiens
tggtgaaaccctgtt

SEQ ID NO: 1569264 - DNA, 15 bp, Homo sapiens
aagaccatcctggcc

SEQ ID NO: 1569265 - DNA, 15 bp, Homo sapiens
gaggtcaagagatca

SEQ ID NO: 1569266 - DNA, 15 bp, Homo sapiens
cgaggtcaagagatc

SEQ ID NO: 1569267 - DNA, 15 bp, Homo sapiens
acgaggtcaagagat

SEQ ID NO: 1569268 - DNA, 15 bp, Homo sapiens
cacgaggtcaagaga

SEQ ID NO: 1569269 - DNA, 15 bp, Homo sapiens
tcacgaggtcaagag

SEQ ID NO: 1569270 - DNA, 15 bp, Homo sapiens
atcacgaggtcaaga

SEQ ID NO: 1569271 - DNA, 15 bp, Homo sapiens
gatcacgaggtcaag

SEQ ID NO: 1569272 - DNA, 15 bp, Homo sapiens
agatcacgaggtcaa

SEQ ID NO: 1569273 - DNA, 15 bp, Homo sapiens
aggccaggtgcggtg

SEQ ID NO: 1569274 - DNA, 15 bp, Homo sapiens
gaggccaggtgcggt

SEQ ID NO: 1569275 - DNA, 15 bp, Homo sapiens
tgaggccaggtgcgg

SEQ ID NO: 1569276 - DNA, 15 bp, Homo sapiens
ctgaggccaggtgcg

SEQ ID NO: 1569277 - DNA, 15 bp, Homo sapiens
actgaggccaggtgc

SEQ ID NO: 1569278 - DNA, 15 bp, Homo sapiens
aactgaggccaggtg

SEQ ID NO: 1569279 - DNA, 15 bp, Homo sapiens
aaactgaggccaggt

SEQ ID NO: 1569280 - DNA, 15 bp, Homo sapiens
caaactgaggccagg

SEQ ID NO: 1569281 - DNA, 15 bp, Homo sapiens
acaaactgaggccag

SEQ ID NO: 1569282 - DNA, 15 bp, Homo sapiens
aacaaactgaggcca

SEQ ID NO: 1569283 - DNA, 15 bp, Homo sapiens
aaacaaactgaggcc

SEQ ID NO: 1569284 - DNA, 15 bp, Homo sapiens
aaaacaaactgaggc

SEQ ID NO: 1569285 - DNA, 15 bp, Homo sapiens
aaaaacaaactgagg

SEQ ID NO: 1569286 - DNA, 15 bp, Homo sapiens
aaaaaacaaactgag

SEQ ID NO: 1569287 - DNA, 15 bp, Homo sapiens
caaaaaacaaactga

SEQ ID NO: 1569288 - DNA, 15 bp, Homo sapiens
tcaaaaaacaaactg

SEQ ID NO: 1569289 - DNA, 15 bp, Homo sapiens
atcaaaaaacaaact

SEQ ID NO: 1569290 - DNA, 15 bp, Homo sapiens
aatcaaaaaacaaac

SEQ ID NO: 1569291 - DNA, 15 bp, Homo sapiens
caatcaaaaaacaaa

SEQ ID NO: 1569292 - DNA, 15 bp, Homo sapiens
ccaatcaaaaaacaa

SEQ ID NO: 1569293 - DNA, 15 bp, Homo sapiens
gccaatcaaaaaaca

SEQ ID NO: 1569294 - DNA, 15 bp, Homo sapiens
tgccaatcaaaaaac

SEQ ID NO: 1569295 - DNA, 15 bp, Homo sapiens
atgccaatcaaaaaa

SEQ ID NO: 1569296 - DNA, 15 bp, Homo sapiens
aatgccaatcaaaaa

SEQ ID NO: 1569297 - DNA, 15 bp, Homo sapiens
taatgccaatcaaaa

SEQ ID NO: 1569298 - DNA, 15 bp, Homo sapiens
ctaatgccaatcaaa

SEQ ID NO: 1569299 - DNA, 15 bp, Homo sapiens
actaatgccaatcaa

SEQ ID NO: 1569300 - DNA, 15 bp, Homo sapiens
aactaatgccaatca

SEQ ID NO: 1569301 - DNA, 15 bp, Homo sapiens
aaactaatgccaatc

SEQ ID NO: 1569302 - DNA, 15 bp, Homo sapiens
taaactaatgccaat

SEQ ID NO: 1569303 - DNA, 15 bp, Homo sapiens
ataaactaatgccaa

SEQ ID NO: 1569304 - DNA, 15 bp, Homo sapiens
cataaactaatgcca

SEQ ID NO: 1569305 - DNA, 15 bp, Homo sapiens
acataaactaatgcc

SEQ ID NO: 1569306 - DNA, 15 bp, Homo sapiens
tacataaactaatgc

SEQ ID NO: 1569307 - DNA, 15 bp, Homo sapiens
ctacataaactaatg

SEQ ID NO: 1569308 - DNA, 15 bp, Homo sapiens
actacataaactaat

SEQ ID NO: 1569309 - DNA, 15 bp, Homo sapiens
cactacataaactaa

SEQ ID NO: 1569310 - DNA, 15 bp, Homo sapiens
gcactacataaacta

SEQ ID NO: 1569311 - DNA, 15 bp, Homo sapiens
agcactacataaact

SEQ ID NO: 1569312 - DNA, 15 bp, Homo sapiens
tagcactacataaac

SEQ ID NO: 1569313 - DNA, 15 bp, Homo sapiens
gtagcactacataaa

SEQ ID NO: 1569314 - DNA, 15 bp, Homo sapiens
tgtagcactacataa

SEQ ID NO: 1569315 - DNA, 15 bp, Homo sapiens
atgtagcactacata

SEQ ID NO: 1569316 - DNA, 15 bp, Homo sapiens
tatgtagcactacat

SEQ ID NO: 1569317 - DNA, 15 bp, Homo sapiens
ttatgtagcactaca

SEQ ID NO: 1569318 - DNA, 15 bp, Homo sapiens
cttatgtagcactac

SEQ ID NO: 1569319 - DNA, 15 bp, Homo sapiens
tcttatgtagcacta

SEQ ID NO: 1569320 - DNA, 15 bp, Homo sapiens
atcttatgtagcact

SEQ ID NO: 1569321 - DNA, 15 bp, Homo sapiens
catcttatgtagcac

SEQ ID NO: 1569322 - DNA, 15 bp, Homo sapiens
acatcttatgtagca

SEQ ID NO: 1569323 - DNA, 15 bp, Homo sapiens
tacatcttatgtagc

SEQ ID NO: 1569324 - DNA, 15 bp, Homo sapiens
atacatcttatgtag

SEQ ID NO: 1569325 - DNA, 15 bp, Homo sapiens
tatacatcttatgta

SEQ ID NO: 1569326 - DNA, 15 bp, Homo sapiens
atatacatcttatgt

SEQ ID NO: 1569327 - DNA, 15 bp, Homo sapiens
catatacatcttatg

SEQ ID NO: 1569328 - DNA, 15 bp, Homo sapiens
tcatatacatcttat

SEQ ID NO: 1569329 - DNA, 15 bp, Homo sapiens
atcatatacatctta

SEQ ID NO: 1569330 - DNA, 15 bp, Homo sapiens
gatcatatacatctt

SEQ ID NO: 1569331 - DNA, 15 bp, Homo sapiens
tgatcatatacatct

SEQ ID NO: 1569332 - DNA, 15 bp, Homo sapiens
atgatcatatacatc

SEQ ID NO: 1569333 - DNA, 15 bp, Homo sapiens
aatgatcatatacat

SEQ ID NO: 1569334 - DNA, 15 bp, Homo sapiens
aaatgatcatataca

SEQ ID NO: 1569335 - DNA, 15 bp, Homo sapiens
aaaatgatcatatac

SEQ ID NO: 1569336 - DNA, 15 bp, Homo sapiens
gaaaatgatcatata

SEQ ID NO: 1569337 - DNA, 15 bp, Homo sapiens
agaaaatgatcatat

SEQ ID NO: 1569338 - DNA, 15 bp, Homo sapiens
gagaaaatgatcata

SEQ ID NO: 1569339 - DNA, 15 bp, Homo sapiens
agagaaaatgatcat

SEQ ID NO: 1569340 - DNA, 15 bp, Homo sapiens
tacagagaaaatgat

SEQ ID NO: 1569341 - DNA, 15 bp, Homo sapiens
atacagagaaaatga

SEQ ID NO: 1569342 - DNA, 15 bp, Homo sapiens
catacagagaaaatg

SEQ ID NO: 1569343 - DNA, 15 bp, Homo sapiens
acatacagagaaaat

SEQ ID NO: 1569344 - DNA, 15 bp, Homo sapiens
cacatacagagaaaa

SEQ ID NO: 1569345 - DNA, 15 bp, Homo sapiens
ccacatacagagaaa

SEQ ID NO: 1569346 - DNA, 15 bp, Homo sapiens
cccacatacagagaa

SEQ ID NO: 1569347 - DNA, 15 bp, Homo sapiens
gagcccacatacaga

SEQ ID NO: 1569348 - DNA, 15 bp, Homo sapiens
agagcccacatacag

SEQ ID NO: 1569349 - DNA, 15 bp, Homo sapiens
gagagcccacataca

SEQ ID NO: 1569350 - DNA, 15 bp, Homo sapiens
agagagcccacatac

SEQ ID NO: 1569351 - DNA, 15 bp, Homo sapiens
gagagagcccacata

SEQ ID NO: 1569352 - DNA, 15 bp, Homo sapiens
ggagagagcccacat

SEQ ID NO: 1569353 - DNA, 15 bp, Homo sapiens
tggagagagcccaca

SEQ ID NO: 1569354 - DNA, 15 bp, Homo sapiens
ttggagagagcccac

SEQ ID NO: 1569355 - DNA, 15 bp, Homo sapiens
tttggagagagccca

SEQ ID NO: 1569356 - DNA, 15 bp, Homo sapiens
atttggagagagccc

SEQ ID NO: 1569357 - DNA, 15 bp, Homo sapiens
aatttggagagagcc

SEQ ID NO: 1569358 - DNA, 15 bp, Homo sapiens
caatttggagagagc

SEQ ID NO: 1569359 - DNA, 15 bp, Homo sapiens
tcaatttggagagag

SEQ ID NO: 1569360 - DNA, 15 bp, Homo sapiens
atcaatttggagaga

SEQ ID NO: 1569361 - DNA, 15 bp, Homo sapiens
gatcaatttggagag

SEQ ID NO: 1569362 - DNA, 15 bp, Homo sapiens
tgatcaatttggaga

SEQ ID NO: 1569363 - DNA, 15 bp, Homo sapiens
ttgatcaatttggag

SEQ ID NO: 1569364 - DNA, 15 bp, Homo sapiens
tttgatcaatttgga

SEQ ID NO: 1569365 - DNA, 15 bp, Homo sapiens
ctttgatcaatttgg

SEQ ID NO: 1569366 - DNA, 15 bp, Homo sapiens
actttgatcaatttg

SEQ ID NO: 1569367 - DNA, 15 bp, Homo sapiens
aactttgatcaattt

SEQ ID NO: 1569368 - DNA, 15 bp, Homo sapiens
gaactttgatcaatt

SEQ ID NO: 1569369 - DNA, 15 bp, Homo sapiens
ggaactttgatcaat

SEQ ID NO: 1569370 - DNA, 15 bp, Homo sapiens
aggaactttgatcaa

SEQ ID NO: 1569371 - DNA, 15 bp, Homo sapiens
aaggaactttgatca

SEQ ID NO: 1569372 - DNA, 15 bp, Homo sapiens
caaggaactttgatc

SEQ ID NO: 1569373 - DNA, 15 bp, Homo sapiens
tcaaggaactttgat

SEQ ID NO: 1569374 - DNA, 15 bp, Homo sapiens
ttcaaggaactttga

SEQ ID NO: 1569375 - DNA, 15 bp, Homo sapiens
cttcaaggaactttg

SEQ ID NO: 1569376 - DNA, 15 bp, Homo sapiens
tcttcaaggaacttt

SEQ ID NO: 1569377 - DNA, 15 bp, Homo sapiens
gtcttcaaggaactt

SEQ ID NO: 1569378 - DNA, 15 bp, Homo sapiens
tgtcttcaaggaact

SEQ ID NO: 1569379 - DNA, 15 bp, Homo sapiens
ctgtcttcaaggaac

SEQ ID NO: 1569380 - DNA, 15 bp, Homo sapiens
cctgtcttcaaggaa

SEQ ID NO: 1569381 - DNA, 15 bp, Homo sapiens
ccctgtcttcaagga

SEQ ID NO: 1569382 - DNA, 15 bp, Homo sapiens
accctgtcttcaagg

SEQ ID NO: 1569383 - DNA, 15 bp, Homo sapiens
aaccctgtcttcaag

SEQ ID NO: 1569384 - DNA, 15 bp, Homo sapiens
aaaccctgtcttcaa

SEQ ID NO: 1569385 - DNA, 15 bp, Homo sapiens
gaaaccctgtcttca

SEQ ID NO: 1569386 - DNA, 15 bp, Homo sapiens
agaaaccctgtcttc

SEQ ID NO: 1569387 - DNA, 15 bp, Homo sapiens
cagaaaccctgtctt

SEQ ID NO: 1569388 - DNA, 15 bp, Homo sapiens
acagaaaccctgtct

SEQ ID NO: 1569389 - DNA, 15 bp, Homo sapiens
aacagaaaccctgtc

SEQ ID NO: 1569390 - DNA, 15 bp, Homo sapiens
aaacagaaaccctgt

SEQ ID NO: 1569391 - DNA, 15 bp, Homo sapiens
gaaacagaaaccctg

SEQ ID NO: 1569392 - DNA, 15 bp, Homo sapiens
agaaacagaaaccct

SEQ ID NO: 1569393 - DNA, 15 bp, Homo sapiens
aagaaacagaaaccc

SEQ ID NO: 1569394 - DNA, 15 bp, Homo sapiens
gaagaaacagaaacc

SEQ ID NO: 1569395 - DNA, 15 bp, Homo sapiens
ggaagaaacagaaac

SEQ ID NO: 1569396 - DNA, 15 bp, Homo sapiens
aggaagaaacagaaa

SEQ ID NO: 1569397 - DNA, 15 bp, Homo sapiens
aaggaagaaacagaa

SEQ ID NO: 1569398 - DNA, 15 bp, Homo sapiens
taaggaagaaacaga

SEQ ID NO: 1569399 - DNA, 15 bp, Homo sapiens
ttaaggaagaaacag

SEQ ID NO: 1569400 - DNA, 15 bp, Homo sapiens
tttaaggaagaaaca

SEQ ID NO: 1569401 - DNA, 15 bp, Homo sapiens
gtttaaggaagaaac

SEQ ID NO: 1569402 - DNA, 15 bp, Homo sapiens
tgtttaaggaagaaa

SEQ ID NO: 1569403 - DNA, 15 bp, Homo sapiens
ctgtttaaggaagaa

SEQ ID NO: 1569404 - DNA, 15 bp, Homo sapiens
actgtttaaggaaga

SEQ ID NO: 1569405 - DNA, 15 bp, Homo sapiens
aactgtttaaggaag

SEQ ID NO: 1569406 - DNA, 15 bp, Homo sapiens
gaactgtttaaggaa

SEQ ID NO: 1569407 - DNA, 15 bp, Homo sapiens
ggaactgtttaagga

SEQ ID NO: 1569408 - DNA, 15 bp, Homo sapiens
aggaactgtttaagg

SEQ ID NO: 1569409 - DNA, 15 bp, Homo sapiens
caggaactgtttaag

SEQ ID NO: 1569410 - DNA, 15 bp, Homo sapiens
ccaggaactgtttaa

SEQ ID NO: 1569411 - DNA, 15 bp, Homo sapiens
accaggaactgttta

SEQ ID NO: 1569412 - DNA, 15 bp, Homo sapiens
caccaggaactgttt

SEQ ID NO: 1569413 - DNA, 15 bp, Homo sapiens
gcaccaggaactgtt

SEQ ID NO: 1569414 - DNA, 15 bp, Homo sapiens
tgcaccaggaactgt

SEQ ID NO: 1569415 - DNA, 15 bp, Homo sapiens
ctgcaccaggaactg

SEQ ID NO: 1569416 - DNA, 15 bp, Homo sapiens
actgcaccaggaact

SEQ ID NO: 1569417 - DNA, 15 bp, Homo sapiens
cactgcaccaggaac

SEQ ID NO: 1569418 - DNA, 15 bp, Homo sapiens
acactgcaccaggaa

SEQ ID NO: 1569419 - DNA, 15 bp, Homo sapiens
aacactgcaccagga

SEQ ID NO: 1569420 - DNA, 15 bp, Homo sapiens
aaacactgcaccagg

SEQ ID NO: 1569421 - DNA, 15 bp, Homo sapiens
aaaacactgcaccag

SEQ ID NO: 1569422 - DNA, 15 bp, Homo sapiens
taaaacactgcacca

SEQ ID NO: 1569423 - DNA, 15 bp, Homo sapiens
ctaaaacactgcacc

SEQ ID NO: 1569424 - DNA, 15 bp, Homo sapiens
tctaaaacactgcac

SEQ ID NO: 1569425 - DNA, 15 bp, Homo sapiens
atctaaaacactgca

SEQ ID NO: 1569426 - DNA, 15 bp, Homo sapiens
tatctaaaacactgc

SEQ ID NO: 1569427 - DNA, 15 bp, Homo sapiens
gtatctaaaacactg

SEQ ID NO: 1569428 - DNA, 15 bp, Homo sapiens
tgtatctaaaacact

SEQ ID NO: 1569429 - DNA, 15 bp, Homo sapiens
ctgtatctaaaacac

SEQ ID NO: 1569430 - DNA, 15 bp, Homo sapiens
cctgtatctaaaaca

SEQ ID NO: 1569431 - DNA, 15 bp, Homo sapiens
ccctgtatctaaaac

SEQ ID NO: 1569432 - DNA, 15 bp, Homo sapiens
cccctgtatctaaaa

SEQ ID NO: 1569433 - DNA, 15 bp, Homo sapiens
ccccctgtatctaaa

SEQ ID NO: 1569434 - DNA, 15 bp, Homo sapiens
accccctgtatctaa

SEQ ID NO: 1569435 - DNA, 15 bp, Homo sapiens
caccccctgtatcta

SEQ ID NO: 1569436 - DNA, 15 bp, Homo sapiens
gcaccccctgtatct

SEQ ID NO: 1569437 - DNA, 15 bp, Homo sapiens
agcaccccctgtatc

SEQ ID NO: 1569438 - DNA, 15 bp, Homo sapiens
tagcaccccctgtat

SEQ ID NO: 1569439 - DNA, 15 bp, Homo sapiens
ttagcaccccctgta

SEQ ID NO: 1569440 - DNA, 15 bp, Homo sapiens
tttagcaccccctgt

SEQ ID NO: 1569441 - DNA, 15 bp, Homo sapiens
atttagcaccccctg

SEQ ID NO: 1569442 - DNA, 15 bp, Homo sapiens
gatttagcaccccct

SEQ ID NO: 1569443 - DNA, 15 bp, Homo sapiens
tgatttagcaccccc

SEQ ID NO: 1569444 - DNA, 15 bp, Homo sapiens
ttgatttagcacccc

SEQ ID NO: 1569445 - DNA, 15 bp, Homo sapiens
attgatttagcaccc

SEQ ID NO: 1569446 - DNA, 15 bp, Homo sapiens
tattgatttagcacc

SEQ ID NO: 1569447 - DNA, 15 bp, Homo sapiens
atattgatttagcac

SEQ ID NO: 1569448 - DNA, 15 bp, Homo sapiens
catattgatttagca

SEQ ID NO: 1569449 - DNA, 15 bp, Homo sapiens
tcatattgatttagc

SEQ ID NO: 1569450 - DNA, 15 bp, Homo sapiens
ttcatattgatttag

SEQ ID NO: 1569451 - DNA, 15 bp, Homo sapiens
attcatattgattta

SEQ ID NO: 1569452 - DNA, 15 bp, Homo sapiens
aattcatattgattt

SEQ ID NO: 1569453 - DNA, 15 bp, Homo sapiens
caattcatattgatt

SEQ ID NO: 1569454 - DNA, 15 bp, Homo sapiens
acaattcatattgat

SEQ ID NO: 1569455 - DNA, 15 bp, Homo sapiens
tacaattcatattga

SEQ ID NO: 1569456 - DNA, 15 bp, Homo sapiens
atacaattcatattg

SEQ ID NO: 1569457 - DNA, 15 bp, Homo sapiens
tatacaattcatatt

SEQ ID NO: 1569458 - DNA, 15 bp, Homo sapiens
ttatacaattcatat

SEQ ID NO: 1569459 - DNA, 15 bp, Homo sapiens
tttatacaattcata

SEQ ID NO: 1569460 - DNA, 15 bp, Homo sapiens
gtttatacaattcat

SEQ ID NO: 1569461 - DNA, 15 bp, Homo sapiens
ggtttatacaattca

SEQ ID NO: 1569462 - DNA, 15 bp, Homo sapiens
aggtttatacaattc

SEQ ID NO: 1569463 - DNA, 15 bp, Homo sapiens
aaggtttatacaatt

SEQ ID NO: 1569464 - DNA, 15 bp, Homo sapiens
caaggtttatacaat

SEQ ID NO: 1569465 - DNA, 15 bp, Homo sapiens
acaaggtttatacaa

SEQ ID NO: 1569466 - DNA, 15 bp, Homo sapiens
aacaaggtttataca

SEQ ID NO: 1569467 - DNA, 15 bp, Homo sapiens
gaacaaggtttatac

SEQ ID NO: 1569468 - DNA, 15 bp, Homo sapiens
ggaacaaggtttata

SEQ ID NO: 1569469 - DNA, 15 bp, Homo sapiens
tggaacaaggtttat

SEQ ID NO: 1569470 - DNA, 15 bp, Homo sapiens
ctggaacaaggttta

SEQ ID NO: 1569471 - DNA, 15 bp, Homo sapiens
actggaacaaggttt

SEQ ID NO: 1569472 - DNA, 15 bp, Homo sapiens
aactggaacaaggtt

SEQ ID NO: 1569473 - DNA, 15 bp, Homo sapiens
aaactggaacaaggt

SEQ ID NO: 1569474 - DNA, 15 bp, Homo sapiens
aaaactggaacaagg

SEQ ID NO: 1569475 - DNA, 15 bp, Homo sapiens
aaaaactggaacaag

SEQ ID NO: 1569476 - DNA, 15 bp, Homo sapiens
taaaaactggaacaa

SEQ ID NO: 1569477 - DNA, 15 bp, Homo sapiens
ttaaaaactggaaca

SEQ ID NO: 1569478 - DNA, 15 bp, Homo sapiens
cttaaaaactggaac

SEQ ID NO: 1569479 - DNA, 15 bp, Homo sapiens
tcttaaaaactggaa

SEQ ID NO: 1569480 - DNA, 15 bp, Homo sapiens
ttcttaaaaactgga

SEQ ID NO: 1569481 - DNA, 15 bp, Homo sapiens
attcttaaaaactgg

SEQ ID NO: 1569482 - DNA, 15 bp, Homo sapiens
aattcttaaaaactg

SEQ ID NO: 1569483 - DNA, 15 bp, Homo sapiens
caattcttaaaaact

SEQ ID NO: 1569484 - DNA, 15 bp, Homo sapiens
ccaattcttaaaaac

SEQ ID NO: 1569485 - DNA, 15 bp, Homo sapiens
cccaattcttaaaaa

SEQ ID NO: 1569486 - DNA, 15 bp, Homo sapiens
acccaattcttaaaa

SEQ ID NO: 1569487 - DNA, 15 bp, Homo sapiens
tacccaattcttaaa

SEQ ID NO: 1569488 - DNA, 15 bp, Homo sapiens
atacccaattcttaa

SEQ ID NO: 1569489 - DNA, 15 bp, Homo sapiens
aatacccaattctta

SEQ ID NO: 1569490 - DNA, 15 bp, Homo sapiens
aaatacccaattctt

SEQ ID NO: 1569491 - DNA, 15 bp, Homo sapiens
aaaatacccaattct

SEQ ID NO: 1569492 - DNA, 15 bp, Homo sapiens
taaaatacccaattc

SEQ ID NO: 1569493 - DNA, 15 bp, Homo sapiens
ataaaatacccaatt

SEQ ID NO: 1569494 - DNA, 15 bp, Homo sapiens
aataaaatacccaat

SEQ ID NO: 1569495 - DNA, 15 bp, Homo sapiens
aaataaaatacccaa

SEQ ID NO: 1569496 - DNA, 15 bp, Homo sapiens
taaataaaataccca

SEQ ID NO: 1569497 - DNA, 15 bp, Homo sapiens
ataaataaaataccc

SEQ ID NO: 1569498 - DNA, 15 bp, Homo sapiens
aataaataaaatacc

SEQ ID NO: 1569499 - DNA, 15 bp, Homo sapiens
aaataaataaaatac

SEQ ID NO: 1569500 - DNA, 15 bp, Homo sapiens
gaaataaataaaata

SEQ ID NO: 1569501 - DNA, 15 bp, Homo sapiens
ggaaataaataaaat

SEQ ID NO: 1569502 - DNA, 15 bp, Homo sapiens
aggaaataaataaaa

SEQ ID NO: 1569503 - DNA, 15 bp, Homo sapiens
aaggaaataaataaa

SEQ ID NO: 1569504 - DNA, 15 bp, Homo sapiens
aaaggaaataaataa

SEQ ID NO: 1569505 - DNA, 15 bp, Homo sapiens
gaaaggaaataaata

SEQ ID NO: 1569506 - DNA, 15 bp, Homo sapiens
tgaaaggaaataaat

SEQ ID NO: 1569507 - DNA, 15 bp, Homo sapiens
gtgaaaggaaataaa

SEQ ID NO: 1569508 - DNA, 15 bp, Homo sapiens
agtgaaaggaaataa

SEQ ID NO: 1569509 - DNA, 15 bp, Homo sapiens
tagtgaaaggaaata

SEQ ID NO: 1569510 - DNA, 15 bp, Homo sapiens
atagtgaaaggaaat

SEQ ID NO: 1569511 - DNA, 15 bp, Homo sapiens
aatagtgaaaggaaa

SEQ ID NO: 1569512 - DNA, 15 bp, Homo sapiens
taatagtgaaaggaa

SEQ ID NO: 1569513 - DNA, 15 bp, Homo sapiens
gtaatagtgaaagga

SEQ ID NO: 1569514 - DNA, 15 bp, Homo sapiens
agtaatagtgaaagg

SEQ ID NO: 1569515 - DNA, 15 bp, Homo sapiens
aagtaatagtgaaag

SEQ ID NO: 1569516 - DNA, 15 bp, Homo sapiens
caagtaatagtgaaa

SEQ ID NO: 1569517 - DNA, 15 bp, Homo sapiens
tcaagtaatagtgaa

SEQ ID NO: 1569518 - DNA, 15 bp, Homo sapiens
ttcaagtaatagtga

SEQ ID NO: 1569519 - DNA, 15 bp, Homo sapiens
attcaagtaatagtg

SEQ ID NO: 1569520 - DNA, 15 bp, Homo sapiens
tattcaagtaatagt

SEQ ID NO: 1569521 - DNA, 15 bp, Homo sapiens
atattcaagtaatag

SEQ ID NO: 1569522 - DNA, 15 bp, Homo sapiens
gatattcaagtaata

SEQ ID NO: 1569523 - DNA, 15 bp, Homo sapiens
agatattcaagtaat

SEQ ID NO: 1569524 - DNA, 15 bp, Homo sapiens
cagatattcaagtaa

SEQ ID NO: 1569525 - DNA, 15 bp, Homo sapiens
acagatattcaagta

SEQ ID NO: 1569526 - DNA, 15 bp, Homo sapiens
gacagatattcaagt

SEQ ID NO: 1569527 - DNA, 15 bp, Homo sapiens
tgacagatattcaag

SEQ ID NO: 1569528 - DNA, 15 bp, Homo sapiens
ttgacagatattcaa

SEQ ID NO: 1569529 - DNA, 15 bp, Homo sapiens
gttgacagatattca

SEQ ID NO: 1569530 - DNA, 15 bp, Homo sapiens
tgttgacagatattc

SEQ ID NO: 1569531 - DNA, 15 bp, Homo sapiens
atgttgacagatatt

SEQ ID NO: 1569532 - DNA, 15 bp, Homo sapiens
catgttgacagatat

SEQ ID NO: 1569533 - DNA, 15 bp, Homo sapiens
gcatgttgacagata

SEQ ID NO: 1569534 - DNA, 15 bp, Homo sapiens
tgcatgttgacagat

SEQ ID NO: 1569535 - DNA, 15 bp, Homo sapiens
ttgcatgttgacaga

SEQ ID NO: 1569536 - DNA, 15 bp, Homo sapiens
tttgcatgttgacag

SEQ ID NO: 1569537 - DNA, 15 bp, Homo sapiens
ctttgcatgttgaca

SEQ ID NO: 1569538 - DNA, 15 bp, Homo sapiens
cctttgcatgttgac

SEQ ID NO: 1569539 - DNA, 15 bp, Homo sapiens
acctttgcatgttga

SEQ ID NO: 1569540 - DNA, 15 bp, Homo sapiens
aacctttgcatgttg

SEQ ID NO: 1569541 - DNA, 15 bp, Homo sapiens
caacctttgcatgtt

SEQ ID NO: 1569542 - DNA, 15 bp, Homo sapiens
acaacctttgcatgt

SEQ ID NO: 1569543 - DNA, 15 bp, Homo sapiens
gacaacctttgcatg

SEQ ID NO: 1569544 - DNA, 15 bp, Homo sapiens
tgacaacctttgcat

SEQ ID NO: 1569545 - DNA, 15 bp, Homo sapiens
gtgacaacctttgca

SEQ ID NO: 1569546 - DNA, 15 bp, Homo sapiens
agtgacaacctttgc

SEQ ID NO: 1569547 - DNA, 15 bp, Homo sapiens
aagtgacaacctttg

SEQ ID NO: 1569548 - DNA, 15 bp, Homo sapiens
taagtgacaaccttt

SEQ ID NO: 1569549 - DNA, 15 bp, Homo sapiens
ttaagtgacaacctt

SEQ ID NO: 1569550 - DNA, 15 bp, Homo sapiens
tttaagtgacaacct

SEQ ID NO: 1569551 - DNA, 15 bp, Homo sapiens
ttttaagtgacaacc

SEQ ID NO: 1569552 - DNA, 15 bp, Homo sapiens
tttttaagtgacaac

SEQ ID NO: 1569553 - DNA, 15 bp, Homo sapiens
attttttaagtgaca

SEQ ID NO: 1569554 - DNA, 15 bp, Homo sapiens
cattttttaagtgac

SEQ ID NO: 1569555 - DNA, 15 bp, Homo sapiens
ccattttttaagtga

SEQ ID NO: 1569556 - DNA, 15 bp, Homo sapiens
cccattttttaagtg

SEQ ID NO: 1569557 - DNA, 15 bp, Homo sapiens
gcccattttttaagt

SEQ ID NO: 1569558 - DNA, 15 bp, Homo sapiens
ggcccattttttaag

SEQ ID NO: 1569559 - DNA, 15 bp, Homo sapiens
aggcccattttttaa

SEQ ID NO: 1569560 - DNA, 15 bp, Homo sapiens
caggcccatttttta

SEQ ID NO: 1569561 - DNA, 15 bp, Homo sapiens
tcaggcccatttttt

SEQ ID NO: 1569562 - DNA, 15 bp, Homo sapiens
ttcaggcccattttt

SEQ ID NO: 1569563 - DNA, 15 bp, Homo sapiens
cttcaggcccatttt

SEQ ID NO: 1569564 - DNA, 15 bp, Homo sapiens
acttcaggcccattt

SEQ ID NO: 1569565 - DNA, 15 bp, Homo sapiens
aacttcaggcccatt

SEQ ID NO: 1569566 - DNA, 15 bp, Homo sapiens
taacttcaggcccat

SEQ ID NO: 1569567 - DNA, 15 bp, Homo sapiens
gtaacttcaggccca

SEQ ID NO: 1569568 - DNA, 15 bp, Homo sapiens
tgtaacttcaggccc

SEQ ID NO: 1569569 - DNA, 15 bp, Homo sapiens
ctgtaacttcaggcc

SEQ ID NO: 1569570 - DNA, 15 bp, Homo sapiens
tctgtaacttcaggc

SEQ ID NO: 1569571 - DNA, 15 bp, Homo sapiens
ttctgtaacttcagg

SEQ ID NO: 1569572 - DNA, 15 bp, Homo sapiens
tttctgtaacttcag

SEQ ID NO: 1569573 - DNA, 15 bp, Homo sapiens
atttctgtaacttca

SEQ ID NO: 1569574 - DNA, 15 bp, Homo sapiens
tatttctgtaacttc

SEQ ID NO: 1569575 - DNA, 15 bp, Homo sapiens
ttatttctgtaactt

SEQ ID NO: 1569576 - DNA, 15 bp, Homo sapiens
cttatttctgtaact

SEQ ID NO: 1569577 - DNA, 15 bp, Homo sapiens
acttatttctgtaac

SEQ ID NO: 1569578 - DNA, 15 bp, Homo sapiens
tacttatttctgtaa

SEQ ID NO: 1569579 - DNA, 15 bp, Homo sapiens
atacttatttctgta

SEQ ID NO: 1569580 - DNA, 15 bp, Homo sapiens
tatacttatttctgt

SEQ ID NO: 1569581 - DNA, 15 bp, Homo sapiens
atatacttatttctg

SEQ ID NO: 1569582 - DNA, 15 bp, Homo sapiens
gatatacttatttct

SEQ ID NO: 1569583 - DNA, 15 bp, Homo sapiens
tgatatacttatttc

SEQ ID NO: 1569584 - DNA, 15 bp, Homo sapiens
atgatatacttattt

SEQ ID NO: 1569585 - DNA, 15 bp, Homo sapiens
tatgatatacttatt

SEQ ID NO: 1569586 - DNA, 15 bp, Homo sapiens
gtatgatatacttat

SEQ ID NO: 1569587 - DNA, 15 bp, Homo sapiens
tgtatgatatactta

SEQ ID NO: 1569588 - DNA, 15 bp, Homo sapiens
ctgtatgatatactt

SEQ ID NO: 1569589 - DNA, 15 bp, Homo sapiens
tctgtatgatatact

SEQ ID NO: 1569590 - DNA, 15 bp, Homo sapiens
ttctgtatgatatac

SEQ ID NO: 1569591 - DNA, 15 bp, Homo sapiens
cttctgtatgatata

SEQ ID NO: 1569592 - DNA, 15 bp, Homo sapiens
acttctgtatgatat

SEQ ID NO: 1569593 - DNA, 15 bp, Homo sapiens
aacttctgtatgata

SEQ ID NO: 1569594 - DNA, 15 bp, Homo sapiens
aaacttctgtatgat

SEQ ID NO: 1569595 - DNA, 15 bp, Homo sapiens
aaaacttctgtatga

SEQ ID NO: 1569596 - DNA, 15 bp, Homo sapiens
aaaaacttctgtatg

SEQ ID NO: 1569597 - DNA, 15 bp, Homo sapiens
caaaaacttctgtat

SEQ ID NO: 1569598 - DNA, 15 bp, Homo sapiens
gcaaaaacttctgta

SEQ ID NO: 1569599 - DNA, 15 bp, Homo sapiens
tgcaaaaacttctgt

SEQ ID NO: 1569600 - DNA, 15 bp, Homo sapiens
atgcaaaaacttctg

SEQ ID NO: 1569601 - DNA, 15 bp, Homo sapiens
aatgcaaaaacttct

SEQ ID NO: 1569602 - DNA, 15 bp, Homo sapiens
aaatgcaaaaacttc

SEQ ID NO: 1569603 - DNA, 15 bp, Homo sapiens
caaatgcaaaaactt

SEQ ID NO: 1569604 - DNA, 15 bp, Homo sapiens
ccaaatgcaaaaact

SEQ ID NO: 1569605 - DNA, 15 bp, Homo sapiens
tccaaatgcaaaaac

SEQ ID NO: 1569606 - DNA, 15 bp, Homo sapiens
atccaaatgcaaaaa

SEQ ID NO: 1569607 - DNA, 15 bp, Homo sapiens
aatccaaatgcaaaa

SEQ ID NO: 1569608 - DNA, 15 bp, Homo sapiens
caatccaaatgcaaa

SEQ ID NO: 1569609 - DNA, 15 bp, Homo sapiens
gcaatccaaatgcaa

SEQ ID NO: 1569610 - DNA, 15 bp, Homo sapiens
ggcaatccaaatgca

SEQ ID NO: 1569611 - DNA, 15 bp, Homo sapiens
tggcaatccaaatgc

SEQ ID NO: 1569612 - DNA, 15 bp, Homo sapiens
ctggcaatccaaatg

SEQ ID NO: 1569613 - DNA, 15 bp, Homo sapiens
actggcaatccaaat

SEQ ID NO: 1569614 - DNA, 15 bp, Homo sapiens
tactggcaatccaaa

SEQ ID NO: 1569615 - DNA, 15 bp, Homo sapiens
ttactggcaatccaa

SEQ ID NO: 1569616 - DNA, 15 bp, Homo sapiens
gttactggcaatcca

SEQ ID NO: 1569617 - DNA, 15 bp, Homo sapiens
ggttactggcaatcc

SEQ ID NO: 1569618 - DNA, 15 bp, Homo sapiens
gggttactggcaatc

SEQ ID NO: 1569619 - DNA, 15 bp, Homo sapiens
agggttactggcaat

SEQ ID NO: 1569620 - DNA, 15 bp, Homo sapiens
gagggttactggcaa

SEQ ID NO: 1569621 - DNA, 15 bp, Homo sapiens
agagggttactggca

SEQ ID NO: 1569622 - DNA, 15 bp, Homo sapiens
cagagggttactggc

SEQ ID NO: 1569623 - DNA, 15 bp, Homo sapiens
tcagagggttactgg

SEQ ID NO: 1569624 - DNA, 15 bp, Homo sapiens
ctcagagggttactg

SEQ ID NO: 1569625 - DNA, 15 bp, Homo sapiens
gctcagagggttact

SEQ ID NO: 1569626 - DNA, 15 bp, Homo sapiens
ggctcagagggttac

SEQ ID NO: 1569627 - DNA, 15 bp, Homo sapiens
gggctcagagggtta

SEQ ID NO: 1569628 - DNA, 15 bp, Homo sapiens
agggctcagagggtt

SEQ ID NO: 1569629 - DNA, 15 bp, Homo sapiens
aagggctcagagggt

SEQ ID NO: 1569630 - DNA, 15 bp, Homo sapiens
aaagggctcagaggg

SEQ ID NO: 1569631 - DNA, 15 bp, Homo sapiens
taaagggctcagagg

SEQ ID NO: 1569632 - DNA, 15 bp, Homo sapiens
gtaaagggctcagag

SEQ ID NO: 1569633 - DNA, 15 bp, Homo sapiens
tgtaaagggctcaga

SEQ ID NO: 1569634 - DNA, 15 bp, Homo sapiens
ctgtaaagggctcag

SEQ ID NO: 1569635 - DNA, 15 bp, Homo sapiens
actgtaaagggctca

SEQ ID NO: 1569636 - DNA, 15 bp, Homo sapiens
cactgtaaagggctc

SEQ ID NO: 1569637 - DNA, 15 bp, Homo sapiens
acactgtaaagggct

SEQ ID NO: 1569638 - DNA, 15 bp, Homo sapiens
gacactgtaaagggc

SEQ ID NO: 1569639 - DNA, 15 bp, Homo sapiens
agacactgtaaaggg

SEQ ID NO: 1569640 - DNA, 15 bp, Homo sapiens
tagacactgtaaagg

SEQ ID NO: 1569641 - DNA, 15 bp, Homo sapiens
ctagacactgtaaag

SEQ ID NO: 1569642 - DNA, 15 bp, Homo sapiens
actagacactgtaaa

SEQ ID NO: 1569643 - DNA, 15 bp, Homo sapiens
cactagacactgtaa

SEQ ID NO: 1569644 - DNA, 15 bp, Homo sapiens
tcactagacactgta

SEQ ID NO: 1569645 - DNA, 15 bp, Homo sapiens
ctcactagacactgt

SEQ ID NO: 1569646 - DNA, 15 bp, Homo sapiens
actcactagacactg

SEQ ID NO: 1569647 - DNA, 15 bp, Homo sapiens
cactcactagacact

SEQ ID NO: 1569648 - DNA, 15 bp, Homo sapiens
ccactcactagacac

SEQ ID NO: 1569649 - DNA, 15 bp, Homo sapiens
tccactcactagaca

SEQ ID NO: 1569650 - DNA, 15 bp, Homo sapiens
ttccactcactagac

SEQ ID NO: 1569651 - DNA, 15 bp, Homo sapiens
attccactcactaga

SEQ ID NO: 1569652 - DNA, 15 bp, Homo sapiens
gattccactcactag

SEQ ID NO: 1569653 - DNA, 15 bp, Homo sapiens
agattccactcacta

SEQ ID NO: 1569654 - DNA, 15 bp, Homo sapiens
tagattccactcact

SEQ ID NO: 1569655 - DNA, 15 bp, Homo sapiens
ttagattccactcac

SEQ ID NO: 1569656 - DNA, 15 bp, Homo sapiens
tttagattccactca

SEQ ID NO: 1569657 - DNA, 15 bp, Homo sapiens
atttagattccactc

SEQ ID NO: 1569658 - DNA, 15 bp, Homo sapiens
catttagattccact

SEQ ID NO: 1569659 - DNA, 15 bp, Homo sapiens
ccatttagattccac

SEQ ID NO: 1569660 - DNA, 15 bp, Homo sapiens
gccatttagattcca

SEQ ID NO: 1569661 - DNA, 15 bp, Homo sapiens
tgccatttagattcc

SEQ ID NO: 1569662 - DNA, 15 bp, Homo sapiens
ctgccatttagattc

SEQ ID NO: 1569663 - DNA, 15 bp, Homo sapiens
gctgccatttagatt

SEQ ID NO: 1569664 - DNA, 15 bp, Homo sapiens
agctgccatttagat

SEQ ID NO: 1569665 - DNA, 15 bp, Homo sapiens
cagctgccatttaga

SEQ ID NO: 1569666 - DNA, 15 bp, Homo sapiens
ccagctgccatttag

SEQ ID NO: 1569667 - DNA, 15 bp, Homo sapiens
tccagctgccattta

SEQ ID NO: 1569668 - DNA, 15 bp, Homo sapiens
ttccagctgccattt

SEQ ID NO: 1569669 - DNA, 15 bp, Homo sapiens
attccagctgccatt

SEQ ID NO: 1569670 - DNA, 15 bp, Homo sapiens
cattccagctgccat

SEQ ID NO: 1569671 - DNA, 15 bp, Homo sapiens
tcattccagctgcca

SEQ ID NO: 1569672 - DNA, 15 bp, Homo sapiens
atcattccagctgcc

SEQ ID NO: 1569673 - DNA, 15 bp, Homo sapiens
catcattccagctgc

SEQ ID NO: 1569674 - DNA, 15 bp, Homo sapiens
tcatcattccagctg

SEQ ID NO: 1569675 - DNA, 15 bp, Homo sapiens
atcatcattccagct

SEQ ID NO: 1569676 - DNA, 15 bp, Homo sapiens
catcatcattccagc

SEQ ID NO: 1569677 - DNA, 15 bp, Homo sapiens
gcatcatcattccag

SEQ ID NO: 1569678 - DNA, 15 bp, Homo sapiens
agcatcatcattcca

SEQ ID NO: 1569679 - DNA, 15 bp, Homo sapiens
gagcatcatcattcc

SEQ ID NO: 1569680 - DNA, 15 bp, Homo sapiens
agagcatcatcattc

SEQ ID NO: 1569681 - DNA, 15 bp, Homo sapiens
cagagcatcatcatt

SEQ ID NO: 1569682 - DNA, 15 bp, Homo sapiens
gcagagcatcatcat

SEQ ID NO: 1569683 - DNA, 15 bp, Homo sapiens
agcagagcatcatca

SEQ ID NO: 1569684 - DNA, 15 bp, Homo sapiens
gagcagagcatcatc

SEQ ID NO: 1569685 - DNA, 15 bp, Homo sapiens
tgagcagagcatcat

SEQ ID NO: 1569686 - DNA, 15 bp, Homo sapiens
atgagcagagcatca

SEQ ID NO: 1569687 - DNA, 15 bp, Homo sapiens
aatgagcagagcatc

SEQ ID NO: 1569688 - DNA, 15 bp, Homo sapiens
aaatgagcagagcat

SEQ ID NO: 1569689 - DNA, 15 bp, Homo sapiens
aaaatgagcagagca

SEQ ID NO: 1569690 - DNA, 15 bp, Homo sapiens
gaaaatgagcagagc

SEQ ID NO: 1569691 - DNA, 15 bp, Homo sapiens
agaaaatgagcagag

SEQ ID NO: 1569692 - DNA, 15 bp, Homo sapiens
gagaaaatgagcaga

SEQ ID NO: 1569693 - DNA, 15 bp, Homo sapiens
agagaaaatgagcag

SEQ ID NO: 1569694 - DNA, 15 bp, Homo sapiens
cagagaaaatgagca

SEQ ID NO: 1569695 - DNA, 15 bp, Homo sapiens
acagagaaaatgagc

SEQ ID NO: 1569696 - DNA, 15 bp, Homo sapiens
aacagagaaaatgag

SEQ ID NO: 1569697 - DNA, 15 bp, Homo sapiens
aaacagagaaaatga

SEQ ID NO: 1569698 - DNA, 15 bp, Homo sapiens
aaaacagagaaaatg

SEQ ID NO: 1569699 - DNA, 15 bp, Homo sapiens
tccaaaacagagaaa

SEQ ID NO: 1569700 - DNA, 15 bp, Homo sapiens
ttccaaaacagagaa

SEQ ID NO: 1569701 - DNA, 15 bp, Homo sapiens
tttccaaaacagaga

SEQ ID NO: 1569702 - DNA, 15 bp, Homo sapiens
ttttccaaaacagag

SEQ ID NO: 1569703 - DNA, 15 bp, Homo sapiens
attttccaaaacaga

SEQ ID NO: 1569704 - DNA, 15 bp, Homo sapiens
aattttccaaaacag

SEQ ID NO: 1569705 - DNA, 15 bp, Homo sapiens
caattttccaaaaca

SEQ ID NO: 1569706 - DNA, 15 bp, Homo sapiens
ccaattttccaaaac

SEQ ID NO: 1569707 - DNA, 15 bp, Homo sapiens
gccaattttccaaaa

SEQ ID NO: 1569708 - DNA, 15 bp, Homo sapiens
agccaattttccaaa

SEQ ID NO: 1569709 - DNA, 15 bp, Homo sapiens
tagccaattttccaa

SEQ ID NO: 1569710 - DNA, 15 bp, Homo sapiens
ctagccaattttcca

SEQ ID NO: 1569711 - DNA, 15 bp, Homo sapiens
tctagccaattttcc

SEQ ID NO: 1569712 - DNA, 15 bp, Homo sapiens
gtctagccaattttc

SEQ ID NO: 1569713 - DNA, 15 bp, Homo sapiens
tgtctagccaatttt

SEQ ID NO: 1569714 - DNA, 15 bp, Homo sapiens
atgtctagccaattt

SEQ ID NO: 1569715 - DNA, 15 bp, Homo sapiens
gatgtctagccaatt

SEQ ID NO: 1569716 - DNA, 15 bp, Homo sapiens
tgatgtctagccaat

SEQ ID NO: 1569717 - DNA, 15 bp, Homo sapiens
atgatgtctagccaa

SEQ ID NO: 1569718 - DNA, 15 bp, Homo sapiens
aatgatgtctagcca

SEQ ID NO: 1569719 - DNA, 15 bp, Homo sapiens
gaatgatgtctagcc

SEQ ID NO: 1569720 - DNA, 15 bp, Homo sapiens
ggaatgatgtctagc

SEQ ID NO: 1569721 - DNA, 15 bp, Homo sapiens
aggaatgatgtctag

SEQ ID NO: 1569722 - DNA, 15 bp, Homo sapiens
caggaatgatgtcta

SEQ ID NO: 1569723 - DNA, 15 bp, Homo sapiens
ccaggaatgatgtct

SEQ ID NO: 1569724 - DNA, 15 bp, Homo sapiens
accaggaatgatgtc

SEQ ID NO: 1569725 - DNA, 15 bp, Homo sapiens
caccaggaatgatgt

SEQ ID NO: 1569726 - DNA, 15 bp, Homo sapiens
tcaccaggaatgatg

SEQ ID NO: 1569727 - DNA, 15 bp, Homo sapiens
atcaccaggaatgat

SEQ ID NO: 1569728 - DNA, 15 bp, Homo sapiens
aatcaccaggaatga

SEQ ID NO: 1569729 - DNA, 15 bp, Homo sapiens
caatcaccaggaatg

SEQ ID NO: 1569730 - DNA, 15 bp, Homo sapiens
acaatcaccaggaat

SEQ ID NO: 1569731 - DNA, 15 bp, Homo sapiens
tacaatcaccaggaa

SEQ ID NO: 1569732 - DNA, 15 bp, Homo sapiens
atacaatcaccagga

SEQ ID NO: 1569733 - DNA, 15 bp, Homo sapiens
aatacaatcaccagg

SEQ ID NO: 1569734 - DNA, 15 bp, Homo sapiens
caatacaatcaccag

SEQ ID NO: 1569735 - DNA, 15 bp, Homo sapiens
acaatacaatcacca

SEQ ID NO: 1569736 - DNA, 15 bp, Homo sapiens
gacaatacaatcacc

SEQ ID NO: 1569737 - DNA, 15 bp, Homo sapiens
agacaatacaatcac

SEQ ID NO: 1569738 - DNA, 15 bp, Homo sapiens
gagacaatacaatca

SEQ ID NO: 1569739 - DNA, 15 bp, Homo sapiens
tgagacaatacaatc

SEQ ID NO: 1569740 - DNA, 15 bp, Homo sapiens
ctgagacaatacaat

SEQ ID NO: 1569741 - DNA, 15 bp, Homo sapiens
actgagacaatacaa

SEQ ID NO: 1569742 - DNA, 15 bp, Homo sapiens
tactgagacaataca

SEQ ID NO: 1569743 - DNA, 15 bp, Homo sapiens
atactgagacaatac

SEQ ID NO: 1569744 - DNA, 15 bp, Homo sapiens
aatactgagacaata

SEQ ID NO: 1569745 - DNA, 15 bp, Homo sapiens
taatactgagacaat

SEQ ID NO: 1569746 - DNA, 15 bp, Homo sapiens
gtaatactgagacaa

SEQ ID NO: 1569747 - DNA, 15 bp, Homo sapiens
tgtaatactgagaca

SEQ ID NO: 1569748 - DNA, 15 bp, Homo sapiens
atgtaatactgagac

SEQ ID NO: 1569749 - DNA, 15 bp, Homo sapiens
aatgtaatactgaga

SEQ ID NO: 1569750 - DNA, 15 bp, Homo sapiens
gaatgtaatactgag

SEQ ID NO: 1569751 - DNA, 15 bp, Homo sapiens
tgaatgtaatactga

SEQ ID NO: 1569752 - DNA, 15 bp, Homo sapiens
ctgaatgtaatactg

SEQ ID NO: 1569753 - DNA, 15 bp, Homo sapiens
actgaatgtaatact

SEQ ID NO: 1569754 - DNA, 15 bp, Homo sapiens
gactgaatgtaatac

SEQ ID NO: 1569755 - DNA, 15 bp, Homo sapiens
agactgaatgtaata

SEQ ID NO: 1569756 - DNA, 15 bp, Homo sapiens
cagactgaatgtaat

SEQ ID NO: 1569757 - DNA, 15 bp, Homo sapiens
acagactgaatgtaa

SEQ ID NO: 1569758 - DNA, 15 bp, Homo sapiens
gacagactgaatgta

SEQ ID NO: 1569759 - DNA, 15 bp, Homo sapiens
agacagactgaatgt

SEQ ID NO: 1569760 - DNA, 15 bp, Homo sapiens
aagacagactgaatg

SEQ ID NO: 1569761 - DNA, 15 bp, Homo sapiens
caagacagactgaat

SEQ ID NO: 1569762 - DNA, 15 bp, Homo sapiens
acaagacagactgaa

SEQ ID NO: 1569763 - DNA, 15 bp, Homo sapiens
cacaagacagactga

SEQ ID NO: 1569764 - DNA, 15 bp, Homo sapiens
gcacaagacagactg

SEQ ID NO: 1569765 - DNA, 15 bp, Homo sapiens
tgcacaagacagact

SEQ ID NO: 1569766 - DNA, 15 bp, Homo sapiens
atgcacaagacagac

SEQ ID NO: 1569767 - DNA, 15 bp, Homo sapiens
catgcacaagacaga

SEQ ID NO: 1569768 - DNA, 15 bp, Homo sapiens
ccatgcacaagacag

SEQ ID NO: 1569769 - DNA, 15 bp, Homo sapiens
gccatgcacaagaca

SEQ ID NO: 1569770 - DNA, 15 bp, Homo sapiens
agccatgcacaagac

SEQ ID NO: 1569771 - DNA, 15 bp, Homo sapiens
aagccatgcacaaga

SEQ ID NO: 1569772 - DNA, 15 bp, Homo sapiens
aaagccatgcacaag

SEQ ID NO: 1569773 - DNA, 15 bp, Homo sapiens
gaaagccatgcacaa

SEQ ID NO: 1569774 - DNA, 15 bp, Homo sapiens
tgaaagccatgcaca

SEQ ID NO: 1569775 - DNA, 15 bp, Homo sapiens
ctgaaagccatgcac

SEQ ID NO: 1569776 - DNA, 15 bp, Homo sapiens
tctgaaagccatgca

SEQ ID NO: 1569777 - DNA, 15 bp, Homo sapiens
ttctgaaagccatgc

SEQ ID NO: 1569778 - DNA, 15 bp, Homo sapiens
tttctgaaagccatg

SEQ ID NO: 1569779 - DNA, 15 bp, Homo sapiens
ttttctgaaagccat

SEQ ID NO: 1569780 - DNA, 15 bp, Homo sapiens
attttctgaaagcca

SEQ ID NO: 1569781 - DNA, 15 bp, Homo sapiens
cattttctgaaagcc

SEQ ID NO: 1569782 - DNA, 15 bp, Homo sapiens
gcattttctgaaagc

SEQ ID NO: 1569783 - DNA, 15 bp, Homo sapiens
tgcattttctgaaag

SEQ ID NO: 1569784 - DNA, 15 bp, Homo sapiens
cctgcattttctgaa

SEQ ID NO: 1569785 - DNA, 15 bp, Homo sapiens
acctgcattttctga

SEQ ID NO: 1569786 - DNA, 15 bp, Homo sapiens
aacctgcattttctg

SEQ ID NO: 1569787 - DNA, 15 bp, Homo sapiens
gaacctgcattttct

SEQ ID NO: 1569788 - DNA, 15 bp, Homo sapiens
tgaacctgcattttc

SEQ ID NO: 1569789 - DNA, 15 bp, Homo sapiens
atgaacctgcatttt

SEQ ID NO: 1569790 - DNA, 15 bp, Homo sapiens
gatgaacctgcattt

SEQ ID NO: 1569791 - DNA, 15 bp, Homo sapiens
agatgaacctgcatt

SEQ ID NO: 1569792 - DNA, 15 bp, Homo sapiens
cagatgaacctgcat

SEQ ID NO: 1569793 - DNA, 15 bp, Homo sapiens
ccagatgaacctgca

SEQ ID NO: 1569794 - DNA, 15 bp, Homo sapiens
tccagatgaacctgc

SEQ ID NO: 1569795 - DNA, 15 bp, Homo sapiens
ttccagatgaacctg

SEQ ID NO: 1569796 - DNA, 15 bp, Homo sapiens
cttccagatgaacct

SEQ ID NO: 1569797 - DNA, 15 bp, Homo sapiens
gcttccagatgaacc

SEQ ID NO: 1569798 - DNA, 15 bp, Homo sapiens
agcttccagatgaac

SEQ ID NO: 1569799 - DNA, 15 bp, Homo sapiens
aagcttccagatgaa

SEQ ID NO: 1569800 - DNA, 15 bp, Homo sapiens
aaagcttccagatga

SEQ ID NO: 1569801 - DNA, 15 bp, Homo sapiens
taaagcttccagatg

SEQ ID NO: 1569802 - DNA, 15 bp, Homo sapiens
ttaaagcttccagat

SEQ ID NO: 1569803 - DNA, 15 bp, Homo sapiens
cttaaagcttccaga

SEQ ID NO: 1569804 - DNA, 15 bp, Homo sapiens
gcttaaagcttccag

SEQ ID NO: 1569805 - DNA, 15 bp, Homo sapiens
agcttaaagcttcca

SEQ ID NO: 1569806 - DNA, 15 bp, Homo sapiens
cagcttaaagcttcc

SEQ ID NO: 1569807 - DNA, 15 bp, Homo sapiens
tcagcttaaagcttc

SEQ ID NO: 1569808 - DNA, 15 bp, Homo sapiens
ttcagcttaaagctt

SEQ ID NO: 1569809 - DNA, 15 bp, Homo sapiens
attcagcttaaagct

SEQ ID NO: 1569810 - DNA, 15 bp, Homo sapiens
tattcagcttaaagc

SEQ ID NO: 1569811 - DNA, 15 bp, Homo sapiens
ctattcagcttaaag

SEQ ID NO: 1569812 - DNA, 15 bp, Homo sapiens
tctattcagcttaaa

SEQ ID NO: 1569813 - DNA, 15 bp, Homo sapiens
ttctattcagcttaa

SEQ ID NO: 1569814 - DNA, 15 bp, Homo sapiens
gttctattcagctta

SEQ ID NO: 1569815 - DNA, 15 bp, Homo sapiens
agttctattcagctt

SEQ ID NO: 1569816 - DNA, 15 bp, Homo sapiens
gagttctattcagct

SEQ ID NO: 1569817 - DNA, 15 bp, Homo sapiens
ggagttctattcagc

SEQ ID NO: 1569818 - DNA, 15 bp, Homo sapiens
gggagttctattcag

SEQ ID NO: 1569819 - DNA, 15 bp, Homo sapiens
agggagttctattca

SEQ ID NO: 1569820 - DNA, 15 bp, Homo sapiens
cagggagttctattc

SEQ ID NO: 1569821 - DNA, 15 bp, Homo sapiens
acagggagttctatt

SEQ ID NO: 1569822 - DNA, 15 bp, Homo sapiens
aacagggagttctat

SEQ ID NO: 1569823 - DNA, 15 bp, Homo sapiens
caacagggagttcta

SEQ ID NO: 1569824 - DNA, 15 bp, Homo sapiens
acaacagggagttct

SEQ ID NO: 1569825 - DNA, 15 bp, Homo sapiens
tacaacagggagttc

SEQ ID NO: 1569826 - DNA, 15 bp, Homo sapiens
ttacaacagggagtt

SEQ ID NO: 1569827 - DNA, 15 bp, Homo sapiens
cttacaacagggagt

SEQ ID NO: 1569828 - DNA, 15 bp, Homo sapiens
acttacaacagggag

SEQ ID NO: 1569829 - DNA, 15 bp, Homo sapiens
gacttacaacaggga

SEQ ID NO: 1569830 - DNA, 15 bp, Homo sapiens
ggacttacaacaggg

SEQ ID NO: 1569831 - DNA, 15 bp, Homo sapiens
aggacttacaacagg

SEQ ID NO: 1569832 - DNA, 15 bp, Homo sapiens
taggacttacaacag

SEQ ID NO: 1569833 - DNA, 15 bp, Homo sapiens
ataggacttacaaca

SEQ ID NO: 1569834 - DNA, 15 bp, Homo sapiens
cataggacttacaac

SEQ ID NO: 1569835 - DNA, 15 bp, Homo sapiens
ccataggacttacaa

SEQ ID NO: 1569836 - DNA, 15 bp, Homo sapiens
accataggacttaca

SEQ ID NO: 1569837 - DNA, 15 bp, Homo sapiens
taccataggacttac

SEQ ID NO: 1569838 - DNA, 15 bp, Homo sapiens
ctaccataggactta

SEQ ID NO: 1569839 - DNA, 15 bp, Homo sapiens
actaccataggactt

SEQ ID NO: 1569840 - DNA, 15 bp, Homo sapiens
gactaccataggact

SEQ ID NO: 1569841 - DNA, 15 bp, Homo sapiens
agactaccataggac

SEQ ID NO: 1569842 - DNA, 15 bp, Homo sapiens
tagactaccatagga

SEQ ID NO: 1569843 - DNA, 15 bp, Homo sapiens
atagactaccatagg

SEQ ID NO: 1569844 - DNA, 15 bp, Homo sapiens
tatagactaccatag

SEQ ID NO: 1569845 - DNA, 15 bp, Homo sapiens
ttatagactaccata

SEQ ID NO: 1569846 - DNA, 15 bp, Homo sapiens
tttatagactaccat

SEQ ID NO: 1569847 - DNA, 15 bp, Homo sapiens
atttatagactacca

SEQ ID NO: 1569848 - DNA, 15 bp, Homo sapiens
tatttatagactacc

SEQ ID NO: 1569849 - DNA, 15 bp, Homo sapiens
atatttatagactac

SEQ ID NO: 1569850 - DNA, 15 bp, Homo sapiens
aatatttatagacta

SEQ ID NO: 1569851 - DNA, 15 bp, Homo sapiens
taatatttatagact

SEQ ID NO: 1569852 - DNA, 15 bp, Homo sapiens
gtaatatttatagac

SEQ ID NO: 1569853 - DNA, 15 bp, Homo sapiens
agtaatatttataga

SEQ ID NO: 1569854 - DNA, 15 bp, Homo sapiens
gagtaatatttatag

SEQ ID NO: 1569855 - DNA, 15 bp, Homo sapiens
ggagtaatatttata

SEQ ID NO: 1569856 - DNA, 15 bp, Homo sapiens
tggagtaatatttat

SEQ ID NO: 1569857 - DNA, 15 bp, Homo sapiens
gtggagtaatattta

SEQ ID NO: 1569858 - DNA, 15 bp, Homo sapiens
agtggagtaatattt

SEQ ID NO: 1569859 - DNA, 15 bp, Homo sapiens
gagtggagtaatatt

SEQ ID NO: 1569860 - DNA, 15 bp, Homo sapiens
ggagtggagtaatat

SEQ ID NO: 1569861 - DNA, 15 bp, Homo sapiens
gggagtggagtaata

SEQ ID NO: 1569862 - DNA, 15 bp, Homo sapiens
ggggagtggagtaat

SEQ ID NO: 1569863 - DNA, 15 bp, Homo sapiens
aggggagtggagtaa

SEQ ID NO: 1569864 - DNA, 15 bp, Homo sapiens
aaggggagtggagta

SEQ ID NO: 1569865 - DNA, 15 bp, Homo sapiens
aaaggggagtggagt

SEQ ID NO: 1569866 - DNA, 15 bp, Homo sapiens
aaaaggggagtggag

SEQ ID NO: 1569867 - DNA, 15 bp, Homo sapiens
aaaaaggggagtgga

SEQ ID NO: 1569868 - DNA, 15 bp, Homo sapiens
aaaaaaggggagtgg

SEQ ID NO: 1569869 - DNA, 15 bp, Homo sapiens
taaaaaaggggagtg

SEQ ID NO: 1569870 - DNA, 15 bp, Homo sapiens
ttaaaaaaggggagt

SEQ ID NO: 1569871 - DNA, 15 bp, Homo sapiens
attaaaaaaggggag

SEQ ID NO: 1569872 - DNA, 15 bp, Homo sapiens
cattaaaaaagggga

SEQ ID NO: 1569873 - DNA, 15 bp, Homo sapiens
tcattaaaaaagggg

SEQ ID NO: 1569874 - DNA, 15 bp, Homo sapiens
atcattaaaaaaggg

SEQ ID NO: 1569875 - DNA, 15 bp, Homo sapiens
tatcattaaaaaagg

SEQ ID NO: 1569876 - DNA, 15 bp, Homo sapiens
ttatcattaaaaaag

SEQ ID NO: 1569877 - DNA, 15 bp, Homo sapiens
cttatcattaaaaaa

SEQ ID NO: 1569878 - DNA, 15 bp, Homo sapiens
acttatcattaaaaa

SEQ ID NO: 1569879 - DNA, 15 bp, Homo sapiens
tacttatcattaaaa

SEQ ID NO: 1569880 - DNA, 15 bp, Homo sapiens
ttacttatcattaaa

SEQ ID NO: 1569881 - DNA, 15 bp, Homo sapiens
attacttatcattaa

SEQ ID NO: 1569882 - DNA, 15 bp, Homo sapiens
tattacttatcatta

SEQ ID NO: 1569883 - DNA, 15 bp, Homo sapiens
gtattacttatcatt

SEQ ID NO: 1569884 - DNA, 15 bp, Homo sapiens
tgtattacttatcat

SEQ ID NO: 1569885 - DNA, 15 bp, Homo sapiens
ttgtattacttatca

SEQ ID NO: 1569886 - DNA, 15 bp, Homo sapiens
tttgtattacttatc

SEQ ID NO: 1569887 - DNA, 15 bp, Homo sapiens
ctttgtattacttat

SEQ ID NO: 1569888 - DNA, 15 bp, Homo sapiens
cctttgtattactta

SEQ ID NO: 1569889 - DNA, 15 bp, Homo sapiens
tcctttgtattactt

SEQ ID NO: 1569890 - DNA, 15 bp, Homo sapiens
ttcctttgtattact

SEQ ID NO: 1569891 - DNA, 15 bp, Homo sapiens
cttcctttgtattac

SEQ ID NO: 1569892 - DNA, 15 bp, Homo sapiens
tcttcctttgtatta

SEQ ID NO: 1569893 - DNA, 15 bp, Homo sapiens
ttcttcctttgtatt

SEQ ID NO: 1569894 - DNA, 15 bp, Homo sapiens
tttcttcctttgtat

SEQ ID NO: 1569895 - DNA, 15 bp, Homo sapiens
ttttcttcctttgta

SEQ ID NO: 1569896 - DNA, 15 bp, Homo sapiens
tttttcttcctttgt

SEQ ID NO: 1569897 - DNA, 15 bp, Homo sapiens
atttttcttcctttg

SEQ ID NO: 1569898 - DNA, 15 bp, Homo sapiens
ctatttttcttcctt

SEQ ID NO: 1569899 - DNA, 15 bp, Homo sapiens
actatttttcttcct

SEQ ID NO: 1569900 - DNA, 15 bp, Homo sapiens
tactatttttcttcc

SEQ ID NO: 1569901 - DNA, 15 bp, Homo sapiens
ttactatttttcttc

SEQ ID NO: 1569902 - DNA, 15 bp, Homo sapiens
tttactatttttctt

SEQ ID NO: 1569903 - DNA, 15 bp, Homo sapiens
atttactatttttct

SEQ ID NO: 1569904 - DNA, 15 bp, Homo sapiens
aatttactatttttc

SEQ ID NO: 1569905 - DNA, 15 bp, Homo sapiens
taatttactattttt

SEQ ID NO: 1569906 - DNA, 15 bp, Homo sapiens
ttaatttactatttt

SEQ ID NO: 1569907 - DNA, 15 bp, Homo sapiens
cttaatttactattt

SEQ ID NO: 1569908 - DNA, 15 bp, Homo sapiens
acttaatttactatt

SEQ ID NO: 1569909 - DNA, 15 bp, Homo sapiens
gacttaatttactat

SEQ ID NO: 1569910 - DNA, 15 bp, Homo sapiens
ggacttaatttacta

SEQ ID NO: 1569911 - DNA, 15 bp, Homo sapiens
tggacttaatttact

SEQ ID NO: 1569912 - DNA, 15 bp, Homo sapiens
ttggacttaatttac

SEQ ID NO: 1569913 - DNA, 15 bp, Homo sapiens
tttggacttaattta

SEQ ID NO: 1569914 - DNA, 15 bp, Homo sapiens
gtttggacttaattt

SEQ ID NO: 1569915 - DNA, 15 bp, Homo sapiens
tgtttggacttaatt

SEQ ID NO: 1569916 - DNA, 15 bp, Homo sapiens
ttgtttggacttaat

SEQ ID NO: 1569917 - DNA, 15 bp, Homo sapiens
tttgtttggacttaa

SEQ ID NO: 1569918 - DNA, 15 bp, Homo sapiens
ttttgtttggactta

SEQ ID NO: 1569919 - DNA, 15 bp, Homo sapiens
attttgtttggactt

SEQ ID NO: 1569920 - DNA, 15 bp, Homo sapiens
aattttgtttggact

SEQ ID NO: 1569921 - DNA, 15 bp, Homo sapiens
taattttgtttggac

SEQ ID NO: 1569922 - DNA, 15 bp, Homo sapiens
ttaattttgtttgga

SEQ ID NO: 1569923 - DNA, 15 bp, Homo sapiens
attaattttgtttgg

SEQ ID NO: 1569924 - DNA, 15 bp, Homo sapiens
tattaattttgtttg

SEQ ID NO: 1569925 - DNA, 15 bp, Homo sapiens
atattaattttgttt

SEQ ID NO: 1569926 - DNA, 15 bp, Homo sapiens
aatattaattttgtt

SEQ ID NO: 1569927 - DNA, 15 bp, Homo sapiens
aaatattaattttgt

SEQ ID NO: 1569928 - DNA, 15 bp, Homo sapiens
aaaatattaattttg

SEQ ID NO: 1569929 - DNA, 15 bp, Homo sapiens
aaaaatattaatttt

SEQ ID NO: 1569930 - DNA, 15 bp, Homo sapiens
caaaaatattaattt

SEQ ID NO: 1569931 - DNA, 15 bp, Homo sapiens
ccaaaaatattaatt

SEQ ID NO: 1569932 - DNA, 15 bp, Homo sapiens
gccaaaaatattaat

SEQ ID NO: 1569933 - DNA, 15 bp, Homo sapiens
agccaaaaatattaa

SEQ ID NO: 1569934 - DNA, 15 bp, Homo sapiens
aagccaaaaatatta

SEQ ID NO: 1569935 - DNA, 15 bp, Homo sapiens
gaagccaaaaatatt

SEQ ID NO: 1569936 - DNA, 15 bp, Homo sapiens
tgaagccaaaaatat

SEQ ID NO: 1569937 - DNA, 15 bp, Homo sapiens
ctgaagccaaaaata

SEQ ID NO: 1569938 - DNA, 15 bp, Homo sapiens
tctgaagccaaaaat

SEQ ID NO: 1569939 - DNA, 15 bp, Homo sapiens
atctgaagccaaaaa

SEQ ID NO: 1569940 - DNA, 15 bp, Homo sapiens
catctgaagccaaaa

SEQ ID NO: 1569941 - DNA, 15 bp, Homo sapiens
ccatctgaagccaaa

SEQ ID NO: 1569942 - DNA, 15 bp, Homo sapiens
cccatctgaagccaa

SEQ ID NO: 1569943 - DNA, 15 bp, Homo sapiens
ccccatctgaagcca

SEQ ID NO: 1569944 - DNA, 15 bp, Homo sapiens
tccccatctgaagcc

SEQ ID NO: 1569945 - DNA, 15 bp, Homo sapiens
atccccatctgaagc

SEQ ID NO: 1569946 - DNA, 15 bp, Homo sapiens
aatccccatctgaag

SEQ ID NO: 1569947 - DNA, 15 bp, Homo sapiens
aaatccccatctgaa

SEQ ID NO: 1569948 - DNA, 15 bp, Homo sapiens
taaatccccatctga

SEQ ID NO: 1569949 - DNA, 15 bp, Homo sapiens
gtaaatccccatctg

SEQ ID NO: 1569950 - DNA, 15 bp, Homo sapiens
agtaaatccccatct

SEQ ID NO: 1569951 - DNA, 15 bp, Homo sapiens
aagtaaatccccatc

SEQ ID NO: 1569952 - DNA, 15 bp, Homo sapiens
taagtaaatccccat

SEQ ID NO: 1569953 - DNA, 15 bp, Homo sapiens
ttaagtaaatcccca

SEQ ID NO: 1569954 - DNA, 15 bp, Homo sapiens
tttaagtaaatcccc

SEQ ID NO: 1569955 - DNA, 15 bp, Homo sapiens
ttttaagtaaatccc

SEQ ID NO: 1569956 - DNA, 15 bp, Homo sapiens
tttttaagtaaatcc

SEQ ID NO: 1569957 - DNA, 15 bp, Homo sapiens
ttttttaagtaaatc

SEQ ID NO: 1569958 - DNA, 15 bp, Homo sapiens
tttttttaagtaaat

SEQ ID NO: 1569959 - DNA, 15 bp, Homo sapiens
ttttttttaagtaaa

SEQ ID NO: 1569960 - DNA, 15 bp, Homo sapiens
cttttttttaagtaa

SEQ ID NO: 1569961 - DNA, 15 bp, Homo sapiens
ccttttttttaagta

SEQ ID NO: 1569962 - DNA, 15 bp, Homo sapiens
tccttttttttaagt

SEQ ID NO: 1569963 - DNA, 15 bp, Homo sapiens
ttccttttttttaag

SEQ ID NO: 1569964 - DNA, 15 bp, Homo sapiens
gttccttttttttaa

SEQ ID NO: 1569965 - DNA, 15 bp, Homo sapiens
agttcctttttttta

SEQ ID NO: 1569966 - DNA, 15 bp, Homo sapiens
tagttcctttttttt

SEQ ID NO: 1569967 - DNA, 15 bp, Homo sapiens
ttagttccttttttt

SEQ ID NO: 1569968 - DNA, 15 bp, Homo sapiens
tttagttcctttttt

SEQ ID NO: 1569969 - DNA, 15 bp, Homo sapiens
ttttagttccttttt

SEQ ID NO: 1569970 - DNA, 15 bp, Homo sapiens
attttagttcctttt

SEQ ID NO: 1569971 - DNA, 15 bp, Homo sapiens
tattttagttccttt

SEQ ID NO: 1569972 - DNA, 15 bp, Homo sapiens
ttattttagttcctt

SEQ ID NO: 1569973 - DNA, 15 bp, Homo sapiens
attattttagttcct

SEQ ID NO: 1569974 - DNA, 15 bp, Homo sapiens
aattattttagttcc

SEQ ID NO: 1569975 - DNA, 15 bp, Homo sapiens
aaattattttagttc

SEQ ID NO: 1569976 - DNA, 15 bp, Homo sapiens
gaaattattttagtt

SEQ ID NO: 1569977 - DNA, 15 bp, Homo sapiens
ggaaattattttagt

SEQ ID NO: 1569978 - DNA, 15 bp, Homo sapiens
aggaaattattttag

SEQ ID NO: 1569979 - DNA, 15 bp, Homo sapiens
taggaaattatttta

SEQ ID NO: 1569980 - DNA, 15 bp, Homo sapiens
ataggaaattatttt

SEQ ID NO: 1569981 - DNA, 15 bp, Homo sapiens
aataggaaattattt

SEQ ID NO: 1569982 - DNA, 15 bp, Homo sapiens
aaataggaaattatt

SEQ ID NO: 1569983 - DNA, 15 bp, Homo sapiens
aaaataggaaattat

SEQ ID NO: 1569984 - DNA, 15 bp, Homo sapiens
gaaaataggaaatta

SEQ ID NO: 1569985 - DNA, 15 bp, Homo sapiens
ggaaaataggaaatt

SEQ ID NO: 1569986 - DNA, 15 bp, Homo sapiens
tggaaaataggaaat

SEQ ID NO: 1569987 - DNA, 15 bp, Homo sapiens
atggaaaataggaaa

SEQ ID NO: 1569988 - DNA, 15 bp, Homo sapiens
aatggaaaataggaa

SEQ ID NO: 1569989 - DNA, 15 bp, Homo sapiens
taatggaaaatagga

SEQ ID NO: 1569990 - DNA, 15 bp, Homo sapiens
gtaatggaaaatagg

SEQ ID NO: 1569991 - DNA, 15 bp, Homo sapiens
tgtaatggaaaatag

SEQ ID NO: 1569992 - DNA, 15 bp, Homo sapiens
ctgtaatggaaaata

SEQ ID NO: 1569993 - DNA, 15 bp, Homo sapiens
gctgtaatggaaaat

SEQ ID NO: 1569994 - DNA, 15 bp, Homo sapiens
tgctgtaatggaaaa

SEQ ID NO: 1569995 - DNA, 15 bp, Homo sapiens
ttgctgtaatggaaa

SEQ ID NO: 1569996 - DNA, 15 bp, Homo sapiens
tttgctgtaatggaa

SEQ ID NO: 1569997 - DNA, 15 bp, Homo sapiens
gtttgctgtaatgga

SEQ ID NO: 1569998 - DNA, 15 bp, Homo sapiens
tgtttgctgtaatgg

SEQ ID NO: 1569999 - DNA, 15 bp, Homo sapiens
gtgtttgctgtaatg

SEQ ID NO: 1570000 - DNA, 15 bp, Homo sapiens
tgtgtttgctgtaat

SEQ ID NO: 1570001 - DNA, 15 bp, Homo sapiens
ttgtgtttgctgtaa

SEQ ID NO: 1570002 - DNA, 15 bp, Homo sapiens
tttgtgtttgctgta

SEQ ID NO: 1570003 - DNA, 15 bp, Homo sapiens
atttgtgtttgctgt

SEQ ID NO: 1570004 - DNA, 15 bp, Homo sapiens
gaatttgtgtttgct

SEQ ID NO: 1570005 - DNA, 15 bp, Homo sapiens
ggaatttgtgtttgc

SEQ ID NO: 1570006 - DNA, 15 bp, Homo sapiens
tggaatttgtgtttg

SEQ ID NO: 1570007 - DNA, 15 bp, Homo sapiens
ctggaatttgtgttt

SEQ ID NO: 1570008 - DNA, 15 bp, Homo sapiens
tctggaatttgtgtt

SEQ ID NO: 1570009 - DNA, 15 bp, Homo sapiens
gtctggaatttgtgt

SEQ ID NO: 1570010 - DNA, 15 bp, Homo sapiens
agtctggaatttgtg

SEQ ID NO: 1570011 - DNA, 15 bp, Homo sapiens
tagtctggaatttgt

SEQ ID NO: 1570012 - DNA, 15 bp, Homo sapiens
atagtctggaatttg

SEQ ID NO: 1570013 - DNA, 15 bp, Homo sapiens
catagtctggaattt

SEQ ID NO: 1570014 - DNA, 15 bp, Homo sapiens
gcatagtctggaatt

SEQ ID NO: 1570015 - DNA, 15 bp, Homo sapiens
agcatagtctggaat

SEQ ID NO: 1570016 - DNA, 15 bp, Homo sapiens
cagcatagtctggaa

SEQ ID NO: 1570017 - DNA, 15 bp, Homo sapiens
tcagcatagtctgga

SEQ ID NO: 1570018 - DNA, 15 bp, Homo sapiens
ctcagcatagtctgg

SEQ ID NO: 1570019 - DNA, 15 bp, Homo sapiens
gctcagcatagtctg

SEQ ID NO: 1570020 - DNA, 15 bp, Homo sapiens
agctcagcatagtct

SEQ ID NO: 1570021 - DNA, 15 bp, Homo sapiens
aagctcagcatagtc

SEQ ID NO: 1570022 - DNA, 15 bp, Homo sapiens
taagctcagcatagt

SEQ ID NO: 1570023 - DNA, 15 bp, Homo sapiens
ataagctcagcatag

SEQ ID NO: 1570024 - DNA, 15 bp, Homo sapiens
aataagctcagcata

SEQ ID NO: 1570025 - DNA, 15 bp, Homo sapiens
caataagctcagcat

SEQ ID NO: 1570026 - DNA, 15 bp, Homo sapiens
acaataagctcagca

SEQ ID NO: 1570027 - DNA, 15 bp, Homo sapiens
aacaataagctcagc

SEQ ID NO: 1570028 - DNA, 15 bp, Homo sapiens
taacaataagctcag

SEQ ID NO: 1570029 - DNA, 15 bp, Homo sapiens
ttaacaataagctca

SEQ ID NO: 1570030 - DNA, 15 bp, Homo sapiens
cttaacaataagctc

SEQ ID NO: 1570031 - DNA, 15 bp, Homo sapiens
acttaacaataagct

SEQ ID NO: 1570032 - DNA, 15 bp, Homo sapiens
aacttaacaataagc

SEQ ID NO: 1570033 - DNA, 15 bp, Homo sapiens
aaacttaacaataag

SEQ ID NO: 1570034 - DNA, 15 bp, Homo sapiens
gaaacttaacaataa

SEQ ID NO: 1570035 - DNA, 15 bp, Homo sapiens
agaaacttaacaata

SEQ ID NO: 1570036 - DNA, 15 bp, Homo sapiens
aagaaacttaacaat

SEQ ID NO: 1570037 - DNA, 15 bp, Homo sapiens
caagaaacttaacaa

SEQ ID NO: 1570038 - DNA, 15 bp, Homo sapiens
tcaagaaacttaaca

SEQ ID NO: 1570039 - DNA, 15 bp, Homo sapiens
atcaagaaacttaac

SEQ ID NO: 1570040 - DNA, 15 bp, Homo sapiens
catcaagaaacttaa

SEQ ID NO: 1570041 - DNA, 15 bp, Homo sapiens
gcatcaagaaactta

SEQ ID NO: 1570042 - DNA, 15 bp, Homo sapiens
ggcatcaagaaactt

SEQ ID NO: 1570043 - DNA, 15 bp, Homo sapiens
aggcatcaagaaact

SEQ ID NO: 1570044 - DNA, 15 bp, Homo sapiens
aaggcatcaagaaac

SEQ ID NO: 1570045 - DNA, 15 bp, Homo sapiens
caaggcatcaagaaa

SEQ ID NO: 1570046 - DNA, 15 bp, Homo sapiens
tcaaggcatcaagaa

SEQ ID NO: 1570047 - DNA, 15 bp, Homo sapiens
atcaaggcatcaaga

SEQ ID NO: 1570048 - DNA, 15 bp, Homo sapiens
aatcaaggcatcaag

SEQ ID NO: 1570049 - DNA, 15 bp, Homo sapiens
caatcaaggcatcaa

SEQ ID NO: 1570050 - DNA, 15 bp, Homo sapiens
tcaatcaaggcatca

SEQ ID NO: 1570051 - DNA, 15 bp, Homo sapiens
gtcaatcaaggcatc

SEQ ID NO: 1570052 - DNA, 15 bp, Homo sapiens
tgtcaatcaaggcat

SEQ ID NO: 1570053 - DNA, 15 bp, Homo sapiens
gtgtcaatcaaggca

SEQ ID NO: 1570054 - DNA, 15 bp, Homo sapiens
cgtgtcaatcaaggc

SEQ ID NO: 1570055 - DNA, 15 bp, Homo sapiens
acgtgtcaatcaagg

SEQ ID NO: 1570056 - DNA, 15 bp, Homo sapiens
tacgtgtcaatcaag

SEQ ID NO: 1570057 - DNA, 15 bp, Homo sapiens
gtacgtgtcaatcaa

SEQ ID NO: 1570058 - DNA, 15 bp, Homo sapiens
ggtacgtgtcaatca

SEQ ID NO: 1570059 - DNA, 15 bp, Homo sapiens
aggtacgtgtcaatc

SEQ ID NO: 1570060 - DNA, 15 bp, Homo sapiens
caggtacgtgtcaat

SEQ ID NO: 1570061 - DNA, 15 bp, Homo sapiens
gcaggtacgtgtcaa

SEQ ID NO: 1570062 - DNA, 15 bp, Homo sapiens
ggcaggtacgtgtca

SEQ ID NO: 1570063 - DNA, 15 bp, Homo sapiens
aggcaggtacgtgtc

SEQ ID NO: 1570064 - DNA, 15 bp, Homo sapiens
caggcaggtacgtgt

SEQ ID NO: 1570065 - DNA, 15 bp, Homo sapiens
ccaggcaggtacgtg

SEQ ID NO: 1570066 - DNA, 15 bp, Homo sapiens
tccaggcaggtacgt

SEQ ID NO: 1570067 - DNA, 15 bp, Homo sapiens
ttccaggcaggtacg

SEQ ID NO: 1570068 - DNA, 15 bp, Homo sapiens
attccaggcaggtac

SEQ ID NO: 1570069 - DNA, 15 bp, Homo sapiens
aattccaggcaggta

SEQ ID NO: 1570070 - DNA, 15 bp, Homo sapiens
caattccaggcaggt

SEQ ID NO: 1570071 - DNA, 15 bp, Homo sapiens
tcaattccaggcagg

SEQ ID NO: 1570072 - DNA, 15 bp, Homo sapiens
atcaattccaggcag

SEQ ID NO: 1570073 - DNA, 15 bp, Homo sapiens
catcaattccaggca

SEQ ID NO: 1570074 - DNA, 15 bp, Homo sapiens
tcatcaattccaggc

SEQ ID NO: 1570075 - DNA, 15 bp, Homo sapiens
ttcatcaattccagg

SEQ ID NO: 1570076 - DNA, 15 bp, Homo sapiens
cttcatcaattccag

SEQ ID NO: 1570077 - DNA, 15 bp, Homo sapiens
tcttcatcaattcca

SEQ ID NO: 1570078 - DNA, 15 bp, Homo sapiens
ttcttcatcaattcc

SEQ ID NO: 1570079 - DNA, 15 bp, Homo sapiens
tttcttcatcaattc

SEQ ID NO: 1570080 - DNA, 15 bp, Homo sapiens
gtttcttcatcaatt

SEQ ID NO: 1570081 - DNA, 15 bp, Homo sapiens
ggtttcttcatcaat

SEQ ID NO: 1570082 - DNA, 15 bp, Homo sapiens
tggtttcttcatcaa

SEQ ID NO: 1570083 - DNA, 15 bp, Homo sapiens
ctggtttcttcatca

SEQ ID NO: 1570084 - DNA, 15 bp, Homo sapiens
actggtttcttcatc

SEQ ID NO: 1570085 - DNA, 15 bp, Homo sapiens
cactggtttcttcat

SEQ ID NO: 1570086 - DNA, 15 bp, Homo sapiens
tcactggtttcttca

SEQ ID NO: 1570087 - DNA, 15 bp, Homo sapiens
ttcactggtttcttc

SEQ ID NO: 1570088 - DNA, 15 bp, Homo sapiens
cttcactggtttctt

SEQ ID NO: 1570089 - DNA, 15 bp, Homo sapiens
tcttcactggtttct

SEQ ID NO: 1570090 - DNA, 15 bp, Homo sapiens
ttcttcactggtttc

SEQ ID NO: 1570091 - DNA, 15 bp, Homo sapiens
attcttcactggttt

SEQ ID NO: 1570092 - DNA, 15 bp, Homo sapiens
gattcttcactggtt

SEQ ID NO: 1570093 - DNA, 15 bp, Homo sapiens
ggattcttcactggt

SEQ ID NO: 1570094 - DNA, 15 bp, Homo sapiens
gggattcttcactgg

SEQ ID NO: 1570095 - DNA, 15 bp, Homo sapiens
agggattcttcactg

SEQ ID NO: 1570096 - DNA, 15 bp, Homo sapiens
gagggattcttcact

SEQ ID NO: 1570097 - DNA, 15 bp, Homo sapiens
ggagggattcttcac

SEQ ID NO: 1570098 - DNA, 15 bp, Homo sapiens
aggagggattcttca

SEQ ID NO: 1570099 - DNA, 15 bp, Homo sapiens
caggagggattcttc

SEQ ID NO: 1570100 - DNA, 15 bp, Homo sapiens
tcaggagggattctt

SEQ ID NO: 1570101 - DNA, 15 bp, Homo sapiens
gtcaggagggattct

SEQ ID NO: 1570102 - DNA, 15 bp, Homo sapiens
agtcaggagggattc

SEQ ID NO: 1570103 - DNA, 15 bp, Homo sapiens
gagtcaggagggatt

SEQ ID NO: 1570104 - DNA, 15 bp, Homo sapiens
ggagtcaggagggat

SEQ ID NO: 1570105 - DNA, 15 bp, Homo sapiens
gggagtcaggaggga

SEQ ID NO: 1570106 - DNA, 15 bp, Homo sapiens
tgggagtcaggaggg

SEQ ID NO: 1570107 - DNA, 15 bp, Homo sapiens
gtgggagtcaggagg

SEQ ID NO: 1570108 - DNA, 15 bp, Homo sapiens
tgtgggagtcaggag

SEQ ID NO: 1570109 - DNA, 15 bp, Homo sapiens
atgtgggagtcagga

SEQ ID NO: 1570110 - DNA, 15 bp, Homo sapiens
gatgtgggagtcagg

SEQ ID NO: 1570111 - DNA, 15 bp, Homo sapiens
agatgtgggagtcag

SEQ ID NO: 1570112 - DNA, 15 bp, Homo sapiens
gagatgtgggagtca

SEQ ID NO: 1570113 - DNA, 15 bp, Homo sapiens
ggagatgtgggagtc

SEQ ID NO: 1570114 - DNA, 15 bp, Homo sapiens
aggagatgtgggagt

SEQ ID NO: 1570115 - DNA, 15 bp, Homo sapiens
aaggagatgtgggag

SEQ ID NO: 1570116 - DNA, 15 bp, Homo sapiens
taaggagatgtggga

SEQ ID NO: 1570117 - DNA, 15 bp, Homo sapiens
gtaaggagatgtggg

SEQ ID NO: 1570118 - DNA, 15 bp, Homo sapiens
ggtaaggagatgtgg

SEQ ID NO: 1570119 - DNA, 15 bp, Homo sapiens
gggtaaggagatgtg

SEQ ID NO: 1570120 - DNA, 15 bp, Homo sapiens
agggtaaggagatgt

SEQ ID NO: 1570121 - DNA, 15 bp, Homo sapiens
gagggtaaggagatg

SEQ ID NO: 1570122 - DNA, 15 bp, Homo sapiens
ggagggtaaggagat

SEQ ID NO: 1570123 - DNA, 15 bp, Homo sapiens
aggagggtaaggaga

SEQ ID NO: 1570124 - DNA, 15 bp, Homo sapiens
caggagggtaaggag

SEQ ID NO: 1570125 - DNA, 15 bp, Homo sapiens
gcaggagggtaagga

SEQ ID NO: 1570126 - DNA, 15 bp, Homo sapiens
tgcaggagggtaagg

SEQ ID NO: 1570127 - DNA, 15 bp, Homo sapiens
gtgcaggagggtaag

SEQ ID NO: 1570128 - DNA, 15 bp, Homo sapiens
agtgcaggagggtaa

SEQ ID NO: 1570129 - DNA, 15 bp, Homo sapiens
cagtgcaggagggta

SEQ ID NO: 1570130 - DNA, 15 bp, Homo sapiens
gcagtgcaggagggt

SEQ ID NO: 1570131 - DNA, 15 bp, Homo sapiens
tgcagtgcaggaggg

SEQ ID NO: 1570132 - DNA, 15 bp, Homo sapiens
ctgcagtgcaggagg

SEQ ID NO: 1570133 - DNA, 15 bp, Homo sapiens
tctgcagtgcaggag

SEQ ID NO: 1570134 - DNA, 15 bp, Homo sapiens
ctctgcagtgcagga

SEQ ID NO: 1570135 - DNA, 15 bp, Homo sapiens
gctctgcagtgcagg

SEQ ID NO: 1570136 - DNA, 15 bp, Homo sapiens
ggctctgcagtgcag

SEQ ID NO: 1570137 - DNA, 15 bp, Homo sapiens
tggctctgcagtgca

SEQ ID NO: 1570138 - DNA, 15 bp, Homo sapiens
ctggctctgcagtgc

SEQ ID NO: 1570139 - DNA, 15 bp, Homo sapiens
gctggctctgcagtg

SEQ ID NO: 1570140 - DNA, 15 bp, Homo sapiens
agctggctctgcagt

SEQ ID NO: 1570141 - DNA, 15 bp, Homo sapiens
aagctggctctgcag

SEQ ID NO: 1570142 - DNA, 15 bp, Homo sapiens
taagctggctctgca

SEQ ID NO: 1570143 - DNA, 15 bp, Homo sapiens
ctaagctggctctgc

SEQ ID NO: 1570144 - DNA, 15 bp, Homo sapiens
actaagctggctctg

SEQ ID NO: 1570145 - DNA, 15 bp, Homo sapiens
tactaagctggctct

SEQ ID NO: 1570146 - DNA, 15 bp, Homo sapiens
atactaagctggctc

SEQ ID NO: 1570147 - DNA, 15 bp, Homo sapiens
gatactaagctggct

SEQ ID NO: 1570148 - DNA, 15 bp, Homo sapiens
tgatactaagctggc

SEQ ID NO: 1570149 - DNA, 15 bp, Homo sapiens
gtgatactaagctgg

SEQ ID NO: 1570150 - DNA, 15 bp, Homo sapiens
agtgatactaagctg

SEQ ID NO: 1570151 - DNA, 15 bp, Homo sapiens
cagtgatactaagct

SEQ ID NO: 1570152 - DNA, 15 bp, Homo sapiens
gcagtgatactaagc

SEQ ID NO: 1570153 - DNA, 15 bp, Homo sapiens
ggcagtgatactaag

SEQ ID NO: 1570154 - DNA, 15 bp, Homo sapiens
tggcagtgatactaa

SEQ ID NO: 1570155 - DNA, 15 bp, Homo sapiens
ttggcagtgatacta

SEQ ID NO: 1570156 - DNA, 15 bp, Homo sapiens
gttggcagtgatact

SEQ ID NO: 1570157 - DNA, 15 bp, Homo sapiens
ggttggcagtgatac

SEQ ID NO: 1570158 - DNA, 15 bp, Homo sapiens
aggttggcagtgata

SEQ ID NO: 1570159 - DNA, 15 bp, Homo sapiens
aaggttggcagtgat

SEQ ID NO: 1570160 - DNA, 15 bp, Homo sapiens
taaggttggcagtga

SEQ ID NO: 1570161 - DNA, 15 bp, Homo sapiens
ttaaggttggcagtg

SEQ ID NO: 1570162 - DNA, 15 bp, Homo sapiens
gttaaggttggcagt

SEQ ID NO: 1570163 - DNA, 15 bp, Homo sapiens
ggttaaggttggcag

SEQ ID NO: 1570164 - DNA, 15 bp, Homo sapiens
aggttaaggttggca

SEQ ID NO: 1570165 - DNA, 15 bp, Homo sapiens
aaggttaaggttggc

SEQ ID NO: 1570166 - DNA, 15 bp, Homo sapiens
aaaggttaaggttgg

SEQ ID NO: 1570167 - DNA, 15 bp, Homo sapiens
gaaaggttaaggttg

SEQ ID NO: 1570168 - DNA, 15 bp, Homo sapiens
agaaaggttaaggtt

SEQ ID NO: 1570169 - DNA, 15 bp, Homo sapiens
tagaaaggttaaggt

SEQ ID NO: 1570170 - DNA, 15 bp, Homo sapiens
ttagaaaggttaagg

SEQ ID NO: 1570171 - DNA, 15 bp, Homo sapiens
attagaaaggttaag

SEQ ID NO: 1570172 - DNA, 15 bp, Homo sapiens
aattagaaaggttaa

SEQ ID NO: 1570173 - DNA, 15 bp, Homo sapiens
gaattagaaaggtta

SEQ ID NO: 1570174 - DNA, 15 bp, Homo sapiens
ggaattagaaaggtt

SEQ ID NO: 1570175 - DNA, 15 bp, Homo sapiens
tggaattagaaaggt

SEQ ID NO: 1570176 - DNA, 15 bp, Homo sapiens
atggaattagaaagg

SEQ ID NO: 1570177 - DNA, 15 bp, Homo sapiens
catggaattagaaag

SEQ ID NO: 1570178 - DNA, 15 bp, Homo sapiens
tcatggaattagaaa

SEQ ID NO: 1570179 - DNA, 15 bp, Homo sapiens
gtcatggaattagaa

SEQ ID NO: 1570180 - DNA, 15 bp, Homo sapiens
ggtcatggaattaga

SEQ ID NO: 1570181 - DNA, 15 bp, Homo sapiens
aggtcatggaattag

SEQ ID NO: 1570182 - DNA, 15 bp, Homo sapiens
gaggtcatggaatta

SEQ ID NO: 1570183 - DNA, 15 bp, Homo sapiens
tgaggtcatggaatt

SEQ ID NO: 1570184 - DNA, 15 bp, Homo sapiens
gtgaggtcatggaat

SEQ ID NO: 1570185 - DNA, 15 bp, Homo sapiens
agtgaggtcatggaa

SEQ ID NO: 1570186 - DNA, 15 bp, Homo sapiens
aagtgaggtcatgga

SEQ ID NO: 1570187 - DNA, 15 bp, Homo sapiens
caagtgaggtcatgg

SEQ ID NO: 1570188 - DNA, 15 bp, Homo sapiens
gcaagtgaggtcatg

SEQ ID NO: 1570189 - DNA, 15 bp, Homo sapiens
tgcaagtgaggtcat

SEQ ID NO: 1570190 - DNA, 15 bp, Homo sapiens
ttgcaagtgaggtca

SEQ ID NO: 1570191 - DNA, 15 bp, Homo sapiens
gttgcaagtgaggtc

SEQ ID NO: 1570192 - DNA, 15 bp, Homo sapiens
agttgcaagtgaggt

SEQ ID NO: 1570193 - DNA, 15 bp, Homo sapiens
aagttgcaagtgagg

SEQ ID NO: 1570194 - DNA, 15 bp, Homo sapiens
gaagttgcaagtgag

SEQ ID NO: 1570195 - DNA, 15 bp, Homo sapiens
ggaagttgcaagtga

SEQ ID NO: 1570196 - DNA, 15 bp, Homo sapiens
gggaagttgcaagtg

SEQ ID NO: 1570197 - DNA, 15 bp, Homo sapiens
tgggaagttgcaagt

SEQ ID NO: 1570198 - DNA, 15 bp, Homo sapiens
ctgggaagttgcaag

SEQ ID NO: 1570199 - DNA, 15 bp, Homo sapiens
gctgggaagttgcaa

SEQ ID NO: 1570200 - DNA, 15 bp, Homo sapiens
tgctgggaagttgca

SEQ ID NO: 1570201 - DNA, 15 bp, Homo sapiens
atgctgggaagttgc

SEQ ID NO: 1570202 - DNA, 15 bp, Homo sapiens
aatgctgggaagttg

SEQ ID NO: 1570203 - DNA, 15 bp, Homo sapiens
gaatgctgggaagtt

SEQ ID NO: 1570204 - DNA, 15 bp, Homo sapiens
ggaatgctgggaagt

SEQ ID NO: 1570205 - DNA, 15 bp, Homo sapiens
gggaatgctgggaag

SEQ ID NO: 1570206 - DNA, 15 bp, Homo sapiens
ggggaatgctgggaa

SEQ ID NO: 1570207 - DNA, 15 bp, Homo sapiens
tggggaatgctggga

SEQ ID NO: 1570208 - DNA, 15 bp, Homo sapiens
ctggggaatgctggg

SEQ ID NO: 1570209 - DNA, 15 bp, Homo sapiens
cctggggaatgctgg

SEQ ID NO: 1570210 - DNA, 15 bp, Homo sapiens
acctggggaatgctg

SEQ ID NO: 1570211 - DNA, 15 bp, Homo sapiens
gacctggggaatgct

SEQ ID NO: 1570212 - DNA, 15 bp, Homo sapiens
tgacctggggaatgc

SEQ ID NO: 1570213 - DNA, 15 bp, Homo sapiens
ctgacctggggaatg

SEQ ID NO: 1570214 - DNA, 15 bp, Homo sapiens
actgacctggggaat

SEQ ID NO: 1570215 - DNA, 15 bp, Homo sapiens
tactgacctggggaa

SEQ ID NO: 1570216 - DNA, 15 bp, Homo sapiens
ttactgacctgggga

SEQ ID NO: 1570217 - DNA, 15 bp, Homo sapiens
tttactgacctgggg

SEQ ID NO: 1570218 - DNA, 15 bp, Homo sapiens
atttactgacctggg

SEQ ID NO: 1570219 - DNA, 15 bp, Homo sapiens
catttactgacctgg

SEQ ID NO: 1570220 - DNA, 15 bp, Homo sapiens
acatttactgacctg

SEQ ID NO: 1570221 - DNA, 15 bp, Homo sapiens
cacatttactgacct

SEQ ID NO: 1570222 - DNA, 15 bp, Homo sapiens
tcacatttactgacc

SEQ ID NO: 1570223 - DNA, 15 bp, Homo sapiens
atcacatttactgac

SEQ ID NO: 1570224 - DNA, 15 bp, Homo sapiens
gatcacatttactga

SEQ ID NO: 1570225 - DNA, 15 bp, Homo sapiens
agatcacatttactg

SEQ ID NO: 1570226 - DNA, 15 bp, Homo sapiens
aagatcacatttact

SEQ ID NO: 1570227 - DNA, 15 bp, Homo sapiens
aaagatcacatttac

SEQ ID NO: 1570228 - DNA, 15 bp, Homo sapiens
taaagatcacattta

SEQ ID NO: 1570229 - DNA, 15 bp, Homo sapiens
ataaagatcacattt

SEQ ID NO: 1570230 - DNA, 15 bp, Homo sapiens
tataaagatcacatt

SEQ ID NO: 1570231 - DNA, 15 bp, Homo sapiens
atataaagatcacat

SEQ ID NO: 1570232 - DNA, 15 bp, Homo sapiens
catataaagatcaca

SEQ ID NO: 1570233 - DNA, 15 bp, Homo sapiens
tcatataaagatcac

SEQ ID NO: 1570234 - DNA, 15 bp, Homo sapiens
gtcatataaagatca

SEQ ID NO: 1570235 - DNA, 15 bp, Homo sapiens
agtcatataaagatc

SEQ ID NO: 1570236 - DNA, 15 bp, Homo sapiens
aagtcatataaagat

SEQ ID NO: 1570237 - DNA, 15 bp, Homo sapiens
aaagtcatataaaga

SEQ ID NO: 1570238 - DNA, 15 bp, Homo sapiens
caaagtcatataaag

SEQ ID NO: 1570239 - DNA, 15 bp, Homo sapiens
tcaaagtcatataaa

SEQ ID NO: 1570240 - DNA, 15 bp, Homo sapiens
ctcaaagtcatataa

SEQ ID NO: 1570241 - DNA, 15 bp, Homo sapiens
gctcaaagtcatata

SEQ ID NO: 1570242 - DNA, 15 bp, Homo sapiens
tgctcaaagtcatat

SEQ ID NO: 1570243 - DNA, 15 bp, Homo sapiens
ttgctcaaagtcata

SEQ ID NO: 1570244 - DNA, 15 bp, Homo sapiens
gttgctcaaagtcat

SEQ ID NO: 1570245 - DNA, 15 bp, Homo sapiens
tgttgctcaaagtca

SEQ ID NO: 1570246 - DNA, 15 bp, Homo sapiens
ttgttgctcaaagtc

SEQ ID NO: 1570247 - DNA, 15 bp, Homo sapiens
attgttgctcaaagt

SEQ ID NO: 1570248 - DNA, 15 bp, Homo sapiens
tattgttgctcaaag

SEQ ID NO: 1570249 - DNA, 15 bp, Homo sapiens
atattgttgctcaaa

SEQ ID NO: 1570250 - DNA, 15 bp, Homo sapiens
tatattgttgctcaa

SEQ ID NO: 1570251 - DNA, 15 bp, Homo sapiens
ttatattgttgctca

SEQ ID NO: 1570252 - DNA, 15 bp, Homo sapiens
cttatattgttgctc

SEQ ID NO: 1570253 - DNA, 15 bp, Homo sapiens
tcttatattgttgct

SEQ ID NO: 1570254 - DNA, 15 bp, Homo sapiens
gtcttatattgttgc

SEQ ID NO: 1570255 - DNA, 15 bp, Homo sapiens
tgtcttatattgttg

SEQ ID NO: 1570256 - DNA, 15 bp, Homo sapiens
gtgtcttatattgtt

SEQ ID NO: 1570257 - DNA, 15 bp, Homo sapiens
ggtgtcttatattgt

SEQ ID NO: 1570258 - DNA, 15 bp, Homo sapiens
tggtgtcttatattg

SEQ ID NO: 1570259 - DNA, 15 bp, Homo sapiens
ttggtgtcttatatt

SEQ ID NO: 1570260 - DNA, 15 bp, Homo sapiens
gttggtgtcttatat

SEQ ID NO: 1570261 - DNA, 15 bp, Homo sapiens
tgttggtgtcttata

SEQ ID NO: 1570262 - DNA, 15 bp, Homo sapiens
atgttggtgtcttat

SEQ ID NO: 1570263 - DNA, 15 bp, Homo sapiens
aatgttggtgtctta

SEQ ID NO: 1570264 - DNA, 15 bp, Homo sapiens
taatgttggtgtctt

SEQ ID NO: 1570265 - DNA, 15 bp, Homo sapiens
ctaatgttggtgtct

SEQ ID NO: 1570266 - DNA, 15 bp, Homo sapiens
cctaatgttggtgtc

SEQ ID NO: 1570267 - DNA, 15 bp, Homo sapiens
tcctaatgttggtgt

SEQ ID NO: 1570268 - DNA, 15 bp, Homo sapiens
ttcctaatgttggtg

SEQ ID NO: 1570269 - DNA, 15 bp, Homo sapiens
attcctaatgttggt

SEQ ID NO: 1570270 - DNA, 15 bp, Homo sapiens
aattcctaatgttgg

SEQ ID NO: 1570271 - DNA, 15 bp, Homo sapiens
gaattcctaatgttg

SEQ ID NO: 1570272 - DNA, 15 bp, Homo sapiens
ggaattcctaatgtt

SEQ ID NO: 1570273 - DNA, 15 bp, Homo sapiens
gggaattcctaatgt

SEQ ID NO: 1570274 - DNA, 15 bp, Homo sapiens
agggaattcctaatg

SEQ ID NO: 1570275 - DNA, 15 bp, Homo sapiens
aagggaattcctaat

SEQ ID NO: 1570276 - DNA, 15 bp, Homo sapiens
caagggaattcctaa

SEQ ID NO: 1570277 - DNA, 15 bp, Homo sapiens
acaagggaattccta

SEQ ID NO: 1570278 - DNA, 15 bp, Homo sapiens
cacaagggaattcct

SEQ ID NO: 1570279 - DNA, 15 bp, Homo sapiens
tcacaagggaattcc

SEQ ID NO: 1570280 - DNA, 15 bp, Homo sapiens
atcacaagggaattc

SEQ ID NO: 1570281 - DNA, 15 bp, Homo sapiens
gatcacaagggaatt

SEQ ID NO: 1570282 - DNA, 15 bp, Homo sapiens
tgatcacaagggaat

SEQ ID NO: 1570283 - DNA, 15 bp, Homo sapiens
ctgatcacaagggaa

SEQ ID NO: 1570284 - DNA, 15 bp, Homo sapiens
actgatcacaaggga

SEQ ID NO: 1570285 - DNA, 15 bp, Homo sapiens
aactgatcacaaggg

SEQ ID NO: 1570286 - DNA, 15 bp, Homo sapiens
aaactgatcacaagg

SEQ ID NO: 1570287 - DNA, 15 bp, Homo sapiens
taaactgatcacaag

SEQ ID NO: 1570288 - DNA, 15 bp, Homo sapiens
ataaactgatcacaa

SEQ ID NO: 1570289 - DNA, 15 bp, Homo sapiens
tataaactgatcaca

SEQ ID NO: 1570290 - DNA, 15 bp, Homo sapiens
ctataaactgatcac

SEQ ID NO: 1570291 - DNA, 15 bp, Homo sapiens
gctataaactgatca

SEQ ID NO: 1570292 - DNA, 15 bp, Homo sapiens
tgctataaactgatc

SEQ ID NO: 1570293 - DNA, 15 bp, Homo sapiens
ttgctataaactgat

SEQ ID NO: 1570294 - DNA, 15 bp, Homo sapiens
tttgctataaactga

SEQ ID NO: 1570295 - DNA, 15 bp, Homo sapiens
atttgctataaactg

SEQ ID NO: 1570296 - DNA, 15 bp, Homo sapiens
aatttgctataaact

SEQ ID NO: 1570297 - DNA, 15 bp, Homo sapiens
aaatttgctataaac

SEQ ID NO: 1570298 - DNA, 15 bp, Homo sapiens
aaaatttgctataaa

SEQ ID NO: 1570299 - DNA, 15 bp, Homo sapiens
caaaatttgctataa

SEQ ID NO: 1570300 - DNA, 15 bp, Homo sapiens
gcaaaatttgctata

SEQ ID NO: 1570301 - DNA, 15 bp, Homo sapiens
agcaaaatttgctat

SEQ ID NO: 1570302 - DNA, 15 bp, Homo sapiens
gagcaaaatttgcta

SEQ ID NO: 1570303 - DNA, 15 bp, Homo sapiens
ggagcaaaatttgct

SEQ ID NO: 1570304 - DNA, 15 bp, Homo sapiens
aggagcaaaatttgc

SEQ ID NO: 1570305 - DNA, 15 bp, Homo sapiens
aaggagcaaaatttg

SEQ ID NO: 1570306 - DNA, 15 bp, Homo sapiens
aaaggagcaaaattt

SEQ ID NO: 1570307 - DNA, 15 bp, Homo sapiens
aaaaggagcaaaatt

SEQ ID NO: 1570308 - DNA, 15 bp, Homo sapiens
aaaaaggagcaaaat

SEQ ID NO: 1570309 - DNA, 15 bp, Homo sapiens
gaaaaaggagcaaaa

SEQ ID NO: 1570310 - DNA, 15 bp, Homo sapiens
agaaaaaggagcaaa

SEQ ID NO: 1570311 - DNA, 15 bp, Homo sapiens
aagaaaaaggagcaa

SEQ ID NO: 1570312 - DNA, 15 bp, Homo sapiens
taagaaaaaggagca

SEQ ID NO: 1570313 - DNA, 15 bp, Homo sapiens
ataagaaaaaggagc

SEQ ID NO: 1570314 - DNA, 15 bp, Homo sapiens
cataagaaaaaggag

SEQ ID NO: 1570315 - DNA, 15 bp, Homo sapiens
tcataagaaaaagga

SEQ ID NO: 1570316 - DNA, 15 bp, Homo sapiens
ctcataagaaaaagg

SEQ ID NO: 1570317 - DNA, 15 bp, Homo sapiens
tctcataagaaaaag

SEQ ID NO: 1570318 - DNA, 15 bp, Homo sapiens
atctcataagaaaaa

SEQ ID NO: 1570319 - DNA, 15 bp, Homo sapiens
aatctcataagaaaa

SEQ ID NO: 1570320 - DNA, 15 bp, Homo sapiens
gaatctcataagaaa

SEQ ID NO: 1570321 - DNA, 15 bp, Homo sapiens
tgaatctcataagaa

SEQ ID NO: 1570322 - DNA, 15 bp, Homo sapiens
gtgaatctcataaga

SEQ ID NO: 1570323 - DNA, 15 bp, Homo sapiens
ggtgaatctcataag

SEQ ID NO: 1570324 - DNA, 15 bp, Homo sapiens
aggtgaatctcataa

SEQ ID NO: 1570325 - DNA, 15 bp, Homo sapiens
aaggtgaatctcata

SEQ ID NO: 1570326 - DNA, 15 bp, Homo sapiens
taaggtgaatctcat

SEQ ID NO: 1570327 - DNA, 15 bp, Homo sapiens
gtaaggtgaatctca

SEQ ID NO: 1570328 - DNA, 15 bp, Homo sapiens
tgtaaggtgaatctc

SEQ ID NO: 1570329 - DNA, 15 bp, Homo sapiens
atgtaaggtgaatct

SEQ ID NO: 1570330 - DNA, 15 bp, Homo sapiens
aatgtaaggtgaatc

SEQ ID NO: 1570331 - DNA, 15 bp, Homo sapiens
aaatgtaaggtgaat

SEQ ID NO: 1570332 - DNA, 15 bp, Homo sapiens
gaaatgtaaggtgaa

SEQ ID NO: 1570333 - DNA, 15 bp, Homo sapiens
agaaatgtaaggtga

SEQ ID NO: 1570334 - DNA, 15 bp, Homo sapiens
aagaaatgtaaggtg

SEQ ID NO: 1570335 - DNA, 15 bp, Homo sapiens
gaagaaatgtaaggt

SEQ ID NO: 1570336 - DNA, 15 bp, Homo sapiens
agaagaaatgtaagg

SEQ ID NO: 1570337 - DNA, 15 bp, Homo sapiens
aagaagaaatgtaag

SEQ ID NO: 1570338 - DNA, 15 bp, Homo sapiens
aaagaagaaatgtaa

SEQ ID NO: 1570339 - DNA, 15 bp, Homo sapiens
taaagaagaaatgta

SEQ ID NO: 1570340 - DNA, 15 bp, Homo sapiens
gtaaagaagaaatgt

SEQ ID NO: 1570341 - DNA, 15 bp, Homo sapiens
ggtaaagaagaaatg

SEQ ID NO: 1570342 - DNA, 15 bp, Homo sapiens
aggtaaagaagaaat

SEQ ID NO: 1570343 - DNA, 15 bp, Homo sapiens
aaggtaaagaagaaa

SEQ ID NO: 1570344 - DNA, 15 bp, Homo sapiens
caaggtaaagaagaa

SEQ ID NO: 1570345 - DNA, 15 bp, Homo sapiens
acaaggtaaagaaga

SEQ ID NO: 1570346 - DNA, 15 bp, Homo sapiens
tacaaggtaaagaag

SEQ ID NO: 1570347 - DNA, 15 bp, Homo sapiens
ttacaaggtaaagaa

SEQ ID NO: 1570348 - DNA, 15 bp, Homo sapiens
gttacaaggtaaaga

SEQ ID NO: 1570349 - DNA, 15 bp, Homo sapiens
agttacaaggtaaag

SEQ ID NO: 1570350 - DNA, 15 bp, Homo sapiens
cagttacaaggtaaa

SEQ ID NO: 1570351 - DNA, 15 bp, Homo sapiens
tcagttacaaggtaa

SEQ ID NO: 1570352 - DNA, 15 bp, Homo sapiens
gtcagttacaaggta

SEQ ID NO: 1570353 - DNA, 15 bp, Homo sapiens
agtcagttacaaggt

SEQ ID NO: 1570354 - DNA, 15 bp, Homo sapiens
aagtcagttacaagg

SEQ ID NO: 1570355 - DNA, 15 bp, Homo sapiens
caagtcagttacaag

SEQ ID NO: 1570356 - DNA, 15 bp, Homo sapiens
tcaagtcagttacaa

SEQ ID NO: 1570357 - DNA, 15 bp, Homo sapiens
gtcaagtcagttaca

SEQ ID NO: 1570358 - DNA, 15 bp, Homo sapiens
agtcaagtcagttac

SEQ ID NO: 1570359 - DNA, 15 bp, Homo sapiens
aagtcaagtcagtta

SEQ ID NO: 1570360 - DNA, 15 bp, Homo sapiens
aaagtcaagtcagtt

SEQ ID NO: 1570361 - DNA, 15 bp, Homo sapiens
aaaagtcaagtcagt

SEQ ID NO: 1570362 - DNA, 15 bp, Homo sapiens
caaaagtcaagtcag

SEQ ID NO: 1570363 - DNA, 15 bp, Homo sapiens
acaaaagtcaagtca

SEQ ID NO: 1570364 - DNA, 15 bp, Homo sapiens
aacaaaagtcaagtc

SEQ ID NO: 1570365 - DNA, 15 bp, Homo sapiens
taacaaaagtcaagt

SEQ ID NO: 1570366 - DNA, 15 bp, Homo sapiens
ataacaaaagtcaag

SEQ ID NO: 1570367 - DNA, 15 bp, Homo sapiens
aataacaaaagtcaa

SEQ ID NO: 1570368 - DNA, 15 bp, Homo sapiens
gaataacaaaagtca

SEQ ID NO: 1570369 - DNA, 15 bp, Homo sapiens
agaataacaaaagtc

SEQ ID NO: 1570370 - DNA, 15 bp, Homo sapiens
tagaataacaaaagt

SEQ ID NO: 1570371 - DNA, 15 bp, Homo sapiens
atagaataacaaaag

SEQ ID NO: 1570372 - DNA, 15 bp, Homo sapiens
catagaataacaaaa

SEQ ID NO: 1570373 - DNA, 15 bp, Homo sapiens
tcatagaataacaaa

SEQ ID NO: 1570374 - DNA, 15 bp, Homo sapiens
ttcatagaataacaa

SEQ ID NO: 1570375 - DNA, 15 bp, Homo sapiens
cttcatagaataaca

SEQ ID NO: 1570376 - DNA, 15 bp, Homo sapiens
gcttcatagaataac

SEQ ID NO: 1570377 - DNA, 15 bp, Homo sapiens
agcttcatagaataa

SEQ ID NO: 1570378 - DNA, 15 bp, Homo sapiens
aagcttcatagaata

SEQ ID NO: 1570379 - DNA, 15 bp, Homo sapiens
aaagcttcatagaat

SEQ ID NO: 1570380 - DNA, 15 bp, Homo sapiens
gaaagcttcatagaa

SEQ ID NO: 1570381 - DNA, 15 bp, Homo sapiens
agaaagcttcataga

SEQ ID NO: 1570382 - DNA, 15 bp, Homo sapiens
tagaaagcttcatag

SEQ ID NO: 1570383 - DNA, 15 bp, Homo sapiens
gtagaaagcttcata

SEQ ID NO: 1570384 - DNA, 15 bp, Homo sapiens
agtagaaagcttcat

SEQ ID NO: 1570385 - DNA, 15 bp, Homo sapiens
aagtagaaagcttca

SEQ ID NO: 1570386 - DNA, 15 bp, Homo sapiens
aaagtagaaagcttc

SEQ ID NO: 1570387 - DNA, 15 bp, Homo sapiens
gaaagtagaaagctt

SEQ ID NO: 1570388 - DNA, 15 bp, Homo sapiens
tgaaagtagaaagct

SEQ ID NO: 1570389 - DNA, 15 bp, Homo sapiens
ttgaaagtagaaagc

SEQ ID NO: 1570390 - DNA, 15 bp, Homo sapiens
tttgaaagtagaaag

SEQ ID NO: 1570391 - DNA, 15 bp, Homo sapiens
gtttgaaagtagaaa

SEQ ID NO: 1570392 - DNA, 15 bp, Homo sapiens
tgtttgaaagtagaa

SEQ ID NO: 1570393 - DNA, 15 bp, Homo sapiens
ttgtttgaaagtaga

SEQ ID NO: 1570394 - DNA, 15 bp, Homo sapiens
cttgtttgaaagtag

SEQ ID NO: 1570395 - DNA, 15 bp, Homo sapiens
acttgtttgaaagta

SEQ ID NO: 1570396 - DNA, 15 bp, Homo sapiens
aacttgtttgaaagt

SEQ ID NO: 1570397 - DNA, 15 bp, Homo sapiens
caacttgtttgaaag

SEQ ID NO: 1570398 - DNA, 15 bp, Homo sapiens
acaacttgtttgaaa

SEQ ID NO: 1570399 - DNA, 15 bp, Homo sapiens
tacaacttgtttgaa

SEQ ID NO: 1570400 - DNA, 15 bp, Homo sapiens
gtacaacttgtttga

SEQ ID NO: 1570401 - DNA, 15 bp, Homo sapiens
tgtacaacttgtttg

SEQ ID NO: 1570402 - DNA, 15 bp, Homo sapiens
atgtacaacttgttt

SEQ ID NO: 1570403 - DNA, 15 bp, Homo sapiens
tatgtacaacttgtt

SEQ ID NO: 1570404 - DNA, 15 bp, Homo sapiens
ttatgtacaacttgt

SEQ ID NO: 1570405 - DNA, 15 bp, Homo sapiens
cttatgtacaacttg

SEQ ID NO: 1570406 - DNA, 15 bp, Homo sapiens
tcttatgtacaactt

SEQ ID NO: 1570407 - DNA, 15 bp, Homo sapiens
gtcttatgtacaact

SEQ ID NO: 1570408 - DNA, 15 bp, Homo sapiens
tgtcttatgtacaac

SEQ ID NO: 1570409 - DNA, 15 bp, Homo sapiens
ctgtcttatgtacaa

SEQ ID NO: 1570410 - DNA, 15 bp, Homo sapiens
actgtcttatgtaca

SEQ ID NO: 1570411 - DNA, 15 bp, Homo sapiens
tactgtcttatgtac

SEQ ID NO: 1570412 - DNA, 15 bp, Homo sapiens
ttactgtcttatgta

SEQ ID NO: 1570413 - DNA, 15 bp, Homo sapiens
tttactgtcttatgt

SEQ ID NO: 1570414 - DNA, 15 bp, Homo sapiens
ttttactgtcttatg

SEQ ID NO: 1570415 - DNA, 15 bp, Homo sapiens
attttactgtcttat

SEQ ID NO: 1570416 - DNA, 15 bp, Homo sapiens
cattttactgtctta

SEQ ID NO: 1570417 - DNA, 15 bp, Homo sapiens
acattttactgtctt

SEQ ID NO: 1570418 - DNA, 15 bp, Homo sapiens
aacattttactgtct

SEQ ID NO: 1570419 - DNA, 15 bp, Homo sapiens
taacattttactgtc

SEQ ID NO: 1570420 - DNA, 15 bp, Homo sapiens
ttaacattttactgt

SEQ ID NO: 1570421 - DNA, 15 bp, Homo sapiens
tttaacattttactg

SEQ ID NO: 1570422 - DNA, 15 bp, Homo sapiens
ttttaacattttact

SEQ ID NO: 1570423 - DNA, 15 bp, Homo sapiens
attttaacattttac

SEQ ID NO: 1570424 - DNA, 15 bp, Homo sapiens
cattttaacatttta

SEQ ID NO: 1570425 - DNA, 15 bp, Homo sapiens
acattttaacatttt

SEQ ID NO: 1570426 - DNA, 15 bp, Homo sapiens
gacattttaacattt

SEQ ID NO: 1570427 - DNA, 15 bp, Homo sapiens
ggacattttaacatt

SEQ ID NO: 1570428 - DNA, 15 bp, Homo sapiens
tggacattttaacat

SEQ ID NO: 1570429 - DNA, 15 bp, Homo sapiens
gtggacattttaaca

SEQ ID NO: 1570430 - DNA, 15 bp, Homo sapiens
tgtggacattttaac

SEQ ID NO: 1570431 - DNA, 15 bp, Homo sapiens
atgtggacattttaa

SEQ ID NO: 1570432 - DNA, 15 bp, Homo sapiens
catgtggacatttta

SEQ ID NO: 1570433 - DNA, 15 bp, Homo sapiens
tcatgtggacatttt

SEQ ID NO: 1570434 - DNA, 15 bp, Homo sapiens
atcatgtggacattt

SEQ ID NO: 1570435 - DNA, 15 bp, Homo sapiens
tatcatgtggacatt

SEQ ID NO: 1570436 - DNA, 15 bp, Homo sapiens
atatcatgtggacat

SEQ ID NO: 1570437 - DNA, 15 bp, Homo sapiens
aatatcatgtggaca

SEQ ID NO: 1570438 - DNA, 15 bp, Homo sapiens
gaatatcatgtggac

SEQ ID NO: 1570439 - DNA, 15 bp, Homo sapiens
ggaatatcatgtgga

SEQ ID NO: 1570440 - DNA, 15 bp, Homo sapiens
tggaatatcatgtgg

SEQ ID NO: 1570441 - DNA, 15 bp, Homo sapiens
ttggaatatcatgtg

SEQ ID NO: 1570442 - DNA, 15 bp, Homo sapiens
cttggaatatcatgt

SEQ ID NO: 1570443 - DNA, 15 bp, Homo sapiens
ccttggaatatcatg

SEQ ID NO: 1570444 - DNA, 15 bp, Homo sapiens
accttggaatatcat

SEQ ID NO: 1570445 - DNA, 15 bp, Homo sapiens
aaccttggaatatca

SEQ ID NO: 1570446 - DNA, 15 bp, Homo sapiens
caaccttggaatatc

SEQ ID NO: 1570447 - DNA, 15 bp, Homo sapiens
tcaaccttggaatat

SEQ ID NO: 1570448 - DNA, 15 bp, Homo sapiens
gtcaaccttggaata

SEQ ID NO: 1570449 - DNA, 15 bp, Homo sapiens
tgtcaaccttggaat

SEQ ID NO: 1570450 - DNA, 15 bp, Homo sapiens
ttgtcaaccttggaa

SEQ ID NO: 1570451 - DNA, 15 bp, Homo sapiens
cttgtcaaccttgga

SEQ ID NO: 1570452 - DNA, 15 bp, Homo sapiens
acttgtcaaccttgg

SEQ ID NO: 1570453 - DNA, 15 bp, Homo sapiens
aacttgtcaaccttg

SEQ ID NO: 1570454 - DNA, 15 bp, Homo sapiens
aaacttgtcaacctt

SEQ ID NO: 1570455 - DNA, 15 bp, Homo sapiens
caaacttgtcaacct

SEQ ID NO: 1570456 - DNA, 15 bp, Homo sapiens
acaaacttgtcaacc

SEQ ID NO: 1570457 - DNA, 15 bp, Homo sapiens
tacaaacttgtcaac

SEQ ID NO: 1570458 - DNA, 15 bp, Homo sapiens
ctacaaacttgtcaa

SEQ ID NO: 1570459 - DNA, 15 bp, Homo sapiens
tctacaaacttgtca

SEQ ID NO: 1570460 - DNA, 15 bp, Homo sapiens
ctctacaaacttgtc

SEQ ID NO: 1570461 - DNA, 15 bp, Homo sapiens
actctacaaacttgt

SEQ ID NO: 1570462 - DNA, 15 bp, Homo sapiens
aactctacaaacttg

SEQ ID NO: 1570463 - DNA, 15 bp, Homo sapiens
aaactctacaaactt

SEQ ID NO: 1570464 - DNA, 15 bp, Homo sapiens
caaactctacaaact

SEQ ID NO: 1570465 - DNA, 15 bp, Homo sapiens
ccaaactctacaaac

SEQ ID NO: 1570466 - DNA, 15 bp, Homo sapiens
cccaaactctacaaa

SEQ ID NO: 1570467 - DNA, 15 bp, Homo sapiens
gcccaaactctacaa

SEQ ID NO: 1570468 - DNA, 15 bp, Homo sapiens
tgcccaaactctaca

SEQ ID NO: 1570469 - DNA, 15 bp, Homo sapiens
ctgcccaaactctac

SEQ ID NO: 1570470 - DNA, 15 bp, Homo sapiens
cctgcccaaactcta

SEQ ID NO: 1570471 - DNA, 15 bp, Homo sapiens
tcctgcccaaactct

SEQ ID NO: 1570472 - DNA, 15 bp, Homo sapiens
ttcctgcccaaactc

SEQ ID NO: 1570473 - DNA, 15 bp, Homo sapiens
cttcctgcccaaact

SEQ ID NO: 1570474 - DNA, 15 bp, Homo sapiens
tcttcctgcccaaac

SEQ ID NO: 1570475 - DNA, 15 bp, Homo sapiens
ctcttcctgcccaaa

SEQ ID NO: 1570476 - DNA, 15 bp, Homo sapiens
cctcttcctgcccaa

SEQ ID NO: 1570477 - DNA, 15 bp, Homo sapiens
tcctcttcctgccca

SEQ ID NO: 1570478 - DNA, 15 bp, Homo sapiens
ttcctcttcctgccc

SEQ ID NO: 1570479 - DNA, 15 bp, Homo sapiens
gttcctcttcctgcc

SEQ ID NO: 1570480 - DNA, 15 bp, Homo sapiens
agttcctcttcctgc

SEQ ID NO: 1570481 - DNA, 15 bp, Homo sapiens
aagttcctcttcctg

SEQ ID NO: 1570482 - DNA, 15 bp, Homo sapiens
taagttcctcttcct

SEQ ID NO: 1570483 - DNA, 15 bp, Homo sapiens
ttaagttcctcttcc

SEQ ID NO: 1570484 - DNA, 15 bp, Homo sapiens
tttaagttcctcttc

SEQ ID NO: 1570485 - DNA, 15 bp, Homo sapiens
ttttaagttcctctt

SEQ ID NO: 1570486 - DNA, 15 bp, Homo sapiens
gttttaagttcctct

SEQ ID NO: 1570487 - DNA, 15 bp, Homo sapiens
tgttttaagttcctc

SEQ ID NO: 1570488 - DNA, 15 bp, Homo sapiens
gtgttttaagttcct

SEQ ID NO: 1570489 - DNA, 15 bp, Homo sapiens
tgtgttttaagttcc

SEQ ID NO: 1570490 - DNA, 15 bp, Homo sapiens
atgtgttttaagttc

SEQ ID NO: 1570491 - DNA, 15 bp, Homo sapiens
aatgtgttttaagtt

SEQ ID NO: 1570492 - DNA, 15 bp, Homo sapiens
taatgtgttttaagt

SEQ ID NO: 1570493 - DNA, 15 bp, Homo sapiens
ataatgtgttttaag

SEQ ID NO: 1570494 - DNA, 15 bp, Homo sapiens
aataatgtgttttaa

SEQ ID NO: 1570495 - DNA, 15 bp, Homo sapiens
gaataatgtgtttta

SEQ ID NO: 1570496 - DNA, 15 bp, Homo sapiens
agaataatgtgtttt

SEQ ID NO: 1570497 - DNA, 15 bp, Homo sapiens
cagaataatgtgttt

SEQ ID NO: 1570498 - DNA, 15 bp, Homo sapiens
cttacagaataatgt

SEQ ID NO: 1570499 - DNA, 15 bp, Homo sapiens
acttacagaataatg

SEQ ID NO: 1570500 - DNA, 15 bp, Homo sapiens
cacttacagaataat

SEQ ID NO: 1570501 - DNA, 15 bp, Homo sapiens
tcacttacagaataa

SEQ ID NO: 1570502 - DNA, 15 bp, Homo sapiens
ttcacttacagaata

SEQ ID NO: 1570503 - DNA, 15 bp, Homo sapiens
gttcacttacagaat

SEQ ID NO: 1570504 - DNA, 15 bp, Homo sapiens
tgttcacttacagaa

SEQ ID NO: 1570505 - DNA, 15 bp, Homo sapiens
ctgttcacttacaga

SEQ ID NO: 1570506 - DNA, 15 bp, Homo sapiens
tctgttcacttacag

SEQ ID NO: 1570507 - DNA, 15 bp, Homo sapiens
ttctgttcacttaca

SEQ ID NO: 1570508 - DNA, 15 bp, Homo sapiens
gttctgttcacttac

SEQ ID NO: 1570509 - DNA, 15 bp, Homo sapiens
agttctgttcactta

SEQ ID NO: 1570510 - DNA, 15 bp, Homo sapiens
tagttctgttcactt

SEQ ID NO: 1570511 - DNA, 15 bp, Homo sapiens
atagttctgttcact

SEQ ID NO: 1570512 - DNA, 15 bp, Homo sapiens
tatagttctgttcac

SEQ ID NO: 1570513 - DNA, 15 bp, Homo sapiens
ttatagttctgttca

SEQ ID NO: 1570514 - DNA, 15 bp, Homo sapiens
attatagttctgttc

SEQ ID NO: 1570515 - DNA, 15 bp, Homo sapiens
aattatagttctgtt

SEQ ID NO: 1570516 - DNA, 15 bp, Homo sapiens
aaattatagttctgt

SEQ ID NO: 1570517 - DNA, 15 bp, Homo sapiens
taaattatagttctg

SEQ ID NO: 1570518 - DNA, 15 bp, Homo sapiens
ataaattatagttct

SEQ ID NO: 1570519 - DNA, 15 bp, Homo sapiens
aataaattatagttc

SEQ ID NO: 1570520 - DNA, 15 bp, Homo sapiens
aaataaattatagtt

SEQ ID NO: 1570521 - DNA, 15 bp, Homo sapiens
taaataaattatagt

SEQ ID NO: 1570522 - DNA, 15 bp, Homo sapiens
gtaaataaattatag

SEQ ID NO: 1570523 - DNA, 15 bp, Homo sapiens
agtaaataaattata

SEQ ID NO: 1570524 - DNA, 15 bp, Homo sapiens
tagtaaataaattat

SEQ ID NO: 1570525 - DNA, 15 bp, Homo sapiens
ctagtaaataaatta

SEQ ID NO: 1570526 - DNA, 15 bp, Homo sapiens
tctagtaaataaatt

SEQ ID NO: 1570527 - DNA, 15 bp, Homo sapiens
atctagtaaataaat

SEQ ID NO: 1570528 - DNA, 15 bp, Homo sapiens
tatctagtaaataaa

SEQ ID NO: 1570529 - DNA, 15 bp, Homo sapiens
atatctagtaaataa

SEQ ID NO: 1570530 - DNA, 15 bp, Homo sapiens
tatatctagtaaata

SEQ ID NO: 1570531 - DNA, 15 bp, Homo sapiens
gtatatctagtaaat

SEQ ID NO: 1570532 - DNA, 15 bp, Homo sapiens
agtatatctagtaaa

SEQ ID NO: 1570533 - DNA, 15 bp, Homo sapiens
tagtatatctagtaa

SEQ ID NO: 1570534 - DNA, 15 bp, Homo sapiens
ttagtatatctagta

SEQ ID NO: 1570535 - DNA, 15 bp, Homo sapiens
gttagtatatctagt

SEQ ID NO: 1570536 - DNA, 15 bp, Homo sapiens
tgttagtatatctag

SEQ ID NO: 1570537 - DNA, 15 bp, Homo sapiens
atgttagtatatcta

SEQ ID NO: 1570538 - DNA, 15 bp, Homo sapiens
aatgttagtatatct

SEQ ID NO: 1570539 - DNA, 15 bp, Homo sapiens
caatgttagtatatc

SEQ ID NO: 1570540 - DNA, 15 bp, Homo sapiens
gcaatgttagtatat

SEQ ID NO: 1570541 - DNA, 15 bp, Homo sapiens
ggcaatgttagtata

SEQ ID NO: 1570542 - DNA, 15 bp, Homo sapiens
gggcaatgttagtat

SEQ ID NO: 1570543 - DNA, 15 bp, Homo sapiens
agggcaatgttagta

SEQ ID NO: 1570544 - DNA, 15 bp, Homo sapiens
tagggcaatgttagt

SEQ ID NO: 1570545 - DNA, 15 bp, Homo sapiens
ttagggcaatgttag

SEQ ID NO: 1570546 - DNA, 15 bp, Homo sapiens
cttagggcaatgtta

SEQ ID NO: 1570547 - DNA, 15 bp, Homo sapiens
ccttagggcaatgtt

SEQ ID NO: 1570548 - DNA, 15 bp, Homo sapiens
cccttagggcaatgt

SEQ ID NO: 1570549 - DNA, 15 bp, Homo sapiens
gcccttagggcaatg

SEQ ID NO: 1570550 - DNA, 15 bp, Homo sapiens
ggcccttagggcaat

SEQ ID NO: 1570551 - DNA, 15 bp, Homo sapiens
aggcccttagggcaa

SEQ ID NO: 1570552 - DNA, 15 bp, Homo sapiens
gaggcccttagggca

SEQ ID NO: 1570553 - DNA, 15 bp, Homo sapiens
agaggcccttagggc

SEQ ID NO: 1570554 - DNA, 15 bp, Homo sapiens
aagaggcccttaggg

SEQ ID NO: 1570555 - DNA, 15 bp, Homo sapiens
aaagaggcccttagg

SEQ ID NO: 1570556 - DNA, 15 bp, Homo sapiens
gaaagaggcccttag

SEQ ID NO: 1570557 - DNA, 15 bp, Homo sapiens
agaaagaggccctta

SEQ ID NO: 1570558 - DNA, 15 bp, Homo sapiens
gagaaagaggccctt

SEQ ID NO: 1570559 - DNA, 15 bp, Homo sapiens
agagaaagaggccct

SEQ ID NO: 1570560 - DNA, 15 bp, Homo sapiens
cagagaaagaggccc

SEQ ID NO: 1570561 - DNA, 15 bp, Homo sapiens
acagagaaagaggcc

SEQ ID NO: 1570562 - DNA, 15 bp, Homo sapiens
gacagagaaagaggc

SEQ ID NO: 1570563 - DNA, 15 bp, Homo sapiens
agacagagaaagagg

SEQ ID NO: 1570564 - DNA, 15 bp, Homo sapiens
gagacagagaaagag

SEQ ID NO: 1570565 - DNA, 15 bp, Homo sapiens
agagacagagaaaga

SEQ ID NO: 1570566 - DNA, 15 bp, Homo sapiens
cagagacagagaaag

SEQ ID NO: 1570567 - DNA, 15 bp, Homo sapiens
tcagagacagagaaa

SEQ ID NO: 1570568 - DNA, 15 bp, Homo sapiens
atcagagacagagaa

SEQ ID NO: 1570569 - DNA, 15 bp, Homo sapiens
tatcagagacagaga

SEQ ID NO: 1570570 - DNA, 15 bp, Homo sapiens
gtatcagagacagag

SEQ ID NO: 1570571 - DNA, 15 bp, Homo sapiens
tgtatcagagacaga

SEQ ID NO: 1570572 - DNA, 15 bp, Homo sapiens
ctgtatcagagacag

SEQ ID NO: 1570573 - DNA, 15 bp, Homo sapiens
gctgtatcagagaca

SEQ ID NO: 1570574 - DNA, 15 bp, Homo sapiens
tgctgtatcagagac

SEQ ID NO: 1570575 - DNA, 15 bp, Homo sapiens
atgctgtatcagaga

SEQ ID NO: 1570576 - DNA, 15 bp, Homo sapiens
tatgctgtatcagag

SEQ ID NO: 1570577 - DNA, 15 bp, Homo sapiens
gtatgctgtatcaga

SEQ ID NO: 1570578 - DNA, 15 bp, Homo sapiens
agtatgctgtatcag

SEQ ID NO: 1570579 - DNA, 15 bp, Homo sapiens
tagtatgctgtatca

SEQ ID NO: 1570580 - DNA, 15 bp, Homo sapiens
atagtatgctgtatc

SEQ ID NO: 1570581 - DNA, 15 bp, Homo sapiens
tatagtatgctgtat

SEQ ID NO: 1570582 - DNA, 15 bp, Homo sapiens
atatagtatgctgta

SEQ ID NO: 1570583 - DNA, 15 bp, Homo sapiens
gatatagtatgctgt

SEQ ID NO: 1570584 - DNA, 15 bp, Homo sapiens
tgatatagtatgctg

SEQ ID NO: 1570585 - DNA, 15 bp, Homo sapiens
ttgatatagtatgct

SEQ ID NO: 1570586 - DNA, 15 bp, Homo sapiens
tttgatatagtatgc

SEQ ID NO: 1570587 - DNA, 15 bp, Homo sapiens
ttttgatatagtatg

SEQ ID NO: 1570588 - DNA, 15 bp, Homo sapiens
tttttgatatagtat

SEQ ID NO: 1570589 - DNA, 15 bp, Homo sapiens
ttttttgatatagta

SEQ ID NO: 1570590 - DNA, 15 bp, Homo sapiens
tttttttgatatagt

SEQ ID NO: 1570591 - DNA, 15 bp, Homo sapiens
ttttttttgatatag

SEQ ID NO: 1570592 - DNA, 15 bp, Homo sapiens
tttttttttgatata

SEQ ID NO: 1570593 - DNA, 15 bp, Homo sapiens
ttttttttttgatat

SEQ ID NO: 1570594 - DNA, 15 bp, Homo sapiens
tttttttttttgata

SEQ ID NO: 1570595 - DNA, 15 bp, Homo sapiens
ttttttttttttgat

SEQ ID NO: 1570596 - DNA, 15 bp, Homo sapiens
gtttcttcttcttct

SEQ ID NO: 1570597 - DNA, 15 bp, Homo sapiens
tgtttcttcttcttc

SEQ ID NO: 1570598 - DNA, 15 bp, Homo sapiens
gtgtttcttcttctt

SEQ ID NO: 1570599 - DNA, 15 bp, Homo sapiens
tgtgtttcttcttct

SEQ ID NO: 1570600 - DNA, 15 bp, Homo sapiens
ttgtgtttcttcttc

SEQ ID NO: 1570601 - DNA, 15 bp, Homo sapiens
tttgtgtttcttctt

SEQ ID NO: 1570602 - DNA, 15 bp, Homo sapiens
ttttgtgtttcttct

SEQ ID NO: 1570603 - DNA, 15 bp, Homo sapiens
attttgtgtttcttc

SEQ ID NO: 1570604 - DNA, 15 bp, Homo sapiens
gattttgtgtttctt

SEQ ID NO: 1570605 - DNA, 15 bp, Homo sapiens
agattttgtgtttct

SEQ ID NO: 1570606 - DNA, 15 bp, Homo sapiens
tagattttgtgtttc

SEQ ID NO: 1570607 - DNA, 15 bp, Homo sapiens
atagattttgtgttt

SEQ ID NO: 1570608 - DNA, 15 bp, Homo sapiens
aatagattttgtgtt

SEQ ID NO: 1570609 - DNA, 15 bp, Homo sapiens
taatagattttgtgt

SEQ ID NO: 1570610 - DNA, 15 bp, Homo sapiens
ctaatagattttgtg

SEQ ID NO: 1570611 - DNA, 15 bp, Homo sapiens
cctaatagattttgt

SEQ ID NO: 1570612 - DNA, 15 bp, Homo sapiens
acctaatagattttg

SEQ ID NO: 1570613 - DNA, 15 bp, Homo sapiens
tacctaatagatttt

SEQ ID NO: 1570614 - DNA, 15 bp, Homo sapiens
gtacctaatagattt

SEQ ID NO: 1570615 - DNA, 15 bp, Homo sapiens
ggtacctaatagatt

SEQ ID NO: 1570616 - DNA, 15 bp, Homo sapiens
aggtacctaatagat

SEQ ID NO: 1570617 - DNA, 15 bp, Homo sapiens
gaggtacctaataga

SEQ ID NO: 1570618 - DNA, 15 bp, Homo sapiens
tgaggtacctaatag

SEQ ID NO: 1570619 - DNA, 15 bp, Homo sapiens
gtgaggtacctaata

SEQ ID NO: 1570620 - DNA, 15 bp, Homo sapiens
agtgaggtacctaat

SEQ ID NO: 1570621 - DNA, 15 bp, Homo sapiens
aagtgaggtacctaa

SEQ ID NO: 1570622 - DNA, 15 bp, Homo sapiens
aaagtgaggtaccta

SEQ ID NO: 1570623 - DNA, 15 bp, Homo sapiens
gaaagtgaggtacct

SEQ ID NO: 1570624 - DNA, 15 bp, Homo sapiens
ggaaagtgaggtacc

SEQ ID NO: 1570625 - DNA, 15 bp, Homo sapiens
aggaaagtgaggtac

SEQ ID NO: 1570626 - DNA, 15 bp, Homo sapiens
caggaaagtgaggta

SEQ ID NO: 1570627 - DNA, 15 bp, Homo sapiens
gcaggaaagtgaggt

SEQ ID NO: 1570628 - DNA, 15 bp, Homo sapiens
agcaggaaagtgagg

SEQ ID NO: 1570629 - DNA, 15 bp, Homo sapiens
cagcaggaaagtgag

SEQ ID NO: 1570630 - DNA, 15 bp, Homo sapiens
gcagcaggaaagtga

SEQ ID NO: 1570631 - DNA, 15 bp, Homo sapiens
ggcagcaggaaagtg

SEQ ID NO: 1570632 - DNA, 15 bp, Homo sapiens
tggcagcaggaaagt

SEQ ID NO: 1570633 - DNA, 15 bp, Homo sapiens
ctggcagcaggaaag

SEQ ID NO: 1570634 - DNA, 15 bp, Homo sapiens
gctggcagcaggaaa

SEQ ID NO: 1570635 - DNA, 15 bp, Homo sapiens
tgctggcagcaggaa

SEQ ID NO: 1570636 - DNA, 15 bp, Homo sapiens
ttgctggcagcagga

SEQ ID NO: 1570637 - DNA, 15 bp, Homo sapiens
attgctggcagcagg

SEQ ID NO: 1570638 - DNA, 15 bp, Homo sapiens
tattgctggcagcag

SEQ ID NO: 1570639 - DNA, 15 bp, Homo sapiens
ttattgctggcagca

SEQ ID NO: 1570640 - DNA, 15 bp, Homo sapiens
gttattgctggcagc

SEQ ID NO: 1570641 - DNA, 15 bp, Homo sapiens
agttattgctggcag

SEQ ID NO: 1570642 - DNA, 15 bp, Homo sapiens
gagttattgctggca

SEQ ID NO: 1570643 - DNA, 15 bp, Homo sapiens
tgagttattgctggc

SEQ ID NO: 1570644 - DNA, 15 bp, Homo sapiens
ttgagttattgctgg

SEQ ID NO: 1570645 - DNA, 15 bp, Homo sapiens
gttgagttattgctg

SEQ ID NO: 1570646 - DNA, 15 bp, Homo sapiens
ggttgagttattgct

SEQ ID NO: 1570647 - DNA, 15 bp, Homo sapiens
tggttgagttattgc

SEQ ID NO: 1570648 - DNA, 15 bp, Homo sapiens
atggttgagttattg

SEQ ID NO: 1570649 - DNA, 15 bp, Homo sapiens
gatggttgagttatt

SEQ ID NO: 1570650 - DNA, 15 bp, Homo sapiens
ggatggttgagttat

SEQ ID NO: 1570651 - DNA, 15 bp, Homo sapiens
tggatggttgagtta

SEQ ID NO: 1570652 - DNA, 15 bp, Homo sapiens
atggatggttgagtt

SEQ ID NO: 1570653 - DNA, 15 bp, Homo sapiens
tatggatggttgagt

SEQ ID NO: 1570654 - DNA, 15 bp, Homo sapiens
ctatggatggttgag

SEQ ID NO: 1570655 - DNA, 15 bp, Homo sapiens
tctatggatggttga

SEQ ID NO: 1570656 - DNA, 15 bp, Homo sapiens
gtctatggatggttg

SEQ ID NO: 1570657 - DNA, 15 bp, Homo sapiens
ggtctatggatggtt

SEQ ID NO: 1570658 - DNA, 15 bp, Homo sapiens
tggtctatggatggt

SEQ ID NO: 1570659 - DNA, 15 bp, Homo sapiens
atggtctatggatgg

SEQ ID NO: 1570660 - DNA, 15 bp, Homo sapiens
gatggtctatggatg

SEQ ID NO: 1570661 - DNA, 15 bp, Homo sapiens
ggatggtctatggat

SEQ ID NO: 1570662 - DNA, 15 bp, Homo sapiens
aggatggtctatgga

SEQ ID NO: 1570663 - DNA, 15 bp, Homo sapiens
caggatggtctatgg

SEQ ID NO: 1570664 - DNA, 15 bp, Homo sapiens
tcaggatggtctatg

SEQ ID NO: 1570665 - DNA, 15 bp, Homo sapiens
ttcaggatggtctat

SEQ ID NO: 1570666 - DNA, 15 bp, Homo sapiens
tttcaggatggtcta

SEQ ID NO: 1570667 - DNA, 15 bp, Homo sapiens
ttttcaggatggtct

SEQ ID NO: 1570668 - DNA, 15 bp, Homo sapiens
attttcaggatggtc

SEQ ID NO: 1570669 - DNA, 15 bp, Homo sapiens
gattttcaggatggt

SEQ ID NO: 1570670 - DNA, 15 bp, Homo sapiens
agattttcaggatgg

SEQ ID NO: 1570671 - DNA, 15 bp, Homo sapiens
cagattttcaggatg

SEQ ID NO: 1570672 - DNA, 15 bp, Homo sapiens
ccagattttcaggat

SEQ ID NO: 1570673 - DNA, 15 bp, Homo sapiens
tccagattttcagga

SEQ ID NO: 1570674 - DNA, 15 bp, Homo sapiens
ttccagattttcagg

SEQ ID NO: 1570675 - DNA, 15 bp, Homo sapiens
cttccagattttcag

SEQ ID NO: 1570676 - DNA, 15 bp, Homo sapiens
acttccagattttca

SEQ ID NO: 1570677 - DNA, 15 bp, Homo sapiens
tacttccagattttc

SEQ ID NO: 1570678 - DNA, 15 bp, Homo sapiens
ttacttccagatttt

SEQ ID NO: 1570679 - DNA, 15 bp, Homo sapiens
tttacttccagattt

SEQ ID NO: 1570680 - DNA, 15 bp, Homo sapiens
atttacttccagatt

SEQ ID NO: 1570681 - DNA, 15 bp, Homo sapiens
tatttacttccagat

SEQ ID NO: 1570682 - DNA, 15 bp, Homo sapiens
ttatttacttccaga

SEQ ID NO: 1570683 - DNA, 15 bp, Homo sapiens
tttatttacttccag

SEQ ID NO: 1570684 - DNA, 15 bp, Homo sapiens
atttatttacttcca

SEQ ID NO: 1570685 - DNA, 15 bp, Homo sapiens
tatttatttacttcc

SEQ ID NO: 1570686 - DNA, 15 bp, Homo sapiens
ttatttatttacttc

SEQ ID NO: 1570687 - DNA, 15 bp, Homo sapiens
attatttatttactt

SEQ ID NO: 1570688 - DNA, 15 bp, Homo sapiens
gattatttatttact

SEQ ID NO: 1570689 - DNA, 15 bp, Homo sapiens
tgattatttatttac

SEQ ID NO: 1570690 - DNA, 15 bp, Homo sapiens
ttgattatttattta

SEQ ID NO: 1570691 - DNA, 15 bp, Homo sapiens
tttgattatttattt

SEQ ID NO: 1570692 - DNA, 15 bp, Homo sapiens
gtttgattatttatt

SEQ ID NO: 1570693 - DNA, 15 bp, Homo sapiens
tgtttgattatttat

SEQ ID NO: 1570694 - DNA, 15 bp, Homo sapiens
ttgtttgattattta

SEQ ID NO: 1570695 - DNA, 15 bp, Homo sapiens
tttgtttgattattt

SEQ ID NO: 1570696 - DNA, 15 bp, Homo sapiens
ttttgtttgattatt

SEQ ID NO: 1570697 - DNA, 15 bp, Homo sapiens
tttttgtttgattat

SEQ ID NO: 1570698 - DNA, 15 bp, Homo sapiens
ttttttgtttgatta

SEQ ID NO: 1570699 - DNA, 15 bp, Homo sapiens
attttttgtttgatt

SEQ ID NO: 1570700 - DNA, 15 bp, Homo sapiens
aattttttgtttgat

SEQ ID NO: 1570701 - DNA, 15 bp, Homo sapiens
gaattttttgtttga

SEQ ID NO: 1570702 - DNA, 15 bp, Homo sapiens
tgaattttttgtttg

SEQ ID NO: 1570703 - DNA, 15 bp, Homo sapiens
atgaattttttgttt

SEQ ID NO: 1570704 - DNA, 15 bp, Homo sapiens
gatgaattttttgtt

SEQ ID NO: 1570705 - DNA, 15 bp, Homo sapiens
agatgaattttttgt

SEQ ID NO: 1570706 - DNA, 15 bp, Homo sapiens
gagatgaattttttg

SEQ ID NO: 1570707 - DNA, 15 bp, Homo sapiens
tgagatgaatttttt

SEQ ID NO: 1570708 - DNA, 15 bp, Homo sapiens
ttgagatgaattttt

SEQ ID NO: 1570709 - DNA, 15 bp, Homo sapiens
cttgagatgaatttt

SEQ ID NO: 1570710 - DNA, 15 bp, Homo sapiens
tcttgagatgaattt

SEQ ID NO: 1570711 - DNA, 15 bp, Homo sapiens
ttcttgagatgaatt

SEQ ID NO: 1570712 - DNA, 15 bp, Homo sapiens
tttcttgagatgaat

SEQ ID NO: 1570713 - DNA, 15 bp, Homo sapiens
ttttcttgagatgaa

SEQ ID NO: 1570714 - DNA, 15 bp, Homo sapiens
attttcttgagatga

SEQ ID NO: 1570715 - DNA, 15 bp, Homo sapiens
tattttcttgagatg

SEQ ID NO: 1570716 - DNA, 15 bp, Homo sapiens
ttattttcttgagat

SEQ ID NO: 1570717 - DNA, 15 bp, Homo sapiens
gttattttcttgaga

SEQ ID NO: 1570718 - DNA, 15 bp, Homo sapiens
tgttattttcttgag

SEQ ID NO: 1570719 - DNA, 15 bp, Homo sapiens
atgttattttcttga

SEQ ID NO: 1570720 - DNA, 15 bp, Homo sapiens
gatgttattttcttg

SEQ ID NO: 1570721 - DNA, 15 bp, Homo sapiens
agatgttattttctt

SEQ ID NO: 1570722 - DNA, 15 bp, Homo sapiens
aagatgttattttct

SEQ ID NO: 1570723 - DNA, 15 bp, Homo sapiens
taagatgttattttc

SEQ ID NO: 1570724 - DNA, 15 bp, Homo sapiens
ttaagatgttatttt

SEQ ID NO: 1570725 - DNA, 15 bp, Homo sapiens
tttaagatgttattt

SEQ ID NO: 1570726 - DNA, 15 bp, Homo sapiens
ctttaagatgttatt

SEQ ID NO: 1570727 - DNA, 15 bp, Homo sapiens
gctttaagatgttat

SEQ ID NO: 1570728 - DNA, 15 bp, Homo sapiens
ggctttaagatgtta

SEQ ID NO: 1570729 - DNA, 15 bp, Homo sapiens
gggctttaagatgtt

SEQ ID NO: 1570730 - DNA, 15 bp, Homo sapiens
tgggctttaagatgt

SEQ ID NO: 1570731 - DNA, 15 bp, Homo sapiens
atgggctttaagatg

SEQ ID NO: 1570732 - DNA, 15 bp, Homo sapiens
tatgggctttaagat

SEQ ID NO: 1570733 - DNA, 15 bp, Homo sapiens
ttatgggctttaaga

SEQ ID NO: 1570734 - DNA, 15 bp, Homo sapiens
cttatgggctttaag

SEQ ID NO: 1570735 - DNA, 15 bp, Homo sapiens
gcttatgggctttaa

SEQ ID NO: 1570736 - DNA, 15 bp, Homo sapiens
tgcttatgggcttta

SEQ ID NO: 1570737 - DNA, 15 bp, Homo sapiens
atgcttatgggcttt

SEQ ID NO: 1570738 - DNA, 15 bp, Homo sapiens
tatgcttatgggctt

SEQ ID NO: 1570739 - DNA, 15 bp, Homo sapiens
atatgcttatgggct

SEQ ID NO: 1570740 - DNA, 15 bp, Homo sapiens
tatatgcttatgggc

SEQ ID NO: 1570741 - DNA, 15 bp, Homo sapiens
atatatgcttatggg

SEQ ID NO: 1570742 - DNA, 15 bp, Homo sapiens
tatatatgcttatgg

SEQ ID NO: 1570743 - DNA, 15 bp, Homo sapiens
atatatatgcttatg

SEQ ID NO: 1570744 - DNA, 15 bp, Homo sapiens
tatatatatgcttat

SEQ ID NO: 1570745 - DNA, 15 bp, Homo sapiens
gtatatatatgctta

SEQ ID NO: 1570746 - DNA, 15 bp, Homo sapiens
ggtatatatatgctt

SEQ ID NO: 1570747 - DNA, 15 bp, Homo sapiens
tggtatatatatgct

SEQ ID NO: 1570748 - DNA, 15 bp, Homo sapiens
ttggtatatatatgc

SEQ ID NO: 1570749 - DNA, 15 bp, Homo sapiens
attggtatatatatg

SEQ ID NO: 1570750 - DNA, 15 bp, Homo sapiens
aattggtatatatat

SEQ ID NO: 1570751 - DNA, 15 bp, Homo sapiens
gaattggtatatata

SEQ ID NO: 1570752 - DNA, 15 bp, Homo sapiens
cgaattggtatatat

SEQ ID NO: 1570753 - DNA, 15 bp, Homo sapiens
acgaattggtatata

SEQ ID NO: 1570754 - DNA, 15 bp, Homo sapiens
tacgaattggtatat

SEQ ID NO: 1570755 - DNA, 15 bp, Homo sapiens
ttacgaattggtata

SEQ ID NO: 1570756 - DNA, 15 bp, Homo sapiens
attacgaattggtat

SEQ ID NO: 1570757 - DNA, 15 bp, Homo sapiens
cattacgaattggta

SEQ ID NO: 1570758 - DNA, 15 bp, Homo sapiens
gcattacgaattggt

SEQ ID NO: 1570759 - DNA, 15 bp, Homo sapiens
tgcattacgaattgg

SEQ ID NO: 1570760 - DNA, 15 bp, Homo sapiens
ttgcattacgaattg

SEQ ID NO: 1570761 - DNA, 15 bp, Homo sapiens
gttgcattacgaatt

SEQ ID NO: 1570762 - DNA, 15 bp, Homo sapiens
agttgcattacgaat

SEQ ID NO: 1570763 - DNA, 15 bp, Homo sapiens
aagttgcattacgaa

SEQ ID NO: 1570764 - DNA, 15 bp, Homo sapiens
taagttgcattacga

SEQ ID NO: 1570765 - DNA, 15 bp, Homo sapiens
ctaagttgcattacg

SEQ ID NO: 1570766 - DNA, 15 bp, Homo sapiens
tctaagttgcattac

SEQ ID NO: 1570767 - DNA, 15 bp, Homo sapiens
atctaagttgcatta

SEQ ID NO: 1570768 - DNA, 15 bp, Homo sapiens
aatctaagttgcatt

SEQ ID NO: 1570769 - DNA, 15 bp, Homo sapiens
aaatctaagttgcat

SEQ ID NO: 1570770 - DNA, 15 bp, Homo sapiens
caaatctaagttgca

SEQ ID NO: 1570771 - DNA, 15 bp, Homo sapiens
tcaaatctaagttgc

SEQ ID NO: 1570772 - DNA, 15 bp, Homo sapiens
ttcaaatctaagttg

SEQ ID NO: 1570773 - DNA, 15 bp, Homo sapiens
attcaaatctaagtt

SEQ ID NO: 1570774 - DNA, 15 bp, Homo sapiens
tattcaaatctaagt

SEQ ID NO: 1570775 - DNA, 15 bp, Homo sapiens
gtattcaaatctaag

SEQ ID NO: 1570776 - DNA, 15 bp, Homo sapiens
tgtattcaaatctaa

SEQ ID NO: 1570777 - DNA, 15 bp, Homo sapiens
gtgtattcaaatcta

SEQ ID NO: 1570778 - DNA, 15 bp, Homo sapiens
agtgtattcaaatct

SEQ ID NO: 1570779 - DNA, 15 bp, Homo sapiens
cagtgtattcaaatc

SEQ ID NO: 1570780 - DNA, 15 bp, Homo sapiens
tcagtgtattcaaat

SEQ ID NO: 1570781 - DNA, 15 bp, Homo sapiens
ctcagtgtattcaaa

SEQ ID NO: 1570782 - DNA, 15 bp, Homo sapiens
tctcagtgtattcaa

SEQ ID NO: 1570783 - DNA, 15 bp, Homo sapiens
ttctcagtgtattca

SEQ ID NO: 1570784 - DNA, 15 bp, Homo sapiens
tttctcagtgtattc

SEQ ID NO: 1570785 - DNA, 15 bp, Homo sapiens
atttctcagtgtatt

SEQ ID NO: 1570786 - DNA, 15 bp, Homo sapiens
tatttctcagtgtat

SEQ ID NO: 1570787 - DNA, 15 bp, Homo sapiens
gtatttctcagtgta

SEQ ID NO: 1570788 - DNA, 15 bp, Homo sapiens
agtatttctcagtgt

SEQ ID NO: 1570789 - DNA, 15 bp, Homo sapiens
tagtatttctcagtg

SEQ ID NO: 1570790 - DNA, 15 bp, Homo sapiens
ttagtatttctcagt

SEQ ID NO: 1570791 - DNA, 15 bp, Homo sapiens
attagtatttctcag

SEQ ID NO: 1570792 - DNA, 15 bp, Homo sapiens
tattagtatttctca

SEQ ID NO: 1570793 - DNA, 15 bp, Homo sapiens
ctattagtatttctc

SEQ ID NO: 1570794 - DNA, 15 bp, Homo sapiens
gctattagtatttct

SEQ ID NO: 1570795 - DNA, 15 bp, Homo sapiens
agctattagtatttc

SEQ ID NO: 1570796 - DNA, 15 bp, Homo sapiens
tagctattagtattt

SEQ ID NO: 1570797 - DNA, 15 bp, Homo sapiens
ttagctattagtatt

SEQ ID NO: 1570798 - DNA, 15 bp, Homo sapiens
attagctattagtat

SEQ ID NO: 1570799 - DNA, 15 bp, Homo sapiens
tattagctattagta

SEQ ID NO: 1570800 - DNA, 15 bp, Homo sapiens
ctattagctattagt

SEQ ID NO: 1570801 - DNA, 15 bp, Homo sapiens
gctattagctattag

SEQ ID NO: 1570802 - DNA, 15 bp, Homo sapiens
agctattagctatta

SEQ ID NO: 1570803 - DNA, 15 bp, Homo sapiens
gagctattagctatt

SEQ ID NO: 1570804 - DNA, 15 bp, Homo sapiens
ggagctattagctat

SEQ ID NO: 1570805 - DNA, 15 bp, Homo sapiens
tggagctattagcta

SEQ ID NO: 1570806 - DNA, 15 bp, Homo sapiens
ctggagctattagct

SEQ ID NO: 1570807 - DNA, 15 bp, Homo sapiens
actggagctattagc

SEQ ID NO: 1570808 - DNA, 15 bp, Homo sapiens
cactggagctattag

SEQ ID NO: 1570809 - DNA, 15 bp, Homo sapiens
ccactggagctatta

SEQ ID NO: 1570810 - DNA, 15 bp, Homo sapiens
cccactggagctatt

SEQ ID NO: 1570811 - DNA, 15 bp, Homo sapiens
tcccactggagctat

SEQ ID NO: 1570812 - DNA, 15 bp, Homo sapiens
gtcccactggagcta

SEQ ID NO: 1570813 - DNA, 15 bp, Homo sapiens
agtcccactggagct

SEQ ID NO: 1570814 - DNA, 15 bp, Homo sapiens
cagtcccactggagc

SEQ ID NO: 1570815 - DNA, 15 bp, Homo sapiens
tcagtcccactggag

SEQ ID NO: 1570816 - DNA, 15 bp, Homo sapiens
ctcagtcccactgga

SEQ ID NO: 1570817 - DNA, 15 bp, Homo sapiens
tctcagtcccactgg

SEQ ID NO: 1570818 - DNA, 15 bp, Homo sapiens
atctcagtcccactg

SEQ ID NO: 1570819 - DNA, 15 bp, Homo sapiens
tatctcagtcccact

SEQ ID NO: 1570820 - DNA, 15 bp, Homo sapiens
ttatctcagtcccac

SEQ ID NO: 1570821 - DNA, 15 bp, Homo sapiens
tttatctcagtccca

SEQ ID NO: 1570822 - DNA, 15 bp, Homo sapiens
gtttatctcagtccc

SEQ ID NO: 1570823 - DNA, 15 bp, Homo sapiens
tgtttatctcagtcc

SEQ ID NO: 1570824 - DNA, 15 bp, Homo sapiens
ttgtttatctcagtc

SEQ ID NO: 1570825 - DNA, 15 bp, Homo sapiens
cttgtttatctcagt

SEQ ID NO: 1570826 - DNA, 15 bp, Homo sapiens
ccttgtttatctcag

SEQ ID NO: 1570827 - DNA, 15 bp, Homo sapiens
accttgtttatctca

SEQ ID NO: 1570828 - DNA, 15 bp, Homo sapiens
caccttgtttatctc

SEQ ID NO: 1570829 - DNA, 15 bp, Homo sapiens
ccaccttgtttatct

SEQ ID NO: 1570830 - DNA, 15 bp, Homo sapiens
cccaccttgtttatc

SEQ ID NO: 1570831 - DNA, 15 bp, Homo sapiens
tcccaccttgtttat

SEQ ID NO: 1570832 - DNA, 15 bp, Homo sapiens
ctcccaccttgttta

SEQ ID NO: 1570833 - DNA, 15 bp, Homo sapiens
tctcccaccttgttt

SEQ ID NO: 1570834 - DNA, 15 bp, Homo sapiens
ttctcccaccttgtt

SEQ ID NO: 1570835 - DNA, 15 bp, Homo sapiens
tttctcccaccttgt

SEQ ID NO: 1570836 - DNA, 15 bp, Homo sapiens
atttctcccaccttg

SEQ ID NO: 1570837 - DNA, 15 bp, Homo sapiens
catttctcccacctt

SEQ ID NO: 1570838 - DNA, 15 bp, Homo sapiens
ccatttctcccacct

SEQ ID NO: 1570839 - DNA, 15 bp, Homo sapiens
gccatttctcccacc

SEQ ID NO: 1570840 - DNA, 15 bp, Homo sapiens
tgccatttctcccac

SEQ ID NO: 1570841 - DNA, 15 bp, Homo sapiens
ttgccatttctccca

SEQ ID NO: 1570842 - DNA, 15 bp, Homo sapiens
tttgccatttctccc

SEQ ID NO: 1570843 - DNA, 15 bp, Homo sapiens
gtttgccatttctcc

SEQ ID NO: 1570844 - DNA, 15 bp, Homo sapiens
ggtttgccatttctc

SEQ ID NO: 1570845 - DNA, 15 bp, Homo sapiens
aggtttgccatttct

SEQ ID NO: 1570846 - DNA, 15 bp, Homo sapiens
taggtttgccatttc

SEQ ID NO: 1570847 - DNA, 15 bp, Homo sapiens
gtaggtttgccattt

SEQ ID NO: 1570848 - DNA, 15 bp, Homo sapiens
tgtaggtttgccatt

SEQ ID NO: 1570849 - DNA, 15 bp, Homo sapiens
ctgtaggtttgccat

SEQ ID NO: 1570850 - DNA, 15 bp, Homo sapiens
tctgtaggtttgcca

SEQ ID NO: 1570851 - DNA, 15 bp, Homo sapiens
ttctgtaggtttgcc

SEQ ID NO: 1570852 - DNA, 15 bp, Homo sapiens
gttctgtaggtttgc

SEQ ID NO: 1570853 - DNA, 15 bp, Homo sapiens
agttctgtaggtttg

SEQ ID NO: 1570854 - DNA, 15 bp, Homo sapiens
gagttctgtaggttt

SEQ ID NO: 1570855 - DNA, 15 bp, Homo sapiens
agagttctgtaggtt

SEQ ID NO: 1570856 - DNA, 15 bp, Homo sapiens
cagagttctgtaggt

SEQ ID NO: 1570857 - DNA, 15 bp, Homo sapiens
ccagagttctgtagg

SEQ ID NO: 1570858 - DNA, 15 bp, Homo sapiens
tccagagttctgtag

SEQ ID NO: 1570859 - DNA, 15 bp, Homo sapiens
gtccagagttctgta

SEQ ID NO: 1570860 - DNA, 15 bp, Homo sapiens
agtccagagttctgt

SEQ ID NO: 1570861 - DNA, 15 bp, Homo sapiens
aagtccagagttctg

SEQ ID NO: 1570862 - DNA, 15 bp, Homo sapiens
taagtccagagttct

SEQ ID NO: 1570863 - DNA, 15 bp, Homo sapiens
ataagtccagagttc

SEQ ID NO: 1570864 - DNA, 15 bp, Homo sapiens
aataagtccagagtt

SEQ ID NO: 1570865 - DNA, 15 bp, Homo sapiens
gaataagtccagagt

SEQ ID NO: 1570866 - DNA, 15 bp, Homo sapiens
tgaataagtccagag

SEQ ID NO: 1570867 - DNA, 15 bp, Homo sapiens
ctgaataagtccaga

SEQ ID NO: 1570868 - DNA, 15 bp, Homo sapiens
actgaataagtccag

SEQ ID NO: 1570869 - DNA, 15 bp, Homo sapiens
cactgaataagtcca

SEQ ID NO: 1570870 - DNA, 15 bp, Homo sapiens
acactgaataagtcc

SEQ ID NO: 1570871 - DNA, 15 bp, Homo sapiens
gacactgaataagtc

SEQ ID NO: 1570872 - DNA, 15 bp, Homo sapiens
tgacactgaataagt

SEQ ID NO: 1570873 - DNA, 15 bp, Homo sapiens
atgacactgaataag

SEQ ID NO: 1570874 - DNA, 15 bp, Homo sapiens
tatgacactgaataa

SEQ ID NO: 1570875 - DNA, 15 bp, Homo sapiens
ctatgacactgaata

SEQ ID NO: 1570876 - DNA, 15 bp, Homo sapiens
actatgacactgaat

SEQ ID NO: 1570877 - DNA, 15 bp, Homo sapiens
cactatgacactgaa

SEQ ID NO: 1570878 - DNA, 15 bp, Homo sapiens
tcactatgacactga

SEQ ID NO: 1570879 - DNA, 15 bp, Homo sapiens
ttcactatgacactg

SEQ ID NO: 1570880 - DNA, 15 bp, Homo sapiens
attcactatgacact

SEQ ID NO: 1570881 - DNA, 15 bp, Homo sapiens
cattcactatgacac

SEQ ID NO: 1570882 - DNA, 15 bp, Homo sapiens
ccattcactatgaca

SEQ ID NO: 1570883 - DNA, 15 bp, Homo sapiens
accattcactatgac

SEQ ID NO: 1570884 - DNA, 15 bp, Homo sapiens
aaccattcactatga

SEQ ID NO: 1570885 - DNA, 15 bp, Homo sapiens
aaaccattcactatg

SEQ ID NO: 1570886 - DNA, 15 bp, Homo sapiens
gaaaccattcactat

SEQ ID NO: 1570887 - DNA, 15 bp, Homo sapiens
tgaaaccattcacta

SEQ ID NO: 1570888 - DNA, 15 bp, Homo sapiens
atgaaaccattcact

SEQ ID NO: 1570889 - DNA, 15 bp, Homo sapiens
tatgaaaccattcac

SEQ ID NO: 1570890 - DNA, 15 bp, Homo sapiens
gtatgaaaccattca

SEQ ID NO: 1570891 - DNA, 15 bp, Homo sapiens
tgtatgaaaccattc

SEQ ID NO: 1570892 - DNA, 15 bp, Homo sapiens
ttgtatgaaaccatt

SEQ ID NO: 1570893 - DNA, 15 bp, Homo sapiens
gttgtatgaaaccat

SEQ ID NO: 1570894 - DNA, 15 bp, Homo sapiens
agttgtatgaaacca

SEQ ID NO: 1570895 - DNA, 15 bp, Homo sapiens
gagttgtatgaaacc

SEQ ID NO: 1570896 - DNA, 15 bp, Homo sapiens
agagttgtatgaaac

SEQ ID NO: 1570897 - DNA, 15 bp, Homo sapiens
cagagttgtatgaaa

SEQ ID NO: 1570898 - DNA, 15 bp, Homo sapiens
ccagagttgtatgaa

SEQ ID NO: 1570899 - DNA, 15 bp, Homo sapiens
accagagttgtatga

SEQ ID NO: 1570900 - DNA, 15 bp, Homo sapiens
aaccagagttgtatg

SEQ ID NO: 1570901 - DNA, 15 bp, Homo sapiens
caaccagagttgtat

SEQ ID NO: 1570902 - DNA, 15 bp, Homo sapiens
tcaaccagagttgta

SEQ ID NO: 1570903 - DNA, 15 bp, Homo sapiens
gtcaaccagagttgt

SEQ ID NO: 1570904 - DNA, 15 bp, Homo sapiens
ggtcaaccagagttg

SEQ ID NO: 1570905 - DNA, 15 bp, Homo sapiens
gggtcaaccagagtt

SEQ ID NO: 1570906 - DNA, 15 bp, Homo sapiens
agggtcaaccagagt

SEQ ID NO: 1570907 - DNA, 15 bp, Homo sapiens
cagggtcaaccagag

SEQ ID NO: 1570908 - DNA, 15 bp, Homo sapiens
ccagggtcaaccaga

SEQ ID NO: 1570909 - DNA, 15 bp, Homo sapiens
tccagggtcaaccag

SEQ ID NO: 1570910 - DNA, 15 bp, Homo sapiens
ctccagggtcaacca

SEQ ID NO: 1570911 - DNA, 15 bp, Homo sapiens
cctccagggtcaacc

SEQ ID NO: 1570912 - DNA, 15 bp, Homo sapiens
acctccagggtcaac

SEQ ID NO: 1570913 - DNA, 15 bp, Homo sapiens
cacctccagggtcaa

SEQ ID NO: 1570914 - DNA, 15 bp, Homo sapiens
gcacctccagggtca

SEQ ID NO: 1570915 - DNA, 15 bp, Homo sapiens
agcacctccagggtc

SEQ ID NO: 1570916 - DNA, 15 bp, Homo sapiens
tagcacctccagggt

SEQ ID NO: 1570917 - DNA, 15 bp, Homo sapiens
atagcacctccaggg

SEQ ID NO: 1570918 - DNA, 15 bp, Homo sapiens
aatagcacctccagg

SEQ ID NO: 1570919 - DNA, 15 bp, Homo sapiens
gaatagcacctccag

SEQ ID NO: 1570920 - DNA, 15 bp, Homo sapiens
tgaatagcacctcca

SEQ ID NO: 1570921 - DNA, 15 bp, Homo sapiens
atgaatagcacctcc

SEQ ID NO: 1570922 - DNA, 15 bp, Homo sapiens
aatgaatagcacctc

SEQ ID NO: 1570923 - DNA, 15 bp, Homo sapiens
taatgaatagcacct

SEQ ID NO: 1570924 - DNA, 15 bp, Homo sapiens
ataatgaatagcacc

SEQ ID NO: 1570925 - DNA, 15 bp, Homo sapiens
tataatgaatagcac

SEQ ID NO: 1570926 - DNA, 15 bp, Homo sapiens
ctataatgaatagca

SEQ ID NO: 1570927 - DNA, 15 bp, Homo sapiens
tctataatgaatagc

SEQ ID NO: 1570928 - DNA, 15 bp, Homo sapiens
ttctataatgaatag

SEQ ID NO: 1570929 - DNA, 15 bp, Homo sapiens
gttctataatgaata

SEQ ID NO: 1570930 - DNA, 15 bp, Homo sapiens
agttctataatgaat

SEQ ID NO: 1570931 - DNA, 15 bp, Homo sapiens
aagttctataatgaa

SEQ ID NO: 1570932 - DNA, 15 bp, Homo sapiens
taagttctataatga

SEQ ID NO: 1570933 - DNA, 15 bp, Homo sapiens
ttaagttctataatg

SEQ ID NO: 1570934 - DNA, 15 bp, Homo sapiens
tttaagttctataat

SEQ ID NO: 1570935 - DNA, 15 bp, Homo sapiens
gtttaagttctataa

SEQ ID NO: 1570936 - DNA, 15 bp, Homo sapiens
agtttaagttctata

SEQ ID NO: 1570937 - DNA, 15 bp, Homo sapiens
tagtttaagttctat

SEQ ID NO: 1570938 - DNA, 15 bp, Homo sapiens
atagtttaagttcta

SEQ ID NO: 1570939 - DNA, 15 bp, Homo sapiens
aatagtttaagttct

SEQ ID NO: 1570940 - DNA, 15 bp, Homo sapiens
caatagtttaagttc

SEQ ID NO: 1570941 - DNA, 15 bp, Homo sapiens
acaatagtttaagtt

SEQ ID NO: 1570942 - DNA, 15 bp, Homo sapiens
cacaatagtttaagt

SEQ ID NO: 1570943 - DNA, 15 bp, Homo sapiens
acacaatagtttaag

SEQ ID NO: 1570944 - DNA, 15 bp, Homo sapiens
cacacaatagtttaa

SEQ ID NO: 1570945 - DNA, 15 bp, Homo sapiens
acacacaatagttta

SEQ ID NO: 1570946 - DNA, 15 bp, Homo sapiens
cacacacaatagttt

SEQ ID NO: 1570947 - DNA, 15 bp, Homo sapiens
acacacacaatagtt

SEQ ID NO: 1570948 - DNA, 15 bp, Homo sapiens
aacacacacaatagt

SEQ ID NO: 1570949 - DNA, 15 bp, Homo sapiens
taacacacacaatag

SEQ ID NO: 1570950 - DNA, 15 bp, Homo sapiens
ataacacacacaata

SEQ ID NO: 1570951 - DNA, 15 bp, Homo sapiens
aataacacacacaat

SEQ ID NO: 1570952 - DNA, 15 bp, Homo sapiens
taataacacacacaa

SEQ ID NO: 1570953 - DNA, 15 bp, Homo sapiens
ataataacacacaca

SEQ ID NO: 1570954 - DNA, 15 bp, Homo sapiens
cataataacacacac

SEQ ID NO: 1570955 - DNA, 15 bp, Homo sapiens
tcataataacacaca

SEQ ID NO: 1570956 - DNA, 15 bp, Homo sapiens
gtcataataacacac

SEQ ID NO: 1570957 - DNA, 15 bp, Homo sapiens
tgtcataataacaca

SEQ ID NO: 1570958 - DNA, 15 bp, Homo sapiens
ctgtcataataacac

SEQ ID NO: 1570959 - DNA, 15 bp, Homo sapiens
actgtcataataaca

SEQ ID NO: 1570960 - DNA, 15 bp, Homo sapiens
cactgtcataataac

SEQ ID NO: 1570961 - DNA, 15 bp, Homo sapiens
tcactgtcataataa

SEQ ID NO: 1570962 - DNA, 15 bp, Homo sapiens
ctcactgtcataata

SEQ ID NO: 1570963 - DNA, 15 bp, Homo sapiens
actcactgtcataat

SEQ ID NO: 1570964 - DNA, 15 bp, Homo sapiens
tactcactgtcataa

SEQ ID NO: 1570965 - DNA, 15 bp, Homo sapiens
ttactcactgtcata

SEQ ID NO: 1570966 - DNA, 15 bp, Homo sapiens
attactcactgtcat

SEQ ID NO: 1570967 - DNA, 15 bp, Homo sapiens
cattactcactgtca

SEQ ID NO: 1570968 - DNA, 15 bp, Homo sapiens
ttcattactcactgt

SEQ ID NO: 1570969 - DNA, 15 bp, Homo sapiens
cttcattactcactg

SEQ ID NO: 1570970 - DNA, 15 bp, Homo sapiens
ccttcattactcact

SEQ ID NO: 1570971 - DNA, 15 bp, Homo sapiens
tccttcattactcac

SEQ ID NO: 1570972 - DNA, 15 bp, Homo sapiens
ttccttcattactca

SEQ ID NO: 1570973 - DNA, 15 bp, Homo sapiens
tttccttcattactc

SEQ ID NO: 1570974 - DNA, 15 bp, Homo sapiens
ctttccttcattact

SEQ ID NO: 1570975 - DNA, 15 bp, Homo sapiens
gctttccttcattac

SEQ ID NO: 1570976 - DNA, 15 bp, Homo sapiens
agctttccttcatta

SEQ ID NO: 1570977 - DNA, 15 bp, Homo sapiens
aagctttccttcatt

SEQ ID NO: 1570978 - DNA, 15 bp, Homo sapiens
aaagctttccttcat

SEQ ID NO: 1570979 - DNA, 15 bp, Homo sapiens
aaaagctttccttca

SEQ ID NO: 1570980 - DNA, 15 bp, Homo sapiens
caaaagctttccttc

SEQ ID NO: 1570981 - DNA, 15 bp, Homo sapiens
acaaaagctttcctt

SEQ ID NO: 1570982 - DNA, 15 bp, Homo sapiens
aacaaaagctttcct

SEQ ID NO: 1570983 - DNA, 15 bp, Homo sapiens
taacaaaagctttcc

SEQ ID NO: 1570984 - DNA, 15 bp, Homo sapiens
ataacaaaagctttc

SEQ ID NO: 1570985 - DNA, 15 bp, Homo sapiens
cataacaaaagcttt

SEQ ID NO: 1570986 - DNA, 15 bp, Homo sapiens
ccataacaaaagctt

SEQ ID NO: 1570987 - DNA, 15 bp, Homo sapiens
accataacaaaagct

SEQ ID NO: 1570988 - DNA, 15 bp, Homo sapiens
aaccataacaaaagc

SEQ ID NO: 1570989 - DNA, 15 bp, Homo sapiens
caaccataacaaaag

SEQ ID NO: 1570990 - DNA, 15 bp, Homo sapiens
acaaccataacaaaa

SEQ ID NO: 1570991 - DNA, 15 bp, Homo sapiens
cacaaccataacaaa

SEQ ID NO: 1570992 - DNA, 15 bp, Homo sapiens
acacaaccataacaa

SEQ ID NO: 1570993 - DNA, 15 bp, Homo sapiens
aacacaaccataaca

SEQ ID NO: 1570994 - DNA, 15 bp, Homo sapiens
aaacacaaccataac

SEQ ID NO: 1570995 - DNA, 15 bp, Homo sapiens
aaaacacaaccataa

SEQ ID NO: 1570996 - DNA, 15 bp, Homo sapiens
gaaaacacaaccata

SEQ ID NO: 1570997 - DNA, 15 bp, Homo sapiens
agaaaacacaaccat

SEQ ID NO: 1570998 - DNA, 15 bp, Homo sapiens
tagaaaacacaacca

SEQ ID NO: 1570999 - DNA, 15 bp, Homo sapiens
atagaaaacacaacc

SEQ ID NO: 1571000 - DNA, 15 bp, Homo sapiens
aatagaaaacacaac

SEQ ID NO: 1571001 - DNA, 15 bp, Homo sapiens
aaatagaaaacacaa

SEQ ID NO: 1571002 - DNA, 15 bp, Homo sapiens
taaatagaaaacaca

SEQ ID NO: 1571003 - DNA, 15 bp, Homo sapiens
ctaaatagaaaacac

SEQ ID NO: 1571004 - DNA, 15 bp, Homo sapiens
tctaaatagaaaaca

SEQ ID NO: 1571005 - DNA, 15 bp, Homo sapiens
ttctaaatagaaaac

SEQ ID NO: 1571006 - DNA, 15 bp, Homo sapiens
tttctaaatagaaaa

SEQ ID NO: 1571007 - DNA, 15 bp, Homo sapiens
ctttctaaatagaaa

SEQ ID NO: 1571008 - DNA, 15 bp, Homo sapiens
tctttctaaatagaa

SEQ ID NO: 1571009 - DNA, 15 bp, Homo sapiens
atctttctaaataga

SEQ ID NO: 1571010 - DNA, 15 bp, Homo sapiens
tatctttctaaatag

SEQ ID NO: 1571011 - DNA, 15 bp, Homo sapiens
atatctttctaaata

SEQ ID NO: 1571012 - DNA, 15 bp, Homo sapiens
aatatctttctaaat

SEQ ID NO: 1571013 - DNA, 15 bp, Homo sapiens
gaatatctttctaaa

SEQ ID NO: 1571014 - DNA, 15 bp, Homo sapiens
agaatatctttctaa

SEQ ID NO: 1571015 - DNA, 15 bp, Homo sapiens
aagaatatctttcta

SEQ ID NO: 1571016 - DNA, 15 bp, Homo sapiens
gaagaatatctttct

SEQ ID NO: 1571017 - DNA, 15 bp, Homo sapiens
agaagaatatctttc

SEQ ID NO: 1571018 - DNA, 15 bp, Homo sapiens
tagaagaatatcttt

SEQ ID NO: 1571019 - DNA, 15 bp, Homo sapiens
ttagaagaatatctt

SEQ ID NO: 1571020 - DNA, 15 bp, Homo sapiens
tttagaagaatatct

SEQ ID NO: 1571021 - DNA, 15 bp, Homo sapiens
ttttagaagaatatc

SEQ ID NO: 1571022 - DNA, 15 bp, Homo sapiens
attttagaagaatat

SEQ ID NO: 1571023 - DNA, 15 bp, Homo sapiens
cattttagaagaata

SEQ ID NO: 1571024 - DNA, 15 bp, Homo sapiens
ccattttagaagaat

SEQ ID NO: 1571025 - DNA, 15 bp, Homo sapiens
accattttagaagaa

SEQ ID NO: 1571026 - DNA, 15 bp, Homo sapiens
aaccattttagaaga

SEQ ID NO: 1571027 - DNA, 15 bp, Homo sapiens
taaccattttagaag

SEQ ID NO: 1571028 - DNA, 15 bp, Homo sapiens
ttaaccattttagaa

SEQ ID NO: 1571029 - DNA, 15 bp, Homo sapiens
tttaaccattttaga

SEQ ID NO: 1571030 - DNA, 15 bp, Homo sapiens
ttttaaccattttag

SEQ ID NO: 1571031 - DNA, 15 bp, Homo sapiens
tttttaaccatttta

SEQ ID NO: 1571032 - DNA, 15 bp, Homo sapiens
atttttaaccatttt

SEQ ID NO: 1571033 - DNA, 15 bp, Homo sapiens
ttatttttaaccatt

SEQ ID NO: 1571034 - DNA, 15 bp, Homo sapiens
tttatttttaaccat

SEQ ID NO: 1571035 - DNA, 15 bp, Homo sapiens
ttttatttttaacca

SEQ ID NO: 1571036 - DNA, 15 bp, Homo sapiens
cttttatttttaacc

SEQ ID NO: 1571037 - DNA, 15 bp, Homo sapiens
tcttttatttttaac

SEQ ID NO: 1571038 - DNA, 15 bp, Homo sapiens
ttcttttatttttaa

SEQ ID NO: 1571039 - DNA, 15 bp, Homo sapiens
tttcttttattttta

SEQ ID NO: 1571040 - DNA, 15 bp, Homo sapiens
gtttcttttattttt

SEQ ID NO: 1571041 - DNA, 15 bp, Homo sapiens
agtttcttttatttt

SEQ ID NO: 1571042 - DNA, 15 bp, Homo sapiens
aagtttcttttattt

SEQ ID NO: 1571043 - DNA, 15 bp, Homo sapiens
aaagtttcttttatt

SEQ ID NO: 1571044 - DNA, 15 bp, Homo sapiens
taaagtttcttttat

SEQ ID NO: 1571045 - DNA, 15 bp, Homo sapiens
ctaaagtttctttta

SEQ ID NO: 1571046 - DNA, 15 bp, Homo sapiens
actaaagtttctttt

SEQ ID NO: 1571047 - DNA, 15 bp, Homo sapiens
aactaaagtttcttt

SEQ ID NO: 1571048 - DNA, 15 bp, Homo sapiens
caactaaagtttctt

SEQ ID NO: 1571049 - DNA, 15 bp, Homo sapiens
acaactaaagtttct

SEQ ID NO: 1571050 - DNA, 15 bp, Homo sapiens
aacaactaaagtttc

SEQ ID NO: 1571051 - DNA, 15 bp, Homo sapiens
aaacaactaaagttt

SEQ ID NO: 1571052 - DNA, 15 bp, Homo sapiens
taaacaactaaagtt

SEQ ID NO: 1571053 - DNA, 15 bp, Homo sapiens
ttaaacaactaaagt

SEQ ID NO: 1571054 - DNA, 15 bp, Homo sapiens
gttaaacaactaaag

SEQ ID NO: 1571055 - DNA, 15 bp, Homo sapiens
cgttaaacaactaaa

SEQ ID NO: 1571056 - DNA, 15 bp, Homo sapiens
acgttaaacaactaa

SEQ ID NO: 1571057 - DNA, 15 bp, Homo sapiens
aacgttaaacaacta

SEQ ID NO: 1571058 - DNA, 15 bp, Homo sapiens
gaacgttaaacaact

SEQ ID NO: 1571059 - DNA, 15 bp, Homo sapiens
ggaacgttaaacaac

SEQ ID NO: 1571060 - DNA, 15 bp, Homo sapiens
tggaacgttaaacaa

SEQ ID NO: 1571061 - DNA, 15 bp, Homo sapiens
atggaacgttaaaca

SEQ ID NO: 1571062 - DNA, 15 bp, Homo sapiens
aatggaacgttaaac

SEQ ID NO: 1571063 - DNA, 15 bp, Homo sapiens
taatggaacgttaaa

SEQ ID NO: 1571064 - DNA, 15 bp, Homo sapiens
ataatggaacgttaa

SEQ ID NO: 1571065 - DNA, 15 bp, Homo sapiens
gataatggaacgtta

SEQ ID NO: 1571066 - DNA, 15 bp, Homo sapiens
agataatggaacgtt

SEQ ID NO: 1571067 - DNA, 15 bp, Homo sapiens
cagataatggaacgt

SEQ ID NO: 1571068 - DNA, 15 bp, Homo sapiens
tcagataatggaacg

SEQ ID NO: 1571069 - DNA, 15 bp, Homo sapiens
ttcagataatggaac

SEQ ID NO: 1571070 - DNA, 15 bp, Homo sapiens
tttcagataatggaa

SEQ ID NO: 1571071 - DNA, 15 bp, Homo sapiens
ttttcagataatgga

SEQ ID NO: 1571072 - DNA, 15 bp, Homo sapiens
cttttcagataatgg

SEQ ID NO: 1571073 - DNA, 15 bp, Homo sapiens
acttttcagataatg

SEQ ID NO: 1571074 - DNA, 15 bp, Homo sapiens
aacttttcagataat

SEQ ID NO: 1571075 - DNA, 15 bp, Homo sapiens
gaacttttcagataa

SEQ ID NO: 1571076 - DNA, 15 bp, Homo sapiens
tgaacttttcagata

SEQ ID NO: 1571077 - DNA, 15 bp, Homo sapiens
gtgaacttttcagat

SEQ ID NO: 1571078 - DNA, 15 bp, Homo sapiens
agtgaacttttcaga

SEQ ID NO: 1571079 - DNA, 15 bp, Homo sapiens
aagtgaacttttcag

SEQ ID NO: 1571080 - DNA, 15 bp, Homo sapiens
taagtgaacttttca

SEQ ID NO: 1571081 - DNA, 15 bp, Homo sapiens
ataagtgaacttttc

SEQ ID NO: 1571082 - DNA, 15 bp, Homo sapiens
cataagtgaactttt

SEQ ID NO: 1571083 - DNA, 15 bp, Homo sapiens
tcataagtgaacttt

SEQ ID NO: 1571084 - DNA, 15 bp, Homo sapiens
ttcataagtgaactt

SEQ ID NO: 1571085 - DNA, 15 bp, Homo sapiens
tttcataagtgaact

SEQ ID NO: 1571086 - DNA, 15 bp, Homo sapiens
gtttcataagtgaac

SEQ ID NO: 1571087 - DNA, 15 bp, Homo sapiens
tgtttcataagtgaa

SEQ ID NO: 1571088 - DNA, 15 bp, Homo sapiens
gtgtttcataagtga

SEQ ID NO: 1571089 - DNA, 15 bp, Homo sapiens
tgtgtttcataagtg

SEQ ID NO: 1571090 - DNA, 15 bp, Homo sapiens
atgtgtttcataagt

SEQ ID NO: 1571091 - DNA, 15 bp, Homo sapiens
gatgtgtttcataag

SEQ ID NO: 1571092 - DNA, 15 bp, Homo sapiens
tgatgtgtttcataa

SEQ ID NO: 1571093 - DNA, 15 bp, Homo sapiens
atgatgtgtttcata

SEQ ID NO: 1571094 - DNA, 15 bp, Homo sapiens
aatgatgtgtttcat

SEQ ID NO: 1571095 - DNA, 15 bp, Homo sapiens
caatgatgtgtttca

SEQ ID NO: 1571096 - DNA, 15 bp, Homo sapiens
acaatgatgtgtttc

SEQ ID NO: 1571097 - DNA, 15 bp, Homo sapiens
tacaatgatgtgttt

SEQ ID NO: 1571098 - DNA, 15 bp, Homo sapiens
atacaatgatgtgtt

SEQ ID NO: 1571099 - DNA, 15 bp, Homo sapiens
tatacaatgatgtgt

SEQ ID NO: 1571100 - DNA, 15 bp, Homo sapiens
ttatacaatgatgtg

SEQ ID NO: 1571101 - DNA, 15 bp, Homo sapiens
cttatacaatgatgt

SEQ ID NO: 1571102 - DNA, 15 bp, Homo sapiens
ccttatacaatgatg

SEQ ID NO: 1571103 - DNA, 15 bp, Homo sapiens
tccttatacaatgat

SEQ ID NO: 1571104 - DNA, 15 bp, Homo sapiens
ttccttatacaatga

SEQ ID NO: 1571105 - DNA, 15 bp, Homo sapiens
tttccttatacaatg

SEQ ID NO: 1571106 - DNA, 15 bp, Homo sapiens
ttttccttatacaat

SEQ ID NO: 1571107 - DNA, 15 bp, Homo sapiens
cttttccttatacaa

SEQ ID NO: 1571108 - DNA, 15 bp, Homo sapiens
acttttccttataca

SEQ ID NO: 1571109 - DNA, 15 bp, Homo sapiens
aacttttccttatac

SEQ ID NO: 1571110 - DNA, 15 bp, Homo sapiens
taacttttccttata

SEQ ID NO: 1571111 - DNA, 15 bp, Homo sapiens
gtaacttttccttat

SEQ ID NO: 1571112 - DNA, 15 bp, Homo sapiens
agtaacttttcctta

SEQ ID NO: 1571113 - DNA, 15 bp, Homo sapiens
tagtaacttttcctt

SEQ ID NO: 1571114 - DNA, 15 bp, Homo sapiens
atagtaacttttcct

SEQ ID NO: 1571115 - DNA, 15 bp, Homo sapiens
tatagtaacttttcc

SEQ ID NO: 1571116 - DNA, 15 bp, Homo sapiens
atatagtaacttttc

SEQ ID NO: 1571117 - DNA, 15 bp, Homo sapiens
tatatagtaactttt

SEQ ID NO: 1571118 - DNA, 15 bp, Homo sapiens
atatatagtaacttt

SEQ ID NO: 1571119 - DNA, 15 bp, Homo sapiens
tatatatagtaactt

SEQ ID NO: 1571120 - DNA, 15 bp, Homo sapiens
ctatatatagtaact

SEQ ID NO: 1571121 - DNA, 15 bp, Homo sapiens
actatatatagtaac

SEQ ID NO: 1571122 - DNA, 15 bp, Homo sapiens
aactatatatagtaa

SEQ ID NO: 1571123 - DNA, 15 bp, Homo sapiens
gaactatatatagta

SEQ ID NO: 1571124 - DNA, 15 bp, Homo sapiens
agaactatatatagt

SEQ ID NO: 1571125 - DNA, 15 bp, Homo sapiens
aagaactatatatag

SEQ ID NO: 1571126 - DNA, 15 bp, Homo sapiens
aaagaactatatata

SEQ ID NO: 1571127 - DNA, 15 bp, Homo sapiens
aaaagaactatatat

SEQ ID NO: 1571128 - DNA, 15 bp, Homo sapiens
taaaagaactatata

SEQ ID NO: 1571129 - DNA, 15 bp, Homo sapiens
ttaaaagaactatat

SEQ ID NO: 1571130 - DNA, 15 bp, Homo sapiens
cttaaaagaactata

SEQ ID NO: 1571131 - DNA, 15 bp, Homo sapiens
acttaaaagaactat

SEQ ID NO: 1571132 - DNA, 15 bp, Homo sapiens
cacttaaaagaacta

SEQ ID NO: 1571133 - DNA, 15 bp, Homo sapiens
acacttaaaagaact

SEQ ID NO: 1571134 - DNA, 15 bp, Homo sapiens
aacacttaaaagaac

SEQ ID NO: 1571135 - DNA, 15 bp, Homo sapiens
taacacttaaaagaa

SEQ ID NO: 1571136 - DNA, 15 bp, Homo sapiens
ctaacacttaaaaga

SEQ ID NO: 1571137 - DNA, 15 bp, Homo sapiens
gctaacacttaaaag

SEQ ID NO: 1571138 - DNA, 15 bp, Homo sapiens
tgctaacacttaaaa

SEQ ID NO: 1571139 - DNA, 15 bp, Homo sapiens
atgctaacacttaaa

SEQ ID NO: 1571140 - DNA, 15 bp, Homo sapiens
tatgctaacacttaa

SEQ ID NO: 1571141 - DNA, 15 bp, Homo sapiens
ttatgctaacactta

SEQ ID NO: 1571142 - DNA, 15 bp, Homo sapiens
tttatgctaacactt

SEQ ID NO: 1571143 - DNA, 15 bp, Homo sapiens
atttatgctaacact

SEQ ID NO: 1571144 - DNA, 15 bp, Homo sapiens
aatttatgctaacac

SEQ ID NO: 1571145 - DNA, 15 bp, Homo sapiens
aaatttatgctaaca

SEQ ID NO: 1571146 - DNA, 15 bp, Homo sapiens
taaatttatgctaac

SEQ ID NO: 1571147 - DNA, 15 bp, Homo sapiens
ttaaatttatgctaa

SEQ ID NO: 1571148 - DNA, 15 bp, Homo sapiens
tttaaatttatgcta

SEQ ID NO: 1571149 - DNA, 15 bp, Homo sapiens
tttttaaatttatgc

SEQ ID NO: 1571150 - DNA, 15 bp, Homo sapiens
ttttttaaatttatg

SEQ ID NO: 1571151 - DNA, 15 bp, Homo sapiens
attttttttaaattt

SEQ ID NO: 1571152 - DNA, 15 bp, Homo sapiens
gattttttttaaatt

SEQ ID NO: 1571153 - DNA, 15 bp, Homo sapiens
ggattttttttaaat

SEQ ID NO: 1571154 - DNA, 15 bp, Homo sapiens
tggattttttttaaa

SEQ ID NO: 1571155 - DNA, 15 bp, Homo sapiens
ttggattttttttaa

SEQ ID NO: 1571156 - DNA, 15 bp, Homo sapiens
attggatttttttta

SEQ ID NO: 1571157 - DNA, 15 bp, Homo sapiens
cattggatttttttt

SEQ ID NO: 1571158 - DNA, 15 bp, Homo sapiens
tcattggattttttt

SEQ ID NO: 1571159 - DNA, 15 bp, Homo sapiens
gtcattggatttttt

SEQ ID NO: 1571160 - DNA, 15 bp, Homo sapiens
tgtcattggattttt

SEQ ID NO: 1571161 - DNA, 15 bp, Homo sapiens
atgtcattggatttt

SEQ ID NO: 1571162 - DNA, 15 bp, Homo sapiens
tatgtcattggattt

SEQ ID NO: 1571163 - DNA, 15 bp, Homo sapiens
ttatgtcattggatt

SEQ ID NO: 1571164 - DNA, 15 bp, Homo sapiens
gttatgtcattggat

SEQ ID NO: 1571165 - DNA, 15 bp, Homo sapiens
agttatgtcattgga

SEQ ID NO: 1571166 - DNA, 15 bp, Homo sapiens
tagttatgtcattgg

SEQ ID NO: 1571167 - DNA, 15 bp, Homo sapiens
atagttatgtcattg

SEQ ID NO: 1571168 - DNA, 15 bp, Homo sapiens
aatagttatgtcatt

SEQ ID NO: 1571169 - DNA, 15 bp, Homo sapiens
gaatagttatgtcat

SEQ ID NO: 1571170 - DNA, 15 bp, Homo sapiens
agaatagttatgtca

SEQ ID NO: 1571171 - DNA, 15 bp, Homo sapiens
cagaatagttatgtc

SEQ ID NO: 1571172 - DNA, 15 bp, Homo sapiens
acagaatagttatgt

SEQ ID NO: 1571173 - DNA, 15 bp, Homo sapiens
cacagaatagttatg

SEQ ID NO: 1571174 - DNA, 15 bp, Homo sapiens
tcacagaatagttat

SEQ ID NO: 1571175 - DNA, 15 bp, Homo sapiens
atcacagaatagtta

SEQ ID NO: 1571176 - DNA, 15 bp, Homo sapiens
tatcacagaatagtt

SEQ ID NO: 1571177 - DNA, 15 bp, Homo sapiens
atatcacagaatagt

SEQ ID NO: 1571178 - DNA, 15 bp, Homo sapiens
aatatcacagaatag

SEQ ID NO: 1571179 - DNA, 15 bp, Homo sapiens
gaatatcacagaata

SEQ ID NO: 1571180 - DNA, 15 bp, Homo sapiens
tgaatatcacagaat

SEQ ID NO: 1571181 - DNA, 15 bp, Homo sapiens
ttgaatatcacagaa

SEQ ID NO: 1571182 - DNA, 15 bp, Homo sapiens
cttgaatatcacaga

SEQ ID NO: 1571183 - DNA, 15 bp, Homo sapiens
tcttgaatatcacag

SEQ ID NO: 1571184 - DNA, 15 bp, Homo sapiens
atcttgaatatcaca

SEQ ID NO: 1571185 - DNA, 15 bp, Homo sapiens
gatcttgaatatcac

SEQ ID NO: 1571186 - DNA, 15 bp, Homo sapiens
tgatcttgaatatca

SEQ ID NO: 1571187 - DNA, 15 bp, Homo sapiens
ttgatcttgaatatc

SEQ ID NO: 1571188 - DNA, 15 bp, Homo sapiens
attgatcttgaatat

SEQ ID NO: 1571189 - DNA, 15 bp, Homo sapiens
tattgatcttgaata

SEQ ID NO: 1571190 - DNA, 15 bp, Homo sapiens
ttattgatcttgaat

SEQ ID NO: 1571191 - DNA, 15 bp, Homo sapiens
tttattgatcttgaa

SEQ ID NO: 1571192 - DNA, 15 bp, Homo sapiens
atttattgatcttga

SEQ ID NO: 1571193 - DNA, 15 bp, Homo sapiens
tatttattgatcttg

SEQ ID NO: 1571194 - DNA, 15 bp, Homo sapiens
ctatttattgatctt

SEQ ID NO: 1571195 - DNA, 15 bp, Homo sapiens
tctatttattgatct

SEQ ID NO: 1571196 - DNA, 15 bp, Homo sapiens
ttctatttattgatc

SEQ ID NO: 1571197 - DNA, 15 bp, Homo sapiens
attctatttattgat

SEQ ID NO: 1571198 - DNA, 15 bp, Homo sapiens
aattctatttattga

SEQ ID NO: 1571199 - DNA, 15 bp, Homo sapiens
gaattctatttattg

SEQ ID NO: 1571200 - DNA, 15 bp, Homo sapiens
ggaattctatttatt

SEQ ID NO: 1571201 - DNA, 15 bp, Homo sapiens
gggaattctatttat

SEQ ID NO: 1571202 - DNA, 15 bp, Homo sapiens
tgggaattctattta

SEQ ID NO: 1571203 - DNA, 15 bp, Homo sapiens
ctgggaattctattt

SEQ ID NO: 1571204 - DNA, 15 bp, Homo sapiens
actgggaattctatt

SEQ ID NO: 1571205 - DNA, 15 bp, Homo sapiens
aactgggaattctat

SEQ ID NO: 1571206 - DNA, 15 bp, Homo sapiens
aaactgggaattcta

SEQ ID NO: 1571207 - DNA, 15 bp, Homo sapiens
taaactgggaattct

SEQ ID NO: 1571208 - DNA, 15 bp, Homo sapiens
ataaactgggaattc

SEQ ID NO: 1571209 - DNA, 15 bp, Homo sapiens
cataaactgggaatt

SEQ ID NO: 1571210 - DNA, 15 bp, Homo sapiens
tcataaactgggaat

SEQ ID NO: 1571211 - DNA, 15 bp, Homo sapiens
atcataaactgggaa

SEQ ID NO: 1571212 - DNA, 15 bp, Homo sapiens
gatcataaactggga

SEQ ID NO: 1571213 - DNA, 15 bp, Homo sapiens
agatcataaactggg

SEQ ID NO: 1571214 - DNA, 15 bp, Homo sapiens
gagatcataaactgg

SEQ ID NO: 1571215 - DNA, 15 bp, Homo sapiens
tgagatcataaactg

SEQ ID NO: 1571216 - DNA, 15 bp, Homo sapiens
ctgagatcataaact

SEQ ID NO: 1571217 - DNA, 15 bp, Homo sapiens
actgagatcataaac

SEQ ID NO: 1571218 - DNA, 15 bp, Homo sapiens
aactgagatcataaa

SEQ ID NO: 1571219 - DNA, 15 bp, Homo sapiens
aaactgagatcataa

SEQ ID NO: 1571220 - DNA, 15 bp, Homo sapiens
aaaactgagatcata

SEQ ID NO: 1571221 - DNA, 15 bp, Homo sapiens
caaaactgagatcat

SEQ ID NO: 1571222 - DNA, 15 bp, Homo sapiens
gcaaaactgagatca

SEQ ID NO: 1571223 - DNA, 15 bp, Homo sapiens
tgcaaaactgagatc

SEQ ID NO: 1571224 - DNA, 15 bp, Homo sapiens
atgcaaaactgagat

SEQ ID NO: 1571225 - DNA, 15 bp, Homo sapiens
catgcaaaactgaga

SEQ ID NO: 1571226 - DNA, 15 bp, Homo sapiens
tcatgcaaaactgag

SEQ ID NO: 1571227 - DNA, 15 bp, Homo sapiens
ttcatgcaaaactga

SEQ ID NO: 1571228 - DNA, 15 bp, Homo sapiens
gttcatgcaaaactg

SEQ ID NO: 1571229 - DNA, 15 bp, Homo sapiens
tgttcatgcaaaact

SEQ ID NO: 1571230 - DNA, 15 bp, Homo sapiens
atgttcatgcaaaac

SEQ ID NO: 1571231 - DNA, 15 bp, Homo sapiens
aatgttcatgcaaaa

SEQ ID NO: 1571232 - DNA, 15 bp, Homo sapiens
aaatgttcatgcaaa

SEQ ID NO: 1571233 - DNA, 15 bp, Homo sapiens
gaaatgttcatgcaa

SEQ ID NO: 1571234 - DNA, 15 bp, Homo sapiens
tgaaatgttcatgca

SEQ ID NO: 1571235 - DNA, 15 bp, Homo sapiens
ttgaaatgttcatgc

SEQ ID NO: 1571236 - DNA, 15 bp, Homo sapiens
gttgaaatgttcatg

SEQ ID NO: 1571237 - DNA, 15 bp, Homo sapiens
agttgaaatgttcat

SEQ ID NO: 1571238 - DNA, 15 bp, Homo sapiens
aagttgaaatgttca

SEQ ID NO: 1571239 - DNA, 15 bp, Homo sapiens
taagttgaaatgttc

SEQ ID NO: 1571240 - DNA, 15 bp, Homo sapiens
ataagttgaaatgtt

SEQ ID NO: 1571241 - DNA, 15 bp, Homo sapiens
cataagttgaaatgt

SEQ ID NO: 1571242 - DNA, 15 bp, Homo sapiens
acataagttgaaatg

SEQ ID NO: 1571243 - DNA, 15 bp, Homo sapiens
tacataagttgaaat

SEQ ID NO: 1571244 - DNA, 15 bp, Homo sapiens
ttacataagttgaaa

SEQ ID NO: 1571245 - DNA, 15 bp, Homo sapiens
attacataagttgaa

SEQ ID NO: 1571246 - DNA, 15 bp, Homo sapiens
aattacataagttga

SEQ ID NO: 1571247 - DNA, 15 bp, Homo sapiens
aaattacataagttg

SEQ ID NO: 1571248 - DNA, 15 bp, Homo sapiens
aaaattacataagtt

SEQ ID NO: 1571249 - DNA, 15 bp, Homo sapiens
caaaattacataagt

SEQ ID NO: 1571250 - DNA, 15 bp, Homo sapiens
tcaaaattacataag

SEQ ID NO: 1571251 - DNA, 15 bp, Homo sapiens
ttcaaaattacataa

SEQ ID NO: 1571252 - DNA, 15 bp, Homo sapiens
cttcaaaattacata

SEQ ID NO: 1571253 - DNA, 15 bp, Homo sapiens
ccttcaaaattacat

SEQ ID NO: 1571254 - DNA, 15 bp, Homo sapiens
accttcaaaattaca

SEQ ID NO: 1571255 - DNA, 15 bp, Homo sapiens
aaccttcaaaattac

SEQ ID NO: 1571256 - DNA, 15 bp, Homo sapiens
gaaccttcaaaatta

SEQ ID NO: 1571257 - DNA, 15 bp, Homo sapiens
agaaccttcaaaatt

SEQ ID NO: 1571258 - DNA, 15 bp, Homo sapiens
cagaaccttcaaaat

SEQ ID NO: 1571259 - DNA, 15 bp, Homo sapiens
tcagaaccttcaaaa

SEQ ID NO: 1571260 - DNA, 15 bp, Homo sapiens
ttcagaaccttcaaa

SEQ ID NO: 1571261 - DNA, 15 bp, Homo sapiens
cttcagaaccttcaa

SEQ ID NO: 1571262 - DNA, 15 bp, Homo sapiens
tcttcagaaccttca

SEQ ID NO: 1571263 - DNA, 15 bp, Homo sapiens
ttcttcagaaccttc

SEQ ID NO: 1571264 - DNA, 15 bp, Homo sapiens
attcttcagaacctt

SEQ ID NO: 1571265 - DNA, 15 bp, Homo sapiens
aattcttcagaacct

SEQ ID NO: 1571266 - DNA, 15 bp, Homo sapiens
aaattcttcagaacc

SEQ ID NO: 1571267 - DNA, 15 bp, Homo sapiens
caaattcttcagaac

SEQ ID NO: 1571268 - DNA, 15 bp, Homo sapiens
ccaaattcttcagaa

SEQ ID NO: 1571269 - DNA, 15 bp, Homo sapiens
gccaaattcttcaga

SEQ ID NO: 1571270 - DNA, 15 bp, Homo sapiens
tgccaaattcttcag

SEQ ID NO: 1571271 - DNA, 15 bp, Homo sapiens
ttgccaaattcttca

SEQ ID NO: 1571272 - DNA, 15 bp, Homo sapiens
attgccaaattcttc

SEQ ID NO: 1571273 - DNA, 15 bp, Homo sapiens
tattgccaaattctt

SEQ ID NO: 1571274 - DNA, 15 bp, Homo sapiens
gtattgccaaattct

SEQ ID NO: 1571275 - DNA, 15 bp, Homo sapiens
ggtattgccaaattc

SEQ ID NO: 1571276 - DNA, 15 bp, Homo sapiens
gggtattgccaaatt

SEQ ID NO: 1571277 - DNA, 15 bp, Homo sapiens
tgggtattgccaaat

SEQ ID NO: 1571278 - DNA, 15 bp, Homo sapiens
ttgggtattgccaaa

SEQ ID NO: 1571279 - DNA, 15 bp, Homo sapiens
attgggtattgccaa

SEQ ID NO: 1571280 - DNA, 15 bp, Homo sapiens
aattgggtattgcca

SEQ ID NO: 1571281 - DNA, 15 bp, Homo sapiens
gaattgggtattgcc

SEQ ID NO: 1571282 - DNA, 15 bp, Homo sapiens
tgaattgggtattgc

SEQ ID NO: 1571283 - DNA, 15 bp, Homo sapiens
atgaattgggtattg

SEQ ID NO: 1571284 - DNA, 15 bp, Homo sapiens
tatgaattgggtatt

SEQ ID NO: 1571285 - DNA, 15 bp, Homo sapiens
atatgaattgggtat

SEQ ID NO: 1571286 - DNA, 15 bp, Homo sapiens
aatatgaattgggta

SEQ ID NO: 1571287 - DNA, 15 bp, Homo sapiens
taatatgaattgggt

SEQ ID NO: 1571288 - DNA, 15 bp, Homo sapiens
ataatatgaattggg

SEQ ID NO: 1571289 - DNA, 15 bp, Homo sapiens
tataatatgaattgg

SEQ ID NO: 1571290 - DNA, 15 bp, Homo sapiens
ttataatatgaattg

SEQ ID NO: 1571291 - DNA, 15 bp, Homo sapiens
tttataatatgaatt

SEQ ID NO: 1571292 - DNA, 15 bp, Homo sapiens
gtttataatatgaat

SEQ ID NO: 1571293 - DNA, 15 bp, Homo sapiens
agtttataatatgaa

SEQ ID NO: 1571294 - DNA, 15 bp, Homo sapiens
tagtttataatatga

SEQ ID NO: 1571295 - DNA, 15 bp, Homo sapiens
atagtttataatatg

SEQ ID NO: 1571296 - DNA, 15 bp, Homo sapiens
aatagtttataatat

SEQ ID NO: 1571297 - DNA, 15 bp, Homo sapiens
taatagtttataata

SEQ ID NO: 1571298 - DNA, 15 bp, Homo sapiens
ataatagtttataat

SEQ ID NO: 1571299 - DNA, 15 bp, Homo sapiens
cataatagtttataa

SEQ ID NO: 1571300 - DNA, 15 bp, Homo sapiens
acataatagtttata

SEQ ID NO: 1571301 - DNA, 15 bp, Homo sapiens
tacataatagtttat

SEQ ID NO: 1571302 - DNA, 15 bp, Homo sapiens
ttacataatagttta

SEQ ID NO: 1571303 - DNA, 15 bp, Homo sapiens
attacataatagttt

SEQ ID NO: 1571304 - DNA, 15 bp, Homo sapiens
aattacataatagtt

SEQ ID NO: 1571305 - DNA, 15 bp, Homo sapiens
taattacataatagt

SEQ ID NO: 1571306 - DNA, 15 bp, Homo sapiens
ttaattacataatag

SEQ ID NO: 1571307 - DNA, 15 bp, Homo sapiens
gttaattacataata

SEQ ID NO: 1571308 - DNA, 15 bp, Homo sapiens
agttaattacataat

SEQ ID NO: 1571309 - DNA, 15 bp, Homo sapiens
tagttaattacataa

SEQ ID NO: 1571310 - DNA, 15 bp, Homo sapiens
atagttaattacata

SEQ ID NO: 1571311 - DNA, 15 bp, Homo sapiens
tatagttaattacat

SEQ ID NO: 1571312 - DNA, 15 bp, Homo sapiens
atatagttaattaca

SEQ ID NO: 1571313 - DNA, 15 bp, Homo sapiens
aatatagttaattac

SEQ ID NO: 1571314 - DNA, 15 bp, Homo sapiens
gaatatagttaatta

SEQ ID NO: 1571315 - DNA, 15 bp, Homo sapiens
agaatatagttaatt

SEQ ID NO: 1571316 - DNA, 15 bp, Homo sapiens
tagaatatagttaat

SEQ ID NO: 1571317 - DNA, 15 bp, Homo sapiens
atagaatatagttaa

SEQ ID NO: 1571318 - DNA, 15 bp, Homo sapiens
aatagaatatagtta

SEQ ID NO: 1571319 - DNA, 15 bp, Homo sapiens
taatagaatatagtt

SEQ ID NO: 1571320 - DNA, 15 bp, Homo sapiens
ttaatagaatatagt

SEQ ID NO: 1571321 - DNA, 15 bp, Homo sapiens
tttaatagaatatag

SEQ ID NO: 1571322 - DNA, 15 bp, Homo sapiens
atttaatagaatata

SEQ ID NO: 1571323 - DNA, 15 bp, Homo sapiens
aatttaatagaatat

SEQ ID NO: 1571324 - DNA, 15 bp, Homo sapiens
gaatttaatagaata

SEQ ID NO: 1571325 - DNA, 15 bp, Homo sapiens
agaatttaatagaat

SEQ ID NO: 1571326 - DNA, 15 bp, Homo sapiens
cagaatttaatagaa

SEQ ID NO: 1571327 - DNA, 15 bp, Homo sapiens
gcagaatttaataga

SEQ ID NO: 1571328 - DNA, 15 bp, Homo sapiens
agcagaatttaatag

SEQ ID NO: 1571329 - DNA, 15 bp, Homo sapiens
aagcagaatttaata

SEQ ID NO: 1571330 - DNA, 15 bp, Homo sapiens
taagcagaatttaat

SEQ ID NO: 1571331 - DNA, 15 bp, Homo sapiens
ttaagcagaatttaa

SEQ ID NO: 1571332 - DNA, 15 bp, Homo sapiens
gttaagcagaattta

SEQ ID NO: 1571333 - DNA, 15 bp, Homo sapiens
tgttaagcagaattt

SEQ ID NO: 1571334 - DNA, 15 bp, Homo sapiens
ttgttaagcagaatt

SEQ ID NO: 1571335 - DNA, 15 bp, Homo sapiens
gttgttaagcagaat

SEQ ID NO: 1571336 - DNA, 15 bp, Homo sapiens
tgttgttaagcagaa

SEQ ID NO: 1571337 - DNA, 15 bp, Homo sapiens
ttgttgttaagcaga

SEQ ID NO: 1571338 - DNA, 15 bp, Homo sapiens
tttgttgttaagcag

SEQ ID NO: 1571339 - DNA, 15 bp, Homo sapiens
ctttgttgttaagca

SEQ ID NO: 1571340 - DNA, 15 bp, Homo sapiens
gctttgttgttaagc

SEQ ID NO: 1571341 - DNA, 15 bp, Homo sapiens
agctttgttgttaag

SEQ ID NO: 1571342 - DNA, 15 bp, Homo sapiens
aagctttgttgttaa

SEQ ID NO: 1571343 - DNA, 15 bp, Homo sapiens
aaagctttgttgtta

SEQ ID NO: 1571344 - DNA, 15 bp, Homo sapiens
caaagctttgttgtt

SEQ ID NO: 1571345 - DNA, 15 bp, Homo sapiens
ccaaagctttgttgt

SEQ ID NO: 1571346 - DNA, 15 bp, Homo sapiens
accaaagctttgttg

SEQ ID NO: 1571347 - DNA, 15 bp, Homo sapiens
gaccaaagctttgtt

SEQ ID NO: 1571348 - DNA, 15 bp, Homo sapiens
tgaccaaagctttgt

SEQ ID NO: 1571349 - DNA, 15 bp, Homo sapiens
ctgaccaaagctttg

SEQ ID NO: 1571350 - DNA, 15 bp, Homo sapiens
gctgaccaaagcttt

SEQ ID NO: 1571351 - DNA, 15 bp, Homo sapiens
tgctgaccaaagctt

SEQ ID NO: 1571352 - DNA, 15 bp, Homo sapiens
ctgctgaccaaagct

SEQ ID NO: 1571353 - DNA, 15 bp, Homo sapiens
tctgctgaccaaagc

SEQ ID NO: 1571354 - DNA, 15 bp, Homo sapiens
ctctgctgaccaaag

SEQ ID NO: 1571355 - DNA, 15 bp, Homo sapiens
cctctgctgaccaaa

SEQ ID NO: 1571356 - DNA, 15 bp, Homo sapiens
tcctctgctgaccaa

SEQ ID NO: 1571357 - DNA, 15 bp, Homo sapiens
ttcctctgctgacca

SEQ ID NO: 1571358 - DNA, 15 bp, Homo sapiens
tttcctctgctgacc

SEQ ID NO: 1571359 - DNA, 15 bp, Homo sapiens
gtttcctctgctgac

SEQ ID NO: 1571360 - DNA, 15 bp, Homo sapiens
tgtttcctctgctga

SEQ ID NO: 1571361 - DNA, 15 bp, Homo sapiens
ttgtttcctctgctg

SEQ ID NO: 1571362 - DNA, 15 bp, Homo sapiens
tttgtttcctctgct

SEQ ID NO: 1571363 - DNA, 15 bp, Homo sapiens
atttgtttcctctgc

SEQ ID NO: 1571364 - DNA, 15 bp, Homo sapiens
aatttgtttcctctg

SEQ ID NO: 1571365 - DNA, 15 bp, Homo sapiens
aaatttgtttcctct

SEQ ID NO: 1571366 - DNA, 15 bp, Homo sapiens
aaaatttgtttcctc

SEQ ID NO: 1571367 - DNA, 15 bp, Homo sapiens
taaaatttgtttcct

SEQ ID NO: 1571368 - DNA, 15 bp, Homo sapiens
ataaaatttgtttcc

SEQ ID NO: 1571369 - DNA, 15 bp, Homo sapiens
aataaaatttgtttc

SEQ ID NO: 1571370 - DNA, 15 bp, Homo sapiens
aaataaaatttgttt

SEQ ID NO: 1571371 - DNA, 15 bp, Homo sapiens
gaaataaaatttgtt

SEQ ID NO: 1571372 - DNA, 15 bp, Homo sapiens
ggaaataaaatttgt

SEQ ID NO: 1571373 - DNA, 15 bp, Homo sapiens
tggaaataaaatttg

SEQ ID NO: 1571374 - DNA, 15 bp, Homo sapiens
gtggaaataaaattt

SEQ ID NO: 1571375 - DNA, 15 bp, Homo sapiens
tgtggaaataaaatt

SEQ ID NO: 1571376 - DNA, 15 bp, Homo sapiens
atgtggaaataaaat

SEQ ID NO: 1571377 - DNA, 15 bp, Homo sapiens
aatgtggaaataaaa

SEQ ID NO: 1571378 - DNA, 15 bp, Homo sapiens
aaatgtggaaataaa

SEQ ID NO: 1571379 - DNA, 15 bp, Homo sapiens
caaatgtggaaataa

SEQ ID NO: 1571380 - DNA, 15 bp, Homo sapiens
acaaatgtggaaata

SEQ ID NO: 1571381 - DNA, 15 bp, Homo sapiens
gacaaatgtggaaat

SEQ ID NO: 1571382 - DNA, 15 bp, Homo sapiens
tgacaaatgtggaaa

SEQ ID NO: 1571383 - DNA, 15 bp, Homo sapiens
ctgacaaatgtggaa

SEQ ID NO: 1571384 - DNA, 15 bp, Homo sapiens
actgacaaatgtgga

SEQ ID NO: 1571385 - DNA, 15 bp, Homo sapiens
gactgacaaatgtgg

SEQ ID NO: 1571386 - DNA, 15 bp, Homo sapiens
cgactgacaaatgtg

SEQ ID NO: 1571387 - DNA, 15 bp, Homo sapiens
gcgactgacaaatgt

SEQ ID NO: 1571388 - DNA, 15 bp, Homo sapiens
ggcgactgacaaatg

SEQ ID NO: 1571389 - DNA, 15 bp, Homo sapiens
aggcgactgacaaat

SEQ ID NO: 1571390 - DNA, 15 bp, Homo sapiens
aaggcgactgacaaa

SEQ ID NO: 1571391 - DNA, 15 bp, Homo sapiens
taaggcgactgacaa

SEQ ID NO: 1571392 - DNA, 15 bp, Homo sapiens
gtaaggcgactgaca

SEQ ID NO: 1571393 - DNA, 15 bp, Homo sapiens
tgtaaggcgactgac

SEQ ID NO: 1571394 - DNA, 15 bp, Homo sapiens
ttgtaaggcgactga

SEQ ID NO: 1571395 - DNA, 15 bp, Homo sapiens
cttgtaaggcgactg

SEQ ID NO: 1571396 - DNA, 15 bp, Homo sapiens
acttgtaaggcgact

SEQ ID NO: 1571397 - DNA, 15 bp, Homo sapiens
tacttgtaaggcgac

SEQ ID NO: 1571398 - DNA, 15 bp, Homo sapiens
ttacttgtaaggcga

SEQ ID NO: 1571399 - DNA, 15 bp, Homo sapiens
attacttgtaaggcg

SEQ ID NO: 1571400 - DNA, 15 bp, Homo sapiens
gattacttgtaaggc

SEQ ID NO: 1571401 - DNA, 15 bp, Homo sapiens
ggattacttgtaagg

SEQ ID NO: 1571402 - DNA, 15 bp, Homo sapiens
aggattacttgtaag

SEQ ID NO: 1571403 - DNA, 15 bp, Homo sapiens
aaggattacttgtaa

SEQ ID NO: 1571404 - DNA, 15 bp, Homo sapiens
aaaggattacttgta

SEQ ID NO: 1571405 - DNA, 15 bp, Homo sapiens
aaaaggattacttgt

SEQ ID NO: 1571406 - DNA, 15 bp, Homo sapiens
aaaaaggattacttg

SEQ ID NO: 1571407 - DNA, 15 bp, Homo sapiens
aaaaaaggattactt

SEQ ID NO: 1571408 - DNA, 15 bp, Homo sapiens
gaaaaaaggattact

SEQ ID NO: 1571409 - DNA, 15 bp, Homo sapiens
ggaaaaaaggattac

SEQ ID NO: 1571410 - DNA, 15 bp, Homo sapiens
gggaaaaaaggatta

SEQ ID NO: 1571411 - DNA, 15 bp, Homo sapiens
ggggaaaaaaggatt

SEQ ID NO: 1571412 - DNA, 15 bp, Homo sapiens
gggggaaaaaaggat

SEQ ID NO: 1571413 - DNA, 15 bp, Homo sapiens
tgggggaaaaaagga

SEQ ID NO: 1571414 - DNA, 15 bp, Homo sapiens
ctgggggaaaaaagg

SEQ ID NO: 1571415 - DNA, 15 bp, Homo sapiens
tctgggggaaaaaag

SEQ ID NO: 1571416 - DNA, 15 bp, Homo sapiens
ttctgggggaaaaaa

SEQ ID NO: 1571417 - DNA, 15 bp, Homo sapiens
cttctgggggaaaaa

SEQ ID NO: 1571418 - DNA, 15 bp, Homo sapiens
acttctgggggaaaa

SEQ ID NO: 1571419 - DNA, 15 bp, Homo sapiens
tacttctgggggaaa

SEQ ID NO: 1571420 - DNA, 15 bp, Homo sapiens
ttacttctgggggaa

SEQ ID NO: 1571421 - DNA, 15 bp, Homo sapiens
cttacttctggggga

SEQ ID NO: 1571422 - DNA, 15 bp, Homo sapiens
tcttacttctggggg

SEQ ID NO: 1571423 - DNA, 15 bp, Homo sapiens
ctcttacttctgggg

SEQ ID NO: 1571424 - DNA, 15 bp, Homo sapiens
tctcttacttctggg

SEQ ID NO: 1571425 - DNA, 15 bp, Homo sapiens
ttctcttacttctgg

SEQ ID NO: 1571426 - DNA, 15 bp, Homo sapiens
cttctcttacttctg

SEQ ID NO: 1571427 - DNA, 15 bp, Homo sapiens
acttctcttacttct

SEQ ID NO: 1571428 - DNA, 15 bp, Homo sapiens
gacttctcttacttc

SEQ ID NO: 1571429 - DNA, 15 bp, Homo sapiens
agacttctcttactt

SEQ ID NO: 1571430 - DNA, 15 bp, Homo sapiens
tagacttctcttact

SEQ ID NO: 1571431 - DNA, 15 bp, Homo sapiens
ttagacttctcttac

SEQ ID NO: 1571432 - DNA, 15 bp, Homo sapiens
gttagacttctctta

SEQ ID NO: 1571433 - DNA, 15 bp, Homo sapiens
agttagacttctctt

SEQ ID NO: 1571434 - DNA, 15 bp, Homo sapiens
aagttagacttctct

SEQ ID NO: 1571435 - DNA, 15 bp, Homo sapiens
aaagttagacttctc

SEQ ID NO: 1571436 - DNA, 15 bp, Homo sapiens
aaaagttagacttct

SEQ ID NO: 1571437 - DNA, 15 bp, Homo sapiens
aaaaagttagacttc

SEQ ID NO: 1571438 - DNA, 15 bp, Homo sapiens
aaaaaagttagactt

SEQ ID NO: 1571439 - DNA, 15 bp, Homo sapiens
aaaaaaagttagact

SEQ ID NO: 1571440 - DNA, 15 bp, Homo sapiens
gaaaaaaagttagac

SEQ ID NO: 1571441 - DNA, 15 bp, Homo sapiens
ggaaaaaaagttaga

SEQ ID NO: 1571442 - DNA, 15 bp, Homo sapiens
gggaaaaaaagttag

SEQ ID NO: 1571443 - DNA, 15 bp, Homo sapiens
tgggaaaaaaagtta

SEQ ID NO: 1571444 - DNA, 15 bp, Homo sapiens
atgggaaaaaaagtt

SEQ ID NO: 1571445 - DNA, 15 bp, Homo sapiens
catgggaaaaaaagt

SEQ ID NO: 1571446 - DNA, 15 bp, Homo sapiens
acatgggaaaaaaag

SEQ ID NO: 1571447 - DNA, 15 bp, Homo sapiens
tacatgggaaaaaaa

SEQ ID NO: 1571448 - DNA, 15 bp, Homo sapiens
ttacatgggaaaaaa

SEQ ID NO: 1571449 - DNA, 15 bp, Homo sapiens
gttacatgggaaaaa

SEQ ID NO: 1571450 - DNA, 15 bp, Homo sapiens
tgttacatgggaaaa

SEQ ID NO: 1571451 - DNA, 15 bp, Homo sapiens
ttgttacatgggaaa

SEQ ID NO: 1571452 - DNA, 15 bp, Homo sapiens
cttgttacatgggaa

SEQ ID NO: 1571453 - DNA, 15 bp, Homo sapiens
ccttgttacatggga

SEQ ID NO: 1571454 - DNA, 15 bp, Homo sapiens
accttgttacatggg

SEQ ID NO: 1571455 - DNA, 15 bp, Homo sapiens
aaccttgttacatgg

SEQ ID NO: 1571456 - DNA, 15 bp, Homo sapiens
aaaccttgttacatg

SEQ ID NO: 1571457 - DNA, 15 bp, Homo sapiens
caaaccttgttacat

SEQ ID NO: 1571458 - DNA, 15 bp, Homo sapiens
acaaaccttgttaca

SEQ ID NO: 1571459 - DNA, 15 bp, Homo sapiens
aacaaaccttgttac

SEQ ID NO: 1571460 - DNA, 15 bp, Homo sapiens
aaacaaaccttgtta

SEQ ID NO: 1571461 - DNA, 15 bp, Homo sapiens
caaacaaaccttgtt

SEQ ID NO: 1571462 - DNA, 15 bp, Homo sapiens
gcaaacaaaccttgt

SEQ ID NO: 1571463 - DNA, 15 bp, Homo sapiens
ggcaaacaaaccttg

SEQ ID NO: 1571464 - DNA, 15 bp, Homo sapiens
gggcaaacaaacctt

SEQ ID NO: 1571465 - DNA, 15 bp, Homo sapiens
agggcaaacaaacct

SEQ ID NO: 1571466 - DNA, 15 bp, Homo sapiens
gagggcaaacaaacc

SEQ ID NO: 1571467 - DNA, 15 bp, Homo sapiens
agagggcaaacaaac

SEQ ID NO: 1571468 - DNA, 15 bp, Homo sapiens
cagagggcaaacaaa

SEQ ID NO: 1571469 - DNA, 15 bp, Homo sapiens
gcagagggcaaacaa

SEQ ID NO: 1571470 - DNA, 15 bp, Homo sapiens
ggcagagggcaaaca

SEQ ID NO: 1571471 - DNA, 15 bp, Homo sapiens
tggcagagggcaaac

SEQ ID NO: 1571472 - DNA, 15 bp, Homo sapiens
gtggcagagggcaaa

SEQ ID NO: 1571473 - DNA, 15 bp, Homo sapiens
agtggcagagggcaa

SEQ ID NO: 1571474 - DNA, 15 bp, Homo sapiens
tagtggcagagggca

SEQ ID NO: 1571475 - DNA, 15 bp, Homo sapiens
ttagtggcagagggc

SEQ ID NO: 1571476 - DNA, 15 bp, Homo sapiens
gttagtggcagaggg

SEQ ID NO: 1571477 - DNA, 15 bp, Homo sapiens
agttagtggcagagg

SEQ ID NO: 1571478 - DNA, 15 bp, Homo sapiens
gagttagtggcagag

SEQ ID NO: 1571479 - DNA, 15 bp, Homo sapiens
agagttagtggcaga

SEQ ID NO: 1571480 - DNA, 15 bp, Homo sapiens
gagagttagtggcag

SEQ ID NO: 1571481 - DNA, 15 bp, Homo sapiens
agagagttagtggca

SEQ ID NO: 1571482 - DNA, 15 bp, Homo sapiens
tagagagttagtggc

SEQ ID NO: 1571483 - DNA, 15 bp, Homo sapiens
ctagagagttagtgg

SEQ ID NO: 1571484 - DNA, 15 bp, Homo sapiens
actagagagttagtg

SEQ ID NO: 1571485 - DNA, 15 bp, Homo sapiens
tactagagagttagt

SEQ ID NO: 1571486 - DNA, 15 bp, Homo sapiens
gtactagagagttag

SEQ ID NO: 1571487 - DNA, 15 bp, Homo sapiens
tgtactagagagtta

SEQ ID NO: 1571488 - DNA, 15 bp, Homo sapiens
ctgtactagagagtt

SEQ ID NO: 1571489 - DNA, 15 bp, Homo sapiens
actgtactagagagt

SEQ ID NO: 1571490 - DNA, 15 bp, Homo sapiens
cactgtactagagag

SEQ ID NO: 1571491 - DNA, 15 bp, Homo sapiens
acactgtactagaga

SEQ ID NO: 1571492 - DNA, 15 bp, Homo sapiens
aacactgtactagag

SEQ ID NO: 1571493 - DNA, 15 bp, Homo sapiens
aaacactgtactaga

SEQ ID NO: 1571494 - DNA, 15 bp, Homo sapiens
gaaacactgtactag

SEQ ID NO: 1571495 - DNA, 15 bp, Homo sapiens
agaaacactgtacta

SEQ ID NO: 1571496 - DNA, 15 bp, Homo sapiens
gagaaacactgtact

SEQ ID NO: 1571497 - DNA, 15 bp, Homo sapiens
ggagaaacactgtac

SEQ ID NO: 1571498 - DNA, 15 bp, Homo sapiens
tggagaaacactgta

SEQ ID NO: 1571499 - DNA, 15 bp, Homo sapiens
gtggagaaacactgt

SEQ ID NO: 1571500 - DNA, 15 bp, Homo sapiens
cgtggagaaacactg

SEQ ID NO: 1571501 - DNA, 15 bp, Homo sapiens
acgtggagaaacact

SEQ ID NO: 1571502 - DNA, 15 bp, Homo sapiens
cacgtggagaaacac

SEQ ID NO: 1571503 - DNA, 15 bp, Homo sapiens
acacgtggagaaaca

SEQ ID NO: 1571504 - DNA, 15 bp, Homo sapiens
cacacgtggagaaac

SEQ ID NO: 1571505 - DNA, 15 bp, Homo sapiens
tcacacgtggagaaa

SEQ ID NO: 1571506 - DNA, 15 bp, Homo sapiens
atcacacgtggagaa

SEQ ID NO: 1571507 - DNA, 15 bp, Homo sapiens
gatcacacgtggaga

SEQ ID NO: 1571508 - DNA, 15 bp, Homo sapiens
ggatcacacgtggag

SEQ ID NO: 1571509 - DNA, 15 bp, Homo sapiens
gggatcacacgtgga

SEQ ID NO: 1571510 - DNA, 15 bp, Homo sapiens
tgggatcacacgtgg

SEQ ID NO: 1571511 - DNA, 15 bp, Homo sapiens
ctgggatcacacgtg

SEQ ID NO: 1571512 - DNA, 15 bp, Homo sapiens
tctgggatcacacgt

SEQ ID NO: 1571513 - DNA, 15 bp, Homo sapiens
gtctgggatcacacg

SEQ ID NO: 1571514 - DNA, 15 bp, Homo sapiens
ggtctgggatcacac

SEQ ID NO: 1571515 - DNA, 15 bp, Homo sapiens
tggtctgggatcaca

SEQ ID NO: 1571516 - DNA, 15 bp, Homo sapiens
ctggtctgggatcac

SEQ ID NO: 1571517 - DNA, 15 bp, Homo sapiens
gctggtctgggatca

SEQ ID NO: 1571518 - DNA, 15 bp, Homo sapiens
tgctggtctgggatc

SEQ ID NO: 1571519 - DNA, 15 bp, Homo sapiens
ctgctggtctgggat

SEQ ID NO: 1571520 - DNA, 15 bp, Homo sapiens
gctgctggtctggga

SEQ ID NO: 1571521 - DNA, 15 bp, Homo sapiens
tgctgctggtctggg

SEQ ID NO: 1571522 - DNA, 15 bp, Homo sapiens
atgctgctggtctgg

SEQ ID NO: 1571523 - DNA, 15 bp, Homo sapiens
atgatgctgctggtc

SEQ ID NO: 1571524 - DNA, 15 bp, Homo sapiens
aatgatgctgctggt

SEQ ID NO: 1571525 - DNA, 15 bp, Homo sapiens
aaatgatgctgctgg

SEQ ID NO: 1571526 - DNA, 15 bp, Homo sapiens
caaatgatgctgctg

SEQ ID NO: 1571527 - DNA, 15 bp, Homo sapiens
ccaaatgatgctgct

SEQ ID NO: 1571528 - DNA, 15 bp, Homo sapiens
cccaaatgatgctgc

SEQ ID NO: 1571529 - DNA, 15 bp, Homo sapiens
tcccaaatgatgctg

SEQ ID NO: 1571530 - DNA, 15 bp, Homo sapiens
ctcccaaatgatgct

SEQ ID NO: 1571531 - DNA, 15 bp, Homo sapiens
gctcccaaatgatgc

SEQ ID NO: 1571532 - DNA, 15 bp, Homo sapiens
agctcccaaatgatg

SEQ ID NO: 1571533 - DNA, 15 bp, Homo sapiens
aagctcccaaatgat

SEQ ID NO: 1571534 - DNA, 15 bp, Homo sapiens
caagctcccaaatga

SEQ ID NO: 1571535 - DNA, 15 bp, Homo sapiens
acaagctcccaaatg

SEQ ID NO: 1571536 - DNA, 15 bp, Homo sapiens
aacaagctcccaaat

SEQ ID NO: 1571537 - DNA, 15 bp, Homo sapiens
taacaagctcccaaa

SEQ ID NO: 1571538 - DNA, 15 bp, Homo sapiens
ctaacaagctcccaa

SEQ ID NO: 1571539 - DNA, 15 bp, Homo sapiens
ctgcatttctaacaa

SEQ ID NO: 1571540 - DNA, 15 bp, Homo sapiens
tctgcatttctaaca

SEQ ID NO: 1571541 - DNA, 15 bp, Homo sapiens
atctgcatttctaac

SEQ ID NO: 1571542 - DNA, 15 bp, Homo sapiens
catctgcatttctaa

SEQ ID NO: 1571543 - DNA, 15 bp, Homo sapiens
gcatctgcatttcta

SEQ ID NO: 1571544 - DNA, 15 bp, Homo sapiens
agcatctgcatttct

SEQ ID NO: 1571545 - DNA, 15 bp, Homo sapiens
acagcatctgcattt

SEQ ID NO: 1571546 - DNA, 15 bp, Homo sapiens
tacagcatctgcatt

SEQ ID NO: 1571547 - DNA, 15 bp, Homo sapiens
ctacagcatctgcat

SEQ ID NO: 1571548 - DNA, 15 bp, Homo sapiens
actacagcatctgca

SEQ ID NO: 1571549 - DNA, 15 bp, Homo sapiens
aactacagcatctgc

SEQ ID NO: 1571550 - DNA, 15 bp, Homo sapiens
aaactacagcatctg

SEQ ID NO: 1571551 - DNA, 15 bp, Homo sapiens
gaaactacagcatct

SEQ ID NO: 1571552 - DNA, 15 bp, Homo sapiens
tgaaactacagcatc

SEQ ID NO: 1571553 - DNA, 15 bp, Homo sapiens
gtgaaactacagcat

SEQ ID NO: 1571554 - DNA, 15 bp, Homo sapiens
ggtgaaactacagca

SEQ ID NO: 1571555 - DNA, 15 bp, Homo sapiens
aggtgaaactacagc

SEQ ID NO: 1571556 - DNA, 15 bp, Homo sapiens
gaggtgaaactacag

SEQ ID NO: 1571557 - DNA, 15 bp, Homo sapiens
tgaggtgaaactaca

SEQ ID NO: 1571558 - DNA, 15 bp, Homo sapiens
ctgaggtgaaactac

SEQ ID NO: 1571559 - DNA, 15 bp, Homo sapiens
tctgaggtgaaacta

SEQ ID NO: 1571560 - DNA, 15 bp, Homo sapiens
atctgaggtgaaact

SEQ ID NO: 1571561 - DNA, 15 bp, Homo sapiens
gatctgaggtgaaac

SEQ ID NO: 1571562 - DNA, 15 bp, Homo sapiens
agatctgaggtgaaa

SEQ ID NO: 1571563 - DNA, 15 bp, Homo sapiens
cagatctgaggtgaa

SEQ ID NO: 1571564 - DNA, 15 bp, Homo sapiens
gcagatctgaggtga

SEQ ID NO: 1571565 - DNA, 15 bp, Homo sapiens
tgcagatctgaggtg

SEQ ID NO: 1571566 - DNA, 15 bp, Homo sapiens
gtgcagatctgaggt

SEQ ID NO: 1571567 - DNA, 15 bp, Homo sapiens
tgtgcagatctgagg

SEQ ID NO: 1571568 - DNA, 15 bp, Homo sapiens
ttgtgcagatctgag

SEQ ID NO: 1571569 - DNA, 15 bp, Homo sapiens
tttgtgcagatctga

SEQ ID NO: 1571570 - DNA, 15 bp, Homo sapiens
ttttgtgcagatctg

SEQ ID NO: 1571571 - DNA, 15 bp, Homo sapiens
tttttgtgcagatct

SEQ ID NO: 1571572 - DNA, 15 bp, Homo sapiens
ttttttgtgcagatc

SEQ ID NO: 1571573 - DNA, 15 bp, Homo sapiens
gttttttgtgcagat

SEQ ID NO: 1571574 - DNA, 15 bp, Homo sapiens
agttttttgtgcaga

SEQ ID NO: 1571575 - DNA, 15 bp, Homo sapiens
gagttttttgtgcag

SEQ ID NO: 1571576 - DNA, 15 bp, Homo sapiens
ggagttttttgtgca

SEQ ID NO: 1571577 - DNA, 15 bp, Homo sapiens
gggagttttttgtgc

SEQ ID NO: 1571578 - DNA, 15 bp, Homo sapiens
tgggagttttttgtg

SEQ ID NO: 1571579 - DNA, 15 bp, Homo sapiens
ttgggagttttttgt

SEQ ID NO: 1571580 - DNA, 15 bp, Homo sapiens
cttgggagttttttg

SEQ ID NO: 1571581 - DNA, 15 bp, Homo sapiens
acttgggagtttttt

SEQ ID NO: 1571582 - DNA, 15 bp, Homo sapiens
tacttgggagttttt

SEQ ID NO: 1571583 - DNA, 15 bp, Homo sapiens
ctacttgggagtttt

SEQ ID NO: 1571584 - DNA, 15 bp, Homo sapiens
tctacttgggagttt

SEQ ID NO: 1571585 - DNA, 15 bp, Homo sapiens
ctctacttgggagtt

SEQ ID NO: 1571586 - DNA, 15 bp, Homo sapiens
gctctacttgggagt

SEQ ID NO: 1571587 - DNA, 15 bp, Homo sapiens
ggctctacttgggag

SEQ ID NO: 1571588 - DNA, 15 bp, Homo sapiens
gggctctacttggga

SEQ ID NO: 1571589 - DNA, 15 bp, Homo sapiens
tgggctctacttggg

SEQ ID NO: 1571590 - DNA, 15 bp, Homo sapiens
ctgggctctacttgg

SEQ ID NO: 1571591 - DNA, 15 bp, Homo sapiens
gctgggctctacttg

SEQ ID NO: 1571592 - DNA, 15 bp, Homo sapiens
ggctgggctctactt

SEQ ID NO: 1571593 - DNA, 15 bp, Homo sapiens
tggctgggctctact

SEQ ID NO: 1571594 - DNA, 15 bp, Homo sapiens
ctggctgggctctac

SEQ ID NO: 1571595 - DNA, 15 bp, Homo sapiens
gctggctgggctcta

SEQ ID NO: 1571596 - DNA, 15 bp, Homo sapiens
tgctggctgggctct

SEQ ID NO: 1571597 - DNA, 15 bp, Homo sapiens
ctgctggctgggctc

SEQ ID NO: 1571598 - DNA, 15 bp, Homo sapiens
actgctggctgggct

SEQ ID NO: 1571599 - DNA, 15 bp, Homo sapiens
gactgctggctgggc

SEQ ID NO: 1571600 - DNA, 15 bp, Homo sapiens
tgactgctggctggg

SEQ ID NO: 1571601 - DNA, 15 bp, Homo sapiens
ctgactgctggctgg

SEQ ID NO: 1571602 - DNA, 15 bp, Homo sapiens
actgactgctggctg

SEQ ID NO: 1571603 - DNA, 15 bp, Homo sapiens
cactgactgctggct

SEQ ID NO: 1571604 - DNA, 15 bp, Homo sapiens
acactgactgctggc

SEQ ID NO: 1571605 - DNA, 15 bp, Homo sapiens
cacactgactgctgg

SEQ ID NO: 1571606 - DNA, 15 bp, Homo sapiens
acacactgactgctg

SEQ ID NO: 1571607 - DNA, 15 bp, Homo sapiens
aacacactgactgct

SEQ ID NO: 1571608 - DNA, 15 bp, Homo sapiens
taacacactgactgc

SEQ ID NO: 1571609 - DNA, 15 bp, Homo sapiens
ttaacacactgactg

SEQ ID NO: 1571610 - DNA, 15 bp, Homo sapiens
attaacacactgact

SEQ ID NO: 1571611 - DNA, 15 bp, Homo sapiens
tattaacacactgac

SEQ ID NO: 1571612 - DNA, 15 bp, Homo sapiens
ttattaacacactga

SEQ ID NO: 1571613 - DNA, 15 bp, Homo sapiens
tttattaacacactg

SEQ ID NO: 1571614 - DNA, 15 bp, Homo sapiens
atttattaacacact

SEQ ID NO: 1571615 - DNA, 15 bp, Homo sapiens
tatttattaacacac

SEQ ID NO: 1571616 - DNA, 15 bp, Homo sapiens
gtatttattaacaca

SEQ ID NO: 1571617 - DNA, 15 bp, Homo sapiens
ggtatttattaacac

SEQ ID NO: 1571618 - DNA, 15 bp, Homo sapiens
gggtatttattaaca

SEQ ID NO: 1571619 - DNA, 15 bp, Homo sapiens
ggggtatttattaac

SEQ ID NO: 1571620 - DNA, 15 bp, Homo sapiens
tggggtatttattaa

SEQ ID NO: 1571621 - DNA, 15 bp, Homo sapiens
ctggggtatttatta

SEQ ID NO: 1571622 - DNA, 15 bp, Homo sapiens
cctggggtatttatt

SEQ ID NO: 1571623 - DNA, 15 bp, Homo sapiens
gcctggggtatttat

SEQ ID NO: 1571624 - DNA, 15 bp, Homo sapiens
cgcctggggtattta

SEQ ID NO: 1571625 - DNA, 15 bp, Homo sapiens
tcgcctggggtattt

SEQ ID NO: 1571626 - DNA, 15 bp, Homo sapiens
atcgcctggggtatt

SEQ ID NO: 1571627 - DNA, 15 bp, Homo sapiens
aatcgcctggggtat

SEQ ID NO: 1571628 - DNA, 15 bp, Homo sapiens
gaatcgcctggggta

SEQ ID NO: 1571629 - DNA, 15 bp, Homo sapiens
agaatcgcctggggt

SEQ ID NO: 1571630 - DNA, 15 bp, Homo sapiens
aagaatcgcctgggg

SEQ ID NO: 1571631 - DNA, 15 bp, Homo sapiens
taagaatcgcctggg

SEQ ID NO: 1571632 - DNA, 15 bp, Homo sapiens
gtaagaatcgcctgg

SEQ ID NO: 1571633 - DNA, 15 bp, Homo sapiens
tgtaagaatcgcctg

SEQ ID NO: 1571634 - DNA, 15 bp, Homo sapiens
gtgtaagaatcgcct

SEQ ID NO: 1571635 - DNA, 15 bp, Homo sapiens
tgtgtaagaatcgcc

SEQ ID NO: 1571636 - DNA, 15 bp, Homo sapiens
gtgtgtaagaatcgc

SEQ ID NO: 1571637 - DNA, 15 bp, Homo sapiens
tgtgtgtaagaatcg

SEQ ID NO: 1571638 - DNA, 15 bp, Homo sapiens
gtgtgtgtaagaatc

SEQ ID NO: 1571639 - DNA, 15 bp, Homo sapiens
agtgtgtgtaagaat

SEQ ID NO: 1571640 - DNA, 15 bp, Homo sapiens
tagtgtgtgtaagaa

SEQ ID NO: 1571641 - DNA, 15 bp, Homo sapiens
ctagtgtgtgtaaga

SEQ ID NO: 1571642 - DNA, 15 bp, Homo sapiens
tctagtgtgtgtaag

SEQ ID NO: 1571643 - DNA, 15 bp, Homo sapiens
ttctagtgtgtgtaa

SEQ ID NO: 1571644 - DNA, 15 bp, Homo sapiens
attctagtgtgtgta

SEQ ID NO: 1571645 - DNA, 15 bp, Homo sapiens
aattctagtgtgtgt

SEQ ID NO: 1571646 - DNA, 15 bp, Homo sapiens
caattctagtgtgtg

SEQ ID NO: 1571647 - DNA, 15 bp, Homo sapiens
ccaattctagtgtgt

SEQ ID NO: 1571648 - DNA, 15 bp, Homo sapiens
tccaattctagtgtg

SEQ ID NO: 1571649 - DNA, 15 bp, Homo sapiens
ctccaattctagtgt

SEQ ID NO: 1571650 - DNA, 15 bp, Homo sapiens
tctccaattctagtg

SEQ ID NO: 1571651 - DNA, 15 bp, Homo sapiens
ttctccaattctagt

SEQ ID NO: 1571652 - DNA, 15 bp, Homo sapiens
cttctccaattctag

SEQ ID NO: 1571653 - DNA, 15 bp, Homo sapiens
gcttctccaattcta

SEQ ID NO: 1571654 - DNA, 15 bp, Homo sapiens
tgcttctccaattct

SEQ ID NO: 1571655 - DNA, 15 bp, Homo sapiens
gtgcttctccaattc

SEQ ID NO: 1571656 - DNA, 15 bp, Homo sapiens
agtgcttctccaatt

SEQ ID NO: 1571657 - DNA, 15 bp, Homo sapiens
cagtgcttctccaat

SEQ ID NO: 1571658 - DNA, 15 bp, Homo sapiens
gcagtgcttctccaa

SEQ ID NO: 1571659 - DNA, 15 bp, Homo sapiens
ggcagtgcttctcca

SEQ ID NO: 1571660 - DNA, 15 bp, Homo sapiens
gggcagtgcttctcc

SEQ ID NO: 1571661 - DNA, 15 bp, Homo sapiens
agggcagtgcttctc

SEQ ID NO: 1571662 - DNA, 15 bp, Homo sapiens
cagggcagtgcttct

SEQ ID NO: 1571663 - DNA, 15 bp, Homo sapiens
ccagggcagtgcttc

SEQ ID NO: 1571664 - DNA, 15 bp, Homo sapiens
cccagggcagtgctt

SEQ ID NO: 1571665 - DNA, 15 bp, Homo sapiens
ccccagggcagtgct

SEQ ID NO: 1571666 - DNA, 15 bp, Homo sapiens
accccagggcagtgc

SEQ ID NO: 1571667 - DNA, 15 bp, Homo sapiens
gaccccagggcagtg

SEQ ID NO: 1571668 - DNA, 15 bp, Homo sapiens
agaccccagggcagt

SEQ ID NO: 1571669 - DNA, 15 bp, Homo sapiens
cagaccccagggcag

SEQ ID NO: 1571670 - DNA, 15 bp, Homo sapiens
gcagaccccagggca

SEQ ID NO: 1571671 - DNA, 15 bp, Homo sapiens
agcagaccccagggc

SEQ ID NO: 1571672 - DNA, 15 bp, Homo sapiens
aagcagaccccaggg

SEQ ID NO: 1571673 - DNA, 15 bp, Homo sapiens
gaagcagaccccagg

SEQ ID NO: 1571674 - DNA, 15 bp, Homo sapiens
agaagcagaccccag

SEQ ID NO: 1571675 - DNA, 15 bp, Homo sapiens
cagaagcagacccca

SEQ ID NO: 1571676 - DNA, 15 bp, Homo sapiens
ccagaagcagacccc

SEQ ID NO: 1571677 - DNA, 15 bp, Homo sapiens
accagaagcagaccc

SEQ ID NO: 1571678 - DNA, 15 bp, Homo sapiens
gaccagaagcagacc

SEQ ID NO: 1571679 - DNA, 15 bp, Homo sapiens
agaccagaagcagac

SEQ ID NO: 1571680 - DNA, 15 bp, Homo sapiens
aagaccagaagcaga

SEQ ID NO: 1571681 - DNA, 15 bp, Homo sapiens
caagaccagaagcag

SEQ ID NO: 1571682 - DNA, 15 bp, Homo sapiens
gcaagaccagaagca

SEQ ID NO: 1571683 - DNA, 15 bp, Homo sapiens
ggcaagaccagaagc

SEQ ID NO: 1571684 - DNA, 15 bp, Homo sapiens
gggcaagaccagaag

SEQ ID NO: 1571685 - DNA, 15 bp, Homo sapiens
tgggcaagaccagaa

SEQ ID NO: 1571686 - DNA, 15 bp, Homo sapiens
atgggcaagaccaga

SEQ ID NO: 1571687 - DNA, 15 bp, Homo sapiens
aatgggcaagaccag

SEQ ID NO: 1571688 - DNA, 15 bp, Homo sapiens
taatgggcaagacca

SEQ ID NO: 1571689 - DNA, 15 bp, Homo sapiens
ataatgggcaagacc

SEQ ID NO: 1571690 - DNA, 15 bp, Homo sapiens
gataatgggcaagac

SEQ ID NO: 1571691 - DNA, 15 bp, Homo sapiens
tgataatgggcaaga

SEQ ID NO: 1571692 - DNA, 15 bp, Homo sapiens
ctgataatgggcaag

SEQ ID NO: 1571693 - DNA, 15 bp, Homo sapiens
gctgataatgggcaa

SEQ ID NO: 1571694 - DNA, 15 bp, Homo sapiens
tgctgataatgggca

SEQ ID NO: 1571695 - DNA, 15 bp, Homo sapiens
atgctgataatgggc

SEQ ID NO: 1571696 - DNA, 15 bp, Homo sapiens
aatgctgataatggg

SEQ ID NO: 1571697 - DNA, 15 bp, Homo sapiens
aaatgctgataatgg

SEQ ID NO: 1571698 - DNA, 15 bp, Homo sapiens
gaaatgctgataatg

SEQ ID NO: 1571699 - DNA, 15 bp, Homo sapiens
tgaaatgctgataat

SEQ ID NO: 1571700 - DNA, 15 bp, Homo sapiens
ctgaaatgctgataa

SEQ ID NO: 1571701 - DNA, 15 bp, Homo sapiens
gctgaaatgctgata

SEQ ID NO: 1571702 - DNA, 15 bp, Homo sapiens
agctgaaatgctgat

SEQ ID NO: 1571703 - DNA, 15 bp, Homo sapiens
cagctgaaatgctga

SEQ ID NO: 1571704 - DNA, 15 bp, Homo sapiens
acagctgaaatgctg

SEQ ID NO: 1571705 - DNA, 15 bp, Homo sapiens
cacagctgaaatgct

SEQ ID NO: 1571706 - DNA, 15 bp, Homo sapiens
tcacagctgaaatgc

SEQ ID NO: 1571707 - DNA, 15 bp, Homo sapiens
ttcacagctgaaatg

SEQ ID NO: 1571708 - DNA, 15 bp, Homo sapiens
cttcacagctgaaat

SEQ ID NO: 1571709 - DNA, 15 bp, Homo sapiens
ccttcacagctgaaa

SEQ ID NO: 1571710 - DNA, 15 bp, Homo sapiens
gccttcacagctgaa

SEQ ID NO: 1571711 - DNA, 15 bp, Homo sapiens
ggccttcacagctga

SEQ ID NO: 1571712 - DNA, 15 bp, Homo sapiens
tggccttcacagctg

SEQ ID NO: 1571713 - DNA, 15 bp, Homo sapiens
ctggccttcacagct

SEQ ID NO: 1571714 - DNA, 15 bp, Homo sapiens
cctggccttcacagc

SEQ ID NO: 1571715 - DNA, 15 bp, Homo sapiens
ccctggccttcacag

SEQ ID NO: 1571716 - DNA, 15 bp, Homo sapiens
gccctggccttcaca

SEQ ID NO: 1571717 - DNA, 15 bp, Homo sapiens
tgccctggccttcac

SEQ ID NO: 1571718 - DNA, 15 bp, Homo sapiens
ttgccctggccttca

SEQ ID NO: 1571719 - DNA, 15 bp, Homo sapiens
tttgccctggccttc

SEQ ID NO: 1571720 - DNA, 15 bp, Homo sapiens
ttttgccctggcctt

SEQ ID NO: 1571721 - DNA, 15 bp, Homo sapiens
gttttgccctggcct

SEQ ID NO: 1571722 - DNA, 15 bp, Homo sapiens
agttttgccctggcc

SEQ ID NO: 1571723 - DNA, 15 bp, Homo sapiens
aagttttgccctggc

SEQ ID NO: 1571724 - DNA, 15 bp, Homo sapiens
taagttttgccctgg

SEQ ID NO: 1571725 - DNA, 15 bp, Homo sapiens
ttaagttttgccctg

SEQ ID NO: 1571726 - DNA, 15 bp, Homo sapiens
tttaagttttgccct

SEQ ID NO: 1571727 - DNA, 15 bp, Homo sapiens
ttttaagttttgccc

SEQ ID NO: 1571728 - DNA, 15 bp, Homo sapiens
attttaagttttgcc

SEQ ID NO: 1571729 - DNA, 15 bp, Homo sapiens
aattttaagttttgc

SEQ ID NO: 1571730 - DNA, 15 bp, Homo sapiens
aaattttaagttttg

SEQ ID NO: 1571731 - DNA, 15 bp, Homo sapiens
taaattttaagtttt

SEQ ID NO: 1571732 - DNA, 15 bp, Homo sapiens
gtaaattttaagttt

SEQ ID NO: 1571733 - DNA, 15 bp, Homo sapiens
agtaaattttaagtt

SEQ ID NO: 1571734 - DNA, 15 bp, Homo sapiens
aagtaaattttaagt

SEQ ID NO: 1571735 - DNA, 15 bp, Homo sapiens
aaagtaaattttaag

SEQ ID NO: 1571736 - DNA, 15 bp, Homo sapiens
aaaagtaaattttaa

SEQ ID NO: 1571737 - DNA, 15 bp, Homo sapiens
aaaaagtaaatttta

SEQ ID NO: 1571738 - DNA, 15 bp, Homo sapiens
aaaaaagtaaatttt

SEQ ID NO: 1571739 - DNA, 15 bp, Homo sapiens
aaaaaaagtaaattt

SEQ ID NO: 1571740 - DNA, 15 bp, Homo sapiens
taaaaaaagtaaatt

SEQ ID NO: 1571741 - DNA, 15 bp, Homo sapiens
gtaaaaaaagtaaat

SEQ ID NO: 1571742 - DNA, 15 bp, Homo sapiens
tgtaaaaaaagtaaa

SEQ ID NO: 1571743 - DNA, 15 bp, Homo sapiens
ctgtaaaaaaagtaa

SEQ ID NO: 1571744 - DNA, 15 bp, Homo sapiens
tctgtaaaaaaagta

SEQ ID NO: 1571745 - DNA, 15 bp, Homo sapiens
atctgtaaaaaaagt

SEQ ID NO: 1571746 - DNA, 15 bp, Homo sapiens
tatctgtaaaaaaag

SEQ ID NO: 1571747 - DNA, 15 bp, Homo sapiens
gtatctgtaaaaaaa

SEQ ID NO: 1571748 - DNA, 15 bp, Homo sapiens
agtatctgtaaaaaa

SEQ ID NO: 1571749 - DNA, 15 bp, Homo sapiens
cagtatctgtaaaaa

SEQ ID NO: 1571750 - DNA, 15 bp, Homo sapiens
gcagtatctgtaaaa

SEQ ID NO: 1571751 - DNA, 15 bp, Homo sapiens
tgcagtatctgtaaa

SEQ ID NO: 1571752 - DNA, 15 bp, Homo sapiens
ctgcagtatctgtaa

SEQ ID NO: 1571753 - DNA, 15 bp, Homo sapiens
gctgcagtatctgta

SEQ ID NO: 1571754 - DNA, 15 bp, Homo sapiens
ggctgcagtatctgt

SEQ ID NO: 1571755 - DNA, 15 bp, Homo sapiens
tggctgcagtatctg

SEQ ID NO: 1571756 - DNA, 15 bp, Homo sapiens
gtggctgcagtatct

SEQ ID NO: 1571757 - DNA, 15 bp, Homo sapiens
agtggctgcagtatc

SEQ ID NO: 1571758 - DNA, 15 bp, Homo sapiens
cagtggctgcagtat

SEQ ID NO: 1571759 - DNA, 15 bp, Homo sapiens
tcagtggctgcagta

SEQ ID NO: 1571760 - DNA, 15 bp, Homo sapiens
ttcagtggctgcagt

SEQ ID NO: 1571761 - DNA, 15 bp, Homo sapiens
attcagtggctgcag

SEQ ID NO: 1571762 - DNA, 15 bp, Homo sapiens
aattcagtggctgca

SEQ ID NO: 1571763 - DNA, 15 bp, Homo sapiens
gaattcagtggctgc

SEQ ID NO: 1571764 - DNA, 15 bp, Homo sapiens
ggaattcagtggctg

SEQ ID NO: 1571765 - DNA, 15 bp, Homo sapiens
aggaattcagtggct

SEQ ID NO: 1571766 - DNA, 15 bp, Homo sapiens
aaggaattcagtggc

SEQ ID NO: 1571767 - DNA, 15 bp, Homo sapiens
gaaggaattcagtgg

SEQ ID NO: 1571768 - DNA, 15 bp, Homo sapiens
ggaaggaattcagtg

SEQ ID NO: 1571769 - DNA, 15 bp, Homo sapiens
aggaaggaattcagt

SEQ ID NO: 1571770 - DNA, 15 bp, Homo sapiens
caggaaggaattcag

SEQ ID NO: 1571771 - DNA, 15 bp, Homo sapiens
gcaggaaggaattca

SEQ ID NO: 1571772 - DNA, 15 bp, Homo sapiens
agcaggaaggaattc

SEQ ID NO: 1571773 - DNA, 15 bp, Homo sapiens
aagcaggaaggaatt

SEQ ID NO: 1571774 - DNA, 15 bp, Homo sapiens
gaagcaggaaggaat

SEQ ID NO: 1571775 - DNA, 15 bp, Homo sapiens
ggaagcaggaaggaa

SEQ ID NO: 1571776 - DNA, 15 bp, Homo sapiens
gggaagcaggaagga

SEQ ID NO: 1571777 - DNA, 15 bp, Homo sapiens
ggggaagcaggaagg

SEQ ID NO: 1571778 - DNA, 15 bp, Homo sapiens
cggggaagcaggaag

SEQ ID NO: 1571779 - DNA, 15 bp, Homo sapiens
gcggggaagcaggaa

SEQ ID NO: 1571780 - DNA, 15 bp, Homo sapiens
agcggggaagcagga

SEQ ID NO: 1571781 - DNA, 15 bp, Homo sapiens
cagcggggaagcagg

SEQ ID NO: 1571782 - DNA, 15 bp, Homo sapiens
tcagcggggaagcag

SEQ ID NO: 1571783 - DNA, 15 bp, Homo sapiens
atcagcggggaagca

SEQ ID NO: 1571784 - DNA, 15 bp, Homo sapiens
tatcagcggggaagc

SEQ ID NO: 1571785 - DNA, 15 bp, Homo sapiens
ttatcagcggggaag

SEQ ID NO: 1571786 - DNA, 15 bp, Homo sapiens
tttatcagcggggaa

SEQ ID NO: 1571787 - DNA, 15 bp, Homo sapiens
gtttatcagcgggga

SEQ ID NO: 1571788 - DNA, 15 bp, Homo sapiens
ggtttatcagcgggg

SEQ ID NO: 1571789 - DNA, 15 bp, Homo sapiens
aggtttatcagcggg

SEQ ID NO: 1571790 - DNA, 15 bp, Homo sapiens
aaggtttatcagcgg

SEQ ID NO: 1571791 - DNA, 15 bp, Homo sapiens
aaaggtttatcagcg

SEQ ID NO: 1571792 - DNA, 15 bp, Homo sapiens
aaaaggtttatcagc

SEQ ID NO: 1571793 - DNA, 15 bp, Homo sapiens
taaaaggtttatcag

SEQ ID NO: 1571794 - DNA, 15 bp, Homo sapiens
ctaaaaggtttatca

SEQ ID NO: 1571795 - DNA, 15 bp, Homo sapiens
gctaaaaggtttatc

SEQ ID NO: 1571796 - DNA, 15 bp, Homo sapiens
tgctaaaaggtttat

SEQ ID NO: 1571797 - DNA, 15 bp, Homo sapiens
atgctaaaaggttta

SEQ ID NO: 1571798 - DNA, 15 bp, Homo sapiens
aatgctaaaaggttt

SEQ ID NO: 1571799 - DNA, 15 bp, Homo sapiens
aaatgctaaaaggtt

SEQ ID NO: 1571800 - DNA, 15 bp, Homo sapiens
aaaatgctaaaaggt

SEQ ID NO: 1571801 - DNA, 15 bp, Homo sapiens
caaaatgctaaaagg

SEQ ID NO: 1571802 - DNA, 15 bp, Homo sapiens
ccaaaatgctaaaag

SEQ ID NO: 1571803 - DNA, 15 bp, Homo sapiens
tccaaaatgctaaaa

SEQ ID NO: 1571804 - DNA, 15 bp, Homo sapiens
ctccaaaatgctaaa

SEQ ID NO: 1571805 - DNA, 15 bp, Homo sapiens
gctccaaaatgctaa

SEQ ID NO: 1571806 - DNA, 15 bp, Homo sapiens
agctccaaaatgcta

SEQ ID NO: 1571807 - DNA, 15 bp, Homo sapiens
tagctccaaaatgct

SEQ ID NO: 1571808 - DNA, 15 bp, Homo sapiens
ctagctccaaaatgc

SEQ ID NO: 1571809 - DNA, 15 bp, Homo sapiens
cctagctccaaaatg

SEQ ID NO: 1571810 - DNA, 15 bp, Homo sapiens
ccctagctccaaaat

SEQ ID NO: 1571811 - DNA, 15 bp, Homo sapiens
tccctagctccaaaa

SEQ ID NO: 1571812 - DNA, 15 bp, Homo sapiens
ttccctagctccaaa

SEQ ID NO: 1571813 - DNA, 15 bp, Homo sapiens
gttccctagctccaa

SEQ ID NO: 1571814 - DNA, 15 bp, Homo sapiens
ggttccctagctcca

SEQ ID NO: 1571815 - DNA, 15 bp, Homo sapiens
tggttccctagctcc

SEQ ID NO: 1571816 - DNA, 15 bp, Homo sapiens
atggttccctagctc

SEQ ID NO: 1571817 - DNA, 15 bp, Homo sapiens
tatggttccctagct

SEQ ID NO: 1571818 - DNA, 15 bp, Homo sapiens
gtatggttccctagc

SEQ ID NO: 1571819 - DNA, 15 bp, Homo sapiens
tgtatggttccctag

SEQ ID NO: 1571820 - DNA, 15 bp, Homo sapiens
ctgtatggttcccta

SEQ ID NO: 1571821 - DNA, 15 bp, Homo sapiens
cctgtatggttccct

SEQ ID NO: 1571822 - DNA, 15 bp, Homo sapiens
acctgtatggttccc

SEQ ID NO: 1571823 - DNA, 15 bp, Homo sapiens
tacctgtatggttcc

SEQ ID NO: 1571824 - DNA, 15 bp, Homo sapiens
ttacctgtatggttc

SEQ ID NO: 1571825 - DNA, 15 bp, Homo sapiens
attacctgtatggtt

SEQ ID NO: 1571826 - DNA, 15 bp, Homo sapiens
aattacctgtatggt

SEQ ID NO: 1571827 - DNA, 15 bp, Homo sapiens
aaattacctgtatgg

SEQ ID NO: 1571828 - DNA, 15 bp, Homo sapiens
taaattacctgtatg

SEQ ID NO: 1571829 - DNA, 15 bp, Homo sapiens
ctaaattacctgtat

SEQ ID NO: 1571830 - DNA, 15 bp, Homo sapiens
actaaattacctgta

SEQ ID NO: 1571831 - DNA, 15 bp, Homo sapiens
aactaaattacctgt

SEQ ID NO: 1571832 - DNA, 15 bp, Homo sapiens
aaactaaattacctg

SEQ ID NO: 1571833 - DNA, 15 bp, Homo sapiens
aaaactaaattacct

SEQ ID NO: 1571834 - DNA, 15 bp, Homo sapiens
taaaactaaattacc

SEQ ID NO: 1571835 - DNA, 15 bp, Homo sapiens
ctaaaactaaattac

SEQ ID NO: 1571836 - DNA, 15 bp, Homo sapiens
cctaaaactaaatta

SEQ ID NO: 1571837 - DNA, 15 bp, Homo sapiens
gcctaaaactaaatt

SEQ ID NO: 1571838 - DNA, 15 bp, Homo sapiens
agcctaaaactaaat

SEQ ID NO: 1571839 - DNA, 15 bp, Homo sapiens
gagcctaaaactaaa

SEQ ID NO: 1571840 - DNA, 15 bp, Homo sapiens
tgagcctaaaactaa

SEQ ID NO: 1571841 - DNA, 15 bp, Homo sapiens
gtgagcctaaaacta

SEQ ID NO: 1571842 - DNA, 15 bp, Homo sapiens
tgtgagcctaaaact

SEQ ID NO: 1571843 - DNA, 15 bp, Homo sapiens
ttgtgagcctaaaac

SEQ ID NO: 1571844 - DNA, 15 bp, Homo sapiens
attgtgagcctaaaa

SEQ ID NO: 1571845 - DNA, 15 bp, Homo sapiens
tattgtgagcctaaa

SEQ ID NO: 1571846 - DNA, 15 bp, Homo sapiens
atattgtgagcctaa

SEQ ID NO: 1571847 - DNA, 15 bp, Homo sapiens
aatattgtgagccta

SEQ ID NO: 1571848 - DNA, 15 bp, Homo sapiens
caatattgtgagcct

SEQ ID NO: 1571849 - DNA, 15 bp, Homo sapiens
acaatattgtgagcc

SEQ ID NO: 1571850 - DNA, 15 bp, Homo sapiens
cacaatattgtgagc

SEQ ID NO: 1571851 - DNA, 15 bp, Homo sapiens
acacaatattgtgag

SEQ ID NO: 1571852 - DNA, 15 bp, Homo sapiens
tacacaatattgtga

SEQ ID NO: 1571853 - DNA, 15 bp, Homo sapiens
gtacacaatattgtg

SEQ ID NO: 1571854 - DNA, 15 bp, Homo sapiens
tgtacacaatattgt

SEQ ID NO: 1571855 - DNA, 15 bp, Homo sapiens
atgtacacaatattg

SEQ ID NO: 1571856 - DNA, 15 bp, Homo sapiens
aatgtacacaatatt

SEQ ID NO: 1571857 - DNA, 15 bp, Homo sapiens
caatgtacacaatat

SEQ ID NO: 1571858 - DNA, 15 bp, Homo sapiens
ccaatgtacacaata

SEQ ID NO: 1571859 - DNA, 15 bp, Homo sapiens
cccaatgtacacaat

SEQ ID NO: 1571860 - DNA, 15 bp, Homo sapiens
ccccaatgtacacaa

SEQ ID NO: 1571861 - DNA, 15 bp, Homo sapiens
tccccaatgtacaca

SEQ ID NO: 1571862 - DNA, 15 bp, Homo sapiens
ctccccaatgtacac

SEQ ID NO: 1571863 - DNA, 15 bp, Homo sapiens
tctccccaatgtaca

SEQ ID NO: 1571864 - DNA, 15 bp, Homo sapiens
gtctccccaatgtac

SEQ ID NO: 1571865 - DNA, 15 bp, Homo sapiens
agtctccccaatgta

SEQ ID NO: 1571866 - DNA, 15 bp, Homo sapiens
cagtctccccaatgt

SEQ ID NO: 1571867 - DNA, 15 bp, Homo sapiens
tcagtctccccaatg

SEQ ID NO: 1571868 - DNA, 15 bp, Homo sapiens
ctcagtctccccaat

SEQ ID NO: 1571869 - DNA, 15 bp, Homo sapiens
actcagtctccccaa

SEQ ID NO: 1571870 - DNA, 15 bp, Homo sapiens
aactcagtctcccca

SEQ ID NO: 1571871 - DNA, 15 bp, Homo sapiens
aaactcagtctcccc

SEQ ID NO: 1571872 - DNA, 15 bp, Homo sapiens
aaaactcagtctccc

SEQ ID NO: 1571873 - DNA, 15 bp, Homo sapiens
taaaactcagtctcc

SEQ ID NO: 1571874 - DNA, 15 bp, Homo sapiens
ctaaaactcagtctc

SEQ ID NO: 1571875 - DNA, 15 bp, Homo sapiens
tctaaaactcagtct

SEQ ID NO: 1571876 - DNA, 15 bp, Homo sapiens
ttctaaaactcagtc

SEQ ID NO: 1571877 - DNA, 15 bp, Homo sapiens
cttctaaaactcagt

SEQ ID NO: 1571878 - DNA, 15 bp, Homo sapiens
tcttctaaaactcag

SEQ ID NO: 1571879 - DNA, 15 bp, Homo sapiens
ctcttctaaaactca

SEQ ID NO: 1571880 - DNA, 15 bp, Homo sapiens
gctcttctaaaactc

SEQ ID NO: 1571881 - DNA, 15 bp, Homo sapiens
agctcttctaaaact

SEQ ID NO: 1571882 - DNA, 15 bp, Homo sapiens
cagctcttctaaaac

SEQ ID NO: 1571883 - DNA, 15 bp, Homo sapiens
ccagctcttctaaaa

SEQ ID NO: 1571884 - DNA, 15 bp, Homo sapiens
cccagctcttctaaa

SEQ ID NO: 1571885 - DNA, 15 bp, Homo sapiens
acccagctcttctaa

SEQ ID NO: 1571886 - DNA, 15 bp, Homo sapiens
aacccagctcttcta

SEQ ID NO: 1571887 - DNA, 15 bp, Homo sapiens
taacccagctcttct

SEQ ID NO: 1571888 - DNA, 15 bp, Homo sapiens
ttaacccagctcttc

SEQ ID NO: 1571889 - DNA, 15 bp, Homo sapiens
gttaacccagctctt

SEQ ID NO: 1571890 - DNA, 15 bp, Homo sapiens
agttaacccagctct

SEQ ID NO: 1571891 - DNA, 15 bp, Homo sapiens
cagttaacccagctc

SEQ ID NO: 1571892 - DNA, 15 bp, Homo sapiens
gcagttaacccagct

SEQ ID NO: 1571893 - DNA, 15 bp, Homo sapiens
agcagttaacccagc

SEQ ID NO: 1571894 - DNA, 15 bp, Homo sapiens
aagcagttaacccag

SEQ ID NO: 1571895 - DNA, 15 bp, Homo sapiens
aaagcagttaaccca

SEQ ID NO: 1571896 - DNA, 15 bp, Homo sapiens
taaagcagttaaccc

SEQ ID NO: 1571897 - DNA, 15 bp, Homo sapiens
ataaagcagttaacc

SEQ ID NO: 1571898 - DNA, 15 bp, Homo sapiens
tataaagcagttaac

SEQ ID NO: 1571899 - DNA, 15 bp, Homo sapiens
gtataaagcagttaa

SEQ ID NO: 1571900 - DNA, 15 bp, Homo sapiens
tgtataaagcagtta

SEQ ID NO: 1571901 - DNA, 15 bp, Homo sapiens
ctgtataaagcagtt

SEQ ID NO: 1571902 - DNA, 15 bp, Homo sapiens
actgtataaagcagt

SEQ ID NO: 1571903 - DNA, 15 bp, Homo sapiens
aactgtataaagcag

SEQ ID NO: 1571904 - DNA, 15 bp, Homo sapiens
gaactgtataaagca

SEQ ID NO: 1571905 - DNA, 15 bp, Homo sapiens
agaactgtataaagc

SEQ ID NO: 1571906 - DNA, 15 bp, Homo sapiens
aagaactgtataaag

SEQ ID NO: 1571907 - DNA, 15 bp, Homo sapiens
taagaactgtataaa

SEQ ID NO: 1571908 - DNA, 15 bp, Homo sapiens
ataagaactgtataa

SEQ ID NO: 1571909 - DNA, 15 bp, Homo sapiens
gataagaactgtata

SEQ ID NO: 1571910 - DNA, 15 bp, Homo sapiens
agataagaactgtat

SEQ ID NO: 1571911 - DNA, 15 bp, Homo sapiens
tagataagaactgta

SEQ ID NO: 1571912 - DNA, 15 bp, Homo sapiens
ctagataagaactgt

SEQ ID NO: 1571913 - DNA, 15 bp, Homo sapiens
tctagataagaactg

SEQ ID NO: 1571914 - DNA, 15 bp, Homo sapiens
ttctagataagaact

SEQ ID NO: 1571915 - DNA, 15 bp, Homo sapiens
gttctagataagaac

SEQ ID NO: 1571916 - DNA, 15 bp, Homo sapiens
ggttctagataagaa

SEQ ID NO: 1571917 - DNA, 15 bp, Homo sapiens
tggttctagataaga

SEQ ID NO: 1571918 - DNA, 15 bp, Homo sapiens
ttggttctagataag

SEQ ID NO: 1571919 - DNA, 15 bp, Homo sapiens
cttggttctagataa

SEQ ID NO: 1571920 - DNA, 15 bp, Homo sapiens
ccttggttctagata

SEQ ID NO: 1571921 - DNA, 15 bp, Homo sapiens
gccttggttctagat

SEQ ID NO: 1571922 - DNA, 15 bp, Homo sapiens
ggccttggttctaga

SEQ ID NO: 1571923 - DNA, 15 bp, Homo sapiens
tggccttggttctag

SEQ ID NO: 1571924 - DNA, 15 bp, Homo sapiens
ctggccttggttcta

SEQ ID NO: 1571925 - DNA, 15 bp, Homo sapiens
cctggccttggttct

SEQ ID NO: 1571926 - DNA, 15 bp, Homo sapiens
gcctggccttggttc

SEQ ID NO: 1571927 - DNA, 15 bp, Homo sapiens
ggcctggccttggtt

SEQ ID NO: 1571928 - DNA, 15 bp, Homo sapiens
gggcctggccttggt

SEQ ID NO: 1571929 - DNA, 15 bp, Homo sapiens
agggcctggccttgg

SEQ ID NO: 1571930 - DNA, 15 bp, Homo sapiens
aagggcctggccttg

SEQ ID NO: 1571931 - DNA, 15 bp, Homo sapiens
aaagggcctggcctt

SEQ ID NO: 1571932 - DNA, 15 bp, Homo sapiens
aaaagggcctggcct

SEQ ID NO: 1571933 - DNA, 15 bp, Homo sapiens
caaaagggcctggcc

SEQ ID NO: 1571934 - DNA, 15 bp, Homo sapiens
acaaaagggcctggc

SEQ ID NO: 1571935 - DNA, 15 bp, Homo sapiens
tacaaaagggcctgg

SEQ ID NO: 1571936 - DNA, 15 bp, Homo sapiens
gtacaaaagggcctg

SEQ ID NO: 1571937 - DNA, 15 bp, Homo sapiens
agtacaaaagggcct

SEQ ID NO: 1571938 - DNA, 15 bp, Homo sapiens
tagtacaaaagggcc

SEQ ID NO: 1571939 - DNA, 15 bp, Homo sapiens
gtagtacaaaagggc

SEQ ID NO: 1571940 - DNA, 15 bp, Homo sapiens
tgtagtacaaaaggg

SEQ ID NO: 1571941 - DNA, 15 bp, Homo sapiens
atgtagtacaaaagg

SEQ ID NO: 1571942 - DNA, 15 bp, Homo sapiens
aatgtagtacaaaag

SEQ ID NO: 1571943 - DNA, 15 bp, Homo sapiens
gaatgtagtacaaaa

SEQ ID NO: 1571944 - DNA, 15 bp, Homo sapiens
tgaatgtagtacaaa

SEQ ID NO: 1571945 - DNA, 15 bp, Homo sapiens
atgaatgtagtacaa

SEQ ID NO: 1571946 - DNA, 15 bp, Homo sapiens
aatgaatgtagtaca

SEQ ID NO: 1571947 - DNA, 15 bp, Homo sapiens
caatgaatgtagtac

SEQ ID NO: 1571948 - DNA, 15 bp, Homo sapiens
gcaatgaatgtagta

SEQ ID NO: 1571949 - DNA, 15 bp, Homo sapiens
ggcaatgaatgtagt

SEQ ID NO: 1571950 - DNA, 15 bp, Homo sapiens
aggcaatgaatgtag

SEQ ID NO: 1571951 - DNA, 15 bp, Homo sapiens
aaggcaatgaatgta

SEQ ID NO: 1571952 - DNA, 15 bp, Homo sapiens
gaaggcaatgaatgt

SEQ ID NO: 1571953 - DNA, 15 bp, Homo sapiens
ggaaggcaatgaatg

SEQ ID NO: 1571954 - DNA, 15 bp, Homo sapiens
tggaaggcaatgaat

SEQ ID NO: 1571955 - DNA, 15 bp, Homo sapiens
atggaaggcaatgaa

SEQ ID NO: 1571956 - DNA, 15 bp, Homo sapiens
catggaaggcaatga

SEQ ID NO: 1571957 - DNA, 15 bp, Homo sapiens
ccatggaaggcaatg

SEQ ID NO: 1571958 - DNA, 15 bp, Homo sapiens
gccatggaaggcaat

SEQ ID NO: 1571959 - DNA, 15 bp, Homo sapiens
agccatggaaggcaa

SEQ ID NO: 1571960 - DNA, 15 bp, Homo sapiens
cagccatggaaggca

SEQ ID NO: 1571961 - DNA, 15 bp, Homo sapiens
acagccatggaaggc

SEQ ID NO: 1571962 - DNA, 15 bp, Homo sapiens
aacagccatggaagg

SEQ ID NO: 1571963 - DNA, 15 bp, Homo sapiens
caacagccatggaag

SEQ ID NO: 1571964 - DNA, 15 bp, Homo sapiens
acaacagccatggaa

SEQ ID NO: 1571965 - DNA, 15 bp, Homo sapiens
gacaacagccatgga

SEQ ID NO: 1571966 - DNA, 15 bp, Homo sapiens
agacaacagccatgg

SEQ ID NO: 1571967 - DNA, 15 bp, Homo sapiens
cagacaacagccatg

SEQ ID NO: 1571968 - DNA, 15 bp, Homo sapiens
acagacaacagccat

SEQ ID NO: 1571969 - DNA, 15 bp, Homo sapiens
aacagacaacagcca

SEQ ID NO: 1571970 - DNA, 15 bp, Homo sapiens
aaacagacaacagcc

SEQ ID NO: 1571971 - DNA, 15 bp, Homo sapiens
caaacagacaacagc

SEQ ID NO: 1571972 - DNA, 15 bp, Homo sapiens
tcaaacagacaacag

SEQ ID NO: 1571973 - DNA, 15 bp, Homo sapiens
atcaaacagacaaca

SEQ ID NO: 1571974 - DNA, 15 bp, Homo sapiens
aatcaaacagacaac

SEQ ID NO: 1571975 - DNA, 15 bp, Homo sapiens
taatcaaacagacaa

SEQ ID NO: 1571976 - DNA, 15 bp, Homo sapiens
ataatcaaacagaca

SEQ ID NO: 1571977 - DNA, 15 bp, Homo sapiens
gataatcaaacagac

SEQ ID NO: 1571978 - DNA, 15 bp, Homo sapiens
agataatcaaacaga

SEQ ID NO: 1571979 - DNA, 15 bp, Homo sapiens
tagataatcaaacag

SEQ ID NO: 1571980 - DNA, 15 bp, Homo sapiens
atagataatcaaaca

SEQ ID NO: 1571981 - DNA, 15 bp, Homo sapiens
gatagataatcaaac

SEQ ID NO: 1571982 - DNA, 15 bp, Homo sapiens
agatagataatcaaa

SEQ ID NO: 1571983 - DNA, 15 bp, Homo sapiens
tagatagataatcaa

SEQ ID NO: 1571984 - DNA, 15 bp, Homo sapiens
gtagatagataatca

SEQ ID NO: 1571985 - DNA, 15 bp, Homo sapiens
agtagatagataatc

SEQ ID NO: 1571986 - DNA, 15 bp, Homo sapiens
aagtagatagataat

SEQ ID NO: 1571987 - DNA, 15 bp, Homo sapiens
aaagtagatagataa

SEQ ID NO: 1571988 - DNA, 15 bp, Homo sapiens
gaaagtagatagata

SEQ ID NO: 1571989 - DNA, 15 bp, Homo sapiens
ggaaagtagatagat

SEQ ID NO: 1571990 - DNA, 15 bp, Homo sapiens
gggaaagtagataga

SEQ ID NO: 1571991 - DNA, 15 bp, Homo sapiens
agggaaagtagatag

SEQ ID NO: 1571992 - DNA, 15 bp, Homo sapiens
aagggaaagtagata

SEQ ID NO: 1571993 - DNA, 15 bp, Homo sapiens
gaagggaaagtagat

SEQ ID NO: 1571994 - DNA, 15 bp, Homo sapiens
agaagggaaagtaga

SEQ ID NO: 1571995 - DNA, 15 bp, Homo sapiens
gagaagggaaagtag

SEQ ID NO: 1571996 - DNA, 15 bp, Homo sapiens
ggagaagggaaagta

SEQ ID NO: 1571997 - DNA, 15 bp, Homo sapiens
aggagaagggaaagt

SEQ ID NO: 1571998 - DNA, 15 bp, Homo sapiens
aaggagaagggaaag

SEQ ID NO: 1571999 - DNA, 15 bp, Homo sapiens
gaaggagaagggaaa

SEQ ID NO: 1572000 - DNA, 15 bp, Homo sapiens
agaaggagaagggaa

SEQ ID NO: 1572001 - DNA, 15 bp, Homo sapiens
aagaaggagaaggga

SEQ ID NO: 1572002 - DNA, 15 bp, Homo sapiens
aaagaaggagaaggg

SEQ ID NO: 1572003 - DNA, 15 bp, Homo sapiens
taaagaaggagaagg

SEQ ID NO: 1572004 - DNA, 15 bp, Homo sapiens
ataaagaaggagaag

SEQ ID NO: 1572005 - DNA, 15 bp, Homo sapiens
aataaagaaggagaa

SEQ ID NO: 1572006 - DNA, 15 bp, Homo sapiens
aaataaagaaggaga

SEQ ID NO: 1572007 - DNA, 15 bp, Homo sapiens
gaaataaagaaggag

SEQ ID NO: 1572008 - DNA, 15 bp, Homo sapiens
ggaaataaagaagga

SEQ ID NO: 1572009 - DNA, 15 bp, Homo sapiens
aggaaataaagaagg

SEQ ID NO: 1572010 - DNA, 15 bp, Homo sapiens
aaggaaataaagaag

SEQ ID NO: 1572011 - DNA, 15 bp, Homo sapiens
caaggaaataaagaa

SEQ ID NO: 1572012 - DNA, 15 bp, Homo sapiens
acaaggaaataaaga

SEQ ID NO: 1572013 - DNA, 15 bp, Homo sapiens
aacaaggaaataaag

SEQ ID NO: 1572014 - DNA, 15 bp, Homo sapiens
aaacaaggaaataaa

SEQ ID NO: 1572015 - DNA, 15 bp, Homo sapiens
aaaacaaggaaataa

SEQ ID NO: 1572016 - DNA, 15 bp, Homo sapiens
aaaaacaaggaaata

SEQ ID NO: 1572017 - DNA, 15 bp, Homo sapiens
caaaaacaaggaaat

SEQ ID NO: 1572018 - DNA, 15 bp, Homo sapiens
acaaaaacaaggaaa

SEQ ID NO: 1572019 - DNA, 15 bp, Homo sapiens
aacaaaaacaaggaa

SEQ ID NO: 1572020 - DNA, 15 bp, Homo sapiens
aaacaaaaacaagga

SEQ ID NO: 1572021 - DNA, 15 bp, Homo sapiens
caaacaaaaacaagg

SEQ ID NO: 1572022 - DNA, 15 bp, Homo sapiens
acaaacaaaaacaag

SEQ ID NO: 1572023 - DNA, 15 bp, Homo sapiens
aacaaacaaaaacaa

SEQ ID NO: 1572024 - DNA, 15 bp, Homo sapiens
ataaacaaacaaaaa

SEQ ID NO: 1572025 - DNA, 15 bp, Homo sapiens
aataaacaaacaaaa

SEQ ID NO: 1572026 - DNA, 15 bp, Homo sapiens
caataaacaaacaaa

SEQ ID NO: 1572027 - DNA, 15 bp, Homo sapiens
gcaataaacaaacaa

SEQ ID NO: 1572028 - DNA, 15 bp, Homo sapiens
agcaataaacaaaca

SEQ ID NO: 1572029 - DNA, 15 bp, Homo sapiens
tagcaataaacaaac

SEQ ID NO: 1572030 - DNA, 15 bp, Homo sapiens
ttagcaataaacaaa

SEQ ID NO: 1572031 - DNA, 15 bp, Homo sapiens
ttaaaagttcactaa

SEQ ID NO: 1572032 - DNA, 15 bp, Homo sapiens
tttaaaagttcacta

SEQ ID NO: 1572033 - DNA, 15 bp, Homo sapiens
ttttaaaagttcact

SEQ ID NO: 1572034 - DNA, 15 bp, Homo sapiens
attttaaaagttcac

SEQ ID NO: 1572035 - DNA, 15 bp, Homo sapiens
cattttaaaagttca

SEQ ID NO: 1572036 - DNA, 15 bp, Homo sapiens
acattttaaaagttc

SEQ ID NO: 1572037 - DNA, 15 bp, Homo sapiens
tacattttaaaagtt

SEQ ID NO: 1572038 - DNA, 15 bp, Homo sapiens
ttacattttaaaagt

SEQ ID NO: 1572039 - DNA, 15 bp, Homo sapiens
tttacattttaaaag

SEQ ID NO: 1572040 - DNA, 15 bp, Homo sapiens
gtttacattttaaaa

SEQ ID NO: 1572041 - DNA, 15 bp, Homo sapiens
tgtttacattttaaa

SEQ ID NO: 1572042 - DNA, 15 bp, Homo sapiens
gtgtttacattttaa

SEQ ID NO: 1572043 - DNA, 15 bp, Homo sapiens
tgtgtttacatttta

SEQ ID NO: 1572044 - DNA, 15 bp, Homo sapiens
gtgtgtttacatttt

SEQ ID NO: 1572045 - DNA, 15 bp, Homo sapiens
agtgtgtttacattt

SEQ ID NO: 1572046 - DNA, 15 bp, Homo sapiens
aagtgtgtttacatt

SEQ ID NO: 1572047 - DNA, 15 bp, Homo sapiens
caagtgtgtttacat

SEQ ID NO: 1572048 - DNA, 15 bp, Homo sapiens
tcaagtgtgtttaca

SEQ ID NO: 1572049 - DNA, 15 bp, Homo sapiens
ttcaagtgtgtttac

SEQ ID NO: 1572050 - DNA, 15 bp, Homo sapiens
tttcaagtgtgttta

SEQ ID NO: 1572051 - DNA, 15 bp, Homo sapiens
ttttcaagtgtgttt

SEQ ID NO: 1572052 - DNA, 15 bp, Homo sapiens
attttcaagtgtgtt

SEQ ID NO: 1572053 - DNA, 15 bp, Homo sapiens
gattttcaagtgtgt

SEQ ID NO: 1572054 - DNA, 15 bp, Homo sapiens
ggattttcaagtgtg

SEQ ID NO: 1572055 - DNA, 15 bp, Homo sapiens
tggattttcaagtgt

SEQ ID NO: 1572056 - DNA, 15 bp, Homo sapiens
atggattttcaagtg

SEQ ID NO: 1572057 - DNA, 15 bp, Homo sapiens
gatggattttcaagt

SEQ ID NO: 1572058 - DNA, 15 bp, Homo sapiens
tgatggattttcaag

SEQ ID NO: 1572059 - DNA, 15 bp, Homo sapiens
atgatggattttcaa

SEQ ID NO: 1572060 - DNA, 15 bp, Homo sapiens
gatgatggattttca

SEQ ID NO: 1572061 - DNA, 15 bp, Homo sapiens
agatgatggattttc

SEQ ID NO: 1572062 - DNA, 15 bp, Homo sapiens
tagatgatggatttt

SEQ ID NO: 1572063 - DNA, 15 bp, Homo sapiens
gtagatgatggattt

SEQ ID NO: 1572064 - DNA, 15 bp, Homo sapiens
tgtagatgatggatt

SEQ ID NO: 1572065 - DNA, 15 bp, Homo sapiens
atgtagatgatggat

SEQ ID NO: 1572066 - DNA, 15 bp, Homo sapiens
gatgtagatgatgga

SEQ ID NO: 1572067 - DNA, 15 bp, Homo sapiens
tgatgtagatgatgg

SEQ ID NO: 1572068 - DNA, 15 bp, Homo sapiens
ttgatgtagatgatg

SEQ ID NO: 1572069 - DNA, 15 bp, Homo sapiens
cttgatgtagatgat

SEQ ID NO: 1572070 - DNA, 15 bp, Homo sapiens
tcttgatgtagatga

SEQ ID NO: 1572071 - DNA, 15 bp, Homo sapiens
ttcttgatgtagatg

SEQ ID NO: 1572072 - DNA, 15 bp, Homo sapiens
tttcttgatgtagat

SEQ ID NO: 1572073 - DNA, 15 bp, Homo sapiens
gtttcttgatgtaga

SEQ ID NO: 1572074 - DNA, 15 bp, Homo sapiens
tgtttcttgatgtag

SEQ ID NO: 1572075 - DNA, 15 bp, Homo sapiens
ctgtttcttgatgta

SEQ ID NO: 1572076 - DNA, 15 bp, Homo sapiens
tctgtttcttgatgt

SEQ ID NO: 1572077 - DNA, 15 bp, Homo sapiens
ttctgtttcttgatg

SEQ ID NO: 1572078 - DNA, 15 bp, Homo sapiens
gttctgtttcttgat

SEQ ID NO: 1572079 - DNA, 15 bp, Homo sapiens
tgttctgtttcttga

SEQ ID NO: 1572080 - DNA, 15 bp, Homo sapiens
atgttctgtttcttg

SEQ ID NO: 1572081 - DNA, 15 bp, Homo sapiens
aatgttctgtttctt

SEQ ID NO: 1572082 - DNA, 15 bp, Homo sapiens
taatgttctgtttct

SEQ ID NO: 1572083 - DNA, 15 bp, Homo sapiens
gtaatgttctgtttc

SEQ ID NO: 1572084 - DNA, 15 bp, Homo sapiens
ggtaatgttctgttt

SEQ ID NO: 1572085 - DNA, 15 bp, Homo sapiens
tggtaatgttctgtt

SEQ ID NO: 1572086 - DNA, 15 bp, Homo sapiens
ctggtaatgttctgt

SEQ ID NO: 1572087 - DNA, 15 bp, Homo sapiens
gctggtaatgttctg

SEQ ID NO: 1572088 - DNA, 15 bp, Homo sapiens
tgctggtaatgttct

SEQ ID NO: 1572089 - DNA, 15 bp, Homo sapiens
atgctggtaatgttc

SEQ ID NO: 1572090 - DNA, 15 bp, Homo sapiens
gatgctggtaatgtt

SEQ ID NO: 1572091 - DNA, 15 bp, Homo sapiens
ggatgctggtaatgt

SEQ ID NO: 1572092 - DNA, 15 bp, Homo sapiens
gggatgctggtaatg

SEQ ID NO: 1572093 - DNA, 15 bp, Homo sapiens
tgggatgctggtaat

SEQ ID NO: 1572094 - DNA, 15 bp, Homo sapiens
ttgggatgctggtaa

SEQ ID NO: 1572095 - DNA, 15 bp, Homo sapiens
cttgggatgctggta

SEQ ID NO: 1572096 - DNA, 15 bp, Homo sapiens
tcttgggatgctggt

SEQ ID NO: 1572097 - DNA, 15 bp, Homo sapiens
ttcttgggatgctgg

SEQ ID NO: 1572098 - DNA, 15 bp, Homo sapiens
cttcttgggatgctg

SEQ ID NO: 1572099 - DNA, 15 bp, Homo sapiens
gcttcttgggatgct

SEQ ID NO: 1572100 - DNA, 15 bp, Homo sapiens
ggcttcttgggatgc

SEQ ID NO: 1572101 - DNA, 15 bp, Homo sapiens
tggcttcttgggatg

SEQ ID NO: 1572102 - DNA, 15 bp, Homo sapiens
atggcttcttgggat

SEQ ID NO: 1572103 - DNA, 15 bp, Homo sapiens
gatggcttcttggga

SEQ ID NO: 1572104 - DNA, 15 bp, Homo sapiens
ggatggcttcttggg

SEQ ID NO: 1572105 - DNA, 15 bp, Homo sapiens
aggatggcttcttgg

SEQ ID NO: 1572106 - DNA, 15 bp, Homo sapiens
gaggatggcttcttg

SEQ ID NO: 1572107 - DNA, 15 bp, Homo sapiens
tgaggatggcttctt

SEQ ID NO: 1572108 - DNA, 15 bp, Homo sapiens
atgaggatggcttct

SEQ ID NO: 1572109 - DNA, 15 bp, Homo sapiens
catgaggatggcttc

SEQ ID NO: 1572110 - DNA, 15 bp, Homo sapiens
gcatgaggatggctt

SEQ ID NO: 1572111 - DNA, 15 bp, Homo sapiens
ggcatgaggatggct

SEQ ID NO: 1572112 - DNA, 15 bp, Homo sapiens
gggcatgaggatggc

SEQ ID NO: 1572113 - DNA, 15 bp, Homo sapiens
ggggcatgaggatgg

SEQ ID NO: 1572114 - DNA, 15 bp, Homo sapiens
gggggcatgaggatg

SEQ ID NO: 1572115 - DNA, 15 bp, Homo sapiens
agggggcatgaggat

SEQ ID NO: 1572116 - DNA, 15 bp, Homo sapiens
aagggggcatgagga

SEQ ID NO: 1572117 - DNA, 15 bp, Homo sapiens
taagggggcatgagg

SEQ ID NO: 1572118 - DNA, 15 bp, Homo sapiens
ttaagggggcatgag

SEQ ID NO: 1572119 - DNA, 15 bp, Homo sapiens
cttaagggggcatga

SEQ ID NO: 1572120 - DNA, 15 bp, Homo sapiens
acttaagggggcatg

SEQ ID NO: 1572121 - DNA, 15 bp, Homo sapiens
gacttaagggggcat

SEQ ID NO: 1572122 - DNA, 15 bp, Homo sapiens
tgacttaagggggca

SEQ ID NO: 1572123 - DNA, 15 bp, Homo sapiens
gtgacttaagggggc

SEQ ID NO: 1572124 - DNA, 15 bp, Homo sapiens
agtgacttaaggggg

SEQ ID NO: 1572125 - DNA, 15 bp, Homo sapiens
tagtgacttaagggg

SEQ ID NO: 1572126 - DNA, 15 bp, Homo sapiens
gtagtgacttaaggg

SEQ ID NO: 1572127 - DNA, 15 bp, Homo sapiens
agtagtgacttaagg

SEQ ID NO: 1572128 - DNA, 15 bp, Homo sapiens
aagtagtgacttaag

SEQ ID NO: 1572129 - DNA, 15 bp, Homo sapiens
gaagtagtgacttaa

SEQ ID NO: 1572130 - DNA, 15 bp, Homo sapiens
ggaagtagtgactta

SEQ ID NO: 1572131 - DNA, 15 bp, Homo sapiens
cggaagtagtgactt

SEQ ID NO: 1572132 - DNA, 15 bp, Homo sapiens
gcggaagtagtgact

SEQ ID NO: 1572133 - DNA, 15 bp, Homo sapiens
tgcggaagtagtgac

SEQ ID NO: 1572134 - DNA, 15 bp, Homo sapiens
ttgcggaagtagtga

SEQ ID NO: 1572135 - DNA, 15 bp, Homo sapiens
cttgcggaagtagtg

SEQ ID NO: 1572136 - DNA, 15 bp, Homo sapiens
ccttgcggaagtagt

SEQ ID NO: 1572137 - DNA, 15 bp, Homo sapiens
cccttgcggaagtag

SEQ ID NO: 1572138 - DNA, 15 bp, Homo sapiens
acccttgcggaagta

SEQ ID NO: 1572139 - DNA, 15 bp, Homo sapiens
cacccttgcggaagt

SEQ ID NO: 1572140 - DNA, 15 bp, Homo sapiens
tcacccttgcggaag

SEQ ID NO: 1572141 - DNA, 15 bp, Homo sapiens
gtcacccttgcggaa

SEQ ID NO: 1572142 - DNA, 15 bp, Homo sapiens
ggtcacccttgcgga

SEQ ID NO: 1572143 - DNA, 15 bp, Homo sapiens
tggtcacccttgcgg

SEQ ID NO: 1572144 - DNA, 15 bp, Homo sapiens
gtggtcacccttgcg

SEQ ID NO: 1572145 - DNA, 15 bp, Homo sapiens
tgtggtcacccttgc

SEQ ID NO: 1572146 - DNA, 15 bp, Homo sapiens
ctgtggtcacccttg

SEQ ID NO: 1572147 - DNA, 15 bp, Homo sapiens
actgtggtcaccctt

SEQ ID NO: 1572148 - DNA, 15 bp, Homo sapiens
gactgtggtcaccct

SEQ ID NO: 1572149 - DNA, 15 bp, Homo sapiens
ggactgtggtcaccc

SEQ ID NO: 1572150 - DNA, 15 bp, Homo sapiens
aggactgtggtcacc

SEQ ID NO: 1572151 - DNA, 15 bp, Homo sapiens
caggactgtggtcac

SEQ ID NO: 1572152 - DNA, 15 bp, Homo sapiens
acaggactgtggtca

SEQ ID NO: 1572153 - DNA, 15 bp, Homo sapiens
aacaggactgtggtc

SEQ ID NO: 1572154 - DNA, 15 bp, Homo sapiens
taacaggactgtggt

SEQ ID NO: 1572155 - DNA, 15 bp, Homo sapiens
gtaacaggactgtgg

SEQ ID NO: 1572156 - DNA, 15 bp, Homo sapiens
ggtaacaggactgtg

SEQ ID NO: 1572157 - DNA, 15 bp, Homo sapiens
gggtaacaggactgt

SEQ ID NO: 1572158 - DNA, 15 bp, Homo sapiens
tgggtaacaggactg

SEQ ID NO: 1572159 - DNA, 15 bp, Homo sapiens
ttgggtaacaggact

SEQ ID NO: 1572160 - DNA, 15 bp, Homo sapiens
attgggtaacaggac

SEQ ID NO: 1572161 - DNA, 15 bp, Homo sapiens
aattgggtaacagga

SEQ ID NO: 1572162 - DNA, 15 bp, Homo sapiens
aaattgggtaacagg

SEQ ID NO: 1572163 - DNA, 15 bp, Homo sapiens
caaattgggtaacag

SEQ ID NO: 1572164 - DNA, 15 bp, Homo sapiens
acaaattgggtaaca

SEQ ID NO: 1572165 - DNA, 15 bp, Homo sapiens
tacaaattgggtaac

SEQ ID NO: 1572166 - DNA, 15 bp, Homo sapiens
ttacaaattgggtaa

SEQ ID NO: 1572167 - DNA, 15 bp, Homo sapiens
attacaaattgggta

SEQ ID NO: 1572168 - DNA, 15 bp, Homo sapiens
gattacaaattgggt

SEQ ID NO: 1572169 - DNA, 15 bp, Homo sapiens
agattacaaattggg

SEQ ID NO: 1572170 - DNA, 15 bp, Homo sapiens
aagattacaaattgg

SEQ ID NO: 1572171 - DNA, 15 bp, Homo sapiens
aaagattacaaattg

SEQ ID NO: 1572172 - DNA, 15 bp, Homo sapiens
gaaagattacaaatt

SEQ ID NO: 1572173 - DNA, 15 bp, Homo sapiens
ggaaagattacaaat

SEQ ID NO: 1572174 - DNA, 15 bp, Homo sapiens
aggaaagattacaaa

SEQ ID NO: 1572175 - DNA, 15 bp, Homo sapiens
taggaaagattacaa

SEQ ID NO: 1572176 - DNA, 15 bp, Homo sapiens
ttaggaaagattaca

SEQ ID NO: 1572177 - DNA, 15 bp, Homo sapiens
attaggaaagattac

SEQ ID NO: 1572178 - DNA, 15 bp, Homo sapiens
cattaggaaagatta

SEQ ID NO: 1572179 - DNA, 15 bp, Homo sapiens
acattaggaaagatt

SEQ ID NO: 1572180 - DNA, 15 bp, Homo sapiens
cacattaggaaagat

SEQ ID NO: 1572181 - DNA, 15 bp, Homo sapiens
tcacattaggaaaga

SEQ ID NO: 1572182 - DNA, 15 bp, Homo sapiens
atcacattaggaaag

SEQ ID NO: 1572183 - DNA, 15 bp, Homo sapiens
tatcacattaggaaa

SEQ ID NO: 1572184 - DNA, 15 bp, Homo sapiens
ctatcacattaggaa

SEQ ID NO: 1572185 - DNA, 15 bp, Homo sapiens
tctatcacattagga

SEQ ID NO: 1572186 - DNA, 15 bp, Homo sapiens
atctatcacattagg

SEQ ID NO: 1572187 - DNA, 15 bp, Homo sapiens
tatctatcacattag

SEQ ID NO: 1572188 - DNA, 15 bp, Homo sapiens
ttatctatcacatta

SEQ ID NO: 1572189 - DNA, 15 bp, Homo sapiens
tttatctatcacatt

SEQ ID NO: 1572190 - DNA, 15 bp, Homo sapiens
ttttatctatcacat

SEQ ID NO: 1572191 - DNA, 15 bp, Homo sapiens
tttttatctatcaca

SEQ ID NO: 1572192 - DNA, 15 bp, Homo sapiens
atttttatctatcac

SEQ ID NO: 1572193 - DNA, 15 bp, Homo sapiens
tatttttatctatca

SEQ ID NO: 1572194 - DNA, 15 bp, Homo sapiens
ttatttttatctatc

SEQ ID NO: 1572195 - DNA, 15 bp, Homo sapiens
tttatttttatctat

SEQ ID NO: 1572196 - DNA, 15 bp, Homo sapiens
ttttatttttatcta

SEQ ID NO: 1572197 - DNA, 15 bp, Homo sapiens
tttttatttttatct

SEQ ID NO: 1572198 - DNA, 15 bp, Homo sapiens
atttttatttttatc

SEQ ID NO: 1572199 - DNA, 15 bp, Homo sapiens
ataagatttttattt

SEQ ID NO: 1572200 - DNA, 15 bp, Homo sapiens
aataagatttttatt

SEQ ID NO: 1572201 - DNA, 15 bp, Homo sapiens
aaataagatttttat

SEQ ID NO: 1572202 - DNA, 15 bp, Homo sapiens
aaaataagattttta

SEQ ID NO: 1572203 - DNA, 15 bp, Homo sapiens
taaaataagattttt

SEQ ID NO: 1572204 - DNA, 15 bp, Homo sapiens
ctaaaataagatttt

SEQ ID NO: 1572205 - DNA, 15 bp, Homo sapiens
actaaaataagattt

SEQ ID NO: 1572206 - DNA, 15 bp, Homo sapiens
aactaaaataagatt

SEQ ID NO: 1572207 - DNA, 15 bp, Homo sapiens
aaactaaaataagat

SEQ ID NO: 1572208 - DNA, 15 bp, Homo sapiens
gaaactaaaataaga

SEQ ID NO: 1572209 - DNA, 15 bp, Homo sapiens
agaaactaaaataag

SEQ ID NO: 1572210 - DNA, 15 bp, Homo sapiens
ccagaaactaaaata

SEQ ID NO: 1572211 - DNA, 15 bp, Homo sapiens
accagaaactaaaat

SEQ ID NO: 1572212 - DNA, 15 bp, Homo sapiens
aaccagaaactaaaa

SEQ ID NO: 1572213 - DNA, 15 bp, Homo sapiens
taaccagaaactaaa

SEQ ID NO: 1572214 - DNA, 15 bp, Homo sapiens
gtaaccagaaactaa

SEQ ID NO: 1572215 - DNA, 15 bp, Homo sapiens
agtaaccagaaacta

SEQ ID NO: 1572216 - DNA, 15 bp, Homo sapiens
aagtaaccagaaact

SEQ ID NO: 1572217 - DNA, 15 bp, Homo sapiens
aaagtaaccagaaac

SEQ ID NO: 1572218 - DNA, 15 bp, Homo sapiens
aaaagtaaccagaaa

SEQ ID NO: 1572219 - DNA, 15 bp, Homo sapiens
gaaaagtaaccagaa

SEQ ID NO: 1572220 - DNA, 15 bp, Homo sapiens
agaaaagtaaccaga

SEQ ID NO: 1572221 - DNA, 15 bp, Homo sapiens
cagaaaagtaaccag

SEQ ID NO: 1572222 - DNA, 15 bp, Homo sapiens
tcagaaaagtaacca

SEQ ID NO: 1572223 - DNA, 15 bp, Homo sapiens
ttcagaaaagtaacc

SEQ ID NO: 1572224 - DNA, 15 bp, Homo sapiens
cttcagaaaagtaac

SEQ ID NO: 1572225 - DNA, 15 bp, Homo sapiens
acttcagaaaagtaa

SEQ ID NO: 1572226 - DNA, 15 bp, Homo sapiens
aacttcagaaaagta

SEQ ID NO: 1572227 - DNA, 15 bp, Homo sapiens
taacttcagaaaagt

SEQ ID NO: 1572228 - DNA, 15 bp, Homo sapiens
gtaacttcagaaaag

SEQ ID NO: 1572229 - DNA, 15 bp, Homo sapiens
agtaacttcagaaaa

SEQ ID NO: 1572230 - DNA, 15 bp, Homo sapiens
cagtaacttcagaaa

SEQ ID NO: 1572231 - DNA, 15 bp, Homo sapiens
gcagtaacttcagaa

SEQ ID NO: 1572232 - DNA, 15 bp, Homo sapiens
agcagtaacttcaga

SEQ ID NO: 1572233 - DNA, 15 bp, Homo sapiens
aagcagtaacttcag

SEQ ID NO: 1572234 - DNA, 15 bp, Homo sapiens
taagcagtaacttca

SEQ ID NO: 1572235 - DNA, 15 bp, Homo sapiens
ctaagcagtaacttc

SEQ ID NO: 1572236 - DNA, 15 bp, Homo sapiens
tctaagcagtaactt

SEQ ID NO: 1572237 - DNA, 15 bp, Homo sapiens
atctaagcagtaact

SEQ ID NO: 1572238 - DNA, 15 bp, Homo sapiens
aatctaagcagtaac

SEQ ID NO: 1572239 - DNA, 15 bp, Homo sapiens
taatctaagcagtaa

SEQ ID NO: 1572240 - DNA, 15 bp, Homo sapiens
ataatctaagcagta

SEQ ID NO: 1572241 - DNA, 15 bp, Homo sapiens
aataatctaagcagt

SEQ ID NO: 1572242 - DNA, 15 bp, Homo sapiens
aaataatctaagcag

SEQ ID NO: 1572243 - DNA, 15 bp, Homo sapiens
taaataatctaagca

SEQ ID NO: 1572244 - DNA, 15 bp, Homo sapiens
ataaataatctaagc

SEQ ID NO: 1572245 - DNA, 15 bp, Homo sapiens
tataaataatctaag

SEQ ID NO: 1572246 - DNA, 15 bp, Homo sapiens
ttataaataatctaa

SEQ ID NO: 1572247 - DNA, 15 bp, Homo sapiens
attataaataatcta

SEQ ID NO: 1572248 - DNA, 15 bp, Homo sapiens
tattataaataatct

SEQ ID NO: 1572249 - DNA, 15 bp, Homo sapiens
atattataaataatc

SEQ ID NO: 1572250 - DNA, 15 bp, Homo sapiens
aatattataaataat

SEQ ID NO: 1572251 - DNA, 15 bp, Homo sapiens
taatattataaataa

SEQ ID NO: 1572252 - DNA, 15 bp, Homo sapiens
ttaatattataaata

SEQ ID NO: 1572253 - DNA, 15 bp, Homo sapiens
aattaatattataaa

SEQ ID NO: 1572254 - DNA, 15 bp, Homo sapiens
caattaatattataa

SEQ ID NO: 1572255 - DNA, 15 bp, Homo sapiens
ccaattaatattata

SEQ ID NO: 1572256 - DNA, 15 bp, Homo sapiens
cccaattaatattat

SEQ ID NO: 1572257 - DNA, 15 bp, Homo sapiens
ccccaattaatatta

SEQ ID NO: 1572258 - DNA, 15 bp, Homo sapiens
accccaattaatatt

SEQ ID NO: 1572259 - DNA, 15 bp, Homo sapiens
caccccaattaatat

SEQ ID NO: 1572260 - DNA, 15 bp, Homo sapiens
ccaccccaattaata

SEQ ID NO: 1572261 - DNA, 15 bp, Homo sapiens
cccaccccaattaat

SEQ ID NO: 1572262 - DNA, 15 bp, Homo sapiens
ccccaccccaattaa

SEQ ID NO: 1572263 - DNA, 15 bp, Homo sapiens
accccaccccaatta

SEQ ID NO: 1572264 - DNA, 15 bp, Homo sapiens
caccccaccccaatt

SEQ ID NO: 1572265 - DNA, 15 bp, Homo sapiens
gcaccccaccccaat

SEQ ID NO: 1572266 - DNA, 15 bp, Homo sapiens
tgcaccccaccccaa

SEQ ID NO: 1572267 - DNA, 15 bp, Homo sapiens
ctgcaccccacccca

SEQ ID NO: 1572268 - DNA, 15 bp, Homo sapiens
actgcaccccacccc

SEQ ID NO: 1572269 - DNA, 15 bp, Homo sapiens
cactgcaccccaccc

SEQ ID NO: 1572270 - DNA, 15 bp, Homo sapiens
ccactgcaccccacc

SEQ ID NO: 1572271 - DNA, 15 bp, Homo sapiens
gccactgcaccccac

SEQ ID NO: 1572272 - DNA, 15 bp, Homo sapiens
agccactgcacccca

SEQ ID NO: 1572273 - DNA, 15 bp, Homo sapiens
gagccactgcacccc

SEQ ID NO: 1572274 - DNA, 15 bp, Homo sapiens
tctgggattacaagc

SEQ ID NO: 1572275 - DNA, 15 bp, Homo sapiens
ttctgggattacaag

SEQ ID NO: 1572276 - DNA, 15 bp, Homo sapiens
gttctgggattacaa

SEQ ID NO: 1572277 - DNA, 15 bp, Homo sapiens
tcaaagttctgggat

SEQ ID NO: 1572278 - DNA, 15 bp, Homo sapiens
ctcaaagttctggga

SEQ ID NO: 1572279 - DNA, 15 bp, Homo sapiens
tctcaaagttctggg

SEQ ID NO: 1572280 - DNA, 15 bp, Homo sapiens
ctctcaaagttctgg

SEQ ID NO: 1572281 - DNA, 15 bp, Homo sapiens
cctctcaaagttctg

SEQ ID NO: 1572282 - DNA, 15 bp, Homo sapiens
gcctctcaaagttct

SEQ ID NO: 1572283 - DNA, 15 bp, Homo sapiens
ggcctctcaaagttc

SEQ ID NO: 1572284 - DNA, 15 bp, Homo sapiens
tggcctctcaaagtt

SEQ ID NO: 1572285 - DNA, 15 bp, Homo sapiens
ttggcctctcaaagt

SEQ ID NO: 1572286 - DNA, 15 bp, Homo sapiens
cttggcctctcaaag

SEQ ID NO: 1572287 - DNA, 15 bp, Homo sapiens
tcttggcctctcaaa

SEQ ID NO: 1572288 - DNA, 15 bp, Homo sapiens
atcttggcctctcaa

SEQ ID NO: 1572289 - DNA, 15 bp, Homo sapiens
catcttggcctctca

SEQ ID NO: 1572290 - DNA, 15 bp, Homo sapiens
ccatcttggcctctc

SEQ ID NO: 1572291 - DNA, 15 bp, Homo sapiens
tccatcttggcctct

SEQ ID NO: 1572292 - DNA, 15 bp, Homo sapiens
ttccatcttggcctc

SEQ ID NO: 1572293 - DNA, 15 bp, Homo sapiens
cttccatcttggcct

SEQ ID NO: 1572294 - DNA, 15 bp, Homo sapiens
ccttccatcttggcc

SEQ ID NO: 1572295 - DNA, 15 bp, Homo sapiens
tccttccatcttggc

SEQ ID NO: 1572296 - DNA, 15 bp, Homo sapiens
atccttccatcttgg

SEQ ID NO: 1572297 - DNA, 15 bp, Homo sapiens
aatccttccatcttg

SEQ ID NO: 1572298 - DNA, 15 bp, Homo sapiens
caatccttccatctt

SEQ ID NO: 1572299 - DNA, 15 bp, Homo sapiens
tctcaagcaatcctt

SEQ ID NO: 1572300 - DNA, 15 bp, Homo sapiens
gtctcaagcaatcct

SEQ ID NO: 1572301 - DNA, 15 bp, Homo sapiens
cctggtctcaagcaa

SEQ ID NO: 1572302 - DNA, 15 bp, Homo sapiens
tcctggtctcaagca

SEQ ID NO: 1572303 - DNA, 15 bp, Homo sapiens
ctcctggtctcaagc

SEQ ID NO: 1572304 - DNA, 15 bp, Homo sapiens
gaactcctggtctca

SEQ ID NO: 1572305 - DNA, 15 bp, Homo sapiens
tgaactcctggtctc

SEQ ID NO: 1572306 - DNA, 15 bp, Homo sapiens
ttgaactcctggtct

SEQ ID NO: 1572307 - DNA, 15 bp, Homo sapiens
cttgaactcctggtc

SEQ ID NO: 1572308 - DNA, 15 bp, Homo sapiens
tcttgaactcctggt

SEQ ID NO: 1572309 - DNA, 15 bp, Homo sapiens
aaggctggtcttgaa

SEQ ID NO: 1572310 - DNA, 15 bp, Homo sapiens
caaggctggtcttga

SEQ ID NO: 1572311 - DNA, 15 bp, Homo sapiens
ccaaggctggtcttg

SEQ ID NO: 1572312 - DNA, 15 bp, Homo sapiens
gccaaggctggtctt

SEQ ID NO: 1572313 - DNA, 15 bp, Homo sapiens
tgccaaggctggtct

SEQ ID NO: 1572314 - DNA, 15 bp, Homo sapiens
ttgccaaggctggtc

SEQ ID NO: 1572315 - DNA, 15 bp, Homo sapiens
gttgccaaggctggt

SEQ ID NO: 1572316 - DNA, 15 bp, Homo sapiens
atgttgccaaggctg

SEQ ID NO: 1572317 - DNA, 15 bp, Homo sapiens
tatgttgccaaggct

SEQ ID NO: 1572318 - DNA, 15 bp, Homo sapiens
ctatgttgccaaggc

SEQ ID NO: 1572319 - DNA, 15 bp, Homo sapiens
actatgttgccaagg

SEQ ID NO: 1572320 - DNA, 15 bp, Homo sapiens
cactatgttgccaag

SEQ ID NO: 1572321 - DNA, 15 bp, Homo sapiens
tcactatgttgccaa

SEQ ID NO: 1572322 - DNA, 15 bp, Homo sapiens
ctcactatgttgcca

SEQ ID NO: 1572323 - DNA, 15 bp, Homo sapiens
tagagtctcactatg

SEQ ID NO: 1572324 - DNA, 15 bp, Homo sapiens
atagagtctcactat

SEQ ID NO: 1572325 - DNA, 15 bp, Homo sapiens
gatagagtctcacta

SEQ ID NO: 1572326 - DNA, 15 bp, Homo sapiens
agatagagtctcact

SEQ ID NO: 1572327 - DNA, 15 bp, Homo sapiens
gagatagagtctcac

SEQ ID NO: 1572328 - DNA, 15 bp, Homo sapiens
agagatagagtctca

SEQ ID NO: 1572329 - DNA, 15 bp, Homo sapiens
tagagatagagtctc

SEQ ID NO: 1572330 - DNA, 15 bp, Homo sapiens
ctagagatagagtct

SEQ ID NO: 1572331 - DNA, 15 bp, Homo sapiens
tctagagatagagtc

SEQ ID NO: 1572332 - DNA, 15 bp, Homo sapiens
gtctagagatagagt

SEQ ID NO: 1572333 - DNA, 15 bp, Homo sapiens
tgtctagagatagag

SEQ ID NO: 1572334 - DNA, 15 bp, Homo sapiens
ctgtctagagataga

SEQ ID NO: 1572335 - DNA, 15 bp, Homo sapiens
tctgtctagagatag

SEQ ID NO: 1572336 - DNA, 15 bp, Homo sapiens
ttctgtctagagata

SEQ ID NO: 1572337 - DNA, 15 bp, Homo sapiens
attctgtctagagat

SEQ ID NO: 1572338 - DNA, 15 bp, Homo sapiens
aattctgtctagaga

SEQ ID NO: 1572339 - DNA, 15 bp, Homo sapiens
aaaattctgtctaga

SEQ ID NO: 1572340 - DNA, 15 bp, Homo sapiens
taaaattctgtctag

SEQ ID NO: 1572341 - DNA, 15 bp, Homo sapiens
ttaaaattctgtcta

SEQ ID NO: 1572342 - DNA, 15 bp, Homo sapiens
tttaaaattctgtct

SEQ ID NO: 1572343 - DNA, 15 bp, Homo sapiens
ttttaaaattctgtc

SEQ ID NO: 1572344 - DNA, 15 bp, Homo sapiens
attttaaaattctgt

SEQ ID NO: 1572345 - DNA, 15 bp, Homo sapiens
aattttaaaattctg

SEQ ID NO: 1572346 - DNA, 15 bp, Homo sapiens
taattttaaaattct

SEQ ID NO: 1572347 - DNA, 15 bp, Homo sapiens
ctaattttaaaattc

SEQ ID NO: 1572348 - DNA, 15 bp, Homo sapiens
gctaattttaaaatt

SEQ ID NO: 1572349 - DNA, 15 bp, Homo sapiens
agctaattttaaaat

SEQ ID NO: 1572350 - DNA, 15 bp, Homo sapiens
cagctaattttaaaa

SEQ ID NO: 1572351 - DNA, 15 bp, Homo sapiens
ccagctaattttaaa

SEQ ID NO: 1572352 - DNA, 15 bp, Homo sapiens
cccagctaattttaa

SEQ ID NO: 1572353 - DNA, 15 bp, Homo sapiens
gcccagctaatttta

SEQ ID NO: 1572354 - DNA, 15 bp, Homo sapiens
atgccaccatgccca

SEQ ID NO: 1572355 - DNA, 15 bp, Homo sapiens
catgccaccatgccc

SEQ ID NO: 1572356 - DNA, 15 bp, Homo sapiens
aggactacaggtgca

SEQ ID NO: 1572357 - DNA, 15 bp, Homo sapiens
taggactacaggtgc

SEQ ID NO: 1572358 - DNA, 15 bp, Homo sapiens
ctaggactacaggtg

SEQ ID NO: 1572359 - DNA, 15 bp, Homo sapiens
gctaggactacaggt

SEQ ID NO: 1572360 - DNA, 15 bp, Homo sapiens
cagctaggactacag

SEQ ID NO: 1572361 - DNA, 15 bp, Homo sapiens
acagctaggactaca

SEQ ID NO: 1572362 - DNA, 15 bp, Homo sapiens
aacagctaggactac

SEQ ID NO: 1572363 - DNA, 15 bp, Homo sapiens
aaacagctaggacta

SEQ ID NO: 1572364 - DNA, 15 bp, Homo sapiens
caaacagctaggact

SEQ ID NO: 1572365 - DNA, 15 bp, Homo sapiens
ccaaacagctaggac

SEQ ID NO: 1572366 - DNA, 15 bp, Homo sapiens
cccaaacagctagga

SEQ ID NO: 1572367 - DNA, 15 bp, Homo sapiens
tcccaaacagctagg

SEQ ID NO: 1572368 - DNA, 15 bp, Homo sapiens
ctcccaaacagctag

SEQ ID NO: 1572369 - DNA, 15 bp, Homo sapiens
cctcccaaacagcta

SEQ ID NO: 1572370 - DNA, 15 bp, Homo sapiens
gcctcccaaacagct

SEQ ID NO: 1572371 - DNA, 15 bp, Homo sapiens
agcctcccaaacagc

SEQ ID NO: 1572372 - DNA, 15 bp, Homo sapiens
cagcctcccaaacag

SEQ ID NO: 1572373 - DNA, 15 bp, Homo sapiens
tcagcctcccaaaca

SEQ ID NO: 1572374 - DNA, 15 bp, Homo sapiens
ctcagcctcccaaac

SEQ ID NO: 1572375 - DNA, 15 bp, Homo sapiens
tatcctctcgcctca

SEQ ID NO: 1572376 - DNA, 15 bp, Homo sapiens
ctatcctctcgcctc

SEQ ID NO: 1572377 - DNA, 15 bp, Homo sapiens
gctatcctctcgcct

SEQ ID NO: 1572378 - DNA, 15 bp, Homo sapiens
agctatcctctcgcc

SEQ ID NO: 1572379 - DNA, 15 bp, Homo sapiens
aagctatcctctcgc

SEQ ID NO: 1572380 - DNA, 15 bp, Homo sapiens
caagctatcctctcg

SEQ ID NO: 1572381 - DNA, 15 bp, Homo sapiens
tcaagctatcctctc

SEQ ID NO: 1572382 - DNA, 15 bp, Homo sapiens
ctcaagctatcctct

SEQ ID NO: 1572383 - DNA, 15 bp, Homo sapiens
aggctcaagctatcc

SEQ ID NO: 1572384 - DNA, 15 bp, Homo sapiens
caggctcaagctatc

SEQ ID NO: 1572385 - DNA, 15 bp, Homo sapiens
ccaggctcaagctat

SEQ ID NO: 1572386 - DNA, 15 bp, Homo sapiens
tccaggctcaagcta

SEQ ID NO: 1572387 - DNA, 15 bp, Homo sapiens
ttccaggctcaagct

SEQ ID NO: 1572388 - DNA, 15 bp, Homo sapiens
cttccaggctcaagc

SEQ ID NO: 1572389 - DNA, 15 bp, Homo sapiens
acttccaggctcaag

SEQ ID NO: 1572390 - DNA, 15 bp, Homo sapiens
aacttccaggctcaa

SEQ ID NO: 1572391 - DNA, 15 bp, Homo sapiens
gaacttccaggctca

SEQ ID NO: 1572392 - DNA, 15 bp, Homo sapiens
tgaacttccaggctc

SEQ ID NO: 1572393 - DNA, 15 bp, Homo sapiens
ttgaacttccaggct

SEQ ID NO: 1572394 - DNA, 15 bp, Homo sapiens
cttgaacttccaggc

SEQ ID NO: 1572395 - DNA, 15 bp, Homo sapiens
ccttgaacttccagg

SEQ ID NO: 1572396 - DNA, 15 bp, Homo sapiens
accttgaacttccag

SEQ ID NO: 1572397 - DNA, 15 bp, Homo sapiens
aaccttgaacttcca

SEQ ID NO: 1572398 - DNA, 15 bp, Homo sapiens
taaccttgaacttcc

SEQ ID NO: 1572399 - DNA, 15 bp, Homo sapiens
ataaccttgaacttc

SEQ ID NO: 1572400 - DNA, 15 bp, Homo sapiens
tataaccttgaactt

SEQ ID NO: 1572401 - DNA, 15 bp, Homo sapiens
gatcatagctcacta

SEQ ID NO: 1572402 - DNA, 15 bp, Homo sapiens
cagtgcagtggtgtg

SEQ ID NO: 1572403 - DNA, 15 bp, Homo sapiens
gcagtgcagtggtgt

SEQ ID NO: 1572404 - DNA, 15 bp, Homo sapiens
acaggctgcagtgca

SEQ ID NO: 1572405 - DNA, 15 bp, Homo sapiens
cacaggctgcagtgc

SEQ ID NO: 1572406 - DNA, 15 bp, Homo sapiens
gcacaggctgcagtg

SEQ ID NO: 1572407 - DNA, 15 bp, Homo sapiens
tgcacaggctgcagt

SEQ ID NO: 1572408 - DNA, 15 bp, Homo sapiens
ttgcacaggctgcag

SEQ ID NO: 1572409 - DNA, 15 bp, Homo sapiens
gttgcacaggctgca

SEQ ID NO: 1572410 - DNA, 15 bp, Homo sapiens
tgttgcacaggctgc

SEQ ID NO: 1572411 - DNA, 15 bp, Homo sapiens
ctgttgcacaggctg

SEQ ID NO: 1572412 - DNA, 15 bp, Homo sapiens
cctgttgcacaggct

SEQ ID NO: 1572413 - DNA, 15 bp, Homo sapiens
ccctgttgcacaggc

SEQ ID NO: 1572414 - DNA, 15 bp, Homo sapiens
gccctgttgcacagg

SEQ ID NO: 1572415 - DNA, 15 bp, Homo sapiens
tgccctgttgcacag

SEQ ID NO: 1572416 - DNA, 15 bp, Homo sapiens
ttgccctgttgcaca

SEQ ID NO: 1572417 - DNA, 15 bp, Homo sapiens
cttgccctgttgcac

SEQ ID NO: 1572418 - DNA, 15 bp, Homo sapiens
tcttgccctgttgca

SEQ ID NO: 1572419 - DNA, 15 bp, Homo sapiens
gtcttgccctgttgc

SEQ ID NO: 1572420 - DNA, 15 bp, Homo sapiens
ggtcttgccctgttg

SEQ ID NO: 1572421 - DNA, 15 bp, Homo sapiens
gggtcttgccctgtt

SEQ ID NO: 1572422 - DNA, 15 bp, Homo sapiens
agggtcttgccctgt

SEQ ID NO: 1572423 - DNA, 15 bp, Homo sapiens
cagggtcttgccctg

SEQ ID NO: 1572424 - DNA, 15 bp, Homo sapiens
acagggtcttgccct

SEQ ID NO: 1572425 - DNA, 15 bp, Homo sapiens
gacagggtcttgccc

SEQ ID NO: 1572426 - DNA, 15 bp, Homo sapiens
agacagggtcttgcc

SEQ ID NO: 1572427 - DNA, 15 bp, Homo sapiens
atttagagacagggt

SEQ ID NO: 1572428 - DNA, 15 bp, Homo sapiens
tatttagagacaggg

SEQ ID NO: 1572429 - DNA, 15 bp, Homo sapiens
ttatttagagacagg

SEQ ID NO: 1572430 - DNA, 15 bp, Homo sapiens
tttatttagagacag

SEQ ID NO: 1572431 - DNA, 15 bp, Homo sapiens
atttatttagagaca

SEQ ID NO: 1572432 - DNA, 15 bp, Homo sapiens
attatttatttagag

SEQ ID NO: 1572433 - DNA, 15 bp, Homo sapiens
gattatttatttaga

SEQ ID NO: 1572434 - DNA, 15 bp, Homo sapiens
tgattatttatttag

SEQ ID NO: 1572435 - DNA, 15 bp, Homo sapiens
attgattatttattt

SEQ ID NO: 1572436 - DNA, 15 bp, Homo sapiens
gattgattatttatt

SEQ ID NO: 1572437 - DNA, 15 bp, Homo sapiens
tgattgattatttat

SEQ ID NO: 1572438 - DNA, 15 bp, Homo sapiens
atgattgattattta

SEQ ID NO: 1572439 - DNA, 15 bp, Homo sapiens
aatgattgattattt

SEQ ID NO: 1572440 - DNA, 15 bp, Homo sapiens
caatgattgattatt

SEQ ID NO: 1572441 - DNA, 15 bp, Homo sapiens
acaatgattgattat

SEQ ID NO: 1572442 - DNA, 15 bp, Homo sapiens
aacaatgattgatta

SEQ ID NO: 1572443 - DNA, 15 bp, Homo sapiens
taacaatgattgatt

SEQ ID NO: 1572444 - DNA, 15 bp, Homo sapiens
ctaacaatgattgat

SEQ ID NO: 1572445 - DNA, 15 bp, Homo sapiens
cctaacaatgattga

SEQ ID NO: 1572446 - DNA, 15 bp, Homo sapiens
gcctaacaatgattg

SEQ ID NO: 1572447 - DNA, 15 bp, Homo sapiens
ggcctaacaatgatt

SEQ ID NO: 1572448 - DNA, 15 bp, Homo sapiens
gggcctaacaatgat

SEQ ID NO: 1572449 - DNA, 15 bp, Homo sapiens
tgggcctaacaatga

SEQ ID NO: 1572450 - DNA, 15 bp, Homo sapiens
ctgggcctaacaatg

SEQ ID NO: 1572451 - DNA, 15 bp, Homo sapiens
cctgggcctaacaat

SEQ ID NO: 1572452 - DNA, 15 bp, Homo sapiens
acctgggcctaacaa

SEQ ID NO: 1572453 - DNA, 15 bp, Homo sapiens
aacctgggcctaaca

SEQ ID NO: 1572454 - DNA, 15 bp, Homo sapiens
aaacctgggcctaac

SEQ ID NO: 1572455 - DNA, 15 bp, Homo sapiens
aaaacctgggcctaa

SEQ ID NO: 1572456 - DNA, 15 bp, Homo sapiens
caaaacctgggccta

SEQ ID NO: 1572457 - DNA, 15 bp, Homo sapiens
ccaaaacctgggcct

SEQ ID NO: 1572458 - DNA, 15 bp, Homo sapiens
tccaaaacctgggcc

SEQ ID NO: 1572459 - DNA, 15 bp, Homo sapiens
ctccaaaacctgggc

SEQ ID NO: 1572460 - DNA, 15 bp, Homo sapiens
cctccaaaacctggg

SEQ ID NO: 1572461 - DNA, 15 bp, Homo sapiens
acctccaaaacctgg

SEQ ID NO: 1572462 - DNA, 15 bp, Homo sapiens
aacctccaaaacctg

SEQ ID NO: 1572463 - DNA, 15 bp, Homo sapiens
aaacctccaaaacct

SEQ ID NO: 1572464 - DNA, 15 bp, Homo sapiens
taaacctccaaaacc

SEQ ID NO: 1572465 - DNA, 15 bp, Homo sapiens
ttaaacctccaaaac

SEQ ID NO: 1572466 - DNA, 15 bp, Homo sapiens
attaaacctccaaaa

SEQ ID NO: 1572467 - DNA, 15 bp, Homo sapiens
gattaaacctccaaa

SEQ ID NO: 1572468 - DNA, 15 bp, Homo sapiens
agattaaacctccaa

SEQ ID NO: 1572469 - DNA, 15 bp, Homo sapiens
gagattaaacctcca

SEQ ID NO: 1572470 - DNA, 15 bp, Homo sapiens
ggagattaaacctcc

SEQ ID NO: 1572471 - DNA, 15 bp, Homo sapiens
aggagattaaacctc

SEQ ID NO: 1572472 - DNA, 15 bp, Homo sapiens
gaggagattaaacct

SEQ ID NO: 1572473 - DNA, 15 bp, Homo sapiens
ggaggagattaaacc

SEQ ID NO: 1572474 - DNA, 15 bp, Homo sapiens
aggaggagattaaac

SEQ ID NO: 1572475 - DNA, 15 bp, Homo sapiens
gaggaggagattaaa

SEQ ID NO: 1572476 - DNA, 15 bp, Homo sapiens
tgaggaggagattaa

SEQ ID NO: 1572477 - DNA, 15 bp, Homo sapiens
ttgaggaggagatta

SEQ ID NO: 1572478 - DNA, 15 bp, Homo sapiens
cttgaggaggagatt

SEQ ID NO: 1572479 - DNA, 15 bp, Homo sapiens
tcttgaggaggagat

SEQ ID NO: 1572480 - DNA, 15 bp, Homo sapiens
ctcttgaggaggaga

SEQ ID NO: 1572481 - DNA, 15 bp, Homo sapiens
tctcttgaggaggag

SEQ ID NO: 1572482 - DNA, 15 bp, Homo sapiens
ttctcttgaggagga

SEQ ID NO: 1572483 - DNA, 15 bp, Homo sapiens
tttctcttgaggagg

SEQ ID NO: 1572484 - DNA, 15 bp, Homo sapiens
atttctcttgaggag

SEQ ID NO: 1572485 - DNA, 15 bp, Homo sapiens
tatttctcttgagga

SEQ ID NO: 1572486 - DNA, 15 bp, Homo sapiens
ttatttctcttgagg

SEQ ID NO: 1572487 - DNA, 15 bp, Homo sapiens
tttatttctcttgag

SEQ ID NO: 1572488 - DNA, 15 bp, Homo sapiens
atttatttctcttga

SEQ ID NO: 1572489 - DNA, 15 bp, Homo sapiens
catttatttctcttg

SEQ ID NO: 1572490 - DNA, 15 bp, Homo sapiens
ccatttatttctctt

SEQ ID NO: 1572491 - DNA, 15 bp, Homo sapiens
gccatttatttctct

SEQ ID NO: 1572492 - DNA, 15 bp, Homo sapiens
tgccatttatttctc

SEQ ID NO: 1572493 - DNA, 15 bp, Homo sapiens
atgccatttatttct

SEQ ID NO: 1572494 - DNA, 15 bp, Homo sapiens
gatgccatttatttc

SEQ ID NO: 1572495 - DNA, 15 bp, Homo sapiens
acagatgccatttat

SEQ ID NO: 1572496 - DNA, 15 bp, Homo sapiens
aacagatgccattta

SEQ ID NO: 1572497 - DNA, 15 bp, Homo sapiens
aaacagatgccattt

SEQ ID NO: 1572498 - DNA, 15 bp, Homo sapiens
taaacagatgccatt

SEQ ID NO: 1572499 - DNA, 15 bp, Homo sapiens
ttaaacagatgccat

SEQ ID NO: 1572500 - DNA, 15 bp, Homo sapiens
cttaaacagatgcca

SEQ ID NO: 1572501 - DNA, 15 bp, Homo sapiens
ccttaaacagatgcc

SEQ ID NO: 1572502 - DNA, 15 bp, Homo sapiens
accttaaacagatgc

SEQ ID NO: 1572503 - DNA, 15 bp, Homo sapiens
aaccttaaacagatg

SEQ ID NO: 1572504 - DNA, 15 bp, Homo sapiens
caaccttaaacagat

SEQ ID NO: 1572505 - DNA, 15 bp, Homo sapiens
gcaaccttaaacaga

SEQ ID NO: 1572506 - DNA, 15 bp, Homo sapiens
tgcaaccttaaacag

SEQ ID NO: 1572507 - DNA, 15 bp, Homo sapiens
ctgcaaccttaaaca

SEQ ID NO: 1572508 - DNA, 15 bp, Homo sapiens
tctgcaaccttaaac

SEQ ID NO: 1572509 - DNA, 15 bp, Homo sapiens
ttctgcaaccttaaa

SEQ ID NO: 1572510 - DNA, 15 bp, Homo sapiens
attctgcaaccttaa

SEQ ID NO: 1572511 - DNA, 15 bp, Homo sapiens
cattctgcaacctta

SEQ ID NO: 1572512 - DNA, 15 bp, Homo sapiens
acattctgcaacctt

SEQ ID NO: 1572513 - DNA, 15 bp, Homo sapiens
cacattctgcaacct

SEQ ID NO: 1572514 - DNA, 15 bp, Homo sapiens
tcacattctgcaacc

SEQ ID NO: 1572515 - DNA, 15 bp, Homo sapiens
ttcacattctgcaac

SEQ ID NO: 1572516 - DNA, 15 bp, Homo sapiens
tttcacattctgcaa

SEQ ID NO: 1572517 - DNA, 15 bp, Homo sapiens
atttcacattctgca

SEQ ID NO: 1572518 - DNA, 15 bp, Homo sapiens
catttcacattctgc

SEQ ID NO: 1572519 - DNA, 15 bp, Homo sapiens
tcatttcacattctg

SEQ ID NO: 1572520 - DNA, 15 bp, Homo sapiens
gtcatttcacattct

SEQ ID NO: 1572521 - DNA, 15 bp, Homo sapiens
agtcatttcacattc

SEQ ID NO: 1572522 - DNA, 15 bp, Homo sapiens
aagtcatttcacatt

SEQ ID NO: 1572523 - DNA, 15 bp, Homo sapiens
caagtcatttcacat

SEQ ID NO: 1572524 - DNA, 15 bp, Homo sapiens
ccaagtcatttcaca

SEQ ID NO: 1572525 - DNA, 15 bp, Homo sapiens
gccaagtcatttcac

SEQ ID NO: 1572526 - DNA, 15 bp, Homo sapiens
tgccaagtcatttca

SEQ ID NO: 1572527 - DNA, 15 bp, Homo sapiens
atgccaagtcatttc

SEQ ID NO: 1572528 - DNA, 15 bp, Homo sapiens
tatgccaagtcattt

SEQ ID NO: 1572529 - DNA, 15 bp, Homo sapiens
ctatgccaagtcatt

SEQ ID NO: 1572530 - DNA, 15 bp, Homo sapiens
gctatgccaagtcat

SEQ ID NO: 1572531 - DNA, 15 bp, Homo sapiens
agctatgccaagtca

SEQ ID NO: 1572532 - DNA, 15 bp, Homo sapiens
cagctatgccaagtc

SEQ ID NO: 1572533 - DNA, 15 bp, Homo sapiens
tcagctatgccaagt

SEQ ID NO: 1572534 - DNA, 15 bp, Homo sapiens
ttcagctatgccaag

SEQ ID NO: 1572535 - DNA, 15 bp, Homo sapiens
tttcagctatgccaa

SEQ ID NO: 1572536 - DNA, 15 bp, Homo sapiens
ttttcagctatgcca

SEQ ID NO: 1572537 - DNA, 15 bp, Homo sapiens
cttttcagctatgcc

SEQ ID NO: 1572538 - DNA, 15 bp, Homo sapiens
tcttttcagctatgc

SEQ ID NO: 1572539 - DNA, 15 bp, Homo sapiens
ttcttttcagctatg

SEQ ID NO: 1572540 - DNA, 15 bp, Homo sapiens
cttcttttcagctat

SEQ ID NO: 1572541 - DNA, 15 bp, Homo sapiens
gcttcttttcagcta

SEQ ID NO: 1572542 - DNA, 15 bp, Homo sapiens
tgcttcttttcagct

SEQ ID NO: 1572543 - DNA, 15 bp, Homo sapiens
ttgcttcttttcagc

SEQ ID NO: 1572544 - DNA, 15 bp, Homo sapiens
tttgcttcttttcag

SEQ ID NO: 1572545 - DNA, 15 bp, Homo sapiens
ctttgcttcttttca

SEQ ID NO: 1572546 - DNA, 15 bp, Homo sapiens
tctttgcttcttttc

SEQ ID NO: 1572547 - DNA, 15 bp, Homo sapiens
atctttgcttctttt

SEQ ID NO: 1572548 - DNA, 15 bp, Homo sapiens
aatctttgcttcttt

SEQ ID NO: 1572549 - DNA, 15 bp, Homo sapiens
gaatctttgcttctt

SEQ ID NO: 1572550 - DNA, 15 bp, Homo sapiens
agaatctttgcttct

SEQ ID NO: 1572551 - DNA, 15 bp, Homo sapiens
tagaatctttgcttc

SEQ ID NO: 1572552 - DNA, 15 bp, Homo sapiens
gtagaatctttgctt

SEQ ID NO: 1572553 - DNA, 15 bp, Homo sapiens
tgtagaatctttgct

SEQ ID NO: 1572554 - DNA, 15 bp, Homo sapiens
ctgtagaatctttgc

SEQ ID NO: 1572555 - DNA, 15 bp, Homo sapiens
actgtagaatctttg

SEQ ID NO: 1572556 - DNA, 15 bp, Homo sapiens
tactgtagaatcttt

SEQ ID NO: 1572557 - DNA, 15 bp, Homo sapiens
atactgtagaatctt

SEQ ID NO: 1572558 - DNA, 15 bp, Homo sapiens
catactgtagaatct

SEQ ID NO: 1572559 - DNA, 15 bp, Homo sapiens
tcatactgtagaatc

SEQ ID NO: 1572560 - DNA, 15 bp, Homo sapiens
gtcatactgtagaat

SEQ ID NO: 1572561 - DNA, 15 bp, Homo sapiens
ggtcatactgtagaa

SEQ ID NO: 1572562 - DNA, 15 bp, Homo sapiens
aggtcatactgtaga

SEQ ID NO: 1572563 - DNA, 15 bp, Homo sapiens
aaggtcatactgtag

SEQ ID NO: 1572564 - DNA, 15 bp, Homo sapiens
aaaggtcatactgta

SEQ ID NO: 1572565 - DNA, 15 bp, Homo sapiens
caaaggtcatactgt

SEQ ID NO: 1572566 - DNA, 15 bp, Homo sapiens
acaaaggtcatactg

SEQ ID NO: 1572567 - DNA, 15 bp, Homo sapiens
cacaaaggtcatact

SEQ ID NO: 1572568 - DNA, 15 bp, Homo sapiens
tcacaaaggtcatac

SEQ ID NO: 1572569 - DNA, 15 bp, Homo sapiens
atcacaaaggtcata

SEQ ID NO: 1572570 - DNA, 15 bp, Homo sapiens
tatcacaaaggtcat

SEQ ID NO: 1572571 - DNA, 15 bp, Homo sapiens
atatcacaaaggtca

SEQ ID NO: 1572572 - DNA, 15 bp, Homo sapiens
tatatcacaaaggtc

SEQ ID NO: 1572573 - DNA, 15 bp, Homo sapiens
atatatcacaaaggt

SEQ ID NO: 1572574 - DNA, 15 bp, Homo sapiens
aatatatcacaaagg

SEQ ID NO: 1572575 - DNA, 15 bp, Homo sapiens
taatatatcacaaag

SEQ ID NO: 1572576 - DNA, 15 bp, Homo sapiens
ataatatatcacaaa

SEQ ID NO: 1572577 - DNA, 15 bp, Homo sapiens
aataatatatcacaa

SEQ ID NO: 1572578 - DNA, 15 bp, Homo sapiens
aaataatatatcaca

SEQ ID NO: 1572579 - DNA, 15 bp, Homo sapiens
aaaataatatatcac

SEQ ID NO: 1572580 - DNA, 15 bp, Homo sapiens
gaaaataatatatca

SEQ ID NO: 1572581 - DNA, 15 bp, Homo sapiens
agaaaataatatatc

SEQ ID NO: 1572582 - DNA, 15 bp, Homo sapiens
gagaaaataatatat

SEQ ID NO: 1572583 - DNA, 15 bp, Homo sapiens
tgagaaaataatata

SEQ ID NO: 1572584 - DNA, 15 bp, Homo sapiens
ctgagaaaataatat

SEQ ID NO: 1572585 - DNA, 15 bp, Homo sapiens
actgagaaaataata

SEQ ID NO: 1572586 - DNA, 15 bp, Homo sapiens
tactgagaaaataat

SEQ ID NO: 1572587 - DNA, 15 bp, Homo sapiens
ttactgagaaaataa

SEQ ID NO: 1572588 - DNA, 15 bp, Homo sapiens
tttactgagaaaata

SEQ ID NO: 1572589 - DNA, 15 bp, Homo sapiens
atttactgagaaaat

SEQ ID NO: 1572590 - DNA, 15 bp, Homo sapiens
tatttactgagaaaa

SEQ ID NO: 1572591 - DNA, 15 bp, Homo sapiens
ctatttactgagaaa

SEQ ID NO: 1572592 - DNA, 15 bp, Homo sapiens
actatttactgagaa

SEQ ID NO: 1572593 - DNA, 15 bp, Homo sapiens
aactatttactgaga

SEQ ID NO: 1572594 - DNA, 15 bp, Homo sapiens
aaactatttactgag

SEQ ID NO: 1572595 - DNA, 15 bp, Homo sapiens
gaaactatttactga

SEQ ID NO: 1572596 - DNA, 15 bp, Homo sapiens
agaaactatttactg

SEQ ID NO: 1572597 - DNA, 15 bp, Homo sapiens
aagaaactatttact

SEQ ID NO: 1572598 - DNA, 15 bp, Homo sapiens
aaagaaactatttac

SEQ ID NO: 1572599 - DNA, 15 bp, Homo sapiens
caaagaaactattta

SEQ ID NO: 1572600 - DNA, 15 bp, Homo sapiens
ccaaagaaactattt

SEQ ID NO: 1572601 - DNA, 15 bp, Homo sapiens
cccaaagaaactatt

SEQ ID NO: 1572602 - DNA, 15 bp, Homo sapiens
tcccaaagaaactat

SEQ ID NO: 1572603 - DNA, 15 bp, Homo sapiens
atcccaaagaaacta

SEQ ID NO: 1572604 - DNA, 15 bp, Homo sapiens
tatcccaaagaaact

SEQ ID NO: 1572605 - DNA, 15 bp, Homo sapiens
ctatcccaaagaaac

SEQ ID NO: 1572606 - DNA, 15 bp, Homo sapiens
cctatcccaaagaaa

SEQ ID NO: 1572607 - DNA, 15 bp, Homo sapiens
gcctatcccaaagaa

SEQ ID NO: 1572608 - DNA, 15 bp, Homo sapiens
tgcctatcccaaaga

SEQ ID NO: 1572609 - DNA, 15 bp, Homo sapiens
gtgcctatcccaaag

SEQ ID NO: 1572610 - DNA, 15 bp, Homo sapiens
agtgcctatcccaaa

SEQ ID NO: 1572611 - DNA, 15 bp, Homo sapiens
cagtgcctatcccaa

SEQ ID NO: 1572612 - DNA, 15 bp, Homo sapiens
acagtgcctatccca

SEQ ID NO: 1572613 - DNA, 15 bp, Homo sapiens
cacagtgcctatccc

SEQ ID NO: 1572614 - DNA, 15 bp, Homo sapiens
tcacagtgcctatcc

SEQ ID NO: 1572615 - DNA, 15 bp, Homo sapiens
atcacagtgcctatc

SEQ ID NO: 1572616 - DNA, 15 bp, Homo sapiens
aatcacagtgcctat

SEQ ID NO: 1572617 - DNA, 15 bp, Homo sapiens
taatcacagtgccta

SEQ ID NO: 1572618 - DNA, 15 bp, Homo sapiens
ttaatcacagtgcct

SEQ ID NO: 1572619 - DNA, 15 bp, Homo sapiens
tttaatcacagtgcc

SEQ ID NO: 1572620 - DNA, 15 bp, Homo sapiens
ttttaatcacagtgc

SEQ ID NO: 1572621 - DNA, 15 bp, Homo sapiens
tttttaatcacagtg

SEQ ID NO: 1572622 - DNA, 15 bp, Homo sapiens
ttttttaatcacagt

SEQ ID NO: 1572623 - DNA, 15 bp, Homo sapiens
tttttttaatcacag

SEQ ID NO: 1572624 - DNA, 15 bp, Homo sapiens
atttttttaatcaca

SEQ ID NO: 1572625 - DNA, 15 bp, Homo sapiens
tatttttttaatcac

SEQ ID NO: 1572626 - DNA, 15 bp, Homo sapiens
ttatttttttaatca

SEQ ID NO: 1572627 - DNA, 15 bp, Homo sapiens
tttatttttttaatc

SEQ ID NO: 1572628 - DNA, 15 bp, Homo sapiens
ttttatttttttaat

SEQ ID NO: 1572629 - DNA, 15 bp, Homo sapiens
cttttatttttttaa

SEQ ID NO: 1572630 - DNA, 15 bp, Homo sapiens
gcttttattttttta

SEQ ID NO: 1572631 - DNA, 15 bp, Homo sapiens
tgcttttattttttt

SEQ ID NO: 1572632 - DNA, 15 bp, Homo sapiens
atgcttttatttttt

SEQ ID NO: 1572633 - DNA, 15 bp, Homo sapiens
gatgcttttattttt

SEQ ID NO: 1572634 - DNA, 15 bp, Homo sapiens
agatgcttttatttt

SEQ ID NO: 1572635 - DNA, 15 bp, Homo sapiens
aagatgcttttattt

SEQ ID NO: 1572636 - DNA, 15 bp, Homo sapiens
caagatgcttttatt

SEQ ID NO: 1572637 - DNA, 15 bp, Homo sapiens
tcaagatgcttttat

SEQ ID NO: 1572638 - DNA, 15 bp, Homo sapiens
ctcaagatgctttta

SEQ ID NO: 1572639 - DNA, 15 bp, Homo sapiens
actcaagatgctttt

SEQ ID NO: 1572640 - DNA, 15 bp, Homo sapiens
aactcaagatgcttt

SEQ ID NO: 1572641 - DNA, 15 bp, Homo sapiens
aaactcaagatgctt

SEQ ID NO: 1572642 - DNA, 15 bp, Homo sapiens
aaaactcaagatgct

SEQ ID NO: 1572643 - DNA, 15 bp, Homo sapiens
gaaaactcaagatgc

SEQ ID NO: 1572644 - DNA, 15 bp, Homo sapiens
agaaaactcaagatg

SEQ ID NO: 1572645 - DNA, 15 bp, Homo sapiens
aagaaaactcaagat

SEQ ID NO: 1572646 - DNA, 15 bp, Homo sapiens
aaagaaaactcaaga

SEQ ID NO: 1572647 - DNA, 15 bp, Homo sapiens
caaagaaaactcaag

SEQ ID NO: 1572648 - DNA, 15 bp, Homo sapiens
tcaaagaaaactcaa

SEQ ID NO: 1572649 - DNA, 15 bp, Homo sapiens
ttcaaagaaaactca

SEQ ID NO: 1572650 - DNA, 15 bp, Homo sapiens
cttcaaagaaaactc

SEQ ID NO: 1572651 - DNA, 15 bp, Homo sapiens
acttcaaagaaaact

SEQ ID NO: 1572652 - DNA, 15 bp, Homo sapiens
cacttcaaagaaaac

SEQ ID NO: 1572653 - DNA, 15 bp, Homo sapiens
tcacttcaaagaaaa

SEQ ID NO: 1572654 - DNA, 15 bp, Homo sapiens
gtcacttcaaagaaa

SEQ ID NO: 1572655 - DNA, 15 bp, Homo sapiens
tgtcacttcaaagaa

SEQ ID NO: 1572656 - DNA, 15 bp, Homo sapiens
ttgtcacttcaaaga

SEQ ID NO: 1572657 - DNA, 15 bp, Homo sapiens
tttgtcacttcaaag

SEQ ID NO: 1572658 - DNA, 15 bp, Homo sapiens
atttgtcacttcaaa

SEQ ID NO: 1572659 - DNA, 15 bp, Homo sapiens
aatttgtcacttcaa

SEQ ID NO: 1572660 - DNA, 15 bp, Homo sapiens
aaatttgtcacttca

SEQ ID NO: 1572661 - DNA, 15 bp, Homo sapiens
caaatttgtcacttc

SEQ ID NO: 1572662 - DNA, 15 bp, Homo sapiens
gcaaatttgtcactt

SEQ ID NO: 1572663 - DNA, 15 bp, Homo sapiens
agcaaatttgtcact

SEQ ID NO: 1572664 - DNA, 15 bp, Homo sapiens
cagcaaatttgtcac

SEQ ID NO: 1572665 - DNA, 15 bp, Homo sapiens
ccagcaaatttgtca

SEQ ID NO: 1572666 - DNA, 15 bp, Homo sapiens
tccagcaaatttgtc

SEQ ID NO: 1572667 - DNA, 15 bp, Homo sapiens
ttccagcaaatttgt

SEQ ID NO: 1572668 - DNA, 15 bp, Homo sapiens
tttccagcaaatttg

SEQ ID NO: 1572669 - DNA, 15 bp, Homo sapiens
ctttccagcaaattt

SEQ ID NO: 1572670 - DNA, 15 bp, Homo sapiens
tctttccagcaaatt

SEQ ID NO: 1572671 - DNA, 15 bp, Homo sapiens
atctttccagcaaat

SEQ ID NO: 1572672 - DNA, 15 bp, Homo sapiens
gatctttccagcaaa

SEQ ID NO: 1572673 - DNA, 15 bp, Homo sapiens
tgatctttccagcaa

SEQ ID NO: 1572674 - DNA, 15 bp, Homo sapiens
ctgatctttccagca

SEQ ID NO: 1572675 - DNA, 15 bp, Homo sapiens
actgatctttccagc

SEQ ID NO: 1572676 - DNA, 15 bp, Homo sapiens
tactgatctttccag

SEQ ID NO: 1572677 - DNA, 15 bp, Homo sapiens
gtactgatctttcca

SEQ ID NO: 1572678 - DNA, 15 bp, Homo sapiens
agtactgatctttcc

SEQ ID NO: 1572679 - DNA, 15 bp, Homo sapiens
aagtactgatctttc

SEQ ID NO: 1572680 - DNA, 15 bp, Homo sapiens
aaagtactgatcttt

SEQ ID NO: 1572681 - DNA, 15 bp, Homo sapiens
gaaagtactgatctt

SEQ ID NO: 1572682 - DNA, 15 bp, Homo sapiens
agaaagtactgatct

SEQ ID NO: 1572683 - DNA, 15 bp, Homo sapiens
cagaaagtactgatc

SEQ ID NO: 1572684 - DNA, 15 bp, Homo sapiens
gcagaaagtactgat

SEQ ID NO: 1572685 - DNA, 15 bp, Homo sapiens
agcagaaagtactga

SEQ ID NO: 1572686 - DNA, 15 bp, Homo sapiens
cagcagaaagtactg

SEQ ID NO: 1572687 - DNA, 15 bp, Homo sapiens
gcagcagaaagtact

SEQ ID NO: 1572688 - DNA, 15 bp, Homo sapiens
agcagcagaaagtac

SEQ ID NO: 1572689 - DNA, 15 bp, Homo sapiens
cagcagcagaaagta

SEQ ID NO: 1572690 - DNA, 15 bp, Homo sapiens
ccagcagcagaaagt

SEQ ID NO: 1572691 - DNA, 15 bp, Homo sapiens
tccagcagcagaaag

SEQ ID NO: 1572692 - DNA, 15 bp, Homo sapiens
ctccagcagcagaaa

SEQ ID NO: 1572693 - DNA, 15 bp, Homo sapiens
tctccagcagcagaa

SEQ ID NO: 1572694 - DNA, 15 bp, Homo sapiens
ctctccagcagcaga

SEQ ID NO: 1572695 - DNA, 15 bp, Homo sapiens
actctccagcagcag

SEQ ID NO: 1572696 - DNA, 15 bp, Homo sapiens
tactctccagcagca

SEQ ID NO: 1572697 - DNA, 15 bp, Homo sapiens
atactctccagcagc

SEQ ID NO: 1572698 - DNA, 15 bp, Homo sapiens
tatactctccagcag

SEQ ID NO: 1572699 - DNA, 15 bp, Homo sapiens
atatactctccagca

SEQ ID NO: 1572700 - DNA, 15 bp, Homo sapiens
aatatactctccagc

SEQ ID NO: 1572701 - DNA, 15 bp, Homo sapiens
gaatatactctccag

SEQ ID NO: 1572702 - DNA, 15 bp, Homo sapiens
agaatatactctcca

SEQ ID NO: 1572703 - DNA, 15 bp, Homo sapiens
cagaatatactctcc

SEQ ID NO: 1572704 - DNA, 15 bp, Homo sapiens
acagaatatactctc

SEQ ID NO: 1572705 - DNA, 15 bp, Homo sapiens
aacagaatatactct

SEQ ID NO: 1572706 - DNA, 15 bp, Homo sapiens
aaacagaatatactc

SEQ ID NO: 1572707 - DNA, 15 bp, Homo sapiens
taaacagaatatact

SEQ ID NO: 1572708 - DNA, 15 bp, Homo sapiens
ataaacagaatatac

SEQ ID NO: 1572709 - DNA, 15 bp, Homo sapiens
tataaacagaatata

SEQ ID NO: 1572710 - DNA, 15 bp, Homo sapiens
ttataaacagaatat

SEQ ID NO: 1572711 - DNA, 15 bp, Homo sapiens
tttataaacagaata

SEQ ID NO: 1572712 - DNA, 15 bp, Homo sapiens
gtttataaacagaat

SEQ ID NO: 1572713 - DNA, 15 bp, Homo sapiens
tgtttataaacagaa

SEQ ID NO: 1572714 - DNA, 15 bp, Homo sapiens
atgtttataaacaga

SEQ ID NO: 1572715 - DNA, 15 bp, Homo sapiens
catgtttataaacag

SEQ ID NO: 1572716 - DNA, 15 bp, Homo sapiens
tcatgtttataaaca

SEQ ID NO: 1572717 - DNA, 15 bp, Homo sapiens
ttcatgtttataaac

SEQ ID NO: 1572718 - DNA, 15 bp, Homo sapiens
attcatgtttataaa

SEQ ID NO: 1572719 - DNA, 15 bp, Homo sapiens
cattcatgtttataa

SEQ ID NO: 1572720 - DNA, 15 bp, Homo sapiens
tcattcatgtttata

SEQ ID NO: 1572721 - DNA, 15 bp, Homo sapiens
ctcattcatgtttat

SEQ ID NO: 1572722 - DNA, 15 bp, Homo sapiens
cctcattcatgttta

SEQ ID NO: 1572723 - DNA, 15 bp, Homo sapiens
tcctcattcatgttt

SEQ ID NO: 1572724 - DNA, 15 bp, Homo sapiens
atcctcattcatgtt

SEQ ID NO: 1572725 - DNA, 15 bp, Homo sapiens
catcctcattcatgt

SEQ ID NO: 1572726 - DNA, 15 bp, Homo sapiens
acatcctcattcatg

SEQ ID NO: 1572727 - DNA, 15 bp, Homo sapiens
cacatcctcattcat

SEQ ID NO: 1572728 - DNA, 15 bp, Homo sapiens
tcacatcctcattca

SEQ ID NO: 1572729 - DNA, 15 bp, Homo sapiens
ttcacatcctcattc

SEQ ID NO: 1572730 - DNA, 15 bp, Homo sapiens
attcacatcctcatt

SEQ ID NO: 1572731 - DNA, 15 bp, Homo sapiens
tattcacatcctcat

SEQ ID NO: 1572732 - DNA, 15 bp, Homo sapiens
ttattcacatcctca

SEQ ID NO: 1572733 - DNA, 15 bp, Homo sapiens
cttattcacatcctc

SEQ ID NO: 1572734 - DNA, 15 bp, Homo sapiens
ccttattcacatcct

SEQ ID NO: 1572735 - DNA, 15 bp, Homo sapiens
gccttattcacatcc

SEQ ID NO: 1572736 - DNA, 15 bp, Homo sapiens
agccttattcacatc

SEQ ID NO: 1572737 - DNA, 15 bp, Homo sapiens
tagccttattcacat

SEQ ID NO: 1572738 - DNA, 15 bp, Homo sapiens
ctagccttattcaca

SEQ ID NO: 1572739 - DNA, 15 bp, Homo sapiens
tctagccttattcac

SEQ ID NO: 1572740 - DNA, 15 bp, Homo sapiens
ttctagccttattca

SEQ ID NO: 1572741 - DNA, 15 bp, Homo sapiens
cttctagccttattc

SEQ ID NO: 1572742 - DNA, 15 bp, Homo sapiens
tcttctagccttatt

SEQ ID NO: 1572743 - DNA, 15 bp, Homo sapiens
atcttctagccttat

SEQ ID NO: 1572744 - DNA, 15 bp, Homo sapiens
catcttctagcctta

SEQ ID NO: 1572745 - DNA, 15 bp, Homo sapiens
tcatcttctagcctt

SEQ ID NO: 1572746 - DNA, 15 bp, Homo sapiens
gtcatcttctagcct

SEQ ID NO: 1572747 - DNA, 15 bp, Homo sapiens
ggtcatcttctagcc

SEQ ID NO: 1572748 - DNA, 15 bp, Homo sapiens
aggtcatcttctagc

SEQ ID NO: 1572749 - DNA, 15 bp, Homo sapiens
gaggtcatcttctag

SEQ ID NO: 1572750 - DNA, 15 bp, Homo sapiens
agaggtcatcttcta

SEQ ID NO: 1572751 - DNA, 15 bp, Homo sapiens
cagaggtcatcttct

SEQ ID NO: 1572752 - DNA, 15 bp, Homo sapiens
gcagaggtcatcttc

SEQ ID NO: 1572753 - DNA, 15 bp, Homo sapiens
agcagaggtcatctt

SEQ ID NO: 1572754 - DNA, 15 bp, Homo sapiens
cagcagaggtcatct

SEQ ID NO: 1572755 - DNA, 15 bp, Homo sapiens
ccagcagaggtcatc

SEQ ID NO: 1572756 - DNA, 15 bp, Homo sapiens
tccagcagaggtcat

SEQ ID NO: 1572757 - DNA, 15 bp, Homo sapiens
ttccagcagaggtca

SEQ ID NO: 1572758 - DNA, 15 bp, Homo sapiens
cttccagcagaggtc

SEQ ID NO: 1572759 - DNA, 15 bp, Homo sapiens
acttccagcagaggt

SEQ ID NO: 1572760 - DNA, 15 bp, Homo sapiens
aacttccagcagagg

SEQ ID NO: 1572761 - DNA, 15 bp, Homo sapiens
aaacttccagcagag

SEQ ID NO: 1572762 - DNA, 15 bp, Homo sapiens
gaaacttccagcaga

SEQ ID NO: 1572763 - DNA, 15 bp, Homo sapiens
agaaacttccagcag

SEQ ID NO: 1572764 - DNA, 15 bp, Homo sapiens
cagaaacttccagca

SEQ ID NO: 1572765 - DNA, 15 bp, Homo sapiens
ccagaaacttccagc

SEQ ID NO: 1572766 - DNA, 15 bp, Homo sapiens
accagaaacttccag

SEQ ID NO: 1572767 - DNA, 15 bp, Homo sapiens
taccagaaacttcca

SEQ ID NO: 1572768 - DNA, 15 bp, Homo sapiens
ataccagaaacttcc

SEQ ID NO: 1572769 - DNA, 15 bp, Homo sapiens
cataccagaaacttc

SEQ ID NO: 1572770 - DNA, 15 bp, Homo sapiens
tcataccagaaactt

SEQ ID NO: 1572771 - DNA, 15 bp, Homo sapiens
atcataccagaaact

SEQ ID NO: 1572772 - DNA, 15 bp, Homo sapiens
aatcataccagaaac

SEQ ID NO: 1572773 - DNA, 15 bp, Homo sapiens
aaatcataccagaaa

SEQ ID NO: 1572774 - DNA, 15 bp, Homo sapiens
caaatcataccagaa

SEQ ID NO: 1572775 - DNA, 15 bp, Homo sapiens
ccaaatcataccaga

SEQ ID NO: 1572776 - DNA, 15 bp, Homo sapiens
tccaaatcataccag

SEQ ID NO: 1572777 - DNA, 15 bp, Homo sapiens
ctccaaatcatacca

SEQ ID NO: 1572778 - DNA, 15 bp, Homo sapiens
cctccaaatcatacc

SEQ ID NO: 1572779 - DNA, 15 bp, Homo sapiens
tcctccaaatcatac

SEQ ID NO: 1572780 - DNA, 15 bp, Homo sapiens
ttcctccaaatcata

SEQ ID NO: 1572781 - DNA, 15 bp, Homo sapiens
cttcctccaaatcat

SEQ ID NO: 1572782 - DNA, 15 bp, Homo sapiens
ccttcctccaaatca

SEQ ID NO: 1572783 - DNA, 15 bp, Homo sapiens
tccttcctccaaatc

SEQ ID NO: 1572784 - DNA, 15 bp, Homo sapiens
ctccttcctccaaat

SEQ ID NO: 1572785 - DNA, 15 bp, Homo sapiens
gctccttcctccaaa

SEQ ID NO: 1572786 - DNA, 15 bp, Homo sapiens
tgctccttcctccaa

SEQ ID NO: 1572787 - DNA, 15 bp, Homo sapiens
gtgctccttcctcca

SEQ ID NO: 1572788 - DNA, 15 bp, Homo sapiens
agtgctccttcctcc

SEQ ID NO: 1572789 - DNA, 15 bp, Homo sapiens
tagtgctccttcctc

SEQ ID NO: 1572790 - DNA, 15 bp, Homo sapiens
ctagtgctccttcct

SEQ ID NO: 1572791 - DNA, 15 bp, Homo sapiens
actagtgctccttcc

SEQ ID NO: 1572792 - DNA, 15 bp, Homo sapiens
gactagtgctccttc

SEQ ID NO: 1572793 - DNA, 15 bp, Homo sapiens
agactagtgctcctt

SEQ ID NO: 1572794 - DNA, 15 bp, Homo sapiens
aagactagtgctcct

SEQ ID NO: 1572795 - DNA, 15 bp, Homo sapiens
gaagactagtgctcc

SEQ ID NO: 1572796 - DNA, 15 bp, Homo sapiens
ggaagactagtgctc

SEQ ID NO: 1572797 - DNA, 15 bp, Homo sapiens
gggaagactagtgct

SEQ ID NO: 1572798 - DNA, 15 bp, Homo sapiens
agggaagactagtgc

SEQ ID NO: 1572799 - DNA, 15 bp, Homo sapiens
cagggaagactagtg

SEQ ID NO: 1572800 - DNA, 15 bp, Homo sapiens
ccagggaagactagt

SEQ ID NO: 1572801 - DNA, 15 bp, Homo sapiens
accagggaagactag

SEQ ID NO: 1572802 - DNA, 15 bp, Homo sapiens
caccagggaagacta

SEQ ID NO: 1572803 - DNA, 15 bp, Homo sapiens
ccaccagggaagact

SEQ ID NO: 1572804 - DNA, 15 bp, Homo sapiens
gccaccagggaagac

SEQ ID NO: 1572805 - DNA, 15 bp, Homo sapiens
agccaccagggaaga

SEQ ID NO: 1572806 - DNA, 15 bp, Homo sapiens
cagccaccagggaag

SEQ ID NO: 1572807 - DNA, 15 bp, Homo sapiens
gcagccaccagggaa

SEQ ID NO: 1572808 - DNA, 15 bp, Homo sapiens
agcagccaccaggga

SEQ ID NO: 1572809 - DNA, 15 bp, Homo sapiens
tagcagccaccaggg

SEQ ID NO: 1572810 - DNA, 15 bp, Homo sapiens
ctagcagccaccagg

SEQ ID NO: 1572811 - DNA, 15 bp, Homo sapiens
gctagcagccaccag

SEQ ID NO: 1572812 - DNA, 15 bp, Homo sapiens
ggctagcagccacca

SEQ ID NO: 1572813 - DNA, 15 bp, Homo sapiens
aggctagcagccacc

SEQ ID NO: 1572814 - DNA, 15 bp, Homo sapiens
aaggctagcagccac

SEQ ID NO: 1572815 - DNA, 15 bp, Homo sapiens
aaaggctagcagcca

SEQ ID NO: 1572816 - DNA, 15 bp, Homo sapiens
gaaaggctagcagcc

SEQ ID NO: 1572817 - DNA, 15 bp, Homo sapiens
tgaaaggctagcagc

SEQ ID NO: 1572818 - DNA, 15 bp, Homo sapiens
atgaaaggctagcag

SEQ ID NO: 1572819 - DNA, 15 bp, Homo sapiens
aatgaaaggctagca

SEQ ID NO: 1572820 - DNA, 15 bp, Homo sapiens
aaatgaaaggctagc

SEQ ID NO: 1572821 - DNA, 15 bp, Homo sapiens
taaatgaaaggctag

SEQ ID NO: 1572822 - DNA, 15 bp, Homo sapiens
ctaaatgaaaggcta

SEQ ID NO: 1572823 - DNA, 15 bp, Homo sapiens
actaaatgaaaggct

SEQ ID NO: 1572824 - DNA, 15 bp, Homo sapiens
aactaaatgaaaggc

SEQ ID NO: 1572825 - DNA, 15 bp, Homo sapiens
gaactaaatgaaagg

SEQ ID NO: 1572826 - DNA, 15 bp, Homo sapiens
tgaactaaatgaaag

SEQ ID NO: 1572827 - DNA, 15 bp, Homo sapiens
ttgaactaaatgaaa

SEQ ID NO: 1572828 - DNA, 15 bp, Homo sapiens
cttgaactaaatgaa

SEQ ID NO: 1572829 - DNA, 15 bp, Homo sapiens
gcttgaactaaatga

SEQ ID NO: 1572830 - DNA, 15 bp, Homo sapiens
ggcttgaactaaatg

SEQ ID NO: 1572831 - DNA, 15 bp, Homo sapiens
aggcttgaactaaat

SEQ ID NO: 1572832 - DNA, 15 bp, Homo sapiens
caggcttgaactaaa

SEQ ID NO: 1572833 - DNA, 15 bp, Homo sapiens
gcaggcttgaactaa

SEQ ID NO: 1572834 - DNA, 15 bp, Homo sapiens
ggcaggcttgaacta

SEQ ID NO: 1572835 - DNA, 15 bp, Homo sapiens
tggcaggcttgaact

SEQ ID NO: 1572836 - DNA, 15 bp, Homo sapiens
ctggcaggcttgaac

SEQ ID NO: 1572837 - DNA, 15 bp, Homo sapiens
gctggcaggcttgaa

SEQ ID NO: 1572838 - DNA, 15 bp, Homo sapiens
ggctggcaggcttga

SEQ ID NO: 1572839 - DNA, 15 bp, Homo sapiens
aggctggcaggcttg

SEQ ID NO: 1572840 - DNA, 15 bp, Homo sapiens
gaggctggcaggctt

SEQ ID NO: 1572841 - DNA, 15 bp, Homo sapiens
agaggctggcaggct

SEQ ID NO: 1572842 - DNA, 15 bp, Homo sapiens
tagaggctggcaggc

SEQ ID NO: 1572843 - DNA, 15 bp, Homo sapiens
ctagaggctggcagg

SEQ ID NO: 1572844 - DNA, 15 bp, Homo sapiens
gctagaggctggcag

SEQ ID NO: 1572845 - DNA, 15 bp, Homo sapiens
agctagaggctggca

SEQ ID NO: 1572846 - DNA, 15 bp, Homo sapiens
aagctagaggctggc

SEQ ID NO: 1572847 - DNA, 15 bp, Homo sapiens
aaagctagaggctgg

SEQ ID NO: 1572848 - DNA, 15 bp, Homo sapiens
aaaagctagaggctg

SEQ ID NO: 1572849 - DNA, 15 bp, Homo sapiens
gaaaagctagaggct

SEQ ID NO: 1572850 - DNA, 15 bp, Homo sapiens
ggaaaagctagaggc

SEQ ID NO: 1572851 - DNA, 15 bp, Homo sapiens
aggaaaagctagagg

SEQ ID NO: 1572852 - DNA, 15 bp, Homo sapiens
aaggaaaagctagag

SEQ ID NO: 1572853 - DNA, 15 bp, Homo sapiens
caaggaaaagctaga

SEQ ID NO: 1572854 - DNA, 15 bp, Homo sapiens
gcaaggaaaagctag

SEQ ID NO: 1572855 - DNA, 15 bp, Homo sapiens
tgcaaggaaaagcta

SEQ ID NO: 1572856 - DNA, 15 bp, Homo sapiens
ttgcaaggaaaagct

SEQ ID NO: 1572857 - DNA, 15 bp, Homo sapiens
gttgcaaggaaaagc

SEQ ID NO: 1572858 - DNA, 15 bp, Homo sapiens
agttgcaaggaaaag

SEQ ID NO: 1572859 - DNA, 15 bp, Homo sapiens
aagttgcaaggaaaa

SEQ ID NO: 1572860 - DNA, 15 bp, Homo sapiens
caagttgcaaggaaa

SEQ ID NO: 1572861 - DNA, 15 bp, Homo sapiens
acaagttgcaaggaa

SEQ ID NO: 1572862 - DNA, 15 bp, Homo sapiens
gacaagttgcaagga

SEQ ID NO: 1572863 - DNA, 15 bp, Homo sapiens
agacaagttgcaagg

SEQ ID NO: 1572864 - DNA, 15 bp, Homo sapiens
aagacaagttgcaag

SEQ ID NO: 1572865 - DNA, 15 bp, Homo sapiens
aaagacaagttgcaa

SEQ ID NO: 1572866 - DNA, 15 bp, Homo sapiens
aaaagacaagttgca

SEQ ID NO: 1572867 - DNA, 15 bp, Homo sapiens
gaaaagacaagttgc

SEQ ID NO: 1572868 - DNA, 15 bp, Homo sapiens
tgaaaagacaagttg

SEQ ID NO: 1572869 - DNA, 15 bp, Homo sapiens
atgaaaagacaagtt

SEQ ID NO: 1572870 - DNA, 15 bp, Homo sapiens
aatgaaaagacaagt

SEQ ID NO: 1572871 - DNA, 15 bp, Homo sapiens
aaatgaaaagacaag

SEQ ID NO: 1572872 - DNA, 15 bp, Homo sapiens
aaaatgaaaagacaa

SEQ ID NO: 1572873 - DNA, 15 bp, Homo sapiens
aaaaatgaaaagaca

SEQ ID NO: 1572874 - DNA, 15 bp, Homo sapiens
gaaaaatgaaaagac

SEQ ID NO: 1572875 - DNA, 15 bp, Homo sapiens
agaaaaatgaaaaga

SEQ ID NO: 1572876 - DNA, 15 bp, Homo sapiens
aagaaaaatgaaaag

SEQ ID NO: 1572877 - DNA, 15 bp, Homo sapiens
caagaaaaatgaaaa

SEQ ID NO: 1572878 - DNA, 15 bp, Homo sapiens
acaagaaaaatgaaa

SEQ ID NO: 1572879 - DNA, 15 bp, Homo sapiens
cacaagaaaaatgaa

SEQ ID NO: 1572880 - DNA, 15 bp, Homo sapiens
gcacaagaaaaatga

SEQ ID NO: 1572881 - DNA, 15 bp, Homo sapiens
agcacaagaaaaatg

SEQ ID NO: 1572882 - DNA, 15 bp, Homo sapiens
tagcacaagaaaaat

SEQ ID NO: 1572883 - DNA, 15 bp, Homo sapiens
atagcacaagaaaaa

SEQ ID NO: 1572884 - DNA, 15 bp, Homo sapiens
aatagcacaagaaaa

SEQ ID NO: 1572885 - DNA, 15 bp, Homo sapiens
aaatagcacaagaaa

SEQ ID NO: 1572886 - DNA, 15 bp, Homo sapiens
aaaatagcacaagaa

SEQ ID NO: 1572887 - DNA, 15 bp, Homo sapiens
gaaaatagcacaaga

SEQ ID NO: 1572888 - DNA, 15 bp, Homo sapiens
agaaaatagcacaag

SEQ ID NO: 1572889 - DNA, 15 bp, Homo sapiens
cagaaaatagcacaa

SEQ ID NO: 1572890 - DNA, 15 bp, Homo sapiens
gcagaaaatagcaca

SEQ ID NO: 1572891 - DNA, 15 bp, Homo sapiens
agcagaaaatagcac

SEQ ID NO: 1572892 - DNA, 15 bp, Homo sapiens
tagcagaaaatagca

SEQ ID NO: 1572893 - DNA, 15 bp, Homo sapiens
atagcagaaaatagc

SEQ ID NO: 1572894 - DNA, 15 bp, Homo sapiens
catagcagaaaatag

SEQ ID NO: 1572895 - DNA, 15 bp, Homo sapiens
tcatagcagaaaata

SEQ ID NO: 1572896 - DNA, 15 bp, Homo sapiens
atcatagcagaaaat

SEQ ID NO: 1572897 - DNA, 15 bp, Homo sapiens
tatcatagcagaaaa

SEQ ID NO: 1572898 - DNA, 15 bp, Homo sapiens
ctatcatagcagaaa

SEQ ID NO: 1572899 - DNA, 15 bp, Homo sapiens
gctatcatagcagaa

SEQ ID NO: 1572900 - DNA, 15 bp, Homo sapiens
tgctatcatagcaga

SEQ ID NO: 1572901 - DNA, 15 bp, Homo sapiens
ttgctatcatagcag

SEQ ID NO: 1572902 - DNA, 15 bp, Homo sapiens
tttgctatcatagca

SEQ ID NO: 1572903 - DNA, 15 bp, Homo sapiens
gtttgctatcatagc

SEQ ID NO: 1572904 - DNA, 15 bp, Homo sapiens
agtttgctatcatag

SEQ ID NO: 1572905 - DNA, 15 bp, Homo sapiens
aagtttgctatcata

SEQ ID NO: 1572906 - DNA, 15 bp, Homo sapiens
aaagtttgctatcat

SEQ ID NO: 1572907 - DNA, 15 bp, Homo sapiens
caaagtttgctatca

SEQ ID NO: 1572908 - DNA, 15 bp, Homo sapiens
gcaaagtttgctatc

SEQ ID NO: 1572909 - DNA, 15 bp, Homo sapiens
tgcaaagtttgctat

SEQ ID NO: 1572910 - DNA, 15 bp, Homo sapiens
atgcaaagtttgcta

SEQ ID NO: 1572911 - DNA, 15 bp, Homo sapiens
tatgcaaagtttgct

SEQ ID NO: 1572912 - DNA, 15 bp, Homo sapiens
ttatgcaaagtttgc

SEQ ID NO: 1572913 - DNA, 15 bp, Homo sapiens
gttatgcaaagtttg

SEQ ID NO: 1572914 - DNA, 15 bp, Homo sapiens
tgttatgcaaagttt

SEQ ID NO: 1572915 - DNA, 15 bp, Homo sapiens
ttgttatgcaaagtt

SEQ ID NO: 1572916 - DNA, 15 bp, Homo sapiens
tttgttatgcaaagt

SEQ ID NO: 1572917 - DNA, 15 bp, Homo sapiens
ttttgttatgcaaag

SEQ ID NO: 1572918 - DNA, 15 bp, Homo sapiens
attttgttatgcaaa

SEQ ID NO: 1572919 - DNA, 15 bp, Homo sapiens
cattttgttatgcaa

SEQ ID NO: 1572920 - DNA, 15 bp, Homo sapiens
acattttgttatgca

SEQ ID NO: 1572921 - DNA, 15 bp, Homo sapiens
cacattttgttatgc

SEQ ID NO: 1572922 - DNA, 15 bp, Homo sapiens
tcacattttgttatg

SEQ ID NO: 1572923 - DNA, 15 bp, Homo sapiens
ttcacattttgttat

SEQ ID NO: 1572924 - DNA, 15 bp, Homo sapiens
cttcacattttgtta

SEQ ID NO: 1572925 - DNA, 15 bp, Homo sapiens
acttcacattttgtt

SEQ ID NO: 1572926 - DNA, 15 bp, Homo sapiens
aacttcacattttgt

SEQ ID NO: 1572927 - DNA, 15 bp, Homo sapiens
aaacttcacattttg

SEQ ID NO: 1572928 - DNA, 15 bp, Homo sapiens
aaaacttcacatttt

SEQ ID NO: 1572929 - DNA, 15 bp, Homo sapiens
gaaaacttcacattt

SEQ ID NO: 1572930 - DNA, 15 bp, Homo sapiens
ggaaaacttcacatt

SEQ ID NO: 1572931 - DNA, 15 bp, Homo sapiens
tggaaaacttcacat

SEQ ID NO: 1572932 - DNA, 15 bp, Homo sapiens
atggaaaacttcaca

SEQ ID NO: 1572933 - DNA, 15 bp, Homo sapiens
catggaaaacttcac

SEQ ID NO: 1572934 - DNA, 15 bp, Homo sapiens
acatggaaaacttca

SEQ ID NO: 1572935 - DNA, 15 bp, Homo sapiens
cacatggaaaacttc

SEQ ID NO: 1572936 - DNA, 15 bp, Homo sapiens
tcacatggaaaactt

SEQ ID NO: 1572937 - DNA, 15 bp, Homo sapiens
gtcacatggaaaact

SEQ ID NO: 1572938 - DNA, 15 bp, Homo sapiens
tgtcacatggaaaac

SEQ ID NO: 1572939 - DNA, 15 bp, Homo sapiens
atgtcacatggaaaa

SEQ ID NO: 1572940 - DNA, 15 bp, Homo sapiens
aatgtcacatggaaa

SEQ ID NO: 1572941 - DNA, 15 bp, Homo sapiens
taatgtcacatggaa

SEQ ID NO: 1572942 - DNA, 15 bp, Homo sapiens
ttaatgtcacatgga

SEQ ID NO: 1572943 - DNA, 15 bp, Homo sapiens
gttaatgtcacatgg

SEQ ID NO: 1572944 - DNA, 15 bp, Homo sapiens
agttaatgtcacatg

SEQ ID NO: 1572945 - DNA, 15 bp, Homo sapiens
aagttaatgtcacat

SEQ ID NO: 1572946 - DNA, 15 bp, Homo sapiens
taagttaatgtcaca

SEQ ID NO: 1572947 - DNA, 15 bp, Homo sapiens
ctaagttaatgtcac

SEQ ID NO: 1572948 - DNA, 15 bp, Homo sapiens
actaagttaatgtca

SEQ ID NO: 1572949 - DNA, 15 bp, Homo sapiens
tactaagttaatgtc

SEQ ID NO: 1572950 - DNA, 15 bp, Homo sapiens
ttactaagttaatgt

SEQ ID NO: 1572951 - DNA, 15 bp, Homo sapiens
tttactaagttaatg

SEQ ID NO: 1572952 - DNA, 15 bp, Homo sapiens
gtttactaagttaat

SEQ ID NO: 1572953 - DNA, 15 bp, Homo sapiens
tgtttactaagttaa

SEQ ID NO: 1572954 - DNA, 15 bp, Homo sapiens
atgtttactaagtta

SEQ ID NO: 1572955 - DNA, 15 bp, Homo sapiens
aatgtttactaagtt

SEQ ID NO: 1572956 - DNA, 15 bp, Homo sapiens
aaatgtttactaagt

SEQ ID NO: 1572957 - DNA, 15 bp, Homo sapiens
aaaatgtttactaag

SEQ ID NO: 1572958 - DNA, 15 bp, Homo sapiens
taaaatgtttactaa

SEQ ID NO: 1572959 - DNA, 15 bp, Homo sapiens
gctaaaatgtttact

SEQ ID NO: 1572960 - DNA, 15 bp, Homo sapiens
tgctaaaatgtttac

SEQ ID NO: 1572961 - DNA, 15 bp, Homo sapiens
ttgctaaaatgttta

SEQ ID NO: 1572962 - DNA, 15 bp, Homo sapiens
attgctaaaatgttt

SEQ ID NO: 1572963 - DNA, 15 bp, Homo sapiens
aattgctaaaatgtt

SEQ ID NO: 1572964 - DNA, 15 bp, Homo sapiens
caattgctaaaatgt

SEQ ID NO: 1572965 - DNA, 15 bp, Homo sapiens
tcaattgctaaaatg

SEQ ID NO: 1572966 - DNA, 15 bp, Homo sapiens
gtcaattgctaaaat

SEQ ID NO: 1572967 - DNA, 15 bp, Homo sapiens
agtcaattgctaaaa

SEQ ID NO: 1572968 - DNA, 15 bp, Homo sapiens
tagtcaattgctaaa

SEQ ID NO: 1572969 - DNA, 15 bp, Homo sapiens
atagtcaattgctaa

SEQ ID NO: 1572970 - DNA, 15 bp, Homo sapiens
aatagtcaattgcta

SEQ ID NO: 1572971 - DNA, 15 bp, Homo sapiens
taatagtcaattgct

SEQ ID NO: 1572972 - DNA, 15 bp, Homo sapiens
ttaatagtcaattgc

SEQ ID NO: 1572973 - DNA, 15 bp, Homo sapiens
tttaatagtcaattg

SEQ ID NO: 1572974 - DNA, 15 bp, Homo sapiens
ttttaatagtcaatt

SEQ ID NO: 1572975 - DNA, 15 bp, Homo sapiens
attttaatagtcaat

SEQ ID NO: 1572976 - DNA, 15 bp, Homo sapiens
cattttaatagtcaa

SEQ ID NO: 1572977 - DNA, 15 bp, Homo sapiens
tcattttaatagtca

SEQ ID NO: 1572978 - DNA, 15 bp, Homo sapiens
ttcattttaatagtc

SEQ ID NO: 1572979 - DNA, 15 bp, Homo sapiens
tttcattttaatagt

SEQ ID NO: 1572980 - DNA, 15 bp, Homo sapiens
atttcattttaatag

SEQ ID NO: 1572981 - DNA, 15 bp, Homo sapiens
catttcattttaata

SEQ ID NO: 1572982 - DNA, 15 bp, Homo sapiens
acatttcattttaat

SEQ ID NO: 1572983 - DNA, 15 bp, Homo sapiens
cacatttcattttaa

SEQ ID NO: 1572984 - DNA, 15 bp, Homo sapiens
gcacatttcatttta

SEQ ID NO: 1572985 - DNA, 15 bp, Homo sapiens
tgcacatttcatttt

SEQ ID NO: 1572986 - DNA, 15 bp, Homo sapiens
atgcacatttcattt

SEQ ID NO: 1572987 - DNA, 15 bp, Homo sapiens
tatgcacatttcatt

SEQ ID NO: 1572988 - DNA, 15 bp, Homo sapiens
ttatgcacatttcat

SEQ ID NO: 1572989 - DNA, 15 bp, Homo sapiens
tttatgcacatttca

SEQ ID NO: 1572990 - DNA, 15 bp, Homo sapiens
gtttatgcacatttc

SEQ ID NO: 1572991 - DNA, 15 bp, Homo sapiens
tgtttatgcacattt

SEQ ID NO: 1572992 - DNA, 15 bp, Homo sapiens
ttgtttatgcacatt

SEQ ID NO: 1572993 - DNA, 15 bp, Homo sapiens
attgtttatgcacat

SEQ ID NO: 1572994 - DNA, 15 bp, Homo sapiens
aattgtttatgcaca

SEQ ID NO: 1572995 - DNA, 15 bp, Homo sapiens
aaattgtttatgcac

SEQ ID NO: 1572996 - DNA, 15 bp, Homo sapiens
caaattgtttatgca

SEQ ID NO: 1572997 - DNA, 15 bp, Homo sapiens
gcaaattgtttatgc

SEQ ID NO: 1572998 - DNA, 15 bp, Homo sapiens
ggcaaattgtttatg

SEQ ID NO: 1572999 - DNA, 15 bp, Homo sapiens
tggcaaattgtttat

SEQ ID NO: 1573000 - DNA, 15 bp, Homo sapiens
ctggcaaattgttta

SEQ ID NO: 1573001 - DNA, 15 bp, Homo sapiens
cctggcaaattgttt

SEQ ID NO: 1573002 - DNA, 15 bp, Homo sapiens
acctggcaaattgtt

SEQ ID NO: 1573003 - DNA, 15 bp, Homo sapiens
aacctggcaaattgt

SEQ ID NO: 1573004 - DNA, 15 bp, Homo sapiens
caacctggcaaattg

SEQ ID NO: 1573005 - DNA, 15 bp, Homo sapiens
acaacctggcaaatt

SEQ ID NO: 1573006 - DNA, 15 bp, Homo sapiens
tacaacctggcaaat

SEQ ID NO: 1573007 - DNA, 15 bp, Homo sapiens
atacaacctggcaaa

SEQ ID NO: 1573008 - DNA, 15 bp, Homo sapiens
gatacaacctggcaa

SEQ ID NO: 1573009 - DNA, 15 bp, Homo sapiens
agatacaacctggca

SEQ ID NO: 1573010 - DNA, 15 bp, Homo sapiens
aagatacaacctggc

SEQ ID NO: 1573011 - DNA, 15 bp, Homo sapiens
taagatacaacctgg

SEQ ID NO: 1573012 - DNA, 15 bp, Homo sapiens
ataagatacaacctg

SEQ ID NO: 1573013 - DNA, 15 bp, Homo sapiens
gataagatacaacct

SEQ ID NO: 1573014 - DNA, 15 bp, Homo sapiens
tgataagatacaacc

SEQ ID NO: 1573015 - DNA, 15 bp, Homo sapiens
gtgataagatacaac

SEQ ID NO: 1573016 - DNA, 15 bp, Homo sapiens
tgtgataagatacaa

SEQ ID NO: 1573017 - DNA, 15 bp, Homo sapiens
ttgtgataagataca

SEQ ID NO: 1573018 - DNA, 15 bp, Homo sapiens
tttgtgataagatac

SEQ ID NO: 1573019 - DNA, 15 bp, Homo sapiens
atttgtgataagata

SEQ ID NO: 1573020 - DNA, 15 bp, Homo sapiens
tatttgtgataagat

SEQ ID NO: 1573021 - DNA, 15 bp, Homo sapiens
atatttgtgataaga

SEQ ID NO: 1573022 - DNA, 15 bp, Homo sapiens
tatatttgtgataag

SEQ ID NO: 1573023 - DNA, 15 bp, Homo sapiens
ctatatttgtgataa

SEQ ID NO: 1573024 - DNA, 15 bp, Homo sapiens
actatatttgtgata

SEQ ID NO: 1573025 - DNA, 15 bp, Homo sapiens
gactatatttgtgat

SEQ ID NO: 1573026 - DNA, 15 bp, Homo sapiens
tgactatatttgtga

SEQ ID NO: 1573027 - DNA, 15 bp, Homo sapiens
atgactatatttgtg

SEQ ID NO: 1573028 - DNA, 15 bp, Homo sapiens
catgactatatttgt

SEQ ID NO: 1573029 - DNA, 15 bp, Homo sapiens
acatgactatatttg

SEQ ID NO: 1573030 - DNA, 15 bp, Homo sapiens
cacatgactatattt

SEQ ID NO: 1573031 - DNA, 15 bp, Homo sapiens
gcacatgactatatt

SEQ ID NO: 1573032 - DNA, 15 bp, Homo sapiens
agcacatgactatat

SEQ ID NO: 1573033 - DNA, 15 bp, Homo sapiens
cagcacatgactata

SEQ ID NO: 1573034 - DNA, 15 bp, Homo sapiens
gcagcacatgactat

SEQ ID NO: 1573035 - DNA, 15 bp, Homo sapiens
tgcagcacatgacta

SEQ ID NO: 1573036 - DNA, 15 bp, Homo sapiens
atgcagcacatgact

SEQ ID NO: 1573037 - DNA, 15 bp, Homo sapiens
tatgcagcacatgac

SEQ ID NO: 1573038 - DNA, 15 bp, Homo sapiens
ttatgcagcacatga

SEQ ID NO: 1573039 - DNA, 15 bp, Homo sapiens
gttatgcagcacatg

SEQ ID NO: 1573040 - DNA, 15 bp, Homo sapiens
tgttatgcagcacat

SEQ ID NO: 1573041 - DNA, 15 bp, Homo sapiens
ttgttatgcagcaca

SEQ ID NO: 1573042 - DNA, 15 bp, Homo sapiens
gttgttatgcagcac

SEQ ID NO: 1573043 - DNA, 15 bp, Homo sapiens
tgttgttatgcagca

SEQ ID NO: 1573044 - DNA, 15 bp, Homo sapiens
atgttgttatgcagc

SEQ ID NO: 1573045 - DNA, 15 bp, Homo sapiens
aatgttgttatgcag

SEQ ID NO: 1573046 - DNA, 15 bp, Homo sapiens
caatgttgttatgca

SEQ ID NO: 1573047 - DNA, 15 bp, Homo sapiens
gcaatgttgttatgc

SEQ ID NO: 1573048 - DNA, 15 bp, Homo sapiens
tgcaatgttgttatg

SEQ ID NO: 1573049 - DNA, 15 bp, Homo sapiens
ctgcaatgttgttat

SEQ ID NO: 1573050 - DNA, 15 bp, Homo sapiens
actgcaatgttgtta

SEQ ID NO: 1573051 - DNA, 15 bp, Homo sapiens
gactgcaatgttgtt

SEQ ID NO: 1573052 - DNA, 15 bp, Homo sapiens
tgactgcaatgttgt

SEQ ID NO: 1573053 - DNA, 15 bp, Homo sapiens
ttgactgcaatgttg

SEQ ID NO: 1573054 - DNA, 15 bp, Homo sapiens
gttgactgcaatgtt

SEQ ID NO: 1573055 - DNA, 15 bp, Homo sapiens
tgttgactgcaatgt

SEQ ID NO: 1573056 - DNA, 15 bp, Homo sapiens
ttgttgactgcaatg

SEQ ID NO: 1573057 - DNA, 15 bp, Homo sapiens
gttgttgactgcaat

SEQ ID NO: 1573058 - DNA, 15 bp, Homo sapiens
tgttgttgactgcaa

SEQ ID NO: 1573059 - DNA, 15 bp, Homo sapiens
ctgttgttgactgca

SEQ ID NO: 1573060 - DNA, 15 bp, Homo sapiens
tctgttgttgactgc

SEQ ID NO: 1573061 - DNA, 15 bp, Homo sapiens
ttctgttgttgactg

SEQ ID NO: 1573062 - DNA, 15 bp, Homo sapiens
gttctgttgttgact

SEQ ID NO: 1573063 - DNA, 15 bp, Homo sapiens
tgttctgttgttgac

SEQ ID NO: 1573064 - DNA, 15 bp, Homo sapiens
gtgttctgttgttga

SEQ ID NO: 1573065 - DNA, 15 bp, Homo sapiens
tgtgttctgttgttg

SEQ ID NO: 1573066 - DNA, 15 bp, Homo sapiens
atgtgttctgttgtt

SEQ ID NO: 1573067 - DNA, 15 bp, Homo sapiens
tatgtgttctgttgt

SEQ ID NO: 1573068 - DNA, 15 bp, Homo sapiens
atatgtgttctgttg

SEQ ID NO: 1573069 - DNA, 15 bp, Homo sapiens
tatatgtgttctgtt

SEQ ID NO: 1573070 - DNA, 15 bp, Homo sapiens
ctatatgtgttctgt

SEQ ID NO: 1573071 - DNA, 15 bp, Homo sapiens
tctatatgtgttctg

SEQ ID NO: 1573072 - DNA, 15 bp, Homo sapiens
gtctatatgtgttct

SEQ ID NO: 1573073 - DNA, 15 bp, Homo sapiens
tgtctatatgtgttc

SEQ ID NO: 1573074 - DNA, 15 bp, Homo sapiens
ctgtctatatgtgtt

SEQ ID NO: 1573075 - DNA, 15 bp, Homo sapiens
actgtctatatgtgt

SEQ ID NO: 1573076 - DNA, 15 bp, Homo sapiens
cactgtctatatgtg

SEQ ID NO: 1573077 - DNA, 15 bp, Homo sapiens
ccactgtctatatgt

SEQ ID NO: 1573078 - DNA, 15 bp, Homo sapiens
accactgtctatatg

SEQ ID NO: 1573079 - DNA, 15 bp, Homo sapiens
gaccactgtctatat

SEQ ID NO: 1573080 - DNA, 15 bp, Homo sapiens
ggaccactgtctata

SEQ ID NO: 1573081 - DNA, 15 bp, Homo sapiens
gggaccactgtctat

SEQ ID NO: 1573082 - DNA, 15 bp, Homo sapiens
cgggaccactgtcta

SEQ ID NO: 1573083 - DNA, 15 bp, Homo sapiens
tcgggaccactgtct

SEQ ID NO: 1573084 - DNA, 15 bp, Homo sapiens
ttcgggaccactgtc

SEQ ID NO: 1573085 - DNA, 15 bp, Homo sapiens
tttcgggaccactgt

SEQ ID NO: 1573086 - DNA, 15 bp, Homo sapiens
ctttcgggaccactg

SEQ ID NO: 1573087 - DNA, 15 bp, Homo sapiens
tctttcgggaccact

SEQ ID NO: 1573088 - DNA, 15 bp, Homo sapiens
atctttcgggaccac

SEQ ID NO: 1573089 - DNA, 15 bp, Homo sapiens
aatctttcgggacca

SEQ ID NO: 1573090 - DNA, 15 bp, Homo sapiens
taatctttcgggacc

SEQ ID NO: 1573091 - DNA, 15 bp, Homo sapiens
ataatctttcgggac

SEQ ID NO: 1573092 - DNA, 15 bp, Homo sapiens
tataatctttcggga

SEQ ID NO: 1573093 - DNA, 15 bp, Homo sapiens
ttataatctttcggg

SEQ ID NO: 1573094 - DNA, 15 bp, Homo sapiens
attataatctttcgg

SEQ ID NO: 1573095 - DNA, 15 bp, Homo sapiens
tattataatctttcg

SEQ ID NO: 1573096 - DNA, 15 bp, Homo sapiens
gtattataatctttc

SEQ ID NO: 1573097 - DNA, 15 bp, Homo sapiens
agtattataatcttt

SEQ ID NO: 1573098 - DNA, 15 bp, Homo sapiens
atacagtattataat

SEQ ID NO: 1573099 - DNA, 15 bp, Homo sapiens
aatacagtattataa

SEQ ID NO: 1573100 - DNA, 15 bp, Homo sapiens
aaatacagtattata

SEQ ID NO: 1573101 - DNA, 15 bp, Homo sapiens
aaaatacagtattat

SEQ ID NO: 1573102 - DNA, 15 bp, Homo sapiens
aaaaatacagtatta

SEQ ID NO: 1573103 - DNA, 15 bp, Homo sapiens
taaaaatacagtatt

SEQ ID NO: 1573104 - DNA, 15 bp, Homo sapiens
gtaaaaatacagtat

SEQ ID NO: 1573105 - DNA, 15 bp, Homo sapiens
agtaaaaatacagta

SEQ ID NO: 1573106 - DNA, 15 bp, Homo sapiens
cagtaaaaatacagt

SEQ ID NO: 1573107 - DNA, 15 bp, Homo sapiens
acagtaaaaatacag

SEQ ID NO: 1573108 - DNA, 15 bp, Homo sapiens
tacagtaaaaataca

SEQ ID NO: 1573109 - DNA, 15 bp, Homo sapiens
gtacagtaaaaatac

SEQ ID NO: 1573110 - DNA, 15 bp, Homo sapiens
ggtacagtaaaaata

SEQ ID NO: 1573111 - DNA, 15 bp, Homo sapiens
aggtacagtaaaaat

SEQ ID NO: 1573112 - DNA, 15 bp, Homo sapiens
aaggtacagtaaaaa

SEQ ID NO: 1573113 - DNA, 15 bp, Homo sapiens
aaaggtacagtaaaa

SEQ ID NO: 1573114 - DNA, 15 bp, Homo sapiens
aaaaggtacagtaaa

SEQ ID NO: 1573115 - DNA, 15 bp, Homo sapiens
gaaaaggtacagtaa

SEQ ID NO: 1573116 - DNA, 15 bp, Homo sapiens
agaaaaggtacagta

SEQ ID NO: 1573117 - DNA, 15 bp, Homo sapiens
cagaaaaggtacagt

SEQ ID NO: 1573118 - DNA, 15 bp, Homo sapiens
acagaaaaggtacag

SEQ ID NO: 1573119 - DNA, 15 bp, Homo sapiens
cacagaaaaggtaca

SEQ ID NO: 1573120 - DNA, 15 bp, Homo sapiens
acacagaaaaggtac

SEQ ID NO: 1573121 - DNA, 15 bp, Homo sapiens
aacacagaaaaggta

SEQ ID NO: 1573122 - DNA, 15 bp, Homo sapiens
taacacagaaaaggt

SEQ ID NO: 1573123 - DNA, 15 bp, Homo sapiens
ctaacacagaaaagg

SEQ ID NO: 1573124 - DNA, 15 bp, Homo sapiens
tctaacacagaaaag

SEQ ID NO: 1573125 - DNA, 15 bp, Homo sapiens
atctaacacagaaaa

SEQ ID NO: 1573126 - DNA, 15 bp, Homo sapiens
tatctaacacagaaa

SEQ ID NO: 1573127 - DNA, 15 bp, Homo sapiens
atatctaacacagaa

SEQ ID NO: 1573128 - DNA, 15 bp, Homo sapiens
tatatctaacacaga

SEQ ID NO: 1573129 - DNA, 15 bp, Homo sapiens
gtatatctaacacag

SEQ ID NO: 1573130 - DNA, 15 bp, Homo sapiens
tgtatatctaacaca

SEQ ID NO: 1573131 - DNA, 15 bp, Homo sapiens
ttgtatatctaacac

SEQ ID NO: 1573132 - DNA, 15 bp, Homo sapiens
tttgtatatctaaca

SEQ ID NO: 1573133 - DNA, 15 bp, Homo sapiens
atttgtatatctaac

SEQ ID NO: 1573134 - DNA, 15 bp, Homo sapiens
tatttgtatatctaa

SEQ ID NO: 1573135 - DNA, 15 bp, Homo sapiens
ctatttgtatatcta

SEQ ID NO: 1573136 - DNA, 15 bp, Homo sapiens
aactatttgtatatc

SEQ ID NO: 1573137 - DNA, 15 bp, Homo sapiens
taactatttgtatat

SEQ ID NO: 1573138 - DNA, 15 bp, Homo sapiens
ctaactatttgtata

SEQ ID NO: 1573139 - DNA, 15 bp, Homo sapiens
gctaactatttgtat

SEQ ID NO: 1573140 - DNA, 15 bp, Homo sapiens
tgctaactatttgta

SEQ ID NO: 1573141 - DNA, 15 bp, Homo sapiens
atgctaactatttgt

SEQ ID NO: 1573142 - DNA, 15 bp, Homo sapiens
aatgctaactatttg

SEQ ID NO: 1573143 - DNA, 15 bp, Homo sapiens
caatgctaactattt

SEQ ID NO: 1573144 - DNA, 15 bp, Homo sapiens
acaatgctaactatt

SEQ ID NO: 1573145 - DNA, 15 bp, Homo sapiens
cacaatgctaactat

SEQ ID NO: 1573146 - DNA, 15 bp, Homo sapiens
acacaatgctaacta

SEQ ID NO: 1573147 - DNA, 15 bp, Homo sapiens
aacacaatgctaact

SEQ ID NO: 1573148 - DNA, 15 bp, Homo sapiens
taacacaatgctaac

SEQ ID NO: 1573149 - DNA, 15 bp, Homo sapiens
gtaacacaatgctaa

SEQ ID NO: 1573150 - DNA, 15 bp, Homo sapiens
tgtaacacaatgcta

SEQ ID NO: 1573151 - DNA, 15 bp, Homo sapiens
ttgtaacacaatgct

SEQ ID NO: 1573152 - DNA, 15 bp, Homo sapiens
gttgtaacacaatgc

SEQ ID NO: 1573153 - DNA, 15 bp, Homo sapiens
agttgtaacacaatg

SEQ ID NO: 1573154 - DNA, 15 bp, Homo sapiens
tagttgtaacacaat

SEQ ID NO: 1573155 - DNA, 15 bp, Homo sapiens
gtagttgtaacacaa

SEQ ID NO: 1573156 - DNA, 15 bp, Homo sapiens
tgtagttgtaacaca

SEQ ID NO: 1573157 - DNA, 15 bp, Homo sapiens
atgtagttgtaacac

SEQ ID NO: 1573158 - DNA, 15 bp, Homo sapiens
tatgtagttgtaaca

SEQ ID NO: 1573159 - DNA, 15 bp, Homo sapiens
ttatgtagttgtaac

SEQ ID NO: 1573160 - DNA, 15 bp, Homo sapiens
tttatgtagttgtaa

SEQ ID NO: 1573161 - DNA, 15 bp, Homo sapiens
ctttatgtagttgta

SEQ ID NO: 1573162 - DNA, 15 bp, Homo sapiens
actttatgtagttgt

SEQ ID NO: 1573163 - DNA, 15 bp, Homo sapiens
tactttatgtagttg

SEQ ID NO: 1573164 - DNA, 15 bp, Homo sapiens
gtactttatgtagtt

SEQ ID NO: 1573165 - DNA, 15 bp, Homo sapiens
tgtactttatgtagt

SEQ ID NO: 1573166 - DNA, 15 bp, Homo sapiens
gtgtactttatgtag

SEQ ID NO: 1573167 - DNA, 15 bp, Homo sapiens
tgtgtactttatgta

SEQ ID NO: 1573168 - DNA, 15 bp, Homo sapiens
ttgtgtactttatgt

SEQ ID NO: 1573169 - DNA, 15 bp, Homo sapiens
attgtgtactttatg

SEQ ID NO: 1573170 - DNA, 15 bp, Homo sapiens
tattgtgtactttat

SEQ ID NO: 1573171 - DNA, 15 bp, Homo sapiens
atattgtgtacttta

SEQ ID NO: 1573172 - DNA, 15 bp, Homo sapiens
catattgtgtacttt

SEQ ID NO: 1573173 - DNA, 15 bp, Homo sapiens
ccatattgtgtactt

SEQ ID NO: 1573174 - DNA, 15 bp, Homo sapiens
accatattgtgtact

SEQ ID NO: 1573175 - DNA, 15 bp, Homo sapiens
taccatattgtgtac

SEQ ID NO: 1573176 - DNA, 15 bp, Homo sapiens
ttaccatattgtgta

SEQ ID NO: 1573177 - DNA, 15 bp, Homo sapiens
gttaccatattgtgt

SEQ ID NO: 1573178 - DNA, 15 bp, Homo sapiens
ggttaccatattgtg

SEQ ID NO: 1573179 - DNA, 15 bp, Homo sapiens
aggttaccatattgt

SEQ ID NO: 1573180 - DNA, 15 bp, Homo sapiens
caggttaccatattg

SEQ ID NO: 1573181 - DNA, 15 bp, Homo sapiens
gcaggttaccatatt

SEQ ID NO: 1573182 - DNA, 15 bp, Homo sapiens
agcaggttaccatat

SEQ ID NO: 1573183 - DNA, 15 bp, Homo sapiens
cagcaggttaccata

SEQ ID NO: 1573184 - DNA, 15 bp, Homo sapiens
acagcaggttaccat

SEQ ID NO: 1573185 - DNA, 15 bp, Homo sapiens
tacagcaggttacca

SEQ ID NO: 1573186 - DNA, 15 bp, Homo sapiens
gtacagcaggttacc

SEQ ID NO: 1573187 - DNA, 15 bp, Homo sapiens
tgtacagcaggttac

SEQ ID NO: 1573188 - DNA, 15 bp, Homo sapiens
ctgtacagcaggtta

SEQ ID NO: 1573189 - DNA, 15 bp, Homo sapiens
cctgtacagcaggtt

SEQ ID NO: 1573190 - DNA, 15 bp, Homo sapiens
acctgtacagcaggt

SEQ ID NO: 1573191 - DNA, 15 bp, Homo sapiens
aacctgtacagcagg

SEQ ID NO: 1573192 - DNA, 15 bp, Homo sapiens
aaacctgtacagcag

SEQ ID NO: 1573193 - DNA, 15 bp, Homo sapiens
caaacctgtacagca

SEQ ID NO: 1573194 - DNA, 15 bp, Homo sapiens
acaaacctgtacagc

SEQ ID NO: 1573195 - DNA, 15 bp, Homo sapiens
aacaaacctgtacag

SEQ ID NO: 1573196 - DNA, 15 bp, Homo sapiens
caacaaacctgtaca

SEQ ID NO: 1573197 - DNA, 15 bp, Homo sapiens
gcaacaaacctgtac

SEQ ID NO: 1573198 - DNA, 15 bp, Homo sapiens
ggcaacaaacctgta

SEQ ID NO: 1573199 - DNA, 15 bp, Homo sapiens
aggcaacaaacctgt

SEQ ID NO: 1573200 - DNA, 15 bp, Homo sapiens
caggcaacaaacctg

SEQ ID NO: 1573201 - DNA, 15 bp, Homo sapiens
ccaggcaacaaacct

SEQ ID NO: 1573202 - DNA, 15 bp, Homo sapiens
cccaggcaacaaacc

SEQ ID NO: 1573203 - DNA, 15 bp, Homo sapiens
tcccaggcaacaaac

SEQ ID NO: 1573204 - DNA, 15 bp, Homo sapiens
ctcccaggcaacaaa

SEQ ID NO: 1573205 - DNA, 15 bp, Homo sapiens
tctcccaggcaacaa

SEQ ID NO: 1573206 - DNA, 15 bp, Homo sapiens
ttctcccaggcaaca

SEQ ID NO: 1573207 - DNA, 15 bp, Homo sapiens
tttctcccaggcaac

SEQ ID NO: 1573208 - DNA, 15 bp, Homo sapiens
gtttctcccaggcaa

SEQ ID NO: 1573209 - DNA, 15 bp, Homo sapiens
tgtttctcccaggca

SEQ ID NO: 1573210 - DNA, 15 bp, Homo sapiens
ctgtttctcccaggc

SEQ ID NO: 1573211 - DNA, 15 bp, Homo sapiens
cctgtttctcccagg

SEQ ID NO: 1573212 - DNA, 15 bp, Homo sapiens
gcctgtttctcccag

SEQ ID NO: 1573213 - DNA, 15 bp, Homo sapiens
agcctgtttctccca

SEQ ID NO: 1573214 - DNA, 15 bp, Homo sapiens
tagcctgtttctccc

SEQ ID NO: 1573215 - DNA, 15 bp, Homo sapiens
atagcctgtttctcc

SEQ ID NO: 1573216 - DNA, 15 bp, Homo sapiens
tatagcctgtttctc

SEQ ID NO: 1573217 - DNA, 15 bp, Homo sapiens
gtatagcctgtttct

SEQ ID NO: 1573218 - DNA, 15 bp, Homo sapiens
ggtatagcctgtttc

SEQ ID NO: 1573219 - DNA, 15 bp, Homo sapiens
tggtatagcctgttt

SEQ ID NO: 1573220 - DNA, 15 bp, Homo sapiens
atggtatagcctgtt

SEQ ID NO: 1573221 - DNA, 15 bp, Homo sapiens
tatggtatagcctgt

SEQ ID NO: 1573222 - DNA, 15 bp, Homo sapiens
atatggtatagcctg

SEQ ID NO: 1573223 - DNA, 15 bp, Homo sapiens
tatatggtatagcct

SEQ ID NO: 1573224 - DNA, 15 bp, Homo sapiens
ctatatggtatagcc

SEQ ID NO: 1573225 - DNA, 15 bp, Homo sapiens
gctatatggtatagc

SEQ ID NO: 1573226 - DNA, 15 bp, Homo sapiens
ggctatatggtatag

SEQ ID NO: 1573227 - DNA, 15 bp, Homo sapiens
aaggctatatggtat

SEQ ID NO: 1573228 - DNA, 15 bp, Homo sapiens
caaggctatatggta

SEQ ID NO: 1573229 - DNA, 15 bp, Homo sapiens
ccaaggctatatggt

SEQ ID NO: 1573230 - DNA, 15 bp, Homo sapiens
accaaggctatatgg

SEQ ID NO: 1573231 - DNA, 15 bp, Homo sapiens
caccaaggctatatg

SEQ ID NO: 1573232 - DNA, 15 bp, Homo sapiens
acaccaaggctatat

SEQ ID NO: 1573233 - DNA, 15 bp, Homo sapiens
cacaccaaggctata

SEQ ID NO: 1573234 - DNA, 15 bp, Homo sapiens
acacaccaaggctat

SEQ ID NO: 1573235 - DNA, 15 bp, Homo sapiens
tacacaccaaggcta

SEQ ID NO: 1573236 - DNA, 15 bp, Homo sapiens
ctacacaccaaggct

SEQ ID NO: 1573237 - DNA, 15 bp, Homo sapiens
actacacaccaaggc

SEQ ID NO: 1573238 - DNA, 15 bp, Homo sapiens
tactacacaccaagg

SEQ ID NO: 1573239 - DNA, 15 bp, Homo sapiens
ctactacacaccaag

SEQ ID NO: 1573240 - DNA, 15 bp, Homo sapiens
cctactacacaccaa

SEQ ID NO: 1573241 - DNA, 15 bp, Homo sapiens
gcctactacacacca

SEQ ID NO: 1573242 - DNA, 15 bp, Homo sapiens
agcctactacacacc

SEQ ID NO: 1573243 - DNA, 15 bp, Homo sapiens
tagcctactacacac

SEQ ID NO: 1573244 - DNA, 15 bp, Homo sapiens
atagcctactacaca

SEQ ID NO: 1573245 - DNA, 15 bp, Homo sapiens
catagcctactacac

SEQ ID NO: 1573246 - DNA, 15 bp, Homo sapiens
gcatagcctactaca

SEQ ID NO: 1573247 - DNA, 15 bp, Homo sapiens
agcatagcctactac

SEQ ID NO: 1573248 - DNA, 15 bp, Homo sapiens
tagcatagcctacta

SEQ ID NO: 1573249 - DNA, 15 bp, Homo sapiens
atagcatagcctact

SEQ ID NO: 1573250 - DNA, 15 bp, Homo sapiens
gatagcatagcctac

SEQ ID NO: 1573251 - DNA, 15 bp, Homo sapiens
agatagcatagccta

SEQ ID NO: 1573252 - DNA, 15 bp, Homo sapiens
tagatagcatagcct

SEQ ID NO: 1573253 - DNA, 15 bp, Homo sapiens
ttagatagcatagcc

SEQ ID NO: 1573254 - DNA, 15 bp, Homo sapiens
cttagatagcatagc

SEQ ID NO: 1573255 - DNA, 15 bp, Homo sapiens
acttagatagcatag

SEQ ID NO: 1573256 - DNA, 15 bp, Homo sapiens
aacttagatagcata

SEQ ID NO: 1573257 - DNA, 15 bp, Homo sapiens
gaacttagatagcat

SEQ ID NO: 1573258 - DNA, 15 bp, Homo sapiens
tgaacttagatagca

SEQ ID NO: 1573259 - DNA, 15 bp, Homo sapiens
atgaacttagatagc

SEQ ID NO: 1573260 - DNA, 15 bp, Homo sapiens
catgaacttagatag

SEQ ID NO: 1573261 - DNA, 15 bp, Homo sapiens
acatgaacttagata

SEQ ID NO: 1573262 - DNA, 15 bp, Homo sapiens
tacatgaacttagat

SEQ ID NO: 1573263 - DNA, 15 bp, Homo sapiens
ttacatgaacttaga

SEQ ID NO: 1573264 - DNA, 15 bp, Homo sapiens
cttacatgaacttag

SEQ ID NO: 1573265 - DNA, 15 bp, Homo sapiens
acttacatgaactta

SEQ ID NO: 1573266 - DNA, 15 bp, Homo sapiens
tacttacatgaactt

SEQ ID NO: 1573267 - DNA, 15 bp, Homo sapiens
gtacttacatgaact

SEQ ID NO: 1573268 - DNA, 15 bp, Homo sapiens
tgtacttacatgaac

SEQ ID NO: 1573269 - DNA, 15 bp, Homo sapiens
gtgtacttacatgaa

SEQ ID NO: 1573270 - DNA, 15 bp, Homo sapiens
agtgtacttacatga

SEQ ID NO: 1573271 - DNA, 15 bp, Homo sapiens
gagtgtacttacatg

SEQ ID NO: 1573272 - DNA, 15 bp, Homo sapiens
ggagtgtacttacat

SEQ ID NO: 1573273 - DNA, 15 bp, Homo sapiens
tggagtgtacttaca

SEQ ID NO: 1573274 - DNA, 15 bp, Homo sapiens
gtggagtgtacttac

SEQ ID NO: 1573275 - DNA, 15 bp, Homo sapiens
tgtggagtgtactta

SEQ ID NO: 1573276 - DNA, 15 bp, Homo sapiens
ttgtggagtgtactt

SEQ ID NO: 1573277 - DNA, 15 bp, Homo sapiens
attgtggagtgtact

SEQ ID NO: 1573278 - DNA, 15 bp, Homo sapiens
tattgtggagtgtac

SEQ ID NO: 1573279 - DNA, 15 bp, Homo sapiens
atattgtggagtgta

SEQ ID NO: 1573280 - DNA, 15 bp, Homo sapiens
aatattgtggagtgt

SEQ ID NO: 1573281 - DNA, 15 bp, Homo sapiens
aaatattgtggagtg

SEQ ID NO: 1573282 - DNA, 15 bp, Homo sapiens
caaatattgtggagt

SEQ ID NO: 1573283 - DNA, 15 bp, Homo sapiens
gcaaatattgtggag

SEQ ID NO: 1573284 - DNA, 15 bp, Homo sapiens
tgcaaatattgtgga

SEQ ID NO: 1573285 - DNA, 15 bp, Homo sapiens
gtgcaaatattgtgg

SEQ ID NO: 1573286 - DNA, 15 bp, Homo sapiens
tgtgcaaatattgtg

SEQ ID NO: 1573287 - DNA, 15 bp, Homo sapiens
ctgtgcaaatattgt

SEQ ID NO: 1573288 - DNA, 15 bp, Homo sapiens
tctgtgcaaatattg

SEQ ID NO: 1573289 - DNA, 15 bp, Homo sapiens
gtctgtgcaaatatt

SEQ ID NO: 1573290 - DNA, 15 bp, Homo sapiens
ttgtctgtgcaaata

SEQ ID NO: 1573291 - DNA, 15 bp, Homo sapiens
tttgtctgtgcaaat

SEQ ID NO: 1573292 - DNA, 15 bp, Homo sapiens
ttttgtctgtgcaaa

SEQ ID NO: 1573293 - DNA, 15 bp, Homo sapiens
attttgtctgtgcaa

SEQ ID NO: 1573294 - DNA, 15 bp, Homo sapiens
gattttgtctgtgca

SEQ ID NO: 1573295 - DNA, 15 bp, Homo sapiens
cgattttgtctgtgc

SEQ ID NO: 1573296 - DNA, 15 bp, Homo sapiens
gcgattttgtctgtg

SEQ ID NO: 1573297 - DNA, 15 bp, Homo sapiens
ggcgattttgtctgt

SEQ ID NO: 1573298 - DNA, 15 bp, Homo sapiens
aggcgattttgtctg

SEQ ID NO: 1573299 - DNA, 15 bp, Homo sapiens
taggcgattttgtct

SEQ ID NO: 1573300 - DNA, 15 bp, Homo sapiens
ttaggcgattttgtc

SEQ ID NO: 1573301 - DNA, 15 bp, Homo sapiens
attaggcgattttgt

SEQ ID NO: 1573302 - DNA, 15 bp, Homo sapiens
cattaggcgattttg

SEQ ID NO: 1573303 - DNA, 15 bp, Homo sapiens
tcattaggcgatttt

SEQ ID NO: 1573304 - DNA, 15 bp, Homo sapiens
atcattaggcgattt

SEQ ID NO: 1573305 - DNA, 15 bp, Homo sapiens
aatcattaggcgatt

SEQ ID NO: 1573306 - DNA, 15 bp, Homo sapiens
caatcattaggcgat

SEQ ID NO: 1573307 - DNA, 15 bp, Homo sapiens
acaatcattaggcga

SEQ ID NO: 1573308 - DNA, 15 bp, Homo sapiens
aacaatcattaggcg

SEQ ID NO: 1573309 - DNA, 15 bp, Homo sapiens
aaacaatcattaggc

SEQ ID NO: 1573310 - DNA, 15 bp, Homo sapiens
gaaacaatcattagg

SEQ ID NO: 1573311 - DNA, 15 bp, Homo sapiens
ggaaacaatcattag

SEQ ID NO: 1573312 - DNA, 15 bp, Homo sapiens
aggaaacaatcatta

SEQ ID NO: 1573313 - DNA, 15 bp, Homo sapiens
taggaaacaatcatt

SEQ ID NO: 1573314 - DNA, 15 bp, Homo sapiens
ctaggaaacaatcat

SEQ ID NO: 1573315 - DNA, 15 bp, Homo sapiens
tctaggaaacaatca

SEQ ID NO: 1573316 - DNA, 15 bp, Homo sapiens
ttctaggaaacaatc

SEQ ID NO: 1573317 - DNA, 15 bp, Homo sapiens
attctaggaaacaat

SEQ ID NO: 1573318 - DNA, 15 bp, Homo sapiens
cattctaggaaacaa

SEQ ID NO: 1573319 - DNA, 15 bp, Homo sapiens
acattctaggaaaca

SEQ ID NO: 1573320 - DNA, 15 bp, Homo sapiens
cacattctaggaaac

SEQ ID NO: 1573321 - DNA, 15 bp, Homo sapiens
acacattctaggaaa

SEQ ID NO: 1573322 - DNA, 15 bp, Homo sapiens
gacacattctaggaa

SEQ ID NO: 1573323 - DNA, 15 bp, Homo sapiens
ggacacattctagga

SEQ ID NO: 1573324 - DNA, 15 bp, Homo sapiens
gggacacattctagg

SEQ ID NO: 1573325 - DNA, 15 bp, Homo sapiens
ggggacacattctag

SEQ ID NO: 1573326 - DNA, 15 bp, Homo sapiens
cggggacacattcta

SEQ ID NO: 1573327 - DNA, 15 bp, Homo sapiens
acggggacacattct

SEQ ID NO: 1573328 - DNA, 15 bp, Homo sapiens
aacggggacacattc

SEQ ID NO: 1573329 - DNA, 15 bp, Homo sapiens
caacggggacacatt

SEQ ID NO: 1573330 - DNA, 15 bp, Homo sapiens
acaacggggacacat

SEQ ID NO: 1573331 - DNA, 15 bp, Homo sapiens
aacaacggggacaca

SEQ ID NO: 1573332 - DNA, 15 bp, Homo sapiens
taacaacggggacac

SEQ ID NO: 1573333 - DNA, 15 bp, Homo sapiens
ttaacaacggggaca

SEQ ID NO: 1573334 - DNA, 15 bp, Homo sapiens
cttaacaacggggac

SEQ ID NO: 1573335 - DNA, 15 bp, Homo sapiens
gcttaacaacgggga

SEQ ID NO: 1573336 - DNA, 15 bp, Homo sapiens
cgcttaacaacgggg

SEQ ID NO: 1573337 - DNA, 15 bp, Homo sapiens
tcgcttaacaacggg

SEQ ID NO: 1573338 - DNA, 15 bp, Homo sapiens
gtcgcttaacaacgg

SEQ ID NO: 1573339 - DNA, 15 bp, Homo sapiens
tgtcgcttaacaacg

SEQ ID NO: 1573340 - DNA, 15 bp, Homo sapiens
gtgtcgcttaacaac

SEQ ID NO: 1573341 - DNA, 15 bp, Homo sapiens
tgtgtcgcttaacaa

SEQ ID NO: 1573342 - DNA, 15 bp, Homo sapiens
atgtgtcgcttaaca

SEQ ID NO: 1573343 - DNA, 15 bp, Homo sapiens
catgtgtcgcttaac

SEQ ID NO: 1573344 - DNA, 15 bp, Homo sapiens
tcatgtgtcgcttaa

SEQ ID NO: 1573345 - DNA, 15 bp, Homo sapiens
gtcatgtgtcgctta

SEQ ID NO: 1573346 - DNA, 15 bp, Homo sapiens
agtcatgtgtcgctt

SEQ ID NO: 1573347 - DNA, 15 bp, Homo sapiens
cagtcatgtgtcgct

SEQ ID NO: 1573348 - DNA, 15 bp, Homo sapiens
gcagtcatgtgtcgc

SEQ ID NO: 1573349 - DNA, 15 bp, Homo sapiens
tgcagtcatgtgtcg

SEQ ID NO: 1573350 - DNA, 15 bp, Homo sapiens
ttgcagtcatgtgtc

SEQ ID NO: 1573351 - DNA, 15 bp, Homo sapiens
attgcagtcatgtgt

SEQ ID NO: 1573352 - DNA, 15 bp, Homo sapiens
cattgcagtcatgtg

SEQ ID NO: 1573353 - DNA, 15 bp, Homo sapiens
tcattgcagtcatgt

SEQ ID NO: 1573354 - DNA, 15 bp, Homo sapiens
ttcattgcagtcatg

SEQ ID NO: 1573355 - DNA, 15 bp, Homo sapiens
tttcattgcagtcat

SEQ ID NO: 1573356 - DNA, 15 bp, Homo sapiens
atttcattgcagtca

SEQ ID NO: 1573357 - DNA, 15 bp, Homo sapiens
aatttcattgcagtc

SEQ ID NO: 1573358 - DNA, 15 bp, Homo sapiens
gaatttcattgcagt

SEQ ID NO: 1573359 - DNA, 15 bp, Homo sapiens
tgaatttcattgcag

SEQ ID NO: 1573360 - DNA, 15 bp, Homo sapiens
ctgaatttcattgca

SEQ ID NO: 1573361 - DNA, 15 bp, Homo sapiens
actgaatttcattgc

SEQ ID NO: 1573362 - DNA, 15 bp, Homo sapiens
gactgaatttcattg

SEQ ID NO: 1573363 - DNA, 15 bp, Homo sapiens
ggactgaatttcatt

SEQ ID NO: 1573364 - DNA, 15 bp, Homo sapiens
aggactgaatttcat

SEQ ID NO: 1573365 - DNA, 15 bp, Homo sapiens
caggactgaatttca

SEQ ID NO: 1573366 - DNA, 15 bp, Homo sapiens
ccaggactgaatttc

SEQ ID NO: 1573367 - DNA, 15 bp, Homo sapiens
tccaggactgaattt

SEQ ID NO: 1573368 - DNA, 15 bp, Homo sapiens
ttccaggactgaatt

SEQ ID NO: 1573369 - DNA, 15 bp, Homo sapiens
cttccaggactgaat

SEQ ID NO: 1573370 - DNA, 15 bp, Homo sapiens
ccttccaggactgaa

SEQ ID NO: 1573371 - DNA, 15 bp, Homo sapiens
tccttccaggactga

SEQ ID NO: 1573372 - DNA, 15 bp, Homo sapiens
ttccttccaggactg

SEQ ID NO: 1573373 - DNA, 15 bp, Homo sapiens
ttttccttccaggac

SEQ ID NO: 1573374 - DNA, 15 bp, Homo sapiens
cttttccttccagga

SEQ ID NO: 1573375 - DNA, 15 bp, Homo sapiens
tcttttccttccagg

SEQ ID NO: 1573376 - DNA, 15 bp, Homo sapiens
ttcttttccttccag

SEQ ID NO: 1573377 - DNA, 15 bp, Homo sapiens
cttcttttccttcca

SEQ ID NO: 1573378 - DNA, 15 bp, Homo sapiens
tcttcttttccttcc

SEQ ID NO: 1573379 - DNA, 15 bp, Homo sapiens
ttcttcttttccttc

SEQ ID NO: 1573380 - DNA, 15 bp, Homo sapiens
cttcttcttttcctt

SEQ ID NO: 1573381 - DNA, 15 bp, Homo sapiens
acttcttcttttcct

SEQ ID NO: 1573382 - DNA, 15 bp, Homo sapiens
tacttcttcttttcc

SEQ ID NO: 1573383 - DNA, 15 bp, Homo sapiens
ttacttcttcttttc

SEQ ID NO: 1573384 - DNA, 15 bp, Homo sapiens
gttacttcttctttt

SEQ ID NO: 1573385 - DNA, 15 bp, Homo sapiens
agttacttcttcttt

SEQ ID NO: 1573386 - DNA, 15 bp, Homo sapiens
cagttacttcttctt

SEQ ID NO: 1573387 - DNA, 15 bp, Homo sapiens
ccagttacttcttct

SEQ ID NO: 1573388 - DNA, 15 bp, Homo sapiens
gccagttacttcttc

SEQ ID NO: 1573389 - DNA, 15 bp, Homo sapiens
agccagttacttctt

SEQ ID NO: 1573390 - DNA, 15 bp, Homo sapiens
cagccagttacttct

SEQ ID NO: 1573391 - DNA, 15 bp, Homo sapiens
acagccagttacttc

SEQ ID NO: 1573392 - DNA, 15 bp, Homo sapiens
aacagccagttactt

SEQ ID NO: 1573393 - DNA, 15 bp, Homo sapiens
gaacagccagttact

SEQ ID NO: 1573394 - DNA, 15 bp, Homo sapiens
agaacagccagttac

SEQ ID NO: 1573395 - DNA, 15 bp, Homo sapiens
gagaacagccagtta

SEQ ID NO: 1573396 - DNA, 15 bp, Homo sapiens
agagaacagccagtt

SEQ ID NO: 1573397 - DNA, 15 bp, Homo sapiens
aagagaacagccagt

SEQ ID NO: 1573398 - DNA, 15 bp, Homo sapiens
aaagagaacagccag

SEQ ID NO: 1573399 - DNA, 15 bp, Homo sapiens
aaaagagaacagcca

SEQ ID NO: 1573400 - DNA, 15 bp, Homo sapiens
aaaaagagaacagcc

SEQ ID NO: 1573401 - DNA, 15 bp, Homo sapiens
gaaaaagagaacagc

SEQ ID NO: 1573402 - DNA, 15 bp, Homo sapiens
agaaaaagagaacag

SEQ ID NO: 1573403 - DNA, 15 bp, Homo sapiens
gagaaaaagagaaca

SEQ ID NO: 1573404 - DNA, 15 bp, Homo sapiens
ggagaaaaagagaac

SEQ ID NO: 1573405 - DNA, 15 bp, Homo sapiens
tggagaaaaagagaa

SEQ ID NO: 1573406 - DNA, 15 bp, Homo sapiens
ctggagaaaaagaga

SEQ ID NO: 1573407 - DNA, 15 bp, Homo sapiens
cctggagaaaaagag

SEQ ID NO: 1573408 - DNA, 15 bp, Homo sapiens
tcctggagaaaaaga

SEQ ID NO: 1573409 - DNA, 15 bp, Homo sapiens
ttcctggagaaaaag

SEQ ID NO: 1573410 - DNA, 15 bp, Homo sapiens
attcctggagaaaaa

SEQ ID NO: 1573411 - DNA, 15 bp, Homo sapiens
gattcctggagaaaa

SEQ ID NO: 1573412 - DNA, 15 bp, Homo sapiens
cgattcctggagaaa

SEQ ID NO: 1573413 - DNA, 15 bp, Homo sapiens
tcgattcctggagaa

SEQ ID NO: 1573414 - DNA, 15 bp, Homo sapiens
gtcgattcctggaga

SEQ ID NO: 1573415 - DNA, 15 bp, Homo sapiens
tgtcgattcctggag

SEQ ID NO: 1573416 - DNA, 15 bp, Homo sapiens
ttgtcgattcctgga

SEQ ID NO: 1573417 - DNA, 15 bp, Homo sapiens
cttgtcgattcctgg

SEQ ID NO: 1573418 - DNA, 15 bp, Homo sapiens
ccttgtcgattcctg

SEQ ID NO: 1573419 - DNA, 15 bp, Homo sapiens
tccttgtcgattcct

SEQ ID NO: 1573420 - DNA, 15 bp, Homo sapiens
ctccttgtcgattcc

SEQ ID NO: 1573421 - DNA, 15 bp, Homo sapiens
tctccttgtcgattc

SEQ ID NO: 1573422 - DNA, 15 bp, Homo sapiens
ttctccttgtcgatt

SEQ ID NO: 1573423 - DNA, 15 bp, Homo sapiens
gttctccttgtcgat

SEQ ID NO: 1573424 - DNA, 15 bp, Homo sapiens
cgttctccttgtcga

SEQ ID NO: 1573425 - DNA, 15 bp, Homo sapiens
acgttctccttgtcg

SEQ ID NO: 1573426 - DNA, 15 bp, Homo sapiens
aacgttctccttgtc

SEQ ID NO: 1573427 - DNA, 15 bp, Homo sapiens
ttcaacgttctcctt

SEQ ID NO: 1573428 - DNA, 15 bp, Homo sapiens
gttcaacgttctcct

SEQ ID NO: 1573429 - DNA, 15 bp, Homo sapiens
agttcaacgttctcc

SEQ ID NO: 1573430 - DNA, 15 bp, Homo sapiens
gagttcaacgttctc

SEQ ID NO: 1573431 - DNA, 15 bp, Homo sapiens
agagttcaacgttct

SEQ ID NO: 1573432 - DNA, 15 bp, Homo sapiens
gagagttcaacgttc

SEQ ID NO: 1573433 - DNA, 15 bp, Homo sapiens
ggagagttcaacgtt

SEQ ID NO: 1573434 - DNA, 15 bp, Homo sapiens
gggagagttcaacgt

SEQ ID NO: 1573435 - DNA, 15 bp, Homo sapiens
ggggagagttcaacg

SEQ ID NO: 1573436 - DNA, 15 bp, Homo sapiens
aggggagagttcaac

SEQ ID NO: 1573437 - DNA, 15 bp, Homo sapiens
taggggagagttcaa

SEQ ID NO: 1573438 - DNA, 15 bp, Homo sapiens
gtaggggagagttca

SEQ ID NO: 1573439 - DNA, 15 bp, Homo sapiens
ggtaggggagagttc

SEQ ID NO: 1573440 - DNA, 15 bp, Homo sapiens
tggtaggggagagtt

SEQ ID NO: 1573441 - DNA, 15 bp, Homo sapiens
gtggtaggggagagt

SEQ ID NO: 1573442 - DNA, 15 bp, Homo sapiens
agtggtaggggagag

SEQ ID NO: 1573443 - DNA, 15 bp, Homo sapiens
cagtggtaggggaga

SEQ ID NO: 1573444 - DNA, 15 bp, Homo sapiens
ccagtggtaggggag

SEQ ID NO: 1573445 - DNA, 15 bp, Homo sapiens
gccagtggtagggga

SEQ ID NO: 1573446 - DNA, 15 bp, Homo sapiens
ggccagtggtagggg

SEQ ID NO: 1573447 - DNA, 15 bp, Homo sapiens
tggccagtggtaggg

SEQ ID NO: 1573448 - DNA, 15 bp, Homo sapiens
gtggccagtggtagg

SEQ ID NO: 1573449 - DNA, 15 bp, Homo sapiens
agtggccagtggtag

SEQ ID NO: 1573450 - DNA, 15 bp, Homo sapiens
cagtggccagtggta

SEQ ID NO: 1573451 - DNA, 15 bp, Homo sapiens
acagtggccagtggt

SEQ ID NO: 1573452 - DNA, 15 bp, Homo sapiens
tacagtggccagtgg

SEQ ID NO: 1573453 - DNA, 15 bp, Homo sapiens
ttacagtggccagtg

SEQ ID NO: 1573454 - DNA, 15 bp, Homo sapiens
gttacagtggccagt

SEQ ID NO: 1573455 - DNA, 15 bp, Homo sapiens
tgttacagtggccag

SEQ ID NO: 1573456 - DNA, 15 bp, Homo sapiens
ctgttacagtggcca

SEQ ID NO: 1573457 - DNA, 15 bp, Homo sapiens
actgttacagtggcc

SEQ ID NO: 1573458 - DNA, 15 bp, Homo sapiens
cactgttacagtggc

SEQ ID NO: 1573459 - DNA, 15 bp, Homo sapiens
ccactgttacagtgg

SEQ ID NO: 1573460 - DNA, 15 bp, Homo sapiens
tccactgttacagtg

SEQ ID NO: 1573461 - DNA, 15 bp, Homo sapiens
gtccactgttacagt

SEQ ID NO: 1573462 - DNA, 15 bp, Homo sapiens
cgtccactgttacag

SEQ ID NO: 1573463 - DNA, 15 bp, Homo sapiens
tcgtccactgttaca

SEQ ID NO: 1573464 - DNA, 15 bp, Homo sapiens
ttcgtccactgttac

SEQ ID NO: 1573465 - DNA, 15 bp, Homo sapiens
gttcgtccactgtta

SEQ ID NO: 1573466 - DNA, 15 bp, Homo sapiens
agttcgtccactgtt

SEQ ID NO: 1573467 - DNA, 15 bp, Homo sapiens
gagttcgtccactgt

SEQ ID NO: 1573468 - DNA, 15 bp, Homo sapiens
cgagttcgtccactg

SEQ ID NO: 1573469 - DNA, 15 bp, Homo sapiens
gcgagttcgtccact

SEQ ID NO: 1573470 - DNA, 15 bp, Homo sapiens
ggcgagttcgtccac

SEQ ID NO: 1573471 - DNA, 15 bp, Homo sapiens
tggcgagttcgtcca

SEQ ID NO: 1573472 - DNA, 15 bp, Homo sapiens
gtggcgagttcgtcc

SEQ ID NO: 1573473 - DNA, 15 bp, Homo sapiens
cgtggcgagttcgtc

SEQ ID NO: 1573474 - DNA, 15 bp, Homo sapiens
ccgtggcgagttcgt

SEQ ID NO: 1573475 - DNA, 15 bp, Homo sapiens
tccgtggcgagttcg

SEQ ID NO: 1573476 - DNA, 15 bp, Homo sapiens
atccgtggcgagttc

SEQ ID NO: 1573477 - DNA, 15 bp, Homo sapiens
gatccgtggcgagtt

SEQ ID NO: 1573478 - DNA, 15 bp, Homo sapiens
ggatccgtggcgagt

SEQ ID NO: 1573479 - DNA, 15 bp, Homo sapiens
cggatccgtggcgag

SEQ ID NO: 1573480 - DNA, 15 bp, Homo sapiens
gcggatccgtggcga

SEQ ID NO: 1573481 - DNA, 15 bp, Homo sapiens
tgcggatccgtggcg

SEQ ID NO: 1573482 - DNA, 15 bp, Homo sapiens
ttgcggatccgtggc

SEQ ID NO: 1573483 - DNA, 15 bp, Homo sapiens
cttgcggatccgtgg

SEQ ID NO: 1573484 - DNA, 15 bp, Homo sapiens
gcttgcggatccgtg

SEQ ID NO: 1573485 - DNA, 15 bp, Homo sapiens
ggcttgcggatccgt

SEQ ID NO: 1573486 - DNA, 15 bp, Homo sapiens
tggcttgcggatccg

SEQ ID NO: 1573487 - DNA, 15 bp, Homo sapiens
ttggcttgcggatcc

SEQ ID NO: 1573488 - DNA, 15 bp, Homo sapiens
cttggcttgcggatc

SEQ ID NO: 1573489 - DNA, 15 bp, Homo sapiens
acttggcttgcggat

SEQ ID NO: 1573490 - DNA, 15 bp, Homo sapiens
cacttggcttgcgga

SEQ ID NO: 1573491 - DNA, 15 bp, Homo sapiens
gcacttggcttgcgg

SEQ ID NO: 1573492 - DNA, 15 bp, Homo sapiens
tgcacttggcttgcg

SEQ ID NO: 1573493 - DNA, 15 bp, Homo sapiens
ctgcacttggcttgc

SEQ ID NO: 1573494 - DNA, 15 bp, Homo sapiens
tctgcacttggcttg

SEQ ID NO: 1573495 - DNA, 15 bp, Homo sapiens
ttctgcacttggctt

SEQ ID NO: 1573496 - DNA, 15 bp, Homo sapiens
cttctgcacttggct

SEQ ID NO: 1573497 - DNA, 15 bp, Homo sapiens
gcttctgcacttggc

SEQ ID NO: 1573498 - DNA, 15 bp, Homo sapiens
tgcttctgcacttgg

SEQ ID NO: 1573499 - DNA, 15 bp, Homo sapiens
ttgcttctgcacttg

SEQ ID NO: 1573500 - DNA, 15 bp, Homo sapiens
tttgcttctgcactt

SEQ ID NO: 1573501 - DNA, 15 bp, Homo sapiens
ctttgcttctgcact

SEQ ID NO: 1573502 - DNA, 15 bp, Homo sapiens
tctttgcttctgcac

SEQ ID NO: 1573503 - DNA, 15 bp, Homo sapiens
ttctttgcttctgca

SEQ ID NO: 1573504 - DNA, 15 bp, Homo sapiens
cttctttgcttctgc

SEQ ID NO: 1573505 - DNA, 15 bp, Homo sapiens
gcttctttgcttctg

SEQ ID NO: 1573506 - DNA, 15 bp, Homo sapiens
cgcttctttgcttct

SEQ ID NO: 1573507 - DNA, 15 bp, Homo sapiens
gcgcttctttgcttc

SEQ ID NO: 1573508 - DNA, 15 bp, Homo sapiens
agcgcttctttgctt

SEQ ID NO: 1573509 - DNA, 15 bp, Homo sapiens
cagcgcttctttgct

SEQ ID NO: 1573510 - DNA, 15 bp, Homo sapiens
ccagcgcttctttgc

SEQ ID NO: 1573511 - DNA, 15 bp, Homo sapiens
gccagcgcttctttg

SEQ ID NO: 1573512 - DNA, 15 bp, Homo sapiens
tgccagcgcttcttt

SEQ ID NO: 1573513 - DNA, 15 bp, Homo sapiens
ctgccagcgcttctt

SEQ ID NO: 1573514 - DNA, 15 bp, Homo sapiens
actgccagcgcttct

SEQ ID NO: 1573515 - DNA, 15 bp, Homo sapiens
aactgccagcgcttc

SEQ ID NO: 1573516 - DNA, 15 bp, Homo sapiens
aaactgccagcgctt

SEQ ID NO: 1573517 - DNA, 15 bp, Homo sapiens
gaaactgccagcgct

SEQ ID NO: 1573518 - DNA, 15 bp, Homo sapiens
tgaaactgccagcgc

SEQ ID NO: 1573519 - DNA, 15 bp, Homo sapiens
ttgaaactgccagcg

SEQ ID NO: 1573520 - DNA, 15 bp, Homo sapiens
tttgaaactgccagc

SEQ ID NO: 1573521 - DNA, 15 bp, Homo sapiens
gtttgaaactgccag

SEQ ID NO: 1573522 - DNA, 15 bp, Homo sapiens
cgtttgaaactgcca

SEQ ID NO: 1573523 - DNA, 15 bp, Homo sapiens
acgtttgaaactgcc

SEQ ID NO: 1573524 - DNA, 15 bp, Homo sapiens
tacgtttgaaactgc

SEQ ID NO: 1573525 - DNA, 15 bp, Homo sapiens
ttacgtttgaaactg

SEQ ID NO: 1573526 - DNA, 15 bp, Homo sapiens
attacgtttgaaact

SEQ ID NO: 1573527 - DNA, 15 bp, Homo sapiens
tattacgtttgaaac

SEQ ID NO: 1573528 - DNA, 15 bp, Homo sapiens
ctattacgtttgaaa

SEQ ID NO: 1573529 - DNA, 15 bp, Homo sapiens
gctattacgtttgaa

SEQ ID NO: 1573530 - DNA, 15 bp, Homo sapiens
tgctattacgtttga

SEQ ID NO: 1573531 - DNA, 15 bp, Homo sapiens
atgctattacgtttg

SEQ ID NO: 1573532 - DNA, 15 bp, Homo sapiens
aatgctattacgttt

SEQ ID NO: 1573533 - DNA, 15 bp, Homo sapiens
taatgctattacgtt

SEQ ID NO: 1573534 - DNA, 15 bp, Homo sapiens
ttaatgctattacgt

SEQ ID NO: 1573535 - DNA, 15 bp, Homo sapiens
cttaatgctattacg

SEQ ID NO: 1573536 - DNA, 15 bp, Homo sapiens
tcttaatgctattac

SEQ ID NO: 1573537 - DNA, 15 bp, Homo sapiens
ttcttaatgctatta

SEQ ID NO: 1573538 - DNA, 15 bp, Homo sapiens
cttcttaatgctatt

SEQ ID NO: 1573539 - DNA, 15 bp, Homo sapiens
tcttcttaatgctat

SEQ ID NO: 1573540 - DNA, 15 bp, Homo sapiens
atcttcttaatgcta

SEQ ID NO: 1573541 - DNA, 15 bp, Homo sapiens
gatcttcttaatgct

SEQ ID NO: 1573542 - DNA, 15 bp, Homo sapiens
cgatcttcttaatgc

SEQ ID NO: 1573543 - DNA, 15 bp, Homo sapiens
acgatcttcttaatg

SEQ ID NO: 1573544 - DNA, 15 bp, Homo sapiens
cacgatcttcttaat

SEQ ID NO: 1573545 - DNA, 15 bp, Homo sapiens
acacgatcttcttaa

SEQ ID NO: 1573546 - DNA, 15 bp, Homo sapiens
cacacgatcttctta

SEQ ID NO: 1573547 - DNA, 15 bp, Homo sapiens
tcacacgatcttctt

SEQ ID NO: 1573548 - DNA, 15 bp, Homo sapiens
ttcacacgatcttct

SEQ ID NO: 1573549 - DNA, 15 bp, Homo sapiens
cttcacacgatcttc

SEQ ID NO: 1573550 - DNA, 15 bp, Homo sapiens
gcttcacacgatctt

SEQ ID NO: 1573551 - DNA, 15 bp, Homo sapiens
agcttcacacgatct

SEQ ID NO: 1573552 - DNA, 15 bp, Homo sapiens
aagcttcacacgatc

SEQ ID NO: 1573553 - DNA, 15 bp, Homo sapiens
caagcttcacacgat

SEQ ID NO: 1573554 - DNA, 15 bp, Homo sapiens
gcaagcttcacacga

SEQ ID NO: 1573555 - DNA, 15 bp, Homo sapiens
agcaagcttcacacg

SEQ ID NO: 1573556 - DNA, 15 bp, Homo sapiens
aagcaagcttcacac

SEQ ID NO: 1573557 - DNA, 15 bp, Homo sapiens
caagcaagcttcaca

SEQ ID NO: 1573558 - DNA, 15 bp, Homo sapiens
gcaagcaagcttcac

SEQ ID NO: 1573559 - DNA, 15 bp, Homo sapiens
agcaagcaagcttca

SEQ ID NO: 1573560 - DNA, 15 bp, Homo sapiens
aagcaagcaagcttc

SEQ ID NO: 1573561 - DNA, 15 bp, Homo sapiens
aaagcaagcaagctt

SEQ ID NO: 1573562 - DNA, 15 bp, Homo sapiens
gaaagcaagcaagct

SEQ ID NO: 1573563 - DNA, 15 bp, Homo sapiens
agaaagcaagcaagc

SEQ ID NO: 1573564 - DNA, 15 bp, Homo sapiens
aagaaagcaagcaag

SEQ ID NO: 1573565 - DNA, 15 bp, Homo sapiens
aaagaaagcaagcaa

SEQ ID NO: 1573566 - DNA, 15 bp, Homo sapiens
aaaagaaagcaagca

SEQ ID NO: 1573567 - DNA, 15 bp, Homo sapiens
aaaaagaaagcaagc

SEQ ID NO: 1573568 - DNA, 15 bp, Homo sapiens
aaaaaagaaagcaag

SEQ ID NO: 1573569 - DNA, 15 bp, Homo sapiens
taaaaaagaaagcaa

SEQ ID NO: 1573570 - DNA, 15 bp, Homo sapiens
ttaaaaaagaaagca

SEQ ID NO: 1573571 - DNA, 15 bp, Homo sapiens
tttaaaaaagaaagc

SEQ ID NO: 1573572 - DNA, 15 bp, Homo sapiens
ttttaaaaaagaaag

SEQ ID NO: 1573573 - DNA, 15 bp, Homo sapiens
attttaaaaaagaaa

SEQ ID NO: 1573574 - DNA, 15 bp, Homo sapiens
gattttaaaaaagaa

SEQ ID NO: 1573575 - DNA, 15 bp, Homo sapiens
tgattttaaaaaaga

SEQ ID NO: 1573576 - DNA, 15 bp, Homo sapiens
ttgattttaaaaaag

SEQ ID NO: 1573577 - DNA, 15 bp, Homo sapiens
gttgattttaaaaaa

SEQ ID NO: 1573578 - DNA, 15 bp, Homo sapiens
agttgattttaaaaa

SEQ ID NO: 1573579 - DNA, 15 bp, Homo sapiens
aagttgattttaaaa

SEQ ID NO: 1573580 - DNA, 15 bp, Homo sapiens
taagttgattttaaa

SEQ ID NO: 1573581 - DNA, 15 bp, Homo sapiens
ttaagttgattttaa

SEQ ID NO: 1573582 - DNA, 15 bp, Homo sapiens
gttaagttgatttta

SEQ ID NO: 1573583 - DNA, 15 bp, Homo sapiens
tgttaagttgatttt

SEQ ID NO: 1573584 - DNA, 15 bp, Homo sapiens
atgttaagttgattt

SEQ ID NO: 1573585 - DNA, 15 bp, Homo sapiens
catgttaagttgatt

SEQ ID NO: 1573586 - DNA, 15 bp, Homo sapiens
ccatgttaagttgat

SEQ ID NO: 1573587 - DNA, 15 bp, Homo sapiens
cccatgttaagttga

SEQ ID NO: 1573588 - DNA, 15 bp, Homo sapiens
gcccatgttaagttg

SEQ ID NO: 1573589 - DNA, 15 bp, Homo sapiens
agcccatgttaagtt

SEQ ID NO: 1573590 - DNA, 15 bp, Homo sapiens
gagcccatgttaagt

SEQ ID NO: 1573591 - DNA, 15 bp, Homo sapiens
agagcccatgttaag

SEQ ID NO: 1573592 - DNA, 15 bp, Homo sapiens
aagagcccatgttaa

SEQ ID NO: 1573593 - DNA, 15 bp, Homo sapiens
gaagagcccatgtta

SEQ ID NO: 1573594 - DNA, 15 bp, Homo sapiens
tgaagagcccatgtt

SEQ ID NO: 1573595 - DNA, 15 bp, Homo sapiens
gtgaagagcccatgt

SEQ ID NO: 1573596 - DNA, 15 bp, Homo sapiens
agtgaagagcccatg

SEQ ID NO: 1573597 - DNA, 15 bp, Homo sapiens
tagtgaagagcccat

SEQ ID NO: 1573598 - DNA, 15 bp, Homo sapiens
ctagtgaagagccca

SEQ ID NO: 1573599 - DNA, 15 bp, Homo sapiens
actagtgaagagccc

SEQ ID NO: 1573600 - DNA, 15 bp, Homo sapiens
cactagtgaagagcc

SEQ ID NO: 1573601 - DNA, 15 bp, Homo sapiens
tcactagtgaagagc

SEQ ID NO: 1573602 - DNA, 15 bp, Homo sapiens
gtcactagtgaagag

SEQ ID NO: 1573603 - DNA, 15 bp, Homo sapiens
ggtcactagtgaaga

SEQ ID NO: 1573604 - DNA, 15 bp, Homo sapiens
gggtcactagtgaag

SEQ ID NO: 1573605 - DNA, 15 bp, Homo sapiens
ggggtcactagtgaa

SEQ ID NO: 1573606 - DNA, 15 bp, Homo sapiens
aggggtcactagtga

SEQ ID NO: 1573607 - DNA, 15 bp, Homo sapiens
aaggggtcactagtg

SEQ ID NO: 1573608 - DNA, 15 bp, Homo sapiens
gaaggggtcactagt

SEQ ID NO: 1573609 - DNA, 15 bp, Homo sapiens
ggaaggggtcactag

SEQ ID NO: 1573610 - DNA, 15 bp, Homo sapiens
gggaaggggtcacta

SEQ ID NO: 1573611 - DNA, 15 bp, Homo sapiens
agggaaggggtcact

SEQ ID NO: 1573612 - DNA, 15 bp, Homo sapiens
cagggaaggggtcac

SEQ ID NO: 1573613 - DNA, 15 bp, Homo sapiens
acagggaaggggtca

SEQ ID NO: 1573614 - DNA, 15 bp, Homo sapiens
gacagggaaggggtc

SEQ ID NO: 1573615 - DNA, 15 bp, Homo sapiens
ggacagggaaggggt

SEQ ID NO: 1573616 - DNA, 15 bp, Homo sapiens
aggacagggaagggg

SEQ ID NO: 1573617 - DNA, 15 bp, Homo sapiens
aaggacagggaaggg

SEQ ID NO: 1573618 - DNA, 15 bp, Homo sapiens
caaggacagggaagg

SEQ ID NO: 1573619 - DNA, 15 bp, Homo sapiens
gcaaggacagggaag

SEQ ID NO: 1573620 - DNA, 15 bp, Homo sapiens
ggcaaggacagggaa

SEQ ID NO: 1573621 - DNA, 15 bp, Homo sapiens
gggcaaggacaggga

SEQ ID NO: 1573622 - DNA, 15 bp, Homo sapiens
agggcaaggacaggg

SEQ ID NO: 1573623 - DNA, 15 bp, Homo sapiens
aagggcaaggacagg

SEQ ID NO: 1573624 - DNA, 15 bp, Homo sapiens
aaagggcaaggacag

SEQ ID NO: 1573625 - DNA, 15 bp, Homo sapiens
gaaagggcaaggaca

SEQ ID NO: 1573626 - DNA, 15 bp, Homo sapiens
ggaaagggcaaggac

SEQ ID NO: 1573627 - DNA, 15 bp, Homo sapiens
gggaaagggcaagga

SEQ ID NO: 1573628 - DNA, 15 bp, Homo sapiens
ggggaaagggcaagg

SEQ ID NO: 1573629 - DNA, 15 bp, Homo sapiens
gggggaaagggcaag

SEQ ID NO: 1573630 - DNA, 15 bp, Homo sapiens
ggggggaaagggcaa

SEQ ID NO: 1573631 - DNA, 15 bp, Homo sapiens
tggggggaaagggca

SEQ ID NO: 1573632 - DNA, 15 bp, Homo sapiens
atggggggaaagggc

SEQ ID NO: 1573633 - DNA, 15 bp, Homo sapiens
catggggggaaaggg

SEQ ID NO: 1573634 - DNA, 15 bp, Homo sapiens
acatggggggaaagg

SEQ ID NO: 1573635 - DNA, 15 bp, Homo sapiens
aacatggggggaaag

SEQ ID NO: 1573636 - DNA, 15 bp, Homo sapiens
caacatggggggaaa

SEQ ID NO: 1573637 - DNA, 15 bp, Homo sapiens
acaacatggggggaa

SEQ ID NO: 1573638 - DNA, 15 bp, Homo sapiens
tacaacatgggggga

SEQ ID NO: 1573639 - DNA, 15 bp, Homo sapiens
ttacaacatgggggg

SEQ ID NO: 1573640 - DNA, 15 bp, Homo sapiens
attacaacatggggg

SEQ ID NO: 1573641 - DNA, 15 bp, Homo sapiens
cattacaacatgggg

SEQ ID NO: 1573642 - DNA, 15 bp, Homo sapiens
gcattacaacatggg

SEQ ID NO: 1573643 - DNA, 15 bp, Homo sapiens
agcattacaacatgg

SEQ ID NO: 1573644 - DNA, 15 bp, Homo sapiens
cagcattacaacatg

SEQ ID NO: 1573645 - DNA, 15 bp, Homo sapiens
gcagcattacaacat

SEQ ID NO: 1573646 - DNA, 15 bp, Homo sapiens
tgcagcattacaaca

SEQ ID NO: 1573647 - DNA, 15 bp, Homo sapiens
gtgcagcattacaac

SEQ ID NO: 1573648 - DNA, 15 bp, Homo sapiens
agtgcagcattacaa

SEQ ID NO: 1573649 - DNA, 15 bp, Homo sapiens
aagtgcagcattaca

SEQ ID NO: 1573650 - DNA, 15 bp, Homo sapiens
gaagtgcagcattac

SEQ ID NO: 1573651 - DNA, 15 bp, Homo sapiens
ggaagtgcagcatta

SEQ ID NO: 1573652 - DNA, 15 bp, Homo sapiens
aggaagtgcagcatt

SEQ ID NO: 1573653 - DNA, 15 bp, Homo sapiens
caggaagtgcagcat

SEQ ID NO: 1573654 - DNA, 15 bp, Homo sapiens
acaggaagtgcagca

SEQ ID NO: 1573655 - DNA, 15 bp, Homo sapiens
aacaggaagtgcagc

SEQ ID NO: 1573656 - DNA, 15 bp, Homo sapiens
aaacaggaagtgcag

SEQ ID NO: 1573657 - DNA, 15 bp, Homo sapiens
aaaacaggaagtgca

SEQ ID NO: 1573658 - DNA, 15 bp, Homo sapiens
taaaacaggaagtgc

SEQ ID NO: 1573659 - DNA, 15 bp, Homo sapiens
ataaaacaggaagtg

SEQ ID NO: 1573660 - DNA, 15 bp, Homo sapiens
tataaaacaggaagt

SEQ ID NO: 1573661 - DNA, 15 bp, Homo sapiens
ttataaaacaggaag

SEQ ID NO: 1573662 - DNA, 15 bp, Homo sapiens
attataaaacaggaa

SEQ ID NO: 1573663 - DNA, 15 bp, Homo sapiens
cattataaaacagga

SEQ ID NO: 1573664 - DNA, 15 bp, Homo sapiens
tcattataaaacagg

SEQ ID NO: 1573665 - DNA, 15 bp, Homo sapiens
ttcattataaaacag

SEQ ID NO: 1573666 - DNA, 15 bp, Homo sapiens
gttcattataaaaca

SEQ ID NO: 1573667 - DNA, 15 bp, Homo sapiens
ggttcattataaaac

SEQ ID NO: 1573668 - DNA, 15 bp, Homo sapiens
gggttcattataaaa

SEQ ID NO: 1573669 - DNA, 15 bp, Homo sapiens
tgggttcattataaa

SEQ ID NO: 1573670 - DNA, 15 bp, Homo sapiens
atgggttcattataa

SEQ ID NO: 1573671 - DNA, 15 bp, Homo sapiens
gatgggttcattata

SEQ ID NO: 1573672 - DNA, 15 bp, Homo sapiens
ggatgggttcattat

SEQ ID NO: 1573673 - DNA, 15 bp, Homo sapiens
cggatgggttcatta

SEQ ID NO: 1573674 - DNA, 15 bp, Homo sapiens
ccggatgggttcatt

SEQ ID NO: 1573675 - DNA, 15 bp, Homo sapiens
accggatgggttcat

SEQ ID NO: 1573676 - DNA, 15 bp, Homo sapiens
aaccggatgggttca

SEQ ID NO: 1573677 - DNA, 15 bp, Homo sapiens
aaaccggatgggttc

SEQ ID NO: 1573678 - DNA, 15 bp, Homo sapiens
caaaccggatgggtt

SEQ ID NO: 1573679 - DNA, 15 bp, Homo sapiens
gcaaaccggatgggt

SEQ ID NO: 1573680 - DNA, 15 bp, Homo sapiens
ggcaaaccggatggg

SEQ ID NO: 1573681 - DNA, 15 bp, Homo sapiens
tggcaaaccggatgg

SEQ ID NO: 1573682 - DNA, 15 bp, Homo sapiens
atggcaaaccggatg

SEQ ID NO: 1573683 - DNA, 15 bp, Homo sapiens
catggcaaaccggat

SEQ ID NO: 1573684 - DNA, 15 bp, Homo sapiens
acatggcaaaccgga

SEQ ID NO: 1573685 - DNA, 15 bp, Homo sapiens
aacatggcaaaccgg

SEQ ID NO: 1573686 - DNA, 15 bp, Homo sapiens
caacatggcaaaccg

SEQ ID NO: 1573687 - DNA, 15 bp, Homo sapiens
gcaacatggcaaacc

SEQ ID NO: 1573688 - DNA, 15 bp, Homo sapiens
ggcaacatggcaaac

SEQ ID NO: 1573689 - DNA, 15 bp, Homo sapiens
tggcaacatggcaaa

SEQ ID NO: 1573690 - DNA, 15 bp, Homo sapiens
ctggcaacatggcaa

SEQ ID NO: 1573691 - DNA, 15 bp, Homo sapiens
tctggcaacatggca

SEQ ID NO: 1573692 - DNA, 15 bp, Homo sapiens
atctggcaacatggc

SEQ ID NO: 1573693 - DNA, 15 bp, Homo sapiens
catctggcaacatgg

SEQ ID NO: 1573694 - DNA, 15 bp, Homo sapiens
tcatctggcaacatg

SEQ ID NO: 1573695 - DNA, 15 bp, Homo sapiens
atcatctggcaacat

SEQ ID NO: 1573696 - DNA, 15 bp, Homo sapiens
gatcatctggcaaca

SEQ ID NO: 1573697 - DNA, 15 bp, Homo sapiens
tgatcatctggcaac

SEQ ID NO: 1573698 - DNA, 15 bp, Homo sapiens
ttgatcatctggcaa

SEQ ID NO: 1573699 - DNA, 15 bp, Homo sapiens
gttgatcatctggca

SEQ ID NO: 1573700 - DNA, 15 bp, Homo sapiens
agttgatcatctggc

SEQ ID NO: 1573701 - DNA, 15 bp, Homo sapiens
gagttgatcatctgg

SEQ ID NO: 1573702 - DNA, 15 bp, Homo sapiens
agagttgatcatctg

SEQ ID NO: 1573703 - DNA, 15 bp, Homo sapiens
aagagttgatcatct

SEQ ID NO: 1573704 - DNA, 15 bp, Homo sapiens
gaagagttgatcatc

SEQ ID NO: 1573705 - DNA, 15 bp, Homo sapiens
cgaagagttgatcat

SEQ ID NO: 1573706 - DNA, 15 bp, Homo sapiens
tcgaagagttgatca

SEQ ID NO: 1573707 - DNA, 15 bp, Homo sapiens
ttcgaagagttgatc

SEQ ID NO: 1573708 - DNA, 15 bp, Homo sapiens
cttcgaagagttgat

SEQ ID NO: 1573709 - DNA, 15 bp, Homo sapiens
gcttcgaagagttga

SEQ ID NO: 1573710 - DNA, 15 bp, Homo sapiens
ggcttcgaagagttg

SEQ ID NO: 1573711 - DNA, 15 bp, Homo sapiens
aggcttcgaagagtt

SEQ ID NO: 1573712 - DNA, 15 bp, Homo sapiens
aaggcttcgaagagt

SEQ ID NO: 1573713 - DNA, 15 bp, Homo sapiens
caaggcttcgaagag

SEQ ID NO: 1573714 - DNA, 15 bp, Homo sapiens
gcaaggcttcgaaga

SEQ ID NO: 1573715 - DNA, 15 bp, Homo sapiens
ggcaaggcttcgaag

SEQ ID NO: 1573716 - DNA, 15 bp, Homo sapiens
aggcaaggcttcgaa

SEQ ID NO: 1573717 - DNA, 15 bp, Homo sapiens
taggcaaggcttcga

SEQ ID NO: 1573718 - DNA, 15 bp, Homo sapiens
ttaggcaaggcttcg

SEQ ID NO: 1573719 - DNA, 15 bp, Homo sapiens
tttaggcaaggcttc

SEQ ID NO: 1573720 - DNA, 15 bp, Homo sapiens
atttaggcaaggctt

SEQ ID NO: 1573721 - DNA, 15 bp, Homo sapiens
aatttaggcaaggct

SEQ ID NO: 1573722 - DNA, 15 bp, Homo sapiens
aaatttaggcaaggc

SEQ ID NO: 1573723 - DNA, 15 bp, Homo sapiens
taaatttaggcaagg

SEQ ID NO: 1573724 - DNA, 15 bp, Homo sapiens
ttaaatttaggcaag

SEQ ID NO: 1573725 - DNA, 15 bp, Homo sapiens
attaaatttaggcaa

SEQ ID NO: 1573726 - DNA, 15 bp, Homo sapiens
cattaaatttaggca

SEQ ID NO: 1573727 - DNA, 15 bp, Homo sapiens
gcattaaatttaggc

SEQ ID NO: 1573728 - DNA, 15 bp, Homo sapiens
agcattaaatttagg

SEQ ID NO: 1573729 - DNA, 15 bp, Homo sapiens
cagcattaaatttag

SEQ ID NO: 1573730 - DNA, 15 bp, Homo sapiens
gcagcattaaattta

SEQ ID NO: 1573731 - DNA, 15 bp, Homo sapiens
ggcagcattaaattt

SEQ ID NO: 1573732 - DNA, 15 bp, Homo sapiens
aggcagcattaaatt

SEQ ID NO: 1573733 - DNA, 15 bp, Homo sapiens
aaggcagcattaaat

SEQ ID NO: 1573734 - DNA, 15 bp, Homo sapiens
aaaggcagcattaaa

SEQ ID NO: 1573735 - DNA, 15 bp, Homo sapiens
aaaaggcagcattaa

SEQ ID NO: 1573736 - DNA, 15 bp, Homo sapiens
gaaaaggcagcatta

SEQ ID NO: 1573737 - DNA, 15 bp, Homo sapiens
agaaaaggcagcatt

SEQ ID NO: 1573738 - DNA, 15 bp, Homo sapiens
aagaaaaggcagcat

SEQ ID NO: 1573739 - DNA, 15 bp, Homo sapiens
aaagaaaaggcagca

SEQ ID NO: 1573740 - DNA, 15 bp, Homo sapiens
taaagaaaaggcagc

SEQ ID NO: 1573741 - DNA, 15 bp, Homo sapiens
ttaaagaaaaggcag

SEQ ID NO: 1573742 - DNA, 15 bp, Homo sapiens
gttaaagaaaaggca

SEQ ID NO: 1573743 - DNA, 15 bp, Homo sapiens
agttaaagaaaaggc

SEQ ID NO: 1573744 - DNA, 15 bp, Homo sapiens
aagttaaagaaaagg

SEQ ID NO: 1573745 - DNA, 15 bp, Homo sapiens
aaagttaaagaaaag

SEQ ID NO: 1573746 - DNA, 15 bp, Homo sapiens
aaaagttaaagaaaa

SEQ ID NO: 1573747 - DNA, 15 bp, Homo sapiens
aaaaagttaaagaaa

SEQ ID NO: 1573748 - DNA, 15 bp, Homo sapiens
aaaaaagttaaagaa

SEQ ID NO: 1573749 - DNA, 15 bp, Homo sapiens
aaaaaaagttaaaga

SEQ ID NO: 1573750 - DNA, 15 bp, Homo sapiens
gaaaaaaagttaaag

SEQ ID NO: 1573751 - DNA, 15 bp, Homo sapiens
agaaaaaaagttaaa

SEQ ID NO: 1573752 - DNA, 15 bp, Homo sapiens
aagaaaaaaagttaa

SEQ ID NO: 1573753 - DNA, 15 bp, Homo sapiens
gaagaaaaaaagtta

SEQ ID NO: 1573754 - DNA, 15 bp, Homo sapiens
agaagaaaaaaagtt

SEQ ID NO: 1573755 - DNA, 15 bp, Homo sapiens
tagaagaaaaaaagt

SEQ ID NO: 1573756 - DNA, 15 bp, Homo sapiens
gtagaagaaaaaaag

SEQ ID NO: 1573757 - DNA, 15 bp, Homo sapiens
agtagaagaaaaaaa

SEQ ID NO: 1573758 - DNA, 15 bp, Homo sapiens
aagtagaagaaaaaa

SEQ ID NO: 1573759 - DNA, 15 bp, Homo sapiens
aaagtagaagaaaaa

SEQ ID NO: 1573760 - DNA, 15 bp, Homo sapiens
aaaagtagaagaaaa

SEQ ID NO: 1573761 - DNA, 15 bp, Homo sapiens
caaaagtagaagaaa

SEQ ID NO: 1573762 - DNA, 15 bp, Homo sapiens
ccaaaagtagaagaa

SEQ ID NO: 1573763 - DNA, 15 bp, Homo sapiens
gccaaaagtagaaga

SEQ ID NO: 1573764 - DNA, 15 bp, Homo sapiens
cgccaaaagtagaag

SEQ ID NO: 1573765 - DNA, 15 bp, Homo sapiens
acgccaaaagtagaa

SEQ ID NO: 1573766 - DNA, 15 bp, Homo sapiens
cacgccaaaagtaga

SEQ ID NO: 1573767 - DNA, 15 bp, Homo sapiens
acacgccaaaagtag

SEQ ID NO: 1573768 - DNA, 15 bp, Homo sapiens
tacacgccaaaagta

SEQ ID NO: 1573769 - DNA, 15 bp, Homo sapiens
atacacgccaaaagt

SEQ ID NO: 1573770 - DNA, 15 bp, Homo sapiens
gatacacgccaaaag

SEQ ID NO: 1573771 - DNA, 15 bp, Homo sapiens
agatacacgccaaaa

SEQ ID NO: 1573772 - DNA, 15 bp, Homo sapiens
cagatacacgccaaa

SEQ ID NO: 1573773 - DNA, 15 bp, Homo sapiens
ccagatacacgccaa

SEQ ID NO: 1573774 - DNA, 15 bp, Homo sapiens
accagatacacgcca

SEQ ID NO: 1573775 - DNA, 15 bp, Homo sapiens
taccagatacacgcc

SEQ ID NO: 1573776 - DNA, 15 bp, Homo sapiens
ataccagatacacgc

SEQ ID NO: 1573777 - DNA, 15 bp, Homo sapiens
tataccagatacacg

SEQ ID NO: 1573778 - DNA, 15 bp, Homo sapiens
atataccagatacac

SEQ ID NO: 1573779 - DNA, 15 bp, Homo sapiens
catataccagataca

SEQ ID NO: 1573780 - DNA, 15 bp, Homo sapiens
acatataccagatac

SEQ ID NO: 1573781 - DNA, 15 bp, Homo sapiens
tacatataccagata

SEQ ID NO: 1573782 - DNA, 15 bp, Homo sapiens
ttacatataccagat

SEQ ID NO: 1573783 - DNA, 15 bp, Homo sapiens
cttacatataccaga

SEQ ID NO: 1573784 - DNA, 15 bp, Homo sapiens
acttacatataccag

SEQ ID NO: 1573785 - DNA, 15 bp, Homo sapiens
cacttacatatacca

SEQ ID NO: 1573786 - DNA, 15 bp, Homo sapiens
acacttacatatacc

SEQ ID NO: 1573787 - DNA, 15 bp, Homo sapiens
aacacttacatatac

SEQ ID NO: 1573788 - DNA, 15 bp, Homo sapiens
gaacacttacatata

SEQ ID NO: 1573789 - DNA, 15 bp, Homo sapiens
tgaacacttacatat

SEQ ID NO: 1573790 - DNA, 15 bp, Homo sapiens
ctgaacacttacata

SEQ ID NO: 1573791 - DNA, 15 bp, Homo sapiens
tctgaacacttacat

SEQ ID NO: 1573792 - DNA, 15 bp, Homo sapiens
ttctgaacacttaca

SEQ ID NO: 1573793 - DNA, 15 bp, Homo sapiens
gttctgaacacttac

SEQ ID NO: 1573794 - DNA, 15 bp, Homo sapiens
tgttctgaacactta

SEQ ID NO: 1573795 - DNA, 15 bp, Homo sapiens
ttgttctgaacactt

SEQ ID NO: 1573796 - DNA, 15 bp, Homo sapiens
gttgttctgaacact

SEQ ID NO: 1573797 - DNA, 15 bp, Homo sapiens
agttgttctgaacac

SEQ ID NO: 1573798 - DNA, 15 bp, Homo sapiens
cagttgttctgaaca

SEQ ID NO: 1573799 - DNA, 15 bp, Homo sapiens
gcagttgttctgaac

SEQ ID NO: 1573800 - DNA, 15 bp, Homo sapiens
tgcagttgttctgaa

SEQ ID NO: 1573801 - DNA, 15 bp, Homo sapiens
ttgcagttgttctga

SEQ ID NO: 1573802 - DNA, 15 bp, Homo sapiens
tttgcagttgttctg

SEQ ID NO: 1573803 - DNA, 15 bp, Homo sapiens
ctttgcagttgttct

SEQ ID NO: 1573804 - DNA, 15 bp, Homo sapiens
tctttgcagttgttc

SEQ ID NO: 1573805 - DNA, 15 bp, Homo sapiens
ttctttgcagttgtt

SEQ ID NO: 1573806 - DNA, 15 bp, Homo sapiens
tttctttgcagttgt

SEQ ID NO: 1573807 - DNA, 15 bp, Homo sapiens
ctttctttgcagttg

SEQ ID NO: 1573808 - DNA, 15 bp, Homo sapiens
actttctttgcagtt

SEQ ID NO: 1573809 - DNA, 15 bp, Homo sapiens
cactttctttgcagt

SEQ ID NO: 1573810 - DNA, 15 bp, Homo sapiens
ccactttctttgcag

SEQ ID NO: 1573811 - DNA, 15 bp, Homo sapiens
cccactttctttgca

SEQ ID NO: 1573812 - DNA, 15 bp, Homo sapiens
tcccactttctttgc

SEQ ID NO: 1573813 - DNA, 15 bp, Homo sapiens
ctcccactttctttg

SEQ ID NO: 1573814 - DNA, 15 bp, Homo sapiens
cctcccactttcttt

SEQ ID NO: 1573815 - DNA, 15 bp, Homo sapiens
acctcccactttctt

SEQ ID NO: 1573816 - DNA, 15 bp, Homo sapiens
gacctcccactttct

SEQ ID NO: 1573817 - DNA, 15 bp, Homo sapiens
tgacctcccactttc

SEQ ID NO: 1573818 - DNA, 15 bp, Homo sapiens
ctgacctcccacttt

SEQ ID NO: 1573819 - DNA, 15 bp, Homo sapiens
cctgacctcccactt

SEQ ID NO: 1573820 - DNA, 15 bp, Homo sapiens
tcctgacctcccact

SEQ ID NO: 1573821 - DNA, 15 bp, Homo sapiens
ttcctgacctcccac

SEQ ID NO: 1573822 - DNA, 15 bp, Homo sapiens
tttcctgacctccca

SEQ ID NO: 1573823 - DNA, 15 bp, Homo sapiens
gtttcctgacctccc

SEQ ID NO: 1573824 - DNA, 15 bp, Homo sapiens
agtttcctgacctcc

SEQ ID NO: 1573825 - DNA, 15 bp, Homo sapiens
aagtttcctgacctc

SEQ ID NO: 1573826 - DNA, 15 bp, Homo sapiens
aaagtttcctgacct

SEQ ID NO: 1573827 - DNA, 15 bp, Homo sapiens
aaaagtttcctgacc

SEQ ID NO: 1573828 - DNA, 15 bp, Homo sapiens
taaaagtttcctgac

SEQ ID NO: 1573829 - DNA, 15 bp, Homo sapiens
ttaaaagtttcctga

SEQ ID NO: 1573830 - DNA, 15 bp, Homo sapiens
gttaaaagtttcctg

SEQ ID NO: 1573831 - DNA, 15 bp, Homo sapiens
agttaaaagtttcct

SEQ ID NO: 1573832 - DNA, 15 bp, Homo sapiens
cagttaaaagtttcc

SEQ ID NO: 1573833 - DNA, 15 bp, Homo sapiens
tcagttaaaagtttc

SEQ ID NO: 1573834 - DNA, 15 bp, Homo sapiens
ctcagttaaaagttt

SEQ ID NO: 1573835 - DNA, 15 bp, Homo sapiens
tctcagttaaaagtt

SEQ ID NO: 1573836 - DNA, 15 bp, Homo sapiens
ttctcagttaaaagt

SEQ ID NO: 1573837 - DNA, 15 bp, Homo sapiens
tttctcagttaaaag

SEQ ID NO: 1573838 - DNA, 15 bp, Homo sapiens
atttctcagttaaaa

SEQ ID NO: 1573839 - DNA, 15 bp, Homo sapiens
gatttctcagttaaa

SEQ ID NO: 1573840 - DNA, 15 bp, Homo sapiens
agatttctcagttaa

SEQ ID NO: 1573841 - DNA, 15 bp, Homo sapiens
gagatttctcagtta

SEQ ID NO: 1573842 - DNA, 15 bp, Homo sapiens
tgagatttctcagtt

SEQ ID NO: 1573843 - DNA, 15 bp, Homo sapiens
ttgagatttctcagt

SEQ ID NO: 1573844 - DNA, 15 bp, Homo sapiens
attgagatttctcag

SEQ ID NO: 1573845 - DNA, 15 bp, Homo sapiens
aattgagatttctca

SEQ ID NO: 1573846 - DNA, 15 bp, Homo sapiens
caattgagatttctc

SEQ ID NO: 1573847 - DNA, 15 bp, Homo sapiens
acaattgagatttct

SEQ ID NO: 1573848 - DNA, 15 bp, Homo sapiens
tacaattgagatttc

SEQ ID NO: 1573849 - DNA, 15 bp, Homo sapiens
ttacaattgagattt

SEQ ID NO: 1573850 - DNA, 15 bp, Homo sapiens
cttacaattgagatt

SEQ ID NO: 1573851 - DNA, 15 bp, Homo sapiens
tcttacaattgagat

SEQ ID NO: 1573852 - DNA, 15 bp, Homo sapiens
ctcttacaattgaga

SEQ ID NO: 1573853 - DNA, 15 bp, Homo sapiens
tctcttacaattgag

SEQ ID NO: 1573854 - DNA, 15 bp, Homo sapiens
ctctcttacaattga

SEQ ID NO: 1573855 - DNA, 15 bp, Homo sapiens
cctctcttacaattg

SEQ ID NO: 1573856 - DNA, 15 bp, Homo sapiens
tcctctcttacaatt

SEQ ID NO: 1573857 - DNA, 15 bp, Homo sapiens
atcctctcttacaat

SEQ ID NO: 1573858 - DNA, 15 bp, Homo sapiens
catcctctcttacaa

SEQ ID NO: 1573859 - DNA, 15 bp, Homo sapiens
tcatcctctcttaca

SEQ ID NO: 1573860 - DNA, 15 bp, Homo sapiens
ttcatcctctcttac

SEQ ID NO: 1573861 - DNA, 15 bp, Homo sapiens
attcatcctctctta

SEQ ID NO: 1573862 - DNA, 15 bp, Homo sapiens
aattcatcctctctt

SEQ ID NO: 1573863 - DNA, 15 bp, Homo sapiens
gaattcatcctctct

SEQ ID NO: 1573864 - DNA, 15 bp, Homo sapiens
agaattcatcctctc

SEQ ID NO: 1573865 - DNA, 15 bp, Homo sapiens
aagaattcatcctct

SEQ ID NO: 1573866 - DNA, 15 bp, Homo sapiens
caagaattcatcctc

SEQ ID NO: 1573867 - DNA, 15 bp, Homo sapiens
tcaagaattcatcct

SEQ ID NO: 1573868 - DNA, 15 bp, Homo sapiens
ttcaagaattcatcc

SEQ ID NO: 1573869 - DNA, 15 bp, Homo sapiens
attcaagaattcatc

SEQ ID NO: 1573870 - DNA, 15 bp, Homo sapiens
tattcaagaattcat

SEQ ID NO: 1573871 - DNA, 15 bp, Homo sapiens
gtattcaagaattca

SEQ ID NO: 1573872 - DNA, 15 bp, Homo sapiens
agtattcaagaattc

SEQ ID NO: 1573873 - DNA, 15 bp, Homo sapiens
cagtattcaagaatt

SEQ ID NO: 1573874 - DNA, 15 bp, Homo sapiens
gcagtattcaagaat

SEQ ID NO: 1573875 - DNA, 15 bp, Homo sapiens
agcagtattcaagaa

SEQ ID NO: 1573876 - DNA, 15 bp, Homo sapiens
tagcagtattcaaga

SEQ ID NO: 1573877 - DNA, 15 bp, Homo sapiens
gtagcagtattcaag

SEQ ID NO: 1573878 - DNA, 15 bp, Homo sapiens
agtagcagtattcaa

SEQ ID NO: 1573879 - DNA, 15 bp, Homo sapiens
tagtagcagtattca

SEQ ID NO: 1573880 - DNA, 15 bp, Homo sapiens
gtagtagcagtattc

SEQ ID NO: 1573881 - DNA, 15 bp, Homo sapiens
agtagtagcagtatt

SEQ ID NO: 1573882 - DNA, 15 bp, Homo sapiens
cagtagtagcagtat

SEQ ID NO: 1573883 - DNA, 15 bp, Homo sapiens
ccagtagtagcagta

SEQ ID NO: 1573884 - DNA, 15 bp, Homo sapiens
gccagtagtagcagt

SEQ ID NO: 1573885 - DNA, 15 bp, Homo sapiens
ggccagtagtagcag

SEQ ID NO: 1573886 - DNA, 15 bp, Homo sapiens
tggccagtagtagca

SEQ ID NO: 1573887 - DNA, 15 bp, Homo sapiens
ctggccagtagtagc

SEQ ID NO: 1573888 - DNA, 15 bp, Homo sapiens
actggccagtagtag

SEQ ID NO: 1573889 - DNA, 15 bp, Homo sapiens
cactggccagtagta

SEQ ID NO: 1573890 - DNA, 15 bp, Homo sapiens
tcactggccagtagt

SEQ ID NO: 1573891 - DNA, 15 bp, Homo sapiens
atcactggccagtag

SEQ ID NO: 1573892 - DNA, 15 bp, Homo sapiens
catcactggccagta

SEQ ID NO: 1573893 - DNA, 15 bp, Homo sapiens
tcatcactggccagt

SEQ ID NO: 1573894 - DNA, 15 bp, Homo sapiens
ttcatcactggccag

SEQ ID NO: 1573895 - DNA, 15 bp, Homo sapiens
tttcatcactggcca

SEQ ID NO: 1573896 - DNA, 15 bp, Homo sapiens
ctttcatcactggcc

SEQ ID NO: 1573897 - DNA, 15 bp, Homo sapiens
gctttcatcactggc

SEQ ID NO: 1573898 - DNA, 15 bp, Homo sapiens
ggctttcatcactgg

SEQ ID NO: 1573899 - DNA, 15 bp, Homo sapiens
tggctttcatcactg

SEQ ID NO: 1573900 - DNA, 15 bp, Homo sapiens
atggctttcatcact

SEQ ID NO: 1573901 - DNA, 15 bp, Homo sapiens
aatggctttcatcac

SEQ ID NO: 1573902 - DNA, 15 bp, Homo sapiens
aaatggctttcatca

SEQ ID NO: 1573903 - DNA, 15 bp, Homo sapiens
caaatggctttcatc

SEQ ID NO: 1573904 - DNA, 15 bp, Homo sapiens
gcaaatggctttcat

SEQ ID NO: 1573905 - DNA, 15 bp, Homo sapiens
tgcaaatggctttca

SEQ ID NO: 1573906 - DNA, 15 bp, Homo sapiens
gtgcaaatggctttc

SEQ ID NO: 1573907 - DNA, 15 bp, Homo sapiens
tgtgcaaatggcttt

SEQ ID NO: 1573908 - DNA, 15 bp, Homo sapiens
ctgtgcaaatggctt

SEQ ID NO: 1573909 - DNA, 15 bp, Homo sapiens
tctgtgcaaatggct

SEQ ID NO: 1573910 - DNA, 15 bp, Homo sapiens
ctctgtgcaaatggc

SEQ ID NO: 1573911 - DNA, 15 bp, Homo sapiens
gctctgtgcaaatgg

SEQ ID NO: 1573912 - DNA, 15 bp, Homo sapiens
agctctgtgcaaatg

SEQ ID NO: 1573913 - DNA, 15 bp, Homo sapiens
gagctctgtgcaaat

SEQ ID NO: 1573914 - DNA, 15 bp, Homo sapiens
agagctctgtgcaaa

SEQ ID NO: 1573915 - DNA, 15 bp, Homo sapiens
cagagctctgtgcaa

SEQ ID NO: 1573916 - DNA, 15 bp, Homo sapiens
gcagagctctgtgca

SEQ ID NO: 1573917 - DNA, 15 bp, Homo sapiens
ggcagagctctgtgc

SEQ ID NO: 1573918 - DNA, 15 bp, Homo sapiens
aggcagagctctgtg

SEQ ID NO: 1573919 - DNA, 15 bp, Homo sapiens
aaggcagagctctgt

SEQ ID NO: 1573920 - DNA, 15 bp, Homo sapiens
gaaggcagagctctg

SEQ ID NO: 1573921 - DNA, 15 bp, Homo sapiens
agaaggcagagctct

SEQ ID NO: 1573922 - DNA, 15 bp, Homo sapiens
cagaaggcagagctc

SEQ ID NO: 1573923 - DNA, 15 bp, Homo sapiens
acagaaggcagagct

SEQ ID NO: 1573924 - DNA, 15 bp, Homo sapiens
cacagaaggcagagc

SEQ ID NO: 1573925 - DNA, 15 bp, Homo sapiens
ccacagaaggcagag

SEQ ID NO: 1573926 - DNA, 15 bp, Homo sapiens
accacagaaggcaga

SEQ ID NO: 1573927 - DNA, 15 bp, Homo sapiens
aaccacagaaggcag

SEQ ID NO: 1573928 - DNA, 15 bp, Homo sapiens
aaaccacagaaggca

SEQ ID NO: 1573929 - DNA, 15 bp, Homo sapiens
aaaaccacagaaggc

SEQ ID NO: 1573930 - DNA, 15 bp, Homo sapiens
gaaaaccacagaagg

SEQ ID NO: 1573931 - DNA, 15 bp, Homo sapiens
ggaaaaccacagaag

SEQ ID NO: 1573932 - DNA, 15 bp, Homo sapiens
gggaaaaccacagaa

SEQ ID NO: 1573933 - DNA, 15 bp, Homo sapiens
agggaaaaccacaga

SEQ ID NO: 1573934 - DNA, 15 bp, Homo sapiens
aagggaaaaccacag

SEQ ID NO: 1573935 - DNA, 15 bp, Homo sapiens
gaagggaaaaccaca

SEQ ID NO: 1573936 - DNA, 15 bp, Homo sapiens
agaagggaaaaccac

SEQ ID NO: 1573937 - DNA, 15 bp, Homo sapiens
aagaagggaaaacca

SEQ ID NO: 1573938 - DNA, 15 bp, Homo sapiens
gaagaagggaaaacc

SEQ ID NO: 1573939 - DNA, 15 bp, Homo sapiens
tgaagaagggaaaac

SEQ ID NO: 1573940 - DNA, 15 bp, Homo sapiens
atgaagaagggaaaa

SEQ ID NO: 1573941 - DNA, 15 bp, Homo sapiens
gatgaagaagggaaa

SEQ ID NO: 1573942 - DNA, 15 bp, Homo sapiens
ggatgaagaagggaa

SEQ ID NO: 1573943 - DNA, 15 bp, Homo sapiens
aggatgaagaaggga

SEQ ID NO: 1573944 - DNA, 15 bp, Homo sapiens
taggatgaagaaggg

SEQ ID NO: 1573945 - DNA, 15 bp, Homo sapiens
gtaggatgaagaagg

SEQ ID NO: 1573946 - DNA, 15 bp, Homo sapiens
tgtaggatgaagaag

SEQ ID NO: 1573947 - DNA, 15 bp, Homo sapiens
ctgtaggatgaagaa

SEQ ID NO: 1573948 - DNA, 15 bp, Homo sapiens
tctgtaggatgaaga

SEQ ID NO: 1573949 - DNA, 15 bp, Homo sapiens
ctctgtaggatgaag

SEQ ID NO: 1573950 - DNA, 15 bp, Homo sapiens
actctgtaggatgaa

SEQ ID NO: 1573951 - DNA, 15 bp, Homo sapiens
tactctgtaggatga

SEQ ID NO: 1573952 - DNA, 15 bp, Homo sapiens
ttactctgtaggatg

SEQ ID NO: 1573953 - DNA, 15 bp, Homo sapiens
tttactctgtaggat

SEQ ID NO: 1573954 - DNA, 15 bp, Homo sapiens
ctttactctgtagga

SEQ ID NO: 1573955 - DNA, 15 bp, Homo sapiens
actttactctgtagg

SEQ ID NO: 1573956 - DNA, 15 bp, Homo sapiens
cactttactctgtag

SEQ ID NO: 1573957 - DNA, 15 bp, Homo sapiens
acactttactctgta

SEQ ID NO: 1573958 - DNA, 15 bp, Homo sapiens
aacactttactctgt

SEQ ID NO: 1573959 - DNA, 15 bp, Homo sapiens
taacactttactctg

SEQ ID NO: 1573960 - DNA, 15 bp, Homo sapiens
ctaacactttactct

SEQ ID NO: 1573961 - DNA, 15 bp, Homo sapiens
actaacactttactc

SEQ ID NO: 1573962 - DNA, 15 bp, Homo sapiens
gactaacactttact

SEQ ID NO: 1573963 - DNA, 15 bp, Homo sapiens
ggactaacactttac

SEQ ID NO: 1573964 - DNA, 15 bp, Homo sapiens
aggactaacacttta

SEQ ID NO: 1573965 - DNA, 15 bp, Homo sapiens
taggactaacacttt

SEQ ID NO: 1573966 - DNA, 15 bp, Homo sapiens
ataggactaacactt

SEQ ID NO: 1573967 - DNA, 15 bp, Homo sapiens
aataggactaacact

SEQ ID NO: 1573968 - DNA, 15 bp, Homo sapiens
aaataggactaacac

SEQ ID NO: 1573969 - DNA, 15 bp, Homo sapiens
taaataggactaaca

SEQ ID NO: 1573970 - DNA, 15 bp, Homo sapiens
ataaataggactaac

SEQ ID NO: 1573971 - DNA, 15 bp, Homo sapiens
tataaataggactaa

SEQ ID NO: 1573972 - DNA, 15 bp, Homo sapiens
gtataaataggacta

SEQ ID NO: 1573973 - DNA, 15 bp, Homo sapiens
tgtataaataggact

SEQ ID NO: 1573974 - DNA, 15 bp, Homo sapiens
atgtataaataggac

SEQ ID NO: 1573975 - DNA, 15 bp, Homo sapiens
aatgtataaatagga

SEQ ID NO: 1573976 - DNA, 15 bp, Homo sapiens
aaatgtataaatagg

SEQ ID NO: 1573977 - DNA, 15 bp, Homo sapiens
aaaatgtataaatag

SEQ ID NO: 1573978 - DNA, 15 bp, Homo sapiens
aaaaatgtataaata

SEQ ID NO: 1573979 - DNA, 15 bp, Homo sapiens
gaaaaatgtataaat

SEQ ID NO: 1573980 - DNA, 15 bp, Homo sapiens
tgaaaaatgtataaa

SEQ ID NO: 1573981 - DNA, 15 bp, Homo sapiens
ttgaaaaatgtataa

SEQ ID NO: 1573982 - DNA, 15 bp, Homo sapiens
cttgaaaaatgtata

SEQ ID NO: 1573983 - DNA, 15 bp, Homo sapiens
tcttgaaaaatgtat

SEQ ID NO: 1573984 - DNA, 15 bp, Homo sapiens
atcttgaaaaatgta

SEQ ID NO: 1573985 - DNA, 15 bp, Homo sapiens
tatcttgaaaaatgt

SEQ ID NO: 1573986 - DNA, 15 bp, Homo sapiens
gtatcttgaaaaatg

SEQ ID NO: 1573987 - DNA, 15 bp, Homo sapiens
tgtatcttgaaaaat

SEQ ID NO: 1573988 - DNA, 15 bp, Homo sapiens
ttgtatcttgaaaaa

SEQ ID NO: 1573989 - DNA, 15 bp, Homo sapiens
cttgtatcttgaaaa

SEQ ID NO: 1573990 - DNA, 15 bp, Homo sapiens
acttgtatcttgaaa

SEQ ID NO: 1573991 - DNA, 15 bp, Homo sapiens
aacttgtatcttgaa

SEQ ID NO: 1573992 - DNA, 15 bp, Homo sapiens
aaacttgtatcttga

SEQ ID NO: 1573993 - DNA, 15 bp, Homo sapiens
taaacttgtatcttg

SEQ ID NO: 1573994 - DNA, 15 bp, Homo sapiens
ataaacttgtatctt

SEQ ID NO: 1573995 - DNA, 15 bp, Homo sapiens
cataaacttgtatct

SEQ ID NO: 1573996 - DNA, 15 bp, Homo sapiens
tcataaacttgtatc

SEQ ID NO: 1573997 - DNA, 15 bp, Homo sapiens
ctcataaacttgtat

SEQ ID NO: 1573998 - DNA, 15 bp, Homo sapiens
tctcataaacttgta

SEQ ID NO: 1573999 - DNA, 15 bp, Homo sapiens
ctctcataaacttgt

SEQ ID NO: 1574000 - DNA, 15 bp, Homo sapiens
tctctcataaacttg

SEQ ID NO: 1574001 - DNA, 15 bp, Homo sapiens
ttctctcataaactt

SEQ ID NO: 1574002 - DNA, 15 bp, Homo sapiens
tttctctcataaact

SEQ ID NO: 1574003 - DNA, 15 bp, Homo sapiens
atttctctcataaac

SEQ ID NO: 1574004 - DNA, 15 bp, Homo sapiens
tatttctctcataaa

SEQ ID NO: 1574005 - DNA, 15 bp, Homo sapiens
ctatttctctcataa

SEQ ID NO: 1574006 - DNA, 15 bp, Homo sapiens
actatttctctcata

SEQ ID NO: 1574007 - DNA, 15 bp, Homo sapiens
tactatttctctcat

SEQ ID NO: 1574008 - DNA, 15 bp, Homo sapiens
atactatttctctca

SEQ ID NO: 1574009 - DNA, 15 bp, Homo sapiens
aatactatttctctc

SEQ ID NO: 1574010 - DNA, 15 bp, Homo sapiens
taatactatttctct

SEQ ID NO: 1574011 - DNA, 15 bp, Homo sapiens
ataatactatttctc

SEQ ID NO: 1574012 - DNA, 15 bp, Homo sapiens
tataatactatttct

SEQ ID NO: 1574013 - DNA, 15 bp, Homo sapiens
ttataatactatttc

SEQ ID NO: 1574014 - DNA, 15 bp, Homo sapiens
gttataatactattt

SEQ ID NO: 1574015 - DNA, 15 bp, Homo sapiens
ggttataatactatt

SEQ ID NO: 1574016 - DNA, 15 bp, Homo sapiens
gggttataatactat

SEQ ID NO: 1574017 - DNA, 15 bp, Homo sapiens
ggggttataatacta

SEQ ID NO: 1574018 - DNA, 15 bp, Homo sapiens
tggggttataatact

SEQ ID NO: 1574019 - DNA, 15 bp, Homo sapiens
ctggggttataatac

SEQ ID NO: 1574020 - DNA, 15 bp, Homo sapiens
actggggttataata

SEQ ID NO: 1574021 - DNA, 15 bp, Homo sapiens
tactggggttataat

SEQ ID NO: 1574022 - DNA, 15 bp, Homo sapiens
atactggggttataa

SEQ ID NO: 1574023 - DNA, 15 bp, Homo sapiens
catactggggttata

SEQ ID NO: 1574024 - DNA, 15 bp, Homo sapiens
acatactggggttat

SEQ ID NO: 1574025 - DNA, 15 bp, Homo sapiens
aacatactggggtta

SEQ ID NO: 1574026 - DNA, 15 bp, Homo sapiens
aaacatactggggtt

SEQ ID NO: 1574027 - DNA, 15 bp, Homo sapiens
taaacatactggggt

SEQ ID NO: 1574028 - DNA, 15 bp, Homo sapiens
ttaaacatactgggg

SEQ ID NO: 1574029 - DNA, 15 bp, Homo sapiens
attaaacatactggg

SEQ ID NO: 1574030 - DNA, 15 bp, Homo sapiens
gattaaacatactgg

SEQ ID NO: 1574031 - DNA, 15 bp, Homo sapiens
agattaaacatactg

SEQ ID NO: 1574032 - DNA, 15 bp, Homo sapiens
aagattaaacatact

SEQ ID NO: 1574033 - DNA, 15 bp, Homo sapiens
aaagattaaacatac

SEQ ID NO: 1574034 - DNA, 15 bp, Homo sapiens
aaaagattaaacata

SEQ ID NO: 1574035 - DNA, 15 bp, Homo sapiens
taaaagattaaacat

SEQ ID NO: 1574036 - DNA, 15 bp, Homo sapiens
ctaaaagattaaaca

SEQ ID NO: 1574037 - DNA, 15 bp, Homo sapiens
gctaaaagattaaac

SEQ ID NO: 1574038 - DNA, 15 bp, Homo sapiens
agctaaaagattaaa

SEQ ID NO: 1574039 - DNA, 15 bp, Homo sapiens
cagctaaaagattaa

SEQ ID NO: 1574040 - DNA, 15 bp, Homo sapiens
acagctaaaagatta

SEQ ID NO: 1574041 - DNA, 15 bp, Homo sapiens
cacagctaaaagatt

SEQ ID NO: 1574042 - DNA, 15 bp, Homo sapiens
ccacagctaaaagat

SEQ ID NO: 1574043 - DNA, 15 bp, Homo sapiens
tccacagctaaaaga

SEQ ID NO: 1574044 - DNA, 15 bp, Homo sapiens
gtccacagctaaaag

SEQ ID NO: 1574045 - DNA, 15 bp, Homo sapiens
agtccacagctaaaa

SEQ ID NO: 1574046 - DNA, 15 bp, Homo sapiens
aagtccacagctaaa

SEQ ID NO: 1574047 - DNA, 15 bp, Homo sapiens
aaagtccacagctaa

SEQ ID NO: 1574048 - DNA, 15 bp, Homo sapiens
aaaagtccacagcta

SEQ ID NO: 1574049 - DNA, 15 bp, Homo sapiens
aaaaagtccacagct

SEQ ID NO: 1574050 - DNA, 15 bp, Homo sapiens
aaaaaagtccacagc

SEQ ID NO: 1574051 - DNA, 15 bp, Homo sapiens
aaaaaaagtccacag

SEQ ID NO: 1574052 - DNA, 15 bp, Homo sapiens
aaaaaaaagtccaca

SEQ ID NO: 1574053 - DNA, 15 bp, Homo sapiens
aaaaaaaaagtccac

SEQ ID NO: 1574054 - DNA, 15 bp, Homo sapiens
taaaaaaaaagtcca

SEQ ID NO: 1574055 - DNA, 15 bp, Homo sapiens
ttaaaaaaaaagtcc

SEQ ID NO: 1574056 - DNA, 15 bp, Homo sapiens
gttaaaaaaaaagtc

SEQ ID NO: 1574057 - DNA, 15 bp, Homo sapiens
ggttaaaaaaaaagt

SEQ ID NO: 1574058 - DNA, 15 bp, Homo sapiens
cggttaaaaaaaaag

SEQ ID NO: 1574059 - DNA, 15 bp, Homo sapiens
acggttaaaaaaaaa

SEQ ID NO: 1574060 - DNA, 15 bp, Homo sapiens
tacggttaaaaaaaa

SEQ ID NO: 1574061 - DNA, 15 bp, Homo sapiens
gtacggttaaaaaaa

SEQ ID NO: 1574062 - DNA, 15 bp, Homo sapiens
tgtacggttaaaaaa

SEQ ID NO: 1574063 - DNA, 15 bp, Homo sapiens
ttgtacggttaaaaa

SEQ ID NO: 1574064 - DNA, 15 bp, Homo sapiens
tttgtacggttaaaa

SEQ ID NO: 1574065 - DNA, 15 bp, Homo sapiens
ttttgtacggttaaa

SEQ ID NO: 1574066 - DNA, 15 bp, Homo sapiens
gttttgtacggttaa

SEQ ID NO: 1574067 - DNA, 15 bp, Homo sapiens
agttttgtacggtta

SEQ ID NO: 1574068 - DNA, 15 bp, Homo sapiens
cagttttgtacggtt

SEQ ID NO: 1574069 - DNA, 15 bp, Homo sapiens
tcagttttgtacggt

SEQ ID NO: 1574070 - DNA, 15 bp, Homo sapiens
ttcagttttgtacgg

SEQ ID NO: 1574071 - DNA, 15 bp, Homo sapiens
tttcagttttgtacg

SEQ ID NO: 1574072 - DNA, 15 bp, Homo sapiens
ctttcagttttgtac

SEQ ID NO: 1574073 - DNA, 15 bp, Homo sapiens
tctttcagttttgta

SEQ ID NO: 1574074 - DNA, 15 bp, Homo sapiens
ttctttcagttttgt

SEQ ID NO: 1574075 - DNA, 15 bp, Homo sapiens
gttctttcagttttg

SEQ ID NO: 1574076 - DNA, 15 bp, Homo sapiens
ggttctttcagtttt

SEQ ID NO: 1574077 - DNA, 15 bp, Homo sapiens
tggttctttcagttt

SEQ ID NO: 1574078 - DNA, 15 bp, Homo sapiens
atggttctttcagtt

SEQ ID NO: 1574079 - DNA, 15 bp, Homo sapiens
tatggttctttcagt

SEQ ID NO: 1574080 - DNA, 15 bp, Homo sapiens
ctatggttctttcag

SEQ ID NO: 1574081 - DNA, 15 bp, Homo sapiens
tctatggttctttca

SEQ ID NO: 1574082 - DNA, 15 bp, Homo sapiens
ctctatggttctttc

SEQ ID NO: 1574083 - DNA, 15 bp, Homo sapiens
cctctatggttcttt

SEQ ID NO: 1574084 - DNA, 15 bp, Homo sapiens
acctctatggttctt

SEQ ID NO: 1574085 - DNA, 15 bp, Homo sapiens
gacctctatggttct

SEQ ID NO: 1574086 - DNA, 15 bp, Homo sapiens
tgacctctatggttc

SEQ ID NO: 1574087 - DNA, 15 bp, Homo sapiens
ttgacctctatggtt

SEQ ID NO: 1574088 - DNA, 15 bp, Homo sapiens
cttgacctctatggt

SEQ ID NO: 1574089 - DNA, 15 bp, Homo sapiens
gcttgacctctatgg

SEQ ID NO: 1574090 - DNA, 15 bp, Homo sapiens
ggcttgacctctatg

SEQ ID NO: 1574091 - DNA, 15 bp, Homo sapiens
aggcttgacctctat

SEQ ID NO: 1574092 - DNA, 15 bp, Homo sapiens
gaggcttgacctcta

SEQ ID NO: 1574093 - DNA, 15 bp, Homo sapiens
tgaggcttgacctct

SEQ ID NO: 1574094 - DNA, 15 bp, Homo sapiens
ctgaggcttgacctc

SEQ ID NO: 1574095 - DNA, 15 bp, Homo sapiens
actgaggcttgacct

SEQ ID NO: 1574096 - DNA, 15 bp, Homo sapiens
cactgaggcttgacc

SEQ ID NO: 1574097 - DNA, 15 bp, Homo sapiens
tcactgaggcttgac

SEQ ID NO: 1574098 - DNA, 15 bp, Homo sapiens
gtcactgaggcttga

SEQ ID NO: 1574099 - DNA, 15 bp, Homo sapiens
agtcactgaggcttg

SEQ ID NO: 1574100 - DNA, 15 bp, Homo sapiens
aagtcactgaggctt

SEQ ID NO: 1574101 - DNA, 15 bp, Homo sapiens
caagtcactgaggct

SEQ ID NO: 1574102 - DNA, 15 bp, Homo sapiens
tcaagtcactgaggc

SEQ ID NO: 1574103 - DNA, 15 bp, Homo sapiens
gtcaagtcactgagg

SEQ ID NO: 1574104 - DNA, 15 bp, Homo sapiens
tgtcaagtcactgag

SEQ ID NO: 1574105 - DNA, 15 bp, Homo sapiens
gtgtcaagtcactga

SEQ ID NO: 1574106 - DNA, 15 bp, Homo sapiens
ggtgtcaagtcactg

SEQ ID NO: 1574107 - DNA, 15 bp, Homo sapiens
tggtgtcaagtcact

SEQ ID NO: 1574108 - DNA, 15 bp, Homo sapiens
atggtgtcaagtcac

SEQ ID NO: 1574109 - DNA, 15 bp, Homo sapiens
tatggtgtcaagtca

SEQ ID NO: 1574110 - DNA, 15 bp, Homo sapiens
ttatggtgtcaagtc

SEQ ID NO: 1574111 - DNA, 15 bp, Homo sapiens
tttatggtgtcaagt

SEQ ID NO: 1574112 - DNA, 15 bp, Homo sapiens
ctttatggtgtcaag

SEQ ID NO: 1574113 - DNA, 15 bp, Homo sapiens
gctttatggtgtcaa

SEQ ID NO: 1574114 - DNA, 15 bp, Homo sapiens
ggctttatggtgtca

SEQ ID NO: 1574115 - DNA, 15 bp, Homo sapiens
tggctttatggtgtc

SEQ ID NO: 1574116 - DNA, 15 bp, Homo sapiens
gtggctttatggtgt

SEQ ID NO: 1574117 - DNA, 15 bp, Homo sapiens
tgtggctttatggtg

SEQ ID NO: 1574118 - DNA, 15 bp, Homo sapiens
ctgtggctttatggt

SEQ ID NO: 1574119 - DNA, 15 bp, Homo sapiens
tctgtggctttatgg

SEQ ID NO: 1574120 - DNA, 15 bp, Homo sapiens
gtctgtggctttatg

SEQ ID NO: 1574121 - DNA, 15 bp, Homo sapiens
tgtctgtggctttat

SEQ ID NO: 1574122 - DNA, 15 bp, Homo sapiens
ttgtctgtggcttta

SEQ ID NO: 1574123 - DNA, 15 bp, Homo sapiens
cttgtctgtggcttt

SEQ ID NO: 1574124 - DNA, 15 bp, Homo sapiens
ccttgtctgtggctt

SEQ ID NO: 1574125 - DNA, 15 bp, Homo sapiens
accttgtctgtggct

SEQ ID NO: 1574126 - DNA, 15 bp, Homo sapiens
taccttgtctgtggc

SEQ ID NO: 1574127 - DNA, 15 bp, Homo sapiens
gtaccttgtctgtgg

SEQ ID NO: 1574128 - DNA, 15 bp, Homo sapiens
agtaccttgtctgtg

SEQ ID NO: 1574129 - DNA, 15 bp, Homo sapiens
aagtaccttgtctgt

SEQ ID NO: 1574130 - DNA, 15 bp, Homo sapiens
caagtaccttgtctg

SEQ ID NO: 1574131 - DNA, 15 bp, Homo sapiens
ccaagtaccttgtct

SEQ ID NO: 1574132 - DNA, 15 bp, Homo sapiens
cccaagtaccttgtc

SEQ ID NO: 1574133 - DNA, 15 bp, Homo sapiens
ccccaagtaccttgt

SEQ ID NO: 1574134 - DNA, 15 bp, Homo sapiens
cccccaagtaccttg

SEQ ID NO: 1574135 - DNA, 15 bp, Homo sapiens
ccccccaagtacctt

SEQ ID NO: 1574136 - DNA, 15 bp, Homo sapiens
cccccccaagtacct

SEQ ID NO: 1574137 - DNA, 15 bp, Homo sapiens
tcccccccaagtacc

SEQ ID NO: 1574138 - DNA, 15 bp, Homo sapiens
ctcccccccaagtac

SEQ ID NO: 1574139 - DNA, 15 bp, Homo sapiens
cctcccccccaagta

SEQ ID NO: 1574140 - DNA, 15 bp, Homo sapiens
ccctcccccccaagt

SEQ ID NO: 1574141 - DNA, 15 bp, Homo sapiens
gccctcccccccaag

SEQ ID NO: 1574142 - DNA, 15 bp, Homo sapiens
tgccctcccccccaa

SEQ ID NO: 1574143 - DNA, 15 bp, Homo sapiens
ctgccctccccccca

SEQ ID NO: 1574144 - DNA, 15 bp, Homo sapiens
cctgccctccccccc

SEQ ID NO: 1574145 - DNA, 15 bp, Homo sapiens
ccctgccctcccccc

SEQ ID NO: 1574146 - DNA, 15 bp, Homo sapiens
tccctgccctccccc

SEQ ID NO: 1574147 - DNA, 15 bp, Homo sapiens
ttccctgccctcccc

SEQ ID NO: 1574148 - DNA, 15 bp, Homo sapiens
tttccctgccctccc

SEQ ID NO: 1574149 - DNA, 15 bp, Homo sapiens
atttccctgccctcc

SEQ ID NO: 1574150 - DNA, 15 bp, Homo sapiens
aatttccctgccctc

SEQ ID NO: 1574151 - DNA, 15 bp, Homo sapiens
aaatttccctgccct

SEQ ID NO: 1574152 - DNA, 15 bp, Homo sapiens
gaaatttccctgccc

SEQ ID NO: 1574153 - DNA, 15 bp, Homo sapiens
tgaaatttccctgcc

SEQ ID NO: 1574154 - DNA, 15 bp, Homo sapiens
atgaaatttccctgc

SEQ ID NO: 1574155 - DNA, 15 bp, Homo sapiens
tatgaaatttccctg

SEQ ID NO: 1574156 - DNA, 15 bp, Homo sapiens
atatgaaatttccct

SEQ ID NO: 1574157 - DNA, 15 bp, Homo sapiens
aatatgaaatttccc

SEQ ID NO: 1574158 - DNA, 15 bp, Homo sapiens
aaatatgaaatttcc

SEQ ID NO: 1574159 - DNA, 15 bp, Homo sapiens
aaaatatgaaatttc

SEQ ID NO: 1574160 - DNA, 15 bp, Homo sapiens
taaaatatgaaattt

SEQ ID NO: 1574161 - DNA, 15 bp, Homo sapiens
ataaaatatgaaatt

SEQ ID NO: 1574162 - DNA, 15 bp, Homo sapiens
tataaaatatgaaat

SEQ ID NO: 1574163 - DNA, 15 bp, Homo sapiens
ctataaaatatgaaa

SEQ ID NO: 1574164 - DNA, 15 bp, Homo sapiens
actataaaatatgaa

SEQ ID NO: 1574165 - DNA, 15 bp, Homo sapiens
cactataaaatatga

SEQ ID NO: 1574166 - DNA, 15 bp, Homo sapiens
ccactataaaatatg

SEQ ID NO: 1574167 - DNA, 15 bp, Homo sapiens
tccactataaaatat

SEQ ID NO: 1574168 - DNA, 15 bp, Homo sapiens
atccactataaaata

SEQ ID NO: 1574169 - DNA, 15 bp, Homo sapiens
aatccactataaaat

SEQ ID NO: 1574170 - DNA, 15 bp, Homo sapiens
gaatccactataaaa

SEQ ID NO: 1574171 - DNA, 15 bp, Homo sapiens
agaatccactataaa

SEQ ID NO: 1574172 - DNA, 15 bp, Homo sapiens
aagaatccactataa

SEQ ID NO: 1574173 - DNA, 15 bp, Homo sapiens
taagaatccactata

SEQ ID NO: 1574174 - DNA, 15 bp, Homo sapiens
ttaagaatccactat

SEQ ID NO: 1574175 - DNA, 15 bp, Homo sapiens
cttaagaatccacta

SEQ ID NO: 1574176 - DNA, 15 bp, Homo sapiens
tcttaagaatccact

SEQ ID NO: 1574177 - DNA, 15 bp, Homo sapiens
ttcttaagaatccac

SEQ ID NO: 1574178 - DNA, 15 bp, Homo sapiens
tttcttaagaatcca

SEQ ID NO: 1574179 - DNA, 15 bp, Homo sapiens
atttcttaagaatcc

SEQ ID NO: 1574180 - DNA, 15 bp, Homo sapiens
tatttcttaagaatc

SEQ ID NO: 1574181 - DNA, 15 bp, Homo sapiens
gtatttcttaagaat

SEQ ID NO: 1574182 - DNA, 15 bp, Homo sapiens
agtatttcttaagaa

SEQ ID NO: 1574183 - DNA, 15 bp, Homo sapiens
tagtatttcttaaga

SEQ ID NO: 1574184 - DNA, 15 bp, Homo sapiens
ttagtatttcttaag

SEQ ID NO: 1574185 - DNA, 15 bp, Homo sapiens
gttagtatttcttaa

SEQ ID NO: 1574186 - DNA, 15 bp, Homo sapiens
tgttagtatttctta

SEQ ID NO: 1574187 - DNA, 15 bp, Homo sapiens
gtgttagtatttctt

SEQ ID NO: 1574188 - DNA, 15 bp, Homo sapiens
agtgttagtatttct

SEQ ID NO: 1574189 - DNA, 15 bp, Homo sapiens
aagtgttagtatttc

SEQ ID NO: 1574190 - DNA, 15 bp, Homo sapiens
caagtgttagtattt

SEQ ID NO: 1574191 - DNA, 15 bp, Homo sapiens
tcaagtgttagtatt

SEQ ID NO: 1574192 - DNA, 15 bp, Homo sapiens
ctcaagtgttagtat

SEQ ID NO: 1574193 - DNA, 15 bp, Homo sapiens
actcaagtgttagta

SEQ ID NO: 1574194 - DNA, 15 bp, Homo sapiens
tactcaagtgttagt

SEQ ID NO: 1574195 - DNA, 15 bp, Homo sapiens
atactcaagtgttag

SEQ ID NO: 1574196 - DNA, 15 bp, Homo sapiens
aatactcaagtgtta

SEQ ID NO: 1574197 - DNA, 15 bp, Homo sapiens
taatactcaagtgtt

SEQ ID NO: 1574198 - DNA, 15 bp, Homo sapiens
ctaatactcaagtgt

SEQ ID NO: 1574199 - DNA, 15 bp, Homo sapiens
gctaatactcaagtg

SEQ ID NO: 1574200 - DNA, 15 bp, Homo sapiens
tgctaatactcaagt

SEQ ID NO: 1574201 - DNA, 15 bp, Homo sapiens
ttgctaatactcaag

SEQ ID NO: 1574202 - DNA, 15 bp, Homo sapiens
attgctaatactcaa

SEQ ID NO: 1574203 - DNA, 15 bp, Homo sapiens
tattgctaatactca

SEQ ID NO: 1574204 - DNA, 15 bp, Homo sapiens
ttattgctaatactc

SEQ ID NO: 1574205 - DNA, 15 bp, Homo sapiens
attattgctaatact

SEQ ID NO: 1574206 - DNA, 15 bp, Homo sapiens
aattattgctaatac

SEQ ID NO: 1574207 - DNA, 15 bp, Homo sapiens
taattattgctaata

SEQ ID NO: 1574208 - DNA, 15 bp, Homo sapiens
gtaattattgctaat

SEQ ID NO: 1574209 - DNA, 15 bp, Homo sapiens
tgtaattattgctaa

SEQ ID NO: 1574210 - DNA, 15 bp, Homo sapiens
ctgtaattattgcta

SEQ ID NO: 1574211 - DNA, 15 bp, Homo sapiens
cctgtaattattgct

SEQ ID NO: 1574212 - DNA, 15 bp, Homo sapiens
tcctgtaattattgc

SEQ ID NO: 1574213 - DNA, 15 bp, Homo sapiens
ttcctgtaattattg

SEQ ID NO: 1574214 - DNA, 15 bp, Homo sapiens
tttcctgtaattatt

SEQ ID NO: 1574215 - DNA, 15 bp, Homo sapiens
ttttcctgtaattat

SEQ ID NO: 1574216 - DNA, 15 bp, Homo sapiens
attttcctgtaatta

SEQ ID NO: 1574217 - DNA, 15 bp, Homo sapiens
tattttcctgtaatt

SEQ ID NO: 1574218 - DNA, 15 bp, Homo sapiens
ttattttcctgtaat

SEQ ID NO: 1574219 - DNA, 15 bp, Homo sapiens
cttattttcctgtaa

SEQ ID NO: 1574220 - DNA, 15 bp, Homo sapiens
acttattttcctgta

SEQ ID NO: 1574221 - DNA, 15 bp, Homo sapiens
cacttattttcctgt

SEQ ID NO: 1574222 - DNA, 15 bp, Homo sapiens
gcacttattttcctg

SEQ ID NO: 1574223 - DNA, 15 bp, Homo sapiens
cgcacttattttcct

SEQ ID NO: 1574224 - DNA, 15 bp, Homo sapiens
tcgcacttattttcc

SEQ ID NO: 1574225 - DNA, 15 bp, Homo sapiens
gtcgcacttattttc

SEQ ID NO: 1574226 - DNA, 15 bp, Homo sapiens
ggtcgcacttatttt

SEQ ID NO: 1574227 - DNA, 15 bp, Homo sapiens
tggtcgcacttattt

SEQ ID NO: 1574228 - DNA, 15 bp, Homo sapiens
gtggtcgcacttatt

SEQ ID NO: 1574229 - DNA, 15 bp, Homo sapiens
tgtggtcgcacttat

SEQ ID NO: 1574230 - DNA, 15 bp, Homo sapiens
atgtggtcgcactta

SEQ ID NO: 1574231 - DNA, 15 bp, Homo sapiens
tatgtggtcgcactt

SEQ ID NO: 1574232 - DNA, 15 bp, Homo sapiens
atatgtggtcgcact

SEQ ID NO: 1574233 - DNA, 15 bp, Homo sapiens
tatatgtggtcgcac

SEQ ID NO: 1574234 - DNA, 15 bp, Homo sapiens
atatatgtggtcgca

SEQ ID NO: 1574235 - DNA, 15 bp, Homo sapiens
gatatatgtggtcgc

SEQ ID NO: 1574236 - DNA, 15 bp, Homo sapiens
agatatatgtggtcg

SEQ ID NO: 1574237 - DNA, 15 bp, Homo sapiens
aagatatatgtggtc

SEQ ID NO: 1574238 - DNA, 15 bp, Homo sapiens
taagatatatgtggt

SEQ ID NO: 1574239 - DNA, 15 bp, Homo sapiens
ttaagatatatgtgg

SEQ ID NO: 1574240 - DNA, 15 bp, Homo sapiens
gttaagatatatgtg

SEQ ID NO: 1574241 - DNA, 15 bp, Homo sapiens
tgttaagatatatgt

SEQ ID NO: 1574242 - DNA, 15 bp, Homo sapiens
atgttaagatatatg

SEQ ID NO: 1574243 - DNA, 15 bp, Homo sapiens
aatgttaagatatat

SEQ ID NO: 1574244 - DNA, 15 bp, Homo sapiens
taatgttaagatata

SEQ ID NO: 1574245 - DNA, 15 bp, Homo sapiens
gtaatgttaagatat

SEQ ID NO: 1574246 - DNA, 15 bp, Homo sapiens
agtaatgttaagata

SEQ ID NO: 1574247 - DNA, 15 bp, Homo sapiens
cagtaatgttaagat

SEQ ID NO: 1574248 - DNA, 15 bp, Homo sapiens
tcagtaatgttaaga

SEQ ID NO: 1574249 - DNA, 15 bp, Homo sapiens
ttcagtaatgttaag

SEQ ID NO: 1574250 - DNA, 15 bp, Homo sapiens
attcagtaatgttaa

SEQ ID NO: 1574251 - DNA, 15 bp, Homo sapiens
aattcagtaatgtta

SEQ ID NO: 1574252 - DNA, 15 bp, Homo sapiens
taattcagtaatgtt

SEQ ID NO: 1574253 - DNA, 15 bp, Homo sapiens
ttaattcagtaatgt

SEQ ID NO: 1574254 - DNA, 15 bp, Homo sapiens
tttaattcagtaatg

SEQ ID NO: 1574255 - DNA, 15 bp, Homo sapiens
ttttaattcagtaat

SEQ ID NO: 1574256 - DNA, 15 bp, Homo sapiens
gttttaattcagtaa

SEQ ID NO: 1574257 - DNA, 15 bp, Homo sapiens
agttttaattcagta

SEQ ID NO: 1574258 - DNA, 15 bp, Homo sapiens
tagttttaattcagt

SEQ ID NO: 1574259 - DNA, 15 bp, Homo sapiens
atagttttaattcag

SEQ ID NO: 1574260 - DNA, 15 bp, Homo sapiens
catagttttaattca

SEQ ID NO: 1574261 - DNA, 15 bp, Homo sapiens
ccatagttttaattc

SEQ ID NO: 1574262 - DNA, 15 bp, Homo sapiens
gccatagttttaatt

SEQ ID NO: 1574263 - DNA, 15 bp, Homo sapiens
agccatagttttaat

SEQ ID NO: 1574264 - DNA, 15 bp, Homo sapiens
aagccatagttttaa

SEQ ID NO: 1574265 - DNA, 15 bp, Homo sapiens
gaagccatagtttta

SEQ ID NO: 1574266 - DNA, 15 bp, Homo sapiens
agaagccatagtttt

SEQ ID NO: 1574267 - DNA, 15 bp, Homo sapiens
tagaagccatagttt

SEQ ID NO: 1574268 - DNA, 15 bp, Homo sapiens
ttagaagccatagtt

SEQ ID NO: 1574269 - DNA, 15 bp, Homo sapiens
cttagaagccatagt

SEQ ID NO: 1574270 - DNA, 15 bp, Homo sapiens
acttagaagccatag

SEQ ID NO: 1574271 - DNA, 15 bp, Homo sapiens
gacttagaagccata

SEQ ID NO: 1574272 - DNA, 15 bp, Homo sapiens
ggacttagaagccat

SEQ ID NO: 1574273 - DNA, 15 bp, Homo sapiens
aggacttagaagcca

SEQ ID NO: 1574274 - DNA, 15 bp, Homo sapiens
aaggacttagaagcc

SEQ ID NO: 1574275 - DNA, 15 bp, Homo sapiens
taaggacttagaagc

SEQ ID NO: 1574276 - DNA, 15 bp, Homo sapiens
ataaggacttagaag

SEQ ID NO: 1574277 - DNA, 15 bp, Homo sapiens
gataaggacttagaa

SEQ ID NO: 1574278 - DNA, 15 bp, Homo sapiens
ggataaggacttaga

SEQ ID NO: 1574279 - DNA, 15 bp, Homo sapiens
tggataaggacttag

SEQ ID NO: 1574280 - DNA, 15 bp, Homo sapiens
ttggataaggactta

SEQ ID NO: 1574281 - DNA, 15 bp, Homo sapiens
tttggataaggactt

SEQ ID NO: 1574282 - DNA, 15 bp, Homo sapiens
gtttggataaggact

SEQ ID NO: 1574283 - DNA, 15 bp, Homo sapiens
agtttggataaggac

SEQ ID NO: 1574284 - DNA, 15 bp, Homo sapiens
gagtttggataagga

SEQ ID NO: 1574285 - DNA, 15 bp, Homo sapiens
tgagtttggataagg

SEQ ID NO: 1574286 - DNA, 15 bp, Homo sapiens
gactgagtttggata

SEQ ID NO: 1574287 - DNA, 15 bp, Homo sapiens
tgactgagtttggat

SEQ ID NO: 1574288 - DNA, 15 bp, Homo sapiens
atgactgagtttgga

SEQ ID NO: 1574289 - DNA, 15 bp, Homo sapiens
gatgactgagtttgg

SEQ ID NO: 1574290 - DNA, 15 bp, Homo sapiens
ggatgactgagtttg

SEQ ID NO: 1574291 - DNA, 15 bp, Homo sapiens
tggatgactgagttt

SEQ ID NO: 1574292 - DNA, 15 bp, Homo sapiens
ttggatgactgagtt

SEQ ID NO: 1574293 - DNA, 15 bp, Homo sapiens
tttggatgactgagt

SEQ ID NO: 1574294 - DNA, 15 bp, Homo sapiens
gtttggatgactgag

SEQ ID NO: 1574295 - DNA, 15 bp, Homo sapiens
agtttggatgactga

SEQ ID NO: 1574296 - DNA, 15 bp, Homo sapiens
tagtttggatgactg

SEQ ID NO: 1574297 - DNA, 15 bp, Homo sapiens
ctagtttggatgact

SEQ ID NO: 1574298 - DNA, 15 bp, Homo sapiens
actagtttggatgac

SEQ ID NO: 1574299 - DNA, 15 bp, Homo sapiens
aactagtttggatga

SEQ ID NO: 1574300 - DNA, 15 bp, Homo sapiens
aaactagtttggatg

SEQ ID NO: 1574301 - DNA, 15 bp, Homo sapiens
taaactagtttggat

SEQ ID NO: 1574302 - DNA, 15 bp, Homo sapiens
ataaactagtttgga

SEQ ID NO: 1574303 - DNA, 15 bp, Homo sapiens
aataaactagtttgg

SEQ ID NO: 1574304 - DNA, 15 bp, Homo sapiens
aaataaactagtttg

SEQ ID NO: 1574305 - DNA, 15 bp, Homo sapiens
aaaataaactagttt

SEQ ID NO: 1574306 - DNA, 15 bp, Homo sapiens
aaaaataaactagtt

SEQ ID NO: 1574307 - DNA, 15 bp, Homo sapiens
aaaaaataaactagt

SEQ ID NO: 1574308 - DNA, 15 bp, Homo sapiens
aaaaaaataaactag

SEQ ID NO: 1574309 - DNA, 15 bp, Homo sapiens
gaaaaaaataaacta

SEQ ID NO: 1574310 - DNA, 15 bp, Homo sapiens
agaaaaaaataaact

SEQ ID NO: 1574311 - DNA, 15 bp, Homo sapiens
gagaaaaaaataaac

SEQ ID NO: 1574312 - DNA, 15 bp, Homo sapiens
ggagaaaaaaataaa

SEQ ID NO: 1574313 - DNA, 15 bp, Homo sapiens
tggagaaaaaaataa

SEQ ID NO: 1574314 - DNA, 15 bp, Homo sapiens
ctggagaaaaaaata

SEQ ID NO: 1574315 - DNA, 15 bp, Homo sapiens
actggagaaaaaaat

SEQ ID NO: 1574316 - DNA, 15 bp, Homo sapiens
aactggagaaaaaaa

SEQ ID NO: 1574317 - DNA, 15 bp, Homo sapiens
caactggagaaaaaa

SEQ ID NO: 1574318 - DNA, 15 bp, Homo sapiens
tcaactggagaaaaa

SEQ ID NO: 1574319 - DNA, 15 bp, Homo sapiens
atcaactggagaaaa

SEQ ID NO: 1574320 - DNA, 15 bp, Homo sapiens
aatcaactggagaaa

SEQ ID NO: 1574321 - DNA, 15 bp, Homo sapiens
taatcaactggagaa

SEQ ID NO: 1574322 - DNA, 15 bp, Homo sapiens
ataatcaactggaga

SEQ ID NO: 1574323 - DNA, 15 bp, Homo sapiens
gataatcaactggag

SEQ ID NO: 1574324 - DNA, 15 bp, Homo sapiens
agataatcaactgga

SEQ ID NO: 1574325 - DNA, 15 bp, Homo sapiens
aagataatcaactgg

SEQ ID NO: 1574326 - DNA, 15 bp, Homo sapiens
aaagataatcaactg

SEQ ID NO: 1574327 - DNA, 15 bp, Homo sapiens
aaaagataatcaact

SEQ ID NO: 1574328 - DNA, 15 bp, Homo sapiens
taaaagataatcaac

SEQ ID NO: 1574329 - DNA, 15 bp, Homo sapiens
ttaaaagataatcaa

SEQ ID NO: 1574330 - DNA, 15 bp, Homo sapiens
attaaaagataatca

SEQ ID NO: 1574331 - DNA, 15 bp, Homo sapiens
aattaaaagataatc

SEQ ID NO: 1574332 - DNA, 15 bp, Homo sapiens
aaattaaaagataat

SEQ ID NO: 1574333 - DNA, 15 bp, Homo sapiens
aaaattaaaagataa

SEQ ID NO: 1574334 - DNA, 15 bp, Homo sapiens
aaaaattaaaagata

SEQ ID NO: 1574335 - DNA, 15 bp, Homo sapiens
taaaaattaaaagat

SEQ ID NO: 1574336 - DNA, 15 bp, Homo sapiens
ttaaaaattaaaaga

SEQ ID NO: 1574337 - DNA, 15 bp, Homo sapiens
attaaaaattaaaag

SEQ ID NO: 1574338 - DNA, 15 bp, Homo sapiens
caaaattaaaaatta

SEQ ID NO: 1574339 - DNA, 15 bp, Homo sapiens
gcaaaattaaaaatt

SEQ ID NO: 1574340 - DNA, 15 bp, Homo sapiens
agcaaaattaaaaat

SEQ ID NO: 1574341 - DNA, 15 bp, Homo sapiens
tagcaaaattaaaaa

SEQ ID NO: 1574342 - DNA, 15 bp, Homo sapiens
ttagcaaaattaaaa

SEQ ID NO: 1574343 - DNA, 15 bp, Homo sapiens
tttagcaaaattaaa

SEQ ID NO: 1574344 - DNA, 15 bp, Homo sapiens
ctttagcaaaattaa

SEQ ID NO: 1574345 - DNA, 15 bp, Homo sapiens
cctttagcaaaatta

SEQ ID NO: 1574346 - DNA, 15 bp, Homo sapiens
acctttagcaaaatt

SEQ ID NO: 1574347 - DNA, 15 bp, Homo sapiens
cacctttagcaaaat

SEQ ID NO: 1574348 - DNA, 15 bp, Homo sapiens
ccacctttagcaaaa

SEQ ID NO: 1574349 - DNA, 15 bp, Homo sapiens
accacctttagcaaa

SEQ ID NO: 1574350 - DNA, 15 bp, Homo sapiens
aaccacctttagcaa

SEQ ID NO: 1574351 - DNA, 15 bp, Homo sapiens
aaaccacctttagca

SEQ ID NO: 1574352 - DNA, 15 bp, Homo sapiens
aaaaccacctttagc

SEQ ID NO: 1574353 - DNA, 15 bp, Homo sapiens
aaaaaccacctttag

SEQ ID NO: 1574354 - DNA, 15 bp, Homo sapiens
aaaaaaccaccttta

SEQ ID NO: 1574355 - DNA, 15 bp, Homo sapiens
aaaaaaaccaccttt

SEQ ID NO: 1574356 - DNA, 15 bp, Homo sapiens
caaaaaaaccacctt

SEQ ID NO: 1574357 - DNA, 15 bp, Homo sapiens
acaaaaaaaccacct

SEQ ID NO: 1574358 - DNA, 15 bp, Homo sapiens
cacaaaaaaaccacc

SEQ ID NO: 1574359 - DNA, 15 bp, Homo sapiens
acacaaaaaaaccac

SEQ ID NO: 1574360 - DNA, 15 bp, Homo sapiens
aacacaaaaaaacca

SEQ ID NO: 1574361 - DNA, 15 bp, Homo sapiens
aaacacaaaaaaacc

SEQ ID NO: 1574362 - DNA, 15 bp, Homo sapiens
aaaacacaaaaaaac

SEQ ID NO: 1574363 - DNA, 15 bp, Homo sapiens
caaaacacaaaaaaa

SEQ ID NO: 1574364 - DNA, 15 bp, Homo sapiens
acaaaacacaaaaaa

SEQ ID NO: 1574365 - DNA, 15 bp, Homo sapiens
aacaaaacacaaaaa

SEQ ID NO: 1574366 - DNA, 15 bp, Homo sapiens
aaacaaaacacaaaa

SEQ ID NO: 1574367 - DNA, 15 bp, Homo sapiens
aaaacaaaacacaaa

SEQ ID NO: 1574368 - DNA, 15 bp, Homo sapiens
aaaaacaaaacacaa

SEQ ID NO: 1574369 - DNA, 15 bp, Homo sapiens
aaaaaacaaaacaca

SEQ ID NO: 1574370 - DNA, 15 bp, Homo sapiens
caaaaaacaaaacac

SEQ ID NO: 1574371 - DNA, 15 bp, Homo sapiens
acaaaaaacaaaaca

SEQ ID NO: 1574372 - DNA, 15 bp, Homo sapiens
tacaaaaaacaaaac

SEQ ID NO: 1574373 - DNA, 15 bp, Homo sapiens
ttacaaaaaacaaaa

SEQ ID NO: 1574374 - DNA, 15 bp, Homo sapiens
tttacaaaaaacaaa

SEQ ID NO: 1574375 - DNA, 15 bp, Homo sapiens
gtttacaaaaaacaa

SEQ ID NO: 1574376 - DNA, 15 bp, Homo sapiens
ggtttacaaaaaaca

SEQ ID NO: 1574377 - DNA, 15 bp, Homo sapiens
tggtttacaaaaaac

SEQ ID NO: 1574378 - DNA, 15 bp, Homo sapiens
ttggtttacaaaaaa

SEQ ID NO: 1574379 - DNA, 15 bp, Homo sapiens
tttggtttacaaaaa

SEQ ID NO: 1574380 - DNA, 15 bp, Homo sapiens
ttttggtttacaaaa

SEQ ID NO: 1574381 - DNA, 15 bp, Homo sapiens
gttttggtttacaaa

SEQ ID NO: 1574382 - DNA, 15 bp, Homo sapiens
agttttggtttacaa

SEQ ID NO: 1574383 - DNA, 15 bp, Homo sapiens
tagttttggtttaca

SEQ ID NO: 1574384 - DNA, 15 bp, Homo sapiens
atagttttggtttac

SEQ ID NO: 1574385 - DNA, 15 bp, Homo sapiens
tatagttttggttta

SEQ ID NO: 1574386 - DNA, 15 bp, Homo sapiens
gtatagttttggttt

SEQ ID NO: 1574387 - DNA, 15 bp, Homo sapiens
agtatagttttggtt

SEQ ID NO: 1574388 - DNA, 15 bp, Homo sapiens
tagtatagttttggt

SEQ ID NO: 1574389 - DNA, 15 bp, Homo sapiens
ttagtatagttttgg

SEQ ID NO: 1574390 - DNA, 15 bp, Homo sapiens
cttagtatagttttg

SEQ ID NO: 1574391 - DNA, 15 bp, Homo sapiens
acttagtatagtttt

SEQ ID NO: 1574392 - DNA, 15 bp, Homo sapiens
tacttagtatagttt

SEQ ID NO: 1574393 - DNA, 15 bp, Homo sapiens
atacttagtatagtt

SEQ ID NO: 1574394 - DNA, 15 bp, Homo sapiens
tatacttagtatagt

SEQ ID NO: 1574395 - DNA, 15 bp, Homo sapiens
ctatacttagtatag

SEQ ID NO: 1574396 - DNA, 15 bp, Homo sapiens
actatacttagtata

SEQ ID NO: 1574397 - DNA, 15 bp, Homo sapiens
tactatacttagtat

SEQ ID NO: 1574398 - DNA, 15 bp, Homo sapiens
ttactatacttagta

SEQ ID NO: 1574399 - DNA, 15 bp, Homo sapiens
attactatacttagt

SEQ ID NO: 1574400 - DNA, 15 bp, Homo sapiens
aattactatacttag

SEQ ID NO: 1574401 - DNA, 15 bp, Homo sapiens
taattactatactta

SEQ ID NO: 1574402 - DNA, 15 bp, Homo sapiens
ataattactatactt

SEQ ID NO: 1574403 - DNA, 15 bp, Homo sapiens
tataattactatact

SEQ ID NO: 1574404 - DNA, 15 bp, Homo sapiens
atataattactatac

SEQ ID NO: 1574405 - DNA, 15 bp, Homo sapiens
tatataattactata

SEQ ID NO: 1574406 - DNA, 15 bp, Homo sapiens
atatataattactat

SEQ ID NO: 1574407 - DNA, 15 bp, Homo sapiens
tatatataattacta

SEQ ID NO: 1574408 - DNA, 15 bp, Homo sapiens
atatatataattact

SEQ ID NO: 1574409 - DNA, 15 bp, Homo sapiens
tatatatataattac

SEQ ID NO: 1574410 - DNA, 15 bp, Homo sapiens
gaaaaaatatatata

SEQ ID NO: 1574411 - DNA, 15 bp, Homo sapiens
ggaaaaaatatatat

SEQ ID NO: 1574412 - DNA, 15 bp, Homo sapiens
gggaaaaaatatata

SEQ ID NO: 1574413 - DNA, 15 bp, Homo sapiens
ggggaaaaaatatat

SEQ ID NO: 1574414 - DNA, 15 bp, Homo sapiens
aggggaaaaaatata

SEQ ID NO: 1574415 - DNA, 15 bp, Homo sapiens
gaggggaaaaaatat

SEQ ID NO: 1574416 - DNA, 15 bp, Homo sapiens
ggaggggaaaaaata

SEQ ID NO: 1574417 - DNA, 15 bp, Homo sapiens
gggaggggaaaaaat

SEQ ID NO: 1574418 - DNA, 15 bp, Homo sapiens
ggggaggggaaaaaa

SEQ ID NO: 1574419 - DNA, 15 bp, Homo sapiens
gggggaggggaaaaa

SEQ ID NO: 1574420 - DNA, 15 bp, Homo sapiens
agggggaggggaaaa

SEQ ID NO: 1574421 - DNA, 15 bp, Homo sapiens
gagggggaggggaaa

SEQ ID NO: 1574422 - DNA, 15 bp, Homo sapiens
agagggggaggggaa

SEQ ID NO: 1574423 - DNA, 15 bp, Homo sapiens
aagagggggagggga

SEQ ID NO: 1574424 - DNA, 15 bp, Homo sapiens
gaagagggggagggg

SEQ ID NO: 1574425 - DNA, 15 bp, Homo sapiens
agaagagggggaggg

SEQ ID NO: 1574426 - DNA, 15 bp, Homo sapiens
aagaagagggggagg

SEQ ID NO: 1574427 - DNA, 15 bp, Homo sapiens
aaagaagagggggag

SEQ ID NO: 1574428 - DNA, 15 bp, Homo sapiens
gaaagaagaggggga

SEQ ID NO: 1574429 - DNA, 15 bp, Homo sapiens
ggaaagaagaggggg

SEQ ID NO: 1574430 - DNA, 15 bp, Homo sapiens
aggaaagaagagggg

SEQ ID NO: 1574431 - DNA, 15 bp, Homo sapiens
taggaaagaagaggg

SEQ ID NO: 1574432 - DNA, 15 bp, Homo sapiens
ttaggaaagaagagg

SEQ ID NO: 1574433 - DNA, 15 bp, Homo sapiens
tagttaggaaagaag

SEQ ID NO: 1574434 - DNA, 15 bp, Homo sapiens
ttagttaggaaagaa

SEQ ID NO: 1574435 - DNA, 15 bp, Homo sapiens
attagttaggaaaga

SEQ ID NO: 1574436 - DNA, 15 bp, Homo sapiens
aattagttaggaaag

SEQ ID NO: 1574437 - DNA, 15 bp, Homo sapiens
gaattagttaggaaa

SEQ ID NO: 1574438 - DNA, 15 bp, Homo sapiens
agaattagttaggaa

SEQ ID NO: 1574439 - DNA, 15 bp, Homo sapiens
cagaattagttagga

SEQ ID NO: 1574440 - DNA, 15 bp, Homo sapiens
tcagaattagttagg

SEQ ID NO: 1574441 - DNA, 15 bp, Homo sapiens
ctcagaattagttag

SEQ ID NO: 1574442 - DNA, 15 bp, Homo sapiens
gctcagaattagtta

SEQ ID NO: 1574443 - DNA, 15 bp, Homo sapiens
tgctcagaattagtt

SEQ ID NO: 1574444 - DNA, 15 bp, Homo sapiens
ctgctcagaattagt

SEQ ID NO: 1574445 - DNA, 15 bp, Homo sapiens
cctgctcagaattag

SEQ ID NO: 1574446 - DNA, 15 bp, Homo sapiens
ccctgctcagaatta

SEQ ID NO: 1574447 - DNA, 15 bp, Homo sapiens
accctgctcagaatt

SEQ ID NO: 1574448 - DNA, 15 bp, Homo sapiens
taccctgctcagaat

SEQ ID NO: 1574449 - DNA, 15 bp, Homo sapiens
ttaccctgctcagaa

SEQ ID NO: 1574450 - DNA, 15 bp, Homo sapiens
attaccctgctcaga

SEQ ID NO: 1574451 - DNA, 15 bp, Homo sapiens
gattaccctgctcag

SEQ ID NO: 1574452 - DNA, 15 bp, Homo sapiens
tgattaccctgctca

SEQ ID NO: 1574453 - DNA, 15 bp, Homo sapiens
ctgattaccctgctc

SEQ ID NO: 1574454 - DNA, 15 bp, Homo sapiens
actgattaccctgct

SEQ ID NO: 1574455 - DNA, 15 bp, Homo sapiens
cactgattaccctgc

SEQ ID NO: 1574456 - DNA, 15 bp, Homo sapiens
tcactgattaccctg

SEQ ID NO: 1574457 - DNA, 15 bp, Homo sapiens
ttcactgattaccct

SEQ ID NO: 1574458 - DNA, 15 bp, Homo sapiens
gttcactgattaccc

SEQ ID NO: 1574459 - DNA, 15 bp, Homo sapiens
tgttcactgattacc

SEQ ID NO: 1574460 - DNA, 15 bp, Homo sapiens
ttgttcactgattac

SEQ ID NO: 1574461 - DNA, 15 bp, Homo sapiens
tttgttcactgatta

SEQ ID NO: 1574462 - DNA, 15 bp, Homo sapiens
ctttgttcactgatt

SEQ ID NO: 1574463 - DNA, 15 bp, Homo sapiens
actttgttcactgat

SEQ ID NO: 1574464 - DNA, 15 bp, Homo sapiens
cactttgttcactga

SEQ ID NO: 1574465 - DNA, 15 bp, Homo sapiens
acactttgttcactg

SEQ ID NO: 1574466 - DNA, 15 bp, Homo sapiens
aacactttgttcact

SEQ ID NO: 1574467 - DNA, 15 bp, Homo sapiens
caacactttgttcac

SEQ ID NO: 1574468 - DNA, 15 bp, Homo sapiens
tcaacactttgttca

SEQ ID NO: 1574469 - DNA, 15 bp, Homo sapiens
ttcaacactttgttc

SEQ ID NO: 1574470 - DNA, 15 bp, Homo sapiens
tttcaacactttgtt

SEQ ID NO: 1574471 - DNA, 15 bp, Homo sapiens
ttttcaacactttgt

SEQ ID NO: 1574472 - DNA, 15 bp, Homo sapiens
attttcaacactttg

SEQ ID NO: 1574473 - DNA, 15 bp, Homo sapiens
aattttcaacacttt

SEQ ID NO: 1574474 - DNA, 15 bp, Homo sapiens
caattttcaacactt

SEQ ID NO: 1574475 - DNA, 15 bp, Homo sapiens
acaattttcaacact

SEQ ID NO: 1574476 - DNA, 15 bp, Homo sapiens
aacaattttcaacac

SEQ ID NO: 1574477 - DNA, 15 bp, Homo sapiens
gaacaattttcaaca

SEQ ID NO: 1574478 - DNA, 15 bp, Homo sapiens
ggaacaattttcaac

SEQ ID NO: 1574479 - DNA, 15 bp, Homo sapiens
gggaacaattttcaa

SEQ ID NO: 1574480 - DNA, 15 bp, Homo sapiens
tgggaacaattttca

SEQ ID NO: 1574481 - DNA, 15 bp, Homo sapiens
ctgggaacaattttc

SEQ ID NO: 1574482 - DNA, 15 bp, Homo sapiens
tctgggaacaatttt

SEQ ID NO: 1574483 - DNA, 15 bp, Homo sapiens
ttctgggaacaattt

SEQ ID NO: 1574484 - DNA, 15 bp, Homo sapiens
cttctgggaacaatt

SEQ ID NO: 1574485 - DNA, 15 bp, Homo sapiens
ccttctgggaacaat

SEQ ID NO: 1574486 - DNA, 15 bp, Homo sapiens
accttctgggaacaa

SEQ ID NO: 1574487 - DNA, 15 bp, Homo sapiens
taccttctgggaaca

SEQ ID NO: 1574488 - DNA, 15 bp, Homo sapiens
ttaccttctgggaac

SEQ ID NO: 1574489 - DNA, 15 bp, Homo sapiens
attaccttctgggaa

SEQ ID NO: 1574490 - DNA, 15 bp, Homo sapiens
aattaccttctggga

SEQ ID NO: 1574491 - DNA, 15 bp, Homo sapiens
aaattaccttctggg

SEQ ID NO: 1574492 - DNA, 15 bp, Homo sapiens
aaaattaccttctgg

SEQ ID NO: 1574493 - DNA, 15 bp, Homo sapiens
gaaaattaccttctg

SEQ ID NO: 1574494 - DNA, 15 bp, Homo sapiens
tgaaaattaccttct

SEQ ID NO: 1574495 - DNA, 15 bp, Homo sapiens
atgaaaattaccttc

SEQ ID NO: 1574496 - DNA, 15 bp, Homo sapiens
tatgaaaattacctt

SEQ ID NO: 1574497 - DNA, 15 bp, Homo sapiens
ctatgaaaattacct

SEQ ID NO: 1574498 - DNA, 15 bp, Homo sapiens
tctatgaaaattacc

SEQ ID NO: 1574499 - DNA, 15 bp, Homo sapiens
atctatgaaaattac

SEQ ID NO: 1574500 - DNA, 15 bp, Homo sapiens
catctatgaaaatta

SEQ ID NO: 1574501 - DNA, 15 bp, Homo sapiens
acatctatgaaaatt

SEQ ID NO: 1574502 - DNA, 15 bp, Homo sapiens
aacatctatgaaaat

SEQ ID NO: 1574503 - DNA, 15 bp, Homo sapiens
aaacatctatgaaaa

SEQ ID NO: 1574504 - DNA, 15 bp, Homo sapiens
caaacatctatgaaa

SEQ ID NO: 1574505 - DNA, 15 bp, Homo sapiens
gcaaacatctatgaa

SEQ ID NO: 1574506 - DNA, 15 bp, Homo sapiens
tgcaaacatctatga

SEQ ID NO: 1574507 - DNA, 15 bp, Homo sapiens
atgcaaacatctatg

SEQ ID NO: 1574508 - DNA, 15 bp, Homo sapiens
aatgcaaacatctat

SEQ ID NO: 1574509 - DNA, 15 bp, Homo sapiens
taatgcaaacatcta

SEQ ID NO: 1574510 - DNA, 15 bp, Homo sapiens
ctaatgcaaacatct

SEQ ID NO: 1574511 - DNA, 15 bp, Homo sapiens
gctaatgcaaacatc

SEQ ID NO: 1574512 - DNA, 15 bp, Homo sapiens
agctaatgcaaacat

SEQ ID NO: 1574513 - DNA, 15 bp, Homo sapiens
gagctaatgcaaaca

SEQ ID NO: 1574514 - DNA, 15 bp, Homo sapiens
ggagctaatgcaaac

SEQ ID NO: 1574515 - DNA, 15 bp, Homo sapiens
tggagctaatgcaaa

SEQ ID NO: 1574516 - DNA, 15 bp, Homo sapiens
atggagctaatgcaa

SEQ ID NO: 1574517 - DNA, 15 bp, Homo sapiens
tatggagctaatgca

SEQ ID NO: 1574518 - DNA, 15 bp, Homo sapiens
ctatggagctaatgc

SEQ ID NO: 1574519 - DNA, 15 bp, Homo sapiens
gctatggagctaatg

SEQ ID NO: 1574520 - DNA, 15 bp, Homo sapiens
tgctatggagctaat

SEQ ID NO: 1574521 - DNA, 15 bp, Homo sapiens
ttgctatggagctaa

SEQ ID NO: 1574522 - DNA, 15 bp, Homo sapiens
tttgctatggagcta

SEQ ID NO: 1574523 - DNA, 15 bp, Homo sapiens
ttttgctatggagct

SEQ ID NO: 1574524 - DNA, 15 bp, Homo sapiens
attttgctatggagc

SEQ ID NO: 1574525 - DNA, 15 bp, Homo sapiens
cattttgctatggag

SEQ ID NO: 1574526 - DNA, 15 bp, Homo sapiens
ccattttgctatgga

SEQ ID NO: 1574527 - DNA, 15 bp, Homo sapiens
tccattttgctatgg

SEQ ID NO: 1574528 - DNA, 15 bp, Homo sapiens
ttccattttgctatg

SEQ ID NO: 1574529 - DNA, 15 bp, Homo sapiens
attccattttgctat

SEQ ID NO: 1574530 - DNA, 15 bp, Homo sapiens
cattccattttgcta

SEQ ID NO: 1574531 - DNA, 15 bp, Homo sapiens
ccattccattttgct

SEQ ID NO: 1574532 - DNA, 15 bp, Homo sapiens
accattccattttgc

SEQ ID NO: 1574533 - DNA, 15 bp, Homo sapiens
taccattccattttg

SEQ ID NO: 1574534 - DNA, 15 bp, Homo sapiens
gtaccattccatttt

SEQ ID NO: 1574535 - DNA, 15 bp, Homo sapiens
cgtaccattccattt

SEQ ID NO: 1574536 - DNA, 15 bp, Homo sapiens
acgtaccattccatt

SEQ ID NO: 1574537 - DNA, 15 bp, Homo sapiens
cacgtaccattccat

SEQ ID NO: 1574538 - DNA, 15 bp, Homo sapiens
tcacgtaccattcca

SEQ ID NO: 1574539 - DNA, 15 bp, Homo sapiens
gtcacgtaccattcc

SEQ ID NO: 1574540 - DNA, 15 bp, Homo sapiens
tgtcacgtaccattc

SEQ ID NO: 1574541 - DNA, 15 bp, Homo sapiens
atgtcacgtaccatt

SEQ ID NO: 1574542 - DNA, 15 bp, Homo sapiens
aatgtcacgtaccat

SEQ ID NO: 1574543 - DNA, 15 bp, Homo sapiens
aaatgtcacgtacca

SEQ ID NO: 1574544 - DNA, 15 bp, Homo sapiens
taaatgtcacgtacc

SEQ ID NO: 1574545 - DNA, 15 bp, Homo sapiens
ctaaatgtcacgtac

SEQ ID NO: 1574546 - DNA, 15 bp, Homo sapiens
cctaaatgtcacgta

SEQ ID NO: 1574547 - DNA, 15 bp, Homo sapiens
ccctaaatgtcacgt

SEQ ID NO: 1574548 - DNA, 15 bp, Homo sapiens
accctaaatgtcacg

SEQ ID NO: 1574549 - DNA, 15 bp, Homo sapiens
taccctaaatgtcac

SEQ ID NO: 1574550 - DNA, 15 bp, Homo sapiens
ctaccctaaatgtca

SEQ ID NO: 1574551 - DNA, 15 bp, Homo sapiens
gctaccctaaatgtc

SEQ ID NO: 1574552 - DNA, 15 bp, Homo sapiens
agctaccctaaatgt

SEQ ID NO: 1574553 - DNA, 15 bp, Homo sapiens
cagctaccctaaatg

SEQ ID NO: 1574554 - DNA, 15 bp, Homo sapiens
tcagctaccctaaat

SEQ ID NO: 1574555 - DNA, 15 bp, Homo sapiens
atcagctaccctaaa

SEQ ID NO: 1574556 - DNA, 15 bp, Homo sapiens
tatcagctaccctaa

SEQ ID NO: 1574557 - DNA, 15 bp, Homo sapiens
atatcagctacccta

SEQ ID NO: 1574558 - DNA, 15 bp, Homo sapiens
aatatcagctaccct

SEQ ID NO: 1574559 - DNA, 15 bp, Homo sapiens
aaatatcagctaccc

SEQ ID NO: 1574560 - DNA, 15 bp, Homo sapiens
aaaatatcagctacc

SEQ ID NO: 1574561 - DNA, 15 bp, Homo sapiens
aaaaatatcagctac

SEQ ID NO: 1574562 - DNA, 15 bp, Homo sapiens
taaaaatatcagcta

SEQ ID NO: 1574563 - DNA, 15 bp, Homo sapiens
ataaaaatatcagct

SEQ ID NO: 1574564 - DNA, 15 bp, Homo sapiens
aataaaaatatcagc

SEQ ID NO: 1574565 - DNA, 15 bp, Homo sapiens
aaataaaaatatcag

SEQ ID NO: 1574566 - DNA, 15 bp, Homo sapiens
aaaataaaaatatca

SEQ ID NO: 1574567 - DNA, 15 bp, Homo sapiens
caaaataaaaatatc

SEQ ID NO: 1574568 - DNA, 15 bp, Homo sapiens
acaaaataaaaatat

SEQ ID NO: 1574569 - DNA, 15 bp, Homo sapiens
aacaaaataaaaata

SEQ ID NO: 1574570 - DNA, 15 bp, Homo sapiens
taacaaaataaaaat

SEQ ID NO: 1574571 - DNA, 15 bp, Homo sapiens
ttaacaaaataaaaa

SEQ ID NO: 1574572 - DNA, 15 bp, Homo sapiens
tttaacaaaataaaa

SEQ ID NO: 1574573 - DNA, 15 bp, Homo sapiens
atttaacaaaataaa

SEQ ID NO: 1574574 - DNA, 15 bp, Homo sapiens
tatttaacaaaataa

SEQ ID NO: 1574575 - DNA, 15 bp, Homo sapiens
ttatttaacaaaata

SEQ ID NO: 1574576 - DNA, 15 bp, Homo sapiens
attatttaacaaaat

SEQ ID NO: 1574577 - DNA, 15 bp, Homo sapiens
aattatttaacaaaa

SEQ ID NO: 1574578 - DNA, 15 bp, Homo sapiens
aaattatttaacaaa

SEQ ID NO: 1574579 - DNA, 15 bp, Homo sapiens
tggaaattatttaac

SEQ ID NO: 1574580 - DNA, 15 bp, Homo sapiens
ttggaaattatttaa

SEQ ID NO: 1574581 - DNA, 15 bp, Homo sapiens
cttggaaattattta

SEQ ID NO: 1574582 - DNA, 15 bp, Homo sapiens
tcttggaaattattt

SEQ ID NO: 1574583 - DNA, 15 bp, Homo sapiens
ttcttggaaattatt

SEQ ID NO: 1574584 - DNA, 15 bp, Homo sapiens
attcttggaaattat

SEQ ID NO: 1574585 - DNA, 15 bp, Homo sapiens
tattcttggaaatta

SEQ ID NO: 1574586 - DNA, 15 bp, Homo sapiens
ctattcttggaaatt

SEQ ID NO: 1574587 - DNA, 15 bp, Homo sapiens
tctattcttggaaat

SEQ ID NO: 1574588 - DNA, 15 bp, Homo sapiens
ctctattcttggaaa

SEQ ID NO: 1574589 - DNA, 15 bp, Homo sapiens
actctattcttggaa

SEQ ID NO: 1574590 - DNA, 15 bp, Homo sapiens
tactctattcttgga

SEQ ID NO: 1574591 - DNA, 15 bp, Homo sapiens
atactctattcttgg

SEQ ID NO: 1574592 - DNA, 15 bp, Homo sapiens
catactctattcttg

SEQ ID NO: 1574593 - DNA, 15 bp, Homo sapiens
ccatactctattctt

SEQ ID NO: 1574594 - DNA, 15 bp, Homo sapiens
accatactctattct

SEQ ID NO: 1574595 - DNA, 15 bp, Homo sapiens
caccatactctattc

SEQ ID NO: 1574596 - DNA, 15 bp, Homo sapiens
acaccatactctatt

SEQ ID NO: 1574597 - DNA, 15 bp, Homo sapiens
tacaccatactctat

SEQ ID NO: 1574598 - DNA, 15 bp, Homo sapiens
atacaccatactcta

SEQ ID NO: 1574599 - DNA, 15 bp, Homo sapiens
tatacaccatactct

SEQ ID NO: 1574600 - DNA, 15 bp, Homo sapiens
atatacaccatactc

SEQ ID NO: 1574601 - DNA, 15 bp, Homo sapiens
aatatacaccatact

SEQ ID NO: 1574602 - DNA, 15 bp, Homo sapiens
taatatacaccatac

SEQ ID NO: 1574603 - DNA, 15 bp, Homo sapiens
ataatatacaccata

SEQ ID NO: 1574604 - DNA, 15 bp, Homo sapiens
tataatatacaccat

SEQ ID NO: 1574605 - DNA, 15 bp, Homo sapiens
ttataatatacacca

SEQ ID NO: 1574606 - DNA, 15 bp, Homo sapiens
tttataatatacacc

SEQ ID NO: 1574607 - DNA, 15 bp, Homo sapiens
atttataatatacac

SEQ ID NO: 1574608 - DNA, 15 bp, Homo sapiens
aatttataatataca

SEQ ID NO: 1574609 - DNA, 15 bp, Homo sapiens
aaatttataatatac

SEQ ID NO: 1574610 - DNA, 15 bp, Homo sapiens
gaaatttataatata

SEQ ID NO: 1574611 - DNA, 15 bp, Homo sapiens
agaaatttataatat

SEQ ID NO: 1574612 - DNA, 15 bp, Homo sapiens
aagaaatttataata

SEQ ID NO: 1574613 - DNA, 15 bp, Homo sapiens
aaagaaatttataat

SEQ ID NO: 1574614 - DNA, 15 bp, Homo sapiens
caaagaaatttataa

SEQ ID NO: 1574615 - DNA, 15 bp, Homo sapiens
tcaaagaaatttata

SEQ ID NO: 1574616 - DNA, 15 bp, Homo sapiens
atcaaagaaatttat

SEQ ID NO: 1574617 - DNA, 15 bp, Homo sapiens
tatcaaagaaattta

SEQ ID NO: 1574618 - DNA, 15 bp, Homo sapiens
ttatcaaagaaattt

SEQ ID NO: 1574619 - DNA, 15 bp, Homo sapiens
cttatcaaagaaatt

SEQ ID NO: 1574620 - DNA, 15 bp, Homo sapiens
tcttatcaaagaaat

SEQ ID NO: 1574621 - DNA, 15 bp, Homo sapiens
atcttatcaaagaaa

SEQ ID NO: 1574622 - DNA, 15 bp, Homo sapiens
catcttatcaaagaa

SEQ ID NO: 1574623 - DNA, 15 bp, Homo sapiens
acatcttatcaaaga

SEQ ID NO: 1574624 - DNA, 15 bp, Homo sapiens
tacatcttatcaaag

SEQ ID NO: 1574625 - DNA, 15 bp, Homo sapiens
atacatcttatcaaa

SEQ ID NO: 1574626 - DNA, 15 bp, Homo sapiens
aatacatcttatcaa

SEQ ID NO: 1574627 - DNA, 15 bp, Homo sapiens
aaatacatcttatca

SEQ ID NO: 1574628 - DNA, 15 bp, Homo sapiens
aaaatacatcttatc

SEQ ID NO: 1574629 - DNA, 15 bp, Homo sapiens
caaaatacatcttat

SEQ ID NO: 1574630 - DNA, 15 bp, Homo sapiens
tcaaaatacatctta

SEQ ID NO: 1574631 - DNA, 15 bp, Homo sapiens
ttcaaaatacatctt

SEQ ID NO: 1574632 - DNA, 15 bp, Homo sapiens
attcaaaatacatct

SEQ ID NO: 1574633 - DNA, 15 bp, Homo sapiens
cattcaaaatacatc

SEQ ID NO: 1574634 - DNA, 15 bp, Homo sapiens
acattcaaaatacat

SEQ ID NO: 1574635 - DNA, 15 bp, Homo sapiens
gacattcaaaataca

SEQ ID NO: 1574636 - DNA, 15 bp, Homo sapiens
agacattcaaaatac

SEQ ID NO: 1574637 - DNA, 15 bp, Homo sapiens
aagacattcaaaata

SEQ ID NO: 1574638 - DNA, 15 bp, Homo sapiens
aaagacattcaaaat

SEQ ID NO: 1574639 - DNA, 15 bp, Homo sapiens
aaaagacattcaaaa

SEQ ID NO: 1574640 - DNA, 15 bp, Homo sapiens
taaaagacattcaaa

SEQ ID NO: 1574641 - DNA, 15 bp, Homo sapiens
ttaaaagacattcaa

SEQ ID NO: 1574642 - DNA, 15 bp, Homo sapiens
attaaaagacattca

SEQ ID NO: 1574643 - DNA, 15 bp, Homo sapiens
gattaaaagacattc

SEQ ID NO: 1574644 - DNA, 15 bp, Homo sapiens
agattaaaagacatt

SEQ ID NO: 1574645 - DNA, 15 bp, Homo sapiens
aagattaaaagacat

SEQ ID NO: 1574646 - DNA, 15 bp, Homo sapiens
gaagattaaaagaca

SEQ ID NO: 1574647 - DNA, 15 bp, Homo sapiens
ggaagattaaaagac

SEQ ID NO: 1574648 - DNA, 15 bp, Homo sapiens
aggaagattaaaaga

SEQ ID NO: 1574649 - DNA, 15 bp, Homo sapiens
gaggaagattaaaag

SEQ ID NO: 1574650 - DNA, 15 bp, Homo sapiens
ggaggaagattaaaa

SEQ ID NO: 1574651 - DNA, 15 bp, Homo sapiens
aggaggaagattaaa

SEQ ID NO: 1574652 - DNA, 15 bp, Homo sapiens
gaggaggaagattaa

SEQ ID NO: 1574653 - DNA, 15 bp, Homo sapiens
ggaggaggaagatta

SEQ ID NO: 1574654 - DNA, 15 bp, Homo sapiens
aggaggaggaagatt

SEQ ID NO: 1574655 - DNA, 15 bp, Homo sapiens
gaggaggaggaagat

SEQ ID NO: 1574656 - DNA, 15 bp, Homo sapiens
agaggaggaggaaga

SEQ ID NO: 1574657 - DNA, 15 bp, Homo sapiens
gagaggaggaggaag

SEQ ID NO: 1574658 - DNA, 15 bp, Homo sapiens
ggagaggaggaggaa

SEQ ID NO: 1574659 - DNA, 15 bp, Homo sapiens
tggagaggaggagga

SEQ ID NO: 1574660 - DNA, 15 bp, Homo sapiens
ttggagaggaggagg

SEQ ID NO: 1574661 - DNA, 15 bp, Homo sapiens
tttggagaggaggag

SEQ ID NO: 1574662 - DNA, 15 bp, Homo sapiens
ttttggagaggagga

SEQ ID NO: 1574663 - DNA, 15 bp, Homo sapiens
tttttggagaggagg

SEQ ID NO: 1574664 - DNA, 15 bp, Homo sapiens
ttttttggagaggag

SEQ ID NO: 1574665 - DNA, 15 bp, Homo sapiens
tttttttggagagga

SEQ ID NO: 1574666 - DNA, 15 bp, Homo sapiens
atttttttggagagg

SEQ ID NO: 1574667 - DNA, 15 bp, Homo sapiens
gatttttttggagag

SEQ ID NO: 1574668 - DNA, 15 bp, Homo sapiens
tgatttttttggaga

SEQ ID NO: 1574669 - DNA, 15 bp, Homo sapiens
ctgatttttttggag

SEQ ID NO: 1574670 - DNA, 15 bp, Homo sapiens
tctgatttttttgga

SEQ ID NO: 1574671 - DNA, 15 bp, Homo sapiens
ttctgatttttttgg

SEQ ID NO: 1574672 - DNA, 15 bp, Homo sapiens
tttctgatttttttg

SEQ ID NO: 1574673 - DNA, 15 bp, Homo sapiens
gtttctgattttttt

SEQ ID NO: 1574674 - DNA, 15 bp, Homo sapiens
ggtttctgatttttt

SEQ ID NO: 1574675 - DNA, 15 bp, Homo sapiens
aggtttctgattttt

SEQ ID NO: 1574676 - DNA, 15 bp, Homo sapiens
gaggtttctgatttt

SEQ ID NO: 1574677 - DNA, 15 bp, Homo sapiens
agaggtttctgattt

SEQ ID NO: 1574678 - DNA, 15 bp, Homo sapiens
aagaggtttctgatt

SEQ ID NO: 1574679 - DNA, 15 bp, Homo sapiens
aaagaggtttctgat

SEQ ID NO: 1574680 - DNA, 15 bp, Homo sapiens
taaagaggtttctga

SEQ ID NO: 1574681 - DNA, 15 bp, Homo sapiens
ttaaagaggtttctg

SEQ ID NO: 1574682 - DNA, 15 bp, Homo sapiens
cttaaagaggtttct

SEQ ID NO: 1574683 - DNA, 15 bp, Homo sapiens
tcttaaagaggtttc

SEQ ID NO: 1574684 - DNA, 15 bp, Homo sapiens
ttcttaaagaggttt

SEQ ID NO: 1574685 - DNA, 15 bp, Homo sapiens
tttcttaaagaggtt

SEQ ID NO: 1574686 - DNA, 15 bp, Homo sapiens
ttttcttaaagaggt

SEQ ID NO: 1574687 - DNA, 15 bp, Homo sapiens
gttttcttaaagagg

SEQ ID NO: 1574688 - DNA, 15 bp, Homo sapiens
tgttttcttaaagag

SEQ ID NO: 1574689 - DNA, 15 bp, Homo sapiens
atgttttcttaaaga

SEQ ID NO: 1574690 - DNA, 15 bp, Homo sapiens
catgttttcttaaag

SEQ ID NO: 1574691 - DNA, 15 bp, Homo sapiens
acatgttttcttaaa

SEQ ID NO: 1574692 - DNA, 15 bp, Homo sapiens
tacatgttttcttaa

SEQ ID NO: 1574693 - DNA, 15 bp, Homo sapiens
ctacatgttttctta

SEQ ID NO: 1574694 - DNA, 15 bp, Homo sapiens
cctacatgttttctt

SEQ ID NO: 1574695 - DNA, 15 bp, Homo sapiens
acctacatgttttct

SEQ ID NO: 1574696 - DNA, 15 bp, Homo sapiens
aacctacatgttttc

SEQ ID NO: 1574697 - DNA, 15 bp, Homo sapiens
taacctacatgtttt

SEQ ID NO: 1574698 - DNA, 15 bp, Homo sapiens
ataacctacatgttt

SEQ ID NO: 1574699 - DNA, 15 bp, Homo sapiens
tataacctacatgtt

SEQ ID NO: 1574700 - DNA, 15 bp, Homo sapiens
atataacctacatgt

SEQ ID NO: 1574701 - DNA, 15 bp, Homo sapiens
tatataacctacatg

SEQ ID NO: 1574702 - DNA, 15 bp, Homo sapiens
atatataacctacat

SEQ ID NO: 1574703 - DNA, 15 bp, Homo sapiens
catatataacctaca

SEQ ID NO: 1574704 - DNA, 15 bp, Homo sapiens
gcatatataacctac

SEQ ID NO: 1574705 - DNA, 15 bp, Homo sapiens
agcatatataaccta

SEQ ID NO: 1574706 - DNA, 15 bp, Homo sapiens
tagcatatataacct

SEQ ID NO: 1574707 - DNA, 15 bp, Homo sapiens
ctagcatatataacc

SEQ ID NO: 1574708 - DNA, 15 bp, Homo sapiens
tctagcatatataac

SEQ ID NO: 1574709 - DNA, 15 bp, Homo sapiens
ttctagcatatataa

SEQ ID NO: 1574710 - DNA, 15 bp, Homo sapiens
attctagcatatata

SEQ ID NO: 1574711 - DNA, 15 bp, Homo sapiens
aattctagcatatat

SEQ ID NO: 1574712 - DNA, 15 bp, Homo sapiens
caattctagcatata

SEQ ID NO: 1574713 - DNA, 15 bp, Homo sapiens
gcaattctagcatat

SEQ ID NO: 1574714 - DNA, 15 bp, Homo sapiens
tgcaattctagcata

SEQ ID NO: 1574715 - DNA, 15 bp, Homo sapiens
atgcaattctagcat

SEQ ID NO: 1574716 - DNA, 15 bp, Homo sapiens
aatgcaattctagca

SEQ ID NO: 1574717 - DNA, 15 bp, Homo sapiens
aaatgcaattctagc

SEQ ID NO: 1574718 - DNA, 15 bp, Homo sapiens
taaatgcaattctag

SEQ ID NO: 1574719 - DNA, 15 bp, Homo sapiens
ttaaatgcaattcta

SEQ ID NO: 1574720 - DNA, 15 bp, Homo sapiens
attaaatgcaattct

SEQ ID NO: 1574721 - DNA, 15 bp, Homo sapiens
gattaaatgcaattc

SEQ ID NO: 1574722 - DNA, 15 bp, Homo sapiens
tgattaaatgcaatt

SEQ ID NO: 1574723 - DNA, 15 bp, Homo sapiens
gtgattaaatgcaat

SEQ ID NO: 1574724 - DNA, 15 bp, Homo sapiens
agtgattaaatgcaa

SEQ ID NO: 1574725 - DNA, 15 bp, Homo sapiens
cagtgattaaatgca

SEQ ID NO: 1574726 - DNA, 15 bp, Homo sapiens
acagtgattaaatgc

SEQ ID NO: 1574727 - DNA, 15 bp, Homo sapiens
cacagtgattaaatg

SEQ ID NO: 1574728 - DNA, 15 bp, Homo sapiens
tcacagtgattaaat

SEQ ID NO: 1574729 - DNA, 15 bp, Homo sapiens
ttcacagtgattaaa

SEQ ID NO: 1574730 - DNA, 15 bp, Homo sapiens
tttcacagtgattaa

SEQ ID NO: 1574731 - DNA, 15 bp, Homo sapiens
ttttcacagtgatta

SEQ ID NO: 1574732 - DNA, 15 bp, Homo sapiens
cttttcacagtgatt

SEQ ID NO: 1574733 - DNA, 15 bp, Homo sapiens
tcttttcacagtgat

SEQ ID NO: 1574734 - DNA, 15 bp, Homo sapiens
gtcttttcacagtga

SEQ ID NO: 1574735 - DNA, 15 bp, Homo sapiens
agtcttttcacagtg

SEQ ID NO: 1574736 - DNA, 15 bp, Homo sapiens
cagtcttttcacagt

SEQ ID NO: 1574737 - DNA, 15 bp, Homo sapiens
ccagtcttttcacag

SEQ ID NO: 1574738 - DNA, 15 bp, Homo sapiens
accagtcttttcaca

SEQ ID NO: 1574739 - DNA, 15 bp, Homo sapiens
gaccagtcttttcac

SEQ ID NO: 1574740 - DNA, 15 bp, Homo sapiens
gctgaccagtctttt

SEQ ID NO: 1574741 - DNA, 15 bp, Homo sapiens
ggctgaccagtcttt

SEQ ID NO: 1574742 - DNA, 15 bp, Homo sapiens
aggctgaccagtctt

SEQ ID NO: 1574743 - DNA, 15 bp, Homo sapiens
caggctgaccagtct

SEQ ID NO: 1574744 - DNA, 15 bp, Homo sapiens
gcaggctgaccagtc

SEQ ID NO: 1574745 - DNA, 15 bp, Homo sapiens
tgcaggctgaccagt

SEQ ID NO: 1574746 - DNA, 15 bp, Homo sapiens
atgcaggctgaccag

SEQ ID NO: 1574747 - DNA, 15 bp, Homo sapiens
aatgcaggctgacca

SEQ ID NO: 1574748 - DNA, 15 bp, Homo sapiens
taatgcaggctgacc

SEQ ID NO: 1574749 - DNA, 15 bp, Homo sapiens
ctaatgcaggctgac

SEQ ID NO: 1574750 - DNA, 15 bp, Homo sapiens
actaatgcaggctga

SEQ ID NO: 1574751 - DNA, 15 bp, Homo sapiens
tactaatgcaggctg

SEQ ID NO: 1574752 - DNA, 15 bp, Homo sapiens
atactaatgcaggct

SEQ ID NO: 1574753 - DNA, 15 bp, Homo sapiens
catactaatgcaggc

SEQ ID NO: 1574754 - DNA, 15 bp, Homo sapiens
tcatactaatgcagg

SEQ ID NO: 1574755 - DNA, 15 bp, Homo sapiens
gtcatactaatgcag

SEQ ID NO: 1574756 - DNA, 15 bp, Homo sapiens
tgtcatactaatgca

SEQ ID NO: 1574757 - DNA, 15 bp, Homo sapiens
ctgtcatactaatgc

SEQ ID NO: 1574758 - DNA, 15 bp, Homo sapiens
actgtcatactaatg

SEQ ID NO: 1574759 - DNA, 15 bp, Homo sapiens
tactgtcatactaat

SEQ ID NO: 1574760 - DNA, 15 bp, Homo sapiens
ctactgtcatactaa

SEQ ID NO: 1574761 - DNA, 15 bp, Homo sapiens
cctactgtcatacta

SEQ ID NO: 1574762 - DNA, 15 bp, Homo sapiens
ccctactgtcatact

SEQ ID NO: 1574763 - DNA, 15 bp, Homo sapiens
cccctactgtcatac

SEQ ID NO: 1574764 - DNA, 15 bp, Homo sapiens
ccccctactgtcata

SEQ ID NO: 1574765 - DNA, 15 bp, Homo sapiens
cccccctactgtcat

SEQ ID NO: 1574766 - DNA, 15 bp, Homo sapiens
gcccccctactgtca

SEQ ID NO: 1574767 - DNA, 15 bp, Homo sapiens
agcccccctactgtc

SEQ ID NO: 1574768 - DNA, 15 bp, Homo sapiens
cagcccccctactgt

SEQ ID NO: 1574769 - DNA, 15 bp, Homo sapiens
acagcccccctactg

SEQ ID NO: 1574770 - DNA, 15 bp, Homo sapiens
aacagcccccctact

SEQ ID NO: 1574771 - DNA, 15 bp, Homo sapiens
taacagcccccctac

SEQ ID NO: 1574772 - DNA, 15 bp, Homo sapiens
ctaacagccccccta

SEQ ID NO: 1574773 - DNA, 15 bp, Homo sapiens
tctaacagcccccct

SEQ ID NO: 1574774 - DNA, 15 bp, Homo sapiens
ttctaacagcccccc

SEQ ID NO: 1574775 - DNA, 15 bp, Homo sapiens
attctaacagccccc

SEQ ID NO: 1574776 - DNA, 15 bp, Homo sapiens
aattctaacagcccc

SEQ ID NO: 1574777 - DNA, 15 bp, Homo sapiens
caattctaacagccc

SEQ ID NO: 1574778 - DNA, 15 bp, Homo sapiens
gcaattctaacagcc

SEQ ID NO: 1574779 - DNA, 15 bp, Homo sapiens
agcaattctaacagc

SEQ ID NO: 1574780 - DNA, 15 bp, Homo sapiens
cagcaattctaacag

SEQ ID NO: 1574781 - DNA, 15 bp, Homo sapiens
gcagcaattctaaca

SEQ ID NO: 1574782 - DNA, 15 bp, Homo sapiens
agcagcaattctaac

SEQ ID NO: 1574783 - DNA, 15 bp, Homo sapiens
tagcagcaattctaa

SEQ ID NO: 1574784 - DNA, 15 bp, Homo sapiens
atagcagcaattcta

SEQ ID NO: 1574785 - DNA, 15 bp, Homo sapiens
tatagcagcaattct

SEQ ID NO: 1574786 - DNA, 15 bp, Homo sapiens
gtatagcagcaattc

SEQ ID NO: 1574787 - DNA, 15 bp, Homo sapiens
agtatagcagcaatt

SEQ ID NO: 1574788 - DNA, 15 bp, Homo sapiens
cagtatagcagcaat

SEQ ID NO: 1574789 - DNA, 15 bp, Homo sapiens
ccagtatagcagcaa

SEQ ID NO: 1574790 - DNA, 15 bp, Homo sapiens
accagtatagcagca

SEQ ID NO: 1574791 - DNA, 15 bp, Homo sapiens
caccagtatagcagc

SEQ ID NO: 1574792 - DNA, 15 bp, Homo sapiens
ccaccagtatagcag

SEQ ID NO: 1574793 - DNA, 15 bp, Homo sapiens
accaccagtatagca

SEQ ID NO: 1574794 - DNA, 15 bp, Homo sapiens
taccaccagtatagc

SEQ ID NO: 1574795 - DNA, 15 bp, Homo sapiens
ataccaccagtatag

SEQ ID NO: 1574796 - DNA, 15 bp, Homo sapiens
cataccaccagtata

SEQ ID NO: 1574797 - DNA, 15 bp, Homo sapiens
ccataccaccagtat

SEQ ID NO: 1574798 - DNA, 15 bp, Homo sapiens
tccataccaccagta

SEQ ID NO: 1574799 - DNA, 15 bp, Homo sapiens
atccataccaccagt

SEQ ID NO: 1574800 - DNA, 15 bp, Homo sapiens
aatccataccaccag

SEQ ID NO: 1574801 - DNA, 15 bp, Homo sapiens
taatccataccacca

SEQ ID NO: 1574802 - DNA, 15 bp, Homo sapiens
ataatccataccacc

SEQ ID NO: 1574803 - DNA, 15 bp, Homo sapiens
gataatccataccac

SEQ ID NO: 1574804 - DNA, 15 bp, Homo sapiens
tgataatccatacca

SEQ ID NO: 1574805 - DNA, 15 bp, Homo sapiens
atgataatccatacc

SEQ ID NO: 1574806 - DNA, 15 bp, Homo sapiens
catgataatccatac

SEQ ID NO: 1574807 - DNA, 15 bp, Homo sapiens
ccatgataatccata

SEQ ID NO: 1574808 - DNA, 15 bp, Homo sapiens
gccatgataatccat

SEQ ID NO: 1574809 - DNA, 15 bp, Homo sapiens
tgccatgataatcca

SEQ ID NO: 1574810 - DNA, 15 bp, Homo sapiens
atgccatgataatcc

SEQ ID NO: 1574811 - DNA, 15 bp, Homo sapiens
aatgccatgataatc

SEQ ID NO: 1574812 - DNA, 15 bp, Homo sapiens
caatgccatgataat

SEQ ID NO: 1574813 - DNA, 15 bp, Homo sapiens
ccaatgccatgataa

SEQ ID NO: 1574814 - DNA, 15 bp, Homo sapiens
tccaatgccatgata

SEQ ID NO: 1574815 - DNA, 15 bp, Homo sapiens
ttccaatgccatgat

SEQ ID NO: 1574816 - DNA, 15 bp, Homo sapiens
attccaatgccatga

SEQ ID NO: 1574817 - DNA, 15 bp, Homo sapiens
aattccaatgccatg

SEQ ID NO: 1574818 - DNA, 15 bp, Homo sapiens
aaattccaatgccat

SEQ ID NO: 1574819 - DNA, 15 bp, Homo sapiens
aaaattccaatgcca

SEQ ID NO: 1574820 - DNA, 15 bp, Homo sapiens
gaaaattccaatgcc

SEQ ID NO: 1574821 - DNA, 15 bp, Homo sapiens
tgaaaattccaatgc

SEQ ID NO: 1574822 - DNA, 15 bp, Homo sapiens
atgaaaattccaatg

SEQ ID NO: 1574823 - DNA, 15 bp, Homo sapiens
tatgaaaattccaat

SEQ ID NO: 1574824 - DNA, 15 bp, Homo sapiens
ctatgaaaattccaa

SEQ ID NO: 1574825 - DNA, 15 bp, Homo sapiens
actatgaaaattcca

SEQ ID NO: 1574826 - DNA, 15 bp, Homo sapiens
tactatgaaaattcc

SEQ ID NO: 1574827 - DNA, 15 bp, Homo sapiens
ttactatgaaaattc

SEQ ID NO: 1574828 - DNA, 15 bp, Homo sapiens
attactatgaaaatt

SEQ ID NO: 1574829 - DNA, 15 bp, Homo sapiens
cattactatgaaaat

SEQ ID NO: 1574830 - DNA, 15 bp, Homo sapiens
gcattactatgaaaa

SEQ ID NO: 1574831 - DNA, 15 bp, Homo sapiens
tgcattactatgaaa

SEQ ID NO: 1574832 - DNA, 15 bp, Homo sapiens
ctgcattactatgaa

SEQ ID NO: 1574833 - DNA, 15 bp, Homo sapiens
tctgcattactatga

SEQ ID NO: 1574834 - DNA, 15 bp, Homo sapiens
atctgcattactatg

SEQ ID NO: 1574835 - DNA, 15 bp, Homo sapiens
gatctgcattactat

SEQ ID NO: 1574836 - DNA, 15 bp, Homo sapiens
ggatctgcattacta

SEQ ID NO: 1574837 - DNA, 15 bp, Homo sapiens
tggatctgcattact

SEQ ID NO: 1574838 - DNA, 15 bp, Homo sapiens
ttggatctgcattac

SEQ ID NO: 1574839 - DNA, 15 bp, Homo sapiens
attggatctgcatta

SEQ ID NO: 1574840 - DNA, 15 bp, Homo sapiens
aattggatctgcatt

SEQ ID NO: 1574841 - DNA, 15 bp, Homo sapiens
aaattggatctgcat

SEQ ID NO: 1574842 - DNA, 15 bp, Homo sapiens
gaaattggatctgca

SEQ ID NO: 1574843 - DNA, 15 bp, Homo sapiens
agaaattggatctgc

SEQ ID NO: 1574844 - DNA, 15 bp, Homo sapiens
aagaaattggatctg

SEQ ID NO: 1574845 - DNA, 15 bp, Homo sapiens
aaagaaattggatct

SEQ ID NO: 1574846 - DNA, 15 bp, Homo sapiens
caaagaaattggatc

SEQ ID NO: 1574847 - DNA, 15 bp, Homo sapiens
acaaagaaattggat

SEQ ID NO: 1574848 - DNA, 15 bp, Homo sapiens
cacaaagaaattgga

SEQ ID NO: 1574849 - DNA, 15 bp, Homo sapiens
ccacaaagaaattgg

SEQ ID NO: 1574850 - DNA, 15 bp, Homo sapiens
accacaaagaaattg

SEQ ID NO: 1574851 - DNA, 15 bp, Homo sapiens
taccacaaagaaatt

SEQ ID NO: 1574852 - DNA, 15 bp, Homo sapiens
gtaccacaaagaaat

SEQ ID NO: 1574853 - DNA, 15 bp, Homo sapiens
ggtaccacaaagaaa

SEQ ID NO: 1574854 - DNA, 15 bp, Homo sapiens
aggtaccacaaagaa

SEQ ID NO: 1574855 - DNA, 15 bp, Homo sapiens
caggtaccacaaaga

SEQ ID NO: 1574856 - DNA, 15 bp, Homo sapiens
gcaggtaccacaaag

SEQ ID NO: 1574857 - DNA, 15 bp, Homo sapiens
tgcaggtaccacaaa

SEQ ID NO: 1574858 - DNA, 15 bp, Homo sapiens
ctgcaggtaccacaa

SEQ ID NO: 1574859 - DNA, 15 bp, Homo sapiens
aaactgcaggtacca

SEQ ID NO: 1574860 - DNA, 15 bp, Homo sapiens
taaactgcaggtacc

SEQ ID NO: 1574861 - DNA, 15 bp, Homo sapiens
gtaaactgcaggtac

SEQ ID NO: 1574862 - DNA, 15 bp, Homo sapiens
tgtaaactgcaggta

SEQ ID NO: 1574863 - DNA, 15 bp, Homo sapiens
ttgtaaactgcaggt

SEQ ID NO: 1574864 - DNA, 15 bp, Homo sapiens
tttgtaaactgcagg

SEQ ID NO: 1574865 - DNA, 15 bp, Homo sapiens
ttttgtaaactgcag

SEQ ID NO: 1574866 - DNA, 15 bp, Homo sapiens
attttgtaaactgca

SEQ ID NO: 1574867 - DNA, 15 bp, Homo sapiens
tattttgtaaactgc

SEQ ID NO: 1574868 - DNA, 15 bp, Homo sapiens
ttattttgtaaactg

SEQ ID NO: 1574869 - DNA, 15 bp, Homo sapiens
attattttgtaaact

SEQ ID NO: 1574870 - DNA, 15 bp, Homo sapiens
aattattttgtaaac

SEQ ID NO: 1574871 - DNA, 15 bp, Homo sapiens
aaattattttgtaaa

SEQ ID NO: 1574872 - DNA, 15 bp, Homo sapiens
caaattattttgtaa

SEQ ID NO: 1574873 - DNA, 15 bp, Homo sapiens
tcaaattattttgta

SEQ ID NO: 1574874 - DNA, 15 bp, Homo sapiens
gtcaaattattttgt

SEQ ID NO: 1574875 - DNA, 15 bp, Homo sapiens
agtcaaattattttg

SEQ ID NO: 1574876 - DNA, 15 bp, Homo sapiens
aagtcaaattatttt

SEQ ID NO: 1574877 - DNA, 15 bp, Homo sapiens
gaagtcaaattattt

SEQ ID NO: 1574878 - DNA, 15 bp, Homo sapiens
tgaagtcaaattatt

SEQ ID NO: 1574879 - DNA, 15 bp, Homo sapiens
ctgaagtcaaattat

SEQ ID NO: 1574880 - DNA, 15 bp, Homo sapiens
actgaagtcaaatta

SEQ ID NO: 1574881 - DNA, 15 bp, Homo sapiens
cactgaagtcaaatt

SEQ ID NO: 1574882 - DNA, 15 bp, Homo sapiens
tcactgaagtcaaat

SEQ ID NO: 1574883 - DNA, 15 bp, Homo sapiens
ctcactgaagtcaaa

SEQ ID NO: 1574884 - DNA, 15 bp, Homo sapiens
gctcactgaagtcaa

SEQ ID NO: 1574885 - DNA, 15 bp, Homo sapiens
tgctcactgaagtca

SEQ ID NO: 1574886 - DNA, 15 bp, Homo sapiens
atgctcactgaagtc

SEQ ID NO: 1574887 - DNA, 15 bp, Homo sapiens
tatgctcactgaagt

SEQ ID NO: 1574888 - DNA, 15 bp, Homo sapiens
atatgctcactgaag

SEQ ID NO: 1574889 - DNA, 15 bp, Homo sapiens
aatatgctcactgaa

SEQ ID NO: 1574890 - DNA, 15 bp, Homo sapiens
caatatgctcactga

SEQ ID NO: 1574891 - DNA, 15 bp, Homo sapiens
ccaatatgctcactg

SEQ ID NO: 1574892 - DNA, 15 bp, Homo sapiens
accaatatgctcact

SEQ ID NO: 1574893 - DNA, 15 bp, Homo sapiens
taccaatatgctcac

SEQ ID NO: 1574894 - DNA, 15 bp, Homo sapiens
ataccaatatgctca

SEQ ID NO: 1574895 - DNA, 15 bp, Homo sapiens
gataccaatatgctc

SEQ ID NO: 1574896 - DNA, 15 bp, Homo sapiens
agataccaatatgct

SEQ ID NO: 1574897 - DNA, 15 bp, Homo sapiens
cagataccaatatgc

SEQ ID NO: 1574898 - DNA, 15 bp, Homo sapiens
ccagataccaatatg

SEQ ID NO: 1574899 - DNA, 15 bp, Homo sapiens
tccagataccaatat

SEQ ID NO: 1574900 - DNA, 15 bp, Homo sapiens
atccagataccaata

SEQ ID NO: 1574901 - DNA, 15 bp, Homo sapiens
catccagataccaat

SEQ ID NO: 1574902 - DNA, 15 bp, Homo sapiens
acatccagataccaa

SEQ ID NO: 1574903 - DNA, 15 bp, Homo sapiens
aacatccagatacca

SEQ ID NO: 1574904 - DNA, 15 bp, Homo sapiens
gaacatccagatacc

SEQ ID NO: 1574905 - DNA, 15 bp, Homo sapiens
ggaacatccagatac

SEQ ID NO: 1574906 - DNA, 15 bp, Homo sapiens
tggaacatccagata

SEQ ID NO: 1574907 - DNA, 15 bp, Homo sapiens
ttggaacatccagat

SEQ ID NO: 1574908 - DNA, 15 bp, Homo sapiens
attggaacatccaga

SEQ ID NO: 1574909 - DNA, 15 bp, Homo sapiens
aattggaacatccag

SEQ ID NO: 1574910 - DNA, 15 bp, Homo sapiens
aaattggaacatcca

SEQ ID NO: 1574911 - DNA, 15 bp, Homo sapiens
taaattggaacatcc

SEQ ID NO: 1574912 - DNA, 15 bp, Homo sapiens
ctaaattggaacatc

SEQ ID NO: 1574913 - DNA, 15 bp, Homo sapiens
tctaaattggaacat

SEQ ID NO: 1574914 - DNA, 15 bp, Homo sapiens
ttctaaattggaaca

SEQ ID NO: 1574915 - DNA, 15 bp, Homo sapiens
gttctaaattggaac

SEQ ID NO: 1574916 - DNA, 15 bp, Homo sapiens
agttctaaattggaa

SEQ ID NO: 1574917 - DNA, 15 bp, Homo sapiens
tagttctaaattgga

SEQ ID NO: 1574918 - DNA, 15 bp, Homo sapiens
ttagttctaaattgg

SEQ ID NO: 1574919 - DNA, 15 bp, Homo sapiens
tttagttctaaattg

SEQ ID NO: 1574920 - DNA, 15 bp, Homo sapiens
gtttagttctaaatt

SEQ ID NO: 1574921 - DNA, 15 bp, Homo sapiens
ggtttagttctaaat

SEQ ID NO: 1574922 - DNA, 15 bp, Homo sapiens
tggtttagttctaaa

SEQ ID NO: 1574923 - DNA, 15 bp, Homo sapiens
atggtttagttctaa

SEQ ID NO: 1574924 - DNA, 15 bp, Homo sapiens
tatggtttagttcta

SEQ ID NO: 1574925 - DNA, 15 bp, Homo sapiens
atatggtttagttct

SEQ ID NO: 1574926 - DNA, 15 bp, Homo sapiens
aatatggtttagttc

SEQ ID NO: 1574927 - DNA, 15 bp, Homo sapiens
aaatatggtttagtt

SEQ ID NO: 1574928 - DNA, 15 bp, Homo sapiens
taaatatggtttagt

SEQ ID NO: 1574929 - DNA, 15 bp, Homo sapiens
ataaatatggtttag

SEQ ID NO: 1574930 - DNA, 15 bp, Homo sapiens
aataaatatggttta

SEQ ID NO: 1574931 - DNA, 15 bp, Homo sapiens
taataaatatggttt

SEQ ID NO: 1574932 - DNA, 15 bp, Homo sapiens
gtaataaatatggtt

SEQ ID NO: 1574933 - DNA, 15 bp, Homo sapiens
tgtaataaatatggt

SEQ ID NO: 1574934 - DNA, 15 bp, Homo sapiens
ttgtaataaatatgg

SEQ ID NO: 1574935 - DNA, 15 bp, Homo sapiens
tttgtaataaatatg

SEQ ID NO: 1574936 - DNA, 15 bp, Homo sapiens
ttttgtaataaatat

SEQ ID NO: 1574937 - DNA, 15 bp, Homo sapiens
tttttgtaataaata

SEQ ID NO: 1574938 - DNA, 15 bp, Homo sapiens
ctttttgtaataaat

SEQ ID NO: 1574939 - DNA, 15 bp, Homo sapiens
tctttttgtaataaa

SEQ ID NO: 1574940 - DNA, 15 bp, Homo sapiens
atctttttgtaataa

SEQ ID NO: 1574941 - DNA, 15 bp, Homo sapiens
tatctttttgtaata

SEQ ID NO: 1574942 - DNA, 15 bp, Homo sapiens
atatctttttgtaat

SEQ ID NO: 1574943 - DNA, 15 bp, Homo sapiens
aatatctttttgtaa

SEQ ID NO: 1574944 - DNA, 15 bp, Homo sapiens
taatatctttttgta

SEQ ID NO: 1574945 - DNA, 15 bp, Homo sapiens
ttaatatctttttgt

SEQ ID NO: 1574946 - DNA, 15 bp, Homo sapiens
attaatatctttttg

SEQ ID NO: 1574947 - DNA, 15 bp, Homo sapiens
gattaatatcttttt

SEQ ID NO: 1574948 - DNA, 15 bp, Homo sapiens
ggattaatatctttt

SEQ ID NO: 1574949 - DNA, 15 bp, Homo sapiens
gggattaatatcttt

SEQ ID NO: 1574950 - DNA, 15 bp, Homo sapiens
agggattaatatctt

SEQ ID NO: 1574951 - DNA, 15 bp, Homo sapiens
gagggattaatatct

SEQ ID NO: 1574952 - DNA, 15 bp, Homo sapiens
agagggattaatatc

SEQ ID NO: 1574953 - DNA, 15 bp, Homo sapiens
tagagggattaatat

SEQ ID NO: 1574954 - DNA, 15 bp, Homo sapiens
gtagagggattaata

SEQ ID NO: 1574955 - DNA, 15 bp, Homo sapiens
agtagagggattaat

SEQ ID NO: 1574956 - DNA, 15 bp, Homo sapiens
gagtagagggattaa

SEQ ID NO: 1574957 - DNA, 15 bp, Homo sapiens
ggagtagagggatta

SEQ ID NO: 1574958 - DNA, 15 bp, Homo sapiens
gggagtagagggatt

SEQ ID NO: 1574959 - DNA, 15 bp, Homo sapiens
tgggagtagagggat

SEQ ID NO: 1574960 - DNA, 15 bp, Homo sapiens
ctgggagtagaggga

SEQ ID NO: 1574961 - DNA, 15 bp, Homo sapiens
cctgggagtagaggg

SEQ ID NO: 1574962 - DNA, 15 bp, Homo sapiens
acctgggagtagagg

SEQ ID NO: 1574963 - DNA, 15 bp, Homo sapiens
aacctgggagtagag

SEQ ID NO: 1574964 - DNA, 15 bp, Homo sapiens
gaacctgggagtaga

SEQ ID NO: 1574965 - DNA, 15 bp, Homo sapiens
ggaacctgggagtag

SEQ ID NO: 1574966 - DNA, 15 bp, Homo sapiens
gggaacctgggagta

SEQ ID NO: 1574967 - DNA, 15 bp, Homo sapiens
agggaacctgggagt

SEQ ID NO: 1574968 - DNA, 15 bp, Homo sapiens
aagggaacctgggag

SEQ ID NO: 1574969 - DNA, 15 bp, Homo sapiens
aaagggaacctggga

SEQ ID NO: 1574970 - DNA, 15 bp, Homo sapiens
taaagggaacctggg

SEQ ID NO: 1574971 - DNA, 15 bp, Homo sapiens
ataaagggaacctgg

SEQ ID NO: 1574972 - DNA, 15 bp, Homo sapiens
tataaagggaacctg

SEQ ID NO: 1574973 - DNA, 15 bp, Homo sapiens
atataaagggaacct

SEQ ID NO: 1574974 - DNA, 15 bp, Homo sapiens
catataaagggaacc

SEQ ID NO: 1574975 - DNA, 15 bp, Homo sapiens
acatataaagggaac

SEQ ID NO: 1574976 - DNA, 15 bp, Homo sapiens
aacatataaagggaa

SEQ ID NO: 1574977 - DNA, 15 bp, Homo sapiens
taacatataaaggga

SEQ ID NO: 1574978 - DNA, 15 bp, Homo sapiens
ttaacatataaaggg

SEQ ID NO: 1574979 - DNA, 15 bp, Homo sapiens
cttaacatataaagg

SEQ ID NO: 1574980 - DNA, 15 bp, Homo sapiens
tcttaacatataaag

SEQ ID NO: 1574981 - DNA, 15 bp, Homo sapiens
atcttaacatataaa

SEQ ID NO: 1574982 - DNA, 15 bp, Homo sapiens
tatcttaacatataa

SEQ ID NO: 1574983 - DNA, 15 bp, Homo sapiens
atatcttaacatata

SEQ ID NO: 1574984 - DNA, 15 bp, Homo sapiens
tatatcttaacatat

SEQ ID NO: 1574985 - DNA, 15 bp, Homo sapiens
ttatatcttaacata

SEQ ID NO: 1574986 - DNA, 15 bp, Homo sapiens
attatatcttaacat

SEQ ID NO: 1574987 - DNA, 15 bp, Homo sapiens
cattatatcttaaca

SEQ ID NO: 1574988 - DNA, 15 bp, Homo sapiens
ccattatatcttaac

SEQ ID NO: 1574989 - DNA, 15 bp, Homo sapiens
gccattatatcttaa

SEQ ID NO: 1574990 - DNA, 15 bp, Homo sapiens
agccattatatctta

SEQ ID NO: 1574991 - DNA, 15 bp, Homo sapiens
aagccattatatctt

SEQ ID NO: 1574992 - DNA, 15 bp, Homo sapiens
aaagccattatatct

SEQ ID NO: 1574993 - DNA, 15 bp, Homo sapiens
caaagccattatatc

SEQ ID NO: 1574994 - DNA, 15 bp, Homo sapiens
tcaaagccattatat

SEQ ID NO: 1574995 - DNA, 15 bp, Homo sapiens
ctcaaagccattata

SEQ ID NO: 1574996 - DNA, 15 bp, Homo sapiens
cctcaaagccattat

SEQ ID NO: 1574997 - DNA, 15 bp, Homo sapiens
ccctcaaagccatta

SEQ ID NO: 1574998 - DNA, 15 bp, Homo sapiens
ccccctcaaagccat

SEQ ID NO: 1574999 - DNA, 15 bp, Homo sapiens
cccccctcaaagcca

SEQ ID NO: 1575000 - DNA, 15 bp, Homo sapiens
tcccccctcaaagcc

SEQ ID NO: 1575001 - DNA, 15 bp, Homo sapiens
ttcccccctcaaagc

SEQ ID NO: 1575002 - DNA, 15 bp, Homo sapiens
tttcccccctcaaag

SEQ ID NO: 1575003 - DNA, 15 bp, Homo sapiens
ttttcccccctcaaa

SEQ ID NO: 1575004 - DNA, 15 bp, Homo sapiens
tttttcccccctcaa

SEQ ID NO: 1575005 - DNA, 15 bp, Homo sapiens
ttttttcccccctca

SEQ ID NO: 1575006 - DNA, 15 bp, Homo sapiens
attttttcccccctc

SEQ ID NO: 1575007 - DNA, 15 bp, Homo sapiens
tattttttcccccct

SEQ ID NO: 1575008 - DNA, 15 bp, Homo sapiens
ttattttttcccccc

SEQ ID NO: 1575009 - DNA, 15 bp, Homo sapiens
tttattttttccccc

SEQ ID NO: 1575010 - DNA, 15 bp, Homo sapiens
gtttattttttcccc

SEQ ID NO: 1575011 - DNA, 15 bp, Homo sapiens
aggtttattttttcc

SEQ ID NO: 1575012 - DNA, 15 bp, Homo sapiens
taggtttattttttc

SEQ ID NO: 1575013 - DNA, 15 bp, Homo sapiens
ctaggtttatttttt

SEQ ID NO: 1575014 - DNA, 15 bp, Homo sapiens
cctaggtttattttt

SEQ ID NO: 1575015 - DNA, 15 bp, Homo sapiens
ccctaggtttatttt

SEQ ID NO: 1575016 - DNA, 15 bp, Homo sapiens
cccctaggtttattt

SEQ ID NO: 1575017 - DNA, 15 bp, Homo sapiens
tcccctaggtttatt

SEQ ID NO: 1575018 - DNA, 15 bp, Homo sapiens
ctcccctaggtttat

SEQ ID NO: 1575019 - DNA, 15 bp, Homo sapiens
tctcccctaggttta

SEQ ID NO: 1575020 - DNA, 15 bp, Homo sapiens
ctctcccctaggttt

SEQ ID NO: 1575021 - DNA, 15 bp, Homo sapiens
cctctcccctaggtt

SEQ ID NO: 1575022 - DNA, 15 bp, Homo sapiens
ccctctcccctaggt

SEQ ID NO: 1575023 - DNA, 15 bp, Homo sapiens
cccctctcccctagg

SEQ ID NO: 1575024 - DNA, 15 bp, Homo sapiens
tcccctctcccctag

SEQ ID NO: 1575025 - DNA, 15 bp, Homo sapiens
ctcccctctccccta

SEQ ID NO: 1575026 - DNA, 15 bp, Homo sapiens
actcccctctcccct

SEQ ID NO: 1575027 - DNA, 15 bp, Homo sapiens
aactcccctctcccc

SEQ ID NO: 1575028 - DNA, 15 bp, Homo sapiens
aaactcccctctccc

SEQ ID NO: 1575029 - DNA, 15 bp, Homo sapiens
gaaactcccctctcc

SEQ ID NO: 1575030 - DNA, 15 bp, Homo sapiens
ggaaactcccctctc

SEQ ID NO: 1575031 - DNA, 15 bp, Homo sapiens
aggaaactcccctct

SEQ ID NO: 1575032 - DNA, 15 bp, Homo sapiens
caggaaactcccctc

SEQ ID NO: 1575033 - DNA, 15 bp, Homo sapiens
acaggaaactcccct

SEQ ID NO: 1575034 - DNA, 15 bp, Homo sapiens
tacaggaaactcccc

SEQ ID NO: 1575035 - DNA, 15 bp, Homo sapiens
ctacaggaaactccc

SEQ ID NO: 1575036 - DNA, 15 bp, Homo sapiens
actacaggaaactcc

SEQ ID NO: 1575037 - DNA, 15 bp, Homo sapiens
cactacaggaaactc

SEQ ID NO: 1575038 - DNA, 15 bp, Homo sapiens
gcactacaggaaact

SEQ ID NO: 1575039 - DNA, 15 bp, Homo sapiens
agcactacaggaaac

SEQ ID NO: 1575040 - DNA, 15 bp, Homo sapiens
cagcactacaggaaa

SEQ ID NO: 1575041 - DNA, 15 bp, Homo sapiens
acagcactacaggaa

SEQ ID NO: 1575042 - DNA, 15 bp, Homo sapiens
aacagcactacagga

SEQ ID NO: 1575043 - DNA, 15 bp, Homo sapiens
aaacagcactacagg

SEQ ID NO: 1575044 - DNA, 15 bp, Homo sapiens
gaaacagcactacag

SEQ ID NO: 1575045 - DNA, 15 bp, Homo sapiens
tgaaacagcactaca

SEQ ID NO: 1575046 - DNA, 15 bp, Homo sapiens
atgaaacagcactac

SEQ ID NO: 1575047 - DNA, 15 bp, Homo sapiens
aatgaaacagcacta

SEQ ID NO: 1575048 - DNA, 15 bp, Homo sapiens
taatgaaacagcact

SEQ ID NO: 1575049 - DNA, 15 bp, Homo sapiens
ctaatgaaacagcac

SEQ ID NO: 1575050 - DNA, 15 bp, Homo sapiens
tctaatgaaacagca

SEQ ID NO: 1575051 - DNA, 15 bp, Homo sapiens
ctctaatgaaacagc

SEQ ID NO: 1575052 - DNA, 15 bp, Homo sapiens
cctctaatgaaacag

SEQ ID NO: 1575053 - DNA, 15 bp, Homo sapiens
tcctctaatgaaaca

SEQ ID NO: 1575054 - DNA, 15 bp, Homo sapiens
atcctctaatgaaac

SEQ ID NO: 1575055 - DNA, 15 bp, Homo sapiens
aatcctctaatgaaa

SEQ ID NO: 1575056 - DNA, 15 bp, Homo sapiens
aaatcctctaatgaa

SEQ ID NO: 1575057 - DNA, 15 bp, Homo sapiens
gaaatcctctaatga

SEQ ID NO: 1575058 - DNA, 15 bp, Homo sapiens
tgaaatcctctaatg

SEQ ID NO: 1575059 - DNA, 15 bp, Homo sapiens
ctgaaatcctctaat

SEQ ID NO: 1575060 - DNA, 15 bp, Homo sapiens
actgaaatcctctaa

SEQ ID NO: 1575061 - DNA, 15 bp, Homo sapiens
tactgaaatcctcta

SEQ ID NO: 1575062 - DNA, 15 bp, Homo sapiens
ttactgaaatcctct

SEQ ID NO: 1575063 - DNA, 15 bp, Homo sapiens
tttactgaaatcctc

SEQ ID NO: 1575064 - DNA, 15 bp, Homo sapiens
atttactgaaatcct

SEQ ID NO: 1575065 - DNA, 15 bp, Homo sapiens
aatttactgaaatcc

SEQ ID NO: 1575066 - DNA, 15 bp, Homo sapiens
taatttactgaaatc

SEQ ID NO: 1575067 - DNA, 15 bp, Homo sapiens
ttaatttactgaaat

SEQ ID NO: 1575068 - DNA, 15 bp, Homo sapiens
tttaatttactgaaa

SEQ ID NO: 1575069 - DNA, 15 bp, Homo sapiens
atttaatttactgaa

SEQ ID NO: 1575070 - DNA, 15 bp, Homo sapiens
aatttaatttactga

SEQ ID NO: 1575071 - DNA, 15 bp, Homo sapiens
gaatttaatttactg

SEQ ID NO: 1575072 - DNA, 15 bp, Homo sapiens
ggaatttaatttact

SEQ ID NO: 1575073 - DNA, 15 bp, Homo sapiens
tggaatttaatttac

SEQ ID NO: 1575074 - DNA, 15 bp, Homo sapiens
gtggaatttaattta

SEQ ID NO: 1575075 - DNA, 15 bp, Homo sapiens
tgtggaatttaattt

SEQ ID NO: 1575076 - DNA, 15 bp, Homo sapiens
gctgtggaatttaat

SEQ ID NO: 1575077 - DNA, 15 bp, Homo sapiens
agctgtggaatttaa

SEQ ID NO: 1575078 - DNA, 15 bp, Homo sapiens
tagctgtggaattta

SEQ ID NO: 1575079 - DNA, 15 bp, Homo sapiens
ttagctgtggaattt

SEQ ID NO: 1575080 - DNA, 15 bp, Homo sapiens
attagctgtggaatt

SEQ ID NO: 1575081 - DNA, 15 bp, Homo sapiens
aattagctgtggaat

SEQ ID NO: 1575082 - DNA, 15 bp, Homo sapiens
gaattagctgtggaa

SEQ ID NO: 1575083 - DNA, 15 bp, Homo sapiens
tgaattagctgtgga

SEQ ID NO: 1575084 - DNA, 15 bp, Homo sapiens
ttgaattagctgtgg

SEQ ID NO: 1575085 - DNA, 15 bp, Homo sapiens
attgaattagctgtg

SEQ ID NO: 1575086 - DNA, 15 bp, Homo sapiens
tattgaattagctgt

SEQ ID NO: 1575087 - DNA, 15 bp, Homo sapiens
ttattgaattagctg

SEQ ID NO: 1575088 - DNA, 15 bp, Homo sapiens
tttattgaattagct

SEQ ID NO: 1575089 - DNA, 15 bp, Homo sapiens
atttattgaattagc

SEQ ID NO: 1575090 - DNA, 15 bp, Homo sapiens
tatttattgaattag

SEQ ID NO: 1575091 - DNA, 15 bp, Homo sapiens
ttatttattgaatta

SEQ ID NO: 1575092 - DNA, 15 bp, Homo sapiens
attatttattgaatt

SEQ ID NO: 1575093 - DNA, 15 bp, Homo sapiens
cattatttattgaat

SEQ ID NO: 1575094 - DNA, 15 bp, Homo sapiens
ccattatttattgaa

SEQ ID NO: 1575095 - DNA, 15 bp, Homo sapiens
accattatttattga

SEQ ID NO: 1575096 - DNA, 15 bp, Homo sapiens
taccattatttattg

SEQ ID NO: 1575097 - DNA, 15 bp, Homo sapiens
gtaccattatttatt

SEQ ID NO: 1575098 - DNA, 15 bp, Homo sapiens
tgtaccattatttat

SEQ ID NO: 1575099 - DNA, 15 bp, Homo sapiens
atgtaccattattta

SEQ ID NO: 1575100 - DNA, 15 bp, Homo sapiens
aatgtaccattattt

SEQ ID NO: 1575101 - DNA, 15 bp, Homo sapiens
aaatgtaccattatt

SEQ ID NO: 1575102 - DNA, 15 bp, Homo sapiens
taaatgtaccattat

SEQ ID NO: 1575103 - DNA, 15 bp, Homo sapiens
ttaaatgtaccatta

SEQ ID NO: 1575104 - DNA, 15 bp, Homo sapiens
cttaaatgtaccatt

SEQ ID NO: 1575105 - DNA, 15 bp, Homo sapiens
acttaaatgtaccat

SEQ ID NO: 1575106 - DNA, 15 bp, Homo sapiens
cacttaaatgtacca

SEQ ID NO: 1575107 - DNA, 15 bp, Homo sapiens
acacttaaatgtacc

SEQ ID NO: 1575108 - DNA, 15 bp, Homo sapiens
aacacttaaatgtac

SEQ ID NO: 1575109 - DNA, 15 bp, Homo sapiens
gaacacttaaatgta

SEQ ID NO: 1575110 - DNA, 15 bp, Homo sapiens
agaacacttaaatgt

SEQ ID NO: 1575111 - DNA, 15 bp, Homo sapiens
cagaacacttaaatg

SEQ ID NO: 1575112 - DNA, 15 bp, Homo sapiens
tcagaacacttaaat

SEQ ID NO: 1575113 - DNA, 15 bp, Homo sapiens
atcagaacacttaaa

SEQ ID NO: 1575114 - DNA, 15 bp, Homo sapiens
aatcagaacacttaa

SEQ ID NO: 1575115 - DNA, 15 bp, Homo sapiens
aaatcagaacactta

SEQ ID NO: 1575116 - DNA, 15 bp, Homo sapiens
aaaatcagaacactt

SEQ ID NO: 1575117 - DNA, 15 bp, Homo sapiens
taaaatcagaacact

SEQ ID NO: 1575118 - DNA, 15 bp, Homo sapiens
ttaaaatcagaacac

SEQ ID NO: 1575119 - DNA, 15 bp, Homo sapiens
attaaaatcagaaca

SEQ ID NO: 1575120 - DNA, 15 bp, Homo sapiens
tattaaaatcagaac

SEQ ID NO: 1575121 - DNA, 15 bp, Homo sapiens
ttattaaaatcagaa

SEQ ID NO: 1575122 - DNA, 15 bp, Homo sapiens
attattaaaatcaga

SEQ ID NO: 1575123 - DNA, 15 bp, Homo sapiens
tattattaaaatcag

SEQ ID NO: 1575124 - DNA, 15 bp, Homo sapiens
atattattaaaatca

SEQ ID NO: 1575125 - DNA, 15 bp, Homo sapiens
tatattattaaaatc

SEQ ID NO: 1575126 - DNA, 15 bp, Homo sapiens
atatattattaaaat

SEQ ID NO: 1575127 - DNA, 15 bp, Homo sapiens
aatatattattaaaa

SEQ ID NO: 1575128 - DNA, 15 bp, Homo sapiens
aaatatattattaaa

SEQ ID NO: 1575129 - DNA, 15 bp, Homo sapiens
gaaatatattattaa

SEQ ID NO: 1575130 - DNA, 15 bp, Homo sapiens
tgaaatatattatta

SEQ ID NO: 1575131 - DNA, 15 bp, Homo sapiens
gtgaaatatattatt

SEQ ID NO: 1575132 - DNA, 15 bp, Homo sapiens
tgtgaaatatattat

SEQ ID NO: 1575133 - DNA, 15 bp, Homo sapiens
atgtgaaatatatta

SEQ ID NO: 1575134 - DNA, 15 bp, Homo sapiens
aatgtgaaatatatt

SEQ ID NO: 1575135 - DNA, 15 bp, Homo sapiens
aaatgtgaaatatat

SEQ ID NO: 1575136 - DNA, 15 bp, Homo sapiens
gataaatgtgaaata

SEQ ID NO: 1575137 - DNA, 15 bp, Homo sapiens
ggataaatgtgaaat

SEQ ID NO: 1575138 - DNA, 15 bp, Homo sapiens
tggataaatgtgaaa

SEQ ID NO: 1575139 - DNA, 15 bp, Homo sapiens
gtggataaatgtgaa

SEQ ID NO: 1575140 - DNA, 15 bp, Homo sapiens
tgtggataaatgtga

SEQ ID NO: 1575141 - DNA, 15 bp, Homo sapiens
gtgtggataaatgtg

SEQ ID NO: 1575142 - DNA, 15 bp, Homo sapiens
tgtgtggataaatgt

SEQ ID NO: 1575143 - DNA, 15 bp, Homo sapiens
ctgtgtggataaatg

SEQ ID NO: 1575144 - DNA, 15 bp, Homo sapiens
actgtgtggataaat

SEQ ID NO: 1575145 - DNA, 15 bp, Homo sapiens
tactgtgtggataaa

SEQ ID NO: 1575146 - DNA, 15 bp, Homo sapiens
ttactgtgtggataa

SEQ ID NO: 1575147 - DNA, 15 bp, Homo sapiens
gttactgtgtggata

SEQ ID NO: 1575148 - DNA, 15 bp, Homo sapiens
tgttactgtgtggat

SEQ ID NO: 1575149 - DNA, 15 bp, Homo sapiens
ttgttactgtgtgga

SEQ ID NO: 1575150 - DNA, 15 bp, Homo sapiens
attgttactgtgtgg

SEQ ID NO: 1575151 - DNA, 15 bp, Homo sapiens
cattgttactgtgtg

SEQ ID NO: 1575152 - DNA, 15 bp, Homo sapiens
acattgttactgtgt

SEQ ID NO: 1575153 - DNA, 15 bp, Homo sapiens
tacattgttactgtg

SEQ ID NO: 1575154 - DNA, 15 bp, Homo sapiens
ttacattgttactgt

SEQ ID NO: 1575155 - DNA, 15 bp, Homo sapiens
attacattgttactg

SEQ ID NO: 1575156 - DNA, 15 bp, Homo sapiens
tattacattgttact

SEQ ID NO: 1575157 - DNA, 15 bp, Homo sapiens
atattacattgttac

SEQ ID NO: 1575158 - DNA, 15 bp, Homo sapiens
catattacattgtta

SEQ ID NO: 1575159 - DNA, 15 bp, Homo sapiens
acatattacattgtt

SEQ ID NO: 1575160 - DNA, 15 bp, Homo sapiens
aacatattacattgt

SEQ ID NO: 1575161 - DNA, 15 bp, Homo sapiens
taacatattacattg

SEQ ID NO: 1575162 - DNA, 15 bp, Homo sapiens
ttaacatattacatt

SEQ ID NO: 1575163 - DNA, 15 bp, Homo sapiens
attaacatattacat

SEQ ID NO: 1575164 - DNA, 15 bp, Homo sapiens
cattaacatattaca

SEQ ID NO: 1575165 - DNA, 15 bp, Homo sapiens
acattaacatattac

SEQ ID NO: 1575166 - DNA, 15 bp, Homo sapiens
tacattaacatatta

SEQ ID NO: 1575167 - DNA, 15 bp, Homo sapiens
ttacattaacatatt

SEQ ID NO: 1575168 - DNA, 15 bp, Homo sapiens
tttacattaacatat

SEQ ID NO: 1575169 - DNA, 15 bp, Homo sapiens
atttacattaacata

SEQ ID NO: 1575170 - DNA, 15 bp, Homo sapiens
tatttacattaacat

SEQ ID NO: 1575171 - DNA, 15 bp, Homo sapiens
ttatttacattaaca

SEQ ID NO: 1575172 - DNA, 15 bp, Homo sapiens
tttatttacattaac

SEQ ID NO: 1575173 - DNA, 15 bp, Homo sapiens
ttttatttacattaa

SEQ ID NO: 1575174 - DNA, 15 bp, Homo sapiens
attttatttacatta

SEQ ID NO: 1575175 - DNA, 15 bp, Homo sapiens
aattttatttacatt

SEQ ID NO: 1575176 - DNA, 15 bp, Homo sapiens
caattttatttacat

SEQ ID NO: 1575177 - DNA, 15 bp, Homo sapiens
ccaattttatttaca

SEQ ID NO: 1575178 - DNA, 15 bp, Homo sapiens
accaattttatttac

SEQ ID NO: 1575179 - DNA, 15 bp, Homo sapiens
aaccaattttattta

SEQ ID NO: 1575180 - DNA, 15 bp, Homo sapiens
aaaccaattttattt

SEQ ID NO: 1575181 - DNA, 15 bp, Homo sapiens
aaaaccaattttatt

SEQ ID NO: 1575182 - DNA, 15 bp, Homo sapiens
caaaaccaattttat

SEQ ID NO: 1575183 - DNA, 15 bp, Homo sapiens
tcaaaaccaatttta

SEQ ID NO: 1575184 - DNA, 15 bp, Homo sapiens
atcaaaaccaatttt

SEQ ID NO: 1575185 - DNA, 15 bp, Homo sapiens
tatcaaaaccaattt

SEQ ID NO: 1575186 - DNA, 15 bp, Homo sapiens
gtatcaaaaccaatt

SEQ ID NO: 1575187 - DNA, 15 bp, Homo sapiens
agtatcaaaaccaat

SEQ ID NO: 1575188 - DNA, 15 bp, Homo sapiens
gagtatcaaaaccaa

SEQ ID NO: 1575189 - DNA, 15 bp, Homo sapiens
tgagtatcaaaacca

SEQ ID NO: 1575190 - DNA, 15 bp, Homo sapiens
ctgagtatcaaaacc

SEQ ID NO: 1575191 - DNA, 15 bp, Homo sapiens
tctgagtatcaaaac

SEQ ID NO: 1575192 - DNA, 15 bp, Homo sapiens
ttctgagtatcaaaa

SEQ ID NO: 1575193 - DNA, 15 bp, Homo sapiens
tttctgagtatcaaa

SEQ ID NO: 1575194 - DNA, 15 bp, Homo sapiens
atttctgagtatcaa

SEQ ID NO: 1575195 - DNA, 15 bp, Homo sapiens
tatttctgagtatca

SEQ ID NO: 1575196 - DNA, 15 bp, Homo sapiens
ttatttctgagtatc

SEQ ID NO: 1575197 - DNA, 15 bp, Homo sapiens
gttatttctgagtat

SEQ ID NO: 1575198 - DNA, 15 bp, Homo sapiens
tgttatttctgagta

SEQ ID NO: 1575199 - DNA, 15 bp, Homo sapiens
ttgttatttctgagt

SEQ ID NO: 1575200 - DNA, 15 bp, Homo sapiens
cttgttatttctgag

SEQ ID NO: 1575201 - DNA, 15 bp, Homo sapiens
tcttgttatttctga

SEQ ID NO: 1575202 - DNA, 15 bp, Homo sapiens
ttcttgttatttctg

SEQ ID NO: 1575203 - DNA, 15 bp, Homo sapiens
attcttgttatttct

SEQ ID NO: 1575204 - DNA, 15 bp, Homo sapiens
aattcttgttatttc

SEQ ID NO: 1575205 - DNA, 15 bp, Homo sapiens
aaattcttgttattt

SEQ ID NO: 1575206 - DNA, 15 bp, Homo sapiens
taaattcttgttatt

SEQ ID NO: 1575207 - DNA, 15 bp, Homo sapiens
ttaaattcttgttat

SEQ ID NO: 1575208 - DNA, 15 bp, Homo sapiens
attaaattcttgtta

SEQ ID NO: 1575209 - DNA, 15 bp, Homo sapiens
aattaaattcttgtt

SEQ ID NO: 1575210 - DNA, 15 bp, Homo sapiens
aaattaaattcttgt

SEQ ID NO: 1575211 - DNA, 15 bp, Homo sapiens
aaaattaaattcttg

SEQ ID NO: 1575212 - DNA, 15 bp, Homo sapiens
aaaaattaaattctt

SEQ ID NO: 1575213 - DNA, 15 bp, Homo sapiens
aaaaaattaaattct

SEQ ID NO: 1575214 - DNA, 15 bp, Homo sapiens
taaaaaattaaattc

SEQ ID NO: 1575215 - DNA, 15 bp, Homo sapiens
ttaaaaaattaaatt

SEQ ID NO: 1575216 - DNA, 15 bp, Homo sapiens
tttaaaaaattaaat

SEQ ID NO: 1575217 - DNA, 15 bp, Homo sapiens
atttaaaaaattaaa

SEQ ID NO: 1575218 - DNA, 15 bp, Homo sapiens
aatttaaaaaattaa

SEQ ID NO: 1575219 - DNA, 15 bp, Homo sapiens
aaatttaaaaaatta

SEQ ID NO: 1575220 - DNA, 15 bp, Homo sapiens
caaatttaaaaaatt

SEQ ID NO: 1575221 - DNA, 15 bp, Homo sapiens
acaaatttaaaaaat

SEQ ID NO: 1575222 - DNA, 15 bp, Homo sapiens
gtaaacaaatttaaa

SEQ ID NO: 1575223 - DNA, 15 bp, Homo sapiens
tgtaaacaaatttaa

SEQ ID NO: 1575224 - DNA, 15 bp, Homo sapiens
ctgtaaacaaattta

SEQ ID NO: 1575225 - DNA, 15 bp, Homo sapiens
actgtaaacaaattt

SEQ ID NO: 1575226 - DNA, 15 bp, Homo sapiens
gactgtaaacaaatt

SEQ ID NO: 1575227 - DNA, 15 bp, Homo sapiens
ggactgtaaacaaat

SEQ ID NO: 1575228 - DNA, 15 bp, Homo sapiens
aggactgtaaacaaa

SEQ ID NO: 1575229 - DNA, 15 bp, Homo sapiens
caggactgtaaacaa

SEQ ID NO: 1575230 - DNA, 15 bp, Homo sapiens
ccaggactgtaaaca

SEQ ID NO: 1575231 - DNA, 15 bp, Homo sapiens
cccaggactgtaaac

SEQ ID NO: 1575232 - DNA, 15 bp, Homo sapiens
tcccaggactgtaaa

SEQ ID NO: 1575233 - DNA, 15 bp, Homo sapiens
ttcccaggactgtaa

SEQ ID NO: 1575234 - DNA, 15 bp, Homo sapiens
tttcccaggactgta

SEQ ID NO: 1575235 - DNA, 15 bp, Homo sapiens
ttttcccaggactgt

SEQ ID NO: 1575236 - DNA, 15 bp, Homo sapiens
cttttcccaggactg

SEQ ID NO: 1575237 - DNA, 15 bp, Homo sapiens
acttttcccaggact

SEQ ID NO: 1575238 - DNA, 15 bp, Homo sapiens
tacttttcccaggac

SEQ ID NO: 1575239 - DNA, 15 bp, Homo sapiens
ttacttttcccagga

SEQ ID NO: 1575240 - DNA, 15 bp, Homo sapiens
cttacttttcccagg

SEQ ID NO: 1575241 - DNA, 15 bp, Homo sapiens
tcttacttttcccag

SEQ ID NO: 1575242 - DNA, 15 bp, Homo sapiens
ttcttacttttccca

SEQ ID NO: 1575243 - DNA, 15 bp, Homo sapiens
attcttacttttccc

SEQ ID NO: 1575244 - DNA, 15 bp, Homo sapiens
aattcttacttttcc

SEQ ID NO: 1575245 - DNA, 15 bp, Homo sapiens
taattcttacttttc

SEQ ID NO: 1575246 - DNA, 15 bp, Homo sapiens
ataattcttactttt

SEQ ID NO: 1575247 - DNA, 15 bp, Homo sapiens
aataattcttacttt

SEQ ID NO: 1575248 - DNA, 15 bp, Homo sapiens
aaataattcttactt

SEQ ID NO: 1575249 - DNA, 15 bp, Homo sapiens
caaataattcttact

SEQ ID NO: 1575250 - DNA, 15 bp, Homo sapiens
gcaaataattcttac

SEQ ID NO: 1575251 - DNA, 15 bp, Homo sapiens
ggcaaataattctta

SEQ ID NO: 1575252 - DNA, 15 bp, Homo sapiens
tggcaaataattctt

SEQ ID NO: 1575253 - DNA, 15 bp, Homo sapiens
ttggcaaataattct

SEQ ID NO: 1575254 - DNA, 15 bp, Homo sapiens
tttggcaaataattc

SEQ ID NO: 1575255 - DNA, 15 bp, Homo sapiens
ttttggcaaataatt

SEQ ID NO: 1575256 - DNA, 15 bp, Homo sapiens
attttggcaaataat

SEQ ID NO: 1575257 - DNA, 15 bp, Homo sapiens
tattttggcaaataa

SEQ ID NO: 1575258 - DNA, 15 bp, Homo sapiens
ttattttggcaaata

SEQ ID NO: 1575259 - DNA, 15 bp, Homo sapiens
cttattttggcaaat

SEQ ID NO: 1575260 - DNA, 15 bp, Homo sapiens
tcttattttggcaaa

SEQ ID NO: 1575261 - DNA, 15 bp, Homo sapiens
ctcttattttggcaa

SEQ ID NO: 1575262 - DNA, 15 bp, Homo sapiens
cctcttattttggca

SEQ ID NO: 1575263 - DNA, 15 bp, Homo sapiens
tcctcttattttggc

SEQ ID NO: 1575264 - DNA, 15 bp, Homo sapiens
ttcctcttattttgg

SEQ ID NO: 1575265 - DNA, 15 bp, Homo sapiens
tttcctcttattttg

SEQ ID NO: 1575266 - DNA, 15 bp, Homo sapiens
ctttcctcttatttt

SEQ ID NO: 1575267 - DNA, 15 bp, Homo sapiens
tctttcctcttattt

SEQ ID NO: 1575268 - DNA, 15 bp, Homo sapiens
ttctttcctcttatt

SEQ ID NO: 1575269 - DNA, 15 bp, Homo sapiens
tttctttcctcttat

SEQ ID NO: 1575270 - DNA, 15 bp, Homo sapiens
ttttctttcctctta

SEQ ID NO: 1575271 - DNA, 15 bp, Homo sapiens
gttttctttcctctt

SEQ ID NO: 1575272 - DNA, 15 bp, Homo sapiens
ggttttctttcctct

SEQ ID NO: 1575273 - DNA, 15 bp, Homo sapiens
aggttttctttcctc

SEQ ID NO: 1575274 - DNA, 15 bp, Homo sapiens
aaggttttctttcct

SEQ ID NO: 1575275 - DNA, 15 bp, Homo sapiens
taaggttttctttcc

SEQ ID NO: 1575276 - DNA, 15 bp, Homo sapiens
ctaaggttttctttc

SEQ ID NO: 1575277 - DNA, 15 bp, Homo sapiens
actaaggttttcttt

SEQ ID NO: 1575278 - DNA, 15 bp, Homo sapiens
tactaaggttttctt

SEQ ID NO: 1575279 - DNA, 15 bp, Homo sapiens
atactaaggttttct

SEQ ID NO: 1575280 - DNA, 15 bp, Homo sapiens
aatactaaggttttc

SEQ ID NO: 1575281 - DNA, 15 bp, Homo sapiens
taatactaaggtttt

SEQ ID NO: 1575282 - DNA, 15 bp, Homo sapiens
ataatactaaggttt

SEQ ID NO: 1575283 - DNA, 15 bp, Homo sapiens
aataatactaaggtt

SEQ ID NO: 1575284 - DNA, 15 bp, Homo sapiens
taataatactaaggt

SEQ ID NO: 1575285 - DNA, 15 bp, Homo sapiens
ttaataatactaagg

SEQ ID NO: 1575286 - DNA, 15 bp, Homo sapiens
attaataatactaag

SEQ ID NO: 1575287 - DNA, 15 bp, Homo sapiens
cattaataatactaa

SEQ ID NO: 1575288 - DNA, 15 bp, Homo sapiens
tcattaataatacta

SEQ ID NO: 1575289 - DNA, 15 bp, Homo sapiens
ctcattaataatact

SEQ ID NO: 1575290 - DNA, 15 bp, Homo sapiens
actcattaataatac

SEQ ID NO: 1575291 - DNA, 15 bp, Homo sapiens
aactcattaataata

SEQ ID NO: 1575292 - DNA, 15 bp, Homo sapiens
aaactcattaataat

SEQ ID NO: 1575293 - DNA, 15 bp, Homo sapiens
taaactcattaataa

SEQ ID NO: 1575294 - DNA, 15 bp, Homo sapiens
gtaaactcattaata

SEQ ID NO: 1575295 - DNA, 15 bp, Homo sapiens
ggtaaactcattaat

SEQ ID NO: 1575296 - DNA, 15 bp, Homo sapiens
tggtaaactcattaa

SEQ ID NO: 1575297 - DNA, 15 bp, Homo sapiens
atggtaaactcatta

SEQ ID NO: 1575298 - DNA, 15 bp, Homo sapiens
tatggtaaactcatt

SEQ ID NO: 1575299 - DNA, 15 bp, Homo sapiens
ctatggtaaactcat

SEQ ID NO: 1575300 - DNA, 15 bp, Homo sapiens
tctatggtaaactca

SEQ ID NO: 1575301 - DNA, 15 bp, Homo sapiens
ttctatggtaaactc

SEQ ID NO: 1575302 - DNA, 15 bp, Homo sapiens
attctatggtaaact

SEQ ID NO: 1575303 - DNA, 15 bp, Homo sapiens
aattctatggtaaac

SEQ ID NO: 1575304 - DNA, 15 bp, Homo sapiens
caattctatggtaaa

SEQ ID NO: 1575305 - DNA, 15 bp, Homo sapiens
acaattctatggtaa

SEQ ID NO: 1575306 - DNA, 15 bp, Homo sapiens
aacaattctatggta

SEQ ID NO: 1575307 - DNA, 15 bp, Homo sapiens
caacaattctatggt

SEQ ID NO: 1575308 - DNA, 15 bp, Homo sapiens
ccaacaattctatgg

SEQ ID NO: 1575309 - DNA, 15 bp, Homo sapiens
tccaacaattctatg

SEQ ID NO: 1575310 - DNA, 15 bp, Homo sapiens
ttccaacaattctat

SEQ ID NO: 1575311 - DNA, 15 bp, Homo sapiens
tttccaacaattcta

SEQ ID NO: 1575312 - DNA, 15 bp, Homo sapiens
atttccaacaattct

SEQ ID NO: 1575313 - DNA, 15 bp, Homo sapiens
tatttccaacaattc

SEQ ID NO: 1575314 - DNA, 15 bp, Homo sapiens
gtatttccaacaatt

SEQ ID NO: 1575315 - DNA, 15 bp, Homo sapiens
agtatttccaacaat

SEQ ID NO: 1575316 - DNA, 15 bp, Homo sapiens
cagtatttccaacaa

SEQ ID NO: 1575317 - DNA, 15 bp, Homo sapiens
tcagtatttccaaca

SEQ ID NO: 1575318 - DNA, 15 bp, Homo sapiens
ttcagtatttccaac

SEQ ID NO: 1575319 - DNA, 15 bp, Homo sapiens
cttcagtatttccaa

SEQ ID NO: 1575320 - DNA, 15 bp, Homo sapiens
tcttcagtatttcca

SEQ ID NO: 1575321 - DNA, 15 bp, Homo sapiens
gtcttcagtatttcc

SEQ ID NO: 1575322 - DNA, 15 bp, Homo sapiens
tgtcttcagtatttc

SEQ ID NO: 1575323 - DNA, 15 bp, Homo sapiens
ctgtcttcagtattt

SEQ ID NO: 1575324 - DNA, 15 bp, Homo sapiens
cctgtcttcagtatt

SEQ ID NO: 1575325 - DNA, 15 bp, Homo sapiens
acctgtcttcagtat

SEQ ID NO: 1575326 - DNA, 15 bp, Homo sapiens
cacctgtcttcagta

SEQ ID NO: 1575327 - DNA, 15 bp, Homo sapiens
gcacctgtcttcagt

SEQ ID NO: 1575328 - DNA, 15 bp, Homo sapiens
tgcacctgtcttcag

SEQ ID NO: 1575329 - DNA, 15 bp, Homo sapiens
ttgcacctgtcttca

SEQ ID NO: 1575330 - DNA, 15 bp, Homo sapiens
attgcacctgtcttc

SEQ ID NO: 1575331 - DNA, 15 bp, Homo sapiens
aattgcacctgtctt

SEQ ID NO: 1575332 - DNA, 15 bp, Homo sapiens
aaattgcacctgtct

SEQ ID NO: 1575333 - DNA, 15 bp, Homo sapiens
taaattgcacctgtc

SEQ ID NO: 1575334 - DNA, 15 bp, Homo sapiens
gtaaattgcacctgt

SEQ ID NO: 1575335 - DNA, 15 bp, Homo sapiens
agtaaattgcacctg

SEQ ID NO: 1575336 - DNA, 15 bp, Homo sapiens
tagtaaattgcacct

SEQ ID NO: 1575337 - DNA, 15 bp, Homo sapiens
ttagtaaattgcacc

SEQ ID NO: 1575338 - DNA, 15 bp, Homo sapiens
tttagtaaattgcac

SEQ ID NO: 1575339 - DNA, 15 bp, Homo sapiens
gtttagtaaattgca

SEQ ID NO: 1575340 - DNA, 15 bp, Homo sapiens
agtttagtaaattgc

SEQ ID NO: 1575341 - DNA, 15 bp, Homo sapiens
aaagtttagtaaatt

SEQ ID NO: 1575342 - DNA, 15 bp, Homo sapiens
aaaagtttagtaaat

SEQ ID NO: 1575343 - DNA, 15 bp, Homo sapiens
caaaagtttagtaaa

SEQ ID NO: 1575344 - DNA, 15 bp, Homo sapiens
acaaaagtttagtaa

SEQ ID NO: 1575345 - DNA, 15 bp, Homo sapiens
aacaaaagtttagta

SEQ ID NO: 1575346 - DNA, 15 bp, Homo sapiens
aaacaaaagtttagt

SEQ ID NO: 1575347 - DNA, 15 bp, Homo sapiens
aaaacaaaagtttag

SEQ ID NO: 1575348 - DNA, 15 bp, Homo sapiens
aaaaacaaaagttta

SEQ ID NO: 1575349 - DNA, 15 bp, Homo sapiens
taaaaacaaaagttt

SEQ ID NO: 1575350 - DNA, 15 bp, Homo sapiens
ttaaaaacaaaagtt

SEQ ID NO: 1575351 - DNA, 15 bp, Homo sapiens
tttaaaaacaaaagt

SEQ ID NO: 1575352 - DNA, 15 bp, Homo sapiens
gtttaaaaacaaaag

SEQ ID NO: 1575353 - DNA, 15 bp, Homo sapiens
agtttaaaaacaaaa

SEQ ID NO: 1575354 - DNA, 15 bp, Homo sapiens
tagtttaaaaacaaa

SEQ ID NO: 1575355 - DNA, 15 bp, Homo sapiens
atagtttaaaaacaa

SEQ ID NO: 1575356 - DNA, 15 bp, Homo sapiens
aatagtttaaaaaca

SEQ ID NO: 1575357 - DNA, 15 bp, Homo sapiens
caatagtttaaaaac

SEQ ID NO: 1575358 - DNA, 15 bp, Homo sapiens
acaatagtttaaaaa

SEQ ID NO: 1575359 - DNA, 15 bp, Homo sapiens
tacaatagtttaaaa

SEQ ID NO: 1575360 - DNA, 15 bp, Homo sapiens
ctacaatagtttaaa

SEQ ID NO: 1575361 - DNA, 15 bp, Homo sapiens
tctacaatagtttaa

SEQ ID NO: 1575362 - DNA, 15 bp, Homo sapiens
ctctacaatagttta

SEQ ID NO: 1575363 - DNA, 15 bp, Homo sapiens
cctctacaatagttt

SEQ ID NO: 1575364 - DNA, 15 bp, Homo sapiens
gcctctacaatagtt

SEQ ID NO: 1575365 - DNA, 15 bp, Homo sapiens
agcctctacaatagt

SEQ ID NO: 1575366 - DNA, 15 bp, Homo sapiens
cagcctctacaatag

SEQ ID NO: 1575367 - DNA, 15 bp, Homo sapiens
gcagcctctacaata

SEQ ID NO: 1575368 - DNA, 15 bp, Homo sapiens
tgcagcctctacaat

SEQ ID NO: 1575369 - DNA, 15 bp, Homo sapiens
atgcagcctctacaa

SEQ ID NO: 1575370 - DNA, 15 bp, Homo sapiens
aatgcagcctctaca

SEQ ID NO: 1575371 - DNA, 15 bp, Homo sapiens
taatgcagcctctac

SEQ ID NO: 1575372 - DNA, 15 bp, Homo sapiens
ctaatgcagcctcta

SEQ ID NO: 1575373 - DNA, 15 bp, Homo sapiens
tctaatgcagcctct

SEQ ID NO: 1575374 - DNA, 15 bp, Homo sapiens
ttctaatgcagcctc

SEQ ID NO: 1575375 - DNA, 15 bp, Homo sapiens
cttctaatgcagcct

SEQ ID NO: 1575376 - DNA, 15 bp, Homo sapiens
tcttctaatgcagcc

SEQ ID NO: 1575377 - DNA, 15 bp, Homo sapiens
ttcttctaatgcagc

SEQ ID NO: 1575378 - DNA, 15 bp, Homo sapiens
tttcttctaatgcag

SEQ ID NO: 1575379 - DNA, 15 bp, Homo sapiens
ttttcttctaatgca

SEQ ID NO: 1575380 - DNA, 15 bp, Homo sapiens
attttcttctaatgc

SEQ ID NO: 1575381 - DNA, 15 bp, Homo sapiens
cattttcttctaatg

SEQ ID NO: 1575382 - DNA, 15 bp, Homo sapiens
acattttcttctaat

SEQ ID NO: 1575383 - DNA, 15 bp, Homo sapiens
aacattttcttctaa

SEQ ID NO: 1575384 - DNA, 15 bp, Homo sapiens
aaacattttcttcta

SEQ ID NO: 1575385 - DNA, 15 bp, Homo sapiens
taaacattttcttct

SEQ ID NO: 1575386 - DNA, 15 bp, Homo sapiens
ataaacattttcttc

SEQ ID NO: 1575387 - DNA, 15 bp, Homo sapiens
tataaacattttctt

SEQ ID NO: 1575388 - DNA, 15 bp, Homo sapiens
ttataaacattttct

SEQ ID NO: 1575389 - DNA, 15 bp, Homo sapiens
attataaacattttc

SEQ ID NO: 1575390 - DNA, 15 bp, Homo sapiens
cattataaacatttt

SEQ ID NO: 1575391 - DNA, 15 bp, Homo sapiens
tcattataaacattt

SEQ ID NO: 1575392 - DNA, 15 bp, Homo sapiens
gtcattataaacatt

SEQ ID NO: 1575393 - DNA, 15 bp, Homo sapiens
tgtcattataaacat

SEQ ID NO: 1575394 - DNA, 15 bp, Homo sapiens
ctgtcattataaaca

SEQ ID NO: 1575395 - DNA, 15 bp, Homo sapiens
tctgtcattataaac

SEQ ID NO: 1575396 - DNA, 15 bp, Homo sapiens
ctctgtcattataaa

SEQ ID NO: 1575397 - DNA, 15 bp, Homo sapiens
gctctgtcattataa

SEQ ID NO: 1575398 - DNA, 15 bp, Homo sapiens
tgctctgtcattata

SEQ ID NO: 1575399 - DNA, 15 bp, Homo sapiens
ttgctctgtcattat

SEQ ID NO: 1575400 - DNA, 15 bp, Homo sapiens
gttgctctgtcatta

SEQ ID NO: 1575401 - DNA, 15 bp, Homo sapiens
agttgctctgtcatt

SEQ ID NO: 1575402 - DNA, 15 bp, Homo sapiens
tagttgctctgtcat

SEQ ID NO: 1575403 - DNA, 15 bp, Homo sapiens
atagttgctctgtca

SEQ ID NO: 1575404 - DNA, 15 bp, Homo sapiens
catagttgctctgtc

SEQ ID NO: 1575405 - DNA, 15 bp, Homo sapiens
tcatagttgctctgt

SEQ ID NO: 1575406 - DNA, 15 bp, Homo sapiens
gtcatagttgctctg

SEQ ID NO: 1575407 - DNA, 15 bp, Homo sapiens
agtcatagttgctct

SEQ ID NO: 1575408 - DNA, 15 bp, Homo sapiens
tagtcatagttgctc

SEQ ID NO: 1575409 - DNA, 15 bp, Homo sapiens
atagtcatagttgct

SEQ ID NO: 1575410 - DNA, 15 bp, Homo sapiens
tatagtcatagttgc

SEQ ID NO: 1575411 - DNA, 15 bp, Homo sapiens
atatagtcatagttg

SEQ ID NO: 1575412 - DNA, 15 bp, Homo sapiens
tatatagtcatagtt

SEQ ID NO: 1575413 - DNA, 15 bp, Homo sapiens
ttatatagtcatagt

SEQ ID NO: 1575414 - DNA, 15 bp, Homo sapiens
tttatatagtcatag

SEQ ID NO: 1575415 - DNA, 15 bp, Homo sapiens
ttttatatagtcata

SEQ ID NO: 1575416 - DNA, 15 bp, Homo sapiens
tttttatatagtcat

SEQ ID NO: 1575417 - DNA, 15 bp, Homo sapiens
ttttttatatagtca

SEQ ID NO: 1575418 - DNA, 15 bp, Homo sapiens
cttttttatatagtc

SEQ ID NO: 1575419 - DNA, 15 bp, Homo sapiens
gcttttttatatagt

SEQ ID NO: 1575420 - DNA, 15 bp, Homo sapiens
agcttttttatatag

SEQ ID NO: 1575421 - DNA, 15 bp, Homo sapiens
cagcttttttatata

SEQ ID NO: 1575422 - DNA, 15 bp, Homo sapiens
tcagcttttttatat

SEQ ID NO: 1575423 - DNA, 15 bp, Homo sapiens
ttcagcttttttata

SEQ ID NO: 1575424 - DNA, 15 bp, Homo sapiens
tttcagcttttttat

SEQ ID NO: 1575425 - DNA, 15 bp, Homo sapiens
atttcagctttttta

SEQ ID NO: 1575426 - DNA, 15 bp, Homo sapiens
aatttcagctttttt

SEQ ID NO: 1575427 - DNA, 15 bp, Homo sapiens
taatttcagcttttt

SEQ ID NO: 1575428 - DNA, 15 bp, Homo sapiens
ctaatttcagctttt

SEQ ID NO: 1575429 - DNA, 15 bp, Homo sapiens
tctaatttcagcttt

SEQ ID NO: 1575430 - DNA, 15 bp, Homo sapiens
ttctaatttcagctt

SEQ ID NO: 1575431 - DNA, 15 bp, Homo sapiens
gttctaatttcagct

SEQ ID NO: 1575432 - DNA, 15 bp, Homo sapiens
agttctaatttcagc

SEQ ID NO: 1575433 - DNA, 15 bp, Homo sapiens
cagttctaatttcag

SEQ ID NO: 1575434 - DNA, 15 bp, Homo sapiens
acagttctaatttca

SEQ ID NO: 1575435 - DNA, 15 bp, Homo sapiens
cacagttctaatttc

SEQ ID NO: 1575436 - DNA, 15 bp, Homo sapiens
acacagttctaattt

SEQ ID NO: 1575437 - DNA, 15 bp, Homo sapiens
aacacagttctaatt

SEQ ID NO: 1575438 - DNA, 15 bp, Homo sapiens
aaacacagttctaat

SEQ ID NO: 1575439 - DNA, 15 bp, Homo sapiens
taaacacagttctaa

SEQ ID NO: 1575440 - DNA, 15 bp, Homo sapiens
ctaaacacagttcta

SEQ ID NO: 1575441 - DNA, 15 bp, Homo sapiens
tctaaacacagttct

SEQ ID NO: 1575442 - DNA, 15 bp, Homo sapiens
ttctaaacacagttc

SEQ ID NO: 1575443 - DNA, 15 bp, Homo sapiens
tttctaaacacagtt

SEQ ID NO: 1575444 - DNA, 15 bp, Homo sapiens
atttctaaacacagt

SEQ ID NO: 1575445 - DNA, 15 bp, Homo sapiens
tatttctaaacacag

SEQ ID NO: 1575446 - DNA, 15 bp, Homo sapiens
ctatttctaaacaca

SEQ ID NO: 1575447 - DNA, 15 bp, Homo sapiens
tctatttctaaacac

SEQ ID NO: 1575448 - DNA, 15 bp, Homo sapiens
atctatttctaaaca

SEQ ID NO: 1575449 - DNA, 15 bp, Homo sapiens
gatctatttctaaac

SEQ ID NO: 1575450 - DNA, 15 bp, Homo sapiens
tgatctatttctaaa

SEQ ID NO: 1575451 - DNA, 15 bp, Homo sapiens
ctgatctatttctaa

SEQ ID NO: 1575452 - DNA, 15 bp, Homo sapiens
actgatctatttcta

SEQ ID NO: 1575453 - DNA, 15 bp, Homo sapiens
tactgatctatttct

SEQ ID NO: 1575454 - DNA, 15 bp, Homo sapiens
ttactgatctatttc

SEQ ID NO: 1575455 - DNA, 15 bp, Homo sapiens
gttactgatctattt

SEQ ID NO: 1575456 - DNA, 15 bp, Homo sapiens
ggttactgatctatt

SEQ ID NO: 1575457 - DNA, 15 bp, Homo sapiens
gggttactgatctat

SEQ ID NO: 1575458 - DNA, 15 bp, Homo sapiens
tgggttactgatcta

SEQ ID NO: 1575459 - DNA, 15 bp, Homo sapiens
ctgggttactgatct

SEQ ID NO: 1575460 - DNA, 15 bp, Homo sapiens
actgggttactgatc

SEQ ID NO: 1575461 - DNA, 15 bp, Homo sapiens
cactgggttactgat

SEQ ID NO: 1575462 - DNA, 15 bp, Homo sapiens
gcactgggttactga

SEQ ID NO: 1575463 - DNA, 15 bp, Homo sapiens
ggcactgggttactg

SEQ ID NO: 1575464 - DNA, 15 bp, Homo sapiens
tggcactgggttact

SEQ ID NO: 1575465 - DNA, 15 bp, Homo sapiens
ttggcactgggttac

SEQ ID NO: 1575466 - DNA, 15 bp, Homo sapiens
cttggcactgggtta

SEQ ID NO: 1575467 - DNA, 15 bp, Homo sapiens
ccttggcactgggtt

SEQ ID NO: 1575468 - DNA, 15 bp, Homo sapiens
tccttggcactgggt

SEQ ID NO: 1575469 - DNA, 15 bp, Homo sapiens
atccttggcactggg

SEQ ID NO: 1575470 - DNA, 15 bp, Homo sapiens
catccttggcactgg

SEQ ID NO: 1575471 - DNA, 15 bp, Homo sapiens
gcatccttggcactg

SEQ ID NO: 1575472 - DNA, 15 bp, Homo sapiens
ggcatccttggcact

SEQ ID NO: 1575473 - DNA, 15 bp, Homo sapiens
tggcatccttggcac

SEQ ID NO: 1575474 - DNA, 15 bp, Homo sapiens
ttggcatccttggca

SEQ ID NO: 1575475 - DNA, 15 bp, Homo sapiens
cttggcatccttggc

SEQ ID NO: 1575476 - DNA, 15 bp, Homo sapiens
gcttggcatccttgg

SEQ ID NO: 1575477 - DNA, 15 bp, Homo sapiens
agcttggcatccttg

SEQ ID NO: 1575478 - DNA, 15 bp, Homo sapiens
cagcttggcatcctt

SEQ ID NO: 1575479 - DNA, 15 bp, Homo sapiens
gcagcttggcatcct

SEQ ID NO: 1575480 - DNA, 15 bp, Homo sapiens
ggcagcttggcatcc

SEQ ID NO: 1575481 - DNA, 15 bp, Homo sapiens
tggcagcttggcatc

SEQ ID NO: 1575482 - DNA, 15 bp, Homo sapiens
gtggcagcttggcat

SEQ ID NO: 1575483 - DNA, 15 bp, Homo sapiens
ggtggcagcttggca

SEQ ID NO: 1575484 - DNA, 15 bp, Homo sapiens
tggtggcagcttggc

SEQ ID NO: 1575485 - DNA, 15 bp, Homo sapiens
atggtggcagcttgg

SEQ ID NO: 1575486 - DNA, 15 bp, Homo sapiens
catggtggcagcttg

SEQ ID NO: 1575487 - DNA, 15 bp, Homo sapiens
ccatggtggcagctt

SEQ ID NO: 1575488 - DNA, 15 bp, Homo sapiens
accatggtggcagct

SEQ ID NO: 1575489 - DNA, 15 bp, Homo sapiens
gaccatggtggcagc

SEQ ID NO: 1575490 - DNA, 15 bp, Homo sapiens
agaccatggtggcag

SEQ ID NO: 1575491 - DNA, 15 bp, Homo sapiens
aagaccatggtggca

SEQ ID NO: 1575492 - DNA, 15 bp, Homo sapiens
caagaccatggtggc

SEQ ID NO: 1575493 - DNA, 15 bp, Homo sapiens
ccaagaccatggtgg

SEQ ID NO: 1575494 - DNA, 15 bp, Homo sapiens
gccaagaccatggtg

SEQ ID NO: 1575495 - DNA, 15 bp, Homo sapiens
agccaagaccatggt

SEQ ID NO: 1575496 - DNA, 15 bp, Homo sapiens
gagccaagaccatgg

SEQ ID NO: 1575497 - DNA, 15 bp, Homo sapiens
agagccaagaccatg

SEQ ID NO: 1575498 - DNA, 15 bp, Homo sapiens
gagagccaagaccat

SEQ ID NO: 1575499 - DNA, 15 bp, Homo sapiens
ggagagccaagacca

SEQ ID NO: 1575500 - DNA, 15 bp, Homo sapiens
gggagagccaagacc

SEQ ID NO: 1575501 - DNA, 15 bp, Homo sapiens
tgggagagccaagac

SEQ ID NO: 1575502 - DNA, 15 bp, Homo sapiens
gtgggagagccaaga

SEQ ID NO: 1575503 - DNA, 15 bp, Homo sapiens
tgtgggagagccaag

SEQ ID NO: 1575504 - DNA, 15 bp, Homo sapiens
ttgtgggagagccaa

SEQ ID NO: 1575505 - DNA, 15 bp, Homo sapiens
gttgtgggagagcca

SEQ ID NO: 1575506 - DNA, 15 bp, Homo sapiens
ggttgtgggagagcc

SEQ ID NO: 1575507 - DNA, 15 bp, Homo sapiens
gggttgtgggagagc

SEQ ID NO: 1575508 - DNA, 15 bp, Homo sapiens
tgggttgtgggagag

SEQ ID NO: 1575509 - DNA, 15 bp, Homo sapiens
ctgggttgtgggaga

SEQ ID NO: 1575510 - DNA, 15 bp, Homo sapiens
actgggttgtgggag

SEQ ID NO: 1575511 - DNA, 15 bp, Homo sapiens
cactgggttgtggga

SEQ ID NO: 1575512 - DNA, 15 bp, Homo sapiens
acactgggttgtggg

SEQ ID NO: 1575513 - DNA, 15 bp, Homo sapiens
aacactgggttgtgg

SEQ ID NO: 1575514 - DNA, 15 bp, Homo sapiens
aaacactgggttgtg

SEQ ID NO: 1575515 - DNA, 15 bp, Homo sapiens
gaaacactgggttgt

SEQ ID NO: 1575516 - DNA, 15 bp, Homo sapiens
agaaacactgggttg

SEQ ID NO: 1575517 - DNA, 15 bp, Homo sapiens
cagaaacactgggtt

SEQ ID NO: 1575518 - DNA, 15 bp, Homo sapiens
ccagaaacactgggt

SEQ ID NO: 1575519 - DNA, 15 bp, Homo sapiens
cccagaaacactggg

SEQ ID NO: 1575520 - DNA, 15 bp, Homo sapiens
ccccagaaacactgg

SEQ ID NO: 1575521 - DNA, 15 bp, Homo sapiens
accccagaaacactg

SEQ ID NO: 1575522 - DNA, 15 bp, Homo sapiens
taccccagaaacact

SEQ ID NO: 1575523 - DNA, 15 bp, Homo sapiens
ttaccccagaaacac

SEQ ID NO: 1575524 - DNA, 15 bp, Homo sapiens
cttaccccagaaaca

SEQ ID NO: 1575525 - DNA, 15 bp, Homo sapiens
acttaccccagaaac

SEQ ID NO: 1575526 - DNA, 15 bp, Homo sapiens
aacttaccccagaaa

SEQ ID NO: 1575527 - DNA, 15 bp, Homo sapiens
aaacttaccccagaa

SEQ ID NO: 1575528 - DNA, 15 bp, Homo sapiens
gaaacttaccccaga

SEQ ID NO: 1575529 - DNA, 15 bp, Homo sapiens
tgaaacttaccccag

SEQ ID NO: 1575530 - DNA, 15 bp, Homo sapiens
gtgaaacttacccca

SEQ ID NO: 1575531 - DNA, 15 bp, Homo sapiens
tgtgaaacttacccc

SEQ ID NO: 1575532 - DNA, 15 bp, Homo sapiens
ctgtgaaacttaccc

SEQ ID NO: 1575533 - DNA, 15 bp, Homo sapiens
actgtgaaacttacc

SEQ ID NO: 1575534 - DNA, 15 bp, Homo sapiens
aactgtgaaacttac

SEQ ID NO: 1575535 - DNA, 15 bp, Homo sapiens
aaactgtgaaactta

SEQ ID NO: 1575536 - DNA, 15 bp, Homo sapiens
gaaactgtgaaactt

SEQ ID NO: 1575537 - DNA, 15 bp, Homo sapiens
agaaactgtgaaact

SEQ ID NO: 1575538 - DNA, 15 bp, Homo sapiens
tagaaactgtgaaac

SEQ ID NO: 1575539 - DNA, 15 bp, Homo sapiens
ctagaaactgtgaaa

SEQ ID NO: 1575540 - DNA, 15 bp, Homo sapiens
cctagaaactgtgaa

SEQ ID NO: 1575541 - DNA, 15 bp, Homo sapiens
gcctagaaactgtga

SEQ ID NO: 1575542 - DNA, 15 bp, Homo sapiens
ggcctagaaactgtg

SEQ ID NO: 1575543 - DNA, 15 bp, Homo sapiens
gggcctagaaactgt

SEQ ID NO: 1575544 - DNA, 15 bp, Homo sapiens
agggcctagaaactg

SEQ ID NO: 1575545 - DNA, 15 bp, Homo sapiens
cagggcctagaaact

SEQ ID NO: 1575546 - DNA, 15 bp, Homo sapiens
ccagggcctagaaac

SEQ ID NO: 1575547 - DNA, 15 bp, Homo sapiens
tccagggcctagaaa

SEQ ID NO: 1575548 - DNA, 15 bp, Homo sapiens
ttccagggcctagaa

SEQ ID NO: 1575549 - DNA, 15 bp, Homo sapiens
attccagggcctaga

SEQ ID NO: 1575550 - DNA, 15 bp, Homo sapiens
tattccagggcctag

SEQ ID NO: 1575551 - DNA, 15 bp, Homo sapiens
ctattccagggccta

SEQ ID NO: 1575552 - DNA, 15 bp, Homo sapiens
gctattccagggcct

SEQ ID NO: 1575553 - DNA, 15 bp, Homo sapiens
tgctattccagggcc

SEQ ID NO: 1575554 - DNA, 15 bp, Homo sapiens
ctgctattccagggc

SEQ ID NO: 1575555 - DNA, 15 bp, Homo sapiens
cctgctattccaggg

SEQ ID NO: 1575556 - DNA, 15 bp, Homo sapiens
gcctgctattccagg

SEQ ID NO: 1575557 - DNA, 15 bp, Homo sapiens
tgcctgctattccag

SEQ ID NO: 1575558 - DNA, 15 bp, Homo sapiens
ctgcctgctattcca

SEQ ID NO: 1575559 - DNA, 15 bp, Homo sapiens
actgcctgctattcc

SEQ ID NO: 1575560 - DNA, 15 bp, Homo sapiens
cactgcctgctattc

SEQ ID NO: 1575561 - DNA, 15 bp, Homo sapiens
acactgcctgctatt

SEQ ID NO: 1575562 - DNA, 15 bp, Homo sapiens
tacactgcctgctat

SEQ ID NO: 1575563 - DNA, 15 bp, Homo sapiens
ttacactgcctgcta

SEQ ID NO: 1575564 - DNA, 15 bp, Homo sapiens
cttacactgcctgct

SEQ ID NO: 1575565 - DNA, 15 bp, Homo sapiens
gcttacactgcctgc

SEQ ID NO: 1575566 - DNA, 15 bp, Homo sapiens
ggcttacactgcctg

SEQ ID NO: 1575567 - DNA, 15 bp, Homo sapiens
aggcttacactgcct

SEQ ID NO: 1575568 - DNA, 15 bp, Homo sapiens
aaggcttacactgcc

SEQ ID NO: 1575569 - DNA, 15 bp, Homo sapiens
aaaggcttacactgc

SEQ ID NO: 1575570 - DNA, 15 bp, Homo sapiens
caaaggcttacactg

SEQ ID NO: 1575571 - DNA, 15 bp, Homo sapiens
tcaaaggcttacact

SEQ ID NO: 1575572 - DNA, 15 bp, Homo sapiens
atcaaaggcttacac

SEQ ID NO: 1575573 - DNA, 15 bp, Homo sapiens
tatcaaaggcttaca

SEQ ID NO: 1575574 - DNA, 15 bp, Homo sapiens
ttatcaaaggcttac

SEQ ID NO: 1575575 - DNA, 15 bp, Homo sapiens
gttatcaaaggctta

SEQ ID NO: 1575576 - DNA, 15 bp, Homo sapiens
agttatcaaaggctt

SEQ ID NO: 1575577 - DNA, 15 bp, Homo sapiens
aagttatcaaaggct

SEQ ID NO: 1575578 - DNA, 15 bp, Homo sapiens
aaagttatcaaaggc

SEQ ID NO: 1575579 - DNA, 15 bp, Homo sapiens
taaagttatcaaagg

SEQ ID NO: 1575580 - DNA, 15 bp, Homo sapiens
ctaaagttatcaaag

SEQ ID NO: 1575581 - DNA, 15 bp, Homo sapiens
actaaagttatcaaa

SEQ ID NO: 1575582 - DNA, 15 bp, Homo sapiens
aactaaagttatcaa

SEQ ID NO: 1575583 - DNA, 15 bp, Homo sapiens
gaactaaagttatca

SEQ ID NO: 1575584 - DNA, 15 bp, Homo sapiens
cgaactaaagttatc

SEQ ID NO: 1575585 - DNA, 15 bp, Homo sapiens
tcgaactaaagttat

SEQ ID NO: 1575586 - DNA, 15 bp, Homo sapiens
atcgaactaaagtta

SEQ ID NO: 1575587 - DNA, 15 bp, Homo sapiens
catcgaactaaagtt

SEQ ID NO: 1575588 - DNA, 15 bp, Homo sapiens
acatcgaactaaagt

SEQ ID NO: 1575589 - DNA, 15 bp, Homo sapiens
aacatcgaactaaag

SEQ ID NO: 1575590 - DNA, 15 bp, Homo sapiens
aaacatcgaactaaa

SEQ ID NO: 1575591 - DNA, 15 bp, Homo sapiens
aaaacatcgaactaa

SEQ ID NO: 1575592 - DNA, 15 bp, Homo sapiens
aaaaacatcgaacta

SEQ ID NO: 1575593 - DNA, 15 bp, Homo sapiens
gaaaaacatcgaact

SEQ ID NO: 1575594 - DNA, 15 bp, Homo sapiens
agaaaaacatcgaac

SEQ ID NO: 1575595 - DNA, 15 bp, Homo sapiens
aagaaaaacatcgaa

SEQ ID NO: 1575596 - DNA, 15 bp, Homo sapiens
caagaaaaacatcga

SEQ ID NO: 1575597 - DNA, 15 bp, Homo sapiens
acaagaaaaacatcg

SEQ ID NO: 1575598 - DNA, 15 bp, Homo sapiens
aacaagaaaaacatc

SEQ ID NO: 1575599 - DNA, 15 bp, Homo sapiens
aaacaagaaaaacat

SEQ ID NO: 1575600 - DNA, 15 bp, Homo sapiens
aaaacaagaaaaaca

SEQ ID NO: 1575601 - DNA, 15 bp, Homo sapiens
aaaaacaagaaaaac

SEQ ID NO: 1575602 - DNA, 15 bp, Homo sapiens
caaaaacaagaaaaa

SEQ ID NO: 1575603 - DNA, 15 bp, Homo sapiens
acaaaaacaagaaaa

SEQ ID NO: 1575604 - DNA, 15 bp, Homo sapiens
aacaaaaacaagaaa

SEQ ID NO: 1575605 - DNA, 15 bp, Homo sapiens
aaacaaaaacaagaa

SEQ ID NO: 1575606 - DNA, 15 bp, Homo sapiens
caaacaaaaacaaga

SEQ ID NO: 1575607 - DNA, 15 bp, Homo sapiens
caacaaacaaaaaca

SEQ ID NO: 1575608 - DNA, 15 bp, Homo sapiens
ccaacaaacaaaaac

SEQ ID NO: 1575609 - DNA, 15 bp, Homo sapiens
accaacaaacaaaaa

SEQ ID NO: 1575610 - DNA, 15 bp, Homo sapiens
aaccaacaaacaaaa

SEQ ID NO: 1575611 - DNA, 15 bp, Homo sapiens
aaaccaacaaacaaa

SEQ ID NO: 1575612 - DNA, 15 bp, Homo sapiens
caaaccaacaaacaa

SEQ ID NO: 1575613 - DNA, 15 bp, Homo sapiens
ccaaaccaacaaaca

SEQ ID NO: 1575614 - DNA, 15 bp, Homo sapiens
accaaaccaacaaac

SEQ ID NO: 1575615 - DNA, 15 bp, Homo sapiens
caccaaaccaacaaa

SEQ ID NO: 1575616 - DNA, 15 bp, Homo sapiens
gcaccaaaccaacaa

SEQ ID NO: 1575617 - DNA, 15 bp, Homo sapiens
tgcaccaaaccaaca

SEQ ID NO: 1575618 - DNA, 15 bp, Homo sapiens
atgcaccaaaccaac

SEQ ID NO: 1575619 - DNA, 15 bp, Homo sapiens
tatgcaccaaaccaa

SEQ ID NO: 1575620 - DNA, 15 bp, Homo sapiens
atatgcaccaaacca

SEQ ID NO: 1575621 - DNA, 15 bp, Homo sapiens
catatgcaccaaacc

SEQ ID NO: 1575622 - DNA, 15 bp, Homo sapiens
tcatatgcaccaaac

SEQ ID NO: 1575623 - DNA, 15 bp, Homo sapiens
atcatatgcaccaaa

SEQ ID NO: 1575624 - DNA, 15 bp, Homo sapiens
tatcatatgcaccaa

SEQ ID NO: 1575625 - DNA, 15 bp, Homo sapiens
ctatcatatgcacca

SEQ ID NO: 1575626 - DNA, 15 bp, Homo sapiens
actatcatatgcacc

SEQ ID NO: 1575627 - DNA, 15 bp, Homo sapiens
cactatcatatgcac

SEQ ID NO: 1575628 - DNA, 15 bp, Homo sapiens
ccactatcatatgca

SEQ ID NO: 1575629 - DNA, 15 bp, Homo sapiens
cccactatcatatgc

SEQ ID NO: 1575630 - DNA, 15 bp, Homo sapiens
acccactatcatatg

SEQ ID NO: 1575631 - DNA, 15 bp, Homo sapiens
cacccactatcatat

SEQ ID NO: 1575632 - DNA, 15 bp, Homo sapiens
acacccactatcata

SEQ ID NO: 1575633 - DNA, 15 bp, Homo sapiens
aacacccactatcat

SEQ ID NO: 1575634 - DNA, 15 bp, Homo sapiens
taacacccactatca

SEQ ID NO: 1575635 - DNA, 15 bp, Homo sapiens
ataacacccactatc

SEQ ID NO: 1575636 - DNA, 15 bp, Homo sapiens
cataacacccactat

SEQ ID NO: 1575637 - DNA, 15 bp, Homo sapiens
gcataacacccacta

SEQ ID NO: 1575638 - DNA, 15 bp, Homo sapiens
agcataacacccact

SEQ ID NO: 1575639 - DNA, 15 bp, Homo sapiens
tagcataacacccac

SEQ ID NO: 1575640 - DNA, 15 bp, Homo sapiens
atagcataacaccca

SEQ ID NO: 1575641 - DNA, 15 bp, Homo sapiens
aatagcataacaccc

SEQ ID NO: 1575642 - DNA, 15 bp, Homo sapiens
aaatagcataacacc

SEQ ID NO: 1575643 - DNA, 15 bp, Homo sapiens
aaaatagcataacac

SEQ ID NO: 1575644 - DNA, 15 bp, Homo sapiens
caaaatagcataaca

SEQ ID NO: 1575645 - DNA, 15 bp, Homo sapiens
gcaaaatagcataac

SEQ ID NO: 1575646 - DNA, 15 bp, Homo sapiens
agcaaaatagcataa

SEQ ID NO: 1575647 - DNA, 15 bp, Homo sapiens
gagcaaaatagcata

SEQ ID NO: 1575648 - DNA, 15 bp, Homo sapiens
aagagcaaaatagca

SEQ ID NO: 1575649 - DNA, 15 bp, Homo sapiens
gaagagcaaaatagc

SEQ ID NO: 1575650 - DNA, 15 bp, Homo sapiens
gggaagagcaaaata

SEQ ID NO: 1575651 - DNA, 15 bp, Homo sapiens
tgggaagagcaaaat

SEQ ID NO: 1575652 - DNA, 15 bp, Homo sapiens
atgggaagagcaaaa

SEQ ID NO: 1575653 - DNA, 15 bp, Homo sapiens
gatgggaagagcaaa

SEQ ID NO: 1575654 - DNA, 15 bp, Homo sapiens
tgatgggaagagcaa

SEQ ID NO: 1575655 - DNA, 15 bp, Homo sapiens
ttgatgggaagagca

SEQ ID NO: 1575656 - DNA, 15 bp, Homo sapiens
tttgatgggaagagc

SEQ ID NO: 1575657 - DNA, 15 bp, Homo sapiens
ttttgatgggaagag

SEQ ID NO: 1575658 - DNA, 15 bp, Homo sapiens
attttgatgggaaga

SEQ ID NO: 1575659 - DNA, 15 bp, Homo sapiens
tattttgatgggaag

SEQ ID NO: 1575660 - DNA, 15 bp, Homo sapiens
ttattttgatgggaa

SEQ ID NO: 1575661 - DNA, 15 bp, Homo sapiens
tttattttgatggga

SEQ ID NO: 1575662 - DNA, 15 bp, Homo sapiens
ctttattttgatggg

SEQ ID NO: 1575663 - DNA, 15 bp, Homo sapiens
tctttattttgatgg

SEQ ID NO: 1575664 - DNA, 15 bp, Homo sapiens
ttctttattttgatg

SEQ ID NO: 1575665 - DNA, 15 bp, Homo sapiens
tttctttattttgat

SEQ ID NO: 1575666 - DNA, 15 bp, Homo sapiens
gtttctttattttga

SEQ ID NO: 1575667 - DNA, 15 bp, Homo sapiens
agtttctttattttg

SEQ ID NO: 1575668 - DNA, 15 bp, Homo sapiens
aagtttctttatttt

SEQ ID NO: 1575669 - DNA, 15 bp, Homo sapiens
gaagtttctttattt

SEQ ID NO: 1575670 - DNA, 15 bp, Homo sapiens
ggaagtttctttatt

SEQ ID NO: 1575671 - DNA, 15 bp, Homo sapiens
tggaagtttctttat

SEQ ID NO: 1575672 - DNA, 15 bp, Homo sapiens
ctggaagtttcttta

SEQ ID NO: 1575673 - DNA, 15 bp, Homo sapiens
tctggaagtttcttt

SEQ ID NO: 1575674 - DNA, 15 bp, Homo sapiens
ctctggaagtttctt

SEQ ID NO: 1575675 - DNA, 15 bp, Homo sapiens
cctctggaagtttct

SEQ ID NO: 1575676 - DNA, 15 bp, Homo sapiens
acctctggaagtttc

SEQ ID NO: 1575677 - DNA, 15 bp, Homo sapiens
aacctctggaagttt

SEQ ID NO: 1575678 - DNA, 15 bp, Homo sapiens
aaacctctggaagtt

SEQ ID NO: 1575679 - DNA, 15 bp, Homo sapiens
taaacctctggaagt

SEQ ID NO: 1575680 - DNA, 15 bp, Homo sapiens
gtaaacctctggaag

SEQ ID NO: 1575681 - DNA, 15 bp, Homo sapiens
agtaaacctctggaa

SEQ ID NO: 1575682 - DNA, 15 bp, Homo sapiens
cagtaaacctctgga

SEQ ID NO: 1575683 - DNA, 15 bp, Homo sapiens
acagtaaacctctgg

SEQ ID NO: 1575684 - DNA, 15 bp, Homo sapiens
aacagtaaacctctg

SEQ ID NO: 1575685 - DNA, 15 bp, Homo sapiens
taacagtaaacctct

SEQ ID NO: 1575686 - DNA, 15 bp, Homo sapiens
ttaacagtaaacctc

SEQ ID NO: 1575687 - DNA, 15 bp, Homo sapiens
tttaacagtaaacct

SEQ ID NO: 1575688 - DNA, 15 bp, Homo sapiens
ttttaacagtaaacc

SEQ ID NO: 1575689 - DNA, 15 bp, Homo sapiens
tttttaacagtaaac

SEQ ID NO: 1575690 - DNA, 15 bp, Homo sapiens
atttttaacagtaaa

SEQ ID NO: 1575691 - DNA, 15 bp, Homo sapiens
tatttttaacagtaa

SEQ ID NO: 1575692 - DNA, 15 bp, Homo sapiens
gtatttttaacagta

SEQ ID NO: 1575693 - DNA, 15 bp, Homo sapiens
agtatttttaacagt

SEQ ID NO: 1575694 - DNA, 15 bp, Homo sapiens
cagtatttttaacag

SEQ ID NO: 1575695 - DNA, 15 bp, Homo sapiens
tcagtatttttaaca

SEQ ID NO: 1575696 - DNA, 15 bp, Homo sapiens
atcagtatttttaac

SEQ ID NO: 1575697 - DNA, 15 bp, Homo sapiens
tatcagtatttttaa

SEQ ID NO: 1575698 - DNA, 15 bp, Homo sapiens
atatcagtattttta

SEQ ID NO: 1575699 - DNA, 15 bp, Homo sapiens
aatatcagtattttt

SEQ ID NO: 1575700 - DNA, 15 bp, Homo sapiens
aaatatcagtatttt

SEQ ID NO: 1575701 - DNA, 15 bp, Homo sapiens
gaaatatcagtattt

SEQ ID NO: 1575702 - DNA, 15 bp, Homo sapiens
ggaaatatcagtatt

SEQ ID NO: 1575703 - DNA, 15 bp, Homo sapiens
tggaaatatcagtat

SEQ ID NO: 1575704 - DNA, 15 bp, Homo sapiens
atggaaatatcagta

SEQ ID NO: 1575705 - DNA, 15 bp, Homo sapiens
tatggaaatatcagt

SEQ ID NO: 1575706 - DNA, 15 bp, Homo sapiens
ttatggaaatatcag

SEQ ID NO: 1575707 - DNA, 15 bp, Homo sapiens
tttatggaaatatca

SEQ ID NO: 1575708 - DNA, 15 bp, Homo sapiens
gtttatggaaatatc

SEQ ID NO: 1575709 - DNA, 15 bp, Homo sapiens
cgtttatggaaatat

SEQ ID NO: 1575710 - DNA, 15 bp, Homo sapiens
ccgtttatggaaata

SEQ ID NO: 1575711 - DNA, 15 bp, Homo sapiens
cccgtttatggaaat

SEQ ID NO: 1575712 - DNA, 15 bp, Homo sapiens
acccgtttatggaaa

SEQ ID NO: 1575713 - DNA, 15 bp, Homo sapiens
aacccgtttatggaa

SEQ ID NO: 1575714 - DNA, 15 bp, Homo sapiens
aaacccgtttatgga

SEQ ID NO: 1575715 - DNA, 15 bp, Homo sapiens
taaacccgtttatgg

SEQ ID NO: 1575716 - DNA, 15 bp, Homo sapiens
gtaaacccgtttatg

SEQ ID NO: 1575717 - DNA, 15 bp, Homo sapiens
ggtaaacccgtttat

SEQ ID NO: 1575718 - DNA, 15 bp, Homo sapiens
tggtaaacccgttta

SEQ ID NO: 1575719 - DNA, 15 bp, Homo sapiens
ttggtaaacccgttt

SEQ ID NO: 1575720 - DNA, 15 bp, Homo sapiens
cttggtaaacccgtt

SEQ ID NO: 1575721 - DNA, 15 bp, Homo sapiens
ccttggtaaacccgt

SEQ ID NO: 1575722 - DNA, 15 bp, Homo sapiens
cccttggtaaacccg

SEQ ID NO: 1575723 - DNA, 15 bp, Homo sapiens
acccttggtaaaccc

SEQ ID NO: 1575724 - DNA, 15 bp, Homo sapiens
cacccttggtaaacc

SEQ ID NO: 1575725 - DNA, 15 bp, Homo sapiens
acacccttggtaaac

SEQ ID NO: 1575726 - DNA, 15 bp, Homo sapiens
tacacccttggtaaa

SEQ ID NO: 1575727 - DNA, 15 bp, Homo sapiens
ctacacccttggtaa

SEQ ID NO: 1575728 - DNA, 15 bp, Homo sapiens
actacacccttggta

SEQ ID NO: 1575729 - DNA, 15 bp, Homo sapiens
tactacacccttggt

SEQ ID NO: 1575730 - DNA, 15 bp, Homo sapiens
atactacacccttgg

SEQ ID NO: 1575731 - DNA, 15 bp, Homo sapiens
aatactacacccttg

SEQ ID NO: 1575732 - DNA, 15 bp, Homo sapiens
aaatactacaccctt

SEQ ID NO: 1575733 - DNA, 15 bp, Homo sapiens
gaaatactacaccct

SEQ ID NO: 1575734 - DNA, 15 bp, Homo sapiens
tgaaatactacaccc

SEQ ID NO: 1575735 - DNA, 15 bp, Homo sapiens
atgaaatactacacc

SEQ ID NO: 1575736 - DNA, 15 bp, Homo sapiens
tatgaaatactacac

SEQ ID NO: 1575737 - DNA, 15 bp, Homo sapiens
gtatgaaatactaca

SEQ ID NO: 1575738 - DNA, 15 bp, Homo sapiens
ggtatgaaatactac

SEQ ID NO: 1575739 - DNA, 15 bp, Homo sapiens
cggtatgaaatacta

SEQ ID NO: 1575740 - DNA, 15 bp, Homo sapiens
gcggtatgaaatact

SEQ ID NO: 1575741 - DNA, 15 bp, Homo sapiens
ggcggtatgaaatac

SEQ ID NO: 1575742 - DNA, 15 bp, Homo sapiens
aggcggtatgaaata

SEQ ID NO: 1575743 - DNA, 15 bp, Homo sapiens
caggcggtatgaaat

SEQ ID NO: 1575744 - DNA, 15 bp, Homo sapiens
tcaggcggtatgaaa

SEQ ID NO: 1575745 - DNA, 15 bp, Homo sapiens
ttcaggcggtatgaa

SEQ ID NO: 1575746 - DNA, 15 bp, Homo sapiens
tttcaggcggtatga

SEQ ID NO: 1575747 - DNA, 15 bp, Homo sapiens
atttcaggcggtatg

SEQ ID NO: 1575748 - DNA, 15 bp, Homo sapiens
catttcaggcggtat

SEQ ID NO: 1575749 - DNA, 15 bp, Homo sapiens
tcatttcaggcggta

SEQ ID NO: 1575750 - DNA, 15 bp, Homo sapiens
atcatttcaggcggt

SEQ ID NO: 1575751 - DNA, 15 bp, Homo sapiens
gatcatttcaggcgg

SEQ ID NO: 1575752 - DNA, 15 bp, Homo sapiens
tgatcatttcaggcg

SEQ ID NO: 1575753 - DNA, 15 bp, Homo sapiens
ctgatcatttcaggc

SEQ ID NO: 1575754 - DNA, 15 bp, Homo sapiens
gctgatcatttcagg

SEQ ID NO: 1575755 - DNA, 15 bp, Homo sapiens
tgctgatcatttcag

SEQ ID NO: 1575756 - DNA, 15 bp, Homo sapiens
atgctgatcatttca

SEQ ID NO: 1575757 - DNA, 15 bp, Homo sapiens
aatgctgatcatttc

SEQ ID NO: 1575758 - DNA, 15 bp, Homo sapiens
caatgctgatcattt

SEQ ID NO: 1575759 - DNA, 15 bp, Homo sapiens
ccaatgctgatcatt

SEQ ID NO: 1575760 - DNA, 15 bp, Homo sapiens
gccaatgctgatcat

SEQ ID NO: 1575761 - DNA, 15 bp, Homo sapiens
tgccaatgctgatca

SEQ ID NO: 1575762 - DNA, 15 bp, Homo sapiens
gtgccaatgctgatc

SEQ ID NO: 1575763 - DNA, 15 bp, Homo sapiens
tgtgccaatgctgat

SEQ ID NO: 1575764 - DNA, 15 bp, Homo sapiens
ttgtgccaatgctga

SEQ ID NO: 1575765 - DNA, 15 bp, Homo sapiens
tttgtgccaatgctg

SEQ ID NO: 1575766 - DNA, 15 bp, Homo sapiens
atttgtgccaatgct

SEQ ID NO: 1575767 - DNA, 15 bp, Homo sapiens
gatttgtgccaatgc

SEQ ID NO: 1575768 - DNA, 15 bp, Homo sapiens
tgatttgtgccaatg

SEQ ID NO: 1575769 - DNA, 15 bp, Homo sapiens
ttgatttgtgccaat

SEQ ID NO: 1575770 - DNA, 15 bp, Homo sapiens
tttgatttgtgccaa

SEQ ID NO: 1575771 - DNA, 15 bp, Homo sapiens
ttttgatttgtgcca

SEQ ID NO: 1575772 - DNA, 15 bp, Homo sapiens
attttgatttgtgcc

SEQ ID NO: 1575773 - DNA, 15 bp, Homo sapiens
aattttgatttgtgc

SEQ ID NO: 1575774 - DNA, 15 bp, Homo sapiens
gaattttgatttgtg

SEQ ID NO: 1575775 - DNA, 15 bp, Homo sapiens
tgaattttgatttgt

SEQ ID NO: 1575776 - DNA, 15 bp, Homo sapiens
ctgaattttgatttg

SEQ ID NO: 1575777 - DNA, 15 bp, Homo sapiens
gctgaattttgattt

SEQ ID NO: 1575778 - DNA, 15 bp, Homo sapiens
ggctgaattttgatt

SEQ ID NO: 1575779 - DNA, 15 bp, Homo sapiens
cggctgaattttgat

SEQ ID NO: 1575780 - DNA, 15 bp, Homo sapiens
gcggctgaattttga

SEQ ID NO: 1575781 - DNA, 15 bp, Homo sapiens
ggcggctgaattttg

SEQ ID NO: 1575782 - DNA, 15 bp, Homo sapiens
aggcggctgaatttt

SEQ ID NO: 1575783 - DNA, 15 bp, Homo sapiens
aaggcggctgaattt

SEQ ID NO: 1575784 - DNA, 15 bp, Homo sapiens
aaaggcggctgaatt

SEQ ID NO: 1575785 - DNA, 15 bp, Homo sapiens
caaaggcggctgaat

SEQ ID NO: 1575786 - DNA, 15 bp, Homo sapiens
tcaaaggcggctgaa

SEQ ID NO: 1575787 - DNA, 15 bp, Homo sapiens
ttcaaaggcggctga

SEQ ID NO: 1575788 - DNA, 15 bp, Homo sapiens
tttcaaaggcggctg

SEQ ID NO: 1575789 - DNA, 15 bp, Homo sapiens
atttcaaaggcggct

SEQ ID NO: 1575790 - DNA, 15 bp, Homo sapiens
catttcaaaggcggc

SEQ ID NO: 1575791 - DNA, 15 bp, Homo sapiens
gcatttcaaaggcgg

SEQ ID NO: 1575792 - DNA, 15 bp, Homo sapiens
tgcatttcaaaggcg

SEQ ID NO: 1575793 - DNA, 15 bp, Homo sapiens
ttgcatttcaaaggc

SEQ ID NO: 1575794 - DNA, 15 bp, Homo sapiens
tttgcatttcaaagg

SEQ ID NO: 1575795 - DNA, 15 bp, Homo sapiens
ttttgcatttcaaag

SEQ ID NO: 1575796 - DNA, 15 bp, Homo sapiens
tttttgcatttcaaa

SEQ ID NO: 1575797 - DNA, 15 bp, Homo sapiens
atttttgcatttcaa

SEQ ID NO: 1575798 - DNA, 15 bp, Homo sapiens
tatttttgcatttca

SEQ ID NO: 1575799 - DNA, 15 bp, Homo sapiens
gtatttttgcatttc

SEQ ID NO: 1575800 - DNA, 15 bp, Homo sapiens
ggtatttttgcattt

SEQ ID NO: 1575801 - DNA, 15 bp, Homo sapiens
aggtatttttgcatt

SEQ ID NO: 1575802 - DNA, 15 bp, Homo sapiens
aaggtatttttgcat

SEQ ID NO: 1575803 - DNA, 15 bp, Homo sapiens
aaaggtatttttgca

SEQ ID NO: 1575804 - DNA, 15 bp, Homo sapiens
caaaggtatttttgc

SEQ ID NO: 1575805 - DNA, 15 bp, Homo sapiens
tcaaaggtatttttg

SEQ ID NO: 1575806 - DNA, 15 bp, Homo sapiens
gtcaaaggtattttt

SEQ ID NO: 1575807 - DNA, 15 bp, Homo sapiens
agtcaaaggtatttt

SEQ ID NO: 1575808 - DNA, 15 bp, Homo sapiens
tagtcaaaggtattt

SEQ ID NO: 1575809 - DNA, 15 bp, Homo sapiens
ctagtcaaaggtatt

SEQ ID NO: 1575810 - DNA, 15 bp, Homo sapiens
actagtcaaaggtat

SEQ ID NO: 1575811 - DNA, 15 bp, Homo sapiens
tactagtcaaaggta

SEQ ID NO: 1575812 - DNA, 15 bp, Homo sapiens
ttactagtcaaaggt

SEQ ID NO: 1575813 - DNA, 15 bp, Homo sapiens
cttactagtcaaagg

SEQ ID NO: 1575814 - DNA, 15 bp, Homo sapiens
acttactagtcaaag

SEQ ID NO: 1575815 - DNA, 15 bp, Homo sapiens
tacttactagtcaaa

SEQ ID NO: 1575816 - DNA, 15 bp, Homo sapiens
gtacttactagtcaa

SEQ ID NO: 1575817 - DNA, 15 bp, Homo sapiens
tgtacttactagtca

SEQ ID NO: 1575818 - DNA, 15 bp, Homo sapiens
atgtacttactagtc

SEQ ID NO: 1575819 - DNA, 15 bp, Homo sapiens
gatgtacttactagt

SEQ ID NO: 1575820 - DNA, 15 bp, Homo sapiens
ggatgtacttactag

SEQ ID NO: 1575821 - DNA, 15 bp, Homo sapiens
aggatgtacttacta

SEQ ID NO: 1575822 - DNA, 15 bp, Homo sapiens
taggatgtacttact

SEQ ID NO: 1575823 - DNA, 15 bp, Homo sapiens
ctaggatgtacttac

SEQ ID NO: 1575824 - DNA, 15 bp, Homo sapiens
cctaggatgtactta

SEQ ID NO: 1575825 - DNA, 15 bp, Homo sapiens
tcctaggatgtactt

SEQ ID NO: 1575826 - DNA, 15 bp, Homo sapiens
ctcctaggatgtact

SEQ ID NO: 1575827 - DNA, 15 bp, Homo sapiens
actcctaggatgtac

SEQ ID NO: 1575828 - DNA, 15 bp, Homo sapiens
aactcctaggatgta

SEQ ID NO: 1575829 - DNA, 15 bp, Homo sapiens
aaactcctaggatgt

SEQ ID NO: 1575830 - DNA, 15 bp, Homo sapiens
caaactcctaggatg

SEQ ID NO: 1575831 - DNA, 15 bp, Homo sapiens
tcaaactcctaggat

SEQ ID NO: 1575832 - DNA, 15 bp, Homo sapiens
ttcaaactcctagga

SEQ ID NO: 1575833 - DNA, 15 bp, Homo sapiens
tttcaaactcctagg

SEQ ID NO: 1575834 - DNA, 15 bp, Homo sapiens
ttttcaaactcctag

SEQ ID NO: 1575835 - DNA, 15 bp, Homo sapiens
gttttcaaactccta

SEQ ID NO: 1575836 - DNA, 15 bp, Homo sapiens
agttttcaaactcct

SEQ ID NO: 1575837 - DNA, 15 bp, Homo sapiens
aagttttcaaactcc

SEQ ID NO: 1575838 - DNA, 15 bp, Homo sapiens
taagttttcaaactc

SEQ ID NO: 1575839 - DNA, 15 bp, Homo sapiens
ttaagttttcaaact

SEQ ID NO: 1575840 - DNA, 15 bp, Homo sapiens
gttaagttttcaaac

SEQ ID NO: 1575841 - DNA, 15 bp, Homo sapiens
agttaagttttcaaa

SEQ ID NO: 1575842 - DNA, 15 bp, Homo sapiens
tagttaagttttcaa

SEQ ID NO: 1575843 - DNA, 15 bp, Homo sapiens
ttagttaagttttca

SEQ ID NO: 1575844 - DNA, 15 bp, Homo sapiens
cttagttaagttttc

SEQ ID NO: 1575845 - DNA, 15 bp, Homo sapiens
ccttagttaagtttt

SEQ ID NO: 1575846 - DNA, 15 bp, Homo sapiens
accttagttaagttt

SEQ ID NO: 1575847 - DNA, 15 bp, Homo sapiens
aaccttagttaagtt

SEQ ID NO: 1575848 - DNA, 15 bp, Homo sapiens
aaaccttagttaagt

SEQ ID NO: 1575849 - DNA, 15 bp, Homo sapiens
taaaccttagttaag

SEQ ID NO: 1575850 - DNA, 15 bp, Homo sapiens
ttaaaccttagttaa

SEQ ID NO: 1575851 - DNA, 15 bp, Homo sapiens
tttaaaccttagtta

SEQ ID NO: 1575852 - DNA, 15 bp, Homo sapiens
ttttaaaccttagtt

SEQ ID NO: 1575853 - DNA, 15 bp, Homo sapiens
attttaaaccttagt

SEQ ID NO: 1575854 - DNA, 15 bp, Homo sapiens
aattttaaaccttag

SEQ ID NO: 1575855 - DNA, 15 bp, Homo sapiens
aaattttaaacctta

SEQ ID NO: 1575856 - DNA, 15 bp, Homo sapiens
taaattttaaacctt

SEQ ID NO: 1575857 - DNA, 15 bp, Homo sapiens
gtaaattttaaacct

SEQ ID NO: 1575858 - DNA, 15 bp, Homo sapiens
ggtaaattttaaacc

SEQ ID NO: 1575859 - DNA, 15 bp, Homo sapiens
aggtaaattttaaac

SEQ ID NO: 1575860 - DNA, 15 bp, Homo sapiens
aaggtaaattttaaa

SEQ ID NO: 1575861 - DNA, 15 bp, Homo sapiens
caaggtaaattttaa

SEQ ID NO: 1575862 - DNA, 15 bp, Homo sapiens
acaaggtaaatttta

SEQ ID NO: 1575863 - DNA, 15 bp, Homo sapiens
aacaaggtaaatttt

SEQ ID NO: 1575864 - DNA, 15 bp, Homo sapiens
aaacaaggtaaattt

SEQ ID NO: 1575865 - DNA, 15 bp, Homo sapiens
taaacaaggtaaatt

SEQ ID NO: 1575866 - DNA, 15 bp, Homo sapiens
ttaaacaaggtaaat

SEQ ID NO: 1575867 - DNA, 15 bp, Homo sapiens
tttaaacaaggtaaa

SEQ ID NO: 1575868 - DNA, 15 bp, Homo sapiens
ctttaaacaaggtaa

SEQ ID NO: 1575869 - DNA, 15 bp, Homo sapiens
tctttaaacaaggta

SEQ ID NO: 1575870 - DNA, 15 bp, Homo sapiens
ttctttaaacaaggt

SEQ ID NO: 1575871 - DNA, 15 bp, Homo sapiens
gttctttaaacaagg

SEQ ID NO: 1575872 - DNA, 15 bp, Homo sapiens
agttctttaaacaag

SEQ ID NO: 1575873 - DNA, 15 bp, Homo sapiens
aagttctttaaacaa

SEQ ID NO: 1575874 - DNA, 15 bp, Homo sapiens
gaagttctttaaaca

SEQ ID NO: 1575875 - DNA, 15 bp, Homo sapiens
agaagttctttaaac

SEQ ID NO: 1575876 - DNA, 15 bp, Homo sapiens
cagaagttctttaaa

SEQ ID NO: 1575877 - DNA, 15 bp, Homo sapiens
tcagaagttctttaa

SEQ ID NO: 1575878 - DNA, 15 bp, Homo sapiens
gtcagaagttcttta

SEQ ID NO: 1575879 - DNA, 15 bp, Homo sapiens
agtcagaagttcttt

SEQ ID NO: 1575880 - DNA, 15 bp, Homo sapiens
aagtcagaagttctt

SEQ ID NO: 1575881 - DNA, 15 bp, Homo sapiens
aaagtcagaagttct

SEQ ID NO: 1575882 - DNA, 15 bp, Homo sapiens
aaaagtcagaagttc

SEQ ID NO: 1575883 - DNA, 15 bp, Homo sapiens
caaaagtcagaagtt

SEQ ID NO: 1575884 - DNA, 15 bp, Homo sapiens
tcaaaagtcagaagt

SEQ ID NO: 1575885 - DNA, 15 bp, Homo sapiens
ctcaaaagtcagaag

SEQ ID NO: 1575886 - DNA, 15 bp, Homo sapiens
cctcaaaagtcagaa

SEQ ID NO: 1575887 - DNA, 15 bp, Homo sapiens
tcctcaaaagtcaga

SEQ ID NO: 1575888 - DNA, 15 bp, Homo sapiens
ttcctcaaaagtcag

SEQ ID NO: 1575889 - DNA, 15 bp, Homo sapiens
tttcctcaaaagtca

SEQ ID NO: 1575890 - DNA, 15 bp, Homo sapiens
ttttcctcaaaagtc

SEQ ID NO: 1575891 - DNA, 15 bp, Homo sapiens
attttcctcaaaagt

SEQ ID NO: 1575892 - DNA, 15 bp, Homo sapiens
gattttcctcaaaag

SEQ ID NO: 1575893 - DNA, 15 bp, Homo sapiens
agattttcctcaaaa

SEQ ID NO: 1575894 - DNA, 15 bp, Homo sapiens
tagattttcctcaaa

SEQ ID NO: 1575895 - DNA, 15 bp, Homo sapiens
ctagattttcctcaa

SEQ ID NO: 1575896 - DNA, 15 bp, Homo sapiens
gctagattttcctca

SEQ ID NO: 1575897 - DNA, 15 bp, Homo sapiens
agctagattttcctc

SEQ ID NO: 1575898 - DNA, 15 bp, Homo sapiens
aagctagattttcct

SEQ ID NO: 1575899 - DNA, 15 bp, Homo sapiens
aaagctagattttcc

SEQ ID NO: 1575900 - DNA, 15 bp, Homo sapiens
gaaagctagattttc

SEQ ID NO: 1575901 - DNA, 15 bp, Homo sapiens
ggaaagctagatttt

SEQ ID NO: 1575902 - DNA, 15 bp, Homo sapiens
tggaaagctagattt

SEQ ID NO: 1575903 - DNA, 15 bp, Homo sapiens
ttggaaagctagatt

SEQ ID NO: 1575904 - DNA, 15 bp, Homo sapiens
cttggaaagctagat

SEQ ID NO: 1575905 - DNA, 15 bp, Homo sapiens
acttggaaagctaga

SEQ ID NO: 1575906 - DNA, 15 bp, Homo sapiens
tacttggaaagctag

SEQ ID NO: 1575907 - DNA, 15 bp, Homo sapiens
ttacttggaaagcta

SEQ ID NO: 1575908 - DNA, 15 bp, Homo sapiens
gttacttggaaagct

SEQ ID NO: 1575909 - DNA, 15 bp, Homo sapiens
agttacttggaaagc

SEQ ID NO: 1575910 - DNA, 15 bp, Homo sapiens
tagttacttggaaag

SEQ ID NO: 1575911 - DNA, 15 bp, Homo sapiens
ttagttacttggaaa

SEQ ID NO: 1575912 - DNA, 15 bp, Homo sapiens
tttagttacttggaa

SEQ ID NO: 1575913 - DNA, 15 bp, Homo sapiens
ttttagttacttgga

SEQ ID NO: 1575914 - DNA, 15 bp, Homo sapiens
attttagttacttgg

SEQ ID NO: 1575915 - DNA, 15 bp, Homo sapiens
cattttagttacttg

SEQ ID NO: 1575916 - DNA, 15 bp, Homo sapiens
acattttagttactt

SEQ ID NO: 1575917 - DNA, 15 bp, Homo sapiens
tacattttagttact

SEQ ID NO: 1575918 - DNA, 15 bp, Homo sapiens
gtacattttagttac

SEQ ID NO: 1575919 - DNA, 15 bp, Homo sapiens
tgtacattttagtta

SEQ ID NO: 1575920 - DNA, 15 bp, Homo sapiens
atgtacattttagtt

SEQ ID NO: 1575921 - DNA, 15 bp, Homo sapiens
catgtacattttagt

SEQ ID NO: 1575922 - DNA, 15 bp, Homo sapiens
tcatgtacattttag

SEQ ID NO: 1575923 - DNA, 15 bp, Homo sapiens
ctcatgtacatttta

SEQ ID NO: 1575924 - DNA, 15 bp, Homo sapiens
tctcatgtacatttt

SEQ ID NO: 1575925 - DNA, 15 bp, Homo sapiens
atctcatgtacattt

SEQ ID NO: 1575926 - DNA, 15 bp, Homo sapiens
tatctcatgtacatt

SEQ ID NO: 1575927 - DNA, 15 bp, Homo sapiens
ttatctcatgtacat

SEQ ID NO: 1575928 - DNA, 15 bp, Homo sapiens
tttatctcatgtaca

SEQ ID NO: 1575929 - DNA, 15 bp, Homo sapiens
gtttatctcatgtac

SEQ ID NO: 1575930 - DNA, 15 bp, Homo sapiens
ggtttatctcatgta

SEQ ID NO: 1575931 - DNA, 15 bp, Homo sapiens
aggtttatctcatgt

SEQ ID NO: 1575932 - DNA, 15 bp, Homo sapiens
gaggtttatctcatg

SEQ ID NO: 1575933 - DNA, 15 bp, Homo sapiens
agaggtttatctcat

SEQ ID NO: 1575934 - DNA, 15 bp, Homo sapiens
gagaggtttatctca

SEQ ID NO: 1575935 - DNA, 15 bp, Homo sapiens
tgagaggtttatctc

SEQ ID NO: 1575936 - DNA, 15 bp, Homo sapiens
gtgagaggtttatct

SEQ ID NO: 1575937 - DNA, 15 bp, Homo sapiens
ggtgagaggtttatc

SEQ ID NO: 1575938 - DNA, 15 bp, Homo sapiens
tggtgagaggtttat

SEQ ID NO: 1575939 - DNA, 15 bp, Homo sapiens
gtggtgagaggttta

SEQ ID NO: 1575940 - DNA, 15 bp, Homo sapiens
agtggtgagaggttt

SEQ ID NO: 1575941 - DNA, 15 bp, Homo sapiens
tagtggtgagaggtt

SEQ ID NO: 1575942 - DNA, 15 bp, Homo sapiens
atagtggtgagaggt

SEQ ID NO: 1575943 - DNA, 15 bp, Homo sapiens
catagtggtgagagg

SEQ ID NO: 1575944 - DNA, 15 bp, Homo sapiens
acatagtggtgagag

SEQ ID NO: 1575945 - DNA, 15 bp, Homo sapiens
cacatagtggtgaga

SEQ ID NO: 1575946 - DNA, 15 bp, Homo sapiens
acacatagtggtgag

SEQ ID NO: 1575947 - DNA, 15 bp, Homo sapiens
gacacatagtggtga

SEQ ID NO: 1575948 - DNA, 15 bp, Homo sapiens
ggacacatagtggtg

SEQ ID NO: 1575949 - DNA, 15 bp, Homo sapiens
gggacacatagtggt

SEQ ID NO: 1575950 - DNA, 15 bp, Homo sapiens
agggacacatagtgg

SEQ ID NO: 1575951 - DNA, 15 bp, Homo sapiens
aagggacacatagtg

SEQ ID NO: 1575952 - DNA, 15 bp, Homo sapiens
caagggacacatagt

SEQ ID NO: 1575953 - DNA, 15 bp, Homo sapiens
tcaagggacacatag

SEQ ID NO: 1575954 - DNA, 15 bp, Homo sapiens
ctcaagggacacata

SEQ ID NO: 1575955 - DNA, 15 bp, Homo sapiens
tctcaagggacacat

SEQ ID NO: 1575956 - DNA, 15 bp, Homo sapiens
ttctcaagggacaca

SEQ ID NO: 1575957 - DNA, 15 bp, Homo sapiens
tttctcaagggacac

SEQ ID NO: 1575958 - DNA, 15 bp, Homo sapiens
atttctcaagggaca

SEQ ID NO: 1575959 - DNA, 15 bp, Homo sapiens
catttctcaagggac

SEQ ID NO: 1575960 - DNA, 15 bp, Homo sapiens
gcatttctcaaggga

SEQ ID NO: 1575961 - DNA, 15 bp, Homo sapiens
tgcatttctcaaggg

SEQ ID NO: 1575962 - DNA, 15 bp, Homo sapiens
ttgcatttctcaagg

SEQ ID NO: 1575963 - DNA, 15 bp, Homo sapiens
gttgcatttctcaag

SEQ ID NO: 1575964 - DNA, 15 bp, Homo sapiens
tgttgcatttctcaa

SEQ ID NO: 1575965 - DNA, 15 bp, Homo sapiens
gtgttgcatttctca

SEQ ID NO: 1575966 - DNA, 15 bp, Homo sapiens
agtgttgcatttctc

SEQ ID NO: 1575967 - DNA, 15 bp, Homo sapiens
aagtgttgcatttct

SEQ ID NO: 1575968 - DNA, 15 bp, Homo sapiens
aaagtgttgcatttc

SEQ ID NO: 1575969 - DNA, 15 bp, Homo sapiens
aaaagtgttgcattt

SEQ ID NO: 1575970 - DNA, 15 bp, Homo sapiens
aaaaagtgttgcatt

SEQ ID NO: 1575971 - DNA, 15 bp, Homo sapiens
aaaaaagtgttgcat

SEQ ID NO: 1575972 - DNA, 15 bp, Homo sapiens
taaaaaagtgttgca

SEQ ID NO: 1575973 - DNA, 15 bp, Homo sapiens
ctaaaaaagtgttgc

SEQ ID NO: 1575974 - DNA, 15 bp, Homo sapiens
actaaaaaagtgttg

SEQ ID NO: 1575975 - DNA, 15 bp, Homo sapiens
gactaaaaaagtgtt

SEQ ID NO: 1575976 - DNA, 15 bp, Homo sapiens
agactaaaaaagtgt

SEQ ID NO: 1575977 - DNA, 15 bp, Homo sapiens
aagactaaaaaagtg

SEQ ID NO: 1575978 - DNA, 15 bp, Homo sapiens
gaagactaaaaaagt

SEQ ID NO: 1575979 - DNA, 15 bp, Homo sapiens
tgaagactaaaaaag

SEQ ID NO: 1575980 - DNA, 15 bp, Homo sapiens
atgaagactaaaaaa

SEQ ID NO: 1575981 - DNA, 15 bp, Homo sapiens
tatgaagactaaaaa

SEQ ID NO: 1575982 - DNA, 15 bp, Homo sapiens
gtatgaagactaaaa

SEQ ID NO: 1575983 - DNA, 15 bp, Homo sapiens
agtatgaagactaaa

SEQ ID NO: 1575984 - DNA, 15 bp, Homo sapiens
aagtatgaagactaa

SEQ ID NO: 1575985 - DNA, 15 bp, Homo sapiens
caagtatgaagacta

SEQ ID NO: 1575986 - DNA, 15 bp, Homo sapiens
acaagtatgaagact

SEQ ID NO: 1575987 - DNA, 15 bp, Homo sapiens
tacaagtatgaagac

SEQ ID NO: 1575988 - DNA, 15 bp, Homo sapiens
ttacaagtatgaaga

SEQ ID NO: 1575989 - DNA, 15 bp, Homo sapiens
attacaagtatgaag

SEQ ID NO: 1575990 - DNA, 15 bp, Homo sapiens
gattacaagtatgaa

SEQ ID NO: 1575991 - DNA, 15 bp, Homo sapiens
agattacaagtatga

SEQ ID NO: 1575992 - DNA, 15 bp, Homo sapiens
tagattacaagtatg

SEQ ID NO: 1575993 - DNA, 15 bp, Homo sapiens
atagattacaagtat

SEQ ID NO: 1575994 - DNA, 15 bp, Homo sapiens
tatagattacaagta

SEQ ID NO: 1575995 - DNA, 15 bp, Homo sapiens
ttatagattacaagt

SEQ ID NO: 1575996 - DNA, 15 bp, Homo sapiens
tttatagattacaag

SEQ ID NO: 1575997 - DNA, 15 bp, Homo sapiens
ttttatagattacaa

SEQ ID NO: 1575998 - DNA, 15 bp, Homo sapiens
cttttatagattaca

SEQ ID NO: 1575999 - DNA, 15 bp, Homo sapiens
tcttttatagattac

SEQ ID NO: 1576000 - DNA, 15 bp, Homo sapiens
ttcttttatagatta

SEQ ID NO: 1576001 - DNA, 15 bp, Homo sapiens
tttcttttatagatt

SEQ ID NO: 1576002 - DNA, 15 bp, Homo sapiens
atttcttttatagat

SEQ ID NO: 1576003 - DNA, 15 bp, Homo sapiens
aatttcttttataga

SEQ ID NO: 1576004 - DNA, 15 bp, Homo sapiens
gaatttcttttatag

SEQ ID NO: 1576005 - DNA, 15 bp, Homo sapiens
agaatttcttttata

SEQ ID NO: 1576006 - DNA, 15 bp, Homo sapiens
cagaatttcttttat

SEQ ID NO: 1576007 - DNA, 15 bp, Homo sapiens
tcagaatttctttta

SEQ ID NO: 1576008 - DNA, 15 bp, Homo sapiens
ttcagaatttctttt

SEQ ID NO: 1576009 - DNA, 15 bp, Homo sapiens
cttcagaatttcttt

SEQ ID NO: 1576010 - DNA, 15 bp, Homo sapiens
acttcagaatttctt

SEQ ID NO: 1576011 - DNA, 15 bp, Homo sapiens
aacttcagaatttct

SEQ ID NO: 1576012 - DNA, 15 bp, Homo sapiens
aaacttcagaatttc

SEQ ID NO: 1576013 - DNA, 15 bp, Homo sapiens
taaacttcagaattt

SEQ ID NO: 1576014 - DNA, 15 bp, Homo sapiens
ctaaacttcagaatt

SEQ ID NO: 1576015 - DNA, 15 bp, Homo sapiens
tctaaacttcagaat

SEQ ID NO: 1576016 - DNA, 15 bp, Homo sapiens
gtctaaacttcagaa

SEQ ID NO: 1576017 - DNA, 15 bp, Homo sapiens
ggtctaaacttcaga

SEQ ID NO: 1576018 - DNA, 15 bp, Homo sapiens
tggtctaaacttcag

SEQ ID NO: 1576019 - DNA, 15 bp, Homo sapiens
ttggtctaaacttca

SEQ ID NO: 1576020 - DNA, 15 bp, Homo sapiens
cttggtctaaacttc

SEQ ID NO: 1576021 - DNA, 15 bp, Homo sapiens
acttggtctaaactt

SEQ ID NO: 1576022 - DNA, 15 bp, Homo sapiens
aacttggtctaaact

SEQ ID NO: 1576023 - DNA, 15 bp, Homo sapiens
caacttggtctaaac

SEQ ID NO: 1576024 - DNA, 15 bp, Homo sapiens
gcaacttggtctaaa

SEQ ID NO: 1576025 - DNA, 15 bp, Homo sapiens
ggcaacttggtctaa

SEQ ID NO: 1576026 - DNA, 15 bp, Homo sapiens
gggcaacttggtcta

SEQ ID NO: 1576027 - DNA, 15 bp, Homo sapiens
tgggcaacttggtct

SEQ ID NO: 1576028 - DNA, 15 bp, Homo sapiens
atgggcaacttggtc

SEQ ID NO: 1576029 - DNA, 15 bp, Homo sapiens
aatgggcaacttggt

SEQ ID NO: 1576030 - DNA, 15 bp, Homo sapiens
aaatgggcaacttgg

SEQ ID NO: 1576031 - DNA, 15 bp, Homo sapiens
gaaatgggcaacttg

SEQ ID NO: 1576032 - DNA, 15 bp, Homo sapiens
agaaatgggcaactt

SEQ ID NO: 1576033 - DNA, 15 bp, Homo sapiens
cagaaatgggcaact

SEQ ID NO: 1576034 - DNA, 15 bp, Homo sapiens
gcagaaatgggcaac

SEQ ID NO: 1576035 - DNA, 15 bp, Homo sapiens
cgcagaaatgggcaa

SEQ ID NO: 1576036 - DNA, 15 bp, Homo sapiens
acgcagaaatgggca

SEQ ID NO: 1576037 - DNA, 15 bp, Homo sapiens
tacgcagaaatgggc

SEQ ID NO: 1576038 - DNA, 15 bp, Homo sapiens
ttacgcagaaatggg

SEQ ID NO: 1576039 - DNA, 15 bp, Homo sapiens
attacgcagaaatgg

SEQ ID NO: 1576040 - DNA, 15 bp, Homo sapiens
aattacgcagaaatg

SEQ ID NO: 1576041 - DNA, 15 bp, Homo sapiens
caattacgcagaaat

SEQ ID NO: 1576042 - DNA, 15 bp, Homo sapiens
tcaattacgcagaaa

SEQ ID NO: 1576043 - DNA, 15 bp, Homo sapiens
gtcaattacgcagaa

SEQ ID NO: 1576044 - DNA, 15 bp, Homo sapiens
tgtcaattacgcaga

SEQ ID NO: 1576045 - DNA, 15 bp, Homo sapiens
atgtcaattacgcag

SEQ ID NO: 1576046 - DNA, 15 bp, Homo sapiens
tatgtcaattacgca

SEQ ID NO: 1576047 - DNA, 15 bp, Homo sapiens
ttatgtcaattacgc

SEQ ID NO: 1576048 - DNA, 15 bp, Homo sapiens
cttatgtcaattacg

SEQ ID NO: 1576049 - DNA, 15 bp, Homo sapiens
acttatgtcaattac

SEQ ID NO: 1576050 - DNA, 15 bp, Homo sapiens
aacttatgtcaatta

SEQ ID NO: 1576051 - DNA, 15 bp, Homo sapiens
gaacttatgtcaatt

SEQ ID NO: 1576052 - DNA, 15 bp, Homo sapiens
agaacttatgtcaat

SEQ ID NO: 1576053 - DNA, 15 bp, Homo sapiens
cagaacttatgtcaa

SEQ ID NO: 1576054 - DNA, 15 bp, Homo sapiens
acagaacttatgtca

SEQ ID NO: 1576055 - DNA, 15 bp, Homo sapiens
aacagaacttatgtc

SEQ ID NO: 1576056 - DNA, 15 bp, Homo sapiens
taacagaacttatgt

SEQ ID NO: 1576057 - DNA, 15 bp, Homo sapiens
ttaacagaacttatg

SEQ ID NO: 1576058 - DNA, 15 bp, Homo sapiens
tttaacagaacttat

SEQ ID NO: 1576059 - DNA, 15 bp, Homo sapiens
ttttaacagaactta

SEQ ID NO: 1576060 - DNA, 15 bp, Homo sapiens
tttttaacagaactt

SEQ ID NO: 1576061 - DNA, 15 bp, Homo sapiens
atttttaacagaact

SEQ ID NO: 1576062 - DNA, 15 bp, Homo sapiens
tatttttaacagaac

SEQ ID NO: 1576063 - DNA, 15 bp, Homo sapiens
atatttttaacagaa

SEQ ID NO: 1576064 - DNA, 15 bp, Homo sapiens
aatatttttaacaga

SEQ ID NO: 1576065 - DNA, 15 bp, Homo sapiens
taatatttttaacag

SEQ ID NO: 1576066 - DNA, 15 bp, Homo sapiens
ataatatttttaaca

SEQ ID NO: 1576067 - DNA, 15 bp, Homo sapiens
tataatatttttaac

SEQ ID NO: 1576068 - DNA, 15 bp, Homo sapiens
ttataatatttttaa

SEQ ID NO: 1576069 - DNA, 15 bp, Homo sapiens
cttataatattttta

SEQ ID NO: 1576070 - DNA, 15 bp, Homo sapiens
acttataatattttt

SEQ ID NO: 1576071 - DNA, 15 bp, Homo sapiens
tacttataatatttt

SEQ ID NO: 1576072 - DNA, 15 bp, Homo sapiens
ttacttataatattt

SEQ ID NO: 1576073 - DNA, 15 bp, Homo sapiens
attacttataatatt

SEQ ID NO: 1576074 - DNA, 15 bp, Homo sapiens
aattacttataatat

SEQ ID NO: 1576075 - DNA, 15 bp, Homo sapiens
gaattacttataata

SEQ ID NO: 1576076 - DNA, 15 bp, Homo sapiens
cgaattacttataat

SEQ ID NO: 1576077 - DNA, 15 bp, Homo sapiens
acgaattacttataa

SEQ ID NO: 1576078 - DNA, 15 bp, Homo sapiens
aacgaattacttata

SEQ ID NO: 1576079 - DNA, 15 bp, Homo sapiens
aaacgaattacttat

SEQ ID NO: 1576080 - DNA, 15 bp, Homo sapiens
gaaacgaattactta

SEQ ID NO: 1576081 - DNA, 15 bp, Homo sapiens
cgaaacgaattactt

SEQ ID NO: 1576082 - DNA, 15 bp, Homo sapiens
ccgaaacgaattact

SEQ ID NO: 1576083 - DNA, 15 bp, Homo sapiens
accgaaacgaattac

SEQ ID NO: 1576084 - DNA, 15 bp, Homo sapiens
aaccgaaacgaatta

SEQ ID NO: 1576085 - DNA, 15 bp, Homo sapiens
aaaccgaaacgaatt

SEQ ID NO: 1576086 - DNA, 15 bp, Homo sapiens
caaaccgaaacgaat

SEQ ID NO: 1576087 - DNA, 15 bp, Homo sapiens
acaaaccgaaacgaa

SEQ ID NO: 1576088 - DNA, 15 bp, Homo sapiens
tacaaaccgaaacga

SEQ ID NO: 1576089 - DNA, 15 bp, Homo sapiens
ctacaaaccgaaacg

SEQ ID NO: 1576090 - DNA, 15 bp, Homo sapiens
tctacaaaccgaaac

SEQ ID NO: 1576091 - DNA, 15 bp, Homo sapiens
atctacaaaccgaaa

SEQ ID NO: 1576092 - DNA, 15 bp, Homo sapiens
catctacaaaccgaa

SEQ ID NO: 1576093 - DNA, 15 bp, Homo sapiens
acatctacaaaccga

SEQ ID NO: 1576094 - DNA, 15 bp, Homo sapiens
aacatctacaaaccg

SEQ ID NO: 1576095 - DNA, 15 bp, Homo sapiens
aaacatctacaaacc

SEQ ID NO: 1576096 - DNA, 15 bp, Homo sapiens
gaaacatctacaaac

SEQ ID NO: 1576097 - DNA, 15 bp, Homo sapiens
ggaaacatctacaaa

SEQ ID NO: 1576098 - DNA, 15 bp, Homo sapiens
gggaaacatctacaa

SEQ ID NO: 1576099 - DNA, 15 bp, Homo sapiens
ggggaaacatctaca

SEQ ID NO: 1576100 - DNA, 15 bp, Homo sapiens
aggggaaacatctac

SEQ ID NO: 1576101 - DNA, 15 bp, Homo sapiens
caggggaaacatcta

SEQ ID NO: 1576102 - DNA, 15 bp, Homo sapiens
tcaggggaaacatct

SEQ ID NO: 1576103 - DNA, 15 bp, Homo sapiens
gtcaggggaaacatc

SEQ ID NO: 1576104 - DNA, 15 bp, Homo sapiens
agtcaggggaaacat

SEQ ID NO: 1576105 - DNA, 15 bp, Homo sapiens
aagtcaggggaaaca

SEQ ID NO: 1576106 - DNA, 15 bp, Homo sapiens
caagtcaggggaaac

SEQ ID NO: 1576107 - DNA, 15 bp, Homo sapiens
acaagtcaggggaaa

SEQ ID NO: 1576108 - DNA, 15 bp, Homo sapiens
aacaagtcaggggaa

SEQ ID NO: 1576109 - DNA, 15 bp, Homo sapiens
taacaagtcagggga

SEQ ID NO: 1576110 - DNA, 15 bp, Homo sapiens
ttaacaagtcagggg

SEQ ID NO: 1576111 - DNA, 15 bp, Homo sapiens
tttaacaagtcaggg

SEQ ID NO: 1576112 - DNA, 15 bp, Homo sapiens
ctttaacaagtcagg

SEQ ID NO: 1576113 - DNA, 15 bp, Homo sapiens
tctttaacaagtcag

SEQ ID NO: 1576114 - DNA, 15 bp, Homo sapiens
ctctttaacaagtca

SEQ ID NO: 1576115 - DNA, 15 bp, Homo sapiens
cctctttaacaagtc

SEQ ID NO: 1576116 - DNA, 15 bp, Homo sapiens
tcctctttaacaagt

SEQ ID NO: 1576117 - DNA, 15 bp, Homo sapiens
ttcctctttaacaag

SEQ ID NO: 1576118 - DNA, 15 bp, Homo sapiens
tttcctctttaacaa

SEQ ID NO: 1576119 - DNA, 15 bp, Homo sapiens
gtttcctctttaaca

SEQ ID NO: 1576120 - DNA, 15 bp, Homo sapiens
ggtttcctctttaac

SEQ ID NO: 1576121 - DNA, 15 bp, Homo sapiens
tggtttcctctttaa

SEQ ID NO: 1576122 - DNA, 15 bp, Homo sapiens
ctggtttcctcttta

SEQ ID NO: 1576123 - DNA, 15 bp, Homo sapiens
cctggtttcctcttt

SEQ ID NO: 1576124 - DNA, 15 bp, Homo sapiens
tcctggtttcctctt

SEQ ID NO: 1576125 - DNA, 15 bp, Homo sapiens
ttcctggtttcctct

SEQ ID NO: 1576126 - DNA, 15 bp, Homo sapiens
gttcctggtttcctc

SEQ ID NO: 1576127 - DNA, 15 bp, Homo sapiens
agttcctggtttcct

SEQ ID NO: 1576128 - DNA, 15 bp, Homo sapiens
gagttcctggtttcc

SEQ ID NO: 1576129 - DNA, 15 bp, Homo sapiens
tgagttcctggtttc

SEQ ID NO: 1576130 - DNA, 15 bp, Homo sapiens
ctgagttcctggttt

SEQ ID NO: 1576131 - DNA, 15 bp, Homo sapiens
actgagttcctggtt

SEQ ID NO: 1576132 - DNA, 15 bp, Homo sapiens
gactgagttcctggt

SEQ ID NO: 1576133 - DNA, 15 bp, Homo sapiens
tgactgagttcctgg

SEQ ID NO: 1576134 - DNA, 15 bp, Homo sapiens
atgactgagttcctg

SEQ ID NO: 1576135 - DNA, 15 bp, Homo sapiens
catgactgagttcct

SEQ ID NO: 1576136 - DNA, 15 bp, Homo sapiens
acatgactgagttcc

SEQ ID NO: 1576137 - DNA, 15 bp, Homo sapiens
aacatgactgagttc

SEQ ID NO: 1576138 - DNA, 15 bp, Homo sapiens
aaacatgactgagtt

SEQ ID NO: 1576139 - DNA, 15 bp, Homo sapiens
aaaacatgactgagt

SEQ ID NO: 1576140 - DNA, 15 bp, Homo sapiens
aaaaacatgactgag

SEQ ID NO: 1576141 - DNA, 15 bp, Homo sapiens
caaaaacatgactga

SEQ ID NO: 1576142 - DNA, 15 bp, Homo sapiens
acaaaaacatgactg

SEQ ID NO: 1576143 - DNA, 15 bp, Homo sapiens
gacaaaaacatgact

SEQ ID NO: 1576144 - DNA, 15 bp, Homo sapiens
ggacaaaaacatgac

SEQ ID NO: 1576145 - DNA, 15 bp, Homo sapiens
aggacaaaaacatga

SEQ ID NO: 1576146 - DNA, 15 bp, Homo sapiens
caggacaaaaacatg

SEQ ID NO: 1576147 - DNA, 15 bp, Homo sapiens
tccaggacaaaaaca

SEQ ID NO: 1576148 - DNA, 15 bp, Homo sapiens
atccaggacaaaaac

SEQ ID NO: 1576149 - DNA, 15 bp, Homo sapiens
tatccaggacaaaaa

SEQ ID NO: 1576150 - DNA, 15 bp, Homo sapiens
ttatccaggacaaaa

SEQ ID NO: 1576151 - DNA, 15 bp, Homo sapiens
attatccaggacaaa

SEQ ID NO: 1576152 - DNA, 15 bp, Homo sapiens
gattatccaggacaa

SEQ ID NO: 1576153 - DNA, 15 bp, Homo sapiens
agattatccaggaca

SEQ ID NO: 1576154 - DNA, 15 bp, Homo sapiens
tagattatccaggac

SEQ ID NO: 1576155 - DNA, 15 bp, Homo sapiens
gtagattatccagga

SEQ ID NO: 1576156 - DNA, 15 bp, Homo sapiens
ggtagattatccagg

SEQ ID NO: 1576157 - DNA, 15 bp, Homo sapiens
aggtagattatccag

SEQ ID NO: 1576158 - DNA, 15 bp, Homo sapiens
caggtagattatcca

SEQ ID NO: 1576159 - DNA, 15 bp, Homo sapiens
acaggtagattatcc

SEQ ID NO: 1576160 - DNA, 15 bp, Homo sapiens
aacaggtagattatc

SEQ ID NO: 1576161 - DNA, 15 bp, Homo sapiens
taacaggtagattat

SEQ ID NO: 1576162 - DNA, 15 bp, Homo sapiens
ataacaggtagatta

SEQ ID NO: 1576163 - DNA, 15 bp, Homo sapiens
cataacaggtagatt

SEQ ID NO: 1576164 - DNA, 15 bp, Homo sapiens
gcataacaggtagat

SEQ ID NO: 1576165 - DNA, 15 bp, Homo sapiens
ggcataacaggtaga

SEQ ID NO: 1576166 - DNA, 15 bp, Homo sapiens
tggcataacaggtag

SEQ ID NO: 1576167 - DNA, 15 bp, Homo sapiens
ctggcataacaggta

SEQ ID NO: 1576168 - DNA, 15 bp, Homo sapiens
actggcataacaggt

SEQ ID NO: 1576169 - DNA, 15 bp, Homo sapiens
tactggcataacagg

SEQ ID NO: 1576170 - DNA, 15 bp, Homo sapiens
gtactggcataacag

SEQ ID NO: 1576171 - DNA, 15 bp, Homo sapiens
agtactggcataaca

SEQ ID NO: 1576172 - DNA, 15 bp, Homo sapiens
gagtactggcataac

SEQ ID NO: 1576173 - DNA, 15 bp, Homo sapiens
ggagtactggcataa

SEQ ID NO: 1576174 - DNA, 15 bp, Homo sapiens
gggagtactggcata

SEQ ID NO: 1576175 - DNA, 15 bp, Homo sapiens
tgggagtactggcat

SEQ ID NO: 1576176 - DNA, 15 bp, Homo sapiens
atgggagtactggca

SEQ ID NO: 1576177 - DNA, 15 bp, Homo sapiens
gatgggagtactggc

SEQ ID NO: 1576178 - DNA, 15 bp, Homo sapiens
ggatgggagtactgg

SEQ ID NO: 1576179 - DNA, 15 bp, Homo sapiens
cggatgggagtactg

SEQ ID NO: 1576180 - DNA, 15 bp, Homo sapiens
tcggatgggagtact

SEQ ID NO: 1576181 - DNA, 15 bp, Homo sapiens
ctcggatgggagtac

SEQ ID NO: 1576182 - DNA, 15 bp, Homo sapiens
cctcggatgggagta

SEQ ID NO: 1576183 - DNA, 15 bp, Homo sapiens
ccctcggatgggagt

SEQ ID NO: 1576184 - DNA, 15 bp, Homo sapiens
cccctcggatgggag

SEQ ID NO: 1576185 - DNA, 15 bp, Homo sapiens
gcccctcggatggga

SEQ ID NO: 1576186 - DNA, 15 bp, Homo sapiens
tgcccctcggatggg

SEQ ID NO: 1576187 - DNA, 15 bp, Homo sapiens
atgcccctcggatgg

SEQ ID NO: 1576188 - DNA, 15 bp, Homo sapiens
catgcccctcggatg

SEQ ID NO: 1576189 - DNA, 15 bp, Homo sapiens
gcatgcccctcggat

SEQ ID NO: 1576190 - DNA, 15 bp, Homo sapiens
ggcatgcccctcgga

SEQ ID NO: 1576191 - DNA, 15 bp, Homo sapiens
gggcatgcccctcgg

SEQ ID NO: 1576192 - DNA, 15 bp, Homo sapiens
agggcatgcccctcg

SEQ ID NO: 1576193 - DNA, 15 bp, Homo sapiens
aagggcatgcccctc

SEQ ID NO: 1576194 - DNA, 15 bp, Homo sapiens
taagggcatgcccct

SEQ ID NO: 1576195 - DNA, 15 bp, Homo sapiens
ctaagggcatgcccc

SEQ ID NO: 1576196 - DNA, 15 bp, Homo sapiens
actaagggcatgccc

SEQ ID NO: 1576197 - DNA, 15 bp, Homo sapiens
aactaagggcatgcc

SEQ ID NO: 1576198 - DNA, 15 bp, Homo sapiens
caactaagggcatgc

SEQ ID NO: 1576199 - DNA, 15 bp, Homo sapiens
gcaactaagggcatg

SEQ ID NO: 1576200 - DNA, 15 bp, Homo sapiens
ggcaactaagggcat

SEQ ID NO: 1576201 - DNA, 15 bp, Homo sapiens
gggcaactaagggca

SEQ ID NO: 1576202 - DNA, 15 bp, Homo sapiens
tgggcaactaagggc

SEQ ID NO: 1576203 - DNA, 15 bp, Homo sapiens
ctgggcaactaaggg

SEQ ID NO: 1576204 - DNA, 15 bp, Homo sapiens
tctgggcaactaagg

SEQ ID NO: 1576205 - DNA, 15 bp, Homo sapiens
atctgggcaactaag

SEQ ID NO: 1576206 - DNA, 15 bp, Homo sapiens
catctgggcaactaa

SEQ ID NO: 1576207 - DNA, 15 bp, Homo sapiens
ccatctgggcaacta

SEQ ID NO: 1576208 - DNA, 15 bp, Homo sapiens
tccatctgggcaact

SEQ ID NO: 1576209 - DNA, 15 bp, Homo sapiens
ctccatctgggcaac

SEQ ID NO: 1576210 - DNA, 15 bp, Homo sapiens
atctccatctgggca

SEQ ID NO: 1576211 - DNA, 15 bp, Homo sapiens
catctccatctgggc

SEQ ID NO: 1576212 - DNA, 15 bp, Homo sapiens
gcatctccatctggg

SEQ ID NO: 1576213 - DNA, 15 bp, Homo sapiens
tgcatctccatctgg

SEQ ID NO: 1576214 - DNA, 15 bp, Homo sapiens
ctgcatctccatctg

SEQ ID NO: 1576215 - DNA, 15 bp, Homo sapiens
actgcatctccatct

SEQ ID NO: 1576216 - DNA, 15 bp, Homo sapiens
aactgcatctccatc

SEQ ID NO: 1576217 - DNA, 15 bp, Homo sapiens
gaactgcatctccat

SEQ ID NO: 1576218 - DNA, 15 bp, Homo sapiens
tgaactgcatctcca

SEQ ID NO: 1576219 - DNA, 15 bp, Homo sapiens
ctgaactgcatctcc

SEQ ID NO: 1576220 - DNA, 15 bp, Homo sapiens
actgaactgcatctc

SEQ ID NO: 1576221 - DNA, 15 bp, Homo sapiens
tactgaactgcatct

SEQ ID NO: 1576222 - DNA, 15 bp, Homo sapiens
ctactgaactgcatc

SEQ ID NO: 1576223 - DNA, 15 bp, Homo sapiens
tctactgaactgcat

SEQ ID NO: 1576224 - DNA, 15 bp, Homo sapiens
atctactgaactgca

SEQ ID NO: 1576225 - DNA, 15 bp, Homo sapiens
aatctactgaactgc

SEQ ID NO: 1576226 - DNA, 15 bp, Homo sapiens
aaatctactgaactg

SEQ ID NO: 1576227 - DNA, 15 bp, Homo sapiens
caaatctactgaact

SEQ ID NO: 1576228 - DNA, 15 bp, Homo sapiens
ccaaatctactgaac

SEQ ID NO: 1576229 - DNA, 15 bp, Homo sapiens
tgccccaaatctact

SEQ ID NO: 1576230 - DNA, 15 bp, Homo sapiens
ttgccccaaatctac

SEQ ID NO: 1576231 - DNA, 15 bp, Homo sapiens
tttgccccaaatcta

SEQ ID NO: 1576232 - DNA, 15 bp, Homo sapiens
ctttgccccaaatct

SEQ ID NO: 1576233 - DNA, 15 bp, Homo sapiens
cactttgccccaaat

SEQ ID NO: 1576234 - DNA, 15 bp, Homo sapiens
ccactttgccccaaa

SEQ ID NO: 1576235 - DNA, 15 bp, Homo sapiens
gccactttgccccaa

SEQ ID NO: 1576236 - DNA, 15 bp, Homo sapiens
agccactttgcccca

SEQ ID NO: 1576237 - DNA, 15 bp, Homo sapiens
tagccactttgcccc

SEQ ID NO: 1576238 - DNA, 15 bp, Homo sapiens
gtagccactttgccc

SEQ ID NO: 1576239 - DNA, 15 bp, Homo sapiens
tgtagccactttgcc

SEQ ID NO: 1576240 - DNA, 15 bp, Homo sapiens
ctgtagccactttgc

SEQ ID NO: 1576241 - DNA, 15 bp, Homo sapiens
gctgtagccactttg

SEQ ID NO: 1576242 - DNA, 15 bp, Homo sapiens
agctgtagccacttt

SEQ ID NO: 1576243 - DNA, 15 bp, Homo sapiens
gagctgtagccactt

SEQ ID NO: 1576244 - DNA, 15 bp, Homo sapiens
agagctgtagccact

SEQ ID NO: 1576245 - DNA, 15 bp, Homo sapiens
cagagctgtagccac

SEQ ID NO: 1576246 - DNA, 15 bp, Homo sapiens
acagagctgtagcca

SEQ ID NO: 1576247 - DNA, 15 bp, Homo sapiens
gacagagctgtagcc

SEQ ID NO: 1576248 - DNA, 15 bp, Homo sapiens
agacagagctgtagc

SEQ ID NO: 1576249 - DNA, 15 bp, Homo sapiens
aagacagagctgtag

SEQ ID NO: 1576250 - DNA, 15 bp, Homo sapiens
gaagacagagctgta

SEQ ID NO: 1576251 - DNA, 15 bp, Homo sapiens
ggaagacagagctgt

SEQ ID NO: 1576252 - DNA, 15 bp, Homo sapiens
tggaagacagagctg

SEQ ID NO: 1576253 - DNA, 15 bp, Homo sapiens
atggaagacagagct

SEQ ID NO: 1576254 - DNA, 15 bp, Homo sapiens
aatggaagacagagc

SEQ ID NO: 1576255 - DNA, 15 bp, Homo sapiens
gaatggaagacagag

SEQ ID NO: 1576256 - DNA, 15 bp, Homo sapiens
tgaatggaagacaga

SEQ ID NO: 1576257 - DNA, 15 bp, Homo sapiens
gtgaatggaagacag

SEQ ID NO: 1576258 - DNA, 15 bp, Homo sapiens
agtgaatggaagaca

SEQ ID NO: 1576259 - DNA, 15 bp, Homo sapiens
gagtgaatggaagac

SEQ ID NO: 1576260 - DNA, 15 bp, Homo sapiens
tgagtgaatggaaga

SEQ ID NO: 1576261 - DNA, 15 bp, Homo sapiens
ttgagtgaatggaag

SEQ ID NO: 1576262 - DNA, 15 bp, Homo sapiens
gttgagtgaatggaa

SEQ ID NO: 1576263 - DNA, 15 bp, Homo sapiens
tgttgagtgaatgga

SEQ ID NO: 1576264 - DNA, 15 bp, Homo sapiens
gtgttgagtgaatgg

SEQ ID NO: 1576265 - DNA, 15 bp, Homo sapiens
ggtgttgagtgaatg

SEQ ID NO: 1576266 - DNA, 15 bp, Homo sapiens
aggtgttgagtgaat

SEQ ID NO: 1576267 - DNA, 15 bp, Homo sapiens
caggtgttgagtgaa

SEQ ID NO: 1576268 - DNA, 15 bp, Homo sapiens
acaggtgttgagtga

SEQ ID NO: 1576269 - DNA, 15 bp, Homo sapiens
aacaggtgttgagtg

SEQ ID NO: 1576270 - DNA, 15 bp, Homo sapiens
gaacaggtgttgagt

SEQ ID NO: 1576271 - DNA, 15 bp, Homo sapiens
tgaacaggtgttgag

SEQ ID NO: 1576272 - DNA, 15 bp, Homo sapiens
atgaacaggtgttga

SEQ ID NO: 1576273 - DNA, 15 bp, Homo sapiens
catgaacaggtgttg

SEQ ID NO: 1576274 - DNA, 15 bp, Homo sapiens
tcatgaacaggtgtt

SEQ ID NO: 1576275 - DNA, 15 bp, Homo sapiens
gtcatgaacaggtgt

SEQ ID NO: 1576276 - DNA, 15 bp, Homo sapiens
agtcatgaacaggtg

SEQ ID NO: 1576277 - DNA, 15 bp, Homo sapiens
cagtcatgaacaggt

SEQ ID NO: 1576278 - DNA, 15 bp, Homo sapiens
tcagtcatgaacagg

SEQ ID NO: 1576279 - DNA, 15 bp, Homo sapiens
ctcagtcatgaacag

SEQ ID NO: 1576280 - DNA, 15 bp, Homo sapiens
gctcagtcatgaaca

SEQ ID NO: 1576281 - DNA, 15 bp, Homo sapiens
ggctcagtcatgaac

SEQ ID NO: 1576282 - DNA, 15 bp, Homo sapiens
tggctcagtcatgaa

SEQ ID NO: 1576283 - DNA, 15 bp, Homo sapiens
ctggctcagtcatga

SEQ ID NO: 1576284 - DNA, 15 bp, Homo sapiens
cctggctcagtcatg

SEQ ID NO: 1576285 - DNA, 15 bp, Homo sapiens
acctggctcagtcat

SEQ ID NO: 1576286 - DNA, 15 bp, Homo sapiens
cacctggctcagtca

SEQ ID NO: 1576287 - DNA, 15 bp, Homo sapiens
gcacctggctcagtc

SEQ ID NO: 1576288 - DNA, 15 bp, Homo sapiens
ggcacctggctcagt

SEQ ID NO: 1576289 - DNA, 15 bp, Homo sapiens
gggcacctggctcag

SEQ ID NO: 1576290 - DNA, 15 bp, Homo sapiens
tgggcacctggctca

SEQ ID NO: 1576291 - DNA, 15 bp, Homo sapiens
ctgggcacctggctc

SEQ ID NO: 1576292 - DNA, 15 bp, Homo sapiens
cctgggcacctggct

SEQ ID NO: 1576293 - DNA, 15 bp, Homo sapiens
tcctgggcacctggc

SEQ ID NO: 1576294 - DNA, 15 bp, Homo sapiens
gtcctgggcacctgg

SEQ ID NO: 1576295 - DNA, 15 bp, Homo sapiens
tgtcctgggcacctg

SEQ ID NO: 1576296 - DNA, 15 bp, Homo sapiens
gtgtcctgggcacct

SEQ ID NO: 1576297 - DNA, 15 bp, Homo sapiens
tgtgtcctgggcacc

SEQ ID NO: 1576298 - DNA, 15 bp, Homo sapiens
atgtgtcctgggcac

SEQ ID NO: 1576299 - DNA, 15 bp, Homo sapiens
gatgtgtcctgggca

SEQ ID NO: 1576300 - DNA, 15 bp, Homo sapiens
ggatgtgtcctgggc

SEQ ID NO: 1576301 - DNA, 15 bp, Homo sapiens
aggatgtgtcctggg

SEQ ID NO: 1576302 - DNA, 15 bp, Homo sapiens
taggatgtgtcctgg

SEQ ID NO: 1576303 - DNA, 15 bp, Homo sapiens
ttaggatgtgtcctg

SEQ ID NO: 1576304 - DNA, 15 bp, Homo sapiens
tttaggatgtgtcct

SEQ ID NO: 1576305 - DNA, 15 bp, Homo sapiens
gtttaggatgtgtcc

SEQ ID NO: 1576306 - DNA, 15 bp, Homo sapiens
tgtttaggatgtgtc

SEQ ID NO: 1576307 - DNA, 15 bp, Homo sapiens
ctgtttaggatgtgt

SEQ ID NO: 1576308 - DNA, 15 bp, Homo sapiens
actgtttaggatgtg

SEQ ID NO: 1576309 - DNA, 15 bp, Homo sapiens
gactgtttaggatgt

SEQ ID NO: 1576310 - DNA, 15 bp, Homo sapiens
tgactgtttaggatg

SEQ ID NO: 1576311 - DNA, 15 bp, Homo sapiens
ctgactgtttaggat

SEQ ID NO: 1576312 - DNA, 15 bp, Homo sapiens
gctgactgtttagga

SEQ ID NO: 1576313 - DNA, 15 bp, Homo sapiens
agctgactgtttagg

SEQ ID NO: 1576314 - DNA, 15 bp, Homo sapiens
aagctgactgtttag

SEQ ID NO: 1576315 - DNA, 15 bp, Homo sapiens
gaagctgactgttta

SEQ ID NO: 1576316 - DNA, 15 bp, Homo sapiens
agaagctgactgttt

SEQ ID NO: 1576317 - DNA, 15 bp, Homo sapiens
tagaagctgactgtt

SEQ ID NO: 1576318 - DNA, 15 bp, Homo sapiens
atagaagctgactgt

SEQ ID NO: 1576319 - DNA, 15 bp, Homo sapiens
gatagaagctgactg

SEQ ID NO: 1576320 - DNA, 15 bp, Homo sapiens
ggatagaagctgact

SEQ ID NO: 1576321 - DNA, 15 bp, Homo sapiens
aggatagaagctgac

SEQ ID NO: 1576322 - DNA, 15 bp, Homo sapiens
caggatagaagctga

SEQ ID NO: 1576323 - DNA, 15 bp, Homo sapiens
acaggatagaagctg

SEQ ID NO: 1576324 - DNA, 15 bp, Homo sapiens
cacaggatagaagct

SEQ ID NO: 1576325 - DNA, 15 bp, Homo sapiens
acacaggatagaagc

SEQ ID NO: 1576326 - DNA, 15 bp, Homo sapiens
gacacaggatagaag

SEQ ID NO: 1576327 - DNA, 15 bp, Homo sapiens
ggacacaggatagaa

SEQ ID NO: 1576328 - DNA, 15 bp, Homo sapiens
aggacacaggataga

SEQ ID NO: 1576329 - DNA, 15 bp, Homo sapiens
taggacacaggatag

SEQ ID NO: 1576330 - DNA, 15 bp, Homo sapiens
ctaggacacaggata

SEQ ID NO: 1576331 - DNA, 15 bp, Homo sapiens
actaggacacaggat

SEQ ID NO: 1576332 - DNA, 15 bp, Homo sapiens
aactaggacacagga

SEQ ID NO: 1576333 - DNA, 15 bp, Homo sapiens
caactaggacacagg

SEQ ID NO: 1576334 - DNA, 15 bp, Homo sapiens
ccaactaggacacag

SEQ ID NO: 1576335 - DNA, 15 bp, Homo sapiens
cccaactaggacaca

SEQ ID NO: 1576336 - DNA, 15 bp, Homo sapiens
ccccaactaggacac

SEQ ID NO: 1576337 - DNA, 15 bp, Homo sapiens
tccccaactaggaca

SEQ ID NO: 1576338 - DNA, 15 bp, Homo sapiens
ctccccaactaggac

SEQ ID NO: 1576339 - DNA, 15 bp, Homo sapiens
tctccccaactagga

SEQ ID NO: 1576340 - DNA, 15 bp, Homo sapiens
gtctccccaactagg

SEQ ID NO: 1576341 - DNA, 15 bp, Homo sapiens
tgtctccccaactag

SEQ ID NO: 1576342 - DNA, 15 bp, Homo sapiens
ctgtctccccaacta

SEQ ID NO: 1576343 - DNA, 15 bp, Homo sapiens
tctgtctccccaact

SEQ ID NO: 1576344 - DNA, 15 bp, Homo sapiens
ctctgtctccccaac

SEQ ID NO: 1576345 - DNA, 15 bp, Homo sapiens
actctgtctccccaa

SEQ ID NO: 1576346 - DNA, 15 bp, Homo sapiens
cactctgtctcccca

SEQ ID NO: 1576347 - DNA, 15 bp, Homo sapiens
gcactctgtctcccc

SEQ ID NO: 1576348 - DNA, 15 bp, Homo sapiens
ggcactctgtctccc

SEQ ID NO: 1576349 - DNA, 15 bp, Homo sapiens
tggcactctgtctcc

SEQ ID NO: 1576350 - DNA, 15 bp, Homo sapiens
ctggcactctgtctc

SEQ ID NO: 1576351 - DNA, 15 bp, Homo sapiens
gctggcactctgtct

SEQ ID NO: 1576352 - DNA, 15 bp, Homo sapiens
ggctggcactctgtc

SEQ ID NO: 1576353 - DNA, 15 bp, Homo sapiens
tggctggcactctgt

SEQ ID NO: 1576354 - DNA, 15 bp, Homo sapiens
ctggctggcactctg

SEQ ID NO: 1576355 - DNA, 15 bp, Homo sapiens
gctggctggcactct

SEQ ID NO: 1576356 - DNA, 15 bp, Homo sapiens
tgctggctggcactc

SEQ ID NO: 1576357 - DNA, 15 bp, Homo sapiens
ttgctggctggcact

SEQ ID NO: 1576358 - DNA, 15 bp, Homo sapiens
gttgctggctggcac

SEQ ID NO: 1576359 - DNA, 15 bp, Homo sapiens
ggttgctggctggca

SEQ ID NO: 1576360 - DNA, 15 bp, Homo sapiens
gggttgctggctggc

SEQ ID NO: 1576361 - DNA, 15 bp, Homo sapiens
agggttgctggctgg

SEQ ID NO: 1576362 - DNA, 15 bp, Homo sapiens
gagggttgctggctg

SEQ ID NO: 1576363 - DNA, 15 bp, Homo sapiens
ggagggttgctggct

SEQ ID NO: 1576364 - DNA, 15 bp, Homo sapiens
gggagggttgctggc

SEQ ID NO: 1576365 - DNA, 15 bp, Homo sapiens
ctgggagggttgctg

SEQ ID NO: 1576366 - DNA, 15 bp, Homo sapiens
cctgggagggttgct

SEQ ID NO: 1576367 - DNA, 15 bp, Homo sapiens
acctgggagggttgc

SEQ ID NO: 1576368 - DNA, 15 bp, Homo sapiens
aacctgggagggttg

SEQ ID NO: 1576369 - DNA, 15 bp, Homo sapiens
aaacctgggagggtt

SEQ ID NO: 1576370 - DNA, 15 bp, Homo sapiens
caaacctgggagggt

SEQ ID NO: 1576371 - DNA, 15 bp, Homo sapiens
acaaacctgggaggg

SEQ ID NO: 1576372 - DNA, 15 bp, Homo sapiens
tacaaacctgggagg

SEQ ID NO: 1576373 - DNA, 15 bp, Homo sapiens
ctacaaacctgggag

SEQ ID NO: 1576374 - DNA, 15 bp, Homo sapiens
cctacaaacctggga

SEQ ID NO: 1576375 - DNA, 15 bp, Homo sapiens
acctacaaacctggg

SEQ ID NO: 1576376 - DNA, 15 bp, Homo sapiens
aacctacaaacctgg

SEQ ID NO: 1576377 - DNA, 15 bp, Homo sapiens
aaacctacaaacctg

SEQ ID NO: 1576378 - DNA, 15 bp, Homo sapiens
aaaacctacaaacct

SEQ ID NO: 1576379 - DNA, 15 bp, Homo sapiens
taaaacctacaaacc

SEQ ID NO: 1576380 - DNA, 15 bp, Homo sapiens
ctaaaacctacaaac

SEQ ID NO: 1576381 - DNA, 15 bp, Homo sapiens
cctaaaacctacaaa

SEQ ID NO: 1576382 - DNA, 15 bp, Homo sapiens
ccctaaaacctacaa

SEQ ID NO: 1576383 - DNA, 15 bp, Homo sapiens
cccctaaaacctaca

SEQ ID NO: 1576384 - DNA, 15 bp, Homo sapiens
acccctaaaacctac

SEQ ID NO: 1576385 - DNA, 15 bp, Homo sapiens
aacccctaaaaccta

SEQ ID NO: 1576386 - DNA, 15 bp, Homo sapiens
aaacccctaaaacct

SEQ ID NO: 1576387 - DNA, 15 bp, Homo sapiens
aaaacccctaaaacc

SEQ ID NO: 1576388 - DNA, 15 bp, Homo sapiens
gaaaacccctaaaac

SEQ ID NO: 1576389 - DNA, 15 bp, Homo sapiens
tgaaaacccctaaaa

SEQ ID NO: 1576390 - DNA, 15 bp, Homo sapiens
ctgaaaacccctaaa

SEQ ID NO: 1576391 - DNA, 15 bp, Homo sapiens
actgaaaacccctaa

SEQ ID NO: 1576392 - DNA, 15 bp, Homo sapiens
aactgaaaaccccta

SEQ ID NO: 1576393 - DNA, 15 bp, Homo sapiens
aaactgaaaacccct

SEQ ID NO: 1576394 - DNA, 15 bp, Homo sapiens
aaaactgaaaacccc

SEQ ID NO: 1576395 - DNA, 15 bp, Homo sapiens
caaaactgaaaaccc

SEQ ID NO: 1576396 - DNA, 15 bp, Homo sapiens
acaaaactgaaaacc

SEQ ID NO: 1576397 - DNA, 15 bp, Homo sapiens
aacaaaactgaaaac

SEQ ID NO: 1576398 - DNA, 15 bp, Homo sapiens
aaacaaaactgaaaa

SEQ ID NO: 1576399 - DNA, 15 bp, Homo sapiens
caaacaaaactgaaa

SEQ ID NO: 1576400 - DNA, 15 bp, Homo sapiens
ccaaacaaaactgaa

SEQ ID NO: 1576401 - DNA, 15 bp, Homo sapiens
cccaaacaaaactga

SEQ ID NO: 1576402 - DNA, 15 bp, Homo sapiens
acccaaacaaaactg

SEQ ID NO: 1576403 - DNA, 15 bp, Homo sapiens
aacccaaacaaaact

SEQ ID NO: 1576404 - DNA, 15 bp, Homo sapiens
aaacccaaacaaaac

SEQ ID NO: 1576405 - DNA, 15 bp, Homo sapiens
aaaacccaaacaaaa

SEQ ID NO: 1576406 - DNA, 15 bp, Homo sapiens
aaaaacccaaacaaa

SEQ ID NO: 1576407 - DNA, 15 bp, Homo sapiens
aaaaaacccaaacaa

SEQ ID NO: 1576408 - DNA, 15 bp, Homo sapiens
caaaaaacccaaaca

SEQ ID NO: 1576409 - DNA, 15 bp, Homo sapiens
acaaaaaacccaaac

SEQ ID NO: 1576410 - DNA, 15 bp, Homo sapiens
aacaaaaaacccaaa

SEQ ID NO: 1576411 - DNA, 15 bp, Homo sapiens
aaacaaaaaacccaa

SEQ ID NO: 1576412 - DNA, 15 bp, Homo sapiens
aaaacaaaaaaccca

SEQ ID NO: 1576413 - DNA, 15 bp, Homo sapiens
aaaaacaaaaaaccc

SEQ ID NO: 1576414 - DNA, 15 bp, Homo sapiens
aaaaaacaaaaaacc

SEQ ID NO: 1576415 - DNA, 15 bp, Homo sapiens
caaaaaacaaaaaac

SEQ ID NO: 1576416 - DNA, 15 bp, Homo sapiens
caaaaacaaaaaaca

SEQ ID NO: 1576417 - DNA, 15 bp, Homo sapiens
acaaaaacaaaaaac

SEQ ID NO: 1576418 - DNA, 15 bp, Homo sapiens
tagaaacaaaaacaa

SEQ ID NO: 1576419 - DNA, 15 bp, Homo sapiens
gtagaaacaaaaaca

SEQ ID NO: 1576420 - DNA, 15 bp, Homo sapiens
tgtagaaacaaaaac

SEQ ID NO: 1576421 - DNA, 15 bp, Homo sapiens
atgtagaaacaaaaa

SEQ ID NO: 1576422 - DNA, 15 bp, Homo sapiens
gatgtagaaacaaaa

SEQ ID NO: 1576423 - DNA, 15 bp, Homo sapiens
ggatgtagaaacaaa

SEQ ID NO: 1576424 - DNA, 15 bp, Homo sapiens
aggatgtagaaacaa

SEQ ID NO: 1576425 - DNA, 15 bp, Homo sapiens
aaggatgtagaaaca

SEQ ID NO: 1576426 - DNA, 15 bp, Homo sapiens
gaaggatgtagaaac

SEQ ID NO: 1576427 - DNA, 15 bp, Homo sapiens
ggaaggatgtagaaa

SEQ ID NO: 1576428 - DNA, 15 bp, Homo sapiens
gggaaggatgtagaa

SEQ ID NO: 1576429 - DNA, 15 bp, Homo sapiens
ggggaaggatgtaga

SEQ ID NO: 1576430 - DNA, 15 bp, Homo sapiens
cggggaaggatgtag

SEQ ID NO: 1576431 - DNA, 15 bp, Homo sapiens
tcggggaaggatgta

SEQ ID NO: 1576432 - DNA, 15 bp, Homo sapiens
gtcggggaaggatgt

SEQ ID NO: 1576433 - DNA, 15 bp, Homo sapiens
agtcggggaaggatg

SEQ ID NO: 1576434 - DNA, 15 bp, Homo sapiens
gagtcggggaaggat

SEQ ID NO: 1576435 - DNA, 15 bp, Homo sapiens
ggagtcggggaagga

SEQ ID NO: 1576436 - DNA, 15 bp, Homo sapiens
gggagtcggggaagg

SEQ ID NO: 1576437 - DNA, 15 bp, Homo sapiens
tgggagtcggggaag

SEQ ID NO: 1576438 - DNA, 15 bp, Homo sapiens
ctgggagtcggggaa

SEQ ID NO: 1576439 - DNA, 15 bp, Homo sapiens
cctgggagtcgggga

SEQ ID NO: 1576440 - DNA, 15 bp, Homo sapiens
gcctgggagtcgggg

SEQ ID NO: 1576441 - DNA, 15 bp, Homo sapiens
tgcctgggagtcggg

SEQ ID NO: 1576442 - DNA, 15 bp, Homo sapiens
atgcctgggagtcgg

SEQ ID NO: 1576443 - DNA, 15 bp, Homo sapiens
tatgcctgggagtcg

SEQ ID NO: 1576444 - DNA, 15 bp, Homo sapiens
ttatgcctgggagtc

SEQ ID NO: 1576445 - DNA, 15 bp, Homo sapiens
attatgcctgggagt

SEQ ID NO: 1576446 - DNA, 15 bp, Homo sapiens
cattatgcctgggag

SEQ ID NO: 1576447 - DNA, 15 bp, Homo sapiens
tcattatgcctggga

SEQ ID NO: 1576448 - DNA, 15 bp, Homo sapiens
ctcattatgcctggg

SEQ ID NO: 1576449 - DNA, 15 bp, Homo sapiens
cctcattatgcctgg

SEQ ID NO: 1576450 - DNA, 15 bp, Homo sapiens
gcctcattatgcctg

SEQ ID NO: 1576451 - DNA, 15 bp, Homo sapiens
tgcctcattatgcct

SEQ ID NO: 1576452 - DNA, 15 bp, Homo sapiens
atgcctcattatgcc

SEQ ID NO: 1576453 - DNA, 15 bp, Homo sapiens
catgcctcattatgc

SEQ ID NO: 1576454 - DNA, 15 bp, Homo sapiens
acatgcctcattatg

SEQ ID NO: 1576455 - DNA, 15 bp, Homo sapiens
gacatgcctcattat

SEQ ID NO: 1576456 - DNA, 15 bp, Homo sapiens
agacatgcctcatta

SEQ ID NO: 1576457 - DNA, 15 bp, Homo sapiens
aagacatgcctcatt

SEQ ID NO: 1576458 - DNA, 15 bp, Homo sapiens
taagacatgcctcat

SEQ ID NO: 1576459 - DNA, 15 bp, Homo sapiens
gtaagacatgcctca

SEQ ID NO: 1576460 - DNA, 15 bp, Homo sapiens
agtaagacatgcctc

SEQ ID NO: 1576461 - DNA, 15 bp, Homo sapiens
gagtaagacatgcct

SEQ ID NO: 1576462 - DNA, 15 bp, Homo sapiens
tgagtaagacatgcc

SEQ ID NO: 1576463 - DNA, 15 bp, Homo sapiens
ttgagtaagacatgc

SEQ ID NO: 1576464 - DNA, 15 bp, Homo sapiens
attgagtaagacatg

SEQ ID NO: 1576465 - DNA, 15 bp, Homo sapiens
cattgagtaagacat

SEQ ID NO: 1576466 - DNA, 15 bp, Homo sapiens
acattgagtaagaca

SEQ ID NO: 1576467 - DNA, 15 bp, Homo sapiens
aacattgagtaagac

SEQ ID NO: 1576468 - DNA, 15 bp, Homo sapiens
taacattgagtaaga

SEQ ID NO: 1576469 - DNA, 15 bp, Homo sapiens
ataacattgagtaag

SEQ ID NO: 1576470 - DNA, 15 bp, Homo sapiens
cataacattgagtaa

SEQ ID NO: 1576471 - DNA, 15 bp, Homo sapiens
gcataacattgagta

SEQ ID NO: 1576472 - DNA, 15 bp, Homo sapiens
tgcataacattgagt

SEQ ID NO: 1576473 - DNA, 15 bp, Homo sapiens
ttgcataacattgag

SEQ ID NO: 1576474 - DNA, 15 bp, Homo sapiens
attgcataacattga

SEQ ID NO: 1576475 - DNA, 15 bp, Homo sapiens
cattgcataacattg

SEQ ID NO: 1576476 - DNA, 15 bp, Homo sapiens
ccattgcataacatt

SEQ ID NO: 1576477 - DNA, 15 bp, Homo sapiens
tccattgcataacat

SEQ ID NO: 1576478 - DNA, 15 bp, Homo sapiens
atccattgcataaca

SEQ ID NO: 1576479 - DNA, 15 bp, Homo sapiens
aatccattgcataac

SEQ ID NO: 1576480 - DNA, 15 bp, Homo sapiens
aaatccattgcataa

SEQ ID NO: 1576481 - DNA, 15 bp, Homo sapiens
taaatccattgcata

SEQ ID NO: 1576482 - DNA, 15 bp, Homo sapiens
ctaaatccattgcat

SEQ ID NO: 1576483 - DNA, 15 bp, Homo sapiens
cctaaatccattgca

SEQ ID NO: 1576484 - DNA, 15 bp, Homo sapiens
gcctaaatccattgc

SEQ ID NO: 1576485 - DNA, 15 bp, Homo sapiens
tgcctaaatccattg

SEQ ID NO: 1576486 - DNA, 15 bp, Homo sapiens
ttgcctaaatccatt

SEQ ID NO: 1576487 - DNA, 15 bp, Homo sapiens
tttgcctaaatccat

SEQ ID NO: 1576488 - DNA, 15 bp, Homo sapiens
ttttgcctaaatcca

SEQ ID NO: 1576489 - DNA, 15 bp, Homo sapiens
tttttgcctaaatcc

SEQ ID NO: 1576490 - DNA, 15 bp, Homo sapiens
atttttgcctaaatc

SEQ ID NO: 1576491 - DNA, 15 bp, Homo sapiens
aatttttgcctaaat

SEQ ID NO: 1576492 - DNA, 15 bp, Homo sapiens
gaatttttgcctaaa

SEQ ID NO: 1576493 - DNA, 15 bp, Homo sapiens
tgaatttttgcctaa

SEQ ID NO: 1576494 - DNA, 15 bp, Homo sapiens
atgaatttttgccta

SEQ ID NO: 1576495 - DNA, 15 bp, Homo sapiens
aatgaatttttgcct

SEQ ID NO: 1576496 - DNA, 15 bp, Homo sapiens
gaatgaatttttgcc

SEQ ID NO: 1576497 - DNA, 15 bp, Homo sapiens
agaatgaatttttgc

SEQ ID NO: 1576498 - DNA, 15 bp, Homo sapiens
aagaatgaatttttg

SEQ ID NO: 1576499 - DNA, 15 bp, Homo sapiens
taagaatgaattttt

SEQ ID NO: 1576500 - DNA, 15 bp, Homo sapiens
ctaagaatgaatttt

SEQ ID NO: 1576501 - DNA, 15 bp, Homo sapiens
actaagaatgaattt

SEQ ID NO: 1576502 - DNA, 15 bp, Homo sapiens
cactaagaatgaatt

SEQ ID NO: 1576503 - DNA, 15 bp, Homo sapiens
acactaagaatgaat

SEQ ID NO: 1576504 - DNA, 15 bp, Homo sapiens
gacactaagaatgaa

SEQ ID NO: 1576505 - DNA, 15 bp, Homo sapiens
tgacactaagaatga

SEQ ID NO: 1576506 - DNA, 15 bp, Homo sapiens
ctgacactaagaatg

SEQ ID NO: 1576507 - DNA, 15 bp, Homo sapiens
gctgacactaagaat

SEQ ID NO: 1576508 - DNA, 15 bp, Homo sapiens
ggctgacactaagaa

SEQ ID NO: 1576509 - DNA, 15 bp, Homo sapiens
tggctgacactaaga

SEQ ID NO: 1576510 - DNA, 15 bp, Homo sapiens
gtggctgacactaag

SEQ ID NO: 1576511 - DNA, 15 bp, Homo sapiens
tgtggctgacactaa

SEQ ID NO: 1576512 - DNA, 15 bp, Homo sapiens
gtgtggctgacacta

SEQ ID NO: 1576513 - DNA, 15 bp, Homo sapiens
tgtgtggctgacact

SEQ ID NO: 1576514 - DNA, 15 bp, Homo sapiens
ttgtgtggctgacac

SEQ ID NO: 1576515 - DNA, 15 bp, Homo sapiens
attgtgtggctgaca

SEQ ID NO: 1576516 - DNA, 15 bp, Homo sapiens
aattgtgtggctgac

SEQ ID NO: 1576517 - DNA, 15 bp, Homo sapiens
aaattgtgtggctga

SEQ ID NO: 1576518 - DNA, 15 bp, Homo sapiens
aaaattgtgtggctg

SEQ ID NO: 1576519 - DNA, 15 bp, Homo sapiens
aaaaattgtgtggct

SEQ ID NO: 1576520 - DNA, 15 bp, Homo sapiens
aaaaaattgtgtggc

SEQ ID NO: 1576521 - DNA, 15 bp, Homo sapiens
aaaaaaattgtgtgg

SEQ ID NO: 1576522 - DNA, 15 bp, Homo sapiens
aaaaaaaattgtgtg

SEQ ID NO: 1576523 - DNA, 15 bp, Homo sapiens
taaaaaaaattgtgt

SEQ ID NO: 1576524 - DNA, 15 bp, Homo sapiens
ttaaaaaaaattgtg

SEQ ID NO: 1576525 - DNA, 15 bp, Homo sapiens
attaaaaaaaattgt

SEQ ID NO: 1576526 - DNA, 15 bp, Homo sapiens
cattaaaaaaaattg

SEQ ID NO: 1576527 - DNA, 15 bp, Homo sapiens
gcattaaaaaaaatt

SEQ ID NO: 1576528 - DNA, 15 bp, Homo sapiens
tgcattaaaaaaaat

SEQ ID NO: 1576529 - DNA, 15 bp, Homo sapiens
ctgcattaaaaaaaa

SEQ ID NO: 1576530 - DNA, 15 bp, Homo sapiens
ttctagtcataaatg

SEQ ID NO: 1576531 - DNA, 15 bp, Homo sapiens
tttctagtcataaat

SEQ ID NO: 1576532 - DNA, 15 bp, Homo sapiens
gtttctagtcataaa

SEQ ID NO: 1576533 - DNA, 15 bp, Homo sapiens
agtttctagtcataa

SEQ ID NO: 1576534 - DNA, 15 bp, Homo sapiens
aagtttctagtcata

SEQ ID NO: 1576535 - DNA, 15 bp, Homo sapiens
gaagtttctagtcat

SEQ ID NO: 1576536 - DNA, 15 bp, Homo sapiens
agaagtttctagtca

SEQ ID NO: 1576537 - DNA, 15 bp, Homo sapiens
aagaagtttctagtc

SEQ ID NO: 1576538 - DNA, 15 bp, Homo sapiens
gaagaagtttctagt

SEQ ID NO: 1576539 - DNA, 15 bp, Homo sapiens
tgaagaagtttctag

SEQ ID NO: 1576540 - DNA, 15 bp, Homo sapiens
ctgaagaagtttcta

SEQ ID NO: 1576541 - DNA, 15 bp, Homo sapiens
actgaagaagtttct

SEQ ID NO: 1576542 - DNA, 15 bp, Homo sapiens
aactgaagaagtttc

SEQ ID NO: 1576543 - DNA, 15 bp, Homo sapiens
aaactgaagaagttt

SEQ ID NO: 1576544 - DNA, 15 bp, Homo sapiens
gaaactgaagaagtt

SEQ ID NO: 1576545 - DNA, 15 bp, Homo sapiens
agaaactgaagaagt

SEQ ID NO: 1576546 - DNA, 15 bp, Homo sapiens
aagaaactgaagaag

SEQ ID NO: 1576547 - DNA, 15 bp, Homo sapiens
aaagaaactgaagaa

SEQ ID NO: 1576548 - DNA, 15 bp, Homo sapiens
gaaagaaactgaaga

SEQ ID NO: 1576549 - DNA, 15 bp, Homo sapiens
agaaagaaactgaag

SEQ ID NO: 1576550 - DNA, 15 bp, Homo sapiens
aagaaagaaactgaa

SEQ ID NO: 1576551 - DNA, 15 bp, Homo sapiens
gaagaaagaaactga

SEQ ID NO: 1576552 - DNA, 15 bp, Homo sapiens
agaagaaagaaactg

SEQ ID NO: 1576553 - DNA, 15 bp, Homo sapiens
aagaagaaagaaact

SEQ ID NO: 1576554 - DNA, 15 bp, Homo sapiens
aaagaagaaagaaac

SEQ ID NO: 1576555 - DNA, 15 bp, Homo sapiens
caaaagaagaaagaa

SEQ ID NO: 1576556 - DNA, 15 bp, Homo sapiens
tcaaaagaagaaaga

SEQ ID NO: 1576557 - DNA, 15 bp, Homo sapiens
gtcaaaagaagaaag

SEQ ID NO: 1576558 - DNA, 15 bp, Homo sapiens
ggtcaaaagaagaaa

SEQ ID NO: 1576559 - DNA, 15 bp, Homo sapiens
tggtcaaaagaagaa

SEQ ID NO: 1576560 - DNA, 15 bp, Homo sapiens
gtggtcaaaagaaga

SEQ ID NO: 1576561 - DNA, 15 bp, Homo sapiens
agtggtcaaaagaag

SEQ ID NO: 1576562 - DNA, 15 bp, Homo sapiens
aagtggtcaaaagaa

SEQ ID NO: 1576563 - DNA, 15 bp, Homo sapiens
aaagtggtcaaaaga

SEQ ID NO: 1576564 - DNA, 15 bp, Homo sapiens
gaaagtggtcaaaag

SEQ ID NO: 1576565 - DNA, 15 bp, Homo sapiens
agaaagtggtcaaaa

SEQ ID NO: 1576566 - DNA, 15 bp, Homo sapiens
cagaaagtggtcaaa

SEQ ID NO: 1576567 - DNA, 15 bp, Homo sapiens
ccagaaagtggtcaa

SEQ ID NO: 1576568 - DNA, 15 bp, Homo sapiens
accagaaagtggtca

SEQ ID NO: 1576569 - DNA, 15 bp, Homo sapiens
caccagaaagtggtc

SEQ ID NO: 1576570 - DNA, 15 bp, Homo sapiens
gcaccagaaagtggt

SEQ ID NO: 1576571 - DNA, 15 bp, Homo sapiens
ggcaccagaaagtgg

SEQ ID NO: 1576572 - DNA, 15 bp, Homo sapiens
aggcaccagaaagtg

SEQ ID NO: 1576573 - DNA, 15 bp, Homo sapiens
aaggcaccagaaagt

SEQ ID NO: 1576574 - DNA, 15 bp, Homo sapiens
gaaggcaccagaaag

SEQ ID NO: 1576575 - DNA, 15 bp, Homo sapiens
tgaaggcaccagaaa

SEQ ID NO: 1576576 - DNA, 15 bp, Homo sapiens
ttgaaggcaccagaa

SEQ ID NO: 1576577 - DNA, 15 bp, Homo sapiens
tttgaaggcaccaga

SEQ ID NO: 1576578 - DNA, 15 bp, Homo sapiens
atttgaaggcaccag

SEQ ID NO: 1576579 - DNA, 15 bp, Homo sapiens
tatttgaaggcacca

SEQ ID NO: 1576580 - DNA, 15 bp, Homo sapiens
ttatttgaaggcacc

SEQ ID NO: 1576581 - DNA, 15 bp, Homo sapiens
attatttgaaggcac

SEQ ID NO: 1576582 - DNA, 15 bp, Homo sapiens
aattatttgaaggca

SEQ ID NO: 1576583 - DNA, 15 bp, Homo sapiens
caattatttgaaggc

SEQ ID NO: 1576584 - DNA, 15 bp, Homo sapiens
acaattatttgaagg

SEQ ID NO: 1576585 - DNA, 15 bp, Homo sapiens
cacaattatttgaag

SEQ ID NO: 1576586 - DNA, 15 bp, Homo sapiens
acacaattatttgaa

SEQ ID NO: 1576587 - DNA, 15 bp, Homo sapiens
cacacaattatttga

SEQ ID NO: 1576588 - DNA, 15 bp, Homo sapiens
acacacaattatttg

SEQ ID NO: 1576589 - DNA, 15 bp, Homo sapiens
cacacacaattattt

SEQ ID NO: 1576590 - DNA, 15 bp, Homo sapiens
acacacacaattatt

SEQ ID NO: 1576591 - DNA, 15 bp, Homo sapiens
cacacacacaattat

SEQ ID NO: 1576592 - DNA, 15 bp, Homo sapiens
acacacacacaatta

SEQ ID NO: 1576593 - DNA, 15 bp, Homo sapiens
aacacacacacaatt

SEQ ID NO: 1576594 - DNA, 15 bp, Homo sapiens
aaacacacacacaat

SEQ ID NO: 1576595 - DNA, 15 bp, Homo sapiens
caaacacacacacaa

SEQ ID NO: 1576596 - DNA, 15 bp, Homo sapiens
gacaatacacacaca

SEQ ID NO: 1576597 - DNA, 15 bp, Homo sapiens
ggacaatacacacac

SEQ ID NO: 1576598 - DNA, 15 bp, Homo sapiens
tggacaatacacaca

SEQ ID NO: 1576599 - DNA, 15 bp, Homo sapiens
ctggacaatacacac

SEQ ID NO: 1576600 - DNA, 15 bp, Homo sapiens
tctggacaatacaca

SEQ ID NO: 1576601 - DNA, 15 bp, Homo sapiens
ctctggacaatacac

SEQ ID NO: 1576602 - DNA, 15 bp, Homo sapiens
actctggacaataca

SEQ ID NO: 1576603 - DNA, 15 bp, Homo sapiens
aactctggacaatac

SEQ ID NO: 1576604 - DNA, 15 bp, Homo sapiens
aaactctggacaata

SEQ ID NO: 1576605 - DNA, 15 bp, Homo sapiens
taaactctggacaat

SEQ ID NO: 1576606 - DNA, 15 bp, Homo sapiens
ataaactctggacaa

SEQ ID NO: 1576607 - DNA, 15 bp, Homo sapiens
gataaactctggaca

SEQ ID NO: 1576608 - DNA, 15 bp, Homo sapiens
tgataaactctggac

SEQ ID NO: 1576609 - DNA, 15 bp, Homo sapiens
atgataaactctgga

SEQ ID NO: 1576610 - DNA, 15 bp, Homo sapiens
aatgataaactctgg

SEQ ID NO: 1576611 - DNA, 15 bp, Homo sapiens
taatgataaactctg

SEQ ID NO: 1576612 - DNA, 15 bp, Homo sapiens
ataatgataaactct

SEQ ID NO: 1576613 - DNA, 15 bp, Homo sapiens
aataatgataaactc

SEQ ID NO: 1576614 - DNA, 15 bp, Homo sapiens
taataatgataaact

SEQ ID NO: 1576615 - DNA, 15 bp, Homo sapiens
ataataatgataaac

SEQ ID NO: 1576616 - DNA, 15 bp, Homo sapiens
gataataatgataaa

SEQ ID NO: 1576617 - DNA, 15 bp, Homo sapiens
agataataatgataa

SEQ ID NO: 1576618 - DNA, 15 bp, Homo sapiens
cagataataatgata

SEQ ID NO: 1576619 - DNA, 15 bp, Homo sapiens
tcagataataatgat

SEQ ID NO: 1576620 - DNA, 15 bp, Homo sapiens
ttcagataataatga

SEQ ID NO: 1576621 - DNA, 15 bp, Homo sapiens
tttcagataataatg

SEQ ID NO: 1576622 - DNA, 15 bp, Homo sapiens
ttttcagataataat

SEQ ID NO: 1576623 - DNA, 15 bp, Homo sapiens
tttttcagataataa

SEQ ID NO: 1576624 - DNA, 15 bp, Homo sapiens
ctttttcagataata

SEQ ID NO: 1576625 - DNA, 15 bp, Homo sapiens
cctttttcagataat

SEQ ID NO: 1576626 - DNA, 15 bp, Homo sapiens
gcctttttcagataa

SEQ ID NO: 1576627 - DNA, 15 bp, Homo sapiens
tgcctttttcagata

SEQ ID NO: 1576628 - DNA, 15 bp, Homo sapiens
atgcctttttcagat

SEQ ID NO: 1576629 - DNA, 15 bp, Homo sapiens
tatgcctttttcaga

SEQ ID NO: 1576630 - DNA, 15 bp, Homo sapiens
ctatgcctttttcag

SEQ ID NO: 1576631 - DNA, 15 bp, Homo sapiens
actatgcctttttca

SEQ ID NO: 1576632 - DNA, 15 bp, Homo sapiens
gactatgcctttttc

SEQ ID NO: 1576633 - DNA, 15 bp, Homo sapiens
tgactatgccttttt

SEQ ID NO: 1576634 - DNA, 15 bp, Homo sapiens
ctgactatgcctttt

SEQ ID NO: 1576635 - DNA, 15 bp, Homo sapiens
tctgactatgccttt

SEQ ID NO: 1576636 - DNA, 15 bp, Homo sapiens
atctgactatgcctt

SEQ ID NO: 1576637 - DNA, 15 bp, Homo sapiens
tatctgactatgcct

SEQ ID NO: 1576638 - DNA, 15 bp, Homo sapiens
ttatctgactatgcc

SEQ ID NO: 1576639 - DNA, 15 bp, Homo sapiens
attatctgactatgc

SEQ ID NO: 1576640 - DNA, 15 bp, Homo sapiens
cattatctgactatg

SEQ ID NO: 1576641 - DNA, 15 bp, Homo sapiens
acattatctgactat

SEQ ID NO: 1576642 - DNA, 15 bp, Homo sapiens
tacattatctgacta

SEQ ID NO: 1576643 - DNA, 15 bp, Homo sapiens
gtacattatctgact

SEQ ID NO: 1576644 - DNA, 15 bp, Homo sapiens
agtacattatctgac

SEQ ID NO: 1576645 - DNA, 15 bp, Homo sapiens
aagtacattatctga

SEQ ID NO: 1576646 - DNA, 15 bp, Homo sapiens
aaagtacattatctg

SEQ ID NO: 1576647 - DNA, 15 bp, Homo sapiens
aaaagtacattatct

SEQ ID NO: 1576648 - DNA, 15 bp, Homo sapiens
aaaaagtacattatc

SEQ ID NO: 1576649 - DNA, 15 bp, Homo sapiens
taaaaagtacattat

SEQ ID NO: 1576650 - DNA, 15 bp, Homo sapiens
ataaaaagtacatta

SEQ ID NO: 1576651 - DNA, 15 bp, Homo sapiens
aataaaaagtacatt

SEQ ID NO: 1576652 - DNA, 15 bp, Homo sapiens
taataaaaagtacat

SEQ ID NO: 1576653 - DNA, 15 bp, Homo sapiens
gtaataaaaagtaca

SEQ ID NO: 1576654 - DNA, 15 bp, Homo sapiens
agtaataaaaagtac

SEQ ID NO: 1576655 - DNA, 15 bp, Homo sapiens
cagtaataaaaagta

SEQ ID NO: 1576656 - DNA, 15 bp, Homo sapiens
ccagtaataaaaagt

SEQ ID NO: 1576657 - DNA, 15 bp, Homo sapiens
tccagtaataaaaag

SEQ ID NO: 1576658 - DNA, 15 bp, Homo sapiens
gtccagtaataaaaa

SEQ ID NO: 1576659 - DNA, 15 bp, Homo sapiens
agtccagtaataaaa

SEQ ID NO: 1576660 - DNA, 15 bp, Homo sapiens
gagtccagtaataaa

SEQ ID NO: 1576661 - DNA, 15 bp, Homo sapiens
tgagtccagtaataa

SEQ ID NO: 1576662 - DNA, 15 bp, Homo sapiens
ctgagtccagtaata

SEQ ID NO: 1576663 - DNA, 15 bp, Homo sapiens
tctgagtccagtaat

SEQ ID NO: 1576664 - DNA, 15 bp, Homo sapiens
ttctgagtccagtaa

SEQ ID NO: 1576665 - DNA, 15 bp, Homo sapiens
gttctgagtccagta

SEQ ID NO: 1576666 - DNA, 15 bp, Homo sapiens
tgttctgagtccagt

SEQ ID NO: 1576667 - DNA, 15 bp, Homo sapiens
gtgttctgagtccag

SEQ ID NO: 1576668 - DNA, 15 bp, Homo sapiens
ggtgttctgagtcca

SEQ ID NO: 1576669 - DNA, 15 bp, Homo sapiens
gggtgttctgagtcc

SEQ ID NO: 1576670 - DNA, 15 bp, Homo sapiens
tgggtgttctgagtc

SEQ ID NO: 1576671 - DNA, 15 bp, Homo sapiens
atgggtgttctgagt

SEQ ID NO: 1576672 - DNA, 15 bp, Homo sapiens
aatgggtgttctgag

SEQ ID NO: 1576673 - DNA, 15 bp, Homo sapiens
gaatgggtgttctga

SEQ ID NO: 1576674 - DNA, 15 bp, Homo sapiens
tgaatgggtgttctg

SEQ ID NO: 1576675 - DNA, 15 bp, Homo sapiens
ttgaatgggtgttct

SEQ ID NO: 1576676 - DNA, 15 bp, Homo sapiens
cttgaatgggtgttc

SEQ ID NO: 1576677 - DNA, 15 bp, Homo sapiens
tcttgaatgggtgtt

SEQ ID NO: 1576678 - DNA, 15 bp, Homo sapiens
ttcttgaatgggtgt

SEQ ID NO: 1576679 - DNA, 15 bp, Homo sapiens
attcttgaatgggtg

SEQ ID NO: 1576680 - DNA, 15 bp, Homo sapiens
tattcttgaatgggt

SEQ ID NO: 1576681 - DNA, 15 bp, Homo sapiens
atattcttgaatggg

SEQ ID NO: 1576682 - DNA, 15 bp, Homo sapiens
tatattcttgaatgg

SEQ ID NO: 1576683 - DNA, 15 bp, Homo sapiens
gtatattcttgaatg

SEQ ID NO: 1576684 - DNA, 15 bp, Homo sapiens
tgtatattcttgaat

SEQ ID NO: 1576685 - DNA, 15 bp, Homo sapiens
gtgtatattcttgaa

SEQ ID NO: 1576686 - DNA, 15 bp, Homo sapiens
agtgtatattcttga

SEQ ID NO: 1576687 - DNA, 15 bp, Homo sapiens
aagtgtatattcttg

SEQ ID NO: 1576688 - DNA, 15 bp, Homo sapiens
taagtgtatattctt

SEQ ID NO: 1576689 - DNA, 15 bp, Homo sapiens
ttaagtgtatattct

SEQ ID NO: 1576690 - DNA, 15 bp, Homo sapiens
tttaagtgtatattc

SEQ ID NO: 1576691 - DNA, 15 bp, Homo sapiens
ttttaagtgtatatt

SEQ ID NO: 1576692 - DNA, 15 bp, Homo sapiens
gttttaagtgtatat

SEQ ID NO: 1576693 - DNA, 15 bp, Homo sapiens
tgttttaagtgtata

SEQ ID NO: 1576694 - DNA, 15 bp, Homo sapiens
ttgttttaagtgtat

SEQ ID NO: 1576695 - DNA, 15 bp, Homo sapiens
cttgttttaagtgta

SEQ ID NO: 1576696 - DNA, 15 bp, Homo sapiens
gcttgttttaagtgt

SEQ ID NO: 1576697 - DNA, 15 bp, Homo sapiens
agcttgttttaagtg

SEQ ID NO: 1576698 - DNA, 15 bp, Homo sapiens
aagcttgttttaagt

SEQ ID NO: 1576699 - DNA, 15 bp, Homo sapiens
aaagcttgttttaag

SEQ ID NO: 1576700 - DNA, 15 bp, Homo sapiens
aaaagcttgttttaa

SEQ ID NO: 1576701 - DNA, 15 bp, Homo sapiens
aaaaagcttgtttta

SEQ ID NO: 1576702 - DNA, 15 bp, Homo sapiens
caaaaagcttgtttt

SEQ ID NO: 1576703 - DNA, 15 bp, Homo sapiens
ccaaaaagcttgttt

SEQ ID NO: 1576704 - DNA, 15 bp, Homo sapiens
cccaaaaagcttgtt

SEQ ID NO: 1576705 - DNA, 15 bp, Homo sapiens
acccaaaaagcttgt

SEQ ID NO: 1576706 - DNA, 15 bp, Homo sapiens
aacccaaaaagcttg

SEQ ID NO: 1576707 - DNA, 15 bp, Homo sapiens
taacccaaaaagctt

SEQ ID NO: 1576708 - DNA, 15 bp, Homo sapiens
ataacccaaaaagct

SEQ ID NO: 1576709 - DNA, 15 bp, Homo sapiens
tataacccaaaaagc

SEQ ID NO: 1576710 - DNA, 15 bp, Homo sapiens
gtataacccaaaaag

SEQ ID NO: 1576711 - DNA, 15 bp, Homo sapiens
agtataacccaaaaa

SEQ ID NO: 1576712 - DNA, 15 bp, Homo sapiens
aagtataacccaaaa

SEQ ID NO: 1576713 - DNA, 15 bp, Homo sapiens
taagtataacccaaa

SEQ ID NO: 1576714 - DNA, 15 bp, Homo sapiens
ataagtataacccaa

SEQ ID NO: 1576715 - DNA, 15 bp, Homo sapiens
cataagtataaccca

SEQ ID NO: 1576716 - DNA, 15 bp, Homo sapiens
gcataagtataaccc

SEQ ID NO: 1576717 - DNA, 15 bp, Homo sapiens
tgcataagtataacc

SEQ ID NO: 1576718 - DNA, 15 bp, Homo sapiens
gtgcataagtataac

SEQ ID NO: 1576719 - DNA, 15 bp, Homo sapiens
agtgcataagtataa

SEQ ID NO: 1576720 - DNA, 15 bp, Homo sapiens
gagtgcataagtata

SEQ ID NO: 1576721 - DNA, 15 bp, Homo sapiens
ggagtgcataagtat

SEQ ID NO: 1576722 - DNA, 15 bp, Homo sapiens
tggagtgcataagta

SEQ ID NO: 1576723 - DNA, 15 bp, Homo sapiens
ttggagtgcataagt

SEQ ID NO: 1576724 - DNA, 15 bp, Homo sapiens
tttggagtgcataag

SEQ ID NO: 1576725 - DNA, 15 bp, Homo sapiens
ctttggagtgcataa

SEQ ID NO: 1576726 - DNA, 15 bp, Homo sapiens
actttggagtgcata

SEQ ID NO: 1576727 - DNA, 15 bp, Homo sapiens
aactttggagtgcat

SEQ ID NO: 1576728 - DNA, 15 bp, Homo sapiens
aaactttggagtgca

SEQ ID NO: 1576729 - DNA, 15 bp, Homo sapiens
caaactttggagtgc

SEQ ID NO: 1576730 - DNA, 15 bp, Homo sapiens
tcaaactttggagtg

SEQ ID NO: 1576731 - DNA, 15 bp, Homo sapiens
gtcaaactttggagt

SEQ ID NO: 1576732 - DNA, 15 bp, Homo sapiens
tgtcaaactttggag

SEQ ID NO: 1576733 - DNA, 15 bp, Homo sapiens
ctgtcaaactttgga

SEQ ID NO: 1576734 - DNA, 15 bp, Homo sapiens
cctgtcaaactttgg

SEQ ID NO: 1576735 - DNA, 15 bp, Homo sapiens
acctgtcaaactttg

SEQ ID NO: 1576736 - DNA, 15 bp, Homo sapiens
cacctgtcaaacttt

SEQ ID NO: 1576737 - DNA, 15 bp, Homo sapiens
gcacctgtcaaactt

SEQ ID NO: 1576738 - DNA, 15 bp, Homo sapiens
agcacctgtcaaact

SEQ ID NO: 1576739 - DNA, 15 bp, Homo sapiens
cagcacctgtcaaac

SEQ ID NO: 1576740 - DNA, 15 bp, Homo sapiens
acagcacctgtcaaa

SEQ ID NO: 1576741 - DNA, 15 bp, Homo sapiens
gacagcacctgtcaa

SEQ ID NO: 1576742 - DNA, 15 bp, Homo sapiens
agacagcacctgtca

SEQ ID NO: 1576743 - DNA, 15 bp, Homo sapiens
aagacagcacctgtc

SEQ ID NO: 1576744 - DNA, 15 bp, Homo sapiens
taagacagcacctgt

SEQ ID NO: 1576745 - DNA, 15 bp, Homo sapiens
ctaagacagcacctg

SEQ ID NO: 1576746 - DNA, 15 bp, Homo sapiens
tctaagacagcacct

SEQ ID NO: 1576747 - DNA, 15 bp, Homo sapiens
atctaagacagcacc

SEQ ID NO: 1576748 - DNA, 15 bp, Homo sapiens
aatctaagacagcac

SEQ ID NO: 1576749 - DNA, 15 bp, Homo sapiens
taatctaagacagca

SEQ ID NO: 1576750 - DNA, 15 bp, Homo sapiens
ttaatctaagacagc

SEQ ID NO: 1576751 - DNA, 15 bp, Homo sapiens
tttaatctaagacag

SEQ ID NO: 1576752 - DNA, 15 bp, Homo sapiens
gtttaatctaagaca

SEQ ID NO: 1576753 - DNA, 15 bp, Homo sapiens
agtttaatctaagac

SEQ ID NO: 1576754 - DNA, 15 bp, Homo sapiens
aagtttaatctaaga

SEQ ID NO: 1576755 - DNA, 15 bp, Homo sapiens
gaagtttaatctaag

SEQ ID NO: 1576756 - DNA, 15 bp, Homo sapiens
ggaagtttaatctaa

SEQ ID NO: 1576757 - DNA, 15 bp, Homo sapiens
tggaagtttaatcta

SEQ ID NO: 1576758 - DNA, 15 bp, Homo sapiens
atggaagtttaatct

SEQ ID NO: 1576759 - DNA, 15 bp, Homo sapiens
catggaagtttaatc

SEQ ID NO: 1576760 - DNA, 15 bp, Homo sapiens
gcatggaagtttaat

SEQ ID NO: 1576761 - DNA, 15 bp, Homo sapiens
agcatggaagtttaa

SEQ ID NO: 1576762 - DNA, 15 bp, Homo sapiens
aagcatggaagttta

SEQ ID NO: 1576763 - DNA, 15 bp, Homo sapiens
taagcatggaagttt

SEQ ID NO: 1576764 - DNA, 15 bp, Homo sapiens
ttaagcatggaagtt

SEQ ID NO: 1576765 - DNA, 15 bp, Homo sapiens
gttaagcatggaagt

SEQ ID NO: 1576766 - DNA, 15 bp, Homo sapiens
agttaagcatggaag

SEQ ID NO: 1576767 - DNA, 15 bp, Homo sapiens
aagttaagcatggaa

SEQ ID NO: 1576768 - DNA, 15 bp, Homo sapiens
aaagttaagcatgga

SEQ ID NO: 1576769 - DNA, 15 bp, Homo sapiens
caaagttaagcatgg

SEQ ID NO: 1576770 - DNA, 15 bp, Homo sapiens
acaaagttaagcatg

SEQ ID NO: 1576771 - DNA, 15 bp, Homo sapiens
gacaaagttaagcat

SEQ ID NO: 1576772 - DNA, 15 bp, Homo sapiens
agacaaagttaagca

SEQ ID NO: 1576773 - DNA, 15 bp, Homo sapiens
aagacaaagttaagc

SEQ ID NO: 1576774 - DNA, 15 bp, Homo sapiens
aaagacaaagttaag

SEQ ID NO: 1576775 - DNA, 15 bp, Homo sapiens
aaaagacaaagttaa

SEQ ID NO: 1576776 - DNA, 15 bp, Homo sapiens
caaaagacaaagtta

SEQ ID NO: 1576777 - DNA, 15 bp, Homo sapiens
tcaaaagacaaagtt

SEQ ID NO: 1576778 - DNA, 15 bp, Homo sapiens
ctcaaaagacaaagt

SEQ ID NO: 1576779 - DNA, 15 bp, Homo sapiens
tctcaaaagacaaag

SEQ ID NO: 1576780 - DNA, 15 bp, Homo sapiens
ttctcaaaagacaaa

SEQ ID NO: 1576781 - DNA, 15 bp, Homo sapiens
cttctcaaaagacaa

SEQ ID NO: 1576782 - DNA, 15 bp, Homo sapiens
acttctcaaaagaca

SEQ ID NO: 1576783 - DNA, 15 bp, Homo sapiens
gacttctcaaaagac

SEQ ID NO: 1576784 - DNA, 15 bp, Homo sapiens
tgacttctcaaaaga

SEQ ID NO: 1576785 - DNA, 15 bp, Homo sapiens
atgacttctcaaaag

SEQ ID NO: 1576786 - DNA, 15 bp, Homo sapiens
gatgacttctcaaaa

SEQ ID NO: 1576787 - DNA, 15 bp, Homo sapiens
agatgacttctcaaa

SEQ ID NO: 1576788 - DNA, 15 bp, Homo sapiens
aagatgacttctcaa

SEQ ID NO: 1576789 - DNA, 15 bp, Homo sapiens
gaagatgacttctca

SEQ ID NO: 1576790 - DNA, 15 bp, Homo sapiens
ggaagatgacttctc

SEQ ID NO: 1576791 - DNA, 15 bp, Homo sapiens
aggaagatgacttct

SEQ ID NO: 1576792 - DNA, 15 bp, Homo sapiens
gaggaagatgacttc

SEQ ID NO: 1576793 - DNA, 15 bp, Homo sapiens
tgaggaagatgactt

SEQ ID NO: 1576794 - DNA, 15 bp, Homo sapiens
gtgaggaagatgact

SEQ ID NO: 1576795 - DNA, 15 bp, Homo sapiens
agtgaggaagatgac

SEQ ID NO: 1576796 - DNA, 15 bp, Homo sapiens
tagtgaggaagatga

SEQ ID NO: 1576797 - DNA, 15 bp, Homo sapiens
gtagtgaggaagatg

SEQ ID NO: 1576798 - DNA, 15 bp, Homo sapiens
cgtagtgaggaagat

SEQ ID NO: 1576799 - DNA, 15 bp, Homo sapiens
tcgtagtgaggaaga

SEQ ID NO: 1576800 - DNA, 15 bp, Homo sapiens
ttcgtagtgaggaag

SEQ ID NO: 1576801 - DNA, 15 bp, Homo sapiens
gttcgtagtgaggaa

SEQ ID NO: 1576802 - DNA, 15 bp, Homo sapiens
tgttcgtagtgagga

SEQ ID NO: 1576803 - DNA, 15 bp, Homo sapiens
ttgttcgtagtgagg

SEQ ID NO: 1576804 - DNA, 15 bp, Homo sapiens
cttgttcgtagtgag

SEQ ID NO: 1576805 - DNA, 15 bp, Homo sapiens
tcttgttcgtagtga

SEQ ID NO: 1576806 - DNA, 15 bp, Homo sapiens
ttcttgttcgtagtg

SEQ ID NO: 1576807 - DNA, 15 bp, Homo sapiens
attcttgttcgtagt

SEQ ID NO: 1576808 - DNA, 15 bp, Homo sapiens
aattcttgttcgtag

SEQ ID NO: 1576809 - DNA, 15 bp, Homo sapiens
aaattcttgttcgta

SEQ ID NO: 1576810 - DNA, 15 bp, Homo sapiens
taaattcttgttcgt

SEQ ID NO: 1576811 - DNA, 15 bp, Homo sapiens
ttaaattcttgttcg

SEQ ID NO: 1576812 - DNA, 15 bp, Homo sapiens
tttaaattcttgttc

SEQ ID NO: 1576813 - DNA, 15 bp, Homo sapiens
gtttaaattcttgtt

SEQ ID NO: 1576814 - DNA, 15 bp, Homo sapiens
agtttaaattcttgt

SEQ ID NO: 1576815 - DNA, 15 bp, Homo sapiens
gagtttaaattcttg

SEQ ID NO: 1576816 - DNA, 15 bp, Homo sapiens
agagtttaaattctt

SEQ ID NO: 1576817 - DNA, 15 bp, Homo sapiens
aagagtttaaattct

SEQ ID NO: 1576818 - DNA, 15 bp, Homo sapiens
gaagagtttaaattc

SEQ ID NO: 1576819 - DNA, 15 bp, Homo sapiens
tgaagagtttaaatt

SEQ ID NO: 1576820 - DNA, 15 bp, Homo sapiens
ctgaagagtttaaat

SEQ ID NO: 1576821 - DNA, 15 bp, Homo sapiens
cctgaagagtttaaa

SEQ ID NO: 1576822 - DNA, 15 bp, Homo sapiens
acctgaagagtttaa

SEQ ID NO: 1576823 - DNA, 15 bp, Homo sapiens
aacctgaagagttta

SEQ ID NO: 1576824 - DNA, 15 bp, Homo sapiens
gaacctgaagagttt

SEQ ID NO: 1576825 - DNA, 15 bp, Homo sapiens
tgaacctgaagagtt

SEQ ID NO: 1576826 - DNA, 15 bp, Homo sapiens
atgaacctgaagagt

SEQ ID NO: 1576827 - DNA, 15 bp, Homo sapiens
aatgaacctgaagag

SEQ ID NO: 1576828 - DNA, 15 bp, Homo sapiens
taatgaacctgaaga

SEQ ID NO: 1576829 - DNA, 15 bp, Homo sapiens
ttaatgaacctgaag

SEQ ID NO: 1576830 - DNA, 15 bp, Homo sapiens
attaatgaacctgaa

SEQ ID NO: 1576831 - DNA, 15 bp, Homo sapiens
gattaatgaacctga

SEQ ID NO: 1576832 - DNA, 15 bp, Homo sapiens
tgattaatgaacctg

SEQ ID NO: 1576833 - DNA, 15 bp, Homo sapiens
gtgattaatgaacct

SEQ ID NO: 1576834 - DNA, 15 bp, Homo sapiens
tgtgattaatgaacc

SEQ ID NO: 1576835 - DNA, 15 bp, Homo sapiens
gtgtgattaatgaac

SEQ ID NO: 1576836 - DNA, 15 bp, Homo sapiens
agtgtgattaatgaa

SEQ ID NO: 1576837 - DNA, 15 bp, Homo sapiens
gagtgtgattaatga

SEQ ID NO: 1576838 - DNA, 15 bp, Homo sapiens
ggagtgtgattaatg

SEQ ID NO: 1576839 - DNA, 15 bp, Homo sapiens
gggagtgtgattaat

SEQ ID NO: 1576840 - DNA, 15 bp, Homo sapiens
agggagtgtgattaa

SEQ ID NO: 1576841 - DNA, 15 bp, Homo sapiens
cagggagtgtgatta

SEQ ID NO: 1576842 - DNA, 15 bp, Homo sapiens
tcagggagtgtgatt

SEQ ID NO: 1576843 - DNA, 15 bp, Homo sapiens
ttcagggagtgtgat

SEQ ID NO: 1576844 - DNA, 15 bp, Homo sapiens
tttcagggagtgtga

SEQ ID NO: 1576845 - DNA, 15 bp, Homo sapiens
atttcagggagtgtg

SEQ ID NO: 1576846 - DNA, 15 bp, Homo sapiens
gatttcagggagtgt

SEQ ID NO: 1576847 - DNA, 15 bp, Homo sapiens
agatttcagggagtg

SEQ ID NO: 1576848 - DNA, 15 bp, Homo sapiens
tagatttcagggagt

SEQ ID NO: 1576849 - DNA, 15 bp, Homo sapiens
ttagatttcagggag

SEQ ID NO: 1576850 - DNA, 15 bp, Homo sapiens
tttagatttcaggga

SEQ ID NO: 1576851 - DNA, 15 bp, Homo sapiens
ttttagatttcaggg

SEQ ID NO: 1576852 - DNA, 15 bp, Homo sapiens
attttagatttcagg

SEQ ID NO: 1576853 - DNA, 15 bp, Homo sapiens
tattttagatttcag

SEQ ID NO: 1576854 - DNA, 15 bp, Homo sapiens
ttattttagatttca

SEQ ID NO: 1576855 - DNA, 15 bp, Homo sapiens
tttattttagatttc

SEQ ID NO: 1576856 - DNA, 15 bp, Homo sapiens
ctttattttagattt

SEQ ID NO: 1576857 - DNA, 15 bp, Homo sapiens
actttattttagatt

SEQ ID NO: 1576858 - DNA, 15 bp, Homo sapiens
gactttattttagat

SEQ ID NO: 1576859 - DNA, 15 bp, Homo sapiens
tgactttattttaga

SEQ ID NO: 1576860 - DNA, 15 bp, Homo sapiens
atgactttattttag

SEQ ID NO: 1576861 - DNA, 15 bp, Homo sapiens
tatgactttatttta

SEQ ID NO: 1576862 - DNA, 15 bp, Homo sapiens
atatgactttatttt

SEQ ID NO: 1576863 - DNA, 15 bp, Homo sapiens
tatatgactttattt

SEQ ID NO: 1576864 - DNA, 15 bp, Homo sapiens
ttatatgactttatt

SEQ ID NO: 1576865 - DNA, 15 bp, Homo sapiens
tttatatgactttat

SEQ ID NO: 1576866 - DNA, 15 bp, Homo sapiens
gtttatatgacttta

SEQ ID NO: 1576867 - DNA, 15 bp, Homo sapiens
agtttatatgacttt

SEQ ID NO: 1576868 - DNA, 15 bp, Homo sapiens
aagtttatatgactt

SEQ ID NO: 1576869 - DNA, 15 bp, Homo sapiens
caagtttatatgact

SEQ ID NO: 1576870 - DNA, 15 bp, Homo sapiens
ccaagtttatatgac

SEQ ID NO: 1576871 - DNA, 15 bp, Homo sapiens
accaagtttatatga

SEQ ID NO: 1576872 - DNA, 15 bp, Homo sapiens
taccaagtttatatg

SEQ ID NO: 1576873 - DNA, 15 bp, Homo sapiens
ttaccaagtttatat

SEQ ID NO: 1576874 - DNA, 15 bp, Homo sapiens
tttaccaagtttata

SEQ ID NO: 1576875 - DNA, 15 bp, Homo sapiens
atttaccaagtttat

SEQ ID NO: 1576876 - DNA, 15 bp, Homo sapiens
tatttaccaagttta

SEQ ID NO: 1576877 - DNA, 15 bp, Homo sapiens
atatttaccaagttt

SEQ ID NO: 1576878 - DNA, 15 bp, Homo sapiens
tatatttaccaagtt

SEQ ID NO: 1576879 - DNA, 15 bp, Homo sapiens
gtatatttaccaagt

SEQ ID NO: 1576880 - DNA, 15 bp, Homo sapiens
agtatatttaccaag

SEQ ID NO: 1576881 - DNA, 15 bp, Homo sapiens
gagtatatttaccaa

SEQ ID NO: 1576882 - DNA, 15 bp, Homo sapiens
agagtatatttacca

SEQ ID NO: 1576883 - DNA, 15 bp, Homo sapiens
aagagtatatttacc

SEQ ID NO: 1576884 - DNA, 15 bp, Homo sapiens
taagagtatatttac

SEQ ID NO: 1576885 - DNA, 15 bp, Homo sapiens
gtaagagtatattta

SEQ ID NO: 1576886 - DNA, 15 bp, Homo sapiens
ggtaagagtatattt

SEQ ID NO: 1576887 - DNA, 15 bp, Homo sapiens
gggtaagagtatatt

SEQ ID NO: 1576888 - DNA, 15 bp, Homo sapiens
tgggtaagagtatat

SEQ ID NO: 1576889 - DNA, 15 bp, Homo sapiens
gtgggtaagagtata

SEQ ID NO: 1576890 - DNA, 15 bp, Homo sapiens
tgtgggtaagagtat

SEQ ID NO: 1576891 - DNA, 15 bp, Homo sapiens
ctgtgggtaagagta

SEQ ID NO: 1576892 - DNA, 15 bp, Homo sapiens
actgtgggtaagagt

SEQ ID NO: 1576893 - DNA, 15 bp, Homo sapiens
cactgtgggtaagag

SEQ ID NO: 1576894 - DNA, 15 bp, Homo sapiens
acactgtgggtaaga

SEQ ID NO: 1576895 - DNA, 15 bp, Homo sapiens
aacactgtgggtaag

SEQ ID NO: 1576896 - DNA, 15 bp, Homo sapiens
aaacactgtgggtaa

SEQ ID NO: 1576897 - DNA, 15 bp, Homo sapiens
aaaacactgtgggta

SEQ ID NO: 1576898 - DNA, 15 bp, Homo sapiens
gaaaacactgtgggt

SEQ ID NO: 1576899 - DNA, 15 bp, Homo sapiens
ggaaaacactgtggg

SEQ ID NO: 1576900 - DNA, 15 bp, Homo sapiens
aggaaaacactgtgg

SEQ ID NO: 1576901 - DNA, 15 bp, Homo sapiens
aaggaaaacactgtg

SEQ ID NO: 1576902 - DNA, 15 bp, Homo sapiens
taaggaaaacactgt

SEQ ID NO: 1576903 - DNA, 15 bp, Homo sapiens
ataaggaaaacactg

SEQ ID NO: 1576904 - DNA, 15 bp, Homo sapiens
aataaggaaaacact

SEQ ID NO: 1576905 - DNA, 15 bp, Homo sapiens
taataaggaaaacac

SEQ ID NO: 1576906 - DNA, 15 bp, Homo sapiens
gtaataaggaaaaca

SEQ ID NO: 1576907 - DNA, 15 bp, Homo sapiens
agtaataaggaaaac

SEQ ID NO: 1576908 - DNA, 15 bp, Homo sapiens
tagtaataaggaaaa

SEQ ID NO: 1576909 - DNA, 15 bp, Homo sapiens
gtagtaataaggaaa

SEQ ID NO: 1576910 - DNA, 15 bp, Homo sapiens
tgtagtaataaggaa

SEQ ID NO: 1576911 - DNA, 15 bp, Homo sapiens
atgtagtaataagga

SEQ ID NO: 1576912 - DNA, 15 bp, Homo sapiens
aatgtagtaataagg

SEQ ID NO: 1576913 - DNA, 15 bp, Homo sapiens
aaatgtagtaataag

SEQ ID NO: 1576914 - DNA, 15 bp, Homo sapiens
aaaatgtagtaataa

SEQ ID NO: 1576915 - DNA, 15 bp, Homo sapiens
aaaaatgtagtaata

SEQ ID NO: 1576916 - DNA, 15 bp, Homo sapiens
gaaaaatgtagtaat

SEQ ID NO: 1576917 - DNA, 15 bp, Homo sapiens
tggaaaaatgtagta

SEQ ID NO: 1576918 - DNA, 15 bp, Homo sapiens
ttggaaaaatgtagt

SEQ ID NO: 1576919 - DNA, 15 bp, Homo sapiens
tttggaaaaatgtag

SEQ ID NO: 1576920 - DNA, 15 bp, Homo sapiens
ttttggaaaaatgta

SEQ ID NO: 1576921 - DNA, 15 bp, Homo sapiens
cttttggaaaaatgt

SEQ ID NO: 1576922 - DNA, 15 bp, Homo sapiens
ccttttggaaaaatg

SEQ ID NO: 1576923 - DNA, 15 bp, Homo sapiens
tccttttggaaaaat

SEQ ID NO: 1576924 - DNA, 15 bp, Homo sapiens
gtccttttggaaaaa

SEQ ID NO: 1576925 - DNA, 15 bp, Homo sapiens
agtccttttggaaaa

SEQ ID NO: 1576926 - DNA, 15 bp, Homo sapiens
cagtccttttggaaa

SEQ ID NO: 1576927 - DNA, 15 bp, Homo sapiens
ccagtccttttggaa

SEQ ID NO: 1576928 - DNA, 15 bp, Homo sapiens
tccagtccttttgga

SEQ ID NO: 1576929 - DNA, 15 bp, Homo sapiens
ttccagtccttttgg

SEQ ID NO: 1576930 - DNA, 15 bp, Homo sapiens
tttccagtccttttg

SEQ ID NO: 1576931 - DNA, 15 bp, Homo sapiens
gtttccagtcctttt

SEQ ID NO: 1576932 - DNA, 15 bp, Homo sapiens
agtttccagtccttt

SEQ ID NO: 1576933 - DNA, 15 bp, Homo sapiens
tagtttccagtcctt

SEQ ID NO: 1576934 - DNA, 15 bp, Homo sapiens
atagtttccagtcct

SEQ ID NO: 1576935 - DNA, 15 bp, Homo sapiens
aatagtttccagtcc

SEQ ID NO: 1576936 - DNA, 15 bp, Homo sapiens
aaatagtttccagtc

SEQ ID NO: 1576937 - DNA, 15 bp, Homo sapiens
caaatagtttccagt

SEQ ID NO: 1576938 - DNA, 15 bp, Homo sapiens
acaaatagtttccag

SEQ ID NO: 1576939 - DNA, 15 bp, Homo sapiens
aacaaatagtttcca

SEQ ID NO: 1576940 - DNA, 15 bp, Homo sapiens
caacaaatagtttcc

SEQ ID NO: 1576941 - DNA, 15 bp, Homo sapiens
tcaacaaatagtttc

SEQ ID NO: 1576942 - DNA, 15 bp, Homo sapiens
ttcaacaaatagttt

SEQ ID NO: 1576943 - DNA, 15 bp, Homo sapiens
tttcaacaaatagtt

SEQ ID NO: 1576944 - DNA, 15 bp, Homo sapiens
ttttcaacaaatagt

SEQ ID NO: 1576945 - DNA, 15 bp, Homo sapiens
attttcaacaaatag

SEQ ID NO: 1576946 - DNA, 15 bp, Homo sapiens
aattttcaacaaata

SEQ ID NO: 1576947 - DNA, 15 bp, Homo sapiens
taattttcaacaaat

SEQ ID NO: 1576948 - DNA, 15 bp, Homo sapiens
ctaattttcaacaaa

SEQ ID NO: 1576949 - DNA, 15 bp, Homo sapiens
tctaattttcaacaa

SEQ ID NO: 1576950 - DNA, 15 bp, Homo sapiens
ctctaattttcaaca

SEQ ID NO: 1576951 - DNA, 15 bp, Homo sapiens
tctctaattttcaac

SEQ ID NO: 1576952 - DNA, 15 bp, Homo sapiens
ttctctaattttcaa

SEQ ID NO: 1576953 - DNA, 15 bp, Homo sapiens
cttctctaattttca

SEQ ID NO: 1576954 - DNA, 15 bp, Homo sapiens
gcttctctaattttc

SEQ ID NO: 1576955 - DNA, 15 bp, Homo sapiens
tgcttctctaatttt

SEQ ID NO: 1576956 - DNA, 15 bp, Homo sapiens
atgcttctctaattt

SEQ ID NO: 1576957 - DNA, 15 bp, Homo sapiens
aatgcttctctaatt

SEQ ID NO: 1576958 - DNA, 15 bp, Homo sapiens
caatgcttctctaat

SEQ ID NO: 1576959 - DNA, 15 bp, Homo sapiens
tcaatgcttctctaa

SEQ ID NO: 1576960 - DNA, 15 bp, Homo sapiens
ttcaatgcttctcta

SEQ ID NO: 1576961 - DNA, 15 bp, Homo sapiens
attcaatgcttctct

SEQ ID NO: 1576962 - DNA, 15 bp, Homo sapiens
tattcaatgcttctc

SEQ ID NO: 1576963 - DNA, 15 bp, Homo sapiens
atattcaatgcttct

SEQ ID NO: 1576964 - DNA, 15 bp, Homo sapiens
tatattcaatgcttc

SEQ ID NO: 1576965 - DNA, 15 bp, Homo sapiens
ctatattcaatgctt

SEQ ID NO: 1576966 - DNA, 15 bp, Homo sapiens
actatattcaatgct

SEQ ID NO: 1576967 - DNA, 15 bp, Homo sapiens
cactatattcaatgc

SEQ ID NO: 1576968 - DNA, 15 bp, Homo sapiens
ccactatattcaatg

SEQ ID NO: 1576969 - DNA, 15 bp, Homo sapiens
tccactatattcaat

SEQ ID NO: 1576970 - DNA, 15 bp, Homo sapiens
ttccactatattcaa

SEQ ID NO: 1576971 - DNA, 15 bp, Homo sapiens
tttccactatattca

SEQ ID NO: 1576972 - DNA, 15 bp, Homo sapiens
atttccactatattc

SEQ ID NO: 1576973 - DNA, 15 bp, Homo sapiens
tatttccactatatt

SEQ ID NO: 1576974 - DNA, 15 bp, Homo sapiens
ttatttccactatat

SEQ ID NO: 1576975 - DNA, 15 bp, Homo sapiens
attatttccactata

SEQ ID NO: 1576976 - DNA, 15 bp, Homo sapiens
tattatttccactat

SEQ ID NO: 1576977 - DNA, 15 bp, Homo sapiens
gtattatttccacta

SEQ ID NO: 1576978 - DNA, 15 bp, Homo sapiens
tgtattatttccact

SEQ ID NO: 1576979 - DNA, 15 bp, Homo sapiens
ctgtattatttccac

SEQ ID NO: 1576980 - DNA, 15 bp, Homo sapiens
actgtattatttcca

SEQ ID NO: 1576981 - DNA, 15 bp, Homo sapiens
cactgtattatttcc

SEQ ID NO: 1576982 - DNA, 15 bp, Homo sapiens
acactgtattatttc

SEQ ID NO: 1576983 - DNA, 15 bp, Homo sapiens
cacactgtattattt

SEQ ID NO: 1576984 - DNA, 15 bp, Homo sapiens
ccacactgtattatt

SEQ ID NO: 1576985 - DNA, 15 bp, Homo sapiens
accacactgtattat

SEQ ID NO: 1576986 - DNA, 15 bp, Homo sapiens
aaccacactgtatta

SEQ ID NO: 1576987 - DNA, 15 bp, Homo sapiens
gaaccacactgtatt

SEQ ID NO: 1576988 - DNA, 15 bp, Homo sapiens
ggaaccacactgtat

SEQ ID NO: 1576989 - DNA, 15 bp, Homo sapiens
tggaaccacactgta

SEQ ID NO: 1576990 - DNA, 15 bp, Homo sapiens
atggaaccacactgt

SEQ ID NO: 1576991 - DNA, 15 bp, Homo sapiens
tatggaaccacactg

SEQ ID NO: 1576992 - DNA, 15 bp, Homo sapiens
ttatggaaccacact

SEQ ID NO: 1576993 - DNA, 15 bp, Homo sapiens
gttatggaaccacac

SEQ ID NO: 1576994 - DNA, 15 bp, Homo sapiens
tgttatggaaccaca

SEQ ID NO: 1576995 - DNA, 15 bp, Homo sapiens
ttgttatggaaccac

SEQ ID NO: 1576996 - DNA, 15 bp, Homo sapiens
attgttatggaacca

SEQ ID NO: 1576997 - DNA, 15 bp, Homo sapiens
aattgttatggaacc

SEQ ID NO: 1576998 - DNA, 15 bp, Homo sapiens
taattgttatggaac

SEQ ID NO: 1576999 - DNA, 15 bp, Homo sapiens
ctaattgttatggaa

SEQ ID NO: 1577000 - DNA, 15 bp, Homo sapiens
actaattgttatgga

SEQ ID NO: 1577001 - DNA, 15 bp, Homo sapiens
aactaattgttatgg

SEQ ID NO: 1577002 - DNA, 15 bp, Homo sapiens
caactaattgttatg

SEQ ID NO: 1577003 - DNA, 15 bp, Homo sapiens
acaactaattgttat

SEQ ID NO: 1577004 - DNA, 15 bp, Homo sapiens
aacaactaattgtta

SEQ ID NO: 1577005 - DNA, 15 bp, Homo sapiens
taacaactaattgtt

SEQ ID NO: 1577006 - DNA, 15 bp, Homo sapiens
gtaacaactaattgt

SEQ ID NO: 1577007 - DNA, 15 bp, Homo sapiens
cgtaacaactaattg

SEQ ID NO: 1577008 - DNA, 15 bp, Homo sapiens
acgtaacaactaatt

SEQ ID NO: 1577009 - DNA, 15 bp, Homo sapiens
aacgtaacaactaat

SEQ ID NO: 1577010 - DNA, 15 bp, Homo sapiens
aaacgtaacaactaa

SEQ ID NO: 1577011 - DNA, 15 bp, Homo sapiens
taaacgtaacaacta

SEQ ID NO: 1577012 - DNA, 15 bp, Homo sapiens
ttaaacgtaacaact

SEQ ID NO: 1577013 - DNA, 15 bp, Homo sapiens
tttaaacgtaacaac

SEQ ID NO: 1577014 - DNA, 15 bp, Homo sapiens
ttttaaacgtaacaa

SEQ ID NO: 1577015 - DNA, 15 bp, Homo sapiens
attttaaacgtaaca

SEQ ID NO: 1577016 - DNA, 15 bp, Homo sapiens
tattttaaacgtaac

SEQ ID NO: 1577017 - DNA, 15 bp, Homo sapiens
atattttaaacgtaa

SEQ ID NO: 1577018 - DNA, 15 bp, Homo sapiens
catattttaaacgta

SEQ ID NO: 1577019 - DNA, 15 bp, Homo sapiens
tcatattttaaacgt

SEQ ID NO: 1577020 - DNA, 15 bp, Homo sapiens
gtcatattttaaacg

SEQ ID NO: 1577021 - DNA, 15 bp, Homo sapiens
tgtcatattttaaac

SEQ ID NO: 1577022 - DNA, 15 bp, Homo sapiens
gtgtcatattttaaa

SEQ ID NO: 1577023 - DNA, 15 bp, Homo sapiens
agtgtcatattttaa

SEQ ID NO: 1577024 - DNA, 15 bp, Homo sapiens
gagtgtcatatttta

SEQ ID NO: 1577025 - DNA, 15 bp, Homo sapiens
ggagtgtcatatttt

SEQ ID NO: 1577026 - DNA, 15 bp, Homo sapiens
aggagtgtcatattt

SEQ ID NO: 1577027 - DNA, 15 bp, Homo sapiens
aaggagtgtcatatt

SEQ ID NO: 1577028 - DNA, 15 bp, Homo sapiens
taaggagtgtcatat

SEQ ID NO: 1577029 - DNA, 15 bp, Homo sapiens
ttaaggagtgtcata

SEQ ID NO: 1577030 - DNA, 15 bp, Homo sapiens
cttaaggagtgtcat

SEQ ID NO: 1577031 - DNA, 15 bp, Homo sapiens
ccttaaggagtgtca

SEQ ID NO: 1577032 - DNA, 15 bp, Homo sapiens
accttaaggagtgtc

SEQ ID NO: 1577033 - DNA, 15 bp, Homo sapiens
taccttaaggagtgt

SEQ ID NO: 1577034 - DNA, 15 bp, Homo sapiens
ttaccttaaggagtg

SEQ ID NO: 1577035 - DNA, 15 bp, Homo sapiens
tttaccttaaggagt

SEQ ID NO: 1577036 - DNA, 15 bp, Homo sapiens
ttttaccttaaggag

SEQ ID NO: 1577037 - DNA, 15 bp, Homo sapiens
attttaccttaagga

SEQ ID NO: 1577038 - DNA, 15 bp, Homo sapiens
aattttaccttaagg

SEQ ID NO: 1577039 - DNA, 15 bp, Homo sapiens
aaattttaccttaag

SEQ ID NO: 1577040 - DNA, 15 bp, Homo sapiens
taaattttaccttaa

SEQ ID NO: 1577041 - DNA, 15 bp, Homo sapiens
ttaaattttacctta

SEQ ID NO: 1577042 - DNA, 15 bp, Homo sapiens
attaaattttacctt

SEQ ID NO: 1577043 - DNA, 15 bp, Homo sapiens
tattaaattttacct

SEQ ID NO: 1577044 - DNA, 15 bp, Homo sapiens
ttattaaattttacc

SEQ ID NO: 1577045 - DNA, 15 bp, Homo sapiens
attattaaattttac

SEQ ID NO: 1577046 - DNA, 15 bp, Homo sapiens
tattattaaatttta

SEQ ID NO: 1577047 - DNA, 15 bp, Homo sapiens
gtattattaaatttt

SEQ ID NO: 1577048 - DNA, 15 bp, Homo sapiens
ggtattattaaattt

SEQ ID NO: 1577049 - DNA, 15 bp, Homo sapiens
tggtattattaaatt

SEQ ID NO: 1577050 - DNA, 15 bp, Homo sapiens
ttggtattattaaat

SEQ ID NO: 1577051 - DNA, 15 bp, Homo sapiens
tttggtattattaaa

SEQ ID NO: 1577052 - DNA, 15 bp, Homo sapiens
ttttggtattattaa

SEQ ID NO: 1577053 - DNA, 15 bp, Homo sapiens
cttttggtattatta

SEQ ID NO: 1577054 - DNA, 15 bp, Homo sapiens
acttttggtattatt

SEQ ID NO: 1577055 - DNA, 15 bp, Homo sapiens
tacttttggtattat

SEQ ID NO: 1577056 - DNA, 15 bp, Homo sapiens
gtacttttggtatta

SEQ ID NO: 1577057 - DNA, 15 bp, Homo sapiens
ggtacttttggtatt

SEQ ID NO: 1577058 - DNA, 15 bp, Homo sapiens
gggtacttttggtat

SEQ ID NO: 1577059 - DNA, 15 bp, Homo sapiens
agggtacttttggta

SEQ ID NO: 1577060 - DNA, 15 bp, Homo sapiens
tagggtacttttggt

SEQ ID NO: 1577061 - DNA, 15 bp, Homo sapiens
ctagggtacttttgg

SEQ ID NO: 1577062 - DNA, 15 bp, Homo sapiens
tctagggtacttttg

SEQ ID NO: 1577063 - DNA, 15 bp, Homo sapiens
ttctagggtactttt

SEQ ID NO: 1577064 - DNA, 15 bp, Homo sapiens
tttctagggtacttt

SEQ ID NO: 1577065 - DNA, 15 bp, Homo sapiens
ttttctagggtactt

SEQ ID NO: 1577066 - DNA, 15 bp, Homo sapiens
gttttctagggtact

SEQ ID NO: 1577067 - DNA, 15 bp, Homo sapiens
agttttctagggtac

SEQ ID NO: 1577068 - DNA, 15 bp, Homo sapiens
cagttttctagggta

SEQ ID NO: 1577069 - DNA, 15 bp, Homo sapiens
tcagttttctagggt

SEQ ID NO: 1577070 - DNA, 15 bp, Homo sapiens
atcagttttctaggg

SEQ ID NO: 1577071 - DNA, 15 bp, Homo sapiens
catcagttttctagg

SEQ ID NO: 1577072 - DNA, 15 bp, Homo sapiens
tcatcagttttctag

SEQ ID NO: 1577073 - DNA, 15 bp, Homo sapiens
ttcatcagttttcta

SEQ ID NO: 1577074 - DNA, 15 bp, Homo sapiens
tttcatcagttttct

SEQ ID NO: 1577075 - DNA, 15 bp, Homo sapiens
atttcatcagttttc

SEQ ID NO: 1577076 - DNA, 15 bp, Homo sapiens
catttcatcagtttt

SEQ ID NO: 1577077 - DNA, 15 bp, Homo sapiens
ccatttcatcagttt

SEQ ID NO: 1577078 - DNA, 15 bp, Homo sapiens
accatttcatcagtt

SEQ ID NO: 1577079 - DNA, 15 bp, Homo sapiens
taccatttcatcagt

SEQ ID NO: 1577080 - DNA, 15 bp, Homo sapiens
ttaccatttcatcag

SEQ ID NO: 1577081 - DNA, 15 bp, Homo sapiens
gttaccatttcatca

SEQ ID NO: 1577082 - DNA, 15 bp, Homo sapiens
tgttaccatttcatc

SEQ ID NO: 1577083 - DNA, 15 bp, Homo sapiens
ttgttaccatttcat

SEQ ID NO: 1577084 - DNA, 15 bp, Homo sapiens
tttgttaccatttca

SEQ ID NO: 1577085 - DNA, 15 bp, Homo sapiens
ttttgttaccatttc

SEQ ID NO: 1577086 - DNA, 15 bp, Homo sapiens
attttgttaccattt

SEQ ID NO: 1577087 - DNA, 15 bp, Homo sapiens
aattttgttaccatt

SEQ ID NO: 1577088 - DNA, 15 bp, Homo sapiens
aaattttgttaccat

SEQ ID NO: 1577089 - DNA, 15 bp, Homo sapiens
caaattttgttacca

SEQ ID NO: 1577090 - DNA, 15 bp, Homo sapiens
tcaaattttgttacc

SEQ ID NO: 1577091 - DNA, 15 bp, Homo sapiens
ctcaaattttgttac

SEQ ID NO: 1577092 - DNA, 15 bp, Homo sapiens
tctcaaattttgtta

SEQ ID NO: 1577093 - DNA, 15 bp, Homo sapiens
atctcaaattttgtt

SEQ ID NO: 1577094 - DNA, 15 bp, Homo sapiens
aatctcaaattttgt

SEQ ID NO: 1577095 - DNA, 15 bp, Homo sapiens
taatctcaaattttg

SEQ ID NO: 1577096 - DNA, 15 bp, Homo sapiens
ataatctcaaatttt

SEQ ID NO: 1577097 - DNA, 15 bp, Homo sapiens
tataatctcaaattt

SEQ ID NO: 1577098 - DNA, 15 bp, Homo sapiens
gtataatctcaaatt

SEQ ID NO: 1577099 - DNA, 15 bp, Homo sapiens
agtataatctcaaat

SEQ ID NO: 1577100 - DNA, 15 bp, Homo sapiens
aagtataatctcaaa

SEQ ID NO: 1577101 - DNA, 15 bp, Homo sapiens
aaagtataatctcaa

SEQ ID NO: 1577102 - DNA, 15 bp, Homo sapiens
caaagtataatctca

SEQ ID NO: 1577103 - DNA, 15 bp, Homo sapiens
tcaaagtataatctc

SEQ ID NO: 1577104 - DNA, 15 bp, Homo sapiens
atcaaagtataatct

SEQ ID NO: 1577105 - DNA, 15 bp, Homo sapiens
tatcaaagtataatc

SEQ ID NO: 1577106 - DNA, 15 bp, Homo sapiens
ctatcaaagtataat

SEQ ID NO: 1577107 - DNA, 15 bp, Homo sapiens
tctatcaaagtataa

SEQ ID NO: 1577108 - DNA, 15 bp, Homo sapiens
ttctatcaaagtata

SEQ ID NO: 1577109 - DNA, 15 bp, Homo sapiens
attctatcaaagtat

SEQ ID NO: 1577110 - DNA, 15 bp, Homo sapiens
tattctatcaaagta

SEQ ID NO: 1577111 - DNA, 15 bp, Homo sapiens
ttattctatcaaagt

SEQ ID NO: 1577112 - DNA, 15 bp, Homo sapiens
attattctatcaaag

SEQ ID NO: 1577113 - DNA, 15 bp, Homo sapiens
aattattctatcaaa

SEQ ID NO: 1577114 - DNA, 15 bp, Homo sapiens
aaattattctatcaa

SEQ ID NO: 1577115 - DNA, 15 bp, Homo sapiens
aaaattattctatca

SEQ ID NO: 1577116 - DNA, 15 bp, Homo sapiens
aaaaattattctatc

SEQ ID NO: 1577117 - DNA, 15 bp, Homo sapiens
caaaaattattctat

SEQ ID NO: 1577118 - DNA, 15 bp, Homo sapiens
acaaaaattattcta

SEQ ID NO: 1577119 - DNA, 15 bp, Homo sapiens
gacaaaaattattct

SEQ ID NO: 1577120 - DNA, 15 bp, Homo sapiens
ggacaaaaattattc

SEQ ID NO: 1577121 - DNA, 15 bp, Homo sapiens
tggacaaaaattatt

SEQ ID NO: 1577122 - DNA, 15 bp, Homo sapiens
gtggacaaaaattat

SEQ ID NO: 1577123 - DNA, 15 bp, Homo sapiens
tgtggacaaaaatta

SEQ ID NO: 1577124 - DNA, 15 bp, Homo sapiens
atgtggacaaaaatt

SEQ ID NO: 1577125 - DNA, 15 bp, Homo sapiens
aatgtggacaaaaat

SEQ ID NO: 1577126 - DNA, 15 bp, Homo sapiens
taatgtggacaaaaa

SEQ ID NO: 1577127 - DNA, 15 bp, Homo sapiens
ttaatgtggacaaaa

SEQ ID NO: 1577128 - DNA, 15 bp, Homo sapiens
tttaatgtggacaaa

SEQ ID NO: 1577129 - DNA, 15 bp, Homo sapiens
ctttaatgtggacaa

SEQ ID NO: 1577130 - DNA, 15 bp, Homo sapiens
actttaatgtggaca

SEQ ID NO: 1577131 - DNA, 15 bp, Homo sapiens
aactttaatgtggac

SEQ ID NO: 1577132 - DNA, 15 bp, Homo sapiens
aaactttaatgtgga

SEQ ID NO: 1577133 - DNA, 15 bp, Homo sapiens
caaactttaatgtgg

SEQ ID NO: 1577134 - DNA, 15 bp, Homo sapiens
tcaaactttaatgtg

SEQ ID NO: 1577135 - DNA, 15 bp, Homo sapiens
gtcaaactttaatgt

SEQ ID NO: 1577136 - DNA, 15 bp, Homo sapiens
tgtcaaactttaatg

SEQ ID NO: 1577137 - DNA, 15 bp, Homo sapiens
atgtcaaactttaat

SEQ ID NO: 1577138 - DNA, 15 bp, Homo sapiens
gatgtcaaactttaa

SEQ ID NO: 1577139 - DNA, 15 bp, Homo sapiens
agatgtcaaacttta

SEQ ID NO: 1577140 - DNA, 15 bp, Homo sapiens
tagatgtcaaacttt

SEQ ID NO: 1577141 - DNA, 15 bp, Homo sapiens
gtagatgtcaaactt

SEQ ID NO: 1577142 - DNA, 15 bp, Homo sapiens
cgtagatgtcaaact

SEQ ID NO: 1577143 - DNA, 15 bp, Homo sapiens
ccgtagatgtcaaac

SEQ ID NO: 1577144 - DNA, 15 bp, Homo sapiens
tccgtagatgtcaaa

SEQ ID NO: 1577145 - DNA, 15 bp, Homo sapiens
ctccgtagatgtcaa

SEQ ID NO: 1577146 - DNA, 15 bp, Homo sapiens
gctccgtagatgtca

SEQ ID NO: 1577147 - DNA, 15 bp, Homo sapiens
agctccgtagatgtc

SEQ ID NO: 1577148 - DNA, 15 bp, Homo sapiens
tagctccgtagatgt

SEQ ID NO: 1577149 - DNA, 15 bp, Homo sapiens
ctagctccgtagatg

SEQ ID NO: 1577150 - DNA, 15 bp, Homo sapiens
tctagctccgtagat

SEQ ID NO: 1577151 - DNA, 15 bp, Homo sapiens
gtctagctccgtaga

SEQ ID NO: 1577152 - DNA, 15 bp, Homo sapiens
tgtctagctccgtag

SEQ ID NO: 1577153 - DNA, 15 bp, Homo sapiens
ttgtctagctccgta

SEQ ID NO: 1577154 - DNA, 15 bp, Homo sapiens
cttgtctagctccgt

SEQ ID NO: 1577155 - DNA, 15 bp, Homo sapiens
ccttgtctagctccg

SEQ ID NO: 1577156 - DNA, 15 bp, Homo sapiens
cccttgtctagctcc

SEQ ID NO: 1577157 - DNA, 15 bp, Homo sapiens
tcccttgtctagctc

SEQ ID NO: 1577158 - DNA, 15 bp, Homo sapiens
ctcccttgtctagct

SEQ ID NO: 1577159 - DNA, 15 bp, Homo sapiens
actcccttgtctagc

SEQ ID NO: 1577160 - DNA, 15 bp, Homo sapiens
tactcccttgtctag

SEQ ID NO: 1577161 - DNA, 15 bp, Homo sapiens
ttactcccttgtcta

SEQ ID NO: 1577162 - DNA, 15 bp, Homo sapiens
attactcccttgtct

SEQ ID NO: 1577163 - DNA, 15 bp, Homo sapiens
tattactcccttgtc

SEQ ID NO: 1577164 - DNA, 15 bp, Homo sapiens
gtattactcccttgt

SEQ ID NO: 1577165 - DNA, 15 bp, Homo sapiens
tgtattactcccttg

SEQ ID NO: 1577166 - DNA, 15 bp, Homo sapiens
ttgtattactccctt

SEQ ID NO: 1577167 - DNA, 15 bp, Homo sapiens
tttgtattactccct

SEQ ID NO: 1577168 - DNA, 15 bp, Homo sapiens
ctttgtattactccc

SEQ ID NO: 1577169 - DNA, 15 bp, Homo sapiens
tctttgtattactcc

SEQ ID NO: 1577170 - DNA, 15 bp, Homo sapiens
ttctttgtattactc

SEQ ID NO: 1577171 - DNA, 15 bp, Homo sapiens
tttctttgtattact

SEQ ID NO: 1577172 - DNA, 15 bp, Homo sapiens
gtttctttgtattac

SEQ ID NO: 1577173 - DNA, 15 bp, Homo sapiens
agtttctttgtatta

SEQ ID NO: 1577174 - DNA, 15 bp, Homo sapiens
gagtttctttgtatt

SEQ ID NO: 1577175 - DNA, 15 bp, Homo sapiens
ggagtttctttgtat

SEQ ID NO: 1577176 - DNA, 15 bp, Homo sapiens
gggagtttctttgta

SEQ ID NO: 1577177 - DNA, 15 bp, Homo sapiens
ggggagtttctttgt

SEQ ID NO: 1577178 - DNA, 15 bp, Homo sapiens
tggggagtttctttg

SEQ ID NO: 1577179 - DNA, 15 bp, Homo sapiens
ttggggagtttcttt

SEQ ID NO: 1577180 - DNA, 15 bp, Homo sapiens
cttggggagtttctt

SEQ ID NO: 1577181 - DNA, 15 bp, Homo sapiens
gcttggggagtttct

SEQ ID NO: 1577182 - DNA, 15 bp, Homo sapiens
tgcttggggagtttc

SEQ ID NO: 1577183 - DNA, 15 bp, Homo sapiens
ctgcttggggagttt

SEQ ID NO: 1577184 - DNA, 15 bp, Homo sapiens
tctgcttggggagtt

SEQ ID NO: 1577185 - DNA, 15 bp, Homo sapiens
atctgcttggggagt

SEQ ID NO: 1577186 - DNA, 15 bp, Homo sapiens
catctgcttggggag

SEQ ID NO: 1577187 - DNA, 15 bp, Homo sapiens
tcatctgcttgggga

SEQ ID NO: 1577188 - DNA, 15 bp, Homo sapiens
ctcatctgcttgggg

SEQ ID NO: 1577189 - DNA, 15 bp, Homo sapiens
actcatctgcttggg

SEQ ID NO: 1577190 - DNA, 15 bp, Homo sapiens
tactcatctgcttgg

SEQ ID NO: 1577191 - DNA, 15 bp, Homo sapiens
ctactcatctgcttg

SEQ ID NO: 1577192 - DNA, 15 bp, Homo sapiens
tctactcatctgctt

SEQ ID NO: 1577193 - DNA, 15 bp, Homo sapiens
atctactcatctgct

SEQ ID NO: 1577194 - DNA, 15 bp, Homo sapiens
tatctactcatctgc

SEQ ID NO: 1577195 - DNA, 15 bp, Homo sapiens
atatctactcatctg

SEQ ID NO: 1577196 - DNA, 15 bp, Homo sapiens
aatatctactcatct

SEQ ID NO: 1577197 - DNA, 15 bp, Homo sapiens
aaatatctactcatc

SEQ ID NO: 1577198 - DNA, 15 bp, Homo sapiens
caaatatctactcat

SEQ ID NO: 1577199 - DNA, 15 bp, Homo sapiens
tcaaatatctactca

SEQ ID NO: 1577200 - DNA, 15 bp, Homo sapiens
ttcaaatatctactc

SEQ ID NO: 1577201 - DNA, 15 bp, Homo sapiens
gttcaaatatctact

SEQ ID NO: 1577202 - DNA, 15 bp, Homo sapiens
agttcaaatatctac

SEQ ID NO: 1577203 - DNA, 15 bp, Homo sapiens
tagttcaaatatcta

SEQ ID NO: 1577204 - DNA, 15 bp, Homo sapiens
atagttcaaatatct

SEQ ID NO: 1577205 - DNA, 15 bp, Homo sapiens
gatagttcaaatatc

SEQ ID NO: 1577206 - DNA, 15 bp, Homo sapiens
agatagttcaaatat

SEQ ID NO: 1577207 - DNA, 15 bp, Homo sapiens
aagatagttcaaata

SEQ ID NO: 1577208 - DNA, 15 bp, Homo sapiens
caagatagttcaaat

SEQ ID NO: 1577209 - DNA, 15 bp, Homo sapiens
gcaagatagttcaaa

SEQ ID NO: 1577210 - DNA, 15 bp, Homo sapiens
agcaagatagttcaa

SEQ ID NO: 1577211 - DNA, 15 bp, Homo sapiens
cagcaagatagttca

SEQ ID NO: 1577212 - DNA, 15 bp, Homo sapiens
acagcaagatagttc

SEQ ID NO: 1577213 - DNA, 15 bp, Homo sapiens
gacagcaagatagtt

SEQ ID NO: 1577214 - DNA, 15 bp, Homo sapiens
tgacagcaagatagt

SEQ ID NO: 1577215 - DNA, 15 bp, Homo sapiens
ttgacagcaagatag

SEQ ID NO: 1577216 - DNA, 15 bp, Homo sapiens
tttgacagcaagata

SEQ ID NO: 1577217 - DNA, 15 bp, Homo sapiens
ttttgacagcaagat

SEQ ID NO: 1577218 - DNA, 15 bp, Homo sapiens
attttgacagcaaga

SEQ ID NO: 1577219 - DNA, 15 bp, Homo sapiens
tattttgacagcaag

SEQ ID NO: 1577220 - DNA, 15 bp, Homo sapiens
ttattttgacagcaa

SEQ ID NO: 1577221 - DNA, 15 bp, Homo sapiens
gttattttgacagca

SEQ ID NO: 1577222 - DNA, 15 bp, Homo sapiens
agttattttgacagc

SEQ ID NO: 1577223 - DNA, 15 bp, Homo sapiens
tagttattttgacag

SEQ ID NO: 1577224 - DNA, 15 bp, Homo sapiens
atagttattttgaca

SEQ ID NO: 1577225 - DNA, 15 bp, Homo sapiens
tatagttattttgac

SEQ ID NO: 1577226 - DNA, 15 bp, Homo sapiens
ttatagttattttga

SEQ ID NO: 1577227 - DNA, 15 bp, Homo sapiens
tttatagttattttg

SEQ ID NO: 1577228 - DNA, 15 bp, Homo sapiens
ttttatagttatttt

SEQ ID NO: 1577229 - DNA, 15 bp, Homo sapiens
attttatagttattt

SEQ ID NO: 1577230 - DNA, 15 bp, Homo sapiens
aattttatagttatt

SEQ ID NO: 1577231 - DNA, 15 bp, Homo sapiens
aaattttatagttat

SEQ ID NO: 1577232 - DNA, 15 bp, Homo sapiens
gaaattttatagtta

SEQ ID NO: 1577233 - DNA, 15 bp, Homo sapiens
tgaaattttatagtt

SEQ ID NO: 1577234 - DNA, 15 bp, Homo sapiens
ttgaaattttatagt

SEQ ID NO: 1577235 - DNA, 15 bp, Homo sapiens
cttgaaattttatag

SEQ ID NO: 1577236 - DNA, 15 bp, Homo sapiens
tcttgaaattttata

SEQ ID NO: 1577237 - DNA, 15 bp, Homo sapiens
atcttgaaattttat

SEQ ID NO: 1577238 - DNA, 15 bp, Homo sapiens
catcttgaaatttta

SEQ ID NO: 1577239 - DNA, 15 bp, Homo sapiens
acatcttgaaatttt

SEQ ID NO: 1577240 - DNA, 15 bp, Homo sapiens
aacatcttgaaattt

SEQ ID NO: 1577241 - DNA, 15 bp, Homo sapiens
caacatcttgaaatt

SEQ ID NO: 1577242 - DNA, 15 bp, Homo sapiens
tcaacatcttgaaat

SEQ ID NO: 1577243 - DNA, 15 bp, Homo sapiens
ttcaacatcttgaaa

SEQ ID NO: 1577244 - DNA, 15 bp, Homo sapiens
attcaacatcttgaa

SEQ ID NO: 1577245 - DNA, 15 bp, Homo sapiens
cattcaacatcttga

SEQ ID NO: 1577246 - DNA, 15 bp, Homo sapiens
ccattcaacatcttg

SEQ ID NO: 1577247 - DNA, 15 bp, Homo sapiens
cccattcaacatctt

SEQ ID NO: 1577248 - DNA, 15 bp, Homo sapiens
ccccattcaacatct

SEQ ID NO: 1577249 - DNA, 15 bp, Homo sapiens
cccccattcaacatc

SEQ ID NO: 1577250 - DNA, 15 bp, Homo sapiens
tcccccattcaacat

SEQ ID NO: 1577251 - DNA, 15 bp, Homo sapiens
atcccccattcaaca

SEQ ID NO: 1577252 - DNA, 15 bp, Homo sapiens
tatcccccattcaac

SEQ ID NO: 1577253 - DNA, 15 bp, Homo sapiens
ctatcccccattcaa

SEQ ID NO: 1577254 - DNA, 15 bp, Homo sapiens
cctatcccccattca

SEQ ID NO: 1577255 - DNA, 15 bp, Homo sapiens
acctatcccccattc

SEQ ID NO: 1577256 - DNA, 15 bp, Homo sapiens
tacctatcccccatt

SEQ ID NO: 1577257 - DNA, 15 bp, Homo sapiens
ctacctatcccccat

SEQ ID NO: 1577258 - DNA, 15 bp, Homo sapiens
tctacctatccccca

SEQ ID NO: 1577259 - DNA, 15 bp, Homo sapiens
gtctacctatccccc

SEQ ID NO: 1577260 - DNA, 15 bp, Homo sapiens
tgtctacctatcccc

SEQ ID NO: 1577261 - DNA, 15 bp, Homo sapiens
ttgtctacctatccc

SEQ ID NO: 1577262 - DNA, 15 bp, Homo sapiens
attgtctacctatcc

SEQ ID NO: 1577263 - DNA, 15 bp, Homo sapiens
aattgtctacctatc

SEQ ID NO: 1577264 - DNA, 15 bp, Homo sapiens
gaattgtctacctat

SEQ ID NO: 1577265 - DNA, 15 bp, Homo sapiens
agaattgtctaccta

SEQ ID NO: 1577266 - DNA, 15 bp, Homo sapiens
aagaattgtctacct

SEQ ID NO: 1577267 - DNA, 15 bp, Homo sapiens
aaagaattgtctacc

SEQ ID NO: 1577268 - DNA, 15 bp, Homo sapiens
taaagaattgtctac

SEQ ID NO: 1577269 - DNA, 15 bp, Homo sapiens
ttaaagaattgtcta

SEQ ID NO: 1577270 - DNA, 15 bp, Homo sapiens
tttaaagaattgtct

SEQ ID NO: 1577271 - DNA, 15 bp, Homo sapiens
ctttaaagaattgtc

SEQ ID NO: 1577272 - DNA, 15 bp, Homo sapiens
cctttaaagaattgt

SEQ ID NO: 1577273 - DNA, 15 bp, Homo sapiens
acctttaaagaattg

SEQ ID NO: 1577274 - DNA, 15 bp, Homo sapiens
gacctttaaagaatt

SEQ ID NO: 1577275 - DNA, 15 bp, Homo sapiens
agacctttaaagaat

SEQ ID NO: 1577276 - DNA, 15 bp, Homo sapiens
cagacctttaaagaa

SEQ ID NO: 1577277 - DNA, 15 bp, Homo sapiens
tcagacctttaaaga

SEQ ID NO: 1577278 - DNA, 15 bp, Homo sapiens
atcagacctttaaag

SEQ ID NO: 1577279 - DNA, 15 bp, Homo sapiens
aatcagacctttaaa

SEQ ID NO: 1577280 - DNA, 15 bp, Homo sapiens
taatcagacctttaa

SEQ ID NO: 1577281 - DNA, 15 bp, Homo sapiens
ataatcagaccttta

SEQ ID NO: 1577282 - DNA, 15 bp, Homo sapiens
aataatcagaccttt

SEQ ID NO: 1577283 - DNA, 15 bp, Homo sapiens
aaataatcagacctt

SEQ ID NO: 1577284 - DNA, 15 bp, Homo sapiens
taaataatcagacct

SEQ ID NO: 1577285 - DNA, 15 bp, Homo sapiens
ctaaataatcagacc

SEQ ID NO: 1577286 - DNA, 15 bp, Homo sapiens
cctaaataatcagac

SEQ ID NO: 1577287 - DNA, 15 bp, Homo sapiens
gcctaaataatcaga

SEQ ID NO: 1577288 - DNA, 15 bp, Homo sapiens
tgcctaaataatcag

SEQ ID NO: 1577289 - DNA, 15 bp, Homo sapiens
ttgcctaaataatca

SEQ ID NO: 1577290 - DNA, 15 bp, Homo sapiens
attgcctaaataatc

SEQ ID NO: 1577291 - DNA, 15 bp, Homo sapiens
cattgcctaaataat

SEQ ID NO: 1577292 - DNA, 15 bp, Homo sapiens
tcattgcctaaataa

SEQ ID NO: 1577293 - DNA, 15 bp, Homo sapiens
gtcattgcctaaata

SEQ ID NO: 1577294 - DNA, 15 bp, Homo sapiens
agtcattgcctaaat

SEQ ID NO: 1577295 - DNA, 15 bp, Homo sapiens
gagtcattgcctaaa

SEQ ID NO: 1577296 - DNA, 15 bp, Homo sapiens
ggagtcattgcctaa

SEQ ID NO: 1577297 - DNA, 15 bp, Homo sapiens
aggagtcattgccta

SEQ ID NO: 1577298 - DNA, 15 bp, Homo sapiens
gaggagtcattgcct

SEQ ID NO: 1577299 - DNA, 15 bp, Homo sapiens
agaggagtcattgcc

SEQ ID NO: 1577300 - DNA, 15 bp, Homo sapiens
aagaggagtcattgc

SEQ ID NO: 1577301 - DNA, 15 bp, Homo sapiens
caagaggagtcattg

SEQ ID NO: 1577302 - DNA, 15 bp, Homo sapiens
acaagaggagtcatt

SEQ ID NO: 1577303 - DNA, 15 bp, Homo sapiens
cacaagaggagtcat

SEQ ID NO: 1577304 - DNA, 15 bp, Homo sapiens
ccacaagaggagtca

SEQ ID NO: 1577305 - DNA, 15 bp, Homo sapiens
accacaagaggagtc

SEQ ID NO: 1577306 - DNA, 15 bp, Homo sapiens
aaccacaagaggagt

SEQ ID NO: 1577307 - DNA, 15 bp, Homo sapiens
aaaccacaagaggag

SEQ ID NO: 1577308 - DNA, 15 bp, Homo sapiens
caaaccacaagagga

SEQ ID NO: 1577309 - DNA, 15 bp, Homo sapiens
ccaaaccacaagagg

SEQ ID NO: 1577310 - DNA, 15 bp, Homo sapiens
tccaaaccacaagag

SEQ ID NO: 1577311 - DNA, 15 bp, Homo sapiens
ttccaaaccacaaga

SEQ ID NO: 1577312 - DNA, 15 bp, Homo sapiens
attccaaaccacaag

SEQ ID NO: 1577313 - DNA, 15 bp, Homo sapiens
tattccaaaccacaa

SEQ ID NO: 1577314 - DNA, 15 bp, Homo sapiens
atattccaaaccaca

SEQ ID NO: 1577315 - DNA, 15 bp, Homo sapiens
catattccaaaccac

SEQ ID NO: 1577316 - DNA, 15 bp, Homo sapiens
tcatattccaaacca

SEQ ID NO: 1577317 - DNA, 15 bp, Homo sapiens
gtcatattccaaacc

SEQ ID NO: 1577318 - DNA, 15 bp, Homo sapiens
tgtcatattccaaac

SEQ ID NO: 1577319 - DNA, 15 bp, Homo sapiens
atgtcatattccaaa

SEQ ID NO: 1577320 - DNA, 15 bp, Homo sapiens
catgtcatattccaa

SEQ ID NO: 1577321 - DNA, 15 bp, Homo sapiens
acatgtcatattcca

SEQ ID NO: 1577322 - DNA, 15 bp, Homo sapiens
aacatgtcatattcc

SEQ ID NO: 1577323 - DNA, 15 bp, Homo sapiens
caacatgtcatattc

SEQ ID NO: 1577324 - DNA, 15 bp, Homo sapiens
tcaacatgtcatatt

SEQ ID NO: 1577325 - DNA, 15 bp, Homo sapiens
gtcaacatgtcatat

SEQ ID NO: 1577326 - DNA, 15 bp, Homo sapiens
tgtcaacatgtcata

SEQ ID NO: 1577327 - DNA, 15 bp, Homo sapiens
ttgtcaacatgtcat

SEQ ID NO: 1577328 - DNA, 15 bp, Homo sapiens
attgtcaacatgtca

SEQ ID NO: 1577329 - DNA, 15 bp, Homo sapiens
gattgtcaacatgtc

SEQ ID NO: 1577330 - DNA, 15 bp, Homo sapiens
tgattgtcaacatgt

SEQ ID NO: 1577331 - DNA, 15 bp, Homo sapiens
ttgattgtcaacatg

SEQ ID NO: 1577332 - DNA, 15 bp, Homo sapiens
tttgattgtcaacat

SEQ ID NO: 1577333 - DNA, 15 bp, Homo sapiens
ttttgattgtcaaca

SEQ ID NO: 1577334 - DNA, 15 bp, Homo sapiens
gttttgattgtcaac

SEQ ID NO: 1577335 - DNA, 15 bp, Homo sapiens
agttttgattgtcaa

SEQ ID NO: 1577336 - DNA, 15 bp, Homo sapiens
aagttttgattgtca

SEQ ID NO: 1577337 - DNA, 15 bp, Homo sapiens
taagttttgattgtc

SEQ ID NO: 1577338 - DNA, 15 bp, Homo sapiens
ctaagttttgattgt

SEQ ID NO: 1577339 - DNA, 15 bp, Homo sapiens
actaagttttgattg

SEQ ID NO: 1577340 - DNA, 15 bp, Homo sapiens
aactaagttttgatt

SEQ ID NO: 1577341 - DNA, 15 bp, Homo sapiens
gaactaagttttgat

SEQ ID NO: 1577342 - DNA, 15 bp, Homo sapiens
agaactaagttttga

SEQ ID NO: 1577343 - DNA, 15 bp, Homo sapiens
tagaactaagttttg

SEQ ID NO: 1577344 - DNA, 15 bp, Homo sapiens
gtagaactaagtttt

SEQ ID NO: 1577345 - DNA, 15 bp, Homo sapiens
agtagaactaagttt

SEQ ID NO: 1577346 - DNA, 15 bp, Homo sapiens
tagtagaactaagtt

SEQ ID NO: 1577347 - DNA, 15 bp, Homo sapiens
gtagtagaactaagt

SEQ ID NO: 1577348 - DNA, 15 bp, Homo sapiens
agtagtagaactaag

SEQ ID NO: 1577349 - DNA, 15 bp, Homo sapiens
aagtagtagaactaa

SEQ ID NO: 1577350 - DNA, 15 bp, Homo sapiens
taagtagtagaacta

SEQ ID NO: 1577351 - DNA, 15 bp, Homo sapiens
gtaagtagtagaact

SEQ ID NO: 1577352 - DNA, 15 bp, Homo sapiens
agtaagtagtagaac

SEQ ID NO: 1577353 - DNA, 15 bp, Homo sapiens
tagtaagtagtagaa

SEQ ID NO: 1577354 - DNA, 15 bp, Homo sapiens
ctagtaagtagtaga

SEQ ID NO: 1577355 - DNA, 15 bp, Homo sapiens
gctagtaagtagtag

SEQ ID NO: 1577356 - DNA, 15 bp, Homo sapiens
ggctagtaagtagta

SEQ ID NO: 1577357 - DNA, 15 bp, Homo sapiens
tggctagtaagtagt

SEQ ID NO: 1577358 - DNA, 15 bp, Homo sapiens
atggctagtaagtag

SEQ ID NO: 1577359 - DNA, 15 bp, Homo sapiens
catggctagtaagta

SEQ ID NO: 1577360 - DNA, 15 bp, Homo sapiens
acatggctagtaagt

SEQ ID NO: 1577361 - DNA, 15 bp, Homo sapiens
cacatggctagtaag

SEQ ID NO: 1577362 - DNA, 15 bp, Homo sapiens
tcacatggctagtaa

SEQ ID NO: 1577363 - DNA, 15 bp, Homo sapiens
atcacatggctagta

SEQ ID NO: 1577364 - DNA, 15 bp, Homo sapiens
gatcacatggctagt

SEQ ID NO: 1577365 - DNA, 15 bp, Homo sapiens
agatcacatggctag

SEQ ID NO: 1577366 - DNA, 15 bp, Homo sapiens
aagatcacatggcta

SEQ ID NO: 1577367 - DNA, 15 bp, Homo sapiens
gaagatcacatggct

SEQ ID NO: 1577368 - DNA, 15 bp, Homo sapiens
tgaagatcacatggc

SEQ ID NO: 1577369 - DNA, 15 bp, Homo sapiens
ctgaagatcacatgg

SEQ ID NO: 1577370 - DNA, 15 bp, Homo sapiens
gctgaagatcacatg

SEQ ID NO: 1577371 - DNA, 15 bp, Homo sapiens
tgctgaagatcacat

SEQ ID NO: 1577372 - DNA, 15 bp, Homo sapiens
ttgctgaagatcaca

SEQ ID NO: 1577373 - DNA, 15 bp, Homo sapiens
attgctgaagatcac

SEQ ID NO: 1577374 - DNA, 15 bp, Homo sapiens
aattgctgaagatca

SEQ ID NO: 1577375 - DNA, 15 bp, Homo sapiens
aaattgctgaagatc

SEQ ID NO: 1577376 - DNA, 15 bp, Homo sapiens
taaattgctgaagat

SEQ ID NO: 1577377 - DNA, 15 bp, Homo sapiens
gtaaattgctgaaga

SEQ ID NO: 1577378 - DNA, 15 bp, Homo sapiens
agtaaattgctgaag

SEQ ID NO: 1577379 - DNA, 15 bp, Homo sapiens
aagtaaattgctgaa

SEQ ID NO: 1577380 - DNA, 15 bp, Homo sapiens
taagtaaattgctga

SEQ ID NO: 1577381 - DNA, 15 bp, Homo sapiens
ttaagtaaattgctg

SEQ ID NO: 1577382 - DNA, 15 bp, Homo sapiens
gttaagtaaattgct

SEQ ID NO: 1577383 - DNA, 15 bp, Homo sapiens
ggttaagtaaattgc

SEQ ID NO: 1577384 - DNA, 15 bp, Homo sapiens
aaaggttaagtaaat

SEQ ID NO: 1577385 - DNA, 15 bp, Homo sapiens
gaaaggttaagtaaa

SEQ ID NO: 1577386 - DNA, 15 bp, Homo sapiens
agaaaggttaagtaa

SEQ ID NO: 1577387 - DNA, 15 bp, Homo sapiens
cagaaaggttaagta

SEQ ID NO: 1577388 - DNA, 15 bp, Homo sapiens
ccagaaaggttaagt

SEQ ID NO: 1577389 - DNA, 15 bp, Homo sapiens
cccagaaaggttaag

SEQ ID NO: 1577390 - DNA, 15 bp, Homo sapiens
gcccagaaaggttaa

SEQ ID NO: 1577391 - DNA, 15 bp, Homo sapiens
agcccagaaaggtta

SEQ ID NO: 1577392 - DNA, 15 bp, Homo sapiens
aagcccagaaaggtt

SEQ ID NO: 1577393 - DNA, 15 bp, Homo sapiens
gaagcccagaaaggt

SEQ ID NO: 1577394 - DNA, 15 bp, Homo sapiens
cgaagcccagaaagg

SEQ ID NO: 1577395 - DNA, 15 bp, Homo sapiens
ccgaagcccagaaag

SEQ ID NO: 1577396 - DNA, 15 bp, Homo sapiens
accgaagcccagaaa

SEQ ID NO: 1577397 - DNA, 15 bp, Homo sapiens
aaccgaagcccagaa

SEQ ID NO: 1577398 - DNA, 15 bp, Homo sapiens
aaaccgaagcccaga

SEQ ID NO: 1577399 - DNA, 15 bp, Homo sapiens
gaaaccgaagcccag

SEQ ID NO: 1577400 - DNA, 15 bp, Homo sapiens
ggaaaccgaagccca

SEQ ID NO: 1577401 - DNA, 15 bp, Homo sapiens
aggaaaccgaagccc

SEQ ID NO: 1577402 - DNA, 15 bp, Homo sapiens
gaggaaaccgaagcc

SEQ ID NO: 1577403 - DNA, 15 bp, Homo sapiens
tgaggaaaccgaagc

SEQ ID NO: 1577404 - DNA, 15 bp, Homo sapiens
atgaggaaaccgaag

SEQ ID NO: 1577405 - DNA, 15 bp, Homo sapiens
gatgaggaaaccgaa

SEQ ID NO: 1577406 - DNA, 15 bp, Homo sapiens
agatgaggaaaccga

SEQ ID NO: 1577407 - DNA, 15 bp, Homo sapiens
tagatgaggaaaccg

SEQ ID NO: 1577408 - DNA, 15 bp, Homo sapiens
atagatgaggaaacc

SEQ ID NO: 1577409 - DNA, 15 bp, Homo sapiens
tatagatgaggaaac

SEQ ID NO: 1577410 - DNA, 15 bp, Homo sapiens
ttatagatgaggaaa

SEQ ID NO: 1577411 - DNA, 15 bp, Homo sapiens
tttatagatgaggaa

SEQ ID NO: 1577412 - DNA, 15 bp, Homo sapiens
ttttatagatgagga

SEQ ID NO: 1577413 - DNA, 15 bp, Homo sapiens
tttttatagatgagg

SEQ ID NO: 1577414 - DNA, 15 bp, Homo sapiens
atttttatagatgag

SEQ ID NO: 1577415 - DNA, 15 bp, Homo sapiens
tatttttatagatga

SEQ ID NO: 1577416 - DNA, 15 bp, Homo sapiens
ctatttttatagatg

SEQ ID NO: 1577417 - DNA, 15 bp, Homo sapiens
cctatttttatagat

SEQ ID NO: 1577418 - DNA, 15 bp, Homo sapiens
ccctatttttataga

SEQ ID NO: 1577419 - DNA, 15 bp, Homo sapiens
tccctatttttatag

SEQ ID NO: 1577420 - DNA, 15 bp, Homo sapiens
ttccctatttttata

SEQ ID NO: 1577421 - DNA, 15 bp, Homo sapiens
attccctatttttat

SEQ ID NO: 1577422 - DNA, 15 bp, Homo sapiens
tattccctattttta

SEQ ID NO: 1577423 - DNA, 15 bp, Homo sapiens
atattccctattttt

SEQ ID NO: 1577424 - DNA, 15 bp, Homo sapiens
tatattccctatttt

SEQ ID NO: 1577425 - DNA, 15 bp, Homo sapiens
atatattccctattt

SEQ ID NO: 1577426 - DNA, 15 bp, Homo sapiens
aatatattccctatt

SEQ ID NO: 1577427 - DNA, 15 bp, Homo sapiens
taatatattccctat

SEQ ID NO: 1577428 - DNA, 15 bp, Homo sapiens
gtaatatattcccta

SEQ ID NO: 1577429 - DNA, 15 bp, Homo sapiens
ggtaatatattccct

SEQ ID NO: 1577430 - DNA, 15 bp, Homo sapiens
aggtaatatattccc

SEQ ID NO: 1577431 - DNA, 15 bp, Homo sapiens
aaggtaatatattcc

SEQ ID NO: 1577432 - DNA, 15 bp, Homo sapiens
aaaggtaatatattc

SEQ ID NO: 1577433 - DNA, 15 bp, Homo sapiens
gaaaggtaatatatt

SEQ ID NO: 1577434 - DNA, 15 bp, Homo sapiens
agaaaggtaatatat

SEQ ID NO: 1577435 - DNA, 15 bp, Homo sapiens
gagaaaggtaatata

SEQ ID NO: 1577436 - DNA, 15 bp, Homo sapiens
agagaaaggtaatat

SEQ ID NO: 1577437 - DNA, 15 bp, Homo sapiens
aagagaaaggtaata

SEQ ID NO: 1577438 - DNA, 15 bp, Homo sapiens
caagagaaaggtaat

SEQ ID NO: 1577439 - DNA, 15 bp, Homo sapiens
acaagagaaaggtaa

SEQ ID NO: 1577440 - DNA, 15 bp, Homo sapiens
tacaagagaaaggta

SEQ ID NO: 1577441 - DNA, 15 bp, Homo sapiens
ttacaagagaaaggt

SEQ ID NO: 1577442 - DNA, 15 bp, Homo sapiens
attacaagagaaagg

SEQ ID NO: 1577443 - DNA, 15 bp, Homo sapiens
tattacaagagaaag

SEQ ID NO: 1577444 - DNA, 15 bp, Homo sapiens
atattacaagagaaa

SEQ ID NO: 1577445 - DNA, 15 bp, Homo sapiens
catattacaagagaa

SEQ ID NO: 1577446 - DNA, 15 bp, Homo sapiens
tcatattacaagaga

SEQ ID NO: 1577447 - DNA, 15 bp, Homo sapiens
ttcatattacaagag

SEQ ID NO: 1577448 - DNA, 15 bp, Homo sapiens
attcatattacaaga

SEQ ID NO: 1577449 - DNA, 15 bp, Homo sapiens
cattcatattacaag

SEQ ID NO: 1577450 - DNA, 15 bp, Homo sapiens
gcattcatattacaa

SEQ ID NO: 1577451 - DNA, 15 bp, Homo sapiens
ggcattcatattaca

SEQ ID NO: 1577452 - DNA, 15 bp, Homo sapiens
tggcattcatattac

SEQ ID NO: 1577453 - DNA, 15 bp, Homo sapiens
ttggcattcatatta

SEQ ID NO: 1577454 - DNA, 15 bp, Homo sapiens
tttggcattcatatt

SEQ ID NO: 1577455 - DNA, 15 bp, Homo sapiens
ttttggcattcatat

SEQ ID NO: 1577456 - DNA, 15 bp, Homo sapiens
attttggcattcata

SEQ ID NO: 1577457 - DNA, 15 bp, Homo sapiens
cattttggcattcat

SEQ ID NO: 1577458 - DNA, 15 bp, Homo sapiens
gcattttggcattca

SEQ ID NO: 1577459 - DNA, 15 bp, Homo sapiens
ggcattttggcattc

SEQ ID NO: 1577460 - DNA, 15 bp, Homo sapiens
aggcattttggcatt

SEQ ID NO: 1577461 - DNA, 15 bp, Homo sapiens
caggcattttggcat

SEQ ID NO: 1577462 - DNA, 15 bp, Homo sapiens
ccaggcattttggca

SEQ ID NO: 1577463 - DNA, 15 bp, Homo sapiens
tccaggcattttggc

SEQ ID NO: 1577464 - DNA, 15 bp, Homo sapiens
ttccaggcattttgg

SEQ ID NO: 1577465 - DNA, 15 bp, Homo sapiens
attccaggcattttg

SEQ ID NO: 1577466 - DNA, 15 bp, Homo sapiens
cattccaggcatttt

SEQ ID NO: 1577467 - DNA, 15 bp, Homo sapiens
acattccaggcattt

SEQ ID NO: 1577468 - DNA, 15 bp, Homo sapiens
tacattccaggcatt

SEQ ID NO: 1577469 - DNA, 15 bp, Homo sapiens
atacattccaggcat

SEQ ID NO: 1577470 - DNA, 15 bp, Homo sapiens
gatacattccaggca

SEQ ID NO: 1577471 - DNA, 15 bp, Homo sapiens
agatacattccaggc

SEQ ID NO: 1577472 - DNA, 15 bp, Homo sapiens
aagatacattccagg

SEQ ID NO: 1577473 - DNA, 15 bp, Homo sapiens
caagatacattccag

SEQ ID NO: 1577474 - DNA, 15 bp, Homo sapiens
gcaagatacattcca

SEQ ID NO: 1577475 - DNA, 15 bp, Homo sapiens
ggcaagatacattcc

SEQ ID NO: 1577476 - DNA, 15 bp, Homo sapiens
tggcaagatacattc

SEQ ID NO: 1577477 - DNA, 15 bp, Homo sapiens
ctggcaagatacatt

SEQ ID NO: 1577478 - DNA, 15 bp, Homo sapiens
tctggcaagatacat

SEQ ID NO: 1577479 - DNA, 15 bp, Homo sapiens
ttctggcaagataca

SEQ ID NO: 1577480 - DNA, 15 bp, Homo sapiens
cttctggcaagatac

SEQ ID NO: 1577481 - DNA, 15 bp, Homo sapiens
ccttctggcaagata

SEQ ID NO: 1577482 - DNA, 15 bp, Homo sapiens
tccttctggcaagat

SEQ ID NO: 1577483 - DNA, 15 bp, Homo sapiens
ttccttctggcaaga

SEQ ID NO: 1577484 - DNA, 15 bp, Homo sapiens
cttccttctggcaag

SEQ ID NO: 1577485 - DNA, 15 bp, Homo sapiens
ccttccttctggcaa

SEQ ID NO: 1577486 - DNA, 15 bp, Homo sapiens
cccttccttctggca

SEQ ID NO: 1577487 - DNA, 15 bp, Homo sapiens
acccttccttctggc

SEQ ID NO: 1577488 - DNA, 15 bp, Homo sapiens
gacccttccttctgg

SEQ ID NO: 1577489 - DNA, 15 bp, Homo sapiens
ggacccttccttctg

SEQ ID NO: 1577490 - DNA, 15 bp, Homo sapiens
tggacccttccttct

SEQ ID NO: 1577491 - DNA, 15 bp, Homo sapiens
ctggacccttccttc

SEQ ID NO: 1577492 - DNA, 15 bp, Homo sapiens
gctggacccttcctt

SEQ ID NO: 1577493 - DNA, 15 bp, Homo sapiens
ggctggacccttcct

SEQ ID NO: 1577494 - DNA, 15 bp, Homo sapiens
tggctggacccttcc

SEQ ID NO: 1577495 - DNA, 15 bp, Homo sapiens
ttggctggacccttc

SEQ ID NO: 1577496 - DNA, 15 bp, Homo sapiens
cttggctggaccctt

SEQ ID NO: 1577497 - DNA, 15 bp, Homo sapiens
tcttggctggaccct

SEQ ID NO: 1577498 - DNA, 15 bp, Homo sapiens
gtcttggctggaccc

SEQ ID NO: 1577499 - DNA, 15 bp, Homo sapiens
agtcttggctggacc

SEQ ID NO: 1577500 - DNA, 15 bp, Homo sapiens
tagtcttggctggac

SEQ ID NO: 1577501 - DNA, 15 bp, Homo sapiens
atagtcttggctgga

SEQ ID NO: 1577502 - DNA, 15 bp, Homo sapiens
aatagtcttggctgg

SEQ ID NO: 1577503 - DNA, 15 bp, Homo sapiens
gaatagtcttggctg

SEQ ID NO: 1577504 - DNA, 15 bp, Homo sapiens
ggaatagtcttggct

SEQ ID NO: 1577505 - DNA, 15 bp, Homo sapiens
aggaatagtcttggc

SEQ ID NO: 1577506 - DNA, 15 bp, Homo sapiens
aaggaatagtcttgg

SEQ ID NO: 1577507 - DNA, 15 bp, Homo sapiens
aaaggaatagtcttg

SEQ ID NO: 1577508 - DNA, 15 bp, Homo sapiens
taaaggaatagtctt

SEQ ID NO: 1577509 - DNA, 15 bp, Homo sapiens
ataaaggaatagtct

SEQ ID NO: 1577510 - DNA, 15 bp, Homo sapiens
gataaaggaatagtc

SEQ ID NO: 1577511 - DNA, 15 bp, Homo sapiens
agataaaggaatagt

SEQ ID NO: 1577512 - DNA, 15 bp, Homo sapiens
tagataaaggaatag

SEQ ID NO: 1577513 - DNA, 15 bp, Homo sapiens
ttagataaaggaata

SEQ ID NO: 1577514 - DNA, 15 bp, Homo sapiens
cttagataaaggaat

SEQ ID NO: 1577515 - DNA, 15 bp, Homo sapiens
tcttagataaaggaa

SEQ ID NO: 1577516 - DNA, 15 bp, Homo sapiens
ctcttagataaagga

SEQ ID NO: 1577517 - DNA, 15 bp, Homo sapiens
actcttagataaagg

SEQ ID NO: 1577518 - DNA, 15 bp, Homo sapiens
cactcttagataaag

SEQ ID NO: 1577519 - DNA, 15 bp, Homo sapiens
acactcttagataaa

SEQ ID NO: 1577520 - DNA, 15 bp, Homo sapiens
aacactcttagataa

SEQ ID NO: 1577521 - DNA, 15 bp, Homo sapiens
gaacactcttagata

SEQ ID NO: 1577522 - DNA, 15 bp, Homo sapiens
ggaacactcttagat

SEQ ID NO: 1577523 - DNA, 15 bp, Homo sapiens
gggaacactcttaga

SEQ ID NO: 1577524 - DNA, 15 bp, Homo sapiens
ggggaacactcttag

SEQ ID NO: 1577525 - DNA, 15 bp, Homo sapiens
tggggaacactctta

SEQ ID NO: 1577526 - DNA, 15 bp, Homo sapiens
ttggggaacactctt

SEQ ID NO: 1577527 - DNA, 15 bp, Homo sapiens
cttggggaacactct

SEQ ID NO: 1577528 - DNA, 15 bp, Homo sapiens
gcttggggaacactc

SEQ ID NO: 1577529 - DNA, 15 bp, Homo sapiens
agcttggggaacact

SEQ ID NO: 1577530 - DNA, 15 bp, Homo sapiens
aagcttggggaacac

SEQ ID NO: 1577531 - DNA, 15 bp, Homo sapiens
aaagcttggggaaca

SEQ ID NO: 1577532 - DNA, 15 bp, Homo sapiens
caaagcttggggaac

SEQ ID NO: 1577533 - DNA, 15 bp, Homo sapiens
ccaaagcttggggaa

SEQ ID NO: 1577534 - DNA, 15 bp, Homo sapiens
accaaagcttgggga

SEQ ID NO: 1577535 - DNA, 15 bp, Homo sapiens
gaccaaagcttgggg

SEQ ID NO: 1577536 - DNA, 15 bp, Homo sapiens
agaccaaagcttggg

SEQ ID NO: 1577537 - DNA, 15 bp, Homo sapiens
gagaccaaagcttgg

SEQ ID NO: 1577538 - DNA, 15 bp, Homo sapiens
tgagaccaaagcttg

SEQ ID NO: 1577539 - DNA, 15 bp, Homo sapiens
ttgagaccaaagctt

SEQ ID NO: 1577540 - DNA, 15 bp, Homo sapiens
tttgagaccaaagct

SEQ ID NO: 1577541 - DNA, 15 bp, Homo sapiens
ttttgagaccaaagc

SEQ ID NO: 1577542 - DNA, 15 bp, Homo sapiens
cttttgagaccaaag

SEQ ID NO: 1577543 - DNA, 15 bp, Homo sapiens
ccttttgagaccaaa

SEQ ID NO: 1577544 - DNA, 15 bp, Homo sapiens
gccttttgagaccaa

SEQ ID NO: 1577545 - DNA, 15 bp, Homo sapiens
ggccttttgagacca

SEQ ID NO: 1577546 - DNA, 15 bp, Homo sapiens
gggccttttgagacc

SEQ ID NO: 1577547 - DNA, 15 bp, Homo sapiens
tgggccttttgagac

SEQ ID NO: 1577548 - DNA, 15 bp, Homo sapiens
ctgggccttttgaga

SEQ ID NO: 1577549 - DNA, 15 bp, Homo sapiens
cctgggccttttgag

SEQ ID NO: 1577550 - DNA, 15 bp, Homo sapiens
gcctgggccttttga

SEQ ID NO: 1577551 - DNA, 15 bp, Homo sapiens
agcctgggccttttg

SEQ ID NO: 1577552 - DNA, 15 bp, Homo sapiens
tagcctgggcctttt

SEQ ID NO: 1577553 - DNA, 15 bp, Homo sapiens
ttagcctgggccttt

SEQ ID NO: 1577554 - DNA, 15 bp, Homo sapiens
attagcctgggcctt

SEQ ID NO: 1577555 - DNA, 15 bp, Homo sapiens
cattagcctgggcct

SEQ ID NO: 1577556 - DNA, 15 bp, Homo sapiens
gcattagcctgggcc

SEQ ID NO: 1577557 - DNA, 15 bp, Homo sapiens
tgcattagcctgggc

SEQ ID NO: 1577558 - DNA, 15 bp, Homo sapiens
atgcattagcctggg

SEQ ID NO: 1577559 - DNA, 15 bp, Homo sapiens
aatgcattagcctgg

SEQ ID NO: 1577560 - DNA, 15 bp, Homo sapiens
aaatgcattagcctg

SEQ ID NO: 1577561 - DNA, 15 bp, Homo sapiens
gaaatgcattagcct

SEQ ID NO: 1577562 - DNA, 15 bp, Homo sapiens
agaaatgcattagcc

SEQ ID NO: 1577563 - DNA, 15 bp, Homo sapiens
aagaaatgcattagc

SEQ ID NO: 1577564 - DNA, 15 bp, Homo sapiens
taagaaatgcattag

SEQ ID NO: 1577565 - DNA, 15 bp, Homo sapiens
gtaagaaatgcatta

SEQ ID NO: 1577566 - DNA, 15 bp, Homo sapiens
agtaagaaatgcatt

SEQ ID NO: 1577567 - DNA, 15 bp, Homo sapiens
tagtaagaaatgcat

SEQ ID NO: 1577568 - DNA, 15 bp, Homo sapiens
atagtaagaaatgca

SEQ ID NO: 1577569 - DNA, 15 bp, Homo sapiens
aatagtaagaaatgc

SEQ ID NO: 1577570 - DNA, 15 bp, Homo sapiens
caatagtaagaaatg

SEQ ID NO: 1577571 - DNA, 15 bp, Homo sapiens
ccaatagtaagaaat

SEQ ID NO: 1577572 - DNA, 15 bp, Homo sapiens
accaatagtaagaaa

SEQ ID NO: 1577573 - DNA, 15 bp, Homo sapiens
gaccaatagtaagaa

SEQ ID NO: 1577574 - DNA, 15 bp, Homo sapiens
agaccaatagtaaga

SEQ ID NO: 1577575 - DNA, 15 bp, Homo sapiens
cagaccaatagtaag

SEQ ID NO: 1577576 - DNA, 15 bp, Homo sapiens
tcagaccaatagtaa

SEQ ID NO: 1577577 - DNA, 15 bp, Homo sapiens
ttcagaccaatagta

SEQ ID NO: 1577578 - DNA, 15 bp, Homo sapiens
tttcagaccaatagt

SEQ ID NO: 1577579 - DNA, 15 bp, Homo sapiens
atttcagaccaatag

SEQ ID NO: 1577580 - DNA, 15 bp, Homo sapiens
aatttcagaccaata

SEQ ID NO: 1577581 - DNA, 15 bp, Homo sapiens
gaatttcagaccaat

SEQ ID NO: 1577582 - DNA, 15 bp, Homo sapiens
agaatttcagaccaa

SEQ ID NO: 1577583 - DNA, 15 bp, Homo sapiens
tagaatttcagacca

SEQ ID NO: 1577584 - DNA, 15 bp, Homo sapiens
atagaatttcagacc

SEQ ID NO: 1577585 - DNA, 15 bp, Homo sapiens
catagaatttcagac

SEQ ID NO: 1577586 - DNA, 15 bp, Homo sapiens
acatagaatttcaga

SEQ ID NO: 1577587 - DNA, 15 bp, Homo sapiens
aacatagaatttcag

SEQ ID NO: 1577588 - DNA, 15 bp, Homo sapiens
gaacatagaatttca

SEQ ID NO: 1577589 - DNA, 15 bp, Homo sapiens
agaacatagaatttc

SEQ ID NO: 1577590 - DNA, 15 bp, Homo sapiens
gagaacatagaattt

SEQ ID NO: 1577591 - DNA, 15 bp, Homo sapiens
ggagaacatagaatt

SEQ ID NO: 1577592 - DNA, 15 bp, Homo sapiens
aggagaacatagaat

SEQ ID NO: 1577593 - DNA, 15 bp, Homo sapiens
taggagaacatagaa

SEQ ID NO: 1577594 - DNA, 15 bp, Homo sapiens
ttaggagaacataga

SEQ ID NO: 1577595 - DNA, 15 bp, Homo sapiens
cttaggagaacatag

SEQ ID NO: 1577596 - DNA, 15 bp, Homo sapiens
tcttaggagaacata

SEQ ID NO: 1577597 - DNA, 15 bp, Homo sapiens
gtcttaggagaacat

SEQ ID NO: 1577598 - DNA, 15 bp, Homo sapiens
tgtcttaggagaaca

SEQ ID NO: 1577599 - DNA, 15 bp, Homo sapiens
atgtcttaggagaac

SEQ ID NO: 1577600 - DNA, 15 bp, Homo sapiens
tatgtcttaggagaa

SEQ ID NO: 1577601 - DNA, 15 bp, Homo sapiens
ctatgtcttaggaga

SEQ ID NO: 1577602 - DNA, 15 bp, Homo sapiens
actatgtcttaggag

SEQ ID NO: 1577603 - DNA, 15 bp, Homo sapiens
aactatgtcttagga

SEQ ID NO: 1577604 - DNA, 15 bp, Homo sapiens
aaactatgtcttagg

SEQ ID NO: 1577605 - DNA, 15 bp, Homo sapiens
caaactatgtcttag

SEQ ID NO: 1577606 - DNA, 15 bp, Homo sapiens
acaaactatgtctta

SEQ ID NO: 1577607 - DNA, 15 bp, Homo sapiens
tacaaactatgtctt

SEQ ID NO: 1577608 - DNA, 15 bp, Homo sapiens
ttacaaactatgtct

SEQ ID NO: 1577609 - DNA, 15 bp, Homo sapiens
cttacaaactatgtc

SEQ ID NO: 1577610 - DNA, 15 bp, Homo sapiens
tcttacaaactatgt

SEQ ID NO: 1577611 - DNA, 15 bp, Homo sapiens
gtcttacaaactatg

SEQ ID NO: 1577612 - DNA, 15 bp, Homo sapiens
agtcttacaaactat

SEQ ID NO: 1577613 - DNA, 15 bp, Homo sapiens
aagtcttacaaacta

SEQ ID NO: 1577614 - DNA, 15 bp, Homo sapiens
aaagtcttacaaact

SEQ ID NO: 1577615 - DNA, 15 bp, Homo sapiens
taaagtcttacaaac

SEQ ID NO: 1577616 - DNA, 15 bp, Homo sapiens
ttaaagtcttacaaa

SEQ ID NO: 1577617 - DNA, 15 bp, Homo sapiens
attaaagtcttacaa

SEQ ID NO: 1577618 - DNA, 15 bp, Homo sapiens
cattaaagtcttaca

SEQ ID NO: 1577619 - DNA, 15 bp, Homo sapiens
tcattaaagtcttac

SEQ ID NO: 1577620 - DNA, 15 bp, Homo sapiens
ttcattaaagtctta

SEQ ID NO: 1577621 - DNA, 15 bp, Homo sapiens
attcattaaagtctt

SEQ ID NO: 1577622 - DNA, 15 bp, Homo sapiens
tattcattaaagtct

SEQ ID NO: 1577623 - DNA, 15 bp, Homo sapiens
ttattcattaaagtc

SEQ ID NO: 1577624 - DNA, 15 bp, Homo sapiens
gttattcattaaagt

SEQ ID NO: 1577625 - DNA, 15 bp, Homo sapiens
agttattcattaaag

SEQ ID NO: 1577626 - DNA, 15 bp, Homo sapiens
aagttattcattaaa

SEQ ID NO: 1577627 - DNA, 15 bp, Homo sapiens
gaagttattcattaa

SEQ ID NO: 1577628 - DNA, 15 bp, Homo sapiens
tgaagttattcatta

SEQ ID NO: 1577629 - DNA, 15 bp, Homo sapiens
ttgaagttattcatt

SEQ ID NO: 1577630 - DNA, 15 bp, Homo sapiens
aattgaagttattca

SEQ ID NO: 1577631 - DNA, 15 bp, Homo sapiens
taattgaagttattc

SEQ ID NO: 1577632 - DNA, 15 bp, Homo sapiens
ttaattgaagttatt

SEQ ID NO: 1577633 - DNA, 15 bp, Homo sapiens
cttaattgaagttat

SEQ ID NO: 1577634 - DNA, 15 bp, Homo sapiens
gcttaattgaagtta

SEQ ID NO: 1577635 - DNA, 15 bp, Homo sapiens
tgcttaattgaagtt

SEQ ID NO: 1577636 - DNA, 15 bp, Homo sapiens
gtgcttaattgaagt

SEQ ID NO: 1577637 - DNA, 15 bp, Homo sapiens
tgtgcttaattgaag

SEQ ID NO: 1577638 - DNA, 15 bp, Homo sapiens
ttgtgcttaattgaa

SEQ ID NO: 1577639 - DNA, 15 bp, Homo sapiens
cttgtgcttaattga

SEQ ID NO: 1577640 - DNA, 15 bp, Homo sapiens
ccttgtgcttaattg

SEQ ID NO: 1577641 - DNA, 15 bp, Homo sapiens
accttgtgcttaatt

SEQ ID NO: 1577642 - DNA, 15 bp, Homo sapiens
taccttgtgcttaat

SEQ ID NO: 1577643 - DNA, 15 bp, Homo sapiens
ttaccttgtgcttaa

SEQ ID NO: 1577644 - DNA, 15 bp, Homo sapiens
gttaccttgtgctta

SEQ ID NO: 1577645 - DNA, 15 bp, Homo sapiens
ggttaccttgtgctt

SEQ ID NO: 1577646 - DNA, 15 bp, Homo sapiens
aggttaccttgtgct

SEQ ID NO: 1577647 - DNA, 15 bp, Homo sapiens
gaggttaccttgtgc

SEQ ID NO: 1577648 - DNA, 15 bp, Homo sapiens
agaggttaccttgtg

SEQ ID NO: 1577649 - DNA, 15 bp, Homo sapiens
aagaggttaccttgt

SEQ ID NO: 1577650 - DNA, 15 bp, Homo sapiens
taagaggttaccttg

SEQ ID NO: 1577651 - DNA, 15 bp, Homo sapiens
ttaagaggttacctt

SEQ ID NO: 1577652 - DNA, 15 bp, Homo sapiens
tttaagaggttacct

SEQ ID NO: 1577653 - DNA, 15 bp, Homo sapiens
ttttaagaggttacc

SEQ ID NO: 1577654 - DNA, 15 bp, Homo sapiens
tttttaagaggttac

SEQ ID NO: 1577655 - DNA, 15 bp, Homo sapiens
gtttttaagaggtta

SEQ ID NO: 1577656 - DNA, 15 bp, Homo sapiens
tgtttttaagaggtt

SEQ ID NO: 1577657 - DNA, 15 bp, Homo sapiens
atgtttttaagaggt

SEQ ID NO: 1577658 - DNA, 15 bp, Homo sapiens
tatgtttttaagagg

SEQ ID NO: 1577659 - DNA, 15 bp, Homo sapiens
atatgtttttaagag

SEQ ID NO: 1577660 - DNA, 15 bp, Homo sapiens
catatgtttttaaga

SEQ ID NO: 1577661 - DNA, 15 bp, Homo sapiens
gcatatgtttttaag

SEQ ID NO: 1577662 - DNA, 15 bp, Homo sapiens
agcatatgtttttaa

SEQ ID NO: 1577663 - DNA, 15 bp, Homo sapiens
cagcatatgttttta

SEQ ID NO: 1577664 - DNA, 15 bp, Homo sapiens
acagcatatgttttt

SEQ ID NO: 1577665 - DNA, 15 bp, Homo sapiens
tacagcatatgtttt

SEQ ID NO: 1577666 - DNA, 15 bp, Homo sapiens
ttacagcatatgttt

SEQ ID NO: 1577667 - DNA, 15 bp, Homo sapiens
attacagcatatgtt

SEQ ID NO: 1577668 - DNA, 15 bp, Homo sapiens
aattacagcatatgt

SEQ ID NO: 1577669 - DNA, 15 bp, Homo sapiens
gaattacagcatatg

SEQ ID NO: 1577670 - DNA, 15 bp, Homo sapiens
agaattacagcatat

SEQ ID NO: 1577671 - DNA, 15 bp, Homo sapiens
gagaattacagcata

SEQ ID NO: 1577672 - DNA, 15 bp, Homo sapiens
agagaattacagcat

SEQ ID NO: 1577673 - DNA, 15 bp, Homo sapiens
gagagaattacagca

SEQ ID NO: 1577674 - DNA, 15 bp, Homo sapiens
ggagagaattacagc

SEQ ID NO: 1577675 - DNA, 15 bp, Homo sapiens
aggagagaattacag

SEQ ID NO: 1577676 - DNA, 15 bp, Homo sapiens
aaggagagaattaca

SEQ ID NO: 1577677 - DNA, 15 bp, Homo sapiens
caaggagagaattac

SEQ ID NO: 1577678 - DNA, 15 bp, Homo sapiens
gcaaggagagaatta

SEQ ID NO: 1577679 - DNA, 15 bp, Homo sapiens
tgcaaggagagaatt

SEQ ID NO: 1577680 - DNA, 15 bp, Homo sapiens
atgcaaggagagaat

SEQ ID NO: 1577681 - DNA, 15 bp, Homo sapiens
gatgcaaggagagaa

SEQ ID NO: 1577682 - DNA, 15 bp, Homo sapiens
ggatgcaaggagaga

SEQ ID NO: 1577683 - DNA, 15 bp, Homo sapiens
aggatgcaaggagag

SEQ ID NO: 1577684 - DNA, 15 bp, Homo sapiens
gaggatgcaaggaga

SEQ ID NO: 1577685 - DNA, 15 bp, Homo sapiens
tgaggatgcaaggag

SEQ ID NO: 1577686 - DNA, 15 bp, Homo sapiens
ttgaggatgcaagga

SEQ ID NO: 1577687 - DNA, 15 bp, Homo sapiens
tttgaggatgcaagg

SEQ ID NO: 1577688 - DNA, 15 bp, Homo sapiens
ttttgaggatgcaag

SEQ ID NO: 1577689 - DNA, 15 bp, Homo sapiens
cttttgaggatgcaa

SEQ ID NO: 1577690 - DNA, 15 bp, Homo sapiens
tcttttgaggatgca

SEQ ID NO: 1577691 - DNA, 15 bp, Homo sapiens
ctcttttgaggatgc

SEQ ID NO: 1577692 - DNA, 15 bp, Homo sapiens
actcttttgaggatg

SEQ ID NO: 1577693 - DNA, 15 bp, Homo sapiens
tactcttttgaggat

SEQ ID NO: 1577694 - DNA, 15 bp, Homo sapiens
gtactcttttgagga

SEQ ID NO: 1577695 - DNA, 15 bp, Homo sapiens
tgtactcttttgagg

SEQ ID NO: 1577696 - DNA, 15 bp, Homo sapiens
atgtactcttttgag

SEQ ID NO: 1577697 - DNA, 15 bp, Homo sapiens
gatgtactcttttga

SEQ ID NO: 1577698 - DNA, 15 bp, Homo sapiens
agatgtactcttttg

SEQ ID NO: 1577699 - DNA, 15 bp, Homo sapiens
aagatgtactctttt

SEQ ID NO: 1577700 - DNA, 15 bp, Homo sapiens
gaagatgtactcttt

SEQ ID NO: 1577701 - DNA, 15 bp, Homo sapiens
tgaagatgtactctt

SEQ ID NO: 1577702 - DNA, 15 bp, Homo sapiens
atgaagatgtactct

SEQ ID NO: 1577703 - DNA, 15 bp, Homo sapiens
catgaagatgtactc

SEQ ID NO: 1577704 - DNA, 15 bp, Homo sapiens
ccatgaagatgtact

SEQ ID NO: 1577705 - DNA, 15 bp, Homo sapiens
tccatgaagatgtac

SEQ ID NO: 1577706 - DNA, 15 bp, Homo sapiens
atccatgaagatgta

SEQ ID NO: 1577707 - DNA, 15 bp, Homo sapiens
gatccatgaagatgt

SEQ ID NO: 1577708 - DNA, 15 bp, Homo sapiens
tgatccatgaagatg

SEQ ID NO: 1577709 - DNA, 15 bp, Homo sapiens
atgatccatgaagat

SEQ ID NO: 1577710 - DNA, 15 bp, Homo sapiens
aatgatccatgaaga

SEQ ID NO: 1577711 - DNA, 15 bp, Homo sapiens
aaatgatccatgaag

SEQ ID NO: 1577712 - DNA, 15 bp, Homo sapiens
aaaatgatccatgaa

SEQ ID NO: 1577713 - DNA, 15 bp, Homo sapiens
taaaatgatccatga

SEQ ID NO: 1577714 - DNA, 15 bp, Homo sapiens
ttaaaatgatccatg

SEQ ID NO: 1577715 - DNA, 15 bp, Homo sapiens
tttaaaatgatccat

SEQ ID NO: 1577716 - DNA, 15 bp, Homo sapiens
ttttaaaatgatcca

SEQ ID NO: 1577717 - DNA, 15 bp, Homo sapiens
tttttaaaatgatcc

SEQ ID NO: 1577718 - DNA, 15 bp, Homo sapiens
ctttttaaaatgatc

SEQ ID NO: 1577719 - DNA, 15 bp, Homo sapiens
actttttaaaatgat

SEQ ID NO: 1577720 - DNA, 15 bp, Homo sapiens
gactttttaaaatga

SEQ ID NO: 1577721 - DNA, 15 bp, Homo sapiens
agactttttaaaatg

SEQ ID NO: 1577722 - DNA, 15 bp, Homo sapiens
aagactttttaaaat

SEQ ID NO: 1577723 - DNA, 15 bp, Homo sapiens
taagactttttaaaa

SEQ ID NO: 1577724 - DNA, 15 bp, Homo sapiens
ctaagactttttaaa

SEQ ID NO: 1577725 - DNA, 15 bp, Homo sapiens
cctaagactttttaa

SEQ ID NO: 1577726 - DNA, 15 bp, Homo sapiens
acctaagacttttta

SEQ ID NO: 1577727 - DNA, 15 bp, Homo sapiens
tacctaagacttttt

SEQ ID NO: 1577728 - DNA, 15 bp, Homo sapiens
ttacctaagactttt

SEQ ID NO: 1577729 - DNA, 15 bp, Homo sapiens
cttacctaagacttt

SEQ ID NO: 1577730 - DNA, 15 bp, Homo sapiens
tcttacctaagactt

SEQ ID NO: 1577731 - DNA, 15 bp, Homo sapiens
ttcttacctaagact

SEQ ID NO: 1577732 - DNA, 15 bp, Homo sapiens
tttcttacctaagac

SEQ ID NO: 1577733 - DNA, 15 bp, Homo sapiens
ttttcttacctaaga

SEQ ID NO: 1577734 - DNA, 15 bp, Homo sapiens
tttttcttacctaag

SEQ ID NO: 1577735 - DNA, 15 bp, Homo sapiens
ttttttcttacctaa

SEQ ID NO: 1577736 - DNA, 15 bp, Homo sapiens
attttttcttaccta

SEQ ID NO: 1577737 - DNA, 15 bp, Homo sapiens
tattttttcttacct

SEQ ID NO: 1577738 - DNA, 15 bp, Homo sapiens
ttattttttcttacc

SEQ ID NO: 1577739 - DNA, 15 bp, Homo sapiens
gttattttttcttac

SEQ ID NO: 1577740 - DNA, 15 bp, Homo sapiens
ggttattttttctta

SEQ ID NO: 1577741 - DNA, 15 bp, Homo sapiens
tggttattttttctt

SEQ ID NO: 1577742 - DNA, 15 bp, Homo sapiens
atggttattttttct

SEQ ID NO: 1577743 - DNA, 15 bp, Homo sapiens
aatggttattttttc

SEQ ID NO: 1577744 - DNA, 15 bp, Homo sapiens
ttaaatggttatttt

SEQ ID NO: 1577745 - DNA, 15 bp, Homo sapiens
attaaatggttattt

SEQ ID NO: 1577746 - DNA, 15 bp, Homo sapiens
tattaaatggttatt

SEQ ID NO: 1577747 - DNA, 15 bp, Homo sapiens
ttattaaatggttat

SEQ ID NO: 1577748 - DNA, 15 bp, Homo sapiens
attattaaatggtta

SEQ ID NO: 1577749 - DNA, 15 bp, Homo sapiens
cattattaaatggtt

SEQ ID NO: 1577750 - DNA, 15 bp, Homo sapiens
ccattattaaatggt

SEQ ID NO: 1577751 - DNA, 15 bp, Homo sapiens
gccattattaaatgg

SEQ ID NO: 1577752 - DNA, 15 bp, Homo sapiens
tgccattattaaatg

SEQ ID NO: 1577753 - DNA, 15 bp, Homo sapiens
ctgccattattaaat

SEQ ID NO: 1577754 - DNA, 15 bp, Homo sapiens
actgccattattaaa

SEQ ID NO: 1577755 - DNA, 15 bp, Homo sapiens
aactgccattattaa

SEQ ID NO: 1577756 - DNA, 15 bp, Homo sapiens
taactgccattatta

SEQ ID NO: 1577757 - DNA, 15 bp, Homo sapiens
ataactgccattatt

SEQ ID NO: 1577758 - DNA, 15 bp, Homo sapiens
tataactgccattat

SEQ ID NO: 1577759 - DNA, 15 bp, Homo sapiens
atataactgccatta

SEQ ID NO: 1577760 - DNA, 15 bp, Homo sapiens
gatataactgccatt

SEQ ID NO: 1577761 - DNA, 15 bp, Homo sapiens
ggatataactgccat

SEQ ID NO: 1577762 - DNA, 15 bp, Homo sapiens
aggatataactgcca

SEQ ID NO: 1577763 - DNA, 15 bp, Homo sapiens
caggatataactgcc

SEQ ID NO: 1577764 - DNA, 15 bp, Homo sapiens
ccaggatataactgc

SEQ ID NO: 1577765 - DNA, 15 bp, Homo sapiens
tccaggatataactg

SEQ ID NO: 1577766 - DNA, 15 bp, Homo sapiens
ttccaggatataact

SEQ ID NO: 1577767 - DNA, 15 bp, Homo sapiens
tttccaggatataac

SEQ ID NO: 1577768 - DNA, 15 bp, Homo sapiens
ctttccaggatataa

SEQ ID NO: 1577769 - DNA, 15 bp, Homo sapiens
cctttccaggatata

SEQ ID NO: 1577770 - DNA, 15 bp, Homo sapiens
ccctttccaggatat

SEQ ID NO: 1577771 - DNA, 15 bp, Homo sapiens
gccctttccaggata

SEQ ID NO: 1577772 - DNA, 15 bp, Homo sapiens
agccctttccaggat

SEQ ID NO: 1577773 - DNA, 15 bp, Homo sapiens
gagccctttccagga

SEQ ID NO: 1577774 - DNA, 15 bp, Homo sapiens
tgagccctttccagg

SEQ ID NO: 1577775 - DNA, 15 bp, Homo sapiens
ttgagccctttccag

SEQ ID NO: 1577776 - DNA, 15 bp, Homo sapiens
tttgagccctttcca

SEQ ID NO: 1577777 - DNA, 15 bp, Homo sapiens
ttttgagccctttcc

SEQ ID NO: 1577778 - DNA, 15 bp, Homo sapiens
attttgagccctttc

SEQ ID NO: 1577779 - DNA, 15 bp, Homo sapiens
aattttgagcccttt

SEQ ID NO: 1577780 - DNA, 15 bp, Homo sapiens
caattttgagccctt

SEQ ID NO: 1577781 - DNA, 15 bp, Homo sapiens
ccaattttgagccct

SEQ ID NO: 1577782 - DNA, 15 bp, Homo sapiens
cccaattttgagccc

SEQ ID NO: 1577783 - DNA, 15 bp, Homo sapiens
tcccaattttgagcc

SEQ ID NO: 1577784 - DNA, 15 bp, Homo sapiens
atcccaattttgagc

SEQ ID NO: 1577785 - DNA, 15 bp, Homo sapiens
catcccaattttgag

SEQ ID NO: 1577786 - DNA, 15 bp, Homo sapiens
tcatcccaattttga

SEQ ID NO: 1577787 - DNA, 15 bp, Homo sapiens
atcatcccaattttg

SEQ ID NO: 1577788 - DNA, 15 bp, Homo sapiens
tatcatcccaatttt

SEQ ID NO: 1577789 - DNA, 15 bp, Homo sapiens
ctatcatcccaattt

SEQ ID NO: 1577790 - DNA, 15 bp, Homo sapiens
tctatcatcccaatt

SEQ ID NO: 1577791 - DNA, 15 bp, Homo sapiens
ttctatcatcccaat

SEQ ID NO: 1577792 - DNA, 15 bp, Homo sapiens
attctatcatcccaa

SEQ ID NO: 1577793 - DNA, 15 bp, Homo sapiens
cattctatcatccca

SEQ ID NO: 1577794 - DNA, 15 bp, Homo sapiens
acattctatcatccc

SEQ ID NO: 1577795 - DNA, 15 bp, Homo sapiens
gacattctatcatcc

SEQ ID NO: 1577796 - DNA, 15 bp, Homo sapiens
agacattctatcatc

SEQ ID NO: 1577797 - DNA, 15 bp, Homo sapiens
tagacattctatcat

SEQ ID NO: 1577798 - DNA, 15 bp, Homo sapiens
ttagacattctatca

SEQ ID NO: 1577799 - DNA, 15 bp, Homo sapiens
gttagacattctatc

SEQ ID NO: 1577800 - DNA, 15 bp, Homo sapiens
agttagacattctat

SEQ ID NO: 1577801 - DNA, 15 bp, Homo sapiens
gagttagacattcta

SEQ ID NO: 1577802 - DNA, 15 bp, Homo sapiens
agagttagacattct

SEQ ID NO: 1577803 - DNA, 15 bp, Homo sapiens
cagagttagacattc

SEQ ID NO: 1577804 - DNA, 15 bp, Homo sapiens
tcagagttagacatt

SEQ ID NO: 1577805 - DNA, 15 bp, Homo sapiens
gtcagagttagacat

SEQ ID NO: 1577806 - DNA, 15 bp, Homo sapiens
tgtcagagttagaca

SEQ ID NO: 1577807 - DNA, 15 bp, Homo sapiens
atgtcagagttagac

SEQ ID NO: 1577808 - DNA, 15 bp, Homo sapiens
catgtcagagttaga

SEQ ID NO: 1577809 - DNA, 15 bp, Homo sapiens
acatgtcagagttag

SEQ ID NO: 1577810 - DNA, 15 bp, Homo sapiens
cacatgtcagagtta

SEQ ID NO: 1577811 - DNA, 15 bp, Homo sapiens
gcacatgtcagagtt

SEQ ID NO: 1577812 - DNA, 15 bp, Homo sapiens
ggcacatgtcagagt

SEQ ID NO: 1577813 - DNA, 15 bp, Homo sapiens
cggcacatgtcagag

SEQ ID NO: 1577814 - DNA, 15 bp, Homo sapiens
gcggcacatgtcaga

SEQ ID NO: 1577815 - DNA, 15 bp, Homo sapiens
agcggcacatgtcag

SEQ ID NO: 1577816 - DNA, 15 bp, Homo sapiens
cagcggcacatgtca

SEQ ID NO: 1577817 - DNA, 15 bp, Homo sapiens
gcagcggcacatgtc

SEQ ID NO: 1577818 - DNA, 15 bp, Homo sapiens
agcagcggcacatgt

SEQ ID NO: 1577819 - DNA, 15 bp, Homo sapiens
gagcagcggcacatg

SEQ ID NO: 1577820 - DNA, 15 bp, Homo sapiens
agagcagcggcacat

SEQ ID NO: 1577821 - DNA, 15 bp, Homo sapiens
cagagcagcggcaca

SEQ ID NO: 1577822 - DNA, 15 bp, Homo sapiens
ccagagcagcggcac

SEQ ID NO: 1577823 - DNA, 15 bp, Homo sapiens
tccagagcagcggca

SEQ ID NO: 1577824 - DNA, 15 bp, Homo sapiens
ttccagagcagcggc

SEQ ID NO: 1577825 - DNA, 15 bp, Homo sapiens
cttccagagcagcgg

SEQ ID NO: 1577826 - DNA, 15 bp, Homo sapiens
gcttccagagcagcg

SEQ ID NO: 1577827 - DNA, 15 bp, Homo sapiens
tgcttccagagcagc

SEQ ID NO: 1577828 - DNA, 15 bp, Homo sapiens
ttgcttccagagcag

SEQ ID NO: 1577829 - DNA, 15 bp, Homo sapiens
attgcttccagagca

SEQ ID NO: 1577830 - DNA, 15 bp, Homo sapiens
aattgcttccagagc

SEQ ID NO: 1577831 - DNA, 15 bp, Homo sapiens
caattgcttccagag

SEQ ID NO: 1577832 - DNA, 15 bp, Homo sapiens
ccaattgcttccaga

SEQ ID NO: 1577833 - DNA, 15 bp, Homo sapiens
accaattgcttccag

SEQ ID NO: 1577834 - DNA, 15 bp, Homo sapiens
caccaattgcttcca

SEQ ID NO: 1577835 - DNA, 15 bp, Homo sapiens
ccaccaattgcttcc

SEQ ID NO: 1577836 - DNA, 15 bp, Homo sapiens
cccaccaattgcttc

SEQ ID NO: 1577837 - DNA, 15 bp, Homo sapiens
tcccaccaattgctt

SEQ ID NO: 1577838 - DNA, 15 bp, Homo sapiens
ctcccaccaattgct

SEQ ID NO: 1577839 - DNA, 15 bp, Homo sapiens
actcccaccaattgc

SEQ ID NO: 1577840 - DNA, 15 bp, Homo sapiens
aactcccaccaattg

SEQ ID NO: 1577841 - DNA, 15 bp, Homo sapiens
gaactcccaccaatt

SEQ ID NO: 1577842 - DNA, 15 bp, Homo sapiens
ggaactcccaccaat

SEQ ID NO: 1577843 - DNA, 15 bp, Homo sapiens
tggaactcccaccaa

SEQ ID NO: 1577844 - DNA, 15 bp, Homo sapiens
ctggaactcccacca

SEQ ID NO: 1577845 - DNA, 15 bp, Homo sapiens
tctggaactcccacc

SEQ ID NO: 1577846 - DNA, 15 bp, Homo sapiens
ttctggaactcccac

SEQ ID NO: 1577847 - DNA, 15 bp, Homo sapiens
attctggaactccca

SEQ ID NO: 1577848 - DNA, 15 bp, Homo sapiens
aattctggaactccc

SEQ ID NO: 1577849 - DNA, 15 bp, Homo sapiens
aaattctggaactcc

SEQ ID NO: 1577850 - DNA, 15 bp, Homo sapiens
gaaattctggaactc

SEQ ID NO: 1577851 - DNA, 15 bp, Homo sapiens
ggaaattctggaact

SEQ ID NO: 1577852 - DNA, 15 bp, Homo sapiens
tggaaattctggaac

SEQ ID NO: 1577853 - DNA, 15 bp, Homo sapiens
atggaaattctggaa

SEQ ID NO: 1577854 - DNA, 15 bp, Homo sapiens
catggaaattctgga

SEQ ID NO: 1577855 - DNA, 15 bp, Homo sapiens
acatggaaattctgg

SEQ ID NO: 1577856 - DNA, 15 bp, Homo sapiens
tacatggaaattctg

SEQ ID NO: 1577857 - DNA, 15 bp, Homo sapiens
gtacatggaaattct

SEQ ID NO: 1577858 - DNA, 15 bp, Homo sapiens
tgtacatggaaattc

SEQ ID NO: 1577859 - DNA, 15 bp, Homo sapiens
ctgtacatggaaatt

SEQ ID NO: 1577860 - DNA, 15 bp, Homo sapiens
actgtacatggaaat

SEQ ID NO: 1577861 - DNA, 15 bp, Homo sapiens
cactgtacatggaaa

SEQ ID NO: 1577862 - DNA, 15 bp, Homo sapiens
tcactgtacatggaa

SEQ ID NO: 1577863 - DNA, 15 bp, Homo sapiens
ctcactgtacatgga

SEQ ID NO: 1577864 - DNA, 15 bp, Homo sapiens
cctcactgtacatgg

SEQ ID NO: 1577865 - DNA, 15 bp, Homo sapiens
tcctcactgtacatg

SEQ ID NO: 1577866 - DNA, 15 bp, Homo sapiens
atcctcactgtacat

SEQ ID NO: 1577867 - DNA, 15 bp, Homo sapiens
tatcctcactgtaca

SEQ ID NO: 1577868 - DNA, 15 bp, Homo sapiens
atatcctcactgtac

SEQ ID NO: 1577869 - DNA, 15 bp, Homo sapiens
catatcctcactgta

SEQ ID NO: 1577870 - DNA, 15 bp, Homo sapiens
ccatatcctcactgt

SEQ ID NO: 1577871 - DNA, 15 bp, Homo sapiens
gccatatcctcactg

SEQ ID NO: 1577872 - DNA, 15 bp, Homo sapiens
cgccatatcctcact

SEQ ID NO: 1577873 - DNA, 15 bp, Homo sapiens
tcgccatatcctcac

SEQ ID NO: 1577874 - DNA, 15 bp, Homo sapiens
atcgccatatcctca

SEQ ID NO: 1577875 - DNA, 15 bp, Homo sapiens
catcgccatatcctc

SEQ ID NO: 1577876 - DNA, 15 bp, Homo sapiens
ccatcgccatatcct

SEQ ID NO: 1577877 - DNA, 15 bp, Homo sapiens
tccatcgccatatcc

SEQ ID NO: 1577878 - DNA, 15 bp, Homo sapiens
ttccatcgccatatc

SEQ ID NO: 1577879 - DNA, 15 bp, Homo sapiens
tttccatcgccatat

SEQ ID NO: 1577880 - DNA, 15 bp, Homo sapiens
ttttccatcgccata

SEQ ID NO: 1577881 - DNA, 15 bp, Homo sapiens
gttttccatcgccat

SEQ ID NO: 1577882 - DNA, 15 bp, Homo sapiens
tgttttccatcgcca

SEQ ID NO: 1577883 - DNA, 15 bp, Homo sapiens
ttgttttccatcgcc

SEQ ID NO: 1577884 - DNA, 15 bp, Homo sapiens
attgttttccatcgc

SEQ ID NO: 1577885 - DNA, 15 bp, Homo sapiens
gattgttttccatcg

SEQ ID NO: 1577886 - DNA, 15 bp, Homo sapiens
agattgttttccatc

SEQ ID NO: 1577887 - DNA, 15 bp, Homo sapiens
aagattgttttccat

SEQ ID NO: 1577888 - DNA, 15 bp, Homo sapiens
caagattgttttcca

SEQ ID NO: 1577889 - DNA, 15 bp, Homo sapiens
acaagattgttttcc

SEQ ID NO: 1577890 - DNA, 15 bp, Homo sapiens
cacaagattgttttc

SEQ ID NO: 1577891 - DNA, 15 bp, Homo sapiens
acacaagattgtttt

SEQ ID NO: 1577892 - DNA, 15 bp, Homo sapiens
cacacaagattgttt

SEQ ID NO: 1577893 - DNA, 15 bp, Homo sapiens
gcacacaagattgtt

SEQ ID NO: 1577894 - DNA, 15 bp, Homo sapiens
ggcacacaagattgt

SEQ ID NO: 1577895 - DNA, 15 bp, Homo sapiens
tggcacacaagattg

SEQ ID NO: 1577896 - DNA, 15 bp, Homo sapiens
atggcacacaagatt

SEQ ID NO: 1577897 - DNA, 15 bp, Homo sapiens
aatggcacacaagat

SEQ ID NO: 1577898 - DNA, 15 bp, Homo sapiens
aaatggcacacaaga

SEQ ID NO: 1577899 - DNA, 15 bp, Homo sapiens
taaatggcacacaag

SEQ ID NO: 1577900 - DNA, 15 bp, Homo sapiens
ctaaatggcacacaa

SEQ ID NO: 1577901 - DNA, 15 bp, Homo sapiens
cctaaatggcacaca

SEQ ID NO: 1577902 - DNA, 15 bp, Homo sapiens
gcctaaatggcacac

SEQ ID NO: 1577903 - DNA, 15 bp, Homo sapiens
tgcctaaatggcaca

SEQ ID NO: 1577904 - DNA, 15 bp, Homo sapiens
ctgcctaaatggcac

SEQ ID NO: 1577905 - DNA, 15 bp, Homo sapiens
tctgcctaaatggca

SEQ ID NO: 1577906 - DNA, 15 bp, Homo sapiens
atctgcctaaatggc

SEQ ID NO: 1577907 - DNA, 15 bp, Homo sapiens
catctgcctaaatgg

SEQ ID NO: 1577908 - DNA, 15 bp, Homo sapiens
ccatctgcctaaatg

SEQ ID NO: 1577909 - DNA, 15 bp, Homo sapiens
cccatctgcctaaat

SEQ ID NO: 1577910 - DNA, 15 bp, Homo sapiens
tcccatctgcctaaa

SEQ ID NO: 1577911 - DNA, 15 bp, Homo sapiens
ttcccatctgcctaa

SEQ ID NO: 1577912 - DNA, 15 bp, Homo sapiens
cttcccatctgccta

SEQ ID NO: 1577913 - DNA, 15 bp, Homo sapiens
gcttcccatctgcct

SEQ ID NO: 1577914 - DNA, 15 bp, Homo sapiens
tgcttcccatctgcc

SEQ ID NO: 1577915 - DNA, 15 bp, Homo sapiens
ctgcttcccatctgc

SEQ ID NO: 1577916 - DNA, 15 bp, Homo sapiens
cctgcttcccatctg

SEQ ID NO: 1577917 - DNA, 15 bp, Homo sapiens
ccctgcttcccatct

SEQ ID NO: 1577918 - DNA, 15 bp, Homo sapiens
gccctgcttcccatc

SEQ ID NO: 1577919 - DNA, 15 bp, Homo sapiens
agccctgcttcccat

SEQ ID NO: 1577920 - DNA, 15 bp, Homo sapiens
tagccctgcttccca

SEQ ID NO: 1577921 - DNA, 15 bp, Homo sapiens
atagccctgcttccc

SEQ ID NO: 1577922 - DNA, 15 bp, Homo sapiens
tatagccctgcttcc

SEQ ID NO: 1577923 - DNA, 15 bp, Homo sapiens
ttatagccctgcttc

SEQ ID NO: 1577924 - DNA, 15 bp, Homo sapiens
tttatagccctgctt

SEQ ID NO: 1577925 - DNA, 15 bp, Homo sapiens
ttttatagccctgct

SEQ ID NO: 1577926 - DNA, 15 bp, Homo sapiens
gttttatagccctgc

SEQ ID NO: 1577927 - DNA, 15 bp, Homo sapiens
agttttatagccctg

SEQ ID NO: 1577928 - DNA, 15 bp, Homo sapiens
aagttttatagccct

SEQ ID NO: 1577929 - DNA, 15 bp, Homo sapiens
gaagttttatagccc

SEQ ID NO: 1577930 - DNA, 15 bp, Homo sapiens
tgaagttttatagcc

SEQ ID NO: 1577931 - DNA, 15 bp, Homo sapiens
gtgaagttttatagc

SEQ ID NO: 1577932 - DNA, 15 bp, Homo sapiens
agtgaagttttatag

SEQ ID NO: 1577933 - DNA, 15 bp, Homo sapiens
aagtgaagttttata

SEQ ID NO: 1577934 - DNA, 15 bp, Homo sapiens
taagtgaagttttat

SEQ ID NO: 1577935 - DNA, 15 bp, Homo sapiens
gtaagtgaagtttta

SEQ ID NO: 1577936 - DNA, 15 bp, Homo sapiens
tgtaagtgaagtttt

SEQ ID NO: 1577937 - DNA, 15 bp, Homo sapiens
gtgtaagtgaagttt

SEQ ID NO: 1577938 - DNA, 15 bp, Homo sapiens
tgtgtaagtgaagtt

SEQ ID NO: 1577939 - DNA, 15 bp, Homo sapiens
ttgtgtaagtgaagt

SEQ ID NO: 1577940 - DNA, 15 bp, Homo sapiens
gttgtgtaagtgaag

SEQ ID NO: 1577941 - DNA, 15 bp, Homo sapiens
ggttgtgtaagtgaa

SEQ ID NO: 1577942 - DNA, 15 bp, Homo sapiens
aggttgtgtaagtga

SEQ ID NO: 1577943 - DNA, 15 bp, Homo sapiens
taggttgtgtaagtg

SEQ ID NO: 1577944 - DNA, 15 bp, Homo sapiens
gtaggttgtgtaagt

SEQ ID NO: 1577945 - DNA, 15 bp, Homo sapiens
agtaggttgtgtaag

SEQ ID NO: 1577946 - DNA, 15 bp, Homo sapiens
tagtaggttgtgtaa

SEQ ID NO: 1577947 - DNA, 15 bp, Homo sapiens
ttagtaggttgtgta

SEQ ID NO: 1577948 - DNA, 15 bp, Homo sapiens
tttagtaggttgtgt

SEQ ID NO: 1577949 - DNA, 15 bp, Homo sapiens
ttttagtaggttgtg

SEQ ID NO: 1577950 - DNA, 15 bp, Homo sapiens
tttttagtaggttgt

SEQ ID NO: 1577951 - DNA, 15 bp, Homo sapiens
atttttagtaggttg

SEQ ID NO: 1577952 - DNA, 15 bp, Homo sapiens
aatttttagtaggtt

SEQ ID NO: 1577953 - DNA, 15 bp, Homo sapiens
taatttttagtaggt

SEQ ID NO: 1577954 - DNA, 15 bp, Homo sapiens
ttaatttttagtagg

SEQ ID NO: 1577955 - DNA, 15 bp, Homo sapiens
attaatttttagtag

SEQ ID NO: 1577956 - DNA, 15 bp, Homo sapiens
aattaatttttagta

SEQ ID NO: 1577957 - DNA, 15 bp, Homo sapiens
aaattaatttttagt

SEQ ID NO: 1577958 - DNA, 15 bp, Homo sapiens
aaaattaatttttag

SEQ ID NO: 1577959 - DNA, 15 bp, Homo sapiens
gaaaattaattttta

SEQ ID NO: 1577960 - DNA, 15 bp, Homo sapiens
ggaaaattaattttt

SEQ ID NO: 1577961 - DNA, 15 bp, Homo sapiens
tggaaaattaatttt

SEQ ID NO: 1577962 - DNA, 15 bp, Homo sapiens
atggaaaattaattt

SEQ ID NO: 1577963 - DNA, 15 bp, Homo sapiens
tatggaaaattaatt

SEQ ID NO: 1577964 - DNA, 15 bp, Homo sapiens
atatggaaaattaat

SEQ ID NO: 1577965 - DNA, 15 bp, Homo sapiens
gatatggaaaattaa

SEQ ID NO: 1577966 - DNA, 15 bp, Homo sapiens
tgatatggaaaatta

SEQ ID NO: 1577967 - DNA, 15 bp, Homo sapiens
ctgatatggaaaatt

SEQ ID NO: 1577968 - DNA, 15 bp, Homo sapiens
tctgatatggaaaat

SEQ ID NO: 1577969 - DNA, 15 bp, Homo sapiens
ctctgatatggaaaa

SEQ ID NO: 1577970 - DNA, 15 bp, Homo sapiens
tctctgatatggaaa

SEQ ID NO: 1577971 - DNA, 15 bp, Homo sapiens
atctctgatatggaa

SEQ ID NO: 1577972 - DNA, 15 bp, Homo sapiens
aatctctgatatgga

SEQ ID NO: 1577973 - DNA, 15 bp, Homo sapiens
taatctctgatatgg

SEQ ID NO: 1577974 - DNA, 15 bp, Homo sapiens
ctaatctctgatatg

SEQ ID NO: 1577975 - DNA, 15 bp, Homo sapiens
tctaatctctgatat

SEQ ID NO: 1577976 - DNA, 15 bp, Homo sapiens
ctctaatctctgata

SEQ ID NO: 1577977 - DNA, 15 bp, Homo sapiens
tctctaatctctgat

SEQ ID NO: 1577978 - DNA, 15 bp, Homo sapiens
ctctctaatctctga

SEQ ID NO: 1577979 - DNA, 15 bp, Homo sapiens
tctctctaatctctg

SEQ ID NO: 1577980 - DNA, 15 bp, Homo sapiens
ctctctctaatctct

SEQ ID NO: 1577981 - DNA, 15 bp, Homo sapiens
actctctctaatctc

SEQ ID NO: 1577982 - DNA, 15 bp, Homo sapiens
aactctctctaatct

SEQ ID NO: 1577983 - DNA, 15 bp, Homo sapiens
aaactctctctaatc

SEQ ID NO: 1577984 - DNA, 15 bp, Homo sapiens
caaactctctctaat

SEQ ID NO: 1577985 - DNA, 15 bp, Homo sapiens
acaaactctctctaa

SEQ ID NO: 1577986 - DNA, 15 bp, Homo sapiens
cacaaactctctcta

SEQ ID NO: 1577987 - DNA, 15 bp, Homo sapiens
tcacaaactctctct

SEQ ID NO: 1577988 - DNA, 15 bp, Homo sapiens
ttcacaaactctctc

SEQ ID NO: 1577989 - DNA, 15 bp, Homo sapiens
cttcacaaactctct

SEQ ID NO: 1577990 - DNA, 15 bp, Homo sapiens
tcttcacaaactctc

SEQ ID NO: 1577991 - DNA, 15 bp, Homo sapiens
gtcttcacaaactct

SEQ ID NO: 1577992 - DNA, 15 bp, Homo sapiens
agtcttcacaaactc

SEQ ID NO: 1577993 - DNA, 15 bp, Homo sapiens
cagtcttcacaaact

SEQ ID NO: 1577994 - DNA, 15 bp, Homo sapiens
acagtcttcacaaac

SEQ ID NO: 1577995 - DNA, 15 bp, Homo sapiens
aacagtcttcacaaa

SEQ ID NO: 1577996 - DNA, 15 bp, Homo sapiens
caacagtcttcacaa

SEQ ID NO: 1577997 - DNA, 15 bp, Homo sapiens
tcaacagtcttcaca

SEQ ID NO: 1577998 - DNA, 15 bp, Homo sapiens
ctcaacagtcttcac

SEQ ID NO: 1577999 - DNA, 15 bp, Homo sapiens
cctcaacagtcttca

SEQ ID NO: 1578000 - DNA, 15 bp, Homo sapiens
acctcaacagtcttc

SEQ ID NO: 1578001 - DNA, 15 bp, Homo sapiens
tacctcaacagtctt

SEQ ID NO: 1578002 - DNA, 15 bp, Homo sapiens
ctacctcaacagtct

SEQ ID NO: 1578003 - DNA, 15 bp, Homo sapiens
tctacctcaacagtc

SEQ ID NO: 1578004 - DNA, 15 bp, Homo sapiens
ctctacctcaacagt

SEQ ID NO: 1578005 - DNA, 15 bp, Homo sapiens
cctctacctcaacag

SEQ ID NO: 1578006 - DNA, 15 bp, Homo sapiens
acctctacctcaaca

SEQ ID NO: 1578007 - DNA, 15 bp, Homo sapiens
cacctctacctcaac

SEQ ID NO: 1578008 - DNA, 15 bp, Homo sapiens
tcacctctacctcaa

SEQ ID NO: 1578009 - DNA, 15 bp, Homo sapiens
ttcacctctacctca

SEQ ID NO: 1578010 - DNA, 15 bp, Homo sapiens
cttcacctctacctc

SEQ ID NO: 1578011 - DNA, 15 bp, Homo sapiens
gcttcacctctacct

SEQ ID NO: 1578012 - DNA, 15 bp, Homo sapiens
ggcttcacctctacc

SEQ ID NO: 1578013 - DNA, 15 bp, Homo sapiens
gggcttcacctctac

SEQ ID NO: 1578014 - DNA, 15 bp, Homo sapiens
agggcttcacctcta

SEQ ID NO: 1578015 - DNA, 15 bp, Homo sapiens
gagggcttcacctct

SEQ ID NO: 1578016 - DNA, 15 bp, Homo sapiens
ggagggcttcacctc

SEQ ID NO: 1578017 - DNA, 15 bp, Homo sapiens
gggagggcttcacct

SEQ ID NO: 1578018 - DNA, 15 bp, Homo sapiens
tgggagggcttcacc

SEQ ID NO: 1578019 - DNA, 15 bp, Homo sapiens
ctgggagggcttcac

SEQ ID NO: 1578020 - DNA, 15 bp, Homo sapiens
actgggagggcttca

SEQ ID NO: 1578021 - DNA, 15 bp, Homo sapiens
cactgggagggcttc

SEQ ID NO: 1578022 - DNA, 15 bp, Homo sapiens
gcactgggagggctt

SEQ ID NO: 1578023 - DNA, 15 bp, Homo sapiens
agcactgggagggct

SEQ ID NO: 1578024 - DNA, 15 bp, Homo sapiens
gagcactgggagggc

SEQ ID NO: 1578025 - DNA, 15 bp, Homo sapiens
ggagcactgggaggg

SEQ ID NO: 1578026 - DNA, 15 bp, Homo sapiens
tggagcactgggagg

SEQ ID NO: 1578027 - DNA, 15 bp, Homo sapiens
gtggagcactgggag

SEQ ID NO: 1578028 - DNA, 15 bp, Homo sapiens
tgtggagcactggga

SEQ ID NO: 1578029 - DNA, 15 bp, Homo sapiens
gtgtggagcactggg

SEQ ID NO: 1578030 - DNA, 15 bp, Homo sapiens
agtgtggagcactgg

SEQ ID NO: 1578031 - DNA, 15 bp, Homo sapiens
aagtgtggagcactg

SEQ ID NO: 1578032 - DNA, 15 bp, Homo sapiens
aaagtgtggagcact

SEQ ID NO: 1578033 - DNA, 15 bp, Homo sapiens
aaaagtgtggagcac

SEQ ID NO: 1578034 - DNA, 15 bp, Homo sapiens
caaaagtgtggagca

SEQ ID NO: 1578035 - DNA, 15 bp, Homo sapiens
acaaaagtgtggagc

SEQ ID NO: 1578036 - DNA, 15 bp, Homo sapiens
cacaaaagtgtggag

SEQ ID NO: 1578037 - DNA, 15 bp, Homo sapiens
gcacaaaagtgtgga

SEQ ID NO: 1578038 - DNA, 15 bp, Homo sapiens
agcacaaaagtgtgg

SEQ ID NO: 1578039 - DNA, 15 bp, Homo sapiens
cagcacaaaagtgtg

SEQ ID NO: 1578040 - DNA, 15 bp, Homo sapiens
acagcacaaaagtgt

SEQ ID NO: 1578041 - DNA, 15 bp, Homo sapiens
gacagcacaaaagtg

SEQ ID NO: 1578042 - DNA, 15 bp, Homo sapiens
ggacagcacaaaagt

SEQ ID NO: 1578043 - DNA, 15 bp, Homo sapiens
gggacagcacaaaag

SEQ ID NO: 1578044 - DNA, 15 bp, Homo sapiens
agggacagcacaaaa

SEQ ID NO: 1578045 - DNA, 15 bp, Homo sapiens
cagggacagcacaaa

SEQ ID NO: 1578046 - DNA, 15 bp, Homo sapiens
ccagggacagcacaa

SEQ ID NO: 1578047 - DNA, 15 bp, Homo sapiens
tccagggacagcaca

SEQ ID NO: 1578048 - DNA, 15 bp, Homo sapiens
ttccagggacagcac

SEQ ID NO: 1578049 - DNA, 15 bp, Homo sapiens
tttccagggacagca

SEQ ID NO: 1578050 - DNA, 15 bp, Homo sapiens
gtttccagggacagc

SEQ ID NO: 1578051 - DNA, 15 bp, Homo sapiens
tgtttccagggacag

SEQ ID NO: 1578052 - DNA, 15 bp, Homo sapiens
ttgtttccagggaca

SEQ ID NO: 1578053 - DNA, 15 bp, Homo sapiens
attgtttccagggac

SEQ ID NO: 1578054 - DNA, 15 bp, Homo sapiens
aattgtttccaggga

SEQ ID NO: 1578055 - DNA, 15 bp, Homo sapiens
aaattgtttccaggg

SEQ ID NO: 1578056 - DNA, 15 bp, Homo sapiens
gaaattgtttccagg

SEQ ID NO: 1578057 - DNA, 15 bp, Homo sapiens
tgaaattgtttccag

SEQ ID NO: 1578058 - DNA, 15 bp, Homo sapiens
ctgaaattgtttcca

SEQ ID NO: 1578059 - DNA, 15 bp, Homo sapiens
gctgaaattgtttcc

SEQ ID NO: 1578060 - DNA, 15 bp, Homo sapiens
ggctgaaattgtttc

SEQ ID NO: 1578061 - DNA, 15 bp, Homo sapiens
tggctgaaattgttt

SEQ ID NO: 1578062 - DNA, 15 bp, Homo sapiens
ctggctgaaattgtt

SEQ ID NO: 1578063 - DNA, 15 bp, Homo sapiens
tctggctgaaattgt

SEQ ID NO: 1578064 - DNA, 15 bp, Homo sapiens
ttctggctgaaattg

SEQ ID NO: 1578065 - DNA, 15 bp, Homo sapiens
tttctggctgaaatt

SEQ ID NO: 1578066 - DNA, 15 bp, Homo sapiens
ttttctggctgaaat

SEQ ID NO: 1578067 - DNA, 15 bp, Homo sapiens
gttttctggctgaaa

SEQ ID NO: 1578068 - DNA, 15 bp, Homo sapiens
tgttttctggctgaa

SEQ ID NO: 1578069 - DNA, 15 bp, Homo sapiens
gtgttttctggctga

SEQ ID NO: 1578070 - DNA, 15 bp, Homo sapiens
agtgttttctggctg

SEQ ID NO: 1578071 - DNA, 15 bp, Homo sapiens
cagtgttttctggct

SEQ ID NO: 1578072 - DNA, 15 bp, Homo sapiens
ccagtgttttctggc

SEQ ID NO: 1578073 - DNA, 15 bp, Homo sapiens
cccagtgttttctgg

SEQ ID NO: 1578074 - DNA, 15 bp, Homo sapiens
tcccagtgttttctg

SEQ ID NO: 1578075 - DNA, 15 bp, Homo sapiens
gtcccagtgttttct

SEQ ID NO: 1578076 - DNA, 15 bp, Homo sapiens
tgtcccagtgttttc

SEQ ID NO: 1578077 - DNA, 15 bp, Homo sapiens
ttgtcccagtgtttt

SEQ ID NO: 1578078 - DNA, 15 bp, Homo sapiens
gttgtcccagtgttt

SEQ ID NO: 1578079 - DNA, 15 bp, Homo sapiens
tgttgtcccagtgtt

SEQ ID NO: 1578080 - DNA, 15 bp, Homo sapiens
atgttgtcccagtgt

SEQ ID NO: 1578081 - DNA, 15 bp, Homo sapiens
gatgttgtcccagtg

SEQ ID NO: 1578082 - DNA, 15 bp, Homo sapiens
agatgttgtcccagt

SEQ ID NO: 1578083 - DNA, 15 bp, Homo sapiens
aagatgttgtcccag

SEQ ID NO: 1578084 - DNA, 15 bp, Homo sapiens
gaagatgttgtccca

SEQ ID NO: 1578085 - DNA, 15 bp, Homo sapiens
tgaagatgttgtccc

SEQ ID NO: 1578086 - DNA, 15 bp, Homo sapiens
ttgaagatgttgtcc

SEQ ID NO: 1578087 - DNA, 15 bp, Homo sapiens
tttgaagatgttgtc

SEQ ID NO: 1578088 - DNA, 15 bp, Homo sapiens
ctttgaagatgttgt

SEQ ID NO: 1578089 - DNA, 15 bp, Homo sapiens
actttgaagatgttg

SEQ ID NO: 1578090 - DNA, 15 bp, Homo sapiens
cactttgaagatgtt

SEQ ID NO: 1578091 - DNA, 15 bp, Homo sapiens
gcactttgaagatgt

SEQ ID NO: 1578092 - DNA, 15 bp, Homo sapiens
agcactttgaagatg

SEQ ID NO: 1578093 - DNA, 15 bp, Homo sapiens
cagcactttgaagat

SEQ ID NO: 1578094 - DNA, 15 bp, Homo sapiens
ccagcactttgaaga

SEQ ID NO: 1578095 - DNA, 15 bp, Homo sapiens
cccagcactttgaag

SEQ ID NO: 1578096 - DNA, 15 bp, Homo sapiens
ccccagcactttgaa

SEQ ID NO: 1578097 - DNA, 15 bp, Homo sapiens
cccccagcactttga

SEQ ID NO: 1578098 - DNA, 15 bp, Homo sapiens
acccccagcactttg

SEQ ID NO: 1578099 - DNA, 15 bp, Homo sapiens
tacccccagcacttt

SEQ ID NO: 1578100 - DNA, 15 bp, Homo sapiens
ctacccccagcactt

SEQ ID NO: 1578101 - DNA, 15 bp, Homo sapiens
tctacccccagcact

SEQ ID NO: 1578102 - DNA, 15 bp, Homo sapiens
ttctacccccagcac

SEQ ID NO: 1578103 - DNA, 15 bp, Homo sapiens
tttctacccccagca

SEQ ID NO: 1578104 - DNA, 15 bp, Homo sapiens
ttttctacccccagc

SEQ ID NO: 1578105 - DNA, 15 bp, Homo sapiens
gttttctacccccag

SEQ ID NO: 1578106 - DNA, 15 bp, Homo sapiens
ggttttctaccccca

SEQ ID NO: 1578107 - DNA, 15 bp, Homo sapiens
gggttttctaccccc

SEQ ID NO: 1578108 - DNA, 15 bp, Homo sapiens
tgggttttctacccc

SEQ ID NO: 1578109 - DNA, 15 bp, Homo sapiens
ctgggttttctaccc

SEQ ID NO: 1578110 - DNA, 15 bp, Homo sapiens
tctgggttttctacc

SEQ ID NO: 1578111 - DNA, 15 bp, Homo sapiens
ttctgggttttctac

SEQ ID NO: 1578112 - DNA, 15 bp, Homo sapiens
tttctgggttttcta

SEQ ID NO: 1578113 - DNA, 15 bp, Homo sapiens
gtttctgggttttct

SEQ ID NO: 1578114 - DNA, 15 bp, Homo sapiens
tgtttctgggttttc

SEQ ID NO: 1578115 - DNA, 15 bp, Homo sapiens
atgtttctgggtttt

SEQ ID NO: 1578116 - DNA, 15 bp, Homo sapiens
aatgtttctgggttt

SEQ ID NO: 1578117 - DNA, 15 bp, Homo sapiens
caatgtttctgggtt

SEQ ID NO: 1578118 - DNA, 15 bp, Homo sapiens
acaatgtttctgggt

SEQ ID NO: 1578119 - DNA, 15 bp, Homo sapiens
cacaatgtttctggg

SEQ ID NO: 1578120 - DNA, 15 bp, Homo sapiens
tcacaatgtttctgg

SEQ ID NO: 1578121 - DNA, 15 bp, Homo sapiens
ttcacaatgtttctg

SEQ ID NO: 1578122 - DNA, 15 bp, Homo sapiens
gttcacaatgtttct

SEQ ID NO: 1578123 - DNA, 15 bp, Homo sapiens
ggttcacaatgtttc

SEQ ID NO: 1578124 - DNA, 15 bp, Homo sapiens
aggttcacaatgttt

SEQ ID NO: 1578125 - DNA, 15 bp, Homo sapiens
taggttcacaatgtt

SEQ ID NO: 1578126 - DNA, 15 bp, Homo sapiens
ataggttcacaatgt

SEQ ID NO: 1578127 - DNA, 15 bp, Homo sapiens
tataggttcacaatg

SEQ ID NO: 1578128 - DNA, 15 bp, Homo sapiens
ttataggttcacaat

SEQ ID NO: 1578129 - DNA, 15 bp, Homo sapiens
attataggttcacaa

SEQ ID NO: 1578130 - DNA, 15 bp, Homo sapiens
aattataggttcaca

SEQ ID NO: 1578131 - DNA, 15 bp, Homo sapiens
gaattataggttcac

SEQ ID NO: 1578132 - DNA, 15 bp, Homo sapiens
agaattataggttca

SEQ ID NO: 1578133 - DNA, 15 bp, Homo sapiens
tagaattataggttc

SEQ ID NO: 1578134 - DNA, 15 bp, Homo sapiens
atagaattataggtt

SEQ ID NO: 1578135 - DNA, 15 bp, Homo sapiens
tatagaattataggt

SEQ ID NO: 1578136 - DNA, 15 bp, Homo sapiens
gtatagaattatagg

SEQ ID NO: 1578137 - DNA, 15 bp, Homo sapiens
ggtatagaattatag

SEQ ID NO: 1578138 - DNA, 15 bp, Homo sapiens
aggtatagaattata

SEQ ID NO: 1578139 - DNA, 15 bp, Homo sapiens
taggtatagaattat

SEQ ID NO: 1578140 - DNA, 15 bp, Homo sapiens
ttaggtatagaatta

SEQ ID NO: 1578141 - DNA, 15 bp, Homo sapiens
attaggtatagaatt

SEQ ID NO: 1578142 - DNA, 15 bp, Homo sapiens
cattaggtatagaat

SEQ ID NO: 1578143 - DNA, 15 bp, Homo sapiens
tcattaggtatagaa

SEQ ID NO: 1578144 - DNA, 15 bp, Homo sapiens
ttcattaggtataga

SEQ ID NO: 1578145 - DNA, 15 bp, Homo sapiens
tttcattaggtatag

SEQ ID NO: 1578146 - DNA, 15 bp, Homo sapiens
ttttcattaggtata

SEQ ID NO: 1578147 - DNA, 15 bp, Homo sapiens
attttcattaggtat

SEQ ID NO: 1578148 - DNA, 15 bp, Homo sapiens
tattttcattaggta

SEQ ID NO: 1578149 - DNA, 15 bp, Homo sapiens
atattttcattaggt

SEQ ID NO: 1578150 - DNA, 15 bp, Homo sapiens
gatattttcattagg

SEQ ID NO: 1578151 - DNA, 15 bp, Homo sapiens
agatattttcattag

SEQ ID NO: 1578152 - DNA, 15 bp, Homo sapiens
aagatattttcatta

SEQ ID NO: 1578153 - DNA, 15 bp, Homo sapiens
aaagatattttcatt

SEQ ID NO: 1578154 - DNA, 15 bp, Homo sapiens
caaagatattttcat

SEQ ID NO: 1578155 - DNA, 15 bp, Homo sapiens
gcaaagatattttca

SEQ ID NO: 1578156 - DNA, 15 bp, Homo sapiens
tgcaaagatattttc

SEQ ID NO: 1578157 - DNA, 15 bp, Homo sapiens
ttgcaaagatatttt

SEQ ID NO: 1578158 - DNA, 15 bp, Homo sapiens
tttgcaaagatattt

SEQ ID NO: 1578159 - DNA, 15 bp, Homo sapiens
ttttgcaaagatatt

SEQ ID NO: 1578160 - DNA, 15 bp, Homo sapiens
attttgcaaagatat

SEQ ID NO: 1578161 - DNA, 15 bp, Homo sapiens
cattttgcaaagata

SEQ ID NO: 1578162 - DNA, 15 bp, Homo sapiens
tcattttgcaaagat

SEQ ID NO: 1578163 - DNA, 15 bp, Homo sapiens
ctcattttgcaaaga

SEQ ID NO: 1578164 - DNA, 15 bp, Homo sapiens
cctcattttgcaaag

SEQ ID NO: 1578165 - DNA, 15 bp, Homo sapiens
tcctcattttgcaaa

SEQ ID NO: 1578166 - DNA, 15 bp, Homo sapiens
atcctcattttgcaa

SEQ ID NO: 1578167 - DNA, 15 bp, Homo sapiens
catcctcattttgca

SEQ ID NO: 1578168 - DNA, 15 bp, Homo sapiens
tcatcctcattttgc

SEQ ID NO: 1578169 - DNA, 15 bp, Homo sapiens
ttcatcctcattttg

SEQ ID NO: 1578170 - DNA, 15 bp, Homo sapiens
tttcatcctcatttt

SEQ ID NO: 1578171 - DNA, 15 bp, Homo sapiens
atttcatcctcattt

SEQ ID NO: 1578172 - DNA, 15 bp, Homo sapiens
tatttcatcctcatt

SEQ ID NO: 1578173 - DNA, 15 bp, Homo sapiens
ttatttcatcctcat

SEQ ID NO: 1578174 - DNA, 15 bp, Homo sapiens
tttatttcatcctca

SEQ ID NO: 1578175 - DNA, 15 bp, Homo sapiens
ctttatttcatcctc

SEQ ID NO: 1578176 - DNA, 15 bp, Homo sapiens
tctttatttcatcct

SEQ ID NO: 1578177 - DNA, 15 bp, Homo sapiens
gtctttatttcatcc

SEQ ID NO: 1578178 - DNA, 15 bp, Homo sapiens
tgtctttatttcatc

SEQ ID NO: 1578179 - DNA, 15 bp, Homo sapiens
ctgtctttatttcat

SEQ ID NO: 1578180 - DNA, 15 bp, Homo sapiens
cctgtctttatttca

SEQ ID NO: 1578181 - DNA, 15 bp, Homo sapiens
gcctgtctttatttc

SEQ ID NO: 1578182 - DNA, 15 bp, Homo sapiens
tgcctgtctttattt

SEQ ID NO: 1578183 - DNA, 15 bp, Homo sapiens
ttgcctgtctttatt

SEQ ID NO: 1578184 - DNA, 15 bp, Homo sapiens
tttgcctgtctttat

SEQ ID NO: 1578185 - DNA, 15 bp, Homo sapiens
ctttgcctgtcttta

SEQ ID NO: 1578186 - DNA, 15 bp, Homo sapiens
gctttgcctgtcttt

SEQ ID NO: 1578187 - DNA, 15 bp, Homo sapiens
agctttgcctgtctt

SEQ ID NO: 1578188 - DNA, 15 bp, Homo sapiens
cagctttgcctgtct

SEQ ID NO: 1578189 - DNA, 15 bp, Homo sapiens
tcagctttgcctgtc

SEQ ID NO: 1578190 - DNA, 15 bp, Homo sapiens
ttcagctttgcctgt

SEQ ID NO: 1578191 - DNA, 15 bp, Homo sapiens
tttcagctttgcctg

SEQ ID NO: 1578192 - DNA, 15 bp, Homo sapiens
ctttcagctttgcct

SEQ ID NO: 1578193 - DNA, 15 bp, Homo sapiens
tctttcagctttgcc

SEQ ID NO: 1578194 - DNA, 15 bp, Homo sapiens
ttctttcagctttgc

SEQ ID NO: 1578195 - DNA, 15 bp, Homo sapiens
attctttcagctttg

SEQ ID NO: 1578196 - DNA, 15 bp, Homo sapiens
aattctttcagcttt

SEQ ID NO: 1578197 - DNA, 15 bp, Homo sapiens
taattctttcagctt

SEQ ID NO: 1578198 - DNA, 15 bp, Homo sapiens
ttaattctttcagct

SEQ ID NO: 1578199 - DNA, 15 bp, Homo sapiens
attaattctttcagc

SEQ ID NO: 1578200 - DNA, 15 bp, Homo sapiens
gattaattctttcag

SEQ ID NO: 1578201 - DNA, 15 bp, Homo sapiens
tgattaattctttca

SEQ ID NO: 1578202 - DNA, 15 bp, Homo sapiens
ttgattaattctttc

SEQ ID NO: 1578203 - DNA, 15 bp, Homo sapiens
gttgattaattcttt

SEQ ID NO: 1578204 - DNA, 15 bp, Homo sapiens
tgttgattaattctt

SEQ ID NO: 1578205 - DNA, 15 bp, Homo sapiens
atgttgattaattct

SEQ ID NO: 1578206 - DNA, 15 bp, Homo sapiens
gatgttgattaattc

SEQ ID NO: 1578207 - DNA, 15 bp, Homo sapiens
tgatgttgattaatt

SEQ ID NO: 1578208 - DNA, 15 bp, Homo sapiens
gtgatgttgattaat

SEQ ID NO: 1578209 - DNA, 15 bp, Homo sapiens
tgtgatgttgattaa

SEQ ID NO: 1578210 - DNA, 15 bp, Homo sapiens
gtgtgatgttgatta

SEQ ID NO: 1578211 - DNA, 15 bp, Homo sapiens
ggtgtgatgttgatt

SEQ ID NO: 1578212 - DNA, 15 bp, Homo sapiens
tggtgtgatgttgat

SEQ ID NO: 1578213 - DNA, 15 bp, Homo sapiens
ctggtgtgatgttga

SEQ ID NO: 1578214 - DNA, 15 bp, Homo sapiens
actggtgtgatgttg

SEQ ID NO: 1578215 - DNA, 15 bp, Homo sapiens
tactggtgtgatgtt

SEQ ID NO: 1578216 - DNA, 15 bp, Homo sapiens
gtactggtgtgatgt

SEQ ID NO: 1578217 - DNA, 15 bp, Homo sapiens
agtactggtgtgatg

SEQ ID NO: 1578218 - DNA, 15 bp, Homo sapiens
tagtactggtgtgat

SEQ ID NO: 1578219 - DNA, 15 bp, Homo sapiens
atagtactggtgtga

SEQ ID NO: 1578220 - DNA, 15 bp, Homo sapiens
tatagtactggtgtg

SEQ ID NO: 1578221 - DNA, 15 bp, Homo sapiens
ttatagtactggtgt

SEQ ID NO: 1578222 - DNA, 15 bp, Homo sapiens
cttatagtactggtg

SEQ ID NO: 1578223 - DNA, 15 bp, Homo sapiens
tcttatagtactggt

SEQ ID NO: 1578224 - DNA, 15 bp, Homo sapiens
ttcttatagtactgg

SEQ ID NO: 1578225 - DNA, 15 bp, Homo sapiens
tttcttatagtactg

SEQ ID NO: 1578226 - DNA, 15 bp, Homo sapiens
atttcttatagtact

SEQ ID NO: 1578227 - DNA, 15 bp, Homo sapiens
catttcttatagtac

SEQ ID NO: 1578228 - DNA, 15 bp, Homo sapiens
acatttcttatagta

SEQ ID NO: 1578229 - DNA, 15 bp, Homo sapiens
aacatttcttatagt

SEQ ID NO: 1578230 - DNA, 15 bp, Homo sapiens
caacatttcttatag

SEQ ID NO: 1578231 - DNA, 15 bp, Homo sapiens
tcaacatttcttata

SEQ ID NO: 1578232 - DNA, 15 bp, Homo sapiens
ttcaacatttcttat

SEQ ID NO: 1578233 - DNA, 15 bp, Homo sapiens
tttcaacatttctta

SEQ ID NO: 1578234 - DNA, 15 bp, Homo sapiens
ttttcaacatttctt

SEQ ID NO: 1578235 - DNA, 15 bp, Homo sapiens
cttttcaacatttct

SEQ ID NO: 1578236 - DNA, 15 bp, Homo sapiens
tcttttcaacatttc

SEQ ID NO: 1578237 - DNA, 15 bp, Homo sapiens
ttcttttcaacattt

SEQ ID NO: 1578238 - DNA, 15 bp, Homo sapiens
tttcttttcaacatt

SEQ ID NO: 1578239 - DNA, 15 bp, Homo sapiens
atttcttttcaacat

SEQ ID NO: 1578240 - DNA, 15 bp, Homo sapiens
aatttcttttcaaca

SEQ ID NO: 1578241 - DNA, 15 bp, Homo sapiens
gaatttcttttcaac

SEQ ID NO: 1578242 - DNA, 15 bp, Homo sapiens
agaatttcttttcaa

SEQ ID NO: 1578243 - DNA, 15 bp, Homo sapiens
aagaatttcttttca

SEQ ID NO: 1578244 - DNA, 15 bp, Homo sapiens
aaagaatttcttttc

SEQ ID NO: 1578245 - DNA, 15 bp, Homo sapiens
caaagaatttctttt

SEQ ID NO: 1578246 - DNA, 15 bp, Homo sapiens
acaaagaatttcttt

SEQ ID NO: 1578247 - DNA, 15 bp, Homo sapiens
tacaaagaatttctt

SEQ ID NO: 1578248 - DNA, 15 bp, Homo sapiens
ttacaaagaatttct

SEQ ID NO: 1578249 - DNA, 15 bp, Homo sapiens
cttacaaagaatttc

SEQ ID NO: 1578250 - DNA, 15 bp, Homo sapiens
tcttacaaagaattt

SEQ ID NO: 1578251 - DNA, 15 bp, Homo sapiens
ttcttacaaagaatt

SEQ ID NO: 1578252 - DNA, 15 bp, Homo sapiens
tttcttacaaagaat

SEQ ID NO: 1578253 - DNA, 15 bp, Homo sapiens
ttttcttacaaagaa

SEQ ID NO: 1578254 - DNA, 15 bp, Homo sapiens
attttcttacaaaga

SEQ ID NO: 1578255 - DNA, 15 bp, Homo sapiens
tattttcttacaaag

SEQ ID NO: 1578256 - DNA, 15 bp, Homo sapiens
ttattttcttacaaa

SEQ ID NO: 1578257 - DNA, 15 bp, Homo sapiens
attattttcttacaa

SEQ ID NO: 1578258 - DNA, 15 bp, Homo sapiens
tattattttcttaca

SEQ ID NO: 1578259 - DNA, 15 bp, Homo sapiens
gtattattttcttac

SEQ ID NO: 1578260 - DNA, 15 bp, Homo sapiens
agtattattttctta

SEQ ID NO: 1578261 - DNA, 15 bp, Homo sapiens
tagtattattttctt

SEQ ID NO: 1578262 - DNA, 15 bp, Homo sapiens
ctagtattattttct

SEQ ID NO: 1578263 - DNA, 15 bp, Homo sapiens
tctagtattattttc

SEQ ID NO: 1578264 - DNA, 15 bp, Homo sapiens
atctagtattatttt

SEQ ID NO: 1578265 - DNA, 15 bp, Homo sapiens
catctagtattattt

SEQ ID NO: 1578266 - DNA, 15 bp, Homo sapiens
ccatctagtattatt

SEQ ID NO: 1578267 - DNA, 15 bp, Homo sapiens
tccatctagtattat

SEQ ID NO: 1578268 - DNA, 15 bp, Homo sapiens
ttccatctagtatta

SEQ ID NO: 1578269 - DNA, 15 bp, Homo sapiens
tttccatctagtatt

SEQ ID NO: 1578270 - DNA, 15 bp, Homo sapiens
atttccatctagtat

SEQ ID NO: 1578271 - DNA, 15 bp, Homo sapiens
tatttccatctagta

SEQ ID NO: 1578272 - DNA, 15 bp, Homo sapiens
atatttccatctagt

SEQ ID NO: 1578273 - DNA, 15 bp, Homo sapiens
catatttccatctag

SEQ ID NO: 1578274 - DNA, 15 bp, Homo sapiens
tcatatttccatcta

SEQ ID NO: 1578275 - DNA, 15 bp, Homo sapiens
ttcatatttccatct

SEQ ID NO: 1578276 - DNA, 15 bp, Homo sapiens
gttcatatttccatc

SEQ ID NO: 1578277 - DNA, 15 bp, Homo sapiens
ggttcatatttccat

SEQ ID NO: 1578278 - DNA, 15 bp, Homo sapiens
aggttcatatttcca

SEQ ID NO: 1578279 - DNA, 15 bp, Homo sapiens
taggttcatatttcc

SEQ ID NO: 1578280 - DNA, 15 bp, Homo sapiens
gtaggttcatatttc

SEQ ID NO: 1578281 - DNA, 15 bp, Homo sapiens
tgtaggttcatattt

SEQ ID NO: 1578282 - DNA, 15 bp, Homo sapiens
gtgtaggttcatatt

SEQ ID NO: 1578283 - DNA, 15 bp, Homo sapiens
tgtgtaggttcatat

SEQ ID NO: 1578284 - DNA, 15 bp, Homo sapiens
ttgtgtaggttcata

SEQ ID NO: 1578285 - DNA, 15 bp, Homo sapiens
tttgtgtaggttcat

SEQ ID NO: 1578286 - DNA, 15 bp, Homo sapiens
ctttgtgtaggttca

SEQ ID NO: 1578287 - DNA, 15 bp, Homo sapiens
cctttgtgtaggttc

SEQ ID NO: 1578288 - DNA, 15 bp, Homo sapiens
tcctttgtgtaggtt

SEQ ID NO: 1578289 - DNA, 15 bp, Homo sapiens
ctcctttgtgtaggt

SEQ ID NO: 1578290 - DNA, 15 bp, Homo sapiens
actcctttgtgtagg

SEQ ID NO: 1578291 - DNA, 15 bp, Homo sapiens
cactcctttgtgtag

SEQ ID NO: 1578292 - DNA, 15 bp, Homo sapiens
tcactcctttgtgta

SEQ ID NO: 1578293 - DNA, 15 bp, Homo sapiens
ttcactcctttgtgt

SEQ ID NO: 1578294 - DNA, 15 bp, Homo sapiens
cttcactcctttgtg

SEQ ID NO: 1578295 - DNA, 15 bp, Homo sapiens
tcttcactcctttgt

SEQ ID NO: 1578296 - DNA, 15 bp, Homo sapiens
ctcttcactcctttg

SEQ ID NO: 1578297 - DNA, 15 bp, Homo sapiens
gctcttcactccttt

SEQ ID NO: 1578298 - DNA, 15 bp, Homo sapiens
tgctcttcactcctt

SEQ ID NO: 1578299 - DNA, 15 bp, Homo sapiens
gtgctcttcactcct

SEQ ID NO: 1578300 - DNA, 15 bp, Homo sapiens
ggtgctcttcactcc

SEQ ID NO: 1578301 - DNA, 15 bp, Homo sapiens
tggtgctcttcactc

SEQ ID NO: 1578302 - DNA, 15 bp, Homo sapiens
ctggtgctcttcact

SEQ ID NO: 1578303 - DNA, 15 bp, Homo sapiens
tctggtgctcttcac

SEQ ID NO: 1578304 - DNA, 15 bp, Homo sapiens
ttctggtgctcttca

SEQ ID NO: 1578305 - DNA, 15 bp, Homo sapiens
tttctggtgctcttc

SEQ ID NO: 1578306 - DNA, 15 bp, Homo sapiens
atttctggtgctctt

SEQ ID NO: 1578307 - DNA, 15 bp, Homo sapiens
tatttctggtgctct

SEQ ID NO: 1578308 - DNA, 15 bp, Homo sapiens
ctatttctggtgctc

SEQ ID NO: 1578309 - DNA, 15 bp, Homo sapiens
actatttctggtgct

SEQ ID NO: 1578310 - DNA, 15 bp, Homo sapiens
tactatttctggtgc

SEQ ID NO: 1578311 - DNA, 15 bp, Homo sapiens
ttactatttctggtg

SEQ ID NO: 1578312 - DNA, 15 bp, Homo sapiens
gttactatttctggt

SEQ ID NO: 1578313 - DNA, 15 bp, Homo sapiens
agttactatttctgg

SEQ ID NO: 1578314 - DNA, 15 bp, Homo sapiens
tagttactatttctg

SEQ ID NO: 1578315 - DNA, 15 bp, Homo sapiens
atagttactatttct

SEQ ID NO: 1578316 - DNA, 15 bp, Homo sapiens
catagttactatttc

SEQ ID NO: 1578317 - DNA, 15 bp, Homo sapiens
acatagttactattt

SEQ ID NO: 1578318 - DNA, 15 bp, Homo sapiens
cacatagttactatt

SEQ ID NO: 1578319 - DNA, 15 bp, Homo sapiens
acacatagttactat

SEQ ID NO: 1578320 - DNA, 15 bp, Homo sapiens
cacacatagttacta

SEQ ID NO: 1578321 - DNA, 15 bp, Homo sapiens
tcacacatagttact

SEQ ID NO: 1578322 - DNA, 15 bp, Homo sapiens
ttcacacatagttac

SEQ ID NO: 1578323 - DNA, 15 bp, Homo sapiens
tttcacacatagtta

SEQ ID NO: 1578324 - DNA, 15 bp, Homo sapiens
atttcacacatagtt

SEQ ID NO: 1578325 - DNA, 15 bp, Homo sapiens
tatttcacacatagt

SEQ ID NO: 1578326 - DNA, 15 bp, Homo sapiens
atatttcacacatag

SEQ ID NO: 1578327 - DNA, 15 bp, Homo sapiens
tatatttcacacata

SEQ ID NO: 1578328 - DNA, 15 bp, Homo sapiens
ttatatttcacacat

SEQ ID NO: 1578329 - DNA, 15 bp, Homo sapiens
tttatatttcacaca

SEQ ID NO: 1578330 - DNA, 15 bp, Homo sapiens
ttttatatttcacac

SEQ ID NO: 1578331 - DNA, 15 bp, Homo sapiens
cttttatatttcaca

SEQ ID NO: 1578332 - DNA, 15 bp, Homo sapiens
tcttttatatttcac

SEQ ID NO: 1578333 - DNA, 15 bp, Homo sapiens
ttcttttatatttca

SEQ ID NO: 1578334 - DNA, 15 bp, Homo sapiens
attcttttatatttc

SEQ ID NO: 1578335 - DNA, 15 bp, Homo sapiens
aattcttttatattt

SEQ ID NO: 1578336 - DNA, 15 bp, Homo sapiens
aaattcttttatatt

SEQ ID NO: 1578337 - DNA, 15 bp, Homo sapiens
aaaattcttttatat

SEQ ID NO: 1578338 - DNA, 15 bp, Homo sapiens
aaaaattcttttata

SEQ ID NO: 1578339 - DNA, 15 bp, Homo sapiens
aaaaaattcttttat

SEQ ID NO: 1578340 - DNA, 15 bp, Homo sapiens
aaaaaaattctttta

SEQ ID NO: 1578341 - DNA, 15 bp, Homo sapiens
aaaaaaaattctttt

SEQ ID NO: 1578342 - DNA, 15 bp, Homo sapiens
taaaaaaaattcttt

SEQ ID NO: 1578343 - DNA, 15 bp, Homo sapiens
gtaaaaaaaattctt

SEQ ID NO: 1578344 - DNA, 15 bp, Homo sapiens
agtaaaaaaaattct

SEQ ID NO: 1578345 - DNA, 15 bp, Homo sapiens
tagtaaaaaaaattc

SEQ ID NO: 1578346 - DNA, 15 bp, Homo sapiens
atagtaaaaaaaatt

SEQ ID NO: 1578347 - DNA, 15 bp, Homo sapiens
aatagtaaaaaaaat

SEQ ID NO: 1578348 - DNA, 15 bp, Homo sapiens
aaatagtaaaaaaaa

SEQ ID NO: 1578349 - DNA, 15 bp, Homo sapiens
taaatagtaaaaaaa

SEQ ID NO: 1578350 - DNA, 15 bp, Homo sapiens
gtaaatagtaaaaaa

SEQ ID NO: 1578351 - DNA, 15 bp, Homo sapiens
tgtaaatagtaaaaa

SEQ ID NO: 1578352 - DNA, 15 bp, Homo sapiens
atgtaaatagtaaaa

SEQ ID NO: 1578353 - DNA, 15 bp, Homo sapiens
gatgtaaatagtaaa

SEQ ID NO: 1578354 - DNA, 15 bp, Homo sapiens
agatgtaaatagtaa

SEQ ID NO: 1578355 - DNA, 15 bp, Homo sapiens
gagatgtaaatagta

SEQ ID NO: 1578356 - DNA, 15 bp, Homo sapiens
agagatgtaaatagt

SEQ ID NO: 1578357 - DNA, 15 bp, Homo sapiens
aagagatgtaaatag

SEQ ID NO: 1578358 - DNA, 15 bp, Homo sapiens
aaagagatgtaaata

SEQ ID NO: 1578359 - DNA, 15 bp, Homo sapiens
taaagagatgtaaat

SEQ ID NO: 1578360 - DNA, 15 bp, Homo sapiens
ttaaagagatgtaaa

SEQ ID NO: 1578361 - DNA, 15 bp, Homo sapiens
tttaaagagatgtaa

SEQ ID NO: 1578362 - DNA, 15 bp, Homo sapiens
ttttaaagagatgta

SEQ ID NO: 1578363 - DNA, 15 bp, Homo sapiens
cttttaaagagatgt

SEQ ID NO: 1578364 - DNA, 15 bp, Homo sapiens
tcttttaaagagatg

SEQ ID NO: 1578365 - DNA, 15 bp, Homo sapiens
atcttttaaagagat

SEQ ID NO: 1578366 - DNA, 15 bp, Homo sapiens
aatcttttaaagaga

SEQ ID NO: 1578367 - DNA, 15 bp, Homo sapiens
taatcttttaaagag

SEQ ID NO: 1578368 - DNA, 15 bp, Homo sapiens
gtaatcttttaaaga

SEQ ID NO: 1578369 - DNA, 15 bp, Homo sapiens
agtaatcttttaaag

SEQ ID NO: 1578370 - DNA, 15 bp, Homo sapiens
cagtaatcttttaaa

SEQ ID NO: 1578371 - DNA, 15 bp, Homo sapiens
tcagtaatcttttaa

SEQ ID NO: 1578372 - DNA, 15 bp, Homo sapiens
gtcagtaatctttta

SEQ ID NO: 1578373 - DNA, 15 bp, Homo sapiens
agtcagtaatctttt

SEQ ID NO: 1578374 - DNA, 15 bp, Homo sapiens
cagtcagtaatcttt

SEQ ID NO: 1578375 - DNA, 15 bp, Homo sapiens
acagtcagtaatctt

SEQ ID NO: 1578376 - DNA, 15 bp, Homo sapiens
cacagtcagtaatct

SEQ ID NO: 1578377 - DNA, 15 bp, Homo sapiens
acacagtcagtaatc

SEQ ID NO: 1578378 - DNA, 15 bp, Homo sapiens
tacacagtcagtaat

SEQ ID NO: 1578379 - DNA, 15 bp, Homo sapiens
ttacacagtcagtaa

SEQ ID NO: 1578380 - DNA, 15 bp, Homo sapiens
cttacacagtcagta

SEQ ID NO: 1578381 - DNA, 15 bp, Homo sapiens
tcttacacagtcagt

SEQ ID NO: 1578382 - DNA, 15 bp, Homo sapiens
gtcttacacagtcag

SEQ ID NO: 1578383 - DNA, 15 bp, Homo sapiens
tgtcttacacagtca

SEQ ID NO: 1578384 - DNA, 15 bp, Homo sapiens
ttgtcttacacagtc

SEQ ID NO: 1578385 - DNA, 15 bp, Homo sapiens
tttgtcttacacagt

SEQ ID NO: 1578386 - DNA, 15 bp, Homo sapiens
ttttgtcttacacag

SEQ ID NO: 1578387 - DNA, 15 bp, Homo sapiens
tttttgtcttacaca

SEQ ID NO: 1578388 - DNA, 15 bp, Homo sapiens
atttttgtcttacac

SEQ ID NO: 1578389 - DNA, 15 bp, Homo sapiens
tatttttgtcttaca

SEQ ID NO: 1578390 - DNA, 15 bp, Homo sapiens
ttatttttgtcttac

SEQ ID NO: 1578391 - DNA, 15 bp, Homo sapiens
attatttttgtctta

SEQ ID NO: 1578392 - DNA, 15 bp, Homo sapiens
tattatttttgtctt

SEQ ID NO: 1578393 - DNA, 15 bp, Homo sapiens
ttattatttttgtct

SEQ ID NO: 1578394 - DNA, 15 bp, Homo sapiens
tttattatttttgtc

SEQ ID NO: 1578395 - DNA, 15 bp, Homo sapiens
gtttattatttttgt

SEQ ID NO: 1578396 - DNA, 15 bp, Homo sapiens
tgtttattatttttg

SEQ ID NO: 1578397 - DNA, 15 bp, Homo sapiens
atgtttattattttt

SEQ ID NO: 1578398 - DNA, 15 bp, Homo sapiens
aatgtttattatttt

SEQ ID NO: 1578399 - DNA, 15 bp, Homo sapiens
aaatgtttattattt

SEQ ID NO: 1578400 - DNA, 15 bp, Homo sapiens
taaatgtttattatt

SEQ ID NO: 1578401 - DNA, 15 bp, Homo sapiens
ataaatgtttattat

SEQ ID NO: 1578402 - DNA, 15 bp, Homo sapiens
aataaatgtttatta

SEQ ID NO: 1578403 - DNA, 15 bp, Homo sapiens
caataaatgtttatt

SEQ ID NO: 1578404 - DNA, 15 bp, Homo sapiens
acaataaatgtttat

SEQ ID NO: 1578405 - DNA, 15 bp, Homo sapiens
cacaataaatgttta

SEQ ID NO: 1578406 - DNA, 15 bp, Homo sapiens
ccacaataaatgttt

SEQ ID NO: 1578407 - DNA, 15 bp, Homo sapiens
tccacaataaatgtt

SEQ ID NO: 1578408 - DNA, 15 bp, Homo sapiens
atccacaataaatgt

SEQ ID NO: 1578409 - DNA, 15 bp, Homo sapiens
tatccacaataaatg

SEQ ID NO: 1578410 - DNA, 15 bp, Homo sapiens
atatccacaataaat

SEQ ID NO: 1578411 - DNA, 15 bp, Homo sapiens
tatatccacaataaa

SEQ ID NO: 1578412 - DNA, 15 bp, Homo sapiens
atatatccacaataa

SEQ ID NO: 1578413 - DNA, 15 bp, Homo sapiens
aatatatccacaata

SEQ ID NO: 1578414 - DNA, 15 bp, Homo sapiens
aaatatatccacaat

SEQ ID NO: 1578415 - DNA, 15 bp, Homo sapiens
taaatatatccacaa

SEQ ID NO: 1578416 - DNA, 15 bp, Homo sapiens
ctaaatatatccaca

SEQ ID NO: 1578417 - DNA, 15 bp, Homo sapiens
tctaaatatatccac

SEQ ID NO: 1578418 - DNA, 15 bp, Homo sapiens
ttctaaatatatcca

SEQ ID NO: 1578419 - DNA, 15 bp, Homo sapiens
cttctaaatatatcc

SEQ ID NO: 1578420 - DNA, 15 bp, Homo sapiens
acttctaaatatatc

SEQ ID NO: 1578421 - DNA, 15 bp, Homo sapiens
tacttctaaatatat

SEQ ID NO: 1578422 - DNA, 15 bp, Homo sapiens
ttacttctaaatata

SEQ ID NO: 1578423 - DNA, 15 bp, Homo sapiens
tttacttctaaatat

SEQ ID NO: 1578424 - DNA, 15 bp, Homo sapiens
ttttacttctaaata

SEQ ID NO: 1578425 - DNA, 15 bp, Homo sapiens
attttacttctaaat

SEQ ID NO: 1578426 - DNA, 15 bp, Homo sapiens
tattttacttctaaa

SEQ ID NO: 1578427 - DNA, 15 bp, Homo sapiens
atattttacttctaa

SEQ ID NO: 1578428 - DNA, 15 bp, Homo sapiens
tatattttacttcta

SEQ ID NO: 1578429 - DNA, 15 bp, Homo sapiens
ttatattttacttct

SEQ ID NO: 1578430 - DNA, 15 bp, Homo sapiens
cttatattttacttc

SEQ ID NO: 1578431 - DNA, 15 bp, Homo sapiens
tcttatattttactt

SEQ ID NO: 1578432 - DNA, 15 bp, Homo sapiens
gtcttatattttact

SEQ ID NO: 1578433 - DNA, 15 bp, Homo sapiens
tgtcttatattttac

SEQ ID NO: 1578434 - DNA, 15 bp, Homo sapiens
ttgtcttatatttta

SEQ ID NO: 1578435 - DNA, 15 bp, Homo sapiens
attgtcttatatttt

SEQ ID NO: 1578436 - DNA, 15 bp, Homo sapiens
tattgtcttatattt

SEQ ID NO: 1578437 - DNA, 15 bp, Homo sapiens
ctattgtcttatatt

SEQ ID NO: 1578438 - DNA, 15 bp, Homo sapiens
gctattgtcttatat

SEQ ID NO: 1578439 - DNA, 15 bp, Homo sapiens
tgctattgtcttata

SEQ ID NO: 1578440 - DNA, 15 bp, Homo sapiens
gtgctattgtcttat

SEQ ID NO: 1578441 - DNA, 15 bp, Homo sapiens
tgtgctattgtctta

SEQ ID NO: 1578442 - DNA, 15 bp, Homo sapiens
ttgtgctattgtctt

SEQ ID NO: 1578443 - DNA, 15 bp, Homo sapiens
tttgtgctattgtct

SEQ ID NO: 1578444 - DNA, 15 bp, Homo sapiens
ttttgtgctattgtc

SEQ ID NO: 1578445 - DNA, 15 bp, Homo sapiens
tttttgtgctattgt

SEQ ID NO: 1578446 - DNA, 15 bp, Homo sapiens
gtttttgtgctattg

SEQ ID NO: 1578447 - DNA, 15 bp, Homo sapiens
ggtttttgtgctatt

SEQ ID NO: 1578448 - DNA, 15 bp, Homo sapiens
tggtttttgtgctat

SEQ ID NO: 1578449 - DNA, 15 bp, Homo sapiens
ctggtttttgtgcta

SEQ ID NO: 1578450 - DNA, 15 bp, Homo sapiens
tctggtttttgtgct

SEQ ID NO: 1578451 - DNA, 15 bp, Homo sapiens
ttctggtttttgtgc

SEQ ID NO: 1578452 - DNA, 15 bp, Homo sapiens
cttctggtttttgtg

SEQ ID NO: 1578453 - DNA, 15 bp, Homo sapiens
tcttctggtttttgt

SEQ ID NO: 1578454 - DNA, 15 bp, Homo sapiens
ctcttctggtttttg

SEQ ID NO: 1578455 - DNA, 15 bp, Homo sapiens
tctcttctggttttt

SEQ ID NO: 1578456 - DNA, 15 bp, Homo sapiens
ttctcttctggtttt

SEQ ID NO: 1578457 - DNA, 15 bp, Homo sapiens
tttctcttctggttt

SEQ ID NO: 1578458 - DNA, 15 bp, Homo sapiens
ttttctcttctggtt

SEQ ID NO: 1578459 - DNA, 15 bp, Homo sapiens
attttctcttctggt

SEQ ID NO: 1578460 - DNA, 15 bp, Homo sapiens
tattttctcttctgg

SEQ ID NO: 1578461 - DNA, 15 bp, Homo sapiens
ttattttctcttctg

SEQ ID NO: 1578462 - DNA, 15 bp, Homo sapiens
attattttctcttct

SEQ ID NO: 1578463 - DNA, 15 bp, Homo sapiens
tattattttctcttc

SEQ ID NO: 1578464 - DNA, 15 bp, Homo sapiens
ttattattttctctt

SEQ ID NO: 1578465 - DNA, 15 bp, Homo sapiens
cttttattattttct

SEQ ID NO: 1578466 - DNA, 15 bp, Homo sapiens
acttttattattttc

SEQ ID NO: 1578467 - DNA, 15 bp, Homo sapiens
cacttttattatttt

SEQ ID NO: 1578468 - DNA, 15 bp, Homo sapiens
acacttttattattt

SEQ ID NO: 1578469 - DNA, 15 bp, Homo sapiens
cacacttttattatt

SEQ ID NO: 1578470 - DNA, 15 bp, Homo sapiens
gcacacttttattat

SEQ ID NO: 1578471 - DNA, 15 bp, Homo sapiens
tgcacacttttatta

SEQ ID NO: 1578472 - DNA, 15 bp, Homo sapiens
ctgcacacttttatt

SEQ ID NO: 1578473 - DNA, 15 bp, Homo sapiens
actgcacacttttat

SEQ ID NO: 1578474 - DNA, 15 bp, Homo sapiens
aactgcacactttta

SEQ ID NO: 1578475 - DNA, 15 bp, Homo sapiens
caactgcacactttt

SEQ ID NO: 1578476 - DNA, 15 bp, Homo sapiens
acaactgcacacttt

SEQ ID NO: 1578477 - DNA, 15 bp, Homo sapiens
tacaactgcacactt

SEQ ID NO: 1578478 - DNA, 15 bp, Homo sapiens
ttacaactgcacact

SEQ ID NO: 1578479 - DNA, 15 bp, Homo sapiens
cttacaactgcacac

SEQ ID NO: 1578480 - DNA, 15 bp, Homo sapiens
ccttacaactgcaca

SEQ ID NO: 1578481 - DNA, 15 bp, Homo sapiens
tccttacaactgcac

SEQ ID NO: 1578482 - DNA, 15 bp, Homo sapiens
atccttacaactgca

SEQ ID NO: 1578483 - DNA, 15 bp, Homo sapiens
gatccttacaactgc

SEQ ID NO: 1578484 - DNA, 15 bp, Homo sapiens
agatccttacaactg

SEQ ID NO: 1578485 - DNA, 15 bp, Homo sapiens
aagatccttacaact

SEQ ID NO: 1578486 - DNA, 15 bp, Homo sapiens
gaagatccttacaac

SEQ ID NO: 1578487 - DNA, 15 bp, Homo sapiens
agaagatccttacaa

SEQ ID NO: 1578488 - DNA, 15 bp, Homo sapiens
tagaagatccttaca

SEQ ID NO: 1578489 - DNA, 15 bp, Homo sapiens
atagaagatccttac

SEQ ID NO: 1578490 - DNA, 15 bp, Homo sapiens
aatagaagatcctta

SEQ ID NO: 1578491 - DNA, 15 bp, Homo sapiens
taatagaagatcctt

SEQ ID NO: 1578492 - DNA, 15 bp, Homo sapiens
ataatagaagatcct

SEQ ID NO: 1578493 - DNA, 15 bp, Homo sapiens
tataatagaagatcc

SEQ ID NO: 1578494 - DNA, 15 bp, Homo sapiens
gtataatagaagatc

SEQ ID NO: 1578495 - DNA, 15 bp, Homo sapiens
tgtataatagaagat

SEQ ID NO: 1578496 - DNA, 15 bp, Homo sapiens
atgtataatagaaga

SEQ ID NO: 1578497 - DNA, 15 bp, Homo sapiens
catgtataatagaag

SEQ ID NO: 1578498 - DNA, 15 bp, Homo sapiens
tcatgtataatagaa

SEQ ID NO: 1578499 - DNA, 15 bp, Homo sapiens
ctcatgtataataga

SEQ ID NO: 1578500 - DNA, 15 bp, Homo sapiens
cctcatgtataatag

SEQ ID NO: 1578501 - DNA, 15 bp, Homo sapiens
acctcatgtataata

SEQ ID NO: 1578502 - DNA, 15 bp, Homo sapiens
cacctcatgtataat

SEQ ID NO: 1578503 - DNA, 15 bp, Homo sapiens
ccacctcatgtataa

SEQ ID NO: 1578504 - DNA, 15 bp, Homo sapiens
accacctcatgtata

SEQ ID NO: 1578505 - DNA, 15 bp, Homo sapiens
taccacctcatgtat

SEQ ID NO: 1578506 - DNA, 15 bp, Homo sapiens
ataccacctcatgta

SEQ ID NO: 1578507 - DNA, 15 bp, Homo sapiens
tataccacctcatgt

SEQ ID NO: 1578508 - DNA, 15 bp, Homo sapiens
ctataccacctcatg

SEQ ID NO: 1578509 - DNA, 15 bp, Homo sapiens
actataccacctcat

SEQ ID NO: 1578510 - DNA, 15 bp, Homo sapiens
tactataccacctca

SEQ ID NO: 1578511 - DNA, 15 bp, Homo sapiens
atactataccacctc

SEQ ID NO: 1578512 - DNA, 15 bp, Homo sapiens
tatactataccacct

SEQ ID NO: 1578513 - DNA, 15 bp, Homo sapiens
ttatactataccacc

SEQ ID NO: 1578514 - DNA, 15 bp, Homo sapiens
attatactataccac

SEQ ID NO: 1578515 - DNA, 15 bp, Homo sapiens
aattatactatacca

SEQ ID NO: 1578516 - DNA, 15 bp, Homo sapiens
aaattatactatacc

SEQ ID NO: 1578517 - DNA, 15 bp, Homo sapiens
caaattatactatac

SEQ ID NO: 1578518 - DNA, 15 bp, Homo sapiens
tcaaattatactata

SEQ ID NO: 1578519 - DNA, 15 bp, Homo sapiens
ttcaaattatactat

SEQ ID NO: 1578520 - DNA, 15 bp, Homo sapiens
tttcaaattatacta

SEQ ID NO: 1578521 - DNA, 15 bp, Homo sapiens
ctttcaaattatact

SEQ ID NO: 1578522 - DNA, 15 bp, Homo sapiens
actttcaaattatac

SEQ ID NO: 1578523 - DNA, 15 bp, Homo sapiens
tactttcaaattata

SEQ ID NO: 1578524 - DNA, 15 bp, Homo sapiens
ctactttcaaattat

SEQ ID NO: 1578525 - DNA, 15 bp, Homo sapiens
tctactttcaaatta

SEQ ID NO: 1578526 - DNA, 15 bp, Homo sapiens
gtctactttcaaatt

SEQ ID NO: 1578527 - DNA, 15 bp, Homo sapiens
agtctactttcaaat

SEQ ID NO: 1578528 - DNA, 15 bp, Homo sapiens
cagtctactttcaaa

SEQ ID NO: 1578529 - DNA, 15 bp, Homo sapiens
acagtctactttcaa

SEQ ID NO: 1578530 - DNA, 15 bp, Homo sapiens
cacagtctactttca

SEQ ID NO: 1578531 - DNA, 15 bp, Homo sapiens
tcacagtctactttc

SEQ ID NO: 1578532 - DNA, 15 bp, Homo sapiens
atcacagtctacttt

SEQ ID NO: 1578533 - DNA, 15 bp, Homo sapiens
catcacagtctactt

SEQ ID NO: 1578534 - DNA, 15 bp, Homo sapiens
gcatcacagtctact

SEQ ID NO: 1578535 - DNA, 15 bp, Homo sapiens
agcatcacagtctac

SEQ ID NO: 1578536 - DNA, 15 bp, Homo sapiens
tagcatcacagtcta

SEQ ID NO: 1578537 - DNA, 15 bp, Homo sapiens
ttagcatcacagtct

SEQ ID NO: 1578538 - DNA, 15 bp, Homo sapiens
tttagcatcacagtc

SEQ ID NO: 1578539 - DNA, 15 bp, Homo sapiens
atttagcatcacagt

SEQ ID NO: 1578540 - DNA, 15 bp, Homo sapiens
aatttagcatcacag

SEQ ID NO: 1578541 - DNA, 15 bp, Homo sapiens
taatttagcatcaca

SEQ ID NO: 1578542 - DNA, 15 bp, Homo sapiens
ttaatttagcatcac

SEQ ID NO: 1578543 - DNA, 15 bp, Homo sapiens
tttaatttagcatca

SEQ ID NO: 1578544 - DNA, 15 bp, Homo sapiens
atttaatttagcatc

SEQ ID NO: 1578545 - DNA, 15 bp, Homo sapiens
gatttaatttagcat

SEQ ID NO: 1578546 - DNA, 15 bp, Homo sapiens
agatttaatttagca

SEQ ID NO: 1578547 - DNA, 15 bp, Homo sapiens
gagatttaatttagc

SEQ ID NO: 1578548 - DNA, 15 bp, Homo sapiens
tgagatttaatttag

SEQ ID NO: 1578549 - DNA, 15 bp, Homo sapiens
ttgagatttaattta

SEQ ID NO: 1578550 - DNA, 15 bp, Homo sapiens
tttgagatttaattt

SEQ ID NO: 1578551 - DNA, 15 bp, Homo sapiens
ctttgagatttaatt

SEQ ID NO: 1578552 - DNA, 15 bp, Homo sapiens
gctttgagatttaat

SEQ ID NO: 1578553 - DNA, 15 bp, Homo sapiens
tgctttgagatttaa

SEQ ID NO: 1578554 - DNA, 15 bp, Homo sapiens
ttgctttgagattta

SEQ ID NO: 1578555 - DNA, 15 bp, Homo sapiens
gttgctttgagattt

SEQ ID NO: 1578556 - DNA, 15 bp, Homo sapiens
ggttgctttgagatt

SEQ ID NO: 1578557 - DNA, 15 bp, Homo sapiens
tggttgctttgagat

SEQ ID NO: 1578558 - DNA, 15 bp, Homo sapiens
gtggttgctttgaga

SEQ ID NO: 1578559 - DNA, 15 bp, Homo sapiens
agtggttgctttgag

SEQ ID NO: 1578560 - DNA, 15 bp, Homo sapiens
tagtggttgctttga

SEQ ID NO: 1578561 - DNA, 15 bp, Homo sapiens
ttagtggttgctttg

SEQ ID NO: 1578562 - DNA, 15 bp, Homo sapiens
tttagtggttgcttt

SEQ ID NO: 1578563 - DNA, 15 bp, Homo sapiens
ttttagtggttgctt

SEQ ID NO: 1578564 - DNA, 15 bp, Homo sapiens
gttttagtggttgct

SEQ ID NO: 1578565 - DNA, 15 bp, Homo sapiens
tgttttagtggttgc

SEQ ID NO: 1578566 - DNA, 15 bp, Homo sapiens
ttgttttagtggttg

SEQ ID NO: 1578567 - DNA, 15 bp, Homo sapiens
gttgttttagtggtt

SEQ ID NO: 1578568 - DNA, 15 bp, Homo sapiens
tgttgttttagtggt

SEQ ID NO: 1578569 - DNA, 15 bp, Homo sapiens
gtgttgttttagtgg

SEQ ID NO: 1578570 - DNA, 15 bp, Homo sapiens
tgtgttgttttagtg

SEQ ID NO: 1578571 - DNA, 15 bp, Homo sapiens
atgtgttgttttagt

SEQ ID NO: 1578572 - DNA, 15 bp, Homo sapiens
catgtgttgttttag

SEQ ID NO: 1578573 - DNA, 15 bp, Homo sapiens
tcatgtgttgtttta

SEQ ID NO: 1578574 - DNA, 15 bp, Homo sapiens
ttcatgtgttgtttt

SEQ ID NO: 1578575 - DNA, 15 bp, Homo sapiens
tttcatgtgttgttt

SEQ ID NO: 1578576 - DNA, 15 bp, Homo sapiens
ttttcatgtgttgtt

SEQ ID NO: 1578577 - DNA, 15 bp, Homo sapiens
attttcatgtgttgt

SEQ ID NO: 1578578 - DNA, 15 bp, Homo sapiens
cattttcatgtgttg

SEQ ID NO: 1578579 - DNA, 15 bp, Homo sapiens
acattttcatgtgtt

SEQ ID NO: 1578580 - DNA, 15 bp, Homo sapiens
aacattttcatgtgt

SEQ ID NO: 1578581 - DNA, 15 bp, Homo sapiens
aaacattttcatgtg

SEQ ID NO: 1578582 - DNA, 15 bp, Homo sapiens
aaaacattttcatgt

SEQ ID NO: 1578583 - DNA, 15 bp, Homo sapiens
caaaacattttcatg

SEQ ID NO: 1578584 - DNA, 15 bp, Homo sapiens
gcaaaacattttcat

SEQ ID NO: 1578585 - DNA, 15 bp, Homo sapiens
agcaaaacattttca

SEQ ID NO: 1578586 - DNA, 15 bp, Homo sapiens
tagcaaaacattttc

SEQ ID NO: 1578587 - DNA, 15 bp, Homo sapiens
ttagcaaaacatttt

SEQ ID NO: 1578588 - DNA, 15 bp, Homo sapiens
attagcaaaacattt

SEQ ID NO: 1578589 - DNA, 15 bp, Homo sapiens
tattagcaaaacatt

SEQ ID NO: 1578590 - DNA, 15 bp, Homo sapiens
atattagcaaaacat

SEQ ID NO: 1578591 - DNA, 15 bp, Homo sapiens
catattagcaaaaca

SEQ ID NO: 1578592 - DNA, 15 bp, Homo sapiens
gcatattagcaaaac

SEQ ID NO: 1578593 - DNA, 15 bp, Homo sapiens
tgcatattagcaaaa

SEQ ID NO: 1578594 - DNA, 15 bp, Homo sapiens
ttgcatattagcaaa

SEQ ID NO: 1578595 - DNA, 15 bp, Homo sapiens
tttgcatattagcaa

SEQ ID NO: 1578596 - DNA, 15 bp, Homo sapiens
ttttgcatattagca

SEQ ID NO: 1578597 - DNA, 15 bp, Homo sapiens
tttttgcatattagc

SEQ ID NO: 1578598 - DNA, 15 bp, Homo sapiens
ttttttgcatattag

SEQ ID NO: 1578599 - DNA, 15 bp, Homo sapiens
cttttttgcatatta

SEQ ID NO: 1578600 - DNA, 15 bp, Homo sapiens
ccttttttgcatatt

SEQ ID NO: 1578601 - DNA, 15 bp, Homo sapiens
tccttttttgcatat

SEQ ID NO: 1578602 - DNA, 15 bp, Homo sapiens
ctccttttttgcata

SEQ ID NO: 1578603 - DNA, 15 bp, Homo sapiens
tctccttttttgcat

SEQ ID NO: 1578604 - DNA, 15 bp, Homo sapiens
atctccttttttgca

SEQ ID NO: 1578605 - DNA, 15 bp, Homo sapiens
tatctccttttttgc

SEQ ID NO: 1578606 - DNA, 15 bp, Homo sapiens
atatctccttttttg

SEQ ID NO: 1578607 - DNA, 15 bp, Homo sapiens
tatatctcctttttt

SEQ ID NO: 1578608 - DNA, 15 bp, Homo sapiens
ttatatctccttttt

SEQ ID NO: 1578609 - DNA, 15 bp, Homo sapiens
attatatctcctttt

SEQ ID NO: 1578610 - DNA, 15 bp, Homo sapiens
cattatatctccttt

SEQ ID NO: 1578611 - DNA, 15 bp, Homo sapiens
tcattatatctcctt

SEQ ID NO: 1578612 - DNA, 15 bp, Homo sapiens
ttcattatatctcct

SEQ ID NO: 1578613 - DNA, 15 bp, Homo sapiens
tttcattatatctcc

SEQ ID NO: 1578614 - DNA, 15 bp, Homo sapiens
atttcattatatctc

SEQ ID NO: 1578615 - DNA, 15 bp, Homo sapiens
aatttcattatatct

SEQ ID NO: 1578616 - DNA, 15 bp, Homo sapiens
caatttcattatatc

SEQ ID NO: 1578617 - DNA, 15 bp, Homo sapiens
acaatttcattatat

SEQ ID NO: 1578618 - DNA, 15 bp, Homo sapiens
tacaatttcattata

SEQ ID NO: 1578619 - DNA, 15 bp, Homo sapiens
ctacaatttcattat

SEQ ID NO: 1578620 - DNA, 15 bp, Homo sapiens
tctacaatttcatta

SEQ ID NO: 1578621 - DNA, 15 bp, Homo sapiens
ttctacaatttcatt

SEQ ID NO: 1578622 - DNA, 15 bp, Homo sapiens
tttctacaatttcat

SEQ ID NO: 1578623 - DNA, 15 bp, Homo sapiens
ttttctacaatttca

SEQ ID NO: 1578624 - DNA, 15 bp, Homo sapiens
gttttctacaatttc

SEQ ID NO: 1578625 - DNA, 15 bp, Homo sapiens
tgttttctacaattt

SEQ ID NO: 1578626 - DNA, 15 bp, Homo sapiens
gtgttttctacaatt

SEQ ID NO: 1578627 - DNA, 15 bp, Homo sapiens
agtgttttctacaat

SEQ ID NO: 1578628 - DNA, 15 bp, Homo sapiens
gagtgttttctacaa

SEQ ID NO: 1578629 - DNA, 15 bp, Homo sapiens
tgagtgttttctaca

SEQ ID NO: 1578630 - DNA, 15 bp, Homo sapiens
ttgagtgttttctac

SEQ ID NO: 1578631 - DNA, 15 bp, Homo sapiens
attgagtgttttcta

SEQ ID NO: 1578632 - DNA, 15 bp, Homo sapiens
tattgagtgttttct

SEQ ID NO: 1578633 - DNA, 15 bp, Homo sapiens
gtattgagtgttttc

SEQ ID NO: 1578634 - DNA, 15 bp, Homo sapiens
ggtattgagtgtttt

SEQ ID NO: 1578635 - DNA, 15 bp, Homo sapiens
gggtattgagtgttt

SEQ ID NO: 1578636 - DNA, 15 bp, Homo sapiens
ggggtattgagtgtt

SEQ ID NO: 1578637 - DNA, 15 bp, Homo sapiens
tggggtattgagtgt

SEQ ID NO: 1578638 - DNA, 15 bp, Homo sapiens
ttggggtattgagtg

SEQ ID NO: 1578639 - DNA, 15 bp, Homo sapiens
tttggggtattgagt

SEQ ID NO: 1578640 - DNA, 15 bp, Homo sapiens
ttttggggtattgag

SEQ ID NO: 1578641 - DNA, 15 bp, Homo sapiens
tttttggggtattga

SEQ ID NO: 1578642 - DNA, 15 bp, Homo sapiens
ttttttggggtattg

SEQ ID NO: 1578643 - DNA, 15 bp, Homo sapiens
tttttttggggtatt

SEQ ID NO: 1578644 - DNA, 15 bp, Homo sapiens
ctttttttggggtat

SEQ ID NO: 1578645 - DNA, 15 bp, Homo sapiens
cctttttttggggta

SEQ ID NO: 1578646 - DNA, 15 bp, Homo sapiens
gcctttttttggggt

SEQ ID NO: 1578647 - DNA, 15 bp, Homo sapiens
tgcctttttttgggg

SEQ ID NO: 1578648 - DNA, 15 bp, Homo sapiens
atgcctttttttggg

SEQ ID NO: 1578649 - DNA, 15 bp, Homo sapiens
tatgcctttttttgg

SEQ ID NO: 1578650 - DNA, 15 bp, Homo sapiens
ttatgcctttttttg

SEQ ID NO: 1578651 - DNA, 15 bp, Homo sapiens
tttatgccttttttt

SEQ ID NO: 1578652 - DNA, 15 bp, Homo sapiens
ttttatgcctttttt

SEQ ID NO: 1578653 - DNA, 15 bp, Homo sapiens
tttttatgccttttt

SEQ ID NO: 1578654 - DNA, 15 bp, Homo sapiens
ctttttatgcctttt

SEQ ID NO: 1578655 - DNA, 15 bp, Homo sapiens
tctttttatgccttt

SEQ ID NO: 1578656 - DNA, 15 bp, Homo sapiens
ctctttttatgcctt

SEQ ID NO: 1578657 - DNA, 15 bp, Homo sapiens
cctctttttatgcct

SEQ ID NO: 1578658 - DNA, 15 bp, Homo sapiens
tcctctttttatgcc

SEQ ID NO: 1578659 - DNA, 15 bp, Homo sapiens
ttcctctttttatgc

SEQ ID NO: 1578660 - DNA, 15 bp, Homo sapiens
tttcctctttttatg

SEQ ID NO: 1578661 - DNA, 15 bp, Homo sapiens
ttttcctctttttat

SEQ ID NO: 1578662 - DNA, 15 bp, Homo sapiens
cttttcctcttttta

SEQ ID NO: 1578663 - DNA, 15 bp, Homo sapiens
ccttttcctcttttt

SEQ ID NO: 1578664 - DNA, 15 bp, Homo sapiens
tccttttcctctttt

SEQ ID NO: 1578665 - DNA, 15 bp, Homo sapiens
ttccttttcctcttt

SEQ ID NO: 1578666 - DNA, 15 bp, Homo sapiens
cttccttttcctctt

SEQ ID NO: 1578667 - DNA, 15 bp, Homo sapiens
tcttccttttcctct

SEQ ID NO: 1578668 - DNA, 15 bp, Homo sapiens
gtcttccttttcctc

SEQ ID NO: 1578669 - DNA, 15 bp, Homo sapiens
tgtcttccttttcct

SEQ ID NO: 1578670 - DNA, 15 bp, Homo sapiens
atgtcttccttttcc

SEQ ID NO: 1578671 - DNA, 15 bp, Homo sapiens
tatgtcttccttttc

SEQ ID NO: 1578672 - DNA, 15 bp, Homo sapiens
ctatgtcttcctttt

SEQ ID NO: 1578673 - DNA, 15 bp, Homo sapiens
actatgtcttccttt

SEQ ID NO: 1578674 - DNA, 15 bp, Homo sapiens
aactatgtcttcctt

SEQ ID NO: 1578675 - DNA, 15 bp, Homo sapiens
caactatgtcttcct

SEQ ID NO: 1578676 - DNA, 15 bp, Homo sapiens
tcaactatgtcttcc

SEQ ID NO: 1578677 - DNA, 15 bp, Homo sapiens
ttcaactatgtcttc

SEQ ID NO: 1578678 - DNA, 15 bp, Homo sapiens
cttcaactatgtctt

SEQ ID NO: 1578679 - DNA, 15 bp, Homo sapiens
acttcaactatgtct

SEQ ID NO: 1578680 - DNA, 15 bp, Homo sapiens
gacttcaactatgtc

SEQ ID NO: 1578681 - DNA, 15 bp, Homo sapiens
agacttcaactatgt

SEQ ID NO: 1578682 - DNA, 15 bp, Homo sapiens
gagacttcaactatg

SEQ ID NO: 1578683 - DNA, 15 bp, Homo sapiens
tgagacttcaactat

SEQ ID NO: 1578684 - DNA, 15 bp, Homo sapiens
ttgagacttcaacta

SEQ ID NO: 1578685 - DNA, 15 bp, Homo sapiens
tttgagacttcaact

SEQ ID NO: 1578686 - DNA, 15 bp, Homo sapiens
atttgagacttcaac

SEQ ID NO: 1578687 - DNA, 15 bp, Homo sapiens
tatttgagacttcaa

SEQ ID NO: 1578688 - DNA, 15 bp, Homo sapiens
ctatttgagacttca

SEQ ID NO: 1578689 - DNA, 15 bp, Homo sapiens
tctatttgagacttc

SEQ ID NO: 1578690 - DNA, 15 bp, Homo sapiens
ttctatttgagactt

SEQ ID NO: 1578691 - DNA, 15 bp, Homo sapiens
gttctatttgagact

SEQ ID NO: 1578692 - DNA, 15 bp, Homo sapiens
tgttctatttgagac

SEQ ID NO: 1578693 - DNA, 15 bp, Homo sapiens
gtgttctatttgaga

SEQ ID NO: 1578694 - DNA, 15 bp, Homo sapiens
tgtgttctatttgag

SEQ ID NO: 1578695 - DNA, 15 bp, Homo sapiens
ttgtgttctatttga

SEQ ID NO: 1578696 - DNA, 15 bp, Homo sapiens
tttgtgttctatttg

SEQ ID NO: 1578697 - DNA, 15 bp, Homo sapiens
gtttgtgttctattt

SEQ ID NO: 1578698 - DNA, 15 bp, Homo sapiens
tgtttgtgttctatt

SEQ ID NO: 1578699 - DNA, 15 bp, Homo sapiens
ctgtttgtgttctat

SEQ ID NO: 1578700 - DNA, 15 bp, Homo sapiens
gctgtttgtgttcta

SEQ ID NO: 1578701 - DNA, 15 bp, Homo sapiens
tgctgtttgtgttct

SEQ ID NO: 1578702 - DNA, 15 bp, Homo sapiens
ttgctgtttgtgttc

SEQ ID NO: 1578703 - DNA, 15 bp, Homo sapiens
cttgctgtttgtgtt

SEQ ID NO: 1578704 - DNA, 15 bp, Homo sapiens
tcttgctgtttgtgt

SEQ ID NO: 1578705 - DNA, 15 bp, Homo sapiens
atcttgctgtttgtg

SEQ ID NO: 1578706 - DNA, 15 bp, Homo sapiens
tatcttgctgtttgt

SEQ ID NO: 1578707 - DNA, 15 bp, Homo sapiens
ctatcttgctgtttg

SEQ ID NO: 1578708 - DNA, 15 bp, Homo sapiens
actatcttgctgttt

SEQ ID NO: 1578709 - DNA, 15 bp, Homo sapiens
tactatcttgctgtt

SEQ ID NO: 1578710 - DNA, 15 bp, Homo sapiens
atactatcttgctgt

SEQ ID NO: 1578711 - DNA, 15 bp, Homo sapiens
tatactatcttgctg

SEQ ID NO: 1578712 - DNA, 15 bp, Homo sapiens
atatactatcttgct

SEQ ID NO: 1578713 - DNA, 15 bp, Homo sapiens
aatatactatcttgc

SEQ ID NO: 1578714 - DNA, 15 bp, Homo sapiens
aaatatactatcttg

SEQ ID NO: 1578715 - DNA, 15 bp, Homo sapiens
taaatatactatctt

SEQ ID NO: 1578716 - DNA, 15 bp, Homo sapiens
ttaaatatactatct

SEQ ID NO: 1578717 - DNA, 15 bp, Homo sapiens
tttaaatatactatc

SEQ ID NO: 1578718 - DNA, 15 bp, Homo sapiens
gtttaaatatactat

SEQ ID NO: 1578719 - DNA, 15 bp, Homo sapiens
agtttaaatatacta

SEQ ID NO: 1578720 - DNA, 15 bp, Homo sapiens
gagtttaaatatact

SEQ ID NO: 1578721 - DNA, 15 bp, Homo sapiens
tgagtttaaatatac

SEQ ID NO: 1578722 - DNA, 15 bp, Homo sapiens
ttgagtttaaatata

SEQ ID NO: 1578723 - DNA, 15 bp, Homo sapiens
gttgagtttaaatat

SEQ ID NO: 1578724 - DNA, 15 bp, Homo sapiens
tgttgagtttaaata

SEQ ID NO: 1578725 - DNA, 15 bp, Homo sapiens
atgttgagtttaaat

SEQ ID NO: 1578726 - DNA, 15 bp, Homo sapiens
tatgttgagtttaaa

SEQ ID NO: 1578727 - DNA, 15 bp, Homo sapiens
atatgttgagtttaa

SEQ ID NO: 1578728 - DNA, 15 bp, Homo sapiens
gatatgttgagttta

SEQ ID NO: 1578729 - DNA, 15 bp, Homo sapiens
tgatatgttgagttt

SEQ ID NO: 1578730 - DNA, 15 bp, Homo sapiens
ttgatatgttgagtt

SEQ ID NO: 1578731 - DNA, 15 bp, Homo sapiens
attgatatgttgagt

SEQ ID NO: 1578732 - DNA, 15 bp, Homo sapiens
tattgatatgttgag

SEQ ID NO: 1578733 - DNA, 15 bp, Homo sapiens
ttattgatatgttga

SEQ ID NO: 1578734 - DNA, 15 bp, Homo sapiens
gttattgatatgttg

SEQ ID NO: 1578735 - DNA, 15 bp, Homo sapiens
ggttattgatatgtt

SEQ ID NO: 1578736 - DNA, 15 bp, Homo sapiens
tggttattgatatgt

SEQ ID NO: 1578737 - DNA, 15 bp, Homo sapiens
atggttattgatatg

SEQ ID NO: 1578738 - DNA, 15 bp, Homo sapiens
tatggttattgatat

SEQ ID NO: 1578739 - DNA, 15 bp, Homo sapiens
atatggttattgata

SEQ ID NO: 1578740 - DNA, 15 bp, Homo sapiens
aatatggttattgat

SEQ ID NO: 1578741 - DNA, 15 bp, Homo sapiens
taatatggttattga

SEQ ID NO: 1578742 - DNA, 15 bp, Homo sapiens
ttaatatggttattg

SEQ ID NO: 1578743 - DNA, 15 bp, Homo sapiens
tttaatatggttatt

SEQ ID NO: 1578744 - DNA, 15 bp, Homo sapiens
atttaatatggttat

SEQ ID NO: 1578745 - DNA, 15 bp, Homo sapiens
catttaatatggtta

SEQ ID NO: 1578746 - DNA, 15 bp, Homo sapiens
tcatttaatatggtt

SEQ ID NO: 1578747 - DNA, 15 bp, Homo sapiens
ttcatttaatatggt

SEQ ID NO: 1578748 - DNA, 15 bp, Homo sapiens
tttcatttaatatgg

SEQ ID NO: 1578749 - DNA, 15 bp, Homo sapiens
gtttcatttaatatg

SEQ ID NO: 1578750 - DNA, 15 bp, Homo sapiens
agtttcatttaatat

SEQ ID NO: 1578751 - DNA, 15 bp, Homo sapiens
cagtttcatttaata

SEQ ID NO: 1578752 - DNA, 15 bp, Homo sapiens
ccagtttcatttaat

SEQ ID NO: 1578753 - DNA, 15 bp, Homo sapiens
accagtttcatttaa

SEQ ID NO: 1578754 - DNA, 15 bp, Homo sapiens
gaccagtttcattta

SEQ ID NO: 1578755 - DNA, 15 bp, Homo sapiens
agaccagtttcattt

SEQ ID NO: 1578756 - DNA, 15 bp, Homo sapiens
tagaccagtttcatt

SEQ ID NO: 1578757 - DNA, 15 bp, Homo sapiens
ttagaccagtttcat

SEQ ID NO: 1578758 - DNA, 15 bp, Homo sapiens
tttagaccagtttca

SEQ ID NO: 1578759 - DNA, 15 bp, Homo sapiens
atttagaccagtttc

SEQ ID NO: 1578760 - DNA, 15 bp, Homo sapiens
tatttagaccagttt

SEQ ID NO: 1578761 - DNA, 15 bp, Homo sapiens
ttatttagaccagtt

SEQ ID NO: 1578762 - DNA, 15 bp, Homo sapiens
attatttagaccagt

SEQ ID NO: 1578763 - DNA, 15 bp, Homo sapiens
gattatttagaccag

SEQ ID NO: 1578764 - DNA, 15 bp, Homo sapiens
tgattatttagacca

SEQ ID NO: 1578765 - DNA, 15 bp, Homo sapiens
ctgattatttagacc

SEQ ID NO: 1578766 - DNA, 15 bp, Homo sapiens
tctgattatttagac

SEQ ID NO: 1578767 - DNA, 15 bp, Homo sapiens
ttctgattatttaga

SEQ ID NO: 1578768 - DNA, 15 bp, Homo sapiens
tttctgattatttag

SEQ ID NO: 1578769 - DNA, 15 bp, Homo sapiens
ttttctgattattta

SEQ ID NO: 1578770 - DNA, 15 bp, Homo sapiens
tttttctgattattt

SEQ ID NO: 1578771 - DNA, 15 bp, Homo sapiens
ctttttctgattatt

SEQ ID NO: 1578772 - DNA, 15 bp, Homo sapiens
tctttttctgattat

SEQ ID NO: 1578773 - DNA, 15 bp, Homo sapiens
gtctttttctgatta

SEQ ID NO: 1578774 - DNA, 15 bp, Homo sapiens
agtctttttctgatt

SEQ ID NO: 1578775 - DNA, 15 bp, Homo sapiens
aagtctttttctgat

SEQ ID NO: 1578776 - DNA, 15 bp, Homo sapiens
gaagtctttttctga

SEQ ID NO: 1578777 - DNA, 15 bp, Homo sapiens
tgaagtctttttctg

SEQ ID NO: 1578778 - DNA, 15 bp, Homo sapiens
ctgaagtctttttct

SEQ ID NO: 1578779 - DNA, 15 bp, Homo sapiens
tctgaagtctttttc

SEQ ID NO: 1578780 - DNA, 15 bp, Homo sapiens
ttctgaagtcttttt

SEQ ID NO: 1578781 - DNA, 15 bp, Homo sapiens
gttctgaagtctttt

SEQ ID NO: 1578782 - DNA, 15 bp, Homo sapiens
tgttctgaagtcttt

SEQ ID NO: 1578783 - DNA, 15 bp, Homo sapiens
atgttctgaagtctt

SEQ ID NO: 1578784 - DNA, 15 bp, Homo sapiens
catgttctgaagtct

SEQ ID NO: 1578785 - DNA, 15 bp, Homo sapiens
ccatgttctgaagtc

SEQ ID NO: 1578786 - DNA, 15 bp, Homo sapiens
tccatgttctgaagt

SEQ ID NO: 1578787 - DNA, 15 bp, Homo sapiens
ttccatgttctgaag

SEQ ID NO: 1578788 - DNA, 15 bp, Homo sapiens
attccatgttctgaa

SEQ ID NO: 1578789 - DNA, 15 bp, Homo sapiens
tattccatgttctga

SEQ ID NO: 1578790 - DNA, 15 bp, Homo sapiens
atattccatgttctg

SEQ ID NO: 1578791 - DNA, 15 bp, Homo sapiens
aatattccatgttct

SEQ ID NO: 1578792 - DNA, 15 bp, Homo sapiens
taatattccatgttc

SEQ ID NO: 1578793 - DNA, 15 bp, Homo sapiens
ctaatattccatgtt

SEQ ID NO: 1578794 - DNA, 15 bp, Homo sapiens
gctaatattccatgt

SEQ ID NO: 1578795 - DNA, 15 bp, Homo sapiens
tgctaatattccatg

SEQ ID NO: 1578796 - DNA, 15 bp, Homo sapiens
ctgctaatattccat

SEQ ID NO: 1578797 - DNA, 15 bp, Homo sapiens
tctgctaatattcca

SEQ ID NO: 1578798 - DNA, 15 bp, Homo sapiens
ctctgctaatattcc

SEQ ID NO: 1578799 - DNA, 15 bp, Homo sapiens
tctctgctaatattc

SEQ ID NO: 1578800 - DNA, 15 bp, Homo sapiens
atctctgctaatatt

SEQ ID NO: 1578801 - DNA, 15 bp, Homo sapiens
tatctctgctaatat

SEQ ID NO: 1578802 - DNA, 15 bp, Homo sapiens
ttatctctgctaata

SEQ ID NO: 1578803 - DNA, 15 bp, Homo sapiens
tttatctctgctaat

SEQ ID NO: 1578804 - DNA, 15 bp, Homo sapiens
ttttatctctgctaa

SEQ ID NO: 1578805 - DNA, 15 bp, Homo sapiens
tttttatctctgcta

SEQ ID NO: 1578806 - DNA, 15 bp, Homo sapiens
ttttttatctctgct

SEQ ID NO: 1578807 - DNA, 15 bp, Homo sapiens
cttttttatctctgc

SEQ ID NO: 1578808 - DNA, 15 bp, Homo sapiens
tcttttttatctctg

SEQ ID NO: 1578809 - DNA, 15 bp, Homo sapiens
ctcttttttatctct

SEQ ID NO: 1578810 - DNA, 15 bp, Homo sapiens
tctcttttttatctc

SEQ ID NO: 1578811 - DNA, 15 bp, Homo sapiens
atctcttttttatct

SEQ ID NO: 1578812 - DNA, 15 bp, Homo sapiens
gatctcttttttatc

SEQ ID NO: 1578813 - DNA, 15 bp, Homo sapiens
tgatctcttttttat

SEQ ID NO: 1578814 - DNA, 15 bp, Homo sapiens
atgatctctttttta

SEQ ID NO: 1578815 - DNA, 15 bp, Homo sapiens
aatgatctctttttt

SEQ ID NO: 1578816 - DNA, 15 bp, Homo sapiens
aaatgatctcttttt

SEQ ID NO: 1578817 - DNA, 15 bp, Homo sapiens
gaaatgatctctttt

SEQ ID NO: 1578818 - DNA, 15 bp, Homo sapiens
tgaaatgatctcttt

SEQ ID NO: 1578819 - DNA, 15 bp, Homo sapiens
atgaaatgatctctt

SEQ ID NO: 1578820 - DNA, 15 bp, Homo sapiens
tatgaaatgatctct

SEQ ID NO: 1578821 - DNA, 15 bp, Homo sapiens
ttatgaaatgatctc

SEQ ID NO: 1578822 - DNA, 15 bp, Homo sapiens
attatgaaatgatct

SEQ ID NO: 1578823 - DNA, 15 bp, Homo sapiens
cattatgaaatgatc

SEQ ID NO: 1578824 - DNA, 15 bp, Homo sapiens
tcattatgaaatgat

SEQ ID NO: 1578825 - DNA, 15 bp, Homo sapiens
atcattatgaaatga

SEQ ID NO: 1578826 - DNA, 15 bp, Homo sapiens
tatcattatgaaatg

SEQ ID NO: 1578827 - DNA, 15 bp, Homo sapiens
ttatcattatgaaat

SEQ ID NO: 1578828 - DNA, 15 bp, Homo sapiens
tttatcattatgaaa

SEQ ID NO: 1578829 - DNA, 15 bp, Homo sapiens
ttttatcattatgaa

SEQ ID NO: 1578830 - DNA, 15 bp, Homo sapiens
attttatcattatga

SEQ ID NO: 1578831 - DNA, 15 bp, Homo sapiens
tattttatcattatg

SEQ ID NO: 1578832 - DNA, 15 bp, Homo sapiens
atattttatcattat

SEQ ID NO: 1578833 - DNA, 15 bp, Homo sapiens
aatattttatcatta

SEQ ID NO: 1578834 - DNA, 15 bp, Homo sapiens
caatattttatcatt

SEQ ID NO: 1578835 - DNA, 15 bp, Homo sapiens
tcaatattttatcat

SEQ ID NO: 1578836 - DNA, 15 bp, Homo sapiens
ttcaatattttatca

SEQ ID NO: 1578837 - DNA, 15 bp, Homo sapiens
attcaatattttatc

SEQ ID NO: 1578838 - DNA, 15 bp, Homo sapiens
aattcaatattttat

SEQ ID NO: 1578839 - DNA, 15 bp, Homo sapiens
gaattcaatatttta

SEQ ID NO: 1578840 - DNA, 15 bp, Homo sapiens
tgaattcaatatttt

SEQ ID NO: 1578841 - DNA, 15 bp, Homo sapiens
ttgaattcaatattt

SEQ ID NO: 1578842 - DNA, 15 bp, Homo sapiens
cttgaattcaatatt

SEQ ID NO: 1578843 - DNA, 15 bp, Homo sapiens
tcttgaattcaatat

SEQ ID NO: 1578844 - DNA, 15 bp, Homo sapiens
ctcttgaattcaata

SEQ ID NO: 1578845 - DNA, 15 bp, Homo sapiens
cctcttgaattcaat

SEQ ID NO: 1578846 - DNA, 15 bp, Homo sapiens
tcctcttgaattcaa

SEQ ID NO: 1578847 - DNA, 15 bp, Homo sapiens
gtcctcttgaattca

SEQ ID NO: 1578848 - DNA, 15 bp, Homo sapiens
tgtcctcttgaattc

SEQ ID NO: 1578849 - DNA, 15 bp, Homo sapiens
atgtcctcttgaatt

SEQ ID NO: 1578850 - DNA, 15 bp, Homo sapiens
tatgtcctcttgaat

SEQ ID NO: 1578851 - DNA, 15 bp, Homo sapiens
ttatgtcctcttgaa

SEQ ID NO: 1578852 - DNA, 15 bp, Homo sapiens
gttatgtcctcttga

SEQ ID NO: 1578853 - DNA, 15 bp, Homo sapiens
tgttatgtcctcttg

SEQ ID NO: 1578854 - DNA, 15 bp, Homo sapiens
ttgttatgtcctctt

SEQ ID NO: 1578855 - DNA, 15 bp, Homo sapiens
attgttatgtcctct

SEQ ID NO: 1578856 - DNA, 15 bp, Homo sapiens
gattgttatgtcctc

SEQ ID NO: 1578857 - DNA, 15 bp, Homo sapiens
ggattgttatgtcct

SEQ ID NO: 1578858 - DNA, 15 bp, Homo sapiens
aggattgttatgtcc

SEQ ID NO: 1578859 - DNA, 15 bp, Homo sapiens
taggattgttatgtc

SEQ ID NO: 1578860 - DNA, 15 bp, Homo sapiens
ttaggattgttatgt

SEQ ID NO: 1578861 - DNA, 15 bp, Homo sapiens
cttaggattgttatg

SEQ ID NO: 1578862 - DNA, 15 bp, Homo sapiens
acttaggattgttat

SEQ ID NO: 1578863 - DNA, 15 bp, Homo sapiens
cacttaggattgtta

SEQ ID NO: 1578864 - DNA, 15 bp, Homo sapiens
acacttaggattgtt

SEQ ID NO: 1578865 - DNA, 15 bp, Homo sapiens
aacacttaggattgt

SEQ ID NO: 1578866 - DNA, 15 bp, Homo sapiens
aaacacttaggattg

SEQ ID NO: 1578867 - DNA, 15 bp, Homo sapiens
taaacacttaggatt

SEQ ID NO: 1578868 - DNA, 15 bp, Homo sapiens
ataaacacttaggat

SEQ ID NO: 1578869 - DNA, 15 bp, Homo sapiens
cataaacacttagga

SEQ ID NO: 1578870 - DNA, 15 bp, Homo sapiens
tcataaacacttagg

SEQ ID NO: 1578871 - DNA, 15 bp, Homo sapiens
ttcataaacacttag

SEQ ID NO: 1578872 - DNA, 15 bp, Homo sapiens
gttcataaacactta

SEQ ID NO: 1578873 - DNA, 15 bp, Homo sapiens
ggttcataaacactt

SEQ ID NO: 1578874 - DNA, 15 bp, Homo sapiens
aggttcataaacact

SEQ ID NO: 1578875 - DNA, 15 bp, Homo sapiens
taggttcataaacac

SEQ ID NO: 1578876 - DNA, 15 bp, Homo sapiens
ctaggttcataaaca

SEQ ID NO: 1578877 - DNA, 15 bp, Homo sapiens
actaggttcataaac

SEQ ID NO: 1578878 - DNA, 15 bp, Homo sapiens
tactaggttcataaa

SEQ ID NO: 1578879 - DNA, 15 bp, Homo sapiens
ttactaggttcataa

SEQ ID NO: 1578880 - DNA, 15 bp, Homo sapiens
gttactaggttcata

SEQ ID NO: 1578881 - DNA, 15 bp, Homo sapiens
tgttactaggttcat

SEQ ID NO: 1578882 - DNA, 15 bp, Homo sapiens
ctgttactaggttca

SEQ ID NO: 1578883 - DNA, 15 bp, Homo sapiens
tctgttactaggttc

SEQ ID NO: 1578884 - DNA, 15 bp, Homo sapiens
atctgttactaggtt

SEQ ID NO: 1578885 - DNA, 15 bp, Homo sapiens
gatctgttactaggt

SEQ ID NO: 1578886 - DNA, 15 bp, Homo sapiens
agatctgttactagg

SEQ ID NO: 1578887 - DNA, 15 bp, Homo sapiens
aagatctgttactag

SEQ ID NO: 1578888 - DNA, 15 bp, Homo sapiens
gaagatctgttacta

SEQ ID NO: 1578889 - DNA, 15 bp, Homo sapiens
tgaagatctgttact

SEQ ID NO: 1578890 - DNA, 15 bp, Homo sapiens
ttgaagatctgttac

SEQ ID NO: 1578891 - DNA, 15 bp, Homo sapiens
tttgaagatctgtta

SEQ ID NO: 1578892 - DNA, 15 bp, Homo sapiens
ttttgaagatctgtt

SEQ ID NO: 1578893 - DNA, 15 bp, Homo sapiens
attttgaagatctgt

SEQ ID NO: 1578894 - DNA, 15 bp, Homo sapiens
tattttgaagatctg

SEQ ID NO: 1578895 - DNA, 15 bp, Homo sapiens
gtattttgaagatct

SEQ ID NO: 1578896 - DNA, 15 bp, Homo sapiens
tgtattttgaagatc

SEQ ID NO: 1578897 - DNA, 15 bp, Homo sapiens
atgtattttgaagat

SEQ ID NO: 1578898 - DNA, 15 bp, Homo sapiens
catgtattttgaaga

SEQ ID NO: 1578899 - DNA, 15 bp, Homo sapiens
tcatgtattttgaag

SEQ ID NO: 1578900 - DNA, 15 bp, Homo sapiens
ttcatgtattttgaa

SEQ ID NO: 1578901 - DNA, 15 bp, Homo sapiens
cttcatgtattttga

SEQ ID NO: 1578902 - DNA, 15 bp, Homo sapiens
gcttcatgtattttg

SEQ ID NO: 1578903 - DNA, 15 bp, Homo sapiens
tgcttcatgtatttt

SEQ ID NO: 1578904 - DNA, 15 bp, Homo sapiens
ttgcttcatgtattt

SEQ ID NO: 1578905 - DNA, 15 bp, Homo sapiens
tttgcttcatgtatt

SEQ ID NO: 1578906 - DNA, 15 bp, Homo sapiens
ttttgcttcatgtat

SEQ ID NO: 1578907 - DNA, 15 bp, Homo sapiens
cttttgcttcatgta

SEQ ID NO: 1578908 - DNA, 15 bp, Homo sapiens
gcttttgcttcatgt

SEQ ID NO: 1578909 - DNA, 15 bp, Homo sapiens
agcttttgcttcatg

SEQ ID NO: 1578910 - DNA, 15 bp, Homo sapiens
cagcttttgcttcat

SEQ ID NO: 1578911 - DNA, 15 bp, Homo sapiens
tcagcttttgcttca

SEQ ID NO: 1578912 - DNA, 15 bp, Homo sapiens
atcagcttttgcttc

SEQ ID NO: 1578913 - DNA, 15 bp, Homo sapiens
tatcagcttttgctt

SEQ ID NO: 1578914 - DNA, 15 bp, Homo sapiens
ctatcagcttttgct

SEQ ID NO: 1578915 - DNA, 15 bp, Homo sapiens
tctatcagcttttgc

SEQ ID NO: 1578916 - DNA, 15 bp, Homo sapiens
ttctatcagcttttg

SEQ ID NO: 1578917 - DNA, 15 bp, Homo sapiens
gttctatcagctttt

SEQ ID NO: 1578918 - DNA, 15 bp, Homo sapiens
agttctatcagcttt

SEQ ID NO: 1578919 - DNA, 15 bp, Homo sapiens
tagttctatcagctt

SEQ ID NO: 1578920 - DNA, 15 bp, Homo sapiens
atagttctatcagct

SEQ ID NO: 1578921 - DNA, 15 bp, Homo sapiens
tatagttctatcagc

SEQ ID NO: 1578922 - DNA, 15 bp, Homo sapiens
ttatagttctatcag

SEQ ID NO: 1578923 - DNA, 15 bp, Homo sapiens
cttatagttctatca

SEQ ID NO: 1578924 - DNA, 15 bp, Homo sapiens
ccttatagttctatc

SEQ ID NO: 1578925 - DNA, 15 bp, Homo sapiens
tccttatagttctat

SEQ ID NO: 1578926 - DNA, 15 bp, Homo sapiens
ctccttatagttcta

SEQ ID NO: 1578927 - DNA, 15 bp, Homo sapiens
tctccttatagttct

SEQ ID NO: 1578928 - DNA, 15 bp, Homo sapiens
ttctccttatagttc

SEQ ID NO: 1578929 - DNA, 15 bp, Homo sapiens
attctccttatagtt

SEQ ID NO: 1578930 - DNA, 15 bp, Homo sapiens
tattctccttatagt

SEQ ID NO: 1578931 - DNA, 15 bp, Homo sapiens
ctattctccttatag

SEQ ID NO: 1578932 - DNA, 15 bp, Homo sapiens
actattctccttata

SEQ ID NO: 1578933 - DNA, 15 bp, Homo sapiens
cactattctccttat

SEQ ID NO: 1578934 - DNA, 15 bp, Homo sapiens
tcactattctcctta

SEQ ID NO: 1578935 - DNA, 15 bp, Homo sapiens
ttcactattctcctt

SEQ ID NO: 1578936 - DNA, 15 bp, Homo sapiens
tttcactattctcct

SEQ ID NO: 1578937 - DNA, 15 bp, Homo sapiens
gtttcactattctcc

SEQ ID NO: 1578938 - DNA, 15 bp, Homo sapiens
agtttcactattctc

SEQ ID NO: 1578939 - DNA, 15 bp, Homo sapiens
gagtttcactattct

SEQ ID NO: 1578940 - DNA, 15 bp, Homo sapiens
tgagtttcactattc

SEQ ID NO: 1578941 - DNA, 15 bp, Homo sapiens
gtgagtttcactatt

SEQ ID NO: 1578942 - DNA, 15 bp, Homo sapiens
tgtgagtttcactat

SEQ ID NO: 1578943 - DNA, 15 bp, Homo sapiens
ttgtgagtttcacta

SEQ ID NO: 1578944 - DNA, 15 bp, Homo sapiens
attgtgagtttcact

SEQ ID NO: 1578945 - DNA, 15 bp, Homo sapiens
aattgtgagtttcac

SEQ ID NO: 1578946 - DNA, 15 bp, Homo sapiens
taattgtgagtttca

SEQ ID NO: 1578947 - DNA, 15 bp, Homo sapiens
ataattgtgagtttc

SEQ ID NO: 1578948 - DNA, 15 bp, Homo sapiens
tataattgtgagttt

SEQ ID NO: 1578949 - DNA, 15 bp, Homo sapiens
ctataattgtgagtt

SEQ ID NO: 1578950 - DNA, 15 bp, Homo sapiens
tctataattgtgagt

SEQ ID NO: 1578951 - DNA, 15 bp, Homo sapiens
atctataattgtgag

SEQ ID NO: 1578952 - DNA, 15 bp, Homo sapiens
catctataattgtga

SEQ ID NO: 1578953 - DNA, 15 bp, Homo sapiens
tcatctataattgtg

SEQ ID NO: 1578954 - DNA, 15 bp, Homo sapiens
ttcatctataattgt

SEQ ID NO: 1578955 - DNA, 15 bp, Homo sapiens
cttcatctataattg

SEQ ID NO: 1578956 - DNA, 15 bp, Homo sapiens
tcttcatctataatt

SEQ ID NO: 1578957 - DNA, 15 bp, Homo sapiens
atcttcatctataat

SEQ ID NO: 1578958 - DNA, 15 bp, Homo sapiens
aatcttcatctataa

SEQ ID NO: 1578959 - DNA, 15 bp, Homo sapiens
aaatcttcatctata

SEQ ID NO: 1578960 - DNA, 15 bp, Homo sapiens
gaaatcttcatctat

SEQ ID NO: 1578961 - DNA, 15 bp, Homo sapiens
tgaaatcttcatcta

SEQ ID NO: 1578962 - DNA, 15 bp, Homo sapiens
ttgaaatcttcatct

SEQ ID NO: 1578963 - DNA, 15 bp, Homo sapiens
gttgaaatcttcatc

SEQ ID NO: 1578964 - DNA, 15 bp, Homo sapiens
tgttgaaatcttcat

SEQ ID NO: 1578965 - DNA, 15 bp, Homo sapiens
atgttgaaatcttca

SEQ ID NO: 1578966 - DNA, 15 bp, Homo sapiens
catgttgaaatcttc

SEQ ID NO: 1578967 - DNA, 15 bp, Homo sapiens
acatgttgaaatctt

SEQ ID NO: 1578968 - DNA, 15 bp, Homo sapiens
gacatgttgaaatct

SEQ ID NO: 1578969 - DNA, 15 bp, Homo sapiens
agacatgttgaaatc

SEQ ID NO: 1578970 - DNA, 15 bp, Homo sapiens
gagacatgttgaaat

SEQ ID NO: 1578971 - DNA, 15 bp, Homo sapiens
agagacatgttgaaa

SEQ ID NO: 1578972 - DNA, 15 bp, Homo sapiens
gagagacatgttgaa

SEQ ID NO: 1578973 - DNA, 15 bp, Homo sapiens
agagagacatgttga

SEQ ID NO: 1578974 - DNA, 15 bp, Homo sapiens
gagagagacatgttg

SEQ ID NO: 1578975 - DNA, 15 bp, Homo sapiens
tgagagagacatgtt

SEQ ID NO: 1578976 - DNA, 15 bp, Homo sapiens
ttgagagagacatgt

SEQ ID NO: 1578977 - DNA, 15 bp, Homo sapiens
attgagagagacatg

SEQ ID NO: 1578978 - DNA, 15 bp, Homo sapiens
tattgagagagacat

SEQ ID NO: 1578979 - DNA, 15 bp, Homo sapiens
ttattgagagagaca

SEQ ID NO: 1578980 - DNA, 15 bp, Homo sapiens
cttattgagagagac

SEQ ID NO: 1578981 - DNA, 15 bp, Homo sapiens
acttattgagagaga

SEQ ID NO: 1578982 - DNA, 15 bp, Homo sapiens
tacttattgagagag

SEQ ID NO: 1578983 - DNA, 15 bp, Homo sapiens
ctacttattgagaga

SEQ ID NO: 1578984 - DNA, 15 bp, Homo sapiens
tctacttattgagag

SEQ ID NO: 1578985 - DNA, 15 bp, Homo sapiens
gtctacttattgaga

SEQ ID NO: 1578986 - DNA, 15 bp, Homo sapiens
tgtctacttattgag

SEQ ID NO: 1578987 - DNA, 15 bp, Homo sapiens
ctgtctacttattga

SEQ ID NO: 1578988 - DNA, 15 bp, Homo sapiens
tctgtctacttattg

SEQ ID NO: 1578989 - DNA, 15 bp, Homo sapiens
ttctgtctacttatt

SEQ ID NO: 1578990 - DNA, 15 bp, Homo sapiens
attctgtctacttat

SEQ ID NO: 1578991 - DNA, 15 bp, Homo sapiens
tattctgtctactta

SEQ ID NO: 1578992 - DNA, 15 bp, Homo sapiens
ttattctgtctactt

SEQ ID NO: 1578993 - DNA, 15 bp, Homo sapiens
gttattctgtctact

SEQ ID NO: 1578994 - DNA, 15 bp, Homo sapiens
tgttattctgtctac

SEQ ID NO: 1578995 - DNA, 15 bp, Homo sapiens
ttgttattctgtcta

SEQ ID NO: 1578996 - DNA, 15 bp, Homo sapiens
cttgttattctgtct

SEQ ID NO: 1578997 - DNA, 15 bp, Homo sapiens
tcttgttattctgtc

SEQ ID NO: 1578998 - DNA, 15 bp, Homo sapiens
ttcttgttattctgt

SEQ ID NO: 1578999 - DNA, 15 bp, Homo sapiens
cttcttgttattctg

SEQ ID NO: 1579000 - DNA, 15 bp, Homo sapiens
ccttcttgttattct

SEQ ID NO: 1579001 - DNA, 15 bp, Homo sapiens
cccttcttgttattc

SEQ ID NO: 1579002 - DNA, 15 bp, Homo sapiens
gcccttcttgttatt

SEQ ID NO: 1579003 - DNA, 15 bp, Homo sapiens
tgcccttcttgttat

SEQ ID NO: 1579004 - DNA, 15 bp, Homo sapiens
atgcccttcttgtta

SEQ ID NO: 1579005 - DNA, 15 bp, Homo sapiens
catgcccttcttgtt

SEQ ID NO: 1579006 - DNA, 15 bp, Homo sapiens
ccatgcccttcttgt

SEQ ID NO: 1579007 - DNA, 15 bp, Homo sapiens
tccatgcccttcttg

SEQ ID NO: 1579008 - DNA, 15 bp, Homo sapiens
ttccatgcccttctt

SEQ ID NO: 1579009 - DNA, 15 bp, Homo sapiens
cttccatgcccttct

SEQ ID NO: 1579010 - DNA, 15 bp, Homo sapiens
tcttccatgcccttc

SEQ ID NO: 1579011 - DNA, 15 bp, Homo sapiens
gtcttccatgccctt

SEQ ID NO: 1579012 - DNA, 15 bp, Homo sapiens
agtcttccatgccct

SEQ ID NO: 1579013 - DNA, 15 bp, Homo sapiens
aagtcttccatgccc

SEQ ID NO: 1579014 - DNA, 15 bp, Homo sapiens
caagtcttccatgcc

SEQ ID NO: 1579015 - DNA, 15 bp, Homo sapiens
tcaagtcttccatgc

SEQ ID NO: 1579016 - DNA, 15 bp, Homo sapiens
ttcaagtcttccatg

SEQ ID NO: 1579017 - DNA, 15 bp, Homo sapiens
attcaagtcttccat

SEQ ID NO: 1579018 - DNA, 15 bp, Homo sapiens
tattcaagtcttcca

SEQ ID NO: 1579019 - DNA, 15 bp, Homo sapiens
ttattcaagtcttcc

SEQ ID NO: 1579020 - DNA, 15 bp, Homo sapiens
gttattcaagtcttc

SEQ ID NO: 1579021 - DNA, 15 bp, Homo sapiens
tgttattcaagtctt

SEQ ID NO: 1579022 - DNA, 15 bp, Homo sapiens
gtgttattcaagtct

SEQ ID NO: 1579023 - DNA, 15 bp, Homo sapiens
agtgttattcaagtc

SEQ ID NO: 1579024 - DNA, 15 bp, Homo sapiens
tagtgttattcaagt

SEQ ID NO: 1579025 - DNA, 15 bp, Homo sapiens
atagtgttattcaag

SEQ ID NO: 1579026 - DNA, 15 bp, Homo sapiens
catagtgttattcaa

SEQ ID NO: 1579027 - DNA, 15 bp, Homo sapiens
ccatagtgttattca

SEQ ID NO: 1579028 - DNA, 15 bp, Homo sapiens
tccatagtgttattc

SEQ ID NO: 1579029 - DNA, 15 bp, Homo sapiens
ttccatagtgttatt

SEQ ID NO: 1579030 - DNA, 15 bp, Homo sapiens
gttccatagtgttat

SEQ ID NO: 1579031 - DNA, 15 bp, Homo sapiens
tgttccatagtgtta

SEQ ID NO: 1579032 - DNA, 15 bp, Homo sapiens
ttgttccatagtgtt

SEQ ID NO: 1579033 - DNA, 15 bp, Homo sapiens
cttgttccatagtgt

SEQ ID NO: 1579034 - DNA, 15 bp, Homo sapiens
acttgttccatagtg

SEQ ID NO: 1579035 - DNA, 15 bp, Homo sapiens
aacttgttccatagt

SEQ ID NO: 1579036 - DNA, 15 bp, Homo sapiens
caacttgttccatag

SEQ ID NO: 1579037 - DNA, 15 bp, Homo sapiens
tcaacttgttccata

SEQ ID NO: 1579038 - DNA, 15 bp, Homo sapiens
gtcaacttgttccat

SEQ ID NO: 1579039 - DNA, 15 bp, Homo sapiens
ggtcaacttgttcca

SEQ ID NO: 1579040 - DNA, 15 bp, Homo sapiens
cggtcaacttgttcc

SEQ ID NO: 1579041 - DNA, 15 bp, Homo sapiens
tcggtcaacttgttc

SEQ ID NO: 1579042 - DNA, 15 bp, Homo sapiens
ttcggtcaacttgtt

SEQ ID NO: 1579043 - DNA, 15 bp, Homo sapiens
attcggtcaacttgt

SEQ ID NO: 1579044 - DNA, 15 bp, Homo sapiens
aattcggtcaacttg

SEQ ID NO: 1579045 - DNA, 15 bp, Homo sapiens
caattcggtcaactt

SEQ ID NO: 1579046 - DNA, 15 bp, Homo sapiens
tcaattcggtcaact

SEQ ID NO: 1579047 - DNA, 15 bp, Homo sapiens
gtcaattcggtcaac

SEQ ID NO: 1579048 - DNA, 15 bp, Homo sapiens
tgtcaattcggtcaa

SEQ ID NO: 1579049 - DNA, 15 bp, Homo sapiens
atgtcaattcggtca

SEQ ID NO: 1579050 - DNA, 15 bp, Homo sapiens
aatgtcaattcggtc

SEQ ID NO: 1579051 - DNA, 15 bp, Homo sapiens
aaatgtcaattcggt

SEQ ID NO: 1579052 - DNA, 15 bp, Homo sapiens
taaatgtcaattcgg

SEQ ID NO: 1579053 - DNA, 15 bp, Homo sapiens
ataaatgtcaattcg

SEQ ID NO: 1579054 - DNA, 15 bp, Homo sapiens
tataaatgtcaattc

SEQ ID NO: 1579055 - DNA, 15 bp, Homo sapiens
gtataaatgtcaatt

SEQ ID NO: 1579056 - DNA, 15 bp, Homo sapiens
tgtataaatgtcaat

SEQ ID NO: 1579057 - DNA, 15 bp, Homo sapiens
gtgtataaatgtcaa

SEQ ID NO: 1579058 - DNA, 15 bp, Homo sapiens
tgtgtataaatgtca

SEQ ID NO: 1579059 - DNA, 15 bp, Homo sapiens
gtgtgtataaatgtc

SEQ ID NO: 1579060 - DNA, 15 bp, Homo sapiens
agtgtgtataaatgt

SEQ ID NO: 1579061 - DNA, 15 bp, Homo sapiens
gagtgtgtataaatg

SEQ ID NO: 1579062 - DNA, 15 bp, Homo sapiens
ggagtgtgtataaat

SEQ ID NO: 1579063 - DNA, 15 bp, Homo sapiens
tggagtgtgtataaa

SEQ ID NO: 1579064 - DNA, 15 bp, Homo sapiens
gtggagtgtgtataa

SEQ ID NO: 1579065 - DNA, 15 bp, Homo sapiens
agtggagtgtgtata

SEQ ID NO: 1579066 - DNA, 15 bp, Homo sapiens
gagtggagtgtgtat

SEQ ID NO: 1579067 - DNA, 15 bp, Homo sapiens
tgagtggagtgtgta

SEQ ID NO: 1579068 - DNA, 15 bp, Homo sapiens
ttgagtggagtgtgt

SEQ ID NO: 1579069 - DNA, 15 bp, Homo sapiens
gttgagtggagtgtg

SEQ ID NO: 1579070 - DNA, 15 bp, Homo sapiens
tgttgagtggagtgt

SEQ ID NO: 1579071 - DNA, 15 bp, Homo sapiens
ttgttgagtggagtg

SEQ ID NO: 1579072 - DNA, 15 bp, Homo sapiens
gttgttgagtggagt

SEQ ID NO: 1579073 - DNA, 15 bp, Homo sapiens
tgttgttgagtggag

SEQ ID NO: 1579074 - DNA, 15 bp, Homo sapiens
ctgttgttgagtgga

SEQ ID NO: 1579075 - DNA, 15 bp, Homo sapiens
gctgttgttgagtgg

SEQ ID NO: 1579076 - DNA, 15 bp, Homo sapiens
tgctgttgttgagtg

SEQ ID NO: 1579077 - DNA, 15 bp, Homo sapiens
ctgctgttgttgagt

SEQ ID NO: 1579078 - DNA, 15 bp, Homo sapiens
tctgctgttgttgag

SEQ ID NO: 1579079 - DNA, 15 bp, Homo sapiens
ctctgctgttgttga

SEQ ID NO: 1579080 - DNA, 15 bp, Homo sapiens
gctctgctgttgttg

SEQ ID NO: 1579081 - DNA, 15 bp, Homo sapiens
tgctctgctgttgtt

SEQ ID NO: 1579082 - DNA, 15 bp, Homo sapiens
ttgctctgctgttgt

SEQ ID NO: 1579083 - DNA, 15 bp, Homo sapiens
cttgctctgctgttg

SEQ ID NO: 1579084 - DNA, 15 bp, Homo sapiens
gcttgctctgctgtt

SEQ ID NO: 1579085 - DNA, 15 bp, Homo sapiens
tgcttgctctgctgt

SEQ ID NO: 1579086 - DNA, 15 bp, Homo sapiens
atgcttgctctgctg

SEQ ID NO: 1579087 - DNA, 15 bp, Homo sapiens
aatgcttgctctgct

SEQ ID NO: 1579088 - DNA, 15 bp, Homo sapiens
gaatgcttgctctgc

SEQ ID NO: 1579089 - DNA, 15 bp, Homo sapiens
ggaatgcttgctctg

SEQ ID NO: 1579090 - DNA, 15 bp, Homo sapiens
aggaatgcttgctct

SEQ ID NO: 1579091 - DNA, 15 bp, Homo sapiens
aaggaatgcttgctc

SEQ ID NO: 1579092 - DNA, 15 bp, Homo sapiens
aaaggaatgcttgct

SEQ ID NO: 1579093 - DNA, 15 bp, Homo sapiens
gaaaggaatgcttgc

SEQ ID NO: 1579094 - DNA, 15 bp, Homo sapiens
tgaaaggaatgcttg

SEQ ID NO: 1579095 - DNA, 15 bp, Homo sapiens
ttgaaaggaatgctt

SEQ ID NO: 1579096 - DNA, 15 bp, Homo sapiens
tttgaaaggaatgct

SEQ ID NO: 1579097 - DNA, 15 bp, Homo sapiens
atttgaaaggaatgc

SEQ ID NO: 1579098 - DNA, 15 bp, Homo sapiens
catttgaaaggaatg

SEQ ID NO: 1579099 - DNA, 15 bp, Homo sapiens
acatttgaaaggaat

SEQ ID NO: 1579100 - DNA, 15 bp, Homo sapiens
cacatttgaaaggaa

SEQ ID NO: 1579101 - DNA, 15 bp, Homo sapiens
gcacatttgaaagga

SEQ ID NO: 1579102 - DNA, 15 bp, Homo sapiens
tgcacatttgaaagg

SEQ ID NO: 1579103 - DNA, 15 bp, Homo sapiens
atgcacatttgaaag

SEQ ID NO: 1579104 - DNA, 15 bp, Homo sapiens
tatgcacatttgaaa

SEQ ID NO: 1579105 - DNA, 15 bp, Homo sapiens
atatgcacatttgaa

SEQ ID NO: 1579106 - DNA, 15 bp, Homo sapiens
tatatgcacatttga

SEQ ID NO: 1579107 - DNA, 15 bp, Homo sapiens
gtatatgcacatttg

SEQ ID NO: 1579108 - DNA, 15 bp, Homo sapiens
tgtatatgcacattt

SEQ ID NO: 1579109 - DNA, 15 bp, Homo sapiens
atgtatatgcacatt

SEQ ID NO: 1579110 - DNA, 15 bp, Homo sapiens
gatgtatatgcacat

SEQ ID NO: 1579111 - DNA, 15 bp, Homo sapiens
ggatgtatatgcaca

SEQ ID NO: 1579112 - DNA, 15 bp, Homo sapiens
tggatgtatatgcac

SEQ ID NO: 1579113 - DNA, 15 bp, Homo sapiens
gtggatgtatatgca

SEQ ID NO: 1579114 - DNA, 15 bp, Homo sapiens
ggtggatgtatatgc

SEQ ID NO: 1579115 - DNA, 15 bp, Homo sapiens
tggtggatgtatatg

SEQ ID NO: 1579116 - DNA, 15 bp, Homo sapiens
ttggtggatgtatat

SEQ ID NO: 1579117 - DNA, 15 bp, Homo sapiens
cttggtggatgtata

SEQ ID NO: 1579118 - DNA, 15 bp, Homo sapiens
tcttggtggatgtat

SEQ ID NO: 1579119 - DNA, 15 bp, Homo sapiens
gtcttggtggatgta

SEQ ID NO: 1579120 - DNA, 15 bp, Homo sapiens
tgtcttggtggatgt

SEQ ID NO: 1579121 - DNA, 15 bp, Homo sapiens
ctgtcttggtggatg

SEQ ID NO: 1579122 - DNA, 15 bp, Homo sapiens
tctgtcttggtggat

SEQ ID NO: 1579123 - DNA, 15 bp, Homo sapiens
atctgtcttggtgga

SEQ ID NO: 1579124 - DNA, 15 bp, Homo sapiens
gatctgtcttggtgg

SEQ ID NO: 1579125 - DNA, 15 bp, Homo sapiens
tgatctgtcttggtg

SEQ ID NO: 1579126 - DNA, 15 bp, Homo sapiens
atgatctgtcttggt

SEQ ID NO: 1579127 - DNA, 15 bp, Homo sapiens
aatgatctgtcttgg

SEQ ID NO: 1579128 - DNA, 15 bp, Homo sapiens
aaatgatctgtcttg

SEQ ID NO: 1579129 - DNA, 15 bp, Homo sapiens
aaaatgatctgtctt

SEQ ID NO: 1579130 - DNA, 15 bp, Homo sapiens
gaaaatgatctgtct

SEQ ID NO: 1579131 - DNA, 15 bp, Homo sapiens
agaaaatgatctgtc

SEQ ID NO: 1579132 - DNA, 15 bp, Homo sapiens
cagaaaatgatctgt

SEQ ID NO: 1579133 - DNA, 15 bp, Homo sapiens
ccagaaaatgatctg

SEQ ID NO: 1579134 - DNA, 15 bp, Homo sapiens
cccagaaaatgatct

SEQ ID NO: 1579135 - DNA, 15 bp, Homo sapiens
gcccagaaaatgatc

SEQ ID NO: 1579136 - DNA, 15 bp, Homo sapiens
ggcccagaaaatgat

SEQ ID NO: 1579137 - DNA, 15 bp, Homo sapiens
tggcccagaaaatga

SEQ ID NO: 1579138 - DNA, 15 bp, Homo sapiens
atggcccagaaaatg

SEQ ID NO: 1579139 - DNA, 15 bp, Homo sapiens
aatggcccagaaaat

SEQ ID NO: 1579140 - DNA, 15 bp, Homo sapiens
taatggcccagaaaa

SEQ ID NO: 1579141 - DNA, 15 bp, Homo sapiens
ttaatggcccagaaa

SEQ ID NO: 1579142 - DNA, 15 bp, Homo sapiens
tttaatggcccagaa

SEQ ID NO: 1579143 - DNA, 15 bp, Homo sapiens
gtttaatggcccaga

SEQ ID NO: 1579144 - DNA, 15 bp, Homo sapiens
tgtttaatggcccag

SEQ ID NO: 1579145 - DNA, 15 bp, Homo sapiens
ttgtttaatggccca

SEQ ID NO: 1579146 - DNA, 15 bp, Homo sapiens
cttgtttaatggccc

SEQ ID NO: 1579147 - DNA, 15 bp, Homo sapiens
gcttgtttaatggcc

SEQ ID NO: 1579148 - DNA, 15 bp, Homo sapiens
ggcttgtttaatggc

SEQ ID NO: 1579149 - DNA, 15 bp, Homo sapiens
aggcttgtttaatgg

SEQ ID NO: 1579150 - DNA, 15 bp, Homo sapiens
gaggcttgtttaatg

SEQ ID NO: 1579151 - DNA, 15 bp, Homo sapiens
tgaggcttgtttaat

SEQ ID NO: 1579152 - DNA, 15 bp, Homo sapiens
ttgaggcttgtttaa

SEQ ID NO: 1579153 - DNA, 15 bp, Homo sapiens
attgaggcttgttta

SEQ ID NO: 1579154 - DNA, 15 bp, Homo sapiens
tattgaggcttgttt

SEQ ID NO: 1579155 - DNA, 15 bp, Homo sapiens
ttattgaggcttgtt

SEQ ID NO: 1579156 - DNA, 15 bp, Homo sapiens
tttattgaggcttgt

SEQ ID NO: 1579157 - DNA, 15 bp, Homo sapiens
atttattgaggcttg

SEQ ID NO: 1579158 - DNA, 15 bp, Homo sapiens
aatttattgaggctt

SEQ ID NO: 1579159 - DNA, 15 bp, Homo sapiens
aaatttattgaggct

SEQ ID NO: 1579160 - DNA, 15 bp, Homo sapiens
caaatttattgaggc

SEQ ID NO: 1579161 - DNA, 15 bp, Homo sapiens
tcaaatttattgagg

SEQ ID NO: 1579162 - DNA, 15 bp, Homo sapiens
ttcaaatttattgag

SEQ ID NO: 1579163 - DNA, 15 bp, Homo sapiens
tttcaaatttattga

SEQ ID NO: 1579164 - DNA, 15 bp, Homo sapiens
ctttcaaatttattg

SEQ ID NO: 1579165 - DNA, 15 bp, Homo sapiens
cctttcaaatttatt

SEQ ID NO: 1579166 - DNA, 15 bp, Homo sapiens
tcctttcaaatttat

SEQ ID NO: 1579167 - DNA, 15 bp, Homo sapiens
atcctttcaaattta

SEQ ID NO: 1579168 - DNA, 15 bp, Homo sapiens
aatcctttcaaattt

SEQ ID NO: 1579169 - DNA, 15 bp, Homo sapiens
gaatcctttcaaatt

SEQ ID NO: 1579170 - DNA, 15 bp, Homo sapiens
ggaatcctttcaaat

SEQ ID NO: 1579171 - DNA, 15 bp, Homo sapiens
aggaatcctttcaaa

SEQ ID NO: 1579172 - DNA, 15 bp, Homo sapiens
caggaatcctttcaa

SEQ ID NO: 1579173 - DNA, 15 bp, Homo sapiens
acaggaatcctttca

SEQ ID NO: 1579174 - DNA, 15 bp, Homo sapiens
gacaggaatcctttc

SEQ ID NO: 1579175 - DNA, 15 bp, Homo sapiens
tgacaggaatccttt

SEQ ID NO: 1579176 - DNA, 15 bp, Homo sapiens
atgacaggaatcctt

SEQ ID NO: 1579177 - DNA, 15 bp, Homo sapiens
tatgacaggaatcct

SEQ ID NO: 1579178 - DNA, 15 bp, Homo sapiens
gtatgacaggaatcc

SEQ ID NO: 1579179 - DNA, 15 bp, Homo sapiens
ggtatgacaggaatc

SEQ ID NO: 1579180 - DNA, 15 bp, Homo sapiens
tggtatgacaggaat

SEQ ID NO: 1579181 - DNA, 15 bp, Homo sapiens
ttggtatgacaggaa

SEQ ID NO: 1579182 - DNA, 15 bp, Homo sapiens
cttggtatgacagga

SEQ ID NO: 1579183 - DNA, 15 bp, Homo sapiens
acttggtatgacagg

SEQ ID NO: 1579184 - DNA, 15 bp, Homo sapiens
tacttggtatgacag

SEQ ID NO: 1579185 - DNA, 15 bp, Homo sapiens
gtacttggtatgaca

SEQ ID NO: 1579186 - DNA, 15 bp, Homo sapiens
ggtacttggtatgac

SEQ ID NO: 1579187 - DNA, 15 bp, Homo sapiens
aggtacttggtatga

SEQ ID NO: 1579188 - DNA, 15 bp, Homo sapiens
aaggtacttggtatg

SEQ ID NO: 1579189 - DNA, 15 bp, Homo sapiens
caaggtacttggtat

SEQ ID NO: 1579190 - DNA, 15 bp, Homo sapiens
tcaaggtacttggta

SEQ ID NO: 1579191 - DNA, 15 bp, Homo sapiens
atcaaggtacttggt

SEQ ID NO: 1579192 - DNA, 15 bp, Homo sapiens
gatcaaggtacttgg

SEQ ID NO: 1579193 - DNA, 15 bp, Homo sapiens
tgatcaaggtacttg

SEQ ID NO: 1579194 - DNA, 15 bp, Homo sapiens
gtgatcaaggtactt

SEQ ID NO: 1579195 - DNA, 15 bp, Homo sapiens
tgtgatcaaggtact

SEQ ID NO: 1579196 - DNA, 15 bp, Homo sapiens
ttgtgatcaaggtac

SEQ ID NO: 1579197 - DNA, 15 bp, Homo sapiens
gttgtgatcaaggta

SEQ ID NO: 1579198 - DNA, 15 bp, Homo sapiens
tgttgtgatcaaggt

SEQ ID NO: 1579199 - DNA, 15 bp, Homo sapiens
ctgttgtgatcaagg

SEQ ID NO: 1579200 - DNA, 15 bp, Homo sapiens
tctgttgtgatcaag

SEQ ID NO: 1579201 - DNA, 15 bp, Homo sapiens
ttctgttgtgatcaa

SEQ ID NO: 1579202 - DNA, 15 bp, Homo sapiens
attctgttgtgatca

SEQ ID NO: 1579203 - DNA, 15 bp, Homo sapiens
gattctgttgtgatc

SEQ ID NO: 1579204 - DNA, 15 bp, Homo sapiens
tgattctgttgtgat

SEQ ID NO: 1579205 - DNA, 15 bp, Homo sapiens
ttgattctgttgtga

SEQ ID NO: 1579206 - DNA, 15 bp, Homo sapiens
tttgattctgttgtg

SEQ ID NO: 1579207 - DNA, 15 bp, Homo sapiens
atttgattctgttgt

SEQ ID NO: 1579208 - DNA, 15 bp, Homo sapiens
aatttgattctgttg

SEQ ID NO: 1579209 - DNA, 15 bp, Homo sapiens
taatttgattctgtt

SEQ ID NO: 1579210 - DNA, 15 bp, Homo sapiens
ctaatttgattctgt

SEQ ID NO: 1579211 - DNA, 15 bp, Homo sapiens
gctaatttgattctg

SEQ ID NO: 1579212 - DNA, 15 bp, Homo sapiens
tgctaatttgattct

SEQ ID NO: 1579213 - DNA, 15 bp, Homo sapiens
ttgctaatttgattc

SEQ ID NO: 1579214 - DNA, 15 bp, Homo sapiens
gttgctaatttgatt

SEQ ID NO: 1579215 - DNA, 15 bp, Homo sapiens
ggttgctaatttgat

SEQ ID NO: 1579216 - DNA, 15 bp, Homo sapiens
tggttgctaatttga

SEQ ID NO: 1579217 - DNA, 15 bp, Homo sapiens
ttggttgctaatttg

SEQ ID NO: 1579218 - DNA, 15 bp, Homo sapiens
attggttgctaattt

SEQ ID NO: 1579219 - DNA, 15 bp, Homo sapiens
tattggttgctaatt

SEQ ID NO: 1579220 - DNA, 15 bp, Homo sapiens
ctattggttgctaat

SEQ ID NO: 1579221 - DNA, 15 bp, Homo sapiens
gctattggttgctaa

SEQ ID NO: 1579222 - DNA, 15 bp, Homo sapiens
tgctattggttgcta

SEQ ID NO: 1579223 - DNA, 15 bp, Homo sapiens
ctgctattggttgct

SEQ ID NO: 1579224 - DNA, 15 bp, Homo sapiens
gctgctattggttgc

SEQ ID NO: 1579225 - DNA, 15 bp, Homo sapiens
tgctgctattggttg

SEQ ID NO: 1579226 - DNA, 15 bp, Homo sapiens
ttgctgctattggtt

SEQ ID NO: 1579227 - DNA, 15 bp, Homo sapiens
cttgctgctattggt

SEQ ID NO: 1579228 - DNA, 15 bp, Homo sapiens
tcttgctgctattgg

SEQ ID NO: 1579229 - DNA, 15 bp, Homo sapiens
atcttgctgctattg

SEQ ID NO: 1579230 - DNA, 15 bp, Homo sapiens
gatcttgctgctatt

SEQ ID NO: 1579231 - DNA, 15 bp, Homo sapiens
agatcttgctgctat

SEQ ID NO: 1579232 - DNA, 15 bp, Homo sapiens
gagatcttgctgcta

SEQ ID NO: 1579233 - DNA, 15 bp, Homo sapiens
agagatcttgctgct

SEQ ID NO: 1579234 - DNA, 15 bp, Homo sapiens
tagagatcttgctgc

SEQ ID NO: 1579235 - DNA, 15 bp, Homo sapiens
ctagagatcttgctg

SEQ ID NO: 1579236 - DNA, 15 bp, Homo sapiens
tctagagatcttgct

SEQ ID NO: 1579237 - DNA, 15 bp, Homo sapiens
ttctagagatcttgc

SEQ ID NO: 1579238 - DNA, 15 bp, Homo sapiens
tttctagagatcttg

SEQ ID NO: 1579239 - DNA, 15 bp, Homo sapiens
ttttctagagatctt

SEQ ID NO: 1579240 - DNA, 15 bp, Homo sapiens
gttttctagagatct

SEQ ID NO: 1579241 - DNA, 15 bp, Homo sapiens
ggttttctagagatc

SEQ ID NO: 1579242 - DNA, 15 bp, Homo sapiens
tggttttctagagat

SEQ ID NO: 1579243 - DNA, 15 bp, Homo sapiens
gtggttttctagaga

SEQ ID NO: 1579244 - DNA, 15 bp, Homo sapiens
ggtggttttctagag

SEQ ID NO: 1579245 - DNA, 15 bp, Homo sapiens
tggtggttttctaga

SEQ ID NO: 1579246 - DNA, 15 bp, Homo sapiens
atggtggttttctag

SEQ ID NO: 1579247 - DNA, 15 bp, Homo sapiens
aatggtggttttcta

SEQ ID NO: 1579248 - DNA, 15 bp, Homo sapiens
aaatggtggttttct

SEQ ID NO: 1579249 - DNA, 15 bp, Homo sapiens
taaatggtggttttc

SEQ ID NO: 1579250 - DNA, 15 bp, Homo sapiens
ctaaatggtggtttt

SEQ ID NO: 1579251 - DNA, 15 bp, Homo sapiens
tctaaatggtggttt

SEQ ID NO: 1579252 - DNA, 15 bp, Homo sapiens
ttctaaatggtggtt

SEQ ID NO: 1579253 - DNA, 15 bp, Homo sapiens
tttctaaatggtggt

SEQ ID NO: 1579254 - DNA, 15 bp, Homo sapiens
atttctaaatggtgg

SEQ ID NO: 1579255 - DNA, 15 bp, Homo sapiens
aatttctaaatggtg

SEQ ID NO: 1579256 - DNA, 15 bp, Homo sapiens
taatttctaaatggt

SEQ ID NO: 1579257 - DNA, 15 bp, Homo sapiens
ttaatttctaaatgg

SEQ ID NO: 1579258 - DNA, 15 bp, Homo sapiens
tttaatttctaaatg

SEQ ID NO: 1579259 - DNA, 15 bp, Homo sapiens
ctttaatttctaaat

SEQ ID NO: 1579260 - DNA, 15 bp, Homo sapiens
tctttaatttctaaa

SEQ ID NO: 1579261 - DNA, 15 bp, Homo sapiens
ttctttaatttctaa

SEQ ID NO: 1579262 - DNA, 15 bp, Homo sapiens
gttctttaatttcta

SEQ ID NO: 1579263 - DNA, 15 bp, Homo sapiens
tgttctttaatttct

SEQ ID NO: 1579264 - DNA, 15 bp, Homo sapiens
atgttctttaatttc

SEQ ID NO: 1579265 - DNA, 15 bp, Homo sapiens
tatgttctttaattt

SEQ ID NO: 1579266 - DNA, 15 bp, Homo sapiens
ttatgttctttaatt

SEQ ID NO: 1579267 - DNA, 15 bp, Homo sapiens
cttatgttctttaat

SEQ ID NO: 1579268 - DNA, 15 bp, Homo sapiens
acttatgttctttaa

SEQ ID NO: 1579269 - DNA, 15 bp, Homo sapiens
gacttatgttcttta

SEQ ID NO: 1579270 - DNA, 15 bp, Homo sapiens
agacttatgttcttt

SEQ ID NO: 1579271 - DNA, 15 bp, Homo sapiens
gagacttatgttctt

SEQ ID NO: 1579272 - DNA, 15 bp, Homo sapiens
agagacttatgttct

SEQ ID NO: 1579273 - DNA, 15 bp, Homo sapiens
tagagacttatgttc

SEQ ID NO: 1579274 - DNA, 15 bp, Homo sapiens
atagagacttatgtt

SEQ ID NO: 1579275 - DNA, 15 bp, Homo sapiens
tatagagacttatgt

SEQ ID NO: 1579276 - DNA, 15 bp, Homo sapiens
ttatagagacttatg

SEQ ID NO: 1579277 - DNA, 15 bp, Homo sapiens
gttatagagacttat

SEQ ID NO: 1579278 - DNA, 15 bp, Homo sapiens
agttatagagactta

SEQ ID NO: 1579279 - DNA, 15 bp, Homo sapiens
gagttatagagactt

SEQ ID NO: 1579280 - DNA, 15 bp, Homo sapiens
tgagttatagagact

SEQ ID NO: 1579281 - DNA, 15 bp, Homo sapiens
ttgagttatagagac

SEQ ID NO: 1579282 - DNA, 15 bp, Homo sapiens
cttgagttatagaga

SEQ ID NO: 1579283 - DNA, 15 bp, Homo sapiens
tcttgagttatagag

SEQ ID NO: 1579284 - DNA, 15 bp, Homo sapiens
ctcttgagttataga

SEQ ID NO: 1579285 - DNA, 15 bp, Homo sapiens
actcttgagttatag

SEQ ID NO: 1579286 - DNA, 15 bp, Homo sapiens
gactcttgagttata

SEQ ID NO: 1579287 - DNA, 15 bp, Homo sapiens
tgactcttgagttat

SEQ ID NO: 1579288 - DNA, 15 bp, Homo sapiens
ttgactcttgagtta

SEQ ID NO: 1579289 - DNA, 15 bp, Homo sapiens
tttgactcttgagtt

SEQ ID NO: 1579290 - DNA, 15 bp, Homo sapiens
ctttgactcttgagt

SEQ ID NO: 1579291 - DNA, 15 bp, Homo sapiens
tctttgactcttgag

SEQ ID NO: 1579292 - DNA, 15 bp, Homo sapiens
ttctttgactcttga

SEQ ID NO: 1579293 - DNA, 15 bp, Homo sapiens
cttctttgactcttg

SEQ ID NO: 1579294 - DNA, 15 bp, Homo sapiens
ccttctttgactctt

SEQ ID NO: 1579295 - DNA, 15 bp, Homo sapiens
gccttctttgactct

SEQ ID NO: 1579296 - DNA, 15 bp, Homo sapiens
tgccttctttgactc

SEQ ID NO: 1579297 - DNA, 15 bp, Homo sapiens
atgccttctttgact

SEQ ID NO: 1579298 - DNA, 15 bp, Homo sapiens
gatgccttctttgac

SEQ ID NO: 1579299 - DNA, 15 bp, Homo sapiens
tgatgccttctttga

SEQ ID NO: 1579300 - DNA, 15 bp, Homo sapiens
ttgatgccttctttg

SEQ ID NO: 1579301 - DNA, 15 bp, Homo sapiens
tttgatgccttcttt

SEQ ID NO: 1579302 - DNA, 15 bp, Homo sapiens
ttttgatgccttctt

SEQ ID NO: 1579303 - DNA, 15 bp, Homo sapiens
cttttgatgccttct

SEQ ID NO: 1579304 - DNA, 15 bp, Homo sapiens
ccttttgatgccttc

SEQ ID NO: 1579305 - DNA, 15 bp, Homo sapiens
cccttttgatgcctt

SEQ ID NO: 1579306 - DNA, 15 bp, Homo sapiens
ccccttttgatgcct

SEQ ID NO: 1579307 - DNA, 15 bp, Homo sapiens
tccccttttgatgcc

SEQ ID NO: 1579308 - DNA, 15 bp, Homo sapiens
ttccccttttgatgc

SEQ ID NO: 1579309 - DNA, 15 bp, Homo sapiens
attccccttttgatg

SEQ ID NO: 1579310 - DNA, 15 bp, Homo sapiens
aattccccttttgat

SEQ ID NO: 1579311 - DNA, 15 bp, Homo sapiens
aaattccccttttga

SEQ ID NO: 1579312 - DNA, 15 bp, Homo sapiens
caaattccccttttg

SEQ ID NO: 1579313 - DNA, 15 bp, Homo sapiens
tcaaattcccctttt

SEQ ID NO: 1579314 - DNA, 15 bp, Homo sapiens
ttcaaattccccttt

SEQ ID NO: 1579315 - DNA, 15 bp, Homo sapiens
gttcaaattcccctt

SEQ ID NO: 1579316 - DNA, 15 bp, Homo sapiens
tgttcaaattcccct

SEQ ID NO: 1579317 - DNA, 15 bp, Homo sapiens
atgttcaaattcccc

SEQ ID NO: 1579318 - DNA, 15 bp, Homo sapiens
catgttcaaattccc

SEQ ID NO: 1579319 - DNA, 15 bp, Homo sapiens
acatgttcaaattcc

SEQ ID NO: 1579320 - DNA, 15 bp, Homo sapiens
aacatgttcaaattc

SEQ ID NO: 1579321 - DNA, 15 bp, Homo sapiens
aaacatgttcaaatt

SEQ ID NO: 1579322 - DNA, 15 bp, Homo sapiens
aaaacatgttcaaat

SEQ ID NO: 1579323 - DNA, 15 bp, Homo sapiens
gaaaacatgttcaaa

SEQ ID NO: 1579324 - DNA, 15 bp, Homo sapiens
tgaaaacatgttcaa

SEQ ID NO: 1579325 - DNA, 15 bp, Homo sapiens
gtgaaaacatgttca

SEQ ID NO: 1579326 - DNA, 15 bp, Homo sapiens
agtgaaaacatgttc

SEQ ID NO: 1579327 - DNA, 15 bp, Homo sapiens
cagtgaaaacatgtt

SEQ ID NO: 1579328 - DNA, 15 bp, Homo sapiens
tcagtgaaaacatgt

SEQ ID NO: 1579329 - DNA, 15 bp, Homo sapiens
gtcagtgaaaacatg

SEQ ID NO: 1579330 - DNA, 15 bp, Homo sapiens
agtcagtgaaaacat

SEQ ID NO: 1579331 - DNA, 15 bp, Homo sapiens
aagtcagtgaaaaca

SEQ ID NO: 1579332 - DNA, 15 bp, Homo sapiens
caagtcagtgaaaac

SEQ ID NO: 1579333 - DNA, 15 bp, Homo sapiens
tcaagtcagtgaaaa

SEQ ID NO: 1579334 - DNA, 15 bp, Homo sapiens
ttcaagtcagtgaaa

SEQ ID NO: 1579335 - DNA, 15 bp, Homo sapiens
tttcaagtcagtgaa

SEQ ID NO: 1579336 - DNA, 15 bp, Homo sapiens
ttttcaagtcagtga

SEQ ID NO: 1579337 - DNA, 15 bp, Homo sapiens
attttcaagtcagtg

SEQ ID NO: 1579338 - DNA, 15 bp, Homo sapiens
cattttcaagtcagt

SEQ ID NO: 1579339 - DNA, 15 bp, Homo sapiens
tcattttcaagtcag

SEQ ID NO: 1579340 - DNA, 15 bp, Homo sapiens
ttcattttcaagtca

SEQ ID NO: 1579341 - DNA, 15 bp, Homo sapiens
tttcattttcaagtc

SEQ ID NO: 1579342 - DNA, 15 bp, Homo sapiens
gtttcattttcaagt

SEQ ID NO: 1579343 - DNA, 15 bp, Homo sapiens
agtttcattttcaag

SEQ ID NO: 1579344 - DNA, 15 bp, Homo sapiens
cagtttcattttcaa

SEQ ID NO: 1579345 - DNA, 15 bp, Homo sapiens
tcagtttcattttca

SEQ ID NO: 1579346 - DNA, 15 bp, Homo sapiens
ttcagtttcattttc

SEQ ID NO: 1579347 - DNA, 15 bp, Homo sapiens
tttcagtttcatttt

SEQ ID NO: 1579348 - DNA, 15 bp, Homo sapiens
ttttcagtttcattt

SEQ ID NO: 1579349 - DNA, 15 bp, Homo sapiens
gttttcagtttcatt

SEQ ID NO: 1579350 - DNA, 15 bp, Homo sapiens
tgttttcagtttcat

SEQ ID NO: 1579351 - DNA, 15 bp, Homo sapiens
atgttttcagtttca

SEQ ID NO: 1579352 - DNA, 15 bp, Homo sapiens
tatgttttcagtttc

SEQ ID NO: 1579353 - DNA, 15 bp, Homo sapiens
ttatgttttcagttt

SEQ ID NO: 1579354 - DNA, 15 bp, Homo sapiens
gttatgttttcagtt

SEQ ID NO: 1579355 - DNA, 15 bp, Homo sapiens
ggttatgttttcagt

SEQ ID NO: 1579356 - DNA, 15 bp, Homo sapiens
aggttatgttttcag

SEQ ID NO: 1579357 - DNA, 15 bp, Homo sapiens
taggttatgttttca

SEQ ID NO: 1579358 - DNA, 15 bp, Homo sapiens
ataggttatgttttc

SEQ ID NO: 1579359 - DNA, 15 bp, Homo sapiens
tataggttatgtttt

SEQ ID NO: 1579360 - DNA, 15 bp, Homo sapiens
ttataggttatgttt

SEQ ID NO: 1579361 - DNA, 15 bp, Homo sapiens
tttataggttatgtt

SEQ ID NO: 1579362 - DNA, 15 bp, Homo sapiens
ttttataggttatgt

SEQ ID NO: 1579363 - DNA, 15 bp, Homo sapiens
tttttataggttatg

SEQ ID NO: 1579364 - DNA, 15 bp, Homo sapiens
atttttataggttat

SEQ ID NO: 1579365 - DNA, 15 bp, Homo sapiens
catttttataggtta

SEQ ID NO: 1579366 - DNA, 15 bp, Homo sapiens
acatttttataggtt

SEQ ID NO: 1579367 - DNA, 15 bp, Homo sapiens
cacatttttataggt

SEQ ID NO: 1579368 - DNA, 15 bp, Homo sapiens
acacatttttatagg

SEQ ID NO: 1579369 - DNA, 15 bp, Homo sapiens
cacacatttttatag

SEQ ID NO: 1579370 - DNA, 15 bp, Homo sapiens
ccacacatttttata

SEQ ID NO: 1579371 - DNA, 15 bp, Homo sapiens
cccacacatttttat

SEQ ID NO: 1579372 - DNA, 15 bp, Homo sapiens
tcccacacattttta

SEQ ID NO: 1579373 - DNA, 15 bp, Homo sapiens
atcccacacattttt

SEQ ID NO: 1579374 - DNA, 15 bp, Homo sapiens
catcccacacatttt

SEQ ID NO: 1579375 - DNA, 15 bp, Homo sapiens
gcatcccacacattt

SEQ ID NO: 1579376 - DNA, 15 bp, Homo sapiens
tgcatcccacacatt

SEQ ID NO: 1579377 - DNA, 15 bp, Homo sapiens
ctgcatcccacacat

SEQ ID NO: 1579378 - DNA, 15 bp, Homo sapiens
gctgcatcccacaca

SEQ ID NO: 1579379 - DNA, 15 bp, Homo sapiens
agctgcatcccacac

SEQ ID NO: 1579380 - DNA, 15 bp, Homo sapiens
tagctgcatcccaca

SEQ ID NO: 1579381 - DNA, 15 bp, Homo sapiens
ttagctgcatcccac

SEQ ID NO: 1579382 - DNA, 15 bp, Homo sapiens
tttagctgcatccca

SEQ ID NO: 1579383 - DNA, 15 bp, Homo sapiens
ctttagctgcatccc

SEQ ID NO: 1579384 - DNA, 15 bp, Homo sapiens
actttagctgcatcc

SEQ ID NO: 1579385 - DNA, 15 bp, Homo sapiens
tactttagctgcatc

SEQ ID NO: 1579386 - DNA, 15 bp, Homo sapiens
ctactttagctgcat

SEQ ID NO: 1579387 - DNA, 15 bp, Homo sapiens
actactttagctgca

SEQ ID NO: 1579388 - DNA, 15 bp, Homo sapiens
cactactttagctgc

SEQ ID NO: 1579389 - DNA, 15 bp, Homo sapiens
gcactactttagctg

SEQ ID NO: 1579390 - DNA, 15 bp, Homo sapiens
agcactactttagct

SEQ ID NO: 1579391 - DNA, 15 bp, Homo sapiens
aagcactactttagc

SEQ ID NO: 1579392 - DNA, 15 bp, Homo sapiens
taagcactactttag

SEQ ID NO: 1579393 - DNA, 15 bp, Homo sapiens
ctaagcactacttta

SEQ ID NO: 1579394 - DNA, 15 bp, Homo sapiens
tctaagcactacttt

SEQ ID NO: 1579395 - DNA, 15 bp, Homo sapiens
ctctaagcactactt

SEQ ID NO: 1579396 - DNA, 15 bp, Homo sapiens
cctctaagcactact

SEQ ID NO: 1579397 - DNA, 15 bp, Homo sapiens
ccctctaagcactac

SEQ ID NO: 1579398 - DNA, 15 bp, Homo sapiens
tccctctaagcacta

SEQ ID NO: 1579399 - DNA, 15 bp, Homo sapiens
ttccctctaagcact

SEQ ID NO: 1579400 - DNA, 15 bp, Homo sapiens
tttccctctaagcac

SEQ ID NO: 1579401 - DNA, 15 bp, Homo sapiens
atttccctctaagca

SEQ ID NO: 1579402 - DNA, 15 bp, Homo sapiens
aatttccctctaagc

SEQ ID NO: 1579403 - DNA, 15 bp, Homo sapiens
gaatttccctctaag

SEQ ID NO: 1579404 - DNA, 15 bp, Homo sapiens
agaatttccctctaa

SEQ ID NO: 1579405 - DNA, 15 bp, Homo sapiens
cagaatttccctcta

SEQ ID NO: 1579406 - DNA, 15 bp, Homo sapiens
tcagaatttccctct

SEQ ID NO: 1579407 - DNA, 15 bp, Homo sapiens
ctcagaatttccctc

SEQ ID NO: 1579408 - DNA, 15 bp, Homo sapiens
actcagaatttccct

SEQ ID NO: 1579409 - DNA, 15 bp, Homo sapiens
tactcagaatttccc

SEQ ID NO: 1579410 - DNA, 15 bp, Homo sapiens
ctactcagaatttcc

SEQ ID NO: 1579411 - DNA, 15 bp, Homo sapiens
actactcagaatttc

SEQ ID NO: 1579412 - DNA, 15 bp, Homo sapiens
tactactcagaattt

SEQ ID NO: 1579413 - DNA, 15 bp, Homo sapiens
ttactactcagaatt

SEQ ID NO: 1579414 - DNA, 15 bp, Homo sapiens
tttactactcagaat

SEQ ID NO: 1579415 - DNA, 15 bp, Homo sapiens
atttactactcagaa

SEQ ID NO: 1579416 - DNA, 15 bp, Homo sapiens
catttactactcaga

SEQ ID NO: 1579417 - DNA, 15 bp, Homo sapiens
gcatttactactcag

SEQ ID NO: 1579418 - DNA, 15 bp, Homo sapiens
ggcatttactactca

SEQ ID NO: 1579419 - DNA, 15 bp, Homo sapiens
aggcatttactactc

SEQ ID NO: 1579420 - DNA, 15 bp, Homo sapiens
caggcatttactact

SEQ ID NO: 1579421 - DNA, 15 bp, Homo sapiens
acaggcatttactac

SEQ ID NO: 1579422 - DNA, 15 bp, Homo sapiens
aacaggcatttacta

SEQ ID NO: 1579423 - DNA, 15 bp, Homo sapiens
aaacaggcatttact

SEQ ID NO: 1579424 - DNA, 15 bp, Homo sapiens
taaacaggcatttac

SEQ ID NO: 1579425 - DNA, 15 bp, Homo sapiens
ctaaacaggcattta

SEQ ID NO: 1579426 - DNA, 15 bp, Homo sapiens
tctaaacaggcattt

SEQ ID NO: 1579427 - DNA, 15 bp, Homo sapiens
ttctaaacaggcatt

SEQ ID NO: 1579428 - DNA, 15 bp, Homo sapiens
tttctaaacaggcat

SEQ ID NO: 1579429 - DNA, 15 bp, Homo sapiens
ttttctaaacaggca

SEQ ID NO: 1579430 - DNA, 15 bp, Homo sapiens
cttttctaaacaggc

SEQ ID NO: 1579431 - DNA, 15 bp, Homo sapiens
tcttttctaaacagg

SEQ ID NO: 1579432 - DNA, 15 bp, Homo sapiens
ttcttttctaaacag

SEQ ID NO: 1579433 - DNA, 15 bp, Homo sapiens
cttcttttctaaaca

SEQ ID NO: 1579434 - DNA, 15 bp, Homo sapiens
tcttcttttctaaac

SEQ ID NO: 1579435 - DNA, 15 bp, Homo sapiens
ttcttcttttctaaa

SEQ ID NO: 1579436 - DNA, 15 bp, Homo sapiens
tttcttcttttctaa

SEQ ID NO: 1579437 - DNA, 15 bp, Homo sapiens
ctttcttcttttcta

SEQ ID NO: 1579438 - DNA, 15 bp, Homo sapiens
cctttcttcttttct

SEQ ID NO: 1579439 - DNA, 15 bp, Homo sapiens
acctttcttcttttc

SEQ ID NO: 1579440 - DNA, 15 bp, Homo sapiens
gacctttcttctttt

SEQ ID NO: 1579441 - DNA, 15 bp, Homo sapiens
agacctttcttcttt

SEQ ID NO: 1579442 - DNA, 15 bp, Homo sapiens
gagacctttcttctt

SEQ ID NO: 1579443 - DNA, 15 bp, Homo sapiens
agagacctttcttct

SEQ ID NO: 1579444 - DNA, 15 bp, Homo sapiens
cagagacctttcttc

SEQ ID NO: 1579445 - DNA, 15 bp, Homo sapiens
acagagacctttctt

SEQ ID NO: 1579446 - DNA, 15 bp, Homo sapiens
cacagagacctttct

SEQ ID NO: 1579447 - DNA, 15 bp, Homo sapiens
acacagagacctttc

SEQ ID NO: 1579448 - DNA, 15 bp, Homo sapiens
cacacagagaccttt

SEQ ID NO: 1579449 - DNA, 15 bp, Homo sapiens
ccacacagagacctt

SEQ ID NO: 1579450 - DNA, 15 bp, Homo sapiens
tccacacagagacct

SEQ ID NO: 1579451 - DNA, 15 bp, Homo sapiens
gtccacacagagacc

SEQ ID NO: 1579452 - DNA, 15 bp, Homo sapiens
agtccacacagagac

SEQ ID NO: 1579453 - DNA, 15 bp, Homo sapiens
cagtccacacagaga

SEQ ID NO: 1579454 - DNA, 15 bp, Homo sapiens
tcagtccacacagag

SEQ ID NO: 1579455 - DNA, 15 bp, Homo sapiens
ttcagtccacacaga

SEQ ID NO: 1579456 - DNA, 15 bp, Homo sapiens
attcagtccacacag

SEQ ID NO: 1579457 - DNA, 15 bp, Homo sapiens
aattcagtccacaca

SEQ ID NO: 1579458 - DNA, 15 bp, Homo sapiens
caattcagtccacac

SEQ ID NO: 1579459 - DNA, 15 bp, Homo sapiens
acaattcagtccaca

SEQ ID NO: 1579460 - DNA, 15 bp, Homo sapiens
cacaattcagtccac

SEQ ID NO: 1579461 - DNA, 15 bp, Homo sapiens
ccacaattcagtcca

SEQ ID NO: 1579462 - DNA, 15 bp, Homo sapiens
gccacaattcagtcc

SEQ ID NO: 1579463 - DNA, 15 bp, Homo sapiens
agccacaattcagtc

SEQ ID NO: 1579464 - DNA, 15 bp, Homo sapiens
aagccacaattcagt

SEQ ID NO: 1579465 - DNA, 15 bp, Homo sapiens
gaagccacaattcag

SEQ ID NO: 1579466 - DNA, 15 bp, Homo sapiens
agaagccacaattca

SEQ ID NO: 1579467 - DNA, 15 bp, Homo sapiens
cagaagccacaattc

SEQ ID NO: 1579468 - DNA, 15 bp, Homo sapiens
ccagaagccacaatt

SEQ ID NO: 1579469 - DNA, 15 bp, Homo sapiens
tccagaagccacaat

SEQ ID NO: 1579470 - DNA, 15 bp, Homo sapiens
ttccagaagccacaa

SEQ ID NO: 1579471 - DNA, 15 bp, Homo sapiens
tttccagaagccaca

SEQ ID NO: 1579472 - DNA, 15 bp, Homo sapiens
ctttccagaagccac

SEQ ID NO: 1579473 - DNA, 15 bp, Homo sapiens
tctttccagaagcca

SEQ ID NO: 1579474 - DNA, 15 bp, Homo sapiens
atctttccagaagcc

SEQ ID NO: 1579475 - DNA, 15 bp, Homo sapiens
tatctttccagaagc

SEQ ID NO: 1579476 - DNA, 15 bp, Homo sapiens
ttatctttccagaag

SEQ ID NO: 1579477 - DNA, 15 bp, Homo sapiens
cttatctttccagaa

SEQ ID NO: 1579478 - DNA, 15 bp, Homo sapiens
gacttatctttccag

SEQ ID NO: 1579479 - DNA, 15 bp, Homo sapiens
ggacttatctttcca

SEQ ID NO: 1579480 - DNA, 15 bp, Homo sapiens
tggacttatctttcc

SEQ ID NO: 1579481 - DNA, 15 bp, Homo sapiens
gtggacttatctttc

SEQ ID NO: 1579482 - DNA, 15 bp, Homo sapiens
tgtggacttatcttt

SEQ ID NO: 1579483 - DNA, 15 bp, Homo sapiens
atgtggacttatctt

SEQ ID NO: 1579484 - DNA, 15 bp, Homo sapiens
gatgtggacttatct

SEQ ID NO: 1579485 - DNA, 15 bp, Homo sapiens
ggatgtggacttatc

SEQ ID NO: 1579486 - DNA, 15 bp, Homo sapiens
aggatgtggacttat

SEQ ID NO: 1579487 - DNA, 15 bp, Homo sapiens
taggatgtggactta

SEQ ID NO: 1579488 - DNA, 15 bp, Homo sapiens
ttaggatgtggactt

SEQ ID NO: 1579489 - DNA, 15 bp, Homo sapiens
attaggatgtggact

SEQ ID NO: 1579490 - DNA, 15 bp, Homo sapiens
gattaggatgtggac

SEQ ID NO: 1579491 - DNA, 15 bp, Homo sapiens
tgattaggatgtgga

SEQ ID NO: 1579492 - DNA, 15 bp, Homo sapiens
gtgattaggatgtgg

SEQ ID NO: 1579493 - DNA, 15 bp, Homo sapiens
agtgattaggatgtg

SEQ ID NO: 1579494 - DNA, 15 bp, Homo sapiens
tagtgattaggatgt

SEQ ID NO: 1579495 - DNA, 15 bp, Homo sapiens
ctagtgattaggatg

SEQ ID NO: 1579496 - DNA, 15 bp, Homo sapiens
tctagtgattaggat

SEQ ID NO: 1579497 - DNA, 15 bp, Homo sapiens
ttctagtgattagga

SEQ ID NO: 1579498 - DNA, 15 bp, Homo sapiens
gttctagtgattagg

SEQ ID NO: 1579499 - DNA, 15 bp, Homo sapiens
ggttctagtgattag

SEQ ID NO: 1579500 - DNA, 15 bp, Homo sapiens
aggttctagtgatta

SEQ ID NO: 1579501 - DNA, 15 bp, Homo sapiens
aaggttctagtgatt

SEQ ID NO: 1579502 - DNA, 15 bp, Homo sapiens
aaaggttctagtgat

SEQ ID NO: 1579503 - DNA, 15 bp, Homo sapiens
caaaggttctagtga

SEQ ID NO: 1579504 - DNA, 15 bp, Homo sapiens
tcaaaggttctagtg

SEQ ID NO: 1579505 - DNA, 15 bp, Homo sapiens
ttcaaaggttctagt

SEQ ID NO: 1579506 - DNA, 15 bp, Homo sapiens
attcaaaggttctag

SEQ ID NO: 1579507 - DNA, 15 bp, Homo sapiens
cattcaaaggttcta

SEQ ID NO: 1579508 - DNA, 15 bp, Homo sapiens
acattcaaaggttct

SEQ ID NO: 1579509 - DNA, 15 bp, Homo sapiens
aacattcaaaggttc

SEQ ID NO: 1579510 - DNA, 15 bp, Homo sapiens
taacattcaaaggtt

SEQ ID NO: 1579511 - DNA, 15 bp, Homo sapiens
gtaacattcaaaggt

SEQ ID NO: 1579512 - DNA, 15 bp, Homo sapiens
ggtaacattcaaagg

SEQ ID NO: 1579513 - DNA, 15 bp, Homo sapiens
aggtaacattcaaag

SEQ ID NO: 1579514 - DNA, 15 bp, Homo sapiens
aaggtaacattcaaa

SEQ ID NO: 1579515 - DNA, 15 bp, Homo sapiens
taaggtaacattcaa

SEQ ID NO: 1579516 - DNA, 15 bp, Homo sapiens
ataaggtaacattca

SEQ ID NO: 1579517 - DNA, 15 bp, Homo sapiens
aataaggtaacattc

SEQ ID NO: 1579518 - DNA, 15 bp, Homo sapiens
aaataaggtaacatt

SEQ ID NO: 1579519 - DNA, 15 bp, Homo sapiens
caaataaggtaacat

SEQ ID NO: 1579520 - DNA, 15 bp, Homo sapiens
ccaaataaggtaaca

SEQ ID NO: 1579521 - DNA, 15 bp, Homo sapiens
tccaaataaggtaac

SEQ ID NO: 1579522 - DNA, 15 bp, Homo sapiens
ttccaaataaggtaa

SEQ ID NO: 1579523 - DNA, 15 bp, Homo sapiens
tttccaaataaggta

SEQ ID NO: 1579524 - DNA, 15 bp, Homo sapiens
ttttccaaataaggt

SEQ ID NO: 1579525 - DNA, 15 bp, Homo sapiens
tttttccaaataagg

SEQ ID NO: 1579526 - DNA, 15 bp, Homo sapiens
ctttttccaaataag

SEQ ID NO: 1579527 - DNA, 15 bp, Homo sapiens
tctttttccaaataa

SEQ ID NO: 1579528 - DNA, 15 bp, Homo sapiens
ctctttttccaaata

SEQ ID NO: 1579529 - DNA, 15 bp, Homo sapiens
actctttttccaaat

SEQ ID NO: 1579530 - DNA, 15 bp, Homo sapiens
gactctttttccaaa

SEQ ID NO: 1579531 - DNA, 15 bp, Homo sapiens
agactctttttccaa

SEQ ID NO: 1579532 - DNA, 15 bp, Homo sapiens
aagactctttttcca

SEQ ID NO: 1579533 - DNA, 15 bp, Homo sapiens
aaagactctttttcc

SEQ ID NO: 1579534 - DNA, 15 bp, Homo sapiens
caaagactctttttc

SEQ ID NO: 1579535 - DNA, 15 bp, Homo sapiens
gcaaagactcttttt

SEQ ID NO: 1579536 - DNA, 15 bp, Homo sapiens
tgcaaagactctttt

SEQ ID NO: 1579537 - DNA, 15 bp, Homo sapiens
ctgcaaagactcttt

SEQ ID NO: 1579538 - DNA, 15 bp, Homo sapiens
tctgcaaagactctt

SEQ ID NO: 1579539 - DNA, 15 bp, Homo sapiens
atctgcaaagactct

SEQ ID NO: 1579540 - DNA, 15 bp, Homo sapiens
tatctgcaaagactc

SEQ ID NO: 1579541 - DNA, 15 bp, Homo sapiens
atatctgcaaagact

SEQ ID NO: 1579542 - DNA, 15 bp, Homo sapiens
tatatctgcaaagac

SEQ ID NO: 1579543 - DNA, 15 bp, Homo sapiens
ttatatctgcaaaga

SEQ ID NO: 1579544 - DNA, 15 bp, Homo sapiens
attatatctgcaaag

SEQ ID NO: 1579545 - DNA, 15 bp, Homo sapiens
aattatatctgcaaa

SEQ ID NO: 1579546 - DNA, 15 bp, Homo sapiens
caattatatctgcaa

SEQ ID NO: 1579547 - DNA, 15 bp, Homo sapiens
tcaattatatctgca

SEQ ID NO: 1579548 - DNA, 15 bp, Homo sapiens
ctcaattatatctgc

SEQ ID NO: 1579549 - DNA, 15 bp, Homo sapiens
tctcaattatatctg

SEQ ID NO: 1579550 - DNA, 15 bp, Homo sapiens
ttctcaattatatct

SEQ ID NO: 1579551 - DNA, 15 bp, Homo sapiens
attctcaattatatc

SEQ ID NO: 1579552 - DNA, 15 bp, Homo sapiens
gattctcaattatat

SEQ ID NO: 1579553 - DNA, 15 bp, Homo sapiens
agattctcaattata

SEQ ID NO: 1579554 - DNA, 15 bp, Homo sapiens
aagattctcaattat

SEQ ID NO: 1579555 - DNA, 15 bp, Homo sapiens
caagattctcaatta

SEQ ID NO: 1579556 - DNA, 15 bp, Homo sapiens
tcaagattctcaatt

SEQ ID NO: 1579557 - DNA, 15 bp, Homo sapiens
ctcaagattctcaat

SEQ ID NO: 1579558 - DNA, 15 bp, Homo sapiens
tctcaagattctcaa

SEQ ID NO: 1579559 - DNA, 15 bp, Homo sapiens
atctcaagattctca

SEQ ID NO: 1579560 - DNA, 15 bp, Homo sapiens
catctcaagattctc

SEQ ID NO: 1579561 - DNA, 15 bp, Homo sapiens
tcatctcaagattct

SEQ ID NO: 1579562 - DNA, 15 bp, Homo sapiens
ctcatctcaagattc

SEQ ID NO: 1579563 - DNA, 15 bp, Homo sapiens
tctcatctcaagatt

SEQ ID NO: 1579564 - DNA, 15 bp, Homo sapiens
atctcatctcaagat

SEQ ID NO: 1579565 - DNA, 15 bp, Homo sapiens
gatctcatctcaaga

SEQ ID NO: 1579566 - DNA, 15 bp, Homo sapiens
tgatctcatctcaag

SEQ ID NO: 1579567 - DNA, 15 bp, Homo sapiens
gtgatctcatctcaa

SEQ ID NO: 1579568 - DNA, 15 bp, Homo sapiens
ggtgatctcatctca

SEQ ID NO: 1579569 - DNA, 15 bp, Homo sapiens
gggtgatctcatctc

SEQ ID NO: 1579570 - DNA, 15 bp, Homo sapiens
agggtgatctcatct

SEQ ID NO: 1579571 - DNA, 15 bp, Homo sapiens
cagggtgatctcatc

SEQ ID NO: 1579572 - DNA, 15 bp, Homo sapiens
ccagggtgatctcat

SEQ ID NO: 1579573 - DNA, 15 bp, Homo sapiens
tccagggtgatctca

SEQ ID NO: 1579574 - DNA, 15 bp, Homo sapiens
atccagggtgatctc

SEQ ID NO: 1579575 - DNA, 15 bp, Homo sapiens
aatccagggtgatct

SEQ ID NO: 1579576 - DNA, 15 bp, Homo sapiens
taatccagggtgatc

SEQ ID NO: 1579577 - DNA, 15 bp, Homo sapiens
ataatccagggtgat

SEQ ID NO: 1579578 - DNA, 15 bp, Homo sapiens
gataatccagggtga

SEQ ID NO: 1579579 - DNA, 15 bp, Homo sapiens
agataatccagggtg

SEQ ID NO: 1579580 - DNA, 15 bp, Homo sapiens
cagataatccagggt

SEQ ID NO: 1579581 - DNA, 15 bp, Homo sapiens
tcagataatccaggg

SEQ ID NO: 1579582 - DNA, 15 bp, Homo sapiens
ctcagataatccagg

SEQ ID NO: 1579583 - DNA, 15 bp, Homo sapiens
actcagataatccag

SEQ ID NO: 1579584 - DNA, 15 bp, Homo sapiens
cactcagataatcca

SEQ ID NO: 1579585 - DNA, 15 bp, Homo sapiens
ccactcagataatcc

SEQ ID NO: 1579586 - DNA, 15 bp, Homo sapiens
tccactcagataatc

SEQ ID NO: 1579587 - DNA, 15 bp, Homo sapiens
ttccactcagataat

SEQ ID NO: 1579588 - DNA, 15 bp, Homo sapiens
gttccactcagataa

SEQ ID NO: 1579589 - DNA, 15 bp, Homo sapiens
agttccactcagata

SEQ ID NO: 1579590 - DNA, 15 bp, Homo sapiens
aagttccactcagat

SEQ ID NO: 1579591 - DNA, 15 bp, Homo sapiens
gaagttccactcaga

SEQ ID NO: 1579592 - DNA, 15 bp, Homo sapiens
tgaagttccactcag

SEQ ID NO: 1579593 - DNA, 15 bp, Homo sapiens
ctgaagttccactca

SEQ ID NO: 1579594 - DNA, 15 bp, Homo sapiens
actgaagttccactc

SEQ ID NO: 1579595 - DNA, 15 bp, Homo sapiens
cactgaagttccact

SEQ ID NO: 1579596 - DNA, 15 bp, Homo sapiens
acactgaagttccac

SEQ ID NO: 1579597 - DNA, 15 bp, Homo sapiens
gacactgaagttcca

SEQ ID NO: 1579598 - DNA, 15 bp, Homo sapiens
tgacactgaagttcc

SEQ ID NO: 1579599 - DNA, 15 bp, Homo sapiens
atgacactgaagttc

SEQ ID NO: 1579600 - DNA, 15 bp, Homo sapiens
gatgacactgaagtt

SEQ ID NO: 1579601 - DNA, 15 bp, Homo sapiens
tgatgacactgaagt

SEQ ID NO: 1579602 - DNA, 15 bp, Homo sapiens
gtgatgacactgaag

SEQ ID NO: 1579603 - DNA, 15 bp, Homo sapiens
tgtgatgacactgaa

SEQ ID NO: 1579604 - DNA, 15 bp, Homo sapiens
ctgtgatgacactga

SEQ ID NO: 1579605 - DNA, 15 bp, Homo sapiens
gctgtgatgacactg

SEQ ID NO: 1579606 - DNA, 15 bp, Homo sapiens
tgctgtgatgacact

SEQ ID NO: 1579607 - DNA, 15 bp, Homo sapiens
atgctgtgatgacac

SEQ ID NO: 1579608 - DNA, 15 bp, Homo sapiens
gatgctgtgatgaca

SEQ ID NO: 1579609 - DNA, 15 bp, Homo sapiens
agatgctgtgatgac

SEQ ID NO: 1579610 - DNA, 15 bp, Homo sapiens
aagatgctgtgatga

SEQ ID NO: 1579611 - DNA, 15 bp, Homo sapiens
aaagatgctgtgatg

SEQ ID NO: 1579612 - DNA, 15 bp, Homo sapiens
taaagatgctgtgat

SEQ ID NO: 1579613 - DNA, 15 bp, Homo sapiens
ataaagatgctgtga

SEQ ID NO: 1579614 - DNA, 15 bp, Homo sapiens
tataaagatgctgtg

SEQ ID NO: 1579615 - DNA, 15 bp, Homo sapiens
ttataaagatgctgt

SEQ ID NO: 1579616 - DNA, 15 bp, Homo sapiens
cttataaagatgctg

SEQ ID NO: 1579617 - DNA, 15 bp, Homo sapiens
tcttataaagatgct

SEQ ID NO: 1579618 - DNA, 15 bp, Homo sapiens
ctcttataaagatgc

SEQ ID NO: 1579619 - DNA, 15 bp, Homo sapiens
tctcttataaagatg

SEQ ID NO: 1579620 - DNA, 15 bp, Homo sapiens
gtctcttataaagat

SEQ ID NO: 1579621 - DNA, 15 bp, Homo sapiens
tgtctcttataaaga

SEQ ID NO: 1579622 - DNA, 15 bp, Homo sapiens
ttgtctcttataaag

SEQ ID NO: 1579623 - DNA, 15 bp, Homo sapiens
tttgtctcttataaa

SEQ ID NO: 1579624 - DNA, 15 bp, Homo sapiens
ctttgtctcttataa

SEQ ID NO: 1579625 - DNA, 15 bp, Homo sapiens
tctttgtctcttata

SEQ ID NO: 1579626 - DNA, 15 bp, Homo sapiens
ctctttgtctcttat

SEQ ID NO: 1579627 - DNA, 15 bp, Homo sapiens
tctctttgtctctta

SEQ ID NO: 1579628 - DNA, 15 bp, Homo sapiens
ttctctttgtctctt

SEQ ID NO: 1579629 - DNA, 15 bp, Homo sapiens
tttctctttgtctct

SEQ ID NO: 1579630 - DNA, 15 bp, Homo sapiens
gtttctctttgtctc

SEQ ID NO: 1579631 - DNA, 15 bp, Homo sapiens
tgtttctctttgtct

SEQ ID NO: 1579632 - DNA, 15 bp, Homo sapiens
gtgtttctctttgtc

SEQ ID NO: 1579633 - DNA, 15 bp, Homo sapiens
tgtgtttctctttgt

SEQ ID NO: 1579634 - DNA, 15 bp, Homo sapiens
atgtgtttctctttg

SEQ ID NO: 1579635 - DNA, 15 bp, Homo sapiens
tatgtgtttctcttt

SEQ ID NO: 1579636 - DNA, 15 bp, Homo sapiens
gtatgtgtttctctt

SEQ ID NO: 1579637 - DNA, 15 bp, Homo sapiens
tgtatgtgtttctct

SEQ ID NO: 1579638 - DNA, 15 bp, Homo sapiens
ttgtatgtgtttctc

SEQ ID NO: 1579639 - DNA, 15 bp, Homo sapiens
tttgtatgtgtttct

SEQ ID NO: 1579640 - DNA, 15 bp, Homo sapiens
ctttgtatgtgtttc

SEQ ID NO: 1579641 - DNA, 15 bp, Homo sapiens
tctttgtatgtgttt

SEQ ID NO: 1579642 - DNA, 15 bp, Homo sapiens
ttctttgtatgtgtt

SEQ ID NO: 1579643 - DNA, 15 bp, Homo sapiens
cttctttgtatgtgt

SEQ ID NO: 1579644 - DNA, 15 bp, Homo sapiens
ccttctttgtatgtg

SEQ ID NO: 1579645 - DNA, 15 bp, Homo sapiens
gccttctttgtatgt

SEQ ID NO: 1579646 - DNA, 15 bp, Homo sapiens
ggccttctttgtatg

SEQ ID NO: 1579647 - DNA, 15 bp, Homo sapiens
tggccttctttgtat

SEQ ID NO: 1579648 - DNA, 15 bp, Homo sapiens
atggccttctttgta

SEQ ID NO: 1579649 - DNA, 15 bp, Homo sapiens
catggccttctttgt

SEQ ID NO: 1579650 - DNA, 15 bp, Homo sapiens
acatggccttctttg

SEQ ID NO: 1579651 - DNA, 15 bp, Homo sapiens
cacatggccttcttt

SEQ ID NO: 1579652 - DNA, 15 bp, Homo sapiens
ccacatggccttctt

SEQ ID NO: 1579653 - DNA, 15 bp, Homo sapiens
tccacatggccttct

SEQ ID NO: 1579654 - DNA, 15 bp, Homo sapiens
ttccacatggccttc

SEQ ID NO: 1579655 - DNA, 15 bp, Homo sapiens
tttccacatggcctt

SEQ ID NO: 1579656 - DNA, 15 bp, Homo sapiens
atttccacatggcct

SEQ ID NO: 1579657 - DNA, 15 bp, Homo sapiens
catttccacatggcc

SEQ ID NO: 1579658 - DNA, 15 bp, Homo sapiens
ccatttccacatggc

SEQ ID NO: 1579659 - DNA, 15 bp, Homo sapiens
tccatttccacatgg

SEQ ID NO: 1579660 - DNA, 15 bp, Homo sapiens
ctccatttccacatg

SEQ ID NO: 1579661 - DNA, 15 bp, Homo sapiens
tctccatttccacat

SEQ ID NO: 1579662 - DNA, 15 bp, Homo sapiens
gtctccatttccaca

SEQ ID NO: 1579663 - DNA, 15 bp, Homo sapiens
tgtctccatttccac

SEQ ID NO: 1579664 - DNA, 15 bp, Homo sapiens
ctgtctccatttcca

SEQ ID NO: 1579665 - DNA, 15 bp, Homo sapiens
tctgtctccatttcc

SEQ ID NO: 1579666 - DNA, 15 bp, Homo sapiens
atctgtctccatttc

SEQ ID NO: 1579667 - DNA, 15 bp, Homo sapiens
aatctgtctccattt

SEQ ID NO: 1579668 - DNA, 15 bp, Homo sapiens
caatctgtctccatt

SEQ ID NO: 1579669 - DNA, 15 bp, Homo sapiens
ccaatctgtctccat

SEQ ID NO: 1579670 - DNA, 15 bp, Homo sapiens
tccaatctgtctcca

SEQ ID NO: 1579671 - DNA, 15 bp, Homo sapiens
ctccaatctgtctcc

SEQ ID NO: 1579672 - DNA, 15 bp, Homo sapiens
tctccaatctgtctc

SEQ ID NO: 1579673 - DNA, 15 bp, Homo sapiens
ttctccaatctgtct

SEQ ID NO: 1579674 - DNA, 15 bp, Homo sapiens
tttctccaatctgtc

SEQ ID NO: 1579675 - DNA, 15 bp, Homo sapiens
atttctccaatctgt

SEQ ID NO: 1579676 - DNA, 15 bp, Homo sapiens
catttctccaatctg

SEQ ID NO: 1579677 - DNA, 15 bp, Homo sapiens
acatttctccaatct

SEQ ID NO: 1579678 - DNA, 15 bp, Homo sapiens
cacatttctccaatc

SEQ ID NO: 1579679 - DNA, 15 bp, Homo sapiens
acacatttctccaat

SEQ ID NO: 1579680 - DNA, 15 bp, Homo sapiens
gacacatttctccaa

SEQ ID NO: 1579681 - DNA, 15 bp, Homo sapiens
tgacacatttctcca

SEQ ID NO: 1579682 - DNA, 15 bp, Homo sapiens
gtgacacatttctcc

SEQ ID NO: 1579683 - DNA, 15 bp, Homo sapiens
tgtgacacatttctc

SEQ ID NO: 1579684 - DNA, 15 bp, Homo sapiens
ttgtgacacatttct

SEQ ID NO: 1579685 - DNA, 15 bp, Homo sapiens
cttgtgacacatttc

SEQ ID NO: 1579686 - DNA, 15 bp, Homo sapiens
gcttgtgacacattt

SEQ ID NO: 1579687 - DNA, 15 bp, Homo sapiens
ggcttgtgacacatt

SEQ ID NO: 1579688 - DNA, 15 bp, Homo sapiens
tggcttgtgacacat

SEQ ID NO: 1579689 - DNA, 15 bp, Homo sapiens
ttggcttgtgacaca

SEQ ID NO: 1579690 - DNA, 15 bp, Homo sapiens
attggcttgtgacac

SEQ ID NO: 1579691 - DNA, 15 bp, Homo sapiens
cattggcttgtgaca

SEQ ID NO: 1579692 - DNA, 15 bp, Homo sapiens
tcattggcttgtgac

SEQ ID NO: 1579693 - DNA, 15 bp, Homo sapiens
ttcattggcttgtga

SEQ ID NO: 1579694 - DNA, 15 bp, Homo sapiens
attcattggcttgtg

SEQ ID NO: 1579695 - DNA, 15 bp, Homo sapiens
cattcattggcttgt

SEQ ID NO: 1579696 - DNA, 15 bp, Homo sapiens
gcattcattggcttg

SEQ ID NO: 1579697 - DNA, 15 bp, Homo sapiens
ggcattcattggctt

SEQ ID NO: 1579698 - DNA, 15 bp, Homo sapiens
tggcattcattggct

SEQ ID NO: 1579699 - DNA, 15 bp, Homo sapiens
ttggcattcattggc

SEQ ID NO: 1579700 - DNA, 15 bp, Homo sapiens
tttggcattcattgg

SEQ ID NO: 1579701 - DNA, 15 bp, Homo sapiens
ttttggcattcattg

SEQ ID NO: 1579702 - DNA, 15 bp, Homo sapiens
cttttggcattcatt

SEQ ID NO: 1579703 - DNA, 15 bp, Homo sapiens
gcttttggcattcat

SEQ ID NO: 1579704 - DNA, 15 bp, Homo sapiens
ggcttttggcattca

SEQ ID NO: 1579705 - DNA, 15 bp, Homo sapiens
aggcttttggcattc

SEQ ID NO: 1579706 - DNA, 15 bp, Homo sapiens
gaggcttttggcatt

SEQ ID NO: 1579707 - DNA, 15 bp, Homo sapiens
ggaggcttttggcat

SEQ ID NO: 1579708 - DNA, 15 bp, Homo sapiens
tggaggcttttggca

SEQ ID NO: 1579709 - DNA, 15 bp, Homo sapiens
ctggaggcttttggc

SEQ ID NO: 1579710 - DNA, 15 bp, Homo sapiens
tctggaggcttttgg

SEQ ID NO: 1579711 - DNA, 15 bp, Homo sapiens
ttctggaggcttttg

SEQ ID NO: 1579712 - DNA, 15 bp, Homo sapiens
cttctggaggctttt

SEQ ID NO: 1579713 - DNA, 15 bp, Homo sapiens
gcttctggaggcttt

SEQ ID NO: 1579714 - DNA, 15 bp, Homo sapiens
agcttctggaggctt

SEQ ID NO: 1579715 - DNA, 15 bp, Homo sapiens
cagcttctggaggct

SEQ ID NO: 1579716 - DNA, 15 bp, Homo sapiens
ccagcttctggaggc

SEQ ID NO: 1579717 - DNA, 15 bp, Homo sapiens
tccagcttctggagg

SEQ ID NO: 1579718 - DNA, 15 bp, Homo sapiens
ttccagcttctggag

SEQ ID NO: 1579719 - DNA, 15 bp, Homo sapiens
cttccagcttctgga

SEQ ID NO: 1579720 - DNA, 15 bp, Homo sapiens
tcttccagcttctgg

SEQ ID NO: 1579721 - DNA, 15 bp, Homo sapiens
ttcttccagcttctg

SEQ ID NO: 1579722 - DNA, 15 bp, Homo sapiens
cttcttccagcttct

SEQ ID NO: 1579723 - DNA, 15 bp, Homo sapiens
gcttcttccagcttc

SEQ ID NO: 1579724 - DNA, 15 bp, Homo sapiens
tgcttcttccagctt

SEQ ID NO: 1579725 - DNA, 15 bp, Homo sapiens
ttgcttcttccagct

SEQ ID NO: 1579726 - DNA, 15 bp, Homo sapiens
cttgcttcttccagc

SEQ ID NO: 1579727 - DNA, 15 bp, Homo sapiens
ccttgcttcttccag

SEQ ID NO: 1579728 - DNA, 15 bp, Homo sapiens
tccttgcttcttcca

SEQ ID NO: 1579729 - DNA, 15 bp, Homo sapiens
ttccttgcttcttcc

SEQ ID NO: 1579730 - DNA, 15 bp, Homo sapiens
gttccttgcttcttc

SEQ ID NO: 1579731 - DNA, 15 bp, Homo sapiens
tgttccttgcttctt

SEQ ID NO: 1579732 - DNA, 15 bp, Homo sapiens
ctgttccttgcttct

SEQ ID NO: 1579733 - DNA, 15 bp, Homo sapiens
tctgttccttgcttc

SEQ ID NO: 1579734 - DNA, 15 bp, Homo sapiens
ttctgttccttgctt

SEQ ID NO: 1579735 - DNA, 15 bp, Homo sapiens
attctgttccttgct

SEQ ID NO: 1579736 - DNA, 15 bp, Homo sapiens
gattctgttccttgc

SEQ ID NO: 1579737 - DNA, 15 bp, Homo sapiens
agattctgttccttg

SEQ ID NO: 1579738 - DNA, 15 bp, Homo sapiens
gagattctgttcctt

SEQ ID NO: 1579739 - DNA, 15 bp, Homo sapiens
ggagattctgttcct

SEQ ID NO: 1579740 - DNA, 15 bp, Homo sapiens
gggagattctgttcc

SEQ ID NO: 1579741 - DNA, 15 bp, Homo sapiens
ggggagattctgttc

SEQ ID NO: 1579742 - DNA, 15 bp, Homo sapiens
tggggagattctgtt

SEQ ID NO: 1579743 - DNA, 15 bp, Homo sapiens
ctggggagattctgt

SEQ ID NO: 1579744 - DNA, 15 bp, Homo sapiens
tctggggagattctg

SEQ ID NO: 1579745 - DNA, 15 bp, Homo sapiens
ctctggggagattct

SEQ ID NO: 1579746 - DNA, 15 bp, Homo sapiens
gctctggggagattc

SEQ ID NO: 1579747 - DNA, 15 bp, Homo sapiens
ggctctggggagatt

SEQ ID NO: 1579748 - DNA, 15 bp, Homo sapiens
aggctctggggagat

SEQ ID NO: 1579749 - DNA, 15 bp, Homo sapiens
gaggctctggggaga

SEQ ID NO: 1579750 - DNA, 15 bp, Homo sapiens
agaggctctggggag

SEQ ID NO: 1579751 - DNA, 15 bp, Homo sapiens
cagaggctctgggga

SEQ ID NO: 1579752 - DNA, 15 bp, Homo sapiens
ccagaggctctgggg

SEQ ID NO: 1579753 - DNA, 15 bp, Homo sapiens
tccagaggctctggg

SEQ ID NO: 1579754 - DNA, 15 bp, Homo sapiens
ctccagaggctctgg

SEQ ID NO: 1579755 - DNA, 15 bp, Homo sapiens
tctccagaggctctg

SEQ ID NO: 1579756 - DNA, 15 bp, Homo sapiens
ctctccagaggctct

SEQ ID NO: 1579757 - DNA, 15 bp, Homo sapiens
tctctccagaggctc

SEQ ID NO: 1579758 - DNA, 15 bp, Homo sapiens
ctctctccagaggct

SEQ ID NO: 1579759 - DNA, 15 bp, Homo sapiens
actctctccagaggc

SEQ ID NO: 1579760 - DNA, 15 bp, Homo sapiens
tactctctccagagg

SEQ ID NO: 1579761 - DNA, 15 bp, Homo sapiens
gtactctctccagag

SEQ ID NO: 1579762 - DNA, 15 bp, Homo sapiens
tgtactctctccaga

SEQ ID NO: 1579763 - DNA, 15 bp, Homo sapiens
ttgtactctctccag

SEQ ID NO: 1579764 - DNA, 15 bp, Homo sapiens
attgtactctctcca

SEQ ID NO: 1579765 - DNA, 15 bp, Homo sapiens
gattgtactctctcc

SEQ ID NO: 1579766 - DNA, 15 bp, Homo sapiens
agattgtactctctc

SEQ ID NO: 1579767 - DNA, 15 bp, Homo sapiens
cagattgtactctct

SEQ ID NO: 1579768 - DNA, 15 bp, Homo sapiens
gcagattgtactctc

SEQ ID NO: 1579769 - DNA, 15 bp, Homo sapiens
cgcagattgtactct

SEQ ID NO: 1579770 - DNA, 15 bp, Homo sapiens
ccgcagattgtactc

SEQ ID NO: 1579771 - DNA, 15 bp, Homo sapiens
tccgcagattgtact

SEQ ID NO: 1579772 - DNA, 15 bp, Homo sapiens
gtccgcagattgtac

SEQ ID NO: 1579773 - DNA, 15 bp, Homo sapiens
tgtccgcagattgta

SEQ ID NO: 1579774 - DNA, 15 bp, Homo sapiens
gtgtccgcagattgt

SEQ ID NO: 1579775 - DNA, 15 bp, Homo sapiens
ggtgtccgcagattg

SEQ ID NO: 1579776 - DNA, 15 bp, Homo sapiens
aggtgtccgcagatt

SEQ ID NO: 1579777 - DNA, 15 bp, Homo sapiens
aaggtgtccgcagat

SEQ ID NO: 1579778 - DNA, 15 bp, Homo sapiens
caaggtgtccgcaga

SEQ ID NO: 1579779 - DNA, 15 bp, Homo sapiens
tcaaggtgtccgcag

SEQ ID NO: 1579780 - DNA, 15 bp, Homo sapiens
atcaaggtgtccgca

SEQ ID NO: 1579781 - DNA, 15 bp, Homo sapiens
aatcaaggtgtccgc

SEQ ID NO: 1579782 - DNA, 15 bp, Homo sapiens
aaatcaaggtgtccg

SEQ ID NO: 1579783 - DNA, 15 bp, Homo sapiens
gaaatcaaggtgtcc

SEQ ID NO: 1579784 - DNA, 15 bp, Homo sapiens
tgaaatcaaggtgtc

SEQ ID NO: 1579785 - DNA, 15 bp, Homo sapiens
ctgaaatcaaggtgt

SEQ ID NO: 1579786 - DNA, 15 bp, Homo sapiens
tctgaaatcaaggtg

SEQ ID NO: 1579787 - DNA, 15 bp, Homo sapiens
gtctgaaatcaaggt

SEQ ID NO: 1579788 - DNA, 15 bp, Homo sapiens
agtctgaaatcaagg

SEQ ID NO: 1579789 - DNA, 15 bp, Homo sapiens
aagtctgaaatcaag

SEQ ID NO: 1579790 - DNA, 15 bp, Homo sapiens
gaagtctgaaatcaa

SEQ ID NO: 1579791 - DNA, 15 bp, Homo sapiens
agaagtctgaaatca

SEQ ID NO: 1579792 - DNA, 15 bp, Homo sapiens
tagaagtctgaaatc

SEQ ID NO: 1579793 - DNA, 15 bp, Homo sapiens
ctagaagtctgaaat

SEQ ID NO: 1579794 - DNA, 15 bp, Homo sapiens
gctagaagtctgaaa

SEQ ID NO: 1579795 - DNA, 15 bp, Homo sapiens
agctagaagtctgaa

SEQ ID NO: 1579796 - DNA, 15 bp, Homo sapiens
gagctagaagtctga

SEQ ID NO: 1579797 - DNA, 15 bp, Homo sapiens
ggagctagaagtctg

SEQ ID NO: 1579798 - DNA, 15 bp, Homo sapiens
gggagctagaagtct

SEQ ID NO: 1579799 - DNA, 15 bp, Homo sapiens
tgggagctagaagtc

SEQ ID NO: 1579800 - DNA, 15 bp, Homo sapiens
atgggagctagaagt

SEQ ID NO: 1579801 - DNA, 15 bp, Homo sapiens
tatgggagctagaag

SEQ ID NO: 1579802 - DNA, 15 bp, Homo sapiens
ttatgggagctagaa

SEQ ID NO: 1579803 - DNA, 15 bp, Homo sapiens
gttatgggagctaga

SEQ ID NO: 1579804 - DNA, 15 bp, Homo sapiens
agttatgggagctag

SEQ ID NO: 1579805 - DNA, 15 bp, Homo sapiens
cagttatgggagcta

SEQ ID NO: 1579806 - DNA, 15 bp, Homo sapiens
acagttatgggagct

SEQ ID NO: 1579807 - DNA, 15 bp, Homo sapiens
cacagttatgggagc

SEQ ID NO: 1579808 - DNA, 15 bp, Homo sapiens
tcacagttatgggag

SEQ ID NO: 1579809 - DNA, 15 bp, Homo sapiens
ctcacagttatggga

SEQ ID NO: 1579810 - DNA, 15 bp, Homo sapiens
tctcacagttatggg

SEQ ID NO: 1579811 - DNA, 15 bp, Homo sapiens
ctctcacagttatgg

SEQ ID NO: 1579812 - DNA, 15 bp, Homo sapiens
tctctcacagttatg

SEQ ID NO: 1579813 - DNA, 15 bp, Homo sapiens
ttctctcacagttat

SEQ ID NO: 1579814 - DNA, 15 bp, Homo sapiens
attctctcacagtta

SEQ ID NO: 1579815 - DNA, 15 bp, Homo sapiens
tattctctcacagtt

SEQ ID NO: 1579816 - DNA, 15 bp, Homo sapiens
gtattctctcacagt

SEQ ID NO: 1579817 - DNA, 15 bp, Homo sapiens
tgtattctctcacag

SEQ ID NO: 1579818 - DNA, 15 bp, Homo sapiens
atgtattctctcaca

SEQ ID NO: 1579819 - DNA, 15 bp, Homo sapiens
aatgtattctctcac

SEQ ID NO: 1579820 - DNA, 15 bp, Homo sapiens
gaatgtattctctca

SEQ ID NO: 1579821 - DNA, 15 bp, Homo sapiens
ggaatgtattctctc

SEQ ID NO: 1579822 - DNA, 15 bp, Homo sapiens
aggaatgtattctct

SEQ ID NO: 1579823 - DNA, 15 bp, Homo sapiens
caggaatgtattctc

SEQ ID NO: 1579824 - DNA, 15 bp, Homo sapiens
tcaggaatgtattct

SEQ ID NO: 1579825 - DNA, 15 bp, Homo sapiens
atcaggaatgtattc

SEQ ID NO: 1579826 - DNA, 15 bp, Homo sapiens
gatcaggaatgtatt

SEQ ID NO: 1579827 - DNA, 15 bp, Homo sapiens
agatcaggaatgtat

SEQ ID NO: 1579828 - DNA, 15 bp, Homo sapiens
aagatcaggaatgta

SEQ ID NO: 1579829 - DNA, 15 bp, Homo sapiens
aaagatcaggaatgt

SEQ ID NO: 1579830 - DNA, 15 bp, Homo sapiens
taaagatcaggaatg

SEQ ID NO: 1579831 - DNA, 15 bp, Homo sapiens
ttaaagatcaggaat

SEQ ID NO: 1579832 - DNA, 15 bp, Homo sapiens
cttaaagatcaggaa

SEQ ID NO: 1579833 - DNA, 15 bp, Homo sapiens
gcttaaagatcagga

SEQ ID NO: 1579834 - DNA, 15 bp, Homo sapiens
ggcttaaagatcagg

SEQ ID NO: 1579835 - DNA, 15 bp, Homo sapiens
aggcttaaagatcag

SEQ ID NO: 1579836 - DNA, 15 bp, Homo sapiens
gaggcttaaagatca

SEQ ID NO: 1579837 - DNA, 15 bp, Homo sapiens
agaggcttaaagatc

SEQ ID NO: 1579838 - DNA, 15 bp, Homo sapiens
cagaggcttaaagat

SEQ ID NO: 1579839 - DNA, 15 bp, Homo sapiens
tcagaggcttaaaga

SEQ ID NO: 1579840 - DNA, 15 bp, Homo sapiens
ctcagaggcttaaag

SEQ ID NO: 1579841 - DNA, 15 bp, Homo sapiens
actcagaggcttaaa

SEQ ID NO: 1579842 - DNA, 15 bp, Homo sapiens
aactcagaggcttaa

SEQ ID NO: 1579843 - DNA, 15 bp, Homo sapiens
aaactcagaggctta

SEQ ID NO: 1579844 - DNA, 15 bp, Homo sapiens
caaactcagaggctt

SEQ ID NO: 1579845 - DNA, 15 bp, Homo sapiens
acaaactcagaggct

SEQ ID NO: 1579846 - DNA, 15 bp, Homo sapiens
cacaaactcagaggc

SEQ ID NO: 1579847 - DNA, 15 bp, Homo sapiens
ccacaaactcagagg

SEQ ID NO: 1579848 - DNA, 15 bp, Homo sapiens
accacaaactcagag

SEQ ID NO: 1579849 - DNA, 15 bp, Homo sapiens
taccacaaactcaga

SEQ ID NO: 1579850 - DNA, 15 bp, Homo sapiens
ttaccacaaactcag

SEQ ID NO: 1579851 - DNA, 15 bp, Homo sapiens
attaccacaaactca

SEQ ID NO: 1579852 - DNA, 15 bp, Homo sapiens
aattaccacaaactc

SEQ ID NO: 1579853 - DNA, 15 bp, Homo sapiens
ttgtaacaaattacc

SEQ ID NO: 1579854 - DNA, 15 bp, Homo sapiens
gttgtaacaaattac

SEQ ID NO: 1579855 - DNA, 15 bp, Homo sapiens
tgttgtaacaaatta

SEQ ID NO: 1579856 - DNA, 15 bp, Homo sapiens
ctgttgtaacaaatt

SEQ ID NO: 1579857 - DNA, 15 bp, Homo sapiens
gctgttgtaacaaat

SEQ ID NO: 1579858 - DNA, 15 bp, Homo sapiens
ggctgttgtaacaaa

SEQ ID NO: 1579859 - DNA, 15 bp, Homo sapiens
tggctgttgtaacaa

SEQ ID NO: 1579860 - DNA, 15 bp, Homo sapiens
atggctgttgtaaca

SEQ ID NO: 1579861 - DNA, 15 bp, Homo sapiens
tatggctgttgtaac

SEQ ID NO: 1579862 - DNA, 15 bp, Homo sapiens
ctatggctgttgtaa

SEQ ID NO: 1579863 - DNA, 15 bp, Homo sapiens
cctatggctgttgta

SEQ ID NO: 1579864 - DNA, 15 bp, Homo sapiens
tcctatggctgttgt

SEQ ID NO: 1579865 - DNA, 15 bp, Homo sapiens
ttcctatggctgttg

SEQ ID NO: 1579866 - DNA, 15 bp, Homo sapiens
cttcctatggctgtt

SEQ ID NO: 1579867 - DNA, 15 bp, Homo sapiens
gcttcctatggctgt

SEQ ID NO: 1579868 - DNA, 15 bp, Homo sapiens
agcttcctatggctg

SEQ ID NO: 1579869 - DNA, 15 bp, Homo sapiens
tagcttcctatggct

SEQ ID NO: 1579870 - DNA, 15 bp, Homo sapiens
ctagcttcctatggc

SEQ ID NO: 1579871 - DNA, 15 bp, Homo sapiens
actagcttcctatgg

SEQ ID NO: 1579872 - DNA, 15 bp, Homo sapiens
cactagcttcctatg

SEQ ID NO: 1579873 - DNA, 15 bp, Homo sapiens
acactagcttcctat

SEQ ID NO: 1579874 - DNA, 15 bp, Homo sapiens
tacactagcttccta

SEQ ID NO: 1579875 - DNA, 15 bp, Homo sapiens
ctacactagcttcct

SEQ ID NO: 1579876 - DNA, 15 bp, Homo sapiens
gctacactagcttcc

SEQ ID NO: 1579877 - DNA, 15 bp, Homo sapiens
ggctacactagcttc

SEQ ID NO: 1579878 - DNA, 15 bp, Homo sapiens
aggctacactagctt

SEQ ID NO: 1579879 - DNA, 15 bp, Homo sapiens
gaggctacactagct

SEQ ID NO: 1579880 - DNA, 15 bp, Homo sapiens
tgaggctacactagc

SEQ ID NO: 1579881 - DNA, 15 bp, Homo sapiens
ttgaggctacactag

SEQ ID NO: 1579882 - DNA, 15 bp, Homo sapiens
tttgaggctacacta

SEQ ID NO: 1579883 - DNA, 15 bp, Homo sapiens
atttgaggctacact

SEQ ID NO: 1579884 - DNA, 15 bp, Homo sapiens
gatttgaggctacac

SEQ ID NO: 1579885 - DNA, 15 bp, Homo sapiens
tgatttgaggctaca

SEQ ID NO: 1579886 - DNA, 15 bp, Homo sapiens
ttgatttgaggctac

SEQ ID NO: 1579887 - DNA, 15 bp, Homo sapiens
attgatttgaggcta

SEQ ID NO: 1579888 - DNA, 15 bp, Homo sapiens
cattgatttgaggct

SEQ ID NO: 1579889 - DNA, 15 bp, Homo sapiens
tcattgatttgaggc

SEQ ID NO: 1579890 - DNA, 15 bp, Homo sapiens
gtcattgatttgagg

SEQ ID NO: 1579891 - DNA, 15 bp, Homo sapiens
ggtcattgatttgag

SEQ ID NO: 1579892 - DNA, 15 bp, Homo sapiens
aggtcattgatttga

SEQ ID NO: 1579893 - DNA, 15 bp, Homo sapiens
gaggtcattgatttg

SEQ ID NO: 1579894 - DNA, 15 bp, Homo sapiens
tgaggtcattgattt

SEQ ID NO: 1579895 - DNA, 15 bp, Homo sapiens
ctgaggtcattgatt

SEQ ID NO: 1579896 - DNA, 15 bp, Homo sapiens
gctgaggtcattgat

SEQ ID NO: 1579897 - DNA, 15 bp, Homo sapiens
agctgaggtcattga

SEQ ID NO: 1579898 - DNA, 15 bp, Homo sapiens
aagctgaggtcattg

SEQ ID NO: 1579899 - DNA, 15 bp, Homo sapiens
taagctgaggtcatt

SEQ ID NO: 1579900 - DNA, 15 bp, Homo sapiens
ataagctgaggtcat

SEQ ID NO: 1579901 - DNA, 15 bp, Homo sapiens
tataagctgaggtca

SEQ ID NO: 1579902 - DNA, 15 bp, Homo sapiens
atataagctgaggtc

SEQ ID NO: 1579903 - DNA, 15 bp, Homo sapiens
catataagctgaggt

SEQ ID NO: 1579904 - DNA, 15 bp, Homo sapiens
acatataagctgagg

SEQ ID NO: 1579905 - DNA, 15 bp, Homo sapiens
aacatataagctgag

SEQ ID NO: 1579906 - DNA, 15 bp, Homo sapiens
taacatataagctga

SEQ ID NO: 1579907 - DNA, 15 bp, Homo sapiens
ttaacatataagctg

SEQ ID NO: 1579908 - DNA, 15 bp, Homo sapiens
cttaacatataagct

SEQ ID NO: 1579909 - DNA, 15 bp, Homo sapiens
tcttaacatataagc

SEQ ID NO: 1579910 - DNA, 15 bp, Homo sapiens
ttcttaacatataag

SEQ ID NO: 1579911 - DNA, 15 bp, Homo sapiens
tttcttaacatataa

SEQ ID NO: 1579912 - DNA, 15 bp, Homo sapiens
gtttcttaacatata

SEQ ID NO: 1579913 - DNA, 15 bp, Homo sapiens
agtttcttaacatat

SEQ ID NO: 1579914 - DNA, 15 bp, Homo sapiens
tagtttcttaacata

SEQ ID NO: 1579915 - DNA, 15 bp, Homo sapiens
ctagtttcttaacat

SEQ ID NO: 1579916 - DNA, 15 bp, Homo sapiens
tctagtttcttaaca

SEQ ID NO: 1579917 - DNA, 15 bp, Homo sapiens
ttctagtttcttaac

SEQ ID NO: 1579918 - DNA, 15 bp, Homo sapiens
tttctagtttcttaa

SEQ ID NO: 1579919 - DNA, 15 bp, Homo sapiens
ttttctagtttctta

SEQ ID NO: 1579920 - DNA, 15 bp, Homo sapiens
tttttctagtttctt

SEQ ID NO: 1579921 - DNA, 15 bp, Homo sapiens
ctttttctagtttct

SEQ ID NO: 1579922 - DNA, 15 bp, Homo sapiens
tctttttctagtttc

SEQ ID NO: 1579923 - DNA, 15 bp, Homo sapiens
ttctttttctagttt

SEQ ID NO: 1579924 - DNA, 15 bp, Homo sapiens
cttctttttctagtt

SEQ ID NO: 1579925 - DNA, 15 bp, Homo sapiens
tcttctttttctagt

SEQ ID NO: 1579926 - DNA, 15 bp, Homo sapiens
ctcttctttttctag

SEQ ID NO: 1579927 - DNA, 15 bp, Homo sapiens
gctcttctttttcta

SEQ ID NO: 1579928 - DNA, 15 bp, Homo sapiens
tgctcttctttttct

SEQ ID NO: 1579929 - DNA, 15 bp, Homo sapiens
ttgctcttctttttc

SEQ ID NO: 1579930 - DNA, 15 bp, Homo sapiens
tttgctcttcttttt

SEQ ID NO: 1579931 - DNA, 15 bp, Homo sapiens
atttgctcttctttt

SEQ ID NO: 1579932 - DNA, 15 bp, Homo sapiens
aatttgctcttcttt

SEQ ID NO: 1579933 - DNA, 15 bp, Homo sapiens
ttaatttgctcttct

SEQ ID NO: 1579934 - DNA, 15 bp, Homo sapiens
tttaatttgctcttc

SEQ ID NO: 1579935 - DNA, 15 bp, Homo sapiens
gtttaatttgctctt

SEQ ID NO: 1579936 - DNA, 15 bp, Homo sapiens
tgtttaatttgctct

SEQ ID NO: 1579937 - DNA, 15 bp, Homo sapiens
gtgtttaatttgctc

SEQ ID NO: 1579938 - DNA, 15 bp, Homo sapiens
tgtgtttaatttgct

SEQ ID NO: 1579939 - DNA, 15 bp, Homo sapiens
ttgtgtttaatttgc

SEQ ID NO: 1579940 - DNA, 15 bp, Homo sapiens
attgtgtttaatttg

SEQ ID NO: 1579941 - DNA, 15 bp, Homo sapiens
cattgtgtttaattt

SEQ ID NO: 1579942 - DNA, 15 bp, Homo sapiens
acattgtgtttaatt

SEQ ID NO: 1579943 - DNA, 15 bp, Homo sapiens
aacattgtgtttaat

SEQ ID NO: 1579944 - DNA, 15 bp, Homo sapiens
taacattgtgtttaa

SEQ ID NO: 1579945 - DNA, 15 bp, Homo sapiens
ctaacattgtgttta

SEQ ID NO: 1579946 - DNA, 15 bp, Homo sapiens
actaacattgtgttt

SEQ ID NO: 1579947 - DNA, 15 bp, Homo sapiens
tactaacattgtgtt

SEQ ID NO: 1579948 - DNA, 15 bp, Homo sapiens
ctactaacattgtgt

SEQ ID NO: 1579949 - DNA, 15 bp, Homo sapiens
tctactaacattgtg

SEQ ID NO: 1579950 - DNA, 15 bp, Homo sapiens
ttctactaacattgt

SEQ ID NO: 1579951 - DNA, 15 bp, Homo sapiens
attctactaacattg

SEQ ID NO: 1579952 - DNA, 15 bp, Homo sapiens
tattctactaacatt

SEQ ID NO: 1579953 - DNA, 15 bp, Homo sapiens
ttattctactaacat

SEQ ID NO: 1579954 - DNA, 15 bp, Homo sapiens
tttattctactaaca

SEQ ID NO: 1579955 - DNA, 15 bp, Homo sapiens
ttttattctactaac

SEQ ID NO: 1579956 - DNA, 15 bp, Homo sapiens
cttttattctactaa

SEQ ID NO: 1579957 - DNA, 15 bp, Homo sapiens
tcttttattctacta

SEQ ID NO: 1579958 - DNA, 15 bp, Homo sapiens
ttcttttattctact

SEQ ID NO: 1579959 - DNA, 15 bp, Homo sapiens
tttcttttattctac

SEQ ID NO: 1579960 - DNA, 15 bp, Homo sapiens
gtttcttttattcta

SEQ ID NO: 1579961 - DNA, 15 bp, Homo sapiens
tgtttcttttattct

SEQ ID NO: 1579962 - DNA, 15 bp, Homo sapiens
ctgtttcttttattc

SEQ ID NO: 1579963 - DNA, 15 bp, Homo sapiens
tctgtttcttttatt

SEQ ID NO: 1579964 - DNA, 15 bp, Homo sapiens
ttctgtttcttttat

SEQ ID NO: 1579965 - DNA, 15 bp, Homo sapiens
tttctgtttctttta

SEQ ID NO: 1579966 - DNA, 15 bp, Homo sapiens
atttctgtttctttt

SEQ ID NO: 1579967 - DNA, 15 bp, Homo sapiens
catttctgtttcttt

SEQ ID NO: 1579968 - DNA, 15 bp, Homo sapiens
tcatttctgtttctt

SEQ ID NO: 1579969 - DNA, 15 bp, Homo sapiens
ctcatttctgtttct

SEQ ID NO: 1579970 - DNA, 15 bp, Homo sapiens
tctcatttctgtttc

SEQ ID NO: 1579971 - DNA, 15 bp, Homo sapiens
gtctcatttctgttt

SEQ ID NO: 1579972 - DNA, 15 bp, Homo sapiens
ggtctcatttctgtt

SEQ ID NO: 1579973 - DNA, 15 bp, Homo sapiens
tggtctcatttctgt

SEQ ID NO: 1579974 - DNA, 15 bp, Homo sapiens
ctggtctcatttctg

SEQ ID NO: 1579975 - DNA, 15 bp, Homo sapiens
tctggtctcatttct

SEQ ID NO: 1579976 - DNA, 15 bp, Homo sapiens
ttctggtctcatttc

SEQ ID NO: 1579977 - DNA, 15 bp, Homo sapiens
tttctggtctcattt

SEQ ID NO: 1579978 - DNA, 15 bp, Homo sapiens
atttctggtctcatt

SEQ ID NO: 1579979 - DNA, 15 bp, Homo sapiens
gatttctggtctcat

SEQ ID NO: 1579980 - DNA, 15 bp, Homo sapiens
tgatttctggtctca

SEQ ID NO: 1579981 - DNA, 15 bp, Homo sapiens
atgatttctggtctc

SEQ ID NO: 1579982 - DNA, 15 bp, Homo sapiens
aatgatttctggtct

SEQ ID NO: 1579983 - DNA, 15 bp, Homo sapiens
caatgatttctggtc

SEQ ID NO: 1579984 - DNA, 15 bp, Homo sapiens
tcaatgatttctggt

SEQ ID NO: 1579985 - DNA, 15 bp, Homo sapiens
ttcaatgatttctgg

SEQ ID NO: 1579986 - DNA, 15 bp, Homo sapiens
tttcaatgatttctg

SEQ ID NO: 1579987 - DNA, 15 bp, Homo sapiens
atttcaatgatttct

SEQ ID NO: 1579988 - DNA, 15 bp, Homo sapiens
catttcaatgatttc

SEQ ID NO: 1579989 - DNA, 15 bp, Homo sapiens
tcatttcaatgattt

SEQ ID NO: 1579990 - DNA, 15 bp, Homo sapiens
ttcatttcaatgatt

SEQ ID NO: 1579991 - DNA, 15 bp, Homo sapiens
tttcatttcaatgat

SEQ ID NO: 1579992 - DNA, 15 bp, Homo sapiens
ttttcatttcaatga

SEQ ID NO: 1579993 - DNA, 15 bp, Homo sapiens
tttttcatttcaatg

SEQ ID NO: 1579994 - DNA, 15 bp, Homo sapiens
gtttttcatttcaat

SEQ ID NO: 1579995 - DNA, 15 bp, Homo sapiens
ctgtttttcatttca

SEQ ID NO: 1579996 - DNA, 15 bp, Homo sapiens
tctgtttttcatttc

SEQ ID NO: 1579997 - DNA, 15 bp, Homo sapiens
ttctgtttttcattt

SEQ ID NO: 1579998 - DNA, 15 bp, Homo sapiens
tttctgtttttcatt

SEQ ID NO: 1579999 - DNA, 15 bp, Homo sapiens
ttttctgtttttcat

SEQ ID NO: 1580000 - DNA, 15 bp, Homo sapiens
tttttctgtttttca

SEQ ID NO: 1580001 - DNA, 15 bp, Homo sapiens
gtttttctgtttttc

SEQ ID NO: 1580002 - DNA, 15 bp, Homo sapiens
tgtttttctgttttt

SEQ ID NO: 1580003 - DNA, 15 bp, Homo sapiens
ttgtttttctgtttt

SEQ ID NO: 1580004 - DNA, 15 bp, Homo sapiens
attgtttttctgttt

SEQ ID NO: 1580005 - DNA, 15 bp, Homo sapiens
tattgtttttctgtt

SEQ ID NO: 1580006 - DNA, 15 bp, Homo sapiens
atattgtttttctgt

SEQ ID NO: 1580007 - DNA, 15 bp, Homo sapiens
tatattgtttttctg

SEQ ID NO: 1580008 - DNA, 15 bp, Homo sapiens
ctatattgtttttct

SEQ ID NO: 1580009 - DNA, 15 bp, Homo sapiens
tctatattgtttttc

SEQ ID NO: 1580010 - DNA, 15 bp, Homo sapiens
ttctatattgttttt

SEQ ID NO: 1580011 - DNA, 15 bp, Homo sapiens
tttctatattgtttt

SEQ ID NO: 1580012 - DNA, 15 bp, Homo sapiens
ttttctatattgttt

SEQ ID NO: 1580013 - DNA, 15 bp, Homo sapiens
attttctatattgtt

SEQ ID NO: 1580014 - DNA, 15 bp, Homo sapiens
gattttctatattgt

SEQ ID NO: 1580015 - DNA, 15 bp, Homo sapiens
tgattttctatattg

SEQ ID NO: 1580016 - DNA, 15 bp, Homo sapiens
ttgattttctatatt

SEQ ID NO: 1580017 - DNA, 15 bp, Homo sapiens
cttgattttctatat

SEQ ID NO: 1580018 - DNA, 15 bp, Homo sapiens
gcttgattttctata

SEQ ID NO: 1580019 - DNA, 15 bp, Homo sapiens
agcttgattttctat

SEQ ID NO: 1580020 - DNA, 15 bp, Homo sapiens
cagcttgattttcta

SEQ ID NO: 1580021 - DNA, 15 bp, Homo sapiens
ccagcttgattttct

SEQ ID NO: 1580022 - DNA, 15 bp, Homo sapiens
cccagcttgattttc

SEQ ID NO: 1580023 - DNA, 15 bp, Homo sapiens
gcccagcttgatttt

SEQ ID NO: 1580024 - DNA, 15 bp, Homo sapiens
tgcccagcttgattt

SEQ ID NO: 1580025 - DNA, 15 bp, Homo sapiens
gtgcccagcttgatt

SEQ ID NO: 1580026 - DNA, 15 bp, Homo sapiens
tgtgcccagcttgat

SEQ ID NO: 1580027 - DNA, 15 bp, Homo sapiens
ctgtgcccagcttga

SEQ ID NO: 1580028 - DNA, 15 bp, Homo sapiens
actgtgcccagcttg

SEQ ID NO: 1580029 - DNA, 15 bp, Homo sapiens
tactgtgcccagctt

SEQ ID NO: 1580030 - DNA, 15 bp, Homo sapiens
ttactgtgcccagct

SEQ ID NO: 1580031 - DNA, 15 bp, Homo sapiens
attactgtgcccagc

SEQ ID NO: 1580032 - DNA, 15 bp, Homo sapiens
aattactgtgcccag

SEQ ID NO: 1580033 - DNA, 15 bp, Homo sapiens
gaattactgtgccca

SEQ ID NO: 1580034 - DNA, 15 bp, Homo sapiens
tgaattactgtgccc

SEQ ID NO: 1580035 - DNA, 15 bp, Homo sapiens
gtgaattactgtgcc

SEQ ID NO: 1580036 - DNA, 15 bp, Homo sapiens
tgtgaattactgtgc

SEQ ID NO: 1580037 - DNA, 15 bp, Homo sapiens
gtgtgaattactgtg

SEQ ID NO: 1580038 - DNA, 15 bp, Homo sapiens
cgtgtgaattactgt

SEQ ID NO: 1580039 - DNA, 15 bp, Homo sapiens
acgtgtgaattactg

SEQ ID NO: 1580040 - DNA, 15 bp, Homo sapiens
cacgtgtgaattact

SEQ ID NO: 1580041 - DNA, 15 bp, Homo sapiens
acacgtgtgaattac

SEQ ID NO: 1580042 - DNA, 15 bp, Homo sapiens
tacacgtgtgaatta

SEQ ID NO: 1580043 - DNA, 15 bp, Homo sapiens
ttacacgtgtgaatt

SEQ ID NO: 1580044 - DNA, 15 bp, Homo sapiens
attacacgtgtgaat

SEQ ID NO: 1580045 - DNA, 15 bp, Homo sapiens
gattacacgtgtgaa

SEQ ID NO: 1580046 - DNA, 15 bp, Homo sapiens
ggattacacgtgtga

SEQ ID NO: 1580047 - DNA, 15 bp, Homo sapiens
gggattacacgtgtg

SEQ ID NO: 1580048 - DNA, 15 bp, Homo sapiens
tgggattacacgtgt

SEQ ID NO: 1580049 - DNA, 15 bp, Homo sapiens
ctgggattacacgtg

SEQ ID NO: 1580050 - DNA, 15 bp, Homo sapiens
actgggattacacgt

SEQ ID NO: 1580051 - DNA, 15 bp, Homo sapiens
cactgggattacacg

SEQ ID NO: 1580052 - DNA, 15 bp, Homo sapiens
gcactgggattacac

SEQ ID NO: 1580053 - DNA, 15 bp, Homo sapiens
taaagcactgggatt

SEQ ID NO: 1580054 - DNA, 15 bp, Homo sapiens
ctaaagcactgggat

SEQ ID NO: 1580055 - DNA, 15 bp, Homo sapiens
cctaaagcactggga

SEQ ID NO: 1580056 - DNA, 15 bp, Homo sapiens
tcctaaagcactggg

SEQ ID NO: 1580057 - DNA, 15 bp, Homo sapiens
ctcctaaagcactgg

SEQ ID NO: 1580058 - DNA, 15 bp, Homo sapiens
cctcctaaagcactg

SEQ ID NO: 1580059 - DNA, 15 bp, Homo sapiens
gcctcctaaagcact

SEQ ID NO: 1580060 - DNA, 15 bp, Homo sapiens
agcctcctaaagcac

SEQ ID NO: 1580061 - DNA, 15 bp, Homo sapiens
cagcctcctaaagca

SEQ ID NO: 1580062 - DNA, 15 bp, Homo sapiens
tcagcctcctaaagc

SEQ ID NO: 1580063 - DNA, 15 bp, Homo sapiens
agcctcaagcaatcc

SEQ ID NO: 1580064 - DNA, 15 bp, Homo sapiens
tagcctcaagcaatc

SEQ ID NO: 1580065 - DNA, 15 bp, Homo sapiens
ctagcctcaagcaat

SEQ ID NO: 1580066 - DNA, 15 bp, Homo sapiens
tctagcctcaagcaa

SEQ ID NO: 1580067 - DNA, 15 bp, Homo sapiens
ttctagcctcaagca

SEQ ID NO: 1580068 - DNA, 15 bp, Homo sapiens
cttctagcctcaagc

SEQ ID NO: 1580069 - DNA, 15 bp, Homo sapiens
acttctagcctcaag

SEQ ID NO: 1580070 - DNA, 15 bp, Homo sapiens
aacttctagcctcaa

SEQ ID NO: 1580071 - DNA, 15 bp, Homo sapiens
aaacttctagcctca

SEQ ID NO: 1580072 - DNA, 15 bp, Homo sapiens
caaacttctagcctc

SEQ ID NO: 1580073 - DNA, 15 bp, Homo sapiens
tcaaacttctagcct

SEQ ID NO: 1580074 - DNA, 15 bp, Homo sapiens
ttcaaacttctagcc

SEQ ID NO: 1580075 - DNA, 15 bp, Homo sapiens
tttcaaacttctagc

SEQ ID NO: 1580076 - DNA, 15 bp, Homo sapiens
gtttcaaacttctag

SEQ ID NO: 1580077 - DNA, 15 bp, Homo sapiens
ggtttcaaacttcta

SEQ ID NO: 1580078 - DNA, 15 bp, Homo sapiens
tggtttcaaacttct

SEQ ID NO: 1580079 - DNA, 15 bp, Homo sapiens
ctggtttcaaacttc

SEQ ID NO: 1580080 - DNA, 15 bp, Homo sapiens
gctggtttcaaactt

SEQ ID NO: 1580081 - DNA, 15 bp, Homo sapiens
aggctggtttcaaac

SEQ ID NO: 1580082 - DNA, 15 bp, Homo sapiens
caggctggtttcaaa

SEQ ID NO: 1580083 - DNA, 15 bp, Homo sapiens
tcaggctggtttcaa

SEQ ID NO: 1580084 - DNA, 15 bp, Homo sapiens
ttcaggctggtttca

SEQ ID NO: 1580085 - DNA, 15 bp, Homo sapiens
gttcaggctggtttc

SEQ ID NO: 1580086 - DNA, 15 bp, Homo sapiens
tgttcaggctggttt

SEQ ID NO: 1580087 - DNA, 15 bp, Homo sapiens
ttgttcaggctggtt

SEQ ID NO: 1580088 - DNA, 15 bp, Homo sapiens
gttgttcaggctggt

SEQ ID NO: 1580089 - DNA, 15 bp, Homo sapiens
tgttgttcaggctgg

SEQ ID NO: 1580090 - DNA, 15 bp, Homo sapiens
atgttgttcaggctg

SEQ ID NO: 1580091 - DNA, 15 bp, Homo sapiens
tatgttgttcaggct

SEQ ID NO: 1580092 - DNA, 15 bp, Homo sapiens
ctatgttgttcaggc

SEQ ID NO: 1580093 - DNA, 15 bp, Homo sapiens
actatgttgttcagg

SEQ ID NO: 1580094 - DNA, 15 bp, Homo sapiens
cactatgttgttcag

SEQ ID NO: 1580095 - DNA, 15 bp, Homo sapiens
tcactatgttgttca

SEQ ID NO: 1580096 - DNA, 15 bp, Homo sapiens
ctcactatgttgttc

SEQ ID NO: 1580097 - DNA, 15 bp, Homo sapiens
tctcactatgttgtt

SEQ ID NO: 1580098 - DNA, 15 bp, Homo sapiens
gtctcactatgttgt

SEQ ID NO: 1580099 - DNA, 15 bp, Homo sapiens
tttttttgtagagac

SEQ ID NO: 1580100 - DNA, 15 bp, Homo sapiens
attttttttttttgt

SEQ ID NO: 1580101 - DNA, 15 bp, Homo sapiens
aattttttttttttg

SEQ ID NO: 1580102 - DNA, 15 bp, Homo sapiens
taaaatttttttttt

SEQ ID NO: 1580103 - DNA, 15 bp, Homo sapiens
ttaaaattttttttt

SEQ ID NO: 1580104 - DNA, 15 bp, Homo sapiens
tttaaaatttttttt

SEQ ID NO: 1580105 - DNA, 15 bp, Homo sapiens
gtttaaaattttttt

SEQ ID NO: 1580106 - DNA, 15 bp, Homo sapiens
agtttaaaatttttt

SEQ ID NO: 1580107 - DNA, 15 bp, Homo sapiens
cagtttaaaattttt

SEQ ID NO: 1580108 - DNA, 15 bp, Homo sapiens
ccagtttaaaatttt

SEQ ID NO: 1580109 - DNA, 15 bp, Homo sapiens
tccagtttaaaattt

SEQ ID NO: 1580110 - DNA, 15 bp, Homo sapiens
gtccagtttaaaatt

SEQ ID NO: 1580111 - DNA, 15 bp, Homo sapiens
agtccagtttaaaat

SEQ ID NO: 1580112 - DNA, 15 bp, Homo sapiens
cagtccagtttaaaa

SEQ ID NO: 1580113 - DNA, 15 bp, Homo sapiens
acagtccagtttaaa

SEQ ID NO: 1580114 - DNA, 15 bp, Homo sapiens
cacagtccagtttaa

SEQ ID NO: 1580115 - DNA, 15 bp, Homo sapiens
gcacagtccagttta

SEQ ID NO: 1580116 - DNA, 15 bp, Homo sapiens
tgcacagtccagttt

SEQ ID NO: 1580117 - DNA, 15 bp, Homo sapiens
atgcacagtccagtt

SEQ ID NO: 1580118 - DNA, 15 bp, Homo sapiens
catgcacagtccagt

SEQ ID NO: 1580119 - DNA, 15 bp, Homo sapiens
ccatgcacagtccag

SEQ ID NO: 1580120 - DNA, 15 bp, Homo sapiens
accatgcacagtcca

SEQ ID NO: 1580121 - DNA, 15 bp, Homo sapiens
aaccatgcacagtcc

SEQ ID NO: 1580122 - DNA, 15 bp, Homo sapiens
caaccatgcacagtc

SEQ ID NO: 1580123 - DNA, 15 bp, Homo sapiens
acaaccatgcacagt

SEQ ID NO: 1580124 - DNA, 15 bp, Homo sapiens
cacaaccatgcacag

SEQ ID NO: 1580125 - DNA, 15 bp, Homo sapiens
acacaaccatgcaca

SEQ ID NO: 1580126 - DNA, 15 bp, Homo sapiens
cacacaaccatgcac

SEQ ID NO: 1580127 - DNA, 15 bp, Homo sapiens
gcacacaaccatgca

SEQ ID NO: 1580128 - DNA, 15 bp, Homo sapiens
tgcacacaaccatgc

SEQ ID NO: 1580129 - DNA, 15 bp, Homo sapiens
gtgcacacaaccatg

SEQ ID NO: 1580130 - DNA, 15 bp, Homo sapiens
ggtgcacacaaccat

SEQ ID NO: 1580131 - DNA, 15 bp, Homo sapiens
aggtgcacacaacca

SEQ ID NO: 1580132 - DNA, 15 bp, Homo sapiens
caggtgcacacaacc

SEQ ID NO: 1580133 - DNA, 15 bp, Homo sapiens
acaggtgcacacaac

SEQ ID NO: 1580134 - DNA, 15 bp, Homo sapiens
tacaggtgcacacaa

SEQ ID NO: 1580135 - DNA, 15 bp, Homo sapiens
ctacaggtgcacaca

SEQ ID NO: 1580136 - DNA, 15 bp, Homo sapiens
gtgggactacaggtg

SEQ ID NO: 1580137 - DNA, 15 bp, Homo sapiens
ggtgggactacaggt

SEQ ID NO: 1580138 - DNA, 15 bp, Homo sapiens
tggtgggactacagg

SEQ ID NO: 1580139 - DNA, 15 bp, Homo sapiens
atggtgggactacag

SEQ ID NO: 1580140 - DNA, 15 bp, Homo sapiens
aatggtgggactaca

SEQ ID NO: 1580141 - DNA, 15 bp, Homo sapiens
gaatggtgggactac

SEQ ID NO: 1580142 - DNA, 15 bp, Homo sapiens
tgaatggtgggacta

SEQ ID NO: 1580143 - DNA, 15 bp, Homo sapiens
ctgaatggtgggact

SEQ ID NO: 1580144 - DNA, 15 bp, Homo sapiens
cctgaatggtgggac

SEQ ID NO: 1580145 - DNA, 15 bp, Homo sapiens
tcctgaatggtggga

SEQ ID NO: 1580146 - DNA, 15 bp, Homo sapiens
ctcctgaatggtggg

SEQ ID NO: 1580147 - DNA, 15 bp, Homo sapiens
cctcctgaatggtgg

SEQ ID NO: 1580148 - DNA, 15 bp, Homo sapiens
gcctcctgaatggtg

SEQ ID NO: 1580149 - DNA, 15 bp, Homo sapiens
agcctcctgaatggt

SEQ ID NO: 1580150 - DNA, 15 bp, Homo sapiens
cagcctcctgaatgg

SEQ ID NO: 1580151 - DNA, 15 bp, Homo sapiens
ccagcctcctgaatg

SEQ ID NO: 1580152 - DNA, 15 bp, Homo sapiens
cccagcctcctgaat

SEQ ID NO: 1580153 - DNA, 15 bp, Homo sapiens
ccccagcctcctgaa

SEQ ID NO: 1580154 - DNA, 15 bp, Homo sapiens
ttccccagcctcctg

SEQ ID NO: 1580155 - DNA, 15 bp, Homo sapiens
cttccccagcctcct

SEQ ID NO: 1580156 - DNA, 15 bp, Homo sapiens
ccttccccagcctcc

SEQ ID NO: 1580157 - DNA, 15 bp, Homo sapiens
tccttccccagcctc

SEQ ID NO: 1580158 - DNA, 15 bp, Homo sapiens
ctccttccccagcct

SEQ ID NO: 1580159 - DNA, 15 bp, Homo sapiens
cctccttccccagcc

SEQ ID NO: 1580160 - DNA, 15 bp, Homo sapiens
tcctccttccccagc

SEQ ID NO: 1580161 - DNA, 15 bp, Homo sapiens
atcctccttccccag

SEQ ID NO: 1580162 - DNA, 15 bp, Homo sapiens
gatcctccttcccca

SEQ ID NO: 1580163 - DNA, 15 bp, Homo sapiens
agatcctccttcccc

SEQ ID NO: 1580164 - DNA, 15 bp, Homo sapiens
gagatcctccttccc

SEQ ID NO: 1580165 - DNA, 15 bp, Homo sapiens
agagatcctccttcc

SEQ ID NO: 1580166 - DNA, 15 bp, Homo sapiens
aagagatcctccttc

SEQ ID NO: 1580167 - DNA, 15 bp, Homo sapiens
caagagatcctcctt

SEQ ID NO: 1580168 - DNA, 15 bp, Homo sapiens
tcaagagatcctcct

SEQ ID NO: 1580169 - DNA, 15 bp, Homo sapiens
ctcaagagatcctcc

SEQ ID NO: 1580170 - DNA, 15 bp, Homo sapiens
gctcaagagatcctc

SEQ ID NO: 1580171 - DNA, 15 bp, Homo sapiens
ggctcaagagatcct

SEQ ID NO: 1580172 - DNA, 15 bp, Homo sapiens
gggctcaagagatcc

SEQ ID NO: 1580173 - DNA, 15 bp, Homo sapiens
tgggctcaagagatc

SEQ ID NO: 1580174 - DNA, 15 bp, Homo sapiens
ctgggctcaagagat

SEQ ID NO: 1580175 - DNA, 15 bp, Homo sapiens
actgggctcaagaga

SEQ ID NO: 1580176 - DNA, 15 bp, Homo sapiens
tactgggctcaagag

SEQ ID NO: 1580177 - DNA, 15 bp, Homo sapiens
ctactgggctcaaga

SEQ ID NO: 1580178 - DNA, 15 bp, Homo sapiens
actactgggctcaag

SEQ ID NO: 1580179 - DNA, 15 bp, Homo sapiens
aactactgggctcaa

SEQ ID NO: 1580180 - DNA, 15 bp, Homo sapiens
gaactactgggctca

SEQ ID NO: 1580181 - DNA, 15 bp, Homo sapiens
tgaactactgggctc

SEQ ID NO: 1580182 - DNA, 15 bp, Homo sapiens
ttgaactactgggct

SEQ ID NO: 1580183 - DNA, 15 bp, Homo sapiens
cttgaactactgggc

SEQ ID NO: 1580184 - DNA, 15 bp, Homo sapiens
ccttgaactactggg

SEQ ID NO: 1580185 - DNA, 15 bp, Homo sapiens
gccttgaactactgg

SEQ ID NO: 1580186 - DNA, 15 bp, Homo sapiens
agccttgaactactg

SEQ ID NO: 1580187 - DNA, 15 bp, Homo sapiens
cagccttgaactact

SEQ ID NO: 1580188 - DNA, 15 bp, Homo sapiens
gcagccttgaactac

SEQ ID NO: 1580189 - DNA, 15 bp, Homo sapiens
tgcagccttgaacta

SEQ ID NO: 1580190 - DNA, 15 bp, Homo sapiens
cctgcagccttgaac

SEQ ID NO: 1580191 - DNA, 15 bp, Homo sapiens
ccctgcagccttgaa

SEQ ID NO: 1580192 - DNA, 15 bp, Homo sapiens
tccctgcagccttga

SEQ ID NO: 1580193 - DNA, 15 bp, Homo sapiens
gtccctgcagccttg

SEQ ID NO: 1580194 - DNA, 15 bp, Homo sapiens
agtccctgcagcctt

SEQ ID NO: 1580195 - DNA, 15 bp, Homo sapiens
aagtccctgcagcct

SEQ ID NO: 1580196 - DNA, 15 bp, Homo sapiens
taagtccctgcagcc

SEQ ID NO: 1580197 - DNA, 15 bp, Homo sapiens
ataagtccctgcagc

SEQ ID NO: 1580198 - DNA, 15 bp, Homo sapiens
cataagtccctgcag

SEQ ID NO: 1580199 - DNA, 15 bp, Homo sapiens
tcataagtccctgca

SEQ ID NO: 1580200 - DNA, 15 bp, Homo sapiens
atcataagtccctgc

SEQ ID NO: 1580201 - DNA, 15 bp, Homo sapiens
gatcataagtccctg

SEQ ID NO: 1580202 - DNA, 15 bp, Homo sapiens
agatcataagtccct

SEQ ID NO: 1580203 - DNA, 15 bp, Homo sapiens
cagatcataagtccc

SEQ ID NO: 1580204 - DNA, 15 bp, Homo sapiens
ccagatcataagtcc

SEQ ID NO: 1580205 - DNA, 15 bp, Homo sapiens
accagatcataagtc

SEQ ID NO: 1580206 - DNA, 15 bp, Homo sapiens
gaccagatcataagt

SEQ ID NO: 1580207 - DNA, 15 bp, Homo sapiens
tgaccagatcataag

SEQ ID NO: 1580208 - DNA, 15 bp, Homo sapiens
gtgaccagatcataa

SEQ ID NO: 1580209 - DNA, 15 bp, Homo sapiens
agtgaccagatcata

SEQ ID NO: 1580210 - DNA, 15 bp, Homo sapiens
cagtgaccagatcat

SEQ ID NO: 1580211 - DNA, 15 bp, Homo sapiens
acagtgaccagatca

SEQ ID NO: 1580212 - DNA, 15 bp, Homo sapiens
tacagtgaccagatc

SEQ ID NO: 1580213 - DNA, 15 bp, Homo sapiens
gtacagtgaccagat

SEQ ID NO: 1580214 - DNA, 15 bp, Homo sapiens
agtacagtgaccaga

SEQ ID NO: 1580215 - DNA, 15 bp, Homo sapiens
gagtacagtgaccag

SEQ ID NO: 1580216 - DNA, 15 bp, Homo sapiens
ggagtacagtgacca

SEQ ID NO: 1580217 - DNA, 15 bp, Homo sapiens
tggagtacagtgacc

SEQ ID NO: 1580218 - DNA, 15 bp, Homo sapiens
ctggagtacagtgac

SEQ ID NO: 1580219 - DNA, 15 bp, Homo sapiens
actggagtacagtga

SEQ ID NO: 1580220 - DNA, 15 bp, Homo sapiens
gactggagtacagtg

SEQ ID NO: 1580221 - DNA, 15 bp, Homo sapiens
agactggagtacagt

SEQ ID NO: 1580222 - DNA, 15 bp, Homo sapiens
cagactggagtacag

SEQ ID NO: 1580223 - DNA, 15 bp, Homo sapiens
ccagactggagtaca

SEQ ID NO: 1580224 - DNA, 15 bp, Homo sapiens
cccagactggagtac

SEQ ID NO: 1580225 - DNA, 15 bp, Homo sapiens
acccagactggagta

SEQ ID NO: 1580226 - DNA, 15 bp, Homo sapiens
ttgtcacccagactg

SEQ ID NO: 1580227 - DNA, 15 bp, Homo sapiens
tttgtcacccagact

SEQ ID NO: 1580228 - DNA, 15 bp, Homo sapiens
ctttgtcacccagac

SEQ ID NO: 1580229 - DNA, 15 bp, Homo sapiens
gctttgtcacccaga

SEQ ID NO: 1580230 - DNA, 15 bp, Homo sapiens
tgctttgtcacccag

SEQ ID NO: 1580231 - DNA, 15 bp, Homo sapiens
ttgctttgtcaccca

SEQ ID NO: 1580232 - DNA, 15 bp, Homo sapiens
cttgctttgtcaccc

SEQ ID NO: 1580233 - DNA, 15 bp, Homo sapiens
tcttgctttgtcacc

SEQ ID NO: 1580234 - DNA, 15 bp, Homo sapiens
gtcttgctttgtcac

SEQ ID NO: 1580235 - DNA, 15 bp, Homo sapiens
agtcttgctttgtca

SEQ ID NO: 1580236 - DNA, 15 bp, Homo sapiens
cagtcttgctttgtc

SEQ ID NO: 1580237 - DNA, 15 bp, Homo sapiens
gcagtcttgctttgt

SEQ ID NO: 1580238 - DNA, 15 bp, Homo sapiens
tgcagtcttgctttg

SEQ ID NO: 1580239 - DNA, 15 bp, Homo sapiens
atgcagtcttgcttt

SEQ ID NO: 1580240 - DNA, 15 bp, Homo sapiens
gatgcagtcttgctt

SEQ ID NO: 1580241 - DNA, 15 bp, Homo sapiens
agatgcagtcttgct

SEQ ID NO: 1580242 - DNA, 15 bp, Homo sapiens
gagatgcagtcttgc

SEQ ID NO: 1580243 - DNA, 15 bp, Homo sapiens
tgagatgcagtcttg

SEQ ID NO: 1580244 - DNA, 15 bp, Homo sapiens
ttgagatgcagtctt

SEQ ID NO: 1580245 - DNA, 15 bp, Homo sapiens
tttgagatgcagtct

SEQ ID NO: 1580246 - DNA, 15 bp, Homo sapiens
ttttgagatgcagtc

SEQ ID NO: 1580247 - DNA, 15 bp, Homo sapiens
tttttgagatgcagt

SEQ ID NO: 1580248 - DNA, 15 bp, Homo sapiens
ttttttgagatgcag

SEQ ID NO: 1580249 - DNA, 15 bp, Homo sapiens
gttttttgagatgca

SEQ ID NO: 1580250 - DNA, 15 bp, Homo sapiens
tgttttttgagatgc

SEQ ID NO: 1580251 - DNA, 15 bp, Homo sapiens
ttgttttttgagatg

SEQ ID NO: 1580252 - DNA, 15 bp, Homo sapiens
tttgttttttgagat

SEQ ID NO: 1580253 - DNA, 15 bp, Homo sapiens
ttttgttttttgaga

SEQ ID NO: 1580254 - DNA, 15 bp, Homo sapiens
gttttgttttttgag

SEQ ID NO: 1580255 - DNA, 15 bp, Homo sapiens
tgttttgttttttga

SEQ ID NO: 1580256 - DNA, 15 bp, Homo sapiens
tttttttgttttgtt

SEQ ID NO: 1580257 - DNA, 15 bp, Homo sapiens
gtttttttgttttgt

SEQ ID NO: 1580258 - DNA, 15 bp, Homo sapiens
tgtttttttgttttg

SEQ ID NO: 1580259 - DNA, 15 bp, Homo sapiens
gtgtttttttgtttt

SEQ ID NO: 1580260 - DNA, 15 bp, Homo sapiens
tgtgtttttttgttt

SEQ ID NO: 1580261 - DNA, 15 bp, Homo sapiens
gtgtgtttttttgtt

SEQ ID NO: 1580262 - DNA, 15 bp, Homo sapiens
tgtgtgtttttttgt

SEQ ID NO: 1580263 - DNA, 15 bp, Homo sapiens
ttgtgtgtttttttg

SEQ ID NO: 1580264 - DNA, 15 bp, Homo sapiens
gttgtgtgttttttt

SEQ ID NO: 1580265 - DNA, 15 bp, Homo sapiens
tgttgtgtgtttttt

SEQ ID NO: 1580266 - DNA, 15 bp, Homo sapiens
ttgttgtgtgttttt

SEQ ID NO: 1580267 - DNA, 15 bp, Homo sapiens
gttgttgtgtgtttt

SEQ ID NO: 1580268 - DNA, 15 bp, Homo sapiens
agttgttgtgtgttt

SEQ ID NO: 1580269 - DNA, 15 bp, Homo sapiens
gagttgttgtgtgtt

SEQ ID NO: 1580270 - DNA, 15 bp, Homo sapiens
ggagttgttgtgtgt

SEQ ID NO: 1580271 - DNA, 15 bp, Homo sapiens
gggagttgttgtgtg

SEQ ID NO: 1580272 - DNA, 15 bp, Homo sapiens
agggagttgttgtgt

SEQ ID NO: 1580273 - DNA, 15 bp, Homo sapiens
gagggagttgttgtg

SEQ ID NO: 1580274 - DNA, 15 bp, Homo sapiens
agagggagttgttgt

SEQ ID NO: 1580275 - DNA, 15 bp, Homo sapiens
gagagggagttgttg

SEQ ID NO: 1580276 - DNA, 15 bp, Homo sapiens
tgagagggagttgtt

SEQ ID NO: 1580277 - DNA, 15 bp, Homo sapiens
gtgagagggagttgt

SEQ ID NO: 1580278 - DNA, 15 bp, Homo sapiens
agtgagagggagttg

SEQ ID NO: 1580279 - DNA, 15 bp, Homo sapiens
gagtgagagggagtt

SEQ ID NO: 1580280 - DNA, 15 bp, Homo sapiens
agagtgagagggagt

SEQ ID NO: 1580281 - DNA, 15 bp, Homo sapiens
gagagtgagagggag

SEQ ID NO: 1580282 - DNA, 15 bp, Homo sapiens
agagagtgagaggga

SEQ ID NO: 1580283 - DNA, 15 bp, Homo sapiens
gagagagtgagaggg

SEQ ID NO: 1580284 - DNA, 15 bp, Homo sapiens
agagagagtgagagg

SEQ ID NO: 1580285 - DNA, 15 bp, Homo sapiens
gagagagagtgagag

SEQ ID NO: 1580286 - DNA, 15 bp, Homo sapiens
agagagagagtgaga

SEQ ID NO: 1580287 - DNA, 15 bp, Homo sapiens
gagagagagagtgag

SEQ ID NO: 1580288 - DNA, 15 bp, Homo sapiens
tgagagagagagtga

SEQ ID NO: 1580289 - DNA, 15 bp, Homo sapiens
ctgagagagagagtg

SEQ ID NO: 1580290 - DNA, 15 bp, Homo sapiens
actgagagagagagt

SEQ ID NO: 1580291 - DNA, 15 bp, Homo sapiens
aactgagagagagag

SEQ ID NO: 1580292 - DNA, 15 bp, Homo sapiens
taactgagagagaga

SEQ ID NO: 1580293 - DNA, 15 bp, Homo sapiens
ataactgagagagag

SEQ ID NO: 1580294 - DNA, 15 bp, Homo sapiens
tataactgagagaga

SEQ ID NO: 1580295 - DNA, 15 bp, Homo sapiens
gtataactgagagag

SEQ ID NO: 1580296 - DNA, 15 bp, Homo sapiens
agtataactgagaga

SEQ ID NO: 1580297 - DNA, 15 bp, Homo sapiens
aagtataactgagag

SEQ ID NO: 1580298 - DNA, 15 bp, Homo sapiens
aaagtataactgaga

SEQ ID NO: 1580299 - DNA, 15 bp, Homo sapiens
taaagtataactgag

SEQ ID NO: 1580300 - DNA, 15 bp, Homo sapiens
ttaaagtataactga

SEQ ID NO: 1580301 - DNA, 15 bp, Homo sapiens
attaaagtataactg

SEQ ID NO: 1580302 - DNA, 15 bp, Homo sapiens
tattaaagtataact

SEQ ID NO: 1580303 - DNA, 15 bp, Homo sapiens
ttattaaagtataac

SEQ ID NO: 1580304 - DNA, 15 bp, Homo sapiens
tttattaaagtataa

SEQ ID NO: 1580305 - DNA, 15 bp, Homo sapiens
ctttattaaagtata

SEQ ID NO: 1580306 - DNA, 15 bp, Homo sapiens
actttattaaagtat

SEQ ID NO: 1580307 - DNA, 15 bp, Homo sapiens
aactttattaaagta

SEQ ID NO: 1580308 - DNA, 15 bp, Homo sapiens
caactttattaaagt

SEQ ID NO: 1580309 - DNA, 15 bp, Homo sapiens
acaactttattaaag

SEQ ID NO: 1580310 - DNA, 15 bp, Homo sapiens
tacaactttattaaa

SEQ ID NO: 1580311 - DNA, 15 bp, Homo sapiens
gtacaactttattaa

SEQ ID NO: 1580312 - DNA, 15 bp, Homo sapiens
tgtacaactttatta

SEQ ID NO: 1580313 - DNA, 15 bp, Homo sapiens
ttgtacaactttatt

SEQ ID NO: 1580314 - DNA, 15 bp, Homo sapiens
tttgtacaactttat

SEQ ID NO: 1580315 - DNA, 15 bp, Homo sapiens
ttttgtacaacttta

SEQ ID NO: 1580316 - DNA, 15 bp, Homo sapiens
attttgtacaacttt

SEQ ID NO: 1580317 - DNA, 15 bp, Homo sapiens
cattttgtacaactt

SEQ ID NO: 1580318 - DNA, 15 bp, Homo sapiens
tcattttgtacaact

SEQ ID NO: 1580319 - DNA, 15 bp, Homo sapiens
ttcattttgtacaac

SEQ ID NO: 1580320 - DNA, 15 bp, Homo sapiens
tttcattttgtacaa

SEQ ID NO: 1580321 - DNA, 15 bp, Homo sapiens
ttttcattttgtaca

SEQ ID NO: 1580322 - DNA, 15 bp, Homo sapiens
tttttcattttgtac

SEQ ID NO: 1580323 - DNA, 15 bp, Homo sapiens
ttttttcattttgta

SEQ ID NO: 1580324 - DNA, 15 bp, Homo sapiens
cttttttcattttgt

SEQ ID NO: 1580325 - DNA, 15 bp, Homo sapiens
acttttttcattttg

SEQ ID NO: 1580326 - DNA, 15 bp, Homo sapiens
cacttttttcatttt

SEQ ID NO: 1580327 - DNA, 15 bp, Homo sapiens
tcacttttttcattt

SEQ ID NO: 1580328 - DNA, 15 bp, Homo sapiens
ctcacttttttcatt

SEQ ID NO: 1580329 - DNA, 15 bp, Homo sapiens
tctcacttttttcat

SEQ ID NO: 1580330 - DNA, 15 bp, Homo sapiens
ttctcacttttttca

SEQ ID NO: 1580331 - DNA, 15 bp, Homo sapiens
cttctcacttttttc

SEQ ID NO: 1580332 - DNA, 15 bp, Homo sapiens
acttctcactttttt

SEQ ID NO: 1580333 - DNA, 15 bp, Homo sapiens
aacttctcacttttt

SEQ ID NO: 1580334 - DNA, 15 bp, Homo sapiens
aaacttctcactttt

SEQ ID NO: 1580335 - DNA, 15 bp, Homo sapiens
taaacttctcacttt

SEQ ID NO: 1580336 - DNA, 15 bp, Homo sapiens
ctaaacttctcactt

SEQ ID NO: 1580337 - DNA, 15 bp, Homo sapiens
tctaaacttctcact

SEQ ID NO: 1580338 - DNA, 15 bp, Homo sapiens
ctctaaacttctcac

SEQ ID NO: 1580339 - DNA, 15 bp, Homo sapiens
actctaaacttctca

SEQ ID NO: 1580340 - DNA, 15 bp, Homo sapiens
tactctaaacttctc

SEQ ID NO: 1580341 - DNA, 15 bp, Homo sapiens
ctactctaaacttct

SEQ ID NO: 1580342 - DNA, 15 bp, Homo sapiens
gctactctaaacttc

SEQ ID NO: 1580343 - DNA, 15 bp, Homo sapiens
agctactctaaactt

SEQ ID NO: 1580344 - DNA, 15 bp, Homo sapiens
tagctactctaaact

SEQ ID NO: 1580345 - DNA, 15 bp, Homo sapiens
ttagctactctaaac

SEQ ID NO: 1580346 - DNA, 15 bp, Homo sapiens
tttagctactctaaa

SEQ ID NO: 1580347 - DNA, 15 bp, Homo sapiens
ttttagctactctaa

SEQ ID NO: 1580348 - DNA, 15 bp, Homo sapiens
tttttagctactcta

SEQ ID NO: 1580349 - DNA, 15 bp, Homo sapiens
ctttttagctactct

SEQ ID NO: 1580350 - DNA, 15 bp, Homo sapiens
actttttagctactc

SEQ ID NO: 1580351 - DNA, 15 bp, Homo sapiens
tactttttagctact

SEQ ID NO: 1580352 - DNA, 15 bp, Homo sapiens
ctactttttagctac

SEQ ID NO: 1580353 - DNA, 15 bp, Homo sapiens
cctactttttagcta

SEQ ID NO: 1580354 - DNA, 15 bp, Homo sapiens
acctactttttagct

SEQ ID NO: 1580355 - DNA, 15 bp, Homo sapiens
aacctactttttagc

SEQ ID NO: 1580356 - DNA, 15 bp, Homo sapiens
taacctactttttag

SEQ ID NO: 1580357 - DNA, 15 bp, Homo sapiens
ataacctacttttta

SEQ ID NO: 1580358 - DNA, 15 bp, Homo sapiens
cataacctacttttt

SEQ ID NO: 1580359 - DNA, 15 bp, Homo sapiens
tcataacctactttt

SEQ ID NO: 1580360 - DNA, 15 bp, Homo sapiens
ctcataacctacttt

SEQ ID NO: 1580361 - DNA, 15 bp, Homo sapiens
cctcataacctactt

SEQ ID NO: 1580362 - DNA, 15 bp, Homo sapiens
ccctcataacctact

SEQ ID NO: 1580363 - DNA, 15 bp, Homo sapiens
cccctcataacctac

SEQ ID NO: 1580364 - DNA, 15 bp, Homo sapiens
ccccctcataaccta

SEQ ID NO: 1580365 - DNA, 15 bp, Homo sapiens
accccctcataacct

SEQ ID NO: 1580366 - DNA, 15 bp, Homo sapiens
taccccctcataacc

SEQ ID NO: 1580367 - DNA, 15 bp, Homo sapiens
ctaccccctcataac

SEQ ID NO: 1580368 - DNA, 15 bp, Homo sapiens
cctaccccctcataa

SEQ ID NO: 1580369 - DNA, 15 bp, Homo sapiens
gcctaccccctcata

SEQ ID NO: 1580370 - DNA, 15 bp, Homo sapiens
tgcctaccccctcat

SEQ ID NO: 1580371 - DNA, 15 bp, Homo sapiens
ctgcctaccccctca

SEQ ID NO: 1580372 - DNA, 15 bp, Homo sapiens
cctgcctaccccctc

SEQ ID NO: 1580373 - DNA, 15 bp, Homo sapiens
ccctgcctaccccct

SEQ ID NO: 1580374 - DNA, 15 bp, Homo sapiens
tccctgcctaccccc

SEQ ID NO: 1580375 - DNA, 15 bp, Homo sapiens
ctccctgcctacccc

SEQ ID NO: 1580376 - DNA, 15 bp, Homo sapiens
cctccctgcctaccc

SEQ ID NO: 1580377 - DNA, 15 bp, Homo sapiens
gcctccctgcctacc

SEQ ID NO: 1580378 - DNA, 15 bp, Homo sapiens
tgcctccctgcctac

SEQ ID NO: 1580379 - DNA, 15 bp, Homo sapiens
ctgcctccctgccta

SEQ ID NO: 1580380 - DNA, 15 bp, Homo sapiens
cctgcctccctgcct

SEQ ID NO: 1580381 - DNA, 15 bp, Homo sapiens
tcctgcctccctgcc

SEQ ID NO: 1580382 - DNA, 15 bp, Homo sapiens
ttcctgcctccctgc

SEQ ID NO: 1580383 - DNA, 15 bp, Homo sapiens
cttcctgcctccctg

SEQ ID NO: 1580384 - DNA, 15 bp, Homo sapiens
ttcttcctgcctccc

SEQ ID NO: 1580385 - DNA, 15 bp, Homo sapiens
tttcttcctgcctcc

SEQ ID NO: 1580386 - DNA, 15 bp, Homo sapiens
atttcttcctgcctc

SEQ ID NO: 1580387 - DNA, 15 bp, Homo sapiens
aatttcttcctgcct

SEQ ID NO: 1580388 - DNA, 15 bp, Homo sapiens
taatttcttcctgcc

SEQ ID NO: 1580389 - DNA, 15 bp, Homo sapiens
ctaatttcttcctgc

SEQ ID NO: 1580390 - DNA, 15 bp, Homo sapiens
actaatttcttcctg

SEQ ID NO: 1580391 - DNA, 15 bp, Homo sapiens
aactaatttcttcct

SEQ ID NO: 1580392 - DNA, 15 bp, Homo sapiens
caaactaatttcttc

SEQ ID NO: 1580393 - DNA, 15 bp, Homo sapiens
ccaaactaatttctt

SEQ ID NO: 1580394 - DNA, 15 bp, Homo sapiens
tccaaactaatttct

SEQ ID NO: 1580395 - DNA, 15 bp, Homo sapiens
ctccaaactaatttc

SEQ ID NO: 1580396 - DNA, 15 bp, Homo sapiens
tctccaaactaattt

SEQ ID NO: 1580397 - DNA, 15 bp, Homo sapiens
ctctccaaactaatt

SEQ ID NO: 1580398 - DNA, 15 bp, Homo sapiens
tctctccaaactaat

SEQ ID NO: 1580399 - DNA, 15 bp, Homo sapiens
atctctccaaactaa

SEQ ID NO: 1580400 - DNA, 15 bp, Homo sapiens
tatctctccaaacta

SEQ ID NO: 1580401 - DNA, 15 bp, Homo sapiens
ctatctctccaaact

SEQ ID NO: 1580402 - DNA, 15 bp, Homo sapiens
cctatctctccaaac

SEQ ID NO: 1580403 - DNA, 15 bp, Homo sapiens
acctatctctccaaa

SEQ ID NO: 1580404 - DNA, 15 bp, Homo sapiens
aacctatctctccaa

SEQ ID NO: 1580405 - DNA, 15 bp, Homo sapiens
caacctatctctcca

SEQ ID NO: 1580406 - DNA, 15 bp, Homo sapiens
ccaacctatctctcc

SEQ ID NO: 1580407 - DNA, 15 bp, Homo sapiens
tccaacctatctctc

SEQ ID NO: 1580408 - DNA, 15 bp, Homo sapiens
gtccaacctatctct

SEQ ID NO: 1580409 - DNA, 15 bp, Homo sapiens
agtccaacctatctc

SEQ ID NO: 1580410 - DNA, 15 bp, Homo sapiens
tagtccaacctatct

SEQ ID NO: 1580411 - DNA, 15 bp, Homo sapiens
atagtccaacctatc

SEQ ID NO: 1580412 - DNA, 15 bp, Homo sapiens
catagtccaacctat

SEQ ID NO: 1580413 - DNA, 15 bp, Homo sapiens
acatagtccaaccta

SEQ ID NO: 1580414 - DNA, 15 bp, Homo sapiens
gacatagtccaacct

SEQ ID NO: 1580415 - DNA, 15 bp, Homo sapiens
ggacatagtccaacc

SEQ ID NO: 1580416 - DNA, 15 bp, Homo sapiens
aggacatagtccaac

SEQ ID NO: 1580417 - DNA, 15 bp, Homo sapiens
caggacatagtccaa

SEQ ID NO: 1580418 - DNA, 15 bp, Homo sapiens
acaggacatagtcca

SEQ ID NO: 1580419 - DNA, 15 bp, Homo sapiens
cacaggacatagtcc

SEQ ID NO: 1580420 - DNA, 15 bp, Homo sapiens
ccacaggacatagtc

SEQ ID NO: 1580421 - DNA, 15 bp, Homo sapiens
tccacaggacatagt

SEQ ID NO: 1580422 - DNA, 15 bp, Homo sapiens
gtccacaggacatag

SEQ ID NO: 1580423 - DNA, 15 bp, Homo sapiens
tgtccacaggacata

SEQ ID NO: 1580424 - DNA, 15 bp, Homo sapiens
ctgtccacaggacat

SEQ ID NO: 1580425 - DNA, 15 bp, Homo sapiens
cctgtccacaggaca

SEQ ID NO: 1580426 - DNA, 15 bp, Homo sapiens
tcctgtccacaggac

SEQ ID NO: 1580427 - DNA, 15 bp, Homo sapiens
atcctgtccacagga

SEQ ID NO: 1580428 - DNA, 15 bp, Homo sapiens
aatcctgtccacagg

SEQ ID NO: 1580429 - DNA, 15 bp, Homo sapiens
caatcctgtccacag

SEQ ID NO: 1580430 - DNA, 15 bp, Homo sapiens
acaatcctgtccaca

SEQ ID NO: 1580431 - DNA, 15 bp, Homo sapiens
cacaatcctgtccac

SEQ ID NO: 1580432 - DNA, 15 bp, Homo sapiens
ccacaatcctgtcca

SEQ ID NO: 1580433 - DNA, 15 bp, Homo sapiens
tccacaatcctgtcc

SEQ ID NO: 1580434 - DNA, 15 bp, Homo sapiens
gtccacaatcctgtc

SEQ ID NO: 1580435 - DNA, 15 bp, Homo sapiens
agtccacaatcctgt

SEQ ID NO: 1580436 - DNA, 15 bp, Homo sapiens
tagtccacaatcctg

SEQ ID NO: 1580437 - DNA, 15 bp, Homo sapiens
ctagtccacaatcct

SEQ ID NO: 1580438 - DNA, 15 bp, Homo sapiens
tctagtccacaatcc

SEQ ID NO: 1580439 - DNA, 15 bp, Homo sapiens
gtctagtccacaatc

SEQ ID NO: 1580440 - DNA, 15 bp, Homo sapiens
agtctagtccacaat

SEQ ID NO: 1580441 - DNA, 15 bp, Homo sapiens
cagtctagtccacaa

SEQ ID NO: 1580442 - DNA, 15 bp, Homo sapiens
ccagtctagtccaca

SEQ ID NO: 1580443 - DNA, 15 bp, Homo sapiens
cccagtctagtccac

SEQ ID NO: 1580444 - DNA, 15 bp, Homo sapiens
tcccagtctagtcca

SEQ ID NO: 1580445 - DNA, 15 bp, Homo sapiens
ctcccagtctagtcc

SEQ ID NO: 1580446 - DNA, 15 bp, Homo sapiens
tctcccagtctagtc

SEQ ID NO: 1580447 - DNA, 15 bp, Homo sapiens
ctctcccagtctagt

SEQ ID NO: 1580448 - DNA, 15 bp, Homo sapiens
gctctcccagtctag

SEQ ID NO: 1580449 - DNA, 15 bp, Homo sapiens
ggctctcccagtcta

SEQ ID NO: 1580450 - DNA, 15 bp, Homo sapiens
aggctctcccagtct

SEQ ID NO: 1580451 - DNA, 15 bp, Homo sapiens
taggctctcccagtc

SEQ ID NO: 1580452 - DNA, 15 bp, Homo sapiens
ctaggctctcccagt

SEQ ID NO: 1580453 - DNA, 15 bp, Homo sapiens
cctaggctctcccag

SEQ ID NO: 1580454 - DNA, 15 bp, Homo sapiens
ccctaggctctccca

SEQ ID NO: 1580455 - DNA, 15 bp, Homo sapiens
accctaggctctccc

SEQ ID NO: 1580456 - DNA, 15 bp, Homo sapiens
taccctaggctctcc

SEQ ID NO: 1580457 - DNA, 15 bp, Homo sapiens
ctaccctaggctctc

SEQ ID NO: 1580458 - DNA, 15 bp, Homo sapiens
cctaccctaggctct

SEQ ID NO: 1580459 - DNA, 15 bp, Homo sapiens
tcctaccctaggctc

SEQ ID NO: 1580460 - DNA, 15 bp, Homo sapiens
ttcctaccctaggct

SEQ ID NO: 1580461 - DNA, 15 bp, Homo sapiens
attcctaccctaggc

SEQ ID NO: 1580462 - DNA, 15 bp, Homo sapiens
tattcctaccctagg

SEQ ID NO: 1580463 - DNA, 15 bp, Homo sapiens
cctagaaatgtgccc

SEQ ID NO: 1580464 - DNA, 15 bp, Homo sapiens
tcctagaaatgtgcc

SEQ ID NO: 1580465 - DNA, 15 bp, Homo sapiens
ttcctagaaatgtgc

SEQ ID NO: 1580466 - DNA, 15 bp, Homo sapiens
gttcctagaaatgtg

SEQ ID NO: 1580467 - DNA, 15 bp, Homo sapiens
tgttcctagaaatgt

SEQ ID NO: 1580468 - DNA, 15 bp, Homo sapiens
atgttcctagaaatg

SEQ ID NO: 1580469 - DNA, 15 bp, Homo sapiens
catgttcctagaaat

SEQ ID NO: 1580470 - DNA, 15 bp, Homo sapiens
acatgttcctagaaa

SEQ ID NO: 1580471 - DNA, 15 bp, Homo sapiens
gacatgttcctagaa

SEQ ID NO: 1580472 - DNA, 15 bp, Homo sapiens
agacatgttcctaga

SEQ ID NO: 1580473 - DNA, 15 bp, Homo sapiens
tagacatgttcctag

SEQ ID NO: 1580474 - DNA, 15 bp, Homo sapiens
ttagacatgttccta

SEQ ID NO: 1580475 - DNA, 15 bp, Homo sapiens
cttagacatgttcct

SEQ ID NO: 1580476 - DNA, 15 bp, Homo sapiens
acttagacatgttcc

SEQ ID NO: 1580477 - DNA, 15 bp, Homo sapiens
cacttagacatgttc

SEQ ID NO: 1580478 - DNA, 15 bp, Homo sapiens
acacttagacatgtt

SEQ ID NO: 1580479 - DNA, 15 bp, Homo sapiens
aacacttagacatgt

SEQ ID NO: 1580480 - DNA, 15 bp, Homo sapiens
aaacacttagacatg

SEQ ID NO: 1580481 - DNA, 15 bp, Homo sapiens
aaaacacttagacat

SEQ ID NO: 1580482 - DNA, 15 bp, Homo sapiens
aaaaacacttagaca

SEQ ID NO: 1580483 - DNA, 15 bp, Homo sapiens
caaaaacacttagac

SEQ ID NO: 1580484 - DNA, 15 bp, Homo sapiens
tcaaaaacacttaga

SEQ ID NO: 1580485 - DNA, 15 bp, Homo sapiens
ctcaaaaacacttag

SEQ ID NO: 1580486 - DNA, 15 bp, Homo sapiens
tctcaaaaacactta

SEQ ID NO: 1580487 - DNA, 15 bp, Homo sapiens
atctcaaaaacactt

SEQ ID NO: 1580488 - DNA, 15 bp, Homo sapiens
catctcaaaaacact

SEQ ID NO: 1580489 - DNA, 15 bp, Homo sapiens
ccatctcaaaaacac

SEQ ID NO: 1580490 - DNA, 15 bp, Homo sapiens
gccatctcaaaaaca

SEQ ID NO: 1580491 - DNA, 15 bp, Homo sapiens
agccatctcaaaaac

SEQ ID NO: 1580492 - DNA, 15 bp, Homo sapiens
cagccatctcaaaaa

SEQ ID NO: 1580493 - DNA, 15 bp, Homo sapiens
acagccatctcaaaa

SEQ ID NO: 1580494 - DNA, 15 bp, Homo sapiens
aacagccatctcaaa

SEQ ID NO: 1580495 - DNA, 15 bp, Homo sapiens
taacagccatctcaa

SEQ ID NO: 1580496 - DNA, 15 bp, Homo sapiens
ttaacagccatctca

SEQ ID NO: 1580497 - DNA, 15 bp, Homo sapiens
tttaacagccatctc

SEQ ID NO: 1580498 - DNA, 15 bp, Homo sapiens
ttttaacagccatct

SEQ ID NO: 1580499 - DNA, 15 bp, Homo sapiens
attttaacagccatc

SEQ ID NO: 1580500 - DNA, 15 bp, Homo sapiens
gattttaacagccat

SEQ ID NO: 1580501 - DNA, 15 bp, Homo sapiens
tgattttaacagcca

SEQ ID NO: 1580502 - DNA, 15 bp, Homo sapiens
ttgattttaacagcc

SEQ ID NO: 1580503 - DNA, 15 bp, Homo sapiens
cttgattttaacagc

SEQ ID NO: 1580504 - DNA, 15 bp, Homo sapiens
ccttgattttaacag

SEQ ID NO: 1580505 - DNA, 15 bp, Homo sapiens
tccttgattttaaca

SEQ ID NO: 1580506 - DNA, 15 bp, Homo sapiens
ctccttgattttaac

SEQ ID NO: 1580507 - DNA, 15 bp, Homo sapiens
gctccttgattttaa

SEQ ID NO: 1580508 - DNA, 15 bp, Homo sapiens
agctccttgatttta

SEQ ID NO: 1580509 - DNA, 15 bp, Homo sapiens
cagctccttgatttt

SEQ ID NO: 1580510 - DNA, 15 bp, Homo sapiens
ccagctccttgattt

SEQ ID NO: 1580511 - DNA, 15 bp, Homo sapiens
tccagctccttgatt

SEQ ID NO: 1580512 - DNA, 15 bp, Homo sapiens
gtccagctccttgat

SEQ ID NO: 1580513 - DNA, 15 bp, Homo sapiens
cgtccagctccttga

SEQ ID NO: 1580514 - DNA, 15 bp, Homo sapiens
ccgtccagctccttg

SEQ ID NO: 1580515 - DNA, 15 bp, Homo sapiens
cccgtccagctcctt

SEQ ID NO: 1580516 - DNA, 15 bp, Homo sapiens
gcccgtccagctcct

SEQ ID NO: 1580517 - DNA, 15 bp, Homo sapiens
tgcccgtccagctcc

SEQ ID NO: 1580518 - DNA, 15 bp, Homo sapiens
gtgcccgtccagctc

SEQ ID NO: 1580519 - DNA, 15 bp, Homo sapiens
cgtgcccgtccagct

SEQ ID NO: 1580520 - DNA, 15 bp, Homo sapiens
tcgtgcccgtccagc

SEQ ID NO: 1580521 - DNA, 15 bp, Homo sapiens
atcgtgcccgtccag

SEQ ID NO: 1580522 - DNA, 15 bp, Homo sapiens
catcgtgcccgtcca

SEQ ID NO: 1580523 - DNA, 15 bp, Homo sapiens
ccatcgtgcccgtcc

SEQ ID NO: 1580524 - DNA, 15 bp, Homo sapiens
gccatcgtgcccgtc

SEQ ID NO: 1580525 - DNA, 15 bp, Homo sapiens
agccatcgtgcccgt

SEQ ID NO: 1580526 - DNA, 15 bp, Homo sapiens
gagccatcgtgcccg

SEQ ID NO: 1580527 - DNA, 15 bp, Homo sapiens
tgagccatcgtgccc

SEQ ID NO: 1580528 - DNA, 15 bp, Homo sapiens
atgagccatcgtgcc

SEQ ID NO: 1580529 - DNA, 15 bp, Homo sapiens
catgagccatcgtgc

SEQ ID NO: 1580530 - DNA, 15 bp, Homo sapiens
gcatgagccatcgtg

SEQ ID NO: 1580531 - DNA, 15 bp, Homo sapiens
ggcatgagccatcgt

SEQ ID NO: 1580532 - DNA, 15 bp, Homo sapiens
gggcatgagccatcg

SEQ ID NO: 1580533 - DNA, 15 bp, Homo sapiens
cgggcatgagccatc

SEQ ID NO: 1580534 - DNA, 15 bp, Homo sapiens
acgggcatgagccat

SEQ ID NO: 1580535 - DNA, 15 bp, Homo sapiens
aattacgggcatgag

SEQ ID NO: 1580536 - DNA, 15 bp, Homo sapiens
gaattacgggcatga

SEQ ID NO: 1580537 - DNA, 15 bp, Homo sapiens
ggaattacgggcatg

SEQ ID NO: 1580538 - DNA, 15 bp, Homo sapiens
tggaattacgggcat

SEQ ID NO: 1580539 - DNA, 15 bp, Homo sapiens
ctggaattacgggca

SEQ ID NO: 1580540 - DNA, 15 bp, Homo sapiens
gctggaattacgggc

SEQ ID NO: 1580541 - DNA, 15 bp, Homo sapiens
tgctggaattacggg

SEQ ID NO: 1580542 - DNA, 15 bp, Homo sapiens
gtgctggaattacgg

SEQ ID NO: 1580543 - DNA, 15 bp, Homo sapiens
agtgctggaattacg

SEQ ID NO: 1580544 - DNA, 15 bp, Homo sapiens
cggtctcccaaagtg

SEQ ID NO: 1580545 - DNA, 15 bp, Homo sapiens
gctcggtctcccaaa

SEQ ID NO: 1580546 - DNA, 15 bp, Homo sapiens
tgctcggtctcccaa

SEQ ID NO: 1580547 - DNA, 15 bp, Homo sapiens
ctgctcggtctccca

SEQ ID NO: 1580548 - DNA, 15 bp, Homo sapiens
cctgctcggtctccc

SEQ ID NO: 1580549 - DNA, 15 bp, Homo sapiens
ccctgctcggtctcc

SEQ ID NO: 1580550 - DNA, 15 bp, Homo sapiens
tccctgctcggtctc

SEQ ID NO: 1580551 - DNA, 15 bp, Homo sapiens
ctccctgctcggtct

SEQ ID NO: 1580552 - DNA, 15 bp, Homo sapiens
cctccctgctcggtc

SEQ ID NO: 1580553 - DNA, 15 bp, Homo sapiens
tcctccctgctcggt

SEQ ID NO: 1580554 - DNA, 15 bp, Homo sapiens
atcctccctgctcgg

SEQ ID NO: 1580555 - DNA, 15 bp, Homo sapiens
aatcctccctgctcg

SEQ ID NO: 1580556 - DNA, 15 bp, Homo sapiens
caatcctccctgctc

SEQ ID NO: 1580557 - DNA, 15 bp, Homo sapiens
gcaatcctccctgct

SEQ ID NO: 1580558 - DNA, 15 bp, Homo sapiens
agcaatcctccctgc

SEQ ID NO: 1580559 - DNA, 15 bp, Homo sapiens
aagcaatcctccctg

SEQ ID NO: 1580560 - DNA, 15 bp, Homo sapiens
caagcaatcctccct

SEQ ID NO: 1580561 - DNA, 15 bp, Homo sapiens
aggctcaagcaatcc

SEQ ID NO: 1580562 - DNA, 15 bp, Homo sapiens
taggctcaagcaatc

SEQ ID NO: 1580563 - DNA, 15 bp, Homo sapiens
ctaggctcaagcaat

SEQ ID NO: 1580564 - DNA, 15 bp, Homo sapiens
cctaggctcaagcaa

SEQ ID NO: 1580565 - DNA, 15 bp, Homo sapiens
tcctaggctcaagca

SEQ ID NO: 1580566 - DNA, 15 bp, Homo sapiens
ctcctaggctcaagc

SEQ ID NO: 1580567 - DNA, 15 bp, Homo sapiens
actcctaggctcaag

SEQ ID NO: 1580568 - DNA, 15 bp, Homo sapiens
aactcctaggctcaa

SEQ ID NO: 1580569 - DNA, 15 bp, Homo sapiens
aaactcctaggctca

SEQ ID NO: 1580570 - DNA, 15 bp, Homo sapiens
caaactcctaggctc

SEQ ID NO: 1580571 - DNA, 15 bp, Homo sapiens
tcaaactcctaggct

SEQ ID NO: 1580572 - DNA, 15 bp, Homo sapiens
ctcaaactcctaggc

SEQ ID NO: 1580573 - DNA, 15 bp, Homo sapiens
cctcaaactcctagg

SEQ ID NO: 1580574 - DNA, 15 bp, Homo sapiens
acctcaaactcctag

SEQ ID NO: 1580575 - DNA, 15 bp, Homo sapiens
cacctcaaactccta

SEQ ID NO: 1580576 - DNA, 15 bp, Homo sapiens
ccacctcaaactcct

SEQ ID NO: 1580577 - DNA, 15 bp, Homo sapiens
gccacctcaaactcc

SEQ ID NO: 1580578 - DNA, 15 bp, Homo sapiens
tgccacctcaaactc

SEQ ID NO: 1580579 - DNA, 15 bp, Homo sapiens
ctgccacctcaaact

SEQ ID NO: 1580580 - DNA, 15 bp, Homo sapiens
actgccacctcaaac

SEQ ID NO: 1580581 - DNA, 15 bp, Homo sapiens
cactgccacctcaaa

SEQ ID NO: 1580582 - DNA, 15 bp, Homo sapiens
tcactgccacctcaa

SEQ ID NO: 1580583 - DNA, 15 bp, Homo sapiens
ctcactgccacctca

SEQ ID NO: 1580584 - DNA, 15 bp, Homo sapiens
gctcactgccacctc

SEQ ID NO: 1580585 - DNA, 15 bp, Homo sapiens
agctcactgccacct

SEQ ID NO: 1580586 - DNA, 15 bp, Homo sapiens
tagctcactgccacc

SEQ ID NO: 1580587 - DNA, 15 bp, Homo sapiens
atagctcactgccac

SEQ ID NO: 1580588 - DNA, 15 bp, Homo sapiens
catagctcactgcca

SEQ ID NO: 1580589 - DNA, 15 bp, Homo sapiens
tcatagctcactgcc

SEQ ID NO: 1580590 - DNA, 15 bp, Homo sapiens
aatcatagctcactg

SEQ ID NO: 1580591 - DNA, 15 bp, Homo sapiens
taatcatagctcact

SEQ ID NO: 1580592 - DNA, 15 bp, Homo sapiens
gtaatcatagctcac

SEQ ID NO: 1580593 - DNA, 15 bp, Homo sapiens
tgtaatcatagctca

SEQ ID NO: 1580594 - DNA, 15 bp, Homo sapiens
gtgtaatcatagctc

SEQ ID NO: 1580595 - DNA, 15 bp, Homo sapiens
ggtgtaatcatagct

SEQ ID NO: 1580596 - DNA, 15 bp, Homo sapiens
cggtgtaatcatagc

SEQ ID NO: 1580597 - DNA, 15 bp, Homo sapiens
gcggtgtaatcatag

SEQ ID NO: 1580598 - DNA, 15 bp, Homo sapiens
agcggtgtaatcata

SEQ ID NO: 1580599 - DNA, 15 bp, Homo sapiens
tagcggtgtaatcat

SEQ ID NO: 1580600 - DNA, 15 bp, Homo sapiens
atagcggtgtaatca

SEQ ID NO: 1580601 - DNA, 15 bp, Homo sapiens
tatagcggtgtaatc

SEQ ID NO: 1580602 - DNA, 15 bp, Homo sapiens
gtatagcggtgtaat

SEQ ID NO: 1580603 - DNA, 15 bp, Homo sapiens
agtatagcggtgtaa

SEQ ID NO: 1580604 - DNA, 15 bp, Homo sapiens
gagtatagcggtgta

SEQ ID NO: 1580605 - DNA, 15 bp, Homo sapiens
agagtatagcggtgt

SEQ ID NO: 1580606 - DNA, 15 bp, Homo sapiens
cagagtatagcggtg

SEQ ID NO: 1580607 - DNA, 15 bp, Homo sapiens
ccagagtatagcggt

SEQ ID NO: 1580608 - DNA, 15 bp, Homo sapiens
gccagagtatagcgg

SEQ ID NO: 1580609 - DNA, 15 bp, Homo sapiens
ggccagagtatagcg

SEQ ID NO: 1580610 - DNA, 15 bp, Homo sapiens
aggccagagtatagc

SEQ ID NO: 1580611 - DNA, 15 bp, Homo sapiens
caggccagagtatag

SEQ ID NO: 1580612 - DNA, 15 bp, Homo sapiens
ccaggccagagtata

SEQ ID NO: 1580613 - DNA, 15 bp, Homo sapiens
cccaggccagagtat

SEQ ID NO: 1580614 - DNA, 15 bp, Homo sapiens
gcccaggccagagta

SEQ ID NO: 1580615 - DNA, 15 bp, Homo sapiens
tgcccaggccagagt

SEQ ID NO: 1580616 - DNA, 15 bp, Homo sapiens
ttgcccaggccagag

SEQ ID NO: 1580617 - DNA, 15 bp, Homo sapiens
gttgcccaggccaga

SEQ ID NO: 1580618 - DNA, 15 bp, Homo sapiens
tgttgcccaggccag

SEQ ID NO: 1580619 - DNA, 15 bp, Homo sapiens
ctgttgcccaggcca

SEQ ID NO: 1580620 - DNA, 15 bp, Homo sapiens
tctgttgcccaggcc

SEQ ID NO: 1580621 - DNA, 15 bp, Homo sapiens
ctctctgttgcccag

SEQ ID NO: 1580622 - DNA, 15 bp, Homo sapiens
tctctctgttgccca

SEQ ID NO: 1580623 - DNA, 15 bp, Homo sapiens
ctctctctgttgccc

SEQ ID NO: 1580624 - DNA, 15 bp, Homo sapiens
tctctctctgttgcc

SEQ ID NO: 1580625 - DNA, 15 bp, Homo sapiens
gtctctctctgttgc

SEQ ID NO: 1580626 - DNA, 15 bp, Homo sapiens
ggtctctctctgttg

SEQ ID NO: 1580627 - DNA, 15 bp, Homo sapiens
gggtctctctctgtt

SEQ ID NO: 1580628 - DNA, 15 bp, Homo sapiens
agggtctctctctgt

SEQ ID NO: 1580629 - DNA, 15 bp, Homo sapiens
cagggtctctctctg

SEQ ID NO: 1580630 - DNA, 15 bp, Homo sapiens
acagggtctctctct

SEQ ID NO: 1580631 - DNA, 15 bp, Homo sapiens
gacagggtctctctc

SEQ ID NO: 1580632 - DNA, 15 bp, Homo sapiens
aagacagggtctctc

SEQ ID NO: 1580633 - DNA, 15 bp, Homo sapiens
caagacagggtctct

SEQ ID NO: 1580634 - DNA, 15 bp, Homo sapiens
ccaagacagggtctc

SEQ ID NO: 1580635 - DNA, 15 bp, Homo sapiens
cccaagacagggtct

SEQ ID NO: 1580636 - DNA, 15 bp, Homo sapiens
ccccaagacagggtc

SEQ ID NO: 1580637 - DNA, 15 bp, Homo sapiens
cccccaagacagggt

SEQ ID NO: 1580638 - DNA, 15 bp, Homo sapiens
ccccccaagacaggg

SEQ ID NO: 1580639 - DNA, 15 bp, Homo sapiens
tccccccaagacagg

SEQ ID NO: 1580640 - DNA, 15 bp, Homo sapiens
ttccccccaagacag

SEQ ID NO: 1580641 - DNA, 15 bp, Homo sapiens
tttccccccaagaca

SEQ ID NO: 1580642 - DNA, 15 bp, Homo sapiens
ttttccccccaagac

SEQ ID NO: 1580643 - DNA, 15 bp, Homo sapiens
tttttccccccaaga

SEQ ID NO: 1580644 - DNA, 15 bp, Homo sapiens
ttttttccccccaag

SEQ ID NO: 1580645 - DNA, 15 bp, Homo sapiens
gttttttccccccaa

SEQ ID NO: 1580646 - DNA, 15 bp, Homo sapiens
tgttttttcccccca

SEQ ID NO: 1580647 - DNA, 15 bp, Homo sapiens
ttgttttttcccccc

SEQ ID NO: 1580648 - DNA, 15 bp, Homo sapiens
tttgttttttccccc

SEQ ID NO: 1580649 - DNA, 15 bp, Homo sapiens
ttttgttttttcccc

SEQ ID NO: 1580650 - DNA, 15 bp, Homo sapiens
gttttgttttttccc

SEQ ID NO: 1580651 - DNA, 15 bp, Homo sapiens
tgttttgttttttcc

SEQ ID NO: 1580652 - DNA, 15 bp, Homo sapiens
tttgttgttttgttt

SEQ ID NO: 1580653 - DNA, 15 bp, Homo sapiens
ttttgttgttttgtt

SEQ ID NO: 1580654 - DNA, 15 bp, Homo sapiens
tttttgttgttttgt

SEQ ID NO: 1580655 - DNA, 15 bp, Homo sapiens
ttttttgttgttttg

SEQ ID NO: 1580656 - DNA, 15 bp, Homo sapiens
gttttttgttgtttt

SEQ ID NO: 1580657 - DNA, 15 bp, Homo sapiens
tgttttttgttgttt

SEQ ID NO: 1580658 - DNA, 15 bp, Homo sapiens
ctgttttttgttgtt

SEQ ID NO: 1580659 - DNA, 15 bp, Homo sapiens
tctgttttttgttgt

SEQ ID NO: 1580660 - DNA, 15 bp, Homo sapiens
ttctgttttttgttg

SEQ ID NO: 1580661 - DNA, 15 bp, Homo sapiens
tttctgttttttgtt

SEQ ID NO: 1580662 - DNA, 15 bp, Homo sapiens
ttttctgttttttgt

SEQ ID NO: 1580663 - DNA, 15 bp, Homo sapiens
attttctgttttttg

SEQ ID NO: 1580664 - DNA, 15 bp, Homo sapiens
tattttctgtttttt

SEQ ID NO: 1580665 - DNA, 15 bp, Homo sapiens
ttattttctgttttt

SEQ ID NO: 1580666 - DNA, 15 bp, Homo sapiens
cttattttctgtttt

SEQ ID NO: 1580667 - DNA, 15 bp, Homo sapiens
ccttattttctgttt

SEQ ID NO: 1580668 - DNA, 15 bp, Homo sapiens
tccttattttctgtt

SEQ ID NO: 1580669 - DNA, 15 bp, Homo sapiens
ctccttattttctgt

SEQ ID NO: 1580670 - DNA, 15 bp, Homo sapiens
gctccttattttctg

SEQ ID NO: 1580671 - DNA, 15 bp, Homo sapiens
agctccttattttct

SEQ ID NO: 1580672 - DNA, 15 bp, Homo sapiens
aagctccttattttc

SEQ ID NO: 1580673 - DNA, 15 bp, Homo sapiens
taagctccttatttt

SEQ ID NO: 1580674 - DNA, 15 bp, Homo sapiens
gtaagctccttattt

SEQ ID NO: 1580675 - DNA, 15 bp, Homo sapiens
cgtaagctccttatt

SEQ ID NO: 1580676 - DNA, 15 bp, Homo sapiens
ccgtaagctccttat

SEQ ID NO: 1580677 - DNA, 15 bp, Homo sapiens
accgtaagctcctta

SEQ ID NO: 1580678 - DNA, 15 bp, Homo sapiens
gaccgtaagctcctt

SEQ ID NO: 1580679 - DNA, 15 bp, Homo sapiens
agaccgtaagctcct

SEQ ID NO: 1580680 - DNA, 15 bp, Homo sapiens
cagaccgtaagctcc

SEQ ID NO: 1580681 - DNA, 15 bp, Homo sapiens
gcagaccgtaagctc

SEQ ID NO: 1580682 - DNA, 15 bp, Homo sapiens
ggcagaccgtaagct

SEQ ID NO: 1580683 - DNA, 15 bp, Homo sapiens
aggcagaccgtaagc

SEQ ID NO: 1580684 - DNA, 15 bp, Homo sapiens
taggcagaccgtaag

SEQ ID NO: 1580685 - DNA, 15 bp, Homo sapiens
ttaggcagaccgtaa

SEQ ID NO: 1580686 - DNA, 15 bp, Homo sapiens
tttaggcagaccgta

SEQ ID NO: 1580687 - DNA, 15 bp, Homo sapiens
ttttaggcagaccgt

SEQ ID NO: 1580688 - DNA, 15 bp, Homo sapiens
tttttaggcagaccg

SEQ ID NO: 1580689 - DNA, 15 bp, Homo sapiens
ctttttaggcagacc

SEQ ID NO: 1580690 - DNA, 15 bp, Homo sapiens
tctttttaggcagac

SEQ ID NO: 1580691 - DNA, 15 bp, Homo sapiens
ttctttttaggcaga

SEQ ID NO: 1580692 - DNA, 15 bp, Homo sapiens
gttctttttaggcag

SEQ ID NO: 1580693 - DNA, 15 bp, Homo sapiens
tgttctttttaggca

SEQ ID NO: 1580694 - DNA, 15 bp, Homo sapiens
gtgttctttttaggc

SEQ ID NO: 1580695 - DNA, 15 bp, Homo sapiens
tgtgttctttttagg

SEQ ID NO: 1580696 - DNA, 15 bp, Homo sapiens
ttgtgttctttttag

SEQ ID NO: 1580697 - DNA, 15 bp, Homo sapiens
tttgtgttcttttta

SEQ ID NO: 1580698 - DNA, 15 bp, Homo sapiens
gtttgtgttcttttt

SEQ ID NO: 1580699 - DNA, 15 bp, Homo sapiens
tgtttgtgttctttt

SEQ ID NO: 1580700 - DNA, 15 bp, Homo sapiens
gtgtttgtgttcttt

SEQ ID NO: 1580701 - DNA, 15 bp, Homo sapiens
tgtgtttgtgttctt

SEQ ID NO: 1580702 - DNA, 15 bp, Homo sapiens
atgtgtttgtgttct

SEQ ID NO: 1580703 - DNA, 15 bp, Homo sapiens
catgtgtttgtgttc

SEQ ID NO: 1580704 - DNA, 15 bp, Homo sapiens
ccatgtgtttgtgtt

SEQ ID NO: 1580705 - DNA, 15 bp, Homo sapiens
gccatgtgtttgtgt

SEQ ID NO: 1580706 - DNA, 15 bp, Homo sapiens
tgccatgtgtttgtg

SEQ ID NO: 1580707 - DNA, 15 bp, Homo sapiens
ttgccatgtgtttgt

SEQ ID NO: 1580708 - DNA, 15 bp, Homo sapiens
attgccatgtgtttg

SEQ ID NO: 1580709 - DNA, 15 bp, Homo sapiens
aattgccatgtgttt

SEQ ID NO: 1580710 - DNA, 15 bp, Homo sapiens
taattgccatgtgtt

SEQ ID NO: 1580711 - DNA, 15 bp, Homo sapiens
ctaattgccatgtgt

SEQ ID NO: 1580712 - DNA, 15 bp, Homo sapiens
cctaattgccatgtg

SEQ ID NO: 1580713 - DNA, 15 bp, Homo sapiens
tcctaattgccatgt

SEQ ID NO: 1580714 - DNA, 15 bp, Homo sapiens
ttcctaattgccatg

SEQ ID NO: 1580715 - DNA, 15 bp, Homo sapiens
tttcctaattgccat

SEQ ID NO: 1580716 - DNA, 15 bp, Homo sapiens
atttcctaattgcca

SEQ ID NO: 1580717 - DNA, 15 bp, Homo sapiens
gatttcctaattgcc

SEQ ID NO: 1580718 - DNA, 15 bp, Homo sapiens
tgatttcctaattgc

SEQ ID NO: 1580719 - DNA, 15 bp, Homo sapiens
gtgatttcctaattg

SEQ ID NO: 1580720 - DNA, 15 bp, Homo sapiens
agtgatttcctaatt

SEQ ID NO: 1580721 - DNA, 15 bp, Homo sapiens
gagtgatttcctaat

SEQ ID NO: 1580722 - DNA, 15 bp, Homo sapiens
tgagtgatttcctaa

SEQ ID NO: 1580723 - DNA, 15 bp, Homo sapiens
ttgagtgatttccta

SEQ ID NO: 1580724 - DNA, 15 bp, Homo sapiens
attgagtgatttcct

SEQ ID NO: 1580725 - DNA, 15 bp, Homo sapiens
aattgagtgatttcc

SEQ ID NO: 1580726 - DNA, 15 bp, Homo sapiens
taattgagtgatttc

SEQ ID NO: 1580727 - DNA, 15 bp, Homo sapiens
ttaattgagtgattt

SEQ ID NO: 1580728 - DNA, 15 bp, Homo sapiens
cttaattgagtgatt

SEQ ID NO: 1580729 - DNA, 15 bp, Homo sapiens
tcttaattgagtgat

SEQ ID NO: 1580730 - DNA, 15 bp, Homo sapiens
ttcttaattgagtga

SEQ ID NO: 1580731 - DNA, 15 bp, Homo sapiens
tttcttaattgagtg

SEQ ID NO: 1580732 - DNA, 15 bp, Homo sapiens
atttcttaattgagt

SEQ ID NO: 1580733 - DNA, 15 bp, Homo sapiens
aatttcttaattgag

SEQ ID NO: 1580734 - DNA, 15 bp, Homo sapiens
caatttcttaattga

SEQ ID NO: 1580735 - DNA, 15 bp, Homo sapiens
gcaatttcttaattg

SEQ ID NO: 1580736 - DNA, 15 bp, Homo sapiens
agcaatttcttaatt

SEQ ID NO: 1580737 - DNA, 15 bp, Homo sapiens
aagcaatttcttaat

SEQ ID NO: 1580738 - DNA, 15 bp, Homo sapiens
taagcaatttcttaa

SEQ ID NO: 1580739 - DNA, 15 bp, Homo sapiens
ataagcaatttctta

SEQ ID NO: 1580740 - DNA, 15 bp, Homo sapiens
gataagcaatttctt

SEQ ID NO: 1580741 - DNA, 15 bp, Homo sapiens
tgataagcaatttct

SEQ ID NO: 1580742 - DNA, 15 bp, Homo sapiens
ttgataagcaatttc

SEQ ID NO: 1580743 - DNA, 15 bp, Homo sapiens
attgataagcaattt

SEQ ID NO: 1580744 - DNA, 15 bp, Homo sapiens
cattgataagcaatt

SEQ ID NO: 1580745 - DNA, 15 bp, Homo sapiens
acattgataagcaat

SEQ ID NO: 1580746 - DNA, 15 bp, Homo sapiens
tacattgataagcaa

SEQ ID NO: 1580747 - DNA, 15 bp, Homo sapiens
ttacattgataagca

SEQ ID NO: 1580748 - DNA, 15 bp, Homo sapiens
gttacattgataagc

SEQ ID NO: 1580749 - DNA, 15 bp, Homo sapiens
tgttacattgataag

SEQ ID NO: 1580750 - DNA, 15 bp, Homo sapiens
ctgttacattgataa

SEQ ID NO: 1580751 - DNA, 15 bp, Homo sapiens
tctgttacattgata

SEQ ID NO: 1580752 - DNA, 15 bp, Homo sapiens
ttctgttacattgat

SEQ ID NO: 1580753 - DNA, 15 bp, Homo sapiens
tttctgttacattga

SEQ ID NO: 1580754 - DNA, 15 bp, Homo sapiens
ttttctgttacattg

SEQ ID NO: 1580755 - DNA, 15 bp, Homo sapiens
cttttctgttacatt

SEQ ID NO: 1580756 - DNA, 15 bp, Homo sapiens
acttttctgttacat

SEQ ID NO: 1580757 - DNA, 15 bp, Homo sapiens
cacttttctgttaca

SEQ ID NO: 1580758 - DNA, 15 bp, Homo sapiens
acacttttctgttac

SEQ ID NO: 1580759 - DNA, 15 bp, Homo sapiens
tacacttttctgtta

SEQ ID NO: 1580760 - DNA, 15 bp, Homo sapiens
ttacacttttctgtt

SEQ ID NO: 1580761 - DNA, 15 bp, Homo sapiens
attacacttttctgt

SEQ ID NO: 1580762 - DNA, 15 bp, Homo sapiens
tattacacttttctg

SEQ ID NO: 1580763 - DNA, 15 bp, Homo sapiens
ctattacacttttct

SEQ ID NO: 1580764 - DNA, 15 bp, Homo sapiens
tctattacacttttc

SEQ ID NO: 1580765 - DNA, 15 bp, Homo sapiens
ctctattacactttt

SEQ ID NO: 1580766 - DNA, 15 bp, Homo sapiens
tctctattacacttt

SEQ ID NO: 1580767 - DNA, 15 bp, Homo sapiens
atctctattacactt

SEQ ID NO: 1580768 - DNA, 15 bp, Homo sapiens
aatctctattacact

SEQ ID NO: 1580769 - DNA, 15 bp, Homo sapiens
gaatctctattacac

SEQ ID NO: 1580770 - DNA, 15 bp, Homo sapiens
tgaatctctattaca

SEQ ID NO: 1580771 - DNA, 15 bp, Homo sapiens
atgaatctctattac

SEQ ID NO: 1580772 - DNA, 15 bp, Homo sapiens
gatgaatctctatta

SEQ ID NO: 1580773 - DNA, 15 bp, Homo sapiens
ggatgaatctctatt

SEQ ID NO: 1580774 - DNA, 15 bp, Homo sapiens
tggatgaatctctat

SEQ ID NO: 1580775 - DNA, 15 bp, Homo sapiens
atggatgaatctcta

SEQ ID NO: 1580776 - DNA, 15 bp, Homo sapiens
aatggatgaatctct

SEQ ID NO: 1580777 - DNA, 15 bp, Homo sapiens
aaatggatgaatctc

SEQ ID NO: 1580778 - DNA, 15 bp, Homo sapiens
taaatggatgaatct

SEQ ID NO: 1580779 - DNA, 15 bp, Homo sapiens
ataaatggatgaatc

SEQ ID NO: 1580780 - DNA, 15 bp, Homo sapiens
aataaatggatgaat

SEQ ID NO: 1580781 - DNA, 15 bp, Homo sapiens
gaataaatggatgaa

SEQ ID NO: 1580782 - DNA, 15 bp, Homo sapiens
agaataaatggatga

SEQ ID NO: 1580783 - DNA, 15 bp, Homo sapiens
cagaataaatggatg

SEQ ID NO: 1580784 - DNA, 15 bp, Homo sapiens
gcagaataaatggat

SEQ ID NO: 1580785 - DNA, 15 bp, Homo sapiens
tgcagaataaatgga

SEQ ID NO: 1580786 - DNA, 15 bp, Homo sapiens
gtgcagaataaatgg

SEQ ID NO: 1580787 - DNA, 15 bp, Homo sapiens
tgtgcagaataaatg

SEQ ID NO: 1580788 - DNA, 15 bp, Homo sapiens
gtgtgcagaataaat

SEQ ID NO: 1580789 - DNA, 15 bp, Homo sapiens
tgtgtgcagaataaa

SEQ ID NO: 1580790 - DNA, 15 bp, Homo sapiens
atgtgtgcagaataa

SEQ ID NO: 1580791 - DNA, 15 bp, Homo sapiens
tatgtgtgcagaata

SEQ ID NO: 1580792 - DNA, 15 bp, Homo sapiens
atatgtgtgcagaat

SEQ ID NO: 1580793 - DNA, 15 bp, Homo sapiens
tatatgtgtgcagaa

SEQ ID NO: 1580794 - DNA, 15 bp, Homo sapiens
atatatgtgtgcaga

SEQ ID NO: 1580795 - DNA, 15 bp, Homo sapiens
aatatatgtgtgcag

SEQ ID NO: 1580796 - DNA, 15 bp, Homo sapiens
caatatatgtgtgca

SEQ ID NO: 1580797 - DNA, 15 bp, Homo sapiens
tcaatatatgtgtgc

SEQ ID NO: 1580798 - DNA, 15 bp, Homo sapiens
ctcaatatatgtgtg

SEQ ID NO: 1580799 - DNA, 15 bp, Homo sapiens
gctcaatatatgtgt

SEQ ID NO: 1580800 - DNA, 15 bp, Homo sapiens
agctcaatatatgtg

SEQ ID NO: 1580801 - DNA, 15 bp, Homo sapiens
gagctcaatatatgt

SEQ ID NO: 1580802 - DNA, 15 bp, Homo sapiens
ggagctcaatatatg

SEQ ID NO: 1580803 - DNA, 15 bp, Homo sapiens
gggagctcaatatat

SEQ ID NO: 1580804 - DNA, 15 bp, Homo sapiens
tgggagctcaatata

SEQ ID NO: 1580805 - DNA, 15 bp, Homo sapiens
gtgggagctcaatat

SEQ ID NO: 1580806 - DNA, 15 bp, Homo sapiens
agtgggagctcaata

SEQ ID NO: 1580807 - DNA, 15 bp, Homo sapiens
tagtgggagctcaat

SEQ ID NO: 1580808 - DNA, 15 bp, Homo sapiens
atagtgggagctcaa

SEQ ID NO: 1580809 - DNA, 15 bp, Homo sapiens
catagtgggagctca

SEQ ID NO: 1580810 - DNA, 15 bp, Homo sapiens
acatagtgggagctc

SEQ ID NO: 1580811 - DNA, 15 bp, Homo sapiens
cacatagtgggagct

SEQ ID NO: 1580812 - DNA, 15 bp, Homo sapiens
acacatagtgggagc

SEQ ID NO: 1580813 - DNA, 15 bp, Homo sapiens
gacacatagtgggag

SEQ ID NO: 1580814 - DNA, 15 bp, Homo sapiens
tgacacatagtggga

SEQ ID NO: 1580815 - DNA, 15 bp, Homo sapiens
ctgacacatagtggg

SEQ ID NO: 1580816 - DNA, 15 bp, Homo sapiens
cctgacacatagtgg

SEQ ID NO: 1580817 - DNA, 15 bp, Homo sapiens
gcctgacacatagtg

SEQ ID NO: 1580818 - DNA, 15 bp, Homo sapiens
atgcctgacacatag

SEQ ID NO: 1580819 - DNA, 15 bp, Homo sapiens
aatgcctgacacata

SEQ ID NO: 1580820 - DNA, 15 bp, Homo sapiens
aaatgcctgacacat

SEQ ID NO: 1580821 - DNA, 15 bp, Homo sapiens
taaatgcctgacaca

SEQ ID NO: 1580822 - DNA, 15 bp, Homo sapiens
ctaaatgcctgacac

SEQ ID NO: 1580823 - DNA, 15 bp, Homo sapiens
actaaatgcctgaca

SEQ ID NO: 1580824 - DNA, 15 bp, Homo sapiens
aactaaatgcctgac

SEQ ID NO: 1580825 - DNA, 15 bp, Homo sapiens
caactaaatgcctga

SEQ ID NO: 1580826 - DNA, 15 bp, Homo sapiens
acaactaaatgcctg

SEQ ID NO: 1580827 - DNA, 15 bp, Homo sapiens
gacaactaaatgcct

SEQ ID NO: 1580828 - DNA, 15 bp, Homo sapiens
tgacaactaaatgcc

SEQ ID NO: 1580829 - DNA, 15 bp, Homo sapiens
ctgacaactaaatgc

SEQ ID NO: 1580830 - DNA, 15 bp, Homo sapiens
tctgacaactaaatg

SEQ ID NO: 1580831 - DNA, 15 bp, Homo sapiens
ttctgacaactaaat

SEQ ID NO: 1580832 - DNA, 15 bp, Homo sapiens
cttctgacaactaaa

SEQ ID NO: 1580833 - DNA, 15 bp, Homo sapiens
tcttctgacaactaa

SEQ ID NO: 1580834 - DNA, 15 bp, Homo sapiens
ctcttctgacaacta

SEQ ID NO: 1580835 - DNA, 15 bp, Homo sapiens
cctcttctgacaact

SEQ ID NO: 1580836 - DNA, 15 bp, Homo sapiens
gcctcttctgacaac

SEQ ID NO: 1580837 - DNA, 15 bp, Homo sapiens
tgcctcttctgacaa

SEQ ID NO: 1580838 - DNA, 15 bp, Homo sapiens
ttgcctcttctgaca

SEQ ID NO: 1580839 - DNA, 15 bp, Homo sapiens
attgcctcttctgac

SEQ ID NO: 1580840 - DNA, 15 bp, Homo sapiens
aattgcctcttctga

SEQ ID NO: 1580841 - DNA, 15 bp, Homo sapiens
caattgcctcttctg

SEQ ID NO: 1580842 - DNA, 15 bp, Homo sapiens
ccaattgcctcttct

SEQ ID NO: 1580843 - DNA, 15 bp, Homo sapiens
tccaattgcctcttc

SEQ ID NO: 1580844 - DNA, 15 bp, Homo sapiens
atccaattgcctctt

SEQ ID NO: 1580845 - DNA, 15 bp, Homo sapiens
aatccaattgcctct

SEQ ID NO: 1580846 - DNA, 15 bp, Homo sapiens
aaatccaattgcctc

SEQ ID NO: 1580847 - DNA, 15 bp, Homo sapiens
aaaatccaattgcct

SEQ ID NO: 1580848 - DNA, 15 bp, Homo sapiens
aaaaatccaattgcc

SEQ ID NO: 1580849 - DNA, 15 bp, Homo sapiens
taaaaatccaattgc

SEQ ID NO: 1580850 - DNA, 15 bp, Homo sapiens
ttaaaaatccaattg

SEQ ID NO: 1580851 - DNA, 15 bp, Homo sapiens
tttaaaaatccaatt

SEQ ID NO: 1580852 - DNA, 15 bp, Homo sapiens
ctttaaaaatccaat

SEQ ID NO: 1580853 - DNA, 15 bp, Homo sapiens
tctttaaaaatccaa

SEQ ID NO: 1580854 - DNA, 15 bp, Homo sapiens
ctctttaaaaatcca

SEQ ID NO: 1580855 - DNA, 15 bp, Homo sapiens
tctctttaaaaatcc

SEQ ID NO: 1580856 - DNA, 15 bp, Homo sapiens
ttctctttaaaaatc

SEQ ID NO: 1580857 - DNA, 15 bp, Homo sapiens
cttctctttaaaaat

SEQ ID NO: 1580858 - DNA, 15 bp, Homo sapiens
ccttctctttaaaaa

SEQ ID NO: 1580859 - DNA, 15 bp, Homo sapiens
tccttctctttaaaa

SEQ ID NO: 1580860 - DNA, 15 bp, Homo sapiens
atccttctctttaaa

SEQ ID NO: 1580861 - DNA, 15 bp, Homo sapiens
tatccttctctttaa

SEQ ID NO: 1580862 - DNA, 15 bp, Homo sapiens
atatccttctcttta

SEQ ID NO: 1580863 - DNA, 15 bp, Homo sapiens
catatccttctcttt

SEQ ID NO: 1580864 - DNA, 15 bp, Homo sapiens
tcatatccttctctt

SEQ ID NO: 1580865 - DNA, 15 bp, Homo sapiens
gtcatatccttctct

SEQ ID NO: 1580866 - DNA, 15 bp, Homo sapiens
agtcatatccttctc

SEQ ID NO: 1580867 - DNA, 15 bp, Homo sapiens
aagtcatatccttct

SEQ ID NO: 1580868 - DNA, 15 bp, Homo sapiens
taagtcatatccttc

SEQ ID NO: 1580869 - DNA, 15 bp, Homo sapiens
ctaagtcatatcctt

SEQ ID NO: 1580870 - DNA, 15 bp, Homo sapiens
actaagtcatatcct

SEQ ID NO: 1580871 - DNA, 15 bp, Homo sapiens
aactaagtcatatcc

SEQ ID NO: 1580872 - DNA, 15 bp, Homo sapiens
caactaagtcatatc

SEQ ID NO: 1580873 - DNA, 15 bp, Homo sapiens
acaactaagtcatat

SEQ ID NO: 1580874 - DNA, 15 bp, Homo sapiens
cacaactaagtcata

SEQ ID NO: 1580875 - DNA, 15 bp, Homo sapiens
ccacaactaagtcat

SEQ ID NO: 1580876 - DNA, 15 bp, Homo sapiens
cccacaactaagtca

SEQ ID NO: 1580877 - DNA, 15 bp, Homo sapiens
ccccacaactaagtc

SEQ ID NO: 1580878 - DNA, 15 bp, Homo sapiens
gccccacaactaagt

SEQ ID NO: 1580879 - DNA, 15 bp, Homo sapiens
agccccacaactaag

SEQ ID NO: 1580880 - DNA, 15 bp, Homo sapiens
cagccccacaactaa

SEQ ID NO: 1580881 - DNA, 15 bp, Homo sapiens
ccagccccacaacta

SEQ ID NO: 1580882 - DNA, 15 bp, Homo sapiens
tccagccccacaact

SEQ ID NO: 1580883 - DNA, 15 bp, Homo sapiens
ttccagccccacaac

SEQ ID NO: 1580884 - DNA, 15 bp, Homo sapiens
tttccagccccacaa

SEQ ID NO: 1580885 - DNA, 15 bp, Homo sapiens
ctttccagccccaca

SEQ ID NO: 1580886 - DNA, 15 bp, Homo sapiens
tctttccagccccac

SEQ ID NO: 1580887 - DNA, 15 bp, Homo sapiens
ttctttccagcccca

SEQ ID NO: 1580888 - DNA, 15 bp, Homo sapiens
attctttccagcccc

SEQ ID NO: 1580889 - DNA, 15 bp, Homo sapiens
cattctttccagccc

SEQ ID NO: 1580890 - DNA, 15 bp, Homo sapiens
tcattctttccagcc

SEQ ID NO: 1580891 - DNA, 15 bp, Homo sapiens
atcattctttccagc

SEQ ID NO: 1580892 - DNA, 15 bp, Homo sapiens
aatcattctttccag

SEQ ID NO: 1580893 - DNA, 15 bp, Homo sapiens
aaatcattctttcca

SEQ ID NO: 1580894 - DNA, 15 bp, Homo sapiens
aaaatcattctttcc

SEQ ID NO: 1580895 - DNA, 15 bp, Homo sapiens
aaaaatcattctttc

SEQ ID NO: 1580896 - DNA, 15 bp, Homo sapiens
gaaaaatcattcttt

SEQ ID NO: 1580897 - DNA, 15 bp, Homo sapiens
agaaaaatcattctt

SEQ ID NO: 1580898 - DNA, 15 bp, Homo sapiens
cagaaaaatcattct

SEQ ID NO: 1580899 - DNA, 15 bp, Homo sapiens
ccagaaaaatcattc

SEQ ID NO: 1580900 - DNA, 15 bp, Homo sapiens
gccagaaaaatcatt

SEQ ID NO: 1580901 - DNA, 15 bp, Homo sapiens
agccagaaaaatcat

SEQ ID NO: 1580902 - DNA, 15 bp, Homo sapiens
tagccagaaaaatca

SEQ ID NO: 1580903 - DNA, 15 bp, Homo sapiens
ttagccagaaaaatc

SEQ ID NO: 1580904 - DNA, 15 bp, Homo sapiens
cttagccagaaaaat

SEQ ID NO: 1580905 - DNA, 15 bp, Homo sapiens
acttagccagaaaaa

SEQ ID NO: 1580906 - DNA, 15 bp, Homo sapiens
cacttagccagaaaa

SEQ ID NO: 1580907 - DNA, 15 bp, Homo sapiens
tcacttagccagaaa

SEQ ID NO: 1580908 - DNA, 15 bp, Homo sapiens
ttcacttagccagaa

SEQ ID NO: 1580909 - DNA, 15 bp, Homo sapiens
tttcacttagccaga

SEQ ID NO: 1580910 - DNA, 15 bp, Homo sapiens
ttttcacttagccag

SEQ ID NO: 1580911 - DNA, 15 bp, Homo sapiens
tttttcacttagcca

SEQ ID NO: 1580912 - DNA, 15 bp, Homo sapiens
ctttttcacttagcc

SEQ ID NO: 1580913 - DNA, 15 bp, Homo sapiens
tctttttcacttagc

SEQ ID NO: 1580914 - DNA, 15 bp, Homo sapiens
ttctttttcacttag

SEQ ID NO: 1580915 - DNA, 15 bp, Homo sapiens
attctttttcactta

SEQ ID NO: 1580916 - DNA, 15 bp, Homo sapiens
tattctttttcactt

SEQ ID NO: 1580917 - DNA, 15 bp, Homo sapiens
ctattctttttcact

SEQ ID NO: 1580918 - DNA, 15 bp, Homo sapiens
gctattctttttcac

SEQ ID NO: 1580919 - DNA, 15 bp, Homo sapiens
tgctattctttttca

SEQ ID NO: 1580920 - DNA, 15 bp, Homo sapiens
ctgctattctttttc

SEQ ID NO: 1580921 - DNA, 15 bp, Homo sapiens
tctgctattcttttt

SEQ ID NO: 1580922 - DNA, 15 bp, Homo sapiens
ctctgctattctttt

SEQ ID NO: 1580923 - DNA, 15 bp, Homo sapiens
actctgctattcttt

SEQ ID NO: 1580924 - DNA, 15 bp, Homo sapiens
tactctgctattctt

SEQ ID NO: 1580925 - DNA, 15 bp, Homo sapiens
ttactctgctattct

SEQ ID NO: 1580926 - DNA, 15 bp, Homo sapiens
gttactctgctattc

SEQ ID NO: 1580927 - DNA, 15 bp, Homo sapiens
tgttactctgctatt

SEQ ID NO: 1580928 - DNA, 15 bp, Homo sapiens
atgttactctgctat

SEQ ID NO: 1580929 - DNA, 15 bp, Homo sapiens
catgttactctgcta

SEQ ID NO: 1580930 - DNA, 15 bp, Homo sapiens
ccatgttactctgct

SEQ ID NO: 1580931 - DNA, 15 bp, Homo sapiens
cccatgttactctgc

SEQ ID NO: 1580932 - DNA, 15 bp, Homo sapiens
gcccatgttactctg

SEQ ID NO: 1580933 - DNA, 15 bp, Homo sapiens
tgcccatgttactct

SEQ ID NO: 1580934 - DNA, 15 bp, Homo sapiens
atgcccatgttactc

SEQ ID NO: 1580935 - DNA, 15 bp, Homo sapiens
tatgcccatgttact

SEQ ID NO: 1580936 - DNA, 15 bp, Homo sapiens
atatgcccatgttac

SEQ ID NO: 1580937 - DNA, 15 bp, Homo sapiens
aatatgcccatgtta

SEQ ID NO: 1580938 - DNA, 15 bp, Homo sapiens
caatatgcccatgtt

SEQ ID NO: 1580939 - DNA, 15 bp, Homo sapiens
ccaatatgcccatgt

SEQ ID NO: 1580940 - DNA, 15 bp, Homo sapiens
gccaatatgcccatg

SEQ ID NO: 1580941 - DNA, 15 bp, Homo sapiens
agccaatatgcccat

SEQ ID NO: 1580942 - DNA, 15 bp, Homo sapiens
cagccaatatgccca

SEQ ID NO: 1580943 - DNA, 15 bp, Homo sapiens
ccagccaatatgccc

SEQ ID NO: 1580944 - DNA, 15 bp, Homo sapiens
cccagccaatatgcc

SEQ ID NO: 1580945 - DNA, 15 bp, Homo sapiens
tcccagccaatatgc

SEQ ID NO: 1580946 - DNA, 15 bp, Homo sapiens
atcccagccaatatg

SEQ ID NO: 1580947 - DNA, 15 bp, Homo sapiens
catcccagccaatat

SEQ ID NO: 1580948 - DNA, 15 bp, Homo sapiens
ccatcccagccaata

SEQ ID NO: 1580949 - DNA, 15 bp, Homo sapiens
cccatcccagccaat

SEQ ID NO: 1580950 - DNA, 15 bp, Homo sapiens
acccatcccagccaa

SEQ ID NO: 1580951 - DNA, 15 bp, Homo sapiens
aacccatcccagcca

SEQ ID NO: 1580952 - DNA, 15 bp, Homo sapiens
aaacccatcccagcc

SEQ ID NO: 1580953 - DNA, 15 bp, Homo sapiens
caaacccatcccagc

SEQ ID NO: 1580954 - DNA, 15 bp, Homo sapiens
ccaaacccatcccag

SEQ ID NO: 1580955 - DNA, 15 bp, Homo sapiens
cccaaacccatccca

SEQ ID NO: 1580956 - DNA, 15 bp, Homo sapiens
tcccaaacccatccc

SEQ ID NO: 1580957 - DNA, 15 bp, Homo sapiens
ctcccaaacccatcc

SEQ ID NO: 1580958 - DNA, 15 bp, Homo sapiens
cctcccaaacccatc

SEQ ID NO: 1580959 - DNA, 15 bp, Homo sapiens
ccctcccaaacccat

SEQ ID NO: 1580960 - DNA, 15 bp, Homo sapiens
accctcccaaaccca

SEQ ID NO: 1580961 - DNA, 15 bp, Homo sapiens
caccctcccaaaccc

SEQ ID NO: 1580962 - DNA, 15 bp, Homo sapiens
ccaccctcccaaacc

SEQ ID NO: 1580963 - DNA, 15 bp, Homo sapiens
tccaccctcccaaac

SEQ ID NO: 1580964 - DNA, 15 bp, Homo sapiens
ctccaccctcccaaa

SEQ ID NO: 1580965 - DNA, 15 bp, Homo sapiens
tctccaccctcccaa

SEQ ID NO: 1580966 - DNA, 15 bp, Homo sapiens
ctctccaccctccca

SEQ ID NO: 1580967 - DNA, 15 bp, Homo sapiens
cctctccaccctccc

SEQ ID NO: 1580968 - DNA, 15 bp, Homo sapiens
tcctctccaccctcc

SEQ ID NO: 1580969 - DNA, 15 bp, Homo sapiens
atcctctccaccctc

SEQ ID NO: 1580970 - DNA, 15 bp, Homo sapiens
gatcctctccaccct

SEQ ID NO: 1580971 - DNA, 15 bp, Homo sapiens
agatcctctccaccc

SEQ ID NO: 1580972 - DNA, 15 bp, Homo sapiens
cagatcctctccacc

SEQ ID NO: 1580973 - DNA, 15 bp, Homo sapiens
ccagatcctctccac

SEQ ID NO: 1580974 - DNA, 15 bp, Homo sapiens
accagatcctctcca

SEQ ID NO: 1580975 - DNA, 15 bp, Homo sapiens
aaccagatcctctcc

SEQ ID NO: 1580976 - DNA, 15 bp, Homo sapiens
aaaccagatcctctc

SEQ ID NO: 1580977 - DNA, 15 bp, Homo sapiens
aaaaccagatcctct

SEQ ID NO: 1580978 - DNA, 15 bp, Homo sapiens
caaaaccagatcctc

SEQ ID NO: 1580979 - DNA, 15 bp, Homo sapiens
tcaaaaccagatcct

SEQ ID NO: 1580980 - DNA, 15 bp, Homo sapiens
gtcaaaaccagatcc

SEQ ID NO: 1580981 - DNA, 15 bp, Homo sapiens
ggtcaaaaccagatc

SEQ ID NO: 1580982 - DNA, 15 bp, Homo sapiens
tggtcaaaaccagat

SEQ ID NO: 1580983 - DNA, 15 bp, Homo sapiens
ctggtcaaaaccaga

SEQ ID NO: 1580984 - DNA, 15 bp, Homo sapiens
tctggtcaaaaccag

SEQ ID NO: 1580985 - DNA, 15 bp, Homo sapiens
ctctggtcaaaacca

SEQ ID NO: 1580986 - DNA, 15 bp, Homo sapiens
actctggtcaaaacc

SEQ ID NO: 1580987 - DNA, 15 bp, Homo sapiens
gactctggtcaaaac

SEQ ID NO: 1580988 - DNA, 15 bp, Homo sapiens
ggactctggtcaaaa

SEQ ID NO: 1580989 - DNA, 15 bp, Homo sapiens
tggactctggtcaaa

SEQ ID NO: 1580990 - DNA, 15 bp, Homo sapiens
ttggactctggtcaa

SEQ ID NO: 1580991 - DNA, 15 bp, Homo sapiens
tttggactctggtca

SEQ ID NO: 1580992 - DNA, 15 bp, Homo sapiens
ctttggactctggtc

SEQ ID NO: 1580993 - DNA, 15 bp, Homo sapiens
tctttggactctggt

SEQ ID NO: 1580994 - DNA, 15 bp, Homo sapiens
ttctttggactctgg

SEQ ID NO: 1580995 - DNA, 15 bp, Homo sapiens
cttctttggactctg

SEQ ID NO: 1580996 - DNA, 15 bp, Homo sapiens
ccttctttggactct

SEQ ID NO: 1580997 - DNA, 15 bp, Homo sapiens
cccttctttggactc

SEQ ID NO: 1580998 - DNA, 15 bp, Homo sapiens
ccccttctttggact

SEQ ID NO: 1580999 - DNA, 15 bp, Homo sapiens
cccccttctttggac

SEQ ID NO: 1581000 - DNA, 15 bp, Homo sapiens
tcccccttctttgga

SEQ ID NO: 1581001 - DNA, 15 bp, Homo sapiens
ttcccccttctttgg

SEQ ID NO: 1581002 - DNA, 15 bp, Homo sapiens
attcccccttctttg

SEQ ID NO: 1581003 - DNA, 15 bp, Homo sapiens
tattcccccttcttt

SEQ ID NO: 1581004 - DNA, 15 bp, Homo sapiens
ttattcccccttctt

SEQ ID NO: 1581005 - DNA, 15 bp, Homo sapiens
attattcccccttct

SEQ ID NO: 1581006 - DNA, 15 bp, Homo sapiens
aattattcccccttc

SEQ ID NO: 1581007 - DNA, 15 bp, Homo sapiens
aaattattccccctt

SEQ ID NO: 1581008 - DNA, 15 bp, Homo sapiens
caaattattccccct

SEQ ID NO: 1581009 - DNA, 15 bp, Homo sapiens
ccaaattattccccc

SEQ ID NO: 1581010 - DNA, 15 bp, Homo sapiens
cccaaattattcccc

SEQ ID NO: 1581011 - DNA, 15 bp, Homo sapiens
ccccaaattattccc

SEQ ID NO: 1581012 - DNA, 15 bp, Homo sapiens
cccccaaattattcc

SEQ ID NO: 1581013 - DNA, 15 bp, Homo sapiens
tcccccaaattattc

SEQ ID NO: 1581014 - DNA, 15 bp, Homo sapiens
ttcccccaaattatt

SEQ ID NO: 1581015 - DNA, 15 bp, Homo sapiens
tttcccccaaattat

SEQ ID NO: 1581016 - DNA, 15 bp, Homo sapiens
ctttcccccaaatta

SEQ ID NO: 1581017 - DNA, 15 bp, Homo sapiens
gctttcccccaaatt

SEQ ID NO: 1581018 - DNA, 15 bp, Homo sapiens
ggctttcccccaaat

SEQ ID NO: 1581019 - DNA, 15 bp, Homo sapiens
aggctttcccccaaa

SEQ ID NO: 1581020 - DNA, 15 bp, Homo sapiens
caggctttcccccaa

SEQ ID NO: 1581021 - DNA, 15 bp, Homo sapiens
gcaggctttccccca

SEQ ID NO: 1581022 - DNA, 15 bp, Homo sapiens
ggcaggctttccccc

SEQ ID NO: 1581023 - DNA, 15 bp, Homo sapiens
aggcaggctttcccc

SEQ ID NO: 1581024 - DNA, 15 bp, Homo sapiens
caggcaggctttccc

SEQ ID NO: 1581025 - DNA, 15 bp, Homo sapiens
tcaggcaggctttcc

SEQ ID NO: 1581026 - DNA, 15 bp, Homo sapiens
ctcaggcaggctttc

SEQ ID NO: 1581027 - DNA, 15 bp, Homo sapiens
actcaggcaggcttt

SEQ ID NO: 1581028 - DNA, 15 bp, Homo sapiens
cactcaggcaggctt

SEQ ID NO: 1581029 - DNA, 15 bp, Homo sapiens
tcactcaggcaggct

SEQ ID NO: 1581030 - DNA, 15 bp, Homo sapiens
ctcactcaggcaggc

SEQ ID NO: 1581031 - DNA, 15 bp, Homo sapiens
actcactcaggcagg

SEQ ID NO: 1581032 - DNA, 15 bp, Homo sapiens
aactcactcaggcag

SEQ ID NO: 1581033 - DNA, 15 bp, Homo sapiens
caactcactcaggca

SEQ ID NO: 1581034 - DNA, 15 bp, Homo sapiens
ccaactcactcaggc

SEQ ID NO: 1581035 - DNA, 15 bp, Homo sapiens
accaactcactcagg

SEQ ID NO: 1581036 - DNA, 15 bp, Homo sapiens
taccaactcactcag

SEQ ID NO: 1581037 - DNA, 15 bp, Homo sapiens
gtaccaactcactca

SEQ ID NO: 1581038 - DNA, 15 bp, Homo sapiens
ggtaccaactcactc

SEQ ID NO: 1581039 - DNA, 15 bp, Homo sapiens
cggtaccaactcact

SEQ ID NO: 1581040 - DNA, 15 bp, Homo sapiens
acggtaccaactcac

SEQ ID NO: 1581041 - DNA, 15 bp, Homo sapiens
tacggtaccaactca

SEQ ID NO: 1581042 - DNA, 15 bp, Homo sapiens
ctacggtaccaactc

SEQ ID NO: 1581043 - DNA, 15 bp, Homo sapiens
tctacggtaccaact

SEQ ID NO: 1581044 - DNA, 15 bp, Homo sapiens
atctacggtaccaac

SEQ ID NO: 1581045 - DNA, 15 bp, Homo sapiens
aatctacggtaccaa

SEQ ID NO: 1581046 - DNA, 15 bp, Homo sapiens
caatctacggtacca

SEQ ID NO: 1581047 - DNA, 15 bp, Homo sapiens
ccaatctacggtacc

SEQ ID NO: 1581048 - DNA, 15 bp, Homo sapiens
tccaatctacggtac

SEQ ID NO: 1581049 - DNA, 15 bp, Homo sapiens
ctccaatctacggta

SEQ ID NO: 1581050 - DNA, 15 bp, Homo sapiens
tctccaatctacggt

SEQ ID NO: 1581051 - DNA, 15 bp, Homo sapiens
ctctccaatctacgg

SEQ ID NO: 1581052 - DNA, 15 bp, Homo sapiens
gctctccaatctacg

SEQ ID NO: 1581053 - DNA, 15 bp, Homo sapiens
agctctccaatctac

SEQ ID NO: 1581054 - DNA, 15 bp, Homo sapiens
cagctctccaatcta

SEQ ID NO: 1581055 - DNA, 15 bp, Homo sapiens
ccagctctccaatct

SEQ ID NO: 1581056 - DNA, 15 bp, Homo sapiens
tccagctctccaatc

SEQ ID NO: 1581057 - DNA, 15 bp, Homo sapiens
ttccagctctccaat

SEQ ID NO: 1581058 - DNA, 15 bp, Homo sapiens
cttccagctctccaa

SEQ ID NO: 1581059 - DNA, 15 bp, Homo sapiens
ccttccagctctcca

SEQ ID NO: 1581060 - DNA, 15 bp, Homo sapiens
gccttccagctctcc

SEQ ID NO: 1581061 - DNA, 15 bp, Homo sapiens
tgccttccagctctc

SEQ ID NO: 1581062 - DNA, 15 bp, Homo sapiens
gtgccttccagctct

SEQ ID NO: 1581063 - DNA, 15 bp, Homo sapiens
ggtgccttccagctc

SEQ ID NO: 1581064 - DNA, 15 bp, Homo sapiens
gggtgccttccagct

SEQ ID NO: 1581065 - DNA, 15 bp, Homo sapiens
tgggtgccttccagc

SEQ ID NO: 1581066 - DNA, 15 bp, Homo sapiens
atgggtgccttccag

SEQ ID NO: 1581067 - DNA, 15 bp, Homo sapiens
gatgggtgccttcca

SEQ ID NO: 1581068 - DNA, 15 bp, Homo sapiens
cgatgggtgccttcc

SEQ ID NO: 1581069 - DNA, 15 bp, Homo sapiens
tcgatgggtgccttc

SEQ ID NO: 1581070 - DNA, 15 bp, Homo sapiens
ctcgatgggtgcctt

SEQ ID NO: 1581071 - DNA, 15 bp, Homo sapiens
actcgatgggtgcct

SEQ ID NO: 1581072 - DNA, 15 bp, Homo sapiens
cactcgatgggtgcc

SEQ ID NO: 1581073 - DNA, 15 bp, Homo sapiens
acactcgatgggtgc

SEQ ID NO: 1581074 - DNA, 15 bp, Homo sapiens
tacactcgatgggtg

SEQ ID NO: 1581075 - DNA, 15 bp, Homo sapiens
ctacactcgatgggt

SEQ ID NO: 1581076 - DNA, 15 bp, Homo sapiens
gctacactcgatggg

SEQ ID NO: 1581077 - DNA, 15 bp, Homo sapiens
agctacactcgatgg

SEQ ID NO: 1581078 - DNA, 15 bp, Homo sapiens
tagctacactcgatg

SEQ ID NO: 1581079 - DNA, 15 bp, Homo sapiens
ctagctacactcgat

SEQ ID NO: 1581080 - DNA, 15 bp, Homo sapiens
actagctacactcga

SEQ ID NO: 1581081 - DNA, 15 bp, Homo sapiens
gactagctacactcg

SEQ ID NO: 1581082 - DNA, 15 bp, Homo sapiens
ggactagctacactc

SEQ ID NO: 1581083 - DNA, 15 bp, Homo sapiens
gggactagctacact

SEQ ID NO: 1581084 - DNA, 15 bp, Homo sapiens
tgggactagctacac

SEQ ID NO: 1581085 - DNA, 15 bp, Homo sapiens
ctgggactagctaca

SEQ ID NO: 1581086 - DNA, 15 bp, Homo sapiens
tctgggactagctac

SEQ ID NO: 1581087 - DNA, 15 bp, Homo sapiens
ttctgggactagcta

SEQ ID NO: 1581088 - DNA, 15 bp, Homo sapiens
cttctgggactagct

SEQ ID NO: 1581089 - DNA, 15 bp, Homo sapiens
acttctgggactagc

SEQ ID NO: 1581090 - DNA, 15 bp, Homo sapiens
aacttctgggactag

SEQ ID NO: 1581091 - DNA, 15 bp, Homo sapiens
aaacttctgggacta

SEQ ID NO: 1581092 - DNA, 15 bp, Homo sapiens
aaaacttctgggact

SEQ ID NO: 1581093 - DNA, 15 bp, Homo sapiens
gaaaacttctgggac

SEQ ID NO: 1581094 - DNA, 15 bp, Homo sapiens
ggaaaacttctggga

SEQ ID NO: 1581095 - DNA, 15 bp, Homo sapiens
aggaaaacttctggg

SEQ ID NO: 1581096 - DNA, 15 bp, Homo sapiens
taggaaaacttctgg

SEQ ID NO: 1581097 - DNA, 15 bp, Homo sapiens
gtaggaaaacttctg

SEQ ID NO: 1581098 - DNA, 15 bp, Homo sapiens
agtaggaaaacttct

SEQ ID NO: 1581099 - DNA, 15 bp, Homo sapiens
gagtaggaaaacttc

SEQ ID NO: 1581100 - DNA, 15 bp, Homo sapiens
ggagtaggaaaactt

SEQ ID NO: 1581101 - DNA, 15 bp, Homo sapiens
tggagtaggaaaact

SEQ ID NO: 1581102 - DNA, 15 bp, Homo sapiens
ttggagtaggaaaac

SEQ ID NO: 1581103 - DNA, 15 bp, Homo sapiens
attggagtaggaaaa

SEQ ID NO: 1581104 - DNA, 15 bp, Homo sapiens
tattggagtaggaaa

SEQ ID NO: 1581105 - DNA, 15 bp, Homo sapiens
atattggagtaggaa

SEQ ID NO: 1581106 - DNA, 15 bp, Homo sapiens
aatattggagtagga

SEQ ID NO: 1581107 - DNA, 15 bp, Homo sapiens
aaatattggagtagg

SEQ ID NO: 1581108 - DNA, 15 bp, Homo sapiens
aaaatattggagtag

SEQ ID NO: 1581109 - DNA, 15 bp, Homo sapiens
gaaaatattggagta

SEQ ID NO: 1581110 - DNA, 15 bp, Homo sapiens
agaaaatattggagt

SEQ ID NO: 1581111 - DNA, 15 bp, Homo sapiens
tagaaaatattggag

SEQ ID NO: 1581112 - DNA, 15 bp, Homo sapiens
ttagaaaatattgga

SEQ ID NO: 1581113 - DNA, 15 bp, Homo sapiens
tttagaaaatattgg

SEQ ID NO: 1581114 - DNA, 15 bp, Homo sapiens
ctttagaaaatattg

SEQ ID NO: 1581115 - DNA, 15 bp, Homo sapiens
cctttagaaaatatt

SEQ ID NO: 1581116 - DNA, 15 bp, Homo sapiens
acctttagaaaatat

SEQ ID NO: 1581117 - DNA, 15 bp, Homo sapiens
aacctttagaaaata

SEQ ID NO: 1581118 - DNA, 15 bp, Homo sapiens
taacctttagaaaat

SEQ ID NO: 1581119 - DNA, 15 bp, Homo sapiens
ataacctttagaaaa

SEQ ID NO: 1581120 - DNA, 15 bp, Homo sapiens
cataacctttagaaa

SEQ ID NO: 1581121 - DNA, 15 bp, Homo sapiens
gcataacctttagaa

SEQ ID NO: 1581122 - DNA, 15 bp, Homo sapiens
agcataacctttaga

SEQ ID NO: 1581123 - DNA, 15 bp, Homo sapiens
gagcataacctttag

SEQ ID NO: 1581124 - DNA, 15 bp, Homo sapiens
ggagcataaccttta

SEQ ID NO: 1581125 - DNA, 15 bp, Homo sapiens
aggagcataaccttt

SEQ ID NO: 1581126 - DNA, 15 bp, Homo sapiens
taggagcataacctt

SEQ ID NO: 1581127 - DNA, 15 bp, Homo sapiens
gtaggagcataacct

SEQ ID NO: 1581128 - DNA, 15 bp, Homo sapiens
agtaggagcataacc

SEQ ID NO: 1581129 - DNA, 15 bp, Homo sapiens
cagtaggagcataac

SEQ ID NO: 1581130 - DNA, 15 bp, Homo sapiens
gcagtaggagcataa

SEQ ID NO: 1581131 - DNA, 15 bp, Homo sapiens
agcagtaggagcata

SEQ ID NO: 1581132 - DNA, 15 bp, Homo sapiens
cagcagtaggagcat

SEQ ID NO: 1581133 - DNA, 15 bp, Homo sapiens
gcagcagtaggagca

SEQ ID NO: 1581134 - DNA, 15 bp, Homo sapiens
tgcagcagtaggagc

SEQ ID NO: 1581135 - DNA, 15 bp, Homo sapiens
ttgcagcagtaggag

SEQ ID NO: 1581136 - DNA, 15 bp, Homo sapiens
gttgcagcagtagga

SEQ ID NO: 1581137 - DNA, 15 bp, Homo sapiens
tgttgcagcagtagg

SEQ ID NO: 1581138 - DNA, 15 bp, Homo sapiens
gtgttgcagcagtag

SEQ ID NO: 1581139 - DNA, 15 bp, Homo sapiens
tgtgttgcagcagta

SEQ ID NO: 1581140 - DNA, 15 bp, Homo sapiens
ttgtgttgcagcagt

SEQ ID NO: 1581141 - DNA, 15 bp, Homo sapiens
cttgtgttgcagcag

SEQ ID NO: 1581142 - DNA, 15 bp, Homo sapiens
ccttgtgttgcagca

SEQ ID NO: 1581143 - DNA, 15 bp, Homo sapiens
gccttgtgttgcagc

SEQ ID NO: 1581144 - DNA, 15 bp, Homo sapiens
tgccttgtgttgcag

SEQ ID NO: 1581145 - DNA, 15 bp, Homo sapiens
ctgccttgtgttgca

SEQ ID NO: 1581146 - DNA, 15 bp, Homo sapiens
tctgccttgtgttgc

SEQ ID NO: 1581147 - DNA, 15 bp, Homo sapiens
ttctgccttgtgttg

SEQ ID NO: 1581148 - DNA, 15 bp, Homo sapiens
gttctgccttgtgtt

SEQ ID NO: 1581149 - DNA, 15 bp, Homo sapiens
ggttctgccttgtgt

SEQ ID NO: 1581150 - DNA, 15 bp, Homo sapiens
gggttctgccttgtg

SEQ ID NO: 1581151 - DNA, 15 bp, Homo sapiens
ggggttctgccttgt

SEQ ID NO: 1581152 - DNA, 15 bp, Homo sapiens
gggggttctgccttg

SEQ ID NO: 1581153 - DNA, 15 bp, Homo sapiens
agggggttctgcctt

SEQ ID NO: 1581154 - DNA, 15 bp, Homo sapiens
aagggggttctgcct

SEQ ID NO: 1581155 - DNA, 15 bp, Homo sapiens
caagggggttctgcc

SEQ ID NO: 1581156 - DNA, 15 bp, Homo sapiens
acaagggggttctgc

SEQ ID NO: 1581157 - DNA, 15 bp, Homo sapiens
cacaagggggttctg

SEQ ID NO: 1581158 - DNA, 15 bp, Homo sapiens
acacaagggggttct

SEQ ID NO: 1581159 - DNA, 15 bp, Homo sapiens
gacacaagggggttc

SEQ ID NO: 1581160 - DNA, 15 bp, Homo sapiens
tgacacaagggggtt

SEQ ID NO: 1581161 - DNA, 15 bp, Homo sapiens
ctgacacaagggggt

SEQ ID NO: 1581162 - DNA, 15 bp, Homo sapiens
cctgacacaaggggg

SEQ ID NO: 1581163 - DNA, 15 bp, Homo sapiens
gcctgacacaagggg

SEQ ID NO: 1581164 - DNA, 15 bp, Homo sapiens
agcctgacacaaggg

SEQ ID NO: 1581165 - DNA, 15 bp, Homo sapiens
cagcctgacacaagg

SEQ ID NO: 1581166 - DNA, 15 bp, Homo sapiens
acagcctgacacaag

SEQ ID NO: 1581167 - DNA, 15 bp, Homo sapiens
gacagcctgacacaa

SEQ ID NO: 1581168 - DNA, 15 bp, Homo sapiens
tgacagcctgacaca

SEQ ID NO: 1581169 - DNA, 15 bp, Homo sapiens
ttgacagcctgacac

SEQ ID NO: 1581170 - DNA, 15 bp, Homo sapiens
cttgacagcctgaca

SEQ ID NO: 1581171 - DNA, 15 bp, Homo sapiens
gcttgacagcctgac

SEQ ID NO: 1581172 - DNA, 15 bp, Homo sapiens
agcttgacagcctga

SEQ ID NO: 1581173 - DNA, 15 bp, Homo sapiens
tagcttgacagcctg

SEQ ID NO: 1581174 - DNA, 15 bp, Homo sapiens
ttagcttgacagcct

SEQ ID NO: 1581175 - DNA, 15 bp, Homo sapiens
attagcttgacagcc

SEQ ID NO: 1581176 - DNA, 15 bp, Homo sapiens
tattagcttgacagc

SEQ ID NO: 1581177 - DNA, 15 bp, Homo sapiens
ctattagcttgacag

SEQ ID NO: 1581178 - DNA, 15 bp, Homo sapiens
cctattagcttgaca

SEQ ID NO: 1581179 - DNA, 15 bp, Homo sapiens
ccctattagcttgac

SEQ ID NO: 1581180 - DNA, 15 bp, Homo sapiens
gccctattagcttga

SEQ ID NO: 1581181 - DNA, 15 bp, Homo sapiens
ggccctattagcttg

SEQ ID NO: 1581182 - DNA, 15 bp, Homo sapiens
tggccctattagctt

SEQ ID NO: 1581183 - DNA, 15 bp, Homo sapiens
gtggccctattagct

SEQ ID NO: 1581184 - DNA, 15 bp, Homo sapiens
agtggccctattagc

SEQ ID NO: 1581185 - DNA, 15 bp, Homo sapiens
cagtggccctattag

SEQ ID NO: 1581186 - DNA, 15 bp, Homo sapiens
gcagtggccctatta

SEQ ID NO: 1581187 - DNA, 15 bp, Homo sapiens
ggcagtggccctatt

SEQ ID NO: 1581188 - DNA, 15 bp, Homo sapiens
aggcagtggccctat

SEQ ID NO: 1581189 - DNA, 15 bp, Homo sapiens
gaggcagtggcccta

SEQ ID NO: 1581190 - DNA, 15 bp, Homo sapiens
ggaggcagtggccct

SEQ ID NO: 1581191 - DNA, 15 bp, Homo sapiens
aggaggcagtggccc

SEQ ID NO: 1581192 - DNA, 15 bp, Homo sapiens
gaggaggcagtggcc

SEQ ID NO: 1581193 - DNA, 15 bp, Homo sapiens
ggaggaggcagtggc

SEQ ID NO: 1581194 - DNA, 15 bp, Homo sapiens
tggaggaggcagtgg

SEQ ID NO: 1581195 - DNA, 15 bp, Homo sapiens
ctggaggaggcagtg

SEQ ID NO: 1581196 - DNA, 15 bp, Homo sapiens
tctggaggaggcagt

SEQ ID NO: 1581197 - DNA, 15 bp, Homo sapiens
ttctggaggaggcag

SEQ ID NO: 1581198 - DNA, 15 bp, Homo sapiens
tttctggaggaggca

SEQ ID NO: 1581199 - DNA, 15 bp, Homo sapiens
ctttctggaggaggc

SEQ ID NO: 1581200 - DNA, 15 bp, Homo sapiens
cctttctggaggagg

SEQ ID NO: 1581201 - DNA, 15 bp, Homo sapiens
tcctttctggaggag

SEQ ID NO: 1581202 - DNA, 15 bp, Homo sapiens
gtcctttctggagga

SEQ ID NO: 1581203 - DNA, 15 bp, Homo sapiens
tgtcctttctggagg

SEQ ID NO: 1581204 - DNA, 15 bp, Homo sapiens
atgtcctttctggag

SEQ ID NO: 1581205 - DNA, 15 bp, Homo sapiens
catgtcctttctgga

SEQ ID NO: 1581206 - DNA, 15 bp, Homo sapiens
gcatgtcctttctgg

SEQ ID NO: 1581207 - DNA, 15 bp, Homo sapiens
tgcatgtcctttctg

SEQ ID NO: 1581208 - DNA, 15 bp, Homo sapiens
ctgcatgtcctttct

SEQ ID NO: 1581209 - DNA, 15 bp, Homo sapiens
tctgcatgtcctttc

SEQ ID NO: 1581210 - DNA, 15 bp, Homo sapiens
ttctgcatgtccttt

SEQ ID NO: 1581211 - DNA, 15 bp, Homo sapiens
tttctgcatgtcctt

SEQ ID NO: 1581212 - DNA, 15 bp, Homo sapiens
ctttctgcatgtcct

SEQ ID NO: 1581213 - DNA, 15 bp, Homo sapiens
actttctgcatgtcc

SEQ ID NO: 1581214 - DNA, 15 bp, Homo sapiens
cactttctgcatgtc

SEQ ID NO: 1581215 - DNA, 15 bp, Homo sapiens
gcactttctgcatgt

SEQ ID NO: 1581216 - DNA, 15 bp, Homo sapiens
tgcactttctgcatg

SEQ ID NO: 1581217 - DNA, 15 bp, Homo sapiens
ttgcactttctgcat

SEQ ID NO: 1581218 - DNA, 15 bp, Homo sapiens
cttgcactttctgca

SEQ ID NO: 1581219 - DNA, 15 bp, Homo sapiens
gcttgcactttctgc

SEQ ID NO: 1581220 - DNA, 15 bp, Homo sapiens
agcttgcactttctg

SEQ ID NO: 1581221 - DNA, 15 bp, Homo sapiens
tagcttgcactttct

SEQ ID NO: 1581222 - DNA, 15 bp, Homo sapiens
gtagcttgcactttc

SEQ ID NO: 1581223 - DNA, 15 bp, Homo sapiens
agtagcttgcacttt

SEQ ID NO: 1581224 - DNA, 15 bp, Homo sapiens
gagtagcttgcactt

SEQ ID NO: 1581225 - DNA, 15 bp, Homo sapiens
ggagtagcttgcact

SEQ ID NO: 1581226 - DNA, 15 bp, Homo sapiens
tggagtagcttgcac

SEQ ID NO: 1581227 - DNA, 15 bp, Homo sapiens
atggagtagcttgca

SEQ ID NO: 1581228 - DNA, 15 bp, Homo sapiens
aatggagtagcttgc

SEQ ID NO: 1581229 - DNA, 15 bp, Homo sapiens
caatggagtagcttg

SEQ ID NO: 1581230 - DNA, 15 bp, Homo sapiens
ccaatggagtagctt

SEQ ID NO: 1581231 - DNA, 15 bp, Homo sapiens
accaatggagtagct

SEQ ID NO: 1581232 - DNA, 15 bp, Homo sapiens
gaccaatggagtagc

SEQ ID NO: 1581233 - DNA, 15 bp, Homo sapiens
tgaccaatggagtag

SEQ ID NO: 1581234 - DNA, 15 bp, Homo sapiens
gtgaccaatggagta

SEQ ID NO: 1581235 - DNA, 15 bp, Homo sapiens
ggtgaccaatggagt

SEQ ID NO: 1581236 - DNA, 15 bp, Homo sapiens
tggtgaccaatggag

SEQ ID NO: 1581237 - DNA, 15 bp, Homo sapiens
ttggtgaccaatgga

SEQ ID NO: 1581238 - DNA, 15 bp, Homo sapiens
tttggtgaccaatgg

SEQ ID NO: 1581239 - DNA, 15 bp, Homo sapiens
atttggtgaccaatg

SEQ ID NO: 1581240 - DNA, 15 bp, Homo sapiens
tatttggtgaccaat

SEQ ID NO: 1581241 - DNA, 15 bp, Homo sapiens
atatttggtgaccaa

SEQ ID NO: 1581242 - DNA, 15 bp, Homo sapiens
catatttggtgacca

SEQ ID NO: 1581243 - DNA, 15 bp, Homo sapiens
gcatatttggtgacc

SEQ ID NO: 1581244 - DNA, 15 bp, Homo sapiens
ggcatatttggtgac

SEQ ID NO: 1581245 - DNA, 15 bp, Homo sapiens
aggcatatttggtga

SEQ ID NO: 1581246 - DNA, 15 bp, Homo sapiens
gaggcatatttggtg

SEQ ID NO: 1581247 - DNA, 15 bp, Homo sapiens
ggaggcatatttggt

SEQ ID NO: 1581248 - DNA, 15 bp, Homo sapiens
tggaggcatatttgg

SEQ ID NO: 1581249 - DNA, 15 bp, Homo sapiens
ttggaggcatatttg

SEQ ID NO: 1581250 - DNA, 15 bp, Homo sapiens
tttggaggcatattt

SEQ ID NO: 1581251 - DNA, 15 bp, Homo sapiens
atttggaggcatatt

SEQ ID NO: 1581252 - DNA, 15 bp, Homo sapiens
catttggaggcatat

SEQ ID NO: 1581253 - DNA, 15 bp, Homo sapiens
gcatttggaggcata

SEQ ID NO: 1581254 - DNA, 15 bp, Homo sapiens
ggcatttggaggcat

SEQ ID NO: 1581255 - DNA, 15 bp, Homo sapiens
gggcatttggaggca

SEQ ID NO: 1581256 - DNA, 15 bp, Homo sapiens
agggcatttggaggc

SEQ ID NO: 1581257 - DNA, 15 bp, Homo sapiens
gagggcatttggagg

SEQ ID NO: 1581258 - DNA, 15 bp, Homo sapiens
agagggcatttggag

SEQ ID NO: 1581259 - DNA, 15 bp, Homo sapiens
cagagggcatttgga

SEQ ID NO: 1581260 - DNA, 15 bp, Homo sapiens
tcagagggcatttgg

SEQ ID NO: 1581261 - DNA, 15 bp, Homo sapiens
gtcagagggcatttg

SEQ ID NO: 1581262 - DNA, 15 bp, Homo sapiens
agtcagagggcattt

SEQ ID NO: 1581263 - DNA, 15 bp, Homo sapiens
aagtcagagggcatt

SEQ ID NO: 1581264 - DNA, 15 bp, Homo sapiens
caagtcagagggcat

SEQ ID NO: 1581265 - DNA, 15 bp, Homo sapiens
ccaagtcagagggca

SEQ ID NO: 1581266 - DNA, 15 bp, Homo sapiens
tccaagtcagagggc

SEQ ID NO: 1581267 - DNA, 15 bp, Homo sapiens
gtccaagtcagaggg

SEQ ID NO: 1581268 - DNA, 15 bp, Homo sapiens
tgtccaagtcagagg

SEQ ID NO: 1581269 - DNA, 15 bp, Homo sapiens
ctgtccaagtcagag

SEQ ID NO: 1581270 - DNA, 15 bp, Homo sapiens
cctgtccaagtcaga

SEQ ID NO: 1581271 - DNA, 15 bp, Homo sapiens
tcctgtccaagtcag

SEQ ID NO: 1581272 - DNA, 15 bp, Homo sapiens
gtcctgtccaagtca

SEQ ID NO: 1581273 - DNA, 15 bp, Homo sapiens
tgtcctgtccaagtc

SEQ ID NO: 1581274 - DNA, 15 bp, Homo sapiens
atgtcctgtccaagt

SEQ ID NO: 1581275 - DNA, 15 bp, Homo sapiens
aatgtcctgtccaag

SEQ ID NO: 1581276 - DNA, 15 bp, Homo sapiens
gaatgtcctgtccaa

SEQ ID NO: 1581277 - DNA, 15 bp, Homo sapiens
cgaatgtcctgtcca

SEQ ID NO: 1581278 - DNA, 15 bp, Homo sapiens
gcgaatgtcctgtcc

SEQ ID NO: 1581279 - DNA, 15 bp, Homo sapiens
tgcgaatgtcctgtc

SEQ ID NO: 1581280 - DNA, 15 bp, Homo sapiens
atgcgaatgtcctgt

SEQ ID NO: 1581281 - DNA, 15 bp, Homo sapiens
tatgcgaatgtcctg

SEQ ID NO: 1581282 - DNA, 15 bp, Homo sapiens
ttatgcgaatgtcct

SEQ ID NO: 1581283 - DNA, 15 bp, Homo sapiens
gttatgcgaatgtcc

SEQ ID NO: 1581284 - DNA, 15 bp, Homo sapiens
tgttatgcgaatgtc

SEQ ID NO: 1581285 - DNA, 15 bp, Homo sapiens
ttgttatgcgaatgt

SEQ ID NO: 1581286 - DNA, 15 bp, Homo sapiens
tttgttatgcgaatg

SEQ ID NO: 1581287 - DNA, 15 bp, Homo sapiens
ttttgttatgcgaat

SEQ ID NO: 1581288 - DNA, 15 bp, Homo sapiens
attttgttatgcgaa

SEQ ID NO: 1581289 - DNA, 15 bp, Homo sapiens
aattttgttatgcga

SEQ ID NO: 1581290 - DNA, 15 bp, Homo sapiens
gaattttgttatgcg

SEQ ID NO: 1581291 - DNA, 15 bp, Homo sapiens
ggaattttgttatgc

SEQ ID NO: 1581292 - DNA, 15 bp, Homo sapiens
cggaattttgttatg

SEQ ID NO: 1581293 - DNA, 15 bp, Homo sapiens
tcggaattttgttat

SEQ ID NO: 1581294 - DNA, 15 bp, Homo sapiens
ttcggaattttgtta

SEQ ID NO: 1581295 - DNA, 15 bp, Homo sapiens
cttcggaattttgtt

SEQ ID NO: 1581296 - DNA, 15 bp, Homo sapiens
gcttcggaattttgt

SEQ ID NO: 1581297 - DNA, 15 bp, Homo sapiens
tgcttcggaattttg

SEQ ID NO: 1581298 - DNA, 15 bp, Homo sapiens
gctttgcttcggaat

SEQ ID NO: 1581299 - DNA, 15 bp, Homo sapiens
tgctttgcttcggaa

SEQ ID NO: 1581300 - DNA, 15 bp, Homo sapiens
atgctttgcttcgga

SEQ ID NO: 1581301 - DNA, 15 bp, Homo sapiens
tatgctttgcttcgg

SEQ ID NO: 1581302 - DNA, 15 bp, Homo sapiens
ttatgctttgcttcg

SEQ ID NO: 1581303 - DNA, 15 bp, Homo sapiens
attatgctttgcttc

SEQ ID NO: 1581304 - DNA, 15 bp, Homo sapiens
aattatgctttgctt

SEQ ID NO: 1581305 - DNA, 15 bp, Homo sapiens
taattatgctttgct

SEQ ID NO: 1581306 - DNA, 15 bp, Homo sapiens
ttaattatgctttgc

SEQ ID NO: 1581307 - DNA, 15 bp, Homo sapiens
tttaattatgctttg

SEQ ID NO: 1581308 - DNA, 15 bp, Homo sapiens
ttttaattatgcttt

SEQ ID NO: 1581309 - DNA, 15 bp, Homo sapiens
cttttaattatgctt

SEQ ID NO: 1581310 - DNA, 15 bp, Homo sapiens
tcttttaattatgct

SEQ ID NO: 1581311 - DNA, 15 bp, Homo sapiens
ctcttttaattatgc

SEQ ID NO: 1581312 - DNA, 15 bp, Homo sapiens
cctcttttaattatg

SEQ ID NO: 1581313 - DNA, 15 bp, Homo sapiens
ccctcttttaattat

SEQ ID NO: 1581314 - DNA, 15 bp, Homo sapiens
accctcttttaatta

SEQ ID NO: 1581315 - DNA, 15 bp, Homo sapiens
aaccctcttttaatt

SEQ ID NO: 1581316 - DNA, 15 bp, Homo sapiens
aaaaccctcttttaa

SEQ ID NO: 1581317 - DNA, 15 bp, Homo sapiens
taaaaccctctttta

SEQ ID NO: 1581318 - DNA, 15 bp, Homo sapiens
ctaaaaccctctttt

SEQ ID NO: 1581319 - DNA, 15 bp, Homo sapiens
cctaaaaccctcttt

SEQ ID NO: 1581320 - DNA, 15 bp, Homo sapiens
acctaaaaccctctt

SEQ ID NO: 1581321 - DNA, 15 bp, Homo sapiens
tacctaaaaccctct

SEQ ID NO: 1581322 - DNA, 15 bp, Homo sapiens
gtacctaaaaccctc

SEQ ID NO: 1581323 - DNA, 15 bp, Homo sapiens
tgtacctaaaaccct

SEQ ID NO: 1581324 - DNA, 15 bp, Homo sapiens
ttgtacctaaaaccc

SEQ ID NO: 1581325 - DNA, 15 bp, Homo sapiens
cttgtacctaaaacc

SEQ ID NO: 1581326 - DNA, 15 bp, Homo sapiens
tcttgtacctaaaac

SEQ ID NO: 1581327 - DNA, 15 bp, Homo sapiens
ctcttgtacctaaaa

SEQ ID NO: 1581328 - DNA, 15 bp, Homo sapiens
gctcttgtacctaaa

SEQ ID NO: 1581329 - DNA, 15 bp, Homo sapiens
tgctcttgtacctaa

SEQ ID NO: 1581330 - DNA, 15 bp, Homo sapiens
ctgctcttgtaccta

SEQ ID NO: 1581331 - DNA, 15 bp, Homo sapiens
gctgctcttgtacct

SEQ ID NO: 1581332 - DNA, 15 bp, Homo sapiens
agctgctcttgtacc

SEQ ID NO: 1581333 - DNA, 15 bp, Homo sapiens
aagctgctcttgtac

SEQ ID NO: 1581334 - DNA, 15 bp, Homo sapiens
gaagctgctcttgta

SEQ ID NO: 1581335 - DNA, 15 bp, Homo sapiens
ggaagctgctcttgt

SEQ ID NO: 1581336 - DNA, 15 bp, Homo sapiens
tggaagctgctcttg

SEQ ID NO: 1581337 - DNA, 15 bp, Homo sapiens
ttggaagctgctctt

SEQ ID NO: 1581338 - DNA, 15 bp, Homo sapiens
cttggaagctgctct

SEQ ID NO: 1581339 - DNA, 15 bp, Homo sapiens
gcttggaagctgctc

SEQ ID NO: 1581340 - DNA, 15 bp, Homo sapiens
ggcttggaagctgct

SEQ ID NO: 1581341 - DNA, 15 bp, Homo sapiens
gggcttggaagctgc

SEQ ID NO: 1581342 - DNA, 15 bp, Homo sapiens
agggcttggaagctg

SEQ ID NO: 1581343 - DNA, 15 bp, Homo sapiens
cagggcttggaagct

SEQ ID NO: 1581344 - DNA, 15 bp, Homo sapiens
tcagggcttggaagc

SEQ ID NO: 1581345 - DNA, 15 bp, Homo sapiens
atcagggcttggaag

SEQ ID NO: 1581346 - DNA, 15 bp, Homo sapiens
gatcagggcttggaa

SEQ ID NO: 1581347 - DNA, 15 bp, Homo sapiens
agatcagggcttgga

SEQ ID NO: 1581348 - DNA, 15 bp, Homo sapiens
tagatcagggcttgg

SEQ ID NO: 1581349 - DNA, 15 bp, Homo sapiens
gtagatcagggcttg

SEQ ID NO: 1581350 - DNA, 15 bp, Homo sapiens
tgtagatcagggctt

SEQ ID NO: 1581351 - DNA, 15 bp, Homo sapiens
gtgtagatcagggct

SEQ ID NO: 1581352 - DNA, 15 bp, Homo sapiens
ggtgtagatcagggc

SEQ ID NO: 1581353 - DNA, 15 bp, Homo sapiens
aggtgtagatcaggg

SEQ ID NO: 1581354 - DNA, 15 bp, Homo sapiens
caggtgtagatcagg

SEQ ID NO: 1581355 - DNA, 15 bp, Homo sapiens
ccaggtgtagatcag

SEQ ID NO: 1581356 - DNA, 15 bp, Homo sapiens
cccaggtgtagatca

SEQ ID NO: 1581357 - DNA, 15 bp, Homo sapiens
gcccaggtgtagatc

SEQ ID NO: 1581358 - DNA, 15 bp, Homo sapiens
agcccaggtgtagat

SEQ ID NO: 1581359 - DNA, 15 bp, Homo sapiens
gagcccaggtgtaga

SEQ ID NO: 1581360 - DNA, 15 bp, Homo sapiens
agagcccaggtgtag

SEQ ID NO: 1581361 - DNA, 15 bp, Homo sapiens
aagagcccaggtgta

SEQ ID NO: 1581362 - DNA, 15 bp, Homo sapiens
aaagagcccaggtgt

SEQ ID NO: 1581363 - DNA, 15 bp, Homo sapiens
gaaagagcccaggtg

SEQ ID NO: 1581364 - DNA, 15 bp, Homo sapiens
tgaaagagcccaggt

SEQ ID NO: 1581365 - DNA, 15 bp, Homo sapiens
ttgaaagagcccagg

SEQ ID NO: 1581366 - DNA, 15 bp, Homo sapiens
tttgaaagagcccag

SEQ ID NO: 1581367 - DNA, 15 bp, Homo sapiens
atttgaaagagccca

SEQ ID NO: 1581368 - DNA, 15 bp, Homo sapiens
tatttgaaagagccc

SEQ ID NO: 1581369 - DNA, 15 bp, Homo sapiens
ctatttgaaagagcc

SEQ ID NO: 1581370 - DNA, 15 bp, Homo sapiens
gctatttgaaagagc

SEQ ID NO: 1581371 - DNA, 15 bp, Homo sapiens
tgctatttgaaagag

SEQ ID NO: 1581372 - DNA, 15 bp, Homo sapiens
ctgctatttgaaaga

SEQ ID NO: 1581373 - DNA, 15 bp, Homo sapiens
cctgctatttgaaag

SEQ ID NO: 1581374 - DNA, 15 bp, Homo sapiens
acctgctatttgaaa

SEQ ID NO: 1581375 - DNA, 15 bp, Homo sapiens
cacctgctatttgaa

SEQ ID NO: 1581376 - DNA, 15 bp, Homo sapiens
gcacctgctatttga

SEQ ID NO: 1581377 - DNA, 15 bp, Homo sapiens
tgcacctgctatttg

SEQ ID NO: 1581378 - DNA, 15 bp, Homo sapiens
ttgcacctgctattt

SEQ ID NO: 1581379 - DNA, 15 bp, Homo sapiens
cttgcacctgctatt

SEQ ID NO: 1581380 - DNA, 15 bp, Homo sapiens
ccttgcacctgctat

SEQ ID NO: 1581381 - DNA, 15 bp, Homo sapiens
tccttgcacctgcta

SEQ ID NO: 1581382 - DNA, 15 bp, Homo sapiens
ctccttgcacctgct

SEQ ID NO: 1581383 - DNA, 15 bp, Homo sapiens
tctccttgcacctgc

SEQ ID NO: 1581384 - DNA, 15 bp, Homo sapiens
gtctccttgcacctg

SEQ ID NO: 1581385 - DNA, 15 bp, Homo sapiens
agtctccttgcacct

SEQ ID NO: 1581386 - DNA, 15 bp, Homo sapiens
cagtctccttgcacc

SEQ ID NO: 1581387 - DNA, 15 bp, Homo sapiens
ccagtctccttgcac

SEQ ID NO: 1581388 - DNA, 15 bp, Homo sapiens
cccagtctccttgca

SEQ ID NO: 1581389 - DNA, 15 bp, Homo sapiens
acccagtctccttgc

SEQ ID NO: 1581390 - DNA, 15 bp, Homo sapiens
cacccagtctccttg

SEQ ID NO: 1581391 - DNA, 15 bp, Homo sapiens
tcacccagtctcctt

SEQ ID NO: 1581392 - DNA, 15 bp, Homo sapiens
atcacccagtctcct

SEQ ID NO: 1581393 - DNA, 15 bp, Homo sapiens
aatcacccagtctcc

SEQ ID NO: 1581394 - DNA, 15 bp, Homo sapiens
gaatcacccagtctc

SEQ ID NO: 1581395 - DNA, 15 bp, Homo sapiens
tgaatcacccagtct

SEQ ID NO: 1581396 - DNA, 15 bp, Homo sapiens
ttgaatcacccagtc

SEQ ID NO: 1581397 - DNA, 15 bp, Homo sapiens
tttgaatcacccagt

SEQ ID NO: 1581398 - DNA, 15 bp, Homo sapiens
ctttgaatcacccag

SEQ ID NO: 1581399 - DNA, 15 bp, Homo sapiens
tctttgaatcaccca

SEQ ID NO: 1581400 - DNA, 15 bp, Homo sapiens
ctctttgaatcaccc

SEQ ID NO: 1581401 - DNA, 15 bp, Homo sapiens
actctttgaatcacc

SEQ ID NO: 1581402 - DNA, 15 bp, Homo sapiens
gactctttgaatcac

SEQ ID NO: 1581403 - DNA, 15 bp, Homo sapiens
tgactctttgaatca

SEQ ID NO: 1581404 - DNA, 15 bp, Homo sapiens
ttgactctttgaatc

SEQ ID NO: 1581405 - DNA, 15 bp, Homo sapiens
attgactctttgaat

SEQ ID NO: 1581406 - DNA, 15 bp, Homo sapiens
gattgactctttgaa

SEQ ID NO: 1581407 - DNA, 15 bp, Homo sapiens
tgattgactctttga

SEQ ID NO: 1581408 - DNA, 15 bp, Homo sapiens
atgattgactctttg

SEQ ID NO: 1581409 - DNA, 15 bp, Homo sapiens
tatgattgactcttt

SEQ ID NO: 1581410 - DNA, 15 bp, Homo sapiens
ttatgattgactctt

SEQ ID NO: 1581411 - DNA, 15 bp, Homo sapiens
gttatgattgactct

SEQ ID NO: 1581412 - DNA, 15 bp, Homo sapiens
agttatgattgactc

SEQ ID NO: 1581413 - DNA, 15 bp, Homo sapiens
aagttatgattgact

SEQ ID NO: 1581414 - DNA, 15 bp, Homo sapiens
taagttatgattgac

SEQ ID NO: 1581415 - DNA, 15 bp, Homo sapiens
ataagttatgattga

SEQ ID NO: 1581416 - DNA, 15 bp, Homo sapiens
tataagttatgattg

SEQ ID NO: 1581417 - DNA, 15 bp, Homo sapiens
atataagttatgatt

SEQ ID NO: 1581418 - DNA, 15 bp, Homo sapiens
aatataagttatgat

SEQ ID NO: 1581419 - DNA, 15 bp, Homo sapiens
caatataagttatga

SEQ ID NO: 1581420 - DNA, 15 bp, Homo sapiens
ccaatataagttatg

SEQ ID NO: 1581421 - DNA, 15 bp, Homo sapiens
gccaatataagttat

SEQ ID NO: 1581422 - DNA, 15 bp, Homo sapiens
agccaatataagtta

SEQ ID NO: 1581423 - DNA, 15 bp, Homo sapiens
aagccaatataagtt

SEQ ID NO: 1581424 - DNA, 15 bp, Homo sapiens
aaagccaatataagt

SEQ ID NO: 1581425 - DNA, 15 bp, Homo sapiens
caaagccaatataag

SEQ ID NO: 1581426 - DNA, 15 bp, Homo sapiens
ccaaagccaatataa

SEQ ID NO: 1581427 - DNA, 15 bp, Homo sapiens
cccaaagccaatata

SEQ ID NO: 1581428 - DNA, 15 bp, Homo sapiens
acccaaagccaatat

SEQ ID NO: 1581429 - DNA, 15 bp, Homo sapiens
cacccaaagccaata

SEQ ID NO: 1581430 - DNA, 15 bp, Homo sapiens
ccacccaaagccaat

SEQ ID NO: 1581431 - DNA, 15 bp, Homo sapiens
tccacccaaagccaa

SEQ ID NO: 1581432 - DNA, 15 bp, Homo sapiens
gtccacccaaagcca

SEQ ID NO: 1581433 - DNA, 15 bp, Homo sapiens
ggtccacccaaagcc

SEQ ID NO: 1581434 - DNA, 15 bp, Homo sapiens
cggtccacccaaagc

SEQ ID NO: 1581435 - DNA, 15 bp, Homo sapiens
tcggtccacccaaag

SEQ ID NO: 1581436 - DNA, 15 bp, Homo sapiens
atcggtccacccaaa

SEQ ID NO: 1581437 - DNA, 15 bp, Homo sapiens
tatcggtccacccaa

SEQ ID NO: 1581438 - DNA, 15 bp, Homo sapiens
ctatcggtccaccca

SEQ ID NO: 1581439 - DNA, 15 bp, Homo sapiens
tctatcggtccaccc

SEQ ID NO: 1581440 - DNA, 15 bp, Homo sapiens
gtctatcggtccacc

SEQ ID NO: 1581441 - DNA, 15 bp, Homo sapiens
tgtctatcggtccac

SEQ ID NO: 1581442 - DNA, 15 bp, Homo sapiens
ctgtctatcggtcca

SEQ ID NO: 1581443 - DNA, 15 bp, Homo sapiens
gctgtctatcggtcc

SEQ ID NO: 1581444 - DNA, 15 bp, Homo sapiens
ggctgtctatcggtc

SEQ ID NO: 1581445 - DNA, 15 bp, Homo sapiens
aggctgtctatcggt

SEQ ID NO: 1581446 - DNA, 15 bp, Homo sapiens
caggctgtctatcgg

SEQ ID NO: 1581447 - DNA, 15 bp, Homo sapiens
tcaggctgtctatcg

SEQ ID NO: 1581448 - DNA, 15 bp, Homo sapiens
gtcaggctgtctatc

SEQ ID NO: 1581449 - DNA, 15 bp, Homo sapiens
cgtcaggctgtctat

SEQ ID NO: 1581450 - DNA, 15 bp, Homo sapiens
acgtcaggctgtcta

SEQ ID NO: 1581451 - DNA, 15 bp, Homo sapiens
tacgtcaggctgtct

SEQ ID NO: 1581452 - DNA, 15 bp, Homo sapiens
atacgtcaggctgtc

SEQ ID NO: 1581453 - DNA, 15 bp, Homo sapiens
catacgtcaggctgt

SEQ ID NO: 1581454 - DNA, 15 bp, Homo sapiens
ccatacgtcaggctg

SEQ ID NO: 1581455 - DNA, 15 bp, Homo sapiens
accatacgtcaggct

SEQ ID NO: 1581456 - DNA, 15 bp, Homo sapiens
gaccatacgtcaggc

SEQ ID NO: 1581457 - DNA, 15 bp, Homo sapiens
cgaccatacgtcagg

SEQ ID NO: 1581458 - DNA, 15 bp, Homo sapiens
ccgaccatacgtcag

SEQ ID NO: 1581459 - DNA, 15 bp, Homo sapiens
cccgaccatacgtca

SEQ ID NO: 1581460 - DNA, 15 bp, Homo sapiens
gcccgaccatacgtc

SEQ ID NO: 1581461 - DNA, 15 bp, Homo sapiens
cgcccgaccatacgt

SEQ ID NO: 1581462 - DNA, 15 bp, Homo sapiens
ccgcccgaccatacg

SEQ ID NO: 1581463 - DNA, 15 bp, Homo sapiens
tccgcccgaccatac

SEQ ID NO: 1581464 - DNA, 15 bp, Homo sapiens
gtccgcccgaccata

SEQ ID NO: 1581465 - DNA, 15 bp, Homo sapiens
tgtccgcccgaccat

SEQ ID NO: 1581466 - DNA, 15 bp, Homo sapiens
ctgtccgcccgacca

SEQ ID NO: 1581467 - DNA, 15 bp, Homo sapiens
actgtccgcccgacc

SEQ ID NO: 1581468 - DNA, 15 bp, Homo sapiens
aactgtccgcccgac

SEQ ID NO: 1581469 - DNA, 15 bp, Homo sapiens
taactgtccgcccga

SEQ ID NO: 1581470 - DNA, 15 bp, Homo sapiens
ctaactgtccgcccg

SEQ ID NO: 1581471 - DNA, 15 bp, Homo sapiens
tctaactgtccgccc

SEQ ID NO: 1581472 - DNA, 15 bp, Homo sapiens
ttctaactgtccgcc

SEQ ID NO: 1581473 - DNA, 15 bp, Homo sapiens
attctaactgtccgc

SEQ ID NO: 1581474 - DNA, 15 bp, Homo sapiens
cattctaactgtccg

SEQ ID NO: 1581475 - DNA, 15 bp, Homo sapiens
tcattctaactgtcc

SEQ ID NO: 1581476 - DNA, 15 bp, Homo sapiens
ctcattctaactgtc

SEQ ID NO: 1581477 - DNA, 15 bp, Homo sapiens
gctcattctaactgt

SEQ ID NO: 1581478 - DNA, 15 bp, Homo sapiens
cgctcattctaactg

SEQ ID NO: 1581479 - DNA, 15 bp, Homo sapiens
tcgctcattctaact

SEQ ID NO: 1581480 - DNA, 15 bp, Homo sapiens
ttcgctcattctaac

SEQ ID NO: 1581481 - DNA, 15 bp, Homo sapiens
attcgctcattctaa

SEQ ID NO: 1581482 - DNA, 15 bp, Homo sapiens
cattcgctcattcta

SEQ ID NO: 1581483 - DNA, 15 bp, Homo sapiens
gcattcgctcattct

SEQ ID NO: 1581484 - DNA, 15 bp, Homo sapiens
cgcattcgctcattc

SEQ ID NO: 1581485 - DNA, 15 bp, Homo sapiens
acgcattcgctcatt

SEQ ID NO: 1581486 - DNA, 15 bp, Homo sapiens
cacgcattcgctcat

SEQ ID NO: 1581487 - DNA, 15 bp, Homo sapiens
ccacgcattcgctca

SEQ ID NO: 1581488 - DNA, 15 bp, Homo sapiens
tccacgcattcgctc

SEQ ID NO: 1581489 - DNA, 15 bp, Homo sapiens
atccacgcattcgct

SEQ ID NO: 1581490 - DNA, 15 bp, Homo sapiens
catccacgcattcgc

SEQ ID NO: 1581491 - DNA, 15 bp, Homo sapiens
tcatccacgcattcg

SEQ ID NO: 1581492 - DNA, 15 bp, Homo sapiens
atcatccacgcattc

SEQ ID NO: 1581493 - DNA, 15 bp, Homo sapiens
catcatccacgcatt

SEQ ID NO: 1581494 - DNA, 15 bp, Homo sapiens
acatcatccacgcat

SEQ ID NO: 1581495 - DNA, 15 bp, Homo sapiens
tacatcatccacgca

SEQ ID NO: 1581496 - DNA, 15 bp, Homo sapiens
gtacatcatccacgc

SEQ ID NO: 1581497 - DNA, 15 bp, Homo sapiens
agtacatcatccacg

SEQ ID NO: 1581498 - DNA, 15 bp, Homo sapiens
tagtacatcatccac

SEQ ID NO: 1581499 - DNA, 15 bp, Homo sapiens
gtagtacatcatcca

SEQ ID NO: 1581500 - DNA, 15 bp, Homo sapiens
ggtagtacatcatcc

SEQ ID NO: 1581501 - DNA, 15 bp, Homo sapiens
tggtagtacatcatc

SEQ ID NO: 1581502 - DNA, 15 bp, Homo sapiens
ctggtagtacatcat

SEQ ID NO: 1581503 - DNA, 15 bp, Homo sapiens
actggtagtacatca

SEQ ID NO: 1581504 - DNA, 15 bp, Homo sapiens
gactggtagtacatc

SEQ ID NO: 1581505 - DNA, 15 bp, Homo sapiens
agactggtagtacat

SEQ ID NO: 1581506 - DNA, 15 bp, Homo sapiens
gagactggtagtaca

SEQ ID NO: 1581507 - DNA, 15 bp, Homo sapiens
ggagactggtagtac

SEQ ID NO: 1581508 - DNA, 15 bp, Homo sapiens
cggagactggtagta

SEQ ID NO: 1581509 - DNA, 15 bp, Homo sapiens
tcggagactggtagt

SEQ ID NO: 1581510 - DNA, 15 bp, Homo sapiens
gtcggagactggtag

SEQ ID NO: 1581511 - DNA, 15 bp, Homo sapiens
ggtcggagactggta

SEQ ID NO: 1581512 - DNA, 15 bp, Homo sapiens
tggtcggagactggt

SEQ ID NO: 1581513 - DNA, 15 bp, Homo sapiens
gtggtcggagactgg

SEQ ID NO: 1581514 - DNA, 15 bp, Homo sapiens
ggtggtcggagactg

SEQ ID NO: 1581515 - DNA, 15 bp, Homo sapiens
tggtggtcggagact

SEQ ID NO: 1581516 - DNA, 15 bp, Homo sapiens
gtggtggtcggagac

SEQ ID NO: 1581517 - DNA, 15 bp, Homo sapiens
ggtggtggtcggaga

SEQ ID NO: 1581518 - DNA, 15 bp, Homo sapiens
tggtggtggtcggag

SEQ ID NO: 1581519 - DNA, 15 bp, Homo sapiens
ctggtggtggtcgga

SEQ ID NO: 1581520 - DNA, 15 bp, Homo sapiens
actggtggtggtcgg

SEQ ID NO: 1581521 - DNA, 15 bp, Homo sapiens
aactggtggtggtcg

SEQ ID NO: 1581522 - DNA, 15 bp, Homo sapiens
aaactggtggtggtc

SEQ ID NO: 1581523 - DNA, 15 bp, Homo sapiens
aaaactggtggtggt

SEQ ID NO: 1581524 - DNA, 15 bp, Homo sapiens
gaaaactggtggtgg

SEQ ID NO: 1581525 - DNA, 15 bp, Homo sapiens
ggaaaactggtggtg

SEQ ID NO: 1581526 - DNA, 15 bp, Homo sapiens
gggaaaactggtggt

SEQ ID NO: 1581527 - DNA, 15 bp, Homo sapiens
agggaaaactggtgg

SEQ ID NO: 1581528 - DNA, 15 bp, Homo sapiens
tagggaaaactggtg

SEQ ID NO: 1581529 - DNA, 15 bp, Homo sapiens
ctagggaaaactggt

SEQ ID NO: 1581530 - DNA, 15 bp, Homo sapiens
gctagggaaaactgg

SEQ ID NO: 1581531 - DNA, 15 bp, Homo sapiens
ggctagggaaaactg

SEQ ID NO: 1581532 - DNA, 15 bp, Homo sapiens
cggctagggaaaact

SEQ ID NO: 1581533 - DNA, 15 bp, Homo sapiens
ccggctagggaaaac

SEQ ID NO: 1581534 - DNA, 15 bp, Homo sapiens
tccggctagggaaaa

SEQ ID NO: 1581535 - DNA, 15 bp, Homo sapiens
ttccggctagggaaa

SEQ ID NO: 1581536 - DNA, 15 bp, Homo sapiens
tttccggctagggaa

SEQ ID NO: 1581537 - DNA, 15 bp, Homo sapiens
gtttccggctaggga

SEQ ID NO: 1581538 - DNA, 15 bp, Homo sapiens
agtttccggctaggg

SEQ ID NO: 1581539 - DNA, 15 bp, Homo sapiens
tagtttccggctagg

SEQ ID NO: 1581540 - DNA, 15 bp, Homo sapiens
ctagtttccggctag

SEQ ID NO: 1581541 - DNA, 15 bp, Homo sapiens
actagtttccggcta

SEQ ID NO: 1581542 - DNA, 15 bp, Homo sapiens
tactagtttccggct

SEQ ID NO: 1581543 - DNA, 15 bp, Homo sapiens
ctactagtttccggc

SEQ ID NO: 1581544 - DNA, 15 bp, Homo sapiens
gctactagtttccgg

SEQ ID NO: 1581545 - DNA, 15 bp, Homo sapiens
tgctactagtttccg

SEQ ID NO: 1581546 - DNA, 15 bp, Homo sapiens
ttgctactagtttcc

SEQ ID NO: 1581547 - DNA, 15 bp, Homo sapiens
tttgctactagtttc

SEQ ID NO: 1581548 - DNA, 15 bp, Homo sapiens
ctttgctactagttt

SEQ ID NO: 1581549 - DNA, 15 bp, Homo sapiens
gctttgctactagtt

SEQ ID NO: 1581550 - DNA, 15 bp, Homo sapiens
agctttgctactagt

SEQ ID NO: 1581551 - DNA, 15 bp, Homo sapiens
aagctttgctactag

SEQ ID NO: 1581552 - DNA, 15 bp, Homo sapiens
gaagctttgctacta

SEQ ID NO: 1581553 - DNA, 15 bp, Homo sapiens
ggaagctttgctact

SEQ ID NO: 1581554 - DNA, 15 bp, Homo sapiens
gggaagctttgctac

SEQ ID NO: 1581555 - DNA, 15 bp, Homo sapiens
ggggaagctttgcta

SEQ ID NO: 1581556 - DNA, 15 bp, Homo sapiens
cggggaagctttgct

SEQ ID NO: 1581557 - DNA, 15 bp, Homo sapiens
tcggggaagctttgc

SEQ ID NO: 1581558 - DNA, 15 bp, Homo sapiens
ctcggggaagctttg

SEQ ID NO: 1581559 - DNA, 15 bp, Homo sapiens
tctcggggaagcttt

SEQ ID NO: 1581560 - DNA, 15 bp, Homo sapiens
gtctcggggaagctt

SEQ ID NO: 1581561 - DNA, 15 bp, Homo sapiens
ggtctcggggaagct

SEQ ID NO: 1581562 - DNA, 15 bp, Homo sapiens
cggtctcggggaagc

SEQ ID NO: 1581563 - DNA, 15 bp, Homo sapiens
gcggtctcggggaag

SEQ ID NO: 1581564 - DNA, 15 bp, Homo sapiens
agcggtctcggggaa

SEQ ID NO: 1581565 - DNA, 15 bp, Homo sapiens
gagcggtctcgggga

SEQ ID NO: 1581566 - DNA, 15 bp, Homo sapiens
agagcggtctcgggg

SEQ ID NO: 1581567 - DNA, 15 bp, Homo sapiens
tagagcggtctcggg

SEQ ID NO: 1581568 - DNA, 15 bp, Homo sapiens
ttagagcggtctcgg

SEQ ID NO: 1581569 - DNA, 15 bp, Homo sapiens
tttagagcggtctcg

SEQ ID NO: 1581570 - DNA, 15 bp, Homo sapiens
ctttagagcggtctc

SEQ ID NO: 1581571 - DNA, 15 bp, Homo sapiens
gctttagagcggtct

SEQ ID NO: 1581572 - DNA, 15 bp, Homo sapiens
agctttagagcggtc

SEQ ID NO: 1581573 - DNA, 15 bp, Homo sapiens
cagctttagagcggt

SEQ ID NO: 1581574 - DNA, 15 bp, Homo sapiens
gcagctttagagcgg

SEQ ID NO: 1581575 - DNA, 15 bp, Homo sapiens
tgcagctttagagcg

SEQ ID NO: 1581576 - DNA, 15 bp, Homo sapiens
ctgcagctttagagc

SEQ ID NO: 1581577 - DNA, 15 bp, Homo sapiens
actgcagctttagag

SEQ ID NO: 1581578 - DNA, 15 bp, Homo sapiens
aactgcagctttaga

SEQ ID NO: 1581579 - DNA, 15 bp, Homo sapiens
gaactgcagctttag

SEQ ID NO: 1581580 - DNA, 15 bp, Homo sapiens
agaactgcagcttta

SEQ ID NO: 1581581 - DNA, 15 bp, Homo sapiens
gagaactgcagcttt

SEQ ID NO: 1581582 - DNA, 15 bp, Homo sapiens
ggagaactgcagctt

SEQ ID NO: 1581583 - DNA, 15 bp, Homo sapiens
tggagaactgcagct

SEQ ID NO: 1581584 - DNA, 15 bp, Homo sapiens
ctggagaactgcagc

SEQ ID NO: 1581585 - DNA, 15 bp, Homo sapiens
tctggagaactgcag

SEQ ID NO: 1581586 - DNA, 15 bp, Homo sapiens
gtctggagaactgca

SEQ ID NO: 1581587 - DNA, 15 bp, Homo sapiens
cgtctggagaactgc

SEQ ID NO: 1581588 - DNA, 15 bp, Homo sapiens
ccgtctggagaactg

SEQ ID NO: 1581589 - DNA, 15 bp, Homo sapiens
gccgtctggagaact

SEQ ID NO: 1581590 - DNA, 15 bp, Homo sapiens
ggccgtctggagaac

SEQ ID NO: 1581591 - DNA, 15 bp, Homo sapiens
cggccgtctggagaa

SEQ ID NO: 1581592 - DNA, 15 bp, Homo sapiens
gcggccgtctggaga

SEQ ID NO: 1581593 - DNA, 15 bp, Homo sapiens
ggcggccgtctggag

SEQ ID NO: 1581594 - DNA, 15 bp, Homo sapiens
cggcggccgtctgga

SEQ ID NO: 1581595 - DNA, 15 bp, Homo sapiens
ccggcggccgtctgg

SEQ ID NO: 1581596 - DNA, 15 bp, Homo sapiens
tccggcggccgtctg

SEQ ID NO: 1581597 - DNA, 15 bp, Homo sapiens
ttccggcggccgtct

SEQ ID NO: 1581598 - DNA, 15 bp, Homo sapiens
cttccggcggccgtc

SEQ ID NO: 1581599 - DNA, 15 bp, Homo sapiens
tcttccggcggccgt

SEQ ID NO: 1581600 - DNA, 15 bp, Homo sapiens
ctcttccggcggccg

SEQ ID NO: 1581601 - DNA, 15 bp, Homo sapiens
cctcttccggcggcc

SEQ ID NO: 1581602 - DNA, 15 bp, Homo sapiens
ccctcttccggcggc

SEQ ID NO: 1581603 - DNA, 15 bp, Homo sapiens
gccctcttccggcgg

SEQ ID NO: 1581604 - DNA, 15 bp, Homo sapiens
cgccctcttccggcg

SEQ ID NO: 1581605 - DNA, 15 bp, Homo sapiens
gcgccctcttccggc

SEQ ID NO: 1581606 - DNA, 15 bp, Homo sapiens
agcgccctcttccgg

SEQ ID NO: 1581607 - DNA, 15 bp, Homo sapiens
cagcgccctcttccg

SEQ ID NO: 1581608 - DNA, 15 bp, Homo sapiens
gcagcgccctcttcc

SEQ ID NO: 1581609 - DNA, 15 bp, Homo sapiens
cgcagcgccctcttc

SEQ ID NO: 1581610 - DNA, 15 bp, Homo sapiens
ccgcagcgccctctt

SEQ ID NO: 1581611 - DNA, 15 bp, Homo sapiens
tccgcagcgccctct

SEQ ID NO: 1581612 - DNA, 15 bp, Homo sapiens
atccgcagcgccctc

SEQ ID NO: 1581613 - DNA, 15 bp, Homo sapiens
gatccgcagcgccct

SEQ ID NO: 1581614 - DNA, 15 bp, Homo sapiens
cgatccgcagcgccc

SEQ ID NO: 1581615 - DNA, 15 bp, Homo sapiens
gcgatccgcagcgcc

SEQ ID NO: 1581616 - DNA, 15 bp, Homo sapiens
ggcgatccgcagcgc

SEQ ID NO: 1581617 - DNA, 15 bp, Homo sapiens
aggcgatccgcagcg

SEQ ID NO: 1581618 - DNA, 15 bp, Homo sapiens
gaggcgatccgcagc

SEQ ID NO: 1581619 - DNA, 15 bp, Homo sapiens
cgaggcgatccgcag

SEQ ID NO: 1581620 - DNA, 15 bp, Homo sapiens
ccgaggcgatccgca

SEQ ID NO: 1581621 - DNA, 15 bp, Homo sapiens
accgaggcgatccgc

SEQ ID NO: 1581622 - DNA, 15 bp, Homo sapiens
gaccgaggcgatccg

SEQ ID NO: 1581623 - DNA, 15 bp, Homo sapiens
agaccgaggcgatcc

SEQ ID NO: 1581624 - DNA, 15 bp, Homo sapiens
cagaccgaggcgatc

SEQ ID NO: 1581625 - DNA, 15 bp, Homo sapiens
gcagaccgaggcgat

SEQ ID NO: 1581626 - DNA, 15 bp, Homo sapiens
tgcagaccgaggcga

SEQ ID NO: 1581627 - DNA, 15 bp, Homo sapiens
ttgcagaccgaggcg

SEQ ID NO: 1581628 - DNA, 15 bp, Homo sapiens
gttgcagaccgaggc

SEQ ID NO: 1581629 - DNA, 15 bp, Homo sapiens
ggttgcagaccgagg

SEQ ID NO: 1581630 - DNA, 15 bp, Homo sapiens
aggttgcagaccgag

SEQ ID NO: 1581631 - DNA, 15 bp, Homo sapiens
aaggttgcagaccga

SEQ ID NO: 1581632 - DNA, 15 bp, Homo sapiens
gaaggttgcagaccg

SEQ ID NO: 1581633 - DNA, 15 bp, Homo sapiens
tgaaggttgcagacc

SEQ ID NO: 1581634 - DNA, 15 bp, Homo sapiens
ctgaaggttgcagac

SEQ ID NO: 1581635 - DNA, 15 bp, Homo sapiens
tctgaaggttgcaga

SEQ ID NO: 1581636 - DNA, 15 bp, Homo sapiens
gtctgaaggttgcag

SEQ ID NO: 1581637 - DNA, 15 bp, Homo sapiens
ggtctgaaggttgca

SEQ ID NO: 1581638 - DNA, 15 bp, Homo sapiens
gggtctgaaggttgc

SEQ ID NO: 1581639 - DNA, 15 bp, Homo sapiens
ggggtctgaaggttg

SEQ ID NO: 1581640 - DNA, 15 bp, Homo sapiens
tggggtctgaaggtt

SEQ ID NO: 1581641 - DNA, 15 bp, Homo sapiens
ttggggtctgaaggt

SEQ ID NO: 1581642 - DNA, 15 bp, Homo sapiens
cttggggtctgaagg

SEQ ID NO: 1581643 - DNA, 15 bp, Homo sapiens
acttggggtctgaag

SEQ ID NO: 1581644 - DNA, 15 bp, Homo sapiens
gacttggggtctgaa

SEQ ID NO: 1581645 - DNA, 15 bp, Homo sapiens
ggacttggggtctga

SEQ ID NO: 1581646 - DNA, 15 bp, Homo sapiens
aggacttggggtctg

SEQ ID NO: 1581647 - DNA, 15 bp, Homo sapiens
taggacttggggtct

SEQ ID NO: 1581648 - DNA, 15 bp, Homo sapiens
ctaggacttggggtc

SEQ ID NO: 1581649 - DNA, 15 bp, Homo sapiens
cctaggacttggggt

SEQ ID NO: 1581650 - DNA, 15 bp, Homo sapiens
gcctaggacttgggg

SEQ ID NO: 1581651 - DNA, 15 bp, Homo sapiens
tgcctaggacttggg

SEQ ID NO: 1581652 - DNA, 15 bp, Homo sapiens
ctgcctaggacttgg

SEQ ID NO: 1581653 - DNA, 15 bp, Homo sapiens
gctgcctaggacttg

SEQ ID NO: 1581654 - DNA, 15 bp, Homo sapiens
cgctgcctaggactt

SEQ ID NO: 1581655 - DNA, 15 bp, Homo sapiens
tcgctgcctaggact

SEQ ID NO: 1581656 - DNA, 15 bp, Homo sapiens
ctcgctgcctaggac

SEQ ID NO: 1581657 - DNA, 15 bp, Homo sapiens
cctcgctgcctagga

SEQ ID NO: 1581658 - DNA, 15 bp, Homo sapiens
ccctcgctgcctagg

SEQ ID NO: 1581659 - DNA, 15 bp, Homo sapiens
tccctcgctgcctag

SEQ ID NO: 1581660 - DNA, 15 bp, Homo sapiens
ctccctcgctgccta

SEQ ID NO: 1581661 - DNA, 15 bp, Homo sapiens
tctccctcgctgcct

SEQ ID NO: 1581662 - DNA, 15 bp, Homo sapiens
ttctccctcgctgcc

SEQ ID NO: 1581663 - DNA, 15 bp, Homo sapiens
attctccctcgctgc

SEQ ID NO: 1581664 - DNA, 15 bp, Homo sapiens
aattctccctcgctg

SEQ ID NO: 1581665 - DNA, 15 bp, Homo sapiens
gaattctccctcgct

SEQ ID NO: 1581666 - DNA, 15 bp, Homo sapiens
tgaattctccctcgc

SEQ ID NO: 1581667 - DNA, 15 bp, Homo sapiens
ctgaattctccctcg

SEQ ID NO: 1581668 - DNA, 15 bp, Homo sapiens
gctgaattctccctc

SEQ ID NO: 1581669 - DNA, 15 bp, Homo sapiens
ggctgaattctccct

SEQ ID NO: 1581670 - DNA, 15 bp, Homo sapiens
aggctgaattctccc

SEQ ID NO: 1581671 - DNA, 15 bp, Homo sapiens
gaggctgaattctcc

SEQ ID NO: 1581672 - DNA, 15 bp, Homo sapiens
ggaggctgaattctc

SEQ ID NO: 1581673 - DNA, 15 bp, Homo sapiens
gggaggctgaattct

SEQ ID NO: 1581674 - DNA, 15 bp, Homo sapiens
agggaggctgaattc

SEQ ID NO: 1581675 - DNA, 15 bp, Homo sapiens
gagggaggctgaatt

SEQ ID NO: 1581676 - DNA, 15 bp, Homo sapiens
tgagggaggctgaat

SEQ ID NO: 1581677 - DNA, 15 bp, Homo sapiens
ttgagggaggctgaa

SEQ ID NO: 1581678 - DNA, 15 bp, Homo sapiens
cttgagggaggctga

SEQ ID NO: 1581679 - DNA, 15 bp, Homo sapiens
acttgagggaggctg

SEQ ID NO: 1581680 - DNA, 15 bp, Homo sapiens
gacttgagggaggct

SEQ ID NO: 1581681 - DNA, 15 bp, Homo sapiens
ggacttgagggaggc

SEQ ID NO: 1581682 - DNA, 15 bp, Homo sapiens
gggacttgagggagg

SEQ ID NO: 1581683 - DNA, 15 bp, Homo sapiens
tgggacttgagggag

SEQ ID NO: 1581684 - DNA, 15 bp, Homo sapiens
ctgggacttgaggga

SEQ ID NO: 1581685 - DNA, 15 bp, Homo sapiens
tctgggacttgaggg

SEQ ID NO: 1581686 - DNA, 15 bp, Homo sapiens
ttctgggacttgagg

SEQ ID NO: 1581687 - DNA, 15 bp, Homo sapiens
tttctgggacttgag

SEQ ID NO: 1581688 - DNA, 15 bp, Homo sapiens
ttttctgggacttga

SEQ ID NO: 1581689 - DNA, 15 bp, Homo sapiens
gttttctgggacttg

SEQ ID NO: 1581690 - DNA, 15 bp, Homo sapiens
tgttttctgggactt

SEQ ID NO: 1581691 - DNA, 15 bp, Homo sapiens
atgttttctgggact

SEQ ID NO: 1581692 - DNA, 15 bp, Homo sapiens
aatgttttctgggac

SEQ ID NO: 1581693 - DNA, 15 bp, Homo sapiens
caatgttttctggga

SEQ ID NO: 1581694 - DNA, 15 bp, Homo sapiens
ccaatgttttctggg

SEQ ID NO: 1581695 - DNA, 15 bp, Homo sapiens
cccaatgttttctgg

SEQ ID NO: 1581696 - DNA, 15 bp, Homo sapiens
gcccaatgttttctg

SEQ ID NO: 1581697 - DNA, 15 bp, Homo sapiens
ggcccaatgttttct

SEQ ID NO: 1581698 - DNA, 15 bp, Homo sapiens
aggcccaatgttttc

SEQ ID NO: 1581699 - DNA, 15 bp, Homo sapiens
gaggcccaatgtttt

SEQ ID NO: 1581700 - DNA, 15 bp, Homo sapiens
cgaggcccaatgttt

SEQ ID NO: 1581701 - DNA, 15 bp, Homo sapiens
ccgaggcccaatgtt

SEQ ID NO: 1581702 - DNA, 15 bp, Homo sapiens
tccgaggcccaatgt

SEQ ID NO: 1581703 - DNA, 15 bp, Homo sapiens
ctccgaggcccaatg

SEQ ID NO: 1581704 - DNA, 15 bp, Homo sapiens
tctccgaggcccaat

SEQ ID NO: 1581705 - DNA, 15 bp, Homo sapiens
atctccgaggcccaa

SEQ ID NO: 1581706 - DNA, 15 bp, Homo sapiens
aatctccgaggccca

SEQ ID NO: 1581707 - DNA, 15 bp, Homo sapiens
gaatctccgaggccc

SEQ ID NO: 1581708 - DNA, 15 bp, Homo sapiens
ggaatctccgaggcc

SEQ ID NO: 1581709 - DNA, 15 bp, Homo sapiens
gggaatctccgaggc

SEQ ID NO: 1581710 - DNA, 15 bp, Homo sapiens
ggggaatctccgagg

SEQ ID NO: 1581711 - DNA, 15 bp, Homo sapiens
gggggaatctccgag

SEQ ID NO: 1581712 - DNA, 15 bp, Homo sapiens
agggggaatctccga

SEQ ID NO: 1581713 - DNA, 15 bp, Homo sapiens
gagggggaatctccg

SEQ ID NO: 1581714 - DNA, 15 bp, Homo sapiens
ggagggggaatctcc

SEQ ID NO: 1581715 - DNA, 15 bp, Homo sapiens
tggagggggaatctc

SEQ ID NO: 1581716 - DNA, 15 bp, Homo sapiens
gtggagggggaatct

SEQ ID NO: 1581717 - DNA, 15 bp, Homo sapiens
ggtggagggggaatc

SEQ ID NO: 1581718 - DNA, 15 bp, Homo sapiens
gggtggagggggaat

SEQ ID NO: 1581719 - DNA, 15 bp, Homo sapiens
agggtggagggggaa

SEQ ID NO: 1581720 - DNA, 15 bp, Homo sapiens
aagggtggaggggga

SEQ ID NO: 1581721 - DNA, 15 bp, Homo sapiens
gaagggtggaggggg

SEQ ID NO: 1581722 - DNA, 15 bp, Homo sapiens
ggaagggtggagggg

SEQ ID NO: 1581723 - DNA, 15 bp, Homo sapiens
gggaagggtggaggg

SEQ ID NO: 1581724 - DNA, 15 bp, Homo sapiens
agggaagggtggagg

SEQ ID NO: 1581725 - DNA, 15 bp, Homo sapiens
gagggaagggtggag

SEQ ID NO: 1581726 - DNA, 15 bp, Homo sapiens
tgagggaagggtgga

SEQ ID NO: 1581727 - DNA, 15 bp, Homo sapiens
gtgagggaagggtgg

SEQ ID NO: 1581728 - DNA, 15 bp, Homo sapiens
tgtgagggaagggtg

SEQ ID NO: 1581729 - DNA, 15 bp, Homo sapiens
gtgtgagggaagggt

SEQ ID NO: 1581730 - DNA, 15 bp, Homo sapiens
ggtgtgagggaaggg

SEQ ID NO: 1581731 - DNA, 15 bp, Homo sapiens
gggtgtgagggaagg

SEQ ID NO: 1581732 - DNA, 15 bp, Homo sapiens
tgggtgtgagggaag

SEQ ID NO: 1581733 - DNA, 15 bp, Homo sapiens
gtgggtgtgagggaa

SEQ ID NO: 1581734 - DNA, 15 bp, Homo sapiens
ggtgggtgtgaggga

SEQ ID NO: 1581735 - DNA, 15 bp, Homo sapiens
gggtgggtgtgaggg

SEQ ID NO: 1581736 - DNA, 15 bp, Homo sapiens
ggggtgggtgtgagg

SEQ ID NO: 1581737 - DNA, 15 bp, Homo sapiens
tggggtgggtgtgag

SEQ ID NO: 1581738 - DNA, 15 bp, Homo sapiens
ttggggtgggtgtga

SEQ ID NO: 1581739 - DNA, 15 bp, Homo sapiens
attggggtgggtgtg

SEQ ID NO: 1581740 - DNA, 15 bp, Homo sapiens
cattggggtgggtgt

SEQ ID NO: 1581741 - DNA, 15 bp, Homo sapiens
ccattggggtgggtg

SEQ ID NO: 1581742 - DNA, 15 bp, Homo sapiens
gccattggggtgggt

SEQ ID NO: 1581743 - DNA, 15 bp, Homo sapiens
ggccattggggtggg

SEQ ID NO: 1581744 - DNA, 15 bp, Homo sapiens
aggccattggggtgg

SEQ ID NO: 1581745 - DNA, 15 bp, Homo sapiens
caggccattggggtg

SEQ ID NO: 1581746 - DNA, 15 bp, Homo sapiens
ccaggccattggggt

SEQ ID NO: 1581747 - DNA, 15 bp, Homo sapiens
cccaggccattgggg

SEQ ID NO: 1581748 - DNA, 15 bp, Homo sapiens
ccccaggccattggg

SEQ ID NO: 1581749 - DNA, 15 bp, Homo sapiens
accccaggccattgg

SEQ ID NO: 1581750 - DNA, 15 bp, Homo sapiens
gaccccaggccattg

SEQ ID NO: 1581751 - DNA, 15 bp, Homo sapiens
cgaccccaggccatt

SEQ ID NO: 1581752 - DNA, 15 bp, Homo sapiens
tcgaccccaggccat

SEQ ID NO: 1581753 - DNA, 15 bp, Homo sapiens
atcgaccccaggcca

SEQ ID NO: 1581754 - DNA, 15 bp, Homo sapiens
tatcgaccccaggcc

SEQ ID NO: 1581755 - DNA, 15 bp, Homo sapiens
gtatcgaccccaggc

SEQ ID NO: 1581756 - DNA, 15 bp, Homo sapiens
agtatcgaccccagg

SEQ ID NO: 1581757 - DNA, 15 bp, Homo sapiens
cagtatcgaccccag

SEQ ID NO: 1581758 - DNA, 15 bp, Homo sapiens
gcagtatcgacccca

SEQ ID NO: 1581759 - DNA, 15 bp, Homo sapiens
cgcagtatcgacccc

SEQ ID NO: 1581760 - DNA, 15 bp, Homo sapiens
ccgcagtatcgaccc

SEQ ID NO: 1581761 - DNA, 15 bp, Homo sapiens
gccgcagtatcgacc

SEQ ID NO: 1581762 - DNA, 15 bp, Homo sapiens
ggccgcagtatcgac

SEQ ID NO: 1581763 - DNA, 15 bp, Homo sapiens
tggccgcagtatcga

SEQ ID NO: 1581764 - DNA, 15 bp, Homo sapiens
gtggccgcagtatcg

SEQ ID NO: 1581765 - DNA, 15 bp, Homo sapiens
ggtggccgcagtatc

SEQ ID NO: 1581766 - DNA, 15 bp, Homo sapiens
cggtggccgcagtat

SEQ ID NO: 1581767 - DNA, 15 bp, Homo sapiens
ccggtggccgcagta

SEQ ID NO: 1581768 - DNA, 15 bp, Homo sapiens
tccggtggccgcagt

SEQ ID NO: 1581769 - DNA, 15 bp, Homo sapiens
ttccggtggccgcag

SEQ ID NO: 1581770 - DNA, 15 bp, Homo sapiens
tttccggtggccgca

SEQ ID NO: 1581771 - DNA, 15 bp, Homo sapiens
gtttccggtggccgc

SEQ ID NO: 1581772 - DNA, 15 bp, Homo sapiens
agtttccggtggccg

SEQ ID NO: 1581773 - DNA, 15 bp, Homo sapiens
cagtttccggtggcc

SEQ ID NO: 1581774 - DNA, 15 bp, Homo sapiens
gcagtttccggtggc

SEQ ID NO: 1581775 - DNA, 15 bp, Homo sapiens
ggcagtttccggtgg

SEQ ID NO: 1581776 - DNA, 15 bp, Homo sapiens
aggcagtttccggtg

SEQ ID NO: 1581777 - DNA, 15 bp, Homo sapiens
caggcagtttccggt

SEQ ID NO: 1581778 - DNA, 15 bp, Homo sapiens
ccaggcagtttccgg

SEQ ID NO: 1581779 - DNA, 15 bp, Homo sapiens
cccaggcagtttccg

SEQ ID NO: 1581780 - DNA, 15 bp, Homo sapiens
tcccaggcagtttcc

SEQ ID NO: 1581781 - DNA, 15 bp, Homo sapiens
gtcccaggcagtttc

SEQ ID NO: 1581782 - DNA, 15 bp, Homo sapiens
tgtcccaggcagttt

SEQ ID NO: 1581783 - DNA, 15 bp, Homo sapiens
ttgtcccaggcagtt

SEQ ID NO: 1581784 - DNA, 15 bp, Homo sapiens
cttgtcccaggcagt

SEQ ID NO: 1581785 - DNA, 15 bp, Homo sapiens
acttgtcccaggcag

SEQ ID NO: 1581786 - DNA, 15 bp, Homo sapiens
cacttgtcccaggca

SEQ ID NO: 1581787 - DNA, 15 bp, Homo sapiens
acacttgtcccaggc

SEQ ID NO: 1581788 - DNA, 15 bp, Homo sapiens
aacacttgtcccagg

SEQ ID NO: 1581789 - DNA, 15 bp, Homo sapiens
caacacttgtcccag

SEQ ID NO: 1581790 - DNA, 15 bp, Homo sapiens
ccaacacttgtccca

SEQ ID NO: 1581791 - DNA, 15 bp, Homo sapiens
cccaacacttgtccc

SEQ ID NO: 1581792 - DNA, 15 bp, Homo sapiens
ccccaacacttgtcc

SEQ ID NO: 1581793 - DNA, 15 bp, Homo sapiens
tccccaacacttgtc

SEQ ID NO: 1581794 - DNA, 15 bp, Homo sapiens
atccccaacacttgt

SEQ ID NO: 1581795 - DNA, 15 bp, Homo sapiens
catccccaacacttg

SEQ ID NO: 1581796 - DNA, 15 bp, Homo sapiens
acatccccaacactt

SEQ ID NO: 1581797 - DNA, 15 bp, Homo sapiens
cacatccccaacact

SEQ ID NO: 1581798 - DNA, 15 bp, Homo sapiens
ccacatccccaacac

SEQ ID NO: 1581799 - DNA, 15 bp, Homo sapiens
cccacatccccaaca

SEQ ID NO: 1581800 - DNA, 15 bp, Homo sapiens
ccccacatccccaac

SEQ ID NO: 1581801 - DNA, 15 bp, Homo sapiens
cccccacatccccaa

SEQ ID NO: 1581802 - DNA, 15 bp, Homo sapiens
tcccccacatcccca

SEQ ID NO: 1581803 - DNA, 15 bp, Homo sapiens
ctcccccacatcccc

SEQ ID NO: 1581804 - DNA, 15 bp, Homo sapiens
tctcccccacatccc

SEQ ID NO: 1581805 - DNA, 15 bp, Homo sapiens
gtctcccccacatcc

SEQ ID NO: 1581806 - DNA, 15 bp, Homo sapiens
cgtctcccccacatc

SEQ ID NO: 1581807 - DNA, 15 bp, Homo sapiens
ccgtctcccccacat

SEQ ID NO: 1581808 - DNA, 15 bp, Homo sapiens
cccgtctcccccaca

SEQ ID NO: 1581809 - DNA, 15 bp, Homo sapiens
gcccgtctcccccac

SEQ ID NO: 1581810 - DNA, 15 bp, Homo sapiens
agcccgtctccccca

SEQ ID NO: 1581811 - DNA, 15 bp, Homo sapiens
cagcccgtctccccc

SEQ ID NO: 1581812 - DNA, 15 bp, Homo sapiens
acagcccgtctcccc

SEQ ID NO: 1581813 - DNA, 15 bp, Homo sapiens
cacagcccgtctccc

SEQ ID NO: 1581814 - DNA, 15 bp, Homo sapiens
ccacagcccgtctcc

SEQ ID NO: 1581815 - DNA, 15 bp, Homo sapiens
accacagcccgtctc

SEQ ID NO: 1581816 - DNA, 15 bp, Homo sapiens
caccacagcccgtct

SEQ ID NO: 1581817 - DNA, 15 bp, Homo sapiens
ccaccacagcccgtc

SEQ ID NO: 1581818 - DNA, 15 bp, Homo sapiens
cccaccacagcccgt

SEQ ID NO: 1581819 - DNA, 15 bp, Homo sapiens
tcccaccacagcccg

SEQ ID NO: 1581820 - DNA, 15 bp, Homo sapiens
ctcccaccacagccc

SEQ ID NO: 1581821 - DNA, 15 bp, Homo sapiens
acctcccaccacagc

SEQ ID NO: 1581822 - DNA, 15 bp, Homo sapiens
aacctcccaccacag

SEQ ID NO: 1581823 - DNA, 15 bp, Homo sapiens
caacctcccaccaca

SEQ ID NO: 1581824 - DNA, 15 bp, Homo sapiens
ccaacctcccaccac

SEQ ID NO: 1581825 - DNA, 15 bp, Homo sapiens
tccaacctcccacca

SEQ ID NO: 1581826 - DNA, 15 bp, Homo sapiens
ctccaacctcccacc

SEQ ID NO: 1581827 - DNA, 15 bp, Homo sapiens
tctccaacctcccac

SEQ ID NO: 1581828 - DNA, 15 bp, Homo sapiens
ctctccaacctccca

SEQ ID NO: 1581829 - DNA, 15 bp, Homo sapiens
cctctccaacctccc

SEQ ID NO: 1581830 - DNA, 15 bp, Homo sapiens
tcctctccaacctcc

SEQ ID NO: 1581831 - DNA, 15 bp, Homo sapiens
ctcctctccaacctc

SEQ ID NO: 1581832 - DNA, 15 bp, Homo sapiens
cctcctctccaacct

SEQ ID NO: 1581833 - DNA, 15 bp, Homo sapiens
tcctcctctccaacc

SEQ ID NO: 1581834 - DNA, 15 bp, Homo sapiens
ttcctcctctccaac

SEQ ID NO: 1581835 - DNA, 15 bp, Homo sapiens
tttcctcctctccaa

SEQ ID NO: 1581836 - DNA, 15 bp, Homo sapiens
ctttcctcctctcca

SEQ ID NO: 1581837 - DNA, 15 bp, Homo sapiens
cctttcctcctctcc

SEQ ID NO: 1581838 - DNA, 15 bp, Homo sapiens
tcctttcctcctctc

SEQ ID NO: 1581839 - DNA, 15 bp, Homo sapiens
ctcctttcctcctct

SEQ ID NO: 1581840 - DNA, 15 bp, Homo sapiens
gctcctttcctcctc

SEQ ID NO: 1581841 - DNA, 15 bp, Homo sapiens
cgctcctttcctcct

SEQ ID NO: 1581842 - DNA, 15 bp, Homo sapiens
ccgctcctttcctcc

SEQ ID NO: 1581843 - DNA, 15 bp, Homo sapiens
tccgctcctttcctc

SEQ ID NO: 1581844 - DNA, 15 bp, Homo sapiens
ctccgctcctttcct

SEQ ID NO: 1581845 - DNA, 15 bp, Homo sapiens
cctccgctcctttcc

SEQ ID NO: 1581846 - DNA, 15 bp, Homo sapiens
tcctccgctcctttc

SEQ ID NO: 1581847 - DNA, 15 bp, Homo sapiens
ctcctccgctccttt

SEQ ID NO: 1581848 - DNA, 15 bp, Homo sapiens
cctcctccgctcctt

SEQ ID NO: 1581849 - DNA, 15 bp, Homo sapiens
ccctcctccgctcct

SEQ ID NO: 1581850 - DNA, 15 bp, Homo sapiens
tccctcctccgctcc

SEQ ID NO: 1581851 - DNA, 15 bp, Homo sapiens
ttccctcctccgctc

SEQ ID NO: 1581852 - DNA, 15 bp, Homo sapiens
gttccctcctccgct

SEQ ID NO: 1581853 - DNA, 15 bp, Homo sapiens
ggttccctcctccgc

SEQ ID NO: 1581854 - DNA, 15 bp, Homo sapiens
gggttccctcctccg

SEQ ID NO: 1581855 - DNA, 15 bp, Homo sapiens
ggggttccctcctcc

SEQ ID NO: 1581856 - DNA, 15 bp, Homo sapiens
tggggttccctcctc

SEQ ID NO: 1581857 - DNA, 15 bp, Homo sapiens
ctggggttccctcct

SEQ ID NO: 1581858 - DNA, 15 bp, Homo sapiens
gctggggttccctcc

SEQ ID NO: 1581859 - DNA, 15 bp, Homo sapiens
cgctggggttccctc

SEQ ID NO: 1581860 - DNA, 15 bp, Homo sapiens
gcgctggggttccct

SEQ ID NO: 1581861 - DNA, 15 bp, Homo sapiens
agcgctggggttccc

SEQ ID NO: 1581862 - DNA, 15 bp, Homo sapiens
cagcgctggggttcc

SEQ ID NO: 1581863 - DNA, 15 bp, Homo sapiens
gcagcgctggggttc

SEQ ID NO: 1581864 - DNA, 15 bp, Homo sapiens
agcagcgctggggtt

SEQ ID NO: 1581865 - DNA, 15 bp, Homo sapiens
cagcagcgctggggt

SEQ ID NO: 1581866 - DNA, 15 bp, Homo sapiens
ccagcagcgctgggg

SEQ ID NO: 1581867 - DNA, 15 bp, Homo sapiens
gccagcagcgctggg

SEQ ID NO: 1581868 - DNA, 15 bp, Homo sapiens
tgccagcagcgctgg

SEQ ID NO: 1581869 - DNA, 15 bp, Homo sapiens
ttgccagcagcgctg

SEQ ID NO: 1581870 - DNA, 15 bp, Homo sapiens
cttgccagcagcgct

SEQ ID NO: 1581871 - DNA, 15 bp, Homo sapiens
gcttgccagcagcgc

SEQ ID NO: 1581872 - DNA, 15 bp, Homo sapiens
ggcttgccagcagcg

SEQ ID NO: 1581873 - DNA, 15 bp, Homo sapiens
gggcttgccagcagc

SEQ ID NO: 1581874 - DNA, 15 bp, Homo sapiens
cgggcttgccagcag

SEQ ID NO: 1581875 - DNA, 15 bp, Homo sapiens
gcgggcttgccagca

SEQ ID NO: 1581876 - DNA, 15 bp, Homo sapiens
cgcgggcttgccagc

SEQ ID NO: 1581877 - DNA, 15 bp, Homo sapiens
ccgcgggcttgccag

SEQ ID NO: 1581878 - DNA, 15 bp, Homo sapiens
cccgcgggcttgcca

SEQ ID NO: 1581879 - DNA, 15 bp, Homo sapiens
tcccgcgggcttgcc

SEQ ID NO: 1581880 - DNA, 15 bp, Homo sapiens
ttcccgcgggcttgc

SEQ ID NO: 1581881 - DNA, 15 bp, Homo sapiens
tttcccgcgggcttg

SEQ ID NO: 1581882 - DNA, 15 bp, Homo sapiens
gtttcccgcgggctt

SEQ ID NO: 1581883 - DNA, 15 bp, Homo sapiens
agtttcccgcgggct

SEQ ID NO: 1581884 - DNA, 15 bp, Homo sapiens
gagtttcccgcgggc

SEQ ID NO: 1581885 - DNA, 15 bp, Homo sapiens
cgagtttcccgcggg

SEQ ID NO: 1581886 - DNA, 15 bp, Homo sapiens
tcgagtttcccgcgg

SEQ ID NO: 1581887 - DNA, 15 bp, Homo sapiens
ttcgagtttcccgcg

SEQ ID NO: 1581888 - DNA, 15 bp, Homo sapiens
gttcgagtttcccgc

SEQ ID NO: 1581889 - DNA, 15 bp, Homo sapiens
tgttcgagtttcccg

SEQ ID NO: 1581890 - DNA, 15 bp, Homo sapiens
gtgttcgagtttccc

SEQ ID NO: 1581891 - DNA, 15 bp, Homo sapiens
ggtgttcgagtttcc

SEQ ID NO: 1581892 - DNA, 15 bp, Homo sapiens
gggtgttcgagtttc

SEQ ID NO: 1581893 - DNA, 15 bp, Homo sapiens
tgggtgttcgagttt

SEQ ID NO: 1581894 - DNA, 15 bp, Homo sapiens
ttgggtgttcgagtt

SEQ ID NO: 1581895 - DNA, 15 bp, Homo sapiens
cttgggtgttcgagt

SEQ ID NO: 1581896 - DNA, 15 bp, Homo sapiens
ccttgggtgttcgag

SEQ ID NO: 1581897 - DNA, 15 bp, Homo sapiens
gccttgggtgttcga

SEQ ID NO: 1581898 - DNA, 15 bp, Homo sapiens
ggccttgggtgttcg

SEQ ID NO: 1581899 - DNA, 15 bp, Homo sapiens
gggccttgggtgttc

SEQ ID NO: 1581900 - DNA, 15 bp, Homo sapiens
tgggccttgggtgtt

SEQ ID NO: 1581901 - DNA, 15 bp, Homo sapiens
gtgggccttgggtgt

SEQ ID NO: 1581902 - DNA, 15 bp, Homo sapiens
cgtgggccttgggtg

SEQ ID NO: 1581903 - DNA, 15 bp, Homo sapiens
ccgtgggccttgggt

SEQ ID NO: 1581904 - DNA, 15 bp, Homo sapiens
cccgtgggccttggg

SEQ ID NO: 1581905 - DNA, 15 bp, Homo sapiens
gcccgtgggccttgg

SEQ ID NO: 1581906 - DNA, 15 bp, Homo sapiens
agcccgtgggccttg

SEQ ID NO: 1581907 - DNA, 15 bp, Homo sapiens
gagcccgtgggcctt

SEQ ID NO: 1581908 - DNA, 15 bp, Homo sapiens
ggagcccgtgggcct

SEQ ID NO: 1581909 - DNA, 15 bp, Homo sapiens
gggagcccgtgggcc

SEQ ID NO: 1581910 - DNA, 15 bp, Homo sapiens
tgggagcccgtgggc

SEQ ID NO: 1581911 - DNA, 15 bp, Homo sapiens
gtgggagcccgtggg

SEQ ID NO: 1581912 - DNA, 15 bp, Homo sapiens
agtgggagcccgtgg

SEQ ID NO: 1581913 - DNA, 15 bp, Homo sapiens
cagtgggagcccgtg

SEQ ID NO: 1581914 - DNA, 15 bp, Homo sapiens
acagtgggagcccgt

SEQ ID NO: 1581915 - DNA, 15 bp, Homo sapiens
aacagtgggagcccg

SEQ ID NO: 1581916 - DNA, 15 bp, Homo sapiens
caacagtgggagccc

SEQ ID NO: 1581917 - DNA, 15 bp, Homo sapiens
ccaacagtgggagcc

SEQ ID NO: 1581918 - DNA, 15 bp, Homo sapiens
cccaacagtgggagc

SEQ ID NO: 1581919 - DNA, 15 bp, Homo sapiens
tcccaacagtgggag

SEQ ID NO: 1581920 - DNA, 15 bp, Homo sapiens
gtcccaacagtggga

SEQ ID NO: 1581921 - DNA, 15 bp, Homo sapiens
agtcccaacagtggg

SEQ ID NO: 1581922 - DNA, 15 bp, Homo sapiens
cagtcccaacagtgg

SEQ ID NO: 1581923 - DNA, 15 bp, Homo sapiens
tcagtcccaacagtg

SEQ ID NO: 1581924 - DNA, 15 bp, Homo sapiens
ctcagtcccaacagt

SEQ ID NO: 1581925 - DNA, 15 bp, Homo sapiens
tctcagtcccaacag

SEQ ID NO: 1581926 - DNA, 15 bp, Homo sapiens
atctcagtcccaaca

SEQ ID NO: 1581927 - DNA, 15 bp, Homo sapiens
aatctcagtcccaac

SEQ ID NO: 1581928 - DNA, 15 bp, Homo sapiens
aaatctcagtcccaa

SEQ ID NO: 1581929 - DNA, 15 bp, Homo sapiens
caaatctcagtccca

SEQ ID NO: 1581930 - DNA, 15 bp, Homo sapiens
acaaatctcagtccc

SEQ ID NO: 1581931 - DNA, 15 bp, Homo sapiens
aacaaatctcagtcc

SEQ ID NO: 1581932 - DNA, 15 bp, Homo sapiens
caacaaatctcagtc

SEQ ID NO: 1581933 - DNA, 15 bp, Homo sapiens
ccaacaaatctcagt

SEQ ID NO: 1581934 - DNA, 15 bp, Homo sapiens
cccaacaaatctcag

SEQ ID NO: 1581935 - DNA, 15 bp, Homo sapiens
ccccaacaaatctca

SEQ ID NO: 1581936 - DNA, 15 bp, Homo sapiens
tccccaacaaatctc

SEQ ID NO: 1581937 - DNA, 15 bp, Homo sapiens
ttccccaacaaatct

SEQ ID NO: 1581938 - DNA, 15 bp, Homo sapiens
gttccccaacaaatc

SEQ ID NO: 1581939 - DNA, 15 bp, Homo sapiens
tgttccccaacaaat

SEQ ID NO: 1581940 - DNA, 15 bp, Homo sapiens
ctgttccccaacaaa

SEQ ID NO: 1581941 - DNA, 15 bp, Homo sapiens
tctgttccccaacaa

SEQ ID NO: 1581942 - DNA, 15 bp, Homo sapiens
ctctgttccccaaca

SEQ ID NO: 1581943 - DNA, 15 bp, Homo sapiens
cctctgttccccaac

SEQ ID NO: 1581944 - DNA, 15 bp, Homo sapiens
ccctctgttccccaa

SEQ ID NO: 1581945 - DNA, 15 bp, Homo sapiens
gccctctgttcccca

SEQ ID NO: 1581946 - DNA, 15 bp, Homo sapiens
tgccctctgttcccc

SEQ ID NO: 1581947 - DNA, 15 bp, Homo sapiens
ctgccctctgttccc

SEQ ID NO: 1581948 - DNA, 15 bp, Homo sapiens
tctgccctctgttcc

SEQ ID NO: 1581949 - DNA, 15 bp, Homo sapiens
ttctgccctctgttc

SEQ ID NO: 1581950 - DNA, 15 bp, Homo sapiens
tttctgccctctgtt

SEQ ID NO: 1581951 - DNA, 15 bp, Homo sapiens
ctttctgccctctgt

SEQ ID NO: 1581952 - DNA, 15 bp, Homo sapiens
tctttctgccctctg

SEQ ID NO: 1581953 - DNA, 15 bp, Homo sapiens
ctctttctgccctct

SEQ ID NO: 1581954 - DNA, 15 bp, Homo sapiens
gctctttctgccctc

SEQ ID NO: 1581955 - DNA, 15 bp, Homo sapiens
agctctttctgccct

SEQ ID NO: 1581956 - DNA, 15 bp, Homo sapiens
tagctctttctgccc

SEQ ID NO: 1581957 - DNA, 15 bp, Homo sapiens
atagctctttctgcc

SEQ ID NO: 1581958 - DNA, 15 bp, Homo sapiens
tatagctctttctgc

SEQ ID NO: 1581959 - DNA, 15 bp, Homo sapiens
ctatagctctttctg

SEQ ID NO: 1581960 - DNA, 15 bp, Homo sapiens
cctatagctctttct

SEQ ID NO: 1581961 - DNA, 15 bp, Homo sapiens
acctatagctctttc

SEQ ID NO: 1581962 - DNA, 15 bp, Homo sapiens
aacctatagctcttt

SEQ ID NO: 1581963 - DNA, 15 bp, Homo sapiens
aaacctatagctctt

SEQ ID NO: 1581964 - DNA, 15 bp, Homo sapiens
gaaacctatagctct

SEQ ID NO: 1581965 - DNA, 15 bp, Homo sapiens
cgaaacctatagctc

SEQ ID NO: 1581966 - DNA, 15 bp, Homo sapiens
tcgaaacctatagct

SEQ ID NO: 1581967 - DNA, 15 bp, Homo sapiens
gtcgaaacctatagc

SEQ ID NO: 1581968 - DNA, 15 bp, Homo sapiens
agtcgaaacctatag

SEQ ID NO: 1581969 - DNA, 15 bp, Homo sapiens
tagtcgaaacctata

SEQ ID NO: 1581970 - DNA, 15 bp, Homo sapiens
gtagtcgaaacctat

SEQ ID NO: 1581971 - DNA, 15 bp, Homo sapiens
ggtagtcgaaaccta

SEQ ID NO: 1581972 - DNA, 15 bp, Homo sapiens
aggtagtcgaaacct

SEQ ID NO: 1581973 - DNA, 15 bp, Homo sapiens
taggtagtcgaaacc

SEQ ID NO: 1581974 - DNA, 15 bp, Homo sapiens
ttaggtagtcgaaac

SEQ ID NO: 1581975 - DNA, 15 bp, Homo sapiens
tttaggtagtcgaaa

SEQ ID NO: 1581976 - DNA, 15 bp, Homo sapiens
ctttaggtagtcgaa

SEQ ID NO: 1581977 - DNA, 15 bp, Homo sapiens
gctttaggtagtcga

SEQ ID NO: 1581978 - DNA, 15 bp, Homo sapiens
agctttaggtagtcg

SEQ ID NO: 1581979 - DNA, 15 bp, Homo sapiens
cagctttaggtagtc

SEQ ID NO: 1581980 - DNA, 15 bp, Homo sapiens
tcagctttaggtagt

SEQ ID NO: 1581981 - DNA, 15 bp, Homo sapiens
ttcagctttaggtag

SEQ ID NO: 1581982 - DNA, 15 bp, Homo sapiens
attcagctttaggta

SEQ ID NO: 1581983 - DNA, 15 bp, Homo sapiens
cattcagctttaggt

SEQ ID NO: 1581984 - DNA, 15 bp, Homo sapiens
tcattcagctttagg

SEQ ID NO: 1581985 - DNA, 15 bp, Homo sapiens
ctcattcagctttag

SEQ ID NO: 1581986 - DNA, 15 bp, Homo sapiens
cctcattcagcttta

SEQ ID NO: 1581987 - DNA, 15 bp, Homo sapiens
gcctcattcagcttt

SEQ ID NO: 1581988 - DNA, 15 bp, Homo sapiens
agcctcattcagctt

SEQ ID NO: 1581989 - DNA, 15 bp, Homo sapiens
cagcctcattcagct

SEQ ID NO: 1581990 - DNA, 15 bp, Homo sapiens
gcagcctcattcagc

SEQ ID NO: 1581991 - DNA, 15 bp, Homo sapiens
tgcagcctcattcag

SEQ ID NO: 1581992 - DNA, 15 bp, Homo sapiens
gtgcagcctcattca

SEQ ID NO: 1581993 - DNA, 15 bp, Homo sapiens
tgtgcagcctcattc

SEQ ID NO: 1581994 - DNA, 15 bp, Homo sapiens
ctgtgcagcctcatt

SEQ ID NO: 1581995 - DNA, 15 bp, Homo sapiens
cctgtgcagcctcat

SEQ ID NO: 1581996 - DNA, 15 bp, Homo sapiens
acctgtgcagcctca

SEQ ID NO: 1581997 - DNA, 15 bp, Homo sapiens
gacctgtgcagcctc

SEQ ID NO: 1581998 - DNA, 15 bp, Homo sapiens
ggacctgtgcagcct

SEQ ID NO: 1581999 - DNA, 15 bp, Homo sapiens
aggacctgtgcagcc

SEQ ID NO: 1582000 - DNA, 15 bp, Homo sapiens
caggacctgtgcagc

SEQ ID NO: 1582001 - DNA, 15 bp, Homo sapiens
ccaggacctgtgcag

SEQ ID NO: 1582002 - DNA, 15 bp, Homo sapiens
cccaggacctgtgca

SEQ ID NO: 1582003 - DNA, 15 bp, Homo sapiens
ccccaggacctgtgc

SEQ ID NO: 1582004 - DNA, 15 bp, Homo sapiens
gccccaggacctgtg

SEQ ID NO: 1582005 - DNA, 15 bp, Homo sapiens
cgccccaggacctgt

SEQ ID NO: 1582006 - DNA, 15 bp, Homo sapiens
tcgccccaggacctg

SEQ ID NO: 1582007 - DNA, 15 bp, Homo sapiens
ttcgccccaggacct

SEQ ID NO: 1582008 - DNA, 15 bp, Homo sapiens
tttcgccccaggacc

SEQ ID NO: 1582009 - DNA, 15 bp, Homo sapiens
ttttcgccccaggac

SEQ ID NO: 1582010 - DNA, 15 bp, Homo sapiens
gttttcgccccagga

SEQ ID NO: 1582011 - DNA, 15 bp, Homo sapiens
tgttttcgccccagg

SEQ ID NO: 1582012 - DNA, 15 bp, Homo sapiens
ctgttttcgccccag

SEQ ID NO: 1582013 - DNA, 15 bp, Homo sapiens
gctgttttcgcccca

SEQ ID NO: 1582014 - DNA, 15 bp, Homo sapiens
ggctgttttcgcccc

SEQ ID NO: 1582015 - DNA, 15 bp, Homo sapiens
cggctgttttcgccc

SEQ ID NO: 1582016 - DNA, 15 bp, Homo sapiens
gcggctgttttcgcc

SEQ ID NO: 1582017 - DNA, 15 bp, Homo sapiens
cgcggctgttttcgc

SEQ ID NO: 1582018 - DNA, 15 bp, Homo sapiens
gcgcggctgttttcg

SEQ ID NO: 1582019 - DNA, 15 bp, Homo sapiens
ggcgcggctgttttc

SEQ ID NO: 1582020 - DNA, 15 bp, Homo sapiens
cggcgcggctgtttt

SEQ ID NO: 1582021 - DNA, 15 bp, Homo sapiens
gcggcgcggctgttt

SEQ ID NO: 1582022 - DNA, 15 bp, Homo sapiens
ggcggcgcggctgtt

SEQ ID NO: 1582023 - DNA, 15 bp, Homo sapiens
tggcggcgcggctgt

SEQ ID NO: 1582024 - DNA, 15 bp, Homo sapiens
gtggcggcgcggctg

SEQ ID NO: 1582025 - DNA, 15 bp, Homo sapiens
tgtggcggcgcggct

SEQ ID NO: 1582026 - DNA, 15 bp, Homo sapiens
ttgtggcggcgcggc

SEQ ID NO: 1582027 - DNA, 15 bp, Homo sapiens
cttgtggcggcgcgg

SEQ ID NO: 1582028 - DNA, 15 bp, Homo sapiens
ccttgtggcggcgcg

SEQ ID NO: 1582029 - DNA, 15 bp, Homo sapiens
tccttgtggcggcgc

SEQ ID NO: 1582030 - DNA, 15 bp, Homo sapiens
atccttgtggcggcg

SEQ ID NO: 1582031 - DNA, 15 bp, Homo sapiens
catccttgtggcggc

SEQ ID NO: 1582032 - DNA, 15 bp, Homo sapiens
gcatccttgtggcgg

SEQ ID NO: 1582033 - DNA, 15 bp, Homo sapiens
agcatccttgtggcg

SEQ ID NO: 1582034 - DNA, 15 bp, Homo sapiens
aagcatccttgtggc

SEQ ID NO: 1582035 - DNA, 15 bp, Homo sapiens
gaagcatccttgtgg

SEQ ID NO: 1582036 - DNA, 15 bp, Homo sapiens
cgaagcatccttgtg

SEQ ID NO: 1582037 - DNA, 15 bp, Homo sapiens
ccgaagcatccttgt

SEQ ID NO: 1582038 - DNA, 15 bp, Homo sapiens
cccgaagcatccttg

SEQ ID NO: 1582039 - DNA, 15 bp, Homo sapiens
tcccgaagcatcctt

SEQ ID NO: 1582040 - DNA, 15 bp, Homo sapiens
ttcccgaagcatcct

SEQ ID NO: 1582041 - DNA, 15 bp, Homo sapiens
attcccgaagcatcc

SEQ ID NO: 1582042 - DNA, 15 bp, Homo sapiens
gattcccgaagcatc

SEQ ID NO: 1582043 - DNA, 15 bp, Homo sapiens
agattcccgaagcat

SEQ ID NO: 1582044 - DNA, 15 bp, Homo sapiens
cagattcccgaagca

SEQ ID NO: 1582045 - DNA, 15 bp, Homo sapiens
acagattcccgaagc

SEQ ID NO: 1582046 - DNA, 15 bp, Homo sapiens
gacagattcccgaag

SEQ ID NO: 1582047 - DNA, 15 bp, Homo sapiens
ggacagattcccgaa

SEQ ID NO: 1582048 - DNA, 15 bp, Homo sapiens
aggacagattcccga

SEQ ID NO: 1582049 - DNA, 15 bp, Homo sapiens
aaggacagattcccg

SEQ ID NO: 1582050 - DNA, 15 bp, Homo sapiens
aaaggacagattccc

SEQ ID NO: 1582051 - DNA, 15 bp, Homo sapiens
taaaggacagattcc

SEQ ID NO: 1582052 - DNA, 15 bp, Homo sapiens
ttaaaggacagattc

SEQ ID NO: 1582053 - DNA, 15 bp, Homo sapiens
attaaaggacagatt

SEQ ID NO: 1582054 - DNA, 15 bp, Homo sapiens
aattaaaggacagat

SEQ ID NO: 1582055 - DNA, 15 bp, Homo sapiens
taattaaaggacaga

SEQ ID NO: 1582056 - DNA, 15 bp, Homo sapiens
ataattaaaggacag

SEQ ID NO: 1582057 - DNA, 15 bp, Homo sapiens
gataattaaaggaca

SEQ ID NO: 1582058 - DNA, 15 bp, Homo sapiens
tgataattaaaggac

SEQ ID NO: 1582059 - DNA, 15 bp, Homo sapiens
ctgataattaaagga

SEQ ID NO: 1582060 - DNA, 15 bp, Homo sapiens
cctgataattaaagg

SEQ ID NO: 1582061 - DNA, 15 bp, Homo sapiens
tcctgataattaaag

SEQ ID NO: 1582062 - DNA, 15 bp, Homo sapiens
ctcctgataattaaa

SEQ ID NO: 1582063 - DNA, 15 bp, Homo sapiens
gctcctgataattaa

SEQ ID NO: 1582064 - DNA, 15 bp, Homo sapiens
tgctcctgataatta

SEQ ID NO: 1582065 - DNA, 15 bp, Homo sapiens
ctgctcctgataatt

SEQ ID NO: 1582066 - DNA, 15 bp, Homo sapiens
gctgctcctgataat

SEQ ID NO: 1582067 - DNA, 15 bp, Homo sapiens
agctgctcctgataa

SEQ ID NO: 1582068 - DNA, 15 bp, Homo sapiens
cagctgctcctgata

SEQ ID NO: 1582069 - DNA, 15 bp, Homo sapiens
gcagctgctcctgat

SEQ ID NO: 1582070 - DNA, 15 bp, Homo sapiens
cgcagctgctcctga

SEQ ID NO: 1582071 - DNA, 15 bp, Homo sapiens
tcgcagctgctcctg

SEQ ID NO: 1582072 - DNA, 15 bp, Homo sapiens
ttcgcagctgctcct

SEQ ID NO: 1582073 - DNA, 15 bp, Homo sapiens
tttcgcagctgctcc

SEQ ID NO: 1582074 - DNA, 15 bp, Homo sapiens
gtttcgcagctgctc

SEQ ID NO: 1582075 - DNA, 15 bp, Homo sapiens
agtttcgcagctgct

SEQ ID NO: 1582076 - DNA, 15 bp, Homo sapiens
aagtttcgcagctgc

SEQ ID NO: 1582077 - DNA, 15 bp, Homo sapiens
taagtttcgcagctg

SEQ ID NO: 1582078 - DNA, 15 bp, Homo sapiens
gtaagtttcgcagct

SEQ ID NO: 1582079 - DNA, 15 bp, Homo sapiens
ggtaagtttcgcagc

SEQ ID NO: 1582080 - DNA, 15 bp, Homo sapiens
aggtaagtttcgcag

SEQ ID NO: 1582081 - DNA, 15 bp, Homo sapiens
aaggtaagtttcgca

SEQ ID NO: 1582082 - DNA, 15 bp, Homo sapiens
taaggtaagtttcgc

SEQ ID NO: 1582083 - DNA, 15 bp, Homo sapiens
ctaaggtaagtttcg

SEQ ID NO: 1582084 - DNA, 15 bp, Homo sapiens
gctaaggtaagtttc

SEQ ID NO: 1582085 - DNA, 15 bp, Homo sapiens
cgctaaggtaagttt

SEQ ID NO: 1582086 - DNA, 15 bp, Homo sapiens
gcgctaaggtaagtt

SEQ ID NO: 1582087 - DNA, 15 bp, Homo sapiens
tgcgctaaggtaagt

SEQ ID NO: 1582088 - DNA, 15 bp, Homo sapiens
ctgcgctaaggtaag

SEQ ID NO: 1582089 - DNA, 15 bp, Homo sapiens
gctgcgctaaggtaa

SEQ ID NO: 1582090 - DNA, 15 bp, Homo sapiens
tgctgcgctaaggta

SEQ ID NO: 1582091 - DNA, 15 bp, Homo sapiens
gtgctgcgctaaggt

SEQ ID NO: 1582092 - DNA, 15 bp, Homo sapiens
cgtgctgcgctaagg

SEQ ID NO: 1582093 - DNA, 15 bp, Homo sapiens
tcgtgctgcgctaag

SEQ ID NO: 1582094 - DNA, 15 bp, Homo sapiens
ttcgtgctgcgctaa

SEQ ID NO: 1582095 - DNA, 15 bp, Homo sapiens
gttcgtgctgcgcta

SEQ ID NO: 1582096 - DNA, 15 bp, Homo sapiens
ggttcgtgctgcgct

SEQ ID NO: 1582097 - DNA, 15 bp, Homo sapiens
gggttcgtgctgcgc

SEQ ID NO: 1582098 - DNA, 15 bp, Homo sapiens
agggttcgtgctgcg

SEQ ID NO: 1582099 - DNA, 15 bp, Homo sapiens
tagggttcgtgctgc

SEQ ID NO: 1582100 - DNA, 15 bp, Homo sapiens
ctagggttcgtgctg

SEQ ID NO: 1582101 - DNA, 15 bp, Homo sapiens
tctagggttcgtgct

SEQ ID NO: 1582102 - DNA, 15 bp, Homo sapiens
ctctagggttcgtgc

SEQ ID NO: 1582103 - DNA, 15 bp, Homo sapiens
gctctagggttcgtg

SEQ ID NO: 1582104 - DNA, 15 bp, Homo sapiens
cgctctagggttcgt

SEQ ID NO: 1582105 - DNA, 15 bp, Homo sapiens
gcgctctagggttcg

SEQ ID NO: 1582106 - DNA, 15 bp, Homo sapiens
ggcgctctagggttc

SEQ ID NO: 1582107 - DNA, 15 bp, Homo sapiens
gggcgctctagggtt

SEQ ID NO: 1582108 - DNA, 15 bp, Homo sapiens
ggggcgctctagggt

SEQ ID NO: 1582109 - DNA, 15 bp, Homo sapiens
gggggcgctctaggg

SEQ ID NO: 1582110 - DNA, 15 bp, Homo sapiens
cgggggcgctctagg

SEQ ID NO: 1582111 - DNA, 15 bp, Homo sapiens
tcgggggcgctctag

SEQ ID NO: 1582112 - DNA, 15 bp, Homo sapiens
ctcgggggcgctcta

SEQ ID NO: 1582113 - DNA, 15 bp, Homo sapiens
cctcgggggcgctct

SEQ ID NO: 1582114 - DNA, 15 bp, Homo sapiens
ccctcgggggcgctc

SEQ ID NO: 1582115 - DNA, 15 bp, Homo sapiens
accctcgggggcgct

SEQ ID NO: 1582116 - DNA, 15 bp, Homo sapiens
caccctcgggggcgc

SEQ ID NO: 1582117 - DNA, 15 bp, Homo sapiens
acaccctcgggggcg

SEQ ID NO: 1582118 - DNA, 15 bp, Homo sapiens
gacaccctcgggggc

SEQ ID NO: 1582119 - DNA, 15 bp, Homo sapiens
ggacaccctcggggg

SEQ ID NO: 1582120 - DNA, 15 bp, Homo sapiens
gggacaccctcgggg

SEQ ID NO: 1582121 - DNA, 15 bp, Homo sapiens
agggacaccctcggg

SEQ ID NO: 1582122 - DNA, 15 bp, Homo sapiens
cagggacaccctcgg

SEQ ID NO: 1582123 - DNA, 15 bp, Homo sapiens
gcagggacaccctcg

SEQ ID NO: 1582124 - DNA, 15 bp, Homo sapiens
ggcagggacaccctc

SEQ ID NO: 1582125 - DNA, 15 bp, Homo sapiens
gggcagggacaccct

SEQ ID NO: 1582126 - DNA, 15 bp, Homo sapiens
ggggcagggacaccc

SEQ ID NO: 1582127 - DNA, 15 bp, Homo sapiens
aggggcagggacacc

SEQ ID NO: 1582128 - DNA, 15 bp, Homo sapiens
aaggggcagggacac

SEQ ID NO: 1582129 - DNA, 15 bp, Homo sapiens
gaaggggcagggaca

SEQ ID NO: 1582130 - DNA, 15 bp, Homo sapiens
ggaaggggcagggac

SEQ ID NO: 1582131 - DNA, 15 bp, Homo sapiens
cggaaggggcaggga

SEQ ID NO: 1582132 - DNA, 15 bp, Homo sapiens
tcggaaggggcaggg

SEQ ID NO: 1582133 - DNA, 15 bp, Homo sapiens
gtcggaaggggcagg

SEQ ID NO: 1582134 - DNA, 15 bp, Homo sapiens
cgtcggaaggggcag

SEQ ID NO: 1582135 - DNA, 15 bp, Homo sapiens
ccgtcggaaggggca

SEQ ID NO: 1582136 - DNA, 15 bp, Homo sapiens
cccgtcggaaggggc

SEQ ID NO: 1582137 - DNA, 15 bp, Homo sapiens
ccccgtcggaagggg

SEQ ID NO: 1582138 - DNA, 15 bp, Homo sapiens
cccccgtcggaaggg

SEQ ID NO: 1582139 - DNA, 15 bp, Homo sapiens
gcccccgtcggaagg

SEQ ID NO: 1582140 - DNA, 15 bp, Homo sapiens
cgcccccgtcggaag

SEQ ID NO: 1582141 - DNA, 15 bp, Homo sapiens
acgcccccgtcggaa

SEQ ID NO: 1582142 - DNA, 15 bp, Homo sapiens
gacgcccccgtcgga

SEQ ID NO: 1582143 - DNA, 15 bp, Homo sapiens
agacgcccccgtcgg

SEQ ID NO: 1582144 - DNA, 15 bp, Homo sapiens
cagacgcccccgtcg

SEQ ID NO: 1582145 - DNA, 15 bp, Homo sapiens
ccagacgcccccgtc

SEQ ID NO: 1582146 - DNA, 15 bp, Homo sapiens
gccagacgcccccgt

SEQ ID NO: 1582147 - DNA, 15 bp, Homo sapiens
cgccagacgcccccg

SEQ ID NO: 1582148 - DNA, 15 bp, Homo sapiens
ccgccagacgccccc

SEQ ID NO: 1582149 - DNA, 15 bp, Homo sapiens
tccgccagacgcccc

SEQ ID NO: 1582150 - DNA, 15 bp, Homo sapiens
atccgccagacgccc

SEQ ID NO: 1582151 - DNA, 15 bp, Homo sapiens
aatccgccagacgcc

SEQ ID NO: 1582152 - DNA, 15 bp, Homo sapiens
gaatccgccagacgc

SEQ ID NO: 1582153 - DNA, 15 bp, Homo sapiens
cgaatccgccagacg

SEQ ID NO: 1582154 - DNA, 15 bp, Homo sapiens
gcgaatccgccagac

SEQ ID NO: 1582155 - DNA, 15 bp, Homo sapiens
cgcgaatccgccaga

SEQ ID NO: 1582156 - DNA, 15 bp, Homo sapiens
ccgcgaatccgccag

SEQ ID NO: 1582157 - DNA, 15 bp, Homo sapiens
gccgcgaatccgcca

SEQ ID NO: 1582158 - DNA, 15 bp, Homo sapiens
cgccgcgaatccgcc

SEQ ID NO: 1582159 - DNA, 15 bp, Homo sapiens
acgccgcgaatccgc

SEQ ID NO: 1582160 - DNA, 15 bp, Homo sapiens
tacgccgcgaatccg

SEQ ID NO: 1582161 - DNA, 15 bp, Homo sapiens
ctacgccgcgaatcc

SEQ ID NO: 1582162 - DNA, 15 bp, Homo sapiens
gctacgccgcgaatc

SEQ ID NO: 1582163 - DNA, 15 bp, Homo sapiens
tgctacgccgcgaat

SEQ ID NO: 1582164 - DNA, 15 bp, Homo sapiens
gtgctacgccgcgaa

SEQ ID NO: 1582165 - DNA, 15 bp, Homo sapiens
cgtgctacgccgcga

SEQ ID NO: 1582166 - DNA, 15 bp, Homo sapiens
ccgtgctacgccgcg

SEQ ID NO: 1582167 - DNA, 15 bp, Homo sapiens
gccgtgctacgccgc

SEQ ID NO: 1582168 - DNA, 15 bp, Homo sapiens
tgccgtgctacgccg

SEQ ID NO: 1582169 - DNA, 15 bp, Homo sapiens
ctgccgtgctacgcc

SEQ ID NO: 1582170 - DNA, 15 bp, Homo sapiens
gctgccgtgctacgc

SEQ ID NO: 1582171 - DNA, 15 bp, Homo sapiens
cgctgccgtgctacg

SEQ ID NO: 1582172 - DNA, 15 bp, Homo sapiens
gcgctgccgtgctac

SEQ ID NO: 1582173 - DNA, 15 bp, Homo sapiens
cgcgctgccgtgcta

SEQ ID NO: 1582174 - DNA, 15 bp, Homo sapiens
ccgcgctgccgtgct

SEQ ID NO: 1582175 - DNA, 15 bp, Homo sapiens
cccgcgctgccgtgc

SEQ ID NO: 1582176 - DNA, 15 bp, Homo sapiens
gcccgcgctgccgtg

SEQ ID NO: 1582177 - DNA, 15 bp, Homo sapiens
ggcccgcgctgccgt

SEQ ID NO: 1582178 - DNA, 15 bp, Homo sapiens
aggcccgcgctgccg

SEQ ID NO: 1582179 - DNA, 15 bp, Homo sapiens
gaggcccgcgctgcc

SEQ ID NO: 1582180 - DNA, 15 bp, Homo sapiens
tgaggcccgcgctgc

SEQ ID NO: 1582181 - DNA, 15 bp, Homo sapiens
gtgaggcccgcgctg

SEQ ID NO: 1582182 - DNA, 15 bp, Homo sapiens
tgtgaggcccgcgct

SEQ ID NO: 1582183 - DNA, 15 bp, Homo sapiens
ctgtgaggcccgcgc

SEQ ID NO: 1582184 - DNA, 15 bp, Homo sapiens
cctgtgaggcccgcg

SEQ ID NO: 1582185 - DNA, 15 bp, Homo sapiens
ccctgtgaggcccgc

SEQ ID NO: 1582186 - DNA, 15 bp, Homo sapiens
accctgtgaggcccg

SEQ ID NO: 1582187 - DNA, 15 bp, Homo sapiens
gaccctgtgaggccc

SEQ ID NO: 1582188 - DNA, 15 bp, Homo sapiens
cgaccctgtgaggcc

SEQ ID NO: 1582189 - DNA, 15 bp, Homo sapiens
ccgaccctgtgaggc

SEQ ID NO: 1582190 - DNA, 15 bp, Homo sapiens
gccgaccctgtgagg

SEQ ID NO: 1582191 - DNA, 15 bp, Homo sapiens
agccgaccctgtgag

SEQ ID NO: 1582192 - DNA, 15 bp, Homo sapiens
cagccgaccctgtga

SEQ ID NO: 1582193 - DNA, 15 bp, Homo sapiens
tcagccgaccctgtg

SEQ ID NO: 1582194 - DNA, 15 bp, Homo sapiens
gtcagccgaccctgt

SEQ ID NO: 1582195 - DNA, 15 bp, Homo sapiens
ggtcagccgaccctg

SEQ ID NO: 1582196 - DNA, 15 bp, Homo sapiens
cggtcagccgaccct

SEQ ID NO: 1582197 - DNA, 15 bp, Homo sapiens
gcggtcagccgaccc

SEQ ID NO: 1582198 - DNA, 15 bp, Homo sapiens
agcggtcagccgacc

SEQ ID NO: 1582199 - DNA, 15 bp, Homo sapiens
aagcggtcagccgac

SEQ ID NO: 1582200 - DNA, 15 bp, Homo sapiens
gaagcggtcagccga

SEQ ID NO: 1582201 - DNA, 15 bp, Homo sapiens
tgaagcggtcagccg

SEQ ID NO: 1582202 - DNA, 15 bp, Homo sapiens
ctgaagcggtcagcc

SEQ ID NO: 1582203 - DNA, 15 bp, Homo sapiens
cctgaagcggtcagc

SEQ ID NO: 1582204 - DNA, 15 bp, Homo sapiens
gcctgaagcggtcag

SEQ ID NO: 1582205 - DNA, 15 bp, Homo sapiens
ggcctgaagcggtca

SEQ ID NO: 1582206 - DNA, 15 bp, Homo sapiens
gggcctgaagcggtc

SEQ ID NO: 1582207 - DNA, 15 bp, Homo sapiens
cgggcctgaagcggt

SEQ ID NO: 1582208 - DNA, 15 bp, Homo sapiens
acgggcctgaagcgg

SEQ ID NO: 1582209 - DNA, 15 bp, Homo sapiens
cacgggcctgaagcg

SEQ ID NO: 1582210 - DNA, 15 bp, Homo sapiens
gcacgggcctgaagc

SEQ ID NO: 1582211 - DNA, 15 bp, Homo sapiens
agcacgggcctgaag

SEQ ID NO: 1582212 - DNA, 15 bp, Homo sapiens
gagcacgggcctgaa

SEQ ID NO: 1582213 - DNA, 15 bp, Homo sapiens
ggagcacgggcctga

SEQ ID NO: 1582214 - DNA, 15 bp, Homo sapiens
aggagcacgggcctg

SEQ ID NO: 1582215 - DNA, 15 bp, Homo sapiens
taggagcacgggcct

SEQ ID NO: 1582216 - DNA, 15 bp, Homo sapiens
gtaggagcacgggcc

SEQ ID NO: 1582217 - DNA, 15 bp, Homo sapiens
ggtaggagcacgggc

SEQ ID NO: 1582218 - DNA, 15 bp, Homo sapiens
aggtaggagcacggg

SEQ ID NO: 1582219 - DNA, 15 bp, Homo sapiens
gaggtaggagcacgg

SEQ ID NO: 1582220 - DNA, 15 bp, Homo sapiens
ggaggtaggagcacg

SEQ ID NO: 1582221 - DNA, 15 bp, Homo sapiens
gggaggtaggagcac

SEQ ID NO: 1582222 - DNA, 15 bp, Homo sapiens
cgggaggtaggagca

SEQ ID NO: 1582223 - DNA, 15 bp, Homo sapiens
acgggaggtaggagc

SEQ ID NO: 1582224 - DNA, 15 bp, Homo sapiens
gacgggaggtaggag

SEQ ID NO: 1582225 - DNA, 15 bp, Homo sapiens
agacgggaggtagga

SEQ ID NO: 1582226 - DNA, 15 bp, Homo sapiens
gagacgggaggtagg

SEQ ID NO: 1582227 - DNA, 15 bp, Homo sapiens
ggagacgggaggtag

SEQ ID NO: 1582228 - DNA, 15 bp, Homo sapiens
cggagacgggaggta

SEQ ID NO: 1582229 - DNA, 15 bp, Homo sapiens
acggagacgggaggt

SEQ ID NO: 1582230 - DNA, 15 bp, Homo sapiens
gacggagacgggagg

SEQ ID NO: 1582231 - DNA, 15 bp, Homo sapiens
agacggagacgggag

SEQ ID NO: 1582232 - DNA, 15 bp, Homo sapiens
aagacggagacggga

SEQ ID NO: 1582233 - DNA, 15 bp, Homo sapiens
caagacggagacggg

SEQ ID NO: 1582234 - DNA, 15 bp, Homo sapiens
ccaagacggagacgg

SEQ ID NO: 1582235 - DNA, 15 bp, Homo sapiens
accaagacggagacg

SEQ ID NO: 1582236 - DNA, 15 bp, Homo sapiens
aaccaagacggagac

SEQ ID NO: 1582237 - DNA, 15 bp, Homo sapiens
aaaccaagacggaga

SEQ ID NO: 1582238 - DNA, 15 bp, Homo sapiens
gaaaccaagacggag

SEQ ID NO: 1582239 - DNA, 15 bp, Homo sapiens
ggaaaccaagacgga

SEQ ID NO: 1582240 - DNA, 15 bp, Homo sapiens
aggaaaccaagacgg

SEQ ID NO: 1582241 - DNA, 15 bp, Homo sapiens
gaggaaaccaagacg

SEQ ID NO: 1582242 - DNA, 15 bp, Homo sapiens
cgaggaaaccaagac

SEQ ID NO: 1582243 - DNA, 15 bp, Homo sapiens
tgcgaggaaaccaag

SEQ ID NO: 1582244 - DNA, 15 bp, Homo sapiens
ttgcgaggaaaccaa

SEQ ID NO: 1582245 - DNA, 15 bp, Homo sapiens
attgcgaggaaacca

SEQ ID NO: 1582246 - DNA, 15 bp, Homo sapiens
aattgcgaggaaacc

SEQ ID NO: 1582247 - DNA, 15 bp, Homo sapiens
gaattgcgaggaaac

SEQ ID NO: 1582248 - DNA, 15 bp, Homo sapiens
tgaattgcgaggaaa

SEQ ID NO: 1582249 - DNA, 15 bp, Homo sapiens
ttgaattgcgaggaa

SEQ ID NO: 1582250 - DNA, 15 bp, Homo sapiens
tttgaattgcgagga

SEQ ID NO: 1582251 - DNA, 15 bp, Homo sapiens
ctttgaattgcgagg

SEQ ID NO: 1582252 - DNA, 15 bp, Homo sapiens
cctttgaattgcgag

SEQ ID NO: 1582253 - DNA, 15 bp, Homo sapiens
ccctttgaattgcga

SEQ ID NO: 1582254 - DNA, 15 bp, Homo sapiens
tccctttgaattgcg

SEQ ID NO: 1582255 - DNA, 15 bp, Homo sapiens
ctccctttgaattgc

SEQ ID NO: 1582256 - DNA, 15 bp, Homo sapiens
gctccctttgaattg

SEQ ID NO: 1582257 - DNA, 15 bp, Homo sapiens
agctccctttgaatt

SEQ ID NO: 1582258 - DNA, 15 bp, Homo sapiens
cagctccctttgaat

SEQ ID NO: 1582259 - DNA, 15 bp, Homo sapiens
gcagctccctttgaa

SEQ ID NO: 1582260 - DNA, 15 bp, Homo sapiens
agcagctccctttga

SEQ ID NO: 1582261 - DNA, 15 bp, Homo sapiens
cagcagctccctttg

SEQ ID NO: 1582262 - DNA, 15 bp, Homo sapiens
tcagcagctcccttt

SEQ ID NO: 1582263 - DNA, 15 bp, Homo sapiens
ctcagcagctccctt

SEQ ID NO: 1582264 - DNA, 15 bp, Homo sapiens
gctcagcagctccct

SEQ ID NO: 1582265 - DNA, 15 bp, Homo sapiens
agctcagcagctccc

SEQ ID NO: 1582266 - DNA, 15 bp, Homo sapiens
gagctcagcagctcc

SEQ ID NO: 1582267 - DNA, 15 bp, Homo sapiens
ggagctcagcagctc

SEQ ID NO: 1582268 - DNA, 15 bp, Homo sapiens
gggagctcagcagct

SEQ ID NO: 1582269 - DNA, 15 bp, Homo sapiens
cgggagctcagcagc

SEQ ID NO: 1582270 - DNA, 15 bp, Homo sapiens
gcgggagctcagcag

SEQ ID NO: 1582271 - DNA, 15 bp, Homo sapiens
agcgggagctcagca

SEQ ID NO: 1582272 - DNA, 15 bp, Homo sapiens
cagcgggagctcagc

SEQ ID NO: 1582273 - DNA, 15 bp, Homo sapiens
acagcgggagctcag

SEQ ID NO: 1582274 - DNA, 15 bp, Homo sapiens
aacagcgggagctca

SEQ ID NO: 1582275 - DNA, 15 bp, Homo sapiens
gaacagcgggagctc

SEQ ID NO: 1582276 - DNA, 15 bp, Homo sapiens
agaacagcgggagct

SEQ ID NO: 1582277 - DNA, 15 bp, Homo sapiens
gagaacagcgggagc

SEQ ID NO: 1582278 - DNA, 15 bp, Homo sapiens
agagaacagcgggag

SEQ ID NO: 1582279 - DNA, 15 bp, Homo sapiens
cagagaacagcggga

SEQ ID NO: 1582280 - DNA, 15 bp, Homo sapiens
gcagagaacagcggg

SEQ ID NO: 1582281 - DNA, 15 bp, Homo sapiens
agcagagaacagcgg

SEQ ID NO: 1582282 - DNA, 15 bp, Homo sapiens
aagcagagaacagcg

SEQ ID NO: 1582283 - DNA, 15 bp, Homo sapiens
aaagcagagaacagc

SEQ ID NO: 1582284 - DNA, 15 bp, Homo sapiens
caaagcagagaacag

SEQ ID NO: 1582285 - DNA, 15 bp, Homo sapiens
acaaagcagagaaca

SEQ ID NO: 1582286 - DNA, 15 bp, Homo sapiens
tacaaagcagagaac

SEQ ID NO: 1582287 - DNA, 15 bp, Homo sapiens
ttacaaagcagagaa

SEQ ID NO: 1582288 - DNA, 15 bp, Homo sapiens
gttacaaagcagaga

SEQ ID NO: 1582289 - DNA, 15 bp, Homo sapiens
ggttacaaagcagag

SEQ ID NO: 1582290 - DNA, 15 bp, Homo sapiens
gggttacaaagcaga

SEQ ID NO: 1582291 - DNA, 15 bp, Homo sapiens
cgggttacaaagcag

SEQ ID NO: 1582292 - DNA, 15 bp, Homo sapiens
gcgggttacaaagca

SEQ ID NO: 1582293 - DNA, 15 bp, Homo sapiens
agcgggttacaaagc

SEQ ID NO: 1582294 - DNA, 15 bp, Homo sapiens
gagcgggttacaaag

SEQ ID NO: 1582295 - DNA, 15 bp, Homo sapiens
ggagcgggttacaaa

SEQ ID NO: 1582296 - DNA, 15 bp, Homo sapiens
gggagcgggttacaa

SEQ ID NO: 1582297 - DNA, 15 bp, Homo sapiens
agggagcgggttaca

SEQ ID NO: 1582298 - DNA, 15 bp, Homo sapiens
gagggagcgggttac

SEQ ID NO: 1582299 - DNA, 15 bp, Homo sapiens
tgagggagcgggtta

SEQ ID NO: 1582300 - DNA, 15 bp, Homo sapiens
ctgagggagcgggtt

SEQ ID NO: 1582301 - DNA, 15 bp, Homo sapiens
cctgagggagcgggt

SEQ ID NO: 1582302 - DNA, 15 bp, Homo sapiens
acctgagggagcggg

SEQ ID NO: 1582303 - DNA, 15 bp, Homo sapiens
aacctgagggagcgg

SEQ ID NO: 1582304 - DNA, 15 bp, Homo sapiens
gaacctgagggagcg

SEQ ID NO: 1582305 - DNA, 15 bp, Homo sapiens
ggaacctgagggagc

SEQ ID NO: 1582306 - DNA, 15 bp, Homo sapiens
gggaacctgagggag

SEQ ID NO: 1582307 - DNA, 15 bp, Homo sapiens
agggaacctgaggga

SEQ ID NO: 1582308 - DNA, 15 bp, Homo sapiens
gagggaacctgaggg

SEQ ID NO: 1582309 - DNA, 15 bp, Homo sapiens
ggagggaacctgagg

SEQ ID NO: 1582310 - DNA, 15 bp, Homo sapiens
aggagggaacctgag

SEQ ID NO: 1582311 - DNA, 15 bp, Homo sapiens
taggagggaacctga

SEQ ID NO: 1582312 - DNA, 15 bp, Homo sapiens
gtaggagggaacctg

SEQ ID NO: 1582313 - DNA, 15 bp, Homo sapiens
ggtaggagggaacct

SEQ ID NO: 1582314 - DNA, 15 bp, Homo sapiens
gggtaggagggaacc

SEQ ID NO: 1582315 - DNA, 15 bp, Homo sapiens
ggggtaggagggaac

SEQ ID NO: 1582316 - DNA, 15 bp, Homo sapiens
tggggtaggagggaa

SEQ ID NO: 1582317 - DNA, 15 bp, Homo sapiens
ctggggtaggaggga

SEQ ID NO: 1582318 - DNA, 15 bp, Homo sapiens
cctggggtaggaggg

SEQ ID NO: 1582319 - DNA, 15 bp, Homo sapiens
gcctggggtaggagg

SEQ ID NO: 1582320 - DNA, 15 bp, Homo sapiens
ggcctggggtaggag

SEQ ID NO: 1582321 - DNA, 15 bp, Homo sapiens
gggcctggggtagga

SEQ ID NO: 1582322 - DNA, 15 bp, Homo sapiens
ggggcctggggtagg

SEQ ID NO: 1582323 - DNA, 15 bp, Homo sapiens
aggggcctggggtag

SEQ ID NO: 1582324 - DNA, 15 bp, Homo sapiens
aaggggcctggggta

SEQ ID NO: 1582325 - DNA, 15 bp, Homo sapiens
gaaggggcctggggt

SEQ ID NO: 1582326 - DNA, 15 bp, Homo sapiens
ggaaggggcctgggg

SEQ ID NO: 1582327 - DNA, 15 bp, Homo sapiens
gggaaggggcctggg

SEQ ID NO: 1582328 - DNA, 15 bp, Homo sapiens
cgggaaggggcctgg

SEQ ID NO: 1582329 - DNA, 15 bp, Homo sapiens
gcgggaaggggcctg

SEQ ID NO: 1582330 - DNA, 15 bp, Homo sapiens
ggcgggaaggggcct

SEQ ID NO: 1582331 - DNA, 15 bp, Homo sapiens
tggcgggaaggggcc

SEQ ID NO: 1582332 - DNA, 15 bp, Homo sapiens
ctggcgggaaggggc

SEQ ID NO: 1582333 - DNA, 15 bp, Homo sapiens
tctggcgggaagggg

SEQ ID NO: 1582334 - DNA, 15 bp, Homo sapiens
ctctggcgggaaggg

SEQ ID NO: 1582335 - DNA, 15 bp, Homo sapiens
cctctggcgggaagg

SEQ ID NO: 1582336 - DNA, 15 bp, Homo sapiens
ccctctggcgggaag

SEQ ID NO: 1582337 - DNA, 15 bp, Homo sapiens
gccctctggcgggaa

SEQ ID NO: 1582338 - DNA, 15 bp, Homo sapiens
cgccctctggcggga

SEQ ID NO: 1582339 - DNA, 15 bp, Homo sapiens
gcgccctctggcggg

SEQ ID NO: 1582340 - DNA, 15 bp, Homo sapiens
ggcgccctctggcgg

SEQ ID NO: 1582341 - DNA, 15 bp, Homo sapiens
gggcgccctctggcg

SEQ ID NO: 1582342 - DNA, 15 bp, Homo sapiens
ggggcgccctctggc

SEQ ID NO: 1582343 - DNA, 15 bp, Homo sapiens
aggggcgccctctgg

SEQ ID NO: 1582344 - DNA, 15 bp, Homo sapiens
caggggcgccctctg

SEQ ID NO: 1582345 - DNA, 15 bp, Homo sapiens
ccaggggcgccctct

SEQ ID NO: 1582346 - DNA, 15 bp, Homo sapiens
tccaggggcgccctc

SEQ ID NO: 1582347 - DNA, 15 bp, Homo sapiens
ctccaggggcgccct

SEQ ID NO: 1582348 - DNA, 15 bp, Homo sapiens
actccaggggcgccc

SEQ ID NO: 1582349 - DNA, 15 bp, Homo sapiens
gactccaggggcgcc

SEQ ID NO: 1582350 - DNA, 15 bp, Homo sapiens
cgactccaggggcgc

SEQ ID NO: 1582351 - DNA, 15 bp, Homo sapiens
ccgactccaggggcg

SEQ ID NO: 1582352 - DNA, 15 bp, Homo sapiens
accgactccaggggc

SEQ ID NO: 1582353 - DNA, 15 bp, Homo sapiens
caccgactccagggg

SEQ ID NO: 1582354 - DNA, 15 bp, Homo sapiens
ccaccgactccaggg

SEQ ID NO: 1582355 - DNA, 15 bp, Homo sapiens
tccaccgactccagg

SEQ ID NO: 1582356 - DNA, 15 bp, Homo sapiens
ctccaccgactccag

SEQ ID NO: 1582357 - DNA, 15 bp, Homo sapiens
tctccaccgactcca

SEQ ID NO: 1582358 - DNA, 15 bp, Homo sapiens
ttctccaccgactcc

SEQ ID NO: 1582359 - DNA, 15 bp, Homo sapiens
cttctccaccgactc

SEQ ID NO: 1582360 - DNA, 15 bp, Homo sapiens
ccttctccaccgact

SEQ ID NO: 1582361 - DNA, 15 bp, Homo sapiens
accttctccaccgac

SEQ ID NO: 1582362 - DNA, 15 bp, Homo sapiens
taccttctccaccga

SEQ ID NO: 1582363 - DNA, 15 bp, Homo sapiens
ctaccttctccaccg

SEQ ID NO: 1582364 - DNA, 15 bp, Homo sapiens
cctaccttctccacc

SEQ ID NO: 1582365 - DNA, 15 bp, Homo sapiens
ccctaccttctccac

SEQ ID NO: 1582366 - DNA, 15 bp, Homo sapiens
cccctaccttctcca

SEQ ID NO: 1582367 - DNA, 15 bp, Homo sapiens
gcccctaccttctcc

SEQ ID NO: 1582368 - DNA, 15 bp, Homo sapiens
agcccctaccttctc

SEQ ID NO: 1582369 - DNA, 15 bp, Homo sapiens
gagcccctaccttct

SEQ ID NO: 1582370 - DNA, 15 bp, Homo sapiens
agagcccctaccttc

SEQ ID NO: 1582371 - DNA, 15 bp, Homo sapiens
tagagcccctacctt

SEQ ID NO: 1582372 - DNA, 15 bp, Homo sapiens
ttagagcccctacct

SEQ ID NO: 1582373 - DNA, 15 bp, Homo sapiens
tttagagcccctacc

SEQ ID NO: 1582374 - DNA, 15 bp, Homo sapiens
atttagagcccctac

SEQ ID NO: 1582375 - DNA, 15 bp, Homo sapiens
tatttagagccccta

SEQ ID NO: 1582376 - DNA, 15 bp, Homo sapiens
gtatttagagcccct

SEQ ID NO: 1582377 - DNA, 15 bp, Homo sapiens
tgtatttagagcccc

SEQ ID NO: 1582378 - DNA, 15 bp, Homo sapiens
ttgtatttagagccc

SEQ ID NO: 1582379 - DNA, 15 bp, Homo sapiens
tttgtatttagagcc

SEQ ID NO: 1582380 - DNA, 15 bp, Homo sapiens
ttttgtatttagagc

SEQ ID NO: 1582381 - DNA, 15 bp, Homo sapiens
tttttgtatttagag

SEQ ID NO: 1582382 - DNA, 15 bp, Homo sapiens
atttttgtatttaga

SEQ ID NO: 1582383 - DNA, 15 bp, Homo sapiens
aatttttgtatttag

SEQ ID NO: 1582384 - DNA, 15 bp, Homo sapiens
gaatttttgtattta

SEQ ID NO: 1582385 - DNA, 15 bp, Homo sapiens
tgaatttttgtattt

SEQ ID NO: 1582386 - DNA, 15 bp, Homo sapiens
ttgaatttttgtatt

SEQ ID NO: 1582387 - DNA, 15 bp, Homo sapiens
cttgaatttttgtat

SEQ ID NO: 1582388 - DNA, 15 bp, Homo sapiens
tcttgaatttttgta

SEQ ID NO: 1582389 - DNA, 15 bp, Homo sapiens
gtcttgaatttttgt

SEQ ID NO: 1582390 - DNA, 15 bp, Homo sapiens
cgtcttgaatttttg

SEQ ID NO: 1582391 - DNA, 15 bp, Homo sapiens
tcgtcttgaattttt

SEQ ID NO: 1582392 - DNA, 15 bp, Homo sapiens
ctcgtcttgaatttt

SEQ ID NO: 1582393 - DNA, 15 bp, Homo sapiens
actcgtcttgaattt

SEQ ID NO: 1582394 - DNA, 15 bp, Homo sapiens
aactcgtcttgaatt

SEQ ID NO: 1582395 - DNA, 15 bp, Homo sapiens
caactcgtcttgaat

SEQ ID NO: 1582396 - DNA, 15 bp, Homo sapiens
tcaactcgtcttgaa

SEQ ID NO: 1582397 - DNA, 15 bp, Homo sapiens
ttcaactcgtcttga

SEQ ID NO: 1582398 - DNA, 15 bp, Homo sapiens
attcaactcgtcttg

SEQ ID NO: 1582399 - DNA, 15 bp, Homo sapiens
gattcaactcgtctt

SEQ ID NO: 1582400 - DNA, 15 bp, Homo sapiens
agattcaactcgtct

SEQ ID NO: 1582401 - DNA, 15 bp, Homo sapiens
aagattcaactcgtc

SEQ ID NO: 1582402 - DNA, 15 bp, Homo sapiens
caagattcaactcgt

SEQ ID NO: 1582403 - DNA, 15 bp, Homo sapiens
ccaagattcaactcg

SEQ ID NO: 1582404 - DNA, 15 bp, Homo sapiens
gccaagattcaactc

SEQ ID NO: 1582405 - DNA, 15 bp, Homo sapiens
agccaagattcaact

SEQ ID NO: 1582406 - DNA, 15 bp, Homo sapiens
aagccaagattcaac

SEQ ID NO: 1582407 - DNA, 15 bp, Homo sapiens
caagccaagattcaa

SEQ ID NO: 1582408 - DNA, 15 bp, Homo sapiens
tcaagccaagattca

SEQ ID NO: 1582409 - DNA, 15 bp, Homo sapiens
ttcaagccaagattc

SEQ ID NO: 1582410 - DNA, 15 bp, Homo sapiens
gttcaagccaagatt

SEQ ID NO: 1582411 - DNA, 15 bp, Homo sapiens
agttcaagccaagat

SEQ ID NO: 1582412 - DNA, 15 bp, Homo sapiens
cagttcaagccaaga

SEQ ID NO: 1582413 - DNA, 15 bp, Homo sapiens
gcagttcaagccaag

SEQ ID NO: 1582414 - DNA, 15 bp, Homo sapiens
cgcagttcaagccaa

SEQ ID NO: 1582415 - DNA, 15 bp, Homo sapiens
acgcagttcaagcca

SEQ ID NO: 1582416 - DNA, 15 bp, Homo sapiens
cacgcagttcaagcc

SEQ ID NO: 1582417 - DNA, 15 bp, Homo sapiens
tcacgcagttcaagc

SEQ ID NO: 1582418 - DNA, 15 bp, Homo sapiens
gtcacgcagttcaag

SEQ ID NO: 1582419 - DNA, 15 bp, Homo sapiens
tgtcacgcagttcaa

SEQ ID NO: 1582420 - DNA, 15 bp, Homo sapiens
ctgtcacgcagttca

SEQ ID NO: 1582421 - DNA, 15 bp, Homo sapiens
cctgtcacgcagttc

SEQ ID NO: 1582422 - DNA, 15 bp, Homo sapiens
tcctgtcacgcagtt

SEQ ID NO: 1582423 - DNA, 15 bp, Homo sapiens
ttcctgtcacgcagt

SEQ ID NO: 1582424 - DNA, 15 bp, Homo sapiens
tttcctgtcacgcag

SEQ ID NO: 1582425 - DNA, 15 bp, Homo sapiens
ttttcctgtcacgca

SEQ ID NO: 1582426 - DNA, 15 bp, Homo sapiens
attttcctgtcacgc

SEQ ID NO: 1582427 - DNA, 15 bp, Homo sapiens
tattttcctgtcacg

SEQ ID NO: 1582428 - DNA, 15 bp, Homo sapiens
ctattttcctgtcac

SEQ ID NO: 1582429 - DNA, 15 bp, Homo sapiens
cctattttcctgtca

SEQ ID NO: 1582430 - DNA, 15 bp, Homo sapiens
gcctattttcctgtc

SEQ ID NO: 1582431 - DNA, 15 bp, Homo sapiens
tgcctattttcctgt

SEQ ID NO: 1582432 - DNA, 15 bp, Homo sapiens
ttgcctattttcctg

SEQ ID NO: 1582433 - DNA, 15 bp, Homo sapiens
cttgcctattttcct

SEQ ID NO: 1582434 - DNA, 15 bp, Homo sapiens
acttgcctattttcc

SEQ ID NO: 1582435 - DNA, 15 bp, Homo sapiens
aacttgcctattttc

SEQ ID NO: 1582436 - DNA, 15 bp, Homo sapiens
aaacttgcctatttt

SEQ ID NO: 1582437 - DNA, 15 bp, Homo sapiens
caaacttgcctattt

SEQ ID NO: 1582438 - DNA, 15 bp, Homo sapiens
ccaaacttgcctatt

SEQ ID NO: 1582439 - DNA, 15 bp, Homo sapiens
tccaaacttgcctat

SEQ ID NO: 1582440 - DNA, 15 bp, Homo sapiens
ctccaaacttgccta

SEQ ID NO: 1582441 - DNA, 15 bp, Homo sapiens
tctccaaacttgcct

SEQ ID NO: 1582442 - DNA, 15 bp, Homo sapiens
gtctccaaacttgcc

SEQ ID NO: 1582443 - DNA, 15 bp, Homo sapiens
ggtctccaaacttgc

SEQ ID NO: 1582444 - DNA, 15 bp, Homo sapiens
tggtctccaaacttg

SEQ ID NO: 1582445 - DNA, 15 bp, Homo sapiens
gtggtctccaaactt

SEQ ID NO: 1582446 - DNA, 15 bp, Homo sapiens
tgtggtctccaaact

SEQ ID NO: 1582447 - DNA, 15 bp, Homo sapiens
ctgtggtctccaaac

SEQ ID NO: 1582448 - DNA, 15 bp, Homo sapiens
cctgtggtctccaaa

SEQ ID NO: 1582449 - DNA, 15 bp, Homo sapiens
acctgtggtctccaa

SEQ ID NO: 1582450 - DNA, 15 bp, Homo sapiens
cacctgtggtctcca

SEQ ID NO: 1582451 - DNA, 15 bp, Homo sapiens
acacctgtggtctcc

SEQ ID NO: 1582452 - DNA, 15 bp, Homo sapiens
aacacctgtggtctc

SEQ ID NO: 1582453 - DNA, 15 bp, Homo sapiens
taacacctgtggtct

SEQ ID NO: 1582454 - DNA, 15 bp, Homo sapiens
ttaacacctgtggtc

SEQ ID NO: 1582455 - DNA, 15 bp, Homo sapiens
gttaacacctgtggt

SEQ ID NO: 1582456 - DNA, 15 bp, Homo sapiens
agttaacacctgtgg

SEQ ID NO: 1582457 - DNA, 15 bp, Homo sapiens
aagttaacacctgtg

SEQ ID NO: 1582458 - DNA, 15 bp, Homo sapiens
gaagttaacacctgt

SEQ ID NO: 1582459 - DNA, 15 bp, Homo sapiens
agaagttaacacctg

SEQ ID NO: 1582460 - DNA, 15 bp, Homo sapiens
tagaagttaacacct

SEQ ID NO: 1582461 - DNA, 15 bp, Homo sapiens
ctagaagttaacacc

SEQ ID NO: 1582462 - DNA, 15 bp, Homo sapiens
actagaagttaacac

SEQ ID NO: 1582463 - DNA, 15 bp, Homo sapiens
cactagaagttaaca

SEQ ID NO: 1582464 - DNA, 15 bp, Homo sapiens
ccactagaagttaac

SEQ ID NO: 1582465 - DNA, 15 bp, Homo sapiens
cccactagaagttaa

SEQ ID NO: 1582466 - DNA, 15 bp, Homo sapiens
ccccactagaagtta

SEQ ID NO: 1582467 - DNA, 15 bp, Homo sapiens
gccccactagaagtt

SEQ ID NO: 1582468 - DNA, 15 bp, Homo sapiens
agccccactagaagt

SEQ ID NO: 1582469 - DNA, 15 bp, Homo sapiens
aagccccactagaag

SEQ ID NO: 1582470 - DNA, 15 bp, Homo sapiens
caagccccactagaa

SEQ ID NO: 1582471 - DNA, 15 bp, Homo sapiens
tcaagccccactaga

SEQ ID NO: 1582472 - DNA, 15 bp, Homo sapiens
gtcaagccccactag

SEQ ID NO: 1582473 - DNA, 15 bp, Homo sapiens
ggtcaagccccacta

SEQ ID NO: 1582474 - DNA, 15 bp, Homo sapiens
gggtcaagccccact

SEQ ID NO: 1582475 - DNA, 15 bp, Homo sapiens
cgggtcaagccccac

SEQ ID NO: 1582476 - DNA, 15 bp, Homo sapiens
tcgggtcaagcccca

SEQ ID NO: 1582477 - DNA, 15 bp, Homo sapiens
gtcgggtcaagcccc

SEQ ID NO: 1582478 - DNA, 15 bp, Homo sapiens
tgtcgggtcaagccc

SEQ ID NO: 1582479 - DNA, 15 bp, Homo sapiens
ctgtcgggtcaagcc

SEQ ID NO: 1582480 - DNA, 15 bp, Homo sapiens
tctgtcgggtcaagc

SEQ ID NO: 1582481 - DNA, 15 bp, Homo sapiens
ctctgtcgggtcaag

SEQ ID NO: 1582482 - DNA, 15 bp, Homo sapiens
cctctgtcgggtcaa

SEQ ID NO: 1582483 - DNA, 15 bp, Homo sapiens
tcctctgtcgggtca

SEQ ID NO: 1582484 - DNA, 15 bp, Homo sapiens
ctcctctgtcgggtc

SEQ ID NO: 1582485 - DNA, 15 bp, Homo sapiens
gctcctctgtcgggt

SEQ ID NO: 1582486 - DNA, 15 bp, Homo sapiens
tgctcctctgtcggg

SEQ ID NO: 1582487 - DNA, 15 bp, Homo sapiens
ctgctcctctgtcgg

SEQ ID NO: 1582488 - DNA, 15 bp, Homo sapiens
tctgctcctctgtcg

SEQ ID NO: 1582489 - DNA, 15 bp, Homo sapiens
atctgctcctctgtc

SEQ ID NO: 1582490 - DNA, 15 bp, Homo sapiens
aatctgctcctctgt

SEQ ID NO: 1582491 - DNA, 15 bp, Homo sapiens
gaatctgctcctctg

SEQ ID NO: 1582492 - DNA, 15 bp, Homo sapiens
agaatctgctcctct

SEQ ID NO: 1582493 - DNA, 15 bp, Homo sapiens
aagaatctgctcctc

SEQ ID NO: 1582494 - DNA, 15 bp, Homo sapiens
gaagaatctgctcct

SEQ ID NO: 1582495 - DNA, 15 bp, Homo sapiens
tgaagaatctgctcc

SEQ ID NO: 1582496 - DNA, 15 bp, Homo sapiens
ttgaagaatctgctc

SEQ ID NO: 1582497 - DNA, 15 bp, Homo sapiens
gttgaagaatctgct

SEQ ID NO: 1582498 - DNA, 15 bp, Homo sapiens
tgttgaagaatctgc

SEQ ID NO: 1582499 - DNA, 15 bp, Homo sapiens
gtgttgaagaatctg

SEQ ID NO: 1582500 - DNA, 15 bp, Homo sapiens
ggtgttgaagaatct

SEQ ID NO: 1582501 - DNA, 15 bp, Homo sapiens
tggtgttgaagaatc

SEQ ID NO: 1582502 - DNA, 15 bp, Homo sapiens
ttggtgttgaagaat

SEQ ID NO: 1582503 - DNA, 15 bp, Homo sapiens
tttggtgttgaagaa

SEQ ID NO: 1582504 - DNA, 15 bp, Homo sapiens
ctttggtgttgaaga

SEQ ID NO: 1582505 - DNA, 15 bp, Homo sapiens
cctttggtgttgaag

SEQ ID NO: 1582506 - DNA, 15 bp, Homo sapiens
gcctttggtgttgaa

SEQ ID NO: 1582507 - DNA, 15 bp, Homo sapiens
ggcctttggtgttga

SEQ ID NO: 1582508 - DNA, 15 bp, Homo sapiens
aggcctttggtgttg

SEQ ID NO: 1582509 - DNA, 15 bp, Homo sapiens
taggcctttggtgtt

SEQ ID NO: 1582510 - DNA, 15 bp, Homo sapiens
ttaggcctttggtgt

SEQ ID NO: 1582511 - DNA, 15 bp, Homo sapiens
cttaggcctttggtg

SEQ ID NO: 1582512 - DNA, 15 bp, Homo sapiens
ccttaggcctttggt

SEQ ID NO: 1582513 - DNA, 15 bp, Homo sapiens
cccttaggcctttgg

SEQ ID NO: 1582514 - DNA, 15 bp, Homo sapiens
gcccttaggcctttg

SEQ ID NO: 1582515 - DNA, 15 bp, Homo sapiens
ggcccttaggccttt

SEQ ID NO: 1582516 - DNA, 15 bp, Homo sapiens
cggcccttaggcctt

SEQ ID NO: 1582517 - DNA, 15 bp, Homo sapiens
ccggcccttaggcct

SEQ ID NO: 1582518 - DNA, 15 bp, Homo sapiens
tccggcccttaggcc

SEQ ID NO: 1582519 - DNA, 15 bp, Homo sapiens
gtccggcccttaggc

SEQ ID NO: 1582520 - DNA, 15 bp, Homo sapiens
agtccggcccttagg

SEQ ID NO: 1582521 - DNA, 15 bp, Homo sapiens
gagtccggcccttag

SEQ ID NO: 1582522 - DNA, 15 bp, Homo sapiens
agagtccggccctta

SEQ ID NO: 1582523 - DNA, 15 bp, Homo sapiens
gagagtccggccctt

SEQ ID NO: 1582524 - DNA, 15 bp, Homo sapiens
agagagtccggccct

SEQ ID NO: 1582525 - DNA, 15 bp, Homo sapiens
aagagagtccggccc

SEQ ID NO: 1582526 - DNA, 15 bp, Homo sapiens
gaagagagtccggcc

SEQ ID NO: 1582527 - DNA, 15 bp, Homo sapiens
cgaagagagtccggc

SEQ ID NO: 1582528 - DNA, 15 bp, Homo sapiens
gcgaagagagtccgg

SEQ ID NO: 1582529 - DNA, 15 bp, Homo sapiens
cgcgaagagagtccg

SEQ ID NO: 1582530 - DNA, 15 bp, Homo sapiens
ccgcgaagagagtcc

SEQ ID NO: 1582531 - DNA, 15 bp, Homo sapiens
tccgcgaagagagtc

SEQ ID NO: 1582532 - DNA, 15 bp, Homo sapiens
gtccgcgaagagagt

SEQ ID NO: 1582533 - DNA, 15 bp, Homo sapiens
agtccgcgaagagag

SEQ ID NO: 1582534 - DNA, 15 bp, Homo sapiens
gagtccgcgaagaga

SEQ ID NO: 1582535 - DNA, 15 bp, Homo sapiens
agagtccgcgaagag

SEQ ID NO: 1582536 - DNA, 15 bp, Homo sapiens
cagagtccgcgaaga

SEQ ID NO: 1582537 - DNA, 15 bp, Homo sapiens
ccagagtccgcgaag

SEQ ID NO: 1582538 - DNA, 15 bp, Homo sapiens
gccagagtccgcgaa

SEQ ID NO: 1582539 - DNA, 15 bp, Homo sapiens
ggccagagtccgcga

SEQ ID NO: 1582540 - DNA, 15 bp, Homo sapiens
gggccagagtccgcg

SEQ ID NO: 1582541 - DNA, 15 bp, Homo sapiens
agggccagagtccgc

SEQ ID NO: 1582542 - DNA, 15 bp, Homo sapiens
gagggccagagtccg

SEQ ID NO: 1582543 - DNA, 15 bp, Homo sapiens
tgagggccagagtcc

SEQ ID NO: 1582544 - DNA, 15 bp, Homo sapiens
atgagggccagagtc

SEQ ID NO: 1582545 - DNA, 15 bp, Homo sapiens
tatgagggccagagt

SEQ ID NO: 1582546 - DNA, 15 bp, Homo sapiens
ctatgagggccagag

SEQ ID NO: 1582547 - DNA, 15 bp, Homo sapiens
tctatgagggccaga

SEQ ID NO: 1582548 - DNA, 15 bp, Homo sapiens
gtctatgagggccag

SEQ ID NO: 1582549 - DNA, 15 bp, Homo sapiens
cgtctatgagggcca

SEQ ID NO: 1582550 - DNA, 15 bp, Homo sapiens
gcgtctatgagggcc

SEQ ID NO: 1582551 - DNA, 15 bp, Homo sapiens
cgcgtctatgagggc

SEQ ID NO: 1582552 - DNA, 15 bp, Homo sapiens
gcgcgtctatgaggg

SEQ ID NO: 1582553 - DNA, 15 bp, Homo sapiens
ggcgcgtctatgagg

SEQ ID NO: 1582554 - DNA, 15 bp, Homo sapiens
gggcgcgtctatgag

SEQ ID NO: 1582555 - DNA, 15 bp, Homo sapiens
agggcgcgtctatga

SEQ ID NO: 1582556 - DNA, 15 bp, Homo sapiens
gagggcgcgtctatg

SEQ ID NO: 1582557 - DNA, 15 bp, Homo sapiens
cgagggcgcgtctat

SEQ ID NO: 1582558 - DNA, 15 bp, Homo sapiens
gcgagggcgcgtcta

SEQ ID NO: 1582559 - DNA, 15 bp, Homo sapiens
ggcgagggcgcgtct

SEQ ID NO: 1582560 - DNA, 15 bp, Homo sapiens
aggcgagggcgcgtc

SEQ ID NO: 1582561 - DNA, 15 bp, Homo sapiens
gaggcgagggcgcgt

SEQ ID NO: 1582562 - DNA, 15 bp, Homo sapiens
ggaggcgagggcgcg

SEQ ID NO: 1582563 - DNA, 15 bp, Homo sapiens
gggaggcgagggcgc

SEQ ID NO: 1582564 - DNA, 15 bp, Homo sapiens
tgggaggcgagggcg

SEQ ID NO: 1582565 - DNA, 15 bp, Homo sapiens
atgggaggcgagggc

SEQ ID NO: 1582566 - DNA, 15 bp, Homo sapiens
tatgggaggcgaggg

SEQ ID NO: 1582567 - DNA, 15 bp, Homo sapiens
gtatgggaggcgagg

SEQ ID NO: 1582568 - DNA, 15 bp, Homo sapiens
ggtatgggaggcgag

SEQ ID NO: 1582569 - DNA, 15 bp, Homo sapiens
gggtatgggaggcga

SEQ ID NO: 1582570 - DNA, 15 bp, Homo sapiens
agggtatgggaggcg

SEQ ID NO: 1582571 - DNA, 15 bp, Homo sapiens
gagggtatgggaggc

SEQ ID NO: 1582572 - DNA, 15 bp, Homo sapiens
ggagggtatgggagg

SEQ ID NO: 1582573 - DNA, 15 bp, Homo sapiens
cggagggtatgggag

SEQ ID NO: 1582574 - DNA, 15 bp, Homo sapiens
acggagggtatggga

SEQ ID NO: 1582575 - DNA, 15 bp, Homo sapiens
tacggagggtatggg

SEQ ID NO: 1582576 - DNA, 15 bp, Homo sapiens
ctacggagggtatgg

SEQ ID NO: 1582577 - DNA, 15 bp, Homo sapiens
tctacggagggtatg

SEQ ID NO: 1582578 - DNA, 15 bp, Homo sapiens
ctctacggagggtat

SEQ ID NO: 1582579 - DNA, 15 bp, Homo sapiens
gctctacggagggta

SEQ ID NO: 1582580 - DNA, 15 bp, Homo sapiens
tgctctacggagggt

SEQ ID NO: 1582581 - DNA, 15 bp, Homo sapiens
atgctctacggaggg

SEQ ID NO: 1582582 - DNA, 15 bp, Homo sapiens
catgctctacggagg

SEQ ID NO: 1582583 - DNA, 15 bp, Homo sapiens
gcatgctctacggag

SEQ ID NO: 1582584 - DNA, 15 bp, Homo sapiens
ggcatgctctacgga

SEQ ID NO: 1582585 - DNA, 15 bp, Homo sapiens
aggcatgctctacgg

SEQ ID NO: 1582586 - DNA, 15 bp, Homo sapiens
caggcatgctctacg

SEQ ID NO: 1582587 - DNA, 15 bp, Homo sapiens
acaggcatgctctac

SEQ ID NO: 1582588 - DNA, 15 bp, Homo sapiens
cacaggcatgctcta

SEQ ID NO: 1582589 - DNA, 15 bp, Homo sapiens
tcacaggcatgctct

SEQ ID NO: 1582590 - DNA, 15 bp, Homo sapiens
ctcacaggcatgctc

SEQ ID NO: 1582591 - DNA, 15 bp, Homo sapiens
cctcacaggcatgct

SEQ ID NO: 1582592 - DNA, 15 bp, Homo sapiens
ccctcacaggcatgc

SEQ ID NO: 1582593 - DNA, 15 bp, Homo sapiens
tccctcacaggcatg

SEQ ID NO: 1582594 - DNA, 15 bp, Homo sapiens
ttccctcacaggcat

SEQ ID NO: 1582595 - DNA, 15 bp, Homo sapiens
tttccctcacaggca

SEQ ID NO: 1582596 - DNA, 15 bp, Homo sapiens
ctttccctcacaggc

SEQ ID NO: 1582597 - DNA, 15 bp, Homo sapiens
cctttccctcacagg

SEQ ID NO: 1582598 - DNA, 15 bp, Homo sapiens
ccctttccctcacag

SEQ ID NO: 1582599 - DNA, 15 bp, Homo sapiens
tccctttccctcaca

SEQ ID NO: 1582600 - DNA, 15 bp, Homo sapiens
ctccctttccctcac

SEQ ID NO: 1582601 - DNA, 15 bp, Homo sapiens
tctccctttccctca

SEQ ID NO: 1582602 - DNA, 15 bp, Homo sapiens
ttctccctttccctc

SEQ ID NO: 1582603 - DNA, 15 bp, Homo sapiens
cttctccctttccct

SEQ ID NO: 1582604 - DNA, 15 bp, Homo sapiens
gcttctccctttccc

SEQ ID NO: 1582605 - DNA, 15 bp, Homo sapiens
tgcttctccctttcc

SEQ ID NO: 1582606 - DNA, 15 bp, Homo sapiens
ctgcttctccctttc

SEQ ID NO: 1582607 - DNA, 15 bp, Homo sapiens
tctgcttctcccttt

SEQ ID NO: 1582608 - DNA, 15 bp, Homo sapiens
ttctgcttctccctt

SEQ ID NO: 1582609 - DNA, 15 bp, Homo sapiens
cttctgcttctccct

SEQ ID NO: 1582610 - DNA, 15 bp, Homo sapiens
gcttctgcttctccc

SEQ ID NO: 1582611 - DNA, 15 bp, Homo sapiens
ggcttctgcttctcc

SEQ ID NO: 1582612 - DNA, 15 bp, Homo sapiens
cggcttctgcttctc

SEQ ID NO: 1582613 - DNA, 15 bp, Homo sapiens
gcggcttctgcttct

SEQ ID NO: 1582614 - DNA, 15 bp, Homo sapiens
cgcggcttctgcttc

SEQ ID NO: 1582615 - DNA, 15 bp, Homo sapiens
gcgcggcttctgctt

SEQ ID NO: 1582616 - DNA, 15 bp, Homo sapiens
agcgcggcttctgct

SEQ ID NO: 1582617 - DNA, 15 bp, Homo sapiens
gagcgcggcttctgc

SEQ ID NO: 1582618 - DNA, 15 bp, Homo sapiens
cgagcgcggcttctg

SEQ ID NO: 1582619 - DNA, 15 bp, Homo sapiens
ccgagcgcggcttct

SEQ ID NO: 1582620 - DNA, 15 bp, Homo sapiens
tccgagcgcggcttc

SEQ ID NO: 1582621 - DNA, 15 bp, Homo sapiens
atccgagcgcggctt

SEQ ID NO: 1582622 - DNA, 15 bp, Homo sapiens
catccgagcgcggct

SEQ ID NO: 1582623 - DNA, 15 bp, Homo sapiens
tcatccgagcgcggc

SEQ ID NO: 1582624 - DNA, 15 bp, Homo sapiens
gtcatccgagcgcgg

SEQ ID NO: 1582625 - DNA, 15 bp, Homo sapiens
agtcatccgagcgcg

SEQ ID NO: 1582626 - DNA, 15 bp, Homo sapiens
aagtcatccgagcgc

SEQ ID NO: 1582627 - DNA, 15 bp, Homo sapiens
caagtcatccgagcg

SEQ ID NO: 1582628 - DNA, 15 bp, Homo sapiens
ccaagtcatccgagc

SEQ ID NO: 1582629 - DNA, 15 bp, Homo sapiens
gccaagtcatccgag

SEQ ID NO: 1582630 - DNA, 15 bp, Homo sapiens
cgccaagtcatccga

SEQ ID NO: 1582631 - DNA, 15 bp, Homo sapiens
gcgccaagtcatccg

SEQ ID NO: 1582632 - DNA, 15 bp, Homo sapiens
ggcgccaagtcatcc

SEQ ID NO: 1582633 - DNA, 15 bp, Homo sapiens
gggcgccaagtcatc

SEQ ID NO: 1582634 - DNA, 15 bp, Homo sapiens
ggggcgccaagtcat

SEQ ID NO: 1582635 - DNA, 15 bp, Homo sapiens
tggggcgccaagtca

SEQ ID NO: 1582636 - DNA, 15 bp, Homo sapiens
gtggggcgccaagtc

SEQ ID NO: 1582637 - DNA, 15 bp, Homo sapiens
ggtggggcgccaagt

SEQ ID NO: 1582638 - DNA, 15 bp, Homo sapiens
gggtggggcgccaag

SEQ ID NO: 1582639 - DNA, 15 bp, Homo sapiens
ggggtggggcgccaa

SEQ ID NO: 1582640 - DNA, 15 bp, Homo sapiens
gggggtggggcgcca

SEQ ID NO: 1582641 - DNA, 15 bp, Homo sapiens
ggggggtggggcgcc

SEQ ID NO: 1582642 - DNA, 15 bp, Homo sapiens
tggggggtggggcgc

SEQ ID NO: 1582643 - DNA, 15 bp, Homo sapiens
ctggggggtggggcg

SEQ ID NO: 1582644 - DNA, 15 bp, Homo sapiens
gctggggggtggggc

SEQ ID NO: 1582645 - DNA, 15 bp, Homo sapiens
ggctggggggtgggg

SEQ ID NO: 1582646 - DNA, 15 bp, Homo sapiens
aggctggggggtggg

SEQ ID NO: 1582647 - DNA, 15 bp, Homo sapiens
caggctggggggtgg

SEQ ID NO: 1582648 - DNA, 15 bp, Homo sapiens
gcaggctggggggtg

SEQ ID NO: 1582649 - DNA, 15 bp, Homo sapiens
ggcaggctggggggt

SEQ ID NO: 1582650 - DNA, 15 bp, Homo sapiens
gggcaggctgggggg

SEQ ID NO: 1582651 - DNA, 15 bp, Homo sapiens
tgggcaggctggggg

SEQ ID NO: 1582652 - DNA, 15 bp, Homo sapiens
gtgggcaggctgggg

SEQ ID NO: 1582653 - DNA, 15 bp, Homo sapiens
tgtgggcaggctggg

SEQ ID NO: 1582654 - DNA, 15 bp, Homo sapiens
ctgtgggcaggctgg

SEQ ID NO: 1582655 - DNA, 15 bp, Homo sapiens
cctgtgggcaggctg

SEQ ID NO: 1582656 - DNA, 15 bp, Homo sapiens
gcctgtgggcaggct

SEQ ID NO: 1582657 - DNA, 15 bp, Homo sapiens
ggcctgtgggcaggc

SEQ ID NO: 1582658 - DNA, 15 bp, Homo sapiens
tggcctgtgggcagg

SEQ ID NO: 1582659 - DNA, 15 bp, Homo sapiens
gtggcctgtgggcag

SEQ ID NO: 1582660 - DNA, 15 bp, Homo sapiens
cgtggcctgtgggca

SEQ ID NO: 1582661 - DNA, 15 bp, Homo sapiens
tcgtggcctgtgggc

SEQ ID NO: 1582662 - DNA, 15 bp, Homo sapiens
ttcgtggcctgtggg

SEQ ID NO: 1582663 - DNA, 15 bp, Homo sapiens
attcgtggcctgtgg

SEQ ID NO: 1582664 - DNA, 15 bp, Homo sapiens
aattcgtggcctgtg

SEQ ID NO: 1582665 - DNA, 15 bp, Homo sapiens
caattcgtggcctgt

SEQ ID NO: 1582666 - DNA, 15 bp, Homo sapiens
tcaattcgtggcctg

SEQ ID NO: 1582667 - DNA, 15 bp, Homo sapiens
ctcaattcgtggcct

SEQ ID NO: 1582668 - DNA, 15 bp, Homo sapiens
tctcaattcgtggcc

SEQ ID NO: 1582669 - DNA, 15 bp, Homo sapiens
ttctcaattcgtggc

SEQ ID NO: 1582670 - DNA, 15 bp, Homo sapiens
tttctcaattcgtgg

SEQ ID NO: 1582671 - DNA, 15 bp, Homo sapiens
ttttctcaattcgtg

SEQ ID NO: 1582672 - DNA, 15 bp, Homo sapiens
cttttctcaattcgt

SEQ ID NO: 1582673 - DNA, 15 bp, Homo sapiens
gcttttctcaattcg

SEQ ID NO: 1582674 - DNA, 15 bp, Homo sapiens
agcttttctcaattc

SEQ ID NO: 1582675 - DNA, 15 bp, Homo sapiens
aagcttttctcaatt

SEQ ID NO: 1582676 - DNA, 15 bp, Homo sapiens
aaagcttttctcaat

SEQ ID NO: 1582677 - DNA, 15 bp, Homo sapiens
gaaagcttttctcaa

SEQ ID NO: 1582678 - DNA, 15 bp, Homo sapiens
ggaaagcttttctca

SEQ ID NO: 1582679 - DNA, 15 bp, Homo sapiens
gggaaagcttttctc

SEQ ID NO: 1582680 - DNA, 15 bp, Homo sapiens
tgggaaagcttttct

SEQ ID NO: 1582681 - DNA, 15 bp, Homo sapiens
ttgggaaagcttttc

SEQ ID NO: 1582682 - DNA, 15 bp, Homo sapiens
tttgggaaagctttt

SEQ ID NO: 1582683 - DNA, 15 bp, Homo sapiens
ttttgggaaagcttt

SEQ ID NO: 1582684 - DNA, 15 bp, Homo sapiens
cttttgggaaagctt

SEQ ID NO: 1582685 - DNA, 15 bp, Homo sapiens
ccttttgggaaagct

SEQ ID NO: 1582686 - DNA, 15 bp, Homo sapiens
tccttttgggaaagc

SEQ ID NO: 1582687 - DNA, 15 bp, Homo sapiens
ttccttttgggaaag

SEQ ID NO: 1582688 - DNA, 15 bp, Homo sapiens
tttccttttgggaaa

SEQ ID NO: 1582689 - DNA, 15 bp, Homo sapiens
ctttccttttgggaa

SEQ ID NO: 1582690 - DNA, 15 bp, Homo sapiens
actttccttttggga

SEQ ID NO: 1582691 - DNA, 15 bp, Homo sapiens
gactttccttttggg

SEQ ID NO: 1582692 - DNA, 15 bp, Homo sapiens
ggactttccttttgg

SEQ ID NO: 1582693 - DNA, 15 bp, Homo sapiens
aggactttccttttg

SEQ ID NO: 1582694 - DNA, 15 bp, Homo sapiens
gaggactttcctttt

SEQ ID NO: 1582695 - DNA, 15 bp, Homo sapiens
agaggactttccttt

SEQ ID NO: 1582696 - DNA, 15 bp, Homo sapiens
gagaggactttcctt

SEQ ID NO: 1582697 - DNA, 15 bp, Homo sapiens
tgagaggactttcct

SEQ ID NO: 1582698 - DNA, 15 bp, Homo sapiens
ttgagaggactttcc

SEQ ID NO: 1582699 - DNA, 15 bp, Homo sapiens
tttgagaggactttc

SEQ ID NO: 1582700 - DNA, 15 bp, Homo sapiens
ctttgagaggacttt

SEQ ID NO: 1582701 - DNA, 15 bp, Homo sapiens
cctttgagaggactt

SEQ ID NO: 1582702 - DNA, 15 bp, Homo sapiens
gcctttgagaggact

SEQ ID NO: 1582703 - DNA, 15 bp, Homo sapiens
ggcctttgagaggac

SEQ ID NO: 1582704 - DNA, 15 bp, Homo sapiens
gggcctttgagagga

SEQ ID NO: 1582705 - DNA, 15 bp, Homo sapiens
agggcctttgagagg

SEQ ID NO: 1582706 - DNA, 15 bp, Homo sapiens
tagggcctttgagag

SEQ ID NO: 1582707 - DNA, 15 bp, Homo sapiens
ctagggcctttgaga

SEQ ID NO: 1582708 - DNA, 15 bp, Homo sapiens
tctagggcctttgag

SEQ ID NO: 1582709 - DNA, 15 bp, Homo sapiens
gtctagggcctttga

SEQ ID NO: 1582710 - DNA, 15 bp, Homo sapiens
cgtctagggcctttg

SEQ ID NO: 1582711 - DNA, 15 bp, Homo sapiens
ccgtctagggccttt

SEQ ID NO: 1582712 - DNA, 15 bp, Homo sapiens
accgtctagggcctt

SEQ ID NO: 1582713 - DNA, 15 bp, Homo sapiens
gaccgtctagggcct

SEQ ID NO: 1582714 - DNA, 15 bp, Homo sapiens
tgaccgtctagggcc

SEQ ID NO: 1582715 - DNA, 15 bp, Homo sapiens
ttgaccgtctagggc

SEQ ID NO: 1582716 - DNA, 15 bp, Homo sapiens
tttgaccgtctaggg

SEQ ID NO: 1582717 - DNA, 15 bp, Homo sapiens
atttgaccgtctagg

SEQ ID NO: 1582718 - DNA, 15 bp, Homo sapiens
gatttgaccgtctag

SEQ ID NO: 1582719 - DNA, 15 bp, Homo sapiens
cgatttgaccgtcta

SEQ ID NO: 1582720 - DNA, 15 bp, Homo sapiens
ccgatttgaccgtct

SEQ ID NO: 1582721 - DNA, 15 bp, Homo sapiens
cccgatttgaccgtc

SEQ ID NO: 1582722 - DNA, 15 bp, Homo sapiens
tcccgatttgaccgt

SEQ ID NO: 1582723 - DNA, 15 bp, Homo sapiens
ttcccgatttgaccg

SEQ ID NO: 1582724 - DNA, 15 bp, Homo sapiens
tttcccgatttgacc

SEQ ID NO: 1582725 - DNA, 15 bp, Homo sapiens
ctttcccgatttgac

SEQ ID NO: 1582726 - DNA, 15 bp, Homo sapiens
cctttcccgatttga

SEQ ID NO: 1582727 - DNA, 15 bp, Homo sapiens
ccctttcccgatttg

SEQ ID NO: 1582728 - DNA, 15 bp, Homo sapiens
tccctttcccgattt

SEQ ID NO: 1582729 - DNA, 15 bp, Homo sapiens
ctccctttcccgatt

SEQ ID NO: 1582730 - DNA, 15 bp, Homo sapiens
gctccctttcccgat

SEQ ID NO: 1582731 - DNA, 15 bp, Homo sapiens
tgctccctttcccga

SEQ ID NO: 1582732 - DNA, 15 bp, Homo sapiens
ctgctccctttcccg

SEQ ID NO: 1582733 - DNA, 15 bp, Homo sapiens
actgctccctttccc

SEQ ID NO: 1582734 - DNA, 15 bp, Homo sapiens
tactgctccctttcc

SEQ ID NO: 1582735 - DNA, 15 bp, Homo sapiens
ctactgctccctttc

SEQ ID NO: 1582736 - DNA, 15 bp, Homo sapiens
tctactgctcccttt

SEQ ID NO: 1582737 - DNA, 15 bp, Homo sapiens
ctctactgctccctt

SEQ ID NO: 1582738 - DNA, 15 bp, Homo sapiens
cctctactgctccct

SEQ ID NO: 1582739 - DNA, 15 bp, Homo sapiens
ccctctactgctccc

SEQ ID NO: 1582740 - DNA, 15 bp, Homo sapiens
tccctctactgctcc

SEQ ID NO: 1582741 - DNA, 15 bp, Homo sapiens
atccctctactgctc

SEQ ID NO: 1582742 - DNA, 15 bp, Homo sapiens
gatccctctactgct

SEQ ID NO: 1582743 - DNA, 15 bp, Homo sapiens
ggatccctctactgc

SEQ ID NO: 1582744 - DNA, 15 bp, Homo sapiens
aggatccctctactg

SEQ ID NO: 1582745 - DNA, 15 bp, Homo sapiens
aaggatccctctact

SEQ ID NO: 1582746 - DNA, 15 bp, Homo sapiens
gaaggatccctctac

SEQ ID NO: 1582747 - DNA, 15 bp, Homo sapiens
ggaaggatccctcta

SEQ ID NO: 1582748 - DNA, 15 bp, Homo sapiens
aggaaggatccctct

SEQ ID NO: 1582749 - DNA, 15 bp, Homo sapiens
gaggaaggatccctc

SEQ ID NO: 1582750 - DNA, 15 bp, Homo sapiens
ggaggaaggatccct

SEQ ID NO: 1582751 - DNA, 15 bp, Homo sapiens
gggaggaaggatccc

SEQ ID NO: 1582752 - DNA, 15 bp, Homo sapiens
cgggaggaaggatcc

SEQ ID NO: 1582753 - DNA, 15 bp, Homo sapiens
gcgggaggaaggatc

SEQ ID NO: 1582754 - DNA, 15 bp, Homo sapiens
agcgggaggaaggat

SEQ ID NO: 1582755 - DNA, 15 bp, Homo sapiens
cagcgggaggaagga

SEQ ID NO: 1582756 - DNA, 15 bp, Homo sapiens
gcagcgggaggaagg

SEQ ID NO: 1582757 - DNA, 15 bp, Homo sapiens
cgcagcgggaggaag

SEQ ID NO: 1582758 - DNA, 15 bp, Homo sapiens
acgcagcgggaggaa

SEQ ID NO: 1582759 - DNA, 15 bp, Homo sapiens
gacgcagcgggagga

SEQ ID NO: 1582760 - DNA, 15 bp, Homo sapiens
agacgcagcgggagg

SEQ ID NO: 1582761 - DNA, 15 bp, Homo sapiens
cagacgcagcgggag

SEQ ID NO: 1582762 - DNA, 15 bp, Homo sapiens
acagacgcagcggga

SEQ ID NO: 1582763 - DNA, 15 bp, Homo sapiens
cacagacgcagcggg

SEQ ID NO: 1582764 - DNA, 15 bp, Homo sapiens
tcacagacgcagcgg

SEQ ID NO: 1582765 - DNA, 15 bp, Homo sapiens
ttcacagacgcagcg

SEQ ID NO: 1582766 - DNA, 15 bp, Homo sapiens
tttcacagacgcagc

SEQ ID NO: 1582767 - DNA, 15 bp, Homo sapiens
ctttcacagacgcag

SEQ ID NO: 1582768 - DNA, 15 bp, Homo sapiens
gctttcacagacgca

SEQ ID NO: 1582769 - DNA, 15 bp, Homo sapiens
ggctttcacagacgc

SEQ ID NO: 1582770 - DNA, 15 bp, Homo sapiens
cggctttcacagacg

SEQ ID NO: 1582771 - DNA, 15 bp, Homo sapiens
gcggctttcacagac

SEQ ID NO: 1582772 - DNA, 15 bp, Homo sapiens
ggcggctttcacaga

SEQ ID NO: 1582773 - DNA, 15 bp, Homo sapiens
aggcggctttcacag

SEQ ID NO: 1582774 - DNA, 15 bp, Homo sapiens
caggcggctttcaca

SEQ ID NO: 1582775 - DNA, 15 bp, Homo sapiens
acaggcggctttcac

SEQ ID NO: 1582776 - DNA, 15 bp, Homo sapiens
gacaggcggctttca

SEQ ID NO: 1582777 - DNA, 15 bp, Homo sapiens
agacaggcggctttc

SEQ ID NO: 1582778 - DNA, 15 bp, Homo sapiens
cagacaggcggcttt

SEQ ID NO: 1582779 - DNA, 15 bp, Homo sapiens
gcagacaggcggctt

SEQ ID NO: 1582780 - DNA, 15 bp, Homo sapiens
tgcagacaggcggct

SEQ ID NO: 1582781 - DNA, 15 bp, Homo sapiens
gtgcagacaggcggc

SEQ ID NO: 1582782 - DNA, 15 bp, Homo sapiens
cgtgcagacaggcgg

SEQ ID NO: 1582783 - DNA, 15 bp, Homo sapiens
gcgtgcagacaggcg

SEQ ID NO: 1582784 - DNA, 15 bp, Homo sapiens
ggcgtgcagacaggc

SEQ ID NO: 1582785 - DNA, 15 bp, Homo sapiens
gggcgtgcagacagg

SEQ ID NO: 1582786 - DNA, 15 bp, Homo sapiens
ggggcgtgcagacag

SEQ ID NO: 1582787 - DNA, 15 bp, Homo sapiens
cggggcgtgcagaca

SEQ ID NO: 1582788 - DNA, 15 bp, Homo sapiens
ccggggcgtgcagac

SEQ ID NO: 1582789 - DNA, 15 bp, Homo sapiens
cccggggcgtgcaga

SEQ ID NO: 1582790 - DNA, 15 bp, Homo sapiens
gcccggggcgtgcag

SEQ ID NO: 1582791 - DNA, 15 bp, Homo sapiens
agcccggggcgtgca

SEQ ID NO: 1582792 - DNA, 15 bp, Homo sapiens
gagcccggggcgtgc

SEQ ID NO: 1582793 - DNA, 15 bp, Homo sapiens
ggagcccggggcgtg

SEQ ID NO: 1582794 - DNA, 15 bp, Homo sapiens
gggagcccggggcgt

SEQ ID NO: 1582795 - DNA, 15 bp, Homo sapiens
cgggagcccggggcg

SEQ ID NO: 1582796 - DNA, 15 bp, Homo sapiens
gcgggagcccggggc

SEQ ID NO: 1582797 - DNA, 15 bp, Homo sapiens
cgcgggagcccgggg

SEQ ID NO: 1582798 - DNA, 15 bp, Homo sapiens
ccgcgggagcccggg

SEQ ID NO: 1582799 - DNA, 15 bp, Homo sapiens
accgcgggagcccgg

SEQ ID NO: 1582800 - DNA, 15 bp, Homo sapiens
gaccgcgggagcccg

SEQ ID NO: 1582801 - DNA, 15 bp, Homo sapiens
ggaccgcgggagccc

SEQ ID NO: 1582802 - DNA, 15 bp, Homo sapiens
gggaccgcgggagcc

SEQ ID NO: 1582803 - DNA, 15 bp, Homo sapiens
agggaccgcgggagc

SEQ ID NO: 1582804 - DNA, 15 bp, Homo sapiens
gagggaccgcgggag

SEQ ID NO: 1582805 - DNA, 15 bp, Homo sapiens
ggagggaccgcggga

SEQ ID NO: 1582806 - DNA, 15 bp, Homo sapiens
gggagggaccgcggg

SEQ ID NO: 1582807 - DNA, 15 bp, Homo sapiens
cgggagggaccgcgg

SEQ ID NO: 1582808 - DNA, 15 bp, Homo sapiens
tcgggagggaccgcg

SEQ ID NO: 1582809 - DNA, 15 bp, Homo sapiens
ctcgggagggaccgc

SEQ ID NO: 1582810 - DNA, 15 bp, Homo sapiens
cctcgggagggaccg

SEQ ID NO: 1582811 - DNA, 15 bp, Homo sapiens
tcctcgggagggacc

SEQ ID NO: 1582812 - DNA, 15 bp, Homo sapiens
atcctcgggagggac

SEQ ID NO: 1582813 - DNA, 15 bp, Homo sapiens
aatcctcgggaggga

SEQ ID NO: 1582814 - DNA, 15 bp, Homo sapiens
aaatcctcgggaggg

SEQ ID NO: 1582815 - DNA, 15 bp, Homo sapiens
gaaatcctcgggagg

SEQ ID NO: 1582816 - DNA, 15 bp, Homo sapiens
cgaaatcctcgggag

SEQ ID NO: 1582817 - DNA, 15 bp, Homo sapiens
ccgaaatcctcggga

SEQ ID NO: 1582818 - DNA, 15 bp, Homo sapiens
accgaaatcctcggg

SEQ ID NO: 1582819 - DNA, 15 bp, Homo sapiens
aaccgaaatcctcgg

SEQ ID NO: 1582820 - DNA, 15 bp, Homo sapiens
gaaccgaaatcctcg

SEQ ID NO: 1582821 - DNA, 15 bp, Homo sapiens
agaaccgaaatcctc

SEQ ID NO: 1582822 - DNA, 15 bp, Homo sapiens
cagaaccgaaatcct

SEQ ID NO: 1582823 - DNA, 15 bp, Homo sapiens
ccagaaccgaaatcc

SEQ ID NO: 1582824 - DNA, 15 bp, Homo sapiens
accagaaccgaaatc

SEQ ID NO: 1582825 - DNA, 15 bp, Homo sapiens
caccagaaccgaaat

SEQ ID NO: 1582826 - DNA, 15 bp, Homo sapiens
gcaccagaaccgaaa

SEQ ID NO: 1582827 - DNA, 15 bp, Homo sapiens
ggcaccagaaccgaa

SEQ ID NO: 1582828 - DNA, 15 bp, Homo sapiens
aggcaccagaaccga

SEQ ID NO: 1582829 - DNA, 15 bp, Homo sapiens
caggcaccagaaccg

SEQ ID NO: 1582830 - DNA, 15 bp, Homo sapiens
tcaggcaccagaacc

SEQ ID NO: 1582831 - DNA, 15 bp, Homo sapiens
ctcaggcaccagaac

SEQ ID NO: 1582832 - DNA, 15 bp, Homo sapiens
tctcaggcaccagaa

SEQ ID NO: 1582833 - DNA, 15 bp, Homo sapiens
ttctcaggcaccaga

SEQ ID NO: 1582834 - DNA, 15 bp, Homo sapiens
tttctcaggcaccag

SEQ ID NO: 1582835 - DNA, 15 bp, Homo sapiens
ctttctcaggcacca

SEQ ID NO: 1582836 - DNA, 15 bp, Homo sapiens
gctttctcaggcacc

SEQ ID NO: 1582837 - DNA, 15 bp, Homo sapiens
tgctttctcaggcac

SEQ ID NO: 1582838 - DNA, 15 bp, Homo sapiens
ctgctttctcaggca

SEQ ID NO: 1582839 - DNA, 15 bp, Homo sapiens
gctgctttctcaggc

SEQ ID NO: 1582840 - DNA, 15 bp, Homo sapiens
cgctgctttctcagg

SEQ ID NO: 1582841 - DNA, 15 bp, Homo sapiens
gcgctgctttctcag

SEQ ID NO: 1582842 - DNA, 15 bp, Homo sapiens
tgcgctgctttctca

SEQ ID NO: 1582843 - DNA, 15 bp, Homo sapiens
ctgcgctgctttctc

SEQ ID NO: 1582844 - DNA, 15 bp, Homo sapiens
tctgcgctgctttct

SEQ ID NO: 1582845 - DNA, 15 bp, Homo sapiens
ctctgcgctgctttc

SEQ ID NO: 1582846 - DNA, 15 bp, Homo sapiens
cctctgcgctgcttt

SEQ ID NO: 1582847 - DNA, 15 bp, Homo sapiens
ccctctgcgctgctt

SEQ ID NO: 1582848 - DNA, 15 bp, Homo sapiens
cccctctgcgctgct

SEQ ID NO: 1582849 - DNA, 15 bp, Homo sapiens
ccccctctgcgctgc

SEQ ID NO: 1582850 - DNA, 15 bp, Homo sapiens
gccccctctgcgctg

SEQ ID NO: 1582851 - DNA, 15 bp, Homo sapiens
ggccccctctgcgct

SEQ ID NO: 1582852 - DNA, 15 bp, Homo sapiens
gggccccctctgcgc

SEQ ID NO: 1582853 - DNA, 15 bp, Homo sapiens
agggccccctctgcg

SEQ ID NO: 1582854 - DNA, 15 bp, Homo sapiens
cagggccccctctgc

SEQ ID NO: 1582855 - DNA, 15 bp, Homo sapiens
gcagggccccctctg

SEQ ID NO: 1582856 - DNA, 15 bp, Homo sapiens
cgcagggccccctct

SEQ ID NO: 1582857 - DNA, 15 bp, Homo sapiens
tcgcagggccccctc

SEQ ID NO: 1582858 - DNA, 15 bp, Homo sapiens
ctcgcagggccccct

SEQ ID NO: 1582859 - DNA, 15 bp, Homo sapiens
tctcgcagggccccc

SEQ ID NO: 1582860 - DNA, 15 bp, Homo sapiens
gtctcgcagggcccc

SEQ ID NO: 1582861 - DNA, 15 bp, Homo sapiens
ggtctcgcagggccc

SEQ ID NO: 1582862 - DNA, 15 bp, Homo sapiens
gggtctcgcagggcc

SEQ ID NO: 1582863 - DNA, 15 bp, Homo sapiens
ggggtctcgcagggc

SEQ ID NO: 1582864 - DNA, 15 bp, Homo sapiens
aggggtctcgcaggg

SEQ ID NO: 1582865 - DNA, 15 bp, Homo sapiens
gaggggtctcgcagg

SEQ ID NO: 1582866 - DNA, 15 bp, Homo sapiens
ggaggggtctcgcag

SEQ ID NO: 1582867 - DNA, 15 bp, Homo sapiens
tggaggggtctcgca

SEQ ID NO: 1582868 - DNA, 15 bp, Homo sapiens
ctggaggggtctcgc

SEQ ID NO: 1582869 - DNA, 15 bp, Homo sapiens
tctggaggggtctcg

SEQ ID NO: 1582870 - DNA, 15 bp, Homo sapiens
ctctggaggggtctc

SEQ ID NO: 1582871 - DNA, 15 bp, Homo sapiens
tctctggaggggtct

SEQ ID NO: 1582872 - DNA, 15 bp, Homo sapiens
ttctctggaggggtc

SEQ ID NO: 1582873 - DNA, 15 bp, Homo sapiens
tttctctggaggggt

SEQ ID NO: 1582874 - DNA, 15 bp, Homo sapiens
atttctctggagggg

SEQ ID NO: 1582875 - DNA, 15 bp, Homo sapiens
gatttctctggaggg

SEQ ID NO: 1582876 - DNA, 15 bp, Homo sapiens
tgatttctctggagg

SEQ ID NO: 1582877 - DNA, 15 bp, Homo sapiens
atgatttctctggag

SEQ ID NO: 1582878 - DNA, 15 bp, Homo sapiens
gatgatttctctgga

SEQ ID NO: 1582879 - DNA, 15 bp, Homo sapiens
ggatgatttctctgg

SEQ ID NO: 1582880 - DNA, 15 bp, Homo sapiens
gggatgatttctctg

SEQ ID NO: 1582881 - DNA, 15 bp, Homo sapiens
ggggatgatttctct

SEQ ID NO: 1582882 - DNA, 15 bp, Homo sapiens
gggggatgatttctc

SEQ ID NO: 1582883 - DNA, 15 bp, Homo sapiens
cgggggatgatttct

SEQ ID NO: 1582884 - DNA, 15 bp, Homo sapiens
ccgggggatgatttc

SEQ ID NO: 1582885 - DNA, 15 bp, Homo sapiens
tccgggggatgattt

SEQ ID NO: 1582886 - DNA, 15 bp, Homo sapiens
ctccgggggatgatt

SEQ ID NO: 1582887 - DNA, 15 bp, Homo sapiens
cctccgggggatgat

SEQ ID NO: 1582888 - DNA, 15 bp, Homo sapiens
gcctccgggggatga

SEQ ID NO: 1582889 - DNA, 15 bp, Homo sapiens
tgcctccgggggatg

SEQ ID NO: 1582890 - DNA, 15 bp, Homo sapiens
atgcctccgggggat

SEQ ID NO: 1582891 - DNA, 15 bp, Homo sapiens
aatgcctccggggga

SEQ ID NO: 1582892 - DNA, 15 bp, Homo sapiens
gaatgcctccggggg

SEQ ID NO: 1582893 - DNA, 15 bp, Homo sapiens
ggaatgcctccgggg

SEQ ID NO: 1582894 - DNA, 15 bp, Homo sapiens
aggaatgcctccggg

SEQ ID NO: 1582895 - DNA, 15 bp, Homo sapiens
gaggaatgcctccgg

SEQ ID NO: 1582896 - DNA, 15 bp, Homo sapiens
cgaggaatgcctccg

SEQ ID NO: 1582897 - DNA, 15 bp, Homo sapiens
ccgaggaatgcctcc

SEQ ID NO: 1582898 - DNA, 15 bp, Homo sapiens
tccgaggaatgcctc

SEQ ID NO: 1582899 - DNA, 15 bp, Homo sapiens
atccgaggaatgcct

SEQ ID NO: 1582900 - DNA, 15 bp, Homo sapiens
gatccgaggaatgcc

SEQ ID NO: 1582901 - DNA, 15 bp, Homo sapiens
agatccgaggaatgc

SEQ ID NO: 1582902 - DNA, 15 bp, Homo sapiens
aagatccgaggaatg

SEQ ID NO: 1582903 - DNA, 15 bp, Homo sapiens
caagatccgaggaat

SEQ ID NO: 1582904 - DNA, 15 bp, Homo sapiens
ccaagatccgaggaa

SEQ ID NO: 1582905 - DNA, 15 bp, Homo sapiens
cccaagatccgagga

SEQ ID NO: 1582906 - DNA, 15 bp, Homo sapiens
ccccaagatccgagg

SEQ ID NO: 1582907 - DNA, 15 bp, Homo sapiens
accccaagatccgag

SEQ ID NO: 1582908 - DNA, 15 bp, Homo sapiens
aaccccaagatccga

SEQ ID NO: 1582909 - DNA, 15 bp, Homo sapiens
caaccccaagatccg

SEQ ID NO: 1582910 - DNA, 15 bp, Homo sapiens
gcaaccccaagatcc

SEQ ID NO: 1582911 - DNA, 15 bp, Homo sapiens
cgcaaccccaagatc

SEQ ID NO: 1582912 - DNA, 15 bp, Homo sapiens
ccgcaaccccaagat

SEQ ID NO: 1582913 - DNA, 15 bp, Homo sapiens
tccgcaaccccaaga

SEQ ID NO: 1582914 - DNA, 15 bp, Homo sapiens
ctccgcaaccccaag

SEQ ID NO: 1582915 - DNA, 15 bp, Homo sapiens
gctccgcaaccccaa

SEQ ID NO: 1582916 - DNA, 15 bp, Homo sapiens
tgctccgcaacccca

SEQ ID NO: 1582917 - DNA, 15 bp, Homo sapiens
ctgctccgcaacccc

SEQ ID NO: 1582918 - DNA, 15 bp, Homo sapiens
gctgctccgcaaccc

SEQ ID NO: 1582919 - DNA, 15 bp, Homo sapiens
cgctgctccgcaacc

SEQ ID NO: 1582920 - DNA, 15 bp, Homo sapiens
gcgctgctccgcaac

SEQ ID NO: 1582921 - DNA, 15 bp, Homo sapiens
ggcgctgctccgcaa

SEQ ID NO: 1582922 - DNA, 15 bp, Homo sapiens
gggcgctgctccgca

SEQ ID NO: 1582923 - DNA, 15 bp, Homo sapiens
ggggcgctgctccgc

SEQ ID NO: 1582924 - DNA, 15 bp, Homo sapiens
gggggcgctgctccg

SEQ ID NO: 1582925 - DNA, 15 bp, Homo sapiens
ggggggcgctgctcc

SEQ ID NO: 1582926 - DNA, 15 bp, Homo sapiens
tggggggcgctgctc

SEQ ID NO: 1582927 - DNA, 15 bp, Homo sapiens
ctggggggcgctgct

SEQ ID NO: 1582928 - DNA, 15 bp, Homo sapiens
gctggggggcgctgc

SEQ ID NO: 1582929 - DNA, 15 bp, Homo sapiens
cgctggggggcgctg

SEQ ID NO: 1582930 - DNA, 15 bp, Homo sapiens
gcgctggggggcgct

SEQ ID NO: 1582931 - DNA, 15 bp, Homo sapiens
ggcgctggggggcgc

SEQ ID NO: 1582932 - DNA, 15 bp, Homo sapiens
gggcgctggggggcg

SEQ ID NO: 1582933 - DNA, 15 bp, Homo sapiens
tgggcgctggggggc

SEQ ID NO: 1582934 - DNA, 15 bp, Homo sapiens
ctgggcgctgggggg

SEQ ID NO: 1582935 - DNA, 15 bp, Homo sapiens
actgggcgctggggg

SEQ ID NO: 1582936 - DNA, 15 bp, Homo sapiens
aactgggcgctgggg

SEQ ID NO: 1582937 - DNA, 15 bp, Homo sapiens
taactgggcgctggg

SEQ ID NO: 1582938 - DNA, 15 bp, Homo sapiens
gtaactgggcgctgg

SEQ ID NO: 1582939 - DNA, 15 bp, Homo sapiens
tgtaactgggcgctg

SEQ ID NO: 1582940 - DNA, 15 bp, Homo sapiens
gtgtaactgggcgct

SEQ ID NO: 1582941 - DNA, 15 bp, Homo sapiens
agtgtaactgggcgc

SEQ ID NO: 1582942 - DNA, 15 bp, Homo sapiens
gagtgtaactgggcg

SEQ ID NO: 1582943 - DNA, 15 bp, Homo sapiens
ggagtgtaactgggc

SEQ ID NO: 1582944 - DNA, 15 bp, Homo sapiens
aggagtgtaactggg

SEQ ID NO: 1582945 - DNA, 15 bp, Homo sapiens
caggagtgtaactgg

SEQ ID NO: 1582946 - DNA, 15 bp, Homo sapiens
gcaggagtgtaactg

SEQ ID NO: 1582947 - DNA, 15 bp, Homo sapiens
ggcaggagtgtaact

SEQ ID NO: 1582948 - DNA, 15 bp, Homo sapiens
aggcaggagtgtaac

SEQ ID NO: 1582949 - DNA, 15 bp, Homo sapiens
aaggcaggagtgtaa

SEQ ID NO: 1582950 - DNA, 15 bp, Homo sapiens
gaaggcaggagtgta

SEQ ID NO: 1582951 - DNA, 15 bp, Homo sapiens
ggaaggcaggagtgt

SEQ ID NO: 1582952 - DNA, 15 bp, Homo sapiens
cggaaggcaggagtg

SEQ ID NO: 1582953 - DNA, 15 bp, Homo sapiens
gcggaaggcaggagt

SEQ ID NO: 1582954 - DNA, 15 bp, Homo sapiens
agcggaaggcaggag

SEQ ID NO: 1582955 - DNA, 15 bp, Homo sapiens
gagcggaaggcagga

SEQ ID NO: 1582956 - DNA, 15 bp, Homo sapiens
ggagcggaaggcagg

SEQ ID NO: 1582957 - DNA, 15 bp, Homo sapiens
gggagcggaaggcag

SEQ ID NO: 1582958 - DNA, 15 bp, Homo sapiens
agggagcggaaggca

SEQ ID NO: 1582959 - DNA, 15 bp, Homo sapiens
cagggagcggaaggc

SEQ ID NO: 1582960 - DNA, 15 bp, Homo sapiens
gcagggagcggaagg

SEQ ID NO: 1582961 - DNA, 15 bp, Homo sapiens
cgcagggagcggaag

SEQ ID NO: 1582962 - DNA, 15 bp, Homo sapiens
gcgcagggagcggaa

SEQ ID NO: 1582963 - DNA, 15 bp, Homo sapiens
ggcgcagggagcgga

SEQ ID NO: 1582964 - DNA, 15 bp, Homo sapiens
aggcgcagggagcgg

SEQ ID NO: 1582965 - DNA, 15 bp, Homo sapiens
caggcgcagggagcg

SEQ ID NO: 1582966 - DNA, 15 bp, Homo sapiens
ccaggcgcagggagc

SEQ ID NO: 1582967 - DNA, 15 bp, Homo sapiens
accaggcgcagggag

SEQ ID NO: 1582968 - DNA, 15 bp, Homo sapiens
aaccaggcgcaggga

SEQ ID NO: 1582969 - DNA, 15 bp, Homo sapiens
caaccaggcgcaggg

SEQ ID NO: 1582970 - DNA, 15 bp, Homo sapiens
gcaaccaggcgcagg

SEQ ID NO: 1582971 - DNA, 15 bp, Homo sapiens
ggcaaccaggcgcag

SEQ ID NO: 1582972 - DNA, 15 bp, Homo sapiens
aggcaaccaggcgca

SEQ ID NO: 1582973 - DNA, 15 bp, Homo sapiens
gaggcaaccaggcgc

SEQ ID NO: 1582974 - DNA, 15 bp, Homo sapiens
cgaggcaaccaggcg

SEQ ID NO: 1582975 - DNA, 15 bp, Homo sapiens
tcgaggcaaccaggc

SEQ ID NO: 1582976 - DNA, 15 bp, Homo sapiens
atcgaggcaaccagg

SEQ ID NO: 1582977 - DNA, 15 bp, Homo sapiens
catcgaggcaaccag

SEQ ID NO: 1582978 - DNA, 15 bp, Homo sapiens
ccatcgaggcaacca

SEQ ID NO: 1582979 - DNA, 15 bp, Homo sapiens
gccatcgaggcaacc

SEQ ID NO: 1582980 - DNA, 15 bp, Homo sapiens
tgccatcgaggcaac

SEQ ID NO: 1582981 - DNA, 15 bp, Homo sapiens
gtgccatcgaggcaa

SEQ ID NO: 1582982 - DNA, 15 bp, Homo sapiens
agtgccatcgaggca

SEQ ID NO: 1582983 - DNA, 15 bp, Homo sapiens
gagtgccatcgaggc

SEQ ID NO: 1582984 - DNA, 15 bp, Homo sapiens
cgagtgccatcgagg

SEQ ID NO: 1582985 - DNA, 15 bp, Homo sapiens
gcgagtgccatcgag

SEQ ID NO: 1582986 - DNA, 15 bp, Homo sapiens
cgcgagtgccatcga

SEQ ID NO: 1582987 - DNA, 15 bp, Homo sapiens
tcgcgagtgccatcg

SEQ ID NO: 1582988 - DNA, 15 bp, Homo sapiens
ctcgcgagtgccatc

SEQ ID NO: 1582989 - DNA, 15 bp, Homo sapiens
gctcgcgagtgccat

SEQ ID NO: 1582990 - DNA, 15 bp, Homo sapiens
ggctcgcgagtgcca

SEQ ID NO: 1582991 - DNA, 15 bp, Homo sapiens
gggctcgcgagtgcc

SEQ ID NO: 1582992 - DNA, 15 bp, Homo sapiens
tgggctcgcgagtgc

SEQ ID NO: 1582993 - DNA, 15 bp, Homo sapiens
ctgggctcgcgagtg

SEQ ID NO: 1582994 - DNA, 15 bp, Homo sapiens
gctgggctcgcgagt

SEQ ID NO: 1582995 - DNA, 15 bp, Homo sapiens
agctgggctcgcgag

SEQ ID NO: 1582996 - DNA, 15 bp, Homo sapiens
gagctgggctcgcga

SEQ ID NO: 1582997 - DNA, 15 bp, Homo sapiens
tgagctgggctcgcg

SEQ ID NO: 1582998 - DNA, 15 bp, Homo sapiens
ctgagctgggctcgc

SEQ ID NO: 1582999 - DNA, 15 bp, Homo sapiens
gctgagctgggctcg

SEQ ID NO: 1583000 - DNA, 15 bp, Homo sapiens
ggctgagctgggctc

SEQ ID NO: 1583001 - DNA, 15 bp, Homo sapiens
gggctgagctgggct

SEQ ID NO: 1583002 - DNA, 15 bp, Homo sapiens
cgggctgagctgggc

SEQ ID NO: 1583003 - DNA, 15 bp, Homo sapiens
ccgggctgagctggg

SEQ ID NO: 1583004 - DNA, 15 bp, Homo sapiens
gccgggctgagctgg

SEQ ID NO: 1583005 - DNA, 15 bp, Homo sapiens
agccgggctgagctg

SEQ ID NO: 1583006 - DNA, 15 bp, Homo sapiens
aagccgggctgagct

SEQ ID NO: 1583007 - DNA, 15 bp, Homo sapiens
taagccgggctgagc

SEQ ID NO: 1583008 - DNA, 15 bp, Homo sapiens
ctaagccgggctgag

SEQ ID NO: 1583009 - DNA, 15 bp, Homo sapiens
tctaagccgggctga

SEQ ID NO: 1583010 - DNA, 15 bp, Homo sapiens
ttctaagccgggctg

SEQ ID NO: 1583011 - DNA, 15 bp, Homo sapiens
cttctaagccgggct

SEQ ID NO: 1583012 - DNA, 15 bp, Homo sapiens
gcttctaagccgggc

SEQ ID NO: 1583013 - DNA, 15 bp, Homo sapiens
ggcttctaagccggg

SEQ ID NO: 1583014 - DNA, 15 bp, Homo sapiens
aggcttctaagccgg

SEQ ID NO: 1583015 - DNA, 15 bp, Homo sapiens
caggcttctaagccg

SEQ ID NO: 1583016 - DNA, 15 bp, Homo sapiens
acaggcttctaagcc

SEQ ID NO: 1583017 - DNA, 15 bp, Homo sapiens
cacaggcttctaagc

SEQ ID NO: 1583018 - DNA, 15 bp, Homo sapiens
gcacaggcttctaag

SEQ ID NO: 1583019 - DNA, 15 bp, Homo sapiens
ggcacaggcttctaa

SEQ ID NO: 1583020 - DNA, 15 bp, Homo sapiens
aggcacaggcttcta

SEQ ID NO: 1583021 - DNA, 15 bp, Homo sapiens
taggcacaggcttct

SEQ ID NO: 1583022 - DNA, 15 bp, Homo sapiens
ctaggcacaggcttc

SEQ ID NO: 1583023 - DNA, 15 bp, Homo sapiens
gctaggcacaggctt

SEQ ID NO: 1583024 - DNA, 15 bp, Homo sapiens
agctaggcacaggct

SEQ ID NO: 1583025 - DNA, 15 bp, Homo sapiens
cagctaggcacaggc

SEQ ID NO: 1583026 - DNA, 15 bp, Homo sapiens
acagctaggcacagg

SEQ ID NO: 1583027 - DNA, 15 bp, Homo sapiens
cacagctaggcacag

SEQ ID NO: 1583028 - DNA, 15 bp, Homo sapiens
ccacagctaggcaca

SEQ ID NO: 1583029 - DNA, 15 bp, Homo sapiens
cccacagctaggcac

SEQ ID NO: 1583030 - DNA, 15 bp, Homo sapiens
tcccacagctaggca

SEQ ID NO: 1583031 - DNA, 15 bp, Homo sapiens
ctcccacagctaggc

SEQ ID NO: 1583032 - DNA, 15 bp, Homo sapiens
tctcccacagctagg

SEQ ID NO: 1583033 - DNA, 15 bp, Homo sapiens
gtctcccacagctag

SEQ ID NO: 1583034 - DNA, 15 bp, Homo sapiens
agtctcccacagcta

SEQ ID NO: 1583035 - DNA, 15 bp, Homo sapiens
cagtctcccacagct

SEQ ID NO: 1583036 - DNA, 15 bp, Homo sapiens
gcagtctcccacagc

SEQ ID NO: 1583037 - DNA, 15 bp, Homo sapiens
cgcagtctcccacag

SEQ ID NO: 1583038 - DNA, 15 bp, Homo sapiens
ccgcagtctcccaca

SEQ ID NO: 1583039 - DNA, 15 bp, Homo sapiens
cccgcagtctcccac

SEQ ID NO: 1583040 - DNA, 15 bp, Homo sapiens
tcccgcagtctccca

SEQ ID NO: 1583041 - DNA, 15 bp, Homo sapiens
ctcccgcagtctccc

SEQ ID NO: 1583042 - DNA, 15 bp, Homo sapiens
gctcccgcagtctcc

SEQ ID NO: 1583043 - DNA, 15 bp, Homo sapiens
tgctcccgcagtctc

SEQ ID NO: 1583044 - DNA, 15 bp, Homo sapiens
ttgctcccgcagtct

SEQ ID NO: 1583045 - DNA, 15 bp, Homo sapiens
gttgctcccgcagtc

SEQ ID NO: 1583046 - DNA, 15 bp, Homo sapiens
agttgctcccgcagt

SEQ ID NO: 1583047 - DNA, 15 bp, Homo sapiens
cagttgctcccgcag

SEQ ID NO: 1583048 - DNA, 15 bp, Homo sapiens
tcagttgctcccgca

SEQ ID NO: 1583049 - DNA, 15 bp, Homo sapiens
ctcagttgctcccgc

SEQ ID NO: 1583050 - DNA, 15 bp, Homo sapiens
cctcagttgctcccg

SEQ ID NO: 1583051 - DNA, 15 bp, Homo sapiens
ccctcagttgctccc

SEQ ID NO: 1583052 - DNA, 15 bp, Homo sapiens
cccctcagttgctcc

SEQ ID NO: 1583053 - DNA, 15 bp, Homo sapiens
gcccctcagttgctc

SEQ ID NO: 1583054 - DNA, 15 bp, Homo sapiens
ggcccctcagttgct

SEQ ID NO: 1583055 - DNA, 15 bp, Homo sapiens
gggcccctcagttgc

SEQ ID NO: 1583056 - DNA, 15 bp, Homo sapiens
tgggcccctcagttg

SEQ ID NO: 1583057 - DNA, 15 bp, Homo sapiens
ttgggcccctcagtt

SEQ ID NO: 1583058 - DNA, 15 bp, Homo sapiens
cttgggcccctcagt

SEQ ID NO: 1583059 - DNA, 15 bp, Homo sapiens
acttgggcccctcag

SEQ ID NO: 1583060 - DNA, 15 bp, Homo sapiens
cacttgggcccctca

SEQ ID NO: 1583061 - DNA, 15 bp, Homo sapiens
acacttgggcccctc

SEQ ID NO: 1583062 - DNA, 15 bp, Homo sapiens
aacacttgggcccct

SEQ ID NO: 1583063 - DNA, 15 bp, Homo sapiens
aaacacttgggcccc

SEQ ID NO: 1583064 - DNA, 15 bp, Homo sapiens
gaaacacttgggccc

SEQ ID NO: 1583065 - DNA, 15 bp, Homo sapiens
agaaacacttgggcc

SEQ ID NO: 1583066 - DNA, 15 bp, Homo sapiens
aagaaacacttgggc

SEQ ID NO: 1583067 - DNA, 15 bp, Homo sapiens
caagaaacacttggg

SEQ ID NO: 1583068 - DNA, 15 bp, Homo sapiens
acaagaaacacttgg

SEQ ID NO: 1583069 - DNA, 15 bp, Homo sapiens
aacaagaaacacttg

SEQ ID NO: 1583070 - DNA, 15 bp, Homo sapiens
caacaagaaacactt

SEQ ID NO: 1583071 - DNA, 15 bp, Homo sapiens
tcaacaagaaacact

SEQ ID NO: 1583072 - DNA, 15 bp, Homo sapiens
ttcaacaagaaacac

SEQ ID NO: 1583073 - DNA, 15 bp, Homo sapiens
cttcaacaagaaaca

SEQ ID NO: 1583074 - DNA, 15 bp, Homo sapiens
ccttcaacaagaaac

SEQ ID NO: 1583075 - DNA, 15 bp, Homo sapiens
accttcaacaagaaa

SEQ ID NO: 1583076 - DNA, 15 bp, Homo sapiens
gaccttcaacaagaa

SEQ ID NO: 1583077 - DNA, 15 bp, Homo sapiens
tgaccttcaacaaga

SEQ ID NO: 1583078 - DNA, 15 bp, Homo sapiens
ctgaccttcaacaag

SEQ ID NO: 1583079 - DNA, 15 bp, Homo sapiens
tctgaccttcaacaa

SEQ ID NO: 1583080 - DNA, 15 bp, Homo sapiens
ctctgaccttcaaca

SEQ ID NO: 1583081 - DNA, 15 bp, Homo sapiens
cctctgaccttcaac

SEQ ID NO: 1583082 - DNA, 15 bp, Homo sapiens
gcctctgaccttcaa

SEQ ID NO: 1583083 - DNA, 15 bp, Homo sapiens
ggcctctgaccttca

SEQ ID NO: 1583084 - DNA, 15 bp, Homo sapiens
aggcctctgaccttc

SEQ ID NO: 1583085 - DNA, 15 bp, Homo sapiens
taggcctctgacctt

SEQ ID NO: 1583086 - DNA, 15 bp, Homo sapiens
ctaggcctctgacct

SEQ ID NO: 1583087 - DNA, 15 bp, Homo sapiens
tctaggcctctgacc

SEQ ID NO: 1583088 - DNA, 15 bp, Homo sapiens
ctctaggcctctgac

SEQ ID NO: 1583089 - DNA, 15 bp, Homo sapiens
actctaggcctctga

SEQ ID NO: 1583090 - DNA, 15 bp, Homo sapiens
gactctaggcctctg

SEQ ID NO: 1583091 - DNA, 15 bp, Homo sapiens
tgactctaggcctct

SEQ ID NO: 1583092 - DNA, 15 bp, Homo sapiens
gtgactctaggcctc

SEQ ID NO: 1583093 - DNA, 15 bp, Homo sapiens
tgtgactctaggcct

SEQ ID NO: 1583094 - DNA, 15 bp, Homo sapiens
ctgtgactctaggcc

SEQ ID NO: 1583095 - DNA, 15 bp, Homo sapiens
actgtgactctaggc

SEQ ID NO: 1583096 - DNA, 15 bp, Homo sapiens
aactgtgactctagg

SEQ ID NO: 1583097 - DNA, 15 bp, Homo sapiens
aaactgtgactctag

SEQ ID NO: 1583098 - DNA, 15 bp, Homo sapiens
gaaactgtgactcta

SEQ ID NO: 1583099 - DNA, 15 bp, Homo sapiens
agaaactgtgactct

SEQ ID NO: 1583100 - DNA, 15 bp, Homo sapiens
gagaaactgtgactc

SEQ ID NO: 1583101 - DNA, 15 bp, Homo sapiens
agagaaactgtgact

SEQ ID NO: 1583102 - DNA, 15 bp, Homo sapiens
tagagaaactgtgac

SEQ ID NO: 1583103 - DNA, 15 bp, Homo sapiens
ttagagaaactgtga

SEQ ID NO: 1583104 - DNA, 15 bp, Homo sapiens
tttagagaaactgtg

SEQ ID NO: 1583105 - DNA, 15 bp, Homo sapiens
atttagagaaactgt

SEQ ID NO: 1583106 - DNA, 15 bp, Homo sapiens
gatttagagaaactg

SEQ ID NO: 1583107 - DNA, 15 bp, Homo sapiens
ggatttagagaaact

SEQ ID NO: 1583108 - DNA, 15 bp, Homo sapiens
tggatttagagaaac

SEQ ID NO: 1583109 - DNA, 15 bp, Homo sapiens
ttggatttagagaaa

SEQ ID NO: 1583110 - DNA, 15 bp, Homo sapiens
tttggatttagagaa

SEQ ID NO: 1583111 - DNA, 15 bp, Homo sapiens
ttttggatttagaga

SEQ ID NO: 1583112 - DNA, 15 bp, Homo sapiens
attttggatttagag

SEQ ID NO: 1583113 - DNA, 15 bp, Homo sapiens
tattttggatttaga

SEQ ID NO: 1583114 - DNA, 15 bp, Homo sapiens
gtattttggatttag

SEQ ID NO: 1583115 - DNA, 15 bp, Homo sapiens
tgtattttggattta

SEQ ID NO: 1583116 - DNA, 15 bp, Homo sapiens
ctgtattttggattt

SEQ ID NO: 1583117 - DNA, 15 bp, Homo sapiens
tctgtattttggatt

SEQ ID NO: 1583118 - DNA, 15 bp, Homo sapiens
ttctgtattttggat

SEQ ID NO: 1583119 - DNA, 15 bp, Homo sapiens
attctgtattttgga

SEQ ID NO: 1583120 - DNA, 15 bp, Homo sapiens
gattctgtattttgg

SEQ ID NO: 1583121 - DNA, 15 bp, Homo sapiens
tgattctgtattttg

SEQ ID NO: 1583122 - DNA, 15 bp, Homo sapiens
ctgattctgtatttt

SEQ ID NO: 1583123 - DNA, 15 bp, Homo sapiens
tctgattctgtattt

SEQ ID NO: 1583124 - DNA, 15 bp, Homo sapiens
ttctgattctgtatt

SEQ ID NO: 1583125 - DNA, 15 bp, Homo sapiens
cttctgattctgtat

SEQ ID NO: 1583126 - DNA, 15 bp, Homo sapiens
ccttctgattctgta

SEQ ID NO: 1583127 - DNA, 15 bp, Homo sapiens
tccttctgattctgt

SEQ ID NO: 1583128 - DNA, 15 bp, Homo sapiens
ttccttctgattctg

SEQ ID NO: 1583129 - DNA, 15 bp, Homo sapiens
attccttctgattct

SEQ ID NO: 1583130 - DNA, 15 bp, Homo sapiens
tattccttctgattc

SEQ ID NO: 1583131 - DNA, 15 bp, Homo sapiens
ttattccttctgatt

SEQ ID NO: 1583132 - DNA, 15 bp, Homo sapiens
gttattccttctgat

SEQ ID NO: 1583133 - DNA, 15 bp, Homo sapiens
agttattccttctga

SEQ ID NO: 1583134 - DNA, 15 bp, Homo sapiens
gagttattccttctg

SEQ ID NO: 1583135 - DNA, 15 bp, Homo sapiens
ggagttattccttct

SEQ ID NO: 1583136 - DNA, 15 bp, Homo sapiens
aggagttattccttc

SEQ ID NO: 1583137 - DNA, 15 bp, Homo sapiens
aaggagttattcctt

SEQ ID NO: 1583138 - DNA, 15 bp, Homo sapiens
gaaggagttattcct

SEQ ID NO: 1583139 - DNA, 15 bp, Homo sapiens
agaaggagttattcc

SEQ ID NO: 1583140 - DNA, 15 bp, Homo sapiens
tagaaggagttattc

SEQ ID NO: 1583141 - DNA, 15 bp, Homo sapiens
atagaaggagttatt

SEQ ID NO: 1583142 - DNA, 15 bp, Homo sapiens
aatagaaggagttat

SEQ ID NO: 1583143 - DNA, 15 bp, Homo sapiens
taatagaaggagtta

SEQ ID NO: 1583144 - DNA, 15 bp, Homo sapiens
ctaatagaaggagtt

SEQ ID NO: 1583145 - DNA, 15 bp, Homo sapiens
gctaatagaaggagt

SEQ ID NO: 1583146 - DNA, 15 bp, Homo sapiens
cgctaatagaaggag

SEQ ID NO: 1583147 - DNA, 15 bp, Homo sapiens
tcgctaatagaagga

SEQ ID NO: 1583148 - DNA, 15 bp, Homo sapiens
gtcgctaatagaagg

SEQ ID NO: 1583149 - DNA, 15 bp, Homo sapiens
agtcgctaatagaag

SEQ ID NO: 1583150 - DNA, 15 bp, Homo sapiens
aagtcgctaatagaa

SEQ ID NO: 1583151 - DNA, 15 bp, Homo sapiens
aaagtcgctaataga

SEQ ID NO: 1583152 - DNA, 15 bp, Homo sapiens
aaaagtcgctaatag

SEQ ID NO: 1583153 - DNA, 15 bp, Homo sapiens
caaaagtcgctaata

SEQ ID NO: 1583154 - DNA, 15 bp, Homo sapiens
acaaaagtcgctaat

SEQ ID NO: 1583155 - DNA, 15 bp, Homo sapiens
cacaaaagtcgctaa

SEQ ID NO: 1583156 - DNA, 15 bp, Homo sapiens
tcacaaaagtcgcta

SEQ ID NO: 1583157 - DNA, 15 bp, Homo sapiens
atcacaaaagtcgct

SEQ ID NO: 1583158 - DNA, 15 bp, Homo sapiens
gatcacaaaagtcgc

SEQ ID NO: 1583159 - DNA, 15 bp, Homo sapiens
agatcacaaaagtcg

SEQ ID NO: 1583160 - DNA, 15 bp, Homo sapiens
tagatcacaaaagtc

SEQ ID NO: 1583161 - DNA, 15 bp, Homo sapiens
gtagatcacaaaagt

SEQ ID NO: 1583162 - DNA, 15 bp, Homo sapiens
tgtagatcacaaaag

SEQ ID NO: 1583163 - DNA, 15 bp, Homo sapiens
ttgtagatcacaaaa

SEQ ID NO: 1583164 - DNA, 15 bp, Homo sapiens
tttgtagatcacaaa

SEQ ID NO: 1583165 - DNA, 15 bp, Homo sapiens
gtttgtagatcacaa

SEQ ID NO: 1583166 - DNA, 15 bp, Homo sapiens
agtttgtagatcaca

SEQ ID NO: 1583167 - DNA, 15 bp, Homo sapiens
gagtttgtagatcac

SEQ ID NO: 1583168 - DNA, 15 bp, Homo sapiens
tgagtttgtagatca

SEQ ID NO: 1583169 - DNA, 15 bp, Homo sapiens
ctgagtttgtagatc

SEQ ID NO: 1583170 - DNA, 15 bp, Homo sapiens
cctgagtttgtagat

SEQ ID NO: 1583171 - DNA, 15 bp, Homo sapiens
gcctgagtttgtaga

SEQ ID NO: 1583172 - DNA, 15 bp, Homo sapiens
tgcctgagtttgtag

SEQ ID NO: 1583173 - DNA, 15 bp, Homo sapiens
gtgcctgagtttgta

SEQ ID NO: 1583174 - DNA, 15 bp, Homo sapiens
tgtgcctgagtttgt

SEQ ID NO: 1583175 - DNA, 15 bp, Homo sapiens
atgtgcctgagtttg

SEQ ID NO: 1583176 - DNA, 15 bp, Homo sapiens
catgtgcctgagttt

SEQ ID NO: 1583177 - DNA, 15 bp, Homo sapiens
tcatgtgcctgagtt

SEQ ID NO: 1583178 - DNA, 15 bp, Homo sapiens
atcatgtgcctgagt

SEQ ID NO: 1583179 - DNA, 15 bp, Homo sapiens
gatcatgtgcctgag

SEQ ID NO: 1583180 - DNA, 15 bp, Homo sapiens
agatcatgtgcctga

SEQ ID NO: 1583181 - DNA, 15 bp, Homo sapiens
gagatcatgtgcctg

SEQ ID NO: 1583182 - DNA, 15 bp, Homo sapiens
tgagatcatgtgcct

SEQ ID NO: 1583183 - DNA, 15 bp, Homo sapiens
atgagatcatgtgcc

SEQ ID NO: 1583184 - DNA, 15 bp, Homo sapiens
gatgagatcatgtgc

SEQ ID NO: 1583185 - DNA, 15 bp, Homo sapiens
ggatgagatcatgtg

SEQ ID NO: 1583186 - DNA, 15 bp, Homo sapiens
aggatgagatcatgt

SEQ ID NO: 1583187 - DNA, 15 bp, Homo sapiens
caggatgagatcatg

SEQ ID NO: 1583188 - DNA, 15 bp, Homo sapiens
tcaggatgagatcat

SEQ ID NO: 1583189 - DNA, 15 bp, Homo sapiens
ttcaggatgagatca

SEQ ID NO: 1583190 - DNA, 15 bp, Homo sapiens
attcaggatgagatc

SEQ ID NO: 1583191 - DNA, 15 bp, Homo sapiens
aattcaggatgagat

SEQ ID NO: 1583192 - DNA, 15 bp, Homo sapiens
caattcaggatgaga

SEQ ID NO: 1583193 - DNA, 15 bp, Homo sapiens
acaattcaggatgag

SEQ ID NO: 1583194 - DNA, 15 bp, Homo sapiens
aacaattcaggatga

SEQ ID NO: 1583195 - DNA, 15 bp, Homo sapiens
aaacaattcaggatg

SEQ ID NO: 1583196 - DNA, 15 bp, Homo sapiens
caaacaattcaggat

SEQ ID NO: 1583197 - DNA, 15 bp, Homo sapiens
ccaaacaattcagga

SEQ ID NO: 1583198 - DNA, 15 bp, Homo sapiens
tccaaacaattcagg

SEQ ID NO: 1583199 - DNA, 15 bp, Homo sapiens
atccaaacaattcag

SEQ ID NO: 1583200 - DNA, 15 bp, Homo sapiens
gatccaaacaattca

SEQ ID NO: 1583201 - DNA, 15 bp, Homo sapiens
ggatccaaacaattc

SEQ ID NO: 1583202 - DNA, 15 bp, Homo sapiens
gggatccaaacaatt

SEQ ID NO: 1583203 - DNA, 15 bp, Homo sapiens
agggatccaaacaat

SEQ ID NO: 1583204 - DNA, 15 bp, Homo sapiens
tagggatccaaacaa

SEQ ID NO: 1583205 - DNA, 15 bp, Homo sapiens
ctagggatccaaaca

SEQ ID NO: 1583206 - DNA, 15 bp, Homo sapiens
gctagggatccaaac

SEQ ID NO: 1583207 - DNA, 15 bp, Homo sapiens
tgctagggatccaaa

SEQ ID NO: 1583208 - DNA, 15 bp, Homo sapiens
gtgctagggatccaa

SEQ ID NO: 1583209 - DNA, 15 bp, Homo sapiens
tgtgctagggatcca

SEQ ID NO: 1583210 - DNA, 15 bp, Homo sapiens
ttgtgctagggatcc

SEQ ID NO: 1583211 - DNA, 15 bp, Homo sapiens
tttgtgctagggatc

SEQ ID NO: 1583212 - DNA, 15 bp, Homo sapiens
gtttgtgctagggat

SEQ ID NO: 1583213 - DNA, 15 bp, Homo sapiens
ggtttgtgctaggga

SEQ ID NO: 1583214 - DNA, 15 bp, Homo sapiens
tggtttgtgctaggg

SEQ ID NO: 1583215 - DNA, 15 bp, Homo sapiens
ttggtttgtgctagg

SEQ ID NO: 1583216 - DNA, 15 bp, Homo sapiens
cttggtttgtgctag

SEQ ID NO: 1583217 - DNA, 15 bp, Homo sapiens
gcttggtttgtgcta

SEQ ID NO: 1583218 - DNA, 15 bp, Homo sapiens
ggcttggtttgtgct

SEQ ID NO: 1583219 - DNA, 15 bp, Homo sapiens
tggcttggtttgtgc

SEQ ID NO: 1583220 - DNA, 15 bp, Homo sapiens
ctggcttggtttgtg

SEQ ID NO: 1583221 - DNA, 15 bp, Homo sapiens
actggcttggtttgt

SEQ ID NO: 1583222 - DNA, 15 bp, Homo sapiens
tactggcttggtttg

SEQ ID NO: 1583223 - DNA, 15 bp, Homo sapiens
gtactggcttggttt

SEQ ID NO: 1583224 - DNA, 15 bp, Homo sapiens
tgtactggcttggtt

SEQ ID NO: 1583225 - DNA, 15 bp, Homo sapiens
gtgtactggcttggt

SEQ ID NO: 1583226 - DNA, 15 bp, Homo sapiens
tgtgtactggcttgg

SEQ ID NO: 1583227 - DNA, 15 bp, Homo sapiens
ctgtgtactggcttg

SEQ ID NO: 1583228 - DNA, 15 bp, Homo sapiens
cctgtgtactggctt

SEQ ID NO: 1583229 - DNA, 15 bp, Homo sapiens
ccctgtgtactggct

SEQ ID NO: 1583230 - DNA, 15 bp, Homo sapiens
gccctgtgtactggc

SEQ ID NO: 1583231 - DNA, 15 bp, Homo sapiens
tgccctgtgtactgg

SEQ ID NO: 1583232 - DNA, 15 bp, Homo sapiens
ctgccctgtgtactg

SEQ ID NO: 1583233 - DNA, 15 bp, Homo sapiens
cctgccctgtgtact

SEQ ID NO: 1583234 - DNA, 15 bp, Homo sapiens
acctgccctgtgtac

SEQ ID NO: 1583235 - DNA, 15 bp, Homo sapiens
aacctgccctgtgta

SEQ ID NO: 1583236 - DNA, 15 bp, Homo sapiens
caacctgccctgtgt

SEQ ID NO: 1583237 - DNA, 15 bp, Homo sapiens
acaacctgccctgtg

SEQ ID NO: 1583238 - DNA, 15 bp, Homo sapiens
cacaacctgccctgt

SEQ ID NO: 1583239 - DNA, 15 bp, Homo sapiens
tcacaacctgccctg

SEQ ID NO: 1583240 - DNA, 15 bp, Homo sapiens
gtcacaacctgccct

SEQ ID NO: 1583241 - DNA, 15 bp, Homo sapiens
ggtcacaacctgccc

SEQ ID NO: 1583242 - DNA, 15 bp, Homo sapiens
tggtcacaacctgcc

SEQ ID NO: 1583243 - DNA, 15 bp, Homo sapiens
atggtcacaacctgc

SEQ ID NO: 1583244 - DNA, 15 bp, Homo sapiens
aatggtcacaacctg

SEQ ID NO: 1583245 - DNA, 15 bp, Homo sapiens
aaatggtcacaacct

SEQ ID NO: 1583246 - DNA, 15 bp, Homo sapiens
aaaatggtcacaacc

SEQ ID NO: 1583247 - DNA, 15 bp, Homo sapiens
aaaaatggtcacaac

SEQ ID NO: 1583248 - DNA, 15 bp, Homo sapiens
aaaaaatggtcacaa

SEQ ID NO: 1583249 - DNA, 15 bp, Homo sapiens
taaaaaatggtcaca

SEQ ID NO: 1583250 - DNA, 15 bp, Homo sapiens
gtaaaaaatggtcac

SEQ ID NO: 1583251 - DNA, 15 bp, Homo sapiens
tgtaaaaaatggtca

SEQ ID NO: 1583252 - DNA, 15 bp, Homo sapiens
ctgtaaaaaatggtc

SEQ ID NO: 1583253 - DNA, 15 bp, Homo sapiens
gctgtaaaaaatggt

SEQ ID NO: 1583254 - DNA, 15 bp, Homo sapiens
agctgtaaaaaatgg

SEQ ID NO: 1583255 - DNA, 15 bp, Homo sapiens
gagctgtaaaaaatg

SEQ ID NO: 1583256 - DNA, 15 bp, Homo sapiens
tgagctgtaaaaaat

SEQ ID NO: 1583257 - DNA, 15 bp, Homo sapiens
ctgagctgtaaaaaa

SEQ ID NO: 1583258 - DNA, 15 bp, Homo sapiens
cctgagctgtaaaaa

SEQ ID NO: 1583259 - DNA, 15 bp, Homo sapiens
tcctgagctgtaaaa

SEQ ID NO: 1583260 - DNA, 15 bp, Homo sapiens
ttcctgagctgtaaa

SEQ ID NO: 1583261 - DNA, 15 bp, Homo sapiens
tttcctgagctgtaa

SEQ ID NO: 1583262 - DNA, 15 bp, Homo sapiens
gtttcctgagctgta

SEQ ID NO: 1583263 - DNA, 15 bp, Homo sapiens
tgtttcctgagctgt

SEQ ID NO: 1583264 - DNA, 15 bp, Homo sapiens
ctgtttcctgagctg

SEQ ID NO: 1583265 - DNA, 15 bp, Homo sapiens
cctgtttcctgagct

SEQ ID NO: 1583266 - DNA, 15 bp, Homo sapiens
acctgtttcctgagc

SEQ ID NO: 1583267 - DNA, 15 bp, Homo sapiens
cacctgtttcctgag

SEQ ID NO: 1583268 - DNA, 15 bp, Homo sapiens
gcacctgtttcctga

SEQ ID NO: 1583269 - DNA, 15 bp, Homo sapiens
agcacctgtttcctg

SEQ ID NO: 1583270 - DNA, 15 bp, Homo sapiens
gagcacctgtttcct

SEQ ID NO: 1583271 - DNA, 15 bp, Homo sapiens
cgagcacctgtttcc

SEQ ID NO: 1583272 - DNA, 15 bp, Homo sapiens
ccgagcacctgtttc

SEQ ID NO: 1583273 - DNA, 15 bp, Homo sapiens
tccgagcacctgttt

SEQ ID NO: 1583274 - DNA, 15 bp, Homo sapiens
ctccgagcacctgtt

SEQ ID NO: 1583275 - DNA, 15 bp, Homo sapiens
cctccgagcacctgt

SEQ ID NO: 1583276 - DNA, 15 bp, Homo sapiens
gcctccgagcacctg

SEQ ID NO: 1583277 - DNA, 15 bp, Homo sapiens
agcctccgagcacct

SEQ ID NO: 1583278 - DNA, 15 bp, Homo sapiens
cagcctccgagcacc

SEQ ID NO: 1583279 - DNA, 15 bp, Homo sapiens
acagcctccgagcac

SEQ ID NO: 1583280 - DNA, 15 bp, Homo sapiens
cacagcctccgagca

SEQ ID NO: 1583281 - DNA, 15 bp, Homo sapiens
acacagcctccgagc

SEQ ID NO: 1583282 - DNA, 15 bp, Homo sapiens
aacacagcctccgag

SEQ ID NO: 1583283 - DNA, 15 bp, Homo sapiens
aaacacagcctccga

SEQ ID NO: 1583284 - DNA, 15 bp, Homo sapiens
gaaacacagcctccg

SEQ ID NO: 1583285 - DNA, 15 bp, Homo sapiens
ggaaacacagcctcc

SEQ ID NO: 1583286 - DNA, 15 bp, Homo sapiens
aggaaacacagcctc

SEQ ID NO: 1583287 - DNA, 15 bp, Homo sapiens
gaggaaacacagcct

SEQ ID NO: 1583288 - DNA, 15 bp, Homo sapiens
tgaggaaacacagcc

SEQ ID NO: 1583289 - DNA, 15 bp, Homo sapiens
ctgaggaaacacagc

SEQ ID NO: 1583290 - DNA, 15 bp, Homo sapiens
gctgaggaaacacag

SEQ ID NO: 1583291 - DNA, 15 bp, Homo sapiens
cgctgaggaaacaca

SEQ ID NO: 1583292 - DNA, 15 bp, Homo sapiens
acgctgaggaaacac

SEQ ID NO: 1583293 - DNA, 15 bp, Homo sapiens
aacgctgaggaaaca

SEQ ID NO: 1583294 - DNA, 15 bp, Homo sapiens
aaacgctgaggaaac

SEQ ID NO: 1583295 - DNA, 15 bp, Homo sapiens
gaaacgctgaggaaa

SEQ ID NO: 1583296 - DNA, 15 bp, Homo sapiens
agaaacgctgaggaa

SEQ ID NO: 1583297 - DNA, 15 bp, Homo sapiens
gagaaacgctgagga

SEQ ID NO: 1583298 - DNA, 15 bp, Homo sapiens
cgagaaacgctgagg

SEQ ID NO: 1583299 - DNA, 15 bp, Homo sapiens
tcgagaaacgctgag

SEQ ID NO: 1583300 - DNA, 15 bp, Homo sapiens
ctcgagaaacgctga

SEQ ID NO: 1583301 - DNA, 15 bp, Homo sapiens
cctcgagaaacgctg

SEQ ID NO: 1583302 - DNA, 15 bp, Homo sapiens
gcctcgagaaacgct

SEQ ID NO: 1583303 - DNA, 15 bp, Homo sapiens
tgcctcgagaaacgc

SEQ ID NO: 1583304 - DNA, 15 bp, Homo sapiens
gtgcctcgagaaacg

SEQ ID NO: 1583305 - DNA, 15 bp, Homo sapiens
agtgcctcgagaaac

SEQ ID NO: 1583306 - DNA, 15 bp, Homo sapiens
cagtgcctcgagaaa

SEQ ID NO: 1583307 - DNA, 15 bp, Homo sapiens
ccagtgcctcgagaa

SEQ ID NO: 1583308 - DNA, 15 bp, Homo sapiens
cccagtgcctcgaga

SEQ ID NO: 1583309 - DNA, 15 bp, Homo sapiens
ccccagtgcctcgag

SEQ ID NO: 1583310 - DNA, 15 bp, Homo sapiens
cccccagtgcctcga

SEQ ID NO: 1583311 - DNA, 15 bp, Homo sapiens
ccccccagtgcctcg

SEQ ID NO: 1583312 - DNA, 15 bp, Homo sapiens
accccccagtgcctc

SEQ ID NO: 1583313 - DNA, 15 bp, Homo sapiens
aaccccccagtgcct

SEQ ID NO: 1583314 - DNA, 15 bp, Homo sapiens
gaaccccccagtgcc

SEQ ID NO: 1583315 - DNA, 15 bp, Homo sapiens
tgaaccccccagtgc

SEQ ID NO: 1583316 - DNA, 15 bp, Homo sapiens
ttgaaccccccagtg

SEQ ID NO: 1583317 - DNA, 15 bp, Homo sapiens
tttgaaccccccagt

SEQ ID NO: 1583318 - DNA, 15 bp, Homo sapiens
ctttgaaccccccag

SEQ ID NO: 1583319 - DNA, 15 bp, Homo sapiens
tctttgaacccccca

SEQ ID NO: 1583320 - DNA, 15 bp, Homo sapiens
atctttgaacccccc

SEQ ID NO: 1583321 - DNA, 15 bp, Homo sapiens
tatctttgaaccccc

SEQ ID NO: 1583322 - DNA, 15 bp, Homo sapiens
ctatctttgaacccc

SEQ ID NO: 1583323 - DNA, 15 bp, Homo sapiens
tctatctttgaaccc

SEQ ID NO: 1583324 - DNA, 15 bp, Homo sapiens
atctatctttgaacc

SEQ ID NO: 1583325 - DNA, 15 bp, Homo sapiens
tatctatctttgaac

SEQ ID NO: 1583326 - DNA, 15 bp, Homo sapiens
ttatctatctttgaa

SEQ ID NO: 1583327 - DNA, 15 bp, Homo sapiens
tttatctatctttga

SEQ ID NO: 1583328 - DNA, 15 bp, Homo sapiens
ttttatctatctttg

SEQ ID NO: 1583329 - DNA, 15 bp, Homo sapiens
gttttatctatcttt

SEQ ID NO: 1583330 - DNA, 15 bp, Homo sapiens
tgttttatctatctt

SEQ ID NO: 1583331 - DNA, 15 bp, Homo sapiens
ctgttttatctatct

SEQ ID NO: 1583332 - DNA, 15 bp, Homo sapiens
cctgttttatctatc

SEQ ID NO: 1583333 - DNA, 15 bp, Homo sapiens
ccctgttttatctat

SEQ ID NO: 1583334 - DNA, 15 bp, Homo sapiens
cccctgttttatcta

SEQ ID NO: 1583335 - DNA, 15 bp, Homo sapiens
gcccctgttttatct

SEQ ID NO: 1583336 - DNA, 15 bp, Homo sapiens
agcccctgttttatc

SEQ ID NO: 1583337 - DNA, 15 bp, Homo sapiens
gagcccctgttttat

SEQ ID NO: 1583338 - DNA, 15 bp, Homo sapiens
tgagcccctgtttta

SEQ ID NO: 1583339 - DNA, 15 bp, Homo sapiens
gtgagcccctgtttt

SEQ ID NO: 1583340 - DNA, 15 bp, Homo sapiens
ggtgagcccctgttt

SEQ ID NO: 1583341 - DNA, 15 bp, Homo sapiens
gggtgagcccctgtt

SEQ ID NO: 1583342 - DNA, 15 bp, Homo sapiens
agggtgagcccctgt

SEQ ID NO: 1583343 - DNA, 15 bp, Homo sapiens
gagggtgagcccctg

SEQ ID NO: 1583344 - DNA, 15 bp, Homo sapiens
tgagggtgagcccct

SEQ ID NO: 1583345 - DNA, 15 bp, Homo sapiens
ttgagggtgagcccc

SEQ ID NO: 1583346 - DNA, 15 bp, Homo sapiens
cttgagggtgagccc

SEQ ID NO: 1583347 - DNA, 15 bp, Homo sapiens
ccttgagggtgagcc

SEQ ID NO: 1583348 - DNA, 15 bp, Homo sapiens
tccttgagggtgagc

SEQ ID NO: 1583349 - DNA, 15 bp, Homo sapiens
ctccttgagggtgag

SEQ ID NO: 1583350 - DNA, 15 bp, Homo sapiens
cctccttgagggtga

SEQ ID NO: 1583351 - DNA, 15 bp, Homo sapiens
ccctccttgagggtg

SEQ ID NO: 1583352 - DNA, 15 bp, Homo sapiens
tccctccttgagggt

SEQ ID NO: 1583353 - DNA, 15 bp, Homo sapiens
ttccctccttgaggg

SEQ ID NO: 1583354 - DNA, 15 bp, Homo sapiens
cttccctccttgagg

SEQ ID NO: 1583355 - DNA, 15 bp, Homo sapiens
gcttccctccttgag

SEQ ID NO: 1583356 - DNA, 15 bp, Homo sapiens
ggcttccctccttga

SEQ ID NO: 1583357 - DNA, 15 bp, Homo sapiens
tggcttccctccttg

SEQ ID NO: 1583358 - DNA, 15 bp, Homo sapiens
ctggcttccctcctt

SEQ ID NO: 1583359 - DNA, 15 bp, Homo sapiens
tctggcttccctcct

SEQ ID NO: 1583360 - DNA, 15 bp, Homo sapiens
ttctggcttccctcc

SEQ ID NO: 1583361 - DNA, 15 bp, Homo sapiens
tttctggcttccctc

SEQ ID NO: 1583362 - DNA, 15 bp, Homo sapiens
ttttctggcttccct

SEQ ID NO: 1583363 - DNA, 15 bp, Homo sapiens
gttttctggcttccc

SEQ ID NO: 1583364 - DNA, 15 bp, Homo sapiens
tgttttctggcttcc

SEQ ID NO: 1583365 - DNA, 15 bp, Homo sapiens
gtgttttctggcttc

SEQ ID NO: 1583366 - DNA, 15 bp, Homo sapiens
tgtgttttctggctt

SEQ ID NO: 1583367 - DNA, 15 bp, Homo sapiens
gtgtgttttctggct

SEQ ID NO: 1583368 - DNA, 15 bp, Homo sapiens
tgtgtgttttctggc

SEQ ID NO: 1583369 - DNA, 15 bp, Homo sapiens
gtgtgtgttttctgg

SEQ ID NO: 1583370 - DNA, 15 bp, Homo sapiens
agtgtgtgttttctg

SEQ ID NO: 1583371 - DNA, 15 bp, Homo sapiens
cagtgtgtgttttct

SEQ ID NO: 1583372 - DNA, 15 bp, Homo sapiens
ccagtgtgtgttttc

SEQ ID NO: 1583373 - DNA, 15 bp, Homo sapiens
accagtgtgtgtttt

SEQ ID NO: 1583374 - DNA, 15 bp, Homo sapiens
aaccagtgtgtgttt

SEQ ID NO: 1583375 - DNA, 15 bp, Homo sapiens
aaaccagtgtgtgtt

SEQ ID NO: 1583376 - DNA, 15 bp, Homo sapiens
taaaccagtgtgtgt

SEQ ID NO: 1583377 - DNA, 15 bp, Homo sapiens
gtaaaccagtgtgtg

SEQ ID NO: 1583378 - DNA, 15 bp, Homo sapiens
agtaaaccagtgtgt

SEQ ID NO: 1583379 - DNA, 15 bp, Homo sapiens
gagtaaaccagtgtg

SEQ ID NO: 1583380 - DNA, 15 bp, Homo sapiens
agagtaaaccagtgt

SEQ ID NO: 1583381 - DNA, 15 bp, Homo sapiens
cagagtaaaccagtg

SEQ ID NO: 1583382 - DNA, 15 bp, Homo sapiens
ccagagtaaaccagt

SEQ ID NO: 1583383 - DNA, 15 bp, Homo sapiens
gccagagtaaaccag

SEQ ID NO: 1583384 - DNA, 15 bp, Homo sapiens
agccagagtaaacca

SEQ ID NO: 1583385 - DNA, 15 bp, Homo sapiens
cagccagagtaaacc

SEQ ID NO: 1583386 - DNA, 15 bp, Homo sapiens
acagccagagtaaac

SEQ ID NO: 1583387 - DNA, 15 bp, Homo sapiens
cacagccagagtaaa

SEQ ID NO: 1583388 - DNA, 15 bp, Homo sapiens
tcacagccagagtaa

SEQ ID NO: 1583389 - DNA, 15 bp, Homo sapiens
atcacagccagagta

SEQ ID NO: 1583390 - DNA, 15 bp, Homo sapiens
catcacagccagagt

SEQ ID NO: 1583391 - DNA, 15 bp, Homo sapiens
ccatcacagccagag

SEQ ID NO: 1583392 - DNA, 15 bp, Homo sapiens
tcccatcacagccag

SEQ ID NO: 1583393 - DNA, 15 bp, Homo sapiens
ctcccatcacagcca

SEQ ID NO: 1583394 - DNA, 15 bp, Homo sapiens
actcccatcacagcc

SEQ ID NO: 1583395 - DNA, 15 bp, Homo sapiens
cactcccatcacagc

SEQ ID NO: 1583396 - DNA, 15 bp, Homo sapiens
tcactcccatcacag

SEQ ID NO: 1583397 - DNA, 15 bp, Homo sapiens
gtcactcccatcaca

SEQ ID NO: 1583398 - DNA, 15 bp, Homo sapiens
agtcactcccatcac

SEQ ID NO: 1583399 - DNA, 15 bp, Homo sapiens
gagtcactcccatca

SEQ ID NO: 1583400 - DNA, 15 bp, Homo sapiens
ggagtcactcccatc

SEQ ID NO: 1583401 - DNA, 15 bp, Homo sapiens
tggagtcactcccat

SEQ ID NO: 1583402 - DNA, 15 bp, Homo sapiens
ctggagtcactccca

SEQ ID NO: 1583403 - DNA, 15 bp, Homo sapiens
cctggagtcactccc

SEQ ID NO: 1583404 - DNA, 15 bp, Homo sapiens
ccctggagtcactcc

SEQ ID NO: 1583405 - DNA, 15 bp, Homo sapiens
accctggagtcactc

SEQ ID NO: 1583406 - DNA, 15 bp, Homo sapiens
caccctggagtcact

SEQ ID NO: 1583407 - DNA, 15 bp, Homo sapiens
acaccctggagtcac

SEQ ID NO: 1583408 - DNA, 15 bp, Homo sapiens
cacaccctggagtca

SEQ ID NO: 1583409 - DNA, 15 bp, Homo sapiens
ccacaccctggagtc

SEQ ID NO: 1583410 - DNA, 15 bp, Homo sapiens
gccacaccctggagt

SEQ ID NO: 1583411 - DNA, 15 bp, Homo sapiens
cgccacaccctggag

SEQ ID NO: 1583412 - DNA, 15 bp, Homo sapiens
ccgccacaccctgga

SEQ ID NO: 1583413 - DNA, 15 bp, Homo sapiens
cccgccacaccctgg

SEQ ID NO: 1583414 - DNA, 15 bp, Homo sapiens
tcccgccacaccctg

SEQ ID NO: 1583415 - DNA, 15 bp, Homo sapiens
ctcccgccacaccct

SEQ ID NO: 1583416 - DNA, 15 bp, Homo sapiens
gctcccgccacaccc

SEQ ID NO: 1583417 - DNA, 15 bp, Homo sapiens
ggctcccgccacacc

SEQ ID NO: 1583418 - DNA, 15 bp, Homo sapiens
gggctcccgccacac

SEQ ID NO: 1583419 - DNA, 15 bp, Homo sapiens
tgggctcccgccaca

SEQ ID NO: 1583420 - DNA, 15 bp, Homo sapiens
gtgggctcccgccac

SEQ ID NO: 1583421 - DNA, 15 bp, Homo sapiens
tgtgggctcccgcca

SEQ ID NO: 1583422 - DNA, 15 bp, Homo sapiens
ttgtgggctcccgcc

SEQ ID NO: 1583423 - DNA, 15 bp, Homo sapiens
cttgtgggctcccgc

SEQ ID NO: 1583424 - DNA, 15 bp, Homo sapiens
tcttgtgggctcccg

SEQ ID NO: 1583425 - DNA, 15 bp, Homo sapiens
ctcttgtgggctccc

SEQ ID NO: 1583426 - DNA, 15 bp, Homo sapiens
gctcttgtgggctcc

SEQ ID NO: 1583427 - DNA, 15 bp, Homo sapiens
cgctcttgtgggctc

SEQ ID NO: 1583428 - DNA, 15 bp, Homo sapiens
ccgctcttgtgggct

SEQ ID NO: 1583429 - DNA, 15 bp, Homo sapiens
accgctcttgtgggc

SEQ ID NO: 1583430 - DNA, 15 bp, Homo sapiens
taccgctcttgtggg

SEQ ID NO: 1583431 - DNA, 15 bp, Homo sapiens
gtaccgctcttgtgg

SEQ ID NO: 1583432 - DNA, 15 bp, Homo sapiens
agtaccgctcttgtg

SEQ ID NO: 1583433 - DNA, 15 bp, Homo sapiens
cagtaccgctcttgt

SEQ ID NO: 1583434 - DNA, 15 bp, Homo sapiens
gcagtaccgctcttg

SEQ ID NO: 1583435 - DNA, 15 bp, Homo sapiens
tgcagtaccgctctt

SEQ ID NO: 1583436 - DNA, 15 bp, Homo sapiens
gtgcagtaccgctct

SEQ ID NO: 1583437 - DNA, 15 bp, Homo sapiens
tgtgcagtaccgctc

SEQ ID NO: 1583438 - DNA, 15 bp, Homo sapiens
ctgtgcagtaccgct

SEQ ID NO: 1583439 - DNA, 15 bp, Homo sapiens
gctgtgcagtaccgc

SEQ ID NO: 1583440 - DNA, 15 bp, Homo sapiens
agctgtgcagtaccg

SEQ ID NO: 1583441 - DNA, 15 bp, Homo sapiens
cagctgtgcagtacc

SEQ ID NO: 1583442 - DNA, 15 bp, Homo sapiens
ccagctgtgcagtac

SEQ ID NO: 1583443 - DNA, 15 bp, Homo sapiens
tccagctgtgcagta

SEQ ID NO: 1583444 - DNA, 15 bp, Homo sapiens
ttccagctgtgcagt

SEQ ID NO: 1583445 - DNA, 15 bp, Homo sapiens
tttccagctgtgcag

SEQ ID NO: 1583446 - DNA, 15 bp, Homo sapiens
ttttccagctgtgca

SEQ ID NO: 1583447 - DNA, 15 bp, Homo sapiens
tttttccagctgtgc

SEQ ID NO: 1583448 - DNA, 15 bp, Homo sapiens
ctttttccagctgtg

SEQ ID NO: 1583449 - DNA, 15 bp, Homo sapiens
cctttttccagctgt

SEQ ID NO: 1583450 - DNA, 15 bp, Homo sapiens
gcctttttccagctg

SEQ ID NO: 1583451 - DNA, 15 bp, Homo sapiens
tgcctttttccagct

SEQ ID NO: 1583452 - DNA, 15 bp, Homo sapiens
ttgcctttttccagc

SEQ ID NO: 1583453 - DNA, 15 bp, Homo sapiens
tttgcctttttccag

SEQ ID NO: 1583454 - DNA, 15 bp, Homo sapiens
ctttgcctttttcca

SEQ ID NO: 1583455 - DNA, 15 bp, Homo sapiens
gctttgcctttttcc

SEQ ID NO: 1583456 - DNA, 15 bp, Homo sapiens
ggctttgcctttttc

SEQ ID NO: 1583457 - DNA, 15 bp, Homo sapiens
tggctttgccttttt

SEQ ID NO: 1583458 - DNA, 15 bp, Homo sapiens
ctggctttgcctttt

SEQ ID NO: 1583459 - DNA, 15 bp, Homo sapiens
cctggctttgccttt

SEQ ID NO: 1583460 - DNA, 15 bp, Homo sapiens
ccctggctttgcctt

SEQ ID NO: 1583461 - DNA, 15 bp, Homo sapiens
accctggctttgcct

SEQ ID NO: 1583462 - DNA, 15 bp, Homo sapiens
aaccctggctttgcc

SEQ ID NO: 1583463 - DNA, 15 bp, Homo sapiens
gaaccctggctttgc

SEQ ID NO: 1583464 - DNA, 15 bp, Homo sapiens
tgaaccctggctttg

SEQ ID NO: 1583465 - DNA, 15 bp, Homo sapiens
ttgaaccctggcttt

SEQ ID NO: 1583466 - DNA, 15 bp, Homo sapiens
tttgaaccctggctt

SEQ ID NO: 1583467 - DNA, 15 bp, Homo sapiens
gtttgaaccctggct

SEQ ID NO: 1583468 - DNA, 15 bp, Homo sapiens
ggtttgaaccctggc

SEQ ID NO: 1583469 - DNA, 15 bp, Homo sapiens
aggtttgaaccctgg

SEQ ID NO: 1583470 - DNA, 15 bp, Homo sapiens
taggtttgaaccctg

SEQ ID NO: 1583471 - DNA, 15 bp, Homo sapiens
ctaggtttgaaccct

SEQ ID NO: 1583472 - DNA, 15 bp, Homo sapiens
cctaggtttgaaccc

SEQ ID NO: 1583473 - DNA, 15 bp, Homo sapiens
tcctaggtttgaacc

SEQ ID NO: 1583474 - DNA, 15 bp, Homo sapiens
gtcctaggtttgaac

SEQ ID NO: 1583475 - DNA, 15 bp, Homo sapiens
cgtcctaggtttgaa

SEQ ID NO: 1583476 - DNA, 15 bp, Homo sapiens
ccgtcctaggtttga

SEQ ID NO: 1583477 - DNA, 15 bp, Homo sapiens
tccgtcctaggtttg

SEQ ID NO: 1583478 - DNA, 15 bp, Homo sapiens
gtccgtcctaggttt

SEQ ID NO: 1583479 - DNA, 15 bp, Homo sapiens
agtccgtcctaggtt

SEQ ID NO: 1583480 - DNA, 15 bp, Homo sapiens
aagtccgtcctaggt

SEQ ID NO: 1583481 - DNA, 15 bp, Homo sapiens
gaagtccgtcctagg

SEQ ID NO: 1583482 - DNA, 15 bp, Homo sapiens
ggaagtccgtcctag

SEQ ID NO: 1583483 - DNA, 15 bp, Homo sapiens
tggaagtccgtccta

SEQ ID NO: 1583484 - DNA, 15 bp, Homo sapiens
gtggaagtccgtcct

SEQ ID NO: 1583485 - DNA, 15 bp, Homo sapiens
agtggaagtccgtcc

SEQ ID NO: 1583486 - DNA, 15 bp, Homo sapiens
gagtggaagtccgtc

SEQ ID NO: 1583487 - DNA, 15 bp, Homo sapiens
tgagtggaagtccgt

SEQ ID NO: 1583488 - DNA, 15 bp, Homo sapiens
ttgagtggaagtccg

SEQ ID NO: 1583489 - DNA, 15 bp, Homo sapiens
cttgagtggaagtcc

SEQ ID NO: 1583490 - DNA, 15 bp, Homo sapiens
ccttgagtggaagtc

SEQ ID NO: 1583491 - DNA, 15 bp, Homo sapiens
tccttgagtggaagt

SEQ ID NO: 1583492 - DNA, 15 bp, Homo sapiens
gtccttgagtggaag

SEQ ID NO: 1583493 - DNA, 15 bp, Homo sapiens
agtccttgagtggaa

SEQ ID NO: 1583494 - DNA, 15 bp, Homo sapiens
gagtccttgagtgga

SEQ ID NO: 1583495 - DNA, 15 bp, Homo sapiens
ggagtccttgagtgg

SEQ ID NO: 1583496 - DNA, 15 bp, Homo sapiens
aggagtccttgagtg

SEQ ID NO: 1583497 - DNA, 15 bp, Homo sapiens
gaggagtccttgagt

SEQ ID NO: 1583498 - DNA, 15 bp, Homo sapiens
agaggagtccttgag

SEQ ID NO: 1583499 - DNA, 15 bp, Homo sapiens
gagaggagtccttga

SEQ ID NO: 1583500 - DNA, 15 bp, Homo sapiens
tgagaggagtccttg

SEQ ID NO: 1583501 - DNA, 15 bp, Homo sapiens
gtgagaggagtcctt

SEQ ID NO: 1583502 - DNA, 15 bp, Homo sapiens
cgtgagaggagtcct

SEQ ID NO: 1583503 - DNA, 15 bp, Homo sapiens
tcgtgagaggagtcc

SEQ ID NO: 1583504 - DNA, 15 bp, Homo sapiens
gtcgtgagaggagtc

SEQ ID NO: 1583505 - DNA, 15 bp, Homo sapiens
ggtcgtgagaggagt

SEQ ID NO: 1583506 - DNA, 15 bp, Homo sapiens
aggtcgtgagaggag

SEQ ID NO: 1583507 - DNA, 15 bp, Homo sapiens
aaggtcgtgagagga

SEQ ID NO: 1583508 - DNA, 15 bp, Homo sapiens
caaggtcgtgagagg

SEQ ID NO: 1583509 - DNA, 15 bp, Homo sapiens
ccaaggtcgtgagag

SEQ ID NO: 1583510 - DNA, 15 bp, Homo sapiens
tccaaggtcgtgaga

SEQ ID NO: 1583511 - DNA, 15 bp, Homo sapiens
ttccaaggtcgtgag

SEQ ID NO: 1583512 - DNA, 15 bp, Homo sapiens
attccaaggtcgtga

SEQ ID NO: 1583513 - DNA, 15 bp, Homo sapiens
cattccaaggtcgtg

SEQ ID NO: 1583514 - DNA, 15 bp, Homo sapiens
gcattccaaggtcgt

SEQ ID NO: 1583515 - DNA, 15 bp, Homo sapiens
agcattccaaggtcg

SEQ ID NO: 1583516 - DNA, 15 bp, Homo sapiens
cagcattccaaggtc

SEQ ID NO: 1583517 - DNA, 15 bp, Homo sapiens
tcagcattccaaggt

SEQ ID NO: 1583518 - DNA, 15 bp, Homo sapiens
ctcagcattccaagg

SEQ ID NO: 1583519 - DNA, 15 bp, Homo sapiens
tctcagcattccaag

SEQ ID NO: 1583520 - DNA, 15 bp, Homo sapiens
ctctcagcattccaa

SEQ ID NO: 1583521 - DNA, 15 bp, Homo sapiens
tctctcagcattcca

SEQ ID NO: 1583522 - DNA, 15 bp, Homo sapiens
atctctcagcattcc

SEQ ID NO: 1583523 - DNA, 15 bp, Homo sapiens
gatctctcagcattc

SEQ ID NO: 1583524 - DNA, 15 bp, Homo sapiens
tgatctctcagcatt

SEQ ID NO: 1583525 - DNA, 15 bp, Homo sapiens
ttgatctctcagcat

SEQ ID NO: 1583526 - DNA, 15 bp, Homo sapiens
cttgatctctcagca

SEQ ID NO: 1583527 - DNA, 15 bp, Homo sapiens
tcttgatctctcagc

SEQ ID NO: 1583528 - DNA, 15 bp, Homo sapiens
ttcttgatctctcag

SEQ ID NO: 1583529 - DNA, 15 bp, Homo sapiens
tttcttgatctctca

SEQ ID NO: 1583530 - DNA, 15 bp, Homo sapiens
atttcttgatctctc

SEQ ID NO: 1583531 - DNA, 15 bp, Homo sapiens
catttcttgatctct

SEQ ID NO: 1583532 - DNA, 15 bp, Homo sapiens
ccatttcttgatctc

SEQ ID NO: 1583533 - DNA, 15 bp, Homo sapiens
accatttcttgatct

SEQ ID NO: 1583534 - DNA, 15 bp, Homo sapiens
caccatttcttgatc

SEQ ID NO: 1583535 - DNA, 15 bp, Homo sapiens
gcaccatttcttgat

SEQ ID NO: 1583536 - DNA, 15 bp, Homo sapiens
tgcaccatttcttga

SEQ ID NO: 1583537 - DNA, 15 bp, Homo sapiens
ttgcaccatttcttg

SEQ ID NO: 1583538 - DNA, 15 bp, Homo sapiens
tttgcaccatttctt

SEQ ID NO: 1583539 - DNA, 15 bp, Homo sapiens
ttttgcaccatttct

SEQ ID NO: 1583540 - DNA, 15 bp, Homo sapiens
tttttgcaccatttc

SEQ ID NO: 1583541 - DNA, 15 bp, Homo sapiens
gtttttgcaccattt

SEQ ID NO: 1583542 - DNA, 15 bp, Homo sapiens
ggtttttgcaccatt

SEQ ID NO: 1583543 - DNA, 15 bp, Homo sapiens
gggtttttgcaccat

SEQ ID NO: 1583544 - DNA, 15 bp, Homo sapiens
tgggtttttgcacca

SEQ ID NO: 1583545 - DNA, 15 bp, Homo sapiens
gtgggtttttgcacc

SEQ ID NO: 1583546 - DNA, 15 bp, Homo sapiens
tgtgggtttttgcac

SEQ ID NO: 1583547 - DNA, 15 bp, Homo sapiens
gtgtgggtttttgca

SEQ ID NO: 1583548 - DNA, 15 bp, Homo sapiens
tgtgtgggtttttgc

SEQ ID NO: 1583549 - DNA, 15 bp, Homo sapiens
gtgtgtgggtttttg

SEQ ID NO: 1583550 - DNA, 15 bp, Homo sapiens
cgtgtgtgggttttt

SEQ ID NO: 1583551 - DNA, 15 bp, Homo sapiens
tcgtgtgtgggtttt

SEQ ID NO: 1583552 - DNA, 15 bp, Homo sapiens
ttcgtgtgtgggttt

SEQ ID NO: 1583553 - DNA, 15 bp, Homo sapiens
attcgtgtgtgggtt

SEQ ID NO: 1583554 - DNA, 15 bp, Homo sapiens
gattcgtgtgtgggt

SEQ ID NO: 1583555 - DNA, 15 bp, Homo sapiens
agattcgtgtgtggg

SEQ ID NO: 1583556 - DNA, 15 bp, Homo sapiens
gagattcgtgtgtgg

SEQ ID NO: 1583557 - DNA, 15 bp, Homo sapiens
ggagattcgtgtgtg

SEQ ID NO: 1583558 - DNA, 15 bp, Homo sapiens
tggagattcgtgtgt

SEQ ID NO: 1583559 - DNA, 15 bp, Homo sapiens
atggagattcgtgtg

SEQ ID NO: 1583560 - DNA, 15 bp, Homo sapiens
aatggagattcgtgt

SEQ ID NO: 1583561 - DNA, 15 bp, Homo sapiens
taatggagattcgtg

SEQ ID NO: 1583562 - DNA, 15 bp, Homo sapiens
gtaatggagattcgt

SEQ ID NO: 1583563 - DNA, 15 bp, Homo sapiens
tgtaatggagattcg

SEQ ID NO: 1583564 - DNA, 15 bp, Homo sapiens
ttgtaatggagattc

SEQ ID NO: 1583565 - DNA, 15 bp, Homo sapiens
gttgtaatggagatt

SEQ ID NO: 1583566 - DNA, 15 bp, Homo sapiens
ggttgtaatggagat

SEQ ID NO: 1583567 - DNA, 15 bp, Homo sapiens
gggttgtaatggaga

SEQ ID NO: 1583568 - DNA, 15 bp, Homo sapiens
agggttgtaatggag

SEQ ID NO: 1583569 - DNA, 15 bp, Homo sapiens
gagggttgtaatgga

SEQ ID NO: 1583570 - DNA, 15 bp, Homo sapiens
agagggttgtaatgg

SEQ ID NO: 1583571 - DNA, 15 bp, Homo sapiens
gagagggttgtaatg

SEQ ID NO: 1583572 - DNA, 15 bp, Homo sapiens
agagagggttgtaat

SEQ ID NO: 1583573 - DNA, 15 bp, Homo sapiens
tagagagggttgtaa

SEQ ID NO: 1583574 - DNA, 15 bp, Homo sapiens
atagagagggttgta

SEQ ID NO: 1583575 - DNA, 15 bp, Homo sapiens
gatagagagggttgt

SEQ ID NO: 1583576 - DNA, 15 bp, Homo sapiens
agatagagagggttg

SEQ ID NO: 1583577 - DNA, 15 bp, Homo sapiens
gagatagagagggtt

SEQ ID NO: 1583578 - DNA, 15 bp, Homo sapiens
tgagatagagagggt

SEQ ID NO: 1583579 - DNA, 15 bp, Homo sapiens
gtgagatagagaggg

SEQ ID NO: 1583580 - DNA, 15 bp, Homo sapiens
agtgagatagagagg

SEQ ID NO: 1583581 - DNA, 15 bp, Homo sapiens
cagtgagatagagag

SEQ ID NO: 1583582 - DNA, 15 bp, Homo sapiens
ccagtgagatagaga

SEQ ID NO: 1583583 - DNA, 15 bp, Homo sapiens
tccagtgagatagag

SEQ ID NO: 1583584 - DNA, 15 bp, Homo sapiens
atccagtgagataga

SEQ ID NO: 1583585 - DNA, 15 bp, Homo sapiens
gatccagtgagatag

SEQ ID NO: 1583586 - DNA, 15 bp, Homo sapiens
ggatccagtgagata

SEQ ID NO: 1583587 - DNA, 15 bp, Homo sapiens
aggatccagtgagat

SEQ ID NO: 1583588 - DNA, 15 bp, Homo sapiens
taggatccagtgaga

SEQ ID NO: 1583589 - DNA, 15 bp, Homo sapiens
ctaggatccagtgag

SEQ ID NO: 1583590 - DNA, 15 bp, Homo sapiens
tctaggatccagtga

SEQ ID NO: 1583591 - DNA, 15 bp, Homo sapiens
ctctaggatccagtg

SEQ ID NO: 1583592 - DNA, 15 bp, Homo sapiens
actctaggatccagt

SEQ ID NO: 1583593 - DNA, 15 bp, Homo sapiens
tactctaggatccag

SEQ ID NO: 1583594 - DNA, 15 bp, Homo sapiens
ttactctaggatcca

SEQ ID NO: 1583595 - DNA, 15 bp, Homo sapiens
gttactctaggatcc

SEQ ID NO: 1583596 - DNA, 15 bp, Homo sapiens
tgttactctaggatc

SEQ ID NO: 1583597 - DNA, 15 bp, Homo sapiens
atgttactctaggat

SEQ ID NO: 1583598 - DNA, 15 bp, Homo sapiens
gatgttactctagga

SEQ ID NO: 1583599 - DNA, 15 bp, Homo sapiens
agatgttactctagg

SEQ ID NO: 1583600 - DNA, 15 bp, Homo sapiens
cagatgttactctag

SEQ ID NO: 1583601 - DNA, 15 bp, Homo sapiens
acagatgttactcta

SEQ ID NO: 1583602 - DNA, 15 bp, Homo sapiens
gacagatgttactct

SEQ ID NO: 1583603 - DNA, 15 bp, Homo sapiens
tgacagatgttactc

SEQ ID NO: 1583604 - DNA, 15 bp, Homo sapiens
ctgacagatgttact

SEQ ID NO: 1583605 - DNA, 15 bp, Homo sapiens
tctgacagatgttac

SEQ ID NO: 1583606 - DNA, 15 bp, Homo sapiens
ttctgacagatgtta

SEQ ID NO: 1583607 - DNA, 15 bp, Homo sapiens
tttctgacagatgtt

SEQ ID NO: 1583608 - DNA, 15 bp, Homo sapiens
ctttctgacagatgt

SEQ ID NO: 1583609 - DNA, 15 bp, Homo sapiens
actttctgacagatg

SEQ ID NO: 1583610 - DNA, 15 bp, Homo sapiens
tactttctgacagat

SEQ ID NO: 1583611 - DNA, 15 bp, Homo sapiens
ttactttctgacaga

SEQ ID NO: 1583612 - DNA, 15 bp, Homo sapiens
gttactttctgacag

SEQ ID NO: 1583613 - DNA, 15 bp, Homo sapiens
agttactttctgaca

SEQ ID NO: 1583614 - DNA, 15 bp, Homo sapiens
tagttactttctgac

SEQ ID NO: 1583615 - DNA, 15 bp, Homo sapiens
gtagttactttctga

SEQ ID NO: 1583616 - DNA, 15 bp, Homo sapiens
tgtagttactttctg

SEQ ID NO: 1583617 - DNA, 15 bp, Homo sapiens
atgtagttactttct

SEQ ID NO: 1583618 - DNA, 15 bp, Homo sapiens
tatgtagttactttc

SEQ ID NO: 1583619 - DNA, 15 bp, Homo sapiens
atatgtagttacttt

SEQ ID NO: 1583620 - DNA, 15 bp, Homo sapiens
aatatgtagttactt

SEQ ID NO: 1583621 - DNA, 15 bp, Homo sapiens
taatatgtagttact

SEQ ID NO: 1583622 - DNA, 15 bp, Homo sapiens
ataatatgtagttac

SEQ ID NO: 1583623 - DNA, 15 bp, Homo sapiens
aataatatgtagtta

SEQ ID NO: 1583624 - DNA, 15 bp, Homo sapiens
aaataatatgtagtt

SEQ ID NO: 1583625 - DNA, 15 bp, Homo sapiens
caaataatatgtagt

SEQ ID NO: 1583626 - DNA, 15 bp, Homo sapiens
cccaaataatatgta

SEQ ID NO: 1583627 - DNA, 15 bp, Homo sapiens
acccaaataatatgt

SEQ ID NO: 1583628 - DNA, 15 bp, Homo sapiens
cacccaaataatatg

SEQ ID NO: 1583629 - DNA, 15 bp, Homo sapiens
tcacccaaataatat

SEQ ID NO: 1583630 - DNA, 15 bp, Homo sapiens
atcacccaaataata

SEQ ID NO: 1583631 - DNA, 15 bp, Homo sapiens
aatcacccaaataat

SEQ ID NO: 1583632 - DNA, 15 bp, Homo sapiens
aaatcacccaaataa

SEQ ID NO: 1583633 - DNA, 15 bp, Homo sapiens
taaatcacccaaata

SEQ ID NO: 1583634 - DNA, 15 bp, Homo sapiens
ataaatcacccaaat

SEQ ID NO: 1583635 - DNA, 15 bp, Homo sapiens
aataaatcacccaaa

SEQ ID NO: 1583636 - DNA, 15 bp, Homo sapiens
caataaatcacccaa

SEQ ID NO: 1583637 - DNA, 15 bp, Homo sapiens
acaataaatcaccca

SEQ ID NO: 1583638 - DNA, 15 bp, Homo sapiens
cacaataaatcaccc

SEQ ID NO: 1583639 - DNA, 15 bp, Homo sapiens
tcacaataaatcacc

SEQ ID NO: 1583640 - DNA, 15 bp, Homo sapiens
ttcacaataaatcac

SEQ ID NO: 1583641 - DNA, 15 bp, Homo sapiens
attcacaataaatca

SEQ ID NO: 1583642 - DNA, 15 bp, Homo sapiens
cattcacaataaatc

SEQ ID NO: 1583643 - DNA, 15 bp, Homo sapiens
acattcacaataaat

SEQ ID NO: 1583644 - DNA, 15 bp, Homo sapiens
cacattcacaataaa

SEQ ID NO: 1583645 - DNA, 15 bp, Homo sapiens
acacattcacaataa

SEQ ID NO: 1583646 - DNA, 15 bp, Homo sapiens
tacacattcacaata

SEQ ID NO: 1583647 - DNA, 15 bp, Homo sapiens
ttacacattcacaat

SEQ ID NO: 1583648 - DNA, 15 bp, Homo sapiens
cttacacattcacaa

SEQ ID NO: 1583649 - DNA, 15 bp, Homo sapiens
acttacacattcaca

SEQ ID NO: 1583650 - DNA, 15 bp, Homo sapiens
aacttacacattcac

SEQ ID NO: 1583651 - DNA, 15 bp, Homo sapiens
gaacttacacattca

SEQ ID NO: 1583652 - DNA, 15 bp, Homo sapiens
ggaacttacacattc

SEQ ID NO: 1583653 - DNA, 15 bp, Homo sapiens
cggaacttacacatt

SEQ ID NO: 1583654 - DNA, 15 bp, Homo sapiens
acggaacttacacat

SEQ ID NO: 1583655 - DNA, 15 bp, Homo sapiens
cacggaacttacaca

SEQ ID NO: 1583656 - DNA, 15 bp, Homo sapiens
acacggaacttacac

SEQ ID NO: 1583657 - DNA, 15 bp, Homo sapiens
cacacggaacttaca

SEQ ID NO: 1583658 - DNA, 15 bp, Homo sapiens
tcacacggaacttac

SEQ ID NO: 1583659 - DNA, 15 bp, Homo sapiens
ctcacacggaactta

SEQ ID NO: 1583660 - DNA, 15 bp, Homo sapiens
actcacacggaactt

SEQ ID NO: 1583661 - DNA, 15 bp, Homo sapiens
tactcacacggaact

SEQ ID NO: 1583662 - DNA, 15 bp, Homo sapiens
ctactcacacggaac

SEQ ID NO: 1583663 - DNA, 15 bp, Homo sapiens
cctactcacacggaa

SEQ ID NO: 1583664 - DNA, 15 bp, Homo sapiens
tcctactcacacgga

SEQ ID NO: 1583665 - DNA, 15 bp, Homo sapiens
ctcctactcacacgg

SEQ ID NO: 1583666 - DNA, 15 bp, Homo sapiens
gctcctactcacacg

SEQ ID NO: 1583667 - DNA, 15 bp, Homo sapiens
agctcctactcacac

SEQ ID NO: 1583668 - DNA, 15 bp, Homo sapiens
cagctcctactcaca

SEQ ID NO: 1583669 - DNA, 15 bp, Homo sapiens
gcagctcctactcac

SEQ ID NO: 1583670 - DNA, 15 bp, Homo sapiens
tgcagctcctactca

SEQ ID NO: 1583671 - DNA, 15 bp, Homo sapiens
atgcagctcctactc

SEQ ID NO: 1583672 - DNA, 15 bp, Homo sapiens
gatgcagctcctact

SEQ ID NO: 1583673 - DNA, 15 bp, Homo sapiens
agatgcagctcctac

SEQ ID NO: 1583674 - DNA, 15 bp, Homo sapiens
tagatgcagctccta

SEQ ID NO: 1583675 - DNA, 15 bp, Homo sapiens
ctagatgcagctcct

SEQ ID NO: 1583676 - DNA, 15 bp, Homo sapiens
tctagatgcagctcc

SEQ ID NO: 1583677 - DNA, 15 bp, Homo sapiens
atctagatgcagctc

SEQ ID NO: 1583678 - DNA, 15 bp, Homo sapiens
aatctagatgcagct

SEQ ID NO: 1583679 - DNA, 15 bp, Homo sapiens
taatctagatgcagc

SEQ ID NO: 1583680 - DNA, 15 bp, Homo sapiens
ttaatctagatgcag

SEQ ID NO: 1583681 - DNA, 15 bp, Homo sapiens
cttaatctagatgca

SEQ ID NO: 1583682 - DNA, 15 bp, Homo sapiens
acttaatctagatgc

SEQ ID NO: 1583683 - DNA, 15 bp, Homo sapiens
aacttaatctagatg

SEQ ID NO: 1583684 - DNA, 15 bp, Homo sapiens
aaacttaatctagat

SEQ ID NO: 1583685 - DNA, 15 bp, Homo sapiens
caaacttaatctaga

SEQ ID NO: 1583686 - DNA, 15 bp, Homo sapiens
tcaaacttaatctag

SEQ ID NO: 1583687 - DNA, 15 bp, Homo sapiens
ttcaaacttaatcta

SEQ ID NO: 1583688 - DNA, 15 bp, Homo sapiens
attcaaacttaatct

SEQ ID NO: 1583689 - DNA, 15 bp, Homo sapiens
aattcaaacttaatc

SEQ ID NO: 1583690 - DNA, 15 bp, Homo sapiens
aaattcaaacttaat

SEQ ID NO: 1583691 - DNA, 15 bp, Homo sapiens
aaaattcaaacttaa

SEQ ID NO: 1583692 - DNA, 15 bp, Homo sapiens
gaaaattcaaactta

SEQ ID NO: 1583693 - DNA, 15 bp, Homo sapiens
tgaaaattcaaactt

SEQ ID NO: 1583694 - DNA, 15 bp, Homo sapiens
ctgaaaattcaaact

SEQ ID NO: 1583695 - DNA, 15 bp, Homo sapiens
cctgaaaattcaaac

SEQ ID NO: 1583696 - DNA, 15 bp, Homo sapiens
gcctgaaaattcaaa

SEQ ID NO: 1583697 - DNA, 15 bp, Homo sapiens
ggcctgaaaattcaa

SEQ ID NO: 1583698 - DNA, 15 bp, Homo sapiens
aggcctgaaaattca

SEQ ID NO: 1583699 - DNA, 15 bp, Homo sapiens
aaggcctgaaaattc

SEQ ID NO: 1583700 - DNA, 15 bp, Homo sapiens
caaggcctgaaaatt

SEQ ID NO: 1583701 - DNA, 15 bp, Homo sapiens
gcaaggcctgaaaat

SEQ ID NO: 1583702 - DNA, 15 bp, Homo sapiens
cgcaaggcctgaaaa

SEQ ID NO: 1583703 - DNA, 15 bp, Homo sapiens
acgcaaggcctgaaa

SEQ ID NO: 1583704 - DNA, 15 bp, Homo sapiens
tacgcaaggcctgaa

SEQ ID NO: 1583705 - DNA, 15 bp, Homo sapiens
ctacgcaaggcctga

SEQ ID NO: 1583706 - DNA, 15 bp, Homo sapiens
actacgcaaggcctg

SEQ ID NO: 1583707 - DNA, 15 bp, Homo sapiens
gactacgcaaggcct

SEQ ID NO: 1583708 - DNA, 15 bp, Homo sapiens
ggactacgcaaggcc

SEQ ID NO: 1583709 - DNA, 15 bp, Homo sapiens
gggactacgcaaggc

SEQ ID NO: 1583710 - DNA, 15 bp, Homo sapiens
agggactacgcaagg

SEQ ID NO: 1583711 - DNA, 15 bp, Homo sapiens
cagggactacgcaag

SEQ ID NO: 1583712 - DNA, 15 bp, Homo sapiens
ccagggactacgcaa

SEQ ID NO: 1583713 - DNA, 15 bp, Homo sapiens
gccagggactacgca

SEQ ID NO: 1583714 - DNA, 15 bp, Homo sapiens
tgccagggactacgc

SEQ ID NO: 1583715 - DNA, 15 bp, Homo sapiens
gtgccagggactacg

SEQ ID NO: 1583716 - DNA, 15 bp, Homo sapiens
tgtgccagggactac

SEQ ID NO: 1583717 - DNA, 15 bp, Homo sapiens
ctgtgccagggacta

SEQ ID NO: 1583718 - DNA, 15 bp, Homo sapiens
tctgtgccagggact

SEQ ID NO: 1583719 - DNA, 15 bp, Homo sapiens
ctctgtgccagggac

SEQ ID NO: 1583720 - DNA, 15 bp, Homo sapiens
gctctgtgccaggga

SEQ ID NO: 1583721 - DNA, 15 bp, Homo sapiens
gggctctgtgccagg

SEQ ID NO: 1583722 - DNA, 15 bp, Homo sapiens
agggctctgtgccag

SEQ ID NO: 1583723 - DNA, 15 bp, Homo sapiens
tagggctctgtgcca

SEQ ID NO: 1583724 - DNA, 15 bp, Homo sapiens
ctagggctctgtgcc

SEQ ID NO: 1583725 - DNA, 15 bp, Homo sapiens
gctagggctctgtgc

SEQ ID NO: 1583726 - DNA, 15 bp, Homo sapiens
agctagggctctgtg

SEQ ID NO: 1583727 - DNA, 15 bp, Homo sapiens
cagctagggctctgt

SEQ ID NO: 1583728 - DNA, 15 bp, Homo sapiens
tcagctagggctctg

SEQ ID NO: 1583729 - DNA, 15 bp, Homo sapiens
ttcagctagggctct

SEQ ID NO: 1583730 - DNA, 15 bp, Homo sapiens
attcagctagggctc

SEQ ID NO: 1583731 - DNA, 15 bp, Homo sapiens
tattcagctagggct

SEQ ID NO: 1583732 - DNA, 15 bp, Homo sapiens
ttattcagctagggc

SEQ ID NO: 1583733 - DNA, 15 bp, Homo sapiens
tttattcagctaggg

SEQ ID NO: 1583734 - DNA, 15 bp, Homo sapiens
atttattcagctagg

SEQ ID NO: 1583735 - DNA, 15 bp, Homo sapiens
tatttattcagctag

SEQ ID NO: 1583736 - DNA, 15 bp, Homo sapiens
gtatttattcagcta

SEQ ID NO: 1583737 - DNA, 15 bp, Homo sapiens
agtatttattcagct

SEQ ID NO: 1583738 - DNA, 15 bp, Homo sapiens
cagtatttattcagc

SEQ ID NO: 1583739 - DNA, 15 bp, Homo sapiens
acagtatttattcag

SEQ ID NO: 1583740 - DNA, 15 bp, Homo sapiens
gacagtatttattca

SEQ ID NO: 1583741 - DNA, 15 bp, Homo sapiens
cgacagtatttattc

SEQ ID NO: 1583742 - DNA, 15 bp, Homo sapiens
tcgacagtatttatt

SEQ ID NO: 1583743 - DNA, 15 bp, Homo sapiens
ctcgacagtatttat

SEQ ID NO: 1583744 - DNA, 15 bp, Homo sapiens
actcgacagtattta

SEQ ID NO: 1583745 - DNA, 15 bp, Homo sapiens
cactcgacagtattt

SEQ ID NO: 1583746 - DNA, 15 bp, Homo sapiens
tcactcgacagtatt

SEQ ID NO: 1583747 - DNA, 15 bp, Homo sapiens
ttcactcgacagtat

SEQ ID NO: 1583748 - DNA, 15 bp, Homo sapiens
attcactcgacagta

SEQ ID NO: 1583749 - DNA, 15 bp, Homo sapiens
gattcactcgacagt

SEQ ID NO: 1583750 - DNA, 15 bp, Homo sapiens
tgattcactcgacag

SEQ ID NO: 1583751 - DNA, 15 bp, Homo sapiens
ttgattcactcgaca

SEQ ID NO: 1583752 - DNA, 15 bp, Homo sapiens
tttgattcactcgac

SEQ ID NO: 1583753 - DNA, 15 bp, Homo sapiens
ttttgattcactcga

SEQ ID NO: 1583754 - DNA, 15 bp, Homo sapiens
tttttgattcactcg

SEQ ID NO: 1583755 - DNA, 15 bp, Homo sapiens
atttttgattcactc

SEQ ID NO: 1583756 - DNA, 15 bp, Homo sapiens
aatttttgattcact

SEQ ID NO: 1583757 - DNA, 15 bp, Homo sapiens
caatttttgattcac

SEQ ID NO: 1583758 - DNA, 15 bp, Homo sapiens
gcaatttttgattca

SEQ ID NO: 1583759 - DNA, 15 bp, Homo sapiens
cgcaatttttgattc

SEQ ID NO: 1583760 - DNA, 15 bp, Homo sapiens
tcgcaatttttgatt

SEQ ID NO: 1583761 - DNA, 15 bp, Homo sapiens
atcgcaatttttgat

SEQ ID NO: 1583762 - DNA, 15 bp, Homo sapiens
tatcgcaatttttga

SEQ ID NO: 1583763 - DNA, 15 bp, Homo sapiens
ttatcgcaatttttg

SEQ ID NO: 1583764 - DNA, 15 bp, Homo sapiens
tttatcgcaattttt

SEQ ID NO: 1583765 - DNA, 15 bp, Homo sapiens
ttttatcgcaatttt

SEQ ID NO: 1583766 - DNA, 15 bp, Homo sapiens
gttttatcgcaattt

SEQ ID NO: 1583767 - DNA, 15 bp, Homo sapiens
agttttatcgcaatt

SEQ ID NO: 1583768 - DNA, 15 bp, Homo sapiens
aagttttatcgcaat

SEQ ID NO: 1583769 - DNA, 15 bp, Homo sapiens
caagttttatcgcaa

SEQ ID NO: 1583770 - DNA, 15 bp, Homo sapiens
ccaagttttatcgca

SEQ ID NO: 1583771 - DNA, 15 bp, Homo sapiens
tccaagttttatcgc

SEQ ID NO: 1583772 - DNA, 15 bp, Homo sapiens
ctccaagttttatcg

SEQ ID NO: 1583773 - DNA, 15 bp, Homo sapiens
gctccaagttttatc

SEQ ID NO: 1583774 - DNA, 15 bp, Homo sapiens
tgctccaagttttat

SEQ ID NO: 1583775 - DNA, 15 bp, Homo sapiens
ttgctccaagtttta

SEQ ID NO: 1583776 - DNA, 15 bp, Homo sapiens
tttgctccaagtttt

SEQ ID NO: 1583777 - DNA, 15 bp, Homo sapiens
ttttgctccaagttt

SEQ ID NO: 1583778 - DNA, 15 bp, Homo sapiens
attttgctccaagtt

SEQ ID NO: 1583779 - DNA, 15 bp, Homo sapiens
tattttgctccaagt

SEQ ID NO: 1583780 - DNA, 15 bp, Homo sapiens
ttattttgctccaag

SEQ ID NO: 1583781 - DNA, 15 bp, Homo sapiens
gttattttgctccaa

SEQ ID NO: 1583782 - DNA, 15 bp, Homo sapiens
tgttattttgctcca

SEQ ID NO: 1583783 - DNA, 15 bp, Homo sapiens
gtgttattttgctcc

SEQ ID NO: 1583784 - DNA, 15 bp, Homo sapiens
agtgttattttgctc

SEQ ID NO: 1583785 - DNA, 15 bp, Homo sapiens
tagtgttattttgct

SEQ ID NO: 1583786 - DNA, 15 bp, Homo sapiens
gtagtgttattttgc

SEQ ID NO: 1583787 - DNA, 15 bp, Homo sapiens
ggtagtgttattttg

SEQ ID NO: 1583788 - DNA, 15 bp, Homo sapiens
tggtagtgttatttt

SEQ ID NO: 1583789 - DNA, 15 bp, Homo sapiens
ctggtagtgttattt

SEQ ID NO: 1583790 - DNA, 15 bp, Homo sapiens
cctggtagtgttatt

SEQ ID NO: 1583791 - DNA, 15 bp, Homo sapiens
tcctggtagtgttat

SEQ ID NO: 1583792 - DNA, 15 bp, Homo sapiens
ctcctggtagtgtta

SEQ ID NO: 1583793 - DNA, 15 bp, Homo sapiens
tctcctggtagtgtt

SEQ ID NO: 1583794 - DNA, 15 bp, Homo sapiens
gtctcctggtagtgt

SEQ ID NO: 1583795 - DNA, 15 bp, Homo sapiens
tgtctcctggtagtg

SEQ ID NO: 1583796 - DNA, 15 bp, Homo sapiens
ctgtctcctggtagt

SEQ ID NO: 1583797 - DNA, 15 bp, Homo sapiens
tctgtctcctggtag

SEQ ID NO: 1583798 - DNA, 15 bp, Homo sapiens
ctctgtctcctggta

SEQ ID NO: 1583799 - DNA, 15 bp, Homo sapiens
actctgtctcctggt

SEQ ID NO: 1583800 - DNA, 15 bp, Homo sapiens
cactctgtctcctgg

SEQ ID NO: 1583801 - DNA, 15 bp, Homo sapiens
ccactctgtctcctg

SEQ ID NO: 1583802 - DNA, 15 bp, Homo sapiens
gccactctgtctcct

SEQ ID NO: 1583803 - DNA, 15 bp, Homo sapiens
agccactctgtctcc

SEQ ID NO: 1583804 - DNA, 15 bp, Homo sapiens
gagccactctgtctc

SEQ ID NO: 1583805 - DNA, 15 bp, Homo sapiens
tgagccactctgtct

SEQ ID NO: 1583806 - DNA, 15 bp, Homo sapiens
ctgagccactctgtc

SEQ ID NO: 1583807 - DNA, 15 bp, Homo sapiens
gctgagccactctgt

SEQ ID NO: 1583808 - DNA, 15 bp, Homo sapiens
cgctgagccactctg

SEQ ID NO: 1583809 - DNA, 15 bp, Homo sapiens
gcgctgagccactct

SEQ ID NO: 1583810 - DNA, 15 bp, Homo sapiens
ggcgctgagccactc

SEQ ID NO: 1583811 - DNA, 15 bp, Homo sapiens
gggcgctgagccact

SEQ ID NO: 1583812 - DNA, 15 bp, Homo sapiens
agggcgctgagccac

SEQ ID NO: 1583813 - DNA, 15 bp, Homo sapiens
tagggcgctgagcca

SEQ ID NO: 1583814 - DNA, 15 bp, Homo sapiens
ttagggcgctgagcc

SEQ ID NO: 1583815 - DNA, 15 bp, Homo sapiens
tttagggcgctgagc

SEQ ID NO: 1583816 - DNA, 15 bp, Homo sapiens
gtttagggcgctgag

SEQ ID NO: 1583817 - DNA, 15 bp, Homo sapiens
tgtttagggcgctga

SEQ ID NO: 1583818 - DNA, 15 bp, Homo sapiens
ctgtttagggcgctg

SEQ ID NO: 1583819 - DNA, 15 bp, Homo sapiens
cctgtttagggcgct

SEQ ID NO: 1583820 - DNA, 15 bp, Homo sapiens
acctgtttagggcgc

SEQ ID NO: 1583821 - DNA, 15 bp, Homo sapiens
cacctgtttagggcg

SEQ ID NO: 1583822 - DNA, 15 bp, Homo sapiens
acacctgtttagggc

SEQ ID NO: 1583823 - DNA, 15 bp, Homo sapiens
cacacctgtttaggg

SEQ ID NO: 1583824 - DNA, 15 bp, Homo sapiens
ccacacctgtttagg

SEQ ID NO: 1583825 - DNA, 15 bp, Homo sapiens
tccacacctgtttag

SEQ ID NO: 1583826 - DNA, 15 bp, Homo sapiens
ctccacacctgttta

SEQ ID NO: 1583827 - DNA, 15 bp, Homo sapiens
cctccacacctgttt

SEQ ID NO: 1583828 - DNA, 15 bp, Homo sapiens
tcctccacacctgtt

SEQ ID NO: 1583829 - DNA, 15 bp, Homo sapiens
gtcctccacacctgt

SEQ ID NO: 1583830 - DNA, 15 bp, Homo sapiens
ggtcctccacacctg

SEQ ID NO: 1583831 - DNA, 15 bp, Homo sapiens
tggtcctccacacct

SEQ ID NO: 1583832 - DNA, 15 bp, Homo sapiens
gtggtcctccacacc

SEQ ID NO: 1583833 - DNA, 15 bp, Homo sapiens
tgtggtcctccacac

SEQ ID NO: 1583834 - DNA, 15 bp, Homo sapiens
ttgtggtcctccaca

SEQ ID NO: 1583835 - DNA, 15 bp, Homo sapiens
tttgtggtcctccac

SEQ ID NO: 1583836 - DNA, 15 bp, Homo sapiens
ctttgtggtcctcca

SEQ ID NO: 1583837 - DNA, 15 bp, Homo sapiens
cctttgtggtcctcc

SEQ ID NO: 1583838 - DNA, 15 bp, Homo sapiens
ccctttgtggtcctc

SEQ ID NO: 1583839 - DNA, 15 bp, Homo sapiens
tccctttgtggtcct

SEQ ID NO: 1583840 - DNA, 15 bp, Homo sapiens
ctccctttgtggtcc

SEQ ID NO: 1583841 - DNA, 15 bp, Homo sapiens
actccctttgtggtc

SEQ ID NO: 1583842 - DNA, 15 bp, Homo sapiens
aactccctttgtggt

SEQ ID NO: 1583843 - DNA, 15 bp, Homo sapiens
taactccctttgtgg

SEQ ID NO: 1583844 - DNA, 15 bp, Homo sapiens
ctaactccctttgtg

SEQ ID NO: 1583845 - DNA, 15 bp, Homo sapiens
tctaactccctttgt

SEQ ID NO: 1583846 - DNA, 15 bp, Homo sapiens
ttctaactccctttg

SEQ ID NO: 1583847 - DNA, 15 bp, Homo sapiens
tttctaactcccttt

SEQ ID NO: 1583848 - DNA, 15 bp, Homo sapiens
ttttctaactccctt

SEQ ID NO: 1583849 - DNA, 15 bp, Homo sapiens
tttttctaactccct

SEQ ID NO: 1583850 - DNA, 15 bp, Homo sapiens
ctttttctaactccc

SEQ ID NO: 1583851 - DNA, 15 bp, Homo sapiens
gctttttctaactcc

SEQ ID NO: 1583852 - DNA, 15 bp, Homo sapiens
tgctttttctaactc

SEQ ID NO: 1583853 - DNA, 15 bp, Homo sapiens
ctgctttttctaact

SEQ ID NO: 1583854 - DNA, 15 bp, Homo sapiens
actgctttttctaac

SEQ ID NO: 1583855 - DNA, 15 bp, Homo sapiens
aactgctttttctaa

SEQ ID NO: 1583856 - DNA, 15 bp, Homo sapiens
caactgctttttcta

SEQ ID NO: 1583857 - DNA, 15 bp, Homo sapiens
ccaactgctttttct

SEQ ID NO: 1583858 - DNA, 15 bp, Homo sapiens
cccaactgctttttc

SEQ ID NO: 1583859 - DNA, 15 bp, Homo sapiens
ccccaactgcttttt

SEQ ID NO: 1583860 - DNA, 15 bp, Homo sapiens
cccccaactgctttt

SEQ ID NO: 1583861 - DNA, 15 bp, Homo sapiens
ccccccaactgcttt

SEQ ID NO: 1583862 - DNA, 15 bp, Homo sapiens
accccccaactgctt

SEQ ID NO: 1583863 - DNA, 15 bp, Homo sapiens
caccccccaactgct

SEQ ID NO: 1583864 - DNA, 15 bp, Homo sapiens
ccaccccccaactgc

SEQ ID NO: 1583865 - DNA, 15 bp, Homo sapiens
cccaccccccaactg

SEQ ID NO: 1583866 - DNA, 15 bp, Homo sapiens
ccccaccccccaact

SEQ ID NO: 1583867 - DNA, 15 bp, Homo sapiens
gccccaccccccaac

SEQ ID NO: 1583868 - DNA, 15 bp, Homo sapiens
cgccccaccccccaa

SEQ ID NO: 1583869 - DNA, 15 bp, Homo sapiens
ccgccccacccccca

SEQ ID NO: 1583870 - DNA, 15 bp, Homo sapiens
accgccccacccccc

SEQ ID NO: 1583871 - DNA, 15 bp, Homo sapiens
caccgccccaccccc

SEQ ID NO: 1583872 - DNA, 15 bp, Homo sapiens
tcaccgccccacccc

SEQ ID NO: 1583873 - DNA, 15 bp, Homo sapiens
ctcaccgccccaccc

SEQ ID NO: 1583874 - DNA, 15 bp, Homo sapiens
tctcaccgccccacc

SEQ ID NO: 1583875 - DNA, 15 bp, Homo sapiens
gtctcaccgccccac

SEQ ID NO: 1583876 - DNA, 15 bp, Homo sapiens
tgtctcaccgcccca

SEQ ID NO: 1583877 - DNA, 15 bp, Homo sapiens
ctgtctcaccgcccc

SEQ ID NO: 1583878 - DNA, 15 bp, Homo sapiens
cctgtctcaccgccc

SEQ ID NO: 1583879 - DNA, 15 bp, Homo sapiens
acctgtctcaccgcc

SEQ ID NO: 1583880 - DNA, 15 bp, Homo sapiens
cacctgtctcaccgc

SEQ ID NO: 1583881 - DNA, 15 bp, Homo sapiens
ccacctgtctcaccg

SEQ ID NO: 1583882 - DNA, 15 bp, Homo sapiens
accacctgtctcacc

SEQ ID NO: 1583883 - DNA, 15 bp, Homo sapiens
aaccacctgtctcac

SEQ ID NO: 1583884 - DNA, 15 bp, Homo sapiens
gaaccacctgtctca

SEQ ID NO: 1583885 - DNA, 15 bp, Homo sapiens
ggaaccacctgtctc

SEQ ID NO: 1583886 - DNA, 15 bp, Homo sapiens
aggaaccacctgtct

SEQ ID NO: 1583887 - DNA, 15 bp, Homo sapiens
gaggaaccacctgtc

SEQ ID NO: 1583888 - DNA, 15 bp, Homo sapiens
ggaggaaccacctgt

SEQ ID NO: 1583889 - DNA, 15 bp, Homo sapiens
aggaggaaccacctg

SEQ ID NO: 1583890 - DNA, 15 bp, Homo sapiens
gaggaggaaccacct

SEQ ID NO: 1583891 - DNA, 15 bp, Homo sapiens
tgaggaggaaccacc

SEQ ID NO: 1583892 - DNA, 15 bp, Homo sapiens
gtgaggaggaaccac

SEQ ID NO: 1583893 - DNA, 15 bp, Homo sapiens
tgtgaggaggaacca

SEQ ID NO: 1583894 - DNA, 15 bp, Homo sapiens
ctgtgaggaggaacc

SEQ ID NO: 1583895 - DNA, 15 bp, Homo sapiens
actgtgaggaggaac

SEQ ID NO: 1583896 - DNA, 15 bp, Homo sapiens
aactgtgaggaggaa

SEQ ID NO: 1583897 - DNA, 15 bp, Homo sapiens
gaactgtgaggagga

SEQ ID NO: 1583898 - DNA, 15 bp, Homo sapiens
ggaactgtgaggagg

SEQ ID NO: 1583899 - DNA, 15 bp, Homo sapiens
tggaactgtgaggag

SEQ ID NO: 1583900 - DNA, 15 bp, Homo sapiens
gtggaactgtgagga

SEQ ID NO: 1583901 - DNA, 15 bp, Homo sapiens
ggtggaactgtgagg

SEQ ID NO: 1583902 - DNA, 15 bp, Homo sapiens
aggtggaactgtgag

SEQ ID NO: 1583903 - DNA, 15 bp, Homo sapiens
caggtggaactgtga

SEQ ID NO: 1583904 - DNA, 15 bp, Homo sapiens
ccaggtggaactgtg

SEQ ID NO: 1583905 - DNA, 15 bp, Homo sapiens
accaggtggaactgt

SEQ ID NO: 1583906 - DNA, 15 bp, Homo sapiens
gaccaggtggaactg

SEQ ID NO: 1583907 - DNA, 15 bp, Homo sapiens
ggaccaggtggaact

SEQ ID NO: 1583908 - DNA, 15 bp, Homo sapiens
tggaccaggtggaac

SEQ ID NO: 1583909 - DNA, 15 bp, Homo sapiens
ttggaccaggtggaa

SEQ ID NO: 1583910 - DNA, 15 bp, Homo sapiens
cttggaccaggtgga

SEQ ID NO: 1583911 - DNA, 15 bp, Homo sapiens
gcttggaccaggtgg

SEQ ID NO: 1583912 - DNA, 15 bp, Homo sapiens
agcttggaccaggtg

SEQ ID NO: 1583913 - DNA, 15 bp, Homo sapiens
tagcttggaccaggt

SEQ ID NO: 1583914 - DNA, 15 bp, Homo sapiens
gtagcttggaccagg

SEQ ID NO: 1583915 - DNA, 15 bp, Homo sapiens
tgtagcttggaccag

SEQ ID NO: 1583916 - DNA, 15 bp, Homo sapiens
ctgtagcttggacca

SEQ ID NO: 1583917 - DNA, 15 bp, Homo sapiens
tctgtagcttggacc

SEQ ID NO: 1583918 - DNA, 15 bp, Homo sapiens
gtctgtagcttggac

SEQ ID NO: 1583919 - DNA, 15 bp, Homo sapiens
ggtctgtagcttgga

SEQ ID NO: 1583920 - DNA, 15 bp, Homo sapiens
gggtctgtagcttgg

SEQ ID NO: 1583921 - DNA, 15 bp, Homo sapiens
ggggtctgtagcttg

SEQ ID NO: 1583922 - DNA, 15 bp, Homo sapiens
tggggtctgtagctt

SEQ ID NO: 1583923 - DNA, 15 bp, Homo sapiens
ttggggtctgtagct

SEQ ID NO: 1583924 - DNA, 15 bp, Homo sapiens
tttggggtctgtagc

SEQ ID NO: 1583925 - DNA, 15 bp, Homo sapiens
atttggggtctgtag

SEQ ID NO: 1583926 - DNA, 15 bp, Homo sapiens
aatttggggtctgta

SEQ ID NO: 1583927 - DNA, 15 bp, Homo sapiens
taatttggggtctgt

SEQ ID NO: 1583928 - DNA, 15 bp, Homo sapiens
ctaatttggggtctg

SEQ ID NO: 1583929 - DNA, 15 bp, Homo sapiens
gctaatttggggtct

SEQ ID NO: 1583930 - DNA, 15 bp, Homo sapiens
ggctaatttggggtc

SEQ ID NO: 1583931 - DNA, 15 bp, Homo sapiens
aggctaatttggggt

SEQ ID NO: 1583932 - DNA, 15 bp, Homo sapiens
aaggctaatttgggg

SEQ ID NO: 1583933 - DNA, 15 bp, Homo sapiens
gaaggctaatttggg

SEQ ID NO: 1583934 - DNA, 15 bp, Homo sapiens
agaaggctaatttgg

SEQ ID NO: 1583935 - DNA, 15 bp, Homo sapiens
aagaaggctaatttg

SEQ ID NO: 1583936 - DNA, 15 bp, Homo sapiens
aaagaaggctaattt

SEQ ID NO: 1583937 - DNA, 15 bp, Homo sapiens
aaaagaaggctaatt

SEQ ID NO: 1583938 - DNA, 15 bp, Homo sapiens
caaaagaaggctaat

SEQ ID NO: 1583939 - DNA, 15 bp, Homo sapiens
acaaaagaaggctaa

SEQ ID NO: 1583940 - DNA, 15 bp, Homo sapiens
tacaaaagaaggcta

SEQ ID NO: 1583941 - DNA, 15 bp, Homo sapiens
atacaaaagaaggct

SEQ ID NO: 1583942 - DNA, 15 bp, Homo sapiens
catacaaaagaaggc

SEQ ID NO: 1583943 - DNA, 15 bp, Homo sapiens
tcatacaaaagaagg

SEQ ID NO: 1583944 - DNA, 15 bp, Homo sapiens
ctcatacaaaagaag

SEQ ID NO: 1583945 - DNA, 15 bp, Homo sapiens
gctcatacaaaagaa

SEQ ID NO: 1583946 - DNA, 15 bp, Homo sapiens
ggctcatacaaaaga

SEQ ID NO: 1583947 - DNA, 15 bp, Homo sapiens
gggctcatacaaaag

SEQ ID NO: 1583948 - DNA, 15 bp, Homo sapiens
agggctcatacaaaa

SEQ ID NO: 1583949 - DNA, 15 bp, Homo sapiens
gagggctcatacaaa

SEQ ID NO: 1583950 - DNA, 15 bp, Homo sapiens
agagggctcatacaa

SEQ ID NO: 1583951 - DNA, 15 bp, Homo sapiens
cagagggctcataca

SEQ ID NO: 1583952 - DNA, 15 bp, Homo sapiens
acagagggctcatac

SEQ ID NO: 1583953 - DNA, 15 bp, Homo sapiens
aacagagggctcata

SEQ ID NO: 1583954 - DNA, 15 bp, Homo sapiens
gaacagagggctcat

SEQ ID NO: 1583955 - DNA, 15 bp, Homo sapiens
agaacagagggctca

SEQ ID NO: 1583956 - DNA, 15 bp, Homo sapiens
aagaacagagggctc

SEQ ID NO: 1583957 - DNA, 15 bp, Homo sapiens
caagaacagagggct
